United States Patent Application Publication US 2015/0141320 A1 - sequence listing, part 32

SEQ ID NO: 1187118 - DNA, 15 bp, Homo sapiens
ccttcttgtaaacct

SEQ ID NO: 1187119 - DNA, 15 bp, Homo sapiens
cccttcttgtaaacc

SEQ ID NO: 1187120 - DNA, 15 bp, Homo sapiens
tcccttcttgtaaac

SEQ ID NO: 1187121 - DNA, 15 bp, Homo sapiens
ttcccttcttgtaaa

SEQ ID NO: 1187122 - DNA, 15 bp, Homo sapiens
cttcccttcttgtaa

SEQ ID NO: 1187123 - DNA, 15 bp, Homo sapiens
ccttcccttcttgta

SEQ ID NO: 1187124 - DNA, 15 bp, Homo sapiens
accttcccttcttgt

SEQ ID NO: 1187125 - DNA, 15 bp, Homo sapiens
caccttcccttcttg

SEQ ID NO: 1187126 - DNA, 15 bp, Homo sapiens
acaccttcccttctt

SEQ ID NO: 1187127 - DNA, 15 bp, Homo sapiens
tacaccttcccttct

SEQ ID NO: 1187128 - DNA, 15 bp, Homo sapiens
ttacaccttcccttc

SEQ ID NO: 1187129 - DNA, 15 bp, Homo sapiens
cttacaccttccctt

SEQ ID NO: 1187130 - DNA, 15 bp, Homo sapiens
tcttacaccttccct

SEQ ID NO: 1187131 - DNA, 15 bp, Homo sapiens
atcttacaccttccc

SEQ ID NO: 1187132 - DNA, 15 bp, Homo sapiens
catcttacaccttcc

SEQ ID NO: 1187133 - DNA, 15 bp, Homo sapiens
ccatcttacaccttc

SEQ ID NO: 1187134 - DNA, 15 bp, Homo sapiens
tccatcttacacctt

SEQ ID NO: 1187135 - DNA, 15 bp, Homo sapiens
ctccatcttacacct

SEQ ID NO: 1187136 - DNA, 15 bp, Homo sapiens
cctccatcttacacc

SEQ ID NO: 1187137 - DNA, 15 bp, Homo sapiens
tcctccatcttacac

SEQ ID NO: 1187138 - DNA, 15 bp, Homo sapiens
ttcctccatcttaca

SEQ ID NO: 1187139 - DNA, 15 bp, Homo sapiens
cttcctccatcttac

SEQ ID NO: 1187140 - DNA, 15 bp, Homo sapiens
gcttcctccatctta

SEQ ID NO: 1187141 - DNA, 15 bp, Homo sapiens
tgcttcctccatctt

SEQ ID NO: 1187142 - DNA, 15 bp, Homo sapiens
ctgcttcctccatct

SEQ ID NO: 1187143 - DNA, 15 bp, Homo sapiens
tctgcttcctccatc

SEQ ID NO: 1187144 - DNA, 15 bp, Homo sapiens
atctgcttcctccat

SEQ ID NO: 1187145 - DNA, 15 bp, Homo sapiens
aatctgcttcctcca

SEQ ID NO: 1187146 - DNA, 15 bp, Homo sapiens
gaatctgcttcctcc

SEQ ID NO: 1187147 - DNA, 15 bp, Homo sapiens
agaatctgcttcctc

SEQ ID NO: 1187148 - DNA, 15 bp, Homo sapiens
cagaatctgcttcct

SEQ ID NO: 1187149 - DNA, 15 bp, Homo sapiens
acagaatctgcttcc

SEQ ID NO: 1187150 - DNA, 15 bp, Homo sapiens
aacagaatctgcttc

SEQ ID NO: 1187151 - DNA, 15 bp, Homo sapiens
aaacagaatctgctt

SEQ ID NO: 1187152 - DNA, 15 bp, Homo sapiens
aaaacagaatctgct

SEQ ID NO: 1187153 - DNA, 15 bp, Homo sapiens
caaaacagaatctgc

SEQ ID NO: 1187154 - DNA, 15 bp, Homo sapiens
tcaaaacagaatctg

SEQ ID NO: 1187155 - DNA, 15 bp, Homo sapiens
ctcaaaacagaatct

SEQ ID NO: 1187156 - DNA, 15 bp, Homo sapiens
tctcaaaacagaatc

SEQ ID NO: 1187157 - DNA, 15 bp, Homo sapiens
ttctcaaaacagaat

SEQ ID NO: 1187158 - DNA, 15 bp, Homo sapiens
tttctcaaaacagaa

SEQ ID NO: 1187159 - DNA, 15 bp, Homo sapiens
gtttctcaaaacaga

SEQ ID NO: 1187160 - DNA, 15 bp, Homo sapiens
agtttctcaaaacag

SEQ ID NO: 1187161 - DNA, 15 bp, Homo sapiens
aagtttctcaaaaca

SEQ ID NO: 1187162 - DNA, 15 bp, Homo sapiens
caagtttctcaaaac

SEQ ID NO: 1187163 - DNA, 15 bp, Homo sapiens
ccaagtttctcaaaa

SEQ ID NO: 1187164 - DNA, 15 bp, Homo sapiens
accaagtttctcaaa

SEQ ID NO: 1187165 - DNA, 15 bp, Homo sapiens
caccaagtttctcaa

SEQ ID NO: 1187166 - DNA, 15 bp, Homo sapiens
acaccaagtttctca

SEQ ID NO: 1187167 - DNA, 15 bp, Homo sapiens
aacaccaagtttctc

SEQ ID NO: 1187168 - DNA, 15 bp, Homo sapiens
taacaccaagtttct

SEQ ID NO: 1187169 - DNA, 15 bp, Homo sapiens
gtaacaccaagtttc

SEQ ID NO: 1187170 - DNA, 15 bp, Homo sapiens
tgtaacaccaagttt

SEQ ID NO: 1187171 - DNA, 15 bp, Homo sapiens
ctgtaacaccaagtt

SEQ ID NO: 1187172 - DNA, 15 bp, Homo sapiens
cctgtaacaccaagt

SEQ ID NO: 1187173 - DNA, 15 bp, Homo sapiens
ccctgtaacaccaag

SEQ ID NO: 1187174 - DNA, 15 bp, Homo sapiens
accctgtaacaccaa

SEQ ID NO: 1187175 - DNA, 15 bp, Homo sapiens
taccctgtaacacca

SEQ ID NO: 1187176 - DNA, 15 bp, Homo sapiens
ctaccctgtaacacc

SEQ ID NO: 1187177 - DNA, 15 bp, Homo sapiens
cctaccctgtaacac

SEQ ID NO: 1187178 - DNA, 15 bp, Homo sapiens
tcctaccctgtaaca

SEQ ID NO: 1187179 - DNA, 15 bp, Homo sapiens
atcctaccctgtaac

SEQ ID NO: 1187180 - DNA, 15 bp, Homo sapiens
catcctaccctgtaa

SEQ ID NO: 1187181 - DNA, 15 bp, Homo sapiens
tcatcctaccctgta

SEQ ID NO: 1187182 - DNA, 15 bp, Homo sapiens
ttcatcctaccctgt

SEQ ID NO: 1187183 - DNA, 15 bp, Homo sapiens
cttcatcctaccctg

SEQ ID NO: 1187184 - DNA, 15 bp, Homo sapiens
tcttcatcctaccct

SEQ ID NO: 1187185 - DNA, 15 bp, Homo sapiens
ctcttcatcctaccc

SEQ ID NO: 1187186 - DNA, 15 bp, Homo sapiens
cctcttcatcctacc

SEQ ID NO: 1187187 - DNA, 15 bp, Homo sapiens
ccctcttcatcctac

SEQ ID NO: 1187188 - DNA, 15 bp, Homo sapiens
cccctcttcatccta

SEQ ID NO: 1187189 - DNA, 15 bp, Homo sapiens
gcccctcttcatcct

SEQ ID NO: 1187190 - DNA, 15 bp, Homo sapiens
tgcccctcttcatcc

SEQ ID NO: 1187191 - DNA, 15 bp, Homo sapiens
ctgcccctcttcatc

SEQ ID NO: 1187192 - DNA, 15 bp, Homo sapiens
actgcccctcttcat

SEQ ID NO: 1187193 - DNA, 15 bp, Homo sapiens
aactgcccctcttca

SEQ ID NO: 1187194 - DNA, 15 bp, Homo sapiens
taactgcccctcttc

SEQ ID NO: 1187195 - DNA, 15 bp, Homo sapiens
gtaactgcccctctt

SEQ ID NO: 1187196 - DNA, 15 bp, Homo sapiens
agtaactgcccctct

SEQ ID NO: 1187197 - DNA, 15 bp, Homo sapiens
aagtaactgcccctc

SEQ ID NO: 1187198 - DNA, 15 bp, Homo sapiens
taagtaactgcccct

SEQ ID NO: 1187199 - DNA, 15 bp, Homo sapiens
ttaagtaactgcccc

SEQ ID NO: 1187200 - DNA, 15 bp, Homo sapiens
tttaagtaactgccc

SEQ ID NO: 1187201 - DNA, 15 bp, Homo sapiens
atttaagtaactgcc

SEQ ID NO: 1187202 - DNA, 15 bp, Homo sapiens
catttaagtaactgc

SEQ ID NO: 1187203 - DNA, 15 bp, Homo sapiens
tcatttaagtaactg

SEQ ID NO: 1187204 - DNA, 15 bp, Homo sapiens
atcatttaagtaact

SEQ ID NO: 1187205 - DNA, 15 bp, Homo sapiens
catcatttaagtaac

SEQ ID NO: 1187206 - DNA, 15 bp, Homo sapiens
tcatcatttaagtaa

SEQ ID NO: 1187207 - DNA, 15 bp, Homo sapiens
atcatcatttaagta

SEQ ID NO: 1187208 - DNA, 15 bp, Homo sapiens
gatcatcatttaagt

SEQ ID NO: 1187209 - DNA, 15 bp, Homo sapiens
tgatcatcatttaag

SEQ ID NO: 1187210 - DNA, 15 bp, Homo sapiens
ttgatcatcatttaa

SEQ ID NO: 1187211 - DNA, 15 bp, Homo sapiens
cttgatcatcattta

SEQ ID NO: 1187212 - DNA, 15 bp, Homo sapiens
acttgatcatcattt

SEQ ID NO: 1187213 - DNA, 15 bp, Homo sapiens
aacttgatcatcatt

SEQ ID NO: 1187214 - DNA, 15 bp, Homo sapiens
gaacttgatcatcat

SEQ ID NO: 1187215 - DNA, 15 bp, Homo sapiens
tgaacttgatcatca

SEQ ID NO: 1187216 - DNA, 15 bp, Homo sapiens
ttgaacttgatcatc

SEQ ID NO: 1187217 - DNA, 15 bp, Homo sapiens
tttgaacttgatcat

SEQ ID NO: 1187218 - DNA, 15 bp, Homo sapiens
ttttgaacttgatca

SEQ ID NO: 1187219 - DNA, 15 bp, Homo sapiens
tttttgaacttgatc

SEQ ID NO: 1187220 - DNA, 15 bp, Homo sapiens
ttttttgaacttgat

SEQ ID NO: 1187221 - DNA, 15 bp, Homo sapiens
attttttgaacttga

SEQ ID NO: 1187222 - DNA, 15 bp, Homo sapiens
cattttttgaacttg

SEQ ID NO: 1187223 - DNA, 15 bp, Homo sapiens
ccattttttgaactt

SEQ ID NO: 1187224 - DNA, 15 bp, Homo sapiens
accattttttgaact

SEQ ID NO: 1187225 - DNA, 15 bp, Homo sapiens
aaccattttttgaac

SEQ ID NO: 1187226 - DNA, 15 bp, Homo sapiens
taaccattttttgaa

SEQ ID NO: 1187227 - DNA, 15 bp, Homo sapiens
ataaccattttttga

SEQ ID NO: 1187228 - DNA, 15 bp, Homo sapiens
aataaccattttttg

SEQ ID NO: 1187229 - DNA, 15 bp, Homo sapiens
aaataaccatttttt

SEQ ID NO: 1187230 - DNA, 15 bp, Homo sapiens
aaaataaccattttt

SEQ ID NO: 1187231 - DNA, 15 bp, Homo sapiens
taaaataaccatttt

SEQ ID NO: 1187232 - DNA, 15 bp, Homo sapiens
ctaaaataaccattt

SEQ ID NO: 1187233 - DNA, 15 bp, Homo sapiens
cctaaaataaccatt

SEQ ID NO: 1187234 - DNA, 15 bp, Homo sapiens
tcctaaaataaccat

SEQ ID NO: 1187235 - DNA, 15 bp, Homo sapiens
atcctaaaataacca

SEQ ID NO: 1187236 - DNA, 15 bp, Homo sapiens
catcctaaaataacc

SEQ ID NO: 1187237 - DNA, 15 bp, Homo sapiens
acatcctaaaataac

SEQ ID NO: 1187238 - DNA, 15 bp, Homo sapiens
cacatcctaaaataa

SEQ ID NO: 1187239 - DNA, 15 bp, Homo sapiens
ccacatcctaaaata

SEQ ID NO: 1187240 - DNA, 15 bp, Homo sapiens
accacatcctaaaat

SEQ ID NO: 1187241 - DNA, 15 bp, Homo sapiens
taccacatcctaaaa

SEQ ID NO: 1187242 - DNA, 15 bp, Homo sapiens
ttaccacatcctaaa

SEQ ID NO: 1187243 - DNA, 15 bp, Homo sapiens
tttaccacatcctaa

SEQ ID NO: 1187244 - DNA, 15 bp, Homo sapiens
atttaccacatccta

SEQ ID NO: 1187245 - DNA, 15 bp, Homo sapiens
tatttaccacatcct

SEQ ID NO: 1187246 - DNA, 15 bp, Homo sapiens
ttatttaccacatcc

SEQ ID NO: 1187247 - DNA, 15 bp, Homo sapiens
cttatttaccacatc

SEQ ID NO: 1187248 - DNA, 15 bp, Homo sapiens
tcttatttaccacat

SEQ ID NO: 1187249 - DNA, 15 bp, Homo sapiens
gtcttatttaccaca

SEQ ID NO: 1187250 - DNA, 15 bp, Homo sapiens
ggtcttatttaccac

SEQ ID NO: 1187251 - DNA, 15 bp, Homo sapiens
tggtcttatttacca

SEQ ID NO: 1187252 - DNA, 15 bp, Homo sapiens
atggtcttatttacc

SEQ ID NO: 1187253 - DNA, 15 bp, Homo sapiens
gatggtcttatttac

SEQ ID NO: 1187254 - DNA, 15 bp, Homo sapiens
tgatggtcttattta

SEQ ID NO: 1187255 - DNA, 15 bp, Homo sapiens
ttgatggtcttattt

SEQ ID NO: 1187256 - DNA, 15 bp, Homo sapiens
tttgatggtcttatt

SEQ ID NO: 1187257 - DNA, 15 bp, Homo sapiens
ttttgatggtcttat

SEQ ID NO: 1187258 - DNA, 15 bp, Homo sapiens
tttttgatggtctta

SEQ ID NO: 1187259 - DNA, 15 bp, Homo sapiens
ttttttgatggtctt

SEQ ID NO: 1187260 - DNA, 15 bp, Homo sapiens
gttttttgatggtct

SEQ ID NO: 1187261 - DNA, 15 bp, Homo sapiens
tgttttttgatggtc

SEQ ID NO: 1187262 - DNA, 15 bp, Homo sapiens
atgttttttgatggt

SEQ ID NO: 1187263 - DNA, 15 bp, Homo sapiens
gatgttttttgatgg

SEQ ID NO: 1187264 - DNA, 15 bp, Homo sapiens
tgatgttttttgatg

SEQ ID NO: 1187265 - DNA, 15 bp, Homo sapiens
ctgatgttttttgat

SEQ ID NO: 1187266 - DNA, 15 bp, Homo sapiens
tctgatgttttttga

SEQ ID NO: 1187267 - DNA, 15 bp, Homo sapiens
atctgatgttttttg

SEQ ID NO: 1187268 - DNA, 15 bp, Homo sapiens
aatctgatgtttttt

SEQ ID NO: 1187269 - DNA, 15 bp, Homo sapiens
caatctgatgttttt

SEQ ID NO: 1187270 - DNA, 15 bp, Homo sapiens
tcaatctgatgtttt

SEQ ID NO: 1187271 - DNA, 15 bp, Homo sapiens
ctcaatctgatgttt

SEQ ID NO: 1187272 - DNA, 15 bp, Homo sapiens
tctcaatctgatgtt

SEQ ID NO: 1187273 - DNA, 15 bp, Homo sapiens
ctctcaatctgatgt

SEQ ID NO: 1187274 - DNA, 15 bp, Homo sapiens
actctcaatctgatg

SEQ ID NO: 1187275 - DNA, 15 bp, Homo sapiens
tactctcaatctgat

SEQ ID NO: 1187276 - DNA, 15 bp, Homo sapiens
ctactctcaatctga

SEQ ID NO: 1187277 - DNA, 15 bp, Homo sapiens
tctactctcaatctg

SEQ ID NO: 1187278 - DNA, 15 bp, Homo sapiens
atctactctcaatct

SEQ ID NO: 1187279 - DNA, 15 bp, Homo sapiens
catctactctcaatc

SEQ ID NO: 1187280 - DNA, 15 bp, Homo sapiens
tcatctactctcaat

SEQ ID NO: 1187281 - DNA, 15 bp, Homo sapiens
ttcatctactctcaa

SEQ ID NO: 1187282 - DNA, 15 bp, Homo sapiens
tttcatctactctca

SEQ ID NO: 1187283 - DNA, 15 bp, Homo sapiens
ttttcatctactctc

SEQ ID NO: 1187284 - DNA, 15 bp, Homo sapiens
attttcatctactct

SEQ ID NO: 1187285 - DNA, 15 bp, Homo sapiens
cattttcatctactc

SEQ ID NO: 1187286 - DNA, 15 bp, Homo sapiens
gcattttcatctact

SEQ ID NO: 1187287 - DNA, 15 bp, Homo sapiens
tgcattttcatctac

SEQ ID NO: 1187288 - DNA, 15 bp, Homo sapiens
ctgcattttcatcta

SEQ ID NO: 1187289 - DNA, 15 bp, Homo sapiens
gctgcattttcatct

SEQ ID NO: 1187290 - DNA, 15 bp, Homo sapiens
ggctgcattttcatc

SEQ ID NO: 1187291 - DNA, 15 bp, Homo sapiens
tggctgcattttcat

SEQ ID NO: 1187292 - DNA, 15 bp, Homo sapiens
ttggctgcattttca

SEQ ID NO: 1187293 - DNA, 15 bp, Homo sapiens
tttggctgcattttc

SEQ ID NO: 1187294 - DNA, 15 bp, Homo sapiens
ttttggctgcatttt

SEQ ID NO: 1187295 - DNA, 15 bp, Homo sapiens
attttggctgcattt

SEQ ID NO: 1187296 - DNA, 15 bp, Homo sapiens
aattttggctgcatt

SEQ ID NO: 1187297 - DNA, 15 bp, Homo sapiens
aaattttggctgcat

SEQ ID NO: 1187298 - DNA, 15 bp, Homo sapiens
caaattttggctgca

SEQ ID NO: 1187299 - DNA, 15 bp, Homo sapiens
ccaaattttggctgc

SEQ ID NO: 1187300 - DNA, 15 bp, Homo sapiens
tccaaattttggctg

SEQ ID NO: 1187301 - DNA, 15 bp, Homo sapiens
atccaaattttggct

SEQ ID NO: 1187302 - DNA, 15 bp, Homo sapiens
tatccaaattttggc

SEQ ID NO: 1187303 - DNA, 15 bp, Homo sapiens
ttatccaaattttgg

SEQ ID NO: 1187304 - DNA, 15 bp, Homo sapiens
cttatccaaattttg

SEQ ID NO: 1187305 - DNA, 15 bp, Homo sapiens
acttatccaaatttt

SEQ ID NO: 1187306 - DNA, 15 bp, Homo sapiens
gacttatccaaattt

SEQ ID NO: 1187307 - DNA, 15 bp, Homo sapiens
tgacttatccaaatt

SEQ ID NO: 1187308 - DNA, 15 bp, Homo sapiens
ttgacttatccaaat

SEQ ID NO: 1187309 - DNA, 15 bp, Homo sapiens
tttgacttatccaaa

SEQ ID NO: 1187310 - DNA, 15 bp, Homo sapiens
ctttgacttatccaa

SEQ ID NO: 1187311 - DNA, 15 bp, Homo sapiens
tctttgacttatcca

SEQ ID NO: 1187312 - DNA, 15 bp, Homo sapiens
ctctttgacttatcc

SEQ ID NO: 1187313 - DNA, 15 bp, Homo sapiens
cctctttgacttatc

SEQ ID NO: 1187314 - DNA, 15 bp, Homo sapiens
tcctctttgacttat

SEQ ID NO: 1187315 - DNA, 15 bp, Homo sapiens
ttcctctttgactta

SEQ ID NO: 1187316 - DNA, 15 bp, Homo sapiens
cttcctctttgactt

SEQ ID NO: 1187317 - DNA, 15 bp, Homo sapiens
acttcctctttgact

SEQ ID NO: 1187318 - DNA, 15 bp, Homo sapiens
aacttcctctttgac

SEQ ID NO: 1187319 - DNA, 15 bp, Homo sapiens
gaacttcctctttga

SEQ ID NO: 1187320 - DNA, 15 bp, Homo sapiens
ggaacttcctctttg

SEQ ID NO: 1187321 - DNA, 15 bp, Homo sapiens
gggaacttcctcttt

SEQ ID NO: 1187322 - DNA, 15 bp, Homo sapiens
tgggaacttcctctt

SEQ ID NO: 1187323 - DNA, 15 bp, Homo sapiens
ctgggaacttcctct

SEQ ID NO: 1187324 - DNA, 15 bp, Homo sapiens
tctgggaacttcctc

SEQ ID NO: 1187325 - DNA, 15 bp, Homo sapiens
ctctgggaacttcct

SEQ ID NO: 1187326 - DNA, 15 bp, Homo sapiens
actctgggaacttcc

SEQ ID NO: 1187327 - DNA, 15 bp, Homo sapiens
tactctgggaacttc

SEQ ID NO: 1187328 - DNA, 15 bp, Homo sapiens
ctactctgggaactt

SEQ ID NO: 1187329 - DNA, 15 bp, Homo sapiens
tctactctgggaact

SEQ ID NO: 1187330 - DNA, 15 bp, Homo sapiens
gtctactctgggaac

SEQ ID NO: 1187331 - DNA, 15 bp, Homo sapiens
ggtctactctgggaa

SEQ ID NO: 1187332 - DNA, 15 bp, Homo sapiens
tggtctactctggga

SEQ ID NO: 1187333 - DNA, 15 bp, Homo sapiens
ttggtctactctggg

SEQ ID NO: 1187334 - DNA, 15 bp, Homo sapiens
cttggtctactctgg

SEQ ID NO: 1187335 - DNA, 15 bp, Homo sapiens
ccttggtctactctg

SEQ ID NO: 1187336 - DNA, 15 bp, Homo sapiens
accttggtctactct

SEQ ID NO: 1187337 - DNA, 15 bp, Homo sapiens
taccttggtctactc

SEQ ID NO: 1187338 - DNA, 15 bp, Homo sapiens
ctaccttggtctact

SEQ ID NO: 1187339 - DNA, 15 bp, Homo sapiens
cctaccttggtctac

SEQ ID NO: 1187340 - DNA, 15 bp, Homo sapiens
ccctaccttggtcta

SEQ ID NO: 1187341 - DNA, 15 bp, Homo sapiens
tccctaccttggtct

SEQ ID NO: 1187342 - DNA, 15 bp, Homo sapiens
atccctaccttggtc

SEQ ID NO: 1187343 - DNA, 15 bp, Homo sapiens
tatccctaccttggt

SEQ ID NO: 1187344 - DNA, 15 bp, Homo sapiens
ctatccctaccttgg

SEQ ID NO: 1187345 - DNA, 15 bp, Homo sapiens
cctatccctaccttg

SEQ ID NO: 1187346 - DNA, 15 bp, Homo sapiens
ccctatccctacctt

SEQ ID NO: 1187347 - DNA, 15 bp, Homo sapiens
cccctatccctacct

SEQ ID NO: 1187348 - DNA, 15 bp, Homo sapiens
tcccctatccctacc

SEQ ID NO: 1187349 - DNA, 15 bp, Homo sapiens
ttcccctatccctac

SEQ ID NO: 1187350 - DNA, 15 bp, Homo sapiens
attcccctatcccta

SEQ ID NO: 1187351 - DNA, 15 bp, Homo sapiens
gattcccctatccct

SEQ ID NO: 1187352 - DNA, 15 bp, Homo sapiens
tgattcccctatccc

SEQ ID NO: 1187353 - DNA, 15 bp, Homo sapiens
ctgattcccctatcc

SEQ ID NO: 1187354 - DNA, 15 bp, Homo sapiens
tctgattcccctatc

SEQ ID NO: 1187355 - DNA, 15 bp, Homo sapiens
ttctgattcccctat

SEQ ID NO: 1187356 - DNA, 15 bp, Homo sapiens
attctgattccccta

SEQ ID NO: 1187357 - DNA, 15 bp, Homo sapiens
tattctgattcccct

SEQ ID NO: 1187358 - DNA, 15 bp, Homo sapiens
ttattctgattcccc

SEQ ID NO: 1187359 - DNA, 15 bp, Homo sapiens
gttattctgattccc

SEQ ID NO: 1187360 - DNA, 15 bp, Homo sapiens
tgttattctgattcc

SEQ ID NO: 1187361 - DNA, 15 bp, Homo sapiens
atgttattctgattc

SEQ ID NO: 1187362 - DNA, 15 bp, Homo sapiens
catgttattctgatt

SEQ ID NO: 1187363 - DNA, 15 bp, Homo sapiens
ccatgttattctgat

SEQ ID NO: 1187364 - DNA, 15 bp, Homo sapiens
cccatgttattctga

SEQ ID NO: 1187365 - DNA, 15 bp, Homo sapiens
tcccatgttattctg

SEQ ID NO: 1187366 - DNA, 15 bp, Homo sapiens
atcccatgttattct

SEQ ID NO: 1187367 - DNA, 15 bp, Homo sapiens
gatcccatgttattc

SEQ ID NO: 1187368 - DNA, 15 bp, Homo sapiens
tgatcccatgttatt

SEQ ID NO: 1187369 - DNA, 15 bp, Homo sapiens
ttgatcccatgttat

SEQ ID NO: 1187370 - DNA, 15 bp, Homo sapiens
cttgatcccatgtta

SEQ ID NO: 1187371 - DNA, 15 bp, Homo sapiens
ccttgatcccatgtt

SEQ ID NO: 1187372 - DNA, 15 bp, Homo sapiens
tccttgatcccatgt

SEQ ID NO: 1187373 - DNA, 15 bp, Homo sapiens
atccttgatcccatg

SEQ ID NO: 1187374 - DNA, 15 bp, Homo sapiens
catccttgatcccat

SEQ ID NO: 1187375 - DNA, 15 bp, Homo sapiens
gcatccttgatccca

SEQ ID NO: 1187376 - DNA, 15 bp, Homo sapiens
tgcatccttgatccc

SEQ ID NO: 1187377 - DNA, 15 bp, Homo sapiens
ttgcatccttgatcc

SEQ ID NO: 1187378 - DNA, 15 bp, Homo sapiens
cttgcatccttgatc

SEQ ID NO: 1187379 - DNA, 15 bp, Homo sapiens
gcttgcatccttgat

SEQ ID NO: 1187380 - DNA, 15 bp, Homo sapiens
tgcttgcatccttga

SEQ ID NO: 1187381 - DNA, 15 bp, Homo sapiens
ctgcttgcatccttg

SEQ ID NO: 1187382 - DNA, 15 bp, Homo sapiens
gctgcttgcatcctt

SEQ ID NO: 1187383 - DNA, 15 bp, Homo sapiens
agctgcttgcatcct

SEQ ID NO: 1187384 - DNA, 15 bp, Homo sapiens
tagctgcttgcatcc

SEQ ID NO: 1187385 - DNA, 15 bp, Homo sapiens
ctagctgcttgcatc

SEQ ID NO: 1187386 - DNA, 15 bp, Homo sapiens
cctagctgcttgcat

SEQ ID NO: 1187387 - DNA, 15 bp, Homo sapiens
ccctagctgcttgca

SEQ ID NO: 1187388 - DNA, 15 bp, Homo sapiens
accctagctgcttgc

SEQ ID NO: 1187389 - DNA, 15 bp, Homo sapiens
gaccctagctgcttg

SEQ ID NO: 1187390 - DNA, 15 bp, Homo sapiens
tgaccctagctgctt

SEQ ID NO: 1187391 - DNA, 15 bp, Homo sapiens
gtgaccctagctgct

SEQ ID NO: 1187392 - DNA, 15 bp, Homo sapiens
tgtgaccctagctgc

SEQ ID NO: 1187393 - DNA, 15 bp, Homo sapiens
gtgtgaccctagctg

SEQ ID NO: 1187394 - DNA, 15 bp, Homo sapiens
agtgtgaccctagct

SEQ ID NO: 1187395 - DNA, 15 bp, Homo sapiens
aagtgtgaccctagc

SEQ ID NO: 1187396 - DNA, 15 bp, Homo sapiens
aaagtgtgaccctag

SEQ ID NO: 1187397 - DNA, 15 bp, Homo sapiens
gaaagtgtgacccta

SEQ ID NO: 1187398 - DNA, 15 bp, Homo sapiens
tgaaagtgtgaccct

SEQ ID NO: 1187399 - DNA, 15 bp, Homo sapiens
ttgaaagtgtgaccc

SEQ ID NO: 1187400 - DNA, 15 bp, Homo sapiens
tttgaaagtgtgacc

SEQ ID NO: 1187401 - DNA, 15 bp, Homo sapiens
ctttgaaagtgtgac

SEQ ID NO: 1187402 - DNA, 15 bp, Homo sapiens
tctttgaaagtgtga

SEQ ID NO: 1187403 - DNA, 15 bp, Homo sapiens
atctttgaaagtgtg

SEQ ID NO: 1187404 - DNA, 15 bp, Homo sapiens
catctttgaaagtgt

SEQ ID NO: 1187405 - DNA, 15 bp, Homo sapiens
ccccatctttgaaag

SEQ ID NO: 1187406 - DNA, 15 bp, Homo sapiens
accccatctttgaaa

SEQ ID NO: 1187407 - DNA, 15 bp, Homo sapiens
caccccatctttgaa

SEQ ID NO: 1187408 - DNA, 15 bp, Homo sapiens
gcaccccatctttga

SEQ ID NO: 1187409 - DNA, 15 bp, Homo sapiens
cgcaccccatctttg

SEQ ID NO: 1187410 - DNA, 15 bp, Homo sapiens
ccgcaccccatcttt

SEQ ID NO: 1187411 - DNA, 15 bp, Homo sapiens
cccgcaccccatctt

SEQ ID NO: 1187412 - DNA, 15 bp, Homo sapiens
tcccgcaccccatct

SEQ ID NO: 1187413 - DNA, 15 bp, Homo sapiens
ttcccgcaccccatc

SEQ ID NO: 1187414 - DNA, 15 bp, Homo sapiens
cttcccgcaccccat

SEQ ID NO: 1187415 - DNA, 15 bp, Homo sapiens
tcttcccgcacccca

SEQ ID NO: 1187416 - DNA, 15 bp, Homo sapiens
ctcttcccgcacccc

SEQ ID NO: 1187417 - DNA, 15 bp, Homo sapiens
tctcttcccgcaccc

SEQ ID NO: 1187418 - DNA, 15 bp, Homo sapiens
ctctcttcccgcacc

SEQ ID NO: 1187419 - DNA, 15 bp, Homo sapiens
cctctcttcccgcac

SEQ ID NO: 1187420 - DNA, 15 bp, Homo sapiens
ccctctcttcccgca

SEQ ID NO: 1187421 - DNA, 15 bp, Homo sapiens
cccctctcttcccgc

SEQ ID NO: 1187422 - DNA, 15 bp, Homo sapiens
ccccctctcttcccg

SEQ ID NO: 1187423 - DNA, 15 bp, Homo sapiens
tccccctctcttccc

SEQ ID NO: 1187424 - DNA, 15 bp, Homo sapiens
ctccccctctcttcc

SEQ ID NO: 1187425 - DNA, 15 bp, Homo sapiens
tctccccctctcttc

SEQ ID NO: 1187426 - DNA, 15 bp, Homo sapiens
ctctccccctctctt

SEQ ID NO: 1187427 - DNA, 15 bp, Homo sapiens
tctctccccctctct

SEQ ID NO: 1187428 - DNA, 15 bp, Homo sapiens
ctctctccccctctc

SEQ ID NO: 1187429 - DNA, 15 bp, Homo sapiens
tctctctccccctct

SEQ ID NO: 1187430 - DNA, 15 bp, Homo sapiens
ctctctctccccctc

SEQ ID NO: 1187431 - DNA, 15 bp, Homo sapiens
tctctctctccccct

SEQ ID NO: 1187432 - DNA, 15 bp, Homo sapiens
ctctctctctccccc

SEQ ID NO: 1187433 - DNA, 15 bp, Homo sapiens
tctctctctctcccc

SEQ ID NO: 1187434 - DNA, 15 bp, Homo sapiens
ttctctctctctccc

SEQ ID NO: 1187435 - DNA, 15 bp, Homo sapiens
attctctctctctcc

SEQ ID NO: 1187436 - DNA, 15 bp, Homo sapiens
cattctctctctctc

SEQ ID NO: 1187437 - DNA, 15 bp, Homo sapiens
ttcattctctctctc

SEQ ID NO: 1187438 - DNA, 15 bp, Homo sapiens
tttcattctctctct

SEQ ID NO: 1187439 - DNA, 15 bp, Homo sapiens
ttttcattctctctc

SEQ ID NO: 1187440 - DNA, 15 bp, Homo sapiens
tttttcattctctct

SEQ ID NO: 1187441 - DNA, 15 bp, Homo sapiens
atttttcattctctc

SEQ ID NO: 1187442 - DNA, 15 bp, Homo sapiens
tatttttcattctct

SEQ ID NO: 1187443 - DNA, 15 bp, Homo sapiens
ctatttttcattctc

SEQ ID NO: 1187444 - DNA, 15 bp, Homo sapiens
tctatttttcattct

SEQ ID NO: 1187445 - DNA, 15 bp, Homo sapiens
ctctatttttcattc

SEQ ID NO: 1187446 - DNA, 15 bp, Homo sapiens
tctctatttttcatt

SEQ ID NO: 1187447 - DNA, 15 bp, Homo sapiens
atctctatttttcat

SEQ ID NO: 1187448 - DNA, 15 bp, Homo sapiens
catctctatttttca

SEQ ID NO: 1187449 - DNA, 15 bp, Homo sapiens
tcatctctatttttc

SEQ ID NO: 1187450 - DNA, 15 bp, Homo sapiens
atcatctctattttt

SEQ ID NO: 1187451 - DNA, 15 bp, Homo sapiens
catcatctctatttt

SEQ ID NO: 1187452 - DNA, 15 bp, Homo sapiens
tcatcatctctattt

SEQ ID NO: 1187453 - DNA, 15 bp, Homo sapiens
ttcatcatctctatt

SEQ ID NO: 1187454 - DNA, 15 bp, Homo sapiens
cttcatcatctctat

SEQ ID NO: 1187455 - DNA, 15 bp, Homo sapiens
tcttcatcatctcta

SEQ ID NO: 1187456 - DNA, 15 bp, Homo sapiens
atcttcatcatctct

SEQ ID NO: 1187457 - DNA, 15 bp, Homo sapiens
tatcttcatcatctc

SEQ ID NO: 1187458 - DNA, 15 bp, Homo sapiens
atatcttcatcatct

SEQ ID NO: 1187459 - DNA, 15 bp, Homo sapiens
gatatcttcatcatc

SEQ ID NO: 1187460 - DNA, 15 bp, Homo sapiens
tgatatcttcatcat

SEQ ID NO: 1187461 - DNA, 15 bp, Homo sapiens
ttgatatcttcatca

SEQ ID NO: 1187462 - DNA, 15 bp, Homo sapiens
cttgatatcttcatc

SEQ ID NO: 1187463 - DNA, 15 bp, Homo sapiens
tcttgatatcttcat

SEQ ID NO: 1187464 - DNA, 15 bp, Homo sapiens
ttcttgatatcttca

SEQ ID NO: 1187465 - DNA, 15 bp, Homo sapiens
tttcttgatatcttc

SEQ ID NO: 1187466 - DNA, 15 bp, Homo sapiens
atttcttgatatctt

SEQ ID NO: 1187467 - DNA, 15 bp, Homo sapiens
aatttcttgatatct

SEQ ID NO: 1187468 - DNA, 15 bp, Homo sapiens
gaatttcttgatatc

SEQ ID NO: 1187469 - DNA, 15 bp, Homo sapiens
tgaatttcttgatat

SEQ ID NO: 1187470 - DNA, 15 bp, Homo sapiens
atgaatttcttgata

SEQ ID NO: 1187471 - DNA, 15 bp, Homo sapiens
tatgaatttcttgat

SEQ ID NO: 1187472 - DNA, 15 bp, Homo sapiens
ttatgaatttcttga

SEQ ID NO: 1187473 - DNA, 15 bp, Homo sapiens
tttatgaatttcttg

SEQ ID NO: 1187474 - DNA, 15 bp, Homo sapiens
ttttatgaatttctt

SEQ ID NO: 1187475 - DNA, 15 bp, Homo sapiens
attttatgaatttct

SEQ ID NO: 1187476 - DNA, 15 bp, Homo sapiens
cattttatgaatttc

SEQ ID NO: 1187477 - DNA, 15 bp, Homo sapiens
ccattttatgaattt

SEQ ID NO: 1187478 - DNA, 15 bp, Homo sapiens
cccattttatgaatt

SEQ ID NO: 1187479 - DNA, 15 bp, Homo sapiens
tcccattttatgaat

SEQ ID NO: 1187480 - DNA, 15 bp, Homo sapiens
ctcccattttatgaa

SEQ ID NO: 1187481 - DNA, 15 bp, Homo sapiens
cctcccattttatga

SEQ ID NO: 1187482 - DNA, 15 bp, Homo sapiens
acctcccattttatg

SEQ ID NO: 1187483 - DNA, 15 bp, Homo sapiens
cacctcccattttat

SEQ ID NO: 1187484 - DNA, 15 bp, Homo sapiens
tcacctcccatttta

SEQ ID NO: 1187485 - DNA, 15 bp, Homo sapiens
ttcacctcccatttt

SEQ ID NO: 1187486 - DNA, 15 bp, Homo sapiens
attcacctcccattt

SEQ ID NO: 1187487 - DNA, 15 bp, Homo sapiens
aattcacctcccatt

SEQ ID NO: 1187488 - DNA, 15 bp, Homo sapiens
gaattcacctcccat

SEQ ID NO: 1187489 - DNA, 15 bp, Homo sapiens
tgaattcacctccca

SEQ ID NO: 1187490 - DNA, 15 bp, Homo sapiens
ctgaattcacctccc

SEQ ID NO: 1187491 - DNA, 15 bp, Homo sapiens
gctgaattcacctcc

SEQ ID NO: 1187492 - DNA, 15 bp, Homo sapiens
agctgaattcacctc

SEQ ID NO: 1187493 - DNA, 15 bp, Homo sapiens
cagctgaattcacct

SEQ ID NO: 1187494 - DNA, 15 bp, Homo sapiens
gcagctgaattcacc

SEQ ID NO: 1187495 - DNA, 15 bp, Homo sapiens
agcagctgaattcac

SEQ ID NO: 1187496 - DNA, 15 bp, Homo sapiens
cagcagctgaattca

SEQ ID NO: 1187497 - DNA, 15 bp, Homo sapiens
tcagcagctgaattc

SEQ ID NO: 1187498 - DNA, 15 bp, Homo sapiens
ctcagcagctgaatt

SEQ ID NO: 1187499 - DNA, 15 bp, Homo sapiens
gctcagcagctgaat

SEQ ID NO: 1187500 - DNA, 15 bp, Homo sapiens
tgctcagcagctgaa

SEQ ID NO: 1187501 - DNA, 15 bp, Homo sapiens
gtgctcagcagctga

SEQ ID NO: 1187502 - DNA, 15 bp, Homo sapiens
agtgctcagcagctg

SEQ ID NO: 1187503 - DNA, 15 bp, Homo sapiens
cagtgctcagcagct

SEQ ID NO: 1187504 - DNA, 15 bp, Homo sapiens
ccagtgctcagcagc

SEQ ID NO: 1187505 - DNA, 15 bp, Homo sapiens
cccagtgctcagcag

SEQ ID NO: 1187506 - DNA, 15 bp, Homo sapiens
ccccagtgctcagca

SEQ ID NO: 1187507 - DNA, 15 bp, Homo sapiens
tccccagtgctcagc

SEQ ID NO: 1187508 - DNA, 15 bp, Homo sapiens
ctccccagtgctcag

SEQ ID NO: 1187509 - DNA, 15 bp, Homo sapiens
tctccccagtgctca

SEQ ID NO: 1187510 - DNA, 15 bp, Homo sapiens
ctctccccagtgctc

SEQ ID NO: 1187511 - DNA, 15 bp, Homo sapiens
tctctccccagtgct

SEQ ID NO: 1187512 - DNA, 15 bp, Homo sapiens
ctctctccccagtgc

SEQ ID NO: 1187513 - DNA, 15 bp, Homo sapiens
tctctctccccagtg

SEQ ID NO: 1187514 - DNA, 15 bp, Homo sapiens
atctctctccccagt

SEQ ID NO: 1187515 - DNA, 15 bp, Homo sapiens
aatctctctccccag

SEQ ID NO: 1187516 - DNA, 15 bp, Homo sapiens
caatctctctcccca

SEQ ID NO: 1187517 - DNA, 15 bp, Homo sapiens
tcaatctctctcccc

SEQ ID NO: 1187518 - DNA, 15 bp, Homo sapiens
ttcaatctctctccc

SEQ ID NO: 1187519 - DNA, 15 bp, Homo sapiens
tttcaatctctctcc

SEQ ID NO: 1187520 - DNA, 15 bp, Homo sapiens
atttcaatctctctc

SEQ ID NO: 1187521 - DNA, 15 bp, Homo sapiens
aatttcaatctctct

SEQ ID NO: 1187522 - DNA, 15 bp, Homo sapiens
caatttcaatctctc

SEQ ID NO: 1187523 - DNA, 15 bp, Homo sapiens
ccaatttcaatctct

SEQ ID NO: 1187524 - DNA, 15 bp, Homo sapiens
cccaatttcaatctc

SEQ ID NO: 1187525 - DNA, 15 bp, Homo sapiens
tcccaatttcaatct

SEQ ID NO: 1187526 - DNA, 15 bp, Homo sapiens
ttcccaatttcaatc

SEQ ID NO: 1187527 - DNA, 15 bp, Homo sapiens
cttcccaatttcaat

SEQ ID NO: 1187528 - DNA, 15 bp, Homo sapiens
ccttcccaatttcaa

SEQ ID NO: 1187529 - DNA, 15 bp, Homo sapiens
cccttcccaatttca

SEQ ID NO: 1187530 - DNA, 15 bp, Homo sapiens
ccccttcccaatttc

SEQ ID NO: 1187531 - DNA, 15 bp, Homo sapiens
cccccttcccaattt

SEQ ID NO: 1187532 - DNA, 15 bp, Homo sapiens
tcccccttcccaatt

SEQ ID NO: 1187533 - DNA, 15 bp, Homo sapiens
ttcccccttcccaat

SEQ ID NO: 1187534 - DNA, 15 bp, Homo sapiens
tttcccccttcccaa

SEQ ID NO: 1187535 - DNA, 15 bp, Homo sapiens
atttcccccttccca

SEQ ID NO: 1187536 - DNA, 15 bp, Homo sapiens
aatttcccccttccc

SEQ ID NO: 1187537 - DNA, 15 bp, Homo sapiens
aaatttcccccttcc

SEQ ID NO: 1187538 - DNA, 15 bp, Homo sapiens
aaaatttcccccttc

SEQ ID NO: 1187539 - DNA, 15 bp, Homo sapiens
taaaatttccccctt

SEQ ID NO: 1187540 - DNA, 15 bp, Homo sapiens
ttaaaatttccccct

SEQ ID NO: 1187541 - DNA, 15 bp, Homo sapiens
tttaaaatttccccc

SEQ ID NO: 1187542 - DNA, 15 bp, Homo sapiens
ctttaaaatttcccc

SEQ ID NO: 1187543 - DNA, 15 bp, Homo sapiens
actttaaaatttccc

SEQ ID NO: 1187544 - DNA, 15 bp, Homo sapiens
tactttaaaatttcc

SEQ ID NO: 1187545 - DNA, 15 bp, Homo sapiens
ctactttaaaatttc

SEQ ID NO: 1187546 - DNA, 15 bp, Homo sapiens
tctactttaaaattt

SEQ ID NO: 1187547 - DNA, 15 bp, Homo sapiens
ctctactttaaaatt

SEQ ID NO: 1187548 - DNA, 15 bp, Homo sapiens
cctctactttaaaat

SEQ ID NO: 1187549 - DNA, 15 bp, Homo sapiens
acctctactttaaaa

SEQ ID NO: 1187550 - DNA, 15 bp, Homo sapiens
aacctctactttaaa

SEQ ID NO: 1187551 - DNA, 15 bp, Homo sapiens
aaacctctactttaa

SEQ ID NO: 1187552 - DNA, 15 bp, Homo sapiens
taaacctctacttta

SEQ ID NO: 1187553 - DNA, 15 bp, Homo sapiens
ataaacctctacttt

SEQ ID NO: 1187554 - DNA, 15 bp, Homo sapiens
tataaacctctactt

SEQ ID NO: 1187555 - DNA, 15 bp, Homo sapiens
atataaacctctact

SEQ ID NO: 1187556 - DNA, 15 bp, Homo sapiens
gatataaacctctac

SEQ ID NO: 1187557 - DNA, 15 bp, Homo sapiens
tgatataaacctcta

SEQ ID NO: 1187558 - DNA, 15 bp, Homo sapiens
ctgatataaacctct

SEQ ID NO: 1187559 - DNA, 15 bp, Homo sapiens
actgatataaacctc

SEQ ID NO: 1187560 - DNA, 15 bp, Homo sapiens
gactgatataaacct

SEQ ID NO: 1187561 - DNA, 15 bp, Homo sapiens
tgactgatataaacc

SEQ ID NO: 1187562 - DNA, 15 bp, Homo sapiens
atgactgatataaac

SEQ ID NO: 1187563 - DNA, 15 bp, Homo sapiens
gatgactgatataaa

SEQ ID NO: 1187564 - DNA, 15 bp, Homo sapiens
tgatgactgatataa

SEQ ID NO: 1187565 - DNA, 15 bp, Homo sapiens
atgatgactgatata

SEQ ID NO: 1187566 - DNA, 15 bp, Homo sapiens
catgatgactgatat

SEQ ID NO: 1187567 - DNA, 15 bp, Homo sapiens
ccatgatgactgata

SEQ ID NO: 1187568 - DNA, 15 bp, Homo sapiens
cccatgatgactgat

SEQ ID NO: 1187569 - DNA, 15 bp, Homo sapiens
tcccatgatgactga

SEQ ID NO: 1187570 - DNA, 15 bp, Homo sapiens
gtcccatgatgactg

SEQ ID NO: 1187571 - DNA, 15 bp, Homo sapiens
tgtcccatgatgact

SEQ ID NO: 1187572 - DNA, 15 bp, Homo sapiens
atgtcccatgatgac

SEQ ID NO: 1187573 - DNA, 15 bp, Homo sapiens
catgtcccatgatga

SEQ ID NO: 1187574 - DNA, 15 bp, Homo sapiens
gcatgtcccatgatg

SEQ ID NO: 1187575 - DNA, 15 bp, Homo sapiens
agcatgtcccatgat

SEQ ID NO: 1187576 - DNA, 15 bp, Homo sapiens
tagcatgtcccatga

SEQ ID NO: 1187577 - DNA, 15 bp, Homo sapiens
atagcatgtcccatg

SEQ ID NO: 1187578 - DNA, 15 bp, Homo sapiens
aatagcatgtcccat

SEQ ID NO: 1187579 - DNA, 15 bp, Homo sapiens
taatagcatgtccca

SEQ ID NO: 1187580 - DNA, 15 bp, Homo sapiens
ctaatagcatgtccc

SEQ ID NO: 1187581 - DNA, 15 bp, Homo sapiens
tctaatagcatgtcc

SEQ ID NO: 1187582 - DNA, 15 bp, Homo sapiens
ttctaatagcatgtc

SEQ ID NO: 1187583 - DNA, 15 bp, Homo sapiens
attctaatagcatgt

SEQ ID NO: 1187584 - DNA, 15 bp, Homo sapiens
aattctaatagcatg

SEQ ID NO: 1187585 - DNA, 15 bp, Homo sapiens
gaattctaatagcat

SEQ ID NO: 1187586 - DNA, 15 bp, Homo sapiens
tgaattctaatagca

SEQ ID NO: 1187587 - DNA, 15 bp, Homo sapiens
ttgaattctaatagc

SEQ ID NO: 1187588 - DNA, 15 bp, Homo sapiens
cttgaattctaatag

SEQ ID NO: 1187589 - DNA, 15 bp, Homo sapiens
tcttgaattctaata

SEQ ID NO: 1187590 - DNA, 15 bp, Homo sapiens
gtcttgaattctaat

SEQ ID NO: 1187591 - DNA, 15 bp, Homo sapiens
tgtcttgaattctaa

SEQ ID NO: 1187592 - DNA, 15 bp, Homo sapiens
gtgtcttgaattcta

SEQ ID NO: 1187593 - DNA, 15 bp, Homo sapiens
tgtgtcttgaattct

SEQ ID NO: 1187594 - DNA, 15 bp, Homo sapiens
ttgtgtcttgaattc

SEQ ID NO: 1187595 - DNA, 15 bp, Homo sapiens
gttgtgtcttgaatt

SEQ ID NO: 1187596 - DNA, 15 bp, Homo sapiens
tgttgtgtcttgaat

SEQ ID NO: 1187597 - DNA, 15 bp, Homo sapiens
ttgttgtgtcttgaa

SEQ ID NO: 1187598 - DNA, 15 bp, Homo sapiens
cttgttgtgtcttga

SEQ ID NO: 1187599 - DNA, 15 bp, Homo sapiens
ccttgttgtgtcttg

SEQ ID NO: 1187600 - DNA, 15 bp, Homo sapiens
tccttgttgtgtctt

SEQ ID NO: 1187601 - DNA, 15 bp, Homo sapiens
ttccttgttgtgtct

SEQ ID NO: 1187602 - DNA, 15 bp, Homo sapiens
tttccttgttgtgtc

SEQ ID NO: 1187603 - DNA, 15 bp, Homo sapiens
atttccttgttgtgt

SEQ ID NO: 1187604 - DNA, 15 bp, Homo sapiens
gatttccttgttgtg

SEQ ID NO: 1187605 - DNA, 15 bp, Homo sapiens
agatttccttgttgt

SEQ ID NO: 1187606 - DNA, 15 bp, Homo sapiens
aagatttccttgttg

SEQ ID NO: 1187607 - DNA, 15 bp, Homo sapiens
taagatttccttgtt

SEQ ID NO: 1187608 - DNA, 15 bp, Homo sapiens
ctaagatttccttgt

SEQ ID NO: 1187609 - DNA, 15 bp, Homo sapiens
cctaagatttccttg

SEQ ID NO: 1187610 - DNA, 15 bp, Homo sapiens
ccctaagatttcctt

SEQ ID NO: 1187611 - DNA, 15 bp, Homo sapiens
cccctaagatttcct

SEQ ID NO: 1187612 - DNA, 15 bp, Homo sapiens
acccctaagatttcc

SEQ ID NO: 1187613 - DNA, 15 bp, Homo sapiens
gacccctaagatttc

SEQ ID NO: 1187614 - DNA, 15 bp, Homo sapiens
ggacccctaagattt

SEQ ID NO: 1187615 - DNA, 15 bp, Homo sapiens
tggacccctaagatt

SEQ ID NO: 1187616 - DNA, 15 bp, Homo sapiens
ctggacccctaagat

SEQ ID NO: 1187617 - DNA, 15 bp, Homo sapiens
cctggacccctaaga

SEQ ID NO: 1187618 - DNA, 15 bp, Homo sapiens
ccctggacccctaag

SEQ ID NO: 1187619 - DNA, 15 bp, Homo sapiens
cccctggacccctaa

SEQ ID NO: 1187620 - DNA, 15 bp, Homo sapiens
gcccctggaccccta

SEQ ID NO: 1187621 - DNA, 15 bp, Homo sapiens
ggcccctggacccct

SEQ ID NO: 1187622 - DNA, 15 bp, Homo sapiens
tggcccctggacccc

SEQ ID NO: 1187623 - DNA, 15 bp, Homo sapiens
ctggcccctggaccc

SEQ ID NO: 1187624 - DNA, 15 bp, Homo sapiens
gctggcccctggacc

SEQ ID NO: 1187625 - DNA, 15 bp, Homo sapiens
agctggcccctggac

SEQ ID NO: 1187626 - DNA, 15 bp, Homo sapiens
cagctggcccctgga

SEQ ID NO: 1187627 - DNA, 15 bp, Homo sapiens
tcagctggcccctgg

SEQ ID NO: 1187628 - DNA, 15 bp, Homo sapiens
ctcagctggcccctg

SEQ ID NO: 1187629 - DNA, 15 bp, Homo sapiens
cctcagctggcccct

SEQ ID NO: 1187630 - DNA, 15 bp, Homo sapiens
gcctcagctggcccc

SEQ ID NO: 1187631 - DNA, 15 bp, Homo sapiens
tgcctcagctggccc

SEQ ID NO: 1187632 - DNA, 15 bp, Homo sapiens
ttgcctcagctggcc

SEQ ID NO: 1187633 - DNA, 15 bp, Homo sapiens
tttgcctcagctggc

SEQ ID NO: 1187634 - DNA, 15 bp, Homo sapiens
ctttgcctcagctgg

SEQ ID NO: 1187635 - DNA, 15 bp, Homo sapiens
actttgcctcagctg

SEQ ID NO: 1187636 - DNA, 15 bp, Homo sapiens
cactttgcctcagct

SEQ ID NO: 1187637 - DNA, 15 bp, Homo sapiens
ccactttgcctcagc

SEQ ID NO: 1187638 - DNA, 15 bp, Homo sapiens
gccactttgcctcag

SEQ ID NO: 1187639 - DNA, 15 bp, Homo sapiens
tgccactttgcctca

SEQ ID NO: 1187640 - DNA, 15 bp, Homo sapiens
ctgccactttgcctc

SEQ ID NO: 1187641 - DNA, 15 bp, Homo sapiens
tctgccactttgcct

SEQ ID NO: 1187642 - DNA, 15 bp, Homo sapiens
ctctgccactttgcc

SEQ ID NO: 1187643 - DNA, 15 bp, Homo sapiens
cctctgccactttgc

SEQ ID NO: 1187644 - DNA, 15 bp, Homo sapiens
ccctctgccactttg

SEQ ID NO: 1187645 - DNA, 15 bp, Homo sapiens
cccctctgccacttt

SEQ ID NO: 1187646 - DNA, 15 bp, Homo sapiens
tcccctctgccactt

SEQ ID NO: 1187647 - DNA, 15 bp, Homo sapiens
atcccctctgccact

SEQ ID NO: 1187648 - DNA, 15 bp, Homo sapiens
gatcccctctgccac

SEQ ID NO: 1187649 - DNA, 15 bp, Homo sapiens
ggatcccctctgcca

SEQ ID NO: 1187650 - DNA, 15 bp, Homo sapiens
tggatcccctctgcc

SEQ ID NO: 1187651 - DNA, 15 bp, Homo sapiens
ctggatcccctctgc

SEQ ID NO: 1187652 - DNA, 15 bp, Homo sapiens
actggatcccctctg

SEQ ID NO: 1187653 - DNA, 15 bp, Homo sapiens
aactggatcccctct

SEQ ID NO: 1187654 - DNA, 15 bp, Homo sapiens
taactggatcccctc

SEQ ID NO: 1187655 - DNA, 15 bp, Homo sapiens
ctaactggatcccct

SEQ ID NO: 1187656 - DNA, 15 bp, Homo sapiens
actaactggatcccc

SEQ ID NO: 1187657 - DNA, 15 bp, Homo sapiens
cactaactggatccc

SEQ ID NO: 1187658 - DNA, 15 bp, Homo sapiens
gcactaactggatcc

SEQ ID NO: 1187659 - DNA, 15 bp, Homo sapiens
cgcactaactggatc

SEQ ID NO: 1187660 - DNA, 15 bp, Homo sapiens
ccgcactaactggat

SEQ ID NO: 1187661 - DNA, 15 bp, Homo sapiens
gccgcactaactgga

SEQ ID NO: 1187662 - DNA, 15 bp, Homo sapiens
tgccgcactaactgg

SEQ ID NO: 1187663 - DNA, 15 bp, Homo sapiens
ttgccgcactaactg

SEQ ID NO: 1187664 - DNA, 15 bp, Homo sapiens
attgccgcactaact

SEQ ID NO: 1187665 - DNA, 15 bp, Homo sapiens
tattgccgcactaac

SEQ ID NO: 1187666 - DNA, 15 bp, Homo sapiens
ctattgccgcactaa

SEQ ID NO: 1187667 - DNA, 15 bp, Homo sapiens
cctattgccgcacta

SEQ ID NO: 1187668 - DNA, 15 bp, Homo sapiens
gcctattgccgcact

SEQ ID NO: 1187669 - DNA, 15 bp, Homo sapiens
tgcctattgccgcac

SEQ ID NO: 1187670 - DNA, 15 bp, Homo sapiens
atgcctattgccgca

SEQ ID NO: 1187671 - DNA, 15 bp, Homo sapiens
aatgcctattgccgc

SEQ ID NO: 1187672 - DNA, 15 bp, Homo sapiens
caatgcctattgccg

SEQ ID NO: 1187673 - DNA, 15 bp, Homo sapiens
acaatgcctattgcc

SEQ ID NO: 1187674 - DNA, 15 bp, Homo sapiens
gacaatgcctattgc

SEQ ID NO: 1187675 - DNA, 15 bp, Homo sapiens
ggacaatgcctattg

SEQ ID NO: 1187676 - DNA, 15 bp, Homo sapiens
tggacaatgcctatt

SEQ ID NO: 1187677 - DNA, 15 bp, Homo sapiens
ctggacaatgcctat

SEQ ID NO: 1187678 - DNA, 15 bp, Homo sapiens
gctggacaatgccta

SEQ ID NO: 1187679 - DNA, 15 bp, Homo sapiens
tgctggacaatgcct

SEQ ID NO: 1187680 - DNA, 15 bp, Homo sapiens
gtgctggacaatgcc

SEQ ID NO: 1187681 - DNA, 15 bp, Homo sapiens
tgtgctggacaatgc

SEQ ID NO: 1187682 - DNA, 15 bp, Homo sapiens
gtgtgctggacaatg

SEQ ID NO: 1187683 - DNA, 15 bp, Homo sapiens
ggtgtgctggacaat

SEQ ID NO: 1187684 - DNA, 15 bp, Homo sapiens
aggtgtgctggacaa

SEQ ID NO: 1187685 - DNA, 15 bp, Homo sapiens
aaggtgtgctggaca

SEQ ID NO: 1187686 - DNA, 15 bp, Homo sapiens
gaaggtgtgctggac

SEQ ID NO: 1187687 - DNA, 15 bp, Homo sapiens
ggaaggtgtgctgga

SEQ ID NO: 1187688 - DNA, 15 bp, Homo sapiens
tggaaggtgtgctgg

SEQ ID NO: 1187689 - DNA, 15 bp, Homo sapiens
atggaaggtgtgctg

SEQ ID NO: 1187690 - DNA, 15 bp, Homo sapiens
aatggaaggtgtgct

SEQ ID NO: 1187691 - DNA, 15 bp, Homo sapiens
caatggaaggtgtgc

SEQ ID NO: 1187692 - DNA, 15 bp, Homo sapiens
gcaatggaaggtgtg

SEQ ID NO: 1187693 - DNA, 15 bp, Homo sapiens
agcaatggaaggtgt

SEQ ID NO: 1187694 - DNA, 15 bp, Homo sapiens
aagcaatggaaggtg

SEQ ID NO: 1187695 - DNA, 15 bp, Homo sapiens
taagcaatggaaggt

SEQ ID NO: 1187696 - DNA, 15 bp, Homo sapiens
ttaagcaatggaagg

SEQ ID NO: 1187697 - DNA, 15 bp, Homo sapiens
cttaagcaatggaag

SEQ ID NO: 1187698 - DNA, 15 bp, Homo sapiens
ccttaagcaatggaa

SEQ ID NO: 1187699 - DNA, 15 bp, Homo sapiens
cccttaagcaatgga

SEQ ID NO: 1187700 - DNA, 15 bp, Homo sapiens
tcccttaagcaatgg

SEQ ID NO: 1187701 - DNA, 15 bp, Homo sapiens
ctcccttaagcaatg

SEQ ID NO: 1187702 - DNA, 15 bp, Homo sapiens
tctcccttaagcaat

SEQ ID NO: 1187703 - DNA, 15 bp, Homo sapiens
ttctcccttaagcaa

SEQ ID NO: 1187704 - DNA, 15 bp, Homo sapiens
attctcccttaagca

SEQ ID NO: 1187705 - DNA, 15 bp, Homo sapiens
tattctcccttaagc

SEQ ID NO: 1187706 - DNA, 15 bp, Homo sapiens
ctattctcccttaag

SEQ ID NO: 1187707 - DNA, 15 bp, Homo sapiens
cctattctcccttaa

SEQ ID NO: 1187708 - DNA, 15 bp, Homo sapiens
ccctattctccctta

SEQ ID NO: 1187709 - DNA, 15 bp, Homo sapiens
accctattctccctt

SEQ ID NO: 1187710 - DNA, 15 bp, Homo sapiens
gaccctattctccct

SEQ ID NO: 1187711 - DNA, 15 bp, Homo sapiens
ggaccctattctccc

SEQ ID NO: 1187712 - DNA, 15 bp, Homo sapiens
gggaccctattctcc

SEQ ID NO: 1187713 - DNA, 15 bp, Homo sapiens
ggggaccctattctc

SEQ ID NO: 1187714 - DNA, 15 bp, Homo sapiens
tggggaccctattct

SEQ ID NO: 1187715 - DNA, 15 bp, Homo sapiens
ctggggaccctattc

SEQ ID NO: 1187716 - DNA, 15 bp, Homo sapiens
tctggggaccctatt

SEQ ID NO: 1187717 - DNA, 15 bp, Homo sapiens
atctggggaccctat

SEQ ID NO: 1187718 - DNA, 15 bp, Homo sapiens
catctggggacccta

SEQ ID NO: 1187719 - DNA, 15 bp, Homo sapiens
acatctggggaccct

SEQ ID NO: 1187720 - DNA, 15 bp, Homo sapiens
cacatctggggaccc

SEQ ID NO: 1187721 - DNA, 15 bp, Homo sapiens
ccacatctggggacc

SEQ ID NO: 1187722 - DNA, 15 bp, Homo sapiens
cccacatctggggac

SEQ ID NO: 1187723 - DNA, 15 bp, Homo sapiens
tcccacatctgggga

SEQ ID NO: 1187724 - DNA, 15 bp, Homo sapiens
ttcccacatctgggg

SEQ ID NO: 1187725 - DNA, 15 bp, Homo sapiens
gttcccacatctggg

SEQ ID NO: 1187726 - DNA, 15 bp, Homo sapiens
agttcccacatctgg

SEQ ID NO: 1187727 - DNA, 15 bp, Homo sapiens
cagttcccacatctg

SEQ ID NO: 1187728 - DNA, 15 bp, Homo sapiens
tcagttcccacatct

SEQ ID NO: 1187729 - DNA, 15 bp, Homo sapiens
atcagttcccacatc

SEQ ID NO: 1187730 - DNA, 15 bp, Homo sapiens
tatcagttcccacat

SEQ ID NO: 1187731 - DNA, 15 bp, Homo sapiens
ttatcagttcccaca

SEQ ID NO: 1187732 - DNA, 15 bp, Homo sapiens
cttatcagttcccac

SEQ ID NO: 1187733 - DNA, 15 bp, Homo sapiens
ccttatcagttccca

SEQ ID NO: 1187734 - DNA, 15 bp, Homo sapiens
gccttatcagttccc

SEQ ID NO: 1187735 - DNA, 15 bp, Homo sapiens
tgccttatcagttcc

SEQ ID NO: 1187736 - DNA, 15 bp, Homo sapiens
ttgccttatcagttc

SEQ ID NO: 1187737 - DNA, 15 bp, Homo sapiens
tttgccttatcagtt

SEQ ID NO: 1187738 - DNA, 15 bp, Homo sapiens
ctttgccttatcagt

SEQ ID NO: 1187739 - DNA, 15 bp, Homo sapiens
tctttgccttatcag

SEQ ID NO: 1187740 - DNA, 15 bp, Homo sapiens
ttctttgccttatca

SEQ ID NO: 1187741 - DNA, 15 bp, Homo sapiens
attctttgccttatc

SEQ ID NO: 1187742 - DNA, 15 bp, Homo sapiens
cattctttgccttat

SEQ ID NO: 1187743 - DNA, 15 bp, Homo sapiens
ccattctttgcctta

SEQ ID NO: 1187744 - DNA, 15 bp, Homo sapiens
gccattctttgcctt

SEQ ID NO: 1187745 - DNA, 15 bp, Homo sapiens
tgccattctttgcct

SEQ ID NO: 1187746 - DNA, 15 bp, Homo sapiens
ctgccattctttgcc

SEQ ID NO: 1187747 - DNA, 15 bp, Homo sapiens
tctgccattctttgc

SEQ ID NO: 1187748 - DNA, 15 bp, Homo sapiens
ttctgccattctttg

SEQ ID NO: 1187749 - DNA, 15 bp, Homo sapiens
cttctgccattcttt

SEQ ID NO: 1187750 - DNA, 15 bp, Homo sapiens
ccttctgccattctt

SEQ ID NO: 1187751 - DNA, 15 bp, Homo sapiens
cccttctgccattct

SEQ ID NO: 1187752 - DNA, 15 bp, Homo sapiens
ccccttctgccattc

SEQ ID NO: 1187753 - DNA, 15 bp, Homo sapiens
accccttctgccatt

SEQ ID NO: 1187754 - DNA, 15 bp, Homo sapiens
gaccccttctgccat

SEQ ID NO: 1187755 - DNA, 15 bp, Homo sapiens
ggaccccttctgcca

SEQ ID NO: 1187756 - DNA, 15 bp, Homo sapiens
tggaccccttctgcc

SEQ ID NO: 1187757 - DNA, 15 bp, Homo sapiens
ctggaccccttctgc

SEQ ID NO: 1187758 - DNA, 15 bp, Homo sapiens
gctggaccccttctg

SEQ ID NO: 1187759 - DNA, 15 bp, Homo sapiens
tgctggaccccttct

SEQ ID NO: 1187760 - DNA, 15 bp, Homo sapiens
atgctggaccccttc

SEQ ID NO: 1187761 - DNA, 15 bp, Homo sapiens
gatgctggacccctt

SEQ ID NO: 1187762 - DNA, 15 bp, Homo sapiens
agatgctggacccct

SEQ ID NO: 1187763 - DNA, 15 bp, Homo sapiens
cagatgctggacccc

SEQ ID NO: 1187764 - DNA, 15 bp, Homo sapiens
gcagatgctggaccc

SEQ ID NO: 1187765 - DNA, 15 bp, Homo sapiens
cgcagatgctggacc

SEQ ID NO: 1187766 - DNA, 15 bp, Homo sapiens
ccgcagatgctggac

SEQ ID NO: 1187767 - DNA, 15 bp, Homo sapiens
gccgcagatgctgga

SEQ ID NO: 1187768 - DNA, 15 bp, Homo sapiens
tgccgcagatgctgg

SEQ ID NO: 1187769 - DNA, 15 bp, Homo sapiens
ctgccgcagatgctg

SEQ ID NO: 1187770 - DNA, 15 bp, Homo sapiens
actgccgcagatgct

SEQ ID NO: 1187771 - DNA, 15 bp, Homo sapiens
cactgccgcagatgc

SEQ ID NO: 1187772 - DNA, 15 bp, Homo sapiens
tcactgccgcagatg

SEQ ID NO: 1187773 - DNA, 15 bp, Homo sapiens
ctcactgccgcagat

SEQ ID NO: 1187774 - DNA, 15 bp, Homo sapiens
cctcactgccgcaga

SEQ ID NO: 1187775 - DNA, 15 bp, Homo sapiens
ccctcactgccgcag

SEQ ID NO: 1187776 - DNA, 15 bp, Homo sapiens
gccctcactgccgca

SEQ ID NO: 1187777 - DNA, 15 bp, Homo sapiens
tgccctcactgccgc

SEQ ID NO: 1187778 - DNA, 15 bp, Homo sapiens
gtgccctcactgccg

SEQ ID NO: 1187779 - DNA, 15 bp, Homo sapiens
agtgccctcactgcc

SEQ ID NO: 1187780 - DNA, 15 bp, Homo sapiens
cagtgccctcactgc

SEQ ID NO: 1187781 - DNA, 15 bp, Homo sapiens
ccagtgccctcactg

SEQ ID NO: 1187782 - DNA, 15 bp, Homo sapiens
cccagtgccctcact

SEQ ID NO: 1187783 - DNA, 15 bp, Homo sapiens
ccccagtgccctcac

SEQ ID NO: 1187784 - DNA, 15 bp, Homo sapiens
tccccagtgccctca

SEQ ID NO: 1187785 - DNA, 15 bp, Homo sapiens
ttccccagtgccctc

SEQ ID NO: 1187786 - DNA, 15 bp, Homo sapiens
cttccccagtgccct

SEQ ID NO: 1187787 - DNA, 15 bp, Homo sapiens
acttccccagtgccc

SEQ ID NO: 1187788 - DNA, 15 bp, Homo sapiens
cacttccccagtgcc

SEQ ID NO: 1187789 - DNA, 15 bp, Homo sapiens
tcacttccccagtgc

SEQ ID NO: 1187790 - DNA, 15 bp, Homo sapiens
ctcacttccccagtg

SEQ ID NO: 1187791 - DNA, 15 bp, Homo sapiens
tctcacttccccagt

SEQ ID NO: 1187792 - DNA, 15 bp, Homo sapiens
ctctcacttccccag

SEQ ID NO: 1187793 - DNA, 15 bp, Homo sapiens
cctctcacttcccca

SEQ ID NO: 1187794 - DNA, 15 bp, Homo sapiens
gcctctcacttcccc

SEQ ID NO: 1187795 - DNA, 15 bp, Homo sapiens
tgcctctcacttccc

SEQ ID NO: 1187796 - DNA, 15 bp, Homo sapiens
ctgcctctcacttcc

SEQ ID NO: 1187797 - DNA, 15 bp, Homo sapiens
cctgcctctcacttc

SEQ ID NO: 1187798 - DNA, 15 bp, Homo sapiens
tcctgcctctcactt

SEQ ID NO: 1187799 - DNA, 15 bp, Homo sapiens
ctcctgcctctcact

SEQ ID NO: 1187800 - DNA, 15 bp, Homo sapiens
cctcctgcctctcac

SEQ ID NO: 1187801 - DNA, 15 bp, Homo sapiens
gcctcctgcctctca

SEQ ID NO: 1187802 - DNA, 15 bp, Homo sapiens
agcctcctgcctctc

SEQ ID NO: 1187803 - DNA, 15 bp, Homo sapiens
cagcctcctgcctct

SEQ ID NO: 1187804 - DNA, 15 bp, Homo sapiens
acagcctcctgcctc

SEQ ID NO: 1187805 - DNA, 15 bp, Homo sapiens
cacagcctcctgcct

SEQ ID NO: 1187806 - DNA, 15 bp, Homo sapiens
gcacagcctcctgcc

SEQ ID NO: 1187807 - DNA, 15 bp, Homo sapiens
agcacagcctcctgc

SEQ ID NO: 1187808 - DNA, 15 bp, Homo sapiens
gagcacagcctcctg

SEQ ID NO: 1187809 - DNA, 15 bp, Homo sapiens
tgagcacagcctcct

SEQ ID NO: 1187810 - DNA, 15 bp, Homo sapiens
ctgagcacagcctcc

SEQ ID NO: 1187811 - DNA, 15 bp, Homo sapiens
tctgagcacagcctc

SEQ ID NO: 1187812 - DNA, 15 bp, Homo sapiens
ctctgagcacagcct

SEQ ID NO: 1187813 - DNA, 15 bp, Homo sapiens
tctctgagcacagcc

SEQ ID NO: 1187814 - DNA, 15 bp, Homo sapiens
ctctctgagcacagc

SEQ ID NO: 1187815 - DNA, 15 bp, Homo sapiens
cctctctgagcacag

SEQ ID NO: 1187816 - DNA, 15 bp, Homo sapiens
ccctctctgagcaca

SEQ ID NO: 1187817 - DNA, 15 bp, Homo sapiens
accctctctgagcac

SEQ ID NO: 1187818 - DNA, 15 bp, Homo sapiens
caccctctctgagca

SEQ ID NO: 1187819 - DNA, 15 bp, Homo sapiens
acaccctctctgagc

SEQ ID NO: 1187820 - DNA, 15 bp, Homo sapiens
gacaccctctctgag

SEQ ID NO: 1187821 - DNA, 15 bp, Homo sapiens
ggacaccctctctga

SEQ ID NO: 1187822 - DNA, 15 bp, Homo sapiens
aggacaccctctctg

SEQ ID NO: 1187823 - DNA, 15 bp, Homo sapiens
gaggacaccctctct

SEQ ID NO: 1187824 - DNA, 15 bp, Homo sapiens
tgaggacaccctctc

SEQ ID NO: 1187825 - DNA, 15 bp, Homo sapiens
ctgaggacaccctct

SEQ ID NO: 1187826 - DNA, 15 bp, Homo sapiens
tctgaggacaccctc

SEQ ID NO: 1187827 - DNA, 15 bp, Homo sapiens
gtctgaggacaccct

SEQ ID NO: 1187828 - DNA, 15 bp, Homo sapiens
agtctgaggacaccc

SEQ ID NO: 1187829 - DNA, 15 bp, Homo sapiens
gagtctgaggacacc

SEQ ID NO: 1187830 - DNA, 15 bp, Homo sapiens
agagtctgaggacac

SEQ ID NO: 1187831 - DNA, 15 bp, Homo sapiens
cagagtctgaggaca

SEQ ID NO: 1187832 - DNA, 15 bp, Homo sapiens
tcagagtctgaggac

SEQ ID NO: 1187833 - DNA, 15 bp, Homo sapiens
ttcagagtctgagga

SEQ ID NO: 1187834 - DNA, 15 bp, Homo sapiens
tttcagagtctgagg

SEQ ID NO: 1187835 - DNA, 15 bp, Homo sapiens
atttcagagtctgag

SEQ ID NO: 1187836 - DNA, 15 bp, Homo sapiens
gatttcagagtctga

SEQ ID NO: 1187837 - DNA, 15 bp, Homo sapiens
ggatttcagagtctg

SEQ ID NO: 1187838 - DNA, 15 bp, Homo sapiens
aggatttcagagtct

SEQ ID NO: 1187839 - DNA, 15 bp, Homo sapiens
caggatttcagagtc

SEQ ID NO: 1187840 - DNA, 15 bp, Homo sapiens
ccaggatttcagagt

SEQ ID NO: 1187841 - DNA, 15 bp, Homo sapiens
cccaggatttcagag

SEQ ID NO: 1187842 - DNA, 15 bp, Homo sapiens
tcccaggatttcaga

SEQ ID NO: 1187843 - DNA, 15 bp, Homo sapiens
ctcccaggatttcag

SEQ ID NO: 1187844 - DNA, 15 bp, Homo sapiens
gctcccaggatttca

SEQ ID NO: 1187845 - DNA, 15 bp, Homo sapiens
cgctcccaggatttc

SEQ ID NO: 1187846 - DNA, 15 bp, Homo sapiens
tcgctcccaggattt

SEQ ID NO: 1187847 - DNA, 15 bp, Homo sapiens
ttcgctcccaggatt

SEQ ID NO: 1187848 - DNA, 15 bp, Homo sapiens
tttcgctcccaggat

SEQ ID NO: 1187849 - DNA, 15 bp, Homo sapiens
gtttcgctcccagga

SEQ ID NO: 1187850 - DNA, 15 bp, Homo sapiens
ggtttcgctcccagg

SEQ ID NO: 1187851 - DNA, 15 bp, Homo sapiens
tggtttcgctcccag

SEQ ID NO: 1187852 - DNA, 15 bp, Homo sapiens
atggtttcgctccca

SEQ ID NO: 1187853 - DNA, 15 bp, Homo sapiens
aatggtttcgctccc

SEQ ID NO: 1187854 - DNA, 15 bp, Homo sapiens
aaatggtttcgctcc

SEQ ID NO: 1187855 - DNA, 15 bp, Homo sapiens
aaaatggtttcgctc

SEQ ID NO: 1187856 - DNA, 15 bp, Homo sapiens
caaaatggtttcgct

SEQ ID NO: 1187857 - DNA, 15 bp, Homo sapiens
tcaaaatggtttcgc

SEQ ID NO: 1187858 - DNA, 15 bp, Homo sapiens
ctcaaaatggtttcg

SEQ ID NO: 1187859 - DNA, 15 bp, Homo sapiens
actcaaaatggtttc

SEQ ID NO: 1187860 - DNA, 15 bp, Homo sapiens
tactcaaaatggttt

SEQ ID NO: 1187861 - DNA, 15 bp, Homo sapiens
ttactcaaaatggtt

SEQ ID NO: 1187862 - DNA, 15 bp, Homo sapiens
attactcaaaatggt

SEQ ID NO: 1187863 - DNA, 15 bp, Homo sapiens
tattactcaaaatgg

SEQ ID NO: 1187864 - DNA, 15 bp, Homo sapiens
atattactcaaaatg

SEQ ID NO: 1187865 - DNA, 15 bp, Homo sapiens
aatattactcaaaat

SEQ ID NO: 1187866 - DNA, 15 bp, Homo sapiens
aaatattactcaaaa

SEQ ID NO: 1187867 - DNA, 15 bp, Homo sapiens
taaatattactcaaa

SEQ ID NO: 1187868 - DNA, 15 bp, Homo sapiens
ttaaatattactcaa

SEQ ID NO: 1187869 - DNA, 15 bp, Homo sapiens
cttaaatattactca

SEQ ID NO: 1187870 - DNA, 15 bp, Homo sapiens
acttaaatattactc

SEQ ID NO: 1187871 - DNA, 15 bp, Homo sapiens
gacttaaatattact

SEQ ID NO: 1187872 - DNA, 15 bp, Homo sapiens
ggacttaaatattac

SEQ ID NO: 1187873 - DNA, 15 bp, Homo sapiens
tggacttaaatatta

SEQ ID NO: 1187874 - DNA, 15 bp, Homo sapiens
ttggacttaaatatt

SEQ ID NO: 1187875 - DNA, 15 bp, Homo sapiens
cttggacttaaatat

SEQ ID NO: 1187876 - DNA, 15 bp, Homo sapiens
tcttggacttaaata

SEQ ID NO: 1187877 - DNA, 15 bp, Homo sapiens
gtcttggacttaaat

SEQ ID NO: 1187878 - DNA, 15 bp, Homo sapiens
tgtcttggacttaaa

SEQ ID NO: 1187879 - DNA, 15 bp, Homo sapiens
atgtcttggacttaa

SEQ ID NO: 1187880 - DNA, 15 bp, Homo sapiens
catgtcttggactta

SEQ ID NO: 1187881 - DNA, 15 bp, Homo sapiens
ccatgtcttggactt

SEQ ID NO: 1187882 - DNA, 15 bp, Homo sapiens
accatgtcttggact

SEQ ID NO: 1187883 - DNA, 15 bp, Homo sapiens
caccatgtcttggac

SEQ ID NO: 1187884 - DNA, 15 bp, Homo sapiens
tcaccatgtcttgga

SEQ ID NO: 1187885 - DNA, 15 bp, Homo sapiens
ctcaccatgtcttgg

SEQ ID NO: 1187886 - DNA, 15 bp, Homo sapiens
actcaccatgtcttg

SEQ ID NO: 1187887 - DNA, 15 bp, Homo sapiens
cactcaccatgtctt

SEQ ID NO: 1187888 - DNA, 15 bp, Homo sapiens
tcactcaccatgtct

SEQ ID NO: 1187889 - DNA, 15 bp, Homo sapiens
atcactcaccatgtc

SEQ ID NO: 1187890 - DNA, 15 bp, Homo sapiens
catcactcaccatgt

SEQ ID NO: 1187891 - DNA, 15 bp, Homo sapiens
gcatcactcaccatg

SEQ ID NO: 1187892 - DNA, 15 bp, Homo sapiens
tgcatcactcaccat

SEQ ID NO: 1187893 - DNA, 15 bp, Homo sapiens
tctgcatcactcacc

SEQ ID NO: 1187894 - DNA, 15 bp, Homo sapiens
atctgcatcactcac

SEQ ID NO: 1187895 - DNA, 15 bp, Homo sapiens
aatctgcatcactca

SEQ ID NO: 1187896 - DNA, 15 bp, Homo sapiens
taatctgcatcactc

SEQ ID NO: 1187897 - DNA, 15 bp, Homo sapiens
ctaatctgcatcact

SEQ ID NO: 1187898 - DNA, 15 bp, Homo sapiens
cctaatctgcatcac

SEQ ID NO: 1187899 - DNA, 15 bp, Homo sapiens
acctaatctgcatca

SEQ ID NO: 1187900 - DNA, 15 bp, Homo sapiens
tacctaatctgcatc

SEQ ID NO: 1187901 - DNA, 15 bp, Homo sapiens
ctacctaatctgcat

SEQ ID NO: 1187902 - DNA, 15 bp, Homo sapiens
gctacctaatctgca

SEQ ID NO: 1187903 - DNA, 15 bp, Homo sapiens
agctacctaatctgc

SEQ ID NO: 1187904 - DNA, 15 bp, Homo sapiens
cagctacctaatctg

SEQ ID NO: 1187905 - DNA, 15 bp, Homo sapiens
ccagctacctaatct

SEQ ID NO: 1187906 - DNA, 15 bp, Homo sapiens
tccagctacctaatc

SEQ ID NO: 1187907 - DNA, 15 bp, Homo sapiens
ctccagctacctaat

SEQ ID NO: 1187908 - DNA, 15 bp, Homo sapiens
gctccagctacctaa

SEQ ID NO: 1187909 - DNA, 15 bp, Homo sapiens
ggctccagctaccta

SEQ ID NO: 1187910 - DNA, 15 bp, Homo sapiens
tggctccagctacct

SEQ ID NO: 1187911 - DNA, 15 bp, Homo sapiens
atggctccagctacc

SEQ ID NO: 1187912 - DNA, 15 bp, Homo sapiens
aatggctccagctac

SEQ ID NO: 1187913 - DNA, 15 bp, Homo sapiens
caatggctccagcta

SEQ ID NO: 1187914 - DNA, 15 bp, Homo sapiens
ccaatggctccagct

SEQ ID NO: 1187915 - DNA, 15 bp, Homo sapiens
tccaatggctccagc

SEQ ID NO: 1187916 - DNA, 15 bp, Homo sapiens
ttccaatggctccag

SEQ ID NO: 1187917 - DNA, 15 bp, Homo sapiens
attccaatggctcca

SEQ ID NO: 1187918 - DNA, 15 bp, Homo sapiens
aattccaatggctcc

SEQ ID NO: 1187919 - DNA, 15 bp, Homo sapiens
caattccaatggctc

SEQ ID NO: 1187920 - DNA, 15 bp, Homo sapiens
tcaattccaatggct

SEQ ID NO: 1187921 - DNA, 15 bp, Homo sapiens
ctcaattccaatggc

SEQ ID NO: 1187922 - DNA, 15 bp, Homo sapiens
tctcaattccaatgg

SEQ ID NO: 1187923 - DNA, 15 bp, Homo sapiens
atctcaattccaatg

SEQ ID NO: 1187924 - DNA, 15 bp, Homo sapiens
aatctcaattccaat

SEQ ID NO: 1187925 - DNA, 15 bp, Homo sapiens
gaatctcaattccaa

SEQ ID NO: 1187926 - DNA, 15 bp, Homo sapiens
cgaatctcaattcca

SEQ ID NO: 1187927 - DNA, 15 bp, Homo sapiens
gcgaatctcaattcc

SEQ ID NO: 1187928 - DNA, 15 bp, Homo sapiens
agcgaatctcaattc

SEQ ID NO: 1187929 - DNA, 15 bp, Homo sapiens
tagcgaatctcaatt

SEQ ID NO: 1187930 - DNA, 15 bp, Homo sapiens
ttagcgaatctcaat

SEQ ID NO: 1187931 - DNA, 15 bp, Homo sapiens
attagcgaatctcaa

SEQ ID NO: 1187932 - DNA, 15 bp, Homo sapiens
aattagcgaatctca

SEQ ID NO: 1187933 - DNA, 15 bp, Homo sapiens
taattagcgaatctc

SEQ ID NO: 1187934 - DNA, 15 bp, Homo sapiens
ctaattagcgaatct

SEQ ID NO: 1187935 - DNA, 15 bp, Homo sapiens
cctaattagcgaatc

SEQ ID NO: 1187936 - DNA, 15 bp, Homo sapiens
tcctaattagcgaat

SEQ ID NO: 1187937 - DNA, 15 bp, Homo sapiens
ttcctaattagcgaa

SEQ ID NO: 1187938 - DNA, 15 bp, Homo sapiens
gttcctaattagcga

SEQ ID NO: 1187939 - DNA, 15 bp, Homo sapiens
ggttcctaattagcg

SEQ ID NO: 1187940 - DNA, 15 bp, Homo sapiens
tggttcctaattagc

SEQ ID NO: 1187941 - DNA, 15 bp, Homo sapiens
gtggttcctaattag

SEQ ID NO: 1187942 - DNA, 15 bp, Homo sapiens
agtggttcctaatta

SEQ ID NO: 1187943 - DNA, 15 bp, Homo sapiens
cagtggttcctaatt

SEQ ID NO: 1187944 - DNA, 15 bp, Homo sapiens
tcagtggttcctaat

SEQ ID NO: 1187945 - DNA, 15 bp, Homo sapiens
atcagtggttcctaa

SEQ ID NO: 1187946 - DNA, 15 bp, Homo sapiens
catcagtggttccta

SEQ ID NO: 1187947 - DNA, 15 bp, Homo sapiens
acatcagtggttcct

SEQ ID NO: 1187948 - DNA, 15 bp, Homo sapiens
cacatcagtggttcc

SEQ ID NO: 1187949 - DNA, 15 bp, Homo sapiens
ccacatcagtggttc

SEQ ID NO: 1187950 - DNA, 15 bp, Homo sapiens
tccacatcagtggtt

SEQ ID NO: 1187951 - DNA, 15 bp, Homo sapiens
atccacatcagtggt

SEQ ID NO: 1187952 - DNA, 15 bp, Homo sapiens
catccacatcagtgg

SEQ ID NO: 1187953 - DNA, 15 bp, Homo sapiens
ccatccacatcagtg

SEQ ID NO: 1187954 - DNA, 15 bp, Homo sapiens
gccatccacatcagt

SEQ ID NO: 1187955 - DNA, 15 bp, Homo sapiens
agccatccacatcag

SEQ ID NO: 1187956 - DNA, 15 bp, Homo sapiens
gagccatccacatca

SEQ ID NO: 1187957 - DNA, 15 bp, Homo sapiens
tgagccatccacatc

SEQ ID NO: 1187958 - DNA, 15 bp, Homo sapiens
atgagccatccacat

SEQ ID NO: 1187959 - DNA, 15 bp, Homo sapiens
gatgagccatccaca

SEQ ID NO: 1187960 - DNA, 15 bp, Homo sapiens
tgatgagccatccac

SEQ ID NO: 1187961 - DNA, 15 bp, Homo sapiens
ttgatgagccatcca

SEQ ID NO: 1187962 - DNA, 15 bp, Homo sapiens
cttgatgagccatcc

SEQ ID NO: 1187963 - DNA, 15 bp, Homo sapiens
tcttgatgagccatc

SEQ ID NO: 1187964 - DNA, 15 bp, Homo sapiens
ttcttgatgagccat

SEQ ID NO: 1187965 - DNA, 15 bp, Homo sapiens
cttcttgatgagcca

SEQ ID NO: 1187966 - DNA, 15 bp, Homo sapiens
ccttcttgatgagcc

SEQ ID NO: 1187967 - DNA, 15 bp, Homo sapiens
accttcttgatgagc

SEQ ID NO: 1187968 - DNA, 15 bp, Homo sapiens
aaccttcttgatgag

SEQ ID NO: 1187969 - DNA, 15 bp, Homo sapiens
taaccttcttgatga

SEQ ID NO: 1187970 - DNA, 15 bp, Homo sapiens
ttaaccttcttgatg

SEQ ID NO: 1187971 - DNA, 15 bp, Homo sapiens
tttaaccttcttgat

SEQ ID NO: 1187972 - DNA, 15 bp, Homo sapiens
ctttaaccttcttga

SEQ ID NO: 1187973 - DNA, 15 bp, Homo sapiens
tctttaaccttcttg

SEQ ID NO: 1187974 - DNA, 15 bp, Homo sapiens
ctctttaaccttctt

SEQ ID NO: 1187975 - DNA, 15 bp, Homo sapiens
gctctttaaccttct

SEQ ID NO: 1187976 - DNA, 15 bp, Homo sapiens
agctctttaaccttc

SEQ ID NO: 1187977 - DNA, 15 bp, Homo sapiens
aagctctttaacctt

SEQ ID NO: 1187978 - DNA, 15 bp, Homo sapiens
caagctctttaacct

SEQ ID NO: 1187979 - DNA, 15 bp, Homo sapiens
tcaagctctttaacc

SEQ ID NO: 1187980 - DNA, 15 bp, Homo sapiens
ctcaagctctttaac

SEQ ID NO: 1187981 - DNA, 15 bp, Homo sapiens
cctcaagctctttaa

SEQ ID NO: 1187982 - DNA, 15 bp, Homo sapiens
tcctcaagctcttta

SEQ ID NO: 1187983 - DNA, 15 bp, Homo sapiens
ttcctcaagctcttt

SEQ ID NO: 1187984 - DNA, 15 bp, Homo sapiens
tttcctcaagctctt

SEQ ID NO: 1187985 - DNA, 15 bp, Homo sapiens
ttttcctcaagctct

SEQ ID NO: 1187986 - DNA, 15 bp, Homo sapiens
attttcctcaagctc

SEQ ID NO: 1187987 - DNA, 15 bp, Homo sapiens
cattttcctcaagct

SEQ ID NO: 1187988 - DNA, 15 bp, Homo sapiens
tcattttcctcaagc

SEQ ID NO: 1187989 - DNA, 15 bp, Homo sapiens
atcattttcctcaag

SEQ ID NO: 1187990 - DNA, 15 bp, Homo sapiens
tatcattttcctcaa

SEQ ID NO: 1187991 - DNA, 15 bp, Homo sapiens
ctatcattttcctca

SEQ ID NO: 1187992 - DNA, 15 bp, Homo sapiens
cctatcattttcctc

SEQ ID NO: 1187993 - DNA, 15 bp, Homo sapiens
ccctatcattttcct

SEQ ID NO: 1187994 - DNA, 15 bp, Homo sapiens
cccctatcattttcc

SEQ ID NO: 1187995 - DNA, 15 bp, Homo sapiens
tcccctatcattttc

SEQ ID NO: 1187996 - DNA, 15 bp, Homo sapiens
ctcccctatcatttt

SEQ ID NO: 1187997 - DNA, 15 bp, Homo sapiens
tctcccctatcattt

SEQ ID NO: 1187998 - DNA, 15 bp, Homo sapiens
ctctcccctatcatt

SEQ ID NO: 1187999 - DNA, 15 bp, Homo sapiens
cctctcccctatcat

SEQ ID NO: 1188000 - DNA, 15 bp, Homo sapiens
tcctctcccctatca

SEQ ID NO: 1188001 - DNA, 15 bp, Homo sapiens
ctcctctcccctatc

SEQ ID NO: 1188002 - DNA, 15 bp, Homo sapiens
gctcctctcccctat

SEQ ID NO: 1188003 - DNA, 15 bp, Homo sapiens
tgctcctctccccta

SEQ ID NO: 1188004 - DNA, 15 bp, Homo sapiens
ttgctcctctcccct

SEQ ID NO: 1188005 - DNA, 15 bp, Homo sapiens
tttgctcctctcccc

SEQ ID NO: 1188006 - DNA, 15 bp, Homo sapiens
ttttgctcctctccc

SEQ ID NO: 1188007 - DNA, 15 bp, Homo sapiens
tttttgctcctctcc

SEQ ID NO: 1188008 - DNA, 15 bp, Homo sapiens
ctttttgctcctctc

SEQ ID NO: 1188009 - DNA, 15 bp, Homo sapiens
tctttttgctcctct

SEQ ID NO: 1188010 - DNA, 15 bp, Homo sapiens
ttctttttgctcctc

SEQ ID NO: 1188011 - DNA, 15 bp, Homo sapiens
attctttttgctcct

SEQ ID NO: 1188012 - DNA, 15 bp, Homo sapiens
cattctttttgctcc

SEQ ID NO: 1188013 - DNA, 15 bp, Homo sapiens
tcattctttttgctc

SEQ ID NO: 1188014 - DNA, 15 bp, Homo sapiens
gtcattctttttgct

SEQ ID NO: 1188015 - DNA, 15 bp, Homo sapiens
agtcattctttttgc

SEQ ID NO: 1188016 - DNA, 15 bp, Homo sapiens
gagtcattctttttg

SEQ ID NO: 1188017 - DNA, 15 bp, Homo sapiens
agagtcattcttttt

SEQ ID NO: 1188018 - DNA, 15 bp, Homo sapiens
cagagtcattctttt

SEQ ID NO: 1188019 - DNA, 15 bp, Homo sapiens
ccagagtcattcttt

SEQ ID NO: 1188020 - DNA, 15 bp, Homo sapiens
accagagtcattctt

SEQ ID NO: 1188021 - DNA, 15 bp, Homo sapiens
gaccagagtcattct

SEQ ID NO: 1188022 - DNA, 15 bp, Homo sapiens
ggaccagagtcattc

SEQ ID NO: 1188023 - DNA, 15 bp, Homo sapiens
tggaccagagtcatt

SEQ ID NO: 1188024 - DNA, 15 bp, Homo sapiens
ctggaccagagtcat

SEQ ID NO: 1188025 - DNA, 15 bp, Homo sapiens
tctggaccagagtca

SEQ ID NO: 1188026 - DNA, 15 bp, Homo sapiens
atctggaccagagtc

SEQ ID NO: 1188027 - DNA, 15 bp, Homo sapiens
catctggaccagagt

SEQ ID NO: 1188028 - DNA, 15 bp, Homo sapiens
gcatctggaccagag

SEQ ID NO: 1188029 - DNA, 15 bp, Homo sapiens
agcatctggaccaga

SEQ ID NO: 1188030 - DNA, 15 bp, Homo sapiens
tagcatctggaccag

SEQ ID NO: 1188031 - DNA, 15 bp, Homo sapiens
atagcatctggacca

SEQ ID NO: 1188032 - DNA, 15 bp, Homo sapiens
tatagcatctggacc

SEQ ID NO: 1188033 - DNA, 15 bp, Homo sapiens
ttatagcatctggac

SEQ ID NO: 1188034 - DNA, 15 bp, Homo sapiens
tttatagcatctgga

SEQ ID NO: 1188035 - DNA, 15 bp, Homo sapiens
ttttatagcatctgg

SEQ ID NO: 1188036 - DNA, 15 bp, Homo sapiens
attttatagcatctg

SEQ ID NO: 1188037 - DNA, 15 bp, Homo sapiens
gattttatagcatct

SEQ ID NO: 1188038 - DNA, 15 bp, Homo sapiens
tgattttatagcatc

SEQ ID NO: 1188039 - DNA, 15 bp, Homo sapiens
atgattttatagcat

SEQ ID NO: 1188040 - DNA, 15 bp, Homo sapiens
gatgattttatagca

SEQ ID NO: 1188041 - DNA, 15 bp, Homo sapiens
tgatgattttatagc

SEQ ID NO: 1188042 - DNA, 15 bp, Homo sapiens
ttgatgattttatag

SEQ ID NO: 1188043 - DNA, 15 bp, Homo sapiens
tttgatgattttata

SEQ ID NO: 1188044 - DNA, 15 bp, Homo sapiens
ctttgatgattttat

SEQ ID NO: 1188045 - DNA, 15 bp, Homo sapiens
cctttgatgatttta

SEQ ID NO: 1188046 - DNA, 15 bp, Homo sapiens
gcctttgatgatttt

SEQ ID NO: 1188047 - DNA, 15 bp, Homo sapiens
tgcctttgatgattt

SEQ ID NO: 1188048 - DNA, 15 bp, Homo sapiens
ttgcctttgatgatt

SEQ ID NO: 1188049 - DNA, 15 bp, Homo sapiens
cttgcctttgatgat

SEQ ID NO: 1188050 - DNA, 15 bp, Homo sapiens
tcttgcctttgatga

SEQ ID NO: 1188051 - DNA, 15 bp, Homo sapiens
ctcttgcctttgatg

SEQ ID NO: 1188052 - DNA, 15 bp, Homo sapiens
cctcttgcctttgat

SEQ ID NO: 1188053 - DNA, 15 bp, Homo sapiens
tcctcttgcctttga

SEQ ID NO: 1188054 - DNA, 15 bp, Homo sapiens
atcctcttgcctttg

SEQ ID NO: 1188055 - DNA, 15 bp, Homo sapiens
catcctcttgccttt

SEQ ID NO: 1188056 - DNA, 15 bp, Homo sapiens
acatcctcttgcctt

SEQ ID NO: 1188057 - DNA, 15 bp, Homo sapiens
aacatcctcttgcct

SEQ ID NO: 1188058 - DNA, 15 bp, Homo sapiens
aaacatcctcttgcc

SEQ ID NO: 1188059 - DNA, 15 bp, Homo sapiens
aaaacatcctcttgc

SEQ ID NO: 1188060 - DNA, 15 bp, Homo sapiens
taaaacatcctcttg

SEQ ID NO: 1188061 - DNA, 15 bp, Homo sapiens
ttaaaacatcctctt

SEQ ID NO: 1188062 - DNA, 15 bp, Homo sapiens
tttaaaacatcctct

SEQ ID NO: 1188063 - DNA, 15 bp, Homo sapiens
gtttaaaacatcctc

SEQ ID NO: 1188064 - DNA, 15 bp, Homo sapiens
tgtttaaaacatcct

SEQ ID NO: 1188065 - DNA, 15 bp, Homo sapiens
atgtttaaaacatcc

SEQ ID NO: 1188066 - DNA, 15 bp, Homo sapiens
gatgtttaaaacatc

SEQ ID NO: 1188067 - DNA, 15 bp, Homo sapiens
tgatgtttaaaacat

SEQ ID NO: 1188068 - DNA, 15 bp, Homo sapiens
gtgatgtttaaaaca

SEQ ID NO: 1188069 - DNA, 15 bp, Homo sapiens
tgtgatgtttaaaac

SEQ ID NO: 1188070 - DNA, 15 bp, Homo sapiens
ctgtgatgtttaaaa

SEQ ID NO: 1188071 - DNA, 15 bp, Homo sapiens
tctgtgatgtttaaa

SEQ ID NO: 1188072 - DNA, 15 bp, Homo sapiens
ttctgtgatgtttaa

SEQ ID NO: 1188073 - DNA, 15 bp, Homo sapiens
cttctgtgatgttta

SEQ ID NO: 1188074 - DNA, 15 bp, Homo sapiens
tcttctgtgatgttt

SEQ ID NO: 1188075 - DNA, 15 bp, Homo sapiens
gtcttctgtgatgtt

SEQ ID NO: 1188076 - DNA, 15 bp, Homo sapiens
tgtcttctgtgatgt

SEQ ID NO: 1188077 - DNA, 15 bp, Homo sapiens
ttgtcttctgtgatg

SEQ ID NO: 1188078 - DNA, 15 bp, Homo sapiens
gttgtcttctgtgat

SEQ ID NO: 1188079 - DNA, 15 bp, Homo sapiens
tgttgtcttctgtga

SEQ ID NO: 1188080 - DNA, 15 bp, Homo sapiens
ttgttgtcttctgtg

SEQ ID NO: 1188081 - DNA, 15 bp, Homo sapiens
attgttgtcttctgt

SEQ ID NO: 1188082 - DNA, 15 bp, Homo sapiens
cattgttgtcttctg

SEQ ID NO: 1188083 - DNA, 15 bp, Homo sapiens
tcattgttgtcttct

SEQ ID NO: 1188084 - DNA, 15 bp, Homo sapiens
ctcattgttgtcttc

SEQ ID NO: 1188085 - DNA, 15 bp, Homo sapiens
cctcattgttgtctt

SEQ ID NO: 1188086 - DNA, 15 bp, Homo sapiens
tcctcattgttgtct

SEQ ID NO: 1188087 - DNA, 15 bp, Homo sapiens
ttcctcattgttgtc

SEQ ID NO: 1188088 - DNA, 15 bp, Homo sapiens
gttcctcattgttgt

SEQ ID NO: 1188089 - DNA, 15 bp, Homo sapiens
cgttcctcattgttg

SEQ ID NO: 1188090 - DNA, 15 bp, Homo sapiens
ccgttcctcattgtt

SEQ ID NO: 1188091 - DNA, 15 bp, Homo sapiens
gccgttcctcattgt

SEQ ID NO: 1188092 - DNA, 15 bp, Homo sapiens
tgccgttcctcattg

SEQ ID NO: 1188093 - DNA, 15 bp, Homo sapiens
atgccgttcctcatt

SEQ ID NO: 1188094 - DNA, 15 bp, Homo sapiens
aatgccgttcctcat

SEQ ID NO: 1188095 - DNA, 15 bp, Homo sapiens
caatgccgttcctca

SEQ ID NO: 1188096 - DNA, 15 bp, Homo sapiens
tcaatgccgttcctc

SEQ ID NO: 1188097 - DNA, 15 bp, Homo sapiens
atcaatgccgttcct

SEQ ID NO: 1188098 - DNA, 15 bp, Homo sapiens
tatcaatgccgttcc

SEQ ID NO: 1188099 - DNA, 15 bp, Homo sapiens
ctatcaatgccgttc

SEQ ID NO: 1188100 - DNA, 15 bp, Homo sapiens
gctatcaatgccgtt

SEQ ID NO: 1188101 - DNA, 15 bp, Homo sapiens
tgctatcaatgccgt

SEQ ID NO: 1188102 - DNA, 15 bp, Homo sapiens
atgctatcaatgccg

SEQ ID NO: 1188103 - DNA, 15 bp, Homo sapiens
tatgctatcaatgcc

SEQ ID NO: 1188104 - DNA, 15 bp, Homo sapiens
ttatgctatcaatgc

SEQ ID NO: 1188105 - DNA, 15 bp, Homo sapiens
cttatgctatcaatg

SEQ ID NO: 1188106 - DNA, 15 bp, Homo sapiens
gcttatgctatcaat

SEQ ID NO: 1188107 - DNA, 15 bp, Homo sapiens
tgcttatgctatcaa

SEQ ID NO: 1188108 - DNA, 15 bp, Homo sapiens
ttgcttatgctatca

SEQ ID NO: 1188109 - DNA, 15 bp, Homo sapiens
tttgcttatgctatc

SEQ ID NO: 1188110 - DNA, 15 bp, Homo sapiens
gtttgcttatgctat

SEQ ID NO: 1188111 - DNA, 15 bp, Homo sapiens
agtttgcttatgcta

SEQ ID NO: 1188112 - DNA, 15 bp, Homo sapiens
aagtttgcttatgct

SEQ ID NO: 1188113 - DNA, 15 bp, Homo sapiens
gaagtttgcttatgc

SEQ ID NO: 1188114 - DNA, 15 bp, Homo sapiens
tgaagtttgcttatg

SEQ ID NO: 1188115 - DNA, 15 bp, Homo sapiens
atgaagtttgcttat

SEQ ID NO: 1188116 - DNA, 15 bp, Homo sapiens
catgaagtttgctta

SEQ ID NO: 1188117 - DNA, 15 bp, Homo sapiens
tcatgaagtttgctt

SEQ ID NO: 1188118 - DNA, 15 bp, Homo sapiens
atcatgaagtttgct

SEQ ID NO: 1188119 - DNA, 15 bp, Homo sapiens
aatcatgaagtttgc

SEQ ID NO: 1188120 - DNA, 15 bp, Homo sapiens
aaatcatgaagtttg

SEQ ID NO: 1188121 - DNA, 15 bp, Homo sapiens
caaatcatgaagttt

SEQ ID NO: 1188122 - DNA, 15 bp, Homo sapiens
acaaatcatgaagtt

SEQ ID NO: 1188123 - DNA, 15 bp, Homo sapiens
tacaaatcatgaagt

SEQ ID NO: 1188124 - DNA, 15 bp, Homo sapiens
gtacaaatcatgaag

SEQ ID NO: 1188125 - DNA, 15 bp, Homo sapiens
tgtacaaatcatgaa

SEQ ID NO: 1188126 - DNA, 15 bp, Homo sapiens
ctgtacaaatcatga

SEQ ID NO: 1188127 - DNA, 15 bp, Homo sapiens
tctgtacaaatcatg

SEQ ID NO: 1188128 - DNA, 15 bp, Homo sapiens
ctctgtacaaatcat

SEQ ID NO: 1188129 - DNA, 15 bp, Homo sapiens
cctctgtacaaatca

SEQ ID NO: 1188130 - DNA, 15 bp, Homo sapiens
tcctctgtacaaatc

SEQ ID NO: 1188131 - DNA, 15 bp, Homo sapiens
ttcctctgtacaaat

SEQ ID NO: 1188132 - DNA, 15 bp, Homo sapiens
tttcctctgtacaaa

SEQ ID NO: 1188133 - DNA, 15 bp, Homo sapiens
ttttcctctgtacaa

SEQ ID NO: 1188134 - DNA, 15 bp, Homo sapiens
cttttcctctgtaca

SEQ ID NO: 1188135 - DNA, 15 bp, Homo sapiens
acttttcctctgtac

SEQ ID NO: 1188136 - DNA, 15 bp, Homo sapiens
tacttttcctctgta

SEQ ID NO: 1188137 - DNA, 15 bp, Homo sapiens
ctacttttcctctgt

SEQ ID NO: 1188138 - DNA, 15 bp, Homo sapiens
tctacttttcctctg

SEQ ID NO: 1188139 - DNA, 15 bp, Homo sapiens
atctacttttcctct

SEQ ID NO: 1188140 - DNA, 15 bp, Homo sapiens
catctacttttcctc

SEQ ID NO: 1188141 - DNA, 15 bp, Homo sapiens
ccatctacttttcct

SEQ ID NO: 1188142 - DNA, 15 bp, Homo sapiens
gccatctacttttcc

SEQ ID NO: 1188143 - DNA, 15 bp, Homo sapiens
ggccatctacttttc

SEQ ID NO: 1188144 - DNA, 15 bp, Homo sapiens
aggccatctactttt

SEQ ID NO: 1188145 - DNA, 15 bp, Homo sapiens
aaggccatctacttt

SEQ ID NO: 1188146 - DNA, 15 bp, Homo sapiens
caaggccatctactt

SEQ ID NO: 1188147 - DNA, 15 bp, Homo sapiens
tcaaggccatctact

SEQ ID NO: 1188148 - DNA, 15 bp, Homo sapiens
ttcaaggccatctac

SEQ ID NO: 1188149 - DNA, 15 bp, Homo sapiens
cttcaaggccatcta

SEQ ID NO: 1188150 - DNA, 15 bp, Homo sapiens
tcttcaaggccatct

SEQ ID NO: 1188151 - DNA, 15 bp, Homo sapiens
ctcttcaaggccatc

SEQ ID NO: 1188152 - DNA, 15 bp, Homo sapiens
actcttcaaggccat

SEQ ID NO: 1188153 - DNA, 15 bp, Homo sapiens
tactcttcaaggcca

SEQ ID NO: 1188154 - DNA, 15 bp, Homo sapiens
ttactcttcaaggcc

SEQ ID NO: 1188155 - DNA, 15 bp, Homo sapiens
cttactcttcaaggc

SEQ ID NO: 1188156 - DNA, 15 bp, Homo sapiens
acttactcttcaagg

SEQ ID NO: 1188157 - DNA, 15 bp, Homo sapiens
cacttactcttcaag

SEQ ID NO: 1188158 - DNA, 15 bp, Homo sapiens
ccacttactcttcaa

SEQ ID NO: 1188159 - DNA, 15 bp, Homo sapiens
accacttactcttca

SEQ ID NO: 1188160 - DNA, 15 bp, Homo sapiens
taccacttactcttc

SEQ ID NO: 1188161 - DNA, 15 bp, Homo sapiens
ttaccacttactctt

SEQ ID NO: 1188162 - DNA, 15 bp, Homo sapiens
cttaccacttactct

SEQ ID NO: 1188163 - DNA, 15 bp, Homo sapiens
ccttaccacttactc

SEQ ID NO: 1188164 - DNA, 15 bp, Homo sapiens
tccttaccacttact

SEQ ID NO: 1188165 - DNA, 15 bp, Homo sapiens
ctccttaccacttac

SEQ ID NO: 1188166 - DNA, 15 bp, Homo sapiens
cctccttaccactta

SEQ ID NO: 1188167 - DNA, 15 bp, Homo sapiens
ccctccttaccactt

SEQ ID NO: 1188168 - DNA, 15 bp, Homo sapiens
cccctccttaccact

SEQ ID NO: 1188169 - DNA, 15 bp, Homo sapiens
gcccctccttaccac

SEQ ID NO: 1188170 - DNA, 15 bp, Homo sapiens
cgcccctccttacca

SEQ ID NO: 1188171 - DNA, 15 bp, Homo sapiens
tcgcccctccttacc

SEQ ID NO: 1188172 - DNA, 15 bp, Homo sapiens
ctcgcccctccttac

SEQ ID NO: 1188173 - DNA, 15 bp, Homo sapiens
actcgcccctcctta

SEQ ID NO: 1188174 - DNA, 15 bp, Homo sapiens
tactcgcccctcctt

SEQ ID NO: 1188175 - DNA, 15 bp, Homo sapiens
atactcgcccctcct

SEQ ID NO: 1188176 - DNA, 15 bp, Homo sapiens
tatactcgcccctcc

SEQ ID NO: 1188177 - DNA, 15 bp, Homo sapiens
ttatactcgcccctc

SEQ ID NO: 1188178 - DNA, 15 bp, Homo sapiens
cttatactcgcccct

SEQ ID NO: 1188179 - DNA, 15 bp, Homo sapiens
tcttatactcgcccc

SEQ ID NO: 1188180 - DNA, 15 bp, Homo sapiens
gtcttatactcgccc

SEQ ID NO: 1188181 - DNA, 15 bp, Homo sapiens
tgtcttatactcgcc

SEQ ID NO: 1188182 - DNA, 15 bp, Homo sapiens
atgtcttatactcgc

SEQ ID NO: 1188183 - DNA, 15 bp, Homo sapiens
catgtcttatactcg

SEQ ID NO: 1188184 - DNA, 15 bp, Homo sapiens
gcatgtcttatactc

SEQ ID NO: 1188185 - DNA, 15 bp, Homo sapiens
ggcatgtcttatact

SEQ ID NO: 1188186 - DNA, 15 bp, Homo sapiens
tggcatgtcttatac

SEQ ID NO: 1188187 - DNA, 15 bp, Homo sapiens
ttggcatgtcttata

SEQ ID NO: 1188188 - DNA, 15 bp, Homo sapiens
gttggcatgtcttat

SEQ ID NO: 1188189 - DNA, 15 bp, Homo sapiens
tgttggcatgtctta

SEQ ID NO: 1188190 - DNA, 15 bp, Homo sapiens
atgttggcatgtctt

SEQ ID NO: 1188191 - DNA, 15 bp, Homo sapiens
aatgttggcatgtct

SEQ ID NO: 1188192 - DNA, 15 bp, Homo sapiens
aaatgttggcatgtc

SEQ ID NO: 1188193 - DNA, 15 bp, Homo sapiens
aaaatgttggcatgt

SEQ ID NO: 1188194 - DNA, 15 bp, Homo sapiens
aaaaatgttggcatg

SEQ ID NO: 1188195 - DNA, 15 bp, Homo sapiens
aaaaaatgttggcat

SEQ ID NO: 1188196 - DNA, 15 bp, Homo sapiens
caaaaaatgttggca

SEQ ID NO: 1188197 - DNA, 15 bp, Homo sapiens
gcaaaaaatgttggc

SEQ ID NO: 1188198 - DNA, 15 bp, Homo sapiens
agcaaaaaatgttgg

SEQ ID NO: 1188199 - DNA, 15 bp, Homo sapiens
aagcaaaaaatgttg

SEQ ID NO: 1188200 - DNA, 15 bp, Homo sapiens
taagcaaaaaatgtt

SEQ ID NO: 1188201 - DNA, 15 bp, Homo sapiens
gtaagcaaaaaatgt

SEQ ID NO: 1188202 - DNA, 15 bp, Homo sapiens
agtaagcaaaaaatg

SEQ ID NO: 1188203 - DNA, 15 bp, Homo sapiens
gagtaagcaaaaaat

SEQ ID NO: 1188204 - DNA, 15 bp, Homo sapiens
agagtaagcaaaaaa

SEQ ID NO: 1188205 - DNA, 15 bp, Homo sapiens
tagagtaagcaaaaa

SEQ ID NO: 1188206 - DNA, 15 bp, Homo sapiens
gtagagtaagcaaaa

SEQ ID NO: 1188207 - DNA, 15 bp, Homo sapiens
tgtagagtaagcaaa

SEQ ID NO: 1188208 - DNA, 15 bp, Homo sapiens
ttgtagagtaagcaa

SEQ ID NO: 1188209 - DNA, 15 bp, Homo sapiens
tttgtagagtaagca

SEQ ID NO: 1188210 - DNA, 15 bp, Homo sapiens
atttgtagagtaagc

SEQ ID NO: 1188211 - DNA, 15 bp, Homo sapiens
catttgtagagtaag

SEQ ID NO: 1188212 - DNA, 15 bp, Homo sapiens
ccatttgtagagtaa

SEQ ID NO: 1188213 - DNA, 15 bp, Homo sapiens
cccatttgtagagta

SEQ ID NO: 1188214 - DNA, 15 bp, Homo sapiens
tcccatttgtagagt

SEQ ID NO: 1188215 - DNA, 15 bp, Homo sapiens
atcccatttgtagag

SEQ ID NO: 1188216 - DNA, 15 bp, Homo sapiens
tatcccatttgtaga

SEQ ID NO: 1188217 - DNA, 15 bp, Homo sapiens
ttatcccatttgtag

SEQ ID NO: 1188218 - DNA, 15 bp, Homo sapiens
tttatcccatttgta

SEQ ID NO: 1188219 - DNA, 15 bp, Homo sapiens
ctttatcccatttgt

SEQ ID NO: 1188220 - DNA, 15 bp, Homo sapiens
tctttatcccatttg

SEQ ID NO: 1188221 - DNA, 15 bp, Homo sapiens
ctctttatcccattt

SEQ ID NO: 1188222 - DNA, 15 bp, Homo sapiens
gctctttatcccatt

SEQ ID NO: 1188223 - DNA, 15 bp, Homo sapiens
tgctctttatcccat

SEQ ID NO: 1188224 - DNA, 15 bp, Homo sapiens
ctgctctttatccca

SEQ ID NO: 1188225 - DNA, 15 bp, Homo sapiens
gctgctctttatccc

SEQ ID NO: 1188226 - DNA, 15 bp, Homo sapiens
ggctgctctttatcc

SEQ ID NO: 1188227 - DNA, 15 bp, Homo sapiens
tggctgctctttatc

SEQ ID NO: 1188228 - DNA, 15 bp, Homo sapiens
atggctgctctttat

SEQ ID NO: 1188229 - DNA, 15 bp, Homo sapiens
catggctgctcttta

SEQ ID NO: 1188230 - DNA, 15 bp, Homo sapiens
gcatggctgctcttt

SEQ ID NO: 1188231 - DNA, 15 bp, Homo sapiens
ggcatggctgctctt

SEQ ID NO: 1188232 - DNA, 15 bp, Homo sapiens
aggcatggctgctct

SEQ ID NO: 1188233 - DNA, 15 bp, Homo sapiens
taggcatggctgctc

SEQ ID NO: 1188234 - DNA, 15 bp, Homo sapiens
ttaggcatggctgct

SEQ ID NO: 1188235 - DNA, 15 bp, Homo sapiens
attaggcatggctgc

SEQ ID NO: 1188236 - DNA, 15 bp, Homo sapiens
cattaggcatggctg

SEQ ID NO: 1188237 - DNA, 15 bp, Homo sapiens
ccattaggcatggct

SEQ ID NO: 1188238 - DNA, 15 bp, Homo sapiens
accattaggcatggc

SEQ ID NO: 1188239 - DNA, 15 bp, Homo sapiens
gaccattaggcatgg

SEQ ID NO: 1188240 - DNA, 15 bp, Homo sapiens
tgaccattaggcatg

SEQ ID NO: 1188241 - DNA, 15 bp, Homo sapiens
atgaccattaggcat

SEQ ID NO: 1188242 - DNA, 15 bp, Homo sapiens
aatgaccattaggca

SEQ ID NO: 1188243 - DNA, 15 bp, Homo sapiens
caatgaccattaggc

SEQ ID NO: 1188244 - DNA, 15 bp, Homo sapiens
tcaatgaccattagg

SEQ ID NO: 1188245 - DNA, 15 bp, Homo sapiens
ttcaatgaccattag

SEQ ID NO: 1188246 - DNA, 15 bp, Homo sapiens
cttcaatgaccatta

SEQ ID NO: 1188247 - DNA, 15 bp, Homo sapiens
tcttcaatgaccatt

SEQ ID NO: 1188248 - DNA, 15 bp, Homo sapiens
atcttcaatgaccat

SEQ ID NO: 1188249 - DNA, 15 bp, Homo sapiens
tatcttcaatgacca

SEQ ID NO: 1188250 - DNA, 15 bp, Homo sapiens
gtatcttcaatgacc

SEQ ID NO: 1188251 - DNA, 15 bp, Homo sapiens
cgtatcttcaatgac

SEQ ID NO: 1188252 - DNA, 15 bp, Homo sapiens
gcgtatcttcaatga

SEQ ID NO: 1188253 - DNA, 15 bp, Homo sapiens
agcgtatcttcaatg

SEQ ID NO: 1188254 - DNA, 15 bp, Homo sapiens
tagcgtatcttcaat

SEQ ID NO: 1188255 - DNA, 15 bp, Homo sapiens
atagcgtatcttcaa

SEQ ID NO: 1188256 - DNA, 15 bp, Homo sapiens
gatagcgtatcttca

SEQ ID NO: 1188257 - DNA, 15 bp, Homo sapiens
tgatagcgtatcttc

SEQ ID NO: 1188258 - DNA, 15 bp, Homo sapiens
gtgatagcgtatctt

SEQ ID NO: 1188259 - DNA, 15 bp, Homo sapiens
ggtgatagcgtatct

SEQ ID NO: 1188260 - DNA, 15 bp, Homo sapiens
tggtgatagcgtatc

SEQ ID NO: 1188261 - DNA, 15 bp, Homo sapiens
ctggtgatagcgtat

SEQ ID NO: 1188262 - DNA, 15 bp, Homo sapiens
cctggtgatagcgta

SEQ ID NO: 1188263 - DNA, 15 bp, Homo sapiens
ccctggtgatagcgt

SEQ ID NO: 1188264 - DNA, 15 bp, Homo sapiens
tccctggtgatagcg

SEQ ID NO: 1188265 - DNA, 15 bp, Homo sapiens
ttccctggtgatagc

SEQ ID NO: 1188266 - DNA, 15 bp, Homo sapiens
tttccctggtgatag

SEQ ID NO: 1188267 - DNA, 15 bp, Homo sapiens
atttccctggtgata

SEQ ID NO: 1188268 - DNA, 15 bp, Homo sapiens
catttccctggtgat

SEQ ID NO: 1188269 - DNA, 15 bp, Homo sapiens
acatttccctggtga

SEQ ID NO: 1188270 - DNA, 15 bp, Homo sapiens
tacatttccctggtg

SEQ ID NO: 1188271 - DNA, 15 bp, Homo sapiens
ttacatttccctggt

SEQ ID NO: 1188272 - DNA, 15 bp, Homo sapiens
attacatttccctgg

SEQ ID NO: 1188273 - DNA, 15 bp, Homo sapiens
aattacatttccctg

SEQ ID NO: 1188274 - DNA, 15 bp, Homo sapiens
aaattacatttccct

SEQ ID NO: 1188275 - DNA, 15 bp, Homo sapiens
caaattacatttccc

SEQ ID NO: 1188276 - DNA, 15 bp, Homo sapiens
ccaaattacatttcc

SEQ ID NO: 1188277 - DNA, 15 bp, Homo sapiens
tccaaattacatttc

SEQ ID NO: 1188278 - DNA, 15 bp, Homo sapiens
ctccaaattacattt

SEQ ID NO: 1188279 - DNA, 15 bp, Homo sapiens
tctccaaattacatt

SEQ ID NO: 1188280 - DNA, 15 bp, Homo sapiens
ttctccaaattacat

SEQ ID NO: 1188281 - DNA, 15 bp, Homo sapiens
tttctccaaattaca

SEQ ID NO: 1188282 - DNA, 15 bp, Homo sapiens
ctttctccaaattac

SEQ ID NO: 1188283 - DNA, 15 bp, Homo sapiens
cctttctccaaatta

SEQ ID NO: 1188284 - DNA, 15 bp, Homo sapiens
tcctttctccaaatt

SEQ ID NO: 1188285 - DNA, 15 bp, Homo sapiens
ttcctttctccaaat

SEQ ID NO: 1188286 - DNA, 15 bp, Homo sapiens
attcctttctccaaa

SEQ ID NO: 1188287 - DNA, 15 bp, Homo sapiens
tattcctttctccaa

SEQ ID NO: 1188288 - DNA, 15 bp, Homo sapiens
atattcctttctcca

SEQ ID NO: 1188289 - DNA, 15 bp, Homo sapiens
tatattcctttctcc

SEQ ID NO: 1188290 - DNA, 15 bp, Homo sapiens
ttatattcctttctc

SEQ ID NO: 1188291 - DNA, 15 bp, Homo sapiens
cttatattcctttct

SEQ ID NO: 1188292 - DNA, 15 bp, Homo sapiens
tcttatattcctttc

SEQ ID NO: 1188293 - DNA, 15 bp, Homo sapiens
ctcttatattccttt

SEQ ID NO: 1188294 - DNA, 15 bp, Homo sapiens
cctcttatattcctt

SEQ ID NO: 1188295 - DNA, 15 bp, Homo sapiens
tcctcttatattcct

SEQ ID NO: 1188296 - DNA, 15 bp, Homo sapiens
ttcctcttatattcc

SEQ ID NO: 1188297 - DNA, 15 bp, Homo sapiens
tttcctcttatattc

SEQ ID NO: 1188298 - DNA, 15 bp, Homo sapiens
ctttcctcttatatt

SEQ ID NO: 1188299 - DNA, 15 bp, Homo sapiens
cctttcctcttatat

SEQ ID NO: 1188300 - DNA, 15 bp, Homo sapiens
acctttcctcttata

SEQ ID NO: 1188301 - DNA, 15 bp, Homo sapiens
cacctttcctcttat

SEQ ID NO: 1188302 - DNA, 15 bp, Homo sapiens
gcacctttcctctta

SEQ ID NO: 1188303 - DNA, 15 bp, Homo sapiens
tgcacctttcctctt

SEQ ID NO: 1188304 - DNA, 15 bp, Homo sapiens
atgcacctttcctct

SEQ ID NO: 1188305 - DNA, 15 bp, Homo sapiens
catgcacctttcctc

SEQ ID NO: 1188306 - DNA, 15 bp, Homo sapiens
ccatgcacctttcct

SEQ ID NO: 1188307 - DNA, 15 bp, Homo sapiens
tccatgcacctttcc

SEQ ID NO: 1188308 - DNA, 15 bp, Homo sapiens
atccatgcacctttc

SEQ ID NO: 1188309 - DNA, 15 bp, Homo sapiens
tatccatgcaccttt

SEQ ID NO: 1188310 - DNA, 15 bp, Homo sapiens
atatccatgcacctt

SEQ ID NO: 1188311 - DNA, 15 bp, Homo sapiens
tatatccatgcacct

SEQ ID NO: 1188312 - DNA, 15 bp, Homo sapiens
ctatatccatgcacc

SEQ ID NO: 1188313 - DNA, 15 bp, Homo sapiens
cctatatccatgcac

SEQ ID NO: 1188314 - DNA, 15 bp, Homo sapiens
ccctatatccatgca

SEQ ID NO: 1188315 - DNA, 15 bp, Homo sapiens
accctatatccatgc

SEQ ID NO: 1188316 - DNA, 15 bp, Homo sapiens
caccctatatccatg

SEQ ID NO: 1188317 - DNA, 15 bp, Homo sapiens
ccaccctatatccat

SEQ ID NO: 1188318 - DNA, 15 bp, Homo sapiens
accaccctatatcca

SEQ ID NO: 1188319 - DNA, 15 bp, Homo sapiens
aaccaccctatatcc

SEQ ID NO: 1188320 - DNA, 15 bp, Homo sapiens
aaaccaccctatatc

SEQ ID NO: 1188321 - DNA, 15 bp, Homo sapiens
caaaccaccctatat

SEQ ID NO: 1188322 - DNA, 15 bp, Homo sapiens
acaaaccaccctata

SEQ ID NO: 1188323 - DNA, 15 bp, Homo sapiens
aacaaaccaccctat

SEQ ID NO: 1188324 - DNA, 15 bp, Homo sapiens
aaacaaaccacccta

SEQ ID NO: 1188325 - DNA, 15 bp, Homo sapiens
taaacaaaccaccct

SEQ ID NO: 1188326 - DNA, 15 bp, Homo sapiens
gtaaacaaaccaccc

SEQ ID NO: 1188327 - DNA, 15 bp, Homo sapiens
tgtaaacaaaccacc

SEQ ID NO: 1188328 - DNA, 15 bp, Homo sapiens
ttgtaaacaaaccac

SEQ ID NO: 1188329 - DNA, 15 bp, Homo sapiens
cttgtaaacaaacca

SEQ ID NO: 1188330 - DNA, 15 bp, Homo sapiens
tcttgtaaacaaacc

SEQ ID NO: 1188331 - DNA, 15 bp, Homo sapiens
ttcttgtaaacaaac

SEQ ID NO: 1188332 - DNA, 15 bp, Homo sapiens
tttcttgtaaacaaa

SEQ ID NO: 1188333 - DNA, 15 bp, Homo sapiens
ttttcttgtaaacaa

SEQ ID NO: 1188334 - DNA, 15 bp, Homo sapiens
attttcttgtaaaca

SEQ ID NO: 1188335 - DNA, 15 bp, Homo sapiens
cattttcttgtaaac

SEQ ID NO: 1188336 - DNA, 15 bp, Homo sapiens
tcattttcttgtaaa

SEQ ID NO: 1188337 - DNA, 15 bp, Homo sapiens
ttcattttcttgtaa

SEQ ID NO: 1188338 - DNA, 15 bp, Homo sapiens
cttcattttcttgta

SEQ ID NO: 1188339 - DNA, 15 bp, Homo sapiens
ccttcattttcttgt

SEQ ID NO: 1188340 - DNA, 15 bp, Homo sapiens
accttcattttcttg

SEQ ID NO: 1188341 - DNA, 15 bp, Homo sapiens
gaccttcattttctt

SEQ ID NO: 1188342 - DNA, 15 bp, Homo sapiens
tgaccttcattttct

SEQ ID NO: 1188343 - DNA, 15 bp, Homo sapiens
ctgaccttcattttc

SEQ ID NO: 1188344 - DNA, 15 bp, Homo sapiens
cctgaccttcatttt

SEQ ID NO: 1188345 - DNA, 15 bp, Homo sapiens
gcctgaccttcattt

SEQ ID NO: 1188346 - DNA, 15 bp, Homo sapiens
ggcctgaccttcatt

SEQ ID NO: 1188347 - DNA, 15 bp, Homo sapiens
tggcctgaccttcat

SEQ ID NO: 1188348 - DNA, 15 bp, Homo sapiens
ctggcctgaccttca

SEQ ID NO: 1188349 - DNA, 15 bp, Homo sapiens
cctggcctgaccttc

SEQ ID NO: 1188350 - DNA, 15 bp, Homo sapiens
gcctggcctgacctt

SEQ ID NO: 1188351 - DNA, 15 bp, Homo sapiens
tgcctggcctgacct

SEQ ID NO: 1188352 - DNA, 15 bp, Homo sapiens
atgcctggcctgacc

SEQ ID NO: 1188353 - DNA, 15 bp, Homo sapiens
catgcctggcctgac

SEQ ID NO: 1188354 - DNA, 15 bp, Homo sapiens
ccatgcctggcctga

SEQ ID NO: 1188355 - DNA, 15 bp, Homo sapiens
taccatgcctggcct

SEQ ID NO: 1188356 - DNA, 15 bp, Homo sapiens
ctaccatgcctggcc

SEQ ID NO: 1188357 - DNA, 15 bp, Homo sapiens
agctaccatgcctgg

SEQ ID NO: 1188358 - DNA, 15 bp, Homo sapiens
gagctaccatgcctg

SEQ ID NO: 1188359 - DNA, 15 bp, Homo sapiens
tgagctaccatgcct

SEQ ID NO: 1188360 - DNA, 15 bp, Homo sapiens
atgagctaccatgcc

SEQ ID NO: 1188361 - DNA, 15 bp, Homo sapiens
catgagctaccatgc

SEQ ID NO: 1188362 - DNA, 15 bp, Homo sapiens
gcatgagctaccatg

SEQ ID NO: 1188363 - DNA, 15 bp, Homo sapiens
ggcatgagctaccat

SEQ ID NO: 1188364 - DNA, 15 bp, Homo sapiens
aggcatgagctacca

SEQ ID NO: 1188365 - DNA, 15 bp, Homo sapiens
caggcatgagctacc

SEQ ID NO: 1188366 - DNA, 15 bp, Homo sapiens
acaggcatgagctac

SEQ ID NO: 1188367 - DNA, 15 bp, Homo sapiens
tacaggcatgagcta

SEQ ID NO: 1188368 - DNA, 15 bp, Homo sapiens
ttacaggcatgagct

SEQ ID NO: 1188369 - DNA, 15 bp, Homo sapiens
tctcagcctcccaaa

SEQ ID NO: 1188370 - DNA, 15 bp, Homo sapiens
gcccatctcagcctc

SEQ ID NO: 1188371 - DNA, 15 bp, Homo sapiens
tgcccatctcagcct

SEQ ID NO: 1188372 - DNA, 15 bp, Homo sapiens
ctgcccatctcagcc

SEQ ID NO: 1188373 - DNA, 15 bp, Homo sapiens
tctgcccatctcagc

SEQ ID NO: 1188374 - DNA, 15 bp, Homo sapiens
atctgcccatctcag

SEQ ID NO: 1188375 - DNA, 15 bp, Homo sapiens
gatctgcccatctca

SEQ ID NO: 1188376 - DNA, 15 bp, Homo sapiens
tgatctgcccatctc

SEQ ID NO: 1188377 - DNA, 15 bp, Homo sapiens
gtgatctgcccatct

SEQ ID NO: 1188378 - DNA, 15 bp, Homo sapiens
agtgatctgcccatc

SEQ ID NO: 1188379 - DNA, 15 bp, Homo sapiens
aagtgatctgcccat

SEQ ID NO: 1188380 - DNA, 15 bp, Homo sapiens
atattggccaggctg

SEQ ID NO: 1188381 - DNA, 15 bp, Homo sapiens
catattggccaggct

SEQ ID NO: 1188382 - DNA, 15 bp, Homo sapiens
ccatattggccaggc

SEQ ID NO: 1188383 - DNA, 15 bp, Homo sapiens
gccatattggccagg

SEQ ID NO: 1188384 - DNA, 15 bp, Homo sapiens
tgccatattggccag

SEQ ID NO: 1188385 - DNA, 15 bp, Homo sapiens
ttgccatattggcca

SEQ ID NO: 1188386 - DNA, 15 bp, Homo sapiens
tttgccatattggcc

SEQ ID NO: 1188387 - DNA, 15 bp, Homo sapiens
ttttgccatattggc

SEQ ID NO: 1188388 - DNA, 15 bp, Homo sapiens
gttttgccatattgg

SEQ ID NO: 1188389 - DNA, 15 bp, Homo sapiens
ggttttgccatattg

SEQ ID NO: 1188390 - DNA, 15 bp, Homo sapiens
gggttttgccatatt

SEQ ID NO: 1188391 - DNA, 15 bp, Homo sapiens
ggggttttgccatat

SEQ ID NO: 1188392 - DNA, 15 bp, Homo sapiens
tggggttttgccata

SEQ ID NO: 1188393 - DNA, 15 bp, Homo sapiens
atttagtagagatgg

SEQ ID NO: 1188394 - DNA, 15 bp, Homo sapiens
tatttagtagagatg

SEQ ID NO: 1188395 - DNA, 15 bp, Homo sapiens
gtatttagtagagat

SEQ ID NO: 1188396 - DNA, 15 bp, Homo sapiens
tgtatttagtagaga

SEQ ID NO: 1188397 - DNA, 15 bp, Homo sapiens
ttgtatttagtagag

SEQ ID NO: 1188398 - DNA, 15 bp, Homo sapiens
tttgtatttagtaga

SEQ ID NO: 1188399 - DNA, 15 bp, Homo sapiens
ttttgtatttagtag

SEQ ID NO: 1188400 - DNA, 15 bp, Homo sapiens
tttttgtatttagta

SEQ ID NO: 1188401 - DNA, 15 bp, Homo sapiens
ttttttgtatttagt

SEQ ID NO: 1188402 - DNA, 15 bp, Homo sapiens
tttttttgtatttag

SEQ ID NO: 1188403 - DNA, 15 bp, Homo sapiens
atttttttgtattta

SEQ ID NO: 1188404 - DNA, 15 bp, Homo sapiens
cgcaccaccacaccc

SEQ ID NO: 1188405 - DNA, 15 bp, Homo sapiens
gcgcaccaccacacc

SEQ ID NO: 1188406 - DNA, 15 bp, Homo sapiens
tgcgcaccaccacac

SEQ ID NO: 1188407 - DNA, 15 bp, Homo sapiens
gtgcgcaccaccaca

SEQ ID NO: 1188408 - DNA, 15 bp, Homo sapiens
cagtgattctcctgc

SEQ ID NO: 1188409 - DNA, 15 bp, Homo sapiens
ccagtgattctcctg

SEQ ID NO: 1188410 - DNA, 15 bp, Homo sapiens
tccagtgattctcct

SEQ ID NO: 1188411 - DNA, 15 bp, Homo sapiens
ttccagtgattctcc

SEQ ID NO: 1188412 - DNA, 15 bp, Homo sapiens
gttccagtgattctc

SEQ ID NO: 1188413 - DNA, 15 bp, Homo sapiens
aggttccagtgattc

SEQ ID NO: 1188414 - DNA, 15 bp, Homo sapiens
caggttccagtgatt

SEQ ID NO: 1188415 - DNA, 15 bp, Homo sapiens
ccaggttccagtgat

SEQ ID NO: 1188416 - DNA, 15 bp, Homo sapiens
cccaggttccagtga

SEQ ID NO: 1188417 - DNA, 15 bp, Homo sapiens
tcccaggttccagtg

SEQ ID NO: 1188418 - DNA, 15 bp, Homo sapiens
ttcccaggttccagt

SEQ ID NO: 1188419 - DNA, 15 bp, Homo sapiens
cttcccaggttccag

SEQ ID NO: 1188420 - DNA, 15 bp, Homo sapiens
gcttcccaggttcca

SEQ ID NO: 1188421 - DNA, 15 bp, Homo sapiens
tgcttcccaggttcc

SEQ ID NO: 1188422 - DNA, 15 bp, Homo sapiens
ctgcttcccaggttc

SEQ ID NO: 1188423 - DNA, 15 bp, Homo sapiens
tctgcttcccaggtt

SEQ ID NO: 1188424 - DNA, 15 bp, Homo sapiens
ctctgcttcccaggt

SEQ ID NO: 1188425 - DNA, 15 bp, Homo sapiens
cctctgcttcccagg

SEQ ID NO: 1188426 - DNA, 15 bp, Homo sapiens
acctctgcttcccag

SEQ ID NO: 1188427 - DNA, 15 bp, Homo sapiens
aacctctgcttccca

SEQ ID NO: 1188428 - DNA, 15 bp, Homo sapiens
caacctctgcttccc

SEQ ID NO: 1188429 - DNA, 15 bp, Homo sapiens
gcaacctctgcttcc

SEQ ID NO: 1188430 - DNA, 15 bp, Homo sapiens
tgcaacctctgcttc

SEQ ID NO: 1188431 - DNA, 15 bp, Homo sapiens
ttgcaacctctgctt

SEQ ID NO: 1188432 - DNA, 15 bp, Homo sapiens
attgcaacctctgct

SEQ ID NO: 1188433 - DNA, 15 bp, Homo sapiens
tgatcttggctcatt

SEQ ID NO: 1188434 - DNA, 15 bp, Homo sapiens
gtgatcttggctcat

SEQ ID NO: 1188435 - DNA, 15 bp, Homo sapiens
cgtgatcttggctca

SEQ ID NO: 1188436 - DNA, 15 bp, Homo sapiens
gcgtgatcttggctc

SEQ ID NO: 1188437 - DNA, 15 bp, Homo sapiens
ggcgtgatcttggct

SEQ ID NO: 1188438 - DNA, 15 bp, Homo sapiens
tggcgtgatcttggc

SEQ ID NO: 1188439 - DNA, 15 bp, Homo sapiens
gtggcgtgatcttgg

SEQ ID NO: 1188440 - DNA, 15 bp, Homo sapiens
agtggcgtgatcttg

SEQ ID NO: 1188441 - DNA, 15 bp, Homo sapiens
cagtggcgtgatctt

SEQ ID NO: 1188442 - DNA, 15 bp, Homo sapiens
tcagactggagtgca

SEQ ID NO: 1188443 - DNA, 15 bp, Homo sapiens
atcagactggagtgc

SEQ ID NO: 1188444 - DNA, 15 bp, Homo sapiens
gatcagactggagtg

SEQ ID NO: 1188445 - DNA, 15 bp, Homo sapiens
tgatcagactggagt

SEQ ID NO: 1188446 - DNA, 15 bp, Homo sapiens
ttgatcagactggag

SEQ ID NO: 1188447 - DNA, 15 bp, Homo sapiens
gttgatcagactgga

SEQ ID NO: 1188448 - DNA, 15 bp, Homo sapiens
tgttgatcagactgg

SEQ ID NO: 1188449 - DNA, 15 bp, Homo sapiens
ctgttgatcagactg

SEQ ID NO: 1188450 - DNA, 15 bp, Homo sapiens
tctgttgatcagact

SEQ ID NO: 1188451 - DNA, 15 bp, Homo sapiens
ctctgttgatcagac

SEQ ID NO: 1188452 - DNA, 15 bp, Homo sapiens
actctgttgatcaga

SEQ ID NO: 1188453 - DNA, 15 bp, Homo sapiens
cactctgttgatcag

SEQ ID NO: 1188454 - DNA, 15 bp, Homo sapiens
gcactctgttgatca

SEQ ID NO: 1188455 - DNA, 15 bp, Homo sapiens
tgcactctgttgatc

SEQ ID NO: 1188456 - DNA, 15 bp, Homo sapiens
ttgcactctgttgat

SEQ ID NO: 1188457 - DNA, 15 bp, Homo sapiens
gttgcactctgttga

SEQ ID NO: 1188458 - DNA, 15 bp, Homo sapiens
agttgcactctgttg

SEQ ID NO: 1188459 - DNA, 15 bp, Homo sapiens
gagttgcactctgtt

SEQ ID NO: 1188460 - DNA, 15 bp, Homo sapiens
ggagttgcactctgt

SEQ ID NO: 1188461 - DNA, 15 bp, Homo sapiens
cggagttgcactctg

SEQ ID NO: 1188462 - DNA, 15 bp, Homo sapiens
acggagttgcactct

SEQ ID NO: 1188463 - DNA, 15 bp, Homo sapiens
gacggagttgcactc

SEQ ID NO: 1188464 - DNA, 15 bp, Homo sapiens
agacggagttgcact

SEQ ID NO: 1188465 - DNA, 15 bp, Homo sapiens
gagacggagttgcac

SEQ ID NO: 1188466 - DNA, 15 bp, Homo sapiens
tgagacggagttgca

SEQ ID NO: 1188467 - DNA, 15 bp, Homo sapiens
ttgagacggagttgc

SEQ ID NO: 1188468 - DNA, 15 bp, Homo sapiens
tttgagacggagttg

SEQ ID NO: 1188469 - DNA, 15 bp, Homo sapiens
cttttttgagacgga

SEQ ID NO: 1188470 - DNA, 15 bp, Homo sapiens
tcttttttgagacgg

SEQ ID NO: 1188471 - DNA, 15 bp, Homo sapiens
ttcttttttgagacg

SEQ ID NO: 1188472 - DNA, 15 bp, Homo sapiens
gttttcttttttgag

SEQ ID NO: 1188473 - DNA, 15 bp, Homo sapiens
cgttttcttttttga

SEQ ID NO: 1188474 - DNA, 15 bp, Homo sapiens
tcgttttcttttttg

SEQ ID NO: 1188475 - DNA, 15 bp, Homo sapiens
ttcgttttctttttt

SEQ ID NO: 1188476 - DNA, 15 bp, Homo sapiens
cttcgttttcttttt

SEQ ID NO: 1188477 - DNA, 15 bp, Homo sapiens
ccttcgttttctttt

SEQ ID NO: 1188478 - DNA, 15 bp, Homo sapiens
accttcgttttcttt

SEQ ID NO: 1188479 - DNA, 15 bp, Homo sapiens
gaccttcgttttctt

SEQ ID NO: 1188480 - DNA, 15 bp, Homo sapiens
tgaccttcgttttct

SEQ ID NO: 1188481 - DNA, 15 bp, Homo sapiens
ttgaccttcgttttc

SEQ ID NO: 1188482 - DNA, 15 bp, Homo sapiens
tttgaccttcgtttt

SEQ ID NO: 1188483 - DNA, 15 bp, Homo sapiens
atttgaccttcgttt

SEQ ID NO: 1188484 - DNA, 15 bp, Homo sapiens
gatttgaccttcgtt

SEQ ID NO: 1188485 - DNA, 15 bp, Homo sapiens
tgatttgaccttcgt

SEQ ID NO: 1188486 - DNA, 15 bp, Homo sapiens
ctgatttgaccttcg

SEQ ID NO: 1188487 - DNA, 15 bp, Homo sapiens
actgatttgaccttc

SEQ ID NO: 1188488 - DNA, 15 bp, Homo sapiens
cactgatttgacctt

SEQ ID NO: 1188489 - DNA, 15 bp, Homo sapiens
ccactgatttgacct

SEQ ID NO: 1188490 - DNA, 15 bp, Homo sapiens
tccactgatttgacc

SEQ ID NO: 1188491 - DNA, 15 bp, Homo sapiens
ttccactgatttgac

SEQ ID NO: 1188492 - DNA, 15 bp, Homo sapiens
cttccactgatttga

SEQ ID NO: 1188493 - DNA, 15 bp, Homo sapiens
ccttccactgatttg

SEQ ID NO: 1188494 - DNA, 15 bp, Homo sapiens
cccttccactgattt

SEQ ID NO: 1188495 - DNA, 15 bp, Homo sapiens
ccccttccactgatt

SEQ ID NO: 1188496 - DNA, 15 bp, Homo sapiens
accccttccactgat

SEQ ID NO: 1188497 - DNA, 15 bp, Homo sapiens
aaccccttccactga

SEQ ID NO: 1188498 - DNA, 15 bp, Homo sapiens
caaccccttccactg

SEQ ID NO: 1188499 - DNA, 15 bp, Homo sapiens
ccaaccccttccact

SEQ ID NO: 1188500 - DNA, 15 bp, Homo sapiens
accaaccccttccac

SEQ ID NO: 1188501 - DNA, 15 bp, Homo sapiens
taccaaccccttcca

SEQ ID NO: 1188502 - DNA, 15 bp, Homo sapiens
ctaccaaccccttcc

SEQ ID NO: 1188503 - DNA, 15 bp, Homo sapiens
tctaccaaccccttc

SEQ ID NO: 1188504 - DNA, 15 bp, Homo sapiens
ttctaccaacccctt

SEQ ID NO: 1188505 - DNA, 15 bp, Homo sapiens
attctaccaacccct

SEQ ID NO: 1188506 - DNA, 15 bp, Homo sapiens
tattctaccaacccc

SEQ ID NO: 1188507 - DNA, 15 bp, Homo sapiens
ttattctaccaaccc

SEQ ID NO: 1188508 - DNA, 15 bp, Homo sapiens
tttattctaccaacc

SEQ ID NO: 1188509 - DNA, 15 bp, Homo sapiens
ttttattctaccaac

SEQ ID NO: 1188510 - DNA, 15 bp, Homo sapiens
cttttattctaccaa

SEQ ID NO: 1188511 - DNA, 15 bp, Homo sapiens
tcttttattctacca

SEQ ID NO: 1188512 - DNA, 15 bp, Homo sapiens
gtcttttattctacc

SEQ ID NO: 1188513 - DNA, 15 bp, Homo sapiens
tgtcttttattctac

SEQ ID NO: 1188514 - DNA, 15 bp, Homo sapiens
ttgtcttttattcta

SEQ ID NO: 1188515 - DNA, 15 bp, Homo sapiens
cttgtcttttattct

SEQ ID NO: 1188516 - DNA, 15 bp, Homo sapiens
tcttgtcttttattc

SEQ ID NO: 1188517 - DNA, 15 bp, Homo sapiens
ttcttgtcttttatt

SEQ ID NO: 1188518 - DNA, 15 bp, Homo sapiens
attcttgtcttttat

SEQ ID NO: 1188519 - DNA, 15 bp, Homo sapiens
cattcttgtctttta

SEQ ID NO: 1188520 - DNA, 15 bp, Homo sapiens
ccattcttgtctttt

SEQ ID NO: 1188521 - DNA, 15 bp, Homo sapiens
tccattcttgtcttt

SEQ ID NO: 1188522 - DNA, 15 bp, Homo sapiens
ttccattcttgtctt

SEQ ID NO: 1188523 - DNA, 15 bp, Homo sapiens
attccattcttgtct

SEQ ID NO: 1188524 - DNA, 15 bp, Homo sapiens
cattccattcttgtc

SEQ ID NO: 1188525 - DNA, 15 bp, Homo sapiens
ccattccattcttgt

SEQ ID NO: 1188526 - DNA, 15 bp, Homo sapiens
tccattccattcttg

SEQ ID NO: 1188527 - DNA, 15 bp, Homo sapiens
ctccattccattctt

SEQ ID NO: 1188528 - DNA, 15 bp, Homo sapiens
actccattccattct

SEQ ID NO: 1188529 - DNA, 15 bp, Homo sapiens
tactccattccattc

SEQ ID NO: 1188530 - DNA, 15 bp, Homo sapiens
ctactccattccatt

SEQ ID NO: 1188531 - DNA, 15 bp, Homo sapiens
cctactccattccat

SEQ ID NO: 1188532 - DNA, 15 bp, Homo sapiens
ccctactccattcca

SEQ ID NO: 1188533 - DNA, 15 bp, Homo sapiens
gccctactccattcc

SEQ ID NO: 1188534 - DNA, 15 bp, Homo sapiens
agccctactccattc

SEQ ID NO: 1188535 - DNA, 15 bp, Homo sapiens
cagccctactccatt

SEQ ID NO: 1188536 - DNA, 15 bp, Homo sapiens
ccagccctactccat

SEQ ID NO: 1188537 - DNA, 15 bp, Homo sapiens
cccagccctactcca

SEQ ID NO: 1188538 - DNA, 15 bp, Homo sapiens
ccccagccctactcc

SEQ ID NO: 1188539 - DNA, 15 bp, Homo sapiens
tccccagccctactc

SEQ ID NO: 1188540 - DNA, 15 bp, Homo sapiens
ctccccagccctact

SEQ ID NO: 1188541 - DNA, 15 bp, Homo sapiens
cctccccagccctac

SEQ ID NO: 1188542 - DNA, 15 bp, Homo sapiens
ccctccccagcccta

SEQ ID NO: 1188543 - DNA, 15 bp, Homo sapiens
gccctccccagccct

SEQ ID NO: 1188544 - DNA, 15 bp, Homo sapiens
agccctccccagccc

SEQ ID NO: 1188545 - DNA, 15 bp, Homo sapiens
tagccctccccagcc

SEQ ID NO: 1188546 - DNA, 15 bp, Homo sapiens
ttagccctccccagc

SEQ ID NO: 1188547 - DNA, 15 bp, Homo sapiens
gttagccctccccag

SEQ ID NO: 1188548 - DNA, 15 bp, Homo sapiens
ggttagccctcccca

SEQ ID NO: 1188549 - DNA, 15 bp, Homo sapiens
aggttagccctcccc

SEQ ID NO: 1188550 - DNA, 15 bp, Homo sapiens
caggttagccctccc

SEQ ID NO: 1188551 - DNA, 15 bp, Homo sapiens
tcaggttagccctcc

SEQ ID NO: 1188552 - DNA, 15 bp, Homo sapiens
atcaggttagccctc

SEQ ID NO: 1188553 - DNA, 15 bp, Homo sapiens
gatcaggttagccct

SEQ ID NO: 1188554 - DNA, 15 bp, Homo sapiens
cgatcaggttagccc

SEQ ID NO: 1188555 - DNA, 15 bp, Homo sapiens
tcgatcaggttagcc

SEQ ID NO: 1188556 - DNA, 15 bp, Homo sapiens
ctcgatcaggttagc

SEQ ID NO: 1188557 - DNA, 15 bp, Homo sapiens
cctcgatcaggttag

SEQ ID NO: 1188558 - DNA, 15 bp, Homo sapiens
tcctcgatcaggtta

SEQ ID NO: 1188559 - DNA, 15 bp, Homo sapiens
gtcctcgatcaggtt

SEQ ID NO: 1188560 - DNA, 15 bp, Homo sapiens
tgtcctcgatcaggt

SEQ ID NO: 1188561 - DNA, 15 bp, Homo sapiens
ttgtcctcgatcagg

SEQ ID NO: 1188562 - DNA, 15 bp, Homo sapiens
tttgtcctcgatcag

SEQ ID NO: 1188563 - DNA, 15 bp, Homo sapiens
ttttgtcctcgatca

SEQ ID NO: 1188564 - DNA, 15 bp, Homo sapiens
cttttgtcctcgatc

SEQ ID NO: 1188565 - DNA, 15 bp, Homo sapiens
tcttttgtcctcgat

SEQ ID NO: 1188566 - DNA, 15 bp, Homo sapiens
ttcttttgtcctcga

SEQ ID NO: 1188567 - DNA, 15 bp, Homo sapiens
cttcttttgtcctcg

SEQ ID NO: 1188568 - DNA, 15 bp, Homo sapiens
acttcttttgtcctc

SEQ ID NO: 1188569 - DNA, 15 bp, Homo sapiens
cacttcttttgtcct

SEQ ID NO: 1188570 - DNA, 15 bp, Homo sapiens
tcacttcttttgtcc

SEQ ID NO: 1188571 - DNA, 15 bp, Homo sapiens
ctcacttcttttgtc

SEQ ID NO: 1188572 - DNA, 15 bp, Homo sapiens
cctcacttcttttgt

SEQ ID NO: 1188573 - DNA, 15 bp, Homo sapiens
ccctcacttcttttg

SEQ ID NO: 1188574 - DNA, 15 bp, Homo sapiens
tccctcacttctttt

SEQ ID NO: 1188575 - DNA, 15 bp, Homo sapiens
atccctcacttcttt

SEQ ID NO: 1188576 - DNA, 15 bp, Homo sapiens
aatccctcacttctt

SEQ ID NO: 1188577 - DNA, 15 bp, Homo sapiens
aaatccctcacttct

SEQ ID NO: 1188578 - DNA, 15 bp, Homo sapiens
aaaatccctcacttc

SEQ ID NO: 1188579 - DNA, 15 bp, Homo sapiens
gaaaatccctcactt

SEQ ID NO: 1188580 - DNA, 15 bp, Homo sapiens
tgaaaatccctcact

SEQ ID NO: 1188581 - DNA, 15 bp, Homo sapiens
gtgaaaatccctcac

SEQ ID NO: 1188582 - DNA, 15 bp, Homo sapiens
cgtgaaaatccctca

SEQ ID NO: 1188583 - DNA, 15 bp, Homo sapiens
acgtgaaaatccctc

SEQ ID NO: 1188584 - DNA, 15 bp, Homo sapiens
tacgtgaaaatccct

SEQ ID NO: 1188585 - DNA, 15 bp, Homo sapiens
ctacgtgaaaatccc

SEQ ID NO: 1188586 - DNA, 15 bp, Homo sapiens
cctacgtgaaaatcc

SEQ ID NO: 1188587 - DNA, 15 bp, Homo sapiens
gcctacgtgaaaatc

SEQ ID NO: 1188588 - DNA, 15 bp, Homo sapiens
tgcctacgtgaaaat

SEQ ID NO: 1188589 - DNA, 15 bp, Homo sapiens
ttgcctacgtgaaaa

SEQ ID NO: 1188590 - DNA, 15 bp, Homo sapiens
attgcctacgtgaaa

SEQ ID NO: 1188591 - DNA, 15 bp, Homo sapiens
tattgcctacgtgaa

SEQ ID NO: 1188592 - DNA, 15 bp, Homo sapiens
ttattgcctacgtga

SEQ ID NO: 1188593 - DNA, 15 bp, Homo sapiens
attattgcctacgtg

SEQ ID NO: 1188594 - DNA, 15 bp, Homo sapiens
gattattgcctacgt

SEQ ID NO: 1188595 - DNA, 15 bp, Homo sapiens
ggattattgcctacg

SEQ ID NO: 1188596 - DNA, 15 bp, Homo sapiens
gggattattgcctac

SEQ ID NO: 1188597 - DNA, 15 bp, Homo sapiens
tgggattattgccta

SEQ ID NO: 1188598 - DNA, 15 bp, Homo sapiens
atgggattattgcct

SEQ ID NO: 1188599 - DNA, 15 bp, Homo sapiens
tatgggattattgcc

SEQ ID NO: 1188600 - DNA, 15 bp, Homo sapiens
atatgggattattgc

SEQ ID NO: 1188601 - DNA, 15 bp, Homo sapiens
tatatgggattattg

SEQ ID NO: 1188602 - DNA, 15 bp, Homo sapiens
ttatatgggattatt

SEQ ID NO: 1188603 - DNA, 15 bp, Homo sapiens
gttatatgggattat

SEQ ID NO: 1188604 - DNA, 15 bp, Homo sapiens
tgttatatgggatta

SEQ ID NO: 1188605 - DNA, 15 bp, Homo sapiens
ctgttatatgggatt

SEQ ID NO: 1188606 - DNA, 15 bp, Homo sapiens
tctgttatatgggat

SEQ ID NO: 1188607 - DNA, 15 bp, Homo sapiens
ctctgttatatggga

SEQ ID NO: 1188608 - DNA, 15 bp, Homo sapiens
tctctgttatatggg

SEQ ID NO: 1188609 - DNA, 15 bp, Homo sapiens
atctctgttatatgg

SEQ ID NO: 1188610 - DNA, 15 bp, Homo sapiens
catctctgttatatg

SEQ ID NO: 1188611 - DNA, 15 bp, Homo sapiens
tcatctctgttatat

SEQ ID NO: 1188612 - DNA, 15 bp, Homo sapiens
ctcatctctgttata

SEQ ID NO: 1188613 - DNA, 15 bp, Homo sapiens
cctcatctctgttat

SEQ ID NO: 1188614 - DNA, 15 bp, Homo sapiens
acctcatctctgtta

SEQ ID NO: 1188615 - DNA, 15 bp, Homo sapiens
aacctcatctctgtt

SEQ ID NO: 1188616 - DNA, 15 bp, Homo sapiens
gaacctcatctctgt

SEQ ID NO: 1188617 - DNA, 15 bp, Homo sapiens
tgaacctcatctctg

SEQ ID NO: 1188618 - DNA, 15 bp, Homo sapiens
ctgaacctcatctct

SEQ ID NO: 1188619 - DNA, 15 bp, Homo sapiens
cctgaacctcatctc

SEQ ID NO: 1188620 - DNA, 15 bp, Homo sapiens
ccctgaacctcatct

SEQ ID NO: 1188621 - DNA, 15 bp, Homo sapiens
tccctgaacctcatc

SEQ ID NO: 1188622 - DNA, 15 bp, Homo sapiens
ttccctgaacctcat

SEQ ID NO: 1188623 - DNA, 15 bp, Homo sapiens
cttccctgaacctca

SEQ ID NO: 1188624 - DNA, 15 bp, Homo sapiens
ccttccctgaacctc

SEQ ID NO: 1188625 - DNA, 15 bp, Homo sapiens
cccttccctgaacct

SEQ ID NO: 1188626 - DNA, 15 bp, Homo sapiens
ccccttccctgaacc

SEQ ID NO: 1188627 - DNA, 15 bp, Homo sapiens
cccccttccctgaac

SEQ ID NO: 1188628 - DNA, 15 bp, Homo sapiens
acccccttccctgaa

SEQ ID NO: 1188629 - DNA, 15 bp, Homo sapiens
cacccccttccctga

SEQ ID NO: 1188630 - DNA, 15 bp, Homo sapiens
gcacccccttccctg

SEQ ID NO: 1188631 - DNA, 15 bp, Homo sapiens
agcacccccttccct

SEQ ID NO: 1188632 - DNA, 15 bp, Homo sapiens
cagcacccccttccc

SEQ ID NO: 1188633 - DNA, 15 bp, Homo sapiens
ccagcacccccttcc

SEQ ID NO: 1188634 - DNA, 15 bp, Homo sapiens
cccagcacccccttc

SEQ ID NO: 1188635 - DNA, 15 bp, Homo sapiens
tcccagcaccccctt

SEQ ID NO: 1188636 - DNA, 15 bp, Homo sapiens
ttcccagcaccccct

SEQ ID NO: 1188637 - DNA, 15 bp, Homo sapiens
cttcccagcaccccc

SEQ ID NO: 1188638 - DNA, 15 bp, Homo sapiens
gcttcccagcacccc

SEQ ID NO: 1188639 - DNA, 15 bp, Homo sapiens
cgcttcccagcaccc

SEQ ID NO: 1188640 - DNA, 15 bp, Homo sapiens
ccgcttcccagcacc

SEQ ID NO: 1188641 - DNA, 15 bp, Homo sapiens
cccgcttcccagcac

SEQ ID NO: 1188642 - DNA, 15 bp, Homo sapiens
acccgcttcccagca

SEQ ID NO: 1188643 - DNA, 15 bp, Homo sapiens
aacccgcttcccagc

SEQ ID NO: 1188644 - DNA, 15 bp, Homo sapiens
caacccgcttcccag

SEQ ID NO: 1188645 - DNA, 15 bp, Homo sapiens
ccaacccgcttccca

SEQ ID NO: 1188646 - DNA, 15 bp, Homo sapiens
cccaacccgcttccc

SEQ ID NO: 1188647 - DNA, 15 bp, Homo sapiens
acccaacccgcttcc

SEQ ID NO: 1188648 - DNA, 15 bp, Homo sapiens
cacccaacccgcttc

SEQ ID NO: 1188649 - DNA, 15 bp, Homo sapiens
tcacccaacccgctt

SEQ ID NO: 1188650 - DNA, 15 bp, Homo sapiens
ctcacccaacccgct

SEQ ID NO: 1188651 - DNA, 15 bp, Homo sapiens
gctcacccaacccgc

SEQ ID NO: 1188652 - DNA, 15 bp, Homo sapiens
ggctcacccaacccg

SEQ ID NO: 1188653 - DNA, 15 bp, Homo sapiens
gggctcacccaaccc

SEQ ID NO: 1188654 - DNA, 15 bp, Homo sapiens
agggctcacccaacc

SEQ ID NO: 1188655 - DNA, 15 bp, Homo sapiens
aagggctcacccaac

SEQ ID NO: 1188656 - DNA, 15 bp, Homo sapiens
aaagggctcacccaa

SEQ ID NO: 1188657 - DNA, 15 bp, Homo sapiens
taaagggctcaccca

SEQ ID NO: 1188658 - DNA, 15 bp, Homo sapiens
ttaaagggctcaccc

SEQ ID NO: 1188659 - DNA, 15 bp, Homo sapiens
gttaaagggctcacc

SEQ ID NO: 1188660 - DNA, 15 bp, Homo sapiens
tgttaaagggctcac

SEQ ID NO: 1188661 - DNA, 15 bp, Homo sapiens
atgttaaagggctca

SEQ ID NO: 1188662 - DNA, 15 bp, Homo sapiens
aatgttaaagggctc

SEQ ID NO: 1188663 - DNA, 15 bp, Homo sapiens
taatgttaaagggct

SEQ ID NO: 1188664 - DNA, 15 bp, Homo sapiens
ctaatgttaaagggc

SEQ ID NO: 1188665 - DNA, 15 bp, Homo sapiens
cctaatgttaaaggg

SEQ ID NO: 1188666 - DNA, 15 bp, Homo sapiens
acctaatgttaaagg

SEQ ID NO: 1188667 - DNA, 15 bp, Homo sapiens
tacctaatgttaaag

SEQ ID NO: 1188668 - DNA, 15 bp, Homo sapiens
ctacctaatgttaaa

SEQ ID NO: 1188669 - DNA, 15 bp, Homo sapiens
cctacctaatgttaa

SEQ ID NO: 1188670 - DNA, 15 bp, Homo sapiens
acctacctaatgtta

SEQ ID NO: 1188671 - DNA, 15 bp, Homo sapiens
cacctacctaatgtt

SEQ ID NO: 1188672 - DNA, 15 bp, Homo sapiens
acacctacctaatgt

SEQ ID NO: 1188673 - DNA, 15 bp, Homo sapiens
cacacctacctaatg

SEQ ID NO: 1188674 - DNA, 15 bp, Homo sapiens
ccacacctacctaat

SEQ ID NO: 1188675 - DNA, 15 bp, Homo sapiens
accacacctacctaa

SEQ ID NO: 1188676 - DNA, 15 bp, Homo sapiens
caccacacctaccta

SEQ ID NO: 1188677 - DNA, 15 bp, Homo sapiens
acaccacacctacct

SEQ ID NO: 1188678 - DNA, 15 bp, Homo sapiens
aacaccacacctacc

SEQ ID NO: 1188679 - DNA, 15 bp, Homo sapiens
caacaccacacctac

SEQ ID NO: 1188680 - DNA, 15 bp, Homo sapiens
ccaacaccacaccta

SEQ ID NO: 1188681 - DNA, 15 bp, Homo sapiens
gccaacaccacacct

SEQ ID NO: 1188682 - DNA, 15 bp, Homo sapiens
agccaacaccacacc

SEQ ID NO: 1188683 - DNA, 15 bp, Homo sapiens
tagccaacaccacac

SEQ ID NO: 1188684 - DNA, 15 bp, Homo sapiens
ctagccaacaccaca

SEQ ID NO: 1188685 - DNA, 15 bp, Homo sapiens
cctagccaacaccac

SEQ ID NO: 1188686 - DNA, 15 bp, Homo sapiens
gcctagccaacacca

SEQ ID NO: 1188687 - DNA, 15 bp, Homo sapiens
tgcctagccaacacc

SEQ ID NO: 1188688 - DNA, 15 bp, Homo sapiens
ctgcctagccaacac

SEQ ID NO: 1188689 - DNA, 15 bp, Homo sapiens
tctgcctagccaaca

SEQ ID NO: 1188690 - DNA, 15 bp, Homo sapiens
ttctgcctagccaac

SEQ ID NO: 1188691 - DNA, 15 bp, Homo sapiens
gttctgcctagccaa

SEQ ID NO: 1188692 - DNA, 15 bp, Homo sapiens
tgttctgcctagcca

SEQ ID NO: 1188693 - DNA, 15 bp, Homo sapiens
atgttctgcctagcc

SEQ ID NO: 1188694 - DNA, 15 bp, Homo sapiens
catgttctgcctagc

SEQ ID NO: 1188695 - DNA, 15 bp, Homo sapiens
ccatgttctgcctag

SEQ ID NO: 1188696 - DNA, 15 bp, Homo sapiens
accatgttctgccta

SEQ ID NO: 1188697 - DNA, 15 bp, Homo sapiens
aaccatgttctgcct

SEQ ID NO: 1188698 - DNA, 15 bp, Homo sapiens
taaccatgttctgcc

SEQ ID NO: 1188699 - DNA, 15 bp, Homo sapiens
ataaccatgttctgc

SEQ ID NO: 1188700 - DNA, 15 bp, Homo sapiens
aataaccatgttctg

SEQ ID NO: 1188701 - DNA, 15 bp, Homo sapiens
aaataaccatgttct

SEQ ID NO: 1188702 - DNA, 15 bp, Homo sapiens
taaataaccatgttc

SEQ ID NO: 1188703 - DNA, 15 bp, Homo sapiens
ataaataaccatgtt

SEQ ID NO: 1188704 - DNA, 15 bp, Homo sapiens
cataaataaccatgt

SEQ ID NO: 1188705 - DNA, 15 bp, Homo sapiens
tcataaataaccatg

SEQ ID NO: 1188706 - DNA, 15 bp, Homo sapiens
ttcataaataaccat

SEQ ID NO: 1188707 - DNA, 15 bp, Homo sapiens
cttcataaataacca

SEQ ID NO: 1188708 - DNA, 15 bp, Homo sapiens
tcttcataaataacc

SEQ ID NO: 1188709 - DNA, 15 bp, Homo sapiens
atcttcataaataac

SEQ ID NO: 1188710 - DNA, 15 bp, Homo sapiens
catcttcataaataa

SEQ ID NO: 1188711 - DNA, 15 bp, Homo sapiens
gcatcttcataaata

SEQ ID NO: 1188712 - DNA, 15 bp, Homo sapiens
ggcatcttcataaat

SEQ ID NO: 1188713 - DNA, 15 bp, Homo sapiens
aggcatcttcataaa

SEQ ID NO: 1188714 - DNA, 15 bp, Homo sapiens
caggcatcttcataa

SEQ ID NO: 1188715 - DNA, 15 bp, Homo sapiens
acaggcatcttcata

SEQ ID NO: 1188716 - DNA, 15 bp, Homo sapiens
tacaggcatcttcat

SEQ ID NO: 1188717 - DNA, 15 bp, Homo sapiens
ctacaggcatcttca

SEQ ID NO: 1188718 - DNA, 15 bp, Homo sapiens
tctacaggcatcttc

SEQ ID NO: 1188719 - DNA, 15 bp, Homo sapiens
ctctacaggcatctt

SEQ ID NO: 1188720 - DNA, 15 bp, Homo sapiens
actctacaggcatct

SEQ ID NO: 1188721 - DNA, 15 bp, Homo sapiens
aactctacaggcatc

SEQ ID NO: 1188722 - DNA, 15 bp, Homo sapiens
gaactctacaggcat

SEQ ID NO: 1188723 - DNA, 15 bp, Homo sapiens
tgaactctacaggca

SEQ ID NO: 1188724 - DNA, 15 bp, Homo sapiens
ttgaactctacaggc

SEQ ID NO: 1188725 - DNA, 15 bp, Homo sapiens
gttgaactctacagg

SEQ ID NO: 1188726 - DNA, 15 bp, Homo sapiens
tgttgaactctacag

SEQ ID NO: 1188727 - DNA, 15 bp, Homo sapiens
ttgttgaactctaca

SEQ ID NO: 1188728 - DNA, 15 bp, Homo sapiens
cttgttgaactctac

SEQ ID NO: 1188729 - DNA, 15 bp, Homo sapiens
gcttgttgaactcta

SEQ ID NO: 1188730 - DNA, 15 bp, Homo sapiens
ggcttgttgaactct

SEQ ID NO: 1188731 - DNA, 15 bp, Homo sapiens
aggcttgttgaactc

SEQ ID NO: 1188732 - DNA, 15 bp, Homo sapiens
caggcttgttgaact

SEQ ID NO: 1188733 - DNA, 15 bp, Homo sapiens
gcaggcttgttgaac

SEQ ID NO: 1188734 - DNA, 15 bp, Homo sapiens
agcaggcttgttgaa

SEQ ID NO: 1188735 - DNA, 15 bp, Homo sapiens
aagcaggcttgttga

SEQ ID NO: 1188736 - DNA, 15 bp, Homo sapiens
taagcaggcttgttg

SEQ ID NO: 1188737 - DNA, 15 bp, Homo sapiens
gtaagcaggcttgtt

SEQ ID NO: 1188738 - DNA, 15 bp, Homo sapiens
agtaagcaggcttgt

SEQ ID NO: 1188739 - DNA, 15 bp, Homo sapiens
cagtaagcaggcttg

SEQ ID NO: 1188740 - DNA, 15 bp, Homo sapiens
gcagtaagcaggctt

SEQ ID NO: 1188741 - DNA, 15 bp, Homo sapiens
cgcagtaagcaggct

SEQ ID NO: 1188742 - DNA, 15 bp, Homo sapiens
ccgcagtaagcaggc

SEQ ID NO: 1188743 - DNA, 15 bp, Homo sapiens
accgcagtaagcagg

SEQ ID NO: 1188744 - DNA, 15 bp, Homo sapiens
aaccgcagtaagcag

SEQ ID NO: 1188745 - DNA, 15 bp, Homo sapiens
taaccgcagtaagca

SEQ ID NO: 1188746 - DNA, 15 bp, Homo sapiens
ctaaccgcagtaagc

SEQ ID NO: 1188747 - DNA, 15 bp, Homo sapiens
actaaccgcagtaag

SEQ ID NO: 1188748 - DNA, 15 bp, Homo sapiens
aactaaccgcagtaa

SEQ ID NO: 1188749 - DNA, 15 bp, Homo sapiens
caactaaccgcagta

SEQ ID NO: 1188750 - DNA, 15 bp, Homo sapiens
acaactaaccgcagt

SEQ ID NO: 1188751 - DNA, 15 bp, Homo sapiens
cacaactaaccgcag

SEQ ID NO: 1188752 - DNA, 15 bp, Homo sapiens
tcacaactaaccgca

SEQ ID NO: 1188753 - DNA, 15 bp, Homo sapiens
gtcacaactaaccgc

SEQ ID NO: 1188754 - DNA, 15 bp, Homo sapiens
ggtcacaactaaccg

SEQ ID NO: 1188755 - DNA, 15 bp, Homo sapiens
tggtcacaactaacc

SEQ ID NO: 1188756 - DNA, 15 bp, Homo sapiens
atggtcacaactaac

SEQ ID NO: 1188757 - DNA, 15 bp, Homo sapiens
aatggtcacaactaa

SEQ ID NO: 1188758 - DNA, 15 bp, Homo sapiens
caatggtcacaacta

SEQ ID NO: 1188759 - DNA, 15 bp, Homo sapiens
acaatggtcacaact

SEQ ID NO: 1188760 - DNA, 15 bp, Homo sapiens
gacaatggtcacaac

SEQ ID NO: 1188761 - DNA, 15 bp, Homo sapiens
agacaatggtcacaa

SEQ ID NO: 1188762 - DNA, 15 bp, Homo sapiens
tagacaatggtcaca

SEQ ID NO: 1188763 - DNA, 15 bp, Homo sapiens
ttagacaatggtcac

SEQ ID NO: 1188764 - DNA, 15 bp, Homo sapiens
cttagacaatggtca

SEQ ID NO: 1188765 - DNA, 15 bp, Homo sapiens
acttagacaatggtc

SEQ ID NO: 1188766 - DNA, 15 bp, Homo sapiens
tacttagacaatggt

SEQ ID NO: 1188767 - DNA, 15 bp, Homo sapiens
ttacttagacaatgg

SEQ ID NO: 1188768 - DNA, 15 bp, Homo sapiens
attacttagacaatg

SEQ ID NO: 1188769 - DNA, 15 bp, Homo sapiens
aattacttagacaat

SEQ ID NO: 1188770 - DNA, 15 bp, Homo sapiens
aaattacttagacaa

SEQ ID NO: 1188771 - DNA, 15 bp, Homo sapiens
taaattacttagaca

SEQ ID NO: 1188772 - DNA, 15 bp, Homo sapiens
ttaaattacttagac

SEQ ID NO: 1188773 - DNA, 15 bp, Homo sapiens
attaaattacttaga

SEQ ID NO: 1188774 - DNA, 15 bp, Homo sapiens
cattaaattacttag

SEQ ID NO: 1188775 - DNA, 15 bp, Homo sapiens
acattaaattactta

SEQ ID NO: 1188776 - DNA, 15 bp, Homo sapiens
aacattaaattactt

SEQ ID NO: 1188777 - DNA, 15 bp, Homo sapiens
aaacattaaattact

SEQ ID NO: 1188778 - DNA, 15 bp, Homo sapiens
aaaacattaaattac

SEQ ID NO: 1188779 - DNA, 15 bp, Homo sapiens
gaaaacattaaatta

SEQ ID NO: 1188780 - DNA, 15 bp, Homo sapiens
ggaaaacattaaatt

SEQ ID NO: 1188781 - DNA, 15 bp, Homo sapiens
aggaaaacattaaat

SEQ ID NO: 1188782 - DNA, 15 bp, Homo sapiens
taggaaaacattaaa

SEQ ID NO: 1188783 - DNA, 15 bp, Homo sapiens
ataggaaaacattaa

SEQ ID NO: 1188784 - DNA, 15 bp, Homo sapiens
cataggaaaacatta

SEQ ID NO: 1188785 - DNA, 15 bp, Homo sapiens
tcataggaaaacatt

SEQ ID NO: 1188786 - DNA, 15 bp, Homo sapiens
ctcataggaaaacat

SEQ ID NO: 1188787 - DNA, 15 bp, Homo sapiens
tctcataggaaaaca

SEQ ID NO: 1188788 - DNA, 15 bp, Homo sapiens
ctctcataggaaaac

SEQ ID NO: 1188789 - DNA, 15 bp, Homo sapiens
gctctcataggaaaa

SEQ ID NO: 1188790 - DNA, 15 bp, Homo sapiens
agctctcataggaaa

SEQ ID NO: 1188791 - DNA, 15 bp, Homo sapiens
cagctctcataggaa

SEQ ID NO: 1188792 - DNA, 15 bp, Homo sapiens
tcagctctcatagga

SEQ ID NO: 1188793 - DNA, 15 bp, Homo sapiens
ttcagctctcatagg

SEQ ID NO: 1188794 - DNA, 15 bp, Homo sapiens
cttcagctctcatag

SEQ ID NO: 1188795 - DNA, 15 bp, Homo sapiens
ccttcagctctcata

SEQ ID NO: 1188796 - DNA, 15 bp, Homo sapiens
tccttcagctctcat

SEQ ID NO: 1188797 - DNA, 15 bp, Homo sapiens
ctccttcagctctca

SEQ ID NO: 1188798 - DNA, 15 bp, Homo sapiens
gctccttcagctctc

SEQ ID NO: 1188799 - DNA, 15 bp, Homo sapiens
ggctccttcagctct

SEQ ID NO: 1188800 - DNA, 15 bp, Homo sapiens
cggctccttcagctc

SEQ ID NO: 1188801 - DNA, 15 bp, Homo sapiens
acggctccttcagct

SEQ ID NO: 1188802 - DNA, 15 bp, Homo sapiens
cacggctccttcagc

SEQ ID NO: 1188803 - DNA, 15 bp, Homo sapiens
tcacggctccttcag

SEQ ID NO: 1188804 - DNA, 15 bp, Homo sapiens
ttcacggctccttca

SEQ ID NO: 1188805 - DNA, 15 bp, Homo sapiens
tttcacggctccttc

SEQ ID NO: 1188806 - DNA, 15 bp, Homo sapiens
ctttcacggctcctt

SEQ ID NO: 1188807 - DNA, 15 bp, Homo sapiens
cctttcacggctcct

SEQ ID NO: 1188808 - DNA, 15 bp, Homo sapiens
ccctttcacggctcc

SEQ ID NO: 1188809 - DNA, 15 bp, Homo sapiens
tccctttcacggctc

SEQ ID NO: 1188810 - DNA, 15 bp, Homo sapiens
ttccctttcacggct

SEQ ID NO: 1188811 - DNA, 15 bp, Homo sapiens
tttccctttcacggc

SEQ ID NO: 1188812 - DNA, 15 bp, Homo sapiens
ttttccctttcacgg

SEQ ID NO: 1188813 - DNA, 15 bp, Homo sapiens
cttttccctttcacg

SEQ ID NO: 1188814 - DNA, 15 bp, Homo sapiens
ccttttccctttcac

SEQ ID NO: 1188815 - DNA, 15 bp, Homo sapiens
accttttccctttca

SEQ ID NO: 1188816 - DNA, 15 bp, Homo sapiens
caccttttccctttc

SEQ ID NO: 1188817 - DNA, 15 bp, Homo sapiens
ccaccttttcccttt

SEQ ID NO: 1188818 - DNA, 15 bp, Homo sapiens
gccaccttttccctt

SEQ ID NO: 1188819 - DNA, 15 bp, Homo sapiens
agccaccttttccct

SEQ ID NO: 1188820 - DNA, 15 bp, Homo sapiens
gagccaccttttccc

SEQ ID NO: 1188821 - DNA, 15 bp, Homo sapiens
ggagccaccttttcc

SEQ ID NO: 1188822 - DNA, 15 bp, Homo sapiens
gggagccaccttttc

SEQ ID NO: 1188823 - DNA, 15 bp, Homo sapiens
tgggagccacctttt

SEQ ID NO: 1188824 - DNA, 15 bp, Homo sapiens
ttgggagccaccttt

SEQ ID NO: 1188825 - DNA, 15 bp, Homo sapiens
attgggagccacctt

SEQ ID NO: 1188826 - DNA, 15 bp, Homo sapiens
cattgggagccacct

SEQ ID NO: 1188827 - DNA, 15 bp, Homo sapiens
tcattgggagccacc

SEQ ID NO: 1188828 - DNA, 15 bp, Homo sapiens
ctcattgggagccac

SEQ ID NO: 1188829 - DNA, 15 bp, Homo sapiens
actcattgggagcca

SEQ ID NO: 1188830 - DNA, 15 bp, Homo sapiens
aactcattgggagcc

SEQ ID NO: 1188831 - DNA, 15 bp, Homo sapiens
caactcattgggagc

SEQ ID NO: 1188832 - DNA, 15 bp, Homo sapiens
gcaactcattgggag

SEQ ID NO: 1188833 - DNA, 15 bp, Homo sapiens
tgcaactcattggga

SEQ ID NO: 1188834 - DNA, 15 bp, Homo sapiens
ctgcaactcattggg

SEQ ID NO: 1188835 - DNA, 15 bp, Homo sapiens
gctgcaactcattgg

SEQ ID NO: 1188836 - DNA, 15 bp, Homo sapiens
ggctgcaactcattg

SEQ ID NO: 1188837 - DNA, 15 bp, Homo sapiens
tggctgcaactcatt

SEQ ID NO: 1188838 - DNA, 15 bp, Homo sapiens
ttggctgcaactcat

SEQ ID NO: 1188839 - DNA, 15 bp, Homo sapiens
attggctgcaactca

SEQ ID NO: 1188840 - DNA, 15 bp, Homo sapiens
cattggctgcaactc

SEQ ID NO: 1188841 - DNA, 15 bp, Homo sapiens
ccattggctgcaact

SEQ ID NO: 1188842 - DNA, 15 bp, Homo sapiens
cccattggctgcaac

SEQ ID NO: 1188843 - DNA, 15 bp, Homo sapiens
tcccattggctgcaa

SEQ ID NO: 1188844 - DNA, 15 bp, Homo sapiens
ttcccattggctgca

SEQ ID NO: 1188845 - DNA, 15 bp, Homo sapiens
gttcccattggctgc

SEQ ID NO: 1188846 - DNA, 15 bp, Homo sapiens
tgttcccattggctg

SEQ ID NO: 1188847 - DNA, 15 bp, Homo sapiens
ttgttcccattggct

SEQ ID NO: 1188848 - DNA, 15 bp, Homo sapiens
attgttcccattggc

SEQ ID NO: 1188849 - DNA, 15 bp, Homo sapiens
aattgttcccattgg

SEQ ID NO: 1188850 - DNA, 15 bp, Homo sapiens
aaattgttcccattg

SEQ ID NO: 1188851 - DNA, 15 bp, Homo sapiens
caaattgttcccatt

SEQ ID NO: 1188852 - DNA, 15 bp, Homo sapiens
tcaaattgttcccat

SEQ ID NO: 1188853 - DNA, 15 bp, Homo sapiens
atcaaattgttccca

SEQ ID NO: 1188854 - DNA, 15 bp, Homo sapiens
tatcaaattgttccc

SEQ ID NO: 1188855 - DNA, 15 bp, Homo sapiens
atatcaaattgttcc

SEQ ID NO: 1188856 - DNA, 15 bp, Homo sapiens
tatatcaaattgttc

SEQ ID NO: 1188857 - DNA, 15 bp, Homo sapiens
ttatatcaaattgtt

SEQ ID NO: 1188858 - DNA, 15 bp, Homo sapiens
attatatcaaattgt

SEQ ID NO: 1188859 - DNA, 15 bp, Homo sapiens
tattatatcaaattg

SEQ ID NO: 1188860 - DNA, 15 bp, Homo sapiens
ttattatatcaaatt

SEQ ID NO: 1188861 - DNA, 15 bp, Homo sapiens
tttattatatcaaat

SEQ ID NO: 1188862 - DNA, 15 bp, Homo sapiens
atttattatatcaaa

SEQ ID NO: 1188863 - DNA, 15 bp, Homo sapiens
tatttattatatcaa

SEQ ID NO: 1188864 - DNA, 15 bp, Homo sapiens
ctatttattatatca

SEQ ID NO: 1188865 - DNA, 15 bp, Homo sapiens
actatttattatatc

SEQ ID NO: 1188866 - DNA, 15 bp, Homo sapiens
gactatttattatat

SEQ ID NO: 1188867 - DNA, 15 bp, Homo sapiens
agactatttattata

SEQ ID NO: 1188868 - DNA, 15 bp, Homo sapiens
gagactatttattat

SEQ ID NO: 1188869 - DNA, 15 bp, Homo sapiens
tgagactatttatta

SEQ ID NO: 1188870 - DNA, 15 bp, Homo sapiens
atgagactatttatt

SEQ ID NO: 1188871 - DNA, 15 bp, Homo sapiens
catgagactatttat

SEQ ID NO: 1188872 - DNA, 15 bp, Homo sapiens
acatgagactattta

SEQ ID NO: 1188873 - DNA, 15 bp, Homo sapiens
aacatgagactattt

SEQ ID NO: 1188874 - DNA, 15 bp, Homo sapiens
caacatgagactatt

SEQ ID NO: 1188875 - DNA, 15 bp, Homo sapiens
tcaacatgagactat

SEQ ID NO: 1188876 - DNA, 15 bp, Homo sapiens
gtcaacatgagacta

SEQ ID NO: 1188877 - DNA, 15 bp, Homo sapiens
agtcaacatgagact

SEQ ID NO: 1188878 - DNA, 15 bp, Homo sapiens
gagtcaacatgagac

SEQ ID NO: 1188879 - DNA, 15 bp, Homo sapiens
ggagtcaacatgaga

SEQ ID NO: 1188880 - DNA, 15 bp, Homo sapiens
aggagtcaacatgag

SEQ ID NO: 1188881 - DNA, 15 bp, Homo sapiens
aaggagtcaacatga

SEQ ID NO: 1188882 - DNA, 15 bp, Homo sapiens
aaaggagtcaacatg

SEQ ID NO: 1188883 - DNA, 15 bp, Homo sapiens
gaaaggagtcaacat

SEQ ID NO: 1188884 - DNA, 15 bp, Homo sapiens
ggaaaggagtcaaca

SEQ ID NO: 1188885 - DNA, 15 bp, Homo sapiens
tggaaaggagtcaac

SEQ ID NO: 1188886 - DNA, 15 bp, Homo sapiens
ttggaaaggagtcaa

SEQ ID NO: 1188887 - DNA, 15 bp, Homo sapiens
tttggaaaggagtca

SEQ ID NO: 1188888 - DNA, 15 bp, Homo sapiens
ttttggaaaggagtc

SEQ ID NO: 1188889 - DNA, 15 bp, Homo sapiens
gttttggaaaggagt

SEQ ID NO: 1188890 - DNA, 15 bp, Homo sapiens
cgttttggaaaggag

SEQ ID NO: 1188891 - DNA, 15 bp, Homo sapiens
ccgttttggaaagga

SEQ ID NO: 1188892 - DNA, 15 bp, Homo sapiens
gccgttttggaaagg

SEQ ID NO: 1188893 - DNA, 15 bp, Homo sapiens
ggccgttttggaaag

SEQ ID NO: 1188894 - DNA, 15 bp, Homo sapiens
aggccgttttggaaa

SEQ ID NO: 1188895 - DNA, 15 bp, Homo sapiens
aaggccgttttggaa

SEQ ID NO: 1188896 - DNA, 15 bp, Homo sapiens
aaaggccgttttgga

SEQ ID NO: 1188897 - DNA, 15 bp, Homo sapiens
gaaaggccgttttgg

SEQ ID NO: 1188898 - DNA, 15 bp, Homo sapiens
tgaaaggccgttttg

SEQ ID NO: 1188899 - DNA, 15 bp, Homo sapiens
ttgaaaggccgtttt

SEQ ID NO: 1188900 - DNA, 15 bp, Homo sapiens
tttgaaaggccgttt

SEQ ID NO: 1188901 - DNA, 15 bp, Homo sapiens
ctttgaaaggccgtt

SEQ ID NO: 1188902 - DNA, 15 bp, Homo sapiens
cctttgaaaggccgt

SEQ ID NO: 1188903 - DNA, 15 bp, Homo sapiens
ccctttgaaaggccg

SEQ ID NO: 1188904 - DNA, 15 bp, Homo sapiens
cccctttgaaaggcc

SEQ ID NO: 1188905 - DNA, 15 bp, Homo sapiens
tcccctttgaaaggc

SEQ ID NO: 1188906 - DNA, 15 bp, Homo sapiens
ctcccctttgaaagg

SEQ ID NO: 1188907 - DNA, 15 bp, Homo sapiens
actcccctttgaaag

SEQ ID NO: 1188908 - DNA, 15 bp, Homo sapiens
cactcccctttgaaa

SEQ ID NO: 1188909 - DNA, 15 bp, Homo sapiens
acactcccctttgaa

SEQ ID NO: 1188910 - DNA, 15 bp, Homo sapiens
cacactcccctttga

SEQ ID NO: 1188911 - DNA, 15 bp, Homo sapiens
ccacactcccctttg

SEQ ID NO: 1188912 - DNA, 15 bp, Homo sapiens
gccacactccccttt

SEQ ID NO: 1188913 - DNA, 15 bp, Homo sapiens
agccacactcccctt

SEQ ID NO: 1188914 - DNA, 15 bp, Homo sapiens
aagccacactcccct

SEQ ID NO: 1188915 - DNA, 15 bp, Homo sapiens
caagccacactcccc

SEQ ID NO: 1188916 - DNA, 15 bp, Homo sapiens
gcaagccacactccc

SEQ ID NO: 1188917 - DNA, 15 bp, Homo sapiens
ggcaagccacactcc

SEQ ID NO: 1188918 - DNA, 15 bp, Homo sapiens
gggcaagccacactc

SEQ ID NO: 1188919 - DNA, 15 bp, Homo sapiens
agggcaagccacact

SEQ ID NO: 1188920 - DNA, 15 bp, Homo sapiens
cagggcaagccacac

SEQ ID NO: 1188921 - DNA, 15 bp, Homo sapiens
gcagggcaagccaca

SEQ ID NO: 1188922 - DNA, 15 bp, Homo sapiens
tgcagggcaagccac

SEQ ID NO: 1188923 - DNA, 15 bp, Homo sapiens
ttgcagggcaagcca

SEQ ID NO: 1188924 - DNA, 15 bp, Homo sapiens
tttgcagggcaagcc

SEQ ID NO: 1188925 - DNA, 15 bp, Homo sapiens
gtttgcagggcaagc

SEQ ID NO: 1188926 - DNA, 15 bp, Homo sapiens
agtttgcagggcaag

SEQ ID NO: 1188927 - DNA, 15 bp, Homo sapiens
aagtttgcagggcaa

SEQ ID NO: 1188928 - DNA, 15 bp, Homo sapiens
gaagtttgcagggca

SEQ ID NO: 1188929 - DNA, 15 bp, Homo sapiens
agaagtttgcagggc

SEQ ID NO: 1188930 - DNA, 15 bp, Homo sapiens
gagaagtttgcaggg

SEQ ID NO: 1188931 - DNA, 15 bp, Homo sapiens
ggagaagtttgcagg

SEQ ID NO: 1188932 - DNA, 15 bp, Homo sapiens
gggagaagtttgcag

SEQ ID NO: 1188933 - DNA, 15 bp, Homo sapiens
tgggagaagtttgca

SEQ ID NO: 1188934 - DNA, 15 bp, Homo sapiens
gtgggagaagtttgc

SEQ ID NO: 1188935 - DNA, 15 bp, Homo sapiens
ggtgggagaagtttg

SEQ ID NO: 1188936 - DNA, 15 bp, Homo sapiens
gggtgggagaagttt

SEQ ID NO: 1188937 - DNA, 15 bp, Homo sapiens
tgggtgggagaagtt

SEQ ID NO: 1188938 - DNA, 15 bp, Homo sapiens
gtgggtgggagaagt

SEQ ID NO: 1188939 - DNA, 15 bp, Homo sapiens
agtgggtgggagaag

SEQ ID NO: 1188940 - DNA, 15 bp, Homo sapiens
gagtgggtgggagaa

SEQ ID NO: 1188941 - DNA, 15 bp, Homo sapiens
tgagtgggtgggaga

SEQ ID NO: 1188942 - DNA, 15 bp, Homo sapiens
gtgagtgggtgggag

SEQ ID NO: 1188943 - DNA, 15 bp, Homo sapiens
ggtgagtgggtggga

SEQ ID NO: 1188944 - DNA, 15 bp, Homo sapiens
tggtgagtgggtggg

SEQ ID NO: 1188945 - DNA, 15 bp, Homo sapiens
gtggtgagtgggtgg

SEQ ID NO: 1188946 - DNA, 15 bp, Homo sapiens
tgtggtgagtgggtg

SEQ ID NO: 1188947 - DNA, 15 bp, Homo sapiens
ttgtggtgagtgggt

SEQ ID NO: 1188948 - DNA, 15 bp, Homo sapiens
tttgtggtgagtggg

SEQ ID NO: 1188949 - DNA, 15 bp, Homo sapiens
ctttgtggtgagtgg

SEQ ID NO: 1188950 - DNA, 15 bp, Homo sapiens
cctttgtggtgagtg

SEQ ID NO: 1188951 - DNA, 15 bp, Homo sapiens
tcctttgtggtgagt

SEQ ID NO: 1188952 - DNA, 15 bp, Homo sapiens
atcctttgtggtgag

SEQ ID NO: 1188953 - DNA, 15 bp, Homo sapiens
aatcctttgtggtga

SEQ ID NO: 1188954 - DNA, 15 bp, Homo sapiens
aaatcctttgtggtg

SEQ ID NO: 1188955 - DNA, 15 bp, Homo sapiens
taaatcctttgtggt

SEQ ID NO: 1188956 - DNA, 15 bp, Homo sapiens
ataaatcctttgtgg

SEQ ID NO: 1188957 - DNA, 15 bp, Homo sapiens
aataaatcctttgtg

SEQ ID NO: 1188958 - DNA, 15 bp, Homo sapiens
gaataaatcctttgt

SEQ ID NO: 1188959 - DNA, 15 bp, Homo sapiens
gtgaataaatccttt

SEQ ID NO: 1188960 - DNA, 15 bp, Homo sapiens
tgtgaataaatcctt

SEQ ID NO: 1188961 - DNA, 15 bp, Homo sapiens
ctgtgaataaatcct

SEQ ID NO: 1188962 - DNA, 15 bp, Homo sapiens
tctgtgaataaatcc

SEQ ID NO: 1188963 - DNA, 15 bp, Homo sapiens
ctctgtgaataaatc

SEQ ID NO: 1188964 - DNA, 15 bp, Homo sapiens
cctctgtgaataaat

SEQ ID NO: 1188965 - DNA, 15 bp, Homo sapiens
gcctctgtgaataaa

SEQ ID NO: 1188966 - DNA, 15 bp, Homo sapiens
tgcctctgtgaataa

SEQ ID NO: 1188967 - DNA, 15 bp, Homo sapiens
ttgcctctgtgaata

SEQ ID NO: 1188968 - DNA, 15 bp, Homo sapiens
cttgcctctgtgaat

SEQ ID NO: 1188969 - DNA, 15 bp, Homo sapiens
acttgcctctgtgaa

SEQ ID NO: 1188970 - DNA, 15 bp, Homo sapiens
cacttgcctctgtga

SEQ ID NO: 1188971 - DNA, 15 bp, Homo sapiens
gcacttgcctctgtg

SEQ ID NO: 1188972 - DNA, 15 bp, Homo sapiens
tgcacttgcctctgt

SEQ ID NO: 1188973 - DNA, 15 bp, Homo sapiens
ctgcacttgcctctg

SEQ ID NO: 1188974 - DNA, 15 bp, Homo sapiens
actgcacttgcctct

SEQ ID NO: 1188975 - DNA, 15 bp, Homo sapiens
tactgcacttgcctc

SEQ ID NO: 1188976 - DNA, 15 bp, Homo sapiens
atactgcacttgcct

SEQ ID NO: 1188977 - DNA, 15 bp, Homo sapiens
aatactgcacttgcc

SEQ ID NO: 1188978 - DNA, 15 bp, Homo sapiens
aaatactgcacttgc

SEQ ID NO: 1188979 - DNA, 15 bp, Homo sapiens
aaaatactgcacttg

SEQ ID NO: 1188980 - DNA, 15 bp, Homo sapiens
aaaaatactgcactt

SEQ ID NO: 1188981 - DNA, 15 bp, Homo sapiens
gaaaaatactgcact

SEQ ID NO: 1188982 - DNA, 15 bp, Homo sapiens
agaaaaatactgcac

SEQ ID NO: 1188983 - DNA, 15 bp, Homo sapiens
aagaaaaatactgca

SEQ ID NO: 1188984 - DNA, 15 bp, Homo sapiens
taagaaaaatactgc

SEQ ID NO: 1188985 - DNA, 15 bp, Homo sapiens
ttaagaaaaatactg

SEQ ID NO: 1188986 - DNA, 15 bp, Homo sapiens
tttaagaaaaatact

SEQ ID NO: 1188987 - DNA, 15 bp, Homo sapiens
atttaagaaaaatac

SEQ ID NO: 1188988 - DNA, 15 bp, Homo sapiens
catttaagaaaaata

SEQ ID NO: 1188989 - DNA, 15 bp, Homo sapiens
tcatttaagaaaaat

SEQ ID NO: 1188990 - DNA, 15 bp, Homo sapiens
atcatttaagaaaaa

SEQ ID NO: 1188991 - DNA, 15 bp, Homo sapiens
tatcatttaagaaaa

SEQ ID NO: 1188992 - DNA, 15 bp, Homo sapiens
ctatcatttaagaaa

SEQ ID NO: 1188993 - DNA, 15 bp, Homo sapiens
gctatcatttaagaa

SEQ ID NO: 1188994 - DNA, 15 bp, Homo sapiens
ggctatcatttaaga

SEQ ID NO: 1188995 - DNA, 15 bp, Homo sapiens
gggctatcatttaag

SEQ ID NO: 1188996 - DNA, 15 bp, Homo sapiens
agggctatcatttaa

SEQ ID NO: 1188997 - DNA, 15 bp, Homo sapiens
aagggctatcattta

SEQ ID NO: 1188998 - DNA, 15 bp, Homo sapiens
caagggctatcattt

SEQ ID NO: 1188999 - DNA, 15 bp, Homo sapiens
ccaagggctatcatt

SEQ ID NO: 1189000 - DNA, 15 bp, Homo sapiens
tccaagggctatcat

SEQ ID NO: 1189001 - DNA, 15 bp, Homo sapiens
ctccaagggctatca

SEQ ID NO: 1189002 - DNA, 15 bp, Homo sapiens
tctccaagggctatc

SEQ ID NO: 1189003 - DNA, 15 bp, Homo sapiens
ctctccaagggctat

SEQ ID NO: 1189004 - DNA, 15 bp, Homo sapiens
cctctccaagggcta

SEQ ID NO: 1189005 - DNA, 15 bp, Homo sapiens
tcctctccaagggct

SEQ ID NO: 1189006 - DNA, 15 bp, Homo sapiens
ttcctctccaagggc

SEQ ID NO: 1189007 - DNA, 15 bp, Homo sapiens
tttcctctccaaggg

SEQ ID NO: 1189008 - DNA, 15 bp, Homo sapiens
gtttcctctccaagg

SEQ ID NO: 1189009 - DNA, 15 bp, Homo sapiens
agtttcctctccaag

SEQ ID NO: 1189010 - DNA, 15 bp, Homo sapiens
tagtttcctctccaa

SEQ ID NO: 1189011 - DNA, 15 bp, Homo sapiens
ttagtttcctctcca

SEQ ID NO: 1189012 - DNA, 15 bp, Homo sapiens
tttagtttcctctcc

SEQ ID NO: 1189013 - DNA, 15 bp, Homo sapiens
ctttagtttcctctc

SEQ ID NO: 1189014 - DNA, 15 bp, Homo sapiens
tctttagtttcctct

SEQ ID NO: 1189015 - DNA, 15 bp, Homo sapiens
ctctttagtttcctc

SEQ ID NO: 1189016 - DNA, 15 bp, Homo sapiens
gctctttagtttcct

SEQ ID NO: 1189017 - DNA, 15 bp, Homo sapiens
agctctttagtttcc

SEQ ID NO: 1189018 - DNA, 15 bp, Homo sapiens
aagctctttagtttc

SEQ ID NO: 1189019 - DNA, 15 bp, Homo sapiens
taagctctttagttt

SEQ ID NO: 1189020 - DNA, 15 bp, Homo sapiens
ataagctctttagtt

SEQ ID NO: 1189021 - DNA, 15 bp, Homo sapiens
cataagctctttagt

SEQ ID NO: 1189022 - DNA, 15 bp, Homo sapiens
gcataagctctttag

SEQ ID NO: 1189023 - DNA, 15 bp, Homo sapiens
agcataagctcttta

SEQ ID NO: 1189024 - DNA, 15 bp, Homo sapiens
aagcataagctcttt

SEQ ID NO: 1189025 - DNA, 15 bp, Homo sapiens
aaagcataagctctt

SEQ ID NO: 1189026 - DNA, 15 bp, Homo sapiens
aaaagcataagctct

SEQ ID NO: 1189027 - DNA, 15 bp, Homo sapiens
gaaaagcataagctc

SEQ ID NO: 1189028 - DNA, 15 bp, Homo sapiens
agaaaagcataagct

SEQ ID NO: 1189029 - DNA, 15 bp, Homo sapiens
tagaaaagcataagc

SEQ ID NO: 1189030 - DNA, 15 bp, Homo sapiens
ctagaaaagcataag

SEQ ID NO: 1189031 - DNA, 15 bp, Homo sapiens
cctagaaaagcataa

SEQ ID NO: 1189032 - DNA, 15 bp, Homo sapiens
tcctagaaaagcata

SEQ ID NO: 1189033 - DNA, 15 bp, Homo sapiens
gtcctagaaaagcat

SEQ ID NO: 1189034 - DNA, 15 bp, Homo sapiens
cgtcctagaaaagca

SEQ ID NO: 1189035 - DNA, 15 bp, Homo sapiens
gcgtcctagaaaagc

SEQ ID NO: 1189036 - DNA, 15 bp, Homo sapiens
agcgtcctagaaaag

SEQ ID NO: 1189037 - DNA, 15 bp, Homo sapiens
cagcgtcctagaaaa

SEQ ID NO: 1189038 - DNA, 15 bp, Homo sapiens
ccagcgtcctagaaa

SEQ ID NO: 1189039 - DNA, 15 bp, Homo sapiens
cccagcgtcctagaa

SEQ ID NO: 1189040 - DNA, 15 bp, Homo sapiens
gcccagcgtcctaga

SEQ ID NO: 1189041 - DNA, 15 bp, Homo sapiens
agcccagcgtcctag

SEQ ID NO: 1189042 - DNA, 15 bp, Homo sapiens
aagcccagcgtccta

SEQ ID NO: 1189043 - DNA, 15 bp, Homo sapiens
taagcccagcgtcct

SEQ ID NO: 1189044 - DNA, 15 bp, Homo sapiens
gtaagcccagcgtcc

SEQ ID NO: 1189045 - DNA, 15 bp, Homo sapiens
tgtaagcccagcgtc

SEQ ID NO: 1189046 - DNA, 15 bp, Homo sapiens
atgtaagcccagcgt

SEQ ID NO: 1189047 - DNA, 15 bp, Homo sapiens
gatgtaagcccagcg

SEQ ID NO: 1189048 - DNA, 15 bp, Homo sapiens
ggatgtaagcccagc

SEQ ID NO: 1189049 - DNA, 15 bp, Homo sapiens
aggatgtaagcccag

SEQ ID NO: 1189050 - DNA, 15 bp, Homo sapiens
caggatgtaagccca

SEQ ID NO: 1189051 - DNA, 15 bp, Homo sapiens
tcaggatgtaagccc

SEQ ID NO: 1189052 - DNA, 15 bp, Homo sapiens
ctcaggatgtaagcc

SEQ ID NO: 1189053 - DNA, 15 bp, Homo sapiens
cctcaggatgtaagc

SEQ ID NO: 1189054 - DNA, 15 bp, Homo sapiens
acctcaggatgtaag

SEQ ID NO: 1189055 - DNA, 15 bp, Homo sapiens
aacctcaggatgtaa

SEQ ID NO: 1189056 - DNA, 15 bp, Homo sapiens
caacctcaggatgta

SEQ ID NO: 1189057 - DNA, 15 bp, Homo sapiens
gcaacctcaggatgt

SEQ ID NO: 1189058 - DNA, 15 bp, Homo sapiens
ggcaacctcaggatg

SEQ ID NO: 1189059 - DNA, 15 bp, Homo sapiens
gggcaacctcaggat

SEQ ID NO: 1189060 - DNA, 15 bp, Homo sapiens
cgggcaacctcagga

SEQ ID NO: 1189061 - DNA, 15 bp, Homo sapiens
tcgggcaacctcagg

SEQ ID NO: 1189062 - DNA, 15 bp, Homo sapiens
atcgggcaacctcag

SEQ ID NO: 1189063 - DNA, 15 bp, Homo sapiens
aatcgggcaacctca

SEQ ID NO: 1189064 - DNA, 15 bp, Homo sapiens
aaatcgggcaacctc

SEQ ID NO: 1189065 - DNA, 15 bp, Homo sapiens
caaatcgggcaacct

SEQ ID NO: 1189066 - DNA, 15 bp, Homo sapiens
ccaaatcgggcaacc

SEQ ID NO: 1189067 - DNA, 15 bp, Homo sapiens
tccaaatcgggcaac

SEQ ID NO: 1189068 - DNA, 15 bp, Homo sapiens
atccaaatcgggcaa

SEQ ID NO: 1189069 - DNA, 15 bp, Homo sapiens
tatccaaatcgggca

SEQ ID NO: 1189070 - DNA, 15 bp, Homo sapiens
atatccaaatcgggc

SEQ ID NO: 1189071 - DNA, 15 bp, Homo sapiens
aatatccaaatcggg

SEQ ID NO: 1189072 - DNA, 15 bp, Homo sapiens
aaatatccaaatcgg

SEQ ID NO: 1189073 - DNA, 15 bp, Homo sapiens
aaaatatccaaatcg

SEQ ID NO: 1189074 - DNA, 15 bp, Homo sapiens
aaaaatatccaaatc

SEQ ID NO: 1189075 - DNA, 15 bp, Homo sapiens
gaaaaatatccaaat

SEQ ID NO: 1189076 - DNA, 15 bp, Homo sapiens
agaaaaatatccaaa

SEQ ID NO: 1189077 - DNA, 15 bp, Homo sapiens
cagaaaaatatccaa

SEQ ID NO: 1189078 - DNA, 15 bp, Homo sapiens
gcagaaaaatatcca

SEQ ID NO: 1189079 - DNA, 15 bp, Homo sapiens
agcagaaaaatatcc

SEQ ID NO: 1189080 - DNA, 15 bp, Homo sapiens
cagcagaaaaatatc

SEQ ID NO: 1189081 - DNA, 15 bp, Homo sapiens
gcagcagaaaaatat

SEQ ID NO: 1189082 - DNA, 15 bp, Homo sapiens
agcagcagaaaaata

SEQ ID NO: 1189083 - DNA, 15 bp, Homo sapiens
gagcagcagaaaaat

SEQ ID NO: 1189084 - DNA, 15 bp, Homo sapiens
agagcagcagaaaaa

SEQ ID NO: 1189085 - DNA, 15 bp, Homo sapiens
gagagcagcagaaaa

SEQ ID NO: 1189086 - DNA, 15 bp, Homo sapiens
agagagcagcagaaa

SEQ ID NO: 1189087 - DNA, 15 bp, Homo sapiens
aagagagcagcagaa

SEQ ID NO: 1189088 - DNA, 15 bp, Homo sapiens
caagagagcagcaga

SEQ ID NO: 1189089 - DNA, 15 bp, Homo sapiens
ccaagagagcagcag

SEQ ID NO: 1189090 - DNA, 15 bp, Homo sapiens
gccaagagagcagca

SEQ ID NO: 1189091 - DNA, 15 bp, Homo sapiens
ggccaagagagcagc

SEQ ID NO: 1189092 - DNA, 15 bp, Homo sapiens
gggccaagagagcag

SEQ ID NO: 1189093 - DNA, 15 bp, Homo sapiens
ggggccaagagagca

SEQ ID NO: 1189094 - DNA, 15 bp, Homo sapiens
gggggccaagagagc

SEQ ID NO: 1189095 - DNA, 15 bp, Homo sapiens
ggggggccaagagag

SEQ ID NO: 1189096 - DNA, 15 bp, Homo sapiens
tggggggccaagaga

SEQ ID NO: 1189097 - DNA, 15 bp, Homo sapiens
gtggggggccaagag

SEQ ID NO: 1189098 - DNA, 15 bp, Homo sapiens
agtggggggccaaga

SEQ ID NO: 1189099 - DNA, 15 bp, Homo sapiens
aagtggggggccaag

SEQ ID NO: 1189100 - DNA, 15 bp, Homo sapiens
taagtggggggccaa

SEQ ID NO: 1189101 - DNA, 15 bp, Homo sapiens
ttaagtggggggcca

SEQ ID NO: 1189102 - DNA, 15 bp, Homo sapiens
attaagtggggggcc

SEQ ID NO: 1189103 - DNA, 15 bp, Homo sapiens
aattaagtggggggc

SEQ ID NO: 1189104 - DNA, 15 bp, Homo sapiens
caattaagtgggggg

SEQ ID NO: 1189105 - DNA, 15 bp, Homo sapiens
ccaattaagtggggg

SEQ ID NO: 1189106 - DNA, 15 bp, Homo sapiens
accaattaagtgggg

SEQ ID NO: 1189107 - DNA, 15 bp, Homo sapiens
caccaattaagtggg

SEQ ID NO: 1189108 - DNA, 15 bp, Homo sapiens
tcaccaattaagtgg

SEQ ID NO: 1189109 - DNA, 15 bp, Homo sapiens
ttcaccaattaagtg

SEQ ID NO: 1189110 - DNA, 15 bp, Homo sapiens
attcaccaattaagt

SEQ ID NO: 1189111 - DNA, 15 bp, Homo sapiens
aattcaccaattaag

SEQ ID NO: 1189112 - DNA, 15 bp, Homo sapiens
aaattcaccaattaa

SEQ ID NO: 1189113 - DNA, 15 bp, Homo sapiens
gaaattcaccaatta

SEQ ID NO: 1189114 - DNA, 15 bp, Homo sapiens
agaaattcaccaatt

SEQ ID NO: 1189115 - DNA, 15 bp, Homo sapiens
tagaaattcaccaat

SEQ ID NO: 1189116 - DNA, 15 bp, Homo sapiens
ttagaaattcaccaa

SEQ ID NO: 1189117 - DNA, 15 bp, Homo sapiens
gttagaaattcacca

SEQ ID NO: 1189118 - DNA, 15 bp, Homo sapiens
agttagaaattcacc

SEQ ID NO: 1189119 - DNA, 15 bp, Homo sapiens
gagttagaaattcac

SEQ ID NO: 1189120 - DNA, 15 bp, Homo sapiens
agagttagaaattca

SEQ ID NO: 1189121 - DNA, 15 bp, Homo sapiens
aagagttagaaattc

SEQ ID NO: 1189122 - DNA, 15 bp, Homo sapiens
caagagttagaaatt

SEQ ID NO: 1189123 - DNA, 15 bp, Homo sapiens
acaagagttagaaat

SEQ ID NO: 1189124 - DNA, 15 bp, Homo sapiens
cacaagagttagaaa

SEQ ID NO: 1189125 - DNA, 15 bp, Homo sapiens
gcacaagagttagaa

SEQ ID NO: 1189126 - DNA, 15 bp, Homo sapiens
agcacaagagttaga

SEQ ID NO: 1189127 - DNA, 15 bp, Homo sapiens
tagcacaagagttag

SEQ ID NO: 1189128 - DNA, 15 bp, Homo sapiens
gtagcacaagagtta

SEQ ID NO: 1189129 - DNA, 15 bp, Homo sapiens
agtagcacaagagtt

SEQ ID NO: 1189130 - DNA, 15 bp, Homo sapiens
aagtagcacaagagt

SEQ ID NO: 1189131 - DNA, 15 bp, Homo sapiens
caagtagcacaagag

SEQ ID NO: 1189132 - DNA, 15 bp, Homo sapiens
ccaagtagcacaaga

SEQ ID NO: 1189133 - DNA, 15 bp, Homo sapiens
accaagtagcacaag

SEQ ID NO: 1189134 - DNA, 15 bp, Homo sapiens
taccaagtagcacaa

SEQ ID NO: 1189135 - DNA, 15 bp, Homo sapiens
ataccaagtagcaca

SEQ ID NO: 1189136 - DNA, 15 bp, Homo sapiens
gataccaagtagcac

SEQ ID NO: 1189137 - DNA, 15 bp, Homo sapiens
cgataccaagtagca

SEQ ID NO: 1189138 - DNA, 15 bp, Homo sapiens
acgataccaagtagc

SEQ ID NO: 1189139 - DNA, 15 bp, Homo sapiens
gacgataccaagtag

SEQ ID NO: 1189140 - DNA, 15 bp, Homo sapiens
ggacgataccaagta

SEQ ID NO: 1189141 - DNA, 15 bp, Homo sapiens
tggacgataccaagt

SEQ ID NO: 1189142 - DNA, 15 bp, Homo sapiens
ttggacgataccaag

SEQ ID NO: 1189143 - DNA, 15 bp, Homo sapiens
tttggacgataccaa

SEQ ID NO: 1189144 - DNA, 15 bp, Homo sapiens
ttttggacgatacca

SEQ ID NO: 1189145 - DNA, 15 bp, Homo sapiens
attttggacgatacc

SEQ ID NO: 1189146 - DNA, 15 bp, Homo sapiens
gattttggacgatac

SEQ ID NO: 1189147 - DNA, 15 bp, Homo sapiens
ggattttggacgata

SEQ ID NO: 1189148 - DNA, 15 bp, Homo sapiens
tggattttggacgat

SEQ ID NO: 1189149 - DNA, 15 bp, Homo sapiens
ttggattttggacga

SEQ ID NO: 1189150 - DNA, 15 bp, Homo sapiens
tttggattttggacg

SEQ ID NO: 1189151 - DNA, 15 bp, Homo sapiens
atttggattttggac

SEQ ID NO: 1189152 - DNA, 15 bp, Homo sapiens
tatttggattttgga

SEQ ID NO: 1189153 - DNA, 15 bp, Homo sapiens
atatttggattttgg

SEQ ID NO: 1189154 - DNA, 15 bp, Homo sapiens
tatatttggattttg

SEQ ID NO: 1189155 - DNA, 15 bp, Homo sapiens
ctatatttggatttt

SEQ ID NO: 1189156 - DNA, 15 bp, Homo sapiens
actatatttggattt

SEQ ID NO: 1189157 - DNA, 15 bp, Homo sapiens
gactatatttggatt

SEQ ID NO: 1189158 - DNA, 15 bp, Homo sapiens
tgactatatttggat

SEQ ID NO: 1189159 - DNA, 15 bp, Homo sapiens
ttgactatatttgga

SEQ ID NO: 1189160 - DNA, 15 bp, Homo sapiens
gttgactatatttgg

SEQ ID NO: 1189161 - DNA, 15 bp, Homo sapiens
tgttgactatatttg

SEQ ID NO: 1189162 - DNA, 15 bp, Homo sapiens
ctgttgactatattt

SEQ ID NO: 1189163 - DNA, 15 bp, Homo sapiens
actgttgactatatt

SEQ ID NO: 1189164 - DNA, 15 bp, Homo sapiens
cactgttgactatat

SEQ ID NO: 1189165 - DNA, 15 bp, Homo sapiens
acactgttgactata

SEQ ID NO: 1189166 - DNA, 15 bp, Homo sapiens
tacactgttgactat

SEQ ID NO: 1189167 - DNA, 15 bp, Homo sapiens
ctacactgttgacta

SEQ ID NO: 1189168 - DNA, 15 bp, Homo sapiens
actacactgttgact

SEQ ID NO: 1189169 - DNA, 15 bp, Homo sapiens
cactacactgttgac

SEQ ID NO: 1189170 - DNA, 15 bp, Homo sapiens
ccactacactgttga

SEQ ID NO: 1189171 - DNA, 15 bp, Homo sapiens
gccactacactgttg

SEQ ID NO: 1189172 - DNA, 15 bp, Homo sapiens
agccactacactgtt

SEQ ID NO: 1189173 - DNA, 15 bp, Homo sapiens
gagccactacactgt

SEQ ID NO: 1189174 - DNA, 15 bp, Homo sapiens
agagccactacactg

SEQ ID NO: 1189175 - DNA, 15 bp, Homo sapiens
cagagccactacact

SEQ ID NO: 1189176 - DNA, 15 bp, Homo sapiens
gcagagccactacac

SEQ ID NO: 1189177 - DNA, 15 bp, Homo sapiens
agcagagccactaca

SEQ ID NO: 1189178 - DNA, 15 bp, Homo sapiens
cagcagagccactac

SEQ ID NO: 1189179 - DNA, 15 bp, Homo sapiens
acagcagagccacta

SEQ ID NO: 1189180 - DNA, 15 bp, Homo sapiens
gacagcagagccact

SEQ ID NO: 1189181 - DNA, 15 bp, Homo sapiens
ggacagcagagccac

SEQ ID NO: 1189182 - DNA, 15 bp, Homo sapiens
tggacagcagagcca

SEQ ID NO: 1189183 - DNA, 15 bp, Homo sapiens
atggacagcagagcc

SEQ ID NO: 1189184 - DNA, 15 bp, Homo sapiens
aatggacagcagagc

SEQ ID NO: 1189185 - DNA, 15 bp, Homo sapiens
caatggacagcagag

SEQ ID NO: 1189186 - DNA, 15 bp, Homo sapiens
gcaatggacagcaga

SEQ ID NO: 1189187 - DNA, 15 bp, Homo sapiens
cgcaatggacagcag

SEQ ID NO: 1189188 - DNA, 15 bp, Homo sapiens
ccgcaatggacagca

SEQ ID NO: 1189189 - DNA, 15 bp, Homo sapiens
cccgcaatggacagc

SEQ ID NO: 1189190 - DNA, 15 bp, Homo sapiens
ccccgcaatggacag

SEQ ID NO: 1189191 - DNA, 15 bp, Homo sapiens
cccccgcaatggaca

SEQ ID NO: 1189192 - DNA, 15 bp, Homo sapiens
acccccgcaatggac

SEQ ID NO: 1189193 - DNA, 15 bp, Homo sapiens
cacccccgcaatgga

SEQ ID NO: 1189194 - DNA, 15 bp, Homo sapiens
gcacccccgcaatgg

SEQ ID NO: 1189195 - DNA, 15 bp, Homo sapiens
agcacccccgcaatg

SEQ ID NO: 1189196 - DNA, 15 bp, Homo sapiens
aagcacccccgcaat

SEQ ID NO: 1189197 - DNA, 15 bp, Homo sapiens
caagcacccccgcaa

SEQ ID NO: 1189198 - DNA, 15 bp, Homo sapiens
acaagcacccccgca

SEQ ID NO: 1189199 - DNA, 15 bp, Homo sapiens
aacaagcacccccgc

SEQ ID NO: 1189200 - DNA, 15 bp, Homo sapiens
caacaagcacccccg

SEQ ID NO: 1189201 - DNA, 15 bp, Homo sapiens
ccaacaagcaccccc

SEQ ID NO: 1189202 - DNA, 15 bp, Homo sapiens
tccaacaagcacccc

SEQ ID NO: 1189203 - DNA, 15 bp, Homo sapiens
atccaacaagcaccc

SEQ ID NO: 1189204 - DNA, 15 bp, Homo sapiens
gatccaacaagcacc

SEQ ID NO: 1189205 - DNA, 15 bp, Homo sapiens
agatccaacaagcac

SEQ ID NO: 1189206 - DNA, 15 bp, Homo sapiens
cagatccaacaagca

SEQ ID NO: 1189207 - DNA, 15 bp, Homo sapiens
ccagatccaacaagc

SEQ ID NO: 1189208 - DNA, 15 bp, Homo sapiens
tccagatccaacaag

SEQ ID NO: 1189209 - DNA, 15 bp, Homo sapiens
atccagatccaacaa

SEQ ID NO: 1189210 - DNA, 15 bp, Homo sapiens
aatccagatccaaca

SEQ ID NO: 1189211 - DNA, 15 bp, Homo sapiens
gaatccagatccaac

SEQ ID NO: 1189212 - DNA, 15 bp, Homo sapiens
ggaatccagatccaa

SEQ ID NO: 1189213 - DNA, 15 bp, Homo sapiens
aggaatccagatcca

SEQ ID NO: 1189214 - DNA, 15 bp, Homo sapiens
gaggaatccagatcc

SEQ ID NO: 1189215 - DNA, 15 bp, Homo sapiens
tgaggaatccagatc

SEQ ID NO: 1189216 - DNA, 15 bp, Homo sapiens
ctgaggaatccagat

SEQ ID NO: 1189217 - DNA, 15 bp, Homo sapiens
cctgaggaatccaga

SEQ ID NO: 1189218 - DNA, 15 bp, Homo sapiens
acctgaggaatccag

SEQ ID NO: 1189219 - DNA, 15 bp, Homo sapiens
tacctgaggaatcca

SEQ ID NO: 1189220 - DNA, 15 bp, Homo sapiens
ttacctgaggaatcc

SEQ ID NO: 1189221 - DNA, 15 bp, Homo sapiens
cttacctgaggaatc

SEQ ID NO: 1189222 - DNA, 15 bp, Homo sapiens
tcttacctgaggaat

SEQ ID NO: 1189223 - DNA, 15 bp, Homo sapiens
atcttacctgaggaa

SEQ ID NO: 1189224 - DNA, 15 bp, Homo sapiens
tatcttacctgagga

SEQ ID NO: 1189225 - DNA, 15 bp, Homo sapiens
atatcttacctgagg

SEQ ID NO: 1189226 - DNA, 15 bp, Homo sapiens
gatatcttacctgag

SEQ ID NO: 1189227 - DNA, 15 bp, Homo sapiens
tgatatcttacctga

SEQ ID NO: 1189228 - DNA, 15 bp, Homo sapiens
atgatatcttacctg

SEQ ID NO: 1189229 - DNA, 15 bp, Homo sapiens
tatgatatcttacct

SEQ ID NO: 1189230 - DNA, 15 bp, Homo sapiens
ttatgatatcttacc

SEQ ID NO: 1189231 - DNA, 15 bp, Homo sapiens
attatgatatcttac

SEQ ID NO: 1189232 - DNA, 15 bp, Homo sapiens
aattatgatatctta

SEQ ID NO: 1189233 - DNA, 15 bp, Homo sapiens
gaattatgatatctt

SEQ ID NO: 1189234 - DNA, 15 bp, Homo sapiens
tgaattatgatatct

SEQ ID NO: 1189235 - DNA, 15 bp, Homo sapiens
ttgaattatgatatc

SEQ ID NO: 1189236 - DNA, 15 bp, Homo sapiens
tttgaattatgatat

SEQ ID NO: 1189237 - DNA, 15 bp, Homo sapiens
ttttgaattatgata

SEQ ID NO: 1189238 - DNA, 15 bp, Homo sapiens
tttttgaattatgat

SEQ ID NO: 1189239 - DNA, 15 bp, Homo sapiens
ttttttgaattatga

SEQ ID NO: 1189240 - DNA, 15 bp, Homo sapiens
attttttgaattatg

SEQ ID NO: 1189241 - DNA, 15 bp, Homo sapiens
aattttttgaattat

SEQ ID NO: 1189242 - DNA, 15 bp, Homo sapiens
aaattttttgaatta

SEQ ID NO: 1189243 - DNA, 15 bp, Homo sapiens
taaattttttgaatt

SEQ ID NO: 1189244 - DNA, 15 bp, Homo sapiens
ctaaattttttgaat

SEQ ID NO: 1189245 - DNA, 15 bp, Homo sapiens
tctaaattttttgaa

SEQ ID NO: 1189246 - DNA, 15 bp, Homo sapiens
atctaaattttttga

SEQ ID NO: 1189247 - DNA, 15 bp, Homo sapiens
aatctaaattttttg

SEQ ID NO: 1189248 - DNA, 15 bp, Homo sapiens
caatctaaatttttt

SEQ ID NO: 1189249 - DNA, 15 bp, Homo sapiens
ccaatctaaattttt

SEQ ID NO: 1189250 - DNA, 15 bp, Homo sapiens
cccaatctaaatttt

SEQ ID NO: 1189251 - DNA, 15 bp, Homo sapiens
tcccaatctaaattt

SEQ ID NO: 1189252 - DNA, 15 bp, Homo sapiens
atcccaatctaaatt

SEQ ID NO: 1189253 - DNA, 15 bp, Homo sapiens
tatcccaatctaaat

SEQ ID NO: 1189254 - DNA, 15 bp, Homo sapiens
ttatcccaatctaaa

SEQ ID NO: 1189255 - DNA, 15 bp, Homo sapiens
attatcccaatctaa

SEQ ID NO: 1189256 - DNA, 15 bp, Homo sapiens
gattatcccaatcta

SEQ ID NO: 1189257 - DNA, 15 bp, Homo sapiens
agattatcccaatct

SEQ ID NO: 1189258 - DNA, 15 bp, Homo sapiens
cagattatcccaatc

SEQ ID NO: 1189259 - DNA, 15 bp, Homo sapiens
acagattatcccaat

SEQ ID NO: 1189260 - DNA, 15 bp, Homo sapiens
aacagattatcccaa

SEQ ID NO: 1189261 - DNA, 15 bp, Homo sapiens
taacagattatccca

SEQ ID NO: 1189262 - DNA, 15 bp, Homo sapiens
ataacagattatccc

SEQ ID NO: 1189263 - DNA, 15 bp, Homo sapiens
aataacagattatcc

SEQ ID NO: 1189264 - DNA, 15 bp, Homo sapiens
taataacagattatc

SEQ ID NO: 1189265 - DNA, 15 bp, Homo sapiens
ttaataacagattat

SEQ ID NO: 1189266 - DNA, 15 bp, Homo sapiens
attaataacagatta

SEQ ID NO: 1189267 - DNA, 15 bp, Homo sapiens
cattaataacagatt

SEQ ID NO: 1189268 - DNA, 15 bp, Homo sapiens
tcattaataacagat

SEQ ID NO: 1189269 - DNA, 15 bp, Homo sapiens
atcattaataacaga

SEQ ID NO: 1189270 - DNA, 15 bp, Homo sapiens
gatcattaataacag

SEQ ID NO: 1189271 - DNA, 15 bp, Homo sapiens
tgatcattaataaca

SEQ ID NO: 1189272 - DNA, 15 bp, Homo sapiens
gtgatcattaataac

SEQ ID NO: 1189273 - DNA, 15 bp, Homo sapiens
ggtgatcattaataa

SEQ ID NO: 1189274 - DNA, 15 bp, Homo sapiens
aggtgatcattaata

SEQ ID NO: 1189275 - DNA, 15 bp, Homo sapiens
taggtgatcattaat

SEQ ID NO: 1189276 - DNA, 15 bp, Homo sapiens
ttaggtgatcattaa

SEQ ID NO: 1189277 - DNA, 15 bp, Homo sapiens
attaggtgatcatta

SEQ ID NO: 1189278 - DNA, 15 bp, Homo sapiens
tattaggtgatcatt

SEQ ID NO: 1189279 - DNA, 15 bp, Homo sapiens
ttattaggtgatcat

SEQ ID NO: 1189280 - DNA, 15 bp, Homo sapiens
attattaggtgatca

SEQ ID NO: 1189281 - DNA, 15 bp, Homo sapiens
cattattaggtgatc

SEQ ID NO: 1189282 - DNA, 15 bp, Homo sapiens
tcattattaggtgat

SEQ ID NO: 1189283 - DNA, 15 bp, Homo sapiens
gtcattattaggtga

SEQ ID NO: 1189284 - DNA, 15 bp, Homo sapiens
agtcattattaggtg

SEQ ID NO: 1189285 - DNA, 15 bp, Homo sapiens
cagtcattattaggt

SEQ ID NO: 1189286 - DNA, 15 bp, Homo sapiens
tcagtcattattagg

SEQ ID NO: 1189287 - DNA, 15 bp, Homo sapiens
ttcagtcattattag

SEQ ID NO: 1189288 - DNA, 15 bp, Homo sapiens
cttcagtcattatta

SEQ ID NO: 1189289 - DNA, 15 bp, Homo sapiens
acttcagtcattatt

SEQ ID NO: 1189290 - DNA, 15 bp, Homo sapiens
tacttcagtcattat

SEQ ID NO: 1189291 - DNA, 15 bp, Homo sapiens
ttacttcagtcatta

SEQ ID NO: 1189292 - DNA, 15 bp, Homo sapiens
tttacttcagtcatt

SEQ ID NO: 1189293 - DNA, 15 bp, Homo sapiens
ctttacttcagtcat

SEQ ID NO: 1189294 - DNA, 15 bp, Homo sapiens
cctttacttcagtca

SEQ ID NO: 1189295 - DNA, 15 bp, Homo sapiens
tcctttacttcagtc

SEQ ID NO: 1189296 - DNA, 15 bp, Homo sapiens
ttcctttacttcagt

SEQ ID NO: 1189297 - DNA, 15 bp, Homo sapiens
attcctttacttcag

SEQ ID NO: 1189298 - DNA, 15 bp, Homo sapiens
tattcctttacttca

SEQ ID NO: 1189299 - DNA, 15 bp, Homo sapiens
gtattcctttacttc

SEQ ID NO: 1189300 - DNA, 15 bp, Homo sapiens
ggtattcctttactt

SEQ ID NO: 1189301 - DNA, 15 bp, Homo sapiens
tggtattcctttact

SEQ ID NO: 1189302 - DNA, 15 bp, Homo sapiens
ctggtattcctttac

SEQ ID NO: 1189303 - DNA, 15 bp, Homo sapiens
tctggtattccttta

SEQ ID NO: 1189304 - DNA, 15 bp, Homo sapiens
ctctggtattccttt

SEQ ID NO: 1189305 - DNA, 15 bp, Homo sapiens
tctctggtattcctt

SEQ ID NO: 1189306 - DNA, 15 bp, Homo sapiens
ttctctggtattcct

SEQ ID NO: 1189307 - DNA, 15 bp, Homo sapiens
gttctctggtattcc

SEQ ID NO: 1189308 - DNA, 15 bp, Homo sapiens
agttctctggtattc

SEQ ID NO: 1189309 - DNA, 15 bp, Homo sapiens
cagttctctggtatt

SEQ ID NO: 1189310 - DNA, 15 bp, Homo sapiens
tcagttctctggtat

SEQ ID NO: 1189311 - DNA, 15 bp, Homo sapiens
atcagttctctggta

SEQ ID NO: 1189312 - DNA, 15 bp, Homo sapiens
tatcagttctctggt

SEQ ID NO: 1189313 - DNA, 15 bp, Homo sapiens
ctatcagttctctgg

SEQ ID NO: 1189314 - DNA, 15 bp, Homo sapiens
actatcagttctctg

SEQ ID NO: 1189315 - DNA, 15 bp, Homo sapiens
cactatcagttctct

SEQ ID NO: 1189316 - DNA, 15 bp, Homo sapiens
ccactatcagttctc

SEQ ID NO: 1189317 - DNA, 15 bp, Homo sapiens
accactatcagttct

SEQ ID NO: 1189318 - DNA, 15 bp, Homo sapiens
aaccactatcagttc

SEQ ID NO: 1189319 - DNA, 15 bp, Homo sapiens
taaccactatcagtt

SEQ ID NO: 1189320 - DNA, 15 bp, Homo sapiens
ataaccactatcagt

SEQ ID NO: 1189321 - DNA, 15 bp, Homo sapiens
cataaccactatcag

SEQ ID NO: 1189322 - DNA, 15 bp, Homo sapiens
ccataaccactatca

SEQ ID NO: 1189323 - DNA, 15 bp, Homo sapiens
tccataaccactatc

SEQ ID NO: 1189324 - DNA, 15 bp, Homo sapiens
atccataaccactat

SEQ ID NO: 1189325 - DNA, 15 bp, Homo sapiens
tatccataaccacta

SEQ ID NO: 1189326 - DNA, 15 bp, Homo sapiens
atatccataaccact

SEQ ID NO: 1189327 - DNA, 15 bp, Homo sapiens
aatatccataaccac

SEQ ID NO: 1189328 - DNA, 15 bp, Homo sapiens
taatatccataacca

SEQ ID NO: 1189329 - DNA, 15 bp, Homo sapiens
gtaatatccataacc

SEQ ID NO: 1189330 - DNA, 15 bp, Homo sapiens
ggtaatatccataac

SEQ ID NO: 1189331 - DNA, 15 bp, Homo sapiens
aggtaatatccataa

SEQ ID NO: 1189332 - DNA, 15 bp, Homo sapiens
aaggtaatatccata

SEQ ID NO: 1189333 - DNA, 15 bp, Homo sapiens
taaggtaatatccat

SEQ ID NO: 1189334 - DNA, 15 bp, Homo sapiens
ataaggtaatatcca

SEQ ID NO: 1189335 - DNA, 15 bp, Homo sapiens
tataaggtaatatcc

SEQ ID NO: 1189336 - DNA, 15 bp, Homo sapiens
ctataaggtaatatc

SEQ ID NO: 1189337 - DNA, 15 bp, Homo sapiens
actataaggtaatat

SEQ ID NO: 1189338 - DNA, 15 bp, Homo sapiens
gactataaggtaata

SEQ ID NO: 1189339 - DNA, 15 bp, Homo sapiens
agactataaggtaat

SEQ ID NO: 1189340 - DNA, 15 bp, Homo sapiens
tagactataaggtaa

SEQ ID NO: 1189341 - DNA, 15 bp, Homo sapiens
ctagactataaggta

SEQ ID NO: 1189342 - DNA, 15 bp, Homo sapiens
tctagactataaggt

SEQ ID NO: 1189343 - DNA, 15 bp, Homo sapiens
ctctagactataagg

SEQ ID NO: 1189344 - DNA, 15 bp, Homo sapiens
gctctagactataag

SEQ ID NO: 1189345 - DNA, 15 bp, Homo sapiens
tgctctagactataa

SEQ ID NO: 1189346 - DNA, 15 bp, Homo sapiens
atgctctagactata

SEQ ID NO: 1189347 - DNA, 15 bp, Homo sapiens
aatgctctagactat

SEQ ID NO: 1189348 - DNA, 15 bp, Homo sapiens
aaatgctctagacta

SEQ ID NO: 1189349 - DNA, 15 bp, Homo sapiens
taaatgctctagact

SEQ ID NO: 1189350 - DNA, 15 bp, Homo sapiens
ataaatgctctagac

SEQ ID NO: 1189351 - DNA, 15 bp, Homo sapiens
tataaatgctctaga

SEQ ID NO: 1189352 - DNA, 15 bp, Homo sapiens
gtataaatgctctag

SEQ ID NO: 1189353 - DNA, 15 bp, Homo sapiens
agtataaatgctcta

SEQ ID NO: 1189354 - DNA, 15 bp, Homo sapiens
cagtataaatgctct

SEQ ID NO: 1189355 - DNA, 15 bp, Homo sapiens
gcagtataaatgctc

SEQ ID NO: 1189356 - DNA, 15 bp, Homo sapiens
agcagtataaatgct

SEQ ID NO: 1189357 - DNA, 15 bp, Homo sapiens
gagcagtataaatgc

SEQ ID NO: 1189358 - DNA, 15 bp, Homo sapiens
cgagcagtataaatg

SEQ ID NO: 1189359 - DNA, 15 bp, Homo sapiens
acgagcagtataaat

SEQ ID NO: 1189360 - DNA, 15 bp, Homo sapiens
aacgagcagtataaa

SEQ ID NO: 1189361 - DNA, 15 bp, Homo sapiens
taacgagcagtataa

SEQ ID NO: 1189362 - DNA, 15 bp, Homo sapiens
ttaacgagcagtata

SEQ ID NO: 1189363 - DNA, 15 bp, Homo sapiens
attaacgagcagtat

SEQ ID NO: 1189364 - DNA, 15 bp, Homo sapiens
gattaacgagcagta

SEQ ID NO: 1189365 - DNA, 15 bp, Homo sapiens
tgattaacgagcagt

SEQ ID NO: 1189366 - DNA, 15 bp, Homo sapiens
atgattaacgagcag

SEQ ID NO: 1189367 - DNA, 15 bp, Homo sapiens
aatgattaacgagca

SEQ ID NO: 1189368 - DNA, 15 bp, Homo sapiens
caatgattaacgagc

SEQ ID NO: 1189369 - DNA, 15 bp, Homo sapiens
gcaatgattaacgag

SEQ ID NO: 1189370 - DNA, 15 bp, Homo sapiens
ggcaatgattaacga

SEQ ID NO: 1189371 - DNA, 15 bp, Homo sapiens
aggcaatgattaacg

SEQ ID NO: 1189372 - DNA, 15 bp, Homo sapiens
aaggcaatgattaac

SEQ ID NO: 1189373 - DNA, 15 bp, Homo sapiens
taaggcaatgattaa

SEQ ID NO: 1189374 - DNA, 15 bp, Homo sapiens
ctaaggcaatgatta

SEQ ID NO: 1189375 - DNA, 15 bp, Homo sapiens
tctaaggcaatgatt

SEQ ID NO: 1189376 - DNA, 15 bp, Homo sapiens
gtctaaggcaatgat

SEQ ID NO: 1189377 - DNA, 15 bp, Homo sapiens
ggtctaaggcaatga

SEQ ID NO: 1189378 - DNA, 15 bp, Homo sapiens
aggtctaaggcaatg

SEQ ID NO: 1189379 - DNA, 15 bp, Homo sapiens
aaggtctaaggcaat

SEQ ID NO: 1189380 - DNA, 15 bp, Homo sapiens
caaggtctaaggcaa

SEQ ID NO: 1189381 - DNA, 15 bp, Homo sapiens
tcaaggtctaaggca

SEQ ID NO: 1189382 - DNA, 15 bp, Homo sapiens
ttcaaggtctaaggc

SEQ ID NO: 1189383 - DNA, 15 bp, Homo sapiens
gttcaaggtctaagg

SEQ ID NO: 1189384 - DNA, 15 bp, Homo sapiens
agttcaaggtctaag

SEQ ID NO: 1189385 - DNA, 15 bp, Homo sapiens
cagttcaaggtctaa

SEQ ID NO: 1189386 - DNA, 15 bp, Homo sapiens
acagttcaaggtcta

SEQ ID NO: 1189387 - DNA, 15 bp, Homo sapiens
aacagttcaaggtct

SEQ ID NO: 1189388 - DNA, 15 bp, Homo sapiens
gaacagttcaaggtc

SEQ ID NO: 1189389 - DNA, 15 bp, Homo sapiens
tgaacagttcaaggt

SEQ ID NO: 1189390 - DNA, 15 bp, Homo sapiens
atgaacagttcaagg

SEQ ID NO: 1189391 - DNA, 15 bp, Homo sapiens
aatgaacagttcaag

SEQ ID NO: 1189392 - DNA, 15 bp, Homo sapiens
aaatgaacagttcaa

SEQ ID NO: 1189393 - DNA, 15 bp, Homo sapiens
caaatgaacagttca

SEQ ID NO: 1189394 - DNA, 15 bp, Homo sapiens
acaaatgaacagttc

SEQ ID NO: 1189395 - DNA, 15 bp, Homo sapiens
aacaaatgaacagtt

SEQ ID NO: 1189396 - DNA, 15 bp, Homo sapiens
gaacaaatgaacagt

SEQ ID NO: 1189397 - DNA, 15 bp, Homo sapiens
tgaacaaatgaacag

SEQ ID NO: 1189398 - DNA, 15 bp, Homo sapiens
ttgaacaaatgaaca

SEQ ID NO: 1189399 - DNA, 15 bp, Homo sapiens
attgaacaaatgaac

SEQ ID NO: 1189400 - DNA, 15 bp, Homo sapiens
tattgaacaaatgaa

SEQ ID NO: 1189401 - DNA, 15 bp, Homo sapiens
ttattgaacaaatga

SEQ ID NO: 1189402 - DNA, 15 bp, Homo sapiens
tttattgaacaaatg

SEQ ID NO: 1189403 - DNA, 15 bp, Homo sapiens
ttttattgaacaaat

SEQ ID NO: 1189404 - DNA, 15 bp, Homo sapiens
attttattgaacaaa

SEQ ID NO: 1189405 - DNA, 15 bp, Homo sapiens
cattttattgaacaa

SEQ ID NO: 1189406 - DNA, 15 bp, Homo sapiens
acattttattgaaca

SEQ ID NO: 1189407 - DNA, 15 bp, Homo sapiens
gacattttattgaac

SEQ ID NO: 1189408 - DNA, 15 bp, Homo sapiens
agacattttattgaa

SEQ ID NO: 1189409 - DNA, 15 bp, Homo sapiens
aagacattttattga

SEQ ID NO: 1189410 - DNA, 15 bp, Homo sapiens
aaagacattttattg

SEQ ID NO: 1189411 - DNA, 15 bp, Homo sapiens
aaaagacattttatt

SEQ ID NO: 1189412 - DNA, 15 bp, Homo sapiens
aaaaagacattttat

SEQ ID NO: 1189413 - DNA, 15 bp, Homo sapiens
aaaaaagacatttta

SEQ ID NO: 1189414 - DNA, 15 bp, Homo sapiens
taaaaaagacatttt

SEQ ID NO: 1189415 - DNA, 15 bp, Homo sapiens
ataaaaaagacattt

SEQ ID NO: 1189416 - DNA, 15 bp, Homo sapiens
gataaaaaagacatt

SEQ ID NO: 1189417 - DNA, 15 bp, Homo sapiens
cgataaaaaagacat

SEQ ID NO: 1189418 - DNA, 15 bp, Homo sapiens
ccgataaaaaagaca

SEQ ID NO: 1189419 - DNA, 15 bp, Homo sapiens
cccgataaaaaagac

SEQ ID NO: 1189420 - DNA, 15 bp, Homo sapiens
tcccgataaaaaaga

SEQ ID NO: 1189421 - DNA, 15 bp, Homo sapiens
ttcccgataaaaaag

SEQ ID NO: 1189422 - DNA, 15 bp, Homo sapiens
attcccgataaaaaa

SEQ ID NO: 1189423 - DNA, 15 bp, Homo sapiens
gattcccgataaaaa

SEQ ID NO: 1189424 - DNA, 15 bp, Homo sapiens
tgattcccgataaaa

SEQ ID NO: 1189425 - DNA, 15 bp, Homo sapiens
ctgattcccgataaa

SEQ ID NO: 1189426 - DNA, 15 bp, Homo sapiens
cctgattcccgataa

SEQ ID NO: 1189427 - DNA, 15 bp, Homo sapiens
tcctgattcccgata

SEQ ID NO: 1189428 - DNA, 15 bp, Homo sapiens
ttcctgattcccgat

SEQ ID NO: 1189429 - DNA, 15 bp, Homo sapiens
gttcctgattcccga

SEQ ID NO: 1189430 - DNA, 15 bp, Homo sapiens
agttcctgattcccg

SEQ ID NO: 1189431 - DNA, 15 bp, Homo sapiens
tagttcctgattccc

SEQ ID NO: 1189432 - DNA, 15 bp, Homo sapiens
ttagttcctgattcc

SEQ ID NO: 1189433 - DNA, 15 bp, Homo sapiens
gttagttcctgattc

SEQ ID NO: 1189434 - DNA, 15 bp, Homo sapiens
tgttagttcctgatt

SEQ ID NO: 1189435 - DNA, 15 bp, Homo sapiens
ttgttagttcctgat

SEQ ID NO: 1189436 - DNA, 15 bp, Homo sapiens
cttgttagttcctga

SEQ ID NO: 1189437 - DNA, 15 bp, Homo sapiens
acttgttagttcctg

SEQ ID NO: 1189438 - DNA, 15 bp, Homo sapiens
aacttgttagttcct

SEQ ID NO: 1189439 - DNA, 15 bp, Homo sapiens
aaacttgttagttcc

SEQ ID NO: 1189440 - DNA, 15 bp, Homo sapiens
taaacttgttagttc

SEQ ID NO: 1189441 - DNA, 15 bp, Homo sapiens
ataaacttgttagtt

SEQ ID NO: 1189442 - DNA, 15 bp, Homo sapiens
cataaacttgttagt

SEQ ID NO: 1189443 - DNA, 15 bp, Homo sapiens
acataaacttgttag

SEQ ID NO: 1189444 - DNA, 15 bp, Homo sapiens
aacataaacttgtta

SEQ ID NO: 1189445 - DNA, 15 bp, Homo sapiens
taacataaacttgtt

SEQ ID NO: 1189446 - DNA, 15 bp, Homo sapiens
ataacataaacttgt

SEQ ID NO: 1189447 - DNA, 15 bp, Homo sapiens
cataacataaacttg

SEQ ID NO: 1189448 - DNA, 15 bp, Homo sapiens
tcataacataaactt

SEQ ID NO: 1189449 - DNA, 15 bp, Homo sapiens
atcataacataaact

SEQ ID NO: 1189450 - DNA, 15 bp, Homo sapiens
tatcataacataaac

SEQ ID NO: 1189451 - DNA, 15 bp, Homo sapiens
atatcataacataaa

SEQ ID NO: 1189452 - DNA, 15 bp, Homo sapiens
catatcataacataa

SEQ ID NO: 1189453 - DNA, 15 bp, Homo sapiens
tcatatcataacata

SEQ ID NO: 1189454 - DNA, 15 bp, Homo sapiens
atcatatcataacat

SEQ ID NO: 1189455 - DNA, 15 bp, Homo sapiens
aatcatatcataaca

SEQ ID NO: 1189456 - DNA, 15 bp, Homo sapiens
gaatcatatcataac

SEQ ID NO: 1189457 - DNA, 15 bp, Homo sapiens
tgaatcatatcataa

SEQ ID NO: 1189458 - DNA, 15 bp, Homo sapiens
gtgaatcatatcata

SEQ ID NO: 1189459 - DNA, 15 bp, Homo sapiens
tgtgaatcatatcat

SEQ ID NO: 1189460 - DNA, 15 bp, Homo sapiens
atgtgaatcatatca

SEQ ID NO: 1189461 - DNA, 15 bp, Homo sapiens
catgtgaatcatatc

SEQ ID NO: 1189462 - DNA, 15 bp, Homo sapiens
acatgtgaatcatat

SEQ ID NO: 1189463 - DNA, 15 bp, Homo sapiens
tacatgtgaatcata

SEQ ID NO: 1189464 - DNA, 15 bp, Homo sapiens
ttacatgtgaatcat

SEQ ID NO: 1189465 - DNA, 15 bp, Homo sapiens
attacatgtgaatca

SEQ ID NO: 1189466 - DNA, 15 bp, Homo sapiens
tattacatgtgaatc

SEQ ID NO: 1189467 - DNA, 15 bp, Homo sapiens
ttattacatgtgaat

SEQ ID NO: 1189468 - DNA, 15 bp, Homo sapiens
tttattacatgtgaa

SEQ ID NO: 1189469 - DNA, 15 bp, Homo sapiens
gtttattacatgtga

SEQ ID NO: 1189470 - DNA, 15 bp, Homo sapiens
ggtttattacatgtg

SEQ ID NO: 1189471 - DNA, 15 bp, Homo sapiens
tggtttattacatgt

SEQ ID NO: 1189472 - DNA, 15 bp, Homo sapiens
atggtttattacatg

SEQ ID NO: 1189473 - DNA, 15 bp, Homo sapiens
aatggtttattacat

SEQ ID NO: 1189474 - DNA, 15 bp, Homo sapiens
taatggtttattaca

SEQ ID NO: 1189475 - DNA, 15 bp, Homo sapiens
ataatggtttattac

SEQ ID NO: 1189476 - DNA, 15 bp, Homo sapiens
tataatggtttatta

SEQ ID NO: 1189477 - DNA, 15 bp, Homo sapiens
gtataatggtttatt

SEQ ID NO: 1189478 - DNA, 15 bp, Homo sapiens
ggtataatggtttat

SEQ ID NO: 1189479 - DNA, 15 bp, Homo sapiens
tggtataatggttta

SEQ ID NO: 1189480 - DNA, 15 bp, Homo sapiens
ttggtataatggttt

SEQ ID NO: 1189481 - DNA, 15 bp, Homo sapiens
cttggtataatggtt

SEQ ID NO: 1189482 - DNA, 15 bp, Homo sapiens
tcttggtataatggt

SEQ ID NO: 1189483 - DNA, 15 bp, Homo sapiens
ctcttggtataatgg

SEQ ID NO: 1189484 - DNA, 15 bp, Homo sapiens
tctcttggtataatg

SEQ ID NO: 1189485 - DNA, 15 bp, Homo sapiens
ttctcttggtataat

SEQ ID NO: 1189486 - DNA, 15 bp, Homo sapiens
cttctcttggtataa

SEQ ID NO: 1189487 - DNA, 15 bp, Homo sapiens
tcttctcttggtata

SEQ ID NO: 1189488 - DNA, 15 bp, Homo sapiens
ttcttctcttggtat

SEQ ID NO: 1189489 - DNA, 15 bp, Homo sapiens
tttcttctcttggta

SEQ ID NO: 1189490 - DNA, 15 bp, Homo sapiens
ttttcttctcttggt

SEQ ID NO: 1189491 - DNA, 15 bp, Homo sapiens
gttttcttctcttgg

SEQ ID NO: 1189492 - DNA, 15 bp, Homo sapiens
ggttttcttctcttg

SEQ ID NO: 1189493 - DNA, 15 bp, Homo sapiens
tggttttcttctctt

SEQ ID NO: 1189494 - DNA, 15 bp, Homo sapiens
ctggttttcttctct

SEQ ID NO: 1189495 - DNA, 15 bp, Homo sapiens
gctggttttcttctc

SEQ ID NO: 1189496 - DNA, 15 bp, Homo sapiens
ggctggttttcttct

SEQ ID NO: 1189497 - DNA, 15 bp, Homo sapiens
gggctggttttcttc

SEQ ID NO: 1189498 - DNA, 15 bp, Homo sapiens
cgggctggttttctt

SEQ ID NO: 1189499 - DNA, 15 bp, Homo sapiens
ccgggctggttttct

SEQ ID NO: 1189500 - DNA, 15 bp, Homo sapiens
tccgggctggttttc

SEQ ID NO: 1189501 - DNA, 15 bp, Homo sapiens
atccgggctggtttt

SEQ ID NO: 1189502 - DNA, 15 bp, Homo sapiens
catccgggctggttt

SEQ ID NO: 1189503 - DNA, 15 bp, Homo sapiens
acatccgggctggtt

SEQ ID NO: 1189504 - DNA, 15 bp, Homo sapiens
aacatccgggctggt

SEQ ID NO: 1189505 - DNA, 15 bp, Homo sapiens
gaacatccgggctgg

SEQ ID NO: 1189506 - DNA, 15 bp, Homo sapiens
ggaacatccgggctg

SEQ ID NO: 1189507 - DNA, 15 bp, Homo sapiens
tggaacatccgggct

SEQ ID NO: 1189508 - DNA, 15 bp, Homo sapiens
ctggaacatccgggc

SEQ ID NO: 1189509 - DNA, 15 bp, Homo sapiens
cctggaacatccggg

SEQ ID NO: 1189510 - DNA, 15 bp, Homo sapiens
tcctggaacatccgg

SEQ ID NO: 1189511 - DNA, 15 bp, Homo sapiens
ttcctggaacatccg

SEQ ID NO: 1189512 - DNA, 15 bp, Homo sapiens
tttcctggaacatcc

SEQ ID NO: 1189513 - DNA, 15 bp, Homo sapiens
ttttcctggaacatc

SEQ ID NO: 1189514 - DNA, 15 bp, Homo sapiens
tttttcctggaacat

SEQ ID NO: 1189515 - DNA, 15 bp, Homo sapiens
gtttttcctggaaca

SEQ ID NO: 1189516 - DNA, 15 bp, Homo sapiens
agtttttcctggaac

SEQ ID NO: 1189517 - DNA, 15 bp, Homo sapiens
gagtttttcctggaa

SEQ ID NO: 1189518 - DNA, 15 bp, Homo sapiens
tgagtttttcctgga

SEQ ID NO: 1189519 - DNA, 15 bp, Homo sapiens
gtgagtttttcctgg

SEQ ID NO: 1189520 - DNA, 15 bp, Homo sapiens
tgtgagtttttcctg

SEQ ID NO: 1189521 - DNA, 15 bp, Homo sapiens
ctgtgagtttttcct

SEQ ID NO: 1189522 - DNA, 15 bp, Homo sapiens
gctgtgagtttttcc

SEQ ID NO: 1189523 - DNA, 15 bp, Homo sapiens
ggctgtgagtttttc

SEQ ID NO: 1189524 - DNA, 15 bp, Homo sapiens
gggctgtgagttttt

SEQ ID NO: 1189525 - DNA, 15 bp, Homo sapiens
tgggctgtgagtttt

SEQ ID NO: 1189526 - DNA, 15 bp, Homo sapiens
gtgggctgtgagttt

SEQ ID NO: 1189527 - DNA, 15 bp, Homo sapiens
tgtgggctgtgagtt

SEQ ID NO: 1189528 - DNA, 15 bp, Homo sapiens
atgtgggctgtgagt

SEQ ID NO: 1189529 - DNA, 15 bp, Homo sapiens
catgtgggctgtgag

SEQ ID NO: 1189530 - DNA, 15 bp, Homo sapiens
tcatgtgggctgtga

SEQ ID NO: 1189531 - DNA, 15 bp, Homo sapiens
atcatgtgggctgtg

SEQ ID NO: 1189532 - DNA, 15 bp, Homo sapiens
tatcatgtgggctgt

SEQ ID NO: 1189533 - DNA, 15 bp, Homo sapiens
ctatcatgtgggctg

SEQ ID NO: 1189534 - DNA, 15 bp, Homo sapiens
cctatcatgtgggct

SEQ ID NO: 1189535 - DNA, 15 bp, Homo sapiens
gcctatcatgtgggc

SEQ ID NO: 1189536 - DNA, 15 bp, Homo sapiens
agcctatcatgtggg

SEQ ID NO: 1189537 - DNA, 15 bp, Homo sapiens
tagcctatcatgtgg

SEQ ID NO: 1189538 - DNA, 15 bp, Homo sapiens
ttagcctatcatgtg

SEQ ID NO: 1189539 - DNA, 15 bp, Homo sapiens
tttagcctatcatgt

SEQ ID NO: 1189540 - DNA, 15 bp, Homo sapiens
atttagcctatcatg

SEQ ID NO: 1189541 - DNA, 15 bp, Homo sapiens
tatttagcctatcat

SEQ ID NO: 1189542 - DNA, 15 bp, Homo sapiens
ttatttagcctatca

SEQ ID NO: 1189543 - DNA, 15 bp, Homo sapiens
tttatttagcctatc

SEQ ID NO: 1189544 - DNA, 15 bp, Homo sapiens
atttatttagcctat

SEQ ID NO: 1189545 - DNA, 15 bp, Homo sapiens
aatttatttagccta

SEQ ID NO: 1189546 - DNA, 15 bp, Homo sapiens
caatttatttagcct

SEQ ID NO: 1189547 - DNA, 15 bp, Homo sapiens
gcaatttatttagcc

SEQ ID NO: 1189548 - DNA, 15 bp, Homo sapiens
tgcaatttatttagc

SEQ ID NO: 1189549 - DNA, 15 bp, Homo sapiens
atgcaatttatttag

SEQ ID NO: 1189550 - DNA, 15 bp, Homo sapiens
catgcaatttattta

SEQ ID NO: 1189551 - DNA, 15 bp, Homo sapiens
gcatgcaatttattt

SEQ ID NO: 1189552 - DNA, 15 bp, Homo sapiens
tgcatgcaatttatt

SEQ ID NO: 1189553 - DNA, 15 bp, Homo sapiens
atgcatgcaatttat

SEQ ID NO: 1189554 - DNA, 15 bp, Homo sapiens
aatgcatgcaattta

SEQ ID NO: 1189555 - DNA, 15 bp, Homo sapiens
taatgcatgcaattt

SEQ ID NO: 1189556 - DNA, 15 bp, Homo sapiens
ctaatgcatgcaatt

SEQ ID NO: 1189557 - DNA, 15 bp, Homo sapiens
actaatgcatgcaat

SEQ ID NO: 1189558 - DNA, 15 bp, Homo sapiens
aactaatgcatgcaa

SEQ ID NO: 1189559 - DNA, 15 bp, Homo sapiens
gaactaatgcatgca

SEQ ID NO: 1189560 - DNA, 15 bp, Homo sapiens
tgaactaatgcatgc

SEQ ID NO: 1189561 - DNA, 15 bp, Homo sapiens
atgaactaatgcatg

SEQ ID NO: 1189562 - DNA, 15 bp, Homo sapiens
aatgaactaatgcat

SEQ ID NO: 1189563 - DNA, 15 bp, Homo sapiens
aaatgaactaatgca

SEQ ID NO: 1189564 - DNA, 15 bp, Homo sapiens
gaaatgaactaatgc

SEQ ID NO: 1189565 - DNA, 15 bp, Homo sapiens
agaaatgaactaatg

SEQ ID NO: 1189566 - DNA, 15 bp, Homo sapiens
cagaaatgaactaat

SEQ ID NO: 1189567 - DNA, 15 bp, Homo sapiens
tcagaaatgaactaa

SEQ ID NO: 1189568 - DNA, 15 bp, Homo sapiens
gtcagaaatgaacta

SEQ ID NO: 1189569 - DNA, 15 bp, Homo sapiens
ggtcagaaatgaact

SEQ ID NO: 1189570 - DNA, 15 bp, Homo sapiens
aggtcagaaatgaac

SEQ ID NO: 1189571 - DNA, 15 bp, Homo sapiens
caggtcagaaatgaa

SEQ ID NO: 1189572 - DNA, 15 bp, Homo sapiens
ccaggtcagaaatga

SEQ ID NO: 1189573 - DNA, 15 bp, Homo sapiens
accaggtcagaaatg

SEQ ID NO: 1189574 - DNA, 15 bp, Homo sapiens
taccaggtcagaaat

SEQ ID NO: 1189575 - DNA, 15 bp, Homo sapiens
gtaccaggtcagaaa

SEQ ID NO: 1189576 - DNA, 15 bp, Homo sapiens
agtaccaggtcagaa

SEQ ID NO: 1189577 - DNA, 15 bp, Homo sapiens
cagtaccaggtcaga

SEQ ID NO: 1189578 - DNA, 15 bp, Homo sapiens
acagtaccaggtcag

SEQ ID NO: 1189579 - DNA, 15 bp, Homo sapiens
aacagtaccaggtca

SEQ ID NO: 1189580 - DNA, 15 bp, Homo sapiens
caacagtaccaggtc

SEQ ID NO: 1189581 - DNA, 15 bp, Homo sapiens
tcaacagtaccaggt

SEQ ID NO: 1189582 - DNA, 15 bp, Homo sapiens
ctcaacagtaccagg

SEQ ID NO: 1189583 - DNA, 15 bp, Homo sapiens
actcaacagtaccag

SEQ ID NO: 1189584 - DNA, 15 bp, Homo sapiens
cactcaacagtacca

SEQ ID NO: 1189585 - DNA, 15 bp, Homo sapiens
acactcaacagtacc

SEQ ID NO: 1189586 - DNA, 15 bp, Homo sapiens
cacactcaacagtac

SEQ ID NO: 1189587 - DNA, 15 bp, Homo sapiens
tcacactcaacagta

SEQ ID NO: 1189588 - DNA, 15 bp, Homo sapiens
ttcacactcaacagt

SEQ ID NO: 1189589 - DNA, 15 bp, Homo sapiens
gttcacactcaacag

SEQ ID NO: 1189590 - DNA, 15 bp, Homo sapiens
agttcacactcaaca

SEQ ID NO: 1189591 - DNA, 15 bp, Homo sapiens
cagttcacactcaac

SEQ ID NO: 1189592 - DNA, 15 bp, Homo sapiens
gcagttcacactcaa

SEQ ID NO: 1189593 - DNA, 15 bp, Homo sapiens
tgcagttcacactca

SEQ ID NO: 1189594 - DNA, 15 bp, Homo sapiens
ctgcagttcacactc

SEQ ID NO: 1189595 - DNA, 15 bp, Homo sapiens
actgcagttcacact

SEQ ID NO: 1189596 - DNA, 15 bp, Homo sapiens
aactgcagttcacac

SEQ ID NO: 1189597 - DNA, 15 bp, Homo sapiens
gaactgcagttcaca

SEQ ID NO: 1189598 - DNA, 15 bp, Homo sapiens
agaactgcagttcac

SEQ ID NO: 1189599 - DNA, 15 bp, Homo sapiens
gagaactgcagttca

SEQ ID NO: 1189600 - DNA, 15 bp, Homo sapiens
tgagaactgcagttc

SEQ ID NO: 1189601 - DNA, 15 bp, Homo sapiens
ttgagaactgcagtt

SEQ ID NO: 1189602 - DNA, 15 bp, Homo sapiens
attgagaactgcagt

SEQ ID NO: 1189603 - DNA, 15 bp, Homo sapiens
aattgagaactgcag

SEQ ID NO: 1189604 - DNA, 15 bp, Homo sapiens
gaattgagaactgca

SEQ ID NO: 1189605 - DNA, 15 bp, Homo sapiens
ggaattgagaactgc

SEQ ID NO: 1189606 - DNA, 15 bp, Homo sapiens
gggaattgagaactg

SEQ ID NO: 1189607 - DNA, 15 bp, Homo sapiens
tgggaattgagaact

SEQ ID NO: 1189608 - DNA, 15 bp, Homo sapiens
ctgggaattgagaac

SEQ ID NO: 1189609 - DNA, 15 bp, Homo sapiens
actgggaattgagaa

SEQ ID NO: 1189610 - DNA, 15 bp, Homo sapiens
aactgggaattgaga

SEQ ID NO: 1189611 - DNA, 15 bp, Homo sapiens
taactgggaattgag

SEQ ID NO: 1189612 - DNA, 15 bp, Homo sapiens
ataactgggaattga

SEQ ID NO: 1189613 - DNA, 15 bp, Homo sapiens
aataactgggaattg

SEQ ID NO: 1189614 - DNA, 15 bp, Homo sapiens
gaataactgggaatt

SEQ ID NO: 1189615 - DNA, 15 bp, Homo sapiens
agaataactgggaat

SEQ ID NO: 1189616 - DNA, 15 bp, Homo sapiens
aagaataactgggaa

SEQ ID NO: 1189617 - DNA, 15 bp, Homo sapiens
taagaataactggga

SEQ ID NO: 1189618 - DNA, 15 bp, Homo sapiens
ctaagaataactggg

SEQ ID NO: 1189619 - DNA, 15 bp, Homo sapiens
cctaagaataactgg

SEQ ID NO: 1189620 - DNA, 15 bp, Homo sapiens
tcctaagaataactg

SEQ ID NO: 1189621 - DNA, 15 bp, Homo sapiens
ttcctaagaataact

SEQ ID NO: 1189622 - DNA, 15 bp, Homo sapiens
attcctaagaataac

SEQ ID NO: 1189623 - DNA, 15 bp, Homo sapiens
aattcctaagaataa

SEQ ID NO: 1189624 - DNA, 15 bp, Homo sapiens
taattcctaagaata

SEQ ID NO: 1189625 - DNA, 15 bp, Homo sapiens
ttaattcctaagaat

SEQ ID NO: 1189626 - DNA, 15 bp, Homo sapiens
cttaattcctaagaa

SEQ ID NO: 1189627 - DNA, 15 bp, Homo sapiens
tcttaattcctaaga

SEQ ID NO: 1189628 - DNA, 15 bp, Homo sapiens
gtcttaattcctaag

SEQ ID NO: 1189629 - DNA, 15 bp, Homo sapiens
agtcttaattcctaa

SEQ ID NO: 1189630 - DNA, 15 bp, Homo sapiens
tagtcttaattccta

SEQ ID NO: 1189631 - DNA, 15 bp, Homo sapiens
ctagtcttaattcct

SEQ ID NO: 1189632 - DNA, 15 bp, Homo sapiens
actagtcttaattcc

SEQ ID NO: 1189633 - DNA, 15 bp, Homo sapiens
gactagtcttaattc

SEQ ID NO: 1189634 - DNA, 15 bp, Homo sapiens
tgactagtcttaatt

SEQ ID NO: 1189635 - DNA, 15 bp, Homo sapiens
ctgactagtcttaat

SEQ ID NO: 1189636 - DNA, 15 bp, Homo sapiens
tctgactagtcttaa

SEQ ID NO: 1189637 - DNA, 15 bp, Homo sapiens
gtctgactagtctta

SEQ ID NO: 1189638 - DNA, 15 bp, Homo sapiens
tgtctgactagtctt

SEQ ID NO: 1189639 - DNA, 15 bp, Homo sapiens
ttgtctgactagtct

SEQ ID NO: 1189640 - DNA, 15 bp, Homo sapiens
tttgtctgactagtc

SEQ ID NO: 1189641 - DNA, 15 bp, Homo sapiens
ttttgtctgactagt

SEQ ID NO: 1189642 - DNA, 15 bp, Homo sapiens
tttttgtctgactag

SEQ ID NO: 1189643 - DNA, 15 bp, Homo sapiens
ttttttgtctgacta

SEQ ID NO: 1189644 - DNA, 15 bp, Homo sapiens
tttttttgtctgact

SEQ ID NO: 1189645 - DNA, 15 bp, Homo sapiens
ttttttttgtctgac

SEQ ID NO: 1189646 - DNA, 15 bp, Homo sapiens
ttttttttttttgtc

SEQ ID NO: 1189647 - DNA, 15 bp, Homo sapiens
cttttttttttttgt

SEQ ID NO: 1189648 - DNA, 15 bp, Homo sapiens
gcttttttttttttg

SEQ ID NO: 1189649 - DNA, 15 bp, Homo sapiens
gcaggcttttttttt

SEQ ID NO: 1189650 - DNA, 15 bp, Homo sapiens
tgcaggctttttttt

SEQ ID NO: 1189651 - DNA, 15 bp, Homo sapiens
ctgcaggcttttttt

SEQ ID NO: 1189652 - DNA, 15 bp, Homo sapiens
cctgcaggctttttt

SEQ ID NO: 1189653 - DNA, 15 bp, Homo sapiens
tcctgcaggcttttt

SEQ ID NO: 1189654 - DNA, 15 bp, Homo sapiens
atcctgcaggctttt

SEQ ID NO: 1189655 - DNA, 15 bp, Homo sapiens
tatcctgcaggcttt

SEQ ID NO: 1189656 - DNA, 15 bp, Homo sapiens
ttatcctgcaggctt

SEQ ID NO: 1189657 - DNA, 15 bp, Homo sapiens
tttatcctgcaggct

SEQ ID NO: 1189658 - DNA, 15 bp, Homo sapiens
ttttatcctgcaggc

SEQ ID NO: 1189659 - DNA, 15 bp, Homo sapiens
cttttatcctgcagg

SEQ ID NO: 1189660 - DNA, 15 bp, Homo sapiens
tcttttatcctgcag

SEQ ID NO: 1189661 - DNA, 15 bp, Homo sapiens
gtcttttatcctgca

SEQ ID NO: 1189662 - DNA, 15 bp, Homo sapiens
agtcttttatcctgc

SEQ ID NO: 1189663 - DNA, 15 bp, Homo sapiens
cagtcttttatcctg

SEQ ID NO: 1189664 - DNA, 15 bp, Homo sapiens
gcagtcttttatcct

SEQ ID NO: 1189665 - DNA, 15 bp, Homo sapiens
agcagtcttttatcc

SEQ ID NO: 1189666 - DNA, 15 bp, Homo sapiens
gagcagtcttttatc

SEQ ID NO: 1189667 - DNA, 15 bp, Homo sapiens
ggagcagtcttttat

SEQ ID NO: 1189668 - DNA, 15 bp, Homo sapiens
tggagcagtctttta

SEQ ID NO: 1189669 - DNA, 15 bp, Homo sapiens
ttggagcagtctttt

SEQ ID NO: 1189670 - DNA, 15 bp, Homo sapiens
tttggagcagtcttt

SEQ ID NO: 1189671 - DNA, 15 bp, Homo sapiens
ctttggagcagtctt

SEQ ID NO: 1189672 - DNA, 15 bp, Homo sapiens
tctttggagcagtct

SEQ ID NO: 1189673 - DNA, 15 bp, Homo sapiens
ctctttggagcagtc

SEQ ID NO: 1189674 - DNA, 15 bp, Homo sapiens
actctttggagcagt

SEQ ID NO: 1189675 - DNA, 15 bp, Homo sapiens
tactctttggagcag

SEQ ID NO: 1189676 - DNA, 15 bp, Homo sapiens
atactctttggagca

SEQ ID NO: 1189677 - DNA, 15 bp, Homo sapiens
gatactctttggagc

SEQ ID NO: 1189678 - DNA, 15 bp, Homo sapiens
tgatactctttggag

SEQ ID NO: 1189679 - DNA, 15 bp, Homo sapiens
ttgatactctttgga

SEQ ID NO: 1189680 - DNA, 15 bp, Homo sapiens
cttgatactctttgg

SEQ ID NO: 1189681 - DNA, 15 bp, Homo sapiens
ccttgatactctttg

SEQ ID NO: 1189682 - DNA, 15 bp, Homo sapiens
gccttgatactcttt

SEQ ID NO: 1189683 - DNA, 15 bp, Homo sapiens
agccttgatactctt

SEQ ID NO: 1189684 - DNA, 15 bp, Homo sapiens
aagccttgatactct

SEQ ID NO: 1189685 - DNA, 15 bp, Homo sapiens
taagccttgatactc

SEQ ID NO: 1189686 - DNA, 15 bp, Homo sapiens
ttaagccttgatact

SEQ ID NO: 1189687 - DNA, 15 bp, Homo sapiens
tttaagccttgatac

SEQ ID NO: 1189688 - DNA, 15 bp, Homo sapiens
ctttaagccttgata

SEQ ID NO: 1189689 - DNA, 15 bp, Homo sapiens
cctttaagccttgat

SEQ ID NO: 1189690 - DNA, 15 bp, Homo sapiens
tcctttaagccttga

SEQ ID NO: 1189691 - DNA, 15 bp, Homo sapiens
atcctttaagccttg

SEQ ID NO: 1189692 - DNA, 15 bp, Homo sapiens
tatcctttaagcctt

SEQ ID NO: 1189693 - DNA, 15 bp, Homo sapiens
atatcctttaagcct

SEQ ID NO: 1189694 - DNA, 15 bp, Homo sapiens
catatcctttaagcc

SEQ ID NO: 1189695 - DNA, 15 bp, Homo sapiens
gcatatcctttaagc

SEQ ID NO: 1189696 - DNA, 15 bp, Homo sapiens
tgcatatcctttaag

SEQ ID NO: 1189697 - DNA, 15 bp, Homo sapiens
gtgcatatcctttaa

SEQ ID NO: 1189698 - DNA, 15 bp, Homo sapiens
ggtgcatatccttta

SEQ ID NO: 1189699 - DNA, 15 bp, Homo sapiens
tggtgcatatccttt

SEQ ID NO: 1189700 - DNA, 15 bp, Homo sapiens
ttggtgcatatcctt

SEQ ID NO: 1189701 - DNA, 15 bp, Homo sapiens
tttggtgcatatcct

SEQ ID NO: 1189702 - DNA, 15 bp, Homo sapiens
atttggtgcatatcc

SEQ ID NO: 1189703 - DNA, 15 bp, Homo sapiens
catttggtgcatatc

SEQ ID NO: 1189704 - DNA, 15 bp, Homo sapiens
tcatttggtgcatat

SEQ ID NO: 1189705 - DNA, 15 bp, Homo sapiens
atcatttggtgcata

SEQ ID NO: 1189706 - DNA, 15 bp, Homo sapiens
tatcatttggtgcat

SEQ ID NO: 1189707 - DNA, 15 bp, Homo sapiens
ctatcatttggtgca

SEQ ID NO: 1189708 - DNA, 15 bp, Homo sapiens
gctatcatttggtgc

SEQ ID NO: 1189709 - DNA, 15 bp, Homo sapiens
tgctatcatttggtg

SEQ ID NO: 1189710 - DNA, 15 bp, Homo sapiens
ctgctatcatttggt

SEQ ID NO: 1189711 - DNA, 15 bp, Homo sapiens
actgctatcatttgg

SEQ ID NO: 1189712 - DNA, 15 bp, Homo sapiens
tactgctatcatttg

SEQ ID NO: 1189713 - DNA, 15 bp, Homo sapiens
ttactgctatcattt

SEQ ID NO: 1189714 - DNA, 15 bp, Homo sapiens
attactgctatcatt

SEQ ID NO: 1189715 - DNA, 15 bp, Homo sapiens
aattactgctatcat

SEQ ID NO: 1189716 - DNA, 15 bp, Homo sapiens
taattactgctatca

SEQ ID NO: 1189717 - DNA, 15 bp, Homo sapiens
ataattactgctatc

SEQ ID NO: 1189718 - DNA, 15 bp, Homo sapiens
gataattactgctat

SEQ ID NO: 1189719 - DNA, 15 bp, Homo sapiens
agataattactgcta

SEQ ID NO: 1189720 - DNA, 15 bp, Homo sapiens
gagataattactgct

SEQ ID NO: 1189721 - DNA, 15 bp, Homo sapiens
agagataattactgc

SEQ ID NO: 1189722 - DNA, 15 bp, Homo sapiens
tagagataattactg

SEQ ID NO: 1189723 - DNA, 15 bp, Homo sapiens
atagagataattact

SEQ ID NO: 1189724 - DNA, 15 bp, Homo sapiens
gatagagataattac

SEQ ID NO: 1189725 - DNA, 15 bp, Homo sapiens
agatagagataatta

SEQ ID NO: 1189726 - DNA, 15 bp, Homo sapiens
gagatagagataatt

SEQ ID NO: 1189727 - DNA, 15 bp, Homo sapiens
agagatagagataat

SEQ ID NO: 1189728 - DNA, 15 bp, Homo sapiens
tagagatagagataa

SEQ ID NO: 1189729 - DNA, 15 bp, Homo sapiens
ttagagatagagata

SEQ ID NO: 1189730 - DNA, 15 bp, Homo sapiens
tttagagatagagat

SEQ ID NO: 1189731 - DNA, 15 bp, Homo sapiens
ttttagagatagaga

SEQ ID NO: 1189732 - DNA, 15 bp, Homo sapiens
attttagagatagag

SEQ ID NO: 1189733 - DNA, 15 bp, Homo sapiens
gattttagagataga

SEQ ID NO: 1189734 - DNA, 15 bp, Homo sapiens
tgattttagagatag

SEQ ID NO: 1189735 - DNA, 15 bp, Homo sapiens
ttgattttagagata

SEQ ID NO: 1189736 - DNA, 15 bp, Homo sapiens
attgattttagagat

SEQ ID NO: 1189737 - DNA, 15 bp, Homo sapiens
tattgattttagaga

SEQ ID NO: 1189738 - DNA, 15 bp, Homo sapiens
atattgattttagag

SEQ ID NO: 1189739 - DNA, 15 bp, Homo sapiens
gatattgattttaga

SEQ ID NO: 1189740 - DNA, 15 bp, Homo sapiens
tgatattgattttag

SEQ ID NO: 1189741 - DNA, 15 bp, Homo sapiens
ttgatattgatttta

SEQ ID NO: 1189742 - DNA, 15 bp, Homo sapiens
attgatattgatttt

SEQ ID NO: 1189743 - DNA, 15 bp, Homo sapiens
tattgatattgattt

SEQ ID NO: 1189744 - DNA, 15 bp, Homo sapiens
ctattgatattgatt

SEQ ID NO: 1189745 - DNA, 15 bp, Homo sapiens
actattgatattgat

SEQ ID NO: 1189746 - DNA, 15 bp, Homo sapiens
cactattgatattga

SEQ ID NO: 1189747 - DNA, 15 bp, Homo sapiens
tcactattgatattg

SEQ ID NO: 1189748 - DNA, 15 bp, Homo sapiens
atcactattgatatt

SEQ ID NO: 1189749 - DNA, 15 bp, Homo sapiens
tatcactattgatat

SEQ ID NO: 1189750 - DNA, 15 bp, Homo sapiens
atatcactattgata

SEQ ID NO: 1189751 - DNA, 15 bp, Homo sapiens
aatatcactattgat

SEQ ID NO: 1189752 - DNA, 15 bp, Homo sapiens
caatatcactattga

SEQ ID NO: 1189753 - DNA, 15 bp, Homo sapiens
tcaatatcactattg

SEQ ID NO: 1189754 - DNA, 15 bp, Homo sapiens
atcaatatcactatt

SEQ ID NO: 1189755 - DNA, 15 bp, Homo sapiens
aatcaatatcactat

SEQ ID NO: 1189756 - DNA, 15 bp, Homo sapiens
aaatcaatatcacta

SEQ ID NO: 1189757 - DNA, 15 bp, Homo sapiens
aaaatcaatatcact

SEQ ID NO: 1189758 - DNA, 15 bp, Homo sapiens
taaaatcaatatcac

SEQ ID NO: 1189759 - DNA, 15 bp, Homo sapiens
ttaaaatcaatatca

SEQ ID NO: 1189760 - DNA, 15 bp, Homo sapiens
attaaaatcaatatc

SEQ ID NO: 1189761 - DNA, 15 bp, Homo sapiens
aattaaaatcaatat

SEQ ID NO: 1189762 - DNA, 15 bp, Homo sapiens
aaattaaaatcaata

SEQ ID NO: 1189763 - DNA, 15 bp, Homo sapiens
aaaattaaaatcaat

SEQ ID NO: 1189764 - DNA, 15 bp, Homo sapiens
aaaaattaaaatcaa

SEQ ID NO: 1189765 - DNA, 15 bp, Homo sapiens
aaaaaattaaaatca

SEQ ID NO: 1189766 - DNA, 15 bp, Homo sapiens
aaaaaaattaaaatc

SEQ ID NO: 1189767 - DNA, 15 bp, Homo sapiens
gaaaaaaattaaaat

SEQ ID NO: 1189768 - DNA, 15 bp, Homo sapiens
agaaaaaaattaaaa

SEQ ID NO: 1189769 - DNA, 15 bp, Homo sapiens
aagaaaaaaattaaa

SEQ ID NO: 1189770 - DNA, 15 bp, Homo sapiens
gaagaaaaaaattaa

SEQ ID NO: 1189771 - DNA, 15 bp, Homo sapiens
tgaagaaaaaaatta

SEQ ID NO: 1189772 - DNA, 15 bp, Homo sapiens
atgaagaaaaaaatt

SEQ ID NO: 1189773 - DNA, 15 bp, Homo sapiens
tatgaagaaaaaaat

SEQ ID NO: 1189774 - DNA, 15 bp, Homo sapiens
atatgaagaaaaaaa

SEQ ID NO: 1189775 - DNA, 15 bp, Homo sapiens
aatatgaagaaaaaa

SEQ ID NO: 1189776 - DNA, 15 bp, Homo sapiens
aaatatgaagaaaaa

SEQ ID NO: 1189777 - DNA, 15 bp, Homo sapiens
gaaatatgaagaaaa

SEQ ID NO: 1189778 - DNA, 15 bp, Homo sapiens
agaaatatgaagaaa

SEQ ID NO: 1189779 - DNA, 15 bp, Homo sapiens
cagaaatatgaagaa

SEQ ID NO: 1189780 - DNA, 15 bp, Homo sapiens
acagaaatatgaaga

SEQ ID NO: 1189781 - DNA, 15 bp, Homo sapiens
tacagaaatatgaag

SEQ ID NO: 1189782 - DNA, 15 bp, Homo sapiens
atacagaaatatgaa

SEQ ID NO: 1189783 - DNA, 15 bp, Homo sapiens
aatacagaaatatga

SEQ ID NO: 1189784 - DNA, 15 bp, Homo sapiens
aaatacagaaatatg

SEQ ID NO: 1189785 - DNA, 15 bp, Homo sapiens
aaaatacagaaatat

SEQ ID NO: 1189786 - DNA, 15 bp, Homo sapiens
taaaatacagaaata

SEQ ID NO: 1189787 - DNA, 15 bp, Homo sapiens
ataaaatacagaaat

SEQ ID NO: 1189788 - DNA, 15 bp, Homo sapiens
gataaaatacagaaa

SEQ ID NO: 1189789 - DNA, 15 bp, Homo sapiens
tgataaaatacagaa

SEQ ID NO: 1189790 - DNA, 15 bp, Homo sapiens
ttgataaaatacaga

SEQ ID NO: 1189791 - DNA, 15 bp, Homo sapiens
attgataaaatacag

SEQ ID NO: 1189792 - DNA, 15 bp, Homo sapiens
cattgataaaataca

SEQ ID NO: 1189793 - DNA, 15 bp, Homo sapiens
acattgataaaatac

SEQ ID NO: 1189794 - DNA, 15 bp, Homo sapiens
aacattgataaaata

SEQ ID NO: 1189795 - DNA, 15 bp, Homo sapiens
gaacattgataaaat

SEQ ID NO: 1189796 - DNA, 15 bp, Homo sapiens
agaacattgataaaa

SEQ ID NO: 1189797 - DNA, 15 bp, Homo sapiens
cagaacattgataaa

SEQ ID NO: 1189798 - DNA, 15 bp, Homo sapiens
acagaacattgataa

SEQ ID NO: 1189799 - DNA, 15 bp, Homo sapiens
tacagaacattgata

SEQ ID NO: 1189800 - DNA, 15 bp, Homo sapiens
ttacagaacattgat

SEQ ID NO: 1189801 - DNA, 15 bp, Homo sapiens
attacagaacattga

SEQ ID NO: 1189802 - DNA, 15 bp, Homo sapiens
cattacagaacattg

SEQ ID NO: 1189803 - DNA, 15 bp, Homo sapiens
ccattacagaacatt

SEQ ID NO: 1189804 - DNA, 15 bp, Homo sapiens
tccattacagaacat

SEQ ID NO: 1189805 - DNA, 15 bp, Homo sapiens
gtccattacagaaca

SEQ ID NO: 1189806 - DNA, 15 bp, Homo sapiens
tgtccattacagaac

SEQ ID NO: 1189807 - DNA, 15 bp, Homo sapiens
ttgtccattacagaa

SEQ ID NO: 1189808 - DNA, 15 bp, Homo sapiens
cttgtccattacaga

SEQ ID NO: 1189809 - DNA, 15 bp, Homo sapiens
acttgtccattacag

SEQ ID NO: 1189810 - DNA, 15 bp, Homo sapiens
tacttgtccattaca

SEQ ID NO: 1189811 - DNA, 15 bp, Homo sapiens
atacttgtccattac

SEQ ID NO: 1189812 - DNA, 15 bp, Homo sapiens
gatacttgtccatta

SEQ ID NO: 1189813 - DNA, 15 bp, Homo sapiens
tgatacttgtccatt

SEQ ID NO: 1189814 - DNA, 15 bp, Homo sapiens
atgatacttgtccat

SEQ ID NO: 1189815 - DNA, 15 bp, Homo sapiens
aatgatacttgtcca

SEQ ID NO: 1189816 - DNA, 15 bp, Homo sapiens
aaatgatacttgtcc

SEQ ID NO: 1189817 - DNA, 15 bp, Homo sapiens
aaaatgatacttgtc

SEQ ID NO: 1189818 - DNA, 15 bp, Homo sapiens
taaaatgatacttgt

SEQ ID NO: 1189819 - DNA, 15 bp, Homo sapiens
ataaaatgatacttg

SEQ ID NO: 1189820 - DNA, 15 bp, Homo sapiens
tataaaatgatactt

SEQ ID NO: 1189821 - DNA, 15 bp, Homo sapiens
ttataaaatgatact

SEQ ID NO: 1189822 - DNA, 15 bp, Homo sapiens
gttataaaatgatac

SEQ ID NO: 1189823 - DNA, 15 bp, Homo sapiens
ggttataaaatgata

SEQ ID NO: 1189824 - DNA, 15 bp, Homo sapiens
tggttataaaatgat

SEQ ID NO: 1189825 - DNA, 15 bp, Homo sapiens
ctggttataaaatga

SEQ ID NO: 1189826 - DNA, 15 bp, Homo sapiens
cctggttataaaatg

SEQ ID NO: 1189827 - DNA, 15 bp, Homo sapiens
tcctggttataaaat

SEQ ID NO: 1189828 - DNA, 15 bp, Homo sapiens
ttcctggttataaaa

SEQ ID NO: 1189829 - DNA, 15 bp, Homo sapiens
tttcctggttataaa

SEQ ID NO: 1189830 - DNA, 15 bp, Homo sapiens
ttttcctggttataa

SEQ ID NO: 1189831 - DNA, 15 bp, Homo sapiens
tttttcctggttata

SEQ ID NO: 1189832 - DNA, 15 bp, Homo sapiens
ttttttcctggttat

SEQ ID NO: 1189833 - DNA, 15 bp, Homo sapiens
attttttcctggtta

SEQ ID NO: 1189834 - DNA, 15 bp, Homo sapiens
cattttttcctggtt

SEQ ID NO: 1189835 - DNA, 15 bp, Homo sapiens
acattttttcctggt

SEQ ID NO: 1189836 - DNA, 15 bp, Homo sapiens
tacattttttcctgg

SEQ ID NO: 1189837 - DNA, 15 bp, Homo sapiens
atacattttttcctg

SEQ ID NO: 1189838 - DNA, 15 bp, Homo sapiens
gatacattttttcct

SEQ ID NO: 1189839 - DNA, 15 bp, Homo sapiens
ggatacattttttcc

SEQ ID NO: 1189840 - DNA, 15 bp, Homo sapiens
tggatacattttttc

SEQ ID NO: 1189841 - DNA, 15 bp, Homo sapiens
gtggatacatttttt

SEQ ID NO: 1189842 - DNA, 15 bp, Homo sapiens
tgtggatacattttt

SEQ ID NO: 1189843 - DNA, 15 bp, Homo sapiens
gtgtggatacatttt

SEQ ID NO: 1189844 - DNA, 15 bp, Homo sapiens
tgtgtggatacattt

SEQ ID NO: 1189845 - DNA, 15 bp, Homo sapiens
gtgtgtggatacatt

SEQ ID NO: 1189846 - DNA, 15 bp, Homo sapiens
tgtgtgtggatacat

SEQ ID NO: 1189847 - DNA, 15 bp, Homo sapiens
atgtgtgtggataca

SEQ ID NO: 1189848 - DNA, 15 bp, Homo sapiens
aatgtgtgtggatac

SEQ ID NO: 1189849 - DNA, 15 bp, Homo sapiens
aaatgtgtgtggata

SEQ ID NO: 1189850 - DNA, 15 bp, Homo sapiens
aaaatgtgtgtggat

SEQ ID NO: 1189851 - DNA, 15 bp, Homo sapiens
aaaaatgtgtgtgga

SEQ ID NO: 1189852 - DNA, 15 bp, Homo sapiens
taaaaatgtgtgtgg

SEQ ID NO: 1189853 - DNA, 15 bp, Homo sapiens
ttaaaaatgtgtgtg

SEQ ID NO: 1189854 - DNA, 15 bp, Homo sapiens
tttaaaaatgtgtgt

SEQ ID NO: 1189855 - DNA, 15 bp, Homo sapiens
ttttaaaaatgtgtg

SEQ ID NO: 1189856 - DNA, 15 bp, Homo sapiens
tttttaaaaatgtgt

SEQ ID NO: 1189857 - DNA, 15 bp, Homo sapiens
ctttttaaaaatgtg

SEQ ID NO: 1189858 - DNA, 15 bp, Homo sapiens
gctttttaaaaatgt

SEQ ID NO: 1189859 - DNA, 15 bp, Homo sapiens
tgctttttaaaaatg

SEQ ID NO: 1189860 - DNA, 15 bp, Homo sapiens
gctgctttttaaaaa

SEQ ID NO: 1189861 - DNA, 15 bp, Homo sapiens
tgctgctttttaaaa

SEQ ID NO: 1189862 - DNA, 15 bp, Homo sapiens
ctgctgctttttaaa

SEQ ID NO: 1189863 - DNA, 15 bp, Homo sapiens
gctgctgctttttaa

SEQ ID NO: 1189864 - DNA, 15 bp, Homo sapiens
tgctgctgcttttta

SEQ ID NO: 1189865 - DNA, 15 bp, Homo sapiens
ttgctgctgcttttt

SEQ ID NO: 1189866 - DNA, 15 bp, Homo sapiens
tttgctgctgctttt

SEQ ID NO: 1189867 - DNA, 15 bp, Homo sapiens
ttttgctgctgcttt

SEQ ID NO: 1189868 - DNA, 15 bp, Homo sapiens
tttttgctgctgctt

SEQ ID NO: 1189869 - DNA, 15 bp, Homo sapiens
ctttttgctgctgct

SEQ ID NO: 1189870 - DNA, 15 bp, Homo sapiens
cctttttgctgctgc

SEQ ID NO: 1189871 - DNA, 15 bp, Homo sapiens
ccctttttgctgctg

SEQ ID NO: 1189872 - DNA, 15 bp, Homo sapiens
gccctttttgctgct

SEQ ID NO: 1189873 - DNA, 15 bp, Homo sapiens
tgccctttttgctgc

SEQ ID NO: 1189874 - DNA, 15 bp, Homo sapiens
ctgccctttttgctg

SEQ ID NO: 1189875 - DNA, 15 bp, Homo sapiens
tctgccctttttgct

SEQ ID NO: 1189876 - DNA, 15 bp, Homo sapiens
ttctgccctttttgc

SEQ ID NO: 1189877 - DNA, 15 bp, Homo sapiens
tttctgccctttttg

SEQ ID NO: 1189878 - DNA, 15 bp, Homo sapiens
ttttctgcccttttt

SEQ ID NO: 1189879 - DNA, 15 bp, Homo sapiens
attttctgccctttt

SEQ ID NO: 1189880 - DNA, 15 bp, Homo sapiens
aattttctgcccttt

SEQ ID NO: 1189881 - DNA, 15 bp, Homo sapiens
aaattttctgccctt

SEQ ID NO: 1189882 - DNA, 15 bp, Homo sapiens
aaaattttctgccct

SEQ ID NO: 1189883 - DNA, 15 bp, Homo sapiens
taaaattttctgccc

SEQ ID NO: 1189884 - DNA, 15 bp, Homo sapiens
ttaaaattttctgcc

SEQ ID NO: 1189885 - DNA, 15 bp, Homo sapiens
tttaaaattttctgc

SEQ ID NO: 1189886 - DNA, 15 bp, Homo sapiens
ttttaaaattttctg

SEQ ID NO: 1189887 - DNA, 15 bp, Homo sapiens
cttttaaaattttct

SEQ ID NO: 1189888 - DNA, 15 bp, Homo sapiens
ccttttaaaattttc

SEQ ID NO: 1189889 - DNA, 15 bp, Homo sapiens
gccttttaaaatttt

SEQ ID NO: 1189890 - DNA, 15 bp, Homo sapiens
agccttttaaaattt

SEQ ID NO: 1189891 - DNA, 15 bp, Homo sapiens
tagccttttaaaatt

SEQ ID NO: 1189892 - DNA, 15 bp, Homo sapiens
ttagccttttaaaat

SEQ ID NO: 1189893 - DNA, 15 bp, Homo sapiens
tttagccttttaaaa

SEQ ID NO: 1189894 - DNA, 15 bp, Homo sapiens
ttttagccttttaaa

SEQ ID NO: 1189895 - DNA, 15 bp, Homo sapiens
tttttagccttttaa

SEQ ID NO: 1189896 - DNA, 15 bp, Homo sapiens
atttttagcctttta

SEQ ID NO: 1189897 - DNA, 15 bp, Homo sapiens
catttttagcctttt

SEQ ID NO: 1189898 - DNA, 15 bp, Homo sapiens
tcatttttagccttt

SEQ ID NO: 1189899 - DNA, 15 bp, Homo sapiens
atcatttttagcctt

SEQ ID NO: 1189900 - DNA, 15 bp, Homo sapiens
gatcatttttagcct

SEQ ID NO: 1189901 - DNA, 15 bp, Homo sapiens
ggatcatttttagcc

SEQ ID NO: 1189902 - DNA, 15 bp, Homo sapiens
gggatcatttttagc

SEQ ID NO: 1189903 - DNA, 15 bp, Homo sapiens
tgggatcatttttag

SEQ ID NO: 1189904 - DNA, 15 bp, Homo sapiens
ctgggatcattttta

SEQ ID NO: 1189905 - DNA, 15 bp, Homo sapiens
cctgggatcattttt

SEQ ID NO: 1189906 - DNA, 15 bp, Homo sapiens
gcctgggatcatttt

SEQ ID NO: 1189907 - DNA, 15 bp, Homo sapiens
tgcctgggatcattt

SEQ ID NO: 1189908 - DNA, 15 bp, Homo sapiens
ctgcctgggatcatt

SEQ ID NO: 1189909 - DNA, 15 bp, Homo sapiens
cctgcctgggatcat

SEQ ID NO: 1189910 - DNA, 15 bp, Homo sapiens
acctgcctgggatca

SEQ ID NO: 1189911 - DNA, 15 bp, Homo sapiens
cacctgcctgggatc

SEQ ID NO: 1189912 - DNA, 15 bp, Homo sapiens
ccacctgcctgggat

SEQ ID NO: 1189913 - DNA, 15 bp, Homo sapiens
accacctgcctggga

SEQ ID NO: 1189914 - DNA, 15 bp, Homo sapiens
caccacctgcctggg

SEQ ID NO: 1189915 - DNA, 15 bp, Homo sapiens
acaccacctgcctgg

SEQ ID NO: 1189916 - DNA, 15 bp, Homo sapiens
cacaccacctgcctg

SEQ ID NO: 1189917 - DNA, 15 bp, Homo sapiens
tcacaccacctgcct

SEQ ID NO: 1189918 - DNA, 15 bp, Homo sapiens
ctcacaccacctgcc

SEQ ID NO: 1189919 - DNA, 15 bp, Homo sapiens
actcacaccacctgc

SEQ ID NO: 1189920 - DNA, 15 bp, Homo sapiens
cactcacaccacctg

SEQ ID NO: 1189921 - DNA, 15 bp, Homo sapiens
ccactcacaccacct

SEQ ID NO: 1189922 - DNA, 15 bp, Homo sapiens
cccactcacaccacc

SEQ ID NO: 1189923 - DNA, 15 bp, Homo sapiens
tcccactcacaccac

SEQ ID NO: 1189924 - DNA, 15 bp, Homo sapiens
atcccactcacacca

SEQ ID NO: 1189925 - DNA, 15 bp, Homo sapiens
gatcccactcacacc

SEQ ID NO: 1189926 - DNA, 15 bp, Homo sapiens
agatcccactcacac

SEQ ID NO: 1189927 - DNA, 15 bp, Homo sapiens
tagatcccactcaca

SEQ ID NO: 1189928 - DNA, 15 bp, Homo sapiens
ctagatcccactcac

SEQ ID NO: 1189929 - DNA, 15 bp, Homo sapiens
actagatcccactca

SEQ ID NO: 1189930 - DNA, 15 bp, Homo sapiens
tactagatcccactc

SEQ ID NO: 1189931 - DNA, 15 bp, Homo sapiens
ttactagatcccact

SEQ ID NO: 1189932 - DNA, 15 bp, Homo sapiens
cttactagatcccac

SEQ ID NO: 1189933 - DNA, 15 bp, Homo sapiens
acttactagatccca

SEQ ID NO: 1189934 - DNA, 15 bp, Homo sapiens
tacttactagatccc

SEQ ID NO: 1189935 - DNA, 15 bp, Homo sapiens
ttacttactagatcc

SEQ ID NO: 1189936 - DNA, 15 bp, Homo sapiens
attacttactagatc

SEQ ID NO: 1189937 - DNA, 15 bp, Homo sapiens
gattacttactagat

SEQ ID NO: 1189938 - DNA, 15 bp, Homo sapiens
agattacttactaga

SEQ ID NO: 1189939 - DNA, 15 bp, Homo sapiens
gagattacttactag

SEQ ID NO: 1189940 - DNA, 15 bp, Homo sapiens
agagattacttacta

SEQ ID NO: 1189941 - DNA, 15 bp, Homo sapiens
cagagattacttact

SEQ ID NO: 1189942 - DNA, 15 bp, Homo sapiens
ccagagattacttac

SEQ ID NO: 1189943 - DNA, 15 bp, Homo sapiens
cccagagattactta

SEQ ID NO: 1189944 - DNA, 15 bp, Homo sapiens
acccagagattactt

SEQ ID NO: 1189945 - DNA, 15 bp, Homo sapiens
gacccagagattact

SEQ ID NO: 1189946 - DNA, 15 bp, Homo sapiens
ggacccagagattac

SEQ ID NO: 1189947 - DNA, 15 bp, Homo sapiens
gggacccagagatta

SEQ ID NO: 1189948 - DNA, 15 bp, Homo sapiens
ggggacccagagatt

SEQ ID NO: 1189949 - DNA, 15 bp, Homo sapiens
tggggacccagagat

SEQ ID NO: 1189950 - DNA, 15 bp, Homo sapiens
ttggggacccagaga

SEQ ID NO: 1189951 - DNA, 15 bp, Homo sapiens
cttggggacccagag

SEQ ID NO: 1189952 - DNA, 15 bp, Homo sapiens
ccttggggacccaga

SEQ ID NO: 1189953 - DNA, 15 bp, Homo sapiens
tccttggggacccag

SEQ ID NO: 1189954 - DNA, 15 bp, Homo sapiens
ttccttggggaccca

SEQ ID NO: 1189955 - DNA, 15 bp, Homo sapiens
tttccttggggaccc

SEQ ID NO: 1189956 - DNA, 15 bp, Homo sapiens
gtttccttggggacc

SEQ ID NO: 1189957 - DNA, 15 bp, Homo sapiens
tgtttccttggggac

SEQ ID NO: 1189958 - DNA, 15 bp, Homo sapiens
atgtttccttgggga

SEQ ID NO: 1189959 - DNA, 15 bp, Homo sapiens
catgtttccttgggg

SEQ ID NO: 1189960 - DNA, 15 bp, Homo sapiens
tcatgtttccttggg

SEQ ID NO: 1189961 - DNA, 15 bp, Homo sapiens
ttcatgtttccttgg

SEQ ID NO: 1189962 - DNA, 15 bp, Homo sapiens
cttcatgtttccttg

SEQ ID NO: 1189963 - DNA, 15 bp, Homo sapiens
ccttcatgtttcctt

SEQ ID NO: 1189964 - DNA, 15 bp, Homo sapiens
gccttcatgtttcct

SEQ ID NO: 1189965 - DNA, 15 bp, Homo sapiens
agccttcatgtttcc

SEQ ID NO: 1189966 - DNA, 15 bp, Homo sapiens
cagccttcatgtttc

SEQ ID NO: 1189967 - DNA, 15 bp, Homo sapiens
acagccttcatgttt

SEQ ID NO: 1189968 - DNA, 15 bp, Homo sapiens
aacagccttcatgtt

SEQ ID NO: 1189969 - DNA, 15 bp, Homo sapiens
aaacagccttcatgt

SEQ ID NO: 1189970 - DNA, 15 bp, Homo sapiens
gaaacagccttcatg

SEQ ID NO: 1189971 - DNA, 15 bp, Homo sapiens
agaaacagccttcat

SEQ ID NO: 1189972 - DNA, 15 bp, Homo sapiens
aagaaacagccttca

SEQ ID NO: 1189973 - DNA, 15 bp, Homo sapiens
aaagaaacagccttc

SEQ ID NO: 1189974 - DNA, 15 bp, Homo sapiens
caaagaaacagcctt

SEQ ID NO: 1189975 - DNA, 15 bp, Homo sapiens
tcaaagaaacagcct

SEQ ID NO: 1189976 - DNA, 15 bp, Homo sapiens
gtcaaagaaacagcc

SEQ ID NO: 1189977 - DNA, 15 bp, Homo sapiens
agtcaaagaaacagc

SEQ ID NO: 1189978 - DNA, 15 bp, Homo sapiens
aagtcaaagaaacag

SEQ ID NO: 1189979 - DNA, 15 bp, Homo sapiens
taagtcaaagaaaca

SEQ ID NO: 1189980 - DNA, 15 bp, Homo sapiens
ttaagtcaaagaaac

SEQ ID NO: 1189981 - DNA, 15 bp, Homo sapiens
tttaagtcaaagaaa

SEQ ID NO: 1189982 - DNA, 15 bp, Homo sapiens
ttttaagtcaaagaa

SEQ ID NO: 1189983 - DNA, 15 bp, Homo sapiens
tttttaagtcaaaga

SEQ ID NO: 1189984 - DNA, 15 bp, Homo sapiens
atttttaagtcaaag

SEQ ID NO: 1189985 - DNA, 15 bp, Homo sapiens
catttttaagtcaaa

SEQ ID NO: 1189986 - DNA, 15 bp, Homo sapiens
acatttttaagtcaa

SEQ ID NO: 1189987 - DNA, 15 bp, Homo sapiens
tacatttttaagtca

SEQ ID NO: 1189988 - DNA, 15 bp, Homo sapiens
ttacatttttaagtc

SEQ ID NO: 1189989 - DNA, 15 bp, Homo sapiens
tttacatttttaagt

SEQ ID NO: 1189990 - DNA, 15 bp, Homo sapiens
ttttacatttttaag

SEQ ID NO: 1189991 - DNA, 15 bp, Homo sapiens
tttttacatttttaa

SEQ ID NO: 1189992 - DNA, 15 bp, Homo sapiens
atttttacattttta

SEQ ID NO: 1189993 - DNA, 15 bp, Homo sapiens
gatttttacattttt

SEQ ID NO: 1189994 - DNA, 15 bp, Homo sapiens
tgatttttacatttt

SEQ ID NO: 1189995 - DNA, 15 bp, Homo sapiens
ttgatttttacattt

SEQ ID NO: 1189996 - DNA, 15 bp, Homo sapiens
cttgatttttacatt

SEQ ID NO: 1189997 - DNA, 15 bp, Homo sapiens
acttgatttttacat

SEQ ID NO: 1189998 - DNA, 15 bp, Homo sapiens
gacttgatttttaca

SEQ ID NO: 1189999 - DNA, 15 bp, Homo sapiens
tgacttgatttttac

SEQ ID NO: 1190000 - DNA, 15 bp, Homo sapiens
ttgacttgattttta

SEQ ID NO: 1190001 - DNA, 15 bp, Homo sapiens
tttgacttgattttt

SEQ ID NO: 1190002 - DNA, 15 bp, Homo sapiens
ttttgacttgatttt

SEQ ID NO: 1190003 - DNA, 15 bp, Homo sapiens
tttttgacttgattt

SEQ ID NO: 1190004 - DNA, 15 bp, Homo sapiens
ctttttgacttgatt

SEQ ID NO: 1190005 - DNA, 15 bp, Homo sapiens
gctttttgacttgat

SEQ ID NO: 1190006 - DNA, 15 bp, Homo sapiens
tgctttttgacttga

SEQ ID NO: 1190007 - DNA, 15 bp, Homo sapiens
ttgctttttgacttg

SEQ ID NO: 1190008 - DNA, 15 bp, Homo sapiens
tttgctttttgactt

SEQ ID NO: 1190009 - DNA, 15 bp, Homo sapiens
ttttgctttttgact

SEQ ID NO: 1190010 - DNA, 15 bp, Homo sapiens
cttttgctttttgac

SEQ ID NO: 1190011 - DNA, 15 bp, Homo sapiens
gcttttgctttttga

SEQ ID NO: 1190012 - DNA, 15 bp, Homo sapiens
tgcttttgctttttg

SEQ ID NO: 1190013 - DNA, 15 bp, Homo sapiens
atgcttttgcttttt

SEQ ID NO: 1190014 - DNA, 15 bp, Homo sapiens
aatgcttttgctttt

SEQ ID NO: 1190015 - DNA, 15 bp, Homo sapiens
taatgcttttgcttt

SEQ ID NO: 1190016 - DNA, 15 bp, Homo sapiens
gtaatgcttttgctt

SEQ ID NO: 1190017 - DNA, 15 bp, Homo sapiens
agtaatgcttttgct

SEQ ID NO: 1190018 - DNA, 15 bp, Homo sapiens
cagtaatgcttttgc

SEQ ID NO: 1190019 - DNA, 15 bp, Homo sapiens
tcagtaatgcttttg

SEQ ID NO: 1190020 - DNA, 15 bp, Homo sapiens
ctcagtaatgctttt

SEQ ID NO: 1190021 - DNA, 15 bp, Homo sapiens
gctcagtaatgcttt

SEQ ID NO: 1190022 - DNA, 15 bp, Homo sapiens
tgctcagtaatgctt

SEQ ID NO: 1190023 - DNA, 15 bp, Homo sapiens
atgctcagtaatgct

SEQ ID NO: 1190024 - DNA, 15 bp, Homo sapiens
gatgctcagtaatgc

SEQ ID NO: 1190025 - DNA, 15 bp, Homo sapiens
agatgctcagtaatg

SEQ ID NO: 1190026 - DNA, 15 bp, Homo sapiens
tagatgctcagtaat

SEQ ID NO: 1190027 - DNA, 15 bp, Homo sapiens
gtagatgctcagtaa

SEQ ID NO: 1190028 - DNA, 15 bp, Homo sapiens
agtagatgctcagta

SEQ ID NO: 1190029 - DNA, 15 bp, Homo sapiens
tagtagatgctcagt

SEQ ID NO: 1190030 - DNA, 15 bp, Homo sapiens
atagtagatgctcag

SEQ ID NO: 1190031 - DNA, 15 bp, Homo sapiens
tatatagtagatgct

SEQ ID NO: 1190032 - DNA, 15 bp, Homo sapiens
ttatatagtagatgc

SEQ ID NO: 1190033 - DNA, 15 bp, Homo sapiens
tttatatagtagatg

SEQ ID NO: 1190034 - DNA, 15 bp, Homo sapiens
ttttatatagtagat

SEQ ID NO: 1190035 - DNA, 15 bp, Homo sapiens
cttttatatagtaga

SEQ ID NO: 1190036 - DNA, 15 bp, Homo sapiens
acttttatatagtag

SEQ ID NO: 1190037 - DNA, 15 bp, Homo sapiens
tacttttatatagta

SEQ ID NO: 1190038 - DNA, 15 bp, Homo sapiens
atacttttatatagt

SEQ ID NO: 1190039 - DNA, 15 bp, Homo sapiens
tatacttttatatag

SEQ ID NO: 1190040 - DNA, 15 bp, Homo sapiens
atatacttttatata

SEQ ID NO: 1190041 - DNA, 15 bp, Homo sapiens
catatacttttatat

SEQ ID NO: 1190042 - DNA, 15 bp, Homo sapiens
acatatacttttata

SEQ ID NO: 1190043 - DNA, 15 bp, Homo sapiens
cacatatacttttat

SEQ ID NO: 1190044 - DNA, 15 bp, Homo sapiens
acacatatactttta

SEQ ID NO: 1190045 - DNA, 15 bp, Homo sapiens
cacacatatactttt

SEQ ID NO: 1190046 - DNA, 15 bp, Homo sapiens
acacacatatacttt

SEQ ID NO: 1190047 - DNA, 15 bp, Homo sapiens
cacacacatatactt

SEQ ID NO: 1190048 - DNA, 15 bp, Homo sapiens
acacacacatatact

SEQ ID NO: 1190049 - DNA, 15 bp, Homo sapiens
aacacacacatatac

SEQ ID NO: 1190050 - DNA, 15 bp, Homo sapiens
aaacacacacatata

SEQ ID NO: 1190051 - DNA, 15 bp, Homo sapiens
taaacacacacatat

SEQ ID NO: 1190052 - DNA, 15 bp, Homo sapiens
ttaaacacacacata

SEQ ID NO: 1190053 - DNA, 15 bp, Homo sapiens
attaaacacacacat

SEQ ID NO: 1190054 - DNA, 15 bp, Homo sapiens
aattaaacacacaca

SEQ ID NO: 1190055 - DNA, 15 bp, Homo sapiens
taattaaacacacac

SEQ ID NO: 1190056 - DNA, 15 bp, Homo sapiens
ataattaaacacaca

SEQ ID NO: 1190057 - DNA, 15 bp, Homo sapiens
aataattaaacacac

SEQ ID NO: 1190058 - DNA, 15 bp, Homo sapiens
aaataattaaacaca

SEQ ID NO: 1190059 - DNA, 15 bp, Homo sapiens
taaataattaaacac

SEQ ID NO: 1190060 - DNA, 15 bp, Homo sapiens
ttaaataattaaaca

SEQ ID NO: 1190061 - DNA, 15 bp, Homo sapiens
gttaaataattaaac

SEQ ID NO: 1190062 - DNA, 15 bp, Homo sapiens
agttaaataattaaa

SEQ ID NO: 1190063 - DNA, 15 bp, Homo sapiens
gagttaaataattaa

SEQ ID NO: 1190064 - DNA, 15 bp, Homo sapiens
agagttaaataatta

SEQ ID NO: 1190065 - DNA, 15 bp, Homo sapiens
gagagttaaataatt

SEQ ID NO: 1190066 - DNA, 15 bp, Homo sapiens
tgagagttaaataat

SEQ ID NO: 1190067 - DNA, 15 bp, Homo sapiens
ctgagagttaaataa

SEQ ID NO: 1190068 - DNA, 15 bp, Homo sapiens
tctgagagttaaata

SEQ ID NO: 1190069 - DNA, 15 bp, Homo sapiens
ctctgagagttaaat

SEQ ID NO: 1190070 - DNA, 15 bp, Homo sapiens
gctctgagagttaaa

SEQ ID NO: 1190071 - DNA, 15 bp, Homo sapiens
tgctctgagagttaa

SEQ ID NO: 1190072 - DNA, 15 bp, Homo sapiens
ttgctctgagagtta

SEQ ID NO: 1190073 - DNA, 15 bp, Homo sapiens
attgctctgagagtt

SEQ ID NO: 1190074 - DNA, 15 bp, Homo sapiens
gattgctctgagagt

SEQ ID NO: 1190075 - DNA, 15 bp, Homo sapiens
ggattgctctgagag

SEQ ID NO: 1190076 - DNA, 15 bp, Homo sapiens
tggattgctctgaga

SEQ ID NO: 1190077 - DNA, 15 bp, Homo sapiens
atggattgctctgag

SEQ ID NO: 1190078 - DNA, 15 bp, Homo sapiens
aatggattgctctga

SEQ ID NO: 1190079 - DNA, 15 bp, Homo sapiens
aaatggattgctctg

SEQ ID NO: 1190080 - DNA, 15 bp, Homo sapiens
aaaatggattgctct

SEQ ID NO: 1190081 - DNA, 15 bp, Homo sapiens
gaaaatggattgctc

SEQ ID NO: 1190082 - DNA, 15 bp, Homo sapiens
tgaaaatggattgct

SEQ ID NO: 1190083 - DNA, 15 bp, Homo sapiens
ctgaaaatggattgc

SEQ ID NO: 1190084 - DNA, 15 bp, Homo sapiens
tctgaaaatggattg

SEQ ID NO: 1190085 - DNA, 15 bp, Homo sapiens
atctgaaaatggatt

SEQ ID NO: 1190086 - DNA, 15 bp, Homo sapiens
tatctgaaaatggat

SEQ ID NO: 1190087 - DNA, 15 bp, Homo sapiens
ttatctgaaaatgga

SEQ ID NO: 1190088 - DNA, 15 bp, Homo sapiens
cttatctgaaaatgg

SEQ ID NO: 1190089 - DNA, 15 bp, Homo sapiens
tcttatctgaaaatg

SEQ ID NO: 1190090 - DNA, 15 bp, Homo sapiens
ttcttatctgaaaat

SEQ ID NO: 1190091 - DNA, 15 bp, Homo sapiens
tttcttatctgaaaa

SEQ ID NO: 1190092 - DNA, 15 bp, Homo sapiens
ttttcttatctgaaa

SEQ ID NO: 1190093 - DNA, 15 bp, Homo sapiens
attttcttatctgaa

SEQ ID NO: 1190094 - DNA, 15 bp, Homo sapiens
cattttcttatctga

SEQ ID NO: 1190095 - DNA, 15 bp, Homo sapiens
tcattttcttatctg

SEQ ID NO: 1190096 - DNA, 15 bp, Homo sapiens
ttcattttcttatct

SEQ ID NO: 1190097 - DNA, 15 bp, Homo sapiens
cttcattttcttatc

SEQ ID NO: 1190098 - DNA, 15 bp, Homo sapiens
gcttcattttcttat

SEQ ID NO: 1190099 - DNA, 15 bp, Homo sapiens
agcttcattttctta

SEQ ID NO: 1190100 - DNA, 15 bp, Homo sapiens
gagcttcattttctt

SEQ ID NO: 1190101 - DNA, 15 bp, Homo sapiens
tgagcttcattttct

SEQ ID NO: 1190102 - DNA, 15 bp, Homo sapiens
ctgagcttcattttc

SEQ ID NO: 1190103 - DNA, 15 bp, Homo sapiens
tctgagcttcatttt

SEQ ID NO: 1190104 - DNA, 15 bp, Homo sapiens
gtctgagcttcattt

SEQ ID NO: 1190105 - DNA, 15 bp, Homo sapiens
agtctgagcttcatt

SEQ ID NO: 1190106 - DNA, 15 bp, Homo sapiens
aagtctgagcttcat

SEQ ID NO: 1190107 - DNA, 15 bp, Homo sapiens
caagtctgagcttca

SEQ ID NO: 1190108 - DNA, 15 bp, Homo sapiens
tcaagtctgagcttc

SEQ ID NO: 1190109 - DNA, 15 bp, Homo sapiens
gtcaagtctgagctt

SEQ ID NO: 1190110 - DNA, 15 bp, Homo sapiens
agtcaagtctgagct

SEQ ID NO: 1190111 - DNA, 15 bp, Homo sapiens
aagtcaagtctgagc

SEQ ID NO: 1190112 - DNA, 15 bp, Homo sapiens
aaagtcaagtctgag

SEQ ID NO: 1190113 - DNA, 15 bp, Homo sapiens
caaagtcaagtctga

SEQ ID NO: 1190114 - DNA, 15 bp, Homo sapiens
gcaaagtcaagtctg

SEQ ID NO: 1190115 - DNA, 15 bp, Homo sapiens
agcaaagtcaagtct

SEQ ID NO: 1190116 - DNA, 15 bp, Homo sapiens
gagcaaagtcaagtc

SEQ ID NO: 1190117 - DNA, 15 bp, Homo sapiens
tgagcaaagtcaagt

SEQ ID NO: 1190118 - DNA, 15 bp, Homo sapiens
ttgagcaaagtcaag

SEQ ID NO: 1190119 - DNA, 15 bp, Homo sapiens
cttgagcaaagtcaa

SEQ ID NO: 1190120 - DNA, 15 bp, Homo sapiens
acttgagcaaagtca

SEQ ID NO: 1190121 - DNA, 15 bp, Homo sapiens
gacttgagcaaagtc

SEQ ID NO: 1190122 - DNA, 15 bp, Homo sapiens
tgacttgagcaaagt

SEQ ID NO: 1190123 - DNA, 15 bp, Homo sapiens
gtgacttgagcaaag

SEQ ID NO: 1190124 - DNA, 15 bp, Homo sapiens
tgtgacttgagcaaa

SEQ ID NO: 1190125 - DNA, 15 bp, Homo sapiens
gtgtgacttgagcaa

SEQ ID NO: 1190126 - DNA, 15 bp, Homo sapiens
ggtgtgacttgagca

SEQ ID NO: 1190127 - DNA, 15 bp, Homo sapiens
tggtgtgacttgagc

SEQ ID NO: 1190128 - DNA, 15 bp, Homo sapiens
gtggtgtgacttgag

SEQ ID NO: 1190129 - DNA, 15 bp, Homo sapiens
agtggtgtgacttga

SEQ ID NO: 1190130 - DNA, 15 bp, Homo sapiens
tagtggtgtgacttg

SEQ ID NO: 1190131 - DNA, 15 bp, Homo sapiens
atagtggtgtgactt

SEQ ID NO: 1190132 - DNA, 15 bp, Homo sapiens
catagtggtgtgact

SEQ ID NO: 1190133 - DNA, 15 bp, Homo sapiens
tcatagtggtgtgac

SEQ ID NO: 1190134 - DNA, 15 bp, Homo sapiens
ttcatagtggtgtga

SEQ ID NO: 1190135 - DNA, 15 bp, Homo sapiens
cttcatagtggtgtg

SEQ ID NO: 1190136 - DNA, 15 bp, Homo sapiens
ccttcatagtggtgt

SEQ ID NO: 1190137 - DNA, 15 bp, Homo sapiens
gccttcatagtggtg

SEQ ID NO: 1190138 - DNA, 15 bp, Homo sapiens
agccttcatagtggt

SEQ ID NO: 1190139 - DNA, 15 bp, Homo sapiens
cagccttcatagtgg

SEQ ID NO: 1190140 - DNA, 15 bp, Homo sapiens
acagccttcatagtg

SEQ ID NO: 1190141 - DNA, 15 bp, Homo sapiens
cacagccttcatagt

SEQ ID NO: 1190142 - DNA, 15 bp, Homo sapiens
tcacagccttcatag

SEQ ID NO: 1190143 - DNA, 15 bp, Homo sapiens
gtcacagccttcata

SEQ ID NO: 1190144 - DNA, 15 bp, Homo sapiens
cgtcacagccttcat

SEQ ID NO: 1190145 - DNA, 15 bp, Homo sapiens
gcgtcacagccttca

SEQ ID NO: 1190146 - DNA, 15 bp, Homo sapiens
tgcgtcacagccttc

SEQ ID NO: 1190147 - DNA, 15 bp, Homo sapiens
gtgcgtcacagcctt

SEQ ID NO: 1190148 - DNA, 15 bp, Homo sapiens
cgtgcgtcacagcct

SEQ ID NO: 1190149 - DNA, 15 bp, Homo sapiens
acgtgcgtcacagcc

SEQ ID NO: 1190150 - DNA, 15 bp, Homo sapiens
cacgtgcgtcacagc

SEQ ID NO: 1190151 - DNA, 15 bp, Homo sapiens
tcacgtgcgtcacag

SEQ ID NO: 1190152 - DNA, 15 bp, Homo sapiens
gtcacgtgcgtcaca

SEQ ID NO: 1190153 - DNA, 15 bp, Homo sapiens
agtcacgtgcgtcac

SEQ ID NO: 1190154 - DNA, 15 bp, Homo sapiens
aagtcacgtgcgtca

SEQ ID NO: 1190155 - DNA, 15 bp, Homo sapiens
gaagtcacgtgcgtc

SEQ ID NO: 1190156 - DNA, 15 bp, Homo sapiens
cgaagtcacgtgcgt

SEQ ID NO: 1190157 - DNA, 15 bp, Homo sapiens
acgaagtcacgtgcg

SEQ ID NO: 1190158 - DNA, 15 bp, Homo sapiens
cacgaagtcacgtgc

SEQ ID NO: 1190159 - DNA, 15 bp, Homo sapiens
ccacgaagtcacgtg

SEQ ID NO: 1190160 - DNA, 15 bp, Homo sapiens
tccacgaagtcacgt

SEQ ID NO: 1190161 - DNA, 15 bp, Homo sapiens
ctccacgaagtcacg

SEQ ID NO: 1190162 - DNA, 15 bp, Homo sapiens
tctccacgaagtcac

SEQ ID NO: 1190163 - DNA, 15 bp, Homo sapiens
ctctccacgaagtca

SEQ ID NO: 1190164 - DNA, 15 bp, Homo sapiens
tctctccacgaagtc

SEQ ID NO: 1190165 - DNA, 15 bp, Homo sapiens
ctctctccacgaagt

SEQ ID NO: 1190166 - DNA, 15 bp, Homo sapiens
cctctctccacgaag

SEQ ID NO: 1190167 - DNA, 15 bp, Homo sapiens
gcctctctccacgaa

SEQ ID NO: 1190168 - DNA, 15 bp, Homo sapiens
agcctctctccacga

SEQ ID NO: 1190169 - DNA, 15 bp, Homo sapiens
cagcctctctccacg

SEQ ID NO: 1190170 - DNA, 15 bp, Homo sapiens
tcagcctctctccac

SEQ ID NO: 1190171 - DNA, 15 bp, Homo sapiens
gtcagcctctctcca

SEQ ID NO: 1190172 - DNA, 15 bp, Homo sapiens
ggtcagcctctctcc

SEQ ID NO: 1190173 - DNA, 15 bp, Homo sapiens
aggtcagcctctctc

SEQ ID NO: 1190174 - DNA, 15 bp, Homo sapiens
taggtcagcctctct

SEQ ID NO: 1190175 - DNA, 15 bp, Homo sapiens
ataggtcagcctctc

SEQ ID NO: 1190176 - DNA, 15 bp, Homo sapiens
cataggtcagcctct

SEQ ID NO: 1190177 - DNA, 15 bp, Homo sapiens
tcataggtcagcctc

SEQ ID NO: 1190178 - DNA, 15 bp, Homo sapiens
ctcataggtcagcct

SEQ ID NO: 1190179 - DNA, 15 bp, Homo sapiens
actcataggtcagcc

SEQ ID NO: 1190180 - DNA, 15 bp, Homo sapiens
gactcataggtcagc

SEQ ID NO: 1190181 - DNA, 15 bp, Homo sapiens
tgactcataggtcag

SEQ ID NO: 1190182 - DNA, 15 bp, Homo sapiens
ctgactcataggtca

SEQ ID NO: 1190183 - DNA, 15 bp, Homo sapiens
tctgactcataggtc

SEQ ID NO: 1190184 - DNA, 15 bp, Homo sapiens
ttctgactcataggt

SEQ ID NO: 1190185 - DNA, 15 bp, Homo sapiens
tttctgactcatagg

SEQ ID NO: 1190186 - DNA, 15 bp, Homo sapiens
gtttctgactcatag

SEQ ID NO: 1190187 - DNA, 15 bp, Homo sapiens
agtttctgactcata

SEQ ID NO: 1190188 - DNA, 15 bp, Homo sapiens
aagtttctgactcat

SEQ ID NO: 1190189 - DNA, 15 bp, Homo sapiens
gaagtttctgactca

SEQ ID NO: 1190190 - DNA, 15 bp, Homo sapiens
ggaagtttctgactc

SEQ ID NO: 1190191 - DNA, 15 bp, Homo sapiens
aggaagtttctgact

SEQ ID NO: 1190192 - DNA, 15 bp, Homo sapiens
gaggaagtttctgac

SEQ ID NO: 1190193 - DNA, 15 bp, Homo sapiens
agaggaagtttctga

SEQ ID NO: 1190194 - DNA, 15 bp, Homo sapiens
tagaggaagtttctg

SEQ ID NO: 1190195 - DNA, 15 bp, Homo sapiens
gtagaggaagtttct

SEQ ID NO: 1190196 - DNA, 15 bp, Homo sapiens
ggtagaggaagtttc

SEQ ID NO: 1190197 - DNA, 15 bp, Homo sapiens
tggtagaggaagttt

SEQ ID NO: 1190198 - DNA, 15 bp, Homo sapiens
gtggtagaggaagtt

SEQ ID NO: 1190199 - DNA, 15 bp, Homo sapiens
agtggtagaggaagt

SEQ ID NO: 1190200 - DNA, 15 bp, Homo sapiens
aagtggtagaggaag

SEQ ID NO: 1190201 - DNA, 15 bp, Homo sapiens
caagtggtagaggaa

SEQ ID NO: 1190202 - DNA, 15 bp, Homo sapiens
gcaagtggtagagga

SEQ ID NO: 1190203 - DNA, 15 bp, Homo sapiens
ggcaagtggtagagg

SEQ ID NO: 1190204 - DNA, 15 bp, Homo sapiens
tggcaagtggtagag

SEQ ID NO: 1190205 - DNA, 15 bp, Homo sapiens
actggcaagtggtag

SEQ ID NO: 1190206 - DNA, 15 bp, Homo sapiens
gactggcaagtggta

SEQ ID NO: 1190207 - DNA, 15 bp, Homo sapiens
agactggcaagtggt

SEQ ID NO: 1190208 - DNA, 15 bp, Homo sapiens
gagactggcaagtgg

SEQ ID NO: 1190209 - DNA, 15 bp, Homo sapiens
agagactggcaagtg

SEQ ID NO: 1190210 - DNA, 15 bp, Homo sapiens
aagagactggcaagt

SEQ ID NO: 1190211 - DNA, 15 bp, Homo sapiens
aaagagactggcaag

SEQ ID NO: 1190212 - DNA, 15 bp, Homo sapiens
aaaagagactggcaa

SEQ ID NO: 1190213 - DNA, 15 bp, Homo sapiens
gaaaagagactggca

SEQ ID NO: 1190214 - DNA, 15 bp, Homo sapiens
agaaaagagactggc

SEQ ID NO: 1190215 - DNA, 15 bp, Homo sapiens
tagaaaagagactgg

SEQ ID NO: 1190216 - DNA, 15 bp, Homo sapiens
atagaaaagagactg

SEQ ID NO: 1190217 - DNA, 15 bp, Homo sapiens
gatagaaaagagact

SEQ ID NO: 1190218 - DNA, 15 bp, Homo sapiens
agatagaaaagagac

SEQ ID NO: 1190219 - DNA, 15 bp, Homo sapiens
tagatagaaaagaga

SEQ ID NO: 1190220 - DNA, 15 bp, Homo sapiens
ttagatagaaaagag

SEQ ID NO: 1190221 - DNA, 15 bp, Homo sapiens
tttagatagaaaaga

SEQ ID NO: 1190222 - DNA, 15 bp, Homo sapiens
atttagatagaaaag

SEQ ID NO: 1190223 - DNA, 15 bp, Homo sapiens
aatttagatagaaaa

SEQ ID NO: 1190224 - DNA, 15 bp, Homo sapiens
taatttagatagaaa

SEQ ID NO: 1190225 - DNA, 15 bp, Homo sapiens
ctaatttagatagaa

SEQ ID NO: 1190226 - DNA, 15 bp, Homo sapiens
actaatttagataga

SEQ ID NO: 1190227 - DNA, 15 bp, Homo sapiens
aactaatttagatag

SEQ ID NO: 1190228 - DNA, 15 bp, Homo sapiens
aaactaatttagata

SEQ ID NO: 1190229 - DNA, 15 bp, Homo sapiens
gaaactaatttagat

SEQ ID NO: 1190230 - DNA, 15 bp, Homo sapiens
ggaaactaatttaga

SEQ ID NO: 1190231 - DNA, 15 bp, Homo sapiens
aggaaactaatttag

SEQ ID NO: 1190232 - DNA, 15 bp, Homo sapiens
gaggaaactaattta

SEQ ID NO: 1190233 - DNA, 15 bp, Homo sapiens
tgaggaaactaattt

SEQ ID NO: 1190234 - DNA, 15 bp, Homo sapiens
atgaggaaactaatt

SEQ ID NO: 1190235 - DNA, 15 bp, Homo sapiens
aatgaggaaactaat

SEQ ID NO: 1190236 - DNA, 15 bp, Homo sapiens
aaatgaggaaactaa

SEQ ID NO: 1190237 - DNA, 15 bp, Homo sapiens
taaatgaggaaacta

SEQ ID NO: 1190238 - DNA, 15 bp, Homo sapiens
ataaatgaggaaact

SEQ ID NO: 1190239 - DNA, 15 bp, Homo sapiens
tataaatgaggaaac

SEQ ID NO: 1190240 - DNA, 15 bp, Homo sapiens
ttataaatgaggaaa

SEQ ID NO: 1190241 - DNA, 15 bp, Homo sapiens
tttataaatgaggaa

SEQ ID NO: 1190242 - DNA, 15 bp, Homo sapiens
ttttataaatgagga

SEQ ID NO: 1190243 - DNA, 15 bp, Homo sapiens
tttttataaatgagg

SEQ ID NO: 1190244 - DNA, 15 bp, Homo sapiens
ttttttataaatgag

SEQ ID NO: 1190245 - DNA, 15 bp, Homo sapiens
cttttttataaatga

SEQ ID NO: 1190246 - DNA, 15 bp, Homo sapiens
tcttttttataaatg

SEQ ID NO: 1190247 - DNA, 15 bp, Homo sapiens
ctcttttttataaat

SEQ ID NO: 1190248 - DNA, 15 bp, Homo sapiens
tctcttttttataaa

SEQ ID NO: 1190249 - DNA, 15 bp, Homo sapiens
atctcttttttataa

SEQ ID NO: 1190250 - DNA, 15 bp, Homo sapiens
gatctcttttttata

SEQ ID NO: 1190251 - DNA, 15 bp, Homo sapiens
tgatctcttttttat

SEQ ID NO: 1190252 - DNA, 15 bp, Homo sapiens
gtgatctctttttta

SEQ ID NO: 1190253 - DNA, 15 bp, Homo sapiens
agtgatctctttttt

SEQ ID NO: 1190254 - DNA, 15 bp, Homo sapiens
tagtgatctcttttt

SEQ ID NO: 1190255 - DNA, 15 bp, Homo sapiens
atagtgatctctttt

SEQ ID NO: 1190256 - DNA, 15 bp, Homo sapiens
aatagtgatctcttt

SEQ ID NO: 1190257 - DNA, 15 bp, Homo sapiens
aaatagtgatctctt

SEQ ID NO: 1190258 - DNA, 15 bp, Homo sapiens
gaaatagtgatctct

SEQ ID NO: 1190259 - DNA, 15 bp, Homo sapiens
tgaaatagtgatctc

SEQ ID NO: 1190260 - DNA, 15 bp, Homo sapiens
ctgaaatagtgatct

SEQ ID NO: 1190261 - DNA, 15 bp, Homo sapiens
gctgaaatagtgatc

SEQ ID NO: 1190262 - DNA, 15 bp, Homo sapiens
ggctgaaatagtgat

SEQ ID NO: 1190263 - DNA, 15 bp, Homo sapiens
gggctgaaatagtga

SEQ ID NO: 1190264 - DNA, 15 bp, Homo sapiens
ggggctgaaatagtg

SEQ ID NO: 1190265 - DNA, 15 bp, Homo sapiens
tggggctgaaatagt

SEQ ID NO: 1190266 - DNA, 15 bp, Homo sapiens
gtggggctgaaatag

SEQ ID NO: 1190267 - DNA, 15 bp, Homo sapiens
ggtggggctgaaata

SEQ ID NO: 1190268 - DNA, 15 bp, Homo sapiens
aggtggggctgaaat

SEQ ID NO: 1190269 - DNA, 15 bp, Homo sapiens
caggtggggctgaaa

SEQ ID NO: 1190270 - DNA, 15 bp, Homo sapiens
gcaggtggggctgaa

SEQ ID NO: 1190271 - DNA, 15 bp, Homo sapiens
ggcaggtggggctga

SEQ ID NO: 1190272 - DNA, 15 bp, Homo sapiens
aggcaggtggggctg

SEQ ID NO: 1190273 - DNA, 15 bp, Homo sapiens
gaggcaggtggggct

SEQ ID NO: 1190274 - DNA, 15 bp, Homo sapiens
tgaggcaggtggggc

SEQ ID NO: 1190275 - DNA, 15 bp, Homo sapiens
ttgaggcaggtgggg

SEQ ID NO: 1190276 - DNA, 15 bp, Homo sapiens
cttgaggcaggtggg

SEQ ID NO: 1190277 - DNA, 15 bp, Homo sapiens
ccttgaggcaggtgg

SEQ ID NO: 1190278 - DNA, 15 bp, Homo sapiens
cccttgaggcaggtg

SEQ ID NO: 1190279 - DNA, 15 bp, Homo sapiens
tcccttgaggcaggt

SEQ ID NO: 1190280 - DNA, 15 bp, Homo sapiens
atcccttgaggcagg

SEQ ID NO: 1190281 - DNA, 15 bp, Homo sapiens
gatcccttgaggcag

SEQ ID NO: 1190282 - DNA, 15 bp, Homo sapiens
tgatcccttgaggca

SEQ ID NO: 1190283 - DNA, 15 bp, Homo sapiens
atgatcccttgaggc

SEQ ID NO: 1190284 - DNA, 15 bp, Homo sapiens
catgatcccttgagg

SEQ ID NO: 1190285 - DNA, 15 bp, Homo sapiens
tcatgatcccttgag

SEQ ID NO: 1190286 - DNA, 15 bp, Homo sapiens
ctcatgatcccttga

SEQ ID NO: 1190287 - DNA, 15 bp, Homo sapiens
tctcatgatcccttg

SEQ ID NO: 1190288 - DNA, 15 bp, Homo sapiens
ttctcatgatccctt

SEQ ID NO: 1190289 - DNA, 15 bp, Homo sapiens
cttctcatgatccct

SEQ ID NO: 1190290 - DNA, 15 bp, Homo sapiens
ccttctcatgatccc

SEQ ID NO: 1190291 - DNA, 15 bp, Homo sapiens
tccttctcatgatcc

SEQ ID NO: 1190292 - DNA, 15 bp, Homo sapiens
ttccttctcatgatc

SEQ ID NO: 1190293 - DNA, 15 bp, Homo sapiens
gttccttctcatgat

SEQ ID NO: 1190294 - DNA, 15 bp, Homo sapiens
cgttccttctcatga

SEQ ID NO: 1190295 - DNA, 15 bp, Homo sapiens
ccgttccttctcatg

SEQ ID NO: 1190296 - DNA, 15 bp, Homo sapiens
tccgttccttctcat

SEQ ID NO: 1190297 - DNA, 15 bp, Homo sapiens
ttccgttccttctca

SEQ ID NO: 1190298 - DNA, 15 bp, Homo sapiens
tttccgttccttctc

SEQ ID NO: 1190299 - DNA, 15 bp, Homo sapiens
atttccgttccttct

SEQ ID NO: 1190300 - DNA, 15 bp, Homo sapiens
tatttccgttccttc

SEQ ID NO: 1190301 - DNA, 15 bp, Homo sapiens
ttatttccgttcctt

SEQ ID NO: 1190302 - DNA, 15 bp, Homo sapiens
attatttccgttcct

SEQ ID NO: 1190303 - DNA, 15 bp, Homo sapiens
gattatttccgttcc

SEQ ID NO: 1190304 - DNA, 15 bp, Homo sapiens
tgattatttccgttc

SEQ ID NO: 1190305 - DNA, 15 bp, Homo sapiens
ttgattatttccgtt

SEQ ID NO: 1190306 - DNA, 15 bp, Homo sapiens
attgattatttccgt

SEQ ID NO: 1190307 - DNA, 15 bp, Homo sapiens
tattgattatttccg

SEQ ID NO: 1190308 - DNA, 15 bp, Homo sapiens
atattgattatttcc

SEQ ID NO: 1190309 - DNA, 15 bp, Homo sapiens
catattgattatttc

SEQ ID NO: 1190310 - DNA, 15 bp, Homo sapiens
tcatattgattattt

SEQ ID NO: 1190311 - DNA, 15 bp, Homo sapiens
ttcatattgattatt

SEQ ID NO: 1190312 - DNA, 15 bp, Homo sapiens
tttcatattgattat

SEQ ID NO: 1190313 - DNA, 15 bp, Homo sapiens
ttttcatattgatta

SEQ ID NO: 1190314 - DNA, 15 bp, Homo sapiens
gttttcatattgatt

SEQ ID NO: 1190315 - DNA, 15 bp, Homo sapiens
tgttttcatattgat

SEQ ID NO: 1190316 - DNA, 15 bp, Homo sapiens
gtgttttcatattga

SEQ ID NO: 1190317 - DNA, 15 bp, Homo sapiens
tgtgttttcatattg

SEQ ID NO: 1190318 - DNA, 15 bp, Homo sapiens
atgtgttttcatatt

SEQ ID NO: 1190319 - DNA, 15 bp, Homo sapiens
aatgtgttttcatat

SEQ ID NO: 1190320 - DNA, 15 bp, Homo sapiens
taatgtgttttcata

SEQ ID NO: 1190321 - DNA, 15 bp, Homo sapiens
ataatgtgttttcat

SEQ ID NO: 1190322 - DNA, 15 bp, Homo sapiens
tataatgtgttttca

SEQ ID NO: 1190323 - DNA, 15 bp, Homo sapiens
ttataatgtgttttc

SEQ ID NO: 1190324 - DNA, 15 bp, Homo sapiens
tttataatgtgtttt

SEQ ID NO: 1190325 - DNA, 15 bp, Homo sapiens
atttataatgtgttt

SEQ ID NO: 1190326 - DNA, 15 bp, Homo sapiens
aatttataatgtgtt

SEQ ID NO: 1190327 - DNA, 15 bp, Homo sapiens
caatttataatgtgt

SEQ ID NO: 1190328 - DNA, 15 bp, Homo sapiens
gcaatttataatgtg

SEQ ID NO: 1190329 - DNA, 15 bp, Homo sapiens
tgcaatttataatgt

SEQ ID NO: 1190330 - DNA, 15 bp, Homo sapiens
ctgcaatttataatg

SEQ ID NO: 1190331 - DNA, 15 bp, Homo sapiens
actgcaatttataat

SEQ ID NO: 1190332 - DNA, 15 bp, Homo sapiens
cactgcaatttataa

SEQ ID NO: 1190333 - DNA, 15 bp, Homo sapiens
tcactgcaatttata

SEQ ID NO: 1190334 - DNA, 15 bp, Homo sapiens
ctcactgcaatttat

SEQ ID NO: 1190335 - DNA, 15 bp, Homo sapiens
actcactgcaattta

SEQ ID NO: 1190336 - DNA, 15 bp, Homo sapiens
aactcactgcaattt

SEQ ID NO: 1190337 - DNA, 15 bp, Homo sapiens
taactcactgcaatt

SEQ ID NO: 1190338 - DNA, 15 bp, Homo sapiens
ataactcactgcaat

SEQ ID NO: 1190339 - DNA, 15 bp, Homo sapiens
tataactcactgcaa

SEQ ID NO: 1190340 - DNA, 15 bp, Homo sapiens
gtataactcactgca

SEQ ID NO: 1190341 - DNA, 15 bp, Homo sapiens
cgtataactcactgc

SEQ ID NO: 1190342 - DNA, 15 bp, Homo sapiens
tcgtataactcactg

SEQ ID NO: 1190343 - DNA, 15 bp, Homo sapiens
ttcgtataactcact

SEQ ID NO: 1190344 - DNA, 15 bp, Homo sapiens
cttcgtataactcac

SEQ ID NO: 1190345 - DNA, 15 bp, Homo sapiens
acttcgtataactca

SEQ ID NO: 1190346 - DNA, 15 bp, Homo sapiens
cacttcgtataactc

SEQ ID NO: 1190347 - DNA, 15 bp, Homo sapiens
tcacttcgtataact

SEQ ID NO: 1190348 - DNA, 15 bp, Homo sapiens
ctcacttcgtataac

SEQ ID NO: 1190349 - DNA, 15 bp, Homo sapiens
tctcacttcgtataa

SEQ ID NO: 1190350 - DNA, 15 bp, Homo sapiens
atctcacttcgtata

SEQ ID NO: 1190351 - DNA, 15 bp, Homo sapiens
tatctcacttcgtat

SEQ ID NO: 1190352 - DNA, 15 bp, Homo sapiens
atatctcacttcgta

SEQ ID NO: 1190353 - DNA, 15 bp, Homo sapiens
aatatctcacttcgt

SEQ ID NO: 1190354 - DNA, 15 bp, Homo sapiens
taatatctcacttcg

SEQ ID NO: 1190355 - DNA, 15 bp, Homo sapiens
ataatatctcacttc

SEQ ID NO: 1190356 - DNA, 15 bp, Homo sapiens
tataatatctcactt

SEQ ID NO: 1190357 - DNA, 15 bp, Homo sapiens
ttataatatctcact

SEQ ID NO: 1190358 - DNA, 15 bp, Homo sapiens
tttataatatctcac

SEQ ID NO: 1190359 - DNA, 15 bp, Homo sapiens
ctttataatatctca

SEQ ID NO: 1190360 - DNA, 15 bp, Homo sapiens
gctttataatatctc

SEQ ID NO: 1190361 - DNA, 15 bp, Homo sapiens
tgctttataatatct

SEQ ID NO: 1190362 - DNA, 15 bp, Homo sapiens
ttgctttataatatc

SEQ ID NO: 1190363 - DNA, 15 bp, Homo sapiens
tttgctttataatat

SEQ ID NO: 1190364 - DNA, 15 bp, Homo sapiens
ctttgctttataata

SEQ ID NO: 1190365 - DNA, 15 bp, Homo sapiens
actttgctttataat

SEQ ID NO: 1190366 - DNA, 15 bp, Homo sapiens
cactttgctttataa

SEQ ID NO: 1190367 - DNA, 15 bp, Homo sapiens
tcactttgctttata

SEQ ID NO: 1190368 - DNA, 15 bp, Homo sapiens
ttcactttgctttat

SEQ ID NO: 1190369 - DNA, 15 bp, Homo sapiens
attcactttgcttta

SEQ ID NO: 1190370 - DNA, 15 bp, Homo sapiens
aattcactttgcttt

SEQ ID NO: 1190371 - DNA, 15 bp, Homo sapiens
taattcactttgctt

SEQ ID NO: 1190372 - DNA, 15 bp, Homo sapiens
ctaattcactttgct

SEQ ID NO: 1190373 - DNA, 15 bp, Homo sapiens
cctaattcactttgc

SEQ ID NO: 1190374 - DNA, 15 bp, Homo sapiens
gcctaattcactttg

SEQ ID NO: 1190375 - DNA, 15 bp, Homo sapiens
agcctaattcacttt

SEQ ID NO: 1190376 - DNA, 15 bp, Homo sapiens
aagcctaattcactt

SEQ ID NO: 1190377 - DNA, 15 bp, Homo sapiens
aaagcctaattcact

SEQ ID NO: 1190378 - DNA, 15 bp, Homo sapiens
caaagcctaattcac

SEQ ID NO: 1190379 - DNA, 15 bp, Homo sapiens
tcaaagcctaattca

SEQ ID NO: 1190380 - DNA, 15 bp, Homo sapiens
atcaaagcctaattc

SEQ ID NO: 1190381 - DNA, 15 bp, Homo sapiens
tatcaaagcctaatt

SEQ ID NO: 1190382 - DNA, 15 bp, Homo sapiens
ttatcaaagcctaat

SEQ ID NO: 1190383 - DNA, 15 bp, Homo sapiens
tttatcaaagcctaa

SEQ ID NO: 1190384 - DNA, 15 bp, Homo sapiens
atttatcaaagccta

SEQ ID NO: 1190385 - DNA, 15 bp, Homo sapiens
gatttatcaaagcct

SEQ ID NO: 1190386 - DNA, 15 bp, Homo sapiens
tgatttatcaaagcc

SEQ ID NO: 1190387 - DNA, 15 bp, Homo sapiens
ttgatttatcaaagc

SEQ ID NO: 1190388 - DNA, 15 bp, Homo sapiens
cttgatttatcaaag

SEQ ID NO: 1190389 - DNA, 15 bp, Homo sapiens
ccttgatttatcaaa

SEQ ID NO: 1190390 - DNA, 15 bp, Homo sapiens
tccttgatttatcaa

SEQ ID NO: 1190391 - DNA, 15 bp, Homo sapiens
ctccttgatttatca

SEQ ID NO: 1190392 - DNA, 15 bp, Homo sapiens
cctccttgatttatc

SEQ ID NO: 1190393 - DNA, 15 bp, Homo sapiens
tcctccttgatttat

SEQ ID NO: 1190394 - DNA, 15 bp, Homo sapiens
atcctccttgattta

SEQ ID NO: 1190395 - DNA, 15 bp, Homo sapiens
tatcctccttgattt

SEQ ID NO: 1190396 - DNA, 15 bp, Homo sapiens
atatcctccttgatt

SEQ ID NO: 1190397 - DNA, 15 bp, Homo sapiens
aatatcctccttgat

SEQ ID NO: 1190398 - DNA, 15 bp, Homo sapiens
aaatatcctccttga

SEQ ID NO: 1190399 - DNA, 15 bp, Homo sapiens
aaaatatcctccttg

SEQ ID NO: 1190400 - DNA, 15 bp, Homo sapiens
aaaaatatcctcctt

SEQ ID NO: 1190401 - DNA, 15 bp, Homo sapiens
aaaaaatatcctcct

SEQ ID NO: 1190402 - DNA, 15 bp, Homo sapiens
gaaaaaatatcctcc

SEQ ID NO: 1190403 - DNA, 15 bp, Homo sapiens
tgaaaaaatatcctc

SEQ ID NO: 1190404 - DNA, 15 bp, Homo sapiens
gtgaaaaaatatcct

SEQ ID NO: 1190405 - DNA, 15 bp, Homo sapiens
tgtgaaaaaatatcc

SEQ ID NO: 1190406 - DNA, 15 bp, Homo sapiens
gtgtgaaaaaatatc

SEQ ID NO: 1190407 - DNA, 15 bp, Homo sapiens
cgtgtgaaaaaatat

SEQ ID NO: 1190408 - DNA, 15 bp, Homo sapiens
tcgtgtgaaaaaata

SEQ ID NO: 1190409 - DNA, 15 bp, Homo sapiens
ttcgtgtgaaaaaat

SEQ ID NO: 1190410 - DNA, 15 bp, Homo sapiens
cttcgtgtgaaaaaa

SEQ ID NO: 1190411 - DNA, 15 bp, Homo sapiens
tcttcgtgtgaaaaa

SEQ ID NO: 1190412 - DNA, 15 bp, Homo sapiens
gtcttcgtgtgaaaa

SEQ ID NO: 1190413 - DNA, 15 bp, Homo sapiens
ggtcttcgtgtgaaa

SEQ ID NO: 1190414 - DNA, 15 bp, Homo sapiens
tggtcttcgtgtgaa

SEQ ID NO: 1190415 - DNA, 15 bp, Homo sapiens
atggtcttcgtgtga

SEQ ID NO: 1190416 - DNA, 15 bp, Homo sapiens
catggtcttcgtgtg

SEQ ID NO: 1190417 - DNA, 15 bp, Homo sapiens
tcatggtcttcgtgt

SEQ ID NO: 1190418 - DNA, 15 bp, Homo sapiens
atcatggtcttcgtg

SEQ ID NO: 1190419 - DNA, 15 bp, Homo sapiens
tatcatggtcttcgt

SEQ ID NO: 1190420 - DNA, 15 bp, Homo sapiens
atatcatggtcttcg

SEQ ID NO: 1190421 - DNA, 15 bp, Homo sapiens
aatatcatggtcttc

SEQ ID NO: 1190422 - DNA, 15 bp, Homo sapiens
caatatcatggtctt

SEQ ID NO: 1190423 - DNA, 15 bp, Homo sapiens
acaatatcatggtct

SEQ ID NO: 1190424 - DNA, 15 bp, Homo sapiens
tacaatatcatggtc

SEQ ID NO: 1190425 - DNA, 15 bp, Homo sapiens
atacaatatcatggt

SEQ ID NO: 1190426 - DNA, 15 bp, Homo sapiens
aatacaatatcatgg

SEQ ID NO: 1190427 - DNA, 15 bp, Homo sapiens
aaatacaatatcatg

SEQ ID NO: 1190428 - DNA, 15 bp, Homo sapiens
caaatacaatatcat

SEQ ID NO: 1190429 - DNA, 15 bp, Homo sapiens
acaaatacaatatca

SEQ ID NO: 1190430 - DNA, 15 bp, Homo sapiens
gacaaatacaatatc

SEQ ID NO: 1190431 - DNA, 15 bp, Homo sapiens
ggacaaatacaatat

SEQ ID NO: 1190432 - DNA, 15 bp, Homo sapiens
cggacaaatacaata

SEQ ID NO: 1190433 - DNA, 15 bp, Homo sapiens
acggacaaatacaat

SEQ ID NO: 1190434 - DNA, 15 bp, Homo sapiens
cacggacaaatacaa

SEQ ID NO: 1190435 - DNA, 15 bp, Homo sapiens
acacggacaaataca

SEQ ID NO: 1190436 - DNA, 15 bp, Homo sapiens
aacacggacaaatac

SEQ ID NO: 1190437 - DNA, 15 bp, Homo sapiens
caacacggacaaata

SEQ ID NO: 1190438 - DNA, 15 bp, Homo sapiens
gcaacacggacaaat

SEQ ID NO: 1190439 - DNA, 15 bp, Homo sapiens
agcaacacggacaaa

SEQ ID NO: 1190440 - DNA, 15 bp, Homo sapiens
aagcaacacggacaa

SEQ ID NO: 1190441 - DNA, 15 bp, Homo sapiens
taagcaacacggaca

SEQ ID NO: 1190442 - DNA, 15 bp, Homo sapiens
ttaagcaacacggac

SEQ ID NO: 1190443 - DNA, 15 bp, Homo sapiens
cttaagcaacacgga

SEQ ID NO: 1190444 - DNA, 15 bp, Homo sapiens
acttaagcaacacgg

SEQ ID NO: 1190445 - DNA, 15 bp, Homo sapiens
cacttaagcaacacg

SEQ ID NO: 1190446 - DNA, 15 bp, Homo sapiens
ccacttaagcaacac

SEQ ID NO: 1190447 - DNA, 15 bp, Homo sapiens
tccacttaagcaaca

SEQ ID NO: 1190448 - DNA, 15 bp, Homo sapiens
atccacttaagcaac

SEQ ID NO: 1190449 - DNA, 15 bp, Homo sapiens
aatccacttaagcaa

SEQ ID NO: 1190450 - DNA, 15 bp, Homo sapiens
caatccacttaagca

SEQ ID NO: 1190451 - DNA, 15 bp, Homo sapiens
acaatccacttaagc

SEQ ID NO: 1190452 - DNA, 15 bp, Homo sapiens
aacaatccacttaag

SEQ ID NO: 1190453 - DNA, 15 bp, Homo sapiens
taacaatccacttaa

SEQ ID NO: 1190454 - DNA, 15 bp, Homo sapiens
ttaacaatccactta

SEQ ID NO: 1190455 - DNA, 15 bp, Homo sapiens
attaacaatccactt

SEQ ID NO: 1190456 - DNA, 15 bp, Homo sapiens
tattaacaatccact

SEQ ID NO: 1190457 - DNA, 15 bp, Homo sapiens
atattaacaatccac

SEQ ID NO: 1190458 - DNA, 15 bp, Homo sapiens
aatattaacaatcca

SEQ ID NO: 1190459 - DNA, 15 bp, Homo sapiens
aaatattaacaatcc

SEQ ID NO: 1190460 - DNA, 15 bp, Homo sapiens
taaatattaacaatc

SEQ ID NO: 1190461 - DNA, 15 bp, Homo sapiens
ataaatattaacaat

SEQ ID NO: 1190462 - DNA, 15 bp, Homo sapiens
cataaatattaacaa

SEQ ID NO: 1190463 - DNA, 15 bp, Homo sapiens
tcataaatattaaca

SEQ ID NO: 1190464 - DNA, 15 bp, Homo sapiens
ttcataaatattaac

SEQ ID NO: 1190465 - DNA, 15 bp, Homo sapiens
tttcataaatattaa

SEQ ID NO: 1190466 - DNA, 15 bp, Homo sapiens
ttttcataaatatta

SEQ ID NO: 1190467 - DNA, 15 bp, Homo sapiens
tttttcataaatatt

SEQ ID NO: 1190468 - DNA, 15 bp, Homo sapiens
atttttcataaatat

SEQ ID NO: 1190469 - DNA, 15 bp, Homo sapiens
catttttcataaata

SEQ ID NO: 1190470 - DNA, 15 bp, Homo sapiens
gcatttttcataaat

SEQ ID NO: 1190471 - DNA, 15 bp, Homo sapiens
tgcatttttcataaa

SEQ ID NO: 1190472 - DNA, 15 bp, Homo sapiens
ctgcatttttcataa

SEQ ID NO: 1190473 - DNA, 15 bp, Homo sapiens
tctgcatttttcata

SEQ ID NO: 1190474 - DNA, 15 bp, Homo sapiens
ttctgcatttttcat

SEQ ID NO: 1190475 - DNA, 15 bp, Homo sapiens
tttctgcatttttca

SEQ ID NO: 1190476 - DNA, 15 bp, Homo sapiens
atttctgcatttttc

SEQ ID NO: 1190477 - DNA, 15 bp, Homo sapiens
gatttctgcattttt

SEQ ID NO: 1190478 - DNA, 15 bp, Homo sapiens
tgatttctgcatttt

SEQ ID NO: 1190479 - DNA, 15 bp, Homo sapiens
ttgatttctgcattt

SEQ ID NO: 1190480 - DNA, 15 bp, Homo sapiens
tttgatttctgcatt

SEQ ID NO: 1190481 - DNA, 15 bp, Homo sapiens
atttgatttctgcat

SEQ ID NO: 1190482 - DNA, 15 bp, Homo sapiens
gatttgatttctgca

SEQ ID NO: 1190483 - DNA, 15 bp, Homo sapiens
tgatttgatttctgc

SEQ ID NO: 1190484 - DNA, 15 bp, Homo sapiens
gtgatttgatttctg

SEQ ID NO: 1190485 - DNA, 15 bp, Homo sapiens
tgtgatttgatttct

SEQ ID NO: 1190486 - DNA, 15 bp, Homo sapiens
gtgtgatttgatttc

SEQ ID NO: 1190487 - DNA, 15 bp, Homo sapiens
ggtgtgatttgattt

SEQ ID NO: 1190488 - DNA, 15 bp, Homo sapiens
tggtgtgatttgatt

SEQ ID NO: 1190489 - DNA, 15 bp, Homo sapiens
ttggtgtgatttgat

SEQ ID NO: 1190490 - DNA, 15 bp, Homo sapiens
cttggtgtgatttga

SEQ ID NO: 1190491 - DNA, 15 bp, Homo sapiens
tcttggtgtgatttg

SEQ ID NO: 1190492 - DNA, 15 bp, Homo sapiens
ctcttggtgtgattt

SEQ ID NO: 1190493 - DNA, 15 bp, Homo sapiens
actcttggtgtgatt

SEQ ID NO: 1190494 - DNA, 15 bp, Homo sapiens
tactcttggtgtgat

SEQ ID NO: 1190495 - DNA, 15 bp, Homo sapiens
gtactcttggtgtga

SEQ ID NO: 1190496 - DNA, 15 bp, Homo sapiens
tgtactcttggtgtg

SEQ ID NO: 1190497 - DNA, 15 bp, Homo sapiens
ctgtactcttggtgt

SEQ ID NO: 1190498 - DNA, 15 bp, Homo sapiens
tctgtactcttggtg

SEQ ID NO: 1190499 - DNA, 15 bp, Homo sapiens
ttctgtactcttggt

SEQ ID NO: 1190500 - DNA, 15 bp, Homo sapiens
attctgtactcttgg

SEQ ID NO: 1190501 - DNA, 15 bp, Homo sapiens
gattctgtactcttg

SEQ ID NO: 1190502 - DNA, 15 bp, Homo sapiens
tgattctgtactctt

SEQ ID NO: 1190503 - DNA, 15 bp, Homo sapiens
ttgattctgtactct

SEQ ID NO: 1190504 - DNA, 15 bp, Homo sapiens
cttgattctgtactc

SEQ ID NO: 1190505 - DNA, 15 bp, Homo sapiens
gcttgattctgtact

SEQ ID NO: 1190506 - DNA, 15 bp, Homo sapiens
ggcttgattctgtac

SEQ ID NO: 1190507 - DNA, 15 bp, Homo sapiens
tggcttgattctgta

SEQ ID NO: 1190508 - DNA, 15 bp, Homo sapiens
ctggcttgattctgt

SEQ ID NO: 1190509 - DNA, 15 bp, Homo sapiens
gctggcttgattctg

SEQ ID NO: 1190510 - DNA, 15 bp, Homo sapiens
tgctggcttgattct

SEQ ID NO: 1190511 - DNA, 15 bp, Homo sapiens
ttgctggcttgattc

SEQ ID NO: 1190512 - DNA, 15 bp, Homo sapiens
attgctggcttgatt

SEQ ID NO: 1190513 - DNA, 15 bp, Homo sapiens
cattgctggcttgat

SEQ ID NO: 1190514 - DNA, 15 bp, Homo sapiens
acattgctggcttga

SEQ ID NO: 1190515 - DNA, 15 bp, Homo sapiens
tacattgctggcttg

SEQ ID NO: 1190516 - DNA, 15 bp, Homo sapiens
gtacattgctggctt

SEQ ID NO: 1190517 - DNA, 15 bp, Homo sapiens
tgtacattgctggct

SEQ ID NO: 1190518 - DNA, 15 bp, Homo sapiens
ctgtacattgctggc

SEQ ID NO: 1190519 - DNA, 15 bp, Homo sapiens
tctgtacattgctgg

SEQ ID NO: 1190520 - DNA, 15 bp, Homo sapiens
ctctgtacattgctg

SEQ ID NO: 1190521 - DNA, 15 bp, Homo sapiens
gctctgtacattgct

SEQ ID NO: 1190522 - DNA, 15 bp, Homo sapiens
ggctctgtacattgc

SEQ ID NO: 1190523 - DNA, 15 bp, Homo sapiens
tggctctgtacattg

SEQ ID NO: 1190524 - DNA, 15 bp, Homo sapiens
ttggctctgtacatt

SEQ ID NO: 1190525 - DNA, 15 bp, Homo sapiens
gttggctctgtacat

SEQ ID NO: 1190526 - DNA, 15 bp, Homo sapiens
ggttggctctgtaca

SEQ ID NO: 1190527 - DNA, 15 bp, Homo sapiens
aggttggctctgtac

SEQ ID NO: 1190528 - DNA, 15 bp, Homo sapiens
aaggttggctctgta

SEQ ID NO: 1190529 - DNA, 15 bp, Homo sapiens
caaggttggctctgt

SEQ ID NO: 1190530 - DNA, 15 bp, Homo sapiens
ccaaggttggctctg

SEQ ID NO: 1190531 - DNA, 15 bp, Homo sapiens
cccaaggttggctct

SEQ ID NO: 1190532 - DNA, 15 bp, Homo sapiens
gcccaaggttggctc

SEQ ID NO: 1190533 - DNA, 15 bp, Homo sapiens
tgcccaaggttggct

SEQ ID NO: 1190534 - DNA, 15 bp, Homo sapiens
ctgcccaaggttggc

SEQ ID NO: 1190535 - DNA, 15 bp, Homo sapiens
gctgcccaaggttgg

SEQ ID NO: 1190536 - DNA, 15 bp, Homo sapiens
tgctgcccaaggttg

SEQ ID NO: 1190537 - DNA, 15 bp, Homo sapiens
atgctgcccaaggtt

SEQ ID NO: 1190538 - DNA, 15 bp, Homo sapiens
aatgctgcccaaggt

SEQ ID NO: 1190539 - DNA, 15 bp, Homo sapiens
aaatgctgcccaagg

SEQ ID NO: 1190540 - DNA, 15 bp, Homo sapiens
gaaatgctgcccaag

SEQ ID NO: 1190541 - DNA, 15 bp, Homo sapiens
ggaaatgctgcccaa

SEQ ID NO: 1190542 - DNA, 15 bp, Homo sapiens
aggaaatgctgccca

SEQ ID NO: 1190543 - DNA, 15 bp, Homo sapiens
gaggaaatgctgccc

SEQ ID NO: 1190544 - DNA, 15 bp, Homo sapiens
agaggaaatgctgcc

SEQ ID NO: 1190545 - DNA, 15 bp, Homo sapiens
aagaggaaatgctgc

SEQ ID NO: 1190546 - DNA, 15 bp, Homo sapiens
aaagaggaaatgctg

SEQ ID NO: 1190547 - DNA, 15 bp, Homo sapiens
aaaagaggaaatgct

SEQ ID NO: 1190548 - DNA, 15 bp, Homo sapiens
taaaagaggaaatgc

SEQ ID NO: 1190549 - DNA, 15 bp, Homo sapiens
ataaaagaggaaatg

SEQ ID NO: 1190550 - DNA, 15 bp, Homo sapiens
tataaaagaggaaat

SEQ ID NO: 1190551 - DNA, 15 bp, Homo sapiens
atataaaagaggaaa

SEQ ID NO: 1190552 - DNA, 15 bp, Homo sapiens
aatataaaagaggaa

SEQ ID NO: 1190553 - DNA, 15 bp, Homo sapiens
taatataaaagagga

SEQ ID NO: 1190554 - DNA, 15 bp, Homo sapiens
ataatataaaagagg

SEQ ID NO: 1190555 - DNA, 15 bp, Homo sapiens
aataatataaaagag

SEQ ID NO: 1190556 - DNA, 15 bp, Homo sapiens
aaataatataaaaga

SEQ ID NO: 1190557 - DNA, 15 bp, Homo sapiens
caaataatataaaag

SEQ ID NO: 1190558 - DNA, 15 bp, Homo sapiens
tcaaataatataaaa

SEQ ID NO: 1190559 - DNA, 15 bp, Homo sapiens
ttcaaataatataaa

SEQ ID NO: 1190560 - DNA, 15 bp, Homo sapiens
attcaaataatataa

SEQ ID NO: 1190561 - DNA, 15 bp, Homo sapiens
gattcaaataatata

SEQ ID NO: 1190562 - DNA, 15 bp, Homo sapiens
tgattcaaataatat

SEQ ID NO: 1190563 - DNA, 15 bp, Homo sapiens
atgattcaaataata

SEQ ID NO: 1190564 - DNA, 15 bp, Homo sapiens
aatgattcaaataat

SEQ ID NO: 1190565 - DNA, 15 bp, Homo sapiens
caatgattcaaataa

SEQ ID NO: 1190566 - DNA, 15 bp, Homo sapiens
acaatgattcaaata

SEQ ID NO: 1190567 - DNA, 15 bp, Homo sapiens
aacaatgattcaaat

SEQ ID NO: 1190568 - DNA, 15 bp, Homo sapiens
aaacaatgattcaaa

SEQ ID NO: 1190569 - DNA, 15 bp, Homo sapiens
gaaacaatgattcaa

SEQ ID NO: 1190570 - DNA, 15 bp, Homo sapiens
tgaaacaatgattca

SEQ ID NO: 1190571 - DNA, 15 bp, Homo sapiens
ctgaaacaatgattc

SEQ ID NO: 1190572 - DNA, 15 bp, Homo sapiens
actgaaacaatgatt

SEQ ID NO: 1190573 - DNA, 15 bp, Homo sapiens
aactgaaacaatgat

SEQ ID NO: 1190574 - DNA, 15 bp, Homo sapiens
taactgaaacaatga

SEQ ID NO: 1190575 - DNA, 15 bp, Homo sapiens
ttaactgaaacaatg

SEQ ID NO: 1190576 - DNA, 15 bp, Homo sapiens
attaactgaaacaat

SEQ ID NO: 1190577 - DNA, 15 bp, Homo sapiens
gattaactgaaacaa

SEQ ID NO: 1190578 - DNA, 15 bp, Homo sapiens
agattaactgaaaca

SEQ ID NO: 1190579 - DNA, 15 bp, Homo sapiens
cagattaactgaaac

SEQ ID NO: 1190580 - DNA, 15 bp, Homo sapiens
ccagattaactgaaa

SEQ ID NO: 1190581 - DNA, 15 bp, Homo sapiens
accagattaactgaa

SEQ ID NO: 1190582 - DNA, 15 bp, Homo sapiens
caccagattaactga

SEQ ID NO: 1190583 - DNA, 15 bp, Homo sapiens
gcaccagattaactg

SEQ ID NO: 1190584 - DNA, 15 bp, Homo sapiens
ggcaccagattaact

SEQ ID NO: 1190585 - DNA, 15 bp, Homo sapiens
tggcaccagattaac

SEQ ID NO: 1190586 - DNA, 15 bp, Homo sapiens
atggcaccagattaa

SEQ ID NO: 1190587 - DNA, 15 bp, Homo sapiens
aatggcaccagatta

SEQ ID NO: 1190588 - DNA, 15 bp, Homo sapiens
aaatggcaccagatt

SEQ ID NO: 1190589 - DNA, 15 bp, Homo sapiens
gaaatggcaccagat

SEQ ID NO: 1190590 - DNA, 15 bp, Homo sapiens
tgaaatggcaccaga

SEQ ID NO: 1190591 - DNA, 15 bp, Homo sapiens
atgaaatggcaccag

SEQ ID NO: 1190592 - DNA, 15 bp, Homo sapiens
catgaaatggcacca

SEQ ID NO: 1190593 - DNA, 15 bp, Homo sapiens
acatgaaatggcacc

SEQ ID NO: 1190594 - DNA, 15 bp, Homo sapiens
tacatgaaatggcac

SEQ ID NO: 1190595 - DNA, 15 bp, Homo sapiens
gtacatgaaatggca

SEQ ID NO: 1190596 - DNA, 15 bp, Homo sapiens
tgtacatgaaatggc

SEQ ID NO: 1190597 - DNA, 15 bp, Homo sapiens
ctgtacatgaaatgg

SEQ ID NO: 1190598 - DNA, 15 bp, Homo sapiens
tctgtacatgaaatg

SEQ ID NO: 1190599 - DNA, 15 bp, Homo sapiens
atctgtacatgaaat

SEQ ID NO: 1190600 - DNA, 15 bp, Homo sapiens
catctgtacatgaaa

SEQ ID NO: 1190601 - DNA, 15 bp, Homo sapiens
tcatctgtacatgaa

SEQ ID NO: 1190602 - DNA, 15 bp, Homo sapiens
atcatctgtacatga

SEQ ID NO: 1190603 - DNA, 15 bp, Homo sapiens
gatcatctgtacatg

SEQ ID NO: 1190604 - DNA, 15 bp, Homo sapiens
ggatcatctgtacat

SEQ ID NO: 1190605 - DNA, 15 bp, Homo sapiens
gggatcatctgtaca

SEQ ID NO: 1190606 - DNA, 15 bp, Homo sapiens
ggggatcatctgtac

SEQ ID NO: 1190607 - DNA, 15 bp, Homo sapiens
cggggatcatctgta

SEQ ID NO: 1190608 - DNA, 15 bp, Homo sapiens
tcggggatcatctgt

SEQ ID NO: 1190609 - DNA, 15 bp, Homo sapiens
gtcggggatcatctg

SEQ ID NO: 1190610 - DNA, 15 bp, Homo sapiens
agtcggggatcatct

SEQ ID NO: 1190611 - DNA, 15 bp, Homo sapiens
aagtcggggatcatc

SEQ ID NO: 1190612 - DNA, 15 bp, Homo sapiens
taagtcggggatcat

SEQ ID NO: 1190613 - DNA, 15 bp, Homo sapiens
ataagtcggggatca

SEQ ID NO: 1190614 - DNA, 15 bp, Homo sapiens
cataagtcggggatc

SEQ ID NO: 1190615 - DNA, 15 bp, Homo sapiens
tcataagtcggggat

SEQ ID NO: 1190616 - DNA, 15 bp, Homo sapiens
atcataagtcgggga

SEQ ID NO: 1190617 - DNA, 15 bp, Homo sapiens
aatcataagtcgggg

SEQ ID NO: 1190618 - DNA, 15 bp, Homo sapiens
aaatcataagtcggg

SEQ ID NO: 1190619 - DNA, 15 bp, Homo sapiens
aaaatcataagtcgg

SEQ ID NO: 1190620 - DNA, 15 bp, Homo sapiens
aaaaatcataagtcg

SEQ ID NO: 1190621 - DNA, 15 bp, Homo sapiens
aaaaaatcataagtc

SEQ ID NO: 1190622 - DNA, 15 bp, Homo sapiens
caaaaaatcataagt

SEQ ID NO: 1190623 - DNA, 15 bp, Homo sapiens
tcaaaaaatcataag

SEQ ID NO: 1190624 - DNA, 15 bp, Homo sapiens
ctcaaaaaatcataa

SEQ ID NO: 1190625 - DNA, 15 bp, Homo sapiens
tctcaaaaaatcata

SEQ ID NO: 1190626 - DNA, 15 bp, Homo sapiens
ttctcaaaaaatcat

SEQ ID NO: 1190627 - DNA, 15 bp, Homo sapiens
tttctcaaaaaatca

SEQ ID NO: 1190628 - DNA, 15 bp, Homo sapiens
ctttctcaaaaaatc

SEQ ID NO: 1190629 - DNA, 15 bp, Homo sapiens
actttctcaaaaaat

SEQ ID NO: 1190630 - DNA, 15 bp, Homo sapiens
cactttctcaaaaaa

SEQ ID NO: 1190631 - DNA, 15 bp, Homo sapiens
tcactttctcaaaaa

SEQ ID NO: 1190632 - DNA, 15 bp, Homo sapiens
atcactttctcaaaa

SEQ ID NO: 1190633 - DNA, 15 bp, Homo sapiens
tatcactttctcaaa

SEQ ID NO: 1190634 - DNA, 15 bp, Homo sapiens
gtatcactttctcaa

SEQ ID NO: 1190635 - DNA, 15 bp, Homo sapiens
agtatcactttctca

SEQ ID NO: 1190636 - DNA, 15 bp, Homo sapiens
gagtatcactttctc

SEQ ID NO: 1190637 - DNA, 15 bp, Homo sapiens
cgagtatcactttct

SEQ ID NO: 1190638 - DNA, 15 bp, Homo sapiens
acgagtatcactttc

SEQ ID NO: 1190639 - DNA, 15 bp, Homo sapiens
aacgagtatcacttt

SEQ ID NO: 1190640 - DNA, 15 bp, Homo sapiens
gaacgagtatcactt

SEQ ID NO: 1190641 - DNA, 15 bp, Homo sapiens
agaacgagtatcact

SEQ ID NO: 1190642 - DNA, 15 bp, Homo sapiens
cagaacgagtatcac

SEQ ID NO: 1190643 - DNA, 15 bp, Homo sapiens
acagaacgagtatca

SEQ ID NO: 1190644 - DNA, 15 bp, Homo sapiens
tacagaacgagtatc

SEQ ID NO: 1190645 - DNA, 15 bp, Homo sapiens
ctacagaacgagtat

SEQ ID NO: 1190646 - DNA, 15 bp, Homo sapiens
tctacagaacgagta

SEQ ID NO: 1190647 - DNA, 15 bp, Homo sapiens
ttctacagaacgagt

SEQ ID NO: 1190648 - DNA, 15 bp, Homo sapiens
tttctacagaacgag

SEQ ID NO: 1190649 - DNA, 15 bp, Homo sapiens
gtttctacagaacga

SEQ ID NO: 1190650 - DNA, 15 bp, Homo sapiens
ggtttctacagaacg

SEQ ID NO: 1190651 - DNA, 15 bp, Homo sapiens
cggtttctacagaac

SEQ ID NO: 1190652 - DNA, 15 bp, Homo sapiens
acggtttctacagaa

SEQ ID NO: 1190653 - DNA, 15 bp, Homo sapiens
tacggtttctacaga

SEQ ID NO: 1190654 - DNA, 15 bp, Homo sapiens
atacggtttctacag

SEQ ID NO: 1190655 - DNA, 15 bp, Homo sapiens
aatacggtttctaca

SEQ ID NO: 1190656 - DNA, 15 bp, Homo sapiens
aaatacggtttctac

SEQ ID NO: 1190657 - DNA, 15 bp, Homo sapiens
aaaatacggtttcta

SEQ ID NO: 1190658 - DNA, 15 bp, Homo sapiens
caaaatacggtttct

SEQ ID NO: 1190659 - DNA, 15 bp, Homo sapiens
acaaaatacggtttc

SEQ ID NO: 1190660 - DNA, 15 bp, Homo sapiens
aacaaaatacggttt

SEQ ID NO: 1190661 - DNA, 15 bp, Homo sapiens
aaacaaaatacggtt

SEQ ID NO: 1190662 - DNA, 15 bp, Homo sapiens
aaaacaaaatacggt

SEQ ID NO: 1190663 - DNA, 15 bp, Homo sapiens
aaaaacaaaatacgg

SEQ ID NO: 1190664 - DNA, 15 bp, Homo sapiens
caaaaacaaaatacg

SEQ ID NO: 1190665 - DNA, 15 bp, Homo sapiens
acaaaaacaaaatac

SEQ ID NO: 1190666 - DNA, 15 bp, Homo sapiens
aacaaaaacaaaata

SEQ ID NO: 1190667 - DNA, 15 bp, Homo sapiens
aaacaaaaacaaaat

SEQ ID NO: 1190668 - DNA, 15 bp, Homo sapiens
tcaaaaaaacaaaaa

SEQ ID NO: 1190669 - DNA, 15 bp, Homo sapiens
ttcaaaaaaacaaaa

SEQ ID NO: 1190670 - DNA, 15 bp, Homo sapiens
tttcaaaaaaacaaa

SEQ ID NO: 1190671 - DNA, 15 bp, Homo sapiens
gtttcaaaaaaacaa

SEQ ID NO: 1190672 - DNA, 15 bp, Homo sapiens
tgtttcaaaaaaaca

SEQ ID NO: 1190673 - DNA, 15 bp, Homo sapiens
gtgtttcaaaaaaac

SEQ ID NO: 1190674 - DNA, 15 bp, Homo sapiens
tgtgtttcaaaaaaa

SEQ ID NO: 1190675 - DNA, 15 bp, Homo sapiens
ctgtgtttcaaaaaa

SEQ ID NO: 1190676 - DNA, 15 bp, Homo sapiens
actgtgtttcaaaaa

SEQ ID NO: 1190677 - DNA, 15 bp, Homo sapiens
aactgtgtttcaaaa

SEQ ID NO: 1190678 - DNA, 15 bp, Homo sapiens
aaactgtgtttcaaa

SEQ ID NO: 1190679 - DNA, 15 bp, Homo sapiens
gaaactgtgtttcaa

SEQ ID NO: 1190680 - DNA, 15 bp, Homo sapiens
tgaaactgtgtttca

SEQ ID NO: 1190681 - DNA, 15 bp, Homo sapiens
gtgaaactgtgtttc

SEQ ID NO: 1190682 - DNA, 15 bp, Homo sapiens
agtgaaactgtgttt

SEQ ID NO: 1190683 - DNA, 15 bp, Homo sapiens
gagtgaaactgtgtt

SEQ ID NO: 1190684 - DNA, 15 bp, Homo sapiens
agagtgaaactgtgt

SEQ ID NO: 1190685 - DNA, 15 bp, Homo sapiens
cagagtgaaactgtg

SEQ ID NO: 1190686 - DNA, 15 bp, Homo sapiens
gcagagtgaaactgt

SEQ ID NO: 1190687 - DNA, 15 bp, Homo sapiens
ggcagagtgaaactg

SEQ ID NO: 1190688 - DNA, 15 bp, Homo sapiens
cggcagagtgaaact

SEQ ID NO: 1190689 - DNA, 15 bp, Homo sapiens
gcggcagagtgaaac

SEQ ID NO: 1190690 - DNA, 15 bp, Homo sapiens
ggcggcagagtgaaa

SEQ ID NO: 1190691 - DNA, 15 bp, Homo sapiens
gggcggcagagtgaa

SEQ ID NO: 1190692 - DNA, 15 bp, Homo sapiens
tgggcggcagagtga

SEQ ID NO: 1190693 - DNA, 15 bp, Homo sapiens
ctgggcggcagagtg

SEQ ID NO: 1190694 - DNA, 15 bp, Homo sapiens
cctgggcggcagagt

SEQ ID NO: 1190695 - DNA, 15 bp, Homo sapiens
gcctgggcggcagag

SEQ ID NO: 1190696 - DNA, 15 bp, Homo sapiens
agcctgggcggcaga

SEQ ID NO: 1190697 - DNA, 15 bp, Homo sapiens
cagcctgggcggcag

SEQ ID NO: 1190698 - DNA, 15 bp, Homo sapiens
tcagcctgggcggca

SEQ ID NO: 1190699 - DNA, 15 bp, Homo sapiens
ttcagcctgggcggc

SEQ ID NO: 1190700 - DNA, 15 bp, Homo sapiens
cttcagcctgggcgg

SEQ ID NO: 1190701 - DNA, 15 bp, Homo sapiens
acttcagcctgggcg

SEQ ID NO: 1190702 - DNA, 15 bp, Homo sapiens
cacttcagcctgggc

SEQ ID NO: 1190703 - DNA, 15 bp, Homo sapiens
ttgcacttcagcctg

SEQ ID NO: 1190704 - DNA, 15 bp, Homo sapiens
attgcacttcagcct

SEQ ID NO: 1190705 - DNA, 15 bp, Homo sapiens
cattgcacttcagcc

SEQ ID NO: 1190706 - DNA, 15 bp, Homo sapiens
ccattgcacttcagc

SEQ ID NO: 1190707 - DNA, 15 bp, Homo sapiens
gccattgcacttcag

SEQ ID NO: 1190708 - DNA, 15 bp, Homo sapiens
cgccattgcacttca

SEQ ID NO: 1190709 - DNA, 15 bp, Homo sapiens
gcgccattgcacttc

SEQ ID NO: 1190710 - DNA, 15 bp, Homo sapiens
cgcgccattgcactt

SEQ ID NO: 1190711 - DNA, 15 bp, Homo sapiens
tcgcgccattgcact

SEQ ID NO: 1190712 - DNA, 15 bp, Homo sapiens
atcgcgccattgcac

SEQ ID NO: 1190713 - DNA, 15 bp, Homo sapiens
gatcgcgccattgca

SEQ ID NO: 1190714 - DNA, 15 bp, Homo sapiens
agatcgcgccattgc

SEQ ID NO: 1190715 - DNA, 15 bp, Homo sapiens
gagatcgcgccattg

SEQ ID NO: 1190716 - DNA, 15 bp, Homo sapiens
tgagatcgcgccatt

SEQ ID NO: 1190717 - DNA, 15 bp, Homo sapiens
ctgagatcgcgccat

SEQ ID NO: 1190718 - DNA, 15 bp, Homo sapiens
gctgagatcgcgcca

SEQ ID NO: 1190719 - DNA, 15 bp, Homo sapiens
agctgagatcgcgcc

SEQ ID NO: 1190720 - DNA, 15 bp, Homo sapiens
gagctgagatcgcgc

SEQ ID NO: 1190721 - DNA, 15 bp, Homo sapiens
tgagctgagatcgcg

SEQ ID NO: 1190722 - DNA, 15 bp, Homo sapiens
actgaggcacaagaa

SEQ ID NO: 1190723 - DNA, 15 bp, Homo sapiens
gactgaggcacaaga

SEQ ID NO: 1190724 - DNA, 15 bp, Homo sapiens
agactgaggcacaag

SEQ ID NO: 1190725 - DNA, 15 bp, Homo sapiens
gagactgaggcacaa

SEQ ID NO: 1190726 - DNA, 15 bp, Homo sapiens
ggagactgaggcaca

SEQ ID NO: 1190727 - DNA, 15 bp, Homo sapiens
aggagactgaggcac

SEQ ID NO: 1190728 - DNA, 15 bp, Homo sapiens
ttcaggagactgagg

SEQ ID NO: 1190729 - DNA, 15 bp, Homo sapiens
attcaggagactgag

SEQ ID NO: 1190730 - DNA, 15 bp, Homo sapiens
tattcaggagactga

SEQ ID NO: 1190731 - DNA, 15 bp, Homo sapiens
ctattcaggagactg

SEQ ID NO: 1190732 - DNA, 15 bp, Homo sapiens
gctattcaggagact

SEQ ID NO: 1190733 - DNA, 15 bp, Homo sapiens
agctattcaggagac

SEQ ID NO: 1190734 - DNA, 15 bp, Homo sapiens
cagctattcaggaga

SEQ ID NO: 1190735 - DNA, 15 bp, Homo sapiens
ccagctattcaggag

SEQ ID NO: 1190736 - DNA, 15 bp, Homo sapiens
cccagctattcagga

SEQ ID NO: 1190737 - DNA, 15 bp, Homo sapiens
tcccagctattcagg

SEQ ID NO: 1190738 - DNA, 15 bp, Homo sapiens
atcccagctattcag

SEQ ID NO: 1190739 - DNA, 15 bp, Homo sapiens
aatcccagctattca

SEQ ID NO: 1190740 - DNA, 15 bp, Homo sapiens
agcatggtggcgcac

SEQ ID NO: 1190741 - DNA, 15 bp, Homo sapiens
gagcatggtggcgca

SEQ ID NO: 1190742 - DNA, 15 bp, Homo sapiens
cgagcatggtggcgc

SEQ ID NO: 1190743 - DNA, 15 bp, Homo sapiens
ccgagcatggtggcg

SEQ ID NO: 1190744 - DNA, 15 bp, Homo sapiens
gccgagcatggtggc

SEQ ID NO: 1190745 - DNA, 15 bp, Homo sapiens
agccgagcatggtgg

SEQ ID NO: 1190746 - DNA, 15 bp, Homo sapiens
tagccgagcatggtg

SEQ ID NO: 1190747 - DNA, 15 bp, Homo sapiens
ttagccgagcatggt

SEQ ID NO: 1190748 - DNA, 15 bp, Homo sapiens
attagccgagcatgg

SEQ ID NO: 1190749 - DNA, 15 bp, Homo sapiens
aattagccgagcatg

SEQ ID NO: 1190750 - DNA, 15 bp, Homo sapiens
aaattagccgagcat

SEQ ID NO: 1190751 - DNA, 15 bp, Homo sapiens
aaaattagccgagca

SEQ ID NO: 1190752 - DNA, 15 bp, Homo sapiens
acaaaaattagccga

SEQ ID NO: 1190753 - DNA, 15 bp, Homo sapiens
tagcctggccaacat

SEQ ID NO: 1190754 - DNA, 15 bp, Homo sapiens
gtcgagactagcctg

SEQ ID NO: 1190755 - DNA, 15 bp, Homo sapiens
ggtcgagactagcct

SEQ ID NO: 1190756 - DNA, 15 bp, Homo sapiens
aggtcgagactagcc

SEQ ID NO: 1190757 - DNA, 15 bp, Homo sapiens
gaggtcgagactagc

SEQ ID NO: 1190758 - DNA, 15 bp, Homo sapiens
tgaggtcgagactag

SEQ ID NO: 1190759 - DNA, 15 bp, Homo sapiens
ttgaggtcgagacta

SEQ ID NO: 1190760 - DNA, 15 bp, Homo sapiens
cttgaggtcgagact

SEQ ID NO: 1190761 - DNA, 15 bp, Homo sapiens
acttgaggtcgagac

SEQ ID NO: 1190762 - DNA, 15 bp, Homo sapiens
cacttgaggtcgaga

SEQ ID NO: 1190763 - DNA, 15 bp, Homo sapiens
tcacttgaggtcgag

SEQ ID NO: 1190764 - DNA, 15 bp, Homo sapiens
atcacttgaggtcga

SEQ ID NO: 1190765 - DNA, 15 bp, Homo sapiens
aatcacttgaggtcg

SEQ ID NO: 1190766 - DNA, 15 bp, Homo sapiens
gaatcacttgaggtc

SEQ ID NO: 1190767 - DNA, 15 bp, Homo sapiens
cgaatcacttgaggt

SEQ ID NO: 1190768 - DNA, 15 bp, Homo sapiens
gcgaatcacttgagg

SEQ ID NO: 1190769 - DNA, 15 bp, Homo sapiens
ggcgaatcacttgag

SEQ ID NO: 1190770 - DNA, 15 bp, Homo sapiens
gggcgaatcacttga

SEQ ID NO: 1190771 - DNA, 15 bp, Homo sapiens
tgggcgaatcacttg

SEQ ID NO: 1190772 - DNA, 15 bp, Homo sapiens
gtgggcgaatcactt

SEQ ID NO: 1190773 - DNA, 15 bp, Homo sapiens
ggtgggcgaatcact

SEQ ID NO: 1190774 - DNA, 15 bp, Homo sapiens
aggtgggcgaatcac

SEQ ID NO: 1190775 - DNA, 15 bp, Homo sapiens
gaggtgggcgaatca

SEQ ID NO: 1190776 - DNA, 15 bp, Homo sapiens
cgaggtgggcgaatc

SEQ ID NO: 1190777 - DNA, 15 bp, Homo sapiens
ccgaggtgggcgaat

SEQ ID NO: 1190778 - DNA, 15 bp, Homo sapiens
gccgaggtgggcgaa

SEQ ID NO: 1190779 - DNA, 15 bp, Homo sapiens
ggccgaggtgggcga

SEQ ID NO: 1190780 - DNA, 15 bp, Homo sapiens
aggccgaggtgggcg

SEQ ID NO: 1190781 - DNA, 15 bp, Homo sapiens
cacctgtaatcctag

SEQ ID NO: 1190782 - DNA, 15 bp, Homo sapiens
ctgcggtggctcaca

SEQ ID NO: 1190783 - DNA, 15 bp, Homo sapiens
gctgcggtggctcac

SEQ ID NO: 1190784 - DNA, 15 bp, Homo sapiens
ggctgcggtggctca

SEQ ID NO: 1190785 - DNA, 15 bp, Homo sapiens
tggctgcggtggctc

SEQ ID NO: 1190786 - DNA, 15 bp, Homo sapiens
ttggctgcggtggct

SEQ ID NO: 1190787 - DNA, 15 bp, Homo sapiens
gttggctgcggtggc

SEQ ID NO: 1190788 - DNA, 15 bp, Homo sapiens
ggttggctgcggtgg

SEQ ID NO: 1190789 - DNA, 15 bp, Homo sapiens
aggttggctgcggtg

SEQ ID NO: 1190790 - DNA, 15 bp, Homo sapiens
taggttggctgcggt

SEQ ID NO: 1190791 - DNA, 15 bp, Homo sapiens
ctaggttggctgcgg

SEQ ID NO: 1190792 - DNA, 15 bp, Homo sapiens
tctaggttggctgcg

SEQ ID NO: 1190793 - DNA, 15 bp, Homo sapiens
ttctaggttggctgc

SEQ ID NO: 1190794 - DNA, 15 bp, Homo sapiens
tttctaggttggctg

SEQ ID NO: 1190795 - DNA, 15 bp, Homo sapiens
gtttctaggttggct

SEQ ID NO: 1190796 - DNA, 15 bp, Homo sapiens
agtttctaggttggc

SEQ ID NO: 1190797 - DNA, 15 bp, Homo sapiens
cagtttctaggttgg

SEQ ID NO: 1190798 - DNA, 15 bp, Homo sapiens
acagtttctaggttg

SEQ ID NO: 1190799 - DNA, 15 bp, Homo sapiens
tacagtttctaggtt

SEQ ID NO: 1190800 - DNA, 15 bp, Homo sapiens
atacagtttctaggt

SEQ ID NO: 1190801 - DNA, 15 bp, Homo sapiens
aatacagtttctagg

SEQ ID NO: 1190802 - DNA, 15 bp, Homo sapiens
aaatacagtttctag

SEQ ID NO: 1190803 - DNA, 15 bp, Homo sapiens
aaaatacagtttcta

SEQ ID NO: 1190804 - DNA, 15 bp, Homo sapiens
caaaatacagtttct

SEQ ID NO: 1190805 - DNA, 15 bp, Homo sapiens
tcaaaatacagtttc

SEQ ID NO: 1190806 - DNA, 15 bp, Homo sapiens
ctcaaaatacagttt

SEQ ID NO: 1190807 - DNA, 15 bp, Homo sapiens
actcaaaatacagtt

SEQ ID NO: 1190808 - DNA, 15 bp, Homo sapiens
tactcaaaatacagt

SEQ ID NO: 1190809 - DNA, 15 bp, Homo sapiens
ctactcaaaatacag

SEQ ID NO: 1190810 - DNA, 15 bp, Homo sapiens
gctactcaaaataca

SEQ ID NO: 1190811 - DNA, 15 bp, Homo sapiens
ggctactcaaaatac

SEQ ID NO: 1190812 - DNA, 15 bp, Homo sapiens
tggctactcaaaata

SEQ ID NO: 1190813 - DNA, 15 bp, Homo sapiens
atggctactcaaaat

SEQ ID NO: 1190814 - DNA, 15 bp, Homo sapiens
tatggctactcaaaa

SEQ ID NO: 1190815 - DNA, 15 bp, Homo sapiens
gtatggctactcaaa

SEQ ID NO: 1190816 - DNA, 15 bp, Homo sapiens
tgtatggctactcaa

SEQ ID NO: 1190817 - DNA, 15 bp, Homo sapiens
ttgtatggctactca

SEQ ID NO: 1190818 - DNA, 15 bp, Homo sapiens
attgtatggctactc

SEQ ID NO: 1190819 - DNA, 15 bp, Homo sapiens
gattgtatggctact

SEQ ID NO: 1190820 - DNA, 15 bp, Homo sapiens
tgattgtatggctac

SEQ ID NO: 1190821 - DNA, 15 bp, Homo sapiens
atgattgtatggcta

SEQ ID NO: 1190822 - DNA, 15 bp, Homo sapiens
gatgattgtatggct

SEQ ID NO: 1190823 - DNA, 15 bp, Homo sapiens
ggatgattgtatggc

SEQ ID NO: 1190824 - DNA, 15 bp, Homo sapiens
aggatgattgtatgg

SEQ ID NO: 1190825 - DNA, 15 bp, Homo sapiens
caggatgattgtatg

SEQ ID NO: 1190826 - DNA, 15 bp, Homo sapiens
acaggatgattgtat

SEQ ID NO: 1190827 - DNA, 15 bp, Homo sapiens
aacaggatgattgta

SEQ ID NO: 1190828 - DNA, 15 bp, Homo sapiens
aaacaggatgattgt

SEQ ID NO: 1190829 - DNA, 15 bp, Homo sapiens
aaaacaggatgattg

SEQ ID NO: 1190830 - DNA, 15 bp, Homo sapiens
aaaaacaggatgatt

SEQ ID NO: 1190831 - DNA, 15 bp, Homo sapiens
aaaaaacaggatgat

SEQ ID NO: 1190832 - DNA, 15 bp, Homo sapiens
taaaaaacaggatga

SEQ ID NO: 1190833 - DNA, 15 bp, Homo sapiens
gtaaaaaacaggatg

SEQ ID NO: 1190834 - DNA, 15 bp, Homo sapiens
agtaaaaaacaggat

SEQ ID NO: 1190835 - DNA, 15 bp, Homo sapiens
aagtaaaaaacagga

SEQ ID NO: 1190836 - DNA, 15 bp, Homo sapiens
aaagtaaaaaacagg

SEQ ID NO: 1190837 - DNA, 15 bp, Homo sapiens
gaaagtaaaaaacag

SEQ ID NO: 1190838 - DNA, 15 bp, Homo sapiens
tgaaagtaaaaaaca

SEQ ID NO: 1190839 - DNA, 15 bp, Homo sapiens
ctgaaagtaaaaaac

SEQ ID NO: 1190840 - DNA, 15 bp, Homo sapiens
tctgaaagtaaaaaa

SEQ ID NO: 1190841 - DNA, 15 bp, Homo sapiens
ttctgaaagtaaaaa

SEQ ID NO: 1190842 - DNA, 15 bp, Homo sapiens
gttctgaaagtaaaa

SEQ ID NO: 1190843 - DNA, 15 bp, Homo sapiens
tgttctgaaagtaaa

SEQ ID NO: 1190844 - DNA, 15 bp, Homo sapiens
ctgttctgaaagtaa

SEQ ID NO: 1190845 - DNA, 15 bp, Homo sapiens
cctgttctgaaagta

SEQ ID NO: 1190846 - DNA, 15 bp, Homo sapiens
tcctgttctgaaagt

SEQ ID NO: 1190847 - DNA, 15 bp, Homo sapiens
atcctgttctgaaag

SEQ ID NO: 1190848 - DNA, 15 bp, Homo sapiens
aatcctgttctgaaa

SEQ ID NO: 1190849 - DNA, 15 bp, Homo sapiens
gaatcctgttctgaa

SEQ ID NO: 1190850 - DNA, 15 bp, Homo sapiens
tgaatcctgttctga

SEQ ID NO: 1190851 - DNA, 15 bp, Homo sapiens
ttgaatcctgttctg

SEQ ID NO: 1190852 - DNA, 15 bp, Homo sapiens
attgaatcctgttct

SEQ ID NO: 1190853 - DNA, 15 bp, Homo sapiens
tattgaatcctgttc

SEQ ID NO: 1190854 - DNA, 15 bp, Homo sapiens
ttattgaatcctgtt

SEQ ID NO: 1190855 - DNA, 15 bp, Homo sapiens
tttattgaatcctgt

SEQ ID NO: 1190856 - DNA, 15 bp, Homo sapiens
atttattgaatcctg

SEQ ID NO: 1190857 - DNA, 15 bp, Homo sapiens
aatttattgaatcct

SEQ ID NO: 1190858 - DNA, 15 bp, Homo sapiens
taatttattgaatcc

SEQ ID NO: 1190859 - DNA, 15 bp, Homo sapiens
gtaatttattgaatc

SEQ ID NO: 1190860 - DNA, 15 bp, Homo sapiens
tgtaatttattgaat

SEQ ID NO: 1190861 - DNA, 15 bp, Homo sapiens
atgtaatttattgaa

SEQ ID NO: 1190862 - DNA, 15 bp, Homo sapiens
aatgtaatttattga

SEQ ID NO: 1190863 - DNA, 15 bp, Homo sapiens
taatgtaatttattg

SEQ ID NO: 1190864 - DNA, 15 bp, Homo sapiens
ttaatgtaatttatt

SEQ ID NO: 1190865 - DNA, 15 bp, Homo sapiens
tttaatgtaatttat

SEQ ID NO: 1190866 - DNA, 15 bp, Homo sapiens
atttaatgtaattta

SEQ ID NO: 1190867 - DNA, 15 bp, Homo sapiens
tatttaatgtaattt

SEQ ID NO: 1190868 - DNA, 15 bp, Homo sapiens
atatttaatgtaatt

SEQ ID NO: 1190869 - DNA, 15 bp, Homo sapiens
aatatttaatgtaat

SEQ ID NO: 1190870 - DNA, 15 bp, Homo sapiens
gaatatttaatgtaa

SEQ ID NO: 1190871 - DNA, 15 bp, Homo sapiens
tgaatatttaatgta

SEQ ID NO: 1190872 - DNA, 15 bp, Homo sapiens
ttgaatatttaatgt

SEQ ID NO: 1190873 - DNA, 15 bp, Homo sapiens
gttgaatatttaatg

SEQ ID NO: 1190874 - DNA, 15 bp, Homo sapiens
tgttgaatatttaat

SEQ ID NO: 1190875 - DNA, 15 bp, Homo sapiens
ttgttgaatatttaa

SEQ ID NO: 1190876 - DNA, 15 bp, Homo sapiens
tttgttgaatattta

SEQ ID NO: 1190877 - DNA, 15 bp, Homo sapiens
atttgttgaatattt

SEQ ID NO: 1190878 - DNA, 15 bp, Homo sapiens
aatttgttgaatatt

SEQ ID NO: 1190879 - DNA, 15 bp, Homo sapiens
taatttgttgaatat

SEQ ID NO: 1190880 - DNA, 15 bp, Homo sapiens
gtaatttgttgaata

SEQ ID NO: 1190881 - DNA, 15 bp, Homo sapiens
tgtaatttgttgaat

SEQ ID NO: 1190882 - DNA, 15 bp, Homo sapiens
atgtaatttgttgaa

SEQ ID NO: 1190883 - DNA, 15 bp, Homo sapiens
aatgtaatttgttga

SEQ ID NO: 1190884 - DNA, 15 bp, Homo sapiens
taatgtaatttgttg

SEQ ID NO: 1190885 - DNA, 15 bp, Homo sapiens
ttaatgtaatttgtt

SEQ ID NO: 1190886 - DNA, 15 bp, Homo sapiens
tttaatgtaatttgt

SEQ ID NO: 1190887 - DNA, 15 bp, Homo sapiens
atttaatgtaatttg

SEQ ID NO: 1190888 - DNA, 15 bp, Homo sapiens
attgttgaatattta

SEQ ID NO: 1190889 - DNA, 15 bp, Homo sapiens
aattgttgaatattt

SEQ ID NO: 1190890 - DNA, 15 bp, Homo sapiens
aaattgttgaatatt

SEQ ID NO: 1190891 - DNA, 15 bp, Homo sapiens
taaattgttgaatat

SEQ ID NO: 1190892 - DNA, 15 bp, Homo sapiens
ataaattgttgaata

SEQ ID NO: 1190893 - DNA, 15 bp, Homo sapiens
aataaattgttgaat

SEQ ID NO: 1190894 - DNA, 15 bp, Homo sapiens
taataaattgttgaa

SEQ ID NO: 1190895 - DNA, 15 bp, Homo sapiens
ataataaattgttga

SEQ ID NO: 1190896 - DNA, 15 bp, Homo sapiens
tataataaattgttg

SEQ ID NO: 1190897 - DNA, 15 bp, Homo sapiens
ttataataaattgtt

SEQ ID NO: 1190898 - DNA, 15 bp, Homo sapiens
tttataataaattgt

SEQ ID NO: 1190899 - DNA, 15 bp, Homo sapiens
ttttataataaattg

SEQ ID NO: 1190900 - DNA, 15 bp, Homo sapiens
attttataataaatt

SEQ ID NO: 1190901 - DNA, 15 bp, Homo sapiens
tattttataataaat

SEQ ID NO: 1190902 - DNA, 15 bp, Homo sapiens
ctattttataataaa

SEQ ID NO: 1190903 - DNA, 15 bp, Homo sapiens
cctattttataataa

SEQ ID NO: 1190904 - DNA, 15 bp, Homo sapiens
gcctattttataata

SEQ ID NO: 1190905 - DNA, 15 bp, Homo sapiens
agcctattttataat

SEQ ID NO: 1190906 - DNA, 15 bp, Homo sapiens
aagcctattttataa

SEQ ID NO: 1190907 - DNA, 15 bp, Homo sapiens
aaagcctattttata

SEQ ID NO: 1190908 - DNA, 15 bp, Homo sapiens
caaagcctattttat

SEQ ID NO: 1190909 - DNA, 15 bp, Homo sapiens
acaaagcctatttta

SEQ ID NO: 1190910 - DNA, 15 bp, Homo sapiens
cacaaagcctatttt

SEQ ID NO: 1190911 - DNA, 15 bp, Homo sapiens
acacaaagcctattt

SEQ ID NO: 1190912 - DNA, 15 bp, Homo sapiens
aacacaaagcctatt

SEQ ID NO: 1190913 - DNA, 15 bp, Homo sapiens
taacacaaagcctat

SEQ ID NO: 1190914 - DNA, 15 bp, Homo sapiens
ctaacacaaagccta

SEQ ID NO: 1190915 - DNA, 15 bp, Homo sapiens
tctaacacaaagcct

SEQ ID NO: 1190916 - DNA, 15 bp, Homo sapiens
atctaacacaaagcc

SEQ ID NO: 1190917 - DNA, 15 bp, Homo sapiens
catctaacacaaagc

SEQ ID NO: 1190918 - DNA, 15 bp, Homo sapiens
tcatctaacacaaag

SEQ ID NO: 1190919 - DNA, 15 bp, Homo sapiens
atcatctaacacaaa

SEQ ID NO: 1190920 - DNA, 15 bp, Homo sapiens
aatcatctaacacaa

SEQ ID NO: 1190921 - DNA, 15 bp, Homo sapiens
aaatcatctaacaca

SEQ ID NO: 1190922 - DNA, 15 bp, Homo sapiens
aaaatcatctaacac

SEQ ID NO: 1190923 - DNA, 15 bp, Homo sapiens
aaaaatcatctaaca

SEQ ID NO: 1190924 - DNA, 15 bp, Homo sapiens
gaaaaatcatctaac

SEQ ID NO: 1190925 - DNA, 15 bp, Homo sapiens
ggaaaaatcatctaa

SEQ ID NO: 1190926 - DNA, 15 bp, Homo sapiens
gggaaaaatcatcta

SEQ ID NO: 1190927 - DNA, 15 bp, Homo sapiens
tgggaaaaatcatct

SEQ ID NO: 1190928 - DNA, 15 bp, Homo sapiens
ttgggaaaaatcatc

SEQ ID NO: 1190929 - DNA, 15 bp, Homo sapiens
gttgggaaaaatcat

SEQ ID NO: 1190930 - DNA, 15 bp, Homo sapiens
agttgggaaaaatca

SEQ ID NO: 1190931 - DNA, 15 bp, Homo sapiens
cagttgggaaaaatc

SEQ ID NO: 1190932 - DNA, 15 bp, Homo sapiens
acagttgggaaaaat

SEQ ID NO: 1190933 - DNA, 15 bp, Homo sapiens
tacagttgggaaaaa

SEQ ID NO: 1190934 - DNA, 15 bp, Homo sapiens
ctacagttgggaaaa

SEQ ID NO: 1190935 - DNA, 15 bp, Homo sapiens
cctacagttgggaaa

SEQ ID NO: 1190936 - DNA, 15 bp, Homo sapiens
acctacagttgggaa

SEQ ID NO: 1190937 - DNA, 15 bp, Homo sapiens
aacctacagttggga

SEQ ID NO: 1190938 - DNA, 15 bp, Homo sapiens
taacctacagttggg

SEQ ID NO: 1190939 - DNA, 15 bp, Homo sapiens
ttaacctacagttgg

SEQ ID NO: 1190940 - DNA, 15 bp, Homo sapiens
gttaacctacagttg

SEQ ID NO: 1190941 - DNA, 15 bp, Homo sapiens
cgttaacctacagtt

SEQ ID NO: 1190942 - DNA, 15 bp, Homo sapiens
acgttaacctacagt

SEQ ID NO: 1190943 - DNA, 15 bp, Homo sapiens
aacgttaacctacag

SEQ ID NO: 1190944 - DNA, 15 bp, Homo sapiens
taacgttaacctaca

SEQ ID NO: 1190945 - DNA, 15 bp, Homo sapiens
ttaacgttaacctac

SEQ ID NO: 1190946 - DNA, 15 bp, Homo sapiens
cttaacgttaaccta

SEQ ID NO: 1190947 - DNA, 15 bp, Homo sapiens
gcttaacgttaacct

SEQ ID NO: 1190948 - DNA, 15 bp, Homo sapiens
agcttaacgttaacc

SEQ ID NO: 1190949 - DNA, 15 bp, Homo sapiens
aagcttaacgttaac

SEQ ID NO: 1190950 - DNA, 15 bp, Homo sapiens
aaagcttaacgttaa

SEQ ID NO: 1190951 - DNA, 15 bp, Homo sapiens
gaaagcttaacgtta

SEQ ID NO: 1190952 - DNA, 15 bp, Homo sapiens
agaaagcttaacgtt

SEQ ID NO: 1190953 - DNA, 15 bp, Homo sapiens
cagaaagcttaacgt

SEQ ID NO: 1190954 - DNA, 15 bp, Homo sapiens
tcagaaagcttaacg

SEQ ID NO: 1190955 - DNA, 15 bp, Homo sapiens
ctcagaaagcttaac

SEQ ID NO: 1190956 - DNA, 15 bp, Homo sapiens
gctcagaaagcttaa

SEQ ID NO: 1190957 - DNA, 15 bp, Homo sapiens
tgctcagaaagctta

SEQ ID NO: 1190958 - DNA, 15 bp, Homo sapiens
gtgctcagaaagctt

SEQ ID NO: 1190959 - DNA, 15 bp, Homo sapiens
tgtgctcagaaagct

SEQ ID NO: 1190960 - DNA, 15 bp, Homo sapiens
atgtgctcagaaagc

SEQ ID NO: 1190961 - DNA, 15 bp, Homo sapiens
aatgtgctcagaaag

SEQ ID NO: 1190962 - DNA, 15 bp, Homo sapiens
aaatgtgctcagaaa

SEQ ID NO: 1190963 - DNA, 15 bp, Homo sapiens
taaatgtgctcagaa

SEQ ID NO: 1190964 - DNA, 15 bp, Homo sapiens
ttaaatgtgctcaga

SEQ ID NO: 1190965 - DNA, 15 bp, Homo sapiens
cttaaatgtgctcag

SEQ ID NO: 1190966 - DNA, 15 bp, Homo sapiens
ccttaaatgtgctca

SEQ ID NO: 1190967 - DNA, 15 bp, Homo sapiens
accttaaatgtgctc

SEQ ID NO: 1190968 - DNA, 15 bp, Homo sapiens
taccttaaatgtgct

SEQ ID NO: 1190969 - DNA, 15 bp, Homo sapiens
ctaccttaaatgtgc

SEQ ID NO: 1190970 - DNA, 15 bp, Homo sapiens
tctaccttaaatgtg

SEQ ID NO: 1190971 - DNA, 15 bp, Homo sapiens
gtctaccttaaatgt

SEQ ID NO: 1190972 - DNA, 15 bp, Homo sapiens
ggtctaccttaaatg

SEQ ID NO: 1190973 - DNA, 15 bp, Homo sapiens
tggtctaccttaaat

SEQ ID NO: 1190974 - DNA, 15 bp, Homo sapiens
ctggtctaccttaaa

SEQ ID NO: 1190975 - DNA, 15 bp, Homo sapiens
cctggtctaccttaa

SEQ ID NO: 1190976 - DNA, 15 bp, Homo sapiens
gcctggtctacctta

SEQ ID NO: 1190977 - DNA, 15 bp, Homo sapiens
agcctggtctacctt

SEQ ID NO: 1190978 - DNA, 15 bp, Homo sapiens
tagcctggtctacct

SEQ ID NO: 1190979 - DNA, 15 bp, Homo sapiens
ttagcctggtctacc

SEQ ID NO: 1190980 - DNA, 15 bp, Homo sapiens
cttagcctggtctac

SEQ ID NO: 1190981 - DNA, 15 bp, Homo sapiens
gcttagcctggtcta

SEQ ID NO: 1190982 - DNA, 15 bp, Homo sapiens
agcttagcctggtct

SEQ ID NO: 1190983 - DNA, 15 bp, Homo sapiens
cagcttagcctggtc

SEQ ID NO: 1190984 - DNA, 15 bp, Homo sapiens
acagcttagcctggt

SEQ ID NO: 1190985 - DNA, 15 bp, Homo sapiens
tacagcttagcctgg

SEQ ID NO: 1190986 - DNA, 15 bp, Homo sapiens
ttacagcttagcctg

SEQ ID NO: 1190987 - DNA, 15 bp, Homo sapiens
attacagcttagcct

SEQ ID NO: 1190988 - DNA, 15 bp, Homo sapiens
cattacagcttagcc

SEQ ID NO: 1190989 - DNA, 15 bp, Homo sapiens
acattacagcttagc

SEQ ID NO: 1190990 - DNA, 15 bp, Homo sapiens
aacattacagcttag

SEQ ID NO: 1190991 - DNA, 15 bp, Homo sapiens
aaacattacagctta

SEQ ID NO: 1190992 - DNA, 15 bp, Homo sapiens
caaacattacagctt

SEQ ID NO: 1190993 - DNA, 15 bp, Homo sapiens
ccaaacattacagct

SEQ ID NO: 1190994 - DNA, 15 bp, Homo sapiens
accaaacattacagc

SEQ ID NO: 1190995 - DNA, 15 bp, Homo sapiens
caccaaacattacag

SEQ ID NO: 1190996 - DNA, 15 bp, Homo sapiens
ccaccaaacattaca

SEQ ID NO: 1190997 - DNA, 15 bp, Homo sapiens
cccaccaaacattac

SEQ ID NO: 1190998 - DNA, 15 bp, Homo sapiens
gcccaccaaacatta

SEQ ID NO: 1190999 - DNA, 15 bp, Homo sapiens
agcccaccaaacatt

SEQ ID NO: 1191000 - DNA, 15 bp, Homo sapiens
tagcccaccaaacat

SEQ ID NO: 1191001 - DNA, 15 bp, Homo sapiens
ctagcccaccaaaca

SEQ ID NO: 1191002 - DNA, 15 bp, Homo sapiens
cctagcccaccaaac

SEQ ID NO: 1191003 - DNA, 15 bp, Homo sapiens
acctagcccaccaaa

SEQ ID NO: 1191004 - DNA, 15 bp, Homo sapiens
cacctagcccaccaa

SEQ ID NO: 1191005 - DNA, 15 bp, Homo sapiens
acacctagcccacca

SEQ ID NO: 1191006 - DNA, 15 bp, Homo sapiens
gacacctagcccacc

SEQ ID NO: 1191007 - DNA, 15 bp, Homo sapiens
agacacctagcccac

SEQ ID NO: 1191008 - DNA, 15 bp, Homo sapiens
aagacacctagccca

SEQ ID NO: 1191009 - DNA, 15 bp, Homo sapiens
taagacacctagccc

SEQ ID NO: 1191010 - DNA, 15 bp, Homo sapiens
gtaagacacctagcc

SEQ ID NO: 1191011 - DNA, 15 bp, Homo sapiens
tgtaagacacctagc

SEQ ID NO: 1191012 - DNA, 15 bp, Homo sapiens
atgtaagacacctag

SEQ ID NO: 1191013 - DNA, 15 bp, Homo sapiens
catgtaagacaccta

SEQ ID NO: 1191014 - DNA, 15 bp, Homo sapiens
acatgtaagacacct

SEQ ID NO: 1191015 - DNA, 15 bp, Homo sapiens
cacatgtaagacacc

SEQ ID NO: 1191016 - DNA, 15 bp, Homo sapiens
acacatgtaagacac

SEQ ID NO: 1191017 - DNA, 15 bp, Homo sapiens
aacacatgtaagaca

SEQ ID NO: 1191018 - DNA, 15 bp, Homo sapiens
aaacacatgtaagac

SEQ ID NO: 1191019 - DNA, 15 bp, Homo sapiens
aaaacacatgtaaga

SEQ ID NO: 1191020 - DNA, 15 bp, Homo sapiens
aaaaacacatgtaag

SEQ ID NO: 1191021 - DNA, 15 bp, Homo sapiens
aaaaaacacatgtaa

SEQ ID NO: 1191022 - DNA, 15 bp, Homo sapiens
aaaaaaacacatgta

SEQ ID NO: 1191023 - DNA, 15 bp, Homo sapiens
caaaaaaacacatgt

SEQ ID NO: 1191024 - DNA, 15 bp, Homo sapiens
acaaaaaaacacatg

SEQ ID NO: 1191025 - DNA, 15 bp, Homo sapiens
aacaaaaaaacacat

SEQ ID NO: 1191026 - DNA, 15 bp, Homo sapiens
aaacaaaaaaacaca

SEQ ID NO: 1191027 - DNA, 15 bp, Homo sapiens
caaacaaaaaaacac

SEQ ID NO: 1191028 - DNA, 15 bp, Homo sapiens
acaaacaaaaaaaca

SEQ ID NO: 1191029 - DNA, 15 bp, Homo sapiens
caaaacaaacaaaca

SEQ ID NO: 1191030 - DNA, 15 bp, Homo sapiens
tcaaaacaaacaaac

SEQ ID NO: 1191031 - DNA, 15 bp, Homo sapiens
ctcaaaacaaacaaa

SEQ ID NO: 1191032 - DNA, 15 bp, Homo sapiens
tctcaaaacaaacaa

SEQ ID NO: 1191033 - DNA, 15 bp, Homo sapiens
ctctcaaaacaaaca

SEQ ID NO: 1191034 - DNA, 15 bp, Homo sapiens
cctctcaaaacaaac

SEQ ID NO: 1191035 - DNA, 15 bp, Homo sapiens
ccctctcaaaacaaa

SEQ ID NO: 1191036 - DNA, 15 bp, Homo sapiens
tccctctcaaaacaa

SEQ ID NO: 1191037 - DNA, 15 bp, Homo sapiens
ttccctctcaaaaca

SEQ ID NO: 1191038 - DNA, 15 bp, Homo sapiens
attccctctcaaaac

SEQ ID NO: 1191039 - DNA, 15 bp, Homo sapiens
gattccctctcaaaa

SEQ ID NO: 1191040 - DNA, 15 bp, Homo sapiens
cgattccctctcaaa

SEQ ID NO: 1191041 - DNA, 15 bp, Homo sapiens
gcgattccctctcaa

SEQ ID NO: 1191042 - DNA, 15 bp, Homo sapiens
cgcgattccctctca

SEQ ID NO: 1191043 - DNA, 15 bp, Homo sapiens
gcgcgattccctctc

SEQ ID NO: 1191044 - DNA, 15 bp, Homo sapiens
agcgcgattccctct

SEQ ID NO: 1191045 - DNA, 15 bp, Homo sapiens
gagcgcgattccctc

SEQ ID NO: 1191046 - DNA, 15 bp, Homo sapiens
agagcgcgattccct

SEQ ID NO: 1191047 - DNA, 15 bp, Homo sapiens
cagagcgcgattccc

SEQ ID NO: 1191048 - DNA, 15 bp, Homo sapiens
acagagcgcgattcc

SEQ ID NO: 1191049 - DNA, 15 bp, Homo sapiens
gacagagcgcgattc

SEQ ID NO: 1191050 - DNA, 15 bp, Homo sapiens
tgacagagcgcgatt

SEQ ID NO: 1191051 - DNA, 15 bp, Homo sapiens
gtgacagagcgcgat

SEQ ID NO: 1191052 - DNA, 15 bp, Homo sapiens
ggtgacagagcgcga

SEQ ID NO: 1191053 - DNA, 15 bp, Homo sapiens
gggtgacagagcgcg

SEQ ID NO: 1191054 - DNA, 15 bp, Homo sapiens
tgggtgacagagcgc

SEQ ID NO: 1191055 - DNA, 15 bp, Homo sapiens
ttccagcctgggtga

SEQ ID NO: 1191056 - DNA, 15 bp, Homo sapiens
attccagcctgggtg

SEQ ID NO: 1191057 - DNA, 15 bp, Homo sapiens
cattccagcctgggt

SEQ ID NO: 1191058 - DNA, 15 bp, Homo sapiens
ctgcattccagcctg

SEQ ID NO: 1191059 - DNA, 15 bp, Homo sapiens
actgcattccagcct

SEQ ID NO: 1191060 - DNA, 15 bp, Homo sapiens
cactgcattccagcc

SEQ ID NO: 1191061 - DNA, 15 bp, Homo sapiens
cgccactgcattcca

SEQ ID NO: 1191062 - DNA, 15 bp, Homo sapiens
gcgccactgcattcc

SEQ ID NO: 1191063 - DNA, 15 bp, Homo sapiens
cgcgccactgcattc

SEQ ID NO: 1191064 - DNA, 15 bp, Homo sapiens
tcgcgccactgcatt

SEQ ID NO: 1191065 - DNA, 15 bp, Homo sapiens
atcgcgccactgcat

SEQ ID NO: 1191066 - DNA, 15 bp, Homo sapiens
ggaggttacagtgag

SEQ ID NO: 1191067 - DNA, 15 bp, Homo sapiens
cggaggttacagtga

SEQ ID NO: 1191068 - DNA, 15 bp, Homo sapiens
gcggaggttacagtg

SEQ ID NO: 1191069 - DNA, 15 bp, Homo sapiens
ggcggaggttacagt

SEQ ID NO: 1191070 - DNA, 15 bp, Homo sapiens
aggcggaggttacag

SEQ ID NO: 1191071 - DNA, 15 bp, Homo sapiens
gaggcggaggttaca

SEQ ID NO: 1191072 - DNA, 15 bp, Homo sapiens
ggaggcggaggttac

SEQ ID NO: 1191073 - DNA, 15 bp, Homo sapiens
gggaggcggaggtta

SEQ ID NO: 1191074 - DNA, 15 bp, Homo sapiens
atgggaggcggaggt

SEQ ID NO: 1191075 - DNA, 15 bp, Homo sapiens
catgggaggcggagg

SEQ ID NO: 1191076 - DNA, 15 bp, Homo sapiens
acatgggaggcggag

SEQ ID NO: 1191077 - DNA, 15 bp, Homo sapiens
aacatgggaggcgga

SEQ ID NO: 1191078 - DNA, 15 bp, Homo sapiens
gaacatgggaggcgg

SEQ ID NO: 1191079 - DNA, 15 bp, Homo sapiens
tgaacatgggaggcg

SEQ ID NO: 1191080 - DNA, 15 bp, Homo sapiens
ttgaacatgggaggc

SEQ ID NO: 1191081 - DNA, 15 bp, Homo sapiens
cttgaacatgggagg

SEQ ID NO: 1191082 - DNA, 15 bp, Homo sapiens
ctacaggcgcctgcc

SEQ ID NO: 1191083 - DNA, 15 bp, Homo sapiens
actacaggcgcctgc

SEQ ID NO: 1191084 - DNA, 15 bp, Homo sapiens
gactacaggcgcctg

SEQ ID NO: 1191085 - DNA, 15 bp, Homo sapiens
ggactacaggcgcct

SEQ ID NO: 1191086 - DNA, 15 bp, Homo sapiens
ttctcggctcactgc

SEQ ID NO: 1191087 - DNA, 15 bp, Homo sapiens
attctcggctcactg

SEQ ID NO: 1191088 - DNA, 15 bp, Homo sapiens
cattctcggctcact

SEQ ID NO: 1191089 - DNA, 15 bp, Homo sapiens
gcattctcggctcac

SEQ ID NO: 1191090 - DNA, 15 bp, Homo sapiens
tgcattctcggctca

SEQ ID NO: 1191091 - DNA, 15 bp, Homo sapiens
gtgcattctcggctc

SEQ ID NO: 1191092 - DNA, 15 bp, Homo sapiens
ggtgcattctcggct

SEQ ID NO: 1191093 - DNA, 15 bp, Homo sapiens
tggtgcattctcggc

SEQ ID NO: 1191094 - DNA, 15 bp, Homo sapiens
gtggtgcattctcgg

SEQ ID NO: 1191095 - DNA, 15 bp, Homo sapiens
agtggtgcattctcg

SEQ ID NO: 1191096 - DNA, 15 bp, Homo sapiens
cagtggtgcattctc

SEQ ID NO: 1191097 - DNA, 15 bp, Homo sapiens
gcagtggtgcattct

SEQ ID NO: 1191098 - DNA, 15 bp, Homo sapiens
tgcagtggtgcattc

SEQ ID NO: 1191099 - DNA, 15 bp, Homo sapiens
gtgcagtggtgcatt

SEQ ID NO: 1191100 - DNA, 15 bp, Homo sapiens
agtgcagtggtgcat

SEQ ID NO: 1191101 - DNA, 15 bp, Homo sapiens
cgccaggctggagtg

SEQ ID NO: 1191102 - DNA, 15 bp, Homo sapiens
tcgccaggctggagt

SEQ ID NO: 1191103 - DNA, 15 bp, Homo sapiens
gtcgccaggctggag

SEQ ID NO: 1191104 - DNA, 15 bp, Homo sapiens
tgtcgccaggctgga

SEQ ID NO: 1191105 - DNA, 15 bp, Homo sapiens
ctgtcgccaggctgg

SEQ ID NO: 1191106 - DNA, 15 bp, Homo sapiens
tctgtcgccaggctg

SEQ ID NO: 1191107 - DNA, 15 bp, Homo sapiens
ctctgtcgccaggct

SEQ ID NO: 1191108 - DNA, 15 bp, Homo sapiens
gctctgtcgccaggc

SEQ ID NO: 1191109 - DNA, 15 bp, Homo sapiens
tgctctgtcgccagg

SEQ ID NO: 1191110 - DNA, 15 bp, Homo sapiens
ttgctctgtcgccag

SEQ ID NO: 1191111 - DNA, 15 bp, Homo sapiens
cttgctctgtcgcca

SEQ ID NO: 1191112 - DNA, 15 bp, Homo sapiens
tgagacagagtcttg

SEQ ID NO: 1191113 - DNA, 15 bp, Homo sapiens
ttgagacagagtctt

SEQ ID NO: 1191114 - DNA, 15 bp, Homo sapiens
aaccttttttttttt

SEQ ID NO: 1191115 - DNA, 15 bp, Homo sapiens
gaacctttttttttt

SEQ ID NO: 1191116 - DNA, 15 bp, Homo sapiens
agaaccttttttttt

SEQ ID NO: 1191117 - DNA, 15 bp, Homo sapiens
cagaacctttttttt

SEQ ID NO: 1191118 - DNA, 15 bp, Homo sapiens
acagaaccttttttt

SEQ ID NO: 1191119 - DNA, 15 bp, Homo sapiens
tacagaacctttttt

SEQ ID NO: 1191120 - DNA, 15 bp, Homo sapiens
atacagaaccttttt

SEQ ID NO: 1191121 - DNA, 15 bp, Homo sapiens
aatacagaacctttt

SEQ ID NO: 1191122 - DNA, 15 bp, Homo sapiens
taatacagaaccttt

SEQ ID NO: 1191123 - DNA, 15 bp, Homo sapiens
ttaatacagaacctt

SEQ ID NO: 1191124 - DNA, 15 bp, Homo sapiens
tttaatacagaacct

SEQ ID NO: 1191125 - DNA, 15 bp, Homo sapiens
ttttaatacagaacc

SEQ ID NO: 1191126 - DNA, 15 bp, Homo sapiens
attttaatacagaac

SEQ ID NO: 1191127 - DNA, 15 bp, Homo sapiens
aattttaatacagaa

SEQ ID NO: 1191128 - DNA, 15 bp, Homo sapiens
taattttaatacaga

SEQ ID NO: 1191129 - DNA, 15 bp, Homo sapiens
gtaattttaatacag

SEQ ID NO: 1191130 - DNA, 15 bp, Homo sapiens
agtaattttaataca

SEQ ID NO: 1191131 - DNA, 15 bp, Homo sapiens
cagtaattttaatac

SEQ ID NO: 1191132 - DNA, 15 bp, Homo sapiens
tcagtaattttaata

SEQ ID NO: 1191133 - DNA, 15 bp, Homo sapiens
atcagtaattttaat

SEQ ID NO: 1191134 - DNA, 15 bp, Homo sapiens
aatcagtaattttaa

SEQ ID NO: 1191135 - DNA, 15 bp, Homo sapiens
gaatcagtaatttta

SEQ ID NO: 1191136 - DNA, 15 bp, Homo sapiens
agaatcagtaatttt

SEQ ID NO: 1191137 - DNA, 15 bp, Homo sapiens
gagaatcagtaattt

SEQ ID NO: 1191138 - DNA, 15 bp, Homo sapiens
agagaatcagtaatt

SEQ ID NO: 1191139 - DNA, 15 bp, Homo sapiens
aagagaatcagtaat

SEQ ID NO: 1191140 - DNA, 15 bp, Homo sapiens
aaagagaatcagtaa

SEQ ID NO: 1191141 - DNA, 15 bp, Homo sapiens
gaaagagaatcagta

SEQ ID NO: 1191142 - DNA, 15 bp, Homo sapiens
agaaagagaatcagt

SEQ ID NO: 1191143 - DNA, 15 bp, Homo sapiens
cagaaagagaatcag

SEQ ID NO: 1191144 - DNA, 15 bp, Homo sapiens
tcagaaagagaatca

SEQ ID NO: 1191145 - DNA, 15 bp, Homo sapiens
atcagaaagagaatc

SEQ ID NO: 1191146 - DNA, 15 bp, Homo sapiens
aatcagaaagagaat

SEQ ID NO: 1191147 - DNA, 15 bp, Homo sapiens
caatcagaaagagaa

SEQ ID NO: 1191148 - DNA, 15 bp, Homo sapiens
tcaatcagaaagaga

SEQ ID NO: 1191149 - DNA, 15 bp, Homo sapiens
atcaatcagaaagag

SEQ ID NO: 1191150 - DNA, 15 bp, Homo sapiens
gatcaatcagaaaga

SEQ ID NO: 1191151 - DNA, 15 bp, Homo sapiens
agatcaatcagaaag

SEQ ID NO: 1191152 - DNA, 15 bp, Homo sapiens
aagatcaatcagaaa

SEQ ID NO: 1191153 - DNA, 15 bp, Homo sapiens
gaagatcaatcagaa

SEQ ID NO: 1191154 - DNA, 15 bp, Homo sapiens
tgaagatcaatcaga

SEQ ID NO: 1191155 - DNA, 15 bp, Homo sapiens
ttgaagatcaatcag

SEQ ID NO: 1191156 - DNA, 15 bp, Homo sapiens
cttgaagatcaatca

SEQ ID NO: 1191157 - DNA, 15 bp, Homo sapiens
acttgaagatcaatc

SEQ ID NO: 1191158 - DNA, 15 bp, Homo sapiens
tacttgaagatcaat

SEQ ID NO: 1191159 - DNA, 15 bp, Homo sapiens
ttacttgaagatcaa

SEQ ID NO: 1191160 - DNA, 15 bp, Homo sapiens
attacttgaagatca

SEQ ID NO: 1191161 - DNA, 15 bp, Homo sapiens
aattacttgaagatc

SEQ ID NO: 1191162 - DNA, 15 bp, Homo sapiens
gaattacttgaagat

SEQ ID NO: 1191163 - DNA, 15 bp, Homo sapiens
ggaattacttgaaga

SEQ ID NO: 1191164 - DNA, 15 bp, Homo sapiens
tggaattacttgaag

SEQ ID NO: 1191165 - DNA, 15 bp, Homo sapiens
atggaattacttgaa

SEQ ID NO: 1191166 - DNA, 15 bp, Homo sapiens
catggaattacttga

SEQ ID NO: 1191167 - DNA, 15 bp, Homo sapiens
acatggaattacttg

SEQ ID NO: 1191168 - DNA, 15 bp, Homo sapiens
tacatggaattactt

SEQ ID NO: 1191169 - DNA, 15 bp, Homo sapiens
gtacatggaattact

SEQ ID NO: 1191170 - DNA, 15 bp, Homo sapiens
tgtacatggaattac

SEQ ID NO: 1191171 - DNA, 15 bp, Homo sapiens
ttgtacatggaatta

SEQ ID NO: 1191172 - DNA, 15 bp, Homo sapiens
tttgtacatggaatt

SEQ ID NO: 1191173 - DNA, 15 bp, Homo sapiens
gtttgtacatggaat

SEQ ID NO: 1191174 - DNA, 15 bp, Homo sapiens
ggtttgtacatggaa

SEQ ID NO: 1191175 - DNA, 15 bp, Homo sapiens
aggtttgtacatgga

SEQ ID NO: 1191176 - DNA, 15 bp, Homo sapiens
caggtttgtacatgg

SEQ ID NO: 1191177 - DNA, 15 bp, Homo sapiens
tcaggtttgtacatg

SEQ ID NO: 1191178 - DNA, 15 bp, Homo sapiens
ttcaggtttgtacat

SEQ ID NO: 1191179 - DNA, 15 bp, Homo sapiens
tttcaggtttgtaca

SEQ ID NO: 1191180 - DNA, 15 bp, Homo sapiens
atttcaggtttgtac

SEQ ID NO: 1191181 - DNA, 15 bp, Homo sapiens
catttcaggtttgta

SEQ ID NO: 1191182 - DNA, 15 bp, Homo sapiens
tcatttcaggtttgt

SEQ ID NO: 1191183 - DNA, 15 bp, Homo sapiens
ttcatttcaggtttg

SEQ ID NO: 1191184 - DNA, 15 bp, Homo sapiens
tttcatttcaggttt

SEQ ID NO: 1191185 - DNA, 15 bp, Homo sapiens
gtttcatttcaggtt

SEQ ID NO: 1191186 - DNA, 15 bp, Homo sapiens
agtttcatttcaggt

SEQ ID NO: 1191187 - DNA, 15 bp, Homo sapiens
cagtttcatttcagg

SEQ ID NO: 1191188 - DNA, 15 bp, Homo sapiens
acagtttcatttcag

SEQ ID NO: 1191189 - DNA, 15 bp, Homo sapiens
gacagtttcatttca

SEQ ID NO: 1191190 - DNA, 15 bp, Homo sapiens
agacagtttcatttc

SEQ ID NO: 1191191 - DNA, 15 bp, Homo sapiens
gagacagtttcattt

SEQ ID NO: 1191192 - DNA, 15 bp, Homo sapiens
tgagacagtttcatt

SEQ ID NO: 1191193 - DNA, 15 bp, Homo sapiens
ctgagacagtttcat

SEQ ID NO: 1191194 - DNA, 15 bp, Homo sapiens
actgagacagtttca

SEQ ID NO: 1191195 - DNA, 15 bp, Homo sapiens
cactgagacagtttc

SEQ ID NO: 1191196 - DNA, 15 bp, Homo sapiens
acactgagacagttt

SEQ ID NO: 1191197 - DNA, 15 bp, Homo sapiens
aacactgagacagtt

SEQ ID NO: 1191198 - DNA, 15 bp, Homo sapiens
taacactgagacagt

SEQ ID NO: 1191199 - DNA, 15 bp, Homo sapiens
gtaacactgagacag

SEQ ID NO: 1191200 - DNA, 15 bp, Homo sapiens
agtaacactgagaca

SEQ ID NO: 1191201 - DNA, 15 bp, Homo sapiens
tagtaacactgagac

SEQ ID NO: 1191202 - DNA, 15 bp, Homo sapiens
atagtaacactgaga

SEQ ID NO: 1191203 - DNA, 15 bp, Homo sapiens
catagtaacactgag

SEQ ID NO: 1191204 - DNA, 15 bp, Homo sapiens
ccatagtaacactga

SEQ ID NO: 1191205 - DNA, 15 bp, Homo sapiens
accatagtaacactg

SEQ ID NO: 1191206 - DNA, 15 bp, Homo sapiens
taccatagtaacact

SEQ ID NO: 1191207 - DNA, 15 bp, Homo sapiens
ttaccatagtaacac

SEQ ID NO: 1191208 - DNA, 15 bp, Homo sapiens
gttaccatagtaaca

SEQ ID NO: 1191209 - DNA, 15 bp, Homo sapiens
agttaccatagtaac

SEQ ID NO: 1191210 - DNA, 15 bp, Homo sapiens
aagttaccatagtaa

SEQ ID NO: 1191211 - DNA, 15 bp, Homo sapiens
aaagttaccatagta

SEQ ID NO: 1191212 - DNA, 15 bp, Homo sapiens
caaagttaccatagt

SEQ ID NO: 1191213 - DNA, 15 bp, Homo sapiens
ccaaagttaccatag

SEQ ID NO: 1191214 - DNA, 15 bp, Homo sapiens
cccaaagttaccata

SEQ ID NO: 1191215 - DNA, 15 bp, Homo sapiens
acccaaagttaccat

SEQ ID NO: 1191216 - DNA, 15 bp, Homo sapiens
cacccaaagttacca

SEQ ID NO: 1191217 - DNA, 15 bp, Homo sapiens
tcacccaaagttacc

SEQ ID NO: 1191218 - DNA, 15 bp, Homo sapiens
ctcacccaaagttac

SEQ ID NO: 1191219 - DNA, 15 bp, Homo sapiens
tctcacccaaagtta

SEQ ID NO: 1191220 - DNA, 15 bp, Homo sapiens
ttctcacccaaagtt

SEQ ID NO: 1191221 - DNA, 15 bp, Homo sapiens
attctcacccaaagt

SEQ ID NO: 1191222 - DNA, 15 bp, Homo sapiens
tattctcacccaaag

SEQ ID NO: 1191223 - DNA, 15 bp, Homo sapiens
atattctcacccaaa

SEQ ID NO: 1191224 - DNA, 15 bp, Homo sapiens
catattctcacccaa

SEQ ID NO: 1191225 - DNA, 15 bp, Homo sapiens
ccatattctcaccca

SEQ ID NO: 1191226 - DNA, 15 bp, Homo sapiens
accatattctcaccc

SEQ ID NO: 1191227 - DNA, 15 bp, Homo sapiens
taccatattctcacc

SEQ ID NO: 1191228 - DNA, 15 bp, Homo sapiens
ctaccatattctcac

SEQ ID NO: 1191229 - DNA, 15 bp, Homo sapiens
tctaccatattctca

SEQ ID NO: 1191230 - DNA, 15 bp, Homo sapiens
ctctaccatattctc

SEQ ID NO: 1191231 - DNA, 15 bp, Homo sapiens
tctctaccatattct

SEQ ID NO: 1191232 - DNA, 15 bp, Homo sapiens
ctctctaccatattc

SEQ ID NO: 1191233 - DNA, 15 bp, Homo sapiens
gctctctaccatatt

SEQ ID NO: 1191234 - DNA, 15 bp, Homo sapiens
cgctctctaccatat

SEQ ID NO: 1191235 - DNA, 15 bp, Homo sapiens
gcgctctctaccata

SEQ ID NO: 1191236 - DNA, 15 bp, Homo sapiens
tgcgctctctaccat

SEQ ID NO: 1191237 - DNA, 15 bp, Homo sapiens
atgcgctctctacca

SEQ ID NO: 1191238 - DNA, 15 bp, Homo sapiens
catgcgctctctacc

SEQ ID NO: 1191239 - DNA, 15 bp, Homo sapiens
tcatgcgctctctac

SEQ ID NO: 1191240 - DNA, 15 bp, Homo sapiens
ttcatgcgctctcta

SEQ ID NO: 1191241 - DNA, 15 bp, Homo sapiens
gttcatgcgctctct

SEQ ID NO: 1191242 - DNA, 15 bp, Homo sapiens
agttcatgcgctctc

SEQ ID NO: 1191243 - DNA, 15 bp, Homo sapiens
aagttcatgcgctct

SEQ ID NO: 1191244 - DNA, 15 bp, Homo sapiens
caagttcatgcgctc

SEQ ID NO: 1191245 - DNA, 15 bp, Homo sapiens
acaagttcatgcgct

SEQ ID NO: 1191246 - DNA, 15 bp, Homo sapiens
aacaagttcatgcgc

SEQ ID NO: 1191247 - DNA, 15 bp, Homo sapiens
gaacaagttcatgcg

SEQ ID NO: 1191248 - DNA, 15 bp, Homo sapiens
tgaacaagttcatgc

SEQ ID NO: 1191249 - DNA, 15 bp, Homo sapiens
gtgaacaagttcatg

SEQ ID NO: 1191250 - DNA, 15 bp, Homo sapiens
agtgaacaagttcat

SEQ ID NO: 1191251 - DNA, 15 bp, Homo sapiens
cagtgaacaagttca

SEQ ID NO: 1191252 - DNA, 15 bp, Homo sapiens
tcagtgaacaagttc

SEQ ID NO: 1191253 - DNA, 15 bp, Homo sapiens
gtcagtgaacaagtt

SEQ ID NO: 1191254 - DNA, 15 bp, Homo sapiens
agtcagtgaacaagt

SEQ ID NO: 1191255 - DNA, 15 bp, Homo sapiens
cagtcagtgaacaag

SEQ ID NO: 1191256 - DNA, 15 bp, Homo sapiens
acagtcagtgaacaa

SEQ ID NO: 1191257 - DNA, 15 bp, Homo sapiens
cacagtcagtgaaca

SEQ ID NO: 1191258 - DNA, 15 bp, Homo sapiens
tcacagtcagtgaac

SEQ ID NO: 1191259 - DNA, 15 bp, Homo sapiens
gtcacagtcagtgaa

SEQ ID NO: 1191260 - DNA, 15 bp, Homo sapiens
ggtcacagtcagtga

SEQ ID NO: 1191261 - DNA, 15 bp, Homo sapiens
aggtcacagtcagtg

SEQ ID NO: 1191262 - DNA, 15 bp, Homo sapiens
taggtcacagtcagt

SEQ ID NO: 1191263 - DNA, 15 bp, Homo sapiens
ttaggtcacagtcag

SEQ ID NO: 1191264 - DNA, 15 bp, Homo sapiens
gttaggtcacagtca

SEQ ID NO: 1191265 - DNA, 15 bp, Homo sapiens
agttaggtcacagtc

SEQ ID NO: 1191266 - DNA, 15 bp, Homo sapiens
aagttaggtcacagt

SEQ ID NO: 1191267 - DNA, 15 bp, Homo sapiens
caagttaggtcacag

SEQ ID NO: 1191268 - DNA, 15 bp, Homo sapiens
acaagttaggtcaca

SEQ ID NO: 1191269 - DNA, 15 bp, Homo sapiens
cacaagttaggtcac

SEQ ID NO: 1191270 - DNA, 15 bp, Homo sapiens
tcacaagttaggtca

SEQ ID NO: 1191271 - DNA, 15 bp, Homo sapiens
ttcacaagttaggtc

SEQ ID NO: 1191272 - DNA, 15 bp, Homo sapiens
cttcacaagttaggt

SEQ ID NO: 1191273 - DNA, 15 bp, Homo sapiens
tcttcacaagttagg

SEQ ID NO: 1191274 - DNA, 15 bp, Homo sapiens
ttcttcacaagttag

SEQ ID NO: 1191275 - DNA, 15 bp, Homo sapiens
tttcttcacaagtta

SEQ ID NO: 1191276 - DNA, 15 bp, Homo sapiens
ctttcttcacaagtt

SEQ ID NO: 1191277 - DNA, 15 bp, Homo sapiens
tctttcttcacaagt

SEQ ID NO: 1191278 - DNA, 15 bp, Homo sapiens
atctttcttcacaag

SEQ ID NO: 1191279 - DNA, 15 bp, Homo sapiens
tatctttcttcacaa

SEQ ID NO: 1191280 - DNA, 15 bp, Homo sapiens
ttatctttcttcaca

SEQ ID NO: 1191281 - DNA, 15 bp, Homo sapiens
tttatctttcttcac

SEQ ID NO: 1191282 - DNA, 15 bp, Homo sapiens
atttatctttcttca

SEQ ID NO: 1191283 - DNA, 15 bp, Homo sapiens
aatttatctttcttc

SEQ ID NO: 1191284 - DNA, 15 bp, Homo sapiens
taatttatctttctt

SEQ ID NO: 1191285 - DNA, 15 bp, Homo sapiens
ataatttatctttct

SEQ ID NO: 1191286 - DNA, 15 bp, Homo sapiens
tataatttatctttc

SEQ ID NO: 1191287 - DNA, 15 bp, Homo sapiens
ctataatttatcttt

SEQ ID NO: 1191288 - DNA, 15 bp, Homo sapiens
gctataatttatctt

SEQ ID NO: 1191289 - DNA, 15 bp, Homo sapiens
tgctataatttatct

SEQ ID NO: 1191290 - DNA, 15 bp, Homo sapiens
atgctataatttatc

SEQ ID NO: 1191291 - DNA, 15 bp, Homo sapiens
aatgctataatttat

SEQ ID NO: 1191292 - DNA, 15 bp, Homo sapiens
aaatgctataattta

SEQ ID NO: 1191293 - DNA, 15 bp, Homo sapiens
caaatgctataattt

SEQ ID NO: 1191294 - DNA, 15 bp, Homo sapiens
tcaaatgctataatt

SEQ ID NO: 1191295 - DNA, 15 bp, Homo sapiens
ttcaaatgctataat

SEQ ID NO: 1191296 - DNA, 15 bp, Homo sapiens
tttcaaatgctataa

SEQ ID NO: 1191297 - DNA, 15 bp, Homo sapiens
atttcaaatgctata

SEQ ID NO: 1191298 - DNA, 15 bp, Homo sapiens
catttcaaatgctat

SEQ ID NO: 1191299 - DNA, 15 bp, Homo sapiens
acatttcaaatgcta

SEQ ID NO: 1191300 - DNA, 15 bp, Homo sapiens
gacatttcaaatgct

SEQ ID NO: 1191301 - DNA, 15 bp, Homo sapiens
agacatttcaaatgc

SEQ ID NO: 1191302 - DNA, 15 bp, Homo sapiens
gagacatttcaaatg

SEQ ID NO: 1191303 - DNA, 15 bp, Homo sapiens
tgagacatttcaaat

SEQ ID NO: 1191304 - DNA, 15 bp, Homo sapiens
gtgagacatttcaaa

SEQ ID NO: 1191305 - DNA, 15 bp, Homo sapiens
tgtgagacatttcaa

SEQ ID NO: 1191306 - DNA, 15 bp, Homo sapiens
gtgtgagacatttca

SEQ ID NO: 1191307 - DNA, 15 bp, Homo sapiens
agtgtgagacatttc

SEQ ID NO: 1191308 - DNA, 15 bp, Homo sapiens
cagtgtgagacattt

SEQ ID NO: 1191309 - DNA, 15 bp, Homo sapiens
tcagtgtgagacatt

SEQ ID NO: 1191310 - DNA, 15 bp, Homo sapiens
ttcagtgtgagacat

SEQ ID NO: 1191311 - DNA, 15 bp, Homo sapiens
tttcagtgtgagaca

SEQ ID NO: 1191312 - DNA, 15 bp, Homo sapiens
atttcagtgtgagac

SEQ ID NO: 1191313 - DNA, 15 bp, Homo sapiens
tatttcagtgtgaga

SEQ ID NO: 1191314 - DNA, 15 bp, Homo sapiens
ctatttcagtgtgag

SEQ ID NO: 1191315 - DNA, 15 bp, Homo sapiens
cctatttcagtgtga

SEQ ID NO: 1191316 - DNA, 15 bp, Homo sapiens
tcctatttcagtgtg

SEQ ID NO: 1191317 - DNA, 15 bp, Homo sapiens
ttcctatttcagtgt

SEQ ID NO: 1191318 - DNA, 15 bp, Homo sapiens
tttcctatttcagtg

SEQ ID NO: 1191319 - DNA, 15 bp, Homo sapiens
ctttcctatttcagt

SEQ ID NO: 1191320 - DNA, 15 bp, Homo sapiens
tctttcctatttcag

SEQ ID NO: 1191321 - DNA, 15 bp, Homo sapiens
atctttcctatttca

SEQ ID NO: 1191322 - DNA, 15 bp, Homo sapiens
gatctttcctatttc

SEQ ID NO: 1191323 - DNA, 15 bp, Homo sapiens
tgatctttcctattt

SEQ ID NO: 1191324 - DNA, 15 bp, Homo sapiens
atgatctttcctatt

SEQ ID NO: 1191325 - DNA, 15 bp, Homo sapiens
aatgatctttcctat

SEQ ID NO: 1191326 - DNA, 15 bp, Homo sapiens
aaatgatctttccta

SEQ ID NO: 1191327 - DNA, 15 bp, Homo sapiens
gaaatgatctttcct

SEQ ID NO: 1191328 - DNA, 15 bp, Homo sapiens
tgaaatgatctttcc

SEQ ID NO: 1191329 - DNA, 15 bp, Homo sapiens
atgaaatgatctttc

SEQ ID NO: 1191330 - DNA, 15 bp, Homo sapiens
aatgaaatgatcttt

SEQ ID NO: 1191331 - DNA, 15 bp, Homo sapiens
taatgaaatgatctt

SEQ ID NO: 1191332 - DNA, 15 bp, Homo sapiens
ttaatgaaatgatct

SEQ ID NO: 1191333 - DNA, 15 bp, Homo sapiens
cttaatgaaatgatc

SEQ ID NO: 1191334 - DNA, 15 bp, Homo sapiens
ccttaatgaaatgat

SEQ ID NO: 1191335 - DNA, 15 bp, Homo sapiens
tccttaatgaaatga

SEQ ID NO: 1191336 - DNA, 15 bp, Homo sapiens
ttccttaatgaaatg

SEQ ID NO: 1191337 - DNA, 15 bp, Homo sapiens
tttccttaatgaaat

SEQ ID NO: 1191338 - DNA, 15 bp, Homo sapiens
gtttccttaatgaaa

SEQ ID NO: 1191339 - DNA, 15 bp, Homo sapiens
ggtttccttaatgaa

SEQ ID NO: 1191340 - DNA, 15 bp, Homo sapiens
tggtttccttaatga

SEQ ID NO: 1191341 - DNA, 15 bp, Homo sapiens
gtggtttccttaatg

SEQ ID NO: 1191342 - DNA, 15 bp, Homo sapiens
tgtggtttccttaat

SEQ ID NO: 1191343 - DNA, 15 bp, Homo sapiens
ctgtggtttccttaa

SEQ ID NO: 1191344 - DNA, 15 bp, Homo sapiens
actgtggtttcctta

SEQ ID NO: 1191345 - DNA, 15 bp, Homo sapiens
tactgtggtttcctt

SEQ ID NO: 1191346 - DNA, 15 bp, Homo sapiens
ttactgtggtttcct

SEQ ID NO: 1191347 - DNA, 15 bp, Homo sapiens
tttactgtggtttcc

SEQ ID NO: 1191348 - DNA, 15 bp, Homo sapiens
ttttactgtggtttc

SEQ ID NO: 1191349 - DNA, 15 bp, Homo sapiens
attttactgtggttt

SEQ ID NO: 1191350 - DNA, 15 bp, Homo sapiens
aattttactgtggtt

SEQ ID NO: 1191351 - DNA, 15 bp, Homo sapiens
gaattttactgtggt

SEQ ID NO: 1191352 - DNA, 15 bp, Homo sapiens
agaattttactgtgg

SEQ ID NO: 1191353 - DNA, 15 bp, Homo sapiens
tagaattttactgtg

SEQ ID NO: 1191354 - DNA, 15 bp, Homo sapiens
atagaattttactgt

SEQ ID NO: 1191355 - DNA, 15 bp, Homo sapiens
aatagaattttactg

SEQ ID NO: 1191356 - DNA, 15 bp, Homo sapiens
aaatagaattttact

SEQ ID NO: 1191357 - DNA, 15 bp, Homo sapiens
gaaatagaattttac

SEQ ID NO: 1191358 - DNA, 15 bp, Homo sapiens
agaaatagaatttta

SEQ ID NO: 1191359 - DNA, 15 bp, Homo sapiens
aagaaatagaatttt

SEQ ID NO: 1191360 - DNA, 15 bp, Homo sapiens
ctaagaaatagaatt

SEQ ID NO: 1191361 - DNA, 15 bp, Homo sapiens
tctaagaaatagaat

SEQ ID NO: 1191362 - DNA, 15 bp, Homo sapiens
ttctaagaaatagaa

SEQ ID NO: 1191363 - DNA, 15 bp, Homo sapiens
gttctaagaaataga

SEQ ID NO: 1191364 - DNA, 15 bp, Homo sapiens
tgttctaagaaatag

SEQ ID NO: 1191365 - DNA, 15 bp, Homo sapiens
ctgttctaagaaata

SEQ ID NO: 1191366 - DNA, 15 bp, Homo sapiens
actgttctaagaaat

SEQ ID NO: 1191367 - DNA, 15 bp, Homo sapiens
tactgttctaagaaa

SEQ ID NO: 1191368 - DNA, 15 bp, Homo sapiens
atactgttctaagaa

SEQ ID NO: 1191369 - DNA, 15 bp, Homo sapiens
aatactgttctaaga

SEQ ID NO: 1191370 - DNA, 15 bp, Homo sapiens
aaatactgttctaag

SEQ ID NO: 1191371 - DNA, 15 bp, Homo sapiens
taaatactgttctaa

SEQ ID NO: 1191372 - DNA, 15 bp, Homo sapiens
ttaaatactgttcta

SEQ ID NO: 1191373 - DNA, 15 bp, Homo sapiens
cttaaatactgttct

SEQ ID NO: 1191374 - DNA, 15 bp, Homo sapiens
ccttaaatactgttc

SEQ ID NO: 1191375 - DNA, 15 bp, Homo sapiens
tccttaaatactgtt

SEQ ID NO: 1191376 - DNA, 15 bp, Homo sapiens
atccttaaatactgt

SEQ ID NO: 1191377 - DNA, 15 bp, Homo sapiens
catccttaaatactg

SEQ ID NO: 1191378 - DNA, 15 bp, Homo sapiens
acatccttaaatact

SEQ ID NO: 1191379 - DNA, 15 bp, Homo sapiens
cacatccttaaatac

SEQ ID NO: 1191380 - DNA, 15 bp, Homo sapiens
ccacatccttaaata

SEQ ID NO: 1191381 - DNA, 15 bp, Homo sapiens
tccacatccttaaat

SEQ ID NO: 1191382 - DNA, 15 bp, Homo sapiens
ctccacatccttaaa

SEQ ID NO: 1191383 - DNA, 15 bp, Homo sapiens
cctccacatccttaa

SEQ ID NO: 1191384 - DNA, 15 bp, Homo sapiens
gcctccacatcctta

SEQ ID NO: 1191385 - DNA, 15 bp, Homo sapiens
tgcctccacatcctt

SEQ ID NO: 1191386 - DNA, 15 bp, Homo sapiens
atgcctccacatcct

SEQ ID NO: 1191387 - DNA, 15 bp, Homo sapiens
aatgcctccacatcc

SEQ ID NO: 1191388 - DNA, 15 bp, Homo sapiens
caatgcctccacatc

SEQ ID NO: 1191389 - DNA, 15 bp, Homo sapiens
ccaatgcctccacat

SEQ ID NO: 1191390 - DNA, 15 bp, Homo sapiens
accaatgcctccaca

SEQ ID NO: 1191391 - DNA, 15 bp, Homo sapiens
taccaatgcctccac

SEQ ID NO: 1191392 - DNA, 15 bp, Homo sapiens
ttaccaatgcctcca

SEQ ID NO: 1191393 - DNA, 15 bp, Homo sapiens
tttaccaatgcctcc

SEQ ID NO: 1191394 - DNA, 15 bp, Homo sapiens
atttaccaatgcctc

SEQ ID NO: 1191395 - DNA, 15 bp, Homo sapiens
aatttaccaatgcct

SEQ ID NO: 1191396 - DNA, 15 bp, Homo sapiens
taatttaccaatgcc

SEQ ID NO: 1191397 - DNA, 15 bp, Homo sapiens
ataatttaccaatgc

SEQ ID NO: 1191398 - DNA, 15 bp, Homo sapiens
gataatttaccaatg

SEQ ID NO: 1191399 - DNA, 15 bp, Homo sapiens
tgataatttaccaat

SEQ ID NO: 1191400 - DNA, 15 bp, Homo sapiens
ctgataatttaccaa

SEQ ID NO: 1191401 - DNA, 15 bp, Homo sapiens
tctgataatttacca

SEQ ID NO: 1191402 - DNA, 15 bp, Homo sapiens
gtctgataatttacc

SEQ ID NO: 1191403 - DNA, 15 bp, Homo sapiens
agtctgataatttac

SEQ ID NO: 1191404 - DNA, 15 bp, Homo sapiens
tagtctgataattta

SEQ ID NO: 1191405 - DNA, 15 bp, Homo sapiens
ctagtctgataattt

SEQ ID NO: 1191406 - DNA, 15 bp, Homo sapiens
actagtctgataatt

SEQ ID NO: 1191407 - DNA, 15 bp, Homo sapiens
tactagtctgataat

SEQ ID NO: 1191408 - DNA, 15 bp, Homo sapiens
atactagtctgataa

SEQ ID NO: 1191409 - DNA, 15 bp, Homo sapiens
aatactagtctgata

SEQ ID NO: 1191410 - DNA, 15 bp, Homo sapiens
caatactagtctgat

SEQ ID NO: 1191411 - DNA, 15 bp, Homo sapiens
acaatactagtctga

SEQ ID NO: 1191412 - DNA, 15 bp, Homo sapiens
gacaatactagtctg

SEQ ID NO: 1191413 - DNA, 15 bp, Homo sapiens
tgacaatactagtct

SEQ ID NO: 1191414 - DNA, 15 bp, Homo sapiens
ttgacaatactagtc

SEQ ID NO: 1191415 - DNA, 15 bp, Homo sapiens
attgacaatactagt

SEQ ID NO: 1191416 - DNA, 15 bp, Homo sapiens
aattgacaatactag

SEQ ID NO: 1191417 - DNA, 15 bp, Homo sapiens
aaattgacaatacta

SEQ ID NO: 1191418 - DNA, 15 bp, Homo sapiens
aaaattgacaatact

SEQ ID NO: 1191419 - DNA, 15 bp, Homo sapiens
aaaaattgacaatac

SEQ ID NO: 1191420 - DNA, 15 bp, Homo sapiens
taaaaattgacaata

SEQ ID NO: 1191421 - DNA, 15 bp, Homo sapiens
ataaaaattgacaat

SEQ ID NO: 1191422 - DNA, 15 bp, Homo sapiens
tataaaaattgacaa

SEQ ID NO: 1191423 - DNA, 15 bp, Homo sapiens
ttataaaaattgaca

SEQ ID NO: 1191424 - DNA, 15 bp, Homo sapiens
tttataaaaattgac

SEQ ID NO: 1191425 - DNA, 15 bp, Homo sapiens
ttttataaaaattga

SEQ ID NO: 1191426 - DNA, 15 bp, Homo sapiens
cttttataaaaattg

SEQ ID NO: 1191427 - DNA, 15 bp, Homo sapiens
ccttttataaaaatt

SEQ ID NO: 1191428 - DNA, 15 bp, Homo sapiens
accttttataaaaat

SEQ ID NO: 1191429 - DNA, 15 bp, Homo sapiens
gaccttttataaaaa

SEQ ID NO: 1191430 - DNA, 15 bp, Homo sapiens
agaccttttataaaa

SEQ ID NO: 1191431 - DNA, 15 bp, Homo sapiens
aagaccttttataaa

SEQ ID NO: 1191432 - DNA, 15 bp, Homo sapiens
aaagaccttttataa

SEQ ID NO: 1191433 - DNA, 15 bp, Homo sapiens
caaagaccttttata

SEQ ID NO: 1191434 - DNA, 15 bp, Homo sapiens
tcaaagaccttttat

SEQ ID NO: 1191435 - DNA, 15 bp, Homo sapiens
gtcaaagacctttta

SEQ ID NO: 1191436 - DNA, 15 bp, Homo sapiens
tgtcaaagacctttt

SEQ ID NO: 1191437 - DNA, 15 bp, Homo sapiens
atgtcaaagaccttt

SEQ ID NO: 1191438 - DNA, 15 bp, Homo sapiens
catgtcaaagacctt

SEQ ID NO: 1191439 - DNA, 15 bp, Homo sapiens
ccatgtcaaagacct

SEQ ID NO: 1191440 - DNA, 15 bp, Homo sapiens
tccatgtcaaagacc

SEQ ID NO: 1191441 - DNA, 15 bp, Homo sapiens
atccatgtcaaagac

SEQ ID NO: 1191442 - DNA, 15 bp, Homo sapiens
catccatgtcaaaga

SEQ ID NO: 1191443 - DNA, 15 bp, Homo sapiens
tcatccatgtcaaag

SEQ ID NO: 1191444 - DNA, 15 bp, Homo sapiens
atcatccatgtcaaa

SEQ ID NO: 1191445 - DNA, 15 bp, Homo sapiens
aatcatccatgtcaa

SEQ ID NO: 1191446 - DNA, 15 bp, Homo sapiens
taatcatccatgtca

SEQ ID NO: 1191447 - DNA, 15 bp, Homo sapiens
ataatcatccatgtc

SEQ ID NO: 1191448 - DNA, 15 bp, Homo sapiens
cataatcatccatgt

SEQ ID NO: 1191449 - DNA, 15 bp, Homo sapiens
ccataatcatccatg

SEQ ID NO: 1191450 - DNA, 15 bp, Homo sapiens
accataatcatccat

SEQ ID NO: 1191451 - DNA, 15 bp, Homo sapiens
caccataatcatcca

SEQ ID NO: 1191452 - DNA, 15 bp, Homo sapiens
acaccataatcatcc

SEQ ID NO: 1191453 - DNA, 15 bp, Homo sapiens
tacaccataatcatc

SEQ ID NO: 1191454 - DNA, 15 bp, Homo sapiens
ttacaccataatcat

SEQ ID NO: 1191455 - DNA, 15 bp, Homo sapiens
attacaccataatca

SEQ ID NO: 1191456 - DNA, 15 bp, Homo sapiens
tattacaccataatc

SEQ ID NO: 1191457 - DNA, 15 bp, Homo sapiens
ctattacaccataat

SEQ ID NO: 1191458 - DNA, 15 bp, Homo sapiens
actattacaccataa

SEQ ID NO: 1191459 - DNA, 15 bp, Homo sapiens
aactattacaccata

SEQ ID NO: 1191460 - DNA, 15 bp, Homo sapiens
taactattacaccat

SEQ ID NO: 1191461 - DNA, 15 bp, Homo sapiens
gtaactattacacca

SEQ ID NO: 1191462 - DNA, 15 bp, Homo sapiens
tgtaactattacacc

SEQ ID NO: 1191463 - DNA, 15 bp, Homo sapiens
gtgtaactattacac

SEQ ID NO: 1191464 - DNA, 15 bp, Homo sapiens
tgtgtaactattaca

SEQ ID NO: 1191465 - DNA, 15 bp, Homo sapiens
ttgtgtaactattac

SEQ ID NO: 1191466 - DNA, 15 bp, Homo sapiens
attgtgtaactatta

SEQ ID NO: 1191467 - DNA, 15 bp, Homo sapiens
cattgtgtaactatt

SEQ ID NO: 1191468 - DNA, 15 bp, Homo sapiens
acattgtgtaactat

SEQ ID NO: 1191469 - DNA, 15 bp, Homo sapiens
gacattgtgtaacta

SEQ ID NO: 1191470 - DNA, 15 bp, Homo sapiens
agacattgtgtaact

SEQ ID NO: 1191471 - DNA, 15 bp, Homo sapiens
aagacattgtgtaac

SEQ ID NO: 1191472 - DNA, 15 bp, Homo sapiens
taagacattgtgtaa

SEQ ID NO: 1191473 - DNA, 15 bp, Homo sapiens
gtaagacattgtgta

SEQ ID NO: 1191474 - DNA, 15 bp, Homo sapiens
tgtaagacattgtgt

SEQ ID NO: 1191475 - DNA, 15 bp, Homo sapiens
ctgtaagacattgtg

SEQ ID NO: 1191476 - DNA, 15 bp, Homo sapiens
tctgtaagacattgt

SEQ ID NO: 1191477 - DNA, 15 bp, Homo sapiens
atctgtaagacattg

SEQ ID NO: 1191478 - DNA, 15 bp, Homo sapiens
aatctgtaagacatt

SEQ ID NO: 1191479 - DNA, 15 bp, Homo sapiens
taatctgtaagacat

SEQ ID NO: 1191480 - DNA, 15 bp, Homo sapiens
ataatctgtaagaca

SEQ ID NO: 1191481 - DNA, 15 bp, Homo sapiens
tataatctgtaagac

SEQ ID NO: 1191482 - DNA, 15 bp, Homo sapiens
atataatctgtaaga

SEQ ID NO: 1191483 - DNA, 15 bp, Homo sapiens
tatataatctgtaag

SEQ ID NO: 1191484 - DNA, 15 bp, Homo sapiens
atatataatctgtaa

SEQ ID NO: 1191485 - DNA, 15 bp, Homo sapiens
catatataatctgta

SEQ ID NO: 1191486 - DNA, 15 bp, Homo sapiens
acatatataatctgt

SEQ ID NO: 1191487 - DNA, 15 bp, Homo sapiens
gacatatataatctg

SEQ ID NO: 1191488 - DNA, 15 bp, Homo sapiens
tgacatatataatct

SEQ ID NO: 1191489 - DNA, 15 bp, Homo sapiens
gtgacatatataatc

SEQ ID NO: 1191490 - DNA, 15 bp, Homo sapiens
tgtgacatatataat

SEQ ID NO: 1191491 - DNA, 15 bp, Homo sapiens
atgtgacatatataa

SEQ ID NO: 1191492 - DNA, 15 bp, Homo sapiens
gatgtgacatatata

SEQ ID NO: 1191493 - DNA, 15 bp, Homo sapiens
tgatgtgacatatat

SEQ ID NO: 1191494 - DNA, 15 bp, Homo sapiens
ctgatgtgacatata

SEQ ID NO: 1191495 - DNA, 15 bp, Homo sapiens
actgatgtgacatat

SEQ ID NO: 1191496 - DNA, 15 bp, Homo sapiens
aactgatgtgacata

SEQ ID NO: 1191497 - DNA, 15 bp, Homo sapiens
taactgatgtgacat

SEQ ID NO: 1191498 - DNA, 15 bp, Homo sapiens
ataactgatgtgaca

SEQ ID NO: 1191499 - DNA, 15 bp, Homo sapiens
tataactgatgtgac

SEQ ID NO: 1191500 - DNA, 15 bp, Homo sapiens
ctataactgatgtga

SEQ ID NO: 1191501 - DNA, 15 bp, Homo sapiens
tctataactgatgtg

SEQ ID NO: 1191502 - DNA, 15 bp, Homo sapiens
gtctataactgatgt

SEQ ID NO: 1191503 - DNA, 15 bp, Homo sapiens
tgtctataactgatg

SEQ ID NO: 1191504 - DNA, 15 bp, Homo sapiens
ttgtctataactgat

SEQ ID NO: 1191505 - DNA, 15 bp, Homo sapiens
attgtctataactga

SEQ ID NO: 1191506 - DNA, 15 bp, Homo sapiens
aattgtctataactg

SEQ ID NO: 1191507 - DNA, 15 bp, Homo sapiens
gaattgtctataact

SEQ ID NO: 1191508 - DNA, 15 bp, Homo sapiens
agaattgtctataac

SEQ ID NO: 1191509 - DNA, 15 bp, Homo sapiens
cagaattgtctataa

SEQ ID NO: 1191510 - DNA, 15 bp, Homo sapiens
ccagaattgtctata

SEQ ID NO: 1191511 - DNA, 15 bp, Homo sapiens
tccagaattgtctat

SEQ ID NO: 1191512 - DNA, 15 bp, Homo sapiens
ctccagaattgtcta

SEQ ID NO: 1191513 - DNA, 15 bp, Homo sapiens
tctccagaattgtct

SEQ ID NO: 1191514 - DNA, 15 bp, Homo sapiens
atctccagaattgtc

SEQ ID NO: 1191515 - DNA, 15 bp, Homo sapiens
catctccagaattgt

SEQ ID NO: 1191516 - DNA, 15 bp, Homo sapiens
tcatctccagaattg

SEQ ID NO: 1191517 - DNA, 15 bp, Homo sapiens
atcatctccagaatt

SEQ ID NO: 1191518 - DNA, 15 bp, Homo sapiens
tatcatctccagaat

SEQ ID NO: 1191519 - DNA, 15 bp, Homo sapiens
ttatcatctccagaa

SEQ ID NO: 1191520 - DNA, 15 bp, Homo sapiens
attatcatctccaga

SEQ ID NO: 1191521 - DNA, 15 bp, Homo sapiens
gattatcatctccag

SEQ ID NO: 1191522 - DNA, 15 bp, Homo sapiens
agattatcatctcca

SEQ ID NO: 1191523 - DNA, 15 bp, Homo sapiens
tagattatcatctcc

SEQ ID NO: 1191524 - DNA, 15 bp, Homo sapiens
atagattatcatctc

SEQ ID NO: 1191525 - DNA, 15 bp, Homo sapiens
aatagattatcatct

SEQ ID NO: 1191526 - DNA, 15 bp, Homo sapiens
taatagattatcatc

SEQ ID NO: 1191527 - DNA, 15 bp, Homo sapiens
ttaatagattatcat

SEQ ID NO: 1191528 - DNA, 15 bp, Homo sapiens
tttaatagattatca

SEQ ID NO: 1191529 - DNA, 15 bp, Homo sapiens
ctttaatagattatc

SEQ ID NO: 1191530 - DNA, 15 bp, Homo sapiens
actttaatagattat

SEQ ID NO: 1191531 - DNA, 15 bp, Homo sapiens
tactttaatagatta

SEQ ID NO: 1191532 - DNA, 15 bp, Homo sapiens
ctactttaatagatt

SEQ ID NO: 1191533 - DNA, 15 bp, Homo sapiens
actactttaatagat

SEQ ID NO: 1191534 - DNA, 15 bp, Homo sapiens
aactactttaataga

SEQ ID NO: 1191535 - DNA, 15 bp, Homo sapiens
gaactactttaatag

SEQ ID NO: 1191536 - DNA, 15 bp, Homo sapiens
tgaactactttaata

SEQ ID NO: 1191537 - DNA, 15 bp, Homo sapiens
ttgaactactttaat

SEQ ID NO: 1191538 - DNA, 15 bp, Homo sapiens
tttgaactactttaa

SEQ ID NO: 1191539 - DNA, 15 bp, Homo sapiens
ctttgaactacttta

SEQ ID NO: 1191540 - DNA, 15 bp, Homo sapiens
tctttgaactacttt

SEQ ID NO: 1191541 - DNA, 15 bp, Homo sapiens
ctctttgaactactt

SEQ ID NO: 1191542 - DNA, 15 bp, Homo sapiens
tctctttgaactact

SEQ ID NO: 1191543 - DNA, 15 bp, Homo sapiens
ctctctttgaactac

SEQ ID NO: 1191544 - DNA, 15 bp, Homo sapiens
actctctttgaacta

SEQ ID NO: 1191545 - DNA, 15 bp, Homo sapiens
gactctctttgaact

SEQ ID NO: 1191546 - DNA, 15 bp, Homo sapiens
ggactctctttgaac

SEQ ID NO: 1191547 - DNA, 15 bp, Homo sapiens
gggactctctttgaa

SEQ ID NO: 1191548 - DNA, 15 bp, Homo sapiens
tgggactctctttga

SEQ ID NO: 1191549 - DNA, 15 bp, Homo sapiens
gtgggactctctttg

SEQ ID NO: 1191550 - DNA, 15 bp, Homo sapiens
tgtgggactctcttt

SEQ ID NO: 1191551 - DNA, 15 bp, Homo sapiens
ctgtgggactctctt

SEQ ID NO: 1191552 - DNA, 15 bp, Homo sapiens
cctgtgggactctct

SEQ ID NO: 1191553 - DNA, 15 bp, Homo sapiens
tcctgtgggactctc

SEQ ID NO: 1191554 - DNA, 15 bp, Homo sapiens
ttcctgtgggactct

SEQ ID NO: 1191555 - DNA, 15 bp, Homo sapiens
gttcctgtgggactc

SEQ ID NO: 1191556 - DNA, 15 bp, Homo sapiens
ggttcctgtgggact

SEQ ID NO: 1191557 - DNA, 15 bp, Homo sapiens
aggttcctgtgggac

SEQ ID NO: 1191558 - DNA, 15 bp, Homo sapiens
gaggttcctgtggga

SEQ ID NO: 1191559 - DNA, 15 bp, Homo sapiens
agaggttcctgtggg

SEQ ID NO: 1191560 - DNA, 15 bp, Homo sapiens
aagaggttcctgtgg

SEQ ID NO: 1191561 - DNA, 15 bp, Homo sapiens
aaagaggttcctgtg

SEQ ID NO: 1191562 - DNA, 15 bp, Homo sapiens
aaaagaggttcctgt

SEQ ID NO: 1191563 - DNA, 15 bp, Homo sapiens
caaaagaggttcctg

SEQ ID NO: 1191564 - DNA, 15 bp, Homo sapiens
tcaaaagaggttcct

SEQ ID NO: 1191565 - DNA, 15 bp, Homo sapiens
ttcaaaagaggttcc

SEQ ID NO: 1191566 - DNA, 15 bp, Homo sapiens
tttcaaaagaggttc

SEQ ID NO: 1191567 - DNA, 15 bp, Homo sapiens
atttcaaaagaggtt

SEQ ID NO: 1191568 - DNA, 15 bp, Homo sapiens
gatttcaaaagaggt

SEQ ID NO: 1191569 - DNA, 15 bp, Homo sapiens
tgatttcaaaagagg

SEQ ID NO: 1191570 - DNA, 15 bp, Homo sapiens
gtgatttcaaaagag

SEQ ID NO: 1191571 - DNA, 15 bp, Homo sapiens
agtgatttcaaaaga

SEQ ID NO: 1191572 - DNA, 15 bp, Homo sapiens
cagtgatttcaaaag

SEQ ID NO: 1191573 - DNA, 15 bp, Homo sapiens
tcagtgatttcaaaa

SEQ ID NO: 1191574 - DNA, 15 bp, Homo sapiens
atcagtgatttcaaa

SEQ ID NO: 1191575 - DNA, 15 bp, Homo sapiens
aatcagtgatttcaa

SEQ ID NO: 1191576 - DNA, 15 bp, Homo sapiens
aaatcagtgatttca

SEQ ID NO: 1191577 - DNA, 15 bp, Homo sapiens
gaaatcagtgatttc

SEQ ID NO: 1191578 - DNA, 15 bp, Homo sapiens
tgaaatcagtgattt

SEQ ID NO: 1191579 - DNA, 15 bp, Homo sapiens
ttgaaatcagtgatt

SEQ ID NO: 1191580 - DNA, 15 bp, Homo sapiens
gttgaaatcagtgat

SEQ ID NO: 1191581 - DNA, 15 bp, Homo sapiens
agttgaaatcagtga

SEQ ID NO: 1191582 - DNA, 15 bp, Homo sapiens
aagttgaaatcagtg

SEQ ID NO: 1191583 - DNA, 15 bp, Homo sapiens
taagttgaaatcagt

SEQ ID NO: 1191584 - DNA, 15 bp, Homo sapiens
gtaagttgaaatcag

SEQ ID NO: 1191585 - DNA, 15 bp, Homo sapiens
agtaagttgaaatca

SEQ ID NO: 1191586 - DNA, 15 bp, Homo sapiens
tagtaagttgaaatc

SEQ ID NO: 1191587 - DNA, 15 bp, Homo sapiens
ttagtaagttgaaat

SEQ ID NO: 1191588 - DNA, 15 bp, Homo sapiens
tttagtaagttgaaa

SEQ ID NO: 1191589 - DNA, 15 bp, Homo sapiens
ctttagtaagttgaa

SEQ ID NO: 1191590 - DNA, 15 bp, Homo sapiens
tctttagtaagttga

SEQ ID NO: 1191591 - DNA, 15 bp, Homo sapiens
atctttagtaagttg

SEQ ID NO: 1191592 - DNA, 15 bp, Homo sapiens
tatctttagtaagtt

SEQ ID NO: 1191593 - DNA, 15 bp, Homo sapiens
atatctttagtaagt

SEQ ID NO: 1191594 - DNA, 15 bp, Homo sapiens
catatctttagtaag

SEQ ID NO: 1191595 - DNA, 15 bp, Homo sapiens
ccatatctttagtaa

SEQ ID NO: 1191596 - DNA, 15 bp, Homo sapiens
cccatatctttagta

SEQ ID NO: 1191597 - DNA, 15 bp, Homo sapiens
acccatatctttagt

SEQ ID NO: 1191598 - DNA, 15 bp, Homo sapiens
cacccatatctttag

SEQ ID NO: 1191599 - DNA, 15 bp, Homo sapiens
acacccatatcttta

SEQ ID NO: 1191600 - DNA, 15 bp, Homo sapiens
tacacccatatcttt

SEQ ID NO: 1191601 - DNA, 15 bp, Homo sapiens
gtacacccatatctt

SEQ ID NO: 1191602 - DNA, 15 bp, Homo sapiens
tgtacacccatatct

SEQ ID NO: 1191603 - DNA, 15 bp, Homo sapiens
ttgtacacccatatc

SEQ ID NO: 1191604 - DNA, 15 bp, Homo sapiens
gttgtacacccatat

SEQ ID NO: 1191605 - DNA, 15 bp, Homo sapiens
tgttgtacacccata

SEQ ID NO: 1191606 - DNA, 15 bp, Homo sapiens
atgttgtacacccat

SEQ ID NO: 1191607 - DNA, 15 bp, Homo sapiens
tatgttgtacaccca

SEQ ID NO: 1191608 - DNA, 15 bp, Homo sapiens
ttatgttgtacaccc

SEQ ID NO: 1191609 - DNA, 15 bp, Homo sapiens
cttatgttgtacacc

SEQ ID NO: 1191610 - DNA, 15 bp, Homo sapiens
acttatgttgtacac

SEQ ID NO: 1191611 - DNA, 15 bp, Homo sapiens
cacttatgttgtaca

SEQ ID NO: 1191612 - DNA, 15 bp, Homo sapiens
ccacttatgttgtac

SEQ ID NO: 1191613 - DNA, 15 bp, Homo sapiens
tccacttatgttgta

SEQ ID NO: 1191614 - DNA, 15 bp, Homo sapiens
ttccacttatgttgt

SEQ ID NO: 1191615 - DNA, 15 bp, Homo sapiens
tttccacttatgttg

SEQ ID NO: 1191616 - DNA, 15 bp, Homo sapiens
gtttccacttatgtt

SEQ ID NO: 1191617 - DNA, 15 bp, Homo sapiens
tgtttccacttatgt

SEQ ID NO: 1191618 - DNA, 15 bp, Homo sapiens
atgtttccacttatg

SEQ ID NO: 1191619 - DNA, 15 bp, Homo sapiens
aatgtttccacttat

SEQ ID NO: 1191620 - DNA, 15 bp, Homo sapiens
aaatgtttccactta

SEQ ID NO: 1191621 - DNA, 15 bp, Homo sapiens
aaaatgtttccactt

SEQ ID NO: 1191622 - DNA, 15 bp, Homo sapiens
gaaaatgtttccact

SEQ ID NO: 1191623 - DNA, 15 bp, Homo sapiens
agaaaatgtttccac

SEQ ID NO: 1191624 - DNA, 15 bp, Homo sapiens
tagaaaatgtttcca

SEQ ID NO: 1191625 - DNA, 15 bp, Homo sapiens
gtagaaaatgtttcc

SEQ ID NO: 1191626 - DNA, 15 bp, Homo sapiens
agtagaaaatgtttc

SEQ ID NO: 1191627 - DNA, 15 bp, Homo sapiens
tagtagaaaatgttt

SEQ ID NO: 1191628 - DNA, 15 bp, Homo sapiens
atagtagaaaatgtt

SEQ ID NO: 1191629 - DNA, 15 bp, Homo sapiens
aatagtagaaaatgt

SEQ ID NO: 1191630 - DNA, 15 bp, Homo sapiens
gaatagtagaaaatg

SEQ ID NO: 1191631 - DNA, 15 bp, Homo sapiens
tgaatagtagaaaat

SEQ ID NO: 1191632 - DNA, 15 bp, Homo sapiens
atgaatagtagaaaa

SEQ ID NO: 1191633 - DNA, 15 bp, Homo sapiens
tatgaatagtagaaa

SEQ ID NO: 1191634 - DNA, 15 bp, Homo sapiens
atatgaatagtagaa

SEQ ID NO: 1191635 - DNA, 15 bp, Homo sapiens
catatgaatagtaga

SEQ ID NO: 1191636 - DNA, 15 bp, Homo sapiens
gcatatgaatagtag

SEQ ID NO: 1191637 - DNA, 15 bp, Homo sapiens
tgcatatgaatagta

SEQ ID NO: 1191638 - DNA, 15 bp, Homo sapiens
ctgcatatgaatagt

SEQ ID NO: 1191639 - DNA, 15 bp, Homo sapiens
tctgcatatgaatag

SEQ ID NO: 1191640 - DNA, 15 bp, Homo sapiens
atctgcatatgaata

SEQ ID NO: 1191641 - DNA, 15 bp, Homo sapiens
catctgcatatgaat

SEQ ID NO: 1191642 - DNA, 15 bp, Homo sapiens
tcatctgcatatgaa

SEQ ID NO: 1191643 - DNA, 15 bp, Homo sapiens
ttcatctgcatatga

SEQ ID NO: 1191644 - DNA, 15 bp, Homo sapiens
attcatctgcatatg

SEQ ID NO: 1191645 - DNA, 15 bp, Homo sapiens
aattcatctgcatat

SEQ ID NO: 1191646 - DNA, 15 bp, Homo sapiens
aaattcatctgcata

SEQ ID NO: 1191647 - DNA, 15 bp, Homo sapiens
gaaattcatctgcat

SEQ ID NO: 1191648 - DNA, 15 bp, Homo sapiens
tgaaattcatctgca

SEQ ID NO: 1191649 - DNA, 15 bp, Homo sapiens
atgaaattcatctgc

SEQ ID NO: 1191650 - DNA, 15 bp, Homo sapiens
aatgaaattcatctg

SEQ ID NO: 1191651 - DNA, 15 bp, Homo sapiens
gaatgaaattcatct

SEQ ID NO: 1191652 - DNA, 15 bp, Homo sapiens
agaatgaaattcatc

SEQ ID NO: 1191653 - DNA, 15 bp, Homo sapiens
tagaatgaaattcat

SEQ ID NO: 1191654 - DNA, 15 bp, Homo sapiens
ctagaatgaaattca

SEQ ID NO: 1191655 - DNA, 15 bp, Homo sapiens
gctagaatgaaattc

SEQ ID NO: 1191656 - DNA, 15 bp, Homo sapiens
agctagaatgaaatt

SEQ ID NO: 1191657 - DNA, 15 bp, Homo sapiens
gagctagaatgaaat

SEQ ID NO: 1191658 - DNA, 15 bp, Homo sapiens
tgagctagaatgaaa

SEQ ID NO: 1191659 - DNA, 15 bp, Homo sapiens
ctgagctagaatgaa

SEQ ID NO: 1191660 - DNA, 15 bp, Homo sapiens
tctgagctagaatga

SEQ ID NO: 1191661 - DNA, 15 bp, Homo sapiens
ttctgagctagaatg

SEQ ID NO: 1191662 - DNA, 15 bp, Homo sapiens
tttctgagctagaat

SEQ ID NO: 1191663 - DNA, 15 bp, Homo sapiens
gtttctgagctagaa

SEQ ID NO: 1191664 - DNA, 15 bp, Homo sapiens
tgtttctgagctaga

SEQ ID NO: 1191665 - DNA, 15 bp, Homo sapiens
atgtttctgagctag

SEQ ID NO: 1191666 - DNA, 15 bp, Homo sapiens
aatgtttctgagcta

SEQ ID NO: 1191667 - DNA, 15 bp, Homo sapiens
aaatgtttctgagct

SEQ ID NO: 1191668 - DNA, 15 bp, Homo sapiens
caaatgtttctgagc

SEQ ID NO: 1191669 - DNA, 15 bp, Homo sapiens
ccaaatgtttctgag

SEQ ID NO: 1191670 - DNA, 15 bp, Homo sapiens
tccaaatgtttctga

SEQ ID NO: 1191671 - DNA, 15 bp, Homo sapiens
ttccaaatgtttctg

SEQ ID NO: 1191672 - DNA, 15 bp, Homo sapiens
tttccaaatgtttct

SEQ ID NO: 1191673 - DNA, 15 bp, Homo sapiens
ttttccaaatgtttc

SEQ ID NO: 1191674 - DNA, 15 bp, Homo sapiens
gttttccaaatgttt

SEQ ID NO: 1191675 - DNA, 15 bp, Homo sapiens
agttttccaaatgtt

SEQ ID NO: 1191676 - DNA, 15 bp, Homo sapiens
cagttttccaaatgt

SEQ ID NO: 1191677 - DNA, 15 bp, Homo sapiens
tcagttttccaaatg

SEQ ID NO: 1191678 - DNA, 15 bp, Homo sapiens
gtcagttttccaaat

SEQ ID NO: 1191679 - DNA, 15 bp, Homo sapiens
tgtcagttttccaaa

SEQ ID NO: 1191680 - DNA, 15 bp, Homo sapiens
atgtcagttttccaa

SEQ ID NO: 1191681 - DNA, 15 bp, Homo sapiens
gatgtcagttttcca

SEQ ID NO: 1191682 - DNA, 15 bp, Homo sapiens
tgatgtcagttttcc

SEQ ID NO: 1191683 - DNA, 15 bp, Homo sapiens
gtgatgtcagttttc

SEQ ID NO: 1191684 - DNA, 15 bp, Homo sapiens
tgtgatgtcagtttt

SEQ ID NO: 1191685 - DNA, 15 bp, Homo sapiens
gtgtgatgtcagttt

SEQ ID NO: 1191686 - DNA, 15 bp, Homo sapiens
cgtgtgatgtcagtt

SEQ ID NO: 1191687 - DNA, 15 bp, Homo sapiens
acgtgtgatgtcagt

SEQ ID NO: 1191688 - DNA, 15 bp, Homo sapiens
cacgtgtgatgtcag

SEQ ID NO: 1191689 - DNA, 15 bp, Homo sapiens
tcacgtgtgatgtca

SEQ ID NO: 1191690 - DNA, 15 bp, Homo sapiens
gtcacgtgtgatgtc

SEQ ID NO: 1191691 - DNA, 15 bp, Homo sapiens
agtcacgtgtgatgt

SEQ ID NO: 1191692 - DNA, 15 bp, Homo sapiens
aagtcacgtgtgatg

SEQ ID NO: 1191693 - DNA, 15 bp, Homo sapiens
gaagtcacgtgtgat

SEQ ID NO: 1191694 - DNA, 15 bp, Homo sapiens
tgaagtcacgtgtga

SEQ ID NO: 1191695 - DNA, 15 bp, Homo sapiens
ttgaagtcacgtgtg

SEQ ID NO: 1191696 - DNA, 15 bp, Homo sapiens
cttgaagtcacgtgt

SEQ ID NO: 1191697 - DNA, 15 bp, Homo sapiens
gcttgaagtcacgtg

SEQ ID NO: 1191698 - DNA, 15 bp, Homo sapiens
agcttgaagtcacgt

SEQ ID NO: 1191699 - DNA, 15 bp, Homo sapiens
tagcttgaagtcacg

SEQ ID NO: 1191700 - DNA, 15 bp, Homo sapiens
atagcttgaagtcac

SEQ ID NO: 1191701 - DNA, 15 bp, Homo sapiens
aatagcttgaagtca

SEQ ID NO: 1191702 - DNA, 15 bp, Homo sapiens
taatagcttgaagtc

SEQ ID NO: 1191703 - DNA, 15 bp, Homo sapiens
ttaatagcttgaagt

SEQ ID NO: 1191704 - DNA, 15 bp, Homo sapiens
tttaatagcttgaag

SEQ ID NO: 1191705 - DNA, 15 bp, Homo sapiens
atttaatagcttgaa

SEQ ID NO: 1191706 - DNA, 15 bp, Homo sapiens
catttaatagcttga

SEQ ID NO: 1191707 - DNA, 15 bp, Homo sapiens
acatttaatagcttg

SEQ ID NO: 1191708 - DNA, 15 bp, Homo sapiens
aacatttaatagctt

SEQ ID NO: 1191709 - DNA, 15 bp, Homo sapiens
taacatttaatagct

SEQ ID NO: 1191710 - DNA, 15 bp, Homo sapiens
ctaacatttaatagc

SEQ ID NO: 1191711 - DNA, 15 bp, Homo sapiens
actaacatttaatag

SEQ ID NO: 1191712 - DNA, 15 bp, Homo sapiens
cactaacatttaata

SEQ ID NO: 1191713 - DNA, 15 bp, Homo sapiens
tcactaacatttaat

SEQ ID NO: 1191714 - DNA, 15 bp, Homo sapiens
atcactaacatttaa

SEQ ID NO: 1191715 - DNA, 15 bp, Homo sapiens
tatcactaacattta

SEQ ID NO: 1191716 - DNA, 15 bp, Homo sapiens
ctatcactaacattt

SEQ ID NO: 1191717 - DNA, 15 bp, Homo sapiens
gctatcactaacatt

SEQ ID NO: 1191718 - DNA, 15 bp, Homo sapiens
tgctatcactaacat

SEQ ID NO: 1191719 - DNA, 15 bp, Homo sapiens
gtgctatcactaaca

SEQ ID NO: 1191720 - DNA, 15 bp, Homo sapiens
ggtgctatcactaac

SEQ ID NO: 1191721 - DNA, 15 bp, Homo sapiens
aggtgctatcactaa

SEQ ID NO: 1191722 - DNA, 15 bp, Homo sapiens
aaggtgctatcacta

SEQ ID NO: 1191723 - DNA, 15 bp, Homo sapiens
taaggtgctatcact

SEQ ID NO: 1191724 - DNA, 15 bp, Homo sapiens
ctaaggtgctatcac

SEQ ID NO: 1191725 - DNA, 15 bp, Homo sapiens
tctaaggtgctatca

SEQ ID NO: 1191726 - DNA, 15 bp, Homo sapiens
ttctaaggtgctatc

SEQ ID NO: 1191727 - DNA, 15 bp, Homo sapiens
tttctaaggtgctat

SEQ ID NO: 1191728 - DNA, 15 bp, Homo sapiens
ttttctaaggtgcta

SEQ ID NO: 1191729 - DNA, 15 bp, Homo sapiens
tttttctaaggtgct

SEQ ID NO: 1191730 - DNA, 15 bp, Homo sapiens
gtttttctaaggtgc

SEQ ID NO: 1191731 - DNA, 15 bp, Homo sapiens
tgtttttctaaggtg

SEQ ID NO: 1191732 - DNA, 15 bp, Homo sapiens
gtgtttttctaaggt

SEQ ID NO: 1191733 - DNA, 15 bp, Homo sapiens
tgtgtttttctaagg

SEQ ID NO: 1191734 - DNA, 15 bp, Homo sapiens
ttgtgtttttctaag

SEQ ID NO: 1191735 - DNA, 15 bp, Homo sapiens
attgtgtttttctaa

SEQ ID NO: 1191736 - DNA, 15 bp, Homo sapiens
cattgtgtttttcta

SEQ ID NO: 1191737 - DNA, 15 bp, Homo sapiens
ccattgtgtttttct

SEQ ID NO: 1191738 - DNA, 15 bp, Homo sapiens
gccattgtgtttttc

SEQ ID NO: 1191739 - DNA, 15 bp, Homo sapiens
agccattgtgttttt

SEQ ID NO: 1191740 - DNA, 15 bp, Homo sapiens
aagccattgtgtttt

SEQ ID NO: 1191741 - DNA, 15 bp, Homo sapiens
aaagccattgtgttt

SEQ ID NO: 1191742 - DNA, 15 bp, Homo sapiens
gaaagccattgtgtt

SEQ ID NO: 1191743 - DNA, 15 bp, Homo sapiens
tgaaagccattgtgt

SEQ ID NO: 1191744 - DNA, 15 bp, Homo sapiens
ttgaaagccattgtg

SEQ ID NO: 1191745 - DNA, 15 bp, Homo sapiens
gttgaaagccattgt

SEQ ID NO: 1191746 - DNA, 15 bp, Homo sapiens
tgttgaaagccattg

SEQ ID NO: 1191747 - DNA, 15 bp, Homo sapiens
atgttgaaagccatt

SEQ ID NO: 1191748 - DNA, 15 bp, Homo sapiens
catgttgaaagccat

SEQ ID NO: 1191749 - DNA, 15 bp, Homo sapiens
acatgttgaaagcca

SEQ ID NO: 1191750 - DNA, 15 bp, Homo sapiens
cacatgttgaaagcc

SEQ ID NO: 1191751 - DNA, 15 bp, Homo sapiens
tcacatgttgaaagc

SEQ ID NO: 1191752 - DNA, 15 bp, Homo sapiens
gtcacatgttgaaag

SEQ ID NO: 1191753 - DNA, 15 bp, Homo sapiens
tgtcacatgttgaaa

SEQ ID NO: 1191754 - DNA, 15 bp, Homo sapiens
ctgtcacatgttgaa

SEQ ID NO: 1191755 - DNA, 15 bp, Homo sapiens
actgtcacatgttga

SEQ ID NO: 1191756 - DNA, 15 bp, Homo sapiens
aactgtcacatgttg

SEQ ID NO: 1191757 - DNA, 15 bp, Homo sapiens
aaactgtcacatgtt

SEQ ID NO: 1191758 - DNA, 15 bp, Homo sapiens
caaactgtcacatgt

SEQ ID NO: 1191759 - DNA, 15 bp, Homo sapiens
acaaactgtcacatg

SEQ ID NO: 1191760 - DNA, 15 bp, Homo sapiens
cacaaactgtcacat

SEQ ID NO: 1191761 - DNA, 15 bp, Homo sapiens
acacaaactgtcaca

SEQ ID NO: 1191762 - DNA, 15 bp, Homo sapiens
gacacaaactgtcac

SEQ ID NO: 1191763 - DNA, 15 bp, Homo sapiens
agacacaaactgtca

SEQ ID NO: 1191764 - DNA, 15 bp, Homo sapiens
gagacacaaactgtc

SEQ ID NO: 1191765 - DNA, 15 bp, Homo sapiens
tgagacacaaactgt

SEQ ID NO: 1191766 - DNA, 15 bp, Homo sapiens
ttgagacacaaactg

SEQ ID NO: 1191767 - DNA, 15 bp, Homo sapiens
cttgagacacaaact

SEQ ID NO: 1191768 - DNA, 15 bp, Homo sapiens
acttgagacacaaac

SEQ ID NO: 1191769 - DNA, 15 bp, Homo sapiens
gacttgagacacaaa

SEQ ID NO: 1191770 - DNA, 15 bp, Homo sapiens
tgacttgagacacaa

SEQ ID NO: 1191771 - DNA, 15 bp, Homo sapiens
ttgacttgagacaca

SEQ ID NO: 1191772 - DNA, 15 bp, Homo sapiens
tttgacttgagacac

SEQ ID NO: 1191773 - DNA, 15 bp, Homo sapiens
ttttgacttgagaca

SEQ ID NO: 1191774 - DNA, 15 bp, Homo sapiens
tttttgacttgagac

SEQ ID NO: 1191775 - DNA, 15 bp, Homo sapiens
atttttgacttgaga

SEQ ID NO: 1191776 - DNA, 15 bp, Homo sapiens
catttttgacttgag

SEQ ID NO: 1191777 - DNA, 15 bp, Homo sapiens
ccatttttgacttga

SEQ ID NO: 1191778 - DNA, 15 bp, Homo sapiens
tccatttttgacttg

SEQ ID NO: 1191779 - DNA, 15 bp, Homo sapiens
gtccatttttgactt

SEQ ID NO: 1191780 - DNA, 15 bp, Homo sapiens
tgtccatttttgact

SEQ ID NO: 1191781 - DNA, 15 bp, Homo sapiens
ctgtccatttttgac

SEQ ID NO: 1191782 - DNA, 15 bp, Homo sapiens
actgtccatttttga

SEQ ID NO: 1191783 - DNA, 15 bp, Homo sapiens
cactgtccatttttg

SEQ ID NO: 1191784 - DNA, 15 bp, Homo sapiens
tcactgtccattttt

SEQ ID NO: 1191785 - DNA, 15 bp, Homo sapiens
atcactgtccatttt

SEQ ID NO: 1191786 - DNA, 15 bp, Homo sapiens
catcactgtccattt

SEQ ID NO: 1191787 - DNA, 15 bp, Homo sapiens
acatcactgtccatt

SEQ ID NO: 1191788 - DNA, 15 bp, Homo sapiens
cacatcactgtccat

SEQ ID NO: 1191789 - DNA, 15 bp, Homo sapiens
acacatcactgtcca

SEQ ID NO: 1191790 - DNA, 15 bp, Homo sapiens
tacacatcactgtcc

SEQ ID NO: 1191791 - DNA, 15 bp, Homo sapiens
ttacacatcactgtc

SEQ ID NO: 1191792 - DNA, 15 bp, Homo sapiens
cttacacatcactgt

SEQ ID NO: 1191793 - DNA, 15 bp, Homo sapiens
tcttacacatcactg

SEQ ID NO: 1191794 - DNA, 15 bp, Homo sapiens
ttcttacacatcact

SEQ ID NO: 1191795 - DNA, 15 bp, Homo sapiens
tttcttacacatcac

SEQ ID NO: 1191796 - DNA, 15 bp, Homo sapiens
ttttcttacacatca

SEQ ID NO: 1191797 - DNA, 15 bp, Homo sapiens
attttcttacacatc

SEQ ID NO: 1191798 - DNA, 15 bp, Homo sapiens
gattttcttacacat

SEQ ID NO: 1191799 - DNA, 15 bp, Homo sapiens
tgattttcttacaca

SEQ ID NO: 1191800 - DNA, 15 bp, Homo sapiens
ttgattttcttacac

SEQ ID NO: 1191801 - DNA, 15 bp, Homo sapiens
tttgattttcttaca

SEQ ID NO: 1191802 - DNA, 15 bp, Homo sapiens
atttgattttcttac

SEQ ID NO: 1191803 - DNA, 15 bp, Homo sapiens
aatttgattttctta

SEQ ID NO: 1191804 - DNA, 15 bp, Homo sapiens
taatttgattttctt

SEQ ID NO: 1191805 - DNA, 15 bp, Homo sapiens
gtaatttgattttct

SEQ ID NO: 1191806 - DNA, 15 bp, Homo sapiens
tgtaatttgattttc

SEQ ID NO: 1191807 - DNA, 15 bp, Homo sapiens
atgtaatttgatttt

SEQ ID NO: 1191808 - DNA, 15 bp, Homo sapiens
tatgtaatttgattt

SEQ ID NO: 1191809 - DNA, 15 bp, Homo sapiens
ttatgtaatttgatt

SEQ ID NO: 1191810 - DNA, 15 bp, Homo sapiens
attatgtaatttgat

SEQ ID NO: 1191811 - DNA, 15 bp, Homo sapiens
tattatgtaatttga

SEQ ID NO: 1191812 - DNA, 15 bp, Homo sapiens
ttattatgtaatttg

SEQ ID NO: 1191813 - DNA, 15 bp, Homo sapiens
gttattatgtaattt

SEQ ID NO: 1191814 - DNA, 15 bp, Homo sapiens
tgttattatgtaatt

SEQ ID NO: 1191815 - DNA, 15 bp, Homo sapiens
ttgttattatgtaat

SEQ ID NO: 1191816 - DNA, 15 bp, Homo sapiens
attgttattatgtaa

SEQ ID NO: 1191817 - DNA, 15 bp, Homo sapiens
aattgttattatgta

SEQ ID NO: 1191818 - DNA, 15 bp, Homo sapiens
gaattgttattatgt

SEQ ID NO: 1191819 - DNA, 15 bp, Homo sapiens
ggaattgttattatg

SEQ ID NO: 1191820 - DNA, 15 bp, Homo sapiens
aggaattgttattat

SEQ ID NO: 1191821 - DNA, 15 bp, Homo sapiens
taggaattgttatta

SEQ ID NO: 1191822 - DNA, 15 bp, Homo sapiens
ataggaattgttatt

SEQ ID NO: 1191823 - DNA, 15 bp, Homo sapiens
aataggaattgttat

SEQ ID NO: 1191824 - DNA, 15 bp, Homo sapiens
taataggaattgtta

SEQ ID NO: 1191825 - DNA, 15 bp, Homo sapiens
gtaataggaattgtt

SEQ ID NO: 1191826 - DNA, 15 bp, Homo sapiens
agtaataggaattgt

SEQ ID NO: 1191827 - DNA, 15 bp, Homo sapiens
gagtaataggaattg

SEQ ID NO: 1191828 - DNA, 15 bp, Homo sapiens
agagtaataggaatt

SEQ ID NO: 1191829 - DNA, 15 bp, Homo sapiens
aagagtaataggaat

SEQ ID NO: 1191830 - DNA, 15 bp, Homo sapiens
caagagtaataggaa

SEQ ID NO: 1191831 - DNA, 15 bp, Homo sapiens
acaagagtaatagga

SEQ ID NO: 1191832 - DNA, 15 bp, Homo sapiens
cacaagagtaatagg

SEQ ID NO: 1191833 - DNA, 15 bp, Homo sapiens
ccacaagagtaatag

SEQ ID NO: 1191834 - DNA, 15 bp, Homo sapiens
tccacaagagtaata

SEQ ID NO: 1191835 - DNA, 15 bp, Homo sapiens
ttccacaagagtaat

SEQ ID NO: 1191836 - DNA, 15 bp, Homo sapiens
attccacaagagtaa

SEQ ID NO: 1191837 - DNA, 15 bp, Homo sapiens
tattccacaagagta

SEQ ID NO: 1191838 - DNA, 15 bp, Homo sapiens
ctattccacaagagt

SEQ ID NO: 1191839 - DNA, 15 bp, Homo sapiens
cctattccacaagag

SEQ ID NO: 1191840 - DNA, 15 bp, Homo sapiens
gcctattccacaaga

SEQ ID NO: 1191841 - DNA, 15 bp, Homo sapiens
agcctattccacaag

SEQ ID NO: 1191842 - DNA, 15 bp, Homo sapiens
cagcctattccacaa

SEQ ID NO: 1191843 - DNA, 15 bp, Homo sapiens
acagcctattccaca

SEQ ID NO: 1191844 - DNA, 15 bp, Homo sapiens
aacagcctattccac

SEQ ID NO: 1191845 - DNA, 15 bp, Homo sapiens
aaacagcctattcca

SEQ ID NO: 1191846 - DNA, 15 bp, Homo sapiens
gaaacagcctattcc

SEQ ID NO: 1191847 - DNA, 15 bp, Homo sapiens
agaaacagcctattc

SEQ ID NO: 1191848 - DNA, 15 bp, Homo sapiens
aagaaacagcctatt

SEQ ID NO: 1191849 - DNA, 15 bp, Homo sapiens
gaagaaacagcctat

SEQ ID NO: 1191850 - DNA, 15 bp, Homo sapiens
ggaagaaacagccta

SEQ ID NO: 1191851 - DNA, 15 bp, Homo sapiens
gggaagaaacagcct

SEQ ID NO: 1191852 - DNA, 15 bp, Homo sapiens
tgggaagaaacagcc

SEQ ID NO: 1191853 - DNA, 15 bp, Homo sapiens
gtgggaagaaacagc

SEQ ID NO: 1191854 - DNA, 15 bp, Homo sapiens
ggtgggaagaaacag

SEQ ID NO: 1191855 - DNA, 15 bp, Homo sapiens
tggtgggaagaaaca

SEQ ID NO: 1191856 - DNA, 15 bp, Homo sapiens
ttggtgggaagaaac

SEQ ID NO: 1191857 - DNA, 15 bp, Homo sapiens
cttggtgggaagaaa

SEQ ID NO: 1191858 - DNA, 15 bp, Homo sapiens
acttggtgggaagaa

SEQ ID NO: 1191859 - DNA, 15 bp, Homo sapiens
gacttggtgggaaga

SEQ ID NO: 1191860 - DNA, 15 bp, Homo sapiens
tgacttggtgggaag

SEQ ID NO: 1191861 - DNA, 15 bp, Homo sapiens
ctgacttggtgggaa

SEQ ID NO: 1191862 - DNA, 15 bp, Homo sapiens
actgacttggtggga

SEQ ID NO: 1191863 - DNA, 15 bp, Homo sapiens
cactgacttggtggg

SEQ ID NO: 1191864 - DNA, 15 bp, Homo sapiens
tcactgacttggtgg

SEQ ID NO: 1191865 - DNA, 15 bp, Homo sapiens
atcactgacttggtg

SEQ ID NO: 1191866 - DNA, 15 bp, Homo sapiens
catcactgacttggt

SEQ ID NO: 1191867 - DNA, 15 bp, Homo sapiens
acatcactgacttgg

SEQ ID NO: 1191868 - DNA, 15 bp, Homo sapiens
aacatcactgacttg

SEQ ID NO: 1191869 - DNA, 15 bp, Homo sapiens
aaacatcactgactt

SEQ ID NO: 1191870 - DNA, 15 bp, Homo sapiens
gaaacatcactgact

SEQ ID NO: 1191871 - DNA, 15 bp, Homo sapiens
agaaacatcactgac

SEQ ID NO: 1191872 - DNA, 15 bp, Homo sapiens
cagaaacatcactga

SEQ ID NO: 1191873 - DNA, 15 bp, Homo sapiens
tcagaaacatcactg

SEQ ID NO: 1191874 - DNA, 15 bp, Homo sapiens
ctcagaaacatcact

SEQ ID NO: 1191875 - DNA, 15 bp, Homo sapiens
tctcagaaacatcac

SEQ ID NO: 1191876 - DNA, 15 bp, Homo sapiens
atctcagaaacatca

SEQ ID NO: 1191877 - DNA, 15 bp, Homo sapiens
gatctcagaaacatc

SEQ ID NO: 1191878 - DNA, 15 bp, Homo sapiens
tgatctcagaaacat

SEQ ID NO: 1191879 - DNA, 15 bp, Homo sapiens
atgatctcagaaaca

SEQ ID NO: 1191880 - DNA, 15 bp, Homo sapiens
tatgatctcagaaac

SEQ ID NO: 1191881 - DNA, 15 bp, Homo sapiens
ttatgatctcagaaa

SEQ ID NO: 1191882 - DNA, 15 bp, Homo sapiens
attatgatctcagaa

SEQ ID NO: 1191883 - DNA, 15 bp, Homo sapiens
cattatgatctcaga

SEQ ID NO: 1191884 - DNA, 15 bp, Homo sapiens
acattatgatctcag

SEQ ID NO: 1191885 - DNA, 15 bp, Homo sapiens
aacattatgatctca

SEQ ID NO: 1191886 - DNA, 15 bp, Homo sapiens
gaacattatgatctc

SEQ ID NO: 1191887 - DNA, 15 bp, Homo sapiens
tgaacattatgatct

SEQ ID NO: 1191888 - DNA, 15 bp, Homo sapiens
gtgaacattatgatc

SEQ ID NO: 1191889 - DNA, 15 bp, Homo sapiens
agtgaacattatgat

SEQ ID NO: 1191890 - DNA, 15 bp, Homo sapiens
cagtgaacattatga

SEQ ID NO: 1191891 - DNA, 15 bp, Homo sapiens
acagtgaacattatg

SEQ ID NO: 1191892 - DNA, 15 bp, Homo sapiens
tacagtgaacattat

SEQ ID NO: 1191893 - DNA, 15 bp, Homo sapiens
ttacagtgaacatta

SEQ ID NO: 1191894 - DNA, 15 bp, Homo sapiens
tttacagtgaacatt

SEQ ID NO: 1191895 - DNA, 15 bp, Homo sapiens
atttacagtgaacat

SEQ ID NO: 1191896 - DNA, 15 bp, Homo sapiens
aatttacagtgaaca

SEQ ID NO: 1191897 - DNA, 15 bp, Homo sapiens
aaatttacagtgaac

SEQ ID NO: 1191898 - DNA, 15 bp, Homo sapiens
taaatttacagtgaa

SEQ ID NO: 1191899 - DNA, 15 bp, Homo sapiens
ttaaatttacagtga

SEQ ID NO: 1191900 - DNA, 15 bp, Homo sapiens
tttaaatttacagtg

SEQ ID NO: 1191901 - DNA, 15 bp, Homo sapiens
ctttaaatttacagt

SEQ ID NO: 1191902 - DNA, 15 bp, Homo sapiens
cctttaaatttacag

SEQ ID NO: 1191903 - DNA, 15 bp, Homo sapiens
ccctttaaatttaca

SEQ ID NO: 1191904 - DNA, 15 bp, Homo sapiens
tccctttaaatttac

SEQ ID NO: 1191905 - DNA, 15 bp, Homo sapiens
atccctttaaattta

SEQ ID NO: 1191906 - DNA, 15 bp, Homo sapiens
aatccctttaaattt

SEQ ID NO: 1191907 - DNA, 15 bp, Homo sapiens
aaatccctttaaatt

SEQ ID NO: 1191908 - DNA, 15 bp, Homo sapiens
gaaatccctttaaat

SEQ ID NO: 1191909 - DNA, 15 bp, Homo sapiens
agaaatccctttaaa

SEQ ID NO: 1191910 - DNA, 15 bp, Homo sapiens
aagaaatccctttaa

SEQ ID NO: 1191911 - DNA, 15 bp, Homo sapiens
aaagaaatcccttta

SEQ ID NO: 1191912 - DNA, 15 bp, Homo sapiens
aaaagaaatcccttt

SEQ ID NO: 1191913 - DNA, 15 bp, Homo sapiens
aaaaagaaatccctt

SEQ ID NO: 1191914 - DNA, 15 bp, Homo sapiens
gaaaaagaaatccct

SEQ ID NO: 1191915 - DNA, 15 bp, Homo sapiens
ggaaaaagaaatccc

SEQ ID NO: 1191916 - DNA, 15 bp, Homo sapiens
tggaaaaagaaatcc

SEQ ID NO: 1191917 - DNA, 15 bp, Homo sapiens
atggaaaaagaaatc

SEQ ID NO: 1191918 - DNA, 15 bp, Homo sapiens
tatggaaaaagaaat

SEQ ID NO: 1191919 - DNA, 15 bp, Homo sapiens
gctatggaaaaagaa

SEQ ID NO: 1191920 - DNA, 15 bp, Homo sapiens
tgctatggaaaaaga

SEQ ID NO: 1191921 - DNA, 15 bp, Homo sapiens
gtgctatggaaaaag

SEQ ID NO: 1191922 - DNA, 15 bp, Homo sapiens
agtgctatggaaaaa

SEQ ID NO: 1191923 - DNA, 15 bp, Homo sapiens
gagtgctatggaaaa

SEQ ID NO: 1191924 - DNA, 15 bp, Homo sapiens
tgagtgctatggaaa

SEQ ID NO: 1191925 - DNA, 15 bp, Homo sapiens
ctgagtgctatggaa

SEQ ID NO: 1191926 - DNA, 15 bp, Homo sapiens
gctgagtgctatgga

SEQ ID NO: 1191927 - DNA, 15 bp, Homo sapiens
tgctgagtgctatgg

SEQ ID NO: 1191928 - DNA, 15 bp, Homo sapiens
ttgctgagtgctatg

SEQ ID NO: 1191929 - DNA, 15 bp, Homo sapiens
cttgctgagtgctat

SEQ ID NO: 1191930 - DNA, 15 bp, Homo sapiens
tcttgctgagtgcta

SEQ ID NO: 1191931 - DNA, 15 bp, Homo sapiens
ttcttgctgagtgct

SEQ ID NO: 1191932 - DNA, 15 bp, Homo sapiens
tttcttgctgagtgc

SEQ ID NO: 1191933 - DNA, 15 bp, Homo sapiens
gtttcttgctgagtg

SEQ ID NO: 1191934 - DNA, 15 bp, Homo sapiens
cgtttcttgctgagt

SEQ ID NO: 1191935 - DNA, 15 bp, Homo sapiens
acgtttcttgctgag

SEQ ID NO: 1191936 - DNA, 15 bp, Homo sapiens
cacgtttcttgctga

SEQ ID NO: 1191937 - DNA, 15 bp, Homo sapiens
acacgtttcttgctg

SEQ ID NO: 1191938 - DNA, 15 bp, Homo sapiens
cacacgtttcttgct

SEQ ID NO: 1191939 - DNA, 15 bp, Homo sapiens
gcacacgtttcttgc

SEQ ID NO: 1191940 - DNA, 15 bp, Homo sapiens
agcacacgtttcttg

SEQ ID NO: 1191941 - DNA, 15 bp, Homo sapiens
tagcacacgtttctt

SEQ ID NO: 1191942 - DNA, 15 bp, Homo sapiens
ttagcacacgtttct

SEQ ID NO: 1191943 - DNA, 15 bp, Homo sapiens
tttagcacacgtttc

SEQ ID NO: 1191944 - DNA, 15 bp, Homo sapiens
ctttagcacacgttt

SEQ ID NO: 1191945 - DNA, 15 bp, Homo sapiens
tctttagcacacgtt

SEQ ID NO: 1191946 - DNA, 15 bp, Homo sapiens
gtctttagcacacgt

SEQ ID NO: 1191947 - DNA, 15 bp, Homo sapiens
agtctttagcacacg

SEQ ID NO: 1191948 - DNA, 15 bp, Homo sapiens
cagtctttagcacac

SEQ ID NO: 1191949 - DNA, 15 bp, Homo sapiens
tcagtctttagcaca

SEQ ID NO: 1191950 - DNA, 15 bp, Homo sapiens
ctcagtctttagcac

SEQ ID NO: 1191951 - DNA, 15 bp, Homo sapiens
cctcagtctttagca

SEQ ID NO: 1191952 - DNA, 15 bp, Homo sapiens
acctcagtctttagc

SEQ ID NO: 1191953 - DNA, 15 bp, Homo sapiens
aacctcagtctttag

SEQ ID NO: 1191954 - DNA, 15 bp, Homo sapiens
gaacctcagtcttta

SEQ ID NO: 1191955 - DNA, 15 bp, Homo sapiens
ggaacctcagtcttt

SEQ ID NO: 1191956 - DNA, 15 bp, Homo sapiens
aggaacctcagtctt

SEQ ID NO: 1191957 - DNA, 15 bp, Homo sapiens
aaggaacctcagtct

SEQ ID NO: 1191958 - DNA, 15 bp, Homo sapiens
caaggaacctcagtc

SEQ ID NO: 1191959 - DNA, 15 bp, Homo sapiens
ccaaggaacctcagt

SEQ ID NO: 1191960 - DNA, 15 bp, Homo sapiens
tccaaggaacctcag

SEQ ID NO: 1191961 - DNA, 15 bp, Homo sapiens
ttccaaggaacctca

SEQ ID NO: 1191962 - DNA, 15 bp, Homo sapiens
tttccaaggaacctc

SEQ ID NO: 1191963 - DNA, 15 bp, Homo sapiens
gtttccaaggaacct

SEQ ID NO: 1191964 - DNA, 15 bp, Homo sapiens
tgtttccaaggaacc

SEQ ID NO: 1191965 - DNA, 15 bp, Homo sapiens
atgtttccaaggaac

SEQ ID NO: 1191966 - DNA, 15 bp, Homo sapiens
catgtttccaaggaa

SEQ ID NO: 1191967 - DNA, 15 bp, Homo sapiens
gcatgtttccaagga

SEQ ID NO: 1191968 - DNA, 15 bp, Homo sapiens
agcatgtttccaagg

SEQ ID NO: 1191969 - DNA, 15 bp, Homo sapiens
cagcatgtttccaag

SEQ ID NO: 1191970 - DNA, 15 bp, Homo sapiens
tcagcatgtttccaa

SEQ ID NO: 1191971 - DNA, 15 bp, Homo sapiens
ttcagcatgtttcca

SEQ ID NO: 1191972 - DNA, 15 bp, Homo sapiens
tttcagcatgtttcc

SEQ ID NO: 1191973 - DNA, 15 bp, Homo sapiens
ttttcagcatgtttc

SEQ ID NO: 1191974 - DNA, 15 bp, Homo sapiens
attttcagcatgttt

SEQ ID NO: 1191975 - DNA, 15 bp, Homo sapiens
aattttcagcatgtt

SEQ ID NO: 1191976 - DNA, 15 bp, Homo sapiens
gaattttcagcatgt

SEQ ID NO: 1191977 - DNA, 15 bp, Homo sapiens
agaattttcagcatg

SEQ ID NO: 1191978 - DNA, 15 bp, Homo sapiens
cagaattttcagcat

SEQ ID NO: 1191979 - DNA, 15 bp, Homo sapiens
acagaattttcagca

SEQ ID NO: 1191980 - DNA, 15 bp, Homo sapiens
aacagaattttcagc

SEQ ID NO: 1191981 - DNA, 15 bp, Homo sapiens
gaacagaattttcag

SEQ ID NO: 1191982 - DNA, 15 bp, Homo sapiens
agaacagaattttca

SEQ ID NO: 1191983 - DNA, 15 bp, Homo sapiens
gagaacagaattttc

SEQ ID NO: 1191984 - DNA, 15 bp, Homo sapiens
tgagaacagaatttt

SEQ ID NO: 1191985 - DNA, 15 bp, Homo sapiens
ttgagaacagaattt

SEQ ID NO: 1191986 - DNA, 15 bp, Homo sapiens
cttgagaacagaatt

SEQ ID NO: 1191987 - DNA, 15 bp, Homo sapiens
ccttgagaacagaat

SEQ ID NO: 1191988 - DNA, 15 bp, Homo sapiens
cccttgagaacagaa

SEQ ID NO: 1191989 - DNA, 15 bp, Homo sapiens
acccttgagaacaga

SEQ ID NO: 1191990 - DNA, 15 bp, Homo sapiens
cacccttgagaacag

SEQ ID NO: 1191991 - DNA, 15 bp, Homo sapiens
acacccttgagaaca

SEQ ID NO: 1191992 - DNA, 15 bp, Homo sapiens
gacacccttgagaac

SEQ ID NO: 1191993 - DNA, 15 bp, Homo sapiens
tgacacccttgagaa

SEQ ID NO: 1191994 - DNA, 15 bp, Homo sapiens
ctgacacccttgaga

SEQ ID NO: 1191995 - DNA, 15 bp, Homo sapiens
tctgacacccttgag

SEQ ID NO: 1191996 - DNA, 15 bp, Homo sapiens
ttctgacacccttga

SEQ ID NO: 1191997 - DNA, 15 bp, Homo sapiens
gttctgacacccttg

SEQ ID NO: 1191998 - DNA, 15 bp, Homo sapiens
ggttctgacaccctt

SEQ ID NO: 1191999 - DNA, 15 bp, Homo sapiens
tggttctgacaccct

SEQ ID NO: 1192000 - DNA, 15 bp, Homo sapiens
atggttctgacaccc

SEQ ID NO: 1192001 - DNA, 15 bp, Homo sapiens
tatggttctgacacc

SEQ ID NO: 1192002 - DNA, 15 bp, Homo sapiens
gtatggttctgacac

SEQ ID NO: 1192003 - DNA, 15 bp, Homo sapiens
cgtatggttctgaca

SEQ ID NO: 1192004 - DNA, 15 bp, Homo sapiens
acgtatggttctgac

SEQ ID NO: 1192005 - DNA, 15 bp, Homo sapiens
tacgtatggttctga

SEQ ID NO: 1192006 - DNA, 15 bp, Homo sapiens
gtacgtatggttctg

SEQ ID NO: 1192007 - DNA, 15 bp, Homo sapiens
agtacgtatggttct

SEQ ID NO: 1192008 - DNA, 15 bp, Homo sapiens
cagtacgtatggttc

SEQ ID NO: 1192009 - DNA, 15 bp, Homo sapiens
gcagtacgtatggtt

SEQ ID NO: 1192010 - DNA, 15 bp, Homo sapiens
tgcagtacgtatggt

SEQ ID NO: 1192011 - DNA, 15 bp, Homo sapiens
ttgcagtacgtatgg

SEQ ID NO: 1192012 - DNA, 15 bp, Homo sapiens
tttgcagtacgtatg

SEQ ID NO: 1192013 - DNA, 15 bp, Homo sapiens
atttgcagtacgtat

SEQ ID NO: 1192014 - DNA, 15 bp, Homo sapiens
tatttgcagtacgta

SEQ ID NO: 1192015 - DNA, 15 bp, Homo sapiens
ttatttgcagtacgt

SEQ ID NO: 1192016 - DNA, 15 bp, Homo sapiens
attatttgcagtacg

SEQ ID NO: 1192017 - DNA, 15 bp, Homo sapiens
aattatttgcagtac

SEQ ID NO: 1192018 - DNA, 15 bp, Homo sapiens
aaattatttgcagta

SEQ ID NO: 1192019 - DNA, 15 bp, Homo sapiens
taaattatttgcagt

SEQ ID NO: 1192020 - DNA, 15 bp, Homo sapiens
ataaattatttgcag

SEQ ID NO: 1192021 - DNA, 15 bp, Homo sapiens
cataaattatttgca

SEQ ID NO: 1192022 - DNA, 15 bp, Homo sapiens
tcataaattatttgc

SEQ ID NO: 1192023 - DNA, 15 bp, Homo sapiens
ttcataaattatttg

SEQ ID NO: 1192024 - DNA, 15 bp, Homo sapiens
cttcataaattattt

SEQ ID NO: 1192025 - DNA, 15 bp, Homo sapiens
acttcataaattatt

SEQ ID NO: 1192026 - DNA, 15 bp, Homo sapiens
gacttcataaattat

SEQ ID NO: 1192027 - DNA, 15 bp, Homo sapiens
ggacttcataaatta

SEQ ID NO: 1192028 - DNA, 15 bp, Homo sapiens
aggacttcataaatt

SEQ ID NO: 1192029 - DNA, 15 bp, Homo sapiens
taggacttcataaat

SEQ ID NO: 1192030 - DNA, 15 bp, Homo sapiens
ctaggacttcataaa

SEQ ID NO: 1192031 - DNA, 15 bp, Homo sapiens
actaggacttcataa

SEQ ID NO: 1192032 - DNA, 15 bp, Homo sapiens
aactaggacttcata

SEQ ID NO: 1192033 - DNA, 15 bp, Homo sapiens
gaactaggacttcat

SEQ ID NO: 1192034 - DNA, 15 bp, Homo sapiens
tgaactaggacttca

SEQ ID NO: 1192035 - DNA, 15 bp, Homo sapiens
atgaactaggacttc

SEQ ID NO: 1192036 - DNA, 15 bp, Homo sapiens
aatgaactaggactt

SEQ ID NO: 1192037 - DNA, 15 bp, Homo sapiens
caatgaactaggact

SEQ ID NO: 1192038 - DNA, 15 bp, Homo sapiens
gcaatgaactaggac

SEQ ID NO: 1192039 - DNA, 15 bp, Homo sapiens
tgcaatgaactagga

SEQ ID NO: 1192040 - DNA, 15 bp, Homo sapiens
ttgcaatgaactagg

SEQ ID NO: 1192041 - DNA, 15 bp, Homo sapiens
attgcaatgaactag

SEQ ID NO: 1192042 - DNA, 15 bp, Homo sapiens
tattgcaatgaacta

SEQ ID NO: 1192043 - DNA, 15 bp, Homo sapiens
ttattgcaatgaact

SEQ ID NO: 1192044 - DNA, 15 bp, Homo sapiens
cttattgcaatgaac

SEQ ID NO: 1192045 - DNA, 15 bp, Homo sapiens
gcttattgcaatgaa

SEQ ID NO: 1192046 - DNA, 15 bp, Homo sapiens
tgcttattgcaatga

SEQ ID NO: 1192047 - DNA, 15 bp, Homo sapiens
ctgcttattgcaatg

SEQ ID NO: 1192048 - DNA, 15 bp, Homo sapiens
tctgcttattgcaat

SEQ ID NO: 1192049 - DNA, 15 bp, Homo sapiens
atctgcttattgcaa

SEQ ID NO: 1192050 - DNA, 15 bp, Homo sapiens
catctgcttattgca

SEQ ID NO: 1192051 - DNA, 15 bp, Homo sapiens
ccatctgcttattgc

SEQ ID NO: 1192052 - DNA, 15 bp, Homo sapiens
gccatctgcttattg

SEQ ID NO: 1192053 - DNA, 15 bp, Homo sapiens
agccatctgcttatt

SEQ ID NO: 1192054 - DNA, 15 bp, Homo sapiens
aagccatctgcttat

SEQ ID NO: 1192055 - DNA, 15 bp, Homo sapiens
caagccatctgctta

SEQ ID NO: 1192056 - DNA, 15 bp, Homo sapiens
gcaagccatctgctt

SEQ ID NO: 1192057 - DNA, 15 bp, Homo sapiens
agcaagccatctgct

SEQ ID NO: 1192058 - DNA, 15 bp, Homo sapiens
tagcaagccatctgc

SEQ ID NO: 1192059 - DNA, 15 bp, Homo sapiens
atagcaagccatctg

SEQ ID NO: 1192060 - DNA, 15 bp, Homo sapiens
gatagcaagccatct

SEQ ID NO: 1192061 - DNA, 15 bp, Homo sapiens
agatagcaagccatc

SEQ ID NO: 1192062 - DNA, 15 bp, Homo sapiens
cagatagcaagccat

SEQ ID NO: 1192063 - DNA, 15 bp, Homo sapiens
gcagatagcaagcca

SEQ ID NO: 1192064 - DNA, 15 bp, Homo sapiens
agcagatagcaagcc

SEQ ID NO: 1192065 - DNA, 15 bp, Homo sapiens
gagcagatagcaagc

SEQ ID NO: 1192066 - DNA, 15 bp, Homo sapiens
tgagcagatagcaag

SEQ ID NO: 1192067 - DNA, 15 bp, Homo sapiens
ctgagcagatagcaa

SEQ ID NO: 1192068 - DNA, 15 bp, Homo sapiens
tctgagcagatagca

SEQ ID NO: 1192069 - DNA, 15 bp, Homo sapiens
gtctgagcagatagc

SEQ ID NO: 1192070 - DNA, 15 bp, Homo sapiens
tgtctgagcagatag

SEQ ID NO: 1192071 - DNA, 15 bp, Homo sapiens
ctgtctgagcagata

SEQ ID NO: 1192072 - DNA, 15 bp, Homo sapiens
actgtctgagcagat

SEQ ID NO: 1192073 - DNA, 15 bp, Homo sapiens
tactgtctgagcaga

SEQ ID NO: 1192074 - DNA, 15 bp, Homo sapiens
gtactgtctgagcag

SEQ ID NO: 1192075 - DNA, 15 bp, Homo sapiens
agtactgtctgagca

SEQ ID NO: 1192076 - DNA, 15 bp, Homo sapiens
gagtactgtctgagc

SEQ ID NO: 1192077 - DNA, 15 bp, Homo sapiens
ggagtactgtctgag

SEQ ID NO: 1192078 - DNA, 15 bp, Homo sapiens
gggagtactgtctga

SEQ ID NO: 1192079 - DNA, 15 bp, Homo sapiens
agggagtactgtctg

SEQ ID NO: 1192080 - DNA, 15 bp, Homo sapiens
aagggagtactgtct

SEQ ID NO: 1192081 - DNA, 15 bp, Homo sapiens
caagggagtactgtc

SEQ ID NO: 1192082 - DNA, 15 bp, Homo sapiens
ccaagggagtactgt

SEQ ID NO: 1192083 - DNA, 15 bp, Homo sapiens
cccaagggagtactg

SEQ ID NO: 1192084 - DNA, 15 bp, Homo sapiens
ccccaagggagtact

SEQ ID NO: 1192085 - DNA, 15 bp, Homo sapiens
accccaagggagtac

SEQ ID NO: 1192086 - DNA, 15 bp, Homo sapiens
taccccaagggagta

SEQ ID NO: 1192087 - DNA, 15 bp, Homo sapiens
ctaccccaagggagt

SEQ ID NO: 1192088 - DNA, 15 bp, Homo sapiens
actaccccaagggag

SEQ ID NO: 1192089 - DNA, 15 bp, Homo sapiens
tactaccccaaggga

SEQ ID NO: 1192090 - DNA, 15 bp, Homo sapiens
ttactaccccaaggg

SEQ ID NO: 1192091 - DNA, 15 bp, Homo sapiens
tttactaccccaagg

SEQ ID NO: 1192092 - DNA, 15 bp, Homo sapiens
atttactaccccaag

SEQ ID NO: 1192093 - DNA, 15 bp, Homo sapiens
catttactaccccaa

SEQ ID NO: 1192094 - DNA, 15 bp, Homo sapiens
acatttactacccca

SEQ ID NO: 1192095 - DNA, 15 bp, Homo sapiens
cacatttactacccc

SEQ ID NO: 1192096 - DNA, 15 bp, Homo sapiens
gcacatttactaccc

SEQ ID NO: 1192097 - DNA, 15 bp, Homo sapiens
agcacatttactacc

SEQ ID NO: 1192098 - DNA, 15 bp, Homo sapiens
aagcacatttactac

SEQ ID NO: 1192099 - DNA, 15 bp, Homo sapiens
taagcacatttacta

SEQ ID NO: 1192100 - DNA, 15 bp, Homo sapiens
ataagcacatttact

SEQ ID NO: 1192101 - DNA, 15 bp, Homo sapiens
gataagcacatttac

SEQ ID NO: 1192102 - DNA, 15 bp, Homo sapiens
agataagcacattta

SEQ ID NO: 1192103 - DNA, 15 bp, Homo sapiens
cagataagcacattt

SEQ ID NO: 1192104 - DNA, 15 bp, Homo sapiens
tcagataagcacatt

SEQ ID NO: 1192105 - DNA, 15 bp, Homo sapiens
ttcagataagcacat

SEQ ID NO: 1192106 - DNA, 15 bp, Homo sapiens
cttcagataagcaca

SEQ ID NO: 1192107 - DNA, 15 bp, Homo sapiens
gcttcagataagcac

SEQ ID NO: 1192108 - DNA, 15 bp, Homo sapiens
agcttcagataagca

SEQ ID NO: 1192109 - DNA, 15 bp, Homo sapiens
cagcttcagataagc

SEQ ID NO: 1192110 - DNA, 15 bp, Homo sapiens
ccagcttcagataag

SEQ ID NO: 1192111 - DNA, 15 bp, Homo sapiens
cccagcttcagataa

SEQ ID NO: 1192112 - DNA, 15 bp, Homo sapiens
tcccagcttcagata

SEQ ID NO: 1192113 - DNA, 15 bp, Homo sapiens
ctcccagcttcagat

SEQ ID NO: 1192114 - DNA, 15 bp, Homo sapiens
actcccagcttcaga

SEQ ID NO: 1192115 - DNA, 15 bp, Homo sapiens
gactcccagcttcag

SEQ ID NO: 1192116 - DNA, 15 bp, Homo sapiens
tgactcccagcttca

SEQ ID NO: 1192117 - DNA, 15 bp, Homo sapiens
ttgactcccagcttc

SEQ ID NO: 1192118 - DNA, 15 bp, Homo sapiens
attgactcccagctt

SEQ ID NO: 1192119 - DNA, 15 bp, Homo sapiens
tattgactcccagct

SEQ ID NO: 1192120 - DNA, 15 bp, Homo sapiens
atattgactcccagc

SEQ ID NO: 1192121 - DNA, 15 bp, Homo sapiens
tatattgactcccag

SEQ ID NO: 1192122 - DNA, 15 bp, Homo sapiens
atatattgactccca

SEQ ID NO: 1192123 - DNA, 15 bp, Homo sapiens
aatatattgactccc

SEQ ID NO: 1192124 - DNA, 15 bp, Homo sapiens
aaatatattgactcc

SEQ ID NO: 1192125 - DNA, 15 bp, Homo sapiens
aaaatatattgactc

SEQ ID NO: 1192126 - DNA, 15 bp, Homo sapiens
caaaatatattgact

SEQ ID NO: 1192127 - DNA, 15 bp, Homo sapiens
acaaaatatattgac

SEQ ID NO: 1192128 - DNA, 15 bp, Homo sapiens
tacaaaatatattga

SEQ ID NO: 1192129 - DNA, 15 bp, Homo sapiens
atacaaaatatattg

SEQ ID NO: 1192130 - DNA, 15 bp, Homo sapiens
catacaaaatatatt

SEQ ID NO: 1192131 - DNA, 15 bp, Homo sapiens
acatacaaaatatat

SEQ ID NO: 1192132 - DNA, 15 bp, Homo sapiens
cacatacaaaatata

SEQ ID NO: 1192133 - DNA, 15 bp, Homo sapiens
ccacatacaaaatat

SEQ ID NO: 1192134 - DNA, 15 bp, Homo sapiens
tccacatacaaaata

SEQ ID NO: 1192135 - DNA, 15 bp, Homo sapiens
gtccacatacaaaat

SEQ ID NO: 1192136 - DNA, 15 bp, Homo sapiens
tgtccacatacaaaa

SEQ ID NO: 1192137 - DNA, 15 bp, Homo sapiens
atgtccacatacaaa

SEQ ID NO: 1192138 - DNA, 15 bp, Homo sapiens
catgtccacatacaa

SEQ ID NO: 1192139 - DNA, 15 bp, Homo sapiens
ccatgtccacataca

SEQ ID NO: 1192140 - DNA, 15 bp, Homo sapiens
tccatgtccacatac

SEQ ID NO: 1192141 - DNA, 15 bp, Homo sapiens
ttccatgtccacata

SEQ ID NO: 1192142 - DNA, 15 bp, Homo sapiens
cttccatgtccacat

SEQ ID NO: 1192143 - DNA, 15 bp, Homo sapiens
tcttccatgtccaca

SEQ ID NO: 1192144 - DNA, 15 bp, Homo sapiens
ttcttccatgtccac

SEQ ID NO: 1192145 - DNA, 15 bp, Homo sapiens
gttcttccatgtcca

SEQ ID NO: 1192146 - DNA, 15 bp, Homo sapiens
tgttcttccatgtcc

SEQ ID NO: 1192147 - DNA, 15 bp, Homo sapiens
atgttcttccatgtc

SEQ ID NO: 1192148 - DNA, 15 bp, Homo sapiens
tatgttcttccatgt

SEQ ID NO: 1192149 - DNA, 15 bp, Homo sapiens
ctatgttcttccatg

SEQ ID NO: 1192150 - DNA, 15 bp, Homo sapiens
tctatgttcttccat

SEQ ID NO: 1192151 - DNA, 15 bp, Homo sapiens
ttctatgttcttcca

SEQ ID NO: 1192152 - DNA, 15 bp, Homo sapiens
attctatgttcttcc

SEQ ID NO: 1192153 - DNA, 15 bp, Homo sapiens
tattctatgttcttc

SEQ ID NO: 1192154 - DNA, 15 bp, Homo sapiens
ttattctatgttctt

SEQ ID NO: 1192155 - DNA, 15 bp, Homo sapiens
tttattctatgttct

SEQ ID NO: 1192156 - DNA, 15 bp, Homo sapiens
atttattctatgttc

SEQ ID NO: 1192157 - DNA, 15 bp, Homo sapiens
gatttattctatgtt

SEQ ID NO: 1192158 - DNA, 15 bp, Homo sapiens
tgatttattctatgt

SEQ ID NO: 1192159 - DNA, 15 bp, Homo sapiens
atgatttattctatg

SEQ ID NO: 1192160 - DNA, 15 bp, Homo sapiens
aatgatttattctat

SEQ ID NO: 1192161 - DNA, 15 bp, Homo sapiens
aaatgatttattcta

SEQ ID NO: 1192162 - DNA, 15 bp, Homo sapiens
aaaatgatttattct

SEQ ID NO: 1192163 - DNA, 15 bp, Homo sapiens
aaaaatgatttattc

SEQ ID NO: 1192164 - DNA, 15 bp, Homo sapiens
taaaaatgatttatt

SEQ ID NO: 1192165 - DNA, 15 bp, Homo sapiens
ttaaaaatgatttat

SEQ ID NO: 1192166 - DNA, 15 bp, Homo sapiens
attaaaaatgattta

SEQ ID NO: 1192167 - DNA, 15 bp, Homo sapiens
gattaaaaatgattt

SEQ ID NO: 1192168 - DNA, 15 bp, Homo sapiens
tgattaaaaatgatt

SEQ ID NO: 1192169 - DNA, 15 bp, Homo sapiens
atgattaaaaatgat

SEQ ID NO: 1192170 - DNA, 15 bp, Homo sapiens
tatgattaaaaatga

SEQ ID NO: 1192171 - DNA, 15 bp, Homo sapiens
ctatgattaaaaatg

SEQ ID NO: 1192172 - DNA, 15 bp, Homo sapiens
gctatgattaaaaat

SEQ ID NO: 1192173 - DNA, 15 bp, Homo sapiens
tgctatgattaaaaa

SEQ ID NO: 1192174 - DNA, 15 bp, Homo sapiens
ttgctatgattaaaa

SEQ ID NO: 1192175 - DNA, 15 bp, Homo sapiens
attgctatgattaaa

SEQ ID NO: 1192176 - DNA, 15 bp, Homo sapiens
aattgctatgattaa

SEQ ID NO: 1192177 - DNA, 15 bp, Homo sapiens
taattgctatgatta

SEQ ID NO: 1192178 - DNA, 15 bp, Homo sapiens
ataattgctatgatt

SEQ ID NO: 1192179 - DNA, 15 bp, Homo sapiens
tataattgctatgat

SEQ ID NO: 1192180 - DNA, 15 bp, Homo sapiens
gtataattgctatga

SEQ ID NO: 1192181 - DNA, 15 bp, Homo sapiens
agtataattgctatg

SEQ ID NO: 1192182 - DNA, 15 bp, Homo sapiens
aagtataattgctat

SEQ ID NO: 1192183 - DNA, 15 bp, Homo sapiens
taagtataattgcta

SEQ ID NO: 1192184 - DNA, 15 bp, Homo sapiens
gtaagtataattgct

SEQ ID NO: 1192185 - DNA, 15 bp, Homo sapiens
agtaagtataattgc

SEQ ID NO: 1192186 - DNA, 15 bp, Homo sapiens
gagtaagtataattg

SEQ ID NO: 1192187 - DNA, 15 bp, Homo sapiens
tgagtaagtataatt

SEQ ID NO: 1192188 - DNA, 15 bp, Homo sapiens
ttgagtaagtataat

SEQ ID NO: 1192189 - DNA, 15 bp, Homo sapiens
tttgagtaagtataa

SEQ ID NO: 1192190 - DNA, 15 bp, Homo sapiens
ttttgagtaagtata

SEQ ID NO: 1192191 - DNA, 15 bp, Homo sapiens
attttgagtaagtat

SEQ ID NO: 1192192 - DNA, 15 bp, Homo sapiens
cattttgagtaagta

SEQ ID NO: 1192193 - DNA, 15 bp, Homo sapiens
tcattttgagtaagt

SEQ ID NO: 1192194 - DNA, 15 bp, Homo sapiens
ttcattttgagtaag

SEQ ID NO: 1192195 - DNA, 15 bp, Homo sapiens
gttcattttgagtaa

SEQ ID NO: 1192196 - DNA, 15 bp, Homo sapiens
agttcattttgagta

SEQ ID NO: 1192197 - DNA, 15 bp, Homo sapiens
aagttcattttgagt

SEQ ID NO: 1192198 - DNA, 15 bp, Homo sapiens
caagttcattttgag

SEQ ID NO: 1192199 - DNA, 15 bp, Homo sapiens
ccaagttcattttga

SEQ ID NO: 1192200 - DNA, 15 bp, Homo sapiens
gccaagttcattttg

SEQ ID NO: 1192201 - DNA, 15 bp, Homo sapiens
agccaagttcatttt

SEQ ID NO: 1192202 - DNA, 15 bp, Homo sapiens
tagccaagttcattt

SEQ ID NO: 1192203 - DNA, 15 bp, Homo sapiens
ctagccaagttcatt

SEQ ID NO: 1192204 - DNA, 15 bp, Homo sapiens
gctagccaagttcat

SEQ ID NO: 1192205 - DNA, 15 bp, Homo sapiens
tgctagccaagttca

SEQ ID NO: 1192206 - DNA, 15 bp, Homo sapiens
ctgctagccaagttc

SEQ ID NO: 1192207 - DNA, 15 bp, Homo sapiens
cctgctagccaagtt

SEQ ID NO: 1192208 - DNA, 15 bp, Homo sapiens
acctgctagccaagt

SEQ ID NO: 1192209 - DNA, 15 bp, Homo sapiens
tacctgctagccaag

SEQ ID NO: 1192210 - DNA, 15 bp, Homo sapiens
gtacctgctagccaa

SEQ ID NO: 1192211 - DNA, 15 bp, Homo sapiens
tgtacctgctagcca

SEQ ID NO: 1192212 - DNA, 15 bp, Homo sapiens
gtgtacctgctagcc

SEQ ID NO: 1192213 - DNA, 15 bp, Homo sapiens
tgtgtacctgctagc

SEQ ID NO: 1192214 - DNA, 15 bp, Homo sapiens
gtgtgtacctgctag

SEQ ID NO: 1192215 - DNA, 15 bp, Homo sapiens
tgtgtgtacctgcta

SEQ ID NO: 1192216 - DNA, 15 bp, Homo sapiens
atgtgtgtacctgct

SEQ ID NO: 1192217 - DNA, 15 bp, Homo sapiens
gatgtgtgtacctgc

SEQ ID NO: 1192218 - DNA, 15 bp, Homo sapiens
agatgtgtgtacctg

SEQ ID NO: 1192219 - DNA, 15 bp, Homo sapiens
tagatgtgtgtacct

SEQ ID NO: 1192220 - DNA, 15 bp, Homo sapiens
gtagatgtgtgtacc

SEQ ID NO: 1192221 - DNA, 15 bp, Homo sapiens
tgtagatgtgtgtac

SEQ ID NO: 1192222 - DNA, 15 bp, Homo sapiens
ctgtagatgtgtgta

SEQ ID NO: 1192223 - DNA, 15 bp, Homo sapiens
tctgtagatgtgtgt

SEQ ID NO: 1192224 - DNA, 15 bp, Homo sapiens
atctgtagatgtgtg

SEQ ID NO: 1192225 - DNA, 15 bp, Homo sapiens
aatctgtagatgtgt

SEQ ID NO: 1192226 - DNA, 15 bp, Homo sapiens
caatctgtagatgtg

SEQ ID NO: 1192227 - DNA, 15 bp, Homo sapiens
ccaatctgtagatgt

SEQ ID NO: 1192228 - DNA, 15 bp, Homo sapiens
tccaatctgtagatg

SEQ ID NO: 1192229 - DNA, 15 bp, Homo sapiens
ttccaatctgtagat

SEQ ID NO: 1192230 - DNA, 15 bp, Homo sapiens
attccaatctgtaga

SEQ ID NO: 1192231 - DNA, 15 bp, Homo sapiens
cattccaatctgtag

SEQ ID NO: 1192232 - DNA, 15 bp, Homo sapiens
ccattccaatctgta

SEQ ID NO: 1192233 - DNA, 15 bp, Homo sapiens
gccattccaatctgt

SEQ ID NO: 1192234 - DNA, 15 bp, Homo sapiens
agccattccaatctg

SEQ ID NO: 1192235 - DNA, 15 bp, Homo sapiens
aagccattccaatct

SEQ ID NO: 1192236 - DNA, 15 bp, Homo sapiens
gaagccattccaatc

SEQ ID NO: 1192237 - DNA, 15 bp, Homo sapiens
agaagccattccaat

SEQ ID NO: 1192238 - DNA, 15 bp, Homo sapiens
aagaagccattccaa

SEQ ID NO: 1192239 - DNA, 15 bp, Homo sapiens
taagaagccattcca

SEQ ID NO: 1192240 - DNA, 15 bp, Homo sapiens
ttaagaagccattcc

SEQ ID NO: 1192241 - DNA, 15 bp, Homo sapiens
tttaagaagccattc

SEQ ID NO: 1192242 - DNA, 15 bp, Homo sapiens
ctttaagaagccatt

SEQ ID NO: 1192243 - DNA, 15 bp, Homo sapiens
cctttaagaagccat

SEQ ID NO: 1192244 - DNA, 15 bp, Homo sapiens
gcctttaagaagcca

SEQ ID NO: 1192245 - DNA, 15 bp, Homo sapiens
agcctttaagaagcc

SEQ ID NO: 1192246 - DNA, 15 bp, Homo sapiens
tagcctttaagaagc

SEQ ID NO: 1192247 - DNA, 15 bp, Homo sapiens
atagcctttaagaag

SEQ ID NO: 1192248 - DNA, 15 bp, Homo sapiens
gatagcctttaagaa

SEQ ID NO: 1192249 - DNA, 15 bp, Homo sapiens
ggatagcctttaaga

SEQ ID NO: 1192250 - DNA, 15 bp, Homo sapiens
gggatagcctttaag

SEQ ID NO: 1192251 - DNA, 15 bp, Homo sapiens
tgggatagcctttaa

SEQ ID NO: 1192252 - DNA, 15 bp, Homo sapiens
gtgggatagccttta

SEQ ID NO: 1192253 - DNA, 15 bp, Homo sapiens
ggtgggatagccttt

SEQ ID NO: 1192254 - DNA, 15 bp, Homo sapiens
aggtgggatagcctt

SEQ ID NO: 1192255 - DNA, 15 bp, Homo sapiens
aaggtgggatagcct

SEQ ID NO: 1192256 - DNA, 15 bp, Homo sapiens
caaggtgggatagcc

SEQ ID NO: 1192257 - DNA, 15 bp, Homo sapiens
ccaaggtgggatagc

SEQ ID NO: 1192258 - DNA, 15 bp, Homo sapiens
tccaaggtgggatag

SEQ ID NO: 1192259 - DNA, 15 bp, Homo sapiens
ttccaaggtgggata

SEQ ID NO: 1192260 - DNA, 15 bp, Homo sapiens
tttccaaggtgggat

SEQ ID NO: 1192261 - DNA, 15 bp, Homo sapiens
atttccaaggtggga

SEQ ID NO: 1192262 - DNA, 15 bp, Homo sapiens
tatttccaaggtggg

SEQ ID NO: 1192263 - DNA, 15 bp, Homo sapiens
ttatttccaaggtgg

SEQ ID NO: 1192264 - DNA, 15 bp, Homo sapiens
attatttccaaggtg

SEQ ID NO: 1192265 - DNA, 15 bp, Homo sapiens
gattatttccaaggt

SEQ ID NO: 1192266 - DNA, 15 bp, Homo sapiens
ggattatttccaagg

SEQ ID NO: 1192267 - DNA, 15 bp, Homo sapiens
aggattatttccaag

SEQ ID NO: 1192268 - DNA, 15 bp, Homo sapiens
caggattatttccaa

SEQ ID NO: 1192269 - DNA, 15 bp, Homo sapiens
ccaggattatttcca

SEQ ID NO: 1192270 - DNA, 15 bp, Homo sapiens
accaggattatttcc

SEQ ID NO: 1192271 - DNA, 15 bp, Homo sapiens
aaccaggattatttc

SEQ ID NO: 1192272 - DNA, 15 bp, Homo sapiens
taaccaggattattt

SEQ ID NO: 1192273 - DNA, 15 bp, Homo sapiens
ataaccaggattatt

SEQ ID NO: 1192274 - DNA, 15 bp, Homo sapiens
gataaccaggattat

SEQ ID NO: 1192275 - DNA, 15 bp, Homo sapiens
ggataaccaggatta

SEQ ID NO: 1192276 - DNA, 15 bp, Homo sapiens
cggataaccaggatt

SEQ ID NO: 1192277 - DNA, 15 bp, Homo sapiens
gcggataaccaggat

SEQ ID NO: 1192278 - DNA, 15 bp, Homo sapiens
tgcggataaccagga

SEQ ID NO: 1192279 - DNA, 15 bp, Homo sapiens
ttgcggataaccagg

SEQ ID NO: 1192280 - DNA, 15 bp, Homo sapiens
gttgcggataaccag

SEQ ID NO: 1192281 - DNA, 15 bp, Homo sapiens
tgttgcggataacca

SEQ ID NO: 1192282 - DNA, 15 bp, Homo sapiens
gtgttgcggataacc

SEQ ID NO: 1192283 - DNA, 15 bp, Homo sapiens
tgtgttgcggataac

SEQ ID NO: 1192284 - DNA, 15 bp, Homo sapiens
atgtgttgcggataa

SEQ ID NO: 1192285 - DNA, 15 bp, Homo sapiens
catgtgttgcggata

SEQ ID NO: 1192286 - DNA, 15 bp, Homo sapiens
tcatgtgttgcggat

SEQ ID NO: 1192287 - DNA, 15 bp, Homo sapiens
atcatgtgttgcgga

SEQ ID NO: 1192288 - DNA, 15 bp, Homo sapiens
catcatgtgttgcgg

SEQ ID NO: 1192289 - DNA, 15 bp, Homo sapiens
acatcatgtgttgcg

SEQ ID NO: 1192290 - DNA, 15 bp, Homo sapiens
aacatcatgtgttgc

SEQ ID NO: 1192291 - DNA, 15 bp, Homo sapiens
aaacatcatgtgttg

SEQ ID NO: 1192292 - DNA, 15 bp, Homo sapiens
aaaacatcatgtgtt

SEQ ID NO: 1192293 - DNA, 15 bp, Homo sapiens
caaaacatcatgtgt

SEQ ID NO: 1192294 - DNA, 15 bp, Homo sapiens
acaaaacatcatgtg

SEQ ID NO: 1192295 - DNA, 15 bp, Homo sapiens
gacaaaacatcatgt

SEQ ID NO: 1192296 - DNA, 15 bp, Homo sapiens
ggacaaaacatcatg

SEQ ID NO: 1192297 - DNA, 15 bp, Homo sapiens
aggacaaaacatcat

SEQ ID NO: 1192298 - DNA, 15 bp, Homo sapiens
caggacaaaacatca

SEQ ID NO: 1192299 - DNA, 15 bp, Homo sapiens
gcaggacaaaacatc

SEQ ID NO: 1192300 - DNA, 15 bp, Homo sapiens
agcaggacaaaacat

SEQ ID NO: 1192301 - DNA, 15 bp, Homo sapiens
aagcaggacaaaaca

SEQ ID NO: 1192302 - DNA, 15 bp, Homo sapiens
gaagcaggacaaaac

SEQ ID NO: 1192303 - DNA, 15 bp, Homo sapiens
agaagcaggacaaaa

SEQ ID NO: 1192304 - DNA, 15 bp, Homo sapiens
aagaagcaggacaaa

SEQ ID NO: 1192305 - DNA, 15 bp, Homo sapiens
caagaagcaggacaa

SEQ ID NO: 1192306 - DNA, 15 bp, Homo sapiens
tcaagaagcaggaca

SEQ ID NO: 1192307 - DNA, 15 bp, Homo sapiens
atcaagaagcaggac

SEQ ID NO: 1192308 - DNA, 15 bp, Homo sapiens
tatcaagaagcagga

SEQ ID NO: 1192309 - DNA, 15 bp, Homo sapiens
ctatcaagaagcagg

SEQ ID NO: 1192310 - DNA, 15 bp, Homo sapiens
cctatcaagaagcag

SEQ ID NO: 1192311 - DNA, 15 bp, Homo sapiens
tcctatcaagaagca

SEQ ID NO: 1192312 - DNA, 15 bp, Homo sapiens
atcctatcaagaagc

SEQ ID NO: 1192313 - DNA, 15 bp, Homo sapiens
tatcctatcaagaag

SEQ ID NO: 1192314 - DNA, 15 bp, Homo sapiens
atatcctatcaagaa

SEQ ID NO: 1192315 - DNA, 15 bp, Homo sapiens
gatatcctatcaaga

SEQ ID NO: 1192316 - DNA, 15 bp, Homo sapiens
agatatcctatcaag

SEQ ID NO: 1192317 - DNA, 15 bp, Homo sapiens
gagatatcctatcaa

SEQ ID NO: 1192318 - DNA, 15 bp, Homo sapiens
ggagatatcctatca

SEQ ID NO: 1192319 - DNA, 15 bp, Homo sapiens
aggagatatcctatc

SEQ ID NO: 1192320 - DNA, 15 bp, Homo sapiens
aaggagatatcctat

SEQ ID NO: 1192321 - DNA, 15 bp, Homo sapiens
taaggagatatccta

SEQ ID NO: 1192322 - DNA, 15 bp, Homo sapiens
ctaaggagatatcct

SEQ ID NO: 1192323 - DNA, 15 bp, Homo sapiens
tctaaggagatatcc

SEQ ID NO: 1192324 - DNA, 15 bp, Homo sapiens
atctaaggagatatc

SEQ ID NO: 1192325 - DNA, 15 bp, Homo sapiens
catctaaggagatat

SEQ ID NO: 1192326 - DNA, 15 bp, Homo sapiens
acatctaaggagata

SEQ ID NO: 1192327 - DNA, 15 bp, Homo sapiens
cacatctaaggagat

SEQ ID NO: 1192328 - DNA, 15 bp, Homo sapiens
gcacatctaaggaga

SEQ ID NO: 1192329 - DNA, 15 bp, Homo sapiens
ggcacatctaaggag

SEQ ID NO: 1192330 - DNA, 15 bp, Homo sapiens
aggcacatctaagga

SEQ ID NO: 1192331 - DNA, 15 bp, Homo sapiens
caggcacatctaagg

SEQ ID NO: 1192332 - DNA, 15 bp, Homo sapiens
acaggcacatctaag

SEQ ID NO: 1192333 - DNA, 15 bp, Homo sapiens
aacaggcacatctaa

SEQ ID NO: 1192334 - DNA, 15 bp, Homo sapiens
gaacaggcacatcta

SEQ ID NO: 1192335 - DNA, 15 bp, Homo sapiens
agaacaggcacatct

SEQ ID NO: 1192336 - DNA, 15 bp, Homo sapiens
aagaacaggcacatc

SEQ ID NO: 1192337 - DNA, 15 bp, Homo sapiens
gaagaacaggcacat

SEQ ID NO: 1192338 - DNA, 15 bp, Homo sapiens
tgaagaacaggcaca

SEQ ID NO: 1192339 - DNA, 15 bp, Homo sapiens
ttgaagaacaggcac

SEQ ID NO: 1192340 - DNA, 15 bp, Homo sapiens
tttgaagaacaggca

SEQ ID NO: 1192341 - DNA, 15 bp, Homo sapiens
ttttgaagaacaggc

SEQ ID NO: 1192342 - DNA, 15 bp, Homo sapiens
tttttgaagaacagg

SEQ ID NO: 1192343 - DNA, 15 bp, Homo sapiens
ctttttgaagaacag

SEQ ID NO: 1192344 - DNA, 15 bp, Homo sapiens
actttttgaagaaca

SEQ ID NO: 1192345 - DNA, 15 bp, Homo sapiens
cactttttgaagaac

SEQ ID NO: 1192346 - DNA, 15 bp, Homo sapiens
ccactttttgaagaa

SEQ ID NO: 1192347 - DNA, 15 bp, Homo sapiens
accactttttgaaga

SEQ ID NO: 1192348 - DNA, 15 bp, Homo sapiens
taccactttttgaag

SEQ ID NO: 1192349 - DNA, 15 bp, Homo sapiens
ataccactttttgaa

SEQ ID NO: 1192350 - DNA, 15 bp, Homo sapiens
aataccactttttga

SEQ ID NO: 1192351 - DNA, 15 bp, Homo sapiens
aaataccactttttg

SEQ ID NO: 1192352 - DNA, 15 bp, Homo sapiens
taaataccacttttt

SEQ ID NO: 1192353 - DNA, 15 bp, Homo sapiens
ttaaataccactttt

SEQ ID NO: 1192354 - DNA, 15 bp, Homo sapiens
tttaaataccacttt

SEQ ID NO: 1192355 - DNA, 15 bp, Homo sapiens
ttttaaataccactt

SEQ ID NO: 1192356 - DNA, 15 bp, Homo sapiens
attttaaataccact

SEQ ID NO: 1192357 - DNA, 15 bp, Homo sapiens
tattttaaataccac

SEQ ID NO: 1192358 - DNA, 15 bp, Homo sapiens
ttattttaaatacca

SEQ ID NO: 1192359 - DNA, 15 bp, Homo sapiens
tttattttaaatacc

SEQ ID NO: 1192360 - DNA, 15 bp, Homo sapiens
atttattttaaatac

SEQ ID NO: 1192361 - DNA, 15 bp, Homo sapiens
catttattttaaata

SEQ ID NO: 1192362 - DNA, 15 bp, Homo sapiens
acatttattttaaat

SEQ ID NO: 1192363 - DNA, 15 bp, Homo sapiens
cacatttattttaaa

SEQ ID NO: 1192364 - DNA, 15 bp, Homo sapiens
acacatttattttaa

SEQ ID NO: 1192365 - DNA, 15 bp, Homo sapiens
gacacatttatttta

SEQ ID NO: 1192366 - DNA, 15 bp, Homo sapiens
tgacacatttatttt

SEQ ID NO: 1192367 - DNA, 15 bp, Homo sapiens
ctgacacatttattt

SEQ ID NO: 1192368 - DNA, 15 bp, Homo sapiens
actgacacatttatt

SEQ ID NO: 1192369 - DNA, 15 bp, Homo sapiens
gactgacacatttat

SEQ ID NO: 1192370 - DNA, 15 bp, Homo sapiens
agactgacacattta

SEQ ID NO: 1192371 - DNA, 15 bp, Homo sapiens
gagactgacacattt

SEQ ID NO: 1192372 - DNA, 15 bp, Homo sapiens
tgagactgacacatt

SEQ ID NO: 1192373 - DNA, 15 bp, Homo sapiens
gtgagactgacacat

SEQ ID NO: 1192374 - DNA, 15 bp, Homo sapiens
tgtgagactgacaca

SEQ ID NO: 1192375 - DNA, 15 bp, Homo sapiens
ctgtgagactgacac

SEQ ID NO: 1192376 - DNA, 15 bp, Homo sapiens
gctgtgagactgaca

SEQ ID NO: 1192377 - DNA, 15 bp, Homo sapiens
tgctgtgagactgac

SEQ ID NO: 1192378 - DNA, 15 bp, Homo sapiens
ctgctgtgagactga

SEQ ID NO: 1192379 - DNA, 15 bp, Homo sapiens
cctgctgtgagactg

SEQ ID NO: 1192380 - DNA, 15 bp, Homo sapiens
ccctgctgtgagact

SEQ ID NO: 1192381 - DNA, 15 bp, Homo sapiens
accctgctgtgagac

SEQ ID NO: 1192382 - DNA, 15 bp, Homo sapiens
caccctgctgtgaga

SEQ ID NO: 1192383 - DNA, 15 bp, Homo sapiens
tcaccctgctgtgag

SEQ ID NO: 1192384 - DNA, 15 bp, Homo sapiens
ttcaccctgctgtga

SEQ ID NO: 1192385 - DNA, 15 bp, Homo sapiens
tttcaccctgctgtg

SEQ ID NO: 1192386 - DNA, 15 bp, Homo sapiens
atttcaccctgctgt

SEQ ID NO: 1192387 - DNA, 15 bp, Homo sapiens
aatttcaccctgctg

SEQ ID NO: 1192388 - DNA, 15 bp, Homo sapiens
caatttcaccctgct

SEQ ID NO: 1192389 - DNA, 15 bp, Homo sapiens
ccaatttcaccctgc

SEQ ID NO: 1192390 - DNA, 15 bp, Homo sapiens
accaatttcaccctg

SEQ ID NO: 1192391 - DNA, 15 bp, Homo sapiens
caccaatttcaccct

SEQ ID NO: 1192392 - DNA, 15 bp, Homo sapiens
gcaccaatttcaccc

SEQ ID NO: 1192393 - DNA, 15 bp, Homo sapiens
agcaccaatttcacc

SEQ ID NO: 1192394 - DNA, 15 bp, Homo sapiens
cagcaccaatttcac

SEQ ID NO: 1192395 - DNA, 15 bp, Homo sapiens
tcagcaccaatttca

SEQ ID NO: 1192396 - DNA, 15 bp, Homo sapiens
atcagcaccaatttc

SEQ ID NO: 1192397 - DNA, 15 bp, Homo sapiens
aatcagcaccaattt

SEQ ID NO: 1192398 - DNA, 15 bp, Homo sapiens
taatcagcaccaatt

SEQ ID NO: 1192399 - DNA, 15 bp, Homo sapiens
ttaatcagcaccaat

SEQ ID NO: 1192400 - DNA, 15 bp, Homo sapiens
tttaatcagcaccaa

SEQ ID NO: 1192401 - DNA, 15 bp, Homo sapiens
ttttaatcagcacca

SEQ ID NO: 1192402 - DNA, 15 bp, Homo sapiens
tttttaatcagcacc

SEQ ID NO: 1192403 - DNA, 15 bp, Homo sapiens
atttttaatcagcac

SEQ ID NO: 1192404 - DNA, 15 bp, Homo sapiens
catttttaatcagca

SEQ ID NO: 1192405 - DNA, 15 bp, Homo sapiens
gcatttttaatcagc

SEQ ID NO: 1192406 - DNA, 15 bp, Homo sapiens
ggcatttttaatcag

SEQ ID NO: 1192407 - DNA, 15 bp, Homo sapiens
gggcatttttaatca

SEQ ID NO: 1192408 - DNA, 15 bp, Homo sapiens
ggggcatttttaatc

SEQ ID NO: 1192409 - DNA, 15 bp, Homo sapiens
tggggcatttttaat

SEQ ID NO: 1192410 - DNA, 15 bp, Homo sapiens
atggggcatttttaa

SEQ ID NO: 1192411 - DNA, 15 bp, Homo sapiens
aatggggcattttta

SEQ ID NO: 1192412 - DNA, 15 bp, Homo sapiens
gaatggggcattttt

SEQ ID NO: 1192413 - DNA, 15 bp, Homo sapiens
ggaatggggcatttt

SEQ ID NO: 1192414 - DNA, 15 bp, Homo sapiens
tggaatggggcattt

SEQ ID NO: 1192415 - DNA, 15 bp, Homo sapiens
ctggaatggggcatt

SEQ ID NO: 1192416 - DNA, 15 bp, Homo sapiens
tctggaatggggcat

SEQ ID NO: 1192417 - DNA, 15 bp, Homo sapiens
gtctggaatggggca

SEQ ID NO: 1192418 - DNA, 15 bp, Homo sapiens
ggtctggaatggggc

SEQ ID NO: 1192419 - DNA, 15 bp, Homo sapiens
tggtctggaatgggg

SEQ ID NO: 1192420 - DNA, 15 bp, Homo sapiens
gtggtctggaatggg

SEQ ID NO: 1192421 - DNA, 15 bp, Homo sapiens
agtggtctggaatgg

SEQ ID NO: 1192422 - DNA, 15 bp, Homo sapiens
cagtggtctggaatg

SEQ ID NO: 1192423 - DNA, 15 bp, Homo sapiens
tcagtggtctggaat

SEQ ID NO: 1192424 - DNA, 15 bp, Homo sapiens
atcagtggtctggaa

SEQ ID NO: 1192425 - DNA, 15 bp, Homo sapiens
catcagtggtctgga

SEQ ID NO: 1192426 - DNA, 15 bp, Homo sapiens
ccatcagtggtctgg

SEQ ID NO: 1192427 - DNA, 15 bp, Homo sapiens
gccatcagtggtctg

SEQ ID NO: 1192428 - DNA, 15 bp, Homo sapiens
cgccatcagtggtct

SEQ ID NO: 1192429 - DNA, 15 bp, Homo sapiens
tcgccatcagtggtc

SEQ ID NO: 1192430 - DNA, 15 bp, Homo sapiens
gtcgccatcagtggt

SEQ ID NO: 1192431 - DNA, 15 bp, Homo sapiens
tgtcgccatcagtgg

SEQ ID NO: 1192432 - DNA, 15 bp, Homo sapiens
gtgtcgccatcagtg

SEQ ID NO: 1192433 - DNA, 15 bp, Homo sapiens
agtgtcgccatcagt

SEQ ID NO: 1192434 - DNA, 15 bp, Homo sapiens
gagtgtcgccatcag

SEQ ID NO: 1192435 - DNA, 15 bp, Homo sapiens
agagtgtcgccatca

SEQ ID NO: 1192436 - DNA, 15 bp, Homo sapiens
tagagtgtcgccatc

SEQ ID NO: 1192437 - DNA, 15 bp, Homo sapiens
ctagagtgtcgccat

SEQ ID NO: 1192438 - DNA, 15 bp, Homo sapiens
cctagagtgtcgcca

SEQ ID NO: 1192439 - DNA, 15 bp, Homo sapiens
acctagagtgtcgcc

SEQ ID NO: 1192440 - DNA, 15 bp, Homo sapiens
cacctagagtgtcgc

SEQ ID NO: 1192441 - DNA, 15 bp, Homo sapiens
acacctagagtgtcg

SEQ ID NO: 1192442 - DNA, 15 bp, Homo sapiens
cacacctagagtgtc

SEQ ID NO: 1192443 - DNA, 15 bp, Homo sapiens
ccacacctagagtgt

SEQ ID NO: 1192444 - DNA, 15 bp, Homo sapiens
cccacacctagagtg

SEQ ID NO: 1192445 - DNA, 15 bp, Homo sapiens
ccccacacctagagt

SEQ ID NO: 1192446 - DNA, 15 bp, Homo sapiens
tccccacacctagag

SEQ ID NO: 1192447 - DNA, 15 bp, Homo sapiens
gtccccacacctaga

SEQ ID NO: 1192448 - DNA, 15 bp, Homo sapiens
ggtccccacacctag

SEQ ID NO: 1192449 - DNA, 15 bp, Homo sapiens
aggtccccacaccta

SEQ ID NO: 1192450 - DNA, 15 bp, Homo sapiens
caggtccccacacct

SEQ ID NO: 1192451 - DNA, 15 bp, Homo sapiens
ccaggtccccacacc

SEQ ID NO: 1192452 - DNA, 15 bp, Homo sapiens
cccaggtccccacac

SEQ ID NO: 1192453 - DNA, 15 bp, Homo sapiens
tcccaggtccccaca

SEQ ID NO: 1192454 - DNA, 15 bp, Homo sapiens
ttcccaggtccccac

SEQ ID NO: 1192455 - DNA, 15 bp, Homo sapiens
attcccaggtcccca

SEQ ID NO: 1192456 - DNA, 15 bp, Homo sapiens
cattcccaggtcccc

SEQ ID NO: 1192457 - DNA, 15 bp, Homo sapiens
acattcccaggtccc

SEQ ID NO: 1192458 - DNA, 15 bp, Homo sapiens
cacattcccaggtcc

SEQ ID NO: 1192459 - DNA, 15 bp, Homo sapiens
gcacattcccaggtc

SEQ ID NO: 1192460 - DNA, 15 bp, Homo sapiens
tgcacattcccaggt

SEQ ID NO: 1192461 - DNA, 15 bp, Homo sapiens
atgcacattcccagg

SEQ ID NO: 1192462 - DNA, 15 bp, Homo sapiens
gatgcacattcccag

SEQ ID NO: 1192463 - DNA, 15 bp, Homo sapiens
agatgcacattccca

SEQ ID NO: 1192464 - DNA, 15 bp, Homo sapiens
gagatgcacattccc

SEQ ID NO: 1192465 - DNA, 15 bp, Homo sapiens
ggagatgcacattcc

SEQ ID NO: 1192466 - DNA, 15 bp, Homo sapiens
aggagatgcacattc

SEQ ID NO: 1192467 - DNA, 15 bp, Homo sapiens
taggagatgcacatt

SEQ ID NO: 1192468 - DNA, 15 bp, Homo sapiens
ataggagatgcacat

SEQ ID NO: 1192469 - DNA, 15 bp, Homo sapiens
aataggagatgcaca

SEQ ID NO: 1192470 - DNA, 15 bp, Homo sapiens
aaataggagatgcac

SEQ ID NO: 1192471 - DNA, 15 bp, Homo sapiens
gaaataggagatgca

SEQ ID NO: 1192472 - DNA, 15 bp, Homo sapiens
tgaaataggagatgc

SEQ ID NO: 1192473 - DNA, 15 bp, Homo sapiens
ctgaaataggagatg

SEQ ID NO: 1192474 - DNA, 15 bp, Homo sapiens
cctgaaataggagat

SEQ ID NO: 1192475 - DNA, 15 bp, Homo sapiens
acctgaaataggaga

SEQ ID NO: 1192476 - DNA, 15 bp, Homo sapiens
cacctgaaataggag

SEQ ID NO: 1192477 - DNA, 15 bp, Homo sapiens
gcacctgaaatagga

SEQ ID NO: 1192478 - DNA, 15 bp, Homo sapiens
agcacctgaaatagg

SEQ ID NO: 1192479 - DNA, 15 bp, Homo sapiens
aagcacctgaaatag

SEQ ID NO: 1192480 - DNA, 15 bp, Homo sapiens
gaagcacctgaaata

SEQ ID NO: 1192481 - DNA, 15 bp, Homo sapiens
agaagcacctgaaat

SEQ ID NO: 1192482 - DNA, 15 bp, Homo sapiens
aagaagcacctgaaa

SEQ ID NO: 1192483 - DNA, 15 bp, Homo sapiens
caagaagcacctgaa

SEQ ID NO: 1192484 - DNA, 15 bp, Homo sapiens
gcaagaagcacctga

SEQ ID NO: 1192485 - DNA, 15 bp, Homo sapiens
cgcaagaagcacctg

SEQ ID NO: 1192486 - DNA, 15 bp, Homo sapiens
gcgcaagaagcacct

SEQ ID NO: 1192487 - DNA, 15 bp, Homo sapiens
ggcgcaagaagcacc

SEQ ID NO: 1192488 - DNA, 15 bp, Homo sapiens
aggcgcaagaagcac

SEQ ID NO: 1192489 - DNA, 15 bp, Homo sapiens
gaggcgcaagaagca

SEQ ID NO: 1192490 - DNA, 15 bp, Homo sapiens
tgaggcgcaagaagc

SEQ ID NO: 1192491 - DNA, 15 bp, Homo sapiens
gtgaggcgcaagaag

SEQ ID NO: 1192492 - DNA, 15 bp, Homo sapiens
agtgaggcgcaagaa

SEQ ID NO: 1192493 - DNA, 15 bp, Homo sapiens
cagtgaggcgcaaga

SEQ ID NO: 1192494 - DNA, 15 bp, Homo sapiens
acagtgaggcgcaag

SEQ ID NO: 1192495 - DNA, 15 bp, Homo sapiens
aacagtgaggcgcaa

SEQ ID NO: 1192496 - DNA, 15 bp, Homo sapiens
taacagtgaggcgca

SEQ ID NO: 1192497 - DNA, 15 bp, Homo sapiens
ttaacagtgaggcgc

SEQ ID NO: 1192498 - DNA, 15 bp, Homo sapiens
cttaacagtgaggcg

SEQ ID NO: 1192499 - DNA, 15 bp, Homo sapiens
tcttaacagtgaggc

SEQ ID NO: 1192500 - DNA, 15 bp, Homo sapiens
ctcttaacagtgagg

SEQ ID NO: 1192501 - DNA, 15 bp, Homo sapiens
actcttaacagtgag

SEQ ID NO: 1192502 - DNA, 15 bp, Homo sapiens
tactcttaacagtga

SEQ ID NO: 1192503 - DNA, 15 bp, Homo sapiens
ttactcttaacagtg

SEQ ID NO: 1192504 - DNA, 15 bp, Homo sapiens
tttactcttaacagt

SEQ ID NO: 1192505 - DNA, 15 bp, Homo sapiens
ttttactcttaacag

SEQ ID NO: 1192506 - DNA, 15 bp, Homo sapiens
attttactcttaaca

SEQ ID NO: 1192507 - DNA, 15 bp, Homo sapiens
aattttactcttaac

SEQ ID NO: 1192508 - DNA, 15 bp, Homo sapiens
aaattttactcttaa

SEQ ID NO: 1192509 - DNA, 15 bp, Homo sapiens
aaaattttactctta

SEQ ID NO: 1192510 - DNA, 15 bp, Homo sapiens
caaaattttactctt

SEQ ID NO: 1192511 - DNA, 15 bp, Homo sapiens
tcaaaattttactct

SEQ ID NO: 1192512 - DNA, 15 bp, Homo sapiens
gtcaaaattttactc

SEQ ID NO: 1192513 - DNA, 15 bp, Homo sapiens
tgtcaaaattttact

SEQ ID NO: 1192514 - DNA, 15 bp, Homo sapiens
atgtcaaaattttac

SEQ ID NO: 1192515 - DNA, 15 bp, Homo sapiens
gatgtcaaaatttta

SEQ ID NO: 1192516 - DNA, 15 bp, Homo sapiens
agatgtcaaaatttt

SEQ ID NO: 1192517 - DNA, 15 bp, Homo sapiens
cagatgtcaaaattt

SEQ ID NO: 1192518 - DNA, 15 bp, Homo sapiens
acagatgtcaaaatt

SEQ ID NO: 1192519 - DNA, 15 bp, Homo sapiens
cacagatgtcaaaat

SEQ ID NO: 1192520 - DNA, 15 bp, Homo sapiens
tcacagatgtcaaaa

SEQ ID NO: 1192521 - DNA, 15 bp, Homo sapiens
ttcacagatgtcaaa

SEQ ID NO: 1192522 - DNA, 15 bp, Homo sapiens
gttcacagatgtcaa

SEQ ID NO: 1192523 - DNA, 15 bp, Homo sapiens
ggttcacagatgtca

SEQ ID NO: 1192524 - DNA, 15 bp, Homo sapiens
gggttcacagatgtc

SEQ ID NO: 1192525 - DNA, 15 bp, Homo sapiens
tgggttcacagatgt

SEQ ID NO: 1192526 - DNA, 15 bp, Homo sapiens
ttgggttcacagatg

SEQ ID NO: 1192527 - DNA, 15 bp, Homo sapiens
attgggttcacagat

SEQ ID NO: 1192528 - DNA, 15 bp, Homo sapiens
aattgggttcacaga

SEQ ID NO: 1192529 - DNA, 15 bp, Homo sapiens
gaattgggttcacag

SEQ ID NO: 1192530 - DNA, 15 bp, Homo sapiens
ggaattgggttcaca

SEQ ID NO: 1192531 - DNA, 15 bp, Homo sapiens
cggaattgggttcac

SEQ ID NO: 1192532 - DNA, 15 bp, Homo sapiens
ccggaattgggttca

SEQ ID NO: 1192533 - DNA, 15 bp, Homo sapiens
accggaattgggttc

SEQ ID NO: 1192534 - DNA, 15 bp, Homo sapiens
aaccggaattgggtt

SEQ ID NO: 1192535 - DNA, 15 bp, Homo sapiens
aaaccggaattgggt

SEQ ID NO: 1192536 - DNA, 15 bp, Homo sapiens
gaaaccggaattggg

SEQ ID NO: 1192537 - DNA, 15 bp, Homo sapiens
ggaaaccggaattgg

SEQ ID NO: 1192538 - DNA, 15 bp, Homo sapiens
aggaaaccggaattg

SEQ ID NO: 1192539 - DNA, 15 bp, Homo sapiens
gaggaaaccggaatt

SEQ ID NO: 1192540 - DNA, 15 bp, Homo sapiens
ggaggaaaccggaat

SEQ ID NO: 1192541 - DNA, 15 bp, Homo sapiens
gggaggaaaccggaa

SEQ ID NO: 1192542 - DNA, 15 bp, Homo sapiens
tgggaggaaaccgga

SEQ ID NO: 1192543 - DNA, 15 bp, Homo sapiens
ctgggaggaaaccgg

SEQ ID NO: 1192544 - DNA, 15 bp, Homo sapiens
gctgggaggaaaccg

SEQ ID NO: 1192545 - DNA, 15 bp, Homo sapiens
agctgggaggaaacc

SEQ ID NO: 1192546 - DNA, 15 bp, Homo sapiens
tagctgggaggaaac

SEQ ID NO: 1192547 - DNA, 15 bp, Homo sapiens
gtagctgggaggaaa

SEQ ID NO: 1192548 - DNA, 15 bp, Homo sapiens
tgtagctgggaggaa

SEQ ID NO: 1192549 - DNA, 15 bp, Homo sapiens
ctgtagctgggagga

SEQ ID NO: 1192550 - DNA, 15 bp, Homo sapiens
gctgtagctgggagg

SEQ ID NO: 1192551 - DNA, 15 bp, Homo sapiens
agctgtagctgggag

SEQ ID NO: 1192552 - DNA, 15 bp, Homo sapiens
cagctgtagctggga

SEQ ID NO: 1192553 - DNA, 15 bp, Homo sapiens
tcagctgtagctggg

SEQ ID NO: 1192554 - DNA, 15 bp, Homo sapiens
ctcagctgtagctgg

SEQ ID NO: 1192555 - DNA, 15 bp, Homo sapiens
tctcagctgtagctg

SEQ ID NO: 1192556 - DNA, 15 bp, Homo sapiens
ttctcagctgtagct

SEQ ID NO: 1192557 - DNA, 15 bp, Homo sapiens
attctcagctgtagc

SEQ ID NO: 1192558 - DNA, 15 bp, Homo sapiens
cattctcagctgtag

SEQ ID NO: 1192559 - DNA, 15 bp, Homo sapiens
gcattctcagctgta

SEQ ID NO: 1192560 - DNA, 15 bp, Homo sapiens
ggcattctcagctgt

SEQ ID NO: 1192561 - DNA, 15 bp, Homo sapiens
aggcattctcagctg

SEQ ID NO: 1192562 - DNA, 15 bp, Homo sapiens
aaggcattctcagct

SEQ ID NO: 1192563 - DNA, 15 bp, Homo sapiens
aaaggcattctcagc

SEQ ID NO: 1192564 - DNA, 15 bp, Homo sapiens
aaaaggcattctcag

SEQ ID NO: 1192565 - DNA, 15 bp, Homo sapiens
taaaaggcattctca

SEQ ID NO: 1192566 - DNA, 15 bp, Homo sapiens
ctaaaaggcattctc

SEQ ID NO: 1192567 - DNA, 15 bp, Homo sapiens
tctaaaaggcattct

SEQ ID NO: 1192568 - DNA, 15 bp, Homo sapiens
ttctaaaaggcattc

SEQ ID NO: 1192569 - DNA, 15 bp, Homo sapiens
tttctaaaaggcatt

SEQ ID NO: 1192570 - DNA, 15 bp, Homo sapiens
ctttctaaaaggcat

SEQ ID NO: 1192571 - DNA, 15 bp, Homo sapiens
tctttctaaaaggca

SEQ ID NO: 1192572 - DNA, 15 bp, Homo sapiens
ttctttctaaaaggc

SEQ ID NO: 1192573 - DNA, 15 bp, Homo sapiens
attctttctaaaagg

SEQ ID NO: 1192574 - DNA, 15 bp, Homo sapiens
cattctttctaaaag

SEQ ID NO: 1192575 - DNA, 15 bp, Homo sapiens
acattctttctaaaa

SEQ ID NO: 1192576 - DNA, 15 bp, Homo sapiens
cacattctttctaaa

SEQ ID NO: 1192577 - DNA, 15 bp, Homo sapiens
acacattctttctaa

SEQ ID NO: 1192578 - DNA, 15 bp, Homo sapiens
gacacattctttcta

SEQ ID NO: 1192579 - DNA, 15 bp, Homo sapiens
agacacattctttct

SEQ ID NO: 1192580 - DNA, 15 bp, Homo sapiens
tagacacattctttc

SEQ ID NO: 1192581 - DNA, 15 bp, Homo sapiens
ttagacacattcttt

SEQ ID NO: 1192582 - DNA, 15 bp, Homo sapiens
gttagacacattctt

SEQ ID NO: 1192583 - DNA, 15 bp, Homo sapiens
cgttagacacattct

SEQ ID NO: 1192584 - DNA, 15 bp, Homo sapiens
acgttagacacattc

SEQ ID NO: 1192585 - DNA, 15 bp, Homo sapiens
cacgttagacacatt

SEQ ID NO: 1192586 - DNA, 15 bp, Homo sapiens
ccacgttagacacat

SEQ ID NO: 1192587 - DNA, 15 bp, Homo sapiens
cccacgttagacaca

SEQ ID NO: 1192588 - DNA, 15 bp, Homo sapiens
gcccacgttagacac

SEQ ID NO: 1192589 - DNA, 15 bp, Homo sapiens
tgcccacgttagaca

SEQ ID NO: 1192590 - DNA, 15 bp, Homo sapiens
gtgcccacgttagac

SEQ ID NO: 1192591 - DNA, 15 bp, Homo sapiens
agtgcccacgttaga

SEQ ID NO: 1192592 - DNA, 15 bp, Homo sapiens
aagtgcccacgttag

SEQ ID NO: 1192593 - DNA, 15 bp, Homo sapiens
taagtgcccacgtta

SEQ ID NO: 1192594 - DNA, 15 bp, Homo sapiens
ttaagtgcccacgtt

SEQ ID NO: 1192595 - DNA, 15 bp, Homo sapiens
gttaagtgcccacgt

SEQ ID NO: 1192596 - DNA, 15 bp, Homo sapiens
ggttaagtgcccacg

SEQ ID NO: 1192597 - DNA, 15 bp, Homo sapiens
aggttaagtgcccac

SEQ ID NO: 1192598 - DNA, 15 bp, Homo sapiens
aaggttaagtgccca

SEQ ID NO: 1192599 - DNA, 15 bp, Homo sapiens
caaggttaagtgccc

SEQ ID NO: 1192600 - DNA, 15 bp, Homo sapiens
gcaaggttaagtgcc

SEQ ID NO: 1192601 - DNA, 15 bp, Homo sapiens
tgcaaggttaagtgc

SEQ ID NO: 1192602 - DNA, 15 bp, Homo sapiens
atgcaaggttaagtg

SEQ ID NO: 1192603 - DNA, 15 bp, Homo sapiens
aatgcaaggttaagt

SEQ ID NO: 1192604 - DNA, 15 bp, Homo sapiens
aaatgcaaggttaag

SEQ ID NO: 1192605 - DNA, 15 bp, Homo sapiens
taaatgcaaggttaa

SEQ ID NO: 1192606 - DNA, 15 bp, Homo sapiens
ttaaatgcaaggtta

SEQ ID NO: 1192607 - DNA, 15 bp, Homo sapiens
tttaaatgcaaggtt

SEQ ID NO: 1192608 - DNA, 15 bp, Homo sapiens
ttttaaatgcaaggt

SEQ ID NO: 1192609 - DNA, 15 bp, Homo sapiens
gttttaaatgcaagg

SEQ ID NO: 1192610 - DNA, 15 bp, Homo sapiens
agttttaaatgcaag

SEQ ID NO: 1192611 - DNA, 15 bp, Homo sapiens
cagttttaaatgcaa

SEQ ID NO: 1192612 - DNA, 15 bp, Homo sapiens
acagttttaaatgca

SEQ ID NO: 1192613 - DNA, 15 bp, Homo sapiens
tacagttttaaatgc

SEQ ID NO: 1192614 - DNA, 15 bp, Homo sapiens
ttacagttttaaatg

SEQ ID NO: 1192615 - DNA, 15 bp, Homo sapiens
gttacagttttaaat

SEQ ID NO: 1192616 - DNA, 15 bp, Homo sapiens
ggttacagttttaaa

SEQ ID NO: 1192617 - DNA, 15 bp, Homo sapiens
tggttacagttttaa

SEQ ID NO: 1192618 - DNA, 15 bp, Homo sapiens
ttggttacagtttta

SEQ ID NO: 1192619 - DNA, 15 bp, Homo sapiens
tttggttacagtttt

SEQ ID NO: 1192620 - DNA, 15 bp, Homo sapiens
atttggttacagttt

SEQ ID NO: 1192621 - DNA, 15 bp, Homo sapiens
tatttggttacagtt

SEQ ID NO: 1192622 - DNA, 15 bp, Homo sapiens
gtatttggttacagt

SEQ ID NO: 1192623 - DNA, 15 bp, Homo sapiens
agtatttggttacag

SEQ ID NO: 1192624 - DNA, 15 bp, Homo sapiens
gagtatttggttaca

SEQ ID NO: 1192625 - DNA, 15 bp, Homo sapiens
agagtatttggttac

SEQ ID NO: 1192626 - DNA, 15 bp, Homo sapiens
aagagtatttggtta

SEQ ID NO: 1192627 - DNA, 15 bp, Homo sapiens
taagagtatttggtt

SEQ ID NO: 1192628 - DNA, 15 bp, Homo sapiens
gtaagagtatttggt

SEQ ID NO: 1192629 - DNA, 15 bp, Homo sapiens
agtaagagtatttgg

SEQ ID NO: 1192630 - DNA, 15 bp, Homo sapiens
aagtaagagtatttg

SEQ ID NO: 1192631 - DNA, 15 bp, Homo sapiens
aaagtaagagtattt

SEQ ID NO: 1192632 - DNA, 15 bp, Homo sapiens
aaaagtaagagtatt

SEQ ID NO: 1192633 - DNA, 15 bp, Homo sapiens
taaaagtaagagtat

SEQ ID NO: 1192634 - DNA, 15 bp, Homo sapiens
ataaaagtaagagta

SEQ ID NO: 1192635 - DNA, 15 bp, Homo sapiens
tataaaagtaagagt

SEQ ID NO: 1192636 - DNA, 15 bp, Homo sapiens
atataaaagtaagag

SEQ ID NO: 1192637 - DNA, 15 bp, Homo sapiens
aatataaaagtaaga

SEQ ID NO: 1192638 - DNA, 15 bp, Homo sapiens
gaatataaaagtaag

SEQ ID NO: 1192639 - DNA, 15 bp, Homo sapiens
ggaatataaaagtaa

SEQ ID NO: 1192640 - DNA, 15 bp, Homo sapiens
aggaatataaaagta

SEQ ID NO: 1192641 - DNA, 15 bp, Homo sapiens
taggaatataaaagt

SEQ ID NO: 1192642 - DNA, 15 bp, Homo sapiens
ttaggaatataaaag

SEQ ID NO: 1192643 - DNA, 15 bp, Homo sapiens
tttaggaatataaaa

SEQ ID NO: 1192644 - DNA, 15 bp, Homo sapiens
ttttaggaatataaa

SEQ ID NO: 1192645 - DNA, 15 bp, Homo sapiens
tttttaggaatataa

SEQ ID NO: 1192646 - DNA, 15 bp, Homo sapiens
gtttttaggaatata

SEQ ID NO: 1192647 - DNA, 15 bp, Homo sapiens
tgtttttaggaatat

SEQ ID NO: 1192648 - DNA, 15 bp, Homo sapiens
atgtttttaggaata

SEQ ID NO: 1192649 - DNA, 15 bp, Homo sapiens
tatgtttttaggaat

SEQ ID NO: 1192650 - DNA, 15 bp, Homo sapiens
atatgtttttaggaa

SEQ ID NO: 1192651 - DNA, 15 bp, Homo sapiens
tatatgtttttagga

SEQ ID NO: 1192652 - DNA, 15 bp, Homo sapiens
ttatatgtttttagg

SEQ ID NO: 1192653 - DNA, 15 bp, Homo sapiens
cttatatgtttttag

SEQ ID NO: 1192654 - DNA, 15 bp, Homo sapiens
gcttatatgttttta

SEQ ID NO: 1192655 - DNA, 15 bp, Homo sapiens
tgcttatatgttttt

SEQ ID NO: 1192656 - DNA, 15 bp, Homo sapiens
ctgcttatatgtttt

SEQ ID NO: 1192657 - DNA, 15 bp, Homo sapiens
tctgcttatatgttt

SEQ ID NO: 1192658 - DNA, 15 bp, Homo sapiens
ttctgcttatatgtt

SEQ ID NO: 1192659 - DNA, 15 bp, Homo sapiens
tttctgcttatatgt

SEQ ID NO: 1192660 - DNA, 15 bp, Homo sapiens
gtttctgcttatatg

SEQ ID NO: 1192661 - DNA, 15 bp, Homo sapiens
agtttctgcttatat

SEQ ID NO: 1192662 - DNA, 15 bp, Homo sapiens
aagtttctgcttata

SEQ ID NO: 1192663 - DNA, 15 bp, Homo sapiens
taagtttctgcttat

SEQ ID NO: 1192664 - DNA, 15 bp, Homo sapiens
ataagtttctgctta

SEQ ID NO: 1192665 - DNA, 15 bp, Homo sapiens
tataagtttctgctt

SEQ ID NO: 1192666 - DNA, 15 bp, Homo sapiens
gtataagtttctgct

SEQ ID NO: 1192667 - DNA, 15 bp, Homo sapiens
tgtataagtttctgc

SEQ ID NO: 1192668 - DNA, 15 bp, Homo sapiens
atgtataagtttctg

SEQ ID NO: 1192669 - DNA, 15 bp, Homo sapiens
catgtataagtttct

SEQ ID NO: 1192670 - DNA, 15 bp, Homo sapiens
gcatgtataagtttc

SEQ ID NO: 1192671 - DNA, 15 bp, Homo sapiens
agcatgtataagttt

SEQ ID NO: 1192672 - DNA, 15 bp, Homo sapiens
cagcatgtataagtt

SEQ ID NO: 1192673 - DNA, 15 bp, Homo sapiens
tcagcatgtataagt

SEQ ID NO: 1192674 - DNA, 15 bp, Homo sapiens
ttcagcatgtataag

SEQ ID NO: 1192675 - DNA, 15 bp, Homo sapiens
attcagcatgtataa

SEQ ID NO: 1192676 - DNA, 15 bp, Homo sapiens
aattcagcatgtata

SEQ ID NO: 1192677 - DNA, 15 bp, Homo sapiens
caattcagcatgtat

SEQ ID NO: 1192678 - DNA, 15 bp, Homo sapiens
tcaattcagcatgta

SEQ ID NO: 1192679 - DNA, 15 bp, Homo sapiens
ctcaattcagcatgt

SEQ ID NO: 1192680 - DNA, 15 bp, Homo sapiens
actcaattcagcatg

SEQ ID NO: 1192681 - DNA, 15 bp, Homo sapiens
tactcaattcagcat

SEQ ID NO: 1192682 - DNA, 15 bp, Homo sapiens
atactcaattcagca

SEQ ID NO: 1192683 - DNA, 15 bp, Homo sapiens
tatactcaattcagc

SEQ ID NO: 1192684 - DNA, 15 bp, Homo sapiens
atatactcaattcag

SEQ ID NO: 1192685 - DNA, 15 bp, Homo sapiens
tatatactcaattca

SEQ ID NO: 1192686 - DNA, 15 bp, Homo sapiens
gtatatactcaattc

SEQ ID NO: 1192687 - DNA, 15 bp, Homo sapiens
ggtatatactcaatt

SEQ ID NO: 1192688 - DNA, 15 bp, Homo sapiens
tggtatatactcaat

SEQ ID NO: 1192689 - DNA, 15 bp, Homo sapiens
gtggtatatactcaa

SEQ ID NO: 1192690 - DNA, 15 bp, Homo sapiens
agtggtatatactca

SEQ ID NO: 1192691 - DNA, 15 bp, Homo sapiens
aagtggtatatactc

SEQ ID NO: 1192692 - DNA, 15 bp, Homo sapiens
taagtggtatatact

SEQ ID NO: 1192693 - DNA, 15 bp, Homo sapiens
ttaagtggtatatac

SEQ ID NO: 1192694 - DNA, 15 bp, Homo sapiens
tttaagtggtatata

SEQ ID NO: 1192695 - DNA, 15 bp, Homo sapiens
gtttaagtggtatat

SEQ ID NO: 1192696 - DNA, 15 bp, Homo sapiens
tgtttaagtggtata

SEQ ID NO: 1192697 - DNA, 15 bp, Homo sapiens
atgtttaagtggtat

SEQ ID NO: 1192698 - DNA, 15 bp, Homo sapiens
catgtttaagtggta

SEQ ID NO: 1192699 - DNA, 15 bp, Homo sapiens
acatgtttaagtggt

SEQ ID NO: 1192700 - DNA, 15 bp, Homo sapiens
aacatgtttaagtgg

SEQ ID NO: 1192701 - DNA, 15 bp, Homo sapiens
taacatgtttaagtg

SEQ ID NO: 1192702 - DNA, 15 bp, Homo sapiens
ctaacatgtttaagt

SEQ ID NO: 1192703 - DNA, 15 bp, Homo sapiens
tctaacatgtttaag

SEQ ID NO: 1192704 - DNA, 15 bp, Homo sapiens
ctctaacatgtttaa

SEQ ID NO: 1192705 - DNA, 15 bp, Homo sapiens
cctctaacatgttta

SEQ ID NO: 1192706 - DNA, 15 bp, Homo sapiens
acctctaacatgttt

SEQ ID NO: 1192707 - DNA, 15 bp, Homo sapiens
tacctctaacatgtt

SEQ ID NO: 1192708 - DNA, 15 bp, Homo sapiens
ctacctctaacatgt

SEQ ID NO: 1192709 - DNA, 15 bp, Homo sapiens
cctacctctaacatg

SEQ ID NO: 1192710 - DNA, 15 bp, Homo sapiens
acctacctctaacat

SEQ ID NO: 1192711 - DNA, 15 bp, Homo sapiens
tacctacctctaaca

SEQ ID NO: 1192712 - DNA, 15 bp, Homo sapiens
ctacctacctctaac

SEQ ID NO: 1192713 - DNA, 15 bp, Homo sapiens
actacctacctctaa

SEQ ID NO: 1192714 - DNA, 15 bp, Homo sapiens
tactacctacctcta

SEQ ID NO: 1192715 - DNA, 15 bp, Homo sapiens
ctactacctacctct

SEQ ID NO: 1192716 - DNA, 15 bp, Homo sapiens
tctactacctacctc

SEQ ID NO: 1192717 - DNA, 15 bp, Homo sapiens
ttctactacctacct

SEQ ID NO: 1192718 - DNA, 15 bp, Homo sapiens
cttctactacctacc

SEQ ID NO: 1192719 - DNA, 15 bp, Homo sapiens
tcttctactacctac

SEQ ID NO: 1192720 - DNA, 15 bp, Homo sapiens
atcttctactaccta

SEQ ID NO: 1192721 - DNA, 15 bp, Homo sapiens
aatcttctactacct

SEQ ID NO: 1192722 - DNA, 15 bp, Homo sapiens
gaatcttctactacc

SEQ ID NO: 1192723 - DNA, 15 bp, Homo sapiens
agaatcttctactac

SEQ ID NO: 1192724 - DNA, 15 bp, Homo sapiens
aagaatcttctacta

SEQ ID NO: 1192725 - DNA, 15 bp, Homo sapiens
aaagaatcttctact

SEQ ID NO: 1192726 - DNA, 15 bp, Homo sapiens
aaaagaatcttctac

SEQ ID NO: 1192727 - DNA, 15 bp, Homo sapiens
taaaagaatcttcta

SEQ ID NO: 1192728 - DNA, 15 bp, Homo sapiens
ataaaagaatcttct

SEQ ID NO: 1192729 - DNA, 15 bp, Homo sapiens
aataaaagaatcttc

SEQ ID NO: 1192730 - DNA, 15 bp, Homo sapiens
aaataaaagaatctt

SEQ ID NO: 1192731 - DNA, 15 bp, Homo sapiens
aaaataaaagaatct

SEQ ID NO: 1192732 - DNA, 15 bp, Homo sapiens
taaaataaaagaatc

SEQ ID NO: 1192733 - DNA, 15 bp, Homo sapiens
ttaaaataaaagaat

SEQ ID NO: 1192734 - DNA, 15 bp, Homo sapiens
tttaaaataaaagaa

SEQ ID NO: 1192735 - DNA, 15 bp, Homo sapiens
ttttaaaataaaaga

SEQ ID NO: 1192736 - DNA, 15 bp, Homo sapiens
tttttaaaataaaag

SEQ ID NO: 1192737 - DNA, 15 bp, Homo sapiens
ttttttaaaataaaa

SEQ ID NO: 1192738 - DNA, 15 bp, Homo sapiens
tttttttaaaataaa

SEQ ID NO: 1192739 - DNA, 15 bp, Homo sapiens
ttttttttaaaataa

SEQ ID NO: 1192740 - DNA, 15 bp, Homo sapiens
attttttttaaaata

SEQ ID NO: 1192741 - DNA, 15 bp, Homo sapiens
aattttttttaaaat

SEQ ID NO: 1192742 - DNA, 15 bp, Homo sapiens
taattttttttaaaa

SEQ ID NO: 1192743 - DNA, 15 bp, Homo sapiens
gtaattttttttaaa

SEQ ID NO: 1192744 - DNA, 15 bp, Homo sapiens
tgtaattttttttaa

SEQ ID NO: 1192745 - DNA, 15 bp, Homo sapiens
gtgtaatttttttta

SEQ ID NO: 1192746 - DNA, 15 bp, Homo sapiens
cgtgtaatttttttt

SEQ ID NO: 1192747 - DNA, 15 bp, Homo sapiens
acgtgtaattttttt

SEQ ID NO: 1192748 - DNA, 15 bp, Homo sapiens
cacgtgtaatttttt

SEQ ID NO: 1192749 - DNA, 15 bp, Homo sapiens
ccacgtgtaattttt

SEQ ID NO: 1192750 - DNA, 15 bp, Homo sapiens
accacgtgtaatttt

SEQ ID NO: 1192751 - DNA, 15 bp, Homo sapiens
aaccacgtgtaattt

SEQ ID NO: 1192752 - DNA, 15 bp, Homo sapiens
gaaccacgtgtaatt

SEQ ID NO: 1192753 - DNA, 15 bp, Homo sapiens
agaaccacgtgtaat

SEQ ID NO: 1192754 - DNA, 15 bp, Homo sapiens
tagaaccacgtgtaa

SEQ ID NO: 1192755 - DNA, 15 bp, Homo sapiens
gtagaaccacgtgta

SEQ ID NO: 1192756 - DNA, 15 bp, Homo sapiens
tgtagaaccacgtgt

SEQ ID NO: 1192757 - DNA, 15 bp, Homo sapiens
ttgtagaaccacgtg

SEQ ID NO: 1192758 - DNA, 15 bp, Homo sapiens
attgtagaaccacgt

SEQ ID NO: 1192759 - DNA, 15 bp, Homo sapiens
tattgtagaaccacg

SEQ ID NO: 1192760 - DNA, 15 bp, Homo sapiens
ttattgtagaaccac

SEQ ID NO: 1192761 - DNA, 15 bp, Homo sapiens
attattgtagaacca

SEQ ID NO: 1192762 - DNA, 15 bp, Homo sapiens
aattattgtagaacc

SEQ ID NO: 1192763 - DNA, 15 bp, Homo sapiens
aaattattgtagaac

SEQ ID NO: 1192764 - DNA, 15 bp, Homo sapiens
aaaattattgtagaa

SEQ ID NO: 1192765 - DNA, 15 bp, Homo sapiens
aaaaattattgtaga

SEQ ID NO: 1192766 - DNA, 15 bp, Homo sapiens
gaaaaattattgtag

SEQ ID NO: 1192767 - DNA, 15 bp, Homo sapiens
ggaaaaattattgta

SEQ ID NO: 1192768 - DNA, 15 bp, Homo sapiens
aggaaaaattattgt

SEQ ID NO: 1192769 - DNA, 15 bp, Homo sapiens
aaggaaaaattattg

SEQ ID NO: 1192770 - DNA, 15 bp, Homo sapiens
aaaggaaaaattatt

SEQ ID NO: 1192771 - DNA, 15 bp, Homo sapiens
aaaaggaaaaattat

SEQ ID NO: 1192772 - DNA, 15 bp, Homo sapiens
taaaaggaaaaatta

SEQ ID NO: 1192773 - DNA, 15 bp, Homo sapiens
ttaaaaggaaaaatt

SEQ ID NO: 1192774 - DNA, 15 bp, Homo sapiens
tttaaaaggaaaaat

SEQ ID NO: 1192775 - DNA, 15 bp, Homo sapiens
tttttaaaaggaaaa

SEQ ID NO: 1192776 - DNA, 15 bp, Homo sapiens
ctttttaaaaggaaa

SEQ ID NO: 1192777 - DNA, 15 bp, Homo sapiens
gctttttaaaaggaa

SEQ ID NO: 1192778 - DNA, 15 bp, Homo sapiens
agctttttaaaagga

SEQ ID NO: 1192779 - DNA, 15 bp, Homo sapiens
aagctttttaaaagg

SEQ ID NO: 1192780 - DNA, 15 bp, Homo sapiens
gaagctttttaaaag

SEQ ID NO: 1192781 - DNA, 15 bp, Homo sapiens
tgaagctttttaaaa

SEQ ID NO: 1192782 - DNA, 15 bp, Homo sapiens
ttgaagctttttaaa

SEQ ID NO: 1192783 - DNA, 15 bp, Homo sapiens
cttgaagctttttaa

SEQ ID NO: 1192784 - DNA, 15 bp, Homo sapiens
tcttgaagcttttta

SEQ ID NO: 1192785 - DNA, 15 bp, Homo sapiens
atcttgaagcttttt

SEQ ID NO: 1192786 - DNA, 15 bp, Homo sapiens
tatcttgaagctttt

SEQ ID NO: 1192787 - DNA, 15 bp, Homo sapiens
atatcttgaagcttt

SEQ ID NO: 1192788 - DNA, 15 bp, Homo sapiens
tatatcttgaagctt

SEQ ID NO: 1192789 - DNA, 15 bp, Homo sapiens
gtatatcttgaagct

SEQ ID NO: 1192790 - DNA, 15 bp, Homo sapiens
tgtatatcttgaagc

SEQ ID NO: 1192791 - DNA, 15 bp, Homo sapiens
ctgtatatcttgaag

SEQ ID NO: 1192792 - DNA, 15 bp, Homo sapiens
cctgtatatcttgaa

SEQ ID NO: 1192793 - DNA, 15 bp, Homo sapiens
ccctgtatatcttga

SEQ ID NO: 1192794 - DNA, 15 bp, Homo sapiens
tccctgtatatcttg

SEQ ID NO: 1192795 - DNA, 15 bp, Homo sapiens
ctccctgtatatctt

SEQ ID NO: 1192796 - DNA, 15 bp, Homo sapiens
tctccctgtatatct

SEQ ID NO: 1192797 - DNA, 15 bp, Homo sapiens
atctccctgtatatc

SEQ ID NO: 1192798 - DNA, 15 bp, Homo sapiens
catctccctgtatat

SEQ ID NO: 1192799 - DNA, 15 bp, Homo sapiens
gcatctccctgtata

SEQ ID NO: 1192800 - DNA, 15 bp, Homo sapiens
tgcatctccctgtat

SEQ ID NO: 1192801 - DNA, 15 bp, Homo sapiens
gtgcatctccctgta

SEQ ID NO: 1192802 - DNA, 15 bp, Homo sapiens
agtgcatctccctgt

SEQ ID NO: 1192803 - DNA, 15 bp, Homo sapiens
tagtgcatctccctg

SEQ ID NO: 1192804 - DNA, 15 bp, Homo sapiens
ctagtgcatctccct

SEQ ID NO: 1192805 - DNA, 15 bp, Homo sapiens
actagtgcatctccc

SEQ ID NO: 1192806 - DNA, 15 bp, Homo sapiens
gactagtgcatctcc

SEQ ID NO: 1192807 - DNA, 15 bp, Homo sapiens
ggactagtgcatctc

SEQ ID NO: 1192808 - DNA, 15 bp, Homo sapiens
tggactagtgcatct

SEQ ID NO: 1192809 - DNA, 15 bp, Homo sapiens
ttggactagtgcatc

SEQ ID NO: 1192810 - DNA, 15 bp, Homo sapiens
cttggactagtgcat

SEQ ID NO: 1192811 - DNA, 15 bp, Homo sapiens
tcttggactagtgca

SEQ ID NO: 1192812 - DNA, 15 bp, Homo sapiens
ttcttggactagtgc

SEQ ID NO: 1192813 - DNA, 15 bp, Homo sapiens
tttcttggactagtg

SEQ ID NO: 1192814 - DNA, 15 bp, Homo sapiens
atttcttggactagt

SEQ ID NO: 1192815 - DNA, 15 bp, Homo sapiens
gatttcttggactag

SEQ ID NO: 1192816 - DNA, 15 bp, Homo sapiens
ggatttcttggacta

SEQ ID NO: 1192817 - DNA, 15 bp, Homo sapiens
tggatttcttggact

SEQ ID NO: 1192818 - DNA, 15 bp, Homo sapiens
ctggatttcttggac

SEQ ID NO: 1192819 - DNA, 15 bp, Homo sapiens
gctggatttcttgga

SEQ ID NO: 1192820 - DNA, 15 bp, Homo sapiens
agctggatttcttgg

SEQ ID NO: 1192821 - DNA, 15 bp, Homo sapiens
aagctggatttcttg

SEQ ID NO: 1192822 - DNA, 15 bp, Homo sapiens
caagctggatttctt

SEQ ID NO: 1192823 - DNA, 15 bp, Homo sapiens
acaagctggatttct

SEQ ID NO: 1192824 - DNA, 15 bp, Homo sapiens
gacaagctggatttc

SEQ ID NO: 1192825 - DNA, 15 bp, Homo sapiens
ggacaagctggattt

SEQ ID NO: 1192826 - DNA, 15 bp, Homo sapiens
aggacaagctggatt

SEQ ID NO: 1192827 - DNA, 15 bp, Homo sapiens
aaggacaagctggat

SEQ ID NO: 1192828 - DNA, 15 bp, Homo sapiens
aaaggacaagctgga

SEQ ID NO: 1192829 - DNA, 15 bp, Homo sapiens
taaaggacaagctgg

SEQ ID NO: 1192830 - DNA, 15 bp, Homo sapiens
ttaaaggacaagctg

SEQ ID NO: 1192831 - DNA, 15 bp, Homo sapiens
gttaaaggacaagct

SEQ ID NO: 1192832 - DNA, 15 bp, Homo sapiens
tgttaaaggacaagc

SEQ ID NO: 1192833 - DNA, 15 bp, Homo sapiens
ttgttaaaggacaag

SEQ ID NO: 1192834 - DNA, 15 bp, Homo sapiens
tttgttaaaggacaa

SEQ ID NO: 1192835 - DNA, 15 bp, Homo sapiens
atttgttaaaggaca

SEQ ID NO: 1192836 - DNA, 15 bp, Homo sapiens
aatttgttaaaggac

SEQ ID NO: 1192837 - DNA, 15 bp, Homo sapiens
taatttgttaaagga

SEQ ID NO: 1192838 - DNA, 15 bp, Homo sapiens
ataatttgttaaagg

SEQ ID NO: 1192839 - DNA, 15 bp, Homo sapiens
tataatttgttaaag

SEQ ID NO: 1192840 - DNA, 15 bp, Homo sapiens
gtataatttgttaaa

SEQ ID NO: 1192841 - DNA, 15 bp, Homo sapiens
tgtataatttgttaa

SEQ ID NO: 1192842 - DNA, 15 bp, Homo sapiens
ctgtataatttgtta

SEQ ID NO: 1192843 - DNA, 15 bp, Homo sapiens
actgtataatttgtt

SEQ ID NO: 1192844 - DNA, 15 bp, Homo sapiens
aactgtataatttgt

SEQ ID NO: 1192845 - DNA, 15 bp, Homo sapiens
aaactgtataatttg

SEQ ID NO: 1192846 - DNA, 15 bp, Homo sapiens
taaactgtataattt

SEQ ID NO: 1192847 - DNA, 15 bp, Homo sapiens
ttaaactgtataatt

SEQ ID NO: 1192848 - DNA, 15 bp, Homo sapiens
gttaaactgtataat

SEQ ID NO: 1192849 - DNA, 15 bp, Homo sapiens
agttaaactgtataa

SEQ ID NO: 1192850 - DNA, 15 bp, Homo sapiens
aagttaaactgtata

SEQ ID NO: 1192851 - DNA, 15 bp, Homo sapiens
aaagttaaactgtat

SEQ ID NO: 1192852 - DNA, 15 bp, Homo sapiens
gaaagttaaactgta

SEQ ID NO: 1192853 - DNA, 15 bp, Homo sapiens
agaaagttaaactgt

SEQ ID NO: 1192854 - DNA, 15 bp, Homo sapiens
aagaaagttaaactg

SEQ ID NO: 1192855 - DNA, 15 bp, Homo sapiens
gaagaaagttaaact

SEQ ID NO: 1192856 - DNA, 15 bp, Homo sapiens
tgaagaaagttaaac

SEQ ID NO: 1192857 - DNA, 15 bp, Homo sapiens
gtgaagaaagttaaa

SEQ ID NO: 1192858 - DNA, 15 bp, Homo sapiens
tgtgaagaaagttaa

SEQ ID NO: 1192859 - DNA, 15 bp, Homo sapiens
atgtgaagaaagtta

SEQ ID NO: 1192860 - DNA, 15 bp, Homo sapiens
tatgtgaagaaagtt

SEQ ID NO: 1192861 - DNA, 15 bp, Homo sapiens
atatgtgaagaaagt

SEQ ID NO: 1192862 - DNA, 15 bp, Homo sapiens
aatatgtgaagaaag

SEQ ID NO: 1192863 - DNA, 15 bp, Homo sapiens
caatatgtgaagaaa

SEQ ID NO: 1192864 - DNA, 15 bp, Homo sapiens
gcaatatgtgaagaa

SEQ ID NO: 1192865 - DNA, 15 bp, Homo sapiens
ggcaatatgtgaaga

SEQ ID NO: 1192866 - DNA, 15 bp, Homo sapiens
tggcaatatgtgaag

SEQ ID NO: 1192867 - DNA, 15 bp, Homo sapiens
gtggcaatatgtgaa

SEQ ID NO: 1192868 - DNA, 15 bp, Homo sapiens
tgtggcaatatgtga

SEQ ID NO: 1192869 - DNA, 15 bp, Homo sapiens
ttgtggcaatatgtg

SEQ ID NO: 1192870 - DNA, 15 bp, Homo sapiens
attgtggcaatatgt

SEQ ID NO: 1192871 - DNA, 15 bp, Homo sapiens
tattgtggcaatatg

SEQ ID NO: 1192872 - DNA, 15 bp, Homo sapiens
ctattgtggcaatat

SEQ ID NO: 1192873 - DNA, 15 bp, Homo sapiens
actattgtggcaata

SEQ ID NO: 1192874 - DNA, 15 bp, Homo sapiens
aactattgtggcaat

SEQ ID NO: 1192875 - DNA, 15 bp, Homo sapiens
taactattgtggcaa

SEQ ID NO: 1192876 - DNA, 15 bp, Homo sapiens
ttaactattgtggca

SEQ ID NO: 1192877 - DNA, 15 bp, Homo sapiens
attaactattgtggc

SEQ ID NO: 1192878 - DNA, 15 bp, Homo sapiens
aattaactattgtgg

SEQ ID NO: 1192879 - DNA, 15 bp, Homo sapiens
gaattaactattgtg

SEQ ID NO: 1192880 - DNA, 15 bp, Homo sapiens
tgaattaactattgt

SEQ ID NO: 1192881 - DNA, 15 bp, Homo sapiens
gtgaattaactattg

SEQ ID NO: 1192882 - DNA, 15 bp, Homo sapiens
tgtgaattaactatt

SEQ ID NO: 1192883 - DNA, 15 bp, Homo sapiens
ctgtgaattaactat

SEQ ID NO: 1192884 - DNA, 15 bp, Homo sapiens
actgtgaattaacta

SEQ ID NO: 1192885 - DNA, 15 bp, Homo sapiens
tactgtgaattaact

SEQ ID NO: 1192886 - DNA, 15 bp, Homo sapiens
atactgtgaattaac

SEQ ID NO: 1192887 - DNA, 15 bp, Homo sapiens
tatactgtgaattaa

SEQ ID NO: 1192888 - DNA, 15 bp, Homo sapiens
ttatactgtgaatta

SEQ ID NO: 1192889 - DNA, 15 bp, Homo sapiens
attatactgtgaatt

SEQ ID NO: 1192890 - DNA, 15 bp, Homo sapiens
gattatactgtgaat

SEQ ID NO: 1192891 - DNA, 15 bp, Homo sapiens
agattatactgtgaa

SEQ ID NO: 1192892 - DNA, 15 bp, Homo sapiens
aagattatactgtga

SEQ ID NO: 1192893 - DNA, 15 bp, Homo sapiens
taagattatactgtg

SEQ ID NO: 1192894 - DNA, 15 bp, Homo sapiens
ataagattatactgt

SEQ ID NO: 1192895 - DNA, 15 bp, Homo sapiens
aataagattatactg

SEQ ID NO: 1192896 - DNA, 15 bp, Homo sapiens
aaataagattatact

SEQ ID NO: 1192897 - DNA, 15 bp, Homo sapiens
caaataagattatac

SEQ ID NO: 1192898 - DNA, 15 bp, Homo sapiens
acaaataagattata

SEQ ID NO: 1192899 - DNA, 15 bp, Homo sapiens
tacaaataagattat

SEQ ID NO: 1192900 - DNA, 15 bp, Homo sapiens
atacaaataagatta

SEQ ID NO: 1192901 - DNA, 15 bp, Homo sapiens
aatacaaataagatt

SEQ ID NO: 1192902 - DNA, 15 bp, Homo sapiens
aaatacaaataagat

SEQ ID NO: 1192903 - DNA, 15 bp, Homo sapiens
caaatacaaataaga

SEQ ID NO: 1192904 - DNA, 15 bp, Homo sapiens
ccaaatacaaataag

SEQ ID NO: 1192905 - DNA, 15 bp, Homo sapiens
tccaaatacaaataa

SEQ ID NO: 1192906 - DNA, 15 bp, Homo sapiens
ttccaaatacaaata

SEQ ID NO: 1192907 - DNA, 15 bp, Homo sapiens
tttccaaatacaaat

SEQ ID NO: 1192908 - DNA, 15 bp, Homo sapiens
ttttccaaatacaaa

SEQ ID NO: 1192909 - DNA, 15 bp, Homo sapiens
cttttccaaatacaa

SEQ ID NO: 1192910 - DNA, 15 bp, Homo sapiens
tcttttccaaataca

SEQ ID NO: 1192911 - DNA, 15 bp, Homo sapiens
ttcttttccaaatac

SEQ ID NO: 1192912 - DNA, 15 bp, Homo sapiens
cttcttttccaaata

SEQ ID NO: 1192913 - DNA, 15 bp, Homo sapiens
tcttcttttccaaat

SEQ ID NO: 1192914 - DNA, 15 bp, Homo sapiens
ttcttcttttccaaa

SEQ ID NO: 1192915 - DNA, 15 bp, Homo sapiens
tttcttcttttccaa

SEQ ID NO: 1192916 - DNA, 15 bp, Homo sapiens
atttcttcttttcca

SEQ ID NO: 1192917 - DNA, 15 bp, Homo sapiens
tatttcttcttttcc

SEQ ID NO: 1192918 - DNA, 15 bp, Homo sapiens
ttatttcttcttttc

SEQ ID NO: 1192919 - DNA, 15 bp, Homo sapiens
tttatttcttctttt

SEQ ID NO: 1192920 - DNA, 15 bp, Homo sapiens
atttatttcttcttt

SEQ ID NO: 1192921 - DNA, 15 bp, Homo sapiens
tatttatttcttctt

SEQ ID NO: 1192922 - DNA, 15 bp, Homo sapiens
atatttatttcttct

SEQ ID NO: 1192923 - DNA, 15 bp, Homo sapiens
tatatttatttcttc

SEQ ID NO: 1192924 - DNA, 15 bp, Homo sapiens
gtatatttatttctt

SEQ ID NO: 1192925 - DNA, 15 bp, Homo sapiens
tgtatatttatttct

SEQ ID NO: 1192926 - DNA, 15 bp, Homo sapiens
ttgtatatttatttc

SEQ ID NO: 1192927 - DNA, 15 bp, Homo sapiens
attgtatatttattt

SEQ ID NO: 1192928 - DNA, 15 bp, Homo sapiens
tattgtatatttatt

SEQ ID NO: 1192929 - DNA, 15 bp, Homo sapiens
ttattgtatatttat

SEQ ID NO: 1192930 - DNA, 15 bp, Homo sapiens
attattgtatattta

SEQ ID NO: 1192931 - DNA, 15 bp, Homo sapiens
aattattgtatattt

SEQ ID NO: 1192932 - DNA, 15 bp, Homo sapiens
caattattgtatatt

SEQ ID NO: 1192933 - DNA, 15 bp, Homo sapiens
tcaattattgtatat

SEQ ID NO: 1192934 - DNA, 15 bp, Homo sapiens
ttcaattattgtata

SEQ ID NO: 1192935 - DNA, 15 bp, Homo sapiens
tttcaattattgtat

SEQ ID NO: 1192936 - DNA, 15 bp, Homo sapiens
atttcaattattgta

SEQ ID NO: 1192937 - DNA, 15 bp, Homo sapiens
tatttcaattattgt

SEQ ID NO: 1192938 - DNA, 15 bp, Homo sapiens
ctatttcaattattg

SEQ ID NO: 1192939 - DNA, 15 bp, Homo sapiens
cctatttcaattatt

SEQ ID NO: 1192940 - DNA, 15 bp, Homo sapiens
acctatttcaattat

SEQ ID NO: 1192941 - DNA, 15 bp, Homo sapiens
aacctatttcaatta

SEQ ID NO: 1192942 - DNA, 15 bp, Homo sapiens
gaacctatttcaatt

SEQ ID NO: 1192943 - DNA, 15 bp, Homo sapiens
tgaacctatttcaat

SEQ ID NO: 1192944 - DNA, 15 bp, Homo sapiens
ttgaacctatttcaa

SEQ ID NO: 1192945 - DNA, 15 bp, Homo sapiens
cttgaacctatttca

SEQ ID NO: 1192946 - DNA, 15 bp, Homo sapiens
tcttgaacctatttc

SEQ ID NO: 1192947 - DNA, 15 bp, Homo sapiens
ttcttgaacctattt

SEQ ID NO: 1192948 - DNA, 15 bp, Homo sapiens
attcttgaacctatt

SEQ ID NO: 1192949 - DNA, 15 bp, Homo sapiens
gattcttgaacctat

SEQ ID NO: 1192950 - DNA, 15 bp, Homo sapiens
tgattcttgaaccta

SEQ ID NO: 1192951 - DNA, 15 bp, Homo sapiens
ttgattcttgaacct

SEQ ID NO: 1192952 - DNA, 15 bp, Homo sapiens
cttgattcttgaacc

SEQ ID NO: 1192953 - DNA, 15 bp, Homo sapiens
gcttgattcttgaac

SEQ ID NO: 1192954 - DNA, 15 bp, Homo sapiens
agcttgattcttgaa

SEQ ID NO: 1192955 - DNA, 15 bp, Homo sapiens
gagcttgattcttga

SEQ ID NO: 1192956 - DNA, 15 bp, Homo sapiens
cgagcttgattcttg

SEQ ID NO: 1192957 - DNA, 15 bp, Homo sapiens
tcgagcttgattctt

SEQ ID NO: 1192958 - DNA, 15 bp, Homo sapiens
atcgagcttgattct

SEQ ID NO: 1192959 - DNA, 15 bp, Homo sapiens
aatcgagcttgattc

SEQ ID NO: 1192960 - DNA, 15 bp, Homo sapiens
aaatcgagcttgatt

SEQ ID NO: 1192961 - DNA, 15 bp, Homo sapiens
caaatcgagcttgat

SEQ ID NO: 1192962 - DNA, 15 bp, Homo sapiens
acaaatcgagcttga

SEQ ID NO: 1192963 - DNA, 15 bp, Homo sapiens
aacaaatcgagcttg

SEQ ID NO: 1192964 - DNA, 15 bp, Homo sapiens
aaacaaatcgagctt

SEQ ID NO: 1192965 - DNA, 15 bp, Homo sapiens
gaaacaaatcgagct

SEQ ID NO: 1192966 - DNA, 15 bp, Homo sapiens
ggaaacaaatcgagc

SEQ ID NO: 1192967 - DNA, 15 bp, Homo sapiens
tggaaacaaatcgag

SEQ ID NO: 1192968 - DNA, 15 bp, Homo sapiens
ttggaaacaaatcga

SEQ ID NO: 1192969 - DNA, 15 bp, Homo sapiens
cttggaaacaaatcg

SEQ ID NO: 1192970 - DNA, 15 bp, Homo sapiens
tcttggaaacaaatc

SEQ ID NO: 1192971 - DNA, 15 bp, Homo sapiens
gtcttggaaacaaat

SEQ ID NO: 1192972 - DNA, 15 bp, Homo sapiens
agtcttggaaacaaa

SEQ ID NO: 1192973 - DNA, 15 bp, Homo sapiens
aagtcttggaaacaa

SEQ ID NO: 1192974 - DNA, 15 bp, Homo sapiens
caagtcttggaaaca

SEQ ID NO: 1192975 - DNA, 15 bp, Homo sapiens
ccaagtcttggaaac

SEQ ID NO: 1192976 - DNA, 15 bp, Homo sapiens
tccaagtcttggaaa

SEQ ID NO: 1192977 - DNA, 15 bp, Homo sapiens
ttccaagtcttggaa

SEQ ID NO: 1192978 - DNA, 15 bp, Homo sapiens
cttccaagtcttgga

SEQ ID NO: 1192979 - DNA, 15 bp, Homo sapiens
tcttccaagtcttgg

SEQ ID NO: 1192980 - DNA, 15 bp, Homo sapiens
ttcttccaagtcttg

SEQ ID NO: 1192981 - DNA, 15 bp, Homo sapiens
gttcttccaagtctt

SEQ ID NO: 1192982 - DNA, 15 bp, Homo sapiens
agttcttccaagtct

SEQ ID NO: 1192983 - DNA, 15 bp, Homo sapiens
aagttcttccaagtc

SEQ ID NO: 1192984 - DNA, 15 bp, Homo sapiens
gaagttcttccaagt

SEQ ID NO: 1192985 - DNA, 15 bp, Homo sapiens
agaagttcttccaag

SEQ ID NO: 1192986 - DNA, 15 bp, Homo sapiens
aagaagttcttccaa

SEQ ID NO: 1192987 - DNA, 15 bp, Homo sapiens
aaagaagttcttcca

SEQ ID NO: 1192988 - DNA, 15 bp, Homo sapiens
aaaagaagttcttcc

SEQ ID NO: 1192989 - DNA, 15 bp, Homo sapiens
caaaagaagttcttc

SEQ ID NO: 1192990 - DNA, 15 bp, Homo sapiens
acaaaagaagttctt

SEQ ID NO: 1192991 - DNA, 15 bp, Homo sapiens
tacaaaagaagttct

SEQ ID NO: 1192992 - DNA, 15 bp, Homo sapiens
gtacaaaagaagttc

SEQ ID NO: 1192993 - DNA, 15 bp, Homo sapiens
agtacaaaagaagtt

SEQ ID NO: 1192994 - DNA, 15 bp, Homo sapiens
cagtacaaaagaagt

SEQ ID NO: 1192995 - DNA, 15 bp, Homo sapiens
acagtacaaaagaag

SEQ ID NO: 1192996 - DNA, 15 bp, Homo sapiens
aacagtacaaaagaa

SEQ ID NO: 1192997 - DNA, 15 bp, Homo sapiens
gaacagtacaaaaga

SEQ ID NO: 1192998 - DNA, 15 bp, Homo sapiens
ggaacagtacaaaag

SEQ ID NO: 1192999 - DNA, 15 bp, Homo sapiens
tggaacagtacaaaa

SEQ ID NO: 1193000 - DNA, 15 bp, Homo sapiens
ctggaacagtacaaa

SEQ ID NO: 1193001 - DNA, 15 bp, Homo sapiens
actggaacagtacaa

SEQ ID NO: 1193002 - DNA, 15 bp, Homo sapiens
aactggaacagtaca

SEQ ID NO: 1193003 - DNA, 15 bp, Homo sapiens
gaactggaacagtac

SEQ ID NO: 1193004 - DNA, 15 bp, Homo sapiens
ggaactggaacagta

SEQ ID NO: 1193005 - DNA, 15 bp, Homo sapiens
aggaactggaacagt

SEQ ID NO: 1193006 - DNA, 15 bp, Homo sapiens
taggaactggaacag

SEQ ID NO: 1193007 - DNA, 15 bp, Homo sapiens
ttaggaactggaaca

SEQ ID NO: 1193008 - DNA, 15 bp, Homo sapiens
tttaggaactggaac

SEQ ID NO: 1193009 - DNA, 15 bp, Homo sapiens
ttttaggaactggaa

SEQ ID NO: 1193010 - DNA, 15 bp, Homo sapiens
gttttaggaactgga

SEQ ID NO: 1193011 - DNA, 15 bp, Homo sapiens
tgttttaggaactgg

SEQ ID NO: 1193012 - DNA, 15 bp, Homo sapiens
ttgttttaggaactg

SEQ ID NO: 1193013 - DNA, 15 bp, Homo sapiens
tttgttttaggaact

SEQ ID NO: 1193014 - DNA, 15 bp, Homo sapiens
ttttgttttaggaac

SEQ ID NO: 1193015 - DNA, 15 bp, Homo sapiens
tttttgttttaggaa

SEQ ID NO: 1193016 - DNA, 15 bp, Homo sapiens
atttttgttttagga

SEQ ID NO: 1193017 - DNA, 15 bp, Homo sapiens
tatttttgttttagg

SEQ ID NO: 1193018 - DNA, 15 bp, Homo sapiens
atatttttgttttag

SEQ ID NO: 1193019 - DNA, 15 bp, Homo sapiens
catatttttgtttta

SEQ ID NO: 1193020 - DNA, 15 bp, Homo sapiens
acatatttttgtttt

SEQ ID NO: 1193021 - DNA, 15 bp, Homo sapiens
tacatatttttgttt

SEQ ID NO: 1193022 - DNA, 15 bp, Homo sapiens
atacatatttttgtt

SEQ ID NO: 1193023 - DNA, 15 bp, Homo sapiens
gatacatatttttgt

SEQ ID NO: 1193024 - DNA, 15 bp, Homo sapiens
tgatacatatttttg

SEQ ID NO: 1193025 - DNA, 15 bp, Homo sapiens
gtgatacatattttt

SEQ ID NO: 1193026 - DNA, 15 bp, Homo sapiens
agtgatacatatttt

SEQ ID NO: 1193027 - DNA, 15 bp, Homo sapiens
aagtgatacatattt

SEQ ID NO: 1193028 - DNA, 15 bp, Homo sapiens
aaagtgatacatatt

SEQ ID NO: 1193029 - DNA, 15 bp, Homo sapiens
taaagtgatacatat

SEQ ID NO: 1193030 - DNA, 15 bp, Homo sapiens
ttaaagtgatacata

SEQ ID NO: 1193031 - DNA, 15 bp, Homo sapiens
cttaaagtgatacat

SEQ ID NO: 1193032 - DNA, 15 bp, Homo sapiens
tcttaaagtgataca

SEQ ID NO: 1193033 - DNA, 15 bp, Homo sapiens
ttcttaaagtgatac

SEQ ID NO: 1193034 - DNA, 15 bp, Homo sapiens
tttcttaaagtgata

SEQ ID NO: 1193035 - DNA, 15 bp, Homo sapiens
ttttcttaaagtgat

SEQ ID NO: 1193036 - DNA, 15 bp, Homo sapiens
tttttcttaaagtga

SEQ ID NO: 1193037 - DNA, 15 bp, Homo sapiens
atttttcttaaagtg

SEQ ID NO: 1193038 - DNA, 15 bp, Homo sapiens
gatttttcttaaagt

SEQ ID NO: 1193039 - DNA, 15 bp, Homo sapiens
tgatttttcttaaag

SEQ ID NO: 1193040 - DNA, 15 bp, Homo sapiens
ttgatttttcttaaa

SEQ ID NO: 1193041 - DNA, 15 bp, Homo sapiens
gttgatttttcttaa

SEQ ID NO: 1193042 - DNA, 15 bp, Homo sapiens
agttgatttttctta

SEQ ID NO: 1193043 - DNA, 15 bp, Homo sapiens
aagttgatttttctt

SEQ ID NO: 1193044 - DNA, 15 bp, Homo sapiens
aaagttgatttttct

SEQ ID NO: 1193045 - DNA, 15 bp, Homo sapiens
taaagttgatttttc

SEQ ID NO: 1193046 - DNA, 15 bp, Homo sapiens
gtaaagttgattttt

SEQ ID NO: 1193047 - DNA, 15 bp, Homo sapiens
tagtaaagttgattt

SEQ ID NO: 1193048 - DNA, 15 bp, Homo sapiens
ttagtaaagttgatt

SEQ ID NO: 1193049 - DNA, 15 bp, Homo sapiens
attagtaaagttgat

SEQ ID NO: 1193050 - DNA, 15 bp, Homo sapiens
aattagtaaagttga

SEQ ID NO: 1193051 - DNA, 15 bp, Homo sapiens
gaattagtaaagttg

SEQ ID NO: 1193052 - DNA, 15 bp, Homo sapiens
tgaattagtaaagtt

SEQ ID NO: 1193053 - DNA, 15 bp, Homo sapiens
ttgaattagtaaagt

SEQ ID NO: 1193054 - DNA, 15 bp, Homo sapiens
cttgaattagtaaag

SEQ ID NO: 1193055 - DNA, 15 bp, Homo sapiens
ccttgaattagtaaa

SEQ ID NO: 1193056 - DNA, 15 bp, Homo sapiens
tccttgaattagtaa

SEQ ID NO: 1193057 - DNA, 15 bp, Homo sapiens
ctccttgaattagta

SEQ ID NO: 1193058 - DNA, 15 bp, Homo sapiens
cctccttgaattagt

SEQ ID NO: 1193059 - DNA, 15 bp, Homo sapiens
gcctccttgaattag

SEQ ID NO: 1193060 - DNA, 15 bp, Homo sapiens
tgcctccttgaatta

SEQ ID NO: 1193061 - DNA, 15 bp, Homo sapiens
gtgcctccttgaatt

SEQ ID NO: 1193062 - DNA, 15 bp, Homo sapiens
ggtgcctccttgaat

SEQ ID NO: 1193063 - DNA, 15 bp, Homo sapiens
aggtgcctccttgaa

SEQ ID NO: 1193064 - DNA, 15 bp, Homo sapiens
aaggtgcctccttga

SEQ ID NO: 1193065 - DNA, 15 bp, Homo sapiens
taaggtgcctccttg

SEQ ID NO: 1193066 - DNA, 15 bp, Homo sapiens
ttaaggtgcctcctt

SEQ ID NO: 1193067 - DNA, 15 bp, Homo sapiens
tttaaggtgcctcct

SEQ ID NO: 1193068 - DNA, 15 bp, Homo sapiens
ttttaaggtgcctcc

SEQ ID NO: 1193069 - DNA, 15 bp, Homo sapiens
gttttaaggtgcctc

SEQ ID NO: 1193070 - DNA, 15 bp, Homo sapiens
agttttaaggtgcct

SEQ ID NO: 1193071 - DNA, 15 bp, Homo sapiens
cagttttaaggtgcc

SEQ ID NO: 1193072 - DNA, 15 bp, Homo sapiens
gcagttttaaggtgc

SEQ ID NO: 1193073 - DNA, 15 bp, Homo sapiens
ggcagttttaaggtg

SEQ ID NO: 1193074 - DNA, 15 bp, Homo sapiens
aggcagttttaaggt

SEQ ID NO: 1193075 - DNA, 15 bp, Homo sapiens
aaggcagttttaagg

SEQ ID NO: 1193076 - DNA, 15 bp, Homo sapiens
gaaggcagttttaag

SEQ ID NO: 1193077 - DNA, 15 bp, Homo sapiens
agaaggcagttttaa

SEQ ID NO: 1193078 - DNA, 15 bp, Homo sapiens
gagaaggcagtttta

SEQ ID NO: 1193079 - DNA, 15 bp, Homo sapiens
tgagaaggcagtttt

SEQ ID NO: 1193080 - DNA, 15 bp, Homo sapiens
atgagaaggcagttt

SEQ ID NO: 1193081 - DNA, 15 bp, Homo sapiens
aatgagaaggcagtt

SEQ ID NO: 1193082 - DNA, 15 bp, Homo sapiens
aaatgagaaggcagt

SEQ ID NO: 1193083 - DNA, 15 bp, Homo sapiens
aaaatgagaaggcag

SEQ ID NO: 1193084 - DNA, 15 bp, Homo sapiens
aaaaatgagaaggca

SEQ ID NO: 1193085 - DNA, 15 bp, Homo sapiens
aaaaaatgagaaggc

SEQ ID NO: 1193086 - DNA, 15 bp, Homo sapiens
taaaaaatgagaagg

SEQ ID NO: 1193087 - DNA, 15 bp, Homo sapiens
ctaaaaaatgagaag

SEQ ID NO: 1193088 - DNA, 15 bp, Homo sapiens
tctaaaaaatgagaa

SEQ ID NO: 1193089 - DNA, 15 bp, Homo sapiens
atctaaaaaatgaga

SEQ ID NO: 1193090 - DNA, 15 bp, Homo sapiens
tatctaaaaaatgag

SEQ ID NO: 1193091 - DNA, 15 bp, Homo sapiens
atatctaaaaaatga

SEQ ID NO: 1193092 - DNA, 15 bp, Homo sapiens
tatatctaaaaaatg

SEQ ID NO: 1193093 - DNA, 15 bp, Homo sapiens
atatatctaaaaaat

SEQ ID NO: 1193094 - DNA, 15 bp, Homo sapiens
gatatatctaaaaaa

SEQ ID NO: 1193095 - DNA, 15 bp, Homo sapiens
tgatatatctaaaaa

SEQ ID NO: 1193096 - DNA, 15 bp, Homo sapiens
ttgatatatctaaaa

SEQ ID NO: 1193097 - DNA, 15 bp, Homo sapiens
attgatatatctaaa

SEQ ID NO: 1193098 - DNA, 15 bp, Homo sapiens
cattgatatatctaa

SEQ ID NO: 1193099 - DNA, 15 bp, Homo sapiens
tcattgatatatcta

SEQ ID NO: 1193100 - DNA, 15 bp, Homo sapiens
ttcattgatatatct

SEQ ID NO: 1193101 - DNA, 15 bp, Homo sapiens
attcattgatatatc

SEQ ID NO: 1193102 - DNA, 15 bp, Homo sapiens
gattcattgatatat

SEQ ID NO: 1193103 - DNA, 15 bp, Homo sapiens
ggattcattgatata

SEQ ID NO: 1193104 - DNA, 15 bp, Homo sapiens
aggattcattgatat

SEQ ID NO: 1193105 - DNA, 15 bp, Homo sapiens
aaggattcattgata

SEQ ID NO: 1193106 - DNA, 15 bp, Homo sapiens
taaggattcattgat

SEQ ID NO: 1193107 - DNA, 15 bp, Homo sapiens
ctaaggattcattga

SEQ ID NO: 1193108 - DNA, 15 bp, Homo sapiens
actaaggattcattg

SEQ ID NO: 1193109 - DNA, 15 bp, Homo sapiens
tactaaggattcatt

SEQ ID NO: 1193110 - DNA, 15 bp, Homo sapiens
ctactaaggattcat

SEQ ID NO: 1193111 - DNA, 15 bp, Homo sapiens
gctactaaggattca

SEQ ID NO: 1193112 - DNA, 15 bp, Homo sapiens
tgctactaaggattc

SEQ ID NO: 1193113 - DNA, 15 bp, Homo sapiens
atgctactaaggatt

SEQ ID NO: 1193114 - DNA, 15 bp, Homo sapiens
aatgctactaaggat

SEQ ID NO: 1193115 - DNA, 15 bp, Homo sapiens
taatgctactaagga

SEQ ID NO: 1193116 - DNA, 15 bp, Homo sapiens
ataatgctactaagg

SEQ ID NO: 1193117 - DNA, 15 bp, Homo sapiens
gataatgctactaag

SEQ ID NO: 1193118 - DNA, 15 bp, Homo sapiens
tgataatgctactaa

SEQ ID NO: 1193119 - DNA, 15 bp, Homo sapiens
atgataatgctacta

SEQ ID NO: 1193120 - DNA, 15 bp, Homo sapiens
aatgataatgctact

SEQ ID NO: 1193121 - DNA, 15 bp, Homo sapiens
gaatgataatgctac

SEQ ID NO: 1193122 - DNA, 15 bp, Homo sapiens
agaatgataatgcta

SEQ ID NO: 1193123 - DNA, 15 bp, Homo sapiens
tagaatgataatgct

SEQ ID NO: 1193124 - DNA, 15 bp, Homo sapiens
ttagaatgataatgc

SEQ ID NO: 1193125 - DNA, 15 bp, Homo sapiens
tttagaatgataatg

SEQ ID NO: 1193126 - DNA, 15 bp, Homo sapiens
atttagaatgataat

SEQ ID NO: 1193127 - DNA, 15 bp, Homo sapiens
tatttagaatgataa

SEQ ID NO: 1193128 - DNA, 15 bp, Homo sapiens
atatttagaatgata

SEQ ID NO: 1193129 - DNA, 15 bp, Homo sapiens
aatatttagaatgat

SEQ ID NO: 1193130 - DNA, 15 bp, Homo sapiens
aaatatttagaatga

SEQ ID NO: 1193131 - DNA, 15 bp, Homo sapiens
gaaatatttagaatg

SEQ ID NO: 1193132 - DNA, 15 bp, Homo sapiens
agaaatatttagaat

SEQ ID NO: 1193133 - DNA, 15 bp, Homo sapiens
aagaaatatttagaa

SEQ ID NO: 1193134 - DNA, 15 bp, Homo sapiens
caagaaatatttaga

SEQ ID NO: 1193135 - DNA, 15 bp, Homo sapiens
gcaagaaatatttag

SEQ ID NO: 1193136 - DNA, 15 bp, Homo sapiens
ggcaagaaatattta

SEQ ID NO: 1193137 - DNA, 15 bp, Homo sapiens
tggcaagaaatattt

SEQ ID NO: 1193138 - DNA, 15 bp, Homo sapiens
ttggcaagaaatatt

SEQ ID NO: 1193139 - DNA, 15 bp, Homo sapiens
attggcaagaaatat

SEQ ID NO: 1193140 - DNA, 15 bp, Homo sapiens
aattggcaagaaata

SEQ ID NO: 1193141 - DNA, 15 bp, Homo sapiens
taattggcaagaaat

SEQ ID NO: 1193142 - DNA, 15 bp, Homo sapiens
ataattggcaagaaa

SEQ ID NO: 1193143 - DNA, 15 bp, Homo sapiens
aataattggcaagaa

SEQ ID NO: 1193144 - DNA, 15 bp, Homo sapiens
aaataattggcaaga

SEQ ID NO: 1193145 - DNA, 15 bp, Homo sapiens
caaaataattggcaa

SEQ ID NO: 1193146 - DNA, 15 bp, Homo sapiens
acaaaataattggca

SEQ ID NO: 1193147 - DNA, 15 bp, Homo sapiens
tacaaaataattggc

SEQ ID NO: 1193148 - DNA, 15 bp, Homo sapiens
ttacaaaataattgg

SEQ ID NO: 1193149 - DNA, 15 bp, Homo sapiens
tttacaaaataattg

SEQ ID NO: 1193150 - DNA, 15 bp, Homo sapiens
atttacaaaataatt

SEQ ID NO: 1193151 - DNA, 15 bp, Homo sapiens
catttacaaaataat

SEQ ID NO: 1193152 - DNA, 15 bp, Homo sapiens
tcatttacaaaataa

SEQ ID NO: 1193153 - DNA, 15 bp, Homo sapiens
atcatttacaaaata

SEQ ID NO: 1193154 - DNA, 15 bp, Homo sapiens
taatcatttacaaaa

SEQ ID NO: 1193155 - DNA, 15 bp, Homo sapiens
ataatcatttacaaa

SEQ ID NO: 1193156 - DNA, 15 bp, Homo sapiens
cataatcatttacaa

SEQ ID NO: 1193157 - DNA, 15 bp, Homo sapiens
gcataatcatttaca

SEQ ID NO: 1193158 - DNA, 15 bp, Homo sapiens
agcataatcatttac

SEQ ID NO: 1193159 - DNA, 15 bp, Homo sapiens
aagcataatcattta

SEQ ID NO: 1193160 - DNA, 15 bp, Homo sapiens
taagcataatcattt

SEQ ID NO: 1193161 - DNA, 15 bp, Homo sapiens
ctaagcataatcatt

SEQ ID NO: 1193162 - DNA, 15 bp, Homo sapiens
cctaagcataatcat

SEQ ID NO: 1193163 - DNA, 15 bp, Homo sapiens
tcctaagcataatca

SEQ ID NO: 1193164 - DNA, 15 bp, Homo sapiens
gtcctaagcataatc

SEQ ID NO: 1193165 - DNA, 15 bp, Homo sapiens
agtcctaagcataat

SEQ ID NO: 1193166 - DNA, 15 bp, Homo sapiens
aagtcctaagcataa

SEQ ID NO: 1193167 - DNA, 15 bp, Homo sapiens
taagtcctaagcata

SEQ ID NO: 1193168 - DNA, 15 bp, Homo sapiens
ataagtcctaagcat

SEQ ID NO: 1193169 - DNA, 15 bp, Homo sapiens
aataagtcctaagca

SEQ ID NO: 1193170 - DNA, 15 bp, Homo sapiens
aaataagtcctaagc

SEQ ID NO: 1193171 - DNA, 15 bp, Homo sapiens
aaaataagtcctaag

SEQ ID NO: 1193172 - DNA, 15 bp, Homo sapiens
gaaaataagtcctaa

SEQ ID NO: 1193173 - DNA, 15 bp, Homo sapiens
agaaaataagtccta

SEQ ID NO: 1193174 - DNA, 15 bp, Homo sapiens
tagaaaataagtcct

SEQ ID NO: 1193175 - DNA, 15 bp, Homo sapiens
ctagaaaataagtcc

SEQ ID NO: 1193176 - DNA, 15 bp, Homo sapiens
tctagaaaataagtc

SEQ ID NO: 1193177 - DNA, 15 bp, Homo sapiens
ttctagaaaataagt

SEQ ID NO: 1193178 - DNA, 15 bp, Homo sapiens
tttctagaaaataag

SEQ ID NO: 1193179 - DNA, 15 bp, Homo sapiens
atttctagaaaataa

SEQ ID NO: 1193180 - DNA, 15 bp, Homo sapiens
tatttctagaaaata

SEQ ID NO: 1193181 - DNA, 15 bp, Homo sapiens
gtatttctagaaaat

SEQ ID NO: 1193182 - DNA, 15 bp, Homo sapiens
agtatttctagaaaa

SEQ ID NO: 1193183 - DNA, 15 bp, Homo sapiens
cagtatttctagaaa

SEQ ID NO: 1193184 - DNA, 15 bp, Homo sapiens
acagtatttctagaa

SEQ ID NO: 1193185 - DNA, 15 bp, Homo sapiens
gacagtatttctaga

SEQ ID NO: 1193186 - DNA, 15 bp, Homo sapiens
agacagtatttctag

SEQ ID NO: 1193187 - DNA, 15 bp, Homo sapiens
aagacagtatttcta

SEQ ID NO: 1193188 - DNA, 15 bp, Homo sapiens
gaagacagtatttct

SEQ ID NO: 1193189 - DNA, 15 bp, Homo sapiens
tgaagacagtatttc

SEQ ID NO: 1193190 - DNA, 15 bp, Homo sapiens
ctgaagacagtattt

SEQ ID NO: 1193191 - DNA, 15 bp, Homo sapiens
tctgaagacagtatt

SEQ ID NO: 1193192 - DNA, 15 bp, Homo sapiens
ctctgaagacagtat

SEQ ID NO: 1193193 - DNA, 15 bp, Homo sapiens
actctgaagacagta

SEQ ID NO: 1193194 - DNA, 15 bp, Homo sapiens
aactctgaagacagt

SEQ ID NO: 1193195 - DNA, 15 bp, Homo sapiens
aaactctgaagacag

SEQ ID NO: 1193196 - DNA, 15 bp, Homo sapiens
gaaactctgaagaca

SEQ ID NO: 1193197 - DNA, 15 bp, Homo sapiens
agaaactctgaagac

SEQ ID NO: 1193198 - DNA, 15 bp, Homo sapiens
cagaaactctgaaga

SEQ ID NO: 1193199 - DNA, 15 bp, Homo sapiens
acagaaactctgaag

SEQ ID NO: 1193200 - DNA, 15 bp, Homo sapiens
cacagaaactctgaa

SEQ ID NO: 1193201 - DNA, 15 bp, Homo sapiens
acacagaaactctga

SEQ ID NO: 1193202 - DNA, 15 bp, Homo sapiens
cacacagaaactctg

SEQ ID NO: 1193203 - DNA, 15 bp, Homo sapiens
ccacacagaaactct

SEQ ID NO: 1193204 - DNA, 15 bp, Homo sapiens
gccacacagaaactc

SEQ ID NO: 1193205 - DNA, 15 bp, Homo sapiens
agccacacagaaact

SEQ ID NO: 1193206 - DNA, 15 bp, Homo sapiens
tagccacacagaaac

SEQ ID NO: 1193207 - DNA, 15 bp, Homo sapiens
ttagccacacagaaa

SEQ ID NO: 1193208 - DNA, 15 bp, Homo sapiens
cttagccacacagaa

SEQ ID NO: 1193209 - DNA, 15 bp, Homo sapiens
gcttagccacacaga

SEQ ID NO: 1193210 - DNA, 15 bp, Homo sapiens
tgcttagccacacag

SEQ ID NO: 1193211 - DNA, 15 bp, Homo sapiens
ctgcttagccacaca

SEQ ID NO: 1193212 - DNA, 15 bp, Homo sapiens
gctgcttagccacac

SEQ ID NO: 1193213 - DNA, 15 bp, Homo sapiens
tgctgcttagccaca

SEQ ID NO: 1193214 - DNA, 15 bp, Homo sapiens
gtgctgcttagccac

SEQ ID NO: 1193215 - DNA, 15 bp, Homo sapiens
agtgctgcttagcca

SEQ ID NO: 1193216 - DNA, 15 bp, Homo sapiens
gagtgctgcttagcc

SEQ ID NO: 1193217 - DNA, 15 bp, Homo sapiens
tgagtgctgcttagc

SEQ ID NO: 1193218 - DNA, 15 bp, Homo sapiens
ctgagtgctgcttag

SEQ ID NO: 1193219 - DNA, 15 bp, Homo sapiens
tctgagtgctgctta

SEQ ID NO: 1193220 - DNA, 15 bp, Homo sapiens
ctctgagtgctgctt

SEQ ID NO: 1193221 - DNA, 15 bp, Homo sapiens
tctctgagtgctgct

SEQ ID NO: 1193222 - DNA, 15 bp, Homo sapiens
atctctgagtgctgc

SEQ ID NO: 1193223 - DNA, 15 bp, Homo sapiens
catctctgagtgctg

SEQ ID NO: 1193224 - DNA, 15 bp, Homo sapiens
attcatctctgagtg

SEQ ID NO: 1193225 - DNA, 15 bp, Homo sapiens
aattcatctctgagt

SEQ ID NO: 1193226 - DNA, 15 bp, Homo sapiens
aaattcatctctgag

SEQ ID NO: 1193227 - DNA, 15 bp, Homo sapiens
taaattcatctctga

SEQ ID NO: 1193228 - DNA, 15 bp, Homo sapiens
ataaattcatctctg

SEQ ID NO: 1193229 - DNA, 15 bp, Homo sapiens
aataaattcatctct

SEQ ID NO: 1193230 - DNA, 15 bp, Homo sapiens
taataaattcatctc

SEQ ID NO: 1193231 - DNA, 15 bp, Homo sapiens
ttaataaattcatct

SEQ ID NO: 1193232 - DNA, 15 bp, Homo sapiens
tttaataaattcatc

SEQ ID NO: 1193233 - DNA, 15 bp, Homo sapiens
gtttaataaattcat

SEQ ID NO: 1193234 - DNA, 15 bp, Homo sapiens
agtttaataaattca

SEQ ID NO: 1193235 - DNA, 15 bp, Homo sapiens
aagtttaataaattc

SEQ ID NO: 1193236 - DNA, 15 bp, Homo sapiens
aaagtttaataaatt

SEQ ID NO: 1193237 - DNA, 15 bp, Homo sapiens
gaaagtttaataaat

SEQ ID NO: 1193238 - DNA, 15 bp, Homo sapiens
tgaaagtttaataaa

SEQ ID NO: 1193239 - DNA, 15 bp, Homo sapiens
ctgaaagtttaataa

SEQ ID NO: 1193240 - DNA, 15 bp, Homo sapiens
tctgaaagtttaata

SEQ ID NO: 1193241 - DNA, 15 bp, Homo sapiens
gtctgaaagtttaat

SEQ ID NO: 1193242 - DNA, 15 bp, Homo sapiens
tgtctgaaagtttaa

SEQ ID NO: 1193243 - DNA, 15 bp, Homo sapiens
ttgtctgaaagttta

SEQ ID NO: 1193244 - DNA, 15 bp, Homo sapiens
tttgtctgaaagttt

SEQ ID NO: 1193245 - DNA, 15 bp, Homo sapiens
ttttgtctgaaagtt

SEQ ID NO: 1193246 - DNA, 15 bp, Homo sapiens
attttgtctgaaagt

SEQ ID NO: 1193247 - DNA, 15 bp, Homo sapiens
aattttgtctgaaag

SEQ ID NO: 1193248 - DNA, 15 bp, Homo sapiens
taattttgtctgaaa

SEQ ID NO: 1193249 - DNA, 15 bp, Homo sapiens
ataattttgtctgaa

SEQ ID NO: 1193250 - DNA, 15 bp, Homo sapiens
cataattttgtctga

SEQ ID NO: 1193251 - DNA, 15 bp, Homo sapiens
acataattttgtctg

SEQ ID NO: 1193252 - DNA, 15 bp, Homo sapiens
tacataattttgtct

SEQ ID NO: 1193253 - DNA, 15 bp, Homo sapiens
gtacataattttgtc

SEQ ID NO: 1193254 - DNA, 15 bp, Homo sapiens
tgtacataattttgt

SEQ ID NO: 1193255 - DNA, 15 bp, Homo sapiens
atgtacataattttg

SEQ ID NO: 1193256 - DNA, 15 bp, Homo sapiens
tatgtacataatttt

SEQ ID NO: 1193257 - DNA, 15 bp, Homo sapiens
ttatgtacataattt

SEQ ID NO: 1193258 - DNA, 15 bp, Homo sapiens
tttatgtacataatt

SEQ ID NO: 1193259 - DNA, 15 bp, Homo sapiens
gtttatgtacataat

SEQ ID NO: 1193260 - DNA, 15 bp, Homo sapiens
agtttatgtacataa

SEQ ID NO: 1193261 - DNA, 15 bp, Homo sapiens
tagtttatgtacata

SEQ ID NO: 1193262 - DNA, 15 bp, Homo sapiens
gtagtttatgtacat

SEQ ID NO: 1193263 - DNA, 15 bp, Homo sapiens
tgtagtttatgtaca

SEQ ID NO: 1193264 - DNA, 15 bp, Homo sapiens
atgtagtttatgtac

SEQ ID NO: 1193265 - DNA, 15 bp, Homo sapiens
tatgtagtttatgta

SEQ ID NO: 1193266 - DNA, 15 bp, Homo sapiens
ttatgtagtttatgt

SEQ ID NO: 1193267 - DNA, 15 bp, Homo sapiens
attatgtagtttatg

SEQ ID NO: 1193268 - DNA, 15 bp, Homo sapiens
tattatgtagtttat

SEQ ID NO: 1193269 - DNA, 15 bp, Homo sapiens
gtattatgtagttta

SEQ ID NO: 1193270 - DNA, 15 bp, Homo sapiens
tgtattatgtagttt

SEQ ID NO: 1193271 - DNA, 15 bp, Homo sapiens
atgtattatgtagtt

SEQ ID NO: 1193272 - DNA, 15 bp, Homo sapiens
tatgtattatgtagt

SEQ ID NO: 1193273 - DNA, 15 bp, Homo sapiens
atatgtattatgtag

SEQ ID NO: 1193274 - DNA, 15 bp, Homo sapiens
catatgtattatgta

SEQ ID NO: 1193275 - DNA, 15 bp, Homo sapiens
tcatatgtattatgt

SEQ ID NO: 1193276 - DNA, 15 bp, Homo sapiens
ttcatatgtattatg

SEQ ID NO: 1193277 - DNA, 15 bp, Homo sapiens
caattcatatgtatt

SEQ ID NO: 1193278 - DNA, 15 bp, Homo sapiens
acaattcatatgtat

SEQ ID NO: 1193279 - DNA, 15 bp, Homo sapiens
gacaattcatatgta

SEQ ID NO: 1193280 - DNA, 15 bp, Homo sapiens
agacaattcatatgt

SEQ ID NO: 1193281 - DNA, 15 bp, Homo sapiens
aagacaattcatatg

SEQ ID NO: 1193282 - DNA, 15 bp, Homo sapiens
aaagacaattcatat

SEQ ID NO: 1193283 - DNA, 15 bp, Homo sapiens
gaaagacaattcata

SEQ ID NO: 1193284 - DNA, 15 bp, Homo sapiens
tgaaagacaattcat

SEQ ID NO: 1193285 - DNA, 15 bp, Homo sapiens
ttgaaagacaattca

SEQ ID NO: 1193286 - DNA, 15 bp, Homo sapiens
gttgaaagacaattc

SEQ ID NO: 1193287 - DNA, 15 bp, Homo sapiens
agttgaaagacaatt

SEQ ID NO: 1193288 - DNA, 15 bp, Homo sapiens
tagttgaaagacaat

SEQ ID NO: 1193289 - DNA, 15 bp, Homo sapiens
ttagttgaaagacaa

SEQ ID NO: 1193290 - DNA, 15 bp, Homo sapiens
attagttgaaagaca

SEQ ID NO: 1193291 - DNA, 15 bp, Homo sapiens
cattagttgaaagac

SEQ ID NO: 1193292 - DNA, 15 bp, Homo sapiens
tcattagttgaaaga

SEQ ID NO: 1193293 - DNA, 15 bp, Homo sapiens
ttcattagttgaaag

SEQ ID NO: 1193294 - DNA, 15 bp, Homo sapiens
gttcattagttgaaa

SEQ ID NO: 1193295 - DNA, 15 bp, Homo sapiens
agttcattagttgaa

SEQ ID NO: 1193296 - DNA, 15 bp, Homo sapiens
tagttcattagttga

SEQ ID NO: 1193297 - DNA, 15 bp, Homo sapiens
ctagttcattagttg

SEQ ID NO: 1193298 - DNA, 15 bp, Homo sapiens
tctagttcattagtt

SEQ ID NO: 1193299 - DNA, 15 bp, Homo sapiens
gtctagttcattagt

SEQ ID NO: 1193300 - DNA, 15 bp, Homo sapiens
tgtctagttcattag

SEQ ID NO: 1193301 - DNA, 15 bp, Homo sapiens
atgtctagttcatta

SEQ ID NO: 1193302 - DNA, 15 bp, Homo sapiens
gatgtctagttcatt

SEQ ID NO: 1193303 - DNA, 15 bp, Homo sapiens
agatgtctagttcat

SEQ ID NO: 1193304 - DNA, 15 bp, Homo sapiens
cagatgtctagttca

SEQ ID NO: 1193305 - DNA, 15 bp, Homo sapiens
acagatgtctagttc

SEQ ID NO: 1193306 - DNA, 15 bp, Homo sapiens
gacagatgtctagtt

SEQ ID NO: 1193307 - DNA, 15 bp, Homo sapiens
tgacagatgtctagt

SEQ ID NO: 1193308 - DNA, 15 bp, Homo sapiens
atgacagatgtctag

SEQ ID NO: 1193309 - DNA, 15 bp, Homo sapiens
gatgacagatgtcta

SEQ ID NO: 1193310 - DNA, 15 bp, Homo sapiens
ggatgacagatgtct

SEQ ID NO: 1193311 - DNA, 15 bp, Homo sapiens
aggatgacagatgtc

SEQ ID NO: 1193312 - DNA, 15 bp, Homo sapiens
aaggatgacagatgt

SEQ ID NO: 1193313 - DNA, 15 bp, Homo sapiens
gaaggatgacagatg

SEQ ID NO: 1193314 - DNA, 15 bp, Homo sapiens
tgaaggatgacagat

SEQ ID NO: 1193315 - DNA, 15 bp, Homo sapiens
ttgaaggatgacaga

SEQ ID NO: 1193316 - DNA, 15 bp, Homo sapiens
cttgaaggatgacag

SEQ ID NO: 1193317 - DNA, 15 bp, Homo sapiens
acttgaaggatgaca

SEQ ID NO: 1193318 - DNA, 15 bp, Homo sapiens
tacttgaaggatgac

SEQ ID NO: 1193319 - DNA, 15 bp, Homo sapiens
atacttgaaggatga

SEQ ID NO: 1193320 - DNA, 15 bp, Homo sapiens
aatacttgaaggatg

SEQ ID NO: 1193321 - DNA, 15 bp, Homo sapiens
gaatacttgaaggat

SEQ ID NO: 1193322 - DNA, 15 bp, Homo sapiens
tgaatacttgaagga

SEQ ID NO: 1193323 - DNA, 15 bp, Homo sapiens
ttgaatacttgaagg

SEQ ID NO: 1193324 - DNA, 15 bp, Homo sapiens
tttgaatacttgaag

SEQ ID NO: 1193325 - DNA, 15 bp, Homo sapiens
ttttgaatacttgaa

SEQ ID NO: 1193326 - DNA, 15 bp, Homo sapiens
cttttgaatacttga

SEQ ID NO: 1193327 - DNA, 15 bp, Homo sapiens
acttttgaatacttg

SEQ ID NO: 1193328 - DNA, 15 bp, Homo sapiens
cacttttgaatactt

SEQ ID NO: 1193329 - DNA, 15 bp, Homo sapiens
tcacttttgaatact

SEQ ID NO: 1193330 - DNA, 15 bp, Homo sapiens
atcacttttgaatac

SEQ ID NO: 1193331 - DNA, 15 bp, Homo sapiens
gatcacttttgaata

SEQ ID NO: 1193332 - DNA, 15 bp, Homo sapiens
agatcacttttgaat

SEQ ID NO: 1193333 - DNA, 15 bp, Homo sapiens
aagatcacttttgaa

SEQ ID NO: 1193334 - DNA, 15 bp, Homo sapiens
taagatcacttttga

SEQ ID NO: 1193335 - DNA, 15 bp, Homo sapiens
ataagatcacttttg

SEQ ID NO: 1193336 - DNA, 15 bp, Homo sapiens
aataagatcactttt

SEQ ID NO: 1193337 - DNA, 15 bp, Homo sapiens
aaataagatcacttt

SEQ ID NO: 1193338 - DNA, 15 bp, Homo sapiens
aaaataagatcactt

SEQ ID NO: 1193339 - DNA, 15 bp, Homo sapiens
taaaataagatcact

SEQ ID NO: 1193340 - DNA, 15 bp, Homo sapiens
ttaaaataagatcac

SEQ ID NO: 1193341 - DNA, 15 bp, Homo sapiens
attaaaataagatca

SEQ ID NO: 1193342 - DNA, 15 bp, Homo sapiens
aattaaaataagatc

SEQ ID NO: 1193343 - DNA, 15 bp, Homo sapiens
caattaaaataagat

SEQ ID NO: 1193344 - DNA, 15 bp, Homo sapiens
acaattaaaataaga

SEQ ID NO: 1193345 - DNA, 15 bp, Homo sapiens
aacaattaaaataag

SEQ ID NO: 1193346 - DNA, 15 bp, Homo sapiens
aaacaattaaaataa

SEQ ID NO: 1193347 - DNA, 15 bp, Homo sapiens
caaacaattaaaata

SEQ ID NO: 1193348 - DNA, 15 bp, Homo sapiens
gcaaacaattaaaat

SEQ ID NO: 1193349 - DNA, 15 bp, Homo sapiens
agcaaacaattaaaa

SEQ ID NO: 1193350 - DNA, 15 bp, Homo sapiens
cagcaaacaattaaa

SEQ ID NO: 1193351 - DNA, 15 bp, Homo sapiens
acagcaaacaattaa

SEQ ID NO: 1193352 - DNA, 15 bp, Homo sapiens
aacagcaaacaatta

SEQ ID NO: 1193353 - DNA, 15 bp, Homo sapiens
gaacagcaaacaatt

SEQ ID NO: 1193354 - DNA, 15 bp, Homo sapiens
tgaacagcaaacaat

SEQ ID NO: 1193355 - DNA, 15 bp, Homo sapiens
ctgaacagcaaacaa

SEQ ID NO: 1193356 - DNA, 15 bp, Homo sapiens
gctgaacagcaaaca

SEQ ID NO: 1193357 - DNA, 15 bp, Homo sapiens
agctgaacagcaaac

SEQ ID NO: 1193358 - DNA, 15 bp, Homo sapiens
gagctgaacagcaaa

SEQ ID NO: 1193359 - DNA, 15 bp, Homo sapiens
agagctgaacagcaa

SEQ ID NO: 1193360 - DNA, 15 bp, Homo sapiens
tagagctgaacagca

SEQ ID NO: 1193361 - DNA, 15 bp, Homo sapiens
ttagagctgaacagc

SEQ ID NO: 1193362 - DNA, 15 bp, Homo sapiens
attagagctgaacag

SEQ ID NO: 1193363 - DNA, 15 bp, Homo sapiens
gattagagctgaaca

SEQ ID NO: 1193364 - DNA, 15 bp, Homo sapiens
tgattagagctgaac

SEQ ID NO: 1193365 - DNA, 15 bp, Homo sapiens
ttgattagagctgaa

SEQ ID NO: 1193366 - DNA, 15 bp, Homo sapiens
tttgattagagctga

SEQ ID NO: 1193367 - DNA, 15 bp, Homo sapiens
ttttgattagagctg

SEQ ID NO: 1193368 - DNA, 15 bp, Homo sapiens
tttttgattagagct

SEQ ID NO: 1193369 - DNA, 15 bp, Homo sapiens
gtttttgattagagc

SEQ ID NO: 1193370 - DNA, 15 bp, Homo sapiens
agtttttgattagag

SEQ ID NO: 1193371 - DNA, 15 bp, Homo sapiens
aagtttttgattaga

SEQ ID NO: 1193372 - DNA, 15 bp, Homo sapiens
caagtttttgattag

SEQ ID NO: 1193373 - DNA, 15 bp, Homo sapiens
ccaagtttttgatta

SEQ ID NO: 1193374 - DNA, 15 bp, Homo sapiens
accaagtttttgatt

SEQ ID NO: 1193375 - DNA, 15 bp, Homo sapiens
aaccaagtttttgat

SEQ ID NO: 1193376 - DNA, 15 bp, Homo sapiens
caaccaagtttttga

SEQ ID NO: 1193377 - DNA, 15 bp, Homo sapiens
tcaaccaagtttttg

SEQ ID NO: 1193378 - DNA, 15 bp, Homo sapiens
ttcaaccaagttttt

SEQ ID NO: 1193379 - DNA, 15 bp, Homo sapiens
cttcaaccaagtttt

SEQ ID NO: 1193380 - DNA, 15 bp, Homo sapiens
acttcaaccaagttt

SEQ ID NO: 1193381 - DNA, 15 bp, Homo sapiens
aacttcaaccaagtt

SEQ ID NO: 1193382 - DNA, 15 bp, Homo sapiens
taacttcaaccaagt

SEQ ID NO: 1193383 - DNA, 15 bp, Homo sapiens
ctaacttcaaccaag

SEQ ID NO: 1193384 - DNA, 15 bp, Homo sapiens
gctaacttcaaccaa

SEQ ID NO: 1193385 - DNA, 15 bp, Homo sapiens
tgctaacttcaacca

SEQ ID NO: 1193386 - DNA, 15 bp, Homo sapiens
ttgctaacttcaacc

SEQ ID NO: 1193387 - DNA, 15 bp, Homo sapiens
tttgctaacttcaac

SEQ ID NO: 1193388 - DNA, 15 bp, Homo sapiens
ttttgctaacttcaa

SEQ ID NO: 1193389 - DNA, 15 bp, Homo sapiens
attttgctaacttca

SEQ ID NO: 1193390 - DNA, 15 bp, Homo sapiens
tattttgctaacttc

SEQ ID NO: 1193391 - DNA, 15 bp, Homo sapiens
atattttgctaactt

SEQ ID NO: 1193392 - DNA, 15 bp, Homo sapiens
aatattttgctaact

SEQ ID NO: 1193393 - DNA, 15 bp, Homo sapiens
aaatattttgctaac

SEQ ID NO: 1193394 - DNA, 15 bp, Homo sapiens
taaatattttgctaa

SEQ ID NO: 1193395 - DNA, 15 bp, Homo sapiens
ttaaatattttgcta

SEQ ID NO: 1193396 - DNA, 15 bp, Homo sapiens
tttaaatattttgct

SEQ ID NO: 1193397 - DNA, 15 bp, Homo sapiens
ttttaaatattttgc

SEQ ID NO: 1193398 - DNA, 15 bp, Homo sapiens
tttttaaatattttg

SEQ ID NO: 1193399 - DNA, 15 bp, Homo sapiens
ttttttaaatatttt

SEQ ID NO: 1193400 - DNA, 15 bp, Homo sapiens
tattttttaaatatt

SEQ ID NO: 1193401 - DNA, 15 bp, Homo sapiens
gtattttttaaatat

SEQ ID NO: 1193402 - DNA, 15 bp, Homo sapiens
tgtattttttaaata

SEQ ID NO: 1193403 - DNA, 15 bp, Homo sapiens
atgtattttttaaat

SEQ ID NO: 1193404 - DNA, 15 bp, Homo sapiens
tatgtattttttaaa

SEQ ID NO: 1193405 - DNA, 15 bp, Homo sapiens
gtatgtattttttaa

SEQ ID NO: 1193406 - DNA, 15 bp, Homo sapiens
ggtatgtatttttta

SEQ ID NO: 1193407 - DNA, 15 bp, Homo sapiens
gggtatgtatttttt

SEQ ID NO: 1193408 - DNA, 15 bp, Homo sapiens
tgggtatgtattttt

SEQ ID NO: 1193409 - DNA, 15 bp, Homo sapiens
ctgggtatgtatttt

SEQ ID NO: 1193410 - DNA, 15 bp, Homo sapiens
cctgggtatgtattt

SEQ ID NO: 1193411 - DNA, 15 bp, Homo sapiens
gcctgggtatgtatt

SEQ ID NO: 1193412 - DNA, 15 bp, Homo sapiens
agcctgggtatgtat

SEQ ID NO: 1193413 - DNA, 15 bp, Homo sapiens
cagcctgggtatgta

SEQ ID NO: 1193414 - DNA, 15 bp, Homo sapiens
ccagcctgggtatgt

SEQ ID NO: 1193415 - DNA, 15 bp, Homo sapiens
cccagcctgggtatg

SEQ ID NO: 1193416 - DNA, 15 bp, Homo sapiens
acccagcctgggtat

SEQ ID NO: 1193417 - DNA, 15 bp, Homo sapiens
cacccagcctgggta

SEQ ID NO: 1193418 - DNA, 15 bp, Homo sapiens
gcacccagcctgggt

SEQ ID NO: 1193419 - DNA, 15 bp, Homo sapiens
cgcacccagcctggg

SEQ ID NO: 1193420 - DNA, 15 bp, Homo sapiens
ccgcacccagcctgg

SEQ ID NO: 1193421 - DNA, 15 bp, Homo sapiens
accgcacccagcctg

SEQ ID NO: 1193422 - DNA, 15 bp, Homo sapiens
caccgcacccagcct

SEQ ID NO: 1193423 - DNA, 15 bp, Homo sapiens
gagccaccgcaccca

SEQ ID NO: 1193424 - DNA, 15 bp, Homo sapiens
tgagccaccgcaccc

SEQ ID NO: 1193425 - DNA, 15 bp, Homo sapiens
aatgagccaccgcac

SEQ ID NO: 1193426 - DNA, 15 bp, Homo sapiens
gaatgagccaccgca

SEQ ID NO: 1193427 - DNA, 15 bp, Homo sapiens
ggaatgagccaccgc

SEQ ID NO: 1193428 - DNA, 15 bp, Homo sapiens
aggaatgagccaccg

SEQ ID NO: 1193429 - DNA, 15 bp, Homo sapiens
taggaatgagccacc

SEQ ID NO: 1193430 - DNA, 15 bp, Homo sapiens
ataggaatgagccac

SEQ ID NO: 1193431 - DNA, 15 bp, Homo sapiens
tataggaatgagcca

SEQ ID NO: 1193432 - DNA, 15 bp, Homo sapiens
ctataggaatgagcc

SEQ ID NO: 1193433 - DNA, 15 bp, Homo sapiens
actataggaatgagc

SEQ ID NO: 1193434 - DNA, 15 bp, Homo sapiens
gactataggaatgag

SEQ ID NO: 1193435 - DNA, 15 bp, Homo sapiens
ggactataggaatga

SEQ ID NO: 1193436 - DNA, 15 bp, Homo sapiens
gggactataggaatg

SEQ ID NO: 1193437 - DNA, 15 bp, Homo sapiens
tgggactataggaat

SEQ ID NO: 1193438 - DNA, 15 bp, Homo sapiens
ctgggactataggaa

SEQ ID NO: 1193439 - DNA, 15 bp, Homo sapiens
gctgggactatagga

SEQ ID NO: 1193440 - DNA, 15 bp, Homo sapiens
tgctgggactatagg

SEQ ID NO: 1193441 - DNA, 15 bp, Homo sapiens
gtgctgggactatag

SEQ ID NO: 1193442 - DNA, 15 bp, Homo sapiens
agtgctgggactata

SEQ ID NO: 1193443 - DNA, 15 bp, Homo sapiens
aagtgctgggactat

SEQ ID NO: 1193444 - DNA, 15 bp, Homo sapiens
aaagtgctgggacta

SEQ ID NO: 1193445 - DNA, 15 bp, Homo sapiens
caaagtgctgggact

SEQ ID NO: 1193446 - DNA, 15 bp, Homo sapiens
ccaaagtgctgggac

SEQ ID NO: 1193447 - DNA, 15 bp, Homo sapiens
ccagcctcccaaagt

SEQ ID NO: 1193448 - DNA, 15 bp, Homo sapiens
cccagcctcccaaag

SEQ ID NO: 1193449 - DNA, 15 bp, Homo sapiens
ccccagcctcccaaa

SEQ ID NO: 1193450 - DNA, 15 bp, Homo sapiens
gccccagcctcccaa

SEQ ID NO: 1193451 - DNA, 15 bp, Homo sapiens
tgccccagcctccca

SEQ ID NO: 1193452 - DNA, 15 bp, Homo sapiens
ctgccccagcctccc

SEQ ID NO: 1193453 - DNA, 15 bp, Homo sapiens
cctgccccagcctcc

SEQ ID NO: 1193454 - DNA, 15 bp, Homo sapiens
tcctgccccagcctc

SEQ ID NO: 1193455 - DNA, 15 bp, Homo sapiens
ctcctgccccagcct

SEQ ID NO: 1193456 - DNA, 15 bp, Homo sapiens
tctcctgccccagcc

SEQ ID NO: 1193457 - DNA, 15 bp, Homo sapiens
ttctcctgccccagc

SEQ ID NO: 1193458 - DNA, 15 bp, Homo sapiens
attctcctgccccag

SEQ ID NO: 1193459 - DNA, 15 bp, Homo sapiens
aattctcctgcccca

SEQ ID NO: 1193460 - DNA, 15 bp, Homo sapiens
caattctcctgcccc

SEQ ID NO: 1193461 - DNA, 15 bp, Homo sapiens
gcaattctcctgccc

SEQ ID NO: 1193462 - DNA, 15 bp, Homo sapiens
ttcctgggctcaagc

SEQ ID NO: 1193463 - DNA, 15 bp, Homo sapiens
attcctgggctcaag

SEQ ID NO: 1193464 - DNA, 15 bp, Homo sapiens
aattcctgggctcaa

SEQ ID NO: 1193465 - DNA, 15 bp, Homo sapiens
aaattcctgggctca

SEQ ID NO: 1193466 - DNA, 15 bp, Homo sapiens
caaattcctgggctc

SEQ ID NO: 1193467 - DNA, 15 bp, Homo sapiens
tcaaattcctgggct

SEQ ID NO: 1193468 - DNA, 15 bp, Homo sapiens
ctcaaattcctgggc

SEQ ID NO: 1193469 - DNA, 15 bp, Homo sapiens
tctcaaattcctggg

SEQ ID NO: 1193470 - DNA, 15 bp, Homo sapiens
gtctcaaattcctgg

SEQ ID NO: 1193471 - DNA, 15 bp, Homo sapiens
ggtctcaaattcctg

SEQ ID NO: 1193472 - DNA, 15 bp, Homo sapiens
tggtctcaaattcct

SEQ ID NO: 1193473 - DNA, 15 bp, Homo sapiens
ctggtctcaaattcc

SEQ ID NO: 1193474 - DNA, 15 bp, Homo sapiens
gctggtctcaaattc

SEQ ID NO: 1193475 - DNA, 15 bp, Homo sapiens
ggctggtctcaaatt

SEQ ID NO: 1193476 - DNA, 15 bp, Homo sapiens
aggctggtctcaaat

SEQ ID NO: 1193477 - DNA, 15 bp, Homo sapiens
cctatgttgcccagg

SEQ ID NO: 1193478 - DNA, 15 bp, Homo sapiens
ccctatgttgcccag

SEQ ID NO: 1193479 - DNA, 15 bp, Homo sapiens
tccctatgttgccca

SEQ ID NO: 1193480 - DNA, 15 bp, Homo sapiens
ctccctatgttgccc

SEQ ID NO: 1193481 - DNA, 15 bp, Homo sapiens
tctccctatgttgcc

SEQ ID NO: 1193482 - DNA, 15 bp, Homo sapiens
cggtctccctatgtt

SEQ ID NO: 1193483 - DNA, 15 bp, Homo sapiens
acggtctccctatgt

SEQ ID NO: 1193484 - DNA, 15 bp, Homo sapiens
cacggtctccctatg

SEQ ID NO: 1193485 - DNA, 15 bp, Homo sapiens
acacggtctccctat

SEQ ID NO: 1193486 - DNA, 15 bp, Homo sapiens
gacacggtctcccta

SEQ ID NO: 1193487 - DNA, 15 bp, Homo sapiens
agacacggtctccct

SEQ ID NO: 1193488 - DNA, 15 bp, Homo sapiens
gagacacggtctccc

SEQ ID NO: 1193489 - DNA, 15 bp, Homo sapiens
agagacacggtctcc

SEQ ID NO: 1193490 - DNA, 15 bp, Homo sapiens
tagagacacggtctc

SEQ ID NO: 1193491 - DNA, 15 bp, Homo sapiens
gtagagacacggtct

SEQ ID NO: 1193492 - DNA, 15 bp, Homo sapiens
tgtagagacacggtc

SEQ ID NO: 1193493 - DNA, 15 bp, Homo sapiens
ttgtagagacacggt

SEQ ID NO: 1193494 - DNA, 15 bp, Homo sapiens
tttgtagagacacgg

SEQ ID NO: 1193495 - DNA, 15 bp, Homo sapiens
ttttgtagagacacg

SEQ ID NO: 1193496 - DNA, 15 bp, Homo sapiens
tttttgtagagacac

SEQ ID NO: 1193497 - DNA, 15 bp, Homo sapiens
agtttttgtagagac

SEQ ID NO: 1193498 - DNA, 15 bp, Homo sapiens
cagtttttgtagaga

SEQ ID NO: 1193499 - DNA, 15 bp, Homo sapiens
tcagtttttgtagag

SEQ ID NO: 1193500 - DNA, 15 bp, Homo sapiens
ctcagtttttgtaga

SEQ ID NO: 1193501 - DNA, 15 bp, Homo sapiens
tctcagtttttgtag

SEQ ID NO: 1193502 - DNA, 15 bp, Homo sapiens
ttctcagtttttgta

SEQ ID NO: 1193503 - DNA, 15 bp, Homo sapiens
tttctcagtttttgt

SEQ ID NO: 1193504 - DNA, 15 bp, Homo sapiens
ttttctcagtttttg

SEQ ID NO: 1193505 - DNA, 15 bp, Homo sapiens
tttttctcagttttt

SEQ ID NO: 1193506 - DNA, 15 bp, Homo sapiens
atttttctcagtttt

SEQ ID NO: 1193507 - DNA, 15 bp, Homo sapiens
tatttttctcagttt

SEQ ID NO: 1193508 - DNA, 15 bp, Homo sapiens
ttatttttctcagtt

SEQ ID NO: 1193509 - DNA, 15 bp, Homo sapiens
attatttttctcagt

SEQ ID NO: 1193510 - DNA, 15 bp, Homo sapiens
aattatttttctcag

SEQ ID NO: 1193511 - DNA, 15 bp, Homo sapiens
taattatttttctca

SEQ ID NO: 1193512 - DNA, 15 bp, Homo sapiens
ataattatttttctc

SEQ ID NO: 1193513 - DNA, 15 bp, Homo sapiens
gataattatttttct

SEQ ID NO: 1193514 - DNA, 15 bp, Homo sapiens
ggataattatttttc

SEQ ID NO: 1193515 - DNA, 15 bp, Homo sapiens
tggataattattttt

SEQ ID NO: 1193516 - DNA, 15 bp, Homo sapiens
ctggataattatttt

SEQ ID NO: 1193517 - DNA, 15 bp, Homo sapiens
cctggataattattt

SEQ ID NO: 1193518 - DNA, 15 bp, Homo sapiens
gcctggataattatt

SEQ ID NO: 1193519 - DNA, 15 bp, Homo sapiens
tgcctggataattat

SEQ ID NO: 1193520 - DNA, 15 bp, Homo sapiens
atgcctggataatta

SEQ ID NO: 1193521 - DNA, 15 bp, Homo sapiens
ccatgcctggataat

SEQ ID NO: 1193522 - DNA, 15 bp, Homo sapiens
accatgcctggataa

SEQ ID NO: 1193523 - DNA, 15 bp, Homo sapiens
caccatgcctggata

SEQ ID NO: 1193524 - DNA, 15 bp, Homo sapiens
ccaccatgcctggat

SEQ ID NO: 1193525 - DNA, 15 bp, Homo sapiens
accaccatgcctgga

SEQ ID NO: 1193526 - DNA, 15 bp, Homo sapiens
acaccaccatgcctg

SEQ ID NO: 1193527 - DNA, 15 bp, Homo sapiens
cacaccaccatgcct

SEQ ID NO: 1193528 - DNA, 15 bp, Homo sapiens
gcacaccaccatgcc

SEQ ID NO: 1193529 - DNA, 15 bp, Homo sapiens
cgcacaccaccatgc

SEQ ID NO: 1193530 - DNA, 15 bp, Homo sapiens
gcgcacaccaccatg

SEQ ID NO: 1193531 - DNA, 15 bp, Homo sapiens
agcgcacaccaccat

SEQ ID NO: 1193532 - DNA, 15 bp, Homo sapiens
cagcgcacaccacca

SEQ ID NO: 1193533 - DNA, 15 bp, Homo sapiens
acagcgcacaccacc

SEQ ID NO: 1193534 - DNA, 15 bp, Homo sapiens
cacagcgcacaccac

SEQ ID NO: 1193535 - DNA, 15 bp, Homo sapiens
ccacagcgcacacca

SEQ ID NO: 1193536 - DNA, 15 bp, Homo sapiens
accacagcgcacacc

SEQ ID NO: 1193537 - DNA, 15 bp, Homo sapiens
gaccacagcgcacac

SEQ ID NO: 1193538 - DNA, 15 bp, Homo sapiens
ggaccacagcgcaca

SEQ ID NO: 1193539 - DNA, 15 bp, Homo sapiens
gggaccacagcgcac

SEQ ID NO: 1193540 - DNA, 15 bp, Homo sapiens
tgggaccacagcgca

SEQ ID NO: 1193541 - DNA, 15 bp, Homo sapiens
ctgggaccacagcgc

SEQ ID NO: 1193542 - DNA, 15 bp, Homo sapiens
gctgggaccacagcg

SEQ ID NO: 1193543 - DNA, 15 bp, Homo sapiens
agctgggaccacagc

SEQ ID NO: 1193544 - DNA, 15 bp, Homo sapiens
actcccaagtagctg

SEQ ID NO: 1193545 - DNA, 15 bp, Homo sapiens
gactcccaagtagct

SEQ ID NO: 1193546 - DNA, 15 bp, Homo sapiens
agactcccaagtagc

SEQ ID NO: 1193547 - DNA, 15 bp, Homo sapiens
cagactcccaagtag

SEQ ID NO: 1193548 - DNA, 15 bp, Homo sapiens
tcagactcccaagta

SEQ ID NO: 1193549 - DNA, 15 bp, Homo sapiens
ctcagactcccaagt

SEQ ID NO: 1193550 - DNA, 15 bp, Homo sapiens
cctcagactcccaag

SEQ ID NO: 1193551 - DNA, 15 bp, Homo sapiens
acctcagactcccaa

SEQ ID NO: 1193552 - DNA, 15 bp, Homo sapiens
cacctcagactccca

SEQ ID NO: 1193553 - DNA, 15 bp, Homo sapiens
ccacctcagactccc

SEQ ID NO: 1193554 - DNA, 15 bp, Homo sapiens
cccacctcagactcc

SEQ ID NO: 1193555 - DNA, 15 bp, Homo sapiens
tcccacctcagactc

SEQ ID NO: 1193556 - DNA, 15 bp, Homo sapiens
ctcccacctcagact

SEQ ID NO: 1193557 - DNA, 15 bp, Homo sapiens
cctcccacctcagac

SEQ ID NO: 1193558 - DNA, 15 bp, Homo sapiens
tcctcccacctcaga

SEQ ID NO: 1193559 - DNA, 15 bp, Homo sapiens
ttcaagcgatcctcc

SEQ ID NO: 1193560 - DNA, 15 bp, Homo sapiens
gttcaagcgatcctc

SEQ ID NO: 1193561 - DNA, 15 bp, Homo sapiens
aggttcaagcgatcc

SEQ ID NO: 1193562 - DNA, 15 bp, Homo sapiens
caggttcaagcgatc

SEQ ID NO: 1193563 - DNA, 15 bp, Homo sapiens
ggcctcccaggttca

SEQ ID NO: 1193564 - DNA, 15 bp, Homo sapiens
tggcctcccaggttc

SEQ ID NO: 1193565 - DNA, 15 bp, Homo sapiens
ttggcctcccaggtt

SEQ ID NO: 1193566 - DNA, 15 bp, Homo sapiens
cttggcctcccaggt

SEQ ID NO: 1193567 - DNA, 15 bp, Homo sapiens
ccttggcctcccagg

SEQ ID NO: 1193568 - DNA, 15 bp, Homo sapiens
gccttggcctcccag

SEQ ID NO: 1193569 - DNA, 15 bp, Homo sapiens
gcagccttggcctcc

SEQ ID NO: 1193570 - DNA, 15 bp, Homo sapiens
tgcagccttggcctc

SEQ ID NO: 1193571 - DNA, 15 bp, Homo sapiens
ctgcagccttggcct

SEQ ID NO: 1193572 - DNA, 15 bp, Homo sapiens
actgcagccttggcc

SEQ ID NO: 1193573 - DNA, 15 bp, Homo sapiens
tactgcagccttggc

SEQ ID NO: 1193574 - DNA, 15 bp, Homo sapiens
ttactgcagccttgg

SEQ ID NO: 1193575 - DNA, 15 bp, Homo sapiens
tttactgcagccttg

SEQ ID NO: 1193576 - DNA, 15 bp, Homo sapiens
gtttactgcagcctt

SEQ ID NO: 1193577 - DNA, 15 bp, Homo sapiens
agtttactgcagcct

SEQ ID NO: 1193578 - DNA, 15 bp, Homo sapiens
cagtttactgcagcc

SEQ ID NO: 1193579 - DNA, 15 bp, Homo sapiens
acagtttactgcagc

SEQ ID NO: 1193580 - DNA, 15 bp, Homo sapiens
cacagtttactgcag

SEQ ID NO: 1193581 - DNA, 15 bp, Homo sapiens
tcacagtttactgca

SEQ ID NO: 1193582 - DNA, 15 bp, Homo sapiens
atcacagtttactgc

SEQ ID NO: 1193583 - DNA, 15 bp, Homo sapiens
aatcacagtttactg

SEQ ID NO: 1193584 - DNA, 15 bp, Homo sapiens
caatcacagtttact

SEQ ID NO: 1193585 - DNA, 15 bp, Homo sapiens
gcaatcacagtttac

SEQ ID NO: 1193586 - DNA, 15 bp, Homo sapiens
cgcaatcacagttta

SEQ ID NO: 1193587 - DNA, 15 bp, Homo sapiens
gcgcaatcacagttt

SEQ ID NO: 1193588 - DNA, 15 bp, Homo sapiens
ggcgcaatcacagtt

SEQ ID NO: 1193589 - DNA, 15 bp, Homo sapiens
tggcgcaatcacagt

SEQ ID NO: 1193590 - DNA, 15 bp, Homo sapiens
gtggcgcaatcacag

SEQ ID NO: 1193591 - DNA, 15 bp, Homo sapiens
agtggcgcaatcaca

SEQ ID NO: 1193592 - DNA, 15 bp, Homo sapiens
cagtggcgcaatcac

SEQ ID NO: 1193593 - DNA, 15 bp, Homo sapiens
gatctcactctgtca

SEQ ID NO: 1193594 - DNA, 15 bp, Homo sapiens
ggatctcactctgtc

SEQ ID NO: 1193595 - DNA, 15 bp, Homo sapiens
tgacaggatctcact

SEQ ID NO: 1193596 - DNA, 15 bp, Homo sapiens
gtgacaggatctcac

SEQ ID NO: 1193597 - DNA, 15 bp, Homo sapiens
tgtgacaggatctca

SEQ ID NO: 1193598 - DNA, 15 bp, Homo sapiens
ttgtgacaggatctc

SEQ ID NO: 1193599 - DNA, 15 bp, Homo sapiens
tttgtgacaggatct

SEQ ID NO: 1193600 - DNA, 15 bp, Homo sapiens
ttttgtgacaggatc

SEQ ID NO: 1193601 - DNA, 15 bp, Homo sapiens
tttttgtgacaggat

SEQ ID NO: 1193602 - DNA, 15 bp, Homo sapiens
ttttttgtgacagga

SEQ ID NO: 1193603 - DNA, 15 bp, Homo sapiens
cttttttgtgacagg

SEQ ID NO: 1193604 - DNA, 15 bp, Homo sapiens
acttttttgtgacag

SEQ ID NO: 1193605 - DNA, 15 bp, Homo sapiens
cacttttttgtgaca

SEQ ID NO: 1193606 - DNA, 15 bp, Homo sapiens
acacttttttgtgac

SEQ ID NO: 1193607 - DNA, 15 bp, Homo sapiens
cacacttttttgtga

SEQ ID NO: 1193608 - DNA, 15 bp, Homo sapiens
acacacttttttgtg

SEQ ID NO: 1193609 - DNA, 15 bp, Homo sapiens
cacacacttttttgt

SEQ ID NO: 1193610 - DNA, 15 bp, Homo sapiens
acacacacttttttg

SEQ ID NO: 1193611 - DNA, 15 bp, Homo sapiens
cacacacactttttt

SEQ ID NO: 1193612 - DNA, 15 bp, Homo sapiens
acacacacacttttt

SEQ ID NO: 1193613 - DNA, 15 bp, Homo sapiens
cacacacacactttt

SEQ ID NO: 1193614 - DNA, 15 bp, Homo sapiens
acacacacacacttt

SEQ ID NO: 1193615 - DNA, 15 bp, Homo sapiens
gatacacacacacac

SEQ ID NO: 1193616 - DNA, 15 bp, Homo sapiens
ggatacacacacaca

SEQ ID NO: 1193617 - DNA, 15 bp, Homo sapiens
aggatacacacacac

SEQ ID NO: 1193618 - DNA, 15 bp, Homo sapiens
aaggatacacacaca

SEQ ID NO: 1193619 - DNA, 15 bp, Homo sapiens
aaaggatacacacac

SEQ ID NO: 1193620 - DNA, 15 bp, Homo sapiens
caaaggatacacaca

SEQ ID NO: 1193621 - DNA, 15 bp, Homo sapiens
acaaaggatacacac

SEQ ID NO: 1193622 - DNA, 15 bp, Homo sapiens
gacaaaggatacaca

SEQ ID NO: 1193623 - DNA, 15 bp, Homo sapiens
ggacaaaggatacac

SEQ ID NO: 1193624 - DNA, 15 bp, Homo sapiens
gggacaaaggataca

SEQ ID NO: 1193625 - DNA, 15 bp, Homo sapiens
tgggacaaaggatac

SEQ ID NO: 1193626 - DNA, 15 bp, Homo sapiens
ctgggacaaaggata

SEQ ID NO: 1193627 - DNA, 15 bp, Homo sapiens
actgggacaaaggat

SEQ ID NO: 1193628 - DNA, 15 bp, Homo sapiens
cactgggacaaagga

SEQ ID NO: 1193629 - DNA, 15 bp, Homo sapiens
tcactgggacaaagg

SEQ ID NO: 1193630 - DNA, 15 bp, Homo sapiens
atcactgggacaaag

SEQ ID NO: 1193631 - DNA, 15 bp, Homo sapiens
aatcactgggacaaa

SEQ ID NO: 1193632 - DNA, 15 bp, Homo sapiens
aaatcactgggacaa

SEQ ID NO: 1193633 - DNA, 15 bp, Homo sapiens
aaaatcactgggaca

SEQ ID NO: 1193634 - DNA, 15 bp, Homo sapiens
taaaatcactgggac

SEQ ID NO: 1193635 - DNA, 15 bp, Homo sapiens
gtaaaatcactggga

SEQ ID NO: 1193636 - DNA, 15 bp, Homo sapiens
aagtaaaatcactgg

SEQ ID NO: 1193637 - DNA, 15 bp, Homo sapiens
aaagtaaaatcactg

SEQ ID NO: 1193638 - DNA, 15 bp, Homo sapiens
aaaagtaaaatcact

SEQ ID NO: 1193639 - DNA, 15 bp, Homo sapiens
taaaagtaaaatcac

SEQ ID NO: 1193640 - DNA, 15 bp, Homo sapiens
ctaaaagtaaaatca

SEQ ID NO: 1193641 - DNA, 15 bp, Homo sapiens
tctaaaagtaaaatc

SEQ ID NO: 1193642 - DNA, 15 bp, Homo sapiens
ttctaaaagtaaaat

SEQ ID NO: 1193643 - DNA, 15 bp, Homo sapiens
tttctaaaagtaaaa

SEQ ID NO: 1193644 - DNA, 15 bp, Homo sapiens
atttctaaaagtaaa

SEQ ID NO: 1193645 - DNA, 15 bp, Homo sapiens
aatttctaaaagtaa

SEQ ID NO: 1193646 - DNA, 15 bp, Homo sapiens
aaatttctaaaagta

SEQ ID NO: 1193647 - DNA, 15 bp, Homo sapiens
taaatttctaaaagt

SEQ ID NO: 1193648 - DNA, 15 bp, Homo sapiens
ataaatttctaaaag

SEQ ID NO: 1193649 - DNA, 15 bp, Homo sapiens
gataaatttctaaaa

SEQ ID NO: 1193650 - DNA, 15 bp, Homo sapiens
tgataaatttctaaa

SEQ ID NO: 1193651 - DNA, 15 bp, Homo sapiens
atgataaatttctaa

SEQ ID NO: 1193652 - DNA, 15 bp, Homo sapiens
gatgataaatttcta

SEQ ID NO: 1193653 - DNA, 15 bp, Homo sapiens
ggatgataaatttct

SEQ ID NO: 1193654 - DNA, 15 bp, Homo sapiens
tggatgataaatttc

SEQ ID NO: 1193655 - DNA, 15 bp, Homo sapiens
atggatgataaattt

SEQ ID NO: 1193656 - DNA, 15 bp, Homo sapiens
tatggatgataaatt

SEQ ID NO: 1193657 - DNA, 15 bp, Homo sapiens
ttatggatgataaat

SEQ ID NO: 1193658 - DNA, 15 bp, Homo sapiens
gttatggatgataaa

SEQ ID NO: 1193659 - DNA, 15 bp, Homo sapiens
tgttatggatgataa

SEQ ID NO: 1193660 - DNA, 15 bp, Homo sapiens
ttgttatggatgata

SEQ ID NO: 1193661 - DNA, 15 bp, Homo sapiens
attgttatggatgat

SEQ ID NO: 1193662 - DNA, 15 bp, Homo sapiens
tattgttatggatga

SEQ ID NO: 1193663 - DNA, 15 bp, Homo sapiens
ctattgttatggatg

SEQ ID NO: 1193664 - DNA, 15 bp, Homo sapiens
tctattgttatggat

SEQ ID NO: 1193665 - DNA, 15 bp, Homo sapiens
ctctattgttatgga

SEQ ID NO: 1193666 - DNA, 15 bp, Homo sapiens
gctctattgttatgg

SEQ ID NO: 1193667 - DNA, 15 bp, Homo sapiens
tgctctattgttatg

SEQ ID NO: 1193668 - DNA, 15 bp, Homo sapiens
ttgctctattgttat

SEQ ID NO: 1193669 - DNA, 15 bp, Homo sapiens
attgctctattgtta

SEQ ID NO: 1193670 - DNA, 15 bp, Homo sapiens
cattgctctattgtt

SEQ ID NO: 1193671 - DNA, 15 bp, Homo sapiens
gcattgctctattgt

SEQ ID NO: 1193672 - DNA, 15 bp, Homo sapiens
tgcattgctctattg

SEQ ID NO: 1193673 - DNA, 15 bp, Homo sapiens
gtgcattgctctatt

SEQ ID NO: 1193674 - DNA, 15 bp, Homo sapiens
tgtgcattgctctat

SEQ ID NO: 1193675 - DNA, 15 bp, Homo sapiens
ttgtgcattgctcta

SEQ ID NO: 1193676 - DNA, 15 bp, Homo sapiens
cttgtgcattgctct

SEQ ID NO: 1193677 - DNA, 15 bp, Homo sapiens
ccttgtgcattgctc

SEQ ID NO: 1193678 - DNA, 15 bp, Homo sapiens
tccttgtgcattgct

SEQ ID NO: 1193679 - DNA, 15 bp, Homo sapiens
atccttgtgcattgc

SEQ ID NO: 1193680 - DNA, 15 bp, Homo sapiens
catccttgtgcattg

SEQ ID NO: 1193681 - DNA, 15 bp, Homo sapiens
acatccttgtgcatt

SEQ ID NO: 1193682 - DNA, 15 bp, Homo sapiens
tacatccttgtgcat

SEQ ID NO: 1193683 - DNA, 15 bp, Homo sapiens
ttacatccttgtgca

SEQ ID NO: 1193684 - DNA, 15 bp, Homo sapiens
tttacatccttgtgc

SEQ ID NO: 1193685 - DNA, 15 bp, Homo sapiens
ttttacatccttgtg

SEQ ID NO: 1193686 - DNA, 15 bp, Homo sapiens
cttttacatccttgt

SEQ ID NO: 1193687 - DNA, 15 bp, Homo sapiens
tcttttacatccttg

SEQ ID NO: 1193688 - DNA, 15 bp, Homo sapiens
ttcttttacatcctt

SEQ ID NO: 1193689 - DNA, 15 bp, Homo sapiens
cttcttttacatcct

SEQ ID NO: 1193690 - DNA, 15 bp, Homo sapiens
ccttcttttacatcc

SEQ ID NO: 1193691 - DNA, 15 bp, Homo sapiens
tccttcttttacatc

SEQ ID NO: 1193692 - DNA, 15 bp, Homo sapiens
ttccttcttttacat

SEQ ID NO: 1193693 - DNA, 15 bp, Homo sapiens
tttccttcttttaca

SEQ ID NO: 1193694 - DNA, 15 bp, Homo sapiens
gtttccttcttttac

SEQ ID NO: 1193695 - DNA, 15 bp, Homo sapiens
ggtttccttctttta

SEQ ID NO: 1193696 - DNA, 15 bp, Homo sapiens
gggtttccttctttt

SEQ ID NO: 1193697 - DNA, 15 bp, Homo sapiens
tgggtttccttcttt

SEQ ID NO: 1193698 - DNA, 15 bp, Homo sapiens
atgggtttccttctt

SEQ ID NO: 1193699 - DNA, 15 bp, Homo sapiens
aatgggtttccttct

SEQ ID NO: 1193700 - DNA, 15 bp, Homo sapiens
caatgggtttccttc

SEQ ID NO: 1193701 - DNA, 15 bp, Homo sapiens
gcaatgggtttcctt

SEQ ID NO: 1193702 - DNA, 15 bp, Homo sapiens
agcaatgggtttcct

SEQ ID NO: 1193703 - DNA, 15 bp, Homo sapiens
gagcaatgggtttcc

SEQ ID NO: 1193704 - DNA, 15 bp, Homo sapiens
agagcaatgggtttc

SEQ ID NO: 1193705 - DNA, 15 bp, Homo sapiens
cagagcaatgggttt

SEQ ID NO: 1193706 - DNA, 15 bp, Homo sapiens
acagagcaatgggtt

SEQ ID NO: 1193707 - DNA, 15 bp, Homo sapiens
gacagagcaatgggt

SEQ ID NO: 1193708 - DNA, 15 bp, Homo sapiens
agacagagcaatggg

SEQ ID NO: 1193709 - DNA, 15 bp, Homo sapiens
gagacagagcaatgg

SEQ ID NO: 1193710 - DNA, 15 bp, Homo sapiens
tgagacagagcaatg

SEQ ID NO: 1193711 - DNA, 15 bp, Homo sapiens
ctgagacagagcaat

SEQ ID NO: 1193712 - DNA, 15 bp, Homo sapiens
gctgagacagagcaa

SEQ ID NO: 1193713 - DNA, 15 bp, Homo sapiens
tgctgagacagagca

SEQ ID NO: 1193714 - DNA, 15 bp, Homo sapiens
gtgctgagacagagc

SEQ ID NO: 1193715 - DNA, 15 bp, Homo sapiens
tgtgctgagacagag

SEQ ID NO: 1193716 - DNA, 15 bp, Homo sapiens
ttgtgctgagacaga

SEQ ID NO: 1193717 - DNA, 15 bp, Homo sapiens
gttgtgctgagacag

SEQ ID NO: 1193718 - DNA, 15 bp, Homo sapiens
agttgtgctgagaca

SEQ ID NO: 1193719 - DNA, 15 bp, Homo sapiens
cagttgtgctgagac

SEQ ID NO: 1193720 - DNA, 15 bp, Homo sapiens
ccagttgtgctgaga

SEQ ID NO: 1193721 - DNA, 15 bp, Homo sapiens
tccagttgtgctgag

SEQ ID NO: 1193722 - DNA, 15 bp, Homo sapiens
ttccagttgtgctga

SEQ ID NO: 1193723 - DNA, 15 bp, Homo sapiens
tttccagttgtgctg

SEQ ID NO: 1193724 - DNA, 15 bp, Homo sapiens
gtttccagttgtgct

SEQ ID NO: 1193725 - DNA, 15 bp, Homo sapiens
tgtttccagttgtgc

SEQ ID NO: 1193726 - DNA, 15 bp, Homo sapiens
ttgtttccagttgtg

SEQ ID NO: 1193727 - DNA, 15 bp, Homo sapiens
gttgtttccagttgt

SEQ ID NO: 1193728 - DNA, 15 bp, Homo sapiens
agttgtttccagttg

SEQ ID NO: 1193729 - DNA, 15 bp, Homo sapiens
aagttgtttccagtt

SEQ ID NO: 1193730 - DNA, 15 bp, Homo sapiens
aaagttgtttccagt

SEQ ID NO: 1193731 - DNA, 15 bp, Homo sapiens
caaagttgtttccag

SEQ ID NO: 1193732 - DNA, 15 bp, Homo sapiens
tcaaagttgtttcca

SEQ ID NO: 1193733 - DNA, 15 bp, Homo sapiens
atcaaagttgtttcc

SEQ ID NO: 1193734 - DNA, 15 bp, Homo sapiens
catcaaagttgtttc

SEQ ID NO: 1193735 - DNA, 15 bp, Homo sapiens
acatcaaagttgttt

SEQ ID NO: 1193736 - DNA, 15 bp, Homo sapiens
gacatcaaagttgtt

SEQ ID NO: 1193737 - DNA, 15 bp, Homo sapiens
ggacatcaaagttgt

SEQ ID NO: 1193738 - DNA, 15 bp, Homo sapiens
gggacatcaaagttg

SEQ ID NO: 1193739 - DNA, 15 bp, Homo sapiens
ggggacatcaaagtt

SEQ ID NO: 1193740 - DNA, 15 bp, Homo sapiens
gggggacatcaaagt

SEQ ID NO: 1193741 - DNA, 15 bp, Homo sapiens
tgggggacatcaaag

SEQ ID NO: 1193742 - DNA, 15 bp, Homo sapiens
ctgggggacatcaaa

SEQ ID NO: 1193743 - DNA, 15 bp, Homo sapiens
actgggggacatcaa

SEQ ID NO: 1193744 - DNA, 15 bp, Homo sapiens
tactgggggacatca

SEQ ID NO: 1193745 - DNA, 15 bp, Homo sapiens
ttactgggggacatc

SEQ ID NO: 1193746 - DNA, 15 bp, Homo sapiens
cttactgggggacat

SEQ ID NO: 1193747 - DNA, 15 bp, Homo sapiens
ccttactgggggaca

SEQ ID NO: 1193748 - DNA, 15 bp, Homo sapiens
tccttactgggggac

SEQ ID NO: 1193749 - DNA, 15 bp, Homo sapiens
gtccttactggggga

SEQ ID NO: 1193750 - DNA, 15 bp, Homo sapiens
agtccttactggggg

SEQ ID NO: 1193751 - DNA, 15 bp, Homo sapiens
cagtccttactgggg

SEQ ID NO: 1193752 - DNA, 15 bp, Homo sapiens
tcagtccttactggg

SEQ ID NO: 1193753 - DNA, 15 bp, Homo sapiens
atcagtccttactgg

SEQ ID NO: 1193754 - DNA, 15 bp, Homo sapiens
aatcagtccttactg

SEQ ID NO: 1193755 - DNA, 15 bp, Homo sapiens
taatcagtccttact

SEQ ID NO: 1193756 - DNA, 15 bp, Homo sapiens
ttaatcagtccttac

SEQ ID NO: 1193757 - DNA, 15 bp, Homo sapiens
tttaatcagtcctta

SEQ ID NO: 1193758 - DNA, 15 bp, Homo sapiens
atttaatcagtcctt

SEQ ID NO: 1193759 - DNA, 15 bp, Homo sapiens
tatttaatcagtcct

SEQ ID NO: 1193760 - DNA, 15 bp, Homo sapiens
ttatttaatcagtcc

SEQ ID NO: 1193761 - DNA, 15 bp, Homo sapiens
attatttaatcagtc

SEQ ID NO: 1193762 - DNA, 15 bp, Homo sapiens
aattatttaatcagt

SEQ ID NO: 1193763 - DNA, 15 bp, Homo sapiens
taattatttaatcag

SEQ ID NO: 1193764 - DNA, 15 bp, Homo sapiens
ctaattatttaatca

SEQ ID NO: 1193765 - DNA, 15 bp, Homo sapiens
gctaattatttaatc

SEQ ID NO: 1193766 - DNA, 15 bp, Homo sapiens
cgctaattatttaat

SEQ ID NO: 1193767 - DNA, 15 bp, Homo sapiens
acgctaattatttaa

SEQ ID NO: 1193768 - DNA, 15 bp, Homo sapiens
aacgctaattattta

SEQ ID NO: 1193769 - DNA, 15 bp, Homo sapiens
gaacgctaattattt

SEQ ID NO: 1193770 - DNA, 15 bp, Homo sapiens
tgaacgctaattatt

SEQ ID NO: 1193771 - DNA, 15 bp, Homo sapiens
atgaacgctaattat

SEQ ID NO: 1193772 - DNA, 15 bp, Homo sapiens
aatgaacgctaatta

SEQ ID NO: 1193773 - DNA, 15 bp, Homo sapiens
gaatgaacgctaatt

SEQ ID NO: 1193774 - DNA, 15 bp, Homo sapiens
tgaatgaacgctaat

SEQ ID NO: 1193775 - DNA, 15 bp, Homo sapiens
gtgaatgaacgctaa

SEQ ID NO: 1193776 - DNA, 15 bp, Homo sapiens
tgtgaatgaacgcta

SEQ ID NO: 1193777 - DNA, 15 bp, Homo sapiens
ctgtgaatgaacgct

SEQ ID NO: 1193778 - DNA, 15 bp, Homo sapiens
cctgtgaatgaacgc

SEQ ID NO: 1193779 - DNA, 15 bp, Homo sapiens
acctgtgaatgaacg

SEQ ID NO: 1193780 - DNA, 15 bp, Homo sapiens
cacctgtgaatgaac

SEQ ID NO: 1193781 - DNA, 15 bp, Homo sapiens
ccacctgtgaatgaa

SEQ ID NO: 1193782 - DNA, 15 bp, Homo sapiens
gccacctgtgaatga

SEQ ID NO: 1193783 - DNA, 15 bp, Homo sapiens
agccacctgtgaatg

SEQ ID NO: 1193784 - DNA, 15 bp, Homo sapiens
aagccacctgtgaat

SEQ ID NO: 1193785 - DNA, 15 bp, Homo sapiens
gaagccacctgtgaa

SEQ ID NO: 1193786 - DNA, 15 bp, Homo sapiens
ggaagccacctgtga

SEQ ID NO: 1193787 - DNA, 15 bp, Homo sapiens
tggaagccacctgtg

SEQ ID NO: 1193788 - DNA, 15 bp, Homo sapiens
ttggaagccacctgt

SEQ ID NO: 1193789 - DNA, 15 bp, Homo sapiens
cttggaagccacctg

SEQ ID NO: 1193790 - DNA, 15 bp, Homo sapiens
ccttggaagccacct

SEQ ID NO: 1193791 - DNA, 15 bp, Homo sapiens
gccttggaagccacc

SEQ ID NO: 1193792 - DNA, 15 bp, Homo sapiens
tgccttggaagccac

SEQ ID NO: 1193793 - DNA, 15 bp, Homo sapiens
ctgccttggaagcca

SEQ ID NO: 1193794 - DNA, 15 bp, Homo sapiens
gctgccttggaagcc

SEQ ID NO: 1193795 - DNA, 15 bp, Homo sapiens
ggctgccttggaagc

SEQ ID NO: 1193796 - DNA, 15 bp, Homo sapiens
tggctgccttggaag

SEQ ID NO: 1193797 - DNA, 15 bp, Homo sapiens
ctggctgccttggaa

SEQ ID NO: 1193798 - DNA, 15 bp, Homo sapiens
gctggctgccttgga

SEQ ID NO: 1193799 - DNA, 15 bp, Homo sapiens
tgctggctgccttgg

SEQ ID NO: 1193800 - DNA, 15 bp, Homo sapiens
ttgctggctgccttg

SEQ ID NO: 1193801 - DNA, 15 bp, Homo sapiens
tttgctggctgcctt

SEQ ID NO: 1193802 - DNA, 15 bp, Homo sapiens
ttttgctggctgcct

SEQ ID NO: 1193803 - DNA, 15 bp, Homo sapiens
tttttgctggctgcc

SEQ ID NO: 1193804 - DNA, 15 bp, Homo sapiens
atttttgctggctgc

SEQ ID NO: 1193805 - DNA, 15 bp, Homo sapiens
tatttttgctggctg

SEQ ID NO: 1193806 - DNA, 15 bp, Homo sapiens
ttatttttgctggct

SEQ ID NO: 1193807 - DNA, 15 bp, Homo sapiens
gttatttttgctggc

SEQ ID NO: 1193808 - DNA, 15 bp, Homo sapiens
tgttatttttgctgg

SEQ ID NO: 1193809 - DNA, 15 bp, Homo sapiens
ctgttatttttgctg

SEQ ID NO: 1193810 - DNA, 15 bp, Homo sapiens
actgttatttttgct

SEQ ID NO: 1193811 - DNA, 15 bp, Homo sapiens
cactgttatttttgc

SEQ ID NO: 1193812 - DNA, 15 bp, Homo sapiens
ccactgttatttttg

SEQ ID NO: 1193813 - DNA, 15 bp, Homo sapiens
gccactgttattttt

SEQ ID NO: 1193814 - DNA, 15 bp, Homo sapiens
ggccactgttatttt

SEQ ID NO: 1193815 - DNA, 15 bp, Homo sapiens
tggccactgttattt

SEQ ID NO: 1193816 - DNA, 15 bp, Homo sapiens
gtggccactgttatt

SEQ ID NO: 1193817 - DNA, 15 bp, Homo sapiens
tgtggccactgttat

SEQ ID NO: 1193818 - DNA, 15 bp, Homo sapiens
atgtggccactgtta

SEQ ID NO: 1193819 - DNA, 15 bp, Homo sapiens
catgtggccactgtt

SEQ ID NO: 1193820 - DNA, 15 bp, Homo sapiens
tcatgtggccactgt

SEQ ID NO: 1193821 - DNA, 15 bp, Homo sapiens
ttcatgtggccactg

SEQ ID NO: 1193822 - DNA, 15 bp, Homo sapiens
tttcatgtggccact

SEQ ID NO: 1193823 - DNA, 15 bp, Homo sapiens
ttttcatgtggccac

SEQ ID NO: 1193824 - DNA, 15 bp, Homo sapiens
gttttcatgtggcca

SEQ ID NO: 1193825 - DNA, 15 bp, Homo sapiens
tgttttcatgtggcc

SEQ ID NO: 1193826 - DNA, 15 bp, Homo sapiens
atgttttcatgtggc

SEQ ID NO: 1193827 - DNA, 15 bp, Homo sapiens
tatgttttcatgtgg

SEQ ID NO: 1193828 - DNA, 15 bp, Homo sapiens
ttatgttttcatgtg

SEQ ID NO: 1193829 - DNA, 15 bp, Homo sapiens
attatgttttcatgt

SEQ ID NO: 1193830 - DNA, 15 bp, Homo sapiens
cattatgttttcatg

SEQ ID NO: 1193831 - DNA, 15 bp, Homo sapiens
acattatgttttcat

SEQ ID NO: 1193832 - DNA, 15 bp, Homo sapiens
cacattatgttttca

SEQ ID NO: 1193833 - DNA, 15 bp, Homo sapiens
acacattatgttttc

SEQ ID NO: 1193834 - DNA, 15 bp, Homo sapiens
cacacattatgtttt

SEQ ID NO: 1193835 - DNA, 15 bp, Homo sapiens
gcacacattatgttt

SEQ ID NO: 1193836 - DNA, 15 bp, Homo sapiens
ggcacacattatgtt

SEQ ID NO: 1193837 - DNA, 15 bp, Homo sapiens
tggcacacattatgt

SEQ ID NO: 1193838 - DNA, 15 bp, Homo sapiens
gtggcacacattatg

SEQ ID NO: 1193839 - DNA, 15 bp, Homo sapiens
tgtggcacacattat

SEQ ID NO: 1193840 - DNA, 15 bp, Homo sapiens
atgtggcacacatta

SEQ ID NO: 1193841 - DNA, 15 bp, Homo sapiens
catgtggcacacatt

SEQ ID NO: 1193842 - DNA, 15 bp, Homo sapiens
tcatgtggcacacat

SEQ ID NO: 1193843 - DNA, 15 bp, Homo sapiens
ttcatgtggcacaca

SEQ ID NO: 1193844 - DNA, 15 bp, Homo sapiens
tttcatgtggcacac

SEQ ID NO: 1193845 - DNA, 15 bp, Homo sapiens
ttttcatgtggcaca

SEQ ID NO: 1193846 - DNA, 15 bp, Homo sapiens
tttttcatgtggcac

SEQ ID NO: 1193847 - DNA, 15 bp, Homo sapiens
ttttttcatgtggca

SEQ ID NO: 1193848 - DNA, 15 bp, Homo sapiens
cttttttcatgtggc

SEQ ID NO: 1193849 - DNA, 15 bp, Homo sapiens
gcttttttcatgtgg

SEQ ID NO: 1193850 - DNA, 15 bp, Homo sapiens
tgcttttttcatgtg

SEQ ID NO: 1193851 - DNA, 15 bp, Homo sapiens
gtgcttttttcatgt

SEQ ID NO: 1193852 - DNA, 15 bp, Homo sapiens
tgtgcttttttcatg

SEQ ID NO: 1193853 - DNA, 15 bp, Homo sapiens
gtgtgcttttttcat

SEQ ID NO: 1193854 - DNA, 15 bp, Homo sapiens
tgtgtgcttttttca

SEQ ID NO: 1193855 - DNA, 15 bp, Homo sapiens
ctgtgtgcttttttc

SEQ ID NO: 1193856 - DNA, 15 bp, Homo sapiens
tctgtgtgctttttt

SEQ ID NO: 1193857 - DNA, 15 bp, Homo sapiens
atctgtgtgcttttt

SEQ ID NO: 1193858 - DNA, 15 bp, Homo sapiens
tatctgtgtgctttt

SEQ ID NO: 1193859 - DNA, 15 bp, Homo sapiens
ctatctgtgtgcttt

SEQ ID NO: 1193860 - DNA, 15 bp, Homo sapiens
cctatctgtgtgctt

SEQ ID NO: 1193861 - DNA, 15 bp, Homo sapiens
ccctatctgtgtgct

SEQ ID NO: 1193862 - DNA, 15 bp, Homo sapiens
tccctatctgtgtgc

SEQ ID NO: 1193863 - DNA, 15 bp, Homo sapiens
ctccctatctgtgtg

SEQ ID NO: 1193864 - DNA, 15 bp, Homo sapiens
tctccctatctgtgt

SEQ ID NO: 1193865 - DNA, 15 bp, Homo sapiens
ctctccctatctgtg

SEQ ID NO: 1193866 - DNA, 15 bp, Homo sapiens
cctctccctatctgt

SEQ ID NO: 1193867 - DNA, 15 bp, Homo sapiens
ccctctccctatctg

SEQ ID NO: 1193868 - DNA, 15 bp, Homo sapiens
gccctctccctatct

SEQ ID NO: 1193869 - DNA, 15 bp, Homo sapiens
tgccctctccctatc

SEQ ID NO: 1193870 - DNA, 15 bp, Homo sapiens
ctgccctctccctat

SEQ ID NO: 1193871 - DNA, 15 bp, Homo sapiens
cctgccctctcccta

SEQ ID NO: 1193872 - DNA, 15 bp, Homo sapiens
tcctgccctctccct

SEQ ID NO: 1193873 - DNA, 15 bp, Homo sapiens
atcctgccctctccc

SEQ ID NO: 1193874 - DNA, 15 bp, Homo sapiens
tatcctgccctctcc

SEQ ID NO: 1193875 - DNA, 15 bp, Homo sapiens
gtatcctgccctctc

SEQ ID NO: 1193876 - DNA, 15 bp, Homo sapiens
agtatcctgccctct

SEQ ID NO: 1193877 - DNA, 15 bp, Homo sapiens
aagtatcctgccctc

SEQ ID NO: 1193878 - DNA, 15 bp, Homo sapiens
gaagtatcctgccct

SEQ ID NO: 1193879 - DNA, 15 bp, Homo sapiens
ggaagtatcctgccc

SEQ ID NO: 1193880 - DNA, 15 bp, Homo sapiens
tggaagtatcctgcc

SEQ ID NO: 1193881 - DNA, 15 bp, Homo sapiens
atggaagtatcctgc

SEQ ID NO: 1193882 - DNA, 15 bp, Homo sapiens
aatggaagtatcctg

SEQ ID NO: 1193883 - DNA, 15 bp, Homo sapiens
aaatggaagtatcct

SEQ ID NO: 1193884 - DNA, 15 bp, Homo sapiens
aaaatggaagtatcc

SEQ ID NO: 1193885 - DNA, 15 bp, Homo sapiens
gaaaatggaagtatc

SEQ ID NO: 1193886 - DNA, 15 bp, Homo sapiens
agaaaatggaagtat

SEQ ID NO: 1193887 - DNA, 15 bp, Homo sapiens
tagaaaatggaagta

SEQ ID NO: 1193888 - DNA, 15 bp, Homo sapiens
atagaaaatggaagt

SEQ ID NO: 1193889 - DNA, 15 bp, Homo sapiens
aatagaaaatggaag

SEQ ID NO: 1193890 - DNA, 15 bp, Homo sapiens
aaaatagaaaatgga

SEQ ID NO: 1193891 - DNA, 15 bp, Homo sapiens
taaaatagaaaatgg

SEQ ID NO: 1193892 - DNA, 15 bp, Homo sapiens
ataaaatagaaaatg

SEQ ID NO: 1193893 - DNA, 15 bp, Homo sapiens
tataaaatagaaaat

SEQ ID NO: 1193894 - DNA, 15 bp, Homo sapiens
atataaaatagaaaa

SEQ ID NO: 1193895 - DNA, 15 bp, Homo sapiens
tatataaaatagaaa

SEQ ID NO: 1193896 - DNA, 15 bp, Homo sapiens
gtatataaaatagaa

SEQ ID NO: 1193897 - DNA, 15 bp, Homo sapiens
tgtatataaaataga

SEQ ID NO: 1193898 - DNA, 15 bp, Homo sapiens
atgtatataaaatag

SEQ ID NO: 1193899 - DNA, 15 bp, Homo sapiens
gatgtatataaaata

SEQ ID NO: 1193900 - DNA, 15 bp, Homo sapiens
agatgtatataaaat

SEQ ID NO: 1193901 - DNA, 15 bp, Homo sapiens
tagatgtatataaaa

SEQ ID NO: 1193902 - DNA, 15 bp, Homo sapiens
atagatgtatataaa

SEQ ID NO: 1193903 - DNA, 15 bp, Homo sapiens
gatagatgtatataa

SEQ ID NO: 1193904 - DNA, 15 bp, Homo sapiens
agatagatgtatata

SEQ ID NO: 1193905 - DNA, 15 bp, Homo sapiens
tagatagatgtatat

SEQ ID NO: 1193906 - DNA, 15 bp, Homo sapiens
atagatagatgtata

SEQ ID NO: 1193907 - DNA, 15 bp, Homo sapiens
tatagatagatgtat

SEQ ID NO: 1193908 - DNA, 15 bp, Homo sapiens
ctatagatagatgta

SEQ ID NO: 1193909 - DNA, 15 bp, Homo sapiens
gctatagatagatgt

SEQ ID NO: 1193910 - DNA, 15 bp, Homo sapiens
agctatagatagatg

SEQ ID NO: 1193911 - DNA, 15 bp, Homo sapiens
gagctatagatagat

SEQ ID NO: 1193912 - DNA, 15 bp, Homo sapiens
agagctatagataga

SEQ ID NO: 1193913 - DNA, 15 bp, Homo sapiens
aagagctatagatag

SEQ ID NO: 1193914 - DNA, 15 bp, Homo sapiens
caagagctatagata

SEQ ID NO: 1193915 - DNA, 15 bp, Homo sapiens
tcaagagctatagat

SEQ ID NO: 1193916 - DNA, 15 bp, Homo sapiens
ttcaagagctataga

SEQ ID NO: 1193917 - DNA, 15 bp, Homo sapiens
attcaagagctatag

SEQ ID NO: 1193918 - DNA, 15 bp, Homo sapiens
aattcaagagctata

SEQ ID NO: 1193919 - DNA, 15 bp, Homo sapiens
aaattcaagagctat

SEQ ID NO: 1193920 - DNA, 15 bp, Homo sapiens
aaaattcaagagcta

SEQ ID NO: 1193921 - DNA, 15 bp, Homo sapiens
aaaaattcaagagct

SEQ ID NO: 1193922 - DNA, 15 bp, Homo sapiens
aaaaaattcaagagc

SEQ ID NO: 1193923 - DNA, 15 bp, Homo sapiens
gaaaaaattcaagag

SEQ ID NO: 1193924 - DNA, 15 bp, Homo sapiens
tgaaaaaattcaaga

SEQ ID NO: 1193925 - DNA, 15 bp, Homo sapiens
gtgaaaaaattcaag

SEQ ID NO: 1193926 - DNA, 15 bp, Homo sapiens
tgtgaaaaaattcaa

SEQ ID NO: 1193927 - DNA, 15 bp, Homo sapiens
ttgtgaaaaaattca

SEQ ID NO: 1193928 - DNA, 15 bp, Homo sapiens
cttgtgaaaaaattc

SEQ ID NO: 1193929 - DNA, 15 bp, Homo sapiens
ccttgtgaaaaaatt

SEQ ID NO: 1193930 - DNA, 15 bp, Homo sapiens
tccttgtgaaaaaat

SEQ ID NO: 1193931 - DNA, 15 bp, Homo sapiens
ctccttgtgaaaaaa

SEQ ID NO: 1193932 - DNA, 15 bp, Homo sapiens
actccttgtgaaaaa

SEQ ID NO: 1193933 - DNA, 15 bp, Homo sapiens
tactccttgtgaaaa

SEQ ID NO: 1193934 - DNA, 15 bp, Homo sapiens
atactccttgtgaaa

SEQ ID NO: 1193935 - DNA, 15 bp, Homo sapiens
tatactccttgtgaa

SEQ ID NO: 1193936 - DNA, 15 bp, Homo sapiens
atatactccttgtga

SEQ ID NO: 1193937 - DNA, 15 bp, Homo sapiens
gatatactccttgtg

SEQ ID NO: 1193938 - DNA, 15 bp, Homo sapiens
agatatactccttgt

SEQ ID NO: 1193939 - DNA, 15 bp, Homo sapiens
aagatatactccttg

SEQ ID NO: 1193940 - DNA, 15 bp, Homo sapiens
taagatatactcctt

SEQ ID NO: 1193941 - DNA, 15 bp, Homo sapiens
gtaagatatactcct

SEQ ID NO: 1193942 - DNA, 15 bp, Homo sapiens
ggtaagatatactcc

SEQ ID NO: 1193943 - DNA, 15 bp, Homo sapiens
aggtaagatatactc

SEQ ID NO: 1193944 - DNA, 15 bp, Homo sapiens
aaggtaagatatact

SEQ ID NO: 1193945 - DNA, 15 bp, Homo sapiens
aaaggtaagatatac

SEQ ID NO: 1193946 - DNA, 15 bp, Homo sapiens
taaaggtaagatata

SEQ ID NO: 1193947 - DNA, 15 bp, Homo sapiens
gtaaaggtaagatat

SEQ ID NO: 1193948 - DNA, 15 bp, Homo sapiens
tgtaaaggtaagata

SEQ ID NO: 1193949 - DNA, 15 bp, Homo sapiens
ttgtaaaggtaagat

SEQ ID NO: 1193950 - DNA, 15 bp, Homo sapiens
attgtaaaggtaaga

SEQ ID NO: 1193951 - DNA, 15 bp, Homo sapiens
aattgtaaaggtaag

SEQ ID NO: 1193952 - DNA, 15 bp, Homo sapiens
gaattgtaaaggtaa

SEQ ID NO: 1193953 - DNA, 15 bp, Homo sapiens
tgaattgtaaaggta

SEQ ID NO: 1193954 - DNA, 15 bp, Homo sapiens
atgaattgtaaaggt

SEQ ID NO: 1193955 - DNA, 15 bp, Homo sapiens
tatgaattgtaaagg

SEQ ID NO: 1193956 - DNA, 15 bp, Homo sapiens
ttatgaattgtaaag

SEQ ID NO: 1193957 - DNA, 15 bp, Homo sapiens
tttatgaattgtaaa

SEQ ID NO: 1193958 - DNA, 15 bp, Homo sapiens
atttatgaattgtaa

SEQ ID NO: 1193959 - DNA, 15 bp, Homo sapiens
tatttatgaattgta

SEQ ID NO: 1193960 - DNA, 15 bp, Homo sapiens
ttatttatgaattgt

SEQ ID NO: 1193961 - DNA, 15 bp, Homo sapiens
tttatttatgaattg

SEQ ID NO: 1193962 - DNA, 15 bp, Homo sapiens
atttatttatgaatt

SEQ ID NO: 1193963 - DNA, 15 bp, Homo sapiens
aatttatttatgaat

SEQ ID NO: 1193964 - DNA, 15 bp, Homo sapiens
aaatttatttatgaa

SEQ ID NO: 1193965 - DNA, 15 bp, Homo sapiens
aaaatttatttatga

SEQ ID NO: 1193966 - DNA, 15 bp, Homo sapiens
taaaatttatttatg

SEQ ID NO: 1193967 - DNA, 15 bp, Homo sapiens
ctaaaatttatttat

SEQ ID NO: 1193968 - DNA, 15 bp, Homo sapiens
actaaaatttattta

SEQ ID NO: 1193969 - DNA, 15 bp, Homo sapiens
cactaaaatttattt

SEQ ID NO: 1193970 - DNA, 15 bp, Homo sapiens
ccactaaaatttatt

SEQ ID NO: 1193971 - DNA, 15 bp, Homo sapiens
tccactaaaatttat

SEQ ID NO: 1193972 - DNA, 15 bp, Homo sapiens
ctccactaaaattta

SEQ ID NO: 1193973 - DNA, 15 bp, Homo sapiens
cctccactaaaattt

SEQ ID NO: 1193974 - DNA, 15 bp, Homo sapiens
acctccactaaaatt

SEQ ID NO: 1193975 - DNA, 15 bp, Homo sapiens
cacctccactaaaat

SEQ ID NO: 1193976 - DNA, 15 bp, Homo sapiens
ccacctccactaaaa

SEQ ID NO: 1193977 - DNA, 15 bp, Homo sapiens
gccacctccactaaa

SEQ ID NO: 1193978 - DNA, 15 bp, Homo sapiens
agccacctccactaa

SEQ ID NO: 1193979 - DNA, 15 bp, Homo sapiens
tagccacctccacta

SEQ ID NO: 1193980 - DNA, 15 bp, Homo sapiens
atagccacctccact

SEQ ID NO: 1193981 - DNA, 15 bp, Homo sapiens
gatagccacctccac

SEQ ID NO: 1193982 - DNA, 15 bp, Homo sapiens
ggatagccacctcca

SEQ ID NO: 1193983 - DNA, 15 bp, Homo sapiens
aggatagccacctcc

SEQ ID NO: 1193984 - DNA, 15 bp, Homo sapiens
caggatagccacctc

SEQ ID NO: 1193985 - DNA, 15 bp, Homo sapiens
gcaggatagccacct

SEQ ID NO: 1193986 - DNA, 15 bp, Homo sapiens
tgcaggatagccacc

SEQ ID NO: 1193987 - DNA, 15 bp, Homo sapiens
gtgcaggatagccac

SEQ ID NO: 1193988 - DNA, 15 bp, Homo sapiens
tgtgcaggatagcca

SEQ ID NO: 1193989 - DNA, 15 bp, Homo sapiens
ttgtgcaggatagcc

SEQ ID NO: 1193990 - DNA, 15 bp, Homo sapiens
cttgtgcaggatagc

SEQ ID NO: 1193991 - DNA, 15 bp, Homo sapiens
ccttgtgcaggatag

SEQ ID NO: 1193992 - DNA, 15 bp, Homo sapiens
gccttgtgcaggata

SEQ ID NO: 1193993 - DNA, 15 bp, Homo sapiens
tgccttgtgcaggat

SEQ ID NO: 1193994 - DNA, 15 bp, Homo sapiens
ttgccttgtgcagga

SEQ ID NO: 1193995 - DNA, 15 bp, Homo sapiens
gttgccttgtgcagg

SEQ ID NO: 1193996 - DNA, 15 bp, Homo sapiens
agttgccttgtgcag

SEQ ID NO: 1193997 - DNA, 15 bp, Homo sapiens
cagttgccttgtgca

SEQ ID NO: 1193998 - DNA, 15 bp, Homo sapiens
tcagttgccttgtgc

SEQ ID NO: 1193999 - DNA, 15 bp, Homo sapiens
gtcagttgccttgtg

SEQ ID NO: 1194000 - DNA, 15 bp, Homo sapiens
tgtcagttgccttgt

SEQ ID NO: 1194001 - DNA, 15 bp, Homo sapiens
atgtcagttgccttg

SEQ ID NO: 1194002 - DNA, 15 bp, Homo sapiens
catgtcagttgcctt

SEQ ID NO: 1194003 - DNA, 15 bp, Homo sapiens
acatgtcagttgcct

SEQ ID NO: 1194004 - DNA, 15 bp, Homo sapiens
tacatgtcagttgcc

SEQ ID NO: 1194005 - DNA, 15 bp, Homo sapiens
ttacatgtcagttgc

SEQ ID NO: 1194006 - DNA, 15 bp, Homo sapiens
tttacatgtcagttg

SEQ ID NO: 1194007 - DNA, 15 bp, Homo sapiens
ttttacatgtcagtt

SEQ ID NO: 1194008 - DNA, 15 bp, Homo sapiens
cttttacatgtcagt

SEQ ID NO: 1194009 - DNA, 15 bp, Homo sapiens
ccttttacatgtcag

SEQ ID NO: 1194010 - DNA, 15 bp, Homo sapiens
cccttttacatgtca

SEQ ID NO: 1194011 - DNA, 15 bp, Homo sapiens
tcccttttacatgtc

SEQ ID NO: 1194012 - DNA, 15 bp, Homo sapiens
gtcccttttacatgt

SEQ ID NO: 1194013 - DNA, 15 bp, Homo sapiens
ggtcccttttacatg

SEQ ID NO: 1194014 - DNA, 15 bp, Homo sapiens
tggtcccttttacat

SEQ ID NO: 1194015 - DNA, 15 bp, Homo sapiens
atggtcccttttaca

SEQ ID NO: 1194016 - DNA, 15 bp, Homo sapiens
gatggtcccttttac

SEQ ID NO: 1194017 - DNA, 15 bp, Homo sapiens
agatggtccctttta

SEQ ID NO: 1194018 - DNA, 15 bp, Homo sapiens
tagatggtccctttt

SEQ ID NO: 1194019 - DNA, 15 bp, Homo sapiens
ttagatggtcccttt

SEQ ID NO: 1194020 - DNA, 15 bp, Homo sapiens
cttagatggtccctt

SEQ ID NO: 1194021 - DNA, 15 bp, Homo sapiens
ccttagatggtccct

SEQ ID NO: 1194022 - DNA, 15 bp, Homo sapiens
cccttagatggtccc

SEQ ID NO: 1194023 - DNA, 15 bp, Homo sapiens
ccccttagatggtcc

SEQ ID NO: 1194024 - DNA, 15 bp, Homo sapiens
tccccttagatggtc

SEQ ID NO: 1194025 - DNA, 15 bp, Homo sapiens
atccccttagatggt

SEQ ID NO: 1194026 - DNA, 15 bp, Homo sapiens
catccccttagatgg

SEQ ID NO: 1194027 - DNA, 15 bp, Homo sapiens
gcatccccttagatg

SEQ ID NO: 1194028 - DNA, 15 bp, Homo sapiens
ggcatccccttagat

SEQ ID NO: 1194029 - DNA, 15 bp, Homo sapiens
aggcatccccttaga

SEQ ID NO: 1194030 - DNA, 15 bp, Homo sapiens
gaggcatccccttag

SEQ ID NO: 1194031 - DNA, 15 bp, Homo sapiens
agaggcatcccctta

SEQ ID NO: 1194032 - DNA, 15 bp, Homo sapiens
aagaggcatcccctt

SEQ ID NO: 1194033 - DNA, 15 bp, Homo sapiens
caagaggcatcccct

SEQ ID NO: 1194034 - DNA, 15 bp, Homo sapiens
ccaagaggcatcccc

SEQ ID NO: 1194035 - DNA, 15 bp, Homo sapiens
gccaagaggcatccc

SEQ ID NO: 1194036 - DNA, 15 bp, Homo sapiens
ggccaagaggcatcc

SEQ ID NO: 1194037 - DNA, 15 bp, Homo sapiens
aggccaagaggcatc

SEQ ID NO: 1194038 - DNA, 15 bp, Homo sapiens
gaggccaagaggcat

SEQ ID NO: 1194039 - DNA, 15 bp, Homo sapiens
ggaggccaagaggca

SEQ ID NO: 1194040 - DNA, 15 bp, Homo sapiens
aggaggccaagaggc

SEQ ID NO: 1194041 - DNA, 15 bp, Homo sapiens
taggaggccaagagg

SEQ ID NO: 1194042 - DNA, 15 bp, Homo sapiens
gtaggaggccaagag

SEQ ID NO: 1194043 - DNA, 15 bp, Homo sapiens
tgtaggaggccaaga

SEQ ID NO: 1194044 - DNA, 15 bp, Homo sapiens
atgtaggaggccaag

SEQ ID NO: 1194045 - DNA, 15 bp, Homo sapiens
catgtaggaggccaa

SEQ ID NO: 1194046 - DNA, 15 bp, Homo sapiens
acatgtaggaggcca

SEQ ID NO: 1194047 - DNA, 15 bp, Homo sapiens
aacatgtaggaggcc

SEQ ID NO: 1194048 - DNA, 15 bp, Homo sapiens
caacatgtaggaggc

SEQ ID NO: 1194049 - DNA, 15 bp, Homo sapiens
acaacatgtaggagg

SEQ ID NO: 1194050 - DNA, 15 bp, Homo sapiens
aacaacatgtaggag

SEQ ID NO: 1194051 - DNA, 15 bp, Homo sapiens
gaacaacatgtagga

SEQ ID NO: 1194052 - DNA, 15 bp, Homo sapiens
tgaacaacatgtagg

SEQ ID NO: 1194053 - DNA, 15 bp, Homo sapiens
ttgaacaacatgtag

SEQ ID NO: 1194054 - DNA, 15 bp, Homo sapiens
attgaacaacatgta

SEQ ID NO: 1194055 - DNA, 15 bp, Homo sapiens
cattgaacaacatgt

SEQ ID NO: 1194056 - DNA, 15 bp, Homo sapiens
acattgaacaacatg

SEQ ID NO: 1194057 - DNA, 15 bp, Homo sapiens
gacattgaacaacat

SEQ ID NO: 1194058 - DNA, 15 bp, Homo sapiens
agacattgaacaaca

SEQ ID NO: 1194059 - DNA, 15 bp, Homo sapiens
tagacattgaacaac

SEQ ID NO: 1194060 - DNA, 15 bp, Homo sapiens
ttagacattgaacaa

SEQ ID NO: 1194061 - DNA, 15 bp, Homo sapiens
tttagacattgaaca

SEQ ID NO: 1194062 - DNA, 15 bp, Homo sapiens
atttagacattgaac

SEQ ID NO: 1194063 - DNA, 15 bp, Homo sapiens
tatttagacattgaa

SEQ ID NO: 1194064 - DNA, 15 bp, Homo sapiens
ttatttagacattga

SEQ ID NO: 1194065 - DNA, 15 bp, Homo sapiens
gttatttagacattg

SEQ ID NO: 1194066 - DNA, 15 bp, Homo sapiens
agttatttagacatt

SEQ ID NO: 1194067 - DNA, 15 bp, Homo sapiens
cagttatttagacat

SEQ ID NO: 1194068 - DNA, 15 bp, Homo sapiens
acagttatttagaca

SEQ ID NO: 1194069 - DNA, 15 bp, Homo sapiens
tacagttatttagac

SEQ ID NO: 1194070 - DNA, 15 bp, Homo sapiens
gtacagttatttaga

SEQ ID NO: 1194071 - DNA, 15 bp, Homo sapiens
tgtacagttatttag

SEQ ID NO: 1194072 - DNA, 15 bp, Homo sapiens
ttgtacagttattta

SEQ ID NO: 1194073 - DNA, 15 bp, Homo sapiens
tttgtacagttattt

SEQ ID NO: 1194074 - DNA, 15 bp, Homo sapiens
ctttgtacagttatt

SEQ ID NO: 1194075 - DNA, 15 bp, Homo sapiens
cctttgtacagttat

SEQ ID NO: 1194076 - DNA, 15 bp, Homo sapiens
acctttgtacagtta

SEQ ID NO: 1194077 - DNA, 15 bp, Homo sapiens
aacctttgtacagtt

SEQ ID NO: 1194078 - DNA, 15 bp, Homo sapiens
caacctttgtacagt

SEQ ID NO: 1194079 - DNA, 15 bp, Homo sapiens
acaacctttgtacag

SEQ ID NO: 1194080 - DNA, 15 bp, Homo sapiens
gacaacctttgtaca

SEQ ID NO: 1194081 - DNA, 15 bp, Homo sapiens
tgacaacctttgtac

SEQ ID NO: 1194082 - DNA, 15 bp, Homo sapiens
gtgacaacctttgta

SEQ ID NO: 1194083 - DNA, 15 bp, Homo sapiens
agtgacaacctttgt

SEQ ID NO: 1194084 - DNA, 15 bp, Homo sapiens
tagtgacaacctttg

SEQ ID NO: 1194085 - DNA, 15 bp, Homo sapiens
gtagtgacaaccttt

SEQ ID NO: 1194086 - DNA, 15 bp, Homo sapiens
agtagtgacaacctt

SEQ ID NO: 1194087 - DNA, 15 bp, Homo sapiens
aagtagtgacaacct

SEQ ID NO: 1194088 - DNA, 15 bp, Homo sapiens
gaagtagtgacaacc

SEQ ID NO: 1194089 - DNA, 15 bp, Homo sapiens
tgaagtagtgacaac

SEQ ID NO: 1194090 - DNA, 15 bp, Homo sapiens
ttgaagtagtgacaa

SEQ ID NO: 1194091 - DNA, 15 bp, Homo sapiens
tttgaagtagtgaca

SEQ ID NO: 1194092 - DNA, 15 bp, Homo sapiens
atttgaagtagtgac

SEQ ID NO: 1194093 - DNA, 15 bp, Homo sapiens
tatttgaagtagtga

SEQ ID NO: 1194094 - DNA, 15 bp, Homo sapiens
ttatttgaagtagtg

SEQ ID NO: 1194095 - DNA, 15 bp, Homo sapiens
tttatttgaagtagt

SEQ ID NO: 1194096 - DNA, 15 bp, Homo sapiens
ttttatttgaagtag

SEQ ID NO: 1194097 - DNA, 15 bp, Homo sapiens
gttttatttgaagta

SEQ ID NO: 1194098 - DNA, 15 bp, Homo sapiens
cgttttatttgaagt

SEQ ID NO: 1194099 - DNA, 15 bp, Homo sapiens
acgttttatttgaag

SEQ ID NO: 1194100 - DNA, 15 bp, Homo sapiens
cacgttttatttgaa

SEQ ID NO: 1194101 - DNA, 15 bp, Homo sapiens
ccacgttttatttga

SEQ ID NO: 1194102 - DNA, 15 bp, Homo sapiens
accacgttttatttg

SEQ ID NO: 1194103 - DNA, 15 bp, Homo sapiens
aaccacgttttattt

SEQ ID NO: 1194104 - DNA, 15 bp, Homo sapiens
taaccacgttttatt

SEQ ID NO: 1194105 - DNA, 15 bp, Homo sapiens
gtaaccacgttttat

SEQ ID NO: 1194106 - DNA, 15 bp, Homo sapiens
agtaaccacgtttta

SEQ ID NO: 1194107 - DNA, 15 bp, Homo sapiens
gagtaaccacgtttt

SEQ ID NO: 1194108 - DNA, 15 bp, Homo sapiens
agagtaaccacgttt

SEQ ID NO: 1194109 - DNA, 15 bp, Homo sapiens
cagagtaaccacgtt

SEQ ID NO: 1194110 - DNA, 15 bp, Homo sapiens
gcagagtaaccacgt

SEQ ID NO: 1194111 - DNA, 15 bp, Homo sapiens
tgcagagtaaccacg

SEQ ID NO: 1194112 - DNA, 15 bp, Homo sapiens
ttgcagagtaaccac

SEQ ID NO: 1194113 - DNA, 15 bp, Homo sapiens
cttgcagagtaacca

SEQ ID NO: 1194114 - DNA, 15 bp, Homo sapiens
tcttgcagagtaacc

SEQ ID NO: 1194115 - DNA, 15 bp, Homo sapiens
atcttgcagagtaac

SEQ ID NO: 1194116 - DNA, 15 bp, Homo sapiens
catcttgcagagtaa

SEQ ID NO: 1194117 - DNA, 15 bp, Homo sapiens
tcatcttgcagagta

SEQ ID NO: 1194118 - DNA, 15 bp, Homo sapiens
ctcatcttgcagagt

SEQ ID NO: 1194119 - DNA, 15 bp, Homo sapiens
cctcatcttgcagag

SEQ ID NO: 1194120 - DNA, 15 bp, Homo sapiens
gcctcatcttgcaga

SEQ ID NO: 1194121 - DNA, 15 bp, Homo sapiens
tgcctcatcttgcag

SEQ ID NO: 1194122 - DNA, 15 bp, Homo sapiens
ttgcctcatcttgca

SEQ ID NO: 1194123 - DNA, 15 bp, Homo sapiens
attgcctcatcttgc

SEQ ID NO: 1194124 - DNA, 15 bp, Homo sapiens
gattgcctcatcttg

SEQ ID NO: 1194125 - DNA, 15 bp, Homo sapiens
tgattgcctcatctt

SEQ ID NO: 1194126 - DNA, 15 bp, Homo sapiens
ttgattgcctcatct

SEQ ID NO: 1194127 - DNA, 15 bp, Homo sapiens
attgattgcctcatc

SEQ ID NO: 1194128 - DNA, 15 bp, Homo sapiens
cattgattgcctcat

SEQ ID NO: 1194129 - DNA, 15 bp, Homo sapiens
gcattgattgcctca

SEQ ID NO: 1194130 - DNA, 15 bp, Homo sapiens
ggcattgattgcctc

SEQ ID NO: 1194131 - DNA, 15 bp, Homo sapiens
gggcattgattgcct

SEQ ID NO: 1194132 - DNA, 15 bp, Homo sapiens
agggcattgattgcc

SEQ ID NO: 1194133 - DNA, 15 bp, Homo sapiens
aagggcattgattgc

SEQ ID NO: 1194134 - DNA, 15 bp, Homo sapiens
aaagggcattgattg

SEQ ID NO: 1194135 - DNA, 15 bp, Homo sapiens
caaagggcattgatt

SEQ ID NO: 1194136 - DNA, 15 bp, Homo sapiens
ccaaagggcattgat

SEQ ID NO: 1194137 - DNA, 15 bp, Homo sapiens
gccaaagggcattga

SEQ ID NO: 1194138 - DNA, 15 bp, Homo sapiens
agccaaagggcattg

SEQ ID NO: 1194139 - DNA, 15 bp, Homo sapiens
tagccaaagggcatt

SEQ ID NO: 1194140 - DNA, 15 bp, Homo sapiens
ttagccaaagggcat

SEQ ID NO: 1194141 - DNA, 15 bp, Homo sapiens
gttagccaaagggca

SEQ ID NO: 1194142 - DNA, 15 bp, Homo sapiens
tgttagccaaagggc

SEQ ID NO: 1194143 - DNA, 15 bp, Homo sapiens
atgttagccaaaggg

SEQ ID NO: 1194144 - DNA, 15 bp, Homo sapiens
tatgttagccaaagg

SEQ ID NO: 1194145 - DNA, 15 bp, Homo sapiens
ttatgttagccaaag

SEQ ID NO: 1194146 - DNA, 15 bp, Homo sapiens
gttatgttagccaaa

SEQ ID NO: 1194147 - DNA, 15 bp, Homo sapiens
agttatgttagccaa

SEQ ID NO: 1194148 - DNA, 15 bp, Homo sapiens
cagttatgttagcca

SEQ ID NO: 1194149 - DNA, 15 bp, Homo sapiens
tcagttatgttagcc

SEQ ID NO: 1194150 - DNA, 15 bp, Homo sapiens
ttcagttatgttagc

SEQ ID NO: 1194151 - DNA, 15 bp, Homo sapiens
cttcagttatgttag

SEQ ID NO: 1194152 - DNA, 15 bp, Homo sapiens
acttcagttatgtta

SEQ ID NO: 1194153 - DNA, 15 bp, Homo sapiens
aacttcagttatgtt

SEQ ID NO: 1194154 - DNA, 15 bp, Homo sapiens
gaacttcagttatgt

SEQ ID NO: 1194155 - DNA, 15 bp, Homo sapiens
tgaacttcagttatg

SEQ ID NO: 1194156 - DNA, 15 bp, Homo sapiens
gtgaacttcagttat

SEQ ID NO: 1194157 - DNA, 15 bp, Homo sapiens
tgtgaacttcagtta

SEQ ID NO: 1194158 - DNA, 15 bp, Homo sapiens
ctgtgaacttcagtt

SEQ ID NO: 1194159 - DNA, 15 bp, Homo sapiens
actgtgaacttcagt

SEQ ID NO: 1194160 - DNA, 15 bp, Homo sapiens
aactgtgaacttcag

SEQ ID NO: 1194161 - DNA, 15 bp, Homo sapiens
caactgtgaacttca

SEQ ID NO: 1194162 - DNA, 15 bp, Homo sapiens
gcaactgtgaacttc

SEQ ID NO: 1194163 - DNA, 15 bp, Homo sapiens
agcaactgtgaactt

SEQ ID NO: 1194164 - DNA, 15 bp, Homo sapiens
tagcaactgtgaact

SEQ ID NO: 1194165 - DNA, 15 bp, Homo sapiens
atagcaactgtgaac

SEQ ID NO: 1194166 - DNA, 15 bp, Homo sapiens
catagcaactgtgaa

SEQ ID NO: 1194167 - DNA, 15 bp, Homo sapiens
tcatagcaactgtga

SEQ ID NO: 1194168 - DNA, 15 bp, Homo sapiens
ttcatagcaactgtg

SEQ ID NO: 1194169 - DNA, 15 bp, Homo sapiens
tttcatagcaactgt

SEQ ID NO: 1194170 - DNA, 15 bp, Homo sapiens
ttttcatagcaactg

SEQ ID NO: 1194171 - DNA, 15 bp, Homo sapiens
cttttcatagcaact

SEQ ID NO: 1194172 - DNA, 15 bp, Homo sapiens
tcttttcatagcaac

SEQ ID NO: 1194173 - DNA, 15 bp, Homo sapiens
ttcttttcatagcaa

SEQ ID NO: 1194174 - DNA, 15 bp, Homo sapiens
tttcttttcatagca

SEQ ID NO: 1194175 - DNA, 15 bp, Homo sapiens
ttttcttttcatagc

SEQ ID NO: 1194176 - DNA, 15 bp, Homo sapiens
attttcttttcatag

SEQ ID NO: 1194177 - DNA, 15 bp, Homo sapiens
gattttcttttcata

SEQ ID NO: 1194178 - DNA, 15 bp, Homo sapiens
ggattttcttttcat

SEQ ID NO: 1194179 - DNA, 15 bp, Homo sapiens
tggattttcttttca

SEQ ID NO: 1194180 - DNA, 15 bp, Homo sapiens
atggattttcttttc

SEQ ID NO: 1194181 - DNA, 15 bp, Homo sapiens
aatggattttctttt

SEQ ID NO: 1194182 - DNA, 15 bp, Homo sapiens
gaatggattttcttt

SEQ ID NO: 1194183 - DNA, 15 bp, Homo sapiens
agaatggattttctt

SEQ ID NO: 1194184 - DNA, 15 bp, Homo sapiens
tagaatggattttct

SEQ ID NO: 1194185 - DNA, 15 bp, Homo sapiens
ttagaatggattttc

SEQ ID NO: 1194186 - DNA, 15 bp, Homo sapiens
attagaatggatttt

SEQ ID NO: 1194187 - DNA, 15 bp, Homo sapiens
aattagaatggattt

SEQ ID NO: 1194188 - DNA, 15 bp, Homo sapiens
aaattagaatggatt

SEQ ID NO: 1194189 - DNA, 15 bp, Homo sapiens
aaaattagaatggat

SEQ ID NO: 1194190 - DNA, 15 bp, Homo sapiens
gaaaattagaatgga

SEQ ID NO: 1194191 - DNA, 15 bp, Homo sapiens
tgaaaattagaatgg

SEQ ID NO: 1194192 - DNA, 15 bp, Homo sapiens
ctgaaaattagaatg

SEQ ID NO: 1194193 - DNA, 15 bp, Homo sapiens
tctgaaaattagaat

SEQ ID NO: 1194194 - DNA, 15 bp, Homo sapiens
ttctgaaaattagaa

SEQ ID NO: 1194195 - DNA, 15 bp, Homo sapiens
tttctgaaaattaga

SEQ ID NO: 1194196 - DNA, 15 bp, Homo sapiens
ttttctgaaaattag

SEQ ID NO: 1194197 - DNA, 15 bp, Homo sapiens
tttttctgaaaatta

SEQ ID NO: 1194198 - DNA, 15 bp, Homo sapiens
atttttctgaaaatt

SEQ ID NO: 1194199 - DNA, 15 bp, Homo sapiens
aatttttctgaaaat

SEQ ID NO: 1194200 - DNA, 15 bp, Homo sapiens
caatttttctgaaaa

SEQ ID NO: 1194201 - DNA, 15 bp, Homo sapiens
gcaatttttctgaaa

SEQ ID NO: 1194202 - DNA, 15 bp, Homo sapiens
tgcaatttttctgaa

SEQ ID NO: 1194203 - DNA, 15 bp, Homo sapiens
ctgcaatttttctga

SEQ ID NO: 1194204 - DNA, 15 bp, Homo sapiens
tctgcaatttttctg

SEQ ID NO: 1194205 - DNA, 15 bp, Homo sapiens
ctctgcaatttttct

SEQ ID NO: 1194206 - DNA, 15 bp, Homo sapiens
gctctgcaatttttc

SEQ ID NO: 1194207 - DNA, 15 bp, Homo sapiens
cgctctgcaattttt

SEQ ID NO: 1194208 - DNA, 15 bp, Homo sapiens
acgctctgcaatttt

SEQ ID NO: 1194209 - DNA, 15 bp, Homo sapiens
tacgctctgcaattt

SEQ ID NO: 1194210 - DNA, 15 bp, Homo sapiens
gtacgctctgcaatt

SEQ ID NO: 1194211 - DNA, 15 bp, Homo sapiens
ggtacgctctgcaat

SEQ ID NO: 1194212 - DNA, 15 bp, Homo sapiens
aggtacgctctgcaa

SEQ ID NO: 1194213 - DNA, 15 bp, Homo sapiens
aaggtacgctctgca

SEQ ID NO: 1194214 - DNA, 15 bp, Homo sapiens
aaaggtacgctctgc

SEQ ID NO: 1194215 - DNA, 15 bp, Homo sapiens
gaaaggtacgctctg

SEQ ID NO: 1194216 - DNA, 15 bp, Homo sapiens
tgaaaggtacgctct

SEQ ID NO: 1194217 - DNA, 15 bp, Homo sapiens
atgaaaggtacgctc

SEQ ID NO: 1194218 - DNA, 15 bp, Homo sapiens
tatgaaaggtacgct

SEQ ID NO: 1194219 - DNA, 15 bp, Homo sapiens
gtatgaaaggtacgc

SEQ ID NO: 1194220 - DNA, 15 bp, Homo sapiens
ggtatgaaaggtacg

SEQ ID NO: 1194221 - DNA, 15 bp, Homo sapiens
aggtatgaaaggtac

SEQ ID NO: 1194222 - DNA, 15 bp, Homo sapiens
taggtatgaaaggta

SEQ ID NO: 1194223 - DNA, 15 bp, Homo sapiens
ataggtatgaaaggt

SEQ ID NO: 1194224 - DNA, 15 bp, Homo sapiens
tataggtatgaaagg

SEQ ID NO: 1194225 - DNA, 15 bp, Homo sapiens
gtataggtatgaaag

SEQ ID NO: 1194226 - DNA, 15 bp, Homo sapiens
ggtataggtatgaaa

SEQ ID NO: 1194227 - DNA, 15 bp, Homo sapiens
gggtataggtatgaa

SEQ ID NO: 1194228 - DNA, 15 bp, Homo sapiens
agggtataggtatga

SEQ ID NO: 1194229 - DNA, 15 bp, Homo sapiens
tagggtataggtatg

SEQ ID NO: 1194230 - DNA, 15 bp, Homo sapiens
ttagggtataggtat

SEQ ID NO: 1194231 - DNA, 15 bp, Homo sapiens
cttagggtataggta

SEQ ID NO: 1194232 - DNA, 15 bp, Homo sapiens
acttagggtataggt

SEQ ID NO: 1194233 - DNA, 15 bp, Homo sapiens
aacttagggtatagg

SEQ ID NO: 1194234 - DNA, 15 bp, Homo sapiens
taacttagggtatag

SEQ ID NO: 1194235 - DNA, 15 bp, Homo sapiens
gtaacttagggtata

SEQ ID NO: 1194236 - DNA, 15 bp, Homo sapiens
agtaacttagggtat

SEQ ID NO: 1194237 - DNA, 15 bp, Homo sapiens
tagtaacttagggta

SEQ ID NO: 1194238 - DNA, 15 bp, Homo sapiens
ttagtaacttagggt

SEQ ID NO: 1194239 - DNA, 15 bp, Homo sapiens
tttagtaacttaggg

SEQ ID NO: 1194240 - DNA, 15 bp, Homo sapiens
ttttagtaacttagg

SEQ ID NO: 1194241 - DNA, 15 bp, Homo sapiens
attttagtaacttag

SEQ ID NO: 1194242 - DNA, 15 bp, Homo sapiens
aattttagtaactta

SEQ ID NO: 1194243 - DNA, 15 bp, Homo sapiens
aaattttagtaactt

SEQ ID NO: 1194244 - DNA, 15 bp, Homo sapiens
taaattttagtaact

SEQ ID NO: 1194245 - DNA, 15 bp, Homo sapiens
ttaaattttagtaac

SEQ ID NO: 1194246 - DNA, 15 bp, Homo sapiens
tttaaattttagtaa

SEQ ID NO: 1194247 - DNA, 15 bp, Homo sapiens
atttaaattttagta

SEQ ID NO: 1194248 - DNA, 15 bp, Homo sapiens
catttaaattttagt

SEQ ID NO: 1194249 - DNA, 15 bp, Homo sapiens
acatttaaattttag

SEQ ID NO: 1194250 - DNA, 15 bp, Homo sapiens
aacatttaaatttta

SEQ ID NO: 1194251 - DNA, 15 bp, Homo sapiens
taacatttaaatttt

SEQ ID NO: 1194252 - DNA, 15 bp, Homo sapiens
ttaacatttaaattt

SEQ ID NO: 1194253 - DNA, 15 bp, Homo sapiens
tttaacatttaaatt

SEQ ID NO: 1194254 - DNA, 15 bp, Homo sapiens
atttaacatttaaat

SEQ ID NO: 1194255 - DNA, 15 bp, Homo sapiens
catttaacatttaaa

SEQ ID NO: 1194256 - DNA, 15 bp, Homo sapiens
acatttaacatttaa

SEQ ID NO: 1194257 - DNA, 15 bp, Homo sapiens
aacatttaacattta

SEQ ID NO: 1194258 - DNA, 15 bp, Homo sapiens
aaacatttaacattt

SEQ ID NO: 1194259 - DNA, 15 bp, Homo sapiens
gaaacatttaacatt

SEQ ID NO: 1194260 - DNA, 15 bp, Homo sapiens
tgaaacatttaacat

SEQ ID NO: 1194261 - DNA, 15 bp, Homo sapiens
ttgaaacatttaaca

SEQ ID NO: 1194262 - DNA, 15 bp, Homo sapiens
tttgaaacatttaac

SEQ ID NO: 1194263 - DNA, 15 bp, Homo sapiens
ttttgaaacatttaa

SEQ ID NO: 1194264 - DNA, 15 bp, Homo sapiens
attttgaaacattta

SEQ ID NO: 1194265 - DNA, 15 bp, Homo sapiens
cattttgaaacattt

SEQ ID NO: 1194266 - DNA, 15 bp, Homo sapiens
ccattttgaaacatt

SEQ ID NO: 1194267 - DNA, 15 bp, Homo sapiens
accattttgaaacat

SEQ ID NO: 1194268 - DNA, 15 bp, Homo sapiens
taccattttgaaaca

SEQ ID NO: 1194269 - DNA, 15 bp, Homo sapiens
ataccattttgaaac

SEQ ID NO: 1194270 - DNA, 15 bp, Homo sapiens
tataccattttgaaa

SEQ ID NO: 1194271 - DNA, 15 bp, Homo sapiens
atataccattttgaa

SEQ ID NO: 1194272 - DNA, 15 bp, Homo sapiens
tatataccattttga

SEQ ID NO: 1194273 - DNA, 15 bp, Homo sapiens
ctatataccattttg

SEQ ID NO: 1194274 - DNA, 15 bp, Homo sapiens
tctatataccatttt

SEQ ID NO: 1194275 - DNA, 15 bp, Homo sapiens
gtctatataccattt

SEQ ID NO: 1194276 - DNA, 15 bp, Homo sapiens
agtctatataccatt

SEQ ID NO: 1194277 - DNA, 15 bp, Homo sapiens
aagtctatataccat

SEQ ID NO: 1194278 - DNA, 15 bp, Homo sapiens
taagtctatatacca

SEQ ID NO: 1194279 - DNA, 15 bp, Homo sapiens
ctaagtctatatacc

SEQ ID NO: 1194280 - DNA, 15 bp, Homo sapiens
cctaagtctatatac

SEQ ID NO: 1194281 - DNA, 15 bp, Homo sapiens
tcctaagtctatata

SEQ ID NO: 1194282 - DNA, 15 bp, Homo sapiens
ttcctaagtctatat

SEQ ID NO: 1194283 - DNA, 15 bp, Homo sapiens
cttcctaagtctata

SEQ ID NO: 1194284 - DNA, 15 bp, Homo sapiens
tcttcctaagtctat

SEQ ID NO: 1194285 - DNA, 15 bp, Homo sapiens
ttcttcctaagtcta

SEQ ID NO: 1194286 - DNA, 15 bp, Homo sapiens
attcttcctaagtct

SEQ ID NO: 1194287 - DNA, 15 bp, Homo sapiens
aattcttcctaagtc

SEQ ID NO: 1194288 - DNA, 15 bp, Homo sapiens
aaattcttcctaagt

SEQ ID NO: 1194289 - DNA, 15 bp, Homo sapiens
aaaattcttcctaag

SEQ ID NO: 1194290 - DNA, 15 bp, Homo sapiens
aaaaattcttcctaa

SEQ ID NO: 1194291 - DNA, 15 bp, Homo sapiens
gaaaaattcttccta

SEQ ID NO: 1194292 - DNA, 15 bp, Homo sapiens
ggaaaaattcttcct

SEQ ID NO: 1194293 - DNA, 15 bp, Homo sapiens
aggaaaaattcttcc

SEQ ID NO: 1194294 - DNA, 15 bp, Homo sapiens
aaggaaaaattcttc

SEQ ID NO: 1194295 - DNA, 15 bp, Homo sapiens
caaggaaaaattctt

SEQ ID NO: 1194296 - DNA, 15 bp, Homo sapiens
acaaggaaaaattct

SEQ ID NO: 1194297 - DNA, 15 bp, Homo sapiens
cacaaggaaaaattc

SEQ ID NO: 1194298 - DNA, 15 bp, Homo sapiens
acacaaggaaaaatt

SEQ ID NO: 1194299 - DNA, 15 bp, Homo sapiens
cacacaaggaaaaat

SEQ ID NO: 1194300 - DNA, 15 bp, Homo sapiens
acacacaaggaaaaa

SEQ ID NO: 1194301 - DNA, 15 bp, Homo sapiens
aacacacaaggaaaa

SEQ ID NO: 1194302 - DNA, 15 bp, Homo sapiens
aaacacacaaggaaa

SEQ ID NO: 1194303 - DNA, 15 bp, Homo sapiens
aaaacacacaaggaa

SEQ ID NO: 1194304 - DNA, 15 bp, Homo sapiens
aaaaacacacaagga

SEQ ID NO: 1194305 - DNA, 15 bp, Homo sapiens
aaaaaacacacaagg

SEQ ID NO: 1194306 - DNA, 15 bp, Homo sapiens
aaaaaaacacacaag

SEQ ID NO: 1194307 - DNA, 15 bp, Homo sapiens
aaaaaaaacacacaa

SEQ ID NO: 1194308 - DNA, 15 bp, Homo sapiens
aaaaaaaaacacaca

SEQ ID NO: 1194309 - DNA, 15 bp, Homo sapiens
aaaaaaaaaacacac

SEQ ID NO: 1194310 - DNA, 15 bp, Homo sapiens
aaaaaaaaaaacaca

SEQ ID NO: 1194311 - DNA, 15 bp, Homo sapiens
gaaaaaaaaaaacac

SEQ ID NO: 1194312 - DNA, 15 bp, Homo sapiens
ttaaaggaaaaaaaa

SEQ ID NO: 1194313 - DNA, 15 bp, Homo sapiens
gttaaaggaaaaaaa

SEQ ID NO: 1194314 - DNA, 15 bp, Homo sapiens
agttaaaggaaaaaa

SEQ ID NO: 1194315 - DNA, 15 bp, Homo sapiens
aagttaaaggaaaaa

SEQ ID NO: 1194316 - DNA, 15 bp, Homo sapiens
gaagttaaaggaaaa

SEQ ID NO: 1194317 - DNA, 15 bp, Homo sapiens
ggaagttaaaggaaa

SEQ ID NO: 1194318 - DNA, 15 bp, Homo sapiens
aggaagttaaaggaa

SEQ ID NO: 1194319 - DNA, 15 bp, Homo sapiens
gaggaagttaaagga

SEQ ID NO: 1194320 - DNA, 15 bp, Homo sapiens
tgaggaagttaaagg

SEQ ID NO: 1194321 - DNA, 15 bp, Homo sapiens
atgaggaagttaaag

SEQ ID NO: 1194322 - DNA, 15 bp, Homo sapiens
aatgaggaagttaaa

SEQ ID NO: 1194323 - DNA, 15 bp, Homo sapiens
caatgaggaagttaa

SEQ ID NO: 1194324 - DNA, 15 bp, Homo sapiens
ccaatgaggaagtta

SEQ ID NO: 1194325 - DNA, 15 bp, Homo sapiens
tccaatgaggaagtt

SEQ ID NO: 1194326 - DNA, 15 bp, Homo sapiens
atccaatgaggaagt

SEQ ID NO: 1194327 - DNA, 15 bp, Homo sapiens
aatccaatgaggaag

SEQ ID NO: 1194328 - DNA, 15 bp, Homo sapiens
gaatccaatgaggaa

SEQ ID NO: 1194329 - DNA, 15 bp, Homo sapiens
agaatccaatgagga

SEQ ID NO: 1194330 - DNA, 15 bp, Homo sapiens
tagaatccaatgagg

SEQ ID NO: 1194331 - DNA, 15 bp, Homo sapiens
ctagaatccaatgag

SEQ ID NO: 1194332 - DNA, 15 bp, Homo sapiens
cctagaatccaatga

SEQ ID NO: 1194333 - DNA, 15 bp, Homo sapiens
tcctagaatccaatg

SEQ ID NO: 1194334 - DNA, 15 bp, Homo sapiens
ttcctagaatccaat

SEQ ID NO: 1194335 - DNA, 15 bp, Homo sapiens
cttcctagaatccaa

SEQ ID NO: 1194336 - DNA, 15 bp, Homo sapiens
tcttcctagaatcca

SEQ ID NO: 1194337 - DNA, 15 bp, Homo sapiens
ttcttcctagaatcc

SEQ ID NO: 1194338 - DNA, 15 bp, Homo sapiens
attcttcctagaatc

SEQ ID NO: 1194339 - DNA, 15 bp, Homo sapiens
aattcttcctagaat

SEQ ID NO: 1194340 - DNA, 15 bp, Homo sapiens
aaattcttcctagaa

SEQ ID NO: 1194341 - DNA, 15 bp, Homo sapiens
aaaattcttcctaga

SEQ ID NO: 1194342 - DNA, 15 bp, Homo sapiens
gaaaattcttcctag

SEQ ID NO: 1194343 - DNA, 15 bp, Homo sapiens
tgaaaattcttccta

SEQ ID NO: 1194344 - DNA, 15 bp, Homo sapiens
atgaaaattcttcct

SEQ ID NO: 1194345 - DNA, 15 bp, Homo sapiens
catgaaaattcttcc

SEQ ID NO: 1194346 - DNA, 15 bp, Homo sapiens
ccatgaaaattcttc

SEQ ID NO: 1194347 - DNA, 15 bp, Homo sapiens
accatgaaaattctt

SEQ ID NO: 1194348 - DNA, 15 bp, Homo sapiens
taccatgaaaattct

SEQ ID NO: 1194349 - DNA, 15 bp, Homo sapiens
ttaccatgaaaattc

SEQ ID NO: 1194350 - DNA, 15 bp, Homo sapiens
attaccatgaaaatt

SEQ ID NO: 1194351 - DNA, 15 bp, Homo sapiens
tattaccatgaaaat

SEQ ID NO: 1194352 - DNA, 15 bp, Homo sapiens
ttattaccatgaaaa

SEQ ID NO: 1194353 - DNA, 15 bp, Homo sapiens
attattaccatgaaa

SEQ ID NO: 1194354 - DNA, 15 bp, Homo sapiens
gattattaccatgaa

SEQ ID NO: 1194355 - DNA, 15 bp, Homo sapiens
tgattattaccatga

SEQ ID NO: 1194356 - DNA, 15 bp, Homo sapiens
tatgattattaccat

SEQ ID NO: 1194357 - DNA, 15 bp, Homo sapiens
atatgattattacca

SEQ ID NO: 1194358 - DNA, 15 bp, Homo sapiens
catatgattattacc

SEQ ID NO: 1194359 - DNA, 15 bp, Homo sapiens
acatatgattattac

SEQ ID NO: 1194360 - DNA, 15 bp, Homo sapiens
tacatatgattatta

SEQ ID NO: 1194361 - DNA, 15 bp, Homo sapiens
ctacatatgattatt

SEQ ID NO: 1194362 - DNA, 15 bp, Homo sapiens
actacatatgattat

SEQ ID NO: 1194363 - DNA, 15 bp, Homo sapiens
gactacatatgatta

SEQ ID NO: 1194364 - DNA, 15 bp, Homo sapiens
agactacatatgatt

SEQ ID NO: 1194365 - DNA, 15 bp, Homo sapiens
aagactacatatgat

SEQ ID NO: 1194366 - DNA, 15 bp, Homo sapiens
aaagactacatatga

SEQ ID NO: 1194367 - DNA, 15 bp, Homo sapiens
taaagactacatatg

SEQ ID NO: 1194368 - DNA, 15 bp, Homo sapiens
gtaaagactacatat

SEQ ID NO: 1194369 - DNA, 15 bp, Homo sapiens
tgtaaagactacata

SEQ ID NO: 1194370 - DNA, 15 bp, Homo sapiens
ctgtaaagactacat

SEQ ID NO: 1194371 - DNA, 15 bp, Homo sapiens
gctgtaaagactaca

SEQ ID NO: 1194372 - DNA, 15 bp, Homo sapiens
agctgtaaagactac

SEQ ID NO: 1194373 - DNA, 15 bp, Homo sapiens
aagctgtaaagacta

SEQ ID NO: 1194374 - DNA, 15 bp, Homo sapiens
caagctgtaaagact

SEQ ID NO: 1194375 - DNA, 15 bp, Homo sapiens
acaagctgtaaagac

SEQ ID NO: 1194376 - DNA, 15 bp, Homo sapiens
aacaagctgtaaaga

SEQ ID NO: 1194377 - DNA, 15 bp, Homo sapiens
aaacaagctgtaaag

SEQ ID NO: 1194378 - DNA, 15 bp, Homo sapiens
aaaacaagctgtaaa

SEQ ID NO: 1194379 - DNA, 15 bp, Homo sapiens
taaaacaagctgtaa

SEQ ID NO: 1194380 - DNA, 15 bp, Homo sapiens
ataaaacaagctgta

SEQ ID NO: 1194381 - DNA, 15 bp, Homo sapiens
aataaaacaagctgt

SEQ ID NO: 1194382 - DNA, 15 bp, Homo sapiens
aaataaaacaagctg

SEQ ID NO: 1194383 - DNA, 15 bp, Homo sapiens
aaaataaaacaagct

SEQ ID NO: 1194384 - DNA, 15 bp, Homo sapiens
aaaaataaaacaagc

SEQ ID NO: 1194385 - DNA, 15 bp, Homo sapiens
aaaaaataaaacaag

SEQ ID NO: 1194386 - DNA, 15 bp, Homo sapiens
aaaaaaataaaacaa

SEQ ID NO: 1194387 - DNA, 15 bp, Homo sapiens
gaaaaaaataaaaca

SEQ ID NO: 1194388 - DNA, 15 bp, Homo sapiens
agaaaaaaataaaac

SEQ ID NO: 1194389 - DNA, 15 bp, Homo sapiens
tagaaaaaaataaaa

SEQ ID NO: 1194390 - DNA, 15 bp, Homo sapiens
ttagaaaaaaataaa

SEQ ID NO: 1194391 - DNA, 15 bp, Homo sapiens
attagaaaaaaataa

SEQ ID NO: 1194392 - DNA, 15 bp, Homo sapiens
tattagaaaaaaata

SEQ ID NO: 1194393 - DNA, 15 bp, Homo sapiens
ttattagaaaaaaat

SEQ ID NO: 1194394 - DNA, 15 bp, Homo sapiens
tttattagaaaaaaa

SEQ ID NO: 1194395 - DNA, 15 bp, Homo sapiens
ctttattagaaaaaa

SEQ ID NO: 1194396 - DNA, 15 bp, Homo sapiens
gctttattagaaaaa

SEQ ID NO: 1194397 - DNA, 15 bp, Homo sapiens
agctttattagaaaa

SEQ ID NO: 1194398 - DNA, 15 bp, Homo sapiens
tagctttattagaaa

SEQ ID NO: 1194399 - DNA, 15 bp, Homo sapiens
ttagctttattagaa

SEQ ID NO: 1194400 - DNA, 15 bp, Homo sapiens
attagctttattaga

SEQ ID NO: 1194401 - DNA, 15 bp, Homo sapiens
aattagctttattag

SEQ ID NO: 1194402 - DNA, 15 bp, Homo sapiens
gaattagctttatta

SEQ ID NO: 1194403 - DNA, 15 bp, Homo sapiens
tgaattagctttatt

SEQ ID NO: 1194404 - DNA, 15 bp, Homo sapiens
ctgaattagctttat

SEQ ID NO: 1194405 - DNA, 15 bp, Homo sapiens
actgaattagcttta

SEQ ID NO: 1194406 - DNA, 15 bp, Homo sapiens
aactgaattagcttt

SEQ ID NO: 1194407 - DNA, 15 bp, Homo sapiens
gaactgaattagctt

SEQ ID NO: 1194408 - DNA, 15 bp, Homo sapiens
tgaactgaattagct

SEQ ID NO: 1194409 - DNA, 15 bp, Homo sapiens
gtgaactgaattagc

SEQ ID NO: 1194410 - DNA, 15 bp, Homo sapiens
ggtgaactgaattag

SEQ ID NO: 1194411 - DNA, 15 bp, Homo sapiens
tggtgaactgaatta

SEQ ID NO: 1194412 - DNA, 15 bp, Homo sapiens
ctggtgaactgaatt

SEQ ID NO: 1194413 - DNA, 15 bp, Homo sapiens
actggtgaactgaat

SEQ ID NO: 1194414 - DNA, 15 bp, Homo sapiens
aactggtgaactgaa

SEQ ID NO: 1194415 - DNA, 15 bp, Homo sapiens
taactggtgaactga

SEQ ID NO: 1194416 - DNA, 15 bp, Homo sapiens
ataactggtgaactg

SEQ ID NO: 1194417 - DNA, 15 bp, Homo sapiens
gataactggtgaact

SEQ ID NO: 1194418 - DNA, 15 bp, Homo sapiens
agataactggtgaac

SEQ ID NO: 1194419 - DNA, 15 bp, Homo sapiens
tagataactggtgaa

SEQ ID NO: 1194420 - DNA, 15 bp, Homo sapiens
gtagataactggtga

SEQ ID NO: 1194421 - DNA, 15 bp, Homo sapiens
ggtagataactggtg

SEQ ID NO: 1194422 - DNA, 15 bp, Homo sapiens
tggtagataactggt

SEQ ID NO: 1194423 - DNA, 15 bp, Homo sapiens
gtggtagataactgg

SEQ ID NO: 1194424 - DNA, 15 bp, Homo sapiens
agtggtagataactg

SEQ ID NO: 1194425 - DNA, 15 bp, Homo sapiens
aagtggtagataact

SEQ ID NO: 1194426 - DNA, 15 bp, Homo sapiens
caagtggtagataac

SEQ ID NO: 1194427 - DNA, 15 bp, Homo sapiens
gcaagtggtagataa

SEQ ID NO: 1194428 - DNA, 15 bp, Homo sapiens
cgcaagtggtagata

SEQ ID NO: 1194429 - DNA, 15 bp, Homo sapiens
ccgcaagtggtagat

SEQ ID NO: 1194430 - DNA, 15 bp, Homo sapiens
accgcaagtggtaga

SEQ ID NO: 1194431 - DNA, 15 bp, Homo sapiens
aaccgcaagtggtag

SEQ ID NO: 1194432 - DNA, 15 bp, Homo sapiens
aaaccgcaagtggta

SEQ ID NO: 1194433 - DNA, 15 bp, Homo sapiens
aaaaccgcaagtggt

SEQ ID NO: 1194434 - DNA, 15 bp, Homo sapiens
taaaaccgcaagtgg

SEQ ID NO: 1194435 - DNA, 15 bp, Homo sapiens
ttaaaaccgcaagtg

SEQ ID NO: 1194436 - DNA, 15 bp, Homo sapiens
tttaaaaccgcaagt

SEQ ID NO: 1194437 - DNA, 15 bp, Homo sapiens
ctttaaaaccgcaag

SEQ ID NO: 1194438 - DNA, 15 bp, Homo sapiens
tctttaaaaccgcaa

SEQ ID NO: 1194439 - DNA, 15 bp, Homo sapiens
atctttaaaaccgca

SEQ ID NO: 1194440 - DNA, 15 bp, Homo sapiens
aatctttaaaaccgc

SEQ ID NO: 1194441 - DNA, 15 bp, Homo sapiens
taatctttaaaaccg

SEQ ID NO: 1194442 - DNA, 15 bp, Homo sapiens
ttaatctttaaaacc

SEQ ID NO: 1194443 - DNA, 15 bp, Homo sapiens
gttaatctttaaaac

SEQ ID NO: 1194444 - DNA, 15 bp, Homo sapiens
agttaatctttaaaa

SEQ ID NO: 1194445 - DNA, 15 bp, Homo sapiens
gagttaatctttaaa

SEQ ID NO: 1194446 - DNA, 15 bp, Homo sapiens
tgagttaatctttaa

SEQ ID NO: 1194447 - DNA, 15 bp, Homo sapiens
atgagttaatcttta

SEQ ID NO: 1194448 - DNA, 15 bp, Homo sapiens
tatgagttaatcttt

SEQ ID NO: 1194449 - DNA, 15 bp, Homo sapiens
ttatgagttaatctt

SEQ ID NO: 1194450 - DNA, 15 bp, Homo sapiens
tttatgagttaatct

SEQ ID NO: 1194451 - DNA, 15 bp, Homo sapiens
ctttatgagttaatc

SEQ ID NO: 1194452 - DNA, 15 bp, Homo sapiens
tctttatgagttaat

SEQ ID NO: 1194453 - DNA, 15 bp, Homo sapiens
ttctttatgagttaa

SEQ ID NO: 1194454 - DNA, 15 bp, Homo sapiens
attctttatgagtta

SEQ ID NO: 1194455 - DNA, 15 bp, Homo sapiens
tattctttatgagtt

SEQ ID NO: 1194456 - DNA, 15 bp, Homo sapiens
ttattctttatgagt

SEQ ID NO: 1194457 - DNA, 15 bp, Homo sapiens
tttattctttatgag

SEQ ID NO: 1194458 - DNA, 15 bp, Homo sapiens
gtttattctttatga

SEQ ID NO: 1194459 - DNA, 15 bp, Homo sapiens
tgtttattctttatg

SEQ ID NO: 1194460 - DNA, 15 bp, Homo sapiens
ttgtttattctttat

SEQ ID NO: 1194461 - DNA, 15 bp, Homo sapiens
atttgtttattcttt

SEQ ID NO: 1194462 - DNA, 15 bp, Homo sapiens
aatttgtttattctt

SEQ ID NO: 1194463 - DNA, 15 bp, Homo sapiens
caatttgtttattct

SEQ ID NO: 1194464 - DNA, 15 bp, Homo sapiens
acaatttgtttattc

SEQ ID NO: 1194465 - DNA, 15 bp, Homo sapiens
aacaatttgtttatt

SEQ ID NO: 1194466 - DNA, 15 bp, Homo sapiens
aaacaatttgtttat

SEQ ID NO: 1194467 - DNA, 15 bp, Homo sapiens
taaacaatttgttta

SEQ ID NO: 1194468 - DNA, 15 bp, Homo sapiens
gtaaacaatttgttt

SEQ ID NO: 1194469 - DNA, 15 bp, Homo sapiens
agtaaacaatttgtt

SEQ ID NO: 1194470 - DNA, 15 bp, Homo sapiens
cagtaaacaatttgt

SEQ ID NO: 1194471 - DNA, 15 bp, Homo sapiens
gcagtaaacaatttg

SEQ ID NO: 1194472 - DNA, 15 bp, Homo sapiens
tgcagtaaacaattt

SEQ ID NO: 1194473 - DNA, 15 bp, Homo sapiens
ttgcagtaaacaatt

SEQ ID NO: 1194474 - DNA, 15 bp, Homo sapiens
tttgcagtaaacaat

SEQ ID NO: 1194475 - DNA, 15 bp, Homo sapiens
gtttgcagtaaacaa

SEQ ID NO: 1194476 - DNA, 15 bp, Homo sapiens
agtttgcagtaaaca

SEQ ID NO: 1194477 - DNA, 15 bp, Homo sapiens
aagtttgcagtaaac

SEQ ID NO: 1194478 - DNA, 15 bp, Homo sapiens
aaagtttgcagtaaa

SEQ ID NO: 1194479 - DNA, 15 bp, Homo sapiens
caaagtttgcagtaa

SEQ ID NO: 1194480 - DNA, 15 bp, Homo sapiens
acaaagtttgcagta

SEQ ID NO: 1194481 - DNA, 15 bp, Homo sapiens
gacaaagtttgcagt

SEQ ID NO: 1194482 - DNA, 15 bp, Homo sapiens
agacaaagtttgcag

SEQ ID NO: 1194483 - DNA, 15 bp, Homo sapiens
aagacaaagtttgca

SEQ ID NO: 1194484 - DNA, 15 bp, Homo sapiens
aaagacaaagtttgc

SEQ ID NO: 1194485 - DNA, 15 bp, Homo sapiens
taaagacaaagtttg

SEQ ID NO: 1194486 - DNA, 15 bp, Homo sapiens
ttaaagacaaagttt

SEQ ID NO: 1194487 - DNA, 15 bp, Homo sapiens
gttaaagacaaagtt

SEQ ID NO: 1194488 - DNA, 15 bp, Homo sapiens
agttaaagacaaagt

SEQ ID NO: 1194489 - DNA, 15 bp, Homo sapiens
cagttaaagacaaag

SEQ ID NO: 1194490 - DNA, 15 bp, Homo sapiens
ccagttaaagacaaa

SEQ ID NO: 1194491 - DNA, 15 bp, Homo sapiens
tccagttaaagacaa

SEQ ID NO: 1194492 - DNA, 15 bp, Homo sapiens
ttccagttaaagaca

SEQ ID NO: 1194493 - DNA, 15 bp, Homo sapiens
cttccagttaaagac

SEQ ID NO: 1194494 - DNA, 15 bp, Homo sapiens
acttccagttaaaga

SEQ ID NO: 1194495 - DNA, 15 bp, Homo sapiens
aacttccagttaaag

SEQ ID NO: 1194496 - DNA, 15 bp, Homo sapiens
taacttccagttaaa

SEQ ID NO: 1194497 - DNA, 15 bp, Homo sapiens
ttaacttccagttaa

SEQ ID NO: 1194498 - DNA, 15 bp, Homo sapiens
tttaacttccagtta

SEQ ID NO: 1194499 - DNA, 15 bp, Homo sapiens
atttaacttccagtt

SEQ ID NO: 1194500 - DNA, 15 bp, Homo sapiens
aatttaacttccagt

SEQ ID NO: 1194501 - DNA, 15 bp, Homo sapiens
taatttaacttccag

SEQ ID NO: 1194502 - DNA, 15 bp, Homo sapiens
ataatttaacttcca

SEQ ID NO: 1194503 - DNA, 15 bp, Homo sapiens
aataatttaacttcc

SEQ ID NO: 1194504 - DNA, 15 bp, Homo sapiens
aaataatttaacttc

SEQ ID NO: 1194505 - DNA, 15 bp, Homo sapiens
aaaataatttaactt

SEQ ID NO: 1194506 - DNA, 15 bp, Homo sapiens
aaaaataatttaact

SEQ ID NO: 1194507 - DNA, 15 bp, Homo sapiens
taaaaataatttaac

SEQ ID NO: 1194508 - DNA, 15 bp, Homo sapiens
gtaaaaataatttaa

SEQ ID NO: 1194509 - DNA, 15 bp, Homo sapiens
ggtaaaaataattta

SEQ ID NO: 1194510 - DNA, 15 bp, Homo sapiens
tggtaaaaataattt

SEQ ID NO: 1194511 - DNA, 15 bp, Homo sapiens
ttggtaaaaataatt

SEQ ID NO: 1194512 - DNA, 15 bp, Homo sapiens
attggtaaaaataat

SEQ ID NO: 1194513 - DNA, 15 bp, Homo sapiens
cattggtaaaaataa

SEQ ID NO: 1194514 - DNA, 15 bp, Homo sapiens
tcattggtaaaaata

SEQ ID NO: 1194515 - DNA, 15 bp, Homo sapiens
gtcattggtaaaaat

SEQ ID NO: 1194516 - DNA, 15 bp, Homo sapiens
tgtcattggtaaaaa

SEQ ID NO: 1194517 - DNA, 15 bp, Homo sapiens
ttgtcattggtaaaa

SEQ ID NO: 1194518 - DNA, 15 bp, Homo sapiens
tttgtcattggtaaa

SEQ ID NO: 1194519 - DNA, 15 bp, Homo sapiens
ctttgtcattggtaa

SEQ ID NO: 1194520 - DNA, 15 bp, Homo sapiens
cctttgtcattggta

SEQ ID NO: 1194521 - DNA, 15 bp, Homo sapiens
acctttgtcattggt

SEQ ID NO: 1194522 - DNA, 15 bp, Homo sapiens
cacctttgtcattgg

SEQ ID NO: 1194523 - DNA, 15 bp, Homo sapiens
tcacctttgtcattg

SEQ ID NO: 1194524 - DNA, 15 bp, Homo sapiens
ttcacctttgtcatt

SEQ ID NO: 1194525 - DNA, 15 bp, Homo sapiens
tttcacctttgtcat

SEQ ID NO: 1194526 - DNA, 15 bp, Homo sapiens
ttttcacctttgtca

SEQ ID NO: 1194527 - DNA, 15 bp, Homo sapiens
attttcacctttgtc

SEQ ID NO: 1194528 - DNA, 15 bp, Homo sapiens
cattttcacctttgt

SEQ ID NO: 1194529 - DNA, 15 bp, Homo sapiens
acattttcacctttg

SEQ ID NO: 1194530 - DNA, 15 bp, Homo sapiens
aacattttcaccttt

SEQ ID NO: 1194531 - DNA, 15 bp, Homo sapiens
caacattttcacctt

SEQ ID NO: 1194532 - DNA, 15 bp, Homo sapiens
acaacattttcacct

SEQ ID NO: 1194533 - DNA, 15 bp, Homo sapiens
aacaacattttcacc

SEQ ID NO: 1194534 - DNA, 15 bp, Homo sapiens
aaacaacattttcac

SEQ ID NO: 1194535 - DNA, 15 bp, Homo sapiens
aaaacaacattttca

SEQ ID NO: 1194536 - DNA, 15 bp, Homo sapiens
caaaacaacattttc

SEQ ID NO: 1194537 - DNA, 15 bp, Homo sapiens
tcaaaacaacatttt

SEQ ID NO: 1194538 - DNA, 15 bp, Homo sapiens
ctcaaaacaacattt

SEQ ID NO: 1194539 - DNA, 15 bp, Homo sapiens
tctcaaaacaacatt

SEQ ID NO: 1194540 - DNA, 15 bp, Homo sapiens
atctcaaaacaacat

SEQ ID NO: 1194541 - DNA, 15 bp, Homo sapiens
aatctcaaaacaaca

SEQ ID NO: 1194542 - DNA, 15 bp, Homo sapiens
gaatctcaaaacaac

SEQ ID NO: 1194543 - DNA, 15 bp, Homo sapiens
agaatctcaaaacaa

SEQ ID NO: 1194544 - DNA, 15 bp, Homo sapiens
aagaatctcaaaaca

SEQ ID NO: 1194545 - DNA, 15 bp, Homo sapiens
aaagaatctcaaaac

SEQ ID NO: 1194546 - DNA, 15 bp, Homo sapiens
caaagaatctcaaaa

SEQ ID NO: 1194547 - DNA, 15 bp, Homo sapiens
gcaaagaatctcaaa

SEQ ID NO: 1194548 - DNA, 15 bp, Homo sapiens
agcaaagaatctcaa

SEQ ID NO: 1194549 - DNA, 15 bp, Homo sapiens
cagcaaagaatctca

SEQ ID NO: 1194550 - DNA, 15 bp, Homo sapiens
ccagcaaagaatctc

SEQ ID NO: 1194551 - DNA, 15 bp, Homo sapiens
accagcaaagaatct

SEQ ID NO: 1194552 - DNA, 15 bp, Homo sapiens
taccagcaaagaatc

SEQ ID NO: 1194553 - DNA, 15 bp, Homo sapiens
ctaccagcaaagaat

SEQ ID NO: 1194554 - DNA, 15 bp, Homo sapiens
actaccagcaaagaa

SEQ ID NO: 1194555 - DNA, 15 bp, Homo sapiens
tactaccagcaaaga

SEQ ID NO: 1194556 - DNA, 15 bp, Homo sapiens
atactaccagcaaag

SEQ ID NO: 1194557 - DNA, 15 bp, Homo sapiens
gatactaccagcaaa

SEQ ID NO: 1194558 - DNA, 15 bp, Homo sapiens
agatactaccagcaa

SEQ ID NO: 1194559 - DNA, 15 bp, Homo sapiens
gagatactaccagca

SEQ ID NO: 1194560 - DNA, 15 bp, Homo sapiens
ggagatactaccagc

SEQ ID NO: 1194561 - DNA, 15 bp, Homo sapiens
gggagatactaccag

SEQ ID NO: 1194562 - DNA, 15 bp, Homo sapiens
agggagatactacca

SEQ ID NO: 1194563 - DNA, 15 bp, Homo sapiens
aagggagatactacc

SEQ ID NO: 1194564 - DNA, 15 bp, Homo sapiens
aaagggagatactac

SEQ ID NO: 1194565 - DNA, 15 bp, Homo sapiens
aaaagggagatacta

SEQ ID NO: 1194566 - DNA, 15 bp, Homo sapiens
caaaagggagatact

SEQ ID NO: 1194567 - DNA, 15 bp, Homo sapiens
gcaaaagggagatac

SEQ ID NO: 1194568 - DNA, 15 bp, Homo sapiens
tgcaaaagggagata

SEQ ID NO: 1194569 - DNA, 15 bp, Homo sapiens
ctgcaaaagggagat

SEQ ID NO: 1194570 - DNA, 15 bp, Homo sapiens
tctgcaaaagggaga

SEQ ID NO: 1194571 - DNA, 15 bp, Homo sapiens
gtctgcaaaagggag

SEQ ID NO: 1194572 - DNA, 15 bp, Homo sapiens
tgtctgcaaaaggga

SEQ ID NO: 1194573 - DNA, 15 bp, Homo sapiens
ctgtctgcaaaaggg

SEQ ID NO: 1194574 - DNA, 15 bp, Homo sapiens
gctgtctgcaaaagg

SEQ ID NO: 1194575 - DNA, 15 bp, Homo sapiens
tgctgtctgcaaaag

SEQ ID NO: 1194576 - DNA, 15 bp, Homo sapiens
ctgctgtctgcaaaa

SEQ ID NO: 1194577 - DNA, 15 bp, Homo sapiens
tctgctgtctgcaaa

SEQ ID NO: 1194578 - DNA, 15 bp, Homo sapiens
gtctgctgtctgcaa

SEQ ID NO: 1194579 - DNA, 15 bp, Homo sapiens
agtctgctgtctgca

SEQ ID NO: 1194580 - DNA, 15 bp, Homo sapiens
cagtctgctgtctgc

SEQ ID NO: 1194581 - DNA, 15 bp, Homo sapiens
acagtctgctgtctg

SEQ ID NO: 1194582 - DNA, 15 bp, Homo sapiens
cacagtctgctgtct

SEQ ID NO: 1194583 - DNA, 15 bp, Homo sapiens
tcacagtctgctgtc

SEQ ID NO: 1194584 - DNA, 15 bp, Homo sapiens
ctcacagtctgctgt

SEQ ID NO: 1194585 - DNA, 15 bp, Homo sapiens
tctcacagtctgctg

SEQ ID NO: 1194586 - DNA, 15 bp, Homo sapiens
ttctcacagtctgct

SEQ ID NO: 1194587 - DNA, 15 bp, Homo sapiens
tttctcacagtctgc

SEQ ID NO: 1194588 - DNA, 15 bp, Homo sapiens
ttttctcacagtctg

SEQ ID NO: 1194589 - DNA, 15 bp, Homo sapiens
gttttctcacagtct

SEQ ID NO: 1194590 - DNA, 15 bp, Homo sapiens
agttttctcacagtc

SEQ ID NO: 1194591 - DNA, 15 bp, Homo sapiens
tagttttctcacagt

SEQ ID NO: 1194592 - DNA, 15 bp, Homo sapiens
ctagttttctcacag

SEQ ID NO: 1194593 - DNA, 15 bp, Homo sapiens
cctagttttctcaca

SEQ ID NO: 1194594 - DNA, 15 bp, Homo sapiens
ccctagttttctcac

SEQ ID NO: 1194595 - DNA, 15 bp, Homo sapiens
gccctagttttctca

SEQ ID NO: 1194596 - DNA, 15 bp, Homo sapiens
agccctagttttctc

SEQ ID NO: 1194597 - DNA, 15 bp, Homo sapiens
tagccctagttttct

SEQ ID NO: 1194598 - DNA, 15 bp, Homo sapiens
atagccctagttttc

SEQ ID NO: 1194599 - DNA, 15 bp, Homo sapiens
gatagccctagtttt

SEQ ID NO: 1194600 - DNA, 15 bp, Homo sapiens
tgatagccctagttt

SEQ ID NO: 1194601 - DNA, 15 bp, Homo sapiens
gtgatagccctagtt

SEQ ID NO: 1194602 - DNA, 15 bp, Homo sapiens
tgtgatagccctagt

SEQ ID NO: 1194603 - DNA, 15 bp, Homo sapiens
gtgtgatagccctag

SEQ ID NO: 1194604 - DNA, 15 bp, Homo sapiens
tgtgtgatagcccta

SEQ ID NO: 1194605 - DNA, 15 bp, Homo sapiens
ctgtgtgatagccct

SEQ ID NO: 1194606 - DNA, 15 bp, Homo sapiens
cctgtgtgatagccc

SEQ ID NO: 1194607 - DNA, 15 bp, Homo sapiens
gcctgtgtgatagcc

SEQ ID NO: 1194608 - DNA, 15 bp, Homo sapiens
ggcctgtgtgatagc

SEQ ID NO: 1194609 - DNA, 15 bp, Homo sapiens
tggcctgtgtgatag

SEQ ID NO: 1194610 - DNA, 15 bp, Homo sapiens
atggcctgtgtgata

SEQ ID NO: 1194611 - DNA, 15 bp, Homo sapiens
catggcctgtgtgat

SEQ ID NO: 1194612 - DNA, 15 bp, Homo sapiens
gcatggcctgtgtga

SEQ ID NO: 1194613 - DNA, 15 bp, Homo sapiens
ggcatggcctgtgtg

SEQ ID NO: 1194614 - DNA, 15 bp, Homo sapiens
tggcatggcctgtgt

SEQ ID NO: 1194615 - DNA, 15 bp, Homo sapiens
ctggcatggcctgtg

SEQ ID NO: 1194616 - DNA, 15 bp, Homo sapiens
tctggcatggcctgt

SEQ ID NO: 1194617 - DNA, 15 bp, Homo sapiens
ctctggcatggcctg

SEQ ID NO: 1194618 - DNA, 15 bp, Homo sapiens
cctctggcatggcct

SEQ ID NO: 1194619 - DNA, 15 bp, Homo sapiens
ccctctggcatggcc

SEQ ID NO: 1194620 - DNA, 15 bp, Homo sapiens
tccctctggcatggc

SEQ ID NO: 1194621 - DNA, 15 bp, Homo sapiens
ctccctctggcatgg

SEQ ID NO: 1194622 - DNA, 15 bp, Homo sapiens
tctccctctggcatg

SEQ ID NO: 1194623 - DNA, 15 bp, Homo sapiens
ttctccctctggcat

SEQ ID NO: 1194624 - DNA, 15 bp, Homo sapiens
tttctccctctggca

SEQ ID NO: 1194625 - DNA, 15 bp, Homo sapiens
ttttctccctctggc

SEQ ID NO: 1194626 - DNA, 15 bp, Homo sapiens
tttttctccctctgg

SEQ ID NO: 1194627 - DNA, 15 bp, Homo sapiens
ctttttctccctctg

SEQ ID NO: 1194628 - DNA, 15 bp, Homo sapiens
cctttttctccctct

SEQ ID NO: 1194629 - DNA, 15 bp, Homo sapiens
tcctttttctccctc

SEQ ID NO: 1194630 - DNA, 15 bp, Homo sapiens
ttcctttttctccct

SEQ ID NO: 1194631 - DNA, 15 bp, Homo sapiens
attcctttttctccc

SEQ ID NO: 1194632 - DNA, 15 bp, Homo sapiens
tattcctttttctcc

SEQ ID NO: 1194633 - DNA, 15 bp, Homo sapiens
ttattcctttttctc

SEQ ID NO: 1194634 - DNA, 15 bp, Homo sapiens
gttattcctttttct

SEQ ID NO: 1194635 - DNA, 15 bp, Homo sapiens
ggttattcctttttc

SEQ ID NO: 1194636 - DNA, 15 bp, Homo sapiens
tggttattccttttt

SEQ ID NO: 1194637 - DNA, 15 bp, Homo sapiens
ttggttattcctttt

SEQ ID NO: 1194638 - DNA, 15 bp, Homo sapiens
attggttattccttt

SEQ ID NO: 1194639 - DNA, 15 bp, Homo sapiens
tattggttattcctt

SEQ ID NO: 1194640 - DNA, 15 bp, Homo sapiens
atattggttattcct

SEQ ID NO: 1194641 - DNA, 15 bp, Homo sapiens
catattggttattcc

SEQ ID NO: 1194642 - DNA, 15 bp, Homo sapiens
tcatattggttattc

SEQ ID NO: 1194643 - DNA, 15 bp, Homo sapiens
ctcatattggttatt

SEQ ID NO: 1194644 - DNA, 15 bp, Homo sapiens
tctcatattggttat

SEQ ID NO: 1194645 - DNA, 15 bp, Homo sapiens
gtctcatattggtta

SEQ ID NO: 1194646 - DNA, 15 bp, Homo sapiens
tgtctcatattggtt

SEQ ID NO: 1194647 - DNA, 15 bp, Homo sapiens
ttgtctcatattggt

SEQ ID NO: 1194648 - DNA, 15 bp, Homo sapiens
tttgtctcatattgg

SEQ ID NO: 1194649 - DNA, 15 bp, Homo sapiens
ttttgtctcatattg

SEQ ID NO: 1194650 - DNA, 15 bp, Homo sapiens
tttttgtctcatatt

SEQ ID NO: 1194651 - DNA, 15 bp, Homo sapiens
gtttttgtctcatat

SEQ ID NO: 1194652 - DNA, 15 bp, Homo sapiens
ggtttttgtctcata

SEQ ID NO: 1194653 - DNA, 15 bp, Homo sapiens
tggtttttgtctcat

SEQ ID NO: 1194654 - DNA, 15 bp, Homo sapiens
gtggtttttgtctca

SEQ ID NO: 1194655 - DNA, 15 bp, Homo sapiens
ggtggtttttgtctc

SEQ ID NO: 1194656 - DNA, 15 bp, Homo sapiens
tggtggtttttgtct

SEQ ID NO: 1194657 - DNA, 15 bp, Homo sapiens
ttggtggtttttgtc

SEQ ID NO: 1194658 - DNA, 15 bp, Homo sapiens
cttggtggtttttgt

SEQ ID NO: 1194659 - DNA, 15 bp, Homo sapiens
acttggtggtttttg

SEQ ID NO: 1194660 - DNA, 15 bp, Homo sapiens
gacttggtggttttt

SEQ ID NO: 1194661 - DNA, 15 bp, Homo sapiens
ggacttggtggtttt

SEQ ID NO: 1194662 - DNA, 15 bp, Homo sapiens
tggacttggtggttt

SEQ ID NO: 1194663 - DNA, 15 bp, Homo sapiens
gtggacttggtggtt

SEQ ID NO: 1194664 - DNA, 15 bp, Homo sapiens
agtggacttggtggt

SEQ ID NO: 1194665 - DNA, 15 bp, Homo sapiens
tagtggacttggtgg

SEQ ID NO: 1194666 - DNA, 15 bp, Homo sapiens
ctagtggacttggtg

SEQ ID NO: 1194667 - DNA, 15 bp, Homo sapiens
tctagtggacttggt

SEQ ID NO: 1194668 - DNA, 15 bp, Homo sapiens
atctagtggacttgg

SEQ ID NO: 1194669 - DNA, 15 bp, Homo sapiens
gatctagtggacttg

SEQ ID NO: 1194670 - DNA, 15 bp, Homo sapiens
agatctagtggactt

SEQ ID NO: 1194671 - DNA, 15 bp, Homo sapiens
aagatctagtggact

SEQ ID NO: 1194672 - DNA, 15 bp, Homo sapiens
gaagatctagtggac

SEQ ID NO: 1194673 - DNA, 15 bp, Homo sapiens
tgaagatctagtgga

SEQ ID NO: 1194674 - DNA, 15 bp, Homo sapiens
ttgaagatctagtgg

SEQ ID NO: 1194675 - DNA, 15 bp, Homo sapiens
gttgaagatctagtg

SEQ ID NO: 1194676 - DNA, 15 bp, Homo sapiens
tgttgaagatctagt

SEQ ID NO: 1194677 - DNA, 15 bp, Homo sapiens
atgttgaagatctag

SEQ ID NO: 1194678 - DNA, 15 bp, Homo sapiens
catgttgaagatcta

SEQ ID NO: 1194679 - DNA, 15 bp, Homo sapiens
tcatgttgaagatct

SEQ ID NO: 1194680 - DNA, 15 bp, Homo sapiens
gtcatgttgaagatc

SEQ ID NO: 1194681 - DNA, 15 bp, Homo sapiens
tgtcatgttgaagat

SEQ ID NO: 1194682 - DNA, 15 bp, Homo sapiens
ttgtcatgttgaaga

SEQ ID NO: 1194683 - DNA, 15 bp, Homo sapiens
attgtcatgttgaag

SEQ ID NO: 1194684 - DNA, 15 bp, Homo sapiens
cattgtcatgttgaa

SEQ ID NO: 1194685 - DNA, 15 bp, Homo sapiens
tcattgtcatgttga

SEQ ID NO: 1194686 - DNA, 15 bp, Homo sapiens
atcattgtcatgttg

SEQ ID NO: 1194687 - DNA, 15 bp, Homo sapiens
tatcattgtcatgtt

SEQ ID NO: 1194688 - DNA, 15 bp, Homo sapiens
gtatcattgtcatgt

SEQ ID NO: 1194689 - DNA, 15 bp, Homo sapiens
cgtatcattgtcatg

SEQ ID NO: 1194690 - DNA, 15 bp, Homo sapiens
ccgtatcattgtcat

SEQ ID NO: 1194691 - DNA, 15 bp, Homo sapiens
gccgtatcattgtca

SEQ ID NO: 1194692 - DNA, 15 bp, Homo sapiens
ggccgtatcattgtc

SEQ ID NO: 1194693 - DNA, 15 bp, Homo sapiens
aggccgtatcattgt

SEQ ID NO: 1194694 - DNA, 15 bp, Homo sapiens
gaggccgtatcattg

SEQ ID NO: 1194695 - DNA, 15 bp, Homo sapiens
tgaggccgtatcatt

SEQ ID NO: 1194696 - DNA, 15 bp, Homo sapiens
ttgaggccgtatcat

SEQ ID NO: 1194697 - DNA, 15 bp, Homo sapiens
tttgaggccgtatca

SEQ ID NO: 1194698 - DNA, 15 bp, Homo sapiens
ttttgaggccgtatc

SEQ ID NO: 1194699 - DNA, 15 bp, Homo sapiens
attttgaggccgtat

SEQ ID NO: 1194700 - DNA, 15 bp, Homo sapiens
tattttgaggccgta

SEQ ID NO: 1194701 - DNA, 15 bp, Homo sapiens
ttattttgaggccgt

SEQ ID NO: 1194702 - DNA, 15 bp, Homo sapiens
attattttgaggccg

SEQ ID NO: 1194703 - DNA, 15 bp, Homo sapiens
cattattttgaggcc

SEQ ID NO: 1194704 - DNA, 15 bp, Homo sapiens
gcattattttgaggc

SEQ ID NO: 1194705 - DNA, 15 bp, Homo sapiens
tgcattattttgagg

SEQ ID NO: 1194706 - DNA, 15 bp, Homo sapiens
atgcattattttgag

SEQ ID NO: 1194707 - DNA, 15 bp, Homo sapiens
aatgcattattttga

SEQ ID NO: 1194708 - DNA, 15 bp, Homo sapiens
caatgcattattttg

SEQ ID NO: 1194709 - DNA, 15 bp, Homo sapiens
tcaatgcattatttt

SEQ ID NO: 1194710 - DNA, 15 bp, Homo sapiens
atcaatgcattattt

SEQ ID NO: 1194711 - DNA, 15 bp, Homo sapiens
catcaatgcattatt

SEQ ID NO: 1194712 - DNA, 15 bp, Homo sapiens
acatcaatgcattat

SEQ ID NO: 1194713 - DNA, 15 bp, Homo sapiens
aacatcaatgcatta

SEQ ID NO: 1194714 - DNA, 15 bp, Homo sapiens
aaacatcaatgcatt

SEQ ID NO: 1194715 - DNA, 15 bp, Homo sapiens
aaaacatcaatgcat

SEQ ID NO: 1194716 - DNA, 15 bp, Homo sapiens
taaaacatcaatgca

SEQ ID NO: 1194717 - DNA, 15 bp, Homo sapiens
ttaaaacatcaatgc

SEQ ID NO: 1194718 - DNA, 15 bp, Homo sapiens
tttaaaacatcaatg

SEQ ID NO: 1194719 - DNA, 15 bp, Homo sapiens
ctttaaaacatcaat

SEQ ID NO: 1194720 - DNA, 15 bp, Homo sapiens
cctttaaaacatcaa

SEQ ID NO: 1194721 - DNA, 15 bp, Homo sapiens
ccctttaaaacatca

SEQ ID NO: 1194722 - DNA, 15 bp, Homo sapiens
tccctttaaaacatc

SEQ ID NO: 1194723 - DNA, 15 bp, Homo sapiens
atccctttaaaacat

SEQ ID NO: 1194724 - DNA, 15 bp, Homo sapiens
tatccctttaaaaca

SEQ ID NO: 1194725 - DNA, 15 bp, Homo sapiens
ctatccctttaaaac

SEQ ID NO: 1194726 - DNA, 15 bp, Homo sapiens
gctatccctttaaaa

SEQ ID NO: 1194727 - DNA, 15 bp, Homo sapiens
tgctatccctttaaa

SEQ ID NO: 1194728 - DNA, 15 bp, Homo sapiens
ttgctatccctttaa

SEQ ID NO: 1194729 - DNA, 15 bp, Homo sapiens
cttgctatcccttta

SEQ ID NO: 1194730 - DNA, 15 bp, Homo sapiens
acttgctatcccttt

SEQ ID NO: 1194731 - DNA, 15 bp, Homo sapiens
tacttgctatccctt

SEQ ID NO: 1194732 - DNA, 15 bp, Homo sapiens
ttacttgctatccct

SEQ ID NO: 1194733 - DNA, 15 bp, Homo sapiens
tttacttgctatccc

SEQ ID NO: 1194734 - DNA, 15 bp, Homo sapiens
ctttacttgctatcc

SEQ ID NO: 1194735 - DNA, 15 bp, Homo sapiens
actttacttgctatc

SEQ ID NO: 1194736 - DNA, 15 bp, Homo sapiens
aactttacttgctat

SEQ ID NO: 1194737 - DNA, 15 bp, Homo sapiens
aaactttacttgcta

SEQ ID NO: 1194738 - DNA, 15 bp, Homo sapiens
aaaactttacttgct

SEQ ID NO: 1194739 - DNA, 15 bp, Homo sapiens
gaaaactttacttgc

SEQ ID NO: 1194740 - DNA, 15 bp, Homo sapiens
ggaaaactttacttg

SEQ ID NO: 1194741 - DNA, 15 bp, Homo sapiens
cggaaaactttactt

SEQ ID NO: 1194742 - DNA, 15 bp, Homo sapiens
tcggaaaactttact

SEQ ID NO: 1194743 - DNA, 15 bp, Homo sapiens
ttcggaaaactttac

SEQ ID NO: 1194744 - DNA, 15 bp, Homo sapiens
cttcggaaaacttta

SEQ ID NO: 1194745 - DNA, 15 bp, Homo sapiens
tcttcggaaaacttt

SEQ ID NO: 1194746 - DNA, 15 bp, Homo sapiens
atcttcggaaaactt

SEQ ID NO: 1194747 - DNA, 15 bp, Homo sapiens
tatcttcggaaaact

SEQ ID NO: 1194748 - DNA, 15 bp, Homo sapiens
ttatcttcggaaaac

SEQ ID NO: 1194749 - DNA, 15 bp, Homo sapiens
gttatcttcggaaaa

SEQ ID NO: 1194750 - DNA, 15 bp, Homo sapiens
agttatcttcggaaa

SEQ ID NO: 1194751 - DNA, 15 bp, Homo sapiens
cagttatcttcggaa

SEQ ID NO: 1194752 - DNA, 15 bp, Homo sapiens
acagttatcttcgga

SEQ ID NO: 1194753 - DNA, 15 bp, Homo sapiens
cacagttatcttcgg

SEQ ID NO: 1194754 - DNA, 15 bp, Homo sapiens
ccacagttatcttcg

SEQ ID NO: 1194755 - DNA, 15 bp, Homo sapiens
accacagttatcttc

SEQ ID NO: 1194756 - DNA, 15 bp, Homo sapiens
aaccacagttatctt

SEQ ID NO: 1194757 - DNA, 15 bp, Homo sapiens
caaccacagttatct

SEQ ID NO: 1194758 - DNA, 15 bp, Homo sapiens
ccaaccacagttatc

SEQ ID NO: 1194759 - DNA, 15 bp, Homo sapiens
gccaaccacagttat

SEQ ID NO: 1194760 - DNA, 15 bp, Homo sapiens
ggccaaccacagtta

SEQ ID NO: 1194761 - DNA, 15 bp, Homo sapiens
tggccaaccacagtt

SEQ ID NO: 1194762 - DNA, 15 bp, Homo sapiens
ttggccaaccacagt

SEQ ID NO: 1194763 - DNA, 15 bp, Homo sapiens
cttggccaaccacag

SEQ ID NO: 1194764 - DNA, 15 bp, Homo sapiens
tcttggccaaccaca

SEQ ID NO: 1194765 - DNA, 15 bp, Homo sapiens
ttcttggccaaccac

SEQ ID NO: 1194766 - DNA, 15 bp, Homo sapiens
cttcttggccaacca

SEQ ID NO: 1194767 - DNA, 15 bp, Homo sapiens
tcttcttggccaacc

SEQ ID NO: 1194768 - DNA, 15 bp, Homo sapiens
gtcttcttggccaac

SEQ ID NO: 1194769 - DNA, 15 bp, Homo sapiens
ggtcttcttggccaa

SEQ ID NO: 1194770 - DNA, 15 bp, Homo sapiens
aggtcttcttggcca

SEQ ID NO: 1194771 - DNA, 15 bp, Homo sapiens
aaggtcttcttggcc

SEQ ID NO: 1194772 - DNA, 15 bp, Homo sapiens
taaggtcttcttggc

SEQ ID NO: 1194773 - DNA, 15 bp, Homo sapiens
ttaaggtcttcttgg

SEQ ID NO: 1194774 - DNA, 15 bp, Homo sapiens
tttaaggtcttcttg

SEQ ID NO: 1194775 - DNA, 15 bp, Homo sapiens
ttttaaggtcttctt

SEQ ID NO: 1194776 - DNA, 15 bp, Homo sapiens
tttttaaggtcttct

SEQ ID NO: 1194777 - DNA, 15 bp, Homo sapiens
atttttaaggtcttc

SEQ ID NO: 1194778 - DNA, 15 bp, Homo sapiens
tatttttaaggtctt

SEQ ID NO: 1194779 - DNA, 15 bp, Homo sapiens
ttatttttaaggtct

SEQ ID NO: 1194780 - DNA, 15 bp, Homo sapiens
tttatttttaaggtc

SEQ ID NO: 1194781 - DNA, 15 bp, Homo sapiens
atttatttttaaggt

SEQ ID NO: 1194782 - DNA, 15 bp, Homo sapiens
catttatttttaagg

SEQ ID NO: 1194783 - DNA, 15 bp, Homo sapiens
acatttatttttaag

SEQ ID NO: 1194784 - DNA, 15 bp, Homo sapiens
aacatttatttttaa

SEQ ID NO: 1194785 - DNA, 15 bp, Homo sapiens
taacatttattttta

SEQ ID NO: 1194786 - DNA, 15 bp, Homo sapiens
ttaacatttattttt

SEQ ID NO: 1194787 - DNA, 15 bp, Homo sapiens
gttaacatttatttt

SEQ ID NO: 1194788 - DNA, 15 bp, Homo sapiens
agttaacatttattt

SEQ ID NO: 1194789 - DNA, 15 bp, Homo sapiens
cagttaacatttatt

SEQ ID NO: 1194790 - DNA, 15 bp, Homo sapiens
acagttaacatttat

SEQ ID NO: 1194791 - DNA, 15 bp, Homo sapiens
tacagttaacattta

SEQ ID NO: 1194792 - DNA, 15 bp, Homo sapiens
ttacagttaacattt

SEQ ID NO: 1194793 - DNA, 15 bp, Homo sapiens
gttacagttaacatt

SEQ ID NO: 1194794 - DNA, 15 bp, Homo sapiens
ggttacagttaacat

SEQ ID NO: 1194795 - DNA, 15 bp, Homo sapiens
aggttacagttaaca

SEQ ID NO: 1194796 - DNA, 15 bp, Homo sapiens
aaggttacagttaac

SEQ ID NO: 1194797 - DNA, 15 bp, Homo sapiens
aaaggttacagttaa

SEQ ID NO: 1194798 - DNA, 15 bp, Homo sapiens
aaaaggttacagtta

SEQ ID NO: 1194799 - DNA, 15 bp, Homo sapiens
aaaaaggttacagtt

SEQ ID NO: 1194800 - DNA, 15 bp, Homo sapiens
aaaaaaggttacagt

SEQ ID NO: 1194801 - DNA, 15 bp, Homo sapiens
aaaaaaaggttacag

SEQ ID NO: 1194802 - DNA, 15 bp, Homo sapiens
aaaaaaaaggttaca

SEQ ID NO: 1194803 - DNA, 15 bp, Homo sapiens
aaaaaaaaaggttac

SEQ ID NO: 1194804 - DNA, 15 bp, Homo sapiens
aaaaaaaaaaggtta

SEQ ID NO: 1194805 - DNA, 15 bp, Homo sapiens
aaagcaaaaaaaaaa

SEQ ID NO: 1194806 - DNA, 15 bp, Homo sapiens
taaagcaaaaaaaaa

SEQ ID NO: 1194807 - DNA, 15 bp, Homo sapiens
ttaaagcaaaaaaaa

SEQ ID NO: 1194808 - DNA, 15 bp, Homo sapiens
gttaaagcaaaaaaa

SEQ ID NO: 1194809 - DNA, 15 bp, Homo sapiens
tgttaaagcaaaaaa

SEQ ID NO: 1194810 - DNA, 15 bp, Homo sapiens
ttgttaaagcaaaaa

SEQ ID NO: 1194811 - DNA, 15 bp, Homo sapiens
tttgttaaagcaaaa

SEQ ID NO: 1194812 - DNA, 15 bp, Homo sapiens
ttttgttaaagcaaa

SEQ ID NO: 1194813 - DNA, 15 bp, Homo sapiens
tttttgttaaagcaa

SEQ ID NO: 1194814 - DNA, 15 bp, Homo sapiens
atttttgttaaagca

SEQ ID NO: 1194815 - DNA, 15 bp, Homo sapiens
tatttttgttaaagc

SEQ ID NO: 1194816 - DNA, 15 bp, Homo sapiens
ttatttttgttaaag

SEQ ID NO: 1194817 - DNA, 15 bp, Homo sapiens
attatttttgttaaa

SEQ ID NO: 1194818 - DNA, 15 bp, Homo sapiens
tattatttttgttaa

SEQ ID NO: 1194819 - DNA, 15 bp, Homo sapiens
ctattatttttgtta

SEQ ID NO: 1194820 - DNA, 15 bp, Homo sapiens
tctattatttttgtt

SEQ ID NO: 1194821 - DNA, 15 bp, Homo sapiens
ttctattatttttgt

SEQ ID NO: 1194822 - DNA, 15 bp, Homo sapiens
tttctattatttttg

SEQ ID NO: 1194823 - DNA, 15 bp, Homo sapiens
ttttctattattttt

SEQ ID NO: 1194824 - DNA, 15 bp, Homo sapiens
tatcacccttcattc

SEQ ID NO: 1194825 - DNA, 15 bp, Homo sapiens
atatcacccttcatt

SEQ ID NO: 1194826 - DNA, 15 bp, Homo sapiens
catatcacccttcat

SEQ ID NO: 1194827 - DNA, 15 bp, Homo sapiens
ccatatcacccttca

SEQ ID NO: 1194828 - DNA, 15 bp, Homo sapiens
cccatatcacccttc

SEQ ID NO: 1194829 - DNA, 15 bp, Homo sapiens
acccatatcaccctt

SEQ ID NO: 1194830 - DNA, 15 bp, Homo sapiens
tacccatatcaccct

SEQ ID NO: 1194831 - DNA, 15 bp, Homo sapiens
gtacccatatcaccc

SEQ ID NO: 1194832 - DNA, 15 bp, Homo sapiens
agtacccatatcacc

SEQ ID NO: 1194833 - DNA, 15 bp, Homo sapiens
cagtacccatatcac

SEQ ID NO: 1194834 - DNA, 15 bp, Homo sapiens
acagtacccatatca

SEQ ID NO: 1194835 - DNA, 15 bp, Homo sapiens
cacagtacccatatc

SEQ ID NO: 1194836 - DNA, 15 bp, Homo sapiens
ccacagtacccatat

SEQ ID NO: 1194837 - DNA, 15 bp, Homo sapiens
cccacagtacccata

SEQ ID NO: 1194838 - DNA, 15 bp, Homo sapiens
ccccacagtacccat

SEQ ID NO: 1194839 - DNA, 15 bp, Homo sapiens
gccccacagtaccca

SEQ ID NO: 1194840 - DNA, 15 bp, Homo sapiens
agccccacagtaccc

SEQ ID NO: 1194841 - DNA, 15 bp, Homo sapiens
cagccccacagtacc

SEQ ID NO: 1194842 - DNA, 15 bp, Homo sapiens
gcagccccacagtac

SEQ ID NO: 1194843 - DNA, 15 bp, Homo sapiens
ggcagccccacagta

SEQ ID NO: 1194844 - DNA, 15 bp, Homo sapiens
aggcagccccacagt

SEQ ID NO: 1194845 - DNA, 15 bp, Homo sapiens
aaggcagccccacag

SEQ ID NO: 1194846 - DNA, 15 bp, Homo sapiens
gaaggcagccccaca

SEQ ID NO: 1194847 - DNA, 15 bp, Homo sapiens
ggaaggcagccccac

SEQ ID NO: 1194848 - DNA, 15 bp, Homo sapiens
aggaaggcagcccca

SEQ ID NO: 1194849 - DNA, 15 bp, Homo sapiens
aaggaaggcagcccc

SEQ ID NO: 1194850 - DNA, 15 bp, Homo sapiens
aaaggaaggcagccc

SEQ ID NO: 1194851 - DNA, 15 bp, Homo sapiens
aaaaggaaggcagcc

SEQ ID NO: 1194852 - DNA, 15 bp, Homo sapiens
gaaaaggaaggcagc

SEQ ID NO: 1194853 - DNA, 15 bp, Homo sapiens
ggaaaaggaaggcag

SEQ ID NO: 1194854 - DNA, 15 bp, Homo sapiens
tggaaaaggaaggca

SEQ ID NO: 1194855 - DNA, 15 bp, Homo sapiens
gtggaaaaggaaggc

SEQ ID NO: 1194856 - DNA, 15 bp, Homo sapiens
tgtggaaaaggaagg

SEQ ID NO: 1194857 - DNA, 15 bp, Homo sapiens
gtgtggaaaaggaag

SEQ ID NO: 1194858 - DNA, 15 bp, Homo sapiens
tgtgtggaaaaggaa

SEQ ID NO: 1194859 - DNA, 15 bp, Homo sapiens
ttgtgtggaaaagga

SEQ ID NO: 1194860 - DNA, 15 bp, Homo sapiens
tttgtgtggaaaagg

SEQ ID NO: 1194861 - DNA, 15 bp, Homo sapiens
ttttgtgtggaaaag

SEQ ID NO: 1194862 - DNA, 15 bp, Homo sapiens
attttgtgtggaaaa

SEQ ID NO: 1194863 - DNA, 15 bp, Homo sapiens
aattttgtgtggaaa

SEQ ID NO: 1194864 - DNA, 15 bp, Homo sapiens
gaattttgtgtggaa

SEQ ID NO: 1194865 - DNA, 15 bp, Homo sapiens
agaattttgtgtgga

SEQ ID NO: 1194866 - DNA, 15 bp, Homo sapiens
aagaattttgtgtgg

SEQ ID NO: 1194867 - DNA, 15 bp, Homo sapiens
ataagaattttgtgt

SEQ ID NO: 1194868 - DNA, 15 bp, Homo sapiens
cataagaattttgtg

SEQ ID NO: 1194869 - DNA, 15 bp, Homo sapiens
ccataagaattttgt

SEQ ID NO: 1194870 - DNA, 15 bp, Homo sapiens
accataagaattttg

SEQ ID NO: 1194871 - DNA, 15 bp, Homo sapiens
aaccataagaatttt

SEQ ID NO: 1194872 - DNA, 15 bp, Homo sapiens
aaaccataagaattt

SEQ ID NO: 1194873 - DNA, 15 bp, Homo sapiens
aaaaccataagaatt

SEQ ID NO: 1194874 - DNA, 15 bp, Homo sapiens
taaaaccataagaat

SEQ ID NO: 1194875 - DNA, 15 bp, Homo sapiens
ttaaaaccataagaa

SEQ ID NO: 1194876 - DNA, 15 bp, Homo sapiens
cttaaaaccataaga

SEQ ID NO: 1194877 - DNA, 15 bp, Homo sapiens
acttaaaaccataag

SEQ ID NO: 1194878 - DNA, 15 bp, Homo sapiens
gacttaaaaccataa

SEQ ID NO: 1194879 - DNA, 15 bp, Homo sapiens
tgacttaaaaccata

SEQ ID NO: 1194880 - DNA, 15 bp, Homo sapiens
atgacttaaaaccat

SEQ ID NO: 1194881 - DNA, 15 bp, Homo sapiens
aatgacttaaaacca

SEQ ID NO: 1194882 - DNA, 15 bp, Homo sapiens
aaatgacttaaaacc

SEQ ID NO: 1194883 - DNA, 15 bp, Homo sapiens
taaatgacttaaaac

SEQ ID NO: 1194884 - DNA, 15 bp, Homo sapiens
ctaaatgacttaaaa

SEQ ID NO: 1194885 - DNA, 15 bp, Homo sapiens
tctaaatgacttaaa

SEQ ID NO: 1194886 - DNA, 15 bp, Homo sapiens
ctctaaatgacttaa

SEQ ID NO: 1194887 - DNA, 15 bp, Homo sapiens
tctctaaatgactta

SEQ ID NO: 1194888 - DNA, 15 bp, Homo sapiens
ttctctaaatgactt

SEQ ID NO: 1194889 - DNA, 15 bp, Homo sapiens
cttctctaaatgact

SEQ ID NO: 1194890 - DNA, 15 bp, Homo sapiens
tcttctctaaatgac

SEQ ID NO: 1194891 - DNA, 15 bp, Homo sapiens
gtcttctctaaatga

SEQ ID NO: 1194892 - DNA, 15 bp, Homo sapiens
tgtcttctctaaatg

SEQ ID NO: 1194893 - DNA, 15 bp, Homo sapiens
ctgtcttctctaaat

SEQ ID NO: 1194894 - DNA, 15 bp, Homo sapiens
tctgtcttctctaaa

SEQ ID NO: 1194895 - DNA, 15 bp, Homo sapiens
atctgtcttctctaa

SEQ ID NO: 1194896 - DNA, 15 bp, Homo sapiens
aatctgtcttctcta

SEQ ID NO: 1194897 - DNA, 15 bp, Homo sapiens
aaatctgtcttctct

SEQ ID NO: 1194898 - DNA, 15 bp, Homo sapiens
caaatctgtcttctc

SEQ ID NO: 1194899 - DNA, 15 bp, Homo sapiens
tcaaatctgtcttct

SEQ ID NO: 1194900 - DNA, 15 bp, Homo sapiens
ttcaaatctgtcttc

SEQ ID NO: 1194901 - DNA, 15 bp, Homo sapiens
attcaaatctgtctt

SEQ ID NO: 1194902 - DNA, 15 bp, Homo sapiens
cattcaaatctgtct

SEQ ID NO: 1194903 - DNA, 15 bp, Homo sapiens
acattcaaatctgtc

SEQ ID NO: 1194904 - DNA, 15 bp, Homo sapiens
cacattcaaatctgt

SEQ ID NO: 1194905 - DNA, 15 bp, Homo sapiens
tcacattcaaatctg

SEQ ID NO: 1194906 - DNA, 15 bp, Homo sapiens
ttcacattcaaatct

SEQ ID NO: 1194907 - DNA, 15 bp, Homo sapiens
tttcacattcaaatc

SEQ ID NO: 1194908 - DNA, 15 bp, Homo sapiens
ttttcacattcaaat

SEQ ID NO: 1194909 - DNA, 15 bp, Homo sapiens
gttttcacattcaaa

SEQ ID NO: 1194910 - DNA, 15 bp, Homo sapiens
agttttcacattcaa

SEQ ID NO: 1194911 - DNA, 15 bp, Homo sapiens
gagttttcacattca

SEQ ID NO: 1194912 - DNA, 15 bp, Homo sapiens
tgagttttcacattc

SEQ ID NO: 1194913 - DNA, 15 bp, Homo sapiens
atgagttttcacatt

SEQ ID NO: 1194914 - DNA, 15 bp, Homo sapiens
catgagttttcacat

SEQ ID NO: 1194915 - DNA, 15 bp, Homo sapiens
tcatgagttttcaca

SEQ ID NO: 1194916 - DNA, 15 bp, Homo sapiens
atcatgagttttcac

SEQ ID NO: 1194917 - DNA, 15 bp, Homo sapiens
catcatgagttttca

SEQ ID NO: 1194918 - DNA, 15 bp, Homo sapiens
gcatcatgagttttc

SEQ ID NO: 1194919 - DNA, 15 bp, Homo sapiens
agcatcatgagtttt

SEQ ID NO: 1194920 - DNA, 15 bp, Homo sapiens
gagcatcatgagttt

SEQ ID NO: 1194921 - DNA, 15 bp, Homo sapiens
tgagcatcatgagtt

SEQ ID NO: 1194922 - DNA, 15 bp, Homo sapiens
gtgagcatcatgagt

SEQ ID NO: 1194923 - DNA, 15 bp, Homo sapiens
tgtgagcatcatgag

SEQ ID NO: 1194924 - DNA, 15 bp, Homo sapiens
ttgtgagcatcatga

SEQ ID NO: 1194925 - DNA, 15 bp, Homo sapiens
tttgtgagcatcatg

SEQ ID NO: 1194926 - DNA, 15 bp, Homo sapiens
atttgtgagcatcat

SEQ ID NO: 1194927 - DNA, 15 bp, Homo sapiens
tatttgtgagcatca

SEQ ID NO: 1194928 - DNA, 15 bp, Homo sapiens
gtatttgtgagcatc

SEQ ID NO: 1194929 - DNA, 15 bp, Homo sapiens
ggtatttgtgagcat

SEQ ID NO: 1194930 - DNA, 15 bp, Homo sapiens
gggtatttgtgagca

SEQ ID NO: 1194931 - DNA, 15 bp, Homo sapiens
agggtatttgtgagc

SEQ ID NO: 1194932 - DNA, 15 bp, Homo sapiens
tagggtatttgtgag

SEQ ID NO: 1194933 - DNA, 15 bp, Homo sapiens
ttagggtatttgtga

SEQ ID NO: 1194934 - DNA, 15 bp, Homo sapiens
attagggtatttgtg

SEQ ID NO: 1194935 - DNA, 15 bp, Homo sapiens
gattagggtatttgt

SEQ ID NO: 1194936 - DNA, 15 bp, Homo sapiens
ggattagggtatttg

SEQ ID NO: 1194937 - DNA, 15 bp, Homo sapiens
aggattagggtattt

SEQ ID NO: 1194938 - DNA, 15 bp, Homo sapiens
aaggattagggtatt

SEQ ID NO: 1194939 - DNA, 15 bp, Homo sapiens
aaaggattagggtat

SEQ ID NO: 1194940 - DNA, 15 bp, Homo sapiens
taaaggattagggta

SEQ ID NO: 1194941 - DNA, 15 bp, Homo sapiens
ttaaaggattagggt

SEQ ID NO: 1194942 - DNA, 15 bp, Homo sapiens
attaaaggattaggg

SEQ ID NO: 1194943 - DNA, 15 bp, Homo sapiens
tattaaaggattagg

SEQ ID NO: 1194944 - DNA, 15 bp, Homo sapiens
ttattaaaggattag

SEQ ID NO: 1194945 - DNA, 15 bp, Homo sapiens
attattaaaggatta

SEQ ID NO: 1194946 - DNA, 15 bp, Homo sapiens
tattattaaaggatt

SEQ ID NO: 1194947 - DNA, 15 bp, Homo sapiens
gtattattaaaggat

SEQ ID NO: 1194948 - DNA, 15 bp, Homo sapiens
agtattattaaagga

SEQ ID NO: 1194949 - DNA, 15 bp, Homo sapiens
cagtattattaaagg

SEQ ID NO: 1194950 - DNA, 15 bp, Homo sapiens
tcagtattattaaag

SEQ ID NO: 1194951 - DNA, 15 bp, Homo sapiens
atcagtattattaaa

SEQ ID NO: 1194952 - DNA, 15 bp, Homo sapiens
catcagtattattaa

SEQ ID NO: 1194953 - DNA, 15 bp, Homo sapiens
acatcagtattatta

SEQ ID NO: 1194954 - DNA, 15 bp, Homo sapiens
tacatcagtattatt

SEQ ID NO: 1194955 - DNA, 15 bp, Homo sapiens
atacatcagtattat

SEQ ID NO: 1194956 - DNA, 15 bp, Homo sapiens
tatacatcagtatta

SEQ ID NO: 1194957 - DNA, 15 bp, Homo sapiens
atatacatcagtatt

SEQ ID NO: 1194958 - DNA, 15 bp, Homo sapiens
catatacatcagtat

SEQ ID NO: 1194959 - DNA, 15 bp, Homo sapiens
tcatatacatcagta

SEQ ID NO: 1194960 - DNA, 15 bp, Homo sapiens
ttcatatacatcagt

SEQ ID NO: 1194961 - DNA, 15 bp, Homo sapiens
gttcatatacatcag

SEQ ID NO: 1194962 - DNA, 15 bp, Homo sapiens
agttcatatacatca

SEQ ID NO: 1194963 - DNA, 15 bp, Homo sapiens
aagttcatatacatc

SEQ ID NO: 1194964 - DNA, 15 bp, Homo sapiens
taagttcatatacat

SEQ ID NO: 1194965 - DNA, 15 bp, Homo sapiens
ttaagttcatataca

SEQ ID NO: 1194966 - DNA, 15 bp, Homo sapiens
attaagttcatatac

SEQ ID NO: 1194967 - DNA, 15 bp, Homo sapiens
tattaagttcatata

SEQ ID NO: 1194968 - DNA, 15 bp, Homo sapiens
ttattaagttcatat

SEQ ID NO: 1194969 - DNA, 15 bp, Homo sapiens
tttattaagttcata

SEQ ID NO: 1194970 - DNA, 15 bp, Homo sapiens
ttttattaagttcat

SEQ ID NO: 1194971 - DNA, 15 bp, Homo sapiens
cttttattaagttca

SEQ ID NO: 1194972 - DNA, 15 bp, Homo sapiens
acttttattaagttc

SEQ ID NO: 1194973 - DNA, 15 bp, Homo sapiens
cacttttattaagtt

SEQ ID NO: 1194974 - DNA, 15 bp, Homo sapiens
tcacttttattaagt

SEQ ID NO: 1194975 - DNA, 15 bp, Homo sapiens
atcacttttattaag

SEQ ID NO: 1194976 - DNA, 15 bp, Homo sapiens
gatcacttttattaa

SEQ ID NO: 1194977 - DNA, 15 bp, Homo sapiens
tgatcacttttatta

SEQ ID NO: 1194978 - DNA, 15 bp, Homo sapiens
atgatcacttttatt

SEQ ID NO: 1194979 - DNA, 15 bp, Homo sapiens
aatgatcacttttat

SEQ ID NO: 1194980 - DNA, 15 bp, Homo sapiens
taatgatcactttta

SEQ ID NO: 1194981 - DNA, 15 bp, Homo sapiens
ataatgatcactttt

SEQ ID NO: 1194982 - DNA, 15 bp, Homo sapiens
tataatgatcacttt

SEQ ID NO: 1194983 - DNA, 15 bp, Homo sapiens
gtataatgatcactt

SEQ ID NO: 1194984 - DNA, 15 bp, Homo sapiens
tgtataatgatcact

SEQ ID NO: 1194985 - DNA, 15 bp, Homo sapiens
ttgtataatgatcac

SEQ ID NO: 1194986 - DNA, 15 bp, Homo sapiens
attgtataatgatca

SEQ ID NO: 1194987 - DNA, 15 bp, Homo sapiens
tattgtataatgatc

SEQ ID NO: 1194988 - DNA, 15 bp, Homo sapiens
atattgtataatgat

SEQ ID NO: 1194989 - DNA, 15 bp, Homo sapiens
tatattgtataatga

SEQ ID NO: 1194990 - DNA, 15 bp, Homo sapiens
ttatattgtataatg

SEQ ID NO: 1194991 - DNA, 15 bp, Homo sapiens
tttatattgtataat

SEQ ID NO: 1194992 - DNA, 15 bp, Homo sapiens
gtttatattgtataa

SEQ ID NO: 1194993 - DNA, 15 bp, Homo sapiens
tgtttatattgtata

SEQ ID NO: 1194994 - DNA, 15 bp, Homo sapiens
ctgtttatattgtat

SEQ ID NO: 1194995 - DNA, 15 bp, Homo sapiens
tctgtttatattgta

SEQ ID NO: 1194996 - DNA, 15 bp, Homo sapiens
atctgtttatattgt

SEQ ID NO: 1194997 - DNA, 15 bp, Homo sapiens
tatctgtttatattg

SEQ ID NO: 1194998 - DNA, 15 bp, Homo sapiens
atatctgtttatatt

SEQ ID NO: 1194999 - DNA, 15 bp, Homo sapiens
aatatctgtttatat

SEQ ID NO: 1195000 - DNA, 15 bp, Homo sapiens
gaatatctgtttata

SEQ ID NO: 1195001 - DNA, 15 bp, Homo sapiens
agaatatctgtttat

SEQ ID NO: 1195002 - DNA, 15 bp, Homo sapiens
aagaatatctgttta

SEQ ID NO: 1195003 - DNA, 15 bp, Homo sapiens
taagaatatctgttt

SEQ ID NO: 1195004 - DNA, 15 bp, Homo sapiens
ataagaatatctgtt

SEQ ID NO: 1195005 - DNA, 15 bp, Homo sapiens
gataagaatatctgt

SEQ ID NO: 1195006 - DNA, 15 bp, Homo sapiens
tgataagaatatctg

SEQ ID NO: 1195007 - DNA, 15 bp, Homo sapiens
ttgataagaatatct

SEQ ID NO: 1195008 - DNA, 15 bp, Homo sapiens
gttgataagaatatc

SEQ ID NO: 1195009 - DNA, 15 bp, Homo sapiens
tgttgataagaatat

SEQ ID NO: 1195010 - DNA, 15 bp, Homo sapiens
ttgttgataagaata

SEQ ID NO: 1195011 - DNA, 15 bp, Homo sapiens
gttgttgataagaat

SEQ ID NO: 1195012 - DNA, 15 bp, Homo sapiens
tgttgttgataagaa

SEQ ID NO: 1195013 - DNA, 15 bp, Homo sapiens
ttgttgttgataaga

SEQ ID NO: 1195014 - DNA, 15 bp, Homo sapiens
gttgttgttgataag

SEQ ID NO: 1195015 - DNA, 15 bp, Homo sapiens
tgttgttgttgataa

SEQ ID NO: 1195016 - DNA, 15 bp, Homo sapiens
ctgttgttgttgata

SEQ ID NO: 1195017 - DNA, 15 bp, Homo sapiens
actgttgttgttgat

SEQ ID NO: 1195018 - DNA, 15 bp, Homo sapiens
aactgttgttgttga

SEQ ID NO: 1195019 - DNA, 15 bp, Homo sapiens
taactgttgttgttg

SEQ ID NO: 1195020 - DNA, 15 bp, Homo sapiens
ttaactgttgttgtt

SEQ ID NO: 1195021 - DNA, 15 bp, Homo sapiens
attaactgttgttgt

SEQ ID NO: 1195022 - DNA, 15 bp, Homo sapiens
gattaactgttgttg

SEQ ID NO: 1195023 - DNA, 15 bp, Homo sapiens
tgattaactgttgtt

SEQ ID NO: 1195024 - DNA, 15 bp, Homo sapiens
atgattaactgttgt

SEQ ID NO: 1195025 - DNA, 15 bp, Homo sapiens
aatgattaactgttg

SEQ ID NO: 1195026 - DNA, 15 bp, Homo sapiens
caatgattaactgtt

SEQ ID NO: 1195027 - DNA, 15 bp, Homo sapiens
tcaatgattaactgt

SEQ ID NO: 1195028 - DNA, 15 bp, Homo sapiens
gtcaatgattaactg

SEQ ID NO: 1195029 - DNA, 15 bp, Homo sapiens
agtcaatgattaact

SEQ ID NO: 1195030 - DNA, 15 bp, Homo sapiens
gagtcaatgattaac

SEQ ID NO: 1195031 - DNA, 15 bp, Homo sapiens
ggagtcaatgattaa

SEQ ID NO: 1195032 - DNA, 15 bp, Homo sapiens
aggagtcaatgatta

SEQ ID NO: 1195033 - DNA, 15 bp, Homo sapiens
taggagtcaatgatt

SEQ ID NO: 1195034 - DNA, 15 bp, Homo sapiens
ctaggagtcaatgat

SEQ ID NO: 1195035 - DNA, 15 bp, Homo sapiens
tctaggagtcaatga

SEQ ID NO: 1195036 - DNA, 15 bp, Homo sapiens
atctaggagtcaatg

SEQ ID NO: 1195037 - DNA, 15 bp, Homo sapiens
tatctaggagtcaat

SEQ ID NO: 1195038 - DNA, 15 bp, Homo sapiens
ttatctaggagtcaa

SEQ ID NO: 1195039 - DNA, 15 bp, Homo sapiens
tttatctaggagtca

SEQ ID NO: 1195040 - DNA, 15 bp, Homo sapiens
atttatctaggagtc

SEQ ID NO: 1195041 - DNA, 15 bp, Homo sapiens
tatttatctaggagt

SEQ ID NO: 1195042 - DNA, 15 bp, Homo sapiens
atatttatctaggag

SEQ ID NO: 1195043 - DNA, 15 bp, Homo sapiens
aatatttatctagga

SEQ ID NO: 1195044 - DNA, 15 bp, Homo sapiens
taatatttatctagg

SEQ ID NO: 1195045 - DNA, 15 bp, Homo sapiens
ttaatatttatctag

SEQ ID NO: 1195046 - DNA, 15 bp, Homo sapiens
attaatatttatcta

SEQ ID NO: 1195047 - DNA, 15 bp, Homo sapiens
gattaatatttatct

SEQ ID NO: 1195048 - DNA, 15 bp, Homo sapiens
tgattaatatttatc

SEQ ID NO: 1195049 - DNA, 15 bp, Homo sapiens
ctgattaatatttat

SEQ ID NO: 1195050 - DNA, 15 bp, Homo sapiens
cctgattaatattta

SEQ ID NO: 1195051 - DNA, 15 bp, Homo sapiens
ccctgattaatattt

SEQ ID NO: 1195052 - DNA, 15 bp, Homo sapiens
tccctgattaatatt

SEQ ID NO: 1195053 - DNA, 15 bp, Homo sapiens
atccctgattaatat

SEQ ID NO: 1195054 - DNA, 15 bp, Homo sapiens
catccctgattaata

SEQ ID NO: 1195055 - DNA, 15 bp, Homo sapiens
tcatccctgattaat

SEQ ID NO: 1195056 - DNA, 15 bp, Homo sapiens
gtcatccctgattaa

SEQ ID NO: 1195057 - DNA, 15 bp, Homo sapiens
agtcatccctgatta

SEQ ID NO: 1195058 - DNA, 15 bp, Homo sapiens
aagtcatccctgatt

SEQ ID NO: 1195059 - DNA, 15 bp, Homo sapiens
gaagtcatccctgat

SEQ ID NO: 1195060 - DNA, 15 bp, Homo sapiens
ggaagtcatccctga

SEQ ID NO: 1195061 - DNA, 15 bp, Homo sapiens
tggaagtcatccctg

SEQ ID NO: 1195062 - DNA, 15 bp, Homo sapiens
ttggaagtcatccct

SEQ ID NO: 1195063 - DNA, 15 bp, Homo sapiens
gttggaagtcatccc

SEQ ID NO: 1195064 - DNA, 15 bp, Homo sapiens
agttggaagtcatcc

SEQ ID NO: 1195065 - DNA, 15 bp, Homo sapiens
tagttggaagtcatc

SEQ ID NO: 1195066 - DNA, 15 bp, Homo sapiens
ttagttggaagtcat

SEQ ID NO: 1195067 - DNA, 15 bp, Homo sapiens
attagttggaagtca

SEQ ID NO: 1195068 - DNA, 15 bp, Homo sapiens
gattagttggaagtc

SEQ ID NO: 1195069 - DNA, 15 bp, Homo sapiens
ggattagttggaagt

SEQ ID NO: 1195070 - DNA, 15 bp, Homo sapiens
aggattagttggaag

SEQ ID NO: 1195071 - DNA, 15 bp, Homo sapiens
aaggattagttggaa

SEQ ID NO: 1195072 - DNA, 15 bp, Homo sapiens
taaggattagttgga

SEQ ID NO: 1195073 - DNA, 15 bp, Homo sapiens
ataaggattagttgg

SEQ ID NO: 1195074 - DNA, 15 bp, Homo sapiens
tataaggattagttg

SEQ ID NO: 1195075 - DNA, 15 bp, Homo sapiens
ctataaggattagtt

SEQ ID NO: 1195076 - DNA, 15 bp, Homo sapiens
gctataaggattagt

SEQ ID NO: 1195077 - DNA, 15 bp, Homo sapiens
ggctataaggattag

SEQ ID NO: 1195078 - DNA, 15 bp, Homo sapiens
tggctataaggatta

SEQ ID NO: 1195079 - DNA, 15 bp, Homo sapiens
ctggctataaggatt

SEQ ID NO: 1195080 - DNA, 15 bp, Homo sapiens
cctggctataaggat

SEQ ID NO: 1195081 - DNA, 15 bp, Homo sapiens
gcctggctataagga

SEQ ID NO: 1195082 - DNA, 15 bp, Homo sapiens
agcctggctataagg

SEQ ID NO: 1195083 - DNA, 15 bp, Homo sapiens
cagcctggctataag

SEQ ID NO: 1195084 - DNA, 15 bp, Homo sapiens
gcagcctggctataa

SEQ ID NO: 1195085 - DNA, 15 bp, Homo sapiens
tgcagcctggctata

SEQ ID NO: 1195086 - DNA, 15 bp, Homo sapiens
ttgcagcctggctat

SEQ ID NO: 1195087 - DNA, 15 bp, Homo sapiens
tttgcagcctggcta

SEQ ID NO: 1195088 - DNA, 15 bp, Homo sapiens
gtttgcagcctggct

SEQ ID NO: 1195089 - DNA, 15 bp, Homo sapiens
tgtttgcagcctggc

SEQ ID NO: 1195090 - DNA, 15 bp, Homo sapiens
atgtttgcagcctgg

SEQ ID NO: 1195091 - DNA, 15 bp, Homo sapiens
tatgtttgcagcctg

SEQ ID NO: 1195092 - DNA, 15 bp, Homo sapiens
ttatgtttgcagcct

SEQ ID NO: 1195093 - DNA, 15 bp, Homo sapiens
attatgtttgcagcc

SEQ ID NO: 1195094 - DNA, 15 bp, Homo sapiens
tattatgtttgcagc

SEQ ID NO: 1195095 - DNA, 15 bp, Homo sapiens
ttattatgtttgcag

SEQ ID NO: 1195096 - DNA, 15 bp, Homo sapiens
cttattatgtttgca

SEQ ID NO: 1195097 - DNA, 15 bp, Homo sapiens
ccttattatgtttgc

SEQ ID NO: 1195098 - DNA, 15 bp, Homo sapiens
cccttattatgtttg

SEQ ID NO: 1195099 - DNA, 15 bp, Homo sapiens
acccttattatgttt

SEQ ID NO: 1195100 - DNA, 15 bp, Homo sapiens
aacccttattatgtt

SEQ ID NO: 1195101 - DNA, 15 bp, Homo sapiens
gtaacccttattatg

SEQ ID NO: 1195102 - DNA, 15 bp, Homo sapiens
tgtaacccttattat

SEQ ID NO: 1195103 - DNA, 15 bp, Homo sapiens
atgtaacccttatta

SEQ ID NO: 1195104 - DNA, 15 bp, Homo sapiens
tatgtaacccttatt

SEQ ID NO: 1195105 - DNA, 15 bp, Homo sapiens
ttatgtaacccttat

SEQ ID NO: 1195106 - DNA, 15 bp, Homo sapiens
cttatgtaaccctta

SEQ ID NO: 1195107 - DNA, 15 bp, Homo sapiens
ccttatgtaaccctt

SEQ ID NO: 1195108 - DNA, 15 bp, Homo sapiens
accttatgtaaccct

SEQ ID NO: 1195109 - DNA, 15 bp, Homo sapiens
gaccttatgtaaccc

SEQ ID NO: 1195110 - DNA, 15 bp, Homo sapiens
tgaccttatgtaacc

SEQ ID NO: 1195111 - DNA, 15 bp, Homo sapiens
atgaccttatgtaac

SEQ ID NO: 1195112 - DNA, 15 bp, Homo sapiens
aatgaccttatgtaa

SEQ ID NO: 1195113 - DNA, 15 bp, Homo sapiens
aaatgaccttatgta

SEQ ID NO: 1195114 - DNA, 15 bp, Homo sapiens
aaaatgaccttatgt

SEQ ID NO: 1195115 - DNA, 15 bp, Homo sapiens
gaaaatgaccttatg

SEQ ID NO: 1195116 - DNA, 15 bp, Homo sapiens
ggaaaatgaccttat

SEQ ID NO: 1195117 - DNA, 15 bp, Homo sapiens
aggaaaatgacctta

SEQ ID NO: 1195118 - DNA, 15 bp, Homo sapiens
caggaaaatgacctt

SEQ ID NO: 1195119 - DNA, 15 bp, Homo sapiens
acaggaaaatgacct

SEQ ID NO: 1195120 - DNA, 15 bp, Homo sapiens
aacaggaaaatgacc

SEQ ID NO: 1195121 - DNA, 15 bp, Homo sapiens
aaacaggaaaatgac

SEQ ID NO: 1195122 - DNA, 15 bp, Homo sapiens
gaaacaggaaaatga

SEQ ID NO: 1195123 - DNA, 15 bp, Homo sapiens
agaaacaggaaaatg

SEQ ID NO: 1195124 - DNA, 15 bp, Homo sapiens
tagaaacaggaaaat

SEQ ID NO: 1195125 - DNA, 15 bp, Homo sapiens
gtagaaacaggaaaa

SEQ ID NO: 1195126 - DNA, 15 bp, Homo sapiens
tgtagaaacaggaaa

SEQ ID NO: 1195127 - DNA, 15 bp, Homo sapiens
ttgtagaaacaggaa

SEQ ID NO: 1195128 - DNA, 15 bp, Homo sapiens
gttgtagaaacagga

SEQ ID NO: 1195129 - DNA, 15 bp, Homo sapiens
tgttgtagaaacagg

SEQ ID NO: 1195130 - DNA, 15 bp, Homo sapiens
atgttgtagaaacag

SEQ ID NO: 1195131 - DNA, 15 bp, Homo sapiens
catgttgtagaaaca

SEQ ID NO: 1195132 - DNA, 15 bp, Homo sapiens
gcatgttgtagaaac

SEQ ID NO: 1195133 - DNA, 15 bp, Homo sapiens
ggcatgttgtagaaa

SEQ ID NO: 1195134 - DNA, 15 bp, Homo sapiens
aggcatgttgtagaa

SEQ ID NO: 1195135 - DNA, 15 bp, Homo sapiens
gaggcatgttgtaga

SEQ ID NO: 1195136 - DNA, 15 bp, Homo sapiens
agaggcatgttgtag

SEQ ID NO: 1195137 - DNA, 15 bp, Homo sapiens
gagaggcatgttgta

SEQ ID NO: 1195138 - DNA, 15 bp, Homo sapiens
tgagaggcatgttgt

SEQ ID NO: 1195139 - DNA, 15 bp, Homo sapiens
gtgagaggcatgttg

SEQ ID NO: 1195140 - DNA, 15 bp, Homo sapiens
agtgagaggcatgtt

SEQ ID NO: 1195141 - DNA, 15 bp, Homo sapiens
aagtgagaggcatgt

SEQ ID NO: 1195142 - DNA, 15 bp, Homo sapiens
aaagtgagaggcatg

SEQ ID NO: 1195143 - DNA, 15 bp, Homo sapiens
caaagtgagaggcat

SEQ ID NO: 1195144 - DNA, 15 bp, Homo sapiens
gcaaagtgagaggca

SEQ ID NO: 1195145 - DNA, 15 bp, Homo sapiens
agcaaagtgagaggc

SEQ ID NO: 1195146 - DNA, 15 bp, Homo sapiens
tagcaaagtgagagg

SEQ ID NO: 1195147 - DNA, 15 bp, Homo sapiens
gtagcaaagtgagag

SEQ ID NO: 1195148 - DNA, 15 bp, Homo sapiens
tgtagcaaagtgaga

SEQ ID NO: 1195149 - DNA, 15 bp, Homo sapiens
ctgtagcaaagtgag

SEQ ID NO: 1195150 - DNA, 15 bp, Homo sapiens
gctgtagcaaagtga

SEQ ID NO: 1195151 - DNA, 15 bp, Homo sapiens
agctgtagcaaagtg

SEQ ID NO: 1195152 - DNA, 15 bp, Homo sapiens
tagctgtagcaaagt

SEQ ID NO: 1195153 - DNA, 15 bp, Homo sapiens
atagctgtagcaaag

SEQ ID NO: 1195154 - DNA, 15 bp, Homo sapiens
tatagctgtagcaaa

SEQ ID NO: 1195155 - DNA, 15 bp, Homo sapiens
ttatagctgtagcaa

SEQ ID NO: 1195156 - DNA, 15 bp, Homo sapiens
tttatagctgtagca

SEQ ID NO: 1195157 - DNA, 15 bp, Homo sapiens
ttttatagctgtagc

SEQ ID NO: 1195158 - DNA, 15 bp, Homo sapiens
gttttatagctgtag

SEQ ID NO: 1195159 - DNA, 15 bp, Homo sapiens
aggttttatagctgt

SEQ ID NO: 1195160 - DNA, 15 bp, Homo sapiens
gaggttttatagctg

SEQ ID NO: 1195161 - DNA, 15 bp, Homo sapiens
agaggttttatagct

SEQ ID NO: 1195162 - DNA, 15 bp, Homo sapiens
tagaggttttatagc

SEQ ID NO: 1195163 - DNA, 15 bp, Homo sapiens
ttagaggttttatag

SEQ ID NO: 1195164 - DNA, 15 bp, Homo sapiens
tttagaggttttata

SEQ ID NO: 1195165 - DNA, 15 bp, Homo sapiens
atttagaggttttat

SEQ ID NO: 1195166 - DNA, 15 bp, Homo sapiens
tatttagaggtttta

SEQ ID NO: 1195167 - DNA, 15 bp, Homo sapiens
atatttagaggtttt

SEQ ID NO: 1195168 - DNA, 15 bp, Homo sapiens
aatatttagaggttt

SEQ ID NO: 1195169 - DNA, 15 bp, Homo sapiens
gaatatttagaggtt

SEQ ID NO: 1195170 - DNA, 15 bp, Homo sapiens
tgaatatttagaggt

SEQ ID NO: 1195171 - DNA, 15 bp, Homo sapiens
atgaatatttagagg

SEQ ID NO: 1195172 - DNA, 15 bp, Homo sapiens
catgaatatttagag

SEQ ID NO: 1195173 - DNA, 15 bp, Homo sapiens
ccatgaatatttaga

SEQ ID NO: 1195174 - DNA, 15 bp, Homo sapiens
gccatgaatatttag

SEQ ID NO: 1195175 - DNA, 15 bp, Homo sapiens
tgccatgaatattta

SEQ ID NO: 1195176 - DNA, 15 bp, Homo sapiens
atgccatgaatattt

SEQ ID NO: 1195177 - DNA, 15 bp, Homo sapiens
tatgccatgaatatt

SEQ ID NO: 1195178 - DNA, 15 bp, Homo sapiens
atatgccatgaatat

SEQ ID NO: 1195179 - DNA, 15 bp, Homo sapiens
aatatgccatgaata

SEQ ID NO: 1195180 - DNA, 15 bp, Homo sapiens
aaatatgccatgaat

SEQ ID NO: 1195181 - DNA, 15 bp, Homo sapiens
aaaaatatgccatga

SEQ ID NO: 1195182 - DNA, 15 bp, Homo sapiens
gaaaaatatgccatg

SEQ ID NO: 1195183 - DNA, 15 bp, Homo sapiens
tgaaaaatatgccat

SEQ ID NO: 1195184 - DNA, 15 bp, Homo sapiens
ttgaaaaatatgcca

SEQ ID NO: 1195185 - DNA, 15 bp, Homo sapiens
tttgaaaaatatgcc

SEQ ID NO: 1195186 - DNA, 15 bp, Homo sapiens
ttttgaaaaatatgc

SEQ ID NO: 1195187 - DNA, 15 bp, Homo sapiens
cttttgaaaaatatg

SEQ ID NO: 1195188 - DNA, 15 bp, Homo sapiens
acttttgaaaaatat

SEQ ID NO: 1195189 - DNA, 15 bp, Homo sapiens
gacttttgaaaaata

SEQ ID NO: 1195190 - DNA, 15 bp, Homo sapiens
agacttttgaaaaat

SEQ ID NO: 1195191 - DNA, 15 bp, Homo sapiens
aagacttttgaaaaa

SEQ ID NO: 1195192 - DNA, 15 bp, Homo sapiens
gaagacttttgaaaa

SEQ ID NO: 1195193 - DNA, 15 bp, Homo sapiens
agaagacttttgaaa

SEQ ID NO: 1195194 - DNA, 15 bp, Homo sapiens
cagaagacttttgaa

SEQ ID NO: 1195195 - DNA, 15 bp, Homo sapiens
ccagaagacttttga

SEQ ID NO: 1195196 - DNA, 15 bp, Homo sapiens
tccagaagacttttg

SEQ ID NO: 1195197 - DNA, 15 bp, Homo sapiens
gtccagaagactttt

SEQ ID NO: 1195198 - DNA, 15 bp, Homo sapiens
ggtccagaagacttt

SEQ ID NO: 1195199 - DNA, 15 bp, Homo sapiens
cggtccagaagactt

SEQ ID NO: 1195200 - DNA, 15 bp, Homo sapiens
acggtccagaagact

SEQ ID NO: 1195201 - DNA, 15 bp, Homo sapiens
aacggtccagaagac

SEQ ID NO: 1195202 - DNA, 15 bp, Homo sapiens
aaacggtccagaaga

SEQ ID NO: 1195203 - DNA, 15 bp, Homo sapiens
taaacggtccagaag

SEQ ID NO: 1195204 - DNA, 15 bp, Homo sapiens
gtaaacggtccagaa

SEQ ID NO: 1195205 - DNA, 15 bp, Homo sapiens
tgtaaacggtccaga

SEQ ID NO: 1195206 - DNA, 15 bp, Homo sapiens
atgtaaacggtccag

SEQ ID NO: 1195207 - DNA, 15 bp, Homo sapiens
tatgtaaacggtcca

SEQ ID NO: 1195208 - DNA, 15 bp, Homo sapiens
ttatgtaaacggtcc

SEQ ID NO: 1195209 - DNA, 15 bp, Homo sapiens
tttatgtaaacggtc

SEQ ID NO: 1195210 - DNA, 15 bp, Homo sapiens
ttttatgtaaacggt

SEQ ID NO: 1195211 - DNA, 15 bp, Homo sapiens
attttatgtaaacgg

SEQ ID NO: 1195212 - DNA, 15 bp, Homo sapiens
cattttatgtaaacg

SEQ ID NO: 1195213 - DNA, 15 bp, Homo sapiens
acattttatgtaaac

SEQ ID NO: 1195214 - DNA, 15 bp, Homo sapiens
aacattttatgtaaa

SEQ ID NO: 1195215 - DNA, 15 bp, Homo sapiens
aaacattttatgtaa

SEQ ID NO: 1195216 - DNA, 15 bp, Homo sapiens
aaaacattttatgta

SEQ ID NO: 1195217 - DNA, 15 bp, Homo sapiens
caaaacattttatgt

SEQ ID NO: 1195218 - DNA, 15 bp, Homo sapiens
gcaaaacattttatg

SEQ ID NO: 1195219 - DNA, 15 bp, Homo sapiens
agcaaaacattttat

SEQ ID NO: 1195220 - DNA, 15 bp, Homo sapiens
aagcaaaacatttta

SEQ ID NO: 1195221 - DNA, 15 bp, Homo sapiens
taagcaaaacatttt

SEQ ID NO: 1195222 - DNA, 15 bp, Homo sapiens
gtaagcaaaacattt

SEQ ID NO: 1195223 - DNA, 15 bp, Homo sapiens
agtaagcaaaacatt

SEQ ID NO: 1195224 - DNA, 15 bp, Homo sapiens
aagtaagcaaaacat

SEQ ID NO: 1195225 - DNA, 15 bp, Homo sapiens
gaagtaagcaaaaca

SEQ ID NO: 1195226 - DNA, 15 bp, Homo sapiens
gagaagtaagcaaaa

SEQ ID NO: 1195227 - DNA, 15 bp, Homo sapiens
ggagaagtaagcaaa

SEQ ID NO: 1195228 - DNA, 15 bp, Homo sapiens
tggagaagtaagcaa

SEQ ID NO: 1195229 - DNA, 15 bp, Homo sapiens
ttggagaagtaagca

SEQ ID NO: 1195230 - DNA, 15 bp, Homo sapiens
gttggagaagtaagc

SEQ ID NO: 1195231 - DNA, 15 bp, Homo sapiens
tgttggagaagtaag

SEQ ID NO: 1195232 - DNA, 15 bp, Homo sapiens
ctgttggagaagtaa

SEQ ID NO: 1195233 - DNA, 15 bp, Homo sapiens
gctgttggagaagta

SEQ ID NO: 1195234 - DNA, 15 bp, Homo sapiens
ggctgttggagaagt

SEQ ID NO: 1195235 - DNA, 15 bp, Homo sapiens
gggctgttggagaag

SEQ ID NO: 1195236 - DNA, 15 bp, Homo sapiens
ggggctgttggagaa

SEQ ID NO: 1195237 - DNA, 15 bp, Homo sapiens
gggggctgttggaga

SEQ ID NO: 1195238 - DNA, 15 bp, Homo sapiens
cgggggctgttggag

SEQ ID NO: 1195239 - DNA, 15 bp, Homo sapiens
tcgggggctgttgga

SEQ ID NO: 1195240 - DNA, 15 bp, Homo sapiens
ttcgggggctgttgg

SEQ ID NO: 1195241 - DNA, 15 bp, Homo sapiens
cttcgggggctgttg

SEQ ID NO: 1195242 - DNA, 15 bp, Homo sapiens
ccttcgggggctgtt

SEQ ID NO: 1195243 - DNA, 15 bp, Homo sapiens
accttcgggggctgt

SEQ ID NO: 1195244 - DNA, 15 bp, Homo sapiens
caccttcgggggctg

SEQ ID NO: 1195245 - DNA, 15 bp, Homo sapiens
tcaccttcgggggct

SEQ ID NO: 1195246 - DNA, 15 bp, Homo sapiens
ttcaccttcgggggc

SEQ ID NO: 1195247 - DNA, 15 bp, Homo sapiens
attcaccttcggggg

SEQ ID NO: 1195248 - DNA, 15 bp, Homo sapiens
tattcaccttcgggg

SEQ ID NO: 1195249 - DNA, 15 bp, Homo sapiens
gtattcaccttcggg

SEQ ID NO: 1195250 - DNA, 15 bp, Homo sapiens
agtattcaccttcgg

SEQ ID NO: 1195251 - DNA, 15 bp, Homo sapiens
cagtattcaccttcg

SEQ ID NO: 1195252 - DNA, 15 bp, Homo sapiens
tcagtattcaccttc

SEQ ID NO: 1195253 - DNA, 15 bp, Homo sapiens
ctcagtattcacctt

SEQ ID NO: 1195254 - DNA, 15 bp, Homo sapiens
tctcagtattcacct

SEQ ID NO: 1195255 - DNA, 15 bp, Homo sapiens
ttctcagtattcacc

SEQ ID NO: 1195256 - DNA, 15 bp, Homo sapiens
tttctcagtattcac

SEQ ID NO: 1195257 - DNA, 15 bp, Homo sapiens
ttttctcagtattca

SEQ ID NO: 1195258 - DNA, 15 bp, Homo sapiens
tttttctcagtattc

SEQ ID NO: 1195259 - DNA, 15 bp, Homo sapiens
ttttttctcagtatt

SEQ ID NO: 1195260 - DNA, 15 bp, Homo sapiens
tttttttctcagtat

SEQ ID NO: 1195261 - DNA, 15 bp, Homo sapiens
gtttttttctcagta

SEQ ID NO: 1195262 - DNA, 15 bp, Homo sapiens
ggtttttttctcagt

SEQ ID NO: 1195263 - DNA, 15 bp, Homo sapiens
gggtttttttctcag

SEQ ID NO: 1195264 - DNA, 15 bp, Homo sapiens
agggtttttttctca

SEQ ID NO: 1195265 - DNA, 15 bp, Homo sapiens
cagggtttttttctc

SEQ ID NO: 1195266 - DNA, 15 bp, Homo sapiens
ccagggtttttttct

SEQ ID NO: 1195267 - DNA, 15 bp, Homo sapiens
gccagggtttttttc

SEQ ID NO: 1195268 - DNA, 15 bp, Homo sapiens
agccagggttttttt

SEQ ID NO: 1195269 - DNA, 15 bp, Homo sapiens
gagccagggtttttt

SEQ ID NO: 1195270 - DNA, 15 bp, Homo sapiens
ggagccagggttttt

SEQ ID NO: 1195271 - DNA, 15 bp, Homo sapiens
aggagccagggtttt

SEQ ID NO: 1195272 - DNA, 15 bp, Homo sapiens
taggagccagggttt

SEQ ID NO: 1195273 - DNA, 15 bp, Homo sapiens
gtaggagccagggtt

SEQ ID NO: 1195274 - DNA, 15 bp, Homo sapiens
agtaggagccagggt

SEQ ID NO: 1195275 - DNA, 15 bp, Homo sapiens
gagtaggagccaggg

SEQ ID NO: 1195276 - DNA, 15 bp, Homo sapiens
ggagtaggagccagg

SEQ ID NO: 1195277 - DNA, 15 bp, Homo sapiens
gggagtaggagccag

SEQ ID NO: 1195278 - DNA, 15 bp, Homo sapiens
tgggagtaggagcca

SEQ ID NO: 1195279 - DNA, 15 bp, Homo sapiens
ctgggagtaggagcc

SEQ ID NO: 1195280 - DNA, 15 bp, Homo sapiens
gctgggagtaggagc

SEQ ID NO: 1195281 - DNA, 15 bp, Homo sapiens
agctgggagtaggag

SEQ ID NO: 1195282 - DNA, 15 bp, Homo sapiens
cagctgggagtagga

SEQ ID NO: 1195283 - DNA, 15 bp, Homo sapiens
tcagctgggagtagg

SEQ ID NO: 1195284 - DNA, 15 bp, Homo sapiens
gtcagctgggagtag

SEQ ID NO: 1195285 - DNA, 15 bp, Homo sapiens
tgtcagctgggagta

SEQ ID NO: 1195286 - DNA, 15 bp, Homo sapiens
ctgtcagctgggagt

SEQ ID NO: 1195287 - DNA, 15 bp, Homo sapiens
gctgtcagctgggag

SEQ ID NO: 1195288 - DNA, 15 bp, Homo sapiens
agctgtcagctggga

SEQ ID NO: 1195289 - DNA, 15 bp, Homo sapiens
cagctgtcagctggg

SEQ ID NO: 1195290 - DNA, 15 bp, Homo sapiens
acagctgtcagctgg

SEQ ID NO: 1195291 - DNA, 15 bp, Homo sapiens
aacagctgtcagctg

SEQ ID NO: 1195292 - DNA, 15 bp, Homo sapiens
aaacagctgtcagct

SEQ ID NO: 1195293 - DNA, 15 bp, Homo sapiens
aaaacagctgtcagc

SEQ ID NO: 1195294 - DNA, 15 bp, Homo sapiens
gaaaacagctgtcag

SEQ ID NO: 1195295 - DNA, 15 bp, Homo sapiens
tgaaaacagctgtca

SEQ ID NO: 1195296 - DNA, 15 bp, Homo sapiens
ctgaaaacagctgtc

SEQ ID NO: 1195297 - DNA, 15 bp, Homo sapiens
cctgaaaacagctgt

SEQ ID NO: 1195298 - DNA, 15 bp, Homo sapiens
acctgaaaacagctg

SEQ ID NO: 1195299 - DNA, 15 bp, Homo sapiens
aacctgaaaacagct

SEQ ID NO: 1195300 - DNA, 15 bp, Homo sapiens
taacctgaaaacagc

SEQ ID NO: 1195301 - DNA, 15 bp, Homo sapiens
gtaacctgaaaacag

SEQ ID NO: 1195302 - DNA, 15 bp, Homo sapiens
ggtaacctgaaaaca

SEQ ID NO: 1195303 - DNA, 15 bp, Homo sapiens
gggtaacctgaaaac

SEQ ID NO: 1195304 - DNA, 15 bp, Homo sapiens
agggtaacctgaaaa

SEQ ID NO: 1195305 - DNA, 15 bp, Homo sapiens
gagggtaacctgaaa

SEQ ID NO: 1195306 - DNA, 15 bp, Homo sapiens
cgagggtaacctgaa

SEQ ID NO: 1195307 - DNA, 15 bp, Homo sapiens
gcgagggtaacctga

SEQ ID NO: 1195308 - DNA, 15 bp, Homo sapiens
tgcgagggtaacctg

SEQ ID NO: 1195309 - DNA, 15 bp, Homo sapiens
ttgcgagggtaacct

SEQ ID NO: 1195310 - DNA, 15 bp, Homo sapiens
gttgcgagggtaacc

SEQ ID NO: 1195311 - DNA, 15 bp, Homo sapiens
tgttgcgagggtaac

SEQ ID NO: 1195312 - DNA, 15 bp, Homo sapiens
ttgttgcgagggtaa

SEQ ID NO: 1195313 - DNA, 15 bp, Homo sapiens
gttgttgcgagggta

SEQ ID NO: 1195314 - DNA, 15 bp, Homo sapiens
cgttgttgcgagggt

SEQ ID NO: 1195315 - DNA, 15 bp, Homo sapiens
acgttgttgcgaggg

SEQ ID NO: 1195316 - DNA, 15 bp, Homo sapiens
cacgttgttgcgagg

SEQ ID NO: 1195317 - DNA, 15 bp, Homo sapiens
tcacgttgttgcgag

SEQ ID NO: 1195318 - DNA, 15 bp, Homo sapiens
gtcacgttgttgcga

SEQ ID NO: 1195319 - DNA, 15 bp, Homo sapiens
agtcacgttgttgcg

SEQ ID NO: 1195320 - DNA, 15 bp, Homo sapiens
cagtcacgttgttgc

SEQ ID NO: 1195321 - DNA, 15 bp, Homo sapiens
gcagtcacgttgttg

SEQ ID NO: 1195322 - DNA, 15 bp, Homo sapiens
ggcagtcacgttgtt

SEQ ID NO: 1195323 - DNA, 15 bp, Homo sapiens
tggcagtcacgttgt

SEQ ID NO: 1195324 - DNA, 15 bp, Homo sapiens
gtggcagtcacgttg

SEQ ID NO: 1195325 - DNA, 15 bp, Homo sapiens
ggtggcagtcacgtt

SEQ ID NO: 1195326 - DNA, 15 bp, Homo sapiens
aggtggcagtcacgt

SEQ ID NO: 1195327 - DNA, 15 bp, Homo sapiens
caggtggcagtcacg

SEQ ID NO: 1195328 - DNA, 15 bp, Homo sapiens
tcaggtggcagtcac

SEQ ID NO: 1195329 - DNA, 15 bp, Homo sapiens
ctcaggtggcagtca

SEQ ID NO: 1195330 - DNA, 15 bp, Homo sapiens
tctcaggtggcagtc

SEQ ID NO: 1195331 - DNA, 15 bp, Homo sapiens
ttctcaggtggcagt

SEQ ID NO: 1195332 - DNA, 15 bp, Homo sapiens
cttctcaggtggcag

SEQ ID NO: 1195333 - DNA, 15 bp, Homo sapiens
acttctcaggtggca

SEQ ID NO: 1195334 - DNA, 15 bp, Homo sapiens
aacttctcaggtggc

SEQ ID NO: 1195335 - DNA, 15 bp, Homo sapiens
caacttctcaggtgg

SEQ ID NO: 1195336 - DNA, 15 bp, Homo sapiens
gcaacttctcaggtg

SEQ ID NO: 1195337 - DNA, 15 bp, Homo sapiens
agcaacttctcaggt

SEQ ID NO: 1195338 - DNA, 15 bp, Homo sapiens
cagcaacttctcagg

SEQ ID NO: 1195339 - DNA, 15 bp, Homo sapiens
ccagcaacttctcag

SEQ ID NO: 1195340 - DNA, 15 bp, Homo sapiens
cccagcaacttctca

SEQ ID NO: 1195341 - DNA, 15 bp, Homo sapiens
ccccagcaacttctc

SEQ ID NO: 1195342 - DNA, 15 bp, Homo sapiens
gccccagcaacttct

SEQ ID NO: 1195343 - DNA, 15 bp, Homo sapiens
agccccagcaacttc

SEQ ID NO: 1195344 - DNA, 15 bp, Homo sapiens
aagccccagcaactt

SEQ ID NO: 1195345 - DNA, 15 bp, Homo sapiens
aaagccccagcaact

SEQ ID NO: 1195346 - DNA, 15 bp, Homo sapiens
gaaagccccagcaac

SEQ ID NO: 1195347 - DNA, 15 bp, Homo sapiens
cgaaagccccagcaa

SEQ ID NO: 1195348 - DNA, 15 bp, Homo sapiens
tcgaaagccccagca

SEQ ID NO: 1195349 - DNA, 15 bp, Homo sapiens
atcgaaagccccagc

SEQ ID NO: 1195350 - DNA, 15 bp, Homo sapiens
gatcgaaagccccag

SEQ ID NO: 1195351 - DNA, 15 bp, Homo sapiens
agatcgaaagcccca

SEQ ID NO: 1195352 - DNA, 15 bp, Homo sapiens
tagatcgaaagcccc

SEQ ID NO: 1195353 - DNA, 15 bp, Homo sapiens
ctagatcgaaagccc

SEQ ID NO: 1195354 - DNA, 15 bp, Homo sapiens
actagatcgaaagcc

SEQ ID NO: 1195355 - DNA, 15 bp, Homo sapiens
cactagatcgaaagc

SEQ ID NO: 1195356 - DNA, 15 bp, Homo sapiens
gcactagatcgaaag

SEQ ID NO: 1195357 - DNA, 15 bp, Homo sapiens
agcactagatcgaaa

SEQ ID NO: 1195358 - DNA, 15 bp, Homo sapiens
aagcactagatcgaa

SEQ ID NO: 1195359 - DNA, 15 bp, Homo sapiens
taagcactagatcga

SEQ ID NO: 1195360 - DNA, 15 bp, Homo sapiens
ctaagcactagatcg

SEQ ID NO: 1195361 - DNA, 15 bp, Homo sapiens
gctaagcactagatc

SEQ ID NO: 1195362 - DNA, 15 bp, Homo sapiens
tgctaagcactagat

SEQ ID NO: 1195363 - DNA, 15 bp, Homo sapiens
atgctaagcactaga

SEQ ID NO: 1195364 - DNA, 15 bp, Homo sapiens
tatgctaagcactag

SEQ ID NO: 1195365 - DNA, 15 bp, Homo sapiens
atatgctaagcacta

SEQ ID NO: 1195366 - DNA, 15 bp, Homo sapiens
tatatgctaagcact

SEQ ID NO: 1195367 - DNA, 15 bp, Homo sapiens
atatatgctaagcac

SEQ ID NO: 1195368 - DNA, 15 bp, Homo sapiens
tatatatgctaagca

SEQ ID NO: 1195369 - DNA, 15 bp, Homo sapiens
ttatatatgctaagc

SEQ ID NO: 1195370 - DNA, 15 bp, Homo sapiens
cttatatatgctaag

SEQ ID NO: 1195371 - DNA, 15 bp, Homo sapiens
acttatatatgctaa

SEQ ID NO: 1195372 - DNA, 15 bp, Homo sapiens
aacttatatatgcta

SEQ ID NO: 1195373 - DNA, 15 bp, Homo sapiens
aaacttatatatgct

SEQ ID NO: 1195374 - DNA, 15 bp, Homo sapiens
taaacttatatatgc

SEQ ID NO: 1195375 - DNA, 15 bp, Homo sapiens
gtaaacttatatatg

SEQ ID NO: 1195376 - DNA, 15 bp, Homo sapiens
agtaaacttatatat

SEQ ID NO: 1195377 - DNA, 15 bp, Homo sapiens
gagtaaacttatata

SEQ ID NO: 1195378 - DNA, 15 bp, Homo sapiens
tgagtaaacttatat

SEQ ID NO: 1195379 - DNA, 15 bp, Homo sapiens
atgagtaaacttata

SEQ ID NO: 1195380 - DNA, 15 bp, Homo sapiens
tatgagtaaacttat

SEQ ID NO: 1195381 - DNA, 15 bp, Homo sapiens
atatgagtaaactta

SEQ ID NO: 1195382 - DNA, 15 bp, Homo sapiens
tatatgagtaaactt

SEQ ID NO: 1195383 - DNA, 15 bp, Homo sapiens
ttatatgagtaaact

SEQ ID NO: 1195384 - DNA, 15 bp, Homo sapiens
cttatatgagtaaac

SEQ ID NO: 1195385 - DNA, 15 bp, Homo sapiens
ccttatatgagtaaa

SEQ ID NO: 1195386 - DNA, 15 bp, Homo sapiens
tccttatatgagtaa

SEQ ID NO: 1195387 - DNA, 15 bp, Homo sapiens
gtccttatatgagta

SEQ ID NO: 1195388 - DNA, 15 bp, Homo sapiens
tgtccttatatgagt

SEQ ID NO: 1195389 - DNA, 15 bp, Homo sapiens
ctgtccttatatgag

SEQ ID NO: 1195390 - DNA, 15 bp, Homo sapiens
tctgtccttatatga

SEQ ID NO: 1195391 - DNA, 15 bp, Homo sapiens
atctgtccttatatg

SEQ ID NO: 1195392 - DNA, 15 bp, Homo sapiens
aatctgtccttatat

SEQ ID NO: 1195393 - DNA, 15 bp, Homo sapiens
gaatctgtccttata

SEQ ID NO: 1195394 - DNA, 15 bp, Homo sapiens
agaatctgtccttat

SEQ ID NO: 1195395 - DNA, 15 bp, Homo sapiens
cagaatctgtcctta

SEQ ID NO: 1195396 - DNA, 15 bp, Homo sapiens
acagaatctgtcctt

SEQ ID NO: 1195397 - DNA, 15 bp, Homo sapiens
tacagaatctgtcct

SEQ ID NO: 1195398 - DNA, 15 bp, Homo sapiens
gtacagaatctgtcc

SEQ ID NO: 1195399 - DNA, 15 bp, Homo sapiens
tgtacagaatctgtc

SEQ ID NO: 1195400 - DNA, 15 bp, Homo sapiens
ttgtacagaatctgt

SEQ ID NO: 1195401 - DNA, 15 bp, Homo sapiens
gttgtacagaatctg

SEQ ID NO: 1195402 - DNA, 15 bp, Homo sapiens
cgttgtacagaatct

SEQ ID NO: 1195403 - DNA, 15 bp, Homo sapiens
acgttgtacagaatc

SEQ ID NO: 1195404 - DNA, 15 bp, Homo sapiens
gacgttgtacagaat

SEQ ID NO: 1195405 - DNA, 15 bp, Homo sapiens
agacgttgtacagaa

SEQ ID NO: 1195406 - DNA, 15 bp, Homo sapiens
gagacgttgtacaga

SEQ ID NO: 1195407 - DNA, 15 bp, Homo sapiens
tgagacgttgtacag

SEQ ID NO: 1195408 - DNA, 15 bp, Homo sapiens
atgagacgttgtaca

SEQ ID NO: 1195409 - DNA, 15 bp, Homo sapiens
aatgagacgttgtac

SEQ ID NO: 1195410 - DNA, 15 bp, Homo sapiens
aaatgagacgttgta

SEQ ID NO: 1195411 - DNA, 15 bp, Homo sapiens
aaaatgagacgttgt

SEQ ID NO: 1195412 - DNA, 15 bp, Homo sapiens
taaaatgagacgttg

SEQ ID NO: 1195413 - DNA, 15 bp, Homo sapiens
ataaaatgagacgtt

SEQ ID NO: 1195414 - DNA, 15 bp, Homo sapiens
gataaaatgagacgt

SEQ ID NO: 1195415 - DNA, 15 bp, Homo sapiens
tgataaaatgagacg

SEQ ID NO: 1195416 - DNA, 15 bp, Homo sapiens
ttgataaaatgagac

SEQ ID NO: 1195417 - DNA, 15 bp, Homo sapiens
tttgataaaatgaga

SEQ ID NO: 1195418 - DNA, 15 bp, Homo sapiens
atttgataaaatgag

SEQ ID NO: 1195419 - DNA, 15 bp, Homo sapiens
tatttgataaaatga

SEQ ID NO: 1195420 - DNA, 15 bp, Homo sapiens
ttatttgataaaatg

SEQ ID NO: 1195421 - DNA, 15 bp, Homo sapiens
tttatttgataaaat

SEQ ID NO: 1195422 - DNA, 15 bp, Homo sapiens
ttttatttgataaaa

SEQ ID NO: 1195423 - DNA, 15 bp, Homo sapiens
gttttatttgataaa

SEQ ID NO: 1195424 - DNA, 15 bp, Homo sapiens
agttttatttgataa

SEQ ID NO: 1195425 - DNA, 15 bp, Homo sapiens
tagttttatttgata

SEQ ID NO: 1195426 - DNA, 15 bp, Homo sapiens
ttagttttatttgat

SEQ ID NO: 1195427 - DNA, 15 bp, Homo sapiens
tttagttttatttga

SEQ ID NO: 1195428 - DNA, 15 bp, Homo sapiens
ttttagttttatttg

SEQ ID NO: 1195429 - DNA, 15 bp, Homo sapiens
gattttagttttatt

SEQ ID NO: 1195430 - DNA, 15 bp, Homo sapiens
agattttagttttat

SEQ ID NO: 1195431 - DNA, 15 bp, Homo sapiens
tagattttagtttta

SEQ ID NO: 1195432 - DNA, 15 bp, Homo sapiens
ttagattttagtttt

SEQ ID NO: 1195433 - DNA, 15 bp, Homo sapiens
cttagattttagttt

SEQ ID NO: 1195434 - DNA, 15 bp, Homo sapiens
acttagattttagtt

SEQ ID NO: 1195435 - DNA, 15 bp, Homo sapiens
aacttagattttagt

SEQ ID NO: 1195436 - DNA, 15 bp, Homo sapiens
aaacttagattttag

SEQ ID NO: 1195437 - DNA, 15 bp, Homo sapiens
caaacttagatttta

SEQ ID NO: 1195438 - DNA, 15 bp, Homo sapiens
gcaaacttagatttt

SEQ ID NO: 1195439 - DNA, 15 bp, Homo sapiens
agcaaacttagattt

SEQ ID NO: 1195440 - DNA, 15 bp, Homo sapiens
aagcaaacttagatt

SEQ ID NO: 1195441 - DNA, 15 bp, Homo sapiens
caagcaaacttagat

SEQ ID NO: 1195442 - DNA, 15 bp, Homo sapiens
acaagcaaacttaga

SEQ ID NO: 1195443 - DNA, 15 bp, Homo sapiens
aacaagcaaacttag

SEQ ID NO: 1195444 - DNA, 15 bp, Homo sapiens
aaacaagcaaactta

SEQ ID NO: 1195445 - DNA, 15 bp, Homo sapiens
caaacaagcaaactt

SEQ ID NO: 1195446 - DNA, 15 bp, Homo sapiens
acaaacaagcaaact

SEQ ID NO: 1195447 - DNA, 15 bp, Homo sapiens
taaaaacaaacaagc

SEQ ID NO: 1195448 - DNA, 15 bp, Homo sapiens
ctaaaaacaaacaag

SEQ ID NO: 1195449 - DNA, 15 bp, Homo sapiens
tctaaaaacaaacaa

SEQ ID NO: 1195450 - DNA, 15 bp, Homo sapiens
ttctaaaaacaaaca

SEQ ID NO: 1195451 - DNA, 15 bp, Homo sapiens
tttctaaaaacaaac

SEQ ID NO: 1195452 - DNA, 15 bp, Homo sapiens
ttttctaaaaacaaa

SEQ ID NO: 1195453 - DNA, 15 bp, Homo sapiens
tttttctaaaaacaa

SEQ ID NO: 1195454 - DNA, 15 bp, Homo sapiens
atttttctaaaaaca

SEQ ID NO: 1195455 - DNA, 15 bp, Homo sapiens
gatttttctaaaaac

SEQ ID NO: 1195456 - DNA, 15 bp, Homo sapiens
agatttttctaaaaa

SEQ ID NO: 1195457 - DNA, 15 bp, Homo sapiens
tagatttttctaaaa

SEQ ID NO: 1195458 - DNA, 15 bp, Homo sapiens
ctagatttttctaaa

SEQ ID NO: 1195459 - DNA, 15 bp, Homo sapiens
cctagatttttctaa

SEQ ID NO: 1195460 - DNA, 15 bp, Homo sapiens
gcctagatttttcta

SEQ ID NO: 1195461 - DNA, 15 bp, Homo sapiens
ggcctagatttttct

SEQ ID NO: 1195462 - DNA, 15 bp, Homo sapiens
tggcctagatttttc

SEQ ID NO: 1195463 - DNA, 15 bp, Homo sapiens
ctggcctagattttt

SEQ ID NO: 1195464 - DNA, 15 bp, Homo sapiens
cctggcctagatttt

SEQ ID NO: 1195465 - DNA, 15 bp, Homo sapiens
gcctggcctagattt

SEQ ID NO: 1195466 - DNA, 15 bp, Homo sapiens
cgcctggcctagatt

SEQ ID NO: 1195467 - DNA, 15 bp, Homo sapiens
gcgcctggcctagat

SEQ ID NO: 1195468 - DNA, 15 bp, Homo sapiens
tgcgcctggcctaga

SEQ ID NO: 1195469 - DNA, 15 bp, Homo sapiens
gtgcgcctggcctag

SEQ ID NO: 1195470 - DNA, 15 bp, Homo sapiens
agtgcgcctggccta

SEQ ID NO: 1195471 - DNA, 15 bp, Homo sapiens
cagtgcgcctggcct

SEQ ID NO: 1195472 - DNA, 15 bp, Homo sapiens
ccagtgcgcctggcc

SEQ ID NO: 1195473 - DNA, 15 bp, Homo sapiens
gccagtgcgcctggc

SEQ ID NO: 1195474 - DNA, 15 bp, Homo sapiens
agccagtgcgcctgg

SEQ ID NO: 1195475 - DNA, 15 bp, Homo sapiens
gagccagtgcgcctg

SEQ ID NO: 1195476 - DNA, 15 bp, Homo sapiens
tgagccagtgcgcct

SEQ ID NO: 1195477 - DNA, 15 bp, Homo sapiens
atgagccagtgcgcc

SEQ ID NO: 1195478 - DNA, 15 bp, Homo sapiens
catgagccagtgcgc

SEQ ID NO: 1195479 - DNA, 15 bp, Homo sapiens
gcatgagccagtgcg

SEQ ID NO: 1195480 - DNA, 15 bp, Homo sapiens
ggcatgagccagtgc

SEQ ID NO: 1195481 - DNA, 15 bp, Homo sapiens
aggcatgagccagtg

SEQ ID NO: 1195482 - DNA, 15 bp, Homo sapiens
caggcatgagccagt

SEQ ID NO: 1195483 - DNA, 15 bp, Homo sapiens
acaggcatgagccag

SEQ ID NO: 1195484 - DNA, 15 bp, Homo sapiens
tccgccttggcctcc

SEQ ID NO: 1195485 - DNA, 15 bp, Homo sapiens
atccgccttggcctc

SEQ ID NO: 1195486 - DNA, 15 bp, Homo sapiens
catccgccttggcct

SEQ ID NO: 1195487 - DNA, 15 bp, Homo sapiens
ccatccgccttggcc

SEQ ID NO: 1195488 - DNA, 15 bp, Homo sapiens
tccatccgccttggc

SEQ ID NO: 1195489 - DNA, 15 bp, Homo sapiens
atccatccgccttgg

SEQ ID NO: 1195490 - DNA, 15 bp, Homo sapiens
gatccatccgccttg

SEQ ID NO: 1195491 - DNA, 15 bp, Homo sapiens
tgatccatccgcctt

SEQ ID NO: 1195492 - DNA, 15 bp, Homo sapiens
gtgatccatccgcct

SEQ ID NO: 1195493 - DNA, 15 bp, Homo sapiens
cgtgatccatccgcc

SEQ ID NO: 1195494 - DNA, 15 bp, Homo sapiens
tcgtgatccatccgc

SEQ ID NO: 1195495 - DNA, 15 bp, Homo sapiens
ctcgtgatccatccg

SEQ ID NO: 1195496 - DNA, 15 bp, Homo sapiens
cctcgtgatccatcc

SEQ ID NO: 1195497 - DNA, 15 bp, Homo sapiens
acctcgtgatccatc

SEQ ID NO: 1195498 - DNA, 15 bp, Homo sapiens
gacctcgtgatccat

SEQ ID NO: 1195499 - DNA, 15 bp, Homo sapiens
cggggtttcaccatc

SEQ ID NO: 1195500 - DNA, 15 bp, Homo sapiens
aacggggtttcacca

SEQ ID NO: 1195501 - DNA, 15 bp, Homo sapiens
aaacggggtttcacc

SEQ ID NO: 1195502 - DNA, 15 bp, Homo sapiens
gaaacggggtttcac

SEQ ID NO: 1195503 - DNA, 15 bp, Homo sapiens
agaaacggggtttca

SEQ ID NO: 1195504 - DNA, 15 bp, Homo sapiens
ttttttagtagaaac

SEQ ID NO: 1195505 - DNA, 15 bp, Homo sapiens
cttttttagtagaaa

SEQ ID NO: 1195506 - DNA, 15 bp, Homo sapiens
gcttttttagtagaa

SEQ ID NO: 1195507 - DNA, 15 bp, Homo sapiens
tgcttttttagtaga

SEQ ID NO: 1195508 - DNA, 15 bp, Homo sapiens
ttgcttttttagtag

SEQ ID NO: 1195509 - DNA, 15 bp, Homo sapiens
tttgcttttttagta

SEQ ID NO: 1195510 - DNA, 15 bp, Homo sapiens
ttttgcttttttagt

SEQ ID NO: 1195511 - DNA, 15 bp, Homo sapiens
tttttgcttttttag

SEQ ID NO: 1195512 - DNA, 15 bp, Homo sapiens
ttttttgctttttta

SEQ ID NO: 1195513 - DNA, 15 bp, Homo sapiens
tttttttgctttttt

SEQ ID NO: 1195514 - DNA, 15 bp, Homo sapiens
ttttttttgcttttt

SEQ ID NO: 1195515 - DNA, 15 bp, Homo sapiens
attttttttgctttt

SEQ ID NO: 1195516 - DNA, 15 bp, Homo sapiens
aattttttttgcttt

SEQ ID NO: 1195517 - DNA, 15 bp, Homo sapiens
taattttttttgctt

SEQ ID NO: 1195518 - DNA, 15 bp, Homo sapiens
ctaattttttttgct

SEQ ID NO: 1195519 - DNA, 15 bp, Homo sapiens
ggctaattttttttg

SEQ ID NO: 1195520 - DNA, 15 bp, Homo sapiens
tgagtggctgggatt

SEQ ID NO: 1195521 - DNA, 15 bp, Homo sapiens
ctgagtggctgggat

SEQ ID NO: 1195522 - DNA, 15 bp, Homo sapiens
cctgagtggctggga

SEQ ID NO: 1195523 - DNA, 15 bp, Homo sapiens
tcctgagtggctggg

SEQ ID NO: 1195524 - DNA, 15 bp, Homo sapiens
ctcctgagtggctgg

SEQ ID NO: 1195525 - DNA, 15 bp, Homo sapiens
cctcctgagtggctg

SEQ ID NO: 1195526 - DNA, 15 bp, Homo sapiens
gcctcctgagtggct

SEQ ID NO: 1195527 - DNA, 15 bp, Homo sapiens
agcctcctgagtggc

SEQ ID NO: 1195528 - DNA, 15 bp, Homo sapiens
cagcctcctgagtgg

SEQ ID NO: 1195529 - DNA, 15 bp, Homo sapiens
tcagcctcctgagtg

SEQ ID NO: 1195530 - DNA, 15 bp, Homo sapiens
ttcagcctcctgagt

SEQ ID NO: 1195531 - DNA, 15 bp, Homo sapiens
cttcagcctcctgag

SEQ ID NO: 1195532 - DNA, 15 bp, Homo sapiens
gcttcagcctcctga

SEQ ID NO: 1195533 - DNA, 15 bp, Homo sapiens
ctgcttcagcctcct

SEQ ID NO: 1195534 - DNA, 15 bp, Homo sapiens
tctgcttcagcctcc

SEQ ID NO: 1195535 - DNA, 15 bp, Homo sapiens
ctctgcttcagcctc

SEQ ID NO: 1195536 - DNA, 15 bp, Homo sapiens
tctctgcttcagcct

SEQ ID NO: 1195537 - DNA, 15 bp, Homo sapiens
ttctctgcttcagcc

SEQ ID NO: 1195538 - DNA, 15 bp, Homo sapiens
attctctgcttcagc

SEQ ID NO: 1195539 - DNA, 15 bp, Homo sapiens
aattctctgcttcag

SEQ ID NO: 1195540 - DNA, 15 bp, Homo sapiens
caattctctgcttca

SEQ ID NO: 1195541 - DNA, 15 bp, Homo sapiens
gcaattctctgcttc

SEQ ID NO: 1195542 - DNA, 15 bp, Homo sapiens
agcaattctctgctt

SEQ ID NO: 1195543 - DNA, 15 bp, Homo sapiens
aagcaattctctgct

SEQ ID NO: 1195544 - DNA, 15 bp, Homo sapiens
tacaacctccgcctc

SEQ ID NO: 1195545 - DNA, 15 bp, Homo sapiens
ctacaacctccgcct

SEQ ID NO: 1195546 - DNA, 15 bp, Homo sapiens
actacaacctccgcc

SEQ ID NO: 1195547 - DNA, 15 bp, Homo sapiens
cactacaacctccgc

SEQ ID NO: 1195548 - DNA, 15 bp, Homo sapiens
tcactacaacctccg

SEQ ID NO: 1195549 - DNA, 15 bp, Homo sapiens
cctcggctcactaca

SEQ ID NO: 1195550 - DNA, 15 bp, Homo sapiens
acctcggctcactac

SEQ ID NO: 1195551 - DNA, 15 bp, Homo sapiens
gacctcggctcacta

SEQ ID NO: 1195552 - DNA, 15 bp, Homo sapiens
tgacctcggctcact

SEQ ID NO: 1195553 - DNA, 15 bp, Homo sapiens
atgacctcggctcac

SEQ ID NO: 1195554 - DNA, 15 bp, Homo sapiens
catgacctcggctca

SEQ ID NO: 1195555 - DNA, 15 bp, Homo sapiens
gcatgacctcggctc

SEQ ID NO: 1195556 - DNA, 15 bp, Homo sapiens
ggcatgacctcggct

SEQ ID NO: 1195557 - DNA, 15 bp, Homo sapiens
tggcatgacctcggc

SEQ ID NO: 1195558 - DNA, 15 bp, Homo sapiens
gtggcatgacctcgg

SEQ ID NO: 1195559 - DNA, 15 bp, Homo sapiens
agtggcatgacctcg

SEQ ID NO: 1195560 - DNA, 15 bp, Homo sapiens
cagtggcatgacctc

SEQ ID NO: 1195561 - DNA, 15 bp, Homo sapiens
gcagtggcatgacct

SEQ ID NO: 1195562 - DNA, 15 bp, Homo sapiens
tgcagtggcatgacc

SEQ ID NO: 1195563 - DNA, 15 bp, Homo sapiens
gtgcagtggcatgac

SEQ ID NO: 1195564 - DNA, 15 bp, Homo sapiens
acactgtcgcccagg

SEQ ID NO: 1195565 - DNA, 15 bp, Homo sapiens
cacactgtcgcccag

SEQ ID NO: 1195566 - DNA, 15 bp, Homo sapiens
tcacactgtcgccca

SEQ ID NO: 1195567 - DNA, 15 bp, Homo sapiens
ctcacactgtcgccc

SEQ ID NO: 1195568 - DNA, 15 bp, Homo sapiens
tctcacactgtcgcc

SEQ ID NO: 1195569 - DNA, 15 bp, Homo sapiens
gtctcacactgtcgc

SEQ ID NO: 1195570 - DNA, 15 bp, Homo sapiens
agtctcacactgtcg

SEQ ID NO: 1195571 - DNA, 15 bp, Homo sapiens
gagtctcacactgtc

SEQ ID NO: 1195572 - DNA, 15 bp, Homo sapiens
cgagtctcacactgt

SEQ ID NO: 1195573 - DNA, 15 bp, Homo sapiens
acgagtctcacactg

SEQ ID NO: 1195574 - DNA, 15 bp, Homo sapiens
gacgagtctcacact

SEQ ID NO: 1195575 - DNA, 15 bp, Homo sapiens
agacgagtctcacac

SEQ ID NO: 1195576 - DNA, 15 bp, Homo sapiens
aagacgagtctcaca

SEQ ID NO: 1195577 - DNA, 15 bp, Homo sapiens
taagacgagtctcac

SEQ ID NO: 1195578 - DNA, 15 bp, Homo sapiens
ttaagacgagtctca

SEQ ID NO: 1195579 - DNA, 15 bp, Homo sapiens
tttaagacgagtctc

SEQ ID NO: 1195580 - DNA, 15 bp, Homo sapiens
ttttaagacgagtct

SEQ ID NO: 1195581 - DNA, 15 bp, Homo sapiens
tttttaagacgagtc

SEQ ID NO: 1195582 - DNA, 15 bp, Homo sapiens
ttttttaagacgagt

SEQ ID NO: 1195583 - DNA, 15 bp, Homo sapiens
tttttttaagacgag

SEQ ID NO: 1195584 - DNA, 15 bp, Homo sapiens
ttttttttaagacga

SEQ ID NO: 1195585 - DNA, 15 bp, Homo sapiens
tttttttttaagacg

SEQ ID NO: 1195586 - DNA, 15 bp, Homo sapiens
ttttttttttaagac

SEQ ID NO: 1195587 - DNA, 15 bp, Homo sapiens
cttttttttttaaga

SEQ ID NO: 1195588 - DNA, 15 bp, Homo sapiens
tcttttttttttaag

SEQ ID NO: 1195589 - DNA, 15 bp, Homo sapiens
ttcttttttttttaa

SEQ ID NO: 1195590 - DNA, 15 bp, Homo sapiens
tttctttttttttta

SEQ ID NO: 1195591 - DNA, 15 bp, Homo sapiens
tctttttcttttttt

SEQ ID NO: 1195592 - DNA, 15 bp, Homo sapiens
ttctttttctttttt

SEQ ID NO: 1195593 - DNA, 15 bp, Homo sapiens
cttttctttttcttt

SEQ ID NO: 1195594 - DNA, 15 bp, Homo sapiens
tcttttctttttctt

SEQ ID NO: 1195595 - DNA, 15 bp, Homo sapiens
ttcttttctttttct

SEQ ID NO: 1195596 - DNA, 15 bp, Homo sapiens
tttcttttctttttc

SEQ ID NO: 1195597 - DNA, 15 bp, Homo sapiens
atttttcttttcttt

SEQ ID NO: 1195598 - DNA, 15 bp, Homo sapiens
agatttttcttttct

SEQ ID NO: 1195599 - DNA, 15 bp, Homo sapiens
tagatttttcttttc

SEQ ID NO: 1195600 - DNA, 15 bp, Homo sapiens
ttagatttttctttt

SEQ ID NO: 1195601 - DNA, 15 bp, Homo sapiens
cttagatttttcttt

SEQ ID NO: 1195602 - DNA, 15 bp, Homo sapiens
acttagatttttctt

SEQ ID NO: 1195603 - DNA, 15 bp, Homo sapiens
tacttagatttttct

SEQ ID NO: 1195604 - DNA, 15 bp, Homo sapiens
atacttagatttttc

SEQ ID NO: 1195605 - DNA, 15 bp, Homo sapiens
aatacttagattttt

SEQ ID NO: 1195606 - DNA, 15 bp, Homo sapiens
aaatacttagatttt

SEQ ID NO: 1195607 - DNA, 15 bp, Homo sapiens
caaatacttagattt

SEQ ID NO: 1195608 - DNA, 15 bp, Homo sapiens
tcaaatacttagatt

SEQ ID NO: 1195609 - DNA, 15 bp, Homo sapiens
ctcaaatacttagat

SEQ ID NO: 1195610 - DNA, 15 bp, Homo sapiens
actcaaatacttaga

SEQ ID NO: 1195611 - DNA, 15 bp, Homo sapiens
cactcaaatacttag

SEQ ID NO: 1195612 - DNA, 15 bp, Homo sapiens
tcactcaaatactta

SEQ ID NO: 1195613 - DNA, 15 bp, Homo sapiens
atcactcaaatactt

SEQ ID NO: 1195614 - DNA, 15 bp, Homo sapiens
catcactcaaatact

SEQ ID NO: 1195615 - DNA, 15 bp, Homo sapiens
ccatcactcaaatac

SEQ ID NO: 1195616 - DNA, 15 bp, Homo sapiens
accatcactcaaata

SEQ ID NO: 1195617 - DNA, 15 bp, Homo sapiens
caccatcactcaaat

SEQ ID NO: 1195618 - DNA, 15 bp, Homo sapiens
tcaccatcactcaaa

SEQ ID NO: 1195619 - DNA, 15 bp, Homo sapiens
ttcaccatcactcaa

SEQ ID NO: 1195620 - DNA, 15 bp, Homo sapiens
attcaccatcactca

SEQ ID NO: 1195621 - DNA, 15 bp, Homo sapiens
aattcaccatcactc

SEQ ID NO: 1195622 - DNA, 15 bp, Homo sapiens
aaattcaccatcact

SEQ ID NO: 1195623 - DNA, 15 bp, Homo sapiens
caaattcaccatcac

SEQ ID NO: 1195624 - DNA, 15 bp, Homo sapiens
gcaaattcaccatca

SEQ ID NO: 1195625 - DNA, 15 bp, Homo sapiens
ggcaaattcaccatc

SEQ ID NO: 1195626 - DNA, 15 bp, Homo sapiens
tggcaaattcaccat

SEQ ID NO: 1195627 - DNA, 15 bp, Homo sapiens
ttggcaaattcacca

SEQ ID NO: 1195628 - DNA, 15 bp, Homo sapiens
gttggcaaattcacc

SEQ ID NO: 1195629 - DNA, 15 bp, Homo sapiens
agttggcaaattcac

SEQ ID NO: 1195630 - DNA, 15 bp, Homo sapiens
gagttggcaaattca

SEQ ID NO: 1195631 - DNA, 15 bp, Homo sapiens
agagttggcaaattc

SEQ ID NO: 1195632 - DNA, 15 bp, Homo sapiens
aagagttggcaaatt

SEQ ID NO: 1195633 - DNA, 15 bp, Homo sapiens
taagagttggcaaat

SEQ ID NO: 1195634 - DNA, 15 bp, Homo sapiens
ttaagagttggcaaa

SEQ ID NO: 1195635 - DNA, 15 bp, Homo sapiens
gttaagagttggcaa

SEQ ID NO: 1195636 - DNA, 15 bp, Homo sapiens
tgttaagagttggca

SEQ ID NO: 1195637 - DNA, 15 bp, Homo sapiens
atgttaagagttggc

SEQ ID NO: 1195638 - DNA, 15 bp, Homo sapiens
aatgttaagagttgg

SEQ ID NO: 1195639 - DNA, 15 bp, Homo sapiens
gaatgttaagagttg

SEQ ID NO: 1195640 - DNA, 15 bp, Homo sapiens
agaatgttaagagtt

SEQ ID NO: 1195641 - DNA, 15 bp, Homo sapiens
aagaatgttaagagt

SEQ ID NO: 1195642 - DNA, 15 bp, Homo sapiens
taagaatgttaagag

SEQ ID NO: 1195643 - DNA, 15 bp, Homo sapiens
gtaagaatgttaaga

SEQ ID NO: 1195644 - DNA, 15 bp, Homo sapiens
tgtaagaatgttaag

SEQ ID NO: 1195645 - DNA, 15 bp, Homo sapiens
atgtaagaatgttaa

SEQ ID NO: 1195646 - DNA, 15 bp, Homo sapiens
gatgtaagaatgtta

SEQ ID NO: 1195647 - DNA, 15 bp, Homo sapiens
tgatgtaagaatgtt

SEQ ID NO: 1195648 - DNA, 15 bp, Homo sapiens
ctgatgtaagaatgt

SEQ ID NO: 1195649 - DNA, 15 bp, Homo sapiens
tctgatgtaagaatg

SEQ ID NO: 1195650 - DNA, 15 bp, Homo sapiens
gtctgatgtaagaat

SEQ ID NO: 1195651 - DNA, 15 bp, Homo sapiens
agtctgatgtaagaa

SEQ ID NO: 1195652 - DNA, 15 bp, Homo sapiens
aagtctgatgtaaga

SEQ ID NO: 1195653 - DNA, 15 bp, Homo sapiens
caagtctgatgtaag

SEQ ID NO: 1195654 - DNA, 15 bp, Homo sapiens
acaagtctgatgtaa

SEQ ID NO: 1195655 - DNA, 15 bp, Homo sapiens
cacaagtctgatgta

SEQ ID NO: 1195656 - DNA, 15 bp, Homo sapiens
acacaagtctgatgt

SEQ ID NO: 1195657 - DNA, 15 bp, Homo sapiens
cacacaagtctgatg

SEQ ID NO: 1195658 - DNA, 15 bp, Homo sapiens
acacacaagtctgat

SEQ ID NO: 1195659 - DNA, 15 bp, Homo sapiens
aacacacaagtctga

SEQ ID NO: 1195660 - DNA, 15 bp, Homo sapiens
gaacacacaagtctg

SEQ ID NO: 1195661 - DNA, 15 bp, Homo sapiens
tgaacacacaagtct

SEQ ID NO: 1195662 - DNA, 15 bp, Homo sapiens
ttgaacacacaagtc

SEQ ID NO: 1195663 - DNA, 15 bp, Homo sapiens
tttgaacacacaagt

SEQ ID NO: 1195664 - DNA, 15 bp, Homo sapiens
atttgaacacacaag

SEQ ID NO: 1195665 - DNA, 15 bp, Homo sapiens
catttgaacacacaa

SEQ ID NO: 1195666 - DNA, 15 bp, Homo sapiens
ccatttgaacacaca

SEQ ID NO: 1195667 - DNA, 15 bp, Homo sapiens
cccatttgaacacac

SEQ ID NO: 1195668 - DNA, 15 bp, Homo sapiens
ccccatttgaacaca

SEQ ID NO: 1195669 - DNA, 15 bp, Homo sapiens
gccccatttgaacac

SEQ ID NO: 1195670 - DNA, 15 bp, Homo sapiens
agccccatttgaaca

SEQ ID NO: 1195671 - DNA, 15 bp, Homo sapiens
tagccccatttgaac

SEQ ID NO: 1195672 - DNA, 15 bp, Homo sapiens
atagccccatttgaa

SEQ ID NO: 1195673 - DNA, 15 bp, Homo sapiens
gatagccccatttga

SEQ ID NO: 1195674 - DNA, 15 bp, Homo sapiens
agatagccccatttg

SEQ ID NO: 1195675 - DNA, 15 bp, Homo sapiens
tagatagccccattt

SEQ ID NO: 1195676 - DNA, 15 bp, Homo sapiens
ctagatagccccatt

SEQ ID NO: 1195677 - DNA, 15 bp, Homo sapiens
actagatagccccat

SEQ ID NO: 1195678 - DNA, 15 bp, Homo sapiens
cactagatagcccca

SEQ ID NO: 1195679 - DNA, 15 bp, Homo sapiens
tcactagatagcccc

SEQ ID NO: 1195680 - DNA, 15 bp, Homo sapiens
atcactagatagccc

SEQ ID NO: 1195681 - DNA, 15 bp, Homo sapiens
tatcactagatagcc

SEQ ID NO: 1195682 - DNA, 15 bp, Homo sapiens
gtatcactagatagc

SEQ ID NO: 1195683 - DNA, 15 bp, Homo sapiens
tgtatcactagatag

SEQ ID NO: 1195684 - DNA, 15 bp, Homo sapiens
atgtatcactagata

SEQ ID NO: 1195685 - DNA, 15 bp, Homo sapiens
catgtatcactagat

SEQ ID NO: 1195686 - DNA, 15 bp, Homo sapiens
ccatgtatcactaga

SEQ ID NO: 1195687 - DNA, 15 bp, Homo sapiens
cccatgtatcactag

SEQ ID NO: 1195688 - DNA, 15 bp, Homo sapiens
tcccatgtatcacta

SEQ ID NO: 1195689 - DNA, 15 bp, Homo sapiens
atcccatgtatcact

SEQ ID NO: 1195690 - DNA, 15 bp, Homo sapiens
catcccatgtatcac

SEQ ID NO: 1195691 - DNA, 15 bp, Homo sapiens
ccatcccatgtatca

SEQ ID NO: 1195692 - DNA, 15 bp, Homo sapiens
accatcccatgtatc

SEQ ID NO: 1195693 - DNA, 15 bp, Homo sapiens
caccatcccatgtat

SEQ ID NO: 1195694 - DNA, 15 bp, Homo sapiens
ccaccatcccatgta

SEQ ID NO: 1195695 - DNA, 15 bp, Homo sapiens
accaccatcccatgt

SEQ ID NO: 1195696 - DNA, 15 bp, Homo sapiens
caccaccatcccatg

SEQ ID NO: 1195697 - DNA, 15 bp, Homo sapiens
acaccaccatcccat

SEQ ID NO: 1195698 - DNA, 15 bp, Homo sapiens
gacaccaccatccca

SEQ ID NO: 1195699 - DNA, 15 bp, Homo sapiens
ggacaccaccatccc

SEQ ID NO: 1195700 - DNA, 15 bp, Homo sapiens
tggacaccaccatcc

SEQ ID NO: 1195701 - DNA, 15 bp, Homo sapiens
gtggacaccaccatc

SEQ ID NO: 1195702 - DNA, 15 bp, Homo sapiens
agtggacaccaccat

SEQ ID NO: 1195703 - DNA, 15 bp, Homo sapiens
aagtggacaccacca

SEQ ID NO: 1195704 - DNA, 15 bp, Homo sapiens
aaagtggacaccacc

SEQ ID NO: 1195705 - DNA, 15 bp, Homo sapiens
aaaagtggacaccac

SEQ ID NO: 1195706 - DNA, 15 bp, Homo sapiens
taaaagtggacacca

SEQ ID NO: 1195707 - DNA, 15 bp, Homo sapiens
ttaaaagtggacacc

SEQ ID NO: 1195708 - DNA, 15 bp, Homo sapiens
cttaaaagtggacac

SEQ ID NO: 1195709 - DNA, 15 bp, Homo sapiens
gcttaaaagtggaca

SEQ ID NO: 1195710 - DNA, 15 bp, Homo sapiens
tgcttaaaagtggac

SEQ ID NO: 1195711 - DNA, 15 bp, Homo sapiens
atgcttaaaagtgga

SEQ ID NO: 1195712 - DNA, 15 bp, Homo sapiens
aatgcttaaaagtgg

SEQ ID NO: 1195713 - DNA, 15 bp, Homo sapiens
aaatgcttaaaagtg

SEQ ID NO: 1195714 - DNA, 15 bp, Homo sapiens
aaaatgcttaaaagt

SEQ ID NO: 1195715 - DNA, 15 bp, Homo sapiens
gaaaatgcttaaaag

SEQ ID NO: 1195716 - DNA, 15 bp, Homo sapiens
ggaaaatgcttaaaa

SEQ ID NO: 1195717 - DNA, 15 bp, Homo sapiens
aggaaaatgcttaaa

SEQ ID NO: 1195718 - DNA, 15 bp, Homo sapiens
caggaaaatgcttaa

SEQ ID NO: 1195719 - DNA, 15 bp, Homo sapiens
tcaggaaaatgctta

SEQ ID NO: 1195720 - DNA, 15 bp, Homo sapiens
ctcaggaaaatgctt

SEQ ID NO: 1195721 - DNA, 15 bp, Homo sapiens
tctcaggaaaatgct

SEQ ID NO: 1195722 - DNA, 15 bp, Homo sapiens
ctctcaggaaaatgc

SEQ ID NO: 1195723 - DNA, 15 bp, Homo sapiens
tctctcaggaaaatg

SEQ ID NO: 1195724 - DNA, 15 bp, Homo sapiens
ttctctcaggaaaat

SEQ ID NO: 1195725 - DNA, 15 bp, Homo sapiens
gttctctcaggaaaa

SEQ ID NO: 1195726 - DNA, 15 bp, Homo sapiens
ggttctctcaggaaa

SEQ ID NO: 1195727 - DNA, 15 bp, Homo sapiens
aggttctctcaggaa

SEQ ID NO: 1195728 - DNA, 15 bp, Homo sapiens
caggttctctcagga

SEQ ID NO: 1195729 - DNA, 15 bp, Homo sapiens
ccaggttctctcagg

SEQ ID NO: 1195730 - DNA, 15 bp, Homo sapiens
cccaggttctctcag

SEQ ID NO: 1195731 - DNA, 15 bp, Homo sapiens
acccaggttctctca

SEQ ID NO: 1195732 - DNA, 15 bp, Homo sapiens
aacccaggttctctc

SEQ ID NO: 1195733 - DNA, 15 bp, Homo sapiens
taacccaggttctct

SEQ ID NO: 1195734 - DNA, 15 bp, Homo sapiens
ataacccaggttctc

SEQ ID NO: 1195735 - DNA, 15 bp, Homo sapiens
cataacccaggttct

SEQ ID NO: 1195736 - DNA, 15 bp, Homo sapiens
acataacccaggttc

SEQ ID NO: 1195737 - DNA, 15 bp, Homo sapiens
gacataacccaggtt

SEQ ID NO: 1195738 - DNA, 15 bp, Homo sapiens
tgacataacccaggt

SEQ ID NO: 1195739 - DNA, 15 bp, Homo sapiens
ctgacataacccagg

SEQ ID NO: 1195740 - DNA, 15 bp, Homo sapiens
cctgacataacccag

SEQ ID NO: 1195741 - DNA, 15 bp, Homo sapiens
acctgacataaccca

SEQ ID NO: 1195742 - DNA, 15 bp, Homo sapiens
tacctgacataaccc

SEQ ID NO: 1195743 - DNA, 15 bp, Homo sapiens
atacctgacataacc

SEQ ID NO: 1195744 - DNA, 15 bp, Homo sapiens
catacctgacataac

SEQ ID NO: 1195745 - DNA, 15 bp, Homo sapiens
acatacctgacataa

SEQ ID NO: 1195746 - DNA, 15 bp, Homo sapiens
gacatacctgacata

SEQ ID NO: 1195747 - DNA, 15 bp, Homo sapiens
agacatacctgacat

SEQ ID NO: 1195748 - DNA, 15 bp, Homo sapiens
cagacatacctgaca

SEQ ID NO: 1195749 - DNA, 15 bp, Homo sapiens
acagacatacctgac

SEQ ID NO: 1195750 - DNA, 15 bp, Homo sapiens
cacagacatacctga

SEQ ID NO: 1195751 - DNA, 15 bp, Homo sapiens
acacagacatacctg

SEQ ID NO: 1195752 - DNA, 15 bp, Homo sapiens
cacacagacatacct

SEQ ID NO: 1195753 - DNA, 15 bp, Homo sapiens
gcacacagacatacc

SEQ ID NO: 1195754 - DNA, 15 bp, Homo sapiens
agcacacagacatac

SEQ ID NO: 1195755 - DNA, 15 bp, Homo sapiens
aagcacacagacata

SEQ ID NO: 1195756 - DNA, 15 bp, Homo sapiens
aaagcacacagacat

SEQ ID NO: 1195757 - DNA, 15 bp, Homo sapiens
gaaagcacacagaca

SEQ ID NO: 1195758 - DNA, 15 bp, Homo sapiens
tgaaagcacacagac

SEQ ID NO: 1195759 - DNA, 15 bp, Homo sapiens
ctgaaagcacacaga

SEQ ID NO: 1195760 - DNA, 15 bp, Homo sapiens
tctgaaagcacacag

SEQ ID NO: 1195761 - DNA, 15 bp, Homo sapiens
atctgaaagcacaca

SEQ ID NO: 1195762 - DNA, 15 bp, Homo sapiens
gatctgaaagcacac

SEQ ID NO: 1195763 - DNA, 15 bp, Homo sapiens
cgatctgaaagcaca

SEQ ID NO: 1195764 - DNA, 15 bp, Homo sapiens
acgatctgaaagcac

SEQ ID NO: 1195765 - DNA, 15 bp, Homo sapiens
cacgatctgaaagca

SEQ ID NO: 1195766 - DNA, 15 bp, Homo sapiens
gcacgatctgaaagc

SEQ ID NO: 1195767 - DNA, 15 bp, Homo sapiens
agcacgatctgaaag

SEQ ID NO: 1195768 - DNA, 15 bp, Homo sapiens
aagcacgatctgaaa

SEQ ID NO: 1195769 - DNA, 15 bp, Homo sapiens
aaagcacgatctgaa

SEQ ID NO: 1195770 - DNA, 15 bp, Homo sapiens
gaaagcacgatctga

SEQ ID NO: 1195771 - DNA, 15 bp, Homo sapiens
tgaaagcacgatctg

SEQ ID NO: 1195772 - DNA, 15 bp, Homo sapiens
ctgaaagcacgatct

SEQ ID NO: 1195773 - DNA, 15 bp, Homo sapiens
actgaaagcacgatc

SEQ ID NO: 1195774 - DNA, 15 bp, Homo sapiens
gactgaaagcacgat

SEQ ID NO: 1195775 - DNA, 15 bp, Homo sapiens
ggactgaaagcacga

SEQ ID NO: 1195776 - DNA, 15 bp, Homo sapiens
aggactgaaagcacg

SEQ ID NO: 1195777 - DNA, 15 bp, Homo sapiens
aaggactgaaagcac

SEQ ID NO: 1195778 - DNA, 15 bp, Homo sapiens
taaggactgaaagca

SEQ ID NO: 1195779 - DNA, 15 bp, Homo sapiens
ttaaggactgaaagc

SEQ ID NO: 1195780 - DNA, 15 bp, Homo sapiens
gttaaggactgaaag

SEQ ID NO: 1195781 - DNA, 15 bp, Homo sapiens
agttaaggactgaaa

SEQ ID NO: 1195782 - DNA, 15 bp, Homo sapiens
cagttaaggactgaa

SEQ ID NO: 1195783 - DNA, 15 bp, Homo sapiens
ccagttaaggactga

SEQ ID NO: 1195784 - DNA, 15 bp, Homo sapiens
cccagttaaggactg

SEQ ID NO: 1195785 - DNA, 15 bp, Homo sapiens
gcccagttaaggact

SEQ ID NO: 1195786 - DNA, 15 bp, Homo sapiens
tgcccagttaaggac

SEQ ID NO: 1195787 - DNA, 15 bp, Homo sapiens
ttgcccagttaagga

SEQ ID NO: 1195788 - DNA, 15 bp, Homo sapiens
cttgcccagttaagg

SEQ ID NO: 1195789 - DNA, 15 bp, Homo sapiens
tcttgcccagttaag

SEQ ID NO: 1195790 - DNA, 15 bp, Homo sapiens
atcttgcccagttaa

SEQ ID NO: 1195791 - DNA, 15 bp, Homo sapiens
tatcttgcccagtta

SEQ ID NO: 1195792 - DNA, 15 bp, Homo sapiens
gtatcttgcccagtt

SEQ ID NO: 1195793 - DNA, 15 bp, Homo sapiens
cgtatcttgcccagt

SEQ ID NO: 1195794 - DNA, 15 bp, Homo sapiens
acgtatcttgcccag

SEQ ID NO: 1195795 - DNA, 15 bp, Homo sapiens
aacgtatcttgccca

SEQ ID NO: 1195796 - DNA, 15 bp, Homo sapiens
aaacgtatcttgccc

SEQ ID NO: 1195797 - DNA, 15 bp, Homo sapiens
aaaacgtatcttgcc

SEQ ID NO: 1195798 - DNA, 15 bp, Homo sapiens
gaaaacgtatcttgc

SEQ ID NO: 1195799 - DNA, 15 bp, Homo sapiens
agaaaacgtatcttg

SEQ ID NO: 1195800 - DNA, 15 bp, Homo sapiens
tagaaaacgtatctt

SEQ ID NO: 1195801 - DNA, 15 bp, Homo sapiens
ctagaaaacgtatct

SEQ ID NO: 1195802 - DNA, 15 bp, Homo sapiens
actagaaaacgtatc

SEQ ID NO: 1195803 - DNA, 15 bp, Homo sapiens
tactagaaaacgtat

SEQ ID NO: 1195804 - DNA, 15 bp, Homo sapiens
gtactagaaaacgta

SEQ ID NO: 1195805 - DNA, 15 bp, Homo sapiens
tgtactagaaaacgt

SEQ ID NO: 1195806 - DNA, 15 bp, Homo sapiens
ttgtactagaaaacg

SEQ ID NO: 1195807 - DNA, 15 bp, Homo sapiens
cttgtactagaaaac

SEQ ID NO: 1195808 - DNA, 15 bp, Homo sapiens
ccttgtactagaaaa

SEQ ID NO: 1195809 - DNA, 15 bp, Homo sapiens
tccttgtactagaaa

SEQ ID NO: 1195810 - DNA, 15 bp, Homo sapiens
ttccttgtactagaa

SEQ ID NO: 1195811 - DNA, 15 bp, Homo sapiens
tttccttgtactaga

SEQ ID NO: 1195812 - DNA, 15 bp, Homo sapiens
ctttccttgtactag

SEQ ID NO: 1195813 - DNA, 15 bp, Homo sapiens
actttccttgtacta

SEQ ID NO: 1195814 - DNA, 15 bp, Homo sapiens
tactttccttgtact

SEQ ID NO: 1195815 - DNA, 15 bp, Homo sapiens
atactttccttgtac

SEQ ID NO: 1195816 - DNA, 15 bp, Homo sapiens
tatactttccttgta

SEQ ID NO: 1195817 - DNA, 15 bp, Homo sapiens
ctatactttccttgt

SEQ ID NO: 1195818 - DNA, 15 bp, Homo sapiens
cctatactttccttg

SEQ ID NO: 1195819 - DNA, 15 bp, Homo sapiens
acctatactttcctt

SEQ ID NO: 1195820 - DNA, 15 bp, Homo sapiens
tacctatactttcct

SEQ ID NO: 1195821 - DNA, 15 bp, Homo sapiens
atacctatactttcc

SEQ ID NO: 1195822 - DNA, 15 bp, Homo sapiens
catacctatactttc

SEQ ID NO: 1195823 - DNA, 15 bp, Homo sapiens
acatacctatacttt

SEQ ID NO: 1195824 - DNA, 15 bp, Homo sapiens
gacatacctatactt

SEQ ID NO: 1195825 - DNA, 15 bp, Homo sapiens
agacatacctatact

SEQ ID NO: 1195826 - DNA, 15 bp, Homo sapiens
cagacatacctatac

SEQ ID NO: 1195827 - DNA, 15 bp, Homo sapiens
tcagacatacctata

SEQ ID NO: 1195828 - DNA, 15 bp, Homo sapiens
ttcagacatacctat

SEQ ID NO: 1195829 - DNA, 15 bp, Homo sapiens
attcagacataccta

SEQ ID NO: 1195830 - DNA, 15 bp, Homo sapiens
cattcagacatacct

SEQ ID NO: 1195831 - DNA, 15 bp, Homo sapiens
acattcagacatacc

SEQ ID NO: 1195832 - DNA, 15 bp, Homo sapiens
gacattcagacatac

SEQ ID NO: 1195833 - DNA, 15 bp, Homo sapiens
ggacattcagacata

SEQ ID NO: 1195834 - DNA, 15 bp, Homo sapiens
aggacattcagacat

SEQ ID NO: 1195835 - DNA, 15 bp, Homo sapiens
taggacattcagaca

SEQ ID NO: 1195836 - DNA, 15 bp, Homo sapiens
ttaggacattcagac

SEQ ID NO: 1195837 - DNA, 15 bp, Homo sapiens
attaggacattcaga

SEQ ID NO: 1195838 - DNA, 15 bp, Homo sapiens
gattaggacattcag

SEQ ID NO: 1195839 - DNA, 15 bp, Homo sapiens
tgattaggacattca

SEQ ID NO: 1195840 - DNA, 15 bp, Homo sapiens
ttgattaggacattc

SEQ ID NO: 1195841 - DNA, 15 bp, Homo sapiens
tttgattaggacatt

SEQ ID NO: 1195842 - DNA, 15 bp, Homo sapiens
ttttgattaggacat

SEQ ID NO: 1195843 - DNA, 15 bp, Homo sapiens
tttttgattaggaca

SEQ ID NO: 1195844 - DNA, 15 bp, Homo sapiens
gtttttgattaggac

SEQ ID NO: 1195845 - DNA, 15 bp, Homo sapiens
tgtttttgattagga

SEQ ID NO: 1195846 - DNA, 15 bp, Homo sapiens
ttgtttttgattagg

SEQ ID NO: 1195847 - DNA, 15 bp, Homo sapiens
tttgtttttgattag

SEQ ID NO: 1195848 - DNA, 15 bp, Homo sapiens
ctttgtttttgatta

SEQ ID NO: 1195849 - DNA, 15 bp, Homo sapiens
gctttgtttttgatt

SEQ ID NO: 1195850 - DNA, 15 bp, Homo sapiens
agctttgtttttgat

SEQ ID NO: 1195851 - DNA, 15 bp, Homo sapiens
gagctttgtttttga

SEQ ID NO: 1195852 - DNA, 15 bp, Homo sapiens
agagctttgtttttg

SEQ ID NO: 1195853 - DNA, 15 bp, Homo sapiens
aagagctttgttttt

SEQ ID NO: 1195854 - DNA, 15 bp, Homo sapiens
gaagagctttgtttt

SEQ ID NO: 1195855 - DNA, 15 bp, Homo sapiens
tgaagagctttgttt

SEQ ID NO: 1195856 - DNA, 15 bp, Homo sapiens
atgaagagctttgtt

SEQ ID NO: 1195857 - DNA, 15 bp, Homo sapiens
catgaagagctttgt

SEQ ID NO: 1195858 - DNA, 15 bp, Homo sapiens
acatgaagagctttg

SEQ ID NO: 1195859 - DNA, 15 bp, Homo sapiens
tacatgaagagcttt

SEQ ID NO: 1195860 - DNA, 15 bp, Homo sapiens
ttacatgaagagctt

SEQ ID NO: 1195861 - DNA, 15 bp, Homo sapiens
attacatgaagagct

SEQ ID NO: 1195862 - DNA, 15 bp, Homo sapiens
aattacatgaagagc

SEQ ID NO: 1195863 - DNA, 15 bp, Homo sapiens
gaattacatgaagag

SEQ ID NO: 1195864 - DNA, 15 bp, Homo sapiens
ggaattacatgaaga

SEQ ID NO: 1195865 - DNA, 15 bp, Homo sapiens
tggaattacatgaag

SEQ ID NO: 1195866 - DNA, 15 bp, Homo sapiens
gtggaattacatgaa

SEQ ID NO: 1195867 - DNA, 15 bp, Homo sapiens
tgtggaattacatga

SEQ ID NO: 1195868 - DNA, 15 bp, Homo sapiens
ttgtggaattacatg

SEQ ID NO: 1195869 - DNA, 15 bp, Homo sapiens
tttgtggaattacat

SEQ ID NO: 1195870 - DNA, 15 bp, Homo sapiens
gtttgtggaattaca

SEQ ID NO: 1195871 - DNA, 15 bp, Homo sapiens
ggtttgtggaattac

SEQ ID NO: 1195872 - DNA, 15 bp, Homo sapiens
tggtttgtggaatta

SEQ ID NO: 1195873 - DNA, 15 bp, Homo sapiens
ttggtttgtggaatt

SEQ ID NO: 1195874 - DNA, 15 bp, Homo sapiens
tttggtttgtggaat

SEQ ID NO: 1195875 - DNA, 15 bp, Homo sapiens
ctttggtttgtggaa

SEQ ID NO: 1195876 - DNA, 15 bp, Homo sapiens
tctttggtttgtgga

SEQ ID NO: 1195877 - DNA, 15 bp, Homo sapiens
gtctttggtttgtgg

SEQ ID NO: 1195878 - DNA, 15 bp, Homo sapiens
agtctttggtttgtg

SEQ ID NO: 1195879 - DNA, 15 bp, Homo sapiens
tagtctttggtttgt

SEQ ID NO: 1195880 - DNA, 15 bp, Homo sapiens
atagtctttggtttg

SEQ ID NO: 1195881 - DNA, 15 bp, Homo sapiens
aatagtctttggttt

SEQ ID NO: 1195882 - DNA, 15 bp, Homo sapiens
taatagtctttggtt

SEQ ID NO: 1195883 - DNA, 15 bp, Homo sapiens
ttaatagtctttggt

SEQ ID NO: 1195884 - DNA, 15 bp, Homo sapiens
cttaatagtctttgg

SEQ ID NO: 1195885 - DNA, 15 bp, Homo sapiens
tcttaatagtctttg

SEQ ID NO: 1195886 - DNA, 15 bp, Homo sapiens
ttcttaatagtcttt

SEQ ID NO: 1195887 - DNA, 15 bp, Homo sapiens
tttcttaatagtctt

SEQ ID NO: 1195888 - DNA, 15 bp, Homo sapiens
ttttcttaatagtct

SEQ ID NO: 1195889 - DNA, 15 bp, Homo sapiens
attttcttaatagtc

SEQ ID NO: 1195890 - DNA, 15 bp, Homo sapiens
cattttcttaatagt

SEQ ID NO: 1195891 - DNA, 15 bp, Homo sapiens
acattttcttaatag

SEQ ID NO: 1195892 - DNA, 15 bp, Homo sapiens
gacattttcttaata

SEQ ID NO: 1195893 - DNA, 15 bp, Homo sapiens
agacattttcttaat

SEQ ID NO: 1195894 - DNA, 15 bp, Homo sapiens
gagacattttcttaa

SEQ ID NO: 1195895 - DNA, 15 bp, Homo sapiens
agagacattttctta

SEQ ID NO: 1195896 - DNA, 15 bp, Homo sapiens
gagagacattttctt

SEQ ID NO: 1195897 - DNA, 15 bp, Homo sapiens
ggagagacattttct

SEQ ID NO: 1195898 - DNA, 15 bp, Homo sapiens
tggagagacattttc

SEQ ID NO: 1195899 - DNA, 15 bp, Homo sapiens
ctggagagacatttt

SEQ ID NO: 1195900 - DNA, 15 bp, Homo sapiens
gctggagagacattt

SEQ ID NO: 1195901 - DNA, 15 bp, Homo sapiens
tgctggagagacatt

SEQ ID NO: 1195902 - DNA, 15 bp, Homo sapiens
ctgctggagagacat

SEQ ID NO: 1195903 - DNA, 15 bp, Homo sapiens
gctgctggagagaca

SEQ ID NO: 1195904 - DNA, 15 bp, Homo sapiens
tgctgctggagagac

SEQ ID NO: 1195905 - DNA, 15 bp, Homo sapiens
ttgctgctggagaga

SEQ ID NO: 1195906 - DNA, 15 bp, Homo sapiens
cttgctgctggagag

SEQ ID NO: 1195907 - DNA, 15 bp, Homo sapiens
ccttgctgctggaga

SEQ ID NO: 1195908 - DNA, 15 bp, Homo sapiens
accttgctgctggag

SEQ ID NO: 1195909 - DNA, 15 bp, Homo sapiens
taccttgctgctgga

SEQ ID NO: 1195910 - DNA, 15 bp, Homo sapiens
ttaccttgctgctgg

SEQ ID NO: 1195911 - DNA, 15 bp, Homo sapiens
cttaccttgctgctg

SEQ ID NO: 1195912 - DNA, 15 bp, Homo sapiens
tcttaccttgctgct

SEQ ID NO: 1195913 - DNA, 15 bp, Homo sapiens
ttcttaccttgctgc

SEQ ID NO: 1195914 - DNA, 15 bp, Homo sapiens
attcttaccttgctg

SEQ ID NO: 1195915 - DNA, 15 bp, Homo sapiens
gattcttaccttgct

SEQ ID NO: 1195916 - DNA, 15 bp, Homo sapiens
tgattcttaccttgc

SEQ ID NO: 1195917 - DNA, 15 bp, Homo sapiens
gtgattcttaccttg

SEQ ID NO: 1195918 - DNA, 15 bp, Homo sapiens
ggtgattcttacctt

SEQ ID NO: 1195919 - DNA, 15 bp, Homo sapiens
tggtgattcttacct

SEQ ID NO: 1195920 - DNA, 15 bp, Homo sapiens
gtggtgattcttacc

SEQ ID NO: 1195921 - DNA, 15 bp, Homo sapiens
agtggtgattcttac

SEQ ID NO: 1195922 - DNA, 15 bp, Homo sapiens
gagtggtgattctta

SEQ ID NO: 1195923 - DNA, 15 bp, Homo sapiens
tgagtggtgattctt

SEQ ID NO: 1195924 - DNA, 15 bp, Homo sapiens
atgagtggtgattct

SEQ ID NO: 1195925 - DNA, 15 bp, Homo sapiens
gatgagtggtgattc

SEQ ID NO: 1195926 - DNA, 15 bp, Homo sapiens
agatgagtggtgatt

SEQ ID NO: 1195927 - DNA, 15 bp, Homo sapiens
aagatgagtggtgat

SEQ ID NO: 1195928 - DNA, 15 bp, Homo sapiens
aaagatgagtggtga

SEQ ID NO: 1195929 - DNA, 15 bp, Homo sapiens
taaagatgagtggtg

SEQ ID NO: 1195930 - DNA, 15 bp, Homo sapiens
ttaaagatgagtggt

SEQ ID NO: 1195931 - DNA, 15 bp, Homo sapiens
attaaagatgagtgg

SEQ ID NO: 1195932 - DNA, 15 bp, Homo sapiens
tattaaagatgagtg

SEQ ID NO: 1195933 - DNA, 15 bp, Homo sapiens
atattaaagatgagt

SEQ ID NO: 1195934 - DNA, 15 bp, Homo sapiens
tatattaaagatgag

SEQ ID NO: 1195935 - DNA, 15 bp, Homo sapiens
ttatattaaagatga

SEQ ID NO: 1195936 - DNA, 15 bp, Homo sapiens
attatattaaagatg

SEQ ID NO: 1195937 - DNA, 15 bp, Homo sapiens
cattatattaaagat

SEQ ID NO: 1195938 - DNA, 15 bp, Homo sapiens
tcattatattaaaga

SEQ ID NO: 1195939 - DNA, 15 bp, Homo sapiens
ttcattatattaaag

SEQ ID NO: 1195940 - DNA, 15 bp, Homo sapiens
tttcattatattaaa

SEQ ID NO: 1195941 - DNA, 15 bp, Homo sapiens
ttttcattatattaa

SEQ ID NO: 1195942 - DNA, 15 bp, Homo sapiens
gttttcattatatta

SEQ ID NO: 1195943 - DNA, 15 bp, Homo sapiens
agttttcattatatt

SEQ ID NO: 1195944 - DNA, 15 bp, Homo sapiens
cagttttcattatat

SEQ ID NO: 1195945 - DNA, 15 bp, Homo sapiens
ccagttttcattata

SEQ ID NO: 1195946 - DNA, 15 bp, Homo sapiens
tccagttttcattat

SEQ ID NO: 1195947 - DNA, 15 bp, Homo sapiens
ttccagttttcatta

SEQ ID NO: 1195948 - DNA, 15 bp, Homo sapiens
tttccagttttcatt

SEQ ID NO: 1195949 - DNA, 15 bp, Homo sapiens
ttttccagttttcat

SEQ ID NO: 1195950 - DNA, 15 bp, Homo sapiens
attttccagttttca

SEQ ID NO: 1195951 - DNA, 15 bp, Homo sapiens
gattttccagttttc

SEQ ID NO: 1195952 - DNA, 15 bp, Homo sapiens
tgattttccagtttt

SEQ ID NO: 1195953 - DNA, 15 bp, Homo sapiens
ttgattttccagttt

SEQ ID NO: 1195954 - DNA, 15 bp, Homo sapiens
tttgattttccagtt

SEQ ID NO: 1195955 - DNA, 15 bp, Homo sapiens
ttttgattttccagt

SEQ ID NO: 1195956 - DNA, 15 bp, Homo sapiens
tttttgattttccag

SEQ ID NO: 1195957 - DNA, 15 bp, Homo sapiens
ctttttgattttcca

SEQ ID NO: 1195958 - DNA, 15 bp, Homo sapiens
cctttttgattttcc

SEQ ID NO: 1195959 - DNA, 15 bp, Homo sapiens
acctttttgattttc

SEQ ID NO: 1195960 - DNA, 15 bp, Homo sapiens
aacctttttgatttt

SEQ ID NO: 1195961 - DNA, 15 bp, Homo sapiens
aaacctttttgattt

SEQ ID NO: 1195962 - DNA, 15 bp, Homo sapiens
taaacctttttgatt

SEQ ID NO: 1195963 - DNA, 15 bp, Homo sapiens
ataaacctttttgat

SEQ ID NO: 1195964 - DNA, 15 bp, Homo sapiens
cataaacctttttga

SEQ ID NO: 1195965 - DNA, 15 bp, Homo sapiens
acataaacctttttg

SEQ ID NO: 1195966 - DNA, 15 bp, Homo sapiens
cacataaaccttttt

SEQ ID NO: 1195967 - DNA, 15 bp, Homo sapiens
tcacataaacctttt

SEQ ID NO: 1195968 - DNA, 15 bp, Homo sapiens
ttcacataaaccttt

SEQ ID NO: 1195969 - DNA, 15 bp, Homo sapiens
gttcacataaacctt

SEQ ID NO: 1195970 - DNA, 15 bp, Homo sapiens
tgttcacataaacct

SEQ ID NO: 1195971 - DNA, 15 bp, Homo sapiens
gtgttcacataaacc

SEQ ID NO: 1195972 - DNA, 15 bp, Homo sapiens
agtgttcacataaac

SEQ ID NO: 1195973 - DNA, 15 bp, Homo sapiens
tagtgttcacataaa

SEQ ID NO: 1195974 - DNA, 15 bp, Homo sapiens
ttagtgttcacataa

SEQ ID NO: 1195975 - DNA, 15 bp, Homo sapiens
cttagtgttcacata

SEQ ID NO: 1195976 - DNA, 15 bp, Homo sapiens
acttagtgttcacat

SEQ ID NO: 1195977 - DNA, 15 bp, Homo sapiens
gacttagtgttcaca

SEQ ID NO: 1195978 - DNA, 15 bp, Homo sapiens
tgacttagtgttcac

SEQ ID NO: 1195979 - DNA, 15 bp, Homo sapiens
atgacttagtgttca

SEQ ID NO: 1195980 - DNA, 15 bp, Homo sapiens
catgacttagtgttc

SEQ ID NO: 1195981 - DNA, 15 bp, Homo sapiens
acatgacttagtgtt

SEQ ID NO: 1195982 - DNA, 15 bp, Homo sapiens
gacatgacttagtgt

SEQ ID NO: 1195983 - DNA, 15 bp, Homo sapiens
agacatgacttagtg

SEQ ID NO: 1195984 - DNA, 15 bp, Homo sapiens
cagacatgacttagt

SEQ ID NO: 1195985 - DNA, 15 bp, Homo sapiens
ccagacatgacttag

SEQ ID NO: 1195986 - DNA, 15 bp, Homo sapiens
cccagacatgactta

SEQ ID NO: 1195987 - DNA, 15 bp, Homo sapiens
acccagacatgactt

SEQ ID NO: 1195988 - DNA, 15 bp, Homo sapiens
cacccagacatgact

SEQ ID NO: 1195989 - DNA, 15 bp, Homo sapiens
ccacccagacatgac

SEQ ID NO: 1195990 - DNA, 15 bp, Homo sapiens
accacccagacatga

SEQ ID NO: 1195991 - DNA, 15 bp, Homo sapiens
caccacccagacatg

SEQ ID NO: 1195992 - DNA, 15 bp, Homo sapiens
ccaccacccagacat

SEQ ID NO: 1195993 - DNA, 15 bp, Homo sapiens
cccaccacccagaca

SEQ ID NO: 1195994 - DNA, 15 bp, Homo sapiens
tcccaccacccagac

SEQ ID NO: 1195995 - DNA, 15 bp, Homo sapiens
atcccaccacccaga

SEQ ID NO: 1195996 - DNA, 15 bp, Homo sapiens
catcccaccacccag

SEQ ID NO: 1195997 - DNA, 15 bp, Homo sapiens
tcatcccaccaccca

SEQ ID NO: 1195998 - DNA, 15 bp, Homo sapiens
gtcatcccaccaccc

SEQ ID NO: 1195999 - DNA, 15 bp, Homo sapiens
tgtcatcccaccacc

SEQ ID NO: 1196000 - DNA, 15 bp, Homo sapiens
ctgtcatcccaccac

SEQ ID NO: 1196001 - DNA, 15 bp, Homo sapiens
cctgtcatcccacca

SEQ ID NO: 1196002 - DNA, 15 bp, Homo sapiens
acctgtcatcccacc

SEQ ID NO: 1196003 - DNA, 15 bp, Homo sapiens
cacctgtcatcccac

SEQ ID NO: 1196004 - DNA, 15 bp, Homo sapiens
tcacctgtcatccca

SEQ ID NO: 1196005 - DNA, 15 bp, Homo sapiens
atcacctgtcatccc

SEQ ID NO: 1196006 - DNA, 15 bp, Homo sapiens
aatcacctgtcatcc

SEQ ID NO: 1196007 - DNA, 15 bp, Homo sapiens
aaatcacctgtcatc

SEQ ID NO: 1196008 - DNA, 15 bp, Homo sapiens
taaatcacctgtcat

SEQ ID NO: 1196009 - DNA, 15 bp, Homo sapiens
ttaaatcacctgtca

SEQ ID NO: 1196010 - DNA, 15 bp, Homo sapiens
tttaaatcacctgtc

SEQ ID NO: 1196011 - DNA, 15 bp, Homo sapiens
ttttaaatcacctgt

SEQ ID NO: 1196012 - DNA, 15 bp, Homo sapiens
tttttaaatcacctg

SEQ ID NO: 1196013 - DNA, 15 bp, Homo sapiens
atttttaaatcacct

SEQ ID NO: 1196014 - DNA, 15 bp, Homo sapiens
aatttttaaatcacc

SEQ ID NO: 1196015 - DNA, 15 bp, Homo sapiens
aaatttttaaatcac

SEQ ID NO: 1196016 - DNA, 15 bp, Homo sapiens
aaaatttttaaatca

SEQ ID NO: 1196017 - DNA, 15 bp, Homo sapiens
aaaaatttttaaatc

SEQ ID NO: 1196018 - DNA, 15 bp, Homo sapiens
gaaaaatttttaaat

SEQ ID NO: 1196019 - DNA, 15 bp, Homo sapiens
agaaaaatttttaaa

SEQ ID NO: 1196020 - DNA, 15 bp, Homo sapiens
aagaaaaatttttaa

SEQ ID NO: 1196021 - DNA, 15 bp, Homo sapiens
aaagaaaaattttta

SEQ ID NO: 1196022 - DNA, 15 bp, Homo sapiens
taaagaaaaattttt

SEQ ID NO: 1196023 - DNA, 15 bp, Homo sapiens
ataaagaaaaatttt

SEQ ID NO: 1196024 - DNA, 15 bp, Homo sapiens
aataaagaaaaattt

SEQ ID NO: 1196025 - DNA, 15 bp, Homo sapiens
gaataaagaaaaatt

SEQ ID NO: 1196026 - DNA, 15 bp, Homo sapiens
tgaataaagaaaaat

SEQ ID NO: 1196027 - DNA, 15 bp, Homo sapiens
atgaataaagaaaaa

SEQ ID NO: 1196028 - DNA, 15 bp, Homo sapiens
tatgaataaagaaaa

SEQ ID NO: 1196029 - DNA, 15 bp, Homo sapiens
atatgaataaagaaa

SEQ ID NO: 1196030 - DNA, 15 bp, Homo sapiens
gatatgaataaagaa

SEQ ID NO: 1196031 - DNA, 15 bp, Homo sapiens
tgatatgaataaaga

SEQ ID NO: 1196032 - DNA, 15 bp, Homo sapiens
ttgatatgaataaag

SEQ ID NO: 1196033 - DNA, 15 bp, Homo sapiens
tttgatatgaataaa

SEQ ID NO: 1196034 - DNA, 15 bp, Homo sapiens
atttgatatgaataa

SEQ ID NO: 1196035 - DNA, 15 bp, Homo sapiens
aatttgatatgaata

SEQ ID NO: 1196036 - DNA, 15 bp, Homo sapiens
aaatttgatatgaat

SEQ ID NO: 1196037 - DNA, 15 bp, Homo sapiens
aaaatttgatatgaa

SEQ ID NO: 1196038 - DNA, 15 bp, Homo sapiens
aaaaatttgatatga

SEQ ID NO: 1196039 - DNA, 15 bp, Homo sapiens
taaaaatttgatatg

SEQ ID NO: 1196040 - DNA, 15 bp, Homo sapiens
ataaaaatttgatat

SEQ ID NO: 1196041 - DNA, 15 bp, Homo sapiens
aataaaaatttgata

SEQ ID NO: 1196042 - DNA, 15 bp, Homo sapiens
aaataaaaatttgat

SEQ ID NO: 1196043 - DNA, 15 bp, Homo sapiens
aaaataaaaatttga

SEQ ID NO: 1196044 - DNA, 15 bp, Homo sapiens
aaaaataaaaatttg

SEQ ID NO: 1196045 - DNA, 15 bp, Homo sapiens
aaaaaataaaaattt

SEQ ID NO: 1196046 - DNA, 15 bp, Homo sapiens
gaaaaaataaaaatt

SEQ ID NO: 1196047 - DNA, 15 bp, Homo sapiens
tagaaaaaataaaaa

SEQ ID NO: 1196048 - DNA, 15 bp, Homo sapiens
gtagaaaaaataaaa

SEQ ID NO: 1196049 - DNA, 15 bp, Homo sapiens
tgtagaaaaaataaa

SEQ ID NO: 1196050 - DNA, 15 bp, Homo sapiens
ctgtagaaaaaataa

SEQ ID NO: 1196051 - DNA, 15 bp, Homo sapiens
actgtagaaaaaata

SEQ ID NO: 1196052 - DNA, 15 bp, Homo sapiens
tactgtagaaaaaat

SEQ ID NO: 1196053 - DNA, 15 bp, Homo sapiens
atactgtagaaaaaa

SEQ ID NO: 1196054 - DNA, 15 bp, Homo sapiens
tatactgtagaaaaa

SEQ ID NO: 1196055 - DNA, 15 bp, Homo sapiens
gtatactgtagaaaa

SEQ ID NO: 1196056 - DNA, 15 bp, Homo sapiens
agtatactgtagaaa

SEQ ID NO: 1196057 - DNA, 15 bp, Homo sapiens
tagtatactgtagaa

SEQ ID NO: 1196058 - DNA, 15 bp, Homo sapiens
atagtatactgtaga

SEQ ID NO: 1196059 - DNA, 15 bp, Homo sapiens
aatagtatactgtag

SEQ ID NO: 1196060 - DNA, 15 bp, Homo sapiens
taatagtatactgta

SEQ ID NO: 1196061 - DNA, 15 bp, Homo sapiens
ctaatagtatactgt

SEQ ID NO: 1196062 - DNA, 15 bp, Homo sapiens
actaatagtatactg

SEQ ID NO: 1196063 - DNA, 15 bp, Homo sapiens
cactaatagtatact

SEQ ID NO: 1196064 - DNA, 15 bp, Homo sapiens
acactaatagtatac

SEQ ID NO: 1196065 - DNA, 15 bp, Homo sapiens
cacactaatagtata

SEQ ID NO: 1196066 - DNA, 15 bp, Homo sapiens
acacactaatagtat

SEQ ID NO: 1196067 - DNA, 15 bp, Homo sapiens
aacacactaatagta

SEQ ID NO: 1196068 - DNA, 15 bp, Homo sapiens
taacacactaatagt

SEQ ID NO: 1196069 - DNA, 15 bp, Homo sapiens
ataacacactaatag

SEQ ID NO: 1196070 - DNA, 15 bp, Homo sapiens
aataacacactaata

SEQ ID NO: 1196071 - DNA, 15 bp, Homo sapiens
aaataacacactaat

SEQ ID NO: 1196072 - DNA, 15 bp, Homo sapiens
taaataacacactaa

SEQ ID NO: 1196073 - DNA, 15 bp, Homo sapiens
ttaaataacacacta

SEQ ID NO: 1196074 - DNA, 15 bp, Homo sapiens
tttaaataacacact

SEQ ID NO: 1196075 - DNA, 15 bp, Homo sapiens
atttaaataacacac

SEQ ID NO: 1196076 - DNA, 15 bp, Homo sapiens
tatttaaataacaca

SEQ ID NO: 1196077 - DNA, 15 bp, Homo sapiens
ctatttaaataacac

SEQ ID NO: 1196078 - DNA, 15 bp, Homo sapiens
tctatttaaataaca

SEQ ID NO: 1196079 - DNA, 15 bp, Homo sapiens
atctatttaaataac

SEQ ID NO: 1196080 - DNA, 15 bp, Homo sapiens
catctatttaaataa

SEQ ID NO: 1196081 - DNA, 15 bp, Homo sapiens
acatctatttaaata

SEQ ID NO: 1196082 - DNA, 15 bp, Homo sapiens
tacatctatttaaat

SEQ ID NO: 1196083 - DNA, 15 bp, Homo sapiens
gtacatctatttaaa

SEQ ID NO: 1196084 - DNA, 15 bp, Homo sapiens
agtacatctatttaa

SEQ ID NO: 1196085 - DNA, 15 bp, Homo sapiens
tagtacatctattta

SEQ ID NO: 1196086 - DNA, 15 bp, Homo sapiens
gtagtacatctattt

SEQ ID NO: 1196087 - DNA, 15 bp, Homo sapiens
agtagtacatctatt

SEQ ID NO: 1196088 - DNA, 15 bp, Homo sapiens
aagtagtacatctat

SEQ ID NO: 1196089 - DNA, 15 bp, Homo sapiens
taagtagtacatcta

SEQ ID NO: 1196090 - DNA, 15 bp, Homo sapiens
ttaagtagtacatct

SEQ ID NO: 1196091 - DNA, 15 bp, Homo sapiens
tttaagtagtacatc

SEQ ID NO: 1196092 - DNA, 15 bp, Homo sapiens
atttaagtagtacat

SEQ ID NO: 1196093 - DNA, 15 bp, Homo sapiens
tatttaagtagtaca

SEQ ID NO: 1196094 - DNA, 15 bp, Homo sapiens
ttatttaagtagtac

SEQ ID NO: 1196095 - DNA, 15 bp, Homo sapiens
attatttaagtagta

SEQ ID NO: 1196096 - DNA, 15 bp, Homo sapiens
aattatttaagtagt

SEQ ID NO: 1196097 - DNA, 15 bp, Homo sapiens
aaattatttaagtag

SEQ ID NO: 1196098 - DNA, 15 bp, Homo sapiens
aaaattatttaagta

SEQ ID NO: 1196099 - DNA, 15 bp, Homo sapiens
taaaattatttaagt

SEQ ID NO: 1196100 - DNA, 15 bp, Homo sapiens
ttaaaattatttaag

SEQ ID NO: 1196101 - DNA, 15 bp, Homo sapiens
attaaaattatttaa

SEQ ID NO: 1196102 - DNA, 15 bp, Homo sapiens
tattaaaattattta

SEQ ID NO: 1196103 - DNA, 15 bp, Homo sapiens
ctattaaaattattt

SEQ ID NO: 1196104 - DNA, 15 bp, Homo sapiens
actattaaaattatt

SEQ ID NO: 1196105 - DNA, 15 bp, Homo sapiens
tactattaaaattat

SEQ ID NO: 1196106 - DNA, 15 bp, Homo sapiens
ttactattaaaatta

SEQ ID NO: 1196107 - DNA, 15 bp, Homo sapiens
tttactattaaaatt

SEQ ID NO: 1196108 - DNA, 15 bp, Homo sapiens
ctttactattaaaat

SEQ ID NO: 1196109 - DNA, 15 bp, Homo sapiens
tctttactattaaaa

SEQ ID NO: 1196110 - DNA, 15 bp, Homo sapiens
ttctttactattaaa

SEQ ID NO: 1196111 - DNA, 15 bp, Homo sapiens
cttctttactattaa

SEQ ID NO: 1196112 - DNA, 15 bp, Homo sapiens
tcttctttactatta

SEQ ID NO: 1196113 - DNA, 15 bp, Homo sapiens
atcttctttactatt

SEQ ID NO: 1196114 - DNA, 15 bp, Homo sapiens
tatcttctttactat

SEQ ID NO: 1196115 - DNA, 15 bp, Homo sapiens
gtatcttctttacta

SEQ ID NO: 1196116 - DNA, 15 bp, Homo sapiens
agtatcttctttact

SEQ ID NO: 1196117 - DNA, 15 bp, Homo sapiens
gagtatcttctttac

SEQ ID NO: 1196118 - DNA, 15 bp, Homo sapiens
agagtatcttcttta

SEQ ID NO: 1196119 - DNA, 15 bp, Homo sapiens
tagagtatcttcttt

SEQ ID NO: 1196120 - DNA, 15 bp, Homo sapiens
ttagagtatcttctt

SEQ ID NO: 1196121 - DNA, 15 bp, Homo sapiens
cttagagtatcttct

SEQ ID NO: 1196122 - DNA, 15 bp, Homo sapiens
acttagagtatcttc

SEQ ID NO: 1196123 - DNA, 15 bp, Homo sapiens
tacttagagtatctt

SEQ ID NO: 1196124 - DNA, 15 bp, Homo sapiens
ttacttagagtatct

SEQ ID NO: 1196125 - DNA, 15 bp, Homo sapiens
tttacttagagtatc

SEQ ID NO: 1196126 - DNA, 15 bp, Homo sapiens
atttacttagagtat

SEQ ID NO: 1196127 - DNA, 15 bp, Homo sapiens
tatttacttagagta

SEQ ID NO: 1196128 - DNA, 15 bp, Homo sapiens
gtatttacttagagt

SEQ ID NO: 1196129 - DNA, 15 bp, Homo sapiens
tgtatttacttagag

SEQ ID NO: 1196130 - DNA, 15 bp, Homo sapiens
atgtatttacttaga

SEQ ID NO: 1196131 - DNA, 15 bp, Homo sapiens
tatgtatttacttag

SEQ ID NO: 1196132 - DNA, 15 bp, Homo sapiens
ctatgtatttactta

SEQ ID NO: 1196133 - DNA, 15 bp, Homo sapiens
tctatgtatttactt

SEQ ID NO: 1196134 - DNA, 15 bp, Homo sapiens
ctctatgtatttact

SEQ ID NO: 1196135 - DNA, 15 bp, Homo sapiens
tctctatgtatttac

SEQ ID NO: 1196136 - DNA, 15 bp, Homo sapiens
ttctctatgtattta

SEQ ID NO: 1196137 - DNA, 15 bp, Homo sapiens
tttctctatgtattt

SEQ ID NO: 1196138 - DNA, 15 bp, Homo sapiens
ttttctctatgtatt

SEQ ID NO: 1196139 - DNA, 15 bp, Homo sapiens
tttttctctatgtat

SEQ ID NO: 1196140 - DNA, 15 bp, Homo sapiens
atttttctctatgta

SEQ ID NO: 1196141 - DNA, 15 bp, Homo sapiens
catttttctctatgt

SEQ ID NO: 1196142 - DNA, 15 bp, Homo sapiens
acatttttctctatg

SEQ ID NO: 1196143 - DNA, 15 bp, Homo sapiens
tacatttttctctat

SEQ ID NO: 1196144 - DNA, 15 bp, Homo sapiens
ttacatttttctcta

SEQ ID NO: 1196145 - DNA, 15 bp, Homo sapiens
cttacatttttctct

SEQ ID NO: 1196146 - DNA, 15 bp, Homo sapiens
ccttacatttttctc

SEQ ID NO: 1196147 - DNA, 15 bp, Homo sapiens
tccttacatttttct

SEQ ID NO: 1196148 - DNA, 15 bp, Homo sapiens
ttccttacatttttc

SEQ ID NO: 1196149 - DNA, 15 bp, Homo sapiens
attccttacattttt

SEQ ID NO: 1196150 - DNA, 15 bp, Homo sapiens
aattccttacatttt

SEQ ID NO: 1196151 - DNA, 15 bp, Homo sapiens
gaattccttacattt

SEQ ID NO: 1196152 - DNA, 15 bp, Homo sapiens
ggaattccttacatt

SEQ ID NO: 1196153 - DNA, 15 bp, Homo sapiens
gggaattccttacat

SEQ ID NO: 1196154 - DNA, 15 bp, Homo sapiens
tgggaattccttaca

SEQ ID NO: 1196155 - DNA, 15 bp, Homo sapiens
ttgggaattccttac

SEQ ID NO: 1196156 - DNA, 15 bp, Homo sapiens
cttgggaattcctta

SEQ ID NO: 1196157 - DNA, 15 bp, Homo sapiens
ccttgggaattcctt

SEQ ID NO: 1196158 - DNA, 15 bp, Homo sapiens
gccttgggaattcct

SEQ ID NO: 1196159 - DNA, 15 bp, Homo sapiens
tgccttgggaattcc

SEQ ID NO: 1196160 - DNA, 15 bp, Homo sapiens
gtgccttgggaattc

SEQ ID NO: 1196161 - DNA, 15 bp, Homo sapiens
ggtgccttgggaatt

SEQ ID NO: 1196162 - DNA, 15 bp, Homo sapiens
gggtgccttgggaat

SEQ ID NO: 1196163 - DNA, 15 bp, Homo sapiens
ggggtgccttgggaa

SEQ ID NO: 1196164 - DNA, 15 bp, Homo sapiens
tggggtgccttggga

SEQ ID NO: 1196165 - DNA, 15 bp, Homo sapiens
ctggggtgccttggg

SEQ ID NO: 1196166 - DNA, 15 bp, Homo sapiens
cctggggtgccttgg

SEQ ID NO: 1196167 - DNA, 15 bp, Homo sapiens
acctggggtgccttg

SEQ ID NO: 1196168 - DNA, 15 bp, Homo sapiens
aacctggggtgcctt

SEQ ID NO: 1196169 - DNA, 15 bp, Homo sapiens
aaacctggggtgcct

SEQ ID NO: 1196170 - DNA, 15 bp, Homo sapiens
aaaacctggggtgcc

SEQ ID NO: 1196171 - DNA, 15 bp, Homo sapiens
caaaacctggggtgc

SEQ ID NO: 1196172 - DNA, 15 bp, Homo sapiens
acaaaacctggggtg

SEQ ID NO: 1196173 - DNA, 15 bp, Homo sapiens
cacaaaacctggggt

SEQ ID NO: 1196174 - DNA, 15 bp, Homo sapiens
acacaaaacctgggg

SEQ ID NO: 1196175 - DNA, 15 bp, Homo sapiens
aacacaaaacctggg

SEQ ID NO: 1196176 - DNA, 15 bp, Homo sapiens
taacacaaaacctgg

SEQ ID NO: 1196177 - DNA, 15 bp, Homo sapiens
ttaacacaaaacctg

SEQ ID NO: 1196178 - DNA, 15 bp, Homo sapiens
tttaacacaaaacct

SEQ ID NO: 1196179 - DNA, 15 bp, Homo sapiens
ttttaacacaaaacc

SEQ ID NO: 1196180 - DNA, 15 bp, Homo sapiens
attttaacacaaaac

SEQ ID NO: 1196181 - DNA, 15 bp, Homo sapiens
aattttaacacaaaa

SEQ ID NO: 1196182 - DNA, 15 bp, Homo sapiens
aaattttaacacaaa

SEQ ID NO: 1196183 - DNA, 15 bp, Homo sapiens
gaaattttaacacaa

SEQ ID NO: 1196184 - DNA, 15 bp, Homo sapiens
tgaaattttaacaca

SEQ ID NO: 1196185 - DNA, 15 bp, Homo sapiens
ctgaaattttaacac

SEQ ID NO: 1196186 - DNA, 15 bp, Homo sapiens
tctgaaattttaaca

SEQ ID NO: 1196187 - DNA, 15 bp, Homo sapiens
atctgaaattttaac

SEQ ID NO: 1196188 - DNA, 15 bp, Homo sapiens
catctgaaattttaa

SEQ ID NO: 1196189 - DNA, 15 bp, Homo sapiens
tcatctgaaatttta

SEQ ID NO: 1196190 - DNA, 15 bp, Homo sapiens
ttcatctgaaatttt

SEQ ID NO: 1196191 - DNA, 15 bp, Homo sapiens
tttcatctgaaattt

SEQ ID NO: 1196192 - DNA, 15 bp, Homo sapiens
atttcatctgaaatt

SEQ ID NO: 1196193 - DNA, 15 bp, Homo sapiens
aatttcatctgaaat

SEQ ID NO: 1196194 - DNA, 15 bp, Homo sapiens
taatttcatctgaaa

SEQ ID NO: 1196195 - DNA, 15 bp, Homo sapiens
ttaatttcatctgaa

SEQ ID NO: 1196196 - DNA, 15 bp, Homo sapiens
cttaatttcatctga

SEQ ID NO: 1196197 - DNA, 15 bp, Homo sapiens
acttaatttcatctg

SEQ ID NO: 1196198 - DNA, 15 bp, Homo sapiens
tacttaatttcatct

SEQ ID NO: 1196199 - DNA, 15 bp, Homo sapiens
ttacttaatttcatc

SEQ ID NO: 1196200 - DNA, 15 bp, Homo sapiens
tttacttaatttcat

SEQ ID NO: 1196201 - DNA, 15 bp, Homo sapiens
atttacttaatttca

SEQ ID NO: 1196202 - DNA, 15 bp, Homo sapiens
catttacttaatttc

SEQ ID NO: 1196203 - DNA, 15 bp, Homo sapiens
aacatttacttaatt

SEQ ID NO: 1196204 - DNA, 15 bp, Homo sapiens
aaacatttacttaat

SEQ ID NO: 1196205 - DNA, 15 bp, Homo sapiens
taaacatttacttaa

SEQ ID NO: 1196206 - DNA, 15 bp, Homo sapiens
ctaaacatttactta

SEQ ID NO: 1196207 - DNA, 15 bp, Homo sapiens
cctaaacatttactt

SEQ ID NO: 1196208 - DNA, 15 bp, Homo sapiens
tcctaaacatttact

SEQ ID NO: 1196209 - DNA, 15 bp, Homo sapiens
atcctaaacatttac

SEQ ID NO: 1196210 - DNA, 15 bp, Homo sapiens
tatcctaaacattta

SEQ ID NO: 1196211 - DNA, 15 bp, Homo sapiens
ttatcctaaacattt

SEQ ID NO: 1196212 - DNA, 15 bp, Homo sapiens
attatcctaaacatt

SEQ ID NO: 1196213 - DNA, 15 bp, Homo sapiens
tattatcctaaacat

SEQ ID NO: 1196214 - DNA, 15 bp, Homo sapiens
gtattatcctaaaca

SEQ ID NO: 1196215 - DNA, 15 bp, Homo sapiens
ggtattatcctaaac

SEQ ID NO: 1196216 - DNA, 15 bp, Homo sapiens
tggtattatcctaaa

SEQ ID NO: 1196217 - DNA, 15 bp, Homo sapiens
ctggtattatcctaa

SEQ ID NO: 1196218 - DNA, 15 bp, Homo sapiens
tctggtattatccta

SEQ ID NO: 1196219 - DNA, 15 bp, Homo sapiens
atctggtattatcct

SEQ ID NO: 1196220 - DNA, 15 bp, Homo sapiens
gatctggtattatcc

SEQ ID NO: 1196221 - DNA, 15 bp, Homo sapiens
ggatctggtattatc

SEQ ID NO: 1196222 - DNA, 15 bp, Homo sapiens
aggatctggtattat

SEQ ID NO: 1196223 - DNA, 15 bp, Homo sapiens
aaggatctggtatta

SEQ ID NO: 1196224 - DNA, 15 bp, Homo sapiens
gaaggatctggtatt

SEQ ID NO: 1196225 - DNA, 15 bp, Homo sapiens
agaaggatctggtat

SEQ ID NO: 1196226 - DNA, 15 bp, Homo sapiens
cagaaggatctggta

SEQ ID NO: 1196227 - DNA, 15 bp, Homo sapiens
tcagaaggatctggt

SEQ ID NO: 1196228 - DNA, 15 bp, Homo sapiens
ttcagaaggatctgg

SEQ ID NO: 1196229 - DNA, 15 bp, Homo sapiens
attcagaaggatctg

SEQ ID NO: 1196230 - DNA, 15 bp, Homo sapiens
aattcagaaggatct

SEQ ID NO: 1196231 - DNA, 15 bp, Homo sapiens
gaattcagaaggatc

SEQ ID NO: 1196232 - DNA, 15 bp, Homo sapiens
agaattcagaaggat

SEQ ID NO: 1196233 - DNA, 15 bp, Homo sapiens
gagaattcagaagga

SEQ ID NO: 1196234 - DNA, 15 bp, Homo sapiens
tgagaattcagaagg

SEQ ID NO: 1196235 - DNA, 15 bp, Homo sapiens
atgagaattcagaag

SEQ ID NO: 1196236 - DNA, 15 bp, Homo sapiens
gatgagaattcagaa

SEQ ID NO: 1196237 - DNA, 15 bp, Homo sapiens
agatgagaattcaga

SEQ ID NO: 1196238 - DNA, 15 bp, Homo sapiens
gagatgagaattcag

SEQ ID NO: 1196239 - DNA, 15 bp, Homo sapiens
tgagatgagaattca

SEQ ID NO: 1196240 - DNA, 15 bp, Homo sapiens
atgagatgagaattc

SEQ ID NO: 1196241 - DNA, 15 bp, Homo sapiens
gatgagatgagaatt

SEQ ID NO: 1196242 - DNA, 15 bp, Homo sapiens
cgatgagatgagaat

SEQ ID NO: 1196243 - DNA, 15 bp, Homo sapiens
tcgatgagatgagaa

SEQ ID NO: 1196244 - DNA, 15 bp, Homo sapiens
gtcgatgagatgaga

SEQ ID NO: 1196245 - DNA, 15 bp, Homo sapiens
agtcgatgagatgag

SEQ ID NO: 1196246 - DNA, 15 bp, Homo sapiens
aagtcgatgagatga

SEQ ID NO: 1196247 - DNA, 15 bp, Homo sapiens
gaagtcgatgagatg

SEQ ID NO: 1196248 - DNA, 15 bp, Homo sapiens
tgaagtcgatgagat

SEQ ID NO: 1196249 - DNA, 15 bp, Homo sapiens
atgaagtcgatgaga

SEQ ID NO: 1196250 - DNA, 15 bp, Homo sapiens
aatgaagtcgatgag

SEQ ID NO: 1196251 - DNA, 15 bp, Homo sapiens
aaatgaagtcgatga

SEQ ID NO: 1196252 - DNA, 15 bp, Homo sapiens
aaaatgaagtcgatg

SEQ ID NO: 1196253 - DNA, 15 bp, Homo sapiens
gaaaatgaagtcgat

SEQ ID NO: 1196254 - DNA, 15 bp, Homo sapiens
tgaaaatgaagtcga

SEQ ID NO: 1196255 - DNA, 15 bp, Homo sapiens
ctgaaaatgaagtcg

SEQ ID NO: 1196256 - DNA, 15 bp, Homo sapiens
gctgaaaatgaagtc

SEQ ID NO: 1196257 - DNA, 15 bp, Homo sapiens
tgctgaaaatgaagt

SEQ ID NO: 1196258 - DNA, 15 bp, Homo sapiens
atgctgaaaatgaag

SEQ ID NO: 1196259 - DNA, 15 bp, Homo sapiens
tatgctgaaaatgaa

SEQ ID NO: 1196260 - DNA, 15 bp, Homo sapiens
gtatgctgaaaatga

SEQ ID NO: 1196261 - DNA, 15 bp, Homo sapiens
agtatgctgaaaatg

SEQ ID NO: 1196262 - DNA, 15 bp, Homo sapiens
cagtatgctgaaaat

SEQ ID NO: 1196263 - DNA, 15 bp, Homo sapiens
tcagtatgctgaaaa

SEQ ID NO: 1196264 - DNA, 15 bp, Homo sapiens
ctcagtatgctgaaa

SEQ ID NO: 1196265 - DNA, 15 bp, Homo sapiens
cctcagtatgctgaa

SEQ ID NO: 1196266 - DNA, 15 bp, Homo sapiens
tcctcagtatgctga

SEQ ID NO: 1196267 - DNA, 15 bp, Homo sapiens
atcctcagtatgctg

SEQ ID NO: 1196268 - DNA, 15 bp, Homo sapiens
gatcctcagtatgct

SEQ ID NO: 1196269 - DNA, 15 bp, Homo sapiens
agatcctcagtatgc

SEQ ID NO: 1196270 - DNA, 15 bp, Homo sapiens
gagatcctcagtatg

SEQ ID NO: 1196271 - DNA, 15 bp, Homo sapiens
agagatcctcagtat

SEQ ID NO: 1196272 - DNA, 15 bp, Homo sapiens
gagagatcctcagta

SEQ ID NO: 1196273 - DNA, 15 bp, Homo sapiens
cgagagatcctcagt

SEQ ID NO: 1196274 - DNA, 15 bp, Homo sapiens
gcgagagatcctcag

SEQ ID NO: 1196275 - DNA, 15 bp, Homo sapiens
tgcgagagatcctca

SEQ ID NO: 1196276 - DNA, 15 bp, Homo sapiens
ctgcgagagatcctc

SEQ ID NO: 1196277 - DNA, 15 bp, Homo sapiens
cctgcgagagatcct

SEQ ID NO: 1196278 - DNA, 15 bp, Homo sapiens
ccctgcgagagatcc

SEQ ID NO: 1196279 - DNA, 15 bp, Homo sapiens
accctgcgagagatc

SEQ ID NO: 1196280 - DNA, 15 bp, Homo sapiens
gaccctgcgagagat

SEQ ID NO: 1196281 - DNA, 15 bp, Homo sapiens
ggaccctgcgagaga

SEQ ID NO: 1196282 - DNA, 15 bp, Homo sapiens
aggaccctgcgagag

SEQ ID NO: 1196283 - DNA, 15 bp, Homo sapiens
aaggaccctgcgaga

SEQ ID NO: 1196284 - DNA, 15 bp, Homo sapiens
caaggaccctgcgag

SEQ ID NO: 1196285 - DNA, 15 bp, Homo sapiens
tcaaggaccctgcga

SEQ ID NO: 1196286 - DNA, 15 bp, Homo sapiens
atcaaggaccctgcg

SEQ ID NO: 1196287 - DNA, 15 bp, Homo sapiens
tatcaaggaccctgc

SEQ ID NO: 1196288 - DNA, 15 bp, Homo sapiens
atatcaaggaccctg

SEQ ID NO: 1196289 - DNA, 15 bp, Homo sapiens
gatatcaaggaccct

SEQ ID NO: 1196290 - DNA, 15 bp, Homo sapiens
agatatcaaggaccc

SEQ ID NO: 1196291 - DNA, 15 bp, Homo sapiens
aagatatcaaggacc

SEQ ID NO: 1196292 - DNA, 15 bp, Homo sapiens
aaagatatcaaggac

SEQ ID NO: 1196293 - DNA, 15 bp, Homo sapiens
gaaagatatcaagga

SEQ ID NO: 1196294 - DNA, 15 bp, Homo sapiens
tgaaagatatcaagg

SEQ ID NO: 1196295 - DNA, 15 bp, Homo sapiens
ctgaaagatatcaag

SEQ ID NO: 1196296 - DNA, 15 bp, Homo sapiens
gctgaaagatatcaa

SEQ ID NO: 1196297 - DNA, 15 bp, Homo sapiens
cgctgaaagatatca

SEQ ID NO: 1196298 - DNA, 15 bp, Homo sapiens
acgctgaaagatatc

SEQ ID NO: 1196299 - DNA, 15 bp, Homo sapiens
cacgctgaaagatat

SEQ ID NO: 1196300 - DNA, 15 bp, Homo sapiens
aacacgctgaaagat

SEQ ID NO: 1196301 - DNA, 15 bp, Homo sapiens
taacacgctgaaaga

SEQ ID NO: 1196302 - DNA, 15 bp, Homo sapiens
ttaacacgctgaaag

SEQ ID NO: 1196303 - DNA, 15 bp, Homo sapiens
attaacacgctgaaa

SEQ ID NO: 1196304 - DNA, 15 bp, Homo sapiens
tattaacacgctgaa

SEQ ID NO: 1196305 - DNA, 15 bp, Homo sapiens
gtattaacacgctga

SEQ ID NO: 1196306 - DNA, 15 bp, Homo sapiens
agtattaacacgctg

SEQ ID NO: 1196307 - DNA, 15 bp, Homo sapiens
gagtattaacacgct

SEQ ID NO: 1196308 - DNA, 15 bp, Homo sapiens
agagtattaacacgc

SEQ ID NO: 1196309 - DNA, 15 bp, Homo sapiens
cagagtattaacacg

SEQ ID NO: 1196310 - DNA, 15 bp, Homo sapiens
tcagagtattaacac

SEQ ID NO: 1196311 - DNA, 15 bp, Homo sapiens
ttcagagtattaaca

SEQ ID NO: 1196312 - DNA, 15 bp, Homo sapiens
tttcagagtattaac

SEQ ID NO: 1196313 - DNA, 15 bp, Homo sapiens
atttcagagtattaa

SEQ ID NO: 1196314 - DNA, 15 bp, Homo sapiens
aatttcagagtatta

SEQ ID NO: 1196315 - DNA, 15 bp, Homo sapiens
taatttcagagtatt

SEQ ID NO: 1196316 - DNA, 15 bp, Homo sapiens
gtaatttcagagtat

SEQ ID NO: 1196317 - DNA, 15 bp, Homo sapiens
tgtaatttcagagta

SEQ ID NO: 1196318 - DNA, 15 bp, Homo sapiens
ttgtaatttcagagt

SEQ ID NO: 1196319 - DNA, 15 bp, Homo sapiens
tttgtaatttcagag

SEQ ID NO: 1196320 - DNA, 15 bp, Homo sapiens
atttgtaatttcaga

SEQ ID NO: 1196321 - DNA, 15 bp, Homo sapiens
gatttgtaatttcag

SEQ ID NO: 1196322 - DNA, 15 bp, Homo sapiens
agatttgtaatttca

SEQ ID NO: 1196323 - DNA, 15 bp, Homo sapiens
gagatttgtaatttc

SEQ ID NO: 1196324 - DNA, 15 bp, Homo sapiens
tgagatttgtaattt

SEQ ID NO: 1196325 - DNA, 15 bp, Homo sapiens
ttgagatttgtaatt

SEQ ID NO: 1196326 - DNA, 15 bp, Homo sapiens
tttgagatttgtaat

SEQ ID NO: 1196327 - DNA, 15 bp, Homo sapiens
ttttgagatttgtaa

SEQ ID NO: 1196328 - DNA, 15 bp, Homo sapiens
attttgagatttgta

SEQ ID NO: 1196329 - DNA, 15 bp, Homo sapiens
gattttgagatttgt

SEQ ID NO: 1196330 - DNA, 15 bp, Homo sapiens
tgattttgagatttg

SEQ ID NO: 1196331 - DNA, 15 bp, Homo sapiens
gtgattttgagattt

SEQ ID NO: 1196332 - DNA, 15 bp, Homo sapiens
agtgattttgagatt

SEQ ID NO: 1196333 - DNA, 15 bp, Homo sapiens
aagtgattttgagat

SEQ ID NO: 1196334 - DNA, 15 bp, Homo sapiens
gaagtgattttgaga

SEQ ID NO: 1196335 - DNA, 15 bp, Homo sapiens
gtgaagtgattttga

SEQ ID NO: 1196336 - DNA, 15 bp, Homo sapiens
cgtgaagtgattttg

SEQ ID NO: 1196337 - DNA, 15 bp, Homo sapiens
gcgtgaagtgatttt

SEQ ID NO: 1196338 - DNA, 15 bp, Homo sapiens
ggcgtgaagtgattt

SEQ ID NO: 1196339 - DNA, 15 bp, Homo sapiens
gggcgtgaagtgatt

SEQ ID NO: 1196340 - DNA, 15 bp, Homo sapiens
tgggcgtgaagtgat

SEQ ID NO: 1196341 - DNA, 15 bp, Homo sapiens
atgggcgtgaagtga

SEQ ID NO: 1196342 - DNA, 15 bp, Homo sapiens
tatgggcgtgaagtg

SEQ ID NO: 1196343 - DNA, 15 bp, Homo sapiens
ttatgggcgtgaagt

SEQ ID NO: 1196344 - DNA, 15 bp, Homo sapiens
tttatgggcgtgaag

SEQ ID NO: 1196345 - DNA, 15 bp, Homo sapiens
gtttatgggcgtgaa

SEQ ID NO: 1196346 - DNA, 15 bp, Homo sapiens
ggtttatgggcgtga

SEQ ID NO: 1196347 - DNA, 15 bp, Homo sapiens
tggtttatgggcgtg

SEQ ID NO: 1196348 - DNA, 15 bp, Homo sapiens
ttggtttatgggcgt

SEQ ID NO: 1196349 - DNA, 15 bp, Homo sapiens
tttggtttatgggcg

SEQ ID NO: 1196350 - DNA, 15 bp, Homo sapiens
ttttggtttatgggc

SEQ ID NO: 1196351 - DNA, 15 bp, Homo sapiens
attttggtttatggg

SEQ ID NO: 1196352 - DNA, 15 bp, Homo sapiens
aattttggtttatgg

SEQ ID NO: 1196353 - DNA, 15 bp, Homo sapiens
gaattttggtttatg

SEQ ID NO: 1196354 - DNA, 15 bp, Homo sapiens
tgaattttggtttat

SEQ ID NO: 1196355 - DNA, 15 bp, Homo sapiens
ttgaattttggttta

SEQ ID NO: 1196356 - DNA, 15 bp, Homo sapiens
attgaattttggttt

SEQ ID NO: 1196357 - DNA, 15 bp, Homo sapiens
cattgaattttggtt

SEQ ID NO: 1196358 - DNA, 15 bp, Homo sapiens
ccattgaattttggt

SEQ ID NO: 1196359 - DNA, 15 bp, Homo sapiens
gccattgaattttgg

SEQ ID NO: 1196360 - DNA, 15 bp, Homo sapiens
agccattgaattttg

SEQ ID NO: 1196361 - DNA, 15 bp, Homo sapiens
tagccattgaatttt

SEQ ID NO: 1196362 - DNA, 15 bp, Homo sapiens
gtagccattgaattt

SEQ ID NO: 1196363 - DNA, 15 bp, Homo sapiens
ggtagccattgaatt

SEQ ID NO: 1196364 - DNA, 15 bp, Homo sapiens
tggtagccattgaat

SEQ ID NO: 1196365 - DNA, 15 bp, Homo sapiens
atggtagccattgaa

SEQ ID NO: 1196366 - DNA, 15 bp, Homo sapiens
gatggtagccattga

SEQ ID NO: 1196367 - DNA, 15 bp, Homo sapiens
agatggtagccattg

SEQ ID NO: 1196368 - DNA, 15 bp, Homo sapiens
cagatggtagccatt

SEQ ID NO: 1196369 - DNA, 15 bp, Homo sapiens
gcagatggtagccat

SEQ ID NO: 1196370 - DNA, 15 bp, Homo sapiens
ggcagatggtagcca

SEQ ID NO: 1196371 - DNA, 15 bp, Homo sapiens
aggcagatggtagcc

SEQ ID NO: 1196372 - DNA, 15 bp, Homo sapiens
taggcagatggtagc

SEQ ID NO: 1196373 - DNA, 15 bp, Homo sapiens
ttaggcagatggtag

SEQ ID NO: 1196374 - DNA, 15 bp, Homo sapiens
attaggcagatggta

SEQ ID NO: 1196375 - DNA, 15 bp, Homo sapiens
tattaggcagatggt

SEQ ID NO: 1196376 - DNA, 15 bp, Homo sapiens
ttattaggcagatgg

SEQ ID NO: 1196377 - DNA, 15 bp, Homo sapiens
tttattaggcagatg

SEQ ID NO: 1196378 - DNA, 15 bp, Homo sapiens
gtttattaggcagat

SEQ ID NO: 1196379 - DNA, 15 bp, Homo sapiens
ggtttattaggcaga

SEQ ID NO: 1196380 - DNA, 15 bp, Homo sapiens
tggtttattaggcag

SEQ ID NO: 1196381 - DNA, 15 bp, Homo sapiens
ttggtttattaggca

SEQ ID NO: 1196382 - DNA, 15 bp, Homo sapiens
cttggtttattaggc

SEQ ID NO: 1196383 - DNA, 15 bp, Homo sapiens
gcttggtttattagg

SEQ ID NO: 1196384 - DNA, 15 bp, Homo sapiens
agcttggtttattag

SEQ ID NO: 1196385 - DNA, 15 bp, Homo sapiens
gagcttggtttatta

SEQ ID NO: 1196386 - DNA, 15 bp, Homo sapiens
ggagcttggtttatt

SEQ ID NO: 1196387 - DNA, 15 bp, Homo sapiens
gggagcttggtttat

SEQ ID NO: 1196388 - DNA, 15 bp, Homo sapiens
tgggagcttggttta

SEQ ID NO: 1196389 - DNA, 15 bp, Homo sapiens
atgggagcttggttt

SEQ ID NO: 1196390 - DNA, 15 bp, Homo sapiens
aatgggagcttggtt

SEQ ID NO: 1196391 - DNA, 15 bp, Homo sapiens
gaatgggagcttggt

SEQ ID NO: 1196392 - DNA, 15 bp, Homo sapiens
ggaatgggagcttgg

SEQ ID NO: 1196393 - DNA, 15 bp, Homo sapiens
aggaatgggagcttg

SEQ ID NO: 1196394 - DNA, 15 bp, Homo sapiens
gaggaatgggagctt

SEQ ID NO: 1196395 - DNA, 15 bp, Homo sapiens
tgaggaatgggagct

SEQ ID NO: 1196396 - DNA, 15 bp, Homo sapiens
ctgaggaatgggagc

SEQ ID NO: 1196397 - DNA, 15 bp, Homo sapiens
gctgaggaatgggag

SEQ ID NO: 1196398 - DNA, 15 bp, Homo sapiens
ggctgaggaatggga

SEQ ID NO: 1196399 - DNA, 15 bp, Homo sapiens
aggctgaggaatggg

SEQ ID NO: 1196400 - DNA, 15 bp, Homo sapiens
caggctgaggaatgg

SEQ ID NO: 1196401 - DNA, 15 bp, Homo sapiens
gcaggctgaggaatg

SEQ ID NO: 1196402 - DNA, 15 bp, Homo sapiens
ggcaggctgaggaat

SEQ ID NO: 1196403 - DNA, 15 bp, Homo sapiens
tggcaggctgaggaa

SEQ ID NO: 1196404 - DNA, 15 bp, Homo sapiens
gtggcaggctgagga

SEQ ID NO: 1196405 - DNA, 15 bp, Homo sapiens
tgtggcaggctgagg

SEQ ID NO: 1196406 - DNA, 15 bp, Homo sapiens
ttgtggcaggctgag

SEQ ID NO: 1196407 - DNA, 15 bp, Homo sapiens
tttgtggcaggctga

SEQ ID NO: 1196408 - DNA, 15 bp, Homo sapiens
ctttgtggcaggctg

SEQ ID NO: 1196409 - DNA, 15 bp, Homo sapiens
cctttgtggcaggct

SEQ ID NO: 1196410 - DNA, 15 bp, Homo sapiens
gcctttgtggcaggc

SEQ ID NO: 1196411 - DNA, 15 bp, Homo sapiens
agcctttgtggcagg

SEQ ID NO: 1196412 - DNA, 15 bp, Homo sapiens
gagcctttgtggcag

SEQ ID NO: 1196413 - DNA, 15 bp, Homo sapiens
agagcctttgtggca

SEQ ID NO: 1196414 - DNA, 15 bp, Homo sapiens
gagagcctttgtggc

SEQ ID NO: 1196415 - DNA, 15 bp, Homo sapiens
agagagcctttgtgg

SEQ ID NO: 1196416 - DNA, 15 bp, Homo sapiens
tagagagcctttgtg

SEQ ID NO: 1196417 - DNA, 15 bp, Homo sapiens
atagagagcctttgt

SEQ ID NO: 1196418 - DNA, 15 bp, Homo sapiens
catagagagcctttg

SEQ ID NO: 1196419 - DNA, 15 bp, Homo sapiens
tcatagagagccttt

SEQ ID NO: 1196420 - DNA, 15 bp, Homo sapiens
atcatagagagcctt

SEQ ID NO: 1196421 - DNA, 15 bp, Homo sapiens
gatcatagagagcct

SEQ ID NO: 1196422 - DNA, 15 bp, Homo sapiens
agatcatagagagcc

SEQ ID NO: 1196423 - DNA, 15 bp, Homo sapiens
aagatcatagagagc

SEQ ID NO: 1196424 - DNA, 15 bp, Homo sapiens
aaagatcatagagag

SEQ ID NO: 1196425 - DNA, 15 bp, Homo sapiens
gaaagatcatagaga

SEQ ID NO: 1196426 - DNA, 15 bp, Homo sapiens
agaaagatcatagag

SEQ ID NO: 1196427 - DNA, 15 bp, Homo sapiens
tagaaagatcataga

SEQ ID NO: 1196428 - DNA, 15 bp, Homo sapiens
ctagaaagatcatag

SEQ ID NO: 1196429 - DNA, 15 bp, Homo sapiens
gctagaaagatcata

SEQ ID NO: 1196430 - DNA, 15 bp, Homo sapiens
agctagaaagatcat

SEQ ID NO: 1196431 - DNA, 15 bp, Homo sapiens
aagctagaaagatca

SEQ ID NO: 1196432 - DNA, 15 bp, Homo sapiens
aaagctagaaagatc

SEQ ID NO: 1196433 - DNA, 15 bp, Homo sapiens
aaaagctagaaagat

SEQ ID NO: 1196434 - DNA, 15 bp, Homo sapiens
gaaaagctagaaaga

SEQ ID NO: 1196435 - DNA, 15 bp, Homo sapiens
agaaaagctagaaag

SEQ ID NO: 1196436 - DNA, 15 bp, Homo sapiens
gagaaaagctagaaa

SEQ ID NO: 1196437 - DNA, 15 bp, Homo sapiens
tgagaaaagctagaa

SEQ ID NO: 1196438 - DNA, 15 bp, Homo sapiens
atgagaaaagctaga

SEQ ID NO: 1196439 - DNA, 15 bp, Homo sapiens
gatgagaaaagctag

SEQ ID NO: 1196440 - DNA, 15 bp, Homo sapiens
tgatgagaaaagcta

SEQ ID NO: 1196441 - DNA, 15 bp, Homo sapiens
gtgatgagaaaagct

SEQ ID NO: 1196442 - DNA, 15 bp, Homo sapiens
ggtgatgagaaaagc

SEQ ID NO: 1196443 - DNA, 15 bp, Homo sapiens
tggtgatgagaaaag

SEQ ID NO: 1196444 - DNA, 15 bp, Homo sapiens
gtggtgatgagaaaa

SEQ ID NO: 1196445 - DNA, 15 bp, Homo sapiens
agtggtgatgagaaa

SEQ ID NO: 1196446 - DNA, 15 bp, Homo sapiens
cagtggtgatgagaa

SEQ ID NO: 1196447 - DNA, 15 bp, Homo sapiens
tcagtggtgatgaga

SEQ ID NO: 1196448 - DNA, 15 bp, Homo sapiens
ctcagtggtgatgag

SEQ ID NO: 1196449 - DNA, 15 bp, Homo sapiens
cctcagtggtgatga

SEQ ID NO: 1196450 - DNA, 15 bp, Homo sapiens
gcctcagtggtgatg

SEQ ID NO: 1196451 - DNA, 15 bp, Homo sapiens
ggcctcagtggtgat

SEQ ID NO: 1196452 - DNA, 15 bp, Homo sapiens
gggcctcagtggtga

SEQ ID NO: 1196453 - DNA, 15 bp, Homo sapiens
tgggcctcagtggtg

SEQ ID NO: 1196454 - DNA, 15 bp, Homo sapiens
gtgggcctcagtggt

SEQ ID NO: 1196455 - DNA, 15 bp, Homo sapiens
agtgggcctcagtgg

SEQ ID NO: 1196456 - DNA, 15 bp, Homo sapiens
aagtgggcctcagtg

SEQ ID NO: 1196457 - DNA, 15 bp, Homo sapiens
gaagtgggcctcagt

SEQ ID NO: 1196458 - DNA, 15 bp, Homo sapiens
ggaagtgggcctcag

SEQ ID NO: 1196459 - DNA, 15 bp, Homo sapiens
tggaagtgggcctca

SEQ ID NO: 1196460 - DNA, 15 bp, Homo sapiens
ttggaagtgggcctc

SEQ ID NO: 1196461 - DNA, 15 bp, Homo sapiens
attggaagtgggcct

SEQ ID NO: 1196462 - DNA, 15 bp, Homo sapiens
aattggaagtgggcc

SEQ ID NO: 1196463 - DNA, 15 bp, Homo sapiens
gaattggaagtgggc

SEQ ID NO: 1196464 - DNA, 15 bp, Homo sapiens
agaattggaagtggg

SEQ ID NO: 1196465 - DNA, 15 bp, Homo sapiens
cagaattggaagtgg

SEQ ID NO: 1196466 - DNA, 15 bp, Homo sapiens
gcagaattggaagtg

SEQ ID NO: 1196467 - DNA, 15 bp, Homo sapiens
ggcagaattggaagt

SEQ ID NO: 1196468 - DNA, 15 bp, Homo sapiens
tggcagaattggaag

SEQ ID NO: 1196469 - DNA, 15 bp, Homo sapiens
ctggcagaattggaa

SEQ ID NO: 1196470 - DNA, 15 bp, Homo sapiens
cctggcagaattgga

SEQ ID NO: 1196471 - DNA, 15 bp, Homo sapiens
acctggcagaattgg

SEQ ID NO: 1196472 - DNA, 15 bp, Homo sapiens
gacctggcagaattg

SEQ ID NO: 1196473 - DNA, 15 bp, Homo sapiens
ggacctggcagaatt

SEQ ID NO: 1196474 - DNA, 15 bp, Homo sapiens
gggacctggcagaat

SEQ ID NO: 1196475 - DNA, 15 bp, Homo sapiens
ggggacctggcagaa

SEQ ID NO: 1196476 - DNA, 15 bp, Homo sapiens
aggggacctggcaga

SEQ ID NO: 1196477 - DNA, 15 bp, Homo sapiens
aaggggacctggcag

SEQ ID NO: 1196478 - DNA, 15 bp, Homo sapiens
aaaggggacctggca

SEQ ID NO: 1196479 - DNA, 15 bp, Homo sapiens
gaaaggggacctggc

SEQ ID NO: 1196480 - DNA, 15 bp, Homo sapiens
tgaaaggggacctgg

SEQ ID NO: 1196481 - DNA, 15 bp, Homo sapiens
ctgaaaggggacctg

SEQ ID NO: 1196482 - DNA, 15 bp, Homo sapiens
actgaaaggggacct

SEQ ID NO: 1196483 - DNA, 15 bp, Homo sapiens
aactgaaaggggacc

SEQ ID NO: 1196484 - DNA, 15 bp, Homo sapiens
caactgaaaggggac

SEQ ID NO: 1196485 - DNA, 15 bp, Homo sapiens
acaactgaaagggga

SEQ ID NO: 1196486 - DNA, 15 bp, Homo sapiens
gacaactgaaagggg

SEQ ID NO: 1196487 - DNA, 15 bp, Homo sapiens
agacaactgaaaggg

SEQ ID NO: 1196488 - DNA, 15 bp, Homo sapiens
gagacaactgaaagg

SEQ ID NO: 1196489 - DNA, 15 bp, Homo sapiens
agagacaactgaaag

SEQ ID NO: 1196490 - DNA, 15 bp, Homo sapiens
gagagacaactgaaa

SEQ ID NO: 1196491 - DNA, 15 bp, Homo sapiens
ggagagacaactgaa

SEQ ID NO: 1196492 - DNA, 15 bp, Homo sapiens
gggagagacaactga

SEQ ID NO: 1196493 - DNA, 15 bp, Homo sapiens
agggagagacaactg

SEQ ID NO: 1196494 - DNA, 15 bp, Homo sapiens
aagggagagacaact

SEQ ID NO: 1196495 - DNA, 15 bp, Homo sapiens
gaagggagagacaac

SEQ ID NO: 1196496 - DNA, 15 bp, Homo sapiens
agaagggagagacaa

SEQ ID NO: 1196497 - DNA, 15 bp, Homo sapiens
gagaagggagagaca

SEQ ID NO: 1196498 - DNA, 15 bp, Homo sapiens
agagaagggagagac

SEQ ID NO: 1196499 - DNA, 15 bp, Homo sapiens
tagagaagggagaga

SEQ ID NO: 1196500 - DNA, 15 bp, Homo sapiens
ttagagaagggagag

SEQ ID NO: 1196501 - DNA, 15 bp, Homo sapiens
gttagagaagggaga

SEQ ID NO: 1196502 - DNA, 15 bp, Homo sapiens
tgttagagaagggag

SEQ ID NO: 1196503 - DNA, 15 bp, Homo sapiens
ctgttagagaaggga

SEQ ID NO: 1196504 - DNA, 15 bp, Homo sapiens
gctgttagagaaggg

SEQ ID NO: 1196505 - DNA, 15 bp, Homo sapiens
ggctgttagagaagg

SEQ ID NO: 1196506 - DNA, 15 bp, Homo sapiens
tggctgttagagaag

SEQ ID NO: 1196507 - DNA, 15 bp, Homo sapiens
ctggctgttagagaa

SEQ ID NO: 1196508 - DNA, 15 bp, Homo sapiens
tctggctgttagaga

SEQ ID NO: 1196509 - DNA, 15 bp, Homo sapiens
atctggctgttagag

SEQ ID NO: 1196510 - DNA, 15 bp, Homo sapiens
tatctggctgttaga

SEQ ID NO: 1196511 - DNA, 15 bp, Homo sapiens
ttatctggctgttag

SEQ ID NO: 1196512 - DNA, 15 bp, Homo sapiens
gttatctggctgtta

SEQ ID NO: 1196513 - DNA, 15 bp, Homo sapiens
agttatctggctgtt

SEQ ID NO: 1196514 - DNA, 15 bp, Homo sapiens
gagttatctggctgt

SEQ ID NO: 1196515 - DNA, 15 bp, Homo sapiens
agagttatctggctg

SEQ ID NO: 1196516 - DNA, 15 bp, Homo sapiens
gagagttatctggct

SEQ ID NO: 1196517 - DNA, 15 bp, Homo sapiens
agagagttatctggc

SEQ ID NO: 1196518 - DNA, 15 bp, Homo sapiens
aagagagttatctgg

SEQ ID NO: 1196519 - DNA, 15 bp, Homo sapiens
aaagagagttatctg

SEQ ID NO: 1196520 - DNA, 15 bp, Homo sapiens
caaagagagttatct

SEQ ID NO: 1196521 - DNA, 15 bp, Homo sapiens
tcaaagagagttatc

SEQ ID NO: 1196522 - DNA, 15 bp, Homo sapiens
ttcaaagagagttat

SEQ ID NO: 1196523 - DNA, 15 bp, Homo sapiens
tttcaaagagagtta

SEQ ID NO: 1196524 - DNA, 15 bp, Homo sapiens
ctttcaaagagagtt

SEQ ID NO: 1196525 - DNA, 15 bp, Homo sapiens
actttcaaagagagt

SEQ ID NO: 1196526 - DNA, 15 bp, Homo sapiens
cactttcaaagagag

SEQ ID NO: 1196527 - DNA, 15 bp, Homo sapiens
ccactttcaaagaga

SEQ ID NO: 1196528 - DNA, 15 bp, Homo sapiens
tccactttcaaagag

SEQ ID NO: 1196529 - DNA, 15 bp, Homo sapiens
ctccactttcaaaga

SEQ ID NO: 1196530 - DNA, 15 bp, Homo sapiens
gctccactttcaaag

SEQ ID NO: 1196531 - DNA, 15 bp, Homo sapiens
tgctccactttcaaa

SEQ ID NO: 1196532 - DNA, 15 bp, Homo sapiens
ctgctccactttcaa

SEQ ID NO: 1196533 - DNA, 15 bp, Homo sapiens
ttcctgctccacttt

SEQ ID NO: 1196534 - DNA, 15 bp, Homo sapiens
gttcctgctccactt

SEQ ID NO: 1196535 - DNA, 15 bp, Homo sapiens
ggttcctgctccact

SEQ ID NO: 1196536 - DNA, 15 bp, Homo sapiens
tggttcctgctccac

SEQ ID NO: 1196537 - DNA, 15 bp, Homo sapiens
atggttcctgctcca

SEQ ID NO: 1196538 - DNA, 15 bp, Homo sapiens
catggttcctgctcc

SEQ ID NO: 1196539 - DNA, 15 bp, Homo sapiens
acatggttcctgctc

SEQ ID NO: 1196540 - DNA, 15 bp, Homo sapiens
gacatggttcctgct

SEQ ID NO: 1196541 - DNA, 15 bp, Homo sapiens
agacatggttcctgc

SEQ ID NO: 1196542 - DNA, 15 bp, Homo sapiens
aagacatggttcctg

SEQ ID NO: 1196543 - DNA, 15 bp, Homo sapiens
taagacatggttcct

SEQ ID NO: 1196544 - DNA, 15 bp, Homo sapiens
gtaagacatggttcc

SEQ ID NO: 1196545 - DNA, 15 bp, Homo sapiens
ggtaagacatggttc

SEQ ID NO: 1196546 - DNA, 15 bp, Homo sapiens
aggtaagacatggtt

SEQ ID NO: 1196547 - DNA, 15 bp, Homo sapiens
aaggtaagacatggt

SEQ ID NO: 1196548 - DNA, 15 bp, Homo sapiens
aaaggtaagacatgg

SEQ ID NO: 1196549 - DNA, 15 bp, Homo sapiens
aaaaggtaagacatg

SEQ ID NO: 1196550 - DNA, 15 bp, Homo sapiens
aaaaaggtaagacat

SEQ ID NO: 1196551 - DNA, 15 bp, Homo sapiens
aaaaaaggtaagaca

SEQ ID NO: 1196552 - DNA, 15 bp, Homo sapiens
aaaaaaaggtaagac

SEQ ID NO: 1196553 - DNA, 15 bp, Homo sapiens
aaaaaaaaggtaaga

SEQ ID NO: 1196554 - DNA, 15 bp, Homo sapiens
aaaaaaaaaggtaag

SEQ ID NO: 1196555 - DNA, 15 bp, Homo sapiens
aaaaaaaaaaggtaa

SEQ ID NO: 1196556 - DNA, 15 bp, Homo sapiens
aaaaaaaaaaaggta

SEQ ID NO: 1196557 - DNA, 15 bp, Homo sapiens
gttaaaaaaaaaaaa

SEQ ID NO: 1196558 - DNA, 15 bp, Homo sapiens
ggttaaaaaaaaaaa

SEQ ID NO: 1196559 - DNA, 15 bp, Homo sapiens
gggttaaaaaaaaaa

SEQ ID NO: 1196560 - DNA, 15 bp, Homo sapiens
ggggttaaaaaaaaa

SEQ ID NO: 1196561 - DNA, 15 bp, Homo sapiens
gggggttaaaaaaaa

SEQ ID NO: 1196562 - DNA, 15 bp, Homo sapiens
tgggggttaaaaaaa

SEQ ID NO: 1196563 - DNA, 15 bp, Homo sapiens
gtgggggttaaaaaa

SEQ ID NO: 1196564 - DNA, 15 bp, Homo sapiens
tgtgggggttaaaaa

SEQ ID NO: 1196565 - DNA, 15 bp, Homo sapiens
ctgtgggggttaaaa

SEQ ID NO: 1196566 - DNA, 15 bp, Homo sapiens
actgtgggggttaaa

SEQ ID NO: 1196567 - DNA, 15 bp, Homo sapiens
cactgtgggggttaa

SEQ ID NO: 1196568 - DNA, 15 bp, Homo sapiens
gcactgtgggggtta

SEQ ID NO: 1196569 - DNA, 15 bp, Homo sapiens
ggcactgtgggggtt

SEQ ID NO: 1196570 - DNA, 15 bp, Homo sapiens
aggcactgtgggggt

SEQ ID NO: 1196571 - DNA, 15 bp, Homo sapiens
taggcactgtggggg

SEQ ID NO: 1196572 - DNA, 15 bp, Homo sapiens
ataggcactgtgggg

SEQ ID NO: 1196573 - DNA, 15 bp, Homo sapiens
aataggcactgtggg

SEQ ID NO: 1196574 - DNA, 15 bp, Homo sapiens
aaataggcactgtgg

SEQ ID NO: 1196575 - DNA, 15 bp, Homo sapiens
taaataggcactgtg

SEQ ID NO: 1196576 - DNA, 15 bp, Homo sapiens
gtaaataggcactgt

SEQ ID NO: 1196577 - DNA, 15 bp, Homo sapiens
tgtaaataggcactg

SEQ ID NO: 1196578 - DNA, 15 bp, Homo sapiens
atgtaaataggcact

SEQ ID NO: 1196579 - DNA, 15 bp, Homo sapiens
aatgtaaataggcac

SEQ ID NO: 1196580 - DNA, 15 bp, Homo sapiens
aaatgtaaataggca

SEQ ID NO: 1196581 - DNA, 15 bp, Homo sapiens
aaaatgtaaataggc

SEQ ID NO: 1196582 - DNA, 15 bp, Homo sapiens
gaaaatgtaaatagg

SEQ ID NO: 1196583 - DNA, 15 bp, Homo sapiens
tgaaaatgtaaatag

SEQ ID NO: 1196584 - DNA, 15 bp, Homo sapiens
ctgaaaatgtaaata

SEQ ID NO: 1196585 - DNA, 15 bp, Homo sapiens
gctgaaaatgtaaat

SEQ ID NO: 1196586 - DNA, 15 bp, Homo sapiens
tgctgaaaatgtaaa

SEQ ID NO: 1196587 - DNA, 15 bp, Homo sapiens
ttgctgaaaatgtaa

SEQ ID NO: 1196588 - DNA, 15 bp, Homo sapiens
tttgctgaaaatgta

SEQ ID NO: 1196589 - DNA, 15 bp, Homo sapiens
atttgctgaaaatgt

SEQ ID NO: 1196590 - DNA, 15 bp, Homo sapiens
catttgctgaaaatg

SEQ ID NO: 1196591 - DNA, 15 bp, Homo sapiens
acatttgctgaaaat

SEQ ID NO: 1196592 - DNA, 15 bp, Homo sapiens
aaacatttgctgaaa

SEQ ID NO: 1196593 - DNA, 15 bp, Homo sapiens
taaacatttgctgaa

SEQ ID NO: 1196594 - DNA, 15 bp, Homo sapiens
ttaaacatttgctga

SEQ ID NO: 1196595 - DNA, 15 bp, Homo sapiens
attaaacatttgctg

SEQ ID NO: 1196596 - DNA, 15 bp, Homo sapiens
aattaaacatttgct

SEQ ID NO: 1196597 - DNA, 15 bp, Homo sapiens
caattaaacatttgc

SEQ ID NO: 1196598 - DNA, 15 bp, Homo sapiens
tcaattaaacatttg

SEQ ID NO: 1196599 - DNA, 15 bp, Homo sapiens
atcaattaaacattt

SEQ ID NO: 1196600 - DNA, 15 bp, Homo sapiens
aatcaattaaacatt

SEQ ID NO: 1196601 - DNA, 15 bp, Homo sapiens
aaatcaattaaacat

SEQ ID NO: 1196602 - DNA, 15 bp, Homo sapiens
aaaatcaattaaaca

SEQ ID NO: 1196603 - DNA, 15 bp, Homo sapiens
aaaaatcaattaaac

SEQ ID NO: 1196604 - DNA, 15 bp, Homo sapiens
caaaaatcaattaaa

SEQ ID NO: 1196605 - DNA, 15 bp, Homo sapiens
tcaaaaatcaattaa

SEQ ID NO: 1196606 - DNA, 15 bp, Homo sapiens
ctcaaaaatcaatta

SEQ ID NO: 1196607 - DNA, 15 bp, Homo sapiens
gctcaaaaatcaatt

SEQ ID NO: 1196608 - DNA, 15 bp, Homo sapiens
tgctcaaaaatcaat

SEQ ID NO: 1196609 - DNA, 15 bp, Homo sapiens
atgctcaaaaatcaa

SEQ ID NO: 1196610 - DNA, 15 bp, Homo sapiens
tatgctcaaaaatca

SEQ ID NO: 1196611 - DNA, 15 bp, Homo sapiens
ttatgctcaaaaatc

SEQ ID NO: 1196612 - DNA, 15 bp, Homo sapiens
tttatgctcaaaaat

SEQ ID NO: 1196613 - DNA, 15 bp, Homo sapiens
ttttatgctcaaaaa

SEQ ID NO: 1196614 - DNA, 15 bp, Homo sapiens
cttttatgctcaaaa

SEQ ID NO: 1196615 - DNA, 15 bp, Homo sapiens
tcttttatgctcaaa

SEQ ID NO: 1196616 - DNA, 15 bp, Homo sapiens
atcttttatgctcaa

SEQ ID NO: 1196617 - DNA, 15 bp, Homo sapiens
catcttttatgctca

SEQ ID NO: 1196618 - DNA, 15 bp, Homo sapiens
tcatcttttatgctc

SEQ ID NO: 1196619 - DNA, 15 bp, Homo sapiens
ttcatcttttatgct

SEQ ID NO: 1196620 - DNA, 15 bp, Homo sapiens
tttcatcttttatgc

SEQ ID NO: 1196621 - DNA, 15 bp, Homo sapiens
ttttcatcttttatg

SEQ ID NO: 1196622 - DNA, 15 bp, Homo sapiens
gttttcatcttttat

SEQ ID NO: 1196623 - DNA, 15 bp, Homo sapiens
tgttttcatctttta

SEQ ID NO: 1196624 - DNA, 15 bp, Homo sapiens
ttgttttcatctttt

SEQ ID NO: 1196625 - DNA, 15 bp, Homo sapiens
tttgttttcatcttt

SEQ ID NO: 1196626 - DNA, 15 bp, Homo sapiens
ctttgttttcatctt

SEQ ID NO: 1196627 - DNA, 15 bp, Homo sapiens
actttgttttcatct

SEQ ID NO: 1196628 - DNA, 15 bp, Homo sapiens
aactttgttttcatc

SEQ ID NO: 1196629 - DNA, 15 bp, Homo sapiens
gataactttgttttc

SEQ ID NO: 1196630 - DNA, 15 bp, Homo sapiens
tgataactttgtttt

SEQ ID NO: 1196631 - DNA, 15 bp, Homo sapiens
atgataactttgttt

SEQ ID NO: 1196632 - DNA, 15 bp, Homo sapiens
tatgataactttgtt

SEQ ID NO: 1196633 - DNA, 15 bp, Homo sapiens
ttatgataactttgt

SEQ ID NO: 1196634 - DNA, 15 bp, Homo sapiens
attatgataactttg

SEQ ID NO: 1196635 - DNA, 15 bp, Homo sapiens
tattatgataacttt

SEQ ID NO: 1196636 - DNA, 15 bp, Homo sapiens
ttattatgataactt

SEQ ID NO: 1196637 - DNA, 15 bp, Homo sapiens
cttattatgataact

SEQ ID NO: 1196638 - DNA, 15 bp, Homo sapiens
gcttattatgataac

SEQ ID NO: 1196639 - DNA, 15 bp, Homo sapiens
ggcttattatgataa

SEQ ID NO: 1196640 - DNA, 15 bp, Homo sapiens
gggcttattatgata

SEQ ID NO: 1196641 - DNA, 15 bp, Homo sapiens
agggcttattatgat

SEQ ID NO: 1196642 - DNA, 15 bp, Homo sapiens
aagggcttattatga

SEQ ID NO: 1196643 - DNA, 15 bp, Homo sapiens
aaagggcttattatg

SEQ ID NO: 1196644 - DNA, 15 bp, Homo sapiens
caaagggcttattat

SEQ ID NO: 1196645 - DNA, 15 bp, Homo sapiens
tcaaagggcttatta

SEQ ID NO: 1196646 - DNA, 15 bp, Homo sapiens
gtcaaagggcttatt

SEQ ID NO: 1196647 - DNA, 15 bp, Homo sapiens
tgtcaaagggcttat

SEQ ID NO: 1196648 - DNA, 15 bp, Homo sapiens
gtgtcaaagggctta

SEQ ID NO: 1196649 - DNA, 15 bp, Homo sapiens
tgtgtcaaagggctt

SEQ ID NO: 1196650 - DNA, 15 bp, Homo sapiens
atgtgtcaaagggct

SEQ ID NO: 1196651 - DNA, 15 bp, Homo sapiens
aatgtgtcaaagggc

SEQ ID NO: 1196652 - DNA, 15 bp, Homo sapiens
aaatgtgtcaaaggg

SEQ ID NO: 1196653 - DNA, 15 bp, Homo sapiens
gaaatgtgtcaaagg

SEQ ID NO: 1196654 - DNA, 15 bp, Homo sapiens
ggaaatgtgtcaaag

SEQ ID NO: 1196655 - DNA, 15 bp, Homo sapiens
aggaaatgtgtcaaa

SEQ ID NO: 1196656 - DNA, 15 bp, Homo sapiens
taggaaatgtgtcaa

SEQ ID NO: 1196657 - DNA, 15 bp, Homo sapiens
ataggaaatgtgtca

SEQ ID NO: 1196658 - DNA, 15 bp, Homo sapiens
tataggaaatgtgtc

SEQ ID NO: 1196659 - DNA, 15 bp, Homo sapiens
ttataggaaatgtgt

SEQ ID NO: 1196660 - DNA, 15 bp, Homo sapiens
gttataggaaatgtg

SEQ ID NO: 1196661 - DNA, 15 bp, Homo sapiens
agttataggaaatgt

SEQ ID NO: 1196662 - DNA, 15 bp, Homo sapiens
cagttataggaaatg

SEQ ID NO: 1196663 - DNA, 15 bp, Homo sapiens
acagttataggaaat

SEQ ID NO: 1196664 - DNA, 15 bp, Homo sapiens
aacagttataggaaa

SEQ ID NO: 1196665 - DNA, 15 bp, Homo sapiens
taacagttataggaa

SEQ ID NO: 1196666 - DNA, 15 bp, Homo sapiens
ctaacagttatagga

SEQ ID NO: 1196667 - DNA, 15 bp, Homo sapiens
tctaacagttatagg

SEQ ID NO: 1196668 - DNA, 15 bp, Homo sapiens
gtctaacagttatag

SEQ ID NO: 1196669 - DNA, 15 bp, Homo sapiens
tgtctaacagttata

SEQ ID NO: 1196670 - DNA, 15 bp, Homo sapiens
ctgtctaacagttat

SEQ ID NO: 1196671 - DNA, 15 bp, Homo sapiens
actgtctaacagtta

SEQ ID NO: 1196672 - DNA, 15 bp, Homo sapiens
cactgtctaacagtt

SEQ ID NO: 1196673 - DNA, 15 bp, Homo sapiens
gcactgtctaacagt

SEQ ID NO: 1196674 - DNA, 15 bp, Homo sapiens
agcactgtctaacag

SEQ ID NO: 1196675 - DNA, 15 bp, Homo sapiens
tagcactgtctaaca

SEQ ID NO: 1196676 - DNA, 15 bp, Homo sapiens
ttagcactgtctaac

SEQ ID NO: 1196677 - DNA, 15 bp, Homo sapiens
tttagcactgtctaa

SEQ ID NO: 1196678 - DNA, 15 bp, Homo sapiens
ttttagcactgtcta

SEQ ID NO: 1196679 - DNA, 15 bp, Homo sapiens
cttttagcactgtct

SEQ ID NO: 1196680 - DNA, 15 bp, Homo sapiens
acttttagcactgtc

SEQ ID NO: 1196681 - DNA, 15 bp, Homo sapiens
gacttttagcactgt

SEQ ID NO: 1196682 - DNA, 15 bp, Homo sapiens
agacttttagcactg

SEQ ID NO: 1196683 - DNA, 15 bp, Homo sapiens
aagacttttagcact

SEQ ID NO: 1196684 - DNA, 15 bp, Homo sapiens
caagacttttagcac

SEQ ID NO: 1196685 - DNA, 15 bp, Homo sapiens
gcaagacttttagca

SEQ ID NO: 1196686 - DNA, 15 bp, Homo sapiens
agcaagacttttagc

SEQ ID NO: 1196687 - DNA, 15 bp, Homo sapiens
aagcaagacttttag

SEQ ID NO: 1196688 - DNA, 15 bp, Homo sapiens
aaagcaagactttta

SEQ ID NO: 1196689 - DNA, 15 bp, Homo sapiens
aaaagcaagactttt

SEQ ID NO: 1196690 - DNA, 15 bp, Homo sapiens
taaaagcaagacttt

SEQ ID NO: 1196691 - DNA, 15 bp, Homo sapiens
ttaaaagcaagactt

SEQ ID NO: 1196692 - DNA, 15 bp, Homo sapiens
tttaaaagcaagact

SEQ ID NO: 1196693 - DNA, 15 bp, Homo sapiens
ttttaaaagcaagac

SEQ ID NO: 1196694 - DNA, 15 bp, Homo sapiens
tttttaaaagcaaga

SEQ ID NO: 1196695 - DNA, 15 bp, Homo sapiens
ttttttaaaagcaag

SEQ ID NO: 1196696 - DNA, 15 bp, Homo sapiens
tttttttaaaagcaa

SEQ ID NO: 1196697 - DNA, 15 bp, Homo sapiens
atttttttaaaagca

SEQ ID NO: 1196698 - DNA, 15 bp, Homo sapiens
aatttttttaaaagc

SEQ ID NO: 1196699 - DNA, 15 bp, Homo sapiens
taatttttttaaaag

SEQ ID NO: 1196700 - DNA, 15 bp, Homo sapiens
ctaatttttttaaaa

SEQ ID NO: 1196701 - DNA, 15 bp, Homo sapiens
tctaatttttttaaa

SEQ ID NO: 1196702 - DNA, 15 bp, Homo sapiens
ttctaatttttttaa

SEQ ID NO: 1196703 - DNA, 15 bp, Homo sapiens
tttctaattttttta

SEQ ID NO: 1196704 - DNA, 15 bp, Homo sapiens
atttctaattttttt

SEQ ID NO: 1196705 - DNA, 15 bp, Homo sapiens
tatttctaatttttt

SEQ ID NO: 1196706 - DNA, 15 bp, Homo sapiens
atatttctaattttt

SEQ ID NO: 1196707 - DNA, 15 bp, Homo sapiens
catatttctaatttt

SEQ ID NO: 1196708 - DNA, 15 bp, Homo sapiens
acatatttctaattt

SEQ ID NO: 1196709 - DNA, 15 bp, Homo sapiens
tacatatttctaatt

SEQ ID NO: 1196710 - DNA, 15 bp, Homo sapiens
gtacatatttctaat

SEQ ID NO: 1196711 - DNA, 15 bp, Homo sapiens
ggtacatatttctaa

SEQ ID NO: 1196712 - DNA, 15 bp, Homo sapiens
aggtacatatttcta

SEQ ID NO: 1196713 - DNA, 15 bp, Homo sapiens
aaggtacatatttct

SEQ ID NO: 1196714 - DNA, 15 bp, Homo sapiens
aaaggtacatatttc

SEQ ID NO: 1196715 - DNA, 15 bp, Homo sapiens
caaaggtacatattt

SEQ ID NO: 1196716 - DNA, 15 bp, Homo sapiens
ccaaaggtacatatt

SEQ ID NO: 1196717 - DNA, 15 bp, Homo sapiens
accaaaggtacatat

SEQ ID NO: 1196718 - DNA, 15 bp, Homo sapiens
caccaaaggtacata

SEQ ID NO: 1196719 - DNA, 15 bp, Homo sapiens
ccaccaaaggtacat

SEQ ID NO: 1196720 - DNA, 15 bp, Homo sapiens
tccaccaaaggtaca

SEQ ID NO: 1196721 - DNA, 15 bp, Homo sapiens
ttccaccaaaggtac

SEQ ID NO: 1196722 - DNA, 15 bp, Homo sapiens
tttccaccaaaggta

SEQ ID NO: 1196723 - DNA, 15 bp, Homo sapiens
ctttccaccaaaggt

SEQ ID NO: 1196724 - DNA, 15 bp, Homo sapiens
tctttccaccaaagg

SEQ ID NO: 1196725 - DNA, 15 bp, Homo sapiens
ctctttccaccaaag

SEQ ID NO: 1196726 - DNA, 15 bp, Homo sapiens
gctctttccaccaaa

SEQ ID NO: 1196727 - DNA, 15 bp, Homo sapiens
agctctttccaccaa

SEQ ID NO: 1196728 - DNA, 15 bp, Homo sapiens
aagctctttccacca

SEQ ID NO: 1196729 - DNA, 15 bp, Homo sapiens
aaagctctttccacc

SEQ ID NO: 1196730 - DNA, 15 bp, Homo sapiens
aaaagctctttccac

SEQ ID NO: 1196731 - DNA, 15 bp, Homo sapiens
gaaaagctctttcca

SEQ ID NO: 1196732 - DNA, 15 bp, Homo sapiens
tgaaaagctctttcc

SEQ ID NO: 1196733 - DNA, 15 bp, Homo sapiens
atgaaaagctctttc

SEQ ID NO: 1196734 - DNA, 15 bp, Homo sapiens
tatgaaaagctcttt

SEQ ID NO: 1196735 - DNA, 15 bp, Homo sapiens
gtatgaaaagctctt

SEQ ID NO: 1196736 - DNA, 15 bp, Homo sapiens
tgtatgaaaagctct

SEQ ID NO: 1196737 - DNA, 15 bp, Homo sapiens
gtgtatgaaaagctc

SEQ ID NO: 1196738 - DNA, 15 bp, Homo sapiens
agtgtatgaaaagct

SEQ ID NO: 1196739 - DNA, 15 bp, Homo sapiens
aagtgtatgaaaagc

SEQ ID NO: 1196740 - DNA, 15 bp, Homo sapiens
aaagtgtatgaaaag

SEQ ID NO: 1196741 - DNA, 15 bp, Homo sapiens
aaaagtgtatgaaaa

SEQ ID NO: 1196742 - DNA, 15 bp, Homo sapiens
aaaaagtgtatgaaa

SEQ ID NO: 1196743 - DNA, 15 bp, Homo sapiens
aaaaaagtgtatgaa

SEQ ID NO: 1196744 - DNA, 15 bp, Homo sapiens
gaaaaaagtgtatga

SEQ ID NO: 1196745 - DNA, 15 bp, Homo sapiens
ggaaaaaagtgtatg

SEQ ID NO: 1196746 - DNA, 15 bp, Homo sapiens
tggaaaaaagtgtat

SEQ ID NO: 1196747 - DNA, 15 bp, Homo sapiens
gtggaaaaaagtgta

SEQ ID NO: 1196748 - DNA, 15 bp, Homo sapiens
tgtggaaaaaagtgt

SEQ ID NO: 1196749 - DNA, 15 bp, Homo sapiens
ttgtggaaaaaagtg

SEQ ID NO: 1196750 - DNA, 15 bp, Homo sapiens
gttgtggaaaaaagt

SEQ ID NO: 1196751 - DNA, 15 bp, Homo sapiens
agttgtggaaaaaag

SEQ ID NO: 1196752 - DNA, 15 bp, Homo sapiens
gagttgtggaaaaaa

SEQ ID NO: 1196753 - DNA, 15 bp, Homo sapiens
ggagttgtggaaaaa

SEQ ID NO: 1196754 - DNA, 15 bp, Homo sapiens
tggagttgtggaaaa

SEQ ID NO: 1196755 - DNA, 15 bp, Homo sapiens
atggagttgtggaaa

SEQ ID NO: 1196756 - DNA, 15 bp, Homo sapiens
tatggagttgtggaa

SEQ ID NO: 1196757 - DNA, 15 bp, Homo sapiens
ctatggagttgtgga

SEQ ID NO: 1196758 - DNA, 15 bp, Homo sapiens
cctatggagttgtgg

SEQ ID NO: 1196759 - DNA, 15 bp, Homo sapiens
acctatggagttgtg

SEQ ID NO: 1196760 - DNA, 15 bp, Homo sapiens
cacctatggagttgt

SEQ ID NO: 1196761 - DNA, 15 bp, Homo sapiens
tcacctatggagttg

SEQ ID NO: 1196762 - DNA, 15 bp, Homo sapiens
ctcacctatggagtt

SEQ ID NO: 1196763 - DNA, 15 bp, Homo sapiens
actcacctatggagt

SEQ ID NO: 1196764 - DNA, 15 bp, Homo sapiens
cactcacctatggag

SEQ ID NO: 1196765 - DNA, 15 bp, Homo sapiens
ccactcacctatgga

SEQ ID NO: 1196766 - DNA, 15 bp, Homo sapiens
cccactcacctatgg

SEQ ID NO: 1196767 - DNA, 15 bp, Homo sapiens
gcccactcacctatg

SEQ ID NO: 1196768 - DNA, 15 bp, Homo sapiens
tgcccactcacctat

SEQ ID NO: 1196769 - DNA, 15 bp, Homo sapiens
atgcccactcaccta

SEQ ID NO: 1196770 - DNA, 15 bp, Homo sapiens
catgcccactcacct

SEQ ID NO: 1196771 - DNA, 15 bp, Homo sapiens
tcatgcccactcacc

SEQ ID NO: 1196772 - DNA, 15 bp, Homo sapiens
ttcatgcccactcac

SEQ ID NO: 1196773 - DNA, 15 bp, Homo sapiens
cttcatgcccactca

SEQ ID NO: 1196774 - DNA, 15 bp, Homo sapiens
gcttcatgcccactc

SEQ ID NO: 1196775 - DNA, 15 bp, Homo sapiens
agcttcatgcccact

SEQ ID NO: 1196776 - DNA, 15 bp, Homo sapiens
aagcttcatgcccac

SEQ ID NO: 1196777 - DNA, 15 bp, Homo sapiens
aaagcttcatgccca

SEQ ID NO: 1196778 - DNA, 15 bp, Homo sapiens
gaaagcttcatgccc

SEQ ID NO: 1196779 - DNA, 15 bp, Homo sapiens
ggaaagcttcatgcc

SEQ ID NO: 1196780 - DNA, 15 bp, Homo sapiens
tggaaagcttcatgc

SEQ ID NO: 1196781 - DNA, 15 bp, Homo sapiens
ttggaaagcttcatg

SEQ ID NO: 1196782 - DNA, 15 bp, Homo sapiens
attggaaagcttcat

SEQ ID NO: 1196783 - DNA, 15 bp, Homo sapiens
cattggaaagcttca

SEQ ID NO: 1196784 - DNA, 15 bp, Homo sapiens
acattggaaagcttc

SEQ ID NO: 1196785 - DNA, 15 bp, Homo sapiens
gacattggaaagctt

SEQ ID NO: 1196786 - DNA, 15 bp, Homo sapiens
tgacattggaaagct

SEQ ID NO: 1196787 - DNA, 15 bp, Homo sapiens
atgacattggaaagc

SEQ ID NO: 1196788 - DNA, 15 bp, Homo sapiens
aatgacattggaaag

SEQ ID NO: 1196789 - DNA, 15 bp, Homo sapiens
aaatgacattggaaa

SEQ ID NO: 1196790 - DNA, 15 bp, Homo sapiens
aaaatgacattggaa

SEQ ID NO: 1196791 - DNA, 15 bp, Homo sapiens
gaaaatgacattgga

SEQ ID NO: 1196792 - DNA, 15 bp, Homo sapiens
tgaaaatgacattgg

SEQ ID NO: 1196793 - DNA, 15 bp, Homo sapiens
ctgaaaatgacattg

SEQ ID NO: 1196794 - DNA, 15 bp, Homo sapiens
cctgaaaatgacatt

SEQ ID NO: 1196795 - DNA, 15 bp, Homo sapiens
tcctgaaaatgacat

SEQ ID NO: 1196796 - DNA, 15 bp, Homo sapiens
ttcctgaaaatgaca

SEQ ID NO: 1196797 - DNA, 15 bp, Homo sapiens
gttcctgaaaatgac

SEQ ID NO: 1196798 - DNA, 15 bp, Homo sapiens
tgttcctgaaaatga

SEQ ID NO: 1196799 - DNA, 15 bp, Homo sapiens
ctgttcctgaaaatg

SEQ ID NO: 1196800 - DNA, 15 bp, Homo sapiens
cctgttcctgaaaat

SEQ ID NO: 1196801 - DNA, 15 bp, Homo sapiens
tcctgttcctgaaaa

SEQ ID NO: 1196802 - DNA, 15 bp, Homo sapiens
ctcctgttcctgaaa

SEQ ID NO: 1196803 - DNA, 15 bp, Homo sapiens
cctcctgttcctgaa

SEQ ID NO: 1196804 - DNA, 15 bp, Homo sapiens
tcctcctgttcctga

SEQ ID NO: 1196805 - DNA, 15 bp, Homo sapiens
ctcctcctgttcctg

SEQ ID NO: 1196806 - DNA, 15 bp, Homo sapiens
tctcctcctgttcct

SEQ ID NO: 1196807 - DNA, 15 bp, Homo sapiens
atctcctcctgttcc

SEQ ID NO: 1196808 - DNA, 15 bp, Homo sapiens
gatctcctcctgttc

SEQ ID NO: 1196809 - DNA, 15 bp, Homo sapiens
ggatctcctcctgtt

SEQ ID NO: 1196810 - DNA, 15 bp, Homo sapiens
aggatctcctcctgt

SEQ ID NO: 1196811 - DNA, 15 bp, Homo sapiens
taggatctcctcctg

SEQ ID NO: 1196812 - DNA, 15 bp, Homo sapiens
ttaggatctcctcct

SEQ ID NO: 1196813 - DNA, 15 bp, Homo sapiens
tttaggatctcctcc

SEQ ID NO: 1196814 - DNA, 15 bp, Homo sapiens
ttttaggatctcctc

SEQ ID NO: 1196815 - DNA, 15 bp, Homo sapiens
attttaggatctcct

SEQ ID NO: 1196816 - DNA, 15 bp, Homo sapiens
tattttaggatctcc

SEQ ID NO: 1196817 - DNA, 15 bp, Homo sapiens
ctattttaggatctc

SEQ ID NO: 1196818 - DNA, 15 bp, Homo sapiens
gctattttaggatct

SEQ ID NO: 1196819 - DNA, 15 bp, Homo sapiens
tgctattttaggatc

SEQ ID NO: 1196820 - DNA, 15 bp, Homo sapiens
ttgctattttaggat

SEQ ID NO: 1196821 - DNA, 15 bp, Homo sapiens
cttgctattttagga

SEQ ID NO: 1196822 - DNA, 15 bp, Homo sapiens
acttgctattttagg

SEQ ID NO: 1196823 - DNA, 15 bp, Homo sapiens
aacttgctattttag

SEQ ID NO: 1196824 - DNA, 15 bp, Homo sapiens
aaacttgctatttta

SEQ ID NO: 1196825 - DNA, 15 bp, Homo sapiens
aaaacttgctatttt

SEQ ID NO: 1196826 - DNA, 15 bp, Homo sapiens
taaaacttgctattt

SEQ ID NO: 1196827 - DNA, 15 bp, Homo sapiens
gtaaaacttgctatt

SEQ ID NO: 1196828 - DNA, 15 bp, Homo sapiens
ggtaaaacttgctat

SEQ ID NO: 1196829 - DNA, 15 bp, Homo sapiens
tggtaaaacttgcta

SEQ ID NO: 1196830 - DNA, 15 bp, Homo sapiens
gtggtaaaacttgct

SEQ ID NO: 1196831 - DNA, 15 bp, Homo sapiens
tgtggtaaaacttgc

SEQ ID NO: 1196832 - DNA, 15 bp, Homo sapiens
ttgtggtaaaacttg

SEQ ID NO: 1196833 - DNA, 15 bp, Homo sapiens
tttgtggtaaaactt

SEQ ID NO: 1196834 - DNA, 15 bp, Homo sapiens
atttgtggtaaaact

SEQ ID NO: 1196835 - DNA, 15 bp, Homo sapiens
catttgtggtaaaac

SEQ ID NO: 1196836 - DNA, 15 bp, Homo sapiens
tcatttgtggtaaaa

SEQ ID NO: 1196837 - DNA, 15 bp, Homo sapiens
gtcatttgtggtaaa

SEQ ID NO: 1196838 - DNA, 15 bp, Homo sapiens
agtcatttgtggtaa

SEQ ID NO: 1196839 - DNA, 15 bp, Homo sapiens
cagtcatttgtggta

SEQ ID NO: 1196840 - DNA, 15 bp, Homo sapiens
gcagtcatttgtggt

SEQ ID NO: 1196841 - DNA, 15 bp, Homo sapiens
tgcagtcatttgtgg

SEQ ID NO: 1196842 - DNA, 15 bp, Homo sapiens
ttgcagtcatttgtg

SEQ ID NO: 1196843 - DNA, 15 bp, Homo sapiens
attgcagtcatttgt

SEQ ID NO: 1196844 - DNA, 15 bp, Homo sapiens
cattgcagtcatttg

SEQ ID NO: 1196845 - DNA, 15 bp, Homo sapiens
tcattgcagtcattt

SEQ ID NO: 1196846 - DNA, 15 bp, Homo sapiens
atcattgcagtcatt

SEQ ID NO: 1196847 - DNA, 15 bp, Homo sapiens
aatcattgcagtcat

SEQ ID NO: 1196848 - DNA, 15 bp, Homo sapiens
taatcattgcagtca

SEQ ID NO: 1196849 - DNA, 15 bp, Homo sapiens
ttaatcattgcagtc

SEQ ID NO: 1196850 - DNA, 15 bp, Homo sapiens
tttaatcattgcagt

SEQ ID NO: 1196851 - DNA, 15 bp, Homo sapiens
ttttaatcattgcag

SEQ ID NO: 1196852 - DNA, 15 bp, Homo sapiens
attttaatcattgca

SEQ ID NO: 1196853 - DNA, 15 bp, Homo sapiens
tattttaatcattgc

SEQ ID NO: 1196854 - DNA, 15 bp, Homo sapiens
atattttaatcattg

SEQ ID NO: 1196855 - DNA, 15 bp, Homo sapiens
aatattttaatcatt

SEQ ID NO: 1196856 - DNA, 15 bp, Homo sapiens
taatattttaatcat

SEQ ID NO: 1196857 - DNA, 15 bp, Homo sapiens
gtaatattttaatca

SEQ ID NO: 1196858 - DNA, 15 bp, Homo sapiens
tgtaatattttaatc

SEQ ID NO: 1196859 - DNA, 15 bp, Homo sapiens
ttgtaatattttaat

SEQ ID NO: 1196860 - DNA, 15 bp, Homo sapiens
tttgtaatattttaa

SEQ ID NO: 1196861 - DNA, 15 bp, Homo sapiens
gtttgtaatatttta

SEQ ID NO: 1196862 - DNA, 15 bp, Homo sapiens
agtttgtaatatttt

SEQ ID NO: 1196863 - DNA, 15 bp, Homo sapiens
gagtttgtaatattt

SEQ ID NO: 1196864 - DNA, 15 bp, Homo sapiens
ggagtttgtaatatt

SEQ ID NO: 1196865 - DNA, 15 bp, Homo sapiens
tggagtttgtaatat

SEQ ID NO: 1196866 - DNA, 15 bp, Homo sapiens
gtggagtttgtaata

SEQ ID NO: 1196867 - DNA, 15 bp, Homo sapiens
ggtggagtttgtaat

SEQ ID NO: 1196868 - DNA, 15 bp, Homo sapiens
tggtggagtttgtaa

SEQ ID NO: 1196869 - DNA, 15 bp, Homo sapiens
ttggtggagtttgta

SEQ ID NO: 1196870 - DNA, 15 bp, Homo sapiens
attggtggagtttgt

SEQ ID NO: 1196871 - DNA, 15 bp, Homo sapiens
tattggtggagtttg

SEQ ID NO: 1196872 - DNA, 15 bp, Homo sapiens
ttattggtggagttt

SEQ ID NO: 1196873 - DNA, 15 bp, Homo sapiens
tttattggtggagtt

SEQ ID NO: 1196874 - DNA, 15 bp, Homo sapiens
ttttattggtggagt

SEQ ID NO: 1196875 - DNA, 15 bp, Homo sapiens
cttttattggtggag

SEQ ID NO: 1196876 - DNA, 15 bp, Homo sapiens
tcttttattggtgga

SEQ ID NO: 1196877 - DNA, 15 bp, Homo sapiens
ttcttttattggtgg

SEQ ID NO: 1196878 - DNA, 15 bp, Homo sapiens
tttcttttattggtg

SEQ ID NO: 1196879 - DNA, 15 bp, Homo sapiens
atttcttttattggt

SEQ ID NO: 1196880 - DNA, 15 bp, Homo sapiens
catttcttttattgg

SEQ ID NO: 1196881 - DNA, 15 bp, Homo sapiens
tcatttcttttattg

SEQ ID NO: 1196882 - DNA, 15 bp, Homo sapiens
gtcatttcttttatt

SEQ ID NO: 1196883 - DNA, 15 bp, Homo sapiens
tgtcatttcttttat

SEQ ID NO: 1196884 - DNA, 15 bp, Homo sapiens
gtgtcatttctttta

SEQ ID NO: 1196885 - DNA, 15 bp, Homo sapiens
agtgtcatttctttt

SEQ ID NO: 1196886 - DNA, 15 bp, Homo sapiens
tagtgtcatttcttt

SEQ ID NO: 1196887 - DNA, 15 bp, Homo sapiens
ttagtgtcatttctt

SEQ ID NO: 1196888 - DNA, 15 bp, Homo sapiens
gttagtgtcatttct

SEQ ID NO: 1196889 - DNA, 15 bp, Homo sapiens
tgttagtgtcatttc

SEQ ID NO: 1196890 - DNA, 15 bp, Homo sapiens
ttgttagtgtcattt

SEQ ID NO: 1196891 - DNA, 15 bp, Homo sapiens
tttgttagtgtcatt

SEQ ID NO: 1196892 - DNA, 15 bp, Homo sapiens
ctttgttagtgtcat

SEQ ID NO: 1196893 - DNA, 15 bp, Homo sapiens
cctttgttagtgtca

SEQ ID NO: 1196894 - DNA, 15 bp, Homo sapiens
acctttgttagtgtc

SEQ ID NO: 1196895 - DNA, 15 bp, Homo sapiens
tacctttgttagtgt

SEQ ID NO: 1196896 - DNA, 15 bp, Homo sapiens
atacctttgttagtg

SEQ ID NO: 1196897 - DNA, 15 bp, Homo sapiens
tatacctttgttagt

SEQ ID NO: 1196898 - DNA, 15 bp, Homo sapiens
gtatacctttgttag

SEQ ID NO: 1196899 - DNA, 15 bp, Homo sapiens
tgtatacctttgtta

SEQ ID NO: 1196900 - DNA, 15 bp, Homo sapiens
atgtatacctttgtt

SEQ ID NO: 1196901 - DNA, 15 bp, Homo sapiens
gatgtatacctttgt

SEQ ID NO: 1196902 - DNA, 15 bp, Homo sapiens
agatgtatacctttg

SEQ ID NO: 1196903 - DNA, 15 bp, Homo sapiens
gagatgtataccttt

SEQ ID NO: 1196904 - DNA, 15 bp, Homo sapiens
cgagatgtatacctt

SEQ ID NO: 1196905 - DNA, 15 bp, Homo sapiens
ccgagatgtatacct

SEQ ID NO: 1196906 - DNA, 15 bp, Homo sapiens
tccgagatgtatacc

SEQ ID NO: 1196907 - DNA, 15 bp, Homo sapiens
atccgagatgtatac

SEQ ID NO: 1196908 - DNA, 15 bp, Homo sapiens
gatccgagatgtata

SEQ ID NO: 1196909 - DNA, 15 bp, Homo sapiens
tgatccgagatgtat

SEQ ID NO: 1196910 - DNA, 15 bp, Homo sapiens
gtgatccgagatgta

SEQ ID NO: 1196911 - DNA, 15 bp, Homo sapiens
agtgatccgagatgt

SEQ ID NO: 1196912 - DNA, 15 bp, Homo sapiens
gagtgatccgagatg

SEQ ID NO: 1196913 - DNA, 15 bp, Homo sapiens
tgagtgatccgagat

SEQ ID NO: 1196914 - DNA, 15 bp, Homo sapiens
atgagtgatccgaga

SEQ ID NO: 1196915 - DNA, 15 bp, Homo sapiens
aatgagtgatccgag

SEQ ID NO: 1196916 - DNA, 15 bp, Homo sapiens
aaatgagtgatccga

SEQ ID NO: 1196917 - DNA, 15 bp, Homo sapiens
aaaatgagtgatccg

SEQ ID NO: 1196918 - DNA, 15 bp, Homo sapiens
gaaaatgagtgatcc

SEQ ID NO: 1196919 - DNA, 15 bp, Homo sapiens
ggaaaatgagtgatc

SEQ ID NO: 1196920 - DNA, 15 bp, Homo sapiens
gggaaaatgagtgat

SEQ ID NO: 1196921 - DNA, 15 bp, Homo sapiens
agggaaaatgagtga

SEQ ID NO: 1196922 - DNA, 15 bp, Homo sapiens
gagggaaaatgagtg

SEQ ID NO: 1196923 - DNA, 15 bp, Homo sapiens
agagggaaaatgagt

SEQ ID NO: 1196924 - DNA, 15 bp, Homo sapiens
gagagggaaaatgag

SEQ ID NO: 1196925 - DNA, 15 bp, Homo sapiens
ggagagggaaaatga

SEQ ID NO: 1196926 - DNA, 15 bp, Homo sapiens
aggagagggaaaatg

SEQ ID NO: 1196927 - DNA, 15 bp, Homo sapiens
aaggagagggaaaat

SEQ ID NO: 1196928 - DNA, 15 bp, Homo sapiens
taaggagagggaaaa

SEQ ID NO: 1196929 - DNA, 15 bp, Homo sapiens
ttaaggagagggaaa

SEQ ID NO: 1196930 - DNA, 15 bp, Homo sapiens
attaaggagagggaa

SEQ ID NO: 1196931 - DNA, 15 bp, Homo sapiens
tattaaggagaggga

SEQ ID NO: 1196932 - DNA, 15 bp, Homo sapiens
atattaaggagaggg

SEQ ID NO: 1196933 - DNA, 15 bp, Homo sapiens
tatattaaggagagg

SEQ ID NO: 1196934 - DNA, 15 bp, Homo sapiens
ctatattaaggagag

SEQ ID NO: 1196935 - DNA, 15 bp, Homo sapiens
actatattaaggaga

SEQ ID NO: 1196936 - DNA, 15 bp, Homo sapiens
gactatattaaggag

SEQ ID NO: 1196937 - DNA, 15 bp, Homo sapiens
tgactatattaagga

SEQ ID NO: 1196938 - DNA, 15 bp, Homo sapiens
gtgactatattaagg

SEQ ID NO: 1196939 - DNA, 15 bp, Homo sapiens
ggtgactatattaag

SEQ ID NO: 1196940 - DNA, 15 bp, Homo sapiens
tggtgactatattaa

SEQ ID NO: 1196941 - DNA, 15 bp, Homo sapiens
atggtgactatatta

SEQ ID NO: 1196942 - DNA, 15 bp, Homo sapiens
tatggtgactatatt

SEQ ID NO: 1196943 - DNA, 15 bp, Homo sapiens
ttatggtgactatat

SEQ ID NO: 1196944 - DNA, 15 bp, Homo sapiens
tttatggtgactata

SEQ ID NO: 1196945 - DNA, 15 bp, Homo sapiens
ttttatggtgactat

SEQ ID NO: 1196946 - DNA, 15 bp, Homo sapiens
tttttatggtgacta

SEQ ID NO: 1196947 - DNA, 15 bp, Homo sapiens
atttttatggtgact

SEQ ID NO: 1196948 - DNA, 15 bp, Homo sapiens
aatttttatggtgac

SEQ ID NO: 1196949 - DNA, 15 bp, Homo sapiens
aaatttttatggtga

SEQ ID NO: 1196950 - DNA, 15 bp, Homo sapiens
taaatttttatggtg

SEQ ID NO: 1196951 - DNA, 15 bp, Homo sapiens
gtaaatttttatggt

SEQ ID NO: 1196952 - DNA, 15 bp, Homo sapiens
ggtaaatttttatgg

SEQ ID NO: 1196953 - DNA, 15 bp, Homo sapiens
gggtaaatttttatg

SEQ ID NO: 1196954 - DNA, 15 bp, Homo sapiens
agggtaaatttttat

SEQ ID NO: 1196955 - DNA, 15 bp, Homo sapiens
tagggtaaattttta

SEQ ID NO: 1196956 - DNA, 15 bp, Homo sapiens
gtagggtaaattttt

SEQ ID NO: 1196957 - DNA, 15 bp, Homo sapiens
ggtagggtaaatttt

SEQ ID NO: 1196958 - DNA, 15 bp, Homo sapiens
gggtagggtaaattt

SEQ ID NO: 1196959 - DNA, 15 bp, Homo sapiens
tgggtagggtaaatt

SEQ ID NO: 1196960 - DNA, 15 bp, Homo sapiens
ctgggtagggtaaat

SEQ ID NO: 1196961 - DNA, 15 bp, Homo sapiens
gctgggtagggtaaa

SEQ ID NO: 1196962 - DNA, 15 bp, Homo sapiens
tgctgggtagggtaa

SEQ ID NO: 1196963 - DNA, 15 bp, Homo sapiens
atgctgggtagggta

SEQ ID NO: 1196964 - DNA, 15 bp, Homo sapiens
tatgctgggtagggt

SEQ ID NO: 1196965 - DNA, 15 bp, Homo sapiens
ctatgctgggtaggg

SEQ ID NO: 1196966 - DNA, 15 bp, Homo sapiens
gctatgctgggtagg

SEQ ID NO: 1196967 - DNA, 15 bp, Homo sapiens
tgctatgctgggtag

SEQ ID NO: 1196968 - DNA, 15 bp, Homo sapiens
ttgctatgctgggta

SEQ ID NO: 1196969 - DNA, 15 bp, Homo sapiens
cttgctatgctgggt

SEQ ID NO: 1196970 - DNA, 15 bp, Homo sapiens
ccttgctatgctggg

SEQ ID NO: 1196971 - DNA, 15 bp, Homo sapiens
accttgctatgctgg

SEQ ID NO: 1196972 - DNA, 15 bp, Homo sapiens
gaccttgctatgctg

SEQ ID NO: 1196973 - DNA, 15 bp, Homo sapiens
tgaccttgctatgct

SEQ ID NO: 1196974 - DNA, 15 bp, Homo sapiens
gtgaccttgctatgc

SEQ ID NO: 1196975 - DNA, 15 bp, Homo sapiens
agtgaccttgctatg

SEQ ID NO: 1196976 - DNA, 15 bp, Homo sapiens
cagtgaccttgctat

SEQ ID NO: 1196977 - DNA, 15 bp, Homo sapiens
ccagtgaccttgcta

SEQ ID NO: 1196978 - DNA, 15 bp, Homo sapiens
cccagtgaccttgct

SEQ ID NO: 1196979 - DNA, 15 bp, Homo sapiens
tcccagtgaccttgc

SEQ ID NO: 1196980 - DNA, 15 bp, Homo sapiens
gtcccagtgaccttg

SEQ ID NO: 1196981 - DNA, 15 bp, Homo sapiens
tgtcccagtgacctt

SEQ ID NO: 1196982 - DNA, 15 bp, Homo sapiens
ctgtcccagtgacct

SEQ ID NO: 1196983 - DNA, 15 bp, Homo sapiens
tctgtcccagtgacc

SEQ ID NO: 1196984 - DNA, 15 bp, Homo sapiens
atctgtcccagtgac

SEQ ID NO: 1196985 - DNA, 15 bp, Homo sapiens
aatctgtcccagtga

SEQ ID NO: 1196986 - DNA, 15 bp, Homo sapiens
gaatctgtcccagtg

SEQ ID NO: 1196987 - DNA, 15 bp, Homo sapiens
agaatctgtcccagt

SEQ ID NO: 1196988 - DNA, 15 bp, Homo sapiens
tagaatctgtcccag

SEQ ID NO: 1196989 - DNA, 15 bp, Homo sapiens
ctagaatctgtccca

SEQ ID NO: 1196990 - DNA, 15 bp, Homo sapiens
actagaatctgtccc

SEQ ID NO: 1196991 - DNA, 15 bp, Homo sapiens
tactagaatctgtcc

SEQ ID NO: 1196992 - DNA, 15 bp, Homo sapiens
gtactagaatctgtc

SEQ ID NO: 1196993 - DNA, 15 bp, Homo sapiens
agtactagaatctgt

SEQ ID NO: 1196994 - DNA, 15 bp, Homo sapiens
cagtactagaatctg

SEQ ID NO: 1196995 - DNA, 15 bp, Homo sapiens
tcagtactagaatct

SEQ ID NO: 1196996 - DNA, 15 bp, Homo sapiens
ttcagtactagaatc

SEQ ID NO: 1196997 - DNA, 15 bp, Homo sapiens
tttcagtactagaat

SEQ ID NO: 1196998 - DNA, 15 bp, Homo sapiens
ctttcagtactagaa

SEQ ID NO: 1196999 - DNA, 15 bp, Homo sapiens
tctttcagtactaga

SEQ ID NO: 1197000 - DNA, 15 bp, Homo sapiens
ttctttcagtactag

SEQ ID NO: 1197001 - DNA, 15 bp, Homo sapiens
cttctttcagtacta

SEQ ID NO: 1197002 - DNA, 15 bp, Homo sapiens
tcttctttcagtact

SEQ ID NO: 1197003 - DNA, 15 bp, Homo sapiens
ctcttctttcagtac

SEQ ID NO: 1197004 - DNA, 15 bp, Homo sapiens
cctcttctttcagta

SEQ ID NO: 1197005 - DNA, 15 bp, Homo sapiens
tcctcttctttcagt

SEQ ID NO: 1197006 - DNA, 15 bp, Homo sapiens
ctcctcttctttcag

SEQ ID NO: 1197007 - DNA, 15 bp, Homo sapiens
cctcctcttctttca

SEQ ID NO: 1197008 - DNA, 15 bp, Homo sapiens
gcctcctcttctttc

SEQ ID NO: 1197009 - DNA, 15 bp, Homo sapiens
tgcctcctcttcttt

SEQ ID NO: 1197010 - DNA, 15 bp, Homo sapiens
ttgcctcctcttctt

SEQ ID NO: 1197011 - DNA, 15 bp, Homo sapiens
tttgcctcctcttct

SEQ ID NO: 1197012 - DNA, 15 bp, Homo sapiens
ctttgcctcctcttc

SEQ ID NO: 1197013 - DNA, 15 bp, Homo sapiens
tctttgcctcctctt

SEQ ID NO: 1197014 - DNA, 15 bp, Homo sapiens
ctctttgcctcctct

SEQ ID NO: 1197015 - DNA, 15 bp, Homo sapiens
actctttgcctcctc

SEQ ID NO: 1197016 - DNA, 15 bp, Homo sapiens
tactctttgcctcct

SEQ ID NO: 1197017 - DNA, 15 bp, Homo sapiens
ttactctttgcctcc

SEQ ID NO: 1197018 - DNA, 15 bp, Homo sapiens
attactctttgcctc

SEQ ID NO: 1197019 - DNA, 15 bp, Homo sapiens
cattactctttgcct

SEQ ID NO: 1197020 - DNA, 15 bp, Homo sapiens
ccattactctttgcc

SEQ ID NO: 1197021 - DNA, 15 bp, Homo sapiens
cccattactctttgc

SEQ ID NO: 1197022 - DNA, 15 bp, Homo sapiens
acccattactctttg

SEQ ID NO: 1197023 - DNA, 15 bp, Homo sapiens
tacccattactcttt

SEQ ID NO: 1197024 - DNA, 15 bp, Homo sapiens
ttacccattactctt

SEQ ID NO: 1197025 - DNA, 15 bp, Homo sapiens
tttacccattactct

SEQ ID NO: 1197026 - DNA, 15 bp, Homo sapiens
gtttacccattactc

SEQ ID NO: 1197027 - DNA, 15 bp, Homo sapiens
agtttacccattact

SEQ ID NO: 1197028 - DNA, 15 bp, Homo sapiens
cagtttacccattac

SEQ ID NO: 1197029 - DNA, 15 bp, Homo sapiens
acagtttacccatta

SEQ ID NO: 1197030 - DNA, 15 bp, Homo sapiens
tacagtttacccatt

SEQ ID NO: 1197031 - DNA, 15 bp, Homo sapiens
ttacagtttacccat

SEQ ID NO: 1197032 - DNA, 15 bp, Homo sapiens
gttacagtttaccca

SEQ ID NO: 1197033 - DNA, 15 bp, Homo sapiens
agttacagtttaccc

SEQ ID NO: 1197034 - DNA, 15 bp, Homo sapiens
gagttacagtttacc

SEQ ID NO: 1197035 - DNA, 15 bp, Homo sapiens
gagagttacagttta

SEQ ID NO: 1197036 - DNA, 15 bp, Homo sapiens
tgagagttacagttt

SEQ ID NO: 1197037 - DNA, 15 bp, Homo sapiens
atgagagttacagtt

SEQ ID NO: 1197038 - DNA, 15 bp, Homo sapiens
aatgagagttacagt

SEQ ID NO: 1197039 - DNA, 15 bp, Homo sapiens
gaatgagagttacag

SEQ ID NO: 1197040 - DNA, 15 bp, Homo sapiens
agaatgagagttaca

SEQ ID NO: 1197041 - DNA, 15 bp, Homo sapiens
gagaatgagagttac

SEQ ID NO: 1197042 - DNA, 15 bp, Homo sapiens
ggagaatgagagtta

SEQ ID NO: 1197043 - DNA, 15 bp, Homo sapiens
tggagaatgagagtt

SEQ ID NO: 1197044 - DNA, 15 bp, Homo sapiens
gtggagaatgagagt

SEQ ID NO: 1197045 - DNA, 15 bp, Homo sapiens
tgtggagaatgagag

SEQ ID NO: 1197046 - DNA, 15 bp, Homo sapiens
gtgtggagaatgaga

SEQ ID NO: 1197047 - DNA, 15 bp, Homo sapiens
ggtgtggagaatgag

SEQ ID NO: 1197048 - DNA, 15 bp, Homo sapiens
gggtgtggagaatga

SEQ ID NO: 1197049 - DNA, 15 bp, Homo sapiens
agggtgtggagaatg

SEQ ID NO: 1197050 - DNA, 15 bp, Homo sapiens
tagggtgtggagaat

SEQ ID NO: 1197051 - DNA, 15 bp, Homo sapiens
atagggtgtggagaa

SEQ ID NO: 1197052 - DNA, 15 bp, Homo sapiens
tatagggtgtggaga

SEQ ID NO: 1197053 - DNA, 15 bp, Homo sapiens
gtatagggtgtggag

SEQ ID NO: 1197054 - DNA, 15 bp, Homo sapiens
ggtatagggtgtgga

SEQ ID NO: 1197055 - DNA, 15 bp, Homo sapiens
aggtatagggtgtgg

SEQ ID NO: 1197056 - DNA, 15 bp, Homo sapiens
taggtatagggtgtg

SEQ ID NO: 1197057 - DNA, 15 bp, Homo sapiens
ataggtatagggtgt

SEQ ID NO: 1197058 - DNA, 15 bp, Homo sapiens
tataggtatagggtg

SEQ ID NO: 1197059 - DNA, 15 bp, Homo sapiens
gtataggtatagggt

SEQ ID NO: 1197060 - DNA, 15 bp, Homo sapiens
ggtataggtataggg

SEQ ID NO: 1197061 - DNA, 15 bp, Homo sapiens
aggtataggtatagg

SEQ ID NO: 1197062 - DNA, 15 bp, Homo sapiens
caggtataggtatag

SEQ ID NO: 1197063 - DNA, 15 bp, Homo sapiens
acaggtataggtata

SEQ ID NO: 1197064 - DNA, 15 bp, Homo sapiens
tacaggtataggtat

SEQ ID NO: 1197065 - DNA, 15 bp, Homo sapiens
atacaggtataggta

SEQ ID NO: 1197066 - DNA, 15 bp, Homo sapiens
gatacaggtataggt

SEQ ID NO: 1197067 - DNA, 15 bp, Homo sapiens
agatacaggtatagg

SEQ ID NO: 1197068 - DNA, 15 bp, Homo sapiens
tagatacaggtatag

SEQ ID NO: 1197069 - DNA, 15 bp, Homo sapiens
atagatacaggtata

SEQ ID NO: 1197070 - DNA, 15 bp, Homo sapiens
tatagatacaggtat

SEQ ID NO: 1197071 - DNA, 15 bp, Homo sapiens
atatagatacaggta

SEQ ID NO: 1197072 - DNA, 15 bp, Homo sapiens
gatatagatacaggt

SEQ ID NO: 1197073 - DNA, 15 bp, Homo sapiens
ggatatagatacagg

SEQ ID NO: 1197074 - DNA, 15 bp, Homo sapiens
aggatatagatacag

SEQ ID NO: 1197075 - DNA, 15 bp, Homo sapiens
taggatatagataca

SEQ ID NO: 1197076 - DNA, 15 bp, Homo sapiens
ataggatatagatac

SEQ ID NO: 1197077 - DNA, 15 bp, Homo sapiens
aataggatatagata

SEQ ID NO: 1197078 - DNA, 15 bp, Homo sapiens
taataggatatagat

SEQ ID NO: 1197079 - DNA, 15 bp, Homo sapiens
ttaataggatataga

SEQ ID NO: 1197080 - DNA, 15 bp, Homo sapiens
gttaataggatatag

SEQ ID NO: 1197081 - DNA, 15 bp, Homo sapiens
ggttaataggatata

SEQ ID NO: 1197082 - DNA, 15 bp, Homo sapiens
tggttaataggatat

SEQ ID NO: 1197083 - DNA, 15 bp, Homo sapiens
ctggttaataggata

SEQ ID NO: 1197084 - DNA, 15 bp, Homo sapiens
actggttaataggat

SEQ ID NO: 1197085 - DNA, 15 bp, Homo sapiens
tactggttaatagga

SEQ ID NO: 1197086 - DNA, 15 bp, Homo sapiens
ttactggttaatagg

SEQ ID NO: 1197087 - DNA, 15 bp, Homo sapiens
attactggttaatag

SEQ ID NO: 1197088 - DNA, 15 bp, Homo sapiens
aattactggttaata

SEQ ID NO: 1197089 - DNA, 15 bp, Homo sapiens
gaattactggttaat

SEQ ID NO: 1197090 - DNA, 15 bp, Homo sapiens
ggaattactggttaa

SEQ ID NO: 1197091 - DNA, 15 bp, Homo sapiens
tggaattactggtta

SEQ ID NO: 1197092 - DNA, 15 bp, Homo sapiens
ctggaattactggtt

SEQ ID NO: 1197093 - DNA, 15 bp, Homo sapiens
actggaattactggt

SEQ ID NO: 1197094 - DNA, 15 bp, Homo sapiens
aactggaattactgg

SEQ ID NO: 1197095 - DNA, 15 bp, Homo sapiens
aaactggaattactg

SEQ ID NO: 1197096 - DNA, 15 bp, Homo sapiens
aaaactggaattact

SEQ ID NO: 1197097 - DNA, 15 bp, Homo sapiens
aaaaactggaattac

SEQ ID NO: 1197098 - DNA, 15 bp, Homo sapiens
caaaaactggaatta

SEQ ID NO: 1197099 - DNA, 15 bp, Homo sapiens
ccaaaaactggaatt

SEQ ID NO: 1197100 - DNA, 15 bp, Homo sapiens
accaaaaactggaat

SEQ ID NO: 1197101 - DNA, 15 bp, Homo sapiens
taccaaaaactggaa

SEQ ID NO: 1197102 - DNA, 15 bp, Homo sapiens
ctaccaaaaactgga

SEQ ID NO: 1197103 - DNA, 15 bp, Homo sapiens
actaccaaaaactgg

SEQ ID NO: 1197104 - DNA, 15 bp, Homo sapiens
cactaccaaaaactg

SEQ ID NO: 1197105 - DNA, 15 bp, Homo sapiens
acactaccaaaaact

SEQ ID NO: 1197106 - DNA, 15 bp, Homo sapiens
aacactaccaaaaac

SEQ ID NO: 1197107 - DNA, 15 bp, Homo sapiens
aaacactaccaaaaa

SEQ ID NO: 1197108 - DNA, 15 bp, Homo sapiens
caaacactaccaaaa

SEQ ID NO: 1197109 - DNA, 15 bp, Homo sapiens
gcaaacactaccaaa

SEQ ID NO: 1197110 - DNA, 15 bp, Homo sapiens
ggcaaacactaccaa

SEQ ID NO: 1197111 - DNA, 15 bp, Homo sapiens
gggcaaacactacca

SEQ ID NO: 1197112 - DNA, 15 bp, Homo sapiens
agggcaaacactacc

SEQ ID NO: 1197113 - DNA, 15 bp, Homo sapiens
tagggcaaacactac

SEQ ID NO: 1197114 - DNA, 15 bp, Homo sapiens
ctagggcaaacacta

SEQ ID NO: 1197115 - DNA, 15 bp, Homo sapiens
tctagggcaaacact

SEQ ID NO: 1197116 - DNA, 15 bp, Homo sapiens
ttctagggcaaacac

SEQ ID NO: 1197117 - DNA, 15 bp, Homo sapiens
tttctagggcaaaca

SEQ ID NO: 1197118 - DNA, 15 bp, Homo sapiens
gtttctagggcaaac

SEQ ID NO: 1197119 - DNA, 15 bp, Homo sapiens
tgtttctagggcaaa

SEQ ID NO: 1197120 - DNA, 15 bp, Homo sapiens
gtgtttctagggcaa

SEQ ID NO: 1197121 - DNA, 15 bp, Homo sapiens
ggtgtttctagggca

SEQ ID NO: 1197122 - DNA, 15 bp, Homo sapiens
aggtgtttctagggc

SEQ ID NO: 1197123 - DNA, 15 bp, Homo sapiens
caggtgtttctaggg

SEQ ID NO: 1197124 - DNA, 15 bp, Homo sapiens
gcaggtgtttctagg

SEQ ID NO: 1197125 - DNA, 15 bp, Homo sapiens
tgcaggtgtttctag

SEQ ID NO: 1197126 - DNA, 15 bp, Homo sapiens
ttgcaggtgtttcta

SEQ ID NO: 1197127 - DNA, 15 bp, Homo sapiens
tttgcaggtgtttct

SEQ ID NO: 1197128 - DNA, 15 bp, Homo sapiens
gtttgcaggtgtttc

SEQ ID NO: 1197129 - DNA, 15 bp, Homo sapiens
agtttgcaggtgttt

SEQ ID NO: 1197130 - DNA, 15 bp, Homo sapiens
cagtttgcaggtgtt

SEQ ID NO: 1197131 - DNA, 15 bp, Homo sapiens
ccagtttgcaggtgt

SEQ ID NO: 1197132 - DNA, 15 bp, Homo sapiens
accagtttgcaggtg

SEQ ID NO: 1197133 - DNA, 15 bp, Homo sapiens
taccagtttgcaggt

SEQ ID NO: 1197134 - DNA, 15 bp, Homo sapiens
gtaccagtttgcagg

SEQ ID NO: 1197135 - DNA, 15 bp, Homo sapiens
agtaccagtttgcag

SEQ ID NO: 1197136 - DNA, 15 bp, Homo sapiens
cagtaccagtttgca

SEQ ID NO: 1197137 - DNA, 15 bp, Homo sapiens
acagtaccagtttgc

SEQ ID NO: 1197138 - DNA, 15 bp, Homo sapiens
tacagtaccagtttg

SEQ ID NO: 1197139 - DNA, 15 bp, Homo sapiens
atacagtaccagttt

SEQ ID NO: 1197140 - DNA, 15 bp, Homo sapiens
aatacagtaccagtt

SEQ ID NO: 1197141 - DNA, 15 bp, Homo sapiens
taatacagtaccagt

SEQ ID NO: 1197142 - DNA, 15 bp, Homo sapiens
ttaatacagtaccag

SEQ ID NO: 1197143 - DNA, 15 bp, Homo sapiens
cttaatacagtacca

SEQ ID NO: 1197144 - DNA, 15 bp, Homo sapiens
ccttaatacagtacc

SEQ ID NO: 1197145 - DNA, 15 bp, Homo sapiens
tccttaatacagtac

SEQ ID NO: 1197146 - DNA, 15 bp, Homo sapiens
atccttaatacagta

SEQ ID NO: 1197147 - DNA, 15 bp, Homo sapiens
aatccttaatacagt

SEQ ID NO: 1197148 - DNA, 15 bp, Homo sapiens
aaatccttaatacag

SEQ ID NO: 1197149 - DNA, 15 bp, Homo sapiens
gaaatccttaataca

SEQ ID NO: 1197150 - DNA, 15 bp, Homo sapiens
tgaaatccttaatac

SEQ ID NO: 1197151 - DNA, 15 bp, Homo sapiens
gtgaaatccttaata

SEQ ID NO: 1197152 - DNA, 15 bp, Homo sapiens
tgtgaaatccttaat

SEQ ID NO: 1197153 - DNA, 15 bp, Homo sapiens
gtgtgaaatccttaa

SEQ ID NO: 1197154 - DNA, 15 bp, Homo sapiens
agtgtgaaatcctta

SEQ ID NO: 1197155 - DNA, 15 bp, Homo sapiens
cagtgtgaaatcctt

SEQ ID NO: 1197156 - DNA, 15 bp, Homo sapiens
gcagtgtgaaatcct

SEQ ID NO: 1197157 - DNA, 15 bp, Homo sapiens
tgcagtgtgaaatcc

SEQ ID NO: 1197158 - DNA, 15 bp, Homo sapiens
ctgcagtgtgaaatc

SEQ ID NO: 1197159 - DNA, 15 bp, Homo sapiens
actgcagtgtgaaat

SEQ ID NO: 1197160 - DNA, 15 bp, Homo sapiens
tactgcagtgtgaaa

SEQ ID NO: 1197161 - DNA, 15 bp, Homo sapiens
atactgcagtgtgaa

SEQ ID NO: 1197162 - DNA, 15 bp, Homo sapiens
tatactgcagtgtga

SEQ ID NO: 1197163 - DNA, 15 bp, Homo sapiens
ttatactgcagtgtg

SEQ ID NO: 1197164 - DNA, 15 bp, Homo sapiens
attatactgcagtgt

SEQ ID NO: 1197165 - DNA, 15 bp, Homo sapiens
aattatactgcagtg

SEQ ID NO: 1197166 - DNA, 15 bp, Homo sapiens
aaattatactgcagt

SEQ ID NO: 1197167 - DNA, 15 bp, Homo sapiens
caaattatactgcag

SEQ ID NO: 1197168 - DNA, 15 bp, Homo sapiens
acaaattatactgca

SEQ ID NO: 1197169 - DNA, 15 bp, Homo sapiens
aacaaattatactgc

SEQ ID NO: 1197170 - DNA, 15 bp, Homo sapiens
taacaaattatactg

SEQ ID NO: 1197171 - DNA, 15 bp, Homo sapiens
ataacaaattatact

SEQ ID NO: 1197172 - DNA, 15 bp, Homo sapiens
gataacaaattatac

SEQ ID NO: 1197173 - DNA, 15 bp, Homo sapiens
tgataacaaattata

SEQ ID NO: 1197174 - DNA, 15 bp, Homo sapiens
ctgataacaaattat

SEQ ID NO: 1197175 - DNA, 15 bp, Homo sapiens
actgataacaaatta

SEQ ID NO: 1197176 - DNA, 15 bp, Homo sapiens
cactgataacaaatt

SEQ ID NO: 1197177 - DNA, 15 bp, Homo sapiens
tcactgataacaaat

SEQ ID NO: 1197178 - DNA, 15 bp, Homo sapiens
ttcactgataacaaa

SEQ ID NO: 1197179 - DNA, 15 bp, Homo sapiens
tttcactgataacaa

SEQ ID NO: 1197180 - DNA, 15 bp, Homo sapiens
ttttcactgataaca

SEQ ID NO: 1197181 - DNA, 15 bp, Homo sapiens
tttttcactgataac

SEQ ID NO: 1197182 - DNA, 15 bp, Homo sapiens
atttttcactgataa

SEQ ID NO: 1197183 - DNA, 15 bp, Homo sapiens
aatttttcactgata

SEQ ID NO: 1197184 - DNA, 15 bp, Homo sapiens
caatttttcactgat

SEQ ID NO: 1197185 - DNA, 15 bp, Homo sapiens
tcaatttttcactga

SEQ ID NO: 1197186 - DNA, 15 bp, Homo sapiens
gtcaatttttcactg

SEQ ID NO: 1197187 - DNA, 15 bp, Homo sapiens
ggtcaatttttcact

SEQ ID NO: 1197188 - DNA, 15 bp, Homo sapiens
aggtcaatttttcac

SEQ ID NO: 1197189 - DNA, 15 bp, Homo sapiens
taggtcaatttttca

SEQ ID NO: 1197190 - DNA, 15 bp, Homo sapiens
gtaggtcaatttttc

SEQ ID NO: 1197191 - DNA, 15 bp, Homo sapiens
tgtaggtcaattttt

SEQ ID NO: 1197192 - DNA, 15 bp, Homo sapiens
ttgtaggtcaatttt

SEQ ID NO: 1197193 - DNA, 15 bp, Homo sapiens
gttgtaggtcaattt

SEQ ID NO: 1197194 - DNA, 15 bp, Homo sapiens
ggttgtaggtcaatt

SEQ ID NO: 1197195 - DNA, 15 bp, Homo sapiens
tggttgtaggtcaat

SEQ ID NO: 1197196 - DNA, 15 bp, Homo sapiens
ttggttgtaggtcaa

SEQ ID NO: 1197197 - DNA, 15 bp, Homo sapiens
tttggttgtaggtca

SEQ ID NO: 1197198 - DNA, 15 bp, Homo sapiens
ttttggttgtaggtc

SEQ ID NO: 1197199 - DNA, 15 bp, Homo sapiens
attttggttgtaggt

SEQ ID NO: 1197200 - DNA, 15 bp, Homo sapiens
tattttggttgtagg

SEQ ID NO: 1197201 - DNA, 15 bp, Homo sapiens
atattttggttgtag

SEQ ID NO: 1197202 - DNA, 15 bp, Homo sapiens
aatattttggttgta

SEQ ID NO: 1197203 - DNA, 15 bp, Homo sapiens
gaatattttggttgt

SEQ ID NO: 1197204 - DNA, 15 bp, Homo sapiens
tgaatattttggttg

SEQ ID NO: 1197205 - DNA, 15 bp, Homo sapiens
atgaatattttggtt

SEQ ID NO: 1197206 - DNA, 15 bp, Homo sapiens
gatgaatattttggt

SEQ ID NO: 1197207 - DNA, 15 bp, Homo sapiens
tgatgaatattttgg

SEQ ID NO: 1197208 - DNA, 15 bp, Homo sapiens
ctgatgaatattttg

SEQ ID NO: 1197209 - DNA, 15 bp, Homo sapiens
actgatgaatatttt

SEQ ID NO: 1197210 - DNA, 15 bp, Homo sapiens
cactgatgaatattt

SEQ ID NO: 1197211 - DNA, 15 bp, Homo sapiens
ccactgatgaatatt

SEQ ID NO: 1197212 - DNA, 15 bp, Homo sapiens
accactgatgaatat

SEQ ID NO: 1197213 - DNA, 15 bp, Homo sapiens
caccactgatgaata

SEQ ID NO: 1197214 - DNA, 15 bp, Homo sapiens
tcaccactgatgaat

SEQ ID NO: 1197215 - DNA, 15 bp, Homo sapiens
ttcaccactgatgaa

SEQ ID NO: 1197216 - DNA, 15 bp, Homo sapiens
gttcaccactgatga

SEQ ID NO: 1197217 - DNA, 15 bp, Homo sapiens
tgttcaccactgatg

SEQ ID NO: 1197218 - DNA, 15 bp, Homo sapiens
ctgttcaccactgat

SEQ ID NO: 1197219 - DNA, 15 bp, Homo sapiens
actgttcaccactga

SEQ ID NO: 1197220 - DNA, 15 bp, Homo sapiens
cactgttcaccactg

SEQ ID NO: 1197221 - DNA, 15 bp, Homo sapiens
gcactgttcaccact

SEQ ID NO: 1197222 - DNA, 15 bp, Homo sapiens
tgcactgttcaccac

SEQ ID NO: 1197223 - DNA, 15 bp, Homo sapiens
atgcactgttcacca

SEQ ID NO: 1197224 - DNA, 15 bp, Homo sapiens
aatgcactgttcacc

SEQ ID NO: 1197225 - DNA, 15 bp, Homo sapiens
taatgcactgttcac

SEQ ID NO: 1197226 - DNA, 15 bp, Homo sapiens
ttaatgcactgttca

SEQ ID NO: 1197227 - DNA, 15 bp, Homo sapiens
attaatgcactgttc

SEQ ID NO: 1197228 - DNA, 15 bp, Homo sapiens
aattaatgcactgtt

SEQ ID NO: 1197229 - DNA, 15 bp, Homo sapiens
taattaatgcactgt

SEQ ID NO: 1197230 - DNA, 15 bp, Homo sapiens
gtaattaatgcactg

SEQ ID NO: 1197231 - DNA, 15 bp, Homo sapiens
agtaattaatgcact

SEQ ID NO: 1197232 - DNA, 15 bp, Homo sapiens
tagtaattaatgcac

SEQ ID NO: 1197233 - DNA, 15 bp, Homo sapiens
atagtaattaatgca

SEQ ID NO: 1197234 - DNA, 15 bp, Homo sapiens
catagtaattaatgc

SEQ ID NO: 1197235 - DNA, 15 bp, Homo sapiens
gcatagtaattaatg

SEQ ID NO: 1197236 - DNA, 15 bp, Homo sapiens
tgcatagtaattaat

SEQ ID NO: 1197237 - DNA, 15 bp, Homo sapiens
atgcatagtaattaa

SEQ ID NO: 1197238 - DNA, 15 bp, Homo sapiens
tatgcatagtaatta

SEQ ID NO: 1197239 - DNA, 15 bp, Homo sapiens
ctatgcatagtaatt

SEQ ID NO: 1197240 - DNA, 15 bp, Homo sapiens
gctatgcatagtaat

SEQ ID NO: 1197241 - DNA, 15 bp, Homo sapiens
ggctatgcatagtaa

SEQ ID NO: 1197242 - DNA, 15 bp, Homo sapiens
tggctatgcatagta

SEQ ID NO: 1197243 - DNA, 15 bp, Homo sapiens
atggctatgcatagt

SEQ ID NO: 1197244 - DNA, 15 bp, Homo sapiens
catggctatgcatag

SEQ ID NO: 1197245 - DNA, 15 bp, Homo sapiens
gcatggctatgcata

SEQ ID NO: 1197246 - DNA, 15 bp, Homo sapiens
agcatggctatgcat

SEQ ID NO: 1197247 - DNA, 15 bp, Homo sapiens
gagcatggctatgca

SEQ ID NO: 1197248 - DNA, 15 bp, Homo sapiens
agagcatggctatgc

SEQ ID NO: 1197249 - DNA, 15 bp, Homo sapiens
cagagcatggctatg

SEQ ID NO: 1197250 - DNA, 15 bp, Homo sapiens
acagagcatggctat

SEQ ID NO: 1197251 - DNA, 15 bp, Homo sapiens
tacagagcatggcta

SEQ ID NO: 1197252 - DNA, 15 bp, Homo sapiens
ttacagagcatggct

SEQ ID NO: 1197253 - DNA, 15 bp, Homo sapiens
gttacagagcatggc

SEQ ID NO: 1197254 - DNA, 15 bp, Homo sapiens
tgttacagagcatgg

SEQ ID NO: 1197255 - DNA, 15 bp, Homo sapiens
gtgttacagagcatg

SEQ ID NO: 1197256 - DNA, 15 bp, Homo sapiens
agtgttacagagcat

SEQ ID NO: 1197257 - DNA, 15 bp, Homo sapiens
tagtgttacagagca

SEQ ID NO: 1197258 - DNA, 15 bp, Homo sapiens
atagtgttacagagc

SEQ ID NO: 1197259 - DNA, 15 bp, Homo sapiens
gatagtgttacagag

SEQ ID NO: 1197260 - DNA, 15 bp, Homo sapiens
ggatagtgttacaga

SEQ ID NO: 1197261 - DNA, 15 bp, Homo sapiens
tggatagtgttacag

SEQ ID NO: 1197262 - DNA, 15 bp, Homo sapiens
ttggatagtgttaca

SEQ ID NO: 1197263 - DNA, 15 bp, Homo sapiens
gttggatagtgttac

SEQ ID NO: 1197264 - DNA, 15 bp, Homo sapiens
tgttggatagtgtta

SEQ ID NO: 1197265 - DNA, 15 bp, Homo sapiens
ctgttggatagtgtt

SEQ ID NO: 1197266 - DNA, 15 bp, Homo sapiens
actgttggatagtgt

SEQ ID NO: 1197267 - DNA, 15 bp, Homo sapiens
aactgttggatagtg

SEQ ID NO: 1197268 - DNA, 15 bp, Homo sapiens
taactgttggatagt

SEQ ID NO: 1197269 - DNA, 15 bp, Homo sapiens
ttaactgttggatag

SEQ ID NO: 1197270 - DNA, 15 bp, Homo sapiens
tttaactgttggata

SEQ ID NO: 1197271 - DNA, 15 bp, Homo sapiens
ttttaactgttggat

SEQ ID NO: 1197272 - DNA, 15 bp, Homo sapiens
attttaactgttgga

SEQ ID NO: 1197273 - DNA, 15 bp, Homo sapiens
tattttaactgttgg

SEQ ID NO: 1197274 - DNA, 15 bp, Homo sapiens
ttattttaactgttg

SEQ ID NO: 1197275 - DNA, 15 bp, Homo sapiens
cttattttaactgtt

SEQ ID NO: 1197276 - DNA, 15 bp, Homo sapiens
tcttattttaactgt

SEQ ID NO: 1197277 - DNA, 15 bp, Homo sapiens
ttcttattttaactg

SEQ ID NO: 1197278 - DNA, 15 bp, Homo sapiens
tttcttattttaact

SEQ ID NO: 1197279 - DNA, 15 bp, Homo sapiens
atttcttattttaac

SEQ ID NO: 1197280 - DNA, 15 bp, Homo sapiens
tatttcttattttaa

SEQ ID NO: 1197281 - DNA, 15 bp, Homo sapiens
ctatttcttatttta

SEQ ID NO: 1197282 - DNA, 15 bp, Homo sapiens
tctatttcttatttt

SEQ ID NO: 1197283 - DNA, 15 bp, Homo sapiens
gtctatttcttattt

SEQ ID NO: 1197284 - DNA, 15 bp, Homo sapiens
ggtctatttcttatt

SEQ ID NO: 1197285 - DNA, 15 bp, Homo sapiens
gggtctatttcttat

SEQ ID NO: 1197286 - DNA, 15 bp, Homo sapiens
tgggtctatttctta

SEQ ID NO: 1197287 - DNA, 15 bp, Homo sapiens
gtgggtctatttctt

SEQ ID NO: 1197288 - DNA, 15 bp, Homo sapiens
tgtgggtctatttct

SEQ ID NO: 1197289 - DNA, 15 bp, Homo sapiens
atgtgggtctatttc

SEQ ID NO: 1197290 - DNA, 15 bp, Homo sapiens
tatgtgggtctattt

SEQ ID NO: 1197291 - DNA, 15 bp, Homo sapiens
gtatgtgggtctatt

SEQ ID NO: 1197292 - DNA, 15 bp, Homo sapiens
tgtatgtgggtctat

SEQ ID NO: 1197293 - DNA, 15 bp, Homo sapiens
ctgtatgtgggtcta

SEQ ID NO: 1197294 - DNA, 15 bp, Homo sapiens
gctgtatgtgggtct

SEQ ID NO: 1197295 - DNA, 15 bp, Homo sapiens
tgctgtatgtgggtc

SEQ ID NO: 1197296 - DNA, 15 bp, Homo sapiens
atgctgtatgtgggt

SEQ ID NO: 1197297 - DNA, 15 bp, Homo sapiens
aatgctgtatgtggg

SEQ ID NO: 1197298 - DNA, 15 bp, Homo sapiens
taatgctgtatgtgg

SEQ ID NO: 1197299 - DNA, 15 bp, Homo sapiens
ttaatgctgtatgtg

SEQ ID NO: 1197300 - DNA, 15 bp, Homo sapiens
attaatgctgtatgt

SEQ ID NO: 1197301 - DNA, 15 bp, Homo sapiens
tattaatgctgtatg

SEQ ID NO: 1197302 - DNA, 15 bp, Homo sapiens
atattaatgctgtat

SEQ ID NO: 1197303 - DNA, 15 bp, Homo sapiens
catattaatgctgta

SEQ ID NO: 1197304 - DNA, 15 bp, Homo sapiens
ccatattaatgctgt

SEQ ID NO: 1197305 - DNA, 15 bp, Homo sapiens
tccatattaatgctg

SEQ ID NO: 1197306 - DNA, 15 bp, Homo sapiens
ttccatattaatgct

SEQ ID NO: 1197307 - DNA, 15 bp, Homo sapiens
tttccatattaatgc

SEQ ID NO: 1197308 - DNA, 15 bp, Homo sapiens
ttttccatattaatg

SEQ ID NO: 1197309 - DNA, 15 bp, Homo sapiens
tttttccatattaat

SEQ ID NO: 1197310 - DNA, 15 bp, Homo sapiens
gtttttccatattaa

SEQ ID NO: 1197311 - DNA, 15 bp, Homo sapiens
agtttttccatatta

SEQ ID NO: 1197312 - DNA, 15 bp, Homo sapiens
tagtttttccatatt

SEQ ID NO: 1197313 - DNA, 15 bp, Homo sapiens
gtagtttttccatat

SEQ ID NO: 1197314 - DNA, 15 bp, Homo sapiens
agtagtttttccata

SEQ ID NO: 1197315 - DNA, 15 bp, Homo sapiens
tagtagtttttccat

SEQ ID NO: 1197316 - DNA, 15 bp, Homo sapiens
ttagtagtttttcca

SEQ ID NO: 1197317 - DNA, 15 bp, Homo sapiens
cttagtagtttttcc

SEQ ID NO: 1197318 - DNA, 15 bp, Homo sapiens
ccttagtagtttttc

SEQ ID NO: 1197319 - DNA, 15 bp, Homo sapiens
accttagtagttttt

SEQ ID NO: 1197320 - DNA, 15 bp, Homo sapiens
taccttagtagtttt

SEQ ID NO: 1197321 - DNA, 15 bp, Homo sapiens
ataccttagtagttt

SEQ ID NO: 1197322 - DNA, 15 bp, Homo sapiens
tataccttagtagtt

SEQ ID NO: 1197323 - DNA, 15 bp, Homo sapiens
atataccttagtagt

SEQ ID NO: 1197324 - DNA, 15 bp, Homo sapiens
aatataccttagtag

SEQ ID NO: 1197325 - DNA, 15 bp, Homo sapiens
caatataccttagta

SEQ ID NO: 1197326 - DNA, 15 bp, Homo sapiens
ccaatataccttagt

SEQ ID NO: 1197327 - DNA, 15 bp, Homo sapiens
accaatataccttag

SEQ ID NO: 1197328 - DNA, 15 bp, Homo sapiens
taccaatatacctta

SEQ ID NO: 1197329 - DNA, 15 bp, Homo sapiens
ataccaatatacctt

SEQ ID NO: 1197330 - DNA, 15 bp, Homo sapiens
tataccaatatacct

SEQ ID NO: 1197331 - DNA, 15 bp, Homo sapiens
atataccaatatacc

SEQ ID NO: 1197332 - DNA, 15 bp, Homo sapiens
aatataccaatatac

SEQ ID NO: 1197333 - DNA, 15 bp, Homo sapiens
caatataccaatata

SEQ ID NO: 1197334 - DNA, 15 bp, Homo sapiens
tcaatataccaatat

SEQ ID NO: 1197335 - DNA, 15 bp, Homo sapiens
ttcaatataccaata

SEQ ID NO: 1197336 - DNA, 15 bp, Homo sapiens
attcaatataccaat

SEQ ID NO: 1197337 - DNA, 15 bp, Homo sapiens
aattcaatataccaa

SEQ ID NO: 1197338 - DNA, 15 bp, Homo sapiens
taattcaatatacca

SEQ ID NO: 1197339 - DNA, 15 bp, Homo sapiens
ttaattcaatatacc

SEQ ID NO: 1197340 - DNA, 15 bp, Homo sapiens
tttaattcaatatac

SEQ ID NO: 1197341 - DNA, 15 bp, Homo sapiens
ttttaattcaatata

SEQ ID NO: 1197342 - DNA, 15 bp, Homo sapiens
cttttaattcaatat

SEQ ID NO: 1197343 - DNA, 15 bp, Homo sapiens
ccttttaattcaata

SEQ ID NO: 1197344 - DNA, 15 bp, Homo sapiens
accttttaattcaat

SEQ ID NO: 1197345 - DNA, 15 bp, Homo sapiens
taccttttaattcaa

SEQ ID NO: 1197346 - DNA, 15 bp, Homo sapiens
gtaccttttaattca

SEQ ID NO: 1197347 - DNA, 15 bp, Homo sapiens
agtaccttttaattc

SEQ ID NO: 1197348 - DNA, 15 bp, Homo sapiens
cagtaccttttaatt

SEQ ID NO: 1197349 - DNA, 15 bp, Homo sapiens
tcagtaccttttaat

SEQ ID NO: 1197350 - DNA, 15 bp, Homo sapiens
ttcagtaccttttaa

SEQ ID NO: 1197351 - DNA, 15 bp, Homo sapiens
attcagtacctttta

SEQ ID NO: 1197352 - DNA, 15 bp, Homo sapiens
tattcagtacctttt

SEQ ID NO: 1197353 - DNA, 15 bp, Homo sapiens
ttattcagtaccttt

SEQ ID NO: 1197354 - DNA, 15 bp, Homo sapiens
attattcagtacctt

SEQ ID NO: 1197355 - DNA, 15 bp, Homo sapiens
tattattcagtacct

SEQ ID NO: 1197356 - DNA, 15 bp, Homo sapiens
ctattattcagtacc

SEQ ID NO: 1197357 - DNA, 15 bp, Homo sapiens
cctattattcagtac

SEQ ID NO: 1197358 - DNA, 15 bp, Homo sapiens
ccctattattcagta

SEQ ID NO: 1197359 - DNA, 15 bp, Homo sapiens
accctattattcagt

SEQ ID NO: 1197360 - DNA, 15 bp, Homo sapiens
taccctattattcag

SEQ ID NO: 1197361 - DNA, 15 bp, Homo sapiens
ataccctattattca

SEQ ID NO: 1197362 - DNA, 15 bp, Homo sapiens
tataccctattattc

SEQ ID NO: 1197363 - DNA, 15 bp, Homo sapiens
atataccctattatt

SEQ ID NO: 1197364 - DNA, 15 bp, Homo sapiens
aatataccctattat

SEQ ID NO: 1197365 - DNA, 15 bp, Homo sapiens
caatataccctatta

SEQ ID NO: 1197366 - DNA, 15 bp, Homo sapiens
tcaatataccctatt

SEQ ID NO: 1197367 - DNA, 15 bp, Homo sapiens
ttcaatataccctat

SEQ ID NO: 1197368 - DNA, 15 bp, Homo sapiens
attcaatatacccta

SEQ ID NO: 1197369 - DNA, 15 bp, Homo sapiens
tattcaatataccct

SEQ ID NO: 1197370 - DNA, 15 bp, Homo sapiens
ttattcaatataccc

SEQ ID NO: 1197371 - DNA, 15 bp, Homo sapiens
tttattcaatatacc

SEQ ID NO: 1197372 - DNA, 15 bp, Homo sapiens
ttttattcaatatac

SEQ ID NO: 1197373 - DNA, 15 bp, Homo sapiens
tttttattcaatata

SEQ ID NO: 1197374 - DNA, 15 bp, Homo sapiens
ctttttattcaatat

SEQ ID NO: 1197375 - DNA, 15 bp, Homo sapiens
cctttttattcaata

SEQ ID NO: 1197376 - DNA, 15 bp, Homo sapiens
ccctttttattcaat

SEQ ID NO: 1197377 - DNA, 15 bp, Homo sapiens
cccctttttattcaa

SEQ ID NO: 1197378 - DNA, 15 bp, Homo sapiens
tcccctttttattca

SEQ ID NO: 1197379 - DNA, 15 bp, Homo sapiens
ttcccctttttattc

SEQ ID NO: 1197380 - DNA, 15 bp, Homo sapiens
atttcccctttttat

SEQ ID NO: 1197381 - DNA, 15 bp, Homo sapiens
aatttccccttttta

SEQ ID NO: 1197382 - DNA, 15 bp, Homo sapiens
gaatttccccttttt

SEQ ID NO: 1197383 - DNA, 15 bp, Homo sapiens
ggaatttcccctttt

SEQ ID NO: 1197384 - DNA, 15 bp, Homo sapiens
tggaatttccccttt

SEQ ID NO: 1197385 - DNA, 15 bp, Homo sapiens
ttggaatttcccctt

SEQ ID NO: 1197386 - DNA, 15 bp, Homo sapiens
tttggaatttcccct

SEQ ID NO: 1197387 - DNA, 15 bp, Homo sapiens
ttttggaatttcccc

SEQ ID NO: 1197388 - DNA, 15 bp, Homo sapiens
attttggaatttccc

SEQ ID NO: 1197389 - DNA, 15 bp, Homo sapiens
cattttggaatttcc

SEQ ID NO: 1197390 - DNA, 15 bp, Homo sapiens
tcattttggaatttc

SEQ ID NO: 1197391 - DNA, 15 bp, Homo sapiens
atcattttggaattt

SEQ ID NO: 1197392 - DNA, 15 bp, Homo sapiens
tatcattttggaatt

SEQ ID NO: 1197393 - DNA, 15 bp, Homo sapiens
atatcattttggaat

SEQ ID NO: 1197394 - DNA, 15 bp, Homo sapiens
tatatcattttggaa

SEQ ID NO: 1197395 - DNA, 15 bp, Homo sapiens
ctatatcattttgga

SEQ ID NO: 1197396 - DNA, 15 bp, Homo sapiens
tctatatcattttgg

SEQ ID NO: 1197397 - DNA, 15 bp, Homo sapiens
gtctatatcattttg

SEQ ID NO: 1197398 - DNA, 15 bp, Homo sapiens
agtctatatcatttt

SEQ ID NO: 1197399 - DNA, 15 bp, Homo sapiens
cagtctatatcattt

SEQ ID NO: 1197400 - DNA, 15 bp, Homo sapiens
tcagtctatatcatt

SEQ ID NO: 1197401 - DNA, 15 bp, Homo sapiens
ttcagtctatatcat

SEQ ID NO: 1197402 - DNA, 15 bp, Homo sapiens
gttcagtctatatca

SEQ ID NO: 1197403 - DNA, 15 bp, Homo sapiens
tgttcagtctatatc

SEQ ID NO: 1197404 - DNA, 15 bp, Homo sapiens
gtgttcagtctatat

SEQ ID NO: 1197405 - DNA, 15 bp, Homo sapiens
tgtgttcagtctata

SEQ ID NO: 1197406 - DNA, 15 bp, Homo sapiens
atgtgttcagtctat

SEQ ID NO: 1197407 - DNA, 15 bp, Homo sapiens
tatgtgttcagtcta

SEQ ID NO: 1197408 - DNA, 15 bp, Homo sapiens
ttatgtgttcagtct

SEQ ID NO: 1197409 - DNA, 15 bp, Homo sapiens
attatgtgttcagtc

SEQ ID NO: 1197410 - DNA, 15 bp, Homo sapiens
aattatgtgttcagt

SEQ ID NO: 1197411 - DNA, 15 bp, Homo sapiens
taattatgtgttcag

SEQ ID NO: 1197412 - DNA, 15 bp, Homo sapiens
gtaattatgtgttca

SEQ ID NO: 1197413 - DNA, 15 bp, Homo sapiens
tgtaattatgtgttc

SEQ ID NO: 1197414 - DNA, 15 bp, Homo sapiens
atgtaattatgtgtt

SEQ ID NO: 1197415 - DNA, 15 bp, Homo sapiens
aatgtaattatgtgt

SEQ ID NO: 1197416 - DNA, 15 bp, Homo sapiens
taatgtaattatgtg

SEQ ID NO: 1197417 - DNA, 15 bp, Homo sapiens
ttaatgtaattatgt

SEQ ID NO: 1197418 - DNA, 15 bp, Homo sapiens
tttaatgtaattatg

SEQ ID NO: 1197419 - DNA, 15 bp, Homo sapiens
ctttaatgtaattat

SEQ ID NO: 1197420 - DNA, 15 bp, Homo sapiens
gctttaatgtaatta

SEQ ID NO: 1197421 - DNA, 15 bp, Homo sapiens
tgctttaatgtaatt

SEQ ID NO: 1197422 - DNA, 15 bp, Homo sapiens
ttgctttaatgtaat

SEQ ID NO: 1197423 - DNA, 15 bp, Homo sapiens
tttgctttaatgtaa

SEQ ID NO: 1197424 - DNA, 15 bp, Homo sapiens
atttgctttaatgta

SEQ ID NO: 1197425 - DNA, 15 bp, Homo sapiens
tatttgctttaatgt

SEQ ID NO: 1197426 - DNA, 15 bp, Homo sapiens
ctatttgctttaatg

SEQ ID NO: 1197427 - DNA, 15 bp, Homo sapiens
actatttgctttaat

SEQ ID NO: 1197428 - DNA, 15 bp, Homo sapiens
aactatttgctttaa

SEQ ID NO: 1197429 - DNA, 15 bp, Homo sapiens
aaactatttgcttta

SEQ ID NO: 1197430 - DNA, 15 bp, Homo sapiens
aaaactatttgcttt

SEQ ID NO: 1197431 - DNA, 15 bp, Homo sapiens
aaaaactatttgctt

SEQ ID NO: 1197432 - DNA, 15 bp, Homo sapiens
aaaaaactatttgct

SEQ ID NO: 1197433 - DNA, 15 bp, Homo sapiens
aaaaaaactatttgc

SEQ ID NO: 1197434 - DNA, 15 bp, Homo sapiens
taaaaaaactatttg

SEQ ID NO: 1197435 - DNA, 15 bp, Homo sapiens
gtaaaaaaactattt

SEQ ID NO: 1197436 - DNA, 15 bp, Homo sapiens
tgtaaaaaaactatt

SEQ ID NO: 1197437 - DNA, 15 bp, Homo sapiens
gtgtaaaaaaactat

SEQ ID NO: 1197438 - DNA, 15 bp, Homo sapiens
agtgtaaaaaaacta

SEQ ID NO: 1197439 - DNA, 15 bp, Homo sapiens
tagtgtaaaaaaact

SEQ ID NO: 1197440 - DNA, 15 bp, Homo sapiens
atagtgtaaaaaaac

SEQ ID NO: 1197441 - DNA, 15 bp, Homo sapiens
tatagtgtaaaaaaa

SEQ ID NO: 1197442 - DNA, 15 bp, Homo sapiens
atatagtgtaaaaaa

SEQ ID NO: 1197443 - DNA, 15 bp, Homo sapiens
tatatagtgtaaaaa

SEQ ID NO: 1197444 - DNA, 15 bp, Homo sapiens
gtatatagtgtaaaa

SEQ ID NO: 1197445 - DNA, 15 bp, Homo sapiens
tgtatatagtgtaaa

SEQ ID NO: 1197446 - DNA, 15 bp, Homo sapiens
gtgtatatagtgtaa

SEQ ID NO: 1197447 - DNA, 15 bp, Homo sapiens
tgtgtatatagtgta

SEQ ID NO: 1197448 - DNA, 15 bp, Homo sapiens
atgtgtatatagtgt

SEQ ID NO: 1197449 - DNA, 15 bp, Homo sapiens
catgtgtatatagtg

SEQ ID NO: 1197450 - DNA, 15 bp, Homo sapiens
acatgtgtatatagt

SEQ ID NO: 1197451 - DNA, 15 bp, Homo sapiens
cacatgtgtatatag

SEQ ID NO: 1197452 - DNA, 15 bp, Homo sapiens
acacatgtgtatata

SEQ ID NO: 1197453 - DNA, 15 bp, Homo sapiens
cacacatgtgtatat

SEQ ID NO: 1197454 - DNA, 15 bp, Homo sapiens
acacacatgtgtata

SEQ ID NO: 1197455 - DNA, 15 bp, Homo sapiens
tacacacatgtgtat

SEQ ID NO: 1197456 - DNA, 15 bp, Homo sapiens
ttacacacatgtgta

SEQ ID NO: 1197457 - DNA, 15 bp, Homo sapiens
tttacacacatgtgt

SEQ ID NO: 1197458 - DNA, 15 bp, Homo sapiens
ctttacacacatgtg

SEQ ID NO: 1197459 - DNA, 15 bp, Homo sapiens
cctttacacacatgt

SEQ ID NO: 1197460 - DNA, 15 bp, Homo sapiens
gcctttacacacatg

SEQ ID NO: 1197461 - DNA, 15 bp, Homo sapiens
tgcctttacacacat

SEQ ID NO: 1197462 - DNA, 15 bp, Homo sapiens
atgcctttacacaca

SEQ ID NO: 1197463 - DNA, 15 bp, Homo sapiens
tatgcctttacacac

SEQ ID NO: 1197464 - DNA, 15 bp, Homo sapiens
ctatgcctttacaca

SEQ ID NO: 1197465 - DNA, 15 bp, Homo sapiens
cctatgcctttacac

SEQ ID NO: 1197466 - DNA, 15 bp, Homo sapiens
tcctatgcctttaca

SEQ ID NO: 1197467 - DNA, 15 bp, Homo sapiens
ttcctatgcctttac

SEQ ID NO: 1197468 - DNA, 15 bp, Homo sapiens
tttcctatgccttta

SEQ ID NO: 1197469 - DNA, 15 bp, Homo sapiens
atttcctatgccttt

SEQ ID NO: 1197470 - DNA, 15 bp, Homo sapiens
aatttcctatgcctt

SEQ ID NO: 1197471 - DNA, 15 bp, Homo sapiens
caatttcctatgcct

SEQ ID NO: 1197472 - DNA, 15 bp, Homo sapiens
ccaatttcctatgcc

SEQ ID NO: 1197473 - DNA, 15 bp, Homo sapiens
tccaatttcctatgc

SEQ ID NO: 1197474 - DNA, 15 bp, Homo sapiens
ttccaatttcctatg

SEQ ID NO: 1197475 - DNA, 15 bp, Homo sapiens
tttccaatttcctat

SEQ ID NO: 1197476 - DNA, 15 bp, Homo sapiens
ctttccaatttccta

SEQ ID NO: 1197477 - DNA, 15 bp, Homo sapiens
tctttccaatttcct

SEQ ID NO: 1197478 - DNA, 15 bp, Homo sapiens
ttctttccaatttcc

SEQ ID NO: 1197479 - DNA, 15 bp, Homo sapiens
gttctttccaatttc

SEQ ID NO: 1197480 - DNA, 15 bp, Homo sapiens
tgttctttccaattt

SEQ ID NO: 1197481 - DNA, 15 bp, Homo sapiens
gtgttctttccaatt

SEQ ID NO: 1197482 - DNA, 15 bp, Homo sapiens
tgtgttctttccaat

SEQ ID NO: 1197483 - DNA, 15 bp, Homo sapiens
ttgtgttctttccaa

SEQ ID NO: 1197484 - DNA, 15 bp, Homo sapiens
tttgtgttctttcca

SEQ ID NO: 1197485 - DNA, 15 bp, Homo sapiens
atttgtgttctttcc

SEQ ID NO: 1197486 - DNA, 15 bp, Homo sapiens
aatttgtgttctttc

SEQ ID NO: 1197487 - DNA, 15 bp, Homo sapiens
caaatttgtgttctt

SEQ ID NO: 1197488 - DNA, 15 bp, Homo sapiens
gcaaatttgtgttct

SEQ ID NO: 1197489 - DNA, 15 bp, Homo sapiens
agcaaatttgtgttc

SEQ ID NO: 1197490 - DNA, 15 bp, Homo sapiens
gagcaaatttgtgtt

SEQ ID NO: 1197491 - DNA, 15 bp, Homo sapiens
ggagcaaatttgtgt

SEQ ID NO: 1197492 - DNA, 15 bp, Homo sapiens
aggagcaaatttgtg

SEQ ID NO: 1197493 - DNA, 15 bp, Homo sapiens
aaggagcaaatttgt

SEQ ID NO: 1197494 - DNA, 15 bp, Homo sapiens
caaggagcaaatttg

SEQ ID NO: 1197495 - DNA, 15 bp, Homo sapiens
acaaggagcaaattt

SEQ ID NO: 1197496 - DNA, 15 bp, Homo sapiens
tacaaggagcaaatt

SEQ ID NO: 1197497 - DNA, 15 bp, Homo sapiens
atacaaggagcaaat

SEQ ID NO: 1197498 - DNA, 15 bp, Homo sapiens
catacaaggagcaaa

SEQ ID NO: 1197499 - DNA, 15 bp, Homo sapiens
acatacaaggagcaa

SEQ ID NO: 1197500 - DNA, 15 bp, Homo sapiens
tacatacaaggagca

SEQ ID NO: 1197501 - DNA, 15 bp, Homo sapiens
gtacatacaaggagc

SEQ ID NO: 1197502 - DNA, 15 bp, Homo sapiens
agtacatacaaggag

SEQ ID NO: 1197503 - DNA, 15 bp, Homo sapiens
gagtacatacaagga

SEQ ID NO: 1197504 - DNA, 15 bp, Homo sapiens
agagtacatacaagg

SEQ ID NO: 1197505 - DNA, 15 bp, Homo sapiens
aagagtacatacaag

SEQ ID NO: 1197506 - DNA, 15 bp, Homo sapiens
aaagagtacatacaa

SEQ ID NO: 1197507 - DNA, 15 bp, Homo sapiens
aaaagagtacataca

SEQ ID NO: 1197508 - DNA, 15 bp, Homo sapiens
taaaagagtacatac

SEQ ID NO: 1197509 - DNA, 15 bp, Homo sapiens
gtaaaagagtacata

SEQ ID NO: 1197510 - DNA, 15 bp, Homo sapiens
ggtaaaagagtacat

SEQ ID NO: 1197511 - DNA, 15 bp, Homo sapiens
aggtaaaagagtaca

SEQ ID NO: 1197512 - DNA, 15 bp, Homo sapiens
aaggtaaaagagtac

SEQ ID NO: 1197513 - DNA, 15 bp, Homo sapiens
aaaggtaaaagagta

SEQ ID NO: 1197514 - DNA, 15 bp, Homo sapiens
aaaaggtaaaagagt

SEQ ID NO: 1197515 - DNA, 15 bp, Homo sapiens
aaaaaggtaaaagag

SEQ ID NO: 1197516 - DNA, 15 bp, Homo sapiens
taaaaaggtaaaaga

SEQ ID NO: 1197517 - DNA, 15 bp, Homo sapiens
gtaaaaaggtaaaag

SEQ ID NO: 1197518 - DNA, 15 bp, Homo sapiens
tgtaaaaaggtaaaa

SEQ ID NO: 1197519 - DNA, 15 bp, Homo sapiens
ttgtaaaaaggtaaa

SEQ ID NO: 1197520 - DNA, 15 bp, Homo sapiens
cttgtaaaaaggtaa

SEQ ID NO: 1197521 - DNA, 15 bp, Homo sapiens
ccttgtaaaaaggta

SEQ ID NO: 1197522 - DNA, 15 bp, Homo sapiens
tccttgtaaaaaggt

SEQ ID NO: 1197523 - DNA, 15 bp, Homo sapiens
ctccttgtaaaaagg

SEQ ID NO: 1197524 - DNA, 15 bp, Homo sapiens
tctccttgtaaaaag

SEQ ID NO: 1197525 - DNA, 15 bp, Homo sapiens
atctccttgtaaaaa

SEQ ID NO: 1197526 - DNA, 15 bp, Homo sapiens
tatctccttgtaaaa

SEQ ID NO: 1197527 - DNA, 15 bp, Homo sapiens
atatctccttgtaaa

SEQ ID NO: 1197528 - DNA, 15 bp, Homo sapiens
gatatctccttgtaa

SEQ ID NO: 1197529 - DNA, 15 bp, Homo sapiens
agatatctccttgta

SEQ ID NO: 1197530 - DNA, 15 bp, Homo sapiens
aagatatctccttgt

SEQ ID NO: 1197531 - DNA, 15 bp, Homo sapiens
aaagatatctccttg

SEQ ID NO: 1197532 - DNA, 15 bp, Homo sapiens
taaagatatctcctt

SEQ ID NO: 1197533 - DNA, 15 bp, Homo sapiens
ataaagatatctcct

SEQ ID NO: 1197534 - DNA, 15 bp, Homo sapiens
cataaagatatctcc

SEQ ID NO: 1197535 - DNA, 15 bp, Homo sapiens
acataaagatatctc

SEQ ID NO: 1197536 - DNA, 15 bp, Homo sapiens
cacataaagatatct

SEQ ID NO: 1197537 - DNA, 15 bp, Homo sapiens
acacataaagatatc

SEQ ID NO: 1197538 - DNA, 15 bp, Homo sapiens
aacacataaagatat

SEQ ID NO: 1197539 - DNA, 15 bp, Homo sapiens
taacacataaagata

SEQ ID NO: 1197540 - DNA, 15 bp, Homo sapiens
gtaacacataaagat

SEQ ID NO: 1197541 - DNA, 15 bp, Homo sapiens
agtaacacataaaga

SEQ ID NO: 1197542 - DNA, 15 bp, Homo sapiens
aagtaacacataaag

SEQ ID NO: 1197543 - DNA, 15 bp, Homo sapiens
caagtaacacataaa

SEQ ID NO: 1197544 - DNA, 15 bp, Homo sapiens
acaagtaacacataa

SEQ ID NO: 1197545 - DNA, 15 bp, Homo sapiens
tacaagtaacacata

SEQ ID NO: 1197546 - DNA, 15 bp, Homo sapiens
atacaagtaacacat

SEQ ID NO: 1197547 - DNA, 15 bp, Homo sapiens
tatacaagtaacaca

SEQ ID NO: 1197548 - DNA, 15 bp, Homo sapiens
ttatacaagtaacac

SEQ ID NO: 1197549 - DNA, 15 bp, Homo sapiens
attatacaagtaaca

SEQ ID NO: 1197550 - DNA, 15 bp, Homo sapiens
aattatacaagtaac

SEQ ID NO: 1197551 - DNA, 15 bp, Homo sapiens
aaattatacaagtaa

SEQ ID NO: 1197552 - DNA, 15 bp, Homo sapiens
taaattatacaagta

SEQ ID NO: 1197553 - DNA, 15 bp, Homo sapiens
ttaaattatacaagt

SEQ ID NO: 1197554 - DNA, 15 bp, Homo sapiens
attaaattatacaag

SEQ ID NO: 1197555 - DNA, 15 bp, Homo sapiens
aattaaattatacaa

SEQ ID NO: 1197556 - DNA, 15 bp, Homo sapiens
aaattaaattataca

SEQ ID NO: 1197557 - DNA, 15 bp, Homo sapiens
caaattaaattatac

SEQ ID NO: 1197558 - DNA, 15 bp, Homo sapiens
tcaaattaaattata

SEQ ID NO: 1197559 - DNA, 15 bp, Homo sapiens
ttcaaattaaattat

SEQ ID NO: 1197560 - DNA, 15 bp, Homo sapiens
tttcaaattaaatta

SEQ ID NO: 1197561 - DNA, 15 bp, Homo sapiens
ttttcaaattaaatt

SEQ ID NO: 1197562 - DNA, 15 bp, Homo sapiens
tttttcaaattaaat

SEQ ID NO: 1197563 - DNA, 15 bp, Homo sapiens
atttttcaaattaaa

SEQ ID NO: 1197564 - DNA, 15 bp, Homo sapiens
aatttttcaaattaa

SEQ ID NO: 1197565 - DNA, 15 bp, Homo sapiens
aaatttttcaaatta

SEQ ID NO: 1197566 - DNA, 15 bp, Homo sapiens
taaatttttcaaatt

SEQ ID NO: 1197567 - DNA, 15 bp, Homo sapiens
ttaaatttttcaaat

SEQ ID NO: 1197568 - DNA, 15 bp, Homo sapiens
tttaaatttttcaaa

SEQ ID NO: 1197569 - DNA, 15 bp, Homo sapiens
ttttaaatttttcaa

SEQ ID NO: 1197570 - DNA, 15 bp, Homo sapiens
gttttaaatttttca

SEQ ID NO: 1197571 - DNA, 15 bp, Homo sapiens
agttttaaatttttc

SEQ ID NO: 1197572 - DNA, 15 bp, Homo sapiens
aagttttaaattttt

SEQ ID NO: 1197573 - DNA, 15 bp, Homo sapiens
aaagttttaaatttt

SEQ ID NO: 1197574 - DNA, 15 bp, Homo sapiens
caaagttttaaattt

SEQ ID NO: 1197575 - DNA, 15 bp, Homo sapiens
gcaaagttttaaatt

SEQ ID NO: 1197576 - DNA, 15 bp, Homo sapiens
agcaaagttttaaat

SEQ ID NO: 1197577 - DNA, 15 bp, Homo sapiens
cagcaaagttttaaa

SEQ ID NO: 1197578 - DNA, 15 bp, Homo sapiens
gcagcaaagttttaa

SEQ ID NO: 1197579 - DNA, 15 bp, Homo sapiens
ggcagcaaagtttta

SEQ ID NO: 1197580 - DNA, 15 bp, Homo sapiens
tggcagcaaagtttt

SEQ ID NO: 1197581 - DNA, 15 bp, Homo sapiens
atggcagcaaagttt

SEQ ID NO: 1197582 - DNA, 15 bp, Homo sapiens
aatggcagcaaagtt

SEQ ID NO: 1197583 - DNA, 15 bp, Homo sapiens
aaatggcagcaaagt

SEQ ID NO: 1197584 - DNA, 15 bp, Homo sapiens
caaatggcagcaaag

SEQ ID NO: 1197585 - DNA, 15 bp, Homo sapiens
gcaaatggcagcaaa

SEQ ID NO: 1197586 - DNA, 15 bp, Homo sapiens
tgcaaatggcagcaa

SEQ ID NO: 1197587 - DNA, 15 bp, Homo sapiens
ttgcaaatggcagca

SEQ ID NO: 1197588 - DNA, 15 bp, Homo sapiens
attgcaaatggcagc

SEQ ID NO: 1197589 - DNA, 15 bp, Homo sapiens
aattgcaaatggcag

SEQ ID NO: 1197590 - DNA, 15 bp, Homo sapiens
aaattgcaaatggca

SEQ ID NO: 1197591 - DNA, 15 bp, Homo sapiens
caaattgcaaatggc

SEQ ID NO: 1197592 - DNA, 15 bp, Homo sapiens
acaaattgcaaatgg

SEQ ID NO: 1197593 - DNA, 15 bp, Homo sapiens
tacaaattgcaaatg

SEQ ID NO: 1197594 - DNA, 15 bp, Homo sapiens
ttacaaattgcaaat

SEQ ID NO: 1197595 - DNA, 15 bp, Homo sapiens
gttacaaattgcaaa

SEQ ID NO: 1197596 - DNA, 15 bp, Homo sapiens
agttacaaattgcaa

SEQ ID NO: 1197597 - DNA, 15 bp, Homo sapiens
cagttacaaattgca

SEQ ID NO: 1197598 - DNA, 15 bp, Homo sapiens
ccagttacaaattgc

SEQ ID NO: 1197599 - DNA, 15 bp, Homo sapiens
tccagttacaaattg

SEQ ID NO: 1197600 - DNA, 15 bp, Homo sapiens
atccagttacaaatt

SEQ ID NO: 1197601 - DNA, 15 bp, Homo sapiens
tatccagttacaaat

SEQ ID NO: 1197602 - DNA, 15 bp, Homo sapiens
atatccagttacaaa

SEQ ID NO: 1197603 - DNA, 15 bp, Homo sapiens
aatatccagttacaa

SEQ ID NO: 1197604 - DNA, 15 bp, Homo sapiens
aaatatccagttaca

SEQ ID NO: 1197605 - DNA, 15 bp, Homo sapiens
gaaatatccagttac

SEQ ID NO: 1197606 - DNA, 15 bp, Homo sapiens
ggaaatatccagtta

SEQ ID NO: 1197607 - DNA, 15 bp, Homo sapiens
gggaaatatccagtt

SEQ ID NO: 1197608 - DNA, 15 bp, Homo sapiens
tgggaaatatccagt

SEQ ID NO: 1197609 - DNA, 15 bp, Homo sapiens
atgggaaatatccag

SEQ ID NO: 1197610 - DNA, 15 bp, Homo sapiens
gatgggaaatatcca

SEQ ID NO: 1197611 - DNA, 15 bp, Homo sapiens
agatgggaaatatcc

SEQ ID NO: 1197612 - DNA, 15 bp, Homo sapiens
aagatgggaaatatc

SEQ ID NO: 1197613 - DNA, 15 bp, Homo sapiens
aaagatgggaaatat

SEQ ID NO: 1197614 - DNA, 15 bp, Homo sapiens
gaaagatgggaaata

SEQ ID NO: 1197615 - DNA, 15 bp, Homo sapiens
agaaagatgggaaat

SEQ ID NO: 1197616 - DNA, 15 bp, Homo sapiens
tagaaagatgggaaa

SEQ ID NO: 1197617 - DNA, 15 bp, Homo sapiens
atagaaagatgggaa

SEQ ID NO: 1197618 - DNA, 15 bp, Homo sapiens
aatagaaagatggga

SEQ ID NO: 1197619 - DNA, 15 bp, Homo sapiens
aaatagaaagatggg

SEQ ID NO: 1197620 - DNA, 15 bp, Homo sapiens
gaaatagaaagatgg

SEQ ID NO: 1197621 - DNA, 15 bp, Homo sapiens
ggaaatagaaagatg

SEQ ID NO: 1197622 - DNA, 15 bp, Homo sapiens
tggaaatagaaagat

SEQ ID NO: 1197623 - DNA, 15 bp, Homo sapiens
ttggaaatagaaaga

SEQ ID NO: 1197624 - DNA, 15 bp, Homo sapiens
gttggaaatagaaag

SEQ ID NO: 1197625 - DNA, 15 bp, Homo sapiens
tgttggaaatagaaa

SEQ ID NO: 1197626 - DNA, 15 bp, Homo sapiens
ttgttggaaatagaa

SEQ ID NO: 1197627 - DNA, 15 bp, Homo sapiens
gttgttggaaataga

SEQ ID NO: 1197628 - DNA, 15 bp, Homo sapiens
agttgttggaaatag

SEQ ID NO: 1197629 - DNA, 15 bp, Homo sapiens
cagttgttggaaata

SEQ ID NO: 1197630 - DNA, 15 bp, Homo sapiens
acagttgttggaaat

SEQ ID NO: 1197631 - DNA, 15 bp, Homo sapiens
tacagttgttggaaa

SEQ ID NO: 1197632 - DNA, 15 bp, Homo sapiens
atacagttgttggaa

SEQ ID NO: 1197633 - DNA, 15 bp, Homo sapiens
aatacagttgttgga

SEQ ID NO: 1197634 - DNA, 15 bp, Homo sapiens
caatacagttgttgg

SEQ ID NO: 1197635 - DNA, 15 bp, Homo sapiens
acaatacagttgttg

SEQ ID NO: 1197636 - DNA, 15 bp, Homo sapiens
aacaatacagttgtt

SEQ ID NO: 1197637 - DNA, 15 bp, Homo sapiens
gaacaatacagttgt

SEQ ID NO: 1197638 - DNA, 15 bp, Homo sapiens
ggaacaatacagttg

SEQ ID NO: 1197639 - DNA, 15 bp, Homo sapiens
gggaacaatacagtt

SEQ ID NO: 1197640 - DNA, 15 bp, Homo sapiens
ggggaacaatacagt

SEQ ID NO: 1197641 - DNA, 15 bp, Homo sapiens
tggggaacaatacag

SEQ ID NO: 1197642 - DNA, 15 bp, Homo sapiens
ttggggaacaataca

SEQ ID NO: 1197643 - DNA, 15 bp, Homo sapiens
tttggggaacaatac

SEQ ID NO: 1197644 - DNA, 15 bp, Homo sapiens
ttttggggaacaata

SEQ ID NO: 1197645 - DNA, 15 bp, Homo sapiens
gttttggggaacaat

SEQ ID NO: 1197646 - DNA, 15 bp, Homo sapiens
agttttggggaacaa

SEQ ID NO: 1197647 - DNA, 15 bp, Homo sapiens
cagttttggggaaca

SEQ ID NO: 1197648 - DNA, 15 bp, Homo sapiens
acagttttggggaac

SEQ ID NO: 1197649 - DNA, 15 bp, Homo sapiens
aacagttttggggaa

SEQ ID NO: 1197650 - DNA, 15 bp, Homo sapiens
aaacagttttgggga

SEQ ID NO: 1197651 - DNA, 15 bp, Homo sapiens
aaaacagttttgggg

SEQ ID NO: 1197652 - DNA, 15 bp, Homo sapiens
taaaacagttttggg

SEQ ID NO: 1197653 - DNA, 15 bp, Homo sapiens
gtaaaacagttttgg

SEQ ID NO: 1197654 - DNA, 15 bp, Homo sapiens
agtaaaacagttttg

SEQ ID NO: 1197655 - DNA, 15 bp, Homo sapiens
cagtaaaacagtttt

SEQ ID NO: 1197656 - DNA, 15 bp, Homo sapiens
ccagtaaaacagttt

SEQ ID NO: 1197657 - DNA, 15 bp, Homo sapiens
accagtaaaacagtt

SEQ ID NO: 1197658 - DNA, 15 bp, Homo sapiens
caccagtaaaacagt

SEQ ID NO: 1197659 - DNA, 15 bp, Homo sapiens
tcaccagtaaaacag

SEQ ID NO: 1197660 - DNA, 15 bp, Homo sapiens
atcaccagtaaaaca

SEQ ID NO: 1197661 - DNA, 15 bp, Homo sapiens
gatcaccagtaaaac

SEQ ID NO: 1197662 - DNA, 15 bp, Homo sapiens
agatcaccagtaaaa

SEQ ID NO: 1197663 - DNA, 15 bp, Homo sapiens
aagatcaccagtaaa

SEQ ID NO: 1197664 - DNA, 15 bp, Homo sapiens
gaagatcaccagtaa

SEQ ID NO: 1197665 - DNA, 15 bp, Homo sapiens
ggaagatcaccagta

SEQ ID NO: 1197666 - DNA, 15 bp, Homo sapiens
tggaagatcaccagt

SEQ ID NO: 1197667 - DNA, 15 bp, Homo sapiens
ctggaagatcaccag

SEQ ID NO: 1197668 - DNA, 15 bp, Homo sapiens
cctggaagatcacca

SEQ ID NO: 1197669 - DNA, 15 bp, Homo sapiens
tcctggaagatcacc

SEQ ID NO: 1197670 - DNA, 15 bp, Homo sapiens
gtcctggaagatcac

SEQ ID NO: 1197671 - DNA, 15 bp, Homo sapiens
tgtcctggaagatca

SEQ ID NO: 1197672 - DNA, 15 bp, Homo sapiens
atgtcctggaagatc

SEQ ID NO: 1197673 - DNA, 15 bp, Homo sapiens
gatgtcctggaagat

SEQ ID NO: 1197674 - DNA, 15 bp, Homo sapiens
ggatgtcctggaaga

SEQ ID NO: 1197675 - DNA, 15 bp, Homo sapiens
aggatgtcctggaag

SEQ ID NO: 1197676 - DNA, 15 bp, Homo sapiens
aaggatgtcctggaa

SEQ ID NO: 1197677 - DNA, 15 bp, Homo sapiens
taaggatgtcctgga

SEQ ID NO: 1197678 - DNA, 15 bp, Homo sapiens
gtaaggatgtcctgg

SEQ ID NO: 1197679 - DNA, 15 bp, Homo sapiens
ggtaaggatgtcctg

SEQ ID NO: 1197680 - DNA, 15 bp, Homo sapiens
tggtaaggatgtcct

SEQ ID NO: 1197681 - DNA, 15 bp, Homo sapiens
gtggtaaggatgtcc

SEQ ID NO: 1197682 - DNA, 15 bp, Homo sapiens
agtggtaaggatgtc

SEQ ID NO: 1197683 - DNA, 15 bp, Homo sapiens
aagtggtaaggatgt

SEQ ID NO: 1197684 - DNA, 15 bp, Homo sapiens
aaagtggtaaggatg

SEQ ID NO: 1197685 - DNA, 15 bp, Homo sapiens
caaagtggtaaggat

SEQ ID NO: 1197686 - DNA, 15 bp, Homo sapiens
ccaaagtggtaagga

SEQ ID NO: 1197687 - DNA, 15 bp, Homo sapiens
accaaagtggtaagg

SEQ ID NO: 1197688 - DNA, 15 bp, Homo sapiens
caccaaagtggtaag

SEQ ID NO: 1197689 - DNA, 15 bp, Homo sapiens
gcaccaaagtggtaa

SEQ ID NO: 1197690 - DNA, 15 bp, Homo sapiens
cgcaccaaagtggta

SEQ ID NO: 1197691 - DNA, 15 bp, Homo sapiens
tcgcaccaaagtggt

SEQ ID NO: 1197692 - DNA, 15 bp, Homo sapiens
ttcgcaccaaagtgg

SEQ ID NO: 1197693 - DNA, 15 bp, Homo sapiens
tttcgcaccaaagtg

SEQ ID NO: 1197694 - DNA, 15 bp, Homo sapiens
ctttcgcaccaaagt

SEQ ID NO: 1197695 - DNA, 15 bp, Homo sapiens
gctttcgcaccaaag

SEQ ID NO: 1197696 - DNA, 15 bp, Homo sapiens
ggctttcgcaccaaa

SEQ ID NO: 1197697 - DNA, 15 bp, Homo sapiens
tggctttcgcaccaa

SEQ ID NO: 1197698 - DNA, 15 bp, Homo sapiens
atggctttcgcacca

SEQ ID NO: 1197699 - DNA, 15 bp, Homo sapiens
aatggctttcgcacc

SEQ ID NO: 1197700 - DNA, 15 bp, Homo sapiens
caatggctttcgcac

SEQ ID NO: 1197701 - DNA, 15 bp, Homo sapiens
tcaatggctttcgca

SEQ ID NO: 1197702 - DNA, 15 bp, Homo sapiens
atcaatggctttcgc

SEQ ID NO: 1197703 - DNA, 15 bp, Homo sapiens
tatcaatggctttcg

SEQ ID NO: 1197704 - DNA, 15 bp, Homo sapiens
gtatcaatggctttc

SEQ ID NO: 1197705 - DNA, 15 bp, Homo sapiens
cgtatcaatggcttt

SEQ ID NO: 1197706 - DNA, 15 bp, Homo sapiens
gcgtatcaatggctt

SEQ ID NO: 1197707 - DNA, 15 bp, Homo sapiens
agcgtatcaatggct

SEQ ID NO: 1197708 - DNA, 15 bp, Homo sapiens
gagcgtatcaatggc

SEQ ID NO: 1197709 - DNA, 15 bp, Homo sapiens
ggagcgtatcaatgg

SEQ ID NO: 1197710 - DNA, 15 bp, Homo sapiens
tggagcgtatcaatg

SEQ ID NO: 1197711 - DNA, 15 bp, Homo sapiens
gtggagcgtatcaat

SEQ ID NO: 1197712 - DNA, 15 bp, Homo sapiens
agtggagcgtatcaa

SEQ ID NO: 1197713 - DNA, 15 bp, Homo sapiens
cagtggagcgtatca

SEQ ID NO: 1197714 - DNA, 15 bp, Homo sapiens
tcagtggagcgtatc

SEQ ID NO: 1197715 - DNA, 15 bp, Homo sapiens
atcagtggagcgtat

SEQ ID NO: 1197716 - DNA, 15 bp, Homo sapiens
catcagtggagcgta

SEQ ID NO: 1197717 - DNA, 15 bp, Homo sapiens
acatcagtggagcgt

SEQ ID NO: 1197718 - DNA, 15 bp, Homo sapiens
aacatcagtggagcg

SEQ ID NO: 1197719 - DNA, 15 bp, Homo sapiens
taacatcagtggagc

SEQ ID NO: 1197720 - DNA, 15 bp, Homo sapiens
ataacatcagtggag

SEQ ID NO: 1197721 - DNA, 15 bp, Homo sapiens
aataacatcagtgga

SEQ ID NO: 1197722 - DNA, 15 bp, Homo sapiens
gaataacatcagtgg

SEQ ID NO: 1197723 - DNA, 15 bp, Homo sapiens
tgaataacatcagtg

SEQ ID NO: 1197724 - DNA, 15 bp, Homo sapiens
ctgaataacatcagt

SEQ ID NO: 1197725 - DNA, 15 bp, Homo sapiens
gctgaataacatcag

SEQ ID NO: 1197726 - DNA, 15 bp, Homo sapiens
agctgaataacatca

SEQ ID NO: 1197727 - DNA, 15 bp, Homo sapiens
aagctgaataacatc

SEQ ID NO: 1197728 - DNA, 15 bp, Homo sapiens
aaagctgaataacat

SEQ ID NO: 1197729 - DNA, 15 bp, Homo sapiens
caaagctgaataaca

SEQ ID NO: 1197730 - DNA, 15 bp, Homo sapiens
gcaaagctgaataac

SEQ ID NO: 1197731 - DNA, 15 bp, Homo sapiens
ggcaaagctgaataa

SEQ ID NO: 1197732 - DNA, 15 bp, Homo sapiens
tggcaaagctgaata

SEQ ID NO: 1197733 - DNA, 15 bp, Homo sapiens
ttggcaaagctgaat

SEQ ID NO: 1197734 - DNA, 15 bp, Homo sapiens
cttggcaaagctgaa

SEQ ID NO: 1197735 - DNA, 15 bp, Homo sapiens
acttggcaaagctga

SEQ ID NO: 1197736 - DNA, 15 bp, Homo sapiens
aacttggcaaagctg

SEQ ID NO: 1197737 - DNA, 15 bp, Homo sapiens
aaacttggcaaagct

SEQ ID NO: 1197738 - DNA, 15 bp, Homo sapiens
aaaacttggcaaagc

SEQ ID NO: 1197739 - DNA, 15 bp, Homo sapiens
taaaacttggcaaag

SEQ ID NO: 1197740 - DNA, 15 bp, Homo sapiens
gtaaaacttggcaaa

SEQ ID NO: 1197741 - DNA, 15 bp, Homo sapiens
agtaaaacttggcaa

SEQ ID NO: 1197742 - DNA, 15 bp, Homo sapiens
aagtaaaacttggca

SEQ ID NO: 1197743 - DNA, 15 bp, Homo sapiens
caagtaaaacttggc

SEQ ID NO: 1197744 - DNA, 15 bp, Homo sapiens
acaagtaaaacttgg

SEQ ID NO: 1197745 - DNA, 15 bp, Homo sapiens
tacaagtaaaacttg

SEQ ID NO: 1197746 - DNA, 15 bp, Homo sapiens
atacaagtaaaactt

SEQ ID NO: 1197747 - DNA, 15 bp, Homo sapiens
aatacaagtaaaact

SEQ ID NO: 1197748 - DNA, 15 bp, Homo sapiens
gaatacaagtaaaac

SEQ ID NO: 1197749 - DNA, 15 bp, Homo sapiens
ggaatacaagtaaaa

SEQ ID NO: 1197750 - DNA, 15 bp, Homo sapiens
aggaatacaagtaaa

SEQ ID NO: 1197751 - DNA, 15 bp, Homo sapiens
aaggaatacaagtaa

SEQ ID NO: 1197752 - DNA, 15 bp, Homo sapiens
aaaggaatacaagta

SEQ ID NO: 1197753 - DNA, 15 bp, Homo sapiens
caaaggaatacaagt

SEQ ID NO: 1197754 - DNA, 15 bp, Homo sapiens
acaaaggaatacaag

SEQ ID NO: 1197755 - DNA, 15 bp, Homo sapiens
cacaaaggaatacaa

SEQ ID NO: 1197756 - DNA, 15 bp, Homo sapiens
acacaaaggaataca

SEQ ID NO: 1197757 - DNA, 15 bp, Homo sapiens
cacacaaaggaatac

SEQ ID NO: 1197758 - DNA, 15 bp, Homo sapiens
acacacaaaggaata

SEQ ID NO: 1197759 - DNA, 15 bp, Homo sapiens
gacacacaaaggaat

SEQ ID NO: 1197760 - DNA, 15 bp, Homo sapiens
agacacacaaaggaa

SEQ ID NO: 1197761 - DNA, 15 bp, Homo sapiens
cagacacacaaagga

SEQ ID NO: 1197762 - DNA, 15 bp, Homo sapiens
acagacacacaaagg

SEQ ID NO: 1197763 - DNA, 15 bp, Homo sapiens
cacagacacacaaag

SEQ ID NO: 1197764 - DNA, 15 bp, Homo sapiens
acacagacacacaaa

SEQ ID NO: 1197765 - DNA, 15 bp, Homo sapiens
cacacagacacacaa

SEQ ID NO: 1197766 - DNA, 15 bp, Homo sapiens
tatacacacagacac

SEQ ID NO: 1197767 - DNA, 15 bp, Homo sapiens
atatacacacagaca

SEQ ID NO: 1197768 - DNA, 15 bp, Homo sapiens
aatatacacacagac

SEQ ID NO: 1197769 - DNA, 15 bp, Homo sapiens
taatatacacacaga

SEQ ID NO: 1197770 - DNA, 15 bp, Homo sapiens
ttaatatacacacag

SEQ ID NO: 1197771 - DNA, 15 bp, Homo sapiens
cttaatatacacaca

SEQ ID NO: 1197772 - DNA, 15 bp, Homo sapiens
acttaatatacacac

SEQ ID NO: 1197773 - DNA, 15 bp, Homo sapiens
aacttaatatacaca

SEQ ID NO: 1197774 - DNA, 15 bp, Homo sapiens
gaacttaatatacac

SEQ ID NO: 1197775 - DNA, 15 bp, Homo sapiens
agaacttaatataca

SEQ ID NO: 1197776 - DNA, 15 bp, Homo sapiens
tagaacttaatatac

SEQ ID NO: 1197777 - DNA, 15 bp, Homo sapiens
atagaacttaatata

SEQ ID NO: 1197778 - DNA, 15 bp, Homo sapiens
tatagaacttaatat

SEQ ID NO: 1197779 - DNA, 15 bp, Homo sapiens
gtatagaacttaata

SEQ ID NO: 1197780 - DNA, 15 bp, Homo sapiens
tgtatagaacttaat

SEQ ID NO: 1197781 - DNA, 15 bp, Homo sapiens
ttgtatagaacttaa

SEQ ID NO: 1197782 - DNA, 15 bp, Homo sapiens
attgtatagaactta

SEQ ID NO: 1197783 - DNA, 15 bp, Homo sapiens
aattgtatagaactt

SEQ ID NO: 1197784 - DNA, 15 bp, Homo sapiens
aaattgtatagaact

SEQ ID NO: 1197785 - DNA, 15 bp, Homo sapiens
aaaattgtatagaac

SEQ ID NO: 1197786 - DNA, 15 bp, Homo sapiens
taaaattgtatagaa

SEQ ID NO: 1197787 - DNA, 15 bp, Homo sapiens
ataaaattgtataga

SEQ ID NO: 1197788 - DNA, 15 bp, Homo sapiens
gataaaattgtatag

SEQ ID NO: 1197789 - DNA, 15 bp, Homo sapiens
tgataaaattgtata

SEQ ID NO: 1197790 - DNA, 15 bp, Homo sapiens
gtgataaaattgtat

SEQ ID NO: 1197791 - DNA, 15 bp, Homo sapiens
ggtgataaaattgta

SEQ ID NO: 1197792 - DNA, 15 bp, Homo sapiens
aggtgataaaattgt

SEQ ID NO: 1197793 - DNA, 15 bp, Homo sapiens
caggtgataaaattg

SEQ ID NO: 1197794 - DNA, 15 bp, Homo sapiens
gcaggtgataaaatt

SEQ ID NO: 1197795 - DNA, 15 bp, Homo sapiens
tgcaggtgataaaat

SEQ ID NO: 1197796 - DNA, 15 bp, Homo sapiens
atgcaggtgataaaa

SEQ ID NO: 1197797 - DNA, 15 bp, Homo sapiens
tatgcaggtgataaa

SEQ ID NO: 1197798 - DNA, 15 bp, Homo sapiens
ctatgcaggtgataa

SEQ ID NO: 1197799 - DNA, 15 bp, Homo sapiens
cctatgcaggtgata

SEQ ID NO: 1197800 - DNA, 15 bp, Homo sapiens
acctatgcaggtgat

SEQ ID NO: 1197801 - DNA, 15 bp, Homo sapiens
aacctatgcaggtga

SEQ ID NO: 1197802 - DNA, 15 bp, Homo sapiens
gaacctatgcaggtg

SEQ ID NO: 1197803 - DNA, 15 bp, Homo sapiens
tgaacctatgcaggt

SEQ ID NO: 1197804 - DNA, 15 bp, Homo sapiens
atgaacctatgcagg

SEQ ID NO: 1197805 - DNA, 15 bp, Homo sapiens
catgaacctatgcag

SEQ ID NO: 1197806 - DNA, 15 bp, Homo sapiens
acatgaacctatgca

SEQ ID NO: 1197807 - DNA, 15 bp, Homo sapiens
tacatgaacctatgc

SEQ ID NO: 1197808 - DNA, 15 bp, Homo sapiens
atacatgaacctatg

SEQ ID NO: 1197809 - DNA, 15 bp, Homo sapiens
aatacatgaacctat

SEQ ID NO: 1197810 - DNA, 15 bp, Homo sapiens
aaatacatgaaccta

SEQ ID NO: 1197811 - DNA, 15 bp, Homo sapiens
caaatacatgaacct

SEQ ID NO: 1197812 - DNA, 15 bp, Homo sapiens
gcaaatacatgaacc

SEQ ID NO: 1197813 - DNA, 15 bp, Homo sapiens
agcaaatacatgaac

SEQ ID NO: 1197814 - DNA, 15 bp, Homo sapiens
tagcaaatacatgaa

SEQ ID NO: 1197815 - DNA, 15 bp, Homo sapiens
gtagcaaatacatga

SEQ ID NO: 1197816 - DNA, 15 bp, Homo sapiens
ggtagcaaatacatg

SEQ ID NO: 1197817 - DNA, 15 bp, Homo sapiens
tggtagcaaatacat

SEQ ID NO: 1197818 - DNA, 15 bp, Homo sapiens
gtggtagcaaataca

SEQ ID NO: 1197819 - DNA, 15 bp, Homo sapiens
tgtggtagcaaatac

SEQ ID NO: 1197820 - DNA, 15 bp, Homo sapiens
ctgtggtagcaaata

SEQ ID NO: 1197821 - DNA, 15 bp, Homo sapiens
actgtggtagcaaat

SEQ ID NO: 1197822 - DNA, 15 bp, Homo sapiens
gactgtggtagcaaa

SEQ ID NO: 1197823 - DNA, 15 bp, Homo sapiens
cgactgtggtagcaa

SEQ ID NO: 1197824 - DNA, 15 bp, Homo sapiens
tcgactgtggtagca

SEQ ID NO: 1197825 - DNA, 15 bp, Homo sapiens
ctcgactgtggtagc

SEQ ID NO: 1197826 - DNA, 15 bp, Homo sapiens
tctcgactgtggtag

SEQ ID NO: 1197827 - DNA, 15 bp, Homo sapiens
gtctcgactgtggta

SEQ ID NO: 1197828 - DNA, 15 bp, Homo sapiens
tgtctcgactgtggt

SEQ ID NO: 1197829 - DNA, 15 bp, Homo sapiens
gtgtctcgactgtgg

SEQ ID NO: 1197830 - DNA, 15 bp, Homo sapiens
ggtgtctcgactgtg

SEQ ID NO: 1197831 - DNA, 15 bp, Homo sapiens
tggtgtctcgactgt

SEQ ID NO: 1197832 - DNA, 15 bp, Homo sapiens
ttggtgtctcgactg

SEQ ID NO: 1197833 - DNA, 15 bp, Homo sapiens
gttggtgtctcgact

SEQ ID NO: 1197834 - DNA, 15 bp, Homo sapiens
agttggtgtctcgac

SEQ ID NO: 1197835 - DNA, 15 bp, Homo sapiens
aagttggtgtctcga

SEQ ID NO: 1197836 - DNA, 15 bp, Homo sapiens
taagttggtgtctcg

SEQ ID NO: 1197837 - DNA, 15 bp, Homo sapiens
ttaagttggtgtctc

SEQ ID NO: 1197838 - DNA, 15 bp, Homo sapiens
attaagttggtgtct

SEQ ID NO: 1197839 - DNA, 15 bp, Homo sapiens
aattaagttggtgtc

SEQ ID NO: 1197840 - DNA, 15 bp, Homo sapiens
gaattaagttggtgt

SEQ ID NO: 1197841 - DNA, 15 bp, Homo sapiens
gtggaattaagttgg

SEQ ID NO: 1197842 - DNA, 15 bp, Homo sapiens
agtggaattaagttg

SEQ ID NO: 1197843 - DNA, 15 bp, Homo sapiens
tagtggaattaagtt

SEQ ID NO: 1197844 - DNA, 15 bp, Homo sapiens
ctagtggaattaagt

SEQ ID NO: 1197845 - DNA, 15 bp, Homo sapiens
gctagtggaattaag

SEQ ID NO: 1197846 - DNA, 15 bp, Homo sapiens
tgctagtggaattaa

SEQ ID NO: 1197847 - DNA, 15 bp, Homo sapiens
gtgctagtggaatta

SEQ ID NO: 1197848 - DNA, 15 bp, Homo sapiens
tgtgctagtggaatt

SEQ ID NO: 1197849 - DNA, 15 bp, Homo sapiens
ttgtgctagtggaat

SEQ ID NO: 1197850 - DNA, 15 bp, Homo sapiens
tttgtgctagtggaa

SEQ ID NO: 1197851 - DNA, 15 bp, Homo sapiens
ctttgtgctagtgga

SEQ ID NO: 1197852 - DNA, 15 bp, Homo sapiens
tctttgtgctagtgg

SEQ ID NO: 1197853 - DNA, 15 bp, Homo sapiens
atctttgtgctagtg

SEQ ID NO: 1197854 - DNA, 15 bp, Homo sapiens
gatctttgtgctagt

SEQ ID NO: 1197855 - DNA, 15 bp, Homo sapiens
ggatctttgtgctag

SEQ ID NO: 1197856 - DNA, 15 bp, Homo sapiens
aggatctttgtgcta

SEQ ID NO: 1197857 - DNA, 15 bp, Homo sapiens
caggatctttgtgct

SEQ ID NO: 1197858 - DNA, 15 bp, Homo sapiens
acaggatctttgtgc

SEQ ID NO: 1197859 - DNA, 15 bp, Homo sapiens
cacaggatctttgtg

SEQ ID NO: 1197860 - DNA, 15 bp, Homo sapiens
acacaggatctttgt

SEQ ID NO: 1197861 - DNA, 15 bp, Homo sapiens
aacacaggatctttg

SEQ ID NO: 1197862 - DNA, 15 bp, Homo sapiens
caacacaggatcttt

SEQ ID NO: 1197863 - DNA, 15 bp, Homo sapiens
gcaacacaggatctt

SEQ ID NO: 1197864 - DNA, 15 bp, Homo sapiens
ggcaacacaggatct

SEQ ID NO: 1197865 - DNA, 15 bp, Homo sapiens
cggcaacacaggatc

SEQ ID NO: 1197866 - DNA, 15 bp, Homo sapiens
acggcaacacaggat

SEQ ID NO: 1197867 - DNA, 15 bp, Homo sapiens
aacggcaacacagga

SEQ ID NO: 1197868 - DNA, 15 bp, Homo sapiens
aaacggcaacacagg

SEQ ID NO: 1197869 - DNA, 15 bp, Homo sapiens
aaaacggcaacacag

SEQ ID NO: 1197870 - DNA, 15 bp, Homo sapiens
taaaacggcaacaca

SEQ ID NO: 1197871 - DNA, 15 bp, Homo sapiens
ataaaacggcaacac

SEQ ID NO: 1197872 - DNA, 15 bp, Homo sapiens
tataaaacggcaaca

SEQ ID NO: 1197873 - DNA, 15 bp, Homo sapiens
ctataaaacggcaac

SEQ ID NO: 1197874 - DNA, 15 bp, Homo sapiens
tctataaaacggcaa

SEQ ID NO: 1197875 - DNA, 15 bp, Homo sapiens
gtctataaaacggca

SEQ ID NO: 1197876 - DNA, 15 bp, Homo sapiens
tgtctataaaacggc

SEQ ID NO: 1197877 - DNA, 15 bp, Homo sapiens
atgtctataaaacgg

SEQ ID NO: 1197878 - DNA, 15 bp, Homo sapiens
tatgtctataaaacg

SEQ ID NO: 1197879 - DNA, 15 bp, Homo sapiens
ttatgtctataaaac

SEQ ID NO: 1197880 - DNA, 15 bp, Homo sapiens
gttatgtctataaaa

SEQ ID NO: 1197881 - DNA, 15 bp, Homo sapiens
ggttatgtctataaa

SEQ ID NO: 1197882 - DNA, 15 bp, Homo sapiens
aggttatgtctataa

SEQ ID NO: 1197883 - DNA, 15 bp, Homo sapiens
gaggttatgtctata

SEQ ID NO: 1197884 - DNA, 15 bp, Homo sapiens
ggaggttatgtctat

SEQ ID NO: 1197885 - DNA, 15 bp, Homo sapiens
aggaggttatgtcta

SEQ ID NO: 1197886 - DNA, 15 bp, Homo sapiens
gaggaggttatgtct

SEQ ID NO: 1197887 - DNA, 15 bp, Homo sapiens
ggaggaggttatgtc

SEQ ID NO: 1197888 - DNA, 15 bp, Homo sapiens
aggaggaggttatgt

SEQ ID NO: 1197889 - DNA, 15 bp, Homo sapiens
aaggaggaggttatg

SEQ ID NO: 1197890 - DNA, 15 bp, Homo sapiens
gaaggaggaggttat

SEQ ID NO: 1197891 - DNA, 15 bp, Homo sapiens
ggaaggaggaggtta

SEQ ID NO: 1197892 - DNA, 15 bp, Homo sapiens
gggaaggaggaggtt

SEQ ID NO: 1197893 - DNA, 15 bp, Homo sapiens
cgggaaggaggaggt

SEQ ID NO: 1197894 - DNA, 15 bp, Homo sapiens
tcgggaaggaggagg

SEQ ID NO: 1197895 - DNA, 15 bp, Homo sapiens
gtcgggaaggaggag

SEQ ID NO: 1197896 - DNA, 15 bp, Homo sapiens
ggtcgggaaggagga

SEQ ID NO: 1197897 - DNA, 15 bp, Homo sapiens
gggtcgggaaggagg

SEQ ID NO: 1197898 - DNA, 15 bp, Homo sapiens
ggggtcgggaaggag

SEQ ID NO: 1197899 - DNA, 15 bp, Homo sapiens
aggggtcgggaagga

SEQ ID NO: 1197900 - DNA, 15 bp, Homo sapiens
gaggggtcgggaagg

SEQ ID NO: 1197901 - DNA, 15 bp, Homo sapiens
ggaggggtcgggaag

SEQ ID NO: 1197902 - DNA, 15 bp, Homo sapiens
gggaggggtcgggaa

SEQ ID NO: 1197903 - DNA, 15 bp, Homo sapiens
ggggaggggtcggga

SEQ ID NO: 1197904 - DNA, 15 bp, Homo sapiens
aggggaggggtcggg

SEQ ID NO: 1197905 - DNA, 15 bp, Homo sapiens
caggggaggggtcgg

SEQ ID NO: 1197906 - DNA, 15 bp, Homo sapiens
ccaggggaggggtcg

SEQ ID NO: 1197907 - DNA, 15 bp, Homo sapiens
accaggggaggggtc

SEQ ID NO: 1197908 - DNA, 15 bp, Homo sapiens
gaccaggggaggggt

SEQ ID NO: 1197909 - DNA, 15 bp, Homo sapiens
agaccaggggagggg

SEQ ID NO: 1197910 - DNA, 15 bp, Homo sapiens
gagaccaggggaggg

SEQ ID NO: 1197911 - DNA, 15 bp, Homo sapiens
ggagaccaggggagg

SEQ ID NO: 1197912 - DNA, 15 bp, Homo sapiens
gggagaccaggggag

SEQ ID NO: 1197913 - DNA, 15 bp, Homo sapiens
ggggagaccagggga

SEQ ID NO: 1197914 - DNA, 15 bp, Homo sapiens
tggggagaccagggg

SEQ ID NO: 1197915 - DNA, 15 bp, Homo sapiens
atggggagaccaggg

SEQ ID NO: 1197916 - DNA, 15 bp, Homo sapiens
gatggggagaccagg

SEQ ID NO: 1197917 - DNA, 15 bp, Homo sapiens
ggatggggagaccag

SEQ ID NO: 1197918 - DNA, 15 bp, Homo sapiens
tggatggggagacca

SEQ ID NO: 1197919 - DNA, 15 bp, Homo sapiens
atggatggggagacc

SEQ ID NO: 1197920 - DNA, 15 bp, Homo sapiens
tatggatggggagac

SEQ ID NO: 1197921 - DNA, 15 bp, Homo sapiens
ctatggatggggaga

SEQ ID NO: 1197922 - DNA, 15 bp, Homo sapiens
actatggatggggag

SEQ ID NO: 1197923 - DNA, 15 bp, Homo sapiens
aactatggatgggga

SEQ ID NO: 1197924 - DNA, 15 bp, Homo sapiens
gaactatggatgggg

SEQ ID NO: 1197925 - DNA, 15 bp, Homo sapiens
agaactatggatggg

SEQ ID NO: 1197926 - DNA, 15 bp, Homo sapiens
tagaactatggatgg

SEQ ID NO: 1197927 - DNA, 15 bp, Homo sapiens
atagaactatggatg

SEQ ID NO: 1197928 - DNA, 15 bp, Homo sapiens
gatagaactatggat

SEQ ID NO: 1197929 - DNA, 15 bp, Homo sapiens
ggatagaactatgga

SEQ ID NO: 1197930 - DNA, 15 bp, Homo sapiens
gggatagaactatgg

SEQ ID NO: 1197931 - DNA, 15 bp, Homo sapiens
agggatagaactatg

SEQ ID NO: 1197932 - DNA, 15 bp, Homo sapiens
cagggatagaactat

SEQ ID NO: 1197933 - DNA, 15 bp, Homo sapiens
gcagggatagaacta

SEQ ID NO: 1197934 - DNA, 15 bp, Homo sapiens
ggcagggatagaact

SEQ ID NO: 1197935 - DNA, 15 bp, Homo sapiens
gggcagggatagaac

SEQ ID NO: 1197936 - DNA, 15 bp, Homo sapiens
agggcagggatagaa

SEQ ID NO: 1197937 - DNA, 15 bp, Homo sapiens
gagggcagggataga

SEQ ID NO: 1197938 - DNA, 15 bp, Homo sapiens
agagggcagggatag

SEQ ID NO: 1197939 - DNA, 15 bp, Homo sapiens
cagagggcagggata

SEQ ID NO: 1197940 - DNA, 15 bp, Homo sapiens
tcagagggcagggat

SEQ ID NO: 1197941 - DNA, 15 bp, Homo sapiens
gtcagagggcaggga

SEQ ID NO: 1197942 - DNA, 15 bp, Homo sapiens
ggtcagagggcaggg

SEQ ID NO: 1197943 - DNA, 15 bp, Homo sapiens
tggtcagagggcagg

SEQ ID NO: 1197944 - DNA, 15 bp, Homo sapiens
gtggtcagagggcag

SEQ ID NO: 1197945 - DNA, 15 bp, Homo sapiens
ggtggtcagagggca

SEQ ID NO: 1197946 - DNA, 15 bp, Homo sapiens
tggtggtcagagggc

SEQ ID NO: 1197947 - DNA, 15 bp, Homo sapiens
gtggtggtcagaggg

SEQ ID NO: 1197948 - DNA, 15 bp, Homo sapiens
agtggtggtcagagg

SEQ ID NO: 1197949 - DNA, 15 bp, Homo sapiens
tagtggtggtcagag

SEQ ID NO: 1197950 - DNA, 15 bp, Homo sapiens
ttagtggtggtcaga

SEQ ID NO: 1197951 - DNA, 15 bp, Homo sapiens
attagtggtggtcag

SEQ ID NO: 1197952 - DNA, 15 bp, Homo sapiens
gattagtggtggtca

SEQ ID NO: 1197953 - DNA, 15 bp, Homo sapiens
agattagtggtggtc

SEQ ID NO: 1197954 - DNA, 15 bp, Homo sapiens
cagattagtggtggt

SEQ ID NO: 1197955 - DNA, 15 bp, Homo sapiens
gcagattagtggtgg

SEQ ID NO: 1197956 - DNA, 15 bp, Homo sapiens
ggcagattagtggtg

SEQ ID NO: 1197957 - DNA, 15 bp, Homo sapiens
aggcagattagtggt

SEQ ID NO: 1197958 - DNA, 15 bp, Homo sapiens
gaggcagattagtgg

SEQ ID NO: 1197959 - DNA, 15 bp, Homo sapiens
ggaggcagattagtg

SEQ ID NO: 1197960 - DNA, 15 bp, Homo sapiens
tggaggcagattagt

SEQ ID NO: 1197961 - DNA, 15 bp, Homo sapiens
atggaggcagattag

SEQ ID NO: 1197962 - DNA, 15 bp, Homo sapiens
aatggaggcagatta

SEQ ID NO: 1197963 - DNA, 15 bp, Homo sapiens
aaatggaggcagatt

SEQ ID NO: 1197964 - DNA, 15 bp, Homo sapiens
gaaatggaggcagat

SEQ ID NO: 1197965 - DNA, 15 bp, Homo sapiens
agaaatggaggcaga

SEQ ID NO: 1197966 - DNA, 15 bp, Homo sapiens
tagaaatggaggcag

SEQ ID NO: 1197967 - DNA, 15 bp, Homo sapiens
ttagaaatggaggca

SEQ ID NO: 1197968 - DNA, 15 bp, Homo sapiens
tttagaaatggaggc

SEQ ID NO: 1197969 - DNA, 15 bp, Homo sapiens
ttttagaaatggagg

SEQ ID NO: 1197970 - DNA, 15 bp, Homo sapiens
attttagaaatggag

SEQ ID NO: 1197971 - DNA, 15 bp, Homo sapiens
cattttagaaatgga

SEQ ID NO: 1197972 - DNA, 15 bp, Homo sapiens
acattttagaaatgg

SEQ ID NO: 1197973 - DNA, 15 bp, Homo sapiens
aacattttagaaatg

SEQ ID NO: 1197974 - DNA, 15 bp, Homo sapiens
aaacattttagaaat

SEQ ID NO: 1197975 - DNA, 15 bp, Homo sapiens
aaaacattttagaaa

SEQ ID NO: 1197976 - DNA, 15 bp, Homo sapiens
aaaaacattttagaa

SEQ ID NO: 1197977 - DNA, 15 bp, Homo sapiens
gaaaaacattttaga

SEQ ID NO: 1197978 - DNA, 15 bp, Homo sapiens
tgaaaaacattttag

SEQ ID NO: 1197979 - DNA, 15 bp, Homo sapiens
atgaaaaacatttta

SEQ ID NO: 1197980 - DNA, 15 bp, Homo sapiens
aatgaaaaacatttt

SEQ ID NO: 1197981 - DNA, 15 bp, Homo sapiens
aaatgaaaaacattt

SEQ ID NO: 1197982 - DNA, 15 bp, Homo sapiens
gaaatgaaaaacatt

SEQ ID NO: 1197983 - DNA, 15 bp, Homo sapiens
tgaaatgaaaaacat

SEQ ID NO: 1197984 - DNA, 15 bp, Homo sapiens
ttgaaatgaaaaaca

SEQ ID NO: 1197985 - DNA, 15 bp, Homo sapiens
tttgaaatgaaaaac

SEQ ID NO: 1197986 - DNA, 15 bp, Homo sapiens
ttttgaaatgaaaaa

SEQ ID NO: 1197987 - DNA, 15 bp, Homo sapiens
attttgaaatgaaaa

SEQ ID NO: 1197988 - DNA, 15 bp, Homo sapiens
aattttgaaatgaaa

SEQ ID NO: 1197989 - DNA, 15 bp, Homo sapiens
aaattttgaaatgaa

SEQ ID NO: 1197990 - DNA, 15 bp, Homo sapiens
aaaattttgaaatga

SEQ ID NO: 1197991 - DNA, 15 bp, Homo sapiens
aaaaattttgaaatg

SEQ ID NO: 1197992 - DNA, 15 bp, Homo sapiens
aaaaaattttgaaat

SEQ ID NO: 1197993 - DNA, 15 bp, Homo sapiens
taaaaaattttgaaa

SEQ ID NO: 1197994 - DNA, 15 bp, Homo sapiens
ataaaaaattttgaa

SEQ ID NO: 1197995 - DNA, 15 bp, Homo sapiens
tataaaaaattttga

SEQ ID NO: 1197996 - DNA, 15 bp, Homo sapiens
ttataaaaaattttg

SEQ ID NO: 1197997 - DNA, 15 bp, Homo sapiens
tttataaaaaatttt

SEQ ID NO: 1197998 - DNA, 15 bp, Homo sapiens
atttataaaaaattt

SEQ ID NO: 1197999 - DNA, 15 bp, Homo sapiens
tatttataaaaaatt

SEQ ID NO: 1198000 - DNA, 15 bp, Homo sapiens
ctatttataaaaaat

SEQ ID NO: 1198001 - DNA, 15 bp, Homo sapiens
tctatttataaaaaa

SEQ ID NO: 1198002 - DNA, 15 bp, Homo sapiens
ttctatttataaaaa

SEQ ID NO: 1198003 - DNA, 15 bp, Homo sapiens
attctatttataaaa

SEQ ID NO: 1198004 - DNA, 15 bp, Homo sapiens
gattctatttataaa

SEQ ID NO: 1198005 - DNA, 15 bp, Homo sapiens
tgattctatttataa

SEQ ID NO: 1198006 - DNA, 15 bp, Homo sapiens
gtgattctatttata

SEQ ID NO: 1198007 - DNA, 15 bp, Homo sapiens
tgtgattctatttat

SEQ ID NO: 1198008 - DNA, 15 bp, Homo sapiens
gtgtgattctattta

SEQ ID NO: 1198009 - DNA, 15 bp, Homo sapiens
agtgtgattctattt

SEQ ID NO: 1198010 - DNA, 15 bp, Homo sapiens
cagtgtgattctatt

SEQ ID NO: 1198011 - DNA, 15 bp, Homo sapiens
acagtgtgattctat

SEQ ID NO: 1198012 - DNA, 15 bp, Homo sapiens
tacagtgtgattcta

SEQ ID NO: 1198013 - DNA, 15 bp, Homo sapiens
atacagtgtgattct

SEQ ID NO: 1198014 - DNA, 15 bp, Homo sapiens
catacagtgtgattc

SEQ ID NO: 1198015 - DNA, 15 bp, Homo sapiens
acatacagtgtgatt

SEQ ID NO: 1198016 - DNA, 15 bp, Homo sapiens
tacatacagtgtgat

SEQ ID NO: 1198017 - DNA, 15 bp, Homo sapiens
ttacatacagtgtga

SEQ ID NO: 1198018 - DNA, 15 bp, Homo sapiens
attacatacagtgtg

SEQ ID NO: 1198019 - DNA, 15 bp, Homo sapiens
gattacatacagtgt

SEQ ID NO: 1198020 - DNA, 15 bp, Homo sapiens
agattacatacagtg

SEQ ID NO: 1198021 - DNA, 15 bp, Homo sapiens
aagattacatacagt

SEQ ID NO: 1198022 - DNA, 15 bp, Homo sapiens
aaagattacatacag

SEQ ID NO: 1198023 - DNA, 15 bp, Homo sapiens
aaaagattacataca

SEQ ID NO: 1198024 - DNA, 15 bp, Homo sapiens
gaaaagattacatac

SEQ ID NO: 1198025 - DNA, 15 bp, Homo sapiens
agaaaagattacata

SEQ ID NO: 1198026 - DNA, 15 bp, Homo sapiens
tagaaaagattacat

SEQ ID NO: 1198027 - DNA, 15 bp, Homo sapiens
ttagaaaagattaca

SEQ ID NO: 1198028 - DNA, 15 bp, Homo sapiens
attagaaaagattac

SEQ ID NO: 1198029 - DNA, 15 bp, Homo sapiens
aattagaaaagatta

SEQ ID NO: 1198030 - DNA, 15 bp, Homo sapiens
caattagaaaagatt

SEQ ID NO: 1198031 - DNA, 15 bp, Homo sapiens
ccaattagaaaagat

SEQ ID NO: 1198032 - DNA, 15 bp, Homo sapiens
gccaattagaaaaga

SEQ ID NO: 1198033 - DNA, 15 bp, Homo sapiens
agccaattagaaaag

SEQ ID NO: 1198034 - DNA, 15 bp, Homo sapiens
cagccaattagaaaa

SEQ ID NO: 1198035 - DNA, 15 bp, Homo sapiens
gcagccaattagaaa

SEQ ID NO: 1198036 - DNA, 15 bp, Homo sapiens
agcagccaattagaa

SEQ ID NO: 1198037 - DNA, 15 bp, Homo sapiens
aagcagccaattaga

SEQ ID NO: 1198038 - DNA, 15 bp, Homo sapiens
aaagcagccaattag

SEQ ID NO: 1198039 - DNA, 15 bp, Homo sapiens
aaaagcagccaatta

SEQ ID NO: 1198040 - DNA, 15 bp, Homo sapiens
gaaaagcagccaatt

SEQ ID NO: 1198041 - DNA, 15 bp, Homo sapiens
tgaaaagcagccaat

SEQ ID NO: 1198042 - DNA, 15 bp, Homo sapiens
gtgaaaagcagccaa

SEQ ID NO: 1198043 - DNA, 15 bp, Homo sapiens
agtgaaaagcagcca

SEQ ID NO: 1198044 - DNA, 15 bp, Homo sapiens
gagtgaaaagcagcc

SEQ ID NO: 1198045 - DNA, 15 bp, Homo sapiens
tgagtgaaaagcagc

SEQ ID NO: 1198046 - DNA, 15 bp, Homo sapiens
ctgagtgaaaagcag

SEQ ID NO: 1198047 - DNA, 15 bp, Homo sapiens
gctgagtgaaaagca

SEQ ID NO: 1198048 - DNA, 15 bp, Homo sapiens
tgctgagtgaaaagc

SEQ ID NO: 1198049 - DNA, 15 bp, Homo sapiens
atgctgagtgaaaag

SEQ ID NO: 1198050 - DNA, 15 bp, Homo sapiens
catgctgagtgaaaa

SEQ ID NO: 1198051 - DNA, 15 bp, Homo sapiens
tcatgctgagtgaaa

SEQ ID NO: 1198052 - DNA, 15 bp, Homo sapiens
atcatgctgagtgaa

SEQ ID NO: 1198053 - DNA, 15 bp, Homo sapiens
aatcatgctgagtga

SEQ ID NO: 1198054 - DNA, 15 bp, Homo sapiens
gaatcatgctgagtg

SEQ ID NO: 1198055 - DNA, 15 bp, Homo sapiens
ggaatcatgctgagt

SEQ ID NO: 1198056 - DNA, 15 bp, Homo sapiens
gggaatcatgctgag

SEQ ID NO: 1198057 - DNA, 15 bp, Homo sapiens
agggaatcatgctga

SEQ ID NO: 1198058 - DNA, 15 bp, Homo sapiens
cagggaatcatgctg

SEQ ID NO: 1198059 - DNA, 15 bp, Homo sapiens
ccagggaatcatgct

SEQ ID NO: 1198060 - DNA, 15 bp, Homo sapiens
tccagggaatcatgc

SEQ ID NO: 1198061 - DNA, 15 bp, Homo sapiens
ctccagggaatcatg

SEQ ID NO: 1198062 - DNA, 15 bp, Homo sapiens
tctccagggaatcat

SEQ ID NO: 1198063 - DNA, 15 bp, Homo sapiens
atctccagggaatca

SEQ ID NO: 1198064 - DNA, 15 bp, Homo sapiens
aatctccagggaatc

SEQ ID NO: 1198065 - DNA, 15 bp, Homo sapiens
gaatctccagggaat

SEQ ID NO: 1198066 - DNA, 15 bp, Homo sapiens
tgaatctccagggaa

SEQ ID NO: 1198067 - DNA, 15 bp, Homo sapiens
atgaatctccaggga

SEQ ID NO: 1198068 - DNA, 15 bp, Homo sapiens
gatgaatctccaggg

SEQ ID NO: 1198069 - DNA, 15 bp, Homo sapiens
ggatgaatctccagg

SEQ ID NO: 1198070 - DNA, 15 bp, Homo sapiens
tggatgaatctccag

SEQ ID NO: 1198071 - DNA, 15 bp, Homo sapiens
ctggatgaatctcca

SEQ ID NO: 1198072 - DNA, 15 bp, Homo sapiens
actggatgaatctcc

SEQ ID NO: 1198073 - DNA, 15 bp, Homo sapiens
gactggatgaatctc

SEQ ID NO: 1198074 - DNA, 15 bp, Homo sapiens
agactggatgaatct

SEQ ID NO: 1198075 - DNA, 15 bp, Homo sapiens
cagactggatgaatc

SEQ ID NO: 1198076 - DNA, 15 bp, Homo sapiens
acagactggatgaat

SEQ ID NO: 1198077 - DNA, 15 bp, Homo sapiens
cacagactggatgaa

SEQ ID NO: 1198078 - DNA, 15 bp, Homo sapiens
acacagactggatga

SEQ ID NO: 1198079 - DNA, 15 bp, Homo sapiens
cacacagactggatg

SEQ ID NO: 1198080 - DNA, 15 bp, Homo sapiens
acacacagactggat

SEQ ID NO: 1198081 - DNA, 15 bp, Homo sapiens
tacacacagactgga

SEQ ID NO: 1198082 - DNA, 15 bp, Homo sapiens
atacacacagactgg

SEQ ID NO: 1198083 - DNA, 15 bp, Homo sapiens
gatacacacagactg

SEQ ID NO: 1198084 - DNA, 15 bp, Homo sapiens
tgatacacacagact

SEQ ID NO: 1198085 - DNA, 15 bp, Homo sapiens
ttgatacacacagac

SEQ ID NO: 1198086 - DNA, 15 bp, Homo sapiens
attgatacacacaga

SEQ ID NO: 1198087 - DNA, 15 bp, Homo sapiens
aattgatacacacag

SEQ ID NO: 1198088 - DNA, 15 bp, Homo sapiens
taattgatacacaca

SEQ ID NO: 1198089 - DNA, 15 bp, Homo sapiens
ataattgatacacac

SEQ ID NO: 1198090 - DNA, 15 bp, Homo sapiens
aataattgatacaca

SEQ ID NO: 1198091 - DNA, 15 bp, Homo sapiens
aaataattgatacac

SEQ ID NO: 1198092 - DNA, 15 bp, Homo sapiens
caaataattgataca

SEQ ID NO: 1198093 - DNA, 15 bp, Homo sapiens
acaaataattgatac

SEQ ID NO: 1198094 - DNA, 15 bp, Homo sapiens
aacaaataattgata

SEQ ID NO: 1198095 - DNA, 15 bp, Homo sapiens
gaacaaataattgat

SEQ ID NO: 1198096 - DNA, 15 bp, Homo sapiens
ggaacaaataattga

SEQ ID NO: 1198097 - DNA, 15 bp, Homo sapiens
aggaacaaataattg

SEQ ID NO: 1198098 - DNA, 15 bp, Homo sapiens
aaggaacaaataatt

SEQ ID NO: 1198099 - DNA, 15 bp, Homo sapiens
aaaggaacaaataat

SEQ ID NO: 1198100 - DNA, 15 bp, Homo sapiens
caaaggaacaaataa

SEQ ID NO: 1198101 - DNA, 15 bp, Homo sapiens
acaaaggaacaaata

SEQ ID NO: 1198102 - DNA, 15 bp, Homo sapiens
tacaaaggaacaaat

SEQ ID NO: 1198103 - DNA, 15 bp, Homo sapiens
atacaaaggaacaaa

SEQ ID NO: 1198104 - DNA, 15 bp, Homo sapiens
catacaaaggaacaa

SEQ ID NO: 1198105 - DNA, 15 bp, Homo sapiens
tcatacaaaggaaca

SEQ ID NO: 1198106 - DNA, 15 bp, Homo sapiens
gtcatacaaaggaac

SEQ ID NO: 1198107 - DNA, 15 bp, Homo sapiens
agtcatacaaaggaa

SEQ ID NO: 1198108 - DNA, 15 bp, Homo sapiens
cagtcatacaaagga

SEQ ID NO: 1198109 - DNA, 15 bp, Homo sapiens
tcagtcatacaaagg

SEQ ID NO: 1198110 - DNA, 15 bp, Homo sapiens
ctcagtcatacaaag

SEQ ID NO: 1198111 - DNA, 15 bp, Homo sapiens
actcagtcatacaaa

SEQ ID NO: 1198112 - DNA, 15 bp, Homo sapiens
tactcagtcatacaa

SEQ ID NO: 1198113 - DNA, 15 bp, Homo sapiens
ctactcagtcataca

SEQ ID NO: 1198114 - DNA, 15 bp, Homo sapiens
actactcagtcatac

SEQ ID NO: 1198115 - DNA, 15 bp, Homo sapiens
cactactcagtcata

SEQ ID NO: 1198116 - DNA, 15 bp, Homo sapiens
acactactcagtcat

SEQ ID NO: 1198117 - DNA, 15 bp, Homo sapiens
aacactactcagtca

SEQ ID NO: 1198118 - DNA, 15 bp, Homo sapiens
aaacactactcagtc

SEQ ID NO: 1198119 - DNA, 15 bp, Homo sapiens
gaaacactactcagt

SEQ ID NO: 1198120 - DNA, 15 bp, Homo sapiens
ggaaacactactcag

SEQ ID NO: 1198121 - DNA, 15 bp, Homo sapiens
aggaaacactactca

SEQ ID NO: 1198122 - DNA, 15 bp, Homo sapiens
caggaaacactactc

SEQ ID NO: 1198123 - DNA, 15 bp, Homo sapiens
ccaggaaacactact

SEQ ID NO: 1198124 - DNA, 15 bp, Homo sapiens
accaggaaacactac

SEQ ID NO: 1198125 - DNA, 15 bp, Homo sapiens
taccaggaaacacta

SEQ ID NO: 1198126 - DNA, 15 bp, Homo sapiens
gtaccaggaaacact

SEQ ID NO: 1198127 - DNA, 15 bp, Homo sapiens
tgtaccaggaaacac

SEQ ID NO: 1198128 - DNA, 15 bp, Homo sapiens
ctgtaccaggaaaca

SEQ ID NO: 1198129 - DNA, 15 bp, Homo sapiens
tctgtaccaggaaac

SEQ ID NO: 1198130 - DNA, 15 bp, Homo sapiens
atctgtaccaggaaa

SEQ ID NO: 1198131 - DNA, 15 bp, Homo sapiens
catctgtaccaggaa

SEQ ID NO: 1198132 - DNA, 15 bp, Homo sapiens
acatctgtaccagga

SEQ ID NO: 1198133 - DNA, 15 bp, Homo sapiens
tacatctgtaccagg

SEQ ID NO: 1198134 - DNA, 15 bp, Homo sapiens
gtacatctgtaccag

SEQ ID NO: 1198135 - DNA, 15 bp, Homo sapiens
ggtacatctgtacca

SEQ ID NO: 1198136 - DNA, 15 bp, Homo sapiens
tggtacatctgtacc

SEQ ID NO: 1198137 - DNA, 15 bp, Homo sapiens
gtggtacatctgtac

SEQ ID NO: 1198138 - DNA, 15 bp, Homo sapiens
tgtggtacatctgta

SEQ ID NO: 1198139 - DNA, 15 bp, Homo sapiens
ctgtggtacatctgt

SEQ ID NO: 1198140 - DNA, 15 bp, Homo sapiens
actgtggtacatctg

SEQ ID NO: 1198141 - DNA, 15 bp, Homo sapiens
aactgtggtacatct

SEQ ID NO: 1198142 - DNA, 15 bp, Homo sapiens
caactgtggtacatc

SEQ ID NO: 1198143 - DNA, 15 bp, Homo sapiens
acaactgtggtacat

SEQ ID NO: 1198144 - DNA, 15 bp, Homo sapiens
aacaactgtggtaca

SEQ ID NO: 1198145 - DNA, 15 bp, Homo sapiens
aaacaactgtggtac

SEQ ID NO: 1198146 - DNA, 15 bp, Homo sapiens
taaacaactgtggta

SEQ ID NO: 1198147 - DNA, 15 bp, Homo sapiens
ctaaacaactgtggt

SEQ ID NO: 1198148 - DNA, 15 bp, Homo sapiens
actaaacaactgtgg

SEQ ID NO: 1198149 - DNA, 15 bp, Homo sapiens
gactaaacaactgtg

SEQ ID NO: 1198150 - DNA, 15 bp, Homo sapiens
tgactaaacaactgt

SEQ ID NO: 1198151 - DNA, 15 bp, Homo sapiens
gtgactaaacaactg

SEQ ID NO: 1198152 - DNA, 15 bp, Homo sapiens
agtgactaaacaact

SEQ ID NO: 1198153 - DNA, 15 bp, Homo sapiens
gagtgactaaacaac

SEQ ID NO: 1198154 - DNA, 15 bp, Homo sapiens
tgagtgactaaacaa

SEQ ID NO: 1198155 - DNA, 15 bp, Homo sapiens
gtgagtgactaaaca

SEQ ID NO: 1198156 - DNA, 15 bp, Homo sapiens
ggtgagtgactaaac

SEQ ID NO: 1198157 - DNA, 15 bp, Homo sapiens
aggtgagtgactaaa

SEQ ID NO: 1198158 - DNA, 15 bp, Homo sapiens
caggtgagtgactaa

SEQ ID NO: 1198159 - DNA, 15 bp, Homo sapiens
gcaggtgagtgacta

SEQ ID NO: 1198160 - DNA, 15 bp, Homo sapiens
agcaggtgagtgact

SEQ ID NO: 1198161 - DNA, 15 bp, Homo sapiens
cagcaggtgagtgac

SEQ ID NO: 1198162 - DNA, 15 bp, Homo sapiens
tcagcaggtgagtga

SEQ ID NO: 1198163 - DNA, 15 bp, Homo sapiens
ttcagcaggtgagtg

SEQ ID NO: 1198164 - DNA, 15 bp, Homo sapiens
gttcagcaggtgagt

SEQ ID NO: 1198165 - DNA, 15 bp, Homo sapiens
tgttcagcaggtgag

SEQ ID NO: 1198166 - DNA, 15 bp, Homo sapiens
ttgttcagcaggtga

SEQ ID NO: 1198167 - DNA, 15 bp, Homo sapiens
gttgttcagcaggtg

SEQ ID NO: 1198168 - DNA, 15 bp, Homo sapiens
agttgttcagcaggt

SEQ ID NO: 1198169 - DNA, 15 bp, Homo sapiens
aagttgttcagcagg

SEQ ID NO: 1198170 - DNA, 15 bp, Homo sapiens
gaagttgttcagcag

SEQ ID NO: 1198171 - DNA, 15 bp, Homo sapiens
agaagttgttcagca

SEQ ID NO: 1198172 - DNA, 15 bp, Homo sapiens
cagaagttgttcagc

SEQ ID NO: 1198173 - DNA, 15 bp, Homo sapiens
ccagaagttgttcag

SEQ ID NO: 1198174 - DNA, 15 bp, Homo sapiens
cccagaagttgttca

SEQ ID NO: 1198175 - DNA, 15 bp, Homo sapiens
gcccagaagttgttc

SEQ ID NO: 1198176 - DNA, 15 bp, Homo sapiens
agcccagaagttgtt

SEQ ID NO: 1198177 - DNA, 15 bp, Homo sapiens
cagcccagaagttgt

SEQ ID NO: 1198178 - DNA, 15 bp, Homo sapiens
acagcccagaagttg

SEQ ID NO: 1198179 - DNA, 15 bp, Homo sapiens
aacagcccagaagtt

SEQ ID NO: 1198180 - DNA, 15 bp, Homo sapiens
aaacagcccagaagt

SEQ ID NO: 1198181 - DNA, 15 bp, Homo sapiens
gaaacagcccagaag

SEQ ID NO: 1198182 - DNA, 15 bp, Homo sapiens
agaaacagcccagaa

SEQ ID NO: 1198183 - DNA, 15 bp, Homo sapiens
tagaaacagcccaga

SEQ ID NO: 1198184 - DNA, 15 bp, Homo sapiens
ctagaaacagcccag

SEQ ID NO: 1198185 - DNA, 15 bp, Homo sapiens
cctagaaacagccca

SEQ ID NO: 1198186 - DNA, 15 bp, Homo sapiens
acctagaaacagccc

SEQ ID NO: 1198187 - DNA, 15 bp, Homo sapiens
aacctagaaacagcc

SEQ ID NO: 1198188 - DNA, 15 bp, Homo sapiens
aaacctagaaacagc

SEQ ID NO: 1198189 - DNA, 15 bp, Homo sapiens
aaaacctagaaacag

SEQ ID NO: 1198190 - DNA, 15 bp, Homo sapiens
caaaacctagaaaca

SEQ ID NO: 1198191 - DNA, 15 bp, Homo sapiens
tcaaaacctagaaac

SEQ ID NO: 1198192 - DNA, 15 bp, Homo sapiens
gtcaaaacctagaaa

SEQ ID NO: 1198193 - DNA, 15 bp, Homo sapiens
agtcaaaacctagaa

SEQ ID NO: 1198194 - DNA, 15 bp, Homo sapiens
tagtcaaaacctaga

SEQ ID NO: 1198195 - DNA, 15 bp, Homo sapiens
gtagtcaaaacctag

SEQ ID NO: 1198196 - DNA, 15 bp, Homo sapiens
agtagtcaaaaccta

SEQ ID NO: 1198197 - DNA, 15 bp, Homo sapiens
tagtagtcaaaacct

SEQ ID NO: 1198198 - DNA, 15 bp, Homo sapiens
ttagtagtcaaaacc

SEQ ID NO: 1198199 - DNA, 15 bp, Homo sapiens
tttagtagtcaaaac

SEQ ID NO: 1198200 - DNA, 15 bp, Homo sapiens
gtttagtagtcaaaa

SEQ ID NO: 1198201 - DNA, 15 bp, Homo sapiens
tgtttagtagtcaaa

SEQ ID NO: 1198202 - DNA, 15 bp, Homo sapiens
atgtttagtagtcaa

SEQ ID NO: 1198203 - DNA, 15 bp, Homo sapiens
tatgtttagtagtca

SEQ ID NO: 1198204 - DNA, 15 bp, Homo sapiens
ttatgtttagtagtc

SEQ ID NO: 1198205 - DNA, 15 bp, Homo sapiens
tttatgtttagtagt

SEQ ID NO: 1198206 - DNA, 15 bp, Homo sapiens
ctttatgtttagtag

SEQ ID NO: 1198207 - DNA, 15 bp, Homo sapiens
gctttatgtttagta

SEQ ID NO: 1198208 - DNA, 15 bp, Homo sapiens
agctttatgtttagt

SEQ ID NO: 1198209 - DNA, 15 bp, Homo sapiens
cagctttatgtttag

SEQ ID NO: 1198210 - DNA, 15 bp, Homo sapiens
gcagctttatgttta

SEQ ID NO: 1198211 - DNA, 15 bp, Homo sapiens
ggcagctttatgttt

SEQ ID NO: 1198212 - DNA, 15 bp, Homo sapiens
tggcagctttatgtt

SEQ ID NO: 1198213 - DNA, 15 bp, Homo sapiens
atggcagctttatgt

SEQ ID NO: 1198214 - DNA, 15 bp, Homo sapiens
catggcagctttatg

SEQ ID NO: 1198215 - DNA, 15 bp, Homo sapiens
tcatggcagctttat

SEQ ID NO: 1198216 - DNA, 15 bp, Homo sapiens
ttcatggcagcttta

SEQ ID NO: 1198217 - DNA, 15 bp, Homo sapiens
gttcatggcagcttt

SEQ ID NO: 1198218 - DNA, 15 bp, Homo sapiens
tgttcatggcagctt

SEQ ID NO: 1198219 - DNA, 15 bp, Homo sapiens
atgttcatggcagct

SEQ ID NO: 1198220 - DNA, 15 bp, Homo sapiens
atatgttcatggcag

SEQ ID NO: 1198221 - DNA, 15 bp, Homo sapiens
catatgttcatggca

SEQ ID NO: 1198222 - DNA, 15 bp, Homo sapiens
gcatatgttcatggc

SEQ ID NO: 1198223 - DNA, 15 bp, Homo sapiens
ggcatatgttcatgg

SEQ ID NO: 1198224 - DNA, 15 bp, Homo sapiens
aggcatatgttcatg

SEQ ID NO: 1198225 - DNA, 15 bp, Homo sapiens
taggcatatgttcat

SEQ ID NO: 1198226 - DNA, 15 bp, Homo sapiens
ctaggcatatgttca

SEQ ID NO: 1198227 - DNA, 15 bp, Homo sapiens
tctaggcatatgttc

SEQ ID NO: 1198228 - DNA, 15 bp, Homo sapiens
ctctaggcatatgtt

SEQ ID NO: 1198229 - DNA, 15 bp, Homo sapiens
tctctaggcatatgt

SEQ ID NO: 1198230 - DNA, 15 bp, Homo sapiens
atctctaggcatatg

SEQ ID NO: 1198231 - DNA, 15 bp, Homo sapiens
aatctctaggcatat

SEQ ID NO: 1198232 - DNA, 15 bp, Homo sapiens
aaatctctaggcata

SEQ ID NO: 1198233 - DNA, 15 bp, Homo sapiens
aaaatctctaggcat

SEQ ID NO: 1198234 - DNA, 15 bp, Homo sapiens
aaaaatctctaggca

SEQ ID NO: 1198235 - DNA, 15 bp, Homo sapiens
aaaaaatctctaggc

SEQ ID NO: 1198236 - DNA, 15 bp, Homo sapiens
caaaaaatctctagg

SEQ ID NO: 1198237 - DNA, 15 bp, Homo sapiens
acaaaaaatctctag

SEQ ID NO: 1198238 - DNA, 15 bp, Homo sapiens
cacaaaaaatctcta

SEQ ID NO: 1198239 - DNA, 15 bp, Homo sapiens
acacaaaaaatctct

SEQ ID NO: 1198240 - DNA, 15 bp, Homo sapiens
cacacaaaaaatctc

SEQ ID NO: 1198241 - DNA, 15 bp, Homo sapiens
tcacacaaaaaatct

SEQ ID NO: 1198242 - DNA, 15 bp, Homo sapiens
ctcacacaaaaaatc

SEQ ID NO: 1198243 - DNA, 15 bp, Homo sapiens
tctcacacaaaaaat

SEQ ID NO: 1198244 - DNA, 15 bp, Homo sapiens
ctctcacacaaaaaa

SEQ ID NO: 1198245 - DNA, 15 bp, Homo sapiens
actctcacacaaaaa

SEQ ID NO: 1198246 - DNA, 15 bp, Homo sapiens
aactctcacacaaaa

SEQ ID NO: 1198247 - DNA, 15 bp, Homo sapiens
taactctcacacaaa

SEQ ID NO: 1198248 - DNA, 15 bp, Homo sapiens
ttaactctcacacaa

SEQ ID NO: 1198249 - DNA, 15 bp, Homo sapiens
cttaactctcacaca

SEQ ID NO: 1198250 - DNA, 15 bp, Homo sapiens
acttaactctcacac

SEQ ID NO: 1198251 - DNA, 15 bp, Homo sapiens
aacttaactctcaca

SEQ ID NO: 1198252 - DNA, 15 bp, Homo sapiens
aaacttaactctcac

SEQ ID NO: 1198253 - DNA, 15 bp, Homo sapiens
aaaacttaactctca

SEQ ID NO: 1198254 - DNA, 15 bp, Homo sapiens
gaaaacttaactctc

SEQ ID NO: 1198255 - DNA, 15 bp, Homo sapiens
tgaaaacttaactct

SEQ ID NO: 1198256 - DNA, 15 bp, Homo sapiens
atgaaaacttaactc

SEQ ID NO: 1198257 - DNA, 15 bp, Homo sapiens
aatgaaaacttaact

SEQ ID NO: 1198258 - DNA, 15 bp, Homo sapiens
aaatgaaaacttaac

SEQ ID NO: 1198259 - DNA, 15 bp, Homo sapiens
taaatgaaaacttaa

SEQ ID NO: 1198260 - DNA, 15 bp, Homo sapiens
ataaatgaaaactta

SEQ ID NO: 1198261 - DNA, 15 bp, Homo sapiens
gataaatgaaaactt

SEQ ID NO: 1198262 - DNA, 15 bp, Homo sapiens
agataaatgaaaact

SEQ ID NO: 1198263 - DNA, 15 bp, Homo sapiens
aagataaatgaaaac

SEQ ID NO: 1198264 - DNA, 15 bp, Homo sapiens
caagataaatgaaaa

SEQ ID NO: 1198265 - DNA, 15 bp, Homo sapiens
tccaagataaatgaa

SEQ ID NO: 1198266 - DNA, 15 bp, Homo sapiens
atccaagataaatga

SEQ ID NO: 1198267 - DNA, 15 bp, Homo sapiens
tatccaagataaatg

SEQ ID NO: 1198268 - DNA, 15 bp, Homo sapiens
ttatccaagataaat

SEQ ID NO: 1198269 - DNA, 15 bp, Homo sapiens
tttatccaagataaa

SEQ ID NO: 1198270 - DNA, 15 bp, Homo sapiens
atttatccaagataa

SEQ ID NO: 1198271 - DNA, 15 bp, Homo sapiens
catttatccaagata

SEQ ID NO: 1198272 - DNA, 15 bp, Homo sapiens
gcatttatccaagat

SEQ ID NO: 1198273 - DNA, 15 bp, Homo sapiens
ggcatttatccaaga

SEQ ID NO: 1198274 - DNA, 15 bp, Homo sapiens
gggcatttatccaag

SEQ ID NO: 1198275 - DNA, 15 bp, Homo sapiens
tgggcatttatccaa

SEQ ID NO: 1198276 - DNA, 15 bp, Homo sapiens
ttgggcatttatcca

SEQ ID NO: 1198277 - DNA, 15 bp, Homo sapiens
gttgggcatttatcc

SEQ ID NO: 1198278 - DNA, 15 bp, Homo sapiens
tgttgggcatttatc

SEQ ID NO: 1198279 - DNA, 15 bp, Homo sapiens
ctgttgggcatttat

SEQ ID NO: 1198280 - DNA, 15 bp, Homo sapiens
gctgttgggcattta

SEQ ID NO: 1198281 - DNA, 15 bp, Homo sapiens
tgctgttgggcattt

SEQ ID NO: 1198282 - DNA, 15 bp, Homo sapiens
gtgctgttgggcatt

SEQ ID NO: 1198283 - DNA, 15 bp, Homo sapiens
tgtgctgttgggcat

SEQ ID NO: 1198284 - DNA, 15 bp, Homo sapiens
ttgtgctgttgggca

SEQ ID NO: 1198285 - DNA, 15 bp, Homo sapiens
attgtgctgttgggc

SEQ ID NO: 1198286 - DNA, 15 bp, Homo sapiens
aattgtgctgttggg

SEQ ID NO: 1198287 - DNA, 15 bp, Homo sapiens
aaattgtgctgttgg

SEQ ID NO: 1198288 - DNA, 15 bp, Homo sapiens
gaaattgtgctgttg

SEQ ID NO: 1198289 - DNA, 15 bp, Homo sapiens
agaaattgtgctgtt

SEQ ID NO: 1198290 - DNA, 15 bp, Homo sapiens
tagaaattgtgctgt

SEQ ID NO: 1198291 - DNA, 15 bp, Homo sapiens
ctagaaattgtgctg

SEQ ID NO: 1198292 - DNA, 15 bp, Homo sapiens
acctagaaattgtgc

SEQ ID NO: 1198293 - DNA, 15 bp, Homo sapiens
gacctagaaattgtg

SEQ ID NO: 1198294 - DNA, 15 bp, Homo sapiens
tgacctagaaattgt

SEQ ID NO: 1198295 - DNA, 15 bp, Homo sapiens
atgacctagaaattg

SEQ ID NO: 1198296 - DNA, 15 bp, Homo sapiens
tatgacctagaaatt

SEQ ID NO: 1198297 - DNA, 15 bp, Homo sapiens
atatgacctagaaat

SEQ ID NO: 1198298 - DNA, 15 bp, Homo sapiens
catatgacctagaaa

SEQ ID NO: 1198299 - DNA, 15 bp, Homo sapiens
ccatatgacctagaa

SEQ ID NO: 1198300 - DNA, 15 bp, Homo sapiens
accatatgacctaga

SEQ ID NO: 1198301 - DNA, 15 bp, Homo sapiens
taccatatgacctag

SEQ ID NO: 1198302 - DNA, 15 bp, Homo sapiens
ctaccatatgaccta

SEQ ID NO: 1198303 - DNA, 15 bp, Homo sapiens
actaccatatgacct

SEQ ID NO: 1198304 - DNA, 15 bp, Homo sapiens
aactaccatatgacc

SEQ ID NO: 1198305 - DNA, 15 bp, Homo sapiens
caactaccatatgac

SEQ ID NO: 1198306 - DNA, 15 bp, Homo sapiens
gcaactaccatatga

SEQ ID NO: 1198307 - DNA, 15 bp, Homo sapiens
tgcaactaccatatg

SEQ ID NO: 1198308 - DNA, 15 bp, Homo sapiens
atgcaactaccatat

SEQ ID NO: 1198309 - DNA, 15 bp, Homo sapiens
catgcaactaccata

SEQ ID NO: 1198310 - DNA, 15 bp, Homo sapiens
acatgcaactaccat

SEQ ID NO: 1198311 - DNA, 15 bp, Homo sapiens
aacatgcaactacca

SEQ ID NO: 1198312 - DNA, 15 bp, Homo sapiens
aaacatgcaactacc

SEQ ID NO: 1198313 - DNA, 15 bp, Homo sapiens
taaacatgcaactac

SEQ ID NO: 1198314 - DNA, 15 bp, Homo sapiens
ctaaacatgcaacta

SEQ ID NO: 1198315 - DNA, 15 bp, Homo sapiens
actaaacatgcaact

SEQ ID NO: 1198316 - DNA, 15 bp, Homo sapiens
aactaaacatgcaac

SEQ ID NO: 1198317 - DNA, 15 bp, Homo sapiens
aaactaaacatgcaa

SEQ ID NO: 1198318 - DNA, 15 bp, Homo sapiens
gaaactaaacatgca

SEQ ID NO: 1198319 - DNA, 15 bp, Homo sapiens
cgaaactaaacatgc

SEQ ID NO: 1198320 - DNA, 15 bp, Homo sapiens
acgaaactaaacatg

SEQ ID NO: 1198321 - DNA, 15 bp, Homo sapiens
tacgaaactaaacat

SEQ ID NO: 1198322 - DNA, 15 bp, Homo sapiens
ttacgaaactaaaca

SEQ ID NO: 1198323 - DNA, 15 bp, Homo sapiens
cttacgaaactaaac

SEQ ID NO: 1198324 - DNA, 15 bp, Homo sapiens
tcttacgaaactaaa

SEQ ID NO: 1198325 - DNA, 15 bp, Homo sapiens
ttcttacgaaactaa

SEQ ID NO: 1198326 - DNA, 15 bp, Homo sapiens
tttcttacgaaacta

SEQ ID NO: 1198327 - DNA, 15 bp, Homo sapiens
gtttcttacgaaact

SEQ ID NO: 1198328 - DNA, 15 bp, Homo sapiens
agtttcttacgaaac

SEQ ID NO: 1198329 - DNA, 15 bp, Homo sapiens
cagtttcttacgaaa

SEQ ID NO: 1198330 - DNA, 15 bp, Homo sapiens
acagtttcttacgaa

SEQ ID NO: 1198331 - DNA, 15 bp, Homo sapiens
aacagtttcttacga

SEQ ID NO: 1198332 - DNA, 15 bp, Homo sapiens
taacagtttcttacg

SEQ ID NO: 1198333 - DNA, 15 bp, Homo sapiens
ttaacagtttcttac

SEQ ID NO: 1198334 - DNA, 15 bp, Homo sapiens
tttaacagtttctta

SEQ ID NO: 1198335 - DNA, 15 bp, Homo sapiens
gtttaacagtttctt

SEQ ID NO: 1198336 - DNA, 15 bp, Homo sapiens
agtttaacagtttct

SEQ ID NO: 1198337 - DNA, 15 bp, Homo sapiens
cagtttaacagtttc

SEQ ID NO: 1198338 - DNA, 15 bp, Homo sapiens
acagtttaacagttt

SEQ ID NO: 1198339 - DNA, 15 bp, Homo sapiens
aacagtttaacagtt

SEQ ID NO: 1198340 - DNA, 15 bp, Homo sapiens
aaacagtttaacagt

SEQ ID NO: 1198341 - DNA, 15 bp, Homo sapiens
aaaacagtttaacag

SEQ ID NO: 1198342 - DNA, 15 bp, Homo sapiens
gaaaacagtttaaca

SEQ ID NO: 1198343 - DNA, 15 bp, Homo sapiens
agaaaacagtttaac

SEQ ID NO: 1198344 - DNA, 15 bp, Homo sapiens
tagaaaacagtttaa

SEQ ID NO: 1198345 - DNA, 15 bp, Homo sapiens
ctagaaaacagttta

SEQ ID NO: 1198346 - DNA, 15 bp, Homo sapiens
tctagaaaacagttt

SEQ ID NO: 1198347 - DNA, 15 bp, Homo sapiens
ctctagaaaacagtt

SEQ ID NO: 1198348 - DNA, 15 bp, Homo sapiens
actctagaaaacagt

SEQ ID NO: 1198349 - DNA, 15 bp, Homo sapiens
cactctagaaaacag

SEQ ID NO: 1198350 - DNA, 15 bp, Homo sapiens
ccactctagaaaaca

SEQ ID NO: 1198351 - DNA, 15 bp, Homo sapiens
gccactctagaaaac

SEQ ID NO: 1198352 - DNA, 15 bp, Homo sapiens
agccactctagaaaa

SEQ ID NO: 1198353 - DNA, 15 bp, Homo sapiens
cagccactctagaaa

SEQ ID NO: 1198354 - DNA, 15 bp, Homo sapiens
acagccactctagaa

SEQ ID NO: 1198355 - DNA, 15 bp, Homo sapiens
tacagccactctaga

SEQ ID NO: 1198356 - DNA, 15 bp, Homo sapiens
gtacagccactctag

SEQ ID NO: 1198357 - DNA, 15 bp, Homo sapiens
ggtacagccactcta

SEQ ID NO: 1198358 - DNA, 15 bp, Homo sapiens
tggtacagccactct

SEQ ID NO: 1198359 - DNA, 15 bp, Homo sapiens
atggtacagccactc

SEQ ID NO: 1198360 - DNA, 15 bp, Homo sapiens
aatggtacagccact

SEQ ID NO: 1198361 - DNA, 15 bp, Homo sapiens
aaatggtacagccac

SEQ ID NO: 1198362 - DNA, 15 bp, Homo sapiens
aaaatggtacagcca

SEQ ID NO: 1198363 - DNA, 15 bp, Homo sapiens
taaaatggtacagcc

SEQ ID NO: 1198364 - DNA, 15 bp, Homo sapiens
gtaaaatggtacagc

SEQ ID NO: 1198365 - DNA, 15 bp, Homo sapiens
tgtaaaatggtacag

SEQ ID NO: 1198366 - DNA, 15 bp, Homo sapiens
gtgtaaaatggtaca

SEQ ID NO: 1198367 - DNA, 15 bp, Homo sapiens
agtgtaaaatggtac

SEQ ID NO: 1198368 - DNA, 15 bp, Homo sapiens
gagtgtaaaatggta

SEQ ID NO: 1198369 - DNA, 15 bp, Homo sapiens
ggagtgtaaaatggt

SEQ ID NO: 1198370 - DNA, 15 bp, Homo sapiens
gggagtgtaaaatgg

SEQ ID NO: 1198371 - DNA, 15 bp, Homo sapiens
tgggagtgtaaaatg

SEQ ID NO: 1198372 - DNA, 15 bp, Homo sapiens
gtgggagtgtaaaat

SEQ ID NO: 1198373 - DNA, 15 bp, Homo sapiens
ggtgggagtgtaaaa

SEQ ID NO: 1198374 - DNA, 15 bp, Homo sapiens
tggtgggagtgtaaa

SEQ ID NO: 1198375 - DNA, 15 bp, Homo sapiens
gtggtgggagtgtaa

SEQ ID NO: 1198376 - DNA, 15 bp, Homo sapiens
ggtggtgggagtgta

SEQ ID NO: 1198377 - DNA, 15 bp, Homo sapiens
tggtggtgggagtgt

SEQ ID NO: 1198378 - DNA, 15 bp, Homo sapiens
ttggtggtgggagtg

SEQ ID NO: 1198379 - DNA, 15 bp, Homo sapiens
attggtggtgggagt

SEQ ID NO: 1198380 - DNA, 15 bp, Homo sapiens
cattggtggtgggag

SEQ ID NO: 1198381 - DNA, 15 bp, Homo sapiens
acattggtggtggga

SEQ ID NO: 1198382 - DNA, 15 bp, Homo sapiens
tacattggtggtggg

SEQ ID NO: 1198383 - DNA, 15 bp, Homo sapiens
atacattggtggtgg

SEQ ID NO: 1198384 - DNA, 15 bp, Homo sapiens
catacattggtggtg

SEQ ID NO: 1198385 - DNA, 15 bp, Homo sapiens
tcatacattggtggt

SEQ ID NO: 1198386 - DNA, 15 bp, Homo sapiens
ctcatacattggtgg

SEQ ID NO: 1198387 - DNA, 15 bp, Homo sapiens
tctcatacattggtg

SEQ ID NO: 1198388 - DNA, 15 bp, Homo sapiens
ctctcatacattggt

SEQ ID NO: 1198389 - DNA, 15 bp, Homo sapiens
tctctcatacattgg

SEQ ID NO: 1198390 - DNA, 15 bp, Homo sapiens
atctctcatacattg

SEQ ID NO: 1198391 - DNA, 15 bp, Homo sapiens
gatctctcatacatt

SEQ ID NO: 1198392 - DNA, 15 bp, Homo sapiens
agatctctcatacat

SEQ ID NO: 1198393 - DNA, 15 bp, Homo sapiens
cagatctctcataca

SEQ ID NO: 1198394 - DNA, 15 bp, Homo sapiens
ccagatctctcatac

SEQ ID NO: 1198395 - DNA, 15 bp, Homo sapiens
accagatctctcata

SEQ ID NO: 1198396 - DNA, 15 bp, Homo sapiens
aaccagatctctcat

SEQ ID NO: 1198397 - DNA, 15 bp, Homo sapiens
aaaccagatctctca

SEQ ID NO: 1198398 - DNA, 15 bp, Homo sapiens
gaaaccagatctctc

SEQ ID NO: 1198399 - DNA, 15 bp, Homo sapiens
agaaaccagatctct

SEQ ID NO: 1198400 - DNA, 15 bp, Homo sapiens
gagaaaccagatctc

SEQ ID NO: 1198401 - DNA, 15 bp, Homo sapiens
agagaaaccagatct

SEQ ID NO: 1198402 - DNA, 15 bp, Homo sapiens
cagagaaaccagatc

SEQ ID NO: 1198403 - DNA, 15 bp, Homo sapiens
gcagagaaaccagat

SEQ ID NO: 1198404 - DNA, 15 bp, Homo sapiens
tgcagagaaaccaga

SEQ ID NO: 1198405 - DNA, 15 bp, Homo sapiens
atgcagagaaaccag

SEQ ID NO: 1198406 - DNA, 15 bp, Homo sapiens
gatgcagagaaacca

SEQ ID NO: 1198407 - DNA, 15 bp, Homo sapiens
ggatgcagagaaacc

SEQ ID NO: 1198408 - DNA, 15 bp, Homo sapiens
aggatgcagagaaac

SEQ ID NO: 1198409 - DNA, 15 bp, Homo sapiens
aaggatgcagagaaa

SEQ ID NO: 1198410 - DNA, 15 bp, Homo sapiens
caaggatgcagagaa

SEQ ID NO: 1198411 - DNA, 15 bp, Homo sapiens
gcaaggatgcagaga

SEQ ID NO: 1198412 - DNA, 15 bp, Homo sapiens
ggcaaggatgcagag

SEQ ID NO: 1198413 - DNA, 15 bp, Homo sapiens
tggcaaggatgcaga

SEQ ID NO: 1198414 - DNA, 15 bp, Homo sapiens
ctggcaaggatgcag

SEQ ID NO: 1198415 - DNA, 15 bp, Homo sapiens
actggcaaggatgca

SEQ ID NO: 1198416 - DNA, 15 bp, Homo sapiens
tactggcaaggatgc

SEQ ID NO: 1198417 - DNA, 15 bp, Homo sapiens
atactggcaaggatg

SEQ ID NO: 1198418 - DNA, 15 bp, Homo sapiens
aatactggcaaggat

SEQ ID NO: 1198419 - DNA, 15 bp, Homo sapiens
aaatactggcaagga

SEQ ID NO: 1198420 - DNA, 15 bp, Homo sapiens
caaatactggcaagg

SEQ ID NO: 1198421 - DNA, 15 bp, Homo sapiens
ccaaatactggcaag

SEQ ID NO: 1198422 - DNA, 15 bp, Homo sapiens
accaaatactggcaa

SEQ ID NO: 1198423 - DNA, 15 bp, Homo sapiens
caccaaatactggca

SEQ ID NO: 1198424 - DNA, 15 bp, Homo sapiens
ccaccaaatactggc

SEQ ID NO: 1198425 - DNA, 15 bp, Homo sapiens
accaccaaatactgg

SEQ ID NO: 1198426 - DNA, 15 bp, Homo sapiens
caccaccaaatactg

SEQ ID NO: 1198427 - DNA, 15 bp, Homo sapiens
acaccaccaaatact

SEQ ID NO: 1198428 - DNA, 15 bp, Homo sapiens
gacaccaccaaatac

SEQ ID NO: 1198429 - DNA, 15 bp, Homo sapiens
tgacaccaccaaata

SEQ ID NO: 1198430 - DNA, 15 bp, Homo sapiens
gtgacaccaccaaat

SEQ ID NO: 1198431 - DNA, 15 bp, Homo sapiens
agtgacaccaccaaa

SEQ ID NO: 1198432 - DNA, 15 bp, Homo sapiens
tagtgacaccaccaa

SEQ ID NO: 1198433 - DNA, 15 bp, Homo sapiens
atagtgacaccacca

SEQ ID NO: 1198434 - DNA, 15 bp, Homo sapiens
aatagtgacaccacc

SEQ ID NO: 1198435 - DNA, 15 bp, Homo sapiens
aaatagtgacaccac

SEQ ID NO: 1198436 - DNA, 15 bp, Homo sapiens
aaaatagtgacacca

SEQ ID NO: 1198437 - DNA, 15 bp, Homo sapiens
aaaaatagtgacacc

SEQ ID NO: 1198438 - DNA, 15 bp, Homo sapiens
aaaaaatagtgacac

SEQ ID NO: 1198439 - DNA, 15 bp, Homo sapiens
taaaaaatagtgaca

SEQ ID NO: 1198440 - DNA, 15 bp, Homo sapiens
ataaaaaatagtgac

SEQ ID NO: 1198441 - DNA, 15 bp, Homo sapiens
aataaaaaatagtga

SEQ ID NO: 1198442 - DNA, 15 bp, Homo sapiens
aaataaaaaatagtg

SEQ ID NO: 1198443 - DNA, 15 bp, Homo sapiens
aaaataaaaaatagt

SEQ ID NO: 1198444 - DNA, 15 bp, Homo sapiens
taaaataaaaaatag

SEQ ID NO: 1198445 - DNA, 15 bp, Homo sapiens
ctaaaataaaaaata

SEQ ID NO: 1198446 - DNA, 15 bp, Homo sapiens
gctaaaataaaaaat

SEQ ID NO: 1198447 - DNA, 15 bp, Homo sapiens
agctaaaataaaaaa

SEQ ID NO: 1198448 - DNA, 15 bp, Homo sapiens
tagctaaaataaaaa

SEQ ID NO: 1198449 - DNA, 15 bp, Homo sapiens
atagctaaaataaaa

SEQ ID NO: 1198450 - DNA, 15 bp, Homo sapiens
gatagctaaaataaa

SEQ ID NO: 1198451 - DNA, 15 bp, Homo sapiens
ggatagctaaaataa

SEQ ID NO: 1198452 - DNA, 15 bp, Homo sapiens
aggatagctaaaata

SEQ ID NO: 1198453 - DNA, 15 bp, Homo sapiens
caggatagctaaaat

SEQ ID NO: 1198454 - DNA, 15 bp, Homo sapiens
acaggatagctaaaa

SEQ ID NO: 1198455 - DNA, 15 bp, Homo sapiens
aacaggatagctaaa

SEQ ID NO: 1198456 - DNA, 15 bp, Homo sapiens
taacaggatagctaa

SEQ ID NO: 1198457 - DNA, 15 bp, Homo sapiens
ttaacaggatagcta

SEQ ID NO: 1198458 - DNA, 15 bp, Homo sapiens
tttaacaggatagct

SEQ ID NO: 1198459 - DNA, 15 bp, Homo sapiens
atttaacaggatagc

SEQ ID NO: 1198460 - DNA, 15 bp, Homo sapiens
catttaacaggatag

SEQ ID NO: 1198461 - DNA, 15 bp, Homo sapiens
acatttaacaggata

SEQ ID NO: 1198462 - DNA, 15 bp, Homo sapiens
tacatttaacaggat

SEQ ID NO: 1198463 - DNA, 15 bp, Homo sapiens
atacatttaacagga

SEQ ID NO: 1198464 - DNA, 15 bp, Homo sapiens
tatacatttaacagg

SEQ ID NO: 1198465 - DNA, 15 bp, Homo sapiens
ctatacatttaacag

SEQ ID NO: 1198466 - DNA, 15 bp, Homo sapiens
actatacatttaaca

SEQ ID NO: 1198467 - DNA, 15 bp, Homo sapiens
cactatacatttaac

SEQ ID NO: 1198468 - DNA, 15 bp, Homo sapiens
tcactatacatttaa

SEQ ID NO: 1198469 - DNA, 15 bp, Homo sapiens
atcactatacattta

SEQ ID NO: 1198470 - DNA, 15 bp, Homo sapiens
tatcactatacattt

SEQ ID NO: 1198471 - DNA, 15 bp, Homo sapiens
atatcactatacatt

SEQ ID NO: 1198472 - DNA, 15 bp, Homo sapiens
aatatcactatacat

SEQ ID NO: 1198473 - DNA, 15 bp, Homo sapiens
aaatatcactataca

SEQ ID NO: 1198474 - DNA, 15 bp, Homo sapiens
gaaatatcactatac

SEQ ID NO: 1198475 - DNA, 15 bp, Homo sapiens
tgaaatatcactata

SEQ ID NO: 1198476 - DNA, 15 bp, Homo sapiens
atgaaatatcactat

SEQ ID NO: 1198477 - DNA, 15 bp, Homo sapiens
aatgaaatatcacta

SEQ ID NO: 1198478 - DNA, 15 bp, Homo sapiens
caatgaaatatcact

SEQ ID NO: 1198479 - DNA, 15 bp, Homo sapiens
acaatgaaatatcac

SEQ ID NO: 1198480 - DNA, 15 bp, Homo sapiens
cacaatgaaatatca

SEQ ID NO: 1198481 - DNA, 15 bp, Homo sapiens
ccacaatgaaatatc

SEQ ID NO: 1198482 - DNA, 15 bp, Homo sapiens
accacaatgaaatat

SEQ ID NO: 1198483 - DNA, 15 bp, Homo sapiens
aaccacaatgaaata

SEQ ID NO: 1198484 - DNA, 15 bp, Homo sapiens
aaaccacaatgaaat

SEQ ID NO: 1198485 - DNA, 15 bp, Homo sapiens
gaaaccacaatgaaa

SEQ ID NO: 1198486 - DNA, 15 bp, Homo sapiens
tgaaaccacaatgaa

SEQ ID NO: 1198487 - DNA, 15 bp, Homo sapiens
ttgaaaccacaatga

SEQ ID NO: 1198488 - DNA, 15 bp, Homo sapiens
attgaaaccacaatg

SEQ ID NO: 1198489 - DNA, 15 bp, Homo sapiens
aattgaaaccacaat

SEQ ID NO: 1198490 - DNA, 15 bp, Homo sapiens
aaattgaaaccacaa

SEQ ID NO: 1198491 - DNA, 15 bp, Homo sapiens
caaattgaaaccaca

SEQ ID NO: 1198492 - DNA, 15 bp, Homo sapiens
gcaaattgaaaccac

SEQ ID NO: 1198493 - DNA, 15 bp, Homo sapiens
tgcaaattgaaacca

SEQ ID NO: 1198494 - DNA, 15 bp, Homo sapiens
atgcaaattgaaacc

SEQ ID NO: 1198495 - DNA, 15 bp, Homo sapiens
aatgcaaattgaaac

SEQ ID NO: 1198496 - DNA, 15 bp, Homo sapiens
aaatgcaaattgaaa

SEQ ID NO: 1198497 - DNA, 15 bp, Homo sapiens
gaaatgcaaattgaa

SEQ ID NO: 1198498 - DNA, 15 bp, Homo sapiens
ggaaatgcaaattga

SEQ ID NO: 1198499 - DNA, 15 bp, Homo sapiens
gggaaatgcaaattg

SEQ ID NO: 1198500 - DNA, 15 bp, Homo sapiens
tagggaaatgcaaat

SEQ ID NO: 1198501 - DNA, 15 bp, Homo sapiens
ttagggaaatgcaaa

SEQ ID NO: 1198502 - DNA, 15 bp, Homo sapiens
gttagggaaatgcaa

SEQ ID NO: 1198503 - DNA, 15 bp, Homo sapiens
tgttagggaaatgca

SEQ ID NO: 1198504 - DNA, 15 bp, Homo sapiens
ttgttagggaaatgc

SEQ ID NO: 1198505 - DNA, 15 bp, Homo sapiens
gttgttagggaaatg

SEQ ID NO: 1198506 - DNA, 15 bp, Homo sapiens
agttgttagggaaat

SEQ ID NO: 1198507 - DNA, 15 bp, Homo sapiens
tagttgttagggaaa

SEQ ID NO: 1198508 - DNA, 15 bp, Homo sapiens
ttagttgttagggaa

SEQ ID NO: 1198509 - DNA, 15 bp, Homo sapiens
attagttgttaggga

SEQ ID NO: 1198510 - DNA, 15 bp, Homo sapiens
cattagttgttaggg

SEQ ID NO: 1198511 - DNA, 15 bp, Homo sapiens
tcattagttgttagg

SEQ ID NO: 1198512 - DNA, 15 bp, Homo sapiens
atcattagttgttag

SEQ ID NO: 1198513 - DNA, 15 bp, Homo sapiens
tatcattagttgtta

SEQ ID NO: 1198514 - DNA, 15 bp, Homo sapiens
atatcattagttgtt

SEQ ID NO: 1198515 - DNA, 15 bp, Homo sapiens
aatatcattagttgt

SEQ ID NO: 1198516 - DNA, 15 bp, Homo sapiens
taatatcattagttg

SEQ ID NO: 1198517 - DNA, 15 bp, Homo sapiens
ttaatatcattagtt

SEQ ID NO: 1198518 - DNA, 15 bp, Homo sapiens
tttaatatcattagt

SEQ ID NO: 1198519 - DNA, 15 bp, Homo sapiens
gtttaatatcattag

SEQ ID NO: 1198520 - DNA, 15 bp, Homo sapiens
tgtttaatatcatta

SEQ ID NO: 1198521 - DNA, 15 bp, Homo sapiens
gtgtttaatatcatt

SEQ ID NO: 1198522 - DNA, 15 bp, Homo sapiens
ggtgtttaatatcat

SEQ ID NO: 1198523 - DNA, 15 bp, Homo sapiens
aggtgtttaatatca

SEQ ID NO: 1198524 - DNA, 15 bp, Homo sapiens
aaggtgtttaatatc

SEQ ID NO: 1198525 - DNA, 15 bp, Homo sapiens
aaaggtgtttaatat

SEQ ID NO: 1198526 - DNA, 15 bp, Homo sapiens
aaaaggtgtttaata

SEQ ID NO: 1198527 - DNA, 15 bp, Homo sapiens
gaaaaggtgtttaat

SEQ ID NO: 1198528 - DNA, 15 bp, Homo sapiens
tgaaaaggtgtttaa

SEQ ID NO: 1198529 - DNA, 15 bp, Homo sapiens
atgaaaaggtgttta

SEQ ID NO: 1198530 - DNA, 15 bp, Homo sapiens
catgaaaaggtgttt

SEQ ID NO: 1198531 - DNA, 15 bp, Homo sapiens
acatgaaaaggtgtt

SEQ ID NO: 1198532 - DNA, 15 bp, Homo sapiens
cacatgaaaaggtgt

SEQ ID NO: 1198533 - DNA, 15 bp, Homo sapiens
gcacatgaaaaggtg

SEQ ID NO: 1198534 - DNA, 15 bp, Homo sapiens
agcacatgaaaaggt

SEQ ID NO: 1198535 - DNA, 15 bp, Homo sapiens
cagcacatgaaaagg

SEQ ID NO: 1198536 - DNA, 15 bp, Homo sapiens
gcagcacatgaaaag

SEQ ID NO: 1198537 - DNA, 15 bp, Homo sapiens
agcagcacatgaaaa

SEQ ID NO: 1198538 - DNA, 15 bp, Homo sapiens
aagcagcacatgaaa

SEQ ID NO: 1198539 - DNA, 15 bp, Homo sapiens
aaagcagcacatgaa

SEQ ID NO: 1198540 - DNA, 15 bp, Homo sapiens
caaagcagcacatga

SEQ ID NO: 1198541 - DNA, 15 bp, Homo sapiens
gcaaagcagcacatg

SEQ ID NO: 1198542 - DNA, 15 bp, Homo sapiens
agcaaagcagcacat

SEQ ID NO: 1198543 - DNA, 15 bp, Homo sapiens
tagcaaagcagcaca

SEQ ID NO: 1198544 - DNA, 15 bp, Homo sapiens
atagcaaagcagcac

SEQ ID NO: 1198545 - DNA, 15 bp, Homo sapiens
catagcaaagcagca

SEQ ID NO: 1198546 - DNA, 15 bp, Homo sapiens
acatagcaaagcagc

SEQ ID NO: 1198547 - DNA, 15 bp, Homo sapiens
aacatagcaaagcag

SEQ ID NO: 1198548 - DNA, 15 bp, Homo sapiens
aaacatagcaaagca

SEQ ID NO: 1198549 - DNA, 15 bp, Homo sapiens
taaacatagcaaagc

SEQ ID NO: 1198550 - DNA, 15 bp, Homo sapiens
ataaacatagcaaag

SEQ ID NO: 1198551 - DNA, 15 bp, Homo sapiens
cataaacatagcaaa

SEQ ID NO: 1198552 - DNA, 15 bp, Homo sapiens
acataaacatagcaa

SEQ ID NO: 1198553 - DNA, 15 bp, Homo sapiens
gacataaacatagca

SEQ ID NO: 1198554 - DNA, 15 bp, Homo sapiens
ggacataaacatagc

SEQ ID NO: 1198555 - DNA, 15 bp, Homo sapiens
aggacataaacatag

SEQ ID NO: 1198556 - DNA, 15 bp, Homo sapiens
gaggacataaacata

SEQ ID NO: 1198557 - DNA, 15 bp, Homo sapiens
agaggacataaacat

SEQ ID NO: 1198558 - DNA, 15 bp, Homo sapiens
gagaggacataaaca

SEQ ID NO: 1198559 - DNA, 15 bp, Homo sapiens
agagaggacataaac

SEQ ID NO: 1198560 - DNA, 15 bp, Homo sapiens
cagagaggacataaa

SEQ ID NO: 1198561 - DNA, 15 bp, Homo sapiens
tcagagaggacataa

SEQ ID NO: 1198562 - DNA, 15 bp, Homo sapiens
ttcagagaggacata

SEQ ID NO: 1198563 - DNA, 15 bp, Homo sapiens
tttcagagaggacat

SEQ ID NO: 1198564 - DNA, 15 bp, Homo sapiens
atttcagagaggaca

SEQ ID NO: 1198565 - DNA, 15 bp, Homo sapiens
catttcagagaggac

SEQ ID NO: 1198566 - DNA, 15 bp, Homo sapiens
tcatttcagagagga

SEQ ID NO: 1198567 - DNA, 15 bp, Homo sapiens
ttcatttcagagagg

SEQ ID NO: 1198568 - DNA, 15 bp, Homo sapiens
tttcatttcagagag

SEQ ID NO: 1198569 - DNA, 15 bp, Homo sapiens
atttcatttcagaga

SEQ ID NO: 1198570 - DNA, 15 bp, Homo sapiens
catttcatttcagag

SEQ ID NO: 1198571 - DNA, 15 bp, Homo sapiens
acatttcatttcaga

SEQ ID NO: 1198572 - DNA, 15 bp, Homo sapiens
gacatttcatttcag

SEQ ID NO: 1198573 - DNA, 15 bp, Homo sapiens
agacatttcatttca

SEQ ID NO: 1198574 - DNA, 15 bp, Homo sapiens
cagacatttcatttc

SEQ ID NO: 1198575 - DNA, 15 bp, Homo sapiens
gcagacatttcattt

SEQ ID NO: 1198576 - DNA, 15 bp, Homo sapiens
agcagacatttcatt

SEQ ID NO: 1198577 - DNA, 15 bp, Homo sapiens
aagcagacatttcat

SEQ ID NO: 1198578 - DNA, 15 bp, Homo sapiens
taagcagacatttca

SEQ ID NO: 1198579 - DNA, 15 bp, Homo sapiens
ataagcagacatttc

SEQ ID NO: 1198580 - DNA, 15 bp, Homo sapiens
cataagcagacattt

SEQ ID NO: 1198581 - DNA, 15 bp, Homo sapiens
acataagcagacatt

SEQ ID NO: 1198582 - DNA, 15 bp, Homo sapiens
gacataagcagacat

SEQ ID NO: 1198583 - DNA, 15 bp, Homo sapiens
agacataagcagaca

SEQ ID NO: 1198584 - DNA, 15 bp, Homo sapiens
aagacataagcagac

SEQ ID NO: 1198585 - DNA, 15 bp, Homo sapiens
aaagacataagcaga

SEQ ID NO: 1198586 - DNA, 15 bp, Homo sapiens
aaaagacataagcag

SEQ ID NO: 1198587 - DNA, 15 bp, Homo sapiens
caaaagacataagca

SEQ ID NO: 1198588 - DNA, 15 bp, Homo sapiens
gcaaaagacataagc

SEQ ID NO: 1198589 - DNA, 15 bp, Homo sapiens
ggcaaaagacataag

SEQ ID NO: 1198590 - DNA, 15 bp, Homo sapiens
gggcaaaagacataa

SEQ ID NO: 1198591 - DNA, 15 bp, Homo sapiens
tgggcaaaagacata

SEQ ID NO: 1198592 - DNA, 15 bp, Homo sapiens
gtgggcaaaagacat

SEQ ID NO: 1198593 - DNA, 15 bp, Homo sapiens
agtgggcaaaagaca

SEQ ID NO: 1198594 - DNA, 15 bp, Homo sapiens
aagtgggcaaaagac

SEQ ID NO: 1198595 - DNA, 15 bp, Homo sapiens
aaagtgggcaaaaga

SEQ ID NO: 1198596 - DNA, 15 bp, Homo sapiens
gaaagtgggcaaaag

SEQ ID NO: 1198597 - DNA, 15 bp, Homo sapiens
agaaagtgggcaaaa

SEQ ID NO: 1198598 - DNA, 15 bp, Homo sapiens
tagaaagtgggcaaa

SEQ ID NO: 1198599 - DNA, 15 bp, Homo sapiens
ttagaaagtgggcaa

SEQ ID NO: 1198600 - DNA, 15 bp, Homo sapiens
attagaaagtgggca

SEQ ID NO: 1198601 - DNA, 15 bp, Homo sapiens
aattagaaagtgggc

SEQ ID NO: 1198602 - DNA, 15 bp, Homo sapiens
caattagaaagtggg

SEQ ID NO: 1198603 - DNA, 15 bp, Homo sapiens
ccaattagaaagtgg

SEQ ID NO: 1198604 - DNA, 15 bp, Homo sapiens
tccaattagaaagtg

SEQ ID NO: 1198605 - DNA, 15 bp, Homo sapiens
atccaattagaaagt

SEQ ID NO: 1198606 - DNA, 15 bp, Homo sapiens
aatccaattagaaag

SEQ ID NO: 1198607 - DNA, 15 bp, Homo sapiens
taatccaattagaaa

SEQ ID NO: 1198608 - DNA, 15 bp, Homo sapiens
ataatccaattagaa

SEQ ID NO: 1198609 - DNA, 15 bp, Homo sapiens
aataatccaattaga

SEQ ID NO: 1198610 - DNA, 15 bp, Homo sapiens
aaataatccaattag

SEQ ID NO: 1198611 - DNA, 15 bp, Homo sapiens
taaataatccaatta

SEQ ID NO: 1198612 - DNA, 15 bp, Homo sapiens
ataaataatccaatt

SEQ ID NO: 1198613 - DNA, 15 bp, Homo sapiens
aataaataatccaat

SEQ ID NO: 1198614 - DNA, 15 bp, Homo sapiens
aaataaataatccaa

SEQ ID NO: 1198615 - DNA, 15 bp, Homo sapiens
aaaataaataatcca

SEQ ID NO: 1198616 - DNA, 15 bp, Homo sapiens
aaaaataaataatcc

SEQ ID NO: 1198617 - DNA, 15 bp, Homo sapiens
gaaaaataaataatc

SEQ ID NO: 1198618 - DNA, 15 bp, Homo sapiens
agaaaaataaataat

SEQ ID NO: 1198619 - DNA, 15 bp, Homo sapiens
cagaaaaataaataa

SEQ ID NO: 1198620 - DNA, 15 bp, Homo sapiens
acagaaaaataaata

SEQ ID NO: 1198621 - DNA, 15 bp, Homo sapiens
aacagaaaaataaat

SEQ ID NO: 1198622 - DNA, 15 bp, Homo sapiens
caacagaaaaataaa

SEQ ID NO: 1198623 - DNA, 15 bp, Homo sapiens
tcaacagaaaaataa

SEQ ID NO: 1198624 - DNA, 15 bp, Homo sapiens
ctcaacagaaaaata

SEQ ID NO: 1198625 - DNA, 15 bp, Homo sapiens
actcaacagaaaaat

SEQ ID NO: 1198626 - DNA, 15 bp, Homo sapiens
aactcaacagaaaaa

SEQ ID NO: 1198627 - DNA, 15 bp, Homo sapiens
aaactcaacagaaaa

SEQ ID NO: 1198628 - DNA, 15 bp, Homo sapiens
taaactcaacagaaa

SEQ ID NO: 1198629 - DNA, 15 bp, Homo sapiens
ataaactcaacagaa

SEQ ID NO: 1198630 - DNA, 15 bp, Homo sapiens
tataaactcaacaga

SEQ ID NO: 1198631 - DNA, 15 bp, Homo sapiens
atataaactcaacag

SEQ ID NO: 1198632 - DNA, 15 bp, Homo sapiens
tatataaactcaaca

SEQ ID NO: 1198633 - DNA, 15 bp, Homo sapiens
atatataaactcaac

SEQ ID NO: 1198634 - DNA, 15 bp, Homo sapiens
aatatataaactcaa

SEQ ID NO: 1198635 - DNA, 15 bp, Homo sapiens
gaatatataaactca

SEQ ID NO: 1198636 - DNA, 15 bp, Homo sapiens
agaatatataaactc

SEQ ID NO: 1198637 - DNA, 15 bp, Homo sapiens
tagaatatataaact

SEQ ID NO: 1198638 - DNA, 15 bp, Homo sapiens
ttagaatatataaac

SEQ ID NO: 1198639 - DNA, 15 bp, Homo sapiens
tttagaatatataaa

SEQ ID NO: 1198640 - DNA, 15 bp, Homo sapiens
gtttagaatatataa

SEQ ID NO: 1198641 - DNA, 15 bp, Homo sapiens
tgtttagaatatata

SEQ ID NO: 1198642 - DNA, 15 bp, Homo sapiens
gtgtttagaatatat

SEQ ID NO: 1198643 - DNA, 15 bp, Homo sapiens
agtgtttagaatata

SEQ ID NO: 1198644 - DNA, 15 bp, Homo sapiens
tagtgtttagaatat

SEQ ID NO: 1198645 - DNA, 15 bp, Homo sapiens
ctagtgtttagaata

SEQ ID NO: 1198646 - DNA, 15 bp, Homo sapiens
actagtgtttagaat

SEQ ID NO: 1198647 - DNA, 15 bp, Homo sapiens
gactagtgtttagaa

SEQ ID NO: 1198648 - DNA, 15 bp, Homo sapiens
ggactagtgtttaga

SEQ ID NO: 1198649 - DNA, 15 bp, Homo sapiens
aggactagtgtttag

SEQ ID NO: 1198650 - DNA, 15 bp, Homo sapiens
aaggactagtgttta

SEQ ID NO: 1198651 - DNA, 15 bp, Homo sapiens
aaaggactagtgttt

SEQ ID NO: 1198652 - DNA, 15 bp, Homo sapiens
caaaggactagtgtt

SEQ ID NO: 1198653 - DNA, 15 bp, Homo sapiens
acaaaggactagtgt

SEQ ID NO: 1198654 - DNA, 15 bp, Homo sapiens
gacaaaggactagtg

SEQ ID NO: 1198655 - DNA, 15 bp, Homo sapiens
tgacaaaggactagt

SEQ ID NO: 1198656 - DNA, 15 bp, Homo sapiens
atgacaaaggactag

SEQ ID NO: 1198657 - DNA, 15 bp, Homo sapiens
tatgacaaaggacta

SEQ ID NO: 1198658 - DNA, 15 bp, Homo sapiens
atatgacaaaggact

SEQ ID NO: 1198659 - DNA, 15 bp, Homo sapiens
tatatgacaaaggac

SEQ ID NO: 1198660 - DNA, 15 bp, Homo sapiens
atatatgacaaagga

SEQ ID NO: 1198661 - DNA, 15 bp, Homo sapiens
catatatgacaaagg

SEQ ID NO: 1198662 - DNA, 15 bp, Homo sapiens
acatatatgacaaag

SEQ ID NO: 1198663 - DNA, 15 bp, Homo sapiens
cacatatatgacaaa

SEQ ID NO: 1198664 - DNA, 15 bp, Homo sapiens
ccacatatatgacaa

SEQ ID NO: 1198665 - DNA, 15 bp, Homo sapiens
accacatatatgaca

SEQ ID NO: 1198666 - DNA, 15 bp, Homo sapiens
aaccacatatatgac

SEQ ID NO: 1198667 - DNA, 15 bp, Homo sapiens
aaaccacatatatga

SEQ ID NO: 1198668 - DNA, 15 bp, Homo sapiens
caaaccacatatatg

SEQ ID NO: 1198669 - DNA, 15 bp, Homo sapiens
tcaaaccacatatat

SEQ ID NO: 1198670 - DNA, 15 bp, Homo sapiens
ttcaaaccacatata

SEQ ID NO: 1198671 - DNA, 15 bp, Homo sapiens
tttcaaaccacatat

SEQ ID NO: 1198672 - DNA, 15 bp, Homo sapiens
atttcaaaccacata

SEQ ID NO: 1198673 - DNA, 15 bp, Homo sapiens
aatttcaaaccacat

SEQ ID NO: 1198674 - DNA, 15 bp, Homo sapiens
gaatttcaaaccaca

SEQ ID NO: 1198675 - DNA, 15 bp, Homo sapiens
agaatttcaaaccac

SEQ ID NO: 1198676 - DNA, 15 bp, Homo sapiens
aagaatttcaaacca

SEQ ID NO: 1198677 - DNA, 15 bp, Homo sapiens
aaagaatttcaaacc

SEQ ID NO: 1198678 - DNA, 15 bp, Homo sapiens
aaaagaatttcaaac

SEQ ID NO: 1198679 - DNA, 15 bp, Homo sapiens
gaaaagaatttcaaa

SEQ ID NO: 1198680 - DNA, 15 bp, Homo sapiens
agaaaagaatttcaa

SEQ ID NO: 1198681 - DNA, 15 bp, Homo sapiens
aggcccttaccttcc

SEQ ID NO: 1198682 - DNA, 15 bp, Homo sapiens
aaggcccttaccttc

SEQ ID NO: 1198683 - DNA, 15 bp, Homo sapiens
caaggcccttacctt

SEQ ID NO: 1198684 - DNA, 15 bp, Homo sapiens
tcaaggcccttacct

SEQ ID NO: 1198685 - DNA, 15 bp, Homo sapiens
ctcaaggcccttacc

SEQ ID NO: 1198686 - DNA, 15 bp, Homo sapiens
tctcaaggcccttac

SEQ ID NO: 1198687 - DNA, 15 bp, Homo sapiens
atctcaaggccctta

SEQ ID NO: 1198688 - DNA, 15 bp, Homo sapiens
tatctcaaggccctt

SEQ ID NO: 1198689 - DNA, 15 bp, Homo sapiens
atatctcaaggccct

SEQ ID NO: 1198690 - DNA, 15 bp, Homo sapiens
tatatctcaaggccc

SEQ ID NO: 1198691 - DNA, 15 bp, Homo sapiens
ttatatctcaaggcc

SEQ ID NO: 1198692 - DNA, 15 bp, Homo sapiens
tttatatctcaaggc

SEQ ID NO: 1198693 - DNA, 15 bp, Homo sapiens
gtttatatctcaagg

SEQ ID NO: 1198694 - DNA, 15 bp, Homo sapiens
agtttatatctcaag

SEQ ID NO: 1198695 - DNA, 15 bp, Homo sapiens
gagtttatatctcaa

SEQ ID NO: 1198696 - DNA, 15 bp, Homo sapiens
agagtttatatctca

SEQ ID NO: 1198697 - DNA, 15 bp, Homo sapiens
aagagtttatatctc

SEQ ID NO: 1198698 - DNA, 15 bp, Homo sapiens
taagagtttatatct

SEQ ID NO: 1198699 - DNA, 15 bp, Homo sapiens
ttaagagtttatatc

SEQ ID NO: 1198700 - DNA, 15 bp, Homo sapiens
tttaagagtttatat

SEQ ID NO: 1198701 - DNA, 15 bp, Homo sapiens
gtttaagagtttata

SEQ ID NO: 1198702 - DNA, 15 bp, Homo sapiens
agtttaagagtttat

SEQ ID NO: 1198703 - DNA, 15 bp, Homo sapiens
aagtttaagagttta

SEQ ID NO: 1198704 - DNA, 15 bp, Homo sapiens
gaagtttaagagttt

SEQ ID NO: 1198705 - DNA, 15 bp, Homo sapiens
ggaagtttaagagtt

SEQ ID NO: 1198706 - DNA, 15 bp, Homo sapiens
aggaagtttaagagt

SEQ ID NO: 1198707 - DNA, 15 bp, Homo sapiens
aaggaagtttaagag

SEQ ID NO: 1198708 - DNA, 15 bp, Homo sapiens
aaaggaagtttaaga

SEQ ID NO: 1198709 - DNA, 15 bp, Homo sapiens
aaaaggaagtttaag

SEQ ID NO: 1198710 - DNA, 15 bp, Homo sapiens
caaaaggaagtttaa

SEQ ID NO: 1198711 - DNA, 15 bp, Homo sapiens
tcaaaaggaagttta

SEQ ID NO: 1198712 - DNA, 15 bp, Homo sapiens
atcaaaaggaagttt

SEQ ID NO: 1198713 - DNA, 15 bp, Homo sapiens
aatcaaaaggaagtt

SEQ ID NO: 1198714 - DNA, 15 bp, Homo sapiens
gaatcaaaaggaagt

SEQ ID NO: 1198715 - DNA, 15 bp, Homo sapiens
tgaatcaaaaggaag

SEQ ID NO: 1198716 - DNA, 15 bp, Homo sapiens
ctgaatcaaaaggaa

SEQ ID NO: 1198717 - DNA, 15 bp, Homo sapiens
tctgaatcaaaagga

SEQ ID NO: 1198718 - DNA, 15 bp, Homo sapiens
ttctgaatcaaaagg

SEQ ID NO: 1198719 - DNA, 15 bp, Homo sapiens
cttctgaatcaaaag

SEQ ID NO: 1198720 - DNA, 15 bp, Homo sapiens
gcttctgaatcaaaa

SEQ ID NO: 1198721 - DNA, 15 bp, Homo sapiens
ggcttctgaatcaaa

SEQ ID NO: 1198722 - DNA, 15 bp, Homo sapiens
aggcttctgaatcaa

SEQ ID NO: 1198723 - DNA, 15 bp, Homo sapiens
taggcttctgaatca

SEQ ID NO: 1198724 - DNA, 15 bp, Homo sapiens
ataggcttctgaatc

SEQ ID NO: 1198725 - DNA, 15 bp, Homo sapiens
tataggcttctgaat

SEQ ID NO: 1198726 - DNA, 15 bp, Homo sapiens
ctataggcttctgaa

SEQ ID NO: 1198727 - DNA, 15 bp, Homo sapiens
tctataggcttctga

SEQ ID NO: 1198728 - DNA, 15 bp, Homo sapiens
ctctataggcttctg

SEQ ID NO: 1198729 - DNA, 15 bp, Homo sapiens
actctataggcttct

SEQ ID NO: 1198730 - DNA, 15 bp, Homo sapiens
gactctataggcttc

SEQ ID NO: 1198731 - DNA, 15 bp, Homo sapiens
agactctataggctt

SEQ ID NO: 1198732 - DNA, 15 bp, Homo sapiens
tagactctataggct

SEQ ID NO: 1198733 - DNA, 15 bp, Homo sapiens
atagactctataggc

SEQ ID NO: 1198734 - DNA, 15 bp, Homo sapiens
catagactctatagg

SEQ ID NO: 1198735 - DNA, 15 bp, Homo sapiens
tcatagactctatag

SEQ ID NO: 1198736 - DNA, 15 bp, Homo sapiens
ctcatagactctata

SEQ ID NO: 1198737 - DNA, 15 bp, Homo sapiens
actcatagactctat

SEQ ID NO: 1198738 - DNA, 15 bp, Homo sapiens
aactcatagactcta

SEQ ID NO: 1198739 - DNA, 15 bp, Homo sapiens
aaactcatagactct

SEQ ID NO: 1198740 - DNA, 15 bp, Homo sapiens
taaactcatagactc

SEQ ID NO: 1198741 - DNA, 15 bp, Homo sapiens
ctaaactcatagact

SEQ ID NO: 1198742 - DNA, 15 bp, Homo sapiens
cctaaactcatagac

SEQ ID NO: 1198743 - DNA, 15 bp, Homo sapiens
tcctaaactcataga

SEQ ID NO: 1198744 - DNA, 15 bp, Homo sapiens
ttcctaaactcatag

SEQ ID NO: 1198745 - DNA, 15 bp, Homo sapiens
tttcctaaactcata

SEQ ID NO: 1198746 - DNA, 15 bp, Homo sapiens
atttcctaaactcat

SEQ ID NO: 1198747 - DNA, 15 bp, Homo sapiens
tatttcctaaactca

SEQ ID NO: 1198748 - DNA, 15 bp, Homo sapiens
gtatttcctaaactc

SEQ ID NO: 1198749 - DNA, 15 bp, Homo sapiens
tgtatttcctaaact

SEQ ID NO: 1198750 - DNA, 15 bp, Homo sapiens
atgtatttcctaaac

SEQ ID NO: 1198751 - DNA, 15 bp, Homo sapiens
aatgtatttcctaaa

SEQ ID NO: 1198752 - DNA, 15 bp, Homo sapiens
gaatgtatttcctaa

SEQ ID NO: 1198753 - DNA, 15 bp, Homo sapiens
ggaatgtatttccta

SEQ ID NO: 1198754 - DNA, 15 bp, Homo sapiens
tggaatgtatttcct

SEQ ID NO: 1198755 - DNA, 15 bp, Homo sapiens
atggaatgtatttcc

SEQ ID NO: 1198756 - DNA, 15 bp, Homo sapiens
aatggaatgtatttc

SEQ ID NO: 1198757 - DNA, 15 bp, Homo sapiens
taatggaatgtattt

SEQ ID NO: 1198758 - DNA, 15 bp, Homo sapiens
ctaatggaatgtatt

SEQ ID NO: 1198759 - DNA, 15 bp, Homo sapiens
tctaatggaatgtat

SEQ ID NO: 1198760 - DNA, 15 bp, Homo sapiens
atctaatggaatgta

SEQ ID NO: 1198761 - DNA, 15 bp, Homo sapiens
catctaatggaatgt

SEQ ID NO: 1198762 - DNA, 15 bp, Homo sapiens
tcatctaatggaatg

SEQ ID NO: 1198763 - DNA, 15 bp, Homo sapiens
ctcatctaatggaat

SEQ ID NO: 1198764 - DNA, 15 bp, Homo sapiens
cctcatctaatggaa

SEQ ID NO: 1198765 - DNA, 15 bp, Homo sapiens
gcctcatctaatgga

SEQ ID NO: 1198766 - DNA, 15 bp, Homo sapiens
tgcctcatctaatgg

SEQ ID NO: 1198767 - DNA, 15 bp, Homo sapiens
atgcctcatctaatg

SEQ ID NO: 1198768 - DNA, 15 bp, Homo sapiens
catgcctcatctaat

SEQ ID NO: 1198769 - DNA, 15 bp, Homo sapiens
gcatgcctcatctaa

SEQ ID NO: 1198770 - DNA, 15 bp, Homo sapiens
agcatgcctcatcta

SEQ ID NO: 1198771 - DNA, 15 bp, Homo sapiens
tagcatgcctcatct

SEQ ID NO: 1198772 - DNA, 15 bp, Homo sapiens
atagcatgcctcatc

SEQ ID NO: 1198773 - DNA, 15 bp, Homo sapiens
aatagcatgcctcat

SEQ ID NO: 1198774 - DNA, 15 bp, Homo sapiens
aaatagcatgcctca

SEQ ID NO: 1198775 - DNA, 15 bp, Homo sapiens
gaaatagcatgcctc

SEQ ID NO: 1198776 - DNA, 15 bp, Homo sapiens
tgaaatagcatgcct

SEQ ID NO: 1198777 - DNA, 15 bp, Homo sapiens
atgaaatagcatgcc

SEQ ID NO: 1198778 - DNA, 15 bp, Homo sapiens
tatgaaatagcatgc

SEQ ID NO: 1198779 - DNA, 15 bp, Homo sapiens
ttatgaaatagcatg

SEQ ID NO: 1198780 - DNA, 15 bp, Homo sapiens
gttatgaaatagcat

SEQ ID NO: 1198781 - DNA, 15 bp, Homo sapiens
tgttatgaaatagca

SEQ ID NO: 1198782 - DNA, 15 bp, Homo sapiens
ttgttatgaaatagc

SEQ ID NO: 1198783 - DNA, 15 bp, Homo sapiens
tttgttatgaaatag

SEQ ID NO: 1198784 - DNA, 15 bp, Homo sapiens
ttttgttatgaaata

SEQ ID NO: 1198785 - DNA, 15 bp, Homo sapiens
tttttgttatgaaat

SEQ ID NO: 1198786 - DNA, 15 bp, Homo sapiens
ttttttgttatgaaa

SEQ ID NO: 1198787 - DNA, 15 bp, Homo sapiens
attttttgttatgaa

SEQ ID NO: 1198788 - DNA, 15 bp, Homo sapiens
gattttttgttatga

SEQ ID NO: 1198789 - DNA, 15 bp, Homo sapiens
tgattttttgttatg

SEQ ID NO: 1198790 - DNA, 15 bp, Homo sapiens
ttgattttttgttat

SEQ ID NO: 1198791 - DNA, 15 bp, Homo sapiens
atttgattttttgtt

SEQ ID NO: 1198792 - DNA, 15 bp, Homo sapiens
gatttgattttttgt

SEQ ID NO: 1198793 - DNA, 15 bp, Homo sapiens
tgatttgattttttg

SEQ ID NO: 1198794 - DNA, 15 bp, Homo sapiens
atgatttgatttttt

SEQ ID NO: 1198795 - DNA, 15 bp, Homo sapiens
tatgatttgattttt

SEQ ID NO: 1198796 - DNA, 15 bp, Homo sapiens
gtatgatttgatttt

SEQ ID NO: 1198797 - DNA, 15 bp, Homo sapiens
ggtatgatttgattt

SEQ ID NO: 1198798 - DNA, 15 bp, Homo sapiens
aggtatgatttgatt

SEQ ID NO: 1198799 - DNA, 15 bp, Homo sapiens
taggtatgatttgat

SEQ ID NO: 1198800 - DNA, 15 bp, Homo sapiens
ttaggtatgatttga

SEQ ID NO: 1198801 - DNA, 15 bp, Homo sapiens
attaggtatgatttg

SEQ ID NO: 1198802 - DNA, 15 bp, Homo sapiens
aattaggtatgattt

SEQ ID NO: 1198803 - DNA, 15 bp, Homo sapiens
caattaggtatgatt

SEQ ID NO: 1198804 - DNA, 15 bp, Homo sapiens
acaattaggtatgat

SEQ ID NO: 1198805 - DNA, 15 bp, Homo sapiens
aacaattaggtatga

SEQ ID NO: 1198806 - DNA, 15 bp, Homo sapiens
taacaattaggtatg

SEQ ID NO: 1198807 - DNA, 15 bp, Homo sapiens
gtaacaattaggtat

SEQ ID NO: 1198808 - DNA, 15 bp, Homo sapiens
tgtaacaattaggta

SEQ ID NO: 1198809 - DNA, 15 bp, Homo sapiens
ttgtaacaattaggt

SEQ ID NO: 1198810 - DNA, 15 bp, Homo sapiens
gttgtaacaattagg

SEQ ID NO: 1198811 - DNA, 15 bp, Homo sapiens
agttgtaacaattag

SEQ ID NO: 1198812 - DNA, 15 bp, Homo sapiens
cagttgtaacaatta

SEQ ID NO: 1198813 - DNA, 15 bp, Homo sapiens
acagttgtaacaatt

SEQ ID NO: 1198814 - DNA, 15 bp, Homo sapiens
cacagttgtaacaat

SEQ ID NO: 1198815 - DNA, 15 bp, Homo sapiens
acacagttgtaacaa

SEQ ID NO: 1198816 - DNA, 15 bp, Homo sapiens
aacacagttgtaaca

SEQ ID NO: 1198817 - DNA, 15 bp, Homo sapiens
gaacacagttgtaac

SEQ ID NO: 1198818 - DNA, 15 bp, Homo sapiens
agaacacagttgtaa

SEQ ID NO: 1198819 - DNA, 15 bp, Homo sapiens
aagaacacagttgta

SEQ ID NO: 1198820 - DNA, 15 bp, Homo sapiens
aaagaacacagttgt

SEQ ID NO: 1198821 - DNA, 15 bp, Homo sapiens
aaaagaacacagttg

SEQ ID NO: 1198822 - DNA, 15 bp, Homo sapiens
aaaaagaacacagtt

SEQ ID NO: 1198823 - DNA, 15 bp, Homo sapiens
caaaaagaacacagt

SEQ ID NO: 1198824 - DNA, 15 bp, Homo sapiens
ccaaaaagaacacag

SEQ ID NO: 1198825 - DNA, 15 bp, Homo sapiens
accaaaaagaacaca

SEQ ID NO: 1198826 - DNA, 15 bp, Homo sapiens
aaccaaaaagaacac

SEQ ID NO: 1198827 - DNA, 15 bp, Homo sapiens
aaaccaaaaagaaca

SEQ ID NO: 1198828 - DNA, 15 bp, Homo sapiens
taaaccaaaaagaac

SEQ ID NO: 1198829 - DNA, 15 bp, Homo sapiens
gtaaaccaaaaagaa

SEQ ID NO: 1198830 - DNA, 15 bp, Homo sapiens
agtaaaccaaaaaga

SEQ ID NO: 1198831 - DNA, 15 bp, Homo sapiens
gagtaaaccaaaaag

SEQ ID NO: 1198832 - DNA, 15 bp, Homo sapiens
agagtaaaccaaaaa

SEQ ID NO: 1198833 - DNA, 15 bp, Homo sapiens
tagagtaaaccaaaa

SEQ ID NO: 1198834 - DNA, 15 bp, Homo sapiens
gtagagtaaaccaaa

SEQ ID NO: 1198835 - DNA, 15 bp, Homo sapiens
ggtagagtaaaccaa

SEQ ID NO: 1198836 - DNA, 15 bp, Homo sapiens
tggtagagtaaacca

SEQ ID NO: 1198837 - DNA, 15 bp, Homo sapiens
gtggtagagtaaacc

SEQ ID NO: 1198838 - DNA, 15 bp, Homo sapiens
agtggtagagtaaac

SEQ ID NO: 1198839 - DNA, 15 bp, Homo sapiens
aagtggtagagtaaa

SEQ ID NO: 1198840 - DNA, 15 bp, Homo sapiens
gaagtggtagagtaa

SEQ ID NO: 1198841 - DNA, 15 bp, Homo sapiens
tgaagtggtagagta

SEQ ID NO: 1198842 - DNA, 15 bp, Homo sapiens
ctgaagtggtagagt

SEQ ID NO: 1198843 - DNA, 15 bp, Homo sapiens
actgaagtggtagag

SEQ ID NO: 1198844 - DNA, 15 bp, Homo sapiens
gactgaagtggtaga

SEQ ID NO: 1198845 - DNA, 15 bp, Homo sapiens
agactgaagtggtag

SEQ ID NO: 1198846 - DNA, 15 bp, Homo sapiens
gagactgaagtggta

SEQ ID NO: 1198847 - DNA, 15 bp, Homo sapiens
agagactgaagtggt

SEQ ID NO: 1198848 - DNA, 15 bp, Homo sapiens
gagagactgaagtgg

SEQ ID NO: 1198849 - DNA, 15 bp, Homo sapiens
tgagagactgaagtg

SEQ ID NO: 1198850 - DNA, 15 bp, Homo sapiens
atgagagactgaagt

SEQ ID NO: 1198851 - DNA, 15 bp, Homo sapiens
tatgagagactgaag

SEQ ID NO: 1198852 - DNA, 15 bp, Homo sapiens
atatgagagactgaa

SEQ ID NO: 1198853 - DNA, 15 bp, Homo sapiens
tatatgagagactga

SEQ ID NO: 1198854 - DNA, 15 bp, Homo sapiens
gtatatgagagactg

SEQ ID NO: 1198855 - DNA, 15 bp, Homo sapiens
agtatatgagagact

SEQ ID NO: 1198856 - DNA, 15 bp, Homo sapiens
aagtatatgagagac

SEQ ID NO: 1198857 - DNA, 15 bp, Homo sapiens
caagtatatgagaga

SEQ ID NO: 1198858 - DNA, 15 bp, Homo sapiens
gcaagtatatgagag

SEQ ID NO: 1198859 - DNA, 15 bp, Homo sapiens
agcaagtatatgaga

SEQ ID NO: 1198860 - DNA, 15 bp, Homo sapiens
tagcaagtatatgag

SEQ ID NO: 1198861 - DNA, 15 bp, Homo sapiens
ttagcaagtatatga

SEQ ID NO: 1198862 - DNA, 15 bp, Homo sapiens
attagcaagtatatg

SEQ ID NO: 1198863 - DNA, 15 bp, Homo sapiens
aattagcaagtatat

SEQ ID NO: 1198864 - DNA, 15 bp, Homo sapiens
caattagcaagtata

SEQ ID NO: 1198865 - DNA, 15 bp, Homo sapiens
gcaattagcaagtat

SEQ ID NO: 1198866 - DNA, 15 bp, Homo sapiens
ggcaattagcaagta

SEQ ID NO: 1198867 - DNA, 15 bp, Homo sapiens
aggcaattagcaagt

SEQ ID NO: 1198868 - DNA, 15 bp, Homo sapiens
caggcaattagcaag

SEQ ID NO: 1198869 - DNA, 15 bp, Homo sapiens
acaggcaattagcaa

SEQ ID NO: 1198870 - DNA, 15 bp, Homo sapiens
tacaggcaattagca

SEQ ID NO: 1198871 - DNA, 15 bp, Homo sapiens
ttacaggcaattagc

SEQ ID NO: 1198872 - DNA, 15 bp, Homo sapiens
attacaggcaattag

SEQ ID NO: 1198873 - DNA, 15 bp, Homo sapiens
tattacaggcaatta

SEQ ID NO: 1198874 - DNA, 15 bp, Homo sapiens
atattacaggcaatt

SEQ ID NO: 1198875 - DNA, 15 bp, Homo sapiens
catattacaggcaat

SEQ ID NO: 1198876 - DNA, 15 bp, Homo sapiens
acatattacaggcaa

SEQ ID NO: 1198877 - DNA, 15 bp, Homo sapiens
tacatattacaggca

SEQ ID NO: 1198878 - DNA, 15 bp, Homo sapiens
ctacatattacaggc

SEQ ID NO: 1198879 - DNA, 15 bp, Homo sapiens
gctacatattacagg

SEQ ID NO: 1198880 - DNA, 15 bp, Homo sapiens
agctacatattacag

SEQ ID NO: 1198881 - DNA, 15 bp, Homo sapiens
aagctacatattaca

SEQ ID NO: 1198882 - DNA, 15 bp, Homo sapiens
aaagctacatattac

SEQ ID NO: 1198883 - DNA, 15 bp, Homo sapiens
caaagctacatatta

SEQ ID NO: 1198884 - DNA, 15 bp, Homo sapiens
tcaaagctacatatt

SEQ ID NO: 1198885 - DNA, 15 bp, Homo sapiens
ttcaaagctacatat

SEQ ID NO: 1198886 - DNA, 15 bp, Homo sapiens
attcaaagctacata

SEQ ID NO: 1198887 - DNA, 15 bp, Homo sapiens
aattcaaagctacat

SEQ ID NO: 1198888 - DNA, 15 bp, Homo sapiens
aaattcaaagctaca

SEQ ID NO: 1198889 - DNA, 15 bp, Homo sapiens
gaaattcaaagctac

SEQ ID NO: 1198890 - DNA, 15 bp, Homo sapiens
ggaaattcaaagcta

SEQ ID NO: 1198891 - DNA, 15 bp, Homo sapiens
aggaaattcaaagct

SEQ ID NO: 1198892 - DNA, 15 bp, Homo sapiens
gaggaaattcaaagc

SEQ ID NO: 1198893 - DNA, 15 bp, Homo sapiens
tgaggaaattcaaag

SEQ ID NO: 1198894 - DNA, 15 bp, Homo sapiens
gtgaggaaattcaaa

SEQ ID NO: 1198895 - DNA, 15 bp, Homo sapiens
agtgaggaaattcaa

SEQ ID NO: 1198896 - DNA, 15 bp, Homo sapiens
tagtgaggaaattca

SEQ ID NO: 1198897 - DNA, 15 bp, Homo sapiens
gtagtgaggaaattc

SEQ ID NO: 1198898 - DNA, 15 bp, Homo sapiens
agtagtgaggaaatt

SEQ ID NO: 1198899 - DNA, 15 bp, Homo sapiens
gagtagtgaggaaat

SEQ ID NO: 1198900 - DNA, 15 bp, Homo sapiens
agagtagtgaggaaa

SEQ ID NO: 1198901 - DNA, 15 bp, Homo sapiens
tagagtagtgaggaa

SEQ ID NO: 1198902 - DNA, 15 bp, Homo sapiens
atagagtagtgagga

SEQ ID NO: 1198903 - DNA, 15 bp, Homo sapiens
catagagtagtgagg

SEQ ID NO: 1198904 - DNA, 15 bp, Homo sapiens
gcatagagtagtgag

SEQ ID NO: 1198905 - DNA, 15 bp, Homo sapiens
agcatagagtagtga

SEQ ID NO: 1198906 - DNA, 15 bp, Homo sapiens
gagcatagagtagtg

SEQ ID NO: 1198907 - DNA, 15 bp, Homo sapiens
ggagcatagagtagt

SEQ ID NO: 1198908 - DNA, 15 bp, Homo sapiens
aggagcatagagtag

SEQ ID NO: 1198909 - DNA, 15 bp, Homo sapiens
taggagcatagagta

SEQ ID NO: 1198910 - DNA, 15 bp, Homo sapiens
ctaggagcatagagt

SEQ ID NO: 1198911 - DNA, 15 bp, Homo sapiens
gctaggagcatagag

SEQ ID NO: 1198912 - DNA, 15 bp, Homo sapiens
agctaggagcataga

SEQ ID NO: 1198913 - DNA, 15 bp, Homo sapiens
aagctaggagcatag

SEQ ID NO: 1198914 - DNA, 15 bp, Homo sapiens
gaagctaggagcata

SEQ ID NO: 1198915 - DNA, 15 bp, Homo sapiens
agaagctaggagcat

SEQ ID NO: 1198916 - DNA, 15 bp, Homo sapiens
aagaagctaggagca

SEQ ID NO: 1198917 - DNA, 15 bp, Homo sapiens
aaagaagctaggagc

SEQ ID NO: 1198918 - DNA, 15 bp, Homo sapiens
taaagaagctaggag

SEQ ID NO: 1198919 - DNA, 15 bp, Homo sapiens
ttaaagaagctagga

SEQ ID NO: 1198920 - DNA, 15 bp, Homo sapiens
tttaaagaagctagg

SEQ ID NO: 1198921 - DNA, 15 bp, Homo sapiens
ctttaaagaagctag

SEQ ID NO: 1198922 - DNA, 15 bp, Homo sapiens
gctttaaagaagcta

SEQ ID NO: 1198923 - DNA, 15 bp, Homo sapiens
ggctttaaagaagct

SEQ ID NO: 1198924 - DNA, 15 bp, Homo sapiens
tggctttaaagaagc

SEQ ID NO: 1198925 - DNA, 15 bp, Homo sapiens
ttggctttaaagaag

SEQ ID NO: 1198926 - DNA, 15 bp, Homo sapiens
cttggctttaaagaa

SEQ ID NO: 1198927 - DNA, 15 bp, Homo sapiens
ccttggctttaaaga

SEQ ID NO: 1198928 - DNA, 15 bp, Homo sapiens
tccttggctttaaag

SEQ ID NO: 1198929 - DNA, 15 bp, Homo sapiens
ctccttggctttaaa

SEQ ID NO: 1198930 - DNA, 15 bp, Homo sapiens
gctccttggctttaa

SEQ ID NO: 1198931 - DNA, 15 bp, Homo sapiens
agctccttggcttta

SEQ ID NO: 1198932 - DNA, 15 bp, Homo sapiens
tagctccttggcttt

SEQ ID NO: 1198933 - DNA, 15 bp, Homo sapiens
ttagctccttggctt

SEQ ID NO: 1198934 - DNA, 15 bp, Homo sapiens
tttagctccttggct

SEQ ID NO: 1198935 - DNA, 15 bp, Homo sapiens
ttttagctccttggc

SEQ ID NO: 1198936 - DNA, 15 bp, Homo sapiens
attttagctccttgg

SEQ ID NO: 1198937 - DNA, 15 bp, Homo sapiens
aattttagctccttg

SEQ ID NO: 1198938 - DNA, 15 bp, Homo sapiens
aaattttagctcctt

SEQ ID NO: 1198939 - DNA, 15 bp, Homo sapiens
taaattttagctcct

SEQ ID NO: 1198940 - DNA, 15 bp, Homo sapiens
ttaaattttagctcc

SEQ ID NO: 1198941 - DNA, 15 bp, Homo sapiens
tttaaattttagctc

SEQ ID NO: 1198942 - DNA, 15 bp, Homo sapiens
ttttaaattttagct

SEQ ID NO: 1198943 - DNA, 15 bp, Homo sapiens
cttttaaattttagc

SEQ ID NO: 1198944 - DNA, 15 bp, Homo sapiens
acttttaaattttag

SEQ ID NO: 1198945 - DNA, 15 bp, Homo sapiens
tacttttaaatttta

SEQ ID NO: 1198946 - DNA, 15 bp, Homo sapiens
gtacttttaaatttt

SEQ ID NO: 1198947 - DNA, 15 bp, Homo sapiens
ggtacttttaaattt

SEQ ID NO: 1198948 - DNA, 15 bp, Homo sapiens
aggtacttttaaatt

SEQ ID NO: 1198949 - DNA, 15 bp, Homo sapiens
caggtacttttaaat

SEQ ID NO: 1198950 - DNA, 15 bp, Homo sapiens
ccaggtacttttaaa

SEQ ID NO: 1198951 - DNA, 15 bp, Homo sapiens
tccaggtacttttaa

SEQ ID NO: 1198952 - DNA, 15 bp, Homo sapiens
ttccaggtactttta

SEQ ID NO: 1198953 - DNA, 15 bp, Homo sapiens
tttccaggtactttt

SEQ ID NO: 1198954 - DNA, 15 bp, Homo sapiens
atttccaggtacttt

SEQ ID NO: 1198955 - DNA, 15 bp, Homo sapiens
gatttccaggtactt

SEQ ID NO: 1198956 - DNA, 15 bp, Homo sapiens
tgatttccaggtact

SEQ ID NO: 1198957 - DNA, 15 bp, Homo sapiens
ctgatttccaggtac

SEQ ID NO: 1198958 - DNA, 15 bp, Homo sapiens
actgatttccaggta

SEQ ID NO: 1198959 - DNA, 15 bp, Homo sapiens
aactgatttccaggt

SEQ ID NO: 1198960 - DNA, 15 bp, Homo sapiens
caactgatttccagg

SEQ ID NO: 1198961 - DNA, 15 bp, Homo sapiens
ccaactgatttccag

SEQ ID NO: 1198962 - DNA, 15 bp, Homo sapiens
cccaactgatttcca

SEQ ID NO: 1198963 - DNA, 15 bp, Homo sapiens
ccccaactgatttcc

SEQ ID NO: 1198964 - DNA, 15 bp, Homo sapiens
tccccaactgatttc

SEQ ID NO: 1198965 - DNA, 15 bp, Homo sapiens
ttccccaactgattt

SEQ ID NO: 1198966 - DNA, 15 bp, Homo sapiens
tttccccaactgatt

SEQ ID NO: 1198967 - DNA, 15 bp, Homo sapiens
ctttccccaactgat

SEQ ID NO: 1198968 - DNA, 15 bp, Homo sapiens
tctttccccaactga

SEQ ID NO: 1198969 - DNA, 15 bp, Homo sapiens
ttctttccccaactg

SEQ ID NO: 1198970 - DNA, 15 bp, Homo sapiens
tttctttccccaact

SEQ ID NO: 1198971 - DNA, 15 bp, Homo sapiens
ttttctttccccaac

SEQ ID NO: 1198972 - DNA, 15 bp, Homo sapiens
attttctttccccaa

SEQ ID NO: 1198973 - DNA, 15 bp, Homo sapiens
tattttctttcccca

SEQ ID NO: 1198974 - DNA, 15 bp, Homo sapiens
gtattttctttcccc

SEQ ID NO: 1198975 - DNA, 15 bp, Homo sapiens
agtattttctttccc

SEQ ID NO: 1198976 - DNA, 15 bp, Homo sapiens
aagtattttctttcc

SEQ ID NO: 1198977 - DNA, 15 bp, Homo sapiens
caagtattttctttc

SEQ ID NO: 1198978 - DNA, 15 bp, Homo sapiens
gcaagtattttcttt

SEQ ID NO: 1198979 - DNA, 15 bp, Homo sapiens
tgcaagtattttctt

SEQ ID NO: 1198980 - DNA, 15 bp, Homo sapiens
ttgcaagtattttct

SEQ ID NO: 1198981 - DNA, 15 bp, Homo sapiens
attgcaagtattttc

SEQ ID NO: 1198982 - DNA, 15 bp, Homo sapiens
aattgcaagtatttt

SEQ ID NO: 1198983 - DNA, 15 bp, Homo sapiens
aaattgcaagtattt

SEQ ID NO: 1198984 - DNA, 15 bp, Homo sapiens
caaattgcaagtatt

SEQ ID NO: 1198985 - DNA, 15 bp, Homo sapiens
acaaattgcaagtat

SEQ ID NO: 1198986 - DNA, 15 bp, Homo sapiens
aacaaattgcaagta

SEQ ID NO: 1198987 - DNA, 15 bp, Homo sapiens
aaacaaattgcaagt

SEQ ID NO: 1198988 - DNA, 15 bp, Homo sapiens
ctgaaaaacaaattg

SEQ ID NO: 1198989 - DNA, 15 bp, Homo sapiens
actgaaaaacaaatt

SEQ ID NO: 1198990 - DNA, 15 bp, Homo sapiens
cactgaaaaacaaat

SEQ ID NO: 1198991 - DNA, 15 bp, Homo sapiens
ccactgaaaaacaaa

SEQ ID NO: 1198992 - DNA, 15 bp, Homo sapiens
tccactgaaaaacaa

SEQ ID NO: 1198993 - DNA, 15 bp, Homo sapiens
ttccactgaaaaaca

SEQ ID NO: 1198994 - DNA, 15 bp, Homo sapiens
attccactgaaaaac

SEQ ID NO: 1198995 - DNA, 15 bp, Homo sapiens
tattccactgaaaaa

SEQ ID NO: 1198996 - DNA, 15 bp, Homo sapiens
ctattccactgaaaa

SEQ ID NO: 1198997 - DNA, 15 bp, Homo sapiens
tctattccactgaaa

SEQ ID NO: 1198998 - DNA, 15 bp, Homo sapiens
ctctattccactgaa

SEQ ID NO: 1198999 - DNA, 15 bp, Homo sapiens
tctctattccactga

SEQ ID NO: 1199000 - DNA, 15 bp, Homo sapiens
atctctattccactg

SEQ ID NO: 1199001 - DNA, 15 bp, Homo sapiens
gatctctattccact

SEQ ID NO: 1199002 - DNA, 15 bp, Homo sapiens
tgatctctattccac

SEQ ID NO: 1199003 - DNA, 15 bp, Homo sapiens
ctgatctctattcca

SEQ ID NO: 1199004 - DNA, 15 bp, Homo sapiens
tctgatctctattcc

SEQ ID NO: 1199005 - DNA, 15 bp, Homo sapiens
ttctgatctctattc

SEQ ID NO: 1199006 - DNA, 15 bp, Homo sapiens
tttctgatctctatt

SEQ ID NO: 1199007 - DNA, 15 bp, Homo sapiens
atttctgatctctat

SEQ ID NO: 1199008 - DNA, 15 bp, Homo sapiens
catttctgatctcta

SEQ ID NO: 1199009 - DNA, 15 bp, Homo sapiens
tcatttctgatctct

SEQ ID NO: 1199010 - DNA, 15 bp, Homo sapiens
ttcatttctgatctc

SEQ ID NO: 1199011 - DNA, 15 bp, Homo sapiens
tttcatttctgatct

SEQ ID NO: 1199012 - DNA, 15 bp, Homo sapiens
ttttcatttctgatc

SEQ ID NO: 1199013 - DNA, 15 bp, Homo sapiens
tttttcatttctgat

SEQ ID NO: 1199014 - DNA, 15 bp, Homo sapiens
atttttcatttctga

SEQ ID NO: 1199015 - DNA, 15 bp, Homo sapiens
gatttttcatttctg

SEQ ID NO: 1199016 - DNA, 15 bp, Homo sapiens
tgatttttcatttct

SEQ ID NO: 1199017 - DNA, 15 bp, Homo sapiens
ctgatttttcatttc

SEQ ID NO: 1199018 - DNA, 15 bp, Homo sapiens
actgatttttcattt

SEQ ID NO: 1199019 - DNA, 15 bp, Homo sapiens
gactgatttttcatt

SEQ ID NO: 1199020 - DNA, 15 bp, Homo sapiens
agactgatttttcat

SEQ ID NO: 1199021 - DNA, 15 bp, Homo sapiens
gagactgatttttca

SEQ ID NO: 1199022 - DNA, 15 bp, Homo sapiens
agagactgatttttc

SEQ ID NO: 1199023 - DNA, 15 bp, Homo sapiens
aagagactgattttt

SEQ ID NO: 1199024 - DNA, 15 bp, Homo sapiens
taagagactgatttt

SEQ ID NO: 1199025 - DNA, 15 bp, Homo sapiens
ataagagactgattt

SEQ ID NO: 1199026 - DNA, 15 bp, Homo sapiens
cataagagactgatt

SEQ ID NO: 1199027 - DNA, 15 bp, Homo sapiens
acataagagactgat

SEQ ID NO: 1199028 - DNA, 15 bp, Homo sapiens
cacataagagactga

SEQ ID NO: 1199029 - DNA, 15 bp, Homo sapiens
ccacataagagactg

SEQ ID NO: 1199030 - DNA, 15 bp, Homo sapiens
accacataagagact

SEQ ID NO: 1199031 - DNA, 15 bp, Homo sapiens
caccacataagagac

SEQ ID NO: 1199032 - DNA, 15 bp, Homo sapiens
tcaccacataagaga

SEQ ID NO: 1199033 - DNA, 15 bp, Homo sapiens
gtcaccacataagag

SEQ ID NO: 1199034 - DNA, 15 bp, Homo sapiens
tgtcaccacataaga

SEQ ID NO: 1199035 - DNA, 15 bp, Homo sapiens
atgtcaccacataag

SEQ ID NO: 1199036 - DNA, 15 bp, Homo sapiens
gatgtcaccacataa

SEQ ID NO: 1199037 - DNA, 15 bp, Homo sapiens
tgatgtcaccacata

SEQ ID NO: 1199038 - DNA, 15 bp, Homo sapiens
gtgatgtcaccacat

SEQ ID NO: 1199039 - DNA, 15 bp, Homo sapiens
agtgatgtcaccaca

SEQ ID NO: 1199040 - DNA, 15 bp, Homo sapiens
aagtgatgtcaccac

SEQ ID NO: 1199041 - DNA, 15 bp, Homo sapiens
gaagtgatgtcacca

SEQ ID NO: 1199042 - DNA, 15 bp, Homo sapiens
ggaagtgatgtcacc

SEQ ID NO: 1199043 - DNA, 15 bp, Homo sapiens
tggaagtgatgtcac

SEQ ID NO: 1199044 - DNA, 15 bp, Homo sapiens
atggaagtgatgtca

SEQ ID NO: 1199045 - DNA, 15 bp, Homo sapiens
gatggaagtgatgtc

SEQ ID NO: 1199046 - DNA, 15 bp, Homo sapiens
tgatggaagtgatgt

SEQ ID NO: 1199047 - DNA, 15 bp, Homo sapiens
gtgatggaagtgatg

SEQ ID NO: 1199048 - DNA, 15 bp, Homo sapiens
tgtgatggaagtgat

SEQ ID NO: 1199049 - DNA, 15 bp, Homo sapiens
ttgtgatggaagtga

SEQ ID NO: 1199050 - DNA, 15 bp, Homo sapiens
tttgtgatggaagtg

SEQ ID NO: 1199051 - DNA, 15 bp, Homo sapiens
gtttgtgatggaagt

SEQ ID NO: 1199052 - DNA, 15 bp, Homo sapiens
tgtttgtgatggaag

SEQ ID NO: 1199053 - DNA, 15 bp, Homo sapiens
atgtttgtgatggaa

SEQ ID NO: 1199054 - DNA, 15 bp, Homo sapiens
catgtttgtgatgga

SEQ ID NO: 1199055 - DNA, 15 bp, Homo sapiens
acatgtttgtgatgg

SEQ ID NO: 1199056 - DNA, 15 bp, Homo sapiens
gacatgtttgtgatg

SEQ ID NO: 1199057 - DNA, 15 bp, Homo sapiens
tgacatgtttgtgat

SEQ ID NO: 1199058 - DNA, 15 bp, Homo sapiens
ttgacatgtttgtga

SEQ ID NO: 1199059 - DNA, 15 bp, Homo sapiens
attgacatgtttgtg

SEQ ID NO: 1199060 - DNA, 15 bp, Homo sapiens
cattgacatgtttgt

SEQ ID NO: 1199061 - DNA, 15 bp, Homo sapiens
acattgacatgtttg

SEQ ID NO: 1199062 - DNA, 15 bp, Homo sapiens
cacattgacatgttt

SEQ ID NO: 1199063 - DNA, 15 bp, Homo sapiens
tcacattgacatgtt

SEQ ID NO: 1199064 - DNA, 15 bp, Homo sapiens
atcacattgacatgt

SEQ ID NO: 1199065 - DNA, 15 bp, Homo sapiens
catcacattgacatg

SEQ ID NO: 1199066 - DNA, 15 bp, Homo sapiens
gcatcacattgacat

SEQ ID NO: 1199067 - DNA, 15 bp, Homo sapiens
tgcatcacattgaca

SEQ ID NO: 1199068 - DNA, 15 bp, Homo sapiens
atgcatcacattgac

SEQ ID NO: 1199069 - DNA, 15 bp, Homo sapiens
catgcatcacattga

SEQ ID NO: 1199070 - DNA, 15 bp, Homo sapiens
acatgcatcacattg

SEQ ID NO: 1199071 - DNA, 15 bp, Homo sapiens
aacatgcatcacatt

SEQ ID NO: 1199072 - DNA, 15 bp, Homo sapiens
taacatgcatcacat

SEQ ID NO: 1199073 - DNA, 15 bp, Homo sapiens
gtaacatgcatcaca

SEQ ID NO: 1199074 - DNA, 15 bp, Homo sapiens
tgtaacatgcatcac

SEQ ID NO: 1199075 - DNA, 15 bp, Homo sapiens
atgtaacatgcatca

SEQ ID NO: 1199076 - DNA, 15 bp, Homo sapiens
aatgtaacatgcatc

SEQ ID NO: 1199077 - DNA, 15 bp, Homo sapiens
taatgtaacatgcat

SEQ ID NO: 1199078 - DNA, 15 bp, Homo sapiens
ttaatgtaacatgca

SEQ ID NO: 1199079 - DNA, 15 bp, Homo sapiens
attaatgtaacatgc

SEQ ID NO: 1199080 - DNA, 15 bp, Homo sapiens
tattaatgtaacatg

SEQ ID NO: 1199081 - DNA, 15 bp, Homo sapiens
gtattaatgtaacat

SEQ ID NO: 1199082 - DNA, 15 bp, Homo sapiens
agtattaatgtaaca

SEQ ID NO: 1199083 - DNA, 15 bp, Homo sapiens
cagtattaatgtaac

SEQ ID NO: 1199084 - DNA, 15 bp, Homo sapiens
ccagtattaatgtaa

SEQ ID NO: 1199085 - DNA, 15 bp, Homo sapiens
cccagtattaatgta

SEQ ID NO: 1199086 - DNA, 15 bp, Homo sapiens
gcccagtattaatgt

SEQ ID NO: 1199087 - DNA, 15 bp, Homo sapiens
tgcccagtattaatg

SEQ ID NO: 1199088 - DNA, 15 bp, Homo sapiens
atgcccagtattaat

SEQ ID NO: 1199089 - DNA, 15 bp, Homo sapiens
tatgcccagtattaa

SEQ ID NO: 1199090 - DNA, 15 bp, Homo sapiens
atatgcccagtatta

SEQ ID NO: 1199091 - DNA, 15 bp, Homo sapiens
tatatgcccagtatt

SEQ ID NO: 1199092 - DNA, 15 bp, Homo sapiens
ttatatgcccagtat

SEQ ID NO: 1199093 - DNA, 15 bp, Homo sapiens
tttatatgcccagta

SEQ ID NO: 1199094 - DNA, 15 bp, Homo sapiens
gtttatatgcccagt

SEQ ID NO: 1199095 - DNA, 15 bp, Homo sapiens
tgtttatatgcccag

SEQ ID NO: 1199096 - DNA, 15 bp, Homo sapiens
ttgtttatatgccca

SEQ ID NO: 1199097 - DNA, 15 bp, Homo sapiens
tttgtttatatgccc

SEQ ID NO: 1199098 - DNA, 15 bp, Homo sapiens
gtttgtttatatgcc

SEQ ID NO: 1199099 - DNA, 15 bp, Homo sapiens
tgtttgtttatatgc

SEQ ID NO: 1199100 - DNA, 15 bp, Homo sapiens
gtgtttgtttatatg

SEQ ID NO: 1199101 - DNA, 15 bp, Homo sapiens
tgtgtttgtttatat

SEQ ID NO: 1199102 - DNA, 15 bp, Homo sapiens
gtgtgtttgtttata

SEQ ID NO: 1199103 - DNA, 15 bp, Homo sapiens
tgtgtgtttgtttat

SEQ ID NO: 1199104 - DNA, 15 bp, Homo sapiens
ctgtgtgtttgttta

SEQ ID NO: 1199105 - DNA, 15 bp, Homo sapiens
cctgtgtgtttgttt

SEQ ID NO: 1199106 - DNA, 15 bp, Homo sapiens
tcctgtgtgtttgtt

SEQ ID NO: 1199107 - DNA, 15 bp, Homo sapiens
ttcctgtgtgtttgt

SEQ ID NO: 1199108 - DNA, 15 bp, Homo sapiens
tttcctgtgtgtttg

SEQ ID NO: 1199109 - DNA, 15 bp, Homo sapiens
atttcctgtgtgttt

SEQ ID NO: 1199110 - DNA, 15 bp, Homo sapiens
tatttcctgtgtgtt

SEQ ID NO: 1199111 - DNA, 15 bp, Homo sapiens
ttatttcctgtgtgt

SEQ ID NO: 1199112 - DNA, 15 bp, Homo sapiens
gttatttcctgtgtg

SEQ ID NO: 1199113 - DNA, 15 bp, Homo sapiens
tgttatttcctgtgt

SEQ ID NO: 1199114 - DNA, 15 bp, Homo sapiens
ctgttatttcctgtg

SEQ ID NO: 1199115 - DNA, 15 bp, Homo sapiens
gctgttatttcctgt

SEQ ID NO: 1199116 - DNA, 15 bp, Homo sapiens
tgctgttatttcctg

SEQ ID NO: 1199117 - DNA, 15 bp, Homo sapiens
ttgctgttatttcct

SEQ ID NO: 1199118 - DNA, 15 bp, Homo sapiens
attgctgttatttcc

SEQ ID NO: 1199119 - DNA, 15 bp, Homo sapiens
cattgctgttatttc

SEQ ID NO: 1199120 - DNA, 15 bp, Homo sapiens
tcattgctgttattt

SEQ ID NO: 1199121 - DNA, 15 bp, Homo sapiens
atcattgctgttatt

SEQ ID NO: 1199122 - DNA, 15 bp, Homo sapiens
tatcattgctgttat

SEQ ID NO: 1199123 - DNA, 15 bp, Homo sapiens
ttatcattgctgtta

SEQ ID NO: 1199124 - DNA, 15 bp, Homo sapiens
attatcattgctgtt

SEQ ID NO: 1199125 - DNA, 15 bp, Homo sapiens
cattatcattgctgt

SEQ ID NO: 1199126 - DNA, 15 bp, Homo sapiens
tcattatcattgctg

SEQ ID NO: 1199127 - DNA, 15 bp, Homo sapiens
ttcattatcattgct

SEQ ID NO: 1199128 - DNA, 15 bp, Homo sapiens
tttcattatcattgc

SEQ ID NO: 1199129 - DNA, 15 bp, Homo sapiens
gtttcattatcattg

SEQ ID NO: 1199130 - DNA, 15 bp, Homo sapiens
ggtttcattatcatt

SEQ ID NO: 1199131 - DNA, 15 bp, Homo sapiens
tggtttcattatcat

SEQ ID NO: 1199132 - DNA, 15 bp, Homo sapiens
ctggtttcattatca

SEQ ID NO: 1199133 - DNA, 15 bp, Homo sapiens
tctggtttcattatc

SEQ ID NO: 1199134 - DNA, 15 bp, Homo sapiens
ttctggtttcattat

SEQ ID NO: 1199135 - DNA, 15 bp, Homo sapiens
tttctggtttcatta

SEQ ID NO: 1199136 - DNA, 15 bp, Homo sapiens
atttctggtttcatt

SEQ ID NO: 1199137 - DNA, 15 bp, Homo sapiens
tatttctggtttcat

SEQ ID NO: 1199138 - DNA, 15 bp, Homo sapiens
ctatttctggtttca

SEQ ID NO: 1199139 - DNA, 15 bp, Homo sapiens
cctatttctggtttc

SEQ ID NO: 1199140 - DNA, 15 bp, Homo sapiens
tcctatttctggttt

SEQ ID NO: 1199141 - DNA, 15 bp, Homo sapiens
ctcctatttctggtt

SEQ ID NO: 1199142 - DNA, 15 bp, Homo sapiens
actcctatttctggt

SEQ ID NO: 1199143 - DNA, 15 bp, Homo sapiens
tactcctatttctgg

SEQ ID NO: 1199144 - DNA, 15 bp, Homo sapiens
atactcctatttctg

SEQ ID NO: 1199145 - DNA, 15 bp, Homo sapiens
catactcctatttct

SEQ ID NO: 1199146 - DNA, 15 bp, Homo sapiens
acatactcctatttc

SEQ ID NO: 1199147 - DNA, 15 bp, Homo sapiens
aacatactcctattt

SEQ ID NO: 1199148 - DNA, 15 bp, Homo sapiens
caacatactcctatt

SEQ ID NO: 1199149 - DNA, 15 bp, Homo sapiens
ccaacatactcctat

SEQ ID NO: 1199150 - DNA, 15 bp, Homo sapiens
tccaacatactccta

SEQ ID NO: 1199151 - DNA, 15 bp, Homo sapiens
ctccaacatactcct

SEQ ID NO: 1199152 - DNA, 15 bp, Homo sapiens
tctccaacatactcc

SEQ ID NO: 1199153 - DNA, 15 bp, Homo sapiens
gtctccaacatactc

SEQ ID NO: 1199154 - DNA, 15 bp, Homo sapiens
tgtctccaacatact

SEQ ID NO: 1199155 - DNA, 15 bp, Homo sapiens
ttgtctccaacatac

SEQ ID NO: 1199156 - DNA, 15 bp, Homo sapiens
tttgtctccaacata

SEQ ID NO: 1199157 - DNA, 15 bp, Homo sapiens
ctttgtctccaacat

SEQ ID NO: 1199158 - DNA, 15 bp, Homo sapiens
actttgtctccaaca

SEQ ID NO: 1199159 - DNA, 15 bp, Homo sapiens
cactttgtctccaac

SEQ ID NO: 1199160 - DNA, 15 bp, Homo sapiens
tcactttgtctccaa

SEQ ID NO: 1199161 - DNA, 15 bp, Homo sapiens
ttcactttgtctcca

SEQ ID NO: 1199162 - DNA, 15 bp, Homo sapiens
gttcactttgtctcc

SEQ ID NO: 1199163 - DNA, 15 bp, Homo sapiens
tgttcactttgtctc

SEQ ID NO: 1199164 - DNA, 15 bp, Homo sapiens
atgttcactttgtct

SEQ ID NO: 1199165 - DNA, 15 bp, Homo sapiens
catgttcactttgtc

SEQ ID NO: 1199166 - DNA, 15 bp, Homo sapiens
ccatgttcactttgt

SEQ ID NO: 1199167 - DNA, 15 bp, Homo sapiens
tccatgttcactttg

SEQ ID NO: 1199168 - DNA, 15 bp, Homo sapiens
ctccatgttcacttt

SEQ ID NO: 1199169 - DNA, 15 bp, Homo sapiens
actccatgttcactt

SEQ ID NO: 1199170 - DNA, 15 bp, Homo sapiens
tactccatgttcact

SEQ ID NO: 1199171 - DNA, 15 bp, Homo sapiens
ctactccatgttcac

SEQ ID NO: 1199172 - DNA, 15 bp, Homo sapiens
cctactccatgttca

SEQ ID NO: 1199173 - DNA, 15 bp, Homo sapiens
tcctactccatgttc

SEQ ID NO: 1199174 - DNA, 15 bp, Homo sapiens
gtcctactccatgtt

SEQ ID NO: 1199175 - DNA, 15 bp, Homo sapiens
tgtcctactccatgt

SEQ ID NO: 1199176 - DNA, 15 bp, Homo sapiens
ttgtcctactccatg

SEQ ID NO: 1199177 - DNA, 15 bp, Homo sapiens
tttgtcctactccat

SEQ ID NO: 1199178 - DNA, 15 bp, Homo sapiens
ttttgtcctactcca

SEQ ID NO: 1199179 - DNA, 15 bp, Homo sapiens
attttgtcctactcc

SEQ ID NO: 1199180 - DNA, 15 bp, Homo sapiens
gattttgtcctactc

SEQ ID NO: 1199181 - DNA, 15 bp, Homo sapiens
tgattttgtcctact

SEQ ID NO: 1199182 - DNA, 15 bp, Homo sapiens
ttgattttgtcctac

SEQ ID NO: 1199183 - DNA, 15 bp, Homo sapiens
attgattttgtccta

SEQ ID NO: 1199184 - DNA, 15 bp, Homo sapiens
tattgattttgtcct

SEQ ID NO: 1199185 - DNA, 15 bp, Homo sapiens
ttattgattttgtcc

SEQ ID NO: 1199186 - DNA, 15 bp, Homo sapiens
cttattgattttgtc

SEQ ID NO: 1199187 - DNA, 15 bp, Homo sapiens
gcttattgattttgt

SEQ ID NO: 1199188 - DNA, 15 bp, Homo sapiens
tgcttattgattttg

SEQ ID NO: 1199189 - DNA, 15 bp, Homo sapiens
ttgcttattgatttt

SEQ ID NO: 1199190 - DNA, 15 bp, Homo sapiens
attgcttattgattt

SEQ ID NO: 1199191 - DNA, 15 bp, Homo sapiens
aattgcttattgatt

SEQ ID NO: 1199192 - DNA, 15 bp, Homo sapiens
taattgcttattgat

SEQ ID NO: 1199193 - DNA, 15 bp, Homo sapiens
ttaattgcttattga

SEQ ID NO: 1199194 - DNA, 15 bp, Homo sapiens
tttaattgcttattg

SEQ ID NO: 1199195 - DNA, 15 bp, Homo sapiens
ttttaattgcttatt

SEQ ID NO: 1199196 - DNA, 15 bp, Homo sapiens
tttttaattgcttat

SEQ ID NO: 1199197 - DNA, 15 bp, Homo sapiens
ttttttaattgctta

SEQ ID NO: 1199198 - DNA, 15 bp, Homo sapiens
tttttttaattgctt

SEQ ID NO: 1199199 - DNA, 15 bp, Homo sapiens
ctttttttaattgct

SEQ ID NO: 1199200 - DNA, 15 bp, Homo sapiens
tctttttttaattgc

SEQ ID NO: 1199201 - DNA, 15 bp, Homo sapiens
atctttttttaattg

SEQ ID NO: 1199202 - DNA, 15 bp, Homo sapiens
aatctttttttaatt

SEQ ID NO: 1199203 - DNA, 15 bp, Homo sapiens
caatctttttttaat

SEQ ID NO: 1199204 - DNA, 15 bp, Homo sapiens
tcaatctttttttaa

SEQ ID NO: 1199205 - DNA, 15 bp, Homo sapiens
ttcaatcttttttta

SEQ ID NO: 1199206 - DNA, 15 bp, Homo sapiens
gttcaatcttttttt

SEQ ID NO: 1199207 - DNA, 15 bp, Homo sapiens
tgttcaatctttttt

SEQ ID NO: 1199208 - DNA, 15 bp, Homo sapiens
ttgttcaatcttttt

SEQ ID NO: 1199209 - DNA, 15 bp, Homo sapiens
attgttcaatctttt

SEQ ID NO: 1199210 - DNA, 15 bp, Homo sapiens
gattgttcaatcttt

SEQ ID NO: 1199211 - DNA, 15 bp, Homo sapiens
agattgttcaatctt

SEQ ID NO: 1199212 - DNA, 15 bp, Homo sapiens
aagattgttcaatct

SEQ ID NO: 1199213 - DNA, 15 bp, Homo sapiens
taagattgttcaatc

SEQ ID NO: 1199214 - DNA, 15 bp, Homo sapiens
ttaagattgttcaat

SEQ ID NO: 1199215 - DNA, 15 bp, Homo sapiens
attaagattgttcaa

SEQ ID NO: 1199216 - DNA, 15 bp, Homo sapiens
tattaagattgttca

SEQ ID NO: 1199217 - DNA, 15 bp, Homo sapiens
ttattaagattgttc

SEQ ID NO: 1199218 - DNA, 15 bp, Homo sapiens
cttattaagattgtt

SEQ ID NO: 1199219 - DNA, 15 bp, Homo sapiens
acttattaagattgt

SEQ ID NO: 1199220 - DNA, 15 bp, Homo sapiens
aacttattaagattg

SEQ ID NO: 1199221 - DNA, 15 bp, Homo sapiens
gaacttattaagatt

SEQ ID NO: 1199222 - DNA, 15 bp, Homo sapiens
tgaacttattaagat

SEQ ID NO: 1199223 - DNA, 15 bp, Homo sapiens
gtgaacttattaaga

SEQ ID NO: 1199224 - DNA, 15 bp, Homo sapiens
agtgaacttattaag

SEQ ID NO: 1199225 - DNA, 15 bp, Homo sapiens
tagtgaacttattaa

SEQ ID NO: 1199226 - DNA, 15 bp, Homo sapiens
ttagtgaacttatta

SEQ ID NO: 1199227 - DNA, 15 bp, Homo sapiens
gttagtgaacttatt

SEQ ID NO: 1199228 - DNA, 15 bp, Homo sapiens
ggttagtgaacttat

SEQ ID NO: 1199229 - DNA, 15 bp, Homo sapiens
aggttagtgaactta

SEQ ID NO: 1199230 - DNA, 15 bp, Homo sapiens
taggttagtgaactt

SEQ ID NO: 1199231 - DNA, 15 bp, Homo sapiens
ataggttagtgaact

SEQ ID NO: 1199232 - DNA, 15 bp, Homo sapiens
aataggttagtgaac

SEQ ID NO: 1199233 - DNA, 15 bp, Homo sapiens
aaataggttagtgaa

SEQ ID NO: 1199234 - DNA, 15 bp, Homo sapiens
caaataggttagtga

SEQ ID NO: 1199235 - DNA, 15 bp, Homo sapiens
tcaaataggttagtg

SEQ ID NO: 1199236 - DNA, 15 bp, Homo sapiens
gtcaaataggttagt

SEQ ID NO: 1199237 - DNA, 15 bp, Homo sapiens
ggtcaaataggttag

SEQ ID NO: 1199238 - DNA, 15 bp, Homo sapiens
cggtcaaataggtta

SEQ ID NO: 1199239 - DNA, 15 bp, Homo sapiens
tcggtcaaataggtt

SEQ ID NO: 1199240 - DNA, 15 bp, Homo sapiens
ttcggtcaaataggt

SEQ ID NO: 1199241 - DNA, 15 bp, Homo sapiens
tttcggtcaaatagg

SEQ ID NO: 1199242 - DNA, 15 bp, Homo sapiens
ctttcggtcaaatag

SEQ ID NO: 1199243 - DNA, 15 bp, Homo sapiens
tctttcggtcaaata

SEQ ID NO: 1199244 - DNA, 15 bp, Homo sapiens
ttctttcggtcaaat

SEQ ID NO: 1199245 - DNA, 15 bp, Homo sapiens
attctttcggtcaaa

SEQ ID NO: 1199246 - DNA, 15 bp, Homo sapiens
gattctttcggtcaa

SEQ ID NO: 1199247 - DNA, 15 bp, Homo sapiens
ggattctttcggtca

SEQ ID NO: 1199248 - DNA, 15 bp, Homo sapiens
tggattctttcggtc

SEQ ID NO: 1199249 - DNA, 15 bp, Homo sapiens
ttggattctttcggt

SEQ ID NO: 1199250 - DNA, 15 bp, Homo sapiens
attggattctttcgg

SEQ ID NO: 1199251 - DNA, 15 bp, Homo sapiens
gattggattctttcg

SEQ ID NO: 1199252 - DNA, 15 bp, Homo sapiens
ggattggattctttc

SEQ ID NO: 1199253 - DNA, 15 bp, Homo sapiens
aggattggattcttt

SEQ ID NO: 1199254 - DNA, 15 bp, Homo sapiens
caggattggattctt

SEQ ID NO: 1199255 - DNA, 15 bp, Homo sapiens
gcaggattggattct

SEQ ID NO: 1199256 - DNA, 15 bp, Homo sapiens
agcaggattggattc

SEQ ID NO: 1199257 - DNA, 15 bp, Homo sapiens
cagcaggattggatt

SEQ ID NO: 1199258 - DNA, 15 bp, Homo sapiens
acagcaggattggat

SEQ ID NO: 1199259 - DNA, 15 bp, Homo sapiens
cacagcaggattgga

SEQ ID NO: 1199260 - DNA, 15 bp, Homo sapiens
tcacagcaggattgg

SEQ ID NO: 1199261 - DNA, 15 bp, Homo sapiens
atcacagcaggattg

SEQ ID NO: 1199262 - DNA, 15 bp, Homo sapiens
tatcacagcaggatt

SEQ ID NO: 1199263 - DNA, 15 bp, Homo sapiens
ttatcacagcaggat

SEQ ID NO: 1199264 - DNA, 15 bp, Homo sapiens
tttatcacagcagga

SEQ ID NO: 1199265 - DNA, 15 bp, Homo sapiens
gtttatcacagcagg

SEQ ID NO: 1199266 - DNA, 15 bp, Homo sapiens
tgtttatcacagcag

SEQ ID NO: 1199267 - DNA, 15 bp, Homo sapiens
ctgtttatcacagca

SEQ ID NO: 1199268 - DNA, 15 bp, Homo sapiens
gctgtttatcacagc

SEQ ID NO: 1199269 - DNA, 15 bp, Homo sapiens
cgctgtttatcacag

SEQ ID NO: 1199270 - DNA, 15 bp, Homo sapiens
ccgctgtttatcaca

SEQ ID NO: 1199271 - DNA, 15 bp, Homo sapiens
accgctgtttatcac

SEQ ID NO: 1199272 - DNA, 15 bp, Homo sapiens
aaccgctgtttatca

SEQ ID NO: 1199273 - DNA, 15 bp, Homo sapiens
aaaccgctgtttatc

SEQ ID NO: 1199274 - DNA, 15 bp, Homo sapiens
taaaccgctgtttat

SEQ ID NO: 1199275 - DNA, 15 bp, Homo sapiens
ataaaccgctgttta

SEQ ID NO: 1199276 - DNA, 15 bp, Homo sapiens
aataaaccgctgttt

SEQ ID NO: 1199277 - DNA, 15 bp, Homo sapiens
gaataaaccgctgtt

SEQ ID NO: 1199278 - DNA, 15 bp, Homo sapiens
agaataaaccgctgt

SEQ ID NO: 1199279 - DNA, 15 bp, Homo sapiens
cagaataaaccgctg

SEQ ID NO: 1199280 - DNA, 15 bp, Homo sapiens
tcagaataaaccgct

SEQ ID NO: 1199281 - DNA, 15 bp, Homo sapiens
atcagaataaaccgc

SEQ ID NO: 1199282 - DNA, 15 bp, Homo sapiens
gatcagaataaaccg

SEQ ID NO: 1199283 - DNA, 15 bp, Homo sapiens
ggatcagaataaacc

SEQ ID NO: 1199284 - DNA, 15 bp, Homo sapiens
tggatcagaataaac

SEQ ID NO: 1199285 - DNA, 15 bp, Homo sapiens
gtggatcagaataaa

SEQ ID NO: 1199286 - DNA, 15 bp, Homo sapiens
tgtggatcagaataa

SEQ ID NO: 1199287 - DNA, 15 bp, Homo sapiens
gtgtggatcagaata

SEQ ID NO: 1199288 - DNA, 15 bp, Homo sapiens
tgtgtggatcagaat

SEQ ID NO: 1199289 - DNA, 15 bp, Homo sapiens
atgtgtggatcagaa

SEQ ID NO: 1199290 - DNA, 15 bp, Homo sapiens
tatgtgtggatcaga

SEQ ID NO: 1199291 - DNA, 15 bp, Homo sapiens
atatgtgtggatcag

SEQ ID NO: 1199292 - DNA, 15 bp, Homo sapiens
aatatgtgtggatca

SEQ ID NO: 1199293 - DNA, 15 bp, Homo sapiens
caatatgtgtggatc

SEQ ID NO: 1199294 - DNA, 15 bp, Homo sapiens
tcaatatgtgtggat

SEQ ID NO: 1199295 - DNA, 15 bp, Homo sapiens
atcaatatgtgtgga

SEQ ID NO: 1199296 - DNA, 15 bp, Homo sapiens
aatcaatatgtgtgg

SEQ ID NO: 1199297 - DNA, 15 bp, Homo sapiens
aaatcaatatgtgtg

SEQ ID NO: 1199298 - DNA, 15 bp, Homo sapiens
caaatcaatatgtgt

SEQ ID NO: 1199299 - DNA, 15 bp, Homo sapiens
gcaaatcaatatgtg

SEQ ID NO: 1199300 - DNA, 15 bp, Homo sapiens
agcaaatcaatatgt

SEQ ID NO: 1199301 - DNA, 15 bp, Homo sapiens
tagcaaatcaatatg

SEQ ID NO: 1199302 - DNA, 15 bp, Homo sapiens
gtagcaaatcaatat

SEQ ID NO: 1199303 - DNA, 15 bp, Homo sapiens
cgtagcaaatcaata

SEQ ID NO: 1199304 - DNA, 15 bp, Homo sapiens
acgtagcaaatcaat

SEQ ID NO: 1199305 - DNA, 15 bp, Homo sapiens
cacgtagcaaatcaa

SEQ ID NO: 1199306 - DNA, 15 bp, Homo sapiens
ccacgtagcaaatca

SEQ ID NO: 1199307 - DNA, 15 bp, Homo sapiens
tccacgtagcaaatc

SEQ ID NO: 1199308 - DNA, 15 bp, Homo sapiens
ctccacgtagcaaat

SEQ ID NO: 1199309 - DNA, 15 bp, Homo sapiens
tctccacgtagcaaa

SEQ ID NO: 1199310 - DNA, 15 bp, Homo sapiens
ttctccacgtagcaa

SEQ ID NO: 1199311 - DNA, 15 bp, Homo sapiens
cttctccacgtagca

SEQ ID NO: 1199312 - DNA, 15 bp, Homo sapiens
tcttctccacgtagc

SEQ ID NO: 1199313 - DNA, 15 bp, Homo sapiens
ctcttctccacgtag

SEQ ID NO: 1199314 - DNA, 15 bp, Homo sapiens
tctcttctccacgta

SEQ ID NO: 1199315 - DNA, 15 bp, Homo sapiens
ttctcttctccacgt

SEQ ID NO: 1199316 - DNA, 15 bp, Homo sapiens
tttctcttctccacg

SEQ ID NO: 1199317 - DNA, 15 bp, Homo sapiens
ctttctcttctccac

SEQ ID NO: 1199318 - DNA, 15 bp, Homo sapiens
tctttctcttctcca

SEQ ID NO: 1199319 - DNA, 15 bp, Homo sapiens
atctttctcttctcc

SEQ ID NO: 1199320 - DNA, 15 bp, Homo sapiens
aatctttctcttctc

SEQ ID NO: 1199321 - DNA, 15 bp, Homo sapiens
gaatctttctcttct

SEQ ID NO: 1199322 - DNA, 15 bp, Homo sapiens
agaatctttctcttc

SEQ ID NO: 1199323 - DNA, 15 bp, Homo sapiens
tagaatctttctctt

SEQ ID NO: 1199324 - DNA, 15 bp, Homo sapiens
ttagaatctttctct

SEQ ID NO: 1199325 - DNA, 15 bp, Homo sapiens
tttagaatctttctc

SEQ ID NO: 1199326 - DNA, 15 bp, Homo sapiens
atttagaatctttct

SEQ ID NO: 1199327 - DNA, 15 bp, Homo sapiens
aatttagaatctttc

SEQ ID NO: 1199328 - DNA, 15 bp, Homo sapiens
taatttagaatcttt

SEQ ID NO: 1199329 - DNA, 15 bp, Homo sapiens
ctaatttagaatctt

SEQ ID NO: 1199330 - DNA, 15 bp, Homo sapiens
actaatttagaatct

SEQ ID NO: 1199331 - DNA, 15 bp, Homo sapiens
aactaatttagaatc

SEQ ID NO: 1199332 - DNA, 15 bp, Homo sapiens
aaactaatttagaat

SEQ ID NO: 1199333 - DNA, 15 bp, Homo sapiens
taaactaatttagaa

SEQ ID NO: 1199334 - DNA, 15 bp, Homo sapiens
ctaaactaatttaga

SEQ ID NO: 1199335 - DNA, 15 bp, Homo sapiens
gctaaactaatttag

SEQ ID NO: 1199336 - DNA, 15 bp, Homo sapiens
tgctaaactaattta

SEQ ID NO: 1199337 - DNA, 15 bp, Homo sapiens
ttgctaaactaattt

SEQ ID NO: 1199338 - DNA, 15 bp, Homo sapiens
attgctaaactaatt

SEQ ID NO: 1199339 - DNA, 15 bp, Homo sapiens
aattgctaaactaat

SEQ ID NO: 1199340 - DNA, 15 bp, Homo sapiens
taattgctaaactaa

SEQ ID NO: 1199341 - DNA, 15 bp, Homo sapiens
ctaattgctaaacta

SEQ ID NO: 1199342 - DNA, 15 bp, Homo sapiens
tctaattgctaaact

SEQ ID NO: 1199343 - DNA, 15 bp, Homo sapiens
atctaattgctaaac

SEQ ID NO: 1199344 - DNA, 15 bp, Homo sapiens
aatctaattgctaaa

SEQ ID NO: 1199345 - DNA, 15 bp, Homo sapiens
aaatctaattgctaa

SEQ ID NO: 1199346 - DNA, 15 bp, Homo sapiens
caaatctaattgcta

SEQ ID NO: 1199347 - DNA, 15 bp, Homo sapiens
gcaaatctaattgct

SEQ ID NO: 1199348 - DNA, 15 bp, Homo sapiens
agcaaatctaattgc

SEQ ID NO: 1199349 - DNA, 15 bp, Homo sapiens
cagcaaatctaattg

SEQ ID NO: 1199350 - DNA, 15 bp, Homo sapiens
gcagcaaatctaatt

SEQ ID NO: 1199351 - DNA, 15 bp, Homo sapiens
ggcagcaaatctaat

SEQ ID NO: 1199352 - DNA, 15 bp, Homo sapiens
tggcagcaaatctaa

SEQ ID NO: 1199353 - DNA, 15 bp, Homo sapiens
gtggcagcaaatcta

SEQ ID NO: 1199354 - DNA, 15 bp, Homo sapiens
cgtggcagcaaatct

SEQ ID NO: 1199355 - DNA, 15 bp, Homo sapiens
gcgtggcagcaaatc

SEQ ID NO: 1199356 - DNA, 15 bp, Homo sapiens
agcgtggcagcaaat

SEQ ID NO: 1199357 - DNA, 15 bp, Homo sapiens
gagcgtggcagcaaa

SEQ ID NO: 1199358 - DNA, 15 bp, Homo sapiens
agagcgtggcagcaa

SEQ ID NO: 1199359 - DNA, 15 bp, Homo sapiens
gagagcgtggcagca

SEQ ID NO: 1199360 - DNA, 15 bp, Homo sapiens
ggagagcgtggcagc

SEQ ID NO: 1199361 - DNA, 15 bp, Homo sapiens
aggagagcgtggcag

SEQ ID NO: 1199362 - DNA, 15 bp, Homo sapiens
caggagagcgtggca

SEQ ID NO: 1199363 - DNA, 15 bp, Homo sapiens
acaggagagcgtggc

SEQ ID NO: 1199364 - DNA, 15 bp, Homo sapiens
tacaggagagcgtgg

SEQ ID NO: 1199365 - DNA, 15 bp, Homo sapiens
ttacaggagagcgtg

SEQ ID NO: 1199366 - DNA, 15 bp, Homo sapiens
tttacaggagagcgt

SEQ ID NO: 1199367 - DNA, 15 bp, Homo sapiens
atttacaggagagcg

SEQ ID NO: 1199368 - DNA, 15 bp, Homo sapiens
tatttacaggagagc

SEQ ID NO: 1199369 - DNA, 15 bp, Homo sapiens
atatttacaggagag

SEQ ID NO: 1199370 - DNA, 15 bp, Homo sapiens
catatttacaggaga

SEQ ID NO: 1199371 - DNA, 15 bp, Homo sapiens
tcatatttacaggag

SEQ ID NO: 1199372 - DNA, 15 bp, Homo sapiens
gtcatatttacagga

SEQ ID NO: 1199373 - DNA, 15 bp, Homo sapiens
tgtcatatttacagg

SEQ ID NO: 1199374 - DNA, 15 bp, Homo sapiens
ctgtcatatttacag

SEQ ID NO: 1199375 - DNA, 15 bp, Homo sapiens
gctgtcatatttaca

SEQ ID NO: 1199376 - DNA, 15 bp, Homo sapiens
tgctgtcatatttac

SEQ ID NO: 1199377 - DNA, 15 bp, Homo sapiens
ttgctgtcatattta

SEQ ID NO: 1199378 - DNA, 15 bp, Homo sapiens
attgctgtcatattt

SEQ ID NO: 1199379 - DNA, 15 bp, Homo sapiens
tattgctgtcatatt

SEQ ID NO: 1199380 - DNA, 15 bp, Homo sapiens
atattgctgtcatat

SEQ ID NO: 1199381 - DNA, 15 bp, Homo sapiens
aatattgctgtcata

SEQ ID NO: 1199382 - DNA, 15 bp, Homo sapiens
taatattgctgtcat

SEQ ID NO: 1199383 - DNA, 15 bp, Homo sapiens
ataatattgctgtca

SEQ ID NO: 1199384 - DNA, 15 bp, Homo sapiens
gataatattgctgtc

SEQ ID NO: 1199385 - DNA, 15 bp, Homo sapiens
cgataatattgctgt

SEQ ID NO: 1199386 - DNA, 15 bp, Homo sapiens
ccgataatattgctg

SEQ ID NO: 1199387 - DNA, 15 bp, Homo sapiens
gccgataatattgct

SEQ ID NO: 1199388 - DNA, 15 bp, Homo sapiens
agccgataatattgc

SEQ ID NO: 1199389 - DNA, 15 bp, Homo sapiens
tagccgataatattg

SEQ ID NO: 1199390 - DNA, 15 bp, Homo sapiens
ctagccgataatatt

SEQ ID NO: 1199391 - DNA, 15 bp, Homo sapiens
actagccgataatat

SEQ ID NO: 1199392 - DNA, 15 bp, Homo sapiens
aactagccgataata

SEQ ID NO: 1199393 - DNA, 15 bp, Homo sapiens
aaactagccgataat

SEQ ID NO: 1199394 - DNA, 15 bp, Homo sapiens
aaaactagccgataa

SEQ ID NO: 1199395 - DNA, 15 bp, Homo sapiens
taaaactagccgata

SEQ ID NO: 1199396 - DNA, 15 bp, Homo sapiens
gtaaaactagccgat

SEQ ID NO: 1199397 - DNA, 15 bp, Homo sapiens
tgtaaaactagccga

SEQ ID NO: 1199398 - DNA, 15 bp, Homo sapiens
atgtaaaactagccg

SEQ ID NO: 1199399 - DNA, 15 bp, Homo sapiens
aatgtaaaactagcc

SEQ ID NO: 1199400 - DNA, 15 bp, Homo sapiens
aaatgtaaaactagc

SEQ ID NO: 1199401 - DNA, 15 bp, Homo sapiens
taaatgtaaaactag

SEQ ID NO: 1199402 - DNA, 15 bp, Homo sapiens
ctaaatgtaaaacta

SEQ ID NO: 1199403 - DNA, 15 bp, Homo sapiens
gctaaatgtaaaact

SEQ ID NO: 1199404 - DNA, 15 bp, Homo sapiens
ggctaaatgtaaaac

SEQ ID NO: 1199405 - DNA, 15 bp, Homo sapiens
tggctaaatgtaaaa

SEQ ID NO: 1199406 - DNA, 15 bp, Homo sapiens
gtggctaaatgtaaa

SEQ ID NO: 1199407 - DNA, 15 bp, Homo sapiens
agtggctaaatgtaa

SEQ ID NO: 1199408 - DNA, 15 bp, Homo sapiens
tagtggctaaatgta

SEQ ID NO: 1199409 - DNA, 15 bp, Homo sapiens
ttagtggctaaatgt

SEQ ID NO: 1199410 - DNA, 15 bp, Homo sapiens
attagtggctaaatg

SEQ ID NO: 1199411 - DNA, 15 bp, Homo sapiens
cattagtggctaaat

SEQ ID NO: 1199412 - DNA, 15 bp, Homo sapiens
tcattagtggctaaa

SEQ ID NO: 1199413 - DNA, 15 bp, Homo sapiens
ctcattagtggctaa

SEQ ID NO: 1199414 - DNA, 15 bp, Homo sapiens
tctcattagtggcta

SEQ ID NO: 1199415 - DNA, 15 bp, Homo sapiens
ctctcattagtggct

SEQ ID NO: 1199416 - DNA, 15 bp, Homo sapiens
gctctcattagtggc

SEQ ID NO: 1199417 - DNA, 15 bp, Homo sapiens
tgctctcattagtgg

SEQ ID NO: 1199418 - DNA, 15 bp, Homo sapiens
atgctctcattagtg

SEQ ID NO: 1199419 - DNA, 15 bp, Homo sapiens
aatgctctcattagt

SEQ ID NO: 1199420 - DNA, 15 bp, Homo sapiens
caatgctctcattag

SEQ ID NO: 1199421 - DNA, 15 bp, Homo sapiens
gcaatgctctcatta

SEQ ID NO: 1199422 - DNA, 15 bp, Homo sapiens
ggcaatgctctcatt

SEQ ID NO: 1199423 - DNA, 15 bp, Homo sapiens
gggcaatgctctcat

SEQ ID NO: 1199424 - DNA, 15 bp, Homo sapiens
ggggcaatgctctca

SEQ ID NO: 1199425 - DNA, 15 bp, Homo sapiens
cggggcaatgctctc

SEQ ID NO: 1199426 - DNA, 15 bp, Homo sapiens
tcggggcaatgctct

SEQ ID NO: 1199427 - DNA, 15 bp, Homo sapiens
ttcggggcaatgctc

SEQ ID NO: 1199428 - DNA, 15 bp, Homo sapiens
attcggggcaatgct

SEQ ID NO: 1199429 - DNA, 15 bp, Homo sapiens
cattcggggcaatgc

SEQ ID NO: 1199430 - DNA, 15 bp, Homo sapiens
tcattcggggcaatg

SEQ ID NO: 1199431 - DNA, 15 bp, Homo sapiens
ttcattcggggcaat

SEQ ID NO: 1199432 - DNA, 15 bp, Homo sapiens
attcattcggggcaa

SEQ ID NO: 1199433 - DNA, 15 bp, Homo sapiens
cattcattcggggca

SEQ ID NO: 1199434 - DNA, 15 bp, Homo sapiens
tcattcattcggggc

SEQ ID NO: 1199435 - DNA, 15 bp, Homo sapiens
ctcattcattcgggg

SEQ ID NO: 1199436 - DNA, 15 bp, Homo sapiens
actcattcattcggg

SEQ ID NO: 1199437 - DNA, 15 bp, Homo sapiens
cactcattcattcgg

SEQ ID NO: 1199438 - DNA, 15 bp, Homo sapiens
tcactcattcattcg

SEQ ID NO: 1199439 - DNA, 15 bp, Homo sapiens
gtcactcattcattc

SEQ ID NO: 1199440 - DNA, 15 bp, Homo sapiens
agtcactcattcatt

SEQ ID NO: 1199441 - DNA, 15 bp, Homo sapiens
tagtcactcattcat

SEQ ID NO: 1199442 - DNA, 15 bp, Homo sapiens
atagtcactcattca

SEQ ID NO: 1199443 - DNA, 15 bp, Homo sapiens
gatagtcactcattc

SEQ ID NO: 1199444 - DNA, 15 bp, Homo sapiens
tgatagtcactcatt

SEQ ID NO: 1199445 - DNA, 15 bp, Homo sapiens
ttgatagtcactcat

SEQ ID NO: 1199446 - DNA, 15 bp, Homo sapiens
attgatagtcactca

SEQ ID NO: 1199447 - DNA, 15 bp, Homo sapiens
aattgatagtcactc

SEQ ID NO: 1199448 - DNA, 15 bp, Homo sapiens
aaattgatagtcact

SEQ ID NO: 1199449 - DNA, 15 bp, Homo sapiens
taaattgatagtcac

SEQ ID NO: 1199450 - DNA, 15 bp, Homo sapiens
ttaaattgatagtca

SEQ ID NO: 1199451 - DNA, 15 bp, Homo sapiens
cttaaattgatagtc

SEQ ID NO: 1199452 - DNA, 15 bp, Homo sapiens
acttaaattgatagt

SEQ ID NO: 1199453 - DNA, 15 bp, Homo sapiens
cacttaaattgatag

SEQ ID NO: 1199454 - DNA, 15 bp, Homo sapiens
tcacttaaattgata

SEQ ID NO: 1199455 - DNA, 15 bp, Homo sapiens
atcacttaaattgat

SEQ ID NO: 1199456 - DNA, 15 bp, Homo sapiens
aatcacttaaattga

SEQ ID NO: 1199457 - DNA, 15 bp, Homo sapiens
aaatcacttaaattg

SEQ ID NO: 1199458 - DNA, 15 bp, Homo sapiens
gaaatcacttaaatt

SEQ ID NO: 1199459 - DNA, 15 bp, Homo sapiens
tgaaatcacttaaat

SEQ ID NO: 1199460 - DNA, 15 bp, Homo sapiens
ttgaaatcacttaaa

SEQ ID NO: 1199461 - DNA, 15 bp, Homo sapiens
tttgaaatcacttaa

SEQ ID NO: 1199462 - DNA, 15 bp, Homo sapiens
ttttgaaatcactta

SEQ ID NO: 1199463 - DNA, 15 bp, Homo sapiens
tttttgaaatcactt

SEQ ID NO: 1199464 - DNA, 15 bp, Homo sapiens
atttttgaaatcact

SEQ ID NO: 1199465 - DNA, 15 bp, Homo sapiens
aatttttgaaatcac

SEQ ID NO: 1199466 - DNA, 15 bp, Homo sapiens
taatttttgaaatca

SEQ ID NO: 1199467 - DNA, 15 bp, Homo sapiens
ttaatttttgaaatc

SEQ ID NO: 1199468 - DNA, 15 bp, Homo sapiens
gttaatttttgaaat

SEQ ID NO: 1199469 - DNA, 15 bp, Homo sapiens
tgttaatttttgaaa

SEQ ID NO: 1199470 - DNA, 15 bp, Homo sapiens
atgttaatttttgaa

SEQ ID NO: 1199471 - DNA, 15 bp, Homo sapiens
tatgttaatttttga

SEQ ID NO: 1199472 - DNA, 15 bp, Homo sapiens
atatgttaatttttg

SEQ ID NO: 1199473 - DNA, 15 bp, Homo sapiens
tatatgttaattttt

SEQ ID NO: 1199474 - DNA, 15 bp, Homo sapiens
ctatatgttaatttt

SEQ ID NO: 1199475 - DNA, 15 bp, Homo sapiens
gctatatgttaattt

SEQ ID NO: 1199476 - DNA, 15 bp, Homo sapiens
tgctatatgttaatt

SEQ ID NO: 1199477 - DNA, 15 bp, Homo sapiens
atgctatatgttaat

SEQ ID NO: 1199478 - DNA, 15 bp, Homo sapiens
tatgctatatgttaa

SEQ ID NO: 1199479 - DNA, 15 bp, Homo sapiens
ttatgctatatgtta

SEQ ID NO: 1199480 - DNA, 15 bp, Homo sapiens
tttatgctatatgtt

SEQ ID NO: 1199481 - DNA, 15 bp, Homo sapiens
atttatgctatatgt

SEQ ID NO: 1199482 - DNA, 15 bp, Homo sapiens
tatttatgctatatg

SEQ ID NO: 1199483 - DNA, 15 bp, Homo sapiens
ttatttatgctatat

SEQ ID NO: 1199484 - DNA, 15 bp, Homo sapiens
tttatttatgctata

SEQ ID NO: 1199485 - DNA, 15 bp, Homo sapiens
gtttatttatgctat

SEQ ID NO: 1199486 - DNA, 15 bp, Homo sapiens
tgtttatttatgcta

SEQ ID NO: 1199487 - DNA, 15 bp, Homo sapiens
atgtttatttatgct

SEQ ID NO: 1199488 - DNA, 15 bp, Homo sapiens
aatgtttatttatgc

SEQ ID NO: 1199489 - DNA, 15 bp, Homo sapiens
aaatgtttatttatg

SEQ ID NO: 1199490 - DNA, 15 bp, Homo sapiens
aaaatgtttatttat

SEQ ID NO: 1199491 - DNA, 15 bp, Homo sapiens
taaaatgtttattta

SEQ ID NO: 1199492 - DNA, 15 bp, Homo sapiens
ataaaatgtttattt

SEQ ID NO: 1199493 - DNA, 15 bp, Homo sapiens
tataaaatgtttatt

SEQ ID NO: 1199494 - DNA, 15 bp, Homo sapiens
ctataaaatgtttat

SEQ ID NO: 1199495 - DNA, 15 bp, Homo sapiens
cctataaaatgttta

SEQ ID NO: 1199496 - DNA, 15 bp, Homo sapiens
tcctataaaatgttt

SEQ ID NO: 1199497 - DNA, 15 bp, Homo sapiens
ttcctataaaatgtt

SEQ ID NO: 1199498 - DNA, 15 bp, Homo sapiens
tttcctataaaatgt

SEQ ID NO: 1199499 - DNA, 15 bp, Homo sapiens
ttttcctataaaatg

SEQ ID NO: 1199500 - DNA, 15 bp, Homo sapiens
tttttcctataaaat

SEQ ID NO: 1199501 - DNA, 15 bp, Homo sapiens
ttttttcctataaaa

SEQ ID NO: 1199502 - DNA, 15 bp, Homo sapiens
ctttttttcctataa

SEQ ID NO: 1199503 - DNA, 15 bp, Homo sapiens
actttttttcctata

SEQ ID NO: 1199504 - DNA, 15 bp, Homo sapiens
cactttttttcctat

SEQ ID NO: 1199505 - DNA, 15 bp, Homo sapiens
tcactttttttccta

SEQ ID NO: 1199506 - DNA, 15 bp, Homo sapiens
gtcactttttttcct

SEQ ID NO: 1199507 - DNA, 15 bp, Homo sapiens
tgtcactttttttcc

SEQ ID NO: 1199508 - DNA, 15 bp, Homo sapiens
ctgtcactttttttc

SEQ ID NO: 1199509 - DNA, 15 bp, Homo sapiens
tctgtcacttttttt

SEQ ID NO: 1199510 - DNA, 15 bp, Homo sapiens
gtctgtcactttttt

SEQ ID NO: 1199511 - DNA, 15 bp, Homo sapiens
ggtctgtcacttttt

SEQ ID NO: 1199512 - DNA, 15 bp, Homo sapiens
gggtctgtcactttt

SEQ ID NO: 1199513 - DNA, 15 bp, Homo sapiens
agggtctgtcacttt

SEQ ID NO: 1199514 - DNA, 15 bp, Homo sapiens
tagggtctgtcactt

SEQ ID NO: 1199515 - DNA, 15 bp, Homo sapiens
atagggtctgtcact

SEQ ID NO: 1199516 - DNA, 15 bp, Homo sapiens
aatagggtctgtcac

SEQ ID NO: 1199517 - DNA, 15 bp, Homo sapiens
taatagggtctgtca

SEQ ID NO: 1199518 - DNA, 15 bp, Homo sapiens
gtaatagggtctgtc

SEQ ID NO: 1199519 - DNA, 15 bp, Homo sapiens
ggtaatagggtctgt

SEQ ID NO: 1199520 - DNA, 15 bp, Homo sapiens
aggtaatagggtctg

SEQ ID NO: 1199521 - DNA, 15 bp, Homo sapiens
aaggtaatagggtct

SEQ ID NO: 1199522 - DNA, 15 bp, Homo sapiens
taaggtaatagggtc

SEQ ID NO: 1199523 - DNA, 15 bp, Homo sapiens
ttaaggtaatagggt

SEQ ID NO: 1199524 - DNA, 15 bp, Homo sapiens
tttaaggtaataggg

SEQ ID NO: 1199525 - DNA, 15 bp, Homo sapiens
atttaaggtaatagg

SEQ ID NO: 1199526 - DNA, 15 bp, Homo sapiens
gatttaaggtaatag

SEQ ID NO: 1199527 - DNA, 15 bp, Homo sapiens
tgatttaaggtaata

SEQ ID NO: 1199528 - DNA, 15 bp, Homo sapiens
ttgatttaaggtaat

SEQ ID NO: 1199529 - DNA, 15 bp, Homo sapiens
tttgatttaaggtaa

SEQ ID NO: 1199530 - DNA, 15 bp, Homo sapiens
ttttgatttaaggta

SEQ ID NO: 1199531 - DNA, 15 bp, Homo sapiens
gttttgatttaaggt

SEQ ID NO: 1199532 - DNA, 15 bp, Homo sapiens
ggttttgatttaagg

SEQ ID NO: 1199533 - DNA, 15 bp, Homo sapiens
tggttttgatttaag

SEQ ID NO: 1199534 - DNA, 15 bp, Homo sapiens
ttggttttgatttaa

SEQ ID NO: 1199535 - DNA, 15 bp, Homo sapiens
cttggttttgattta

SEQ ID NO: 1199536 - DNA, 15 bp, Homo sapiens
tcttggttttgattt

SEQ ID NO: 1199537 - DNA, 15 bp, Homo sapiens
ctcttggttttgatt

SEQ ID NO: 1199538 - DNA, 15 bp, Homo sapiens
tctcttggttttgat

SEQ ID NO: 1199539 - DNA, 15 bp, Homo sapiens
ttctcttggttttga

SEQ ID NO: 1199540 - DNA, 15 bp, Homo sapiens
cttctcttggttttg

SEQ ID NO: 1199541 - DNA, 15 bp, Homo sapiens
acttctcttggtttt

SEQ ID NO: 1199542 - DNA, 15 bp, Homo sapiens
tacttctcttggttt

SEQ ID NO: 1199543 - DNA, 15 bp, Homo sapiens
ctacttctcttggtt

SEQ ID NO: 1199544 - DNA, 15 bp, Homo sapiens
gctacttctcttggt

SEQ ID NO: 1199545 - DNA, 15 bp, Homo sapiens
tgctacttctcttgg

SEQ ID NO: 1199546 - DNA, 15 bp, Homo sapiens
ttgctacttctcttg

SEQ ID NO: 1199547 - DNA, 15 bp, Homo sapiens
cttgctacttctctt

SEQ ID NO: 1199548 - DNA, 15 bp, Homo sapiens
ccttgctacttctct

SEQ ID NO: 1199549 - DNA, 15 bp, Homo sapiens
gccttgctacttctc

SEQ ID NO: 1199550 - DNA, 15 bp, Homo sapiens
agccttgctacttct

SEQ ID NO: 1199551 - DNA, 15 bp, Homo sapiens
tagccttgctacttc

SEQ ID NO: 1199552 - DNA, 15 bp, Homo sapiens
ttagccttgctactt

SEQ ID NO: 1199553 - DNA, 15 bp, Homo sapiens
cttagccttgctact

SEQ ID NO: 1199554 - DNA, 15 bp, Homo sapiens
tcttagccttgctac

SEQ ID NO: 1199555 - DNA, 15 bp, Homo sapiens
ttcttagccttgcta

SEQ ID NO: 1199556 - DNA, 15 bp, Homo sapiens
cttcttagccttgct

SEQ ID NO: 1199557 - DNA, 15 bp, Homo sapiens
tcttcttagccttgc

SEQ ID NO: 1199558 - DNA, 15 bp, Homo sapiens
atcttcttagccttg

SEQ ID NO: 1199559 - DNA, 15 bp, Homo sapiens
tatcttcttagcctt

SEQ ID NO: 1199560 - DNA, 15 bp, Homo sapiens
gtatcttcttagcct

SEQ ID NO: 1199561 - DNA, 15 bp, Homo sapiens
tgtatcttcttagcc

SEQ ID NO: 1199562 - DNA, 15 bp, Homo sapiens
atgtatcttcttagc

SEQ ID NO: 1199563 - DNA, 15 bp, Homo sapiens
tatgtatcttcttag

SEQ ID NO: 1199564 - DNA, 15 bp, Homo sapiens
gtatgtatcttctta

SEQ ID NO: 1199565 - DNA, 15 bp, Homo sapiens
ggtatgtatcttctt

SEQ ID NO: 1199566 - DNA, 15 bp, Homo sapiens
tggtatgtatcttct

SEQ ID NO: 1199567 - DNA, 15 bp, Homo sapiens
ttggtatgtatcttc

SEQ ID NO: 1199568 - DNA, 15 bp, Homo sapiens
tttggtatgtatctt

SEQ ID NO: 1199569 - DNA, 15 bp, Homo sapiens
ttttggtatgtatct

SEQ ID NO: 1199570 - DNA, 15 bp, Homo sapiens
attttggtatgtatc

SEQ ID NO: 1199571 - DNA, 15 bp, Homo sapiens
aattttggtatgtat

SEQ ID NO: 1199572 - DNA, 15 bp, Homo sapiens
aaattttggtatgta

SEQ ID NO: 1199573 - DNA, 15 bp, Homo sapiens
aaaattttggtatgt

SEQ ID NO: 1199574 - DNA, 15 bp, Homo sapiens
gaaaattttggtatg

SEQ ID NO: 1199575 - DNA, 15 bp, Homo sapiens
tgaaaattttggtat

SEQ ID NO: 1199576 - DNA, 15 bp, Homo sapiens
ttgaaaattttggta

SEQ ID NO: 1199577 - DNA, 15 bp, Homo sapiens
attgaaaattttggt

SEQ ID NO: 1199578 - DNA, 15 bp, Homo sapiens
aattgaaaattttgg

SEQ ID NO: 1199579 - DNA, 15 bp, Homo sapiens
gaattgaaaattttg

SEQ ID NO: 1199580 - DNA, 15 bp, Homo sapiens
ggaattgaaaatttt

SEQ ID NO: 1199581 - DNA, 15 bp, Homo sapiens
tggaattgaaaattt

SEQ ID NO: 1199582 - DNA, 15 bp, Homo sapiens
atggaattgaaaatt

SEQ ID NO: 1199583 - DNA, 15 bp, Homo sapiens
aatggaattgaaaat

SEQ ID NO: 1199584 - DNA, 15 bp, Homo sapiens
aaatggaattgaaaa

SEQ ID NO: 1199585 - DNA, 15 bp, Homo sapiens
gaaatggaattgaaa

SEQ ID NO: 1199586 - DNA, 15 bp, Homo sapiens
tgaaatggaattgaa

SEQ ID NO: 1199587 - DNA, 15 bp, Homo sapiens
ttgaaatggaattga

SEQ ID NO: 1199588 - DNA, 15 bp, Homo sapiens
tttgaaatggaattg

SEQ ID NO: 1199589 - DNA, 15 bp, Homo sapiens
atttgaaatggaatt

SEQ ID NO: 1199590 - DNA, 15 bp, Homo sapiens
gatttgaaatggaat

SEQ ID NO: 1199591 - DNA, 15 bp, Homo sapiens
tgatttgaaatggaa

SEQ ID NO: 1199592 - DNA, 15 bp, Homo sapiens
ctgatttgaaatgga

SEQ ID NO: 1199593 - DNA, 15 bp, Homo sapiens
actgatttgaaatgg

SEQ ID NO: 1199594 - DNA, 15 bp, Homo sapiens
tactgatttgaaatg

SEQ ID NO: 1199595 - DNA, 15 bp, Homo sapiens
ttactgatttgaaat

SEQ ID NO: 1199596 - DNA, 15 bp, Homo sapiens
tttactgatttgaaa

SEQ ID NO: 1199597 - DNA, 15 bp, Homo sapiens
ttttactgatttgaa

SEQ ID NO: 1199598 - DNA, 15 bp, Homo sapiens
cttttactgatttga

SEQ ID NO: 1199599 - DNA, 15 bp, Homo sapiens
tcttttactgatttg

SEQ ID NO: 1199600 - DNA, 15 bp, Homo sapiens
ttcttttactgattt

SEQ ID NO: 1199601 - DNA, 15 bp, Homo sapiens
tttcttttactgatt

SEQ ID NO: 1199602 - DNA, 15 bp, Homo sapiens
ctttcttttactgat

SEQ ID NO: 1199603 - DNA, 15 bp, Homo sapiens
actttcttttactga

SEQ ID NO: 1199604 - DNA, 15 bp, Homo sapiens
cactttcttttactg

SEQ ID NO: 1199605 - DNA, 15 bp, Homo sapiens
tcactttcttttact

SEQ ID NO: 1199606 - DNA, 15 bp, Homo sapiens
atcactttcttttac

SEQ ID NO: 1199607 - DNA, 15 bp, Homo sapiens
tatcactttctttta

SEQ ID NO: 1199608 - DNA, 15 bp, Homo sapiens
ctatcactttctttt

SEQ ID NO: 1199609 - DNA, 15 bp, Homo sapiens
actatcactttcttt

SEQ ID NO: 1199610 - DNA, 15 bp, Homo sapiens
tactatcactttctt

SEQ ID NO: 1199611 - DNA, 15 bp, Homo sapiens
ctactatcactttct

SEQ ID NO: 1199612 - DNA, 15 bp, Homo sapiens
tctactatcactttc

SEQ ID NO: 1199613 - DNA, 15 bp, Homo sapiens
ctctactatcacttt

SEQ ID NO: 1199614 - DNA, 15 bp, Homo sapiens
cctctactatcactt

SEQ ID NO: 1199615 - DNA, 15 bp, Homo sapiens
ccctctactatcact

SEQ ID NO: 1199616 - DNA, 15 bp, Homo sapiens
tccctctactatcac

SEQ ID NO: 1199617 - DNA, 15 bp, Homo sapiens
ttccctctactatca

SEQ ID NO: 1199618 - DNA, 15 bp, Homo sapiens
cttccctctactatc

SEQ ID NO: 1199619 - DNA, 15 bp, Homo sapiens
gcttccctctactat

SEQ ID NO: 1199620 - DNA, 15 bp, Homo sapiens
agcttccctctacta

SEQ ID NO: 1199621 - DNA, 15 bp, Homo sapiens
tagcttccctctact

SEQ ID NO: 1199622 - DNA, 15 bp, Homo sapiens
gtagcttccctctac

SEQ ID NO: 1199623 - DNA, 15 bp, Homo sapiens
agtagcttccctcta

SEQ ID NO: 1199624 - DNA, 15 bp, Homo sapiens
cagtagcttccctct

SEQ ID NO: 1199625 - DNA, 15 bp, Homo sapiens
tcagtagcttccctc

SEQ ID NO: 1199626 - DNA, 15 bp, Homo sapiens
ttcagtagcttccct

SEQ ID NO: 1199627 - DNA, 15 bp, Homo sapiens
cttcagtagcttccc

SEQ ID NO: 1199628 - DNA, 15 bp, Homo sapiens
acttcagtagcttcc

SEQ ID NO: 1199629 - DNA, 15 bp, Homo sapiens
cacttcagtagcttc

SEQ ID NO: 1199630 - DNA, 15 bp, Homo sapiens
acacttcagtagctt

SEQ ID NO: 1199631 - DNA, 15 bp, Homo sapiens
cacacttcagtagct

SEQ ID NO: 1199632 - DNA, 15 bp, Homo sapiens
ccacacttcagtagc

SEQ ID NO: 1199633 - DNA, 15 bp, Homo sapiens
cccacacttcagtag

SEQ ID NO: 1199634 - DNA, 15 bp, Homo sapiens
tcccacacttcagta

SEQ ID NO: 1199635 - DNA, 15 bp, Homo sapiens
ttcccacacttcagt

SEQ ID NO: 1199636 - DNA, 15 bp, Homo sapiens
tttcccacacttcag

SEQ ID NO: 1199637 - DNA, 15 bp, Homo sapiens
ctttcccacacttca

SEQ ID NO: 1199638 - DNA, 15 bp, Homo sapiens
cctttcccacacttc

SEQ ID NO: 1199639 - DNA, 15 bp, Homo sapiens
tcctttcccacactt

SEQ ID NO: 1199640 - DNA, 15 bp, Homo sapiens
ttcctttcccacact

SEQ ID NO: 1199641 - DNA, 15 bp, Homo sapiens
cttcctttcccacac

SEQ ID NO: 1199642 - DNA, 15 bp, Homo sapiens
acttcctttcccaca

SEQ ID NO: 1199643 - DNA, 15 bp, Homo sapiens
tacttcctttcccac

SEQ ID NO: 1199644 - DNA, 15 bp, Homo sapiens
ttacttcctttccca

SEQ ID NO: 1199645 - DNA, 15 bp, Homo sapiens
tttacttcctttccc

SEQ ID NO: 1199646 - DNA, 15 bp, Homo sapiens
ttttacttcctttcc

SEQ ID NO: 1199647 - DNA, 15 bp, Homo sapiens
cttttacttcctttc

SEQ ID NO: 1199648 - DNA, 15 bp, Homo sapiens
tcttttacttccttt

SEQ ID NO: 1199649 - DNA, 15 bp, Homo sapiens
ttcttttacttcctt

SEQ ID NO: 1199650 - DNA, 15 bp, Homo sapiens
tttcttttacttcct

SEQ ID NO: 1199651 - DNA, 15 bp, Homo sapiens
atttcttttacttcc

SEQ ID NO: 1199652 - DNA, 15 bp, Homo sapiens
gatttcttttacttc

SEQ ID NO: 1199653 - DNA, 15 bp, Homo sapiens
tgatttcttttactt

SEQ ID NO: 1199654 - DNA, 15 bp, Homo sapiens
ctgatttcttttact

SEQ ID NO: 1199655 - DNA, 15 bp, Homo sapiens
cctgatttcttttac

SEQ ID NO: 1199656 - DNA, 15 bp, Homo sapiens
ccctgatttctttta

SEQ ID NO: 1199657 - DNA, 15 bp, Homo sapiens
tccctgatttctttt

SEQ ID NO: 1199658 - DNA, 15 bp, Homo sapiens
ctccctgatttcttt

SEQ ID NO: 1199659 - DNA, 15 bp, Homo sapiens
gctccctgatttctt

SEQ ID NO: 1199660 - DNA, 15 bp, Homo sapiens
agctccctgatttct

SEQ ID NO: 1199661 - DNA, 15 bp, Homo sapiens
tagctccctgatttc

SEQ ID NO: 1199662 - DNA, 15 bp, Homo sapiens
ctagctccctgattt

SEQ ID NO: 1199663 - DNA, 15 bp, Homo sapiens
actagctccctgatt

SEQ ID NO: 1199664 - DNA, 15 bp, Homo sapiens
tactagctccctgat

SEQ ID NO: 1199665 - DNA, 15 bp, Homo sapiens
atactagctccctga

SEQ ID NO: 1199666 - DNA, 15 bp, Homo sapiens
tatactagctccctg

SEQ ID NO: 1199667 - DNA, 15 bp, Homo sapiens
ttatactagctccct

SEQ ID NO: 1199668 - DNA, 15 bp, Homo sapiens
attatactagctccc

SEQ ID NO: 1199669 - DNA, 15 bp, Homo sapiens
tattatactagctcc

SEQ ID NO: 1199670 - DNA, 15 bp, Homo sapiens
atattatactagctc

SEQ ID NO: 1199671 - DNA, 15 bp, Homo sapiens
aatattatactagct

SEQ ID NO: 1199672 - DNA, 15 bp, Homo sapiens
taatattatactagc

SEQ ID NO: 1199673 - DNA, 15 bp, Homo sapiens
ataatattatactag

SEQ ID NO: 1199674 - DNA, 15 bp, Homo sapiens
gataatattatacta

SEQ ID NO: 1199675 - DNA, 15 bp, Homo sapiens
tgataatattatact

SEQ ID NO: 1199676 - DNA, 15 bp, Homo sapiens
atgataatattatac

SEQ ID NO: 1199677 - DNA, 15 bp, Homo sapiens
aatgataatattata

SEQ ID NO: 1199678 - DNA, 15 bp, Homo sapiens
taatgataatattat

SEQ ID NO: 1199679 - DNA, 15 bp, Homo sapiens
ataatgataatatta

SEQ ID NO: 1199680 - DNA, 15 bp, Homo sapiens
aataatgataatatt

SEQ ID NO: 1199681 - DNA, 15 bp, Homo sapiens
aaataatgataatat

SEQ ID NO: 1199682 - DNA, 15 bp, Homo sapiens
aaaataatgataata

SEQ ID NO: 1199683 - DNA, 15 bp, Homo sapiens
taaaataatgataat

SEQ ID NO: 1199684 - DNA, 15 bp, Homo sapiens
ataaaataatgataa

SEQ ID NO: 1199685 - DNA, 15 bp, Homo sapiens
aataaaataatgata

SEQ ID NO: 1199686 - DNA, 15 bp, Homo sapiens
gaataaaataatgat

SEQ ID NO: 1199687 - DNA, 15 bp, Homo sapiens
ggaataaaataatga

SEQ ID NO: 1199688 - DNA, 15 bp, Homo sapiens
tggaataaaataatg

SEQ ID NO: 1199689 - DNA, 15 bp, Homo sapiens
ctggaataaaataat

SEQ ID NO: 1199690 - DNA, 15 bp, Homo sapiens
gctggaataaaataa

SEQ ID NO: 1199691 - DNA, 15 bp, Homo sapiens
ggctggaataaaata

SEQ ID NO: 1199692 - DNA, 15 bp, Homo sapiens
aggctggaataaaat

SEQ ID NO: 1199693 - DNA, 15 bp, Homo sapiens
gaggctggaataaaa

SEQ ID NO: 1199694 - DNA, 15 bp, Homo sapiens
tgaggctggaataaa

SEQ ID NO: 1199695 - DNA, 15 bp, Homo sapiens
ttgaggctggaataa

SEQ ID NO: 1199696 - DNA, 15 bp, Homo sapiens
tttgaggctggaata

SEQ ID NO: 1199697 - DNA, 15 bp, Homo sapiens
gtttgaggctggaat

SEQ ID NO: 1199698 - DNA, 15 bp, Homo sapiens
agtttgaggctggaa

SEQ ID NO: 1199699 - DNA, 15 bp, Homo sapiens
tagtttgaggctgga

SEQ ID NO: 1199700 - DNA, 15 bp, Homo sapiens
ttagtttgaggctgg

SEQ ID NO: 1199701 - DNA, 15 bp, Homo sapiens
tttagtttgaggctg

SEQ ID NO: 1199702 - DNA, 15 bp, Homo sapiens
atttagtttgaggct

SEQ ID NO: 1199703 - DNA, 15 bp, Homo sapiens
catttagtttgaggc

SEQ ID NO: 1199704 - DNA, 15 bp, Homo sapiens
acatttagtttgagg

SEQ ID NO: 1199705 - DNA, 15 bp, Homo sapiens
aacatttagtttgag

SEQ ID NO: 1199706 - DNA, 15 bp, Homo sapiens
taacatttagtttga

SEQ ID NO: 1199707 - DNA, 15 bp, Homo sapiens
ataacatttagtttg

SEQ ID NO: 1199708 - DNA, 15 bp, Homo sapiens
cataacatttagttt

SEQ ID NO: 1199709 - DNA, 15 bp, Homo sapiens
acataacatttagtt

SEQ ID NO: 1199710 - DNA, 15 bp, Homo sapiens
tacataacatttagt

SEQ ID NO: 1199711 - DNA, 15 bp, Homo sapiens
ttacataacatttag

SEQ ID NO: 1199712 - DNA, 15 bp, Homo sapiens
gttacataacattta

SEQ ID NO: 1199713 - DNA, 15 bp, Homo sapiens
tgttacataacattt

SEQ ID NO: 1199714 - DNA, 15 bp, Homo sapiens
atgttacataacatt

SEQ ID NO: 1199715 - DNA, 15 bp, Homo sapiens
aatgttacataacat

SEQ ID NO: 1199716 - DNA, 15 bp, Homo sapiens
aaatgttacataaca

SEQ ID NO: 1199717 - DNA, 15 bp, Homo sapiens
aaaatgttacataac

SEQ ID NO: 1199718 - DNA, 15 bp, Homo sapiens
caaaatgttacataa

SEQ ID NO: 1199719 - DNA, 15 bp, Homo sapiens
ccaaaatgttacata

SEQ ID NO: 1199720 - DNA, 15 bp, Homo sapiens
accaaaatgttacat

SEQ ID NO: 1199721 - DNA, 15 bp, Homo sapiens
aaccaaaatgttaca

SEQ ID NO: 1199722 - DNA, 15 bp, Homo sapiens
caaccaaaatgttac

SEQ ID NO: 1199723 - DNA, 15 bp, Homo sapiens
acaaccaaaatgtta

SEQ ID NO: 1199724 - DNA, 15 bp, Homo sapiens
tacaaccaaaatgtt

SEQ ID NO: 1199725 - DNA, 15 bp, Homo sapiens
ttacaaccaaaatgt

SEQ ID NO: 1199726 - DNA, 15 bp, Homo sapiens
tttacaaccaaaatg

SEQ ID NO: 1199727 - DNA, 15 bp, Homo sapiens
ttttacaaccaaaat

SEQ ID NO: 1199728 - DNA, 15 bp, Homo sapiens
attttacaaccaaaa

SEQ ID NO: 1199729 - DNA, 15 bp, Homo sapiens
aattttacaaccaaa

SEQ ID NO: 1199730 - DNA, 15 bp, Homo sapiens
aaattttacaaccaa

SEQ ID NO: 1199731 - DNA, 15 bp, Homo sapiens
taaattttacaacca

SEQ ID NO: 1199732 - DNA, 15 bp, Homo sapiens
ttaaattttacaacc

SEQ ID NO: 1199733 - DNA, 15 bp, Homo sapiens
cttaaattttacaac

SEQ ID NO: 1199734 - DNA, 15 bp, Homo sapiens
tcttaaattttacaa

SEQ ID NO: 1199735 - DNA, 15 bp, Homo sapiens
ttcttaaattttaca

SEQ ID NO: 1199736 - DNA, 15 bp, Homo sapiens
tttcttaaattttac

SEQ ID NO: 1199737 - DNA, 15 bp, Homo sapiens
atttcttaaatttta

SEQ ID NO: 1199738 - DNA, 15 bp, Homo sapiens
tatttcttaaatttt

SEQ ID NO: 1199739 - DNA, 15 bp, Homo sapiens
atatttcttaaattt

SEQ ID NO: 1199740 - DNA, 15 bp, Homo sapiens
aatatttcttaaatt

SEQ ID NO: 1199741 - DNA, 15 bp, Homo sapiens
taaatatttcttaaa

SEQ ID NO: 1199742 - DNA, 15 bp, Homo sapiens
ttaaatatttcttaa

SEQ ID NO: 1199743 - DNA, 15 bp, Homo sapiens
tttaaatatttctta

SEQ ID NO: 1199744 - DNA, 15 bp, Homo sapiens
ctttaaatatttctt

SEQ ID NO: 1199745 - DNA, 15 bp, Homo sapiens
tctttaaatatttct

SEQ ID NO: 1199746 - DNA, 15 bp, Homo sapiens
ttctttaaatatttc

SEQ ID NO: 1199747 - DNA, 15 bp, Homo sapiens
attctttaaatattt

SEQ ID NO: 1199748 - DNA, 15 bp, Homo sapiens
tattctttaaatatt

SEQ ID NO: 1199749 - DNA, 15 bp, Homo sapiens
atattctttaaatat

SEQ ID NO: 1199750 - DNA, 15 bp, Homo sapiens
tatattctttaaata

SEQ ID NO: 1199751 - DNA, 15 bp, Homo sapiens
ttatattctttaaat

SEQ ID NO: 1199752 - DNA, 15 bp, Homo sapiens
cttatattctttaaa

SEQ ID NO: 1199753 - DNA, 15 bp, Homo sapiens
tcttatattctttaa

SEQ ID NO: 1199754 - DNA, 15 bp, Homo sapiens
ttcttatattcttta

SEQ ID NO: 1199755 - DNA, 15 bp, Homo sapiens
cttcttatattcttt

SEQ ID NO: 1199756 - DNA, 15 bp, Homo sapiens
gcttcttatattctt

SEQ ID NO: 1199757 - DNA, 15 bp, Homo sapiens
tgcttcttatattct

SEQ ID NO: 1199758 - DNA, 15 bp, Homo sapiens
ctgcttcttatattc

SEQ ID NO: 1199759 - DNA, 15 bp, Homo sapiens
cctgcttcttatatt

SEQ ID NO: 1199760 - DNA, 15 bp, Homo sapiens
tcctgcttcttatat

SEQ ID NO: 1199761 - DNA, 15 bp, Homo sapiens
ttcctgcttcttata

SEQ ID NO: 1199762 - DNA, 15 bp, Homo sapiens
tttcctgcttcttat

SEQ ID NO: 1199763 - DNA, 15 bp, Homo sapiens
atttcctgcttctta

SEQ ID NO: 1199764 - DNA, 15 bp, Homo sapiens
tatttcctgcttctt

SEQ ID NO: 1199765 - DNA, 15 bp, Homo sapiens
ttatttcctgcttct

SEQ ID NO: 1199766 - DNA, 15 bp, Homo sapiens
attatttcctgcttc

SEQ ID NO: 1199767 - DNA, 15 bp, Homo sapiens
tattatttcctgctt

SEQ ID NO: 1199768 - DNA, 15 bp, Homo sapiens
atattatttcctgct

SEQ ID NO: 1199769 - DNA, 15 bp, Homo sapiens
catattatttcctgc

SEQ ID NO: 1199770 - DNA, 15 bp, Homo sapiens
tcatattatttcctg

SEQ ID NO: 1199771 - DNA, 15 bp, Homo sapiens
ttcatattatttcct

SEQ ID NO: 1199772 - DNA, 15 bp, Homo sapiens
tttcatattatttcc

SEQ ID NO: 1199773 - DNA, 15 bp, Homo sapiens
atttcatattatttc

SEQ ID NO: 1199774 - DNA, 15 bp, Homo sapiens
aatttcatattattt

SEQ ID NO: 1199775 - DNA, 15 bp, Homo sapiens
taatttcatattatt

SEQ ID NO: 1199776 - DNA, 15 bp, Homo sapiens
ataatttcatattat

SEQ ID NO: 1199777 - DNA, 15 bp, Homo sapiens
gataatttcatatta

SEQ ID NO: 1199778 - DNA, 15 bp, Homo sapiens
ggataatttcatatt

SEQ ID NO: 1199779 - DNA, 15 bp, Homo sapiens
gggataatttcatat

SEQ ID NO: 1199780 - DNA, 15 bp, Homo sapiens
ggggataatttcata

SEQ ID NO: 1199781 - DNA, 15 bp, Homo sapiens
aggggataatttcat

SEQ ID NO: 1199782 - DNA, 15 bp, Homo sapiens
aaggggataatttca

SEQ ID NO: 1199783 - DNA, 15 bp, Homo sapiens
aaaggggataatttc

SEQ ID NO: 1199784 - DNA, 15 bp, Homo sapiens
taaaggggataattt

SEQ ID NO: 1199785 - DNA, 15 bp, Homo sapiens
ataaaggggataatt

SEQ ID NO: 1199786 - DNA, 15 bp, Homo sapiens
cataaaggggataat

SEQ ID NO: 1199787 - DNA, 15 bp, Homo sapiens
acataaaggggataa

SEQ ID NO: 1199788 - DNA, 15 bp, Homo sapiens
aacataaaggggata

SEQ ID NO: 1199789 - DNA, 15 bp, Homo sapiens
caacataaaggggat

SEQ ID NO: 1199790 - DNA, 15 bp, Homo sapiens
tcaacataaagggga

SEQ ID NO: 1199791 - DNA, 15 bp, Homo sapiens
ctcaacataaagggg

SEQ ID NO: 1199792 - DNA, 15 bp, Homo sapiens
actcaacataaaggg

SEQ ID NO: 1199793 - DNA, 15 bp, Homo sapiens
gactcaacataaagg

SEQ ID NO: 1199794 - DNA, 15 bp, Homo sapiens
agactcaacataaag

SEQ ID NO: 1199795 - DNA, 15 bp, Homo sapiens
aagactcaacataaa

SEQ ID NO: 1199796 - DNA, 15 bp, Homo sapiens
caagactcaacataa

SEQ ID NO: 1199797 - DNA, 15 bp, Homo sapiens
tcaagactcaacata

SEQ ID NO: 1199798 - DNA, 15 bp, Homo sapiens
gtcaagactcaacat

SEQ ID NO: 1199799 - DNA, 15 bp, Homo sapiens
tgtcaagactcaaca

SEQ ID NO: 1199800 - DNA, 15 bp, Homo sapiens
ttgtcaagactcaac

SEQ ID NO: 1199801 - DNA, 15 bp, Homo sapiens
tttgtcaagactcaa

SEQ ID NO: 1199802 - DNA, 15 bp, Homo sapiens
ttttgtcaagactca

SEQ ID NO: 1199803 - DNA, 15 bp, Homo sapiens
attttgtcaagactc

SEQ ID NO: 1199804 - DNA, 15 bp, Homo sapiens
tattttgtcaagact

SEQ ID NO: 1199805 - DNA, 15 bp, Homo sapiens
ttattttgtcaagac

SEQ ID NO: 1199806 - DNA, 15 bp, Homo sapiens
tttattttgtcaaga

SEQ ID NO: 1199807 - DNA, 15 bp, Homo sapiens
atttattttgtcaag

SEQ ID NO: 1199808 - DNA, 15 bp, Homo sapiens
tatttattttgtcaa

SEQ ID NO: 1199809 - DNA, 15 bp, Homo sapiens
ttatttattttgtca

SEQ ID NO: 1199810 - DNA, 15 bp, Homo sapiens
attatttattttgtc

SEQ ID NO: 1199811 - DNA, 15 bp, Homo sapiens
tattatttattttgt

SEQ ID NO: 1199812 - DNA, 15 bp, Homo sapiens
ttattatttattttg

SEQ ID NO: 1199813 - DNA, 15 bp, Homo sapiens
attattatttatttt

SEQ ID NO: 1199814 - DNA, 15 bp, Homo sapiens
tattattatttattt

SEQ ID NO: 1199815 - DNA, 15 bp, Homo sapiens
atattattatttatt

SEQ ID NO: 1199816 - DNA, 15 bp, Homo sapiens
aatattattatttat

SEQ ID NO: 1199817 - DNA, 15 bp, Homo sapiens
taatattattattta

SEQ ID NO: 1199818 - DNA, 15 bp, Homo sapiens
ttaatattattattt

SEQ ID NO: 1199819 - DNA, 15 bp, Homo sapiens
attaatattattatt

SEQ ID NO: 1199820 - DNA, 15 bp, Homo sapiens
tattaatattattat

SEQ ID NO: 1199821 - DNA, 15 bp, Homo sapiens
ttattaatattatta

SEQ ID NO: 1199822 - DNA, 15 bp, Homo sapiens
attattaatattatt

SEQ ID NO: 1199823 - DNA, 15 bp, Homo sapiens
aattattaatattat

SEQ ID NO: 1199824 - DNA, 15 bp, Homo sapiens
taattattaatatta

SEQ ID NO: 1199825 - DNA, 15 bp, Homo sapiens
ttaattattaatatt

SEQ ID NO: 1199826 - DNA, 15 bp, Homo sapiens
tttaattattaatat

SEQ ID NO: 1199827 - DNA, 15 bp, Homo sapiens
ttttaattattaata

SEQ ID NO: 1199828 - DNA, 15 bp, Homo sapiens
tttttaattattaat

SEQ ID NO: 1199829 - DNA, 15 bp, Homo sapiens
atttttaattattaa

SEQ ID NO: 1199830 - DNA, 15 bp, Homo sapiens
tatttttaattatta

SEQ ID NO: 1199831 - DNA, 15 bp, Homo sapiens
ttatttttaattatt

SEQ ID NO: 1199832 - DNA, 15 bp, Homo sapiens
attatttttaattat

SEQ ID NO: 1199833 - DNA, 15 bp, Homo sapiens
tattatttttaatta

SEQ ID NO: 1199834 - DNA, 15 bp, Homo sapiens
ttattatttttaatt

SEQ ID NO: 1199835 - DNA, 15 bp, Homo sapiens
attattatttttaat

SEQ ID NO: 1199836 - DNA, 15 bp, Homo sapiens
tattattatttttaa

SEQ ID NO: 1199837 - DNA, 15 bp, Homo sapiens
ttattattattttta

SEQ ID NO: 1199838 - DNA, 15 bp, Homo sapiens
attttattattattt

SEQ ID NO: 1199839 - DNA, 15 bp, Homo sapiens
tattttattattatt

SEQ ID NO: 1199840 - DNA, 15 bp, Homo sapiens
ttattttattattat

SEQ ID NO: 1199841 - DNA, 15 bp, Homo sapiens
tttattttattatta

SEQ ID NO: 1199842 - DNA, 15 bp, Homo sapiens
atttattttattatt

SEQ ID NO: 1199843 - DNA, 15 bp, Homo sapiens
tatttattttattat

SEQ ID NO: 1199844 - DNA, 15 bp, Homo sapiens
ttatttattttatta

SEQ ID NO: 1199845 - DNA, 15 bp, Homo sapiens
attatttattttatt

SEQ ID NO: 1199846 - DNA, 15 bp, Homo sapiens
tattatttattttat

SEQ ID NO: 1199847 - DNA, 15 bp, Homo sapiens
ttattatttatttta

SEQ ID NO: 1199848 - DNA, 15 bp, Homo sapiens
ttttattatttattt

SEQ ID NO: 1199849 - DNA, 15 bp, Homo sapiens
attttattatttatt

SEQ ID NO: 1199850 - DNA, 15 bp, Homo sapiens
tattttattatttat

SEQ ID NO: 1199851 - DNA, 15 bp, Homo sapiens
ttattttattattta

SEQ ID NO: 1199852 - DNA, 15 bp, Homo sapiens
tttatttattttatt

SEQ ID NO: 1199853 - DNA, 15 bp, Homo sapiens
ttttatttattttat

SEQ ID NO: 1199854 - DNA, 15 bp, Homo sapiens
attttatttatttta

SEQ ID NO: 1199855 - DNA, 15 bp, Homo sapiens
ttattattttattta

SEQ ID NO: 1199856 - DNA, 15 bp, Homo sapiens
attattattttattt

SEQ ID NO: 1199857 - DNA, 15 bp, Homo sapiens
tattattattttatt

SEQ ID NO: 1199858 - DNA, 15 bp, Homo sapiens
ttattattattttat

SEQ ID NO: 1199859 - DNA, 15 bp, Homo sapiens
taaattattattatt

SEQ ID NO: 1199860 - DNA, 15 bp, Homo sapiens
ttaaattattattat

SEQ ID NO: 1199861 - DNA, 15 bp, Homo sapiens
tttaaattattatta

SEQ ID NO: 1199862 - DNA, 15 bp, Homo sapiens
ttttaaattattatt

SEQ ID NO: 1199863 - DNA, 15 bp, Homo sapiens
tttttaaattattat

SEQ ID NO: 1199864 - DNA, 15 bp, Homo sapiens
ctttttaaattatta

SEQ ID NO: 1199865 - DNA, 15 bp, Homo sapiens
tctttttaaattatt

SEQ ID NO: 1199866 - DNA, 15 bp, Homo sapiens
ttctttttaaattat

SEQ ID NO: 1199867 - DNA, 15 bp, Homo sapiens
atttctttttaaatt

SEQ ID NO: 1199868 - DNA, 15 bp, Homo sapiens
aatttctttttaaat

SEQ ID NO: 1199869 - DNA, 15 bp, Homo sapiens
taatttctttttaaa

SEQ ID NO: 1199870 - DNA, 15 bp, Homo sapiens
ataatttctttttaa

SEQ ID NO: 1199871 - DNA, 15 bp, Homo sapiens
gataatttcttttta

SEQ ID NO: 1199872 - DNA, 15 bp, Homo sapiens
ggataatttcttttt

SEQ ID NO: 1199873 - DNA, 15 bp, Homo sapiens
gggataatttctttt

SEQ ID NO: 1199874 - DNA, 15 bp, Homo sapiens
agggataatttcttt

SEQ ID NO: 1199875 - DNA, 15 bp, Homo sapiens
aagggataatttctt

SEQ ID NO: 1199876 - DNA, 15 bp, Homo sapiens
aaagggataatttct

SEQ ID NO: 1199877 - DNA, 15 bp, Homo sapiens
taaagggataatttc

SEQ ID NO: 1199878 - DNA, 15 bp, Homo sapiens
ttaaagggataattt

SEQ ID NO: 1199879 - DNA, 15 bp, Homo sapiens
cttaaagggataatt

SEQ ID NO: 1199880 - DNA, 15 bp, Homo sapiens
tcttaaagggataat

SEQ ID NO: 1199881 - DNA, 15 bp, Homo sapiens
ttcttaaagggataa

SEQ ID NO: 1199882 - DNA, 15 bp, Homo sapiens
tttcttaaagggata

SEQ ID NO: 1199883 - DNA, 15 bp, Homo sapiens
ttttcttaaagggat

SEQ ID NO: 1199884 - DNA, 15 bp, Homo sapiens
cttttcttaaaggga

SEQ ID NO: 1199885 - DNA, 15 bp, Homo sapiens
gcttttcttaaaggg

SEQ ID NO: 1199886 - DNA, 15 bp, Homo sapiens
ggcttttcttaaagg

SEQ ID NO: 1199887 - DNA, 15 bp, Homo sapiens
tggcttttcttaaag

SEQ ID NO: 1199888 - DNA, 15 bp, Homo sapiens
atggcttttcttaaa

SEQ ID NO: 1199889 - DNA, 15 bp, Homo sapiens
gatggcttttcttaa

SEQ ID NO: 1199890 - DNA, 15 bp, Homo sapiens
agatggcttttctta

SEQ ID NO: 1199891 - DNA, 15 bp, Homo sapiens
cagatggcttttctt

SEQ ID NO: 1199892 - DNA, 15 bp, Homo sapiens
ccagatggcttttct

SEQ ID NO: 1199893 - DNA, 15 bp, Homo sapiens
cccagatggcttttc

SEQ ID NO: 1199894 - DNA, 15 bp, Homo sapiens
acccagatggctttt

SEQ ID NO: 1199895 - DNA, 15 bp, Homo sapiens
gacccagatggcttt

SEQ ID NO: 1199896 - DNA, 15 bp, Homo sapiens
tgacccagatggctt

SEQ ID NO: 1199897 - DNA, 15 bp, Homo sapiens
gtgacccagatggct

SEQ ID NO: 1199898 - DNA, 15 bp, Homo sapiens
agtgacccagatggc

SEQ ID NO: 1199899 - DNA, 15 bp, Homo sapiens
aagtgacccagatgg

SEQ ID NO: 1199900 - DNA, 15 bp, Homo sapiens
aaagtgacccagatg

SEQ ID NO: 1199901 - DNA, 15 bp, Homo sapiens
gaaagtgacccagat

SEQ ID NO: 1199902 - DNA, 15 bp, Homo sapiens
ggaaagtgacccaga

SEQ ID NO: 1199903 - DNA, 15 bp, Homo sapiens
aggaaagtgacccag

SEQ ID NO: 1199904 - DNA, 15 bp, Homo sapiens
caggaaagtgaccca

SEQ ID NO: 1199905 - DNA, 15 bp, Homo sapiens
ccaggaaagtgaccc

SEQ ID NO: 1199906 - DNA, 15 bp, Homo sapiens
accaggaaagtgacc

SEQ ID NO: 1199907 - DNA, 15 bp, Homo sapiens
gaccaggaaagtgac

SEQ ID NO: 1199908 - DNA, 15 bp, Homo sapiens
tgaccaggaaagtga

SEQ ID NO: 1199909 - DNA, 15 bp, Homo sapiens
ttgaccaggaaagtg

SEQ ID NO: 1199910 - DNA, 15 bp, Homo sapiens
cttgaccaggaaagt

SEQ ID NO: 1199911 - DNA, 15 bp, Homo sapiens
tcttgaccaggaaag

SEQ ID NO: 1199912 - DNA, 15 bp, Homo sapiens
gtcttgaccaggaaa

SEQ ID NO: 1199913 - DNA, 15 bp, Homo sapiens
tgtcttgaccaggaa

SEQ ID NO: 1199914 - DNA, 15 bp, Homo sapiens
gtgtcttgaccagga

SEQ ID NO: 1199915 - DNA, 15 bp, Homo sapiens
tgtgtcttgaccagg

SEQ ID NO: 1199916 - DNA, 15 bp, Homo sapiens
ttgtgtcttgaccag

SEQ ID NO: 1199917 - DNA, 15 bp, Homo sapiens
cttgtgtcttgacca

SEQ ID NO: 1199918 - DNA, 15 bp, Homo sapiens
tcttgtgtcttgacc

SEQ ID NO: 1199919 - DNA, 15 bp, Homo sapiens
ctcttgtgtcttgac

SEQ ID NO: 1199920 - DNA, 15 bp, Homo sapiens
tctcttgtgtcttga

SEQ ID NO: 1199921 - DNA, 15 bp, Homo sapiens
gtctcttgtgtcttg

SEQ ID NO: 1199922 - DNA, 15 bp, Homo sapiens
agtctcttgtgtctt

SEQ ID NO: 1199923 - DNA, 15 bp, Homo sapiens
cagtctcttgtgtct

SEQ ID NO: 1199924 - DNA, 15 bp, Homo sapiens
tcagtctcttgtgtc

SEQ ID NO: 1199925 - DNA, 15 bp, Homo sapiens
ctcagtctcttgtgt

SEQ ID NO: 1199926 - DNA, 15 bp, Homo sapiens
actcagtctcttgtg

SEQ ID NO: 1199927 - DNA, 15 bp, Homo sapiens
tactcagtctcttgt

SEQ ID NO: 1199928 - DNA, 15 bp, Homo sapiens
ctactcagtctcttg

SEQ ID NO: 1199929 - DNA, 15 bp, Homo sapiens
tctactcagtctctt

SEQ ID NO: 1199930 - DNA, 15 bp, Homo sapiens
ttctactcagtctct

SEQ ID NO: 1199931 - DNA, 15 bp, Homo sapiens
gttctactcagtctc

SEQ ID NO: 1199932 - DNA, 15 bp, Homo sapiens
tgttctactcagtct

SEQ ID NO: 1199933 - DNA, 15 bp, Homo sapiens
ttgttctactcagtc

SEQ ID NO: 1199934 - DNA, 15 bp, Homo sapiens
attgttctactcagt

SEQ ID NO: 1199935 - DNA, 15 bp, Homo sapiens
tattgttctactcag

SEQ ID NO: 1199936 - DNA, 15 bp, Homo sapiens
ttattgttctactca

SEQ ID NO: 1199937 - DNA, 15 bp, Homo sapiens
attattgttctactc

SEQ ID NO: 1199938 - DNA, 15 bp, Homo sapiens
gattattgttctact

SEQ ID NO: 1199939 - DNA, 15 bp, Homo sapiens
tgattattgttctac

SEQ ID NO: 1199940 - DNA, 15 bp, Homo sapiens
ctgattattgttcta

SEQ ID NO: 1199941 - DNA, 15 bp, Homo sapiens
tctgattattgttct

SEQ ID NO: 1199942 - DNA, 15 bp, Homo sapiens
atctgattattgttc

SEQ ID NO: 1199943 - DNA, 15 bp, Homo sapiens
catctgattattgtt

SEQ ID NO: 1199944 - DNA, 15 bp, Homo sapiens
tcatctgattattgt

SEQ ID NO: 1199945 - DNA, 15 bp, Homo sapiens
ctcatctgattattg

SEQ ID NO: 1199946 - DNA, 15 bp, Homo sapiens
tctcatctgattatt

SEQ ID NO: 1199947 - DNA, 15 bp, Homo sapiens
gtctcatctgattat

SEQ ID NO: 1199948 - DNA, 15 bp, Homo sapiens
tgtctcatctgatta

SEQ ID NO: 1199949 - DNA, 15 bp, Homo sapiens
ttgtctcatctgatt

SEQ ID NO: 1199950 - DNA, 15 bp, Homo sapiens
gttgtctcatctgat

SEQ ID NO: 1199951 - DNA, 15 bp, Homo sapiens
tgttgtctcatctga

SEQ ID NO: 1199952 - DNA, 15 bp, Homo sapiens
atgttgtctcatctg

SEQ ID NO: 1199953 - DNA, 15 bp, Homo sapiens
aatgttgtctcatct

SEQ ID NO: 1199954 - DNA, 15 bp, Homo sapiens
caatgttgtctcatc

SEQ ID NO: 1199955 - DNA, 15 bp, Homo sapiens
ccaatgttgtctcat

SEQ ID NO: 1199956 - DNA, 15 bp, Homo sapiens
gccaatgttgtctca

SEQ ID NO: 1199957 - DNA, 15 bp, Homo sapiens
agccaatgttgtctc

SEQ ID NO: 1199958 - DNA, 15 bp, Homo sapiens
tagccaatgttgtct

SEQ ID NO: 1199959 - DNA, 15 bp, Homo sapiens
ttagccaatgttgtc

SEQ ID NO: 1199960 - DNA, 15 bp, Homo sapiens
tttagccaatgttgt

SEQ ID NO: 1199961 - DNA, 15 bp, Homo sapiens
atttagccaatgttg

SEQ ID NO: 1199962 - DNA, 15 bp, Homo sapiens
gatttagccaatgtt

SEQ ID NO: 1199963 - DNA, 15 bp, Homo sapiens
tgatttagccaatgt

SEQ ID NO: 1199964 - DNA, 15 bp, Homo sapiens
ttgatttagccaatg

SEQ ID NO: 1199965 - DNA, 15 bp, Homo sapiens
attgatttagccaat

SEQ ID NO: 1199966 - DNA, 15 bp, Homo sapiens
gattgatttagccaa

SEQ ID NO: 1199967 - DNA, 15 bp, Homo sapiens
tgattgatttagcca

SEQ ID NO: 1199968 - DNA, 15 bp, Homo sapiens
gtgattgatttagcc

SEQ ID NO: 1199969 - DNA, 15 bp, Homo sapiens
agtgattgatttagc

SEQ ID NO: 1199970 - DNA, 15 bp, Homo sapiens
gagtgattgatttag

SEQ ID NO: 1199971 - DNA, 15 bp, Homo sapiens
tgagtgattgattta

SEQ ID NO: 1199972 - DNA, 15 bp, Homo sapiens
ttgagtgattgattt

SEQ ID NO: 1199973 - DNA, 15 bp, Homo sapiens
attgagtgattgatt

SEQ ID NO: 1199974 - DNA, 15 bp, Homo sapiens
tattgagtgattgat

SEQ ID NO: 1199975 - DNA, 15 bp, Homo sapiens
ttattgagtgattga

SEQ ID NO: 1199976 - DNA, 15 bp, Homo sapiens
tttattgagtgattg

SEQ ID NO: 1199977 - DNA, 15 bp, Homo sapiens
atttattgagtgatt

SEQ ID NO: 1199978 - DNA, 15 bp, Homo sapiens
catttattgagtgat

SEQ ID NO: 1199979 - DNA, 15 bp, Homo sapiens
tcatttattgagtga

SEQ ID NO: 1199980 - DNA, 15 bp, Homo sapiens
atcatttattgagtg

SEQ ID NO: 1199981 - DNA, 15 bp, Homo sapiens
tatcatttattgagt

SEQ ID NO: 1199982 - DNA, 15 bp, Homo sapiens
atatcatttattgag

SEQ ID NO: 1199983 - DNA, 15 bp, Homo sapiens
tatatcatttattga

SEQ ID NO: 1199984 - DNA, 15 bp, Homo sapiens
ttatatcatttattg

SEQ ID NO: 1199985 - DNA, 15 bp, Homo sapiens
tttatatcatttatt

SEQ ID NO: 1199986 - DNA, 15 bp, Homo sapiens
ttttatatcatttat

SEQ ID NO: 1199987 - DNA, 15 bp, Homo sapiens
tttttatatcattta

SEQ ID NO: 1199988 - DNA, 15 bp, Homo sapiens
ttttttatatcattt

SEQ ID NO: 1199989 - DNA, 15 bp, Homo sapiens
attttttatatcatt

SEQ ID NO: 1199990 - DNA, 15 bp, Homo sapiens
tattttttatatcat

SEQ ID NO: 1199991 - DNA, 15 bp, Homo sapiens
atattttttatatca

SEQ ID NO: 1199992 - DNA, 15 bp, Homo sapiens
gatattttttatatc

SEQ ID NO: 1199993 - DNA, 15 bp, Homo sapiens
agatattttttatat

SEQ ID NO: 1199994 - DNA, 15 bp, Homo sapiens
aagatattttttata

SEQ ID NO: 1199995 - DNA, 15 bp, Homo sapiens
taagatattttttat

SEQ ID NO: 1199996 - DNA, 15 bp, Homo sapiens
ctaagatatttttta

SEQ ID NO: 1199997 - DNA, 15 bp, Homo sapiens
gctaagatatttttt

SEQ ID NO: 1199998 - DNA, 15 bp, Homo sapiens
tgctaagatattttt

SEQ ID NO: 1199999 - DNA, 15 bp, Homo sapiens
ctgctaagatatttt

SEQ ID NO: 1200000 - DNA, 15 bp, Homo sapiens
actgctaagatattt

SEQ ID NO: 1200001 - DNA, 15 bp, Homo sapiens
tactgctaagatatt

SEQ ID NO: 1200002 - DNA, 15 bp, Homo sapiens
gtactgctaagatat

SEQ ID NO: 1200003 - DNA, 15 bp, Homo sapiens
ggtactgctaagata

SEQ ID NO: 1200004 - DNA, 15 bp, Homo sapiens
aggtactgctaagat

SEQ ID NO: 1200005 - DNA, 15 bp, Homo sapiens
aaggtactgctaaga

SEQ ID NO: 1200006 - DNA, 15 bp, Homo sapiens
aaaggtactgctaag

SEQ ID NO: 1200007 - DNA, 15 bp, Homo sapiens
aaaaggtactgctaa

SEQ ID NO: 1200008 - DNA, 15 bp, Homo sapiens
caaaaggtactgcta

SEQ ID NO: 1200009 - DNA, 15 bp, Homo sapiens
acaaaaggtactgct

SEQ ID NO: 1200010 - DNA, 15 bp, Homo sapiens
gacaaaaggtactgc

SEQ ID NO: 1200011 - DNA, 15 bp, Homo sapiens
tgacaaaaggtactg

SEQ ID NO: 1200012 - DNA, 15 bp, Homo sapiens
ttgacaaaaggtact

SEQ ID NO: 1200013 - DNA, 15 bp, Homo sapiens
attgacaaaaggtac

SEQ ID NO: 1200014 - DNA, 15 bp, Homo sapiens
cattgacaaaaggta

SEQ ID NO: 1200015 - DNA, 15 bp, Homo sapiens
gcattgacaaaaggt

SEQ ID NO: 1200016 - DNA, 15 bp, Homo sapiens
ggcattgacaaaagg

SEQ ID NO: 1200017 - DNA, 15 bp, Homo sapiens
tggcattgacaaaag

SEQ ID NO: 1200018 - DNA, 15 bp, Homo sapiens
ttggcattgacaaaa

SEQ ID NO: 1200019 - DNA, 15 bp, Homo sapiens
tttggcattgacaaa

SEQ ID NO: 1200020 - DNA, 15 bp, Homo sapiens
atttggcattgacaa

SEQ ID NO: 1200021 - DNA, 15 bp, Homo sapiens
catttggcattgaca

SEQ ID NO: 1200022 - DNA, 15 bp, Homo sapiens
gcatttggcattgac

SEQ ID NO: 1200023 - DNA, 15 bp, Homo sapiens
ggcatttggcattga

SEQ ID NO: 1200024 - DNA, 15 bp, Homo sapiens
tggcatttggcattg

SEQ ID NO: 1200025 - DNA, 15 bp, Homo sapiens
ttggcatttggcatt

SEQ ID NO: 1200026 - DNA, 15 bp, Homo sapiens
gttggcatttggcat

SEQ ID NO: 1200027 - DNA, 15 bp, Homo sapiens
agttggcatttggca

SEQ ID NO: 1200028 - DNA, 15 bp, Homo sapiens
cagttggcatttggc

SEQ ID NO: 1200029 - DNA, 15 bp, Homo sapiens
ccagttggcatttgg

SEQ ID NO: 1200030 - DNA, 15 bp, Homo sapiens
accagttggcatttg

SEQ ID NO: 1200031 - DNA, 15 bp, Homo sapiens
aaccagttggcattt

SEQ ID NO: 1200032 - DNA, 15 bp, Homo sapiens
caaccagttggcatt

SEQ ID NO: 1200033 - DNA, 15 bp, Homo sapiens
tcaaccagttggcat

SEQ ID NO: 1200034 - DNA, 15 bp, Homo sapiens
atcaaccagttggca

SEQ ID NO: 1200035 - DNA, 15 bp, Homo sapiens
tatcaaccagttggc

SEQ ID NO: 1200036 - DNA, 15 bp, Homo sapiens
ttatcaaccagttgg

SEQ ID NO: 1200037 - DNA, 15 bp, Homo sapiens
gttatcaaccagttg

SEQ ID NO: 1200038 - DNA, 15 bp, Homo sapiens
agttatcaaccagtt

SEQ ID NO: 1200039 - DNA, 15 bp, Homo sapiens
gagttatcaaccagt

SEQ ID NO: 1200040 - DNA, 15 bp, Homo sapiens
ggagttatcaaccag

SEQ ID NO: 1200041 - DNA, 15 bp, Homo sapiens
tggagttatcaacca

SEQ ID NO: 1200042 - DNA, 15 bp, Homo sapiens
gtggagttatcaacc

SEQ ID NO: 1200043 - DNA, 15 bp, Homo sapiens
cgtggagttatcaac

SEQ ID NO: 1200044 - DNA, 15 bp, Homo sapiens
acgtggagttatcaa

SEQ ID NO: 1200045 - DNA, 15 bp, Homo sapiens
tacgtggagttatca

SEQ ID NO: 1200046 - DNA, 15 bp, Homo sapiens
atacgtggagttatc

SEQ ID NO: 1200047 - DNA, 15 bp, Homo sapiens
aatacgtggagttat

SEQ ID NO: 1200048 - DNA, 15 bp, Homo sapiens
aaatacgtggagtta

SEQ ID NO: 1200049 - DNA, 15 bp, Homo sapiens
aaaatacgtggagtt

SEQ ID NO: 1200050 - DNA, 15 bp, Homo sapiens
aaaaatacgtggagt

SEQ ID NO: 1200051 - DNA, 15 bp, Homo sapiens
taaaaatacgtggag

SEQ ID NO: 1200052 - DNA, 15 bp, Homo sapiens
ctaaaaatacgtgga

SEQ ID NO: 1200053 - DNA, 15 bp, Homo sapiens
actaaaaatacgtgg

SEQ ID NO: 1200054 - DNA, 15 bp, Homo sapiens
tactaaaaatacgtg

SEQ ID NO: 1200055 - DNA, 15 bp, Homo sapiens
ttactaaaaatacgt

SEQ ID NO: 1200056 - DNA, 15 bp, Homo sapiens
attactaaaaatacg

SEQ ID NO: 1200057 - DNA, 15 bp, Homo sapiens
tattactaaaaatac

SEQ ID NO: 1200058 - DNA, 15 bp, Homo sapiens
ctattactaaaaata

SEQ ID NO: 1200059 - DNA, 15 bp, Homo sapiens
tctattactaaaaat

SEQ ID NO: 1200060 - DNA, 15 bp, Homo sapiens
ctctattactaaaaa

SEQ ID NO: 1200061 - DNA, 15 bp, Homo sapiens
gctctattactaaaa

SEQ ID NO: 1200062 - DNA, 15 bp, Homo sapiens
agctctattactaaa

SEQ ID NO: 1200063 - DNA, 15 bp, Homo sapiens
aagctctattactaa

SEQ ID NO: 1200064 - DNA, 15 bp, Homo sapiens
gaagctctattacta

SEQ ID NO: 1200065 - DNA, 15 bp, Homo sapiens
agaagctctattact

SEQ ID NO: 1200066 - DNA, 15 bp, Homo sapiens
cagaagctctattac

SEQ ID NO: 1200067 - DNA, 15 bp, Homo sapiens
tcagaagctctatta

SEQ ID NO: 1200068 - DNA, 15 bp, Homo sapiens
atcagaagctctatt

SEQ ID NO: 1200069 - DNA, 15 bp, Homo sapiens
aatcagaagctctat

SEQ ID NO: 1200070 - DNA, 15 bp, Homo sapiens
aaatcagaagctcta

SEQ ID NO: 1200071 - DNA, 15 bp, Homo sapiens
taaatcagaagctct

SEQ ID NO: 1200072 - DNA, 15 bp, Homo sapiens
gtaaatcagaagctc

SEQ ID NO: 1200073 - DNA, 15 bp, Homo sapiens
agtaaatcagaagct

SEQ ID NO: 1200074 - DNA, 15 bp, Homo sapiens
cagtaaatcagaagc

SEQ ID NO: 1200075 - DNA, 15 bp, Homo sapiens
ccagtaaatcagaag

SEQ ID NO: 1200076 - DNA, 15 bp, Homo sapiens
accagtaaatcagaa

SEQ ID NO: 1200077 - DNA, 15 bp, Homo sapiens
taccagtaaatcaga

SEQ ID NO: 1200078 - DNA, 15 bp, Homo sapiens
ttaccagtaaatcag

SEQ ID NO: 1200079 - DNA, 15 bp, Homo sapiens
tttaccagtaaatca

SEQ ID NO: 1200080 - DNA, 15 bp, Homo sapiens
gtttaccagtaaatc

SEQ ID NO: 1200081 - DNA, 15 bp, Homo sapiens
agtttaccagtaaat

SEQ ID NO: 1200082 - DNA, 15 bp, Homo sapiens
aagtttaccagtaaa

SEQ ID NO: 1200083 - DNA, 15 bp, Homo sapiens
aaagtttaccagtaa

SEQ ID NO: 1200084 - DNA, 15 bp, Homo sapiens
taaagtttaccagta

SEQ ID NO: 1200085 - DNA, 15 bp, Homo sapiens
ttaaagtttaccagt

SEQ ID NO: 1200086 - DNA, 15 bp, Homo sapiens
tttaaagtttaccag

SEQ ID NO: 1200087 - DNA, 15 bp, Homo sapiens
gtttaaagtttacca

SEQ ID NO: 1200088 - DNA, 15 bp, Homo sapiens
tgtttaaagtttacc

SEQ ID NO: 1200089 - DNA, 15 bp, Homo sapiens
ttgtttaaagtttac

SEQ ID NO: 1200090 - DNA, 15 bp, Homo sapiens
tttgtttaaagttta

SEQ ID NO: 1200091 - DNA, 15 bp, Homo sapiens
atttgtttaaagttt

SEQ ID NO: 1200092 - DNA, 15 bp, Homo sapiens
gatttgtttaaagtt

SEQ ID NO: 1200093 - DNA, 15 bp, Homo sapiens
tgatttgtttaaagt

SEQ ID NO: 1200094 - DNA, 15 bp, Homo sapiens
ctgatttgtttaaag

SEQ ID NO: 1200095 - DNA, 15 bp, Homo sapiens
cctgatttgtttaaa

SEQ ID NO: 1200096 - DNA, 15 bp, Homo sapiens
tcctgatttgtttaa

SEQ ID NO: 1200097 - DNA, 15 bp, Homo sapiens
ctcctgatttgttta

SEQ ID NO: 1200098 - DNA, 15 bp, Homo sapiens
tctcctgatttgttt

SEQ ID NO: 1200099 - DNA, 15 bp, Homo sapiens
ttctcctgatttgtt

SEQ ID NO: 1200100 - DNA, 15 bp, Homo sapiens
gttctcctgatttgt

SEQ ID NO: 1200101 - DNA, 15 bp, Homo sapiens
tgttctcctgatttg

SEQ ID NO: 1200102 - DNA, 15 bp, Homo sapiens
ttgttctcctgattt

SEQ ID NO: 1200103 - DNA, 15 bp, Homo sapiens
tttgttctcctgatt

SEQ ID NO: 1200104 - DNA, 15 bp, Homo sapiens
atttgttctcctgat

SEQ ID NO: 1200105 - DNA, 15 bp, Homo sapiens
aatttgttctcctga

SEQ ID NO: 1200106 - DNA, 15 bp, Homo sapiens
taatttgttctcctg

SEQ ID NO: 1200107 - DNA, 15 bp, Homo sapiens
gtaatttgttctcct

SEQ ID NO: 1200108 - DNA, 15 bp, Homo sapiens
tgtaatttgttctcc

SEQ ID NO: 1200109 - DNA, 15 bp, Homo sapiens
atgtaatttgttctc

SEQ ID NO: 1200110 - DNA, 15 bp, Homo sapiens
catgtaatttgttct

SEQ ID NO: 1200111 - DNA, 15 bp, Homo sapiens
gcatgtaatttgttc

SEQ ID NO: 1200112 - DNA, 15 bp, Homo sapiens
agcatgtaatttgtt

SEQ ID NO: 1200113 - DNA, 15 bp, Homo sapiens
gagcatgtaatttgt

SEQ ID NO: 1200114 - DNA, 15 bp, Homo sapiens
agagcatgtaatttg

SEQ ID NO: 1200115 - DNA, 15 bp, Homo sapiens
tagagcatgtaattt

SEQ ID NO: 1200116 - DNA, 15 bp, Homo sapiens
atagagcatgtaatt

SEQ ID NO: 1200117 - DNA, 15 bp, Homo sapiens
aatagagcatgtaat

SEQ ID NO: 1200118 - DNA, 15 bp, Homo sapiens
aaatagagcatgtaa

SEQ ID NO: 1200119 - DNA, 15 bp, Homo sapiens
aaaatagagcatgta

SEQ ID NO: 1200120 - DNA, 15 bp, Homo sapiens
gaaaatagagcatgt

SEQ ID NO: 1200121 - DNA, 15 bp, Homo sapiens
ggaaaatagagcatg

SEQ ID NO: 1200122 - DNA, 15 bp, Homo sapiens
tggaaaatagagcat

SEQ ID NO: 1200123 - DNA, 15 bp, Homo sapiens
ttggaaaatagagca

SEQ ID NO: 1200124 - DNA, 15 bp, Homo sapiens
attggaaaatagagc

SEQ ID NO: 1200125 - DNA, 15 bp, Homo sapiens
gattggaaaatagag

SEQ ID NO: 1200126 - DNA, 15 bp, Homo sapiens
tgattggaaaataga

SEQ ID NO: 1200127 - DNA, 15 bp, Homo sapiens
gtgattggaaaatag

SEQ ID NO: 1200128 - DNA, 15 bp, Homo sapiens
tgtgattggaaaata

SEQ ID NO: 1200129 - DNA, 15 bp, Homo sapiens
ctgtgattggaaaat

SEQ ID NO: 1200130 - DNA, 15 bp, Homo sapiens
tctgtgattggaaaa

SEQ ID NO: 1200131 - DNA, 15 bp, Homo sapiens
ttctgtgattggaaa

SEQ ID NO: 1200132 - DNA, 15 bp, Homo sapiens
tttctgtgattggaa

SEQ ID NO: 1200133 - DNA, 15 bp, Homo sapiens
gtttctgtgattgga

SEQ ID NO: 1200134 - DNA, 15 bp, Homo sapiens
tgtttctgtgattgg

SEQ ID NO: 1200135 - DNA, 15 bp, Homo sapiens
ctgtttctgtgattg

SEQ ID NO: 1200136 - DNA, 15 bp, Homo sapiens
cctgtttctgtgatt

SEQ ID NO: 1200137 - DNA, 15 bp, Homo sapiens
acctgtttctgtgat

SEQ ID NO: 1200138 - DNA, 15 bp, Homo sapiens
tacctgtttctgtga

SEQ ID NO: 1200139 - DNA, 15 bp, Homo sapiens
ttacctgtttctgtg

SEQ ID NO: 1200140 - DNA, 15 bp, Homo sapiens
tttacctgtttctgt

SEQ ID NO: 1200141 - DNA, 15 bp, Homo sapiens
ttttacctgtttctg

SEQ ID NO: 1200142 - DNA, 15 bp, Homo sapiens
attttacctgtttct

SEQ ID NO: 1200143 - DNA, 15 bp, Homo sapiens
tattttacctgtttc

SEQ ID NO: 1200144 - DNA, 15 bp, Homo sapiens
ttattttacctgttt

SEQ ID NO: 1200145 - DNA, 15 bp, Homo sapiens
tttattttacctgtt

SEQ ID NO: 1200146 - DNA, 15 bp, Homo sapiens
atttattttacctgt

SEQ ID NO: 1200147 - DNA, 15 bp, Homo sapiens
tatttattttacctg

SEQ ID NO: 1200148 - DNA, 15 bp, Homo sapiens
atatttattttacct

SEQ ID NO: 1200149 - DNA, 15 bp, Homo sapiens
catatttattttacc

SEQ ID NO: 1200150 - DNA, 15 bp, Homo sapiens
ccatatttattttac

SEQ ID NO: 1200151 - DNA, 15 bp, Homo sapiens
gccatatttatttta

SEQ ID NO: 1200152 - DNA, 15 bp, Homo sapiens
agccatatttatttt

SEQ ID NO: 1200153 - DNA, 15 bp, Homo sapiens
aagccatatttattt

SEQ ID NO: 1200154 - DNA, 15 bp, Homo sapiens
aaagccatatttatt

SEQ ID NO: 1200155 - DNA, 15 bp, Homo sapiens
caaagccatatttat

SEQ ID NO: 1200156 - DNA, 15 bp, Homo sapiens
tcaaagccatattta

SEQ ID NO: 1200157 - DNA, 15 bp, Homo sapiens
ttcaaagccatattt

SEQ ID NO: 1200158 - DNA, 15 bp, Homo sapiens
gttcaaagccatatt

SEQ ID NO: 1200159 - DNA, 15 bp, Homo sapiens
tgttcaaagccatat

SEQ ID NO: 1200160 - DNA, 15 bp, Homo sapiens
ttgttcaaagccata

SEQ ID NO: 1200161 - DNA, 15 bp, Homo sapiens
tttgttcaaagccat

SEQ ID NO: 1200162 - DNA, 15 bp, Homo sapiens
atttgttcaaagcca

SEQ ID NO: 1200163 - DNA, 15 bp, Homo sapiens
tatttgttcaaagcc

SEQ ID NO: 1200164 - DNA, 15 bp, Homo sapiens
gtatttgttcaaagc

SEQ ID NO: 1200165 - DNA, 15 bp, Homo sapiens
tgtatttgttcaaag

SEQ ID NO: 1200166 - DNA, 15 bp, Homo sapiens
ctgtatttgttcaaa

SEQ ID NO: 1200167 - DNA, 15 bp, Homo sapiens
tctgtatttgttcaa

SEQ ID NO: 1200168 - DNA, 15 bp, Homo sapiens
atctgtatttgttca

SEQ ID NO: 1200169 - DNA, 15 bp, Homo sapiens
aatctgtatttgttc

SEQ ID NO: 1200170 - DNA, 15 bp, Homo sapiens
taatctgtatttgtt

SEQ ID NO: 1200171 - DNA, 15 bp, Homo sapiens
gtaatctgtatttgt

SEQ ID NO: 1200172 - DNA, 15 bp, Homo sapiens
tgtaatctgtatttg

SEQ ID NO: 1200173 - DNA, 15 bp, Homo sapiens
ttgtaatctgtattt

SEQ ID NO: 1200174 - DNA, 15 bp, Homo sapiens
tttgtaatctgtatt

SEQ ID NO: 1200175 - DNA, 15 bp, Homo sapiens
ctttgtaatctgtat

SEQ ID NO: 1200176 - DNA, 15 bp, Homo sapiens
tctttgtaatctgta

SEQ ID NO: 1200177 - DNA, 15 bp, Homo sapiens
ctctttgtaatctgt

SEQ ID NO: 1200178 - DNA, 15 bp, Homo sapiens
tctctttgtaatctg

SEQ ID NO: 1200179 - DNA, 15 bp, Homo sapiens
ttctctttgtaatct

SEQ ID NO: 1200180 - DNA, 15 bp, Homo sapiens
attctctttgtaatc

SEQ ID NO: 1200181 - DNA, 15 bp, Homo sapiens
gattctctttgtaat

SEQ ID NO: 1200182 - DNA, 15 bp, Homo sapiens
tgattctctttgtaa

SEQ ID NO: 1200183 - DNA, 15 bp, Homo sapiens
gtgattctctttgta

SEQ ID NO: 1200184 - DNA, 15 bp, Homo sapiens
agtgattctctttgt

SEQ ID NO: 1200185 - DNA, 15 bp, Homo sapiens
cagtgattctctttg

SEQ ID NO: 1200186 - DNA, 15 bp, Homo sapiens
acagtgattctcttt

SEQ ID NO: 1200187 - DNA, 15 bp, Homo sapiens
aacagtgattctctt

SEQ ID NO: 1200188 - DNA, 15 bp, Homo sapiens
aaacagtgattctct

SEQ ID NO: 1200189 - DNA, 15 bp, Homo sapiens
aaaacagtgattctc

SEQ ID NO: 1200190 - DNA, 15 bp, Homo sapiens
caaaacagtgattct

SEQ ID NO: 1200191 - DNA, 15 bp, Homo sapiens
acaaaacagtgattc

SEQ ID NO: 1200192 - DNA, 15 bp, Homo sapiens
aacaaaacagtgatt

SEQ ID NO: 1200193 - DNA, 15 bp, Homo sapiens
caacaaaacagtgat

SEQ ID NO: 1200194 - DNA, 15 bp, Homo sapiens
gcaacaaaacagtga

SEQ ID NO: 1200195 - DNA, 15 bp, Homo sapiens
ggcaacaaaacagtg

SEQ ID NO: 1200196 - DNA, 15 bp, Homo sapiens
gggcaacaaaacagt

SEQ ID NO: 1200197 - DNA, 15 bp, Homo sapiens
tgggcaacaaaacag

SEQ ID NO: 1200198 - DNA, 15 bp, Homo sapiens
ctgggcaacaaaaca

SEQ ID NO: 1200199 - DNA, 15 bp, Homo sapiens
gctgggcaacaaaac

SEQ ID NO: 1200200 - DNA, 15 bp, Homo sapiens
tgctgggcaacaaaa

SEQ ID NO: 1200201 - DNA, 15 bp, Homo sapiens
ttgctgggcaacaaa

SEQ ID NO: 1200202 - DNA, 15 bp, Homo sapiens
tttgctgggcaacaa

SEQ ID NO: 1200203 - DNA, 15 bp, Homo sapiens
atttgctgggcaaca

SEQ ID NO: 1200204 - DNA, 15 bp, Homo sapiens
tatttgctgggcaac

SEQ ID NO: 1200205 - DNA, 15 bp, Homo sapiens
gtatttgctgggcaa

SEQ ID NO: 1200206 - DNA, 15 bp, Homo sapiens
agtatttgctgggca

SEQ ID NO: 1200207 - DNA, 15 bp, Homo sapiens
aagtatttgctgggc

SEQ ID NO: 1200208 - DNA, 15 bp, Homo sapiens
gaagtatttgctggg

SEQ ID NO: 1200209 - DNA, 15 bp, Homo sapiens
agaagtatttgctgg

SEQ ID NO: 1200210 - DNA, 15 bp, Homo sapiens
cagaagtatttgctg

SEQ ID NO: 1200211 - DNA, 15 bp, Homo sapiens
acagaagtatttgct

SEQ ID NO: 1200212 - DNA, 15 bp, Homo sapiens
aacagaagtatttgc

SEQ ID NO: 1200213 - DNA, 15 bp, Homo sapiens
aaacagaagtatttg

SEQ ID NO: 1200214 - DNA, 15 bp, Homo sapiens
caaacagaagtattt

SEQ ID NO: 1200215 - DNA, 15 bp, Homo sapiens
tcaaacagaagtatt

SEQ ID NO: 1200216 - DNA, 15 bp, Homo sapiens
ctcaaacagaagtat

SEQ ID NO: 1200217 - DNA, 15 bp, Homo sapiens
actcaaacagaagta

SEQ ID NO: 1200218 - DNA, 15 bp, Homo sapiens
tactcaaacagaagt

SEQ ID NO: 1200219 - DNA, 15 bp, Homo sapiens
ctactcaaacagaag

SEQ ID NO: 1200220 - DNA, 15 bp, Homo sapiens
tctactcaaacagaa

SEQ ID NO: 1200221 - DNA, 15 bp, Homo sapiens
gtctactcaaacaga

SEQ ID NO: 1200222 - DNA, 15 bp, Homo sapiens
tgtctactcaaacag

SEQ ID NO: 1200223 - DNA, 15 bp, Homo sapiens
ttgtctactcaaaca

SEQ ID NO: 1200224 - DNA, 15 bp, Homo sapiens
tttgtctactcaaac

SEQ ID NO: 1200225 - DNA, 15 bp, Homo sapiens
ttttgtctactcaaa

SEQ ID NO: 1200226 - DNA, 15 bp, Homo sapiens
gttttgtctactcaa

SEQ ID NO: 1200227 - DNA, 15 bp, Homo sapiens
tgttttgtctactca

SEQ ID NO: 1200228 - DNA, 15 bp, Homo sapiens
ttgttttgtctactc

SEQ ID NO: 1200229 - DNA, 15 bp, Homo sapiens
tttgttttgtctact

SEQ ID NO: 1200230 - DNA, 15 bp, Homo sapiens
ttttgttttgtctac

SEQ ID NO: 1200231 - DNA, 15 bp, Homo sapiens
gttttgttttgtcta

SEQ ID NO: 1200232 - DNA, 15 bp, Homo sapiens
ggttttgttttgtct

SEQ ID NO: 1200233 - DNA, 15 bp, Homo sapiens
aggttttgttttgtc

SEQ ID NO: 1200234 - DNA, 15 bp, Homo sapiens
caggttttgttttgt

SEQ ID NO: 1200235 - DNA, 15 bp, Homo sapiens
tcaggttttgttttg

SEQ ID NO: 1200236 - DNA, 15 bp, Homo sapiens
ttcaggttttgtttt

SEQ ID NO: 1200237 - DNA, 15 bp, Homo sapiens
attcaggttttgttt

SEQ ID NO: 1200238 - DNA, 15 bp, Homo sapiens
tattcaggttttgtt

SEQ ID NO: 1200239 - DNA, 15 bp, Homo sapiens
ttattcaggttttgt

SEQ ID NO: 1200240 - DNA, 15 bp, Homo sapiens
tttattcaggttttg

SEQ ID NO: 1200241 - DNA, 15 bp, Homo sapiens
ctttattcaggtttt

SEQ ID NO: 1200242 - DNA, 15 bp, Homo sapiens
tctttattcaggttt

SEQ ID NO: 1200243 - DNA, 15 bp, Homo sapiens
ttctttattcaggtt

SEQ ID NO: 1200244 - DNA, 15 bp, Homo sapiens
tttctttattcaggt

SEQ ID NO: 1200245 - DNA, 15 bp, Homo sapiens
atttctttattcagg

SEQ ID NO: 1200246 - DNA, 15 bp, Homo sapiens
gatttctttattcag

SEQ ID NO: 1200247 - DNA, 15 bp, Homo sapiens
agatttctttattca

SEQ ID NO: 1200248 - DNA, 15 bp, Homo sapiens
aagatttctttattc

SEQ ID NO: 1200249 - DNA, 15 bp, Homo sapiens
caagatttctttatt

SEQ ID NO: 1200250 - DNA, 15 bp, Homo sapiens
ccaagatttctttat

SEQ ID NO: 1200251 - DNA, 15 bp, Homo sapiens
accaagatttcttta

SEQ ID NO: 1200252 - DNA, 15 bp, Homo sapiens
taccaagatttcttt

SEQ ID NO: 1200253 - DNA, 15 bp, Homo sapiens
ttaccaagatttctt

SEQ ID NO: 1200254 - DNA, 15 bp, Homo sapiens
gttaccaagatttct

SEQ ID NO: 1200255 - DNA, 15 bp, Homo sapiens
agttaccaagatttc

SEQ ID NO: 1200256 - DNA, 15 bp, Homo sapiens
aagttaccaagattt

SEQ ID NO: 1200257 - DNA, 15 bp, Homo sapiens
aaagttaccaagatt

SEQ ID NO: 1200258 - DNA, 15 bp, Homo sapiens
taaagttaccaagat

SEQ ID NO: 1200259 - DNA, 15 bp, Homo sapiens
ttaaagttaccaaga

SEQ ID NO: 1200260 - DNA, 15 bp, Homo sapiens
gttaaagttaccaag

SEQ ID NO: 1200261 - DNA, 15 bp, Homo sapiens
agttaaagttaccaa

SEQ ID NO: 1200262 - DNA, 15 bp, Homo sapiens
gagttaaagttacca

SEQ ID NO: 1200263 - DNA, 15 bp, Homo sapiens
cgagttaaagttacc

SEQ ID NO: 1200264 - DNA, 15 bp, Homo sapiens
acgagttaaagttac

SEQ ID NO: 1200265 - DNA, 15 bp, Homo sapiens
aacgagttaaagtta

SEQ ID NO: 1200266 - DNA, 15 bp, Homo sapiens
gaacgagttaaagtt

SEQ ID NO: 1200267 - DNA, 15 bp, Homo sapiens
agaacgagttaaagt

SEQ ID NO: 1200268 - DNA, 15 bp, Homo sapiens
aagaacgagttaaag

SEQ ID NO: 1200269 - DNA, 15 bp, Homo sapiens
gaagaacgagttaaa

SEQ ID NO: 1200270 - DNA, 15 bp, Homo sapiens
tgaagaacgagttaa

SEQ ID NO: 1200271 - DNA, 15 bp, Homo sapiens
ttgaagaacgagtta

SEQ ID NO: 1200272 - DNA, 15 bp, Homo sapiens
tttgaagaacgagtt

SEQ ID NO: 1200273 - DNA, 15 bp, Homo sapiens
gtttgaagaacgagt

SEQ ID NO: 1200274 - DNA, 15 bp, Homo sapiens
agtttgaagaacgag

SEQ ID NO: 1200275 - DNA, 15 bp, Homo sapiens
aagtttgaagaacga

SEQ ID NO: 1200276 - DNA, 15 bp, Homo sapiens
taagtttgaagaacg

SEQ ID NO: 1200277 - DNA, 15 bp, Homo sapiens
ttaagtttgaagaac

SEQ ID NO: 1200278 - DNA, 15 bp, Homo sapiens
attaagtttgaagaa

SEQ ID NO: 1200279 - DNA, 15 bp, Homo sapiens
cattaagtttgaaga

SEQ ID NO: 1200280 - DNA, 15 bp, Homo sapiens
tcattaagtttgaag

SEQ ID NO: 1200281 - DNA, 15 bp, Homo sapiens
ctcattaagtttgaa

SEQ ID NO: 1200282 - DNA, 15 bp, Homo sapiens
actcattaagtttga

SEQ ID NO: 1200283 - DNA, 15 bp, Homo sapiens
tactcattaagtttg

SEQ ID NO: 1200284 - DNA, 15 bp, Homo sapiens
gtactcattaagttt

SEQ ID NO: 1200285 - DNA, 15 bp, Homo sapiens
tgtactcattaagtt

SEQ ID NO: 1200286 - DNA, 15 bp, Homo sapiens
atgtactcattaagt

SEQ ID NO: 1200287 - DNA, 15 bp, Homo sapiens
catgtactcattaag

SEQ ID NO: 1200288 - DNA, 15 bp, Homo sapiens
tcatgtactcattaa

SEQ ID NO: 1200289 - DNA, 15 bp, Homo sapiens
atcatgtactcatta

SEQ ID NO: 1200290 - DNA, 15 bp, Homo sapiens
catcatgtactcatt

SEQ ID NO: 1200291 - DNA, 15 bp, Homo sapiens
acatcatgtactcat

SEQ ID NO: 1200292 - DNA, 15 bp, Homo sapiens
cacatcatgtactca

SEQ ID NO: 1200293 - DNA, 15 bp, Homo sapiens
ccacatcatgtactc

SEQ ID NO: 1200294 - DNA, 15 bp, Homo sapiens
tccacatcatgtact

SEQ ID NO: 1200295 - DNA, 15 bp, Homo sapiens
ttccacatcatgtac

SEQ ID NO: 1200296 - DNA, 15 bp, Homo sapiens
tttccacatcatgta

SEQ ID NO: 1200297 - DNA, 15 bp, Homo sapiens
ctttccacatcatgt

SEQ ID NO: 1200298 - DNA, 15 bp, Homo sapiens
cctttccacatcatg

SEQ ID NO: 1200299 - DNA, 15 bp, Homo sapiens
tcctttccacatcat

SEQ ID NO: 1200300 - DNA, 15 bp, Homo sapiens
gtcctttccacatca

SEQ ID NO: 1200301 - DNA, 15 bp, Homo sapiens
agtcctttccacatc

SEQ ID NO: 1200302 - DNA, 15 bp, Homo sapiens
aagtcctttccacat

SEQ ID NO: 1200303 - DNA, 15 bp, Homo sapiens
caagtcctttccaca

SEQ ID NO: 1200304 - DNA, 15 bp, Homo sapiens
acaagtcctttccac

SEQ ID NO: 1200305 - DNA, 15 bp, Homo sapiens
cacaagtcctttcca

SEQ ID NO: 1200306 - DNA, 15 bp, Homo sapiens
acacaagtcctttcc

SEQ ID NO: 1200307 - DNA, 15 bp, Homo sapiens
aacacaagtcctttc

SEQ ID NO: 1200308 - DNA, 15 bp, Homo sapiens
aaacacaagtccttt

SEQ ID NO: 1200309 - DNA, 15 bp, Homo sapiens
taaacacaagtcctt

SEQ ID NO: 1200310 - DNA, 15 bp, Homo sapiens
ataaacacaagtcct

SEQ ID NO: 1200311 - DNA, 15 bp, Homo sapiens
cataaacacaagtcc

SEQ ID NO: 1200312 - DNA, 15 bp, Homo sapiens
acataaacacaagtc

SEQ ID NO: 1200313 - DNA, 15 bp, Homo sapiens
tacataaacacaagt

SEQ ID NO: 1200314 - DNA, 15 bp, Homo sapiens
gtacataaacacaag

SEQ ID NO: 1200315 - DNA, 15 bp, Homo sapiens
agtacataaacacaa

SEQ ID NO: 1200316 - DNA, 15 bp, Homo sapiens
gagtacataaacaca

SEQ ID NO: 1200317 - DNA, 15 bp, Homo sapiens
tgagtacataaacac

SEQ ID NO: 1200318 - DNA, 15 bp, Homo sapiens
atgagtacataaaca

SEQ ID NO: 1200319 - DNA, 15 bp, Homo sapiens
gatgagtacataaac

SEQ ID NO: 1200320 - DNA, 15 bp, Homo sapiens
tgatgagtacataaa

SEQ ID NO: 1200321 - DNA, 15 bp, Homo sapiens
atgatgagtacataa

SEQ ID NO: 1200322 - DNA, 15 bp, Homo sapiens
aatgatgagtacata

SEQ ID NO: 1200323 - DNA, 15 bp, Homo sapiens
aaatgatgagtacat

SEQ ID NO: 1200324 - DNA, 15 bp, Homo sapiens
gaaatgatgagtaca

SEQ ID NO: 1200325 - DNA, 15 bp, Homo sapiens
tgaaatgatgagtac

SEQ ID NO: 1200326 - DNA, 15 bp, Homo sapiens
ctgaaatgatgagta

SEQ ID NO: 1200327 - DNA, 15 bp, Homo sapiens
gctgaaatgatgagt

SEQ ID NO: 1200328 - DNA, 15 bp, Homo sapiens
agctgaaatgatgag

SEQ ID NO: 1200329 - DNA, 15 bp, Homo sapiens
tagctgaaatgatga

SEQ ID NO: 1200330 - DNA, 15 bp, Homo sapiens
gtagctgaaatgatg

SEQ ID NO: 1200331 - DNA, 15 bp, Homo sapiens
agtagctgaaatgat

SEQ ID NO: 1200332 - DNA, 15 bp, Homo sapiens
gagtagctgaaatga

SEQ ID NO: 1200333 - DNA, 15 bp, Homo sapiens
tgagtagctgaaatg

SEQ ID NO: 1200334 - DNA, 15 bp, Homo sapiens
gtgagtagctgaaat

SEQ ID NO: 1200335 - DNA, 15 bp, Homo sapiens
tgtgagtagctgaaa

SEQ ID NO: 1200336 - DNA, 15 bp, Homo sapiens
gtgtgagtagctgaa

SEQ ID NO: 1200337 - DNA, 15 bp, Homo sapiens
tgtgtgagtagctga

SEQ ID NO: 1200338 - DNA, 15 bp, Homo sapiens
ttgtgtgagtagctg

SEQ ID NO: 1200339 - DNA, 15 bp, Homo sapiens
tttgtgtgagtagct

SEQ ID NO: 1200340 - DNA, 15 bp, Homo sapiens
atttgtgtgagtagc

SEQ ID NO: 1200341 - DNA, 15 bp, Homo sapiens
catttgtgtgagtag

SEQ ID NO: 1200342 - DNA, 15 bp, Homo sapiens
ccatttgtgtgagta

SEQ ID NO: 1200343 - DNA, 15 bp, Homo sapiens
tccatttgtgtgagt

SEQ ID NO: 1200344 - DNA, 15 bp, Homo sapiens
gtccatttgtgtgag

SEQ ID NO: 1200345 - DNA, 15 bp, Homo sapiens
ggtccatttgtgtga

SEQ ID NO: 1200346 - DNA, 15 bp, Homo sapiens
tggtccatttgtgtg

SEQ ID NO: 1200347 - DNA, 15 bp, Homo sapiens
atggtccatttgtgt

SEQ ID NO: 1200348 - DNA, 15 bp, Homo sapiens
tatggtccatttgtg

SEQ ID NO: 1200349 - DNA, 15 bp, Homo sapiens
ttatggtccatttgt

SEQ ID NO: 1200350 - DNA, 15 bp, Homo sapiens
attatggtccatttg

SEQ ID NO: 1200351 - DNA, 15 bp, Homo sapiens
gattatggtccattt

SEQ ID NO: 1200352 - DNA, 15 bp, Homo sapiens
tgattatggtccatt

SEQ ID NO: 1200353 - DNA, 15 bp, Homo sapiens
gtgattatggtccat

SEQ ID NO: 1200354 - DNA, 15 bp, Homo sapiens
agtgattatggtcca

SEQ ID NO: 1200355 - DNA, 15 bp, Homo sapiens
cagtgattatggtcc

SEQ ID NO: 1200356 - DNA, 15 bp, Homo sapiens
acagtgattatggtc

SEQ ID NO: 1200357 - DNA, 15 bp, Homo sapiens
gacagtgattatggt

SEQ ID NO: 1200358 - DNA, 15 bp, Homo sapiens
tgacagtgattatgg

SEQ ID NO: 1200359 - DNA, 15 bp, Homo sapiens
ttgacagtgattatg

SEQ ID NO: 1200360 - DNA, 15 bp, Homo sapiens
tttgacagtgattat

SEQ ID NO: 1200361 - DNA, 15 bp, Homo sapiens
atttgacagtgatta

SEQ ID NO: 1200362 - DNA, 15 bp, Homo sapiens
tatttgacagtgatt

SEQ ID NO: 1200363 - DNA, 15 bp, Homo sapiens
ttatttgacagtgat

SEQ ID NO: 1200364 - DNA, 15 bp, Homo sapiens
attatttgacagtga

SEQ ID NO: 1200365 - DNA, 15 bp, Homo sapiens
aattatttgacagtg

SEQ ID NO: 1200366 - DNA, 15 bp, Homo sapiens
aaattatttgacagt

SEQ ID NO: 1200367 - DNA, 15 bp, Homo sapiens
gaaattatttgacag

SEQ ID NO: 1200368 - DNA, 15 bp, Homo sapiens
agaaattatttgaca

SEQ ID NO: 1200369 - DNA, 15 bp, Homo sapiens
aagaaattatttgac

SEQ ID NO: 1200370 - DNA, 15 bp, Homo sapiens
aaagaaattatttga

SEQ ID NO: 1200371 - DNA, 15 bp, Homo sapiens
taaagaaattatttg

SEQ ID NO: 1200372 - DNA, 15 bp, Homo sapiens
ttaaagaaattattt

SEQ ID NO: 1200373 - DNA, 15 bp, Homo sapiens
tttaaagaaattatt

SEQ ID NO: 1200374 - DNA, 15 bp, Homo sapiens
ttttaaagaaattat

SEQ ID NO: 1200375 - DNA, 15 bp, Homo sapiens
attttaaagaaatta

SEQ ID NO: 1200376 - DNA, 15 bp, Homo sapiens
tattttaaagaaatt

SEQ ID NO: 1200377 - DNA, 15 bp, Homo sapiens
atattttaaagaaat

SEQ ID NO: 1200378 - DNA, 15 bp, Homo sapiens
tatattttaaagaaa

SEQ ID NO: 1200379 - DNA, 15 bp, Homo sapiens
atatattttaaagaa

SEQ ID NO: 1200380 - DNA, 15 bp, Homo sapiens
tatatattttaaaga

SEQ ID NO: 1200381 - DNA, 15 bp, Homo sapiens
atatatattttaaag

SEQ ID NO: 1200382 - DNA, 15 bp, Homo sapiens
atatatatattttaa

SEQ ID NO: 1200383 - DNA, 15 bp, Homo sapiens
tatatatatatttta

SEQ ID NO: 1200384 - DNA, 15 bp, Homo sapiens
atatatatatatttt

SEQ ID NO: 1200385 - DNA, 15 bp, Homo sapiens
catatatatatattt

SEQ ID NO: 1200386 - DNA, 15 bp, Homo sapiens
tcatatatatatatt

SEQ ID NO: 1200387 - DNA, 15 bp, Homo sapiens
ttcatatatatatat

SEQ ID NO: 1200388 - DNA, 15 bp, Homo sapiens
attcatatatatata

SEQ ID NO: 1200389 - DNA, 15 bp, Homo sapiens
cattcatatatatat

SEQ ID NO: 1200390 - DNA, 15 bp, Homo sapiens
acattcatatatata

SEQ ID NO: 1200391 - DNA, 15 bp, Homo sapiens
tacattcatatatat

SEQ ID NO: 1200392 - DNA, 15 bp, Homo sapiens
atacattcatatata

SEQ ID NO: 1200393 - DNA, 15 bp, Homo sapiens
catacattcatatat

SEQ ID NO: 1200394 - DNA, 15 bp, Homo sapiens
acatacattcatata

SEQ ID NO: 1200395 - DNA, 15 bp, Homo sapiens
aacatacattcatat

SEQ ID NO: 1200396 - DNA, 15 bp, Homo sapiens
aaacatacattcata

SEQ ID NO: 1200397 - DNA, 15 bp, Homo sapiens
taaacatacattcat

SEQ ID NO: 1200398 - DNA, 15 bp, Homo sapiens
ataaacatacattca

SEQ ID NO: 1200399 - DNA, 15 bp, Homo sapiens
cataaacatacattc

SEQ ID NO: 1200400 - DNA, 15 bp, Homo sapiens
ccataaacatacatt

SEQ ID NO: 1200401 - DNA, 15 bp, Homo sapiens
cccataaacatacat

SEQ ID NO: 1200402 - DNA, 15 bp, Homo sapiens
gcccataaacataca

SEQ ID NO: 1200403 - DNA, 15 bp, Homo sapiens
agcccataaacatac

SEQ ID NO: 1200404 - DNA, 15 bp, Homo sapiens
cagcccataaacata

SEQ ID NO: 1200405 - DNA, 15 bp, Homo sapiens
acagcccataaacat

SEQ ID NO: 1200406 - DNA, 15 bp, Homo sapiens
tacagcccataaaca

SEQ ID NO: 1200407 - DNA, 15 bp, Homo sapiens
atacagcccataaac

SEQ ID NO: 1200408 - DNA, 15 bp, Homo sapiens
catacagcccataaa

SEQ ID NO: 1200409 - DNA, 15 bp, Homo sapiens
acatacagcccataa

SEQ ID NO: 1200410 - DNA, 15 bp, Homo sapiens
cacatacagcccata

SEQ ID NO: 1200411 - DNA, 15 bp, Homo sapiens
acacatacagcccat

SEQ ID NO: 1200412 - DNA, 15 bp, Homo sapiens
cacacatacagccca

SEQ ID NO: 1200413 - DNA, 15 bp, Homo sapiens
acacacatacagccc

SEQ ID NO: 1200414 - DNA, 15 bp, Homo sapiens
tacacacatacagcc

SEQ ID NO: 1200415 - DNA, 15 bp, Homo sapiens
ttacacacatacagc

SEQ ID NO: 1200416 - DNA, 15 bp, Homo sapiens
tttacacacatacag

SEQ ID NO: 1200417 - DNA, 15 bp, Homo sapiens
gtttacacacataca

SEQ ID NO: 1200418 - DNA, 15 bp, Homo sapiens
tgtttacacacatac

SEQ ID NO: 1200419 - DNA, 15 bp, Homo sapiens
atgtttacacacata

SEQ ID NO: 1200420 - DNA, 15 bp, Homo sapiens
tatgtttacacacat

SEQ ID NO: 1200421 - DNA, 15 bp, Homo sapiens
gtatgtttacacaca

SEQ ID NO: 1200422 - DNA, 15 bp, Homo sapiens
agtatgtttacacac

SEQ ID NO: 1200423 - DNA, 15 bp, Homo sapiens
gagtatgtttacaca

SEQ ID NO: 1200424 - DNA, 15 bp, Homo sapiens
tgagtatgtttacac

SEQ ID NO: 1200425 - DNA, 15 bp, Homo sapiens
atgagtatgtttaca

SEQ ID NO: 1200426 - DNA, 15 bp, Homo sapiens
aatgagtatgtttac

SEQ ID NO: 1200427 - DNA, 15 bp, Homo sapiens
taatgagtatgttta

SEQ ID NO: 1200428 - DNA, 15 bp, Homo sapiens
ataatgagtatgttt

SEQ ID NO: 1200429 - DNA, 15 bp, Homo sapiens
cataatgagtatgtt

SEQ ID NO: 1200430 - DNA, 15 bp, Homo sapiens
ccataatgagtatgt

SEQ ID NO: 1200431 - DNA, 15 bp, Homo sapiens
accataatgagtatg

SEQ ID NO: 1200432 - DNA, 15 bp, Homo sapiens
gaccataatgagtat

SEQ ID NO: 1200433 - DNA, 15 bp, Homo sapiens
agaccataatgagta

SEQ ID NO: 1200434 - DNA, 15 bp, Homo sapiens
tagaccataatgagt

SEQ ID NO: 1200435 - DNA, 15 bp, Homo sapiens
ttagaccataatgag

SEQ ID NO: 1200436 - DNA, 15 bp, Homo sapiens
tttagaccataatga

SEQ ID NO: 1200437 - DNA, 15 bp, Homo sapiens
ttttagaccataatg

SEQ ID NO: 1200438 - DNA, 15 bp, Homo sapiens
cttttagaccataat

SEQ ID NO: 1200439 - DNA, 15 bp, Homo sapiens
tcttttagaccataa

SEQ ID NO: 1200440 - DNA, 15 bp, Homo sapiens
ttcttttagaccata

SEQ ID NO: 1200441 - DNA, 15 bp, Homo sapiens
tttcttttagaccat

SEQ ID NO: 1200442 - DNA, 15 bp, Homo sapiens
ttttcttttagacca

SEQ ID NO: 1200443 - DNA, 15 bp, Homo sapiens
attttcttttagacc

SEQ ID NO: 1200444 - DNA, 15 bp, Homo sapiens
aattttcttttagac

SEQ ID NO: 1200445 - DNA, 15 bp, Homo sapiens
aaattttcttttaga

SEQ ID NO: 1200446 - DNA, 15 bp, Homo sapiens
aaaattttcttttag

SEQ ID NO: 1200447 - DNA, 15 bp, Homo sapiens
cacacttcaggcctt

SEQ ID NO: 1200448 - DNA, 15 bp, Homo sapiens
ccacacttcaggcct

SEQ ID NO: 1200449 - DNA, 15 bp, Homo sapiens
gccacacttcaggcc

SEQ ID NO: 1200450 - DNA, 15 bp, Homo sapiens
tgccacacttcaggc

SEQ ID NO: 1200451 - DNA, 15 bp, Homo sapiens
ctgccacacttcagg

SEQ ID NO: 1200452 - DNA, 15 bp, Homo sapiens
cctgccacacttcag

SEQ ID NO: 1200453 - DNA, 15 bp, Homo sapiens
gcctgccacacttca

SEQ ID NO: 1200454 - DNA, 15 bp, Homo sapiens
tgcctgccacacttc

SEQ ID NO: 1200455 - DNA, 15 bp, Homo sapiens
atgcctgccacactt

SEQ ID NO: 1200456 - DNA, 15 bp, Homo sapiens
aatgcctgccacact

SEQ ID NO: 1200457 - DNA, 15 bp, Homo sapiens
aaatgcctgccacac

SEQ ID NO: 1200458 - DNA, 15 bp, Homo sapiens
caaatgcctgccaca

SEQ ID NO: 1200459 - DNA, 15 bp, Homo sapiens
ccaaatgcctgccac

SEQ ID NO: 1200460 - DNA, 15 bp, Homo sapiens
cccaaatgcctgcca

SEQ ID NO: 1200461 - DNA, 15 bp, Homo sapiens
acccaaatgcctgcc

SEQ ID NO: 1200462 - DNA, 15 bp, Homo sapiens
aacccaaatgcctgc

SEQ ID NO: 1200463 - DNA, 15 bp, Homo sapiens
gaacccaaatgcctg

SEQ ID NO: 1200464 - DNA, 15 bp, Homo sapiens
agaacccaaatgcct

SEQ ID NO: 1200465 - DNA, 15 bp, Homo sapiens
aagaacccaaatgcc

SEQ ID NO: 1200466 - DNA, 15 bp, Homo sapiens
aaagaacccaaatgc

SEQ ID NO: 1200467 - DNA, 15 bp, Homo sapiens
taaagaacccaaatg

SEQ ID NO: 1200468 - DNA, 15 bp, Homo sapiens
ctaaagaacccaaat

SEQ ID NO: 1200469 - DNA, 15 bp, Homo sapiens
tctaaagaacccaaa

SEQ ID NO: 1200470 - DNA, 15 bp, Homo sapiens
ctctaaagaacccaa

SEQ ID NO: 1200471 - DNA, 15 bp, Homo sapiens
cctctaaagaaccca

SEQ ID NO: 1200472 - DNA, 15 bp, Homo sapiens
ccctctaaagaaccc

SEQ ID NO: 1200473 - DNA, 15 bp, Homo sapiens
accctctaaagaacc

SEQ ID NO: 1200474 - DNA, 15 bp, Homo sapiens
aaccctctaaagaac

SEQ ID NO: 1200475 - DNA, 15 bp, Homo sapiens
aaaccctctaaagaa

SEQ ID NO: 1200476 - DNA, 15 bp, Homo sapiens
taaaccctctaaaga

SEQ ID NO: 1200477 - DNA, 15 bp, Homo sapiens
ttaaaccctctaaag

SEQ ID NO: 1200478 - DNA, 15 bp, Homo sapiens
tttaaaccctctaaa

SEQ ID NO: 1200479 - DNA, 15 bp, Homo sapiens
ctttaaaccctctaa

SEQ ID NO: 1200480 - DNA, 15 bp, Homo sapiens
actttaaaccctcta

SEQ ID NO: 1200481 - DNA, 15 bp, Homo sapiens
tactttaaaccctct

SEQ ID NO: 1200482 - DNA, 15 bp, Homo sapiens
ttactttaaaccctc

SEQ ID NO: 1200483 - DNA, 15 bp, Homo sapiens
gttactttaaaccct

SEQ ID NO: 1200484 - DNA, 15 bp, Homo sapiens
agttactttaaaccc

SEQ ID NO: 1200485 - DNA, 15 bp, Homo sapiens
aagttactttaaacc

SEQ ID NO: 1200486 - DNA, 15 bp, Homo sapiens
taagttactttaaac

SEQ ID NO: 1200487 - DNA, 15 bp, Homo sapiens
ataagttactttaaa

SEQ ID NO: 1200488 - DNA, 15 bp, Homo sapiens
aataagttactttaa

SEQ ID NO: 1200489 - DNA, 15 bp, Homo sapiens
aaataagttacttta

SEQ ID NO: 1200490 - DNA, 15 bp, Homo sapiens
gaaataagttacttt

SEQ ID NO: 1200491 - DNA, 15 bp, Homo sapiens
agaaataagttactt

SEQ ID NO: 1200492 - DNA, 15 bp, Homo sapiens
aagaaataagttact

SEQ ID NO: 1200493 - DNA, 15 bp, Homo sapiens
gaagaaataagttac

SEQ ID NO: 1200494 - DNA, 15 bp, Homo sapiens
ggaagaaataagtta

SEQ ID NO: 1200495 - DNA, 15 bp, Homo sapiens
aggaagaaataagtt

SEQ ID NO: 1200496 - DNA, 15 bp, Homo sapiens
taggaagaaataagt

SEQ ID NO: 1200497 - DNA, 15 bp, Homo sapiens
ttaggaagaaataag

SEQ ID NO: 1200498 - DNA, 15 bp, Homo sapiens
tttaggaagaaataa

SEQ ID NO: 1200499 - DNA, 15 bp, Homo sapiens
ttttaggaagaaata

SEQ ID NO: 1200500 - DNA, 15 bp, Homo sapiens
tttttaggaagaaat

SEQ ID NO: 1200501 - DNA, 15 bp, Homo sapiens
ctttttaggaagaaa

SEQ ID NO: 1200502 - DNA, 15 bp, Homo sapiens
actttttaggaagaa

SEQ ID NO: 1200503 - DNA, 15 bp, Homo sapiens
cactttttaggaaga

SEQ ID NO: 1200504 - DNA, 15 bp, Homo sapiens
tcactttttaggaag

SEQ ID NO: 1200505 - DNA, 15 bp, Homo sapiens
gtcactttttaggaa

SEQ ID NO: 1200506 - DNA, 15 bp, Homo sapiens
tgtcactttttagga

SEQ ID NO: 1200507 - DNA, 15 bp, Homo sapiens
ttgtcactttttagg

SEQ ID NO: 1200508 - DNA, 15 bp, Homo sapiens
cttgtcactttttag

SEQ ID NO: 1200509 - DNA, 15 bp, Homo sapiens
ccttgtcacttttta

SEQ ID NO: 1200510 - DNA, 15 bp, Homo sapiens
cccttgtcacttttt

SEQ ID NO: 1200511 - DNA, 15 bp, Homo sapiens
ccccttgtcactttt

SEQ ID NO: 1200512 - DNA, 15 bp, Homo sapiens
cccccttgtcacttt

SEQ ID NO: 1200513 - DNA, 15 bp, Homo sapiens
gcccccttgtcactt

SEQ ID NO: 1200514 - DNA, 15 bp, Homo sapiens
ggcccccttgtcact

SEQ ID NO: 1200515 - DNA, 15 bp, Homo sapiens
cggcccccttgtcac

SEQ ID NO: 1200516 - DNA, 15 bp, Homo sapiens
ccggcccccttgtca

SEQ ID NO: 1200517 - DNA, 15 bp, Homo sapiens
cccggcccccttgtc

SEQ ID NO: 1200518 - DNA, 15 bp, Homo sapiens
gcccggcccccttgt

SEQ ID NO: 1200519 - DNA, 15 bp, Homo sapiens
cgcccggcccccttg

SEQ ID NO: 1200520 - DNA, 15 bp, Homo sapiens
gcgcccggccccctt

SEQ ID NO: 1200521 - DNA, 15 bp, Homo sapiens
cgcgcccggccccct

SEQ ID NO: 1200522 - DNA, 15 bp, Homo sapiens
ccgcgcccggccccc

SEQ ID NO: 1200523 - DNA, 15 bp, Homo sapiens
accgcgcccggcccc

SEQ ID NO: 1200524 - DNA, 15 bp, Homo sapiens
cattacaggcgtgag

SEQ ID NO: 1200525 - DNA, 15 bp, Homo sapiens
gcattacaggcgtga

SEQ ID NO: 1200526 - DNA, 15 bp, Homo sapiens
ggcattacaggcgtg

SEQ ID NO: 1200527 - DNA, 15 bp, Homo sapiens
tggcattacaggcgt

SEQ ID NO: 1200528 - DNA, 15 bp, Homo sapiens
ttggcattacaggcg

SEQ ID NO: 1200529 - DNA, 15 bp, Homo sapiens
gttggcattacaggc

SEQ ID NO: 1200530 - DNA, 15 bp, Homo sapiens
tgttggcattacagg

SEQ ID NO: 1200531 - DNA, 15 bp, Homo sapiens
gtgttggcattacag

SEQ ID NO: 1200532 - DNA, 15 bp, Homo sapiens
agtgttggcattaca

SEQ ID NO: 1200533 - DNA, 15 bp, Homo sapiens
aagtgttggcattac

SEQ ID NO: 1200534 - DNA, 15 bp, Homo sapiens
aaagtgttggcatta

SEQ ID NO: 1200535 - DNA, 15 bp, Homo sapiens
caaagtgttggcatt

SEQ ID NO: 1200536 - DNA, 15 bp, Homo sapiens
ccaaagtgttggcat

SEQ ID NO: 1200537 - DNA, 15 bp, Homo sapiens
cccaaagtgttggca

SEQ ID NO: 1200538 - DNA, 15 bp, Homo sapiens
tcccaaagtgttggc

SEQ ID NO: 1200539 - DNA, 15 bp, Homo sapiens
ctcccaaagtgttgg

SEQ ID NO: 1200540 - DNA, 15 bp, Homo sapiens
cctcccaaagtgttg

SEQ ID NO: 1200541 - DNA, 15 bp, Homo sapiens
acctcccaaagtgtt

SEQ ID NO: 1200542 - DNA, 15 bp, Homo sapiens
gacctcccaaagtgt

SEQ ID NO: 1200543 - DNA, 15 bp, Homo sapiens
gccttgacctcccaa

SEQ ID NO: 1200544 - DNA, 15 bp, Homo sapiens
tgccttgacctccca

SEQ ID NO: 1200545 - DNA, 15 bp, Homo sapiens
ctgccttgacctccc

SEQ ID NO: 1200546 - DNA, 15 bp, Homo sapiens
cctgccttgacctcc

SEQ ID NO: 1200547 - DNA, 15 bp, Homo sapiens
gcctgccttgacctc

SEQ ID NO: 1200548 - DNA, 15 bp, Homo sapiens
ggtgatctgcctgcc

SEQ ID NO: 1200549 - DNA, 15 bp, Homo sapiens
aggtgatctgcctgc

SEQ ID NO: 1200550 - DNA, 15 bp, Homo sapiens
caggtgatctgcctg

SEQ ID NO: 1200551 - DNA, 15 bp, Homo sapiens
tcaggtgatctgcct

SEQ ID NO: 1200552 - DNA, 15 bp, Homo sapiens
ctcaggtgatctgcc

SEQ ID NO: 1200553 - DNA, 15 bp, Homo sapiens
gtggtctcgaactcc

SEQ ID NO: 1200554 - DNA, 15 bp, Homo sapiens
ggtggtctcgaactc

SEQ ID NO: 1200555 - DNA, 15 bp, Homo sapiens
gggtggtctcgaact

SEQ ID NO: 1200556 - DNA, 15 bp, Homo sapiens
agggtggtctcgaac

SEQ ID NO: 1200557 - DNA, 15 bp, Homo sapiens
cagggtggtctcgaa

SEQ ID NO: 1200558 - DNA, 15 bp, Homo sapiens
ccagggtggtctcga

SEQ ID NO: 1200559 - DNA, 15 bp, Homo sapiens
gccagggtggtctcg

SEQ ID NO: 1200560 - DNA, 15 bp, Homo sapiens
ggccagggtggtctc

SEQ ID NO: 1200561 - DNA, 15 bp, Homo sapiens
tggccagggtggtct

SEQ ID NO: 1200562 - DNA, 15 bp, Homo sapiens
ttggccagggtggtc

SEQ ID NO: 1200563 - DNA, 15 bp, Homo sapiens
gttggccagggtggt

SEQ ID NO: 1200564 - DNA, 15 bp, Homo sapiens
tgttggccagggtgg

SEQ ID NO: 1200565 - DNA, 15 bp, Homo sapiens
atgttggccagggtg

SEQ ID NO: 1200566 - DNA, 15 bp, Homo sapiens
catgttggccagggt

SEQ ID NO: 1200567 - DNA, 15 bp, Homo sapiens
ccatgttggccaggg

SEQ ID NO: 1200568 - DNA, 15 bp, Homo sapiens
tcttttagtagagac

SEQ ID NO: 1200569 - DNA, 15 bp, Homo sapiens
ttcttttagtagaga

SEQ ID NO: 1200570 - DNA, 15 bp, Homo sapiens
gttcttttagtagag

SEQ ID NO: 1200571 - DNA, 15 bp, Homo sapiens
tgttcttttagtaga

SEQ ID NO: 1200572 - DNA, 15 bp, Homo sapiens
ttgttcttttagtag

SEQ ID NO: 1200573 - DNA, 15 bp, Homo sapiens
tttgttcttttagta

SEQ ID NO: 1200574 - DNA, 15 bp, Homo sapiens
ttttgttcttttagt

SEQ ID NO: 1200575 - DNA, 15 bp, Homo sapiens
tttttgttcttttag

SEQ ID NO: 1200576 - DNA, 15 bp, Homo sapiens
atttttgttctttta

SEQ ID NO: 1200577 - DNA, 15 bp, Homo sapiens
aatttttgttctttt

SEQ ID NO: 1200578 - DNA, 15 bp, Homo sapiens
taatttttgttcttt

SEQ ID NO: 1200579 - DNA, 15 bp, Homo sapiens
ctaatttttgttctt

SEQ ID NO: 1200580 - DNA, 15 bp, Homo sapiens
gctaatttttgttct

SEQ ID NO: 1200581 - DNA, 15 bp, Homo sapiens
ggctaatttttgttc

SEQ ID NO: 1200582 - DNA, 15 bp, Homo sapiens
cggctaatttttgtt

SEQ ID NO: 1200583 - DNA, 15 bp, Homo sapiens
ctgccaccacacccg

SEQ ID NO: 1200584 - DNA, 15 bp, Homo sapiens
cgcctgccaccacac

SEQ ID NO: 1200585 - DNA, 15 bp, Homo sapiens
gcgcctgccaccaca

SEQ ID NO: 1200586 - DNA, 15 bp, Homo sapiens
gaagcgattctcctg

SEQ ID NO: 1200587 - DNA, 15 bp, Homo sapiens
tgaagcgattctcct

SEQ ID NO: 1200588 - DNA, 15 bp, Homo sapiens
ttgaagcgattctcc

SEQ ID NO: 1200589 - DNA, 15 bp, Homo sapiens
gttgaagcgattctc

SEQ ID NO: 1200590 - DNA, 15 bp, Homo sapiens
ggttgaagcgattct

SEQ ID NO: 1200591 - DNA, 15 bp, Homo sapiens
aggttgaagcgattc

SEQ ID NO: 1200592 - DNA, 15 bp, Homo sapiens
caggttgaagcgatt

SEQ ID NO: 1200593 - DNA, 15 bp, Homo sapiens
ccaggttgaagcgat

SEQ ID NO: 1200594 - DNA, 15 bp, Homo sapiens
cccaggttgaagcga

SEQ ID NO: 1200595 - DNA, 15 bp, Homo sapiens
tcccaggttgaagcg

SEQ ID NO: 1200596 - DNA, 15 bp, Homo sapiens
ctcccaggttgaagc

SEQ ID NO: 1200597 - DNA, 15 bp, Homo sapiens
cctcccaggttgaag

SEQ ID NO: 1200598 - DNA, 15 bp, Homo sapiens
acctcccaggttgaa

SEQ ID NO: 1200599 - DNA, 15 bp, Homo sapiens
cacctcccaggttga

SEQ ID NO: 1200600 - DNA, 15 bp, Homo sapiens
ccacctcccaggttg

SEQ ID NO: 1200601 - DNA, 15 bp, Homo sapiens
ctcactgcaacctcc

SEQ ID NO: 1200602 - DNA, 15 bp, Homo sapiens
tgcgatcttggctca

SEQ ID NO: 1200603 - DNA, 15 bp, Homo sapiens
gtgcgatcttggctc

SEQ ID NO: 1200604 - DNA, 15 bp, Homo sapiens
gagacagagtttcgc

SEQ ID NO: 1200605 - DNA, 15 bp, Homo sapiens
tgagacagagtttcg

SEQ ID NO: 1200606 - DNA, 15 bp, Homo sapiens
ttgagacagagtttc

SEQ ID NO: 1200607 - DNA, 15 bp, Homo sapiens
tcacttttttttttt

SEQ ID NO: 1200608 - DNA, 15 bp, Homo sapiens
gtcactttttttttt

SEQ ID NO: 1200609 - DNA, 15 bp, Homo sapiens
tgtcacttttttttt

SEQ ID NO: 1200610 - DNA, 15 bp, Homo sapiens
ttgtcactttttttt

SEQ ID NO: 1200611 - DNA, 15 bp, Homo sapiens
cttgtcacttttttt

SEQ ID NO: 1200612 - DNA, 15 bp, Homo sapiens
tcttgtcactttttt

SEQ ID NO: 1200613 - DNA, 15 bp, Homo sapiens
ctcttgtcacttttt

SEQ ID NO: 1200614 - DNA, 15 bp, Homo sapiens
gctcttgtcactttt

SEQ ID NO: 1200615 - DNA, 15 bp, Homo sapiens
agctcttgtcacttt

SEQ ID NO: 1200616 - DNA, 15 bp, Homo sapiens
cagctcttgtcactt

SEQ ID NO: 1200617 - DNA, 15 bp, Homo sapiens
acagctcttgtcact

SEQ ID NO: 1200618 - DNA, 15 bp, Homo sapiens
aacagctcttgtcac

SEQ ID NO: 1200619 - DNA, 15 bp, Homo sapiens
taacagctcttgtca

SEQ ID NO: 1200620 - DNA, 15 bp, Homo sapiens
ttaacagctcttgtc

SEQ ID NO: 1200621 - DNA, 15 bp, Homo sapiens
tttaacagctcttgt

SEQ ID NO: 1200622 - DNA, 15 bp, Homo sapiens
ttttaacagctcttg

SEQ ID NO: 1200623 - DNA, 15 bp, Homo sapiens
tttttaacagctctt

SEQ ID NO: 1200624 - DNA, 15 bp, Homo sapiens
gtttttaacagctct

SEQ ID NO: 1200625 - DNA, 15 bp, Homo sapiens
tgtttttaacagctc

SEQ ID NO: 1200626 - DNA, 15 bp, Homo sapiens
atgtttttaacagct

SEQ ID NO: 1200627 - DNA, 15 bp, Homo sapiens
gatgtttttaacagc

SEQ ID NO: 1200628 - DNA, 15 bp, Homo sapiens
agatgtttttaacag

SEQ ID NO: 1200629 - DNA, 15 bp, Homo sapiens
gagatgtttttaaca

SEQ ID NO: 1200630 - DNA, 15 bp, Homo sapiens
agagatgtttttaac

SEQ ID NO: 1200631 - DNA, 15 bp, Homo sapiens
gagagatgtttttaa

SEQ ID NO: 1200632 - DNA, 15 bp, Homo sapiens
agagagatgttttta

SEQ ID NO: 1200633 - DNA, 15 bp, Homo sapiens
aagagagatgttttt

SEQ ID NO: 1200634 - DNA, 15 bp, Homo sapiens
taagagagatgtttt

SEQ ID NO: 1200635 - DNA, 15 bp, Homo sapiens
ataagagagatgttt

SEQ ID NO: 1200636 - DNA, 15 bp, Homo sapiens
aataagagagatgtt

SEQ ID NO: 1200637 - DNA, 15 bp, Homo sapiens
aaataagagagatgt

SEQ ID NO: 1200638 - DNA, 15 bp, Homo sapiens
caaataagagagatg

SEQ ID NO: 1200639 - DNA, 15 bp, Homo sapiens
gcaaataagagagat

SEQ ID NO: 1200640 - DNA, 15 bp, Homo sapiens
ggcaaataagagaga

SEQ ID NO: 1200641 - DNA, 15 bp, Homo sapiens
aggcaaataagagag

SEQ ID NO: 1200642 - DNA, 15 bp, Homo sapiens
aaggcaaataagaga

SEQ ID NO: 1200643 - DNA, 15 bp, Homo sapiens
agaaggcaaataaga

SEQ ID NO: 1200644 - DNA, 15 bp, Homo sapiens
tagaaggcaaataag

SEQ ID NO: 1200645 - DNA, 15 bp, Homo sapiens
ctagaaggcaaataa

SEQ ID NO: 1200646 - DNA, 15 bp, Homo sapiens
actagaaggcaaata

SEQ ID NO: 1200647 - DNA, 15 bp, Homo sapiens
cactagaaggcaaat

SEQ ID NO: 1200648 - DNA, 15 bp, Homo sapiens
tcactagaaggcaaa

SEQ ID NO: 1200649 - DNA, 15 bp, Homo sapiens
gtcactagaaggcaa

SEQ ID NO: 1200650 - DNA, 15 bp, Homo sapiens
ggtcactagaaggca

SEQ ID NO: 1200651 - DNA, 15 bp, Homo sapiens
tggtcactagaaggc

SEQ ID NO: 1200652 - DNA, 15 bp, Homo sapiens
ttggtcactagaagg

SEQ ID NO: 1200653 - DNA, 15 bp, Homo sapiens
cttggtcactagaag

SEQ ID NO: 1200654 - DNA, 15 bp, Homo sapiens
gcttggtcactagaa

SEQ ID NO: 1200655 - DNA, 15 bp, Homo sapiens
tgcttggtcactaga

SEQ ID NO: 1200656 - DNA, 15 bp, Homo sapiens
gtgcttggtcactag

SEQ ID NO: 1200657 - DNA, 15 bp, Homo sapiens
ggtgcttggtcacta

SEQ ID NO: 1200658 - DNA, 15 bp, Homo sapiens
tggtgcttggtcact

SEQ ID NO: 1200659 - DNA, 15 bp, Homo sapiens
atggtgcttggtcac

SEQ ID NO: 1200660 - DNA, 15 bp, Homo sapiens
aatggtgcttggtca

SEQ ID NO: 1200661 - DNA, 15 bp, Homo sapiens
aaatggtgcttggtc

SEQ ID NO: 1200662 - DNA, 15 bp, Homo sapiens
caaatggtgcttggt

SEQ ID NO: 1200663 - DNA, 15 bp, Homo sapiens
tcaaatggtgcttgg

SEQ ID NO: 1200664 - DNA, 15 bp, Homo sapiens
ttcaaatggtgcttg

SEQ ID NO: 1200665 - DNA, 15 bp, Homo sapiens
cttcaaatggtgctt

SEQ ID NO: 1200666 - DNA, 15 bp, Homo sapiens
tcttcaaatggtgct

SEQ ID NO: 1200667 - DNA, 15 bp, Homo sapiens
ttcttcaaatggtgc

SEQ ID NO: 1200668 - DNA, 15 bp, Homo sapiens
gttcttcaaatggtg

SEQ ID NO: 1200669 - DNA, 15 bp, Homo sapiens
tgttcttcaaatggt

SEQ ID NO: 1200670 - DNA, 15 bp, Homo sapiens
ctgttcttcaaatgg

SEQ ID NO: 1200671 - DNA, 15 bp, Homo sapiens
cctgttcttcaaatg

SEQ ID NO: 1200672 - DNA, 15 bp, Homo sapiens
gcctgttcttcaaat

SEQ ID NO: 1200673 - DNA, 15 bp, Homo sapiens
ggcctgttcttcaaa

SEQ ID NO: 1200674 - DNA, 15 bp, Homo sapiens
cggcctgttcttcaa

SEQ ID NO: 1200675 - DNA, 15 bp, Homo sapiens
acggcctgttcttca

SEQ ID NO: 1200676 - DNA, 15 bp, Homo sapiens
gacggcctgttcttc

SEQ ID NO: 1200677 - DNA, 15 bp, Homo sapiens
ggacggcctgttctt

SEQ ID NO: 1200678 - DNA, 15 bp, Homo sapiens
aggacggcctgttct

SEQ ID NO: 1200679 - DNA, 15 bp, Homo sapiens
caggacggcctgttc

SEQ ID NO: 1200680 - DNA, 15 bp, Homo sapiens
ccaggacggcctgtt

SEQ ID NO: 1200681 - DNA, 15 bp, Homo sapiens
accaggacggcctgt

SEQ ID NO: 1200682 - DNA, 15 bp, Homo sapiens
gaccaggacggcctg

SEQ ID NO: 1200683 - DNA, 15 bp, Homo sapiens
agaccaggacggcct

SEQ ID NO: 1200684 - DNA, 15 bp, Homo sapiens
tagaccaggacggcc

SEQ ID NO: 1200685 - DNA, 15 bp, Homo sapiens
gtagaccaggacggc

SEQ ID NO: 1200686 - DNA, 15 bp, Homo sapiens
ggtagaccaggacgg

SEQ ID NO: 1200687 - DNA, 15 bp, Homo sapiens
tggtagaccaggacg

SEQ ID NO: 1200688 - DNA, 15 bp, Homo sapiens
gtggtagaccaggac

SEQ ID NO: 1200689 - DNA, 15 bp, Homo sapiens
tgtggtagaccagga

SEQ ID NO: 1200690 - DNA, 15 bp, Homo sapiens
ctgtggtagaccagg

SEQ ID NO: 1200691 - DNA, 15 bp, Homo sapiens
actgtggtagaccag

SEQ ID NO: 1200692 - DNA, 15 bp, Homo sapiens
cactgtggtagacca

SEQ ID NO: 1200693 - DNA, 15 bp, Homo sapiens
gcactgtggtagacc

SEQ ID NO: 1200694 - DNA, 15 bp, Homo sapiens
tgcactgtggtagac

SEQ ID NO: 1200695 - DNA, 15 bp, Homo sapiens
ttgcactgtggtaga

SEQ ID NO: 1200696 - DNA, 15 bp, Homo sapiens
tttgcactgtggtag

SEQ ID NO: 1200697 - DNA, 15 bp, Homo sapiens
ctttgcactgtggta

SEQ ID NO: 1200698 - DNA, 15 bp, Homo sapiens
tctttgcactgtggt

SEQ ID NO: 1200699 - DNA, 15 bp, Homo sapiens
ttctttgcactgtgg

SEQ ID NO: 1200700 - DNA, 15 bp, Homo sapiens
tttctttgcactgtg

SEQ ID NO: 1200701 - DNA, 15 bp, Homo sapiens
ctttctttgcactgt

SEQ ID NO: 1200702 - DNA, 15 bp, Homo sapiens
cctttctttgcactg

SEQ ID NO: 1200703 - DNA, 15 bp, Homo sapiens
tcctttctttgcact

SEQ ID NO: 1200704 - DNA, 15 bp, Homo sapiens
atcctttctttgcac

SEQ ID NO: 1200705 - DNA, 15 bp, Homo sapiens
gatcctttctttgca

SEQ ID NO: 1200706 - DNA, 15 bp, Homo sapiens
ggatcctttctttgc

SEQ ID NO: 1200707 - DNA, 15 bp, Homo sapiens
tggatcctttctttg

SEQ ID NO: 1200708 - DNA, 15 bp, Homo sapiens
ctggatcctttcttt

SEQ ID NO: 1200709 - DNA, 15 bp, Homo sapiens
tctggatcctttctt

SEQ ID NO: 1200710 - DNA, 15 bp, Homo sapiens
atctggatcctttct

SEQ ID NO: 1200711 - DNA, 15 bp, Homo sapiens
catctggatcctttc

SEQ ID NO: 1200712 - DNA, 15 bp, Homo sapiens
gcatctggatccttt

SEQ ID NO: 1200713 - DNA, 15 bp, Homo sapiens
tgcatctggatcctt

SEQ ID NO: 1200714 - DNA, 15 bp, Homo sapiens
ctgcatctggatcct

SEQ ID NO: 1200715 - DNA, 15 bp, Homo sapiens
actgcatctggatcc

SEQ ID NO: 1200716 - DNA, 15 bp, Homo sapiens
aactgcatctggatc

SEQ ID NO: 1200717 - DNA, 15 bp, Homo sapiens
aaactgcatctggat

SEQ ID NO: 1200718 - DNA, 15 bp, Homo sapiens
caaactgcatctgga

SEQ ID NO: 1200719 - DNA, 15 bp, Homo sapiens
acaaactgcatctgg

SEQ ID NO: 1200720 - DNA, 15 bp, Homo sapiens
gacaaactgcatctg

SEQ ID NO: 1200721 - DNA, 15 bp, Homo sapiens
ggacaaactgcatct

SEQ ID NO: 1200722 - DNA, 15 bp, Homo sapiens
aggacaaactgcatc

SEQ ID NO: 1200723 - DNA, 15 bp, Homo sapiens
gaggacaaactgcat

SEQ ID NO: 1200724 - DNA, 15 bp, Homo sapiens
agaggacaaactgca

SEQ ID NO: 1200725 - DNA, 15 bp, Homo sapiens
gagaggacaaactgc

SEQ ID NO: 1200726 - DNA, 15 bp, Homo sapiens
ggagaggacaaactg

SEQ ID NO: 1200727 - DNA, 15 bp, Homo sapiens
tggagaggacaaact

SEQ ID NO: 1200728 - DNA, 15 bp, Homo sapiens
ctggagaggacaaac

SEQ ID NO: 1200729 - DNA, 15 bp, Homo sapiens
gctggagaggacaaa

SEQ ID NO: 1200730 - DNA, 15 bp, Homo sapiens
agctggagaggacaa

SEQ ID NO: 1200731 - DNA, 15 bp, Homo sapiens
cagctggagaggaca

SEQ ID NO: 1200732 - DNA, 15 bp, Homo sapiens
gcagctggagaggac

SEQ ID NO: 1200733 - DNA, 15 bp, Homo sapiens
tgcagctggagagga

SEQ ID NO: 1200734 - DNA, 15 bp, Homo sapiens
atgcagctggagagg

SEQ ID NO: 1200735 - DNA, 15 bp, Homo sapiens
catgcagctggagag

SEQ ID NO: 1200736 - DNA, 15 bp, Homo sapiens
tcatgcagctggaga

SEQ ID NO: 1200737 - DNA, 15 bp, Homo sapiens
ctcatgcagctggag

SEQ ID NO: 1200738 - DNA, 15 bp, Homo sapiens
actcatgcagctgga

SEQ ID NO: 1200739 - DNA, 15 bp, Homo sapiens
cactcatgcagctgg

SEQ ID NO: 1200740 - DNA, 15 bp, Homo sapiens
ccactcatgcagctg

SEQ ID NO: 1200741 - DNA, 15 bp, Homo sapiens
gccactcatgcagct

SEQ ID NO: 1200742 - DNA, 15 bp, Homo sapiens
cgccactcatgcagc

SEQ ID NO: 1200743 - DNA, 15 bp, Homo sapiens
tcgccactcatgcag

SEQ ID NO: 1200744 - DNA, 15 bp, Homo sapiens
ctcgccactcatgca

SEQ ID NO: 1200745 - DNA, 15 bp, Homo sapiens
cctcgccactcatgc

SEQ ID NO: 1200746 - DNA, 15 bp, Homo sapiens
acctcgccactcatg

SEQ ID NO: 1200747 - DNA, 15 bp, Homo sapiens
aacctcgccactcat

SEQ ID NO: 1200748 - DNA, 15 bp, Homo sapiens
aaacctcgccactca

SEQ ID NO: 1200749 - DNA, 15 bp, Homo sapiens
gaaacctcgccactc

SEQ ID NO: 1200750 - DNA, 15 bp, Homo sapiens
ggaaacctcgccact

SEQ ID NO: 1200751 - DNA, 15 bp, Homo sapiens
gggaaacctcgccac

SEQ ID NO: 1200752 - DNA, 15 bp, Homo sapiens
ggggaaacctcgcca

SEQ ID NO: 1200753 - DNA, 15 bp, Homo sapiens
tggggaaacctcgcc

SEQ ID NO: 1200754 - DNA, 15 bp, Homo sapiens
ctggggaaacctcgc

SEQ ID NO: 1200755 - DNA, 15 bp, Homo sapiens
cctggggaaacctcg

SEQ ID NO: 1200756 - DNA, 15 bp, Homo sapiens
acctggggaaacctc

SEQ ID NO: 1200757 - DNA, 15 bp, Homo sapiens
cacctggggaaacct

SEQ ID NO: 1200758 - DNA, 15 bp, Homo sapiens
tcacctggggaaacc

SEQ ID NO: 1200759 - DNA, 15 bp, Homo sapiens
atcacctggggaaac

SEQ ID NO: 1200760 - DNA, 15 bp, Homo sapiens
catcacctggggaaa

SEQ ID NO: 1200761 - DNA, 15 bp, Homo sapiens
ccatcacctggggaa

SEQ ID NO: 1200762 - DNA, 15 bp, Homo sapiens
cccatcacctgggga

SEQ ID NO: 1200763 - DNA, 15 bp, Homo sapiens
ccccatcacctgggg

SEQ ID NO: 1200764 - DNA, 15 bp, Homo sapiens
tccccatcacctggg

SEQ ID NO: 1200765 - DNA, 15 bp, Homo sapiens
ttccccatcacctgg

SEQ ID NO: 1200766 - DNA, 15 bp, Homo sapiens
tttccccatcacctg

SEQ ID NO: 1200767 - DNA, 15 bp, Homo sapiens
ttttccccatcacct

SEQ ID NO: 1200768 - DNA, 15 bp, Homo sapiens
attttccccatcacc

SEQ ID NO: 1200769 - DNA, 15 bp, Homo sapiens
cattttccccatcac

SEQ ID NO: 1200770 - DNA, 15 bp, Homo sapiens
gtcattttccccatc

SEQ ID NO: 1200771 - DNA, 15 bp, Homo sapiens
ggtcattttccccat

SEQ ID NO: 1200772 - DNA, 15 bp, Homo sapiens
tggtcattttcccca

SEQ ID NO: 1200773 - DNA, 15 bp, Homo sapiens
ttggtcattttcccc

SEQ ID NO: 1200774 - DNA, 15 bp, Homo sapiens
tttggtcattttccc

SEQ ID NO: 1200775 - DNA, 15 bp, Homo sapiens
gtttggtcattttcc

SEQ ID NO: 1200776 - DNA, 15 bp, Homo sapiens
ggtttggtcattttc

SEQ ID NO: 1200777 - DNA, 15 bp, Homo sapiens
aggtttggtcatttt

SEQ ID NO: 1200778 - DNA, 15 bp, Homo sapiens
caggtttggtcattt

SEQ ID NO: 1200779 - DNA, 15 bp, Homo sapiens
ccaggtttggtcatt

SEQ ID NO: 1200780 - DNA, 15 bp, Homo sapiens
gccaggtttggtcat

SEQ ID NO: 1200781 - DNA, 15 bp, Homo sapiens
tgccaggtttggtca

SEQ ID NO: 1200782 - DNA, 15 bp, Homo sapiens
ctgccaggtttggtc

SEQ ID NO: 1200783 - DNA, 15 bp, Homo sapiens
tctgccaggtttggt

SEQ ID NO: 1200784 - DNA, 15 bp, Homo sapiens
ctctgccaggtttgg

SEQ ID NO: 1200785 - DNA, 15 bp, Homo sapiens
cctctgccaggtttg

SEQ ID NO: 1200786 - DNA, 15 bp, Homo sapiens
tcctctgccaggttt

SEQ ID NO: 1200787 - DNA, 15 bp, Homo sapiens
gtcctctgccaggtt

SEQ ID NO: 1200788 - DNA, 15 bp, Homo sapiens
agtcctctgccaggt

SEQ ID NO: 1200789 - DNA, 15 bp, Homo sapiens
cagtcctctgccagg

SEQ ID NO: 1200790 - DNA, 15 bp, Homo sapiens
tcagtcctctgccag

SEQ ID NO: 1200791 - DNA, 15 bp, Homo sapiens
gtcagtcctctgcca

SEQ ID NO: 1200792 - DNA, 15 bp, Homo sapiens
agtcagtcctctgcc

SEQ ID NO: 1200793 - DNA, 15 bp, Homo sapiens
tagtcagtcctctgc

SEQ ID NO: 1200794 - DNA, 15 bp, Homo sapiens
gtagtcagtcctctg

SEQ ID NO: 1200795 - DNA, 15 bp, Homo sapiens
agtagtcagtcctct

SEQ ID NO: 1200796 - DNA, 15 bp, Homo sapiens
gagtagtcagtcctc

SEQ ID NO: 1200797 - DNA, 15 bp, Homo sapiens
agagtagtcagtcct

SEQ ID NO: 1200798 - DNA, 15 bp, Homo sapiens
cagagtagtcagtcc

SEQ ID NO: 1200799 - DNA, 15 bp, Homo sapiens
acagagtagtcagtc

SEQ ID NO: 1200800 - DNA, 15 bp, Homo sapiens
aacagagtagtcagt

SEQ ID NO: 1200801 - DNA, 15 bp, Homo sapiens
aaacagagtagtcag

SEQ ID NO: 1200802 - DNA, 15 bp, Homo sapiens
aaaacagagtagtca

SEQ ID NO: 1200803 - DNA, 15 bp, Homo sapiens
caaaacagagtagtc

SEQ ID NO: 1200804 - DNA, 15 bp, Homo sapiens
tcaaaacagagtagt

SEQ ID NO: 1200805 - DNA, 15 bp, Homo sapiens
atcaaaacagagtag

SEQ ID NO: 1200806 - DNA, 15 bp, Homo sapiens
tatcaaaacagagta

SEQ ID NO: 1200807 - DNA, 15 bp, Homo sapiens
gtatcaaaacagagt

SEQ ID NO: 1200808 - DNA, 15 bp, Homo sapiens
agtatcaaaacagag

SEQ ID NO: 1200809 - DNA, 15 bp, Homo sapiens
gagtatcaaaacaga

SEQ ID NO: 1200810 - DNA, 15 bp, Homo sapiens
ggagtatcaaaacag

SEQ ID NO: 1200811 - DNA, 15 bp, Homo sapiens
gggagtatcaaaaca

SEQ ID NO: 1200812 - DNA, 15 bp, Homo sapiens
agggagtatcaaaac

SEQ ID NO: 1200813 - DNA, 15 bp, Homo sapiens
aagggagtatcaaaa

SEQ ID NO: 1200814 - DNA, 15 bp, Homo sapiens
gaagggagtatcaaa

SEQ ID NO: 1200815 - DNA, 15 bp, Homo sapiens
ggaagggagtatcaa

SEQ ID NO: 1200816 - DNA, 15 bp, Homo sapiens
gggaagggagtatca

SEQ ID NO: 1200817 - DNA, 15 bp, Homo sapiens
ggggaagggagtatc

SEQ ID NO: 1200818 - DNA, 15 bp, Homo sapiens
tggggaagggagtat

SEQ ID NO: 1200819 - DNA, 15 bp, Homo sapiens
gtggggaagggagta

SEQ ID NO: 1200820 - DNA, 15 bp, Homo sapiens
tgtggggaagggagt

SEQ ID NO: 1200821 - DNA, 15 bp, Homo sapiens
ttgtggggaagggag

SEQ ID NO: 1200822 - DNA, 15 bp, Homo sapiens
gttgtggggaaggga

SEQ ID NO: 1200823 - DNA, 15 bp, Homo sapiens
tgttgtggggaaggg

SEQ ID NO: 1200824 - DNA, 15 bp, Homo sapiens
atgttgtggggaagg

SEQ ID NO: 1200825 - DNA, 15 bp, Homo sapiens
tatgttgtggggaag

SEQ ID NO: 1200826 - DNA, 15 bp, Homo sapiens
atatgttgtggggaa

SEQ ID NO: 1200827 - DNA, 15 bp, Homo sapiens
tatatgttgtgggga

SEQ ID NO: 1200828 - DNA, 15 bp, Homo sapiens
gtatatgttgtgggg

SEQ ID NO: 1200829 - DNA, 15 bp, Homo sapiens
tgtatatgttgtggg

SEQ ID NO: 1200830 - DNA, 15 bp, Homo sapiens
gtgtatatgttgtgg

SEQ ID NO: 1200831 - DNA, 15 bp, Homo sapiens
agtgtatatgttgtg

SEQ ID NO: 1200832 - DNA, 15 bp, Homo sapiens
aagtgtatatgttgt

SEQ ID NO: 1200833 - DNA, 15 bp, Homo sapiens
aaagtgtatatgttg

SEQ ID NO: 1200834 - DNA, 15 bp, Homo sapiens
aaaagtgtatatgtt

SEQ ID NO: 1200835 - DNA, 15 bp, Homo sapiens
caaaagtgtatatgt

SEQ ID NO: 1200836 - DNA, 15 bp, Homo sapiens
tcaaaagtgtatatg

SEQ ID NO: 1200837 - DNA, 15 bp, Homo sapiens
ctcaaaagtgtatat

SEQ ID NO: 1200838 - DNA, 15 bp, Homo sapiens
actcaaaagtgtata

SEQ ID NO: 1200839 - DNA, 15 bp, Homo sapiens
aactcaaaagtgtat

SEQ ID NO: 1200840 - DNA, 15 bp, Homo sapiens
aaactcaaaagtgta

SEQ ID NO: 1200841 - DNA, 15 bp, Homo sapiens
taaactcaaaagtgt

SEQ ID NO: 1200842 - DNA, 15 bp, Homo sapiens
ataaactcaaaagtg

SEQ ID NO: 1200843 - DNA, 15 bp, Homo sapiens
gataaactcaaaagt

SEQ ID NO: 1200844 - DNA, 15 bp, Homo sapiens
tgataaactcaaaag

SEQ ID NO: 1200845 - DNA, 15 bp, Homo sapiens
atgataaactcaaaa

SEQ ID NO: 1200846 - DNA, 15 bp, Homo sapiens
aatgataaactcaaa

SEQ ID NO: 1200847 - DNA, 15 bp, Homo sapiens
gaatgataaactcaa

SEQ ID NO: 1200848 - DNA, 15 bp, Homo sapiens
tgaatgataaactca

SEQ ID NO: 1200849 - DNA, 15 bp, Homo sapiens
ttgaatgataaactc

SEQ ID NO: 1200850 - DNA, 15 bp, Homo sapiens
tttgaatgataaact

SEQ ID NO: 1200851 - DNA, 15 bp, Homo sapiens
atttgaatgataaac

SEQ ID NO: 1200852 - DNA, 15 bp, Homo sapiens
aatttgaatgataaa

SEQ ID NO: 1200853 - DNA, 15 bp, Homo sapiens
gaatttgaatgataa

SEQ ID NO: 1200854 - DNA, 15 bp, Homo sapiens
ggaatttgaatgata

SEQ ID NO: 1200855 - DNA, 15 bp, Homo sapiens
aggaatttgaatgat

SEQ ID NO: 1200856 - DNA, 15 bp, Homo sapiens
taggaatttgaatga

SEQ ID NO: 1200857 - DNA, 15 bp, Homo sapiens
ataggaatttgaatg

SEQ ID NO: 1200858 - DNA, 15 bp, Homo sapiens
aataggaatttgaat

SEQ ID NO: 1200859 - DNA, 15 bp, Homo sapiens
aaataggaatttgaa

SEQ ID NO: 1200860 - DNA, 15 bp, Homo sapiens
aaaataggaatttga

SEQ ID NO: 1200861 - DNA, 15 bp, Homo sapiens
taaaataggaatttg

SEQ ID NO: 1200862 - DNA, 15 bp, Homo sapiens
ttaaaataggaattt

SEQ ID NO: 1200863 - DNA, 15 bp, Homo sapiens
attaaaataggaatt

SEQ ID NO: 1200864 - DNA, 15 bp, Homo sapiens
aattaaaataggaat

SEQ ID NO: 1200865 - DNA, 15 bp, Homo sapiens
gaattaaaataggaa

SEQ ID NO: 1200866 - DNA, 15 bp, Homo sapiens
ggaattaaaatagga

SEQ ID NO: 1200867 - DNA, 15 bp, Homo sapiens
aggaattaaaatagg

SEQ ID NO: 1200868 - DNA, 15 bp, Homo sapiens
caggaattaaaatag

SEQ ID NO: 1200869 - DNA, 15 bp, Homo sapiens
gcaggaattaaaata

SEQ ID NO: 1200870 - DNA, 15 bp, Homo sapiens
ggcaggaattaaaat

SEQ ID NO: 1200871 - DNA, 15 bp, Homo sapiens
tggcaggaattaaaa

SEQ ID NO: 1200872 - DNA, 15 bp, Homo sapiens
atggcaggaattaaa

SEQ ID NO: 1200873 - DNA, 15 bp, Homo sapiens
aatggcaggaattaa

SEQ ID NO: 1200874 - DNA, 15 bp, Homo sapiens
aaatggcaggaatta

SEQ ID NO: 1200875 - DNA, 15 bp, Homo sapiens
gaaatggcaggaatt

SEQ ID NO: 1200876 - DNA, 15 bp, Homo sapiens
tgaaatggcaggaat

SEQ ID NO: 1200877 - DNA, 15 bp, Homo sapiens
atgaaatggcaggaa

SEQ ID NO: 1200878 - DNA, 15 bp, Homo sapiens
catgaaatggcagga

SEQ ID NO: 1200879 - DNA, 15 bp, Homo sapiens
tcatgaaatggcagg

SEQ ID NO: 1200880 - DNA, 15 bp, Homo sapiens
ttcatgaaatggcag

SEQ ID NO: 1200881 - DNA, 15 bp, Homo sapiens
gttcatgaaatggca

SEQ ID NO: 1200882 - DNA, 15 bp, Homo sapiens
tgttcatgaaatggc

SEQ ID NO: 1200883 - DNA, 15 bp, Homo sapiens
gtgttcatgaaatgg

SEQ ID NO: 1200884 - DNA, 15 bp, Homo sapiens
ggtgttcatgaaatg

SEQ ID NO: 1200885 - DNA, 15 bp, Homo sapiens
aggtgttcatgaaat

SEQ ID NO: 1200886 - DNA, 15 bp, Homo sapiens
caggtgttcatgaaa

SEQ ID NO: 1200887 - DNA, 15 bp, Homo sapiens
acaggtgttcatgaa

SEQ ID NO: 1200888 - DNA, 15 bp, Homo sapiens
cacaggtgttcatga

SEQ ID NO: 1200889 - DNA, 15 bp, Homo sapiens
ccacaggtgttcatg

SEQ ID NO: 1200890 - DNA, 15 bp, Homo sapiens
accacaggtgttcat

SEQ ID NO: 1200891 - DNA, 15 bp, Homo sapiens
gaccacaggtgttca

SEQ ID NO: 1200892 - DNA, 15 bp, Homo sapiens
tgaccacaggtgttc

SEQ ID NO: 1200893 - DNA, 15 bp, Homo sapiens
atgaccacaggtgtt

SEQ ID NO: 1200894 - DNA, 15 bp, Homo sapiens
tatgaccacaggtgt

SEQ ID NO: 1200895 - DNA, 15 bp, Homo sapiens
atatgaccacaggtg

SEQ ID NO: 1200896 - DNA, 15 bp, Homo sapiens
gatatgaccacaggt

SEQ ID NO: 1200897 - DNA, 15 bp, Homo sapiens
tgatatgaccacagg

SEQ ID NO: 1200898 - DNA, 15 bp, Homo sapiens
ttgatatgaccacag

SEQ ID NO: 1200899 - DNA, 15 bp, Homo sapiens
tttgatatgaccaca

SEQ ID NO: 1200900 - DNA, 15 bp, Homo sapiens
ttttgatatgaccac

SEQ ID NO: 1200901 - DNA, 15 bp, Homo sapiens
gttttgatatgacca

SEQ ID NO: 1200902 - DNA, 15 bp, Homo sapiens
agttttgatatgacc

SEQ ID NO: 1200903 - DNA, 15 bp, Homo sapiens
gagttttgatatgac

SEQ ID NO: 1200904 - DNA, 15 bp, Homo sapiens
tgagttttgatatga

SEQ ID NO: 1200905 - DNA, 15 bp, Homo sapiens
atgagttttgatatg

SEQ ID NO: 1200906 - DNA, 15 bp, Homo sapiens
aatgagttttgatat

SEQ ID NO: 1200907 - DNA, 15 bp, Homo sapiens
caatgagttttgata

SEQ ID NO: 1200908 - DNA, 15 bp, Homo sapiens
ccaatgagttttgat

SEQ ID NO: 1200909 - DNA, 15 bp, Homo sapiens
gccaatgagttttga

SEQ ID NO: 1200910 - DNA, 15 bp, Homo sapiens
agccaatgagttttg

SEQ ID NO: 1200911 - DNA, 15 bp, Homo sapiens
aagccaatgagtttt

SEQ ID NO: 1200912 - DNA, 15 bp, Homo sapiens
aaagccaatgagttt

SEQ ID NO: 1200913 - DNA, 15 bp, Homo sapiens
gaaagccaatgagtt

SEQ ID NO: 1200914 - DNA, 15 bp, Homo sapiens
ggaaagccaatgagt

SEQ ID NO: 1200915 - DNA, 15 bp, Homo sapiens
gggaaagccaatgag

SEQ ID NO: 1200916 - DNA, 15 bp, Homo sapiens
ggggaaagccaatga

SEQ ID NO: 1200917 - DNA, 15 bp, Homo sapiens
tggggaaagccaatg

SEQ ID NO: 1200918 - DNA, 15 bp, Homo sapiens
ctggggaaagccaat

SEQ ID NO: 1200919 - DNA, 15 bp, Homo sapiens
gctggggaaagccaa

SEQ ID NO: 1200920 - DNA, 15 bp, Homo sapiens
ggctggggaaagcca

SEQ ID NO: 1200921 - DNA, 15 bp, Homo sapiens
gggctggggaaagcc

SEQ ID NO: 1200922 - DNA, 15 bp, Homo sapiens
tgggctggggaaagc

SEQ ID NO: 1200923 - DNA, 15 bp, Homo sapiens
gtgggctggggaaag

SEQ ID NO: 1200924 - DNA, 15 bp, Homo sapiens
tgtgggctggggaaa

SEQ ID NO: 1200925 - DNA, 15 bp, Homo sapiens
gtgtgggctggggaa

SEQ ID NO: 1200926 - DNA, 15 bp, Homo sapiens
tgtgtgggctgggga

SEQ ID NO: 1200927 - DNA, 15 bp, Homo sapiens
ctgtgtgggctgggg

SEQ ID NO: 1200928 - DNA, 15 bp, Homo sapiens
actgtgtgggctggg

SEQ ID NO: 1200929 - DNA, 15 bp, Homo sapiens
cactgtgtgggctgg

SEQ ID NO: 1200930 - DNA, 15 bp, Homo sapiens
ccactgtgtgggctg

SEQ ID NO: 1200931 - DNA, 15 bp, Homo sapiens
taccactgtgtgggc

SEQ ID NO: 1200932 - DNA, 15 bp, Homo sapiens
ataccactgtgtggg

SEQ ID NO: 1200933 - DNA, 15 bp, Homo sapiens
aataccactgtgtgg

SEQ ID NO: 1200934 - DNA, 15 bp, Homo sapiens
caataccactgtgtg

SEQ ID NO: 1200935 - DNA, 15 bp, Homo sapiens
gcaataccactgtgt

SEQ ID NO: 1200936 - DNA, 15 bp, Homo sapiens
ggcaataccactgtg

SEQ ID NO: 1200937 - DNA, 15 bp, Homo sapiens
gggcaataccactgt

SEQ ID NO: 1200938 - DNA, 15 bp, Homo sapiens
agggcaataccactg

SEQ ID NO: 1200939 - DNA, 15 bp, Homo sapiens
cagggcaataccact

SEQ ID NO: 1200940 - DNA, 15 bp, Homo sapiens
ccagggcaataccac

SEQ ID NO: 1200941 - DNA, 15 bp, Homo sapiens
accagggcaatacca

SEQ ID NO: 1200942 - DNA, 15 bp, Homo sapiens
caccagggcaatacc

SEQ ID NO: 1200943 - DNA, 15 bp, Homo sapiens
tcaccagggcaatac

SEQ ID NO: 1200944 - DNA, 15 bp, Homo sapiens
ctcaccagggcaata

SEQ ID NO: 1200945 - DNA, 15 bp, Homo sapiens
tctcaccagggcaat

SEQ ID NO: 1200946 - DNA, 15 bp, Homo sapiens
ttctcaccagggcaa

SEQ ID NO: 1200947 - DNA, 15 bp, Homo sapiens
cttctcaccagggca

SEQ ID NO: 1200948 - DNA, 15 bp, Homo sapiens
tcttctcaccagggc

SEQ ID NO: 1200949 - DNA, 15 bp, Homo sapiens
ttcttctcaccaggg

SEQ ID NO: 1200950 - DNA, 15 bp, Homo sapiens
tttcttctcaccagg

SEQ ID NO: 1200951 - DNA, 15 bp, Homo sapiens
atttcttctcaccag

SEQ ID NO: 1200952 - DNA, 15 bp, Homo sapiens
catttcttctcacca

SEQ ID NO: 1200953 - DNA, 15 bp, Homo sapiens
tcatttcttctcacc

SEQ ID NO: 1200954 - DNA, 15 bp, Homo sapiens
atcatttcttctcac

SEQ ID NO: 1200955 - DNA, 15 bp, Homo sapiens
aatcatttcttctca

SEQ ID NO: 1200956 - DNA, 15 bp, Homo sapiens
caatcatttcttctc

SEQ ID NO: 1200957 - DNA, 15 bp, Homo sapiens
ccaatcatttcttct

SEQ ID NO: 1200958 - DNA, 15 bp, Homo sapiens
gccaatcatttcttc

SEQ ID NO: 1200959 - DNA, 15 bp, Homo sapiens
tgccaatcatttctt

SEQ ID NO: 1200960 - DNA, 15 bp, Homo sapiens
ctgccaatcatttct

SEQ ID NO: 1200961 - DNA, 15 bp, Homo sapiens
cctgccaatcatttc

SEQ ID NO: 1200962 - DNA, 15 bp, Homo sapiens
ccctgccaatcattt

SEQ ID NO: 1200963 - DNA, 15 bp, Homo sapiens
gccctgccaatcatt

SEQ ID NO: 1200964 - DNA, 15 bp, Homo sapiens
tgccctgccaatcat

SEQ ID NO: 1200965 - DNA, 15 bp, Homo sapiens
ttgccctgccaatca

SEQ ID NO: 1200966 - DNA, 15 bp, Homo sapiens
cttgccctgccaatc

SEQ ID NO: 1200967 - DNA, 15 bp, Homo sapiens
ccttgccctgccaat

SEQ ID NO: 1200968 - DNA, 15 bp, Homo sapiens
gccttgccctgccaa

SEQ ID NO: 1200969 - DNA, 15 bp, Homo sapiens
agccttgccctgcca

SEQ ID NO: 1200970 - DNA, 15 bp, Homo sapiens
gagccttgccctgcc

SEQ ID NO: 1200971 - DNA, 15 bp, Homo sapiens
ggagccttgccctgc

SEQ ID NO: 1200972 - DNA, 15 bp, Homo sapiens
tggagccttgccctg

SEQ ID NO: 1200973 - DNA, 15 bp, Homo sapiens
atggagccttgccct

SEQ ID NO: 1200974 - DNA, 15 bp, Homo sapiens
tatggagccttgccc

SEQ ID NO: 1200975 - DNA, 15 bp, Homo sapiens
atatggagccttgcc

SEQ ID NO: 1200976 - DNA, 15 bp, Homo sapiens
aatatggagccttgc

SEQ ID NO: 1200977 - DNA, 15 bp, Homo sapiens
gaatatggagccttg

SEQ ID NO: 1200978 - DNA, 15 bp, Homo sapiens
tgaatatggagcctt

SEQ ID NO: 1200979 - DNA, 15 bp, Homo sapiens
ttgaatatggagcct

SEQ ID NO: 1200980 - DNA, 15 bp, Homo sapiens
cttgaatatggagcc

SEQ ID NO: 1200981 - DNA, 15 bp, Homo sapiens
ccttgaatatggagc

SEQ ID NO: 1200982 - DNA, 15 bp, Homo sapiens
tccttgaatatggag

SEQ ID NO: 1200983 - DNA, 15 bp, Homo sapiens
ttccttgaatatgga

SEQ ID NO: 1200984 - DNA, 15 bp, Homo sapiens
tttccttgaatatgg

SEQ ID NO: 1200985 - DNA, 15 bp, Homo sapiens
ttttccttgaatatg

SEQ ID NO: 1200986 - DNA, 15 bp, Homo sapiens
gttttccttgaatat

SEQ ID NO: 1200987 - DNA, 15 bp, Homo sapiens
ggttttccttgaata

SEQ ID NO: 1200988 - DNA, 15 bp, Homo sapiens
gggttttccttgaat

SEQ ID NO: 1200989 - DNA, 15 bp, Homo sapiens
ggggttttccttgaa

SEQ ID NO: 1200990 - DNA, 15 bp, Homo sapiens
tggggttttccttga

SEQ ID NO: 1200991 - DNA, 15 bp, Homo sapiens
ttggggttttccttg

SEQ ID NO: 1200992 - DNA, 15 bp, Homo sapiens
attggggttttcctt

SEQ ID NO: 1200993 - DNA, 15 bp, Homo sapiens
cattggggttttcct

SEQ ID NO: 1200994 - DNA, 15 bp, Homo sapiens
ccattggggttttcc

SEQ ID NO: 1200995 - DNA, 15 bp, Homo sapiens
tccattggggttttc

SEQ ID NO: 1200996 - DNA, 15 bp, Homo sapiens
ttccattggggtttt

SEQ ID NO: 1200997 - DNA, 15 bp, Homo sapiens
gttccattggggttt

SEQ ID NO: 1200998 - DNA, 15 bp, Homo sapiens
tgttccattggggtt

SEQ ID NO: 1200999 - DNA, 15 bp, Homo sapiens
gtgttccattggggt

SEQ ID NO: 1201000 - DNA, 15 bp, Homo sapiens
agtgttccattgggg

SEQ ID NO: 1201001 - DNA, 15 bp, Homo sapiens
aagtgttccattggg

SEQ ID NO: 1201002 - DNA, 15 bp, Homo sapiens
gaagtgttccattgg

SEQ ID NO: 1201003 - DNA, 15 bp, Homo sapiens
tgaagtgttccattg

SEQ ID NO: 1201004 - DNA, 15 bp, Homo sapiens
ttgaagtgttccatt

SEQ ID NO: 1201005 - DNA, 15 bp, Homo sapiens
gttgaagtgttccat

SEQ ID NO: 1201006 - DNA, 15 bp, Homo sapiens
tgttgaagtgttcca

SEQ ID NO: 1201007 - DNA, 15 bp, Homo sapiens
gtgttgaagtgttcc

SEQ ID NO: 1201008 - DNA, 15 bp, Homo sapiens
ggtgttgaagtgttc

SEQ ID NO: 1201009 - DNA, 15 bp, Homo sapiens
tggtgttgaagtgtt

SEQ ID NO: 1201010 - DNA, 15 bp, Homo sapiens
ttggtgttgaagtgt

SEQ ID NO: 1201011 - DNA, 15 bp, Homo sapiens
attggtgttgaagtg

SEQ ID NO: 1201012 - DNA, 15 bp, Homo sapiens
cattggtgttgaagt

SEQ ID NO: 1201013 - DNA, 15 bp, Homo sapiens
gcattggtgttgaag

SEQ ID NO: 1201014 - DNA, 15 bp, Homo sapiens
tgcattggtgttgaa

SEQ ID NO: 1201015 - DNA, 15 bp, Homo sapiens
ttgcattggtgttga

SEQ ID NO: 1201016 - DNA, 15 bp, Homo sapiens
gttgcattggtgttg

SEQ ID NO: 1201017 - DNA, 15 bp, Homo sapiens
cgttgcattggtgtt

SEQ ID NO: 1201018 - DNA, 15 bp, Homo sapiens
gcgttgcattggtgt

SEQ ID NO: 1201019 - DNA, 15 bp, Homo sapiens
agcgttgcattggtg

SEQ ID NO: 1201020 - DNA, 15 bp, Homo sapiens
aagcgttgcattggt

SEQ ID NO: 1201021 - DNA, 15 bp, Homo sapiens
gaagcgttgcattgg

SEQ ID NO: 1201022 - DNA, 15 bp, Homo sapiens
ggaagcgttgcattg

SEQ ID NO: 1201023 - DNA, 15 bp, Homo sapiens
cggaagcgttgcatt

SEQ ID NO: 1201024 - DNA, 15 bp, Homo sapiens
ccggaagcgttgcat

SEQ ID NO: 1201025 - DNA, 15 bp, Homo sapiens
cccggaagcgttgca

SEQ ID NO: 1201026 - DNA, 15 bp, Homo sapiens
acccggaagcgttgc

SEQ ID NO: 1201027 - DNA, 15 bp, Homo sapiens
gacccggaagcgttg

SEQ ID NO: 1201028 - DNA, 15 bp, Homo sapiens
ggacccggaagcgtt

SEQ ID NO: 1201029 - DNA, 15 bp, Homo sapiens
tggacccggaagcgt

SEQ ID NO: 1201030 - DNA, 15 bp, Homo sapiens
ctggacccggaagcg

SEQ ID NO: 1201031 - DNA, 15 bp, Homo sapiens
cctggacccggaagc

SEQ ID NO: 1201032 - DNA, 15 bp, Homo sapiens
tcctggacccggaag

SEQ ID NO: 1201033 - DNA, 15 bp, Homo sapiens
ctcctggacccggaa

SEQ ID NO: 1201034 - DNA, 15 bp, Homo sapiens
gctcctggacccgga

SEQ ID NO: 1201035 - DNA, 15 bp, Homo sapiens
agctcctggacccgg

SEQ ID NO: 1201036 - DNA, 15 bp, Homo sapiens
cagctcctggacccg

SEQ ID NO: 1201037 - DNA, 15 bp, Homo sapiens
acagctcctggaccc

SEQ ID NO: 1201038 - DNA, 15 bp, Homo sapiens
aacagctcctggacc

SEQ ID NO: 1201039 - DNA, 15 bp, Homo sapiens
aaacagctcctggac

SEQ ID NO: 1201040 - DNA, 15 bp, Homo sapiens
aaaacagctcctgga

SEQ ID NO: 1201041 - DNA, 15 bp, Homo sapiens
caaaacagctcctgg

SEQ ID NO: 1201042 - DNA, 15 bp, Homo sapiens
acaaaacagctcctg

SEQ ID NO: 1201043 - DNA, 15 bp, Homo sapiens
aacaaaacagctcct

SEQ ID NO: 1201044 - DNA, 15 bp, Homo sapiens
aaacaaaacagctcc

SEQ ID NO: 1201045 - DNA, 15 bp, Homo sapiens
caaacaaaacagctc

SEQ ID NO: 1201046 - DNA, 15 bp, Homo sapiens
tccaaacaaaacagc

SEQ ID NO: 1201047 - DNA, 15 bp, Homo sapiens
atccaaacaaaacag

SEQ ID NO: 1201048 - DNA, 15 bp, Homo sapiens
catccaaacaaaaca

SEQ ID NO: 1201049 - DNA, 15 bp, Homo sapiens
atcatccaaacaaaa

SEQ ID NO: 1201050 - DNA, 15 bp, Homo sapiens
catcatccaaacaaa

SEQ ID NO: 1201051 - DNA, 15 bp, Homo sapiens
ccatcatccaaacaa

SEQ ID NO: 1201052 - DNA, 15 bp, Homo sapiens
tccatcatccaaaca

SEQ ID NO: 1201053 - DNA, 15 bp, Homo sapiens
ttccatcatccaaac

SEQ ID NO: 1201054 - DNA, 15 bp, Homo sapiens
attccatcatccaaa

SEQ ID NO: 1201055 - DNA, 15 bp, Homo sapiens
gattccatcatccaa

SEQ ID NO: 1201056 - DNA, 15 bp, Homo sapiens
cgattccatcatcca

SEQ ID NO: 1201057 - DNA, 15 bp, Homo sapiens
gcgattccatcatcc

SEQ ID NO: 1201058 - DNA, 15 bp, Homo sapiens
tgcgattccatcatc

SEQ ID NO: 1201059 - DNA, 15 bp, Homo sapiens
atgcgattccatcat

SEQ ID NO: 1201060 - DNA, 15 bp, Homo sapiens
gatgcgattccatca

SEQ ID NO: 1201061 - DNA, 15 bp, Homo sapiens
tgatgcgattccatc

SEQ ID NO: 1201062 - DNA, 15 bp, Homo sapiens
ctgatgcgattccat

SEQ ID NO: 1201063 - DNA, 15 bp, Homo sapiens
cctgatgcgattcca

SEQ ID NO: 1201064 - DNA, 15 bp, Homo sapiens
tcctgatgcgattcc

SEQ ID NO: 1201065 - DNA, 15 bp, Homo sapiens
ttcctgatgcgattc

SEQ ID NO: 1201066 - DNA, 15 bp, Homo sapiens
tttcctgatgcgatt

SEQ ID NO: 1201067 - DNA, 15 bp, Homo sapiens
atttcctgatgcgat

SEQ ID NO: 1201068 - DNA, 15 bp, Homo sapiens
catttcctgatgcga

SEQ ID NO: 1201069 - DNA, 15 bp, Homo sapiens
tcatttcctgatgcg

SEQ ID NO: 1201070 - DNA, 15 bp, Homo sapiens
ttcatttcctgatgc

SEQ ID NO: 1201071 - DNA, 15 bp, Homo sapiens
gttcatttcctgatg

SEQ ID NO: 1201072 - DNA, 15 bp, Homo sapiens
agttcatttcctgat

SEQ ID NO: 1201073 - DNA, 15 bp, Homo sapiens
cagttcatttcctga

SEQ ID NO: 1201074 - DNA, 15 bp, Homo sapiens
acagttcatttcctg

SEQ ID NO: 1201075 - DNA, 15 bp, Homo sapiens
tacagttcatttcct

SEQ ID NO: 1201076 - DNA, 15 bp, Homo sapiens
gtacagttcatttcc

SEQ ID NO: 1201077 - DNA, 15 bp, Homo sapiens
tgtacagttcatttc

SEQ ID NO: 1201078 - DNA, 15 bp, Homo sapiens
ctgtacagttcattt

SEQ ID NO: 1201079 - DNA, 15 bp, Homo sapiens
gctgtacagttcatt

SEQ ID NO: 1201080 - DNA, 15 bp, Homo sapiens
tgctgtacagttcat

SEQ ID NO: 1201081 - DNA, 15 bp, Homo sapiens
atgctgtacagttca

SEQ ID NO: 1201082 - DNA, 15 bp, Homo sapiens
aatgctgtacagttc

SEQ ID NO: 1201083 - DNA, 15 bp, Homo sapiens
aaatgctgtacagtt

SEQ ID NO: 1201084 - DNA, 15 bp, Homo sapiens
gaaatgctgtacagt

SEQ ID NO: 1201085 - DNA, 15 bp, Homo sapiens
ggaaatgctgtacag

SEQ ID NO: 1201086 - DNA, 15 bp, Homo sapiens
tggaaatgctgtaca

SEQ ID NO: 1201087 - DNA, 15 bp, Homo sapiens
ttggaaatgctgtac

SEQ ID NO: 1201088 - DNA, 15 bp, Homo sapiens
tttggaaatgctgta

SEQ ID NO: 1201089 - DNA, 15 bp, Homo sapiens
ttttggaaatgctgt

SEQ ID NO: 1201090 - DNA, 15 bp, Homo sapiens
tttttggaaatgctg

SEQ ID NO: 1201091 - DNA, 15 bp, Homo sapiens
ttttttggaaatgct

SEQ ID NO: 1201092 - DNA, 15 bp, Homo sapiens
tttttttggaaatgc

SEQ ID NO: 1201093 - DNA, 15 bp, Homo sapiens
gtttttttggaaatg

SEQ ID NO: 1201094 - DNA, 15 bp, Homo sapiens
agtttttttggaaat

SEQ ID NO: 1201095 - DNA, 15 bp, Homo sapiens
cagtttttttggaaa

SEQ ID NO: 1201096 - DNA, 15 bp, Homo sapiens
ccagtttttttggaa

SEQ ID NO: 1201097 - DNA, 15 bp, Homo sapiens
cccagtttttttgga

SEQ ID NO: 1201098 - DNA, 15 bp, Homo sapiens
acccagtttttttgg

SEQ ID NO: 1201099 - DNA, 15 bp, Homo sapiens
gacccagtttttttg

SEQ ID NO: 1201100 - DNA, 15 bp, Homo sapiens
ggacccagttttttt

SEQ ID NO: 1201101 - DNA, 15 bp, Homo sapiens
aggacccagtttttt

SEQ ID NO: 1201102 - DNA, 15 bp, Homo sapiens
gaggacccagttttt

SEQ ID NO: 1201103 - DNA, 15 bp, Homo sapiens
tgaggacccagtttt

SEQ ID NO: 1201104 - DNA, 15 bp, Homo sapiens
ctgaggacccagttt

SEQ ID NO: 1201105 - DNA, 15 bp, Homo sapiens
actgaggacccagtt

SEQ ID NO: 1201106 - DNA, 15 bp, Homo sapiens
aactgaggacccagt

SEQ ID NO: 1201107 - DNA, 15 bp, Homo sapiens
aaactgaggacccag

SEQ ID NO: 1201108 - DNA, 15 bp, Homo sapiens
caaactgaggaccca

SEQ ID NO: 1201109 - DNA, 15 bp, Homo sapiens
tcaaactgaggaccc

SEQ ID NO: 1201110 - DNA, 15 bp, Homo sapiens
ttcaaactgaggacc

SEQ ID NO: 1201111 - DNA, 15 bp, Homo sapiens
tttcaaactgaggac

SEQ ID NO: 1201112 - DNA, 15 bp, Homo sapiens
ttttcaaactgagga

SEQ ID NO: 1201113 - DNA, 15 bp, Homo sapiens
tttttcaaactgagg

SEQ ID NO: 1201114 - DNA, 15 bp, Homo sapiens
gtttttcaaactgag

SEQ ID NO: 1201115 - DNA, 15 bp, Homo sapiens
ggtttttcaaactga

SEQ ID NO: 1201116 - DNA, 15 bp, Homo sapiens
aggtttttcaaactg

SEQ ID NO: 1201117 - DNA, 15 bp, Homo sapiens
caggtttttcaaact

SEQ ID NO: 1201118 - DNA, 15 bp, Homo sapiens
acaggtttttcaaac

SEQ ID NO: 1201119 - DNA, 15 bp, Homo sapiens
cacaggtttttcaaa

SEQ ID NO: 1201120 - DNA, 15 bp, Homo sapiens
tcacaggtttttcaa

SEQ ID NO: 1201121 - DNA, 15 bp, Homo sapiens
atcacaggtttttca

SEQ ID NO: 1201122 - DNA, 15 bp, Homo sapiens
aatcacaggtttttc

SEQ ID NO: 1201123 - DNA, 15 bp, Homo sapiens
aaatcacaggttttt

SEQ ID NO: 1201124 - DNA, 15 bp, Homo sapiens
gaaatcacaggtttt

SEQ ID NO: 1201125 - DNA, 15 bp, Homo sapiens
tgaaatcacaggttt

SEQ ID NO: 1201126 - DNA, 15 bp, Homo sapiens
ctgaaatcacaggtt

SEQ ID NO: 1201127 - DNA, 15 bp, Homo sapiens
actgaaatcacaggt

SEQ ID NO: 1201128 - DNA, 15 bp, Homo sapiens
aactgaaatcacagg

SEQ ID NO: 1201129 - DNA, 15 bp, Homo sapiens
caactgaaatcacag

SEQ ID NO: 1201130 - DNA, 15 bp, Homo sapiens
acaactgaaatcaca

SEQ ID NO: 1201131 - DNA, 15 bp, Homo sapiens
tacaactgaaatcac

SEQ ID NO: 1201132 - DNA, 15 bp, Homo sapiens
gtacaactgaaatca

SEQ ID NO: 1201133 - DNA, 15 bp, Homo sapiens
tgtacaactgaaatc

SEQ ID NO: 1201134 - DNA, 15 bp, Homo sapiens
gtgtacaactgaaat

SEQ ID NO: 1201135 - DNA, 15 bp, Homo sapiens
tgtgtacaactgaaa

SEQ ID NO: 1201136 - DNA, 15 bp, Homo sapiens
ttgtgtacaactgaa

SEQ ID NO: 1201137 - DNA, 15 bp, Homo sapiens
tttgtgtacaactga

SEQ ID NO: 1201138 - DNA, 15 bp, Homo sapiens
gtttgtgtacaactg

SEQ ID NO: 1201139 - DNA, 15 bp, Homo sapiens
ggtttgtgtacaact

SEQ ID NO: 1201140 - DNA, 15 bp, Homo sapiens
gggtttgtgtacaac

SEQ ID NO: 1201141 - DNA, 15 bp, Homo sapiens
ggggtttgtgtacaa

SEQ ID NO: 1201142 - DNA, 15 bp, Homo sapiens
aggggtttgtgtaca

SEQ ID NO: 1201143 - DNA, 15 bp, Homo sapiens
aaggggtttgtgtac

SEQ ID NO: 1201144 - DNA, 15 bp, Homo sapiens
aaaggggtttgtgta

SEQ ID NO: 1201145 - DNA, 15 bp, Homo sapiens
gaaaggggtttgtgt

SEQ ID NO: 1201146 - DNA, 15 bp, Homo sapiens
ggaaaggggtttgtg

SEQ ID NO: 1201147 - DNA, 15 bp, Homo sapiens
tggaaaggggtttgt

SEQ ID NO: 1201148 - DNA, 15 bp, Homo sapiens
ttggaaaggggtttg

SEQ ID NO: 1201149 - DNA, 15 bp, Homo sapiens
tttggaaaggggttt

SEQ ID NO: 1201150 - DNA, 15 bp, Homo sapiens
atttggaaaggggtt

SEQ ID NO: 1201151 - DNA, 15 bp, Homo sapiens
catttggaaaggggt

SEQ ID NO: 1201152 - DNA, 15 bp, Homo sapiens
tcatttggaaagggg

SEQ ID NO: 1201153 - DNA, 15 bp, Homo sapiens
ctcatttggaaaggg

SEQ ID NO: 1201154 - DNA, 15 bp, Homo sapiens
cctcatttggaaagg

SEQ ID NO: 1201155 - DNA, 15 bp, Homo sapiens
tcctcatttggaaag

SEQ ID NO: 1201156 - DNA, 15 bp, Homo sapiens
gtcctcatttggaaa

SEQ ID NO: 1201157 - DNA, 15 bp, Homo sapiens
ggtcctcatttggaa

SEQ ID NO: 1201158 - DNA, 15 bp, Homo sapiens
cggtcctcatttgga

SEQ ID NO: 1201159 - DNA, 15 bp, Homo sapiens
acggtcctcatttgg

SEQ ID NO: 1201160 - DNA, 15 bp, Homo sapiens
cacggtcctcatttg

SEQ ID NO: 1201161 - DNA, 15 bp, Homo sapiens
tcacggtcctcattt

SEQ ID NO: 1201162 - DNA, 15 bp, Homo sapiens
ttcacggtcctcatt

SEQ ID NO: 1201163 - DNA, 15 bp, Homo sapiens
cttcacggtcctcat

SEQ ID NO: 1201164 - DNA, 15 bp, Homo sapiens
tcttcacggtcctca

SEQ ID NO: 1201165 - DNA, 15 bp, Homo sapiens
ttcttcacggtcctc

SEQ ID NO: 1201166 - DNA, 15 bp, Homo sapiens
tttcttcacggtcct

SEQ ID NO: 1201167 - DNA, 15 bp, Homo sapiens
ctttcttcacggtcc

SEQ ID NO: 1201168 - DNA, 15 bp, Homo sapiens
cctttcttcacggtc

SEQ ID NO: 1201169 - DNA, 15 bp, Homo sapiens
ccctttcttcacggt

SEQ ID NO: 1201170 - DNA, 15 bp, Homo sapiens
gccctttcttcacgg

SEQ ID NO: 1201171 - DNA, 15 bp, Homo sapiens
ggccctttcttcacg

SEQ ID NO: 1201172 - DNA, 15 bp, Homo sapiens
gggccctttcttcac

SEQ ID NO: 1201173 - DNA, 15 bp, Homo sapiens
tgggccctttcttca

SEQ ID NO: 1201174 - DNA, 15 bp, Homo sapiens
ttgggccctttcttc

SEQ ID NO: 1201175 - DNA, 15 bp, Homo sapiens
tttgggccctttctt

SEQ ID NO: 1201176 - DNA, 15 bp, Homo sapiens
ctttgggccctttct

SEQ ID NO: 1201177 - DNA, 15 bp, Homo sapiens
actttgggccctttc

SEQ ID NO: 1201178 - DNA, 15 bp, Homo sapiens
tactttgggcccttt

SEQ ID NO: 1201179 - DNA, 15 bp, Homo sapiens
atactttgggccctt

SEQ ID NO: 1201180 - DNA, 15 bp, Homo sapiens
gatactttgggccct

SEQ ID NO: 1201181 - DNA, 15 bp, Homo sapiens
agatactttgggccc

SEQ ID NO: 1201182 - DNA, 15 bp, Homo sapiens
cagatactttgggcc

SEQ ID NO: 1201183 - DNA, 15 bp, Homo sapiens
gcagatactttgggc

SEQ ID NO: 1201184 - DNA, 15 bp, Homo sapiens
tgcagatactttggg

SEQ ID NO: 1201185 - DNA, 15 bp, Homo sapiens
gtgcagatactttgg

SEQ ID NO: 1201186 - DNA, 15 bp, Homo sapiens
tgtgcagatactttg

SEQ ID NO: 1201187 - DNA, 15 bp, Homo sapiens
gtgtgcagatacttt

SEQ ID NO: 1201188 - DNA, 15 bp, Homo sapiens
tgtgtgcagatactt

SEQ ID NO: 1201189 - DNA, 15 bp, Homo sapiens
gtgtgtgcagatact

SEQ ID NO: 1201190 - DNA, 15 bp, Homo sapiens
tgtgtgtgcagatac

SEQ ID NO: 1201191 - DNA, 15 bp, Homo sapiens
gtgtgtgtgcagata

SEQ ID NO: 1201192 - DNA, 15 bp, Homo sapiens
tgtgtgtgtgcagat

SEQ ID NO: 1201193 - DNA, 15 bp, Homo sapiens
ctgtgtgtgtgcaga

SEQ ID NO: 1201194 - DNA, 15 bp, Homo sapiens
tctgtgtgtgtgcag

SEQ ID NO: 1201195 - DNA, 15 bp, Homo sapiens
ttctgtgtgtgtgca

SEQ ID NO: 1201196 - DNA, 15 bp, Homo sapiens
cttctgtgtgtgtgc

SEQ ID NO: 1201197 - DNA, 15 bp, Homo sapiens
tcttctgtgtgtgtg

SEQ ID NO: 1201198 - DNA, 15 bp, Homo sapiens
atcttctgtgtgtgt

SEQ ID NO: 1201199 - DNA, 15 bp, Homo sapiens
catcttctgtgtgtg

SEQ ID NO: 1201200 - DNA, 15 bp, Homo sapiens
gcatcttctgtgtgt

SEQ ID NO: 1201201 - DNA, 15 bp, Homo sapiens
ggcatcttctgtgtg

SEQ ID NO: 1201202 - DNA, 15 bp, Homo sapiens
gggcatcttctgtgt

SEQ ID NO: 1201203 - DNA, 15 bp, Homo sapiens
tgggcatcttctgtg

SEQ ID NO: 1201204 - DNA, 15 bp, Homo sapiens
ctgggcatcttctgt

SEQ ID NO: 1201205 - DNA, 15 bp, Homo sapiens
tctgggcatcttctg

SEQ ID NO: 1201206 - DNA, 15 bp, Homo sapiens
gtctgggcatcttct

SEQ ID NO: 1201207 - DNA, 15 bp, Homo sapiens
tgtctgggcatcttc

SEQ ID NO: 1201208 - DNA, 15 bp, Homo sapiens
ctgtctgggcatctt

SEQ ID NO: 1201209 - DNA, 15 bp, Homo sapiens
gctgtctgggcatct

SEQ ID NO: 1201210 - DNA, 15 bp, Homo sapiens
tgctgtctgggcatc

SEQ ID NO: 1201211 - DNA, 15 bp, Homo sapiens
ctgctgtctgggcat

SEQ ID NO: 1201212 - DNA, 15 bp, Homo sapiens
gctgctgtctgggca

SEQ ID NO: 1201213 - DNA, 15 bp, Homo sapiens
agctgctgtctgggc

SEQ ID NO: 1201214 - DNA, 15 bp, Homo sapiens
tagctgctgtctggg

SEQ ID NO: 1201215 - DNA, 15 bp, Homo sapiens
ctagctgctgtctgg

SEQ ID NO: 1201216 - DNA, 15 bp, Homo sapiens
actagctgctgtctg

SEQ ID NO: 1201217 - DNA, 15 bp, Homo sapiens
tactagctgctgtct

SEQ ID NO: 1201218 - DNA, 15 bp, Homo sapiens
ttactagctgctgtc

SEQ ID NO: 1201219 - DNA, 15 bp, Homo sapiens
gttactagctgctgt

SEQ ID NO: 1201220 - DNA, 15 bp, Homo sapiens
tgttactagctgctg

SEQ ID NO: 1201221 - DNA, 15 bp, Homo sapiens
ctgttactagctgct

SEQ ID NO: 1201222 - DNA, 15 bp, Homo sapiens
actgttactagctgc

SEQ ID NO: 1201223 - DNA, 15 bp, Homo sapiens
aactgttactagctg

SEQ ID NO: 1201224 - DNA, 15 bp, Homo sapiens
gaactgttactagct

SEQ ID NO: 1201225 - DNA, 15 bp, Homo sapiens
agaactgttactagc

SEQ ID NO: 1201226 - DNA, 15 bp, Homo sapiens
cagaactgttactag

SEQ ID NO: 1201227 - DNA, 15 bp, Homo sapiens
ccagaactgttacta

SEQ ID NO: 1201228 - DNA, 15 bp, Homo sapiens
cccagaactgttact

SEQ ID NO: 1201229 - DNA, 15 bp, Homo sapiens
acccagaactgttac

SEQ ID NO: 1201230 - DNA, 15 bp, Homo sapiens
cacccagaactgtta

SEQ ID NO: 1201231 - DNA, 15 bp, Homo sapiens
gcacccagaactgtt

SEQ ID NO: 1201232 - DNA, 15 bp, Homo sapiens
ggcacccagaactgt

SEQ ID NO: 1201233 - DNA, 15 bp, Homo sapiens
tggcacccagaactg

SEQ ID NO: 1201234 - DNA, 15 bp, Homo sapiens
gtggcacccagaact

SEQ ID NO: 1201235 - DNA, 15 bp, Homo sapiens
agtggcacccagaac

SEQ ID NO: 1201236 - DNA, 15 bp, Homo sapiens
aagtggcacccagaa

SEQ ID NO: 1201237 - DNA, 15 bp, Homo sapiens
taagtggcacccaga

SEQ ID NO: 1201238 - DNA, 15 bp, Homo sapiens
gtaagtggcacccag

SEQ ID NO: 1201239 - DNA, 15 bp, Homo sapiens
agtaagtggcaccca

SEQ ID NO: 1201240 - DNA, 15 bp, Homo sapiens
tagtaagtggcaccc

SEQ ID NO: 1201241 - DNA, 15 bp, Homo sapiens
ctagtaagtggcacc

SEQ ID NO: 1201242 - DNA, 15 bp, Homo sapiens
cctagtaagtggcac

SEQ ID NO: 1201243 - DNA, 15 bp, Homo sapiens
tcctagtaagtggca

SEQ ID NO: 1201244 - DNA, 15 bp, Homo sapiens
atcctagtaagtggc

SEQ ID NO: 1201245 - DNA, 15 bp, Homo sapiens
gatcctagtaagtgg

SEQ ID NO: 1201246 - DNA, 15 bp, Homo sapiens
ggatcctagtaagtg

SEQ ID NO: 1201247 - DNA, 15 bp, Homo sapiens
aggatcctagtaagt

SEQ ID NO: 1201248 - DNA, 15 bp, Homo sapiens
caggatcctagtaag

SEQ ID NO: 1201249 - DNA, 15 bp, Homo sapiens
ccaggatcctagtaa

SEQ ID NO: 1201250 - DNA, 15 bp, Homo sapiens
tccaggatcctagta

SEQ ID NO: 1201251 - DNA, 15 bp, Homo sapiens
ctccaggatcctagt

SEQ ID NO: 1201252 - DNA, 15 bp, Homo sapiens
gctccaggatcctag

SEQ ID NO: 1201253 - DNA, 15 bp, Homo sapiens
tgctccaggatccta

SEQ ID NO: 1201254 - DNA, 15 bp, Homo sapiens
ctgctccaggatcct

SEQ ID NO: 1201255 - DNA, 15 bp, Homo sapiens
gctgctccaggatcc

SEQ ID NO: 1201256 - DNA, 15 bp, Homo sapiens
agctgctccaggatc

SEQ ID NO: 1201257 - DNA, 15 bp, Homo sapiens
cagctgctccaggat

SEQ ID NO: 1201258 - DNA, 15 bp, Homo sapiens
ccagctgctccagga

SEQ ID NO: 1201259 - DNA, 15 bp, Homo sapiens
cccagctgctccagg

SEQ ID NO: 1201260 - DNA, 15 bp, Homo sapiens
gcccagctgctccag

SEQ ID NO: 1201261 - DNA, 15 bp, Homo sapiens
agcccagctgctcca

SEQ ID NO: 1201262 - DNA, 15 bp, Homo sapiens
cagcccagctgctcc

SEQ ID NO: 1201263 - DNA, 15 bp, Homo sapiens
gcagcccagctgctc

SEQ ID NO: 1201264 - DNA, 15 bp, Homo sapiens
cgcagcccagctgct

SEQ ID NO: 1201265 - DNA, 15 bp, Homo sapiens
tcgcagcccagctgc

SEQ ID NO: 1201266 - DNA, 15 bp, Homo sapiens
atcgcagcccagctg

SEQ ID NO: 1201267 - DNA, 15 bp, Homo sapiens
catcgcagcccagct

SEQ ID NO: 1201268 - DNA, 15 bp, Homo sapiens
ccatcgcagcccagc

SEQ ID NO: 1201269 - DNA, 15 bp, Homo sapiens
tccatcgcagcccag

SEQ ID NO: 1201270 - DNA, 15 bp, Homo sapiens
ctccatcgcagccca

SEQ ID NO: 1201271 - DNA, 15 bp, Homo sapiens
tctccatcgcagccc

SEQ ID NO: 1201272 - DNA, 15 bp, Homo sapiens
gtctccatcgcagcc

SEQ ID NO: 1201273 - DNA, 15 bp, Homo sapiens
ggtctccatcgcagc

SEQ ID NO: 1201274 - DNA, 15 bp, Homo sapiens
gggtctccatcgcag

SEQ ID NO: 1201275 - DNA, 15 bp, Homo sapiens
cgggtctccatcgca

SEQ ID NO: 1201276 - DNA, 15 bp, Homo sapiens
ccgggtctccatcgc

SEQ ID NO: 1201277 - DNA, 15 bp, Homo sapiens
gccgggtctccatcg

SEQ ID NO: 1201278 - DNA, 15 bp, Homo sapiens
cgccgggtctccatc

SEQ ID NO: 1201279 - DNA, 15 bp, Homo sapiens
gcgccgggtctccat

SEQ ID NO: 1201280 - DNA, 15 bp, Homo sapiens
ggcgccgggtctcca

SEQ ID NO: 1201281 - DNA, 15 bp, Homo sapiens
cggcgccgggtctcc

SEQ ID NO: 1201282 - DNA, 15 bp, Homo sapiens
gcggcgccgggtctc

SEQ ID NO: 1201283 - DNA, 15 bp, Homo sapiens
agcggcgccgggtct

SEQ ID NO: 1201284 - DNA, 15 bp, Homo sapiens
gagcggcgccgggtc

SEQ ID NO: 1201285 - DNA, 15 bp, Homo sapiens
tgagcggcgccgggt

SEQ ID NO: 1201286 - DNA, 15 bp, Homo sapiens
gtgagcggcgccggg

SEQ ID NO: 1201287 - DNA, 15 bp, Homo sapiens
ggtgagcggcgccgg

SEQ ID NO: 1201288 - DNA, 15 bp, Homo sapiens
gggtgagcggcgccg

SEQ ID NO: 1201289 - DNA, 15 bp, Homo sapiens
cgggtgagcggcgcc

SEQ ID NO: 1201290 - DNA, 15 bp, Homo sapiens
acgggtgagcggcgc

SEQ ID NO: 1201291 - DNA, 15 bp, Homo sapiens
cacgggtgagcggcg

SEQ ID NO: 1201292 - DNA, 15 bp, Homo sapiens
ccacgggtgagcggc

SEQ ID NO: 1201293 - DNA, 15 bp, Homo sapiens
tccacgggtgagcgg

SEQ ID NO: 1201294 - DNA, 15 bp, Homo sapiens
ttccacgggtgagcg

SEQ ID NO: 1201295 - DNA, 15 bp, Homo sapiens
tttccacgggtgagc

SEQ ID NO: 1201296 - DNA, 15 bp, Homo sapiens
atttccacgggtgag

SEQ ID NO: 1201297 - DNA, 15 bp, Homo sapiens
catttccacgggtga

SEQ ID NO: 1201298 - DNA, 15 bp, Homo sapiens
gcatttccacgggtg

SEQ ID NO: 1201299 - DNA, 15 bp, Homo sapiens
ggcatttccacgggt

SEQ ID NO: 1201300 - DNA, 15 bp, Homo sapiens
gggcatttccacggg

SEQ ID NO: 1201301 - DNA, 15 bp, Homo sapiens
ggggcatttccacgg

SEQ ID NO: 1201302 - DNA, 15 bp, Homo sapiens
gggggcatttccacg

SEQ ID NO: 1201303 - DNA, 15 bp, Homo sapiens
ggggggcatttccac

SEQ ID NO: 1201304 - DNA, 15 bp, Homo sapiens
tggggggcatttcca

SEQ ID NO: 1201305 - DNA, 15 bp, Homo sapiens
ttggggggcatttcc

SEQ ID NO: 1201306 - DNA, 15 bp, Homo sapiens
cttggggggcatttc

SEQ ID NO: 1201307 - DNA, 15 bp, Homo sapiens
gcttggggggcattt

SEQ ID NO: 1201308 - DNA, 15 bp, Homo sapiens
agcttggggggcatt

SEQ ID NO: 1201309 - DNA, 15 bp, Homo sapiens
cagcttggggggcat

SEQ ID NO: 1201310 - DNA, 15 bp, Homo sapiens
acagcttggggggca

SEQ ID NO: 1201311 - DNA, 15 bp, Homo sapiens
tacagcttggggggc

SEQ ID NO: 1201312 - DNA, 15 bp, Homo sapiens
ctacagcttgggggg

SEQ ID NO: 1201313 - DNA, 15 bp, Homo sapiens
actacagcttggggg

SEQ ID NO: 1201314 - DNA, 15 bp, Homo sapiens
aactacagcttgggg

SEQ ID NO: 1201315 - DNA, 15 bp, Homo sapiens
caactacagcttggg

SEQ ID NO: 1201316 - DNA, 15 bp, Homo sapiens
gcaactacagcttgg

SEQ ID NO: 1201317 - DNA, 15 bp, Homo sapiens
ggcaactacagcttg

SEQ ID NO: 1201318 - DNA, 15 bp, Homo sapiens
tggcaactacagctt

SEQ ID NO: 1201319 - DNA, 15 bp, Homo sapiens
ttggcaactacagct

SEQ ID NO: 1201320 - DNA, 15 bp, Homo sapiens
attggcaactacagc

SEQ ID NO: 1201321 - DNA, 15 bp, Homo sapiens
gattggcaactacag

SEQ ID NO: 1201322 - DNA, 15 bp, Homo sapiens
tgattggcaactaca

SEQ ID NO: 1201323 - DNA, 15 bp, Homo sapiens
ctgattggcaactac

SEQ ID NO: 1201324 - DNA, 15 bp, Homo sapiens
actgattggcaacta

SEQ ID NO: 1201325 - DNA, 15 bp, Homo sapiens
gactgattggcaact

SEQ ID NO: 1201326 - DNA, 15 bp, Homo sapiens
cgactgattggcaac

SEQ ID NO: 1201327 - DNA, 15 bp, Homo sapiens
ccgactgattggcaa

SEQ ID NO: 1201328 - DNA, 15 bp, Homo sapiens
accgactgattggca

SEQ ID NO: 1201329 - DNA, 15 bp, Homo sapiens
gaccgactgattggc

SEQ ID NO: 1201330 - DNA, 15 bp, Homo sapiens
agaccgactgattgg

SEQ ID NO: 1201331 - DNA, 15 bp, Homo sapiens
cagaccgactgattg

SEQ ID NO: 1201332 - DNA, 15 bp, Homo sapiens
gcagaccgactgatt

SEQ ID NO: 1201333 - DNA, 15 bp, Homo sapiens
ggcagaccgactgat

SEQ ID NO: 1201334 - DNA, 15 bp, Homo sapiens
tggcagaccgactga

SEQ ID NO: 1201335 - DNA, 15 bp, Homo sapiens
gtggcagaccgactg

SEQ ID NO: 1201336 - DNA, 15 bp, Homo sapiens
tgtggcagaccgact

SEQ ID NO: 1201337 - DNA, 15 bp, Homo sapiens
atgtggcagaccgac

SEQ ID NO: 1201338 - DNA, 15 bp, Homo sapiens
catgtggcagaccga

SEQ ID NO: 1201339 - DNA, 15 bp, Homo sapiens
ccatgtggcagaccg

SEQ ID NO: 1201340 - DNA, 15 bp, Homo sapiens
gccatgtggcagacc

SEQ ID NO: 1201341 - DNA, 15 bp, Homo sapiens
agccatgtggcagac

SEQ ID NO: 1201342 - DNA, 15 bp, Homo sapiens
gagccatgtggcaga

SEQ ID NO: 1201343 - DNA, 15 bp, Homo sapiens
tgagccatgtggcag

SEQ ID NO: 1201344 - DNA, 15 bp, Homo sapiens
ctgagccatgtggca

SEQ ID NO: 1201345 - DNA, 15 bp, Homo sapiens
tctgagccatgtggc

SEQ ID NO: 1201346 - DNA, 15 bp, Homo sapiens
gtctgagccatgtgg

SEQ ID NO: 1201347 - DNA, 15 bp, Homo sapiens
agtctgagccatgtg

SEQ ID NO: 1201348 - DNA, 15 bp, Homo sapiens
gagtctgagccatgt

SEQ ID NO: 1201349 - DNA, 15 bp, Homo sapiens
tgagtctgagccatg

SEQ ID NO: 1201350 - DNA, 15 bp, Homo sapiens
ctgagtctgagccat

SEQ ID NO: 1201351 - DNA, 15 bp, Homo sapiens
gctgagtctgagcca

SEQ ID NO: 1201352 - DNA, 15 bp, Homo sapiens
agctgagtctgagcc

SEQ ID NO: 1201353 - DNA, 15 bp, Homo sapiens
gagctgagtctgagc

SEQ ID NO: 1201354 - DNA, 15 bp, Homo sapiens
agagctgagtctgag

SEQ ID NO: 1201355 - DNA, 15 bp, Homo sapiens
cagagctgagtctga

SEQ ID NO: 1201356 - DNA, 15 bp, Homo sapiens
gcagagctgagtctg

SEQ ID NO: 1201357 - DNA, 15 bp, Homo sapiens
ggcagagctgagtct

SEQ ID NO: 1201358 - DNA, 15 bp, Homo sapiens
tggcagagctgagtc

SEQ ID NO: 1201359 - DNA, 15 bp, Homo sapiens
atggcagagctgagt

SEQ ID NO: 1201360 - DNA, 15 bp, Homo sapiens
catggcagagctgag

SEQ ID NO: 1201361 - DNA, 15 bp, Homo sapiens
tcatggcagagctga

SEQ ID NO: 1201362 - DNA, 15 bp, Homo sapiens
gtcatggcagagctg

SEQ ID NO: 1201363 - DNA, 15 bp, Homo sapiens
cgtcatggcagagct

SEQ ID NO: 1201364 - DNA, 15 bp, Homo sapiens
ccgtcatggcagagc

SEQ ID NO: 1201365 - DNA, 15 bp, Homo sapiens
gccgtcatggcagag

SEQ ID NO: 1201366 - DNA, 15 bp, Homo sapiens
ggccgtcatggcaga

SEQ ID NO: 1201367 - DNA, 15 bp, Homo sapiens
aggccgtcatggcag

SEQ ID NO: 1201368 - DNA, 15 bp, Homo sapiens
gaggccgtcatggca

SEQ ID NO: 1201369 - DNA, 15 bp, Homo sapiens
ggaggccgtcatggc

SEQ ID NO: 1201370 - DNA, 15 bp, Homo sapiens
tggaggccgtcatgg

SEQ ID NO: 1201371 - DNA, 15 bp, Homo sapiens
gtggaggccgtcatg

SEQ ID NO: 1201372 - DNA, 15 bp, Homo sapiens
ggtggaggccgtcat

SEQ ID NO: 1201373 - DNA, 15 bp, Homo sapiens
aggtggaggccgtca

SEQ ID NO: 1201374 - DNA, 15 bp, Homo sapiens
caggtggaggccgtc

SEQ ID NO: 1201375 - DNA, 15 bp, Homo sapiens
gcaggtggaggccgt

SEQ ID NO: 1201376 - DNA, 15 bp, Homo sapiens
tgcaggtggaggccg

SEQ ID NO: 1201377 - DNA, 15 bp, Homo sapiens
ctgcaggtggaggcc

SEQ ID NO: 1201378 - DNA, 15 bp, Homo sapiens
cctgcaggtggaggc

SEQ ID NO: 1201379 - DNA, 15 bp, Homo sapiens
tcctgcaggtggagg

SEQ ID NO: 1201380 - DNA, 15 bp, Homo sapiens
ctcctgcaggtggag

SEQ ID NO: 1201381 - DNA, 15 bp, Homo sapiens
tctcctgcaggtgga

SEQ ID NO: 1201382 - DNA, 15 bp, Homo sapiens
gtctcctgcaggtgg

SEQ ID NO: 1201383 - DNA, 15 bp, Homo sapiens
tgtctcctgcaggtg

SEQ ID NO: 1201384 - DNA, 15 bp, Homo sapiens
gtgtctcctgcaggt

SEQ ID NO: 1201385 - DNA, 15 bp, Homo sapiens
tgtgtctcctgcagg

SEQ ID NO: 1201386 - DNA, 15 bp, Homo sapiens
ttgtgtctcctgcag

SEQ ID NO: 1201387 - DNA, 15 bp, Homo sapiens
tttgtgtctcctgca

SEQ ID NO: 1201388 - DNA, 15 bp, Homo sapiens
atttgtgtctcctgc

SEQ ID NO: 1201389 - DNA, 15 bp, Homo sapiens
aatttgtgtctcctg

SEQ ID NO: 1201390 - DNA, 15 bp, Homo sapiens
taatttgtgtctcct

SEQ ID NO: 1201391 - DNA, 15 bp, Homo sapiens
gtaatttgtgtctcc

SEQ ID NO: 1201392 - DNA, 15 bp, Homo sapiens
tgtaatttgtgtctc

SEQ ID NO: 1201393 - DNA, 15 bp, Homo sapiens
ctgtaatttgtgtct

SEQ ID NO: 1201394 - DNA, 15 bp, Homo sapiens
cctgtaatttgtgtc

SEQ ID NO: 1201395 - DNA, 15 bp, Homo sapiens
tcctgtaatttgtgt

SEQ ID NO: 1201396 - DNA, 15 bp, Homo sapiens
ttcctgtaatttgtg

SEQ ID NO: 1201397 - DNA, 15 bp, Homo sapiens
cttcctgtaatttgt

SEQ ID NO: 1201398 - DNA, 15 bp, Homo sapiens
ccttcctgtaatttg

SEQ ID NO: 1201399 - DNA, 15 bp, Homo sapiens
gccttcctgtaattt

SEQ ID NO: 1201400 - DNA, 15 bp, Homo sapiens
agccttcctgtaatt

SEQ ID NO: 1201401 - DNA, 15 bp, Homo sapiens
cagccttcctgtaat

SEQ ID NO: 1201402 - DNA, 15 bp, Homo sapiens
ccagccttcctgtaa

SEQ ID NO: 1201403 - DNA, 15 bp, Homo sapiens
cccagccttcctgta

SEQ ID NO: 1201404 - DNA, 15 bp, Homo sapiens
tcccagccttcctgt

SEQ ID NO: 1201405 - DNA, 15 bp, Homo sapiens
ctcccagccttcctg

SEQ ID NO: 1201406 - DNA, 15 bp, Homo sapiens
actcccagccttcct

SEQ ID NO: 1201407 - DNA, 15 bp, Homo sapiens
gactcccagccttcc

SEQ ID NO: 1201408 - DNA, 15 bp, Homo sapiens
agactcccagccttc

SEQ ID NO: 1201409 - DNA, 15 bp, Homo sapiens
gagactcccagcctt

SEQ ID NO: 1201410 - DNA, 15 bp, Homo sapiens
agagactcccagcct

SEQ ID NO: 1201411 - DNA, 15 bp, Homo sapiens
cagagactcccagcc

SEQ ID NO: 1201412 - DNA, 15 bp, Homo sapiens
acagagactcccagc

SEQ ID NO: 1201413 - DNA, 15 bp, Homo sapiens
cacagagactcccag

SEQ ID NO: 1201414 - DNA, 15 bp, Homo sapiens
ccacagagactccca

SEQ ID NO: 1201415 - DNA, 15 bp, Homo sapiens
gccacagagactccc

SEQ ID NO: 1201416 - DNA, 15 bp, Homo sapiens
agccacagagactcc

SEQ ID NO: 1201417 - DNA, 15 bp, Homo sapiens
cagccacagagactc

SEQ ID NO: 1201418 - DNA, 15 bp, Homo sapiens
gcagccacagagact

SEQ ID NO: 1201419 - DNA, 15 bp, Homo sapiens
agcagccacagagac

SEQ ID NO: 1201420 - DNA, 15 bp, Homo sapiens
tagcagccacagaga

SEQ ID NO: 1201421 - DNA, 15 bp, Homo sapiens
atagcagccacagag

SEQ ID NO: 1201422 - DNA, 15 bp, Homo sapiens
aatagcagccacaga

SEQ ID NO: 1201423 - DNA, 15 bp, Homo sapiens
aaatagcagccacag

SEQ ID NO: 1201424 - DNA, 15 bp, Homo sapiens
gaaatagcagccaca

SEQ ID NO: 1201425 - DNA, 15 bp, Homo sapiens
tgaaatagcagccac

SEQ ID NO: 1201426 - DNA, 15 bp, Homo sapiens
ttgaaatagcagcca

SEQ ID NO: 1201427 - DNA, 15 bp, Homo sapiens
attgaaatagcagcc

SEQ ID NO: 1201428 - DNA, 15 bp, Homo sapiens
aattgaaatagcagc

SEQ ID NO: 1201429 - DNA, 15 bp, Homo sapiens
gaattgaaatagcag

SEQ ID NO: 1201430 - DNA, 15 bp, Homo sapiens
tgaattgaaatagca

SEQ ID NO: 1201431 - DNA, 15 bp, Homo sapiens
atgaattgaaatagc

SEQ ID NO: 1201432 - DNA, 15 bp, Homo sapiens
catgaattgaaatag

SEQ ID NO: 1201433 - DNA, 15 bp, Homo sapiens
ccatgaattgaaata

SEQ ID NO: 1201434 - DNA, 15 bp, Homo sapiens
gcccatgaattgaaa

SEQ ID NO: 1201435 - DNA, 15 bp, Homo sapiens
agcccatgaattgaa

SEQ ID NO: 1201436 - DNA, 15 bp, Homo sapiens
cagcccatgaattga

SEQ ID NO: 1201437 - DNA, 15 bp, Homo sapiens
ccagcccatgaattg

SEQ ID NO: 1201438 - DNA, 15 bp, Homo sapiens
cccagcccatgaatt

SEQ ID NO: 1201439 - DNA, 15 bp, Homo sapiens
ccccagcccatgaat

SEQ ID NO: 1201440 - DNA, 15 bp, Homo sapiens
tccccagcccatgaa

SEQ ID NO: 1201441 - DNA, 15 bp, Homo sapiens
ctccccagcccatga

SEQ ID NO: 1201442 - DNA, 15 bp, Homo sapiens
cctccccagcccatg

SEQ ID NO: 1201443 - DNA, 15 bp, Homo sapiens
tcctccccagcccat

SEQ ID NO: 1201444 - DNA, 15 bp, Homo sapiens
gtcctccccagccca

SEQ ID NO: 1201445 - DNA, 15 bp, Homo sapiens
tgtcctccccagccc

SEQ ID NO: 1201446 - DNA, 15 bp, Homo sapiens
atgtcctccccagcc

SEQ ID NO: 1201447 - DNA, 15 bp, Homo sapiens
catgtcctccccagc

SEQ ID NO: 1201448 - DNA, 15 bp, Homo sapiens
tcatgtcctccccag

SEQ ID NO: 1201449 - DNA, 15 bp, Homo sapiens
ttcatgtcctcccca

SEQ ID NO: 1201450 - DNA, 15 bp, Homo sapiens
tttcatgtcctcccc

SEQ ID NO: 1201451 - DNA, 15 bp, Homo sapiens
ctttcatgtcctccc

SEQ ID NO: 1201452 - DNA, 15 bp, Homo sapiens
tctttcatgtcctcc

SEQ ID NO: 1201453 - DNA, 15 bp, Homo sapiens
ctctttcatgtcctc

SEQ ID NO: 1201454 - DNA, 15 bp, Homo sapiens
cctctttcatgtcct

SEQ ID NO: 1201455 - DNA, 15 bp, Homo sapiens
gcctctttcatgtcc

SEQ ID NO: 1201456 - DNA, 15 bp, Homo sapiens
tgcctctttcatgtc

SEQ ID NO: 1201457 - DNA, 15 bp, Homo sapiens
ctgcctctttcatgt

SEQ ID NO: 1201458 - DNA, 15 bp, Homo sapiens
gctgcctctttcatg

SEQ ID NO: 1201459 - DNA, 15 bp, Homo sapiens
tgctgcctctttcat

SEQ ID NO: 1201460 - DNA, 15 bp, Homo sapiens
gtgtgctgcctcttt

SEQ ID NO: 1201461 - DNA, 15 bp, Homo sapiens
ggtgtgctgcctctt

SEQ ID NO: 1201462 - DNA, 15 bp, Homo sapiens
cggtgtgctgcctct

SEQ ID NO: 1201463 - DNA, 15 bp, Homo sapiens
gcggtgtgctgcctc

SEQ ID NO: 1201464 - DNA, 15 bp, Homo sapiens
ggcggtgtgctgcct

SEQ ID NO: 1201465 - DNA, 15 bp, Homo sapiens
gggcggtgtgctgcc

SEQ ID NO: 1201466 - DNA, 15 bp, Homo sapiens
tgggcggtgtgctgc

SEQ ID NO: 1201467 - DNA, 15 bp, Homo sapiens
ttgggcggtgtgctg

SEQ ID NO: 1201468 - DNA, 15 bp, Homo sapiens
cttgggcggtgtgct

SEQ ID NO: 1201469 - DNA, 15 bp, Homo sapiens
tcttgggcggtgtgc

SEQ ID NO: 1201470 - DNA, 15 bp, Homo sapiens
ttcttgggcggtgtg

SEQ ID NO: 1201471 - DNA, 15 bp, Homo sapiens
attcttgggcggtgt

SEQ ID NO: 1201472 - DNA, 15 bp, Homo sapiens
gattcttgggcggtg

SEQ ID NO: 1201473 - DNA, 15 bp, Homo sapiens
ggattcttgggcggt

SEQ ID NO: 1201474 - DNA, 15 bp, Homo sapiens
tggattcttgggcgg

SEQ ID NO: 1201475 - DNA, 15 bp, Homo sapiens
ttggattcttgggcg

SEQ ID NO: 1201476 - DNA, 15 bp, Homo sapiens
cttggattcttgggc

SEQ ID NO: 1201477 - DNA, 15 bp, Homo sapiens
ccttggattcttggg

SEQ ID NO: 1201478 - DNA, 15 bp, Homo sapiens
cccttggattcttgg

SEQ ID NO: 1201479 - DNA, 15 bp, Homo sapiens
gcccttggattcttg

SEQ ID NO: 1201480 - DNA, 15 bp, Homo sapiens
ggcccttggattctt

SEQ ID NO: 1201481 - DNA, 15 bp, Homo sapiens
tggcccttggattct

SEQ ID NO: 1201482 - DNA, 15 bp, Homo sapiens
gtggcccttggattc

SEQ ID NO: 1201483 - DNA, 15 bp, Homo sapiens
agtggcccttggatt

SEQ ID NO: 1201484 - DNA, 15 bp, Homo sapiens
aagtggcccttggat

SEQ ID NO: 1201485 - DNA, 15 bp, Homo sapiens
gaagtggcccttgga

SEQ ID NO: 1201486 - DNA, 15 bp, Homo sapiens
ggaagtggcccttgg

SEQ ID NO: 1201487 - DNA, 15 bp, Homo sapiens
tggaagtggcccttg

SEQ ID NO: 1201488 - DNA, 15 bp, Homo sapiens
ctggaagtggccctt

SEQ ID NO: 1201489 - DNA, 15 bp, Homo sapiens
tctggaagtggccct

SEQ ID NO: 1201490 - DNA, 15 bp, Homo sapiens
gtctggaagtggccc

SEQ ID NO: 1201491 - DNA, 15 bp, Homo sapiens
agtctggaagtggcc

SEQ ID NO: 1201492 - DNA, 15 bp, Homo sapiens
gagtctggaagtggc

SEQ ID NO: 1201493 - DNA, 15 bp, Homo sapiens
tgagtctggaagtgg

SEQ ID NO: 1201494 - DNA, 15 bp, Homo sapiens
gtgagtctggaagtg

SEQ ID NO: 1201495 - DNA, 15 bp, Homo sapiens
ggtgagtctggaagt

SEQ ID NO: 1201496 - DNA, 15 bp, Homo sapiens
tggtgagtctggaag

SEQ ID NO: 1201497 - DNA, 15 bp, Homo sapiens
gtggtgagtctggaa

SEQ ID NO: 1201498 - DNA, 15 bp, Homo sapiens
tgtggtgagtctgga

SEQ ID NO: 1201499 - DNA, 15 bp, Homo sapiens
gtgtggtgagtctgg

SEQ ID NO: 1201500 - DNA, 15 bp, Homo sapiens
ggtgtggtgagtctg

SEQ ID NO: 1201501 - DNA, 15 bp, Homo sapiens
gggtgtggtgagtct

SEQ ID NO: 1201502 - DNA, 15 bp, Homo sapiens
agggtgtggtgagtc

SEQ ID NO: 1201503 - DNA, 15 bp, Homo sapiens
cagggtgtggtgagt

SEQ ID NO: 1201504 - DNA, 15 bp, Homo sapiens
ccagggtgtggtgag

SEQ ID NO: 1201505 - DNA, 15 bp, Homo sapiens
cccagggtgtggtga

SEQ ID NO: 1201506 - DNA, 15 bp, Homo sapiens
ccccagggtgtggtg

SEQ ID NO: 1201507 - DNA, 15 bp, Homo sapiens
tccccagggtgtggt

SEQ ID NO: 1201508 - DNA, 15 bp, Homo sapiens
ttccccagggtgtgg

SEQ ID NO: 1201509 - DNA, 15 bp, Homo sapiens
tttccccagggtgtg

SEQ ID NO: 1201510 - DNA, 15 bp, Homo sapiens
ctttccccagggtgt

SEQ ID NO: 1201511 - DNA, 15 bp, Homo sapiens
gctttccccagggtg

SEQ ID NO: 1201512 - DNA, 15 bp, Homo sapiens
tgctttccccagggt

SEQ ID NO: 1201513 - DNA, 15 bp, Homo sapiens
atgctttccccaggg

SEQ ID NO: 1201514 - DNA, 15 bp, Homo sapiens
catgctttccccagg

SEQ ID NO: 1201515 - DNA, 15 bp, Homo sapiens
acatgctttccccag

SEQ ID NO: 1201516 - DNA, 15 bp, Homo sapiens
gacatgctttcccca

SEQ ID NO: 1201517 - DNA, 15 bp, Homo sapiens
agacatgctttcccc

SEQ ID NO: 1201518 - DNA, 15 bp, Homo sapiens
aagacatgctttccc

SEQ ID NO: 1201519 - DNA, 15 bp, Homo sapiens
aaagacatgctttcc

SEQ ID NO: 1201520 - DNA, 15 bp, Homo sapiens
caaagacatgctttc

SEQ ID NO: 1201521 - DNA, 15 bp, Homo sapiens
tcaaagacatgcttt

SEQ ID NO: 1201522 - DNA, 15 bp, Homo sapiens
atcaaagacatgctt

SEQ ID NO: 1201523 - DNA, 15 bp, Homo sapiens
tatcaaagacatgct

SEQ ID NO: 1201524 - DNA, 15 bp, Homo sapiens
ttatcaaagacatgc

SEQ ID NO: 1201525 - DNA, 15 bp, Homo sapiens
attatcaaagacatg

SEQ ID NO: 1201526 - DNA, 15 bp, Homo sapiens
tattatcaaagacat

SEQ ID NO: 1201527 - DNA, 15 bp, Homo sapiens
ttattatcaaagaca

SEQ ID NO: 1201528 - DNA, 15 bp, Homo sapiens
attattatcaaagac

SEQ ID NO: 1201529 - DNA, 15 bp, Homo sapiens
tattattatcaaaga

SEQ ID NO: 1201530 - DNA, 15 bp, Homo sapiens
atattattatcaaag

SEQ ID NO: 1201531 - DNA, 15 bp, Homo sapiens
catattattatcaaa

SEQ ID NO: 1201532 - DNA, 15 bp, Homo sapiens
tcatattattatcaa

SEQ ID NO: 1201533 - DNA, 15 bp, Homo sapiens
atcatattattatca

SEQ ID NO: 1201534 - DNA, 15 bp, Homo sapiens
gatcatattattatc

SEQ ID NO: 1201535 - DNA, 15 bp, Homo sapiens
ggatcatattattat

SEQ ID NO: 1201536 - DNA, 15 bp, Homo sapiens
tggatcatattatta

SEQ ID NO: 1201537 - DNA, 15 bp, Homo sapiens
ttggatcatattatt

SEQ ID NO: 1201538 - DNA, 15 bp, Homo sapiens
attggatcatattat

SEQ ID NO: 1201539 - DNA, 15 bp, Homo sapiens
aattggatcatatta

SEQ ID NO: 1201540 - DNA, 15 bp, Homo sapiens
gaattggatcatatt

SEQ ID NO: 1201541 - DNA, 15 bp, Homo sapiens
cgaattggatcatat

SEQ ID NO: 1201542 - DNA, 15 bp, Homo sapiens
ccgaattggatcata

SEQ ID NO: 1201543 - DNA, 15 bp, Homo sapiens
gccgaattggatcat

SEQ ID NO: 1201544 - DNA, 15 bp, Homo sapiens
agccgaattggatca

SEQ ID NO: 1201545 - DNA, 15 bp, Homo sapiens
aagccgaattggatc

SEQ ID NO: 1201546 - DNA, 15 bp, Homo sapiens
taagccgaattggat

SEQ ID NO: 1201547 - DNA, 15 bp, Homo sapiens
ttaagccgaattgga

SEQ ID NO: 1201548 - DNA, 15 bp, Homo sapiens
tttaagccgaattgg

SEQ ID NO: 1201549 - DNA, 15 bp, Homo sapiens
atttaagccgaattg

SEQ ID NO: 1201550 - DNA, 15 bp, Homo sapiens
gatttaagccgaatt

SEQ ID NO: 1201551 - DNA, 15 bp, Homo sapiens
cgatttaagccgaat

SEQ ID NO: 1201552 - DNA, 15 bp, Homo sapiens
acgatttaagccgaa

SEQ ID NO: 1201553 - DNA, 15 bp, Homo sapiens
tacgatttaagccga

SEQ ID NO: 1201554 - DNA, 15 bp, Homo sapiens
ttacgatttaagccg

SEQ ID NO: 1201555 - DNA, 15 bp, Homo sapiens
attacgatttaagcc

SEQ ID NO: 1201556 - DNA, 15 bp, Homo sapiens
tattacgatttaagc

SEQ ID NO: 1201557 - DNA, 15 bp, Homo sapiens
gtattacgatttaag

SEQ ID NO: 1201558 - DNA, 15 bp, Homo sapiens
tgtattacgatttaa

SEQ ID NO: 1201559 - DNA, 15 bp, Homo sapiens
atgtattacgattta

SEQ ID NO: 1201560 - DNA, 15 bp, Homo sapiens
catgtattacgattt

SEQ ID NO: 1201561 - DNA, 15 bp, Homo sapiens
acatgtattacgatt

SEQ ID NO: 1201562 - DNA, 15 bp, Homo sapiens
cacatgtattacgat

SEQ ID NO: 1201563 - DNA, 15 bp, Homo sapiens
acacatgtattacga

SEQ ID NO: 1201564 - DNA, 15 bp, Homo sapiens
gacacatgtattacg

SEQ ID NO: 1201565 - DNA, 15 bp, Homo sapiens
tgacacatgtattac

SEQ ID NO: 1201566 - DNA, 15 bp, Homo sapiens
ctgacacatgtatta

SEQ ID NO: 1201567 - DNA, 15 bp, Homo sapiens
tctgacacatgtatt

SEQ ID NO: 1201568 - DNA, 15 bp, Homo sapiens
atctgacacatgtat

SEQ ID NO: 1201569 - DNA, 15 bp, Homo sapiens
aatctgacacatgta

SEQ ID NO: 1201570 - DNA, 15 bp, Homo sapiens
aaatctgacacatgt

SEQ ID NO: 1201571 - DNA, 15 bp, Homo sapiens
taaatctgacacatg

SEQ ID NO: 1201572 - DNA, 15 bp, Homo sapiens
ttaaatctgacacat

SEQ ID NO: 1201573 - DNA, 15 bp, Homo sapiens
tttaaatctgacaca

SEQ ID NO: 1201574 - DNA, 15 bp, Homo sapiens
atttaaatctgacac

SEQ ID NO: 1201575 - DNA, 15 bp, Homo sapiens
tatttaaatctgaca

SEQ ID NO: 1201576 - DNA, 15 bp, Homo sapiens
ttatttaaatctgac

SEQ ID NO: 1201577 - DNA, 15 bp, Homo sapiens
tttatttaaatctga

SEQ ID NO: 1201578 - DNA, 15 bp, Homo sapiens
atttatttaaatctg

SEQ ID NO: 1201579 - DNA, 15 bp, Homo sapiens
tatttatttaaatct

SEQ ID NO: 1201580 - DNA, 15 bp, Homo sapiens
ttatttatttaaatc

SEQ ID NO: 1201581 - DNA, 15 bp, Homo sapiens
attatttatttaaat

SEQ ID NO: 1201582 - DNA, 15 bp, Homo sapiens
atattatttatttaa

SEQ ID NO: 1201583 - DNA, 15 bp, Homo sapiens
catattatttattta

SEQ ID NO: 1201584 - DNA, 15 bp, Homo sapiens
tcatattatttattt

SEQ ID NO: 1201585 - DNA, 15 bp, Homo sapiens
ttcatattatttatt

SEQ ID NO: 1201586 - DNA, 15 bp, Homo sapiens
attcatattatttat

SEQ ID NO: 1201587 - DNA, 15 bp, Homo sapiens
aattcatattattta

SEQ ID NO: 1201588 - DNA, 15 bp, Homo sapiens
aaattcatattattt

SEQ ID NO: 1201589 - DNA, 15 bp, Homo sapiens
aaaattcatattatt

SEQ ID NO: 1201590 - DNA, 15 bp, Homo sapiens
aaaaattcatattat

SEQ ID NO: 1201591 - DNA, 15 bp, Homo sapiens
aaaaaattcatatta

SEQ ID NO: 1201592 - DNA, 15 bp, Homo sapiens
taaaaaattcatatt

SEQ ID NO: 1201593 - DNA, 15 bp, Homo sapiens
ttaaaaaattcatat

SEQ ID NO: 1201594 - DNA, 15 bp, Homo sapiens
tttaaaaaattcata

SEQ ID NO: 1201595 - DNA, 15 bp, Homo sapiens
ttttaaaaaattcat

SEQ ID NO: 1201596 - DNA, 15 bp, Homo sapiens
gttttaaaaaattca

SEQ ID NO: 1201597 - DNA, 15 bp, Homo sapiens
cgttttaaaaaattc

SEQ ID NO: 1201598 - DNA, 15 bp, Homo sapiens
acgttttaaaaaatt

SEQ ID NO: 1201599 - DNA, 15 bp, Homo sapiens
gacgttttaaaaaat

SEQ ID NO: 1201600 - DNA, 15 bp, Homo sapiens
ggacgttttaaaaaa

SEQ ID NO: 1201601 - DNA, 15 bp, Homo sapiens
gggacgttttaaaaa

SEQ ID NO: 1201602 - DNA, 15 bp, Homo sapiens
ggggacgttttaaaa

SEQ ID NO: 1201603 - DNA, 15 bp, Homo sapiens
tggggacgttttaaa

SEQ ID NO: 1201604 - DNA, 15 bp, Homo sapiens
ctggggacgttttaa

SEQ ID NO: 1201605 - DNA, 15 bp, Homo sapiens
tctggggacgtttta

SEQ ID NO: 1201606 - DNA, 15 bp, Homo sapiens
ctctggggacgtttt

SEQ ID NO: 1201607 - DNA, 15 bp, Homo sapiens
cctctggggacgttt

SEQ ID NO: 1201608 - DNA, 15 bp, Homo sapiens
gcctctggggacgtt

SEQ ID NO: 1201609 - DNA, 15 bp, Homo sapiens
agcctctggggacgt

SEQ ID NO: 1201610 - DNA, 15 bp, Homo sapiens
cagcctctggggacg

SEQ ID NO: 1201611 - DNA, 15 bp, Homo sapiens
ccagcctctggggac

SEQ ID NO: 1201612 - DNA, 15 bp, Homo sapiens
cccagcctctgggga

SEQ ID NO: 1201613 - DNA, 15 bp, Homo sapiens
acccagcctctgggg

SEQ ID NO: 1201614 - DNA, 15 bp, Homo sapiens
cacccagcctctggg

SEQ ID NO: 1201615 - DNA, 15 bp, Homo sapiens
gcacccagcctctgg

SEQ ID NO: 1201616 - DNA, 15 bp, Homo sapiens
tgcacccagcctctg

SEQ ID NO: 1201617 - DNA, 15 bp, Homo sapiens
ctgcacccagcctct

SEQ ID NO: 1201618 - DNA, 15 bp, Homo sapiens
actgcacccagcctc

SEQ ID NO: 1201619 - DNA, 15 bp, Homo sapiens
cactgcacccagcct

SEQ ID NO: 1201620 - DNA, 15 bp, Homo sapiens
tccaaagtattggga

SEQ ID NO: 1201621 - DNA, 15 bp, Homo sapiens
ttccaaagtattggg

SEQ ID NO: 1201622 - DNA, 15 bp, Homo sapiens
cttccaaagtattgg

SEQ ID NO: 1201623 - DNA, 15 bp, Homo sapiens
ccttccaaagtattg

SEQ ID NO: 1201624 - DNA, 15 bp, Homo sapiens
gccttccaaagtatt

SEQ ID NO: 1201625 - DNA, 15 bp, Homo sapiens
agccttccaaagtat

SEQ ID NO: 1201626 - DNA, 15 bp, Homo sapiens
cagccttccaaagta

SEQ ID NO: 1201627 - DNA, 15 bp, Homo sapiens
tcctcagccttccaa

SEQ ID NO: 1201628 - DNA, 15 bp, Homo sapiens
ctcctcagccttcca

SEQ ID NO: 1201629 - DNA, 15 bp, Homo sapiens
cctcctcagccttcc

SEQ ID NO: 1201630 - DNA, 15 bp, Homo sapiens
ccctcctcagccttc

SEQ ID NO: 1201631 - DNA, 15 bp, Homo sapiens
tccctcctcagcctt

SEQ ID NO: 1201632 - DNA, 15 bp, Homo sapiens
ctccctcctcagcct

SEQ ID NO: 1201633 - DNA, 15 bp, Homo sapiens
tctccctcctcagcc

SEQ ID NO: 1201634 - DNA, 15 bp, Homo sapiens
ttctccctcctcagc

SEQ ID NO: 1201635 - DNA, 15 bp, Homo sapiens
attctccctcctcag

SEQ ID NO: 1201636 - DNA, 15 bp, Homo sapiens
aattctccctcctca

SEQ ID NO: 1201637 - DNA, 15 bp, Homo sapiens
caattctccctcctc

SEQ ID NO: 1201638 - DNA, 15 bp, Homo sapiens
gcaattctccctcct

SEQ ID NO: 1201639 - DNA, 15 bp, Homo sapiens
agcaattctccctcc

SEQ ID NO: 1201640 - DNA, 15 bp, Homo sapiens
aagcaattctccctc

SEQ ID NO: 1201641 - DNA, 15 bp, Homo sapiens
cctcaagcaattctc

SEQ ID NO: 1201642 - DNA, 15 bp, Homo sapiens
gcctcaagcaattct

SEQ ID NO: 1201643 - DNA, 15 bp, Homo sapiens
ggcctcaagcaattc

SEQ ID NO: 1201644 - DNA, 15 bp, Homo sapiens
tggcctcaagcaatt

SEQ ID NO: 1201645 - DNA, 15 bp, Homo sapiens
agctggtctcaaact

SEQ ID NO: 1201646 - DNA, 15 bp, Homo sapiens
aagctggtctcaaac

SEQ ID NO: 1201647 - DNA, 15 bp, Homo sapiens
caagctggtctcaaa

SEQ ID NO: 1201648 - DNA, 15 bp, Homo sapiens
ccaagctggtctcaa

SEQ ID NO: 1201649 - DNA, 15 bp, Homo sapiens
cccaagctggtctca

SEQ ID NO: 1201650 - DNA, 15 bp, Homo sapiens
gcccaagctggtctc

SEQ ID NO: 1201651 - DNA, 15 bp, Homo sapiens
ttgttgcccaagctg

SEQ ID NO: 1201652 - DNA, 15 bp, Homo sapiens
tttgttgcccaagct

SEQ ID NO: 1201653 - DNA, 15 bp, Homo sapiens
ctttgttgcccaagc

SEQ ID NO: 1201654 - DNA, 15 bp, Homo sapiens
tctttgttgcccaag

SEQ ID NO: 1201655 - DNA, 15 bp, Homo sapiens
ctctttgttgcccaa

SEQ ID NO: 1201656 - DNA, 15 bp, Homo sapiens
tctctttgttgccca

SEQ ID NO: 1201657 - DNA, 15 bp, Homo sapiens
ctctctttgttgccc

SEQ ID NO: 1201658 - DNA, 15 bp, Homo sapiens
tctctctttgttgcc

SEQ ID NO: 1201659 - DNA, 15 bp, Homo sapiens
gtctctctttgttgc

SEQ ID NO: 1201660 - DNA, 15 bp, Homo sapiens
ggtctctctttgttg

SEQ ID NO: 1201661 - DNA, 15 bp, Homo sapiens
gggtctctctttgtt

SEQ ID NO: 1201662 - DNA, 15 bp, Homo sapiens
agggtctctctttgt

SEQ ID NO: 1201663 - DNA, 15 bp, Homo sapiens
cagggtctctctttg

SEQ ID NO: 1201664 - DNA, 15 bp, Homo sapiens
acagggtctctcttt

SEQ ID NO: 1201665 - DNA, 15 bp, Homo sapiens
gacagggtctctctt

SEQ ID NO: 1201666 - DNA, 15 bp, Homo sapiens
tttttttgtagagac

SEQ ID NO: 1201667 - DNA, 15 bp, Homo sapiens
gtttttttctttctt

SEQ ID NO: 1201668 - DNA, 15 bp, Homo sapiens
tgtttttttctttct

SEQ ID NO: 1201669 - DNA, 15 bp, Homo sapiens
ttgtttttttctttc

SEQ ID NO: 1201670 - DNA, 15 bp, Homo sapiens
attgtttttttcttt

SEQ ID NO: 1201671 - DNA, 15 bp, Homo sapiens
tattgtttttttctt

SEQ ID NO: 1201672 - DNA, 15 bp, Homo sapiens
ttattgtttttttct

SEQ ID NO: 1201673 - DNA, 15 bp, Homo sapiens
tttattgtttttttc

SEQ ID NO: 1201674 - DNA, 15 bp, Homo sapiens
atttattgttttttt

SEQ ID NO: 1201675 - DNA, 15 bp, Homo sapiens
aatttattgtttttt

SEQ ID NO: 1201676 - DNA, 15 bp, Homo sapiens
taatttattgttttt

SEQ ID NO: 1201677 - DNA, 15 bp, Homo sapiens
ctaatttattgtttt

SEQ ID NO: 1201678 - DNA, 15 bp, Homo sapiens
gctaatttattgttt

SEQ ID NO: 1201679 - DNA, 15 bp, Homo sapiens
ggctaatttattgtt

SEQ ID NO: 1201680 - DNA, 15 bp, Homo sapiens
cggctaatttattgt

SEQ ID NO: 1201681 - DNA, 15 bp, Homo sapiens
ccggctaatttattg

SEQ ID NO: 1201682 - DNA, 15 bp, Homo sapiens
cccggctaatttatt

SEQ ID NO: 1201683 - DNA, 15 bp, Homo sapiens
acccggctaatttat

SEQ ID NO: 1201684 - DNA, 15 bp, Homo sapiens
tacccggctaattta

SEQ ID NO: 1201685 - DNA, 15 bp, Homo sapiens
gcatacccggctaat

SEQ ID NO: 1201686 - DNA, 15 bp, Homo sapiens
agcatacccggctaa

SEQ ID NO: 1201687 - DNA, 15 bp, Homo sapiens
cagcatacccggcta

SEQ ID NO: 1201688 - DNA, 15 bp, Homo sapiens
ccagcatacccggct

SEQ ID NO: 1201689 - DNA, 15 bp, Homo sapiens
gccagcatacccggc

SEQ ID NO: 1201690 - DNA, 15 bp, Homo sapiens
tgccagcatacccgg

SEQ ID NO: 1201691 - DNA, 15 bp, Homo sapiens
gtgccagcatacccg

SEQ ID NO: 1201692 - DNA, 15 bp, Homo sapiens
cgtgccagcataccc

SEQ ID NO: 1201693 - DNA, 15 bp, Homo sapiens
acgtgccagcatacc

SEQ ID NO: 1201694 - DNA, 15 bp, Homo sapiens
cacgtgccagcatac

SEQ ID NO: 1201695 - DNA, 15 bp, Homo sapiens
gcacgtgccagcata

SEQ ID NO: 1201696 - DNA, 15 bp, Homo sapiens
ggcacgtgccagcat

SEQ ID NO: 1201697 - DNA, 15 bp, Homo sapiens
aggcacgtgccagca

SEQ ID NO: 1201698 - DNA, 15 bp, Homo sapiens
caggcacgtgccagc

SEQ ID NO: 1201699 - DNA, 15 bp, Homo sapiens
acaggcacgtgccag

SEQ ID NO: 1201700 - DNA, 15 bp, Homo sapiens
tacaggcacgtgcca

SEQ ID NO: 1201701 - DNA, 15 bp, Homo sapiens
actacaggcacgtgc

SEQ ID NO: 1201702 - DNA, 15 bp, Homo sapiens
gactacaggcacgtg

SEQ ID NO: 1201703 - DNA, 15 bp, Homo sapiens
ggactacaggcacgt

SEQ ID NO: 1201704 - DNA, 15 bp, Homo sapiens
gggactacaggcacg

SEQ ID NO: 1201705 - DNA, 15 bp, Homo sapiens
atcctgagtagctgg

SEQ ID NO: 1201706 - DNA, 15 bp, Homo sapiens
catcctgagtagctg

SEQ ID NO: 1201707 - DNA, 15 bp, Homo sapiens
gcatcctgagtagct

SEQ ID NO: 1201708 - DNA, 15 bp, Homo sapiens
agcatcctgagtagc

SEQ ID NO: 1201709 - DNA, 15 bp, Homo sapiens
aagcatcctgagtag

SEQ ID NO: 1201710 - DNA, 15 bp, Homo sapiens
taagcatcctgagta

SEQ ID NO: 1201711 - DNA, 15 bp, Homo sapiens
ctaagcatcctgagt

SEQ ID NO: 1201712 - DNA, 15 bp, Homo sapiens
cctaagcatcctgag

SEQ ID NO: 1201713 - DNA, 15 bp, Homo sapiens
gcctaagcatcctga

SEQ ID NO: 1201714 - DNA, 15 bp, Homo sapiens
tgcctaagcatcctg

SEQ ID NO: 1201715 - DNA, 15 bp, Homo sapiens
ctgcctaagcatcct

SEQ ID NO: 1201716 - DNA, 15 bp, Homo sapiens
cctgcctaagcatcc

SEQ ID NO: 1201717 - DNA, 15 bp, Homo sapiens
tcctgcctaagcatc

SEQ ID NO: 1201718 - DNA, 15 bp, Homo sapiens
ctcctgcctaagcat

SEQ ID NO: 1201719 - DNA, 15 bp, Homo sapiens
cctcctgcctaagca

SEQ ID NO: 1201720 - DNA, 15 bp, Homo sapiens
tcctcctgcctaagc

SEQ ID NO: 1201721 - DNA, 15 bp, Homo sapiens
atcctcctgcctaag

SEQ ID NO: 1201722 - DNA, 15 bp, Homo sapiens
gatcctcctgcctaa

SEQ ID NO: 1201723 - DNA, 15 bp, Homo sapiens
cgatcctcctgccta

SEQ ID NO: 1201724 - DNA, 15 bp, Homo sapiens
atcaagcgatcctcc

SEQ ID NO: 1201725 - DNA, 15 bp, Homo sapiens
gatcaagcgatcctc

SEQ ID NO: 1201726 - DNA, 15 bp, Homo sapiens
ggatcaagcgatcct

SEQ ID NO: 1201727 - DNA, 15 bp, Homo sapiens
gggatcaagcgatcc

SEQ ID NO: 1201728 - DNA, 15 bp, Homo sapiens
tgggatcaagcgatc

SEQ ID NO: 1201729 - DNA, 15 bp, Homo sapiens
ctgggatcaagcgat

SEQ ID NO: 1201730 - DNA, 15 bp, Homo sapiens
cctgggatcaagcga

SEQ ID NO: 1201731 - DNA, 15 bp, Homo sapiens
tcctgggatcaagcg

SEQ ID NO: 1201732 - DNA, 15 bp, Homo sapiens
gtcctgggatcaagc

SEQ ID NO: 1201733 - DNA, 15 bp, Homo sapiens
cgtcctgggatcaag

SEQ ID NO: 1201734 - DNA, 15 bp, Homo sapiens
acgtcctgggatcaa

SEQ ID NO: 1201735 - DNA, 15 bp, Homo sapiens
aacgtcctgggatca

SEQ ID NO: 1201736 - DNA, 15 bp, Homo sapiens
caacgtcctgggatc

SEQ ID NO: 1201737 - DNA, 15 bp, Homo sapiens
tcaacgtcctgggat

SEQ ID NO: 1201738 - DNA, 15 bp, Homo sapiens
ctcaacgtcctggga

SEQ ID NO: 1201739 - DNA, 15 bp, Homo sapiens
tctcaacgtcctggg

SEQ ID NO: 1201740 - DNA, 15 bp, Homo sapiens
gtctcaacgtcctgg

SEQ ID NO: 1201741 - DNA, 15 bp, Homo sapiens
ggtctcaacgtcctg

SEQ ID NO: 1201742 - DNA, 15 bp, Homo sapiens
tggtctcaacgtcct

SEQ ID NO: 1201743 - DNA, 15 bp, Homo sapiens
gtggtctcaacgtcc

SEQ ID NO: 1201744 - DNA, 15 bp, Homo sapiens
tgtggtctcaacgtc

SEQ ID NO: 1201745 - DNA, 15 bp, Homo sapiens
ctgtggtctcaacgt

SEQ ID NO: 1201746 - DNA, 15 bp, Homo sapiens
actgtggtctcaacg

SEQ ID NO: 1201747 - DNA, 15 bp, Homo sapiens
aactgtggtctcaac

SEQ ID NO: 1201748 - DNA, 15 bp, Homo sapiens
taactgtggtctcaa

SEQ ID NO: 1201749 - DNA, 15 bp, Homo sapiens
ctaactgtggtctca

SEQ ID NO: 1201750 - DNA, 15 bp, Homo sapiens
gctaactgtggtctc

SEQ ID NO: 1201751 - DNA, 15 bp, Homo sapiens
ggctaactgtggtct

SEQ ID NO: 1201752 - DNA, 15 bp, Homo sapiens
tggctaactgtggtc

SEQ ID NO: 1201753 - DNA, 15 bp, Homo sapiens
atggctaactgtggt

SEQ ID NO: 1201754 - DNA, 15 bp, Homo sapiens
catggctaactgtgg

SEQ ID NO: 1201755 - DNA, 15 bp, Homo sapiens
tcatggctaactgtg

SEQ ID NO: 1201756 - DNA, 15 bp, Homo sapiens
atcatggctaactgt

SEQ ID NO: 1201757 - DNA, 15 bp, Homo sapiens
catcatggctaactg

SEQ ID NO: 1201758 - DNA, 15 bp, Homo sapiens
ccatcatggctaact

SEQ ID NO: 1201759 - DNA, 15 bp, Homo sapiens
gccatcatggctaac

SEQ ID NO: 1201760 - DNA, 15 bp, Homo sapiens
tgccatcatggctaa

SEQ ID NO: 1201761 - DNA, 15 bp, Homo sapiens
gtgccatcatggcta

SEQ ID NO: 1201762 - DNA, 15 bp, Homo sapiens
taggctggagtgcag

SEQ ID NO: 1201763 - DNA, 15 bp, Homo sapiens
ctaggctggagtgca

SEQ ID NO: 1201764 - DNA, 15 bp, Homo sapiens
cctaggctggagtgc

SEQ ID NO: 1201765 - DNA, 15 bp, Homo sapiens
acctaggctggagtg

SEQ ID NO: 1201766 - DNA, 15 bp, Homo sapiens
cacctaggctggagt

SEQ ID NO: 1201767 - DNA, 15 bp, Homo sapiens
tcacctaggctggag

SEQ ID NO: 1201768 - DNA, 15 bp, Homo sapiens
gtcacctaggctgga

SEQ ID NO: 1201769 - DNA, 15 bp, Homo sapiens
tgtcacctaggctgg

SEQ ID NO: 1201770 - DNA, 15 bp, Homo sapiens
tctgtcacctaggct

SEQ ID NO: 1201771 - DNA, 15 bp, Homo sapiens
ctctgtcacctaggc

SEQ ID NO: 1201772 - DNA, 15 bp, Homo sapiens
gctctgtcacctagg

SEQ ID NO: 1201773 - DNA, 15 bp, Homo sapiens
tgctctgtcacctag

SEQ ID NO: 1201774 - DNA, 15 bp, Homo sapiens
ttgctctgtcaccta

SEQ ID NO: 1201775 - DNA, 15 bp, Homo sapiens
cttgctctgtcacct

SEQ ID NO: 1201776 - DNA, 15 bp, Homo sapiens
attttagagacaggg

SEQ ID NO: 1201777 - DNA, 15 bp, Homo sapiens
tattttagagacagg

SEQ ID NO: 1201778 - DNA, 15 bp, Homo sapiens
ttattttagagacag

SEQ ID NO: 1201779 - DNA, 15 bp, Homo sapiens
tttattttagagaca

SEQ ID NO: 1201780 - DNA, 15 bp, Homo sapiens
ttttattttagagac

SEQ ID NO: 1201781 - DNA, 15 bp, Homo sapiens
attttattttagaga

SEQ ID NO: 1201782 - DNA, 15 bp, Homo sapiens
tattttattttagag

SEQ ID NO: 1201783 - DNA, 15 bp, Homo sapiens
ttattttattttaga

SEQ ID NO: 1201784 - DNA, 15 bp, Homo sapiens
tttattttattttag

SEQ ID NO: 1201785 - DNA, 15 bp, Homo sapiens
tattttattttattt

SEQ ID NO: 1201786 - DNA, 15 bp, Homo sapiens
cattttattttattt

SEQ ID NO: 1201787 - DNA, 15 bp, Homo sapiens
ccattttattttatt

SEQ ID NO: 1201788 - DNA, 15 bp, Homo sapiens
cccattttattttat

SEQ ID NO: 1201789 - DNA, 15 bp, Homo sapiens
gcccattttatttta

SEQ ID NO: 1201790 - DNA, 15 bp, Homo sapiens
ggcccattttatttt

SEQ ID NO: 1201791 - DNA, 15 bp, Homo sapiens
aggcccattttattt

SEQ ID NO: 1201792 - DNA, 15 bp, Homo sapiens
caggcccattttatt

SEQ ID NO: 1201793 - DNA, 15 bp, Homo sapiens
ccaggcccattttat

SEQ ID NO: 1201794 - DNA, 15 bp, Homo sapiens
gccaggcccatttta

SEQ ID NO: 1201795 - DNA, 15 bp, Homo sapiens
tgccaggcccatttt

SEQ ID NO: 1201796 - DNA, 15 bp, Homo sapiens
atgccaggcccattt

SEQ ID NO: 1201797 - DNA, 15 bp, Homo sapiens
catgccaggcccatt

SEQ ID NO: 1201798 - DNA, 15 bp, Homo sapiens
ccatgccaggcccat

SEQ ID NO: 1201799 - DNA, 15 bp, Homo sapiens
cgccatgccaggccc

SEQ ID NO: 1201800 - DNA, 15 bp, Homo sapiens
ccgccatgccaggcc

SEQ ID NO: 1201801 - DNA, 15 bp, Homo sapiens
gccgccatgccaggc

SEQ ID NO: 1201802 - DNA, 15 bp, Homo sapiens
agccgccatgccagg

SEQ ID NO: 1201803 - DNA, 15 bp, Homo sapiens
aagccgccatgccag

SEQ ID NO: 1201804 - DNA, 15 bp, Homo sapiens
taagccgccatgcca

SEQ ID NO: 1201805 - DNA, 15 bp, Homo sapiens
ataagccgccatgcc

SEQ ID NO: 1201806 - DNA, 15 bp, Homo sapiens
cataagccgccatgc

SEQ ID NO: 1201807 - DNA, 15 bp, Homo sapiens
gcataagccgccatg

SEQ ID NO: 1201808 - DNA, 15 bp, Homo sapiens
ggcataagccgccat

SEQ ID NO: 1201809 - DNA, 15 bp, Homo sapiens
aggcataagccgcca

SEQ ID NO: 1201810 - DNA, 15 bp, Homo sapiens
caggcataagccgcc

SEQ ID NO: 1201811 - DNA, 15 bp, Homo sapiens
acaggcataagccgc

SEQ ID NO: 1201812 - DNA, 15 bp, Homo sapiens
tacaggcataagccg

SEQ ID NO: 1201813 - DNA, 15 bp, Homo sapiens
ttacaggcataagcc

SEQ ID NO: 1201814 - DNA, 15 bp, Homo sapiens
attacaggcataagc

SEQ ID NO: 1201815 - DNA, 15 bp, Homo sapiens
gattacaggcataag

SEQ ID NO: 1201816 - DNA, 15 bp, Homo sapiens
ggattacaggcataa

SEQ ID NO: 1201817 - DNA, 15 bp, Homo sapiens
gggattacaggcata

SEQ ID NO: 1201818 - DNA, 15 bp, Homo sapiens
acccacctcgacctc

SEQ ID NO: 1201819 - DNA, 15 bp, Homo sapiens
cacccacctcgacct

SEQ ID NO: 1201820 - DNA, 15 bp, Homo sapiens
ccacccacctcgacc

SEQ ID NO: 1201821 - DNA, 15 bp, Homo sapiens
tccacccacctcgac

SEQ ID NO: 1201822 - DNA, 15 bp, Homo sapiens
atccacccacctcga

SEQ ID NO: 1201823 - DNA, 15 bp, Homo sapiens
taggctagtctcgaa

SEQ ID NO: 1201824 - DNA, 15 bp, Homo sapiens
ctaggctagtctcga

SEQ ID NO: 1201825 - DNA, 15 bp, Homo sapiens
gctaggctagtctcg

SEQ ID NO: 1201826 - DNA, 15 bp, Homo sapiens
ggctaggctagtctc

SEQ ID NO: 1201827 - DNA, 15 bp, Homo sapiens
tggctaggctagtct

SEQ ID NO: 1201828 - DNA, 15 bp, Homo sapiens
ttggctaggctagtc

SEQ ID NO: 1201829 - DNA, 15 bp, Homo sapiens
gttggctaggctagt

SEQ ID NO: 1201830 - DNA, 15 bp, Homo sapiens
tgttggctaggctag

SEQ ID NO: 1201831 - DNA, 15 bp, Homo sapiens
gtgttggctaggcta

SEQ ID NO: 1201832 - DNA, 15 bp, Homo sapiens
cgtgttggctaggct

SEQ ID NO: 1201833 - DNA, 15 bp, Homo sapiens
ccgtgttggctaggc

SEQ ID NO: 1201834 - DNA, 15 bp, Homo sapiens
accgtgttggctagg

SEQ ID NO: 1201835 - DNA, 15 bp, Homo sapiens
caccgtgttggctag

SEQ ID NO: 1201836 - DNA, 15 bp, Homo sapiens
tcaccgtgttggcta

SEQ ID NO: 1201837 - DNA, 15 bp, Homo sapiens
ttcaccgtgttggct

SEQ ID NO: 1201838 - DNA, 15 bp, Homo sapiens
tttcaccgtgttggc

SEQ ID NO: 1201839 - DNA, 15 bp, Homo sapiens
cagacagggtttcac

SEQ ID NO: 1201840 - DNA, 15 bp, Homo sapiens
aacagacagggtttc

SEQ ID NO: 1201841 - DNA, 15 bp, Homo sapiens
gaacagacagggttt

SEQ ID NO: 1201842 - DNA, 15 bp, Homo sapiens
agaacagacagggtt

SEQ ID NO: 1201843 - DNA, 15 bp, Homo sapiens
tagaacagacagggt

SEQ ID NO: 1201844 - DNA, 15 bp, Homo sapiens
ttagaacagacaggg

SEQ ID NO: 1201845 - DNA, 15 bp, Homo sapiens
tttagaacagacagg

SEQ ID NO: 1201846 - DNA, 15 bp, Homo sapiens
ttttagaacagacag

SEQ ID NO: 1201847 - DNA, 15 bp, Homo sapiens
tttttagaacagaca

SEQ ID NO: 1201848 - DNA, 15 bp, Homo sapiens
atttttagaacagac

SEQ ID NO: 1201849 - DNA, 15 bp, Homo sapiens
tatttttagaacaga

SEQ ID NO: 1201850 - DNA, 15 bp, Homo sapiens
gtatttttagaacag

SEQ ID NO: 1201851 - DNA, 15 bp, Homo sapiens
tgtatttttagaaca

SEQ ID NO: 1201852 - DNA, 15 bp, Homo sapiens
ctgtatttttagaac

SEQ ID NO: 1201853 - DNA, 15 bp, Homo sapiens
tctgtatttttagaa

SEQ ID NO: 1201854 - DNA, 15 bp, Homo sapiens
ttctgtatttttaga

SEQ ID NO: 1201855 - DNA, 15 bp, Homo sapiens
tttctgtatttttag

SEQ ID NO: 1201856 - DNA, 15 bp, Homo sapiens
atttctgtattttta

SEQ ID NO: 1201857 - DNA, 15 bp, Homo sapiens
catttctgtattttt

SEQ ID NO: 1201858 - DNA, 15 bp, Homo sapiens
tcatttctgtatttt

SEQ ID NO: 1201859 - DNA, 15 bp, Homo sapiens
ctcatttctgtattt

SEQ ID NO: 1201860 - DNA, 15 bp, Homo sapiens
gctcatttctgtatt

SEQ ID NO: 1201861 - DNA, 15 bp, Homo sapiens
agctcatttctgtat

SEQ ID NO: 1201862 - DNA, 15 bp, Homo sapiens
cagctcatttctgta

SEQ ID NO: 1201863 - DNA, 15 bp, Homo sapiens
ccagctcatttctgt

SEQ ID NO: 1201864 - DNA, 15 bp, Homo sapiens
cccagctcatttctg

SEQ ID NO: 1201865 - DNA, 15 bp, Homo sapiens
tcccagctcatttct

SEQ ID NO: 1201866 - DNA, 15 bp, Homo sapiens
ctcccagctcatttc

SEQ ID NO: 1201867 - DNA, 15 bp, Homo sapiens
actcccagctcattt

SEQ ID NO: 1201868 - DNA, 15 bp, Homo sapiens
cactcccagctcatt

SEQ ID NO: 1201869 - DNA, 15 bp, Homo sapiens
ccactcccagctcat

SEQ ID NO: 1201870 - DNA, 15 bp, Homo sapiens
accactcccagctca

SEQ ID NO: 1201871 - DNA, 15 bp, Homo sapiens
caccactcccagctc

SEQ ID NO: 1201872 - DNA, 15 bp, Homo sapiens
tgccaccactcccag

SEQ ID NO: 1201873 - DNA, 15 bp, Homo sapiens
ctgccaccactccca

SEQ ID NO: 1201874 - DNA, 15 bp, Homo sapiens
cctgccaccactccc

SEQ ID NO: 1201875 - DNA, 15 bp, Homo sapiens
gcctgccaccactcc

SEQ ID NO: 1201876 - DNA, 15 bp, Homo sapiens
tgcctgccaccactc

SEQ ID NO: 1201877 - DNA, 15 bp, Homo sapiens
gtgcctgccaccact

SEQ ID NO: 1201878 - DNA, 15 bp, Homo sapiens
agtgcctgccaccac

SEQ ID NO: 1201879 - DNA, 15 bp, Homo sapiens
cagtgcctgccacca

SEQ ID NO: 1201880 - DNA, 15 bp, Homo sapiens
ccagtgcctgccacc

SEQ ID NO: 1201881 - DNA, 15 bp, Homo sapiens
accagtgcctgccac

SEQ ID NO: 1201882 - DNA, 15 bp, Homo sapiens
taccagtgcctgcca

SEQ ID NO: 1201883 - DNA, 15 bp, Homo sapiens
ttaccagtgcctgcc

SEQ ID NO: 1201884 - DNA, 15 bp, Homo sapiens
attaccagtgcctgc

SEQ ID NO: 1201885 - DNA, 15 bp, Homo sapiens
gattaccagtgcctg

SEQ ID NO: 1201886 - DNA, 15 bp, Homo sapiens
ggattaccagtgcct

SEQ ID NO: 1201887 - DNA, 15 bp, Homo sapiens
gggattaccagtgcc

SEQ ID NO: 1201888 - DNA, 15 bp, Homo sapiens
tgggattaccagtgc

SEQ ID NO: 1201889 - DNA, 15 bp, Homo sapiens
ctgggattaccagtg

SEQ ID NO: 1201890 - DNA, 15 bp, Homo sapiens
gctgggattaccagt

SEQ ID NO: 1201891 - DNA, 15 bp, Homo sapiens
agctgggattaccag

SEQ ID NO: 1201892 - DNA, 15 bp, Homo sapiens
tagctgggattacca

SEQ ID NO: 1201893 - DNA, 15 bp, Homo sapiens
gtagctgggattacc

SEQ ID NO: 1201894 - DNA, 15 bp, Homo sapiens
tccgagtagctggga

SEQ ID NO: 1201895 - DNA, 15 bp, Homo sapiens
ctccgagtagctggg

SEQ ID NO: 1201896 - DNA, 15 bp, Homo sapiens
cctccgagtagctgg

SEQ ID NO: 1201897 - DNA, 15 bp, Homo sapiens
gcctccgagtagctg

SEQ ID NO: 1201898 - DNA, 15 bp, Homo sapiens
agcctccgagtagct

SEQ ID NO: 1201899 - DNA, 15 bp, Homo sapiens
tagcctccgagtagc

SEQ ID NO: 1201900 - DNA, 15 bp, Homo sapiens
ttagcctccgagtag

SEQ ID NO: 1201901 - DNA, 15 bp, Homo sapiens
cttagcctccgagta

SEQ ID NO: 1201902 - DNA, 15 bp, Homo sapiens
ccttagcctccgagt

SEQ ID NO: 1201903 - DNA, 15 bp, Homo sapiens
gccttagcctccgag

SEQ ID NO: 1201904 - DNA, 15 bp, Homo sapiens
tgccttagcctccga

SEQ ID NO: 1201905 - DNA, 15 bp, Homo sapiens
ctgccttagcctccg

SEQ ID NO: 1201906 - DNA, 15 bp, Homo sapiens
tctcctgccttagcc

SEQ ID NO: 1201907 - DNA, 15 bp, Homo sapiens
ttctcctgccttagc

SEQ ID NO: 1201908 - DNA, 15 bp, Homo sapiens
attctcctgccttag

SEQ ID NO: 1201909 - DNA, 15 bp, Homo sapiens
aattctcctgcctta

SEQ ID NO: 1201910 - DNA, 15 bp, Homo sapiens
caattctcctgcctt

SEQ ID NO: 1201911 - DNA, 15 bp, Homo sapiens
ggcctcccgggttca

SEQ ID NO: 1201912 - DNA, 15 bp, Homo sapiens
tggcctcccgggttc

SEQ ID NO: 1201913 - DNA, 15 bp, Homo sapiens
ttggcctcccgggtt

SEQ ID NO: 1201914 - DNA, 15 bp, Homo sapiens
cttggcctcccgggt

SEQ ID NO: 1201915 - DNA, 15 bp, Homo sapiens
ccttggcctcccggg

SEQ ID NO: 1201916 - DNA, 15 bp, Homo sapiens
accttggcctcccgg

SEQ ID NO: 1201917 - DNA, 15 bp, Homo sapiens
aaccttggcctcccg

SEQ ID NO: 1201918 - DNA, 15 bp, Homo sapiens
caaccttggcctccc

SEQ ID NO: 1201919 - DNA, 15 bp, Homo sapiens
gcaaccttggcctcc

SEQ ID NO: 1201920 - DNA, 15 bp, Homo sapiens
tgcaaccttggcctc

SEQ ID NO: 1201921 - DNA, 15 bp, Homo sapiens
ctgcaaccttggcct

SEQ ID NO: 1201922 - DNA, 15 bp, Homo sapiens
actgcaaccttggcc

SEQ ID NO: 1201923 - DNA, 15 bp, Homo sapiens
cactgcaaccttggc

SEQ ID NO: 1201924 - DNA, 15 bp, Homo sapiens
tcactgcaaccttgg

SEQ ID NO: 1201925 - DNA, 15 bp, Homo sapiens
ctcactgcaaccttg

SEQ ID NO: 1201926 - DNA, 15 bp, Homo sapiens
cctcactgcaacctt

SEQ ID NO: 1201927 - DNA, 15 bp, Homo sapiens
gcctcactgcaacct

SEQ ID NO: 1201928 - DNA, 15 bp, Homo sapiens
tgcctcactgcaacc

SEQ ID NO: 1201929 - DNA, 15 bp, Homo sapiens
ttgcctcactgcaac

SEQ ID NO: 1201930 - DNA, 15 bp, Homo sapiens
cttgcctcactgcaa

SEQ ID NO: 1201931 - DNA, 15 bp, Homo sapiens
tcttgcctcactgca

SEQ ID NO: 1201932 - DNA, 15 bp, Homo sapiens
atcttgcctcactgc

SEQ ID NO: 1201933 - DNA, 15 bp, Homo sapiens
catcttgcctcactg

SEQ ID NO: 1201934 - DNA, 15 bp, Homo sapiens
ccatcttgcctcact

SEQ ID NO: 1201935 - DNA, 15 bp, Homo sapiens
gccatcttgcctcac

SEQ ID NO: 1201936 - DNA, 15 bp, Homo sapiens
tgccatcttgcctca

SEQ ID NO: 1201937 - DNA, 15 bp, Homo sapiens
gtgccatcttgcctc

SEQ ID NO: 1201938 - DNA, 15 bp, Homo sapiens
ggtgccatcttgcct

SEQ ID NO: 1201939 - DNA, 15 bp, Homo sapiens
tggtgccatcttgcc

SEQ ID NO: 1201940 - DNA, 15 bp, Homo sapiens
gtggtgccatcttgc

SEQ ID NO: 1201941 - DNA, 15 bp, Homo sapiens
ttggagtgcagtggt

SEQ ID NO: 1201942 - DNA, 15 bp, Homo sapiens
tctgtcacccaggtt

SEQ ID NO: 1201943 - DNA, 15 bp, Homo sapiens
ctctgtcacccaggt

SEQ ID NO: 1201944 - DNA, 15 bp, Homo sapiens
tcggagtctcgctct

SEQ ID NO: 1201945 - DNA, 15 bp, Homo sapiens
atcggagtctcgctc

SEQ ID NO: 1201946 - DNA, 15 bp, Homo sapiens
aatcggagtctcgct

SEQ ID NO: 1201947 - DNA, 15 bp, Homo sapiens
gaatcggagtctcgc

SEQ ID NO: 1201948 - DNA, 15 bp, Homo sapiens
tgaatcggagtctcg

SEQ ID NO: 1201949 - DNA, 15 bp, Homo sapiens
ttgaatcggagtctc

SEQ ID NO: 1201950 - DNA, 15 bp, Homo sapiens
tttgaatcggagtct

SEQ ID NO: 1201951 - DNA, 15 bp, Homo sapiens
ttttgaatcggagtc

SEQ ID NO: 1201952 - DNA, 15 bp, Homo sapiens
tttttgaatcggagt

SEQ ID NO: 1201953 - DNA, 15 bp, Homo sapiens
ttttttgaatcggag

SEQ ID NO: 1201954 - DNA, 15 bp, Homo sapiens
tttttttgaatcgga

SEQ ID NO: 1201955 - DNA, 15 bp, Homo sapiens
ttttttttgaatcgg

SEQ ID NO: 1201956 - DNA, 15 bp, Homo sapiens
attttttttgaatcg

SEQ ID NO: 1201957 - DNA, 15 bp, Homo sapiens
tattttttttgaatc

SEQ ID NO: 1201958 - DNA, 15 bp, Homo sapiens
ttattttttttgaat

SEQ ID NO: 1201959 - DNA, 15 bp, Homo sapiens
attattttttttgaa

SEQ ID NO: 1201960 - DNA, 15 bp, Homo sapiens
tattattttttttga

SEQ ID NO: 1201961 - DNA, 15 bp, Homo sapiens
ttattattttttttg

SEQ ID NO: 1201962 - DNA, 15 bp, Homo sapiens
ttatttattattatt

SEQ ID NO: 1201963 - DNA, 15 bp, Homo sapiens
tttatttattattat

SEQ ID NO: 1201964 - DNA, 15 bp, Homo sapiens
gtttatttatttatt

SEQ ID NO: 1201965 - DNA, 15 bp, Homo sapiens
ttgtttatttattta

SEQ ID NO: 1201966 - DNA, 15 bp, Homo sapiens
tttgtttatttattt

SEQ ID NO: 1201967 - DNA, 15 bp, Homo sapiens
atttgtttatttatt

SEQ ID NO: 1201968 - DNA, 15 bp, Homo sapiens
tatttgtttatttat

SEQ ID NO: 1201969 - DNA, 15 bp, Homo sapiens
ttatttgtttattta

SEQ ID NO: 1201970 - DNA, 15 bp, Homo sapiens
tttatttgtttattt

SEQ ID NO: 1201971 - DNA, 15 bp, Homo sapiens
ttttatttgtttatt

SEQ ID NO: 1201972 - DNA, 15 bp, Homo sapiens
attttatttgtttat

SEQ ID NO: 1201973 - DNA, 15 bp, Homo sapiens
tattttatttgttta

SEQ ID NO: 1201974 - DNA, 15 bp, Homo sapiens
ttattttatttgttt

SEQ ID NO: 1201975 - DNA, 15 bp, Homo sapiens
tttattttatttgtt

SEQ ID NO: 1201976 - DNA, 15 bp, Homo sapiens
ttttattttatttgt

SEQ ID NO: 1201977 - DNA, 15 bp, Homo sapiens
attttattttatttg

SEQ ID NO: 1201978 - DNA, 15 bp, Homo sapiens
cttattttattttat

SEQ ID NO: 1201979 - DNA, 15 bp, Homo sapiens
tcttattttatttta

SEQ ID NO: 1201980 - DNA, 15 bp, Homo sapiens
atcttattttatttt

SEQ ID NO: 1201981 - DNA, 15 bp, Homo sapiens
aatcttattttattt

SEQ ID NO: 1201982 - DNA, 15 bp, Homo sapiens
gaatcttattttatt

SEQ ID NO: 1201983 - DNA, 15 bp, Homo sapiens
ggaatcttattttat

SEQ ID NO: 1201984 - DNA, 15 bp, Homo sapiens
gggaatcttatttta

SEQ ID NO: 1201985 - DNA, 15 bp, Homo sapiens
agggaatcttatttt

SEQ ID NO: 1201986 - DNA, 15 bp, Homo sapiens
tagggaatcttattt

SEQ ID NO: 1201987 - DNA, 15 bp, Homo sapiens
ctagggaatcttatt

SEQ ID NO: 1201988 - DNA, 15 bp, Homo sapiens
tctagggaatcttat

SEQ ID NO: 1201989 - DNA, 15 bp, Homo sapiens
ttctagggaatctta

SEQ ID NO: 1201990 - DNA, 15 bp, Homo sapiens
gttctagggaatctt

SEQ ID NO: 1201991 - DNA, 15 bp, Homo sapiens
tgttctagggaatct

SEQ ID NO: 1201992 - DNA, 15 bp, Homo sapiens
gtgttctagggaatc

SEQ ID NO: 1201993 - DNA, 15 bp, Homo sapiens
tgtgttctagggaat

SEQ ID NO: 1201994 - DNA, 15 bp, Homo sapiens
ttgtgttctagggaa

SEQ ID NO: 1201995 - DNA, 15 bp, Homo sapiens
tttgtgttctaggga

SEQ ID NO: 1201996 - DNA, 15 bp, Homo sapiens
gtttgtgttctaggg

SEQ ID NO: 1201997 - DNA, 15 bp, Homo sapiens
agtttgtgttctagg

SEQ ID NO: 1201998 - DNA, 15 bp, Homo sapiens
cagtttgtgttctag

SEQ ID NO: 1201999 - DNA, 15 bp, Homo sapiens
gcagtttgtgttcta

SEQ ID NO: 1202000 - DNA, 15 bp, Homo sapiens
agcagtttgtgttct

SEQ ID NO: 1202001 - DNA, 15 bp, Homo sapiens
aagcagtttgtgttc

SEQ ID NO: 1202002 - DNA, 15 bp, Homo sapiens
taagcagtttgtgtt

SEQ ID NO: 1202003 - DNA, 15 bp, Homo sapiens
gtaagcagtttgtgt

SEQ ID NO: 1202004 - DNA, 15 bp, Homo sapiens
tgtaagcagtttgtg

SEQ ID NO: 1202005 - DNA, 15 bp, Homo sapiens
gtgtaagcagtttgt

SEQ ID NO: 1202006 - DNA, 15 bp, Homo sapiens
agtgtaagcagtttg

SEQ ID NO: 1202007 - DNA, 15 bp, Homo sapiens
aagtgtaagcagttt

SEQ ID NO: 1202008 - DNA, 15 bp, Homo sapiens
caagtgtaagcagtt

SEQ ID NO: 1202009 - DNA, 15 bp, Homo sapiens
gcaagtgtaagcagt

SEQ ID NO: 1202010 - DNA, 15 bp, Homo sapiens
agcaagtgtaagcag

SEQ ID NO: 1202011 - DNA, 15 bp, Homo sapiens
aagcaagtgtaagca

SEQ ID NO: 1202012 - DNA, 15 bp, Homo sapiens
gaagcaagtgtaagc

SEQ ID NO: 1202013 - DNA, 15 bp, Homo sapiens
tgaagcaagtgtaag

SEQ ID NO: 1202014 - DNA, 15 bp, Homo sapiens
ctgaagcaagtgtaa

SEQ ID NO: 1202015 - DNA, 15 bp, Homo sapiens
cctgaagcaagtgta

SEQ ID NO: 1202016 - DNA, 15 bp, Homo sapiens
tcctgaagcaagtgt

SEQ ID NO: 1202017 - DNA, 15 bp, Homo sapiens
ttcctgaagcaagtg

SEQ ID NO: 1202018 - DNA, 15 bp, Homo sapiens
tttcctgaagcaagt

SEQ ID NO: 1202019 - DNA, 15 bp, Homo sapiens
ttttcctgaagcaag

SEQ ID NO: 1202020 - DNA, 15 bp, Homo sapiens
attttcctgaagcaa

SEQ ID NO: 1202021 - DNA, 15 bp, Homo sapiens
aattttcctgaagca

SEQ ID NO: 1202022 - DNA, 15 bp, Homo sapiens
taattttcctgaagc

SEQ ID NO: 1202023 - DNA, 15 bp, Homo sapiens
ttaattttcctgaag

SEQ ID NO: 1202024 - DNA, 15 bp, Homo sapiens
gttaattttcctgaa

SEQ ID NO: 1202025 - DNA, 15 bp, Homo sapiens
ggttaattttcctga

SEQ ID NO: 1202026 - DNA, 15 bp, Homo sapiens
tggttaattttcctg

SEQ ID NO: 1202027 - DNA, 15 bp, Homo sapiens
ctggttaattttcct

SEQ ID NO: 1202028 - DNA, 15 bp, Homo sapiens
cctggttaattttcc

SEQ ID NO: 1202029 - DNA, 15 bp, Homo sapiens
tcctggttaattttc

SEQ ID NO: 1202030 - DNA, 15 bp, Homo sapiens
ttcctggttaatttt

SEQ ID NO: 1202031 - DNA, 15 bp, Homo sapiens
gtttcctggttaatt

SEQ ID NO: 1202032 - DNA, 15 bp, Homo sapiens
tgtttcctggttaat

SEQ ID NO: 1202033 - DNA, 15 bp, Homo sapiens
ttgtttcctggttaa

SEQ ID NO: 1202034 - DNA, 15 bp, Homo sapiens
gttgtttcctggtta

SEQ ID NO: 1202035 - DNA, 15 bp, Homo sapiens
tgttgtttcctggtt

SEQ ID NO: 1202036 - DNA, 15 bp, Homo sapiens
ctgttgtttcctggt

SEQ ID NO: 1202037 - DNA, 15 bp, Homo sapiens
tctgttgtttcctgg

SEQ ID NO: 1202038 - DNA, 15 bp, Homo sapiens
atctgttgtttcctg

SEQ ID NO: 1202039 - DNA, 15 bp, Homo sapiens
tatctgttgtttcct

SEQ ID NO: 1202040 - DNA, 15 bp, Homo sapiens
gtatctgttgtttcc

SEQ ID NO: 1202041 - DNA, 15 bp, Homo sapiens
agtatctgttgtttc

SEQ ID NO: 1202042 - DNA, 15 bp, Homo sapiens
aagtatctgttgttt

SEQ ID NO: 1202043 - DNA, 15 bp, Homo sapiens
gaagtatctgttgtt

SEQ ID NO: 1202044 - DNA, 15 bp, Homo sapiens
tgaagtatctgttgt

SEQ ID NO: 1202045 - DNA, 15 bp, Homo sapiens
atgaagtatctgttg

SEQ ID NO: 1202046 - DNA, 15 bp, Homo sapiens
aatgaagtatctgtt

SEQ ID NO: 1202047 - DNA, 15 bp, Homo sapiens
taatgaagtatctgt

SEQ ID NO: 1202048 - DNA, 15 bp, Homo sapiens
ttaatgaagtatctg

SEQ ID NO: 1202049 - DNA, 15 bp, Homo sapiens
tttaatgaagtatct

SEQ ID NO: 1202050 - DNA, 15 bp, Homo sapiens
gtttaatgaagtatc

SEQ ID NO: 1202051 - DNA, 15 bp, Homo sapiens
agtttaatgaagtat

SEQ ID NO: 1202052 - DNA, 15 bp, Homo sapiens
gagtttaatgaagta

SEQ ID NO: 1202053 - DNA, 15 bp, Homo sapiens
ggagtttaatgaagt

SEQ ID NO: 1202054 - DNA, 15 bp, Homo sapiens
aggagtttaatgaag

SEQ ID NO: 1202055 - DNA, 15 bp, Homo sapiens
taggagtttaatgaa

SEQ ID NO: 1202056 - DNA, 15 bp, Homo sapiens
ataggagtttaatga

SEQ ID NO: 1202057 - DNA, 15 bp, Homo sapiens
aataggagtttaatg

SEQ ID NO: 1202058 - DNA, 15 bp, Homo sapiens
aaataggagtttaat

SEQ ID NO: 1202059 - DNA, 15 bp, Homo sapiens
caaataggagtttaa

SEQ ID NO: 1202060 - DNA, 15 bp, Homo sapiens
gcaaataggagttta

SEQ ID NO: 1202061 - DNA, 15 bp, Homo sapiens
tgcaaataggagttt

SEQ ID NO: 1202062 - DNA, 15 bp, Homo sapiens
ctgcaaataggagtt

SEQ ID NO: 1202063 - DNA, 15 bp, Homo sapiens
cctgcaaataggagt

SEQ ID NO: 1202064 - DNA, 15 bp, Homo sapiens
tcctgcaaataggag

SEQ ID NO: 1202065 - DNA, 15 bp, Homo sapiens
ctcctgcaaatagga

SEQ ID NO: 1202066 - DNA, 15 bp, Homo sapiens
gctcctgcaaatagg

SEQ ID NO: 1202067 - DNA, 15 bp, Homo sapiens
ggctcctgcaaatag

SEQ ID NO: 1202068 - DNA, 15 bp, Homo sapiens
tggctcctgcaaata

SEQ ID NO: 1202069 - DNA, 15 bp, Homo sapiens
atggctcctgcaaat

SEQ ID NO: 1202070 - DNA, 15 bp, Homo sapiens
tatggctcctgcaaa

SEQ ID NO: 1202071 - DNA, 15 bp, Homo sapiens
ctatggctcctgcaa

SEQ ID NO: 1202072 - DNA, 15 bp, Homo sapiens
actatggctcctgca

SEQ ID NO: 1202073 - DNA, 15 bp, Homo sapiens
gactatggctcctgc

SEQ ID NO: 1202074 - DNA, 15 bp, Homo sapiens
tgactatggctcctg

SEQ ID NO: 1202075 - DNA, 15 bp, Homo sapiens
gtgactatggctcct

SEQ ID NO: 1202076 - DNA, 15 bp, Homo sapiens
agtgactatggctcc

SEQ ID NO: 1202077 - DNA, 15 bp, Homo sapiens
cagtgactatggctc

SEQ ID NO: 1202078 - DNA, 15 bp, Homo sapiens
gcagtgactatggct

SEQ ID NO: 1202079 - DNA, 15 bp, Homo sapiens
tgcagtgactatggc

SEQ ID NO: 1202080 - DNA, 15 bp, Homo sapiens
ctgcagtgactatgg

SEQ ID NO: 1202081 - DNA, 15 bp, Homo sapiens
gctgcagtgactatg

SEQ ID NO: 1202082 - DNA, 15 bp, Homo sapiens
ggctgcagtgactat

SEQ ID NO: 1202083 - DNA, 15 bp, Homo sapiens
gggctgcagtgacta

SEQ ID NO: 1202084 - DNA, 15 bp, Homo sapiens
tgggctgcagtgact

SEQ ID NO: 1202085 - DNA, 15 bp, Homo sapiens
atgggctgcagtgac

SEQ ID NO: 1202086 - DNA, 15 bp, Homo sapiens
tatgggctgcagtga

SEQ ID NO: 1202087 - DNA, 15 bp, Homo sapiens
gtatgggctgcagtg

SEQ ID NO: 1202088 - DNA, 15 bp, Homo sapiens
tgtatgggctgcagt

SEQ ID NO: 1202089 - DNA, 15 bp, Homo sapiens
ctgtatgggctgcag

SEQ ID NO: 1202090 - DNA, 15 bp, Homo sapiens
tctgtatgggctgca

SEQ ID NO: 1202091 - DNA, 15 bp, Homo sapiens
ttctgtatgggctgc

SEQ ID NO: 1202092 - DNA, 15 bp, Homo sapiens
tttctgtatgggctg

SEQ ID NO: 1202093 - DNA, 15 bp, Homo sapiens
ttttctgtatgggct

SEQ ID NO: 1202094 - DNA, 15 bp, Homo sapiens
tttttctgtatgggc

SEQ ID NO: 1202095 - DNA, 15 bp, Homo sapiens
atttttctgtatggg

SEQ ID NO: 1202096 - DNA, 15 bp, Homo sapiens
gatttttctgtatgg

SEQ ID NO: 1202097 - DNA, 15 bp, Homo sapiens
ggatttttctgtatg

SEQ ID NO: 1202098 - DNA, 15 bp, Homo sapiens
gggatttttctgtat

SEQ ID NO: 1202099 - DNA, 15 bp, Homo sapiens
ggggatttttctgta

SEQ ID NO: 1202100 - DNA, 15 bp, Homo sapiens
gggggatttttctgt

SEQ ID NO: 1202101 - DNA, 15 bp, Homo sapiens
tgggggatttttctg

SEQ ID NO: 1202102 - DNA, 15 bp, Homo sapiens
ttgggggatttttct

SEQ ID NO: 1202103 - DNA, 15 bp, Homo sapiens
tttgggggatttttc

SEQ ID NO: 1202104 - DNA, 15 bp, Homo sapiens
atttgggggattttt

SEQ ID NO: 1202105 - DNA, 15 bp, Homo sapiens
aatttgggggatttt

SEQ ID NO: 1202106 - DNA, 15 bp, Homo sapiens
gaatttgggggattt

SEQ ID NO: 1202107 - DNA, 15 bp, Homo sapiens
tgaatttgggggatt

SEQ ID NO: 1202108 - DNA, 15 bp, Homo sapiens
atgaatttgggggat

SEQ ID NO: 1202109 - DNA, 15 bp, Homo sapiens
catgaatttggggga

SEQ ID NO: 1202110 - DNA, 15 bp, Homo sapiens
tcatgaatttggggg

SEQ ID NO: 1202111 - DNA, 15 bp, Homo sapiens
atcatgaatttgggg

SEQ ID NO: 1202112 - DNA, 15 bp, Homo sapiens
aatcatgaatttggg

SEQ ID NO: 1202113 - DNA, 15 bp, Homo sapiens
taatcatgaatttgg

SEQ ID NO: 1202114 - DNA, 15 bp, Homo sapiens
gtaatcatgaatttg

SEQ ID NO: 1202115 - DNA, 15 bp, Homo sapiens
tgtaatcatgaattt

SEQ ID NO: 1202116 - DNA, 15 bp, Homo sapiens
ttgtaatcatgaatt

SEQ ID NO: 1202117 - DNA, 15 bp, Homo sapiens
attgtaatcatgaat

SEQ ID NO: 1202118 - DNA, 15 bp, Homo sapiens
tattgtaatcatgaa

SEQ ID NO: 1202119 - DNA, 15 bp, Homo sapiens
atattgtaatcatga

SEQ ID NO: 1202120 - DNA, 15 bp, Homo sapiens
gatattgtaatcatg

SEQ ID NO: 1202121 - DNA, 15 bp, Homo sapiens
cgatattgtaatcat

SEQ ID NO: 1202122 - DNA, 15 bp, Homo sapiens
gcgatattgtaatca

SEQ ID NO: 1202123 - DNA, 15 bp, Homo sapiens
agcgatattgtaatc

SEQ ID NO: 1202124 - DNA, 15 bp, Homo sapiens
aagcgatattgtaat

SEQ ID NO: 1202125 - DNA, 15 bp, Homo sapiens
taagcgatattgtaa

SEQ ID NO: 1202126 - DNA, 15 bp, Homo sapiens
gtaagcgatattgta

SEQ ID NO: 1202127 - DNA, 15 bp, Homo sapiens
agtaagcgatattgt

SEQ ID NO: 1202128 - DNA, 15 bp, Homo sapiens
aagtaagcgatattg

SEQ ID NO: 1202129 - DNA, 15 bp, Homo sapiens
aaagtaagcgatatt

SEQ ID NO: 1202130 - DNA, 15 bp, Homo sapiens
gaaagtaagcgatat

SEQ ID NO: 1202131 - DNA, 15 bp, Homo sapiens
tgaaagtaagcgata

SEQ ID NO: 1202132 - DNA, 15 bp, Homo sapiens
atgaaagtaagcgat

SEQ ID NO: 1202133 - DNA, 15 bp, Homo sapiens
tatgaaagtaagcga

SEQ ID NO: 1202134 - DNA, 15 bp, Homo sapiens
ttatgaaagtaagcg

SEQ ID NO: 1202135 - DNA, 15 bp, Homo sapiens
cttatgaaagtaagc

SEQ ID NO: 1202136 - DNA, 15 bp, Homo sapiens
acttatgaaagtaag

SEQ ID NO: 1202137 - DNA, 15 bp, Homo sapiens
cacttatgaaagtaa

SEQ ID NO: 1202138 - DNA, 15 bp, Homo sapiens
acacttatgaaagta

SEQ ID NO: 1202139 - DNA, 15 bp, Homo sapiens
aacacttatgaaagt

SEQ ID NO: 1202140 - DNA, 15 bp, Homo sapiens
aaacacttatgaaag

SEQ ID NO: 1202141 - DNA, 15 bp, Homo sapiens
caaacacttatgaaa

SEQ ID NO: 1202142 - DNA, 15 bp, Homo sapiens
ccaaacacttatgaa

SEQ ID NO: 1202143 - DNA, 15 bp, Homo sapiens
cccaaacacttatga

SEQ ID NO: 1202144 - DNA, 15 bp, Homo sapiens
acccaaacacttatg

SEQ ID NO: 1202145 - DNA, 15 bp, Homo sapiens
aacccaaacacttat

SEQ ID NO: 1202146 - DNA, 15 bp, Homo sapiens
aaacccaaacactta

SEQ ID NO: 1202147 - DNA, 15 bp, Homo sapiens
aaaacccaaacactt

SEQ ID NO: 1202148 - DNA, 15 bp, Homo sapiens
caaaacccaaacact

SEQ ID NO: 1202149 - DNA, 15 bp, Homo sapiens
tcaaaacccaaacac

SEQ ID NO: 1202150 - DNA, 15 bp, Homo sapiens
ttcaaaacccaaaca

SEQ ID NO: 1202151 - DNA, 15 bp, Homo sapiens
tttcaaaacccaaac

SEQ ID NO: 1202152 - DNA, 15 bp, Homo sapiens
atttcaaaacccaaa

SEQ ID NO: 1202153 - DNA, 15 bp, Homo sapiens
aatttcaaaacccaa

SEQ ID NO: 1202154 - DNA, 15 bp, Homo sapiens
aaatttcaaaaccca

SEQ ID NO: 1202155 - DNA, 15 bp, Homo sapiens
aaaatttcaaaaccc

SEQ ID NO: 1202156 - DNA, 15 bp, Homo sapiens
taaaatttcaaaacc

SEQ ID NO: 1202157 - DNA, 15 bp, Homo sapiens
ataaaatttcaaaac

SEQ ID NO: 1202158 - DNA, 15 bp, Homo sapiens
aataaaatttcaaaa

SEQ ID NO: 1202159 - DNA, 15 bp, Homo sapiens
taataaaatttcaaa

SEQ ID NO: 1202160 - DNA, 15 bp, Homo sapiens
ataataaaatttcaa

SEQ ID NO: 1202161 - DNA, 15 bp, Homo sapiens
gataataaaatttca

SEQ ID NO: 1202162 - DNA, 15 bp, Homo sapiens
tgataataaaatttc

SEQ ID NO: 1202163 - DNA, 15 bp, Homo sapiens
atgataataaaattt

SEQ ID NO: 1202164 - DNA, 15 bp, Homo sapiens
tatgataataaaatt

SEQ ID NO: 1202165 - DNA, 15 bp, Homo sapiens
ttatgataataaaat

SEQ ID NO: 1202166 - DNA, 15 bp, Homo sapiens
tttatgataataaaa

SEQ ID NO: 1202167 - DNA, 15 bp, Homo sapiens
atttatgataataaa

SEQ ID NO: 1202168 - DNA, 15 bp, Homo sapiens
catttatgataataa

SEQ ID NO: 1202169 - DNA, 15 bp, Homo sapiens
gcatttatgataata

SEQ ID NO: 1202170 - DNA, 15 bp, Homo sapiens
agcatttatgataat

SEQ ID NO: 1202171 - DNA, 15 bp, Homo sapiens
aagcatttatgataa

SEQ ID NO: 1202172 - DNA, 15 bp, Homo sapiens
aaagcatttatgata

SEQ ID NO: 1202173 - DNA, 15 bp, Homo sapiens
taaagcatttatgat

SEQ ID NO: 1202174 - DNA, 15 bp, Homo sapiens
ataaagcatttatga

SEQ ID NO: 1202175 - DNA, 15 bp, Homo sapiens
cataaagcatttatg

SEQ ID NO: 1202176 - DNA, 15 bp, Homo sapiens
acataaagcatttat

SEQ ID NO: 1202177 - DNA, 15 bp, Homo sapiens
cacataaagcattta

SEQ ID NO: 1202178 - DNA, 15 bp, Homo sapiens
acacataaagcattt

SEQ ID NO: 1202179 - DNA, 15 bp, Homo sapiens
aacacataaagcatt

SEQ ID NO: 1202180 - DNA, 15 bp, Homo sapiens
aaacacataaagcat

SEQ ID NO: 1202181 - DNA, 15 bp, Homo sapiens
taaacacataaagca

SEQ ID NO: 1202182 - DNA, 15 bp, Homo sapiens
gtaaacacataaagc

SEQ ID NO: 1202183 - DNA, 15 bp, Homo sapiens
tgtaaacacataaag

SEQ ID NO: 1202184 - DNA, 15 bp, Homo sapiens
ttgtaaacacataaa

SEQ ID NO: 1202185 - DNA, 15 bp, Homo sapiens
tttgtaaacacataa

SEQ ID NO: 1202186 - DNA, 15 bp, Homo sapiens
ttttgtaaacacata

SEQ ID NO: 1202187 - DNA, 15 bp, Homo sapiens
tttttgtaaacacat

SEQ ID NO: 1202188 - DNA, 15 bp, Homo sapiens
atttttgtaaacaca

SEQ ID NO: 1202189 - DNA, 15 bp, Homo sapiens
gatttttgtaaacac

SEQ ID NO: 1202190 - DNA, 15 bp, Homo sapiens
ggatttttgtaaaca

SEQ ID NO: 1202191 - DNA, 15 bp, Homo sapiens
tggatttttgtaaac

SEQ ID NO: 1202192 - DNA, 15 bp, Homo sapiens
ttggatttttgtaaa

SEQ ID NO: 1202193 - DNA, 15 bp, Homo sapiens
gttggatttttgtaa

SEQ ID NO: 1202194 - DNA, 15 bp, Homo sapiens
ggttggatttttgta

SEQ ID NO: 1202195 - DNA, 15 bp, Homo sapiens
aggttggatttttgt

SEQ ID NO: 1202196 - DNA, 15 bp, Homo sapiens
caggttggatttttg

SEQ ID NO: 1202197 - DNA, 15 bp, Homo sapiens
tcaggttggattttt

SEQ ID NO: 1202198 - DNA, 15 bp, Homo sapiens
atcaggttggatttt

SEQ ID NO: 1202199 - DNA, 15 bp, Homo sapiens
aatcaggttggattt

SEQ ID NO: 1202200 - DNA, 15 bp, Homo sapiens
aaatcaggttggatt

SEQ ID NO: 1202201 - DNA, 15 bp, Homo sapiens
caaatcaggttggat

SEQ ID NO: 1202202 - DNA, 15 bp, Homo sapiens
tcaaatcaggttgga

SEQ ID NO: 1202203 - DNA, 15 bp, Homo sapiens
ttcaaatcaggttgg

SEQ ID NO: 1202204 - DNA, 15 bp, Homo sapiens
gttcaaatcaggttg

SEQ ID NO: 1202205 - DNA, 15 bp, Homo sapiens
agttcaaatcaggtt

SEQ ID NO: 1202206 - DNA, 15 bp, Homo sapiens
tagttcaaatcaggt

SEQ ID NO: 1202207 - DNA, 15 bp, Homo sapiens
ttagttcaaatcagg

SEQ ID NO: 1202208 - DNA, 15 bp, Homo sapiens
tttagttcaaatcag

SEQ ID NO: 1202209 - DNA, 15 bp, Homo sapiens
gtttagttcaaatca

SEQ ID NO: 1202210 - DNA, 15 bp, Homo sapiens
ggtttagttcaaatc

SEQ ID NO: 1202211 - DNA, 15 bp, Homo sapiens
aggtttagttcaaat

SEQ ID NO: 1202212 - DNA, 15 bp, Homo sapiens
caggtttagttcaaa

SEQ ID NO: 1202213 - DNA, 15 bp, Homo sapiens
acaggtttagttcaa

SEQ ID NO: 1202214 - DNA, 15 bp, Homo sapiens
aacaggtttagttca

SEQ ID NO: 1202215 - DNA, 15 bp, Homo sapiens
aaacaggtttagttc

SEQ ID NO: 1202216 - DNA, 15 bp, Homo sapiens
gaaacaggtttagtt

SEQ ID NO: 1202217 - DNA, 15 bp, Homo sapiens
ggaaacaggtttagt

SEQ ID NO: 1202218 - DNA, 15 bp, Homo sapiens
gggaaacaggtttag

SEQ ID NO: 1202219 - DNA, 15 bp, Homo sapiens
tgggaaacaggttta

SEQ ID NO: 1202220 - DNA, 15 bp, Homo sapiens
gtgggaaacaggttt

SEQ ID NO: 1202221 - DNA, 15 bp, Homo sapiens
agtgggaaacaggtt

SEQ ID NO: 1202222 - DNA, 15 bp, Homo sapiens
cagtgggaaacaggt

SEQ ID NO: 1202223 - DNA, 15 bp, Homo sapiens
acagtgggaaacagg

SEQ ID NO: 1202224 - DNA, 15 bp, Homo sapiens
tacagtgggaaacag

SEQ ID NO: 1202225 - DNA, 15 bp, Homo sapiens
atacagtgggaaaca

SEQ ID NO: 1202226 - DNA, 15 bp, Homo sapiens
tatacagtgggaaac

SEQ ID NO: 1202227 - DNA, 15 bp, Homo sapiens
ttatacagtgggaaa

SEQ ID NO: 1202228 - DNA, 15 bp, Homo sapiens
gttatacagtgggaa

SEQ ID NO: 1202229 - DNA, 15 bp, Homo sapiens
ggttatacagtggga

SEQ ID NO: 1202230 - DNA, 15 bp, Homo sapiens
gggttatacagtggg

SEQ ID NO: 1202231 - DNA, 15 bp, Homo sapiens
tgggttatacagtgg

SEQ ID NO: 1202232 - DNA, 15 bp, Homo sapiens
ttgggttatacagtg

SEQ ID NO: 1202233 - DNA, 15 bp, Homo sapiens
tttgggttatacagt

SEQ ID NO: 1202234 - DNA, 15 bp, Homo sapiens
atttgggttatacag

SEQ ID NO: 1202235 - DNA, 15 bp, Homo sapiens
tatttgggttataca

SEQ ID NO: 1202236 - DNA, 15 bp, Homo sapiens
ttatttgggttatac

SEQ ID NO: 1202237 - DNA, 15 bp, Homo sapiens
cttatttgggttata

SEQ ID NO: 1202238 - DNA, 15 bp, Homo sapiens
acttatttgggttat

SEQ ID NO: 1202239 - DNA, 15 bp, Homo sapiens
cacttatttgggtta

SEQ ID NO: 1202240 - DNA, 15 bp, Homo sapiens
gcacttatttgggtt

SEQ ID NO: 1202241 - DNA, 15 bp, Homo sapiens
agcacttatttgggt

SEQ ID NO: 1202242 - DNA, 15 bp, Homo sapiens
cagcacttatttggg

SEQ ID NO: 1202243 - DNA, 15 bp, Homo sapiens
ccagcacttatttgg

SEQ ID NO: 1202244 - DNA, 15 bp, Homo sapiens
cccagcacttatttg

SEQ ID NO: 1202245 - DNA, 15 bp, Homo sapiens
ccccagcacttattt

SEQ ID NO: 1202246 - DNA, 15 bp, Homo sapiens
accccagcacttatt

SEQ ID NO: 1202247 - DNA, 15 bp, Homo sapiens
gaccccagcacttat

SEQ ID NO: 1202248 - DNA, 15 bp, Homo sapiens
ggaccccagcactta

SEQ ID NO: 1202249 - DNA, 15 bp, Homo sapiens
gggaccccagcactt

SEQ ID NO: 1202250 - DNA, 15 bp, Homo sapiens
tgggaccccagcact

SEQ ID NO: 1202251 - DNA, 15 bp, Homo sapiens
atgggaccccagcac

SEQ ID NO: 1202252 - DNA, 15 bp, Homo sapiens
catgggaccccagca

SEQ ID NO: 1202253 - DNA, 15 bp, Homo sapiens
acatgggaccccagc

SEQ ID NO: 1202254 - DNA, 15 bp, Homo sapiens
cacatgggaccccag

SEQ ID NO: 1202255 - DNA, 15 bp, Homo sapiens
ccacatgggacccca

SEQ ID NO: 1202256 - DNA, 15 bp, Homo sapiens
accacatgggacccc

SEQ ID NO: 1202257 - DNA, 15 bp, Homo sapiens
taccacatgggaccc

SEQ ID NO: 1202258 - DNA, 15 bp, Homo sapiens
gtaccacatgggacc

SEQ ID NO: 1202259 - DNA, 15 bp, Homo sapiens
tgtaccacatgggac

SEQ ID NO: 1202260 - DNA, 15 bp, Homo sapiens
ttgtaccacatggga

SEQ ID NO: 1202261 - DNA, 15 bp, Homo sapiens
attgtaccacatggg

SEQ ID NO: 1202262 - DNA, 15 bp, Homo sapiens
gattgtaccacatgg

SEQ ID NO: 1202263 - DNA, 15 bp, Homo sapiens
agattgtaccacatg

SEQ ID NO: 1202264 - DNA, 15 bp, Homo sapiens
gagattgtaccacat

SEQ ID NO: 1202265 - DNA, 15 bp, Homo sapiens
tgagattgtaccaca

SEQ ID NO: 1202266 - DNA, 15 bp, Homo sapiens
ctgagattgtaccac

SEQ ID NO: 1202267 - DNA, 15 bp, Homo sapiens
actgagattgtacca

SEQ ID NO: 1202268 - DNA, 15 bp, Homo sapiens
cactgagattgtacc

SEQ ID NO: 1202269 - DNA, 15 bp, Homo sapiens
acactgagattgtac

SEQ ID NO: 1202270 - DNA, 15 bp, Homo sapiens
cacactgagattgta

SEQ ID NO: 1202271 - DNA, 15 bp, Homo sapiens
tcacactgagattgt

SEQ ID NO: 1202272 - DNA, 15 bp, Homo sapiens
ctcacactgagattg

SEQ ID NO: 1202273 - DNA, 15 bp, Homo sapiens
actcacactgagatt

SEQ ID NO: 1202274 - DNA, 15 bp, Homo sapiens
gactcacactgagat

SEQ ID NO: 1202275 - DNA, 15 bp, Homo sapiens
ggactcacactgaga

SEQ ID NO: 1202276 - DNA, 15 bp, Homo sapiens
tggactcacactgag

SEQ ID NO: 1202277 - DNA, 15 bp, Homo sapiens
gtggactcacactga

SEQ ID NO: 1202278 - DNA, 15 bp, Homo sapiens
tgtggactcacactg

SEQ ID NO: 1202279 - DNA, 15 bp, Homo sapiens
atgtggactcacact

SEQ ID NO: 1202280 - DNA, 15 bp, Homo sapiens
gatgtggactcacac

SEQ ID NO: 1202281 - DNA, 15 bp, Homo sapiens
tgatgtggactcaca

SEQ ID NO: 1202282 - DNA, 15 bp, Homo sapiens
ttgatgtggactcac

SEQ ID NO: 1202283 - DNA, 15 bp, Homo sapiens
tttgatgtggactca

SEQ ID NO: 1202284 - DNA, 15 bp, Homo sapiens
ctttgatgtggactc

SEQ ID NO: 1202285 - DNA, 15 bp, Homo sapiens
tctttgatgtggact

SEQ ID NO: 1202286 - DNA, 15 bp, Homo sapiens
gtctttgatgtggac

SEQ ID NO: 1202287 - DNA, 15 bp, Homo sapiens
tgtctttgatgtgga

SEQ ID NO: 1202288 - DNA, 15 bp, Homo sapiens
atgtctttgatgtgg

SEQ ID NO: 1202289 - DNA, 15 bp, Homo sapiens
tatgtctttgatgtg

SEQ ID NO: 1202290 - DNA, 15 bp, Homo sapiens
atatgtctttgatgt

SEQ ID NO: 1202291 - DNA, 15 bp, Homo sapiens
tatatgtctttgatg

SEQ ID NO: 1202292 - DNA, 15 bp, Homo sapiens
ttatatgtctttgat

SEQ ID NO: 1202293 - DNA, 15 bp, Homo sapiens
attatatgtctttga

SEQ ID NO: 1202294 - DNA, 15 bp, Homo sapiens
gattatatgtctttg

SEQ ID NO: 1202295 - DNA, 15 bp, Homo sapiens
ggattatatgtcttt

SEQ ID NO: 1202296 - DNA, 15 bp, Homo sapiens
tggattatatgtctt

SEQ ID NO: 1202297 - DNA, 15 bp, Homo sapiens
ctggattatatgtct

SEQ ID NO: 1202298 - DNA, 15 bp, Homo sapiens
gctggattatatgtc

SEQ ID NO: 1202299 - DNA, 15 bp, Homo sapiens
ggctggattatatgt

SEQ ID NO: 1202300 - DNA, 15 bp, Homo sapiens
aggctggattatatg

SEQ ID NO: 1202301 - DNA, 15 bp, Homo sapiens
aaggctggattatat

SEQ ID NO: 1202302 - DNA, 15 bp, Homo sapiens
gaaggctggattata

SEQ ID NO: 1202303 - DNA, 15 bp, Homo sapiens
tgaaggctggattat

SEQ ID NO: 1202304 - DNA, 15 bp, Homo sapiens
ctgaaggctggatta

SEQ ID NO: 1202305 - DNA, 15 bp, Homo sapiens
tctgaaggctggatt

SEQ ID NO: 1202306 - DNA, 15 bp, Homo sapiens
ttctgaaggctggat

SEQ ID NO: 1202307 - DNA, 15 bp, Homo sapiens
cttctgaaggctgga

SEQ ID NO: 1202308 - DNA, 15 bp, Homo sapiens
acttctgaaggctgg

SEQ ID NO: 1202309 - DNA, 15 bp, Homo sapiens
tacttctgaaggctg

SEQ ID NO: 1202310 - DNA, 15 bp, Homo sapiens
ttacttctgaaggct

SEQ ID NO: 1202311 - DNA, 15 bp, Homo sapiens
attacttctgaaggc

SEQ ID NO: 1202312 - DNA, 15 bp, Homo sapiens
aattacttctgaagg

SEQ ID NO: 1202313 - DNA, 15 bp, Homo sapiens
taattacttctgaag

SEQ ID NO: 1202314 - DNA, 15 bp, Homo sapiens
ttaattacttctgaa

SEQ ID NO: 1202315 - DNA, 15 bp, Homo sapiens
tttaattacttctga

SEQ ID NO: 1202316 - DNA, 15 bp, Homo sapiens
ttttaattacttctg

SEQ ID NO: 1202317 - DNA, 15 bp, Homo sapiens
tttttaattacttct

SEQ ID NO: 1202318 - DNA, 15 bp, Homo sapiens
atttttaattacttc

SEQ ID NO: 1202319 - DNA, 15 bp, Homo sapiens
tatttttaattactt

SEQ ID NO: 1202320 - DNA, 15 bp, Homo sapiens
ttatttttaattact

SEQ ID NO: 1202321 - DNA, 15 bp, Homo sapiens
attatttttaattac

SEQ ID NO: 1202322 - DNA, 15 bp, Homo sapiens
aattatttttaatta

SEQ ID NO: 1202323 - DNA, 15 bp, Homo sapiens
gaattatttttaatt

SEQ ID NO: 1202324 - DNA, 15 bp, Homo sapiens
ggaattatttttaat

SEQ ID NO: 1202325 - DNA, 15 bp, Homo sapiens
tggaattatttttaa

SEQ ID NO: 1202326 - DNA, 15 bp, Homo sapiens
ttggaattattttta

SEQ ID NO: 1202327 - DNA, 15 bp, Homo sapiens
attggaattattttt

SEQ ID NO: 1202328 - DNA, 15 bp, Homo sapiens
gattggaattatttt

SEQ ID NO: 1202329 - DNA, 15 bp, Homo sapiens
agattggaattattt

SEQ ID NO: 1202330 - DNA, 15 bp, Homo sapiens
aagattggaattatt

SEQ ID NO: 1202331 - DNA, 15 bp, Homo sapiens
aaagattggaattat

SEQ ID NO: 1202332 - DNA, 15 bp, Homo sapiens
taaagattggaatta

SEQ ID NO: 1202333 - DNA, 15 bp, Homo sapiens
gtaaagattggaatt

SEQ ID NO: 1202334 - DNA, 15 bp, Homo sapiens
agtaaagattggaat

SEQ ID NO: 1202335 - DNA, 15 bp, Homo sapiens
aagtaaagattggaa

SEQ ID NO: 1202336 - DNA, 15 bp, Homo sapiens
caagtaaagattgga

SEQ ID NO: 1202337 - DNA, 15 bp, Homo sapiens
tcaagtaaagattgg

SEQ ID NO: 1202338 - DNA, 15 bp, Homo sapiens
ttcaagtaaagattg

SEQ ID NO: 1202339 - DNA, 15 bp, Homo sapiens
attcaagtaaagatt

SEQ ID NO: 1202340 - DNA, 15 bp, Homo sapiens
aattcaagtaaagat

SEQ ID NO: 1202341 - DNA, 15 bp, Homo sapiens
aaattcaagtaaaga

SEQ ID NO: 1202342 - DNA, 15 bp, Homo sapiens
gaaattcaagtaaag

SEQ ID NO: 1202343 - DNA, 15 bp, Homo sapiens
agaaattcaagtaaa

SEQ ID NO: 1202344 - DNA, 15 bp, Homo sapiens
aagaaattcaagtaa

SEQ ID NO: 1202345 - DNA, 15 bp, Homo sapiens
aaagaaattcaagta

SEQ ID NO: 1202346 - DNA, 15 bp, Homo sapiens
taaagaaattcaagt

SEQ ID NO: 1202347 - DNA, 15 bp, Homo sapiens
ttaaagaaattcaag

SEQ ID NO: 1202348 - DNA, 15 bp, Homo sapiens
cttaaagaaattcaa

SEQ ID NO: 1202349 - DNA, 15 bp, Homo sapiens
ccttaaagaaattca

SEQ ID NO: 1202350 - DNA, 15 bp, Homo sapiens
tccttaaagaaattc

SEQ ID NO: 1202351 - DNA, 15 bp, Homo sapiens
gtccttaaagaaatt

SEQ ID NO: 1202352 - DNA, 15 bp, Homo sapiens
agtccttaaagaaat

SEQ ID NO: 1202353 - DNA, 15 bp, Homo sapiens
aagtccttaaagaaa

SEQ ID NO: 1202354 - DNA, 15 bp, Homo sapiens
aaagtccttaaagaa

SEQ ID NO: 1202355 - DNA, 15 bp, Homo sapiens
taaagtccttaaaga

SEQ ID NO: 1202356 - DNA, 15 bp, Homo sapiens
ttaaagtccttaaag

SEQ ID NO: 1202357 - DNA, 15 bp, Homo sapiens
attaaagtccttaaa

SEQ ID NO: 1202358 - DNA, 15 bp, Homo sapiens
cattaaagtccttaa

SEQ ID NO: 1202359 - DNA, 15 bp, Homo sapiens
ccattaaagtcctta

SEQ ID NO: 1202360 - DNA, 15 bp, Homo sapiens
cccattaaagtcctt

SEQ ID NO: 1202361 - DNA, 15 bp, Homo sapiens
ccccattaaagtcct

SEQ ID NO: 1202362 - DNA, 15 bp, Homo sapiens
tccccattaaagtcc

SEQ ID NO: 1202363 - DNA, 15 bp, Homo sapiens
gtccccattaaagtc

SEQ ID NO: 1202364 - DNA, 15 bp, Homo sapiens
ggtccccattaaagt

SEQ ID NO: 1202365 - DNA, 15 bp, Homo sapiens
gggtccccattaaag

SEQ ID NO: 1202366 - DNA, 15 bp, Homo sapiens
tgggtccccattaaa

SEQ ID NO: 1202367 - DNA, 15 bp, Homo sapiens
ttgggtccccattaa

SEQ ID NO: 1202368 - DNA, 15 bp, Homo sapiens
attgggtccccatta

SEQ ID NO: 1202369 - DNA, 15 bp, Homo sapiens
aattgggtccccatt

SEQ ID NO: 1202370 - DNA, 15 bp, Homo sapiens
aaattgggtccccat

SEQ ID NO: 1202371 - DNA, 15 bp, Homo sapiens
taaattgggtcccca

SEQ ID NO: 1202372 - DNA, 15 bp, Homo sapiens
ataaattgggtcccc

SEQ ID NO: 1202373 - DNA, 15 bp, Homo sapiens
tataaattgggtccc

SEQ ID NO: 1202374 - DNA, 15 bp, Homo sapiens
ttataaattgggtcc

SEQ ID NO: 1202375 - DNA, 15 bp, Homo sapiens
gttataaattgggtc

SEQ ID NO: 1202376 - DNA, 15 bp, Homo sapiens
ggttataaattgggt

SEQ ID NO: 1202377 - DNA, 15 bp, Homo sapiens
gggttataaattggg

SEQ ID NO: 1202378 - DNA, 15 bp, Homo sapiens
ggggttataaattgg

SEQ ID NO: 1202379 - DNA, 15 bp, Homo sapiens
gggggttataaattg

SEQ ID NO: 1202380 - DNA, 15 bp, Homo sapiens
tgggggttataaatt

SEQ ID NO: 1202381 - DNA, 15 bp, Homo sapiens
ctgggggttataaat

SEQ ID NO: 1202382 - DNA, 15 bp, Homo sapiens
gctgggggttataaa

SEQ ID NO: 1202383 - DNA, 15 bp, Homo sapiens
ggctgggggttataa

SEQ ID NO: 1202384 - DNA, 15 bp, Homo sapiens
tggctgggggttata

SEQ ID NO: 1202385 - DNA, 15 bp, Homo sapiens
gtggctgggggttat

SEQ ID NO: 1202386 - DNA, 15 bp, Homo sapiens
tgtggctgggggtta

SEQ ID NO: 1202387 - DNA, 15 bp, Homo sapiens
atgtggctgggggtt

SEQ ID NO: 1202388 - DNA, 15 bp, Homo sapiens
aatgtggctgggggt

SEQ ID NO: 1202389 - DNA, 15 bp, Homo sapiens
aaatgtggctggggg

SEQ ID NO: 1202390 - DNA, 15 bp, Homo sapiens
taaatgtggctgggg

SEQ ID NO: 1202391 - DNA, 15 bp, Homo sapiens
ttaaatgtggctggg

SEQ ID NO: 1202392 - DNA, 15 bp, Homo sapiens
tttaaatgtggctgg

SEQ ID NO: 1202393 - DNA, 15 bp, Homo sapiens
ttttaaatgtggctg

SEQ ID NO: 1202394 - DNA, 15 bp, Homo sapiens
attttaaatgtggct

SEQ ID NO: 1202395 - DNA, 15 bp, Homo sapiens
aattttaaatgtggc

SEQ ID NO: 1202396 - DNA, 15 bp, Homo sapiens
gaattttaaatgtgg

SEQ ID NO: 1202397 - DNA, 15 bp, Homo sapiens
ggaattttaaatgtg

SEQ ID NO: 1202398 - DNA, 15 bp, Homo sapiens
gggaattttaaatgt

SEQ ID NO: 1202399 - DNA, 15 bp, Homo sapiens
agggaattttaaatg

SEQ ID NO: 1202400 - DNA, 15 bp, Homo sapiens
aagggaattttaaat

SEQ ID NO: 1202401 - DNA, 15 bp, Homo sapiens
aaagggaattttaaa

SEQ ID NO: 1202402 - DNA, 15 bp, Homo sapiens
gaaagggaattttaa

SEQ ID NO: 1202403 - DNA, 15 bp, Homo sapiens
agaaagggaatttta

SEQ ID NO: 1202404 - DNA, 15 bp, Homo sapiens
aagaaagggaatttt

SEQ ID NO: 1202405 - DNA, 15 bp, Homo sapiens
gaagaaagggaattt

SEQ ID NO: 1202406 - DNA, 15 bp, Homo sapiens
ggaagaaagggaatt

SEQ ID NO: 1202407 - DNA, 15 bp, Homo sapiens
tggaagaaagggaat

SEQ ID NO: 1202408 - DNA, 15 bp, Homo sapiens
ttggaagaaagggaa

SEQ ID NO: 1202409 - DNA, 15 bp, Homo sapiens
attggaagaaaggga

SEQ ID NO: 1202410 - DNA, 15 bp, Homo sapiens
aattggaagaaaggg

SEQ ID NO: 1202411 - DNA, 15 bp, Homo sapiens
gaattggaagaaagg

SEQ ID NO: 1202412 - DNA, 15 bp, Homo sapiens
agaattggaagaaag

SEQ ID NO: 1202413 - DNA, 15 bp, Homo sapiens
gagaattggaagaaa

SEQ ID NO: 1202414 - DNA, 15 bp, Homo sapiens
agagaattggaagaa

SEQ ID NO: 1202415 - DNA, 15 bp, Homo sapiens
aagagaattggaaga

SEQ ID NO: 1202416 - DNA, 15 bp, Homo sapiens
gaagagaattggaag

SEQ ID NO: 1202417 - DNA, 15 bp, Homo sapiens
cgaagagaattggaa

SEQ ID NO: 1202418 - DNA, 15 bp, Homo sapiens
gcgaagagaattgga

SEQ ID NO: 1202419 - DNA, 15 bp, Homo sapiens
agcgaagagaattgg

SEQ ID NO: 1202420 - DNA, 15 bp, Homo sapiens
cagcgaagagaattg

SEQ ID NO: 1202421 - DNA, 15 bp, Homo sapiens
acagcgaagagaatt

SEQ ID NO: 1202422 - DNA, 15 bp, Homo sapiens
tacagcgaagagaat

SEQ ID NO: 1202423 - DNA, 15 bp, Homo sapiens
gtacagcgaagagaa

SEQ ID NO: 1202424 - DNA, 15 bp, Homo sapiens
agtacagcgaagaga

SEQ ID NO: 1202425 - DNA, 15 bp, Homo sapiens
aagtacagcgaagag

SEQ ID NO: 1202426 - DNA, 15 bp, Homo sapiens
taagtacagcgaaga

SEQ ID NO: 1202427 - DNA, 15 bp, Homo sapiens
ttaagtacagcgaag

SEQ ID NO: 1202428 - DNA, 15 bp, Homo sapiens
tttaagtacagcgaa

SEQ ID NO: 1202429 - DNA, 15 bp, Homo sapiens
ctttaagtacagcga

SEQ ID NO: 1202430 - DNA, 15 bp, Homo sapiens
gctttaagtacagcg

SEQ ID NO: 1202431 - DNA, 15 bp, Homo sapiens
ggctttaagtacagc

SEQ ID NO: 1202432 - DNA, 15 bp, Homo sapiens
aggctttaagtacag

SEQ ID NO: 1202433 - DNA, 15 bp, Homo sapiens
caggctttaagtaca

SEQ ID NO: 1202434 - DNA, 15 bp, Homo sapiens
acaggctttaagtac

SEQ ID NO: 1202435 - DNA, 15 bp, Homo sapiens
tacaggctttaagta

SEQ ID NO: 1202436 - DNA, 15 bp, Homo sapiens
ttacaggctttaagt

SEQ ID NO: 1202437 - DNA, 15 bp, Homo sapiens
gttacaggctttaag

SEQ ID NO: 1202438 - DNA, 15 bp, Homo sapiens
agttacaggctttaa

SEQ ID NO: 1202439 - DNA, 15 bp, Homo sapiens
gagttacaggcttta

SEQ ID NO: 1202440 - DNA, 15 bp, Homo sapiens
ggagttacaggcttt

SEQ ID NO: 1202441 - DNA, 15 bp, Homo sapiens
gggagttacaggctt

SEQ ID NO: 1202442 - DNA, 15 bp, Homo sapiens
agggagttacaggct

SEQ ID NO: 1202443 - DNA, 15 bp, Homo sapiens
cagggagttacaggc

SEQ ID NO: 1202444 - DNA, 15 bp, Homo sapiens
tcagggagttacagg

SEQ ID NO: 1202445 - DNA, 15 bp, Homo sapiens
ttcagggagttacag

SEQ ID NO: 1202446 - DNA, 15 bp, Homo sapiens
tttcagggagttaca

SEQ ID NO: 1202447 - DNA, 15 bp, Homo sapiens
gtttcagggagttac

SEQ ID NO: 1202448 - DNA, 15 bp, Homo sapiens
ggtttcagggagtta

SEQ ID NO: 1202449 - DNA, 15 bp, Homo sapiens
cggtttcagggagtt

SEQ ID NO: 1202450 - DNA, 15 bp, Homo sapiens
acggtttcagggagt

SEQ ID NO: 1202451 - DNA, 15 bp, Homo sapiens
aacggtttcagggag

SEQ ID NO: 1202452 - DNA, 15 bp, Homo sapiens
aaacggtttcaggga

SEQ ID NO: 1202453 - DNA, 15 bp, Homo sapiens
aaaacggtttcaggg

SEQ ID NO: 1202454 - DNA, 15 bp, Homo sapiens
aaaaacggtttcagg

SEQ ID NO: 1202455 - DNA, 15 bp, Homo sapiens
gaaaaacggtttcag

SEQ ID NO: 1202456 - DNA, 15 bp, Homo sapiens
ggaaaaacggtttca

SEQ ID NO: 1202457 - DNA, 15 bp, Homo sapiens
aggaaaaacggtttc

SEQ ID NO: 1202458 - DNA, 15 bp, Homo sapiens
gaggaaaaacggttt

SEQ ID NO: 1202459 - DNA, 15 bp, Homo sapiens
ggaggaaaaacggtt

SEQ ID NO: 1202460 - DNA, 15 bp, Homo sapiens
aggaggaaaaacggt

SEQ ID NO: 1202461 - DNA, 15 bp, Homo sapiens
gaggaggaaaaacgg

SEQ ID NO: 1202462 - DNA, 15 bp, Homo sapiens
tgaggaggaaaaacg

SEQ ID NO: 1202463 - DNA, 15 bp, Homo sapiens
atgaggaggaaaaac

SEQ ID NO: 1202464 - DNA, 15 bp, Homo sapiens
aatgaggaggaaaaa

SEQ ID NO: 1202465 - DNA, 15 bp, Homo sapiens
gaatgaggaggaaaa

SEQ ID NO: 1202466 - DNA, 15 bp, Homo sapiens
agaatgaggaggaaa

SEQ ID NO: 1202467 - DNA, 15 bp, Homo sapiens
gagaatgaggaggaa

SEQ ID NO: 1202468 - DNA, 15 bp, Homo sapiens
tgagaatgaggagga

SEQ ID NO: 1202469 - DNA, 15 bp, Homo sapiens
ttgagaatgaggagg

SEQ ID NO: 1202470 - DNA, 15 bp, Homo sapiens
gttgagaatgaggag

SEQ ID NO: 1202471 - DNA, 15 bp, Homo sapiens
agttgagaatgagga

SEQ ID NO: 1202472 - DNA, 15 bp, Homo sapiens
gagttgagaatgagg

SEQ ID NO: 1202473 - DNA, 15 bp, Homo sapiens
agagttgagaatgag

SEQ ID NO: 1202474 - DNA, 15 bp, Homo sapiens
gagagttgagaatga

SEQ ID NO: 1202475 - DNA, 15 bp, Homo sapiens
ggagagttgagaatg

SEQ ID NO: 1202476 - DNA, 15 bp, Homo sapiens
gggagagttgagaat

SEQ ID NO: 1202477 - DNA, 15 bp, Homo sapiens
tgggagagttgagaa

SEQ ID NO: 1202478 - DNA, 15 bp, Homo sapiens
ttgggagagttgaga

SEQ ID NO: 1202479 - DNA, 15 bp, Homo sapiens
tttgggagagttgag

SEQ ID NO: 1202480 - DNA, 15 bp, Homo sapiens
ttttgggagagttga

SEQ ID NO: 1202481 - DNA, 15 bp, Homo sapiens
gttttgggagagttg

SEQ ID NO: 1202482 - DNA, 15 bp, Homo sapiens
tgttttgggagagtt

SEQ ID NO: 1202483 - DNA, 15 bp, Homo sapiens
ttgttttgggagagt

SEQ ID NO: 1202484 - DNA, 15 bp, Homo sapiens
attgttttgggagag

SEQ ID NO: 1202485 - DNA, 15 bp, Homo sapiens
tattgttttgggaga

SEQ ID NO: 1202486 - DNA, 15 bp, Homo sapiens
ttattgttttgggag

SEQ ID NO: 1202487 - DNA, 15 bp, Homo sapiens
gttattgttttggga

SEQ ID NO: 1202488 - DNA, 15 bp, Homo sapiens
cgttattgttttggg

SEQ ID NO: 1202489 - DNA, 15 bp, Homo sapiens
tcgttattgttttgg

SEQ ID NO: 1202490 - DNA, 15 bp, Homo sapiens
gtcgttattgttttg

SEQ ID NO: 1202491 - DNA, 15 bp, Homo sapiens
agtcgttattgtttt

SEQ ID NO: 1202492 - DNA, 15 bp, Homo sapiens
tagtcgttattgttt

SEQ ID NO: 1202493 - DNA, 15 bp, Homo sapiens
ttagtcgttattgtt

SEQ ID NO: 1202494 - DNA, 15 bp, Homo sapiens
tttagtcgttattgt

SEQ ID NO: 1202495 - DNA, 15 bp, Homo sapiens
ttttagtcgttattg

SEQ ID NO: 1202496 - DNA, 15 bp, Homo sapiens
tttttagtcgttatt

SEQ ID NO: 1202497 - DNA, 15 bp, Homo sapiens
ttttttagtcgttat

SEQ ID NO: 1202498 - DNA, 15 bp, Homo sapiens
tttttttagtcgtta

SEQ ID NO: 1202499 - DNA, 15 bp, Homo sapiens
ttttttttagtcgtt

SEQ ID NO: 1202500 - DNA, 15 bp, Homo sapiens
attttttttagtcgt

SEQ ID NO: 1202501 - DNA, 15 bp, Homo sapiens
aattttttttagtcg

SEQ ID NO: 1202502 - DNA, 15 bp, Homo sapiens
gaattttttttagtc

SEQ ID NO: 1202503 - DNA, 15 bp, Homo sapiens
agaattttttttagt

SEQ ID NO: 1202504 - DNA, 15 bp, Homo sapiens
aagaattttttttag

SEQ ID NO: 1202505 - DNA, 15 bp, Homo sapiens
taaagaatttttttt

SEQ ID NO: 1202506 - DNA, 15 bp, Homo sapiens
gtaaagaattttttt

SEQ ID NO: 1202507 - DNA, 15 bp, Homo sapiens
agtaaagaatttttt

SEQ ID NO: 1202508 - DNA, 15 bp, Homo sapiens
cagtaaagaattttt

SEQ ID NO: 1202509 - DNA, 15 bp, Homo sapiens
tcagtaaagaatttt

SEQ ID NO: 1202510 - DNA, 15 bp, Homo sapiens
ttcagtaaagaattt

SEQ ID NO: 1202511 - DNA, 15 bp, Homo sapiens
attcagtaaagaatt

SEQ ID NO: 1202512 - DNA, 15 bp, Homo sapiens
aattcagtaaagaat

SEQ ID NO: 1202513 - DNA, 15 bp, Homo sapiens
aaattcagtaaagaa

SEQ ID NO: 1202514 - DNA, 15 bp, Homo sapiens
gaaattcagtaaaga

SEQ ID NO: 1202515 - DNA, 15 bp, Homo sapiens
agaaattcagtaaag

SEQ ID NO: 1202516 - DNA, 15 bp, Homo sapiens
tagaaattcagtaaa

SEQ ID NO: 1202517 - DNA, 15 bp, Homo sapiens
ttagaaattcagtaa

SEQ ID NO: 1202518 - DNA, 15 bp, Homo sapiens
attagaaattcagta

SEQ ID NO: 1202519 - DNA, 15 bp, Homo sapiens
gattagaaattcagt

SEQ ID NO: 1202520 - DNA, 15 bp, Homo sapiens
tgattagaaattcag

SEQ ID NO: 1202521 - DNA, 15 bp, Homo sapiens
ttgattagaaattca

SEQ ID NO: 1202522 - DNA, 15 bp, Homo sapiens
cttgattagaaattc

SEQ ID NO: 1202523 - DNA, 15 bp, Homo sapiens
tcttgattagaaatt

SEQ ID NO: 1202524 - DNA, 15 bp, Homo sapiens
ttcttgattagaaat

SEQ ID NO: 1202525 - DNA, 15 bp, Homo sapiens
gcttcttgattagaa

SEQ ID NO: 1202526 - DNA, 15 bp, Homo sapiens
agcttcttgattaga

SEQ ID NO: 1202527 - DNA, 15 bp, Homo sapiens
aagcttcttgattag

SEQ ID NO: 1202528 - DNA, 15 bp, Homo sapiens
caagcttcttgatta

SEQ ID NO: 1202529 - DNA, 15 bp, Homo sapiens
ccaagcttcttgatt

SEQ ID NO: 1202530 - DNA, 15 bp, Homo sapiens
gccaagcttcttgat

SEQ ID NO: 1202531 - DNA, 15 bp, Homo sapiens
agccaagcttcttga

SEQ ID NO: 1202532 - DNA, 15 bp, Homo sapiens
aagccaagcttcttg

SEQ ID NO: 1202533 - DNA, 15 bp, Homo sapiens
aaagccaagcttctt

SEQ ID NO: 1202534 - DNA, 15 bp, Homo sapiens
aaaagccaagcttct

SEQ ID NO: 1202535 - DNA, 15 bp, Homo sapiens
aaaaagccaagcttc

SEQ ID NO: 1202536 - DNA, 15 bp, Homo sapiens
aaaaaagccaagctt

SEQ ID NO: 1202537 - DNA, 15 bp, Homo sapiens
gaaaaaagccaagct

SEQ ID NO: 1202538 - DNA, 15 bp, Homo sapiens
ggaaaaaagccaagc

SEQ ID NO: 1202539 - DNA, 15 bp, Homo sapiens
aggaaaaaagccaag

SEQ ID NO: 1202540 - DNA, 15 bp, Homo sapiens
gaggaaaaaagccaa

SEQ ID NO: 1202541 - DNA, 15 bp, Homo sapiens
ggaggaaaaaagcca

SEQ ID NO: 1202542 - DNA, 15 bp, Homo sapiens
gggaggaaaaaagcc

SEQ ID NO: 1202543 - DNA, 15 bp, Homo sapiens
agggaggaaaaaagc

SEQ ID NO: 1202544 - DNA, 15 bp, Homo sapiens
gagggaggaaaaaag

SEQ ID NO: 1202545 - DNA, 15 bp, Homo sapiens
tgagggaggaaaaaa

SEQ ID NO: 1202546 - DNA, 15 bp, Homo sapiens
gtgagggaggaaaaa

SEQ ID NO: 1202547 - DNA, 15 bp, Homo sapiens
agtgagggaggaaaa

SEQ ID NO: 1202548 - DNA, 15 bp, Homo sapiens
cagtgagggaggaaa

SEQ ID NO: 1202549 - DNA, 15 bp, Homo sapiens
acagtgagggaggaa

SEQ ID NO: 1202550 - DNA, 15 bp, Homo sapiens
gacagtgagggagga

SEQ ID NO: 1202551 - DNA, 15 bp, Homo sapiens
agacagtgagggagg

SEQ ID NO: 1202552 - DNA, 15 bp, Homo sapiens
aagacagtgagggag

SEQ ID NO: 1202553 - DNA, 15 bp, Homo sapiens
aaagacagtgaggga

SEQ ID NO: 1202554 - DNA, 15 bp, Homo sapiens
gaaagacagtgaggg

SEQ ID NO: 1202555 - DNA, 15 bp, Homo sapiens
ggaaagacagtgagg

SEQ ID NO: 1202556 - DNA, 15 bp, Homo sapiens
aggaaagacagtgag

SEQ ID NO: 1202557 - DNA, 15 bp, Homo sapiens
aaggaaagacagtga

SEQ ID NO: 1202558 - DNA, 15 bp, Homo sapiens
gaaggaaagacagtg

SEQ ID NO: 1202559 - DNA, 15 bp, Homo sapiens
ggaaggaaagacagt

SEQ ID NO: 1202560 - DNA, 15 bp, Homo sapiens
aggaaggaaagacag

SEQ ID NO: 1202561 - DNA, 15 bp, Homo sapiens
gaggaaggaaagaca

SEQ ID NO: 1202562 - DNA, 15 bp, Homo sapiens
tgaggaaggaaagac

SEQ ID NO: 1202563 - DNA, 15 bp, Homo sapiens
ctgaggaaggaaaga

SEQ ID NO: 1202564 - DNA, 15 bp, Homo sapiens
gctgaggaaggaaag

SEQ ID NO: 1202565 - DNA, 15 bp, Homo sapiens
agctgaggaaggaaa

SEQ ID NO: 1202566 - DNA, 15 bp, Homo sapiens
aagctgaggaaggaa

SEQ ID NO: 1202567 - DNA, 15 bp, Homo sapiens
taagctgaggaagga

SEQ ID NO: 1202568 - DNA, 15 bp, Homo sapiens
ataagctgaggaagg

SEQ ID NO: 1202569 - DNA, 15 bp, Homo sapiens
gataagctgaggaag

SEQ ID NO: 1202570 - DNA, 15 bp, Homo sapiens
agataagctgaggaa

SEQ ID NO: 1202571 - DNA, 15 bp, Homo sapiens
gagataagctgagga

SEQ ID NO: 1202572 - DNA, 15 bp, Homo sapiens
ggagataagctgagg

SEQ ID NO: 1202573 - DNA, 15 bp, Homo sapiens
aggagataagctgag

SEQ ID NO: 1202574 - DNA, 15 bp, Homo sapiens
gaggagataagctga

SEQ ID NO: 1202575 - DNA, 15 bp, Homo sapiens
agaggagataagctg

SEQ ID NO: 1202576 - DNA, 15 bp, Homo sapiens
gagaggagataagct

SEQ ID NO: 1202577 - DNA, 15 bp, Homo sapiens
ggagaggagataagc

SEQ ID NO: 1202578 - DNA, 15 bp, Homo sapiens
tggagaggagataag

SEQ ID NO: 1202579 - DNA, 15 bp, Homo sapiens
ctggagaggagataa

SEQ ID NO: 1202580 - DNA, 15 bp, Homo sapiens
tctggagaggagata

SEQ ID NO: 1202581 - DNA, 15 bp, Homo sapiens
ctctggagaggagat

SEQ ID NO: 1202582 - DNA, 15 bp, Homo sapiens
tctctggagaggaga

SEQ ID NO: 1202583 - DNA, 15 bp, Homo sapiens
gtctctggagaggag

SEQ ID NO: 1202584 - DNA, 15 bp, Homo sapiens
ggtctctggagagga

SEQ ID NO: 1202585 - DNA, 15 bp, Homo sapiens
aggtctctggagagg

SEQ ID NO: 1202586 - DNA, 15 bp, Homo sapiens
caggtctctggagag

SEQ ID NO: 1202587 - DNA, 15 bp, Homo sapiens
acaggtctctggaga

SEQ ID NO: 1202588 - DNA, 15 bp, Homo sapiens
aacaggtctctggag

SEQ ID NO: 1202589 - DNA, 15 bp, Homo sapiens
gaacaggtctctgga

SEQ ID NO: 1202590 - DNA, 15 bp, Homo sapiens
tgaacaggtctctgg

SEQ ID NO: 1202591 - DNA, 15 bp, Homo sapiens
gtgaacaggtctctg

SEQ ID NO: 1202592 - DNA, 15 bp, Homo sapiens
tgtgaacaggtctct

SEQ ID NO: 1202593 - DNA, 15 bp, Homo sapiens
ttgtgaacaggtctc

SEQ ID NO: 1202594 - DNA, 15 bp, Homo sapiens
tttgtgaacaggtct

SEQ ID NO: 1202595 - DNA, 15 bp, Homo sapiens
atttgtgaacaggtc

SEQ ID NO: 1202596 - DNA, 15 bp, Homo sapiens
gatttgtgaacaggt

SEQ ID NO: 1202597 - DNA, 15 bp, Homo sapiens
agatttgtgaacagg

SEQ ID NO: 1202598 - DNA, 15 bp, Homo sapiens
cagatttgtgaacag

SEQ ID NO: 1202599 - DNA, 15 bp, Homo sapiens
acagatttgtgaaca

SEQ ID NO: 1202600 - DNA, 15 bp, Homo sapiens
aacagatttgtgaac

SEQ ID NO: 1202601 - DNA, 15 bp, Homo sapiens
aaacagatttgtgaa

SEQ ID NO: 1202602 - DNA, 15 bp, Homo sapiens
gaaacagatttgtga

SEQ ID NO: 1202603 - DNA, 15 bp, Homo sapiens
agaaacagatttgtg

SEQ ID NO: 1202604 - DNA, 15 bp, Homo sapiens
cagaaacagatttgt

SEQ ID NO: 1202605 - DNA, 15 bp, Homo sapiens
acagaaacagatttg

SEQ ID NO: 1202606 - DNA, 15 bp, Homo sapiens
gacagaaacagattt

SEQ ID NO: 1202607 - DNA, 15 bp, Homo sapiens
ggacagaaacagatt

SEQ ID NO: 1202608 - DNA, 15 bp, Homo sapiens
gggacagaaacagat

SEQ ID NO: 1202609 - DNA, 15 bp, Homo sapiens
ggggacagaaacaga

SEQ ID NO: 1202610 - DNA, 15 bp, Homo sapiens
gggggacagaaacag

SEQ ID NO: 1202611 - DNA, 15 bp, Homo sapiens
agggggacagaaaca

SEQ ID NO: 1202612 - DNA, 15 bp, Homo sapiens
cagggggacagaaac

SEQ ID NO: 1202613 - DNA, 15 bp, Homo sapiens
acagggggacagaaa

SEQ ID NO: 1202614 - DNA, 15 bp, Homo sapiens
tacagggggacagaa

SEQ ID NO: 1202615 - DNA, 15 bp, Homo sapiens
gtacagggggacaga

SEQ ID NO: 1202616 - DNA, 15 bp, Homo sapiens
agtacagggggacag

SEQ ID NO: 1202617 - DNA, 15 bp, Homo sapiens
cagtacagggggaca

SEQ ID NO: 1202618 - DNA, 15 bp, Homo sapiens
tcagtacagggggac

SEQ ID NO: 1202619 - DNA, 15 bp, Homo sapiens
atcagtacaggggga

SEQ ID NO: 1202620 - DNA, 15 bp, Homo sapiens
aatcagtacaggggg

SEQ ID NO: 1202621 - DNA, 15 bp, Homo sapiens
taatcagtacagggg

SEQ ID NO: 1202622 - DNA, 15 bp, Homo sapiens
gtaatcagtacaggg

SEQ ID NO: 1202623 - DNA, 15 bp, Homo sapiens
ggtaatcagtacagg

SEQ ID NO: 1202624 - DNA, 15 bp, Homo sapiens
aggtaatcagtacag

SEQ ID NO: 1202625 - DNA, 15 bp, Homo sapiens
gaggtaatcagtaca

SEQ ID NO: 1202626 - DNA, 15 bp, Homo sapiens
agaggtaatcagtac

SEQ ID NO: 1202627 - DNA, 15 bp, Homo sapiens
tagaggtaatcagta

SEQ ID NO: 1202628 - DNA, 15 bp, Homo sapiens
ttagaggtaatcagt

SEQ ID NO: 1202629 - DNA, 15 bp, Homo sapiens
gttagaggtaatcag

SEQ ID NO: 1202630 - DNA, 15 bp, Homo sapiens
agttagaggtaatca

SEQ ID NO: 1202631 - DNA, 15 bp, Homo sapiens
cagttagaggtaatc

SEQ ID NO: 1202632 - DNA, 15 bp, Homo sapiens
gcagttagaggtaat

SEQ ID NO: 1202633 - DNA, 15 bp, Homo sapiens
tgcagttagaggtaa

SEQ ID NO: 1202634 - DNA, 15 bp, Homo sapiens
ctgcagttagaggta

SEQ ID NO: 1202635 - DNA, 15 bp, Homo sapiens
tctgcagttagaggt

SEQ ID NO: 1202636 - DNA, 15 bp, Homo sapiens
ttctgcagttagagg

SEQ ID NO: 1202637 - DNA, 15 bp, Homo sapiens
tttctgcagttagag

SEQ ID NO: 1202638 - DNA, 15 bp, Homo sapiens
gtttctgcagttaga

SEQ ID NO: 1202639 - DNA, 15 bp, Homo sapiens
ggtttctgcagttag

SEQ ID NO: 1202640 - DNA, 15 bp, Homo sapiens
gggtttctgcagtta

SEQ ID NO: 1202641 - DNA, 15 bp, Homo sapiens
ggggtttctgcagtt

SEQ ID NO: 1202642 - DNA, 15 bp, Homo sapiens
tggggtttctgcagt

SEQ ID NO: 1202643 - DNA, 15 bp, Homo sapiens
ctggggtttctgcag

SEQ ID NO: 1202644 - DNA, 15 bp, Homo sapiens
cctggggtttctgca

SEQ ID NO: 1202645 - DNA, 15 bp, Homo sapiens
ccctggggtttctgc

SEQ ID NO: 1202646 - DNA, 15 bp, Homo sapiens
cccctggggtttctg

SEQ ID NO: 1202647 - DNA, 15 bp, Homo sapiens
ccccctggggtttct

SEQ ID NO: 1202648 - DNA, 15 bp, Homo sapiens
tccccctggggtttc

SEQ ID NO: 1202649 - DNA, 15 bp, Homo sapiens
ttccccctggggttt

SEQ ID NO: 1202650 - DNA, 15 bp, Homo sapiens
tttccccctggggtt

SEQ ID NO: 1202651 - DNA, 15 bp, Homo sapiens
ctttccccctggggt

SEQ ID NO: 1202652 - DNA, 15 bp, Homo sapiens
gctttccccctgggg

SEQ ID NO: 1202653 - DNA, 15 bp, Homo sapiens
tgctttccccctggg

SEQ ID NO: 1202654 - DNA, 15 bp, Homo sapiens
ctgctttccccctgg

SEQ ID NO: 1202655 - DNA, 15 bp, Homo sapiens
tctgctttccccctg

SEQ ID NO: 1202656 - DNA, 15 bp, Homo sapiens
ttctgctttccccct

SEQ ID NO: 1202657 - DNA, 15 bp, Homo sapiens
tttctgctttccccc

SEQ ID NO: 1202658 - DNA, 15 bp, Homo sapiens
ctttctgctttcccc

SEQ ID NO: 1202659 - DNA, 15 bp, Homo sapiens
tctttctgctttccc

SEQ ID NO: 1202660 - DNA, 15 bp, Homo sapiens
ctctttctgctttcc

SEQ ID NO: 1202661 - DNA, 15 bp, Homo sapiens
tctctttctgctttc

SEQ ID NO: 1202662 - DNA, 15 bp, Homo sapiens
gtctctttctgcttt

SEQ ID NO: 1202663 - DNA, 15 bp, Homo sapiens
tgtctctttctgctt

SEQ ID NO: 1202664 - DNA, 15 bp, Homo sapiens
ctgtctctttctgct

SEQ ID NO: 1202665 - DNA, 15 bp, Homo sapiens
tctgtctctttctgc

SEQ ID NO: 1202666 - DNA, 15 bp, Homo sapiens
ttctgtctctttctg

SEQ ID NO: 1202667 - DNA, 15 bp, Homo sapiens
cttctgtctctttct

SEQ ID NO: 1202668 - DNA, 15 bp, Homo sapiens
tcttctgtctctttc

SEQ ID NO: 1202669 - DNA, 15 bp, Homo sapiens
atcttctgtctcttt

SEQ ID NO: 1202670 - DNA, 15 bp, Homo sapiens
tatcttctgtctctt

SEQ ID NO: 1202671 - DNA, 15 bp, Homo sapiens
gtatcttctgtctct

SEQ ID NO: 1202672 - DNA, 15 bp, Homo sapiens
agtatcttctgtctc

SEQ ID NO: 1202673 - DNA, 15 bp, Homo sapiens
gagtatcttctgtct

SEQ ID NO: 1202674 - DNA, 15 bp, Homo sapiens
tgagtatcttctgtc

SEQ ID NO: 1202675 - DNA, 15 bp, Homo sapiens
atgagtatcttctgt

SEQ ID NO: 1202676 - DNA, 15 bp, Homo sapiens
tatgagtatcttctg

SEQ ID NO: 1202677 - DNA, 15 bp, Homo sapiens
atatgagtatcttct

SEQ ID NO: 1202678 - DNA, 15 bp, Homo sapiens
catatgagtatcttc

SEQ ID NO: 1202679 - DNA, 15 bp, Homo sapiens
ccatatgagtatctt

SEQ ID NO: 1202680 - DNA, 15 bp, Homo sapiens
accatatgagtatct

SEQ ID NO: 1202681 - DNA, 15 bp, Homo sapiens
taccatatgagtatc

SEQ ID NO: 1202682 - DNA, 15 bp, Homo sapiens
ttaccatatgagtat

SEQ ID NO: 1202683 - DNA, 15 bp, Homo sapiens
attaccatatgagta

SEQ ID NO: 1202684 - DNA, 15 bp, Homo sapiens
tattaccatatgagt

SEQ ID NO: 1202685 - DNA, 15 bp, Homo sapiens
ttattaccatatgag

SEQ ID NO: 1202686 - DNA, 15 bp, Homo sapiens
cttattaccatatga

SEQ ID NO: 1202687 - DNA, 15 bp, Homo sapiens
acttattaccatatg

SEQ ID NO: 1202688 - DNA, 15 bp, Homo sapiens
aacttattaccatat

SEQ ID NO: 1202689 - DNA, 15 bp, Homo sapiens
aaacttattaccata

SEQ ID NO: 1202690 - DNA, 15 bp, Homo sapiens
aaaacttattaccat

SEQ ID NO: 1202691 - DNA, 15 bp, Homo sapiens
caaaacttattacca

SEQ ID NO: 1202692 - DNA, 15 bp, Homo sapiens
acaaaacttattacc

SEQ ID NO: 1202693 - DNA, 15 bp, Homo sapiens
aacaaaacttattac

SEQ ID NO: 1202694 - DNA, 15 bp, Homo sapiens
aaacaaaacttatta

SEQ ID NO: 1202695 - DNA, 15 bp, Homo sapiens
gaaacaaaacttatt

SEQ ID NO: 1202696 - DNA, 15 bp, Homo sapiens
ggaaacaaaacttat

SEQ ID NO: 1202697 - DNA, 15 bp, Homo sapiens
tggaaacaaaactta

SEQ ID NO: 1202698 - DNA, 15 bp, Homo sapiens
ctggaaacaaaactt

SEQ ID NO: 1202699 - DNA, 15 bp, Homo sapiens
tctggaaacaaaact

SEQ ID NO: 1202700 - DNA, 15 bp, Homo sapiens
gtctggaaacaaaac

SEQ ID NO: 1202701 - DNA, 15 bp, Homo sapiens
tgtctggaaacaaaa

SEQ ID NO: 1202702 - DNA, 15 bp, Homo sapiens
gtgtctggaaacaaa

SEQ ID NO: 1202703 - DNA, 15 bp, Homo sapiens
ggtgtctggaaacaa

SEQ ID NO: 1202704 - DNA, 15 bp, Homo sapiens
gggtgtctggaaaca

SEQ ID NO: 1202705 - DNA, 15 bp, Homo sapiens
ggggtgtctggaaac

SEQ ID NO: 1202706 - DNA, 15 bp, Homo sapiens
aggggtgtctggaaa

SEQ ID NO: 1202707 - DNA, 15 bp, Homo sapiens
taggggtgtctggaa

SEQ ID NO: 1202708 - DNA, 15 bp, Homo sapiens
ttaggggtgtctgga

SEQ ID NO: 1202709 - DNA, 15 bp, Homo sapiens
attaggggtgtctgg

SEQ ID NO: 1202710 - DNA, 15 bp, Homo sapiens
tattaggggtgtctg

SEQ ID NO: 1202711 - DNA, 15 bp, Homo sapiens
ttattaggggtgtct

SEQ ID NO: 1202712 - DNA, 15 bp, Homo sapiens
cttattaggggtgtc

SEQ ID NO: 1202713 - DNA, 15 bp, Homo sapiens
ccttattaggggtgt

SEQ ID NO: 1202714 - DNA, 15 bp, Homo sapiens
gccttattaggggtg

SEQ ID NO: 1202715 - DNA, 15 bp, Homo sapiens
ggccttattaggggt

SEQ ID NO: 1202716 - DNA, 15 bp, Homo sapiens
cggccttattagggg

SEQ ID NO: 1202717 - DNA, 15 bp, Homo sapiens
acggccttattaggg

SEQ ID NO: 1202718 - DNA, 15 bp, Homo sapiens
cacggccttattagg

SEQ ID NO: 1202719 - DNA, 15 bp, Homo sapiens
acacggccttattag

SEQ ID NO: 1202720 - DNA, 15 bp, Homo sapiens
aacacggccttatta

SEQ ID NO: 1202721 - DNA, 15 bp, Homo sapiens
taacacggccttatt

SEQ ID NO: 1202722 - DNA, 15 bp, Homo sapiens
ataacacggccttat

SEQ ID NO: 1202723 - DNA, 15 bp, Homo sapiens
cataacacggcctta

SEQ ID NO: 1202724 - DNA, 15 bp, Homo sapiens
tcataacacggcctt

SEQ ID NO: 1202725 - DNA, 15 bp, Homo sapiens
ttcataacacggcct

SEQ ID NO: 1202726 - DNA, 15 bp, Homo sapiens
tttcataacacggcc

SEQ ID NO: 1202727 - DNA, 15 bp, Homo sapiens
ttttcataacacggc

SEQ ID NO: 1202728 - DNA, 15 bp, Homo sapiens
attttcataacacgg

SEQ ID NO: 1202729 - DNA, 15 bp, Homo sapiens
cattttcataacacg

SEQ ID NO: 1202730 - DNA, 15 bp, Homo sapiens
ccattttcataacac

SEQ ID NO: 1202731 - DNA, 15 bp, Homo sapiens
tccattttcataaca

SEQ ID NO: 1202732 - DNA, 15 bp, Homo sapiens
ttccattttcataac

SEQ ID NO: 1202733 - DNA, 15 bp, Homo sapiens
tttccattttcataa

SEQ ID NO: 1202734 - DNA, 15 bp, Homo sapiens
gtttccattttcata

SEQ ID NO: 1202735 - DNA, 15 bp, Homo sapiens
tgtttccattttcat

SEQ ID NO: 1202736 - DNA, 15 bp, Homo sapiens
ttgtttccattttca

SEQ ID NO: 1202737 - DNA, 15 bp, Homo sapiens
tttgtttccattttc

SEQ ID NO: 1202738 - DNA, 15 bp, Homo sapiens
ttttgtttccatttt

SEQ ID NO: 1202739 - DNA, 15 bp, Homo sapiens
gttttgtttccattt

SEQ ID NO: 1202740 - DNA, 15 bp, Homo sapiens
ggttttgtttccatt

SEQ ID NO: 1202741 - DNA, 15 bp, Homo sapiens
tggttttgtttccat

SEQ ID NO: 1202742 - DNA, 15 bp, Homo sapiens
atggttttgtttcca

SEQ ID NO: 1202743 - DNA, 15 bp, Homo sapiens
aatggttttgtttcc

SEQ ID NO: 1202744 - DNA, 15 bp, Homo sapiens
caatggttttgtttc

SEQ ID NO: 1202745 - DNA, 15 bp, Homo sapiens
gcaatggttttgttt

SEQ ID NO: 1202746 - DNA, 15 bp, Homo sapiens
tgcaatggttttgtt

SEQ ID NO: 1202747 - DNA, 15 bp, Homo sapiens
atgcaatggttttgt

SEQ ID NO: 1202748 - DNA, 15 bp, Homo sapiens
aatgcaatggttttg

SEQ ID NO: 1202749 - DNA, 15 bp, Homo sapiens
taatgcaatggtttt

SEQ ID NO: 1202750 - DNA, 15 bp, Homo sapiens
ttaatgcaatggttt

SEQ ID NO: 1202751 - DNA, 15 bp, Homo sapiens
tttaatgcaatggtt

SEQ ID NO: 1202752 - DNA, 15 bp, Homo sapiens
ttttaatgcaatggt

SEQ ID NO: 1202753 - DNA, 15 bp, Homo sapiens
tttttaatgcaatgg

SEQ ID NO: 1202754 - DNA, 15 bp, Homo sapiens
ttttttaatgcaatg

SEQ ID NO: 1202755 - DNA, 15 bp, Homo sapiens
gttttttaatgcaat

SEQ ID NO: 1202756 - DNA, 15 bp, Homo sapiens
tgttttttaatgcaa

SEQ ID NO: 1202757 - DNA, 15 bp, Homo sapiens
ttgttttttaatgca

SEQ ID NO: 1202758 - DNA, 15 bp, Homo sapiens
attgttttttaatgc

SEQ ID NO: 1202759 - DNA, 15 bp, Homo sapiens
tattgttttttaatg

SEQ ID NO: 1202760 - DNA, 15 bp, Homo sapiens
ttattgttttttaat

SEQ ID NO: 1202761 - DNA, 15 bp, Homo sapiens
cttattgttttttaa

SEQ ID NO: 1202762 - DNA, 15 bp, Homo sapiens
gcttattgtttttta

SEQ ID NO: 1202763 - DNA, 15 bp, Homo sapiens
agcttattgtttttt

SEQ ID NO: 1202764 - DNA, 15 bp, Homo sapiens
tagcttattgttttt

SEQ ID NO: 1202765 - DNA, 15 bp, Homo sapiens
ctagcttattgtttt

SEQ ID NO: 1202766 - DNA, 15 bp, Homo sapiens
tctagcttattgttt

SEQ ID NO: 1202767 - DNA, 15 bp, Homo sapiens
atctagcttattgtt

SEQ ID NO: 1202768 - DNA, 15 bp, Homo sapiens
aatctagcttattgt

SEQ ID NO: 1202769 - DNA, 15 bp, Homo sapiens
caatctagcttattg

SEQ ID NO: 1202770 - DNA, 15 bp, Homo sapiens
gcaatctagcttatt

SEQ ID NO: 1202771 - DNA, 15 bp, Homo sapiens
tgcaatctagcttat

SEQ ID NO: 1202772 - DNA, 15 bp, Homo sapiens
ctgcaatctagctta

SEQ ID NO: 1202773 - DNA, 15 bp, Homo sapiens
tctgcaatctagctt

SEQ ID NO: 1202774 - DNA, 15 bp, Homo sapiens
ttctgcaatctagct

SEQ ID NO: 1202775 - DNA, 15 bp, Homo sapiens
cttctgcaatctagc

SEQ ID NO: 1202776 - DNA, 15 bp, Homo sapiens
tcttctgcaatctag

SEQ ID NO: 1202777 - DNA, 15 bp, Homo sapiens
ttcttctgcaatcta

SEQ ID NO: 1202778 - DNA, 15 bp, Homo sapiens
cttcttctgcaatct

SEQ ID NO: 1202779 - DNA, 15 bp, Homo sapiens
tcttcttctgcaatc

SEQ ID NO: 1202780 - DNA, 15 bp, Homo sapiens
ctcttcttctgcaat

SEQ ID NO: 1202781 - DNA, 15 bp, Homo sapiens
cctcttcttctgcaa

SEQ ID NO: 1202782 - DNA, 15 bp, Homo sapiens
ccctcttcttctgca

SEQ ID NO: 1202783 - DNA, 15 bp, Homo sapiens
tccctcttcttctgc

SEQ ID NO: 1202784 - DNA, 15 bp, Homo sapiens
ttccctcttcttctg

SEQ ID NO: 1202785 - DNA, 15 bp, Homo sapiens
attccctcttcttct

SEQ ID NO: 1202786 - DNA, 15 bp, Homo sapiens
cattccctcttcttc

SEQ ID NO: 1202787 - DNA, 15 bp, Homo sapiens
tcattccctcttctt

SEQ ID NO: 1202788 - DNA, 15 bp, Homo sapiens
gtcattccctcttct

SEQ ID NO: 1202789 - DNA, 15 bp, Homo sapiens
agtcattccctcttc

SEQ ID NO: 1202790 - DNA, 15 bp, Homo sapiens
aagtcattccctctt

SEQ ID NO: 1202791 - DNA, 15 bp, Homo sapiens
caagtcattccctct

SEQ ID NO: 1202792 - DNA, 15 bp, Homo sapiens
acaagtcattccctc

SEQ ID NO: 1202793 - DNA, 15 bp, Homo sapiens
cacaagtcattccct

SEQ ID NO: 1202794 - DNA, 15 bp, Homo sapiens
ccacaagtcattccc

SEQ ID NO: 1202795 - DNA, 15 bp, Homo sapiens
tccacaagtcattcc

SEQ ID NO: 1202796 - DNA, 15 bp, Homo sapiens
gtccacaagtcattc

SEQ ID NO: 1202797 - DNA, 15 bp, Homo sapiens
ggtccacaagtcatt

SEQ ID NO: 1202798 - DNA, 15 bp, Homo sapiens
tggtccacaagtcat

SEQ ID NO: 1202799 - DNA, 15 bp, Homo sapiens
ttggtccacaagtca

SEQ ID NO: 1202800 - DNA, 15 bp, Homo sapiens
gttggtccacaagtc

SEQ ID NO: 1202801 - DNA, 15 bp, Homo sapiens
tgttggtccacaagt

SEQ ID NO: 1202802 - DNA, 15 bp, Homo sapiens
atgttggtccacaag

SEQ ID NO: 1202803 - DNA, 15 bp, Homo sapiens
aatgttggtccacaa

SEQ ID NO: 1202804 - DNA, 15 bp, Homo sapiens
gaatgttggtccaca

SEQ ID NO: 1202805 - DNA, 15 bp, Homo sapiens
tgaatgttggtccac

SEQ ID NO: 1202806 - DNA, 15 bp, Homo sapiens
ttgaatgttggtcca

SEQ ID NO: 1202807 - DNA, 15 bp, Homo sapiens
cttgaatgttggtcc

SEQ ID NO: 1202808 - DNA, 15 bp, Homo sapiens
tcttgaatgttggtc

SEQ ID NO: 1202809 - DNA, 15 bp, Homo sapiens
ctcttgaatgttggt

SEQ ID NO: 1202810 - DNA, 15 bp, Homo sapiens
cctcttgaatgttgg

SEQ ID NO: 1202811 - DNA, 15 bp, Homo sapiens
tcctcttgaatgttg

SEQ ID NO: 1202812 - DNA, 15 bp, Homo sapiens
ctcctcttgaatgtt

SEQ ID NO: 1202813 - DNA, 15 bp, Homo sapiens
actcctcttgaatgt

SEQ ID NO: 1202814 - DNA, 15 bp, Homo sapiens
gactcctcttgaatg

SEQ ID NO: 1202815 - DNA, 15 bp, Homo sapiens
tgactcctcttgaat

SEQ ID NO: 1202816 - DNA, 15 bp, Homo sapiens
ctgactcctcttgaa

SEQ ID NO: 1202817 - DNA, 15 bp, Homo sapiens
cctgactcctcttga

SEQ ID NO: 1202818 - DNA, 15 bp, Homo sapiens
ccctgactcctcttg

SEQ ID NO: 1202819 - DNA, 15 bp, Homo sapiens
tccctgactcctctt

SEQ ID NO: 1202820 - DNA, 15 bp, Homo sapiens
ctccctgactcctct

SEQ ID NO: 1202821 - DNA, 15 bp, Homo sapiens
actccctgactcctc

SEQ ID NO: 1202822 - DNA, 15 bp, Homo sapiens
cactccctgactcct

SEQ ID NO: 1202823 - DNA, 15 bp, Homo sapiens
ccactccctgactcc

SEQ ID NO: 1202824 - DNA, 15 bp, Homo sapiens
cccactccctgactc

SEQ ID NO: 1202825 - DNA, 15 bp, Homo sapiens
ccccactccctgact

SEQ ID NO: 1202826 - DNA, 15 bp, Homo sapiens
accccactccctgac

SEQ ID NO: 1202827 - DNA, 15 bp, Homo sapiens
aaccccactccctga

SEQ ID NO: 1202828 - DNA, 15 bp, Homo sapiens
caaccccactccctg

SEQ ID NO: 1202829 - DNA, 15 bp, Homo sapiens
tcaaccccactccct

SEQ ID NO: 1202830 - DNA, 15 bp, Homo sapiens
gtcaaccccactccc

SEQ ID NO: 1202831 - DNA, 15 bp, Homo sapiens
cgtcaaccccactcc

SEQ ID NO: 1202832 - DNA, 15 bp, Homo sapiens
ccgtcaaccccactc

SEQ ID NO: 1202833 - DNA, 15 bp, Homo sapiens
gccgtcaaccccact

SEQ ID NO: 1202834 - DNA, 15 bp, Homo sapiens
tgccgtcaaccccac

SEQ ID NO: 1202835 - DNA, 15 bp, Homo sapiens
atgccgtcaacccca

SEQ ID NO: 1202836 - DNA, 15 bp, Homo sapiens
tatgccgtcaacccc

SEQ ID NO: 1202837 - DNA, 15 bp, Homo sapiens
ctatgccgtcaaccc

SEQ ID NO: 1202838 - DNA, 15 bp, Homo sapiens
tctatgccgtcaacc

SEQ ID NO: 1202839 - DNA, 15 bp, Homo sapiens
atctatgccgtcaac

SEQ ID NO: 1202840 - DNA, 15 bp, Homo sapiens
catctatgccgtcaa

SEQ ID NO: 1202841 - DNA, 15 bp, Homo sapiens
acatctatgccgtca

SEQ ID NO: 1202842 - DNA, 15 bp, Homo sapiens
tacatctatgccgtc

SEQ ID NO: 1202843 - DNA, 15 bp, Homo sapiens
ctacatctatgccgt

SEQ ID NO: 1202844 - DNA, 15 bp, Homo sapiens
gctacatctatgccg

SEQ ID NO: 1202845 - DNA, 15 bp, Homo sapiens
agctacatctatgcc

SEQ ID NO: 1202846 - DNA, 15 bp, Homo sapiens
aagctacatctatgc

SEQ ID NO: 1202847 - DNA, 15 bp, Homo sapiens
aaagctacatctatg

SEQ ID NO: 1202848 - DNA, 15 bp, Homo sapiens
caaagctacatctat

SEQ ID NO: 1202849 - DNA, 15 bp, Homo sapiens
tcaaagctacatcta

SEQ ID NO: 1202850 - DNA, 15 bp, Homo sapiens
gtcaaagctacatct

SEQ ID NO: 1202851 - DNA, 15 bp, Homo sapiens
ggtcaaagctacatc

SEQ ID NO: 1202852 - DNA, 15 bp, Homo sapiens
gggtcaaagctacat

SEQ ID NO: 1202853 - DNA, 15 bp, Homo sapiens
tgggtcaaagctaca

SEQ ID NO: 1202854 - DNA, 15 bp, Homo sapiens
gtgggtcaaagctac

SEQ ID NO: 1202855 - DNA, 15 bp, Homo sapiens
ggtgggtcaaagcta

SEQ ID NO: 1202856 - DNA, 15 bp, Homo sapiens
gggtgggtcaaagct

SEQ ID NO: 1202857 - DNA, 15 bp, Homo sapiens
tgggtgggtcaaagc

SEQ ID NO: 1202858 - DNA, 15 bp, Homo sapiens
ttgggtgggtcaaag

SEQ ID NO: 1202859 - DNA, 15 bp, Homo sapiens
tttgggtgggtcaaa

SEQ ID NO: 1202860 - DNA, 15 bp, Homo sapiens
ctttgggtgggtcaa

SEQ ID NO: 1202861 - DNA, 15 bp, Homo sapiens
tctttgggtgggtca

SEQ ID NO: 1202862 - DNA, 15 bp, Homo sapiens
ttctttgggtgggtc

SEQ ID NO: 1202863 - DNA, 15 bp, Homo sapiens
attctttgggtgggt

SEQ ID NO: 1202864 - DNA, 15 bp, Homo sapiens
cattctttgggtggg

SEQ ID NO: 1202865 - DNA, 15 bp, Homo sapiens
ccattctttgggtgg

SEQ ID NO: 1202866 - DNA, 15 bp, Homo sapiens
tccattctttgggtg

SEQ ID NO: 1202867 - DNA, 15 bp, Homo sapiens
gtccattctttgggt

SEQ ID NO: 1202868 - DNA, 15 bp, Homo sapiens
tgtccattctttggg

SEQ ID NO: 1202869 - DNA, 15 bp, Homo sapiens
atgtccattctttgg

SEQ ID NO: 1202870 - DNA, 15 bp, Homo sapiens
tatgtccattctttg

SEQ ID NO: 1202871 - DNA, 15 bp, Homo sapiens
atatgtccattcttt

SEQ ID NO: 1202872 - DNA, 15 bp, Homo sapiens
gatatgtccattctt

SEQ ID NO: 1202873 - DNA, 15 bp, Homo sapiens
agatatgtccattct

SEQ ID NO: 1202874 - DNA, 15 bp, Homo sapiens
cagatatgtccattc

SEQ ID NO: 1202875 - DNA, 15 bp, Homo sapiens
tcagatatgtccatt

SEQ ID NO: 1202876 - DNA, 15 bp, Homo sapiens
ttcagatatgtccat

SEQ ID NO: 1202877 - DNA, 15 bp, Homo sapiens
tttcagatatgtcca

SEQ ID NO: 1202878 - DNA, 15 bp, Homo sapiens
atttcagatatgtcc

SEQ ID NO: 1202879 - DNA, 15 bp, Homo sapiens
tatttcagatatgtc

SEQ ID NO: 1202880 - DNA, 15 bp, Homo sapiens
ctatttcagatatgt

SEQ ID NO: 1202881 - DNA, 15 bp, Homo sapiens
cctatttcagatatg

SEQ ID NO: 1202882 - DNA, 15 bp, Homo sapiens
acctatttcagatat

SEQ ID NO: 1202883 - DNA, 15 bp, Homo sapiens
tacctatttcagata

SEQ ID NO: 1202884 - DNA, 15 bp, Homo sapiens
gtacctatttcagat

SEQ ID NO: 1202885 - DNA, 15 bp, Homo sapiens
tgtacctatttcaga

SEQ ID NO: 1202886 - DNA, 15 bp, Homo sapiens
ttgtacctatttcag

SEQ ID NO: 1202887 - DNA, 15 bp, Homo sapiens
tttgtacctatttca

SEQ ID NO: 1202888 - DNA, 15 bp, Homo sapiens
ctttgtacctatttc

SEQ ID NO: 1202889 - DNA, 15 bp, Homo sapiens
cctttgtacctattt

SEQ ID NO: 1202890 - DNA, 15 bp, Homo sapiens
tcctttgtacctatt

SEQ ID NO: 1202891 - DNA, 15 bp, Homo sapiens
ttcctttgtacctat

SEQ ID NO: 1202892 - DNA, 15 bp, Homo sapiens
attcctttgtaccta

SEQ ID NO: 1202893 - DNA, 15 bp, Homo sapiens
tattcctttgtacct

SEQ ID NO: 1202894 - DNA, 15 bp, Homo sapiens
ttattcctttgtacc

SEQ ID NO: 1202895 - DNA, 15 bp, Homo sapiens
attattcctttgtac

SEQ ID NO: 1202896 - DNA, 15 bp, Homo sapiens
cattattcctttgta

SEQ ID NO: 1202897 - DNA, 15 bp, Homo sapiens
tcattattcctttgt

SEQ ID NO: 1202898 - DNA, 15 bp, Homo sapiens
ctcattattcctttg

SEQ ID NO: 1202899 - DNA, 15 bp, Homo sapiens
tctcattattccttt

SEQ ID NO: 1202900 - DNA, 15 bp, Homo sapiens
ttctcattattcctt

SEQ ID NO: 1202901 - DNA, 15 bp, Homo sapiens
cttctcattattcct

SEQ ID NO: 1202902 - DNA, 15 bp, Homo sapiens
ccttctcattattcc

SEQ ID NO: 1202903 - DNA, 15 bp, Homo sapiens
accttctcattattc

SEQ ID NO: 1202904 - DNA, 15 bp, Homo sapiens
taccttctcattatt

SEQ ID NO: 1202905 - DNA, 15 bp, Homo sapiens
ttaccttctcattat

SEQ ID NO: 1202906 - DNA, 15 bp, Homo sapiens
tttaccttctcatta

SEQ ID NO: 1202907 - DNA, 15 bp, Homo sapiens
ttttaccttctcatt

SEQ ID NO: 1202908 - DNA, 15 bp, Homo sapiens
tttttaccttctcat

SEQ ID NO: 1202909 - DNA, 15 bp, Homo sapiens
atttttaccttctca

SEQ ID NO: 1202910 - DNA, 15 bp, Homo sapiens
catttttaccttctc

SEQ ID NO: 1202911 - DNA, 15 bp, Homo sapiens
gcatttttaccttct

SEQ ID NO: 1202912 - DNA, 15 bp, Homo sapiens
tgcatttttaccttc

SEQ ID NO: 1202913 - DNA, 15 bp, Homo sapiens
atgcatttttacctt

SEQ ID NO: 1202914 - DNA, 15 bp, Homo sapiens
tatgcatttttacct

SEQ ID NO: 1202915 - DNA, 15 bp, Homo sapiens
ttatgcatttttacc

SEQ ID NO: 1202916 - DNA, 15 bp, Homo sapiens
tttatgcatttttac

SEQ ID NO: 1202917 - DNA, 15 bp, Homo sapiens
atttatgcattttta

SEQ ID NO: 1202918 - DNA, 15 bp, Homo sapiens
tatttatgcattttt

SEQ ID NO: 1202919 - DNA, 15 bp, Homo sapiens
ttatttatgcatttt

SEQ ID NO: 1202920 - DNA, 15 bp, Homo sapiens
tttatttatgcattt

SEQ ID NO: 1202921 - DNA, 15 bp, Homo sapiens
gtttatttatgcatt

SEQ ID NO: 1202922 - DNA, 15 bp, Homo sapiens
agtttatttatgcat

SEQ ID NO: 1202923 - DNA, 15 bp, Homo sapiens
tagtttatttatgca

SEQ ID NO: 1202924 - DNA, 15 bp, Homo sapiens
ctagtttatttatgc

SEQ ID NO: 1202925 - DNA, 15 bp, Homo sapiens
tctagtttatttatg

SEQ ID NO: 1202926 - DNA, 15 bp, Homo sapiens
atctagtttatttat

SEQ ID NO: 1202927 - DNA, 15 bp, Homo sapiens
tatctagtttattta

SEQ ID NO: 1202928 - DNA, 15 bp, Homo sapiens
atatctagtttattt

SEQ ID NO: 1202929 - DNA, 15 bp, Homo sapiens
tatatctagtttatt

SEQ ID NO: 1202930 - DNA, 15 bp, Homo sapiens
ctatatctagtttat

SEQ ID NO: 1202931 - DNA, 15 bp, Homo sapiens
tctatatctagttta

SEQ ID NO: 1202932 - DNA, 15 bp, Homo sapiens
atctatatctagttt

SEQ ID NO: 1202933 - DNA, 15 bp, Homo sapiens
tatctatatctagtt

SEQ ID NO: 1202934 - DNA, 15 bp, Homo sapiens
atatctatatctagt

SEQ ID NO: 1202935 - DNA, 15 bp, Homo sapiens
tatatctatatctag

SEQ ID NO: 1202936 - DNA, 15 bp, Homo sapiens
atatatctatatcta

SEQ ID NO: 1202937 - DNA, 15 bp, Homo sapiens
aatatatctatatct

SEQ ID NO: 1202938 - DNA, 15 bp, Homo sapiens
gaatatatctatatc

SEQ ID NO: 1202939 - DNA, 15 bp, Homo sapiens
agaatatatctatat

SEQ ID NO: 1202940 - DNA, 15 bp, Homo sapiens
cagaatatatctata

SEQ ID NO: 1202941 - DNA, 15 bp, Homo sapiens
ccagaatatatctat

SEQ ID NO: 1202942 - DNA, 15 bp, Homo sapiens
tccagaatatatcta

SEQ ID NO: 1202943 - DNA, 15 bp, Homo sapiens
ttccagaatatatct

SEQ ID NO: 1202944 - DNA, 15 bp, Homo sapiens
gttccagaatatatc

SEQ ID NO: 1202945 - DNA, 15 bp, Homo sapiens
tgttccagaatatat

SEQ ID NO: 1202946 - DNA, 15 bp, Homo sapiens
ttgttccagaatata

SEQ ID NO: 1202947 - DNA, 15 bp, Homo sapiens
tttgttccagaatat

SEQ ID NO: 1202948 - DNA, 15 bp, Homo sapiens
ttttgttccagaata

SEQ ID NO: 1202949 - DNA, 15 bp, Homo sapiens
cttttgttccagaat

SEQ ID NO: 1202950 - DNA, 15 bp, Homo sapiens
tcttttgttccagaa

SEQ ID NO: 1202951 - DNA, 15 bp, Homo sapiens
ttcttttgttccaga

SEQ ID NO: 1202952 - DNA, 15 bp, Homo sapiens
tttcttttgttccag

SEQ ID NO: 1202953 - DNA, 15 bp, Homo sapiens
ctttcttttgttcca

SEQ ID NO: 1202954 - DNA, 15 bp, Homo sapiens
gctttcttttgttcc

SEQ ID NO: 1202955 - DNA, 15 bp, Homo sapiens
agctttcttttgttc

SEQ ID NO: 1202956 - DNA, 15 bp, Homo sapiens
gagctttcttttgtt

SEQ ID NO: 1202957 - DNA, 15 bp, Homo sapiens
agagctttcttttgt

SEQ ID NO: 1202958 - DNA, 15 bp, Homo sapiens
aagagctttcttttg

SEQ ID NO: 1202959 - DNA, 15 bp, Homo sapiens
gaagagctttctttt

SEQ ID NO: 1202960 - DNA, 15 bp, Homo sapiens
agaagagctttcttt

SEQ ID NO: 1202961 - DNA, 15 bp, Homo sapiens
gagaagagctttctt

SEQ ID NO: 1202962 - DNA, 15 bp, Homo sapiens
agagaagagctttct

SEQ ID NO: 1202963 - DNA, 15 bp, Homo sapiens
aagagaagagctttc

SEQ ID NO: 1202964 - DNA, 15 bp, Homo sapiens
caagagaagagcttt

SEQ ID NO: 1202965 - DNA, 15 bp, Homo sapiens
gcaagagaagagctt

SEQ ID NO: 1202966 - DNA, 15 bp, Homo sapiens
ggcaagagaagagct

SEQ ID NO: 1202967 - DNA, 15 bp, Homo sapiens
tggcaagagaagagc

SEQ ID NO: 1202968 - DNA, 15 bp, Homo sapiens
atggcaagagaagag

SEQ ID NO: 1202969 - DNA, 15 bp, Homo sapiens
gatggcaagagaaga

SEQ ID NO: 1202970 - DNA, 15 bp, Homo sapiens
tgatggcaagagaag

SEQ ID NO: 1202971 - DNA, 15 bp, Homo sapiens
ctgatggcaagagaa

SEQ ID NO: 1202972 - DNA, 15 bp, Homo sapiens
cctgatggcaagaga

SEQ ID NO: 1202973 - DNA, 15 bp, Homo sapiens
ccctgatggcaagag

SEQ ID NO: 1202974 - DNA, 15 bp, Homo sapiens
accctgatggcaaga

SEQ ID NO: 1202975 - DNA, 15 bp, Homo sapiens
taccctgatggcaag

SEQ ID NO: 1202976 - DNA, 15 bp, Homo sapiens
ctaccctgatggcaa

SEQ ID NO: 1202977 - DNA, 15 bp, Homo sapiens
tctaccctgatggca

SEQ ID NO: 1202978 - DNA, 15 bp, Homo sapiens
ttctaccctgatggc

SEQ ID NO: 1202979 - DNA, 15 bp, Homo sapiens
cttctaccctgatgg

SEQ ID NO: 1202980 - DNA, 15 bp, Homo sapiens
ccttctaccctgatg

SEQ ID NO: 1202981 - DNA, 15 bp, Homo sapiens
tccttctaccctgat

SEQ ID NO: 1202982 - DNA, 15 bp, Homo sapiens
atccttctaccctga

SEQ ID NO: 1202983 - DNA, 15 bp, Homo sapiens
gatccttctaccctg

SEQ ID NO: 1202984 - DNA, 15 bp, Homo sapiens
ggatccttctaccct

SEQ ID NO: 1202985 - DNA, 15 bp, Homo sapiens
aggatccttctaccc

SEQ ID NO: 1202986 - DNA, 15 bp, Homo sapiens
taggatccttctacc

SEQ ID NO: 1202987 - DNA, 15 bp, Homo sapiens
ctaggatccttctac

SEQ ID NO: 1202988 - DNA, 15 bp, Homo sapiens
tctaggatccttcta

SEQ ID NO: 1202989 - DNA, 15 bp, Homo sapiens
ttctaggatccttct

SEQ ID NO: 1202990 - DNA, 15 bp, Homo sapiens
attctaggatccttc

SEQ ID NO: 1202991 - DNA, 15 bp, Homo sapiens
aattctaggatcctt

SEQ ID NO: 1202992 - DNA, 15 bp, Homo sapiens
taattctaggatcct

SEQ ID NO: 1202993 - DNA, 15 bp, Homo sapiens
ttaattctaggatcc

SEQ ID NO: 1202994 - DNA, 15 bp, Homo sapiens
cttaattctaggatc

SEQ ID NO: 1202995 - DNA, 15 bp, Homo sapiens
gcttaattctaggat

SEQ ID NO: 1202996 - DNA, 15 bp, Homo sapiens
agcttaattctagga

SEQ ID NO: 1202997 - DNA, 15 bp, Homo sapiens
aagcttaattctagg

SEQ ID NO: 1202998 - DNA, 15 bp, Homo sapiens
aaagcttaattctag

SEQ ID NO: 1202999 - DNA, 15 bp, Homo sapiens
caaagcttaattcta

SEQ ID NO: 1203000 - DNA, 15 bp, Homo sapiens
gcaaagcttaattct

SEQ ID NO: 1203001 - DNA, 15 bp, Homo sapiens
agcaaagcttaattc

SEQ ID NO: 1203002 - DNA, 15 bp, Homo sapiens
aagcaaagcttaatt

SEQ ID NO: 1203003 - DNA, 15 bp, Homo sapiens
caagcaaagcttaat

SEQ ID NO: 1203004 - DNA, 15 bp, Homo sapiens
tcaagcaaagcttaa

SEQ ID NO: 1203005 - DNA, 15 bp, Homo sapiens
gtcaagcaaagctta

SEQ ID NO: 1203006 - DNA, 15 bp, Homo sapiens
tgtcaagcaaagctt

SEQ ID NO: 1203007 - DNA, 15 bp, Homo sapiens
gtgtcaagcaaagct

SEQ ID NO: 1203008 - DNA, 15 bp, Homo sapiens
tgtgtcaagcaaagc

SEQ ID NO: 1203009 - DNA, 15 bp, Homo sapiens
ctgtgtcaagcaaag

SEQ ID NO: 1203010 - DNA, 15 bp, Homo sapiens
actgtgtcaagcaaa

SEQ ID NO: 1203011 - DNA, 15 bp, Homo sapiens
cactgtgtcaagcaa

SEQ ID NO: 1203012 - DNA, 15 bp, Homo sapiens
tcactgtgtcaagca

SEQ ID NO: 1203013 - DNA, 15 bp, Homo sapiens
ctcactgtgtcaagc

SEQ ID NO: 1203014 - DNA, 15 bp, Homo sapiens
tctcactgtgtcaag

SEQ ID NO: 1203015 - DNA, 15 bp, Homo sapiens
atctcactgtgtcaa

SEQ ID NO: 1203016 - DNA, 15 bp, Homo sapiens
aatctcactgtgtca

SEQ ID NO: 1203017 - DNA, 15 bp, Homo sapiens
aaatctcactgtgtc

SEQ ID NO: 1203018 - DNA, 15 bp, Homo sapiens
gaaatctcactgtgt

SEQ ID NO: 1203019 - DNA, 15 bp, Homo sapiens
agaaatctcactgtg

SEQ ID NO: 1203020 - DNA, 15 bp, Homo sapiens
cagaaatctcactgt

SEQ ID NO: 1203021 - DNA, 15 bp, Homo sapiens
acagaaatctcactg

SEQ ID NO: 1203022 - DNA, 15 bp, Homo sapiens
cacagaaatctcact

SEQ ID NO: 1203023 - DNA, 15 bp, Homo sapiens
gcacagaaatctcac

SEQ ID NO: 1203024 - DNA, 15 bp, Homo sapiens
agcacagaaatctca

SEQ ID NO: 1203025 - DNA, 15 bp, Homo sapiens
cagcacagaaatctc

SEQ ID NO: 1203026 - DNA, 15 bp, Homo sapiens
tcagcacagaaatct

SEQ ID NO: 1203027 - DNA, 15 bp, Homo sapiens
gtcagcacagaaatc

SEQ ID NO: 1203028 - DNA, 15 bp, Homo sapiens
ggtcagcacagaaat

SEQ ID NO: 1203029 - DNA, 15 bp, Homo sapiens
tggtcagcacagaaa

SEQ ID NO: 1203030 - DNA, 15 bp, Homo sapiens
ctggtcagcacagaa

SEQ ID NO: 1203031 - DNA, 15 bp, Homo sapiens
gctggtcagcacaga

SEQ ID NO: 1203032 - DNA, 15 bp, Homo sapiens
ggctggtcagcacag

SEQ ID NO: 1203033 - DNA, 15 bp, Homo sapiens
tggctggtcagcaca

SEQ ID NO: 1203034 - DNA, 15 bp, Homo sapiens
ctggctggtcagcac

SEQ ID NO: 1203035 - DNA, 15 bp, Homo sapiens
cctggctggtcagca

SEQ ID NO: 1203036 - DNA, 15 bp, Homo sapiens
ccctggctggtcagc

SEQ ID NO: 1203037 - DNA, 15 bp, Homo sapiens
accctggctggtcag

SEQ ID NO: 1203038 - DNA, 15 bp, Homo sapiens
taccctggctggtca

SEQ ID NO: 1203039 - DNA, 15 bp, Homo sapiens
ctaccctggctggtc

SEQ ID NO: 1203040 - DNA, 15 bp, Homo sapiens
tctaccctggctggt

SEQ ID NO: 1203041 - DNA, 15 bp, Homo sapiens
atctaccctggctgg

SEQ ID NO: 1203042 - DNA, 15 bp, Homo sapiens
aatctaccctggctg

SEQ ID NO: 1203043 - DNA, 15 bp, Homo sapiens
gaatctaccctggct

SEQ ID NO: 1203044 - DNA, 15 bp, Homo sapiens
ggaatctaccctggc

SEQ ID NO: 1203045 - DNA, 15 bp, Homo sapiens
gggaatctaccctgg

SEQ ID NO: 1203046 - DNA, 15 bp, Homo sapiens
cgggaatctaccctg

SEQ ID NO: 1203047 - DNA, 15 bp, Homo sapiens
tcgggaatctaccct

SEQ ID NO: 1203048 - DNA, 15 bp, Homo sapiens
ctcgggaatctaccc

SEQ ID NO: 1203049 - DNA, 15 bp, Homo sapiens
gctcgggaatctacc

SEQ ID NO: 1203050 - DNA, 15 bp, Homo sapiens
ggctcgggaatctac

SEQ ID NO: 1203051 - DNA, 15 bp, Homo sapiens
aggctcgggaatcta

SEQ ID NO: 1203052 - DNA, 15 bp, Homo sapiens
gaggctcgggaatct

SEQ ID NO: 1203053 - DNA, 15 bp, Homo sapiens
ggaggctcgggaatc

SEQ ID NO: 1203054 - DNA, 15 bp, Homo sapiens
aggaggctcgggaat

SEQ ID NO: 1203055 - DNA, 15 bp, Homo sapiens
aaggaggctcgggaa

SEQ ID NO: 1203056 - DNA, 15 bp, Homo sapiens
gaaggaggctcggga

SEQ ID NO: 1203057 - DNA, 15 bp, Homo sapiens
agaaggaggctcggg

SEQ ID NO: 1203058 - DNA, 15 bp, Homo sapiens
gagaaggaggctcgg

SEQ ID NO: 1203059 - DNA, 15 bp, Homo sapiens
tgagaaggaggctcg

SEQ ID NO: 1203060 - DNA, 15 bp, Homo sapiens
atgagaaggaggctc

SEQ ID NO: 1203061 - DNA, 15 bp, Homo sapiens
gatgagaaggaggct

SEQ ID NO: 1203062 - DNA, 15 bp, Homo sapiens
agatgagaaggaggc

SEQ ID NO: 1203063 - DNA, 15 bp, Homo sapiens
gagatgagaaggagg

SEQ ID NO: 1203064 - DNA, 15 bp, Homo sapiens
agagatgagaaggag

SEQ ID NO: 1203065 - DNA, 15 bp, Homo sapiens
cagagatgagaagga

SEQ ID NO: 1203066 - DNA, 15 bp, Homo sapiens
acagagatgagaagg

SEQ ID NO: 1203067 - DNA, 15 bp, Homo sapiens
tacagagatgagaag

SEQ ID NO: 1203068 - DNA, 15 bp, Homo sapiens
ttacagagatgagaa

SEQ ID NO: 1203069 - DNA, 15 bp, Homo sapiens
gttacagagatgaga

SEQ ID NO: 1203070 - DNA, 15 bp, Homo sapiens
tgttacagagatgag

SEQ ID NO: 1203071 - DNA, 15 bp, Homo sapiens
atgttacagagatga

SEQ ID NO: 1203072 - DNA, 15 bp, Homo sapiens
gatgttacagagatg

SEQ ID NO: 1203073 - DNA, 15 bp, Homo sapiens
tgatgttacagagat

SEQ ID NO: 1203074 - DNA, 15 bp, Homo sapiens
atgatgttacagaga

SEQ ID NO: 1203075 - DNA, 15 bp, Homo sapiens
tatgatgttacagag

SEQ ID NO: 1203076 - DNA, 15 bp, Homo sapiens
ttatgatgttacaga

SEQ ID NO: 1203077 - DNA, 15 bp, Homo sapiens
cttatgatgttacag

SEQ ID NO: 1203078 - DNA, 15 bp, Homo sapiens
ccttatgatgttaca

SEQ ID NO: 1203079 - DNA, 15 bp, Homo sapiens
tccttatgatgttac

SEQ ID NO: 1203080 - DNA, 15 bp, Homo sapiens
ctccttatgatgtta

SEQ ID NO: 1203081 - DNA, 15 bp, Homo sapiens
actccttatgatgtt

SEQ ID NO: 1203082 - DNA, 15 bp, Homo sapiens
tactccttatgatgt

SEQ ID NO: 1203083 - DNA, 15 bp, Homo sapiens
ttactccttatgatg

SEQ ID NO: 1203084 - DNA, 15 bp, Homo sapiens
cttactccttatgat

SEQ ID NO: 1203085 - DNA, 15 bp, Homo sapiens
gcttactccttatga

SEQ ID NO: 1203086 - DNA, 15 bp, Homo sapiens
agcttactccttatg

SEQ ID NO: 1203087 - DNA, 15 bp, Homo sapiens
aagcttactccttat

SEQ ID NO: 1203088 - DNA, 15 bp, Homo sapiens
caagcttactcctta

SEQ ID NO: 1203089 - DNA, 15 bp, Homo sapiens
gcaagcttactcctt

SEQ ID NO: 1203090 - DNA, 15 bp, Homo sapiens
ggcaagcttactcct

SEQ ID NO: 1203091 - DNA, 15 bp, Homo sapiens
gggcaagcttactcc

SEQ ID NO: 1203092 - DNA, 15 bp, Homo sapiens
ggggcaagcttactc

SEQ ID NO: 1203093 - DNA, 15 bp, Homo sapiens
aggggcaagcttact

SEQ ID NO: 1203094 - DNA, 15 bp, Homo sapiens
gaggggcaagcttac

SEQ ID NO: 1203095 - DNA, 15 bp, Homo sapiens
ggaggggcaagctta

SEQ ID NO: 1203096 - DNA, 15 bp, Homo sapiens
aggaggggcaagctt

SEQ ID NO: 1203097 - DNA, 15 bp, Homo sapiens
caggaggggcaagct

SEQ ID NO: 1203098 - DNA, 15 bp, Homo sapiens
ccaggaggggcaagc

SEQ ID NO: 1203099 - DNA, 15 bp, Homo sapiens
gccaggaggggcaag

SEQ ID NO: 1203100 - DNA, 15 bp, Homo sapiens
agccaggaggggcaa

SEQ ID NO: 1203101 - DNA, 15 bp, Homo sapiens
aagccaggaggggca

SEQ ID NO: 1203102 - DNA, 15 bp, Homo sapiens
caagccaggaggggc

SEQ ID NO: 1203103 - DNA, 15 bp, Homo sapiens
ccaagccaggagggg

SEQ ID NO: 1203104 - DNA, 15 bp, Homo sapiens
tccaagccaggaggg

SEQ ID NO: 1203105 - DNA, 15 bp, Homo sapiens
ttccaagccaggagg

SEQ ID NO: 1203106 - DNA, 15 bp, Homo sapiens
cttccaagccaggag

SEQ ID NO: 1203107 - DNA, 15 bp, Homo sapiens
tcttccaagccagga

SEQ ID NO: 1203108 - DNA, 15 bp, Homo sapiens
ctcttccaagccagg

SEQ ID NO: 1203109 - DNA, 15 bp, Homo sapiens
tctcttccaagccag

SEQ ID NO: 1203110 - DNA, 15 bp, Homo sapiens
atctcttccaagcca

SEQ ID NO: 1203111 - DNA, 15 bp, Homo sapiens
catctcttccaagcc

SEQ ID NO: 1203112 - DNA, 15 bp, Homo sapiens
ccatctcttccaagc

SEQ ID NO: 1203113 - DNA, 15 bp, Homo sapiens
tccatctcttccaag

SEQ ID NO: 1203114 - DNA, 15 bp, Homo sapiens
gtccatctcttccaa

SEQ ID NO: 1203115 - DNA, 15 bp, Homo sapiens
tgtccatctcttcca

SEQ ID NO: 1203116 - DNA, 15 bp, Homo sapiens
ctgtccatctcttcc

SEQ ID NO: 1203117 - DNA, 15 bp, Homo sapiens
tctgtccatctcttc

SEQ ID NO: 1203118 - DNA, 15 bp, Homo sapiens
ctctgtccatctctt

SEQ ID NO: 1203119 - DNA, 15 bp, Homo sapiens
tctctgtccatctct

SEQ ID NO: 1203120 - DNA, 15 bp, Homo sapiens
ttctctgtccatctc

SEQ ID NO: 1203121 - DNA, 15 bp, Homo sapiens
cttctctgtccatct

SEQ ID NO: 1203122 - DNA, 15 bp, Homo sapiens
tcttctctgtccatc

SEQ ID NO: 1203123 - DNA, 15 bp, Homo sapiens
gtcttctctgtccat

SEQ ID NO: 1203124 - DNA, 15 bp, Homo sapiens
tgtcttctctgtcca

SEQ ID NO: 1203125 - DNA, 15 bp, Homo sapiens
atgtcttctctgtcc

SEQ ID NO: 1203126 - DNA, 15 bp, Homo sapiens
aatgtcttctctgtc

SEQ ID NO: 1203127 - DNA, 15 bp, Homo sapiens
aaatgtcttctctgt

SEQ ID NO: 1203128 - DNA, 15 bp, Homo sapiens
taaatgtcttctctg

SEQ ID NO: 1203129 - DNA, 15 bp, Homo sapiens
gtaaatgtcttctct

SEQ ID NO: 1203130 - DNA, 15 bp, Homo sapiens
agtaaatgtcttctc

SEQ ID NO: 1203131 - DNA, 15 bp, Homo sapiens
aagtaaatgtcttct

SEQ ID NO: 1203132 - DNA, 15 bp, Homo sapiens
taagtaaatgtcttc

SEQ ID NO: 1203133 - DNA, 15 bp, Homo sapiens
ttaagtaaatgtctt

SEQ ID NO: 1203134 - DNA, 15 bp, Homo sapiens
attaagtaaatgtct

SEQ ID NO: 1203135 - DNA, 15 bp, Homo sapiens
aattaagtaaatgtc

SEQ ID NO: 1203136 - DNA, 15 bp, Homo sapiens
aaattaagtaaatgt

SEQ ID NO: 1203137 - DNA, 15 bp, Homo sapiens
caaattaagtaaatg

SEQ ID NO: 1203138 - DNA, 15 bp, Homo sapiens
acaaattaagtaaat

SEQ ID NO: 1203139 - DNA, 15 bp, Homo sapiens
gacaaattaagtaaa

SEQ ID NO: 1203140 - DNA, 15 bp, Homo sapiens
agacaaattaagtaa

SEQ ID NO: 1203141 - DNA, 15 bp, Homo sapiens
gagacaaattaagta

SEQ ID NO: 1203142 - DNA, 15 bp, Homo sapiens
tgagacaaattaagt

SEQ ID NO: 1203143 - DNA, 15 bp, Homo sapiens
ctgagacaaattaag

SEQ ID NO: 1203144 - DNA, 15 bp, Homo sapiens
tctgagacaaattaa

SEQ ID NO: 1203145 - DNA, 15 bp, Homo sapiens
ctctgagacaaatta

SEQ ID NO: 1203146 - DNA, 15 bp, Homo sapiens
cctctgagacaaatt

SEQ ID NO: 1203147 - DNA, 15 bp, Homo sapiens
acctctgagacaaat

SEQ ID NO: 1203148 - DNA, 15 bp, Homo sapiens
aacctctgagacaaa

SEQ ID NO: 1203149 - DNA, 15 bp, Homo sapiens
aaacctctgagacaa

SEQ ID NO: 1203150 - DNA, 15 bp, Homo sapiens
gaaacctctgagaca

SEQ ID NO: 1203151 - DNA, 15 bp, Homo sapiens
tgaaacctctgagac

SEQ ID NO: 1203152 - DNA, 15 bp, Homo sapiens
gtgaaacctctgaga

SEQ ID NO: 1203153 - DNA, 15 bp, Homo sapiens
tgtgaaacctctgag

SEQ ID NO: 1203154 - DNA, 15 bp, Homo sapiens
gtgtgaaacctctga

SEQ ID NO: 1203155 - DNA, 15 bp, Homo sapiens
ggtgtgaaacctctg

SEQ ID NO: 1203156 - DNA, 15 bp, Homo sapiens
gggtgtgaaacctct

SEQ ID NO: 1203157 - DNA, 15 bp, Homo sapiens
ggggtgtgaaacctc

SEQ ID NO: 1203158 - DNA, 15 bp, Homo sapiens
tggggtgtgaaacct

SEQ ID NO: 1203159 - DNA, 15 bp, Homo sapiens
ctggggtgtgaaacc

SEQ ID NO: 1203160 - DNA, 15 bp, Homo sapiens
gctggggtgtgaaac

SEQ ID NO: 1203161 - DNA, 15 bp, Homo sapiens
tgctggggtgtgaaa

SEQ ID NO: 1203162 - DNA, 15 bp, Homo sapiens
ctgctggggtgtgaa

SEQ ID NO: 1203163 - DNA, 15 bp, Homo sapiens
cctgctggggtgtga

SEQ ID NO: 1203164 - DNA, 15 bp, Homo sapiens
tcctgctggggtgtg

SEQ ID NO: 1203165 - DNA, 15 bp, Homo sapiens
ttcctgctggggtgt

SEQ ID NO: 1203166 - DNA, 15 bp, Homo sapiens
attcctgctggggtg

SEQ ID NO: 1203167 - DNA, 15 bp, Homo sapiens
cattcctgctggggt

SEQ ID NO: 1203168 - DNA, 15 bp, Homo sapiens
gcattcctgctgggg

SEQ ID NO: 1203169 - DNA, 15 bp, Homo sapiens
agcattcctgctggg

SEQ ID NO: 1203170 - DNA, 15 bp, Homo sapiens
gagcattcctgctgg

SEQ ID NO: 1203171 - DNA, 15 bp, Homo sapiens
agagcattcctgctg

SEQ ID NO: 1203172 - DNA, 15 bp, Homo sapiens
gagagcattcctgct

SEQ ID NO: 1203173 - DNA, 15 bp, Homo sapiens
ggagagcattcctgc

SEQ ID NO: 1203174 - DNA, 15 bp, Homo sapiens
gggagagcattcctg

SEQ ID NO: 1203175 - DNA, 15 bp, Homo sapiens
tgggagagcattcct

SEQ ID NO: 1203176 - DNA, 15 bp, Homo sapiens
gtgggagagcattcc

SEQ ID NO: 1203177 - DNA, 15 bp, Homo sapiens
tgtgggagagcattc

SEQ ID NO: 1203178 - DNA, 15 bp, Homo sapiens
atgtgggagagcatt

SEQ ID NO: 1203179 - DNA, 15 bp, Homo sapiens
aatgtgggagagcat

SEQ ID NO: 1203180 - DNA, 15 bp, Homo sapiens
aaatgtgggagagca

SEQ ID NO: 1203181 - DNA, 15 bp, Homo sapiens
aaaatgtgggagagc

SEQ ID NO: 1203182 - DNA, 15 bp, Homo sapiens
caaaatgtgggagag

SEQ ID NO: 1203183 - DNA, 15 bp, Homo sapiens
ccaaaatgtgggaga

SEQ ID NO: 1203184 - DNA, 15 bp, Homo sapiens
tccaaaatgtgggag

SEQ ID NO: 1203185 - DNA, 15 bp, Homo sapiens
ttccaaaatgtggga

SEQ ID NO: 1203186 - DNA, 15 bp, Homo sapiens
tttccaaaatgtggg

SEQ ID NO: 1203187 - DNA, 15 bp, Homo sapiens
gtttccaaaatgtgg

SEQ ID NO: 1203188 - DNA, 15 bp, Homo sapiens
tgtttccaaaatgtg

SEQ ID NO: 1203189 - DNA, 15 bp, Homo sapiens
ttgtttccaaaatgt

SEQ ID NO: 1203190 - DNA, 15 bp, Homo sapiens
tttgtttccaaaatg

SEQ ID NO: 1203191 - DNA, 15 bp, Homo sapiens
atttgtttccaaaat

SEQ ID NO: 1203192 - DNA, 15 bp, Homo sapiens
aatttgtttccaaaa

SEQ ID NO: 1203193 - DNA, 15 bp, Homo sapiens
aaatttgtttccaaa

SEQ ID NO: 1203194 - DNA, 15 bp, Homo sapiens
aaaatttgtttccaa

SEQ ID NO: 1203195 - DNA, 15 bp, Homo sapiens
caaaatttgtttcca

SEQ ID NO: 1203196 - DNA, 15 bp, Homo sapiens
ccaaaatttgtttcc

SEQ ID NO: 1203197 - DNA, 15 bp, Homo sapiens
tccaaaatttgtttc

SEQ ID NO: 1203198 - DNA, 15 bp, Homo sapiens
ttccaaaatttgttt

SEQ ID NO: 1203199 - DNA, 15 bp, Homo sapiens
tttccaaaatttgtt

SEQ ID NO: 1203200 - DNA, 15 bp, Homo sapiens
atttccaaaatttgt

SEQ ID NO: 1203201 - DNA, 15 bp, Homo sapiens
catttccaaaatttg

SEQ ID NO: 1203202 - DNA, 15 bp, Homo sapiens
ccatttccaaaattt

SEQ ID NO: 1203203 - DNA, 15 bp, Homo sapiens
tccatttccaaaatt

SEQ ID NO: 1203204 - DNA, 15 bp, Homo sapiens
ttccatttccaaaat

SEQ ID NO: 1203205 - DNA, 15 bp, Homo sapiens
attccatttccaaaa

SEQ ID NO: 1203206 - DNA, 15 bp, Homo sapiens
aattccatttccaaa

SEQ ID NO: 1203207 - DNA, 15 bp, Homo sapiens
gaattccatttccaa

SEQ ID NO: 1203208 - DNA, 15 bp, Homo sapiens
tgaattccatttcca

SEQ ID NO: 1203209 - DNA, 15 bp, Homo sapiens
ctgaattccatttcc

SEQ ID NO: 1203210 - DNA, 15 bp, Homo sapiens
tctgaattccatttc

SEQ ID NO: 1203211 - DNA, 15 bp, Homo sapiens
ctctgaattccattt

SEQ ID NO: 1203212 - DNA, 15 bp, Homo sapiens
actctgaattccatt

SEQ ID NO: 1203213 - DNA, 15 bp, Homo sapiens
gactctgaattccat

SEQ ID NO: 1203214 - DNA, 15 bp, Homo sapiens
ggactctgaattcca

SEQ ID NO: 1203215 - DNA, 15 bp, Homo sapiens
gggactctgaattcc

SEQ ID NO: 1203216 - DNA, 15 bp, Homo sapiens
agggactctgaattc

SEQ ID NO: 1203217 - DNA, 15 bp, Homo sapiens
cagggactctgaatt

SEQ ID NO: 1203218 - DNA, 15 bp, Homo sapiens
ccagggactctgaat

SEQ ID NO: 1203219 - DNA, 15 bp, Homo sapiens
tccagggactctgaa

SEQ ID NO: 1203220 - DNA, 15 bp, Homo sapiens
ttccagggactctga

SEQ ID NO: 1203221 - DNA, 15 bp, Homo sapiens
cttccagggactctg

SEQ ID NO: 1203222 - DNA, 15 bp, Homo sapiens
ccttccagggactct

SEQ ID NO: 1203223 - DNA, 15 bp, Homo sapiens
tccttccagggactc

SEQ ID NO: 1203224 - DNA, 15 bp, Homo sapiens
gtccttccagggact

SEQ ID NO: 1203225 - DNA, 15 bp, Homo sapiens
agtccttccagggac

SEQ ID NO: 1203226 - DNA, 15 bp, Homo sapiens
tagtccttccaggga

SEQ ID NO: 1203227 - DNA, 15 bp, Homo sapiens
atagtccttccaggg

SEQ ID NO: 1203228 - DNA, 15 bp, Homo sapiens
aatagtccttccagg

SEQ ID NO: 1203229 - DNA, 15 bp, Homo sapiens
caatagtccttccag

SEQ ID NO: 1203230 - DNA, 15 bp, Homo sapiens
ccaatagtccttcca

SEQ ID NO: 1203231 - DNA, 15 bp, Homo sapiens
cccaatagtccttcc

SEQ ID NO: 1203232 - DNA, 15 bp, Homo sapiens
tcccaatagtccttc

SEQ ID NO: 1203233 - DNA, 15 bp, Homo sapiens
atcccaatagtcctt

SEQ ID NO: 1203234 - DNA, 15 bp, Homo sapiens
catcccaatagtcct

SEQ ID NO: 1203235 - DNA, 15 bp, Homo sapiens
tcatcccaatagtcc

SEQ ID NO: 1203236 - DNA, 15 bp, Homo sapiens
ctcatcccaatagtc

SEQ ID NO: 1203237 - DNA, 15 bp, Homo sapiens
gctcatcccaatagt

SEQ ID NO: 1203238 - DNA, 15 bp, Homo sapiens
tgctcatcccaatag

SEQ ID NO: 1203239 - DNA, 15 bp, Homo sapiens
ttgctcatcccaata

SEQ ID NO: 1203240 - DNA, 15 bp, Homo sapiens
cttgctcatcccaat

SEQ ID NO: 1203241 - DNA, 15 bp, Homo sapiens
acttgctcatcccaa

SEQ ID NO: 1203242 - DNA, 15 bp, Homo sapiens
gacttgctcatccca

SEQ ID NO: 1203243 - DNA, 15 bp, Homo sapiens
ggacttgctcatccc

SEQ ID NO: 1203244 - DNA, 15 bp, Homo sapiens
tggacttgctcatcc

SEQ ID NO: 1203245 - DNA, 15 bp, Homo sapiens
ttggacttgctcatc

SEQ ID NO: 1203246 - DNA, 15 bp, Homo sapiens
gttggacttgctcat

SEQ ID NO: 1203247 - DNA, 15 bp, Homo sapiens
ggttggacttgctca

SEQ ID NO: 1203248 - DNA, 15 bp, Homo sapiens
gggttggacttgctc

SEQ ID NO: 1203249 - DNA, 15 bp, Homo sapiens
agggttggacttgct

SEQ ID NO: 1203250 - DNA, 15 bp, Homo sapiens
gagggttggacttgc

SEQ ID NO: 1203251 - DNA, 15 bp, Homo sapiens
ggagggttggacttg

SEQ ID NO: 1203252 - DNA, 15 bp, Homo sapiens
tggagggttggactt

SEQ ID NO: 1203253 - DNA, 15 bp, Homo sapiens
atggagggttggact

SEQ ID NO: 1203254 - DNA, 15 bp, Homo sapiens
catggagggttggac

SEQ ID NO: 1203255 - DNA, 15 bp, Homo sapiens
gcatggagggttgga

SEQ ID NO: 1203256 - DNA, 15 bp, Homo sapiens
agcatggagggttgg

SEQ ID NO: 1203257 - DNA, 15 bp, Homo sapiens
gagcatggagggttg

SEQ ID NO: 1203258 - DNA, 15 bp, Homo sapiens
agagcatggagggtt

SEQ ID NO: 1203259 - DNA, 15 bp, Homo sapiens
cagagcatggagggt

SEQ ID NO: 1203260 - DNA, 15 bp, Homo sapiens
acagagcatggaggg

SEQ ID NO: 1203261 - DNA, 15 bp, Homo sapiens
cacagagcatggagg

SEQ ID NO: 1203262 - DNA, 15 bp, Homo sapiens
gcacagagcatggag

SEQ ID NO: 1203263 - DNA, 15 bp, Homo sapiens
agcacagagcatgga

SEQ ID NO: 1203264 - DNA, 15 bp, Homo sapiens
aagcacagagcatgg

SEQ ID NO: 1203265 - DNA, 15 bp, Homo sapiens
aaagcacagagcatg

SEQ ID NO: 1203266 - DNA, 15 bp, Homo sapiens
gaaagcacagagcat

SEQ ID NO: 1203267 - DNA, 15 bp, Homo sapiens
tgaaagcacagagca

SEQ ID NO: 1203268 - DNA, 15 bp, Homo sapiens
gtgaaagcacagagc

SEQ ID NO: 1203269 - DNA, 15 bp, Homo sapiens
cgtgaaagcacagag

SEQ ID NO: 1203270 - DNA, 15 bp, Homo sapiens
acgtgaaagcacaga

SEQ ID NO: 1203271 - DNA, 15 bp, Homo sapiens
tacgtgaaagcacag

SEQ ID NO: 1203272 - DNA, 15 bp, Homo sapiens
ttacgtgaaagcaca

SEQ ID NO: 1203273 - DNA, 15 bp, Homo sapiens
attacgtgaaagcac

SEQ ID NO: 1203274 - DNA, 15 bp, Homo sapiens
gattacgtgaaagca

SEQ ID NO: 1203275 - DNA, 15 bp, Homo sapiens
agattacgtgaaagc

SEQ ID NO: 1203276 - DNA, 15 bp, Homo sapiens
cagattacgtgaaag

SEQ ID NO: 1203277 - DNA, 15 bp, Homo sapiens
tcagattacgtgaaa

SEQ ID NO: 1203278 - DNA, 15 bp, Homo sapiens
atcagattacgtgaa

SEQ ID NO: 1203279 - DNA, 15 bp, Homo sapiens
catcagattacgtga

SEQ ID NO: 1203280 - DNA, 15 bp, Homo sapiens
acatcagattacgtg

SEQ ID NO: 1203281 - DNA, 15 bp, Homo sapiens
tacatcagattacgt

SEQ ID NO: 1203282 - DNA, 15 bp, Homo sapiens
atacatcagattacg

SEQ ID NO: 1203283 - DNA, 15 bp, Homo sapiens
aatacatcagattac

SEQ ID NO: 1203284 - DNA, 15 bp, Homo sapiens
gaatacatcagatta

SEQ ID NO: 1203285 - DNA, 15 bp, Homo sapiens
agaatacatcagatt

SEQ ID NO: 1203286 - DNA, 15 bp, Homo sapiens
aagaatacatcagat

SEQ ID NO: 1203287 - DNA, 15 bp, Homo sapiens
gaagaatacatcaga

SEQ ID NO: 1203288 - DNA, 15 bp, Homo sapiens
tgaagaatacatcag

SEQ ID NO: 1203289 - DNA, 15 bp, Homo sapiens
gtgaagaatacatca

SEQ ID NO: 1203290 - DNA, 15 bp, Homo sapiens
tgtgaagaatacatc

SEQ ID NO: 1203291 - DNA, 15 bp, Homo sapiens
atgtgaagaatacat

SEQ ID NO: 1203292 - DNA, 15 bp, Homo sapiens
gatgtgaagaataca

SEQ ID NO: 1203293 - DNA, 15 bp, Homo sapiens
tgatgtgaagaatac

SEQ ID NO: 1203294 - DNA, 15 bp, Homo sapiens
ttgatgtgaagaata

SEQ ID NO: 1203295 - DNA, 15 bp, Homo sapiens
tttgatgtgaagaat

SEQ ID NO: 1203296 - DNA, 15 bp, Homo sapiens
gtttgatgtgaagaa

SEQ ID NO: 1203297 - DNA, 15 bp, Homo sapiens
ggtttgatgtgaaga

SEQ ID NO: 1203298 - DNA, 15 bp, Homo sapiens
gggtttgatgtgaag

SEQ ID NO: 1203299 - DNA, 15 bp, Homo sapiens
tgggtttgatgtgaa

SEQ ID NO: 1203300 - DNA, 15 bp, Homo sapiens
ctgggtttgatgtga

SEQ ID NO: 1203301 - DNA, 15 bp, Homo sapiens
cctgggtttgatgtg

SEQ ID NO: 1203302 - DNA, 15 bp, Homo sapiens
tcctgggtttgatgt

SEQ ID NO: 1203303 - DNA, 15 bp, Homo sapiens
ctcctgggtttgatg

SEQ ID NO: 1203304 - DNA, 15 bp, Homo sapiens
tctcctgggtttgat

SEQ ID NO: 1203305 - DNA, 15 bp, Homo sapiens
ttctcctgggtttga

SEQ ID NO: 1203306 - DNA, 15 bp, Homo sapiens
tttctcctgggtttg

SEQ ID NO: 1203307 - DNA, 15 bp, Homo sapiens
atttctcctgggttt

SEQ ID NO: 1203308 - DNA, 15 bp, Homo sapiens
catttctcctgggtt

SEQ ID NO: 1203309 - DNA, 15 bp, Homo sapiens
gcatttctcctgggt

SEQ ID NO: 1203310 - DNA, 15 bp, Homo sapiens
tgcatttctcctggg

SEQ ID NO: 1203311 - DNA, 15 bp, Homo sapiens
atgcatttctcctgg

SEQ ID NO: 1203312 - DNA, 15 bp, Homo sapiens
aatgcatttctcctg

SEQ ID NO: 1203313 - DNA, 15 bp, Homo sapiens
gaatgcatttctcct

SEQ ID NO: 1203314 - DNA, 15 bp, Homo sapiens
agaatgcatttctcc

SEQ ID NO: 1203315 - DNA, 15 bp, Homo sapiens
aagaatgcatttctc

SEQ ID NO: 1203316 - DNA, 15 bp, Homo sapiens
taagaatgcatttct

SEQ ID NO: 1203317 - DNA, 15 bp, Homo sapiens
ataagaatgcatttc

SEQ ID NO: 1203318 - DNA, 15 bp, Homo sapiens
aataagaatgcattt

SEQ ID NO: 1203319 - DNA, 15 bp, Homo sapiens
caataagaatgcatt

SEQ ID NO: 1203320 - DNA, 15 bp, Homo sapiens
acaataagaatgcat

SEQ ID NO: 1203321 - DNA, 15 bp, Homo sapiens
tacaataagaatgca

SEQ ID NO: 1203322 - DNA, 15 bp, Homo sapiens
atacaataagaatgc

SEQ ID NO: 1203323 - DNA, 15 bp, Homo sapiens
aatacaataagaatg

SEQ ID NO: 1203324 - DNA, 15 bp, Homo sapiens
aaatacaataagaat

SEQ ID NO: 1203325 - DNA, 15 bp, Homo sapiens
aaaatacaataagaa

SEQ ID NO: 1203326 - DNA, 15 bp, Homo sapiens
aaaaatacaataaga

SEQ ID NO: 1203327 - DNA, 15 bp, Homo sapiens
aaaaaatacaataag

SEQ ID NO: 1203328 - DNA, 15 bp, Homo sapiens
taaaaaatacaataa

SEQ ID NO: 1203329 - DNA, 15 bp, Homo sapiens
ataaaaaatacaata

SEQ ID NO: 1203330 - DNA, 15 bp, Homo sapiens
tataaaaaatacaat

SEQ ID NO: 1203331 - DNA, 15 bp, Homo sapiens
ctataaaaaatacaa

SEQ ID NO: 1203332 - DNA, 15 bp, Homo sapiens
tctataaaaaataca

SEQ ID NO: 1203333 - DNA, 15 bp, Homo sapiens
ctctataaaaaatac

SEQ ID NO: 1203334 - DNA, 15 bp, Homo sapiens
cctctataaaaaata

SEQ ID NO: 1203335 - DNA, 15 bp, Homo sapiens
tcctctataaaaaat

SEQ ID NO: 1203336 - DNA, 15 bp, Homo sapiens
ctcctctataaaaaa

SEQ ID NO: 1203337 - DNA, 15 bp, Homo sapiens
tctcctctataaaaa

SEQ ID NO: 1203338 - DNA, 15 bp, Homo sapiens
ttctcctctataaaa

SEQ ID NO: 1203339 - DNA, 15 bp, Homo sapiens
tttctcctctataaa

SEQ ID NO: 1203340 - DNA, 15 bp, Homo sapiens
ttttctcctctataa

SEQ ID NO: 1203341 - DNA, 15 bp, Homo sapiens
gttttctcctctata

SEQ ID NO: 1203342 - DNA, 15 bp, Homo sapiens
tgttttctcctctat

SEQ ID NO: 1203343 - DNA, 15 bp, Homo sapiens
ttgttttctcctcta

SEQ ID NO: 1203344 - DNA, 15 bp, Homo sapiens
tttgttttctcctct

SEQ ID NO: 1203345 - DNA, 15 bp, Homo sapiens
ctttgttttctcctc

SEQ ID NO: 1203346 - DNA, 15 bp, Homo sapiens
actttgttttctcct

SEQ ID NO: 1203347 - DNA, 15 bp, Homo sapiens
aactttgttttctcc

SEQ ID NO: 1203348 - DNA, 15 bp, Homo sapiens
gaactttgttttctc

SEQ ID NO: 1203349 - DNA, 15 bp, Homo sapiens
ggaactttgttttct

SEQ ID NO: 1203350 - DNA, 15 bp, Homo sapiens
tggaactttgttttc

SEQ ID NO: 1203351 - DNA, 15 bp, Homo sapiens
atggaactttgtttt

SEQ ID NO: 1203352 - DNA, 15 bp, Homo sapiens
tatggaactttgttt

SEQ ID NO: 1203353 - DNA, 15 bp, Homo sapiens
ttatggaactttgtt

SEQ ID NO: 1203354 - DNA, 15 bp, Homo sapiens
gttatggaactttgt

SEQ ID NO: 1203355 - DNA, 15 bp, Homo sapiens
agttatggaactttg

SEQ ID NO: 1203356 - DNA, 15 bp, Homo sapiens
aagttatggaacttt

SEQ ID NO: 1203357 - DNA, 15 bp, Homo sapiens
caagttatggaactt

SEQ ID NO: 1203358 - DNA, 15 bp, Homo sapiens
gcaagttatggaact

SEQ ID NO: 1203359 - DNA, 15 bp, Homo sapiens
ggcaagttatggaac

SEQ ID NO: 1203360 - DNA, 15 bp, Homo sapiens
gggcaagttatggaa

SEQ ID NO: 1203361 - DNA, 15 bp, Homo sapiens
tgggcaagttatgga

SEQ ID NO: 1203362 - DNA, 15 bp, Homo sapiens
ttgggcaagttatgg

SEQ ID NO: 1203363 - DNA, 15 bp, Homo sapiens
cttgggcaagttatg

SEQ ID NO: 1203364 - DNA, 15 bp, Homo sapiens
tcttgggcaagttat

SEQ ID NO: 1203365 - DNA, 15 bp, Homo sapiens
atcttgggcaagtta

SEQ ID NO: 1203366 - DNA, 15 bp, Homo sapiens
tatcttgggcaagtt

SEQ ID NO: 1203367 - DNA, 15 bp, Homo sapiens
ttatcttgggcaagt

SEQ ID NO: 1203368 - DNA, 15 bp, Homo sapiens
attatcttgggcaag

SEQ ID NO: 1203369 - DNA, 15 bp, Homo sapiens
cattatcttgggcaa

SEQ ID NO: 1203370 - DNA, 15 bp, Homo sapiens
gcattatcttgggca

SEQ ID NO: 1203371 - DNA, 15 bp, Homo sapiens
ggcattatcttgggc

SEQ ID NO: 1203372 - DNA, 15 bp, Homo sapiens
tggcattatcttggg

SEQ ID NO: 1203373 - DNA, 15 bp, Homo sapiens
atggcattatcttgg

SEQ ID NO: 1203374 - DNA, 15 bp, Homo sapiens
aatggcattatcttg

SEQ ID NO: 1203375 - DNA, 15 bp, Homo sapiens
taatggcattatctt

SEQ ID NO: 1203376 - DNA, 15 bp, Homo sapiens
ctaatggcattatct

SEQ ID NO: 1203377 - DNA, 15 bp, Homo sapiens
gctaatggcattatc

SEQ ID NO: 1203378 - DNA, 15 bp, Homo sapiens
tgctaatggcattat

SEQ ID NO: 1203379 - DNA, 15 bp, Homo sapiens
ttgctaatggcatta

SEQ ID NO: 1203380 - DNA, 15 bp, Homo sapiens
tttgctaatggcatt

SEQ ID NO: 1203381 - DNA, 15 bp, Homo sapiens
atttgctaatggcat

SEQ ID NO: 1203382 - DNA, 15 bp, Homo sapiens
catttgctaatggca

SEQ ID NO: 1203383 - DNA, 15 bp, Homo sapiens
ccatttgctaatggc

SEQ ID NO: 1203384 - DNA, 15 bp, Homo sapiens
gccatttgctaatgg

SEQ ID NO: 1203385 - DNA, 15 bp, Homo sapiens
tgccatttgctaatg

SEQ ID NO: 1203386 - DNA, 15 bp, Homo sapiens
ctgccatttgctaat

SEQ ID NO: 1203387 - DNA, 15 bp, Homo sapiens
cctgccatttgctaa

SEQ ID NO: 1203388 - DNA, 15 bp, Homo sapiens
ccctgccatttgcta

SEQ ID NO: 1203389 - DNA, 15 bp, Homo sapiens
gccctgccatttgct

SEQ ID NO: 1203390 - DNA, 15 bp, Homo sapiens
ggccctgccatttgc

SEQ ID NO: 1203391 - DNA, 15 bp, Homo sapiens
tggccctgccatttg

SEQ ID NO: 1203392 - DNA, 15 bp, Homo sapiens
ctggccctgccattt

SEQ ID NO: 1203393 - DNA, 15 bp, Homo sapiens
cctggccctgccatt

SEQ ID NO: 1203394 - DNA, 15 bp, Homo sapiens
tcctggccctgccat

SEQ ID NO: 1203395 - DNA, 15 bp, Homo sapiens
atcctggccctgcca

SEQ ID NO: 1203396 - DNA, 15 bp, Homo sapiens
aatcctggccctgcc

SEQ ID NO: 1203397 - DNA, 15 bp, Homo sapiens
caatcctggccctgc

SEQ ID NO: 1203398 - DNA, 15 bp, Homo sapiens
tcaatcctggccctg

SEQ ID NO: 1203399 - DNA, 15 bp, Homo sapiens
ctcaatcctggccct

SEQ ID NO: 1203400 - DNA, 15 bp, Homo sapiens
tctcaatcctggccc

SEQ ID NO: 1203401 - DNA, 15 bp, Homo sapiens
ctctcaatcctggcc

SEQ ID NO: 1203402 - DNA, 15 bp, Homo sapiens
cctctcaatcctggc

SEQ ID NO: 1203403 - DNA, 15 bp, Homo sapiens
tcctctcaatcctgg

SEQ ID NO: 1203404 - DNA, 15 bp, Homo sapiens
gtcctctcaatcctg

SEQ ID NO: 1203405 - DNA, 15 bp, Homo sapiens
agtcctctcaatcct

SEQ ID NO: 1203406 - DNA, 15 bp, Homo sapiens
gagtcctctcaatcc

SEQ ID NO: 1203407 - DNA, 15 bp, Homo sapiens
agagtcctctcaatc

SEQ ID NO: 1203408 - DNA, 15 bp, Homo sapiens
gagagtcctctcaat

SEQ ID NO: 1203409 - DNA, 15 bp, Homo sapiens
agagagtcctctcaa

SEQ ID NO: 1203410 - DNA, 15 bp, Homo sapiens
cagagagtcctctca

SEQ ID NO: 1203411 - DNA, 15 bp, Homo sapiens
ccagagagtcctctc

SEQ ID NO: 1203412 - DNA, 15 bp, Homo sapiens
cccagagagtcctct

SEQ ID NO: 1203413 - DNA, 15 bp, Homo sapiens
gcccagagagtcctc

SEQ ID NO: 1203414 - DNA, 15 bp, Homo sapiens
agcccagagagtcct

SEQ ID NO: 1203415 - DNA, 15 bp, Homo sapiens
gagcccagagagtcc

SEQ ID NO: 1203416 - DNA, 15 bp, Homo sapiens
agagcccagagagtc

SEQ ID NO: 1203417 - DNA, 15 bp, Homo sapiens
gagagcccagagagt

SEQ ID NO: 1203418 - DNA, 15 bp, Homo sapiens
agagagcccagagag

SEQ ID NO: 1203419 - DNA, 15 bp, Homo sapiens
cagagagcccagaga

SEQ ID NO: 1203420 - DNA, 15 bp, Homo sapiens
tcagagagcccagag

SEQ ID NO: 1203421 - DNA, 15 bp, Homo sapiens
ttcagagagcccaga

SEQ ID NO: 1203422 - DNA, 15 bp, Homo sapiens
cttcagagagcccag

SEQ ID NO: 1203423 - DNA, 15 bp, Homo sapiens
acttcagagagccca

SEQ ID NO: 1203424 - DNA, 15 bp, Homo sapiens
cacttcagagagccc

SEQ ID NO: 1203425 - DNA, 15 bp, Homo sapiens
ccacttcagagagcc

SEQ ID NO: 1203426 - DNA, 15 bp, Homo sapiens
accacttcagagagc

SEQ ID NO: 1203427 - DNA, 15 bp, Homo sapiens
gaccacttcagagag

SEQ ID NO: 1203428 - DNA, 15 bp, Homo sapiens
ggaccacttcagaga

SEQ ID NO: 1203429 - DNA, 15 bp, Homo sapiens
tggaccacttcagag

SEQ ID NO: 1203430 - DNA, 15 bp, Homo sapiens
ctggaccacttcaga

SEQ ID NO: 1203431 - DNA, 15 bp, Homo sapiens
cctggaccacttcag

SEQ ID NO: 1203432 - DNA, 15 bp, Homo sapiens
tcctggaccacttca

SEQ ID NO: 1203433 - DNA, 15 bp, Homo sapiens
ttcctggaccacttc

SEQ ID NO: 1203434 - DNA, 15 bp, Homo sapiens
cttcctggaccactt

SEQ ID NO: 1203435 - DNA, 15 bp, Homo sapiens
gcttcctggaccact

SEQ ID NO: 1203436 - DNA, 15 bp, Homo sapiens
ggcttcctggaccac

SEQ ID NO: 1203437 - DNA, 15 bp, Homo sapiens
aggcttcctggacca

SEQ ID NO: 1203438 - DNA, 15 bp, Homo sapiens
caggcttcctggacc

SEQ ID NO: 1203439 - DNA, 15 bp, Homo sapiens
tcaggcttcctggac

SEQ ID NO: 1203440 - DNA, 15 bp, Homo sapiens
ctcaggcttcctgga

SEQ ID NO: 1203441 - DNA, 15 bp, Homo sapiens
gctcaggcttcctgg

SEQ ID NO: 1203442 - DNA, 15 bp, Homo sapiens
ggctcaggcttcctg

SEQ ID NO: 1203443 - DNA, 15 bp, Homo sapiens
aggctcaggcttcct

SEQ ID NO: 1203444 - DNA, 15 bp, Homo sapiens
aaggctcaggcttcc

SEQ ID NO: 1203445 - DNA, 15 bp, Homo sapiens
taaggctcaggcttc

SEQ ID NO: 1203446 - DNA, 15 bp, Homo sapiens
ctaaggctcaggctt

SEQ ID NO: 1203447 - DNA, 15 bp, Homo sapiens
gctaaggctcaggct

SEQ ID NO: 1203448 - DNA, 15 bp, Homo sapiens
ggctaaggctcaggc

SEQ ID NO: 1203449 - DNA, 15 bp, Homo sapiens
tggctaaggctcagg

SEQ ID NO: 1203450 - DNA, 15 bp, Homo sapiens
ttggctaaggctcag

SEQ ID NO: 1203451 - DNA, 15 bp, Homo sapiens
gttggctaaggctca

SEQ ID NO: 1203452 - DNA, 15 bp, Homo sapiens
tgttggctaaggctc

SEQ ID NO: 1203453 - DNA, 15 bp, Homo sapiens
ctgttggctaaggct

SEQ ID NO: 1203454 - DNA, 15 bp, Homo sapiens
gctgttggctaaggc

SEQ ID NO: 1203455 - DNA, 15 bp, Homo sapiens
ggctgttggctaagg

SEQ ID NO: 1203456 - DNA, 15 bp, Homo sapiens
gggctgttggctaag

SEQ ID NO: 1203457 - DNA, 15 bp, Homo sapiens
ggggctgttggctaa

SEQ ID NO: 1203458 - DNA, 15 bp, Homo sapiens
cggggctgttggcta

SEQ ID NO: 1203459 - DNA, 15 bp, Homo sapiens
gcggggctgttggct

SEQ ID NO: 1203460 - DNA, 15 bp, Homo sapiens
tgcggggctgttggc

SEQ ID NO: 1203461 - DNA, 15 bp, Homo sapiens
ctgcggggctgttgg

SEQ ID NO: 1203462 - DNA, 15 bp, Homo sapiens
tctgcggggctgttg

SEQ ID NO: 1203463 - DNA, 15 bp, Homo sapiens
gtctgcggggctgtt

SEQ ID NO: 1203464 - DNA, 15 bp, Homo sapiens
tgtctgcggggctgt

SEQ ID NO: 1203465 - DNA, 15 bp, Homo sapiens
atgtctgcggggctg

SEQ ID NO: 1203466 - DNA, 15 bp, Homo sapiens
tatgtctgcggggct

SEQ ID NO: 1203467 - DNA, 15 bp, Homo sapiens
ctatgtctgcggggc

SEQ ID NO: 1203468 - DNA, 15 bp, Homo sapiens
gctatgtctgcgggg

SEQ ID NO: 1203469 - DNA, 15 bp, Homo sapiens
ggctatgtctgcggg

SEQ ID NO: 1203470 - DNA, 15 bp, Homo sapiens
aggctatgtctgcgg

SEQ ID NO: 1203471 - DNA, 15 bp, Homo sapiens
caggctatgtctgcg

SEQ ID NO: 1203472 - DNA, 15 bp, Homo sapiens
gcaggctatgtctgc

SEQ ID NO: 1203473 - DNA, 15 bp, Homo sapiens
agcaggctatgtctg

SEQ ID NO: 1203474 - DNA, 15 bp, Homo sapiens
gagcaggctatgtct

SEQ ID NO: 1203475 - DNA, 15 bp, Homo sapiens
tgagcaggctatgtc

SEQ ID NO: 1203476 - DNA, 15 bp, Homo sapiens
gtgagcaggctatgt

SEQ ID NO: 1203477 - DNA, 15 bp, Homo sapiens
tgtgagcaggctatg

SEQ ID NO: 1203478 - DNA, 15 bp, Homo sapiens
atgtgagcaggctat

SEQ ID NO: 1203479 - DNA, 15 bp, Homo sapiens
aatgtgagcaggcta

SEQ ID NO: 1203480 - DNA, 15 bp, Homo sapiens
caatgtgagcaggct

SEQ ID NO: 1203481 - DNA, 15 bp, Homo sapiens
ccaatgtgagcaggc

SEQ ID NO: 1203482 - DNA, 15 bp, Homo sapiens
gccaatgtgagcagg

SEQ ID NO: 1203483 - DNA, 15 bp, Homo sapiens
ggccaatgtgagcag

SEQ ID NO: 1203484 - DNA, 15 bp, Homo sapiens
aggccaatgtgagca

SEQ ID NO: 1203485 - DNA, 15 bp, Homo sapiens
aaggccaatgtgagc

SEQ ID NO: 1203486 - DNA, 15 bp, Homo sapiens
caaggccaatgtgag

SEQ ID NO: 1203487 - DNA, 15 bp, Homo sapiens
gcaaggccaatgtga

SEQ ID NO: 1203488 - DNA, 15 bp, Homo sapiens
agcaaggccaatgtg

SEQ ID NO: 1203489 - DNA, 15 bp, Homo sapiens
aagcaaggccaatgt

SEQ ID NO: 1203490 - DNA, 15 bp, Homo sapiens
aaagcaaggccaatg

SEQ ID NO: 1203491 - DNA, 15 bp, Homo sapiens
taaagcaaggccaat

SEQ ID NO: 1203492 - DNA, 15 bp, Homo sapiens
ataaagcaaggccaa

SEQ ID NO: 1203493 - DNA, 15 bp, Homo sapiens
aataaagcaaggcca

SEQ ID NO: 1203494 - DNA, 15 bp, Homo sapiens
aaataaagcaaggcc

SEQ ID NO: 1203495 - DNA, 15 bp, Homo sapiens
gaaataaagcaaggc

SEQ ID NO: 1203496 - DNA, 15 bp, Homo sapiens
ggaaataaagcaagg

SEQ ID NO: 1203497 - DNA, 15 bp, Homo sapiens
tggaaataaagcaag

SEQ ID NO: 1203498 - DNA, 15 bp, Homo sapiens
ctggaaataaagcaa

SEQ ID NO: 1203499 - DNA, 15 bp, Homo sapiens
cctggaaataaagca

SEQ ID NO: 1203500 - DNA, 15 bp, Homo sapiens
acctggaaataaagc

SEQ ID NO: 1203501 - DNA, 15 bp, Homo sapiens
aacctggaaataaag

SEQ ID NO: 1203502 - DNA, 15 bp, Homo sapiens
gaacctggaaataaa

SEQ ID NO: 1203503 - DNA, 15 bp, Homo sapiens
agaacctggaaataa

SEQ ID NO: 1203504 - DNA, 15 bp, Homo sapiens
aagaacctggaaata

SEQ ID NO: 1203505 - DNA, 15 bp, Homo sapiens
gaagaacctggaaat

SEQ ID NO: 1203506 - DNA, 15 bp, Homo sapiens
ggaagaacctggaaa

SEQ ID NO: 1203507 - DNA, 15 bp, Homo sapiens
tggaagaacctggaa

SEQ ID NO: 1203508 - DNA, 15 bp, Homo sapiens
ttggaagaacctgga

SEQ ID NO: 1203509 - DNA, 15 bp, Homo sapiens
cttggaagaacctgg

SEQ ID NO: 1203510 - DNA, 15 bp, Homo sapiens
ccttggaagaacctg

SEQ ID NO: 1203511 - DNA, 15 bp, Homo sapiens
tccttggaagaacct

SEQ ID NO: 1203512 - DNA, 15 bp, Homo sapiens
gtccttggaagaacc

SEQ ID NO: 1203513 - DNA, 15 bp, Homo sapiens
tgtccttggaagaac

SEQ ID NO: 1203514 - DNA, 15 bp, Homo sapiens
ctgtccttggaagaa

SEQ ID NO: 1203515 - DNA, 15 bp, Homo sapiens
tctgtccttggaaga

SEQ ID NO: 1203516 - DNA, 15 bp, Homo sapiens
ttctgtccttggaag

SEQ ID NO: 1203517 - DNA, 15 bp, Homo sapiens
cttctgtccttggaa

SEQ ID NO: 1203518 - DNA, 15 bp, Homo sapiens
gcttctgtccttgga

SEQ ID NO: 1203519 - DNA, 15 bp, Homo sapiens
tgcttctgtccttgg

SEQ ID NO: 1203520 - DNA, 15 bp, Homo sapiens
ctgcttctgtccttg

SEQ ID NO: 1203521 - DNA, 15 bp, Homo sapiens
tctgcttctgtcctt

SEQ ID NO: 1203522 - DNA, 15 bp, Homo sapiens
atctgcttctgtcct

SEQ ID NO: 1203523 - DNA, 15 bp, Homo sapiens
gatctgcttctgtcc

SEQ ID NO: 1203524 - DNA, 15 bp, Homo sapiens
agatctgcttctgtc

SEQ ID NO: 1203525 - DNA, 15 bp, Homo sapiens
cagatctgcttctgt

SEQ ID NO: 1203526 - DNA, 15 bp, Homo sapiens
gcagatctgcttctg

SEQ ID NO: 1203527 - DNA, 15 bp, Homo sapiens
ggcagatctgcttct

SEQ ID NO: 1203528 - DNA, 15 bp, Homo sapiens
tggcagatctgcttc

SEQ ID NO: 1203529 - DNA, 15 bp, Homo sapiens
atggcagatctgctt

SEQ ID NO: 1203530 - DNA, 15 bp, Homo sapiens
catggcagatctgct

SEQ ID NO: 1203531 - DNA, 15 bp, Homo sapiens
gcatggcagatctgc

SEQ ID NO: 1203532 - DNA, 15 bp, Homo sapiens
agcatggcagatctg

SEQ ID NO: 1203533 - DNA, 15 bp, Homo sapiens
tagcatggcagatct

SEQ ID NO: 1203534 - DNA, 15 bp, Homo sapiens
atagcatggcagatc

SEQ ID NO: 1203535 - DNA, 15 bp, Homo sapiens
gatagcatggcagat

SEQ ID NO: 1203536 - DNA, 15 bp, Homo sapiens
agatagcatggcaga

SEQ ID NO: 1203537 - DNA, 15 bp, Homo sapiens
gagatagcatggcag

SEQ ID NO: 1203538 - DNA, 15 bp, Homo sapiens
ggagatagcatggca

SEQ ID NO: 1203539 - DNA, 15 bp, Homo sapiens
aggagatagcatggc

SEQ ID NO: 1203540 - DNA, 15 bp, Homo sapiens
aaggagatagcatgg

SEQ ID NO: 1203541 - DNA, 15 bp, Homo sapiens
aaaggagatagcatg

SEQ ID NO: 1203542 - DNA, 15 bp, Homo sapiens
taaaggagatagcat

SEQ ID NO: 1203543 - DNA, 15 bp, Homo sapiens
ataaaggagatagca

SEQ ID NO: 1203544 - DNA, 15 bp, Homo sapiens
aataaaggagatagc

SEQ ID NO: 1203545 - DNA, 15 bp, Homo sapiens
taataaaggagatag

SEQ ID NO: 1203546 - DNA, 15 bp, Homo sapiens
ataataaaggagata

SEQ ID NO: 1203547 - DNA, 15 bp, Homo sapiens
gataataaaggagat

SEQ ID NO: 1203548 - DNA, 15 bp, Homo sapiens
tgataataaaggaga

SEQ ID NO: 1203549 - DNA, 15 bp, Homo sapiens
atgataataaaggag

SEQ ID NO: 1203550 - DNA, 15 bp, Homo sapiens
gatgataataaagga

SEQ ID NO: 1203551 - DNA, 15 bp, Homo sapiens
tgatgataataaagg

SEQ ID NO: 1203552 - DNA, 15 bp, Homo sapiens
ctgatgataataaag

SEQ ID NO: 1203553 - DNA, 15 bp, Homo sapiens
gctgatgataataaa

SEQ ID NO: 1203554 - DNA, 15 bp, Homo sapiens
tgctgatgataataa

SEQ ID NO: 1203555 - DNA, 15 bp, Homo sapiens
gtgctgatgataata

SEQ ID NO: 1203556 - DNA, 15 bp, Homo sapiens
agtgctgatgataat

SEQ ID NO: 1203557 - DNA, 15 bp, Homo sapiens
gaagtgctgatgata

SEQ ID NO: 1203558 - DNA, 15 bp, Homo sapiens
ggaagtgctgatgat

SEQ ID NO: 1203559 - DNA, 15 bp, Homo sapiens
aggaagtgctgatga

SEQ ID NO: 1203560 - DNA, 15 bp, Homo sapiens
aaggaagtgctgatg

SEQ ID NO: 1203561 - DNA, 15 bp, Homo sapiens
gaaggaagtgctgat

SEQ ID NO: 1203562 - DNA, 15 bp, Homo sapiens
ggaaggaagtgctga

SEQ ID NO: 1203563 - DNA, 15 bp, Homo sapiens
gggaaggaagtgctg

SEQ ID NO: 1203564 - DNA, 15 bp, Homo sapiens
tgggaaggaagtgct

SEQ ID NO: 1203565 - DNA, 15 bp, Homo sapiens
gtgggaaggaagtgc

SEQ ID NO: 1203566 - DNA, 15 bp, Homo sapiens
agtgggaaggaagtg

SEQ ID NO: 1203567 - DNA, 15 bp, Homo sapiens
cagtgggaaggaagt

SEQ ID NO: 1203568 - DNA, 15 bp, Homo sapiens
tcagtgggaaggaag

SEQ ID NO: 1203569 - DNA, 15 bp, Homo sapiens
ttcagtgggaaggaa

SEQ ID NO: 1203570 - DNA, 15 bp, Homo sapiens
attcagtgggaagga

SEQ ID NO: 1203571 - DNA, 15 bp, Homo sapiens
aattcagtgggaagg

SEQ ID NO: 1203572 - DNA, 15 bp, Homo sapiens
taattcagtgggaag

SEQ ID NO: 1203573 - DNA, 15 bp, Homo sapiens
gtaattcagtgggaa

SEQ ID NO: 1203574 - DNA, 15 bp, Homo sapiens
agtaattcagtggga

SEQ ID NO: 1203575 - DNA, 15 bp, Homo sapiens
aagtaattcagtggg

SEQ ID NO: 1203576 - DNA, 15 bp, Homo sapiens
taagtaattcagtgg

SEQ ID NO: 1203577 - DNA, 15 bp, Homo sapiens
ataagtaattcagtg

SEQ ID NO: 1203578 - DNA, 15 bp, Homo sapiens
gataagtaattcagt

SEQ ID NO: 1203579 - DNA, 15 bp, Homo sapiens
tgataagtaattcag

SEQ ID NO: 1203580 - DNA, 15 bp, Homo sapiens
ctgataagtaattca

SEQ ID NO: 1203581 - DNA, 15 bp, Homo sapiens
cctgataagtaattc

SEQ ID NO: 1203582 - DNA, 15 bp, Homo sapiens
tcctgataagtaatt

SEQ ID NO: 1203583 - DNA, 15 bp, Homo sapiens
atcctgataagtaat

SEQ ID NO: 1203584 - DNA, 15 bp, Homo sapiens
aatcctgataagtaa

SEQ ID NO: 1203585 - DNA, 15 bp, Homo sapiens
aaatcctgataagta

SEQ ID NO: 1203586 - DNA, 15 bp, Homo sapiens
aaaatcctgataagt

SEQ ID NO: 1203587 - DNA, 15 bp, Homo sapiens
taaaatcctgataag

SEQ ID NO: 1203588 - DNA, 15 bp, Homo sapiens
gtaaaatcctgataa

SEQ ID NO: 1203589 - DNA, 15 bp, Homo sapiens
tgtaaaatcctgata

SEQ ID NO: 1203590 - DNA, 15 bp, Homo sapiens
gtgtaaaatcctgat

SEQ ID NO: 1203591 - DNA, 15 bp, Homo sapiens
cgtgtaaaatcctga

SEQ ID NO: 1203592 - DNA, 15 bp, Homo sapiens
gcgtgtaaaatcctg

SEQ ID NO: 1203593 - DNA, 15 bp, Homo sapiens
agcgtgtaaaatcct

SEQ ID NO: 1203594 - DNA, 15 bp, Homo sapiens
cagcgtgtaaaatcc

SEQ ID NO: 1203595 - DNA, 15 bp, Homo sapiens
acagcgtgtaaaatc

SEQ ID NO: 1203596 - DNA, 15 bp, Homo sapiens
cacagcgtgtaaaat

SEQ ID NO: 1203597 - DNA, 15 bp, Homo sapiens
ccacagcgtgtaaaa

SEQ ID NO: 1203598 - DNA, 15 bp, Homo sapiens
cccacagcgtgtaaa

SEQ ID NO: 1203599 - DNA, 15 bp, Homo sapiens
gcccacagcgtgtaa

SEQ ID NO: 1203600 - DNA, 15 bp, Homo sapiens
agcccacagcgtgta

SEQ ID NO: 1203601 - DNA, 15 bp, Homo sapiens
cagcccacagcgtgt

SEQ ID NO: 1203602 - DNA, 15 bp, Homo sapiens
ccagcccacagcgtg

SEQ ID NO: 1203603 - DNA, 15 bp, Homo sapiens
tccagcccacagcgt

SEQ ID NO: 1203604 - DNA, 15 bp, Homo sapiens
atccagcccacagcg

SEQ ID NO: 1203605 - DNA, 15 bp, Homo sapiens
aatccagcccacagc

SEQ ID NO: 1203606 - DNA, 15 bp, Homo sapiens
aaatccagcccacag

SEQ ID NO: 1203607 - DNA, 15 bp, Homo sapiens
caaatccagcccaca

SEQ ID NO: 1203608 - DNA, 15 bp, Homo sapiens
gcaaatccagcccac

SEQ ID NO: 1203609 - DNA, 15 bp, Homo sapiens
agcaaatccagccca

SEQ ID NO: 1203610 - DNA, 15 bp, Homo sapiens
gagcaaatccagccc

SEQ ID NO: 1203611 - DNA, 15 bp, Homo sapiens
tgagcaaatccagcc

SEQ ID NO: 1203612 - DNA, 15 bp, Homo sapiens
ctgagcaaatccagc

SEQ ID NO: 1203613 - DNA, 15 bp, Homo sapiens
tctgagcaaatccag

SEQ ID NO: 1203614 - DNA, 15 bp, Homo sapiens
ttctgagcaaatcca

SEQ ID NO: 1203615 - DNA, 15 bp, Homo sapiens
tttctgagcaaatcc

SEQ ID NO: 1203616 - DNA, 15 bp, Homo sapiens
atttctgagcaaatc

SEQ ID NO: 1203617 - DNA, 15 bp, Homo sapiens
catttctgagcaaat

SEQ ID NO: 1203618 - DNA, 15 bp, Homo sapiens
tcatttctgagcaaa

SEQ ID NO: 1203619 - DNA, 15 bp, Homo sapiens
gtcatttctgagcaa

SEQ ID NO: 1203620 - DNA, 15 bp, Homo sapiens
agtcatttctgagca

SEQ ID NO: 1203621 - DNA, 15 bp, Homo sapiens
gagtcatttctgagc

SEQ ID NO: 1203622 - DNA, 15 bp, Homo sapiens
agagtcatttctgag

SEQ ID NO: 1203623 - DNA, 15 bp, Homo sapiens
gagagtcatttctga

SEQ ID NO: 1203624 - DNA, 15 bp, Homo sapiens
tgagagtcatttctg

SEQ ID NO: 1203625 - DNA, 15 bp, Homo sapiens
ttgagagtcatttct

SEQ ID NO: 1203626 - DNA, 15 bp, Homo sapiens
attgagagtcatttc

SEQ ID NO: 1203627 - DNA, 15 bp, Homo sapiens
aattgagagtcattt

SEQ ID NO: 1203628 - DNA, 15 bp, Homo sapiens
caattgagagtcatt

SEQ ID NO: 1203629 - DNA, 15 bp, Homo sapiens
ccaattgagagtcat

SEQ ID NO: 1203630 - DNA, 15 bp, Homo sapiens
tccaattgagagtca

SEQ ID NO: 1203631 - DNA, 15 bp, Homo sapiens
ctccaattgagagtc

SEQ ID NO: 1203632 - DNA, 15 bp, Homo sapiens
tctccaattgagagt

SEQ ID NO: 1203633 - DNA, 15 bp, Homo sapiens
ctctccaattgagag

SEQ ID NO: 1203634 - DNA, 15 bp, Homo sapiens
tctctccaattgaga

SEQ ID NO: 1203635 - DNA, 15 bp, Homo sapiens
ttctctccaattgag

SEQ ID NO: 1203636 - DNA, 15 bp, Homo sapiens
gttctctccaattga

SEQ ID NO: 1203637 - DNA, 15 bp, Homo sapiens
agttctctccaattg

SEQ ID NO: 1203638 - DNA, 15 bp, Homo sapiens
gagttctctccaatt

SEQ ID NO: 1203639 - DNA, 15 bp, Homo sapiens
agagttctctccaat

SEQ ID NO: 1203640 - DNA, 15 bp, Homo sapiens
cagagttctctccaa

SEQ ID NO: 1203641 - DNA, 15 bp, Homo sapiens
gcagagttctctcca

SEQ ID NO: 1203642 - DNA, 15 bp, Homo sapiens
agcagagttctctcc

SEQ ID NO: 1203643 - DNA, 15 bp, Homo sapiens
tagcagagttctctc

SEQ ID NO: 1203644 - DNA, 15 bp, Homo sapiens
atagcagagttctct

SEQ ID NO: 1203645 - DNA, 15 bp, Homo sapiens
gatagcagagttctc

SEQ ID NO: 1203646 - DNA, 15 bp, Homo sapiens
cgatagcagagttct

SEQ ID NO: 1203647 - DNA, 15 bp, Homo sapiens
ccgatagcagagttc

SEQ ID NO: 1203648 - DNA, 15 bp, Homo sapiens
cccgatagcagagtt

SEQ ID NO: 1203649 - DNA, 15 bp, Homo sapiens
tcccgatagcagagt

SEQ ID NO: 1203650 - DNA, 15 bp, Homo sapiens
ctcccgatagcagag

SEQ ID NO: 1203651 - DNA, 15 bp, Homo sapiens
actcccgatagcaga

SEQ ID NO: 1203652 - DNA, 15 bp, Homo sapiens
aactcccgatagcag

SEQ ID NO: 1203653 - DNA, 15 bp, Homo sapiens
gaactcccgatagca

SEQ ID NO: 1203654 - DNA, 15 bp, Homo sapiens
agaactcccgatagc

SEQ ID NO: 1203655 - DNA, 15 bp, Homo sapiens
gagaactcccgatag

SEQ ID NO: 1203656 - DNA, 15 bp, Homo sapiens
ggagaactcccgata

SEQ ID NO: 1203657 - DNA, 15 bp, Homo sapiens
aggagaactcccgat

SEQ ID NO: 1203658 - DNA, 15 bp, Homo sapiens
caggagaactcccga

SEQ ID NO: 1203659 - DNA, 15 bp, Homo sapiens
gcaggagaactcccg

SEQ ID NO: 1203660 - DNA, 15 bp, Homo sapiens
agcaggagaactccc

SEQ ID NO: 1203661 - DNA, 15 bp, Homo sapiens
gagcaggagaactcc

SEQ ID NO: 1203662 - DNA, 15 bp, Homo sapiens
ggagcaggagaactc

SEQ ID NO: 1203663 - DNA, 15 bp, Homo sapiens
gggagcaggagaact

SEQ ID NO: 1203664 - DNA, 15 bp, Homo sapiens
tgggagcaggagaac

SEQ ID NO: 1203665 - DNA, 15 bp, Homo sapiens
ctgggagcaggagaa

SEQ ID NO: 1203666 - DNA, 15 bp, Homo sapiens
cctgggagcaggaga

SEQ ID NO: 1203667 - DNA, 15 bp, Homo sapiens
ccctgggagcaggag

SEQ ID NO: 1203668 - DNA, 15 bp, Homo sapiens
tccctgggagcagga

SEQ ID NO: 1203669 - DNA, 15 bp, Homo sapiens
ctccctgggagcagg

SEQ ID NO: 1203670 - DNA, 15 bp, Homo sapiens
gctccctgggagcag

SEQ ID NO: 1203671 - DNA, 15 bp, Homo sapiens
agctccctgggagca

SEQ ID NO: 1203672 - DNA, 15 bp, Homo sapiens
cagctccctgggagc

SEQ ID NO: 1203673 - DNA, 15 bp, Homo sapiens
acagctccctgggag

SEQ ID NO: 1203674 - DNA, 15 bp, Homo sapiens
cacagctccctggga

SEQ ID NO: 1203675 - DNA, 15 bp, Homo sapiens
gcacagctccctggg

SEQ ID NO: 1203676 - DNA, 15 bp, Homo sapiens
ggcacagctccctgg

SEQ ID NO: 1203677 - DNA, 15 bp, Homo sapiens
gggcacagctccctg

SEQ ID NO: 1203678 - DNA, 15 bp, Homo sapiens
ggggcacagctccct

SEQ ID NO: 1203679 - DNA, 15 bp, Homo sapiens
aggggcacagctccc

SEQ ID NO: 1203680 - DNA, 15 bp, Homo sapiens
aaggggcacagctcc

SEQ ID NO: 1203681 - DNA, 15 bp, Homo sapiens
caaggggcacagctc

SEQ ID NO: 1203682 - DNA, 15 bp, Homo sapiens
tcaaggggcacagct

SEQ ID NO: 1203683 - DNA, 15 bp, Homo sapiens
ttcaaggggcacagc

SEQ ID NO: 1203684 - DNA, 15 bp, Homo sapiens
cttcaaggggcacag

SEQ ID NO: 1203685 - DNA, 15 bp, Homo sapiens
ccttcaaggggcaca

SEQ ID NO: 1203686 - DNA, 15 bp, Homo sapiens
tccttcaaggggcac

SEQ ID NO: 1203687 - DNA, 15 bp, Homo sapiens
ctccttcaaggggca

SEQ ID NO: 1203688 - DNA, 15 bp, Homo sapiens
cctccttcaaggggc

SEQ ID NO: 1203689 - DNA, 15 bp, Homo sapiens
gcctccttcaagggg

SEQ ID NO: 1203690 - DNA, 15 bp, Homo sapiens
tgcctccttcaaggg

SEQ ID NO: 1203691 - DNA, 15 bp, Homo sapiens
atgcctccttcaagg

SEQ ID NO: 1203692 - DNA, 15 bp, Homo sapiens
catgcctccttcaag

SEQ ID NO: 1203693 - DNA, 15 bp, Homo sapiens
acatgcctccttcaa

SEQ ID NO: 1203694 - DNA, 15 bp, Homo sapiens
gacatgcctccttca

SEQ ID NO: 1203695 - DNA, 15 bp, Homo sapiens
ggacatgcctccttc

SEQ ID NO: 1203696 - DNA, 15 bp, Homo sapiens
tggacatgcctcctt

SEQ ID NO: 1203697 - DNA, 15 bp, Homo sapiens
gtggacatgcctcct

SEQ ID NO: 1203698 - DNA, 15 bp, Homo sapiens
ggtggacatgcctcc

SEQ ID NO: 1203699 - DNA, 15 bp, Homo sapiens
aggtggacatgcctc

SEQ ID NO: 1203700 - DNA, 15 bp, Homo sapiens
caggtggacatgcct

SEQ ID NO: 1203701 - DNA, 15 bp, Homo sapiens
acaggtggacatgcc

SEQ ID NO: 1203702 - DNA, 15 bp, Homo sapiens
gacaggtggacatgc

SEQ ID NO: 1203703 - DNA, 15 bp, Homo sapiens
tgacaggtggacatg

SEQ ID NO: 1203704 - DNA, 15 bp, Homo sapiens
atgacaggtggacat

SEQ ID NO: 1203705 - DNA, 15 bp, Homo sapiens
aatgacaggtggaca

SEQ ID NO: 1203706 - DNA, 15 bp, Homo sapiens
caatgacaggtggac

SEQ ID NO: 1203707 - DNA, 15 bp, Homo sapiens
ccaatgacaggtgga

SEQ ID NO: 1203708 - DNA, 15 bp, Homo sapiens
accaatgacaggtgg

SEQ ID NO: 1203709 - DNA, 15 bp, Homo sapiens
aaccaatgacaggtg

SEQ ID NO: 1203710 - DNA, 15 bp, Homo sapiens
gaaccaatgacaggt

SEQ ID NO: 1203711 - DNA, 15 bp, Homo sapiens
ggaaccaatgacagg

SEQ ID NO: 1203712 - DNA, 15 bp, Homo sapiens
gggaaccaatgacag

SEQ ID NO: 1203713 - DNA, 15 bp, Homo sapiens
agggaaccaatgaca

SEQ ID NO: 1203714 - DNA, 15 bp, Homo sapiens
cagggaaccaatgac

SEQ ID NO: 1203715 - DNA, 15 bp, Homo sapiens
ccagggaaccaatga

SEQ ID NO: 1203716 - DNA, 15 bp, Homo sapiens
cccagggaaccaatg

SEQ ID NO: 1203717 - DNA, 15 bp, Homo sapiens
acccagggaaccaat

SEQ ID NO: 1203718 - DNA, 15 bp, Homo sapiens
cacccagggaaccaa

SEQ ID NO: 1203719 - DNA, 15 bp, Homo sapiens
gcacccagggaacca

SEQ ID NO: 1203720 - DNA, 15 bp, Homo sapiens
agcacccagggaacc

SEQ ID NO: 1203721 - DNA, 15 bp, Homo sapiens
aagcacccagggaac

SEQ ID NO: 1203722 - DNA, 15 bp, Homo sapiens
caagcacccagggaa

SEQ ID NO: 1203723 - DNA, 15 bp, Homo sapiens
acaagcacccaggga

SEQ ID NO: 1203724 - DNA, 15 bp, Homo sapiens
cacaagcacccaggg

SEQ ID NO: 1203725 - DNA, 15 bp, Homo sapiens
ccacaagcacccagg

SEQ ID NO: 1203726 - DNA, 15 bp, Homo sapiens
cccacaagcacccag

SEQ ID NO: 1203727 - DNA, 15 bp, Homo sapiens
gcccacaagcaccca

SEQ ID NO: 1203728 - DNA, 15 bp, Homo sapiens
ggcccacaagcaccc

SEQ ID NO: 1203729 - DNA, 15 bp, Homo sapiens
aggcccacaagcacc

SEQ ID NO: 1203730 - DNA, 15 bp, Homo sapiens
aaggcccacaagcac

SEQ ID NO: 1203731 - DNA, 15 bp, Homo sapiens
gaaggcccacaagca

SEQ ID NO: 1203732 - DNA, 15 bp, Homo sapiens
ggaaggcccacaagc

SEQ ID NO: 1203733 - DNA, 15 bp, Homo sapiens
gggaaggcccacaag

SEQ ID NO: 1203734 - DNA, 15 bp, Homo sapiens
tgggaaggcccacaa

SEQ ID NO: 1203735 - DNA, 15 bp, Homo sapiens
ctgggaaggcccaca

SEQ ID NO: 1203736 - DNA, 15 bp, Homo sapiens
actgggaaggcccac

SEQ ID NO: 1203737 - DNA, 15 bp, Homo sapiens
gactgggaaggccca

SEQ ID NO: 1203738 - DNA, 15 bp, Homo sapiens
agactgggaaggccc

SEQ ID NO: 1203739 - DNA, 15 bp, Homo sapiens
tagactgggaaggcc

SEQ ID NO: 1203740 - DNA, 15 bp, Homo sapiens
ctagactgggaaggc

SEQ ID NO: 1203741 - DNA, 15 bp, Homo sapiens
tctagactgggaagg

SEQ ID NO: 1203742 - DNA, 15 bp, Homo sapiens
ctctagactgggaag

SEQ ID NO: 1203743 - DNA, 15 bp, Homo sapiens
tctctagactgggaa

SEQ ID NO: 1203744 - DNA, 15 bp, Homo sapiens
ctctctagactggga

SEQ ID NO: 1203745 - DNA, 15 bp, Homo sapiens
tctctctagactggg

SEQ ID NO: 1203746 - DNA, 15 bp, Homo sapiens
ttctctctagactgg

SEQ ID NO: 1203747 - DNA, 15 bp, Homo sapiens
tttctctctagactg

SEQ ID NO: 1203748 - DNA, 15 bp, Homo sapiens
atttctctctagact

SEQ ID NO: 1203749 - DNA, 15 bp, Homo sapiens
catttctctctagac

SEQ ID NO: 1203750 - DNA, 15 bp, Homo sapiens
tcatttctctctaga

SEQ ID NO: 1203751 - DNA, 15 bp, Homo sapiens
ttcatttctctctag

SEQ ID NO: 1203752 - DNA, 15 bp, Homo sapiens
cttcatttctctcta

SEQ ID NO: 1203753 - DNA, 15 bp, Homo sapiens
gcttcatttctctct

SEQ ID NO: 1203754 - DNA, 15 bp, Homo sapiens
tgcttcatttctctc

SEQ ID NO: 1203755 - DNA, 15 bp, Homo sapiens
ctgcttcatttctct

SEQ ID NO: 1203756 - DNA, 15 bp, Homo sapiens
actgcttcatttctc

SEQ ID NO: 1203757 - DNA, 15 bp, Homo sapiens
aactgcttcatttct

SEQ ID NO: 1203758 - DNA, 15 bp, Homo sapiens
aaactgcttcatttc

SEQ ID NO: 1203759 - DNA, 15 bp, Homo sapiens
gaaactgcttcattt

SEQ ID NO: 1203760 - DNA, 15 bp, Homo sapiens
ggaaactgcttcatt

SEQ ID NO: 1203761 - DNA, 15 bp, Homo sapiens
tggaaactgcttcat

SEQ ID NO: 1203762 - DNA, 15 bp, Homo sapiens
ctggaaactgcttca

SEQ ID NO: 1203763 - DNA, 15 bp, Homo sapiens
cctggaaactgcttc

SEQ ID NO: 1203764 - DNA, 15 bp, Homo sapiens
acctggaaactgctt

SEQ ID NO: 1203765 - DNA, 15 bp, Homo sapiens
tacctggaaactgct

SEQ ID NO: 1203766 - DNA, 15 bp, Homo sapiens
ttacctggaaactgc

SEQ ID NO: 1203767 - DNA, 15 bp, Homo sapiens
cttacctggaaactg

SEQ ID NO: 1203768 - DNA, 15 bp, Homo sapiens
ccttacctggaaact

SEQ ID NO: 1203769 - DNA, 15 bp, Homo sapiens
accttacctggaaac

SEQ ID NO: 1203770 - DNA, 15 bp, Homo sapiens
gaccttacctggaaa

SEQ ID NO: 1203771 - DNA, 15 bp, Homo sapiens
ggaccttacctggaa

SEQ ID NO: 1203772 - DNA, 15 bp, Homo sapiens
gggaccttacctgga

SEQ ID NO: 1203773 - DNA, 15 bp, Homo sapiens
ggggaccttacctgg

SEQ ID NO: 1203774 - DNA, 15 bp, Homo sapiens
cggggaccttacctg

SEQ ID NO: 1203775 - DNA, 15 bp, Homo sapiens
ccggggaccttacct

SEQ ID NO: 1203776 - DNA, 15 bp, Homo sapiens
accggggaccttacc

SEQ ID NO: 1203777 - DNA, 15 bp, Homo sapiens
caccggggaccttac

SEQ ID NO: 1203778 - DNA, 15 bp, Homo sapiens
ccaccggggacctta

SEQ ID NO: 1203779 - DNA, 15 bp, Homo sapiens
cccaccggggacctt

SEQ ID NO: 1203780 - DNA, 15 bp, Homo sapiens
acccaccggggacct

SEQ ID NO: 1203781 - DNA, 15 bp, Homo sapiens
aacccaccggggacc

SEQ ID NO: 1203782 - DNA, 15 bp, Homo sapiens
aaacccaccggggac

SEQ ID NO: 1203783 - DNA, 15 bp, Homo sapiens
taaacccaccgggga

SEQ ID NO: 1203784 - DNA, 15 bp, Homo sapiens
gtaaacccaccgggg

SEQ ID NO: 1203785 - DNA, 15 bp, Homo sapiens
ggtaaacccaccggg

SEQ ID NO: 1203786 - DNA, 15 bp, Homo sapiens
aggtaaacccaccgg

SEQ ID NO: 1203787 - DNA, 15 bp, Homo sapiens
caggtaaacccaccg

SEQ ID NO: 1203788 - DNA, 15 bp, Homo sapiens
acaggtaaacccacc

SEQ ID NO: 1203789 - DNA, 15 bp, Homo sapiens
cacaggtaaacccac

SEQ ID NO: 1203790 - DNA, 15 bp, Homo sapiens
ccacaggtaaaccca

SEQ ID NO: 1203791 - DNA, 15 bp, Homo sapiens
gccacaggtaaaccc

SEQ ID NO: 1203792 - DNA, 15 bp, Homo sapiens
agccacaggtaaacc

SEQ ID NO: 1203793 - DNA, 15 bp, Homo sapiens
tagccacaggtaaac

SEQ ID NO: 1203794 - DNA, 15 bp, Homo sapiens
gtagccacaggtaaa

SEQ ID NO: 1203795 - DNA, 15 bp, Homo sapiens
agtagccacaggtaa

SEQ ID NO: 1203796 - DNA, 15 bp, Homo sapiens
aagtagccacaggta

SEQ ID NO: 1203797 - DNA, 15 bp, Homo sapiens
gaagtagccacaggt

SEQ ID NO: 1203798 - DNA, 15 bp, Homo sapiens
ggaagtagccacagg

SEQ ID NO: 1203799 - DNA, 15 bp, Homo sapiens
tggaagtagccacag

SEQ ID NO: 1203800 - DNA, 15 bp, Homo sapiens
ttggaagtagccaca

SEQ ID NO: 1203801 - DNA, 15 bp, Homo sapiens
tttggaagtagccac

SEQ ID NO: 1203802 - DNA, 15 bp, Homo sapiens
gtttggaagtagcca

SEQ ID NO: 1203803 - DNA, 15 bp, Homo sapiens
agtttggaagtagcc

SEQ ID NO: 1203804 - DNA, 15 bp, Homo sapiens
cagtttggaagtagc

SEQ ID NO: 1203805 - DNA, 15 bp, Homo sapiens
ccagtttggaagtag

SEQ ID NO: 1203806 - DNA, 15 bp, Homo sapiens
tccagtttggaagta

SEQ ID NO: 1203807 - DNA, 15 bp, Homo sapiens
ctccagtttggaagt

SEQ ID NO: 1203808 - DNA, 15 bp, Homo sapiens
tctccagtttggaag

SEQ ID NO: 1203809 - DNA, 15 bp, Homo sapiens
gtctccagtttggaa

SEQ ID NO: 1203810 - DNA, 15 bp, Homo sapiens
tgtctccagtttgga

SEQ ID NO: 1203811 - DNA, 15 bp, Homo sapiens
ttgtctccagtttgg

SEQ ID NO: 1203812 - DNA, 15 bp, Homo sapiens
attgtctccagtttg

SEQ ID NO: 1203813 - DNA, 15 bp, Homo sapiens
aattgtctccagttt

SEQ ID NO: 1203814 - DNA, 15 bp, Homo sapiens
taattgtctccagtt

SEQ ID NO: 1203815 - DNA, 15 bp, Homo sapiens
ttaattgtctccagt

SEQ ID NO: 1203816 - DNA, 15 bp, Homo sapiens
cttaattgtctccag

SEQ ID NO: 1203817 - DNA, 15 bp, Homo sapiens
tcttaattgtctcca

SEQ ID NO: 1203818 - DNA, 15 bp, Homo sapiens
ttcttaattgtctcc

SEQ ID NO: 1203819 - DNA, 15 bp, Homo sapiens
tttcttaattgtctc

SEQ ID NO: 1203820 - DNA, 15 bp, Homo sapiens
ctttcttaattgtct

SEQ ID NO: 1203821 - DNA, 15 bp, Homo sapiens
tctttcttaattgtc

SEQ ID NO: 1203822 - DNA, 15 bp, Homo sapiens
ctctttcttaattgt

SEQ ID NO: 1203823 - DNA, 15 bp, Homo sapiens
tctctttcttaattg

SEQ ID NO: 1203824 - DNA, 15 bp, Homo sapiens
atctctttcttaatt

SEQ ID NO: 1203825 - DNA, 15 bp, Homo sapiens
aatctctttcttaat

SEQ ID NO: 1203826 - DNA, 15 bp, Homo sapiens
caatctctttcttaa

SEQ ID NO: 1203827 - DNA, 15 bp, Homo sapiens
ccaatctctttctta

SEQ ID NO: 1203828 - DNA, 15 bp, Homo sapiens
tccaatctctttctt

SEQ ID NO: 1203829 - DNA, 15 bp, Homo sapiens
ttccaatctctttct

SEQ ID NO: 1203830 - DNA, 15 bp, Homo sapiens
gttccaatctctttc

SEQ ID NO: 1203831 - DNA, 15 bp, Homo sapiens
ggttccaatctcttt

SEQ ID NO: 1203832 - DNA, 15 bp, Homo sapiens
aggttccaatctctt

SEQ ID NO: 1203833 - DNA, 15 bp, Homo sapiens
taggttccaatctct

SEQ ID NO: 1203834 - DNA, 15 bp, Homo sapiens
ctaggttccaatctc

SEQ ID NO: 1203835 - DNA, 15 bp, Homo sapiens
tctaggttccaatct

SEQ ID NO: 1203836 - DNA, 15 bp, Homo sapiens
ttctaggttccaatc

SEQ ID NO: 1203837 - DNA, 15 bp, Homo sapiens
cttctaggttccaat

SEQ ID NO: 1203838 - DNA, 15 bp, Homo sapiens
ccttctaggttccaa

SEQ ID NO: 1203839 - DNA, 15 bp, Homo sapiens
tccttctaggttcca

SEQ ID NO: 1203840 - DNA, 15 bp, Homo sapiens
ctccttctaggttcc

SEQ ID NO: 1203841 - DNA, 15 bp, Homo sapiens
actccttctaggttc

SEQ ID NO: 1203842 - DNA, 15 bp, Homo sapiens
aactccttctaggtt

SEQ ID NO: 1203843 - DNA, 15 bp, Homo sapiens
caactccttctaggt

SEQ ID NO: 1203844 - DNA, 15 bp, Homo sapiens
tcaactccttctagg

SEQ ID NO: 1203845 - DNA, 15 bp, Homo sapiens
gtcaactccttctag

SEQ ID NO: 1203846 - DNA, 15 bp, Homo sapiens
tgtcaactccttcta

SEQ ID NO: 1203847 - DNA, 15 bp, Homo sapiens
ttgtcaactccttct

SEQ ID NO: 1203848 - DNA, 15 bp, Homo sapiens
attgtcaactccttc

SEQ ID NO: 1203849 - DNA, 15 bp, Homo sapiens
aattgtcaactcctt

SEQ ID NO: 1203850 - DNA, 15 bp, Homo sapiens
gaattgtcaactcct

SEQ ID NO: 1203851 - DNA, 15 bp, Homo sapiens
tgaattgtcaactcc

SEQ ID NO: 1203852 - DNA, 15 bp, Homo sapiens
ttgaattgtcaactc

SEQ ID NO: 1203853 - DNA, 15 bp, Homo sapiens
attgaattgtcaact

SEQ ID NO: 1203854 - DNA, 15 bp, Homo sapiens
gattgaattgtcaac

SEQ ID NO: 1203855 - DNA, 15 bp, Homo sapiens
tgattgaattgtcaa

SEQ ID NO: 1203856 - DNA, 15 bp, Homo sapiens
atgattgaattgtca

SEQ ID NO: 1203857 - DNA, 15 bp, Homo sapiens
aatgattgaattgtc

SEQ ID NO: 1203858 - DNA, 15 bp, Homo sapiens
aaatgattgaattgt

SEQ ID NO: 1203859 - DNA, 15 bp, Homo sapiens
gaaatgattgaattg

SEQ ID NO: 1203860 - DNA, 15 bp, Homo sapiens
agaaatgattgaatt

SEQ ID NO: 1203861 - DNA, 15 bp, Homo sapiens
aagaaatgattgaat

SEQ ID NO: 1203862 - DNA, 15 bp, Homo sapiens
gaagaaatgattgaa

SEQ ID NO: 1203863 - DNA, 15 bp, Homo sapiens
ggaagaaatgattga

SEQ ID NO: 1203864 - DNA, 15 bp, Homo sapiens
aggaagaaatgattg

SEQ ID NO: 1203865 - DNA, 15 bp, Homo sapiens
aaggaagaaatgatt

SEQ ID NO: 1203866 - DNA, 15 bp, Homo sapiens
gaaggaagaaatgat

SEQ ID NO: 1203867 - DNA, 15 bp, Homo sapiens
tgaaggaagaaatga

SEQ ID NO: 1203868 - DNA, 15 bp, Homo sapiens
atgaaggaagaaatg

SEQ ID NO: 1203869 - DNA, 15 bp, Homo sapiens
aatgaaggaagaaat

SEQ ID NO: 1203870 - DNA, 15 bp, Homo sapiens
taatgaaggaagaaa

SEQ ID NO: 1203871 - DNA, 15 bp, Homo sapiens
ttaatgaaggaagaa

SEQ ID NO: 1203872 - DNA, 15 bp, Homo sapiens
gttaatgaaggaaga

SEQ ID NO: 1203873 - DNA, 15 bp, Homo sapiens
agttaatgaaggaag

SEQ ID NO: 1203874 - DNA, 15 bp, Homo sapiens
gagttaatgaaggaa

SEQ ID NO: 1203875 - DNA, 15 bp, Homo sapiens
tgagttaatgaagga

SEQ ID NO: 1203876 - DNA, 15 bp, Homo sapiens
ctgagttaatgaagg

SEQ ID NO: 1203877 - DNA, 15 bp, Homo sapiens
actgagttaatgaag

SEQ ID NO: 1203878 - DNA, 15 bp, Homo sapiens
gactgagttaatgaa

SEQ ID NO: 1203879 - DNA, 15 bp, Homo sapiens
ggactgagttaatga

SEQ ID NO: 1203880 - DNA, 15 bp, Homo sapiens
tggactgagttaatg

SEQ ID NO: 1203881 - DNA, 15 bp, Homo sapiens
ctggactgagttaat

SEQ ID NO: 1203882 - DNA, 15 bp, Homo sapiens
actggactgagttaa

SEQ ID NO: 1203883 - DNA, 15 bp, Homo sapiens
aactggactgagtta

SEQ ID NO: 1203884 - DNA, 15 bp, Homo sapiens
aaactggactgagtt

SEQ ID NO: 1203885 - DNA, 15 bp, Homo sapiens
caaactggactgagt

SEQ ID NO: 1203886 - DNA, 15 bp, Homo sapiens
ccaaactggactgag

SEQ ID NO: 1203887 - DNA, 15 bp, Homo sapiens
tccaaactggactga

SEQ ID NO: 1203888 - DNA, 15 bp, Homo sapiens
atccaaactggactg

SEQ ID NO: 1203889 - DNA, 15 bp, Homo sapiens
catccaaactggact

SEQ ID NO: 1203890 - DNA, 15 bp, Homo sapiens
tcatccaaactggac

SEQ ID NO: 1203891 - DNA, 15 bp, Homo sapiens
ctcatccaaactgga

SEQ ID NO: 1203892 - DNA, 15 bp, Homo sapiens
cctcatccaaactgg

SEQ ID NO: 1203893 - DNA, 15 bp, Homo sapiens
gcctcatccaaactg

SEQ ID NO: 1203894 - DNA, 15 bp, Homo sapiens
tgcctcatccaaact

SEQ ID NO: 1203895 - DNA, 15 bp, Homo sapiens
gtgcctcatccaaac

SEQ ID NO: 1203896 - DNA, 15 bp, Homo sapiens
tgtgcctcatccaaa

SEQ ID NO: 1203897 - DNA, 15 bp, Homo sapiens
atgtgcctcatccaa

SEQ ID NO: 1203898 - DNA, 15 bp, Homo sapiens
aatgtgcctcatcca

SEQ ID NO: 1203899 - DNA, 15 bp, Homo sapiens
gaatgtgcctcatcc

SEQ ID NO: 1203900 - DNA, 15 bp, Homo sapiens
tgaatgtgcctcatc

SEQ ID NO: 1203901 - DNA, 15 bp, Homo sapiens
ttgaatgtgcctcat

SEQ ID NO: 1203902 - DNA, 15 bp, Homo sapiens
cttgaatgtgcctca

SEQ ID NO: 1203903 - DNA, 15 bp, Homo sapiens
tcttgaatgtgcctc

SEQ ID NO: 1203904 - DNA, 15 bp, Homo sapiens
atcttgaatgtgcct

SEQ ID NO: 1203905 - DNA, 15 bp, Homo sapiens
catcttgaatgtgcc

SEQ ID NO: 1203906 - DNA, 15 bp, Homo sapiens
gcatcttgaatgtgc

SEQ ID NO: 1203907 - DNA, 15 bp, Homo sapiens
ggcatcttgaatgtg

SEQ ID NO: 1203908 - DNA, 15 bp, Homo sapiens
aggcatcttgaatgt

SEQ ID NO: 1203909 - DNA, 15 bp, Homo sapiens
gaggcatcttgaatg

SEQ ID NO: 1203910 - DNA, 15 bp, Homo sapiens
ggaggcatcttgaat

SEQ ID NO: 1203911 - DNA, 15 bp, Homo sapiens
tggaggcatcttgaa

SEQ ID NO: 1203912 - DNA, 15 bp, Homo sapiens
ttggaggcatcttga

SEQ ID NO: 1203913 - DNA, 15 bp, Homo sapiens
cttggaggcatcttg

SEQ ID NO: 1203914 - DNA, 15 bp, Homo sapiens
gcttggaggcatctt

SEQ ID NO: 1203915 - DNA, 15 bp, Homo sapiens
tgcttggaggcatct

SEQ ID NO: 1203916 - DNA, 15 bp, Homo sapiens
ttgcttggaggcatc

SEQ ID NO: 1203917 - DNA, 15 bp, Homo sapiens
cttgcttggaggcat

SEQ ID NO: 1203918 - DNA, 15 bp, Homo sapiens
gcttgcttggaggca

SEQ ID NO: 1203919 - DNA, 15 bp, Homo sapiens
agcttgcttggaggc

SEQ ID NO: 1203920 - DNA, 15 bp, Homo sapiens
cagcttgcttggagg

SEQ ID NO: 1203921 - DNA, 15 bp, Homo sapiens
tcagcttgcttggag

SEQ ID NO: 1203922 - DNA, 15 bp, Homo sapiens
ctcagcttgcttgga

SEQ ID NO: 1203923 - DNA, 15 bp, Homo sapiens
tctcagcttgcttgg

SEQ ID NO: 1203924 - DNA, 15 bp, Homo sapiens
ttctcagcttgcttg

SEQ ID NO: 1203925 - DNA, 15 bp, Homo sapiens
tttctcagcttgctt

SEQ ID NO: 1203926 - DNA, 15 bp, Homo sapiens
ttttctcagcttgct

SEQ ID NO: 1203927 - DNA, 15 bp, Homo sapiens
tttttctcagcttgc

SEQ ID NO: 1203928 - DNA, 15 bp, Homo sapiens
atttttctcagcttg

SEQ ID NO: 1203929 - DNA, 15 bp, Homo sapiens
gatttttctcagctt

SEQ ID NO: 1203930 - DNA, 15 bp, Homo sapiens
tgatttttctcagct

SEQ ID NO: 1203931 - DNA, 15 bp, Homo sapiens
ctgatttttctcagc

SEQ ID NO: 1203932 - DNA, 15 bp, Homo sapiens
actgatttttctcag

SEQ ID NO: 1203933 - DNA, 15 bp, Homo sapiens
cactgatttttctca

SEQ ID NO: 1203934 - DNA, 15 bp, Homo sapiens
ccactgatttttctc

SEQ ID NO: 1203935 - DNA, 15 bp, Homo sapiens
gccactgatttttct

SEQ ID NO: 1203936 - DNA, 15 bp, Homo sapiens
tgccactgatttttc

SEQ ID NO: 1203937 - DNA, 15 bp, Homo sapiens
ttgccactgattttt

SEQ ID NO: 1203938 - DNA, 15 bp, Homo sapiens
tttgccactgatttt

SEQ ID NO: 1203939 - DNA, 15 bp, Homo sapiens
ttttgccactgattt

SEQ ID NO: 1203940 - DNA, 15 bp, Homo sapiens
tttttgccactgatt

SEQ ID NO: 1203941 - DNA, 15 bp, Homo sapiens
atttttgccactgat

SEQ ID NO: 1203942 - DNA, 15 bp, Homo sapiens
tatttttgccactga

SEQ ID NO: 1203943 - DNA, 15 bp, Homo sapiens
ttatttttgccactg

SEQ ID NO: 1203944 - DNA, 15 bp, Homo sapiens
gttatttttgccact

SEQ ID NO: 1203945 - DNA, 15 bp, Homo sapiens
agttatttttgccac

SEQ ID NO: 1203946 - DNA, 15 bp, Homo sapiens
tagttatttttgcca

SEQ ID NO: 1203947 - DNA, 15 bp, Homo sapiens
atagttatttttgcc

SEQ ID NO: 1203948 - DNA, 15 bp, Homo sapiens
catagttatttttgc

SEQ ID NO: 1203949 - DNA, 15 bp, Homo sapiens
acatagttatttttg

SEQ ID NO: 1203950 - DNA, 15 bp, Homo sapiens
gacatagttattttt

SEQ ID NO: 1203951 - DNA, 15 bp, Homo sapiens
agacatagttatttt

SEQ ID NO: 1203952 - DNA, 15 bp, Homo sapiens
cagacatagttattt

SEQ ID NO: 1203953 - DNA, 15 bp, Homo sapiens
acagacatagttatt

SEQ ID NO: 1203954 - DNA, 15 bp, Homo sapiens
aacagacatagttat

SEQ ID NO: 1203955 - DNA, 15 bp, Homo sapiens
gaacagacatagtta

SEQ ID NO: 1203956 - DNA, 15 bp, Homo sapiens
tgaacagacatagtt

SEQ ID NO: 1203957 - DNA, 15 bp, Homo sapiens
ttgaacagacatagt

SEQ ID NO: 1203958 - DNA, 15 bp, Homo sapiens
tttgaacagacatag

SEQ ID NO: 1203959 - DNA, 15 bp, Homo sapiens
gtttgaacagacata

SEQ ID NO: 1203960 - DNA, 15 bp, Homo sapiens
tgtttgaacagacat

SEQ ID NO: 1203961 - DNA, 15 bp, Homo sapiens
ctgtttgaacagaca

SEQ ID NO: 1203962 - DNA, 15 bp, Homo sapiens
cctgtttgaacagac

SEQ ID NO: 1203963 - DNA, 15 bp, Homo sapiens
ccctgtttgaacaga

SEQ ID NO: 1203964 - DNA, 15 bp, Homo sapiens
tccctgtttgaacag

SEQ ID NO: 1203965 - DNA, 15 bp, Homo sapiens
ttccctgtttgaaca

SEQ ID NO: 1203966 - DNA, 15 bp, Homo sapiens
gttccctgtttgaac

SEQ ID NO: 1203967 - DNA, 15 bp, Homo sapiens
agttccctgtttgaa

SEQ ID NO: 1203968 - DNA, 15 bp, Homo sapiens
aagttccctgtttga

SEQ ID NO: 1203969 - DNA, 15 bp, Homo sapiens
caagttccctgtttg

SEQ ID NO: 1203970 - DNA, 15 bp, Homo sapiens
acaagttccctgttt

SEQ ID NO: 1203971 - DNA, 15 bp, Homo sapiens
tacaagttccctgtt

SEQ ID NO: 1203972 - DNA, 15 bp, Homo sapiens
ctacaagttccctgt

SEQ ID NO: 1203973 - DNA, 15 bp, Homo sapiens
tctacaagttccctg

SEQ ID NO: 1203974 - DNA, 15 bp, Homo sapiens
ttctacaagttccct

SEQ ID NO: 1203975 - DNA, 15 bp, Homo sapiens
gttctacaagttccc

SEQ ID NO: 1203976 - DNA, 15 bp, Homo sapiens
tgttctacaagttcc

SEQ ID NO: 1203977 - DNA, 15 bp, Homo sapiens
ctgttctacaagttc

SEQ ID NO: 1203978 - DNA, 15 bp, Homo sapiens
gctgttctacaagtt

SEQ ID NO: 1203979 - DNA, 15 bp, Homo sapiens
tgctgttctacaagt

SEQ ID NO: 1203980 - DNA, 15 bp, Homo sapiens
atgctgttctacaag

SEQ ID NO: 1203981 - DNA, 15 bp, Homo sapiens
catgctgttctacaa

SEQ ID NO: 1203982 - DNA, 15 bp, Homo sapiens
ccatgctgttctaca

SEQ ID NO: 1203983 - DNA, 15 bp, Homo sapiens
accatgctgttctac

SEQ ID NO: 1203984 - DNA, 15 bp, Homo sapiens
gaccatgctgttcta

SEQ ID NO: 1203985 - DNA, 15 bp, Homo sapiens
ggaccatgctgttct

SEQ ID NO: 1203986 - DNA, 15 bp, Homo sapiens
gggaccatgctgttc

SEQ ID NO: 1203987 - DNA, 15 bp, Homo sapiens
tgggaccatgctgtt

SEQ ID NO: 1203988 - DNA, 15 bp, Homo sapiens
ctgggaccatgctgt

SEQ ID NO: 1203989 - DNA, 15 bp, Homo sapiens
tctgggaccatgctg

SEQ ID NO: 1203990 - DNA, 15 bp, Homo sapiens
ctctgggaccatgct

SEQ ID NO: 1203991 - DNA, 15 bp, Homo sapiens
tctctgggaccatgc

SEQ ID NO: 1203992 - DNA, 15 bp, Homo sapiens
ttctctgggaccatg

SEQ ID NO: 1203993 - DNA, 15 bp, Homo sapiens
cttctctgggaccat

SEQ ID NO: 1203994 - DNA, 15 bp, Homo sapiens
ccttctctgggacca

SEQ ID NO: 1203995 - DNA, 15 bp, Homo sapiens
cccttctctgggacc

SEQ ID NO: 1203996 - DNA, 15 bp, Homo sapiens
acccttctctgggac

SEQ ID NO: 1203997 - DNA, 15 bp, Homo sapiens
tacccttctctggga

SEQ ID NO: 1203998 - DNA, 15 bp, Homo sapiens
ttacccttctctggg

SEQ ID NO: 1203999 - DNA, 15 bp, Homo sapiens
attacccttctctgg

SEQ ID NO: 1204000 - DNA, 15 bp, Homo sapiens
cattacccttctctg

SEQ ID NO: 1204001 - DNA, 15 bp, Homo sapiens
gcattacccttctct

SEQ ID NO: 1204002 - DNA, 15 bp, Homo sapiens
tgcattacccttctc

SEQ ID NO: 1204003 - DNA, 15 bp, Homo sapiens
ttgcattacccttct

SEQ ID NO: 1204004 - DNA, 15 bp, Homo sapiens
cttgcattacccttc

SEQ ID NO: 1204005 - DNA, 15 bp, Homo sapiens
gcttgcattaccctt

SEQ ID NO: 1204006 - DNA, 15 bp, Homo sapiens
ggcttgcattaccct

SEQ ID NO: 1204007 - DNA, 15 bp, Homo sapiens
tggcttgcattaccc

SEQ ID NO: 1204008 - DNA, 15 bp, Homo sapiens
gtggcttgcattacc

SEQ ID NO: 1204009 - DNA, 15 bp, Homo sapiens
tgtggcttgcattac

SEQ ID NO: 1204010 - DNA, 15 bp, Homo sapiens
ctgtggcttgcatta

SEQ ID NO: 1204011 - DNA, 15 bp, Homo sapiens
tctgtggcttgcatt

SEQ ID NO: 1204012 - DNA, 15 bp, Homo sapiens
gtctgtggcttgcat

SEQ ID NO: 1204013 - DNA, 15 bp, Homo sapiens
tgtctgtggcttgca

SEQ ID NO: 1204014 - DNA, 15 bp, Homo sapiens
ctgtctgtggcttgc

SEQ ID NO: 1204015 - DNA, 15 bp, Homo sapiens
tctgtctgtggcttg

SEQ ID NO: 1204016 - DNA, 15 bp, Homo sapiens
ttctgtctgtggctt

SEQ ID NO: 1204017 - DNA, 15 bp, Homo sapiens
cttctgtctgtggct

SEQ ID NO: 1204018 - DNA, 15 bp, Homo sapiens
acttctgtctgtggc

SEQ ID NO: 1204019 - DNA, 15 bp, Homo sapiens
cacttctgtctgtgg

SEQ ID NO: 1204020 - DNA, 15 bp, Homo sapiens
tcacttctgtctgtg

SEQ ID NO: 1204021 - DNA, 15 bp, Homo sapiens
ttcacttctgtctgt

SEQ ID NO: 1204022 - DNA, 15 bp, Homo sapiens
tttcacttctgtctg

SEQ ID NO: 1204023 - DNA, 15 bp, Homo sapiens
atttcacttctgtct

SEQ ID NO: 1204024 - DNA, 15 bp, Homo sapiens
aatttcacttctgtc

SEQ ID NO: 1204025 - DNA, 15 bp, Homo sapiens
aaatttcacttctgt

SEQ ID NO: 1204026 - DNA, 15 bp, Homo sapiens
aaaatttcacttctg

SEQ ID NO: 1204027 - DNA, 15 bp, Homo sapiens
taaaatttcacttct

SEQ ID NO: 1204028 - DNA, 15 bp, Homo sapiens
ctaaaatttcacttc

SEQ ID NO: 1204029 - DNA, 15 bp, Homo sapiens
actaaaatttcactt

SEQ ID NO: 1204030 - DNA, 15 bp, Homo sapiens
tactaaaatttcact

SEQ ID NO: 1204031 - DNA, 15 bp, Homo sapiens
ctactaaaatttcac

SEQ ID NO: 1204032 - DNA, 15 bp, Homo sapiens
gctactaaaatttca

SEQ ID NO: 1204033 - DNA, 15 bp, Homo sapiens
ggctactaaaatttc

SEQ ID NO: 1204034 - DNA, 15 bp, Homo sapiens
tggctactaaaattt

SEQ ID NO: 1204035 - DNA, 15 bp, Homo sapiens
ttggctactaaaatt

SEQ ID NO: 1204036 - DNA, 15 bp, Homo sapiens
tttggctactaaaat

SEQ ID NO: 1204037 - DNA, 15 bp, Homo sapiens
atttggctactaaaa

SEQ ID NO: 1204038 - DNA, 15 bp, Homo sapiens
aatttggctactaaa

SEQ ID NO: 1204039 - DNA, 15 bp, Homo sapiens
aaatttggctactaa

SEQ ID NO: 1204040 - DNA, 15 bp, Homo sapiens
aaaatttggctacta

SEQ ID NO: 1204041 - DNA, 15 bp, Homo sapiens
caaaatttggctact

SEQ ID NO: 1204042 - DNA, 15 bp, Homo sapiens
tcaaaatttggctac

SEQ ID NO: 1204043 - DNA, 15 bp, Homo sapiens
ttcaaaatttggcta

SEQ ID NO: 1204044 - DNA, 15 bp, Homo sapiens
tttcaaaatttggct

SEQ ID NO: 1204045 - DNA, 15 bp, Homo sapiens
ttttcaaaatttggc

SEQ ID NO: 1204046 - DNA, 15 bp, Homo sapiens
cttttcaaaatttgg

SEQ ID NO: 1204047 - DNA, 15 bp, Homo sapiens
acttttcaaaatttg

SEQ ID NO: 1204048 - DNA, 15 bp, Homo sapiens
tacttttcaaaattt

SEQ ID NO: 1204049 - DNA, 15 bp, Homo sapiens
ttacttttcaaaatt

SEQ ID NO: 1204050 - DNA, 15 bp, Homo sapiens
tttacttttcaaaat

SEQ ID NO: 1204051 - DNA, 15 bp, Homo sapiens
ttttacttttcaaaa

SEQ ID NO: 1204052 - DNA, 15 bp, Homo sapiens
tttttacttttcaaa

SEQ ID NO: 1204053 - DNA, 15 bp, Homo sapiens
ctttttacttttcaa

SEQ ID NO: 1204054 - DNA, 15 bp, Homo sapiens
tctttttacttttca

SEQ ID NO: 1204055 - DNA, 15 bp, Homo sapiens
ttctttttacttttc

SEQ ID NO: 1204056 - DNA, 15 bp, Homo sapiens
tttctttttactttt

SEQ ID NO: 1204057 - DNA, 15 bp, Homo sapiens
gtttctttttacttt

SEQ ID NO: 1204058 - DNA, 15 bp, Homo sapiens
tgtttctttttactt

SEQ ID NO: 1204059 - DNA, 15 bp, Homo sapiens
ctgtttctttttact

SEQ ID NO: 1204060 - DNA, 15 bp, Homo sapiens
cctgtttctttttac

SEQ ID NO: 1204061 - DNA, 15 bp, Homo sapiens
acctgtttcttttta

SEQ ID NO: 1204062 - DNA, 15 bp, Homo sapiens
cacctgtttcttttt

SEQ ID NO: 1204063 - DNA, 15 bp, Homo sapiens
tcacctgtttctttt

SEQ ID NO: 1204064 - DNA, 15 bp, Homo sapiens
ttcacctgtttcttt

SEQ ID NO: 1204065 - DNA, 15 bp, Homo sapiens
tttcacctgtttctt

SEQ ID NO: 1204066 - DNA, 15 bp, Homo sapiens
atttcacctgtttct

SEQ ID NO: 1204067 - DNA, 15 bp, Homo sapiens
aatttcacctgtttc

SEQ ID NO: 1204068 - DNA, 15 bp, Homo sapiens
taatttcacctgttt

SEQ ID NO: 1204069 - DNA, 15 bp, Homo sapiens
ttaatttcacctgtt

SEQ ID NO: 1204070 - DNA, 15 bp, Homo sapiens
attaatttcacctgt

SEQ ID NO: 1204071 - DNA, 15 bp, Homo sapiens
aattaatttcacctg

SEQ ID NO: 1204072 - DNA, 15 bp, Homo sapiens
aaattaatttcacct

SEQ ID NO: 1204073 - DNA, 15 bp, Homo sapiens
aaaattaatttcacc

SEQ ID NO: 1204074 - DNA, 15 bp, Homo sapiens
taaaattaatttcac

SEQ ID NO: 1204075 - DNA, 15 bp, Homo sapiens
ttaaaattaatttca

SEQ ID NO: 1204076 - DNA, 15 bp, Homo sapiens
attaaaattaatttc

SEQ ID NO: 1204077 - DNA, 15 bp, Homo sapiens
tattaaaattaattt

SEQ ID NO: 1204078 - DNA, 15 bp, Homo sapiens
ttattaaaattaatt

SEQ ID NO: 1204079 - DNA, 15 bp, Homo sapiens
gttattaaaattaat

SEQ ID NO: 1204080 - DNA, 15 bp, Homo sapiens
tgttattaaaattaa

SEQ ID NO: 1204081 - DNA, 15 bp, Homo sapiens
atgttattaaaatta

SEQ ID NO: 1204082 - DNA, 15 bp, Homo sapiens
tatgttattaaaatt

SEQ ID NO: 1204083 - DNA, 15 bp, Homo sapiens
atatgttattaaaat

SEQ ID NO: 1204084 - DNA, 15 bp, Homo sapiens
aatatgttattaaaa

SEQ ID NO: 1204085 - DNA, 15 bp, Homo sapiens
taatatgttattaaa

SEQ ID NO: 1204086 - DNA, 15 bp, Homo sapiens
ataatatgttattaa

SEQ ID NO: 1204087 - DNA, 15 bp, Homo sapiens
aataatatgttatta

SEQ ID NO: 1204088 - DNA, 15 bp, Homo sapiens
aaataatatgttatt

SEQ ID NO: 1204089 - DNA, 15 bp, Homo sapiens
taaataatatgttat

SEQ ID NO: 1204090 - DNA, 15 bp, Homo sapiens
gtaaataatatgtta

SEQ ID NO: 1204091 - DNA, 15 bp, Homo sapiens
tgtaaataatatgtt

SEQ ID NO: 1204092 - DNA, 15 bp, Homo sapiens
ctgtaaataatatgt

SEQ ID NO: 1204093 - DNA, 15 bp, Homo sapiens
gctgtaaataatatg

SEQ ID NO: 1204094 - DNA, 15 bp, Homo sapiens
ggctgtaaataatat

SEQ ID NO: 1204095 - DNA, 15 bp, Homo sapiens
tggctgtaaataata

SEQ ID NO: 1204096 - DNA, 15 bp, Homo sapiens
ttggctgtaaataat

SEQ ID NO: 1204097 - DNA, 15 bp, Homo sapiens
tttggctgtaaataa

SEQ ID NO: 1204098 - DNA, 15 bp, Homo sapiens
ttttggctgtaaata

SEQ ID NO: 1204099 - DNA, 15 bp, Homo sapiens
tttttggctgtaaat

SEQ ID NO: 1204100 - DNA, 15 bp, Homo sapiens
atttttggctgtaaa

SEQ ID NO: 1204101 - DNA, 15 bp, Homo sapiens
tatttttggctgtaa

SEQ ID NO: 1204102 - DNA, 15 bp, Homo sapiens
gtatttttggctgta

SEQ ID NO: 1204103 - DNA, 15 bp, Homo sapiens
ggtatttttggctgt

SEQ ID NO: 1204104 - DNA, 15 bp, Homo sapiens
tggtatttttggctg

SEQ ID NO: 1204105 - DNA, 15 bp, Homo sapiens
atggtatttttggct

SEQ ID NO: 1204106 - DNA, 15 bp, Homo sapiens
aatggtatttttggc

SEQ ID NO: 1204107 - DNA, 15 bp, Homo sapiens
aaatggtatttttgg

SEQ ID NO: 1204108 - DNA, 15 bp, Homo sapiens
gaaatggtatttttg

SEQ ID NO: 1204109 - DNA, 15 bp, Homo sapiens
tgaaatggtattttt

SEQ ID NO: 1204110 - DNA, 15 bp, Homo sapiens
ttgaaatggtatttt

SEQ ID NO: 1204111 - DNA, 15 bp, Homo sapiens
gttgaaatggtattt

SEQ ID NO: 1204112 - DNA, 15 bp, Homo sapiens
ggttgaaatggtatt

SEQ ID NO: 1204113 - DNA, 15 bp, Homo sapiens
aggttgaaatggtat

SEQ ID NO: 1204114 - DNA, 15 bp, Homo sapiens
caggttgaaatggta

SEQ ID NO: 1204115 - DNA, 15 bp, Homo sapiens
acaggttgaaatggt

SEQ ID NO: 1204116 - DNA, 15 bp, Homo sapiens
tacaggttgaaatgg

SEQ ID NO: 1204117 - DNA, 15 bp, Homo sapiens
ttacaggttgaaatg

SEQ ID NO: 1204118 - DNA, 15 bp, Homo sapiens
attacaggttgaaat

SEQ ID NO: 1204119 - DNA, 15 bp, Homo sapiens
gattacaggttgaaa

SEQ ID NO: 1204120 - DNA, 15 bp, Homo sapiens
tgattacaggttgaa

SEQ ID NO: 1204121 - DNA, 15 bp, Homo sapiens
ttgattacaggttga

SEQ ID NO: 1204122 - DNA, 15 bp, Homo sapiens
attgattacaggttg

SEQ ID NO: 1204123 - DNA, 15 bp, Homo sapiens
tattgattacaggtt

SEQ ID NO: 1204124 - DNA, 15 bp, Homo sapiens
gtattgattacaggt

SEQ ID NO: 1204125 - DNA, 15 bp, Homo sapiens
agtattgattacagg

SEQ ID NO: 1204126 - DNA, 15 bp, Homo sapiens
aagtattgattacag

SEQ ID NO: 1204127 - DNA, 15 bp, Homo sapiens
aaagtattgattaca

SEQ ID NO: 1204128 - DNA, 15 bp, Homo sapiens
aaaagtattgattac

SEQ ID NO: 1204129 - DNA, 15 bp, Homo sapiens
aaaaagtattgatta

SEQ ID NO: 1204130 - DNA, 15 bp, Homo sapiens
caaaaagtattgatt

SEQ ID NO: 1204131 - DNA, 15 bp, Homo sapiens
tcaaaaagtattgat

SEQ ID NO: 1204132 - DNA, 15 bp, Homo sapiens
ttcaaaaagtattga

SEQ ID NO: 1204133 - DNA, 15 bp, Homo sapiens
tttcaaaaagtattg

SEQ ID NO: 1204134 - DNA, 15 bp, Homo sapiens
atttcaaaaagtatt

SEQ ID NO: 1204135 - DNA, 15 bp, Homo sapiens
aatttcaaaaagtat

SEQ ID NO: 1204136 - DNA, 15 bp, Homo sapiens
aaatttcaaaaagta

SEQ ID NO: 1204137 - DNA, 15 bp, Homo sapiens
taaatttcaaaaagt

SEQ ID NO: 1204138 - DNA, 15 bp, Homo sapiens
ataaatttcaaaaag

SEQ ID NO: 1204139 - DNA, 15 bp, Homo sapiens
aataaatttcaaaaa

SEQ ID NO: 1204140 - DNA, 15 bp, Homo sapiens
aaataaatttcaaaa

SEQ ID NO: 1204141 - DNA, 15 bp, Homo sapiens
taaataaatttcaaa

SEQ ID NO: 1204142 - DNA, 15 bp, Homo sapiens
ataaataaatttcaa

SEQ ID NO: 1204143 - DNA, 15 bp, Homo sapiens
aataaataaatttca

SEQ ID NO: 1204144 - DNA, 15 bp, Homo sapiens
aaataaataaatttc

SEQ ID NO: 1204145 - DNA, 15 bp, Homo sapiens
taaataaataaattt

SEQ ID NO: 1204146 - DNA, 15 bp, Homo sapiens
ataaataaataaatt

SEQ ID NO: 1204147 - DNA, 15 bp, Homo sapiens
caaataaataaataa

SEQ ID NO: 1204148 - DNA, 15 bp, Homo sapiens
ccaaataaataaata

SEQ ID NO: 1204149 - DNA, 15 bp, Homo sapiens
accaaataaataaat

SEQ ID NO: 1204150 - DNA, 15 bp, Homo sapiens
aaccaaataaataaa

SEQ ID NO: 1204151 - DNA, 15 bp, Homo sapiens
caaccaaataaataa

SEQ ID NO: 1204152 - DNA, 15 bp, Homo sapiens
ccaaccaaataaata

SEQ ID NO: 1204153 - DNA, 15 bp, Homo sapiens
cccaaccaaataaat

SEQ ID NO: 1204154 - DNA, 15 bp, Homo sapiens
tcccaaccaaataaa

SEQ ID NO: 1204155 - DNA, 15 bp, Homo sapiens
ctcccaaccaaataa

SEQ ID NO: 1204156 - DNA, 15 bp, Homo sapiens
tctcccaaccaaata

SEQ ID NO: 1204157 - DNA, 15 bp, Homo sapiens
ctctcccaaccaaat

SEQ ID NO: 1204158 - DNA, 15 bp, Homo sapiens
tctctcccaaccaaa

SEQ ID NO: 1204159 - DNA, 15 bp, Homo sapiens
gtctctcccaaccaa

SEQ ID NO: 1204160 - DNA, 15 bp, Homo sapiens
tgtctctcccaacca

SEQ ID NO: 1204161 - DNA, 15 bp, Homo sapiens
ctgtctctcccaacc

SEQ ID NO: 1204162 - DNA, 15 bp, Homo sapiens
tctgtctctcccaac

SEQ ID NO: 1204163 - DNA, 15 bp, Homo sapiens
ctctgtctctcccaa

SEQ ID NO: 1204164 - DNA, 15 bp, Homo sapiens
actctgtctctccca

SEQ ID NO: 1204165 - DNA, 15 bp, Homo sapiens
gactctgtctctccc

SEQ ID NO: 1204166 - DNA, 15 bp, Homo sapiens
agactctgtctctcc

SEQ ID NO: 1204167 - DNA, 15 bp, Homo sapiens
gagactctgtctctc

SEQ ID NO: 1204168 - DNA, 15 bp, Homo sapiens
agagactctgtctct

SEQ ID NO: 1204169 - DNA, 15 bp, Homo sapiens
aagagactctgtctc

SEQ ID NO: 1204170 - DNA, 15 bp, Homo sapiens
aaagagactctgtct

SEQ ID NO: 1204171 - DNA, 15 bp, Homo sapiens
aaaagagactctgtc

SEQ ID NO: 1204172 - DNA, 15 bp, Homo sapiens
aaaaagagactctgt

SEQ ID NO: 1204173 - DNA, 15 bp, Homo sapiens
caaaaagagactctg

SEQ ID NO: 1204174 - DNA, 15 bp, Homo sapiens
acaaaaagagactct

SEQ ID NO: 1204175 - DNA, 15 bp, Homo sapiens
gacaaaaagagactc

SEQ ID NO: 1204176 - DNA, 15 bp, Homo sapiens
ggacaaaaagagact

SEQ ID NO: 1204177 - DNA, 15 bp, Homo sapiens
aggacaaaaagagac

SEQ ID NO: 1204178 - DNA, 15 bp, Homo sapiens
aaggacaaaaagaga

SEQ ID NO: 1204179 - DNA, 15 bp, Homo sapiens
gaaggacaaaaagag

SEQ ID NO: 1204180 - DNA, 15 bp, Homo sapiens
tgaaggacaaaaaga

SEQ ID NO: 1204181 - DNA, 15 bp, Homo sapiens
ctgaaggacaaaaag

SEQ ID NO: 1204182 - DNA, 15 bp, Homo sapiens
cctgaaggacaaaaa

SEQ ID NO: 1204183 - DNA, 15 bp, Homo sapiens
gcctgaaggacaaaa

SEQ ID NO: 1204184 - DNA, 15 bp, Homo sapiens
agcctgaaggacaaa

SEQ ID NO: 1204185 - DNA, 15 bp, Homo sapiens
cagcctgaaggacaa

SEQ ID NO: 1204186 - DNA, 15 bp, Homo sapiens
ccagcctgaaggaca

SEQ ID NO: 1204187 - DNA, 15 bp, Homo sapiens
tccagcctgaaggac

SEQ ID NO: 1204188 - DNA, 15 bp, Homo sapiens
ctccagcctgaagga

SEQ ID NO: 1204189 - DNA, 15 bp, Homo sapiens
actccagcctgaagg

SEQ ID NO: 1204190 - DNA, 15 bp, Homo sapiens
cactccagcctgaag

SEQ ID NO: 1204191 - DNA, 15 bp, Homo sapiens
tgattgcaccattgc

SEQ ID NO: 1204192 - DNA, 15 bp, Homo sapiens
atgattgcaccattg

SEQ ID NO: 1204193 - DNA, 15 bp, Homo sapiens
catgattgcaccatt

SEQ ID NO: 1204194 - DNA, 15 bp, Homo sapiens
ccatgattgcaccat

SEQ ID NO: 1204195 - DNA, 15 bp, Homo sapiens
cgagccatgattgca

SEQ ID NO: 1204196 - DNA, 15 bp, Homo sapiens
gcgagccatgattgc

SEQ ID NO: 1204197 - DNA, 15 bp, Homo sapiens
agcgagccatgattg

SEQ ID NO: 1204198 - DNA, 15 bp, Homo sapiens
cagcgagccatgatt

SEQ ID NO: 1204199 - DNA, 15 bp, Homo sapiens
gcagcgagccatgat

SEQ ID NO: 1204200 - DNA, 15 bp, Homo sapiens
tgcagcgagccatga

SEQ ID NO: 1204201 - DNA, 15 bp, Homo sapiens
ctgcagcgagccatg

SEQ ID NO: 1204202 - DNA, 15 bp, Homo sapiens
gctgcagcgagccat

SEQ ID NO: 1204203 - DNA, 15 bp, Homo sapiens
ggctgcagcgagcca

SEQ ID NO: 1204204 - DNA, 15 bp, Homo sapiens
aggctgcagcgagcc

SEQ ID NO: 1204205 - DNA, 15 bp, Homo sapiens
gaggctgcagcgagc

SEQ ID NO: 1204206 - DNA, 15 bp, Homo sapiens
cgaggctgcagcgag

SEQ ID NO: 1204207 - DNA, 15 bp, Homo sapiens
tcgaggctgcagcga

SEQ ID NO: 1204208 - DNA, 15 bp, Homo sapiens
gtcgaggctgcagcg

SEQ ID NO: 1204209 - DNA, 15 bp, Homo sapiens
ggtcgaggctgcagc

SEQ ID NO: 1204210 - DNA, 15 bp, Homo sapiens
aggaggtcgaggctg

SEQ ID NO: 1204211 - DNA, 15 bp, Homo sapiens
caggaggtcgaggct

SEQ ID NO: 1204212 - DNA, 15 bp, Homo sapiens
ccaggaggtcgaggc

SEQ ID NO: 1204213 - DNA, 15 bp, Homo sapiens
cccaggaggtcgagg

SEQ ID NO: 1204214 - DNA, 15 bp, Homo sapiens
acccaggaggtcgag

SEQ ID NO: 1204215 - DNA, 15 bp, Homo sapiens
aacccaggaggtcga

SEQ ID NO: 1204216 - DNA, 15 bp, Homo sapiens
gaacccaggaggtcg

SEQ ID NO: 1204217 - DNA, 15 bp, Homo sapiens
tcttgaacccaggag

SEQ ID NO: 1204218 - DNA, 15 bp, Homo sapiens
ctcttgaacccagga

SEQ ID NO: 1204219 - DNA, 15 bp, Homo sapiens
gatctcttgaaccca

SEQ ID NO: 1204220 - DNA, 15 bp, Homo sapiens
ggatctcttgaaccc

SEQ ID NO: 1204221 - DNA, 15 bp, Homo sapiens
aggatctcttgaacc

SEQ ID NO: 1204222 - DNA, 15 bp, Homo sapiens
gaggatctcttgaac

SEQ ID NO: 1204223 - DNA, 15 bp, Homo sapiens
ggaggatctcttgaa

SEQ ID NO: 1204224 - DNA, 15 bp, Homo sapiens
aggaggatctcttga

SEQ ID NO: 1204225 - DNA, 15 bp, Homo sapiens
caggaggatctcttg

SEQ ID NO: 1204226 - DNA, 15 bp, Homo sapiens
gcaggaggatctctt

SEQ ID NO: 1204227 - DNA, 15 bp, Homo sapiens
ggcaggaggatctct

SEQ ID NO: 1204228 - DNA, 15 bp, Homo sapiens
aggcaggaggatctc

SEQ ID NO: 1204229 - DNA, 15 bp, Homo sapiens
gaggcaggaggatct

SEQ ID NO: 1204230 - DNA, 15 bp, Homo sapiens
aaggaggctgaggca

SEQ ID NO: 1204231 - DNA, 15 bp, Homo sapiens
taaggaggctgaggc

SEQ ID NO: 1204232 - DNA, 15 bp, Homo sapiens
ctaaggaggctgagg

SEQ ID NO: 1204233 - DNA, 15 bp, Homo sapiens
gctaaggaggctgag

SEQ ID NO: 1204234 - DNA, 15 bp, Homo sapiens
tgctaaggaggctga

SEQ ID NO: 1204235 - DNA, 15 bp, Homo sapiens
ctgctaaggaggctg

SEQ ID NO: 1204236 - DNA, 15 bp, Homo sapiens
gctgctaaggaggct

SEQ ID NO: 1204237 - DNA, 15 bp, Homo sapiens
agctgctaaggaggc

SEQ ID NO: 1204238 - DNA, 15 bp, Homo sapiens
cagctgctaaggagg

SEQ ID NO: 1204239 - DNA, 15 bp, Homo sapiens
ccagctgctaaggag

SEQ ID NO: 1204240 - DNA, 15 bp, Homo sapiens
cccagctgctaagga

SEQ ID NO: 1204241 - DNA, 15 bp, Homo sapiens
tcccagctgctaagg

SEQ ID NO: 1204242 - DNA, 15 bp, Homo sapiens
ctcccagctgctaag

SEQ ID NO: 1204243 - DNA, 15 bp, Homo sapiens
actcccagctgctaa

SEQ ID NO: 1204244 - DNA, 15 bp, Homo sapiens
cactcccagctgcta

SEQ ID NO: 1204245 - DNA, 15 bp, Homo sapiens
gcactcccagctgct

SEQ ID NO: 1204246 - DNA, 15 bp, Homo sapiens
tgcactcccagctgc

SEQ ID NO: 1204247 - DNA, 15 bp, Homo sapiens
ctgcactcccagctg

SEQ ID NO: 1204248 - DNA, 15 bp, Homo sapiens
cctgcactcccagct

SEQ ID NO: 1204249 - DNA, 15 bp, Homo sapiens
gcctgcactcccagc

SEQ ID NO: 1204250 - DNA, 15 bp, Homo sapiens
cgcctgcactcccag

SEQ ID NO: 1204251 - DNA, 15 bp, Homo sapiens
gcgcctgcactccca

SEQ ID NO: 1204252 - DNA, 15 bp, Homo sapiens
tgcgcctgcactccc

SEQ ID NO: 1204253 - DNA, 15 bp, Homo sapiens
gtgcgcctgcactcc

SEQ ID NO: 1204254 - DNA, 15 bp, Homo sapiens
tgtgcgcctgcactc

SEQ ID NO: 1204255 - DNA, 15 bp, Homo sapiens
atgtgcgcctgcact

SEQ ID NO: 1204256 - DNA, 15 bp, Homo sapiens
gatgtgcgcctgcac

SEQ ID NO: 1204257 - DNA, 15 bp, Homo sapiens
tgatgtgcgcctgca

SEQ ID NO: 1204258 - DNA, 15 bp, Homo sapiens
gtgatgtgcgcctgc

SEQ ID NO: 1204259 - DNA, 15 bp, Homo sapiens
ggtgatgtgcgcctg

SEQ ID NO: 1204260 - DNA, 15 bp, Homo sapiens
tggtgatgtgcgcct

SEQ ID NO: 1204261 - DNA, 15 bp, Homo sapiens
gtggtgatgtgcgcc

SEQ ID NO: 1204262 - DNA, 15 bp, Homo sapiens
cgtggtgatgtgcgc

SEQ ID NO: 1204263 - DNA, 15 bp, Homo sapiens
acgtggtgatgtgcg

SEQ ID NO: 1204264 - DNA, 15 bp, Homo sapiens
gacgtggtgatgtgc

SEQ ID NO: 1204265 - DNA, 15 bp, Homo sapiens
ggacgtggtgatgtg

SEQ ID NO: 1204266 - DNA, 15 bp, Homo sapiens
tggacgtggtgatgt

SEQ ID NO: 1204267 - DNA, 15 bp, Homo sapiens
ttggacgtggtgatg

SEQ ID NO: 1204268 - DNA, 15 bp, Homo sapiens
gttggacgtggtgat

SEQ ID NO: 1204269 - DNA, 15 bp, Homo sapiens
agttggacgtggtga

SEQ ID NO: 1204270 - DNA, 15 bp, Homo sapiens
tagttggacgtggtg

SEQ ID NO: 1204271 - DNA, 15 bp, Homo sapiens
ttagttggacgtggt

SEQ ID NO: 1204272 - DNA, 15 bp, Homo sapiens
attagttggacgtgg

SEQ ID NO: 1204273 - DNA, 15 bp, Homo sapiens
aattagttggacgtg

SEQ ID NO: 1204274 - DNA, 15 bp, Homo sapiens
aaattagttggacgt

SEQ ID NO: 1204275 - DNA, 15 bp, Homo sapiens
aaaattagttggacg

SEQ ID NO: 1204276 - DNA, 15 bp, Homo sapiens
aaaaattagttggac

SEQ ID NO: 1204277 - DNA, 15 bp, Homo sapiens
caaaaattagttgga

SEQ ID NO: 1204278 - DNA, 15 bp, Homo sapiens
acaaaaattagttgg

SEQ ID NO: 1204279 - DNA, 15 bp, Homo sapiens
tacaaaaattagttg

SEQ ID NO: 1204280 - DNA, 15 bp, Homo sapiens
atacaaaaattagtt

SEQ ID NO: 1204281 - DNA, 15 bp, Homo sapiens
aatacaaaaattagt

SEQ ID NO: 1204282 - DNA, 15 bp, Homo sapiens
ataaaaaatacaaaa

SEQ ID NO: 1204283 - DNA, 15 bp, Homo sapiens
tataaaaaatacaaa

SEQ ID NO: 1204284 - DNA, 15 bp, Homo sapiens
tctctataaaaaata

SEQ ID NO: 1204285 - DNA, 15 bp, Homo sapiens
gtctctataaaaaat

SEQ ID NO: 1204286 - DNA, 15 bp, Homo sapiens
agtctctataaaaaa

SEQ ID NO: 1204287 - DNA, 15 bp, Homo sapiens
cagtctctataaaaa

SEQ ID NO: 1204288 - DNA, 15 bp, Homo sapiens
tcagtctctataaaa

SEQ ID NO: 1204289 - DNA, 15 bp, Homo sapiens
ctcagtctctataaa

SEQ ID NO: 1204290 - DNA, 15 bp, Homo sapiens
actcagtctctataa

SEQ ID NO: 1204291 - DNA, 15 bp, Homo sapiens
gactcagtctctata

SEQ ID NO: 1204292 - DNA, 15 bp, Homo sapiens
agactcagtctctat

SEQ ID NO: 1204293 - DNA, 15 bp, Homo sapiens
gagactcagtctcta

SEQ ID NO: 1204294 - DNA, 15 bp, Homo sapiens
cgagactcagtctct

SEQ ID NO: 1204295 - DNA, 15 bp, Homo sapiens
gcgagactcagtctc

SEQ ID NO: 1204296 - DNA, 15 bp, Homo sapiens
agcgagactcagtct

SEQ ID NO: 1204297 - DNA, 15 bp, Homo sapiens
tagcgagactcagtc

SEQ ID NO: 1204298 - DNA, 15 bp, Homo sapiens
atagcgagactcagt

SEQ ID NO: 1204299 - DNA, 15 bp, Homo sapiens
catagcgagactcag

SEQ ID NO: 1204300 - DNA, 15 bp, Homo sapiens
acatagcgagactca

SEQ ID NO: 1204301 - DNA, 15 bp, Homo sapiens
aacatagcgagactc

SEQ ID NO: 1204302 - DNA, 15 bp, Homo sapiens
caacatagcgagact

SEQ ID NO: 1204303 - DNA, 15 bp, Homo sapiens
gcaacatagcgagac

SEQ ID NO: 1204304 - DNA, 15 bp, Homo sapiens
cctgggcaacatagc

SEQ ID NO: 1204305 - DNA, 15 bp, Homo sapiens
gaagtttgagaccag

SEQ ID NO: 1204306 - DNA, 15 bp, Homo sapiens
agaagtttgagacca

SEQ ID NO: 1204307 - DNA, 15 bp, Homo sapiens
tagaagtttgagacc

SEQ ID NO: 1204308 - DNA, 15 bp, Homo sapiens
ctagaagtttgagac

SEQ ID NO: 1204309 - DNA, 15 bp, Homo sapiens
tctagaagtttgaga

SEQ ID NO: 1204310 - DNA, 15 bp, Homo sapiens
gtctagaagtttgag

SEQ ID NO: 1204311 - DNA, 15 bp, Homo sapiens
agtctagaagtttga

SEQ ID NO: 1204312 - DNA, 15 bp, Homo sapiens
gagtctagaagtttg

SEQ ID NO: 1204313 - DNA, 15 bp, Homo sapiens
tgagtctagaagttt

SEQ ID NO: 1204314 - DNA, 15 bp, Homo sapiens
ttgagtctagaagtt

SEQ ID NO: 1204315 - DNA, 15 bp, Homo sapiens
cttgagtctagaagt

SEQ ID NO: 1204316 - DNA, 15 bp, Homo sapiens
gcttgagtctagaag

SEQ ID NO: 1204317 - DNA, 15 bp, Homo sapiens
tgcttgagtctagaa

SEQ ID NO: 1204318 - DNA, 15 bp, Homo sapiens
ttgcttgagtctaga

SEQ ID NO: 1204319 - DNA, 15 bp, Homo sapiens
attgcttgagtctag

SEQ ID NO: 1204320 - DNA, 15 bp, Homo sapiens
gattgcttgagtcta

SEQ ID NO: 1204321 - DNA, 15 bp, Homo sapiens
ggattgcttgagtct

SEQ ID NO: 1204322 - DNA, 15 bp, Homo sapiens
aggattgcttgagtc

SEQ ID NO: 1204323 - DNA, 15 bp, Homo sapiens
gaggattgcttgagt

SEQ ID NO: 1204324 - DNA, 15 bp, Homo sapiens
atgggaggattgctt

SEQ ID NO: 1204325 - DNA, 15 bp, Homo sapiens
gatgggaggattgct

SEQ ID NO: 1204326 - DNA, 15 bp, Homo sapiens
agatgggaggattgc

SEQ ID NO: 1204327 - DNA, 15 bp, Homo sapiens
aagatgggaggattg

SEQ ID NO: 1204328 - DNA, 15 bp, Homo sapiens
caagatgggaggatt

SEQ ID NO: 1204329 - DNA, 15 bp, Homo sapiens
ccaagatgggaggat

SEQ ID NO: 1204330 - DNA, 15 bp, Homo sapiens
gccaagatgggagga

SEQ ID NO: 1204331 - DNA, 15 bp, Homo sapiens
ggccaagatgggagg

SEQ ID NO: 1204332 - DNA, 15 bp, Homo sapiens
aggccaagatgggag

SEQ ID NO: 1204333 - DNA, 15 bp, Homo sapiens
aaggccaagatggga

SEQ ID NO: 1204334 - DNA, 15 bp, Homo sapiens
gaaggccaagatggg

SEQ ID NO: 1204335 - DNA, 15 bp, Homo sapiens
ggaaggccaagatgg

SEQ ID NO: 1204336 - DNA, 15 bp, Homo sapiens
tggaaggccaagatg

SEQ ID NO: 1204337 - DNA, 15 bp, Homo sapiens
ttggaaggccaagat

SEQ ID NO: 1204338 - DNA, 15 bp, Homo sapiens
tttggaaggccaaga

SEQ ID NO: 1204339 - DNA, 15 bp, Homo sapiens
cactttggaaggcca

SEQ ID NO: 1204340 - DNA, 15 bp, Homo sapiens
gcactttggaaggcc

SEQ ID NO: 1204341 - DNA, 15 bp, Homo sapiens
gggtggctcatacct

SEQ ID NO: 1204342 - DNA, 15 bp, Homo sapiens
agggtggctcatacc

SEQ ID NO: 1204343 - DNA, 15 bp, Homo sapiens
cagggtggctcatac

SEQ ID NO: 1204344 - DNA, 15 bp, Homo sapiens
gcagggtggctcata

SEQ ID NO: 1204345 - DNA, 15 bp, Homo sapiens
tcgggcagggtggct

SEQ ID NO: 1204346 - DNA, 15 bp, Homo sapiens
gtcgggcagggtggc

SEQ ID NO: 1204347 - DNA, 15 bp, Homo sapiens
ggtcgggcagggtgg

SEQ ID NO: 1204348 - DNA, 15 bp, Homo sapiens
aggtcgggcagggtg

SEQ ID NO: 1204349 - DNA, 15 bp, Homo sapiens
taggtcgggcagggt

SEQ ID NO: 1204350 - DNA, 15 bp, Homo sapiens
ttaggtcgggcaggg

SEQ ID NO: 1204351 - DNA, 15 bp, Homo sapiens
tttaggtcgggcagg

SEQ ID NO: 1204352 - DNA, 15 bp, Homo sapiens
ttttaggtcgggcag

SEQ ID NO: 1204353 - DNA, 15 bp, Homo sapiens
tttttaggtcgggca

SEQ ID NO: 1204354 - DNA, 15 bp, Homo sapiens
atttttaggtcgggc

SEQ ID NO: 1204355 - DNA, 15 bp, Homo sapiens
aatttttaggtcggg

SEQ ID NO: 1204356 - DNA, 15 bp, Homo sapiens
gaatttttaggtcgg

SEQ ID NO: 1204357 - DNA, 15 bp, Homo sapiens
agaatttttaggtcg

SEQ ID NO: 1204358 - DNA, 15 bp, Homo sapiens
aagaatttttaggtc

SEQ ID NO: 1204359 - DNA, 15 bp, Homo sapiens
taagaatttttaggt

SEQ ID NO: 1204360 - DNA, 15 bp, Homo sapiens
ttaagaatttttagg

SEQ ID NO: 1204361 - DNA, 15 bp, Homo sapiens
attaagaatttttag

SEQ ID NO: 1204362 - DNA, 15 bp, Homo sapiens
cattaagaattttta

SEQ ID NO: 1204363 - DNA, 15 bp, Homo sapiens
ccattaagaattttt

SEQ ID NO: 1204364 - DNA, 15 bp, Homo sapiens
cccattaagaatttt

SEQ ID NO: 1204365 - DNA, 15 bp, Homo sapiens
gcccattaagaattt

SEQ ID NO: 1204366 - DNA, 15 bp, Homo sapiens
agcccattaagaatt

SEQ ID NO: 1204367 - DNA, 15 bp, Homo sapiens
aagcccattaagaat

SEQ ID NO: 1204368 - DNA, 15 bp, Homo sapiens
aaagcccattaagaa

SEQ ID NO: 1204369 - DNA, 15 bp, Homo sapiens
aaaagcccattaaga

SEQ ID NO: 1204370 - DNA, 15 bp, Homo sapiens
aaaaagcccattaag

SEQ ID NO: 1204371 - DNA, 15 bp, Homo sapiens
gaaaaagcccattaa

SEQ ID NO: 1204372 - DNA, 15 bp, Homo sapiens
tgaaaaagcccatta

SEQ ID NO: 1204373 - DNA, 15 bp, Homo sapiens
gtgaaaaagcccatt

SEQ ID NO: 1204374 - DNA, 15 bp, Homo sapiens
cgtgaaaaagcccat

SEQ ID NO: 1204375 - DNA, 15 bp, Homo sapiens
acgtgaaaaagccca

SEQ ID NO: 1204376 - DNA, 15 bp, Homo sapiens
aacgtgaaaaagccc

SEQ ID NO: 1204377 - DNA, 15 bp, Homo sapiens
gaacgtgaaaaagcc

SEQ ID NO: 1204378 - DNA, 15 bp, Homo sapiens
agaacgtgaaaaagc

SEQ ID NO: 1204379 - DNA, 15 bp, Homo sapiens
cagaacgtgaaaaag

SEQ ID NO: 1204380 - DNA, 15 bp, Homo sapiens
acagaacgtgaaaaa

SEQ ID NO: 1204381 - DNA, 15 bp, Homo sapiens
aacagaacgtgaaaa

SEQ ID NO: 1204382 - DNA, 15 bp, Homo sapiens
aaacagaacgtgaaa

SEQ ID NO: 1204383 - DNA, 15 bp, Homo sapiens
aaaacagaacgtgaa

SEQ ID NO: 1204384 - DNA, 15 bp, Homo sapiens
gaaaacagaacgtga

SEQ ID NO: 1204385 - DNA, 15 bp, Homo sapiens
ggaaaacagaacgtg

SEQ ID NO: 1204386 - DNA, 15 bp, Homo sapiens
aggaaaacagaacgt

SEQ ID NO: 1204387 - DNA, 15 bp, Homo sapiens
gaggaaaacagaacg

SEQ ID NO: 1204388 - DNA, 15 bp, Homo sapiens
tgaggaaaacagaac

SEQ ID NO: 1204389 - DNA, 15 bp, Homo sapiens
ctgaggaaaacagaa

SEQ ID NO: 1204390 - DNA, 15 bp, Homo sapiens
tctgaggaaaacaga

SEQ ID NO: 1204391 - DNA, 15 bp, Homo sapiens
gtctgaggaaaacag

SEQ ID NO: 1204392 - DNA, 15 bp, Homo sapiens
agtctgaggaaaaca

SEQ ID NO: 1204393 - DNA, 15 bp, Homo sapiens
tagtctgaggaaaac

SEQ ID NO: 1204394 - DNA, 15 bp, Homo sapiens
ttagtctgaggaaaa

SEQ ID NO: 1204395 - DNA, 15 bp, Homo sapiens
cttagtctgaggaaa

SEQ ID NO: 1204396 - DNA, 15 bp, Homo sapiens
tcttagtctgaggaa

SEQ ID NO: 1204397 - DNA, 15 bp, Homo sapiens
ctcttagtctgagga

SEQ ID NO: 1204398 - DNA, 15 bp, Homo sapiens
actcttagtctgagg

SEQ ID NO: 1204399 - DNA, 15 bp, Homo sapiens
gactcttagtctgag

SEQ ID NO: 1204400 - DNA, 15 bp, Homo sapiens
agactcttagtctga

SEQ ID NO: 1204401 - DNA, 15 bp, Homo sapiens
cagactcttagtctg

SEQ ID NO: 1204402 - DNA, 15 bp, Homo sapiens
tcagactcttagtct

SEQ ID NO: 1204403 - DNA, 15 bp, Homo sapiens
ttcagactcttagtc

SEQ ID NO: 1204404 - DNA, 15 bp, Homo sapiens
tttcagactcttagt

SEQ ID NO: 1204405 - DNA, 15 bp, Homo sapiens
atttcagactcttag

SEQ ID NO: 1204406 - DNA, 15 bp, Homo sapiens
aatttcagactctta

SEQ ID NO: 1204407 - DNA, 15 bp, Homo sapiens
aaatttcagactctt

SEQ ID NO: 1204408 - DNA, 15 bp, Homo sapiens
caaatttcagactct

SEQ ID NO: 1204409 - DNA, 15 bp, Homo sapiens
tcaaatttcagactc

SEQ ID NO: 1204410 - DNA, 15 bp, Homo sapiens
atcaaatttcagact

SEQ ID NO: 1204411 - DNA, 15 bp, Homo sapiens
catcaaatttcagac

SEQ ID NO: 1204412 - DNA, 15 bp, Homo sapiens
acatcaaatttcaga

SEQ ID NO: 1204413 - DNA, 15 bp, Homo sapiens
cacatcaaatttcag

SEQ ID NO: 1204414 - DNA, 15 bp, Homo sapiens
acacatcaaatttca

SEQ ID NO: 1204415 - DNA, 15 bp, Homo sapiens
tacacatcaaatttc

SEQ ID NO: 1204416 - DNA, 15 bp, Homo sapiens
atacacatcaaattt

SEQ ID NO: 1204417 - DNA, 15 bp, Homo sapiens
aatacacatcaaatt

SEQ ID NO: 1204418 - DNA, 15 bp, Homo sapiens
aaatacacatcaaat

SEQ ID NO: 1204419 - DNA, 15 bp, Homo sapiens
aaaatacacatcaaa

SEQ ID NO: 1204420 - DNA, 15 bp, Homo sapiens
caaaatacacatcaa

SEQ ID NO: 1204421 - DNA, 15 bp, Homo sapiens
gcaaaatacacatca

SEQ ID NO: 1204422 - DNA, 15 bp, Homo sapiens
cgcaaaatacacatc

SEQ ID NO: 1204423 - DNA, 15 bp, Homo sapiens
gcgcaaaatacacat

SEQ ID NO: 1204424 - DNA, 15 bp, Homo sapiens
agcgcaaaatacaca

SEQ ID NO: 1204425 - DNA, 15 bp, Homo sapiens
gagcgcaaaatacac

SEQ ID NO: 1204426 - DNA, 15 bp, Homo sapiens
tgagcgcaaaataca

SEQ ID NO: 1204427 - DNA, 15 bp, Homo sapiens
ctgagcgcaaaatac

SEQ ID NO: 1204428 - DNA, 15 bp, Homo sapiens
tctgagcgcaaaata

SEQ ID NO: 1204429 - DNA, 15 bp, Homo sapiens
ctctgagcgcaaaat

SEQ ID NO: 1204430 - DNA, 15 bp, Homo sapiens
gctctgagcgcaaaa

SEQ ID NO: 1204431 - DNA, 15 bp, Homo sapiens
tgctctgagcgcaaa

SEQ ID NO: 1204432 - DNA, 15 bp, Homo sapiens
gtgctctgagcgcaa

SEQ ID NO: 1204433 - DNA, 15 bp, Homo sapiens
cgtgctctgagcgca

SEQ ID NO: 1204434 - DNA, 15 bp, Homo sapiens
acgtgctctgagcgc

SEQ ID NO: 1204435 - DNA, 15 bp, Homo sapiens
aacgtgctctgagcg

SEQ ID NO: 1204436 - DNA, 15 bp, Homo sapiens
aaacgtgctctgagc

SEQ ID NO: 1204437 - DNA, 15 bp, Homo sapiens
gaaacgtgctctgag

SEQ ID NO: 1204438 - DNA, 15 bp, Homo sapiens
tgaaacgtgctctga

SEQ ID NO: 1204439 - DNA, 15 bp, Homo sapiens
ctgaaacgtgctctg

SEQ ID NO: 1204440 - DNA, 15 bp, Homo sapiens
actgaaacgtgctct

SEQ ID NO: 1204441 - DNA, 15 bp, Homo sapiens
gactgaaacgtgctc

SEQ ID NO: 1204442 - DNA, 15 bp, Homo sapiens
agactgaaacgtgct

SEQ ID NO: 1204443 - DNA, 15 bp, Homo sapiens
cagactgaaacgtgc

SEQ ID NO: 1204444 - DNA, 15 bp, Homo sapiens
ccagactgaaacgtg

SEQ ID NO: 1204445 - DNA, 15 bp, Homo sapiens
tccagactgaaacgt

SEQ ID NO: 1204446 - DNA, 15 bp, Homo sapiens
gtccagactgaaacg

SEQ ID NO: 1204447 - DNA, 15 bp, Homo sapiens
agtccagactgaaac

SEQ ID NO: 1204448 - DNA, 15 bp, Homo sapiens
tagtccagactgaaa

SEQ ID NO: 1204449 - DNA, 15 bp, Homo sapiens
ctagtccagactgaa

SEQ ID NO: 1204450 - DNA, 15 bp, Homo sapiens
actagtccagactga

SEQ ID NO: 1204451 - DNA, 15 bp, Homo sapiens
cactagtccagactg

SEQ ID NO: 1204452 - DNA, 15 bp, Homo sapiens
tcactagtccagact

SEQ ID NO: 1204453 - DNA, 15 bp, Homo sapiens
gtcactagtccagac

SEQ ID NO: 1204454 - DNA, 15 bp, Homo sapiens
tgtcactagtccaga

SEQ ID NO: 1204455 - DNA, 15 bp, Homo sapiens
atgtcactagtccag

SEQ ID NO: 1204456 - DNA, 15 bp, Homo sapiens
aatgtcactagtcca

SEQ ID NO: 1204457 - DNA, 15 bp, Homo sapiens
aaatgtcactagtcc

SEQ ID NO: 1204458 - DNA, 15 bp, Homo sapiens
gaaatgtcactagtc

SEQ ID NO: 1204459 - DNA, 15 bp, Homo sapiens
tgaaatgtcactagt

SEQ ID NO: 1204460 - DNA, 15 bp, Homo sapiens
ttgaaatgtcactag

SEQ ID NO: 1204461 - DNA, 15 bp, Homo sapiens
cttgaaatgtcacta

SEQ ID NO: 1204462 - DNA, 15 bp, Homo sapiens
acttgaaatgtcact

SEQ ID NO: 1204463 - DNA, 15 bp, Homo sapiens
gacttgaaatgtcac

SEQ ID NO: 1204464 - DNA, 15 bp, Homo sapiens
agacttgaaatgtca

SEQ ID NO: 1204465 - DNA, 15 bp, Homo sapiens
gagacttgaaatgtc

SEQ ID NO: 1204466 - DNA, 15 bp, Homo sapiens
ggagacttgaaatgt

SEQ ID NO: 1204467 - DNA, 15 bp, Homo sapiens
tggagacttgaaatg

SEQ ID NO: 1204468 - DNA, 15 bp, Homo sapiens
ttggagacttgaaat

SEQ ID NO: 1204469 - DNA, 15 bp, Homo sapiens
tttggagacttgaaa

SEQ ID NO: 1204470 - DNA, 15 bp, Homo sapiens
ctttggagacttgaa

SEQ ID NO: 1204471 - DNA, 15 bp, Homo sapiens
cctttggagacttga

SEQ ID NO: 1204472 - DNA, 15 bp, Homo sapiens
gcctttggagacttg

SEQ ID NO: 1204473 - DNA, 15 bp, Homo sapiens
tgcctttggagactt

SEQ ID NO: 1204474 - DNA, 15 bp, Homo sapiens
gtgcctttggagact

SEQ ID NO: 1204475 - DNA, 15 bp, Homo sapiens
tgtgcctttggagac

SEQ ID NO: 1204476 - DNA, 15 bp, Homo sapiens
atgtgcctttggaga

SEQ ID NO: 1204477 - DNA, 15 bp, Homo sapiens
catgtgcctttggag

SEQ ID NO: 1204478 - DNA, 15 bp, Homo sapiens
acatgtgcctttgga

SEQ ID NO: 1204479 - DNA, 15 bp, Homo sapiens
cacatgtgcctttgg

SEQ ID NO: 1204480 - DNA, 15 bp, Homo sapiens
tcacatgtgcctttg

SEQ ID NO: 1204481 - DNA, 15 bp, Homo sapiens
gtcacatgtgccttt

SEQ ID NO: 1204482 - DNA, 15 bp, Homo sapiens
agtcacatgtgcctt

SEQ ID NO: 1204483 - DNA, 15 bp, Homo sapiens
tagtcacatgtgcct

SEQ ID NO: 1204484 - DNA, 15 bp, Homo sapiens
ctagtcacatgtgcc

SEQ ID NO: 1204485 - DNA, 15 bp, Homo sapiens
cctagtcacatgtgc

SEQ ID NO: 1204486 - DNA, 15 bp, Homo sapiens
ccctagtcacatgtg

SEQ ID NO: 1204487 - DNA, 15 bp, Homo sapiens
cccctagtcacatgt

SEQ ID NO: 1204488 - DNA, 15 bp, Homo sapiens
gcccctagtcacatg

SEQ ID NO: 1204489 - DNA, 15 bp, Homo sapiens
tgcccctagtcacat

SEQ ID NO: 1204490 - DNA, 15 bp, Homo sapiens
ctgcccctagtcaca

SEQ ID NO: 1204491 - DNA, 15 bp, Homo sapiens
gctgcccctagtcac

SEQ ID NO: 1204492 - DNA, 15 bp, Homo sapiens
tgctgcccctagtca

SEQ ID NO: 1204493 - DNA, 15 bp, Homo sapiens
gtgctgcccctagtc

SEQ ID NO: 1204494 - DNA, 15 bp, Homo sapiens
tgtgctgcccctagt

SEQ ID NO: 1204495 - DNA, 15 bp, Homo sapiens
ctgtgctgcccctag

SEQ ID NO: 1204496 - DNA, 15 bp, Homo sapiens
cctgtgctgccccta

SEQ ID NO: 1204497 - DNA, 15 bp, Homo sapiens
ccctgtgctgcccct

SEQ ID NO: 1204498 - DNA, 15 bp, Homo sapiens
accctgtgctgcccc

SEQ ID NO: 1204499 - DNA, 15 bp, Homo sapiens
caccctgtgctgccc

SEQ ID NO: 1204500 - DNA, 15 bp, Homo sapiens
gcaccctgtgctgcc

SEQ ID NO: 1204501 - DNA, 15 bp, Homo sapiens
tgcaccctgtgctgc

SEQ ID NO: 1204502 - DNA, 15 bp, Homo sapiens
gtgcaccctgtgctg

SEQ ID NO: 1204503 - DNA, 15 bp, Homo sapiens
cgtgcaccctgtgct

SEQ ID NO: 1204504 - DNA, 15 bp, Homo sapiens
ccgtgcaccctgtgc

SEQ ID NO: 1204505 - DNA, 15 bp, Homo sapiens
accgtgcaccctgtg

SEQ ID NO: 1204506 - DNA, 15 bp, Homo sapiens
caccgtgcaccctgt

SEQ ID NO: 1204507 - DNA, 15 bp, Homo sapiens
gcaccgtgcaccctg

SEQ ID NO: 1204508 - DNA, 15 bp, Homo sapiens
tgcaccgtgcaccct

SEQ ID NO: 1204509 - DNA, 15 bp, Homo sapiens
ctgcaccgtgcaccc

SEQ ID NO: 1204510 - DNA, 15 bp, Homo sapiens
cctgcaccgtgcacc

SEQ ID NO: 1204511 - DNA, 15 bp, Homo sapiens
tcctgcaccgtgcac

SEQ ID NO: 1204512 - DNA, 15 bp, Homo sapiens
gtcctgcaccgtgca

SEQ ID NO: 1204513 - DNA, 15 bp, Homo sapiens
cgtcctgcaccgtgc

SEQ ID NO: 1204514 - DNA, 15 bp, Homo sapiens
gcgtcctgcaccgtg

SEQ ID NO: 1204515 - DNA, 15 bp, Homo sapiens
tgcgtcctgcaccgt

SEQ ID NO: 1204516 - DNA, 15 bp, Homo sapiens
ctgcgtcctgcaccg

SEQ ID NO: 1204517 - DNA, 15 bp, Homo sapiens
cctgcgtcctgcacc

SEQ ID NO: 1204518 - DNA, 15 bp, Homo sapiens
ccctgcgtcctgcac

SEQ ID NO: 1204519 - DNA, 15 bp, Homo sapiens
gccctgcgtcctgca

SEQ ID NO: 1204520 - DNA, 15 bp, Homo sapiens
cgccctgcgtcctgc

SEQ ID NO: 1204521 - DNA, 15 bp, Homo sapiens
gcgccctgcgtcctg

SEQ ID NO: 1204522 - DNA, 15 bp, Homo sapiens
cgcgccctgcgtcct

SEQ ID NO: 1204523 - DNA, 15 bp, Homo sapiens
gcgcgccctgcgtcc

SEQ ID NO: 1204524 - DNA, 15 bp, Homo sapiens
agcgcgccctgcgtc

SEQ ID NO: 1204525 - DNA, 15 bp, Homo sapiens
gagcgcgccctgcgt

SEQ ID NO: 1204526 - DNA, 15 bp, Homo sapiens
agagcgcgccctgcg

SEQ ID NO: 1204527 - DNA, 15 bp, Homo sapiens
tagagcgcgccctgc

SEQ ID NO: 1204528 - DNA, 15 bp, Homo sapiens
ctagagcgcgccctg

SEQ ID NO: 1204529 - DNA, 15 bp, Homo sapiens
tctagagcgcgccct

SEQ ID NO: 1204530 - DNA, 15 bp, Homo sapiens
ctctagagcgcgccc

SEQ ID NO: 1204531 - DNA, 15 bp, Homo sapiens
actctagagcgcgcc

SEQ ID NO: 1204532 - DNA, 15 bp, Homo sapiens
cactctagagcgcgc

SEQ ID NO: 1204533 - DNA, 15 bp, Homo sapiens
tcactctagagcgcg

SEQ ID NO: 1204534 - DNA, 15 bp, Homo sapiens
ttcactctagagcgc

SEQ ID NO: 1204535 - DNA, 15 bp, Homo sapiens
cttcactctagagcg

SEQ ID NO: 1204536 - DNA, 15 bp, Homo sapiens
ccttcactctagagc

SEQ ID NO: 1204537 - DNA, 15 bp, Homo sapiens
tccttcactctagag

SEQ ID NO: 1204538 - DNA, 15 bp, Homo sapiens
ctccttcactctaga

SEQ ID NO: 1204539 - DNA, 15 bp, Homo sapiens
actccttcactctag

SEQ ID NO: 1204540 - DNA, 15 bp, Homo sapiens
cactccttcactcta

SEQ ID NO: 1204541 - DNA, 15 bp, Homo sapiens
tcactccttcactct

SEQ ID NO: 1204542 - DNA, 15 bp, Homo sapiens
gtcactccttcactc

SEQ ID NO: 1204543 - DNA, 15 bp, Homo sapiens
cgtcactccttcact

SEQ ID NO: 1204544 - DNA, 15 bp, Homo sapiens
tcgtcactccttcac

SEQ ID NO: 1204545 - DNA, 15 bp, Homo sapiens
ctcgtcactccttca

SEQ ID NO: 1204546 - DNA, 15 bp, Homo sapiens
gctcgtcactccttc

SEQ ID NO: 1204547 - DNA, 15 bp, Homo sapiens
tgctcgtcactcctt

SEQ ID NO: 1204548 - DNA, 15 bp, Homo sapiens
ttgctcgtcactcct

SEQ ID NO: 1204549 - DNA, 15 bp, Homo sapiens
tttgctcgtcactcc

SEQ ID NO: 1204550 - DNA, 15 bp, Homo sapiens
ctttgctcgtcactc

SEQ ID NO: 1204551 - DNA, 15 bp, Homo sapiens
cctttgctcgtcact

SEQ ID NO: 1204552 - DNA, 15 bp, Homo sapiens
ccctttgctcgtcac

SEQ ID NO: 1204553 - DNA, 15 bp, Homo sapiens
tccctttgctcgtca

SEQ ID NO: 1204554 - DNA, 15 bp, Homo sapiens
ttccctttgctcgtc

SEQ ID NO: 1204555 - DNA, 15 bp, Homo sapiens
cttccctttgctcgt

SEQ ID NO: 1204556 - DNA, 15 bp, Homo sapiens
ccttccctttgctcg

SEQ ID NO: 1204557 - DNA, 15 bp, Homo sapiens
tccttccctttgctc

SEQ ID NO: 1204558 - DNA, 15 bp, Homo sapiens
ttccttccctttgct

SEQ ID NO: 1204559 - DNA, 15 bp, Homo sapiens
attccttccctttgc

SEQ ID NO: 1204560 - DNA, 15 bp, Homo sapiens
cattccttccctttg

SEQ ID NO: 1204561 - DNA, 15 bp, Homo sapiens
ccattccttcccttt

SEQ ID NO: 1204562 - DNA, 15 bp, Homo sapiens
cccattccttccctt

SEQ ID NO: 1204563 - DNA, 15 bp, Homo sapiens
gcccattccttccct

SEQ ID NO: 1204564 - DNA, 15 bp, Homo sapiens
tgcccattccttccc

SEQ ID NO: 1204565 - DNA, 15 bp, Homo sapiens
ttgcccattccttcc

SEQ ID NO: 1204566 - DNA, 15 bp, Homo sapiens
cttgcccattccttc

SEQ ID NO: 1204567 - DNA, 15 bp, Homo sapiens
gcttgcccattcctt

SEQ ID NO: 1204568 - DNA, 15 bp, Homo sapiens
cgcttgcccattcct

SEQ ID NO: 1204569 - DNA, 15 bp, Homo sapiens
acgcttgcccattcc

SEQ ID NO: 1204570 - DNA, 15 bp, Homo sapiens
tacgcttgcccattc

SEQ ID NO: 1204571 - DNA, 15 bp, Homo sapiens
ctacgcttgcccatt

SEQ ID NO: 1204572 - DNA, 15 bp, Homo sapiens
cctacgcttgcccat

SEQ ID NO: 1204573 - DNA, 15 bp, Homo sapiens
gcctacgcttgccca

SEQ ID NO: 1204574 - DNA, 15 bp, Homo sapiens
cgcctacgcttgccc

SEQ ID NO: 1204575 - DNA, 15 bp, Homo sapiens
tcgcctacgcttgcc

SEQ ID NO: 1204576 - DNA, 15 bp, Homo sapiens
ttcgcctacgcttgc

SEQ ID NO: 1204577 - DNA, 15 bp, Homo sapiens
cttcgcctacgcttg

SEQ ID NO: 1204578 - DNA, 15 bp, Homo sapiens
tcttcgcctacgctt

SEQ ID NO: 1204579 - DNA, 15 bp, Homo sapiens
ctcttcgcctacgct

SEQ ID NO: 1204580 - DNA, 15 bp, Homo sapiens
tctcttcgcctacgc

SEQ ID NO: 1204581 - DNA, 15 bp, Homo sapiens
ctctcttcgcctacg

SEQ ID NO: 1204582 - DNA, 15 bp, Homo sapiens
cctctcttcgcctac

SEQ ID NO: 1204583 - DNA, 15 bp, Homo sapiens
tcctctcttcgccta

SEQ ID NO: 1204584 - DNA, 15 bp, Homo sapiens
ctcctctcttcgcct

SEQ ID NO: 1204585 - DNA, 15 bp, Homo sapiens
cctcctctcttcgcc

SEQ ID NO: 1204586 - DNA, 15 bp, Homo sapiens
ccctcctctcttcgc

SEQ ID NO: 1204587 - DNA, 15 bp, Homo sapiens
gccctcctctcttcg

SEQ ID NO: 1204588 - DNA, 15 bp, Homo sapiens
tgccctcctctcttc

SEQ ID NO: 1204589 - DNA, 15 bp, Homo sapiens
ctgccctcctctctt

SEQ ID NO: 1204590 - DNA, 15 bp, Homo sapiens
gctgccctcctctct

SEQ ID NO: 1204591 - DNA, 15 bp, Homo sapiens
cgctgccctcctctc

SEQ ID NO: 1204592 - DNA, 15 bp, Homo sapiens
ccgctgccctcctct

SEQ ID NO: 1204593 - DNA, 15 bp, Homo sapiens
cccgctgccctcctc

SEQ ID NO: 1204594 - DNA, 15 bp, Homo sapiens
ccccgctgccctcct

SEQ ID NO: 1204595 - DNA, 15 bp, Homo sapiens
cccccgctgccctcc

SEQ ID NO: 1204596 - DNA, 15 bp, Homo sapiens
ccccccgctgccctc

SEQ ID NO: 1204597 - DNA, 15 bp, Homo sapiens
accccccgctgccct

SEQ ID NO: 1204598 - DNA, 15 bp, Homo sapiens
caccccccgctgccc

SEQ ID NO: 1204599 - DNA, 15 bp, Homo sapiens
gcaccccccgctgcc

SEQ ID NO: 1204600 - DNA, 15 bp, Homo sapiens
tgcaccccccgctgc

SEQ ID NO: 1204601 - DNA, 15 bp, Homo sapiens
ttgcaccccccgctg

SEQ ID NO: 1204602 - DNA, 15 bp, Homo sapiens
tttgcaccccccgct

SEQ ID NO: 1204603 - DNA, 15 bp, Homo sapiens
ctttgcaccccccgc

SEQ ID NO: 1204604 - DNA, 15 bp, Homo sapiens
cctttgcaccccccg

SEQ ID NO: 1204605 - DNA, 15 bp, Homo sapiens
acctttgcacccccc

SEQ ID NO: 1204606 - DNA, 15 bp, Homo sapiens
tacctttgcaccccc

SEQ ID NO: 1204607 - DNA, 15 bp, Homo sapiens
gtacctttgcacccc

SEQ ID NO: 1204608 - DNA, 15 bp, Homo sapiens
agtacctttgcaccc

SEQ ID NO: 1204609 - DNA, 15 bp, Homo sapiens
gagtacctttgcacc

SEQ ID NO: 1204610 - DNA, 15 bp, Homo sapiens
tgagtacctttgcac

SEQ ID NO: 1204611 - DNA, 15 bp, Homo sapiens
ctgagtacctttgca

SEQ ID NO: 1204612 - DNA, 15 bp, Homo sapiens
actgagtacctttgc

SEQ ID NO: 1204613 - DNA, 15 bp, Homo sapiens
aactgagtacctttg

SEQ ID NO: 1204614 - DNA, 15 bp, Homo sapiens
aaactgagtaccttt

SEQ ID NO: 1204615 - DNA, 15 bp, Homo sapiens
caaactgagtacctt

SEQ ID NO: 1204616 - DNA, 15 bp, Homo sapiens
gcaaactgagtacct

SEQ ID NO: 1204617 - DNA, 15 bp, Homo sapiens
ggcaaactgagtacc

SEQ ID NO: 1204618 - DNA, 15 bp, Homo sapiens
gggcaaactgagtac

SEQ ID NO: 1204619 - DNA, 15 bp, Homo sapiens
agggcaaactgagta

SEQ ID NO: 1204620 - DNA, 15 bp, Homo sapiens
gagggcaaactgagt

SEQ ID NO: 1204621 - DNA, 15 bp, Homo sapiens
agagggcaaactgag

SEQ ID NO: 1204622 - DNA, 15 bp, Homo sapiens
cagagggcaaactga

SEQ ID NO: 1204623 - DNA, 15 bp, Homo sapiens
acagagggcaaactg

SEQ ID NO: 1204624 - DNA, 15 bp, Homo sapiens
cacagagggcaaact

SEQ ID NO: 1204625 - DNA, 15 bp, Homo sapiens
tcacagagggcaaac

SEQ ID NO: 1204626 - DNA, 15 bp, Homo sapiens
ctcacagagggcaaa

SEQ ID NO: 1204627 - DNA, 15 bp, Homo sapiens
gctcacagagggcaa

SEQ ID NO: 1204628 - DNA, 15 bp, Homo sapiens
cgctcacagagggca

SEQ ID NO: 1204629 - DNA, 15 bp, Homo sapiens
ccgctcacagagggc

SEQ ID NO: 1204630 - DNA, 15 bp, Homo sapiens
cccgctcacagaggg

SEQ ID NO: 1204631 - DNA, 15 bp, Homo sapiens
ccccgctcacagagg

SEQ ID NO: 1204632 - DNA, 15 bp, Homo sapiens
cccccgctcacagag

SEQ ID NO: 1204633 - DNA, 15 bp, Homo sapiens
ccccccgctcacaga

SEQ ID NO: 1204634 - DNA, 15 bp, Homo sapiens
gccccccgctcacag

SEQ ID NO: 1204635 - DNA, 15 bp, Homo sapiens
agccccccgctcaca

SEQ ID NO: 1204636 - DNA, 15 bp, Homo sapiens
cagccccccgctcac

SEQ ID NO: 1204637 - DNA, 15 bp, Homo sapiens
gcagccccccgctca

SEQ ID NO: 1204638 - DNA, 15 bp, Homo sapiens
tgcagccccccgctc

SEQ ID NO: 1204639 - DNA, 15 bp, Homo sapiens
gtgcagccccccgct

SEQ ID NO: 1204640 - DNA, 15 bp, Homo sapiens
ggtgcagccccccgc

SEQ ID NO: 1204641 - DNA, 15 bp, Homo sapiens
gggtgcagccccccg

SEQ ID NO: 1204642 - DNA, 15 bp, Homo sapiens
tgggtgcagcccccc

SEQ ID NO: 1204643 - DNA, 15 bp, Homo sapiens
gtgggtgcagccccc

SEQ ID NO: 1204644 - DNA, 15 bp, Homo sapiens
ggtgggtgcagcccc

SEQ ID NO: 1204645 - DNA, 15 bp, Homo sapiens
aggtgggtgcagccc

SEQ ID NO: 1204646 - DNA, 15 bp, Homo sapiens
aaggtgggtgcagcc

SEQ ID NO: 1204647 - DNA, 15 bp, Homo sapiens
gaaggtgggtgcagc

SEQ ID NO: 1204648 - DNA, 15 bp, Homo sapiens
agaaggtgggtgcag

SEQ ID NO: 1204649 - DNA, 15 bp, Homo sapiens
aagaaggtgggtgca

SEQ ID NO: 1204650 - DNA, 15 bp, Homo sapiens
gaagaaggtgggtgc

SEQ ID NO: 1204651 - DNA, 15 bp, Homo sapiens
agaagaaggtgggtg

SEQ ID NO: 1204652 - DNA, 15 bp, Homo sapiens
cagaagaaggtgggt

SEQ ID NO: 1204653 - DNA, 15 bp, Homo sapiens
ccagaagaaggtggg

SEQ ID NO: 1204654 - DNA, 15 bp, Homo sapiens
tccagaagaaggtgg

SEQ ID NO: 1204655 - DNA, 15 bp, Homo sapiens
ttccagaagaaggtg

SEQ ID NO: 1204656 - DNA, 15 bp, Homo sapiens
cttccagaagaaggt

SEQ ID NO: 1204657 - DNA, 15 bp, Homo sapiens
ccttccagaagaagg

SEQ ID NO: 1204658 - DNA, 15 bp, Homo sapiens
tccttccagaagaag

SEQ ID NO: 1204659 - DNA, 15 bp, Homo sapiens
ctccttccagaagaa

SEQ ID NO: 1204660 - DNA, 15 bp, Homo sapiens
gctccttccagaaga

SEQ ID NO: 1204661 - DNA, 15 bp, Homo sapiens
ggctccttccagaag

SEQ ID NO: 1204662 - DNA, 15 bp, Homo sapiens
cggctccttccagaa

SEQ ID NO: 1204663 - DNA, 15 bp, Homo sapiens
ccggctccttccaga

SEQ ID NO: 1204664 - DNA, 15 bp, Homo sapiens
cccggctccttccag

SEQ ID NO: 1204665 - DNA, 15 bp, Homo sapiens
tcccggctccttcca

SEQ ID NO: 1204666 - DNA, 15 bp, Homo sapiens
atcccggctccttcc

SEQ ID NO: 1204667 - DNA, 15 bp, Homo sapiens
aatcccggctccttc

SEQ ID NO: 1204668 - DNA, 15 bp, Homo sapiens
caatcccggctcctt

SEQ ID NO: 1204669 - DNA, 15 bp, Homo sapiens
gcaatcccggctcct

SEQ ID NO: 1204670 - DNA, 15 bp, Homo sapiens
ggcaatcccggctcc

SEQ ID NO: 1204671 - DNA, 15 bp, Homo sapiens
cggcaatcccggctc

SEQ ID NO: 1204672 - DNA, 15 bp, Homo sapiens
gcggcaatcccggct

SEQ ID NO: 1204673 - DNA, 15 bp, Homo sapiens
cgcggcaatcccggc

SEQ ID NO: 1204674 - DNA, 15 bp, Homo sapiens
ccgcggcaatcccgg

SEQ ID NO: 1204675 - DNA, 15 bp, Homo sapiens
gccgcggcaatcccg

SEQ ID NO: 1204676 - DNA, 15 bp, Homo sapiens
cgccgcggcaatccc

SEQ ID NO: 1204677 - DNA, 15 bp, Homo sapiens
ccgccgcggcaatcc

SEQ ID NO: 1204678 - DNA, 15 bp, Homo sapiens
tccgccgcggcaatc

SEQ ID NO: 1204679 - DNA, 15 bp, Homo sapiens
atccgccgcggcaat

SEQ ID NO: 1204680 - DNA, 15 bp, Homo sapiens
catccgccgcggcaa

SEQ ID NO: 1204681 - DNA, 15 bp, Homo sapiens
ccatccgccgcggca

SEQ ID NO: 1204682 - DNA, 15 bp, Homo sapiens
gccatccgccgcggc

SEQ ID NO: 1204683 - DNA, 15 bp, Homo sapiens
ggccatccgccgcgg

SEQ ID NO: 1204684 - DNA, 15 bp, Homo sapiens
tggccatccgccgcg

SEQ ID NO: 1204685 - DNA, 15 bp, Homo sapiens
ctggccatccgccgc

SEQ ID NO: 1204686 - DNA, 15 bp, Homo sapiens
gctggccatccgccg

SEQ ID NO: 1204687 - DNA, 15 bp, Homo sapiens
tgctggccatccgcc

SEQ ID NO: 1204688 - DNA, 15 bp, Homo sapiens
ctgctggccatccgc

SEQ ID NO: 1204689 - DNA, 15 bp, Homo sapiens
gctgctggccatccg

SEQ ID NO: 1204690 - DNA, 15 bp, Homo sapiens
cgctgctggccatcc

SEQ ID NO: 1204691 - DNA, 15 bp, Homo sapiens
gcgctgctggccatc

SEQ ID NO: 1204692 - DNA, 15 bp, Homo sapiens
cgcgctgctggccat

SEQ ID NO: 1204693 - DNA, 15 bp, Homo sapiens
ccgcgctgctggcca

SEQ ID NO: 1204694 - DNA, 15 bp, Homo sapiens
accgcgctgctggcc

SEQ ID NO: 1204695 - DNA, 15 bp, Homo sapiens
caccgcgctgctggc

SEQ ID NO: 1204696 - DNA, 15 bp, Homo sapiens
acaccgcgctgctgg

SEQ ID NO: 1204697 - DNA, 15 bp, Homo sapiens
tacaccgcgctgctg

SEQ ID NO: 1204698 - DNA, 15 bp, Homo sapiens
ctacaccgcgctgct

SEQ ID NO: 1204699 - DNA, 15 bp, Homo sapiens
actacaccgcgctgc

SEQ ID NO: 1204700 - DNA, 15 bp, Homo sapiens
cactacaccgcgctg

SEQ ID NO: 1204701 - DNA, 15 bp, Homo sapiens
gcactacaccgcgct

SEQ ID NO: 1204702 - DNA, 15 bp, Homo sapiens
tgcactacaccgcgc

SEQ ID NO: 1204703 - DNA, 15 bp, Homo sapiens
ctgcactacaccgcg

SEQ ID NO: 1204704 - DNA, 15 bp, Homo sapiens
gctgcactacaccgc

SEQ ID NO: 1204705 - DNA, 15 bp, Homo sapiens
cgctgcactacaccg

SEQ ID NO: 1204706 - DNA, 15 bp, Homo sapiens
acgctgcactacacc

SEQ ID NO: 1204707 - DNA, 15 bp, Homo sapiens
gacgctgcactacac

SEQ ID NO: 1204708 - DNA, 15 bp, Homo sapiens
agacgctgcactaca

SEQ ID NO: 1204709 - DNA, 15 bp, Homo sapiens
gagacgctgcactac

SEQ ID NO: 1204710 - DNA, 15 bp, Homo sapiens
cgagacgctgcacta

SEQ ID NO: 1204711 - DNA, 15 bp, Homo sapiens
gcgagacgctgcact

SEQ ID NO: 1204712 - DNA, 15 bp, Homo sapiens
cgcgagacgctgcac

SEQ ID NO: 1204713 - DNA, 15 bp, Homo sapiens
gcgcgagacgctgca

SEQ ID NO: 1204714 - DNA, 15 bp, Homo sapiens
tgcgcgagacgctgc

SEQ ID NO: 1204715 - DNA, 15 bp, Homo sapiens
gtgcgcgagacgctg

SEQ ID NO: 1204716 - DNA, 15 bp, Homo sapiens
cgtgcgcgagacgct

SEQ ID NO: 1204717 - DNA, 15 bp, Homo sapiens
ccgtgcgcgagacgc

SEQ ID NO: 1204718 - DNA, 15 bp, Homo sapiens
accgtgcgcgagacg

SEQ ID NO: 1204719 - DNA, 15 bp, Homo sapiens
caccgtgcgcgagac

SEQ ID NO: 1204720 - DNA, 15 bp, Homo sapiens
tcaccgtgcgcgaga

SEQ ID NO: 1204721 - DNA, 15 bp, Homo sapiens
ctcaccgtgcgcgag

SEQ ID NO: 1204722 - DNA, 15 bp, Homo sapiens
cctcaccgtgcgcga

SEQ ID NO: 1204723 - DNA, 15 bp, Homo sapiens
gcctcaccgtgcgcg

SEQ ID NO: 1204724 - DNA, 15 bp, Homo sapiens
agcctcaccgtgcgc

SEQ ID NO: 1204725 - DNA, 15 bp, Homo sapiens
cagcctcaccgtgcg

SEQ ID NO: 1204726 - DNA, 15 bp, Homo sapiens
gcagcctcaccgtgc

SEQ ID NO: 1204727 - DNA, 15 bp, Homo sapiens
agcagcctcaccgtg

SEQ ID NO: 1204728 - DNA, 15 bp, Homo sapiens
gagcagcctcaccgt

SEQ ID NO: 1204729 - DNA, 15 bp, Homo sapiens
tgagcagcctcaccg

SEQ ID NO: 1204730 - DNA, 15 bp, Homo sapiens
ctgagcagcctcacc

SEQ ID NO: 1204731 - DNA, 15 bp, Homo sapiens
gctgagcagcctcac

SEQ ID NO: 1204732 - DNA, 15 bp, Homo sapiens
tgctgagcagcctca

SEQ ID NO: 1204733 - DNA, 15 bp, Homo sapiens
ctgctgagcagcctc

SEQ ID NO: 1204734 - DNA, 15 bp, Homo sapiens
cctgctgagcagcct

SEQ ID NO: 1204735 - DNA, 15 bp, Homo sapiens
ccctgctgagcagcc

SEQ ID NO: 1204736 - DNA, 15 bp, Homo sapiens
accctgctgagcagc

SEQ ID NO: 1204737 - DNA, 15 bp, Homo sapiens
caccctgctgagcag

SEQ ID NO: 1204738 - DNA, 15 bp, Homo sapiens
acaccctgctgagca

SEQ ID NO: 1204739 - DNA, 15 bp, Homo sapiens
gacaccctgctgagc

SEQ ID NO: 1204740 - DNA, 15 bp, Homo sapiens
cgacaccctgctgag

SEQ ID NO: 1204741 - DNA, 15 bp, Homo sapiens
gcgacaccctgctga

SEQ ID NO: 1204742 - DNA, 15 bp, Homo sapiens
agcgacaccctgctg

SEQ ID NO: 1204743 - DNA, 15 bp, Homo sapiens
gagcgacaccctgct

SEQ ID NO: 1204744 - DNA, 15 bp, Homo sapiens
agagcgacaccctgc

SEQ ID NO: 1204745 - DNA, 15 bp, Homo sapiens
cagagcgacaccctg

SEQ ID NO: 1204746 - DNA, 15 bp, Homo sapiens
gcagagcgacaccct

SEQ ID NO: 1204747 - DNA, 15 bp, Homo sapiens
tgcagagcgacaccc

SEQ ID NO: 1204748 - DNA, 15 bp, Homo sapiens
ctgcagagcgacacc

SEQ ID NO: 1204749 - DNA, 15 bp, Homo sapiens
cctgcagagcgacac

SEQ ID NO: 1204750 - DNA, 15 bp, Homo sapiens
tcctgcagagcgaca

SEQ ID NO: 1204751 - DNA, 15 bp, Homo sapiens
ctcctgcagagcgac

SEQ ID NO: 1204752 - DNA, 15 bp, Homo sapiens
tctcctgcagagcga

SEQ ID NO: 1204753 - DNA, 15 bp, Homo sapiens
gtctcctgcagagcg

SEQ ID NO: 1204754 - DNA, 15 bp, Homo sapiens
agtctcctgcagagc

SEQ ID NO: 1204755 - DNA, 15 bp, Homo sapiens
gagtctcctgcagag

SEQ ID NO: 1204756 - DNA, 15 bp, Homo sapiens
cgagtctcctgcaga

SEQ ID NO: 1204757 - DNA, 15 bp, Homo sapiens
ccgagtctcctgcag

SEQ ID NO: 1204758 - DNA, 15 bp, Homo sapiens
cccgagtctcctgca

SEQ ID NO: 1204759 - DNA, 15 bp, Homo sapiens
gcccgagtctcctgc

SEQ ID NO: 1204760 - DNA, 15 bp, Homo sapiens
cgcccgagtctcctg

SEQ ID NO: 1204761 - DNA, 15 bp, Homo sapiens
acgcccgagtctcct

SEQ ID NO: 1204762 - DNA, 15 bp, Homo sapiens
gacgcccgagtctcc

SEQ ID NO: 1204763 - DNA, 15 bp, Homo sapiens
tgacgcccgagtctc

SEQ ID NO: 1204764 - DNA, 15 bp, Homo sapiens
ctgacgcccgagtct

SEQ ID NO: 1204765 - DNA, 15 bp, Homo sapiens
actgacgcccgagtc

SEQ ID NO: 1204766 - DNA, 15 bp, Homo sapiens
cactgacgcccgagt

SEQ ID NO: 1204767 - DNA, 15 bp, Homo sapiens
acactgacgcccgag

SEQ ID NO: 1204768 - DNA, 15 bp, Homo sapiens
tacactgacgcccga

SEQ ID NO: 1204769 - DNA, 15 bp, Homo sapiens
ctacactgacgcccg

SEQ ID NO: 1204770 - DNA, 15 bp, Homo sapiens
gctacactgacgccc

SEQ ID NO: 1204771 - DNA, 15 bp, Homo sapiens
ggctacactgacgcc

SEQ ID NO: 1204772 - DNA, 15 bp, Homo sapiens
aggctacactgacgc

SEQ ID NO: 1204773 - DNA, 15 bp, Homo sapiens
taggctacactgacg

SEQ ID NO: 1204774 - DNA, 15 bp, Homo sapiens
ttaggctacactgac

SEQ ID NO: 1204775 - DNA, 15 bp, Homo sapiens
cttaggctacactga

SEQ ID NO: 1204776 - DNA, 15 bp, Homo sapiens
gcttaggctacactg

SEQ ID NO: 1204777 - DNA, 15 bp, Homo sapiens
ggcttaggctacact

SEQ ID NO: 1204778 - DNA, 15 bp, Homo sapiens
gggcttaggctacac

SEQ ID NO: 1204779 - DNA, 15 bp, Homo sapiens
ggggcttaggctaca

SEQ ID NO: 1204780 - DNA, 15 bp, Homo sapiens
gggggcttaggctac

SEQ ID NO: 1204781 - DNA, 15 bp, Homo sapiens
cgggggcttaggcta

SEQ ID NO: 1204782 - DNA, 15 bp, Homo sapiens
ccgggggcttaggct

SEQ ID NO: 1204783 - DNA, 15 bp, Homo sapiens
cccgggggcttaggc

SEQ ID NO: 1204784 - DNA, 15 bp, Homo sapiens
ccccgggggcttagg

SEQ ID NO: 1204785 - DNA, 15 bp, Homo sapiens
gccccgggggcttag

SEQ ID NO: 1204786 - DNA, 15 bp, Homo sapiens
cgccccgggggctta

SEQ ID NO: 1204787 - DNA, 15 bp, Homo sapiens
ccgccccgggggctt

SEQ ID NO: 1204788 - DNA, 15 bp, Homo sapiens
cccgccccgggggct

SEQ ID NO: 1204789 - DNA, 15 bp, Homo sapiens
gcccgccccgggggc

SEQ ID NO: 1204790 - DNA, 15 bp, Homo sapiens
cgcccgccccggggg

SEQ ID NO: 1204791 - DNA, 15 bp, Homo sapiens
ccgcccgccccgggg

SEQ ID NO: 1204792 - DNA, 15 bp, Homo sapiens
cccgcccgccccggg

SEQ ID NO: 1204793 - DNA, 15 bp, Homo sapiens
ccccgcccgccccgg

SEQ ID NO: 1204794 - DNA, 15 bp, Homo sapiens
ccccccgcccgcccc

SEQ ID NO: 1204795 - DNA, 15 bp, Homo sapiens
cccccccgcccgccc

SEQ ID NO: 1204796 - DNA, 15 bp, Homo sapiens
gcccccccgcccgcc

SEQ ID NO: 1204797 - DNA, 15 bp, Homo sapiens
ggcccccccgcccgc

SEQ ID NO: 1204798 - DNA, 15 bp, Homo sapiens
tggcccccccgcccg

SEQ ID NO: 1204799 - DNA, 15 bp, Homo sapiens
ctggcccccccgccc

SEQ ID NO: 1204800 - DNA, 15 bp, Homo sapiens
cctggcccccccgcc

SEQ ID NO: 1204801 - DNA, 15 bp, Homo sapiens
ccctggcccccccgc

SEQ ID NO: 1204802 - DNA, 15 bp, Homo sapiens
cccctggcccccccg

SEQ ID NO: 1204803 - DNA, 15 bp, Homo sapiens
acccctggccccccc

SEQ ID NO: 1204804 - DNA, 15 bp, Homo sapiens
cacccctggcccccc

SEQ ID NO: 1204805 - DNA, 15 bp, Homo sapiens
acacccctggccccc

SEQ ID NO: 1204806 - DNA, 15 bp, Homo sapiens
cacacccctggcccc

SEQ ID NO: 1204807 - DNA, 15 bp, Homo sapiens
ccacacccctggccc

SEQ ID NO: 1204808 - DNA, 15 bp, Homo sapiens
cccacacccctggcc

SEQ ID NO: 1204809 - DNA, 15 bp, Homo sapiens
ccccacacccctggc

SEQ ID NO: 1204810 - DNA, 15 bp, Homo sapiens
cccccacacccctgg

SEQ ID NO: 1204811 - DNA, 15 bp, Homo sapiens
tcccccacacccctg

SEQ ID NO: 1204812 - DNA, 15 bp, Homo sapiens
cgtcccccacacccc

SEQ ID NO: 1204813 - DNA, 15 bp, Homo sapiens
gcgtcccccacaccc

SEQ ID NO: 1204814 - DNA, 15 bp, Homo sapiens
cgcgtcccccacacc

SEQ ID NO: 1204815 - DNA, 15 bp, Homo sapiens
gcgcgtcccccacac

SEQ ID NO: 1204816 - DNA, 15 bp, Homo sapiens
ggcgcgtcccccaca

SEQ ID NO: 1204817 - DNA, 15 bp, Homo sapiens
gggcgcgtcccccac

SEQ ID NO: 1204818 - DNA, 15 bp, Homo sapiens
tgggcgcgtccccca

SEQ ID NO: 1204819 - DNA, 15 bp, Homo sapiens
gtgggcgcgtccccc

SEQ ID NO: 1204820 - DNA, 15 bp, Homo sapiens
ggtgggcgcgtcccc

SEQ ID NO: 1204821 - DNA, 15 bp, Homo sapiens
aggtgggcgcgtccc

SEQ ID NO: 1204822 - DNA, 15 bp, Homo sapiens
caggtgggcgcgtcc

SEQ ID NO: 1204823 - DNA, 15 bp, Homo sapiens
gcaggtgggcgcgtc

SEQ ID NO: 1204824 - DNA, 15 bp, Homo sapiens
tgcaggtgggcgcgt

SEQ ID NO: 1204825 - DNA, 15 bp, Homo sapiens
ctgcaggtgggcgcg

SEQ ID NO: 1204826 - DNA, 15 bp, Homo sapiens
cctgcaggtgggcgc

SEQ ID NO: 1204827 - DNA, 15 bp, Homo sapiens
tcctgcaggtgggcg

SEQ ID NO: 1204828 - DNA, 15 bp, Homo sapiens
gtcctgcaggtgggc

SEQ ID NO: 1204829 - DNA, 15 bp, Homo sapiens
cgtcctgcaggtggg

SEQ ID NO: 1204830 - DNA, 15 bp, Homo sapiens
acgtcctgcaggtgg

SEQ ID NO: 1204831 - DNA, 15 bp, Homo sapiens
tacgtcctgcaggtg

SEQ ID NO: 1204832 - DNA, 15 bp, Homo sapiens
ctacgtcctgcaggt

SEQ ID NO: 1204833 - DNA, 15 bp, Homo sapiens
cctacgtcctgcagg

SEQ ID NO: 1204834 - DNA, 15 bp, Homo sapiens
tcctacgtcctgcag

SEQ ID NO: 1204835 - DNA, 15 bp, Homo sapiens
ctcctacgtcctgca

SEQ ID NO: 1204836 - DNA, 15 bp, Homo sapiens
tctcctacgtcctgc

SEQ ID NO: 1204837 - DNA, 15 bp, Homo sapiens
ttctcctacgtcctg

SEQ ID NO: 1204838 - DNA, 15 bp, Homo sapiens
cttctcctacgtcct

SEQ ID NO: 1204839 - DNA, 15 bp, Homo sapiens
gcttctcctacgtcc

SEQ ID NO: 1204840 - DNA, 15 bp, Homo sapiens
tgcttctcctacgtc

SEQ ID NO: 1204841 - DNA, 15 bp, Homo sapiens
ctgcttctcctacgt

SEQ ID NO: 1204842 - DNA, 15 bp, Homo sapiens
actgcttctcctacg

SEQ ID NO: 1204843 - DNA, 15 bp, Homo sapiens
gactgcttctcctac

SEQ ID NO: 1204844 - DNA, 15 bp, Homo sapiens
ggactgcttctccta

SEQ ID NO: 1204845 - DNA, 15 bp, Homo sapiens
aggactgcttctcct

SEQ ID NO: 1204846 - DNA, 15 bp, Homo sapiens
caggactgcttctcc

SEQ ID NO: 1204847 - DNA, 15 bp, Homo sapiens
ccaggactgcttctc

SEQ ID NO: 1204848 - DNA, 15 bp, Homo sapiens
tccaggactgcttct

SEQ ID NO: 1204849 - DNA, 15 bp, Homo sapiens
ttccaggactgcttc

SEQ ID NO: 1204850 - DNA, 15 bp, Homo sapiens
gttccaggactgctt

SEQ ID NO: 1204851 - DNA, 15 bp, Homo sapiens
agttccaggactgct

SEQ ID NO: 1204852 - DNA, 15 bp, Homo sapiens
cagttccaggactgc

SEQ ID NO: 1204853 - DNA, 15 bp, Homo sapiens
gcagttccaggactg

SEQ ID NO: 1204854 - DNA, 15 bp, Homo sapiens
agcagttccaggact

SEQ ID NO: 1204855 - DNA, 15 bp, Homo sapiens
gagcagttccaggac

SEQ ID NO: 1204856 - DNA, 15 bp, Homo sapiens
ggagcagttccagga

SEQ ID NO: 1204857 - DNA, 15 bp, Homo sapiens
gggagcagttccagg

SEQ ID NO: 1204858 - DNA, 15 bp, Homo sapiens
cgggagcagttccag

SEQ ID NO: 1204859 - DNA, 15 bp, Homo sapiens
ccgggagcagttcca

SEQ ID NO: 1204860 - DNA, 15 bp, Homo sapiens
gccgggagcagttcc

SEQ ID NO: 1204861 - DNA, 15 bp, Homo sapiens
cgccgggagcagttc

SEQ ID NO: 1204862 - DNA, 15 bp, Homo sapiens
gcgccgggagcagtt

SEQ ID NO: 1204863 - DNA, 15 bp, Homo sapiens
tgcgccgggagcagt

SEQ ID NO: 1204864 - DNA, 15 bp, Homo sapiens
ctgcgccgggagcag

SEQ ID NO: 1204865 - DNA, 15 bp, Homo sapiens
gctgcgccgggagca

SEQ ID NO: 1204866 - DNA, 15 bp, Homo sapiens
cgctgcgccgggagc

SEQ ID NO: 1204867 - DNA, 15 bp, Homo sapiens
gcgctgcgccgggag

SEQ ID NO: 1204868 - DNA, 15 bp, Homo sapiens
ggcgctgcgccggga

SEQ ID NO: 1204869 - DNA, 15 bp, Homo sapiens
gggcgctgcgccggg

SEQ ID NO: 1204870 - DNA, 15 bp, Homo sapiens
cgggcgctgcgccgg

SEQ ID NO: 1204871 - DNA, 15 bp, Homo sapiens
ccgggcgctgcgccg

SEQ ID NO: 1204872 - DNA, 15 bp, Homo sapiens
gccgggcgctgcgcc

SEQ ID NO: 1204873 - DNA, 15 bp, Homo sapiens
ggccgggcgctgcgc

SEQ ID NO: 1204874 - DNA, 15 bp, Homo sapiens
cggccgggcgctgcg

SEQ ID NO: 1204875 - DNA, 15 bp, Homo sapiens
acggccgggcgctgc

SEQ ID NO: 1204876 - DNA, 15 bp, Homo sapiens
aacggccgggcgctg

SEQ ID NO: 1204877 - DNA, 15 bp, Homo sapiens
gaacggccgggcgct

SEQ ID NO: 1204878 - DNA, 15 bp, Homo sapiens
tgaacggccgggcgc

SEQ ID NO: 1204879 - DNA, 15 bp, Homo sapiens
gtgaacggccgggcg

SEQ ID NO: 1204880 - DNA, 15 bp, Homo sapiens
tgtgaacggccgggc

SEQ ID NO: 1204881 - DNA, 15 bp, Homo sapiens
atgtgaacggccggg

SEQ ID NO: 1204882 - DNA, 15 bp, Homo sapiens
tatgtgaacggccgg

SEQ ID NO: 1204883 - DNA, 15 bp, Homo sapiens
gtatgtgaacggccg

SEQ ID NO: 1204884 - DNA, 15 bp, Homo sapiens
tgtatgtgaacggcc

SEQ ID NO: 1204885 - DNA, 15 bp, Homo sapiens
gtgtatgtgaacggc

SEQ ID NO: 1204886 - DNA, 15 bp, Homo sapiens
ggtgtatgtgaacgg

SEQ ID NO: 1204887 - DNA, 15 bp, Homo sapiens
aggtgtatgtgaacg

SEQ ID NO: 1204888 - DNA, 15 bp, Homo sapiens
gaggtgtatgtgaac

SEQ ID NO: 1204889 - DNA, 15 bp, Homo sapiens
ggaggtgtatgtgaa

SEQ ID NO: 1204890 - DNA, 15 bp, Homo sapiens
gggaggtgtatgtga

SEQ ID NO: 1204891 - DNA, 15 bp, Homo sapiens
ggggaggtgtatgtg

SEQ ID NO: 1204892 - DNA, 15 bp, Homo sapiens
gggggaggtgtatgt

SEQ ID NO: 1204893 - DNA, 15 bp, Homo sapiens
tgggggaggtgtatg

SEQ ID NO: 1204894 - DNA, 15 bp, Homo sapiens
ctgggggaggtgtat

SEQ ID NO: 1204895 - DNA, 15 bp, Homo sapiens
cctgggggaggtgta

SEQ ID NO: 1204896 - DNA, 15 bp, Homo sapiens
tcctgggggaggtgt

SEQ ID NO: 1204897 - DNA, 15 bp, Homo sapiens
ttcctgggggaggtg

SEQ ID NO: 1204898 - DNA, 15 bp, Homo sapiens
cttcctgggggaggt

SEQ ID NO: 1204899 - DNA, 15 bp, Homo sapiens
ccttcctgggggagg

SEQ ID NO: 1204900 - DNA, 15 bp, Homo sapiens
accttcctgggggag

SEQ ID NO: 1204901 - DNA, 15 bp, Homo sapiens
gaccttcctggggga

SEQ ID NO: 1204902 - DNA, 15 bp, Homo sapiens
ggaccttcctggggg

SEQ ID NO: 1204903 - DNA, 15 bp, Homo sapiens
gggaccttcctgggg

SEQ ID NO: 1204904 - DNA, 15 bp, Homo sapiens
ggggaccttcctggg

SEQ ID NO: 1204905 - DNA, 15 bp, Homo sapiens
cggggaccttcctgg

SEQ ID NO: 1204906 - DNA, 15 bp, Homo sapiens
gcggggaccttcctg

SEQ ID NO: 1204907 - DNA, 15 bp, Homo sapiens
cgcggggaccttcct

SEQ ID NO: 1204908 - DNA, 15 bp, Homo sapiens
gcgcggggaccttcc

SEQ ID NO: 1204909 - DNA, 15 bp, Homo sapiens
cgcgcggggaccttc

SEQ ID NO: 1204910 - DNA, 15 bp, Homo sapiens
gcgcgcggggacctt

SEQ ID NO: 1204911 - DNA, 15 bp, Homo sapiens
ggcgcgcggggacct

SEQ ID NO: 1204912 - DNA, 15 bp, Homo sapiens
gggcgcgcggggacc

SEQ ID NO: 1204913 - DNA, 15 bp, Homo sapiens
ggggcgcgcggggac

SEQ ID NO: 1204914 - DNA, 15 bp, Homo sapiens
tggggcgcgcgggga

SEQ ID NO: 1204915 - DNA, 15 bp, Homo sapiens
ctggggcgcgcgggg

SEQ ID NO: 1204916 - DNA, 15 bp, Homo sapiens
gctggggcgcgcggg

SEQ ID NO: 1204917 - DNA, 15 bp, Homo sapiens
ggctggggcgcgcgg

SEQ ID NO: 1204918 - DNA, 15 bp, Homo sapiens
aggctggggcgcgcg

SEQ ID NO: 1204919 - DNA, 15 bp, Homo sapiens
gaggctggggcgcgc

SEQ ID NO: 1204920 - DNA, 15 bp, Homo sapiens
ggaggctggggcgcg

SEQ ID NO: 1204921 - DNA, 15 bp, Homo sapiens
gggaggctggggcgc

SEQ ID NO: 1204922 - DNA, 15 bp, Homo sapiens
cgggaggctggggcg

SEQ ID NO: 1204923 - DNA, 15 bp, Homo sapiens
ccgggaggctggggc

SEQ ID NO: 1204924 - DNA, 15 bp, Homo sapiens
tccgggaggctgggg

SEQ ID NO: 1204925 - DNA, 15 bp, Homo sapiens
gtccgggaggctggg

SEQ ID NO: 1204926 - DNA, 15 bp, Homo sapiens
tgtccgggaggctgg

SEQ ID NO: 1204927 - DNA, 15 bp, Homo sapiens
atgtccgggaggctg

SEQ ID NO: 1204928 - DNA, 15 bp, Homo sapiens
catgtccgggaggct

SEQ ID NO: 1204929 - DNA, 15 bp, Homo sapiens
ccatgtccgggaggc

SEQ ID NO: 1204930 - DNA, 15 bp, Homo sapiens
gccatgtccgggagg

SEQ ID NO: 1204931 - DNA, 15 bp, Homo sapiens
cgccatgtccgggag

SEQ ID NO: 1204932 - DNA, 15 bp, Homo sapiens
acgccatgtccggga

SEQ ID NO: 1204933 - DNA, 15 bp, Homo sapiens
gacgccatgtccggg

SEQ ID NO: 1204934 - DNA, 15 bp, Homo sapiens
ggacgccatgtccgg

SEQ ID NO: 1204935 - DNA, 15 bp, Homo sapiens
tggacgccatgtccg

SEQ ID NO: 1204936 - DNA, 15 bp, Homo sapiens
ctggacgccatgtcc

SEQ ID NO: 1204937 - DNA, 15 bp, Homo sapiens
gctggacgccatgtc

SEQ ID NO: 1204938 - DNA, 15 bp, Homo sapiens
tgctggacgccatgt

SEQ ID NO: 1204939 - DNA, 15 bp, Homo sapiens
ctgctggacgccatg

SEQ ID NO: 1204940 - DNA, 15 bp, Homo sapiens
gctgctggacgccat

SEQ ID NO: 1204941 - DNA, 15 bp, Homo sapiens
cgctgctggacgcca

SEQ ID NO: 1204942 - DNA, 15 bp, Homo sapiens
acgctgctggacgcc

SEQ ID NO: 1204943 - DNA, 15 bp, Homo sapiens
cacgctgctggacgc

SEQ ID NO: 1204944 - DNA, 15 bp, Homo sapiens
ccacgctgctggacg

SEQ ID NO: 1204945 - DNA, 15 bp, Homo sapiens
accacgctgctggac

SEQ ID NO: 1204946 - DNA, 15 bp, Homo sapiens
aaccacgctgctgga

SEQ ID NO: 1204947 - DNA, 15 bp, Homo sapiens
aaaccacgctgctgg

SEQ ID NO: 1204948 - DNA, 15 bp, Homo sapiens
aaaaccacgctgctg

SEQ ID NO: 1204949 - DNA, 15 bp, Homo sapiens
gaaaaccacgctgct

SEQ ID NO: 1204950 - DNA, 15 bp, Homo sapiens
ggaaaaccacgctgc

SEQ ID NO: 1204951 - DNA, 15 bp, Homo sapiens
gggaaaaccacgctg

SEQ ID NO: 1204952 - DNA, 15 bp, Homo sapiens
cgggaaaaccacgct

SEQ ID NO: 1204953 - DNA, 15 bp, Homo sapiens
ccgggaaaaccacgc

SEQ ID NO: 1204954 - DNA, 15 bp, Homo sapiens
tccgggaaaaccacg

SEQ ID NO: 1204955 - DNA, 15 bp, Homo sapiens
ctccgggaaaaccac

SEQ ID NO: 1204956 - DNA, 15 bp, Homo sapiens
gctccgggaaaacca

SEQ ID NO: 1204957 - DNA, 15 bp, Homo sapiens
ggctccgggaaaacc

SEQ ID NO: 1204958 - DNA, 15 bp, Homo sapiens
aggctccgggaaaac

SEQ ID NO: 1204959 - DNA, 15 bp, Homo sapiens
caggctccgggaaaa

SEQ ID NO: 1204960 - DNA, 15 bp, Homo sapiens
gcaggctccgggaaa

SEQ ID NO: 1204961 - DNA, 15 bp, Homo sapiens
cgcaggctccgggaa

SEQ ID NO: 1204962 - DNA, 15 bp, Homo sapiens
ccgcaggctccggga

SEQ ID NO: 1204963 - DNA, 15 bp, Homo sapiens
cccgcaggctccggg

SEQ ID NO: 1204964 - DNA, 15 bp, Homo sapiens
ccccgcaggctccgg

SEQ ID NO: 1204965 - DNA, 15 bp, Homo sapiens
gccccgcaggctccg

SEQ ID NO: 1204966 - DNA, 15 bp, Homo sapiens
cgccccgcaggctcc

SEQ ID NO: 1204967 - DNA, 15 bp, Homo sapiens
tcgccccgcaggctc

SEQ ID NO: 1204968 - DNA, 15 bp, Homo sapiens
gtcgccccgcaggct

SEQ ID NO: 1204969 - DNA, 15 bp, Homo sapiens
tgtcgccccgcaggc

SEQ ID NO: 1204970 - DNA, 15 bp, Homo sapiens
ttgtcgccccgcagg

SEQ ID NO: 1204971 - DNA, 15 bp, Homo sapiens
gttgtcgccccgcag

SEQ ID NO: 1204972 - DNA, 15 bp, Homo sapiens
tgttgtcgccccgca

SEQ ID NO: 1204973 - DNA, 15 bp, Homo sapiens
ctgttgtcgccccgc

SEQ ID NO: 1204974 - DNA, 15 bp, Homo sapiens
tctgttgtcgccccg

SEQ ID NO: 1204975 - DNA, 15 bp, Homo sapiens
ttctgttgtcgcccc

SEQ ID NO: 1204976 - DNA, 15 bp, Homo sapiens
cttctgttgtcgccc

SEQ ID NO: 1204977 - DNA, 15 bp, Homo sapiens
ccttctgttgtcgcc

SEQ ID NO: 1204978 - DNA, 15 bp, Homo sapiens
gccttctgttgtcgc

SEQ ID NO: 1204979 - DNA, 15 bp, Homo sapiens
ggccttctgttgtcg

SEQ ID NO: 1204980 - DNA, 15 bp, Homo sapiens
gggccttctgttgtc

SEQ ID NO: 1204981 - DNA, 15 bp, Homo sapiens
agggccttctgttgt

SEQ ID NO: 1204982 - DNA, 15 bp, Homo sapiens
tagggccttctgttg

SEQ ID NO: 1204983 - DNA, 15 bp, Homo sapiens
ctagggccttctgtt

SEQ ID NO: 1204984 - DNA, 15 bp, Homo sapiens
tctagggccttctgt

SEQ ID NO: 1204985 - DNA, 15 bp, Homo sapiens
ctctagggccttctg

SEQ ID NO: 1204986 - DNA, 15 bp, Homo sapiens
cctctagggccttct

SEQ ID NO: 1204987 - DNA, 15 bp, Homo sapiens
tcctctagggccttc

SEQ ID NO: 1204988 - DNA, 15 bp, Homo sapiens
ttcctctagggcctt

SEQ ID NO: 1204989 - DNA, 15 bp, Homo sapiens
gttcctctagggcct

SEQ ID NO: 1204990 - DNA, 15 bp, Homo sapiens
ggttcctctagggcc

SEQ ID NO: 1204991 - DNA, 15 bp, Homo sapiens
tggttcctctagggc

SEQ ID NO: 1204992 - DNA, 15 bp, Homo sapiens
gtggttcctctaggg

SEQ ID NO: 1204993 - DNA, 15 bp, Homo sapiens
agtggttcctctagg

SEQ ID NO: 1204994 - DNA, 15 bp, Homo sapiens
gagtggttcctctag

SEQ ID NO: 1204995 - DNA, 15 bp, Homo sapiens
agagtggttcctcta

SEQ ID NO: 1204996 - DNA, 15 bp, Homo sapiens
cagagtggttcctct

SEQ ID NO: 1204997 - DNA, 15 bp, Homo sapiens
acagagtggttcctc

SEQ ID NO: 1204998 - DNA, 15 bp, Homo sapiens
cacagagtggttcct

SEQ ID NO: 1204999 - DNA, 15 bp, Homo sapiens
gcacagagtggttcc

SEQ ID NO: 1205000 - DNA, 15 bp, Homo sapiens
ggcacagagtggttc

SEQ ID NO: 1205001 - DNA, 15 bp, Homo sapiens
cggcacagagtggtt

SEQ ID NO: 1205002 - DNA, 15 bp, Homo sapiens
ccggcacagagtggt

SEQ ID NO: 1205003 - DNA, 15 bp, Homo sapiens
gccggcacagagtgg

SEQ ID NO: 1205004 - DNA, 15 bp, Homo sapiens
ggccggcacagagtg

SEQ ID NO: 1205005 - DNA, 15 bp, Homo sapiens
aggccggcacagagt

SEQ ID NO: 1205006 - DNA, 15 bp, Homo sapiens
aaggccggcacagag

SEQ ID NO: 1205007 - DNA, 15 bp, Homo sapiens
caaggccggcacaga

SEQ ID NO: 1205008 - DNA, 15 bp, Homo sapiens
ccaaggccggcacag

SEQ ID NO: 1205009 - DNA, 15 bp, Homo sapiens
tccaaggccggcaca

SEQ ID NO: 1205010 - DNA, 15 bp, Homo sapiens
ctccaaggccggcac

SEQ ID NO: 1205011 - DNA, 15 bp, Homo sapiens
cctccaaggccggca

SEQ ID NO: 1205012 - DNA, 15 bp, Homo sapiens
tcctccaaggccggc

SEQ ID NO: 1205013 - DNA, 15 bp, Homo sapiens
ctcctccaaggccgg

SEQ ID NO: 1205014 - DNA, 15 bp, Homo sapiens
gctcctccaaggccg

SEQ ID NO: 1205015 - DNA, 15 bp, Homo sapiens
agctcctccaaggcc

SEQ ID NO: 1205016 - DNA, 15 bp, Homo sapiens
aagctcctccaaggc

SEQ ID NO: 1205017 - DNA, 15 bp, Homo sapiens
gaagctcctccaagg

SEQ ID NO: 1205018 - DNA, 15 bp, Homo sapiens
ggaagctcctccaag

SEQ ID NO: 1205019 - DNA, 15 bp, Homo sapiens
gggaagctcctccaa

SEQ ID NO: 1205020 - DNA, 15 bp, Homo sapiens
cgggaagctcctcca

SEQ ID NO: 1205021 - DNA, 15 bp, Homo sapiens
tcgggaagctcctcc

SEQ ID NO: 1205022 - DNA, 15 bp, Homo sapiens
ctcgggaagctcctc

SEQ ID NO: 1205023 - DNA, 15 bp, Homo sapiens
tctcgggaagctcct

SEQ ID NO: 1205024 - DNA, 15 bp, Homo sapiens
gtctcgggaagctcc

SEQ ID NO: 1205025 - DNA, 15 bp, Homo sapiens
ggtctcgggaagctc

SEQ ID NO: 1205026 - DNA, 15 bp, Homo sapiens
gggtctcgggaagct

SEQ ID NO: 1205027 - DNA, 15 bp, Homo sapiens
agggtctcgggaagc

SEQ ID NO: 1205028 - DNA, 15 bp, Homo sapiens
gagggtctcgggaag

SEQ ID NO: 1205029 - DNA, 15 bp, Homo sapiens
agagggtctcgggaa

SEQ ID NO: 1205030 - DNA, 15 bp, Homo sapiens
cagagggtctcggga

SEQ ID NO: 1205031 - DNA, 15 bp, Homo sapiens
acagagggtctcggg

SEQ ID NO: 1205032 - DNA, 15 bp, Homo sapiens
cacagagggtctcgg

SEQ ID NO: 1205033 - DNA, 15 bp, Homo sapiens
gcacagagggtctcg

SEQ ID NO: 1205034 - DNA, 15 bp, Homo sapiens
tgcacagagggtctc

SEQ ID NO: 1205035 - DNA, 15 bp, Homo sapiens
ctgcacagagggtct

SEQ ID NO: 1205036 - DNA, 15 bp, Homo sapiens
cctgcacagagggtc

SEQ ID NO: 1205037 - DNA, 15 bp, Homo sapiens
gcctgcacagagggt

SEQ ID NO: 1205038 - DNA, 15 bp, Homo sapiens
tgcctgcacagaggg

SEQ ID NO: 1205039 - DNA, 15 bp, Homo sapiens
atgcctgcacagagg

SEQ ID NO: 1205040 - DNA, 15 bp, Homo sapiens
catgcctgcacagag

SEQ ID NO: 1205041 - DNA, 15 bp, Homo sapiens
tcatgcctgcacaga

SEQ ID NO: 1205042 - DNA, 15 bp, Homo sapiens
gtcatgcctgcacag

SEQ ID NO: 1205043 - DNA, 15 bp, Homo sapiens
ggtcatgcctgcaca

SEQ ID NO: 1205044 - DNA, 15 bp, Homo sapiens
gggtcatgcctgcac

SEQ ID NO: 1205045 - DNA, 15 bp, Homo sapiens
ggggtcatgcctgca

SEQ ID NO: 1205046 - DNA, 15 bp, Homo sapiens
cggggtcatgcctgc

SEQ ID NO: 1205047 - DNA, 15 bp, Homo sapiens
gcggggtcatgcctg

SEQ ID NO: 1205048 - DNA, 15 bp, Homo sapiens
cgcggggtcatgcct

SEQ ID NO: 1205049 - DNA, 15 bp, Homo sapiens
ccgcggggtcatgcc

SEQ ID NO: 1205050 - DNA, 15 bp, Homo sapiens
cccgcggggtcatgc

SEQ ID NO: 1205051 - DNA, 15 bp, Homo sapiens
gcccgcggggtcatg

SEQ ID NO: 1205052 - DNA, 15 bp, Homo sapiens
ggcccgcggggtcat

SEQ ID NO: 1205053 - DNA, 15 bp, Homo sapiens
tggcccgcggggtca

SEQ ID NO: 1205054 - DNA, 15 bp, Homo sapiens
atggcccgcggggtc

SEQ ID NO: 1205055 - DNA, 15 bp, Homo sapiens
catggcccgcggggt

SEQ ID NO: 1205056 - DNA, 15 bp, Homo sapiens
tcatggcccgcgggg

SEQ ID NO: 1205057 - DNA, 15 bp, Homo sapiens
ctcatggcccgcggg

SEQ ID NO: 1205058 - DNA, 15 bp, Homo sapiens
actcatggcccgcgg

SEQ ID NO: 1205059 - DNA, 15 bp, Homo sapiens
cactcatggcccgcg

SEQ ID NO: 1205060 - DNA, 15 bp, Homo sapiens
gcactcatggcccgc

SEQ ID NO: 1205061 - DNA, 15 bp, Homo sapiens
agcactcatggcccg

SEQ ID NO: 1205062 - DNA, 15 bp, Homo sapiens
tagcactcatggccc

SEQ ID NO: 1205063 - DNA, 15 bp, Homo sapiens
gtagcactcatggcc

SEQ ID NO: 1205064 - DNA, 15 bp, Homo sapiens
tgtagcactcatggc

SEQ ID NO: 1205065 - DNA, 15 bp, Homo sapiens
atgtagcactcatgg

SEQ ID NO: 1205066 - DNA, 15 bp, Homo sapiens
catgtagcactcatg

SEQ ID NO: 1205067 - DNA, 15 bp, Homo sapiens
tcatgtagcactcat

SEQ ID NO: 1205068 - DNA, 15 bp, Homo sapiens
gtcatgtagcactca

SEQ ID NO: 1205069 - DNA, 15 bp, Homo sapiens
cgtcatgtagcactc

SEQ ID NO: 1205070 - DNA, 15 bp, Homo sapiens
ccgtcatgtagcact

SEQ ID NO: 1205071 - DNA, 15 bp, Homo sapiens
tccgtcatgtagcac

SEQ ID NO: 1205072 - DNA, 15 bp, Homo sapiens
gtccgtcatgtagca

SEQ ID NO: 1205073 - DNA, 15 bp, Homo sapiens
ggtccgtcatgtagc

SEQ ID NO: 1205074 - DNA, 15 bp, Homo sapiens
gggtccgtcatgtag

SEQ ID NO: 1205075 - DNA, 15 bp, Homo sapiens
agggtccgtcatgta

SEQ ID NO: 1205076 - DNA, 15 bp, Homo sapiens
cagggtccgtcatgt

SEQ ID NO: 1205077 - DNA, 15 bp, Homo sapiens
acagggtccgtcatg

SEQ ID NO: 1205078 - DNA, 15 bp, Homo sapiens
aacagggtccgtcat

SEQ ID NO: 1205079 - DNA, 15 bp, Homo sapiens
gaacagggtccgtca

SEQ ID NO: 1205080 - DNA, 15 bp, Homo sapiens
agaacagggtccgtc

SEQ ID NO: 1205081 - DNA, 15 bp, Homo sapiens
tagaacagggtccgt

SEQ ID NO: 1205082 - DNA, 15 bp, Homo sapiens
ctagaacagggtccg

SEQ ID NO: 1205083 - DNA, 15 bp, Homo sapiens
cctagaacagggtcc

SEQ ID NO: 1205084 - DNA, 15 bp, Homo sapiens
acctagaacagggtc

SEQ ID NO: 1205085 - DNA, 15 bp, Homo sapiens
cacctagaacagggt

SEQ ID NO: 1205086 - DNA, 15 bp, Homo sapiens
acacctagaacaggg

SEQ ID NO: 1205087 - DNA, 15 bp, Homo sapiens
aacacctagaacagg

SEQ ID NO: 1205088 - DNA, 15 bp, Homo sapiens
taacacctagaacag

SEQ ID NO: 1205089 - DNA, 15 bp, Homo sapiens
ttaacacctagaaca

SEQ ID NO: 1205090 - DNA, 15 bp, Homo sapiens
cttaacacctagaac

SEQ ID NO: 1205091 - DNA, 15 bp, Homo sapiens
ccttaacacctagaa

SEQ ID NO: 1205092 - DNA, 15 bp, Homo sapiens
tccttaacacctaga

SEQ ID NO: 1205093 - DNA, 15 bp, Homo sapiens
gtccttaacacctag

SEQ ID NO: 1205094 - DNA, 15 bp, Homo sapiens
tgtccttaacaccta

SEQ ID NO: 1205095 - DNA, 15 bp, Homo sapiens
gtgtccttaacacct

SEQ ID NO: 1205096 - DNA, 15 bp, Homo sapiens
tgtgtccttaacacc

SEQ ID NO: 1205097 - DNA, 15 bp, Homo sapiens
ctgtgtccttaacac

SEQ ID NO: 1205098 - DNA, 15 bp, Homo sapiens
gctgtgtccttaaca

SEQ ID NO: 1205099 - DNA, 15 bp, Homo sapiens
tgctgtgtccttaac

SEQ ID NO: 1205100 - DNA, 15 bp, Homo sapiens
ctgctgtgtccttaa

SEQ ID NO: 1205101 - DNA, 15 bp, Homo sapiens
cctgctgtgtcctta

SEQ ID NO: 1205102 - DNA, 15 bp, Homo sapiens
tcctgctgtgtcctt

SEQ ID NO: 1205103 - DNA, 15 bp, Homo sapiens
atcctgctgtgtcct

SEQ ID NO: 1205104 - DNA, 15 bp, Homo sapiens
tatcctgctgtgtcc

SEQ ID NO: 1205105 - DNA, 15 bp, Homo sapiens
gtatcctgctgtgtc

SEQ ID NO: 1205106 - DNA, 15 bp, Homo sapiens
tgtatcctgctgtgt

SEQ ID NO: 1205107 - DNA, 15 bp, Homo sapiens
ctgtatcctgctgtg

SEQ ID NO: 1205108 - DNA, 15 bp, Homo sapiens
cctgtatcctgctgt

SEQ ID NO: 1205109 - DNA, 15 bp, Homo sapiens
gcctgtatcctgctg

SEQ ID NO: 1205110 - DNA, 15 bp, Homo sapiens
ggcctgtatcctgct

SEQ ID NO: 1205111 - DNA, 15 bp, Homo sapiens
gggcctgtatcctgc

SEQ ID NO: 1205112 - DNA, 15 bp, Homo sapiens
agggcctgtatcctg

SEQ ID NO: 1205113 - DNA, 15 bp, Homo sapiens
cagggcctgtatcct

SEQ ID NO: 1205114 - DNA, 15 bp, Homo sapiens
gcagggcctgtatcc

SEQ ID NO: 1205115 - DNA, 15 bp, Homo sapiens
ggcagggcctgtatc

SEQ ID NO: 1205116 - DNA, 15 bp, Homo sapiens
gggcagggcctgtat

SEQ ID NO: 1205117 - DNA, 15 bp, Homo sapiens
agggcagggcctgta

SEQ ID NO: 1205118 - DNA, 15 bp, Homo sapiens
tagggcagggcctgt

SEQ ID NO: 1205119 - DNA, 15 bp, Homo sapiens
atagggcagggcctg

SEQ ID NO: 1205120 - DNA, 15 bp, Homo sapiens
catagggcagggcct

SEQ ID NO: 1205121 - DNA, 15 bp, Homo sapiens
ccatagggcagggcc

SEQ ID NO: 1205122 - DNA, 15 bp, Homo sapiens
tccatagggcagggc

SEQ ID NO: 1205123 - DNA, 15 bp, Homo sapiens
ttccatagggcaggg

SEQ ID NO: 1205124 - DNA, 15 bp, Homo sapiens
gttccatagggcagg

SEQ ID NO: 1205125 - DNA, 15 bp, Homo sapiens
cgttccatagggcag

SEQ ID NO: 1205126 - DNA, 15 bp, Homo sapiens
gcgttccatagggca

SEQ ID NO: 1205127 - DNA, 15 bp, Homo sapiens
cgcgttccatagggc

SEQ ID NO: 1205128 - DNA, 15 bp, Homo sapiens
gcgcgttccataggg

SEQ ID NO: 1205129 - DNA, 15 bp, Homo sapiens
tgcgcgttccatagg

SEQ ID NO: 1205130 - DNA, 15 bp, Homo sapiens
gtgcgcgttccatag

SEQ ID NO: 1205131 - DNA, 15 bp, Homo sapiens
agtgcgcgttccata

SEQ ID NO: 1205132 - DNA, 15 bp, Homo sapiens
cagtgcgcgttccat

SEQ ID NO: 1205133 - DNA, 15 bp, Homo sapiens
acagtgcgcgttcca

SEQ ID NO: 1205134 - DNA, 15 bp, Homo sapiens
cacagtgcgcgttcc

SEQ ID NO: 1205135 - DNA, 15 bp, Homo sapiens
gcacagtgcgcgttc

SEQ ID NO: 1205136 - DNA, 15 bp, Homo sapiens
cgcacagtgcgcgtt

SEQ ID NO: 1205137 - DNA, 15 bp, Homo sapiens
acgcacagtgcgcgt

SEQ ID NO: 1205138 - DNA, 15 bp, Homo sapiens
cacgcacagtgcgcg

SEQ ID NO: 1205139 - DNA, 15 bp, Homo sapiens
gcacgcacagtgcgc

SEQ ID NO: 1205140 - DNA, 15 bp, Homo sapiens
tgcacgcacagtgcg

SEQ ID NO: 1205141 - DNA, 15 bp, Homo sapiens
ctgcacgcacagtgc

SEQ ID NO: 1205142 - DNA, 15 bp, Homo sapiens
gctgcacgcacagtg

SEQ ID NO: 1205143 - DNA, 15 bp, Homo sapiens
tgctgcacgcacagt

SEQ ID NO: 1205144 - DNA, 15 bp, Homo sapiens
ctgctgcacgcacag

SEQ ID NO: 1205145 - DNA, 15 bp, Homo sapiens
actgctgcacgcaca

SEQ ID NO: 1205146 - DNA, 15 bp, Homo sapiens
gactgctgcacgcac

SEQ ID NO: 1205147 - DNA, 15 bp, Homo sapiens
agactgctgcacgca

SEQ ID NO: 1205148 - DNA, 15 bp, Homo sapiens
gagactgctgcacgc

SEQ ID NO: 1205149 - DNA, 15 bp, Homo sapiens
tgagactgctgcacg

SEQ ID NO: 1205150 - DNA, 15 bp, Homo sapiens
gtgagactgctgcac

SEQ ID NO: 1205151 - DNA, 15 bp, Homo sapiens
cgtgagactgctgca

SEQ ID NO: 1205152 - DNA, 15 bp, Homo sapiens
gcgtgagactgctgc

SEQ ID NO: 1205153 - DNA, 15 bp, Homo sapiens
cgcgtgagactgctg

SEQ ID NO: 1205154 - DNA, 15 bp, Homo sapiens
gcgcgtgagactgct

SEQ ID NO: 1205155 - DNA, 15 bp, Homo sapiens
tgcgcgtgagactgc

SEQ ID NO: 1205156 - DNA, 15 bp, Homo sapiens
ttgcgcgtgagactg

SEQ ID NO: 1205157 - DNA, 15 bp, Homo sapiens
cttgcgcgtgagact

SEQ ID NO: 1205158 - DNA, 15 bp, Homo sapiens
acttgcgcgtgagac

SEQ ID NO: 1205159 - DNA, 15 bp, Homo sapiens
cacttgcgcgtgaga

SEQ ID NO: 1205160 - DNA, 15 bp, Homo sapiens
tcacttgcgcgtgag

SEQ ID NO: 1205161 - DNA, 15 bp, Homo sapiens
ctcacttgcgcgtga

SEQ ID NO: 1205162 - DNA, 15 bp, Homo sapiens
actcacttgcgcgtg

SEQ ID NO: 1205163 - DNA, 15 bp, Homo sapiens
gactcacttgcgcgt

SEQ ID NO: 1205164 - DNA, 15 bp, Homo sapiens
agactcacttgcgcg

SEQ ID NO: 1205165 - DNA, 15 bp, Homo sapiens
gagactcacttgcgc

SEQ ID NO: 1205166 - DNA, 15 bp, Homo sapiens
agagactcacttgcg

SEQ ID NO: 1205167 - DNA, 15 bp, Homo sapiens
cagagactcacttgc

SEQ ID NO: 1205168 - DNA, 15 bp, Homo sapiens
ccagagactcacttg

SEQ ID NO: 1205169 - DNA, 15 bp, Homo sapiens
tccagagactcactt

SEQ ID NO: 1205170 - DNA, 15 bp, Homo sapiens
atccagagactcact

SEQ ID NO: 1205171 - DNA, 15 bp, Homo sapiens
aatccagagactcac

SEQ ID NO: 1205172 - DNA, 15 bp, Homo sapiens
caatccagagactca

SEQ ID NO: 1205173 - DNA, 15 bp, Homo sapiens
acaatccagagactc

SEQ ID NO: 1205174 - DNA, 15 bp, Homo sapiens
gacaatccagagact

SEQ ID NO: 1205175 - DNA, 15 bp, Homo sapiens
ggacaatccagagac

SEQ ID NO: 1205176 - DNA, 15 bp, Homo sapiens
gggacaatccagaga

SEQ ID NO: 1205177 - DNA, 15 bp, Homo sapiens
ggggacaatccagag

SEQ ID NO: 1205178 - DNA, 15 bp, Homo sapiens
aggggacaatccaga

SEQ ID NO: 1205179 - DNA, 15 bp, Homo sapiens
caggggacaatccag

SEQ ID NO: 1205180 - DNA, 15 bp, Homo sapiens
tcaggggacaatcca

SEQ ID NO: 1205181 - DNA, 15 bp, Homo sapiens
ctcaggggacaatcc

SEQ ID NO: 1205182 - DNA, 15 bp, Homo sapiens
actcaggggacaatc

SEQ ID NO: 1205183 - DNA, 15 bp, Homo sapiens
cactcaggggacaat

SEQ ID NO: 1205184 - DNA, 15 bp, Homo sapiens
tcactcaggggacaa

SEQ ID NO: 1205185 - DNA, 15 bp, Homo sapiens
ctcactcaggggaca

SEQ ID NO: 1205186 - DNA, 15 bp, Homo sapiens
tctcactcaggggac

SEQ ID NO: 1205187 - DNA, 15 bp, Homo sapiens
ctctcactcagggga

SEQ ID NO: 1205188 - DNA, 15 bp, Homo sapiens
cctctcactcagggg

SEQ ID NO: 1205189 - DNA, 15 bp, Homo sapiens
ccctctcactcaggg

SEQ ID NO: 1205190 - DNA, 15 bp, Homo sapiens
cccctctcactcagg

SEQ ID NO: 1205191 - DNA, 15 bp, Homo sapiens
tcccctctcactcag

SEQ ID NO: 1205192 - DNA, 15 bp, Homo sapiens
gtcccctctcactca

SEQ ID NO: 1205193 - DNA, 15 bp, Homo sapiens
tgtcccctctcactc

SEQ ID NO: 1205194 - DNA, 15 bp, Homo sapiens
atgtcccctctcact

SEQ ID NO: 1205195 - DNA, 15 bp, Homo sapiens
catgtcccctctcac

SEQ ID NO: 1205196 - DNA, 15 bp, Homo sapiens
gcatgtcccctctca

SEQ ID NO: 1205197 - DNA, 15 bp, Homo sapiens
ggcatgtcccctctc

SEQ ID NO: 1205198 - DNA, 15 bp, Homo sapiens
tggcatgtcccctct

SEQ ID NO: 1205199 - DNA, 15 bp, Homo sapiens
atggcatgtcccctc

SEQ ID NO: 1205200 - DNA, 15 bp, Homo sapiens
aatggcatgtcccct

SEQ ID NO: 1205201 - DNA, 15 bp, Homo sapiens
aaatggcatgtcccc

SEQ ID NO: 1205202 - DNA, 15 bp, Homo sapiens
gaaatggcatgtccc

SEQ ID NO: 1205203 - DNA, 15 bp, Homo sapiens
agaaatggcatgtcc

SEQ ID NO: 1205204 - DNA, 15 bp, Homo sapiens
gagaaatggcatgtc

SEQ ID NO: 1205205 - DNA, 15 bp, Homo sapiens
agagaaatggcatgt

SEQ ID NO: 1205206 - DNA, 15 bp, Homo sapiens
gagagaaatggcatg

SEQ ID NO: 1205207 - DNA, 15 bp, Homo sapiens
tgagagaaatggcat

SEQ ID NO: 1205208 - DNA, 15 bp, Homo sapiens
atgagagaaatggca

SEQ ID NO: 1205209 - DNA, 15 bp, Homo sapiens
gatgagagaaatggc

SEQ ID NO: 1205210 - DNA, 15 bp, Homo sapiens
agatgagagaaatgg

SEQ ID NO: 1205211 - DNA, 15 bp, Homo sapiens
cagatgagagaaatg

SEQ ID NO: 1205212 - DNA, 15 bp, Homo sapiens
ccagatgagagaaat

SEQ ID NO: 1205213 - DNA, 15 bp, Homo sapiens
cccagatgagagaaa

SEQ ID NO: 1205214 - DNA, 15 bp, Homo sapiens
acccagatgagagaa

SEQ ID NO: 1205215 - DNA, 15 bp, Homo sapiens
gacccagatgagaga

SEQ ID NO: 1205216 - DNA, 15 bp, Homo sapiens
tgacccagatgagag

SEQ ID NO: 1205217 - DNA, 15 bp, Homo sapiens
ttgacccagatgaga

SEQ ID NO: 1205218 - DNA, 15 bp, Homo sapiens
cttgacccagatgag

SEQ ID NO: 1205219 - DNA, 15 bp, Homo sapiens
tcttgacccagatga

SEQ ID NO: 1205220 - DNA, 15 bp, Homo sapiens
gtcttgacccagatg

SEQ ID NO: 1205221 - DNA, 15 bp, Homo sapiens
ggtcttgacccagat

SEQ ID NO: 1205222 - DNA, 15 bp, Homo sapiens
cggtcttgacccaga

SEQ ID NO: 1205223 - DNA, 15 bp, Homo sapiens
tcggtcttgacccag

SEQ ID NO: 1205224 - DNA, 15 bp, Homo sapiens
ttcggtcttgaccca

SEQ ID NO: 1205225 - DNA, 15 bp, Homo sapiens
gttcggtcttgaccc

SEQ ID NO: 1205226 - DNA, 15 bp, Homo sapiens
cgttcggtcttgacc

SEQ ID NO: 1205227 - DNA, 15 bp, Homo sapiens
acgttcggtcttgac

SEQ ID NO: 1205228 - DNA, 15 bp, Homo sapiens
cacgttcggtcttga

SEQ ID NO: 1205229 - DNA, 15 bp, Homo sapiens
gcacgttcggtcttg

SEQ ID NO: 1205230 - DNA, 15 bp, Homo sapiens
agcacgttcggtctt

SEQ ID NO: 1205231 - DNA, 15 bp, Homo sapiens
aagcacgttcggtct

SEQ ID NO: 1205232 - DNA, 15 bp, Homo sapiens
aaagcacgttcggtc

SEQ ID NO: 1205233 - DNA, 15 bp, Homo sapiens
gaaagcacgttcggt

SEQ ID NO: 1205234 - DNA, 15 bp, Homo sapiens
agaaagcacgttcgg

SEQ ID NO: 1205235 - DNA, 15 bp, Homo sapiens
gagaaagcacgttcg

SEQ ID NO: 1205236 - DNA, 15 bp, Homo sapiens
agagaaagcacgttc

SEQ ID NO: 1205237 - DNA, 15 bp, Homo sapiens
cagagaaagcacgtt

SEQ ID NO: 1205238 - DNA, 15 bp, Homo sapiens
gcagagaaagcacgt

SEQ ID NO: 1205239 - DNA, 15 bp, Homo sapiens
agcagagaaagcacg

SEQ ID NO: 1205240 - DNA, 15 bp, Homo sapiens
aagcagagaaagcac

SEQ ID NO: 1205241 - DNA, 15 bp, Homo sapiens
caagcagagaaagca

SEQ ID NO: 1205242 - DNA, 15 bp, Homo sapiens
acaagcagagaaagc

SEQ ID NO: 1205243 - DNA, 15 bp, Homo sapiens
aacaagcagagaaag

SEQ ID NO: 1205244 - DNA, 15 bp, Homo sapiens
aaacaagcagagaaa

SEQ ID NO: 1205245 - DNA, 15 bp, Homo sapiens
taaacaagcagagaa

SEQ ID NO: 1205246 - DNA, 15 bp, Homo sapiens
ataaacaagcagaga

SEQ ID NO: 1205247 - DNA, 15 bp, Homo sapiens
aataaacaagcagag

SEQ ID NO: 1205248 - DNA, 15 bp, Homo sapiens
aaataaacaagcaga

SEQ ID NO: 1205249 - DNA, 15 bp, Homo sapiens
caaataaacaagcag

SEQ ID NO: 1205250 - DNA, 15 bp, Homo sapiens
acaaataaacaagca

SEQ ID NO: 1205251 - DNA, 15 bp, Homo sapiens
gacaaataaacaagc

SEQ ID NO: 1205252 - DNA, 15 bp, Homo sapiens
agacaaataaacaag

SEQ ID NO: 1205253 - DNA, 15 bp, Homo sapiens
aagacaaataaacaa

SEQ ID NO: 1205254 - DNA, 15 bp, Homo sapiens
aaagacaaataaaca

SEQ ID NO: 1205255 - DNA, 15 bp, Homo sapiens
taaagacaaataaac

SEQ ID NO: 1205256 - DNA, 15 bp, Homo sapiens
ttaaagacaaataaa

SEQ ID NO: 1205257 - DNA, 15 bp, Homo sapiens
ttttaaagacaaata

SEQ ID NO: 1205258 - DNA, 15 bp, Homo sapiens
gttttaaagacaaat

SEQ ID NO: 1205259 - DNA, 15 bp, Homo sapiens
agttttaaagacaaa

SEQ ID NO: 1205260 - DNA, 15 bp, Homo sapiens
cagttttaaagacaa

SEQ ID NO: 1205261 - DNA, 15 bp, Homo sapiens
acagttttaaagaca

SEQ ID NO: 1205262 - DNA, 15 bp, Homo sapiens
aacagttttaaagac

SEQ ID NO: 1205263 - DNA, 15 bp, Homo sapiens
aaacagttttaaaga

SEQ ID NO: 1205264 - DNA, 15 bp, Homo sapiens
aaaacagttttaaag

SEQ ID NO: 1205265 - DNA, 15 bp, Homo sapiens
caaaacagttttaaa

SEQ ID NO: 1205266 - DNA, 15 bp, Homo sapiens
ccaaaacagttttaa

SEQ ID NO: 1205267 - DNA, 15 bp, Homo sapiens
tccaaaacagtttta

SEQ ID NO: 1205268 - DNA, 15 bp, Homo sapiens
atccaaaacagtttt

SEQ ID NO: 1205269 - DNA, 15 bp, Homo sapiens
aatccaaaacagttt

SEQ ID NO: 1205270 - DNA, 15 bp, Homo sapiens
caatccaaaacagtt

SEQ ID NO: 1205271 - DNA, 15 bp, Homo sapiens
tcaatccaaaacagt

SEQ ID NO: 1205272 - DNA, 15 bp, Homo sapiens
ttcaatccaaaacag

SEQ ID NO: 1205273 - DNA, 15 bp, Homo sapiens
tttcaatccaaaaca

SEQ ID NO: 1205274 - DNA, 15 bp, Homo sapiens
ttttcaatccaaaac

SEQ ID NO: 1205275 - DNA, 15 bp, Homo sapiens
tttttcaatccaaaa

SEQ ID NO: 1205276 - DNA, 15 bp, Homo sapiens
gtttttcaatccaaa

SEQ ID NO: 1205277 - DNA, 15 bp, Homo sapiens
tgtttttcaatccaa

SEQ ID NO: 1205278 - DNA, 15 bp, Homo sapiens
ttgtttttcaatcca

SEQ ID NO: 1205279 - DNA, 15 bp, Homo sapiens
tttgtttttcaatcc

SEQ ID NO: 1205280 - DNA, 15 bp, Homo sapiens
ttttgtttttcaatc

SEQ ID NO: 1205281 - DNA, 15 bp, Homo sapiens
attttgtttttcaat

SEQ ID NO: 1205282 - DNA, 15 bp, Homo sapiens
tattttgtttttcaa

SEQ ID NO: 1205283 - DNA, 15 bp, Homo sapiens
gtattttgtttttca

SEQ ID NO: 1205284 - DNA, 15 bp, Homo sapiens
agtattttgtttttc

SEQ ID NO: 1205285 - DNA, 15 bp, Homo sapiens
aagtattttgttttt

SEQ ID NO: 1205286 - DNA, 15 bp, Homo sapiens
taagtattttgtttt

SEQ ID NO: 1205287 - DNA, 15 bp, Homo sapiens
ataagtattttgttt

SEQ ID NO: 1205288 - DNA, 15 bp, Homo sapiens
tataagtattttgtt

SEQ ID NO: 1205289 - DNA, 15 bp, Homo sapiens
ctataagtattttgt

SEQ ID NO: 1205290 - DNA, 15 bp, Homo sapiens
cctataagtattttg

SEQ ID NO: 1205291 - DNA, 15 bp, Homo sapiens
acctataagtatttt

SEQ ID NO: 1205292 - DNA, 15 bp, Homo sapiens
tacctataagtattt

SEQ ID NO: 1205293 - DNA, 15 bp, Homo sapiens
atacctataagtatt

SEQ ID NO: 1205294 - DNA, 15 bp, Homo sapiens
gatacctataagtat

SEQ ID NO: 1205295 - DNA, 15 bp, Homo sapiens
tgatacctataagta

SEQ ID NO: 1205296 - DNA, 15 bp, Homo sapiens
ctgatacctataagt

SEQ ID NO: 1205297 - DNA, 15 bp, Homo sapiens
tctgatacctataag

SEQ ID NO: 1205298 - DNA, 15 bp, Homo sapiens
ttctgatacctataa

SEQ ID NO: 1205299 - DNA, 15 bp, Homo sapiens
attctgatacctata

SEQ ID NO: 1205300 - DNA, 15 bp, Homo sapiens
tattctgatacctat

SEQ ID NO: 1205301 - DNA, 15 bp, Homo sapiens
ttattctgataccta

SEQ ID NO: 1205302 - DNA, 15 bp, Homo sapiens
cttattctgatacct

SEQ ID NO: 1205303 - DNA, 15 bp, Homo sapiens
tcttattctgatacc

SEQ ID NO: 1205304 - DNA, 15 bp, Homo sapiens
ctcttattctgatac

SEQ ID NO: 1205305 - DNA, 15 bp, Homo sapiens
cctcttattctgata

SEQ ID NO: 1205306 - DNA, 15 bp, Homo sapiens
tcctcttattctgat

SEQ ID NO: 1205307 - DNA, 15 bp, Homo sapiens
ttcctcttattctga

SEQ ID NO: 1205308 - DNA, 15 bp, Homo sapiens
tttcctcttattctg

SEQ ID NO: 1205309 - DNA, 15 bp, Homo sapiens
ctttcctcttattct

SEQ ID NO: 1205310 - DNA, 15 bp, Homo sapiens
gctttcctcttattc

SEQ ID NO: 1205311 - DNA, 15 bp, Homo sapiens
tggctttcctcttat

SEQ ID NO: 1205312 - DNA, 15 bp, Homo sapiens
ttggctttcctctta

SEQ ID NO: 1205313 - DNA, 15 bp, Homo sapiens
cttggctttcctctt

SEQ ID NO: 1205314 - DNA, 15 bp, Homo sapiens
tcttggctttcctct

SEQ ID NO: 1205315 - DNA, 15 bp, Homo sapiens
gtcttggctttcctc

SEQ ID NO: 1205316 - DNA, 15 bp, Homo sapiens
agtcttggctttcct

SEQ ID NO: 1205317 - DNA, 15 bp, Homo sapiens
gagtcttggctttcc

SEQ ID NO: 1205318 - DNA, 15 bp, Homo sapiens
agagtcttggctttc

SEQ ID NO: 1205319 - DNA, 15 bp, Homo sapiens
aagagtcttggcttt

SEQ ID NO: 1205320 - DNA, 15 bp, Homo sapiens
caagagtcttggctt

SEQ ID NO: 1205321 - DNA, 15 bp, Homo sapiens
ccaagagtcttggct

SEQ ID NO: 1205322 - DNA, 15 bp, Homo sapiens
tccaagagtcttggc

SEQ ID NO: 1205323 - DNA, 15 bp, Homo sapiens
ttccaagagtcttgg

SEQ ID NO: 1205324 - DNA, 15 bp, Homo sapiens
tttccaagagtcttg

SEQ ID NO: 1205325 - DNA, 15 bp, Homo sapiens
gtttccaagagtctt

SEQ ID NO: 1205326 - DNA, 15 bp, Homo sapiens
cgtttccaagagtct

SEQ ID NO: 1205327 - DNA, 15 bp, Homo sapiens
acgtttccaagagtc

SEQ ID NO: 1205328 - DNA, 15 bp, Homo sapiens
aacgtttccaagagt

SEQ ID NO: 1205329 - DNA, 15 bp, Homo sapiens
aaacgtttccaagag

SEQ ID NO: 1205330 - DNA, 15 bp, Homo sapiens
caaacgtttccaaga

SEQ ID NO: 1205331 - DNA, 15 bp, Homo sapiens
ccaaacgtttccaag

SEQ ID NO: 1205332 - DNA, 15 bp, Homo sapiens
tccaaacgtttccaa

SEQ ID NO: 1205333 - DNA, 15 bp, Homo sapiens
atccaaacgtttcca

SEQ ID NO: 1205334 - DNA, 15 bp, Homo sapiens
gatccaaacgtttcc

SEQ ID NO: 1205335 - DNA, 15 bp, Homo sapiens
ggatccaaacgtttc

SEQ ID NO: 1205336 - DNA, 15 bp, Homo sapiens
aggatccaaacgttt

SEQ ID NO: 1205337 - DNA, 15 bp, Homo sapiens
taggatccaaacgtt

SEQ ID NO: 1205338 - DNA, 15 bp, Homo sapiens
ctaggatccaaacgt

SEQ ID NO: 1205339 - DNA, 15 bp, Homo sapiens
cctaggatccaaacg

SEQ ID NO: 1205340 - DNA, 15 bp, Homo sapiens
tcctaggatccaaac

SEQ ID NO: 1205341 - DNA, 15 bp, Homo sapiens
gtcctaggatccaaa

SEQ ID NO: 1205342 - DNA, 15 bp, Homo sapiens
cgtcctaggatccaa

SEQ ID NO: 1205343 - DNA, 15 bp, Homo sapiens
ccgtcctaggatcca

SEQ ID NO: 1205344 - DNA, 15 bp, Homo sapiens
tccgtcctaggatcc

SEQ ID NO: 1205345 - DNA, 15 bp, Homo sapiens
atccgtcctaggatc

SEQ ID NO: 1205346 - DNA, 15 bp, Homo sapiens
aatccgtcctaggat

SEQ ID NO: 1205347 - DNA, 15 bp, Homo sapiens
aaatccgtcctagga

SEQ ID NO: 1205348 - DNA, 15 bp, Homo sapiens
gaaatccgtcctagg

SEQ ID NO: 1205349 - DNA, 15 bp, Homo sapiens
agaaatccgtcctag

SEQ ID NO: 1205350 - DNA, 15 bp, Homo sapiens
aagaaatccgtccta

SEQ ID NO: 1205351 - DNA, 15 bp, Homo sapiens
aaagaaatccgtcct

SEQ ID NO: 1205352 - DNA, 15 bp, Homo sapiens
aaaagaaatccgtcc

SEQ ID NO: 1205353 - DNA, 15 bp, Homo sapiens
aaaaagaaatccgtc

SEQ ID NO: 1205354 - DNA, 15 bp, Homo sapiens
caaaaagaaatccgt

SEQ ID NO: 1205355 - DNA, 15 bp, Homo sapiens
acaaaaagaaatccg

SEQ ID NO: 1205356 - DNA, 15 bp, Homo sapiens
cacaaaaagaaatcc

SEQ ID NO: 1205357 - DNA, 15 bp, Homo sapiens
gcacaaaaagaaatc

SEQ ID NO: 1205358 - DNA, 15 bp, Homo sapiens
ggcacaaaaagaaat

SEQ ID NO: 1205359 - DNA, 15 bp, Homo sapiens
gggcacaaaaagaaa

SEQ ID NO: 1205360 - DNA, 15 bp, Homo sapiens
ggggcacaaaaagaa

SEQ ID NO: 1205361 - DNA, 15 bp, Homo sapiens
gggggcacaaaaaga

SEQ ID NO: 1205362 - DNA, 15 bp, Homo sapiens
ggggggcacaaaaag

SEQ ID NO: 1205363 - DNA, 15 bp, Homo sapiens
aggggggcacaaaaa

SEQ ID NO: 1205364 - DNA, 15 bp, Homo sapiens
caggggggcacaaaa

SEQ ID NO: 1205365 - DNA, 15 bp, Homo sapiens
ccaggggggcacaaa

SEQ ID NO: 1205366 - DNA, 15 bp, Homo sapiens
cccaggggggcacaa

SEQ ID NO: 1205367 - DNA, 15 bp, Homo sapiens
ccccaggggggcaca

SEQ ID NO: 1205368 - DNA, 15 bp, Homo sapiens
accccaggggggcac

SEQ ID NO: 1205369 - DNA, 15 bp, Homo sapiens
caccccaggggggca

SEQ ID NO: 1205370 - DNA, 15 bp, Homo sapiens
ccaccccaggggggc

SEQ ID NO: 1205371 - DNA, 15 bp, Homo sapiens
accaccccagggggg

SEQ ID NO: 1205372 - DNA, 15 bp, Homo sapiens
gaccaccccaggggg

SEQ ID NO: 1205373 - DNA, 15 bp, Homo sapiens
agaccaccccagggg

SEQ ID NO: 1205374 - DNA, 15 bp, Homo sapiens
cagaccaccccaggg

SEQ ID NO: 1205375 - DNA, 15 bp, Homo sapiens
ccagaccaccccagg

SEQ ID NO: 1205376 - DNA, 15 bp, Homo sapiens
accagaccaccccag

SEQ ID NO: 1205377 - DNA, 15 bp, Homo sapiens
aaccagaccacccca

SEQ ID NO: 1205378 - DNA, 15 bp, Homo sapiens
caaccagaccacccc

SEQ ID NO: 1205379 - DNA, 15 bp, Homo sapiens
acaaccagaccaccc

SEQ ID NO: 1205380 - DNA, 15 bp, Homo sapiens
tacaaccagaccacc

SEQ ID NO: 1205381 - DNA, 15 bp, Homo sapiens
gtacaaccagaccac

SEQ ID NO: 1205382 - DNA, 15 bp, Homo sapiens
ggtacaaccagacca

SEQ ID NO: 1205383 - DNA, 15 bp, Homo sapiens
aggtacaaccagacc

SEQ ID NO: 1205384 - DNA, 15 bp, Homo sapiens
caggtacaaccagac

SEQ ID NO: 1205385 - DNA, 15 bp, Homo sapiens
ccaggtacaaccaga

SEQ ID NO: 1205386 - DNA, 15 bp, Homo sapiens
tccaggtacaaccag

SEQ ID NO: 1205387 - DNA, 15 bp, Homo sapiens
atccaggtacaacca

SEQ ID NO: 1205388 - DNA, 15 bp, Homo sapiens
catccaggtacaacc

SEQ ID NO: 1205389 - DNA, 15 bp, Homo sapiens
acatccaggtacaac

SEQ ID NO: 1205390 - DNA, 15 bp, Homo sapiens
tacatccaggtacaa

SEQ ID NO: 1205391 - DNA, 15 bp, Homo sapiens
ctacatccaggtaca

SEQ ID NO: 1205392 - DNA, 15 bp, Homo sapiens
cctacatccaggtac

SEQ ID NO: 1205393 - DNA, 15 bp, Homo sapiens
acctacatccaggta

SEQ ID NO: 1205394 - DNA, 15 bp, Homo sapiens
cacctacatccaggt

SEQ ID NO: 1205395 - DNA, 15 bp, Homo sapiens
tcacctacatccagg

SEQ ID NO: 1205396 - DNA, 15 bp, Homo sapiens
gtcacctacatccag

SEQ ID NO: 1205397 - DNA, 15 bp, Homo sapiens
tgtcacctacatcca

SEQ ID NO: 1205398 - DNA, 15 bp, Homo sapiens
atgtcacctacatcc

SEQ ID NO: 1205399 - DNA, 15 bp, Homo sapiens
aatgtcacctacatc

SEQ ID NO: 1205400 - DNA, 15 bp, Homo sapiens
caatgtcacctacat

SEQ ID NO: 1205401 - DNA, 15 bp, Homo sapiens
acaatgtcacctaca

SEQ ID NO: 1205402 - DNA, 15 bp, Homo sapiens
gacaatgtcacctac

SEQ ID NO: 1205403 - DNA, 15 bp, Homo sapiens
agacaatgtcaccta

SEQ ID NO: 1205404 - DNA, 15 bp, Homo sapiens
tagacaatgtcacct

SEQ ID NO: 1205405 - DNA, 15 bp, Homo sapiens
ctagacaatgtcacc

SEQ ID NO: 1205406 - DNA, 15 bp, Homo sapiens
tctagacaatgtcac

SEQ ID NO: 1205407 - DNA, 15 bp, Homo sapiens
ctctagacaatgtca

SEQ ID NO: 1205408 - DNA, 15 bp, Homo sapiens
gctctagacaatgtc

SEQ ID NO: 1205409 - DNA, 15 bp, Homo sapiens
ggctctagacaatgt

SEQ ID NO: 1205410 - DNA, 15 bp, Homo sapiens
aggctctagacaatg

SEQ ID NO: 1205411 - DNA, 15 bp, Homo sapiens
aaggctctagacaat

SEQ ID NO: 1205412 - DNA, 15 bp, Homo sapiens
caaggctctagacaa

SEQ ID NO: 1205413 - DNA, 15 bp, Homo sapiens
gcaaggctctagaca

SEQ ID NO: 1205414 - DNA, 15 bp, Homo sapiens
agcaaggctctagac

SEQ ID NO: 1205415 - DNA, 15 bp, Homo sapiens
gagcaaggctctaga

SEQ ID NO: 1205416 - DNA, 15 bp, Homo sapiens
tgagcaaggctctag

SEQ ID NO: 1205417 - DNA, 15 bp, Homo sapiens
gtgagcaaggctcta

SEQ ID NO: 1205418 - DNA, 15 bp, Homo sapiens
tgtgagcaaggctct

SEQ ID NO: 1205419 - DNA, 15 bp, Homo sapiens
ttgtgagcaaggctc

SEQ ID NO: 1205420 - DNA, 15 bp, Homo sapiens
tttgtgagcaaggct

SEQ ID NO: 1205421 - DNA, 15 bp, Homo sapiens
ctttgtgagcaaggc

SEQ ID NO: 1205422 - DNA, 15 bp, Homo sapiens
gctttgtgagcaagg

SEQ ID NO: 1205423 - DNA, 15 bp, Homo sapiens
tgctttgtgagcaag

SEQ ID NO: 1205424 - DNA, 15 bp, Homo sapiens
ttgctttgtgagcaa

SEQ ID NO: 1205425 - DNA, 15 bp, Homo sapiens
cttgctttgtgagca

SEQ ID NO: 1205426 - DNA, 15 bp, Homo sapiens
gcttgctttgtgagc

SEQ ID NO: 1205427 - DNA, 15 bp, Homo sapiens
tgcttgctttgtgag

SEQ ID NO: 1205428 - DNA, 15 bp, Homo sapiens
ctgcttgctttgtga

SEQ ID NO: 1205429 - DNA, 15 bp, Homo sapiens
gctgcttgctttgtg

SEQ ID NO: 1205430 - DNA, 15 bp, Homo sapiens
tgctgcttgctttgt

SEQ ID NO: 1205431 - DNA, 15 bp, Homo sapiens
atgctgcttgctttg

SEQ ID NO: 1205432 - DNA, 15 bp, Homo sapiens
gatgctgcttgcttt

SEQ ID NO: 1205433 - DNA, 15 bp, Homo sapiens
tgatgctgcttgctt

SEQ ID NO: 1205434 - DNA, 15 bp, Homo sapiens
ctgatgctgcttgct

SEQ ID NO: 1205435 - DNA, 15 bp, Homo sapiens
gctgatgctgcttgc

SEQ ID NO: 1205436 - DNA, 15 bp, Homo sapiens
tgctgatgctgcttg

SEQ ID NO: 1205437 - DNA, 15 bp, Homo sapiens
ttgctgatgctgctt

SEQ ID NO: 1205438 - DNA, 15 bp, Homo sapiens
gttgctgatgctgct

SEQ ID NO: 1205439 - DNA, 15 bp, Homo sapiens
ggttgctgatgctgc

SEQ ID NO: 1205440 - DNA, 15 bp, Homo sapiens
gggttgctgatgctg

SEQ ID NO: 1205441 - DNA, 15 bp, Homo sapiens
ggggttgctgatgct

SEQ ID NO: 1205442 - DNA, 15 bp, Homo sapiens
aggggttgctgatgc

SEQ ID NO: 1205443 - DNA, 15 bp, Homo sapiens
caggggttgctgatg

SEQ ID NO: 1205444 - DNA, 15 bp, Homo sapiens
tcaggggttgctgat

SEQ ID NO: 1205445 - DNA, 15 bp, Homo sapiens
ctcaggggttgctga

SEQ ID NO: 1205446 - DNA, 15 bp, Homo sapiens
tctcaggggttgctg

SEQ ID NO: 1205447 - DNA, 15 bp, Homo sapiens
ctctcaggggttgct

SEQ ID NO: 1205448 - DNA, 15 bp, Homo sapiens
gctctcaggggttgc

SEQ ID NO: 1205449 - DNA, 15 bp, Homo sapiens
agctctcaggggttg

SEQ ID NO: 1205450 - DNA, 15 bp, Homo sapiens
aagctctcaggggtt

SEQ ID NO: 1205451 - DNA, 15 bp, Homo sapiens
caagctctcaggggt

SEQ ID NO: 1205452 - DNA, 15 bp, Homo sapiens
gcaagctctcagggg

SEQ ID NO: 1205453 - DNA, 15 bp, Homo sapiens
ggcaagctctcaggg

SEQ ID NO: 1205454 - DNA, 15 bp, Homo sapiens
tggcaagctctcagg

SEQ ID NO: 1205455 - DNA, 15 bp, Homo sapiens
ctggcaagctctcag

SEQ ID NO: 1205456 - DNA, 15 bp, Homo sapiens
tctggcaagctctca

SEQ ID NO: 1205457 - DNA, 15 bp, Homo sapiens
ttctggcaagctctc

SEQ ID NO: 1205458 - DNA, 15 bp, Homo sapiens
tttctggcaagctct

SEQ ID NO: 1205459 - DNA, 15 bp, Homo sapiens
atttctggcaagctc

SEQ ID NO: 1205460 - DNA, 15 bp, Homo sapiens
catttctggcaagct

SEQ ID NO: 1205461 - DNA, 15 bp, Homo sapiens
gcatttctggcaagc

SEQ ID NO: 1205462 - DNA, 15 bp, Homo sapiens
tgcatttctggcaag

SEQ ID NO: 1205463 - DNA, 15 bp, Homo sapiens
ctgcatttctggcaa

SEQ ID NO: 1205464 - DNA, 15 bp, Homo sapiens
tctgcatttctggca

SEQ ID NO: 1205465 - DNA, 15 bp, Homo sapiens
ctctgcatttctggc

SEQ ID NO: 1205466 - DNA, 15 bp, Homo sapiens
gctctgcatttctgg

SEQ ID NO: 1205467 - DNA, 15 bp, Homo sapiens
ggctctgcatttctg

SEQ ID NO: 1205468 - DNA, 15 bp, Homo sapiens
aggctctgcatttct

SEQ ID NO: 1205469 - DNA, 15 bp, Homo sapiens
gaggctctgcatttc

SEQ ID NO: 1205470 - DNA, 15 bp, Homo sapiens
tgaggctctgcattt

SEQ ID NO: 1205471 - DNA, 15 bp, Homo sapiens
ttgaggctctgcatt

SEQ ID NO: 1205472 - DNA, 15 bp, Homo sapiens
cttgaggctctgcat

SEQ ID NO: 1205473 - DNA, 15 bp, Homo sapiens
gcttgaggctctgca

SEQ ID NO: 1205474 - DNA, 15 bp, Homo sapiens
ggcttgaggctctgc

SEQ ID NO: 1205475 - DNA, 15 bp, Homo sapiens
cggcttgaggctctg

SEQ ID NO: 1205476 - DNA, 15 bp, Homo sapiens
gcggcttgaggctct

SEQ ID NO: 1205477 - DNA, 15 bp, Homo sapiens
tgcggcttgaggctc

SEQ ID NO: 1205478 - DNA, 15 bp, Homo sapiens
gtgcggcttgaggct

SEQ ID NO: 1205479 - DNA, 15 bp, Homo sapiens
ggtgcggcttgaggc

SEQ ID NO: 1205480 - DNA, 15 bp, Homo sapiens
gggtgcggcttgagg

SEQ ID NO: 1205481 - DNA, 15 bp, Homo sapiens
tgggtgcggcttgag

SEQ ID NO: 1205482 - DNA, 15 bp, Homo sapiens
ttgggtgcggcttga

SEQ ID NO: 1205483 - DNA, 15 bp, Homo sapiens
cttgggtgcggcttg

SEQ ID NO: 1205484 - DNA, 15 bp, Homo sapiens
tcttgggtgcggctt

SEQ ID NO: 1205485 - DNA, 15 bp, Homo sapiens
gtcttgggtgcggct

SEQ ID NO: 1205486 - DNA, 15 bp, Homo sapiens
ggtcttgggtgcggc

SEQ ID NO: 1205487 - DNA, 15 bp, Homo sapiens
aggtcttgggtgcgg

SEQ ID NO: 1205488 - DNA, 15 bp, Homo sapiens
caggtcttgggtgcg

SEQ ID NO: 1205489 - DNA, 15 bp, Homo sapiens
gcaggtcttgggtgc

SEQ ID NO: 1205490 - DNA, 15 bp, Homo sapiens
agcaggtcttgggtg

SEQ ID NO: 1205491 - DNA, 15 bp, Homo sapiens
cagcaggtcttgggt

SEQ ID NO: 1205492 - DNA, 15 bp, Homo sapiens
tcagcaggtcttggg

SEQ ID NO: 1205493 - DNA, 15 bp, Homo sapiens
ctcagcaggtcttgg

SEQ ID NO: 1205494 - DNA, 15 bp, Homo sapiens
actcagcaggtcttg

SEQ ID NO: 1205495 - DNA, 15 bp, Homo sapiens
gactcagcaggtctt

SEQ ID NO: 1205496 - DNA, 15 bp, Homo sapiens
tgactcagcaggtct

SEQ ID NO: 1205497 - DNA, 15 bp, Homo sapiens
ctgactcagcaggtc

SEQ ID NO: 1205498 - DNA, 15 bp, Homo sapiens
gctgactcagcaggt

SEQ ID NO: 1205499 - DNA, 15 bp, Homo sapiens
agctgactcagcagg

SEQ ID NO: 1205500 - DNA, 15 bp, Homo sapiens
gagctgactcagcag

SEQ ID NO: 1205501 - DNA, 15 bp, Homo sapiens
agagctgactcagca

SEQ ID NO: 1205502 - DNA, 15 bp, Homo sapiens
cagagctgactcagc

SEQ ID NO: 1205503 - DNA, 15 bp, Homo sapiens
gcagagctgactcag

SEQ ID NO: 1205504 - DNA, 15 bp, Homo sapiens
agcagagctgactca

SEQ ID NO: 1205505 - DNA, 15 bp, Homo sapiens
aagcagagctgactc

SEQ ID NO: 1205506 - DNA, 15 bp, Homo sapiens
gaagcagagctgact

SEQ ID NO: 1205507 - DNA, 15 bp, Homo sapiens
tgaagcagagctgac

SEQ ID NO: 1205508 - DNA, 15 bp, Homo sapiens
ctgaagcagagctga

SEQ ID NO: 1205509 - DNA, 15 bp, Homo sapiens
actgaagcagagctg

SEQ ID NO: 1205510 - DNA, 15 bp, Homo sapiens
gactgaagcagagct

SEQ ID NO: 1205511 - DNA, 15 bp, Homo sapiens
cgactgaagcagagc

SEQ ID NO: 1205512 - DNA, 15 bp, Homo sapiens
tcgactgaagcagag

SEQ ID NO: 1205513 - DNA, 15 bp, Homo sapiens
ctcgactgaagcaga

SEQ ID NO: 1205514 - DNA, 15 bp, Homo sapiens
actcgactgaagcag

SEQ ID NO: 1205515 - DNA, 15 bp, Homo sapiens
aactcgactgaagca

SEQ ID NO: 1205516 - DNA, 15 bp, Homo sapiens
aaactcgactgaagc

SEQ ID NO: 1205517 - DNA, 15 bp, Homo sapiens
caaactcgactgaag

SEQ ID NO: 1205518 - DNA, 15 bp, Homo sapiens
tcaaactcgactgaa

SEQ ID NO: 1205519 - DNA, 15 bp, Homo sapiens
ctcaaactcgactga

SEQ ID NO: 1205520 - DNA, 15 bp, Homo sapiens
tctcaaactcgactg

SEQ ID NO: 1205521 - DNA, 15 bp, Homo sapiens
ttctcaaactcgact

SEQ ID NO: 1205522 - DNA, 15 bp, Homo sapiens
cttctcaaactcgac

SEQ ID NO: 1205523 - DNA, 15 bp, Homo sapiens
gcttctcaaactcga

SEQ ID NO: 1205524 - DNA, 15 bp, Homo sapiens
tgcttctcaaactcg

SEQ ID NO: 1205525 - DNA, 15 bp, Homo sapiens
gtgcttctcaaactc

SEQ ID NO: 1205526 - DNA, 15 bp, Homo sapiens
agtgcttctcaaact

SEQ ID NO: 1205527 - DNA, 15 bp, Homo sapiens
cagtgcttctcaaac

SEQ ID NO: 1205528 - DNA, 15 bp, Homo sapiens
ccagtgcttctcaaa

SEQ ID NO: 1205529 - DNA, 15 bp, Homo sapiens
gccagtgcttctcaa

SEQ ID NO: 1205530 - DNA, 15 bp, Homo sapiens
agccagtgcttctca

SEQ ID NO: 1205531 - DNA, 15 bp, Homo sapiens
aagccagtgcttctc

SEQ ID NO: 1205532 - DNA, 15 bp, Homo sapiens
caagccagtgcttct

SEQ ID NO: 1205533 - DNA, 15 bp, Homo sapiens
ccaagccagtgcttc

SEQ ID NO: 1205534 - DNA, 15 bp, Homo sapiens
accaagccagtgctt

SEQ ID NO: 1205535 - DNA, 15 bp, Homo sapiens
taccaagccagtgct

SEQ ID NO: 1205536 - DNA, 15 bp, Homo sapiens
ttaccaagccagtgc

SEQ ID NO: 1205537 - DNA, 15 bp, Homo sapiens
cttaccaagccagtg

SEQ ID NO: 1205538 - DNA, 15 bp, Homo sapiens
acttaccaagccagt

SEQ ID NO: 1205539 - DNA, 15 bp, Homo sapiens
gacttaccaagccag

SEQ ID NO: 1205540 - DNA, 15 bp, Homo sapiens
ggacttaccaagcca

SEQ ID NO: 1205541 - DNA, 15 bp, Homo sapiens
aggacttaccaagcc

SEQ ID NO: 1205542 - DNA, 15 bp, Homo sapiens
aaggacttaccaagc

SEQ ID NO: 1205543 - DNA, 15 bp, Homo sapiens
aaaggacttaccaag

SEQ ID NO: 1205544 - DNA, 15 bp, Homo sapiens
caaaggacttaccaa

SEQ ID NO: 1205545 - DNA, 15 bp, Homo sapiens
ccaaaggacttacca

SEQ ID NO: 1205546 - DNA, 15 bp, Homo sapiens
accaaaggacttacc

SEQ ID NO: 1205547 - DNA, 15 bp, Homo sapiens
taccaaaggacttac

SEQ ID NO: 1205548 - DNA, 15 bp, Homo sapiens
ttaccaaaggactta

SEQ ID NO: 1205549 - DNA, 15 bp, Homo sapiens
cttaccaaaggactt

SEQ ID NO: 1205550 - DNA, 15 bp, Homo sapiens
tcttaccaaaggact

SEQ ID NO: 1205551 - DNA, 15 bp, Homo sapiens
gtcttaccaaaggac

SEQ ID NO: 1205552 - DNA, 15 bp, Homo sapiens
ggtcttaccaaagga

SEQ ID NO: 1205553 - DNA, 15 bp, Homo sapiens
tggtcttaccaaagg

SEQ ID NO: 1205554 - DNA, 15 bp, Homo sapiens
ttggtcttaccaaag

SEQ ID NO: 1205555 - DNA, 15 bp, Homo sapiens
cttggtcttaccaaa

SEQ ID NO: 1205556 - DNA, 15 bp, Homo sapiens
acttggtcttaccaa

SEQ ID NO: 1205557 - DNA, 15 bp, Homo sapiens
aacttggtcttacca

SEQ ID NO: 1205558 - DNA, 15 bp, Homo sapiens
caacttggtcttacc

SEQ ID NO: 1205559 - DNA, 15 bp, Homo sapiens
ccaacttggtcttac

SEQ ID NO: 1205560 - DNA, 15 bp, Homo sapiens
gccaacttggtctta

SEQ ID NO: 1205561 - DNA, 15 bp, Homo sapiens
ggccaacttggtctt

SEQ ID NO: 1205562 - DNA, 15 bp, Homo sapiens
tggccaacttggtct

SEQ ID NO: 1205563 - DNA, 15 bp, Homo sapiens
gtggccaacttggtc

SEQ ID NO: 1205564 - DNA, 15 bp, Homo sapiens
tgtggccaacttggt

SEQ ID NO: 1205565 - DNA, 15 bp, Homo sapiens
ctgtggccaacttgg

SEQ ID NO: 1205566 - DNA, 15 bp, Homo sapiens
gctgtggccaacttg

SEQ ID NO: 1205567 - DNA, 15 bp, Homo sapiens
ggctgtggccaactt

SEQ ID NO: 1205568 - DNA, 15 bp, Homo sapiens
aggctgtggccaact

SEQ ID NO: 1205569 - DNA, 15 bp, Homo sapiens
caggctgtggccaac

SEQ ID NO: 1205570 - DNA, 15 bp, Homo sapiens
gcaggctgtggccaa

SEQ ID NO: 1205571 - DNA, 15 bp, Homo sapiens
tgcaggctgtggcca

SEQ ID NO: 1205572 - DNA, 15 bp, Homo sapiens
gtgcaggctgtggcc

SEQ ID NO: 1205573 - DNA, 15 bp, Homo sapiens
agtgcaggctgtggc

SEQ ID NO: 1205574 - DNA, 15 bp, Homo sapiens
tagtgcaggctgtgg

SEQ ID NO: 1205575 - DNA, 15 bp, Homo sapiens
ctagtgcaggctgtg

SEQ ID NO: 1205576 - DNA, 15 bp, Homo sapiens
tctagtgcaggctgt

SEQ ID NO: 1205577 - DNA, 15 bp, Homo sapiens
ctctagtgcaggctg

SEQ ID NO: 1205578 - DNA, 15 bp, Homo sapiens
gctctagtgcaggct

SEQ ID NO: 1205579 - DNA, 15 bp, Homo sapiens
ggctctagtgcaggc

SEQ ID NO: 1205580 - DNA, 15 bp, Homo sapiens
aggctctagtgcagg

SEQ ID NO: 1205581 - DNA, 15 bp, Homo sapiens
caggctctagtgcag

SEQ ID NO: 1205582 - DNA, 15 bp, Homo sapiens
ccaggctctagtgca

SEQ ID NO: 1205583 - DNA, 15 bp, Homo sapiens
cccaggctctagtgc

SEQ ID NO: 1205584 - DNA, 15 bp, Homo sapiens
ccccaggctctagtg

SEQ ID NO: 1205585 - DNA, 15 bp, Homo sapiens
gccccaggctctagt

SEQ ID NO: 1205586 - DNA, 15 bp, Homo sapiens
tgccccaggctctag

SEQ ID NO: 1205587 - DNA, 15 bp, Homo sapiens
atgccccaggctcta

SEQ ID NO: 1205588 - DNA, 15 bp, Homo sapiens
tatgccccaggctct

SEQ ID NO: 1205589 - DNA, 15 bp, Homo sapiens
ctatgccccaggctc

SEQ ID NO: 1205590 - DNA, 15 bp, Homo sapiens
gctatgccccaggct

SEQ ID NO: 1205591 - DNA, 15 bp, Homo sapiens
ggctatgccccaggc

SEQ ID NO: 1205592 - DNA, 15 bp, Homo sapiens
aggctatgccccagg

SEQ ID NO: 1205593 - DNA, 15 bp, Homo sapiens
taggctatgccccag

SEQ ID NO: 1205594 - DNA, 15 bp, Homo sapiens
ctaggctatgcccca

SEQ ID NO: 1205595 - DNA, 15 bp, Homo sapiens
gctaggctatgcccc

SEQ ID NO: 1205596 - DNA, 15 bp, Homo sapiens
agctaggctatgccc

SEQ ID NO: 1205597 - DNA, 15 bp, Homo sapiens
cagctaggctatgcc

SEQ ID NO: 1205598 - DNA, 15 bp, Homo sapiens
ccagctaggctatgc

SEQ ID NO: 1205599 - DNA, 15 bp, Homo sapiens
tccagctaggctatg

SEQ ID NO: 1205600 - DNA, 15 bp, Homo sapiens
atccagctaggctat

SEQ ID NO: 1205601 - DNA, 15 bp, Homo sapiens
catccagctaggcta

SEQ ID NO: 1205602 - DNA, 15 bp, Homo sapiens
acatccagctaggct

SEQ ID NO: 1205603 - DNA, 15 bp, Homo sapiens
gacatccagctaggc

SEQ ID NO: 1205604 - DNA, 15 bp, Homo sapiens
tgacatccagctagg

SEQ ID NO: 1205605 - DNA, 15 bp, Homo sapiens
gtgacatccagctag

SEQ ID NO: 1205606 - DNA, 15 bp, Homo sapiens
agtgacatccagcta

SEQ ID NO: 1205607 - DNA, 15 bp, Homo sapiens
tagtgacatccagct

SEQ ID NO: 1205608 - DNA, 15 bp, Homo sapiens
ctagtgacatccagc

SEQ ID NO: 1205609 - DNA, 15 bp, Homo sapiens
cctagtgacatccag

SEQ ID NO: 1205610 - DNA, 15 bp, Homo sapiens
tcctagtgacatcca

SEQ ID NO: 1205611 - DNA, 15 bp, Homo sapiens
ttcctagtgacatcc

SEQ ID NO: 1205612 - DNA, 15 bp, Homo sapiens
cttcctagtgacatc

SEQ ID NO: 1205613 - DNA, 15 bp, Homo sapiens
acttcctagtgacat

SEQ ID NO: 1205614 - DNA, 15 bp, Homo sapiens
aacttcctagtgaca

SEQ ID NO: 1205615 - DNA, 15 bp, Homo sapiens
gaacttcctagtgac

SEQ ID NO: 1205616 - DNA, 15 bp, Homo sapiens
ggaacttcctagtga

SEQ ID NO: 1205617 - DNA, 15 bp, Homo sapiens
gggaacttcctagtg

SEQ ID NO: 1205618 - DNA, 15 bp, Homo sapiens
tgggaacttcctagt

SEQ ID NO: 1205619 - DNA, 15 bp, Homo sapiens
gtgggaacttcctag

SEQ ID NO: 1205620 - DNA, 15 bp, Homo sapiens
tgtgggaacttccta

SEQ ID NO: 1205621 - DNA, 15 bp, Homo sapiens
ctgtgggaacttcct

SEQ ID NO: 1205622 - DNA, 15 bp, Homo sapiens
tctgtgggaacttcc

SEQ ID NO: 1205623 - DNA, 15 bp, Homo sapiens
ctctgtgggaacttc

SEQ ID NO: 1205624 - DNA, 15 bp, Homo sapiens
cctctgtgggaactt

SEQ ID NO: 1205625 - DNA, 15 bp, Homo sapiens
ccctctgtgggaact

SEQ ID NO: 1205626 - DNA, 15 bp, Homo sapiens
cccctctgtgggaac

SEQ ID NO: 1205627 - DNA, 15 bp, Homo sapiens
acccctctgtgggaa

SEQ ID NO: 1205628 - DNA, 15 bp, Homo sapiens
aacccctctgtggga

SEQ ID NO: 1205629 - DNA, 15 bp, Homo sapiens
caacccctctgtggg

SEQ ID NO: 1205630 - DNA, 15 bp, Homo sapiens
acaacccctctgtgg

SEQ ID NO: 1205631 - DNA, 15 bp, Homo sapiens
cacaacccctctgtg

SEQ ID NO: 1205632 - DNA, 15 bp, Homo sapiens
ccacaacccctctgt

SEQ ID NO: 1205633 - DNA, 15 bp, Homo sapiens
accacaacccctctg

SEQ ID NO: 1205634 - DNA, 15 bp, Homo sapiens
caccacaacccctct

SEQ ID NO: 1205635 - DNA, 15 bp, Homo sapiens
tcaccacaacccctc

SEQ ID NO: 1205636 - DNA, 15 bp, Homo sapiens
ttcaccacaacccct

SEQ ID NO: 1205637 - DNA, 15 bp, Homo sapiens
gttcaccacaacccc

SEQ ID NO: 1205638 - DNA, 15 bp, Homo sapiens
agttcaccacaaccc

SEQ ID NO: 1205639 - DNA, 15 bp, Homo sapiens
tagttcaccacaacc

SEQ ID NO: 1205640 - DNA, 15 bp, Homo sapiens
ttagttcaccacaac

SEQ ID NO: 1205641 - DNA, 15 bp, Homo sapiens
gttagttcaccacaa

SEQ ID NO: 1205642 - DNA, 15 bp, Homo sapiens
agttagttcaccaca

SEQ ID NO: 1205643 - DNA, 15 bp, Homo sapiens
cagttagttcaccac

SEQ ID NO: 1205644 - DNA, 15 bp, Homo sapiens
gcagttagttcacca

SEQ ID NO: 1205645 - DNA, 15 bp, Homo sapiens
ggcagttagttcacc

SEQ ID NO: 1205646 - DNA, 15 bp, Homo sapiens
aggcagttagttcac

SEQ ID NO: 1205647 - DNA, 15 bp, Homo sapiens
caggcagttagttca

SEQ ID NO: 1205648 - DNA, 15 bp, Homo sapiens
gcaggcagttagttc

SEQ ID NO: 1205649 - DNA, 15 bp, Homo sapiens
agcaggcagttagtt

SEQ ID NO: 1205650 - DNA, 15 bp, Homo sapiens
cagcaggcagttagt

SEQ ID NO: 1205651 - DNA, 15 bp, Homo sapiens
ccagcaggcagttag

SEQ ID NO: 1205652 - DNA, 15 bp, Homo sapiens
tccagcaggcagtta

SEQ ID NO: 1205653 - DNA, 15 bp, Homo sapiens
ctccagcaggcagtt

SEQ ID NO: 1205654 - DNA, 15 bp, Homo sapiens
cctccagcaggcagt

SEQ ID NO: 1205655 - DNA, 15 bp, Homo sapiens
acctccagcaggcag

SEQ ID NO: 1205656 - DNA, 15 bp, Homo sapiens
cacctccagcaggca

SEQ ID NO: 1205657 - DNA, 15 bp, Homo sapiens
tcacctccagcaggc

SEQ ID NO: 1205658 - DNA, 15 bp, Homo sapiens
gtcacctccagcagg

SEQ ID NO: 1205659 - DNA, 15 bp, Homo sapiens
agtcacctccagcag

SEQ ID NO: 1205660 - DNA, 15 bp, Homo sapiens
cagtcacctccagca

SEQ ID NO: 1205661 - DNA, 15 bp, Homo sapiens
ccagtcacctccagc

SEQ ID NO: 1205662 - DNA, 15 bp, Homo sapiens
cccagtcacctccag

SEQ ID NO: 1205663 - DNA, 15 bp, Homo sapiens
ccccagtcacctcca

SEQ ID NO: 1205664 - DNA, 15 bp, Homo sapiens
cccccagtcacctcc

SEQ ID NO: 1205665 - DNA, 15 bp, Homo sapiens
tcccccagtcacctc

SEQ ID NO: 1205666 - DNA, 15 bp, Homo sapiens
atcccccagtcacct

SEQ ID NO: 1205667 - DNA, 15 bp, Homo sapiens
catcccccagtcacc

SEQ ID NO: 1205668 - DNA, 15 bp, Homo sapiens
tcatcccccagtcac

SEQ ID NO: 1205669 - DNA, 15 bp, Homo sapiens
atcatcccccagtca

SEQ ID NO: 1205670 - DNA, 15 bp, Homo sapiens
catcatcccccagtc

SEQ ID NO: 1205671 - DNA, 15 bp, Homo sapiens
gcatcatcccccagt

SEQ ID NO: 1205672 - DNA, 15 bp, Homo sapiens
agcatcatcccccag

SEQ ID NO: 1205673 - DNA, 15 bp, Homo sapiens
aagcatcatccccca

SEQ ID NO: 1205674 - DNA, 15 bp, Homo sapiens
gaagcatcatccccc

SEQ ID NO: 1205675 - DNA, 15 bp, Homo sapiens
ggaagcatcatcccc

SEQ ID NO: 1205676 - DNA, 15 bp, Homo sapiens
gggaagcatcatccc

SEQ ID NO: 1205677 - DNA, 15 bp, Homo sapiens
agggaagcatcatcc

SEQ ID NO: 1205678 - DNA, 15 bp, Homo sapiens
aagggaagcatcatc

SEQ ID NO: 1205679 - DNA, 15 bp, Homo sapiens
caagggaagcatcat

SEQ ID NO: 1205680 - DNA, 15 bp, Homo sapiens
ccaagggaagcatca

SEQ ID NO: 1205681 - DNA, 15 bp, Homo sapiens
accaagggaagcatc

SEQ ID NO: 1205682 - DNA, 15 bp, Homo sapiens
aaccaagggaagcat

SEQ ID NO: 1205683 - DNA, 15 bp, Homo sapiens
aaaccaagggaagca

SEQ ID NO: 1205684 - DNA, 15 bp, Homo sapiens
caaaccaagggaagc

SEQ ID NO: 1205685 - DNA, 15 bp, Homo sapiens
gcaaaccaagggaag

SEQ ID NO: 1205686 - DNA, 15 bp, Homo sapiens
agcaaaccaagggaa

SEQ ID NO: 1205687 - DNA, 15 bp, Homo sapiens
aagcaaaccaaggga

SEQ ID NO: 1205688 - DNA, 15 bp, Homo sapiens
aaagcaaaccaaggg

SEQ ID NO: 1205689 - DNA, 15 bp, Homo sapiens
aaaagcaaaccaagg

SEQ ID NO: 1205690 - DNA, 15 bp, Homo sapiens
aaaaagcaaaccaag

SEQ ID NO: 1205691 - DNA, 15 bp, Homo sapiens
aaaaaagcaaaccaa

SEQ ID NO: 1205692 - DNA, 15 bp, Homo sapiens
gaaaaaagcaaacca

SEQ ID NO: 1205693 - DNA, 15 bp, Homo sapiens
agaaaaaagcaaacc

SEQ ID NO: 1205694 - DNA, 15 bp, Homo sapiens
aagaaaaaagcaaac

SEQ ID NO: 1205695 - DNA, 15 bp, Homo sapiens
caagaaaaaagcaaa

SEQ ID NO: 1205696 - DNA, 15 bp, Homo sapiens
tcaagaaaaaagcaa

SEQ ID NO: 1205697 - DNA, 15 bp, Homo sapiens
ctcaagaaaaaagca

SEQ ID NO: 1205698 - DNA, 15 bp, Homo sapiens
actcaagaaaaaagc

SEQ ID NO: 1205699 - DNA, 15 bp, Homo sapiens
cactcaagaaaaaag

SEQ ID NO: 1205700 - DNA, 15 bp, Homo sapiens
tcactcaagaaaaaa

SEQ ID NO: 1205701 - DNA, 15 bp, Homo sapiens
ctcactcaagaaaaa

SEQ ID NO: 1205702 - DNA, 15 bp, Homo sapiens
tctcactcaagaaaa

SEQ ID NO: 1205703 - DNA, 15 bp, Homo sapiens
gtctcactcaagaaa

SEQ ID NO: 1205704 - DNA, 15 bp, Homo sapiens
agtctcactcaagaa

SEQ ID NO: 1205705 - DNA, 15 bp, Homo sapiens
cagtctcactcaaga

SEQ ID NO: 1205706 - DNA, 15 bp, Homo sapiens
tcagtctcactcaag

SEQ ID NO: 1205707 - DNA, 15 bp, Homo sapiens
ctcagtctcactcaa

SEQ ID NO: 1205708 - DNA, 15 bp, Homo sapiens
actcagtctcactca

SEQ ID NO: 1205709 - DNA, 15 bp, Homo sapiens
cactcagtctcactc

SEQ ID NO: 1205710 - DNA, 15 bp, Homo sapiens
acactcagtctcact

SEQ ID NO: 1205711 - DNA, 15 bp, Homo sapiens
gacactcagtctcac

SEQ ID NO: 1205712 - DNA, 15 bp, Homo sapiens
tgacactcagtctca

SEQ ID NO: 1205713 - DNA, 15 bp, Homo sapiens
gtgacactcagtctc

SEQ ID NO: 1205714 - DNA, 15 bp, Homo sapiens
agtgacactcagtct

SEQ ID NO: 1205715 - DNA, 15 bp, Homo sapiens
gagtgacactcagtc

SEQ ID NO: 1205716 - DNA, 15 bp, Homo sapiens
agagtgacactcagt

SEQ ID NO: 1205717 - DNA, 15 bp, Homo sapiens
cagagtgacactcag

SEQ ID NO: 1205718 - DNA, 15 bp, Homo sapiens
acagagtgacactca

SEQ ID NO: 1205719 - DNA, 15 bp, Homo sapiens
gacagagtgacactc

SEQ ID NO: 1205720 - DNA, 15 bp, Homo sapiens
tgacagagtgacact

SEQ ID NO: 1205721 - DNA, 15 bp, Homo sapiens
gtgacagagtgacac

SEQ ID NO: 1205722 - DNA, 15 bp, Homo sapiens
ggtgacagagtgaca

SEQ ID NO: 1205723 - DNA, 15 bp, Homo sapiens
gggtgacagagtgac

SEQ ID NO: 1205724 - DNA, 15 bp, Homo sapiens
tgctgagattgtgcc

SEQ ID NO: 1205725 - DNA, 15 bp, Homo sapiens
gtgctgagattgtgc

SEQ ID NO: 1205726 - DNA, 15 bp, Homo sapiens
tgtgctgagattgtg

SEQ ID NO: 1205727 - DNA, 15 bp, Homo sapiens
gtgtgctgagattgt

SEQ ID NO: 1205728 - DNA, 15 bp, Homo sapiens
agtgtgctgagattg

SEQ ID NO: 1205729 - DNA, 15 bp, Homo sapiens
cagtgtgctgagatt

SEQ ID NO: 1205730 - DNA, 15 bp, Homo sapiens
gcagtgtgctgagat

SEQ ID NO: 1205731 - DNA, 15 bp, Homo sapiens
tgcagtgtgctgaga

SEQ ID NO: 1205732 - DNA, 15 bp, Homo sapiens
ttgcagtgtgctgag

SEQ ID NO: 1205733 - DNA, 15 bp, Homo sapiens
gttgcagtgtgctga

SEQ ID NO: 1205734 - DNA, 15 bp, Homo sapiens
ggttgcagtgtgctg

SEQ ID NO: 1205735 - DNA, 15 bp, Homo sapiens
aggttgcagtgtgct

SEQ ID NO: 1205736 - DNA, 15 bp, Homo sapiens
gaggttgcagtgtgc

SEQ ID NO: 1205737 - DNA, 15 bp, Homo sapiens
ggaggttgcagtgtg

SEQ ID NO: 1205738 - DNA, 15 bp, Homo sapiens
cggaggttgcagtgt

SEQ ID NO: 1205739 - DNA, 15 bp, Homo sapiens
agaggcggaggttgc

SEQ ID NO: 1205740 - DNA, 15 bp, Homo sapiens
tgagaggcggaggtt

SEQ ID NO: 1205741 - DNA, 15 bp, Homo sapiens
ctgagaggcggaggt

SEQ ID NO: 1205742 - DNA, 15 bp, Homo sapiens
cctgagaggcggagg

SEQ ID NO: 1205743 - DNA, 15 bp, Homo sapiens
acctgagaggcggag

SEQ ID NO: 1205744 - DNA, 15 bp, Homo sapiens
aacctgagaggcgga

SEQ ID NO: 1205745 - DNA, 15 bp, Homo sapiens
gaacctgagaggcgg

SEQ ID NO: 1205746 - DNA, 15 bp, Homo sapiens
tgaacctgagaggcg

SEQ ID NO: 1205747 - DNA, 15 bp, Homo sapiens
gcttgaacctgagag

SEQ ID NO: 1205748 - DNA, 15 bp, Homo sapiens
ggcttgaacctgaga

SEQ ID NO: 1205749 - DNA, 15 bp, Homo sapiens
tggcttgaacctgag

SEQ ID NO: 1205750 - DNA, 15 bp, Homo sapiens
atggcttgaacctga

SEQ ID NO: 1205751 - DNA, 15 bp, Homo sapiens
aatggcttgaacctg

SEQ ID NO: 1205752 - DNA, 15 bp, Homo sapiens
gaatggcttgaacct

SEQ ID NO: 1205753 - DNA, 15 bp, Homo sapiens
tgtagtggtgcatgc

SEQ ID NO: 1205754 - DNA, 15 bp, Homo sapiens
gtgtagtggtgcatg

SEQ ID NO: 1205755 - DNA, 15 bp, Homo sapiens
ggtgtagtggtgcat

SEQ ID NO: 1205756 - DNA, 15 bp, Homo sapiens
gggtgtagtggtgca

SEQ ID NO: 1205757 - DNA, 15 bp, Homo sapiens
cgggtgtagtggtgc

SEQ ID NO: 1205758 - DNA, 15 bp, Homo sapiens
ccgggtgtagtggtg

SEQ ID NO: 1205759 - DNA, 15 bp, Homo sapiens
gccgggtgtagtggt

SEQ ID NO: 1205760 - DNA, 15 bp, Homo sapiens
agccgggtgtagtgg

SEQ ID NO: 1205761 - DNA, 15 bp, Homo sapiens
tagccgggtgtagtg

SEQ ID NO: 1205762 - DNA, 15 bp, Homo sapiens
ttagccgggtgtagt

SEQ ID NO: 1205763 - DNA, 15 bp, Homo sapiens
attagccgggtgtag

SEQ ID NO: 1205764 - DNA, 15 bp, Homo sapiens
aattagccgggtgta

SEQ ID NO: 1205765 - DNA, 15 bp, Homo sapiens
gaaaattagccgggt

SEQ ID NO: 1205766 - DNA, 15 bp, Homo sapiens
cgaaaattagccggg

SEQ ID NO: 1205767 - DNA, 15 bp, Homo sapiens
acgaaaattagccgg

SEQ ID NO: 1205768 - DNA, 15 bp, Homo sapiens
tacgaaaattagccg

SEQ ID NO: 1205769 - DNA, 15 bp, Homo sapiens
atacgaaaattagcc

SEQ ID NO: 1205770 - DNA, 15 bp, Homo sapiens
aatacgaaaattagc

SEQ ID NO: 1205771 - DNA, 15 bp, Homo sapiens
aaatacgaaaattag

SEQ ID NO: 1205772 - DNA, 15 bp, Homo sapiens
aaaatacgaaaatta

SEQ ID NO: 1205773 - DNA, 15 bp, Homo sapiens
aaaaatacgaaaatt

SEQ ID NO: 1205774 - DNA, 15 bp, Homo sapiens
taaaaatacgaaaat

SEQ ID NO: 1205775 - DNA, 15 bp, Homo sapiens
ctaaaaatacgaaaa

SEQ ID NO: 1205776 - DNA, 15 bp, Homo sapiens
actaaaaatacgaaa

SEQ ID NO: 1205777 - DNA, 15 bp, Homo sapiens
tactaaaaatacgaa

SEQ ID NO: 1205778 - DNA, 15 bp, Homo sapiens
ctactaaaaatacga

SEQ ID NO: 1205779 - DNA, 15 bp, Homo sapiens
tctactaaaaatacg

SEQ ID NO: 1205780 - DNA, 15 bp, Homo sapiens
tcatctctactaaaa

SEQ ID NO: 1205781 - DNA, 15 bp, Homo sapiens
ctcatctctactaaa

SEQ ID NO: 1205782 - DNA, 15 bp, Homo sapiens
cctcatctctactaa

SEQ ID NO: 1205783 - DNA, 15 bp, Homo sapiens
acctcatctctacta

SEQ ID NO: 1205784 - DNA, 15 bp, Homo sapiens
aacctcatctctact

SEQ ID NO: 1205785 - DNA, 15 bp, Homo sapiens
tgaaacctcatctct

SEQ ID NO: 1205786 - DNA, 15 bp, Homo sapiens
gtgaaacctcatctc

SEQ ID NO: 1205787 - DNA, 15 bp, Homo sapiens
ggtgaaacctcatct

SEQ ID NO: 1205788 - DNA, 15 bp, Homo sapiens
tggtgaaacctcatc

SEQ ID NO: 1205789 - DNA, 15 bp, Homo sapiens
atggtgaaacctcat

SEQ ID NO: 1205790 - DNA, 15 bp, Homo sapiens
catggtgaaacctca

SEQ ID NO: 1205791 - DNA, 15 bp, Homo sapiens
gtcgagaccagcctg

SEQ ID NO: 1205792 - DNA, 15 bp, Homo sapiens
ggtcgagaccagcct

SEQ ID NO: 1205793 - DNA, 15 bp, Homo sapiens
aggtcgagaccagcc

SEQ ID NO: 1205794 - DNA, 15 bp, Homo sapiens
gaggtcgagaccagc

SEQ ID NO: 1205795 - DNA, 15 bp, Homo sapiens
ggaggtcgagaccag

SEQ ID NO: 1205796 - DNA, 15 bp, Homo sapiens
aggaggtcgagacca

SEQ ID NO: 1205797 - DNA, 15 bp, Homo sapiens
caggaggtcgagacc

SEQ ID NO: 1205798 - DNA, 15 bp, Homo sapiens
tcaggaggtcgagac

SEQ ID NO: 1205799 - DNA, 15 bp, Homo sapiens
gtcaggaggtcgaga

SEQ ID NO: 1205800 - DNA, 15 bp, Homo sapiens
ggtcaggaggtcgag

SEQ ID NO: 1205801 - DNA, 15 bp, Homo sapiens
aggtcaggaggtcga

SEQ ID NO: 1205802 - DNA, 15 bp, Homo sapiens
gaggtcaggaggtcg

SEQ ID NO: 1205803 - DNA, 15 bp, Homo sapiens
tgaggtcaggaggtc

SEQ ID NO: 1205804 - DNA, 15 bp, Homo sapiens
ctgaggtcaggaggt

SEQ ID NO: 1205805 - DNA, 15 bp, Homo sapiens
cctgaggtcaggagg

SEQ ID NO: 1205806 - DNA, 15 bp, Homo sapiens
agcagtggctcacgc

SEQ ID NO: 1205807 - DNA, 15 bp, Homo sapiens
aagcagtggctcacg

SEQ ID NO: 1205808 - DNA, 15 bp, Homo sapiens
aaagcagtggctcac

SEQ ID NO: 1205809 - DNA, 15 bp, Homo sapiens
aaaagcagtggctca

SEQ ID NO: 1205810 - DNA, 15 bp, Homo sapiens
aaaaagcagtggctc

SEQ ID NO: 1205811 - DNA, 15 bp, Homo sapiens
aaaaaagcagtggct

SEQ ID NO: 1205812 - DNA, 15 bp, Homo sapiens
gaaaaaagcagtggc

SEQ ID NO: 1205813 - DNA, 15 bp, Homo sapiens
agaaaaaagcagtgg

SEQ ID NO: 1205814 - DNA, 15 bp, Homo sapiens
tagaaaaaagcagtg

SEQ ID NO: 1205815 - DNA, 15 bp, Homo sapiens
ttagaaaaaagcagt

SEQ ID NO: 1205816 - DNA, 15 bp, Homo sapiens
cttagaaaaaagcag

SEQ ID NO: 1205817 - DNA, 15 bp, Homo sapiens
ccttagaaaaaagca

SEQ ID NO: 1205818 - DNA, 15 bp, Homo sapiens
accttagaaaaaagc

SEQ ID NO: 1205819 - DNA, 15 bp, Homo sapiens
aaccttagaaaaaag

SEQ ID NO: 1205820 - DNA, 15 bp, Homo sapiens
taaccttagaaaaaa

SEQ ID NO: 1205821 - DNA, 15 bp, Homo sapiens
ttaaccttagaaaaa

SEQ ID NO: 1205822 - DNA, 15 bp, Homo sapiens
tttaaccttagaaaa

SEQ ID NO: 1205823 - DNA, 15 bp, Homo sapiens
ctttaaccttagaaa

SEQ ID NO: 1205824 - DNA, 15 bp, Homo sapiens
cctttaaccttagaa

SEQ ID NO: 1205825 - DNA, 15 bp, Homo sapiens
acctttaaccttaga

SEQ ID NO: 1205826 - DNA, 15 bp, Homo sapiens
aacctttaaccttag

SEQ ID NO: 1205827 - DNA, 15 bp, Homo sapiens
taacctttaacctta

SEQ ID NO: 1205828 - DNA, 15 bp, Homo sapiens
ctaacctttaacctt

SEQ ID NO: 1205829 - DNA, 15 bp, Homo sapiens
cctaacctttaacct

SEQ ID NO: 1205830 - DNA, 15 bp, Homo sapiens
acctaacctttaacc

SEQ ID NO: 1205831 - DNA, 15 bp, Homo sapiens
cacctaacctttaac

SEQ ID NO: 1205832 - DNA, 15 bp, Homo sapiens
tcacctaacctttaa

SEQ ID NO: 1205833 - DNA, 15 bp, Homo sapiens
atcacctaaccttta

SEQ ID NO: 1205834 - DNA, 15 bp, Homo sapiens
catcacctaaccttt

SEQ ID NO: 1205835 - DNA, 15 bp, Homo sapiens
gcatcacctaacctt

SEQ ID NO: 1205836 - DNA, 15 bp, Homo sapiens
ggcatcacctaacct

SEQ ID NO: 1205837 - DNA, 15 bp, Homo sapiens
aggcatcacctaacc

SEQ ID NO: 1205838 - DNA, 15 bp, Homo sapiens
aaggcatcacctaac

SEQ ID NO: 1205839 - DNA, 15 bp, Homo sapiens
aaaggcatcacctaa

SEQ ID NO: 1205840 - DNA, 15 bp, Homo sapiens
taaaggcatcaccta

SEQ ID NO: 1205841 - DNA, 15 bp, Homo sapiens
ctaaaggcatcacct

SEQ ID NO: 1205842 - DNA, 15 bp, Homo sapiens
cctaaaggcatcacc

SEQ ID NO: 1205843 - DNA, 15 bp, Homo sapiens
tcctaaaggcatcac

SEQ ID NO: 1205844 - DNA, 15 bp, Homo sapiens
gtcctaaaggcatca

SEQ ID NO: 1205845 - DNA, 15 bp, Homo sapiens
tgtcctaaaggcatc

SEQ ID NO: 1205846 - DNA, 15 bp, Homo sapiens
cttgtcctaaaggca

SEQ ID NO: 1205847 - DNA, 15 bp, Homo sapiens
tcttgtcctaaaggc

SEQ ID NO: 1205848 - DNA, 15 bp, Homo sapiens
ttcttgtcctaaagg

SEQ ID NO: 1205849 - DNA, 15 bp, Homo sapiens
gttcttgtcctaaag

SEQ ID NO: 1205850 - DNA, 15 bp, Homo sapiens
ggttcttgtcctaaa

SEQ ID NO: 1205851 - DNA, 15 bp, Homo sapiens
aggttcttgtcctaa

SEQ ID NO: 1205852 - DNA, 15 bp, Homo sapiens
caggttcttgtccta

SEQ ID NO: 1205853 - DNA, 15 bp, Homo sapiens
tcaggttcttgtcct

SEQ ID NO: 1205854 - DNA, 15 bp, Homo sapiens
atcaggttcttgtcc

SEQ ID NO: 1205855 - DNA, 15 bp, Homo sapiens
catcaggttcttgtc

SEQ ID NO: 1205856 - DNA, 15 bp, Homo sapiens
ccatcaggttcttgt

SEQ ID NO: 1205857 - DNA, 15 bp, Homo sapiens
gccatcaggttcttg

SEQ ID NO: 1205858 - DNA, 15 bp, Homo sapiens
ggccatcaggttctt

SEQ ID NO: 1205859 - DNA, 15 bp, Homo sapiens
gggccatcaggttct

SEQ ID NO: 1205860 - DNA, 15 bp, Homo sapiens
ggggccatcaggttc

SEQ ID NO: 1205861 - DNA, 15 bp, Homo sapiens
aggggccatcaggtt

SEQ ID NO: 1205862 - DNA, 15 bp, Homo sapiens
gaggggccatcaggt

SEQ ID NO: 1205863 - DNA, 15 bp, Homo sapiens
tgaggggccatcagg

SEQ ID NO: 1205864 - DNA, 15 bp, Homo sapiens
ctgaggggccatcag

SEQ ID NO: 1205865 - DNA, 15 bp, Homo sapiens
actgaggggccatca

SEQ ID NO: 1205866 - DNA, 15 bp, Homo sapiens
gactgaggggccatc

SEQ ID NO: 1205867 - DNA, 15 bp, Homo sapiens
tgactgaggggccat

SEQ ID NO: 1205868 - DNA, 15 bp, Homo sapiens
atgactgaggggcca

SEQ ID NO: 1205869 - DNA, 15 bp, Homo sapiens
tatgactgaggggcc

SEQ ID NO: 1205870 - DNA, 15 bp, Homo sapiens
atatgactgaggggc

SEQ ID NO: 1205871 - DNA, 15 bp, Homo sapiens
aatatgactgagggg

SEQ ID NO: 1205872 - DNA, 15 bp, Homo sapiens
caatatgactgaggg

SEQ ID NO: 1205873 - DNA, 15 bp, Homo sapiens
ccaatatgactgagg

SEQ ID NO: 1205874 - DNA, 15 bp, Homo sapiens
tccaatatgactgag

SEQ ID NO: 1205875 - DNA, 15 bp, Homo sapiens
gtccaatatgactga

SEQ ID NO: 1205876 - DNA, 15 bp, Homo sapiens
tgtccaatatgactg

SEQ ID NO: 1205877 - DNA, 15 bp, Homo sapiens
gtgtccaatatgact

SEQ ID NO: 1205878 - DNA, 15 bp, Homo sapiens
tgtgtccaatatgac

SEQ ID NO: 1205879 - DNA, 15 bp, Homo sapiens
ttgtgtccaatatga

SEQ ID NO: 1205880 - DNA, 15 bp, Homo sapiens
cttgtgtccaatatg

SEQ ID NO: 1205881 - DNA, 15 bp, Homo sapiens
acttgtgtccaatat

SEQ ID NO: 1205882 - DNA, 15 bp, Homo sapiens
aacttgtgtccaata

SEQ ID NO: 1205883 - DNA, 15 bp, Homo sapiens
aaacttgtgtccaat

SEQ ID NO: 1205884 - DNA, 15 bp, Homo sapiens
taaacttgtgtccaa

SEQ ID NO: 1205885 - DNA, 15 bp, Homo sapiens
gtaaacttgtgtcca

SEQ ID NO: 1205886 - DNA, 15 bp, Homo sapiens
ggtaaacttgtgtcc

SEQ ID NO: 1205887 - DNA, 15 bp, Homo sapiens
tggtaaacttgtgtc

SEQ ID NO: 1205888 - DNA, 15 bp, Homo sapiens
atggtaaacttgtgt

SEQ ID NO: 1205889 - DNA, 15 bp, Homo sapiens
tatggtaaacttgtg

SEQ ID NO: 1205890 - DNA, 15 bp, Homo sapiens
ctatggtaaacttgt

SEQ ID NO: 1205891 - DNA, 15 bp, Homo sapiens
cctatggtaaacttg

SEQ ID NO: 1205892 - DNA, 15 bp, Homo sapiens
gcctatggtaaactt

SEQ ID NO: 1205893 - DNA, 15 bp, Homo sapiens
ggcctatggtaaact

SEQ ID NO: 1205894 - DNA, 15 bp, Homo sapiens
gggcctatggtaaac

SEQ ID NO: 1205895 - DNA, 15 bp, Homo sapiens
tgggcctatggtaaa

SEQ ID NO: 1205896 - DNA, 15 bp, Homo sapiens
ctgggcctatggtaa

SEQ ID NO: 1205897 - DNA, 15 bp, Homo sapiens
tctgggcctatggta

SEQ ID NO: 1205898 - DNA, 15 bp, Homo sapiens
ctctgggcctatggt

SEQ ID NO: 1205899 - DNA, 15 bp, Homo sapiens
actctgggcctatgg

SEQ ID NO: 1205900 - DNA, 15 bp, Homo sapiens
aactctgggcctatg

SEQ ID NO: 1205901 - DNA, 15 bp, Homo sapiens
gaactctgggcctat

SEQ ID NO: 1205902 - DNA, 15 bp, Homo sapiens
tgaactctgggccta

SEQ ID NO: 1205903 - DNA, 15 bp, Homo sapiens
atgaactctgggcct

SEQ ID NO: 1205904 - DNA, 15 bp, Homo sapiens
catgaactctgggcc

SEQ ID NO: 1205905 - DNA, 15 bp, Homo sapiens
ccatgaactctgggc

SEQ ID NO: 1205906 - DNA, 15 bp, Homo sapiens
tccatgaactctggg

SEQ ID NO: 1205907 - DNA, 15 bp, Homo sapiens
ctccatgaactctgg

SEQ ID NO: 1205908 - DNA, 15 bp, Homo sapiens
tctccatgaactctg

SEQ ID NO: 1205909 - DNA, 15 bp, Homo sapiens
gtctccatgaactct

SEQ ID NO: 1205910 - DNA, 15 bp, Homo sapiens
tgtctccatgaactc

SEQ ID NO: 1205911 - DNA, 15 bp, Homo sapiens
ctgtctccatgaact

SEQ ID NO: 1205912 - DNA, 15 bp, Homo sapiens
tctgtctccatgaac

SEQ ID NO: 1205913 - DNA, 15 bp, Homo sapiens
ttctgtctccatgaa

SEQ ID NO: 1205914 - DNA, 15 bp, Homo sapiens
attctgtctccatga

SEQ ID NO: 1205915 - DNA, 15 bp, Homo sapiens
tattctgtctccatg

SEQ ID NO: 1205916 - DNA, 15 bp, Homo sapiens
ctattctgtctccat

SEQ ID NO: 1205917 - DNA, 15 bp, Homo sapiens
tctattctgtctcca

SEQ ID NO: 1205918 - DNA, 15 bp, Homo sapiens
gtctattctgtctcc

SEQ ID NO: 1205919 - DNA, 15 bp, Homo sapiens
ggtctattctgtctc

SEQ ID NO: 1205920 - DNA, 15 bp, Homo sapiens
aggtctattctgtct

SEQ ID NO: 1205921 - DNA, 15 bp, Homo sapiens
gaggtctattctgtc

SEQ ID NO: 1205922 - DNA, 15 bp, Homo sapiens
ggaggtctattctgt

SEQ ID NO: 1205923 - DNA, 15 bp, Homo sapiens
gggaggtctattctg

SEQ ID NO: 1205924 - DNA, 15 bp, Homo sapiens
tgggaggtctattct

SEQ ID NO: 1205925 - DNA, 15 bp, Homo sapiens
ctgggaggtctattc

SEQ ID NO: 1205926 - DNA, 15 bp, Homo sapiens
cctgggaggtctatt

SEQ ID NO: 1205927 - DNA, 15 bp, Homo sapiens
gcctgggaggtctat

SEQ ID NO: 1205928 - DNA, 15 bp, Homo sapiens
ggcctgggaggtcta

SEQ ID NO: 1205929 - DNA, 15 bp, Homo sapiens
aggcctgggaggtct

SEQ ID NO: 1205930 - DNA, 15 bp, Homo sapiens
aaggcctgggaggtc

SEQ ID NO: 1205931 - DNA, 15 bp, Homo sapiens
aaaggcctgggaggt

SEQ ID NO: 1205932 - DNA, 15 bp, Homo sapiens
gaaaggcctgggagg

SEQ ID NO: 1205933 - DNA, 15 bp, Homo sapiens
ggaaaggcctgggag

SEQ ID NO: 1205934 - DNA, 15 bp, Homo sapiens
aggaaaggcctggga

SEQ ID NO: 1205935 - DNA, 15 bp, Homo sapiens
taggaaaggcctggg

SEQ ID NO: 1205936 - DNA, 15 bp, Homo sapiens
ataggaaaggcctgg

SEQ ID NO: 1205937 - DNA, 15 bp, Homo sapiens
gataggaaaggcctg

SEQ ID NO: 1205938 - DNA, 15 bp, Homo sapiens
ggataggaaaggcct

SEQ ID NO: 1205939 - DNA, 15 bp, Homo sapiens
tggataggaaaggcc

SEQ ID NO: 1205940 - DNA, 15 bp, Homo sapiens
ttggataggaaaggc

SEQ ID NO: 1205941 - DNA, 15 bp, Homo sapiens
cttggataggaaagg

SEQ ID NO: 1205942 - DNA, 15 bp, Homo sapiens
ccttggataggaaag

SEQ ID NO: 1205943 - DNA, 15 bp, Homo sapiens
tccttggataggaaa

SEQ ID NO: 1205944 - DNA, 15 bp, Homo sapiens
ctccttggataggaa

SEQ ID NO: 1205945 - DNA, 15 bp, Homo sapiens
cctccttggatagga

SEQ ID NO: 1205946 - DNA, 15 bp, Homo sapiens
gcctccttggatagg

SEQ ID NO: 1205947 - DNA, 15 bp, Homo sapiens
agcctccttggatag

SEQ ID NO: 1205948 - DNA, 15 bp, Homo sapiens
cagcctccttggata

SEQ ID NO: 1205949 - DNA, 15 bp, Homo sapiens
tcagcctccttggat

SEQ ID NO: 1205950 - DNA, 15 bp, Homo sapiens
ctcagcctccttgga

SEQ ID NO: 1205951 - DNA, 15 bp, Homo sapiens
tctcagcctccttgg

SEQ ID NO: 1205952 - DNA, 15 bp, Homo sapiens
ttctcagcctccttg

SEQ ID NO: 1205953 - DNA, 15 bp, Homo sapiens
cttctcagcctcctt

SEQ ID NO: 1205954 - DNA, 15 bp, Homo sapiens
acttctcagcctcct

SEQ ID NO: 1205955 - DNA, 15 bp, Homo sapiens
aacttctcagcctcc

SEQ ID NO: 1205956 - DNA, 15 bp, Homo sapiens
caacttctcagcctc

SEQ ID NO: 1205957 - DNA, 15 bp, Homo sapiens
ccaacttctcagcct

SEQ ID NO: 1205958 - DNA, 15 bp, Homo sapiens
cccaacttctcagcc

SEQ ID NO: 1205959 - DNA, 15 bp, Homo sapiens
tcccaacttctcagc

SEQ ID NO: 1205960 - DNA, 15 bp, Homo sapiens
gtcccaacttctcag

SEQ ID NO: 1205961 - DNA, 15 bp, Homo sapiens
agtcccaacttctca

SEQ ID NO: 1205962 - DNA, 15 bp, Homo sapiens
gagtcccaacttctc

SEQ ID NO: 1205963 - DNA, 15 bp, Homo sapiens
tgagtcccaacttct

SEQ ID NO: 1205964 - DNA, 15 bp, Homo sapiens
atgagtcccaacttc

SEQ ID NO: 1205965 - DNA, 15 bp, Homo sapiens
tatgagtcccaactt

SEQ ID NO: 1205966 - DNA, 15 bp, Homo sapiens
ttatgagtcccaact

SEQ ID NO: 1205967 - DNA, 15 bp, Homo sapiens
gttatgagtcccaac

SEQ ID NO: 1205968 - DNA, 15 bp, Homo sapiens
tgttatgagtcccaa

SEQ ID NO: 1205969 - DNA, 15 bp, Homo sapiens
ctgttatgagtccca

SEQ ID NO: 1205970 - DNA, 15 bp, Homo sapiens
tctgttatgagtccc

SEQ ID NO: 1205971 - DNA, 15 bp, Homo sapiens
ctctgttatgagtcc

SEQ ID NO: 1205972 - DNA, 15 bp, Homo sapiens
tctctgttatgagtc

SEQ ID NO: 1205973 - DNA, 15 bp, Homo sapiens
ttctctgttatgagt

SEQ ID NO: 1205974 - DNA, 15 bp, Homo sapiens
tttctctgttatgag

SEQ ID NO: 1205975 - DNA, 15 bp, Homo sapiens
atttctctgttatga

SEQ ID NO: 1205976 - DNA, 15 bp, Homo sapiens
tatttctctgttatg

SEQ ID NO: 1205977 - DNA, 15 bp, Homo sapiens
ctatttctctgttat

SEQ ID NO: 1205978 - DNA, 15 bp, Homo sapiens
cctatttctctgtta

SEQ ID NO: 1205979 - DNA, 15 bp, Homo sapiens
gcctatttctctgtt

SEQ ID NO: 1205980 - DNA, 15 bp, Homo sapiens
tgcctatttctctgt

SEQ ID NO: 1205981 - DNA, 15 bp, Homo sapiens
ctgcctatttctctg

SEQ ID NO: 1205982 - DNA, 15 bp, Homo sapiens
cctgcctatttctct

SEQ ID NO: 1205983 - DNA, 15 bp, Homo sapiens
tcctgcctatttctc

SEQ ID NO: 1205984 - DNA, 15 bp, Homo sapiens
ttcctgcctatttct

SEQ ID NO: 1205985 - DNA, 15 bp, Homo sapiens
cttcctgcctatttc

SEQ ID NO: 1205986 - DNA, 15 bp, Homo sapiens
acttcctgcctattt

SEQ ID NO: 1205987 - DNA, 15 bp, Homo sapiens
aacttcctgcctatt

SEQ ID NO: 1205988 - DNA, 15 bp, Homo sapiens
gaacttcctgcctat

SEQ ID NO: 1205989 - DNA, 15 bp, Homo sapiens
agaacttcctgccta

SEQ ID NO: 1205990 - DNA, 15 bp, Homo sapiens
cagaacttcctgcct

SEQ ID NO: 1205991 - DNA, 15 bp, Homo sapiens
tcagaacttcctgcc

SEQ ID NO: 1205992 - DNA, 15 bp, Homo sapiens
ttcagaacttcctgc

SEQ ID NO: 1205993 - DNA, 15 bp, Homo sapiens
gttcagaacttcctg

SEQ ID NO: 1205994 - DNA, 15 bp, Homo sapiens
agttcagaacttcct

SEQ ID NO: 1205995 - DNA, 15 bp, Homo sapiens
tagttcagaacttcc

SEQ ID NO: 1205996 - DNA, 15 bp, Homo sapiens
atagttcagaacttc

SEQ ID NO: 1205997 - DNA, 15 bp, Homo sapiens
gatagttcagaactt

SEQ ID NO: 1205998 - DNA, 15 bp, Homo sapiens
agatagttcagaact

SEQ ID NO: 1205999 - DNA, 15 bp, Homo sapiens
cagatagttcagaac

SEQ ID NO: 1206000 - DNA, 15 bp, Homo sapiens
ccagatagttcagaa

SEQ ID NO: 1206001 - DNA, 15 bp, Homo sapiens
cccagatagttcaga

SEQ ID NO: 1206002 - DNA, 15 bp, Homo sapiens
tcccagatagttcag

SEQ ID NO: 1206003 - DNA, 15 bp, Homo sapiens
ttcccagatagttca

SEQ ID NO: 1206004 - DNA, 15 bp, Homo sapiens
cttcccagatagttc

SEQ ID NO: 1206005 - DNA, 15 bp, Homo sapiens
tcttcccagatagtt

SEQ ID NO: 1206006 - DNA, 15 bp, Homo sapiens
atcttcccagatagt

SEQ ID NO: 1206007 - DNA, 15 bp, Homo sapiens
tatcttcccagatag

SEQ ID NO: 1206008 - DNA, 15 bp, Homo sapiens
ctatcttcccagata

SEQ ID NO: 1206009 - DNA, 15 bp, Homo sapiens
gctatcttcccagat

SEQ ID NO: 1206010 - DNA, 15 bp, Homo sapiens
tgctatcttcccaga

SEQ ID NO: 1206011 - DNA, 15 bp, Homo sapiens
ttgctatcttcccag

SEQ ID NO: 1206012 - DNA, 15 bp, Homo sapiens
cttgctatcttccca

SEQ ID NO: 1206013 - DNA, 15 bp, Homo sapiens
tcttgctatcttccc

SEQ ID NO: 1206014 - DNA, 15 bp, Homo sapiens
ctcttgctatcttcc

SEQ ID NO: 1206015 - DNA, 15 bp, Homo sapiens
tctcttgctatcttc

SEQ ID NO: 1206016 - DNA, 15 bp, Homo sapiens
ttctcttgctatctt

SEQ ID NO: 1206017 - DNA, 15 bp, Homo sapiens
tttctcttgctatct

SEQ ID NO: 1206018 - DNA, 15 bp, Homo sapiens
atttctcttgctatc

SEQ ID NO: 1206019 - DNA, 15 bp, Homo sapiens
gatttctcttgctat

SEQ ID NO: 1206020 - DNA, 15 bp, Homo sapiens
agatttctcttgcta

SEQ ID NO: 1206021 - DNA, 15 bp, Homo sapiens
tagatttctcttgct

SEQ ID NO: 1206022 - DNA, 15 bp, Homo sapiens
gtagatttctcttgc

SEQ ID NO: 1206023 - DNA, 15 bp, Homo sapiens
agtagatttctcttg

SEQ ID NO: 1206024 - DNA, 15 bp, Homo sapiens
cagtagatttctctt

SEQ ID NO: 1206025 - DNA, 15 bp, Homo sapiens
tcagtagatttctct

SEQ ID NO: 1206026 - DNA, 15 bp, Homo sapiens
atcagtagatttctc

SEQ ID NO: 1206027 - DNA, 15 bp, Homo sapiens
catcagtagatttct

SEQ ID NO: 1206028 - DNA, 15 bp, Homo sapiens
tcatcagtagatttc

SEQ ID NO: 1206029 - DNA, 15 bp, Homo sapiens
ctcatcagtagattt

SEQ ID NO: 1206030 - DNA, 15 bp, Homo sapiens
tctcatcagtagatt

SEQ ID NO: 1206031 - DNA, 15 bp, Homo sapiens
atctcatcagtagat

SEQ ID NO: 1206032 - DNA, 15 bp, Homo sapiens
catctcatcagtaga

SEQ ID NO: 1206033 - DNA, 15 bp, Homo sapiens
ccatctcatcagtag

SEQ ID NO: 1206034 - DNA, 15 bp, Homo sapiens
gccatctcatcagta

SEQ ID NO: 1206035 - DNA, 15 bp, Homo sapiens
agccatctcatcagt

SEQ ID NO: 1206036 - DNA, 15 bp, Homo sapiens
aagccatctcatcag

SEQ ID NO: 1206037 - DNA, 15 bp, Homo sapiens
caagccatctcatca

SEQ ID NO: 1206038 - DNA, 15 bp, Homo sapiens
acaagccatctcatc

SEQ ID NO: 1206039 - DNA, 15 bp, Homo sapiens
cacaagccatctcat

SEQ ID NO: 1206040 - DNA, 15 bp, Homo sapiens
gcacaagccatctca

SEQ ID NO: 1206041 - DNA, 15 bp, Homo sapiens
tgcacaagccatctc

SEQ ID NO: 1206042 - DNA, 15 bp, Homo sapiens
ctgcacaagccatct

SEQ ID NO: 1206043 - DNA, 15 bp, Homo sapiens
tctgcacaagccatc

SEQ ID NO: 1206044 - DNA, 15 bp, Homo sapiens
ctctgcacaagccat

SEQ ID NO: 1206045 - DNA, 15 bp, Homo sapiens
gctctgcacaagcca

SEQ ID NO: 1206046 - DNA, 15 bp, Homo sapiens
ggctctgcacaagcc

SEQ ID NO: 1206047 - DNA, 15 bp, Homo sapiens
tggctctgcacaagc

SEQ ID NO: 1206048 - DNA, 15 bp, Homo sapiens
ttggctctgcacaag

SEQ ID NO: 1206049 - DNA, 15 bp, Homo sapiens
tttggctctgcacaa

SEQ ID NO: 1206050 - DNA, 15 bp, Homo sapiens
ctttggctctgcaca

SEQ ID NO: 1206051 - DNA, 15 bp, Homo sapiens
tctttggctctgcac

SEQ ID NO: 1206052 - DNA, 15 bp, Homo sapiens
ctctttggctctgca

SEQ ID NO: 1206053 - DNA, 15 bp, Homo sapiens
tctctttggctctgc

SEQ ID NO: 1206054 - DNA, 15 bp, Homo sapiens
atctctttggctctg

SEQ ID NO: 1206055 - DNA, 15 bp, Homo sapiens
gatctctttggctct

SEQ ID NO: 1206056 - DNA, 15 bp, Homo sapiens
agatctctttggctc

SEQ ID NO: 1206057 - DNA, 15 bp, Homo sapiens
aagatctctttggct

SEQ ID NO: 1206058 - DNA, 15 bp, Homo sapiens
aaagatctctttggc

SEQ ID NO: 1206059 - DNA, 15 bp, Homo sapiens
aaaagatctctttgg

SEQ ID NO: 1206060 - DNA, 15 bp, Homo sapiens
caaaagatctctttg

SEQ ID NO: 1206061 - DNA, 15 bp, Homo sapiens
acaaaagatctcttt

SEQ ID NO: 1206062 - DNA, 15 bp, Homo sapiens
aacaaaagatctctt

SEQ ID NO: 1206063 - DNA, 15 bp, Homo sapiens
caacaaaagatctct

SEQ ID NO: 1206064 - DNA, 15 bp, Homo sapiens
tcaacaaaagatctc

SEQ ID NO: 1206065 - DNA, 15 bp, Homo sapiens
ttcaacaaaagatct

SEQ ID NO: 1206066 - DNA, 15 bp, Homo sapiens
tttcaacaaaagatc

SEQ ID NO: 1206067 - DNA, 15 bp, Homo sapiens
atttcaacaaaagat

SEQ ID NO: 1206068 - DNA, 15 bp, Homo sapiens
tatttcaacaaaaga

SEQ ID NO: 1206069 - DNA, 15 bp, Homo sapiens
atatttcaacaaaag

SEQ ID NO: 1206070 - DNA, 15 bp, Homo sapiens
aatatttcaacaaaa

SEQ ID NO: 1206071 - DNA, 15 bp, Homo sapiens
taatatttcaacaaa

SEQ ID NO: 1206072 - DNA, 15 bp, Homo sapiens
ataatatttcaacaa

SEQ ID NO: 1206073 - DNA, 15 bp, Homo sapiens
aataatatttcaaca

SEQ ID NO: 1206074 - DNA, 15 bp, Homo sapiens
taataatatttcaac

SEQ ID NO: 1206075 - DNA, 15 bp, Homo sapiens
ataataatatttcaa

SEQ ID NO: 1206076 - DNA, 15 bp, Homo sapiens
aataataatatttca

SEQ ID NO: 1206077 - DNA, 15 bp, Homo sapiens
taataataatatttc

SEQ ID NO: 1206078 - DNA, 15 bp, Homo sapiens
ataataataatattt

SEQ ID NO: 1206079 - DNA, 15 bp, Homo sapiens
aataataataatatt

SEQ ID NO: 1206080 - DNA, 15 bp, Homo sapiens
taataataataatat

SEQ ID NO: 1206081 - DNA, 15 bp, Homo sapiens
caataataataataa

SEQ ID NO: 1206082 - DNA, 15 bp, Homo sapiens
tcaataataataata

SEQ ID NO: 1206083 - DNA, 15 bp, Homo sapiens
ctcaataataataat

SEQ ID NO: 1206084 - DNA, 15 bp, Homo sapiens
tctcaataataataa

SEQ ID NO: 1206085 - DNA, 15 bp, Homo sapiens
gtctcaataataata

SEQ ID NO: 1206086 - DNA, 15 bp, Homo sapiens
cgtctcaataataat

SEQ ID NO: 1206087 - DNA, 15 bp, Homo sapiens
tcgtctcaataataa

SEQ ID NO: 1206088 - DNA, 15 bp, Homo sapiens
ttcgtctcaataata

SEQ ID NO: 1206089 - DNA, 15 bp, Homo sapiens
cttcgtctcaataat

SEQ ID NO: 1206090 - DNA, 15 bp, Homo sapiens
acttcgtctcaataa

SEQ ID NO: 1206091 - DNA, 15 bp, Homo sapiens
tacttcgtctcaata

SEQ ID NO: 1206092 - DNA, 15 bp, Homo sapiens
atacttcgtctcaat

SEQ ID NO: 1206093 - DNA, 15 bp, Homo sapiens
gatacttcgtctcaa

SEQ ID NO: 1206094 - DNA, 15 bp, Homo sapiens
cgatacttcgtctca

SEQ ID NO: 1206095 - DNA, 15 bp, Homo sapiens
gcgatacttcgtctc

SEQ ID NO: 1206096 - DNA, 15 bp, Homo sapiens
agcgatacttcgtct

SEQ ID NO: 1206097 - DNA, 15 bp, Homo sapiens
gagcgatacttcgtc

SEQ ID NO: 1206098 - DNA, 15 bp, Homo sapiens
agagcgatacttcgt

SEQ ID NO: 1206099 - DNA, 15 bp, Homo sapiens
cagagcgatacttcg

SEQ ID NO: 1206100 - DNA, 15 bp, Homo sapiens
acagagcgatacttc

SEQ ID NO: 1206101 - DNA, 15 bp, Homo sapiens
aacagagcgatactt

SEQ ID NO: 1206102 - DNA, 15 bp, Homo sapiens
caacagagcgatact

SEQ ID NO: 1206103 - DNA, 15 bp, Homo sapiens
gcaacagagcgatac

SEQ ID NO: 1206104 - DNA, 15 bp, Homo sapiens
ggcaacagagcgata

SEQ ID NO: 1206105 - DNA, 15 bp, Homo sapiens
gggcaacagagcgat

SEQ ID NO: 1206106 - DNA, 15 bp, Homo sapiens
ctgcgccactgcact

SEQ ID NO: 1206107 - DNA, 15 bp, Homo sapiens
actgcgccactgcac

SEQ ID NO: 1206108 - DNA, 15 bp, Homo sapiens
gactgcgccactgca

SEQ ID NO: 1206109 - DNA, 15 bp, Homo sapiens
agactgcgccactgc

SEQ ID NO: 1206110 - DNA, 15 bp, Homo sapiens
gagactgcgccactg

SEQ ID NO: 1206111 - DNA, 15 bp, Homo sapiens
cgagactgcgccact

SEQ ID NO: 1206112 - DNA, 15 bp, Homo sapiens
ccgagactgcgccac

SEQ ID NO: 1206113 - DNA, 15 bp, Homo sapiens
gccgagactgcgcca

SEQ ID NO: 1206114 - DNA, 15 bp, Homo sapiens
agccgagactgcgcc

SEQ ID NO: 1206115 - DNA, 15 bp, Homo sapiens
gagccgagactgcgc

SEQ ID NO: 1206116 - DNA, 15 bp, Homo sapiens
tgagccgagactgcg

SEQ ID NO: 1206117 - DNA, 15 bp, Homo sapiens
gtgagccgagactgc

SEQ ID NO: 1206118 - DNA, 15 bp, Homo sapiens
agtgagccgagactg

SEQ ID NO: 1206119 - DNA, 15 bp, Homo sapiens
cagtgagccgagact

SEQ ID NO: 1206120 - DNA, 15 bp, Homo sapiens
gcagtgagccgagac

SEQ ID NO: 1206121 - DNA, 15 bp, Homo sapiens
atgaacctgggaggt

SEQ ID NO: 1206122 - DNA, 15 bp, Homo sapiens
catgaacctgggagg

SEQ ID NO: 1206123 - DNA, 15 bp, Homo sapiens
gcatgaacctgggag

SEQ ID NO: 1206124 - DNA, 15 bp, Homo sapiens
ggcatgaacctggga

SEQ ID NO: 1206125 - DNA, 15 bp, Homo sapiens
tggcatgaacctggg

SEQ ID NO: 1206126 - DNA, 15 bp, Homo sapiens
atggcatgaacctgg

SEQ ID NO: 1206127 - DNA, 15 bp, Homo sapiens
aatggcatgaacctg

SEQ ID NO: 1206128 - DNA, 15 bp, Homo sapiens
taatggcatgaacct

SEQ ID NO: 1206129 - DNA, 15 bp, Homo sapiens
ataatggcatgaacc

SEQ ID NO: 1206130 - DNA, 15 bp, Homo sapiens
gataatggcatgaac

SEQ ID NO: 1206131 - DNA, 15 bp, Homo sapiens
ggataatggcatgaa

SEQ ID NO: 1206132 - DNA, 15 bp, Homo sapiens
aggataatggcatga

SEQ ID NO: 1206133 - DNA, 15 bp, Homo sapiens
caggataatggcatg

SEQ ID NO: 1206134 - DNA, 15 bp, Homo sapiens
gcaggataatggcat

SEQ ID NO: 1206135 - DNA, 15 bp, Homo sapiens
ggcaggataatggca

SEQ ID NO: 1206136 - DNA, 15 bp, Homo sapiens
aggcaggataatggc

SEQ ID NO: 1206137 - DNA, 15 bp, Homo sapiens
gaggcaggataatgg

SEQ ID NO: 1206138 - DNA, 15 bp, Homo sapiens
tgaggcaggataatg

SEQ ID NO: 1206139 - DNA, 15 bp, Homo sapiens
agctgaggcaggata

SEQ ID NO: 1206140 - DNA, 15 bp, Homo sapiens
aagctgaggcaggat

SEQ ID NO: 1206141 - DNA, 15 bp, Homo sapiens
tgcagtcccagctac

SEQ ID NO: 1206142 - DNA, 15 bp, Homo sapiens
ctgcagtcccagcta

SEQ ID NO: 1206143 - DNA, 15 bp, Homo sapiens
cctgcagtcccagct

SEQ ID NO: 1206144 - DNA, 15 bp, Homo sapiens
gcctgcagtcccagc

SEQ ID NO: 1206145 - DNA, 15 bp, Homo sapiens
cgcctgcagtcccag

SEQ ID NO: 1206146 - DNA, 15 bp, Homo sapiens
gcgcctgcagtccca

SEQ ID NO: 1206147 - DNA, 15 bp, Homo sapiens
ggcgcctgcagtccc

SEQ ID NO: 1206148 - DNA, 15 bp, Homo sapiens
cggcgcctgcagtcc

SEQ ID NO: 1206149 - DNA, 15 bp, Homo sapiens
ccggcgcctgcagtc

SEQ ID NO: 1206150 - DNA, 15 bp, Homo sapiens
gccggcgcctgcagt

SEQ ID NO: 1206151 - DNA, 15 bp, Homo sapiens
ggccggcgcctgcag

SEQ ID NO: 1206152 - DNA, 15 bp, Homo sapiens
tggccggcgcctgca

SEQ ID NO: 1206153 - DNA, 15 bp, Homo sapiens
gtggccggcgcctgc

SEQ ID NO: 1206154 - DNA, 15 bp, Homo sapiens
ggtggccggcgcctg

SEQ ID NO: 1206155 - DNA, 15 bp, Homo sapiens
tggtggccggcgcct

SEQ ID NO: 1206156 - DNA, 15 bp, Homo sapiens
atggtggccggcgcc

SEQ ID NO: 1206157 - DNA, 15 bp, Homo sapiens
catggtggccggcgc

SEQ ID NO: 1206158 - DNA, 15 bp, Homo sapiens
gcatggtggccggcg

SEQ ID NO: 1206159 - DNA, 15 bp, Homo sapiens
ggcatggtggccggc

SEQ ID NO: 1206160 - DNA, 15 bp, Homo sapiens
gggcatggtggccgg

SEQ ID NO: 1206161 - DNA, 15 bp, Homo sapiens
tgggcatggtggccg

SEQ ID NO: 1206162 - DNA, 15 bp, Homo sapiens
ttgggcatggtggcc

SEQ ID NO: 1206163 - DNA, 15 bp, Homo sapiens
gttgggcatggtggc

SEQ ID NO: 1206164 - DNA, 15 bp, Homo sapiens
aaaaattagttgggc

SEQ ID NO: 1206165 - DNA, 15 bp, Homo sapiens
aaaaaattagttggg

SEQ ID NO: 1206166 - DNA, 15 bp, Homo sapiens
aaaaaaattagttgg

SEQ ID NO: 1206167 - DNA, 15 bp, Homo sapiens
aaaaaaaattagttg

SEQ ID NO: 1206168 - DNA, 15 bp, Homo sapiens
caaaaaaaattagtt

SEQ ID NO: 1206169 - DNA, 15 bp, Homo sapiens
acaaaaaaaattagt

SEQ ID NO: 1206170 - DNA, 15 bp, Homo sapiens
tacaaaaaaaattag

SEQ ID NO: 1206171 - DNA, 15 bp, Homo sapiens
atacaaaaaaaatta

SEQ ID NO: 1206172 - DNA, 15 bp, Homo sapiens
aatacaaaaaaaatt

SEQ ID NO: 1206173 - DNA, 15 bp, Homo sapiens
aaatacaaaaaaaat

SEQ ID NO: 1206174 - DNA, 15 bp, Homo sapiens
cagtgaaaccccatc

SEQ ID NO: 1206175 - DNA, 15 bp, Homo sapiens
gcagtgaaaccccat

SEQ ID NO: 1206176 - DNA, 15 bp, Homo sapiens
tgcagtgaaacccca

SEQ ID NO: 1206177 - DNA, 15 bp, Homo sapiens
atgcagtgaaacccc

SEQ ID NO: 1206178 - DNA, 15 bp, Homo sapiens
aatgcagtgaaaccc

SEQ ID NO: 1206179 - DNA, 15 bp, Homo sapiens
taatgcagtgaaacc

SEQ ID NO: 1206180 - DNA, 15 bp, Homo sapiens
ctaatgcagtgaaac

SEQ ID NO: 1206181 - DNA, 15 bp, Homo sapiens
gctaatgcagtgaaa

SEQ ID NO: 1206182 - DNA, 15 bp, Homo sapiens
ggctaatgcagtgaa

SEQ ID NO: 1206183 - DNA, 15 bp, Homo sapiens
tggctaatgcagtga

SEQ ID NO: 1206184 - DNA, 15 bp, Homo sapiens
ctggctaatgcagtg

SEQ ID NO: 1206185 - DNA, 15 bp, Homo sapiens
cctggctaatgcagt

SEQ ID NO: 1206186 - DNA, 15 bp, Homo sapiens
tcctggctaatgcag

SEQ ID NO: 1206187 - DNA, 15 bp, Homo sapiens
atcctggctaatgca

SEQ ID NO: 1206188 - DNA, 15 bp, Homo sapiens
catcctggctaatgc

SEQ ID NO: 1206189 - DNA, 15 bp, Homo sapiens
ccatcctggctaatg

SEQ ID NO: 1206190 - DNA, 15 bp, Homo sapiens
accatcctggctaat

SEQ ID NO: 1206191 - DNA, 15 bp, Homo sapiens
tgaccatcctggcta

SEQ ID NO: 1206192 - DNA, 15 bp, Homo sapiens
gtgaccatcctggct

SEQ ID NO: 1206193 - DNA, 15 bp, Homo sapiens
tgtgaccatcctggc

SEQ ID NO: 1206194 - DNA, 15 bp, Homo sapiens
ttgtgaccatcctgg

SEQ ID NO: 1206195 - DNA, 15 bp, Homo sapiens
attgtgaccatcctg

SEQ ID NO: 1206196 - DNA, 15 bp, Homo sapiens
gattgtgaccatcct

SEQ ID NO: 1206197 - DNA, 15 bp, Homo sapiens
agattgtgaccatcc

SEQ ID NO: 1206198 - DNA, 15 bp, Homo sapiens
gagattgtgaccatc

SEQ ID NO: 1206199 - DNA, 15 bp, Homo sapiens
ggagattgtgaccat

SEQ ID NO: 1206200 - DNA, 15 bp, Homo sapiens
aggagattgtgacca

SEQ ID NO: 1206201 - DNA, 15 bp, Homo sapiens
caggagattgtgacc

SEQ ID NO: 1206202 - DNA, 15 bp, Homo sapiens
tcaggagattgtgac

SEQ ID NO: 1206203 - DNA, 15 bp, Homo sapiens
gtcaggagattgtga

SEQ ID NO: 1206204 - DNA, 15 bp, Homo sapiens
ggtcaggagattgtg

SEQ ID NO: 1206205 - DNA, 15 bp, Homo sapiens
aggtcaggagattgt

SEQ ID NO: 1206206 - DNA, 15 bp, Homo sapiens
cagatcacgaggtca

SEQ ID NO: 1206207 - DNA, 15 bp, Homo sapiens
gcagatcacgaggtc

SEQ ID NO: 1206208 - DNA, 15 bp, Homo sapiens
ggcagatcacgaggt

SEQ ID NO: 1206209 - DNA, 15 bp, Homo sapiens
cgggcagatcacgag

SEQ ID NO: 1206210 - DNA, 15 bp, Homo sapiens
gcgggcagatcacga

SEQ ID NO: 1206211 - DNA, 15 bp, Homo sapiens
gcactttgggaggtt

SEQ ID NO: 1206212 - DNA, 15 bp, Homo sapiens
ccggtggctcacgcc

SEQ ID NO: 1206213 - DNA, 15 bp, Homo sapiens
cccggtggctcacgc

SEQ ID NO: 1206214 - DNA, 15 bp, Homo sapiens
gcccggtggctcacg

SEQ ID NO: 1206215 - DNA, 15 bp, Homo sapiens
gggcccggtggctca

SEQ ID NO: 1206216 - DNA, 15 bp, Homo sapiens
tgggcccggtggctc

SEQ ID NO: 1206217 - DNA, 15 bp, Homo sapiens
ctgggcccggtggct

SEQ ID NO: 1206218 - DNA, 15 bp, Homo sapiens
gctgggcccggtggc

SEQ ID NO: 1206219 - DNA, 15 bp, Homo sapiens
ggctgggcccggtgg

SEQ ID NO: 1206220 - DNA, 15 bp, Homo sapiens
gggctgggcccggtg

SEQ ID NO: 1206221 - DNA, 15 bp, Homo sapiens
agggctgggcccggt

SEQ ID NO: 1206222 - DNA, 15 bp, Homo sapiens
aagggctgggcccgg

SEQ ID NO: 1206223 - DNA, 15 bp, Homo sapiens
aaagggctgggcccg

SEQ ID NO: 1206224 - DNA, 15 bp, Homo sapiens
taaagggctgggccc

SEQ ID NO: 1206225 - DNA, 15 bp, Homo sapiens
ataaagggctgggcc

SEQ ID NO: 1206226 - DNA, 15 bp, Homo sapiens
aataaagggctgggc

SEQ ID NO: 1206227 - DNA, 15 bp, Homo sapiens
aaataaagggctggg

SEQ ID NO: 1206228 - DNA, 15 bp, Homo sapiens
taaataaagggctgg

SEQ ID NO: 1206229 - DNA, 15 bp, Homo sapiens
ataaataaagggctg

SEQ ID NO: 1206230 - DNA, 15 bp, Homo sapiens
aataaataaagggct

SEQ ID NO: 1206231 - DNA, 15 bp, Homo sapiens
aaataaataaagggc

SEQ ID NO: 1206232 - DNA, 15 bp, Homo sapiens
taaataaataaaggg

SEQ ID NO: 1206233 - DNA, 15 bp, Homo sapiens
ataaataaataaagg

SEQ ID NO: 1206234 - DNA, 15 bp, Homo sapiens
tcaataaataaataa

SEQ ID NO: 1206235 - DNA, 15 bp, Homo sapiens
ctcaataaataaata

SEQ ID NO: 1206236 - DNA, 15 bp, Homo sapiens
tctcaataaataaat

SEQ ID NO: 1206237 - DNA, 15 bp, Homo sapiens
atctcaataaataaa

SEQ ID NO: 1206238 - DNA, 15 bp, Homo sapiens
catctcaataaataa

SEQ ID NO: 1206239 - DNA, 15 bp, Homo sapiens
ccatctcaataaata

SEQ ID NO: 1206240 - DNA, 15 bp, Homo sapiens
tccatctcaataaat

SEQ ID NO: 1206241 - DNA, 15 bp, Homo sapiens
ctccatctcaataaa

SEQ ID NO: 1206242 - DNA, 15 bp, Homo sapiens
actccatctcaataa

SEQ ID NO: 1206243 - DNA, 15 bp, Homo sapiens
gactccatctcaata

SEQ ID NO: 1206244 - DNA, 15 bp, Homo sapiens
agactccatctcaat

SEQ ID NO: 1206245 - DNA, 15 bp, Homo sapiens
tagagtgagactcca

SEQ ID NO: 1206246 - DNA, 15 bp, Homo sapiens
atagagtgagactcc

SEQ ID NO: 1206247 - DNA, 15 bp, Homo sapiens
aatagagtgagactc

SEQ ID NO: 1206248 - DNA, 15 bp, Homo sapiens
caatagagtgagact

SEQ ID NO: 1206249 - DNA, 15 bp, Homo sapiens
gcaatagagtgagac

SEQ ID NO: 1206250 - DNA, 15 bp, Homo sapiens
ggcaatagagtgaga

SEQ ID NO: 1206251 - DNA, 15 bp, Homo sapiens
gggcaatagagtgag

SEQ ID NO: 1206252 - DNA, 15 bp, Homo sapiens
tgggcaatagagtga

SEQ ID NO: 1206253 - DNA, 15 bp, Homo sapiens
ctgggcaatagagtg

SEQ ID NO: 1206254 - DNA, 15 bp, Homo sapiens
cctgggcaatagagt

SEQ ID NO: 1206255 - DNA, 15 bp, Homo sapiens
gcctgggcaatagag

SEQ ID NO: 1206256 - DNA, 15 bp, Homo sapiens
agcctgggcaataga

SEQ ID NO: 1206257 - DNA, 15 bp, Homo sapiens
cagcctgggcaatag

SEQ ID NO: 1206258 - DNA, 15 bp, Homo sapiens
tgccactgtactcca

SEQ ID NO: 1206259 - DNA, 15 bp, Homo sapiens
ttgccactgtactcc

SEQ ID NO: 1206260 - DNA, 15 bp, Homo sapiens
cttgccactgtactc

SEQ ID NO: 1206261 - DNA, 15 bp, Homo sapiens
tcttgccactgtact

SEQ ID NO: 1206262 - DNA, 15 bp, Homo sapiens
atcttgccactgtac

SEQ ID NO: 1206263 - DNA, 15 bp, Homo sapiens
gatcttgccactgta

SEQ ID NO: 1206264 - DNA, 15 bp, Homo sapiens
agatcttgccactgt

SEQ ID NO: 1206265 - DNA, 15 bp, Homo sapiens
gagatcttgccactg

SEQ ID NO: 1206266 - DNA, 15 bp, Homo sapiens
tgagatcttgccact

SEQ ID NO: 1206267 - DNA, 15 bp, Homo sapiens
ctgagatcttgccac

SEQ ID NO: 1206268 - DNA, 15 bp, Homo sapiens
gctgagatcttgcca

SEQ ID NO: 1206269 - DNA, 15 bp, Homo sapiens
agctgagatcttgcc

SEQ ID NO: 1206270 - DNA, 15 bp, Homo sapiens
gagctgagatcttgc

SEQ ID NO: 1206271 - DNA, 15 bp, Homo sapiens
tgagctgagatcttg

SEQ ID NO: 1206272 - DNA, 15 bp, Homo sapiens
gtgagctgagatctt

SEQ ID NO: 1206273 - DNA, 15 bp, Homo sapiens
agtgagctgagatct

SEQ ID NO: 1206274 - DNA, 15 bp, Homo sapiens
cggttgcagtgagct

SEQ ID NO: 1206275 - DNA, 15 bp, Homo sapiens
gcggttgcagtgagc

SEQ ID NO: 1206276 - DNA, 15 bp, Homo sapiens
agcggttgcagtgag

SEQ ID NO: 1206277 - DNA, 15 bp, Homo sapiens
cagcggttgcagtga

SEQ ID NO: 1206278 - DNA, 15 bp, Homo sapiens
acagcggttgcagtg

SEQ ID NO: 1206279 - DNA, 15 bp, Homo sapiens
gacagcggttgcagt

SEQ ID NO: 1206280 - DNA, 15 bp, Homo sapiens
agacagcggttgcag

SEQ ID NO: 1206281 - DNA, 15 bp, Homo sapiens
gagacagcggttgca

SEQ ID NO: 1206282 - DNA, 15 bp, Homo sapiens
ggagacagcggttgc

SEQ ID NO: 1206283 - DNA, 15 bp, Homo sapiens
gggagacagcggttg

SEQ ID NO: 1206284 - DNA, 15 bp, Homo sapiens
tgggagacagcggtt

SEQ ID NO: 1206285 - DNA, 15 bp, Homo sapiens
ctgggagacagcggt

SEQ ID NO: 1206286 - DNA, 15 bp, Homo sapiens
cctgggagacagcgg

SEQ ID NO: 1206287 - DNA, 15 bp, Homo sapiens
acctgggagacagcg

SEQ ID NO: 1206288 - DNA, 15 bp, Homo sapiens
aacctgggagacagc

SEQ ID NO: 1206289 - DNA, 15 bp, Homo sapiens
gaacctgggagacag

SEQ ID NO: 1206290 - DNA, 15 bp, Homo sapiens
tgaacctgggagaca

SEQ ID NO: 1206291 - DNA, 15 bp, Homo sapiens
ttgaacctgggagac

SEQ ID NO: 1206292 - DNA, 15 bp, Homo sapiens
tttgaacctgggaga

SEQ ID NO: 1206293 - DNA, 15 bp, Homo sapiens
gtttgaacctgggag

SEQ ID NO: 1206294 - DNA, 15 bp, Homo sapiens
tgtttgaacctggga

SEQ ID NO: 1206295 - DNA, 15 bp, Homo sapiens
ttgtttgaacctggg

SEQ ID NO: 1206296 - DNA, 15 bp, Homo sapiens
attgtttgaacctgg

SEQ ID NO: 1206297 - DNA, 15 bp, Homo sapiens
aattgtttgaacctg

SEQ ID NO: 1206298 - DNA, 15 bp, Homo sapiens
taattgtttgaacct

SEQ ID NO: 1206299 - DNA, 15 bp, Homo sapiens
ataattgtttgaacc

SEQ ID NO: 1206300 - DNA, 15 bp, Homo sapiens
gataattgtttgaac

SEQ ID NO: 1206301 - DNA, 15 bp, Homo sapiens
agataattgtttgaa

SEQ ID NO: 1206302 - DNA, 15 bp, Homo sapiens
aagataattgtttga

SEQ ID NO: 1206303 - DNA, 15 bp, Homo sapiens
caagataattgtttg

SEQ ID NO: 1206304 - DNA, 15 bp, Homo sapiens
gcaagataattgttt

SEQ ID NO: 1206305 - DNA, 15 bp, Homo sapiens
ggcaagataattgtt

SEQ ID NO: 1206306 - DNA, 15 bp, Homo sapiens
aggcaagataattgt

SEQ ID NO: 1206307 - DNA, 15 bp, Homo sapiens
gaggcaagataattg

SEQ ID NO: 1206308 - DNA, 15 bp, Homo sapiens
tgaggcaagataatt

SEQ ID NO: 1206309 - DNA, 15 bp, Homo sapiens
ctgaggcaagataat

SEQ ID NO: 1206310 - DNA, 15 bp, Homo sapiens
actgaggcaagataa

SEQ ID NO: 1206311 - DNA, 15 bp, Homo sapiens
gactgaggcaagata

SEQ ID NO: 1206312 - DNA, 15 bp, Homo sapiens
agactgaggcaagat

SEQ ID NO: 1206313 - DNA, 15 bp, Homo sapiens
gagactgaggcaaga

SEQ ID NO: 1206314 - DNA, 15 bp, Homo sapiens
ggagactgaggcaag

SEQ ID NO: 1206315 - DNA, 15 bp, Homo sapiens
gggagactgaggcaa

SEQ ID NO: 1206316 - DNA, 15 bp, Homo sapiens
cgggagactgaggca

SEQ ID NO: 1206317 - DNA, 15 bp, Homo sapiens
tcgggagactgaggc

SEQ ID NO: 1206318 - DNA, 15 bp, Homo sapiens
ttcgggagactgagg

SEQ ID NO: 1206319 - DNA, 15 bp, Homo sapiens
attcgggagactgag

SEQ ID NO: 1206320 - DNA, 15 bp, Homo sapiens
tattcgggagactga

SEQ ID NO: 1206321 - DNA, 15 bp, Homo sapiens
ctattcgggagactg

SEQ ID NO: 1206322 - DNA, 15 bp, Homo sapiens
gctattcgggagact

SEQ ID NO: 1206323 - DNA, 15 bp, Homo sapiens
agctattcgggagac

SEQ ID NO: 1206324 - DNA, 15 bp, Homo sapiens
cagctattcgggaga

SEQ ID NO: 1206325 - DNA, 15 bp, Homo sapiens
ccagctattcgggag

SEQ ID NO: 1206326 - DNA, 15 bp, Homo sapiens
tccagctattcggga

SEQ ID NO: 1206327 - DNA, 15 bp, Homo sapiens
ttccagctattcggg

SEQ ID NO: 1206328 - DNA, 15 bp, Homo sapiens
attccagctattcgg

SEQ ID NO: 1206329 - DNA, 15 bp, Homo sapiens
aattccagctattcg

SEQ ID NO: 1206330 - DNA, 15 bp, Homo sapiens
taattccagctattc

SEQ ID NO: 1206331 - DNA, 15 bp, Homo sapiens
gtaattccagctatt

SEQ ID NO: 1206332 - DNA, 15 bp, Homo sapiens
tgtaattccagctat

SEQ ID NO: 1206333 - DNA, 15 bp, Homo sapiens
gcctgtaattccagc

SEQ ID NO: 1206334 - DNA, 15 bp, Homo sapiens
cgcctgtaattccag

SEQ ID NO: 1206335 - DNA, 15 bp, Homo sapiens
acacgcctgtaattc

SEQ ID NO: 1206336 - DNA, 15 bp, Homo sapiens
cacacgcctgtaatt

SEQ ID NO: 1206337 - DNA, 15 bp, Homo sapiens
tgtggtggcacacgc

SEQ ID NO: 1206338 - DNA, 15 bp, Homo sapiens
gtgtggtggcacacg

SEQ ID NO: 1206339 - DNA, 15 bp, Homo sapiens
gtctctacaaaaata

SEQ ID NO: 1206340 - DNA, 15 bp, Homo sapiens
cgtctctacaaaaat

SEQ ID NO: 1206341 - DNA, 15 bp, Homo sapiens
ccgtctctacaaaaa

SEQ ID NO: 1206342 - DNA, 15 bp, Homo sapiens
cccgtctctacaaaa

SEQ ID NO: 1206343 - DNA, 15 bp, Homo sapiens
ccccgtctctacaaa

SEQ ID NO: 1206344 - DNA, 15 bp, Homo sapiens
accccgtctctacaa

SEQ ID NO: 1206345 - DNA, 15 bp, Homo sapiens
aaccccgtctctaca

SEQ ID NO: 1206346 - DNA, 15 bp, Homo sapiens
gtggtgaaaccccgt

SEQ ID NO: 1206347 - DNA, 15 bp, Homo sapiens
cgtggtgaaaccccg

SEQ ID NO: 1206348 - DNA, 15 bp, Homo sapiens
tggtcaggagttcaa

SEQ ID NO: 1206349 - DNA, 15 bp, Homo sapiens
gtggtcaggagttca

SEQ ID NO: 1206350 - DNA, 15 bp, Homo sapiens
tgtggtcaggagttc

SEQ ID NO: 1206351 - DNA, 15 bp, Homo sapiens
ctgtggtcaggagtt

SEQ ID NO: 1206352 - DNA, 15 bp, Homo sapiens
cctgtggtcaggagt

SEQ ID NO: 1206353 - DNA, 15 bp, Homo sapiens
acctgtggtcaggag

SEQ ID NO: 1206354 - DNA, 15 bp, Homo sapiens
cacctgtggtcagga

SEQ ID NO: 1206355 - DNA, 15 bp, Homo sapiens
tcacctgtggtcagg

SEQ ID NO: 1206356 - DNA, 15 bp, Homo sapiens
atcacctgtggtcag

SEQ ID NO: 1206357 - DNA, 15 bp, Homo sapiens
gatcacctgtggtca

SEQ ID NO: 1206358 - DNA, 15 bp, Homo sapiens
ggatcacctgtggtc

SEQ ID NO: 1206359 - DNA, 15 bp, Homo sapiens
cggatcacctgtggt

SEQ ID NO: 1206360 - DNA, 15 bp, Homo sapiens
gcggatcacctgtgg

SEQ ID NO: 1206361 - DNA, 15 bp, Homo sapiens
ggcggatcacctgtg

SEQ ID NO: 1206362 - DNA, 15 bp, Homo sapiens
gggcggatcacctgt

SEQ ID NO: 1206363 - DNA, 15 bp, Homo sapiens
cgggcggatcacctg

SEQ ID NO: 1206364 - DNA, 15 bp, Homo sapiens
gcgggcggatcacct

SEQ ID NO: 1206365 - DNA, 15 bp, Homo sapiens
ggcgggcggatcacc

SEQ ID NO: 1206366 - DNA, 15 bp, Homo sapiens
ccttgggaggccgag

SEQ ID NO: 1206367 - DNA, 15 bp, Homo sapiens
accttgggaggccga

SEQ ID NO: 1206368 - DNA, 15 bp, Homo sapiens
caccttgggaggccg

SEQ ID NO: 1206369 - DNA, 15 bp, Homo sapiens
gcaccttgggaggcc

SEQ ID NO: 1206370 - DNA, 15 bp, Homo sapiens
ccagcaccttgggag

SEQ ID NO: 1206371 - DNA, 15 bp, Homo sapiens
cccagcaccttggga

SEQ ID NO: 1206372 - DNA, 15 bp, Homo sapiens
tcccagcaccttggg

SEQ ID NO: 1206373 - DNA, 15 bp, Homo sapiens
atcccagcaccttgg

SEQ ID NO: 1206374 - DNA, 15 bp, Homo sapiens
aatcccagcaccttg

SEQ ID NO: 1206375 - DNA, 15 bp, Homo sapiens
taatcccagcacctt

SEQ ID NO: 1206376 - DNA, 15 bp, Homo sapiens
gtaatcccagcacct

SEQ ID NO: 1206377 - DNA, 15 bp, Homo sapiens
tgtaatcccagcacc

SEQ ID NO: 1206378 - DNA, 15 bp, Homo sapiens
cgctcacacctgtaa

SEQ ID NO: 1206379 - DNA, 15 bp, Homo sapiens
tcgctcacacctgta

SEQ ID NO: 1206380 - DNA, 15 bp, Homo sapiens
gtcgctcacacctgt

SEQ ID NO: 1206381 - DNA, 15 bp, Homo sapiens
ggtcgctcacacctg

SEQ ID NO: 1206382 - DNA, 15 bp, Homo sapiens
cggtcgctcacacct

SEQ ID NO: 1206383 - DNA, 15 bp, Homo sapiens
gcggtcgctcacacc

SEQ ID NO: 1206384 - DNA, 15 bp, Homo sapiens
tgcggtcgctcacac

SEQ ID NO: 1206385 - DNA, 15 bp, Homo sapiens
gtgcggtcgctcaca

SEQ ID NO: 1206386 - DNA, 15 bp, Homo sapiens
aggtgcggtcgctca

SEQ ID NO: 1206387 - DNA, 15 bp, Homo sapiens
caggtgcggtcgctc

SEQ ID NO: 1206388 - DNA, 15 bp, Homo sapiens
ccaggtgcggtcgct

SEQ ID NO: 1206389 - DNA, 15 bp, Homo sapiens
gccaggtgcggtcgc

SEQ ID NO: 1206390 - DNA, 15 bp, Homo sapiens
ggccaggtgcggtcg

SEQ ID NO: 1206391 - DNA, 15 bp, Homo sapiens
gggccaggtgcggtc

SEQ ID NO: 1206392 - DNA, 15 bp, Homo sapiens
agggccaggtgcggt

SEQ ID NO: 1206393 - DNA, 15 bp, Homo sapiens
aagggccaggtgcgg

SEQ ID NO: 1206394 - DNA, 15 bp, Homo sapiens
caagggccaggtgcg

SEQ ID NO: 1206395 - DNA, 15 bp, Homo sapiens
acaagggccaggtgc

SEQ ID NO: 1206396 - DNA, 15 bp, Homo sapiens
aacaagggccaggtg

SEQ ID NO: 1206397 - DNA, 15 bp, Homo sapiens
caacaagggccaggt

SEQ ID NO: 1206398 - DNA, 15 bp, Homo sapiens
tcaacaagggccagg

SEQ ID NO: 1206399 - DNA, 15 bp, Homo sapiens
ttcaacaagggccag

SEQ ID NO: 1206400 - DNA, 15 bp, Homo sapiens
tttcaacaagggcca

SEQ ID NO: 1206401 - DNA, 15 bp, Homo sapiens
atttcaacaagggcc

SEQ ID NO: 1206402 - DNA, 15 bp, Homo sapiens
tatttcaacaagggc

SEQ ID NO: 1206403 - DNA, 15 bp, Homo sapiens
atatttcaacaaggg

SEQ ID NO: 1206404 - DNA, 15 bp, Homo sapiens
aatatttcaacaagg

SEQ ID NO: 1206405 - DNA, 15 bp, Homo sapiens
aaatatttcaacaag

SEQ ID NO: 1206406 - DNA, 15 bp, Homo sapiens
aaaatatttcaacaa

SEQ ID NO: 1206407 - DNA, 15 bp, Homo sapiens
taaaatatttcaaca

SEQ ID NO: 1206408 - DNA, 15 bp, Homo sapiens
ttaaaatatttcaac

SEQ ID NO: 1206409 - DNA, 15 bp, Homo sapiens
ctttaaaatatttca

SEQ ID NO: 1206410 - DNA, 15 bp, Homo sapiens
tctttaaaatatttc

SEQ ID NO: 1206411 - DNA, 15 bp, Homo sapiens
ttctttaaaatattt

SEQ ID NO: 1206412 - DNA, 15 bp, Homo sapiens
tttctttaaaatatt

SEQ ID NO: 1206413 - DNA, 15 bp, Homo sapiens
gtttctttaaaatat

SEQ ID NO: 1206414 - DNA, 15 bp, Homo sapiens
agtttctttaaaata

SEQ ID NO: 1206415 - DNA, 15 bp, Homo sapiens
aagtttctttaaaat

SEQ ID NO: 1206416 - DNA, 15 bp, Homo sapiens
caagtttctttaaaa

SEQ ID NO: 1206417 - DNA, 15 bp, Homo sapiens
gcaagtttctttaaa

SEQ ID NO: 1206418 - DNA, 15 bp, Homo sapiens
agcaagtttctttaa

SEQ ID NO: 1206419 - DNA, 15 bp, Homo sapiens
aagcaagtttcttta

SEQ ID NO: 1206420 - DNA, 15 bp, Homo sapiens
caagcaagtttcttt

SEQ ID NO: 1206421 - DNA, 15 bp, Homo sapiens
acaagcaagtttctt

SEQ ID NO: 1206422 - DNA, 15 bp, Homo sapiens
aacaagcaagtttct

SEQ ID NO: 1206423 - DNA, 15 bp, Homo sapiens
caacaagcaagtttc

SEQ ID NO: 1206424 - DNA, 15 bp, Homo sapiens
gcaacaagcaagttt

SEQ ID NO: 1206425 - DNA, 15 bp, Homo sapiens
agcaacaagcaagtt

SEQ ID NO: 1206426 - DNA, 15 bp, Homo sapiens
cagcaacaagcaagt

SEQ ID NO: 1206427 - DNA, 15 bp, Homo sapiens
acagcaacaagcaag

SEQ ID NO: 1206428 - DNA, 15 bp, Homo sapiens
cacagcaacaagcaa

SEQ ID NO: 1206429 - DNA, 15 bp, Homo sapiens
tcacagcaacaagca

SEQ ID NO: 1206430 - DNA, 15 bp, Homo sapiens
ctcacagcaacaagc

SEQ ID NO: 1206431 - DNA, 15 bp, Homo sapiens
tctcacagcaacaag

SEQ ID NO: 1206432 - DNA, 15 bp, Homo sapiens
ctctcacagcaacaa

SEQ ID NO: 1206433 - DNA, 15 bp, Homo sapiens
cctctcacagcaaca

SEQ ID NO: 1206434 - DNA, 15 bp, Homo sapiens
acctctcacagcaac

SEQ ID NO: 1206435 - DNA, 15 bp, Homo sapiens
tacctctcacagcaa

SEQ ID NO: 1206436 - DNA, 15 bp, Homo sapiens
gtacctctcacagca

SEQ ID NO: 1206437 - DNA, 15 bp, Homo sapiens
tgtacctctcacagc

SEQ ID NO: 1206438 - DNA, 15 bp, Homo sapiens
ttgtacctctcacag

SEQ ID NO: 1206439 - DNA, 15 bp, Homo sapiens
tttgtacctctcaca

SEQ ID NO: 1206440 - DNA, 15 bp, Homo sapiens
ctttgtacctctcac

SEQ ID NO: 1206441 - DNA, 15 bp, Homo sapiens
tctttgtacctctca

SEQ ID NO: 1206442 - DNA, 15 bp, Homo sapiens
atctttgtacctctc

SEQ ID NO: 1206443 - DNA, 15 bp, Homo sapiens
catctttgtacctct

SEQ ID NO: 1206444 - DNA, 15 bp, Homo sapiens
tcatctttgtacctc

SEQ ID NO: 1206445 - DNA, 15 bp, Homo sapiens
ttcatctttgtacct

SEQ ID NO: 1206446 - DNA, 15 bp, Homo sapiens
attcatctttgtacc

SEQ ID NO: 1206447 - DNA, 15 bp, Homo sapiens
gattcatctttgtac

SEQ ID NO: 1206448 - DNA, 15 bp, Homo sapiens
tgattcatctttgta

SEQ ID NO: 1206449 - DNA, 15 bp, Homo sapiens
ttgattcatctttgt

SEQ ID NO: 1206450 - DNA, 15 bp, Homo sapiens
gttgattcatctttg

SEQ ID NO: 1206451 - DNA, 15 bp, Homo sapiens
agttgattcatcttt

SEQ ID NO: 1206452 - DNA, 15 bp, Homo sapiens
gagttgattcatctt

SEQ ID NO: 1206453 - DNA, 15 bp, Homo sapiens
ggagttgattcatct

SEQ ID NO: 1206454 - DNA, 15 bp, Homo sapiens
gggagttgattcatc

SEQ ID NO: 1206455 - DNA, 15 bp, Homo sapiens
agggagttgattcat

SEQ ID NO: 1206456 - DNA, 15 bp, Homo sapiens
aagggagttgattca

SEQ ID NO: 1206457 - DNA, 15 bp, Homo sapiens
taagggagttgattc

SEQ ID NO: 1206458 - DNA, 15 bp, Homo sapiens
ctaagggagttgatt

SEQ ID NO: 1206459 - DNA, 15 bp, Homo sapiens
gctaagggagttgat

SEQ ID NO: 1206460 - DNA, 15 bp, Homo sapiens
tgctaagggagttga

SEQ ID NO: 1206461 - DNA, 15 bp, Homo sapiens
ctgctaagggagttg

SEQ ID NO: 1206462 - DNA, 15 bp, Homo sapiens
actgctaagggagtt

SEQ ID NO: 1206463 - DNA, 15 bp, Homo sapiens
aactgctaagggagt

SEQ ID NO: 1206464 - DNA, 15 bp, Homo sapiens
caactgctaagggag

SEQ ID NO: 1206465 - DNA, 15 bp, Homo sapiens
acaactgctaaggga

SEQ ID NO: 1206466 - DNA, 15 bp, Homo sapiens
gacaactgctaaggg

SEQ ID NO: 1206467 - DNA, 15 bp, Homo sapiens
agacaactgctaagg

SEQ ID NO: 1206468 - DNA, 15 bp, Homo sapiens
aagacaactgctaag

SEQ ID NO: 1206469 - DNA, 15 bp, Homo sapiens
gaagacaactgctaa

SEQ ID NO: 1206470 - DNA, 15 bp, Homo sapiens
agaagacaactgcta

SEQ ID NO: 1206471 - DNA, 15 bp, Homo sapiens
aagaagacaactgct

SEQ ID NO: 1206472 - DNA, 15 bp, Homo sapiens
aaagaagacaactgc

SEQ ID NO: 1206473 - DNA, 15 bp, Homo sapiens
aaaagaagacaactg

SEQ ID NO: 1206474 - DNA, 15 bp, Homo sapiens
gaaaagaagacaact

SEQ ID NO: 1206475 - DNA, 15 bp, Homo sapiens
agaaaagaagacaac

SEQ ID NO: 1206476 - DNA, 15 bp, Homo sapiens
tagaaaagaagacaa

SEQ ID NO: 1206477 - DNA, 15 bp, Homo sapiens
ttagaaaagaagaca

SEQ ID NO: 1206478 - DNA, 15 bp, Homo sapiens
attagaaaagaagac

SEQ ID NO: 1206479 - DNA, 15 bp, Homo sapiens
cattagaaaagaaga

SEQ ID NO: 1206480 - DNA, 15 bp, Homo sapiens
gcattagaaaagaag

SEQ ID NO: 1206481 - DNA, 15 bp, Homo sapiens
tgcattagaaaagaa

SEQ ID NO: 1206482 - DNA, 15 bp, Homo sapiens
atgcattagaaaaga

SEQ ID NO: 1206483 - DNA, 15 bp, Homo sapiens
gatgcattagaaaag

SEQ ID NO: 1206484 - DNA, 15 bp, Homo sapiens
tgatgcattagaaaa

SEQ ID NO: 1206485 - DNA, 15 bp, Homo sapiens
atgatgcattagaaa

SEQ ID NO: 1206486 - DNA, 15 bp, Homo sapiens
aatgatgcattagaa

SEQ ID NO: 1206487 - DNA, 15 bp, Homo sapiens
caatgatgcattaga

SEQ ID NO: 1206488 - DNA, 15 bp, Homo sapiens
tcaatgatgcattag

SEQ ID NO: 1206489 - DNA, 15 bp, Homo sapiens
gtcaatgatgcatta

SEQ ID NO: 1206490 - DNA, 15 bp, Homo sapiens
tgtcaatgatgcatt

SEQ ID NO: 1206491 - DNA, 15 bp, Homo sapiens
ttgtcaatgatgcat

SEQ ID NO: 1206492 - DNA, 15 bp, Homo sapiens
tttgtcaatgatgca

SEQ ID NO: 1206493 - DNA, 15 bp, Homo sapiens
ttttgtcaatgatgc

SEQ ID NO: 1206494 - DNA, 15 bp, Homo sapiens
gttttgtcaatgatg

SEQ ID NO: 1206495 - DNA, 15 bp, Homo sapiens
agttttgtcaatgat

SEQ ID NO: 1206496 - DNA, 15 bp, Homo sapiens
gagttttgtcaatga

SEQ ID NO: 1206497 - DNA, 15 bp, Homo sapiens
tgagttttgtcaatg

SEQ ID NO: 1206498 - DNA, 15 bp, Homo sapiens
ctgagttttgtcaat

SEQ ID NO: 1206499 - DNA, 15 bp, Homo sapiens
tctgagttttgtcaa

SEQ ID NO: 1206500 - DNA, 15 bp, Homo sapiens
ttctgagttttgtca

SEQ ID NO: 1206501 - DNA, 15 bp, Homo sapiens
tttctgagttttgtc

SEQ ID NO: 1206502 - DNA, 15 bp, Homo sapiens
atttctgagttttgt

SEQ ID NO: 1206503 - DNA, 15 bp, Homo sapiens
tatttctgagttttg

SEQ ID NO: 1206504 - DNA, 15 bp, Homo sapiens
ctatttctgagtttt

SEQ ID NO: 1206505 - DNA, 15 bp, Homo sapiens
gctatttctgagttt

SEQ ID NO: 1206506 - DNA, 15 bp, Homo sapiens
ggctatttctgagtt

SEQ ID NO: 1206507 - DNA, 15 bp, Homo sapiens
gggctatttctgagt

SEQ ID NO: 1206508 - DNA, 15 bp, Homo sapiens
ggggctatttctgag

SEQ ID NO: 1206509 - DNA, 15 bp, Homo sapiens
aggggctatttctga

SEQ ID NO: 1206510 - DNA, 15 bp, Homo sapiens
caggggctatttctg

SEQ ID NO: 1206511 - DNA, 15 bp, Homo sapiens
gcaggggctatttct

SEQ ID NO: 1206512 - DNA, 15 bp, Homo sapiens
cgcaggggctatttc

SEQ ID NO: 1206513 - DNA, 15 bp, Homo sapiens
acgcaggggctattt

SEQ ID NO: 1206514 - DNA, 15 bp, Homo sapiens
cacgcaggggctatt

SEQ ID NO: 1206515 - DNA, 15 bp, Homo sapiens
acacgcaggggctat

SEQ ID NO: 1206516 - DNA, 15 bp, Homo sapiens
aacacgcaggggcta

SEQ ID NO: 1206517 - DNA, 15 bp, Homo sapiens
gaacacgcaggggct

SEQ ID NO: 1206518 - DNA, 15 bp, Homo sapiens
tgaacacgcaggggc

SEQ ID NO: 1206519 - DNA, 15 bp, Homo sapiens
ctgaacacgcagggg

SEQ ID NO: 1206520 - DNA, 15 bp, Homo sapiens
cctgaacacgcaggg

SEQ ID NO: 1206521 - DNA, 15 bp, Homo sapiens
tcctgaacacgcagg

SEQ ID NO: 1206522 - DNA, 15 bp, Homo sapiens
ctcctgaacacgcag

SEQ ID NO: 1206523 - DNA, 15 bp, Homo sapiens
cctcctgaacacgca

SEQ ID NO: 1206524 - DNA, 15 bp, Homo sapiens
acctcctgaacacgc

SEQ ID NO: 1206525 - DNA, 15 bp, Homo sapiens
cacctcctgaacacg

SEQ ID NO: 1206526 - DNA, 15 bp, Homo sapiens
ccacctcctgaacac

SEQ ID NO: 1206527 - DNA, 15 bp, Homo sapiens
tccacctcctgaaca

SEQ ID NO: 1206528 - DNA, 15 bp, Homo sapiens
gtccacctcctgaac

SEQ ID NO: 1206529 - DNA, 15 bp, Homo sapiens
tgtccacctcctgaa

SEQ ID NO: 1206530 - DNA, 15 bp, Homo sapiens
ctgtccacctcctga

SEQ ID NO: 1206531 - DNA, 15 bp, Homo sapiens
tctgtccacctcctg

SEQ ID NO: 1206532 - DNA, 15 bp, Homo sapiens
ctctgtccacctcct

SEQ ID NO: 1206533 - DNA, 15 bp, Homo sapiens
actctgtccacctcc

SEQ ID NO: 1206534 - DNA, 15 bp, Homo sapiens
cactctgtccacctc

SEQ ID NO: 1206535 - DNA, 15 bp, Homo sapiens
ccactctgtccacct

SEQ ID NO: 1206536 - DNA, 15 bp, Homo sapiens
cccactctgtccacc

SEQ ID NO: 1206537 - DNA, 15 bp, Homo sapiens
ccccactctgtccac

SEQ ID NO: 1206538 - DNA, 15 bp, Homo sapiens
tccccactctgtcca

SEQ ID NO: 1206539 - DNA, 15 bp, Homo sapiens
ttccccactctgtcc

SEQ ID NO: 1206540 - DNA, 15 bp, Homo sapiens
tttccccactctgtc

SEQ ID NO: 1206541 - DNA, 15 bp, Homo sapiens
ctttccccactctgt

SEQ ID NO: 1206542 - DNA, 15 bp, Homo sapiens
tctttccccactctg

SEQ ID NO: 1206543 - DNA, 15 bp, Homo sapiens
ctctttccccactct

SEQ ID NO: 1206544 - DNA, 15 bp, Homo sapiens
tctctttccccactc

SEQ ID NO: 1206545 - DNA, 15 bp, Homo sapiens
ctctctttccccact

SEQ ID NO: 1206546 - DNA, 15 bp, Homo sapiens
cctctctttccccac

SEQ ID NO: 1206547 - DNA, 15 bp, Homo sapiens
tcctctctttcccca

SEQ ID NO: 1206548 - DNA, 15 bp, Homo sapiens
ttcctctctttcccc

SEQ ID NO: 1206549 - DNA, 15 bp, Homo sapiens
tttcctctctttccc

SEQ ID NO: 1206550 - DNA, 15 bp, Homo sapiens
ttttcctctctttcc

SEQ ID NO: 1206551 - DNA, 15 bp, Homo sapiens
gttttcctctctttc

SEQ ID NO: 1206552 - DNA, 15 bp, Homo sapiens
ggttttcctctcttt

SEQ ID NO: 1206553 - DNA, 15 bp, Homo sapiens
gggttttcctctctt

SEQ ID NO: 1206554 - DNA, 15 bp, Homo sapiens
tgggttttcctctct

SEQ ID NO: 1206555 - DNA, 15 bp, Homo sapiens
atgggttttcctctc

SEQ ID NO: 1206556 - DNA, 15 bp, Homo sapiens
aatgggttttcctct

SEQ ID NO: 1206557 - DNA, 15 bp, Homo sapiens
taatgggttttcctc

SEQ ID NO: 1206558 - DNA, 15 bp, Homo sapiens
ataatgggttttcct

SEQ ID NO: 1206559 - DNA, 15 bp, Homo sapiens
tataatgggttttcc

SEQ ID NO: 1206560 - DNA, 15 bp, Homo sapiens
ttataatgggttttc

SEQ ID NO: 1206561 - DNA, 15 bp, Homo sapiens
tttataatgggtttt

SEQ ID NO: 1206562 - DNA, 15 bp, Homo sapiens
ctttataatgggttt

SEQ ID NO: 1206563 - DNA, 15 bp, Homo sapiens
tctttataatgggtt

SEQ ID NO: 1206564 - DNA, 15 bp, Homo sapiens
ttctttataatgggt

SEQ ID NO: 1206565 - DNA, 15 bp, Homo sapiens
tttctttataatggg

SEQ ID NO: 1206566 - DNA, 15 bp, Homo sapiens
gtttctttataatgg

SEQ ID NO: 1206567 - DNA, 15 bp, Homo sapiens
tgtttctttataatg

SEQ ID NO: 1206568 - DNA, 15 bp, Homo sapiens
ttgtttctttataat

SEQ ID NO: 1206569 - DNA, 15 bp, Homo sapiens
tttgtttctttataa

SEQ ID NO: 1206570 - DNA, 15 bp, Homo sapiens
ttttgtttctttata

SEQ ID NO: 1206571 - DNA, 15 bp, Homo sapiens
attttgtttctttat

SEQ ID NO: 1206572 - DNA, 15 bp, Homo sapiens
cattttgtttcttta

SEQ ID NO: 1206573 - DNA, 15 bp, Homo sapiens
acattttgtttcttt

SEQ ID NO: 1206574 - DNA, 15 bp, Homo sapiens
cacattttgtttctt

SEQ ID NO: 1206575 - DNA, 15 bp, Homo sapiens
tcacattttgtttct

SEQ ID NO: 1206576 - DNA, 15 bp, Homo sapiens
gtcacattttgtttc

SEQ ID NO: 1206577 - DNA, 15 bp, Homo sapiens
agtcacattttgttt

SEQ ID NO: 1206578 - DNA, 15 bp, Homo sapiens
aagtcacattttgtt

SEQ ID NO: 1206579 - DNA, 15 bp, Homo sapiens
gaagtcacattttgt

SEQ ID NO: 1206580 - DNA, 15 bp, Homo sapiens
tgaagtcacattttg

SEQ ID NO: 1206581 - DNA, 15 bp, Homo sapiens
atgaagtcacatttt

SEQ ID NO: 1206582 - DNA, 15 bp, Homo sapiens
aatgaagtcacattt

SEQ ID NO: 1206583 - DNA, 15 bp, Homo sapiens
caatgaagtcacatt

SEQ ID NO: 1206584 - DNA, 15 bp, Homo sapiens
ccaatgaagtcacat

SEQ ID NO: 1206585 - DNA, 15 bp, Homo sapiens
cccaatgaagtcaca

SEQ ID NO: 1206586 - DNA, 15 bp, Homo sapiens
tcccaatgaagtcac

SEQ ID NO: 1206587 - DNA, 15 bp, Homo sapiens
atcccaatgaagtca

SEQ ID NO: 1206588 - DNA, 15 bp, Homo sapiens
aatcccaatgaagtc

SEQ ID NO: 1206589 - DNA, 15 bp, Homo sapiens
caatcccaatgaagt

SEQ ID NO: 1206590 - DNA, 15 bp, Homo sapiens
acaatcccaatgaag

SEQ ID NO: 1206591 - DNA, 15 bp, Homo sapiens
gacaatcccaatgaa

SEQ ID NO: 1206592 - DNA, 15 bp, Homo sapiens
agacaatcccaatga

SEQ ID NO: 1206593 - DNA, 15 bp, Homo sapiens
aagacaatcccaatg

SEQ ID NO: 1206594 - DNA, 15 bp, Homo sapiens
aaagacaatcccaat

SEQ ID NO: 1206595 - DNA, 15 bp, Homo sapiens
gaaagacaatcccaa

SEQ ID NO: 1206596 - DNA, 15 bp, Homo sapiens
tgaaagacaatccca

SEQ ID NO: 1206597 - DNA, 15 bp, Homo sapiens
ttgaaagacaatccc

SEQ ID NO: 1206598 - DNA, 15 bp, Homo sapiens
tttgaaagacaatcc

SEQ ID NO: 1206599 - DNA, 15 bp, Homo sapiens
ttttgaaagacaatc

SEQ ID NO: 1206600 - DNA, 15 bp, Homo sapiens
attttgaaagacaat

SEQ ID NO: 1206601 - DNA, 15 bp, Homo sapiens
cattttgaaagacaa

SEQ ID NO: 1206602 - DNA, 15 bp, Homo sapiens
acattttgaaagaca

SEQ ID NO: 1206603 - DNA, 15 bp, Homo sapiens
cacattttgaaagac

SEQ ID NO: 1206604 - DNA, 15 bp, Homo sapiens
gcacattttgaaaga

SEQ ID NO: 1206605 - DNA, 15 bp, Homo sapiens
ggcacattttgaaag

SEQ ID NO: 1206606 - DNA, 15 bp, Homo sapiens
gggcacattttgaaa

SEQ ID NO: 1206607 - DNA, 15 bp, Homo sapiens
agggcacattttgaa

SEQ ID NO: 1206608 - DNA, 15 bp, Homo sapiens
cagggcacattttga

SEQ ID NO: 1206609 - DNA, 15 bp, Homo sapiens
acagggcacattttg

SEQ ID NO: 1206610 - DNA, 15 bp, Homo sapiens
tacagggcacatttt

SEQ ID NO: 1206611 - DNA, 15 bp, Homo sapiens
ttacagggcacattt

SEQ ID NO: 1206612 - DNA, 15 bp, Homo sapiens
attacagggcacatt

SEQ ID NO: 1206613 - DNA, 15 bp, Homo sapiens
aattacagggcacat

SEQ ID NO: 1206614 - DNA, 15 bp, Homo sapiens
aaattacagggcaca

SEQ ID NO: 1206615 - DNA, 15 bp, Homo sapiens
gaaattacagggcac

SEQ ID NO: 1206616 - DNA, 15 bp, Homo sapiens
ggaaattacagggca

SEQ ID NO: 1206617 - DNA, 15 bp, Homo sapiens
gggaaattacagggc

SEQ ID NO: 1206618 - DNA, 15 bp, Homo sapiens
tgggaaattacaggg

SEQ ID NO: 1206619 - DNA, 15 bp, Homo sapiens
ctgggaaattacagg

SEQ ID NO: 1206620 - DNA, 15 bp, Homo sapiens
actgggaaattacag

SEQ ID NO: 1206621 - DNA, 15 bp, Homo sapiens
gactgggaaattaca

SEQ ID NO: 1206622 - DNA, 15 bp, Homo sapiens
cgactgggaaattac

SEQ ID NO: 1206623 - DNA, 15 bp, Homo sapiens
acgactgggaaatta

SEQ ID NO: 1206624 - DNA, 15 bp, Homo sapiens
cacgactgggaaatt

SEQ ID NO: 1206625 - DNA, 15 bp, Homo sapiens
acacgactgggaaat

SEQ ID NO: 1206626 - DNA, 15 bp, Homo sapiens
cacacgactgggaaa

SEQ ID NO: 1206627 - DNA, 15 bp, Homo sapiens
ccacacgactgggaa

SEQ ID NO: 1206628 - DNA, 15 bp, Homo sapiens
accacacgactggga

SEQ ID NO: 1206629 - DNA, 15 bp, Homo sapiens
aaccacacgactggg

SEQ ID NO: 1206630 - DNA, 15 bp, Homo sapiens
gaaccacacgactgg

SEQ ID NO: 1206631 - DNA, 15 bp, Homo sapiens
agaaccacacgactg

SEQ ID NO: 1206632 - DNA, 15 bp, Homo sapiens
aagaaccacacgact

SEQ ID NO: 1206633 - DNA, 15 bp, Homo sapiens
gaagaaccacacgac

SEQ ID NO: 1206634 - DNA, 15 bp, Homo sapiens
agaagaaccacacga

SEQ ID NO: 1206635 - DNA, 15 bp, Homo sapiens
tagaagaaccacacg

SEQ ID NO: 1206636 - DNA, 15 bp, Homo sapiens
ttagaagaaccacac

SEQ ID NO: 1206637 - DNA, 15 bp, Homo sapiens
gttagaagaaccaca

SEQ ID NO: 1206638 - DNA, 15 bp, Homo sapiens
ggttagaagaaccac

SEQ ID NO: 1206639 - DNA, 15 bp, Homo sapiens
tggttagaagaacca

SEQ ID NO: 1206640 - DNA, 15 bp, Homo sapiens
ctggttagaagaacc

SEQ ID NO: 1206641 - DNA, 15 bp, Homo sapiens
tctggttagaagaac

SEQ ID NO: 1206642 - DNA, 15 bp, Homo sapiens
ctctggttagaagaa

SEQ ID NO: 1206643 - DNA, 15 bp, Homo sapiens
gctctggttagaaga

SEQ ID NO: 1206644 - DNA, 15 bp, Homo sapiens
ggctctggttagaag

SEQ ID NO: 1206645 - DNA, 15 bp, Homo sapiens
tggctctggttagaa

SEQ ID NO: 1206646 - DNA, 15 bp, Homo sapiens
atggctctggttaga

SEQ ID NO: 1206647 - DNA, 15 bp, Homo sapiens
gatggctctggttag

SEQ ID NO: 1206648 - DNA, 15 bp, Homo sapiens
ggatggctctggtta

SEQ ID NO: 1206649 - DNA, 15 bp, Homo sapiens
aggatggctctggtt

SEQ ID NO: 1206650 - DNA, 15 bp, Homo sapiens
caggatggctctggt

SEQ ID NO: 1206651 - DNA, 15 bp, Homo sapiens
ccaggatggctctgg

SEQ ID NO: 1206652 - DNA, 15 bp, Homo sapiens
gccaggatggctctg

SEQ ID NO: 1206653 - DNA, 15 bp, Homo sapiens
agccaggatggctct

SEQ ID NO: 1206654 - DNA, 15 bp, Homo sapiens
aagccaggatggctc

SEQ ID NO: 1206655 - DNA, 15 bp, Homo sapiens
aaagccaggatggct

SEQ ID NO: 1206656 - DNA, 15 bp, Homo sapiens
taaagccaggatggc

SEQ ID NO: 1206657 - DNA, 15 bp, Homo sapiens
gtaaagccaggatgg

SEQ ID NO: 1206658 - DNA, 15 bp, Homo sapiens
tgtaaagccaggatg

SEQ ID NO: 1206659 - DNA, 15 bp, Homo sapiens
atgtaaagccaggat

SEQ ID NO: 1206660 - DNA, 15 bp, Homo sapiens
aatgtaaagccagga

SEQ ID NO: 1206661 - DNA, 15 bp, Homo sapiens
aaatgtaaagccagg

SEQ ID NO: 1206662 - DNA, 15 bp, Homo sapiens
aaaatgtaaagccag

SEQ ID NO: 1206663 - DNA, 15 bp, Homo sapiens
aaaaatgtaaagcca

SEQ ID NO: 1206664 - DNA, 15 bp, Homo sapiens
aaaaaatgtaaagcc

SEQ ID NO: 1206665 - DNA, 15 bp, Homo sapiens
caaaaaatgtaaagc

SEQ ID NO: 1206666 - DNA, 15 bp, Homo sapiens
ccaaaaaatgtaaag

SEQ ID NO: 1206667 - DNA, 15 bp, Homo sapiens
tccaaaaaatgtaaa

SEQ ID NO: 1206668 - DNA, 15 bp, Homo sapiens
atccaaaaaatgtaa

SEQ ID NO: 1206669 - DNA, 15 bp, Homo sapiens
gatccaaaaaatgta

SEQ ID NO: 1206670 - DNA, 15 bp, Homo sapiens
ggatccaaaaaatgt

SEQ ID NO: 1206671 - DNA, 15 bp, Homo sapiens
tggatccaaaaaatg

SEQ ID NO: 1206672 - DNA, 15 bp, Homo sapiens
ttggatccaaaaaat

SEQ ID NO: 1206673 - DNA, 15 bp, Homo sapiens
attggatccaaaaaa

SEQ ID NO: 1206674 - DNA, 15 bp, Homo sapiens
gattggatccaaaaa

SEQ ID NO: 1206675 - DNA, 15 bp, Homo sapiens
agattggatccaaaa

SEQ ID NO: 1206676 - DNA, 15 bp, Homo sapiens
cagattggatccaaa

SEQ ID NO: 1206677 - DNA, 15 bp, Homo sapiens
tcagattggatccaa

SEQ ID NO: 1206678 - DNA, 15 bp, Homo sapiens
ttcagattggatcca

SEQ ID NO: 1206679 - DNA, 15 bp, Homo sapiens
gttcagattggatcc

SEQ ID NO: 1206680 - DNA, 15 bp, Homo sapiens
agttcagattggatc

SEQ ID NO: 1206681 - DNA, 15 bp, Homo sapiens
gagttcagattggat

SEQ ID NO: 1206682 - DNA, 15 bp, Homo sapiens
agagttcagattgga

SEQ ID NO: 1206683 - DNA, 15 bp, Homo sapiens
cagagttcagattgg

SEQ ID NO: 1206684 - DNA, 15 bp, Homo sapiens
ccagagttcagattg

SEQ ID NO: 1206685 - DNA, 15 bp, Homo sapiens
gccagagttcagatt

SEQ ID NO: 1206686 - DNA, 15 bp, Homo sapiens
tgccagagttcagat

SEQ ID NO: 1206687 - DNA, 15 bp, Homo sapiens
ctgccagagttcaga

SEQ ID NO: 1206688 - DNA, 15 bp, Homo sapiens
tctgccagagttcag

SEQ ID NO: 1206689 - DNA, 15 bp, Homo sapiens
ttctgccagagttca

SEQ ID NO: 1206690 - DNA, 15 bp, Homo sapiens
cttctgccagagttc

SEQ ID NO: 1206691 - DNA, 15 bp, Homo sapiens
gcttctgccagagtt

SEQ ID NO: 1206692 - DNA, 15 bp, Homo sapiens
agcttctgccagagt

SEQ ID NO: 1206693 - DNA, 15 bp, Homo sapiens
cagcttctgccagag

SEQ ID NO: 1206694 - DNA, 15 bp, Homo sapiens
gcagcttctgccaga

SEQ ID NO: 1206695 - DNA, 15 bp, Homo sapiens
tgcagcttctgccag

SEQ ID NO: 1206696 - DNA, 15 bp, Homo sapiens
ttgcagcttctgcca

SEQ ID NO: 1206697 - DNA, 15 bp, Homo sapiens
tttgcagcttctgcc

SEQ ID NO: 1206698 - DNA, 15 bp, Homo sapiens
atttgcagcttctgc

SEQ ID NO: 1206699 - DNA, 15 bp, Homo sapiens
tatttgcagcttctg

SEQ ID NO: 1206700 - DNA, 15 bp, Homo sapiens
atatttgcagcttct

SEQ ID NO: 1206701 - DNA, 15 bp, Homo sapiens
gatatttgcagcttc

SEQ ID NO: 1206702 - DNA, 15 bp, Homo sapiens
ggatatttgcagctt

SEQ ID NO: 1206703 - DNA, 15 bp, Homo sapiens
aggatatttgcagct

SEQ ID NO: 1206704 - DNA, 15 bp, Homo sapiens
caggatatttgcagc

SEQ ID NO: 1206705 - DNA, 15 bp, Homo sapiens
gcaggatatttgcag

SEQ ID NO: 1206706 - DNA, 15 bp, Homo sapiens
tgcaggatatttgca

SEQ ID NO: 1206707 - DNA, 15 bp, Homo sapiens
ctgcaggatatttgc

SEQ ID NO: 1206708 - DNA, 15 bp, Homo sapiens
gctgcaggatatttg

SEQ ID NO: 1206709 - DNA, 15 bp, Homo sapiens
ggctgcaggatattt

SEQ ID NO: 1206710 - DNA, 15 bp, Homo sapiens
aggctgcaggatatt

SEQ ID NO: 1206711 - DNA, 15 bp, Homo sapiens
caggctgcaggatat

SEQ ID NO: 1206712 - DNA, 15 bp, Homo sapiens
ccaggctgcaggata

SEQ ID NO: 1206713 - DNA, 15 bp, Homo sapiens
cccaggctgcaggat

SEQ ID NO: 1206714 - DNA, 15 bp, Homo sapiens
acccaggctgcagga

SEQ ID NO: 1206715 - DNA, 15 bp, Homo sapiens
gacccaggctgcagg

SEQ ID NO: 1206716 - DNA, 15 bp, Homo sapiens
ggacccaggctgcag

SEQ ID NO: 1206717 - DNA, 15 bp, Homo sapiens
gggacccaggctgca

SEQ ID NO: 1206718 - DNA, 15 bp, Homo sapiens
tgggacccaggctgc

SEQ ID NO: 1206719 - DNA, 15 bp, Homo sapiens
ctgggacccaggctg

SEQ ID NO: 1206720 - DNA, 15 bp, Homo sapiens
gctgggacccaggct

SEQ ID NO: 1206721 - DNA, 15 bp, Homo sapiens
ggctgggacccaggc

SEQ ID NO: 1206722 - DNA, 15 bp, Homo sapiens
gggctgggacccagg

SEQ ID NO: 1206723 - DNA, 15 bp, Homo sapiens
ggggctgggacccag

SEQ ID NO: 1206724 - DNA, 15 bp, Homo sapiens
tggggctgggaccca

SEQ ID NO: 1206725 - DNA, 15 bp, Homo sapiens
gtggggctgggaccc

SEQ ID NO: 1206726 - DNA, 15 bp, Homo sapiens
ggtggggctgggacc

SEQ ID NO: 1206727 - DNA, 15 bp, Homo sapiens
tggtggggctgggac

SEQ ID NO: 1206728 - DNA, 15 bp, Homo sapiens
gtggtggggctggga

SEQ ID NO: 1206729 - DNA, 15 bp, Homo sapiens
agtggtggggctggg

SEQ ID NO: 1206730 - DNA, 15 bp, Homo sapiens
aagtggtggggctgg

SEQ ID NO: 1206731 - DNA, 15 bp, Homo sapiens
gaagtggtggggctg

SEQ ID NO: 1206732 - DNA, 15 bp, Homo sapiens
tgaagtggtggggct

SEQ ID NO: 1206733 - DNA, 15 bp, Homo sapiens
atgaagtggtggggc

SEQ ID NO: 1206734 - DNA, 15 bp, Homo sapiens
gatgaagtggtgggg

SEQ ID NO: 1206735 - DNA, 15 bp, Homo sapiens
tgatgaagtggtggg

SEQ ID NO: 1206736 - DNA, 15 bp, Homo sapiens
ttgatgaagtggtgg

SEQ ID NO: 1206737 - DNA, 15 bp, Homo sapiens
tttgatgaagtggtg

SEQ ID NO: 1206738 - DNA, 15 bp, Homo sapiens
ttttgatgaagtggt

SEQ ID NO: 1206739 - DNA, 15 bp, Homo sapiens
gttttgatgaagtgg

SEQ ID NO: 1206740 - DNA, 15 bp, Homo sapiens
agttttgatgaagtg

SEQ ID NO: 1206741 - DNA, 15 bp, Homo sapiens
cagttttgatgaagt

SEQ ID NO: 1206742 - DNA, 15 bp, Homo sapiens
ccagttttgatgaag

SEQ ID NO: 1206743 - DNA, 15 bp, Homo sapiens
gccagttttgatgaa

SEQ ID NO: 1206744 - DNA, 15 bp, Homo sapiens
ggccagttttgatga

SEQ ID NO: 1206745 - DNA, 15 bp, Homo sapiens
aggccagttttgatg

SEQ ID NO: 1206746 - DNA, 15 bp, Homo sapiens
gaggccagttttgat

SEQ ID NO: 1206747 - DNA, 15 bp, Homo sapiens
ggaggccagttttga

SEQ ID NO: 1206748 - DNA, 15 bp, Homo sapiens
gggaggccagttttg

SEQ ID NO: 1206749 - DNA, 15 bp, Homo sapiens
ggggaggccagtttt

SEQ ID NO: 1206750 - DNA, 15 bp, Homo sapiens
tggggaggccagttt

SEQ ID NO: 1206751 - DNA, 15 bp, Homo sapiens
ctggggaggccagtt

SEQ ID NO: 1206752 - DNA, 15 bp, Homo sapiens
cctggggaggccagt

SEQ ID NO: 1206753 - DNA, 15 bp, Homo sapiens
ccctggggaggccag

SEQ ID NO: 1206754 - DNA, 15 bp, Homo sapiens
tccctggggaggcca

SEQ ID NO: 1206755 - DNA, 15 bp, Homo sapiens
atccctggggaggcc

SEQ ID NO: 1206756 - DNA, 15 bp, Homo sapiens
tatccctggggaggc

SEQ ID NO: 1206757 - DNA, 15 bp, Homo sapiens
atatccctggggagg

SEQ ID NO: 1206758 - DNA, 15 bp, Homo sapiens
aatatccctggggag

SEQ ID NO: 1206759 - DNA, 15 bp, Homo sapiens
taatatccctgggga

SEQ ID NO: 1206760 - DNA, 15 bp, Homo sapiens
ttaatatccctgggg

SEQ ID NO: 1206761 - DNA, 15 bp, Homo sapiens
tttaatatccctggg

SEQ ID NO: 1206762 - DNA, 15 bp, Homo sapiens
ctttaatatccctgg

SEQ ID NO: 1206763 - DNA, 15 bp, Homo sapiens
gctttaatatccctg

SEQ ID NO: 1206764 - DNA, 15 bp, Homo sapiens
ggctttaatatccct

SEQ ID NO: 1206765 - DNA, 15 bp, Homo sapiens
tggctttaatatccc

SEQ ID NO: 1206766 - DNA, 15 bp, Homo sapiens
gtggctttaatatcc

SEQ ID NO: 1206767 - DNA, 15 bp, Homo sapiens
agtggctttaatatc

SEQ ID NO: 1206768 - DNA, 15 bp, Homo sapiens
aagtggctttaatat

SEQ ID NO: 1206769 - DNA, 15 bp, Homo sapiens
aaagtggctttaata

SEQ ID NO: 1206770 - DNA, 15 bp, Homo sapiens
taaagtggctttaat

SEQ ID NO: 1206771 - DNA, 15 bp, Homo sapiens
ataaagtggctttaa

SEQ ID NO: 1206772 - DNA, 15 bp, Homo sapiens
aataaagtggcttta

SEQ ID NO: 1206773 - DNA, 15 bp, Homo sapiens
caataaagtggcttt

SEQ ID NO: 1206774 - DNA, 15 bp, Homo sapiens
acaataaagtggctt

SEQ ID NO: 1206775 - DNA, 15 bp, Homo sapiens
aacaataaagtggct

SEQ ID NO: 1206776 - DNA, 15 bp, Homo sapiens
caacaataaagtggc

SEQ ID NO: 1206777 - DNA, 15 bp, Homo sapiens
gcaacaataaagtgg

SEQ ID NO: 1206778 - DNA, 15 bp, Homo sapiens
ggcaacaataaagtg

SEQ ID NO: 1206779 - DNA, 15 bp, Homo sapiens
tggcaacaataaagt

SEQ ID NO: 1206780 - DNA, 15 bp, Homo sapiens
ttggcaacaataaag

SEQ ID NO: 1206781 - DNA, 15 bp, Homo sapiens
tttggcaacaataaa

SEQ ID NO: 1206782 - DNA, 15 bp, Homo sapiens
atttggcaacaataa

SEQ ID NO: 1206783 - DNA, 15 bp, Homo sapiens
gatttggcaacaata

SEQ ID NO: 1206784 - DNA, 15 bp, Homo sapiens
ggatttggcaacaat

SEQ ID NO: 1206785 - DNA, 15 bp, Homo sapiens
tggatttggcaacaa

SEQ ID NO: 1206786 - DNA, 15 bp, Homo sapiens
ctggatttggcaaca

SEQ ID NO: 1206787 - DNA, 15 bp, Homo sapiens
actggatttggcaac

SEQ ID NO: 1206788 - DNA, 15 bp, Homo sapiens
cactggatttggcaa

SEQ ID NO: 1206789 - DNA, 15 bp, Homo sapiens
acactggatttggca

SEQ ID NO: 1206790 - DNA, 15 bp, Homo sapiens
tacactggatttggc

SEQ ID NO: 1206791 - DNA, 15 bp, Homo sapiens
atacactggatttgg

SEQ ID NO: 1206792 - DNA, 15 bp, Homo sapiens
tatacactggatttg

SEQ ID NO: 1206793 - DNA, 15 bp, Homo sapiens
gtatacactggattt

SEQ ID NO: 1206794 - DNA, 15 bp, Homo sapiens
agtatacactggatt

SEQ ID NO: 1206795 - DNA, 15 bp, Homo sapiens
aagtatacactggat

SEQ ID NO: 1206796 - DNA, 15 bp, Homo sapiens
gaagtatacactgga

SEQ ID NO: 1206797 - DNA, 15 bp, Homo sapiens
agaagtatacactgg

SEQ ID NO: 1206798 - DNA, 15 bp, Homo sapiens
gagaagtatacactg

SEQ ID NO: 1206799 - DNA, 15 bp, Homo sapiens
agagaagtatacact

SEQ ID NO: 1206800 - DNA, 15 bp, Homo sapiens
cagagaagtatacac

SEQ ID NO: 1206801 - DNA, 15 bp, Homo sapiens
ccagagaagtataca

SEQ ID NO: 1206802 - DNA, 15 bp, Homo sapiens
cccagagaagtatac

SEQ ID NO: 1206803 - DNA, 15 bp, Homo sapiens
tcccagagaagtata

SEQ ID NO: 1206804 - DNA, 15 bp, Homo sapiens
ctcccagagaagtat

SEQ ID NO: 1206805 - DNA, 15 bp, Homo sapiens
cctcccagagaagta

SEQ ID NO: 1206806 - DNA, 15 bp, Homo sapiens
ccctcccagagaagt

SEQ ID NO: 1206807 - DNA, 15 bp, Homo sapiens
tccctcccagagaag

SEQ ID NO: 1206808 - DNA, 15 bp, Homo sapiens
atccctcccagagaa

SEQ ID NO: 1206809 - DNA, 15 bp, Homo sapiens
gatccctcccagaga

SEQ ID NO: 1206810 - DNA, 15 bp, Homo sapiens
ggatccctcccagag

SEQ ID NO: 1206811 - DNA, 15 bp, Homo sapiens
gggatccctcccaga

SEQ ID NO: 1206812 - DNA, 15 bp, Homo sapiens
tgggatccctcccag

SEQ ID NO: 1206813 - DNA, 15 bp, Homo sapiens
ttgggatccctccca

SEQ ID NO: 1206814 - DNA, 15 bp, Homo sapiens
cttgggatccctccc

SEQ ID NO: 1206815 - DNA, 15 bp, Homo sapiens
tcttgggatccctcc

SEQ ID NO: 1206816 - DNA, 15 bp, Homo sapiens
gtcttgggatccctc

SEQ ID NO: 1206817 - DNA, 15 bp, Homo sapiens
tgtcttgggatccct

SEQ ID NO: 1206818 - DNA, 15 bp, Homo sapiens
ctgtcttgggatccc

SEQ ID NO: 1206819 - DNA, 15 bp, Homo sapiens
cctgtcttgggatcc

SEQ ID NO: 1206820 - DNA, 15 bp, Homo sapiens
tcctgtcttgggatc

SEQ ID NO: 1206821 - DNA, 15 bp, Homo sapiens
gtcctgtcttgggat

SEQ ID NO: 1206822 - DNA, 15 bp, Homo sapiens
agtcctgtcttggga

SEQ ID NO: 1206823 - DNA, 15 bp, Homo sapiens
tagtcctgtcttggg

SEQ ID NO: 1206824 - DNA, 15 bp, Homo sapiens
gtagtcctgtcttgg

SEQ ID NO: 1206825 - DNA, 15 bp, Homo sapiens
ggtagtcctgtcttg

SEQ ID NO: 1206826 - DNA, 15 bp, Homo sapiens
gggtagtcctgtctt

SEQ ID NO: 1206827 - DNA, 15 bp, Homo sapiens
tgggtagtcctgtct

SEQ ID NO: 1206828 - DNA, 15 bp, Homo sapiens
ttgggtagtcctgtc

SEQ ID NO: 1206829 - DNA, 15 bp, Homo sapiens
gttgggtagtcctgt

SEQ ID NO: 1206830 - DNA, 15 bp, Homo sapiens
ggttgggtagtcctg

SEQ ID NO: 1206831 - DNA, 15 bp, Homo sapiens
tggttgggtagtcct

SEQ ID NO: 1206832 - DNA, 15 bp, Homo sapiens
ttggttgggtagtcc

SEQ ID NO: 1206833 - DNA, 15 bp, Homo sapiens
cttggttgggtagtc

SEQ ID NO: 1206834 - DNA, 15 bp, Homo sapiens
acttggttgggtagt

SEQ ID NO: 1206835 - DNA, 15 bp, Homo sapiens
gacttggttgggtag

SEQ ID NO: 1206836 - DNA, 15 bp, Homo sapiens
tgacttggttgggta

SEQ ID NO: 1206837 - DNA, 15 bp, Homo sapiens
gtgacttggttgggt

SEQ ID NO: 1206838 - DNA, 15 bp, Homo sapiens
agtgacttggttggg

SEQ ID NO: 1206839 - DNA, 15 bp, Homo sapiens
aagtgacttggttgg

SEQ ID NO: 1206840 - DNA, 15 bp, Homo sapiens
gaagtgacttggttg

SEQ ID NO: 1206841 - DNA, 15 bp, Homo sapiens
ggaagtgacttggtt

SEQ ID NO: 1206842 - DNA, 15 bp, Homo sapiens
tggaagtgacttggt

SEQ ID NO: 1206843 - DNA, 15 bp, Homo sapiens
ctggaagtgacttgg

SEQ ID NO: 1206844 - DNA, 15 bp, Homo sapiens
tctggaagtgacttg

SEQ ID NO: 1206845 - DNA, 15 bp, Homo sapiens
ctctggaagtgactt

SEQ ID NO: 1206846 - DNA, 15 bp, Homo sapiens
actctggaagtgact

SEQ ID NO: 1206847 - DNA, 15 bp, Homo sapiens
aactctggaagtgac

SEQ ID NO: 1206848 - DNA, 15 bp, Homo sapiens
gaactctggaagtga

SEQ ID NO: 1206849 - DNA, 15 bp, Homo sapiens
agaactctggaagtg

SEQ ID NO: 1206850 - DNA, 15 bp, Homo sapiens
cagaactctggaagt

SEQ ID NO: 1206851 - DNA, 15 bp, Homo sapiens
tcagaactctggaag

SEQ ID NO: 1206852 - DNA, 15 bp, Homo sapiens
atcagaactctggaa

SEQ ID NO: 1206853 - DNA, 15 bp, Homo sapiens
gatcagaactctgga

SEQ ID NO: 1206854 - DNA, 15 bp, Homo sapiens
ggatcagaactctgg

SEQ ID NO: 1206855 - DNA, 15 bp, Homo sapiens
tggatcagaactctg

SEQ ID NO: 1206856 - DNA, 15 bp, Homo sapiens
atggatcagaactct

SEQ ID NO: 1206857 - DNA, 15 bp, Homo sapiens
tatggatcagaactc

SEQ ID NO: 1206858 - DNA, 15 bp, Homo sapiens
ctatggatcagaact

SEQ ID NO: 1206859 - DNA, 15 bp, Homo sapiens
tctatggatcagaac

SEQ ID NO: 1206860 - DNA, 15 bp, Homo sapiens
gtctatggatcagaa

SEQ ID NO: 1206861 - DNA, 15 bp, Homo sapiens
tgtctatggatcaga

SEQ ID NO: 1206862 - DNA, 15 bp, Homo sapiens
atgtctatggatcag

SEQ ID NO: 1206863 - DNA, 15 bp, Homo sapiens
aatgtctatggatca

SEQ ID NO: 1206864 - DNA, 15 bp, Homo sapiens
gaatgtctatggatc

SEQ ID NO: 1206865 - DNA, 15 bp, Homo sapiens
agaatgtctatggat

SEQ ID NO: 1206866 - DNA, 15 bp, Homo sapiens
cagaatgtctatgga

SEQ ID NO: 1206867 - DNA, 15 bp, Homo sapiens
tcagaatgtctatgg

SEQ ID NO: 1206868 - DNA, 15 bp, Homo sapiens
ctcagaatgtctatg

SEQ ID NO: 1206869 - DNA, 15 bp, Homo sapiens
tctcagaatgtctat

SEQ ID NO: 1206870 - DNA, 15 bp, Homo sapiens
ctctcagaatgtcta

SEQ ID NO: 1206871 - DNA, 15 bp, Homo sapiens
tctctcagaatgtct

SEQ ID NO: 1206872 - DNA, 15 bp, Homo sapiens
atctctcagaatgtc

SEQ ID NO: 1206873 - DNA, 15 bp, Homo sapiens
gatctctcagaatgt

SEQ ID NO: 1206874 - DNA, 15 bp, Homo sapiens
tgatctctcagaatg

SEQ ID NO: 1206875 - DNA, 15 bp, Homo sapiens
atgatctctcagaat

SEQ ID NO: 1206876 - DNA, 15 bp, Homo sapiens
catgatctctcagaa

SEQ ID NO: 1206877 - DNA, 15 bp, Homo sapiens
tcatgatctctcaga

SEQ ID NO: 1206878 - DNA, 15 bp, Homo sapiens
ttcatgatctctcag

SEQ ID NO: 1206879 - DNA, 15 bp, Homo sapiens
attcatgatctctca

SEQ ID NO: 1206880 - DNA, 15 bp, Homo sapiens
cattcatgatctctc

SEQ ID NO: 1206881 - DNA, 15 bp, Homo sapiens
ccattcatgatctct

SEQ ID NO: 1206882 - DNA, 15 bp, Homo sapiens
accattcatgatctc

SEQ ID NO: 1206883 - DNA, 15 bp, Homo sapiens
caccattcatgatct

SEQ ID NO: 1206884 - DNA, 15 bp, Homo sapiens
acaccattcatgatc

SEQ ID NO: 1206885 - DNA, 15 bp, Homo sapiens
aacaccattcatgat

SEQ ID NO: 1206886 - DNA, 15 bp, Homo sapiens
caacaccattcatga

SEQ ID NO: 1206887 - DNA, 15 bp, Homo sapiens
acaacaccattcatg

SEQ ID NO: 1206888 - DNA, 15 bp, Homo sapiens
aacaacaccattcat

SEQ ID NO: 1206889 - DNA, 15 bp, Homo sapiens
aaacaacaccattca

SEQ ID NO: 1206890 - DNA, 15 bp, Homo sapiens
aaaacaacaccattc

SEQ ID NO: 1206891 - DNA, 15 bp, Homo sapiens
taaaacaacaccatt

SEQ ID NO: 1206892 - DNA, 15 bp, Homo sapiens
ttaaaacaacaccat

SEQ ID NO: 1206893 - DNA, 15 bp, Homo sapiens
cttaaaacaacacca

SEQ ID NO: 1206894 - DNA, 15 bp, Homo sapiens
gcttaaaacaacacc

SEQ ID NO: 1206895 - DNA, 15 bp, Homo sapiens
ggcttaaaacaacac

SEQ ID NO: 1206896 - DNA, 15 bp, Homo sapiens
tggcttaaaacaaca

SEQ ID NO: 1206897 - DNA, 15 bp, Homo sapiens
gtggcttaaaacaac

SEQ ID NO: 1206898 - DNA, 15 bp, Homo sapiens
ttagtggcttaaaac

SEQ ID NO: 1206899 - DNA, 15 bp, Homo sapiens
tttagtggcttaaaa

SEQ ID NO: 1206900 - DNA, 15 bp, Homo sapiens
atttagtggcttaaa

SEQ ID NO: 1206901 - DNA, 15 bp, Homo sapiens
aatttagtggcttaa

SEQ ID NO: 1206902 - DNA, 15 bp, Homo sapiens
aaatttagtggctta

SEQ ID NO: 1206903 - DNA, 15 bp, Homo sapiens
aaaatttagtggctt

SEQ ID NO: 1206904 - DNA, 15 bp, Homo sapiens
caaaatttagtggct

SEQ ID NO: 1206905 - DNA, 15 bp, Homo sapiens
ccaaaatttagtggc

SEQ ID NO: 1206906 - DNA, 15 bp, Homo sapiens
cccaaaatttagtgg

SEQ ID NO: 1206907 - DNA, 15 bp, Homo sapiens
tcccaaaatttagtg

SEQ ID NO: 1206908 - DNA, 15 bp, Homo sapiens
atcccaaaatttagt

SEQ ID NO: 1206909 - DNA, 15 bp, Homo sapiens
tatcccaaaatttag

SEQ ID NO: 1206910 - DNA, 15 bp, Homo sapiens
gtatcccaaaattta

SEQ ID NO: 1206911 - DNA, 15 bp, Homo sapiens
agtatcccaaaattt

SEQ ID NO: 1206912 - DNA, 15 bp, Homo sapiens
aagtatcccaaaatt

SEQ ID NO: 1206913 - DNA, 15 bp, Homo sapiens
aaagtatcccaaaat

SEQ ID NO: 1206914 - DNA, 15 bp, Homo sapiens
aaaagtatcccaaaa

SEQ ID NO: 1206915 - DNA, 15 bp, Homo sapiens
aaaaagtatcccaaa

SEQ ID NO: 1206916 - DNA, 15 bp, Homo sapiens
aaaaaagtatcccaa

SEQ ID NO: 1206917 - DNA, 15 bp, Homo sapiens
aaaaaaagtatccca

SEQ ID NO: 1206918 - DNA, 15 bp, Homo sapiens
aaaaaaaagtatccc

SEQ ID NO: 1206919 - DNA, 15 bp, Homo sapiens
aaaaaaaaagtatcc

SEQ ID NO: 1206920 - DNA, 15 bp, Homo sapiens
aaaaaaaaaagtatc

SEQ ID NO: 1206921 - DNA, 15 bp, Homo sapiens
taaaaaaaaaagtat

SEQ ID NO: 1206922 - DNA, 15 bp, Homo sapiens
ataaaaaaaaaagta

SEQ ID NO: 1206923 - DNA, 15 bp, Homo sapiens
tataaaaaaaaaagt

SEQ ID NO: 1206924 - DNA, 15 bp, Homo sapiens
ttataaaaaaaaaag

SEQ ID NO: 1206925 - DNA, 15 bp, Homo sapiens
attataaaaaaaaaa

SEQ ID NO: 1206926 - DNA, 15 bp, Homo sapiens
tattataaaaaaaaa

SEQ ID NO: 1206927 - DNA, 15 bp, Homo sapiens
ttattataaaaaaaa

SEQ ID NO: 1206928 - DNA, 15 bp, Homo sapiens
attattataaaaaaa

SEQ ID NO: 1206929 - DNA, 15 bp, Homo sapiens
cattattataaaaaa

SEQ ID NO: 1206930 - DNA, 15 bp, Homo sapiens
tcattattataaaaa

SEQ ID NO: 1206931 - DNA, 15 bp, Homo sapiens
ttcattattataaaa

SEQ ID NO: 1206932 - DNA, 15 bp, Homo sapiens
attcattattataaa

SEQ ID NO: 1206933 - DNA, 15 bp, Homo sapiens
aattcattattataa

SEQ ID NO: 1206934 - DNA, 15 bp, Homo sapiens
aaattcattattata

SEQ ID NO: 1206935 - DNA, 15 bp, Homo sapiens
taaattcattattat

SEQ ID NO: 1206936 - DNA, 15 bp, Homo sapiens
ctaaattcattatta

SEQ ID NO: 1206937 - DNA, 15 bp, Homo sapiens
actaaattcattatt

SEQ ID NO: 1206938 - DNA, 15 bp, Homo sapiens
aactaaattcattat

SEQ ID NO: 1206939 - DNA, 15 bp, Homo sapiens
aaactaaattcatta

SEQ ID NO: 1206940 - DNA, 15 bp, Homo sapiens
aaaactaaattcatt

SEQ ID NO: 1206941 - DNA, 15 bp, Homo sapiens
aaaaactaaattcat

SEQ ID NO: 1206942 - DNA, 15 bp, Homo sapiens
aaaaaactaaattca

SEQ ID NO: 1206943 - DNA, 15 bp, Homo sapiens
taaaaaactaaattc

SEQ ID NO: 1206944 - DNA, 15 bp, Homo sapiens
ttaaaaaactaaatt

SEQ ID NO: 1206945 - DNA, 15 bp, Homo sapiens
tttaaaaaactaaat

SEQ ID NO: 1206946 - DNA, 15 bp, Homo sapiens
ttttaaaaaactaaa

SEQ ID NO: 1206947 - DNA, 15 bp, Homo sapiens
tttttaaaaaactaa

SEQ ID NO: 1206948 - DNA, 15 bp, Homo sapiens
ttttttaaaaaacta

SEQ ID NO: 1206949 - DNA, 15 bp, Homo sapiens
tttttttaaaaaact

SEQ ID NO: 1206950 - DNA, 15 bp, Homo sapiens
atttttttaaaaaac

SEQ ID NO: 1206951 - DNA, 15 bp, Homo sapiens
acatttttttaaaaa

SEQ ID NO: 1206952 - DNA, 15 bp, Homo sapiens
cacatttttttaaaa

SEQ ID NO: 1206953 - DNA, 15 bp, Homo sapiens
acacatttttttaaa

SEQ ID NO: 1206954 - DNA, 15 bp, Homo sapiens
gacacatttttttaa

SEQ ID NO: 1206955 - DNA, 15 bp, Homo sapiens
tgacacattttttta

SEQ ID NO: 1206956 - DNA, 15 bp, Homo sapiens
ttgacacattttttt

SEQ ID NO: 1206957 - DNA, 15 bp, Homo sapiens
cttgacacatttttt

SEQ ID NO: 1206958 - DNA, 15 bp, Homo sapiens
acttgacacattttt

SEQ ID NO: 1206959 - DNA, 15 bp, Homo sapiens
tacttgacacatttt

SEQ ID NO: 1206960 - DNA, 15 bp, Homo sapiens
atacttgacacattt

SEQ ID NO: 1206961 - DNA, 15 bp, Homo sapiens
aatacttgacacatt

SEQ ID NO: 1206962 - DNA, 15 bp, Homo sapiens
aaatacttgacacat

SEQ ID NO: 1206963 - DNA, 15 bp, Homo sapiens
caaatacttgacaca

SEQ ID NO: 1206964 - DNA, 15 bp, Homo sapiens
acaaatacttgacac

SEQ ID NO: 1206965 - DNA, 15 bp, Homo sapiens
aacaaatacttgaca

SEQ ID NO: 1206966 - DNA, 15 bp, Homo sapiens
taacaaatacttgac

SEQ ID NO: 1206967 - DNA, 15 bp, Homo sapiens
ttaacaaatacttga

SEQ ID NO: 1206968 - DNA, 15 bp, Homo sapiens
gttaacaaatacttg

SEQ ID NO: 1206969 - DNA, 15 bp, Homo sapiens
agttaacaaatactt

SEQ ID NO: 1206970 - DNA, 15 bp, Homo sapiens
gagttaacaaatact

SEQ ID NO: 1206971 - DNA, 15 bp, Homo sapiens
tgagttaacaaatac

SEQ ID NO: 1206972 - DNA, 15 bp, Homo sapiens
atgagttaacaaata

SEQ ID NO: 1206973 - DNA, 15 bp, Homo sapiens
aatgagttaacaaat

SEQ ID NO: 1206974 - DNA, 15 bp, Homo sapiens
taatgagttaacaaa

SEQ ID NO: 1206975 - DNA, 15 bp, Homo sapiens
ttaatgagttaacaa

SEQ ID NO: 1206976 - DNA, 15 bp, Homo sapiens
attaatgagttaaca

SEQ ID NO: 1206977 - DNA, 15 bp, Homo sapiens
cattaatgagttaac

SEQ ID NO: 1206978 - DNA, 15 bp, Homo sapiens
tcattaatgagttaa

SEQ ID NO: 1206979 - DNA, 15 bp, Homo sapiens
ctcattaatgagtta

SEQ ID NO: 1206980 - DNA, 15 bp, Homo sapiens
cctcattaatgagtt

SEQ ID NO: 1206981 - DNA, 15 bp, Homo sapiens
ccctcattaatgagt

SEQ ID NO: 1206982 - DNA, 15 bp, Homo sapiens
tccctcattaatgag

SEQ ID NO: 1206983 - DNA, 15 bp, Homo sapiens
ttccctcattaatga

SEQ ID NO: 1206984 - DNA, 15 bp, Homo sapiens
gttccctcattaatg

SEQ ID NO: 1206985 - DNA, 15 bp, Homo sapiens
ggttccctcattaat

SEQ ID NO: 1206986 - DNA, 15 bp, Homo sapiens
tggttccctcattaa

SEQ ID NO: 1206987 - DNA, 15 bp, Homo sapiens
ctggttccctcatta

SEQ ID NO: 1206988 - DNA, 15 bp, Homo sapiens
gctggttccctcatt

SEQ ID NO: 1206989 - DNA, 15 bp, Homo sapiens
tgctggttccctcat

SEQ ID NO: 1206990 - DNA, 15 bp, Homo sapiens
ttgctggttccctca

SEQ ID NO: 1206991 - DNA, 15 bp, Homo sapiens
cttgctggttccctc

SEQ ID NO: 1206992 - DNA, 15 bp, Homo sapiens
tcttgctggttccct

SEQ ID NO: 1206993 - DNA, 15 bp, Homo sapiens
atcttgctggttccc

SEQ ID NO: 1206994 - DNA, 15 bp, Homo sapiens
catcttgctggttcc

SEQ ID NO: 1206995 - DNA, 15 bp, Homo sapiens
tcatcttgctggttc

SEQ ID NO: 1206996 - DNA, 15 bp, Homo sapiens
gtcatcttgctggtt

SEQ ID NO: 1206997 - DNA, 15 bp, Homo sapiens
tgtcatcttgctggt

SEQ ID NO: 1206998 - DNA, 15 bp, Homo sapiens
ttgtcatcttgctgg

SEQ ID NO: 1206999 - DNA, 15 bp, Homo sapiens
tttgtcatcttgctg

SEQ ID NO: 1207000 - DNA, 15 bp, Homo sapiens
ctttgtcatcttgct

SEQ ID NO: 1207001 - DNA, 15 bp, Homo sapiens
gctttgtcatcttgc

SEQ ID NO: 1207002 - DNA, 15 bp, Homo sapiens
agctttgtcatcttg

SEQ ID NO: 1207003 - DNA, 15 bp, Homo sapiens
gagctttgtcatctt

SEQ ID NO: 1207004 - DNA, 15 bp, Homo sapiens
tgagctttgtcatct

SEQ ID NO: 1207005 - DNA, 15 bp, Homo sapiens
atgagctttgtcatc

SEQ ID NO: 1207006 - DNA, 15 bp, Homo sapiens
aatgagctttgtcat

SEQ ID NO: 1207007 - DNA, 15 bp, Homo sapiens
gaatgagctttgtca

SEQ ID NO: 1207008 - DNA, 15 bp, Homo sapiens
tgaatgagctttgtc

SEQ ID NO: 1207009 - DNA, 15 bp, Homo sapiens
ttgaatgagctttgt

SEQ ID NO: 1207010 - DNA, 15 bp, Homo sapiens
tttgaatgagctttg

SEQ ID NO: 1207011 - DNA, 15 bp, Homo sapiens
ttttgaatgagcttt

SEQ ID NO: 1207012 - DNA, 15 bp, Homo sapiens
cttttgaatgagctt

SEQ ID NO: 1207013 - DNA, 15 bp, Homo sapiens
tcttttgaatgagct

SEQ ID NO: 1207014 - DNA, 15 bp, Homo sapiens
ctcttttgaatgagc

SEQ ID NO: 1207015 - DNA, 15 bp, Homo sapiens
cctcttttgaatgag

SEQ ID NO: 1207016 - DNA, 15 bp, Homo sapiens
tcctcttttgaatga

SEQ ID NO: 1207017 - DNA, 15 bp, Homo sapiens
atcctcttttgaatg

SEQ ID NO: 1207018 - DNA, 15 bp, Homo sapiens
tatcctcttttgaat

SEQ ID NO: 1207019 - DNA, 15 bp, Homo sapiens
atatcctcttttgaa

SEQ ID NO: 1207020 - DNA, 15 bp, Homo sapiens
catatcctcttttga

SEQ ID NO: 1207021 - DNA, 15 bp, Homo sapiens
tcatatcctcttttg

SEQ ID NO: 1207022 - DNA, 15 bp, Homo sapiens
ctcatatcctctttt

SEQ ID NO: 1207023 - DNA, 15 bp, Homo sapiens
tctcatatcctcttt

SEQ ID NO: 1207024 - DNA, 15 bp, Homo sapiens
ctctcatatcctctt

SEQ ID NO: 1207025 - DNA, 15 bp, Homo sapiens
cctctcatatcctct

SEQ ID NO: 1207026 - DNA, 15 bp, Homo sapiens
gcctctcatatcctc

SEQ ID NO: 1207027 - DNA, 15 bp, Homo sapiens
agcctctcatatcct

SEQ ID NO: 1207028 - DNA, 15 bp, Homo sapiens
cagcctctcatatcc

SEQ ID NO: 1207029 - DNA, 15 bp, Homo sapiens
ccagcctctcatatc

SEQ ID NO: 1207030 - DNA, 15 bp, Homo sapiens
cccagcctctcatat

SEQ ID NO: 1207031 - DNA, 15 bp, Homo sapiens
gcccagcctctcata

SEQ ID NO: 1207032 - DNA, 15 bp, Homo sapiens
cgcccagcctctcat

SEQ ID NO: 1207033 - DNA, 15 bp, Homo sapiens
acgcccagcctctca

SEQ ID NO: 1207034 - DNA, 15 bp, Homo sapiens
cacgcccagcctctc

SEQ ID NO: 1207035 - DNA, 15 bp, Homo sapiens
ccacgcccagcctct

SEQ ID NO: 1207036 - DNA, 15 bp, Homo sapiens
accacgcccagcctc

SEQ ID NO: 1207037 - DNA, 15 bp, Homo sapiens
atgagccaccacgcc

SEQ ID NO: 1207038 - DNA, 15 bp, Homo sapiens
catgagccaccacgc

SEQ ID NO: 1207039 - DNA, 15 bp, Homo sapiens
gcatgagccaccacg

SEQ ID NO: 1207040 - DNA, 15 bp, Homo sapiens
tccgccttggcctcc

SEQ ID NO: 1207041 - DNA, 15 bp, Homo sapiens
atccgccttggcctc

SEQ ID NO: 1207042 - DNA, 15 bp, Homo sapiens
catccgccttggcct

SEQ ID NO: 1207043 - DNA, 15 bp, Homo sapiens
ccatccgccttggcc

SEQ ID NO: 1207044 - DNA, 15 bp, Homo sapiens
tccatccgccttggc

SEQ ID NO: 1207045 - DNA, 15 bp, Homo sapiens
atccatccgccttgg

SEQ ID NO: 1207046 - DNA, 15 bp, Homo sapiens
gatccatccgccttg

SEQ ID NO: 1207047 - DNA, 15 bp, Homo sapiens
tgatccatccgcctt

SEQ ID NO: 1207048 - DNA, 15 bp, Homo sapiens
atgatccatccgcct

SEQ ID NO: 1207049 - DNA, 15 bp, Homo sapiens
tatgatccatccgcc

SEQ ID NO: 1207050 - DNA, 15 bp, Homo sapiens
ttatgatccatccgc

SEQ ID NO: 1207051 - DNA, 15 bp, Homo sapiens
cttatgatccatccg

SEQ ID NO: 1207052 - DNA, 15 bp, Homo sapiens
ccttatgatccatcc

SEQ ID NO: 1207053 - DNA, 15 bp, Homo sapiens
accttatgatccatc

SEQ ID NO: 1207054 - DNA, 15 bp, Homo sapiens
aaccttatgatccat

SEQ ID NO: 1207055 - DNA, 15 bp, Homo sapiens
taaccttatgatcca

SEQ ID NO: 1207056 - DNA, 15 bp, Homo sapiens
ttaaccttatgatcc

SEQ ID NO: 1207057 - DNA, 15 bp, Homo sapiens
attaaccttatgatc

SEQ ID NO: 1207058 - DNA, 15 bp, Homo sapiens
cattaaccttatgat

SEQ ID NO: 1207059 - DNA, 15 bp, Homo sapiens
gcattaaccttatga

SEQ ID NO: 1207060 - DNA, 15 bp, Homo sapiens
ggcattaaccttatg

SEQ ID NO: 1207061 - DNA, 15 bp, Homo sapiens
gggcattaaccttat

SEQ ID NO: 1207062 - DNA, 15 bp, Homo sapiens
agggcattaacctta

SEQ ID NO: 1207063 - DNA, 15 bp, Homo sapiens
tagggcattaacctt

SEQ ID NO: 1207064 - DNA, 15 bp, Homo sapiens
ttagggcattaacct

SEQ ID NO: 1207065 - DNA, 15 bp, Homo sapiens
tttagggcattaacc

SEQ ID NO: 1207066 - DNA, 15 bp, Homo sapiens
ctttagggcattaac

SEQ ID NO: 1207067 - DNA, 15 bp, Homo sapiens
cctttagggcattaa

SEQ ID NO: 1207068 - DNA, 15 bp, Homo sapiens
ccctttagggcatta

SEQ ID NO: 1207069 - DNA, 15 bp, Homo sapiens
gccctttagggcatt

SEQ ID NO: 1207070 - DNA, 15 bp, Homo sapiens
cgccctttagggcat

SEQ ID NO: 1207071 - DNA, 15 bp, Homo sapiens
tcgccctttagggca

SEQ ID NO: 1207072 - DNA, 15 bp, Homo sapiens
atcgccctttagggc

SEQ ID NO: 1207073 - DNA, 15 bp, Homo sapiens
tatcgccctttaggg

SEQ ID NO: 1207074 - DNA, 15 bp, Homo sapiens
ttatcgccctttagg

SEQ ID NO: 1207075 - DNA, 15 bp, Homo sapiens
tttatcgccctttag

SEQ ID NO: 1207076 - DNA, 15 bp, Homo sapiens
ttttatcgcccttta

SEQ ID NO: 1207077 - DNA, 15 bp, Homo sapiens
gttttatcgcccttt

SEQ ID NO: 1207078 - DNA, 15 bp, Homo sapiens
agttttatcgccctt

SEQ ID NO: 1207079 - DNA, 15 bp, Homo sapiens
tagttttatcgccct

SEQ ID NO: 1207080 - DNA, 15 bp, Homo sapiens
atagttttatcgccc

SEQ ID NO: 1207081 - DNA, 15 bp, Homo sapiens
catagttttatcgcc

SEQ ID NO: 1207082 - DNA, 15 bp, Homo sapiens
tcatagttttatcgc

SEQ ID NO: 1207083 - DNA, 15 bp, Homo sapiens
gtcatagttttatcg

SEQ ID NO: 1207084 - DNA, 15 bp, Homo sapiens
tgtcatagttttatc

SEQ ID NO: 1207085 - DNA, 15 bp, Homo sapiens
atgtcatagttttat

SEQ ID NO: 1207086 - DNA, 15 bp, Homo sapiens
aatgtcatagtttta

SEQ ID NO: 1207087 - DNA, 15 bp, Homo sapiens
aaatgtcatagtttt

SEQ ID NO: 1207088 - DNA, 15 bp, Homo sapiens
caaatgtcatagttt

SEQ ID NO: 1207089 - DNA, 15 bp, Homo sapiens
gcaaatgtcatagtt

SEQ ID NO: 1207090 - DNA, 15 bp, Homo sapiens
tgcaaatgtcatagt

SEQ ID NO: 1207091 - DNA, 15 bp, Homo sapiens
ttgcaaatgtcatag

SEQ ID NO: 1207092 - DNA, 15 bp, Homo sapiens
gttgcaaatgtcata

SEQ ID NO: 1207093 - DNA, 15 bp, Homo sapiens
agttgcaaatgtcat

SEQ ID NO: 1207094 - DNA, 15 bp, Homo sapiens
tagttgcaaatgtca

SEQ ID NO: 1207095 - DNA, 15 bp, Homo sapiens
ttagttgcaaatgtc

SEQ ID NO: 1207096 - DNA, 15 bp, Homo sapiens
tttagttgcaaatgt

SEQ ID NO: 1207097 - DNA, 15 bp, Homo sapiens
atttagttgcaaatg

SEQ ID NO: 1207098 - DNA, 15 bp, Homo sapiens
tatttagttgcaaat

SEQ ID NO: 1207099 - DNA, 15 bp, Homo sapiens
ttatttagttgcaaa

SEQ ID NO: 1207100 - DNA, 15 bp, Homo sapiens
attatttagttgcaa

SEQ ID NO: 1207101 - DNA, 15 bp, Homo sapiens
gattatttagttgca

SEQ ID NO: 1207102 - DNA, 15 bp, Homo sapiens
agattatttagttgc

SEQ ID NO: 1207103 - DNA, 15 bp, Homo sapiens
cagattatttagttg

SEQ ID NO: 1207104 - DNA, 15 bp, Homo sapiens
gcagattatttagtt

SEQ ID NO: 1207105 - DNA, 15 bp, Homo sapiens
tgcagattatttagt

SEQ ID NO: 1207106 - DNA, 15 bp, Homo sapiens
ttgcagattatttag

SEQ ID NO: 1207107 - DNA, 15 bp, Homo sapiens
tttgcagattattta

SEQ ID NO: 1207108 - DNA, 15 bp, Homo sapiens
ctttgcagattattt

SEQ ID NO: 1207109 - DNA, 15 bp, Homo sapiens
tctttgcagattatt

SEQ ID NO: 1207110 - DNA, 15 bp, Homo sapiens
ttctttgcagattat

SEQ ID NO: 1207111 - DNA, 15 bp, Homo sapiens
cttctttgcagatta

SEQ ID NO: 1207112 - DNA, 15 bp, Homo sapiens
gcttctttgcagatt

SEQ ID NO: 1207113 - DNA, 15 bp, Homo sapiens
tgcttctttgcagat

SEQ ID NO: 1207114 - DNA, 15 bp, Homo sapiens
atgcttctttgcaga

SEQ ID NO: 1207115 - DNA, 15 bp, Homo sapiens
gatgcttctttgcag

SEQ ID NO: 1207116 - DNA, 15 bp, Homo sapiens
agatgcttctttgca

SEQ ID NO: 1207117 - DNA, 15 bp, Homo sapiens
tagatgcttctttgc

SEQ ID NO: 1207118 - DNA, 15 bp, Homo sapiens
ttagatgcttctttg

SEQ ID NO: 1207119 - DNA, 15 bp, Homo sapiens
gttagatgcttcttt

SEQ ID NO: 1207120 - DNA, 15 bp, Homo sapiens
ggttagatgcttctt

SEQ ID NO: 1207121 - DNA, 15 bp, Homo sapiens
gggttagatgcttct

SEQ ID NO: 1207122 - DNA, 15 bp, Homo sapiens
tgggttagatgcttc

SEQ ID NO: 1207123 - DNA, 15 bp, Homo sapiens
ctgggttagatgctt

SEQ ID NO: 1207124 - DNA, 15 bp, Homo sapiens
tctgggttagatgct

SEQ ID NO: 1207125 - DNA, 15 bp, Homo sapiens
ctctgggttagatgc

SEQ ID NO: 1207126 - DNA, 15 bp, Homo sapiens
actctgggttagatg

SEQ ID NO: 1207127 - DNA, 15 bp, Homo sapiens
gactctgggttagat

SEQ ID NO: 1207128 - DNA, 15 bp, Homo sapiens
agactctgggttaga

SEQ ID NO: 1207129 - DNA, 15 bp, Homo sapiens
tagactctgggttag

SEQ ID NO: 1207130 - DNA, 15 bp, Homo sapiens
gtagactctgggtta

SEQ ID NO: 1207131 - DNA, 15 bp, Homo sapiens
cgtagactctgggtt

SEQ ID NO: 1207132 - DNA, 15 bp, Homo sapiens
gcgtagactctgggt

SEQ ID NO: 1207133 - DNA, 15 bp, Homo sapiens
ggcgtagactctggg

SEQ ID NO: 1207134 - DNA, 15 bp, Homo sapiens
gggcgtagactctgg

SEQ ID NO: 1207135 - DNA, 15 bp, Homo sapiens
agggcgtagactctg

SEQ ID NO: 1207136 - DNA, 15 bp, Homo sapiens
gagggcgtagactct

SEQ ID NO: 1207137 - DNA, 15 bp, Homo sapiens
ggagggcgtagactc

SEQ ID NO: 1207138 - DNA, 15 bp, Homo sapiens
aggagggcgtagact

SEQ ID NO: 1207139 - DNA, 15 bp, Homo sapiens
gaggagggcgtagac

SEQ ID NO: 1207140 - DNA, 15 bp, Homo sapiens
tgaggagggcgtaga

SEQ ID NO: 1207141 - DNA, 15 bp, Homo sapiens
ttgaggagggcgtag

SEQ ID NO: 1207142 - DNA, 15 bp, Homo sapiens
gttgaggagggcgta

SEQ ID NO: 1207143 - DNA, 15 bp, Homo sapiens
tgttgaggagggcgt

SEQ ID NO: 1207144 - DNA, 15 bp, Homo sapiens
ctgttgaggagggcg

SEQ ID NO: 1207145 - DNA, 15 bp, Homo sapiens
gctgttgaggagggc

SEQ ID NO: 1207146 - DNA, 15 bp, Homo sapiens
tgctgttgaggaggg

SEQ ID NO: 1207147 - DNA, 15 bp, Homo sapiens
ttgctgttgaggagg

SEQ ID NO: 1207148 - DNA, 15 bp, Homo sapiens
tttgctgttgaggag

SEQ ID NO: 1207149 - DNA, 15 bp, Homo sapiens
atttgctgttgagga

SEQ ID NO: 1207150 - DNA, 15 bp, Homo sapiens
tatttgctgttgagg

SEQ ID NO: 1207151 - DNA, 15 bp, Homo sapiens
ttatttgctgttgag

SEQ ID NO: 1207152 - DNA, 15 bp, Homo sapiens
gttatttgctgttga

SEQ ID NO: 1207153 - DNA, 15 bp, Homo sapiens
tgttatttgctgttg

SEQ ID NO: 1207154 - DNA, 15 bp, Homo sapiens
ttgttatttgctgtt

SEQ ID NO: 1207155 - DNA, 15 bp, Homo sapiens
attgttatttgctgt

SEQ ID NO: 1207156 - DNA, 15 bp, Homo sapiens
aattgttatttgctg

SEQ ID NO: 1207157 - DNA, 15 bp, Homo sapiens
gaattgttatttgct

SEQ ID NO: 1207158 - DNA, 15 bp, Homo sapiens
tgaattgttatttgc

SEQ ID NO: 1207159 - DNA, 15 bp, Homo sapiens
ttgaattgttatttg

SEQ ID NO: 1207160 - DNA, 15 bp, Homo sapiens
tttgaattgttattt

SEQ ID NO: 1207161 - DNA, 15 bp, Homo sapiens
atttgaattgttatt

SEQ ID NO: 1207162 - DNA, 15 bp, Homo sapiens
tatttgaattgttat

SEQ ID NO: 1207163 - DNA, 15 bp, Homo sapiens
ttatttgaattgtta

SEQ ID NO: 1207164 - DNA, 15 bp, Homo sapiens
cttatttgaattgtt

SEQ ID NO: 1207165 - DNA, 15 bp, Homo sapiens
acttatttgaattgt

SEQ ID NO: 1207166 - DNA, 15 bp, Homo sapiens
aacttatttgaattg

SEQ ID NO: 1207167 - DNA, 15 bp, Homo sapiens
caacttatttgaatt

SEQ ID NO: 1207168 - DNA, 15 bp, Homo sapiens
ccaacttatttgaat

SEQ ID NO: 1207169 - DNA, 15 bp, Homo sapiens
tccaacttatttgaa

SEQ ID NO: 1207170 - DNA, 15 bp, Homo sapiens
ctccaacttatttga

SEQ ID NO: 1207171 - DNA, 15 bp, Homo sapiens
actccaacttatttg

SEQ ID NO: 1207172 - DNA, 15 bp, Homo sapiens
aactccaacttattt

SEQ ID NO: 1207173 - DNA, 15 bp, Homo sapiens
gaactccaacttatt

SEQ ID NO: 1207174 - DNA, 15 bp, Homo sapiens
ggaactccaacttat

SEQ ID NO: 1207175 - DNA, 15 bp, Homo sapiens
gggaactccaactta

SEQ ID NO: 1207176 - DNA, 15 bp, Homo sapiens
ggggaactccaactt

SEQ ID NO: 1207177 - DNA, 15 bp, Homo sapiens
aggggaactccaact

SEQ ID NO: 1207178 - DNA, 15 bp, Homo sapiens
caggggaactccaac

SEQ ID NO: 1207179 - DNA, 15 bp, Homo sapiens
ccaggggaactccaa

SEQ ID NO: 1207180 - DNA, 15 bp, Homo sapiens
tccaggggaactcca

SEQ ID NO: 1207181 - DNA, 15 bp, Homo sapiens
ctccaggggaactcc

SEQ ID NO: 1207182 - DNA, 15 bp, Homo sapiens
actccaggggaactc

SEQ ID NO: 1207183 - DNA, 15 bp, Homo sapiens
aactccaggggaact

SEQ ID NO: 1207184 - DNA, 15 bp, Homo sapiens
caactccaggggaac

SEQ ID NO: 1207185 - DNA, 15 bp, Homo sapiens
ccaactccaggggaa

SEQ ID NO: 1207186 - DNA, 15 bp, Homo sapiens
tccaactccagggga

SEQ ID NO: 1207187 - DNA, 15 bp, Homo sapiens
atccaactccagggg

SEQ ID NO: 1207188 - DNA, 15 bp, Homo sapiens
catccaactccaggg

SEQ ID NO: 1207189 - DNA, 15 bp, Homo sapiens
ccatccaactccagg

SEQ ID NO: 1207190 - DNA, 15 bp, Homo sapiens
gccatccaactccag

SEQ ID NO: 1207191 - DNA, 15 bp, Homo sapiens
agccatccaactcca

SEQ ID NO: 1207192 - DNA, 15 bp, Homo sapiens
gagccatccaactcc

SEQ ID NO: 1207193 - DNA, 15 bp, Homo sapiens
agagccatccaactc

SEQ ID NO: 1207194 - DNA, 15 bp, Homo sapiens
cagagccatccaact

SEQ ID NO: 1207195 - DNA, 15 bp, Homo sapiens
acagagccatccaac

SEQ ID NO: 1207196 - DNA, 15 bp, Homo sapiens
cacagagccatccaa

SEQ ID NO: 1207197 - DNA, 15 bp, Homo sapiens
gcacagagccatcca

SEQ ID NO: 1207198 - DNA, 15 bp, Homo sapiens
tgcacagagccatcc

SEQ ID NO: 1207199 - DNA, 15 bp, Homo sapiens
ctgcacagagccatc

SEQ ID NO: 1207200 - DNA, 15 bp, Homo sapiens
cctgcacagagccat

SEQ ID NO: 1207201 - DNA, 15 bp, Homo sapiens
gcctgcacagagcca

SEQ ID NO: 1207202 - DNA, 15 bp, Homo sapiens
agcctgcacagagcc

SEQ ID NO: 1207203 - DNA, 15 bp, Homo sapiens
aagcctgcacagagc

SEQ ID NO: 1207204 - DNA, 15 bp, Homo sapiens
caagcctgcacagag

SEQ ID NO: 1207205 - DNA, 15 bp, Homo sapiens
gcaagcctgcacaga

SEQ ID NO: 1207206 - DNA, 15 bp, Homo sapiens
agcaagcctgcacag

SEQ ID NO: 1207207 - DNA, 15 bp, Homo sapiens
aagcaagcctgcaca

SEQ ID NO: 1207208 - DNA, 15 bp, Homo sapiens
aaagcaagcctgcac

SEQ ID NO: 1207209 - DNA, 15 bp, Homo sapiens
taaagcaagcctgca

SEQ ID NO: 1207210 - DNA, 15 bp, Homo sapiens
ctaaagcaagcctgc

SEQ ID NO: 1207211 - DNA, 15 bp, Homo sapiens
tctaaagcaagcctg

SEQ ID NO: 1207212 - DNA, 15 bp, Homo sapiens
gtctaaagcaagcct

SEQ ID NO: 1207213 - DNA, 15 bp, Homo sapiens
agtctaaagcaagcc

SEQ ID NO: 1207214 - DNA, 15 bp, Homo sapiens
tagtctaaagcaagc

SEQ ID NO: 1207215 - DNA, 15 bp, Homo sapiens
atagtctaaagcaag

SEQ ID NO: 1207216 - DNA, 15 bp, Homo sapiens
tatagtctaaagcaa

SEQ ID NO: 1207217 - DNA, 15 bp, Homo sapiens
gtatagtctaaagca

SEQ ID NO: 1207218 - DNA, 15 bp, Homo sapiens
agtatagtctaaagc

SEQ ID NO: 1207219 - DNA, 15 bp, Homo sapiens
gagtatagtctaaag

SEQ ID NO: 1207220 - DNA, 15 bp, Homo sapiens
agagtatagtctaaa

SEQ ID NO: 1207221 - DNA, 15 bp, Homo sapiens
tagagtatagtctaa

SEQ ID NO: 1207222 - DNA, 15 bp, Homo sapiens
ctagagtatagtcta

SEQ ID NO: 1207223 - DNA, 15 bp, Homo sapiens
actagagtatagtct

SEQ ID NO: 1207224 - DNA, 15 bp, Homo sapiens
cactagagtatagtc

SEQ ID NO: 1207225 - DNA, 15 bp, Homo sapiens
tcactagagtatagt

SEQ ID NO: 1207226 - DNA, 15 bp, Homo sapiens
ctcactagagtatag

SEQ ID NO: 1207227 - DNA, 15 bp, Homo sapiens
tctcactagagtata

SEQ ID NO: 1207228 - DNA, 15 bp, Homo sapiens
gtctcactagagtat

SEQ ID NO: 1207229 - DNA, 15 bp, Homo sapiens
agtctcactagagta

SEQ ID NO: 1207230 - DNA, 15 bp, Homo sapiens
aagtctcactagagt

SEQ ID NO: 1207231 - DNA, 15 bp, Homo sapiens
aaagtctcactagag

SEQ ID NO: 1207232 - DNA, 15 bp, Homo sapiens
caaagtctcactaga

SEQ ID NO: 1207233 - DNA, 15 bp, Homo sapiens
tcaaagtctcactag

SEQ ID NO: 1207234 - DNA, 15 bp, Homo sapiens
ttcaaagtctcacta

SEQ ID NO: 1207235 - DNA, 15 bp, Homo sapiens
gttcaaagtctcact

SEQ ID NO: 1207236 - DNA, 15 bp, Homo sapiens
cgttcaaagtctcac

SEQ ID NO: 1207237 - DNA, 15 bp, Homo sapiens
acgttcaaagtctca

SEQ ID NO: 1207238 - DNA, 15 bp, Homo sapiens
tacgttcaaagtctc

SEQ ID NO: 1207239 - DNA, 15 bp, Homo sapiens
atacgttcaaagtct

SEQ ID NO: 1207240 - DNA, 15 bp, Homo sapiens
tatacgttcaaagtc

SEQ ID NO: 1207241 - DNA, 15 bp, Homo sapiens
atatacgttcaaagt

SEQ ID NO: 1207242 - DNA, 15 bp, Homo sapiens
catatacgttcaaag

SEQ ID NO: 1207243 - DNA, 15 bp, Homo sapiens
acatatacgttcaaa

SEQ ID NO: 1207244 - DNA, 15 bp, Homo sapiens
gacatatacgttcaa

SEQ ID NO: 1207245 - DNA, 15 bp, Homo sapiens
tgacatatacgttca

SEQ ID NO: 1207246 - DNA, 15 bp, Homo sapiens
atgacatatacgttc

SEQ ID NO: 1207247 - DNA, 15 bp, Homo sapiens
gatgacatatacgtt

SEQ ID NO: 1207248 - DNA, 15 bp, Homo sapiens
tgatgacatatacgt

SEQ ID NO: 1207249 - DNA, 15 bp, Homo sapiens
atgatgacatatacg

SEQ ID NO: 1207250 - DNA, 15 bp, Homo sapiens
gatgatgacatatac

SEQ ID NO: 1207251 - DNA, 15 bp, Homo sapiens
agatgatgacatata

SEQ ID NO: 1207252 - DNA, 15 bp, Homo sapiens
aagatgatgacatat

SEQ ID NO: 1207253 - DNA, 15 bp, Homo sapiens
aaagatgatgacata

SEQ ID NO: 1207254 - DNA, 15 bp, Homo sapiens
aaaagatgatgacat

SEQ ID NO: 1207255 - DNA, 15 bp, Homo sapiens
caaaagatgatgaca

SEQ ID NO: 1207256 - DNA, 15 bp, Homo sapiens
gcaaaagatgatgac

SEQ ID NO: 1207257 - DNA, 15 bp, Homo sapiens
ggcaaaagatgatga

SEQ ID NO: 1207258 - DNA, 15 bp, Homo sapiens
aggcaaaagatgatg

SEQ ID NO: 1207259 - DNA, 15 bp, Homo sapiens
gaggcaaaagatgat

SEQ ID NO: 1207260 - DNA, 15 bp, Homo sapiens
cgaggcaaaagatga

SEQ ID NO: 1207261 - DNA, 15 bp, Homo sapiens
gcgaggcaaaagatg

SEQ ID NO: 1207262 - DNA, 15 bp, Homo sapiens
agcgaggcaaaagat

SEQ ID NO: 1207263 - DNA, 15 bp, Homo sapiens
tagcgaggcaaaaga

SEQ ID NO: 1207264 - DNA, 15 bp, Homo sapiens
ttagcgaggcaaaag

SEQ ID NO: 1207265 - DNA, 15 bp, Homo sapiens
attagcgaggcaaaa

SEQ ID NO: 1207266 - DNA, 15 bp, Homo sapiens
cattagcgaggcaaa

SEQ ID NO: 1207267 - DNA, 15 bp, Homo sapiens
tcattagcgaggcaa

SEQ ID NO: 1207268 - DNA, 15 bp, Homo sapiens
ttcattagcgaggca

SEQ ID NO: 1207269 - DNA, 15 bp, Homo sapiens
cttcattagcgaggc

SEQ ID NO: 1207270 - DNA, 15 bp, Homo sapiens
tcttcattagcgagg

SEQ ID NO: 1207271 - DNA, 15 bp, Homo sapiens
atcttcattagcgag

SEQ ID NO: 1207272 - DNA, 15 bp, Homo sapiens
aatcttcattagcga

SEQ ID NO: 1207273 - DNA, 15 bp, Homo sapiens
aaatcttcattagcg

SEQ ID NO: 1207274 - DNA, 15 bp, Homo sapiens
caaatcttcattagc

SEQ ID NO: 1207275 - DNA, 15 bp, Homo sapiens
tcaaatcttcattag

SEQ ID NO: 1207276 - DNA, 15 bp, Homo sapiens
atcaaatcttcatta

SEQ ID NO: 1207277 - DNA, 15 bp, Homo sapiens
tatcaaatcttcatt

SEQ ID NO: 1207278 - DNA, 15 bp, Homo sapiens
ctatcaaatcttcat

SEQ ID NO: 1207279 - DNA, 15 bp, Homo sapiens
tctatcaaatcttca

SEQ ID NO: 1207280 - DNA, 15 bp, Homo sapiens
atctatcaaatcttc

SEQ ID NO: 1207281 - DNA, 15 bp, Homo sapiens
tatctatcaaatctt

SEQ ID NO: 1207282 - DNA, 15 bp, Homo sapiens
ttatctatcaaatct

SEQ ID NO: 1207283 - DNA, 15 bp, Homo sapiens
attatctatcaaatc

SEQ ID NO: 1207284 - DNA, 15 bp, Homo sapiens
tattatctatcaaat

SEQ ID NO: 1207285 - DNA, 15 bp, Homo sapiens
gtattatctatcaaa

SEQ ID NO: 1207286 - DNA, 15 bp, Homo sapiens
agtattatctatcaa

SEQ ID NO: 1207287 - DNA, 15 bp, Homo sapiens
cagtattatctatca

SEQ ID NO: 1207288 - DNA, 15 bp, Homo sapiens
gcagtattatctatc

SEQ ID NO: 1207289 - DNA, 15 bp, Homo sapiens
agcagtattatctat

SEQ ID NO: 1207290 - DNA, 15 bp, Homo sapiens
aagcagtattatcta

SEQ ID NO: 1207291 - DNA, 15 bp, Homo sapiens
caagcagtattatct

SEQ ID NO: 1207292 - DNA, 15 bp, Homo sapiens
tcaagcagtattatc

SEQ ID NO: 1207293 - DNA, 15 bp, Homo sapiens
ctcaagcagtattat

SEQ ID NO: 1207294 - DNA, 15 bp, Homo sapiens
tctcaagcagtatta

SEQ ID NO: 1207295 - DNA, 15 bp, Homo sapiens
atctcaagcagtatt

SEQ ID NO: 1207296 - DNA, 15 bp, Homo sapiens
tatctcaagcagtat

SEQ ID NO: 1207297 - DNA, 15 bp, Homo sapiens
ttatctcaagcagta

SEQ ID NO: 1207298 - DNA, 15 bp, Homo sapiens
cttatctcaagcagt

SEQ ID NO: 1207299 - DNA, 15 bp, Homo sapiens
tcttatctcaagcag

SEQ ID NO: 1207300 - DNA, 15 bp, Homo sapiens
gtcttatctcaagca

SEQ ID NO: 1207301 - DNA, 15 bp, Homo sapiens
tgtcttatctcaagc

SEQ ID NO: 1207302 - DNA, 15 bp, Homo sapiens
gtgtcttatctcaag

SEQ ID NO: 1207303 - DNA, 15 bp, Homo sapiens
ggtgtcttatctcaa

SEQ ID NO: 1207304 - DNA, 15 bp, Homo sapiens
tggtgtcttatctca

SEQ ID NO: 1207305 - DNA, 15 bp, Homo sapiens
ttggtgtcttatctc

SEQ ID NO: 1207306 - DNA, 15 bp, Homo sapiens
attggtgtcttatct

SEQ ID NO: 1207307 - DNA, 15 bp, Homo sapiens
cattggtgtcttatc

SEQ ID NO: 1207308 - DNA, 15 bp, Homo sapiens
tcattggtgtcttat

SEQ ID NO: 1207309 - DNA, 15 bp, Homo sapiens
ttcattggtgtctta

SEQ ID NO: 1207310 - DNA, 15 bp, Homo sapiens
tttcattggtgtctt

SEQ ID NO: 1207311 - DNA, 15 bp, Homo sapiens
atttcattggtgtct

SEQ ID NO: 1207312 - DNA, 15 bp, Homo sapiens
aatttcattggtgtc

SEQ ID NO: 1207313 - DNA, 15 bp, Homo sapiens
caatttcattggtgt

SEQ ID NO: 1207314 - DNA, 15 bp, Homo sapiens
acaatttcattggtg

SEQ ID NO: 1207315 - DNA, 15 bp, Homo sapiens
gacaatttcattggt

SEQ ID NO: 1207316 - DNA, 15 bp, Homo sapiens
tgacaatttcattgg

SEQ ID NO: 1207317 - DNA, 15 bp, Homo sapiens
atgacaatttcattg

SEQ ID NO: 1207318 - DNA, 15 bp, Homo sapiens
aatgacaatttcatt

SEQ ID NO: 1207319 - DNA, 15 bp, Homo sapiens
aaatgacaatttcat

SEQ ID NO: 1207320 - DNA, 15 bp, Homo sapiens
aaaatgacaatttca

SEQ ID NO: 1207321 - DNA, 15 bp, Homo sapiens
taaaatgacaatttc

SEQ ID NO: 1207322 - DNA, 15 bp, Homo sapiens
ataaaatgacaattt

SEQ ID NO: 1207323 - DNA, 15 bp, Homo sapiens
cataaaatgacaatt

SEQ ID NO: 1207324 - DNA, 15 bp, Homo sapiens
gcataaaatgacaat

SEQ ID NO: 1207325 - DNA, 15 bp, Homo sapiens
tgcataaaatgacaa

SEQ ID NO: 1207326 - DNA, 15 bp, Homo sapiens
ttgcataaaatgaca

SEQ ID NO: 1207327 - DNA, 15 bp, Homo sapiens
attgcataaaatgac

SEQ ID NO: 1207328 - DNA, 15 bp, Homo sapiens
tattgcataaaatga

SEQ ID NO: 1207329 - DNA, 15 bp, Homo sapiens
gtattgcataaaatg

SEQ ID NO: 1207330 - DNA, 15 bp, Homo sapiens
agtattgcataaaat

SEQ ID NO: 1207331 - DNA, 15 bp, Homo sapiens
tagtattgcataaaa

SEQ ID NO: 1207332 - DNA, 15 bp, Homo sapiens
atagtattgcataaa

SEQ ID NO: 1207333 - DNA, 15 bp, Homo sapiens
catagtattgcataa

SEQ ID NO: 1207334 - DNA, 15 bp, Homo sapiens
ccatagtattgcata

SEQ ID NO: 1207335 - DNA, 15 bp, Homo sapiens
tccatagtattgcat

SEQ ID NO: 1207336 - DNA, 15 bp, Homo sapiens
ctccatagtattgca

SEQ ID NO: 1207337 - DNA, 15 bp, Homo sapiens
actccatagtattgc

SEQ ID NO: 1207338 - DNA, 15 bp, Homo sapiens
tactccatagtattg

SEQ ID NO: 1207339 - DNA, 15 bp, Homo sapiens
ttactccatagtatt

SEQ ID NO: 1207340 - DNA, 15 bp, Homo sapiens
attactccatagtat

SEQ ID NO: 1207341 - DNA, 15 bp, Homo sapiens
aattactccatagta

SEQ ID NO: 1207342 - DNA, 15 bp, Homo sapiens
gaattactccatagt

SEQ ID NO: 1207343 - DNA, 15 bp, Homo sapiens
tgaattactccatag

SEQ ID NO: 1207344 - DNA, 15 bp, Homo sapiens
atgaattactccata

SEQ ID NO: 1207345 - DNA, 15 bp, Homo sapiens
tatgaattactccat

SEQ ID NO: 1207346 - DNA, 15 bp, Homo sapiens
ttatgaattactcca

SEQ ID NO: 1207347 - DNA, 15 bp, Homo sapiens
tttatgaattactcc

SEQ ID NO: 1207348 - DNA, 15 bp, Homo sapiens
ttttatgaattactc

SEQ ID NO: 1207349 - DNA, 15 bp, Homo sapiens
attttatgaattact

SEQ ID NO: 1207350 - DNA, 15 bp, Homo sapiens
aattttatgaattac

SEQ ID NO: 1207351 - DNA, 15 bp, Homo sapiens
taattttatgaatta

SEQ ID NO: 1207352 - DNA, 15 bp, Homo sapiens
ataattttatgaatt

SEQ ID NO: 1207353 - DNA, 15 bp, Homo sapiens
aataattttatgaat

SEQ ID NO: 1207354 - DNA, 15 bp, Homo sapiens
aaataattttatgaa

SEQ ID NO: 1207355 - DNA, 15 bp, Homo sapiens
aaaataattttatga

SEQ ID NO: 1207356 - DNA, 15 bp, Homo sapiens
taaaataattttatg

SEQ ID NO: 1207357 - DNA, 15 bp, Homo sapiens
gtaaaataattttat

SEQ ID NO: 1207358 - DNA, 15 bp, Homo sapiens
agtaaaataatttta

SEQ ID NO: 1207359 - DNA, 15 bp, Homo sapiens
gagtaaaataatttt

SEQ ID NO: 1207360 - DNA, 15 bp, Homo sapiens
ggagtaaaataattt

SEQ ID NO: 1207361 - DNA, 15 bp, Homo sapiens
aggagtaaaataatt

SEQ ID NO: 1207362 - DNA, 15 bp, Homo sapiens
aaggagtaaaataat

SEQ ID NO: 1207363 - DNA, 15 bp, Homo sapiens
aaaggagtaaaataa

SEQ ID NO: 1207364 - DNA, 15 bp, Homo sapiens
taaaggagtaaaata

SEQ ID NO: 1207365 - DNA, 15 bp, Homo sapiens
ataaaggagtaaaat

SEQ ID NO: 1207366 - DNA, 15 bp, Homo sapiens
aataaaggagtaaaa

SEQ ID NO: 1207367 - DNA, 15 bp, Homo sapiens
gaataaaggagtaaa

SEQ ID NO: 1207368 - DNA, 15 bp, Homo sapiens
tgaataaaggagtaa

SEQ ID NO: 1207369 - DNA, 15 bp, Homo sapiens
ttgaataaaggagta

SEQ ID NO: 1207370 - DNA, 15 bp, Homo sapiens
gttgaataaaggagt

SEQ ID NO: 1207371 - DNA, 15 bp, Homo sapiens
tgttgaataaaggag

SEQ ID NO: 1207372 - DNA, 15 bp, Homo sapiens
ttgttgaataaagga

SEQ ID NO: 1207373 - DNA, 15 bp, Homo sapiens
tttgttgaataaagg

SEQ ID NO: 1207374 - DNA, 15 bp, Homo sapiens
atttgttgaataaag

SEQ ID NO: 1207375 - DNA, 15 bp, Homo sapiens
tatttgttgaataaa

SEQ ID NO: 1207376 - DNA, 15 bp, Homo sapiens
atatttgttgaataa

SEQ ID NO: 1207377 - DNA, 15 bp, Homo sapiens
aatatttgttgaata

SEQ ID NO: 1207378 - DNA, 15 bp, Homo sapiens
aaatatttgttgaat

SEQ ID NO: 1207379 - DNA, 15 bp, Homo sapiens
taaatatttgttgaa

SEQ ID NO: 1207380 - DNA, 15 bp, Homo sapiens
ataaatatttgttga

SEQ ID NO: 1207381 - DNA, 15 bp, Homo sapiens
aataaatatttgttg

SEQ ID NO: 1207382 - DNA, 15 bp, Homo sapiens
taataaatatttgtt

SEQ ID NO: 1207383 - DNA, 15 bp, Homo sapiens
ttaataaatatttgt

SEQ ID NO: 1207384 - DNA, 15 bp, Homo sapiens
cttaataaatatttg

SEQ ID NO: 1207385 - DNA, 15 bp, Homo sapiens
gcttaataaatattt

SEQ ID NO: 1207386 - DNA, 15 bp, Homo sapiens
tgcttaataaatatt

SEQ ID NO: 1207387 - DNA, 15 bp, Homo sapiens
gtgcttaataaatat

SEQ ID NO: 1207388 - DNA, 15 bp, Homo sapiens
gggtgcttaataaat

SEQ ID NO: 1207389 - DNA, 15 bp, Homo sapiens
tgggtgcttaataaa

SEQ ID NO: 1207390 - DNA, 15 bp, Homo sapiens
gtgggtgcttaataa

SEQ ID NO: 1207391 - DNA, 15 bp, Homo sapiens
agtgggtgcttaata

SEQ ID NO: 1207392 - DNA, 15 bp, Homo sapiens
tagtgggtgcttaat

SEQ ID NO: 1207393 - DNA, 15 bp, Homo sapiens
gtagtgggtgcttaa

SEQ ID NO: 1207394 - DNA, 15 bp, Homo sapiens
cgtagtgggtgctta

SEQ ID NO: 1207395 - DNA, 15 bp, Homo sapiens
acgtagtgggtgctt

SEQ ID NO: 1207396 - DNA, 15 bp, Homo sapiens
cacgtagtgggtgct

SEQ ID NO: 1207397 - DNA, 15 bp, Homo sapiens
tcacgtagtgggtgc

SEQ ID NO: 1207398 - DNA, 15 bp, Homo sapiens
gtcacgtagtgggtg

SEQ ID NO: 1207399 - DNA, 15 bp, Homo sapiens
ggtcacgtagtgggt

SEQ ID NO: 1207400 - DNA, 15 bp, Homo sapiens
cggtcacgtagtggg

SEQ ID NO: 1207401 - DNA, 15 bp, Homo sapiens
tcggtcacgtagtgg

SEQ ID NO: 1207402 - DNA, 15 bp, Homo sapiens
gtcggtcacgtagtg

SEQ ID NO: 1207403 - DNA, 15 bp, Homo sapiens
ggtcggtcacgtagt

SEQ ID NO: 1207404 - DNA, 15 bp, Homo sapiens
gggtcggtcacgtag

SEQ ID NO: 1207405 - DNA, 15 bp, Homo sapiens
agggtcggtcacgta

SEQ ID NO: 1207406 - DNA, 15 bp, Homo sapiens
cagggtcggtcacgt

SEQ ID NO: 1207407 - DNA, 15 bp, Homo sapiens
acagggtcggtcacg

SEQ ID NO: 1207408 - DNA, 15 bp, Homo sapiens
aacagggtcggtcac

SEQ ID NO: 1207409 - DNA, 15 bp, Homo sapiens
gaacagggtcggtca

SEQ ID NO: 1207410 - DNA, 15 bp, Homo sapiens
agaacagggtcggtc

SEQ ID NO: 1207411 - DNA, 15 bp, Homo sapiens
tagaacagggtcggt

SEQ ID NO: 1207412 - DNA, 15 bp, Homo sapiens
ctagaacagggtcgg

SEQ ID NO: 1207413 - DNA, 15 bp, Homo sapiens
cctagaacagggtcg

SEQ ID NO: 1207414 - DNA, 15 bp, Homo sapiens
tcacctagaacaggg

SEQ ID NO: 1207415 - DNA, 15 bp, Homo sapiens
atcacctagaacagg

SEQ ID NO: 1207416 - DNA, 15 bp, Homo sapiens
tatcacctagaacag

SEQ ID NO: 1207417 - DNA, 15 bp, Homo sapiens
ttatcacctagaaca

SEQ ID NO: 1207418 - DNA, 15 bp, Homo sapiens
cttatcacctagaac

SEQ ID NO: 1207419 - DNA, 15 bp, Homo sapiens
ccttatcacctagaa

SEQ ID NO: 1207420 - DNA, 15 bp, Homo sapiens
tccttatcacctaga

SEQ ID NO: 1207421 - DNA, 15 bp, Homo sapiens
atccttatcacctag

SEQ ID NO: 1207422 - DNA, 15 bp, Homo sapiens
tatccttatcaccta

SEQ ID NO: 1207423 - DNA, 15 bp, Homo sapiens
gtatccttatcacct

SEQ ID NO: 1207424 - DNA, 15 bp, Homo sapiens
tgtatccttatcacc

SEQ ID NO: 1207425 - DNA, 15 bp, Homo sapiens
ctgtatccttatcac

SEQ ID NO: 1207426 - DNA, 15 bp, Homo sapiens
actgtatccttatca

SEQ ID NO: 1207427 - DNA, 15 bp, Homo sapiens
tactgtatccttatc

SEQ ID NO: 1207428 - DNA, 15 bp, Homo sapiens
ctactgtatccttat

SEQ ID NO: 1207429 - DNA, 15 bp, Homo sapiens
tctactgtatcctta

SEQ ID NO: 1207430 - DNA, 15 bp, Homo sapiens
ttctactgtatcctt

SEQ ID NO: 1207431 - DNA, 15 bp, Homo sapiens
attctactgtatcct

SEQ ID NO: 1207432 - DNA, 15 bp, Homo sapiens
tattctactgtatcc

SEQ ID NO: 1207433 - DNA, 15 bp, Homo sapiens
gtattctactgtatc

SEQ ID NO: 1207434 - DNA, 15 bp, Homo sapiens
tgtattctactgtat

SEQ ID NO: 1207435 - DNA, 15 bp, Homo sapiens
ctgtattctactgta

SEQ ID NO: 1207436 - DNA, 15 bp, Homo sapiens
actgtattctactgt

SEQ ID NO: 1207437 - DNA, 15 bp, Homo sapiens
gactgtattctactg

SEQ ID NO: 1207438 - DNA, 15 bp, Homo sapiens
ggactgtattctact

SEQ ID NO: 1207439 - DNA, 15 bp, Homo sapiens
gggactgtattctac

SEQ ID NO: 1207440 - DNA, 15 bp, Homo sapiens
agggactgtattcta

SEQ ID NO: 1207441 - DNA, 15 bp, Homo sapiens
cagggactgtattct

SEQ ID NO: 1207442 - DNA, 15 bp, Homo sapiens
gcagggactgtattc

SEQ ID NO: 1207443 - DNA, 15 bp, Homo sapiens
ggcagggactgtatt

SEQ ID NO: 1207444 - DNA, 15 bp, Homo sapiens
gggcagggactgtat

SEQ ID NO: 1207445 - DNA, 15 bp, Homo sapiens
agggcagggactgta

SEQ ID NO: 1207446 - DNA, 15 bp, Homo sapiens
aagggcagggactgt

SEQ ID NO: 1207447 - DNA, 15 bp, Homo sapiens
caagggcagggactg

SEQ ID NO: 1207448 - DNA, 15 bp, Homo sapiens
acaagggcagggact

SEQ ID NO: 1207449 - DNA, 15 bp, Homo sapiens
tacaagggcagggac

SEQ ID NO: 1207450 - DNA, 15 bp, Homo sapiens
ctacaagggcaggga

SEQ ID NO: 1207451 - DNA, 15 bp, Homo sapiens
tctacaagggcaggg

SEQ ID NO: 1207452 - DNA, 15 bp, Homo sapiens
ttctacaagggcagg

SEQ ID NO: 1207453 - DNA, 15 bp, Homo sapiens
gttctacaagggcag

SEQ ID NO: 1207454 - DNA, 15 bp, Homo sapiens
agttctacaagggca

SEQ ID NO: 1207455 - DNA, 15 bp, Homo sapiens
aagttctacaagggc

SEQ ID NO: 1207456 - DNA, 15 bp, Homo sapiens
caagttctacaaggg

SEQ ID NO: 1207457 - DNA, 15 bp, Homo sapiens
gcaagttctacaagg

SEQ ID NO: 1207458 - DNA, 15 bp, Homo sapiens
tgcaagttctacaag

SEQ ID NO: 1207459 - DNA, 15 bp, Homo sapiens
ctgcaagttctacaa

SEQ ID NO: 1207460 - DNA, 15 bp, Homo sapiens
gctgcaagttctaca

SEQ ID NO: 1207461 - DNA, 15 bp, Homo sapiens
ggctgcaagttctac

SEQ ID NO: 1207462 - DNA, 15 bp, Homo sapiens
gggctgcaagttcta

SEQ ID NO: 1207463 - DNA, 15 bp, Homo sapiens
tgggctgcaagttct

SEQ ID NO: 1207464 - DNA, 15 bp, Homo sapiens
gtgggctgcaagttc

SEQ ID NO: 1207465 - DNA, 15 bp, Homo sapiens
agtgggctgcaagtt

SEQ ID NO: 1207466 - DNA, 15 bp, Homo sapiens
cagtgggctgcaagt

SEQ ID NO: 1207467 - DNA, 15 bp, Homo sapiens
acagtgggctgcaag

SEQ ID NO: 1207468 - DNA, 15 bp, Homo sapiens
cacagtgggctgcaa

SEQ ID NO: 1207469 - DNA, 15 bp, Homo sapiens
ccacagtgggctgca

SEQ ID NO: 1207470 - DNA, 15 bp, Homo sapiens
tccacagtgggctgc

SEQ ID NO: 1207471 - DNA, 15 bp, Homo sapiens
atccacagtgggctg

SEQ ID NO: 1207472 - DNA, 15 bp, Homo sapiens
aatccacagtgggct

SEQ ID NO: 1207473 - DNA, 15 bp, Homo sapiens
gaatccacagtgggc

SEQ ID NO: 1207474 - DNA, 15 bp, Homo sapiens
tgaatccacagtggg

SEQ ID NO: 1207475 - DNA, 15 bp, Homo sapiens
atgaatccacagtgg

SEQ ID NO: 1207476 - DNA, 15 bp, Homo sapiens
aatgaatccacagtg

SEQ ID NO: 1207477 - DNA, 15 bp, Homo sapiens
aaatgaatccacagt

SEQ ID NO: 1207478 - DNA, 15 bp, Homo sapiens
gaaatgaatccacag

SEQ ID NO: 1207479 - DNA, 15 bp, Homo sapiens
tgaaatgaatccaca

SEQ ID NO: 1207480 - DNA, 15 bp, Homo sapiens
ctgaaatgaatccac

SEQ ID NO: 1207481 - DNA, 15 bp, Homo sapiens
actgaaatgaatcca

SEQ ID NO: 1207482 - DNA, 15 bp, Homo sapiens
tactgaaatgaatcc

SEQ ID NO: 1207483 - DNA, 15 bp, Homo sapiens
atactgaaatgaatc

SEQ ID NO: 1207484 - DNA, 15 bp, Homo sapiens
tatactgaaatgaat

SEQ ID NO: 1207485 - DNA, 15 bp, Homo sapiens
ttatactgaaatgaa

SEQ ID NO: 1207486 - DNA, 15 bp, Homo sapiens
tttatactgaaatga

SEQ ID NO: 1207487 - DNA, 15 bp, Homo sapiens
ctttatactgaaatg

SEQ ID NO: 1207488 - DNA, 15 bp, Homo sapiens
actttatactgaaat

SEQ ID NO: 1207489 - DNA, 15 bp, Homo sapiens
cactttatactgaaa

SEQ ID NO: 1207490 - DNA, 15 bp, Homo sapiens
acactttatactgaa

SEQ ID NO: 1207491 - DNA, 15 bp, Homo sapiens
tacactttatactga

SEQ ID NO: 1207492 - DNA, 15 bp, Homo sapiens
ctacactttatactg

SEQ ID NO: 1207493 - DNA, 15 bp, Homo sapiens
cctacactttatact

SEQ ID NO: 1207494 - DNA, 15 bp, Homo sapiens
gcctacactttatac

SEQ ID NO: 1207495 - DNA, 15 bp, Homo sapiens
tgcctacactttata

SEQ ID NO: 1207496 - DNA, 15 bp, Homo sapiens
atgcctacactttat

SEQ ID NO: 1207497 - DNA, 15 bp, Homo sapiens
aatgcctacacttta

SEQ ID NO: 1207498 - DNA, 15 bp, Homo sapiens
caatgcctacacttt

SEQ ID NO: 1207499 - DNA, 15 bp, Homo sapiens
acaatgcctacactt

SEQ ID NO: 1207500 - DNA, 15 bp, Homo sapiens
gacaatgcctacact

SEQ ID NO: 1207501 - DNA, 15 bp, Homo sapiens
ggacaatgcctacac

SEQ ID NO: 1207502 - DNA, 15 bp, Homo sapiens
gggacaatgcctaca

SEQ ID NO: 1207503 - DNA, 15 bp, Homo sapiens
tgggacaatgcctac

SEQ ID NO: 1207504 - DNA, 15 bp, Homo sapiens
ttgggacaatgccta

SEQ ID NO: 1207505 - DNA, 15 bp, Homo sapiens
tttgggacaatgcct

SEQ ID NO: 1207506 - DNA, 15 bp, Homo sapiens
ctttgggacaatgcc

SEQ ID NO: 1207507 - DNA, 15 bp, Homo sapiens
gctttgggacaatgc

SEQ ID NO: 1207508 - DNA, 15 bp, Homo sapiens
ggctttgggacaatg

SEQ ID NO: 1207509 - DNA, 15 bp, Homo sapiens
cggctttgggacaat

SEQ ID NO: 1207510 - DNA, 15 bp, Homo sapiens
acggctttgggacaa

SEQ ID NO: 1207511 - DNA, 15 bp, Homo sapiens
tacggctttgggaca

SEQ ID NO: 1207512 - DNA, 15 bp, Homo sapiens
ttacggctttgggac

SEQ ID NO: 1207513 - DNA, 15 bp, Homo sapiens
attacggctttggga

SEQ ID NO: 1207514 - DNA, 15 bp, Homo sapiens
aattacggctttggg

SEQ ID NO: 1207515 - DNA, 15 bp, Homo sapiens
taattacggctttgg

SEQ ID NO: 1207516 - DNA, 15 bp, Homo sapiens
ctaattacggctttg

SEQ ID NO: 1207517 - DNA, 15 bp, Homo sapiens
cctaattacggcttt

SEQ ID NO: 1207518 - DNA, 15 bp, Homo sapiens
gcctaattacggctt

SEQ ID NO: 1207519 - DNA, 15 bp, Homo sapiens
tgcctaattacggct

SEQ ID NO: 1207520 - DNA, 15 bp, Homo sapiens
atgcctaattacggc

SEQ ID NO: 1207521 - DNA, 15 bp, Homo sapiens
gatgcctaattacgg

SEQ ID NO: 1207522 - DNA, 15 bp, Homo sapiens
agatgcctaattacg

SEQ ID NO: 1207523 - DNA, 15 bp, Homo sapiens
gagatgcctaattac

SEQ ID NO: 1207524 - DNA, 15 bp, Homo sapiens
tgagatgcctaatta

SEQ ID NO: 1207525 - DNA, 15 bp, Homo sapiens
atgagatgcctaatt

SEQ ID NO: 1207526 - DNA, 15 bp, Homo sapiens
gatgagatgcctaat

SEQ ID NO: 1207527 - DNA, 15 bp, Homo sapiens
tgatgagatgcctaa

SEQ ID NO: 1207528 - DNA, 15 bp, Homo sapiens
ctgatgagatgccta

SEQ ID NO: 1207529 - DNA, 15 bp, Homo sapiens
tctgatgagatgcct

SEQ ID NO: 1207530 - DNA, 15 bp, Homo sapiens
ttctgatgagatgcc

SEQ ID NO: 1207531 - DNA, 15 bp, Homo sapiens
tttctgatgagatgc

SEQ ID NO: 1207532 - DNA, 15 bp, Homo sapiens
atttctgatgagatg

SEQ ID NO: 1207533 - DNA, 15 bp, Homo sapiens
gatttctgatgagat

SEQ ID NO: 1207534 - DNA, 15 bp, Homo sapiens
tgatttctgatgaga

SEQ ID NO: 1207535 - DNA, 15 bp, Homo sapiens
ctgatttctgatgag

SEQ ID NO: 1207536 - DNA, 15 bp, Homo sapiens
gctgatttctgatga

SEQ ID NO: 1207537 - DNA, 15 bp, Homo sapiens
ggctgatttctgatg

SEQ ID NO: 1207538 - DNA, 15 bp, Homo sapiens
gggctgatttctgat

SEQ ID NO: 1207539 - DNA, 15 bp, Homo sapiens
tgggctgatttctga

SEQ ID NO: 1207540 - DNA, 15 bp, Homo sapiens
gtgggctgatttctg

SEQ ID NO: 1207541 - DNA, 15 bp, Homo sapiens
agtgggctgatttct

SEQ ID NO: 1207542 - DNA, 15 bp, Homo sapiens
gagtgggctgatttc

SEQ ID NO: 1207543 - DNA, 15 bp, Homo sapiens
ggagtgggctgattt

SEQ ID NO: 1207544 - DNA, 15 bp, Homo sapiens
gggagtgggctgatt

SEQ ID NO: 1207545 - DNA, 15 bp, Homo sapiens
ggggagtgggctgat

SEQ ID NO: 1207546 - DNA, 15 bp, Homo sapiens
gggggagtgggctga

SEQ ID NO: 1207547 - DNA, 15 bp, Homo sapiens
tgggggagtgggctg

SEQ ID NO: 1207548 - DNA, 15 bp, Homo sapiens
gtgggggagtgggct

SEQ ID NO: 1207549 - DNA, 15 bp, Homo sapiens
ggtgggggagtgggc

SEQ ID NO: 1207550 - DNA, 15 bp, Homo sapiens
gggtgggggagtggg

SEQ ID NO: 1207551 - DNA, 15 bp, Homo sapiens
ggggtgggggagtgg

SEQ ID NO: 1207552 - DNA, 15 bp, Homo sapiens
tggggtgggggagtg

SEQ ID NO: 1207553 - DNA, 15 bp, Homo sapiens
ttggggtgggggagt

SEQ ID NO: 1207554 - DNA, 15 bp, Homo sapiens
attggggtgggggag

SEQ ID NO: 1207555 - DNA, 15 bp, Homo sapiens
gattggggtggggga

SEQ ID NO: 1207556 - DNA, 15 bp, Homo sapiens
tgattggggtggggg

SEQ ID NO: 1207557 - DNA, 15 bp, Homo sapiens
ttgattggggtgggg

SEQ ID NO: 1207558 - DNA, 15 bp, Homo sapiens
cttgattggggtggg

SEQ ID NO: 1207559 - DNA, 15 bp, Homo sapiens
tcttgattggggtgg

SEQ ID NO: 1207560 - DNA, 15 bp, Homo sapiens
ctcttgattggggtg

SEQ ID NO: 1207561 - DNA, 15 bp, Homo sapiens
gctcttgattggggt

SEQ ID NO: 1207562 - DNA, 15 bp, Homo sapiens
ggctcttgattgggg

SEQ ID NO: 1207563 - DNA, 15 bp, Homo sapiens
gggctcttgattggg

SEQ ID NO: 1207564 - DNA, 15 bp, Homo sapiens
ggggctcttgattgg

SEQ ID NO: 1207565 - DNA, 15 bp, Homo sapiens
aggggctcttgattg

SEQ ID NO: 1207566 - DNA, 15 bp, Homo sapiens
gaggggctcttgatt

SEQ ID NO: 1207567 - DNA, 15 bp, Homo sapiens
ggaggggctcttgat

SEQ ID NO: 1207568 - DNA, 15 bp, Homo sapiens
aggaggggctcttga

SEQ ID NO: 1207569 - DNA, 15 bp, Homo sapiens
caggaggggctcttg

SEQ ID NO: 1207570 - DNA, 15 bp, Homo sapiens
gcaggaggggctctt

SEQ ID NO: 1207571 - DNA, 15 bp, Homo sapiens
cagcaggaggggctc

SEQ ID NO: 1207572 - DNA, 15 bp, Homo sapiens
acagcaggaggggct

SEQ ID NO: 1207573 - DNA, 15 bp, Homo sapiens
gacagcaggaggggc

SEQ ID NO: 1207574 - DNA, 15 bp, Homo sapiens
ggacagcaggagggg

SEQ ID NO: 1207575 - DNA, 15 bp, Homo sapiens
aggacagcaggaggg

SEQ ID NO: 1207576 - DNA, 15 bp, Homo sapiens
caggacagcaggagg

SEQ ID NO: 1207577 - DNA, 15 bp, Homo sapiens
gcaggacagcaggag

SEQ ID NO: 1207578 - DNA, 15 bp, Homo sapiens
agcaggacagcagga

SEQ ID NO: 1207579 - DNA, 15 bp, Homo sapiens
cagcaggacagcagg

SEQ ID NO: 1207580 - DNA, 15 bp, Homo sapiens
acagcaggacagcag

SEQ ID NO: 1207581 - DNA, 15 bp, Homo sapiens
tacagcaggacagca

SEQ ID NO: 1207582 - DNA, 15 bp, Homo sapiens
atacagcaggacagc

SEQ ID NO: 1207583 - DNA, 15 bp, Homo sapiens
catacagcaggacag

SEQ ID NO: 1207584 - DNA, 15 bp, Homo sapiens
acatacagcaggaca

SEQ ID NO: 1207585 - DNA, 15 bp, Homo sapiens
cacatacagcaggac

SEQ ID NO: 1207586 - DNA, 15 bp, Homo sapiens
gcacatacagcagga

SEQ ID NO: 1207587 - DNA, 15 bp, Homo sapiens
tgcacatacagcagg

SEQ ID NO: 1207588 - DNA, 15 bp, Homo sapiens
atgcacatacagcag

SEQ ID NO: 1207589 - DNA, 15 bp, Homo sapiens
catgcacatacagca

SEQ ID NO: 1207590 - DNA, 15 bp, Homo sapiens
tcatgcacatacagc

SEQ ID NO: 1207591 - DNA, 15 bp, Homo sapiens
ttcatgcacatacag

SEQ ID NO: 1207592 - DNA, 15 bp, Homo sapiens
tttcatgcacataca

SEQ ID NO: 1207593 - DNA, 15 bp, Homo sapiens
gtttcatgcacatac

SEQ ID NO: 1207594 - DNA, 15 bp, Homo sapiens
tgtttcatgcacata

SEQ ID NO: 1207595 - DNA, 15 bp, Homo sapiens
gtgtttcatgcacat

SEQ ID NO: 1207596 - DNA, 15 bp, Homo sapiens
tgtgtttcatgcaca

SEQ ID NO: 1207597 - DNA, 15 bp, Homo sapiens
ttgtgtttcatgcac

SEQ ID NO: 1207598 - DNA, 15 bp, Homo sapiens
gttgtgtttcatgca

SEQ ID NO: 1207599 - DNA, 15 bp, Homo sapiens
tgttgtgtttcatgc

SEQ ID NO: 1207600 - DNA, 15 bp, Homo sapiens
atgttgtgtttcatg

SEQ ID NO: 1207601 - DNA, 15 bp, Homo sapiens
aatgttgtgtttcat

SEQ ID NO: 1207602 - DNA, 15 bp, Homo sapiens
caatgttgtgtttca

SEQ ID NO: 1207603 - DNA, 15 bp, Homo sapiens
ccaatgttgtgtttc

SEQ ID NO: 1207604 - DNA, 15 bp, Homo sapiens
gccaatgttgtgttt

SEQ ID NO: 1207605 - DNA, 15 bp, Homo sapiens
ggccaatgttgtgtt

SEQ ID NO: 1207606 - DNA, 15 bp, Homo sapiens
aggccaatgttgtgt

SEQ ID NO: 1207607 - DNA, 15 bp, Homo sapiens
aaggccaatgttgtg

SEQ ID NO: 1207608 - DNA, 15 bp, Homo sapiens
aaaggccaatgttgt

SEQ ID NO: 1207609 - DNA, 15 bp, Homo sapiens
caaaggccaatgttg

SEQ ID NO: 1207610 - DNA, 15 bp, Homo sapiens
ccaaaggccaatgtt

SEQ ID NO: 1207611 - DNA, 15 bp, Homo sapiens
cccaaaggccaatgt

SEQ ID NO: 1207612 - DNA, 15 bp, Homo sapiens
ccccaaaggccaatg

SEQ ID NO: 1207613 - DNA, 15 bp, Homo sapiens
accccaaaggccaat

SEQ ID NO: 1207614 - DNA, 15 bp, Homo sapiens
caccccaaaggccaa

SEQ ID NO: 1207615 - DNA, 15 bp, Homo sapiens
gcaccccaaaggcca

SEQ ID NO: 1207616 - DNA, 15 bp, Homo sapiens
tgcaccccaaaggcc

SEQ ID NO: 1207617 - DNA, 15 bp, Homo sapiens
gtgcaccccaaaggc

SEQ ID NO: 1207618 - DNA, 15 bp, Homo sapiens
agtgcaccccaaagg

SEQ ID NO: 1207619 - DNA, 15 bp, Homo sapiens
aagtgcaccccaaag

SEQ ID NO: 1207620 - DNA, 15 bp, Homo sapiens
gaagtgcaccccaaa

SEQ ID NO: 1207621 - DNA, 15 bp, Homo sapiens
agaagtgcaccccaa

SEQ ID NO: 1207622 - DNA, 15 bp, Homo sapiens
cagaagtgcacccca

SEQ ID NO: 1207623 - DNA, 15 bp, Homo sapiens
tcagaagtgcacccc

SEQ ID NO: 1207624 - DNA, 15 bp, Homo sapiens
ctcagaagtgcaccc

SEQ ID NO: 1207625 - DNA, 15 bp, Homo sapiens
gctcagaagtgcacc

SEQ ID NO: 1207626 - DNA, 15 bp, Homo sapiens
tgctcagaagtgcac

SEQ ID NO: 1207627 - DNA, 15 bp, Homo sapiens
atgctcagaagtgca

SEQ ID NO: 1207628 - DNA, 15 bp, Homo sapiens
aatgctcagaagtgc

SEQ ID NO: 1207629 - DNA, 15 bp, Homo sapiens
caatgctcagaagtg

SEQ ID NO: 1207630 - DNA, 15 bp, Homo sapiens
ccaatgctcagaagt

SEQ ID NO: 1207631 - DNA, 15 bp, Homo sapiens
gccaatgctcagaag

SEQ ID NO: 1207632 - DNA, 15 bp, Homo sapiens
ggccaatgctcagaa

SEQ ID NO: 1207633 - DNA, 15 bp, Homo sapiens
aggccaatgctcaga

SEQ ID NO: 1207634 - DNA, 15 bp, Homo sapiens
aaggccaatgctcag

SEQ ID NO: 1207635 - DNA, 15 bp, Homo sapiens
aaaggccaatgctca

SEQ ID NO: 1207636 - DNA, 15 bp, Homo sapiens
caaaggccaatgctc

SEQ ID NO: 1207637 - DNA, 15 bp, Homo sapiens
ccaaaggccaatgct

SEQ ID NO: 1207638 - DNA, 15 bp, Homo sapiens
cccaaaggccaatgc

SEQ ID NO: 1207639 - DNA, 15 bp, Homo sapiens
tctcagaagtgcacc

SEQ ID NO: 1207640 - DNA, 15 bp, Homo sapiens
atctcagaagtgcac

SEQ ID NO: 1207641 - DNA, 15 bp, Homo sapiens
catctcagaagtgca

SEQ ID NO: 1207642 - DNA, 15 bp, Homo sapiens
ccatctcagaagtgc

SEQ ID NO: 1207643 - DNA, 15 bp, Homo sapiens
cccatctcagaagtg

SEQ ID NO: 1207644 - DNA, 15 bp, Homo sapiens
ccccatctcagaagt

SEQ ID NO: 1207645 - DNA, 15 bp, Homo sapiens
cccccatctcagaag

SEQ ID NO: 1207646 - DNA, 15 bp, Homo sapiens
ccccccatctcagaa

SEQ ID NO: 1207647 - DNA, 15 bp, Homo sapiens
accccccatctcaga

SEQ ID NO: 1207648 - DNA, 15 bp, Homo sapiens
aaccccccatctcag

SEQ ID NO: 1207649 - DNA, 15 bp, Homo sapiens
gaaccccccatctca

SEQ ID NO: 1207650 - DNA, 15 bp, Homo sapiens
ggaaccccccatctc

SEQ ID NO: 1207651 - DNA, 15 bp, Homo sapiens
tggaaccccccatct

SEQ ID NO: 1207652 - DNA, 15 bp, Homo sapiens
atggaaccccccatc

SEQ ID NO: 1207653 - DNA, 15 bp, Homo sapiens
aatggaaccccccat

SEQ ID NO: 1207654 - DNA, 15 bp, Homo sapiens
aaatggaacccccca

SEQ ID NO: 1207655 - DNA, 15 bp, Homo sapiens
gaaatggaacccccc

SEQ ID NO: 1207656 - DNA, 15 bp, Homo sapiens
agaaatggaaccccc

SEQ ID NO: 1207657 - DNA, 15 bp, Homo sapiens
aagaaatggaacccc

SEQ ID NO: 1207658 - DNA, 15 bp, Homo sapiens
caagaaatggaaccc

SEQ ID NO: 1207659 - DNA, 15 bp, Homo sapiens
acaagaaatggaacc

SEQ ID NO: 1207660 - DNA, 15 bp, Homo sapiens
aacaagaaatggaac

SEQ ID NO: 1207661 - DNA, 15 bp, Homo sapiens
caacaagaaatggaa

SEQ ID NO: 1207662 - DNA, 15 bp, Homo sapiens
acaacaagaaatgga

SEQ ID NO: 1207663 - DNA, 15 bp, Homo sapiens
aacaacaagaaatgg

SEQ ID NO: 1207664 - DNA, 15 bp, Homo sapiens
gaacaacaagaaatg

SEQ ID NO: 1207665 - DNA, 15 bp, Homo sapiens
agaacaacaagaaat

SEQ ID NO: 1207666 - DNA, 15 bp, Homo sapiens
aagaacaacaagaaa

SEQ ID NO: 1207667 - DNA, 15 bp, Homo sapiens
taagaacaacaagaa

SEQ ID NO: 1207668 - DNA, 15 bp, Homo sapiens
ctaagaacaacaaga

SEQ ID NO: 1207669 - DNA, 15 bp, Homo sapiens
tctaagaacaacaag

SEQ ID NO: 1207670 - DNA, 15 bp, Homo sapiens
ttctaagaacaacaa

SEQ ID NO: 1207671 - DNA, 15 bp, Homo sapiens
cttctaagaacaaca

SEQ ID NO: 1207672 - DNA, 15 bp, Homo sapiens
acttctaagaacaac

SEQ ID NO: 1207673 - DNA, 15 bp, Homo sapiens
cacttctaagaacaa

SEQ ID NO: 1207674 - DNA, 15 bp, Homo sapiens
ccacttctaagaaca

SEQ ID NO: 1207675 - DNA, 15 bp, Homo sapiens
cccacttctaagaac

SEQ ID NO: 1207676 - DNA, 15 bp, Homo sapiens
tcccacttctaagaa

SEQ ID NO: 1207677 - DNA, 15 bp, Homo sapiens
gtcccacttctaaga

SEQ ID NO: 1207678 - DNA, 15 bp, Homo sapiens
tgtcccacttctaag

SEQ ID NO: 1207679 - DNA, 15 bp, Homo sapiens
gtgtcccacttctaa

SEQ ID NO: 1207680 - DNA, 15 bp, Homo sapiens
tgtgtcccacttcta

SEQ ID NO: 1207681 - DNA, 15 bp, Homo sapiens
gtgtgtcccacttct

SEQ ID NO: 1207682 - DNA, 15 bp, Homo sapiens
agtgtgtcccacttc

SEQ ID NO: 1207683 - DNA, 15 bp, Homo sapiens
aagtgtgtcccactt

SEQ ID NO: 1207684 - DNA, 15 bp, Homo sapiens
gaagtgtgtcccact

SEQ ID NO: 1207685 - DNA, 15 bp, Homo sapiens
agaagtgtgtcccac

SEQ ID NO: 1207686 - DNA, 15 bp, Homo sapiens
cagaagtgtgtccca

SEQ ID NO: 1207687 - DNA, 15 bp, Homo sapiens
tcagaagtgtgtccc

SEQ ID NO: 1207688 - DNA, 15 bp, Homo sapiens
ctcagaagtgtgtcc

SEQ ID NO: 1207689 - DNA, 15 bp, Homo sapiens
tctcagaagtgtgtc

SEQ ID NO: 1207690 - DNA, 15 bp, Homo sapiens
ttctcagaagtgtgt

SEQ ID NO: 1207691 - DNA, 15 bp, Homo sapiens
cttctcagaagtgtg

SEQ ID NO: 1207692 - DNA, 15 bp, Homo sapiens
ccttctcagaagtgt

SEQ ID NO: 1207693 - DNA, 15 bp, Homo sapiens
cccttctcagaagtg

SEQ ID NO: 1207694 - DNA, 15 bp, Homo sapiens
acccttctcagaagt

SEQ ID NO: 1207695 - DNA, 15 bp, Homo sapiens
cacccttctcagaag

SEQ ID NO: 1207696 - DNA, 15 bp, Homo sapiens
gcacccttctcagaa

SEQ ID NO: 1207697 - DNA, 15 bp, Homo sapiens
agcacccttctcaga

SEQ ID NO: 1207698 - DNA, 15 bp, Homo sapiens
tagcacccttctcag

SEQ ID NO: 1207699 - DNA, 15 bp, Homo sapiens
ttagcacccttctca

SEQ ID NO: 1207700 - DNA, 15 bp, Homo sapiens
tttagcacccttctc

SEQ ID NO: 1207701 - DNA, 15 bp, Homo sapiens
atttagcacccttct

SEQ ID NO: 1207702 - DNA, 15 bp, Homo sapiens
catttagcacccttc

SEQ ID NO: 1207703 - DNA, 15 bp, Homo sapiens
gcatttagcaccctt

SEQ ID NO: 1207704 - DNA, 15 bp, Homo sapiens
ggcatttagcaccct

SEQ ID NO: 1207705 - DNA, 15 bp, Homo sapiens
tggcatttagcaccc

SEQ ID NO: 1207706 - DNA, 15 bp, Homo sapiens
gtggcatttagcacc

SEQ ID NO: 1207707 - DNA, 15 bp, Homo sapiens
ggtggcatttagcac

SEQ ID NO: 1207708 - DNA, 15 bp, Homo sapiens
aggtggcatttagca

SEQ ID NO: 1207709 - DNA, 15 bp, Homo sapiens
aaggtggcatttagc

SEQ ID NO: 1207710 - DNA, 15 bp, Homo sapiens
caaggtggcatttag

SEQ ID NO: 1207711 - DNA, 15 bp, Homo sapiens
acaaggtggcattta

SEQ ID NO: 1207712 - DNA, 15 bp, Homo sapiens
aacaaggtggcattt

SEQ ID NO: 1207713 - DNA, 15 bp, Homo sapiens
aaacaaggtggcatt

SEQ ID NO: 1207714 - DNA, 15 bp, Homo sapiens
taaacaaggtggcat

SEQ ID NO: 1207715 - DNA, 15 bp, Homo sapiens
gtaaacaaggtggca

SEQ ID NO: 1207716 - DNA, 15 bp, Homo sapiens
agtaaacaaggtggc

SEQ ID NO: 1207717 - DNA, 15 bp, Homo sapiens
aagtaaacaaggtgg

SEQ ID NO: 1207718 - DNA, 15 bp, Homo sapiens
gaagtaaacaaggtg

SEQ ID NO: 1207719 - DNA, 15 bp, Homo sapiens
agaagtaaacaaggt

SEQ ID NO: 1207720 - DNA, 15 bp, Homo sapiens
aagaagtaaacaagg

SEQ ID NO: 1207721 - DNA, 15 bp, Homo sapiens
aaagaagtaaacaag

SEQ ID NO: 1207722 - DNA, 15 bp, Homo sapiens
taaagaagtaaacaa

SEQ ID NO: 1207723 - DNA, 15 bp, Homo sapiens
ataaagaagtaaaca

SEQ ID NO: 1207724 - DNA, 15 bp, Homo sapiens
tataaagaagtaaac

SEQ ID NO: 1207725 - DNA, 15 bp, Homo sapiens
ttataaagaagtaaa

SEQ ID NO: 1207726 - DNA, 15 bp, Homo sapiens
cttataaagaagtaa

SEQ ID NO: 1207727 - DNA, 15 bp, Homo sapiens
ccttataaagaagta

SEQ ID NO: 1207728 - DNA, 15 bp, Homo sapiens
tccttataaagaagt

SEQ ID NO: 1207729 - DNA, 15 bp, Homo sapiens
gtccttataaagaag

SEQ ID NO: 1207730 - DNA, 15 bp, Homo sapiens
agtccttataaagaa

SEQ ID NO: 1207731 - DNA, 15 bp, Homo sapiens
cagtccttataaaga

SEQ ID NO: 1207732 - DNA, 15 bp, Homo sapiens
gcagtccttataaag

SEQ ID NO: 1207733 - DNA, 15 bp, Homo sapiens
tgcagtccttataaa

SEQ ID NO: 1207734 - DNA, 15 bp, Homo sapiens
ttgcagtccttataa

SEQ ID NO: 1207735 - DNA, 15 bp, Homo sapiens
gttgcagtccttata

SEQ ID NO: 1207736 - DNA, 15 bp, Homo sapiens
tgttgcagtccttat

SEQ ID NO: 1207737 - DNA, 15 bp, Homo sapiens
ctgttgcagtcctta

SEQ ID NO: 1207738 - DNA, 15 bp, Homo sapiens
cctgttgcagtcctt

SEQ ID NO: 1207739 - DNA, 15 bp, Homo sapiens
acctgttgcagtcct

SEQ ID NO: 1207740 - DNA, 15 bp, Homo sapiens
cacctgttgcagtcc

SEQ ID NO: 1207741 - DNA, 15 bp, Homo sapiens
tcacctgttgcagtc

SEQ ID NO: 1207742 - DNA, 15 bp, Homo sapiens
ttcacctgttgcagt

SEQ ID NO: 1207743 - DNA, 15 bp, Homo sapiens
tttcacctgttgcag

SEQ ID NO: 1207744 - DNA, 15 bp, Homo sapiens
ttttcacctgttgca

SEQ ID NO: 1207745 - DNA, 15 bp, Homo sapiens
attttcacctgttgc

SEQ ID NO: 1207746 - DNA, 15 bp, Homo sapiens
aattttcacctgttg

SEQ ID NO: 1207747 - DNA, 15 bp, Homo sapiens
aaattttcacctgtt

SEQ ID NO: 1207748 - DNA, 15 bp, Homo sapiens
caaattttcacctgt

SEQ ID NO: 1207749 - DNA, 15 bp, Homo sapiens
acaaattttcacctg

SEQ ID NO: 1207750 - DNA, 15 bp, Homo sapiens
aacaaattttcacct

SEQ ID NO: 1207751 - DNA, 15 bp, Homo sapiens
taacaaattttcacc

SEQ ID NO: 1207752 - DNA, 15 bp, Homo sapiens
ttaacaaattttcac

SEQ ID NO: 1207753 - DNA, 15 bp, Homo sapiens
tttaacaaattttca

SEQ ID NO: 1207754 - DNA, 15 bp, Homo sapiens
ctttaacaaattttc

SEQ ID NO: 1207755 - DNA, 15 bp, Homo sapiens
cctttaacaaatttt

SEQ ID NO: 1207756 - DNA, 15 bp, Homo sapiens
tcctttaacaaattt

SEQ ID NO: 1207757 - DNA, 15 bp, Homo sapiens
ctcctttaacaaatt

SEQ ID NO: 1207758 - DNA, 15 bp, Homo sapiens
tctcctttaacaaat

SEQ ID NO: 1207759 - DNA, 15 bp, Homo sapiens
ttctcctttaacaaa

SEQ ID NO: 1207760 - DNA, 15 bp, Homo sapiens
cttctcctttaacaa

SEQ ID NO: 1207761 - DNA, 15 bp, Homo sapiens
tcttctcctttaaca

SEQ ID NO: 1207762 - DNA, 15 bp, Homo sapiens
ctcttctcctttaac

SEQ ID NO: 1207763 - DNA, 15 bp, Homo sapiens
cctcttctcctttaa

SEQ ID NO: 1207764 - DNA, 15 bp, Homo sapiens
gcctcttctccttta

SEQ ID NO: 1207765 - DNA, 15 bp, Homo sapiens
tgcctcttctccttt

SEQ ID NO: 1207766 - DNA, 15 bp, Homo sapiens
ctgcctcttctcctt

SEQ ID NO: 1207767 - DNA, 15 bp, Homo sapiens
actgcctcttctcct

SEQ ID NO: 1207768 - DNA, 15 bp, Homo sapiens
aactgcctcttctcc

SEQ ID NO: 1207769 - DNA, 15 bp, Homo sapiens
aaactgcctcttctc

SEQ ID NO: 1207770 - DNA, 15 bp, Homo sapiens
aaaactgcctcttct

SEQ ID NO: 1207771 - DNA, 15 bp, Homo sapiens
aaaaactgcctcttc

SEQ ID NO: 1207772 - DNA, 15 bp, Homo sapiens
aaaaaactgcctctt

SEQ ID NO: 1207773 - DNA, 15 bp, Homo sapiens
aaaaaaactgcctct

SEQ ID NO: 1207774 - DNA, 15 bp, Homo sapiens
aaaaaaaactgcctc

SEQ ID NO: 1207775 - DNA, 15 bp, Homo sapiens
gaaaaaaaactgcct

SEQ ID NO: 1207776 - DNA, 15 bp, Homo sapiens
agaaaaaaaactgcc

SEQ ID NO: 1207777 - DNA, 15 bp, Homo sapiens
aagaaaaaaaactgc

SEQ ID NO: 1207778 - DNA, 15 bp, Homo sapiens
aaagaaaaaaaactg

SEQ ID NO: 1207779 - DNA, 15 bp, Homo sapiens
aaaagaaaaaaaact

SEQ ID NO: 1207780 - DNA, 15 bp, Homo sapiens
aaaaagaaaaaaaac

SEQ ID NO: 1207781 - DNA, 15 bp, Homo sapiens
ctttaaaaagaaaaa

SEQ ID NO: 1207782 - DNA, 15 bp, Homo sapiens
tctttaaaaagaaaa

SEQ ID NO: 1207783 - DNA, 15 bp, Homo sapiens
ttctttaaaaagaaa

SEQ ID NO: 1207784 - DNA, 15 bp, Homo sapiens
cttctttaaaaagaa

SEQ ID NO: 1207785 - DNA, 15 bp, Homo sapiens
gcttctttaaaaaga

SEQ ID NO: 1207786 - DNA, 15 bp, Homo sapiens
tgcttctttaaaaag

SEQ ID NO: 1207787 - DNA, 15 bp, Homo sapiens
gtgcttctttaaaaa

SEQ ID NO: 1207788 - DNA, 15 bp, Homo sapiens
tgtgcttctttaaaa

SEQ ID NO: 1207789 - DNA, 15 bp, Homo sapiens
gtgtgcttctttaaa

SEQ ID NO: 1207790 - DNA, 15 bp, Homo sapiens
agtgtgcttctttaa

SEQ ID NO: 1207791 - DNA, 15 bp, Homo sapiens
cagtgtgcttcttta

SEQ ID NO: 1207792 - DNA, 15 bp, Homo sapiens
acagtgtgcttcttt

SEQ ID NO: 1207793 - DNA, 15 bp, Homo sapiens
tacagtgtgcttctt

SEQ ID NO: 1207794 - DNA, 15 bp, Homo sapiens
atacagtgtgcttct

SEQ ID NO: 1207795 - DNA, 15 bp, Homo sapiens
aatacagtgtgcttc

SEQ ID NO: 1207796 - DNA, 15 bp, Homo sapiens
aaatacagtgtgctt

SEQ ID NO: 1207797 - DNA, 15 bp, Homo sapiens
taaatacagtgtgct

SEQ ID NO: 1207798 - DNA, 15 bp, Homo sapiens
ataaatacagtgtgc

SEQ ID NO: 1207799 - DNA, 15 bp, Homo sapiens
gataaatacagtgtg

SEQ ID NO: 1207800 - DNA, 15 bp, Homo sapiens
tgataaatacagtgt

SEQ ID NO: 1207801 - DNA, 15 bp, Homo sapiens
ttgataaatacagtg

SEQ ID NO: 1207802 - DNA, 15 bp, Homo sapiens
tttgataaatacagt

SEQ ID NO: 1207803 - DNA, 15 bp, Homo sapiens
ttttgataaatacag

SEQ ID NO: 1207804 - DNA, 15 bp, Homo sapiens
cttttgataaataca

SEQ ID NO: 1207805 - DNA, 15 bp, Homo sapiens
ccttttgataaatac

SEQ ID NO: 1207806 - DNA, 15 bp, Homo sapiens
tccttttgataaata

SEQ ID NO: 1207807 - DNA, 15 bp, Homo sapiens
ttccttttgataaat

SEQ ID NO: 1207808 - DNA, 15 bp, Homo sapiens
cttccttttgataaa

SEQ ID NO: 1207809 - DNA, 15 bp, Homo sapiens
gcttccttttgataa

SEQ ID NO: 1207810 - DNA, 15 bp, Homo sapiens
agcttccttttgata

SEQ ID NO: 1207811 - DNA, 15 bp, Homo sapiens
cagcttccttttgat

SEQ ID NO: 1207812 - DNA, 15 bp, Homo sapiens
tcagcttccttttga

SEQ ID NO: 1207813 - DNA, 15 bp, Homo sapiens
ctcagcttccttttg

SEQ ID NO: 1207814 - DNA, 15 bp, Homo sapiens
tctcagcttcctttt

SEQ ID NO: 1207815 - DNA, 15 bp, Homo sapiens
ttctcagcttccttt

SEQ ID NO: 1207816 - DNA, 15 bp, Homo sapiens
attctcagcttcctt

SEQ ID NO: 1207817 - DNA, 15 bp, Homo sapiens
cattctcagcttcct

SEQ ID NO: 1207818 - DNA, 15 bp, Homo sapiens
tcattctcagcttcc

SEQ ID NO: 1207819 - DNA, 15 bp, Homo sapiens
gtcattctcagcttc

SEQ ID NO: 1207820 - DNA, 15 bp, Homo sapiens
ggtcattctcagctt

SEQ ID NO: 1207821 - DNA, 15 bp, Homo sapiens
gggtcattctcagct

SEQ ID NO: 1207822 - DNA, 15 bp, Homo sapiens
agggtcattctcagc

SEQ ID NO: 1207823 - DNA, 15 bp, Homo sapiens
cagggtcattctcag

SEQ ID NO: 1207824 - DNA, 15 bp, Homo sapiens
ccagggtcattctca

SEQ ID NO: 1207825 - DNA, 15 bp, Homo sapiens
tccagggtcattctc

SEQ ID NO: 1207826 - DNA, 15 bp, Homo sapiens
atccagggtcattct

SEQ ID NO: 1207827 - DNA, 15 bp, Homo sapiens
catccagggtcattc

SEQ ID NO: 1207828 - DNA, 15 bp, Homo sapiens
acatccagggtcatt

SEQ ID NO: 1207829 - DNA, 15 bp, Homo sapiens
aacatccagggtcat

SEQ ID NO: 1207830 - DNA, 15 bp, Homo sapiens
taacatccagggtca

SEQ ID NO: 1207831 - DNA, 15 bp, Homo sapiens
gtaacatccagggtc

SEQ ID NO: 1207832 - DNA, 15 bp, Homo sapiens
cgtaacatccagggt

SEQ ID NO: 1207833 - DNA, 15 bp, Homo sapiens
ccgtaacatccaggg

SEQ ID NO: 1207834 - DNA, 15 bp, Homo sapiens
accgtaacatccagg

SEQ ID NO: 1207835 - DNA, 15 bp, Homo sapiens
taccgtaacatccag

SEQ ID NO: 1207836 - DNA, 15 bp, Homo sapiens
gtaccgtaacatcca

SEQ ID NO: 1207837 - DNA, 15 bp, Homo sapiens
tgtaccgtaacatcc

SEQ ID NO: 1207838 - DNA, 15 bp, Homo sapiens
atgtaccgtaacatc

SEQ ID NO: 1207839 - DNA, 15 bp, Homo sapiens
catgtaccgtaacat

SEQ ID NO: 1207840 - DNA, 15 bp, Homo sapiens
acatgtaccgtaaca

SEQ ID NO: 1207841 - DNA, 15 bp, Homo sapiens
cacatgtaccgtaac

SEQ ID NO: 1207842 - DNA, 15 bp, Homo sapiens
acacatgtaccgtaa

SEQ ID NO: 1207843 - DNA, 15 bp, Homo sapiens
tacacatgtaccgta

SEQ ID NO: 1207844 - DNA, 15 bp, Homo sapiens
atacacatgtaccgt

SEQ ID NO: 1207845 - DNA, 15 bp, Homo sapiens
tatacacatgtaccg

SEQ ID NO: 1207846 - DNA, 15 bp, Homo sapiens
ctatacacatgtacc

SEQ ID NO: 1207847 - DNA, 15 bp, Homo sapiens
gctatacacatgtac

SEQ ID NO: 1207848 - DNA, 15 bp, Homo sapiens
agctatacacatgta

SEQ ID NO: 1207849 - DNA, 15 bp, Homo sapiens
tagctatacacatgt

SEQ ID NO: 1207850 - DNA, 15 bp, Homo sapiens
ctagctatacacatg

SEQ ID NO: 1207851 - DNA, 15 bp, Homo sapiens
tctagctatacacat

SEQ ID NO: 1207852 - DNA, 15 bp, Homo sapiens
atctagctatacaca

SEQ ID NO: 1207853 - DNA, 15 bp, Homo sapiens
catctagctatacac

SEQ ID NO: 1207854 - DNA, 15 bp, Homo sapiens
acatctagctataca

SEQ ID NO: 1207855 - DNA, 15 bp, Homo sapiens
aacatctagctatac

SEQ ID NO: 1207856 - DNA, 15 bp, Homo sapiens
caacatctagctata

SEQ ID NO: 1207857 - DNA, 15 bp, Homo sapiens
ccaacatctagctat

SEQ ID NO: 1207858 - DNA, 15 bp, Homo sapiens
accaacatctagcta

SEQ ID NO: 1207859 - DNA, 15 bp, Homo sapiens
aaccaacatctagct

SEQ ID NO: 1207860 - DNA, 15 bp, Homo sapiens
taaccaacatctagc

SEQ ID NO: 1207861 - DNA, 15 bp, Homo sapiens
ttaaccaacatctag

SEQ ID NO: 1207862 - DNA, 15 bp, Homo sapiens
tttaaccaacatcta

SEQ ID NO: 1207863 - DNA, 15 bp, Homo sapiens
ttttaaccaacatct

SEQ ID NO: 1207864 - DNA, 15 bp, Homo sapiens
tttttaaccaacatc

SEQ ID NO: 1207865 - DNA, 15 bp, Homo sapiens
atttttaaccaacat

SEQ ID NO: 1207866 - DNA, 15 bp, Homo sapiens
catttttaaccaaca

SEQ ID NO: 1207867 - DNA, 15 bp, Homo sapiens
ccatttttaaccaac

SEQ ID NO: 1207868 - DNA, 15 bp, Homo sapiens
tccatttttaaccaa

SEQ ID NO: 1207869 - DNA, 15 bp, Homo sapiens
ttccatttttaacca

SEQ ID NO: 1207870 - DNA, 15 bp, Homo sapiens
tttccatttttaacc

SEQ ID NO: 1207871 - DNA, 15 bp, Homo sapiens
atttccatttttaac

SEQ ID NO: 1207872 - DNA, 15 bp, Homo sapiens
tatttccatttttaa

SEQ ID NO: 1207873 - DNA, 15 bp, Homo sapiens
ttatttccattttta

SEQ ID NO: 1207874 - DNA, 15 bp, Homo sapiens
cttatttccattttt

SEQ ID NO: 1207875 - DNA, 15 bp, Homo sapiens
tcttatttccatttt

SEQ ID NO: 1207876 - DNA, 15 bp, Homo sapiens
ttcttatttccattt

SEQ ID NO: 1207877 - DNA, 15 bp, Homo sapiens
gttcttatttccatt

SEQ ID NO: 1207878 - DNA, 15 bp, Homo sapiens
agttcttatttccat

SEQ ID NO: 1207879 - DNA, 15 bp, Homo sapiens
cagttcttatttcca

SEQ ID NO: 1207880 - DNA, 15 bp, Homo sapiens
tcagttcttatttcc

SEQ ID NO: 1207881 - DNA, 15 bp, Homo sapiens
gtcagttcttatttc

SEQ ID NO: 1207882 - DNA, 15 bp, Homo sapiens
tgtcagttcttattt

SEQ ID NO: 1207883 - DNA, 15 bp, Homo sapiens
ttgtcagttcttatt

SEQ ID NO: 1207884 - DNA, 15 bp, Homo sapiens
tttgtcagttcttat

SEQ ID NO: 1207885 - DNA, 15 bp, Homo sapiens
ctttgtcagttctta

SEQ ID NO: 1207886 - DNA, 15 bp, Homo sapiens
actttgtcagttctt

SEQ ID NO: 1207887 - DNA, 15 bp, Homo sapiens
gactttgtcagttct

SEQ ID NO: 1207888 - DNA, 15 bp, Homo sapiens
agactttgtcagttc

SEQ ID NO: 1207889 - DNA, 15 bp, Homo sapiens
aagactttgtcagtt

SEQ ID NO: 1207890 - DNA, 15 bp, Homo sapiens
aaagactttgtcagt

SEQ ID NO: 1207891 - DNA, 15 bp, Homo sapiens
caaagactttgtcag

SEQ ID NO: 1207892 - DNA, 15 bp, Homo sapiens
tcaaagactttgtca

SEQ ID NO: 1207893 - DNA, 15 bp, Homo sapiens
ttcaaagactttgtc

SEQ ID NO: 1207894 - DNA, 15 bp, Homo sapiens
tttcaaagactttgt

SEQ ID NO: 1207895 - DNA, 15 bp, Homo sapiens
ttttcaaagactttg

SEQ ID NO: 1207896 - DNA, 15 bp, Homo sapiens
cttttcaaagacttt

SEQ ID NO: 1207897 - DNA, 15 bp, Homo sapiens
acttttcaaagactt

SEQ ID NO: 1207898 - DNA, 15 bp, Homo sapiens
cacttttcaaagact

SEQ ID NO: 1207899 - DNA, 15 bp, Homo sapiens
acacttttcaaagac

SEQ ID NO: 1207900 - DNA, 15 bp, Homo sapiens
tacacttttcaaaga

SEQ ID NO: 1207901 - DNA, 15 bp, Homo sapiens
ttacacttttcaaag

SEQ ID NO: 1207902 - DNA, 15 bp, Homo sapiens
gttacacttttcaaa

SEQ ID NO: 1207903 - DNA, 15 bp, Homo sapiens
tgttacacttttcaa

SEQ ID NO: 1207904 - DNA, 15 bp, Homo sapiens
ctgttacacttttca

SEQ ID NO: 1207905 - DNA, 15 bp, Homo sapiens
gctgttacacttttc

SEQ ID NO: 1207906 - DNA, 15 bp, Homo sapiens
agctgttacactttt

SEQ ID NO: 1207907 - DNA, 15 bp, Homo sapiens
aagctgttacacttt

SEQ ID NO: 1207908 - DNA, 15 bp, Homo sapiens
aaagctgttacactt

SEQ ID NO: 1207909 - DNA, 15 bp, Homo sapiens
taaagctgttacact

SEQ ID NO: 1207910 - DNA, 15 bp, Homo sapiens
ctaaagctgttacac

SEQ ID NO: 1207911 - DNA, 15 bp, Homo sapiens
actaaagctgttaca

SEQ ID NO: 1207912 - DNA, 15 bp, Homo sapiens
gactaaagctgttac

SEQ ID NO: 1207913 - DNA, 15 bp, Homo sapiens
tgactaaagctgtta

SEQ ID NO: 1207914 - DNA, 15 bp, Homo sapiens
ctgactaaagctgtt

SEQ ID NO: 1207915 - DNA, 15 bp, Homo sapiens
actgactaaagctgt

SEQ ID NO: 1207916 - DNA, 15 bp, Homo sapiens
cactgactaaagctg

SEQ ID NO: 1207917 - DNA, 15 bp, Homo sapiens
gcactgactaaagct

SEQ ID NO: 1207918 - DNA, 15 bp, Homo sapiens
agcactgactaaagc

SEQ ID NO: 1207919 - DNA, 15 bp, Homo sapiens
tagcactgactaaag

SEQ ID NO: 1207920 - DNA, 15 bp, Homo sapiens
atagcactgactaaa

SEQ ID NO: 1207921 - DNA, 15 bp, Homo sapiens
tatagcactgactaa

SEQ ID NO: 1207922 - DNA, 15 bp, Homo sapiens
ctatagcactgacta

SEQ ID NO: 1207923 - DNA, 15 bp, Homo sapiens
actatagcactgact

SEQ ID NO: 1207924 - DNA, 15 bp, Homo sapiens
gactatagcactgac

SEQ ID NO: 1207925 - DNA, 15 bp, Homo sapiens
agactatagcactga

SEQ ID NO: 1207926 - DNA, 15 bp, Homo sapiens
gagactatagcactg

SEQ ID NO: 1207927 - DNA, 15 bp, Homo sapiens
tgagactatagcact

SEQ ID NO: 1207928 - DNA, 15 bp, Homo sapiens
ttgagactatagcac

SEQ ID NO: 1207929 - DNA, 15 bp, Homo sapiens
attgagactatagca

SEQ ID NO: 1207930 - DNA, 15 bp, Homo sapiens
cattgagactatagc

SEQ ID NO: 1207931 - DNA, 15 bp, Homo sapiens
acattgagactatag

SEQ ID NO: 1207932 - DNA, 15 bp, Homo sapiens
aacattgagactata

SEQ ID NO: 1207933 - DNA, 15 bp, Homo sapiens
aaacattgagactat

SEQ ID NO: 1207934 - DNA, 15 bp, Homo sapiens
taaacattgagacta

SEQ ID NO: 1207935 - DNA, 15 bp, Homo sapiens
ataaacattgagact

SEQ ID NO: 1207936 - DNA, 15 bp, Homo sapiens
cataaacattgagac

SEQ ID NO: 1207937 - DNA, 15 bp, Homo sapiens
acataaacattgaga

SEQ ID NO: 1207938 - DNA, 15 bp, Homo sapiens
gacataaacattgag

SEQ ID NO: 1207939 - DNA, 15 bp, Homo sapiens
agacataaacattga

SEQ ID NO: 1207940 - DNA, 15 bp, Homo sapiens
gagacataaacattg

SEQ ID NO: 1207941 - DNA, 15 bp, Homo sapiens
ggagacataaacatt

SEQ ID NO: 1207942 - DNA, 15 bp, Homo sapiens
gggagacataaacat

SEQ ID NO: 1207943 - DNA, 15 bp, Homo sapiens
agggagacataaaca

SEQ ID NO: 1207944 - DNA, 15 bp, Homo sapiens
tagggagacataaac

SEQ ID NO: 1207945 - DNA, 15 bp, Homo sapiens
ttagggagacataaa

SEQ ID NO: 1207946 - DNA, 15 bp, Homo sapiens
tttagggagacataa

SEQ ID NO: 1207947 - DNA, 15 bp, Homo sapiens
ttttagggagacata

SEQ ID NO: 1207948 - DNA, 15 bp, Homo sapiens
attttagggagacat

SEQ ID NO: 1207949 - DNA, 15 bp, Homo sapiens
aattttagggagaca

SEQ ID NO: 1207950 - DNA, 15 bp, Homo sapiens
gaattttagggagac

SEQ ID NO: 1207951 - DNA, 15 bp, Homo sapiens
tgaattttagggaga

SEQ ID NO: 1207952 - DNA, 15 bp, Homo sapiens
atgaattttagggag

SEQ ID NO: 1207953 - DNA, 15 bp, Homo sapiens
tatgaattttaggga

SEQ ID NO: 1207954 - DNA, 15 bp, Homo sapiens
atatgaattttaggg

SEQ ID NO: 1207955 - DNA, 15 bp, Homo sapiens
catatgaattttagg

SEQ ID NO: 1207956 - DNA, 15 bp, Homo sapiens
acatatgaattttag

SEQ ID NO: 1207957 - DNA, 15 bp, Homo sapiens
aacatatgaatttta

SEQ ID NO: 1207958 - DNA, 15 bp, Homo sapiens
tcaacatatgaattt

SEQ ID NO: 1207959 - DNA, 15 bp, Homo sapiens
ttcaacatatgaatt

SEQ ID NO: 1207960 - DNA, 15 bp, Homo sapiens
tttcaacatatgaat

SEQ ID NO: 1207961 - DNA, 15 bp, Homo sapiens
atttcaacatatgaa

SEQ ID NO: 1207962 - DNA, 15 bp, Homo sapiens
gatttcaacatatga

SEQ ID NO: 1207963 - DNA, 15 bp, Homo sapiens
agatttcaacatatg

SEQ ID NO: 1207964 - DNA, 15 bp, Homo sapiens
aagatttcaacatat

SEQ ID NO: 1207965 - DNA, 15 bp, Homo sapiens
gaagatttcaacata

SEQ ID NO: 1207966 - DNA, 15 bp, Homo sapiens
gtgaagatttcaaca

SEQ ID NO: 1207967 - DNA, 15 bp, Homo sapiens
tgtgaagatttcaac

SEQ ID NO: 1207968 - DNA, 15 bp, Homo sapiens
gtgtgaagatttcaa

SEQ ID NO: 1207969 - DNA, 15 bp, Homo sapiens
ggtgtgaagatttca

SEQ ID NO: 1207970 - DNA, 15 bp, Homo sapiens
gggtgtgaagatttc

SEQ ID NO: 1207971 - DNA, 15 bp, Homo sapiens
tgggtgtgaagattt

SEQ ID NO: 1207972 - DNA, 15 bp, Homo sapiens
ttgggtgtgaagatt

SEQ ID NO: 1207973 - DNA, 15 bp, Homo sapiens
cttgggtgtgaagat

SEQ ID NO: 1207974 - DNA, 15 bp, Homo sapiens
tcttgggtgtgaaga

SEQ ID NO: 1207975 - DNA, 15 bp, Homo sapiens
atcttgggtgtgaag

SEQ ID NO: 1207976 - DNA, 15 bp, Homo sapiens
aatcttgggtgtgaa

SEQ ID NO: 1207977 - DNA, 15 bp, Homo sapiens
taatcttgggtgtga

SEQ ID NO: 1207978 - DNA, 15 bp, Homo sapiens
ataatcttgggtgtg

SEQ ID NO: 1207979 - DNA, 15 bp, Homo sapiens
cataatcttgggtgt

SEQ ID NO: 1207980 - DNA, 15 bp, Homo sapiens
tcataatcttgggtg

SEQ ID NO: 1207981 - DNA, 15 bp, Homo sapiens
atcataatcttgggt

SEQ ID NO: 1207982 - DNA, 15 bp, Homo sapiens
tatcataatcttggg

SEQ ID NO: 1207983 - DNA, 15 bp, Homo sapiens
atatcataatcttgg

SEQ ID NO: 1207984 - DNA, 15 bp, Homo sapiens
aatatcataatcttg

SEQ ID NO: 1207985 - DNA, 15 bp, Homo sapiens
taatatcataatctt

SEQ ID NO: 1207986 - DNA, 15 bp, Homo sapiens
gtaatatcataatct

SEQ ID NO: 1207987 - DNA, 15 bp, Homo sapiens
cgtaatatcataatc

SEQ ID NO: 1207988 - DNA, 15 bp, Homo sapiens
tcgtaatatcataat

SEQ ID NO: 1207989 - DNA, 15 bp, Homo sapiens
ctcgtaatatcataa

SEQ ID NO: 1207990 - DNA, 15 bp, Homo sapiens
cctcgtaatatcata

SEQ ID NO: 1207991 - DNA, 15 bp, Homo sapiens
acctcgtaatatcat

SEQ ID NO: 1207992 - DNA, 15 bp, Homo sapiens
cacctcgtaatatca

SEQ ID NO: 1207993 - DNA, 15 bp, Homo sapiens
ccacctcgtaatatc

SEQ ID NO: 1207994 - DNA, 15 bp, Homo sapiens
cccacctcgtaatat

SEQ ID NO: 1207995 - DNA, 15 bp, Homo sapiens
ccccacctcgtaata

SEQ ID NO: 1207996 - DNA, 15 bp, Homo sapiens
gccccacctcgtaat

SEQ ID NO: 1207997 - DNA, 15 bp, Homo sapiens
tgccccacctcgtaa

SEQ ID NO: 1207998 - DNA, 15 bp, Homo sapiens
atgccccacctcgta

SEQ ID NO: 1207999 - DNA, 15 bp, Homo sapiens
catgccccacctcgt

SEQ ID NO: 1208000 - DNA, 15 bp, Homo sapiens
gcatgccccacctcg

SEQ ID NO: 1208001 - DNA, 15 bp, Homo sapiens
tgcatgccccacctc

SEQ ID NO: 1208002 - DNA, 15 bp, Homo sapiens
ttgcatgccccacct

SEQ ID NO: 1208003 - DNA, 15 bp, Homo sapiens
cttgcatgccccacc

SEQ ID NO: 1208004 - DNA, 15 bp, Homo sapiens
ccttgcatgccccac

SEQ ID NO: 1208005 - DNA, 15 bp, Homo sapiens
tccttgcatgcccca

SEQ ID NO: 1208006 - DNA, 15 bp, Homo sapiens
ctccttgcatgcccc

SEQ ID NO: 1208007 - DNA, 15 bp, Homo sapiens
cctccttgcatgccc

SEQ ID NO: 1208008 - DNA, 15 bp, Homo sapiens
acctccttgcatgcc

SEQ ID NO: 1208009 - DNA, 15 bp, Homo sapiens
cacctccttgcatgc

SEQ ID NO: 1208010 - DNA, 15 bp, Homo sapiens
tcacctccttgcatg

SEQ ID NO: 1208011 - DNA, 15 bp, Homo sapiens
atcacctccttgcat

SEQ ID NO: 1208012 - DNA, 15 bp, Homo sapiens
tatcacctccttgca

SEQ ID NO: 1208013 - DNA, 15 bp, Homo sapiens
atatcacctccttgc

SEQ ID NO: 1208014 - DNA, 15 bp, Homo sapiens
aatatcacctccttg

SEQ ID NO: 1208015 - DNA, 15 bp, Homo sapiens
caatatcacctcctt

SEQ ID NO: 1208016 - DNA, 15 bp, Homo sapiens
ccaatatcacctcct

SEQ ID NO: 1208017 - DNA, 15 bp, Homo sapiens
cccaatatcacctcc

SEQ ID NO: 1208018 - DNA, 15 bp, Homo sapiens
tcccaatatcacctc

SEQ ID NO: 1208019 - DNA, 15 bp, Homo sapiens
ctcccaatatcacct

SEQ ID NO: 1208020 - DNA, 15 bp, Homo sapiens
tctcccaatatcacc

SEQ ID NO: 1208021 - DNA, 15 bp, Homo sapiens
atctcccaatatcac

SEQ ID NO: 1208022 - DNA, 15 bp, Homo sapiens
catctcccaatatca

SEQ ID NO: 1208023 - DNA, 15 bp, Homo sapiens
tcatctcccaatatc

SEQ ID NO: 1208024 - DNA, 15 bp, Homo sapiens
atcatctcccaatat

SEQ ID NO: 1208025 - DNA, 15 bp, Homo sapiens
aatcatctcccaata

SEQ ID NO: 1208026 - DNA, 15 bp, Homo sapiens
taatcatctcccaat

SEQ ID NO: 1208027 - DNA, 15 bp, Homo sapiens
ctaatcatctcccaa

SEQ ID NO: 1208028 - DNA, 15 bp, Homo sapiens
cctaatcatctccca

SEQ ID NO: 1208029 - DNA, 15 bp, Homo sapiens
acctaatcatctccc

SEQ ID NO: 1208030 - DNA, 15 bp, Homo sapiens
aacctaatcatctcc

SEQ ID NO: 1208031 - DNA, 15 bp, Homo sapiens
taacctaatcatctc

SEQ ID NO: 1208032 - DNA, 15 bp, Homo sapiens
ataacctaatcatct

SEQ ID NO: 1208033 - DNA, 15 bp, Homo sapiens
cataacctaatcatc

SEQ ID NO: 1208034 - DNA, 15 bp, Homo sapiens
ccataacctaatcat

SEQ ID NO: 1208035 - DNA, 15 bp, Homo sapiens
tccataacctaatca

SEQ ID NO: 1208036 - DNA, 15 bp, Homo sapiens
ctccataacctaatc

SEQ ID NO: 1208037 - DNA, 15 bp, Homo sapiens
tctccataacctaat

SEQ ID NO: 1208038 - DNA, 15 bp, Homo sapiens
ctctccataacctaa

SEQ ID NO: 1208039 - DNA, 15 bp, Homo sapiens
gctctccataaccta

SEQ ID NO: 1208040 - DNA, 15 bp, Homo sapiens
agctctccataacct

SEQ ID NO: 1208041 - DNA, 15 bp, Homo sapiens
gagctctccataacc

SEQ ID NO: 1208042 - DNA, 15 bp, Homo sapiens
agagctctccataac

SEQ ID NO: 1208043 - DNA, 15 bp, Homo sapiens
aagagctctccataa

SEQ ID NO: 1208044 - DNA, 15 bp, Homo sapiens
taagagctctccata

SEQ ID NO: 1208045 - DNA, 15 bp, Homo sapiens
gtaagagctctccat

SEQ ID NO: 1208046 - DNA, 15 bp, Homo sapiens
tgtaagagctctcca

SEQ ID NO: 1208047 - DNA, 15 bp, Homo sapiens
ttgtaagagctctcc

SEQ ID NO: 1208048 - DNA, 15 bp, Homo sapiens
attgtaagagctctc

SEQ ID NO: 1208049 - DNA, 15 bp, Homo sapiens
aattgtaagagctct

SEQ ID NO: 1208050 - DNA, 15 bp, Homo sapiens
gaattgtaagagctc

SEQ ID NO: 1208051 - DNA, 15 bp, Homo sapiens
tgaattgtaagagct

SEQ ID NO: 1208052 - DNA, 15 bp, Homo sapiens
ctgaattgtaagagc

SEQ ID NO: 1208053 - DNA, 15 bp, Homo sapiens
tctgaattgtaagag

SEQ ID NO: 1208054 - DNA, 15 bp, Homo sapiens
atctgaattgtaaga

SEQ ID NO: 1208055 - DNA, 15 bp, Homo sapiens
catctgaattgtaag

SEQ ID NO: 1208056 - DNA, 15 bp, Homo sapiens
tcatctgaattgtaa

SEQ ID NO: 1208057 - DNA, 15 bp, Homo sapiens
ttcatctgaattgta

SEQ ID NO: 1208058 - DNA, 15 bp, Homo sapiens
attcatctgaattgt

SEQ ID NO: 1208059 - DNA, 15 bp, Homo sapiens
cattcatctgaattg

SEQ ID NO: 1208060 - DNA, 15 bp, Homo sapiens
gcattcatctgaatt

SEQ ID NO: 1208061 - DNA, 15 bp, Homo sapiens
ggcattcatctgaat

SEQ ID NO: 1208062 - DNA, 15 bp, Homo sapiens
aggcattcatctgaa

SEQ ID NO: 1208063 - DNA, 15 bp, Homo sapiens
gaggcattcatctga

SEQ ID NO: 1208064 - DNA, 15 bp, Homo sapiens
tgaggcattcatctg

SEQ ID NO: 1208065 - DNA, 15 bp, Homo sapiens
ctgaggcattcatct

SEQ ID NO: 1208066 - DNA, 15 bp, Homo sapiens
tctgaggcattcatc

SEQ ID NO: 1208067 - DNA, 15 bp, Homo sapiens
ctctgaggcattcat

SEQ ID NO: 1208068 - DNA, 15 bp, Homo sapiens
tctctgaggcattca

SEQ ID NO: 1208069 - DNA, 15 bp, Homo sapiens
gtctctgaggcattc

SEQ ID NO: 1208070 - DNA, 15 bp, Homo sapiens
ggtctctgaggcatt

SEQ ID NO: 1208071 - DNA, 15 bp, Homo sapiens
gggtctctgaggcat

SEQ ID NO: 1208072 - DNA, 15 bp, Homo sapiens
ggggtctctgaggca

SEQ ID NO: 1208073 - DNA, 15 bp, Homo sapiens
aggggtctctgaggc

SEQ ID NO: 1208074 - DNA, 15 bp, Homo sapiens
gaggggtctctgagg

SEQ ID NO: 1208075 - DNA, 15 bp, Homo sapiens
ggaggggtctctgag

SEQ ID NO: 1208076 - DNA, 15 bp, Homo sapiens
gggaggggtctctga

SEQ ID NO: 1208077 - DNA, 15 bp, Homo sapiens
ggggaggggtctctg

SEQ ID NO: 1208078 - DNA, 15 bp, Homo sapiens
tggggaggggtctct

SEQ ID NO: 1208079 - DNA, 15 bp, Homo sapiens
gtggggaggggtctc

SEQ ID NO: 1208080 - DNA, 15 bp, Homo sapiens
agtggggaggggtct

SEQ ID NO: 1208081 - DNA, 15 bp, Homo sapiens
aagtggggaggggtc

SEQ ID NO: 1208082 - DNA, 15 bp, Homo sapiens
gaagtggggaggggt

SEQ ID NO: 1208083 - DNA, 15 bp, Homo sapiens
agaagtggggagggg

SEQ ID NO: 1208084 - DNA, 15 bp, Homo sapiens
cagaagtggggaggg

SEQ ID NO: 1208085 - DNA, 15 bp, Homo sapiens
gcagaagtggggagg

SEQ ID NO: 1208086 - DNA, 15 bp, Homo sapiens
ggcagaagtggggag

SEQ ID NO: 1208087 - DNA, 15 bp, Homo sapiens
tggcagaagtgggga

SEQ ID NO: 1208088 - DNA, 15 bp, Homo sapiens
atggcagaagtgggg

SEQ ID NO: 1208089 - DNA, 15 bp, Homo sapiens
catggcagaagtggg

SEQ ID NO: 1208090 - DNA, 15 bp, Homo sapiens
gcatggcagaagtgg

SEQ ID NO: 1208091 - DNA, 15 bp, Homo sapiens
tgcatggcagaagtg

SEQ ID NO: 1208092 - DNA, 15 bp, Homo sapiens
ttgcatggcagaagt

SEQ ID NO: 1208093 - DNA, 15 bp, Homo sapiens
cttgcatggcagaag

SEQ ID NO: 1208094 - DNA, 15 bp, Homo sapiens
ccttgcatggcagaa

SEQ ID NO: 1208095 - DNA, 15 bp, Homo sapiens
accttgcatggcaga

SEQ ID NO: 1208096 - DNA, 15 bp, Homo sapiens
aaccttgcatggcag

SEQ ID NO: 1208097 - DNA, 15 bp, Homo sapiens
taaccttgcatggca

SEQ ID NO: 1208098 - DNA, 15 bp, Homo sapiens
ctaaccttgcatggc

SEQ ID NO: 1208099 - DNA, 15 bp, Homo sapiens
cctaaccttgcatgg

SEQ ID NO: 1208100 - DNA, 15 bp, Homo sapiens
ccctaaccttgcatg

SEQ ID NO: 1208101 - DNA, 15 bp, Homo sapiens
accctaaccttgcat

SEQ ID NO: 1208102 - DNA, 15 bp, Homo sapiens
caccctaaccttgca

SEQ ID NO: 1208103 - DNA, 15 bp, Homo sapiens
tcaccctaaccttgc

SEQ ID NO: 1208104 - DNA, 15 bp, Homo sapiens
ctcaccctaaccttg

SEQ ID NO: 1208105 - DNA, 15 bp, Homo sapiens
tctcaccctaacctt

SEQ ID NO: 1208106 - DNA, 15 bp, Homo sapiens
ttctcaccctaacct

SEQ ID NO: 1208107 - DNA, 15 bp, Homo sapiens
tttctcaccctaacc

SEQ ID NO: 1208108 - DNA, 15 bp, Homo sapiens
ttttctcaccctaac

SEQ ID NO: 1208109 - DNA, 15 bp, Homo sapiens
attttctcaccctaa

SEQ ID NO: 1208110 - DNA, 15 bp, Homo sapiens
cattttctcacccta

SEQ ID NO: 1208111 - DNA, 15 bp, Homo sapiens
ccattttctcaccct

SEQ ID NO: 1208112 - DNA, 15 bp, Homo sapiens
gccattttctcaccc

SEQ ID NO: 1208113 - DNA, 15 bp, Homo sapiens
agccattttctcacc

SEQ ID NO: 1208114 - DNA, 15 bp, Homo sapiens
cagccattttctcac

SEQ ID NO: 1208115 - DNA, 15 bp, Homo sapiens
acagccattttctca

SEQ ID NO: 1208116 - DNA, 15 bp, Homo sapiens
gacagccattttctc

SEQ ID NO: 1208117 - DNA, 15 bp, Homo sapiens
agacagccattttct

SEQ ID NO: 1208118 - DNA, 15 bp, Homo sapiens
tagacagccattttc

SEQ ID NO: 1208119 - DNA, 15 bp, Homo sapiens
ctagacagccatttt

SEQ ID NO: 1208120 - DNA, 15 bp, Homo sapiens
cctagacagccattt

SEQ ID NO: 1208121 - DNA, 15 bp, Homo sapiens
tcctagacagccatt

SEQ ID NO: 1208122 - DNA, 15 bp, Homo sapiens
ctcctagacagccat

SEQ ID NO: 1208123 - DNA, 15 bp, Homo sapiens
cctcctagacagcca

SEQ ID NO: 1208124 - DNA, 15 bp, Homo sapiens
tcctcctagacagcc

SEQ ID NO: 1208125 - DNA, 15 bp, Homo sapiens
ttcctcctagacagc

SEQ ID NO: 1208126 - DNA, 15 bp, Homo sapiens
cttcctcctagacag

SEQ ID NO: 1208127 - DNA, 15 bp, Homo sapiens
acttcctcctagaca

SEQ ID NO: 1208128 - DNA, 15 bp, Homo sapiens
gacttcctcctagac

SEQ ID NO: 1208129 - DNA, 15 bp, Homo sapiens
agacttcctcctaga

SEQ ID NO: 1208130 - DNA, 15 bp, Homo sapiens
gagacttcctcctag

SEQ ID NO: 1208131 - DNA, 15 bp, Homo sapiens
ggagacttcctccta

SEQ ID NO: 1208132 - DNA, 15 bp, Homo sapiens
gggagacttcctcct

SEQ ID NO: 1208133 - DNA, 15 bp, Homo sapiens
agggagacttcctcc

SEQ ID NO: 1208134 - DNA, 15 bp, Homo sapiens
gagggagacttcctc

SEQ ID NO: 1208135 - DNA, 15 bp, Homo sapiens
tgagggagacttcct

SEQ ID NO: 1208136 - DNA, 15 bp, Homo sapiens
gtgagggagacttcc

SEQ ID NO: 1208137 - DNA, 15 bp, Homo sapiens
ggtgagggagacttc

SEQ ID NO: 1208138 - DNA, 15 bp, Homo sapiens
tggtgagggagactt

SEQ ID NO: 1208139 - DNA, 15 bp, Homo sapiens
ctggtgagggagact

SEQ ID NO: 1208140 - DNA, 15 bp, Homo sapiens
tctggtgagggagac

SEQ ID NO: 1208141 - DNA, 15 bp, Homo sapiens
gtctggtgagggaga

SEQ ID NO: 1208142 - DNA, 15 bp, Homo sapiens
tgtctggtgagggag

SEQ ID NO: 1208143 - DNA, 15 bp, Homo sapiens
gtgtctggtgaggga

SEQ ID NO: 1208144 - DNA, 15 bp, Homo sapiens
agtgtctggtgaggg

SEQ ID NO: 1208145 - DNA, 15 bp, Homo sapiens
acagattcagtgtct

SEQ ID NO: 1208146 - DNA, 15 bp, Homo sapiens
aacagattcagtgtc

SEQ ID NO: 1208147 - DNA, 15 bp, Homo sapiens
caacagattcagtgt

SEQ ID NO: 1208148 - DNA, 15 bp, Homo sapiens
tcaacagattcagtg

SEQ ID NO: 1208149 - DNA, 15 bp, Homo sapiens
gtcaacagattcagt

SEQ ID NO: 1208150 - DNA, 15 bp, Homo sapiens
ggtcaacagattcag

SEQ ID NO: 1208151 - DNA, 15 bp, Homo sapiens
gggtcaacagattca

SEQ ID NO: 1208152 - DNA, 15 bp, Homo sapiens
ggggtcaacagattc

SEQ ID NO: 1208153 - DNA, 15 bp, Homo sapiens
gggggtcaacagatt

SEQ ID NO: 1208154 - DNA, 15 bp, Homo sapiens
agggggtcaacagat

SEQ ID NO: 1208155 - DNA, 15 bp, Homo sapiens
aagggggtcaacaga

SEQ ID NO: 1208156 - DNA, 15 bp, Homo sapiens
caagggggtcaacag

SEQ ID NO: 1208157 - DNA, 15 bp, Homo sapiens
tcaagggggtcaaca

SEQ ID NO: 1208158 - DNA, 15 bp, Homo sapiens
atcaagggggtcaac

SEQ ID NO: 1208159 - DNA, 15 bp, Homo sapiens
gatcaagggggtcaa

SEQ ID NO: 1208160 - DNA, 15 bp, Homo sapiens
agatcaagggggtca

SEQ ID NO: 1208161 - DNA, 15 bp, Homo sapiens
gagatcaagggggtc

SEQ ID NO: 1208162 - DNA, 15 bp, Homo sapiens
cgagatcaagggggt

SEQ ID NO: 1208163 - DNA, 15 bp, Homo sapiens
ccgagatcaaggggg

SEQ ID NO: 1208164 - DNA, 15 bp, Homo sapiens
tccgagatcaagggg

SEQ ID NO: 1208165 - DNA, 15 bp, Homo sapiens
gtccgagatcaaggg

SEQ ID NO: 1208166 - DNA, 15 bp, Homo sapiens
agtccgagatcaagg

SEQ ID NO: 1208167 - DNA, 15 bp, Homo sapiens
aagtccgagatcaag

SEQ ID NO: 1208168 - DNA, 15 bp, Homo sapiens
gaagtccgagatcaa

SEQ ID NO: 1208169 - DNA, 15 bp, Homo sapiens
ggaagtccgagatca

SEQ ID NO: 1208170 - DNA, 15 bp, Homo sapiens
gggaagtccgagatc

SEQ ID NO: 1208171 - DNA, 15 bp, Homo sapiens
tgggaagtccgagat

SEQ ID NO: 1208172 - DNA, 15 bp, Homo sapiens
ctgggaagtccgaga

SEQ ID NO: 1208173 - DNA, 15 bp, Homo sapiens
gctgggaagtccgag

SEQ ID NO: 1208174 - DNA, 15 bp, Homo sapiens
ggctgggaagtccga

SEQ ID NO: 1208175 - DNA, 15 bp, Homo sapiens
gggctgggaagtccg

SEQ ID NO: 1208176 - DNA, 15 bp, Homo sapiens
ggggctgggaagtcc

SEQ ID NO: 1208177 - DNA, 15 bp, Homo sapiens
aggggctgggaagtc

SEQ ID NO: 1208178 - DNA, 15 bp, Homo sapiens
taggggctgggaagt

SEQ ID NO: 1208179 - DNA, 15 bp, Homo sapiens
ctaggggctgggaag

SEQ ID NO: 1208180 - DNA, 15 bp, Homo sapiens
tctaggggctgggaa

SEQ ID NO: 1208181 - DNA, 15 bp, Homo sapiens
ttctaggggctggga

SEQ ID NO: 1208182 - DNA, 15 bp, Homo sapiens
gttctaggggctggg

SEQ ID NO: 1208183 - DNA, 15 bp, Homo sapiens
agttctaggggctgg

SEQ ID NO: 1208184 - DNA, 15 bp, Homo sapiens
cagttctaggggctg

SEQ ID NO: 1208185 - DNA, 15 bp, Homo sapiens
acagttctaggggct

SEQ ID NO: 1208186 - DNA, 15 bp, Homo sapiens
cacagttctaggggc

SEQ ID NO: 1208187 - DNA, 15 bp, Homo sapiens
tcacagttctagggg

SEQ ID NO: 1208188 - DNA, 15 bp, Homo sapiens
ctcacagttctaggg

SEQ ID NO: 1208189 - DNA, 15 bp, Homo sapiens
tctcacagttctagg

SEQ ID NO: 1208190 - DNA, 15 bp, Homo sapiens
ttctcacagttctag

SEQ ID NO: 1208191 - DNA, 15 bp, Homo sapiens
tttctcacagttcta

SEQ ID NO: 1208192 - DNA, 15 bp, Homo sapiens
tttttctcacagttc

SEQ ID NO: 1208193 - DNA, 15 bp, Homo sapiens
ttttttctcacagtt

SEQ ID NO: 1208194 - DNA, 15 bp, Homo sapiens
tttttttctcacagt

SEQ ID NO: 1208195 - DNA, 15 bp, Homo sapiens
atttttttctcacag

SEQ ID NO: 1208196 - DNA, 15 bp, Homo sapiens
aatttttttctcaca

SEQ ID NO: 1208197 - DNA, 15 bp, Homo sapiens
aaatttttttctcac

SEQ ID NO: 1208198 - DNA, 15 bp, Homo sapiens
gaaatttttttctca

SEQ ID NO: 1208199 - DNA, 15 bp, Homo sapiens
agaaatttttttctc

SEQ ID NO: 1208200 - DNA, 15 bp, Homo sapiens
cagaaatttttttct

SEQ ID NO: 1208201 - DNA, 15 bp, Homo sapiens
gcagaaatttttttc

SEQ ID NO: 1208202 - DNA, 15 bp, Homo sapiens
agcagaaattttttt

SEQ ID NO: 1208203 - DNA, 15 bp, Homo sapiens
aagcagaaatttttt

SEQ ID NO: 1208204 - DNA, 15 bp, Homo sapiens
aaagcagaaattttt

SEQ ID NO: 1208205 - DNA, 15 bp, Homo sapiens
aaaagcagaaatttt

SEQ ID NO: 1208206 - DNA, 15 bp, Homo sapiens
aaaaagcagaaattt

SEQ ID NO: 1208207 - DNA, 15 bp, Homo sapiens
taaaaagcagaaatt

SEQ ID NO: 1208208 - DNA, 15 bp, Homo sapiens
ataaaaagcagaaat

SEQ ID NO: 1208209 - DNA, 15 bp, Homo sapiens
tataaaaagcagaaa

SEQ ID NO: 1208210 - DNA, 15 bp, Homo sapiens
ttataaaaagcagaa

SEQ ID NO: 1208211 - DNA, 15 bp, Homo sapiens
cttataaaaagcaga

SEQ ID NO: 1208212 - DNA, 15 bp, Homo sapiens
gcttataaaaagcag

SEQ ID NO: 1208213 - DNA, 15 bp, Homo sapiens
ggcttataaaaagca

SEQ ID NO: 1208214 - DNA, 15 bp, Homo sapiens
tggcttataaaaagc

SEQ ID NO: 1208215 - DNA, 15 bp, Homo sapiens
gtggcttataaaaag

SEQ ID NO: 1208216 - DNA, 15 bp, Homo sapiens
ggtggcttataaaaa

SEQ ID NO: 1208217 - DNA, 15 bp, Homo sapiens
gggtggcttataaaa

SEQ ID NO: 1208218 - DNA, 15 bp, Homo sapiens
tgggtggcttataaa

SEQ ID NO: 1208219 - DNA, 15 bp, Homo sapiens
ctgggtggcttataa

SEQ ID NO: 1208220 - DNA, 15 bp, Homo sapiens
actgggtggcttata

SEQ ID NO: 1208221 - DNA, 15 bp, Homo sapiens
gactgggtggcttat

SEQ ID NO: 1208222 - DNA, 15 bp, Homo sapiens
agactgggtggctta

SEQ ID NO: 1208223 - DNA, 15 bp, Homo sapiens
tagactgggtggctt

SEQ ID NO: 1208224 - DNA, 15 bp, Homo sapiens
atagactgggtggct

SEQ ID NO: 1208225 - DNA, 15 bp, Homo sapiens
catagactgggtggc

SEQ ID NO: 1208226 - DNA, 15 bp, Homo sapiens
ccatagactgggtgg

SEQ ID NO: 1208227 - DNA, 15 bp, Homo sapiens
accatagactgggtg

SEQ ID NO: 1208228 - DNA, 15 bp, Homo sapiens
taccatagactgggt

SEQ ID NO: 1208229 - DNA, 15 bp, Homo sapiens
ataccatagactggg

SEQ ID NO: 1208230 - DNA, 15 bp, Homo sapiens
aataccatagactgg

SEQ ID NO: 1208231 - DNA, 15 bp, Homo sapiens
aaataccatagactg

SEQ ID NO: 1208232 - DNA, 15 bp, Homo sapiens
aaaataccatagact

SEQ ID NO: 1208233 - DNA, 15 bp, Homo sapiens
caaaataccatagac

SEQ ID NO: 1208234 - DNA, 15 bp, Homo sapiens
acaaaataccataga

SEQ ID NO: 1208235 - DNA, 15 bp, Homo sapiens
aacaaaataccatag

SEQ ID NO: 1208236 - DNA, 15 bp, Homo sapiens
caacaaaataccata

SEQ ID NO: 1208237 - DNA, 15 bp, Homo sapiens
acaacaaaataccat

SEQ ID NO: 1208238 - DNA, 15 bp, Homo sapiens
tacaacaaaatacca

SEQ ID NO: 1208239 - DNA, 15 bp, Homo sapiens
ctacaacaaaatacc

SEQ ID NO: 1208240 - DNA, 15 bp, Homo sapiens
gctacaacaaaatac

SEQ ID NO: 1208241 - DNA, 15 bp, Homo sapiens
tgctacaacaaaata

SEQ ID NO: 1208242 - DNA, 15 bp, Homo sapiens
ctgctacaacaaaat

SEQ ID NO: 1208243 - DNA, 15 bp, Homo sapiens
gctgctacaacaaaa

SEQ ID NO: 1208244 - DNA, 15 bp, Homo sapiens
ggctgctacaacaaa

SEQ ID NO: 1208245 - DNA, 15 bp, Homo sapiens
aggctgctacaacaa

SEQ ID NO: 1208246 - DNA, 15 bp, Homo sapiens
caggctgctacaaca

SEQ ID NO: 1208247 - DNA, 15 bp, Homo sapiens
tcaggctgctacaac

SEQ ID NO: 1208248 - DNA, 15 bp, Homo sapiens
ctcaggctgctacaa

SEQ ID NO: 1208249 - DNA, 15 bp, Homo sapiens
actcaggctgctaca

SEQ ID NO: 1208250 - DNA, 15 bp, Homo sapiens
cactcaggctgctac

SEQ ID NO: 1208251 - DNA, 15 bp, Homo sapiens
ccactcaggctgcta

SEQ ID NO: 1208252 - DNA, 15 bp, Homo sapiens
tccactcaggctgct

SEQ ID NO: 1208253 - DNA, 15 bp, Homo sapiens
gtccactcaggctgc

SEQ ID NO: 1208254 - DNA, 15 bp, Homo sapiens
agtccactcaggctg

SEQ ID NO: 1208255 - DNA, 15 bp, Homo sapiens
cagtccactcaggct

SEQ ID NO: 1208256 - DNA, 15 bp, Homo sapiens
tcagtccactcaggc

SEQ ID NO: 1208257 - DNA, 15 bp, Homo sapiens
ctcagtccactcagg

SEQ ID NO: 1208258 - DNA, 15 bp, Homo sapiens
tctcagtccactcag

SEQ ID NO: 1208259 - DNA, 15 bp, Homo sapiens
gtctcagtccactca

SEQ ID NO: 1208260 - DNA, 15 bp, Homo sapiens
tgtctcagtccactc

SEQ ID NO: 1208261 - DNA, 15 bp, Homo sapiens
ctgtctcagtccact

SEQ ID NO: 1208262 - DNA, 15 bp, Homo sapiens
actgtctcagtccac

SEQ ID NO: 1208263 - DNA, 15 bp, Homo sapiens
gactgtctcagtcca

SEQ ID NO: 1208264 - DNA, 15 bp, Homo sapiens
agactgtctcagtcc

SEQ ID NO: 1208265 - DNA, 15 bp, Homo sapiens
cagactgtctcagtc

SEQ ID NO: 1208266 - DNA, 15 bp, Homo sapiens
ccagactgtctcagt

SEQ ID NO: 1208267 - DNA, 15 bp, Homo sapiens
cccagactgtctcag

SEQ ID NO: 1208268 - DNA, 15 bp, Homo sapiens
tcccagactgtctca

SEQ ID NO: 1208269 - DNA, 15 bp, Homo sapiens
ttcccagactgtctc

SEQ ID NO: 1208270 - DNA, 15 bp, Homo sapiens
attcccagactgtct

SEQ ID NO: 1208271 - DNA, 15 bp, Homo sapiens
aattcccagactgtc

SEQ ID NO: 1208272 - DNA, 15 bp, Homo sapiens
gaattcccagactgt

SEQ ID NO: 1208273 - DNA, 15 bp, Homo sapiens
ggaattcccagactg

SEQ ID NO: 1208274 - DNA, 15 bp, Homo sapiens
aggaattcccagact

SEQ ID NO: 1208275 - DNA, 15 bp, Homo sapiens
gaggaattcccagac

SEQ ID NO: 1208276 - DNA, 15 bp, Homo sapiens
agaggaattcccaga

SEQ ID NO: 1208277 - DNA, 15 bp, Homo sapiens
aagaggaattcccag

SEQ ID NO: 1208278 - DNA, 15 bp, Homo sapiens
gaagaggaattccca

SEQ ID NO: 1208279 - DNA, 15 bp, Homo sapiens
agaagaggaattccc

SEQ ID NO: 1208280 - DNA, 15 bp, Homo sapiens
aagaagaggaattcc

SEQ ID NO: 1208281 - DNA, 15 bp, Homo sapiens
aaagaagaggaattc

SEQ ID NO: 1208282 - DNA, 15 bp, Homo sapiens
aaaagaagaggaatt

SEQ ID NO: 1208283 - DNA, 15 bp, Homo sapiens
aaaaagaagaggaat

SEQ ID NO: 1208284 - DNA, 15 bp, Homo sapiens
aaaaaagaagaggaa

SEQ ID NO: 1208285 - DNA, 15 bp, Homo sapiens
aaaaaaagaagagga

SEQ ID NO: 1208286 - DNA, 15 bp, Homo sapiens
aaaaaaaagaagagg

SEQ ID NO: 1208287 - DNA, 15 bp, Homo sapiens
aaaaaaaaagaagag

SEQ ID NO: 1208288 - DNA, 15 bp, Homo sapiens
taaaaaaaaaaaaga

SEQ ID NO: 1208289 - DNA, 15 bp, Homo sapiens
ttaaaaaaaaaaaag

SEQ ID NO: 1208290 - DNA, 15 bp, Homo sapiens
tccatcttaaaaaaa

SEQ ID NO: 1208291 - DNA, 15 bp, Homo sapiens
ctccatcttaaaaaa

SEQ ID NO: 1208292 - DNA, 15 bp, Homo sapiens
actccatcttaaaaa

SEQ ID NO: 1208293 - DNA, 15 bp, Homo sapiens
gactccatcttaaaa

SEQ ID NO: 1208294 - DNA, 15 bp, Homo sapiens
agactccatcttaaa

SEQ ID NO: 1208295 - DNA, 15 bp, Homo sapiens
gagactccatcttaa

SEQ ID NO: 1208296 - DNA, 15 bp, Homo sapiens
tgagactccatctta

SEQ ID NO: 1208297 - DNA, 15 bp, Homo sapiens
gtgagactccatctt

SEQ ID NO: 1208298 - DNA, 15 bp, Homo sapiens
cagtgagactccatc

SEQ ID NO: 1208299 - DNA, 15 bp, Homo sapiens
gcagtgagactccat

SEQ ID NO: 1208300 - DNA, 15 bp, Homo sapiens
agcagtgagactcca

SEQ ID NO: 1208301 - DNA, 15 bp, Homo sapiens
cagcagtgagactcc

SEQ ID NO: 1208302 - DNA, 15 bp, Homo sapiens
gcagcagtgagactc

SEQ ID NO: 1208303 - DNA, 15 bp, Homo sapiens
ggcagcagtgagact

SEQ ID NO: 1208304 - DNA, 15 bp, Homo sapiens
gggcagcagtgagac

SEQ ID NO: 1208305 - DNA, 15 bp, Homo sapiens
tgggcagcagtgaga

SEQ ID NO: 1208306 - DNA, 15 bp, Homo sapiens
ctgggcagcagtgag

SEQ ID NO: 1208307 - DNA, 15 bp, Homo sapiens
cctgggcagcagtga

SEQ ID NO: 1208308 - DNA, 15 bp, Homo sapiens
gcctgggcagcagtg

SEQ ID NO: 1208309 - DNA, 15 bp, Homo sapiens
agcctgggcagcagt

SEQ ID NO: 1208310 - DNA, 15 bp, Homo sapiens
tagcctgggcagcag

SEQ ID NO: 1208311 - DNA, 15 bp, Homo sapiens
ctagcctgggcagca

SEQ ID NO: 1208312 - DNA, 15 bp, Homo sapiens
tctagcctgggcagc

SEQ ID NO: 1208313 - DNA, 15 bp, Homo sapiens
ctctagcctgggcag

SEQ ID NO: 1208314 - DNA, 15 bp, Homo sapiens
gtgccactgcactct

SEQ ID NO: 1208315 - DNA, 15 bp, Homo sapiens
aggttgtagtgagcc

SEQ ID NO: 1208316 - DNA, 15 bp, Homo sapiens
gaggttgtagtgagc

SEQ ID NO: 1208317 - DNA, 15 bp, Homo sapiens
tggaggttgtagtga

SEQ ID NO: 1208318 - DNA, 15 bp, Homo sapiens
gtggaggttgtagtg

SEQ ID NO: 1208319 - DNA, 15 bp, Homo sapiens
ggtggaggttgtagt

SEQ ID NO: 1208320 - DNA, 15 bp, Homo sapiens
aggtggaggttgtag

SEQ ID NO: 1208321 - DNA, 15 bp, Homo sapiens
gaggtggaggttgta

SEQ ID NO: 1208322 - DNA, 15 bp, Homo sapiens
ggaggtggaggttgt

SEQ ID NO: 1208323 - DNA, 15 bp, Homo sapiens
ccttgaacctgggag

SEQ ID NO: 1208324 - DNA, 15 bp, Homo sapiens
cccttgaacctggga

SEQ ID NO: 1208325 - DNA, 15 bp, Homo sapiens
tcccttgaacctggg

SEQ ID NO: 1208326 - DNA, 15 bp, Homo sapiens
atcccttgaacctgg

SEQ ID NO: 1208327 - DNA, 15 bp, Homo sapiens
aatcccttgaacctg

SEQ ID NO: 1208328 - DNA, 15 bp, Homo sapiens
gaatcccttgaacct

SEQ ID NO: 1208329 - DNA, 15 bp, Homo sapiens
agaatcccttgaacc

SEQ ID NO: 1208330 - DNA, 15 bp, Homo sapiens
ctggtggcaggtgcc

SEQ ID NO: 1208331 - DNA, 15 bp, Homo sapiens
cctggtggcaggtgc

SEQ ID NO: 1208332 - DNA, 15 bp, Homo sapiens
gcctggtggcaggtg

SEQ ID NO: 1208333 - DNA, 15 bp, Homo sapiens
ggcctggtggcaggt

SEQ ID NO: 1208334 - DNA, 15 bp, Homo sapiens
aggcctggtggcagg

SEQ ID NO: 1208335 - DNA, 15 bp, Homo sapiens
caggcctggtggcag

SEQ ID NO: 1208336 - DNA, 15 bp, Homo sapiens
ccaggcctggtggca

SEQ ID NO: 1208337 - DNA, 15 bp, Homo sapiens
gccaggcctggtggc

SEQ ID NO: 1208338 - DNA, 15 bp, Homo sapiens
agccaggcctggtgg

SEQ ID NO: 1208339 - DNA, 15 bp, Homo sapiens
tagccaggcctggtg

SEQ ID NO: 1208340 - DNA, 15 bp, Homo sapiens
ttagccaggcctggt

SEQ ID NO: 1208341 - DNA, 15 bp, Homo sapiens
attagccaggcctgg

SEQ ID NO: 1208342 - DNA, 15 bp, Homo sapiens
aattagccaggcctg

SEQ ID NO: 1208343 - DNA, 15 bp, Homo sapiens
aaattagccaggcct

SEQ ID NO: 1208344 - DNA, 15 bp, Homo sapiens
aaaattagccaggcc

SEQ ID NO: 1208345 - DNA, 15 bp, Homo sapiens
aaaaaaaaaattagc

SEQ ID NO: 1208346 - DNA, 15 bp, Homo sapiens
caaaaaaaaaattag

SEQ ID NO: 1208347 - DNA, 15 bp, Homo sapiens
gcaaaaaaaaaatta

SEQ ID NO: 1208348 - DNA, 15 bp, Homo sapiens
tgcaaaaaaaaaatt

SEQ ID NO: 1208349 - DNA, 15 bp, Homo sapiens
atgcaaaaaaaaaat

SEQ ID NO: 1208350 - DNA, 15 bp, Homo sapiens
aatgcaaaaaaaaaa

SEQ ID NO: 1208351 - DNA, 15 bp, Homo sapiens
aaatgcaaaaaaaaa

SEQ ID NO: 1208352 - DNA, 15 bp, Homo sapiens
aaaatgcaaaaaaaa

SEQ ID NO: 1208353 - DNA, 15 bp, Homo sapiens
aaaaatgcaaaaaaa

SEQ ID NO: 1208354 - DNA, 15 bp, Homo sapiens
taaaaatgcaaaaaa

SEQ ID NO: 1208355 - DNA, 15 bp, Homo sapiens
ctaaaaatgcaaaaa

SEQ ID NO: 1208356 - DNA, 15 bp, Homo sapiens
actaaaaatgcaaaa

SEQ ID NO: 1208357 - DNA, 15 bp, Homo sapiens
tactaaaaatgcaaa

SEQ ID NO: 1208358 - DNA, 15 bp, Homo sapiens
ctactaaaaatgcaa

SEQ ID NO: 1208359 - DNA, 15 bp, Homo sapiens
tctactaaaaatgca

SEQ ID NO: 1208360 - DNA, 15 bp, Homo sapiens
ctctactaaaaatgc

SEQ ID NO: 1208361 - DNA, 15 bp, Homo sapiens
tctctactaaaaatg

SEQ ID NO: 1208362 - DNA, 15 bp, Homo sapiens
acccgtctctactaa

SEQ ID NO: 1208363 - DNA, 15 bp, Homo sapiens
aacccgtctctacta

SEQ ID NO: 1208364 - DNA, 15 bp, Homo sapiens
aaacccgtctctact

SEQ ID NO: 1208365 - DNA, 15 bp, Homo sapiens
aaaacccgtctctac

SEQ ID NO: 1208366 - DNA, 15 bp, Homo sapiens
caaaacccgtctcta

SEQ ID NO: 1208367 - DNA, 15 bp, Homo sapiens
gcaaaacccgtctct

SEQ ID NO: 1208368 - DNA, 15 bp, Homo sapiens
ggcaaaacccgtctc

SEQ ID NO: 1208369 - DNA, 15 bp, Homo sapiens
tggcaaaacccgtct

SEQ ID NO: 1208370 - DNA, 15 bp, Homo sapiens
atggcaaaacccgtc

SEQ ID NO: 1208371 - DNA, 15 bp, Homo sapiens
catggcaaaacccgt

SEQ ID NO: 1208372 - DNA, 15 bp, Homo sapiens
acatggcaaaacccg

SEQ ID NO: 1208373 - DNA, 15 bp, Homo sapiens
taacatggcaaaacc

SEQ ID NO: 1208374 - DNA, 15 bp, Homo sapiens
ctaacatggcaaaac

SEQ ID NO: 1208375 - DNA, 15 bp, Homo sapiens
gctaacatggcaaaa

SEQ ID NO: 1208376 - DNA, 15 bp, Homo sapiens
ggctaacatggcaaa

SEQ ID NO: 1208377 - DNA, 15 bp, Homo sapiens
tggctaacatggcaa

SEQ ID NO: 1208378 - DNA, 15 bp, Homo sapiens
ctggctaacatggca

SEQ ID NO: 1208379 - DNA, 15 bp, Homo sapiens
cctggctaacatggc

SEQ ID NO: 1208380 - DNA, 15 bp, Homo sapiens
gaggtcaggaattcg

SEQ ID NO: 1208381 - DNA, 15 bp, Homo sapiens
ttgaggtcaggaatt

SEQ ID NO: 1208382 - DNA, 15 bp, Homo sapiens
cttgaggtcaggaat

SEQ ID NO: 1208383 - DNA, 15 bp, Homo sapiens
acttgaggtcaggaa

SEQ ID NO: 1208384 - DNA, 15 bp, Homo sapiens
agaggcgggcggatc

SEQ ID NO: 1208385 - DNA, 15 bp, Homo sapiens
cagaggcgggcggat

SEQ ID NO: 1208386 - DNA, 15 bp, Homo sapiens
gcagaggcgggcgga

SEQ ID NO: 1208387 - DNA, 15 bp, Homo sapiens
ggcagaggcgggcgg

SEQ ID NO: 1208388 - DNA, 15 bp, Homo sapiens
aggcagaggcgggcg

SEQ ID NO: 1208389 - DNA, 15 bp, Homo sapiens
gaggcagaggcgggc

SEQ ID NO: 1208390 - DNA, 15 bp, Homo sapiens
ggaggcagaggcggg

SEQ ID NO: 1208391 - DNA, 15 bp, Homo sapiens
gggaggcagaggcgg

SEQ ID NO: 1208392 - DNA, 15 bp, Homo sapiens
tgggaggcagaggcg

SEQ ID NO: 1208393 - DNA, 15 bp, Homo sapiens
tttgggaggcagagg

SEQ ID NO: 1208394 - DNA, 15 bp, Homo sapiens
ctttgggaggcagag

SEQ ID NO: 1208395 - DNA, 15 bp, Homo sapiens
cactttgggaggcag

SEQ ID NO: 1208396 - DNA, 15 bp, Homo sapiens
cggtggctcatgctt

SEQ ID NO: 1208397 - DNA, 15 bp, Homo sapiens
cgggcacggtggctc

SEQ ID NO: 1208398 - DNA, 15 bp, Homo sapiens
ccgggcacggtggct

SEQ ID NO: 1208399 - DNA, 15 bp, Homo sapiens
gccgggcacggtggc

SEQ ID NO: 1208400 - DNA, 15 bp, Homo sapiens
ggccgggcacggtgg

SEQ ID NO: 1208401 - DNA, 15 bp, Homo sapiens
aggccgggcacggtg

SEQ ID NO: 1208402 - DNA, 15 bp, Homo sapiens
caggccgggcacggt

SEQ ID NO: 1208403 - DNA, 15 bp, Homo sapiens
ccaggccgggcacgg

SEQ ID NO: 1208404 - DNA, 15 bp, Homo sapiens
cccaggccgggcacg

SEQ ID NO: 1208405 - DNA, 15 bp, Homo sapiens
tcccaggccgggcac

SEQ ID NO: 1208406 - DNA, 15 bp, Homo sapiens
ttcccaggccgggca

SEQ ID NO: 1208407 - DNA, 15 bp, Homo sapiens
attcccaggccgggc

SEQ ID NO: 1208408 - DNA, 15 bp, Homo sapiens
aattcccaggccggg

SEQ ID NO: 1208409 - DNA, 15 bp, Homo sapiens
gaattcccaggccgg

SEQ ID NO: 1208410 - DNA, 15 bp, Homo sapiens
ggaattcccaggccg

SEQ ID NO: 1208411 - DNA, 15 bp, Homo sapiens
aggaattcccaggcc

SEQ ID NO: 1208412 - DNA, 15 bp, Homo sapiens
gaggaattcccaggc

SEQ ID NO: 1208413 - DNA, 15 bp, Homo sapiens
agaggaattcccagg

SEQ ID NO: 1208414 - DNA, 15 bp, Homo sapiens
taagaggaattccca

SEQ ID NO: 1208415 - DNA, 15 bp, Homo sapiens
ttaagaggaattccc

SEQ ID NO: 1208416 - DNA, 15 bp, Homo sapiens
gttaagaggaattcc

SEQ ID NO: 1208417 - DNA, 15 bp, Homo sapiens
tgttaagaggaattc

SEQ ID NO: 1208418 - DNA, 15 bp, Homo sapiens
ttgttaagaggaatt

SEQ ID NO: 1208419 - DNA, 15 bp, Homo sapiens
gttgttaagaggaat

SEQ ID NO: 1208420 - DNA, 15 bp, Homo sapiens
tgttgttaagaggaa

SEQ ID NO: 1208421 - DNA, 15 bp, Homo sapiens
gtgttgttaagagga

SEQ ID NO: 1208422 - DNA, 15 bp, Homo sapiens
agtgttgttaagagg

SEQ ID NO: 1208423 - DNA, 15 bp, Homo sapiens
tagtgttgttaagag

SEQ ID NO: 1208424 - DNA, 15 bp, Homo sapiens
gtagtgttgttaaga

SEQ ID NO: 1208425 - DNA, 15 bp, Homo sapiens
agtagtgttgttaag

SEQ ID NO: 1208426 - DNA, 15 bp, Homo sapiens
cagtagtgttgttaa

SEQ ID NO: 1208427 - DNA, 15 bp, Homo sapiens
acagtagtgttgtta

SEQ ID NO: 1208428 - DNA, 15 bp, Homo sapiens
aacagtagtgttgtt

SEQ ID NO: 1208429 - DNA, 15 bp, Homo sapiens
caacagtagtgttgt

SEQ ID NO: 1208430 - DNA, 15 bp, Homo sapiens
ccaacagtagtgttg

SEQ ID NO: 1208431 - DNA, 15 bp, Homo sapiens
gccaacagtagtgtt

SEQ ID NO: 1208432 - DNA, 15 bp, Homo sapiens
tgccaacagtagtgt

SEQ ID NO: 1208433 - DNA, 15 bp, Homo sapiens
atgccaacagtagtg

SEQ ID NO: 1208434 - DNA, 15 bp, Homo sapiens
gatgccaacagtagt

SEQ ID NO: 1208435 - DNA, 15 bp, Homo sapiens
agatgccaacagtag

SEQ ID NO: 1208436 - DNA, 15 bp, Homo sapiens
cagatgccaacagta

SEQ ID NO: 1208437 - DNA, 15 bp, Homo sapiens
ccagatgccaacagt

SEQ ID NO: 1208438 - DNA, 15 bp, Homo sapiens
accagatgccaacag

SEQ ID NO: 1208439 - DNA, 15 bp, Homo sapiens
aaccagatgccaaca

SEQ ID NO: 1208440 - DNA, 15 bp, Homo sapiens
caaccagatgccaac

SEQ ID NO: 1208441 - DNA, 15 bp, Homo sapiens
acaaccagatgccaa

SEQ ID NO: 1208442 - DNA, 15 bp, Homo sapiens
cacaaccagatgcca

SEQ ID NO: 1208443 - DNA, 15 bp, Homo sapiens
gcacaaccagatgcc

SEQ ID NO: 1208444 - DNA, 15 bp, Homo sapiens
tgcacaaccagatgc

SEQ ID NO: 1208445 - DNA, 15 bp, Homo sapiens
gtgcacaaccagatg

SEQ ID NO: 1208446 - DNA, 15 bp, Homo sapiens
ggtgcacaaccagat

SEQ ID NO: 1208447 - DNA, 15 bp, Homo sapiens
aggtgcacaaccaga

SEQ ID NO: 1208448 - DNA, 15 bp, Homo sapiens
caggtgcacaaccag

SEQ ID NO: 1208449 - DNA, 15 bp, Homo sapiens
gcaggtgcacaacca

SEQ ID NO: 1208450 - DNA, 15 bp, Homo sapiens
agcaggtgcacaacc

SEQ ID NO: 1208451 - DNA, 15 bp, Homo sapiens
cagcaggtgcacaac

SEQ ID NO: 1208452 - DNA, 15 bp, Homo sapiens
acagcaggtgcacaa

SEQ ID NO: 1208453 - DNA, 15 bp, Homo sapiens
tacagcaggtgcaca

SEQ ID NO: 1208454 - DNA, 15 bp, Homo sapiens
ctacagcaggtgcac

SEQ ID NO: 1208455 - DNA, 15 bp, Homo sapiens
gctacagcaggtgca

SEQ ID NO: 1208456 - DNA, 15 bp, Homo sapiens
tgctacagcaggtgc

SEQ ID NO: 1208457 - DNA, 15 bp, Homo sapiens
ctgctacagcaggtg

SEQ ID NO: 1208458 - DNA, 15 bp, Homo sapiens
cctgctacagcaggt

SEQ ID NO: 1208459 - DNA, 15 bp, Homo sapiens
acctgctacagcagg

SEQ ID NO: 1208460 - DNA, 15 bp, Homo sapiens
cacctgctacagcag

SEQ ID NO: 1208461 - DNA, 15 bp, Homo sapiens
tcacctgctacagca

SEQ ID NO: 1208462 - DNA, 15 bp, Homo sapiens
ttcacctgctacagc

SEQ ID NO: 1208463 - DNA, 15 bp, Homo sapiens
attcacctgctacag

SEQ ID NO: 1208464 - DNA, 15 bp, Homo sapiens
tattcacctgctaca

SEQ ID NO: 1208465 - DNA, 15 bp, Homo sapiens
ctattcacctgctac

SEQ ID NO: 1208466 - DNA, 15 bp, Homo sapiens
gctattcacctgcta

SEQ ID NO: 1208467 - DNA, 15 bp, Homo sapiens
ggctattcacctgct

SEQ ID NO: 1208468 - DNA, 15 bp, Homo sapiens
tggctattcacctgc

SEQ ID NO: 1208469 - DNA, 15 bp, Homo sapiens
atggctattcacctg

SEQ ID NO: 1208470 - DNA, 15 bp, Homo sapiens
catggctattcacct

SEQ ID NO: 1208471 - DNA, 15 bp, Homo sapiens
ccatggctattcacc

SEQ ID NO: 1208472 - DNA, 15 bp, Homo sapiens
tccatggctattcac

SEQ ID NO: 1208473 - DNA, 15 bp, Homo sapiens
atccatggctattca

SEQ ID NO: 1208474 - DNA, 15 bp, Homo sapiens
aatccatggctattc

SEQ ID NO: 1208475 - DNA, 15 bp, Homo sapiens
gaatccatggctatt

SEQ ID NO: 1208476 - DNA, 15 bp, Homo sapiens
tgaatccatggctat

SEQ ID NO: 1208477 - DNA, 15 bp, Homo sapiens
ttgaatccatggcta

SEQ ID NO: 1208478 - DNA, 15 bp, Homo sapiens
attgaatccatggct

SEQ ID NO: 1208479 - DNA, 15 bp, Homo sapiens
aattgaatccatggc

SEQ ID NO: 1208480 - DNA, 15 bp, Homo sapiens
gaattgaatccatgg

SEQ ID NO: 1208481 - DNA, 15 bp, Homo sapiens
ggaattgaatccatg

SEQ ID NO: 1208482 - DNA, 15 bp, Homo sapiens
gggaattgaatccat

SEQ ID NO: 1208483 - DNA, 15 bp, Homo sapiens
agggaattgaatcca

SEQ ID NO: 1208484 - DNA, 15 bp, Homo sapiens
cagggaattgaatcc

SEQ ID NO: 1208485 - DNA, 15 bp, Homo sapiens
tcagggaattgaatc

SEQ ID NO: 1208486 - DNA, 15 bp, Homo sapiens
ctcagggaattgaat

SEQ ID NO: 1208487 - DNA, 15 bp, Homo sapiens
actcagggaattgaa

SEQ ID NO: 1208488 - DNA, 15 bp, Homo sapiens
gactcagggaattga

SEQ ID NO: 1208489 - DNA, 15 bp, Homo sapiens
agactcagggaattg

SEQ ID NO: 1208490 - DNA, 15 bp, Homo sapiens
tagactcagggaatt

SEQ ID NO: 1208491 - DNA, 15 bp, Homo sapiens
ttagactcagggaat

SEQ ID NO: 1208492 - DNA, 15 bp, Homo sapiens
cttagactcagggaa

SEQ ID NO: 1208493 - DNA, 15 bp, Homo sapiens
ccttagactcaggga

SEQ ID NO: 1208494 - DNA, 15 bp, Homo sapiens
tccttagactcaggg

SEQ ID NO: 1208495 - DNA, 15 bp, Homo sapiens
ctccttagactcagg

SEQ ID NO: 1208496 - DNA, 15 bp, Homo sapiens
cctccttagactcag

SEQ ID NO: 1208497 - DNA, 15 bp, Homo sapiens
gcctccttagactca

SEQ ID NO: 1208498 - DNA, 15 bp, Homo sapiens
agcctccttagactc

SEQ ID NO: 1208499 - DNA, 15 bp, Homo sapiens
cagcctccttagact

SEQ ID NO: 1208500 - DNA, 15 bp, Homo sapiens
tcagcctccttagac

SEQ ID NO: 1208501 - DNA, 15 bp, Homo sapiens
gtcagcctccttaga

SEQ ID NO: 1208502 - DNA, 15 bp, Homo sapiens
ggtcagcctccttag

SEQ ID NO: 1208503 - DNA, 15 bp, Homo sapiens
tggtcagcctcctta

SEQ ID NO: 1208504 - DNA, 15 bp, Homo sapiens
atggtcagcctcctt

SEQ ID NO: 1208505 - DNA, 15 bp, Homo sapiens
catggtcagcctcct

SEQ ID NO: 1208506 - DNA, 15 bp, Homo sapiens
gcatggtcagcctcc

SEQ ID NO: 1208507 - DNA, 15 bp, Homo sapiens
ggcatggtcagcctc

SEQ ID NO: 1208508 - DNA, 15 bp, Homo sapiens
aggcatggtcagcct

SEQ ID NO: 1208509 - DNA, 15 bp, Homo sapiens
taggcatggtcagcc

SEQ ID NO: 1208510 - DNA, 15 bp, Homo sapiens
gtaggcatggtcagc

SEQ ID NO: 1208511 - DNA, 15 bp, Homo sapiens
tgtaggcatggtcag

SEQ ID NO: 1208512 - DNA, 15 bp, Homo sapiens
atgtaggcatggtca

SEQ ID NO: 1208513 - DNA, 15 bp, Homo sapiens
aatgtaggcatggtc

SEQ ID NO: 1208514 - DNA, 15 bp, Homo sapiens
aaatgtaggcatggt

SEQ ID NO: 1208515 - DNA, 15 bp, Homo sapiens
caaatgtaggcatgg

SEQ ID NO: 1208516 - DNA, 15 bp, Homo sapiens
ccaaatgtaggcatg

SEQ ID NO: 1208517 - DNA, 15 bp, Homo sapiens
accaaatgtaggcat

SEQ ID NO: 1208518 - DNA, 15 bp, Homo sapiens
gaccaaatgtaggca

SEQ ID NO: 1208519 - DNA, 15 bp, Homo sapiens
tgaccaaatgtaggc

SEQ ID NO: 1208520 - DNA, 15 bp, Homo sapiens
atgaccaaatgtagg

SEQ ID NO: 1208521 - DNA, 15 bp, Homo sapiens
tatgaccaaatgtag

SEQ ID NO: 1208522 - DNA, 15 bp, Homo sapiens
ctatgaccaaatgta

SEQ ID NO: 1208523 - DNA, 15 bp, Homo sapiens
tctatgaccaaatgt

SEQ ID NO: 1208524 - DNA, 15 bp, Homo sapiens
gtctatgaccaaatg

SEQ ID NO: 1208525 - DNA, 15 bp, Homo sapiens
agtctatgaccaaat

SEQ ID NO: 1208526 - DNA, 15 bp, Homo sapiens
aagtctatgaccaaa

SEQ ID NO: 1208527 - DNA, 15 bp, Homo sapiens
gaagtctatgaccaa

SEQ ID NO: 1208528 - DNA, 15 bp, Homo sapiens
tgaagtctatgacca

SEQ ID NO: 1208529 - DNA, 15 bp, Homo sapiens
ttgaagtctatgacc

SEQ ID NO: 1208530 - DNA, 15 bp, Homo sapiens
attgaagtctatgac

SEQ ID NO: 1208531 - DNA, 15 bp, Homo sapiens
cattgaagtctatga

SEQ ID NO: 1208532 - DNA, 15 bp, Homo sapiens
ccattgaagtctatg

SEQ ID NO: 1208533 - DNA, 15 bp, Homo sapiens
tccattgaagtctat

SEQ ID NO: 1208534 - DNA, 15 bp, Homo sapiens
ctccattgaagtcta

SEQ ID NO: 1208535 - DNA, 15 bp, Homo sapiens
actccattgaagtct

SEQ ID NO: 1208536 - DNA, 15 bp, Homo sapiens
gactccattgaagtc

SEQ ID NO: 1208537 - DNA, 15 bp, Homo sapiens
ggactccattgaagt

SEQ ID NO: 1208538 - DNA, 15 bp, Homo sapiens
gggactccattgaag

SEQ ID NO: 1208539 - DNA, 15 bp, Homo sapiens
ggggactccattgaa

SEQ ID NO: 1208540 - DNA, 15 bp, Homo sapiens
tggggactccattga

SEQ ID NO: 1208541 - DNA, 15 bp, Homo sapiens
atggggactccattg

SEQ ID NO: 1208542 - DNA, 15 bp, Homo sapiens
gatggggactccatt

SEQ ID NO: 1208543 - DNA, 15 bp, Homo sapiens
agatggggactccat

SEQ ID NO: 1208544 - DNA, 15 bp, Homo sapiens
gagatggggactcca

SEQ ID NO: 1208545 - DNA, 15 bp, Homo sapiens
ggagatggggactcc

SEQ ID NO: 1208546 - DNA, 15 bp, Homo sapiens
tggagatggggactc

SEQ ID NO: 1208547 - DNA, 15 bp, Homo sapiens
atggagatggggact

SEQ ID NO: 1208548 - DNA, 15 bp, Homo sapiens
aatggagatggggac

SEQ ID NO: 1208549 - DNA, 15 bp, Homo sapiens
caatggagatgggga

SEQ ID NO: 1208550 - DNA, 15 bp, Homo sapiens
tcaatggagatgggg

SEQ ID NO: 1208551 - DNA, 15 bp, Homo sapiens
ttcaatggagatggg

SEQ ID NO: 1208552 - DNA, 15 bp, Homo sapiens
cttcaatggagatgg

SEQ ID NO: 1208553 - DNA, 15 bp, Homo sapiens
tcttcaatggagatg

SEQ ID NO: 1208554 - DNA, 15 bp, Homo sapiens
ctcttcaatggagat

SEQ ID NO: 1208555 - DNA, 15 bp, Homo sapiens
tctcttcaatggaga

SEQ ID NO: 1208556 - DNA, 15 bp, Homo sapiens
ttctcttcaatggag

SEQ ID NO: 1208557 - DNA, 15 bp, Homo sapiens
attctcttcaatgga

SEQ ID NO: 1208558 - DNA, 15 bp, Homo sapiens
tattctcttcaatgg

SEQ ID NO: 1208559 - DNA, 15 bp, Homo sapiens
ttattctcttcaatg

SEQ ID NO: 1208560 - DNA, 15 bp, Homo sapiens
gttattctcttcaat

SEQ ID NO: 1208561 - DNA, 15 bp, Homo sapiens
tgttattctcttcaa

SEQ ID NO: 1208562 - DNA, 15 bp, Homo sapiens
gtgttattctcttca

SEQ ID NO: 1208563 - DNA, 15 bp, Homo sapiens
tgtgttattctcttc

SEQ ID NO: 1208564 - DNA, 15 bp, Homo sapiens
ttgtgttattctctt

SEQ ID NO: 1208565 - DNA, 15 bp, Homo sapiens
cttgtgttattctct

SEQ ID NO: 1208566 - DNA, 15 bp, Homo sapiens
acttgtgttattctc

SEQ ID NO: 1208567 - DNA, 15 bp, Homo sapiens
tacttgtgttattct

SEQ ID NO: 1208568 - DNA, 15 bp, Homo sapiens
ctacttgtgttattc

SEQ ID NO: 1208569 - DNA, 15 bp, Homo sapiens
tctacttgtgttatt

SEQ ID NO: 1208570 - DNA, 15 bp, Homo sapiens
ctctacttgtgttat

SEQ ID NO: 1208571 - DNA, 15 bp, Homo sapiens
tctctacttgtgtta

SEQ ID NO: 1208572 - DNA, 15 bp, Homo sapiens
ctctctacttgtgtt

SEQ ID NO: 1208573 - DNA, 15 bp, Homo sapiens
actctctacttgtgt

SEQ ID NO: 1208574 - DNA, 15 bp, Homo sapiens
cactctctacttgtg

SEQ ID NO: 1208575 - DNA, 15 bp, Homo sapiens
ccactctctacttgt

SEQ ID NO: 1208576 - DNA, 15 bp, Homo sapiens
gccactctctacttg

SEQ ID NO: 1208577 - DNA, 15 bp, Homo sapiens
tgccactctctactt

SEQ ID NO: 1208578 - DNA, 15 bp, Homo sapiens
ctgccactctctact

SEQ ID NO: 1208579 - DNA, 15 bp, Homo sapiens
actgccactctctac

SEQ ID NO: 1208580 - DNA, 15 bp, Homo sapiens
cactgccactctcta

SEQ ID NO: 1208581 - DNA, 15 bp, Homo sapiens
tcactgccactctct

SEQ ID NO: 1208582 - DNA, 15 bp, Homo sapiens
ttcactgccactctc

SEQ ID NO: 1208583 - DNA, 15 bp, Homo sapiens
attcactgccactct

SEQ ID NO: 1208584 - DNA, 15 bp, Homo sapiens
cattcactgccactc

SEQ ID NO: 1208585 - DNA, 15 bp, Homo sapiens
acattcactgccact

SEQ ID NO: 1208586 - DNA, 15 bp, Homo sapiens
gacattcactgccac

SEQ ID NO: 1208587 - DNA, 15 bp, Homo sapiens
tgacattcactgcca

SEQ ID NO: 1208588 - DNA, 15 bp, Homo sapiens
ttgacattcactgcc

SEQ ID NO: 1208589 - DNA, 15 bp, Homo sapiens
gttgacattcactgc

SEQ ID NO: 1208590 - DNA, 15 bp, Homo sapiens
tgttgacattcactg

SEQ ID NO: 1208591 - DNA, 15 bp, Homo sapiens
ttgttgacattcact

SEQ ID NO: 1208592 - DNA, 15 bp, Homo sapiens
attgttgacattcac

SEQ ID NO: 1208593 - DNA, 15 bp, Homo sapiens
aattgttgacattca

SEQ ID NO: 1208594 - DNA, 15 bp, Homo sapiens
aaattgttgacattc

SEQ ID NO: 1208595 - DNA, 15 bp, Homo sapiens
caaattgttgacatt

SEQ ID NO: 1208596 - DNA, 15 bp, Homo sapiens
gcaaattgttgacat

SEQ ID NO: 1208597 - DNA, 15 bp, Homo sapiens
tgcaaattgttgaca

SEQ ID NO: 1208598 - DNA, 15 bp, Homo sapiens
ttgcaaattgttgac

SEQ ID NO: 1208599 - DNA, 15 bp, Homo sapiens
cttgcaaattgttga

SEQ ID NO: 1208600 - DNA, 15 bp, Homo sapiens
gcttgcaaattgttg

SEQ ID NO: 1208601 - DNA, 15 bp, Homo sapiens
tgcttgcaaattgtt

SEQ ID NO: 1208602 - DNA, 15 bp, Homo sapiens
tattgcttgcaaatt

SEQ ID NO: 1208603 - DNA, 15 bp, Homo sapiens
ctattgcttgcaaat

SEQ ID NO: 1208604 - DNA, 15 bp, Homo sapiens
gctattgcttgcaaa

SEQ ID NO: 1208605 - DNA, 15 bp, Homo sapiens
agctattgcttgcaa

SEQ ID NO: 1208606 - DNA, 15 bp, Homo sapiens
gagctattgcttgca

SEQ ID NO: 1208607 - DNA, 15 bp, Homo sapiens
tgagctattgcttgc

SEQ ID NO: 1208608 - DNA, 15 bp, Homo sapiens
ttgagctattgcttg

SEQ ID NO: 1208609 - DNA, 15 bp, Homo sapiens
attgagctattgctt

SEQ ID NO: 1208610 - DNA, 15 bp, Homo sapiens
gattgagctattgct

SEQ ID NO: 1208611 - DNA, 15 bp, Homo sapiens
tgattgagctattgc

SEQ ID NO: 1208612 - DNA, 15 bp, Homo sapiens
ttgattgagctattg

SEQ ID NO: 1208613 - DNA, 15 bp, Homo sapiens
cttgattgagctatt

SEQ ID NO: 1208614 - DNA, 15 bp, Homo sapiens
tcttgattgagctat

SEQ ID NO: 1208615 - DNA, 15 bp, Homo sapiens
ctcttgattgagcta

SEQ ID NO: 1208616 - DNA, 15 bp, Homo sapiens
cctcttgattgagct

SEQ ID NO: 1208617 - DNA, 15 bp, Homo sapiens
gcctcttgattgagc

SEQ ID NO: 1208618 - DNA, 15 bp, Homo sapiens
agcctcttgattgag

SEQ ID NO: 1208619 - DNA, 15 bp, Homo sapiens
aagcctcttgattga

SEQ ID NO: 1208620 - DNA, 15 bp, Homo sapiens
gaagcctcttgattg

SEQ ID NO: 1208621 - DNA, 15 bp, Homo sapiens
agaagcctcttgatt

SEQ ID NO: 1208622 - DNA, 15 bp, Homo sapiens
cagaagcctcttgat

SEQ ID NO: 1208623 - DNA, 15 bp, Homo sapiens
acagaagcctcttga

SEQ ID NO: 1208624 - DNA, 15 bp, Homo sapiens
cacagaagcctcttg

SEQ ID NO: 1208625 - DNA, 15 bp, Homo sapiens
ccacagaagcctctt

SEQ ID NO: 1208626 - DNA, 15 bp, Homo sapiens
tccacagaagcctct

SEQ ID NO: 1208627 - DNA, 15 bp, Homo sapiens
ctccacagaagcctc

SEQ ID NO: 1208628 - DNA, 15 bp, Homo sapiens
gctccacagaagcct

SEQ ID NO: 1208629 - DNA, 15 bp, Homo sapiens
ggctccacagaagcc

SEQ ID NO: 1208630 - DNA, 15 bp, Homo sapiens
tggctccacagaagc

SEQ ID NO: 1208631 - DNA, 15 bp, Homo sapiens
ttggctccacagaag

SEQ ID NO: 1208632 - DNA, 15 bp, Homo sapiens
attggctccacagaa

SEQ ID NO: 1208633 - DNA, 15 bp, Homo sapiens
aattggctccacaga

SEQ ID NO: 1208634 - DNA, 15 bp, Homo sapiens
aaattggctccacag

SEQ ID NO: 1208635 - DNA, 15 bp, Homo sapiens
caaattggctccaca

SEQ ID NO: 1208636 - DNA, 15 bp, Homo sapiens
acaaattggctccac

SEQ ID NO: 1208637 - DNA, 15 bp, Homo sapiens
gacaaattggctcca

SEQ ID NO: 1208638 - DNA, 15 bp, Homo sapiens
tgacaaattggctcc

SEQ ID NO: 1208639 - DNA, 15 bp, Homo sapiens
ctgacaaattggctc

SEQ ID NO: 1208640 - DNA, 15 bp, Homo sapiens
tctgacaaattggct

SEQ ID NO: 1208641 - DNA, 15 bp, Homo sapiens
ttctgacaaattggc

SEQ ID NO: 1208642 - DNA, 15 bp, Homo sapiens
cttctgacaaattgg

SEQ ID NO: 1208643 - DNA, 15 bp, Homo sapiens
gcttctgacaaattg

SEQ ID NO: 1208644 - DNA, 15 bp, Homo sapiens
agcttctgacaaatt

SEQ ID NO: 1208645 - DNA, 15 bp, Homo sapiens
aagcttctgacaaat

SEQ ID NO: 1208646 - DNA, 15 bp, Homo sapiens
aaagcttctgacaaa

SEQ ID NO: 1208647 - DNA, 15 bp, Homo sapiens
aaaagcttctgacaa

SEQ ID NO: 1208648 - DNA, 15 bp, Homo sapiens
taaaagcttctgaca

SEQ ID NO: 1208649 - DNA, 15 bp, Homo sapiens
ttaaaagcttctgac

SEQ ID NO: 1208650 - DNA, 15 bp, Homo sapiens
gttaaaagcttctga

SEQ ID NO: 1208651 - DNA, 15 bp, Homo sapiens
ggttaaaagcttctg

SEQ ID NO: 1208652 - DNA, 15 bp, Homo sapiens
aggttaaaagcttct

SEQ ID NO: 1208653 - DNA, 15 bp, Homo sapiens
aaggttaaaagcttc

SEQ ID NO: 1208654 - DNA, 15 bp, Homo sapiens
taaggttaaaagctt

SEQ ID NO: 1208655 - DNA, 15 bp, Homo sapiens
ttaaggttaaaagct

SEQ ID NO: 1208656 - DNA, 15 bp, Homo sapiens
tttaaggttaaaagc

SEQ ID NO: 1208657 - DNA, 15 bp, Homo sapiens
ttttaaggttaaaag

SEQ ID NO: 1208658 - DNA, 15 bp, Homo sapiens
attttaaggttaaaa

SEQ ID NO: 1208659 - DNA, 15 bp, Homo sapiens
cattttaaggttaaa

SEQ ID NO: 1208660 - DNA, 15 bp, Homo sapiens
acattttaaggttaa

SEQ ID NO: 1208661 - DNA, 15 bp, Homo sapiens
tacattttaaggtta

SEQ ID NO: 1208662 - DNA, 15 bp, Homo sapiens
ctacattttaaggtt

SEQ ID NO: 1208663 - DNA, 15 bp, Homo sapiens
tctacattttaaggt

SEQ ID NO: 1208664 - DNA, 15 bp, Homo sapiens
atctacattttaagg

SEQ ID NO: 1208665 - DNA, 15 bp, Homo sapiens
catctacattttaag

SEQ ID NO: 1208666 - DNA, 15 bp, Homo sapiens
ccatctacattttaa

SEQ ID NO: 1208667 - DNA, 15 bp, Homo sapiens
accatctacatttta

SEQ ID NO: 1208668 - DNA, 15 bp, Homo sapiens
taccatctacatttt

SEQ ID NO: 1208669 - DNA, 15 bp, Homo sapiens
ttaccatctacattt

SEQ ID NO: 1208670 - DNA, 15 bp, Homo sapiens
attaccatctacatt

SEQ ID NO: 1208671 - DNA, 15 bp, Homo sapiens
gattaccatctacat

SEQ ID NO: 1208672 - DNA, 15 bp, Homo sapiens
ggattaccatctaca

SEQ ID NO: 1208673 - DNA, 15 bp, Homo sapiens
tggattaccatctac

SEQ ID NO: 1208674 - DNA, 15 bp, Homo sapiens
ctggattaccatcta

SEQ ID NO: 1208675 - DNA, 15 bp, Homo sapiens
actggattaccatct

SEQ ID NO: 1208676 - DNA, 15 bp, Homo sapiens
cactggattaccatc

SEQ ID NO: 1208677 - DNA, 15 bp, Homo sapiens
acactggattaccat

SEQ ID NO: 1208678 - DNA, 15 bp, Homo sapiens
tacactggattacca

SEQ ID NO: 1208679 - DNA, 15 bp, Homo sapiens
ctacactggattacc

SEQ ID NO: 1208680 - DNA, 15 bp, Homo sapiens
gctacactggattac

SEQ ID NO: 1208681 - DNA, 15 bp, Homo sapiens
tgctacactggatta

SEQ ID NO: 1208682 - DNA, 15 bp, Homo sapiens
ctgctacactggatt

SEQ ID NO: 1208683 - DNA, 15 bp, Homo sapiens
tctgctacactggat

SEQ ID NO: 1208684 - DNA, 15 bp, Homo sapiens
gtctgctacactgga

SEQ ID NO: 1208685 - DNA, 15 bp, Homo sapiens
tgtctgctacactgg

SEQ ID NO: 1208686 - DNA, 15 bp, Homo sapiens
gtgtctgctacactg

SEQ ID NO: 1208687 - DNA, 15 bp, Homo sapiens
agtgtctgctacact

SEQ ID NO: 1208688 - DNA, 15 bp, Homo sapiens
cagtgtctgctacac

SEQ ID NO: 1208689 - DNA, 15 bp, Homo sapiens
acagtgtctgctaca

SEQ ID NO: 1208690 - DNA, 15 bp, Homo sapiens
cacagtgtctgctac

SEQ ID NO: 1208691 - DNA, 15 bp, Homo sapiens
ccacagtgtctgcta

SEQ ID NO: 1208692 - DNA, 15 bp, Homo sapiens
accacagtgtctgct

SEQ ID NO: 1208693 - DNA, 15 bp, Homo sapiens
caccacagtgtctgc

SEQ ID NO: 1208694 - DNA, 15 bp, Homo sapiens
acaccacagtgtctg

SEQ ID NO: 1208695 - DNA, 15 bp, Homo sapiens
cacaccacagtgtct

SEQ ID NO: 1208696 - DNA, 15 bp, Homo sapiens
gcacaccacagtgtc

SEQ ID NO: 1208697 - DNA, 15 bp, Homo sapiens
ggcacaccacagtgt

SEQ ID NO: 1208698 - DNA, 15 bp, Homo sapiens
tggcacaccacagtg

SEQ ID NO: 1208699 - DNA, 15 bp, Homo sapiens
gtggcacaccacagt

SEQ ID NO: 1208700 - DNA, 15 bp, Homo sapiens
tgtggcacaccacag

SEQ ID NO: 1208701 - DNA, 15 bp, Homo sapiens
gtgtggcacaccaca

SEQ ID NO: 1208702 - DNA, 15 bp, Homo sapiens
tgtgtggcacaccac

SEQ ID NO: 1208703 - DNA, 15 bp, Homo sapiens
ctgtgtggcacacca

SEQ ID NO: 1208704 - DNA, 15 bp, Homo sapiens
tctgtgtggcacacc

SEQ ID NO: 1208705 - DNA, 15 bp, Homo sapiens
ttctgtgtggcacac

SEQ ID NO: 1208706 - DNA, 15 bp, Homo sapiens
gttctgtgtggcaca

SEQ ID NO: 1208707 - DNA, 15 bp, Homo sapiens
ggttctgtgtggcac

SEQ ID NO: 1208708 - DNA, 15 bp, Homo sapiens
gggttctgtgtggca

SEQ ID NO: 1208709 - DNA, 15 bp, Homo sapiens
ggggttctgtgtggc

SEQ ID NO: 1208710 - DNA, 15 bp, Homo sapiens
aggggttctgtgtgg

SEQ ID NO: 1208711 - DNA, 15 bp, Homo sapiens
gaggggttctgtgtg

SEQ ID NO: 1208712 - DNA, 15 bp, Homo sapiens
agaggggttctgtgt

SEQ ID NO: 1208713 - DNA, 15 bp, Homo sapiens
aagaggggttctgtg

SEQ ID NO: 1208714 - DNA, 15 bp, Homo sapiens
gaagaggggttctgt

SEQ ID NO: 1208715 - DNA, 15 bp, Homo sapiens
tgaagaggggttctg

SEQ ID NO: 1208716 - DNA, 15 bp, Homo sapiens
ctgaagaggggttct

SEQ ID NO: 1208717 - DNA, 15 bp, Homo sapiens
cctgaagaggggttc

SEQ ID NO: 1208718 - DNA, 15 bp, Homo sapiens
ccctgaagaggggtt

SEQ ID NO: 1208719 - DNA, 15 bp, Homo sapiens
gccctgaagaggggt

SEQ ID NO: 1208720 - DNA, 15 bp, Homo sapiens
ggccctgaagagggg

SEQ ID NO: 1208721 - DNA, 15 bp, Homo sapiens
tggccctgaagaggg

SEQ ID NO: 1208722 - DNA, 15 bp, Homo sapiens
ttggccctgaagagg

SEQ ID NO: 1208723 - DNA, 15 bp, Homo sapiens
attggccctgaagag

SEQ ID NO: 1208724 - DNA, 15 bp, Homo sapiens
cattggccctgaaga

SEQ ID NO: 1208725 - DNA, 15 bp, Homo sapiens
gcattggccctgaag

SEQ ID NO: 1208726 - DNA, 15 bp, Homo sapiens
tgcattggccctgaa

SEQ ID NO: 1208727 - DNA, 15 bp, Homo sapiens
ctgcattggccctga

SEQ ID NO: 1208728 - DNA, 15 bp, Homo sapiens
gctgcattggccctg

SEQ ID NO: 1208729 - DNA, 15 bp, Homo sapiens
ggctgcattggccct

SEQ ID NO: 1208730 - DNA, 15 bp, Homo sapiens
tggctgcattggccc

SEQ ID NO: 1208731 - DNA, 15 bp, Homo sapiens
atggctgcattggcc

SEQ ID NO: 1208732 - DNA, 15 bp, Homo sapiens
gatggctgcattggc

SEQ ID NO: 1208733 - DNA, 15 bp, Homo sapiens
ggatggctgcattgg

SEQ ID NO: 1208734 - DNA, 15 bp, Homo sapiens
gggatggctgcattg

SEQ ID NO: 1208735 - DNA, 15 bp, Homo sapiens
ggggatggctgcatt

SEQ ID NO: 1208736 - DNA, 15 bp, Homo sapiens
gggggatggctgcat

SEQ ID NO: 1208737 - DNA, 15 bp, Homo sapiens
tgggggatggctgca

SEQ ID NO: 1208738 - DNA, 15 bp, Homo sapiens
ctgggggatggctgc

SEQ ID NO: 1208739 - DNA, 15 bp, Homo sapiens
gctgggggatggctg

SEQ ID NO: 1208740 - DNA, 15 bp, Homo sapiens
agctgggggatggct

SEQ ID NO: 1208741 - DNA, 15 bp, Homo sapiens
cagctgggggatggc

SEQ ID NO: 1208742 - DNA, 15 bp, Homo sapiens
gcagctgggggatgg

SEQ ID NO: 1208743 - DNA, 15 bp, Homo sapiens
agcagctgggggatg

SEQ ID NO: 1208744 - DNA, 15 bp, Homo sapiens
cagcagctgggggat

SEQ ID NO: 1208745 - DNA, 15 bp, Homo sapiens
tcagcagctggggga

SEQ ID NO: 1208746 - DNA, 15 bp, Homo sapiens
ctcagcagctggggg

SEQ ID NO: 1208747 - DNA, 15 bp, Homo sapiens
tctcagcagctgggg

SEQ ID NO: 1208748 - DNA, 15 bp, Homo sapiens
ttctcagcagctggg

SEQ ID NO: 1208749 - DNA, 15 bp, Homo sapiens
gttctcagcagctgg

SEQ ID NO: 1208750 - DNA, 15 bp, Homo sapiens
cgttctcagcagctg

SEQ ID NO: 1208751 - DNA, 15 bp, Homo sapiens
acgttctcagcagct

SEQ ID NO: 1208752 - DNA, 15 bp, Homo sapiens
gacgttctcagcagc

SEQ ID NO: 1208753 - DNA, 15 bp, Homo sapiens
tgacgttctcagcag

SEQ ID NO: 1208754 - DNA, 15 bp, Homo sapiens
ctgacgttctcagca

SEQ ID NO: 1208755 - DNA, 15 bp, Homo sapiens
gctgacgttctcagc

SEQ ID NO: 1208756 - DNA, 15 bp, Homo sapiens
agctgacgttctcag

SEQ ID NO: 1208757 - DNA, 15 bp, Homo sapiens
cagctgacgttctca

SEQ ID NO: 1208758 - DNA, 15 bp, Homo sapiens
gcagctgacgttctc

SEQ ID NO: 1208759 - DNA, 15 bp, Homo sapiens
tgcagctgacgttct

SEQ ID NO: 1208760 - DNA, 15 bp, Homo sapiens
ctgcagctgacgttc

SEQ ID NO: 1208761 - DNA, 15 bp, Homo sapiens
tctgcagctgacgtt

SEQ ID NO: 1208762 - DNA, 15 bp, Homo sapiens
ttctgcagctgacgt

SEQ ID NO: 1208763 - DNA, 15 bp, Homo sapiens
cttctgcagctgacg

SEQ ID NO: 1208764 - DNA, 15 bp, Homo sapiens
tcttctgcagctgac

SEQ ID NO: 1208765 - DNA, 15 bp, Homo sapiens
atcttctgcagctga

SEQ ID NO: 1208766 - DNA, 15 bp, Homo sapiens
aatcttctgcagctg

SEQ ID NO: 1208767 - DNA, 15 bp, Homo sapiens
gaatcttctgcagct

SEQ ID NO: 1208768 - DNA, 15 bp, Homo sapiens
tgaatcttctgcagc

SEQ ID NO: 1208769 - DNA, 15 bp, Homo sapiens
gtgaatcttctgcag

SEQ ID NO: 1208770 - DNA, 15 bp, Homo sapiens
ggtgaatcttctgca

SEQ ID NO: 1208771 - DNA, 15 bp, Homo sapiens
tggtgaatcttctgc

SEQ ID NO: 1208772 - DNA, 15 bp, Homo sapiens
gtggtgaatcttctg

SEQ ID NO: 1208773 - DNA, 15 bp, Homo sapiens
tgtggtgaatcttct

SEQ ID NO: 1208774 - DNA, 15 bp, Homo sapiens
ctgtggtgaatcttc

SEQ ID NO: 1208775 - DNA, 15 bp, Homo sapiens
cctgtggtgaatctt

SEQ ID NO: 1208776 - DNA, 15 bp, Homo sapiens
ccctgtggtgaatct

SEQ ID NO: 1208777 - DNA, 15 bp, Homo sapiens
tccctgtggtgaatc

SEQ ID NO: 1208778 - DNA, 15 bp, Homo sapiens
gtccctgtggtgaat

SEQ ID NO: 1208779 - DNA, 15 bp, Homo sapiens
ggtccctgtggtgaa

SEQ ID NO: 1208780 - DNA, 15 bp, Homo sapiens
gggtccctgtggtga

SEQ ID NO: 1208781 - DNA, 15 bp, Homo sapiens
agggtccctgtggtg

SEQ ID NO: 1208782 - DNA, 15 bp, Homo sapiens
gagggtccctgtggt

SEQ ID NO: 1208783 - DNA, 15 bp, Homo sapiens
ggagggtccctgtgg

SEQ ID NO: 1208784 - DNA, 15 bp, Homo sapiens
gggagggtccctgtg

SEQ ID NO: 1208785 - DNA, 15 bp, Homo sapiens
tgggagggtccctgt

SEQ ID NO: 1208786 - DNA, 15 bp, Homo sapiens
ctgggagggtccctg

SEQ ID NO: 1208787 - DNA, 15 bp, Homo sapiens
cctgggagggtccct

SEQ ID NO: 1208788 - DNA, 15 bp, Homo sapiens
ccctgggagggtccc

SEQ ID NO: 1208789 - DNA, 15 bp, Homo sapiens
tccctgggagggtcc

SEQ ID NO: 1208790 - DNA, 15 bp, Homo sapiens
ttccctgggagggtc

SEQ ID NO: 1208791 - DNA, 15 bp, Homo sapiens
attccctgggagggt

SEQ ID NO: 1208792 - DNA, 15 bp, Homo sapiens
aattccctgggaggg

SEQ ID NO: 1208793 - DNA, 15 bp, Homo sapiens
caattccctgggagg

SEQ ID NO: 1208794 - DNA, 15 bp, Homo sapiens
gcaattccctgggag

SEQ ID NO: 1208795 - DNA, 15 bp, Homo sapiens
ggcaattccctggga

SEQ ID NO: 1208796 - DNA, 15 bp, Homo sapiens
gggcaattccctggg

SEQ ID NO: 1208797 - DNA, 15 bp, Homo sapiens
agggcaattccctgg

SEQ ID NO: 1208798 - DNA, 15 bp, Homo sapiens
gagggcaattccctg

SEQ ID NO: 1208799 - DNA, 15 bp, Homo sapiens
cgagggcaattccct

SEQ ID NO: 1208800 - DNA, 15 bp, Homo sapiens
ccgagggcaattccc

SEQ ID NO: 1208801 - DNA, 15 bp, Homo sapiens
gccgagggcaattcc

SEQ ID NO: 1208802 - DNA, 15 bp, Homo sapiens
ggccgagggcaattc

SEQ ID NO: 1208803 - DNA, 15 bp, Homo sapiens
tggccgagggcaatt

SEQ ID NO: 1208804 - DNA, 15 bp, Homo sapiens
gtggccgagggcaat

SEQ ID NO: 1208805 - DNA, 15 bp, Homo sapiens
tgtggccgagggcaa

SEQ ID NO: 1208806 - DNA, 15 bp, Homo sapiens
ttgtggccgagggca

SEQ ID NO: 1208807 - DNA, 15 bp, Homo sapiens
cttgtggccgagggc

SEQ ID NO: 1208808 - DNA, 15 bp, Homo sapiens
ccttgtggccgaggg

SEQ ID NO: 1208809 - DNA, 15 bp, Homo sapiens
tccttgtggccgagg

SEQ ID NO: 1208810 - DNA, 15 bp, Homo sapiens
ctccttgtggccgag

SEQ ID NO: 1208811 - DNA, 15 bp, Homo sapiens
gctccttgtggccga

SEQ ID NO: 1208812 - DNA, 15 bp, Homo sapiens
agctccttgtggccg

SEQ ID NO: 1208813 - DNA, 15 bp, Homo sapiens
cagctccttgtggcc

SEQ ID NO: 1208814 - DNA, 15 bp, Homo sapiens
acagctccttgtggc

SEQ ID NO: 1208815 - DNA, 15 bp, Homo sapiens
gagacagctccttgt

SEQ ID NO: 1208816 - DNA, 15 bp, Homo sapiens
tgagacagctccttg

SEQ ID NO: 1208817 - DNA, 15 bp, Homo sapiens
gtgagacagctcctt

SEQ ID NO: 1208818 - DNA, 15 bp, Homo sapiens
ggtgagacagctcct

SEQ ID NO: 1208819 - DNA, 15 bp, Homo sapiens
tggtgagacagctcc

SEQ ID NO: 1208820 - DNA, 15 bp, Homo sapiens
ttggtgagacagctc

SEQ ID NO: 1208821 - DNA, 15 bp, Homo sapiens
tttggtgagacagct

SEQ ID NO: 1208822 - DNA, 15 bp, Homo sapiens
ctttggtgagacagc

SEQ ID NO: 1208823 - DNA, 15 bp, Homo sapiens
cctttggtgagacag

SEQ ID NO: 1208824 - DNA, 15 bp, Homo sapiens
gcctttggtgagaca

SEQ ID NO: 1208825 - DNA, 15 bp, Homo sapiens
agcctttggtgagac

SEQ ID NO: 1208826 - DNA, 15 bp, Homo sapiens
tagcctttggtgaga

SEQ ID NO: 1208827 - DNA, 15 bp, Homo sapiens
ctagcctttggtgag

SEQ ID NO: 1208828 - DNA, 15 bp, Homo sapiens
tctagcctttggtga

SEQ ID NO: 1208829 - DNA, 15 bp, Homo sapiens
gtctagcctttggtg

SEQ ID NO: 1208830 - DNA, 15 bp, Homo sapiens
agtctagcctttggt

SEQ ID NO: 1208831 - DNA, 15 bp, Homo sapiens
gagtctagcctttgg

SEQ ID NO: 1208832 - DNA, 15 bp, Homo sapiens
agagtctagcctttg

SEQ ID NO: 1208833 - DNA, 15 bp, Homo sapiens
gagagtctagccttt

SEQ ID NO: 1208834 - DNA, 15 bp, Homo sapiens
agagagtctagcctt

SEQ ID NO: 1208835 - DNA, 15 bp, Homo sapiens
cagagagtctagcct

SEQ ID NO: 1208836 - DNA, 15 bp, Homo sapiens
ccagagagtctagcc

SEQ ID NO: 1208837 - DNA, 15 bp, Homo sapiens
cccagagagtctagc

SEQ ID NO: 1208838 - DNA, 15 bp, Homo sapiens
ccccagagagtctag

SEQ ID NO: 1208839 - DNA, 15 bp, Homo sapiens
gccccagagagtcta

SEQ ID NO: 1208840 - DNA, 15 bp, Homo sapiens
tgccccagagagtct

SEQ ID NO: 1208841 - DNA, 15 bp, Homo sapiens
ttgccccagagagtc

SEQ ID NO: 1208842 - DNA, 15 bp, Homo sapiens
attgccccagagagt

SEQ ID NO: 1208843 - DNA, 15 bp, Homo sapiens
cattgccccagagag

SEQ ID NO: 1208844 - DNA, 15 bp, Homo sapiens
tcattgccccagaga

SEQ ID NO: 1208845 - DNA, 15 bp, Homo sapiens
gtcattgccccagag

SEQ ID NO: 1208846 - DNA, 15 bp, Homo sapiens
agtcattgccccaga

SEQ ID NO: 1208847 - DNA, 15 bp, Homo sapiens
cagtcattgccccag

SEQ ID NO: 1208848 - DNA, 15 bp, Homo sapiens
ccagtcattgcccca

SEQ ID NO: 1208849 - DNA, 15 bp, Homo sapiens
gccagtcattgcccc

SEQ ID NO: 1208850 - DNA, 15 bp, Homo sapiens
agccagtcattgccc

SEQ ID NO: 1208851 - DNA, 15 bp, Homo sapiens
cagccagtcattgcc

SEQ ID NO: 1208852 - DNA, 15 bp, Homo sapiens
tcagccagtcattgc

SEQ ID NO: 1208853 - DNA, 15 bp, Homo sapiens
atcagccagtcattg

SEQ ID NO: 1208854 - DNA, 15 bp, Homo sapiens
catcagccagtcatt

SEQ ID NO: 1208855 - DNA, 15 bp, Homo sapiens
gcatcagccagtcat

SEQ ID NO: 1208856 - DNA, 15 bp, Homo sapiens
tgcatcagccagtca

SEQ ID NO: 1208857 - DNA, 15 bp, Homo sapiens
ctgcatcagccagtc

SEQ ID NO: 1208858 - DNA, 15 bp, Homo sapiens
cctgcatcagccagt

SEQ ID NO: 1208859 - DNA, 15 bp, Homo sapiens
ccctgcatcagccag

SEQ ID NO: 1208860 - DNA, 15 bp, Homo sapiens
cccctgcatcagcca

SEQ ID NO: 1208861 - DNA, 15 bp, Homo sapiens
gcccctgcatcagcc

SEQ ID NO: 1208862 - DNA, 15 bp, Homo sapiens
tgcccctgcatcagc

SEQ ID NO: 1208863 - DNA, 15 bp, Homo sapiens
gtgcccctgcatcag

SEQ ID NO: 1208864 - DNA, 15 bp, Homo sapiens
tgtgcccctgcatca

SEQ ID NO: 1208865 - DNA, 15 bp, Homo sapiens
ttgtgcccctgcatc

SEQ ID NO: 1208866 - DNA, 15 bp, Homo sapiens
tttgtgcccctgcat

SEQ ID NO: 1208867 - DNA, 15 bp, Homo sapiens
gtttgtgcccctgca

SEQ ID NO: 1208868 - DNA, 15 bp, Homo sapiens
tgtttgtgcccctgc

SEQ ID NO: 1208869 - DNA, 15 bp, Homo sapiens
gtgtttgtgcccctg

SEQ ID NO: 1208870 - DNA, 15 bp, Homo sapiens
ggtgtttgtgcccct

SEQ ID NO: 1208871 - DNA, 15 bp, Homo sapiens
cggtgtttgtgcccc

SEQ ID NO: 1208872 - DNA, 15 bp, Homo sapiens
tcggtgtttgtgccc

SEQ ID NO: 1208873 - DNA, 15 bp, Homo sapiens
gtcggtgtttgtgcc

SEQ ID NO: 1208874 - DNA, 15 bp, Homo sapiens
agtcggtgtttgtgc

SEQ ID NO: 1208875 - DNA, 15 bp, Homo sapiens
cagtcggtgtttgtg

SEQ ID NO: 1208876 - DNA, 15 bp, Homo sapiens
acagtcggtgtttgt

SEQ ID NO: 1208877 - DNA, 15 bp, Homo sapiens
tacagtcggtgtttg

SEQ ID NO: 1208878 - DNA, 15 bp, Homo sapiens
ctacagtcggtgttt

SEQ ID NO: 1208879 - DNA, 15 bp, Homo sapiens
cctacagtcggtgtt

SEQ ID NO: 1208880 - DNA, 15 bp, Homo sapiens
gcctacagtcggtgt

SEQ ID NO: 1208881 - DNA, 15 bp, Homo sapiens
agcctacagtcggtg

SEQ ID NO: 1208882 - DNA, 15 bp, Homo sapiens
gagcctacagtcggt

SEQ ID NO: 1208883 - DNA, 15 bp, Homo sapiens
tgagcctacagtcgg

SEQ ID NO: 1208884 - DNA, 15 bp, Homo sapiens
ttgagcctacagtcg

SEQ ID NO: 1208885 - DNA, 15 bp, Homo sapiens
tttgagcctacagtc

SEQ ID NO: 1208886 - DNA, 15 bp, Homo sapiens
atttgagcctacagt

SEQ ID NO: 1208887 - DNA, 15 bp, Homo sapiens
catttgagcctacag

SEQ ID NO: 1208888 - DNA, 15 bp, Homo sapiens
gcatttgagcctaca

SEQ ID NO: 1208889 - DNA, 15 bp, Homo sapiens
tgcatttgagcctac

SEQ ID NO: 1208890 - DNA, 15 bp, Homo sapiens
ctgcatttgagccta

SEQ ID NO: 1208891 - DNA, 15 bp, Homo sapiens
gctgcatttgagcct

SEQ ID NO: 1208892 - DNA, 15 bp, Homo sapiens
agctgcatttgagcc

SEQ ID NO: 1208893 - DNA, 15 bp, Homo sapiens
tagctgcatttgagc

SEQ ID NO: 1208894 - DNA, 15 bp, Homo sapiens
gtagctgcatttgag

SEQ ID NO: 1208895 - DNA, 15 bp, Homo sapiens
ggtagctgcatttga

SEQ ID NO: 1208896 - DNA, 15 bp, Homo sapiens
gggtagctgcatttg

SEQ ID NO: 1208897 - DNA, 15 bp, Homo sapiens
agggtagctgcattt

SEQ ID NO: 1208898 - DNA, 15 bp, Homo sapiens
cagggtagctgcatt

SEQ ID NO: 1208899 - DNA, 15 bp, Homo sapiens
ccagggtagctgcat

SEQ ID NO: 1208900 - DNA, 15 bp, Homo sapiens
cccagggtagctgca

SEQ ID NO: 1208901 - DNA, 15 bp, Homo sapiens
tcccagggtagctgc

SEQ ID NO: 1208902 - DNA, 15 bp, Homo sapiens
ttcccagggtagctg

SEQ ID NO: 1208903 - DNA, 15 bp, Homo sapiens
tttcccagggtagct

SEQ ID NO: 1208904 - DNA, 15 bp, Homo sapiens
ctttcccagggtagc

SEQ ID NO: 1208905 - DNA, 15 bp, Homo sapiens
tctttcccagggtag

SEQ ID NO: 1208906 - DNA, 15 bp, Homo sapiens
ctctttcccagggta

SEQ ID NO: 1208907 - DNA, 15 bp, Homo sapiens
cctctttcccagggt

SEQ ID NO: 1208908 - DNA, 15 bp, Homo sapiens
tcctctttcccaggg

SEQ ID NO: 1208909 - DNA, 15 bp, Homo sapiens
ctcctctttcccagg

SEQ ID NO: 1208910 - DNA, 15 bp, Homo sapiens
cctcctctttcccag

SEQ ID NO: 1208911 - DNA, 15 bp, Homo sapiens
tcctcctctttccca

SEQ ID NO: 1208912 - DNA, 15 bp, Homo sapiens
ctcctcctctttccc

SEQ ID NO: 1208913 - DNA, 15 bp, Homo sapiens
tctcctcctctttcc

SEQ ID NO: 1208914 - DNA, 15 bp, Homo sapiens
ttctcctcctctttc

SEQ ID NO: 1208915 - DNA, 15 bp, Homo sapiens
cttctcctcctcttt

SEQ ID NO: 1208916 - DNA, 15 bp, Homo sapiens
ccttctcctcctctt

SEQ ID NO: 1208917 - DNA, 15 bp, Homo sapiens
tccttctcctcctct

SEQ ID NO: 1208918 - DNA, 15 bp, Homo sapiens
atccttctcctcctc

SEQ ID NO: 1208919 - DNA, 15 bp, Homo sapiens
catccttctcctcct

SEQ ID NO: 1208920 - DNA, 15 bp, Homo sapiens
tcatccttctcctcc

SEQ ID NO: 1208921 - DNA, 15 bp, Homo sapiens
atcatccttctcctc

SEQ ID NO: 1208922 - DNA, 15 bp, Homo sapiens
catcatccttctcct

SEQ ID NO: 1208923 - DNA, 15 bp, Homo sapiens
acatcatccttctcc

SEQ ID NO: 1208924 - DNA, 15 bp, Homo sapiens
cacatcatccttctc

SEQ ID NO: 1208925 - DNA, 15 bp, Homo sapiens
ccacatcatccttct

SEQ ID NO: 1208926 - DNA, 15 bp, Homo sapiens
tccacatcatccttc

SEQ ID NO: 1208927 - DNA, 15 bp, Homo sapiens
ctccacatcatcctt

SEQ ID NO: 1208928 - DNA, 15 bp, Homo sapiens
tctccacatcatcct

SEQ ID NO: 1208929 - DNA, 15 bp, Homo sapiens
ttctccacatcatcc

SEQ ID NO: 1208930 - DNA, 15 bp, Homo sapiens
gttctccacatcatc

SEQ ID NO: 1208931 - DNA, 15 bp, Homo sapiens
cgttctccacatcat

SEQ ID NO: 1208932 - DNA, 15 bp, Homo sapiens
ccgttctccacatca

SEQ ID NO: 1208933 - DNA, 15 bp, Homo sapiens
cccgttctccacatc

SEQ ID NO: 1208934 - DNA, 15 bp, Homo sapiens
gcccgttctccacat

SEQ ID NO: 1208935 - DNA, 15 bp, Homo sapiens
tgcccgttctccaca

SEQ ID NO: 1208936 - DNA, 15 bp, Homo sapiens
ctgcccgttctccac

SEQ ID NO: 1208937 - DNA, 15 bp, Homo sapiens
actgcccgttctcca

SEQ ID NO: 1208938 - DNA, 15 bp, Homo sapiens
cactgcccgttctcc

SEQ ID NO: 1208939 - DNA, 15 bp, Homo sapiens
ccactgcccgttctc

SEQ ID NO: 1208940 - DNA, 15 bp, Homo sapiens
tccactgcccgttct

SEQ ID NO: 1208941 - DNA, 15 bp, Homo sapiens
atccactgcccgttc

SEQ ID NO: 1208942 - DNA, 15 bp, Homo sapiens
catccactgcccgtt

SEQ ID NO: 1208943 - DNA, 15 bp, Homo sapiens
tcatccactgcccgt

SEQ ID NO: 1208944 - DNA, 15 bp, Homo sapiens
gtcatccactgcccg

SEQ ID NO: 1208945 - DNA, 15 bp, Homo sapiens
ggtcatccactgccc

SEQ ID NO: 1208946 - DNA, 15 bp, Homo sapiens
aggtcatccactgcc

SEQ ID NO: 1208947 - DNA, 15 bp, Homo sapiens
gaggtcatccactgc

SEQ ID NO: 1208948 - DNA, 15 bp, Homo sapiens
tgaggtcatccactg

SEQ ID NO: 1208949 - DNA, 15 bp, Homo sapiens
ctgaggtcatccact

SEQ ID NO: 1208950 - DNA, 15 bp, Homo sapiens
actgaggtcatccac

SEQ ID NO: 1208951 - DNA, 15 bp, Homo sapiens
cactgaggtcatcca

SEQ ID NO: 1208952 - DNA, 15 bp, Homo sapiens
gcactgaggtcatcc

SEQ ID NO: 1208953 - DNA, 15 bp, Homo sapiens
tgcactgaggtcatc

SEQ ID NO: 1208954 - DNA, 15 bp, Homo sapiens
ttgcactgaggtcat

SEQ ID NO: 1208955 - DNA, 15 bp, Homo sapiens
attgcactgaggtca

SEQ ID NO: 1208956 - DNA, 15 bp, Homo sapiens
aattgcactgaggtc

SEQ ID NO: 1208957 - DNA, 15 bp, Homo sapiens
aaattgcactgaggt

SEQ ID NO: 1208958 - DNA, 15 bp, Homo sapiens
caaattgcactgagg

SEQ ID NO: 1208959 - DNA, 15 bp, Homo sapiens
acaaattgcactgag

SEQ ID NO: 1208960 - DNA, 15 bp, Homo sapiens
tacaaattgcactga

SEQ ID NO: 1208961 - DNA, 15 bp, Homo sapiens
ttacaaattgcactg

SEQ ID NO: 1208962 - DNA, 15 bp, Homo sapiens
attacaaattgcact

SEQ ID NO: 1208963 - DNA, 15 bp, Homo sapiens
cattacaaattgcac

SEQ ID NO: 1208964 - DNA, 15 bp, Homo sapiens
acattacaaattgca

SEQ ID NO: 1208965 - DNA, 15 bp, Homo sapiens
aacattacaaattgc

SEQ ID NO: 1208966 - DNA, 15 bp, Homo sapiens
aaacattacaaattg

SEQ ID NO: 1208967 - DNA, 15 bp, Homo sapiens
taaacattacaaatt

SEQ ID NO: 1208968 - DNA, 15 bp, Homo sapiens
ttaaacattacaaat

SEQ ID NO: 1208969 - DNA, 15 bp, Homo sapiens
attaaacattacaaa

SEQ ID NO: 1208970 - DNA, 15 bp, Homo sapiens
aattaaacattacaa

SEQ ID NO: 1208971 - DNA, 15 bp, Homo sapiens
gaattaaacattaca

SEQ ID NO: 1208972 - DNA, 15 bp, Homo sapiens
ggaattaaacattac

SEQ ID NO: 1208973 - DNA, 15 bp, Homo sapiens
aggaattaaacatta

SEQ ID NO: 1208974 - DNA, 15 bp, Homo sapiens
aaggaattaaacatt

SEQ ID NO: 1208975 - DNA, 15 bp, Homo sapiens
taaggaattaaacat

SEQ ID NO: 1208976 - DNA, 15 bp, Homo sapiens
ttaaggaattaaaca

SEQ ID NO: 1208977 - DNA, 15 bp, Homo sapiens
tttaaggaattaaac

SEQ ID NO: 1208978 - DNA, 15 bp, Homo sapiens
ttttaaggaattaaa

SEQ ID NO: 1208979 - DNA, 15 bp, Homo sapiens
tttttaaggaattaa

SEQ ID NO: 1208980 - DNA, 15 bp, Homo sapiens
ttttttaaggaatta

SEQ ID NO: 1208981 - DNA, 15 bp, Homo sapiens
cttttttaaggaatt

SEQ ID NO: 1208982 - DNA, 15 bp, Homo sapiens
tcttttttaaggaat

SEQ ID NO: 1208983 - DNA, 15 bp, Homo sapiens
ttcttttttaaggaa

SEQ ID NO: 1208984 - DNA, 15 bp, Homo sapiens
tttcttttttaagga

SEQ ID NO: 1208985 - DNA, 15 bp, Homo sapiens
ttttcttttttaagg

SEQ ID NO: 1208986 - DNA, 15 bp, Homo sapiens
tttttcttttttaag

SEQ ID NO: 1208987 - DNA, 15 bp, Homo sapiens
ctttttcttttttaa

SEQ ID NO: 1208988 - DNA, 15 bp, Homo sapiens
tctttttctttttta

SEQ ID NO: 1208989 - DNA, 15 bp, Homo sapiens
ctctttttctttttt

SEQ ID NO: 1208990 - DNA, 15 bp, Homo sapiens
actctttttcttttt

SEQ ID NO: 1208991 - DNA, 15 bp, Homo sapiens
gactctttttctttt

SEQ ID NO: 1208992 - DNA, 15 bp, Homo sapiens
agactctttttcttt

SEQ ID NO: 1208993 - DNA, 15 bp, Homo sapiens
cagactctttttctt

SEQ ID NO: 1208994 - DNA, 15 bp, Homo sapiens
ccagactctttttct

SEQ ID NO: 1208995 - DNA, 15 bp, Homo sapiens
cccagactctttttc

SEQ ID NO: 1208996 - DNA, 15 bp, Homo sapiens
tcccagactcttttt

SEQ ID NO: 1208997 - DNA, 15 bp, Homo sapiens
ttcccagactctttt

SEQ ID NO: 1208998 - DNA, 15 bp, Homo sapiens
tttcccagactcttt

SEQ ID NO: 1208999 - DNA, 15 bp, Homo sapiens
gtttcccagactctt

SEQ ID NO: 1209000 - DNA, 15 bp, Homo sapiens
tgtttcccagactct

SEQ ID NO: 1209001 - DNA, 15 bp, Homo sapiens
atgtttcccagactc

SEQ ID NO: 1209002 - DNA, 15 bp, Homo sapiens
tatgtttcccagact

SEQ ID NO: 1209003 - DNA, 15 bp, Homo sapiens
ctatgtttcccagac

SEQ ID NO: 1209004 - DNA, 15 bp, Homo sapiens
gctatgtttcccaga

SEQ ID NO: 1209005 - DNA, 15 bp, Homo sapiens
ttcttgctatgtttc

SEQ ID NO: 1209006 - DNA, 15 bp, Homo sapiens
gttcttgctatgttt

SEQ ID NO: 1209007 - DNA, 15 bp, Homo sapiens
cgttcttgctatgtt

SEQ ID NO: 1209008 - DNA, 15 bp, Homo sapiens
gcgttcttgctatgt

SEQ ID NO: 1209009 - DNA, 15 bp, Homo sapiens
agcgttcttgctatg

SEQ ID NO: 1209010 - DNA, 15 bp, Homo sapiens
cagcgttcttgctat

SEQ ID NO: 1209011 - DNA, 15 bp, Homo sapiens
acagcgttcttgcta

SEQ ID NO: 1209012 - DNA, 15 bp, Homo sapiens
gacagcgttcttgct

SEQ ID NO: 1209013 - DNA, 15 bp, Homo sapiens
agacagcgttcttgc

SEQ ID NO: 1209014 - DNA, 15 bp, Homo sapiens
gagacagcgttcttg

SEQ ID NO: 1209015 - DNA, 15 bp, Homo sapiens
agagacagcgttctt

SEQ ID NO: 1209016 - DNA, 15 bp, Homo sapiens
tagagacagcgttct

SEQ ID NO: 1209017 - DNA, 15 bp, Homo sapiens
gtagagacagcgttc

SEQ ID NO: 1209018 - DNA, 15 bp, Homo sapiens
tgtagagacagcgtt

SEQ ID NO: 1209019 - DNA, 15 bp, Homo sapiens
ttgtagagacagcgt

SEQ ID NO: 1209020 - DNA, 15 bp, Homo sapiens
tttgtagagacagcg

SEQ ID NO: 1209021 - DNA, 15 bp, Homo sapiens
ttttgtagagacagc

SEQ ID NO: 1209022 - DNA, 15 bp, Homo sapiens
ctttttttgtagaga

SEQ ID NO: 1209023 - DNA, 15 bp, Homo sapiens
tctttttttgtagag

SEQ ID NO: 1209024 - DNA, 15 bp, Homo sapiens
atctttttttgtaga

SEQ ID NO: 1209025 - DNA, 15 bp, Homo sapiens
tatctttttttgtag

SEQ ID NO: 1209026 - DNA, 15 bp, Homo sapiens
ttatctttttttgta

SEQ ID NO: 1209027 - DNA, 15 bp, Homo sapiens
ttttatctttttttg

SEQ ID NO: 1209028 - DNA, 15 bp, Homo sapiens
tttttatcttttttt

SEQ ID NO: 1209029 - DNA, 15 bp, Homo sapiens
atttttatctttttt

SEQ ID NO: 1209030 - DNA, 15 bp, Homo sapiens
tatttttatcttttt

SEQ ID NO: 1209031 - DNA, 15 bp, Homo sapiens
ttatttttatctttt

SEQ ID NO: 1209032 - DNA, 15 bp, Homo sapiens
tttatttttatcttt

SEQ ID NO: 1209033 - DNA, 15 bp, Homo sapiens
ttttatttttatctt

SEQ ID NO: 1209034 - DNA, 15 bp, Homo sapiens
tttttatttttatct

SEQ ID NO: 1209035 - DNA, 15 bp, Homo sapiens
atttttatttttatc

SEQ ID NO: 1209036 - DNA, 15 bp, Homo sapiens
atttatttttatttt

SEQ ID NO: 1209037 - DNA, 15 bp, Homo sapiens
aatttatttttattt

SEQ ID NO: 1209038 - DNA, 15 bp, Homo sapiens
taatttatttttatt

SEQ ID NO: 1209039 - DNA, 15 bp, Homo sapiens
ctaatttatttttat

SEQ ID NO: 1209040 - DNA, 15 bp, Homo sapiens
gctaatttattttta

SEQ ID NO: 1209041 - DNA, 15 bp, Homo sapiens
ggctaatttattttt

SEQ ID NO: 1209042 - DNA, 15 bp, Homo sapiens
cggctaatttatttt

SEQ ID NO: 1209043 - DNA, 15 bp, Homo sapiens
ccggctaatttattt

SEQ ID NO: 1209044 - DNA, 15 bp, Homo sapiens
tccggctaatttatt

SEQ ID NO: 1209045 - DNA, 15 bp, Homo sapiens
gtccggctaatttat

SEQ ID NO: 1209046 - DNA, 15 bp, Homo sapiens
tgtccggctaattta

SEQ ID NO: 1209047 - DNA, 15 bp, Homo sapiens
accaccatgtccggc

SEQ ID NO: 1209048 - DNA, 15 bp, Homo sapiens
caccaccatgtccgg

SEQ ID NO: 1209049 - DNA, 15 bp, Homo sapiens
acaccaccatgtccg

SEQ ID NO: 1209050 - DNA, 15 bp, Homo sapiens
cacaccaccatgtcc

SEQ ID NO: 1209051 - DNA, 15 bp, Homo sapiens
gcacaccaccatgtc

SEQ ID NO: 1209052 - DNA, 15 bp, Homo sapiens
tgcacaccaccatgt

SEQ ID NO: 1209053 - DNA, 15 bp, Homo sapiens
gtgcacaccaccatg

SEQ ID NO: 1209054 - DNA, 15 bp, Homo sapiens
ggtgcacaccaccat

SEQ ID NO: 1209055 - DNA, 15 bp, Homo sapiens
aggtgcacaccacca

SEQ ID NO: 1209056 - DNA, 15 bp, Homo sapiens
caggtgcacaccacc

SEQ ID NO: 1209057 - DNA, 15 bp, Homo sapiens
acaggtgcacaccac

SEQ ID NO: 1209058 - DNA, 15 bp, Homo sapiens
cagctgggactacag

SEQ ID NO: 1209059 - DNA, 15 bp, Homo sapiens
tcagctgggactaca

SEQ ID NO: 1209060 - DNA, 15 bp, Homo sapiens
ctcagctgggactac

SEQ ID NO: 1209061 - DNA, 15 bp, Homo sapiens
cctcagctgggacta

SEQ ID NO: 1209062 - DNA, 15 bp, Homo sapiens
acctcagctgggact

SEQ ID NO: 1209063 - DNA, 15 bp, Homo sapiens
cacctcagctgggac

SEQ ID NO: 1209064 - DNA, 15 bp, Homo sapiens
ccacctcagctggga

SEQ ID NO: 1209065 - DNA, 15 bp, Homo sapiens
cccacctcagctggg

SEQ ID NO: 1209066 - DNA, 15 bp, Homo sapiens
tcccacctcagctgg

SEQ ID NO: 1209067 - DNA, 15 bp, Homo sapiens
ctcccacctcagctg

SEQ ID NO: 1209068 - DNA, 15 bp, Homo sapiens
cctcccacctcagct

SEQ ID NO: 1209069 - DNA, 15 bp, Homo sapiens
cctcctgagctcaag

SEQ ID NO: 1209070 - DNA, 15 bp, Homo sapiens
acctcctgagctcaa

SEQ ID NO: 1209071 - DNA, 15 bp, Homo sapiens
aacctcctgagctca

SEQ ID NO: 1209072 - DNA, 15 bp, Homo sapiens
taacctcctgagctc

SEQ ID NO: 1209073 - DNA, 15 bp, Homo sapiens
ttaacctcctgagct

SEQ ID NO: 1209074 - DNA, 15 bp, Homo sapiens
cttaacctcctgagc

SEQ ID NO: 1209075 - DNA, 15 bp, Homo sapiens
ccttaacctcctgag

SEQ ID NO: 1209076 - DNA, 15 bp, Homo sapiens
tccttaacctcctga

SEQ ID NO: 1209077 - DNA, 15 bp, Homo sapiens
atccttaacctcctg

SEQ ID NO: 1209078 - DNA, 15 bp, Homo sapiens
catccttaacctcct

SEQ ID NO: 1209079 - DNA, 15 bp, Homo sapiens
gcatccttaacctcc

SEQ ID NO: 1209080 - DNA, 15 bp, Homo sapiens
tgcatccttaacctc

SEQ ID NO: 1209081 - DNA, 15 bp, Homo sapiens
ctgcatccttaacct

SEQ ID NO: 1209082 - DNA, 15 bp, Homo sapiens
actgcatccttaacc

SEQ ID NO: 1209083 - DNA, 15 bp, Homo sapiens
cactgcatccttaac

SEQ ID NO: 1209084 - DNA, 15 bp, Homo sapiens
tcactgcatccttaa

SEQ ID NO: 1209085 - DNA, 15 bp, Homo sapiens
ctcactgcatcctta

SEQ ID NO: 1209086 - DNA, 15 bp, Homo sapiens
gctcactgcatcctt

SEQ ID NO: 1209087 - DNA, 15 bp, Homo sapiens
ggctcactgcatcct

SEQ ID NO: 1209088 - DNA, 15 bp, Homo sapiens
tggctcactgcatcc

SEQ ID NO: 1209089 - DNA, 15 bp, Homo sapiens
ttggctcactgcatc

SEQ ID NO: 1209090 - DNA, 15 bp, Homo sapiens
cttggctcactgcat

SEQ ID NO: 1209091 - DNA, 15 bp, Homo sapiens
ttaggctggagtgca

SEQ ID NO: 1209092 - DNA, 15 bp, Homo sapiens
cttaggctggagtgc

SEQ ID NO: 1209093 - DNA, 15 bp, Homo sapiens
acttaggctggagtg

SEQ ID NO: 1209094 - DNA, 15 bp, Homo sapiens
cacttaggctggagt

SEQ ID NO: 1209095 - DNA, 15 bp, Homo sapiens
tcacttaggctggag

SEQ ID NO: 1209096 - DNA, 15 bp, Homo sapiens
gtcacttaggctgga

SEQ ID NO: 1209097 - DNA, 15 bp, Homo sapiens
tgtcacttaggctgg

SEQ ID NO: 1209098 - DNA, 15 bp, Homo sapiens
ctgtcacttaggctg

SEQ ID NO: 1209099 - DNA, 15 bp, Homo sapiens
tctgtcacttaggct

SEQ ID NO: 1209100 - DNA, 15 bp, Homo sapiens
ctctgtcacttaggc

SEQ ID NO: 1209101 - DNA, 15 bp, Homo sapiens
actctgtcacttagg

SEQ ID NO: 1209102 - DNA, 15 bp, Homo sapiens
cactctgtcacttag

SEQ ID NO: 1209103 - DNA, 15 bp, Homo sapiens
tcactctgtcactta

SEQ ID NO: 1209104 - DNA, 15 bp, Homo sapiens
ctcactctgtcactt

SEQ ID NO: 1209105 - DNA, 15 bp, Homo sapiens
tctcactctgtcact

SEQ ID NO: 1209106 - DNA, 15 bp, Homo sapiens
ttttttcttttttga

SEQ ID NO: 1209107 - DNA, 15 bp, Homo sapiens
ctttttttttctttt

SEQ ID NO: 1209108 - DNA, 15 bp, Homo sapiens
ttctttttttttctt

SEQ ID NO: 1209109 - DNA, 15 bp, Homo sapiens
tttctttttttttct

SEQ ID NO: 1209110 - DNA, 15 bp, Homo sapiens
ttttctttttttttc

SEQ ID NO: 1209111 - DNA, 15 bp, Homo sapiens
gtttttcttttcttt

SEQ ID NO: 1209112 - DNA, 15 bp, Homo sapiens
cgtttttcttttctt

SEQ ID NO: 1209113 - DNA, 15 bp, Homo sapiens
tcgtttttcttttct

SEQ ID NO: 1209114 - DNA, 15 bp, Homo sapiens
gtcgtttttcttttc

SEQ ID NO: 1209115 - DNA, 15 bp, Homo sapiens
ggtcgtttttctttt

SEQ ID NO: 1209116 - DNA, 15 bp, Homo sapiens
tggtcgtttttcttt

SEQ ID NO: 1209117 - DNA, 15 bp, Homo sapiens
ctggtcgtttttctt

SEQ ID NO: 1209118 - DNA, 15 bp, Homo sapiens
tctggtcgtttttct

SEQ ID NO: 1209119 - DNA, 15 bp, Homo sapiens
atctggtcgtttttc

SEQ ID NO: 1209120 - DNA, 15 bp, Homo sapiens
tatctggtcgttttt

SEQ ID NO: 1209121 - DNA, 15 bp, Homo sapiens
ttatctggtcgtttt

SEQ ID NO: 1209122 - DNA, 15 bp, Homo sapiens
cttatctggtcgttt

SEQ ID NO: 1209123 - DNA, 15 bp, Homo sapiens
tcttatctggtcgtt

SEQ ID NO: 1209124 - DNA, 15 bp, Homo sapiens
atcttatctggtcgt

SEQ ID NO: 1209125 - DNA, 15 bp, Homo sapiens
gatcttatctggtcg

SEQ ID NO: 1209126 - DNA, 15 bp, Homo sapiens
agatcttatctggtc

SEQ ID NO: 1209127 - DNA, 15 bp, Homo sapiens
cagatcttatctggt

SEQ ID NO: 1209128 - DNA, 15 bp, Homo sapiens
tcagatcttatctgg

SEQ ID NO: 1209129 - DNA, 15 bp, Homo sapiens
atcagatcttatctg

SEQ ID NO: 1209130 - DNA, 15 bp, Homo sapiens
tatcagatcttatct

SEQ ID NO: 1209131 - DNA, 15 bp, Homo sapiens
ttatcagatcttatc

SEQ ID NO: 1209132 - DNA, 15 bp, Homo sapiens
cttatcagatcttat

SEQ ID NO: 1209133 - DNA, 15 bp, Homo sapiens
ccttatcagatctta

SEQ ID NO: 1209134 - DNA, 15 bp, Homo sapiens
gccttatcagatctt

SEQ ID NO: 1209135 - DNA, 15 bp, Homo sapiens
ggccttatcagatct

SEQ ID NO: 1209136 - DNA, 15 bp, Homo sapiens
gggccttatcagatc

SEQ ID NO: 1209137 - DNA, 15 bp, Homo sapiens
cgggccttatcagat

SEQ ID NO: 1209138 - DNA, 15 bp, Homo sapiens
tcgggccttatcaga

SEQ ID NO: 1209139 - DNA, 15 bp, Homo sapiens
atcgggccttatcag

SEQ ID NO: 1209140 - DNA, 15 bp, Homo sapiens
catcgggccttatca

SEQ ID NO: 1209141 - DNA, 15 bp, Homo sapiens
acatcgggccttatc

SEQ ID NO: 1209142 - DNA, 15 bp, Homo sapiens
aacatcgggccttat

SEQ ID NO: 1209143 - DNA, 15 bp, Homo sapiens
taacatcgggcctta

SEQ ID NO: 1209144 - DNA, 15 bp, Homo sapiens
ttaacatcgggcctt

SEQ ID NO: 1209145 - DNA, 15 bp, Homo sapiens
attaacatcgggcct

SEQ ID NO: 1209146 - DNA, 15 bp, Homo sapiens
tattaacatcgggcc

SEQ ID NO: 1209147 - DNA, 15 bp, Homo sapiens
gtattaacatcgggc

SEQ ID NO: 1209148 - DNA, 15 bp, Homo sapiens
tgtattaacatcggg

SEQ ID NO: 1209149 - DNA, 15 bp, Homo sapiens
atgtattaacatcgg

SEQ ID NO: 1209150 - DNA, 15 bp, Homo sapiens
catgtattaacatcg

SEQ ID NO: 1209151 - DNA, 15 bp, Homo sapiens
tcatgtattaacatc

SEQ ID NO: 1209152 - DNA, 15 bp, Homo sapiens
ttcatgtattaacat

SEQ ID NO: 1209153 - DNA, 15 bp, Homo sapiens
gttcatgtattaaca

SEQ ID NO: 1209154 - DNA, 15 bp, Homo sapiens
agttcatgtattaac

SEQ ID NO: 1209155 - DNA, 15 bp, Homo sapiens
aagttcatgtattaa

SEQ ID NO: 1209156 - DNA, 15 bp, Homo sapiens
aaagttcatgtatta

SEQ ID NO: 1209157 - DNA, 15 bp, Homo sapiens
aaaagttcatgtatt

SEQ ID NO: 1209158 - DNA, 15 bp, Homo sapiens
taaaagttcatgtat

SEQ ID NO: 1209159 - DNA, 15 bp, Homo sapiens
ttaaaagttcatgta

SEQ ID NO: 1209160 - DNA, 15 bp, Homo sapiens
tttaaaagttcatgt

SEQ ID NO: 1209161 - DNA, 15 bp, Homo sapiens
atttaaaagttcatg

SEQ ID NO: 1209162 - DNA, 15 bp, Homo sapiens
tatttaaaagttcat

SEQ ID NO: 1209163 - DNA, 15 bp, Homo sapiens
atatttaaaagttca

SEQ ID NO: 1209164 - DNA, 15 bp, Homo sapiens
aatatttaaaagttc

SEQ ID NO: 1209165 - DNA, 15 bp, Homo sapiens
taatatttaaaagtt

SEQ ID NO: 1209166 - DNA, 15 bp, Homo sapiens
ataatatttaaaagt

SEQ ID NO: 1209167 - DNA, 15 bp, Homo sapiens
aataatatttaaaag

SEQ ID NO: 1209168 - DNA, 15 bp, Homo sapiens
gaataatatttaaaa

SEQ ID NO: 1209169 - DNA, 15 bp, Homo sapiens
agaataatatttaaa

SEQ ID NO: 1209170 - DNA, 15 bp, Homo sapiens
gagaataatatttaa

SEQ ID NO: 1209171 - DNA, 15 bp, Homo sapiens
ggagaataatattta

SEQ ID NO: 1209172 - DNA, 15 bp, Homo sapiens
tggagaataatattt

SEQ ID NO: 1209173 - DNA, 15 bp, Homo sapiens
ctggagaataatatt

SEQ ID NO: 1209174 - DNA, 15 bp, Homo sapiens
actggagaataatat

SEQ ID NO: 1209175 - DNA, 15 bp, Homo sapiens
gactggagaataata

SEQ ID NO: 1209176 - DNA, 15 bp, Homo sapiens
agactggagaataat

SEQ ID NO: 1209177 - DNA, 15 bp, Homo sapiens
aaaagactggagaat

SEQ ID NO: 1209178 - DNA, 15 bp, Homo sapiens
aaaaagactggagaa

SEQ ID NO: 1209179 - DNA, 15 bp, Homo sapiens
aaaaaagactggaga

SEQ ID NO: 1209180 - DNA, 15 bp, Homo sapiens
aaaaaaagactggag

SEQ ID NO: 1209181 - DNA, 15 bp, Homo sapiens
aaaaaaaagactgga

SEQ ID NO: 1209182 - DNA, 15 bp, Homo sapiens
aaaaaaaaagactgg

SEQ ID NO: 1209183 - DNA, 15 bp, Homo sapiens
aaaaaaaaaagactg

SEQ ID NO: 1209184 - DNA, 15 bp, Homo sapiens
aaaaaaaaaaagact

SEQ ID NO: 1209185 - DNA, 15 bp, Homo sapiens
tgagatagtgccact

SEQ ID NO: 1209186 - DNA, 15 bp, Homo sapiens
ctgagatagtgccac

SEQ ID NO: 1209187 - DNA, 15 bp, Homo sapiens
gctgagatagtgcca

SEQ ID NO: 1209188 - DNA, 15 bp, Homo sapiens
agctgagatagtgcc

SEQ ID NO: 1209189 - DNA, 15 bp, Homo sapiens
gagctgagatagtgc

SEQ ID NO: 1209190 - DNA, 15 bp, Homo sapiens
tgagctgagatagtg

SEQ ID NO: 1209191 - DNA, 15 bp, Homo sapiens
gtgagctgagatagt

SEQ ID NO: 1209192 - DNA, 15 bp, Homo sapiens
agtgagctgagatag

SEQ ID NO: 1209193 - DNA, 15 bp, Homo sapiens
cagtgagctgagata

SEQ ID NO: 1209194 - DNA, 15 bp, Homo sapiens
cttcagtgagctgag

SEQ ID NO: 1209195 - DNA, 15 bp, Homo sapiens
acttcagtgagctga

SEQ ID NO: 1209196 - DNA, 15 bp, Homo sapiens
gacttcagtgagctg

SEQ ID NO: 1209197 - DNA, 15 bp, Homo sapiens
agacttcagtgagct

SEQ ID NO: 1209198 - DNA, 15 bp, Homo sapiens
aagacttcagtgagc

SEQ ID NO: 1209199 - DNA, 15 bp, Homo sapiens
taagacttcagtgag

SEQ ID NO: 1209200 - DNA, 15 bp, Homo sapiens
ttaagacttcagtga

SEQ ID NO: 1209201 - DNA, 15 bp, Homo sapiens
attaagacttcagtg

SEQ ID NO: 1209202 - DNA, 15 bp, Homo sapiens
gattaagacttcagt

SEQ ID NO: 1209203 - DNA, 15 bp, Homo sapiens
agattaagacttcag

SEQ ID NO: 1209204 - DNA, 15 bp, Homo sapiens
gagattaagacttca

SEQ ID NO: 1209205 - DNA, 15 bp, Homo sapiens
ggagattaagacttc

SEQ ID NO: 1209206 - DNA, 15 bp, Homo sapiens
aggagattaagactt

SEQ ID NO: 1209207 - DNA, 15 bp, Homo sapiens
caggagattaagact

SEQ ID NO: 1209208 - DNA, 15 bp, Homo sapiens
ccaggagattaagac

SEQ ID NO: 1209209 - DNA, 15 bp, Homo sapiens
cccaggagattaaga

SEQ ID NO: 1209210 - DNA, 15 bp, Homo sapiens
tgagcccaggagatt

SEQ ID NO: 1209211 - DNA, 15 bp, Homo sapiens
ttgagcccaggagat

SEQ ID NO: 1209212 - DNA, 15 bp, Homo sapiens
cttgagcccaggaga

SEQ ID NO: 1209213 - DNA, 15 bp, Homo sapiens
ggtcccagctacttg

SEQ ID NO: 1209214 - DNA, 15 bp, Homo sapiens
cggtcccagctactt

SEQ ID NO: 1209215 - DNA, 15 bp, Homo sapiens
tctgcggtcccagct

SEQ ID NO: 1209216 - DNA, 15 bp, Homo sapiens
gtctgcggtcccagc

SEQ ID NO: 1209217 - DNA, 15 bp, Homo sapiens
tgtctgcggtcccag

SEQ ID NO: 1209218 - DNA, 15 bp, Homo sapiens
atgtctgcggtccca

SEQ ID NO: 1209219 - DNA, 15 bp, Homo sapiens
catgtctgcggtccc

SEQ ID NO: 1209220 - DNA, 15 bp, Homo sapiens
gcatgtctgcggtcc

SEQ ID NO: 1209221 - DNA, 15 bp, Homo sapiens
tgcatgtctgcggtc

SEQ ID NO: 1209222 - DNA, 15 bp, Homo sapiens
gtgcatgtctgcggt

SEQ ID NO: 1209223 - DNA, 15 bp, Homo sapiens
ggtgcatgtctgcgg

SEQ ID NO: 1209224 - DNA, 15 bp, Homo sapiens
tggtgcatgtctgcg

SEQ ID NO: 1209225 - DNA, 15 bp, Homo sapiens
gtggtgcatgtctgc

SEQ ID NO: 1209226 - DNA, 15 bp, Homo sapiens
ggtggtgcatgtctg

SEQ ID NO: 1209227 - DNA, 15 bp, Homo sapiens
tggtggtgcatgtct

SEQ ID NO: 1209228 - DNA, 15 bp, Homo sapiens
atggtggtgcatgtc

SEQ ID NO: 1209229 - DNA, 15 bp, Homo sapiens
catggtggtgcatgt

SEQ ID NO: 1209230 - DNA, 15 bp, Homo sapiens
gttagccaggcatgg

SEQ ID NO: 1209231 - DNA, 15 bp, Homo sapiens
agttagccaggcatg

SEQ ID NO: 1209232 - DNA, 15 bp, Homo sapiens
aagttagccaggcat

SEQ ID NO: 1209233 - DNA, 15 bp, Homo sapiens
aaagttagccaggca

SEQ ID NO: 1209234 - DNA, 15 bp, Homo sapiens
aaaagttagccaggc

SEQ ID NO: 1209235 - DNA, 15 bp, Homo sapiens
caaaagttagccagg

SEQ ID NO: 1209236 - DNA, 15 bp, Homo sapiens
acaaaagttagccag

SEQ ID NO: 1209237 - DNA, 15 bp, Homo sapiens
tacaaaagttagcca

SEQ ID NO: 1209238 - DNA, 15 bp, Homo sapiens
atacaaaagttagcc

SEQ ID NO: 1209239 - DNA, 15 bp, Homo sapiens
catacaaaagttagc

SEQ ID NO: 1209240 - DNA, 15 bp, Homo sapiens
acatacaaaagttag

SEQ ID NO: 1209241 - DNA, 15 bp, Homo sapiens
aacatacaaaagtta

SEQ ID NO: 1209242 - DNA, 15 bp, Homo sapiens
aaacatacaaaagtt

SEQ ID NO: 1209243 - DNA, 15 bp, Homo sapiens
aaaacatacaaaagt

SEQ ID NO: 1209244 - DNA, 15 bp, Homo sapiens
aaaaacatacaaaag

SEQ ID NO: 1209245 - DNA, 15 bp, Homo sapiens
caaaaacatacaaaa

SEQ ID NO: 1209246 - DNA, 15 bp, Homo sapiens
acaaaaacatacaaa

SEQ ID NO: 1209247 - DNA, 15 bp, Homo sapiens
tacaaaaacatacaa

SEQ ID NO: 1209248 - DNA, 15 bp, Homo sapiens
ctacaaaaacataca

SEQ ID NO: 1209249 - DNA, 15 bp, Homo sapiens
tctacaaaaacatac

SEQ ID NO: 1209250 - DNA, 15 bp, Homo sapiens
ctctacaaaaacata

SEQ ID NO: 1209251 - DNA, 15 bp, Homo sapiens
tctctacaaaaacat

SEQ ID NO: 1209252 - DNA, 15 bp, Homo sapiens
atctctacaaaaaca

SEQ ID NO: 1209253 - DNA, 15 bp, Homo sapiens
catctctacaaaaac

SEQ ID NO: 1209254 - DNA, 15 bp, Homo sapiens
ggaccccatctctac

SEQ ID NO: 1209255 - DNA, 15 bp, Homo sapiens
gggaccccatctcta

SEQ ID NO: 1209256 - DNA, 15 bp, Homo sapiens
tgggaccccatctct

SEQ ID NO: 1209257 - DNA, 15 bp, Homo sapiens
gtgggaccccatctc

SEQ ID NO: 1209258 - DNA, 15 bp, Homo sapiens
agtgggaccccatct

SEQ ID NO: 1209259 - DNA, 15 bp, Homo sapiens
tagtgggaccccatc

SEQ ID NO: 1209260 - DNA, 15 bp, Homo sapiens
atagtgggaccccat

SEQ ID NO: 1209261 - DNA, 15 bp, Homo sapiens
catagtgggacccca

SEQ ID NO: 1209262 - DNA, 15 bp, Homo sapiens
acatagtgggacccc

SEQ ID NO: 1209263 - DNA, 15 bp, Homo sapiens
aacatagtgggaccc

SEQ ID NO: 1209264 - DNA, 15 bp, Homo sapiens
caacatagtgggacc

SEQ ID NO: 1209265 - DNA, 15 bp, Homo sapiens
gcaacatagtgggac

SEQ ID NO: 1209266 - DNA, 15 bp, Homo sapiens
agcaacatagtggga

SEQ ID NO: 1209267 - DNA, 15 bp, Homo sapiens
aagcaacatagtggg

SEQ ID NO: 1209268 - DNA, 15 bp, Homo sapiens
taagcaacatagtgg

SEQ ID NO: 1209269 - DNA, 15 bp, Homo sapiens
ctaagcaacatagtg

SEQ ID NO: 1209270 - DNA, 15 bp, Homo sapiens
cctaagcaacatagt

SEQ ID NO: 1209271 - DNA, 15 bp, Homo sapiens
acctaagcaacatag

SEQ ID NO: 1209272 - DNA, 15 bp, Homo sapiens
aacctaagcaacata

SEQ ID NO: 1209273 - DNA, 15 bp, Homo sapiens
caacctaagcaacat

SEQ ID NO: 1209274 - DNA, 15 bp, Homo sapiens
gcaacctaagcaaca

SEQ ID NO: 1209275 - DNA, 15 bp, Homo sapiens
agcaacctaagcaac

SEQ ID NO: 1209276 - DNA, 15 bp, Homo sapiens
gagcaacctaagcaa

SEQ ID NO: 1209277 - DNA, 15 bp, Homo sapiens
agagcaacctaagca

SEQ ID NO: 1209278 - DNA, 15 bp, Homo sapiens
gagagcaacctaagc

SEQ ID NO: 1209279 - DNA, 15 bp, Homo sapiens
cgagagcaacctaag

SEQ ID NO: 1209280 - DNA, 15 bp, Homo sapiens
tcgagagcaacctaa

SEQ ID NO: 1209281 - DNA, 15 bp, Homo sapiens
ttcgagagcaaccta

SEQ ID NO: 1209282 - DNA, 15 bp, Homo sapiens
gttcgagagcaacct

SEQ ID NO: 1209283 - DNA, 15 bp, Homo sapiens
agttcgagagcaacc

SEQ ID NO: 1209284 - DNA, 15 bp, Homo sapiens
gagttcgagagcaac

SEQ ID NO: 1209285 - DNA, 15 bp, Homo sapiens
ggagttcgagagcaa

SEQ ID NO: 1209286 - DNA, 15 bp, Homo sapiens
aggagttcgagagca

SEQ ID NO: 1209287 - DNA, 15 bp, Homo sapiens
caggagttcgagagc

SEQ ID NO: 1209288 - DNA, 15 bp, Homo sapiens
ccaggagttcgagag

SEQ ID NO: 1209289 - DNA, 15 bp, Homo sapiens
agaggattgcttgag

SEQ ID NO: 1209290 - DNA, 15 bp, Homo sapiens
gagaggattgcttga

SEQ ID NO: 1209291 - DNA, 15 bp, Homo sapiens
tgagaggattgcttg

SEQ ID NO: 1209292 - DNA, 15 bp, Homo sapiens
gtgagaggattgctt

SEQ ID NO: 1209293 - DNA, 15 bp, Homo sapiens
ggtgagaggattgct

SEQ ID NO: 1209294 - DNA, 15 bp, Homo sapiens
aggtgagaggattgc

SEQ ID NO: 1209295 - DNA, 15 bp, Homo sapiens
gaggtgagaggattg

SEQ ID NO: 1209296 - DNA, 15 bp, Homo sapiens
tgaggtgagaggatt

SEQ ID NO: 1209297 - DNA, 15 bp, Homo sapiens
agaggctgaggtgag

SEQ ID NO: 1209298 - DNA, 15 bp, Homo sapiens
gagaggctgaggtga

SEQ ID NO: 1209299 - DNA, 15 bp, Homo sapiens
tgagaggctgaggtg

SEQ ID NO: 1209300 - DNA, 15 bp, Homo sapiens
ttgagaggctgaggt

SEQ ID NO: 1209301 - DNA, 15 bp, Homo sapiens
cttgagaggctgagg

SEQ ID NO: 1209302 - DNA, 15 bp, Homo sapiens
gcttgagaggctgag

SEQ ID NO: 1209303 - DNA, 15 bp, Homo sapiens
agcttgagaggctga

SEQ ID NO: 1209304 - DNA, 15 bp, Homo sapiens
cagcttgagaggctg

SEQ ID NO: 1209305 - DNA, 15 bp, Homo sapiens
gcagcttgagaggct

SEQ ID NO: 1209306 - DNA, 15 bp, Homo sapiens
agcagcttgagaggc

SEQ ID NO: 1209307 - DNA, 15 bp, Homo sapiens
cagcagcttgagagg

SEQ ID NO: 1209308 - DNA, 15 bp, Homo sapiens
ccagcagcttgagag

SEQ ID NO: 1209309 - DNA, 15 bp, Homo sapiens
cccagcagcttgaga

SEQ ID NO: 1209310 - DNA, 15 bp, Homo sapiens
atcccagcagcttga

SEQ ID NO: 1209311 - DNA, 15 bp, Homo sapiens
aatcccagcagcttg

SEQ ID NO: 1209312 - DNA, 15 bp, Homo sapiens
taatcccagcagctt

SEQ ID NO: 1209313 - DNA, 15 bp, Homo sapiens
gtaatcccagcagct

SEQ ID NO: 1209314 - DNA, 15 bp, Homo sapiens
tgtaatcccagcagc

SEQ ID NO: 1209315 - DNA, 15 bp, Homo sapiens
ctgtaatcccagcag

SEQ ID NO: 1209316 - DNA, 15 bp, Homo sapiens
actgtaatcccagca

SEQ ID NO: 1209317 - DNA, 15 bp, Homo sapiens
tatgactgtaatccc

SEQ ID NO: 1209318 - DNA, 15 bp, Homo sapiens
ttatgactgtaatcc

SEQ ID NO: 1209319 - DNA, 15 bp, Homo sapiens
cttatgactgtaatc

SEQ ID NO: 1209320 - DNA, 15 bp, Homo sapiens
gcttatgactgtaat

SEQ ID NO: 1209321 - DNA, 15 bp, Homo sapiens
ggcttatgactgtaa

SEQ ID NO: 1209322 - DNA, 15 bp, Homo sapiens
tggcttatgactgta

SEQ ID NO: 1209323 - DNA, 15 bp, Homo sapiens
gtggcttatgactgt

SEQ ID NO: 1209324 - DNA, 15 bp, Homo sapiens
agtggcttatgactg

SEQ ID NO: 1209325 - DNA, 15 bp, Homo sapiens
cagtggcttatgact

SEQ ID NO: 1209326 - DNA, 15 bp, Homo sapiens
acagtggcttatgac

SEQ ID NO: 1209327 - DNA, 15 bp, Homo sapiens
cacagtggcttatga

SEQ ID NO: 1209328 - DNA, 15 bp, Homo sapiens
tcacagtggcttatg

SEQ ID NO: 1209329 - DNA, 15 bp, Homo sapiens
gtcacagtggcttat

SEQ ID NO: 1209330 - DNA, 15 bp, Homo sapiens
ggtcacagtggctta

SEQ ID NO: 1209331 - DNA, 15 bp, Homo sapiens
tggtcacagtggctt

SEQ ID NO: 1209332 - DNA, 15 bp, Homo sapiens
ctggtcacagtggct

SEQ ID NO: 1209333 - DNA, 15 bp, Homo sapiens
gctggtcacagtggc

SEQ ID NO: 1209334 - DNA, 15 bp, Homo sapiens
ggctggtcacagtgg

SEQ ID NO: 1209335 - DNA, 15 bp, Homo sapiens
aggctggtcacagtg

SEQ ID NO: 1209336 - DNA, 15 bp, Homo sapiens
taggctggtcacagt

SEQ ID NO: 1209337 - DNA, 15 bp, Homo sapiens
ataggctggtcacag

SEQ ID NO: 1209338 - DNA, 15 bp, Homo sapiens
aataggctggtcaca

SEQ ID NO: 1209339 - DNA, 15 bp, Homo sapiens
gaataggctggtcac

SEQ ID NO: 1209340 - DNA, 15 bp, Homo sapiens
agaataggctggtca

SEQ ID NO: 1209341 - DNA, 15 bp, Homo sapiens
gagaataggctggtc

SEQ ID NO: 1209342 - DNA, 15 bp, Homo sapiens
agagaataggctggt

SEQ ID NO: 1209343 - DNA, 15 bp, Homo sapiens
tagagaataggctgg

SEQ ID NO: 1209344 - DNA, 15 bp, Homo sapiens
atagagaataggctg

SEQ ID NO: 1209345 - DNA, 15 bp, Homo sapiens
aatagagaataggct

SEQ ID NO: 1209346 - DNA, 15 bp, Homo sapiens
gaatagagaataggc

SEQ ID NO: 1209347 - DNA, 15 bp, Homo sapiens
agaatagagaatagg

SEQ ID NO: 1209348 - DNA, 15 bp, Homo sapiens
aagaatagagaatag

SEQ ID NO: 1209349 - DNA, 15 bp, Homo sapiens
caagaatagagaata

SEQ ID NO: 1209350 - DNA, 15 bp, Homo sapiens
tcaagaatagagaat

SEQ ID NO: 1209351 - DNA, 15 bp, Homo sapiens
atcaagaatagagaa

SEQ ID NO: 1209352 - DNA, 15 bp, Homo sapiens
aatcaagaatagaga

SEQ ID NO: 1209353 - DNA, 15 bp, Homo sapiens
caatcaagaatagag

SEQ ID NO: 1209354 - DNA, 15 bp, Homo sapiens
acaatcaagaataga

SEQ ID NO: 1209355 - DNA, 15 bp, Homo sapiens
tacaatcaagaatag

SEQ ID NO: 1209356 - DNA, 15 bp, Homo sapiens
atacaatcaagaata

SEQ ID NO: 1209357 - DNA, 15 bp, Homo sapiens
catacaatcaagaat

SEQ ID NO: 1209358 - DNA, 15 bp, Homo sapiens
acatacaatcaagaa

SEQ ID NO: 1209359 - DNA, 15 bp, Homo sapiens
gacatacaatcaaga

SEQ ID NO: 1209360 - DNA, 15 bp, Homo sapiens
ggacatacaatcaag

SEQ ID NO: 1209361 - DNA, 15 bp, Homo sapiens
tggacatacaatcaa

SEQ ID NO: 1209362 - DNA, 15 bp, Homo sapiens
ttggacatacaatca

SEQ ID NO: 1209363 - DNA, 15 bp, Homo sapiens
tttggacatacaatc

SEQ ID NO: 1209364 - DNA, 15 bp, Homo sapiens
ttttggacatacaat

SEQ ID NO: 1209365 - DNA, 15 bp, Homo sapiens
attttggacatacaa

SEQ ID NO: 1209366 - DNA, 15 bp, Homo sapiens
tattttggacataca

SEQ ID NO: 1209367 - DNA, 15 bp, Homo sapiens
atattttggacatac

SEQ ID NO: 1209368 - DNA, 15 bp, Homo sapiens
tatattttggacata

SEQ ID NO: 1209369 - DNA, 15 bp, Homo sapiens
gtatattttggacat

SEQ ID NO: 1209370 - DNA, 15 bp, Homo sapiens
ggtatattttggaca

SEQ ID NO: 1209371 - DNA, 15 bp, Homo sapiens
tggtatattttggac

SEQ ID NO: 1209372 - DNA, 15 bp, Homo sapiens
atggtatattttgga

SEQ ID NO: 1209373 - DNA, 15 bp, Homo sapiens
gatggtatattttgg

SEQ ID NO: 1209374 - DNA, 15 bp, Homo sapiens
tgatggtatattttg

SEQ ID NO: 1209375 - DNA, 15 bp, Homo sapiens
atgatggtatatttt

SEQ ID NO: 1209376 - DNA, 15 bp, Homo sapiens
tatgatggtatattt

SEQ ID NO: 1209377 - DNA, 15 bp, Homo sapiens
ttatgatggtatatt

SEQ ID NO: 1209378 - DNA, 15 bp, Homo sapiens
tttatgatggtatat

SEQ ID NO: 1209379 - DNA, 15 bp, Homo sapiens
ttttatgatggtata

SEQ ID NO: 1209380 - DNA, 15 bp, Homo sapiens
tttttatgatggtat

SEQ ID NO: 1209381 - DNA, 15 bp, Homo sapiens
ttttttatgatggta

SEQ ID NO: 1209382 - DNA, 15 bp, Homo sapiens
cttttttatgatggt

SEQ ID NO: 1209383 - DNA, 15 bp, Homo sapiens
gcttttttatgatgg

SEQ ID NO: 1209384 - DNA, 15 bp, Homo sapiens
tgcttttttatgatg

SEQ ID NO: 1209385 - DNA, 15 bp, Homo sapiens
gtgcttttttatgat

SEQ ID NO: 1209386 - DNA, 15 bp, Homo sapiens
ggtgcttttttatga

SEQ ID NO: 1209387 - DNA, 15 bp, Homo sapiens
tggtgcttttttatg

SEQ ID NO: 1209388 - DNA, 15 bp, Homo sapiens
gtggtgcttttttat

SEQ ID NO: 1209389 - DNA, 15 bp, Homo sapiens
agtggtgctttttta

SEQ ID NO: 1209390 - DNA, 15 bp, Homo sapiens
cagtggtgctttttt

SEQ ID NO: 1209391 - DNA, 15 bp, Homo sapiens
ccagtggtgcttttt

SEQ ID NO: 1209392 - DNA, 15 bp, Homo sapiens
tccagtggtgctttt

SEQ ID NO: 1209393 - DNA, 15 bp, Homo sapiens
ttccagtggtgcttt

SEQ ID NO: 1209394 - DNA, 15 bp, Homo sapiens
attccagtggtgctt

SEQ ID NO: 1209395 - DNA, 15 bp, Homo sapiens
gattccagtggtgct

SEQ ID NO: 1209396 - DNA, 15 bp, Homo sapiens
tgattccagtggtgc

SEQ ID NO: 1209397 - DNA, 15 bp, Homo sapiens
ttgattccagtggtg

SEQ ID NO: 1209398 - DNA, 15 bp, Homo sapiens
tttgattccagtggt

SEQ ID NO: 1209399 - DNA, 15 bp, Homo sapiens
ctttgattccagtgg

SEQ ID NO: 1209400 - DNA, 15 bp, Homo sapiens
tctttgattccagtg

SEQ ID NO: 1209401 - DNA, 15 bp, Homo sapiens
atctttgattccagt

SEQ ID NO: 1209402 - DNA, 15 bp, Homo sapiens
tatctttgattccag

SEQ ID NO: 1209403 - DNA, 15 bp, Homo sapiens
ctatctttgattcca

SEQ ID NO: 1209404 - DNA, 15 bp, Homo sapiens
cctatctttgattcc

SEQ ID NO: 1209405 - DNA, 15 bp, Homo sapiens
ccctatctttgattc

SEQ ID NO: 1209406 - DNA, 15 bp, Homo sapiens
cccctatctttgatt

SEQ ID NO: 1209407 - DNA, 15 bp, Homo sapiens
gcccctatctttgat

SEQ ID NO: 1209408 - DNA, 15 bp, Homo sapiens
agcccctatctttga

SEQ ID NO: 1209409 - DNA, 15 bp, Homo sapiens
aagcccctatctttg

SEQ ID NO: 1209410 - DNA, 15 bp, Homo sapiens
taagcccctatcttt

SEQ ID NO: 1209411 - DNA, 15 bp, Homo sapiens
ttaagcccctatctt

SEQ ID NO: 1209412 - DNA, 15 bp, Homo sapiens
attaagcccctatct

SEQ ID NO: 1209413 - DNA, 15 bp, Homo sapiens
cattaagcccctatc

SEQ ID NO: 1209414 - DNA, 15 bp, Homo sapiens
ccattaagcccctat

SEQ ID NO: 1209415 - DNA, 15 bp, Homo sapiens
cccattaagccccta

SEQ ID NO: 1209416 - DNA, 15 bp, Homo sapiens
gcccattaagcccct

SEQ ID NO: 1209417 - DNA, 15 bp, Homo sapiens
tgcccattaagcccc

SEQ ID NO: 1209418 - DNA, 15 bp, Homo sapiens
atgcccattaagccc

SEQ ID NO: 1209419 - DNA, 15 bp, Homo sapiens
aatgcccattaagcc

SEQ ID NO: 1209420 - DNA, 15 bp, Homo sapiens
aaatgcccattaagc

SEQ ID NO: 1209421 - DNA, 15 bp, Homo sapiens
aaaatgcccattaag

SEQ ID NO: 1209422 - DNA, 15 bp, Homo sapiens
aaaaatgcccattaa

SEQ ID NO: 1209423 - DNA, 15 bp, Homo sapiens
caaaaatgcccatta

SEQ ID NO: 1209424 - DNA, 15 bp, Homo sapiens
acaaaaatgcccatt

SEQ ID NO: 1209425 - DNA, 15 bp, Homo sapiens
cacaaaaatgcccat

SEQ ID NO: 1209426 - DNA, 15 bp, Homo sapiens
gcacaaaaatgccca

SEQ ID NO: 1209427 - DNA, 15 bp, Homo sapiens
agcacaaaaatgccc

SEQ ID NO: 1209428 - DNA, 15 bp, Homo sapiens
aagcacaaaaatgcc

SEQ ID NO: 1209429 - DNA, 15 bp, Homo sapiens
taagcacaaaaatgc

SEQ ID NO: 1209430 - DNA, 15 bp, Homo sapiens
ataagcacaaaaatg

SEQ ID NO: 1209431 - DNA, 15 bp, Homo sapiens
aataagcacaaaaat

SEQ ID NO: 1209432 - DNA, 15 bp, Homo sapiens
aaataagcacaaaaa

SEQ ID NO: 1209433 - DNA, 15 bp, Homo sapiens
taaataagcacaaaa

SEQ ID NO: 1209434 - DNA, 15 bp, Homo sapiens
ttaaataagcacaaa

SEQ ID NO: 1209435 - DNA, 15 bp, Homo sapiens
attaaataagcacaa

SEQ ID NO: 1209436 - DNA, 15 bp, Homo sapiens
gattaaataagcaca

SEQ ID NO: 1209437 - DNA, 15 bp, Homo sapiens
ggattaaataagcac

SEQ ID NO: 1209438 - DNA, 15 bp, Homo sapiens
aggattaaataagca

SEQ ID NO: 1209439 - DNA, 15 bp, Homo sapiens
aaggattaaataagc

SEQ ID NO: 1209440 - DNA, 15 bp, Homo sapiens
aaaggattaaataag

SEQ ID NO: 1209441 - DNA, 15 bp, Homo sapiens
aaaaggattaaataa

SEQ ID NO: 1209442 - DNA, 15 bp, Homo sapiens
gaaaaggattaaata

SEQ ID NO: 1209443 - DNA, 15 bp, Homo sapiens
ggaaaaggattaaat

SEQ ID NO: 1209444 - DNA, 15 bp, Homo sapiens
aggaaaaggattaaa

SEQ ID NO: 1209445 - DNA, 15 bp, Homo sapiens
caggaaaaggattaa

SEQ ID NO: 1209446 - DNA, 15 bp, Homo sapiens
acaggaaaaggatta

SEQ ID NO: 1209447 - DNA, 15 bp, Homo sapiens
gacaggaaaaggatt

SEQ ID NO: 1209448 - DNA, 15 bp, Homo sapiens
agacaggaaaaggat

SEQ ID NO: 1209449 - DNA, 15 bp, Homo sapiens
gagacaggaaaagga

SEQ ID NO: 1209450 - DNA, 15 bp, Homo sapiens
agagacaggaaaagg

SEQ ID NO: 1209451 - DNA, 15 bp, Homo sapiens
tagagacaggaaaag

SEQ ID NO: 1209452 - DNA, 15 bp, Homo sapiens
ctagagacaggaaaa

SEQ ID NO: 1209453 - DNA, 15 bp, Homo sapiens
cctagagacaggaaa

SEQ ID NO: 1209454 - DNA, 15 bp, Homo sapiens
gcctagagacaggaa

SEQ ID NO: 1209455 - DNA, 15 bp, Homo sapiens
tgcctagagacagga

SEQ ID NO: 1209456 - DNA, 15 bp, Homo sapiens
ctgcctagagacagg

SEQ ID NO: 1209457 - DNA, 15 bp, Homo sapiens
actgcctagagacag

SEQ ID NO: 1209458 - DNA, 15 bp, Homo sapiens
cactgcctagagaca

SEQ ID NO: 1209459 - DNA, 15 bp, Homo sapiens
acactgcctagagac

SEQ ID NO: 1209460 - DNA, 15 bp, Homo sapiens
tacactgcctagaga

SEQ ID NO: 1209461 - DNA, 15 bp, Homo sapiens
gtacactgcctagag

SEQ ID NO: 1209462 - DNA, 15 bp, Homo sapiens
tgtacactgcctaga

SEQ ID NO: 1209463 - DNA, 15 bp, Homo sapiens
ctgtacactgcctag

SEQ ID NO: 1209464 - DNA, 15 bp, Homo sapiens
tctgtacactgccta

SEQ ID NO: 1209465 - DNA, 15 bp, Homo sapiens
atctgtacactgcct

SEQ ID NO: 1209466 - DNA, 15 bp, Homo sapiens
tatctgtacactgcc

SEQ ID NO: 1209467 - DNA, 15 bp, Homo sapiens
ctatctgtacactgc

SEQ ID NO: 1209468 - DNA, 15 bp, Homo sapiens
cctatctgtacactg

SEQ ID NO: 1209469 - DNA, 15 bp, Homo sapiens
ccctatctgtacact

SEQ ID NO: 1209470 - DNA, 15 bp, Homo sapiens
cccctatctgtacac

SEQ ID NO: 1209471 - DNA, 15 bp, Homo sapiens
tcccctatctgtaca

SEQ ID NO: 1209472 - DNA, 15 bp, Homo sapiens
ttcccctatctgtac

SEQ ID NO: 1209473 - DNA, 15 bp, Homo sapiens
tttcccctatctgta

SEQ ID NO: 1209474 - DNA, 15 bp, Homo sapiens
atttcccctatctgt

SEQ ID NO: 1209475 - DNA, 15 bp, Homo sapiens
aatttcccctatctg

SEQ ID NO: 1209476 - DNA, 15 bp, Homo sapiens
caatttcccctatct

SEQ ID NO: 1209477 - DNA, 15 bp, Homo sapiens
acaatttcccctatc

SEQ ID NO: 1209478 - DNA, 15 bp, Homo sapiens
cacaatttcccctat

SEQ ID NO: 1209479 - DNA, 15 bp, Homo sapiens
acacaatttccccta

SEQ ID NO: 1209480 - DNA, 15 bp, Homo sapiens
aacacaatttcccct

SEQ ID NO: 1209481 - DNA, 15 bp, Homo sapiens
aaacacaatttcccc

SEQ ID NO: 1209482 - DNA, 15 bp, Homo sapiens
gaaacacaatttccc

SEQ ID NO: 1209483 - DNA, 15 bp, Homo sapiens
ggaaacacaatttcc

SEQ ID NO: 1209484 - DNA, 15 bp, Homo sapiens
aggaaacacaatttc

SEQ ID NO: 1209485 - DNA, 15 bp, Homo sapiens
caggaaacacaattt

SEQ ID NO: 1209486 - DNA, 15 bp, Homo sapiens
tcaggaaacacaatt

SEQ ID NO: 1209487 - DNA, 15 bp, Homo sapiens
ctcaggaaacacaat

SEQ ID NO: 1209488 - DNA, 15 bp, Homo sapiens
actcaggaaacacaa

SEQ ID NO: 1209489 - DNA, 15 bp, Homo sapiens
tactcaggaaacaca

SEQ ID NO: 1209490 - DNA, 15 bp, Homo sapiens
gtactcaggaaacac

SEQ ID NO: 1209491 - DNA, 15 bp, Homo sapiens
agtactcaggaaaca

SEQ ID NO: 1209492 - DNA, 15 bp, Homo sapiens
aagtactcaggaaac

SEQ ID NO: 1209493 - DNA, 15 bp, Homo sapiens
aaagtactcaggaaa

SEQ ID NO: 1209494 - DNA, 15 bp, Homo sapiens
aaaagtactcaggaa

SEQ ID NO: 1209495 - DNA, 15 bp, Homo sapiens
taaaagtactcagga

SEQ ID NO: 1209496 - DNA, 15 bp, Homo sapiens
ataaaagtactcagg

SEQ ID NO: 1209497 - DNA, 15 bp, Homo sapiens
tataaaagtactcag

SEQ ID NO: 1209498 - DNA, 15 bp, Homo sapiens
atataaaagtactca

SEQ ID NO: 1209499 - DNA, 15 bp, Homo sapiens
catataaaagtactc

SEQ ID NO: 1209500 - DNA, 15 bp, Homo sapiens
gcatataaaagtact

SEQ ID NO: 1209501 - DNA, 15 bp, Homo sapiens
ggcatataaaagtac

SEQ ID NO: 1209502 - DNA, 15 bp, Homo sapiens
tggcatataaaagta

SEQ ID NO: 1209503 - DNA, 15 bp, Homo sapiens
atggcatataaaagt

SEQ ID NO: 1209504 - DNA, 15 bp, Homo sapiens
catggcatataaaag

SEQ ID NO: 1209505 - DNA, 15 bp, Homo sapiens
ccatggcatataaaa

SEQ ID NO: 1209506 - DNA, 15 bp, Homo sapiens
tccatggcatataaa

SEQ ID NO: 1209507 - DNA, 15 bp, Homo sapiens
ttccatggcatataa

SEQ ID NO: 1209508 - DNA, 15 bp, Homo sapiens
gttccatggcatata

SEQ ID NO: 1209509 - DNA, 15 bp, Homo sapiens
agttccatggcatat

SEQ ID NO: 1209510 - DNA, 15 bp, Homo sapiens
cagttccatggcata

SEQ ID NO: 1209511 - DNA, 15 bp, Homo sapiens
acagttccatggcat

SEQ ID NO: 1209512 - DNA, 15 bp, Homo sapiens
cacagttccatggca

SEQ ID NO: 1209513 - DNA, 15 bp, Homo sapiens
ccacagttccatggc

SEQ ID NO: 1209514 - DNA, 15 bp, Homo sapiens
cccacagttccatgg

SEQ ID NO: 1209515 - DNA, 15 bp, Homo sapiens
ccccacagttccatg

SEQ ID NO: 1209516 - DNA, 15 bp, Homo sapiens
cccccacagttccat

SEQ ID NO: 1209517 - DNA, 15 bp, Homo sapiens
gcccccacagttcca

SEQ ID NO: 1209518 - DNA, 15 bp, Homo sapiens
agcccccacagttcc

SEQ ID NO: 1209519 - DNA, 15 bp, Homo sapiens
aagcccccacagttc

SEQ ID NO: 1209520 - DNA, 15 bp, Homo sapiens
aaagcccccacagtt

SEQ ID NO: 1209521 - DNA, 15 bp, Homo sapiens
aaaagcccccacagt

SEQ ID NO: 1209522 - DNA, 15 bp, Homo sapiens
aaaaagcccccacag

SEQ ID NO: 1209523 - DNA, 15 bp, Homo sapiens
taaaaagcccccaca

SEQ ID NO: 1209524 - DNA, 15 bp, Homo sapiens
ataaaaagcccccac

SEQ ID NO: 1209525 - DNA, 15 bp, Homo sapiens
tataaaaagccccca

SEQ ID NO: 1209526 - DNA, 15 bp, Homo sapiens
atataaaaagccccc

SEQ ID NO: 1209527 - DNA, 15 bp, Homo sapiens
aatataaaaagcccc

SEQ ID NO: 1209528 - DNA, 15 bp, Homo sapiens
aaatataaaaagccc

SEQ ID NO: 1209529 - DNA, 15 bp, Homo sapiens
aaaatataaaaagcc

SEQ ID NO: 1209530 - DNA, 15 bp, Homo sapiens
caaaatataaaaagc

SEQ ID NO: 1209531 - DNA, 15 bp, Homo sapiens
tcaaaatataaaaag

SEQ ID NO: 1209532 - DNA, 15 bp, Homo sapiens
ttcaaaatataaaaa

SEQ ID NO: 1209533 - DNA, 15 bp, Homo sapiens
tttcaaaatataaaa

SEQ ID NO: 1209534 - DNA, 15 bp, Homo sapiens
atttcaaaatataaa

SEQ ID NO: 1209535 - DNA, 15 bp, Homo sapiens
tatttcaaaatataa

SEQ ID NO: 1209536 - DNA, 15 bp, Homo sapiens
atatttcaaaatata

SEQ ID NO: 1209537 - DNA, 15 bp, Homo sapiens
catatttcaaaatat

SEQ ID NO: 1209538 - DNA, 15 bp, Homo sapiens
tcatatttcaaaata

SEQ ID NO: 1209539 - DNA, 15 bp, Homo sapiens
ttcatatttcaaaat

SEQ ID NO: 1209540 - DNA, 15 bp, Homo sapiens
attcatatttcaaaa

SEQ ID NO: 1209541 - DNA, 15 bp, Homo sapiens
aattcatatttcaaa

SEQ ID NO: 1209542 - DNA, 15 bp, Homo sapiens
gaattcatatttcaa

SEQ ID NO: 1209543 - DNA, 15 bp, Homo sapiens
tgaattcatatttca

SEQ ID NO: 1209544 - DNA, 15 bp, Homo sapiens
gtgaattcatatttc

SEQ ID NO: 1209545 - DNA, 15 bp, Homo sapiens
cgtgaattcatattt

SEQ ID NO: 1209546 - DNA, 15 bp, Homo sapiens
acgtgaattcatatt

SEQ ID NO: 1209547 - DNA, 15 bp, Homo sapiens
tacgtgaattcatat

SEQ ID NO: 1209548 - DNA, 15 bp, Homo sapiens
gtacgtgaattcata

SEQ ID NO: 1209549 - DNA, 15 bp, Homo sapiens
tgtacgtgaattcat

SEQ ID NO: 1209550 - DNA, 15 bp, Homo sapiens
atgtacgtgaattca

SEQ ID NO: 1209551 - DNA, 15 bp, Homo sapiens
catgtacgtgaattc

SEQ ID NO: 1209552 - DNA, 15 bp, Homo sapiens
acatgtacgtgaatt

SEQ ID NO: 1209553 - DNA, 15 bp, Homo sapiens
aacatgtacgtgaat

SEQ ID NO: 1209554 - DNA, 15 bp, Homo sapiens
taacatgtacgtgaa

SEQ ID NO: 1209555 - DNA, 15 bp, Homo sapiens
ctaacatgtacgtga

SEQ ID NO: 1209556 - DNA, 15 bp, Homo sapiens
cctaacatgtacgtg

SEQ ID NO: 1209557 - DNA, 15 bp, Homo sapiens
gcctaacatgtacgt

SEQ ID NO: 1209558 - DNA, 15 bp, Homo sapiens
tgcctaacatgtacg

SEQ ID NO: 1209559 - DNA, 15 bp, Homo sapiens
ctgcctaacatgtac

SEQ ID NO: 1209560 - DNA, 15 bp, Homo sapiens
tctgcctaacatgta

SEQ ID NO: 1209561 - DNA, 15 bp, Homo sapiens
ttctgcctaacatgt

SEQ ID NO: 1209562 - DNA, 15 bp, Homo sapiens
attctgcctaacatg

SEQ ID NO: 1209563 - DNA, 15 bp, Homo sapiens
aattctgcctaacat

SEQ ID NO: 1209564 - DNA, 15 bp, Homo sapiens
aaattctgcctaaca

SEQ ID NO: 1209565 - DNA, 15 bp, Homo sapiens
aaaattctgcctaac

SEQ ID NO: 1209566 - DNA, 15 bp, Homo sapiens
taaaattctgcctaa

SEQ ID NO: 1209567 - DNA, 15 bp, Homo sapiens
ataaaattctgccta

SEQ ID NO: 1209568 - DNA, 15 bp, Homo sapiens
tataaaattctgcct

SEQ ID NO: 1209569 - DNA, 15 bp, Homo sapiens
gtataaaattctgcc

SEQ ID NO: 1209570 - DNA, 15 bp, Homo sapiens
agtataaaattctgc

SEQ ID NO: 1209571 - DNA, 15 bp, Homo sapiens
gagtataaaattctg

SEQ ID NO: 1209572 - DNA, 15 bp, Homo sapiens
agagtataaaattct

SEQ ID NO: 1209573 - DNA, 15 bp, Homo sapiens
aagagtataaaattc

SEQ ID NO: 1209574 - DNA, 15 bp, Homo sapiens
aaagagtataaaatt

SEQ ID NO: 1209575 - DNA, 15 bp, Homo sapiens
gaaagagtataaaat

SEQ ID NO: 1209576 - DNA, 15 bp, Homo sapiens
tgaaagagtataaaa

SEQ ID NO: 1209577 - DNA, 15 bp, Homo sapiens
ttgaaagagtataaa

SEQ ID NO: 1209578 - DNA, 15 bp, Homo sapiens
cttgaaagagtataa

SEQ ID NO: 1209579 - DNA, 15 bp, Homo sapiens
ccttgaaagagtata

SEQ ID NO: 1209580 - DNA, 15 bp, Homo sapiens
tccttgaaagagtat

SEQ ID NO: 1209581 - DNA, 15 bp, Homo sapiens
atccttgaaagagta

SEQ ID NO: 1209582 - DNA, 15 bp, Homo sapiens
gatccttgaaagagt

SEQ ID NO: 1209583 - DNA, 15 bp, Homo sapiens
agatccttgaaagag

SEQ ID NO: 1209584 - DNA, 15 bp, Homo sapiens
aagatccttgaaaga

SEQ ID NO: 1209585 - DNA, 15 bp, Homo sapiens
aaagatccttgaaag

SEQ ID NO: 1209586 - DNA, 15 bp, Homo sapiens
gaaagatccttgaaa

SEQ ID NO: 1209587 - DNA, 15 bp, Homo sapiens
agaaagatccttgaa

SEQ ID NO: 1209588 - DNA, 15 bp, Homo sapiens
tagaaagatccttga

SEQ ID NO: 1209589 - DNA, 15 bp, Homo sapiens
ttagaaagatccttg

SEQ ID NO: 1209590 - DNA, 15 bp, Homo sapiens
tttagaaagatcctt

SEQ ID NO: 1209591 - DNA, 15 bp, Homo sapiens
ctttagaaagatcct

SEQ ID NO: 1209592 - DNA, 15 bp, Homo sapiens
tctttagaaagatcc

SEQ ID NO: 1209593 - DNA, 15 bp, Homo sapiens
atctttagaaagatc

SEQ ID NO: 1209594 - DNA, 15 bp, Homo sapiens
aatctttagaaagat

SEQ ID NO: 1209595 - DNA, 15 bp, Homo sapiens
aaatctttagaaaga

SEQ ID NO: 1209596 - DNA, 15 bp, Homo sapiens
gaaatctttagaaag

SEQ ID NO: 1209597 - DNA, 15 bp, Homo sapiens
tgaaatctttagaaa

SEQ ID NO: 1209598 - DNA, 15 bp, Homo sapiens
gtgaaatctttagaa

SEQ ID NO: 1209599 - DNA, 15 bp, Homo sapiens
tgtgaaatctttaga

SEQ ID NO: 1209600 - DNA, 15 bp, Homo sapiens
atgtgaaatctttag

SEQ ID NO: 1209601 - DNA, 15 bp, Homo sapiens
aatgtgaaatcttta

SEQ ID NO: 1209602 - DNA, 15 bp, Homo sapiens
caatgtgaaatcttt

SEQ ID NO: 1209603 - DNA, 15 bp, Homo sapiens
ccaatgtgaaatctt

SEQ ID NO: 1209604 - DNA, 15 bp, Homo sapiens
accaatgtgaaatct

SEQ ID NO: 1209605 - DNA, 15 bp, Homo sapiens
taccaatgtgaaatc

SEQ ID NO: 1209606 - DNA, 15 bp, Homo sapiens
ctaccaatgtgaaat

SEQ ID NO: 1209607 - DNA, 15 bp, Homo sapiens
gctaccaatgtgaaa

SEQ ID NO: 1209608 - DNA, 15 bp, Homo sapiens
tgctaccaatgtgaa

SEQ ID NO: 1209609 - DNA, 15 bp, Homo sapiens
ctgctaccaatgtga

SEQ ID NO: 1209610 - DNA, 15 bp, Homo sapiens
actgctaccaatgtg

SEQ ID NO: 1209611 - DNA, 15 bp, Homo sapiens
aactgctaccaatgt

SEQ ID NO: 1209612 - DNA, 15 bp, Homo sapiens
gaactgctaccaatg

SEQ ID NO: 1209613 - DNA, 15 bp, Homo sapiens
ggaactgctaccaat

SEQ ID NO: 1209614 - DNA, 15 bp, Homo sapiens
tggaactgctaccaa

SEQ ID NO: 1209615 - DNA, 15 bp, Homo sapiens
atggaactgctacca

SEQ ID NO: 1209616 - DNA, 15 bp, Homo sapiens
aatggaactgctacc

SEQ ID NO: 1209617 - DNA, 15 bp, Homo sapiens
gaatggaactgctac

SEQ ID NO: 1209618 - DNA, 15 bp, Homo sapiens
tgaatggaactgcta

SEQ ID NO: 1209619 - DNA, 15 bp, Homo sapiens
gtgaatggaactgct

SEQ ID NO: 1209620 - DNA, 15 bp, Homo sapiens
tgtgaatggaactgc

SEQ ID NO: 1209621 - DNA, 15 bp, Homo sapiens
ctgtgaatggaactg

SEQ ID NO: 1209622 - DNA, 15 bp, Homo sapiens
actgtgaatggaact

SEQ ID NO: 1209623 - DNA, 15 bp, Homo sapiens
gactgtgaatggaac

SEQ ID NO: 1209624 - DNA, 15 bp, Homo sapiens
tgactgtgaatggaa

SEQ ID NO: 1209625 - DNA, 15 bp, Homo sapiens
ctgactgtgaatgga

SEQ ID NO: 1209626 - DNA, 15 bp, Homo sapiens
tctgactgtgaatgg

SEQ ID NO: 1209627 - DNA, 15 bp, Homo sapiens
atctgactgtgaatg

SEQ ID NO: 1209628 - DNA, 15 bp, Homo sapiens
tatctgactgtgaat

SEQ ID NO: 1209629 - DNA, 15 bp, Homo sapiens
atatctgactgtgaa

SEQ ID NO: 1209630 - DNA, 15 bp, Homo sapiens
gatatctgactgtga

SEQ ID NO: 1209631 - DNA, 15 bp, Homo sapiens
tgatatctgactgtg

SEQ ID NO: 1209632 - DNA, 15 bp, Homo sapiens
ttgatatctgactgt

SEQ ID NO: 1209633 - DNA, 15 bp, Homo sapiens
attgatatctgactg

SEQ ID NO: 1209634 - DNA, 15 bp, Homo sapiens
tattgatatctgact

SEQ ID NO: 1209635 - DNA, 15 bp, Homo sapiens
ctattgatatctgac

SEQ ID NO: 1209636 - DNA, 15 bp, Homo sapiens
tctattgatatctga

SEQ ID NO: 1209637 - DNA, 15 bp, Homo sapiens
ttctattgatatctg

SEQ ID NO: 1209638 - DNA, 15 bp, Homo sapiens
attctattgatatct

SEQ ID NO: 1209639 - DNA, 15 bp, Homo sapiens
aattctattgatatc

SEQ ID NO: 1209640 - DNA, 15 bp, Homo sapiens
gaattctattgatat

SEQ ID NO: 1209641 - DNA, 15 bp, Homo sapiens
tgaattctattgata

SEQ ID NO: 1209642 - DNA, 15 bp, Homo sapiens
atgaattctattgat

SEQ ID NO: 1209643 - DNA, 15 bp, Homo sapiens
aatgaattctattga

SEQ ID NO: 1209644 - DNA, 15 bp, Homo sapiens
gaatgaattctattg

SEQ ID NO: 1209645 - DNA, 15 bp, Homo sapiens
agaatgaattctatt

SEQ ID NO: 1209646 - DNA, 15 bp, Homo sapiens
tagaatgaattctat

SEQ ID NO: 1209647 - DNA, 15 bp, Homo sapiens
ttagaatgaattcta

SEQ ID NO: 1209648 - DNA, 15 bp, Homo sapiens
attagaatgaattct

SEQ ID NO: 1209649 - DNA, 15 bp, Homo sapiens
tattagaatgaattc

SEQ ID NO: 1209650 - DNA, 15 bp, Homo sapiens
atattagaatgaatt

SEQ ID NO: 1209651 - DNA, 15 bp, Homo sapiens
gatattagaatgaat

SEQ ID NO: 1209652 - DNA, 15 bp, Homo sapiens
tgatattagaatgaa

SEQ ID NO: 1209653 - DNA, 15 bp, Homo sapiens
gtttgatattagaat

SEQ ID NO: 1209654 - DNA, 15 bp, Homo sapiens
ggtttgatattagaa

SEQ ID NO: 1209655 - DNA, 15 bp, Homo sapiens
aggtttgatattaga

SEQ ID NO: 1209656 - DNA, 15 bp, Homo sapiens
caggtttgatattag

SEQ ID NO: 1209657 - DNA, 15 bp, Homo sapiens
acaggtttgatatta

SEQ ID NO: 1209658 - DNA, 15 bp, Homo sapiens
cacaggtttgatatt

SEQ ID NO: 1209659 - DNA, 15 bp, Homo sapiens
ccacaggtttgatat

SEQ ID NO: 1209660 - DNA, 15 bp, Homo sapiens
gccacaggtttgata

SEQ ID NO: 1209661 - DNA, 15 bp, Homo sapiens
agccacaggtttgat

SEQ ID NO: 1209662 - DNA, 15 bp, Homo sapiens
aagccacaggtttga

SEQ ID NO: 1209663 - DNA, 15 bp, Homo sapiens
aaagccacaggtttg

SEQ ID NO: 1209664 - DNA, 15 bp, Homo sapiens
gaaagccacaggttt

SEQ ID NO: 1209665 - DNA, 15 bp, Homo sapiens
agaaagccacaggtt

SEQ ID NO: 1209666 - DNA, 15 bp, Homo sapiens
aagaaagccacaggt

SEQ ID NO: 1209667 - DNA, 15 bp, Homo sapiens
caagaaagccacagg

SEQ ID NO: 1209668 - DNA, 15 bp, Homo sapiens
acaagaaagccacag

SEQ ID NO: 1209669 - DNA, 15 bp, Homo sapiens
aacaagaaagccaca

SEQ ID NO: 1209670 - DNA, 15 bp, Homo sapiens
taacaagaaagccac

SEQ ID NO: 1209671 - DNA, 15 bp, Homo sapiens
gtaacaagaaagcca

SEQ ID NO: 1209672 - DNA, 15 bp, Homo sapiens
tgtaacaagaaagcc

SEQ ID NO: 1209673 - DNA, 15 bp, Homo sapiens
ttgtaacaagaaagc

SEQ ID NO: 1209674 - DNA, 15 bp, Homo sapiens
gttgtaacaagaaag

SEQ ID NO: 1209675 - DNA, 15 bp, Homo sapiens
agttgtaacaagaaa

SEQ ID NO: 1209676 - DNA, 15 bp, Homo sapiens
aagttgtaacaagaa

SEQ ID NO: 1209677 - DNA, 15 bp, Homo sapiens
taagttgtaacaaga

SEQ ID NO: 1209678 - DNA, 15 bp, Homo sapiens
ttaagttgtaacaag

SEQ ID NO: 1209679 - DNA, 15 bp, Homo sapiens
attaagttgtaacaa

SEQ ID NO: 1209680 - DNA, 15 bp, Homo sapiens
gattaagttgtaaca

SEQ ID NO: 1209681 - DNA, 15 bp, Homo sapiens
agattaagttgtaac

SEQ ID NO: 1209682 - DNA, 15 bp, Homo sapiens
cagattaagttgtaa

SEQ ID NO: 1209683 - DNA, 15 bp, Homo sapiens
acagattaagttgta

SEQ ID NO: 1209684 - DNA, 15 bp, Homo sapiens
aacagattaagttgt

SEQ ID NO: 1209685 - DNA, 15 bp, Homo sapiens
aaacagattaagttg

SEQ ID NO: 1209686 - DNA, 15 bp, Homo sapiens
gaaacagattaagtt

SEQ ID NO: 1209687 - DNA, 15 bp, Homo sapiens
agaaacagattaagt

SEQ ID NO: 1209688 - DNA, 15 bp, Homo sapiens
aagaaacagattaag

SEQ ID NO: 1209689 - DNA, 15 bp, Homo sapiens
gaagaaacagattaa

SEQ ID NO: 1209690 - DNA, 15 bp, Homo sapiens
tgaagaaacagatta

SEQ ID NO: 1209691 - DNA, 15 bp, Homo sapiens
ttgaagaaacagatt

SEQ ID NO: 1209692 - DNA, 15 bp, Homo sapiens
attgaagaaacagat

SEQ ID NO: 1209693 - DNA, 15 bp, Homo sapiens
cattgaagaaacaga

SEQ ID NO: 1209694 - DNA, 15 bp, Homo sapiens
acattgaagaaacag

SEQ ID NO: 1209695 - DNA, 15 bp, Homo sapiens
cacattgaagaaaca

SEQ ID NO: 1209696 - DNA, 15 bp, Homo sapiens
ccacattgaagaaac

SEQ ID NO: 1209697 - DNA, 15 bp, Homo sapiens
tccacattgaagaaa

SEQ ID NO: 1209698 - DNA, 15 bp, Homo sapiens
ctccacattgaagaa

SEQ ID NO: 1209699 - DNA, 15 bp, Homo sapiens
actccacattgaaga

SEQ ID NO: 1209700 - DNA, 15 bp, Homo sapiens
aactccacattgaag

SEQ ID NO: 1209701 - DNA, 15 bp, Homo sapiens
aaactccacattgaa

SEQ ID NO: 1209702 - DNA, 15 bp, Homo sapiens
taaactccacattga

SEQ ID NO: 1209703 - DNA, 15 bp, Homo sapiens
ttaaactccacattg

SEQ ID NO: 1209704 - DNA, 15 bp, Homo sapiens
gttaaactccacatt

SEQ ID NO: 1209705 - DNA, 15 bp, Homo sapiens
agttaaactccacat

SEQ ID NO: 1209706 - DNA, 15 bp, Homo sapiens
gagttaaactccaca

SEQ ID NO: 1209707 - DNA, 15 bp, Homo sapiens
tgagttaaactccac

SEQ ID NO: 1209708 - DNA, 15 bp, Homo sapiens
ttgagttaaactcca

SEQ ID NO: 1209709 - DNA, 15 bp, Homo sapiens
cttgagttaaactcc

SEQ ID NO: 1209710 - DNA, 15 bp, Homo sapiens
gcttgagttaaactc

SEQ ID NO: 1209711 - DNA, 15 bp, Homo sapiens
ggcttgagttaaact

SEQ ID NO: 1209712 - DNA, 15 bp, Homo sapiens
tggcttgagttaaac

SEQ ID NO: 1209713 - DNA, 15 bp, Homo sapiens
ttggcttgagttaaa

SEQ ID NO: 1209714 - DNA, 15 bp, Homo sapiens
tttggcttgagttaa

SEQ ID NO: 1209715 - DNA, 15 bp, Homo sapiens
atttggcttgagtta

SEQ ID NO: 1209716 - DNA, 15 bp, Homo sapiens
gatttggcttgagtt

SEQ ID NO: 1209717 - DNA, 15 bp, Homo sapiens
ggatttggcttgagt

SEQ ID NO: 1209718 - DNA, 15 bp, Homo sapiens
aggatttggcttgag

SEQ ID NO: 1209719 - DNA, 15 bp, Homo sapiens
aaggatttggcttga

SEQ ID NO: 1209720 - DNA, 15 bp, Homo sapiens
aaaggatttggcttg

SEQ ID NO: 1209721 - DNA, 15 bp, Homo sapiens
aaaaggatttggctt

SEQ ID NO: 1209722 - DNA, 15 bp, Homo sapiens
aaaaaggatttggct

SEQ ID NO: 1209723 - DNA, 15 bp, Homo sapiens
taaaaaggatttggc

SEQ ID NO: 1209724 - DNA, 15 bp, Homo sapiens
ctaaaaaggatttgg

SEQ ID NO: 1209725 - DNA, 15 bp, Homo sapiens
tctaaaaaggatttg

SEQ ID NO: 1209726 - DNA, 15 bp, Homo sapiens
ttctaaaaaggattt

SEQ ID NO: 1209727 - DNA, 15 bp, Homo sapiens
attctaaaaaggatt

SEQ ID NO: 1209728 - DNA, 15 bp, Homo sapiens
gattctaaaaaggat

SEQ ID NO: 1209729 - DNA, 15 bp, Homo sapiens
ggattctaaaaagga

SEQ ID NO: 1209730 - DNA, 15 bp, Homo sapiens
aggattctaaaaagg

SEQ ID NO: 1209731 - DNA, 15 bp, Homo sapiens
gaggattctaaaaag

SEQ ID NO: 1209732 - DNA, 15 bp, Homo sapiens
ggaggattctaaaaa

SEQ ID NO: 1209733 - DNA, 15 bp, Homo sapiens
aggaggattctaaaa

SEQ ID NO: 1209734 - DNA, 15 bp, Homo sapiens
aaggaggattctaaa

SEQ ID NO: 1209735 - DNA, 15 bp, Homo sapiens
gaaggaggattctaa

SEQ ID NO: 1209736 - DNA, 15 bp, Homo sapiens
ggaaggaggattcta

SEQ ID NO: 1209737 - DNA, 15 bp, Homo sapiens
gggaaggaggattct

SEQ ID NO: 1209738 - DNA, 15 bp, Homo sapiens
tgggaaggaggattc

SEQ ID NO: 1209739 - DNA, 15 bp, Homo sapiens
ttgggaaggaggatt

SEQ ID NO: 1209740 - DNA, 15 bp, Homo sapiens
cttgggaaggaggat

SEQ ID NO: 1209741 - DNA, 15 bp, Homo sapiens
gcttgggaaggagga

SEQ ID NO: 1209742 - DNA, 15 bp, Homo sapiens
agcttgggaaggagg

SEQ ID NO: 1209743 - DNA, 15 bp, Homo sapiens
aagcttgggaaggag

SEQ ID NO: 1209744 - DNA, 15 bp, Homo sapiens
taagcttgggaagga

SEQ ID NO: 1209745 - DNA, 15 bp, Homo sapiens
gtaagcttgggaagg

SEQ ID NO: 1209746 - DNA, 15 bp, Homo sapiens
ggtaagcttgggaag

SEQ ID NO: 1209747 - DNA, 15 bp, Homo sapiens
aggtaagcttgggaa

SEQ ID NO: 1209748 - DNA, 15 bp, Homo sapiens
caggtaagcttggga

SEQ ID NO: 1209749 - DNA, 15 bp, Homo sapiens
tcaggtaagcttggg

SEQ ID NO: 1209750 - DNA, 15 bp, Homo sapiens
ctcaggtaagcttgg

SEQ ID NO: 1209751 - DNA, 15 bp, Homo sapiens
gctcaggtaagcttg

SEQ ID NO: 1209752 - DNA, 15 bp, Homo sapiens
agctcaggtaagctt

SEQ ID NO: 1209753 - DNA, 15 bp, Homo sapiens
aagctcaggtaagct

SEQ ID NO: 1209754 - DNA, 15 bp, Homo sapiens
gaagctcaggtaagc

SEQ ID NO: 1209755 - DNA, 15 bp, Homo sapiens
ggaagctcaggtaag

SEQ ID NO: 1209756 - DNA, 15 bp, Homo sapiens
aggaagctcaggtaa

SEQ ID NO: 1209757 - DNA, 15 bp, Homo sapiens
taggaagctcaggta

SEQ ID NO: 1209758 - DNA, 15 bp, Homo sapiens
ctaggaagctcaggt

SEQ ID NO: 1209759 - DNA, 15 bp, Homo sapiens
cctaggaagctcagg

SEQ ID NO: 1209760 - DNA, 15 bp, Homo sapiens
tcctaggaagctcag

SEQ ID NO: 1209761 - DNA, 15 bp, Homo sapiens
atcctaggaagctca

SEQ ID NO: 1209762 - DNA, 15 bp, Homo sapiens
catcctaggaagctc

SEQ ID NO: 1209763 - DNA, 15 bp, Homo sapiens
gcatcctaggaagct

SEQ ID NO: 1209764 - DNA, 15 bp, Homo sapiens
tgcatcctaggaagc

SEQ ID NO: 1209765 - DNA, 15 bp, Homo sapiens
gtgcatcctaggaag

SEQ ID NO: 1209766 - DNA, 15 bp, Homo sapiens
tgtgcatcctaggaa

SEQ ID NO: 1209767 - DNA, 15 bp, Homo sapiens
atgtgcatcctagga

SEQ ID NO: 1209768 - DNA, 15 bp, Homo sapiens
catgtgcatcctagg

SEQ ID NO: 1209769 - DNA, 15 bp, Homo sapiens
tcatgtgcatcctag

SEQ ID NO: 1209770 - DNA, 15 bp, Homo sapiens
atcatgtgcatccta

SEQ ID NO: 1209771 - DNA, 15 bp, Homo sapiens
gatcatgtgcatcct

SEQ ID NO: 1209772 - DNA, 15 bp, Homo sapiens
agatcatgtgcatcc

SEQ ID NO: 1209773 - DNA, 15 bp, Homo sapiens
cagatcatgtgcatc

SEQ ID NO: 1209774 - DNA, 15 bp, Homo sapiens
gcagatcatgtgcat

SEQ ID NO: 1209775 - DNA, 15 bp, Homo sapiens
ggcagatcatgtgca

SEQ ID NO: 1209776 - DNA, 15 bp, Homo sapiens
gggcagatcatgtgc

SEQ ID NO: 1209777 - DNA, 15 bp, Homo sapiens
cgggcagatcatgtg

SEQ ID NO: 1209778 - DNA, 15 bp, Homo sapiens
gcgggcagatcatgt

SEQ ID NO: 1209779 - DNA, 15 bp, Homo sapiens
agcgggcagatcatg

SEQ ID NO: 1209780 - DNA, 15 bp, Homo sapiens
gagcgggcagatcat

SEQ ID NO: 1209781 - DNA, 15 bp, Homo sapiens
agagcgggcagatca

SEQ ID NO: 1209782 - DNA, 15 bp, Homo sapiens
gagagcgggcagatc

SEQ ID NO: 1209783 - DNA, 15 bp, Homo sapiens
ggagagcgggcagat

SEQ ID NO: 1209784 - DNA, 15 bp, Homo sapiens
tggagagcgggcaga

SEQ ID NO: 1209785 - DNA, 15 bp, Homo sapiens
gtggagagcgggcag

SEQ ID NO: 1209786 - DNA, 15 bp, Homo sapiens
cgtggagagcgggca

SEQ ID NO: 1209787 - DNA, 15 bp, Homo sapiens
acgtggagagcgggc

SEQ ID NO: 1209788 - DNA, 15 bp, Homo sapiens
tacgtggagagcggg

SEQ ID NO: 1209789 - DNA, 15 bp, Homo sapiens
gtacgtggagagcgg

SEQ ID NO: 1209790 - DNA, 15 bp, Homo sapiens
tgtacgtggagagcg

SEQ ID NO: 1209791 - DNA, 15 bp, Homo sapiens
ttgtacgtggagagc

SEQ ID NO: 1209792 - DNA, 15 bp, Homo sapiens
cttgtacgtggagag

SEQ ID NO: 1209793 - DNA, 15 bp, Homo sapiens
ccttgtacgtggaga

SEQ ID NO: 1209794 - DNA, 15 bp, Homo sapiens
tccttgtacgtggag

SEQ ID NO: 1209795 - DNA, 15 bp, Homo sapiens
ctccttgtacgtgga

SEQ ID NO: 1209796 - DNA, 15 bp, Homo sapiens
tctccttgtacgtgg

SEQ ID NO: 1209797 - DNA, 15 bp, Homo sapiens
gtctccttgtacgtg

SEQ ID NO: 1209798 - DNA, 15 bp, Homo sapiens
tgtctccttgtacgt

SEQ ID NO: 1209799 - DNA, 15 bp, Homo sapiens
atgtctccttgtacg

SEQ ID NO: 1209800 - DNA, 15 bp, Homo sapiens
gatgtctccttgtac

SEQ ID NO: 1209801 - DNA, 15 bp, Homo sapiens
agatgtctccttgta

SEQ ID NO: 1209802 - DNA, 15 bp, Homo sapiens
aagatgtctccttgt

SEQ ID NO: 1209803 - DNA, 15 bp, Homo sapiens
aaagatgtctccttg

SEQ ID NO: 1209804 - DNA, 15 bp, Homo sapiens
caaagatgtctcctt

SEQ ID NO: 1209805 - DNA, 15 bp, Homo sapiens
tcaaagatgtctcct

SEQ ID NO: 1209806 - DNA, 15 bp, Homo sapiens
ctcaaagatgtctcc

SEQ ID NO: 1209807 - DNA, 15 bp, Homo sapiens
cctcaaagatgtctc

SEQ ID NO: 1209808 - DNA, 15 bp, Homo sapiens
tcctcaaagatgtct

SEQ ID NO: 1209809 - DNA, 15 bp, Homo sapiens
atcctcaaagatgtc

SEQ ID NO: 1209810 - DNA, 15 bp, Homo sapiens
gatcctcaaagatgt

SEQ ID NO: 1209811 - DNA, 15 bp, Homo sapiens
agatcctcaaagatg

SEQ ID NO: 1209812 - DNA, 15 bp, Homo sapiens
cagatcctcaaagat

SEQ ID NO: 1209813 - DNA, 15 bp, Homo sapiens
gcagatcctcaaaga

SEQ ID NO: 1209814 - DNA, 15 bp, Homo sapiens
ggcagatcctcaaag

SEQ ID NO: 1209815 - DNA, 15 bp, Homo sapiens
aggcagatcctcaaa

SEQ ID NO: 1209816 - DNA, 15 bp, Homo sapiens
caggcagatcctcaa

SEQ ID NO: 1209817 - DNA, 15 bp, Homo sapiens
ccaggcagatcctca

SEQ ID NO: 1209818 - DNA, 15 bp, Homo sapiens
accaggcagatcctc

SEQ ID NO: 1209819 - DNA, 15 bp, Homo sapiens
gaccaggcagatcct

SEQ ID NO: 1209820 - DNA, 15 bp, Homo sapiens
ggaccaggcagatcc

SEQ ID NO: 1209821 - DNA, 15 bp, Homo sapiens
tggaccaggcagatc

SEQ ID NO: 1209822 - DNA, 15 bp, Homo sapiens
gtggaccaggcagat

SEQ ID NO: 1209823 - DNA, 15 bp, Homo sapiens
agtggaccaggcaga

SEQ ID NO: 1209824 - DNA, 15 bp, Homo sapiens
cagtggaccaggcag

SEQ ID NO: 1209825 - DNA, 15 bp, Homo sapiens
gcagtggaccaggca

SEQ ID NO: 1209826 - DNA, 15 bp, Homo sapiens
agcagtggaccaggc

SEQ ID NO: 1209827 - DNA, 15 bp, Homo sapiens
cagcagtggaccagg

SEQ ID NO: 1209828 - DNA, 15 bp, Homo sapiens
gcagcagtggaccag

SEQ ID NO: 1209829 - DNA, 15 bp, Homo sapiens
ggcagcagtggacca

SEQ ID NO: 1209830 - DNA, 15 bp, Homo sapiens
cggcagcagtggacc

SEQ ID NO: 1209831 - DNA, 15 bp, Homo sapiens
ccggcagcagtggac

SEQ ID NO: 1209832 - DNA, 15 bp, Homo sapiens
gccggcagcagtgga

SEQ ID NO: 1209833 - DNA, 15 bp, Homo sapiens
tgccggcagcagtgg

SEQ ID NO: 1209834 - DNA, 15 bp, Homo sapiens
ttgccggcagcagtg

SEQ ID NO: 1209835 - DNA, 15 bp, Homo sapiens
cttgccggcagcagt

SEQ ID NO: 1209836 - DNA, 15 bp, Homo sapiens
tcttgccggcagcag

SEQ ID NO: 1209837 - DNA, 15 bp, Homo sapiens
atcttgccggcagca

SEQ ID NO: 1209838 - DNA, 15 bp, Homo sapiens
catcttgccggcagc

SEQ ID NO: 1209839 - DNA, 15 bp, Homo sapiens
acatcttgccggcag

SEQ ID NO: 1209840 - DNA, 15 bp, Homo sapiens
cacatcttgccggca

SEQ ID NO: 1209841 - DNA, 15 bp, Homo sapiens
tcacatcttgccggc

SEQ ID NO: 1209842 - DNA, 15 bp, Homo sapiens
atcacatcttgccgg

SEQ ID NO: 1209843 - DNA, 15 bp, Homo sapiens
catcacatcttgccg

SEQ ID NO: 1209844 - DNA, 15 bp, Homo sapiens
acatcacatcttgcc

SEQ ID NO: 1209845 - DNA, 15 bp, Homo sapiens
gacatcacatcttgc

SEQ ID NO: 1209846 - DNA, 15 bp, Homo sapiens
ggacatcacatcttg

SEQ ID NO: 1209847 - DNA, 15 bp, Homo sapiens
gggacatcacatctt

SEQ ID NO: 1209848 - DNA, 15 bp, Homo sapiens
tgggacatcacatct

SEQ ID NO: 1209849 - DNA, 15 bp, Homo sapiens
gtgggacatcacatc

SEQ ID NO: 1209850 - DNA, 15 bp, Homo sapiens
ggtgggacatcacat

SEQ ID NO: 1209851 - DNA, 15 bp, Homo sapiens
tggtgggacatcaca

SEQ ID NO: 1209852 - DNA, 15 bp, Homo sapiens
ctggtgggacatcac

SEQ ID NO: 1209853 - DNA, 15 bp, Homo sapiens
cctggtgggacatca

SEQ ID NO: 1209854 - DNA, 15 bp, Homo sapiens
ccctggtgggacatc

SEQ ID NO: 1209855 - DNA, 15 bp, Homo sapiens
gccctggtgggacat

SEQ ID NO: 1209856 - DNA, 15 bp, Homo sapiens
ggccctggtgggaca

SEQ ID NO: 1209857 - DNA, 15 bp, Homo sapiens
aggccctggtgggac

SEQ ID NO: 1209858 - DNA, 15 bp, Homo sapiens
gaggccctggtggga

SEQ ID NO: 1209859 - DNA, 15 bp, Homo sapiens
tgaggccctggtggg

SEQ ID NO: 1209860 - DNA, 15 bp, Homo sapiens
gtgaggccctggtgg

SEQ ID NO: 1209861 - DNA, 15 bp, Homo sapiens
cgtgaggccctggtg

SEQ ID NO: 1209862 - DNA, 15 bp, Homo sapiens
gcgtgaggccctggt

SEQ ID NO: 1209863 - DNA, 15 bp, Homo sapiens
cgcgtgaggccctgg

SEQ ID NO: 1209864 - DNA, 15 bp, Homo sapiens
ccgcgtgaggccctg

SEQ ID NO: 1209865 - DNA, 15 bp, Homo sapiens
accgcgtgaggccct

SEQ ID NO: 1209866 - DNA, 15 bp, Homo sapiens
caccgcgtgaggccc

SEQ ID NO: 1209867 - DNA, 15 bp, Homo sapiens
ccaccgcgtgaggcc

SEQ ID NO: 1209868 - DNA, 15 bp, Homo sapiens
gccaccgcgtgaggc

SEQ ID NO: 1209869 - DNA, 15 bp, Homo sapiens
agccaccgcgtgagg

SEQ ID NO: 1209870 - DNA, 15 bp, Homo sapiens
aagccaccgcgtgag

SEQ ID NO: 1209871 - DNA, 15 bp, Homo sapiens
aaagccaccgcgtga

SEQ ID NO: 1209872 - DNA, 15 bp, Homo sapiens
taaagccaccgcgtg

SEQ ID NO: 1209873 - DNA, 15 bp, Homo sapiens
ttaaagccaccgcgt

SEQ ID NO: 1209874 - DNA, 15 bp, Homo sapiens
tttaaagccaccgcg

SEQ ID NO: 1209875 - DNA, 15 bp, Homo sapiens
ctttaaagccaccgc

SEQ ID NO: 1209876 - DNA, 15 bp, Homo sapiens
cctttaaagccaccg

SEQ ID NO: 1209877 - DNA, 15 bp, Homo sapiens
tcctttaaagccacc

SEQ ID NO: 1209878 - DNA, 15 bp, Homo sapiens
ttcctttaaagccac

SEQ ID NO: 1209879 - DNA, 15 bp, Homo sapiens
tttcctttaaagcca

SEQ ID NO: 1209880 - DNA, 15 bp, Homo sapiens
gtttcctttaaagcc

SEQ ID NO: 1209881 - DNA, 15 bp, Homo sapiens
ggtttcctttaaagc

SEQ ID NO: 1209882 - DNA, 15 bp, Homo sapiens
gggtttcctttaaag

SEQ ID NO: 1209883 - DNA, 15 bp, Homo sapiens
ggggtttcctttaaa

SEQ ID NO: 1209884 - DNA, 15 bp, Homo sapiens
tggggtttcctttaa

SEQ ID NO: 1209885 - DNA, 15 bp, Homo sapiens
ctggggtttccttta

SEQ ID NO: 1209886 - DNA, 15 bp, Homo sapiens
cctggggtttccttt

SEQ ID NO: 1209887 - DNA, 15 bp, Homo sapiens
tcctggggtttcctt

SEQ ID NO: 1209888 - DNA, 15 bp, Homo sapiens
ttcctggggtttcct

SEQ ID NO: 1209889 - DNA, 15 bp, Homo sapiens
cttcctggggtttcc

SEQ ID NO: 1209890 - DNA, 15 bp, Homo sapiens
ccttcctggggtttc

SEQ ID NO: 1209891 - DNA, 15 bp, Homo sapiens
gccttcctggggttt

SEQ ID NO: 1209892 - DNA, 15 bp, Homo sapiens
tgccttcctggggtt

SEQ ID NO: 1209893 - DNA, 15 bp, Homo sapiens
ttgccttcctggggt

SEQ ID NO: 1209894 - DNA, 15 bp, Homo sapiens
tttgccttcctgggg

SEQ ID NO: 1209895 - DNA, 15 bp, Homo sapiens
ctttgccttcctggg

SEQ ID NO: 1209896 - DNA, 15 bp, Homo sapiens
cctttgccttcctgg

SEQ ID NO: 1209897 - DNA, 15 bp, Homo sapiens
gcctttgccttcctg

SEQ ID NO: 1209898 - DNA, 15 bp, Homo sapiens
tgcctttgccttcct

SEQ ID NO: 1209899 - DNA, 15 bp, Homo sapiens
ctgcctttgccttcc

SEQ ID NO: 1209900 - DNA, 15 bp, Homo sapiens
gctgcctttgccttc

SEQ ID NO: 1209901 - DNA, 15 bp, Homo sapiens
agctgcctttgcctt

SEQ ID NO: 1209902 - DNA, 15 bp, Homo sapiens
aagctgcctttgcct

SEQ ID NO: 1209903 - DNA, 15 bp, Homo sapiens
caagctgcctttgcc

SEQ ID NO: 1209904 - DNA, 15 bp, Homo sapiens
ccaagctgcctttgc

SEQ ID NO: 1209905 - DNA, 15 bp, Homo sapiens
cccaagctgcctttg

SEQ ID NO: 1209906 - DNA, 15 bp, Homo sapiens
ccccaagctgccttt

SEQ ID NO: 1209907 - DNA, 15 bp, Homo sapiens
gccccaagctgcctt

SEQ ID NO: 1209908 - DNA, 15 bp, Homo sapiens
ggccccaagctgcct

SEQ ID NO: 1209909 - DNA, 15 bp, Homo sapiens
gggccccaagctgcc

SEQ ID NO: 1209910 - DNA, 15 bp, Homo sapiens
agggccccaagctgc

SEQ ID NO: 1209911 - DNA, 15 bp, Homo sapiens
cagggccccaagctg

SEQ ID NO: 1209912 - DNA, 15 bp, Homo sapiens
ccagggccccaagct

SEQ ID NO: 1209913 - DNA, 15 bp, Homo sapiens
tccagggccccaagc

SEQ ID NO: 1209914 - DNA, 15 bp, Homo sapiens
ttccagggccccaag

SEQ ID NO: 1209915 - DNA, 15 bp, Homo sapiens
cttccagggccccaa

SEQ ID NO: 1209916 - DNA, 15 bp, Homo sapiens
ccttccagggcccca

SEQ ID NO: 1209917 - DNA, 15 bp, Homo sapiens
cccttccagggcccc

SEQ ID NO: 1209918 - DNA, 15 bp, Homo sapiens
ccccttccagggccc

SEQ ID NO: 1209919 - DNA, 15 bp, Homo sapiens
gccccttccagggcc

SEQ ID NO: 1209920 - DNA, 15 bp, Homo sapiens
ggccccttccagggc

SEQ ID NO: 1209921 - DNA, 15 bp, Homo sapiens
tggccccttccaggg

SEQ ID NO: 1209922 - DNA, 15 bp, Homo sapiens
gtggccccttccagg

SEQ ID NO: 1209923 - DNA, 15 bp, Homo sapiens
tgtggccccttccag

SEQ ID NO: 1209924 - DNA, 15 bp, Homo sapiens
gtgtggccccttcca

SEQ ID NO: 1209925 - DNA, 15 bp, Homo sapiens
ggtgtggccccttcc

SEQ ID NO: 1209926 - DNA, 15 bp, Homo sapiens
gggtgtggccccttc

SEQ ID NO: 1209927 - DNA, 15 bp, Homo sapiens
tgggtgtggcccctt

SEQ ID NO: 1209928 - DNA, 15 bp, Homo sapiens
ctgggtgtggcccct

SEQ ID NO: 1209929 - DNA, 15 bp, Homo sapiens
cctgggtgtggcccc

SEQ ID NO: 1209930 - DNA, 15 bp, Homo sapiens
acctgggtgtggccc

SEQ ID NO: 1209931 - DNA, 15 bp, Homo sapiens
gacctgggtgtggcc

SEQ ID NO: 1209932 - DNA, 15 bp, Homo sapiens
ggacctgggtgtggc

SEQ ID NO: 1209933 - DNA, 15 bp, Homo sapiens
gggacctgggtgtgg

SEQ ID NO: 1209934 - DNA, 15 bp, Homo sapiens
ggggacctgggtgtg

SEQ ID NO: 1209935 - DNA, 15 bp, Homo sapiens
tggggacctgggtgt

SEQ ID NO: 1209936 - DNA, 15 bp, Homo sapiens
ctggggacctgggtg

SEQ ID NO: 1209937 - DNA, 15 bp, Homo sapiens
gctggggacctgggt

SEQ ID NO: 1209938 - DNA, 15 bp, Homo sapiens
tgctggggacctggg

SEQ ID NO: 1209939 - DNA, 15 bp, Homo sapiens
atgctggggacctgg

SEQ ID NO: 1209940 - DNA, 15 bp, Homo sapiens
aatgctggggacctg

SEQ ID NO: 1209941 - DNA, 15 bp, Homo sapiens
caatgctggggacct

SEQ ID NO: 1209942 - DNA, 15 bp, Homo sapiens
tcaatgctggggacc

SEQ ID NO: 1209943 - DNA, 15 bp, Homo sapiens
atcaatgctggggac

SEQ ID NO: 1209944 - DNA, 15 bp, Homo sapiens
gatcaatgctgggga

SEQ ID NO: 1209945 - DNA, 15 bp, Homo sapiens
ggatcaatgctgggg

SEQ ID NO: 1209946 - DNA, 15 bp, Homo sapiens
aggatcaatgctggg

SEQ ID NO: 1209947 - DNA, 15 bp, Homo sapiens
taggatcaatgctgg

SEQ ID NO: 1209948 - DNA, 15 bp, Homo sapiens
gtaggatcaatgctg

SEQ ID NO: 1209949 - DNA, 15 bp, Homo sapiens
ggtaggatcaatgct

SEQ ID NO: 1209950 - DNA, 15 bp, Homo sapiens
aggtaggatcaatgc

SEQ ID NO: 1209951 - DNA, 15 bp, Homo sapiens
caggtaggatcaatg

SEQ ID NO: 1209952 - DNA, 15 bp, Homo sapiens
acaggtaggatcaat

SEQ ID NO: 1209953 - DNA, 15 bp, Homo sapiens
cacaggtaggatcaa

SEQ ID NO: 1209954 - DNA, 15 bp, Homo sapiens
gcacaggtaggatca

SEQ ID NO: 1209955 - DNA, 15 bp, Homo sapiens
ggcacaggtaggatc

SEQ ID NO: 1209956 - DNA, 15 bp, Homo sapiens
gggcacaggtaggat

SEQ ID NO: 1209957 - DNA, 15 bp, Homo sapiens
ggggcacaggtagga

SEQ ID NO: 1209958 - DNA, 15 bp, Homo sapiens
tggggcacaggtagg

SEQ ID NO: 1209959 - DNA, 15 bp, Homo sapiens
gtggggcacaggtag

SEQ ID NO: 1209960 - DNA, 15 bp, Homo sapiens
ggtggggcacaggta

SEQ ID NO: 1209961 - DNA, 15 bp, Homo sapiens
gggtggggcacaggt

SEQ ID NO: 1209962 - DNA, 15 bp, Homo sapiens
ggggtggggcacagg

SEQ ID NO: 1209963 - DNA, 15 bp, Homo sapiens
tggggtggggcacag

SEQ ID NO: 1209964 - DNA, 15 bp, Homo sapiens
ctggggtggggcaca

SEQ ID NO: 1209965 - DNA, 15 bp, Homo sapiens
actggggtggggcac

SEQ ID NO: 1209966 - DNA, 15 bp, Homo sapiens
tactggggtggggca

SEQ ID NO: 1209967 - DNA, 15 bp, Homo sapiens
ctactggggtggggc

SEQ ID NO: 1209968 - DNA, 15 bp, Homo sapiens
actactggggtgggg

SEQ ID NO: 1209969 - DNA, 15 bp, Homo sapiens
gactactggggtggg

SEQ ID NO: 1209970 - DNA, 15 bp, Homo sapiens
agactactggggtgg

SEQ ID NO: 1209971 - DNA, 15 bp, Homo sapiens
gagactactggggtg

SEQ ID NO: 1209972 - DNA, 15 bp, Homo sapiens
ggagactactggggt

SEQ ID NO: 1209973 - DNA, 15 bp, Homo sapiens
cggagactactgggg

SEQ ID NO: 1209974 - DNA, 15 bp, Homo sapiens
ccggagactactggg

SEQ ID NO: 1209975 - DNA, 15 bp, Homo sapiens
tccggagactactgg

SEQ ID NO: 1209976 - DNA, 15 bp, Homo sapiens
gtccggagactactg

SEQ ID NO: 1209977 - DNA, 15 bp, Homo sapiens
tgtccggagactact

SEQ ID NO: 1209978 - DNA, 15 bp, Homo sapiens
ctgtccggagactac

SEQ ID NO: 1209979 - DNA, 15 bp, Homo sapiens
cctgtccggagacta

SEQ ID NO: 1209980 - DNA, 15 bp, Homo sapiens
gcctgtccggagact

SEQ ID NO: 1209981 - DNA, 15 bp, Homo sapiens
agcctgtccggagac

SEQ ID NO: 1209982 - DNA, 15 bp, Homo sapiens
gagcctgtccggaga

SEQ ID NO: 1209983 - DNA, 15 bp, Homo sapiens
ggagcctgtccggag

SEQ ID NO: 1209984 - DNA, 15 bp, Homo sapiens
aggagcctgtccgga

SEQ ID NO: 1209985 - DNA, 15 bp, Homo sapiens
taggagcctgtccgg

SEQ ID NO: 1209986 - DNA, 15 bp, Homo sapiens
ttaggagcctgtccg

SEQ ID NO: 1209987 - DNA, 15 bp, Homo sapiens
gttaggagcctgtcc

SEQ ID NO: 1209988 - DNA, 15 bp, Homo sapiens
cgttaggagcctgtc

SEQ ID NO: 1209989 - DNA, 15 bp, Homo sapiens
acgttaggagcctgt

SEQ ID NO: 1209990 - DNA, 15 bp, Homo sapiens
acacgttaggagcct

SEQ ID NO: 1209991 - DNA, 15 bp, Homo sapiens
aacacgttaggagcc

SEQ ID NO: 1209992 - DNA, 15 bp, Homo sapiens
aaacacgttaggagc

SEQ ID NO: 1209993 - DNA, 15 bp, Homo sapiens
gaaacacgttaggag

SEQ ID NO: 1209994 - DNA, 15 bp, Homo sapiens
tgaaacacgttagga

SEQ ID NO: 1209995 - DNA, 15 bp, Homo sapiens
ctgaaacacgttagg

SEQ ID NO: 1209996 - DNA, 15 bp, Homo sapiens
actgaaacacgttag

SEQ ID NO: 1209997 - DNA, 15 bp, Homo sapiens
gactgaaacacgtta

SEQ ID NO: 1209998 - DNA, 15 bp, Homo sapiens
agactgaaacacgtt

SEQ ID NO: 1209999 - DNA, 15 bp, Homo sapiens
gagactgaaacacgt

SEQ ID NO: 1210000 - DNA, 15 bp, Homo sapiens
agagactgaaacacg

SEQ ID NO: 1210001 - DNA, 15 bp, Homo sapiens
cagagactgaaacac

SEQ ID NO: 1210002 - DNA, 15 bp, Homo sapiens
gcagagactgaaaca

SEQ ID NO: 1210003 - DNA, 15 bp, Homo sapiens
cgcagagactgaaac

SEQ ID NO: 1210004 - DNA, 15 bp, Homo sapiens
gcgcagagactgaaa

SEQ ID NO: 1210005 - DNA, 15 bp, Homo sapiens
ggcgcagagactgaa

SEQ ID NO: 1210006 - DNA, 15 bp, Homo sapiens
gggcgcagagactga

SEQ ID NO: 1210007 - DNA, 15 bp, Homo sapiens
agggcgcagagactg

SEQ ID NO: 1210008 - DNA, 15 bp, Homo sapiens
gagggcgcagagact

SEQ ID NO: 1210009 - DNA, 15 bp, Homo sapiens
ggagggcgcagagac

SEQ ID NO: 1210010 - DNA, 15 bp, Homo sapiens
aggagggcgcagaga

SEQ ID NO: 1210011 - DNA, 15 bp, Homo sapiens
gaggagggcgcagag

SEQ ID NO: 1210012 - DNA, 15 bp, Homo sapiens
agaggagggcgcaga

SEQ ID NO: 1210013 - DNA, 15 bp, Homo sapiens
cagaggagggcgcag

SEQ ID NO: 1210014 - DNA, 15 bp, Homo sapiens
acagaggagggcgca

SEQ ID NO: 1210015 - DNA, 15 bp, Homo sapiens
tacagaggagggcgc

SEQ ID NO: 1210016 - DNA, 15 bp, Homo sapiens
ctacagaggagggcg

SEQ ID NO: 1210017 - DNA, 15 bp, Homo sapiens
tctacagaggagggc

SEQ ID NO: 1210018 - DNA, 15 bp, Homo sapiens
ttctacagaggaggg

SEQ ID NO: 1210019 - DNA, 15 bp, Homo sapiens
gttctacagaggagg

SEQ ID NO: 1210020 - DNA, 15 bp, Homo sapiens
ggttctacagaggag

SEQ ID NO: 1210021 - DNA, 15 bp, Homo sapiens
aggttctacagagga

SEQ ID NO: 1210022 - DNA, 15 bp, Homo sapiens
caggttctacagagg

SEQ ID NO: 1210023 - DNA, 15 bp, Homo sapiens
ccaggttctacagag

SEQ ID NO: 1210024 - DNA, 15 bp, Homo sapiens
gccaggttctacaga

SEQ ID NO: 1210025 - DNA, 15 bp, Homo sapiens
tgccaggttctacag

SEQ ID NO: 1210026 - DNA, 15 bp, Homo sapiens
ctgccaggttctaca

SEQ ID NO: 1210027 - DNA, 15 bp, Homo sapiens
tctgccaggttctac

SEQ ID NO: 1210028 - DNA, 15 bp, Homo sapiens
atctgccaggttcta

SEQ ID NO: 1210029 - DNA, 15 bp, Homo sapiens
tatctgccaggttct

SEQ ID NO: 1210030 - DNA, 15 bp, Homo sapiens
ctatctgccaggttc

SEQ ID NO: 1210031 - DNA, 15 bp, Homo sapiens
gctatctgccaggtt

SEQ ID NO: 1210032 - DNA, 15 bp, Homo sapiens
cgctatctgccaggt

SEQ ID NO: 1210033 - DNA, 15 bp, Homo sapiens
tcgctatctgccagg

SEQ ID NO: 1210034 - DNA, 15 bp, Homo sapiens
gtcgctatctgccag

SEQ ID NO: 1210035 - DNA, 15 bp, Homo sapiens
agtcgctatctgcca

SEQ ID NO: 1210036 - DNA, 15 bp, Homo sapiens
cagtcgctatctgcc

SEQ ID NO: 1210037 - DNA, 15 bp, Homo sapiens
tcagtcgctatctgc

SEQ ID NO: 1210038 - DNA, 15 bp, Homo sapiens
ctcagtcgctatctg

SEQ ID NO: 1210039 - DNA, 15 bp, Homo sapiens
cctcagtcgctatct

SEQ ID NO: 1210040 - DNA, 15 bp, Homo sapiens
gcctcagtcgctatc

SEQ ID NO: 1210041 - DNA, 15 bp, Homo sapiens
agcctcagtcgctat

SEQ ID NO: 1210042 - DNA, 15 bp, Homo sapiens
cagcctcagtcgcta

SEQ ID NO: 1210043 - DNA, 15 bp, Homo sapiens
acagcctcagtcgct

SEQ ID NO: 1210044 - DNA, 15 bp, Homo sapiens
gacagcctcagtcgc

SEQ ID NO: 1210045 - DNA, 15 bp, Homo sapiens
agacagcctcagtcg

SEQ ID NO: 1210046 - DNA, 15 bp, Homo sapiens
cagacagcctcagtc

SEQ ID NO: 1210047 - DNA, 15 bp, Homo sapiens
gcagacagcctcagt

SEQ ID NO: 1210048 - DNA, 15 bp, Homo sapiens
ggcagacagcctcag

SEQ ID NO: 1210049 - DNA, 15 bp, Homo sapiens
tggcagacagcctca

SEQ ID NO: 1210050 - DNA, 15 bp, Homo sapiens
gtggcagacagcctc

SEQ ID NO: 1210051 - DNA, 15 bp, Homo sapiens
cgtggcagacagcct

SEQ ID NO: 1210052 - DNA, 15 bp, Homo sapiens
acgtggcagacagcc

SEQ ID NO: 1210053 - DNA, 15 bp, Homo sapiens
tacgtggcagacagc

SEQ ID NO: 1210054 - DNA, 15 bp, Homo sapiens
ctacgtggcagacag

SEQ ID NO: 1210055 - DNA, 15 bp, Homo sapiens
cctacgtggcagaca

SEQ ID NO: 1210056 - DNA, 15 bp, Homo sapiens
ccctacgtggcagac

SEQ ID NO: 1210057 - DNA, 15 bp, Homo sapiens
tccctacgtggcaga

SEQ ID NO: 1210058 - DNA, 15 bp, Homo sapiens
ctccctacgtggcag

SEQ ID NO: 1210059 - DNA, 15 bp, Homo sapiens
cctccctacgtggca

SEQ ID NO: 1210060 - DNA, 15 bp, Homo sapiens
ccctccctacgtggc

SEQ ID NO: 1210061 - DNA, 15 bp, Homo sapiens
cccctccctacgtgg

SEQ ID NO: 1210062 - DNA, 15 bp, Homo sapiens
ccccctccctacgtg

SEQ ID NO: 1210063 - DNA, 15 bp, Homo sapiens
gccccctccctacgt

SEQ ID NO: 1210064 - DNA, 15 bp, Homo sapiens
ggccccctccctacg

SEQ ID NO: 1210065 - DNA, 15 bp, Homo sapiens
aggccccctccctac

SEQ ID NO: 1210066 - DNA, 15 bp, Homo sapiens
caggccccctcccta

SEQ ID NO: 1210067 - DNA, 15 bp, Homo sapiens
acaggccccctccct

SEQ ID NO: 1210068 - DNA, 15 bp, Homo sapiens
cacaggccccctccc

SEQ ID NO: 1210069 - DNA, 15 bp, Homo sapiens
gcacaggccccctcc

SEQ ID NO: 1210070 - DNA, 15 bp, Homo sapiens
agcacaggccccctc

SEQ ID NO: 1210071 - DNA, 15 bp, Homo sapiens
cagcacaggccccct

SEQ ID NO: 1210072 - DNA, 15 bp, Homo sapiens
ccagcacaggccccc

SEQ ID NO: 1210073 - DNA, 15 bp, Homo sapiens
tccagcacaggcccc

SEQ ID NO: 1210074 - DNA, 15 bp, Homo sapiens
ctccagcacaggccc

SEQ ID NO: 1210075 - DNA, 15 bp, Homo sapiens
actccagcacaggcc

SEQ ID NO: 1210076 - DNA, 15 bp, Homo sapiens
aactccagcacaggc

SEQ ID NO: 1210077 - DNA, 15 bp, Homo sapiens
caactccagcacagg

SEQ ID NO: 1210078 - DNA, 15 bp, Homo sapiens
gcaactccagcacag

SEQ ID NO: 1210079 - DNA, 15 bp, Homo sapiens
agcaactccagcaca

SEQ ID NO: 1210080 - DNA, 15 bp, Homo sapiens
gagcaactccagcac

SEQ ID NO: 1210081 - DNA, 15 bp, Homo sapiens
agagcaactccagca

SEQ ID NO: 1210082 - DNA, 15 bp, Homo sapiens
cagagcaactccagc

SEQ ID NO: 1210083 - DNA, 15 bp, Homo sapiens
tcagagcaactccag

SEQ ID NO: 1210084 - DNA, 15 bp, Homo sapiens
ttcagagcaactcca

SEQ ID NO: 1210085 - DNA, 15 bp, Homo sapiens
attcagagcaactcc

SEQ ID NO: 1210086 - DNA, 15 bp, Homo sapiens
cattcagagcaactc

SEQ ID NO: 1210087 - DNA, 15 bp, Homo sapiens
acattcagagcaact

SEQ ID NO: 1210088 - DNA, 15 bp, Homo sapiens
gacattcagagcaac

SEQ ID NO: 1210089 - DNA, 15 bp, Homo sapiens
ggacattcagagcaa

SEQ ID NO: 1210090 - DNA, 15 bp, Homo sapiens
aggacattcagagca

SEQ ID NO: 1210091 - DNA, 15 bp, Homo sapiens
caggacattcagagc

SEQ ID NO: 1210092 - DNA, 15 bp, Homo sapiens
acaggacattcagag

SEQ ID NO: 1210093 - DNA, 15 bp, Homo sapiens
gacaggacattcaga

SEQ ID NO: 1210094 - DNA, 15 bp, Homo sapiens
ggacaggacattcag

SEQ ID NO: 1210095 - DNA, 15 bp, Homo sapiens
cggacaggacattca

SEQ ID NO: 1210096 - DNA, 15 bp, Homo sapiens
acggacaggacattc

SEQ ID NO: 1210097 - DNA, 15 bp, Homo sapiens
aacggacaggacatt

SEQ ID NO: 1210098 - DNA, 15 bp, Homo sapiens
aaacggacaggacat

SEQ ID NO: 1210099 - DNA, 15 bp, Homo sapiens
caaacggacaggaca

SEQ ID NO: 1210100 - DNA, 15 bp, Homo sapiens
ccaaacggacaggac

SEQ ID NO: 1210101 - DNA, 15 bp, Homo sapiens
gccaaacggacagga

SEQ ID NO: 1210102 - DNA, 15 bp, Homo sapiens
agccaaacggacagg

SEQ ID NO: 1210103 - DNA, 15 bp, Homo sapiens
cagccaaacggacag

SEQ ID NO: 1210104 - DNA, 15 bp, Homo sapiens
gcagccaaacggaca

SEQ ID NO: 1210105 - DNA, 15 bp, Homo sapiens
cgcagccaaacggac

SEQ ID NO: 1210106 - DNA, 15 bp, Homo sapiens
tcgcagccaaacgga

SEQ ID NO: 1210107 - DNA, 15 bp, Homo sapiens
ctcgcagccaaacgg

SEQ ID NO: 1210108 - DNA, 15 bp, Homo sapiens
cctcgcagccaaacg

SEQ ID NO: 1210109 - DNA, 15 bp, Homo sapiens
acctcgcagccaaac

SEQ ID NO: 1210110 - DNA, 15 bp, Homo sapiens
cacctcgcagccaaa

SEQ ID NO: 1210111 - DNA, 15 bp, Homo sapiens
ccacctcgcagccaa

SEQ ID NO: 1210112 - DNA, 15 bp, Homo sapiens
gccacctcgcagcca

SEQ ID NO: 1210113 - DNA, 15 bp, Homo sapiens
agccacctcgcagcc

SEQ ID NO: 1210114 - DNA, 15 bp, Homo sapiens
cagccacctcgcagc

SEQ ID NO: 1210115 - DNA, 15 bp, Homo sapiens
acagccacctcgcag

SEQ ID NO: 1210116 - DNA, 15 bp, Homo sapiens
gacagccacctcgca

SEQ ID NO: 1210117 - DNA, 15 bp, Homo sapiens
ggacagccacctcgc

SEQ ID NO: 1210118 - DNA, 15 bp, Homo sapiens
gggacagccacctcg

SEQ ID NO: 1210119 - DNA, 15 bp, Homo sapiens
agggacagccacctc

SEQ ID NO: 1210120 - DNA, 15 bp, Homo sapiens
cagggacagccacct

SEQ ID NO: 1210121 - DNA, 15 bp, Homo sapiens
gcagggacagccacc

SEQ ID NO: 1210122 - DNA, 15 bp, Homo sapiens
tgcagggacagccac

SEQ ID NO: 1210123 - DNA, 15 bp, Homo sapiens
atgcagggacagcca

SEQ ID NO: 1210124 - DNA, 15 bp, Homo sapiens
aatgcagggacagcc

SEQ ID NO: 1210125 - DNA, 15 bp, Homo sapiens
gaatgcagggacagc

SEQ ID NO: 1210126 - DNA, 15 bp, Homo sapiens
agaatgcagggacag

SEQ ID NO: 1210127 - DNA, 15 bp, Homo sapiens
aagaatgcagggaca

SEQ ID NO: 1210128 - DNA, 15 bp, Homo sapiens
aaagaatgcagggac

SEQ ID NO: 1210129 - DNA, 15 bp, Homo sapiens
gaaagaatgcaggga

SEQ ID NO: 1210130 - DNA, 15 bp, Homo sapiens
tgaaagaatgcaggg

SEQ ID NO: 1210131 - DNA, 15 bp, Homo sapiens
gtgaaagaatgcagg

SEQ ID NO: 1210132 - DNA, 15 bp, Homo sapiens
ggtgaaagaatgcag

SEQ ID NO: 1210133 - DNA, 15 bp, Homo sapiens
tggtgaaagaatgca

SEQ ID NO: 1210134 - DNA, 15 bp, Homo sapiens
ctggtgaaagaatgc

SEQ ID NO: 1210135 - DNA, 15 bp, Homo sapiens
cctggtgaaagaatg

SEQ ID NO: 1210136 - DNA, 15 bp, Homo sapiens
acctggtgaaagaat

SEQ ID NO: 1210137 - DNA, 15 bp, Homo sapiens
aacctggtgaaagaa

SEQ ID NO: 1210138 - DNA, 15 bp, Homo sapiens
aaacctggtgaaaga

SEQ ID NO: 1210139 - DNA, 15 bp, Homo sapiens
gaaacctggtgaaag

SEQ ID NO: 1210140 - DNA, 15 bp, Homo sapiens
tgaaacctggtgaaa

SEQ ID NO: 1210141 - DNA, 15 bp, Homo sapiens
ttgaaacctggtgaa

SEQ ID NO: 1210142 - DNA, 15 bp, Homo sapiens
cttgaaacctggtga

SEQ ID NO: 1210143 - DNA, 15 bp, Homo sapiens
tcttgaaacctggtg

SEQ ID NO: 1210144 - DNA, 15 bp, Homo sapiens
gtcttgaaacctggt

SEQ ID NO: 1210145 - DNA, 15 bp, Homo sapiens
agtcttgaaacctgg

SEQ ID NO: 1210146 - DNA, 15 bp, Homo sapiens
gagtcttgaaacctg

SEQ ID NO: 1210147 - DNA, 15 bp, Homo sapiens
ggagtcttgaaacct

SEQ ID NO: 1210148 - DNA, 15 bp, Homo sapiens
aggagtcttgaaacc

SEQ ID NO: 1210149 - DNA, 15 bp, Homo sapiens
aaggagtcttgaaac

SEQ ID NO: 1210150 - DNA, 15 bp, Homo sapiens
caaggagtcttgaaa

SEQ ID NO: 1210151 - DNA, 15 bp, Homo sapiens
gcaaggagtcttgaa

SEQ ID NO: 1210152 - DNA, 15 bp, Homo sapiens
tgcaaggagtcttga

SEQ ID NO: 1210153 - DNA, 15 bp, Homo sapiens
atgcaaggagtcttg

SEQ ID NO: 1210154 - DNA, 15 bp, Homo sapiens
aatgcaaggagtctt

SEQ ID NO: 1210155 - DNA, 15 bp, Homo sapiens
gaatgcaaggagtct

SEQ ID NO: 1210156 - DNA, 15 bp, Homo sapiens
cgaatgcaaggagtc

SEQ ID NO: 1210157 - DNA, 15 bp, Homo sapiens
gcgaatgcaaggagt

SEQ ID NO: 1210158 - DNA, 15 bp, Homo sapiens
tgcgaatgcaaggag

SEQ ID NO: 1210159 - DNA, 15 bp, Homo sapiens
ctgcgaatgcaagga

SEQ ID NO: 1210160 - DNA, 15 bp, Homo sapiens
actgcgaatgcaagg

SEQ ID NO: 1210161 - DNA, 15 bp, Homo sapiens
tactgcgaatgcaag

SEQ ID NO: 1210162 - DNA, 15 bp, Homo sapiens
gtactgcgaatgcaa

SEQ ID NO: 1210163 - DNA, 15 bp, Homo sapiens
ggtactgcgaatgca

SEQ ID NO: 1210164 - DNA, 15 bp, Homo sapiens
gggtactgcgaatgc

SEQ ID NO: 1210165 - DNA, 15 bp, Homo sapiens
ggggtactgcgaatg

SEQ ID NO: 1210166 - DNA, 15 bp, Homo sapiens
gggggtactgcgaat

SEQ ID NO: 1210167 - DNA, 15 bp, Homo sapiens
tgggggtactgcgaa

SEQ ID NO: 1210168 - DNA, 15 bp, Homo sapiens
atgggggtactgcga

SEQ ID NO: 1210169 - DNA, 15 bp, Homo sapiens
aatgggggtactgcg

SEQ ID NO: 1210170 - DNA, 15 bp, Homo sapiens
gaatgggggtactgc

SEQ ID NO: 1210171 - DNA, 15 bp, Homo sapiens
ggaatgggggtactg

SEQ ID NO: 1210172 - DNA, 15 bp, Homo sapiens
gggaatgggggtact

SEQ ID NO: 1210173 - DNA, 15 bp, Homo sapiens
tgggaatgggggtac

SEQ ID NO: 1210174 - DNA, 15 bp, Homo sapiens
atgggaatgggggta

SEQ ID NO: 1210175 - DNA, 15 bp, Homo sapiens
gatgggaatgggggt

SEQ ID NO: 1210176 - DNA, 15 bp, Homo sapiens
ggatgggaatggggg

SEQ ID NO: 1210177 - DNA, 15 bp, Homo sapiens
tggatgggaatgggg

SEQ ID NO: 1210178 - DNA, 15 bp, Homo sapiens
gtggatgggaatggg

SEQ ID NO: 1210179 - DNA, 15 bp, Homo sapiens
tgtggatgggaatgg

SEQ ID NO: 1210180 - DNA, 15 bp, Homo sapiens
ctgtggatgggaatg

SEQ ID NO: 1210181 - DNA, 15 bp, Homo sapiens
tctgtggatgggaat

SEQ ID NO: 1210182 - DNA, 15 bp, Homo sapiens
ctctgtggatgggaa

SEQ ID NO: 1210183 - DNA, 15 bp, Homo sapiens
cctctgtggatggga

SEQ ID NO: 1210184 - DNA, 15 bp, Homo sapiens
ccctctgtggatggg

SEQ ID NO: 1210185 - DNA, 15 bp, Homo sapiens
gccctctgtggatgg

SEQ ID NO: 1210186 - DNA, 15 bp, Homo sapiens
tgccctctgtggatg

SEQ ID NO: 1210187 - DNA, 15 bp, Homo sapiens
ctgccctctgtggat

SEQ ID NO: 1210188 - DNA, 15 bp, Homo sapiens
cctgccctctgtgga

SEQ ID NO: 1210189 - DNA, 15 bp, Homo sapiens
gcctgccctctgtgg

SEQ ID NO: 1210190 - DNA, 15 bp, Homo sapiens
ggcctgccctctgtg

SEQ ID NO: 1210191 - DNA, 15 bp, Homo sapiens
cggcctgccctctgt

SEQ ID NO: 1210192 - DNA, 15 bp, Homo sapiens
acggcctgccctctg

SEQ ID NO: 1210193 - DNA, 15 bp, Homo sapiens
tacggcctgccctct

SEQ ID NO: 1210194 - DNA, 15 bp, Homo sapiens
ctacggcctgccctc

SEQ ID NO: 1210195 - DNA, 15 bp, Homo sapiens
tctacggcctgccct

SEQ ID NO: 1210196 - DNA, 15 bp, Homo sapiens
gtctacggcctgccc

SEQ ID NO: 1210197 - DNA, 15 bp, Homo sapiens
tgtctacggcctgcc

SEQ ID NO: 1210198 - DNA, 15 bp, Homo sapiens
gtgtctacggcctgc

SEQ ID NO: 1210199 - DNA, 15 bp, Homo sapiens
agtgtctacggcctg

SEQ ID NO: 1210200 - DNA, 15 bp, Homo sapiens
cagtgtctacggcct

SEQ ID NO: 1210201 - DNA, 15 bp, Homo sapiens
ccagtgtctacggcc

SEQ ID NO: 1210202 - DNA, 15 bp, Homo sapiens
cccagtgtctacggc

SEQ ID NO: 1210203 - DNA, 15 bp, Homo sapiens
acccagtgtctacgg

SEQ ID NO: 1210204 - DNA, 15 bp, Homo sapiens
aacccagtgtctacg

SEQ ID NO: 1210205 - DNA, 15 bp, Homo sapiens
caacccagtgtctac

SEQ ID NO: 1210206 - DNA, 15 bp, Homo sapiens
ccaacccagtgtcta

SEQ ID NO: 1210207 - DNA, 15 bp, Homo sapiens
gccaacccagtgtct

SEQ ID NO: 1210208 - DNA, 15 bp, Homo sapiens
tgccaacccagtgtc

SEQ ID NO: 1210209 - DNA, 15 bp, Homo sapiens
ctgccaacccagtgt

SEQ ID NO: 1210210 - DNA, 15 bp, Homo sapiens
cctgccaacccagtg

SEQ ID NO: 1210211 - DNA, 15 bp, Homo sapiens
ccctgccaacccagt

SEQ ID NO: 1210212 - DNA, 15 bp, Homo sapiens
gccctgccaacccag

SEQ ID NO: 1210213 - DNA, 15 bp, Homo sapiens
tgccctgccaaccca

SEQ ID NO: 1210214 - DNA, 15 bp, Homo sapiens
gtgccctgccaaccc

SEQ ID NO: 1210215 - DNA, 15 bp, Homo sapiens
agtgccctgccaacc

SEQ ID NO: 1210216 - DNA, 15 bp, Homo sapiens
cagtgccctgccaac

SEQ ID NO: 1210217 - DNA, 15 bp, Homo sapiens
gcagtgccctgccaa

SEQ ID NO: 1210218 - DNA, 15 bp, Homo sapiens
agcagtgccctgcca

SEQ ID NO: 1210219 - DNA, 15 bp, Homo sapiens
cagcagtgccctgcc

SEQ ID NO: 1210220 - DNA, 15 bp, Homo sapiens
gcagcagtgccctgc

SEQ ID NO: 1210221 - DNA, 15 bp, Homo sapiens
ggcagcagtgccctg

SEQ ID NO: 1210222 - DNA, 15 bp, Homo sapiens
tggcagcagtgccct

SEQ ID NO: 1210223 - DNA, 15 bp, Homo sapiens
gtggcagcagtgccc

SEQ ID NO: 1210224 - DNA, 15 bp, Homo sapiens
agtggcagcagtgcc

SEQ ID NO: 1210225 - DNA, 15 bp, Homo sapiens
aagtggcagcagtgc

SEQ ID NO: 1210226 - DNA, 15 bp, Homo sapiens
aaagtggcagcagtg

SEQ ID NO: 1210227 - DNA, 15 bp, Homo sapiens
caaagtggcagcagt

SEQ ID NO: 1210228 - DNA, 15 bp, Homo sapiens
acaaagtggcagcag

SEQ ID NO: 1210229 - DNA, 15 bp, Homo sapiens
aacaaagtggcagca

SEQ ID NO: 1210230 - DNA, 15 bp, Homo sapiens
aaacaaagtggcagc

SEQ ID NO: 1210231 - DNA, 15 bp, Homo sapiens
taaacaaagtggcag

SEQ ID NO: 1210232 - DNA, 15 bp, Homo sapiens
ataaacaaagtggca

SEQ ID NO: 1210233 - DNA, 15 bp, Homo sapiens
cataaacaaagtggc

SEQ ID NO: 1210234 - DNA, 15 bp, Homo sapiens
gcataaacaaagtgg

SEQ ID NO: 1210235 - DNA, 15 bp, Homo sapiens
ggcataaacaaagtg

SEQ ID NO: 1210236 - DNA, 15 bp, Homo sapiens
gggcataaacaaagt

SEQ ID NO: 1210237 - DNA, 15 bp, Homo sapiens
tgggcataaacaaag

SEQ ID NO: 1210238 - DNA, 15 bp, Homo sapiens
ctgggcataaacaaa

SEQ ID NO: 1210239 - DNA, 15 bp, Homo sapiens
cctgggcataaacaa

SEQ ID NO: 1210240 - DNA, 15 bp, Homo sapiens
gcctgggcataaaca

SEQ ID NO: 1210241 - DNA, 15 bp, Homo sapiens
ggcctgggcataaac

SEQ ID NO: 1210242 - DNA, 15 bp, Homo sapiens
gggcctgggcataaa

SEQ ID NO: 1210243 - DNA, 15 bp, Homo sapiens
agggcctgggcataa

SEQ ID NO: 1210244 - DNA, 15 bp, Homo sapiens
aagggcctgggcata

SEQ ID NO: 1210245 - DNA, 15 bp, Homo sapiens
gaagggcctgggcat

SEQ ID NO: 1210246 - DNA, 15 bp, Homo sapiens
ggaagggcctgggca

SEQ ID NO: 1210247 - DNA, 15 bp, Homo sapiens
gggaagggcctgggc

SEQ ID NO: 1210248 - DNA, 15 bp, Homo sapiens
agggaagggcctggg

SEQ ID NO: 1210249 - DNA, 15 bp, Homo sapiens
cagggaagggcctgg

SEQ ID NO: 1210250 - DNA, 15 bp, Homo sapiens
ccagggaagggcctg

SEQ ID NO: 1210251 - DNA, 15 bp, Homo sapiens
cccagggaagggcct

SEQ ID NO: 1210252 - DNA, 15 bp, Homo sapiens
gcccagggaagggcc

SEQ ID NO: 1210253 - DNA, 15 bp, Homo sapiens
tgcccagggaagggc

SEQ ID NO: 1210254 - DNA, 15 bp, Homo sapiens
ctgcccagggaaggg

SEQ ID NO: 1210255 - DNA, 15 bp, Homo sapiens
cctgcccagggaagg

SEQ ID NO: 1210256 - DNA, 15 bp, Homo sapiens
ccctgcccagggaag

SEQ ID NO: 1210257 - DNA, 15 bp, Homo sapiens
cccctgcccagggaa

SEQ ID NO: 1210258 - DNA, 15 bp, Homo sapiens
ccccctgcccaggga

SEQ ID NO: 1210259 - DNA, 15 bp, Homo sapiens
tccccctgcccaggg

SEQ ID NO: 1210260 - DNA, 15 bp, Homo sapiens
ctccccctgcccagg

SEQ ID NO: 1210261 - DNA, 15 bp, Homo sapiens
cctccccctgcccag

SEQ ID NO: 1210262 - DNA, 15 bp, Homo sapiens
ccctccccctgccca

SEQ ID NO: 1210263 - DNA, 15 bp, Homo sapiens
cccctccccctgccc

SEQ ID NO: 1210264 - DNA, 15 bp, Homo sapiens
gcccctccccctgcc

SEQ ID NO: 1210265 - DNA, 15 bp, Homo sapiens
ggcccctccccctgc

SEQ ID NO: 1210266 - DNA, 15 bp, Homo sapiens
tggcccctccccctg

SEQ ID NO: 1210267 - DNA, 15 bp, Homo sapiens
atggcccctccccct

SEQ ID NO: 1210268 - DNA, 15 bp, Homo sapiens
aatggcccctccccc

SEQ ID NO: 1210269 - DNA, 15 bp, Homo sapiens
gaatggcccctcccc

SEQ ID NO: 1210270 - DNA, 15 bp, Homo sapiens
tgaatggcccctccc

SEQ ID NO: 1210271 - DNA, 15 bp, Homo sapiens
gtgaatggcccctcc

SEQ ID NO: 1210272 - DNA, 15 bp, Homo sapiens
agtgaatggcccctc

SEQ ID NO: 1210273 - DNA, 15 bp, Homo sapiens
cagtgaatggcccct

SEQ ID NO: 1210274 - DNA, 15 bp, Homo sapiens
acagtgaatggcccc

SEQ ID NO: 1210275 - DNA, 15 bp, Homo sapiens
gacagtgaatggccc

SEQ ID NO: 1210276 - DNA, 15 bp, Homo sapiens
cgacagtgaatggcc

SEQ ID NO: 1210277 - DNA, 15 bp, Homo sapiens
gcgacagtgaatggc

SEQ ID NO: 1210278 - DNA, 15 bp, Homo sapiens
agcgacagtgaatgg

SEQ ID NO: 1210279 - DNA, 15 bp, Homo sapiens
gagcgacagtgaatg

SEQ ID NO: 1210280 - DNA, 15 bp, Homo sapiens
ggagcgacagtgaat

SEQ ID NO: 1210281 - DNA, 15 bp, Homo sapiens
tggagcgacagtgaa

SEQ ID NO: 1210282 - DNA, 15 bp, Homo sapiens
atggagcgacagtga

SEQ ID NO: 1210283 - DNA, 15 bp, Homo sapiens
catggagcgacagtg

SEQ ID NO: 1210284 - DNA, 15 bp, Homo sapiens
acatggagcgacagt

SEQ ID NO: 1210285 - DNA, 15 bp, Homo sapiens
aacatggagcgacag

SEQ ID NO: 1210286 - DNA, 15 bp, Homo sapiens
aaacatggagcgaca

SEQ ID NO: 1210287 - DNA, 15 bp, Homo sapiens
gaaacatggagcgac

SEQ ID NO: 1210288 - DNA, 15 bp, Homo sapiens
ggaaacatggagcga

SEQ ID NO: 1210289 - DNA, 15 bp, Homo sapiens
gggaaacatggagcg

SEQ ID NO: 1210290 - DNA, 15 bp, Homo sapiens
tgggaaacatggagc

SEQ ID NO: 1210291 - DNA, 15 bp, Homo sapiens
ctgggaaacatggag

SEQ ID NO: 1210292 - DNA, 15 bp, Homo sapiens
gctgggaaacatgga

SEQ ID NO: 1210293 - DNA, 15 bp, Homo sapiens
tgctgggaaacatgg

SEQ ID NO: 1210294 - DNA, 15 bp, Homo sapiens
gtgctgggaaacatg

SEQ ID NO: 1210295 - DNA, 15 bp, Homo sapiens
tgtgctgggaaacat

SEQ ID NO: 1210296 - DNA, 15 bp, Homo sapiens
ctgtgctgggaaaca

SEQ ID NO: 1210297 - DNA, 15 bp, Homo sapiens
gctgtgctgggaaac

SEQ ID NO: 1210298 - DNA, 15 bp, Homo sapiens
ggctgtgctgggaaa

SEQ ID NO: 1210299 - DNA, 15 bp, Homo sapiens
gggctgtgctgggaa

SEQ ID NO: 1210300 - DNA, 15 bp, Homo sapiens
agggctgtgctggga

SEQ ID NO: 1210301 - DNA, 15 bp, Homo sapiens
aagggctgtgctggg

SEQ ID NO: 1210302 - DNA, 15 bp, Homo sapiens
gaagggctgtgctgg

SEQ ID NO: 1210303 - DNA, 15 bp, Homo sapiens
agaagggctgtgctg

SEQ ID NO: 1210304 - DNA, 15 bp, Homo sapiens
gagaagggctgtgct

SEQ ID NO: 1210305 - DNA, 15 bp, Homo sapiens
ggagaagggctgtgc

SEQ ID NO: 1210306 - DNA, 15 bp, Homo sapiens
gggagaagggctgtg

SEQ ID NO: 1210307 - DNA, 15 bp, Homo sapiens
agggagaagggctgt

SEQ ID NO: 1210308 - DNA, 15 bp, Homo sapiens
gagggagaagggctg

SEQ ID NO: 1210309 - DNA, 15 bp, Homo sapiens
agagggagaagggct

SEQ ID NO: 1210310 - DNA, 15 bp, Homo sapiens
gagagggagaagggc

SEQ ID NO: 1210311 - DNA, 15 bp, Homo sapiens
ggagagggagaaggg

SEQ ID NO: 1210312 - DNA, 15 bp, Homo sapiens
aggagagggagaagg

SEQ ID NO: 1210313 - DNA, 15 bp, Homo sapiens
gaggagagggagaag

SEQ ID NO: 1210314 - DNA, 15 bp, Homo sapiens
agaggagagggagaa

SEQ ID NO: 1210315 - DNA, 15 bp, Homo sapiens
gagaggagagggaga

SEQ ID NO: 1210316 - DNA, 15 bp, Homo sapiens
agagaggagagggag

SEQ ID NO: 1210317 - DNA, 15 bp, Homo sapiens
gagagaggagaggga

SEQ ID NO: 1210318 - DNA, 15 bp, Homo sapiens
ggagagaggagaggg

SEQ ID NO: 1210319 - DNA, 15 bp, Homo sapiens
tggagagaggagagg

SEQ ID NO: 1210320 - DNA, 15 bp, Homo sapiens
gtggagagaggagag

SEQ ID NO: 1210321 - DNA, 15 bp, Homo sapiens
ggtggagagaggaga

SEQ ID NO: 1210322 - DNA, 15 bp, Homo sapiens
gggtggagagaggag

SEQ ID NO: 1210323 - DNA, 15 bp, Homo sapiens
cgggtggagagagga

SEQ ID NO: 1210324 - DNA, 15 bp, Homo sapiens
tcgggtggagagagg

SEQ ID NO: 1210325 - DNA, 15 bp, Homo sapiens
atcgggtggagagag

SEQ ID NO: 1210326 - DNA, 15 bp, Homo sapiens
gatcgggtggagaga

SEQ ID NO: 1210327 - DNA, 15 bp, Homo sapiens
ggatcgggtggagag

SEQ ID NO: 1210328 - DNA, 15 bp, Homo sapiens
tggatcgggtggaga

SEQ ID NO: 1210329 - DNA, 15 bp, Homo sapiens
gtggatcgggtggag

SEQ ID NO: 1210330 - DNA, 15 bp, Homo sapiens
agtggatcgggtgga

SEQ ID NO: 1210331 - DNA, 15 bp, Homo sapiens
tagtggatcgggtgg

SEQ ID NO: 1210332 - DNA, 15 bp, Homo sapiens
ttagtggatcgggtg

SEQ ID NO: 1210333 - DNA, 15 bp, Homo sapiens
tttagtggatcgggt

SEQ ID NO: 1210334 - DNA, 15 bp, Homo sapiens
ctttagtggatcggg

SEQ ID NO: 1210335 - DNA, 15 bp, Homo sapiens
tctttagtggatcgg

SEQ ID NO: 1210336 - DNA, 15 bp, Homo sapiens
ctctttagtggatcg

SEQ ID NO: 1210337 - DNA, 15 bp, Homo sapiens
cctctttagtggatc

SEQ ID NO: 1210338 - DNA, 15 bp, Homo sapiens
ccctctttagtggat

SEQ ID NO: 1210339 - DNA, 15 bp, Homo sapiens
tccctctttagtgga

SEQ ID NO: 1210340 - DNA, 15 bp, Homo sapiens
ctccctctttagtgg

SEQ ID NO: 1210341 - DNA, 15 bp, Homo sapiens
gctccctctttagtg

SEQ ID NO: 1210342 - DNA, 15 bp, Homo sapiens
ggctccctctttagt

SEQ ID NO: 1210343 - DNA, 15 bp, Homo sapiens
gggctccctctttag

SEQ ID NO: 1210344 - DNA, 15 bp, Homo sapiens
cgggctccctcttta

SEQ ID NO: 1210345 - DNA, 15 bp, Homo sapiens
tcgggctccctcttt

SEQ ID NO: 1210346 - DNA, 15 bp, Homo sapiens
ttcgggctccctctt

SEQ ID NO: 1210347 - DNA, 15 bp, Homo sapiens
cttcgggctccctct

SEQ ID NO: 1210348 - DNA, 15 bp, Homo sapiens
acttcgggctccctc

SEQ ID NO: 1210349 - DNA, 15 bp, Homo sapiens
cacttcgggctccct

SEQ ID NO: 1210350 - DNA, 15 bp, Homo sapiens
gcacttcgggctccc

SEQ ID NO: 1210351 - DNA, 15 bp, Homo sapiens
ggcacttcgggctcc

SEQ ID NO: 1210352 - DNA, 15 bp, Homo sapiens
gggcacttcgggctc

SEQ ID NO: 1210353 - DNA, 15 bp, Homo sapiens
tgggcacttcgggct

SEQ ID NO: 1210354 - DNA, 15 bp, Homo sapiens
ctgggcacttcgggc

SEQ ID NO: 1210355 - DNA, 15 bp, Homo sapiens
tctgggcacttcggg

SEQ ID NO: 1210356 - DNA, 15 bp, Homo sapiens
gtctgggcacttcgg

SEQ ID NO: 1210357 - DNA, 15 bp, Homo sapiens
agtctgggcacttcg

SEQ ID NO: 1210358 - DNA, 15 bp, Homo sapiens
cagtctgggcacttc

SEQ ID NO: 1210359 - DNA, 15 bp, Homo sapiens
ccagtctgggcactt

SEQ ID NO: 1210360 - DNA, 15 bp, Homo sapiens
gccagtctgggcact

SEQ ID NO: 1210361 - DNA, 15 bp, Homo sapiens
tgccagtctgggcac

SEQ ID NO: 1210362 - DNA, 15 bp, Homo sapiens
gtgccagtctgggca

SEQ ID NO: 1210363 - DNA, 15 bp, Homo sapiens
agtgccagtctgggc

SEQ ID NO: 1210364 - DNA, 15 bp, Homo sapiens
aagtgccagtctggg

SEQ ID NO: 1210365 - DNA, 15 bp, Homo sapiens
taagtgccagtctgg

SEQ ID NO: 1210366 - DNA, 15 bp, Homo sapiens
ttaagtgccagtctg

SEQ ID NO: 1210367 - DNA, 15 bp, Homo sapiens
tttaagtgccagtct

SEQ ID NO: 1210368 - DNA, 15 bp, Homo sapiens
ctttaagtgccagtc

SEQ ID NO: 1210369 - DNA, 15 bp, Homo sapiens
tctttaagtgccagt

SEQ ID NO: 1210370 - DNA, 15 bp, Homo sapiens
ctctttaagtgccag

SEQ ID NO: 1210371 - DNA, 15 bp, Homo sapiens
actctttaagtgcca

SEQ ID NO: 1210372 - DNA, 15 bp, Homo sapiens
cactctttaagtgcc

SEQ ID NO: 1210373 - DNA, 15 bp, Homo sapiens
tcactctttaagtgc

SEQ ID NO: 1210374 - DNA, 15 bp, Homo sapiens
ttcactctttaagtg

SEQ ID NO: 1210375 - DNA, 15 bp, Homo sapiens
cttcactctttaagt

SEQ ID NO: 1210376 - DNA, 15 bp, Homo sapiens
tcttcactctttaag

SEQ ID NO: 1210377 - DNA, 15 bp, Homo sapiens
ttcttcactctttaa

SEQ ID NO: 1210378 - DNA, 15 bp, Homo sapiens
tttcttcactcttta

SEQ ID NO: 1210379 - DNA, 15 bp, Homo sapiens
ctttcttcactcttt

SEQ ID NO: 1210380 - DNA, 15 bp, Homo sapiens
cctttcttcactctt

SEQ ID NO: 1210381 - DNA, 15 bp, Homo sapiens
gcctttcttcactct

SEQ ID NO: 1210382 - DNA, 15 bp, Homo sapiens
tgcctttcttcactc

SEQ ID NO: 1210383 - DNA, 15 bp, Homo sapiens
ctgcctttcttcact

SEQ ID NO: 1210384 - DNA, 15 bp, Homo sapiens
gctgcctttcttcac

SEQ ID NO: 1210385 - DNA, 15 bp, Homo sapiens
tgctgcctttcttca

SEQ ID NO: 1210386 - DNA, 15 bp, Homo sapiens
ctgctgcctttcttc

SEQ ID NO: 1210387 - DNA, 15 bp, Homo sapiens
tctgctgcctttctt

SEQ ID NO: 1210388 - DNA, 15 bp, Homo sapiens
ctctgctgcctttct

SEQ ID NO: 1210389 - DNA, 15 bp, Homo sapiens
cctctgctgcctttc

SEQ ID NO: 1210390 - DNA, 15 bp, Homo sapiens
ccctctgctgccttt

SEQ ID NO: 1210391 - DNA, 15 bp, Homo sapiens
cccctctgctgcctt

SEQ ID NO: 1210392 - DNA, 15 bp, Homo sapiens
acccctctgctgcct

SEQ ID NO: 1210393 - DNA, 15 bp, Homo sapiens
cacccctctgctgcc

SEQ ID NO: 1210394 - DNA, 15 bp, Homo sapiens
tcacccctctgctgc

SEQ ID NO: 1210395 - DNA, 15 bp, Homo sapiens
ctcacccctctgctg

SEQ ID NO: 1210396 - DNA, 15 bp, Homo sapiens
gctcacccctctgct

SEQ ID NO: 1210397 - DNA, 15 bp, Homo sapiens
cgctcacccctctgc

SEQ ID NO: 1210398 - DNA, 15 bp, Homo sapiens
gcgctcacccctctg

SEQ ID NO: 1210399 - DNA, 15 bp, Homo sapiens
ggcgctcacccctct

SEQ ID NO: 1210400 - DNA, 15 bp, Homo sapiens
cggcgctcacccctc

SEQ ID NO: 1210401 - DNA, 15 bp, Homo sapiens
ccggcgctcacccct

SEQ ID NO: 1210402 - DNA, 15 bp, Homo sapiens
cccggcgctcacccc

SEQ ID NO: 1210403 - DNA, 15 bp, Homo sapiens
gcccggcgctcaccc

SEQ ID NO: 1210404 - DNA, 15 bp, Homo sapiens
ggcccggcgctcacc

SEQ ID NO: 1210405 - DNA, 15 bp, Homo sapiens
gggcccggcgctcac

SEQ ID NO: 1210406 - DNA, 15 bp, Homo sapiens
ggggcccggcgctca

SEQ ID NO: 1210407 - DNA, 15 bp, Homo sapiens
cggggcccggcgctc

SEQ ID NO: 1210408 - DNA, 15 bp, Homo sapiens
gcggggcccggcgct

SEQ ID NO: 1210409 - DNA, 15 bp, Homo sapiens
tgcggggcccggcgc

SEQ ID NO: 1210410 - DNA, 15 bp, Homo sapiens
gtgcggggcccggcg

SEQ ID NO: 1210411 - DNA, 15 bp, Homo sapiens
agtgcggggcccggc

SEQ ID NO: 1210412 - DNA, 15 bp, Homo sapiens
gagtgcggggcccgg

SEQ ID NO: 1210413 - DNA, 15 bp, Homo sapiens
ggagtgcggggcccg

SEQ ID NO: 1210414 - DNA, 15 bp, Homo sapiens
aggagtgcggggccc

SEQ ID NO: 1210415 - DNA, 15 bp, Homo sapiens
caggagtgcggggcc

SEQ ID NO: 1210416 - DNA, 15 bp, Homo sapiens
ccaggagtgcggggc

SEQ ID NO: 1210417 - DNA, 15 bp, Homo sapiens
cccaggagtgcgggg

SEQ ID NO: 1210418 - DNA, 15 bp, Homo sapiens
ccccaggagtgcggg

SEQ ID NO: 1210419 - DNA, 15 bp, Homo sapiens
cccccaggagtgcgg

SEQ ID NO: 1210420 - DNA, 15 bp, Homo sapiens
tcccccaggagtgcg

SEQ ID NO: 1210421 - DNA, 15 bp, Homo sapiens
ctcccccaggagtgc

SEQ ID NO: 1210422 - DNA, 15 bp, Homo sapiens
gctcccccaggagtg

SEQ ID NO: 1210423 - DNA, 15 bp, Homo sapiens
tgctcccccaggagt

SEQ ID NO: 1210424 - DNA, 15 bp, Homo sapiens
ctgctcccccaggag

SEQ ID NO: 1210425 - DNA, 15 bp, Homo sapiens
gctgctcccccagga

SEQ ID NO: 1210426 - DNA, 15 bp, Homo sapiens
tgctgctcccccagg

SEQ ID NO: 1210427 - DNA, 15 bp, Homo sapiens
ctgctgctcccccag

SEQ ID NO: 1210428 - DNA, 15 bp, Homo sapiens
gctgctgctccccca

SEQ ID NO: 1210429 - DNA, 15 bp, Homo sapiens
tgctgctgctccccc

SEQ ID NO: 1210430 - DNA, 15 bp, Homo sapiens
ctgctgctgctcccc

SEQ ID NO: 1210431 - DNA, 15 bp, Homo sapiens
gctgctgctgctccc

SEQ ID NO: 1210432 - DNA, 15 bp, Homo sapiens
tgctgctgctgctcc

SEQ ID NO: 1210433 - DNA, 15 bp, Homo sapiens
ttgctgctgctgctc

SEQ ID NO: 1210434 - DNA, 15 bp, Homo sapiens
cttgctgctgctgct

SEQ ID NO: 1210435 - DNA, 15 bp, Homo sapiens
ccttgctgctgctgc

SEQ ID NO: 1210436 - DNA, 15 bp, Homo sapiens
cccttgctgctgctg

SEQ ID NO: 1210437 - DNA, 15 bp, Homo sapiens
gcccttgctgctgct

SEQ ID NO: 1210438 - DNA, 15 bp, Homo sapiens
agcccttgctgctgc

SEQ ID NO: 1210439 - DNA, 15 bp, Homo sapiens
gagcccttgctgctg

SEQ ID NO: 1210440 - DNA, 15 bp, Homo sapiens
agagcccttgctgct

SEQ ID NO: 1210441 - DNA, 15 bp, Homo sapiens
cagagcccttgctgc

SEQ ID NO: 1210442 - DNA, 15 bp, Homo sapiens
gcagagcccttgctg

SEQ ID NO: 1210443 - DNA, 15 bp, Homo sapiens
ggcagagcccttgct

SEQ ID NO: 1210444 - DNA, 15 bp, Homo sapiens
aggcagagcccttgc

SEQ ID NO: 1210445 - DNA, 15 bp, Homo sapiens
aaggcagagcccttg

SEQ ID NO: 1210446 - DNA, 15 bp, Homo sapiens
taaggcagagccctt

SEQ ID NO: 1210447 - DNA, 15 bp, Homo sapiens
gtaaggcagagccct

SEQ ID NO: 1210448 - DNA, 15 bp, Homo sapiens
ggtaaggcagagccc

SEQ ID NO: 1210449 - DNA, 15 bp, Homo sapiens
aggtaaggcagagcc

SEQ ID NO: 1210450 - DNA, 15 bp, Homo sapiens
caggtaaggcagagc

SEQ ID NO: 1210451 - DNA, 15 bp, Homo sapiens
tcaggtaaggcagag

SEQ ID NO: 1210452 - DNA, 15 bp, Homo sapiens
gtcaggtaaggcaga

SEQ ID NO: 1210453 - DNA, 15 bp, Homo sapiens
cgtcaggtaaggcag

SEQ ID NO: 1210454 - DNA, 15 bp, Homo sapiens
gcgtcaggtaaggca

SEQ ID NO: 1210455 - DNA, 15 bp, Homo sapiens
agcgtcaggtaaggc

SEQ ID NO: 1210456 - DNA, 15 bp, Homo sapiens
cagcgtcaggtaagg

SEQ ID NO: 1210457 - DNA, 15 bp, Homo sapiens
acagcgtcaggtaag

SEQ ID NO: 1210458 - DNA, 15 bp, Homo sapiens
tacagcgtcaggtaa

SEQ ID NO: 1210459 - DNA, 15 bp, Homo sapiens
ctacagcgtcaggta

SEQ ID NO: 1210460 - DNA, 15 bp, Homo sapiens
cctacagcgtcaggt

SEQ ID NO: 1210461 - DNA, 15 bp, Homo sapiens
tcctacagcgtcagg

SEQ ID NO: 1210462 - DNA, 15 bp, Homo sapiens
ctcctacagcgtcag

SEQ ID NO: 1210463 - DNA, 15 bp, Homo sapiens
cctcctacagcgtca

SEQ ID NO: 1210464 - DNA, 15 bp, Homo sapiens
gcctcctacagcgtc

SEQ ID NO: 1210465 - DNA, 15 bp, Homo sapiens
tgcctcctacagcgt

SEQ ID NO: 1210466 - DNA, 15 bp, Homo sapiens
atgcctcctacagcg

SEQ ID NO: 1210467 - DNA, 15 bp, Homo sapiens
catgcctcctacagc

SEQ ID NO: 1210468 - DNA, 15 bp, Homo sapiens
ccatgcctcctacag

SEQ ID NO: 1210469 - DNA, 15 bp, Homo sapiens
tccatgcctcctaca

SEQ ID NO: 1210470 - DNA, 15 bp, Homo sapiens
ctccatgcctcctac

SEQ ID NO: 1210471 - DNA, 15 bp, Homo sapiens
cctccatgcctccta

SEQ ID NO: 1210472 - DNA, 15 bp, Homo sapiens
tcctccatgcctcct

SEQ ID NO: 1210473 - DNA, 15 bp, Homo sapiens
atcctccatgcctcc

SEQ ID NO: 1210474 - DNA, 15 bp, Homo sapiens
catcctccatgcctc

SEQ ID NO: 1210475 - DNA, 15 bp, Homo sapiens
gcatcctccatgcct

SEQ ID NO: 1210476 - DNA, 15 bp, Homo sapiens
ggcatcctccatgcc

SEQ ID NO: 1210477 - DNA, 15 bp, Homo sapiens
gggcatcctccatgc

SEQ ID NO: 1210478 - DNA, 15 bp, Homo sapiens
tgggcatcctccatg

SEQ ID NO: 1210479 - DNA, 15 bp, Homo sapiens
ctgggcatcctccat

SEQ ID NO: 1210480 - DNA, 15 bp, Homo sapiens
cctgggcatcctcca

SEQ ID NO: 1210481 - DNA, 15 bp, Homo sapiens
gcctgggcatcctcc

SEQ ID NO: 1210482 - DNA, 15 bp, Homo sapiens
agcctgggcatcctc

SEQ ID NO: 1210483 - DNA, 15 bp, Homo sapiens
cagcctgggcatcct

SEQ ID NO: 1210484 - DNA, 15 bp, Homo sapiens
acagcctgggcatcc

SEQ ID NO: 1210485 - DNA, 15 bp, Homo sapiens
cacagcctgggcatc

SEQ ID NO: 1210486 - DNA, 15 bp, Homo sapiens
tcacagcctgggcat

SEQ ID NO: 1210487 - DNA, 15 bp, Homo sapiens
ctcacagcctgggca

SEQ ID NO: 1210488 - DNA, 15 bp, Homo sapiens
cctcacagcctgggc

SEQ ID NO: 1210489 - DNA, 15 bp, Homo sapiens
gcctcacagcctggg

SEQ ID NO: 1210490 - DNA, 15 bp, Homo sapiens
agcctcacagcctgg

SEQ ID NO: 1210491 - DNA, 15 bp, Homo sapiens
gagcctcacagcctg

SEQ ID NO: 1210492 - DNA, 15 bp, Homo sapiens
ggagcctcacagcct

SEQ ID NO: 1210493 - DNA, 15 bp, Homo sapiens
cggagcctcacagcc

SEQ ID NO: 1210494 - DNA, 15 bp, Homo sapiens
ccggagcctcacagc

SEQ ID NO: 1210495 - DNA, 15 bp, Homo sapiens
cccggagcctcacag

SEQ ID NO: 1210496 - DNA, 15 bp, Homo sapiens
ccccggagcctcaca

SEQ ID NO: 1210497 - DNA, 15 bp, Homo sapiens
gccccggagcctcac

SEQ ID NO: 1210498 - DNA, 15 bp, Homo sapiens
cgccccggagcctca

SEQ ID NO: 1210499 - DNA, 15 bp, Homo sapiens
ccgccccggagcctc

SEQ ID NO: 1210500 - DNA, 15 bp, Homo sapiens
accgccccggagcct

SEQ ID NO: 1210501 - DNA, 15 bp, Homo sapiens
caccgccccggagcc

SEQ ID NO: 1210502 - DNA, 15 bp, Homo sapiens
ccaccgccccggagc

SEQ ID NO: 1210503 - DNA, 15 bp, Homo sapiens
gccaccgccccggag

SEQ ID NO: 1210504 - DNA, 15 bp, Homo sapiens
tgccaccgccccgga

SEQ ID NO: 1210505 - DNA, 15 bp, Homo sapiens
ctgccaccgccccgg

SEQ ID NO: 1210506 - DNA, 15 bp, Homo sapiens
cctgccaccgccccg

SEQ ID NO: 1210507 - DNA, 15 bp, Homo sapiens
tcctgccaccgcccc

SEQ ID NO: 1210508 - DNA, 15 bp, Homo sapiens
ctcctgccaccgccc

SEQ ID NO: 1210509 - DNA, 15 bp, Homo sapiens
gctcctgccaccgcc

SEQ ID NO: 1210510 - DNA, 15 bp, Homo sapiens
ggctcctgccaccgc

SEQ ID NO: 1210511 - DNA, 15 bp, Homo sapiens
gggctcctgccaccg

SEQ ID NO: 1210512 - DNA, 15 bp, Homo sapiens
ggggctcctgccacc

SEQ ID NO: 1210513 - DNA, 15 bp, Homo sapiens
gggggctcctgccac

SEQ ID NO: 1210514 - DNA, 15 bp, Homo sapiens
agggggctcctgcca

SEQ ID NO: 1210515 - DNA, 15 bp, Homo sapiens
gagggggctcctgcc

SEQ ID NO: 1210516 - DNA, 15 bp, Homo sapiens
ggagggggctcctgc

SEQ ID NO: 1210517 - DNA, 15 bp, Homo sapiens
tggagggggctcctg

SEQ ID NO: 1210518 - DNA, 15 bp, Homo sapiens
ctggagggggctcct

SEQ ID NO: 1210519 - DNA, 15 bp, Homo sapiens
cctggagggggctcc

SEQ ID NO: 1210520 - DNA, 15 bp, Homo sapiens
ccctggagggggctc

SEQ ID NO: 1210521 - DNA, 15 bp, Homo sapiens
tccctggagggggct

SEQ ID NO: 1210522 - DNA, 15 bp, Homo sapiens
ctccctggagggggc

SEQ ID NO: 1210523 - DNA, 15 bp, Homo sapiens
gctccctggaggggg

SEQ ID NO: 1210524 - DNA, 15 bp, Homo sapiens
agctccctggagggg

SEQ ID NO: 1210525 - DNA, 15 bp, Homo sapiens
gagctccctggaggg

SEQ ID NO: 1210526 - DNA, 15 bp, Homo sapiens
agagctccctggagg

SEQ ID NO: 1210527 - DNA, 15 bp, Homo sapiens
cagagctccctggag

SEQ ID NO: 1210528 - DNA, 15 bp, Homo sapiens
ccagagctccctgga

SEQ ID NO: 1210529 - DNA, 15 bp, Homo sapiens
cccagagctccctgg

SEQ ID NO: 1210530 - DNA, 15 bp, Homo sapiens
tcccagagctccctg

SEQ ID NO: 1210531 - DNA, 15 bp, Homo sapiens
ctcccagagctccct

SEQ ID NO: 1210532 - DNA, 15 bp, Homo sapiens
gctcccagagctccc

SEQ ID NO: 1210533 - DNA, 15 bp, Homo sapiens
ggctcccagagctcc

SEQ ID NO: 1210534 - DNA, 15 bp, Homo sapiens
aggctcccagagctc

SEQ ID NO: 1210535 - DNA, 15 bp, Homo sapiens
gaggctcccagagct

SEQ ID NO: 1210536 - DNA, 15 bp, Homo sapiens
agaggctcccagagc

SEQ ID NO: 1210537 - DNA, 15 bp, Homo sapiens
cagaggctcccagag

SEQ ID NO: 1210538 - DNA, 15 bp, Homo sapiens
acagaggctcccaga

SEQ ID NO: 1210539 - DNA, 15 bp, Homo sapiens
aacagaggctcccag

SEQ ID NO: 1210540 - DNA, 15 bp, Homo sapiens
aaacagaggctccca

SEQ ID NO: 1210541 - DNA, 15 bp, Homo sapiens
taaacagaggctccc

SEQ ID NO: 1210542 - DNA, 15 bp, Homo sapiens
gtaaacagaggctcc

SEQ ID NO: 1210543 - DNA, 15 bp, Homo sapiens
agtaaacagaggctc

SEQ ID NO: 1210544 - DNA, 15 bp, Homo sapiens
aagtaaacagaggct

SEQ ID NO: 1210545 - DNA, 15 bp, Homo sapiens
caagtaaacagaggc

SEQ ID NO: 1210546 - DNA, 15 bp, Homo sapiens
ccaagtaaacagagg

SEQ ID NO: 1210547 - DNA, 15 bp, Homo sapiens
tccaagtaaacagag

SEQ ID NO: 1210548 - DNA, 15 bp, Homo sapiens
ctccaagtaaacaga

SEQ ID NO: 1210549 - DNA, 15 bp, Homo sapiens
tctccaagtaaacag

SEQ ID NO: 1210550 - DNA, 15 bp, Homo sapiens
gtctccaagtaaaca

SEQ ID NO: 1210551 - DNA, 15 bp, Homo sapiens
ggtctccaagtaaac

SEQ ID NO: 1210552 - DNA, 15 bp, Homo sapiens
gggtctccaagtaaa

SEQ ID NO: 1210553 - DNA, 15 bp, Homo sapiens
tgggtctccaagtaa

SEQ ID NO: 1210554 - DNA, 15 bp, Homo sapiens
atgggtctccaagta

SEQ ID NO: 1210555 - DNA, 15 bp, Homo sapiens
catgggtctccaagt

SEQ ID NO: 1210556 - DNA, 15 bp, Homo sapiens
ccatgggtctccaag

SEQ ID NO: 1210557 - DNA, 15 bp, Homo sapiens
tccatgggtctccaa

SEQ ID NO: 1210558 - DNA, 15 bp, Homo sapiens
gtccatgggtctcca

SEQ ID NO: 1210559 - DNA, 15 bp, Homo sapiens
ggtccatgggtctcc

SEQ ID NO: 1210560 - DNA, 15 bp, Homo sapiens
gggtccatgggtctc

SEQ ID NO: 1210561 - DNA, 15 bp, Homo sapiens
agggtccatgggtct

SEQ ID NO: 1210562 - DNA, 15 bp, Homo sapiens
gagggtccatgggtc

SEQ ID NO: 1210563 - DNA, 15 bp, Homo sapiens
ggagggtccatgggt

SEQ ID NO: 1210564 - DNA, 15 bp, Homo sapiens
cggagggtccatggg

SEQ ID NO: 1210565 - DNA, 15 bp, Homo sapiens
ccggagggtccatgg

SEQ ID NO: 1210566 - DNA, 15 bp, Homo sapiens
cccggagggtccatg

SEQ ID NO: 1210567 - DNA, 15 bp, Homo sapiens
ccccggagggtccat

SEQ ID NO: 1210568 - DNA, 15 bp, Homo sapiens
cccccggagggtcca

SEQ ID NO: 1210569 - DNA, 15 bp, Homo sapiens
acccccggagggtcc

SEQ ID NO: 1210570 - DNA, 15 bp, Homo sapiens
gacccccggagggtc

SEQ ID NO: 1210571 - DNA, 15 bp, Homo sapiens
tgacccccggagggt

SEQ ID NO: 1210572 - DNA, 15 bp, Homo sapiens
ttgacccccggaggg

SEQ ID NO: 1210573 - DNA, 15 bp, Homo sapiens
tttgacccccggagg

SEQ ID NO: 1210574 - DNA, 15 bp, Homo sapiens
ctttgacccccggag

SEQ ID NO: 1210575 - DNA, 15 bp, Homo sapiens
tctttgacccccgga

SEQ ID NO: 1210576 - DNA, 15 bp, Homo sapiens
atctttgacccccgg

SEQ ID NO: 1210577 - DNA, 15 bp, Homo sapiens
catctttgacccccg

SEQ ID NO: 1210578 - DNA, 15 bp, Homo sapiens
tcatctttgaccccc

SEQ ID NO: 1210579 - DNA, 15 bp, Homo sapiens
ctcatctttgacccc

SEQ ID NO: 1210580 - DNA, 15 bp, Homo sapiens
tctcatctttgaccc

SEQ ID NO: 1210581 - DNA, 15 bp, Homo sapiens
ctctcatctttgacc

SEQ ID NO: 1210582 - DNA, 15 bp, Homo sapiens
cctctcatctttgac

SEQ ID NO: 1210583 - DNA, 15 bp, Homo sapiens
acctctcatctttga

SEQ ID NO: 1210584 - DNA, 15 bp, Homo sapiens
gacctctcatctttg

SEQ ID NO: 1210585 - DNA, 15 bp, Homo sapiens
tgacctctcatcttt

SEQ ID NO: 1210586 - DNA, 15 bp, Homo sapiens
gtgacctctcatctt

SEQ ID NO: 1210587 - DNA, 15 bp, Homo sapiens
ggtgacctctcatct

SEQ ID NO: 1210588 - DNA, 15 bp, Homo sapiens
gggtgacctctcatc

SEQ ID NO: 1210589 - DNA, 15 bp, Homo sapiens
tgggtgacctctcat

SEQ ID NO: 1210590 - DNA, 15 bp, Homo sapiens
atgggtgacctctca

SEQ ID NO: 1210591 - DNA, 15 bp, Homo sapiens
catgggtgacctctc

SEQ ID NO: 1210592 - DNA, 15 bp, Homo sapiens
ccatgggtgacctct

SEQ ID NO: 1210593 - DNA, 15 bp, Homo sapiens
gccatgggtgacctc

SEQ ID NO: 1210594 - DNA, 15 bp, Homo sapiens
ggccatgggtgacct

SEQ ID NO: 1210595 - DNA, 15 bp, Homo sapiens
tggccatgggtgacc

SEQ ID NO: 1210596 - DNA, 15 bp, Homo sapiens
ttggccatgggtgac

SEQ ID NO: 1210597 - DNA, 15 bp, Homo sapiens
gttggccatgggtga

SEQ ID NO: 1210598 - DNA, 15 bp, Homo sapiens
tgttggccatgggtg

SEQ ID NO: 1210599 - DNA, 15 bp, Homo sapiens
ctgttggccatgggt

SEQ ID NO: 1210600 - DNA, 15 bp, Homo sapiens
cctgttggccatggg

SEQ ID NO: 1210601 - DNA, 15 bp, Homo sapiens
gcctgttggccatgg

SEQ ID NO: 1210602 - DNA, 15 bp, Homo sapiens
tgcctgttggccatg

SEQ ID NO: 1210603 - DNA, 15 bp, Homo sapiens
ctgcctgttggccat

SEQ ID NO: 1210604 - DNA, 15 bp, Homo sapiens
gctgcctgttggcca

SEQ ID NO: 1210605 - DNA, 15 bp, Homo sapiens
tgctgcctgttggcc

SEQ ID NO: 1210606 - DNA, 15 bp, Homo sapiens
ttgctgcctgttggc

SEQ ID NO: 1210607 - DNA, 15 bp, Homo sapiens
tttgctgcctgttgg

SEQ ID NO: 1210608 - DNA, 15 bp, Homo sapiens
ctttgctgcctgttg

SEQ ID NO: 1210609 - DNA, 15 bp, Homo sapiens
gctttgctgcctgtt

SEQ ID NO: 1210610 - DNA, 15 bp, Homo sapiens
agctttgctgcctgt

SEQ ID NO: 1210611 - DNA, 15 bp, Homo sapiens
cagctttgctgcctg

SEQ ID NO: 1210612 - DNA, 15 bp, Homo sapiens
ccagctttgctgcct

SEQ ID NO: 1210613 - DNA, 15 bp, Homo sapiens
cccagctttgctgcc

SEQ ID NO: 1210614 - DNA, 15 bp, Homo sapiens
gcccagctttgctgc

SEQ ID NO: 1210615 - DNA, 15 bp, Homo sapiens
tgcccagctttgctg

SEQ ID NO: 1210616 - DNA, 15 bp, Homo sapiens
ttgcccagctttgct

SEQ ID NO: 1210617 - DNA, 15 bp, Homo sapiens
tttgcccagctttgc

SEQ ID NO: 1210618 - DNA, 15 bp, Homo sapiens
atttgcccagctttg

SEQ ID NO: 1210619 - DNA, 15 bp, Homo sapiens
aatttgcccagcttt

SEQ ID NO: 1210620 - DNA, 15 bp, Homo sapiens
aaatttgcccagctt

SEQ ID NO: 1210621 - DNA, 15 bp, Homo sapiens
aaaatttgcccagct

SEQ ID NO: 1210622 - DNA, 15 bp, Homo sapiens
gaaaatttgcccagc

SEQ ID NO: 1210623 - DNA, 15 bp, Homo sapiens
agaaaatttgcccag

SEQ ID NO: 1210624 - DNA, 15 bp, Homo sapiens
cagaaaatttgccca

SEQ ID NO: 1210625 - DNA, 15 bp, Homo sapiens
ccagaaaatttgccc

SEQ ID NO: 1210626 - DNA, 15 bp, Homo sapiens
accagaaaatttgcc

SEQ ID NO: 1210627 - DNA, 15 bp, Homo sapiens
caccagaaaatttgc

SEQ ID NO: 1210628 - DNA, 15 bp, Homo sapiens
ccaccagaaaatttg

SEQ ID NO: 1210629 - DNA, 15 bp, Homo sapiens
gccaccagaaaattt

SEQ ID NO: 1210630 - DNA, 15 bp, Homo sapiens
ggccaccagaaaatt

SEQ ID NO: 1210631 - DNA, 15 bp, Homo sapiens
cggccaccagaaaat

SEQ ID NO: 1210632 - DNA, 15 bp, Homo sapiens
ccggccaccagaaaa

SEQ ID NO: 1210633 - DNA, 15 bp, Homo sapiens
tccggccaccagaaa

SEQ ID NO: 1210634 - DNA, 15 bp, Homo sapiens
gtccggccaccagaa

SEQ ID NO: 1210635 - DNA, 15 bp, Homo sapiens
ggtccggccaccaga

SEQ ID NO: 1210636 - DNA, 15 bp, Homo sapiens
gggtccggccaccag

SEQ ID NO: 1210637 - DNA, 15 bp, Homo sapiens
agggtccggccacca

SEQ ID NO: 1210638 - DNA, 15 bp, Homo sapiens
gagggtccggccacc

SEQ ID NO: 1210639 - DNA, 15 bp, Homo sapiens
ggagggtccggccac

SEQ ID NO: 1210640 - DNA, 15 bp, Homo sapiens
gggagggtccggcca

SEQ ID NO: 1210641 - DNA, 15 bp, Homo sapiens
ggggagggtccggcc

SEQ ID NO: 1210642 - DNA, 15 bp, Homo sapiens
tggggagggtccggc

SEQ ID NO: 1210643 - DNA, 15 bp, Homo sapiens
ctggggagggtccgg

SEQ ID NO: 1210644 - DNA, 15 bp, Homo sapiens
tctggggagggtccg

SEQ ID NO: 1210645 - DNA, 15 bp, Homo sapiens
ctctggggagggtcc

SEQ ID NO: 1210646 - DNA, 15 bp, Homo sapiens
actctggggagggtc

SEQ ID NO: 1210647 - DNA, 15 bp, Homo sapiens
cactctggggagggt

SEQ ID NO: 1210648 - DNA, 15 bp, Homo sapiens
ccactctggggaggg

SEQ ID NO: 1210649 - DNA, 15 bp, Homo sapiens
gccactctggggagg

SEQ ID NO: 1210650 - DNA, 15 bp, Homo sapiens
agccactctggggag

SEQ ID NO: 1210651 - DNA, 15 bp, Homo sapiens
aagccactctgggga

SEQ ID NO: 1210652 - DNA, 15 bp, Homo sapiens
gaagccactctgggg

SEQ ID NO: 1210653 - DNA, 15 bp, Homo sapiens
tgaagccactctggg

SEQ ID NO: 1210654 - DNA, 15 bp, Homo sapiens
ctgaagccactctgg

SEQ ID NO: 1210655 - DNA, 15 bp, Homo sapiens
actgaagccactctg

SEQ ID NO: 1210656 - DNA, 15 bp, Homo sapiens
aactgaagccactct

SEQ ID NO: 1210657 - DNA, 15 bp, Homo sapiens
caactgaagccactc

SEQ ID NO: 1210658 - DNA, 15 bp, Homo sapiens
ccaactgaagccact

SEQ ID NO: 1210659 - DNA, 15 bp, Homo sapiens
cccaactgaagccac

SEQ ID NO: 1210660 - DNA, 15 bp, Homo sapiens
ccccaactgaagcca

SEQ ID NO: 1210661 - DNA, 15 bp, Homo sapiens
tccccaactgaagcc

SEQ ID NO: 1210662 - DNA, 15 bp, Homo sapiens
ctccccaactgaagc

SEQ ID NO: 1210663 - DNA, 15 bp, Homo sapiens
gctccccaactgaag

SEQ ID NO: 1210664 - DNA, 15 bp, Homo sapiens
ggctccccaactgaa

SEQ ID NO: 1210665 - DNA, 15 bp, Homo sapiens
gggctccccaactga

SEQ ID NO: 1210666 - DNA, 15 bp, Homo sapiens
cgggctccccaactg

SEQ ID NO: 1210667 - DNA, 15 bp, Homo sapiens
acgggctccccaact

SEQ ID NO: 1210668 - DNA, 15 bp, Homo sapiens
cacgggctccccaac

SEQ ID NO: 1210669 - DNA, 15 bp, Homo sapiens
ccacgggctccccaa

SEQ ID NO: 1210670 - DNA, 15 bp, Homo sapiens
gccacgggctcccca

SEQ ID NO: 1210671 - DNA, 15 bp, Homo sapiens
tgccacgggctcccc

SEQ ID NO: 1210672 - DNA, 15 bp, Homo sapiens
ctgccacgggctccc

SEQ ID NO: 1210673 - DNA, 15 bp, Homo sapiens
tctgccacgggctcc

SEQ ID NO: 1210674 - DNA, 15 bp, Homo sapiens
gtctgccacgggctc

SEQ ID NO: 1210675 - DNA, 15 bp, Homo sapiens
agtctgccacgggct

SEQ ID NO: 1210676 - DNA, 15 bp, Homo sapiens
cagtctgccacgggc

SEQ ID NO: 1210677 - DNA, 15 bp, Homo sapiens
gcagtctgccacggg

SEQ ID NO: 1210678 - DNA, 15 bp, Homo sapiens
ggcagtctgccacgg

SEQ ID NO: 1210679 - DNA, 15 bp, Homo sapiens
gggcagtctgccacg

SEQ ID NO: 1210680 - DNA, 15 bp, Homo sapiens
agggcagtctgccac

SEQ ID NO: 1210681 - DNA, 15 bp, Homo sapiens
cagggcagtctgcca

SEQ ID NO: 1210682 - DNA, 15 bp, Homo sapiens
gcagggcagtctgcc

SEQ ID NO: 1210683 - DNA, 15 bp, Homo sapiens
ggcagggcagtctgc

SEQ ID NO: 1210684 - DNA, 15 bp, Homo sapiens
aggcagggcagtctg

SEQ ID NO: 1210685 - DNA, 15 bp, Homo sapiens
caggcagggcagtct

SEQ ID NO: 1210686 - DNA, 15 bp, Homo sapiens
gcaggcagggcagtc

SEQ ID NO: 1210687 - DNA, 15 bp, Homo sapiens
agcaggcagggcagt

SEQ ID NO: 1210688 - DNA, 15 bp, Homo sapiens
gagcaggcagggcag

SEQ ID NO: 1210689 - DNA, 15 bp, Homo sapiens
ggagcaggcagggca

SEQ ID NO: 1210690 - DNA, 15 bp, Homo sapiens
tggagcaggcagggc

SEQ ID NO: 1210691 - DNA, 15 bp, Homo sapiens
gtggagcaggcaggg

SEQ ID NO: 1210692 - DNA, 15 bp, Homo sapiens
ggtggagcaggcagg

SEQ ID NO: 1210693 - DNA, 15 bp, Homo sapiens
aggtggagcaggcag

SEQ ID NO: 1210694 - DNA, 15 bp, Homo sapiens
caggtggagcaggca

SEQ ID NO: 1210695 - DNA, 15 bp, Homo sapiens
tcaggtggagcaggc

SEQ ID NO: 1210696 - DNA, 15 bp, Homo sapiens
gtcaggtggagcagg

SEQ ID NO: 1210697 - DNA, 15 bp, Homo sapiens
ggtcaggtggagcag

SEQ ID NO: 1210698 - DNA, 15 bp, Homo sapiens
gggtcaggtggagca

SEQ ID NO: 1210699 - DNA, 15 bp, Homo sapiens
ggggtcaggtggagc

SEQ ID NO: 1210700 - DNA, 15 bp, Homo sapiens
cggggtcaggtggag

SEQ ID NO: 1210701 - DNA, 15 bp, Homo sapiens
ccggggtcaggtgga

SEQ ID NO: 1210702 - DNA, 15 bp, Homo sapiens
tccggggtcaggtgg

SEQ ID NO: 1210703 - DNA, 15 bp, Homo sapiens
ctccggggtcaggtg

SEQ ID NO: 1210704 - DNA, 15 bp, Homo sapiens
actccggggtcaggt

SEQ ID NO: 1210705 - DNA, 15 bp, Homo sapiens
gactccggggtcagg

SEQ ID NO: 1210706 - DNA, 15 bp, Homo sapiens
ggactccggggtcag

SEQ ID NO: 1210707 - DNA, 15 bp, Homo sapiens
gggactccggggtca

SEQ ID NO: 1210708 - DNA, 15 bp, Homo sapiens
agggactccggggtc

SEQ ID NO: 1210709 - DNA, 15 bp, Homo sapiens
aagggactccggggt

SEQ ID NO: 1210710 - DNA, 15 bp, Homo sapiens
caagggactccgggg

SEQ ID NO: 1210711 - DNA, 15 bp, Homo sapiens
ccaagggactccggg

SEQ ID NO: 1210712 - DNA, 15 bp, Homo sapiens
cccaagggactccgg

SEQ ID NO: 1210713 - DNA, 15 bp, Homo sapiens
tcccaagggactccg

SEQ ID NO: 1210714 - DNA, 15 bp, Homo sapiens
gtcccaagggactcc

SEQ ID NO: 1210715 - DNA, 15 bp, Homo sapiens
tgtcccaagggactc

SEQ ID NO: 1210716 - DNA, 15 bp, Homo sapiens
ctgtcccaagggact

SEQ ID NO: 1210717 - DNA, 15 bp, Homo sapiens
gctgtcccaagggac

SEQ ID NO: 1210718 - DNA, 15 bp, Homo sapiens
tgctgtcccaaggga

SEQ ID NO: 1210719 - DNA, 15 bp, Homo sapiens
ctgctgtcccaaggg

SEQ ID NO: 1210720 - DNA, 15 bp, Homo sapiens
cctgctgtcccaagg

SEQ ID NO: 1210721 - DNA, 15 bp, Homo sapiens
tcctgctgtcccaag

SEQ ID NO: 1210722 - DNA, 15 bp, Homo sapiens
gtcctgctgtcccaa

SEQ ID NO: 1210723 - DNA, 15 bp, Homo sapiens
agtcctgctgtccca

SEQ ID NO: 1210724 - DNA, 15 bp, Homo sapiens
cagtcctgctgtccc

SEQ ID NO: 1210725 - DNA, 15 bp, Homo sapiens
ccagtcctgctgtcc

SEQ ID NO: 1210726 - DNA, 15 bp, Homo sapiens
cccagtcctgctgtc

SEQ ID NO: 1210727 - DNA, 15 bp, Homo sapiens
tcccagtcctgctgt

SEQ ID NO: 1210728 - DNA, 15 bp, Homo sapiens
gtcccagtcctgctg

SEQ ID NO: 1210729 - DNA, 15 bp, Homo sapiens
agtcccagtcctgct

SEQ ID NO: 1210730 - DNA, 15 bp, Homo sapiens
aagtcccagtcctgc

SEQ ID NO: 1210731 - DNA, 15 bp, Homo sapiens
caagtcccagtcctg

SEQ ID NO: 1210732 - DNA, 15 bp, Homo sapiens
ccaagtcccagtcct

SEQ ID NO: 1210733 - DNA, 15 bp, Homo sapiens
gccaagtcccagtcc

SEQ ID NO: 1210734 - DNA, 15 bp, Homo sapiens
ggccaagtcccagtc

SEQ ID NO: 1210735 - DNA, 15 bp, Homo sapiens
tggccaagtcccagt

SEQ ID NO: 1210736 - DNA, 15 bp, Homo sapiens
gtggccaagtcccag

SEQ ID NO: 1210737 - DNA, 15 bp, Homo sapiens
cgtggccaagtccca

SEQ ID NO: 1210738 - DNA, 15 bp, Homo sapiens
ccgtggccaagtccc

SEQ ID NO: 1210739 - DNA, 15 bp, Homo sapiens
tccgtggccaagtcc

SEQ ID NO: 1210740 - DNA, 15 bp, Homo sapiens
ctccgtggccaagtc

SEQ ID NO: 1210741 - DNA, 15 bp, Homo sapiens
tctccgtggccaagt

SEQ ID NO: 1210742 - DNA, 15 bp, Homo sapiens
gtctccgtggccaag

SEQ ID NO: 1210743 - DNA, 15 bp, Homo sapiens
ggtctccgtggccaa

SEQ ID NO: 1210744 - DNA, 15 bp, Homo sapiens
tggtctccgtggcca

SEQ ID NO: 1210745 - DNA, 15 bp, Homo sapiens
atggtctccgtggcc

SEQ ID NO: 1210746 - DNA, 15 bp, Homo sapiens
aatggtctccgtggc

SEQ ID NO: 1210747 - DNA, 15 bp, Homo sapiens
taatggtctccgtgg

SEQ ID NO: 1210748 - DNA, 15 bp, Homo sapiens
ataatggtctccgtg

SEQ ID NO: 1210749 - DNA, 15 bp, Homo sapiens
gataatggtctccgt

SEQ ID NO: 1210750 - DNA, 15 bp, Homo sapiens
agataatggtctccg

SEQ ID NO: 1210751 - DNA, 15 bp, Homo sapiens
cagataatggtctcc

SEQ ID NO: 1210752 - DNA, 15 bp, Homo sapiens
tcagataatggtctc

SEQ ID NO: 1210753 - DNA, 15 bp, Homo sapiens
atcagataatggtct

SEQ ID NO: 1210754 - DNA, 15 bp, Homo sapiens
catcagataatggtc

SEQ ID NO: 1210755 - DNA, 15 bp, Homo sapiens
acatcagataatggt

SEQ ID NO: 1210756 - DNA, 15 bp, Homo sapiens
tacatcagataatgg

SEQ ID NO: 1210757 - DNA, 15 bp, Homo sapiens
gtacatcagataatg

SEQ ID NO: 1210758 - DNA, 15 bp, Homo sapiens
ggtacatcagataat

SEQ ID NO: 1210759 - DNA, 15 bp, Homo sapiens
aggtacatcagataa

SEQ ID NO: 1210760 - DNA, 15 bp, Homo sapiens
aaggtacatcagata

SEQ ID NO: 1210761 - DNA, 15 bp, Homo sapiens
aaaggtacatcagat

SEQ ID NO: 1210762 - DNA, 15 bp, Homo sapiens
taaaggtacatcaga

SEQ ID NO: 1210763 - DNA, 15 bp, Homo sapiens
ctaaaggtacatcag

SEQ ID NO: 1210764 - DNA, 15 bp, Homo sapiens
gctaaaggtacatca

SEQ ID NO: 1210765 - DNA, 15 bp, Homo sapiens
ggctaaaggtacatc

SEQ ID NO: 1210766 - DNA, 15 bp, Homo sapiens
tggctaaaggtacat

SEQ ID NO: 1210767 - DNA, 15 bp, Homo sapiens
ctggctaaaggtaca

SEQ ID NO: 1210768 - DNA, 15 bp, Homo sapiens
gctggctaaaggtac

SEQ ID NO: 1210769 - DNA, 15 bp, Homo sapiens
cgctggctaaaggta

SEQ ID NO: 1210770 - DNA, 15 bp, Homo sapiens
gcgctggctaaaggt

SEQ ID NO: 1210771 - DNA, 15 bp, Homo sapiens
cgcgctggctaaagg

SEQ ID NO: 1210772 - DNA, 15 bp, Homo sapiens
acgcgctggctaaag

SEQ ID NO: 1210773 - DNA, 15 bp, Homo sapiens
gacgcgctggctaaa

SEQ ID NO: 1210774 - DNA, 15 bp, Homo sapiens
ggacgcgctggctaa

SEQ ID NO: 1210775 - DNA, 15 bp, Homo sapiens
aggacgcgctggcta

SEQ ID NO: 1210776 - DNA, 15 bp, Homo sapiens
aaggacgcgctggct

SEQ ID NO: 1210777 - DNA, 15 bp, Homo sapiens
taaggacgcgctggc

SEQ ID NO: 1210778 - DNA, 15 bp, Homo sapiens
ataaggacgcgctgg

SEQ ID NO: 1210779 - DNA, 15 bp, Homo sapiens
gataaggacgcgctg

SEQ ID NO: 1210780 - DNA, 15 bp, Homo sapiens
agataaggacgcgct

SEQ ID NO: 1210781 - DNA, 15 bp, Homo sapiens
aagataaggacgcgc

SEQ ID NO: 1210782 - DNA, 15 bp, Homo sapiens
caagataaggacgcg

SEQ ID NO: 1210783 - DNA, 15 bp, Homo sapiens
tcaagataaggacgc

SEQ ID NO: 1210784 - DNA, 15 bp, Homo sapiens
gtcaagataaggacg

SEQ ID NO: 1210785 - DNA, 15 bp, Homo sapiens
tgtcaagataaggac

SEQ ID NO: 1210786 - DNA, 15 bp, Homo sapiens
ctgtcaagataagga

SEQ ID NO: 1210787 - DNA, 15 bp, Homo sapiens
actgtcaagataagg

SEQ ID NO: 1210788 - DNA, 15 bp, Homo sapiens
cactgtcaagataag

SEQ ID NO: 1210789 - DNA, 15 bp, Homo sapiens
ccactgtcaagataa

SEQ ID NO: 1210790 - DNA, 15 bp, Homo sapiens
cccactgtcaagata

SEQ ID NO: 1210791 - DNA, 15 bp, Homo sapiens
gcccactgtcaagat

SEQ ID NO: 1210792 - DNA, 15 bp, Homo sapiens
tgcccactgtcaaga

SEQ ID NO: 1210793 - DNA, 15 bp, Homo sapiens
ctgcccactgtcaag

SEQ ID NO: 1210794 - DNA, 15 bp, Homo sapiens
tctgcccactgtcaa

SEQ ID NO: 1210795 - DNA, 15 bp, Homo sapiens
ttctgcccactgtca

SEQ ID NO: 1210796 - DNA, 15 bp, Homo sapiens
gttctgcccactgtc

SEQ ID NO: 1210797 - DNA, 15 bp, Homo sapiens
tgttctgcccactgt

SEQ ID NO: 1210798 - DNA, 15 bp, Homo sapiens
gtgttctgcccactg

SEQ ID NO: 1210799 - DNA, 15 bp, Homo sapiens
tgtgttctgcccact

SEQ ID NO: 1210800 - DNA, 15 bp, Homo sapiens
gtgtgttctgcccac

SEQ ID NO: 1210801 - DNA, 15 bp, Homo sapiens
tgtgtgttctgccca

SEQ ID NO: 1210802 - DNA, 15 bp, Homo sapiens
gtgtgtgttctgccc

SEQ ID NO: 1210803 - DNA, 15 bp, Homo sapiens
cgtgtgtgttctgcc

SEQ ID NO: 1210804 - DNA, 15 bp, Homo sapiens
acgtgtgtgttctgc

SEQ ID NO: 1210805 - DNA, 15 bp, Homo sapiens
aacgtgtgtgttctg

SEQ ID NO: 1210806 - DNA, 15 bp, Homo sapiens
aaacgtgtgtgttct

SEQ ID NO: 1210807 - DNA, 15 bp, Homo sapiens
caaacgtgtgtgttc

SEQ ID NO: 1210808 - DNA, 15 bp, Homo sapiens
acaaacgtgtgtgtt

SEQ ID NO: 1210809 - DNA, 15 bp, Homo sapiens
tacaaacgtgtgtgt

SEQ ID NO: 1210810 - DNA, 15 bp, Homo sapiens
ctacaaacgtgtgtg

SEQ ID NO: 1210811 - DNA, 15 bp, Homo sapiens
cctacaaacgtgtgt

SEQ ID NO: 1210812 - DNA, 15 bp, Homo sapiens
acctacaaacgtgtg

SEQ ID NO: 1210813 - DNA, 15 bp, Homo sapiens
cacctacaaacgtgt

SEQ ID NO: 1210814 - DNA, 15 bp, Homo sapiens
ccacctacaaacgtg

SEQ ID NO: 1210815 - DNA, 15 bp, Homo sapiens
cccacctacaaacgt

SEQ ID NO: 1210816 - DNA, 15 bp, Homo sapiens
gcccacctacaaacg

SEQ ID NO: 1210817 - DNA, 15 bp, Homo sapiens
agcccacctacaaac

SEQ ID NO: 1210818 - DNA, 15 bp, Homo sapiens
aagcccacctacaaa

SEQ ID NO: 1210819 - DNA, 15 bp, Homo sapiens
caagcccacctacaa

SEQ ID NO: 1210820 - DNA, 15 bp, Homo sapiens
gcaagcccacctaca

SEQ ID NO: 1210821 - DNA, 15 bp, Homo sapiens
ggcaagcccacctac

SEQ ID NO: 1210822 - DNA, 15 bp, Homo sapiens
tggcaagcccaccta

SEQ ID NO: 1210823 - DNA, 15 bp, Homo sapiens
ctggcaagcccacct

SEQ ID NO: 1210824 - DNA, 15 bp, Homo sapiens
gctggcaagcccacc

SEQ ID NO: 1210825 - DNA, 15 bp, Homo sapiens
tgctggcaagcccac

SEQ ID NO: 1210826 - DNA, 15 bp, Homo sapiens
ttgctggcaagccca

SEQ ID NO: 1210827 - DNA, 15 bp, Homo sapiens
cttgctggcaagccc

SEQ ID NO: 1210828 - DNA, 15 bp, Homo sapiens
ccttgctggcaagcc

SEQ ID NO: 1210829 - DNA, 15 bp, Homo sapiens
tccttgctggcaagc

SEQ ID NO: 1210830 - DNA, 15 bp, Homo sapiens
ttccttgctggcaag

SEQ ID NO: 1210831 - DNA, 15 bp, Homo sapiens
attccttgctggcaa

SEQ ID NO: 1210832 - DNA, 15 bp, Homo sapiens
cattccttgctggca

SEQ ID NO: 1210833 - DNA, 15 bp, Homo sapiens
gcattccttgctggc

SEQ ID NO: 1210834 - DNA, 15 bp, Homo sapiens
agcattccttgctgg

SEQ ID NO: 1210835 - DNA, 15 bp, Homo sapiens
cagcattccttgctg

SEQ ID NO: 1210836 - DNA, 15 bp, Homo sapiens
ccagcattccttgct

SEQ ID NO: 1210837 - DNA, 15 bp, Homo sapiens
cccagcattccttgc

SEQ ID NO: 1210838 - DNA, 15 bp, Homo sapiens
tcccagcattccttg

SEQ ID NO: 1210839 - DNA, 15 bp, Homo sapiens
ctcccagcattcctt

SEQ ID NO: 1210840 - DNA, 15 bp, Homo sapiens
tctcccagcattcct

SEQ ID NO: 1210841 - DNA, 15 bp, Homo sapiens
ctctcccagcattcc

SEQ ID NO: 1210842 - DNA, 15 bp, Homo sapiens
tctctcccagcattc

SEQ ID NO: 1210843 - DNA, 15 bp, Homo sapiens
gtctctcccagcatt

SEQ ID NO: 1210844 - DNA, 15 bp, Homo sapiens
cgtctctcccagcat

SEQ ID NO: 1210845 - DNA, 15 bp, Homo sapiens
ccgtctctcccagca

SEQ ID NO: 1210846 - DNA, 15 bp, Homo sapiens
cccgtctctcccagc

SEQ ID NO: 1210847 - DNA, 15 bp, Homo sapiens
gcccgtctctcccag

SEQ ID NO: 1210848 - DNA, 15 bp, Homo sapiens
ggcccgtctctccca

SEQ ID NO: 1210849 - DNA, 15 bp, Homo sapiens
gggcccgtctctccc

SEQ ID NO: 1210850 - DNA, 15 bp, Homo sapiens
tgggcccgtctctcc

SEQ ID NO: 1210851 - DNA, 15 bp, Homo sapiens
ctgggcccgtctctc

SEQ ID NO: 1210852 - DNA, 15 bp, Homo sapiens
cctgggcccgtctct

SEQ ID NO: 1210853 - DNA, 15 bp, Homo sapiens
ccctgggcccgtctc

SEQ ID NO: 1210854 - DNA, 15 bp, Homo sapiens
gccctgggcccgtct

SEQ ID NO: 1210855 - DNA, 15 bp, Homo sapiens
tgccctgggcccgtc

SEQ ID NO: 1210856 - DNA, 15 bp, Homo sapiens
ctgccctgggcccgt

SEQ ID NO: 1210857 - DNA, 15 bp, Homo sapiens
cctgccctgggcccg

SEQ ID NO: 1210858 - DNA, 15 bp, Homo sapiens
tcctgccctgggccc

SEQ ID NO: 1210859 - DNA, 15 bp, Homo sapiens
ctcctgccctgggcc

SEQ ID NO: 1210860 - DNA, 15 bp, Homo sapiens
cctcctgccctgggc

SEQ ID NO: 1210861 - DNA, 15 bp, Homo sapiens
gcctcctgccctggg

SEQ ID NO: 1210862 - DNA, 15 bp, Homo sapiens
ggcctcctgccctgg

SEQ ID NO: 1210863 - DNA, 15 bp, Homo sapiens
cggcctcctgccctg

SEQ ID NO: 1210864 - DNA, 15 bp, Homo sapiens
tcggcctcctgccct

SEQ ID NO: 1210865 - DNA, 15 bp, Homo sapiens
ctcggcctcctgccc

SEQ ID NO: 1210866 - DNA, 15 bp, Homo sapiens
cctcggcctcctgcc

SEQ ID NO: 1210867 - DNA, 15 bp, Homo sapiens
acctcggcctcctgc

SEQ ID NO: 1210868 - DNA, 15 bp, Homo sapiens
cacctcggcctcctg

SEQ ID NO: 1210869 - DNA, 15 bp, Homo sapiens
acacctcggcctcct

SEQ ID NO: 1210870 - DNA, 15 bp, Homo sapiens
gacacctcggcctcc

SEQ ID NO: 1210871 - DNA, 15 bp, Homo sapiens
ggacacctcggcctc

SEQ ID NO: 1210872 - DNA, 15 bp, Homo sapiens
gggacacctcggcct

SEQ ID NO: 1210873 - DNA, 15 bp, Homo sapiens
agggacacctcggcc

SEQ ID NO: 1210874 - DNA, 15 bp, Homo sapiens
cagggacacctcggc

SEQ ID NO: 1210875 - DNA, 15 bp, Homo sapiens
gcagggacacctcgg

SEQ ID NO: 1210876 - DNA, 15 bp, Homo sapiens
agcagggacacctcg

SEQ ID NO: 1210877 - DNA, 15 bp, Homo sapiens
gagcagggacacctc

SEQ ID NO: 1210878 - DNA, 15 bp, Homo sapiens
ggagcagggacacct

SEQ ID NO: 1210879 - DNA, 15 bp, Homo sapiens
tggagcagggacacc

SEQ ID NO: 1210880 - DNA, 15 bp, Homo sapiens
ctggagcagggacac

SEQ ID NO: 1210881 - DNA, 15 bp, Homo sapiens
cctggagcagggaca

SEQ ID NO: 1210882 - DNA, 15 bp, Homo sapiens
tcctggagcagggac

SEQ ID NO: 1210883 - DNA, 15 bp, Homo sapiens
ttcctggagcaggga

SEQ ID NO: 1210884 - DNA, 15 bp, Homo sapiens
tttcctggagcaggg

SEQ ID NO: 1210885 - DNA, 15 bp, Homo sapiens
gtttcctggagcagg

SEQ ID NO: 1210886 - DNA, 15 bp, Homo sapiens
tgtttcctggagcag

SEQ ID NO: 1210887 - DNA, 15 bp, Homo sapiens
ctgtttcctggagca

SEQ ID NO: 1210888 - DNA, 15 bp, Homo sapiens
tctgtttcctggagc

SEQ ID NO: 1210889 - DNA, 15 bp, Homo sapiens
ctctgtttcctggag

SEQ ID NO: 1210890 - DNA, 15 bp, Homo sapiens
actctgtttcctgga

SEQ ID NO: 1210891 - DNA, 15 bp, Homo sapiens
cactctgtttcctgg

SEQ ID NO: 1210892 - DNA, 15 bp, Homo sapiens
tcactctgtttcctg

SEQ ID NO: 1210893 - DNA, 15 bp, Homo sapiens
ttcactctgtttcct

SEQ ID NO: 1210894 - DNA, 15 bp, Homo sapiens
cttcactctgtttcc

SEQ ID NO: 1210895 - DNA, 15 bp, Homo sapiens
tcttcactctgtttc

SEQ ID NO: 1210896 - DNA, 15 bp, Homo sapiens
gtcttcactctgttt

SEQ ID NO: 1210897 - DNA, 15 bp, Homo sapiens
tgtcttcactctgtt

SEQ ID NO: 1210898 - DNA, 15 bp, Homo sapiens
gtgtcttcactctgt

SEQ ID NO: 1210899 - DNA, 15 bp, Homo sapiens
agtgtcttcactctg

SEQ ID NO: 1210900 - DNA, 15 bp, Homo sapiens
cagtgtcttcactct

SEQ ID NO: 1210901 - DNA, 15 bp, Homo sapiens
ccagtgtcttcactc

SEQ ID NO: 1210902 - DNA, 15 bp, Homo sapiens
gccagtgtcttcact

SEQ ID NO: 1210903 - DNA, 15 bp, Homo sapiens
ggccagtgtcttcac

SEQ ID NO: 1210904 - DNA, 15 bp, Homo sapiens
gggccagtgtcttca

SEQ ID NO: 1210905 - DNA, 15 bp, Homo sapiens
agggccagtgtcttc

SEQ ID NO: 1210906 - DNA, 15 bp, Homo sapiens
cagggccagtgtctt

SEQ ID NO: 1210907 - DNA, 15 bp, Homo sapiens
ccagggccagtgtct

SEQ ID NO: 1210908 - DNA, 15 bp, Homo sapiens
gccagggccagtgtc

SEQ ID NO: 1210909 - DNA, 15 bp, Homo sapiens
tgccagggccagtgt

SEQ ID NO: 1210910 - DNA, 15 bp, Homo sapiens
ctgccagggccagtg

SEQ ID NO: 1210911 - DNA, 15 bp, Homo sapiens
cctgccagggccagt

SEQ ID NO: 1210912 - DNA, 15 bp, Homo sapiens
gcctgccagggccag

SEQ ID NO: 1210913 - DNA, 15 bp, Homo sapiens
tgcctgccagggcca

SEQ ID NO: 1210914 - DNA, 15 bp, Homo sapiens
ctgcctgccagggcc

SEQ ID NO: 1210915 - DNA, 15 bp, Homo sapiens
gctgcctgccagggc

SEQ ID NO: 1210916 - DNA, 15 bp, Homo sapiens
tgctgcctgccaggg

SEQ ID NO: 1210917 - DNA, 15 bp, Homo sapiens
ctgctgcctgccagg

SEQ ID NO: 1210918 - DNA, 15 bp, Homo sapiens
gctgctgcctgccag

SEQ ID NO: 1210919 - DNA, 15 bp, Homo sapiens
agctgctgcctgcca

SEQ ID NO: 1210920 - DNA, 15 bp, Homo sapiens
cagctgctgcctgcc

SEQ ID NO: 1210921 - DNA, 15 bp, Homo sapiens
ccagctgctgcctgc

SEQ ID NO: 1210922 - DNA, 15 bp, Homo sapiens
cccagctgctgcctg

SEQ ID NO: 1210923 - DNA, 15 bp, Homo sapiens
acccagctgctgcct

SEQ ID NO: 1210924 - DNA, 15 bp, Homo sapiens
gacccagctgctgcc

SEQ ID NO: 1210925 - DNA, 15 bp, Homo sapiens
agacccagctgctgc

SEQ ID NO: 1210926 - DNA, 15 bp, Homo sapiens
tagacccagctgctg

SEQ ID NO: 1210927 - DNA, 15 bp, Homo sapiens
ttagacccagctgct

SEQ ID NO: 1210928 - DNA, 15 bp, Homo sapiens
cttagacccagctgc

SEQ ID NO: 1210929 - DNA, 15 bp, Homo sapiens
tcttagacccagctg

SEQ ID NO: 1210930 - DNA, 15 bp, Homo sapiens
ctcttagacccagct

SEQ ID NO: 1210931 - DNA, 15 bp, Homo sapiens
tctcttagacccagc

SEQ ID NO: 1210932 - DNA, 15 bp, Homo sapiens
ctctcttagacccag

SEQ ID NO: 1210933 - DNA, 15 bp, Homo sapiens
gctctcttagaccca

SEQ ID NO: 1210934 - DNA, 15 bp, Homo sapiens
agctctcttagaccc

SEQ ID NO: 1210935 - DNA, 15 bp, Homo sapiens
cagctctcttagacc

SEQ ID NO: 1210936 - DNA, 15 bp, Homo sapiens
gcagctctcttagac

SEQ ID NO: 1210937 - DNA, 15 bp, Homo sapiens
tgcagctctcttaga

SEQ ID NO: 1210938 - DNA, 15 bp, Homo sapiens
ctgcagctctcttag

SEQ ID NO: 1210939 - DNA, 15 bp, Homo sapiens
gctgcagctctctta

SEQ ID NO: 1210940 - DNA, 15 bp, Homo sapiens
ggctgcagctctctt

SEQ ID NO: 1210941 - DNA, 15 bp, Homo sapiens
gggctgcagctctct

SEQ ID NO: 1210942 - DNA, 15 bp, Homo sapiens
tgggctgcagctctc

SEQ ID NO: 1210943 - DNA, 15 bp, Homo sapiens
ctgggctgcagctct

SEQ ID NO: 1210944 - DNA, 15 bp, Homo sapiens
cctgggctgcagctc

SEQ ID NO: 1210945 - DNA, 15 bp, Homo sapiens
ccctgggctgcagct

SEQ ID NO: 1210946 - DNA, 15 bp, Homo sapiens
accctgggctgcagc

SEQ ID NO: 1210947 - DNA, 15 bp, Homo sapiens
gaccctgggctgcag

SEQ ID NO: 1210948 - DNA, 15 bp, Homo sapiens
tgaccctgggctgca

SEQ ID NO: 1210949 - DNA, 15 bp, Homo sapiens
gtgaccctgggctgc

SEQ ID NO: 1210950 - DNA, 15 bp, Homo sapiens
tgtgaccctgggctg

SEQ ID NO: 1210951 - DNA, 15 bp, Homo sapiens
ctgtgaccctgggct

SEQ ID NO: 1210952 - DNA, 15 bp, Homo sapiens
tctgtgaccctgggc

SEQ ID NO: 1210953 - DNA, 15 bp, Homo sapiens
gtctgtgaccctggg

SEQ ID NO: 1210954 - DNA, 15 bp, Homo sapiens
ggtctgtgaccctgg

SEQ ID NO: 1210955 - DNA, 15 bp, Homo sapiens
aggtctgtgaccctg

SEQ ID NO: 1210956 - DNA, 15 bp, Homo sapiens
caggtctgtgaccct

SEQ ID NO: 1210957 - DNA, 15 bp, Homo sapiens
acaggtctgtgaccc

SEQ ID NO: 1210958 - DNA, 15 bp, Homo sapiens
cacaggtctgtgacc

SEQ ID NO: 1210959 - DNA, 15 bp, Homo sapiens
ccacaggtctgtgac

SEQ ID NO: 1210960 - DNA, 15 bp, Homo sapiens
cccacaggtctgtga

SEQ ID NO: 1210961 - DNA, 15 bp, Homo sapiens
gcccacaggtctgtg

SEQ ID NO: 1210962 - DNA, 15 bp, Homo sapiens
ggcccacaggtctgt

SEQ ID NO: 1210963 - DNA, 15 bp, Homo sapiens
gggcccacaggtctg

SEQ ID NO: 1210964 - DNA, 15 bp, Homo sapiens
ggggcccacaggtct

SEQ ID NO: 1210965 - DNA, 15 bp, Homo sapiens
tggggcccacaggtc

SEQ ID NO: 1210966 - DNA, 15 bp, Homo sapiens
atggggcccacaggt

SEQ ID NO: 1210967 - DNA, 15 bp, Homo sapiens
catggggcccacagg

SEQ ID NO: 1210968 - DNA, 15 bp, Homo sapiens
ccatggggcccacag

SEQ ID NO: 1210969 - DNA, 15 bp, Homo sapiens
gccatggggcccaca

SEQ ID NO: 1210970 - DNA, 15 bp, Homo sapiens
ggccatggggcccac

SEQ ID NO: 1210971 - DNA, 15 bp, Homo sapiens
cggccatggggccca

SEQ ID NO: 1210972 - DNA, 15 bp, Homo sapiens
ccggccatggggccc

SEQ ID NO: 1210973 - DNA, 15 bp, Homo sapiens
cccggccatggggcc

SEQ ID NO: 1210974 - DNA, 15 bp, Homo sapiens
tcccggccatggggc

SEQ ID NO: 1210975 - DNA, 15 bp, Homo sapiens
ttcccggccatgggg

SEQ ID NO: 1210976 - DNA, 15 bp, Homo sapiens
cttcccggccatggg

SEQ ID NO: 1210977 - DNA, 15 bp, Homo sapiens
ccttcccggccatgg

SEQ ID NO: 1210978 - DNA, 15 bp, Homo sapiens
gccttcccggccatg

SEQ ID NO: 1210979 - DNA, 15 bp, Homo sapiens
cgccttcccggccat

SEQ ID NO: 1210980 - DNA, 15 bp, Homo sapiens
ccgccttcccggcca

SEQ ID NO: 1210981 - DNA, 15 bp, Homo sapiens
gccgccttcccggcc

SEQ ID NO: 1210982 - DNA, 15 bp, Homo sapiens
tgccgccttcccggc

SEQ ID NO: 1210983 - DNA, 15 bp, Homo sapiens
ctgccgccttcccgg

SEQ ID NO: 1210984 - DNA, 15 bp, Homo sapiens
tctgccgccttcccg

SEQ ID NO: 1210985 - DNA, 15 bp, Homo sapiens
ctctgccgccttccc

SEQ ID NO: 1210986 - DNA, 15 bp, Homo sapiens
cctctgccgccttcc

SEQ ID NO: 1210987 - DNA, 15 bp, Homo sapiens
tcctctgccgccttc

SEQ ID NO: 1210988 - DNA, 15 bp, Homo sapiens
ctcctctgccgcctt

SEQ ID NO: 1210989 - DNA, 15 bp, Homo sapiens
tctcctctgccgcct

SEQ ID NO: 1210990 - DNA, 15 bp, Homo sapiens
ctctcctctgccgcc

SEQ ID NO: 1210991 - DNA, 15 bp, Homo sapiens
tctctcctctgccgc

SEQ ID NO: 1210992 - DNA, 15 bp, Homo sapiens
ctctctcctctgccg

SEQ ID NO: 1210993 - DNA, 15 bp, Homo sapiens
cctctctcctctgcc

SEQ ID NO: 1210994 - DNA, 15 bp, Homo sapiens
ccctctctcctctgc

SEQ ID NO: 1210995 - DNA, 15 bp, Homo sapiens
gccctctctcctctg

SEQ ID NO: 1210996 - DNA, 15 bp, Homo sapiens
agccctctctcctct

SEQ ID NO: 1210997 - DNA, 15 bp, Homo sapiens
cagccctctctcctc

SEQ ID NO: 1210998 - DNA, 15 bp, Homo sapiens
gcagccctctctcct

SEQ ID NO: 1210999 - DNA, 15 bp, Homo sapiens
ggcagccctctctcc

SEQ ID NO: 1211000 - DNA, 15 bp, Homo sapiens
cggcagccctctctc

SEQ ID NO: 1211001 - DNA, 15 bp, Homo sapiens
tcggcagccctctct

SEQ ID NO: 1211002 - DNA, 15 bp, Homo sapiens
ttcggcagccctctc

SEQ ID NO: 1211003 - DNA, 15 bp, Homo sapiens
tttcggcagccctct

SEQ ID NO: 1211004 - DNA, 15 bp, Homo sapiens
ctttcggcagccctc

SEQ ID NO: 1211005 - DNA, 15 bp, Homo sapiens
cctttcggcagccct

SEQ ID NO: 1211006 - DNA, 15 bp, Homo sapiens
ccctttcggcagccc

SEQ ID NO: 1211007 - DNA, 15 bp, Homo sapiens
cccctttcggcagcc

SEQ ID NO: 1211008 - DNA, 15 bp, Homo sapiens
gcccctttcggcagc

SEQ ID NO: 1211009 - DNA, 15 bp, Homo sapiens
ggcccctttcggcag

SEQ ID NO: 1211010 - DNA, 15 bp, Homo sapiens
tggcccctttcggca

SEQ ID NO: 1211011 - DNA, 15 bp, Homo sapiens
gtggcccctttcggc

SEQ ID NO: 1211012 - DNA, 15 bp, Homo sapiens
agtggcccctttcgg

SEQ ID NO: 1211013 - DNA, 15 bp, Homo sapiens
gagtggcccctttcg

SEQ ID NO: 1211014 - DNA, 15 bp, Homo sapiens
ggagtggcccctttc

SEQ ID NO: 1211015 - DNA, 15 bp, Homo sapiens
gggagtggccccttt

SEQ ID NO: 1211016 - DNA, 15 bp, Homo sapiens
ggggagtggcccctt

SEQ ID NO: 1211017 - DNA, 15 bp, Homo sapiens
tggggagtggcccct

SEQ ID NO: 1211018 - DNA, 15 bp, Homo sapiens
ctggggagtggcccc

SEQ ID NO: 1211019 - DNA, 15 bp, Homo sapiens
cctggggagtggccc

SEQ ID NO: 1211020 - DNA, 15 bp, Homo sapiens
tcctggggagtggcc

SEQ ID NO: 1211021 - DNA, 15 bp, Homo sapiens
atcctggggagtggc

SEQ ID NO: 1211022 - DNA, 15 bp, Homo sapiens
tatcctggggagtgg

SEQ ID NO: 1211023 - DNA, 15 bp, Homo sapiens
gtatcctggggagtg

SEQ ID NO: 1211024 - DNA, 15 bp, Homo sapiens
ggtatcctggggagt

SEQ ID NO: 1211025 - DNA, 15 bp, Homo sapiens
aggtatcctggggag

SEQ ID NO: 1211026 - DNA, 15 bp, Homo sapiens
gaggtatcctgggga

SEQ ID NO: 1211027 - DNA, 15 bp, Homo sapiens
cgaggtatcctgggg

SEQ ID NO: 1211028 - DNA, 15 bp, Homo sapiens
ccgaggtatcctggg

SEQ ID NO: 1211029 - DNA, 15 bp, Homo sapiens
accgaggtatcctgg

SEQ ID NO: 1211030 - DNA, 15 bp, Homo sapiens
caccgaggtatcctg

SEQ ID NO: 1211031 - DNA, 15 bp, Homo sapiens
tcaccgaggtatcct

SEQ ID NO: 1211032 - DNA, 15 bp, Homo sapiens
ctcaccgaggtatcc

SEQ ID NO: 1211033 - DNA, 15 bp, Homo sapiens
actcaccgaggtatc

SEQ ID NO: 1211034 - DNA, 15 bp, Homo sapiens
cactcaccgaggtat

SEQ ID NO: 1211035 - DNA, 15 bp, Homo sapiens
tcactcaccgaggta

SEQ ID NO: 1211036 - DNA, 15 bp, Homo sapiens
ctcactcaccgaggt

SEQ ID NO: 1211037 - DNA, 15 bp, Homo sapiens
gctcactcaccgagg

SEQ ID NO: 1211038 - DNA, 15 bp, Homo sapiens
tgctcactcaccgag

SEQ ID NO: 1211039 - DNA, 15 bp, Homo sapiens
ttgctcactcaccga

SEQ ID NO: 1211040 - DNA, 15 bp, Homo sapiens
attgctcactcaccg

SEQ ID NO: 1211041 - DNA, 15 bp, Homo sapiens
cattgctcactcacc

SEQ ID NO: 1211042 - DNA, 15 bp, Homo sapiens
ccattgctcactcac

SEQ ID NO: 1211043 - DNA, 15 bp, Homo sapiens
cccattgctcactca

SEQ ID NO: 1211044 - DNA, 15 bp, Homo sapiens
tcccattgctcactc

SEQ ID NO: 1211045 - DNA, 15 bp, Homo sapiens
ttcccattgctcact

SEQ ID NO: 1211046 - DNA, 15 bp, Homo sapiens
cttcccattgctcac

SEQ ID NO: 1211047 - DNA, 15 bp, Homo sapiens
acttcccattgctca

SEQ ID NO: 1211048 - DNA, 15 bp, Homo sapiens
gacttcccattgctc

SEQ ID NO: 1211049 - DNA, 15 bp, Homo sapiens
cgacttcccattgct

SEQ ID NO: 1211050 - DNA, 15 bp, Homo sapiens
ccgacttcccattgc

SEQ ID NO: 1211051 - DNA, 15 bp, Homo sapiens
gccgacttcccattg

SEQ ID NO: 1211052 - DNA, 15 bp, Homo sapiens
ggccgacttcccatt

SEQ ID NO: 1211053 - DNA, 15 bp, Homo sapiens
gggccgacttcccat

SEQ ID NO: 1211054 - DNA, 15 bp, Homo sapiens
tgggccgacttccca

SEQ ID NO: 1211055 - DNA, 15 bp, Homo sapiens
ctgggccgacttccc

SEQ ID NO: 1211056 - DNA, 15 bp, Homo sapiens
cctgggccgacttcc

SEQ ID NO: 1211057 - DNA, 15 bp, Homo sapiens
gcctgggccgacttc

SEQ ID NO: 1211058 - DNA, 15 bp, Homo sapiens
ggcctgggccgactt

SEQ ID NO: 1211059 - DNA, 15 bp, Homo sapiens
aggcctgggccgact

SEQ ID NO: 1211060 - DNA, 15 bp, Homo sapiens
caggcctgggccgac

SEQ ID NO: 1211061 - DNA, 15 bp, Homo sapiens
ccaggcctgggccga

SEQ ID NO: 1211062 - DNA, 15 bp, Homo sapiens
accaggcctgggccg

SEQ ID NO: 1211063 - DNA, 15 bp, Homo sapiens
caccaggcctgggcc

SEQ ID NO: 1211064 - DNA, 15 bp, Homo sapiens
ccaccaggcctgggc

SEQ ID NO: 1211065 - DNA, 15 bp, Homo sapiens
cccaccaggcctggg

SEQ ID NO: 1211066 - DNA, 15 bp, Homo sapiens
gcccaccaggcctgg

SEQ ID NO: 1211067 - DNA, 15 bp, Homo sapiens
cgcccaccaggcctg

SEQ ID NO: 1211068 - DNA, 15 bp, Homo sapiens
ccgcccaccaggcct

SEQ ID NO: 1211069 - DNA, 15 bp, Homo sapiens
cccgcccaccaggcc

SEQ ID NO: 1211070 - DNA, 15 bp, Homo sapiens
acccgcccaccaggc

SEQ ID NO: 1211071 - DNA, 15 bp, Homo sapiens
tacccgcccaccagg

SEQ ID NO: 1211072 - DNA, 15 bp, Homo sapiens
ctacccgcccaccag

SEQ ID NO: 1211073 - DNA, 15 bp, Homo sapiens
cctacccgcccacca

SEQ ID NO: 1211074 - DNA, 15 bp, Homo sapiens
tcctacccgcccacc

SEQ ID NO: 1211075 - DNA, 15 bp, Homo sapiens
ctcctacccgcccac

SEQ ID NO: 1211076 - DNA, 15 bp, Homo sapiens
tctcctacccgccca

SEQ ID NO: 1211077 - DNA, 15 bp, Homo sapiens
ttctcctacccgccc

SEQ ID NO: 1211078 - DNA, 15 bp, Homo sapiens
tttctcctacccgcc

SEQ ID NO: 1211079 - DNA, 15 bp, Homo sapiens
atttctcctacccgc

SEQ ID NO: 1211080 - DNA, 15 bp, Homo sapiens
gatttctcctacccg

SEQ ID NO: 1211081 - DNA, 15 bp, Homo sapiens
tgatttctcctaccc

SEQ ID NO: 1211082 - DNA, 15 bp, Homo sapiens
ttgatttctcctacc

SEQ ID NO: 1211083 - DNA, 15 bp, Homo sapiens
tttgatttctcctac

SEQ ID NO: 1211084 - DNA, 15 bp, Homo sapiens
gtttgatttctccta

SEQ ID NO: 1211085 - DNA, 15 bp, Homo sapiens
ggtttgatttctcct

SEQ ID NO: 1211086 - DNA, 15 bp, Homo sapiens
aggtttgatttctcc

SEQ ID NO: 1211087 - DNA, 15 bp, Homo sapiens
aaggtttgatttctc

SEQ ID NO: 1211088 - DNA, 15 bp, Homo sapiens
aaaggtttgatttct

SEQ ID NO: 1211089 - DNA, 15 bp, Homo sapiens
gaaaggtttgatttc

SEQ ID NO: 1211090 - DNA, 15 bp, Homo sapiens
agaaaggtttgattt

SEQ ID NO: 1211091 - DNA, 15 bp, Homo sapiens
gagaaaggtttgatt

SEQ ID NO: 1211092 - DNA, 15 bp, Homo sapiens
agagaaaggtttgat

SEQ ID NO: 1211093 - DNA, 15 bp, Homo sapiens
gagagaaaggtttga

SEQ ID NO: 1211094 - DNA, 15 bp, Homo sapiens
agagagaaaggtttg

SEQ ID NO: 1211095 - DNA, 15 bp, Homo sapiens
aagagagaaaggttt

SEQ ID NO: 1211096 - DNA, 15 bp, Homo sapiens
gaagagagaaaggtt

SEQ ID NO: 1211097 - DNA, 15 bp, Homo sapiens
ggaagagagaaaggt

SEQ ID NO: 1211098 - DNA, 15 bp, Homo sapiens
gggaagagagaaagg

SEQ ID NO: 1211099 - DNA, 15 bp, Homo sapiens
agggaagagagaaag

SEQ ID NO: 1211100 - DNA, 15 bp, Homo sapiens
gagggaagagagaaa

SEQ ID NO: 1211101 - DNA, 15 bp, Homo sapiens
tgagggaagagagaa

SEQ ID NO: 1211102 - DNA, 15 bp, Homo sapiens
ctgagggaagagaga

SEQ ID NO: 1211103 - DNA, 15 bp, Homo sapiens
cctgagggaagagag

SEQ ID NO: 1211104 - DNA, 15 bp, Homo sapiens
tcctgagggaagaga

SEQ ID NO: 1211105 - DNA, 15 bp, Homo sapiens
ctcctgagggaagag

SEQ ID NO: 1211106 - DNA, 15 bp, Homo sapiens
gctcctgagggaaga

SEQ ID NO: 1211107 - DNA, 15 bp, Homo sapiens
ggctcctgagggaag

SEQ ID NO: 1211108 - DNA, 15 bp, Homo sapiens
aggctcctgagggaa

SEQ ID NO: 1211109 - DNA, 15 bp, Homo sapiens
aaggctcctgaggga

SEQ ID NO: 1211110 - DNA, 15 bp, Homo sapiens
gaaggctcctgaggg

SEQ ID NO: 1211111 - DNA, 15 bp, Homo sapiens
agaaggctcctgagg

SEQ ID NO: 1211112 - DNA, 15 bp, Homo sapiens
cagaaggctcctgag

SEQ ID NO: 1211113 - DNA, 15 bp, Homo sapiens
acagaaggctcctga

SEQ ID NO: 1211114 - DNA, 15 bp, Homo sapiens
gacagaaggctcctg

SEQ ID NO: 1211115 - DNA, 15 bp, Homo sapiens
ggacagaaggctcct

SEQ ID NO: 1211116 - DNA, 15 bp, Homo sapiens
aggacagaaggctcc

SEQ ID NO: 1211117 - DNA, 15 bp, Homo sapiens
taggacagaaggctc

SEQ ID NO: 1211118 - DNA, 15 bp, Homo sapiens
ctaggacagaaggct

SEQ ID NO: 1211119 - DNA, 15 bp, Homo sapiens
gctaggacagaaggc

SEQ ID NO: 1211120 - DNA, 15 bp, Homo sapiens
tgctaggacagaagg

SEQ ID NO: 1211121 - DNA, 15 bp, Homo sapiens
gtgctaggacagaag

SEQ ID NO: 1211122 - DNA, 15 bp, Homo sapiens
ggtgctaggacagaa

SEQ ID NO: 1211123 - DNA, 15 bp, Homo sapiens
tggtgctaggacaga

SEQ ID NO: 1211124 - DNA, 15 bp, Homo sapiens
gtggtgctaggacag

SEQ ID NO: 1211125 - DNA, 15 bp, Homo sapiens
ggtggtgctaggaca

SEQ ID NO: 1211126 - DNA, 15 bp, Homo sapiens
gggtggtgctaggac

SEQ ID NO: 1211127 - DNA, 15 bp, Homo sapiens
cgggtggtgctagga

SEQ ID NO: 1211128 - DNA, 15 bp, Homo sapiens
ccgggtggtgctagg

SEQ ID NO: 1211129 - DNA, 15 bp, Homo sapiens
tccgggtggtgctag

SEQ ID NO: 1211130 - DNA, 15 bp, Homo sapiens
gtccgggtggtgcta

SEQ ID NO: 1211131 - DNA, 15 bp, Homo sapiens
tgtccgggtggtgct

SEQ ID NO: 1211132 - DNA, 15 bp, Homo sapiens
atgtccgggtggtgc

SEQ ID NO: 1211133 - DNA, 15 bp, Homo sapiens
gatgtccgggtggtg

SEQ ID NO: 1211134 - DNA, 15 bp, Homo sapiens
tgatgtccgggtggt

SEQ ID NO: 1211135 - DNA, 15 bp, Homo sapiens
ttgatgtccgggtgg

SEQ ID NO: 1211136 - DNA, 15 bp, Homo sapiens
cttgatgtccgggtg

SEQ ID NO: 1211137 - DNA, 15 bp, Homo sapiens
gcttgatgtccgggt

SEQ ID NO: 1211138 - DNA, 15 bp, Homo sapiens
tgcttgatgtccggg

SEQ ID NO: 1211139 - DNA, 15 bp, Homo sapiens
ctgcttgatgtccgg

SEQ ID NO: 1211140 - DNA, 15 bp, Homo sapiens
actgcttgatgtccg

SEQ ID NO: 1211141 - DNA, 15 bp, Homo sapiens
cactgcttgatgtcc

SEQ ID NO: 1211142 - DNA, 15 bp, Homo sapiens
acactgcttgatgtc

SEQ ID NO: 1211143 - DNA, 15 bp, Homo sapiens
cacactgcttgatgt

SEQ ID NO: 1211144 - DNA, 15 bp, Homo sapiens
tcacactgcttgatg

SEQ ID NO: 1211145 - DNA, 15 bp, Homo sapiens
ctcacactgcttgat

SEQ ID NO: 1211146 - DNA, 15 bp, Homo sapiens
cctcacactgcttga

SEQ ID NO: 1211147 - DNA, 15 bp, Homo sapiens
tcctcacactgcttg

SEQ ID NO: 1211148 - DNA, 15 bp, Homo sapiens
gtcctcacactgctt

SEQ ID NO: 1211149 - DNA, 15 bp, Homo sapiens
tgtcctcacactgct

SEQ ID NO: 1211150 - DNA, 15 bp, Homo sapiens
atgtcctcacactgc

SEQ ID NO: 1211151 - DNA, 15 bp, Homo sapiens
catgtcctcacactg

SEQ ID NO: 1211152 - DNA, 15 bp, Homo sapiens
ccatgtcctcacact

SEQ ID NO: 1211153 - DNA, 15 bp, Homo sapiens
gccatgtcctcacac

SEQ ID NO: 1211154 - DNA, 15 bp, Homo sapiens
ggccatgtcctcaca

SEQ ID NO: 1211155 - DNA, 15 bp, Homo sapiens
cggccatgtcctcac

SEQ ID NO: 1211156 - DNA, 15 bp, Homo sapiens
gcggccatgtcctca

SEQ ID NO: 1211157 - DNA, 15 bp, Homo sapiens
tgcggccatgtcctc

SEQ ID NO: 1211158 - DNA, 15 bp, Homo sapiens
ctgcggccatgtcct

SEQ ID NO: 1211159 - DNA, 15 bp, Homo sapiens
cctgcggccatgtcc

SEQ ID NO: 1211160 - DNA, 15 bp, Homo sapiens
tcctgcggccatgtc

SEQ ID NO: 1211161 - DNA, 15 bp, Homo sapiens
gtcctgcggccatgt

SEQ ID NO: 1211162 - DNA, 15 bp, Homo sapiens
agtcctgcggccatg

SEQ ID NO: 1211163 - DNA, 15 bp, Homo sapiens
cagtcctgcggccat

SEQ ID NO: 1211164 - DNA, 15 bp, Homo sapiens
acagtcctgcggcca

SEQ ID NO: 1211165 - DNA, 15 bp, Homo sapiens
aacagtcctgcggcc

SEQ ID NO: 1211166 - DNA, 15 bp, Homo sapiens
aaacagtcctgcggc

SEQ ID NO: 1211167 - DNA, 15 bp, Homo sapiens
gaaacagtcctgcgg

SEQ ID NO: 1211168 - DNA, 15 bp, Homo sapiens
ggaaacagtcctgcg

SEQ ID NO: 1211169 - DNA, 15 bp, Homo sapiens
aggaaacagtcctgc

SEQ ID NO: 1211170 - DNA, 15 bp, Homo sapiens
caggaaacagtcctg

SEQ ID NO: 1211171 - DNA, 15 bp, Homo sapiens
gcaggaaacagtcct

SEQ ID NO: 1211172 - DNA, 15 bp, Homo sapiens
tgcaggaaacagtcc

SEQ ID NO: 1211173 - DNA, 15 bp, Homo sapiens
atgcaggaaacagtc

SEQ ID NO: 1211174 - DNA, 15 bp, Homo sapiens
catgcaggaaacagt

SEQ ID NO: 1211175 - DNA, 15 bp, Homo sapiens
acatgcaggaaacag

SEQ ID NO: 1211176 - DNA, 15 bp, Homo sapiens
gacatgcaggaaaca

SEQ ID NO: 1211177 - DNA, 15 bp, Homo sapiens
tgacatgcaggaaac

SEQ ID NO: 1211178 - DNA, 15 bp, Homo sapiens
ttgacatgcaggaaa

SEQ ID NO: 1211179 - DNA, 15 bp, Homo sapiens
tttgacatgcaggaa

SEQ ID NO: 1211180 - DNA, 15 bp, Homo sapiens
ctttgacatgcagga

SEQ ID NO: 1211181 - DNA, 15 bp, Homo sapiens
cctttgacatgcagg

SEQ ID NO: 1211182 - DNA, 15 bp, Homo sapiens
ccctttgacatgcag

SEQ ID NO: 1211183 - DNA, 15 bp, Homo sapiens
gccctttgacatgca

SEQ ID NO: 1211184 - DNA, 15 bp, Homo sapiens
cgccctttgacatgc

SEQ ID NO: 1211185 - DNA, 15 bp, Homo sapiens
ccgccctttgacatg

SEQ ID NO: 1211186 - DNA, 15 bp, Homo sapiens
tccgccctttgacat

SEQ ID NO: 1211187 - DNA, 15 bp, Homo sapiens
ctccgccctttgaca

SEQ ID NO: 1211188 - DNA, 15 bp, Homo sapiens
cctccgccctttgac

SEQ ID NO: 1211189 - DNA, 15 bp, Homo sapiens
ccctccgccctttga

SEQ ID NO: 1211190 - DNA, 15 bp, Homo sapiens
cccctccgccctttg

SEQ ID NO: 1211191 - DNA, 15 bp, Homo sapiens
tcccctccgcccttt

SEQ ID NO: 1211192 - DNA, 15 bp, Homo sapiens
ttcccctccgccctt

SEQ ID NO: 1211193 - DNA, 15 bp, Homo sapiens
gttcccctccgccct

SEQ ID NO: 1211194 - DNA, 15 bp, Homo sapiens
tgttcccctccgccc

SEQ ID NO: 1211195 - DNA, 15 bp, Homo sapiens
ctgttcccctccgcc

SEQ ID NO: 1211196 - DNA, 15 bp, Homo sapiens
tctgttcccctccgc

SEQ ID NO: 1211197 - DNA, 15 bp, Homo sapiens
atctgttcccctccg

SEQ ID NO: 1211198 - DNA, 15 bp, Homo sapiens
aatctgttcccctcc

SEQ ID NO: 1211199 - DNA, 15 bp, Homo sapiens
gaatctgttcccctc

SEQ ID NO: 1211200 - DNA, 15 bp, Homo sapiens
tgaatctgttcccct

SEQ ID NO: 1211201 - DNA, 15 bp, Homo sapiens
ctgaatctgttcccc

SEQ ID NO: 1211202 - DNA, 15 bp, Homo sapiens
cctgaatctgttccc

SEQ ID NO: 1211203 - DNA, 15 bp, Homo sapiens
ccctgaatctgttcc

SEQ ID NO: 1211204 - DNA, 15 bp, Homo sapiens
accctgaatctgttc

SEQ ID NO: 1211205 - DNA, 15 bp, Homo sapiens
gaccctgaatctgtt

SEQ ID NO: 1211206 - DNA, 15 bp, Homo sapiens
ggaccctgaatctgt

SEQ ID NO: 1211207 - DNA, 15 bp, Homo sapiens
gggaccctgaatctg

SEQ ID NO: 1211208 - DNA, 15 bp, Homo sapiens
tgggaccctgaatct

SEQ ID NO: 1211209 - DNA, 15 bp, Homo sapiens
ctgggaccctgaatc

SEQ ID NO: 1211210 - DNA, 15 bp, Homo sapiens
tctgggaccctgaat

SEQ ID NO: 1211211 - DNA, 15 bp, Homo sapiens
ctctgggaccctgaa

SEQ ID NO: 1211212 - DNA, 15 bp, Homo sapiens
cctctgggaccctga

SEQ ID NO: 1211213 - DNA, 15 bp, Homo sapiens
gcctctgggaccctg

SEQ ID NO: 1211214 - DNA, 15 bp, Homo sapiens
ggcctctgggaccct

SEQ ID NO: 1211215 - DNA, 15 bp, Homo sapiens
aggcctctgggaccc

SEQ ID NO: 1211216 - DNA, 15 bp, Homo sapiens
gaggcctctgggacc

SEQ ID NO: 1211217 - DNA, 15 bp, Homo sapiens
agaggcctctgggac

SEQ ID NO: 1211218 - DNA, 15 bp, Homo sapiens
cagaggcctctggga

SEQ ID NO: 1211219 - DNA, 15 bp, Homo sapiens
tcagaggcctctggg

SEQ ID NO: 1211220 - DNA, 15 bp, Homo sapiens
ctcagaggcctctgg

SEQ ID NO: 1211221 - DNA, 15 bp, Homo sapiens
cctcagaggcctctg

SEQ ID NO: 1211222 - DNA, 15 bp, Homo sapiens
acctcagaggcctct

SEQ ID NO: 1211223 - DNA, 15 bp, Homo sapiens
gacctcagaggcctc

SEQ ID NO: 1211224 - DNA, 15 bp, Homo sapiens
tgacctcagaggcct

SEQ ID NO: 1211225 - DNA, 15 bp, Homo sapiens
gtgacctcagaggcc

SEQ ID NO: 1211226 - DNA, 15 bp, Homo sapiens
agtgacctcagaggc

SEQ ID NO: 1211227 - DNA, 15 bp, Homo sapiens
aagtgacctcagagg

SEQ ID NO: 1211228 - DNA, 15 bp, Homo sapiens
gaagtgacctcagag

SEQ ID NO: 1211229 - DNA, 15 bp, Homo sapiens
ggaagtgacctcaga

SEQ ID NO: 1211230 - DNA, 15 bp, Homo sapiens
aggaagtgacctcag

SEQ ID NO: 1211231 - DNA, 15 bp, Homo sapiens
caggaagtgacctca

SEQ ID NO: 1211232 - DNA, 15 bp, Homo sapiens
gcaggaagtgacctc

SEQ ID NO: 1211233 - DNA, 15 bp, Homo sapiens
ggcaggaagtgacct

SEQ ID NO: 1211234 - DNA, 15 bp, Homo sapiens
gggcaggaagtgacc

SEQ ID NO: 1211235 - DNA, 15 bp, Homo sapiens
agggcaggaagtgac

SEQ ID NO: 1211236 - DNA, 15 bp, Homo sapiens
tagggcaggaagtga

SEQ ID NO: 1211237 - DNA, 15 bp, Homo sapiens
ttagggcaggaagtg

SEQ ID NO: 1211238 - DNA, 15 bp, Homo sapiens
cttagggcaggaagt

SEQ ID NO: 1211239 - DNA, 15 bp, Homo sapiens
tcttagggcaggaag

SEQ ID NO: 1211240 - DNA, 15 bp, Homo sapiens
ttcttagggcaggaa

SEQ ID NO: 1211241 - DNA, 15 bp, Homo sapiens
tttcttagggcagga

SEQ ID NO: 1211242 - DNA, 15 bp, Homo sapiens
atttcttagggcagg

SEQ ID NO: 1211243 - DNA, 15 bp, Homo sapiens
catttcttagggcag

SEQ ID NO: 1211244 - DNA, 15 bp, Homo sapiens
gcatttcttagggca

SEQ ID NO: 1211245 - DNA, 15 bp, Homo sapiens
agcatttcttagggc

SEQ ID NO: 1211246 - DNA, 15 bp, Homo sapiens
gagcatttcttaggg

SEQ ID NO: 1211247 - DNA, 15 bp, Homo sapiens
agagcatttcttagg

SEQ ID NO: 1211248 - DNA, 15 bp, Homo sapiens
aagagcatttcttag

SEQ ID NO: 1211249 - DNA, 15 bp, Homo sapiens
aaagagcatttctta

SEQ ID NO: 1211250 - DNA, 15 bp, Homo sapiens
aaaagagcatttctt

SEQ ID NO: 1211251 - DNA, 15 bp, Homo sapiens
taaaagagcatttct

SEQ ID NO: 1211252 - DNA, 15 bp, Homo sapiens
ctaaaagagcatttc

SEQ ID NO: 1211253 - DNA, 15 bp, Homo sapiens
cctaaaagagcattt

SEQ ID NO: 1211254 - DNA, 15 bp, Homo sapiens
ccctaaaagagcatt

SEQ ID NO: 1211255 - DNA, 15 bp, Homo sapiens
tccctaaaagagcat

SEQ ID NO: 1211256 - DNA, 15 bp, Homo sapiens
ttccctaaaagagca

SEQ ID NO: 1211257 - DNA, 15 bp, Homo sapiens
tttccctaaaagagc

SEQ ID NO: 1211258 - DNA, 15 bp, Homo sapiens
atttccctaaaagag

SEQ ID NO: 1211259 - DNA, 15 bp, Homo sapiens
catttccctaaaaga

SEQ ID NO: 1211260 - DNA, 15 bp, Homo sapiens
tcatttccctaaaag

SEQ ID NO: 1211261 - DNA, 15 bp, Homo sapiens
atcatttccctaaaa

SEQ ID NO: 1211262 - DNA, 15 bp, Homo sapiens
catcatttccctaaa

SEQ ID NO: 1211263 - DNA, 15 bp, Homo sapiens
acatcatttccctaa

SEQ ID NO: 1211264 - DNA, 15 bp, Homo sapiens
aacatcatttcccta

SEQ ID NO: 1211265 - DNA, 15 bp, Homo sapiens
gaacatcatttccct

SEQ ID NO: 1211266 - DNA, 15 bp, Homo sapiens
agaacatcatttccc

SEQ ID NO: 1211267 - DNA, 15 bp, Homo sapiens
aagaacatcatttcc

SEQ ID NO: 1211268 - DNA, 15 bp, Homo sapiens
aaagaacatcatttc

SEQ ID NO: 1211269 - DNA, 15 bp, Homo sapiens
aaaagaacatcattt

SEQ ID NO: 1211270 - DNA, 15 bp, Homo sapiens
caaaagaacatcatt

SEQ ID NO: 1211271 - DNA, 15 bp, Homo sapiens
acaaaagaacatcat

SEQ ID NO: 1211272 - DNA, 15 bp, Homo sapiens
cacaaaagaacatca

SEQ ID NO: 1211273 - DNA, 15 bp, Homo sapiens
acacaaaagaacatc

SEQ ID NO: 1211274 - DNA, 15 bp, Homo sapiens
cacacaaaagaacat

SEQ ID NO: 1211275 - DNA, 15 bp, Homo sapiens
tcacacaaaagaaca

SEQ ID NO: 1211276 - DNA, 15 bp, Homo sapiens
atcacacaaaagaac

SEQ ID NO: 1211277 - DNA, 15 bp, Homo sapiens
catcacacaaaagaa

SEQ ID NO: 1211278 - DNA, 15 bp, Homo sapiens
acatcacacaaaaga

SEQ ID NO: 1211279 - DNA, 15 bp, Homo sapiens
cacatcacacaaaag

SEQ ID NO: 1211280 - DNA, 15 bp, Homo sapiens
ccacatcacacaaaa

SEQ ID NO: 1211281 - DNA, 15 bp, Homo sapiens
cccacatcacacaaa

SEQ ID NO: 1211282 - DNA, 15 bp, Homo sapiens
tcccacatcacacaa

SEQ ID NO: 1211283 - DNA, 15 bp, Homo sapiens
gtcccacatcacaca

SEQ ID NO: 1211284 - DNA, 15 bp, Homo sapiens
tgtcccacatcacac

SEQ ID NO: 1211285 - DNA, 15 bp, Homo sapiens
ttgtcccacatcaca

SEQ ID NO: 1211286 - DNA, 15 bp, Homo sapiens
attgtcccacatcac

SEQ ID NO: 1211287 - DNA, 15 bp, Homo sapiens
aattgtcccacatca

SEQ ID NO: 1211288 - DNA, 15 bp, Homo sapiens
aaattgtcccacatc

SEQ ID NO: 1211289 - DNA, 15 bp, Homo sapiens
gaaattgtcccacat

SEQ ID NO: 1211290 - DNA, 15 bp, Homo sapiens
tgaaattgtcccaca

SEQ ID NO: 1211291 - DNA, 15 bp, Homo sapiens
gtgaaattgtcccac

SEQ ID NO: 1211292 - DNA, 15 bp, Homo sapiens
agtgaaattgtccca

SEQ ID NO: 1211293 - DNA, 15 bp, Homo sapiens
aagtgaaattgtccc

SEQ ID NO: 1211294 - DNA, 15 bp, Homo sapiens
aaagtgaaattgtcc

SEQ ID NO: 1211295 - DNA, 15 bp, Homo sapiens
aaaagtgaaattgtc

SEQ ID NO: 1211296 - DNA, 15 bp, Homo sapiens
aaaaagtgaaattgt

SEQ ID NO: 1211297 - DNA, 15 bp, Homo sapiens
gaaaaagtgaaattg

SEQ ID NO: 1211298 - DNA, 15 bp, Homo sapiens
agaaaaagtgaaatt

SEQ ID NO: 1211299 - DNA, 15 bp, Homo sapiens
aagaaaaagtgaaat

SEQ ID NO: 1211300 - DNA, 15 bp, Homo sapiens
aaagaaaaagtgaaa

SEQ ID NO: 1211301 - DNA, 15 bp, Homo sapiens
aaaagaaaaagtgaa

SEQ ID NO: 1211302 - DNA, 15 bp, Homo sapiens
aaaaagaaaaagtga

SEQ ID NO: 1211303 - DNA, 15 bp, Homo sapiens
aaaaaagaaaaagtg

SEQ ID NO: 1211304 - DNA, 15 bp, Homo sapiens
gaaaaaagaaaaagt

SEQ ID NO: 1211305 - DNA, 15 bp, Homo sapiens
gaagaaaagaaaaaa

SEQ ID NO: 1211306 - DNA, 15 bp, Homo sapiens
agaagaaaagaaaaa

SEQ ID NO: 1211307 - DNA, 15 bp, Homo sapiens
aagagaagaaaagaa

SEQ ID NO: 1211308 - DNA, 15 bp, Homo sapiens
aaaaagagaagaaaa

SEQ ID NO: 1211309 - DNA, 15 bp, Homo sapiens
aaaaaagagaagaaa

SEQ ID NO: 1211310 - DNA, 15 bp, Homo sapiens
aaaaaaagagaagaa

SEQ ID NO: 1211311 - DNA, 15 bp, Homo sapiens
aaaaaaaagagaaga

SEQ ID NO: 1211312 - DNA, 15 bp, Homo sapiens
aaaaaaaaagagaag

SEQ ID NO: 1211313 - DNA, 15 bp, Homo sapiens
aaaaaaaaaagagaa

SEQ ID NO: 1211314 - DNA, 15 bp, Homo sapiens
aggaggcagagcttg

SEQ ID NO: 1211315 - DNA, 15 bp, Homo sapiens
taggaggcagagctt

SEQ ID NO: 1211316 - DNA, 15 bp, Homo sapiens
ctaggaggcagagct

SEQ ID NO: 1211317 - DNA, 15 bp, Homo sapiens
cctaggaggcagagc

SEQ ID NO: 1211318 - DNA, 15 bp, Homo sapiens
acctaggaggcagag

SEQ ID NO: 1211319 - DNA, 15 bp, Homo sapiens
aacctaggaggcaga

SEQ ID NO: 1211320 - DNA, 15 bp, Homo sapiens
gaacctaggaggcag

SEQ ID NO: 1211321 - DNA, 15 bp, Homo sapiens
tgaacctaggaggca

SEQ ID NO: 1211322 - DNA, 15 bp, Homo sapiens
acttgaacctaggag

SEQ ID NO: 1211323 - DNA, 15 bp, Homo sapiens
cacttgaacctagga

SEQ ID NO: 1211324 - DNA, 15 bp, Homo sapiens
tcacttgaacctagg

SEQ ID NO: 1211325 - DNA, 15 bp, Homo sapiens
atcacttgaacctag

SEQ ID NO: 1211326 - DNA, 15 bp, Homo sapiens
aatcacttgaaccta

SEQ ID NO: 1211327 - DNA, 15 bp, Homo sapiens
atctcagctacttgg

SEQ ID NO: 1211328 - DNA, 15 bp, Homo sapiens
aatctcagctacttg

SEQ ID NO: 1211329 - DNA, 15 bp, Homo sapiens
taatctcagctactt

SEQ ID NO: 1211330 - DNA, 15 bp, Homo sapiens
gtaatctcagctact

SEQ ID NO: 1211331 - DNA, 15 bp, Homo sapiens
tgtaatctcagctac

SEQ ID NO: 1211332 - DNA, 15 bp, Homo sapiens
ctgtaatctcagcta

SEQ ID NO: 1211333 - DNA, 15 bp, Homo sapiens
cctgtaatctcagct

SEQ ID NO: 1211334 - DNA, 15 bp, Homo sapiens
gtgcctgtaatctca

SEQ ID NO: 1211335 - DNA, 15 bp, Homo sapiens
ggtgcctgtaatctc

SEQ ID NO: 1211336 - DNA, 15 bp, Homo sapiens
aggtgcctgtaatct

SEQ ID NO: 1211337 - DNA, 15 bp, Homo sapiens
tgtggtggcaggtgc

SEQ ID NO: 1211338 - DNA, 15 bp, Homo sapiens
gtgtggtggcaggtg

SEQ ID NO: 1211339 - DNA, 15 bp, Homo sapiens
ggtgtggtggcaggt

SEQ ID NO: 1211340 - DNA, 15 bp, Homo sapiens
tgccaggtgtggtgg

SEQ ID NO: 1211341 - DNA, 15 bp, Homo sapiens
tttgccaggtgtggt

SEQ ID NO: 1211342 - DNA, 15 bp, Homo sapiens
atttgccaggtgtgg

SEQ ID NO: 1211343 - DNA, 15 bp, Homo sapiens
aatttgccaggtgtg

SEQ ID NO: 1211344 - DNA, 15 bp, Homo sapiens
aaatttgccaggtgt

SEQ ID NO: 1211345 - DNA, 15 bp, Homo sapiens
aaaatttgccaggtg

SEQ ID NO: 1211346 - DNA, 15 bp, Homo sapiens
caaaatttgccaggt

SEQ ID NO: 1211347 - DNA, 15 bp, Homo sapiens
acaaaatttgccagg

SEQ ID NO: 1211348 - DNA, 15 bp, Homo sapiens
tacaaaatttgccag

SEQ ID NO: 1211349 - DNA, 15 bp, Homo sapiens
atacaaaatttgcca

SEQ ID NO: 1211350 - DNA, 15 bp, Homo sapiens
aatacaaaatttgcc

SEQ ID NO: 1211351 - DNA, 15 bp, Homo sapiens
aaatacaaaatttgc

SEQ ID NO: 1211352 - DNA, 15 bp, Homo sapiens
aaaatacaaaatttg

SEQ ID NO: 1211353 - DNA, 15 bp, Homo sapiens
aaaaatacaaaattt

SEQ ID NO: 1211354 - DNA, 15 bp, Homo sapiens
aaaaaatacaaaatt

SEQ ID NO: 1211355 - DNA, 15 bp, Homo sapiens
taaaaaatacaaaat

SEQ ID NO: 1211356 - DNA, 15 bp, Homo sapiens
actgtctctactaaa

SEQ ID NO: 1211357 - DNA, 15 bp, Homo sapiens
cactgtctctactaa

SEQ ID NO: 1211358 - DNA, 15 bp, Homo sapiens
acactgtctctacta

SEQ ID NO: 1211359 - DNA, 15 bp, Homo sapiens
aacactgtctctact

SEQ ID NO: 1211360 - DNA, 15 bp, Homo sapiens
aaacactgtctctac

SEQ ID NO: 1211361 - DNA, 15 bp, Homo sapiens
gaaacactgtctcta

SEQ ID NO: 1211362 - DNA, 15 bp, Homo sapiens
tgaaacactgtctct

SEQ ID NO: 1211363 - DNA, 15 bp, Homo sapiens
gtgaaacactgtctc

SEQ ID NO: 1211364 - DNA, 15 bp, Homo sapiens
ggtgaaacactgtct

SEQ ID NO: 1211365 - DNA, 15 bp, Homo sapiens
tggtgaaacactgtc

SEQ ID NO: 1211366 - DNA, 15 bp, Homo sapiens
atggtgaaacactgt

SEQ ID NO: 1211367 - DNA, 15 bp, Homo sapiens
catggtgaaacactg

SEQ ID NO: 1211368 - DNA, 15 bp, Homo sapiens
acatggtgaaacact

SEQ ID NO: 1211369 - DNA, 15 bp, Homo sapiens
aacatggtgaaacac

SEQ ID NO: 1211370 - DNA, 15 bp, Homo sapiens
caacatggtgaaaca

SEQ ID NO: 1211371 - DNA, 15 bp, Homo sapiens
gagcctgaccaacat

SEQ ID NO: 1211372 - DNA, 15 bp, Homo sapiens
tgagcctgaccaaca

SEQ ID NO: 1211373 - DNA, 15 bp, Homo sapiens
ttgagcctgaccaac

SEQ ID NO: 1211374 - DNA, 15 bp, Homo sapiens
tttgagcctgaccaa

SEQ ID NO: 1211375 - DNA, 15 bp, Homo sapiens
gtttgagcctgacca

SEQ ID NO: 1211376 - DNA, 15 bp, Homo sapiens
agtttgagcctgacc

SEQ ID NO: 1211377 - DNA, 15 bp, Homo sapiens
gagtttgagcctgac

SEQ ID NO: 1211378 - DNA, 15 bp, Homo sapiens
ggagtttgagcctga

SEQ ID NO: 1211379 - DNA, 15 bp, Homo sapiens
aggagtttgagcctg

SEQ ID NO: 1211380 - DNA, 15 bp, Homo sapiens
caggagtttgagcct

SEQ ID NO: 1211381 - DNA, 15 bp, Homo sapiens
tcaggagtttgagcc

SEQ ID NO: 1211382 - DNA, 15 bp, Homo sapiens
gtcaggagtttgagc

SEQ ID NO: 1211383 - DNA, 15 bp, Homo sapiens
aacctgaggtcagga

SEQ ID NO: 1211384 - DNA, 15 bp, Homo sapiens
taacctgaggtcagg

SEQ ID NO: 1211385 - DNA, 15 bp, Homo sapiens
gtaacctgaggtcag

SEQ ID NO: 1211386 - DNA, 15 bp, Homo sapiens
ggtaacctgaggtca

SEQ ID NO: 1211387 - DNA, 15 bp, Homo sapiens
gggtaacctgaggtc

SEQ ID NO: 1211388 - DNA, 15 bp, Homo sapiens
tgggtaacctgaggt

SEQ ID NO: 1211389 - DNA, 15 bp, Homo sapiens
gtgggtaacctgagg

SEQ ID NO: 1211390 - DNA, 15 bp, Homo sapiens
ggtgggtaacctgag

SEQ ID NO: 1211391 - DNA, 15 bp, Homo sapiens
gggtgggtaacctga

SEQ ID NO: 1211392 - DNA, 15 bp, Homo sapiens
agggtgggtaacctg

SEQ ID NO: 1211393 - DNA, 15 bp, Homo sapiens
gagggtgggtaacct

SEQ ID NO: 1211394 - DNA, 15 bp, Homo sapiens
ggagggtgggtaacc

SEQ ID NO: 1211395 - DNA, 15 bp, Homo sapiens
aggagggtgggtaac

SEQ ID NO: 1211396 - DNA, 15 bp, Homo sapiens
gaggagggtgggtaa

SEQ ID NO: 1211397 - DNA, 15 bp, Homo sapiens
cgaggagggtgggta

SEQ ID NO: 1211398 - DNA, 15 bp, Homo sapiens
ccgaggagggtgggt

SEQ ID NO: 1211399 - DNA, 15 bp, Homo sapiens
gccgaggagggtggg

SEQ ID NO: 1211400 - DNA, 15 bp, Homo sapiens
tggccaggcacggtg

SEQ ID NO: 1211401 - DNA, 15 bp, Homo sapiens
ctggccaggcacggt

SEQ ID NO: 1211402 - DNA, 15 bp, Homo sapiens
actggccaggcacgg

SEQ ID NO: 1211403 - DNA, 15 bp, Homo sapiens
aactggccaggcacg

SEQ ID NO: 1211404 - DNA, 15 bp, Homo sapiens
aaactggccaggcac

SEQ ID NO: 1211405 - DNA, 15 bp, Homo sapiens
gaaactggccaggca

SEQ ID NO: 1211406 - DNA, 15 bp, Homo sapiens
cgaaactggccaggc

SEQ ID NO: 1211407 - DNA, 15 bp, Homo sapiens
gcgaaactggccagg

SEQ ID NO: 1211408 - DNA, 15 bp, Homo sapiens
agcgaaactggccag

SEQ ID NO: 1211409 - DNA, 15 bp, Homo sapiens
aagcgaaactggcca

SEQ ID NO: 1211410 - DNA, 15 bp, Homo sapiens
aaagcgaaactggcc

SEQ ID NO: 1211411 - DNA, 15 bp, Homo sapiens
aaaagcgaaactggc

SEQ ID NO: 1211412 - DNA, 15 bp, Homo sapiens
aaaaagcgaaactgg

SEQ ID NO: 1211413 - DNA, 15 bp, Homo sapiens
gaaaaagcgaaactg

SEQ ID NO: 1211414 - DNA, 15 bp, Homo sapiens
ggaaaaagcgaaact

SEQ ID NO: 1211415 - DNA, 15 bp, Homo sapiens
cggaaaaagcgaaac

SEQ ID NO: 1211416 - DNA, 15 bp, Homo sapiens
tcggaaaaagcgaaa

SEQ ID NO: 1211417 - DNA, 15 bp, Homo sapiens
ttcggaaaaagcgaa

SEQ ID NO: 1211418 - DNA, 15 bp, Homo sapiens
attcggaaaaagcga

SEQ ID NO: 1211419 - DNA, 15 bp, Homo sapiens
cattcggaaaaagcg

SEQ ID NO: 1211420 - DNA, 15 bp, Homo sapiens
tcattcggaaaaagc

SEQ ID NO: 1211421 - DNA, 15 bp, Homo sapiens
ctcattcggaaaaag

SEQ ID NO: 1211422 - DNA, 15 bp, Homo sapiens
tctcattcggaaaaa

SEQ ID NO: 1211423 - DNA, 15 bp, Homo sapiens
gtctcattcggaaaa

SEQ ID NO: 1211424 - DNA, 15 bp, Homo sapiens
agtctcattcggaaa

SEQ ID NO: 1211425 - DNA, 15 bp, Homo sapiens
gagtctcattcggaa

SEQ ID NO: 1211426 - DNA, 15 bp, Homo sapiens
ggagtctcattcgga

SEQ ID NO: 1211427 - DNA, 15 bp, Homo sapiens
tggagtctcattcgg

SEQ ID NO: 1211428 - DNA, 15 bp, Homo sapiens
atggagtctcattcg

SEQ ID NO: 1211429 - DNA, 15 bp, Homo sapiens
gatggagtctcattc

SEQ ID NO: 1211430 - DNA, 15 bp, Homo sapiens
tgatggagtctcatt

SEQ ID NO: 1211431 - DNA, 15 bp, Homo sapiens
atgatggagtctcat

SEQ ID NO: 1211432 - DNA, 15 bp, Homo sapiens
tatgatggagtctca

SEQ ID NO: 1211433 - DNA, 15 bp, Homo sapiens
ctatgatggagtctc

SEQ ID NO: 1211434 - DNA, 15 bp, Homo sapiens
tctatgatggagtct

SEQ ID NO: 1211435 - DNA, 15 bp, Homo sapiens
ttctatgatggagtc

SEQ ID NO: 1211436 - DNA, 15 bp, Homo sapiens
tttctatgatggagt

SEQ ID NO: 1211437 - DNA, 15 bp, Homo sapiens
atttctatgatggag

SEQ ID NO: 1211438 - DNA, 15 bp, Homo sapiens
catttctatgatgga

SEQ ID NO: 1211439 - DNA, 15 bp, Homo sapiens
acatttctatgatgg

SEQ ID NO: 1211440 - DNA, 15 bp, Homo sapiens
cacatttctatgatg

SEQ ID NO: 1211441 - DNA, 15 bp, Homo sapiens
gcacatttctatgat

SEQ ID NO: 1211442 - DNA, 15 bp, Homo sapiens
agcacatttctatga

SEQ ID NO: 1211443 - DNA, 15 bp, Homo sapiens
gagcacatttctatg

SEQ ID NO: 1211444 - DNA, 15 bp, Homo sapiens
tgagcacatttctat

SEQ ID NO: 1211445 - DNA, 15 bp, Homo sapiens
gtgagcacatttcta

SEQ ID NO: 1211446 - DNA, 15 bp, Homo sapiens
tgtgagcacatttct

SEQ ID NO: 1211447 - DNA, 15 bp, Homo sapiens
gtgtgagcacatttc

SEQ ID NO: 1211448 - DNA, 15 bp, Homo sapiens
tgtgtgagcacattt

SEQ ID NO: 1211449 - DNA, 15 bp, Homo sapiens
atgtgtgagcacatt

SEQ ID NO: 1211450 - DNA, 15 bp, Homo sapiens
catgtgtgagcacat

SEQ ID NO: 1211451 - DNA, 15 bp, Homo sapiens
gcatgtgtgagcaca

SEQ ID NO: 1211452 - DNA, 15 bp, Homo sapiens
ggcatgtgtgagcac

SEQ ID NO: 1211453 - DNA, 15 bp, Homo sapiens
tggcatgtgtgagca

SEQ ID NO: 1211454 - DNA, 15 bp, Homo sapiens
ctggcatgtgtgagc

SEQ ID NO: 1211455 - DNA, 15 bp, Homo sapiens
cctggcatgtgtgag

SEQ ID NO: 1211456 - DNA, 15 bp, Homo sapiens
ccctggcatgtgtga

SEQ ID NO: 1211457 - DNA, 15 bp, Homo sapiens
tccctggcatgtgtg

SEQ ID NO: 1211458 - DNA, 15 bp, Homo sapiens
gtccctggcatgtgt

SEQ ID NO: 1211459 - DNA, 15 bp, Homo sapiens
agtccctggcatgtg

SEQ ID NO: 1211460 - DNA, 15 bp, Homo sapiens
gagtccctggcatgt

SEQ ID NO: 1211461 - DNA, 15 bp, Homo sapiens
ggagtccctggcatg

SEQ ID NO: 1211462 - DNA, 15 bp, Homo sapiens
tggagtccctggcat

SEQ ID NO: 1211463 - DNA, 15 bp, Homo sapiens
gtggagtccctggca

SEQ ID NO: 1211464 - DNA, 15 bp, Homo sapiens
agtggagtccctggc

SEQ ID NO: 1211465 - DNA, 15 bp, Homo sapiens
cagtggagtccctgg

SEQ ID NO: 1211466 - DNA, 15 bp, Homo sapiens
ccagtggagtccctg

SEQ ID NO: 1211467 - DNA, 15 bp, Homo sapiens
accagtggagtccct

SEQ ID NO: 1211468 - DNA, 15 bp, Homo sapiens
caccagtggagtccc

SEQ ID NO: 1211469 - DNA, 15 bp, Homo sapiens
acaccagtggagtcc

SEQ ID NO: 1211470 - DNA, 15 bp, Homo sapiens
gacaccagtggagtc

SEQ ID NO: 1211471 - DNA, 15 bp, Homo sapiens
agacaccagtggagt

SEQ ID NO: 1211472 - DNA, 15 bp, Homo sapiens
gagacaccagtggag

SEQ ID NO: 1211473 - DNA, 15 bp, Homo sapiens
ggagacaccagtgga

SEQ ID NO: 1211474 - DNA, 15 bp, Homo sapiens
aggagacaccagtgg

SEQ ID NO: 1211475 - DNA, 15 bp, Homo sapiens
gaggagacaccagtg

SEQ ID NO: 1211476 - DNA, 15 bp, Homo sapiens
ggaggagacaccagt

SEQ ID NO: 1211477 - DNA, 15 bp, Homo sapiens
tggaggagacaccag

SEQ ID NO: 1211478 - DNA, 15 bp, Homo sapiens
atggaggagacacca

SEQ ID NO: 1211479 - DNA, 15 bp, Homo sapiens
gatggaggagacacc

SEQ ID NO: 1211480 - DNA, 15 bp, Homo sapiens
ggatggaggagacac

SEQ ID NO: 1211481 - DNA, 15 bp, Homo sapiens
tggatggaggagaca

SEQ ID NO: 1211482 - DNA, 15 bp, Homo sapiens
atggatggaggagac

SEQ ID NO: 1211483 - DNA, 15 bp, Homo sapiens
catggatggaggaga

SEQ ID NO: 1211484 - DNA, 15 bp, Homo sapiens
acatggatggaggag

SEQ ID NO: 1211485 - DNA, 15 bp, Homo sapiens
cacatggatggagga

SEQ ID NO: 1211486 - DNA, 15 bp, Homo sapiens
ccacatggatggagg

SEQ ID NO: 1211487 - DNA, 15 bp, Homo sapiens
gccacatggatggag

SEQ ID NO: 1211488 - DNA, 15 bp, Homo sapiens
agccacatggatgga

SEQ ID NO: 1211489 - DNA, 15 bp, Homo sapiens
cagccacatggatgg

SEQ ID NO: 1211490 - DNA, 15 bp, Homo sapiens
acagccacatggatg

SEQ ID NO: 1211491 - DNA, 15 bp, Homo sapiens
gacagccacatggat

SEQ ID NO: 1211492 - DNA, 15 bp, Homo sapiens
tgacagccacatgga

SEQ ID NO: 1211493 - DNA, 15 bp, Homo sapiens
ctgacagccacatgg

SEQ ID NO: 1211494 - DNA, 15 bp, Homo sapiens
cctgacagccacatg

SEQ ID NO: 1211495 - DNA, 15 bp, Homo sapiens
acctgacagccacat

SEQ ID NO: 1211496 - DNA, 15 bp, Homo sapiens
aacctgacagccaca

SEQ ID NO: 1211497 - DNA, 15 bp, Homo sapiens
caacctgacagccac

SEQ ID NO: 1211498 - DNA, 15 bp, Homo sapiens
ccaacctgacagcca

SEQ ID NO: 1211499 - DNA, 15 bp, Homo sapiens
accaacctgacagcc

SEQ ID NO: 1211500 - DNA, 15 bp, Homo sapiens
gaccaacctgacagc

SEQ ID NO: 1211501 - DNA, 15 bp, Homo sapiens
agaccaacctgacag

SEQ ID NO: 1211502 - DNA, 15 bp, Homo sapiens
gagaccaacctgaca

SEQ ID NO: 1211503 - DNA, 15 bp, Homo sapiens
tgagaccaacctgac

SEQ ID NO: 1211504 - DNA, 15 bp, Homo sapiens
ctgagaccaacctga

SEQ ID NO: 1211505 - DNA, 15 bp, Homo sapiens
actgagaccaacctg

SEQ ID NO: 1211506 - DNA, 15 bp, Homo sapiens
tactgagaccaacct

SEQ ID NO: 1211507 - DNA, 15 bp, Homo sapiens
ttactgagaccaacc

SEQ ID NO: 1211508 - DNA, 15 bp, Homo sapiens
attactgagaccaac

SEQ ID NO: 1211509 - DNA, 15 bp, Homo sapiens
cattactgagaccaa

SEQ ID NO: 1211510 - DNA, 15 bp, Homo sapiens
tcattactgagacca

SEQ ID NO: 1211511 - DNA, 15 bp, Homo sapiens
ttcattactgagacc

SEQ ID NO: 1211512 - DNA, 15 bp, Homo sapiens
cttcattactgagac

SEQ ID NO: 1211513 - DNA, 15 bp, Homo sapiens
acttcattactgaga

SEQ ID NO: 1211514 - DNA, 15 bp, Homo sapiens
cacttcattactgag

SEQ ID NO: 1211515 - DNA, 15 bp, Homo sapiens
tcacttcattactga

SEQ ID NO: 1211516 - DNA, 15 bp, Homo sapiens
atcacttcattactg

SEQ ID NO: 1211517 - DNA, 15 bp, Homo sapiens
catcacttcattact

SEQ ID NO: 1211518 - DNA, 15 bp, Homo sapiens
ccatcacttcattac

SEQ ID NO: 1211519 - DNA, 15 bp, Homo sapiens
cccatcacttcatta

SEQ ID NO: 1211520 - DNA, 15 bp, Homo sapiens
acccatcacttcatt

SEQ ID NO: 1211521 - DNA, 15 bp, Homo sapiens
cacccatcacttcat

SEQ ID NO: 1211522 - DNA, 15 bp, Homo sapiens
tcacccatcacttca

SEQ ID NO: 1211523 - DNA, 15 bp, Homo sapiens
ctcacccatcacttc

SEQ ID NO: 1211524 - DNA, 15 bp, Homo sapiens
tctcacccatcactt

SEQ ID NO: 1211525 - DNA, 15 bp, Homo sapiens
gtctcacccatcact

SEQ ID NO: 1211526 - DNA, 15 bp, Homo sapiens
tgtctcacccatcac

SEQ ID NO: 1211527 - DNA, 15 bp, Homo sapiens
ctgtctcacccatca

SEQ ID NO: 1211528 - DNA, 15 bp, Homo sapiens
cctgtctcacccatc

SEQ ID NO: 1211529 - DNA, 15 bp, Homo sapiens
ccctgtctcacccat

SEQ ID NO: 1211530 - DNA, 15 bp, Homo sapiens
accctgtctcaccca

SEQ ID NO: 1211531 - DNA, 15 bp, Homo sapiens
caccctgtctcaccc

SEQ ID NO: 1211532 - DNA, 15 bp, Homo sapiens
tcaccctgtctcacc

SEQ ID NO: 1211533 - DNA, 15 bp, Homo sapiens
gtcaccctgtctcac

SEQ ID NO: 1211534 - DNA, 15 bp, Homo sapiens
tgtcaccctgtctca

SEQ ID NO: 1211535 - DNA, 15 bp, Homo sapiens
ctgtcaccctgtctc

SEQ ID NO: 1211536 - DNA, 15 bp, Homo sapiens
tctgtcaccctgtct

SEQ ID NO: 1211537 - DNA, 15 bp, Homo sapiens
gtctgtcaccctgtc

SEQ ID NO: 1211538 - DNA, 15 bp, Homo sapiens
cgtctgtcaccctgt

SEQ ID NO: 1211539 - DNA, 15 bp, Homo sapiens
ccgtctgtcaccctg

SEQ ID NO: 1211540 - DNA, 15 bp, Homo sapiens
gccgtctgtcaccct

SEQ ID NO: 1211541 - DNA, 15 bp, Homo sapiens
agccgtctgtcaccc

SEQ ID NO: 1211542 - DNA, 15 bp, Homo sapiens
aagccgtctgtcacc

SEQ ID NO: 1211543 - DNA, 15 bp, Homo sapiens
aaagccgtctgtcac

SEQ ID NO: 1211544 - DNA, 15 bp, Homo sapiens
aaaagccgtctgtca

SEQ ID NO: 1211545 - DNA, 15 bp, Homo sapiens
caaaagccgtctgtc

SEQ ID NO: 1211546 - DNA, 15 bp, Homo sapiens
acaaaagccgtctgt

SEQ ID NO: 1211547 - DNA, 15 bp, Homo sapiens
cacaaaagccgtctg

SEQ ID NO: 1211548 - DNA, 15 bp, Homo sapiens
ccacaaaagccgtct

SEQ ID NO: 1211549 - DNA, 15 bp, Homo sapiens
cccacaaaagccgtc

SEQ ID NO: 1211550 - DNA, 15 bp, Homo sapiens
tcccacaaaagccgt

SEQ ID NO: 1211551 - DNA, 15 bp, Homo sapiens
ttcccacaaaagccg

SEQ ID NO: 1211552 - DNA, 15 bp, Homo sapiens
gttcccacaaaagcc

SEQ ID NO: 1211553 - DNA, 15 bp, Homo sapiens
tgttcccacaaaagc

SEQ ID NO: 1211554 - DNA, 15 bp, Homo sapiens
atgttcccacaaaag

SEQ ID NO: 1211555 - DNA, 15 bp, Homo sapiens
gatgttcccacaaaa

SEQ ID NO: 1211556 - DNA, 15 bp, Homo sapiens
tgatgttcccacaaa

SEQ ID NO: 1211557 - DNA, 15 bp, Homo sapiens
ctgatgttcccacaa

SEQ ID NO: 1211558 - DNA, 15 bp, Homo sapiens
gctgatgttcccaca

SEQ ID NO: 1211559 - DNA, 15 bp, Homo sapiens
tgctgatgttcccac

SEQ ID NO: 1211560 - DNA, 15 bp, Homo sapiens
atgctgatgttccca

SEQ ID NO: 1211561 - DNA, 15 bp, Homo sapiens
catgctgatgttccc

SEQ ID NO: 1211562 - DNA, 15 bp, Homo sapiens
acatgctgatgttcc

SEQ ID NO: 1211563 - DNA, 15 bp, Homo sapiens
cacatgctgatgttc

SEQ ID NO: 1211564 - DNA, 15 bp, Homo sapiens
acacatgctgatgtt

SEQ ID NO: 1211565 - DNA, 15 bp, Homo sapiens
cacacatgctgatgt

SEQ ID NO: 1211566 - DNA, 15 bp, Homo sapiens
ccacacatgctgatg

SEQ ID NO: 1211567 - DNA, 15 bp, Homo sapiens
gccacacatgctgat

SEQ ID NO: 1211568 - DNA, 15 bp, Homo sapiens
agccacacatgctga

SEQ ID NO: 1211569 - DNA, 15 bp, Homo sapiens
gagccacacatgctg

SEQ ID NO: 1211570 - DNA, 15 bp, Homo sapiens
agagccacacatgct

SEQ ID NO: 1211571 - DNA, 15 bp, Homo sapiens
tagagccacacatgc

SEQ ID NO: 1211572 - DNA, 15 bp, Homo sapiens
ttagagccacacatg

SEQ ID NO: 1211573 - DNA, 15 bp, Homo sapiens
gttagagccacacat

SEQ ID NO: 1211574 - DNA, 15 bp, Homo sapiens
tgttagagccacaca

SEQ ID NO: 1211575 - DNA, 15 bp, Homo sapiens
ctgttagagccacac

SEQ ID NO: 1211576 - DNA, 15 bp, Homo sapiens
cctgttagagccaca

SEQ ID NO: 1211577 - DNA, 15 bp, Homo sapiens
gcctgttagagccac

SEQ ID NO: 1211578 - DNA, 15 bp, Homo sapiens
tgcctgttagagcca

SEQ ID NO: 1211579 - DNA, 15 bp, Homo sapiens
ttgcctgttagagcc

SEQ ID NO: 1211580 - DNA, 15 bp, Homo sapiens
attgcctgttagagc

SEQ ID NO: 1211581 - DNA, 15 bp, Homo sapiens
gattgcctgttagag

SEQ ID NO: 1211582 - DNA, 15 bp, Homo sapiens
cgattgcctgttaga

SEQ ID NO: 1211583 - DNA, 15 bp, Homo sapiens
acgattgcctgttag

SEQ ID NO: 1211584 - DNA, 15 bp, Homo sapiens
tacgattgcctgtta

SEQ ID NO: 1211585 - DNA, 15 bp, Homo sapiens
ttacgattgcctgtt

SEQ ID NO: 1211586 - DNA, 15 bp, Homo sapiens
cttacgattgcctgt

SEQ ID NO: 1211587 - DNA, 15 bp, Homo sapiens
acttacgattgcctg

SEQ ID NO: 1211588 - DNA, 15 bp, Homo sapiens
aacttacgattgcct

SEQ ID NO: 1211589 - DNA, 15 bp, Homo sapiens
gaacttacgattgcc

SEQ ID NO: 1211590 - DNA, 15 bp, Homo sapiens
agaacttacgattgc

SEQ ID NO: 1211591 - DNA, 15 bp, Homo sapiens
cagaacttacgattg

SEQ ID NO: 1211592 - DNA, 15 bp, Homo sapiens
gcagaacttacgatt

SEQ ID NO: 1211593 - DNA, 15 bp, Homo sapiens
cgcagaacttacgat

SEQ ID NO: 1211594 - DNA, 15 bp, Homo sapiens
tcgcagaacttacga

SEQ ID NO: 1211595 - DNA, 15 bp, Homo sapiens
ctcgcagaacttacg

SEQ ID NO: 1211596 - DNA, 15 bp, Homo sapiens
tctcgcagaacttac

SEQ ID NO: 1211597 - DNA, 15 bp, Homo sapiens
ttctcgcagaactta

SEQ ID NO: 1211598 - DNA, 15 bp, Homo sapiens
tttctcgcagaactt

SEQ ID NO: 1211599 - DNA, 15 bp, Homo sapiens
ctttctcgcagaact

SEQ ID NO: 1211600 - DNA, 15 bp, Homo sapiens
gctttctcgcagaac

SEQ ID NO: 1211601 - DNA, 15 bp, Homo sapiens
agctttctcgcagaa

SEQ ID NO: 1211602 - DNA, 15 bp, Homo sapiens
cagctttctcgcaga

SEQ ID NO: 1211603 - DNA, 15 bp, Homo sapiens
ccagctttctcgcag

SEQ ID NO: 1211604 - DNA, 15 bp, Homo sapiens
tccagctttctcgca

SEQ ID NO: 1211605 - DNA, 15 bp, Homo sapiens
ttccagctttctcgc

SEQ ID NO: 1211606 - DNA, 15 bp, Homo sapiens
cttccagctttctcg

SEQ ID NO: 1211607 - DNA, 15 bp, Homo sapiens
ccttccagctttctc

SEQ ID NO: 1211608 - DNA, 15 bp, Homo sapiens
tccttccagctttct

SEQ ID NO: 1211609 - DNA, 15 bp, Homo sapiens
ctccttccagctttc

SEQ ID NO: 1211610 - DNA, 15 bp, Homo sapiens
actccttccagcttt

SEQ ID NO: 1211611 - DNA, 15 bp, Homo sapiens
tactccttccagctt

SEQ ID NO: 1211612 - DNA, 15 bp, Homo sapiens
ctactccttccagct

SEQ ID NO: 1211613 - DNA, 15 bp, Homo sapiens
tctactccttccagc

SEQ ID NO: 1211614 - DNA, 15 bp, Homo sapiens
ttctactccttccag

SEQ ID NO: 1211615 - DNA, 15 bp, Homo sapiens
cttctactccttcca

SEQ ID NO: 1211616 - DNA, 15 bp, Homo sapiens
gcttctactccttcc

SEQ ID NO: 1211617 - DNA, 15 bp, Homo sapiens
tgcttctactccttc

SEQ ID NO: 1211618 - DNA, 15 bp, Homo sapiens
ctgcttctactcctt

SEQ ID NO: 1211619 - DNA, 15 bp, Homo sapiens
gctgcttctactcct

SEQ ID NO: 1211620 - DNA, 15 bp, Homo sapiens
ggctgcttctactcc

SEQ ID NO: 1211621 - DNA, 15 bp, Homo sapiens
tggctgcttctactc

SEQ ID NO: 1211622 - DNA, 15 bp, Homo sapiens
ctggctgcttctact

SEQ ID NO: 1211623 - DNA, 15 bp, Homo sapiens
cctggctgcttctac

SEQ ID NO: 1211624 - DNA, 15 bp, Homo sapiens
acctggctgcttcta

SEQ ID NO: 1211625 - DNA, 15 bp, Homo sapiens
cacctggctgcttct

SEQ ID NO: 1211626 - DNA, 15 bp, Homo sapiens
ccacctggctgcttc

SEQ ID NO: 1211627 - DNA, 15 bp, Homo sapiens
gccacctggctgctt

SEQ ID NO: 1211628 - DNA, 15 bp, Homo sapiens
tgccacctggctgct

SEQ ID NO: 1211629 - DNA, 15 bp, Homo sapiens
ctgccacctggctgc

SEQ ID NO: 1211630 - DNA, 15 bp, Homo sapiens
cctgccacctggctg

SEQ ID NO: 1211631 - DNA, 15 bp, Homo sapiens
tcctgccacctggct

SEQ ID NO: 1211632 - DNA, 15 bp, Homo sapiens
ctcctgccacctggc

SEQ ID NO: 1211633 - DNA, 15 bp, Homo sapiens
cctcctgccacctgg

SEQ ID NO: 1211634 - DNA, 15 bp, Homo sapiens
acctcctgccacctg

SEQ ID NO: 1211635 - DNA, 15 bp, Homo sapiens
cacctcctgccacct

SEQ ID NO: 1211636 - DNA, 15 bp, Homo sapiens
ccacctcctgccacc

SEQ ID NO: 1211637 - DNA, 15 bp, Homo sapiens
tccacctcctgccac

SEQ ID NO: 1211638 - DNA, 15 bp, Homo sapiens
ctccacctcctgcca

SEQ ID NO: 1211639 - DNA, 15 bp, Homo sapiens
cctccacctcctgcc

SEQ ID NO: 1211640 - DNA, 15 bp, Homo sapiens
acctccacctcctgc

SEQ ID NO: 1211641 - DNA, 15 bp, Homo sapiens
tacctccacctcctg

SEQ ID NO: 1211642 - DNA, 15 bp, Homo sapiens
atacctccacctcct

SEQ ID NO: 1211643 - DNA, 15 bp, Homo sapiens
catacctccacctcc

SEQ ID NO: 1211644 - DNA, 15 bp, Homo sapiens
acatacctccacctc

SEQ ID NO: 1211645 - DNA, 15 bp, Homo sapiens
aacatacctccacct

SEQ ID NO: 1211646 - DNA, 15 bp, Homo sapiens
aaacatacctccacc

SEQ ID NO: 1211647 - DNA, 15 bp, Homo sapiens
gaaacatacctccac

SEQ ID NO: 1211648 - DNA, 15 bp, Homo sapiens
ggaaacatacctcca

SEQ ID NO: 1211649 - DNA, 15 bp, Homo sapiens
aggaaacatacctcc

SEQ ID NO: 1211650 - DNA, 15 bp, Homo sapiens
aaggaaacatacctc

SEQ ID NO: 1211651 - DNA, 15 bp, Homo sapiens
gaaggaaacatacct

SEQ ID NO: 1211652 - DNA, 15 bp, Homo sapiens
ggaaggaaacatacc

SEQ ID NO: 1211653 - DNA, 15 bp, Homo sapiens
aggaaggaaacatac

SEQ ID NO: 1211654 - DNA, 15 bp, Homo sapiens
gaggaaggaaacata

SEQ ID NO: 1211655 - DNA, 15 bp, Homo sapiens
tgaggaaggaaacat

SEQ ID NO: 1211656 - DNA, 15 bp, Homo sapiens
atgaggaaggaaaca

SEQ ID NO: 1211657 - DNA, 15 bp, Homo sapiens
aatgaggaaggaaac

SEQ ID NO: 1211658 - DNA, 15 bp, Homo sapiens
aaatgaggaaggaaa

SEQ ID NO: 1211659 - DNA, 15 bp, Homo sapiens
aaaatgaggaaggaa

SEQ ID NO: 1211660 - DNA, 15 bp, Homo sapiens
taaaatgaggaagga

SEQ ID NO: 1211661 - DNA, 15 bp, Homo sapiens
gtaaaatgaggaagg

SEQ ID NO: 1211662 - DNA, 15 bp, Homo sapiens
ggtaaaatgaggaag

SEQ ID NO: 1211663 - DNA, 15 bp, Homo sapiens
aggtaaaatgaggaa

SEQ ID NO: 1211664 - DNA, 15 bp, Homo sapiens
caggtaaaatgagga

SEQ ID NO: 1211665 - DNA, 15 bp, Homo sapiens
tcaggtaaaatgagg

SEQ ID NO: 1211666 - DNA, 15 bp, Homo sapiens
ctcaggtaaaatgag

SEQ ID NO: 1211667 - DNA, 15 bp, Homo sapiens
tctcaggtaaaatga

SEQ ID NO: 1211668 - DNA, 15 bp, Homo sapiens
ttctcaggtaaaatg

SEQ ID NO: 1211669 - DNA, 15 bp, Homo sapiens
cttctcaggtaaaat

SEQ ID NO: 1211670 - DNA, 15 bp, Homo sapiens
acttctcaggtaaaa

SEQ ID NO: 1211671 - DNA, 15 bp, Homo sapiens
cacttctcaggtaaa

SEQ ID NO: 1211672 - DNA, 15 bp, Homo sapiens
acacttctcaggtaa

SEQ ID NO: 1211673 - DNA, 15 bp, Homo sapiens
aacacttctcaggta

SEQ ID NO: 1211674 - DNA, 15 bp, Homo sapiens
aaacacttctcaggt

SEQ ID NO: 1211675 - DNA, 15 bp, Homo sapiens
taaacacttctcagg

SEQ ID NO: 1211676 - DNA, 15 bp, Homo sapiens
gtaaacacttctcag

SEQ ID NO: 1211677 - DNA, 15 bp, Homo sapiens
agtaaacacttctca

SEQ ID NO: 1211678 - DNA, 15 bp, Homo sapiens
gagtaaacacttctc

SEQ ID NO: 1211679 - DNA, 15 bp, Homo sapiens
tgagtaaacacttct

SEQ ID NO: 1211680 - DNA, 15 bp, Homo sapiens
ttgagtaaacacttc

SEQ ID NO: 1211681 - DNA, 15 bp, Homo sapiens
cttgagtaaacactt

SEQ ID NO: 1211682 - DNA, 15 bp, Homo sapiens
tcttgagtaaacact

SEQ ID NO: 1211683 - DNA, 15 bp, Homo sapiens
ttcttgagtaaacac

SEQ ID NO: 1211684 - DNA, 15 bp, Homo sapiens
tttcttgagtaaaca

SEQ ID NO: 1211685 - DNA, 15 bp, Homo sapiens
atttcttgagtaaac

SEQ ID NO: 1211686 - DNA, 15 bp, Homo sapiens
tatttcttgagtaaa

SEQ ID NO: 1211687 - DNA, 15 bp, Homo sapiens
ctatttcttgagtaa

SEQ ID NO: 1211688 - DNA, 15 bp, Homo sapiens
gctatttcttgagta

SEQ ID NO: 1211689 - DNA, 15 bp, Homo sapiens
ggctatttcttgagt

SEQ ID NO: 1211690 - DNA, 15 bp, Homo sapiens
aggctatttcttgag

SEQ ID NO: 1211691 - DNA, 15 bp, Homo sapiens
aaggctatttcttga

SEQ ID NO: 1211692 - DNA, 15 bp, Homo sapiens
aaaggctatttcttg

SEQ ID NO: 1211693 - DNA, 15 bp, Homo sapiens
caaaggctatttctt

SEQ ID NO: 1211694 - DNA, 15 bp, Homo sapiens
tcaaaggctatttct

SEQ ID NO: 1211695 - DNA, 15 bp, Homo sapiens
gtcaaaggctatttc

SEQ ID NO: 1211696 - DNA, 15 bp, Homo sapiens
agtcaaaggctattt

SEQ ID NO: 1211697 - DNA, 15 bp, Homo sapiens
cagtcaaaggctatt

SEQ ID NO: 1211698 - DNA, 15 bp, Homo sapiens
tcagtcaaaggctat

SEQ ID NO: 1211699 - DNA, 15 bp, Homo sapiens
ttcagtcaaaggcta

SEQ ID NO: 1211700 - DNA, 15 bp, Homo sapiens
attcagtcaaaggct

SEQ ID NO: 1211701 - DNA, 15 bp, Homo sapiens
aattcagtcaaaggc

SEQ ID NO: 1211702 - DNA, 15 bp, Homo sapiens
gaattcagtcaaagg

SEQ ID NO: 1211703 - DNA, 15 bp, Homo sapiens
cgaattcagtcaaag

SEQ ID NO: 1211704 - DNA, 15 bp, Homo sapiens
ccgaattcagtcaaa

SEQ ID NO: 1211705 - DNA, 15 bp, Homo sapiens
cccgaattcagtcaa

SEQ ID NO: 1211706 - DNA, 15 bp, Homo sapiens
tcccgaattcagtca

SEQ ID NO: 1211707 - DNA, 15 bp, Homo sapiens
atcccgaattcagtc

SEQ ID NO: 1211708 - DNA, 15 bp, Homo sapiens
catcccgaattcagt

SEQ ID NO: 1211709 - DNA, 15 bp, Homo sapiens
acatcccgaattcag

SEQ ID NO: 1211710 - DNA, 15 bp, Homo sapiens
cacatcccgaattca

SEQ ID NO: 1211711 - DNA, 15 bp, Homo sapiens
ccacatcccgaattc

SEQ ID NO: 1211712 - DNA, 15 bp, Homo sapiens
gccacatcccgaatt

SEQ ID NO: 1211713 - DNA, 15 bp, Homo sapiens
tgccacatcccgaat

SEQ ID NO: 1211714 - DNA, 15 bp, Homo sapiens
ctgccacatcccgaa

SEQ ID NO: 1211715 - DNA, 15 bp, Homo sapiens
cctgccacatcccga

SEQ ID NO: 1211716 - DNA, 15 bp, Homo sapiens
tcctgccacatcccg

SEQ ID NO: 1211717 - DNA, 15 bp, Homo sapiens
atcctgccacatccc

SEQ ID NO: 1211718 - DNA, 15 bp, Homo sapiens
aatcctgccacatcc

SEQ ID NO: 1211719 - DNA, 15 bp, Homo sapiens
aaatcctgccacatc

SEQ ID NO: 1211720 - DNA, 15 bp, Homo sapiens
caaatcctgccacat

SEQ ID NO: 1211721 - DNA, 15 bp, Homo sapiens
tcaaatcctgccaca

SEQ ID NO: 1211722 - DNA, 15 bp, Homo sapiens
ttcaaatcctgccac

SEQ ID NO: 1211723 - DNA, 15 bp, Homo sapiens
cttcaaatcctgcca

SEQ ID NO: 1211724 - DNA, 15 bp, Homo sapiens
gcttcaaatcctgcc

SEQ ID NO: 1211725 - DNA, 15 bp, Homo sapiens
tgcttcaaatcctgc

SEQ ID NO: 1211726 - DNA, 15 bp, Homo sapiens
ctgcttcaaatcctg

SEQ ID NO: 1211727 - DNA, 15 bp, Homo sapiens
cctgcttcaaatcct

SEQ ID NO: 1211728 - DNA, 15 bp, Homo sapiens
tcctgcttcaaatcc

SEQ ID NO: 1211729 - DNA, 15 bp, Homo sapiens
ctcctgcttcaaatc

SEQ ID NO: 1211730 - DNA, 15 bp, Homo sapiens
cctcctgcttcaaat

SEQ ID NO: 1211731 - DNA, 15 bp, Homo sapiens
gcctcctgcttcaaa

SEQ ID NO: 1211732 - DNA, 15 bp, Homo sapiens
agcctcctgcttcaa

SEQ ID NO: 1211733 - DNA, 15 bp, Homo sapiens
tagcctcctgcttca

SEQ ID NO: 1211734 - DNA, 15 bp, Homo sapiens
ttagcctcctgcttc

SEQ ID NO: 1211735 - DNA, 15 bp, Homo sapiens
tttagcctcctgctt

SEQ ID NO: 1211736 - DNA, 15 bp, Homo sapiens
gtttagcctcctgct

SEQ ID NO: 1211737 - DNA, 15 bp, Homo sapiens
agtttagcctcctgc

SEQ ID NO: 1211738 - DNA, 15 bp, Homo sapiens
cagtttagcctcctg

SEQ ID NO: 1211739 - DNA, 15 bp, Homo sapiens
ccagtttagcctcct

SEQ ID NO: 1211740 - DNA, 15 bp, Homo sapiens
tccagtttagcctcc

SEQ ID NO: 1211741 - DNA, 15 bp, Homo sapiens
ttccagtttagcctc

SEQ ID NO: 1211742 - DNA, 15 bp, Homo sapiens
cttccagtttagcct

SEQ ID NO: 1211743 - DNA, 15 bp, Homo sapiens
tcttccagtttagcc

SEQ ID NO: 1211744 - DNA, 15 bp, Homo sapiens
gtcttccagtttagc

SEQ ID NO: 1211745 - DNA, 15 bp, Homo sapiens
tgtcttccagtttag

SEQ ID NO: 1211746 - DNA, 15 bp, Homo sapiens
ttgtcttccagttta

SEQ ID NO: 1211747 - DNA, 15 bp, Homo sapiens
cttgtcttccagttt

SEQ ID NO: 1211748 - DNA, 15 bp, Homo sapiens
gcttgtcttccagtt

SEQ ID NO: 1211749 - DNA, 15 bp, Homo sapiens
cgcttgtcttccagt

SEQ ID NO: 1211750 - DNA, 15 bp, Homo sapiens
tcgcttgtcttccag

SEQ ID NO: 1211751 - DNA, 15 bp, Homo sapiens
ctcgcttgtcttcca

SEQ ID NO: 1211752 - DNA, 15 bp, Homo sapiens
tctcgcttgtcttcc

SEQ ID NO: 1211753 - DNA, 15 bp, Homo sapiens
ttctcgcttgtcttc

SEQ ID NO: 1211754 - DNA, 15 bp, Homo sapiens
cttctcgcttgtctt

SEQ ID NO: 1211755 - DNA, 15 bp, Homo sapiens
gcttctcgcttgtct

SEQ ID NO: 1211756 - DNA, 15 bp, Homo sapiens
tgcttctcgcttgtc

SEQ ID NO: 1211757 - DNA, 15 bp, Homo sapiens
ctgcttctcgcttgt

SEQ ID NO: 1211758 - DNA, 15 bp, Homo sapiens
tctgcttctcgcttg

SEQ ID NO: 1211759 - DNA, 15 bp, Homo sapiens
atctgcttctcgctt

SEQ ID NO: 1211760 - DNA, 15 bp, Homo sapiens
gatctgcttctcgct

SEQ ID NO: 1211761 - DNA, 15 bp, Homo sapiens
ggatctgcttctcgc

SEQ ID NO: 1211762 - DNA, 15 bp, Homo sapiens
gggatctgcttctcg

SEQ ID NO: 1211763 - DNA, 15 bp, Homo sapiens
ggggatctgcttctc

SEQ ID NO: 1211764 - DNA, 15 bp, Homo sapiens
tggggatctgcttct

SEQ ID NO: 1211765 - DNA, 15 bp, Homo sapiens
gtggggatctgcttc

SEQ ID NO: 1211766 - DNA, 15 bp, Homo sapiens
agtggggatctgctt

SEQ ID NO: 1211767 - DNA, 15 bp, Homo sapiens
gagtggggatctgct

SEQ ID NO: 1211768 - DNA, 15 bp, Homo sapiens
ggagtggggatctgc

SEQ ID NO: 1211769 - DNA, 15 bp, Homo sapiens
gggagtggggatctg

SEQ ID NO: 1211770 - DNA, 15 bp, Homo sapiens
tgggagtggggatct

SEQ ID NO: 1211771 - DNA, 15 bp, Homo sapiens
gtgggagtggggatc

SEQ ID NO: 1211772 - DNA, 15 bp, Homo sapiens
ggtgggagtggggat

SEQ ID NO: 1211773 - DNA, 15 bp, Homo sapiens
tggtgggagtgggga

SEQ ID NO: 1211774 - DNA, 15 bp, Homo sapiens
gtggtgggagtgggg

SEQ ID NO: 1211775 - DNA, 15 bp, Homo sapiens
ggtggtgggagtggg

SEQ ID NO: 1211776 - DNA, 15 bp, Homo sapiens
aggtggtgggagtgg

SEQ ID NO: 1211777 - DNA, 15 bp, Homo sapiens
gaggtggtgggagtg

SEQ ID NO: 1211778 - DNA, 15 bp, Homo sapiens
tgaggtggtgggagt

SEQ ID NO: 1211779 - DNA, 15 bp, Homo sapiens
gtgaggtggtgggag

SEQ ID NO: 1211780 - DNA, 15 bp, Homo sapiens
ggtgaggtggtggga

SEQ ID NO: 1211781 - DNA, 15 bp, Homo sapiens
gggtgaggtggtggg

SEQ ID NO: 1211782 - DNA, 15 bp, Homo sapiens
ggggtgaggtggtgg

SEQ ID NO: 1211783 - DNA, 15 bp, Homo sapiens
tggggtgaggtggtg

SEQ ID NO: 1211784 - DNA, 15 bp, Homo sapiens
atggggtgaggtggt

SEQ ID NO: 1211785 - DNA, 15 bp, Homo sapiens
gatggggtgaggtgg

SEQ ID NO: 1211786 - DNA, 15 bp, Homo sapiens
ggatggggtgaggtg

SEQ ID NO: 1211787 - DNA, 15 bp, Homo sapiens
aggatggggtgaggt

SEQ ID NO: 1211788 - DNA, 15 bp, Homo sapiens
taggatggggtgagg

SEQ ID NO: 1211789 - DNA, 15 bp, Homo sapiens
gtaggatggggtgag

SEQ ID NO: 1211790 - DNA, 15 bp, Homo sapiens
ggtaggatggggtga

SEQ ID NO: 1211791 - DNA, 15 bp, Homo sapiens
aggtaggatggggtg

SEQ ID NO: 1211792 - DNA, 15 bp, Homo sapiens
aaggtaggatggggt

SEQ ID NO: 1211793 - DNA, 15 bp, Homo sapiens
aaaggtaggatgggg

SEQ ID NO: 1211794 - DNA, 15 bp, Homo sapiens
gaaaggtaggatggg

SEQ ID NO: 1211795 - DNA, 15 bp, Homo sapiens
ggaaaggtaggatgg

SEQ ID NO: 1211796 - DNA, 15 bp, Homo sapiens
tggaaaggtaggatg

SEQ ID NO: 1211797 - DNA, 15 bp, Homo sapiens
atggaaaggtaggat

SEQ ID NO: 1211798 - DNA, 15 bp, Homo sapiens
gatggaaaggtagga

SEQ ID NO: 1211799 - DNA, 15 bp, Homo sapiens
agatggaaaggtagg

SEQ ID NO: 1211800 - DNA, 15 bp, Homo sapiens
aagatggaaaggtag

SEQ ID NO: 1211801 - DNA, 15 bp, Homo sapiens
aaagatggaaaggta

SEQ ID NO: 1211802 - DNA, 15 bp, Homo sapiens
caaagatggaaaggt

SEQ ID NO: 1211803 - DNA, 15 bp, Homo sapiens
gcaaagatggaaagg

SEQ ID NO: 1211804 - DNA, 15 bp, Homo sapiens
ggcaaagatggaaag

SEQ ID NO: 1211805 - DNA, 15 bp, Homo sapiens
aggcaaagatggaaa

SEQ ID NO: 1211806 - DNA, 15 bp, Homo sapiens
caggcaaagatggaa

SEQ ID NO: 1211807 - DNA, 15 bp, Homo sapiens
acaggcaaagatgga

SEQ ID NO: 1211808 - DNA, 15 bp, Homo sapiens
aacaggcaaagatgg

SEQ ID NO: 1211809 - DNA, 15 bp, Homo sapiens
caacaggcaaagatg

SEQ ID NO: 1211810 - DNA, 15 bp, Homo sapiens
acaacaggcaaagat

SEQ ID NO: 1211811 - DNA, 15 bp, Homo sapiens
cacaacaggcaaaga

SEQ ID NO: 1211812 - DNA, 15 bp, Homo sapiens
ccacaacaggcaaag

SEQ ID NO: 1211813 - DNA, 15 bp, Homo sapiens
cccacaacaggcaaa

SEQ ID NO: 1211814 - DNA, 15 bp, Homo sapiens
acccacaacaggcaa

SEQ ID NO: 1211815 - DNA, 15 bp, Homo sapiens
tacccacaacaggca

SEQ ID NO: 1211816 - DNA, 15 bp, Homo sapiens
ctacccacaacaggc

SEQ ID NO: 1211817 - DNA, 15 bp, Homo sapiens
cctacccacaacagg

SEQ ID NO: 1211818 - DNA, 15 bp, Homo sapiens
tcctacccacaacag

SEQ ID NO: 1211819 - DNA, 15 bp, Homo sapiens
ctcctacccacaaca

SEQ ID NO: 1211820 - DNA, 15 bp, Homo sapiens
cctcctacccacaac

SEQ ID NO: 1211821 - DNA, 15 bp, Homo sapiens
ccctcctacccacaa

SEQ ID NO: 1211822 - DNA, 15 bp, Homo sapiens
tccctcctacccaca

SEQ ID NO: 1211823 - DNA, 15 bp, Homo sapiens
ctccctcctacccac

SEQ ID NO: 1211824 - DNA, 15 bp, Homo sapiens
cctccctcctaccca

SEQ ID NO: 1211825 - DNA, 15 bp, Homo sapiens
tcctccctcctaccc

SEQ ID NO: 1211826 - DNA, 15 bp, Homo sapiens
ctcctccctcctacc

SEQ ID NO: 1211827 - DNA, 15 bp, Homo sapiens
tctcctccctcctac

SEQ ID NO: 1211828 - DNA, 15 bp, Homo sapiens
ctctcctccctccta

SEQ ID NO: 1211829 - DNA, 15 bp, Homo sapiens
tctctcctccctcct

SEQ ID NO: 1211830 - DNA, 15 bp, Homo sapiens
ttctctcctccctcc

SEQ ID NO: 1211831 - DNA, 15 bp, Homo sapiens
tttctctcctccctc

SEQ ID NO: 1211832 - DNA, 15 bp, Homo sapiens
ctttctctcctccct

SEQ ID NO: 1211833 - DNA, 15 bp, Homo sapiens
tctttctctcctccc

SEQ ID NO: 1211834 - DNA, 15 bp, Homo sapiens
gtctttctctcctcc

SEQ ID NO: 1211835 - DNA, 15 bp, Homo sapiens
tgtctttctctcctc

SEQ ID NO: 1211836 - DNA, 15 bp, Homo sapiens
ttgtctttctctcct

SEQ ID NO: 1211837 - DNA, 15 bp, Homo sapiens
cttgtctttctctcc

SEQ ID NO: 1211838 - DNA, 15 bp, Homo sapiens
gcttgtctttctctc

SEQ ID NO: 1211839 - DNA, 15 bp, Homo sapiens
tgcttgtctttctct

SEQ ID NO: 1211840 - DNA, 15 bp, Homo sapiens
atgcttgtctttctc

SEQ ID NO: 1211841 - DNA, 15 bp, Homo sapiens
catgcttgtctttct

SEQ ID NO: 1211842 - DNA, 15 bp, Homo sapiens
tcatgcttgtctttc

SEQ ID NO: 1211843 - DNA, 15 bp, Homo sapiens
atcatgcttgtcttt

SEQ ID NO: 1211844 - DNA, 15 bp, Homo sapiens
gatcatgcttgtctt

SEQ ID NO: 1211845 - DNA, 15 bp, Homo sapiens
cgatcatgcttgtct

SEQ ID NO: 1211846 - DNA, 15 bp, Homo sapiens
tcgatcatgcttgtc

SEQ ID NO: 1211847 - DNA, 15 bp, Homo sapiens
ctcgatcatgcttgt

SEQ ID NO: 1211848 - DNA, 15 bp, Homo sapiens
cctcgatcatgcttg

SEQ ID NO: 1211849 - DNA, 15 bp, Homo sapiens
tcctcgatcatgctt

SEQ ID NO: 1211850 - DNA, 15 bp, Homo sapiens
atcctcgatcatgct

SEQ ID NO: 1211851 - DNA, 15 bp, Homo sapiens
aatcctcgatcatgc

SEQ ID NO: 1211852 - DNA, 15 bp, Homo sapiens
gaatcctcgatcatg

SEQ ID NO: 1211853 - DNA, 15 bp, Homo sapiens
ggaatcctcgatcat

SEQ ID NO: 1211854 - DNA, 15 bp, Homo sapiens
tggaatcctcgatca

SEQ ID NO: 1211855 - DNA, 15 bp, Homo sapiens
gtggaatcctcgatc

SEQ ID NO: 1211856 - DNA, 15 bp, Homo sapiens
tgtggaatcctcgat

SEQ ID NO: 1211857 - DNA, 15 bp, Homo sapiens
gtgtggaatcctcga

SEQ ID NO: 1211858 - DNA, 15 bp, Homo sapiens
ggtgtggaatcctcg

SEQ ID NO: 1211859 - DNA, 15 bp, Homo sapiens
gggtgtggaatcctc

SEQ ID NO: 1211860 - DNA, 15 bp, Homo sapiens
tgggtgtggaatcct

SEQ ID NO: 1211861 - DNA, 15 bp, Homo sapiens
ttgggtgtggaatcc

SEQ ID NO: 1211862 - DNA, 15 bp, Homo sapiens
attgggtgtggaatc

SEQ ID NO: 1211863 - DNA, 15 bp, Homo sapiens
cattgggtgtggaat

SEQ ID NO: 1211864 - DNA, 15 bp, Homo sapiens
ccattgggtgtggaa

SEQ ID NO: 1211865 - DNA, 15 bp, Homo sapiens
cccattgggtgtgga

SEQ ID NO: 1211866 - DNA, 15 bp, Homo sapiens
ccccattgggtgtgg

SEQ ID NO: 1211867 - DNA, 15 bp, Homo sapiens
tccccattgggtgtg

SEQ ID NO: 1211868 - DNA, 15 bp, Homo sapiens
ttccccattgggtgt

SEQ ID NO: 1211869 - DNA, 15 bp, Homo sapiens
tttccccattgggtg

SEQ ID NO: 1211870 - DNA, 15 bp, Homo sapiens
ttttccccattgggt

SEQ ID NO: 1211871 - DNA, 15 bp, Homo sapiens
gttttccccattggg

SEQ ID NO: 1211872 - DNA, 15 bp, Homo sapiens
tgttttccccattgg

SEQ ID NO: 1211873 - DNA, 15 bp, Homo sapiens
ttgttttccccattg

SEQ ID NO: 1211874 - DNA, 15 bp, Homo sapiens
gttgttttccccatt

SEQ ID NO: 1211875 - DNA, 15 bp, Homo sapiens
ggttgttttccccat

SEQ ID NO: 1211876 - DNA, 15 bp, Homo sapiens
aggttgttttcccca

SEQ ID NO: 1211877 - DNA, 15 bp, Homo sapiens
caggttgttttcccc

SEQ ID NO: 1211878 - DNA, 15 bp, Homo sapiens
ccaggttgttttccc

SEQ ID NO: 1211879 - DNA, 15 bp, Homo sapiens
tccaggttgttttcc

SEQ ID NO: 1211880 - DNA, 15 bp, Homo sapiens
gtccaggttgttttc

SEQ ID NO: 1211881 - DNA, 15 bp, Homo sapiens
agtccaggttgtttt

SEQ ID NO: 1211882 - DNA, 15 bp, Homo sapiens
cagtccaggttgttt

SEQ ID NO: 1211883 - DNA, 15 bp, Homo sapiens
ccagtccaggttgtt

SEQ ID NO: 1211884 - DNA, 15 bp, Homo sapiens
gccagtccaggttgt

SEQ ID NO: 1211885 - DNA, 15 bp, Homo sapiens
ggccagtccaggttg

SEQ ID NO: 1211886 - DNA, 15 bp, Homo sapiens
aggccagtccaggtt

SEQ ID NO: 1211887 - DNA, 15 bp, Homo sapiens
aaggccagtccaggt

SEQ ID NO: 1211888 - DNA, 15 bp, Homo sapiens
caaggccagtccagg

SEQ ID NO: 1211889 - DNA, 15 bp, Homo sapiens
tcaaggccagtccag

SEQ ID NO: 1211890 - DNA, 15 bp, Homo sapiens
ctcaaggccagtcca

SEQ ID NO: 1211891 - DNA, 15 bp, Homo sapiens
actcaaggccagtcc

SEQ ID NO: 1211892 - DNA, 15 bp, Homo sapiens
aactcaaggccagtc

SEQ ID NO: 1211893 - DNA, 15 bp, Homo sapiens
aaactcaaggccagt

SEQ ID NO: 1211894 - DNA, 15 bp, Homo sapiens
gaaactcaaggccag

SEQ ID NO: 1211895 - DNA, 15 bp, Homo sapiens
ggaaactcaaggcca

SEQ ID NO: 1211896 - DNA, 15 bp, Homo sapiens
tggaaactcaaggcc

SEQ ID NO: 1211897 - DNA, 15 bp, Homo sapiens
ctggaaactcaaggc

SEQ ID NO: 1211898 - DNA, 15 bp, Homo sapiens
cctggaaactcaagg

SEQ ID NO: 1211899 - DNA, 15 bp, Homo sapiens
tcctggaaactcaag

SEQ ID NO: 1211900 - DNA, 15 bp, Homo sapiens
gtcctggaaactcaa

SEQ ID NO: 1211901 - DNA, 15 bp, Homo sapiens
agtcctggaaactca

SEQ ID NO: 1211902 - DNA, 15 bp, Homo sapiens
aagtcctggaaactc

SEQ ID NO: 1211903 - DNA, 15 bp, Homo sapiens
caagtcctggaaact

SEQ ID NO: 1211904 - DNA, 15 bp, Homo sapiens
tcaagtcctggaaac

SEQ ID NO: 1211905 - DNA, 15 bp, Homo sapiens
gtcaagtcctggaaa

SEQ ID NO: 1211906 - DNA, 15 bp, Homo sapiens
agtcaagtcctggaa

SEQ ID NO: 1211907 - DNA, 15 bp, Homo sapiens
gagtcaagtcctgga

SEQ ID NO: 1211908 - DNA, 15 bp, Homo sapiens
cgagtcaagtcctgg

SEQ ID NO: 1211909 - DNA, 15 bp, Homo sapiens
ccgagtcaagtcctg

SEQ ID NO: 1211910 - DNA, 15 bp, Homo sapiens
gccgagtcaagtcct

SEQ ID NO: 1211911 - DNA, 15 bp, Homo sapiens
ggccgagtcaagtcc

SEQ ID NO: 1211912 - DNA, 15 bp, Homo sapiens
tggccgagtcaagtc

SEQ ID NO: 1211913 - DNA, 15 bp, Homo sapiens
ctggccgagtcaagt

SEQ ID NO: 1211914 - DNA, 15 bp, Homo sapiens
tctggccgagtcaag

SEQ ID NO: 1211915 - DNA, 15 bp, Homo sapiens
gtctggccgagtcaa

SEQ ID NO: 1211916 - DNA, 15 bp, Homo sapiens
ggtctggccgagtca

SEQ ID NO: 1211917 - DNA, 15 bp, Homo sapiens
gggtctggccgagtc

SEQ ID NO: 1211918 - DNA, 15 bp, Homo sapiens
tgggtctggccgagt

SEQ ID NO: 1211919 - DNA, 15 bp, Homo sapiens
ttgggtctggccgag

SEQ ID NO: 1211920 - DNA, 15 bp, Homo sapiens
cttgggtctggccga

SEQ ID NO: 1211921 - DNA, 15 bp, Homo sapiens
ccttgggtctggccg

SEQ ID NO: 1211922 - DNA, 15 bp, Homo sapiens
tccttgggtctggcc

SEQ ID NO: 1211923 - DNA, 15 bp, Homo sapiens
ctccttgggtctggc

SEQ ID NO: 1211924 - DNA, 15 bp, Homo sapiens
gctccttgggtctgg

SEQ ID NO: 1211925 - DNA, 15 bp, Homo sapiens
ggctccttgggtctg

SEQ ID NO: 1211926 - DNA, 15 bp, Homo sapiens
gggctccttgggtct

SEQ ID NO: 1211927 - DNA, 15 bp, Homo sapiens
tgggctccttgggtc

SEQ ID NO: 1211928 - DNA, 15 bp, Homo sapiens
gtgggctccttgggt

SEQ ID NO: 1211929 - DNA, 15 bp, Homo sapiens
ggtgggctccttggg

SEQ ID NO: 1211930 - DNA, 15 bp, Homo sapiens
tggtgggctccttgg

SEQ ID NO: 1211931 - DNA, 15 bp, Homo sapiens
atggtgggctccttg

SEQ ID NO: 1211932 - DNA, 15 bp, Homo sapiens
aatggtgggctcctt

SEQ ID NO: 1211933 - DNA, 15 bp, Homo sapiens
aaatggtgggctcct

SEQ ID NO: 1211934 - DNA, 15 bp, Homo sapiens
gaaatggtgggctcc

SEQ ID NO: 1211935 - DNA, 15 bp, Homo sapiens
agaaatggtgggctc

SEQ ID NO: 1211936 - DNA, 15 bp, Homo sapiens
tagaaatggtgggct

SEQ ID NO: 1211937 - DNA, 15 bp, Homo sapiens
ctagaaatggtgggc

SEQ ID NO: 1211938 - DNA, 15 bp, Homo sapiens
actagaaatggtggg

SEQ ID NO: 1211939 - DNA, 15 bp, Homo sapiens
gactagaaatggtgg

SEQ ID NO: 1211940 - DNA, 15 bp, Homo sapiens
tgactagaaatggtg

SEQ ID NO: 1211941 - DNA, 15 bp, Homo sapiens
ctgactagaaatggt

SEQ ID NO: 1211942 - DNA, 15 bp, Homo sapiens
actgactagaaatgg

SEQ ID NO: 1211943 - DNA, 15 bp, Homo sapiens
aactgactagaaatg

SEQ ID NO: 1211944 - DNA, 15 bp, Homo sapiens
gaactgactagaaat

SEQ ID NO: 1211945 - DNA, 15 bp, Homo sapiens
agaactgactagaaa

SEQ ID NO: 1211946 - DNA, 15 bp, Homo sapiens
cagaactgactagaa

SEQ ID NO: 1211947 - DNA, 15 bp, Homo sapiens
gcagaactgactaga

SEQ ID NO: 1211948 - DNA, 15 bp, Homo sapiens
tgcagaactgactag

SEQ ID NO: 1211949 - DNA, 15 bp, Homo sapiens
ttgcagaactgacta

SEQ ID NO: 1211950 - DNA, 15 bp, Homo sapiens
gttgcagaactgact

SEQ ID NO: 1211951 - DNA, 15 bp, Homo sapiens
ggttgcagaactgac

SEQ ID NO: 1211952 - DNA, 15 bp, Homo sapiens
tggttgcagaactga

SEQ ID NO: 1211953 - DNA, 15 bp, Homo sapiens
gtggttgcagaactg

SEQ ID NO: 1211954 - DNA, 15 bp, Homo sapiens
ggtggttgcagaact

SEQ ID NO: 1211955 - DNA, 15 bp, Homo sapiens
tggtggttgcagaac

SEQ ID NO: 1211956 - DNA, 15 bp, Homo sapiens
gtggtggttgcagaa

SEQ ID NO: 1211957 - DNA, 15 bp, Homo sapiens
tgtggtggttgcaga

SEQ ID NO: 1211958 - DNA, 15 bp, Homo sapiens
atgtggtggttgcag

SEQ ID NO: 1211959 - DNA, 15 bp, Homo sapiens
gatgtggtggttgca

SEQ ID NO: 1211960 - DNA, 15 bp, Homo sapiens
agatgtggtggttgc

SEQ ID NO: 1211961 - DNA, 15 bp, Homo sapiens
cagatgtggtggttg

SEQ ID NO: 1211962 - DNA, 15 bp, Homo sapiens
tcagatgtggtggtt

SEQ ID NO: 1211963 - DNA, 15 bp, Homo sapiens
gtcagatgtggtggt

SEQ ID NO: 1211964 - DNA, 15 bp, Homo sapiens
ggtcagatgtggtgg

SEQ ID NO: 1211965 - DNA, 15 bp, Homo sapiens
tggtcagatgtggtg

SEQ ID NO: 1211966 - DNA, 15 bp, Homo sapiens
ctggtcagatgtggt

SEQ ID NO: 1211967 - DNA, 15 bp, Homo sapiens
gctggtcagatgtgg

SEQ ID NO: 1211968 - DNA, 15 bp, Homo sapiens
agctggtcagatgtg

SEQ ID NO: 1211969 - DNA, 15 bp, Homo sapiens
gagctggtcagatgt

SEQ ID NO: 1211970 - DNA, 15 bp, Homo sapiens
agagctggtcagatg

SEQ ID NO: 1211971 - DNA, 15 bp, Homo sapiens
cagagctggtcagat

SEQ ID NO: 1211972 - DNA, 15 bp, Homo sapiens
gcagagctggtcaga

SEQ ID NO: 1211973 - DNA, 15 bp, Homo sapiens
agcagagctggtcag

SEQ ID NO: 1211974 - DNA, 15 bp, Homo sapiens
gagcagagctggtca

SEQ ID NO: 1211975 - DNA, 15 bp, Homo sapiens
agagcagagctggtc

SEQ ID NO: 1211976 - DNA, 15 bp, Homo sapiens
gagagcagagctggt

SEQ ID NO: 1211977 - DNA, 15 bp, Homo sapiens
agagagcagagctgg

SEQ ID NO: 1211978 - DNA, 15 bp, Homo sapiens
cagagagcagagctg

SEQ ID NO: 1211979 - DNA, 15 bp, Homo sapiens
tcagagagcagagct

SEQ ID NO: 1211980 - DNA, 15 bp, Homo sapiens
ttcagagagcagagc

SEQ ID NO: 1211981 - DNA, 15 bp, Homo sapiens
attcagagagcagag

SEQ ID NO: 1211982 - DNA, 15 bp, Homo sapiens
tattcagagagcaga

SEQ ID NO: 1211983 - DNA, 15 bp, Homo sapiens
gtattcagagagcag

SEQ ID NO: 1211984 - DNA, 15 bp, Homo sapiens
ggtattcagagagca

SEQ ID NO: 1211985 - DNA, 15 bp, Homo sapiens
gggtattcagagagc

SEQ ID NO: 1211986 - DNA, 15 bp, Homo sapiens
agggtattcagagag

SEQ ID NO: 1211987 - DNA, 15 bp, Homo sapiens
cagggtattcagaga

SEQ ID NO: 1211988 - DNA, 15 bp, Homo sapiens
acagggtattcagag

SEQ ID NO: 1211989 - DNA, 15 bp, Homo sapiens
cacagggtattcaga

SEQ ID NO: 1211990 - DNA, 15 bp, Homo sapiens
ccacagggtattcag

SEQ ID NO: 1211991 - DNA, 15 bp, Homo sapiens
cccacagggtattca

SEQ ID NO: 1211992 - DNA, 15 bp, Homo sapiens
ccccacagggtattc

SEQ ID NO: 1211993 - DNA, 15 bp, Homo sapiens
gccccacagggtatt

SEQ ID NO: 1211994 - DNA, 15 bp, Homo sapiens
ggccccacagggtat

SEQ ID NO: 1211995 - DNA, 15 bp, Homo sapiens
gggccccacagggta

SEQ ID NO: 1211996 - DNA, 15 bp, Homo sapiens
tgggccccacagggt

SEQ ID NO: 1211997 - DNA, 15 bp, Homo sapiens
gtgggccccacaggg

SEQ ID NO: 1211998 - DNA, 15 bp, Homo sapiens
ggtgggccccacagg

SEQ ID NO: 1211999 - DNA, 15 bp, Homo sapiens
tggtgggccccacag

SEQ ID NO: 1212000 - DNA, 15 bp, Homo sapiens
gtggtgggccccaca

SEQ ID NO: 1212001 - DNA, 15 bp, Homo sapiens
agtggtgggccccac

SEQ ID NO: 1212002 - DNA, 15 bp, Homo sapiens
aagtggtgggcccca

SEQ ID NO: 1212003 - DNA, 15 bp, Homo sapiens
gaagtggtgggcccc

SEQ ID NO: 1212004 - DNA, 15 bp, Homo sapiens
cgaagtggtgggccc

SEQ ID NO: 1212005 - DNA, 15 bp, Homo sapiens
ccgaagtggtgggcc

SEQ ID NO: 1212006 - DNA, 15 bp, Homo sapiens
cccgaagtggtgggc

SEQ ID NO: 1212007 - DNA, 15 bp, Homo sapiens
tcccgaagtggtggg

SEQ ID NO: 1212008 - DNA, 15 bp, Homo sapiens
ttcccgaagtggtgg

SEQ ID NO: 1212009 - DNA, 15 bp, Homo sapiens
tttcccgaagtggtg

SEQ ID NO: 1212010 - DNA, 15 bp, Homo sapiens
atttcccgaagtggt

SEQ ID NO: 1212011 - DNA, 15 bp, Homo sapiens
catttcccgaagtgg

SEQ ID NO: 1212012 - DNA, 15 bp, Homo sapiens
acatttcccgaagtg

SEQ ID NO: 1212013 - DNA, 15 bp, Homo sapiens
aacatttcccgaagt

SEQ ID NO: 1212014 - DNA, 15 bp, Homo sapiens
aaacatttcccgaag

SEQ ID NO: 1212015 - DNA, 15 bp, Homo sapiens
taaacatttcccgaa

SEQ ID NO: 1212016 - DNA, 15 bp, Homo sapiens
ttaaacatttcccga

SEQ ID NO: 1212017 - DNA, 15 bp, Homo sapiens
tttaaacatttcccg

SEQ ID NO: 1212018 - DNA, 15 bp, Homo sapiens
ctttaaacatttccc

SEQ ID NO: 1212019 - DNA, 15 bp, Homo sapiens
gctttaaacatttcc

SEQ ID NO: 1212020 - DNA, 15 bp, Homo sapiens
ggctttaaacatttc

SEQ ID NO: 1212021 - DNA, 15 bp, Homo sapiens
aggctttaaacattt

SEQ ID NO: 1212022 - DNA, 15 bp, Homo sapiens
caggctttaaacatt

SEQ ID NO: 1212023 - DNA, 15 bp, Homo sapiens
tcaggctttaaacat

SEQ ID NO: 1212024 - DNA, 15 bp, Homo sapiens
ttcaggctttaaaca

SEQ ID NO: 1212025 - DNA, 15 bp, Homo sapiens
attcaggctttaaac

SEQ ID NO: 1212026 - DNA, 15 bp, Homo sapiens
tattcaggctttaaa

SEQ ID NO: 1212027 - DNA, 15 bp, Homo sapiens
ctattcaggctttaa

SEQ ID NO: 1212028 - DNA, 15 bp, Homo sapiens
tctattcaggcttta

SEQ ID NO: 1212029 - DNA, 15 bp, Homo sapiens
ttctattcaggcttt

SEQ ID NO: 1212030 - DNA, 15 bp, Homo sapiens
attctattcaggctt

SEQ ID NO: 1212031 - DNA, 15 bp, Homo sapiens
tattctattcaggct

SEQ ID NO: 1212032 - DNA, 15 bp, Homo sapiens
ctattctattcaggc

SEQ ID NO: 1212033 - DNA, 15 bp, Homo sapiens
tctattctattcagg

SEQ ID NO: 1212034 - DNA, 15 bp, Homo sapiens
ttctattctattcag

SEQ ID NO: 1212035 - DNA, 15 bp, Homo sapiens
tttctattctattca

SEQ ID NO: 1212036 - DNA, 15 bp, Homo sapiens
ctttctattctattc

SEQ ID NO: 1212037 - DNA, 15 bp, Homo sapiens
actttctattctatt

SEQ ID NO: 1212038 - DNA, 15 bp, Homo sapiens
gactttctattctat

SEQ ID NO: 1212039 - DNA, 15 bp, Homo sapiens
tgactttctattcta

SEQ ID NO: 1212040 - DNA, 15 bp, Homo sapiens
ctgactttctattct

SEQ ID NO: 1212041 - DNA, 15 bp, Homo sapiens
gctgactttctattc

SEQ ID NO: 1212042 - DNA, 15 bp, Homo sapiens
cgctgactttctatt

SEQ ID NO: 1212043 - DNA, 15 bp, Homo sapiens
ccgctgactttctat

SEQ ID NO: 1212044 - DNA, 15 bp, Homo sapiens
cccgctgactttcta

SEQ ID NO: 1212045 - DNA, 15 bp, Homo sapiens
tcccgctgactttct

SEQ ID NO: 1212046 - DNA, 15 bp, Homo sapiens
gtcccgctgactttc

SEQ ID NO: 1212047 - DNA, 15 bp, Homo sapiens
agtcccgctgacttt

SEQ ID NO: 1212048 - DNA, 15 bp, Homo sapiens
aagtcccgctgactt

SEQ ID NO: 1212049 - DNA, 15 bp, Homo sapiens
aaagtcccgctgact

SEQ ID NO: 1212050 - DNA, 15 bp, Homo sapiens
caaagtcccgctgac

SEQ ID NO: 1212051 - DNA, 15 bp, Homo sapiens
ccaaagtcccgctga

SEQ ID NO: 1212052 - DNA, 15 bp, Homo sapiens
cccaaagtcccgctg

SEQ ID NO: 1212053 - DNA, 15 bp, Homo sapiens
tcccaaagtcccgct

SEQ ID NO: 1212054 - DNA, 15 bp, Homo sapiens
ttcccaaagtcccgc

SEQ ID NO: 1212055 - DNA, 15 bp, Homo sapiens
gttcccaaagtcccg

SEQ ID NO: 1212056 - DNA, 15 bp, Homo sapiens
tgttcccaaagtccc

SEQ ID NO: 1212057 - DNA, 15 bp, Homo sapiens
gtgttcccaaagtcc

SEQ ID NO: 1212058 - DNA, 15 bp, Homo sapiens
agtgttcccaaagtc

SEQ ID NO: 1212059 - DNA, 15 bp, Homo sapiens
aagtgttcccaaagt

SEQ ID NO: 1212060 - DNA, 15 bp, Homo sapiens
gaagtgttcccaaag

SEQ ID NO: 1212061 - DNA, 15 bp, Homo sapiens
ggaagtgttcccaaa

SEQ ID NO: 1212062 - DNA, 15 bp, Homo sapiens
aggaagtgttcccaa

SEQ ID NO: 1212063 - DNA, 15 bp, Homo sapiens
caggaagtgttccca

SEQ ID NO: 1212064 - DNA, 15 bp, Homo sapiens
gcaggaagtgttccc

SEQ ID NO: 1212065 - DNA, 15 bp, Homo sapiens
ggcaggaagtgttcc

SEQ ID NO: 1212066 - DNA, 15 bp, Homo sapiens
aggcaggaagtgttc

SEQ ID NO: 1212067 - DNA, 15 bp, Homo sapiens
caggcaggaagtgtt

SEQ ID NO: 1212068 - DNA, 15 bp, Homo sapiens
ccaggcaggaagtgt

SEQ ID NO: 1212069 - DNA, 15 bp, Homo sapiens
cccaggcaggaagtg

SEQ ID NO: 1212070 - DNA, 15 bp, Homo sapiens
tcccaggcaggaagt

SEQ ID NO: 1212071 - DNA, 15 bp, Homo sapiens
ctcccaggcaggaag

SEQ ID NO: 1212072 - DNA, 15 bp, Homo sapiens
cctcccaggcaggaa

SEQ ID NO: 1212073 - DNA, 15 bp, Homo sapiens
ccctcccaggcagga

SEQ ID NO: 1212074 - DNA, 15 bp, Homo sapiens
gccctcccaggcagg

SEQ ID NO: 1212075 - DNA, 15 bp, Homo sapiens
agccctcccaggcag

SEQ ID NO: 1212076 - DNA, 15 bp, Homo sapiens
cagccctcccaggca

SEQ ID NO: 1212077 - DNA, 15 bp, Homo sapiens
tcagccctcccaggc

SEQ ID NO: 1212078 - DNA, 15 bp, Homo sapiens
gtcagccctcccagg

SEQ ID NO: 1212079 - DNA, 15 bp, Homo sapiens
cgtcagccctcccag

SEQ ID NO: 1212080 - DNA, 15 bp, Homo sapiens
tcgtcagccctccca

SEQ ID NO: 1212081 - DNA, 15 bp, Homo sapiens
atcgtcagccctccc

SEQ ID NO: 1212082 - DNA, 15 bp, Homo sapiens
aatcgtcagccctcc

SEQ ID NO: 1212083 - DNA, 15 bp, Homo sapiens
gaatcgtcagccctc

SEQ ID NO: 1212084 - DNA, 15 bp, Homo sapiens
tgaatcgtcagccct

SEQ ID NO: 1212085 - DNA, 15 bp, Homo sapiens
ctgaatcgtcagccc

SEQ ID NO: 1212086 - DNA, 15 bp, Homo sapiens
gctgaatcgtcagcc

SEQ ID NO: 1212087 - DNA, 15 bp, Homo sapiens
ggctgaatcgtcagc

SEQ ID NO: 1212088 - DNA, 15 bp, Homo sapiens
tggctgaatcgtcag

SEQ ID NO: 1212089 - DNA, 15 bp, Homo sapiens
gtggctgaatcgtca

SEQ ID NO: 1212090 - DNA, 15 bp, Homo sapiens
ggtggctgaatcgtc

SEQ ID NO: 1212091 - DNA, 15 bp, Homo sapiens
tggtggctgaatcgt

SEQ ID NO: 1212092 - DNA, 15 bp, Homo sapiens
gtggtggctgaatcg

SEQ ID NO: 1212093 - DNA, 15 bp, Homo sapiens
tgtggtggctgaatc

SEQ ID NO: 1212094 - DNA, 15 bp, Homo sapiens
ctgtggtggctgaat

SEQ ID NO: 1212095 - DNA, 15 bp, Homo sapiens
gctgtggtggctgaa

SEQ ID NO: 1212096 - DNA, 15 bp, Homo sapiens
agctgtggtggctga

SEQ ID NO: 1212097 - DNA, 15 bp, Homo sapiens
aagctgtggtggctg

SEQ ID NO: 1212098 - DNA, 15 bp, Homo sapiens
caagctgtggtggct

SEQ ID NO: 1212099 - DNA, 15 bp, Homo sapiens
tcaagctgtggtggc

SEQ ID NO: 1212100 - DNA, 15 bp, Homo sapiens
ctcaagctgtggtgg

SEQ ID NO: 1212101 - DNA, 15 bp, Homo sapiens
tctcaagctgtggtg

SEQ ID NO: 1212102 - DNA, 15 bp, Homo sapiens
ctctcaagctgtggt

SEQ ID NO: 1212103 - DNA, 15 bp, Homo sapiens
cctctcaagctgtgg

SEQ ID NO: 1212104 - DNA, 15 bp, Homo sapiens
gcctctcaagctgtg

SEQ ID NO: 1212105 - DNA, 15 bp, Homo sapiens
tgcctctcaagctgt

SEQ ID NO: 1212106 - DNA, 15 bp, Homo sapiens
ttgcctctcaagctg

SEQ ID NO: 1212107 - DNA, 15 bp, Homo sapiens
tttgcctctcaagct

SEQ ID NO: 1212108 - DNA, 15 bp, Homo sapiens
ctttgcctctcaagc

SEQ ID NO: 1212109 - DNA, 15 bp, Homo sapiens
tctttgcctctcaag

SEQ ID NO: 1212110 - DNA, 15 bp, Homo sapiens
ttctttgcctctcaa

SEQ ID NO: 1212111 - DNA, 15 bp, Homo sapiens
tttctttgcctctca

SEQ ID NO: 1212112 - DNA, 15 bp, Homo sapiens
atttctttgcctctc

SEQ ID NO: 1212113 - DNA, 15 bp, Homo sapiens
catttctttgcctct

SEQ ID NO: 1212114 - DNA, 15 bp, Homo sapiens
gcatttctttgcctc

SEQ ID NO: 1212115 - DNA, 15 bp, Homo sapiens
agcatttctttgcct

SEQ ID NO: 1212116 - DNA, 15 bp, Homo sapiens
tagcatttctttgcc

SEQ ID NO: 1212117 - DNA, 15 bp, Homo sapiens
ctagcatttctttgc

SEQ ID NO: 1212118 - DNA, 15 bp, Homo sapiens
cctagcatttctttg

SEQ ID NO: 1212119 - DNA, 15 bp, Homo sapiens
tcctagcatttcttt

SEQ ID NO: 1212120 - DNA, 15 bp, Homo sapiens
gtcctagcatttctt

SEQ ID NO: 1212121 - DNA, 15 bp, Homo sapiens
ggtcctagcatttct

SEQ ID NO: 1212122 - DNA, 15 bp, Homo sapiens
tggtcctagcatttc

SEQ ID NO: 1212123 - DNA, 15 bp, Homo sapiens
gtggtcctagcattt

SEQ ID NO: 1212124 - DNA, 15 bp, Homo sapiens
tgtggtcctagcatt

SEQ ID NO: 1212125 - DNA, 15 bp, Homo sapiens
gtgtggtcctagcat

SEQ ID NO: 1212126 - DNA, 15 bp, Homo sapiens
ggtgtggtcctagca

SEQ ID NO: 1212127 - DNA, 15 bp, Homo sapiens
tggtgtggtcctagc

SEQ ID NO: 1212128 - DNA, 15 bp, Homo sapiens
ctggtgtggtcctag

SEQ ID NO: 1212129 - DNA, 15 bp, Homo sapiens
tctggtgtggtccta

SEQ ID NO: 1212130 - DNA, 15 bp, Homo sapiens
ttctggtgtggtcct

SEQ ID NO: 1212131 - DNA, 15 bp, Homo sapiens
tttctggtgtggtcc

SEQ ID NO: 1212132 - DNA, 15 bp, Homo sapiens
atttctggtgtggtc

SEQ ID NO: 1212133 - DNA, 15 bp, Homo sapiens
catttctggtgtggt

SEQ ID NO: 1212134 - DNA, 15 bp, Homo sapiens
gcatttctggtgtgg

SEQ ID NO: 1212135 - DNA, 15 bp, Homo sapiens
tgcatttctggtgtg

SEQ ID NO: 1212136 - DNA, 15 bp, Homo sapiens
gtgcatttctggtgt

SEQ ID NO: 1212137 - DNA, 15 bp, Homo sapiens
cgtgcatttctggtg

SEQ ID NO: 1212138 - DNA, 15 bp, Homo sapiens
gcgtgcatttctggt

SEQ ID NO: 1212139 - DNA, 15 bp, Homo sapiens
tgcgtgcatttctgg

SEQ ID NO: 1212140 - DNA, 15 bp, Homo sapiens
ctgcgtgcatttctg

SEQ ID NO: 1212141 - DNA, 15 bp, Homo sapiens
cctgcgtgcatttct

SEQ ID NO: 1212142 - DNA, 15 bp, Homo sapiens
gcctgcgtgcatttc

SEQ ID NO: 1212143 - DNA, 15 bp, Homo sapiens
ggcctgcgtgcattt

SEQ ID NO: 1212144 - DNA, 15 bp, Homo sapiens
gggcctgcgtgcatt

SEQ ID NO: 1212145 - DNA, 15 bp, Homo sapiens
agggcctgcgtgcat

SEQ ID NO: 1212146 - DNA, 15 bp, Homo sapiens
cagggcctgcgtgca

SEQ ID NO: 1212147 - DNA, 15 bp, Homo sapiens
gcagggcctgcgtgc

SEQ ID NO: 1212148 - DNA, 15 bp, Homo sapiens
ggcagggcctgcgtg

SEQ ID NO: 1212149 - DNA, 15 bp, Homo sapiens
tggcagggcctgcgt

SEQ ID NO: 1212150 - DNA, 15 bp, Homo sapiens
atggcagggcctgcg

SEQ ID NO: 1212151 - DNA, 15 bp, Homo sapiens
aatggcagggcctgc

SEQ ID NO: 1212152 - DNA, 15 bp, Homo sapiens
aaatggcagggcctg

SEQ ID NO: 1212153 - DNA, 15 bp, Homo sapiens
gaaatggcagggcct

SEQ ID NO: 1212154 - DNA, 15 bp, Homo sapiens
agaaatggcagggcc

SEQ ID NO: 1212155 - DNA, 15 bp, Homo sapiens
cagaaatggcagggc

SEQ ID NO: 1212156 - DNA, 15 bp, Homo sapiens
gcagaaatggcaggg

SEQ ID NO: 1212157 - DNA, 15 bp, Homo sapiens
agcagaaatggcagg

SEQ ID NO: 1212158 - DNA, 15 bp, Homo sapiens
aagcagaaatggcag

SEQ ID NO: 1212159 - DNA, 15 bp, Homo sapiens
gaagcagaaatggca

SEQ ID NO: 1212160 - DNA, 15 bp, Homo sapiens
ggaagcagaaatggc

SEQ ID NO: 1212161 - DNA, 15 bp, Homo sapiens
gggaagcagaaatgg

SEQ ID NO: 1212162 - DNA, 15 bp, Homo sapiens
agggaagcagaaatg

SEQ ID NO: 1212163 - DNA, 15 bp, Homo sapiens
aagggaagcagaaat

SEQ ID NO: 1212164 - DNA, 15 bp, Homo sapiens
gaagggaagcagaaa

SEQ ID NO: 1212165 - DNA, 15 bp, Homo sapiens
agaagggaagcagaa

SEQ ID NO: 1212166 - DNA, 15 bp, Homo sapiens
cagaagggaagcaga

SEQ ID NO: 1212167 - DNA, 15 bp, Homo sapiens
acagaagggaagcag

SEQ ID NO: 1212168 - DNA, 15 bp, Homo sapiens
gacagaagggaagca

SEQ ID NO: 1212169 - DNA, 15 bp, Homo sapiens
ggacagaagggaagc

SEQ ID NO: 1212170 - DNA, 15 bp, Homo sapiens
cggacagaagggaag

SEQ ID NO: 1212171 - DNA, 15 bp, Homo sapiens
tcggacagaagggaa

SEQ ID NO: 1212172 - DNA, 15 bp, Homo sapiens
atcggacagaaggga

SEQ ID NO: 1212173 - DNA, 15 bp, Homo sapiens
gatcggacagaaggg

SEQ ID NO: 1212174 - DNA, 15 bp, Homo sapiens
ggatcggacagaagg

SEQ ID NO: 1212175 - DNA, 15 bp, Homo sapiens
aggatcggacagaag

SEQ ID NO: 1212176 - DNA, 15 bp, Homo sapiens
caggatcggacagaa

SEQ ID NO: 1212177 - DNA, 15 bp, Homo sapiens
acaggatcggacaga

SEQ ID NO: 1212178 - DNA, 15 bp, Homo sapiens
gacaggatcggacag

SEQ ID NO: 1212179 - DNA, 15 bp, Homo sapiens
tgacaggatcggaca

SEQ ID NO: 1212180 - DNA, 15 bp, Homo sapiens
gtgacaggatcggac

SEQ ID NO: 1212181 - DNA, 15 bp, Homo sapiens
agtgacaggatcgga

SEQ ID NO: 1212182 - DNA, 15 bp, Homo sapiens
gagtgacaggatcgg

SEQ ID NO: 1212183 - DNA, 15 bp, Homo sapiens
ggagtgacaggatcg

SEQ ID NO: 1212184 - DNA, 15 bp, Homo sapiens
tggagtgacaggatc

SEQ ID NO: 1212185 - DNA, 15 bp, Homo sapiens
ctggagtgacaggat

SEQ ID NO: 1212186 - DNA, 15 bp, Homo sapiens
cctggagtgacagga

SEQ ID NO: 1212187 - DNA, 15 bp, Homo sapiens
acctggagtgacagg

SEQ ID NO: 1212188 - DNA, 15 bp, Homo sapiens
cacctggagtgacag

SEQ ID NO: 1212189 - DNA, 15 bp, Homo sapiens
gcacctggagtgaca

SEQ ID NO: 1212190 - DNA, 15 bp, Homo sapiens
agcacctggagtgac

SEQ ID NO: 1212191 - DNA, 15 bp, Homo sapiens
cagcacctggagtga

SEQ ID NO: 1212192 - DNA, 15 bp, Homo sapiens
tcagcacctggagtg

SEQ ID NO: 1212193 - DNA, 15 bp, Homo sapiens
ctcagcacctggagt

SEQ ID NO: 1212194 - DNA, 15 bp, Homo sapiens
actcagcacctggag

SEQ ID NO: 1212195 - DNA, 15 bp, Homo sapiens
cactcagcacctgga

SEQ ID NO: 1212196 - DNA, 15 bp, Homo sapiens
tcactcagcacctgg

SEQ ID NO: 1212197 - DNA, 15 bp, Homo sapiens
gtcactcagcacctg

SEQ ID NO: 1212198 - DNA, 15 bp, Homo sapiens
cgtcactcagcacct

SEQ ID NO: 1212199 - DNA, 15 bp, Homo sapiens
ccgtcactcagcacc

SEQ ID NO: 1212200 - DNA, 15 bp, Homo sapiens
accgtcactcagcac

SEQ ID NO: 1212201 - DNA, 15 bp, Homo sapiens
gaccgtcactcagca

SEQ ID NO: 1212202 - DNA, 15 bp, Homo sapiens
agaccgtcactcagc

SEQ ID NO: 1212203 - DNA, 15 bp, Homo sapiens
cagaccgtcactcag

SEQ ID NO: 1212204 - DNA, 15 bp, Homo sapiens
gcagaccgtcactca

SEQ ID NO: 1212205 - DNA, 15 bp, Homo sapiens
ggcagaccgtcactc

SEQ ID NO: 1212206 - DNA, 15 bp, Homo sapiens
gggcagaccgtcact

SEQ ID NO: 1212207 - DNA, 15 bp, Homo sapiens
cgggcagaccgtcac

SEQ ID NO: 1212208 - DNA, 15 bp, Homo sapiens
acgggcagaccgtca

SEQ ID NO: 1212209 - DNA, 15 bp, Homo sapiens
tacgggcagaccgtc

SEQ ID NO: 1212210 - DNA, 15 bp, Homo sapiens
ttacgggcagaccgt

SEQ ID NO: 1212211 - DNA, 15 bp, Homo sapiens
gttacgggcagaccg

SEQ ID NO: 1212212 - DNA, 15 bp, Homo sapiens
tgttacgggcagacc

SEQ ID NO: 1212213 - DNA, 15 bp, Homo sapiens
gtgttacgggcagac

SEQ ID NO: 1212214 - DNA, 15 bp, Homo sapiens
ggtgttacgggcaga

SEQ ID NO: 1212215 - DNA, 15 bp, Homo sapiens
aggtgttacgggcag

SEQ ID NO: 1212216 - DNA, 15 bp, Homo sapiens
caggtgttacgggca

SEQ ID NO: 1212217 - DNA, 15 bp, Homo sapiens
acaggtgttacgggc

SEQ ID NO: 1212218 - DNA, 15 bp, Homo sapiens
cacaggtgttacggg

SEQ ID NO: 1212219 - DNA, 15 bp, Homo sapiens
ccacaggtgttacgg

SEQ ID NO: 1212220 - DNA, 15 bp, Homo sapiens
cccacaggtgttacg

SEQ ID NO: 1212221 - DNA, 15 bp, Homo sapiens
acccacaggtgttac

SEQ ID NO: 1212222 - DNA, 15 bp, Homo sapiens
gacccacaggtgtta

SEQ ID NO: 1212223 - DNA, 15 bp, Homo sapiens
agacccacaggtgtt

SEQ ID NO: 1212224 - DNA, 15 bp, Homo sapiens
aagacccacaggtgt

SEQ ID NO: 1212225 - DNA, 15 bp, Homo sapiens
caagacccacaggtg

SEQ ID NO: 1212226 - DNA, 15 bp, Homo sapiens
ccaagacccacaggt

SEQ ID NO: 1212227 - DNA, 15 bp, Homo sapiens
tccaagacccacagg

SEQ ID NO: 1212228 - DNA, 15 bp, Homo sapiens
ttccaagacccacag

SEQ ID NO: 1212229 - DNA, 15 bp, Homo sapiens
gttccaagacccaca

SEQ ID NO: 1212230 - DNA, 15 bp, Homo sapiens
tgttccaagacccac

SEQ ID NO: 1212231 - DNA, 15 bp, Homo sapiens
ttgttccaagaccca

SEQ ID NO: 1212232 - DNA, 15 bp, Homo sapiens
cttgttccaagaccc

SEQ ID NO: 1212233 - DNA, 15 bp, Homo sapiens
tcttgttccaagacc

SEQ ID NO: 1212234 - DNA, 15 bp, Homo sapiens
ctcttgttccaagac

SEQ ID NO: 1212235 - DNA, 15 bp, Homo sapiens
cctcttgttccaaga

SEQ ID NO: 1212236 - DNA, 15 bp, Homo sapiens
tcctcttgttccaag

SEQ ID NO: 1212237 - DNA, 15 bp, Homo sapiens
atcctcttgttccaa

SEQ ID NO: 1212238 - DNA, 15 bp, Homo sapiens
catcctcttgttcca

SEQ ID NO: 1212239 - DNA, 15 bp, Homo sapiens
tcatcctcttgttcc

SEQ ID NO: 1212240 - DNA, 15 bp, Homo sapiens
ctcatcctcttgttc

SEQ ID NO: 1212241 - DNA, 15 bp, Homo sapiens
cctcatcctcttgtt

SEQ ID NO: 1212242 - DNA, 15 bp, Homo sapiens
ccctcatcctcttgt

SEQ ID NO: 1212243 - DNA, 15 bp, Homo sapiens
accctcatcctcttg

SEQ ID NO: 1212244 - DNA, 15 bp, Homo sapiens
gaccctcatcctctt

SEQ ID NO: 1212245 - DNA, 15 bp, Homo sapiens
tgaccctcatcctct

SEQ ID NO: 1212246 - DNA, 15 bp, Homo sapiens
gtgaccctcatcctc

SEQ ID NO: 1212247 - DNA, 15 bp, Homo sapiens
tgtgaccctcatcct

SEQ ID NO: 1212248 - DNA, 15 bp, Homo sapiens
atgtgaccctcatcc

SEQ ID NO: 1212249 - DNA, 15 bp, Homo sapiens
aatgtgaccctcatc

SEQ ID NO: 1212250 - DNA, 15 bp, Homo sapiens
aaatgtgaccctcat

SEQ ID NO: 1212251 - DNA, 15 bp, Homo sapiens
gaaatgtgaccctca

SEQ ID NO: 1212252 - DNA, 15 bp, Homo sapiens
ggaaatgtgaccctc

SEQ ID NO: 1212253 - DNA, 15 bp, Homo sapiens
aggaaatgtgaccct

SEQ ID NO: 1212254 - DNA, 15 bp, Homo sapiens
taggaaatgtgaccc

SEQ ID NO: 1212255 - DNA, 15 bp, Homo sapiens
ataggaaatgtgacc

SEQ ID NO: 1212256 - DNA, 15 bp, Homo sapiens
cataggaaatgtgac

SEQ ID NO: 1212257 - DNA, 15 bp, Homo sapiens
acataggaaatgtga

SEQ ID NO: 1212258 - DNA, 15 bp, Homo sapiens
gacataggaaatgtg

SEQ ID NO: 1212259 - DNA, 15 bp, Homo sapiens
agacataggaaatgt

SEQ ID NO: 1212260 - DNA, 15 bp, Homo sapiens
tagacataggaaatg

SEQ ID NO: 1212261 - DNA, 15 bp, Homo sapiens
ctagacataggaaat

SEQ ID NO: 1212262 - DNA, 15 bp, Homo sapiens
tctagacataggaaa

SEQ ID NO: 1212263 - DNA, 15 bp, Homo sapiens
atctagacataggaa

SEQ ID NO: 1212264 - DNA, 15 bp, Homo sapiens
tatctagacatagga

SEQ ID NO: 1212265 - DNA, 15 bp, Homo sapiens
atatctagacatagg

SEQ ID NO: 1212266 - DNA, 15 bp, Homo sapiens
tatatctagacatag

SEQ ID NO: 1212267 - DNA, 15 bp, Homo sapiens
atatatctagacata

SEQ ID NO: 1212268 - DNA, 15 bp, Homo sapiens
tatatatctagacat

SEQ ID NO: 1212269 - DNA, 15 bp, Homo sapiens
ttatatatctagaca

SEQ ID NO: 1212270 - DNA, 15 bp, Homo sapiens
tttatatatctagac

SEQ ID NO: 1212271 - DNA, 15 bp, Homo sapiens
ttttatatatctaga

SEQ ID NO: 1212272 - DNA, 15 bp, Homo sapiens
cttttatatatctag

SEQ ID NO: 1212273 - DNA, 15 bp, Homo sapiens
acttttatatatcta

SEQ ID NO: 1212274 - DNA, 15 bp, Homo sapiens
gacttttatatatct

SEQ ID NO: 1212275 - DNA, 15 bp, Homo sapiens
tgacttttatatatc

SEQ ID NO: 1212276 - DNA, 15 bp, Homo sapiens
atgacttttatatat

SEQ ID NO: 1212277 - DNA, 15 bp, Homo sapiens
gatgacttttatata

SEQ ID NO: 1212278 - DNA, 15 bp, Homo sapiens
tgatgacttttatat

SEQ ID NO: 1212279 - DNA, 15 bp, Homo sapiens
ctgatgacttttata

SEQ ID NO: 1212280 - DNA, 15 bp, Homo sapiens
actgatgacttttat

SEQ ID NO: 1212281 - DNA, 15 bp, Homo sapiens
gactgatgactttta

SEQ ID NO: 1212282 - DNA, 15 bp, Homo sapiens
tgactgatgactttt

SEQ ID NO: 1212283 - DNA, 15 bp, Homo sapiens
ttgactgatgacttt

SEQ ID NO: 1212284 - DNA, 15 bp, Homo sapiens
cttgactgatgactt

SEQ ID NO: 1212285 - DNA, 15 bp, Homo sapiens
gcttgactgatgact

SEQ ID NO: 1212286 - DNA, 15 bp, Homo sapiens
agcttgactgatgac

SEQ ID NO: 1212287 - DNA, 15 bp, Homo sapiens
tagcttgactgatga

SEQ ID NO: 1212288 - DNA, 15 bp, Homo sapiens
atagcttgactgatg

SEQ ID NO: 1212289 - DNA, 15 bp, Homo sapiens
tatagcttgactgat

SEQ ID NO: 1212290 - DNA, 15 bp, Homo sapiens
ttatagcttgactga

SEQ ID NO: 1212291 - DNA, 15 bp, Homo sapiens
cttatagcttgactg

SEQ ID NO: 1212292 - DNA, 15 bp, Homo sapiens
tcttatagcttgact

SEQ ID NO: 1212293 - DNA, 15 bp, Homo sapiens
ttcttatagcttgac

SEQ ID NO: 1212294 - DNA, 15 bp, Homo sapiens
gttcttatagcttga

SEQ ID NO: 1212295 - DNA, 15 bp, Homo sapiens
tgttcttatagcttg

SEQ ID NO: 1212296 - DNA, 15 bp, Homo sapiens
ctgttcttatagctt

SEQ ID NO: 1212297 - DNA, 15 bp, Homo sapiens
actgttcttatagct

SEQ ID NO: 1212298 - DNA, 15 bp, Homo sapiens
aactgttcttatagc

SEQ ID NO: 1212299 - DNA, 15 bp, Homo sapiens
taactgttcttatag

SEQ ID NO: 1212300 - DNA, 15 bp, Homo sapiens
ttaactgttcttata

SEQ ID NO: 1212301 - DNA, 15 bp, Homo sapiens
tttaactgttcttat

SEQ ID NO: 1212302 - DNA, 15 bp, Homo sapiens
atttaactgttctta

SEQ ID NO: 1212303 - DNA, 15 bp, Homo sapiens
tatttaactgttctt

SEQ ID NO: 1212304 - DNA, 15 bp, Homo sapiens
ttatttaactgttct

SEQ ID NO: 1212305 - DNA, 15 bp, Homo sapiens
tttatttaactgttc

SEQ ID NO: 1212306 - DNA, 15 bp, Homo sapiens
ttttatttaactgtt

SEQ ID NO: 1212307 - DNA, 15 bp, Homo sapiens
attttatttaactgt

SEQ ID NO: 1212308 - DNA, 15 bp, Homo sapiens
tattttatttaactg

SEQ ID NO: 1212309 - DNA, 15 bp, Homo sapiens
ctattttatttaact

SEQ ID NO: 1212310 - DNA, 15 bp, Homo sapiens
actattttatttaac

SEQ ID NO: 1212311 - DNA, 15 bp, Homo sapiens
aactattttatttaa

SEQ ID NO: 1212312 - DNA, 15 bp, Homo sapiens
aaactattttattta

SEQ ID NO: 1212313 - DNA, 15 bp, Homo sapiens
gaaactattttattt

SEQ ID NO: 1212314 - DNA, 15 bp, Homo sapiens
agaaactattttatt

SEQ ID NO: 1212315 - DNA, 15 bp, Homo sapiens
tagaaactattttat

SEQ ID NO: 1212316 - DNA, 15 bp, Homo sapiens
atagaaactatttta

SEQ ID NO: 1212317 - DNA, 15 bp, Homo sapiens
gatagaaactatttt

SEQ ID NO: 1212318 - DNA, 15 bp, Homo sapiens
ggatagaaactattt

SEQ ID NO: 1212319 - DNA, 15 bp, Homo sapiens
aggatagaaactatt

SEQ ID NO: 1212320 - DNA, 15 bp, Homo sapiens
gaggatagaaactat

SEQ ID NO: 1212321 - DNA, 15 bp, Homo sapiens
agaggatagaaacta

SEQ ID NO: 1212322 - DNA, 15 bp, Homo sapiens
aagaggatagaaact

SEQ ID NO: 1212323 - DNA, 15 bp, Homo sapiens
taagaggatagaaac

SEQ ID NO: 1212324 - DNA, 15 bp, Homo sapiens
ataagaggatagaaa

SEQ ID NO: 1212325 - DNA, 15 bp, Homo sapiens
gataagaggatagaa

SEQ ID NO: 1212326 - DNA, 15 bp, Homo sapiens
agataagaggataga

SEQ ID NO: 1212327 - DNA, 15 bp, Homo sapiens
aagataagaggatag

SEQ ID NO: 1212328 - DNA, 15 bp, Homo sapiens
caagataagaggata

SEQ ID NO: 1212329 - DNA, 15 bp, Homo sapiens
tcaagataagaggat

SEQ ID NO: 1212330 - DNA, 15 bp, Homo sapiens
gtcaagataagagga

SEQ ID NO: 1212331 - DNA, 15 bp, Homo sapiens
tgtcaagataagagg

SEQ ID NO: 1212332 - DNA, 15 bp, Homo sapiens
atgtcaagataagag

SEQ ID NO: 1212333 - DNA, 15 bp, Homo sapiens
tatgtcaagataaga

SEQ ID NO: 1212334 - DNA, 15 bp, Homo sapiens
atatgtcaagataag

SEQ ID NO: 1212335 - DNA, 15 bp, Homo sapiens
gatatgtcaagataa

SEQ ID NO: 1212336 - DNA, 15 bp, Homo sapiens
agatatgtcaagata

SEQ ID NO: 1212337 - DNA, 15 bp, Homo sapiens
aagatatgtcaagat

SEQ ID NO: 1212338 - DNA, 15 bp, Homo sapiens
gaagatatgtcaaga

SEQ ID NO: 1212339 - DNA, 15 bp, Homo sapiens
ggaagatatgtcaag

SEQ ID NO: 1212340 - DNA, 15 bp, Homo sapiens
aggaagatatgtcaa

SEQ ID NO: 1212341 - DNA, 15 bp, Homo sapiens
gaggaagatatgtca

SEQ ID NO: 1212342 - DNA, 15 bp, Homo sapiens
tgaggaagatatgtc

SEQ ID NO: 1212343 - DNA, 15 bp, Homo sapiens
gtgaggaagatatgt

SEQ ID NO: 1212344 - DNA, 15 bp, Homo sapiens
tgtgaggaagatatg

SEQ ID NO: 1212345 - DNA, 15 bp, Homo sapiens
ttgtgaggaagatat

SEQ ID NO: 1212346 - DNA, 15 bp, Homo sapiens
gttgtgaggaagata

SEQ ID NO: 1212347 - DNA, 15 bp, Homo sapiens
ggttgtgaggaagat

SEQ ID NO: 1212348 - DNA, 15 bp, Homo sapiens
aggttgtgaggaaga

SEQ ID NO: 1212349 - DNA, 15 bp, Homo sapiens
caggttgtgaggaag

SEQ ID NO: 1212350 - DNA, 15 bp, Homo sapiens
tcaggttgtgaggaa

SEQ ID NO: 1212351 - DNA, 15 bp, Homo sapiens
ttcaggttgtgagga

SEQ ID NO: 1212352 - DNA, 15 bp, Homo sapiens
tttcaggttgtgagg

SEQ ID NO: 1212353 - DNA, 15 bp, Homo sapiens
ctttcaggttgtgag

SEQ ID NO: 1212354 - DNA, 15 bp, Homo sapiens
cctttcaggttgtga

SEQ ID NO: 1212355 - DNA, 15 bp, Homo sapiens
gcctttcaggttgtg

SEQ ID NO: 1212356 - DNA, 15 bp, Homo sapiens
ggcctttcaggttgt

SEQ ID NO: 1212357 - DNA, 15 bp, Homo sapiens
tggcctttcaggttg

SEQ ID NO: 1212358 - DNA, 15 bp, Homo sapiens
atggcctttcaggtt

SEQ ID NO: 1212359 - DNA, 15 bp, Homo sapiens
catggcctttcaggt

SEQ ID NO: 1212360 - DNA, 15 bp, Homo sapiens
acatggcctttcagg

SEQ ID NO: 1212361 - DNA, 15 bp, Homo sapiens
cacatggcctttcag

SEQ ID NO: 1212362 - DNA, 15 bp, Homo sapiens
acacatggcctttca

SEQ ID NO: 1212363 - DNA, 15 bp, Homo sapiens
tacacatggcctttc

SEQ ID NO: 1212364 - DNA, 15 bp, Homo sapiens
ttacacatggccttt

SEQ ID NO: 1212365 - DNA, 15 bp, Homo sapiens
tttacacatggcctt

SEQ ID NO: 1212366 - DNA, 15 bp, Homo sapiens
atttacacatggcct

SEQ ID NO: 1212367 - DNA, 15 bp, Homo sapiens
aatttacacatggcc

SEQ ID NO: 1212368 - DNA, 15 bp, Homo sapiens
caatttacacatggc

SEQ ID NO: 1212369 - DNA, 15 bp, Homo sapiens
tcaatttacacatgg

SEQ ID NO: 1212370 - DNA, 15 bp, Homo sapiens
ctcaatttacacatg

SEQ ID NO: 1212371 - DNA, 15 bp, Homo sapiens
tctcaatttacacat

SEQ ID NO: 1212372 - DNA, 15 bp, Homo sapiens
ttctcaatttacaca

SEQ ID NO: 1212373 - DNA, 15 bp, Homo sapiens
tttctcaatttacac

SEQ ID NO: 1212374 - DNA, 15 bp, Homo sapiens
atttctcaatttaca

SEQ ID NO: 1212375 - DNA, 15 bp, Homo sapiens
aatttctcaatttac

SEQ ID NO: 1212376 - DNA, 15 bp, Homo sapiens
gaatttctcaattta

SEQ ID NO: 1212377 - DNA, 15 bp, Homo sapiens
agaatttctcaattt

SEQ ID NO: 1212378 - DNA, 15 bp, Homo sapiens
tagaatttctcaatt

SEQ ID NO: 1212379 - DNA, 15 bp, Homo sapiens
ttagaatttctcaat

SEQ ID NO: 1212380 - DNA, 15 bp, Homo sapiens
cttagaatttctcaa

SEQ ID NO: 1212381 - DNA, 15 bp, Homo sapiens
ccttagaatttctca

SEQ ID NO: 1212382 - DNA, 15 bp, Homo sapiens
gccttagaatttctc

SEQ ID NO: 1212383 - DNA, 15 bp, Homo sapiens
tgccttagaatttct

SEQ ID NO: 1212384 - DNA, 15 bp, Homo sapiens
ttgccttagaatttc

SEQ ID NO: 1212385 - DNA, 15 bp, Homo sapiens
gttgccttagaattt

SEQ ID NO: 1212386 - DNA, 15 bp, Homo sapiens
agttgccttagaatt

SEQ ID NO: 1212387 - DNA, 15 bp, Homo sapiens
aagttgccttagaat

SEQ ID NO: 1212388 - DNA, 15 bp, Homo sapiens
caagttgccttagaa

SEQ ID NO: 1212389 - DNA, 15 bp, Homo sapiens
ccaagttgccttaga

SEQ ID NO: 1212390 - DNA, 15 bp, Homo sapiens
gccaagttgccttag

SEQ ID NO: 1212391 - DNA, 15 bp, Homo sapiens
agccaagttgcctta

SEQ ID NO: 1212392 - DNA, 15 bp, Homo sapiens
tagccaagttgcctt

SEQ ID NO: 1212393 - DNA, 15 bp, Homo sapiens
ctagccaagttgcct

SEQ ID NO: 1212394 - DNA, 15 bp, Homo sapiens
tctagccaagttgcc

SEQ ID NO: 1212395 - DNA, 15 bp, Homo sapiens
ttctagccaagttgc

SEQ ID NO: 1212396 - DNA, 15 bp, Homo sapiens
attctagccaagttg

SEQ ID NO: 1212397 - DNA, 15 bp, Homo sapiens
cattctagccaagtt

SEQ ID NO: 1212398 - DNA, 15 bp, Homo sapiens
gcattctagccaagt

SEQ ID NO: 1212399 - DNA, 15 bp, Homo sapiens
cgcattctagccaag

SEQ ID NO: 1212400 - DNA, 15 bp, Homo sapiens
gcgcattctagccaa

SEQ ID NO: 1212401 - DNA, 15 bp, Homo sapiens
agcgcattctagcca

SEQ ID NO: 1212402 - DNA, 15 bp, Homo sapiens
cagcgcattctagcc

SEQ ID NO: 1212403 - DNA, 15 bp, Homo sapiens
ccagcgcattctagc

SEQ ID NO: 1212404 - DNA, 15 bp, Homo sapiens
accagcgcattctag

SEQ ID NO: 1212405 - DNA, 15 bp, Homo sapiens
taccagcgcattcta

SEQ ID NO: 1212406 - DNA, 15 bp, Homo sapiens
gtaccagcgcattct

SEQ ID NO: 1212407 - DNA, 15 bp, Homo sapiens
cgtaccagcgcattc

SEQ ID NO: 1212408 - DNA, 15 bp, Homo sapiens
ccgtaccagcgcatt

SEQ ID NO: 1212409 - DNA, 15 bp, Homo sapiens
cccgtaccagcgcat

SEQ ID NO: 1212410 - DNA, 15 bp, Homo sapiens
ccccgtaccagcgca

SEQ ID NO: 1212411 - DNA, 15 bp, Homo sapiens
cccccgtaccagcgc

SEQ ID NO: 1212412 - DNA, 15 bp, Homo sapiens
tcccccgtaccagcg

SEQ ID NO: 1212413 - DNA, 15 bp, Homo sapiens
ctcccccgtaccagc

SEQ ID NO: 1212414 - DNA, 15 bp, Homo sapiens
gctcccccgtaccag

SEQ ID NO: 1212415 - DNA, 15 bp, Homo sapiens
ggctcccccgtacca

SEQ ID NO: 1212416 - DNA, 15 bp, Homo sapiens
tggctcccccgtacc

SEQ ID NO: 1212417 - DNA, 15 bp, Homo sapiens
gtggctcccccgtac

SEQ ID NO: 1212418 - DNA, 15 bp, Homo sapiens
agtggctcccccgta

SEQ ID NO: 1212419 - DNA, 15 bp, Homo sapiens
aagtggctcccccgt

SEQ ID NO: 1212420 - DNA, 15 bp, Homo sapiens
gaagtggctcccccg

SEQ ID NO: 1212421 - DNA, 15 bp, Homo sapiens
ggaagtggctccccc

SEQ ID NO: 1212422 - DNA, 15 bp, Homo sapiens
tggaagtggctcccc

SEQ ID NO: 1212423 - DNA, 15 bp, Homo sapiens
ctggaagtggctccc

SEQ ID NO: 1212424 - DNA, 15 bp, Homo sapiens
gctggaagtggctcc

SEQ ID NO: 1212425 - DNA, 15 bp, Homo sapiens
ggctggaagtggctc

SEQ ID NO: 1212426 - DNA, 15 bp, Homo sapiens
gggctggaagtggct

SEQ ID NO: 1212427 - DNA, 15 bp, Homo sapiens
cgggctggaagtggc

SEQ ID NO: 1212428 - DNA, 15 bp, Homo sapiens
tcgggctggaagtgg

SEQ ID NO: 1212429 - DNA, 15 bp, Homo sapiens
ctcgggctggaagtg

SEQ ID NO: 1212430 - DNA, 15 bp, Homo sapiens
gctcgggctggaagt

SEQ ID NO: 1212431 - DNA, 15 bp, Homo sapiens
ggctcgggctggaag

SEQ ID NO: 1212432 - DNA, 15 bp, Homo sapiens
tggctcgggctggaa

SEQ ID NO: 1212433 - DNA, 15 bp, Homo sapiens
gtggctcgggctgga

SEQ ID NO: 1212434 - DNA, 15 bp, Homo sapiens
tgtggctcgggctgg

SEQ ID NO: 1212435 - DNA, 15 bp, Homo sapiens
ttgtggctcgggctg

SEQ ID NO: 1212436 - DNA, 15 bp, Homo sapiens
gttgtggctcgggct

SEQ ID NO: 1212437 - DNA, 15 bp, Homo sapiens
ggttgtggctcgggc

SEQ ID NO: 1212438 - DNA, 15 bp, Homo sapiens
aggttgtggctcggg

SEQ ID NO: 1212439 - DNA, 15 bp, Homo sapiens
caggttgtggctcgg

SEQ ID NO: 1212440 - DNA, 15 bp, Homo sapiens
acaggttgtggctcg

SEQ ID NO: 1212441 - DNA, 15 bp, Homo sapiens
gacaggttgtggctc

SEQ ID NO: 1212442 - DNA, 15 bp, Homo sapiens
ggacaggttgtggct

SEQ ID NO: 1212443 - DNA, 15 bp, Homo sapiens
gggacaggttgtggc

SEQ ID NO: 1212444 - DNA, 15 bp, Homo sapiens
ggggacaggttgtgg

SEQ ID NO: 1212445 - DNA, 15 bp, Homo sapiens
gggggacaggttgtg

SEQ ID NO: 1212446 - DNA, 15 bp, Homo sapiens
agggggacaggttgt

SEQ ID NO: 1212447 - DNA, 15 bp, Homo sapiens
aagggggacaggttg

SEQ ID NO: 1212448 - DNA, 15 bp, Homo sapiens
aaagggggacaggtt

SEQ ID NO: 1212449 - DNA, 15 bp, Homo sapiens
aaaagggggacaggt

SEQ ID NO: 1212450 - DNA, 15 bp, Homo sapiens
gaaaagggggacagg

SEQ ID NO: 1212451 - DNA, 15 bp, Homo sapiens
agaaaagggggacag

SEQ ID NO: 1212452 - DNA, 15 bp, Homo sapiens
cagaaaagggggaca

SEQ ID NO: 1212453 - DNA, 15 bp, Homo sapiens
ccagaaaagggggac

SEQ ID NO: 1212454 - DNA, 15 bp, Homo sapiens
gccagaaaaggggga

SEQ ID NO: 1212455 - DNA, 15 bp, Homo sapiens
ggccagaaaaggggg

SEQ ID NO: 1212456 - DNA, 15 bp, Homo sapiens
gggccagaaaagggg

SEQ ID NO: 1212457 - DNA, 15 bp, Homo sapiens
ggggccagaaaaggg

SEQ ID NO: 1212458 - DNA, 15 bp, Homo sapiens
gggggccagaaaagg

SEQ ID NO: 1212459 - DNA, 15 bp, Homo sapiens
agggggccagaaaag

SEQ ID NO: 1212460 - DNA, 15 bp, Homo sapiens
gagggggccagaaaa

SEQ ID NO: 1212461 - DNA, 15 bp, Homo sapiens
tgagggggccagaaa

SEQ ID NO: 1212462 - DNA, 15 bp, Homo sapiens
ctgagggggccagaa

SEQ ID NO: 1212463 - DNA, 15 bp, Homo sapiens
gctgagggggccaga

SEQ ID NO: 1212464 - DNA, 15 bp, Homo sapiens
agctgagggggccag

SEQ ID NO: 1212465 - DNA, 15 bp, Homo sapiens
gagctgagggggcca

SEQ ID NO: 1212466 - DNA, 15 bp, Homo sapiens
ggagctgagggggcc

SEQ ID NO: 1212467 - DNA, 15 bp, Homo sapiens
tggagctgagggggc

SEQ ID NO: 1212468 - DNA, 15 bp, Homo sapiens
atggagctgaggggg

SEQ ID NO: 1212469 - DNA, 15 bp, Homo sapiens
gatggagctgagggg

SEQ ID NO: 1212470 - DNA, 15 bp, Homo sapiens
ggatggagctgaggg

SEQ ID NO: 1212471 - DNA, 15 bp, Homo sapiens
gggatggagctgagg

SEQ ID NO: 1212472 - DNA, 15 bp, Homo sapiens
tgggatggagctgag

SEQ ID NO: 1212473 - DNA, 15 bp, Homo sapiens
gtgggatggagctga

SEQ ID NO: 1212474 - DNA, 15 bp, Homo sapiens
agtgggatggagctg

SEQ ID NO: 1212475 - DNA, 15 bp, Homo sapiens
gagtgggatggagct

SEQ ID NO: 1212476 - DNA, 15 bp, Homo sapiens
ggagtgggatggagc

SEQ ID NO: 1212477 - DNA, 15 bp, Homo sapiens
tggagtgggatggag

SEQ ID NO: 1212478 - DNA, 15 bp, Homo sapiens
atggagtgggatgga

SEQ ID NO: 1212479 - DNA, 15 bp, Homo sapiens
catggagtgggatgg

SEQ ID NO: 1212480 - DNA, 15 bp, Homo sapiens
ccatggagtgggatg

SEQ ID NO: 1212481 - DNA, 15 bp, Homo sapiens
cccatggagtgggat

SEQ ID NO: 1212482 - DNA, 15 bp, Homo sapiens
ccccatggagtggga

SEQ ID NO: 1212483 - DNA, 15 bp, Homo sapiens
gccccatggagtggg

SEQ ID NO: 1212484 - DNA, 15 bp, Homo sapiens
ggccccatggagtgg

SEQ ID NO: 1212485 - DNA, 15 bp, Homo sapiens
gggccccatggagtg

SEQ ID NO: 1212486 - DNA, 15 bp, Homo sapiens
agggccccatggagt

SEQ ID NO: 1212487 - DNA, 15 bp, Homo sapiens
gagggccccatggag

SEQ ID NO: 1212488 - DNA, 15 bp, Homo sapiens
tgagggccccatgga

SEQ ID NO: 1212489 - DNA, 15 bp, Homo sapiens
ttgagggccccatgg

SEQ ID NO: 1212490 - DNA, 15 bp, Homo sapiens
gttgagggccccatg

SEQ ID NO: 1212491 - DNA, 15 bp, Homo sapiens
tgttgagggccccat

SEQ ID NO: 1212492 - DNA, 15 bp, Homo sapiens
gtgttgagggcccca

SEQ ID NO: 1212493 - DNA, 15 bp, Homo sapiens
ggtgttgagggcccc

SEQ ID NO: 1212494 - DNA, 15 bp, Homo sapiens
gggtgttgagggccc

SEQ ID NO: 1212495 - DNA, 15 bp, Homo sapiens
agggtgttgagggcc

SEQ ID NO: 1212496 - DNA, 15 bp, Homo sapiens
cagggtgttgagggc

SEQ ID NO: 1212497 - DNA, 15 bp, Homo sapiens
ccagggtgttgaggg

SEQ ID NO: 1212498 - DNA, 15 bp, Homo sapiens
tccagggtgttgagg

SEQ ID NO: 1212499 - DNA, 15 bp, Homo sapiens
atccagggtgttgag

SEQ ID NO: 1212500 - DNA, 15 bp, Homo sapiens
catccagggtgttga

SEQ ID NO: 1212501 - DNA, 15 bp, Homo sapiens
ccatccagggtgttg

SEQ ID NO: 1212502 - DNA, 15 bp, Homo sapiens
accatccagggtgtt

SEQ ID NO: 1212503 - DNA, 15 bp, Homo sapiens
gaccatccagggtgt

SEQ ID NO: 1212504 - DNA, 15 bp, Homo sapiens
tgaccatccagggtg

SEQ ID NO: 1212505 - DNA, 15 bp, Homo sapiens
gtgaccatccagggt

SEQ ID NO: 1212506 - DNA, 15 bp, Homo sapiens
ggtgaccatccaggg

SEQ ID NO: 1212507 - DNA, 15 bp, Homo sapiens
gggtgaccatccagg

SEQ ID NO: 1212508 - DNA, 15 bp, Homo sapiens
agggtgaccatccag

SEQ ID NO: 1212509 - DNA, 15 bp, Homo sapiens
gagggtgaccatcca

SEQ ID NO: 1212510 - DNA, 15 bp, Homo sapiens
ggagggtgaccatcc

SEQ ID NO: 1212511 - DNA, 15 bp, Homo sapiens
aggagggtgaccatc

SEQ ID NO: 1212512 - DNA, 15 bp, Homo sapiens
caggagggtgaccat

SEQ ID NO: 1212513 - DNA, 15 bp, Homo sapiens
gcaggagggtgacca

SEQ ID NO: 1212514 - DNA, 15 bp, Homo sapiens
ggcaggagggtgacc

SEQ ID NO: 1212515 - DNA, 15 bp, Homo sapiens
aggcaggagggtgac

SEQ ID NO: 1212516 - DNA, 15 bp, Homo sapiens
taggcaggagggtga

SEQ ID NO: 1212517 - DNA, 15 bp, Homo sapiens
gtaggcaggagggtg

SEQ ID NO: 1212518 - DNA, 15 bp, Homo sapiens
ggtaggcaggagggt

SEQ ID NO: 1212519 - DNA, 15 bp, Homo sapiens
aggtaggcaggaggg

SEQ ID NO: 1212520 - DNA, 15 bp, Homo sapiens
caggtaggcaggagg

SEQ ID NO: 1212521 - DNA, 15 bp, Homo sapiens
gcaggtaggcaggag

SEQ ID NO: 1212522 - DNA, 15 bp, Homo sapiens
tgcaggtaggcagga

SEQ ID NO: 1212523 - DNA, 15 bp, Homo sapiens
atgcaggtaggcagg

SEQ ID NO: 1212524 - DNA, 15 bp, Homo sapiens
aatgcaggtaggcag

SEQ ID NO: 1212525 - DNA, 15 bp, Homo sapiens
caatgcaggtaggca

SEQ ID NO: 1212526 - DNA, 15 bp, Homo sapiens
gcaatgcaggtaggc

SEQ ID NO: 1212527 - DNA, 15 bp, Homo sapiens
tgcaatgcaggtagg

SEQ ID NO: 1212528 - DNA, 15 bp, Homo sapiens
ctgcaatgcaggtag

SEQ ID NO: 1212529 - DNA, 15 bp, Homo sapiens
gctgcaatgcaggta

SEQ ID NO: 1212530 - DNA, 15 bp, Homo sapiens
ggctgcaatgcaggt

SEQ ID NO: 1212531 - DNA, 15 bp, Homo sapiens
gggctgcaatgcagg

SEQ ID NO: 1212532 - DNA, 15 bp, Homo sapiens
agggctgcaatgcag

SEQ ID NO: 1212533 - DNA, 15 bp, Homo sapiens
cagggctgcaatgca

SEQ ID NO: 1212534 - DNA, 15 bp, Homo sapiens
gcagggctgcaatgc

SEQ ID NO: 1212535 - DNA, 15 bp, Homo sapiens
ggcagggctgcaatg

SEQ ID NO: 1212536 - DNA, 15 bp, Homo sapiens
gggcagggctgcaat

SEQ ID NO: 1212537 - DNA, 15 bp, Homo sapiens
agggcagggctgcaa

SEQ ID NO: 1212538 - DNA, 15 bp, Homo sapiens
cagggcagggctgca

SEQ ID NO: 1212539 - DNA, 15 bp, Homo sapiens
gcagggcagggctgc

SEQ ID NO: 1212540 - DNA, 15 bp, Homo sapiens
tgcagggcagggctg

SEQ ID NO: 1212541 - DNA, 15 bp, Homo sapiens
gtgcagggcagggct

SEQ ID NO: 1212542 - DNA, 15 bp, Homo sapiens
tgtgcagggcagggc

SEQ ID NO: 1212543 - DNA, 15 bp, Homo sapiens
ctgtgcagggcaggg

SEQ ID NO: 1212544 - DNA, 15 bp, Homo sapiens
tctgtgcagggcagg

SEQ ID NO: 1212545 - DNA, 15 bp, Homo sapiens
gtctgtgcagggcag

SEQ ID NO: 1212546 - DNA, 15 bp, Homo sapiens
tgtctgtgcagggca

SEQ ID NO: 1212547 - DNA, 15 bp, Homo sapiens
atgtctgtgcagggc

SEQ ID NO: 1212548 - DNA, 15 bp, Homo sapiens
tatgtctgtgcaggg

SEQ ID NO: 1212549 - DNA, 15 bp, Homo sapiens
atatgtctgtgcagg

SEQ ID NO: 1212550 - DNA, 15 bp, Homo sapiens
tatatgtctgtgcag

SEQ ID NO: 1212551 - DNA, 15 bp, Homo sapiens
gtatatgtctgtgca

SEQ ID NO: 1212552 - DNA, 15 bp, Homo sapiens
agtatatgtctgtgc

SEQ ID NO: 1212553 - DNA, 15 bp, Homo sapiens
aagtatatgtctgtg

SEQ ID NO: 1212554 - DNA, 15 bp, Homo sapiens
gaagtatatgtctgt

SEQ ID NO: 1212555 - DNA, 15 bp, Homo sapiens
agaagtatatgtctg

SEQ ID NO: 1212556 - DNA, 15 bp, Homo sapiens
gagaagtatatgtct

SEQ ID NO: 1212557 - DNA, 15 bp, Homo sapiens
agagaagtatatgtc

SEQ ID NO: 1212558 - DNA, 15 bp, Homo sapiens
cagagaagtatatgt

SEQ ID NO: 1212559 - DNA, 15 bp, Homo sapiens
ccagagaagtatatg

SEQ ID NO: 1212560 - DNA, 15 bp, Homo sapiens
gccagagaagtatat

SEQ ID NO: 1212561 - DNA, 15 bp, Homo sapiens
ggccagagaagtata

SEQ ID NO: 1212562 - DNA, 15 bp, Homo sapiens
aggccagagaagtat

SEQ ID NO: 1212563 - DNA, 15 bp, Homo sapiens
taggccagagaagta

SEQ ID NO: 1212564 - DNA, 15 bp, Homo sapiens
ttaggccagagaagt

SEQ ID NO: 1212565 - DNA, 15 bp, Homo sapiens
tttaggccagagaag

SEQ ID NO: 1212566 - DNA, 15 bp, Homo sapiens
ttttaggccagagaa

SEQ ID NO: 1212567 - DNA, 15 bp, Homo sapiens
cttttaggccagaga

SEQ ID NO: 1212568 - DNA, 15 bp, Homo sapiens
acttttaggccagag

SEQ ID NO: 1212569 - DNA, 15 bp, Homo sapiens
gacttttaggccaga

SEQ ID NO: 1212570 - DNA, 15 bp, Homo sapiens
ggacttttaggccag

SEQ ID NO: 1212571 - DNA, 15 bp, Homo sapiens
aggacttttaggcca

SEQ ID NO: 1212572 - DNA, 15 bp, Homo sapiens
gaggacttttaggcc

SEQ ID NO: 1212573 - DNA, 15 bp, Homo sapiens
tgaggacttttaggc

SEQ ID NO: 1212574 - DNA, 15 bp, Homo sapiens
ctgaggacttttagg

SEQ ID NO: 1212575 - DNA, 15 bp, Homo sapiens
cctgaggacttttag

SEQ ID NO: 1212576 - DNA, 15 bp, Homo sapiens
tcctgaggactttta

SEQ ID NO: 1212577 - DNA, 15 bp, Homo sapiens
ctcctgaggactttt

SEQ ID NO: 1212578 - DNA, 15 bp, Homo sapiens
cctcctgaggacttt

SEQ ID NO: 1212579 - DNA, 15 bp, Homo sapiens
acctcctgaggactt

SEQ ID NO: 1212580 - DNA, 15 bp, Homo sapiens
aacctcctgaggact

SEQ ID NO: 1212581 - DNA, 15 bp, Homo sapiens
caacctcctgaggac

SEQ ID NO: 1212582 - DNA, 15 bp, Homo sapiens
ccaacctcctgagga

SEQ ID NO: 1212583 - DNA, 15 bp, Homo sapiens
cccaacctcctgagg

SEQ ID NO: 1212584 - DNA, 15 bp, Homo sapiens
gcccaacctcctgag

SEQ ID NO: 1212585 - DNA, 15 bp, Homo sapiens
ggcccaacctcctga

SEQ ID NO: 1212586 - DNA, 15 bp, Homo sapiens
aggcccaacctcctg

SEQ ID NO: 1212587 - DNA, 15 bp, Homo sapiens
caggcccaacctcct

SEQ ID NO: 1212588 - DNA, 15 bp, Homo sapiens
ccaggcccaacctcc

SEQ ID NO: 1212589 - DNA, 15 bp, Homo sapiens
cccaggcccaacctc

SEQ ID NO: 1212590 - DNA, 15 bp, Homo sapiens
tcccaggcccaacct

SEQ ID NO: 1212591 - DNA, 15 bp, Homo sapiens
ttcccaggcccaacc

SEQ ID NO: 1212592 - DNA, 15 bp, Homo sapiens
cttcccaggcccaac

SEQ ID NO: 1212593 - DNA, 15 bp, Homo sapiens
tcttcccaggcccaa

SEQ ID NO: 1212594 - DNA, 15 bp, Homo sapiens
ctcttcccaggccca

SEQ ID NO: 1212595 - DNA, 15 bp, Homo sapiens
cctcttcccaggccc

SEQ ID NO: 1212596 - DNA, 15 bp, Homo sapiens
acctcttcccaggcc

SEQ ID NO: 1212597 - DNA, 15 bp, Homo sapiens
cacctcttcccaggc

SEQ ID NO: 1212598 - DNA, 15 bp, Homo sapiens
acacctcttcccagg

SEQ ID NO: 1212599 - DNA, 15 bp, Homo sapiens
tacacctcttcccag

SEQ ID NO: 1212600 - DNA, 15 bp, Homo sapiens
gtacacctcttccca

SEQ ID NO: 1212601 - DNA, 15 bp, Homo sapiens
tgtacacctcttccc

SEQ ID NO: 1212602 - DNA, 15 bp, Homo sapiens
ctgtacacctcttcc

SEQ ID NO: 1212603 - DNA, 15 bp, Homo sapiens
tctgtacacctcttc

SEQ ID NO: 1212604 - DNA, 15 bp, Homo sapiens
gtctgtacacctctt

SEQ ID NO: 1212605 - DNA, 15 bp, Homo sapiens
ggtctgtacacctct

SEQ ID NO: 1212606 - DNA, 15 bp, Homo sapiens
gggtctgtacacctc

SEQ ID NO: 1212607 - DNA, 15 bp, Homo sapiens
agggtctgtacacct

SEQ ID NO: 1212608 - DNA, 15 bp, Homo sapiens
cagggtctgtacacc

SEQ ID NO: 1212609 - DNA, 15 bp, Homo sapiens
ccagggtctgtacac

SEQ ID NO: 1212610 - DNA, 15 bp, Homo sapiens
cccagggtctgtaca

SEQ ID NO: 1212611 - DNA, 15 bp, Homo sapiens
ccccagggtctgtac

SEQ ID NO: 1212612 - DNA, 15 bp, Homo sapiens
tccccagggtctgta

SEQ ID NO: 1212613 - DNA, 15 bp, Homo sapiens
atccccagggtctgt

SEQ ID NO: 1212614 - DNA, 15 bp, Homo sapiens
catccccagggtctg

SEQ ID NO: 1212615 - DNA, 15 bp, Homo sapiens
ccatccccagggtct

SEQ ID NO: 1212616 - DNA, 15 bp, Homo sapiens
tccatccccagggtc

SEQ ID NO: 1212617 - DNA, 15 bp, Homo sapiens
gtccatccccagggt

SEQ ID NO: 1212618 - DNA, 15 bp, Homo sapiens
agtccatccccaggg

SEQ ID NO: 1212619 - DNA, 15 bp, Homo sapiens
aagtccatccccagg

SEQ ID NO: 1212620 - DNA, 15 bp, Homo sapiens
caagtccatccccag

SEQ ID NO: 1212621 - DNA, 15 bp, Homo sapiens
ccaagtccatcccca

SEQ ID NO: 1212622 - DNA, 15 bp, Homo sapiens
cccaagtccatcccc

SEQ ID NO: 1212623 - DNA, 15 bp, Homo sapiens
ccccaagtccatccc

SEQ ID NO: 1212624 - DNA, 15 bp, Homo sapiens
gccccaagtccatcc

SEQ ID NO: 1212625 - DNA, 15 bp, Homo sapiens
ggccccaagtccatc

SEQ ID NO: 1212626 - DNA, 15 bp, Homo sapiens
tggccccaagtccat

SEQ ID NO: 1212627 - DNA, 15 bp, Homo sapiens
atggccccaagtcca

SEQ ID NO: 1212628 - DNA, 15 bp, Homo sapiens
aatggccccaagtcc

SEQ ID NO: 1212629 - DNA, 15 bp, Homo sapiens
aaatggccccaagtc

SEQ ID NO: 1212630 - DNA, 15 bp, Homo sapiens
caaatggccccaagt

SEQ ID NO: 1212631 - DNA, 15 bp, Homo sapiens
gcaaatggccccaag

SEQ ID NO: 1212632 - DNA, 15 bp, Homo sapiens
tgcaaatggccccaa

SEQ ID NO: 1212633 - DNA, 15 bp, Homo sapiens
gtgcaaatggcccca

SEQ ID NO: 1212634 - DNA, 15 bp, Homo sapiens
tgtgcaaatggcccc

SEQ ID NO: 1212635 - DNA, 15 bp, Homo sapiens
ctgtgcaaatggccc

SEQ ID NO: 1212636 - DNA, 15 bp, Homo sapiens
tctgtgcaaatggcc

SEQ ID NO: 1212637 - DNA, 15 bp, Homo sapiens
ctctgtgcaaatggc

SEQ ID NO: 1212638 - DNA, 15 bp, Homo sapiens
tctctgtgcaaatgg

SEQ ID NO: 1212639 - DNA, 15 bp, Homo sapiens
ttctctgtgcaaatg

SEQ ID NO: 1212640 - DNA, 15 bp, Homo sapiens
attctctgtgcaaat

SEQ ID NO: 1212641 - DNA, 15 bp, Homo sapiens
tattctctgtgcaaa

SEQ ID NO: 1212642 - DNA, 15 bp, Homo sapiens
atattctctgtgcaa

SEQ ID NO: 1212643 - DNA, 15 bp, Homo sapiens
gatattctctgtgca

SEQ ID NO: 1212644 - DNA, 15 bp, Homo sapiens
agatattctctgtgc

SEQ ID NO: 1212645 - DNA, 15 bp, Homo sapiens
cagatattctctgtg

SEQ ID NO: 1212646 - DNA, 15 bp, Homo sapiens
ccagatattctctgt

SEQ ID NO: 1212647 - DNA, 15 bp, Homo sapiens
gccagatattctctg

SEQ ID NO: 1212648 - DNA, 15 bp, Homo sapiens
tgccagatattctct

SEQ ID NO: 1212649 - DNA, 15 bp, Homo sapiens
atgccagatattctc

SEQ ID NO: 1212650 - DNA, 15 bp, Homo sapiens
gatgccagatattct

SEQ ID NO: 1212651 - DNA, 15 bp, Homo sapiens
agatgccagatattc

SEQ ID NO: 1212652 - DNA, 15 bp, Homo sapiens
aagatgccagatatt

SEQ ID NO: 1212653 - DNA, 15 bp, Homo sapiens
caagatgccagatat

SEQ ID NO: 1212654 - DNA, 15 bp, Homo sapiens
ccaagatgccagata

SEQ ID NO: 1212655 - DNA, 15 bp, Homo sapiens
cccaagatgccagat

SEQ ID NO: 1212656 - DNA, 15 bp, Homo sapiens
gcccaagatgccaga

SEQ ID NO: 1212657 - DNA, 15 bp, Homo sapiens
tgcccaagatgccag

SEQ ID NO: 1212658 - DNA, 15 bp, Homo sapiens
gtgcccaagatgcca

SEQ ID NO: 1212659 - DNA, 15 bp, Homo sapiens
ggtgcccaagatgcc

SEQ ID NO: 1212660 - DNA, 15 bp, Homo sapiens
aggtgcccaagatgc

SEQ ID NO: 1212661 - DNA, 15 bp, Homo sapiens
caggtgcccaagatg

SEQ ID NO: 1212662 - DNA, 15 bp, Homo sapiens
ccaggtgcccaagat

SEQ ID NO: 1212663 - DNA, 15 bp, Homo sapiens
tccaggtgcccaaga

SEQ ID NO: 1212664 - DNA, 15 bp, Homo sapiens
ctccaggtgcccaag

SEQ ID NO: 1212665 - DNA, 15 bp, Homo sapiens
actccaggtgcccaa

SEQ ID NO: 1212666 - DNA, 15 bp, Homo sapiens
cactccaggtgccca

SEQ ID NO: 1212667 - DNA, 15 bp, Homo sapiens
ccactccaggtgccc

SEQ ID NO: 1212668 - DNA, 15 bp, Homo sapiens
gccactccaggtgcc

SEQ ID NO: 1212669 - DNA, 15 bp, Homo sapiens
tgccactccaggtgc

SEQ ID NO: 1212670 - DNA, 15 bp, Homo sapiens
ttgccactccaggtg

SEQ ID NO: 1212671 - DNA, 15 bp, Homo sapiens
cttgccactccaggt

SEQ ID NO: 1212672 - DNA, 15 bp, Homo sapiens
acttgccactccagg

SEQ ID NO: 1212673 - DNA, 15 bp, Homo sapiens
cacttgccactccag

SEQ ID NO: 1212674 - DNA, 15 bp, Homo sapiens
gcacttgccactcca

SEQ ID NO: 1212675 - DNA, 15 bp, Homo sapiens
ggcacttgccactcc

SEQ ID NO: 1212676 - DNA, 15 bp, Homo sapiens
gggcacttgccactc

SEQ ID NO: 1212677 - DNA, 15 bp, Homo sapiens
agggcacttgccact

SEQ ID NO: 1212678 - DNA, 15 bp, Homo sapiens
aagggcacttgccac

SEQ ID NO: 1212679 - DNA, 15 bp, Homo sapiens
taagggcacttgcca

SEQ ID NO: 1212680 - DNA, 15 bp, Homo sapiens
ttaagggcacttgcc

SEQ ID NO: 1212681 - DNA, 15 bp, Homo sapiens
gttaagggcacttgc

SEQ ID NO: 1212682 - DNA, 15 bp, Homo sapiens
ggttaagggcacttg

SEQ ID NO: 1212683 - DNA, 15 bp, Homo sapiens
gggttaagggcactt

SEQ ID NO: 1212684 - DNA, 15 bp, Homo sapiens
tgggttaagggcact

SEQ ID NO: 1212685 - DNA, 15 bp, Homo sapiens
gtgggttaagggcac

SEQ ID NO: 1212686 - DNA, 15 bp, Homo sapiens
tgtgggttaagggca

SEQ ID NO: 1212687 - DNA, 15 bp, Homo sapiens
ttgtgggttaagggc

SEQ ID NO: 1212688 - DNA, 15 bp, Homo sapiens
tttgtgggttaaggg

SEQ ID NO: 1212689 - DNA, 15 bp, Homo sapiens
gtttgtgggttaagg

SEQ ID NO: 1212690 - DNA, 15 bp, Homo sapiens
agtttgtgggttaag

SEQ ID NO: 1212691 - DNA, 15 bp, Homo sapiens
gagtttgtgggttaa

SEQ ID NO: 1212692 - DNA, 15 bp, Homo sapiens
ggagtttgtgggtta

SEQ ID NO: 1212693 - DNA, 15 bp, Homo sapiens
aggagtttgtgggtt

SEQ ID NO: 1212694 - DNA, 15 bp, Homo sapiens
gaggagtttgtgggt

SEQ ID NO: 1212695 - DNA, 15 bp, Homo sapiens
tgaggagtttgtggg

SEQ ID NO: 1212696 - DNA, 15 bp, Homo sapiens
atgaggagtttgtgg

SEQ ID NO: 1212697 - DNA, 15 bp, Homo sapiens
catgaggagtttgtg

SEQ ID NO: 1212698 - DNA, 15 bp, Homo sapiens
gcatgaggagtttgt

SEQ ID NO: 1212699 - DNA, 15 bp, Homo sapiens
ggcatgaggagtttg

SEQ ID NO: 1212700 - DNA, 15 bp, Homo sapiens
tggcatgaggagttt

SEQ ID NO: 1212701 - DNA, 15 bp, Homo sapiens
atggcatgaggagtt

SEQ ID NO: 1212702 - DNA, 15 bp, Homo sapiens
catggcatgaggagt

SEQ ID NO: 1212703 - DNA, 15 bp, Homo sapiens
ccatggcatgaggag

SEQ ID NO: 1212704 - DNA, 15 bp, Homo sapiens
cccatggcatgagga

SEQ ID NO: 1212705 - DNA, 15 bp, Homo sapiens
gcccatggcatgagg

SEQ ID NO: 1212706 - DNA, 15 bp, Homo sapiens
tgcccatggcatgag

SEQ ID NO: 1212707 - DNA, 15 bp, Homo sapiens
ctgcccatggcatga

SEQ ID NO: 1212708 - DNA, 15 bp, Homo sapiens
cctgcccatggcatg

SEQ ID NO: 1212709 - DNA, 15 bp, Homo sapiens
tcctgcccatggcat

SEQ ID NO: 1212710 - DNA, 15 bp, Homo sapiens
ctcctgcccatggca

SEQ ID NO: 1212711 - DNA, 15 bp, Homo sapiens
gctcctgcccatggc

SEQ ID NO: 1212712 - DNA, 15 bp, Homo sapiens
tgctcctgcccatgg

SEQ ID NO: 1212713 - DNA, 15 bp, Homo sapiens
ctgctcctgcccatg

SEQ ID NO: 1212714 - DNA, 15 bp, Homo sapiens
gctgctcctgcccat

SEQ ID NO: 1212715 - DNA, 15 bp, Homo sapiens
tgctgctcctgccca

SEQ ID NO: 1212716 - DNA, 15 bp, Homo sapiens
ttgctgctcctgccc

SEQ ID NO: 1212717 - DNA, 15 bp, Homo sapiens
gttgctgctcctgcc

SEQ ID NO: 1212718 - DNA, 15 bp, Homo sapiens
tgttgctgctcctgc

SEQ ID NO: 1212719 - DNA, 15 bp, Homo sapiens
ctgttgctgctcctg

SEQ ID NO: 1212720 - DNA, 15 bp, Homo sapiens
tctgttgctgctcct

SEQ ID NO: 1212721 - DNA, 15 bp, Homo sapiens
ctctgttgctgctcc

SEQ ID NO: 1212722 - DNA, 15 bp, Homo sapiens
tctctgttgctgctc

SEQ ID NO: 1212723 - DNA, 15 bp, Homo sapiens
ttctctgttgctgct

SEQ ID NO: 1212724 - DNA, 15 bp, Homo sapiens
cttctctgttgctgc

SEQ ID NO: 1212725 - DNA, 15 bp, Homo sapiens
ccttctctgttgctg

SEQ ID NO: 1212726 - DNA, 15 bp, Homo sapiens
tccttctctgttgct

SEQ ID NO: 1212727 - DNA, 15 bp, Homo sapiens
gtccttctctgttgc

SEQ ID NO: 1212728 - DNA, 15 bp, Homo sapiens
tgtccttctctgttg

SEQ ID NO: 1212729 - DNA, 15 bp, Homo sapiens
ttgtccttctctgtt

SEQ ID NO: 1212730 - DNA, 15 bp, Homo sapiens
cttgtccttctctgt

SEQ ID NO: 1212731 - DNA, 15 bp, Homo sapiens
tcttgtccttctctg

SEQ ID NO: 1212732 - DNA, 15 bp, Homo sapiens
ctcttgtccttctct

SEQ ID NO: 1212733 - DNA, 15 bp, Homo sapiens
tctcttgtccttctc

SEQ ID NO: 1212734 - DNA, 15 bp, Homo sapiens
ttctcttgtccttct

SEQ ID NO: 1212735 - DNA, 15 bp, Homo sapiens
tttctcttgtccttc

SEQ ID NO: 1212736 - DNA, 15 bp, Homo sapiens
gtttctcttgtcctt

SEQ ID NO: 1212737 - DNA, 15 bp, Homo sapiens
ggtttctcttgtcct

SEQ ID NO: 1212738 - DNA, 15 bp, Homo sapiens
gggtttctcttgtcc

SEQ ID NO: 1212739 - DNA, 15 bp, Homo sapiens
agggtttctcttgtc

SEQ ID NO: 1212740 - DNA, 15 bp, Homo sapiens
cagggtttctcttgt

SEQ ID NO: 1212741 - DNA, 15 bp, Homo sapiens
ccagggtttctcttg

SEQ ID NO: 1212742 - DNA, 15 bp, Homo sapiens
gccagggtttctctt

SEQ ID NO: 1212743 - DNA, 15 bp, Homo sapiens
tgccagggtttctct

SEQ ID NO: 1212744 - DNA, 15 bp, Homo sapiens
ctgccagggtttctc

SEQ ID NO: 1212745 - DNA, 15 bp, Homo sapiens
gctgccagggtttct

SEQ ID NO: 1212746 - DNA, 15 bp, Homo sapiens
tgctgccagggtttc

SEQ ID NO: 1212747 - DNA, 15 bp, Homo sapiens
ctgctgccagggttt

SEQ ID NO: 1212748 - DNA, 15 bp, Homo sapiens
cctgctgccagggtt

SEQ ID NO: 1212749 - DNA, 15 bp, Homo sapiens
gcctgctgccagggt

SEQ ID NO: 1212750 - DNA, 15 bp, Homo sapiens
tgcctgctgccaggg

SEQ ID NO: 1212751 - DNA, 15 bp, Homo sapiens
ctgcctgctgccagg

SEQ ID NO: 1212752 - DNA, 15 bp, Homo sapiens
tctgcctgctgccag

SEQ ID NO: 1212753 - DNA, 15 bp, Homo sapiens
ctctgcctgctgcca

SEQ ID NO: 1212754 - DNA, 15 bp, Homo sapiens
gctctgcctgctgcc

SEQ ID NO: 1212755 - DNA, 15 bp, Homo sapiens
agctctgcctgctgc

SEQ ID NO: 1212756 - DNA, 15 bp, Homo sapiens
cagctctgcctgctg

SEQ ID NO: 1212757 - DNA, 15 bp, Homo sapiens
acagctctgcctgct

SEQ ID NO: 1212758 - DNA, 15 bp, Homo sapiens
cacagctctgcctgc

SEQ ID NO: 1212759 - DNA, 15 bp, Homo sapiens
acacagctctgcctg

SEQ ID NO: 1212760 - DNA, 15 bp, Homo sapiens
cacacagctctgcct

SEQ ID NO: 1212761 - DNA, 15 bp, Homo sapiens
acacacagctctgcc

SEQ ID NO: 1212762 - DNA, 15 bp, Homo sapiens
cacacacagctctgc

SEQ ID NO: 1212763 - DNA, 15 bp, Homo sapiens
tcacacacagctctg

SEQ ID NO: 1212764 - DNA, 15 bp, Homo sapiens
gtcacacacagctct

SEQ ID NO: 1212765 - DNA, 15 bp, Homo sapiens
ggtcacacacagctc

SEQ ID NO: 1212766 - DNA, 15 bp, Homo sapiens
aggtcacacacagct

SEQ ID NO: 1212767 - DNA, 15 bp, Homo sapiens
taggtcacacacagc

SEQ ID NO: 1212768 - DNA, 15 bp, Homo sapiens
ctaggtcacacacag

SEQ ID NO: 1212769 - DNA, 15 bp, Homo sapiens
cctaggtcacacaca

SEQ ID NO: 1212770 - DNA, 15 bp, Homo sapiens
gcctaggtcacacac

SEQ ID NO: 1212771 - DNA, 15 bp, Homo sapiens
agcctaggtcacaca

SEQ ID NO: 1212772 - DNA, 15 bp, Homo sapiens
cagcctaggtcacac

SEQ ID NO: 1212773 - DNA, 15 bp, Homo sapiens
tcagcctaggtcaca

SEQ ID NO: 1212774 - DNA, 15 bp, Homo sapiens
ttcagcctaggtcac

SEQ ID NO: 1212775 - DNA, 15 bp, Homo sapiens
attcagcctaggtca

SEQ ID NO: 1212776 - DNA, 15 bp, Homo sapiens
cattcagcctaggtc

SEQ ID NO: 1212777 - DNA, 15 bp, Homo sapiens
acattcagcctaggt

SEQ ID NO: 1212778 - DNA, 15 bp, Homo sapiens
aacattcagcctagg

SEQ ID NO: 1212779 - DNA, 15 bp, Homo sapiens
aaacattcagcctag

SEQ ID NO: 1212780 - DNA, 15 bp, Homo sapiens
gaaacattcagccta

SEQ ID NO: 1212781 - DNA, 15 bp, Homo sapiens
cgaaacattcagcct

SEQ ID NO: 1212782 - DNA, 15 bp, Homo sapiens
tcgaaacattcagcc

SEQ ID NO: 1212783 - DNA, 15 bp, Homo sapiens
atcgaaacattcagc

SEQ ID NO: 1212784 - DNA, 15 bp, Homo sapiens
tatcgaaacattcag

SEQ ID NO: 1212785 - DNA, 15 bp, Homo sapiens
ttatcgaaacattca

SEQ ID NO: 1212786 - DNA, 15 bp, Homo sapiens
tttatcgaaacattc

SEQ ID NO: 1212787 - DNA, 15 bp, Homo sapiens
ttttatcgaaacatt

SEQ ID NO: 1212788 - DNA, 15 bp, Homo sapiens
attttatcgaaacat

SEQ ID NO: 1212789 - DNA, 15 bp, Homo sapiens
aattttatcgaaaca

SEQ ID NO: 1212790 - DNA, 15 bp, Homo sapiens
aaattttatcgaaac

SEQ ID NO: 1212791 - DNA, 15 bp, Homo sapiens
gaaattttatcgaaa

SEQ ID NO: 1212792 - DNA, 15 bp, Homo sapiens
agaaattttatcgaa

SEQ ID NO: 1212793 - DNA, 15 bp, Homo sapiens
aagaaattttatcga

SEQ ID NO: 1212794 - DNA, 15 bp, Homo sapiens
gaagaaattttatcg

SEQ ID NO: 1212795 - DNA, 15 bp, Homo sapiens
tgaagaaattttatc

SEQ ID NO: 1212796 - DNA, 15 bp, Homo sapiens
ctgaagaaattttat

SEQ ID NO: 1212797 - DNA, 15 bp, Homo sapiens
gctgaagaaatttta

SEQ ID NO: 1212798 - DNA, 15 bp, Homo sapiens
ggctgaagaaatttt

SEQ ID NO: 1212799 - DNA, 15 bp, Homo sapiens
tggctgaagaaattt

SEQ ID NO: 1212800 - DNA, 15 bp, Homo sapiens
ctggctgaagaaatt

SEQ ID NO: 1212801 - DNA, 15 bp, Homo sapiens
cctggctgaagaaat

SEQ ID NO: 1212802 - DNA, 15 bp, Homo sapiens
tcctggctgaagaaa

SEQ ID NO: 1212803 - DNA, 15 bp, Homo sapiens
ttcctggctgaagaa

SEQ ID NO: 1212804 - DNA, 15 bp, Homo sapiens
gttcctggctgaaga

SEQ ID NO: 1212805 - DNA, 15 bp, Homo sapiens
tgttcctggctgaag

SEQ ID NO: 1212806 - DNA, 15 bp, Homo sapiens
ttgttcctggctgaa

SEQ ID NO: 1212807 - DNA, 15 bp, Homo sapiens
cttgttcctggctga

SEQ ID NO: 1212808 - DNA, 15 bp, Homo sapiens
acttgttcctggctg

SEQ ID NO: 1212809 - DNA, 15 bp, Homo sapiens
gacttgttcctggct

SEQ ID NO: 1212810 - DNA, 15 bp, Homo sapiens
ggacttgttcctggc

SEQ ID NO: 1212811 - DNA, 15 bp, Homo sapiens
aggacttgttcctgg

SEQ ID NO: 1212812 - DNA, 15 bp, Homo sapiens
caggacttgttcctg

SEQ ID NO: 1212813 - DNA, 15 bp, Homo sapiens
gcaggacttgttcct

SEQ ID NO: 1212814 - DNA, 15 bp, Homo sapiens
cgcaggacttgttcc

SEQ ID NO: 1212815 - DNA, 15 bp, Homo sapiens
acgcaggacttgttc

SEQ ID NO: 1212816 - DNA, 15 bp, Homo sapiens
cacgcaggacttgtt

SEQ ID NO: 1212817 - DNA, 15 bp, Homo sapiens
acacgcaggacttgt

SEQ ID NO: 1212818 - DNA, 15 bp, Homo sapiens
gacacgcaggacttg

SEQ ID NO: 1212819 - DNA, 15 bp, Homo sapiens
ggacacgcaggactt

SEQ ID NO: 1212820 - DNA, 15 bp, Homo sapiens
aggacacgcaggact

SEQ ID NO: 1212821 - DNA, 15 bp, Homo sapiens
gaggacacgcaggac

SEQ ID NO: 1212822 - DNA, 15 bp, Homo sapiens
agaggacacgcagga

SEQ ID NO: 1212823 - DNA, 15 bp, Homo sapiens
aagaggacacgcagg

SEQ ID NO: 1212824 - DNA, 15 bp, Homo sapiens
caagaggacacgcag

SEQ ID NO: 1212825 - DNA, 15 bp, Homo sapiens
gcaagaggacacgca

SEQ ID NO: 1212826 - DNA, 15 bp, Homo sapiens
ggcaagaggacacgc

SEQ ID NO: 1212827 - DNA, 15 bp, Homo sapiens
tggcaagaggacacg

SEQ ID NO: 1212828 - DNA, 15 bp, Homo sapiens
ttggcaagaggacac

SEQ ID NO: 1212829 - DNA, 15 bp, Homo sapiens
gttggcaagaggaca

SEQ ID NO: 1212830 - DNA, 15 bp, Homo sapiens
ggttggcaagaggac

SEQ ID NO: 1212831 - DNA, 15 bp, Homo sapiens
gggttggcaagagga

SEQ ID NO: 1212832 - DNA, 15 bp, Homo sapiens
agggttggcaagagg

SEQ ID NO: 1212833 - DNA, 15 bp, Homo sapiens
gagggttggcaagag

SEQ ID NO: 1212834 - DNA, 15 bp, Homo sapiens
ggagggttggcaaga

SEQ ID NO: 1212835 - DNA, 15 bp, Homo sapiens
tggagggttggcaag

SEQ ID NO: 1212836 - DNA, 15 bp, Homo sapiens
ctggagggttggcaa

SEQ ID NO: 1212837 - DNA, 15 bp, Homo sapiens
gctggagggttggca

SEQ ID NO: 1212838 - DNA, 15 bp, Homo sapiens
ggctggagggttggc

SEQ ID NO: 1212839 - DNA, 15 bp, Homo sapiens
cggctggagggttgg

SEQ ID NO: 1212840 - DNA, 15 bp, Homo sapiens
acggctggagggttg

SEQ ID NO: 1212841 - DNA, 15 bp, Homo sapiens
cacggctggagggtt

SEQ ID NO: 1212842 - DNA, 15 bp, Homo sapiens
tcacggctggagggt

SEQ ID NO: 1212843 - DNA, 15 bp, Homo sapiens
ctcacggctggaggg

SEQ ID NO: 1212844 - DNA, 15 bp, Homo sapiens
actcacggctggagg

SEQ ID NO: 1212845 - DNA, 15 bp, Homo sapiens
cactcacggctggag

SEQ ID NO: 1212846 - DNA, 15 bp, Homo sapiens
acactcacggctgga

SEQ ID NO: 1212847 - DNA, 15 bp, Homo sapiens
gacactcacggctgg

SEQ ID NO: 1212848 - DNA, 15 bp, Homo sapiens
tgacactcacggctg

SEQ ID NO: 1212849 - DNA, 15 bp, Homo sapiens
ctgacactcacggct

SEQ ID NO: 1212850 - DNA, 15 bp, Homo sapiens
gctgacactcacggc

SEQ ID NO: 1212851 - DNA, 15 bp, Homo sapiens
tgctgacactcacgg

SEQ ID NO: 1212852 - DNA, 15 bp, Homo sapiens
gtgctgacactcacg

SEQ ID NO: 1212853 - DNA, 15 bp, Homo sapiens
tgtgctgacactcac

SEQ ID NO: 1212854 - DNA, 15 bp, Homo sapiens
atgtgctgacactca

SEQ ID NO: 1212855 - DNA, 15 bp, Homo sapiens
gatgtgctgacactc

SEQ ID NO: 1212856 - DNA, 15 bp, Homo sapiens
tgatgtgctgacact

SEQ ID NO: 1212857 - DNA, 15 bp, Homo sapiens
gtgatgtgctgacac

SEQ ID NO: 1212858 - DNA, 15 bp, Homo sapiens
agtgatgtgctgaca

SEQ ID NO: 1212859 - DNA, 15 bp, Homo sapiens
gagtgatgtgctgac

SEQ ID NO: 1212860 - DNA, 15 bp, Homo sapiens
ggagtgatgtgctga

SEQ ID NO: 1212861 - DNA, 15 bp, Homo sapiens
gggagtgatgtgctg

SEQ ID NO: 1212862 - DNA, 15 bp, Homo sapiens
ggggagtgatgtgct

SEQ ID NO: 1212863 - DNA, 15 bp, Homo sapiens
gggggagtgatgtgc

SEQ ID NO: 1212864 - DNA, 15 bp, Homo sapiens
ggggggagtgatgtg

SEQ ID NO: 1212865 - DNA, 15 bp, Homo sapiens
cggggggagtgatgt

SEQ ID NO: 1212866 - DNA, 15 bp, Homo sapiens
ccggggggagtgatg

SEQ ID NO: 1212867 - DNA, 15 bp, Homo sapiens
cccggggggagtgat

SEQ ID NO: 1212868 - DNA, 15 bp, Homo sapiens
ccccggggggagtga

SEQ ID NO: 1212869 - DNA, 15 bp, Homo sapiens
gccccggggggagtg

SEQ ID NO: 1212870 - DNA, 15 bp, Homo sapiens
tgccccggggggagt

SEQ ID NO: 1212871 - DNA, 15 bp, Homo sapiens
atgccccggggggag

SEQ ID NO: 1212872 - DNA, 15 bp, Homo sapiens
tatgccccgggggga

SEQ ID NO: 1212873 - DNA, 15 bp, Homo sapiens
ctatgccccgggggg

SEQ ID NO: 1212874 - DNA, 15 bp, Homo sapiens
cctatgccccggggg

SEQ ID NO: 1212875 - DNA, 15 bp, Homo sapiens
gcctatgccccgggg

SEQ ID NO: 1212876 - DNA, 15 bp, Homo sapiens
agcctatgccccggg

SEQ ID NO: 1212877 - DNA, 15 bp, Homo sapiens
gagcctatgccccgg

SEQ ID NO: 1212878 - DNA, 15 bp, Homo sapiens
ggagcctatgccccg

SEQ ID NO: 1212879 - DNA, 15 bp, Homo sapiens
aggagcctatgcccc

SEQ ID NO: 1212880 - DNA, 15 bp, Homo sapiens
gaggagcctatgccc

SEQ ID NO: 1212881 - DNA, 15 bp, Homo sapiens
tgaggagcctatgcc

SEQ ID NO: 1212882 - DNA, 15 bp, Homo sapiens
atgaggagcctatgc

SEQ ID NO: 1212883 - DNA, 15 bp, Homo sapiens
gatgaggagcctatg

SEQ ID NO: 1212884 - DNA, 15 bp, Homo sapiens
agatgaggagcctat

SEQ ID NO: 1212885 - DNA, 15 bp, Homo sapiens
gagatgaggagccta

SEQ ID NO: 1212886 - DNA, 15 bp, Homo sapiens
tgagatgaggagcct

SEQ ID NO: 1212887 - DNA, 15 bp, Homo sapiens
ctgagatgaggagcc

SEQ ID NO: 1212888 - DNA, 15 bp, Homo sapiens
tctgagatgaggagc

SEQ ID NO: 1212889 - DNA, 15 bp, Homo sapiens
ttctgagatgaggag

SEQ ID NO: 1212890 - DNA, 15 bp, Homo sapiens
gttctgagatgagga

SEQ ID NO: 1212891 - DNA, 15 bp, Homo sapiens
agttctgagatgagg

SEQ ID NO: 1212892 - DNA, 15 bp, Homo sapiens
tagttctgagatgag

SEQ ID NO: 1212893 - DNA, 15 bp, Homo sapiens
ctagttctgagatga

SEQ ID NO: 1212894 - DNA, 15 bp, Homo sapiens
tctagttctgagatg

SEQ ID NO: 1212895 - DNA, 15 bp, Homo sapiens
ttctagttctgagat

SEQ ID NO: 1212896 - DNA, 15 bp, Homo sapiens
tttctagttctgaga

SEQ ID NO: 1212897 - DNA, 15 bp, Homo sapiens
gtttctagttctgag

SEQ ID NO: 1212898 - DNA, 15 bp, Homo sapiens
tgtttctagttctga

SEQ ID NO: 1212899 - DNA, 15 bp, Homo sapiens
atgtttctagttctg

SEQ ID NO: 1212900 - DNA, 15 bp, Homo sapiens
catgtttctagttct

SEQ ID NO: 1212901 - DNA, 15 bp, Homo sapiens
acatgtttctagttc

SEQ ID NO: 1212902 - DNA, 15 bp, Homo sapiens
cacatgtttctagtt

SEQ ID NO: 1212903 - DNA, 15 bp, Homo sapiens
gcacatgtttctagt

SEQ ID NO: 1212904 - DNA, 15 bp, Homo sapiens
agcacatgtttctag

SEQ ID NO: 1212905 - DNA, 15 bp, Homo sapiens
gagcacatgtttcta

SEQ ID NO: 1212906 - DNA, 15 bp, Homo sapiens
agagcacatgtttct

SEQ ID NO: 1212907 - DNA, 15 bp, Homo sapiens
cagagcacatgtttc

SEQ ID NO: 1212908 - DNA, 15 bp, Homo sapiens
acagagcacatgttt

SEQ ID NO: 1212909 - DNA, 15 bp, Homo sapiens
cacagagcacatgtt

SEQ ID NO: 1212910 - DNA, 15 bp, Homo sapiens
tcacagagcacatgt

SEQ ID NO: 1212911 - DNA, 15 bp, Homo sapiens
ctcacagagcacatg

SEQ ID NO: 1212912 - DNA, 15 bp, Homo sapiens
actcacagagcacat

SEQ ID NO: 1212913 - DNA, 15 bp, Homo sapiens
aactcacagagcaca

SEQ ID NO: 1212914 - DNA, 15 bp, Homo sapiens
aaactcacagagcac

SEQ ID NO: 1212915 - DNA, 15 bp, Homo sapiens
gaaactcacagagca

SEQ ID NO: 1212916 - DNA, 15 bp, Homo sapiens
ggaaactcacagagc

SEQ ID NO: 1212917 - DNA, 15 bp, Homo sapiens
aggaaactcacagag

SEQ ID NO: 1212918 - DNA, 15 bp, Homo sapiens
aaggaaactcacaga

SEQ ID NO: 1212919 - DNA, 15 bp, Homo sapiens
gaaggaaactcacag

SEQ ID NO: 1212920 - DNA, 15 bp, Homo sapiens
agaaggaaactcaca

SEQ ID NO: 1212921 - DNA, 15 bp, Homo sapiens
aagaaggaaactcac

SEQ ID NO: 1212922 - DNA, 15 bp, Homo sapiens
caagaaggaaactca

SEQ ID NO: 1212923 - DNA, 15 bp, Homo sapiens
gcaagaaggaaactc

SEQ ID NO: 1212924 - DNA, 15 bp, Homo sapiens
ggcaagaaggaaact

SEQ ID NO: 1212925 - DNA, 15 bp, Homo sapiens
aggcaagaaggaaac

SEQ ID NO: 1212926 - DNA, 15 bp, Homo sapiens
taggcaagaaggaaa

SEQ ID NO: 1212927 - DNA, 15 bp, Homo sapiens
ctaggcaagaaggaa

SEQ ID NO: 1212928 - DNA, 15 bp, Homo sapiens
cctaggcaagaagga

SEQ ID NO: 1212929 - DNA, 15 bp, Homo sapiens
gcctaggcaagaagg

SEQ ID NO: 1212930 - DNA, 15 bp, Homo sapiens
tgcctaggcaagaag

SEQ ID NO: 1212931 - DNA, 15 bp, Homo sapiens
atgcctaggcaagaa

SEQ ID NO: 1212932 - DNA, 15 bp, Homo sapiens
gatgcctaggcaaga

SEQ ID NO: 1212933 - DNA, 15 bp, Homo sapiens
agatgcctaggcaag

SEQ ID NO: 1212934 - DNA, 15 bp, Homo sapiens
cagatgcctaggcaa

SEQ ID NO: 1212935 - DNA, 15 bp, Homo sapiens
tcagatgcctaggca

SEQ ID NO: 1212936 - DNA, 15 bp, Homo sapiens
gtcagatgcctaggc

SEQ ID NO: 1212937 - DNA, 15 bp, Homo sapiens
agtcagatgcctagg

SEQ ID NO: 1212938 - DNA, 15 bp, Homo sapiens
gagtcagatgcctag

SEQ ID NO: 1212939 - DNA, 15 bp, Homo sapiens
tgagtcagatgccta

SEQ ID NO: 1212940 - DNA, 15 bp, Homo sapiens
ctgagtcagatgcct

SEQ ID NO: 1212941 - DNA, 15 bp, Homo sapiens
cctgagtcagatgcc

SEQ ID NO: 1212942 - DNA, 15 bp, Homo sapiens
tcctgagtcagatgc

SEQ ID NO: 1212943 - DNA, 15 bp, Homo sapiens
ttcctgagtcagatg

SEQ ID NO: 1212944 - DNA, 15 bp, Homo sapiens
attcctgagtcagat

SEQ ID NO: 1212945 - DNA, 15 bp, Homo sapiens
aattcctgagtcaga

SEQ ID NO: 1212946 - DNA, 15 bp, Homo sapiens
aaattcctgagtcag

SEQ ID NO: 1212947 - DNA, 15 bp, Homo sapiens
caaattcctgagtca

SEQ ID NO: 1212948 - DNA, 15 bp, Homo sapiens
tcaaattcctgagtc

SEQ ID NO: 1212949 - DNA, 15 bp, Homo sapiens
atcaaattcctgagt

SEQ ID NO: 1212950 - DNA, 15 bp, Homo sapiens
gatcaaattcctgag

SEQ ID NO: 1212951 - DNA, 15 bp, Homo sapiens
tgatcaaattcctga

SEQ ID NO: 1212952 - DNA, 15 bp, Homo sapiens
ctgatcaaattcctg

SEQ ID NO: 1212953 - DNA, 15 bp, Homo sapiens
tctgatcaaattcct

SEQ ID NO: 1212954 - DNA, 15 bp, Homo sapiens
ttctgatcaaattcc

SEQ ID NO: 1212955 - DNA, 15 bp, Homo sapiens
cttctgatcaaattc

SEQ ID NO: 1212956 - DNA, 15 bp, Homo sapiens
acttctgatcaaatt

SEQ ID NO: 1212957 - DNA, 15 bp, Homo sapiens
aacttctgatcaaat

SEQ ID NO: 1212958 - DNA, 15 bp, Homo sapiens
taacttctgatcaaa

SEQ ID NO: 1212959 - DNA, 15 bp, Homo sapiens
ttaacttctgatcaa

SEQ ID NO: 1212960 - DNA, 15 bp, Homo sapiens
attaacttctgatca

SEQ ID NO: 1212961 - DNA, 15 bp, Homo sapiens
tattaacttctgatc

SEQ ID NO: 1212962 - DNA, 15 bp, Homo sapiens
gtattaacttctgat

SEQ ID NO: 1212963 - DNA, 15 bp, Homo sapiens
cgtattaacttctga

SEQ ID NO: 1212964 - DNA, 15 bp, Homo sapiens
tcgtattaacttctg

SEQ ID NO: 1212965 - DNA, 15 bp, Homo sapiens
ctcgtattaacttct

SEQ ID NO: 1212966 - DNA, 15 bp, Homo sapiens
cctcgtattaacttc

SEQ ID NO: 1212967 - DNA, 15 bp, Homo sapiens
tcctcgtattaactt

SEQ ID NO: 1212968 - DNA, 15 bp, Homo sapiens
ctcctcgtattaact

SEQ ID NO: 1212969 - DNA, 15 bp, Homo sapiens
tctcctcgtattaac

SEQ ID NO: 1212970 - DNA, 15 bp, Homo sapiens
ttctcctcgtattaa

SEQ ID NO: 1212971 - DNA, 15 bp, Homo sapiens
tttctcctcgtatta

SEQ ID NO: 1212972 - DNA, 15 bp, Homo sapiens
atttctcctcgtatt

SEQ ID NO: 1212973 - DNA, 15 bp, Homo sapiens
aatttctcctcgtat

SEQ ID NO: 1212974 - DNA, 15 bp, Homo sapiens
taatttctcctcgta

SEQ ID NO: 1212975 - DNA, 15 bp, Homo sapiens
gtaatttctcctcgt

SEQ ID NO: 1212976 - DNA, 15 bp, Homo sapiens
tgtaatttctcctcg

SEQ ID NO: 1212977 - DNA, 15 bp, Homo sapiens
ttgtaatttctcctc

SEQ ID NO: 1212978 - DNA, 15 bp, Homo sapiens
attgtaatttctcct

SEQ ID NO: 1212979 - DNA, 15 bp, Homo sapiens
cattgtaatttctcc

SEQ ID NO: 1212980 - DNA, 15 bp, Homo sapiens
acattgtaatttctc

SEQ ID NO: 1212981 - DNA, 15 bp, Homo sapiens
tacattgtaatttct

SEQ ID NO: 1212982 - DNA, 15 bp, Homo sapiens
ctacattgtaatttc

SEQ ID NO: 1212983 - DNA, 15 bp, Homo sapiens
gctacattgtaattt

SEQ ID NO: 1212984 - DNA, 15 bp, Homo sapiens
ggctacattgtaatt

SEQ ID NO: 1212985 - DNA, 15 bp, Homo sapiens
gggctacattgtaat

SEQ ID NO: 1212986 - DNA, 15 bp, Homo sapiens
tgggctacattgtaa

SEQ ID NO: 1212987 - DNA, 15 bp, Homo sapiens
ctgggctacattgta

SEQ ID NO: 1212988 - DNA, 15 bp, Homo sapiens
gctgggctacattgt

SEQ ID NO: 1212989 - DNA, 15 bp, Homo sapiens
tgctgggctacattg

SEQ ID NO: 1212990 - DNA, 15 bp, Homo sapiens
atgctgggctacatt

SEQ ID NO: 1212991 - DNA, 15 bp, Homo sapiens
catgctgggctacat

SEQ ID NO: 1212992 - DNA, 15 bp, Homo sapiens
tcatgctgggctaca

SEQ ID NO: 1212993 - DNA, 15 bp, Homo sapiens
ctcatgctgggctac

SEQ ID NO: 1212994 - DNA, 15 bp, Homo sapiens
gctcatgctgggcta

SEQ ID NO: 1212995 - DNA, 15 bp, Homo sapiens
tgctcatgctgggct

SEQ ID NO: 1212996 - DNA, 15 bp, Homo sapiens
ctgctcatgctgggc

SEQ ID NO: 1212997 - DNA, 15 bp, Homo sapiens
tctgctcatgctggg

SEQ ID NO: 1212998 - DNA, 15 bp, Homo sapiens
ctctgctcatgctgg

SEQ ID NO: 1212999 - DNA, 15 bp, Homo sapiens
gctctgctcatgctg

SEQ ID NO: 1213000 - DNA, 15 bp, Homo sapiens
agctctgctcatgct

SEQ ID NO: 1213001 - DNA, 15 bp, Homo sapiens
cagctctgctcatgc

SEQ ID NO: 1213002 - DNA, 15 bp, Homo sapiens
ccagctctgctcatg

SEQ ID NO: 1213003 - DNA, 15 bp, Homo sapiens
accagctctgctcat

SEQ ID NO: 1213004 - DNA, 15 bp, Homo sapiens
aaccagctctgctca

SEQ ID NO: 1213005 - DNA, 15 bp, Homo sapiens
taaccagctctgctc

SEQ ID NO: 1213006 - DNA, 15 bp, Homo sapiens
gtaaccagctctgct

SEQ ID NO: 1213007 - DNA, 15 bp, Homo sapiens
ggtaaccagctctgc

SEQ ID NO: 1213008 - DNA, 15 bp, Homo sapiens
aggtaaccagctctg

SEQ ID NO: 1213009 - DNA, 15 bp, Homo sapiens
taggtaaccagctct

SEQ ID NO: 1213010 - DNA, 15 bp, Homo sapiens
gtaggtaaccagctc

SEQ ID NO: 1213011 - DNA, 15 bp, Homo sapiens
tgtaggtaaccagct

SEQ ID NO: 1213012 - DNA, 15 bp, Homo sapiens
ttgtaggtaaccagc

SEQ ID NO: 1213013 - DNA, 15 bp, Homo sapiens
tttgtaggtaaccag

SEQ ID NO: 1213014 - DNA, 15 bp, Homo sapiens
atttgtaggtaacca

SEQ ID NO: 1213015 - DNA, 15 bp, Homo sapiens
tatttgtaggtaacc

SEQ ID NO: 1213016 - DNA, 15 bp, Homo sapiens
ttatttgtaggtaac

SEQ ID NO: 1213017 - DNA, 15 bp, Homo sapiens
tttatttgtaggtaa

SEQ ID NO: 1213018 - DNA, 15 bp, Homo sapiens
gtttatttgtaggta

SEQ ID NO: 1213019 - DNA, 15 bp, Homo sapiens
ggtttatttgtaggt

SEQ ID NO: 1213020 - DNA, 15 bp, Homo sapiens
aggtttatttgtagg

SEQ ID NO: 1213021 - DNA, 15 bp, Homo sapiens
caggtttatttgtag

SEQ ID NO: 1213022 - DNA, 15 bp, Homo sapiens
gcaggtttatttgta

SEQ ID NO: 1213023 - DNA, 15 bp, Homo sapiens
agcaggtttatttgt

SEQ ID NO: 1213024 - DNA, 15 bp, Homo sapiens
aagcaggtttatttg

SEQ ID NO: 1213025 - DNA, 15 bp, Homo sapiens
aaagcaggtttattt

SEQ ID NO: 1213026 - DNA, 15 bp, Homo sapiens
aaaagcaggtttatt

SEQ ID NO: 1213027 - DNA, 15 bp, Homo sapiens
caaaagcaggtttat

SEQ ID NO: 1213028 - DNA, 15 bp, Homo sapiens
gcaaaagcaggttta

SEQ ID NO: 1213029 - DNA, 15 bp, Homo sapiens
agcaaaagcaggttt

SEQ ID NO: 1213030 - DNA, 15 bp, Homo sapiens
aagcaaaagcaggtt

SEQ ID NO: 1213031 - DNA, 15 bp, Homo sapiens
aaagcaaaagcaggt

SEQ ID NO: 1213032 - DNA, 15 bp, Homo sapiens
aaaagcaaaagcagg

SEQ ID NO: 1213033 - DNA, 15 bp, Homo sapiens
aaaaagcaaaagcag

SEQ ID NO: 1213034 - DNA, 15 bp, Homo sapiens
aaaaaagcaaaagca

SEQ ID NO: 1213035 - DNA, 15 bp, Homo sapiens
caaaaaagcaaaagc

SEQ ID NO: 1213036 - DNA, 15 bp, Homo sapiens
ccaaaaaagcaaaag

SEQ ID NO: 1213037 - DNA, 15 bp, Homo sapiens
cccaaaaaagcaaaa

SEQ ID NO: 1213038 - DNA, 15 bp, Homo sapiens
acccaaaaaagcaaa

SEQ ID NO: 1213039 - DNA, 15 bp, Homo sapiens
cacccaaaaaagcaa

SEQ ID NO: 1213040 - DNA, 15 bp, Homo sapiens
acacccaaaaaagca

SEQ ID NO: 1213041 - DNA, 15 bp, Homo sapiens
gacacccaaaaaagc

SEQ ID NO: 1213042 - DNA, 15 bp, Homo sapiens
tgacacccaaaaaag

SEQ ID NO: 1213043 - DNA, 15 bp, Homo sapiens
gtgacacccaaaaaa

SEQ ID NO: 1213044 - DNA, 15 bp, Homo sapiens
ggtgacacccaaaaa

SEQ ID NO: 1213045 - DNA, 15 bp, Homo sapiens
aggtgacacccaaaa

SEQ ID NO: 1213046 - DNA, 15 bp, Homo sapiens
caggtgacacccaaa

SEQ ID NO: 1213047 - DNA, 15 bp, Homo sapiens
acaggtgacacccaa

SEQ ID NO: 1213048 - DNA, 15 bp, Homo sapiens
gacaggtgacaccca

SEQ ID NO: 1213049 - DNA, 15 bp, Homo sapiens
tgacaggtgacaccc

SEQ ID NO: 1213050 - DNA, 15 bp, Homo sapiens
ctgacaggtgacacc

SEQ ID NO: 1213051 - DNA, 15 bp, Homo sapiens
tctgacaggtgacac

SEQ ID NO: 1213052 - DNA, 15 bp, Homo sapiens
ttctgacaggtgaca

SEQ ID NO: 1213053 - DNA, 15 bp, Homo sapiens
tttctgacaggtgac

SEQ ID NO: 1213054 - DNA, 15 bp, Homo sapiens
atttctgacaggtga

SEQ ID NO: 1213055 - DNA, 15 bp, Homo sapiens
aatttctgacaggtg

SEQ ID NO: 1213056 - DNA, 15 bp, Homo sapiens
gaatttctgacaggt

SEQ ID NO: 1213057 - DNA, 15 bp, Homo sapiens
tgaatttctgacagg

SEQ ID NO: 1213058 - DNA, 15 bp, Homo sapiens
ttgaatttctgacag

SEQ ID NO: 1213059 - DNA, 15 bp, Homo sapiens
cttgaatttctgaca

SEQ ID NO: 1213060 - DNA, 15 bp, Homo sapiens
acttgaatttctgac

SEQ ID NO: 1213061 - DNA, 15 bp, Homo sapiens
cacttgaatttctga

SEQ ID NO: 1213062 - DNA, 15 bp, Homo sapiens
tcacttgaatttctg

SEQ ID NO: 1213063 - DNA, 15 bp, Homo sapiens
atcacttgaatttct

SEQ ID NO: 1213064 - DNA, 15 bp, Homo sapiens
catcacttgaatttc

SEQ ID NO: 1213065 - DNA, 15 bp, Homo sapiens
acatcacttgaattt

SEQ ID NO: 1213066 - DNA, 15 bp, Homo sapiens
aacatcacttgaatt

SEQ ID NO: 1213067 - DNA, 15 bp, Homo sapiens
gaacatcacttgaat

SEQ ID NO: 1213068 - DNA, 15 bp, Homo sapiens
agaacatcacttgaa

SEQ ID NO: 1213069 - DNA, 15 bp, Homo sapiens
cagaacatcacttga

SEQ ID NO: 1213070 - DNA, 15 bp, Homo sapiens
tcagaacatcacttg

SEQ ID NO: 1213071 - DNA, 15 bp, Homo sapiens
gtcagaacatcactt

SEQ ID NO: 1213072 - DNA, 15 bp, Homo sapiens
tgtcagaacatcact

SEQ ID NO: 1213073 - DNA, 15 bp, Homo sapiens
ctgtcagaacatcac

SEQ ID NO: 1213074 - DNA, 15 bp, Homo sapiens
actgtcagaacatca

SEQ ID NO: 1213075 - DNA, 15 bp, Homo sapiens
gactgtcagaacatc

SEQ ID NO: 1213076 - DNA, 15 bp, Homo sapiens
cgactgtcagaacat

SEQ ID NO: 1213077 - DNA, 15 bp, Homo sapiens
acgactgtcagaaca

SEQ ID NO: 1213078 - DNA, 15 bp, Homo sapiens
tacgactgtcagaac

SEQ ID NO: 1213079 - DNA, 15 bp, Homo sapiens
gtacgactgtcagaa

SEQ ID NO: 1213080 - DNA, 15 bp, Homo sapiens
agtacgactgtcaga

SEQ ID NO: 1213081 - DNA, 15 bp, Homo sapiens
cagtacgactgtcag

SEQ ID NO: 1213082 - DNA, 15 bp, Homo sapiens
tcagtacgactgtca

SEQ ID NO: 1213083 - DNA, 15 bp, Homo sapiens
atcagtacgactgtc

SEQ ID NO: 1213084 - DNA, 15 bp, Homo sapiens
aatcagtacgactgt

SEQ ID NO: 1213085 - DNA, 15 bp, Homo sapiens
taatcagtacgactg

SEQ ID NO: 1213086 - DNA, 15 bp, Homo sapiens
ttaatcagtacgact

SEQ ID NO: 1213087 - DNA, 15 bp, Homo sapiens
cttaatcagtacgac

SEQ ID NO: 1213088 - DNA, 15 bp, Homo sapiens
tcttaatcagtacga

SEQ ID NO: 1213089 - DNA, 15 bp, Homo sapiens
atcttaatcagtacg

SEQ ID NO: 1213090 - DNA, 15 bp, Homo sapiens
catcttaatcagtac

SEQ ID NO: 1213091 - DNA, 15 bp, Homo sapiens
acatcttaatcagta

SEQ ID NO: 1213092 - DNA, 15 bp, Homo sapiens
gacatcttaatcagt

SEQ ID NO: 1213093 - DNA, 15 bp, Homo sapiens
tgacatcttaatcag

SEQ ID NO: 1213094 - DNA, 15 bp, Homo sapiens
ctgacatcttaatca

SEQ ID NO: 1213095 - DNA, 15 bp, Homo sapiens
gctgacatcttaatc

SEQ ID NO: 1213096 - DNA, 15 bp, Homo sapiens
ggctgacatcttaat

SEQ ID NO: 1213097 - DNA, 15 bp, Homo sapiens
cggctgacatcttaa

SEQ ID NO: 1213098 - DNA, 15 bp, Homo sapiens
tcggctgacatctta

SEQ ID NO: 1213099 - DNA, 15 bp, Homo sapiens
ttcggctgacatctt

SEQ ID NO: 1213100 - DNA, 15 bp, Homo sapiens
attcggctgacatct

SEQ ID NO: 1213101 - DNA, 15 bp, Homo sapiens
tattcggctgacatc

SEQ ID NO: 1213102 - DNA, 15 bp, Homo sapiens
ctattcggctgacat

SEQ ID NO: 1213103 - DNA, 15 bp, Homo sapiens
tctattcggctgaca

SEQ ID NO: 1213104 - DNA, 15 bp, Homo sapiens
atctattcggctgac

SEQ ID NO: 1213105 - DNA, 15 bp, Homo sapiens
tatctattcggctga

SEQ ID NO: 1213106 - DNA, 15 bp, Homo sapiens
gtatctattcggctg

SEQ ID NO: 1213107 - DNA, 15 bp, Homo sapiens
agtatctattcggct

SEQ ID NO: 1213108 - DNA, 15 bp, Homo sapiens
aagtatctattcggc

SEQ ID NO: 1213109 - DNA, 15 bp, Homo sapiens
taagtatctattcgg

SEQ ID NO: 1213110 - DNA, 15 bp, Homo sapiens
ttaagtatctattcg

SEQ ID NO: 1213111 - DNA, 15 bp, Homo sapiens
cttaagtatctattc

SEQ ID NO: 1213112 - DNA, 15 bp, Homo sapiens
acttaagtatctatt

SEQ ID NO: 1213113 - DNA, 15 bp, Homo sapiens
tacttaagtatctat

SEQ ID NO: 1213114 - DNA, 15 bp, Homo sapiens
atacttaagtatcta

SEQ ID NO: 1213115 - DNA, 15 bp, Homo sapiens
aatacttaagtatct

SEQ ID NO: 1213116 - DNA, 15 bp, Homo sapiens
aaatacttaagtatc

SEQ ID NO: 1213117 - DNA, 15 bp, Homo sapiens
caaatacttaagtat

SEQ ID NO: 1213118 - DNA, 15 bp, Homo sapiens
tcaaatacttaagta

SEQ ID NO: 1213119 - DNA, 15 bp, Homo sapiens
ttcaaatacttaagt

SEQ ID NO: 1213120 - DNA, 15 bp, Homo sapiens
tttcaaatacttaag

SEQ ID NO: 1213121 - DNA, 15 bp, Homo sapiens
ttttcaaatacttaa

SEQ ID NO: 1213122 - DNA, 15 bp, Homo sapiens
tttttcaaatactta

SEQ ID NO: 1213123 - DNA, 15 bp, Homo sapiens
atttttcaaatactt

SEQ ID NO: 1213124 - DNA, 15 bp, Homo sapiens
tatttttcaaatact

SEQ ID NO: 1213125 - DNA, 15 bp, Homo sapiens
gtatttttcaaatac

SEQ ID NO: 1213126 - DNA, 15 bp, Homo sapiens
tgtatttttcaaata

SEQ ID NO: 1213127 - DNA, 15 bp, Homo sapiens
ctgtatttttcaaat

SEQ ID NO: 1213128 - DNA, 15 bp, Homo sapiens
tctgtatttttcaaa

SEQ ID NO: 1213129 - DNA, 15 bp, Homo sapiens
ctctgtatttttcaa

SEQ ID NO: 1213130 - DNA, 15 bp, Homo sapiens
tctctgtatttttca

SEQ ID NO: 1213131 - DNA, 15 bp, Homo sapiens
ctctctgtatttttc

SEQ ID NO: 1213132 - DNA, 15 bp, Homo sapiens
actctctgtattttt

SEQ ID NO: 1213133 - DNA, 15 bp, Homo sapiens
aactctctgtatttt

SEQ ID NO: 1213134 - DNA, 15 bp, Homo sapiens
aaactctctgtattt

SEQ ID NO: 1213135 - DNA, 15 bp, Homo sapiens
caaactctctgtatt

SEQ ID NO: 1213136 - DNA, 15 bp, Homo sapiens
acaaactctctgtat

SEQ ID NO: 1213137 - DNA, 15 bp, Homo sapiens
gacaaactctctgta

SEQ ID NO: 1213138 - DNA, 15 bp, Homo sapiens
tgacaaactctctgt

SEQ ID NO: 1213139 - DNA, 15 bp, Homo sapiens
ttgacaaactctctg

SEQ ID NO: 1213140 - DNA, 15 bp, Homo sapiens
tttgacaaactctct

SEQ ID NO: 1213141 - DNA, 15 bp, Homo sapiens
ttttgacaaactctc

SEQ ID NO: 1213142 - DNA, 15 bp, Homo sapiens
gttttgacaaactct

SEQ ID NO: 1213143 - DNA, 15 bp, Homo sapiens
ggttttgacaaactc

SEQ ID NO: 1213144 - DNA, 15 bp, Homo sapiens
aggttttgacaaact

SEQ ID NO: 1213145 - DNA, 15 bp, Homo sapiens
gaggttttgacaaac

SEQ ID NO: 1213146 - DNA, 15 bp, Homo sapiens
tgaggttttgacaaa

SEQ ID NO: 1213147 - DNA, 15 bp, Homo sapiens
ctgaggttttgacaa

SEQ ID NO: 1213148 - DNA, 15 bp, Homo sapiens
cctgaggttttgaca

SEQ ID NO: 1213149 - DNA, 15 bp, Homo sapiens
tcctgaggttttgac

SEQ ID NO: 1213150 - DNA, 15 bp, Homo sapiens
ttcctgaggttttga

SEQ ID NO: 1213151 - DNA, 15 bp, Homo sapiens
cttcctgaggttttg

SEQ ID NO: 1213152 - DNA, 15 bp, Homo sapiens
tcttcctgaggtttt

SEQ ID NO: 1213153 - DNA, 15 bp, Homo sapiens
ctcttcctgaggttt

SEQ ID NO: 1213154 - DNA, 15 bp, Homo sapiens
actcttcctgaggtt

SEQ ID NO: 1213155 - DNA, 15 bp, Homo sapiens
gactcttcctgaggt

SEQ ID NO: 1213156 - DNA, 15 bp, Homo sapiens
agactcttcctgagg

SEQ ID NO: 1213157 - DNA, 15 bp, Homo sapiens
tagactcttcctgag

SEQ ID NO: 1213158 - DNA, 15 bp, Homo sapiens
ttagactcttcctga

SEQ ID NO: 1213159 - DNA, 15 bp, Homo sapiens
gttagactcttcctg

SEQ ID NO: 1213160 - DNA, 15 bp, Homo sapiens
tgttagactcttcct

SEQ ID NO: 1213161 - DNA, 15 bp, Homo sapiens
ttgttagactcttcc

SEQ ID NO: 1213162 - DNA, 15 bp, Homo sapiens
tttgttagactcttc

SEQ ID NO: 1213163 - DNA, 15 bp, Homo sapiens
atttgttagactctt

SEQ ID NO: 1213164 - DNA, 15 bp, Homo sapiens
gatttgttagactct

SEQ ID NO: 1213165 - DNA, 15 bp, Homo sapiens
ggatttgttagactc

SEQ ID NO: 1213166 - DNA, 15 bp, Homo sapiens
aggatttgttagact

SEQ ID NO: 1213167 - DNA, 15 bp, Homo sapiens
aaggatttgttagac

SEQ ID NO: 1213168 - DNA, 15 bp, Homo sapiens
gaaggatttgttaga

SEQ ID NO: 1213169 - DNA, 15 bp, Homo sapiens
ggaaggatttgttag

SEQ ID NO: 1213170 - DNA, 15 bp, Homo sapiens
aggaaggatttgtta

SEQ ID NO: 1213171 - DNA, 15 bp, Homo sapiens
caggaaggatttgtt

SEQ ID NO: 1213172 - DNA, 15 bp, Homo sapiens
ccaggaaggatttgt

SEQ ID NO: 1213173 - DNA, 15 bp, Homo sapiens
cccaggaaggatttg

SEQ ID NO: 1213174 - DNA, 15 bp, Homo sapiens
tcccaggaaggattt

SEQ ID NO: 1213175 - DNA, 15 bp, Homo sapiens
ctcccaggaaggatt

SEQ ID NO: 1213176 - DNA, 15 bp, Homo sapiens
gctcccaggaaggat

SEQ ID NO: 1213177 - DNA, 15 bp, Homo sapiens
ggctcccaggaagga

SEQ ID NO: 1213178 - DNA, 15 bp, Homo sapiens
tggctcccaggaagg

SEQ ID NO: 1213179 - DNA, 15 bp, Homo sapiens
ttggctcccaggaag

SEQ ID NO: 1213180 - DNA, 15 bp, Homo sapiens
cttggctcccaggaa

SEQ ID NO: 1213181 - DNA, 15 bp, Homo sapiens
ccttggctcccagga

SEQ ID NO: 1213182 - DNA, 15 bp, Homo sapiens
tccttggctcccagg

SEQ ID NO: 1213183 - DNA, 15 bp, Homo sapiens
ttccttggctcccag

SEQ ID NO: 1213184 - DNA, 15 bp, Homo sapiens
tttccttggctccca

SEQ ID NO: 1213185 - DNA, 15 bp, Homo sapiens
ttttccttggctccc

SEQ ID NO: 1213186 - DNA, 15 bp, Homo sapiens
attttccttggctcc

SEQ ID NO: 1213187 - DNA, 15 bp, Homo sapiens
tattttccttggctc

SEQ ID NO: 1213188 - DNA, 15 bp, Homo sapiens
atattttccttggct

SEQ ID NO: 1213189 - DNA, 15 bp, Homo sapiens
aatattttccttggc

SEQ ID NO: 1213190 - DNA, 15 bp, Homo sapiens
aaatattttccttgg

SEQ ID NO: 1213191 - DNA, 15 bp, Homo sapiens
aaaatattttccttg

SEQ ID NO: 1213192 - DNA, 15 bp, Homo sapiens
taaaatattttcctt

SEQ ID NO: 1213193 - DNA, 15 bp, Homo sapiens
ttaaaatattttcct

SEQ ID NO: 1213194 - DNA, 15 bp, Homo sapiens
tttaaaatattttcc

SEQ ID NO: 1213195 - DNA, 15 bp, Homo sapiens
attttaaaatatttt

SEQ ID NO: 1213196 - DNA, 15 bp, Homo sapiens
cattttaaaatattt

SEQ ID NO: 1213197 - DNA, 15 bp, Homo sapiens
ccattttaaaatatt

SEQ ID NO: 1213198 - DNA, 15 bp, Homo sapiens
tccattttaaaatat

SEQ ID NO: 1213199 - DNA, 15 bp, Homo sapiens
ttccattttaaaata

SEQ ID NO: 1213200 - DNA, 15 bp, Homo sapiens
gttccattttaaaat

SEQ ID NO: 1213201 - DNA, 15 bp, Homo sapiens
tgttccattttaaaa

SEQ ID NO: 1213202 - DNA, 15 bp, Homo sapiens
ctgttccattttaaa

SEQ ID NO: 1213203 - DNA, 15 bp, Homo sapiens
tctgttccattttaa

SEQ ID NO: 1213204 - DNA, 15 bp, Homo sapiens
ctctgttccatttta

SEQ ID NO: 1213205 - DNA, 15 bp, Homo sapiens
cctctgttccatttt

SEQ ID NO: 1213206 - DNA, 15 bp, Homo sapiens
acctctgttccattt

SEQ ID NO: 1213207 - DNA, 15 bp, Homo sapiens
gacctctgttccatt

SEQ ID NO: 1213208 - DNA, 15 bp, Homo sapiens
cgacctctgttccat

SEQ ID NO: 1213209 - DNA, 15 bp, Homo sapiens
acgacctctgttcca

SEQ ID NO: 1213210 - DNA, 15 bp, Homo sapiens
gacgacctctgttcc

SEQ ID NO: 1213211 - DNA, 15 bp, Homo sapiens
ggacgacctctgttc

SEQ ID NO: 1213212 - DNA, 15 bp, Homo sapiens
gggacgacctctgtt

SEQ ID NO: 1213213 - DNA, 15 bp, Homo sapiens
ggggacgacctctgt

SEQ ID NO: 1213214 - DNA, 15 bp, Homo sapiens
tggggacgacctctg

SEQ ID NO: 1213215 - DNA, 15 bp, Homo sapiens
ttggggacgacctct

SEQ ID NO: 1213216 - DNA, 15 bp, Homo sapiens
gttggggacgacctc

SEQ ID NO: 1213217 - DNA, 15 bp, Homo sapiens
ggttggggacgacct

SEQ ID NO: 1213218 - DNA, 15 bp, Homo sapiens
gggttggggacgacc

SEQ ID NO: 1213219 - DNA, 15 bp, Homo sapiens
tgggttggggacgac

SEQ ID NO: 1213220 - DNA, 15 bp, Homo sapiens
ctgggttggggacga

SEQ ID NO: 1213221 - DNA, 15 bp, Homo sapiens
cctgggttggggacg

SEQ ID NO: 1213222 - DNA, 15 bp, Homo sapiens
gcctgggttggggac

SEQ ID NO: 1213223 - DNA, 15 bp, Homo sapiens
tgcctgggttgggga

SEQ ID NO: 1213224 - DNA, 15 bp, Homo sapiens
gtgcctgggttgggg

SEQ ID NO: 1213225 - DNA, 15 bp, Homo sapiens
cgtgcctgggttggg

SEQ ID NO: 1213226 - DNA, 15 bp, Homo sapiens
tcgtgcctgggttgg

SEQ ID NO: 1213227 - DNA, 15 bp, Homo sapiens
ttcgtgcctgggttg

SEQ ID NO: 1213228 - DNA, 15 bp, Homo sapiens
attcgtgcctgggtt

SEQ ID NO: 1213229 - DNA, 15 bp, Homo sapiens
aattcgtgcctgggt

SEQ ID NO: 1213230 - DNA, 15 bp, Homo sapiens
aaattcgtgcctggg

SEQ ID NO: 1213231 - DNA, 15 bp, Homo sapiens
aaaattcgtgcctgg

SEQ ID NO: 1213232 - DNA, 15 bp, Homo sapiens
gaaaattcgtgcctg

SEQ ID NO: 1213233 - DNA, 15 bp, Homo sapiens
agaaaattcgtgcct

SEQ ID NO: 1213234 - DNA, 15 bp, Homo sapiens
aagaaaattcgtgcc

SEQ ID NO: 1213235 - DNA, 15 bp, Homo sapiens
gaagaaaattcgtgc

SEQ ID NO: 1213236 - DNA, 15 bp, Homo sapiens
ggaagaaaattcgtg

SEQ ID NO: 1213237 - DNA, 15 bp, Homo sapiens
aggaagaaaattcgt

SEQ ID NO: 1213238 - DNA, 15 bp, Homo sapiens
gaggaagaaaattcg

SEQ ID NO: 1213239 - DNA, 15 bp, Homo sapiens
ggaggaagaaaattc

SEQ ID NO: 1213240 - DNA, 15 bp, Homo sapiens
cggaggaagaaaatt

SEQ ID NO: 1213241 - DNA, 15 bp, Homo sapiens
tcggaggaagaaaat

SEQ ID NO: 1213242 - DNA, 15 bp, Homo sapiens
ttcggaggaagaaaa

SEQ ID NO: 1213243 - DNA, 15 bp, Homo sapiens
tttcggaggaagaaa

SEQ ID NO: 1213244 - DNA, 15 bp, Homo sapiens
ctttcggaggaagaa

SEQ ID NO: 1213245 - DNA, 15 bp, Homo sapiens
tctttcggaggaaga

SEQ ID NO: 1213246 - DNA, 15 bp, Homo sapiens
atctttcggaggaag

SEQ ID NO: 1213247 - DNA, 15 bp, Homo sapiens
catctttcggaggaa

SEQ ID NO: 1213248 - DNA, 15 bp, Homo sapiens
tcatctttcggagga

SEQ ID NO: 1213249 - DNA, 15 bp, Homo sapiens
ctcatctttcggagg

SEQ ID NO: 1213250 - DNA, 15 bp, Homo sapiens
gctcatctttcggag

SEQ ID NO: 1213251 - DNA, 15 bp, Homo sapiens
agctcatctttcgga

SEQ ID NO: 1213252 - DNA, 15 bp, Homo sapiens
cagctcatctttcgg

SEQ ID NO: 1213253 - DNA, 15 bp, Homo sapiens
gcagctcatctttcg

SEQ ID NO: 1213254 - DNA, 15 bp, Homo sapiens
ggcagctcatctttc

SEQ ID NO: 1213255 - DNA, 15 bp, Homo sapiens
aggcagctcatcttt

SEQ ID NO: 1213256 - DNA, 15 bp, Homo sapiens
caggcagctcatctt

SEQ ID NO: 1213257 - DNA, 15 bp, Homo sapiens
acaggcagctcatct

SEQ ID NO: 1213258 - DNA, 15 bp, Homo sapiens
cacaggcagctcatc

SEQ ID NO: 1213259 - DNA, 15 bp, Homo sapiens
gcacaggcagctcat

SEQ ID NO: 1213260 - DNA, 15 bp, Homo sapiens
tgcacaggcagctca

SEQ ID NO: 1213261 - DNA, 15 bp, Homo sapiens
ttgcacaggcagctc

SEQ ID NO: 1213262 - DNA, 15 bp, Homo sapiens
gttgcacaggcagct

SEQ ID NO: 1213263 - DNA, 15 bp, Homo sapiens
agttgcacaggcagc

SEQ ID NO: 1213264 - DNA, 15 bp, Homo sapiens
gagttgcacaggcag

SEQ ID NO: 1213265 - DNA, 15 bp, Homo sapiens
ggagttgcacaggca

SEQ ID NO: 1213266 - DNA, 15 bp, Homo sapiens
aggagttgcacaggc

SEQ ID NO: 1213267 - DNA, 15 bp, Homo sapiens
caggagttgcacagg

SEQ ID NO: 1213268 - DNA, 15 bp, Homo sapiens
ccaggagttgcacag

SEQ ID NO: 1213269 - DNA, 15 bp, Homo sapiens
tccaggagttgcaca

SEQ ID NO: 1213270 - DNA, 15 bp, Homo sapiens
ttccaggagttgcac

SEQ ID NO: 1213271 - DNA, 15 bp, Homo sapiens
cttccaggagttgca

SEQ ID NO: 1213272 - DNA, 15 bp, Homo sapiens
ccttccaggagttgc

SEQ ID NO: 1213273 - DNA, 15 bp, Homo sapiens
gccttccaggagttg

SEQ ID NO: 1213274 - DNA, 15 bp, Homo sapiens
tgccttccaggagtt

SEQ ID NO: 1213275 - DNA, 15 bp, Homo sapiens
gtgccttccaggagt

SEQ ID NO: 1213276 - DNA, 15 bp, Homo sapiens
tgtgccttccaggag

SEQ ID NO: 1213277 - DNA, 15 bp, Homo sapiens
ttgtgccttccagga

SEQ ID NO: 1213278 - DNA, 15 bp, Homo sapiens
attgtgccttccagg

SEQ ID NO: 1213279 - DNA, 15 bp, Homo sapiens
gattgtgccttccag

SEQ ID NO: 1213280 - DNA, 15 bp, Homo sapiens
ggattgtgccttcca

SEQ ID NO: 1213281 - DNA, 15 bp, Homo sapiens
gggattgtgccttcc

SEQ ID NO: 1213282 - DNA, 15 bp, Homo sapiens
agggattgtgccttc

SEQ ID NO: 1213283 - DNA, 15 bp, Homo sapiens
gagggattgtgcctt

SEQ ID NO: 1213284 - DNA, 15 bp, Homo sapiens
tgagggattgtgcct

SEQ ID NO: 1213285 - DNA, 15 bp, Homo sapiens
ttgagggattgtgcc

SEQ ID NO: 1213286 - DNA, 15 bp, Homo sapiens
attgagggattgtgc

SEQ ID NO: 1213287 - DNA, 15 bp, Homo sapiens
cattgagggattgtg

SEQ ID NO: 1213288 - DNA, 15 bp, Homo sapiens
ccattgagggattgt

SEQ ID NO: 1213289 - DNA, 15 bp, Homo sapiens
accattgagggattg

SEQ ID NO: 1213290 - DNA, 15 bp, Homo sapiens
caccattgagggatt

SEQ ID NO: 1213291 - DNA, 15 bp, Homo sapiens
ccaccattgagggat

SEQ ID NO: 1213292 - DNA, 15 bp, Homo sapiens
accaccattgaggga

SEQ ID NO: 1213293 - DNA, 15 bp, Homo sapiens
aaccaccattgaggg

SEQ ID NO: 1213294 - DNA, 15 bp, Homo sapiens
caaccaccattgagg

SEQ ID NO: 1213295 - DNA, 15 bp, Homo sapiens
ccaaccaccattgag

SEQ ID NO: 1213296 - DNA, 15 bp, Homo sapiens
tccaaccaccattga

SEQ ID NO: 1213297 - DNA, 15 bp, Homo sapiens
ctccaaccaccattg

SEQ ID NO: 1213298 - DNA, 15 bp, Homo sapiens
actccaaccaccatt

SEQ ID NO: 1213299 - DNA, 15 bp, Homo sapiens
gactccaaccaccat

SEQ ID NO: 1213300 - DNA, 15 bp, Homo sapiens
tgactccaaccacca

SEQ ID NO: 1213301 - DNA, 15 bp, Homo sapiens
ctgactccaaccacc

SEQ ID NO: 1213302 - DNA, 15 bp, Homo sapiens
cctgactccaaccac

SEQ ID NO: 1213303 - DNA, 15 bp, Homo sapiens
ccctgactccaacca

SEQ ID NO: 1213304 - DNA, 15 bp, Homo sapiens
gccctgactccaacc

SEQ ID NO: 1213305 - DNA, 15 bp, Homo sapiens
agccctgactccaac

SEQ ID NO: 1213306 - DNA, 15 bp, Homo sapiens
cagccctgactccaa

SEQ ID NO: 1213307 - DNA, 15 bp, Homo sapiens
ccagccctgactcca

SEQ ID NO: 1213308 - DNA, 15 bp, Homo sapiens
gccagccctgactcc

SEQ ID NO: 1213309 - DNA, 15 bp, Homo sapiens
ggccagccctgactc

SEQ ID NO: 1213310 - DNA, 15 bp, Homo sapiens
gggccagccctgact

SEQ ID NO: 1213311 - DNA, 15 bp, Homo sapiens
tgggccagccctgac

SEQ ID NO: 1213312 - DNA, 15 bp, Homo sapiens
gtgggccagccctga

SEQ ID NO: 1213313 - DNA, 15 bp, Homo sapiens
tgtgggccagccctg

SEQ ID NO: 1213314 - DNA, 15 bp, Homo sapiens
gtgtgggccagccct

SEQ ID NO: 1213315 - DNA, 15 bp, Homo sapiens
ggtgtgggccagccc

SEQ ID NO: 1213316 - DNA, 15 bp, Homo sapiens
aggtgtgggccagcc

SEQ ID NO: 1213317 - DNA, 15 bp, Homo sapiens
caggtgtgggccagc

SEQ ID NO: 1213318 - DNA, 15 bp, Homo sapiens
gcaggtgtgggccag

SEQ ID NO: 1213319 - DNA, 15 bp, Homo sapiens
ggcaggtgtgggcca

SEQ ID NO: 1213320 - DNA, 15 bp, Homo sapiens
aggcaggtgtgggcc

SEQ ID NO: 1213321 - DNA, 15 bp, Homo sapiens
aaggcaggtgtgggc

SEQ ID NO: 1213322 - DNA, 15 bp, Homo sapiens
gaaggcaggtgtggg

SEQ ID NO: 1213323 - DNA, 15 bp, Homo sapiens
ggaaggcaggtgtgg

SEQ ID NO: 1213324 - DNA, 15 bp, Homo sapiens
gggaaggcaggtgtg

SEQ ID NO: 1213325 - DNA, 15 bp, Homo sapiens
tgggaaggcaggtgt

SEQ ID NO: 1213326 - DNA, 15 bp, Homo sapiens
ctgggaaggcaggtg

SEQ ID NO: 1213327 - DNA, 15 bp, Homo sapiens
cctgggaaggcaggt

SEQ ID NO: 1213328 - DNA, 15 bp, Homo sapiens
gcctgggaaggcagg

SEQ ID NO: 1213329 - DNA, 15 bp, Homo sapiens
ggcctgggaaggcag

SEQ ID NO: 1213330 - DNA, 15 bp, Homo sapiens
tggcctgggaaggca

SEQ ID NO: 1213331 - DNA, 15 bp, Homo sapiens
gtggcctgggaaggc

SEQ ID NO: 1213332 - DNA, 15 bp, Homo sapiens
tgtggcctgggaagg

SEQ ID NO: 1213333 - DNA, 15 bp, Homo sapiens
ctgtggcctgggaag

SEQ ID NO: 1213334 - DNA, 15 bp, Homo sapiens
cactgtggcctggga

SEQ ID NO: 1213335 - DNA, 15 bp, Homo sapiens
tcactgtggcctggg

SEQ ID NO: 1213336 - DNA, 15 bp, Homo sapiens
ttcactgtggcctgg

SEQ ID NO: 1213337 - DNA, 15 bp, Homo sapiens
cttcactgtggcctg

SEQ ID NO: 1213338 - DNA, 15 bp, Homo sapiens
ccttcactgtggcct

SEQ ID NO: 1213339 - DNA, 15 bp, Homo sapiens
cccttcactgtggcc

SEQ ID NO: 1213340 - DNA, 15 bp, Homo sapiens
ccccttcactgtggc

SEQ ID NO: 1213341 - DNA, 15 bp, Homo sapiens
gccccttcactgtgg

SEQ ID NO: 1213342 - DNA, 15 bp, Homo sapiens
agccccttcactgtg

SEQ ID NO: 1213343 - DNA, 15 bp, Homo sapiens
aagccccttcactgt

SEQ ID NO: 1213344 - DNA, 15 bp, Homo sapiens
caagccccttcactg

SEQ ID NO: 1213345 - DNA, 15 bp, Homo sapiens
ccaagccccttcact

SEQ ID NO: 1213346 - DNA, 15 bp, Homo sapiens
cccaagccccttcac

SEQ ID NO: 1213347 - DNA, 15 bp, Homo sapiens
ccccaagccccttca

SEQ ID NO: 1213348 - DNA, 15 bp, Homo sapiens
accccaagccccttc

SEQ ID NO: 1213349 - DNA, 15 bp, Homo sapiens
caccccaagcccctt

SEQ ID NO: 1213350 - DNA, 15 bp, Homo sapiens
tcaccccaagcccct

SEQ ID NO: 1213351 - DNA, 15 bp, Homo sapiens
ctcaccccaagcccc

SEQ ID NO: 1213352 - DNA, 15 bp, Homo sapiens
gctcaccccaagccc

SEQ ID NO: 1213353 - DNA, 15 bp, Homo sapiens
aaggctcaccccaag

SEQ ID NO: 1213354 - DNA, 15 bp, Homo sapiens
caaggctcaccccaa

SEQ ID NO: 1213355 - DNA, 15 bp, Homo sapiens
ccaaggctcacccca

SEQ ID NO: 1213356 - DNA, 15 bp, Homo sapiens
tccaaggctcacccc

SEQ ID NO: 1213357 - DNA, 15 bp, Homo sapiens
ttccaaggctcaccc

SEQ ID NO: 1213358 - DNA, 15 bp, Homo sapiens
gttccaaggctcacc

SEQ ID NO: 1213359 - DNA, 15 bp, Homo sapiens
tgttccaaggctcac

SEQ ID NO: 1213360 - DNA, 15 bp, Homo sapiens
ttgttccaaggctca

SEQ ID NO: 1213361 - DNA, 15 bp, Homo sapiens
cttgttccaaggctc

SEQ ID NO: 1213362 - DNA, 15 bp, Homo sapiens
gcttgttccaaggct

SEQ ID NO: 1213363 - DNA, 15 bp, Homo sapiens
tgcttgttccaaggc

SEQ ID NO: 1213364 - DNA, 15 bp, Homo sapiens
ttgcttgttccaagg

SEQ ID NO: 1213365 - DNA, 15 bp, Homo sapiens
gttgcttgttccaag

SEQ ID NO: 1213366 - DNA, 15 bp, Homo sapiens
ggttgcttgttccaa

SEQ ID NO: 1213367 - DNA, 15 bp, Homo sapiens
tggttgcttgttcca

SEQ ID NO: 1213368 - DNA, 15 bp, Homo sapiens
ctggttgcttgttcc

SEQ ID NO: 1213369 - DNA, 15 bp, Homo sapiens
cctggttgcttgttc

SEQ ID NO: 1213370 - DNA, 15 bp, Homo sapiens
gcctggttgcttgtt

SEQ ID NO: 1213371 - DNA, 15 bp, Homo sapiens
tgcctggttgcttgt

SEQ ID NO: 1213372 - DNA, 15 bp, Homo sapiens
gtgcctggttgcttg

SEQ ID NO: 1213373 - DNA, 15 bp, Homo sapiens
ggtgcctggttgctt

SEQ ID NO: 1213374 - DNA, 15 bp, Homo sapiens
aggtgcctggttgct

SEQ ID NO: 1213375 - DNA, 15 bp, Homo sapiens
gaggtgcctggttgc

SEQ ID NO: 1213376 - DNA, 15 bp, Homo sapiens
agaggtgcctggttg

SEQ ID NO: 1213377 - DNA, 15 bp, Homo sapiens
gagaggtgcctggtt

SEQ ID NO: 1213378 - DNA, 15 bp, Homo sapiens
ggagaggtgcctggt

SEQ ID NO: 1213379 - DNA, 15 bp, Homo sapiens
gggagaggtgcctgg

SEQ ID NO: 1213380 - DNA, 15 bp, Homo sapiens
ggggagaggtgcctg

SEQ ID NO: 1213381 - DNA, 15 bp, Homo sapiens
aggggagaggtgcct

SEQ ID NO: 1213382 - DNA, 15 bp, Homo sapiens
aaggggagaggtgcc

SEQ ID NO: 1213383 - DNA, 15 bp, Homo sapiens
gaaggggagaggtgc

SEQ ID NO: 1213384 - DNA, 15 bp, Homo sapiens
ggaaggggagaggtg

SEQ ID NO: 1213385 - DNA, 15 bp, Homo sapiens
aggaaggggagaggt

SEQ ID NO: 1213386 - DNA, 15 bp, Homo sapiens
gaggaaggggagagg

SEQ ID NO: 1213387 - DNA, 15 bp, Homo sapiens
agaggaaggggagag

SEQ ID NO: 1213388 - DNA, 15 bp, Homo sapiens
aagaggaaggggaga

SEQ ID NO: 1213389 - DNA, 15 bp, Homo sapiens
taagaggaaggggag

SEQ ID NO: 1213390 - DNA, 15 bp, Homo sapiens
gtaagaggaagggga

SEQ ID NO: 1213391 - DNA, 15 bp, Homo sapiens
ggtaagaggaagggg

SEQ ID NO: 1213392 - DNA, 15 bp, Homo sapiens
gggtaagaggaaggg

SEQ ID NO: 1213393 - DNA, 15 bp, Homo sapiens
tgggtaagaggaagg

SEQ ID NO: 1213394 - DNA, 15 bp, Homo sapiens
ctgggtaagaggaag

SEQ ID NO: 1213395 - DNA, 15 bp, Homo sapiens
actgggtaagaggaa

SEQ ID NO: 1213396 - DNA, 15 bp, Homo sapiens
aactgggtaagagga

SEQ ID NO: 1213397 - DNA, 15 bp, Homo sapiens
aaactgggtaagagg

SEQ ID NO: 1213398 - DNA, 15 bp, Homo sapiens
gaaactgggtaagag

SEQ ID NO: 1213399 - DNA, 15 bp, Homo sapiens
agaaactgggtaaga

SEQ ID NO: 1213400 - DNA, 15 bp, Homo sapiens
cagaaactgggtaag

SEQ ID NO: 1213401 - DNA, 15 bp, Homo sapiens
gcagaaactgggtaa

SEQ ID NO: 1213402 - DNA, 15 bp, Homo sapiens
agcagaaactgggta

SEQ ID NO: 1213403 - DNA, 15 bp, Homo sapiens
gagcagaaactgggt

SEQ ID NO: 1213404 - DNA, 15 bp, Homo sapiens
agagcagaaactggg

SEQ ID NO: 1213405 - DNA, 15 bp, Homo sapiens
cagagcagaaactgg

SEQ ID NO: 1213406 - DNA, 15 bp, Homo sapiens
gcagagcagaaactg

SEQ ID NO: 1213407 - DNA, 15 bp, Homo sapiens
ggcagagcagaaact

SEQ ID NO: 1213408 - DNA, 15 bp, Homo sapiens
aggcagagcagaaac

SEQ ID NO: 1213409 - DNA, 15 bp, Homo sapiens
gaggcagagcagaaa

SEQ ID NO: 1213410 - DNA, 15 bp, Homo sapiens
ggaggcagagcagaa

SEQ ID NO: 1213411 - DNA, 15 bp, Homo sapiens
aggaggcagagcaga

SEQ ID NO: 1213412 - DNA, 15 bp, Homo sapiens
gaggaggcagagcag

SEQ ID NO: 1213413 - DNA, 15 bp, Homo sapiens
agaggaggcagagca

SEQ ID NO: 1213414 - DNA, 15 bp, Homo sapiens
cagaggaggcagagc

SEQ ID NO: 1213415 - DNA, 15 bp, Homo sapiens
acagaggaggcagag

SEQ ID NO: 1213416 - DNA, 15 bp, Homo sapiens
gacagaggaggcaga

SEQ ID NO: 1213417 - DNA, 15 bp, Homo sapiens
agacagaggaggcag

SEQ ID NO: 1213418 - DNA, 15 bp, Homo sapiens
cagacagaggaggca

SEQ ID NO: 1213419 - DNA, 15 bp, Homo sapiens
gcagacagaggaggc

SEQ ID NO: 1213420 - DNA, 15 bp, Homo sapiens
ggcagacagaggagg

SEQ ID NO: 1213421 - DNA, 15 bp, Homo sapiens
tggcagacagaggag

SEQ ID NO: 1213422 - DNA, 15 bp, Homo sapiens
ctggcagacagagga

SEQ ID NO: 1213423 - DNA, 15 bp, Homo sapiens
gctggcagacagagg

SEQ ID NO: 1213424 - DNA, 15 bp, Homo sapiens
agctggcagacagag

SEQ ID NO: 1213425 - DNA, 15 bp, Homo sapiens
gagctggcagacaga

SEQ ID NO: 1213426 - DNA, 15 bp, Homo sapiens
ggagctggcagacag

SEQ ID NO: 1213427 - DNA, 15 bp, Homo sapiens
gggagctggcagaca

SEQ ID NO: 1213428 - DNA, 15 bp, Homo sapiens
agggagctggcagac

SEQ ID NO: 1213429 - DNA, 15 bp, Homo sapiens
gagggagctggcaga

SEQ ID NO: 1213430 - DNA, 15 bp, Homo sapiens
ggagggagctggcag

SEQ ID NO: 1213431 - DNA, 15 bp, Homo sapiens
gggagggagctggca

SEQ ID NO: 1213432 - DNA, 15 bp, Homo sapiens
ggggagggagctggc

SEQ ID NO: 1213433 - DNA, 15 bp, Homo sapiens
aggggagggagctgg

SEQ ID NO: 1213434 - DNA, 15 bp, Homo sapiens
aaggggagggagctg

SEQ ID NO: 1213435 - DNA, 15 bp, Homo sapiens
gaaggggagggagct

SEQ ID NO: 1213436 - DNA, 15 bp, Homo sapiens
agaaggggagggagc

SEQ ID NO: 1213437 - DNA, 15 bp, Homo sapiens
gagaaggggagggag

SEQ ID NO: 1213438 - DNA, 15 bp, Homo sapiens
tgagaaggggaggga

SEQ ID NO: 1213439 - DNA, 15 bp, Homo sapiens
ttgagaaggggaggg

SEQ ID NO: 1213440 - DNA, 15 bp, Homo sapiens
tttgagaaggggagg

SEQ ID NO: 1213441 - DNA, 15 bp, Homo sapiens
ctttgagaaggggag

SEQ ID NO: 1213442 - DNA, 15 bp, Homo sapiens
gctttgagaagggga

SEQ ID NO: 1213443 - DNA, 15 bp, Homo sapiens
tgctttgagaagggg

SEQ ID NO: 1213444 - DNA, 15 bp, Homo sapiens
gtgctttgagaaggg

SEQ ID NO: 1213445 - DNA, 15 bp, Homo sapiens
ggtgctttgagaagg

SEQ ID NO: 1213446 - DNA, 15 bp, Homo sapiens
tggtgctttgagaag

SEQ ID NO: 1213447 - DNA, 15 bp, Homo sapiens
gtggtgctttgagaa

SEQ ID NO: 1213448 - DNA, 15 bp, Homo sapiens
tgtggtgctttgaga

SEQ ID NO: 1213449 - DNA, 15 bp, Homo sapiens
gtgtggtgctttgag

SEQ ID NO: 1213450 - DNA, 15 bp, Homo sapiens
tgtgtggtgctttga

SEQ ID NO: 1213451 - DNA, 15 bp, Homo sapiens
ctgtgtggtgctttg

SEQ ID NO: 1213452 - DNA, 15 bp, Homo sapiens
actgtgtggtgcttt

SEQ ID NO: 1213453 - DNA, 15 bp, Homo sapiens
cactgtgtggtgctt

SEQ ID NO: 1213454 - DNA, 15 bp, Homo sapiens
ccactgtgtggtgct

SEQ ID NO: 1213455 - DNA, 15 bp, Homo sapiens
tccactgtgtggtgc

SEQ ID NO: 1213456 - DNA, 15 bp, Homo sapiens
ttccactgtgtggtg

SEQ ID NO: 1213457 - DNA, 15 bp, Homo sapiens
gttccactgtgtggt

SEQ ID NO: 1213458 - DNA, 15 bp, Homo sapiens
ggttccactgtgtgg

SEQ ID NO: 1213459 - DNA, 15 bp, Homo sapiens
gggttccactgtgtg

SEQ ID NO: 1213460 - DNA, 15 bp, Homo sapiens
tgggttccactgtgt

SEQ ID NO: 1213461 - DNA, 15 bp, Homo sapiens
ctgggttccactgtg

SEQ ID NO: 1213462 - DNA, 15 bp, Homo sapiens
actgggttccactgt

SEQ ID NO: 1213463 - DNA, 15 bp, Homo sapiens
aactgggttccactg

SEQ ID NO: 1213464 - DNA, 15 bp, Homo sapiens
caactgggttccact

SEQ ID NO: 1213465 - DNA, 15 bp, Homo sapiens
ccaactgggttccac

SEQ ID NO: 1213466 - DNA, 15 bp, Homo sapiens
cccaactgggttcca

SEQ ID NO: 1213467 - DNA, 15 bp, Homo sapiens
gcccaactgggttcc

SEQ ID NO: 1213468 - DNA, 15 bp, Homo sapiens
agcccaactgggttc

SEQ ID NO: 1213469 - DNA, 15 bp, Homo sapiens
cagcccaactgggtt

SEQ ID NO: 1213470 - DNA, 15 bp, Homo sapiens
gcagcccaactgggt

SEQ ID NO: 1213471 - DNA, 15 bp, Homo sapiens
tgcagcccaactggg

SEQ ID NO: 1213472 - DNA, 15 bp, Homo sapiens
ctgcagcccaactgg

SEQ ID NO: 1213473 - DNA, 15 bp, Homo sapiens
cctgcagcccaactg

SEQ ID NO: 1213474 - DNA, 15 bp, Homo sapiens
acctgcagcccaact

SEQ ID NO: 1213475 - DNA, 15 bp, Homo sapiens
aacctgcagcccaac

SEQ ID NO: 1213476 - DNA, 15 bp, Homo sapiens
taacctgcagcccaa

SEQ ID NO: 1213477 - DNA, 15 bp, Homo sapiens
gtaacctgcagccca

SEQ ID NO: 1213478 - DNA, 15 bp, Homo sapiens
ggtaacctgcagccc

SEQ ID NO: 1213479 - DNA, 15 bp, Homo sapiens
aggtaacctgcagcc

SEQ ID NO: 1213480 - DNA, 15 bp, Homo sapiens
gaggtaacctgcagc

SEQ ID NO: 1213481 - DNA, 15 bp, Homo sapiens
ggaggtaacctgcag

SEQ ID NO: 1213482 - DNA, 15 bp, Homo sapiens
tggaggtaacctgca

SEQ ID NO: 1213483 - DNA, 15 bp, Homo sapiens
gtggaggtaacctgc

SEQ ID NO: 1213484 - DNA, 15 bp, Homo sapiens
tgtggaggtaacctg

SEQ ID NO: 1213485 - DNA, 15 bp, Homo sapiens
gtgtggaggtaacct

SEQ ID NO: 1213486 - DNA, 15 bp, Homo sapiens
tgtgtggaggtaacc

SEQ ID NO: 1213487 - DNA, 15 bp, Homo sapiens
atgtgtggaggtaac

SEQ ID NO: 1213488 - DNA, 15 bp, Homo sapiens
aatgtgtggaggtaa

SEQ ID NO: 1213489 - DNA, 15 bp, Homo sapiens
caatgtgtggaggta

SEQ ID NO: 1213490 - DNA, 15 bp, Homo sapiens
gcaatgtgtggaggt

SEQ ID NO: 1213491 - DNA, 15 bp, Homo sapiens
agcaatgtgtggagg

SEQ ID NO: 1213492 - DNA, 15 bp, Homo sapiens
gagcaatgtgtggag

SEQ ID NO: 1213493 - DNA, 15 bp, Homo sapiens
ggagcaatgtgtgga

SEQ ID NO: 1213494 - DNA, 15 bp, Homo sapiens
tggagcaatgtgtgg

SEQ ID NO: 1213495 - DNA, 15 bp, Homo sapiens
ctggagcaatgtgtg

SEQ ID NO: 1213496 - DNA, 15 bp, Homo sapiens
tctggagcaatgtgt

SEQ ID NO: 1213497 - DNA, 15 bp, Homo sapiens
gtctggagcaatgtg

SEQ ID NO: 1213498 - DNA, 15 bp, Homo sapiens
agtctggagcaatgt

SEQ ID NO: 1213499 - DNA, 15 bp, Homo sapiens
gagtctggagcaatg

SEQ ID NO: 1213500 - DNA, 15 bp, Homo sapiens
ggagtctggagcaat

SEQ ID NO: 1213501 - DNA, 15 bp, Homo sapiens
tggagtctggagcaa

SEQ ID NO: 1213502 - DNA, 15 bp, Homo sapiens
ttggagtctggagca

SEQ ID NO: 1213503 - DNA, 15 bp, Homo sapiens
tttggagtctggagc

SEQ ID NO: 1213504 - DNA, 15 bp, Homo sapiens
atttggagtctggag

SEQ ID NO: 1213505 - DNA, 15 bp, Homo sapiens
catttggagtctgga

SEQ ID NO: 1213506 - DNA, 15 bp, Homo sapiens
acatttggagtctgg

SEQ ID NO: 1213507 - DNA, 15 bp, Homo sapiens
gacatttggagtctg

SEQ ID NO: 1213508 - DNA, 15 bp, Homo sapiens
agacatttggagtct

SEQ ID NO: 1213509 - DNA, 15 bp, Homo sapiens
cagacatttggagtc

SEQ ID NO: 1213510 - DNA, 15 bp, Homo sapiens
tcagacatttggagt

SEQ ID NO: 1213511 - DNA, 15 bp, Homo sapiens
gtcagacatttggag

SEQ ID NO: 1213512 - DNA, 15 bp, Homo sapiens
ggtcagacatttgga

SEQ ID NO: 1213513 - DNA, 15 bp, Homo sapiens
aggtcagacatttgg

SEQ ID NO: 1213514 - DNA, 15 bp, Homo sapiens
aaggtcagacatttg

SEQ ID NO: 1213515 - DNA, 15 bp, Homo sapiens
gaaggtcagacattt

SEQ ID NO: 1213516 - DNA, 15 bp, Homo sapiens
ggaaggtcagacatt

SEQ ID NO: 1213517 - DNA, 15 bp, Homo sapiens
aggaaggtcagacat

SEQ ID NO: 1213518 - DNA, 15 bp, Homo sapiens
aaggaaggtcagaca

SEQ ID NO: 1213519 - DNA, 15 bp, Homo sapiens
gaaggaaggtcagac

SEQ ID NO: 1213520 - DNA, 15 bp, Homo sapiens
ggaaggaaggtcaga

SEQ ID NO: 1213521 - DNA, 15 bp, Homo sapiens
aggaaggaaggtcag

SEQ ID NO: 1213522 - DNA, 15 bp, Homo sapiens
gaggaaggaaggtca

SEQ ID NO: 1213523 - DNA, 15 bp, Homo sapiens
tgaggaaggaaggtc

SEQ ID NO: 1213524 - DNA, 15 bp, Homo sapiens
ctgaggaaggaaggt

SEQ ID NO: 1213525 - DNA, 15 bp, Homo sapiens
gctgaggaaggaagg

SEQ ID NO: 1213526 - DNA, 15 bp, Homo sapiens
cgctgaggaaggaag

SEQ ID NO: 1213527 - DNA, 15 bp, Homo sapiens
gcgctgaggaaggaa

SEQ ID NO: 1213528 - DNA, 15 bp, Homo sapiens
ggcgctgaggaagga

SEQ ID NO: 1213529 - DNA, 15 bp, Homo sapiens
aggcgctgaggaagg

SEQ ID NO: 1213530 - DNA, 15 bp, Homo sapiens
gaggcgctgaggaag

SEQ ID NO: 1213531 - DNA, 15 bp, Homo sapiens
ggaggcgctgaggaa

SEQ ID NO: 1213532 - DNA, 15 bp, Homo sapiens
aggaggcgctgagga

SEQ ID NO: 1213533 - DNA, 15 bp, Homo sapiens
gaggaggcgctgagg

SEQ ID NO: 1213534 - DNA, 15 bp, Homo sapiens
ggaggaggcgctgag

SEQ ID NO: 1213535 - DNA, 15 bp, Homo sapiens
tggaggaggcgctga

SEQ ID NO: 1213536 - DNA, 15 bp, Homo sapiens
atggaggaggcgctg

SEQ ID NO: 1213537 - DNA, 15 bp, Homo sapiens
catggaggaggcgct

SEQ ID NO: 1213538 - DNA, 15 bp, Homo sapiens
gcatggaggaggcgc

SEQ ID NO: 1213539 - DNA, 15 bp, Homo sapiens
ggcatggaggaggcg

SEQ ID NO: 1213540 - DNA, 15 bp, Homo sapiens
aggcatggaggaggc

SEQ ID NO: 1213541 - DNA, 15 bp, Homo sapiens
taggcatggaggagg

SEQ ID NO: 1213542 - DNA, 15 bp, Homo sapiens
ttaggcatggaggag

SEQ ID NO: 1213543 - DNA, 15 bp, Homo sapiens
tttaggcatggagga

SEQ ID NO: 1213544 - DNA, 15 bp, Homo sapiens
atttaggcatggagg

SEQ ID NO: 1213545 - DNA, 15 bp, Homo sapiens
gatttaggcatggag

SEQ ID NO: 1213546 - DNA, 15 bp, Homo sapiens
ggatttaggcatgga

SEQ ID NO: 1213547 - DNA, 15 bp, Homo sapiens
cggatttaggcatgg

SEQ ID NO: 1213548 - DNA, 15 bp, Homo sapiens
tcggatttaggcatg

SEQ ID NO: 1213549 - DNA, 15 bp, Homo sapiens
gtcggatttaggcat

SEQ ID NO: 1213550 - DNA, 15 bp, Homo sapiens
ggtcggatttaggca

SEQ ID NO: 1213551 - DNA, 15 bp, Homo sapiens
aggtcggatttaggc

SEQ ID NO: 1213552 - DNA, 15 bp, Homo sapiens
caggtcggatttagg

SEQ ID NO: 1213553 - DNA, 15 bp, Homo sapiens
ccaggtcggatttag

SEQ ID NO: 1213554 - DNA, 15 bp, Homo sapiens
cccaggtcggattta

SEQ ID NO: 1213555 - DNA, 15 bp, Homo sapiens
ccccaggtcggattt

SEQ ID NO: 1213556 - DNA, 15 bp, Homo sapiens
tccccaggtcggatt

SEQ ID NO: 1213557 - DNA, 15 bp, Homo sapiens
atccccaggtcggat

SEQ ID NO: 1213558 - DNA, 15 bp, Homo sapiens
catccccaggtcgga

SEQ ID NO: 1213559 - DNA, 15 bp, Homo sapiens
acatccccaggtcgg

SEQ ID NO: 1213560 - DNA, 15 bp, Homo sapiens
aacatccccaggtcg

SEQ ID NO: 1213561 - DNA, 15 bp, Homo sapiens
aaacatccccaggtc

SEQ ID NO: 1213562 - DNA, 15 bp, Homo sapiens
aaaacatccccaggt

SEQ ID NO: 1213563 - DNA, 15 bp, Homo sapiens
caaaacatccccagg

SEQ ID NO: 1213564 - DNA, 15 bp, Homo sapiens
ccaaaacatccccag

SEQ ID NO: 1213565 - DNA, 15 bp, Homo sapiens
gccaaaacatcccca

SEQ ID NO: 1213566 - DNA, 15 bp, Homo sapiens
ggccaaaacatcccc

SEQ ID NO: 1213567 - DNA, 15 bp, Homo sapiens
tggccaaaacatccc

SEQ ID NO: 1213568 - DNA, 15 bp, Homo sapiens
ctggccaaaacatcc

SEQ ID NO: 1213569 - DNA, 15 bp, Homo sapiens
gctggccaaaacatc

SEQ ID NO: 1213570 - DNA, 15 bp, Homo sapiens
tgctggccaaaacat

SEQ ID NO: 1213571 - DNA, 15 bp, Homo sapiens
ctgctggccaaaaca

SEQ ID NO: 1213572 - DNA, 15 bp, Homo sapiens
tctgctggccaaaac

SEQ ID NO: 1213573 - DNA, 15 bp, Homo sapiens
ttctgctggccaaaa

SEQ ID NO: 1213574 - DNA, 15 bp, Homo sapiens
cttctgctggccaaa

SEQ ID NO: 1213575 - DNA, 15 bp, Homo sapiens
acttctgctggccaa

SEQ ID NO: 1213576 - DNA, 15 bp, Homo sapiens
tacttctgctggcca

SEQ ID NO: 1213577 - DNA, 15 bp, Homo sapiens
ttacttctgctggcc

SEQ ID NO: 1213578 - DNA, 15 bp, Homo sapiens
attacttctgctggc

SEQ ID NO: 1213579 - DNA, 15 bp, Homo sapiens
aattacttctgctgg

SEQ ID NO: 1213580 - DNA, 15 bp, Homo sapiens
aaattacttctgctg

SEQ ID NO: 1213581 - DNA, 15 bp, Homo sapiens
gaaattacttctgct

SEQ ID NO: 1213582 - DNA, 15 bp, Homo sapiens
agaaattacttctgc

SEQ ID NO: 1213583 - DNA, 15 bp, Homo sapiens
gagaaattacttctg

SEQ ID NO: 1213584 - DNA, 15 bp, Homo sapiens
tgagaaattacttct

SEQ ID NO: 1213585 - DNA, 15 bp, Homo sapiens
ctgagaaattacttc

SEQ ID NO: 1213586 - DNA, 15 bp, Homo sapiens
gctgagaaattactt

SEQ ID NO: 1213587 - DNA, 15 bp, Homo sapiens
agctgagaaattact

SEQ ID NO: 1213588 - DNA, 15 bp, Homo sapiens
gagctgagaaattac

SEQ ID NO: 1213589 - DNA, 15 bp, Homo sapiens
tgagctgagaaatta

SEQ ID NO: 1213590 - DNA, 15 bp, Homo sapiens
atgagctgagaaatt

SEQ ID NO: 1213591 - DNA, 15 bp, Homo sapiens
aatgagctgagaaat

SEQ ID NO: 1213592 - DNA, 15 bp, Homo sapiens
aaatgagctgagaaa

SEQ ID NO: 1213593 - DNA, 15 bp, Homo sapiens
taaatgagctgagaa

SEQ ID NO: 1213594 - DNA, 15 bp, Homo sapiens
gtaaatgagctgaga

SEQ ID NO: 1213595 - DNA, 15 bp, Homo sapiens
tgtaaatgagctgag

SEQ ID NO: 1213596 - DNA, 15 bp, Homo sapiens
aatgtaaatgagctg

SEQ ID NO: 1213597 - DNA, 15 bp, Homo sapiens
caatgtaaatgagct

SEQ ID NO: 1213598 - DNA, 15 bp, Homo sapiens
acaatgtaaatgagc

SEQ ID NO: 1213599 - DNA, 15 bp, Homo sapiens
gacaatgtaaatgag

SEQ ID NO: 1213600 - DNA, 15 bp, Homo sapiens
agacaatgtaaatga

SEQ ID NO: 1213601 - DNA, 15 bp, Homo sapiens
tagacaatgtaaatg

SEQ ID NO: 1213602 - DNA, 15 bp, Homo sapiens
ttagacaatgtaaat

SEQ ID NO: 1213603 - DNA, 15 bp, Homo sapiens
attagacaatgtaaa

SEQ ID NO: 1213604 - DNA, 15 bp, Homo sapiens
tattagacaatgtaa

SEQ ID NO: 1213605 - DNA, 15 bp, Homo sapiens
atattagacaatgta

SEQ ID NO: 1213606 - DNA, 15 bp, Homo sapiens
gatattagacaatgt

SEQ ID NO: 1213607 - DNA, 15 bp, Homo sapiens
ggatattagacaatg

SEQ ID NO: 1213608 - DNA, 15 bp, Homo sapiens
gggatattagacaat

SEQ ID NO: 1213609 - DNA, 15 bp, Homo sapiens
agggatattagacaa

SEQ ID NO: 1213610 - DNA, 15 bp, Homo sapiens
gagggatattagaca

SEQ ID NO: 1213611 - DNA, 15 bp, Homo sapiens
ggagggatattagac

SEQ ID NO: 1213612 - DNA, 15 bp, Homo sapiens
aggagggatattaga

SEQ ID NO: 1213613 - DNA, 15 bp, Homo sapiens
caggagggatattag

SEQ ID NO: 1213614 - DNA, 15 bp, Homo sapiens
gcaggagggatatta

SEQ ID NO: 1213615 - DNA, 15 bp, Homo sapiens
tgcaggagggatatt

SEQ ID NO: 1213616 - DNA, 15 bp, Homo sapiens
ctgcaggagggatat

SEQ ID NO: 1213617 - DNA, 15 bp, Homo sapiens
tctgcaggagggata

SEQ ID NO: 1213618 - DNA, 15 bp, Homo sapiens
atctgcaggagggat

SEQ ID NO: 1213619 - DNA, 15 bp, Homo sapiens
tatctgcaggaggga

SEQ ID NO: 1213620 - DNA, 15 bp, Homo sapiens
atatctgcaggaggg

SEQ ID NO: 1213621 - DNA, 15 bp, Homo sapiens
aatatctgcaggagg

SEQ ID NO: 1213622 - DNA, 15 bp, Homo sapiens
aaatatctgcaggag

SEQ ID NO: 1213623 - DNA, 15 bp, Homo sapiens
caaatatctgcagga

SEQ ID NO: 1213624 - DNA, 15 bp, Homo sapiens
acaaatatctgcagg

SEQ ID NO: 1213625 - DNA, 15 bp, Homo sapiens
aacaaatatctgcag

SEQ ID NO: 1213626 - DNA, 15 bp, Homo sapiens
aaacaaatatctgca

SEQ ID NO: 1213627 - DNA, 15 bp, Homo sapiens
aaaacaaatatctgc

SEQ ID NO: 1213628 - DNA, 15 bp, Homo sapiens
ttaaaacaaatatct

SEQ ID NO: 1213629 - DNA, 15 bp, Homo sapiens
tttaaaacaaatatc

SEQ ID NO: 1213630 - DNA, 15 bp, Homo sapiens
ttttaaaacaaatat

SEQ ID NO: 1213631 - DNA, 15 bp, Homo sapiens
tttttaaaacaaata

SEQ ID NO: 1213632 - DNA, 15 bp, Homo sapiens
gtttttaaaacaaat

SEQ ID NO: 1213633 - DNA, 15 bp, Homo sapiens
tgtttttaaaacaaa

SEQ ID NO: 1213634 - DNA, 15 bp, Homo sapiens
ttgtttttaaaacaa

SEQ ID NO: 1213635 - DNA, 15 bp, Homo sapiens
gttgtttttaaaaca

SEQ ID NO: 1213636 - DNA, 15 bp, Homo sapiens
tgttgtttttaaaac

SEQ ID NO: 1213637 - DNA, 15 bp, Homo sapiens
ttgttgtttttaaaa

SEQ ID NO: 1213638 - DNA, 15 bp, Homo sapiens
gttgttgtttttaaa

SEQ ID NO: 1213639 - DNA, 15 bp, Homo sapiens
ctgttgttgttttta

SEQ ID NO: 1213640 - DNA, 15 bp, Homo sapiens
gctgttgttgttttt

SEQ ID NO: 1213641 - DNA, 15 bp, Homo sapiens
tgctgttgttgtttt

SEQ ID NO: 1213642 - DNA, 15 bp, Homo sapiens
ttgctgttgttgttt

SEQ ID NO: 1213643 - DNA, 15 bp, Homo sapiens
cttgctgttgttgtt

SEQ ID NO: 1213644 - DNA, 15 bp, Homo sapiens
tcttgctgttgttgt

SEQ ID NO: 1213645 - DNA, 15 bp, Homo sapiens
atcttgctgttgttg

SEQ ID NO: 1213646 - DNA, 15 bp, Homo sapiens
catcttgctgttgtt

SEQ ID NO: 1213647 - DNA, 15 bp, Homo sapiens
gcatcttgctgttgt

SEQ ID NO: 1213648 - DNA, 15 bp, Homo sapiens
tgcatcttgctgttg

SEQ ID NO: 1213649 - DNA, 15 bp, Homo sapiens
atgcatcttgctgtt

SEQ ID NO: 1213650 - DNA, 15 bp, Homo sapiens
catgcatcttgctgt

SEQ ID NO: 1213651 - DNA, 15 bp, Homo sapiens
acatgcatcttgctg

SEQ ID NO: 1213652 - DNA, 15 bp, Homo sapiens
aacatgcatcttgct

SEQ ID NO: 1213653 - DNA, 15 bp, Homo sapiens
taacatgcatcttgc

SEQ ID NO: 1213654 - DNA, 15 bp, Homo sapiens
ctaacatgcatcttg

SEQ ID NO: 1213655 - DNA, 15 bp, Homo sapiens
gctaacatgcatctt

SEQ ID NO: 1213656 - DNA, 15 bp, Homo sapiens
ggctaacatgcatct

SEQ ID NO: 1213657 - DNA, 15 bp, Homo sapiens
gggctaacatgcatc

SEQ ID NO: 1213658 - DNA, 15 bp, Homo sapiens
tgggctaacatgcat

SEQ ID NO: 1213659 - DNA, 15 bp, Homo sapiens
gtgggctaacatgca

SEQ ID NO: 1213660 - DNA, 15 bp, Homo sapiens
tgtgggctaacatgc

SEQ ID NO: 1213661 - DNA, 15 bp, Homo sapiens
atgtgggctaacatg

SEQ ID NO: 1213662 - DNA, 15 bp, Homo sapiens
catgtgggctaacat

SEQ ID NO: 1213663 - DNA, 15 bp, Homo sapiens
tcatgtgggctaaca

SEQ ID NO: 1213664 - DNA, 15 bp, Homo sapiens
ctcatgtgggctaac

SEQ ID NO: 1213665 - DNA, 15 bp, Homo sapiens
actcatgtgggctaa

SEQ ID NO: 1213666 - DNA, 15 bp, Homo sapiens
gactcatgtgggcta

SEQ ID NO: 1213667 - DNA, 15 bp, Homo sapiens
agactcatgtgggct

SEQ ID NO: 1213668 - DNA, 15 bp, Homo sapiens
gagactcatgtgggc

SEQ ID NO: 1213669 - DNA, 15 bp, Homo sapiens
agagactcatgtggg

SEQ ID NO: 1213670 - DNA, 15 bp, Homo sapiens
aagagactcatgtgg

SEQ ID NO: 1213671 - DNA, 15 bp, Homo sapiens
taagagactcatgtg

SEQ ID NO: 1213672 - DNA, 15 bp, Homo sapiens
ctaagagactcatgt

SEQ ID NO: 1213673 - DNA, 15 bp, Homo sapiens
tctaagagactcatg

SEQ ID NO: 1213674 - DNA, 15 bp, Homo sapiens
ttctaagagactcat

SEQ ID NO: 1213675 - DNA, 15 bp, Homo sapiens
tttctaagagactca

SEQ ID NO: 1213676 - DNA, 15 bp, Homo sapiens
atttctaagagactc

SEQ ID NO: 1213677 - DNA, 15 bp, Homo sapiens
catttctaagagact

SEQ ID NO: 1213678 - DNA, 15 bp, Homo sapiens
ccatttctaagagac

SEQ ID NO: 1213679 - DNA, 15 bp, Homo sapiens
tccatttctaagaga

SEQ ID NO: 1213680 - DNA, 15 bp, Homo sapiens
atccatttctaagag

SEQ ID NO: 1213681 - DNA, 15 bp, Homo sapiens
tatccatttctaaga

SEQ ID NO: 1213682 - DNA, 15 bp, Homo sapiens
ttatccatttctaag

SEQ ID NO: 1213683 - DNA, 15 bp, Homo sapiens
cttatccatttctaa

SEQ ID NO: 1213684 - DNA, 15 bp, Homo sapiens
tcttatccatttcta

SEQ ID NO: 1213685 - DNA, 15 bp, Homo sapiens
atcttatccatttct

SEQ ID NO: 1213686 - DNA, 15 bp, Homo sapiens
aatcttatccatttc

SEQ ID NO: 1213687 - DNA, 15 bp, Homo sapiens
aaatcttatccattt

SEQ ID NO: 1213688 - DNA, 15 bp, Homo sapiens
aaaatcttatccatt

SEQ ID NO: 1213689 - DNA, 15 bp, Homo sapiens
aaaaatcttatccat

SEQ ID NO: 1213690 - DNA, 15 bp, Homo sapiens
aaaaaatcttatcca

SEQ ID NO: 1213691 - DNA, 15 bp, Homo sapiens
aaaaaaatcttatcc

SEQ ID NO: 1213692 - DNA, 15 bp, Homo sapiens
aaaaaaaatcttatc

SEQ ID NO: 1213693 - DNA, 15 bp, Homo sapiens
aaaaaaaaatcttat

SEQ ID NO: 1213694 - DNA, 15 bp, Homo sapiens
aaaaaaaaaatctta

SEQ ID NO: 1213695 - DNA, 15 bp, Homo sapiens
aaaaaaaaaaatctt

SEQ ID NO: 1213696 - DNA, 15 bp, Homo sapiens
ctgtcaaaaaaaaaa

SEQ ID NO: 1213697 - DNA, 15 bp, Homo sapiens
tctgtcaaaaaaaaa

SEQ ID NO: 1213698 - DNA, 15 bp, Homo sapiens
ctctgtcaaaaaaaa

SEQ ID NO: 1213699 - DNA, 15 bp, Homo sapiens
actctgtcaaaaaaa

SEQ ID NO: 1213700 - DNA, 15 bp, Homo sapiens
gactctgtcaaaaaa

SEQ ID NO: 1213701 - DNA, 15 bp, Homo sapiens
agactctgtcaaaaa

SEQ ID NO: 1213702 - DNA, 15 bp, Homo sapiens
gagactctgtcaaaa

SEQ ID NO: 1213703 - DNA, 15 bp, Homo sapiens
tgagactctgtcaaa

SEQ ID NO: 1213704 - DNA, 15 bp, Homo sapiens
gtgagactctgtcaa

SEQ ID NO: 1213705 - DNA, 15 bp, Homo sapiens
cgtgagactctgtca

SEQ ID NO: 1213706 - DNA, 15 bp, Homo sapiens
gcgtgagactctgtc

SEQ ID NO: 1213707 - DNA, 15 bp, Homo sapiens
agcgtgagactctgt

SEQ ID NO: 1213708 - DNA, 15 bp, Homo sapiens
cagcgtgagactctg

SEQ ID NO: 1213709 - DNA, 15 bp, Homo sapiens
acagcgtgagactct

SEQ ID NO: 1213710 - DNA, 15 bp, Homo sapiens
cacagcgtgagactc

SEQ ID NO: 1213711 - DNA, 15 bp, Homo sapiens
ccacagcgtgagact

SEQ ID NO: 1213712 - DNA, 15 bp, Homo sapiens
gccacagcgtgagac

SEQ ID NO: 1213713 - DNA, 15 bp, Homo sapiens
ggccacagcgtgaga

SEQ ID NO: 1213714 - DNA, 15 bp, Homo sapiens
gggccacagcgtgag

SEQ ID NO: 1213715 - DNA, 15 bp, Homo sapiens
tgggccacagcgtga

SEQ ID NO: 1213716 - DNA, 15 bp, Homo sapiens
ctgggccacagcgtg

SEQ ID NO: 1213717 - DNA, 15 bp, Homo sapiens
cctgggccacagcgt

SEQ ID NO: 1213718 - DNA, 15 bp, Homo sapiens
gcctgggccacagcg

SEQ ID NO: 1213719 - DNA, 15 bp, Homo sapiens
agcctgggccacagc

SEQ ID NO: 1213720 - DNA, 15 bp, Homo sapiens
tgcctctgcactcca

SEQ ID NO: 1213721 - DNA, 15 bp, Homo sapiens
gtgcctctgcactcc

SEQ ID NO: 1213722 - DNA, 15 bp, Homo sapiens
cgtgcctctgcactc

SEQ ID NO: 1213723 - DNA, 15 bp, Homo sapiens
tcgtgcctctgcact

SEQ ID NO: 1213724 - DNA, 15 bp, Homo sapiens
atcgtgcctctgcac

SEQ ID NO: 1213725 - DNA, 15 bp, Homo sapiens
gatcgtgcctctgca

SEQ ID NO: 1213726 - DNA, 15 bp, Homo sapiens
agatcgtgcctctgc

SEQ ID NO: 1213727 - DNA, 15 bp, Homo sapiens
gagatcgtgcctctg

SEQ ID NO: 1213728 - DNA, 15 bp, Homo sapiens
cgagatcgtgcctct

SEQ ID NO: 1213729 - DNA, 15 bp, Homo sapiens
ccgagatcgtgcctc

SEQ ID NO: 1213730 - DNA, 15 bp, Homo sapiens
gccgagatcgtgcct

SEQ ID NO: 1213731 - DNA, 15 bp, Homo sapiens
ggagccgagatcgtg

SEQ ID NO: 1213732 - DNA, 15 bp, Homo sapiens
gggagccgagatcgt

SEQ ID NO: 1213733 - DNA, 15 bp, Homo sapiens
agggagccgagatcg

SEQ ID NO: 1213734 - DNA, 15 bp, Homo sapiens
cagggagccgagatc

SEQ ID NO: 1213735 - DNA, 15 bp, Homo sapiens
gcagggagccgagat

SEQ ID NO: 1213736 - DNA, 15 bp, Homo sapiens
tgcagggagccgaga

SEQ ID NO: 1213737 - DNA, 15 bp, Homo sapiens
gtgcagggagccgag

SEQ ID NO: 1213738 - DNA, 15 bp, Homo sapiens
ggtgcagggagccga

SEQ ID NO: 1213739 - DNA, 15 bp, Homo sapiens
aggtgcagggagccg

SEQ ID NO: 1213740 - DNA, 15 bp, Homo sapiens
gaggtgcagggagcc

SEQ ID NO: 1213741 - DNA, 15 bp, Homo sapiens
ggaggtgcagggagc

SEQ ID NO: 1213742 - DNA, 15 bp, Homo sapiens
tggaggtgcagggag

SEQ ID NO: 1213743 - DNA, 15 bp, Homo sapiens
gtggaggtgcaggga

SEQ ID NO: 1213744 - DNA, 15 bp, Homo sapiens
ggtggaggtgcaggg

SEQ ID NO: 1213745 - DNA, 15 bp, Homo sapiens
aggtggaggtgcagg

SEQ ID NO: 1213746 - DNA, 15 bp, Homo sapiens
caggtggaggtgcag

SEQ ID NO: 1213747 - DNA, 15 bp, Homo sapiens
gcaggtggaggtgca

SEQ ID NO: 1213748 - DNA, 15 bp, Homo sapiens
ggcaggtggaggtgc

SEQ ID NO: 1213749 - DNA, 15 bp, Homo sapiens
cggcaggtggaggtg

SEQ ID NO: 1213750 - DNA, 15 bp, Homo sapiens
ccggcaggtggaggt

SEQ ID NO: 1213751 - DNA, 15 bp, Homo sapiens
accggcaggtggagg

SEQ ID NO: 1213752 - DNA, 15 bp, Homo sapiens
aaccggcaggtggag

SEQ ID NO: 1213753 - DNA, 15 bp, Homo sapiens
gaaccggcaggtgga

SEQ ID NO: 1213754 - DNA, 15 bp, Homo sapiens
tgaaccggcaggtgg

SEQ ID NO: 1213755 - DNA, 15 bp, Homo sapiens
ttgaaccggcaggtg

SEQ ID NO: 1213756 - DNA, 15 bp, Homo sapiens
cttgaaccggcaggt

SEQ ID NO: 1213757 - DNA, 15 bp, Homo sapiens
acttgaaccggcagg

SEQ ID NO: 1213758 - DNA, 15 bp, Homo sapiens
cacttgaaccggcag

SEQ ID NO: 1213759 - DNA, 15 bp, Homo sapiens
tcacttgaaccggca

SEQ ID NO: 1213760 - DNA, 15 bp, Homo sapiens
atcacttgaaccggc

SEQ ID NO: 1213761 - DNA, 15 bp, Homo sapiens
aatcacttgaaccgg

SEQ ID NO: 1213762 - DNA, 15 bp, Homo sapiens
gaatcacttgaaccg

SEQ ID NO: 1213763 - DNA, 15 bp, Homo sapiens
gttgaggcaggagaa

SEQ ID NO: 1213764 - DNA, 15 bp, Homo sapiens
agaggttgaggcagg

SEQ ID NO: 1213765 - DNA, 15 bp, Homo sapiens
aagaggttgaggcag

SEQ ID NO: 1213766 - DNA, 15 bp, Homo sapiens
caagaggttgaggca

SEQ ID NO: 1213767 - DNA, 15 bp, Homo sapiens
tcaagaggttgaggc

SEQ ID NO: 1213768 - DNA, 15 bp, Homo sapiens
ctcaagaggttgagg

SEQ ID NO: 1213769 - DNA, 15 bp, Homo sapiens
actcaagaggttgag

SEQ ID NO: 1213770 - DNA, 15 bp, Homo sapiens
tactcaagaggttga

SEQ ID NO: 1213771 - DNA, 15 bp, Homo sapiens
ctactcaagaggttg

SEQ ID NO: 1213772 - DNA, 15 bp, Homo sapiens
cctactcaagaggtt

SEQ ID NO: 1213773 - DNA, 15 bp, Homo sapiens
ccctactcaagaggt

SEQ ID NO: 1213774 - DNA, 15 bp, Homo sapiens
accctactcaagagg

SEQ ID NO: 1213775 - DNA, 15 bp, Homo sapiens
taccctactcaagag

SEQ ID NO: 1213776 - DNA, 15 bp, Homo sapiens
ctaccctactcaaga

SEQ ID NO: 1213777 - DNA, 15 bp, Homo sapiens
gctaccctactcaag

SEQ ID NO: 1213778 - DNA, 15 bp, Homo sapiens
agctaccctactcaa

SEQ ID NO: 1213779 - DNA, 15 bp, Homo sapiens
cagctaccctactca

SEQ ID NO: 1213780 - DNA, 15 bp, Homo sapiens
ccagctaccctactc

SEQ ID NO: 1213781 - DNA, 15 bp, Homo sapiens
cccagctaccctact

SEQ ID NO: 1213782 - DNA, 15 bp, Homo sapiens
tcccagctaccctac

SEQ ID NO: 1213783 - DNA, 15 bp, Homo sapiens
gtcccagctacccta

SEQ ID NO: 1213784 - DNA, 15 bp, Homo sapiens
agtcccagctaccct

SEQ ID NO: 1213785 - DNA, 15 bp, Homo sapiens
tagtcccagctaccc

SEQ ID NO: 1213786 - DNA, 15 bp, Homo sapiens
atagtcccagctacc

SEQ ID NO: 1213787 - DNA, 15 bp, Homo sapiens
tatagtcccagctac

SEQ ID NO: 1213788 - DNA, 15 bp, Homo sapiens
ccctatagtcccagc

SEQ ID NO: 1213789 - DNA, 15 bp, Homo sapiens
cccctatagtcccag

SEQ ID NO: 1213790 - DNA, 15 bp, Homo sapiens
acccctatagtccca

SEQ ID NO: 1213791 - DNA, 15 bp, Homo sapiens
cacccctatagtccc

SEQ ID NO: 1213792 - DNA, 15 bp, Homo sapiens
acacccctatagtcc

SEQ ID NO: 1213793 - DNA, 15 bp, Homo sapiens
cacacccctatagtc

SEQ ID NO: 1213794 - DNA, 15 bp, Homo sapiens
gcacacccctatagt

SEQ ID NO: 1213795 - DNA, 15 bp, Homo sapiens
ggcacacccctatag

SEQ ID NO: 1213796 - DNA, 15 bp, Homo sapiens
tggcacacccctata

SEQ ID NO: 1213797 - DNA, 15 bp, Homo sapiens
gtggcacacccctat

SEQ ID NO: 1213798 - DNA, 15 bp, Homo sapiens
ggtggcacaccccta

SEQ ID NO: 1213799 - DNA, 15 bp, Homo sapiens
tggtggcacacccct

SEQ ID NO: 1213800 - DNA, 15 bp, Homo sapiens
atggtggcacacccc

SEQ ID NO: 1213801 - DNA, 15 bp, Homo sapiens
catggtggcacaccc

SEQ ID NO: 1213802 - DNA, 15 bp, Homo sapiens
gcatggtggcacacc

SEQ ID NO: 1213803 - DNA, 15 bp, Homo sapiens
tgccgggcatggtgg

SEQ ID NO: 1213804 - DNA, 15 bp, Homo sapiens
ttgccgggcatggtg

SEQ ID NO: 1213805 - DNA, 15 bp, Homo sapiens
attgccgggcatggt

SEQ ID NO: 1213806 - DNA, 15 bp, Homo sapiens
aattgccgggcatgg

SEQ ID NO: 1213807 - DNA, 15 bp, Homo sapiens
aaattgccgggcatg

SEQ ID NO: 1213808 - DNA, 15 bp, Homo sapiens
aaaattgccgggcat

SEQ ID NO: 1213809 - DNA, 15 bp, Homo sapiens
aaaaattgccgggca

SEQ ID NO: 1213810 - DNA, 15 bp, Homo sapiens
aaaaaattgccgggc

SEQ ID NO: 1213811 - DNA, 15 bp, Homo sapiens
aaaaaaattgccggg

SEQ ID NO: 1213812 - DNA, 15 bp, Homo sapiens
aaaaaaaattgccgg

SEQ ID NO: 1213813 - DNA, 15 bp, Homo sapiens
aaaaaaaaattgccg

SEQ ID NO: 1213814 - DNA, 15 bp, Homo sapiens
caaaaaaaaattgcc

SEQ ID NO: 1213815 - DNA, 15 bp, Homo sapiens
acaaaaaaaaattgc

SEQ ID NO: 1213816 - DNA, 15 bp, Homo sapiens
tacaaaaaaaaattg

SEQ ID NO: 1213817 - DNA, 15 bp, Homo sapiens
aacagtgaaaccctg

SEQ ID NO: 1213818 - DNA, 15 bp, Homo sapiens
aaacagtgaaaccct

SEQ ID NO: 1213819 - DNA, 15 bp, Homo sapiens
caaaacagtgaaacc

SEQ ID NO: 1213820 - DNA, 15 bp, Homo sapiens
ccaaaacagtgaaac

SEQ ID NO: 1213821 - DNA, 15 bp, Homo sapiens
gccaaaacagtgaaa

SEQ ID NO: 1213822 - DNA, 15 bp, Homo sapiens
ggccaaaacagtgaa

SEQ ID NO: 1213823 - DNA, 15 bp, Homo sapiens
tggccaaaacagtga

SEQ ID NO: 1213824 - DNA, 15 bp, Homo sapiens
ttggccaaaacagtg

SEQ ID NO: 1213825 - DNA, 15 bp, Homo sapiens
cttggccaaaacagt

SEQ ID NO: 1213826 - DNA, 15 bp, Homo sapiens
gcttggccaaaacag

SEQ ID NO: 1213827 - DNA, 15 bp, Homo sapiens
agcttggccaaaaca

SEQ ID NO: 1213828 - DNA, 15 bp, Homo sapiens
cagcttggccaaaac

SEQ ID NO: 1213829 - DNA, 15 bp, Homo sapiens
ccagcttggccaaaa

SEQ ID NO: 1213830 - DNA, 15 bp, Homo sapiens
accagcttggccaaa

SEQ ID NO: 1213831 - DNA, 15 bp, Homo sapiens
gaccagcttggccaa

SEQ ID NO: 1213832 - DNA, 15 bp, Homo sapiens
agaccagcttggcca

SEQ ID NO: 1213833 - DNA, 15 bp, Homo sapiens
aagaccagcttggcc

SEQ ID NO: 1213834 - DNA, 15 bp, Homo sapiens
caagaccagcttggc

SEQ ID NO: 1213835 - DNA, 15 bp, Homo sapiens
tcaagaccagcttgg

SEQ ID NO: 1213836 - DNA, 15 bp, Homo sapiens
ttcaagaccagcttg

SEQ ID NO: 1213837 - DNA, 15 bp, Homo sapiens
gttcaagaccagctt

SEQ ID NO: 1213838 - DNA, 15 bp, Homo sapiens
agttcaagaccagct

SEQ ID NO: 1213839 - DNA, 15 bp, Homo sapiens
agggcagatcacctg

SEQ ID NO: 1213840 - DNA, 15 bp, Homo sapiens
gagggcagatcacct

SEQ ID NO: 1213841 - DNA, 15 bp, Homo sapiens
ggagggcagatcacc

SEQ ID NO: 1213842 - DNA, 15 bp, Homo sapiens
aggagggcagatcac

SEQ ID NO: 1213843 - DNA, 15 bp, Homo sapiens
gaggagggcagatca

SEQ ID NO: 1213844 - DNA, 15 bp, Homo sapiens
tgaggagggcagatc

SEQ ID NO: 1213845 - DNA, 15 bp, Homo sapiens
ctgaggagggcagat

SEQ ID NO: 1213846 - DNA, 15 bp, Homo sapiens
gctgaggagggcaga

SEQ ID NO: 1213847 - DNA, 15 bp, Homo sapiens
agctgaggagggcag

SEQ ID NO: 1213848 - DNA, 15 bp, Homo sapiens
aagctgaggagggca

SEQ ID NO: 1213849 - DNA, 15 bp, Homo sapiens
gaagctgaggagggc

SEQ ID NO: 1213850 - DNA, 15 bp, Homo sapiens
ggaagctgaggaggg

SEQ ID NO: 1213851 - DNA, 15 bp, Homo sapiens
gggaagctgaggagg

SEQ ID NO: 1213852 - DNA, 15 bp, Homo sapiens
tgggaagctgaggag

SEQ ID NO: 1213853 - DNA, 15 bp, Homo sapiens
ttgggaagctgagga

SEQ ID NO: 1213854 - DNA, 15 bp, Homo sapiens
cgcagtggctcatgc

SEQ ID NO: 1213855 - DNA, 15 bp, Homo sapiens
gcgcagtggctcatg

SEQ ID NO: 1213856 - DNA, 15 bp, Homo sapiens
tgcgcagtggctcat

SEQ ID NO: 1213857 - DNA, 15 bp, Homo sapiens
gtgcgcagtggctca

SEQ ID NO: 1213858 - DNA, 15 bp, Homo sapiens
tgtgcgcagtggctc

SEQ ID NO: 1213859 - DNA, 15 bp, Homo sapiens
ctgtgcgcagtggct

SEQ ID NO: 1213860 - DNA, 15 bp, Homo sapiens
gctgtgcgcagtggc

SEQ ID NO: 1213861 - DNA, 15 bp, Homo sapiens
agctgtgcgcagtgg

SEQ ID NO: 1213862 - DNA, 15 bp, Homo sapiens
cagctgtgcgcagtg

SEQ ID NO: 1213863 - DNA, 15 bp, Homo sapiens
ccagctgtgcgcagt

SEQ ID NO: 1213864 - DNA, 15 bp, Homo sapiens
gccagctgtgcgcag

SEQ ID NO: 1213865 - DNA, 15 bp, Homo sapiens
tgccagctgtgcgca

SEQ ID NO: 1213866 - DNA, 15 bp, Homo sapiens
ttgccagctgtgcgc

SEQ ID NO: 1213867 - DNA, 15 bp, Homo sapiens
attgccagctgtgcg

SEQ ID NO: 1213868 - DNA, 15 bp, Homo sapiens
cattgccagctgtgc

SEQ ID NO: 1213869 - DNA, 15 bp, Homo sapiens
ccattgccagctgtg

SEQ ID NO: 1213870 - DNA, 15 bp, Homo sapiens
gccattgccagctgt

SEQ ID NO: 1213871 - DNA, 15 bp, Homo sapiens
agccattgccagctg

SEQ ID NO: 1213872 - DNA, 15 bp, Homo sapiens
tagccattgccagct

SEQ ID NO: 1213873 - DNA, 15 bp, Homo sapiens
ttagccattgccagc

SEQ ID NO: 1213874 - DNA, 15 bp, Homo sapiens
cttagccattgccag

SEQ ID NO: 1213875 - DNA, 15 bp, Homo sapiens
tcttagccattgcca

SEQ ID NO: 1213876 - DNA, 15 bp, Homo sapiens
atcttagccattgcc

SEQ ID NO: 1213877 - DNA, 15 bp, Homo sapiens
aatcttagccattgc

SEQ ID NO: 1213878 - DNA, 15 bp, Homo sapiens
aaatcttagccattg

SEQ ID NO: 1213879 - DNA, 15 bp, Homo sapiens
aaaatcttagccatt

SEQ ID NO: 1213880 - DNA, 15 bp, Homo sapiens
aaaaatcttagccat

SEQ ID NO: 1213881 - DNA, 15 bp, Homo sapiens
aaaaaatcttagcca

SEQ ID NO: 1213882 - DNA, 15 bp, Homo sapiens
caaaaaatcttagcc

SEQ ID NO: 1213883 - DNA, 15 bp, Homo sapiens
tcaaaaaatcttagc

SEQ ID NO: 1213884 - DNA, 15 bp, Homo sapiens
atcaaaaaatcttag

SEQ ID NO: 1213885 - DNA, 15 bp, Homo sapiens
catcaaaaaatctta

SEQ ID NO: 1213886 - DNA, 15 bp, Homo sapiens
tcatcaaaaaatctt

SEQ ID NO: 1213887 - DNA, 15 bp, Homo sapiens
atcatcaaaaaatct

SEQ ID NO: 1213888 - DNA, 15 bp, Homo sapiens
aatcatcaaaaaatc

SEQ ID NO: 1213889 - DNA, 15 bp, Homo sapiens
gaatcatcaaaaaat

SEQ ID NO: 1213890 - DNA, 15 bp, Homo sapiens
tgaatcatcaaaaaa

SEQ ID NO: 1213891 - DNA, 15 bp, Homo sapiens
ttgaatcatcaaaaa

SEQ ID NO: 1213892 - DNA, 15 bp, Homo sapiens
gttgaatcatcaaaa

SEQ ID NO: 1213893 - DNA, 15 bp, Homo sapiens
tgttgaatcatcaaa

SEQ ID NO: 1213894 - DNA, 15 bp, Homo sapiens
ttgttgaatcatcaa

SEQ ID NO: 1213895 - DNA, 15 bp, Homo sapiens
gttgttgaatcatca

SEQ ID NO: 1213896 - DNA, 15 bp, Homo sapiens
tgttgttgaatcatc

SEQ ID NO: 1213897 - DNA, 15 bp, Homo sapiens
ttgttgttgaatcat

SEQ ID NO: 1213898 - DNA, 15 bp, Homo sapiens
gttgttgttgaatca

SEQ ID NO: 1213899 - DNA, 15 bp, Homo sapiens
tgttgttgttgaatc

SEQ ID NO: 1213900 - DNA, 15 bp, Homo sapiens
ttgttgttgttgaat

SEQ ID NO: 1213901 - DNA, 15 bp, Homo sapiens
gttgttgttgttgaa

SEQ ID NO: 1213902 - DNA, 15 bp, Homo sapiens
atttttgttgttgtt

SEQ ID NO: 1213903 - DNA, 15 bp, Homo sapiens
catttttgttgttgt

SEQ ID NO: 1213904 - DNA, 15 bp, Homo sapiens
ccatttttgttgttg

SEQ ID NO: 1213905 - DNA, 15 bp, Homo sapiens
cccatttttgttgtt

SEQ ID NO: 1213906 - DNA, 15 bp, Homo sapiens
tcccatttttgttgt

SEQ ID NO: 1213907 - DNA, 15 bp, Homo sapiens
gtcccatttttgttg

SEQ ID NO: 1213908 - DNA, 15 bp, Homo sapiens
tgtcccatttttgtt

SEQ ID NO: 1213909 - DNA, 15 bp, Homo sapiens
ttgtcccatttttgt

SEQ ID NO: 1213910 - DNA, 15 bp, Homo sapiens
attgtcccatttttg

SEQ ID NO: 1213911 - DNA, 15 bp, Homo sapiens
cattgtcccattttt

SEQ ID NO: 1213912 - DNA, 15 bp, Homo sapiens
tcattgtcccatttt

SEQ ID NO: 1213913 - DNA, 15 bp, Homo sapiens
ttcattgtcccattt

SEQ ID NO: 1213914 - DNA, 15 bp, Homo sapiens
cttcattgtcccatt

SEQ ID NO: 1213915 - DNA, 15 bp, Homo sapiens
gcttcattgtcccat

SEQ ID NO: 1213916 - DNA, 15 bp, Homo sapiens
tgcttcattgtccca

SEQ ID NO: 1213917 - DNA, 15 bp, Homo sapiens
ttgcttcattgtccc

SEQ ID NO: 1213918 - DNA, 15 bp, Homo sapiens
attgcttcattgtcc

SEQ ID NO: 1213919 - DNA, 15 bp, Homo sapiens
cattgcttcattgtc

SEQ ID NO: 1213920 - DNA, 15 bp, Homo sapiens
acattgcttcattgt

SEQ ID NO: 1213921 - DNA, 15 bp, Homo sapiens
cacattgcttcattg

SEQ ID NO: 1213922 - DNA, 15 bp, Homo sapiens
gcacattgcttcatt

SEQ ID NO: 1213923 - DNA, 15 bp, Homo sapiens
tgcacattgcttcat

SEQ ID NO: 1213924 - DNA, 15 bp, Homo sapiens
gtgcacattgcttca

SEQ ID NO: 1213925 - DNA, 15 bp, Homo sapiens
tgtgcacattgcttc

SEQ ID NO: 1213926 - DNA, 15 bp, Homo sapiens
ctgtgcacattgctt

SEQ ID NO: 1213927 - DNA, 15 bp, Homo sapiens
actgtgcacattgct

SEQ ID NO: 1213928 - DNA, 15 bp, Homo sapiens
cactgtgcacattgc

SEQ ID NO: 1213929 - DNA, 15 bp, Homo sapiens
tcactgtgcacattg

SEQ ID NO: 1213930 - DNA, 15 bp, Homo sapiens
gtcactgtgcacatt

SEQ ID NO: 1213931 - DNA, 15 bp, Homo sapiens
tgtcactgtgcacat

SEQ ID NO: 1213932 - DNA, 15 bp, Homo sapiens
ctgtcactgtgcaca

SEQ ID NO: 1213933 - DNA, 15 bp, Homo sapiens
gctgtcactgtgcac

SEQ ID NO: 1213934 - DNA, 15 bp, Homo sapiens
cgctgtcactgtgca

SEQ ID NO: 1213935 - DNA, 15 bp, Homo sapiens
ccgctgtcactgtgc

SEQ ID NO: 1213936 - DNA, 15 bp, Homo sapiens
tccgctgtcactgtg

SEQ ID NO: 1213937 - DNA, 15 bp, Homo sapiens
ctccgctgtcactgt

SEQ ID NO: 1213938 - DNA, 15 bp, Homo sapiens
tctccgctgtcactg

SEQ ID NO: 1213939 - DNA, 15 bp, Homo sapiens
ctctccgctgtcact

SEQ ID NO: 1213940 - DNA, 15 bp, Homo sapiens
cctctccgctgtcac

SEQ ID NO: 1213941 - DNA, 15 bp, Homo sapiens
ccctctccgctgtca

SEQ ID NO: 1213942 - DNA, 15 bp, Homo sapiens
gccctctccgctgtc

SEQ ID NO: 1213943 - DNA, 15 bp, Homo sapiens
cgccctctccgctgt

SEQ ID NO: 1213944 - DNA, 15 bp, Homo sapiens
tcgccctctccgctg

SEQ ID NO: 1213945 - DNA, 15 bp, Homo sapiens
ctcgccctctccgct

SEQ ID NO: 1213946 - DNA, 15 bp, Homo sapiens
actcgccctctccgc

SEQ ID NO: 1213947 - DNA, 15 bp, Homo sapiens
cactcgccctctccg

SEQ ID NO: 1213948 - DNA, 15 bp, Homo sapiens
tcactcgccctctcc

SEQ ID NO: 1213949 - DNA, 15 bp, Homo sapiens
ctcactcgccctctc

SEQ ID NO: 1213950 - DNA, 15 bp, Homo sapiens
cctcactcgccctct

SEQ ID NO: 1213951 - DNA, 15 bp, Homo sapiens
ccctcactcgccctc

SEQ ID NO: 1213952 - DNA, 15 bp, Homo sapiens
cccctcactcgccct

SEQ ID NO: 1213953 - DNA, 15 bp, Homo sapiens
gcccctcactcgccc

SEQ ID NO: 1213954 - DNA, 15 bp, Homo sapiens
tgcccctcactcgcc

SEQ ID NO: 1213955 - DNA, 15 bp, Homo sapiens
ttgcccctcactcgc

SEQ ID NO: 1213956 - DNA, 15 bp, Homo sapiens
cttgcccctcactcg

SEQ ID NO: 1213957 - DNA, 15 bp, Homo sapiens
ccttgcccctcactc

SEQ ID NO: 1213958 - DNA, 15 bp, Homo sapiens
gccttgcccctcact

SEQ ID NO: 1213959 - DNA, 15 bp, Homo sapiens
ggccttgcccctcac

SEQ ID NO: 1213960 - DNA, 15 bp, Homo sapiens
cggccttgcccctca

SEQ ID NO: 1213961 - DNA, 15 bp, Homo sapiens
tcggccttgcccctc

SEQ ID NO: 1213962 - DNA, 15 bp, Homo sapiens
ttcggccttgcccct

SEQ ID NO: 1213963 - DNA, 15 bp, Homo sapiens
cttcggccttgcccc

SEQ ID NO: 1213964 - DNA, 15 bp, Homo sapiens
ccttcggccttgccc

SEQ ID NO: 1213965 - DNA, 15 bp, Homo sapiens
cccttcggccttgcc

SEQ ID NO: 1213966 - DNA, 15 bp, Homo sapiens
gcccttcggccttgc

SEQ ID NO: 1213967 - DNA, 15 bp, Homo sapiens
agcccttcggccttg

SEQ ID NO: 1213968 - DNA, 15 bp, Homo sapiens
cagcccttcggcctt

SEQ ID NO: 1213969 - DNA, 15 bp, Homo sapiens
tcagcccttcggcct

SEQ ID NO: 1213970 - DNA, 15 bp, Homo sapiens
atcagcccttcggcc

SEQ ID NO: 1213971 - DNA, 15 bp, Homo sapiens
gatcagcccttcggc

SEQ ID NO: 1213972 - DNA, 15 bp, Homo sapiens
agatcagcccttcgg

SEQ ID NO: 1213973 - DNA, 15 bp, Homo sapiens
cagatcagcccttcg

SEQ ID NO: 1213974 - DNA, 15 bp, Homo sapiens
gcagatcagcccttc

SEQ ID NO: 1213975 - DNA, 15 bp, Homo sapiens
ggcagatcagccctt

SEQ ID NO: 1213976 - DNA, 15 bp, Homo sapiens
tggcagatcagccct

SEQ ID NO: 1213977 - DNA, 15 bp, Homo sapiens
ctggcagatcagccc

SEQ ID NO: 1213978 - DNA, 15 bp, Homo sapiens
cctggcagatcagcc

SEQ ID NO: 1213979 - DNA, 15 bp, Homo sapiens
tcctggcagatcagc

SEQ ID NO: 1213980 - DNA, 15 bp, Homo sapiens
ctcctggcagatcag

SEQ ID NO: 1213981 - DNA, 15 bp, Homo sapiens
actcctggcagatca

SEQ ID NO: 1213982 - DNA, 15 bp, Homo sapiens
gactcctggcagatc

SEQ ID NO: 1213983 - DNA, 15 bp, Homo sapiens
ggactcctggcagat

SEQ ID NO: 1213984 - DNA, 15 bp, Homo sapiens
tggactcctggcaga

SEQ ID NO: 1213985 - DNA, 15 bp, Homo sapiens
ctggactcctggcag

SEQ ID NO: 1213986 - DNA, 15 bp, Homo sapiens
gctggactcctggca

SEQ ID NO: 1213987 - DNA, 15 bp, Homo sapiens
tgctggactcctggc

SEQ ID NO: 1213988 - DNA, 15 bp, Homo sapiens
atgctggactcctgg

SEQ ID NO: 1213989 - DNA, 15 bp, Homo sapiens
gatgctggactcctg

SEQ ID NO: 1213990 - DNA, 15 bp, Homo sapiens
agatgctggactcct

SEQ ID NO: 1213991 - DNA, 15 bp, Homo sapiens
acagatgctggactc

SEQ ID NO: 1213992 - DNA, 15 bp, Homo sapiens
gacagatgctggact

SEQ ID NO: 1213993 - DNA, 15 bp, Homo sapiens
ggacagatgctggac

SEQ ID NO: 1213994 - DNA, 15 bp, Homo sapiens
cggacagatgctgga

SEQ ID NO: 1213995 - DNA, 15 bp, Homo sapiens
tcggacagatgctgg

SEQ ID NO: 1213996 - DNA, 15 bp, Homo sapiens
ctcggacagatgctg

SEQ ID NO: 1213997 - DNA, 15 bp, Homo sapiens
gctcggacagatgct

SEQ ID NO: 1213998 - DNA, 15 bp, Homo sapiens
agctcggacagatgc

SEQ ID NO: 1213999 - DNA, 15 bp, Homo sapiens
cagctcggacagatg

SEQ ID NO: 1214000 - DNA, 15 bp, Homo sapiens
gcagctcggacagat

SEQ ID NO: 1214001 - DNA, 15 bp, Homo sapiens
agcagctcggacaga

SEQ ID NO: 1214002 - DNA, 15 bp, Homo sapiens
aagcagctcggacag

SEQ ID NO: 1214003 - DNA, 15 bp, Homo sapiens
aaagcagctcggaca

SEQ ID NO: 1214004 - DNA, 15 bp, Homo sapiens
gaaagcagctcggac

SEQ ID NO: 1214005 - DNA, 15 bp, Homo sapiens
tgaaagcagctcgga

SEQ ID NO: 1214006 - DNA, 15 bp, Homo sapiens
ttgaaagcagctcgg

SEQ ID NO: 1214007 - DNA, 15 bp, Homo sapiens
attgaaagcagctcg

SEQ ID NO: 1214008 - DNA, 15 bp, Homo sapiens
gattgaaagcagctc

SEQ ID NO: 1214009 - DNA, 15 bp, Homo sapiens
agattgaaagcagct

SEQ ID NO: 1214010 - DNA, 15 bp, Homo sapiens
gagattgaaagcagc

SEQ ID NO: 1214011 - DNA, 15 bp, Homo sapiens
ggagattgaaagcag

SEQ ID NO: 1214012 - DNA, 15 bp, Homo sapiens
aggagattgaaagca

SEQ ID NO: 1214013 - DNA, 15 bp, Homo sapiens
gaggagattgaaagc

SEQ ID NO: 1214014 - DNA, 15 bp, Homo sapiens
tgaggagattgaaag

SEQ ID NO: 1214015 - DNA, 15 bp, Homo sapiens
ctgaggagattgaaa

SEQ ID NO: 1214016 - DNA, 15 bp, Homo sapiens
cctgaggagattgaa

SEQ ID NO: 1214017 - DNA, 15 bp, Homo sapiens
tcctgaggagattga

SEQ ID NO: 1214018 - DNA, 15 bp, Homo sapiens
ctcctgaggagattg

SEQ ID NO: 1214019 - DNA, 15 bp, Homo sapiens
gctcctgaggagatt

SEQ ID NO: 1214020 - DNA, 15 bp, Homo sapiens
agctcctgaggagat

SEQ ID NO: 1214021 - DNA, 15 bp, Homo sapiens
aagctcctgaggaga

SEQ ID NO: 1214022 - DNA, 15 bp, Homo sapiens
caagctcctgaggag

SEQ ID NO: 1214023 - DNA, 15 bp, Homo sapiens
ccaagctcctgagga

SEQ ID NO: 1214024 - DNA, 15 bp, Homo sapiens
cccaagctcctgagg

SEQ ID NO: 1214025 - DNA, 15 bp, Homo sapiens
ccccaagctcctgag

SEQ ID NO: 1214026 - DNA, 15 bp, Homo sapiens
gccccaagctcctga

SEQ ID NO: 1214027 - DNA, 15 bp, Homo sapiens
tgccccaagctcctg

SEQ ID NO: 1214028 - DNA, 15 bp, Homo sapiens
gtgccccaagctcct

SEQ ID NO: 1214029 - DNA, 15 bp, Homo sapiens
tgtgccccaagctcc

SEQ ID NO: 1214030 - DNA, 15 bp, Homo sapiens
ctgtgccccaagctc

SEQ ID NO: 1214031 - DNA, 15 bp, Homo sapiens
tctgtgccccaagct

SEQ ID NO: 1214032 - DNA, 15 bp, Homo sapiens
gtctgtgccccaagc

SEQ ID NO: 1214033 - DNA, 15 bp, Homo sapiens
ggtctgtgccccaag

SEQ ID NO: 1214034 - DNA, 15 bp, Homo sapiens
aggtctgtgccccaa

SEQ ID NO: 1214035 - DNA, 15 bp, Homo sapiens
aaggtctgtgcccca

SEQ ID NO: 1214036 - DNA, 15 bp, Homo sapiens
gaaggtctgtgcccc

SEQ ID NO: 1214037 - DNA, 15 bp, Homo sapiens
agaaggtctgtgccc

SEQ ID NO: 1214038 - DNA, 15 bp, Homo sapiens
aagaaggtctgtgcc

SEQ ID NO: 1214039 - DNA, 15 bp, Homo sapiens
taagaaggtctgtgc

SEQ ID NO: 1214040 - DNA, 15 bp, Homo sapiens
gtaagaaggtctgtg

SEQ ID NO: 1214041 - DNA, 15 bp, Homo sapiens
ggtaagaaggtctgt

SEQ ID NO: 1214042 - DNA, 15 bp, Homo sapiens
aggtaagaaggtctg

SEQ ID NO: 1214043 - DNA, 15 bp, Homo sapiens
gaggtaagaaggtct

SEQ ID NO: 1214044 - DNA, 15 bp, Homo sapiens
ggaggtaagaaggtc

SEQ ID NO: 1214045 - DNA, 15 bp, Homo sapiens
aggaggtaagaaggt

SEQ ID NO: 1214046 - DNA, 15 bp, Homo sapiens
gaggaggtaagaagg

SEQ ID NO: 1214047 - DNA, 15 bp, Homo sapiens
agaggaggtaagaag

SEQ ID NO: 1214048 - DNA, 15 bp, Homo sapiens
gagaggaggtaagaa

SEQ ID NO: 1214049 - DNA, 15 bp, Homo sapiens
ggagaggaggtaaga

SEQ ID NO: 1214050 - DNA, 15 bp, Homo sapiens
gggagaggaggtaag

SEQ ID NO: 1214051 - DNA, 15 bp, Homo sapiens
agggagaggaggtaa

SEQ ID NO: 1214052 - DNA, 15 bp, Homo sapiens
gagggagaggaggta

SEQ ID NO: 1214053 - DNA, 15 bp, Homo sapiens
tgagggagaggaggt

SEQ ID NO: 1214054 - DNA, 15 bp, Homo sapiens
ttgagggagaggagg

SEQ ID NO: 1214055 - DNA, 15 bp, Homo sapiens
gttgagggagaggag

SEQ ID NO: 1214056 - DNA, 15 bp, Homo sapiens
ggttgagggagagga

SEQ ID NO: 1214057 - DNA, 15 bp, Homo sapiens
aggttgagggagagg

SEQ ID NO: 1214058 - DNA, 15 bp, Homo sapiens
gaggttgagggagag

SEQ ID NO: 1214059 - DNA, 15 bp, Homo sapiens
ggaggttgagggaga

SEQ ID NO: 1214060 - DNA, 15 bp, Homo sapiens
gggaggttgagggag

SEQ ID NO: 1214061 - DNA, 15 bp, Homo sapiens
agggaggttgaggga

SEQ ID NO: 1214062 - DNA, 15 bp, Homo sapiens
gagggaggttgaggg

SEQ ID NO: 1214063 - DNA, 15 bp, Homo sapiens
ggagggaggttgagg

SEQ ID NO: 1214064 - DNA, 15 bp, Homo sapiens
aggagggaggttgag

SEQ ID NO: 1214065 - DNA, 15 bp, Homo sapiens
caggagggaggttga

SEQ ID NO: 1214066 - DNA, 15 bp, Homo sapiens
gcaggagggaggttg

SEQ ID NO: 1214067 - DNA, 15 bp, Homo sapiens
agcaggagggaggtt

SEQ ID NO: 1214068 - DNA, 15 bp, Homo sapiens
aagcaggagggaggt

SEQ ID NO: 1214069 - DNA, 15 bp, Homo sapiens
caagcaggagggagg

SEQ ID NO: 1214070 - DNA, 15 bp, Homo sapiens
ccaagcaggagggag

SEQ ID NO: 1214071 - DNA, 15 bp, Homo sapiens
cccaagcaggaggga

SEQ ID NO: 1214072 - DNA, 15 bp, Homo sapiens
ccccaagcaggaggg

SEQ ID NO: 1214073 - DNA, 15 bp, Homo sapiens
cccccaagcaggagg

SEQ ID NO: 1214074 - DNA, 15 bp, Homo sapiens
gcccccaagcaggag

SEQ ID NO: 1214075 - DNA, 15 bp, Homo sapiens
agcccccaagcagga

SEQ ID NO: 1214076 - DNA, 15 bp, Homo sapiens
aagcccccaagcagg

SEQ ID NO: 1214077 - DNA, 15 bp, Homo sapiens
aaagcccccaagcag

SEQ ID NO: 1214078 - DNA, 15 bp, Homo sapiens
caaagcccccaagca

SEQ ID NO: 1214079 - DNA, 15 bp, Homo sapiens
ccaaagcccccaagc

SEQ ID NO: 1214080 - DNA, 15 bp, Homo sapiens
gccaaagcccccaag

SEQ ID NO: 1214081 - DNA, 15 bp, Homo sapiens
tgccaaagcccccaa

SEQ ID NO: 1214082 - DNA, 15 bp, Homo sapiens
ttgccaaagccccca

SEQ ID NO: 1214083 - DNA, 15 bp, Homo sapiens
gttgccaaagccccc

SEQ ID NO: 1214084 - DNA, 15 bp, Homo sapiens
agttgccaaagcccc

SEQ ID NO: 1214085 - DNA, 15 bp, Homo sapiens
cagttgccaaagccc

SEQ ID NO: 1214086 - DNA, 15 bp, Homo sapiens
ccagttgccaaagcc

SEQ ID NO: 1214087 - DNA, 15 bp, Homo sapiens
cccagttgccaaagc

SEQ ID NO: 1214088 - DNA, 15 bp, Homo sapiens
ccccagttgccaaag

SEQ ID NO: 1214089 - DNA, 15 bp, Homo sapiens
accccagttgccaaa

SEQ ID NO: 1214090 - DNA, 15 bp, Homo sapiens
aaccccagttgccaa

SEQ ID NO: 1214091 - DNA, 15 bp, Homo sapiens
caaccccagttgcca

SEQ ID NO: 1214092 - DNA, 15 bp, Homo sapiens
tcaaccccagttgcc

SEQ ID NO: 1214093 - DNA, 15 bp, Homo sapiens
ctcaaccccagttgc

SEQ ID NO: 1214094 - DNA, 15 bp, Homo sapiens
cctcaaccccagttg

SEQ ID NO: 1214095 - DNA, 15 bp, Homo sapiens
acctcaaccccagtt

SEQ ID NO: 1214096 - DNA, 15 bp, Homo sapiens
cacctcaaccccagt

SEQ ID NO: 1214097 - DNA, 15 bp, Homo sapiens
ccacctcaaccccag

SEQ ID NO: 1214098 - DNA, 15 bp, Homo sapiens
cccacctcaacccca

SEQ ID NO: 1214099 - DNA, 15 bp, Homo sapiens
tcccacctcaacccc

SEQ ID NO: 1214100 - DNA, 15 bp, Homo sapiens
ttcccacctcaaccc

SEQ ID NO: 1214101 - DNA, 15 bp, Homo sapiens
attcccacctcaacc

SEQ ID NO: 1214102 - DNA, 15 bp, Homo sapiens
cattcccacctcaac

SEQ ID NO: 1214103 - DNA, 15 bp, Homo sapiens
ccattcccacctcaa

SEQ ID NO: 1214104 - DNA, 15 bp, Homo sapiens
tccattcccacctca

SEQ ID NO: 1214105 - DNA, 15 bp, Homo sapiens
ttccattcccacctc

SEQ ID NO: 1214106 - DNA, 15 bp, Homo sapiens
gttccattcccacct

SEQ ID NO: 1214107 - DNA, 15 bp, Homo sapiens
agttccattcccacc

SEQ ID NO: 1214108 - DNA, 15 bp, Homo sapiens
gagttccattcccac

SEQ ID NO: 1214109 - DNA, 15 bp, Homo sapiens
agagttccattccca

SEQ ID NO: 1214110 - DNA, 15 bp, Homo sapiens
cagagttccattccc

SEQ ID NO: 1214111 - DNA, 15 bp, Homo sapiens
ccagagttccattcc

SEQ ID NO: 1214112 - DNA, 15 bp, Homo sapiens
tccagagttccattc

SEQ ID NO: 1214113 - DNA, 15 bp, Homo sapiens
ctccagagttccatt

SEQ ID NO: 1214114 - DNA, 15 bp, Homo sapiens
actccagagttccat

SEQ ID NO: 1214115 - DNA, 15 bp, Homo sapiens
aactccagagttcca

SEQ ID NO: 1214116 - DNA, 15 bp, Homo sapiens
gaactccagagttcc

SEQ ID NO: 1214117 - DNA, 15 bp, Homo sapiens
agaactccagagttc

SEQ ID NO: 1214118 - DNA, 15 bp, Homo sapiens
tagaactccagagtt

SEQ ID NO: 1214119 - DNA, 15 bp, Homo sapiens
gtagaactccagagt

SEQ ID NO: 1214120 - DNA, 15 bp, Homo sapiens
agtagaactccagag

SEQ ID NO: 1214121 - DNA, 15 bp, Homo sapiens
gagtagaactccaga

SEQ ID NO: 1214122 - DNA, 15 bp, Homo sapiens
tgagtagaactccag

SEQ ID NO: 1214123 - DNA, 15 bp, Homo sapiens
gtgagtagaactcca

SEQ ID NO: 1214124 - DNA, 15 bp, Homo sapiens
agtgagtagaactcc

SEQ ID NO: 1214125 - DNA, 15 bp, Homo sapiens
cagtgagtagaactc

SEQ ID NO: 1214126 - DNA, 15 bp, Homo sapiens
ccagtgagtagaact

SEQ ID NO: 1214127 - DNA, 15 bp, Homo sapiens
gccagtgagtagaac

SEQ ID NO: 1214128 - DNA, 15 bp, Homo sapiens
agccagtgagtagaa

SEQ ID NO: 1214129 - DNA, 15 bp, Homo sapiens
aagccagtgagtaga

SEQ ID NO: 1214130 - DNA, 15 bp, Homo sapiens
caagccagtgagtag

SEQ ID NO: 1214131 - DNA, 15 bp, Homo sapiens
gcaagccagtgagta

SEQ ID NO: 1214132 - DNA, 15 bp, Homo sapiens
agcaagccagtgagt

SEQ ID NO: 1214133 - DNA, 15 bp, Homo sapiens
gagcaagccagtgag

SEQ ID NO: 1214134 - DNA, 15 bp, Homo sapiens
agagcaagccagtga

SEQ ID NO: 1214135 - DNA, 15 bp, Homo sapiens
gagagcaagccagtg

SEQ ID NO: 1214136 - DNA, 15 bp, Homo sapiens
agagagcaagccagt

SEQ ID NO: 1214137 - DNA, 15 bp, Homo sapiens
gagagagcaagccag

SEQ ID NO: 1214138 - DNA, 15 bp, Homo sapiens
tgagagagcaagcca

SEQ ID NO: 1214139 - DNA, 15 bp, Homo sapiens
ttgagagagcaagcc

SEQ ID NO: 1214140 - DNA, 15 bp, Homo sapiens
attgagagagcaagc

SEQ ID NO: 1214141 - DNA, 15 bp, Homo sapiens
aattgagagagcaag

SEQ ID NO: 1214142 - DNA, 15 bp, Homo sapiens
aaattgagagagcaa

SEQ ID NO: 1214143 - DNA, 15 bp, Homo sapiens
caaattgagagagca

SEQ ID NO: 1214144 - DNA, 15 bp, Homo sapiens
tcaaattgagagagc

SEQ ID NO: 1214145 - DNA, 15 bp, Homo sapiens
gtcaaattgagagag

SEQ ID NO: 1214146 - DNA, 15 bp, Homo sapiens
tgtcaaattgagaga

SEQ ID NO: 1214147 - DNA, 15 bp, Homo sapiens
ttgtcaaattgagag

SEQ ID NO: 1214148 - DNA, 15 bp, Homo sapiens
gttgtcaaattgaga

SEQ ID NO: 1214149 - DNA, 15 bp, Homo sapiens
tgttgtcaaattgag

SEQ ID NO: 1214150 - DNA, 15 bp, Homo sapiens
atgttgtcaaattga

SEQ ID NO: 1214151 - DNA, 15 bp, Homo sapiens
tatgttgtcaaattg

SEQ ID NO: 1214152 - DNA, 15 bp, Homo sapiens
atatgttgtcaaatt

SEQ ID NO: 1214153 - DNA, 15 bp, Homo sapiens
aatatgttgtcaaat

SEQ ID NO: 1214154 - DNA, 15 bp, Homo sapiens
caatatgttgtcaaa

SEQ ID NO: 1214155 - DNA, 15 bp, Homo sapiens
acaatatgttgtcaa

SEQ ID NO: 1214156 - DNA, 15 bp, Homo sapiens
cacaatatgttgtca

SEQ ID NO: 1214157 - DNA, 15 bp, Homo sapiens
tcacaatatgttgtc

SEQ ID NO: 1214158 - DNA, 15 bp, Homo sapiens
ttcacaatatgttgt

SEQ ID NO: 1214159 - DNA, 15 bp, Homo sapiens
tttcacaatatgttg

SEQ ID NO: 1214160 - DNA, 15 bp, Homo sapiens
atttcacaatatgtt

SEQ ID NO: 1214161 - DNA, 15 bp, Homo sapiens
tatttcacaatatgt

SEQ ID NO: 1214162 - DNA, 15 bp, Homo sapiens
atatttcacaatatg

SEQ ID NO: 1214163 - DNA, 15 bp, Homo sapiens
gatatttcacaatat

SEQ ID NO: 1214164 - DNA, 15 bp, Homo sapiens
cgatatttcacaata

SEQ ID NO: 1214165 - DNA, 15 bp, Homo sapiens
acgatatttcacaat

SEQ ID NO: 1214166 - DNA, 15 bp, Homo sapiens
tacgatatttcacaa

SEQ ID NO: 1214167 - DNA, 15 bp, Homo sapiens
gtacgatatttcaca

SEQ ID NO: 1214168 - DNA, 15 bp, Homo sapiens
tgtacgatatttcac

SEQ ID NO: 1214169 - DNA, 15 bp, Homo sapiens
gtgtacgatatttca

SEQ ID NO: 1214170 - DNA, 15 bp, Homo sapiens
tgtgtacgatatttc

SEQ ID NO: 1214171 - DNA, 15 bp, Homo sapiens
ttgtgtacgatattt

SEQ ID NO: 1214172 - DNA, 15 bp, Homo sapiens
tttgtgtacgatatt

SEQ ID NO: 1214173 - DNA, 15 bp, Homo sapiens
atttgtgtacgatat

SEQ ID NO: 1214174 - DNA, 15 bp, Homo sapiens
gatttgtgtacgata

SEQ ID NO: 1214175 - DNA, 15 bp, Homo sapiens
tgatttgtgtacgat

SEQ ID NO: 1214176 - DNA, 15 bp, Homo sapiens
ctgatttgtgtacga

SEQ ID NO: 1214177 - DNA, 15 bp, Homo sapiens
gctgatttgtgtacg

SEQ ID NO: 1214178 - DNA, 15 bp, Homo sapiens
agctgatttgtgtac

SEQ ID NO: 1214179 - DNA, 15 bp, Homo sapiens
aagctgatttgtgta

SEQ ID NO: 1214180 - DNA, 15 bp, Homo sapiens
taagctgatttgtgt

SEQ ID NO: 1214181 - DNA, 15 bp, Homo sapiens
ttaagctgatttgtg

SEQ ID NO: 1214182 - DNA, 15 bp, Homo sapiens
tttaagctgatttgt

SEQ ID NO: 1214183 - DNA, 15 bp, Homo sapiens
ctttaagctgatttg

SEQ ID NO: 1214184 - DNA, 15 bp, Homo sapiens
tctttaagctgattt

SEQ ID NO: 1214185 - DNA, 15 bp, Homo sapiens
ttctttaagctgatt

SEQ ID NO: 1214186 - DNA, 15 bp, Homo sapiens
gttctttaagctgat

SEQ ID NO: 1214187 - DNA, 15 bp, Homo sapiens
agttctttaagctga

SEQ ID NO: 1214188 - DNA, 15 bp, Homo sapiens
gagttctttaagctg

SEQ ID NO: 1214189 - DNA, 15 bp, Homo sapiens
agagttctttaagct

SEQ ID NO: 1214190 - DNA, 15 bp, Homo sapiens
gagagttctttaagc

SEQ ID NO: 1214191 - DNA, 15 bp, Homo sapiens
tgagagttctttaag

SEQ ID NO: 1214192 - DNA, 15 bp, Homo sapiens
atgagagttctttaa

SEQ ID NO: 1214193 - DNA, 15 bp, Homo sapiens
catgagagttcttta

SEQ ID NO: 1214194 - DNA, 15 bp, Homo sapiens
acatgagagttcttt

SEQ ID NO: 1214195 - DNA, 15 bp, Homo sapiens
tacatgagagttctt

SEQ ID NO: 1214196 - DNA, 15 bp, Homo sapiens
gtacatgagagttct

SEQ ID NO: 1214197 - DNA, 15 bp, Homo sapiens
tgtacatgagagttc

SEQ ID NO: 1214198 - DNA, 15 bp, Homo sapiens
gtgtacatgagagtt

SEQ ID NO: 1214199 - DNA, 15 bp, Homo sapiens
tgtgtacatgagagt

SEQ ID NO: 1214200 - DNA, 15 bp, Homo sapiens
gtgtgtacatgagag

SEQ ID NO: 1214201 - DNA, 15 bp, Homo sapiens
ggtgtgtacatgaga

SEQ ID NO: 1214202 - DNA, 15 bp, Homo sapiens
tggtgtgtacatgag

SEQ ID NO: 1214203 - DNA, 15 bp, Homo sapiens
gtggtgtgtacatga

SEQ ID NO: 1214204 - DNA, 15 bp, Homo sapiens
ggtggtgtgtacatg

SEQ ID NO: 1214205 - DNA, 15 bp, Homo sapiens
tggtggtgtgtacat

SEQ ID NO: 1214206 - DNA, 15 bp, Homo sapiens
ttggtggtgtgtaca

SEQ ID NO: 1214207 - DNA, 15 bp, Homo sapiens
attggtggtgtgtac

SEQ ID NO: 1214208 - DNA, 15 bp, Homo sapiens
aattggtggtgtgta

SEQ ID NO: 1214209 - DNA, 15 bp, Homo sapiens
taattggtggtgtgt

SEQ ID NO: 1214210 - DNA, 15 bp, Homo sapiens
gtaattggtggtgtg

SEQ ID NO: 1214211 - DNA, 15 bp, Homo sapiens
ggtaattggtggtgt

SEQ ID NO: 1214212 - DNA, 15 bp, Homo sapiens
tggtaattggtggtg

SEQ ID NO: 1214213 - DNA, 15 bp, Homo sapiens
ttggtaattggtggt

SEQ ID NO: 1214214 - DNA, 15 bp, Homo sapiens
tttggtaattggtgg

SEQ ID NO: 1214215 - DNA, 15 bp, Homo sapiens
ttttggtaattggtg

SEQ ID NO: 1214216 - DNA, 15 bp, Homo sapiens
cttttggtaattggt

SEQ ID NO: 1214217 - DNA, 15 bp, Homo sapiens
gcttttggtaattgg

SEQ ID NO: 1214218 - DNA, 15 bp, Homo sapiens
agcttttggtaattg

SEQ ID NO: 1214219 - DNA, 15 bp, Homo sapiens
aagcttttggtaatt

SEQ ID NO: 1214220 - DNA, 15 bp, Homo sapiens
aaagcttttggtaat

SEQ ID NO: 1214221 - DNA, 15 bp, Homo sapiens
caaagcttttggtaa

SEQ ID NO: 1214222 - DNA, 15 bp, Homo sapiens
tcaaagcttttggta

SEQ ID NO: 1214223 - DNA, 15 bp, Homo sapiens
ttcaaagcttttggt

SEQ ID NO: 1214224 - DNA, 15 bp, Homo sapiens
cttcaaagcttttgg

SEQ ID NO: 1214225 - DNA, 15 bp, Homo sapiens
gcttcaaagcttttg

SEQ ID NO: 1214226 - DNA, 15 bp, Homo sapiens
agcttcaaagctttt

SEQ ID NO: 1214227 - DNA, 15 bp, Homo sapiens
aagcttcaaagcttt

SEQ ID NO: 1214228 - DNA, 15 bp, Homo sapiens
caagcttcaaagctt

SEQ ID NO: 1214229 - DNA, 15 bp, Homo sapiens
tcaagcttcaaagct

SEQ ID NO: 1214230 - DNA, 15 bp, Homo sapiens
atcaagcttcaaagc

SEQ ID NO: 1214231 - DNA, 15 bp, Homo sapiens
gatcaagcttcaaag

SEQ ID NO: 1214232 - DNA, 15 bp, Homo sapiens
ggatcaagcttcaaa

SEQ ID NO: 1214233 - DNA, 15 bp, Homo sapiens
gggatcaagcttcaa

SEQ ID NO: 1214234 - DNA, 15 bp, Homo sapiens
ggggatcaagcttca

SEQ ID NO: 1214235 - DNA, 15 bp, Homo sapiens
cggggatcaagcttc

SEQ ID NO: 1214236 - DNA, 15 bp, Homo sapiens
gcggggatcaagctt

SEQ ID NO: 1214237 - DNA, 15 bp, Homo sapiens
tgcggggatcaagct

SEQ ID NO: 1214238 - DNA, 15 bp, Homo sapiens
gtgcggggatcaagc

SEQ ID NO: 1214239 - DNA, 15 bp, Homo sapiens
agtgcggggatcaag

SEQ ID NO: 1214240 - DNA, 15 bp, Homo sapiens
gagtgcggggatcaa

SEQ ID NO: 1214241 - DNA, 15 bp, Homo sapiens
ggagtgcggggatca

SEQ ID NO: 1214242 - DNA, 15 bp, Homo sapiens
aggagtgcggggatc

SEQ ID NO: 1214243 - DNA, 15 bp, Homo sapiens
taggagtgcggggat

SEQ ID NO: 1214244 - DNA, 15 bp, Homo sapiens
gtaggagtgcgggga

SEQ ID NO: 1214245 - DNA, 15 bp, Homo sapiens
agtaggagtgcgggg

SEQ ID NO: 1214246 - DNA, 15 bp, Homo sapiens
cagtaggagtgcggg

SEQ ID NO: 1214247 - DNA, 15 bp, Homo sapiens
acagtaggagtgcgg

SEQ ID NO: 1214248 - DNA, 15 bp, Homo sapiens
cacagtaggagtgcg

SEQ ID NO: 1214249 - DNA, 15 bp, Homo sapiens
acacagtaggagtgc

SEQ ID NO: 1214250 - DNA, 15 bp, Homo sapiens
gacacagtaggagtg

SEQ ID NO: 1214251 - DNA, 15 bp, Homo sapiens
ggacacagtaggagt

SEQ ID NO: 1214252 - DNA, 15 bp, Homo sapiens
gggacacagtaggag

SEQ ID NO: 1214253 - DNA, 15 bp, Homo sapiens
ggggacacagtagga

SEQ ID NO: 1214254 - DNA, 15 bp, Homo sapiens
aggggacacagtagg

SEQ ID NO: 1214255 - DNA, 15 bp, Homo sapiens
aaggggacacagtag

SEQ ID NO: 1214256 - DNA, 15 bp, Homo sapiens
aaaggggacacagta

SEQ ID NO: 1214257 - DNA, 15 bp, Homo sapiens
gaaaggggacacagt

SEQ ID NO: 1214258 - DNA, 15 bp, Homo sapiens
agaaaggggacacag

SEQ ID NO: 1214259 - DNA, 15 bp, Homo sapiens
gagaaaggggacaca

SEQ ID NO: 1214260 - DNA, 15 bp, Homo sapiens
ggagaaaggggacac

SEQ ID NO: 1214261 - DNA, 15 bp, Homo sapiens
aggagaaaggggaca

SEQ ID NO: 1214262 - DNA, 15 bp, Homo sapiens
aaggagaaaggggac

SEQ ID NO: 1214263 - DNA, 15 bp, Homo sapiens
aaaggagaaagggga

SEQ ID NO: 1214264 - DNA, 15 bp, Homo sapiens
gaaaggagaaagggg

SEQ ID NO: 1214265 - DNA, 15 bp, Homo sapiens
tgaaaggagaaaggg

SEQ ID NO: 1214266 - DNA, 15 bp, Homo sapiens
atgaaaggagaaagg

SEQ ID NO: 1214267 - DNA, 15 bp, Homo sapiens
gatgaaaggagaaag

SEQ ID NO: 1214268 - DNA, 15 bp, Homo sapiens
agatgaaaggagaaa

SEQ ID NO: 1214269 - DNA, 15 bp, Homo sapiens
gagatgaaaggagaa

SEQ ID NO: 1214270 - DNA, 15 bp, Homo sapiens
agagatgaaaggaga

SEQ ID NO: 1214271 - DNA, 15 bp, Homo sapiens
gagagatgaaaggag

SEQ ID NO: 1214272 - DNA, 15 bp, Homo sapiens
ggagagatgaaagga

SEQ ID NO: 1214273 - DNA, 15 bp, Homo sapiens
gggagagatgaaagg

SEQ ID NO: 1214274 - DNA, 15 bp, Homo sapiens
ggggagagatgaaag

SEQ ID NO: 1214275 - DNA, 15 bp, Homo sapiens
cggggagagatgaaa

SEQ ID NO: 1214276 - DNA, 15 bp, Homo sapiens
gcggggagagatgaa

SEQ ID NO: 1214277 - DNA, 15 bp, Homo sapiens
agcggggagagatga

SEQ ID NO: 1214278 - DNA, 15 bp, Homo sapiens
gagcggggagagatg

SEQ ID NO: 1214279 - DNA, 15 bp, Homo sapiens
ggagcggggagagat

SEQ ID NO: 1214280 - DNA, 15 bp, Homo sapiens
gggagcggggagaga

SEQ ID NO: 1214281 - DNA, 15 bp, Homo sapiens
ggggagcggggagag

SEQ ID NO: 1214282 - DNA, 15 bp, Homo sapiens
tggggagcggggaga

SEQ ID NO: 1214283 - DNA, 15 bp, Homo sapiens
ctggggagcggggag

SEQ ID NO: 1214284 - DNA, 15 bp, Homo sapiens
tctggggagcgggga

SEQ ID NO: 1214285 - DNA, 15 bp, Homo sapiens
ctctggggagcgggg

SEQ ID NO: 1214286 - DNA, 15 bp, Homo sapiens
tctctggggagcggg

SEQ ID NO: 1214287 - DNA, 15 bp, Homo sapiens
atctctggggagcgg

SEQ ID NO: 1214288 - DNA, 15 bp, Homo sapiens
tatctctggggagcg

SEQ ID NO: 1214289 - DNA, 15 bp, Homo sapiens
ttatctctggggagc

SEQ ID NO: 1214290 - DNA, 15 bp, Homo sapiens
gttatctctggggag

SEQ ID NO: 1214291 - DNA, 15 bp, Homo sapiens
ggttatctctgggga

SEQ ID NO: 1214292 - DNA, 15 bp, Homo sapiens
gggttatctctgggg

SEQ ID NO: 1214293 - DNA, 15 bp, Homo sapiens
ggggttatctctggg

SEQ ID NO: 1214294 - DNA, 15 bp, Homo sapiens
aggggttatctctgg

SEQ ID NO: 1214295 - DNA, 15 bp, Homo sapiens
gaggggttatctctg

SEQ ID NO: 1214296 - DNA, 15 bp, Homo sapiens
agaggggttatctct

SEQ ID NO: 1214297 - DNA, 15 bp, Homo sapiens
gagaggggttatctc

SEQ ID NO: 1214298 - DNA, 15 bp, Homo sapiens
ggagaggggttatct

SEQ ID NO: 1214299 - DNA, 15 bp, Homo sapiens
aggagaggggttatc

SEQ ID NO: 1214300 - DNA, 15 bp, Homo sapiens
caggagaggggttat

SEQ ID NO: 1214301 - DNA, 15 bp, Homo sapiens
tcaggagaggggtta

SEQ ID NO: 1214302 - DNA, 15 bp, Homo sapiens
ttcaggagaggggtt

SEQ ID NO: 1214303 - DNA, 15 bp, Homo sapiens
attcaggagaggggt

SEQ ID NO: 1214304 - DNA, 15 bp, Homo sapiens
aattcaggagagggg

SEQ ID NO: 1214305 - DNA, 15 bp, Homo sapiens
taattcaggagaggg

SEQ ID NO: 1214306 - DNA, 15 bp, Homo sapiens
ctaattcaggagagg

SEQ ID NO: 1214307 - DNA, 15 bp, Homo sapiens
cctaattcaggagag

SEQ ID NO: 1214308 - DNA, 15 bp, Homo sapiens
acctaattcaggaga

SEQ ID NO: 1214309 - DNA, 15 bp, Homo sapiens
cacctaattcaggag

SEQ ID NO: 1214310 - DNA, 15 bp, Homo sapiens
acacctaattcagga

SEQ ID NO: 1214311 - DNA, 15 bp, Homo sapiens
aacacctaattcagg

SEQ ID NO: 1214312 - DNA, 15 bp, Homo sapiens
aaacacctaattcag

SEQ ID NO: 1214313 - DNA, 15 bp, Homo sapiens
taaacacctaattca

SEQ ID NO: 1214314 - DNA, 15 bp, Homo sapiens
ataaacacctaattc

SEQ ID NO: 1214315 - DNA, 15 bp, Homo sapiens
gataaacacctaatt

SEQ ID NO: 1214316 - DNA, 15 bp, Homo sapiens
agataaacacctaat

SEQ ID NO: 1214317 - DNA, 15 bp, Homo sapiens
aagataaacacctaa

SEQ ID NO: 1214318 - DNA, 15 bp, Homo sapiens
aaagataaacaccta

SEQ ID NO: 1214319 - DNA, 15 bp, Homo sapiens
gaaagataaacacct

SEQ ID NO: 1214320 - DNA, 15 bp, Homo sapiens
ggaaagataaacacc

SEQ ID NO: 1214321 - DNA, 15 bp, Homo sapiens
gggaaagataaacac

SEQ ID NO: 1214322 - DNA, 15 bp, Homo sapiens
tgggaaagataaaca

SEQ ID NO: 1214323 - DNA, 15 bp, Homo sapiens
atgggaaagataaac

SEQ ID NO: 1214324 - DNA, 15 bp, Homo sapiens
aatgggaaagataaa

SEQ ID NO: 1214325 - DNA, 15 bp, Homo sapiens
aaatgggaaagataa

SEQ ID NO: 1214326 - DNA, 15 bp, Homo sapiens
aaaatgggaaagata

SEQ ID NO: 1214327 - DNA, 15 bp, Homo sapiens
aaaaatgggaaagat

SEQ ID NO: 1214328 - DNA, 15 bp, Homo sapiens
aaaaaatgggaaaga

SEQ ID NO: 1214329 - DNA, 15 bp, Homo sapiens
aaaaaaatgggaaag

SEQ ID NO: 1214330 - DNA, 15 bp, Homo sapiens
gaaaaaaatgggaaa

SEQ ID NO: 1214331 - DNA, 15 bp, Homo sapiens
agaaaaaaatgggaa

SEQ ID NO: 1214332 - DNA, 15 bp, Homo sapiens
cagaaaaaaatggga

SEQ ID NO: 1214333 - DNA, 15 bp, Homo sapiens
acagaaaaaaatggg

SEQ ID NO: 1214334 - DNA, 15 bp, Homo sapiens
tacagaaaaaaatgg

SEQ ID NO: 1214335 - DNA, 15 bp, Homo sapiens
atacagaaaaaaatg

SEQ ID NO: 1214336 - DNA, 15 bp, Homo sapiens
tatacagaaaaaaat

SEQ ID NO: 1214337 - DNA, 15 bp, Homo sapiens
ttatacagaaaaaaa

SEQ ID NO: 1214338 - DNA, 15 bp, Homo sapiens
attatacagaaaaaa

SEQ ID NO: 1214339 - DNA, 15 bp, Homo sapiens
aattatacagaaaaa

SEQ ID NO: 1214340 - DNA, 15 bp, Homo sapiens
aaattatacagaaaa

SEQ ID NO: 1214341 - DNA, 15 bp, Homo sapiens
aaaattatacagaaa

SEQ ID NO: 1214342 - DNA, 15 bp, Homo sapiens
caaaattatacagaa

SEQ ID NO: 1214343 - DNA, 15 bp, Homo sapiens
ccaaaattatacaga

SEQ ID NO: 1214344 - DNA, 15 bp, Homo sapiens
cccaaaattatacag

SEQ ID NO: 1214345 - DNA, 15 bp, Homo sapiens
acccaaaattataca

SEQ ID NO: 1214346 - DNA, 15 bp, Homo sapiens
gacccaaaattatac

SEQ ID NO: 1214347 - DNA, 15 bp, Homo sapiens
agacccaaaattata

SEQ ID NO: 1214348 - DNA, 15 bp, Homo sapiens
aagacccaaaattat

SEQ ID NO: 1214349 - DNA, 15 bp, Homo sapiens
aaagacccaaaatta

SEQ ID NO: 1214350 - DNA, 15 bp, Homo sapiens
taaagacccaaaatt

SEQ ID NO: 1214351 - DNA, 15 bp, Homo sapiens
ataaagacccaaaat

SEQ ID NO: 1214352 - DNA, 15 bp, Homo sapiens
cataaagacccaaaa

SEQ ID NO: 1214353 - DNA, 15 bp, Homo sapiens
ccataaagacccaaa

SEQ ID NO: 1214354 - DNA, 15 bp, Homo sapiens
accataaagacccaa

SEQ ID NO: 1214355 - DNA, 15 bp, Homo sapiens
caccataaagaccca

SEQ ID NO: 1214356 - DNA, 15 bp, Homo sapiens
tcaccataaagaccc

SEQ ID NO: 1214357 - DNA, 15 bp, Homo sapiens
atcaccataaagacc

SEQ ID NO: 1214358 - DNA, 15 bp, Homo sapiens
tatcaccataaagac

SEQ ID NO: 1214359 - DNA, 15 bp, Homo sapiens
ttatcaccataaaga

SEQ ID NO: 1214360 - DNA, 15 bp, Homo sapiens
attatcaccataaag

SEQ ID NO: 1214361 - DNA, 15 bp, Homo sapiens
aattatcaccataaa

SEQ ID NO: 1214362 - DNA, 15 bp, Homo sapiens
gaattatcaccataa

SEQ ID NO: 1214363 - DNA, 15 bp, Homo sapiens
tgaattatcaccata

SEQ ID NO: 1214364 - DNA, 15 bp, Homo sapiens
ttgaattatcaccat

SEQ ID NO: 1214365 - DNA, 15 bp, Homo sapiens
tttgaattatcacca

SEQ ID NO: 1214366 - DNA, 15 bp, Homo sapiens
gtttgaattatcacc

SEQ ID NO: 1214367 - DNA, 15 bp, Homo sapiens
tgtttgaattatcac

SEQ ID NO: 1214368 - DNA, 15 bp, Homo sapiens
atgtttgaattatca

SEQ ID NO: 1214369 - DNA, 15 bp, Homo sapiens
aatgtttgaattatc

SEQ ID NO: 1214370 - DNA, 15 bp, Homo sapiens
taatgtttgaattat

SEQ ID NO: 1214371 - DNA, 15 bp, Homo sapiens
ttaatgtttgaatta

SEQ ID NO: 1214372 - DNA, 15 bp, Homo sapiens
cttaatgtttgaatt

SEQ ID NO: 1214373 - DNA, 15 bp, Homo sapiens
gcttaatgtttgaat

SEQ ID NO: 1214374 - DNA, 15 bp, Homo sapiens
tgcttaatgtttgaa

SEQ ID NO: 1214375 - DNA, 15 bp, Homo sapiens
ttgcttaatgtttga

SEQ ID NO: 1214376 - DNA, 15 bp, Homo sapiens
attgcttaatgtttg

SEQ ID NO: 1214377 - DNA, 15 bp, Homo sapiens
cattgcttaatgttt

SEQ ID NO: 1214378 - DNA, 15 bp, Homo sapiens
ccattgcttaatgtt

SEQ ID NO: 1214379 - DNA, 15 bp, Homo sapiens
tccattgcttaatgt

SEQ ID NO: 1214380 - DNA, 15 bp, Homo sapiens
ttccattgcttaatg

SEQ ID NO: 1214381 - DNA, 15 bp, Homo sapiens
cttccattgcttaat

SEQ ID NO: 1214382 - DNA, 15 bp, Homo sapiens
acttccattgcttaa

SEQ ID NO: 1214383 - DNA, 15 bp, Homo sapiens
gacttccattgctta

SEQ ID NO: 1214384 - DNA, 15 bp, Homo sapiens
tgacttccattgctt

SEQ ID NO: 1214385 - DNA, 15 bp, Homo sapiens
gtgacttccattgct

SEQ ID NO: 1214386 - DNA, 15 bp, Homo sapiens
agtgacttccattgc

SEQ ID NO: 1214387 - DNA, 15 bp, Homo sapiens
aagtgacttccattg

SEQ ID NO: 1214388 - DNA, 15 bp, Homo sapiens
aaagtgacttccatt

SEQ ID NO: 1214389 - DNA, 15 bp, Homo sapiens
gaaagtgacttccat

SEQ ID NO: 1214390 - DNA, 15 bp, Homo sapiens
cgaaagtgacttcca

SEQ ID NO: 1214391 - DNA, 15 bp, Homo sapiens
acgaaagtgacttcc

SEQ ID NO: 1214392 - DNA, 15 bp, Homo sapiens
gacgaaagtgacttc

SEQ ID NO: 1214393 - DNA, 15 bp, Homo sapiens
agacgaaagtgactt

SEQ ID NO: 1214394 - DNA, 15 bp, Homo sapiens
cagacgaaagtgact

SEQ ID NO: 1214395 - DNA, 15 bp, Homo sapiens
gcagacgaaagtgac

SEQ ID NO: 1214396 - DNA, 15 bp, Homo sapiens
agcagacgaaagtga

SEQ ID NO: 1214397 - DNA, 15 bp, Homo sapiens
cagcagacgaaagtg

SEQ ID NO: 1214398 - DNA, 15 bp, Homo sapiens
acagcagacgaaagt

SEQ ID NO: 1214399 - DNA, 15 bp, Homo sapiens
aacagcagacgaaag

SEQ ID NO: 1214400 - DNA, 15 bp, Homo sapiens
aaacagcagacgaaa

SEQ ID NO: 1214401 - DNA, 15 bp, Homo sapiens
aaaacagcagacgaa

SEQ ID NO: 1214402 - DNA, 15 bp, Homo sapiens
aaaaacagcagacga

SEQ ID NO: 1214403 - DNA, 15 bp, Homo sapiens
gaaaaacagcagacg

SEQ ID NO: 1214404 - DNA, 15 bp, Homo sapiens
tgaaaaacagcagac

SEQ ID NO: 1214405 - DNA, 15 bp, Homo sapiens
atgaaaaacagcaga

SEQ ID NO: 1214406 - DNA, 15 bp, Homo sapiens
tatgaaaaacagcag

SEQ ID NO: 1214407 - DNA, 15 bp, Homo sapiens
gtatgaaaaacagca

SEQ ID NO: 1214408 - DNA, 15 bp, Homo sapiens
agtatgaaaaacagc

SEQ ID NO: 1214409 - DNA, 15 bp, Homo sapiens
gagtatgaaaaacag

SEQ ID NO: 1214410 - DNA, 15 bp, Homo sapiens
agagtatgaaaaaca

SEQ ID NO: 1214411 - DNA, 15 bp, Homo sapiens
gagagtatgaaaaac

SEQ ID NO: 1214412 - DNA, 15 bp, Homo sapiens
ggagagtatgaaaaa

SEQ ID NO: 1214413 - DNA, 15 bp, Homo sapiens
gggagagtatgaaaa

SEQ ID NO: 1214414 - DNA, 15 bp, Homo sapiens
tgggagagtatgaaa

SEQ ID NO: 1214415 - DNA, 15 bp, Homo sapiens
ctgggagagtatgaa

SEQ ID NO: 1214416 - DNA, 15 bp, Homo sapiens
tctgggagagtatga

SEQ ID NO: 1214417 - DNA, 15 bp, Homo sapiens
ttctgggagagtatg

SEQ ID NO: 1214418 - DNA, 15 bp, Homo sapiens
gttctgggagagtat

SEQ ID NO: 1214419 - DNA, 15 bp, Homo sapiens
agttctgggagagta

SEQ ID NO: 1214420 - DNA, 15 bp, Homo sapiens
gagttctgggagagt

SEQ ID NO: 1214421 - DNA, 15 bp, Homo sapiens
agagttctgggagag

SEQ ID NO: 1214422 - DNA, 15 bp, Homo sapiens
tagagttctgggaga

SEQ ID NO: 1214423 - DNA, 15 bp, Homo sapiens
ttagagttctgggag

SEQ ID NO: 1214424 - DNA, 15 bp, Homo sapiens
cttagagttctggga

SEQ ID NO: 1214425 - DNA, 15 bp, Homo sapiens
ccttagagttctggg

SEQ ID NO: 1214426 - DNA, 15 bp, Homo sapiens
cccttagagttctgg

SEQ ID NO: 1214427 - DNA, 15 bp, Homo sapiens
acccttagagttctg

SEQ ID NO: 1214428 - DNA, 15 bp, Homo sapiens
aacccttagagttct

SEQ ID NO: 1214429 - DNA, 15 bp, Homo sapiens
gaacccttagagttc

SEQ ID NO: 1214430 - DNA, 15 bp, Homo sapiens
ggaacccttagagtt

SEQ ID NO: 1214431 - DNA, 15 bp, Homo sapiens
gggaacccttagagt

SEQ ID NO: 1214432 - DNA, 15 bp, Homo sapiens
ggggaacccttagag

SEQ ID NO: 1214433 - DNA, 15 bp, Homo sapiens
tggggaacccttaga

SEQ ID NO: 1214434 - DNA, 15 bp, Homo sapiens
gtggggaacccttag

SEQ ID NO: 1214435 - DNA, 15 bp, Homo sapiens
tgtggggaaccctta

SEQ ID NO: 1214436 - DNA, 15 bp, Homo sapiens
ctgtggggaaccctt

SEQ ID NO: 1214437 - DNA, 15 bp, Homo sapiens
gctgtggggaaccct

SEQ ID NO: 1214438 - DNA, 15 bp, Homo sapiens
tgctgtggggaaccc

SEQ ID NO: 1214439 - DNA, 15 bp, Homo sapiens
gtgctgtggggaacc

SEQ ID NO: 1214440 - DNA, 15 bp, Homo sapiens
cgtgctgtggggaac

SEQ ID NO: 1214441 - DNA, 15 bp, Homo sapiens
gcgtgctgtggggaa

SEQ ID NO: 1214442 - DNA, 15 bp, Homo sapiens
ggcgtgctgtgggga

SEQ ID NO: 1214443 - DNA, 15 bp, Homo sapiens
aggcgtgctgtgggg

SEQ ID NO: 1214444 - DNA, 15 bp, Homo sapiens
caggcgtgctgtggg

SEQ ID NO: 1214445 - DNA, 15 bp, Homo sapiens
gcaggcgtgctgtgg

SEQ ID NO: 1214446 - DNA, 15 bp, Homo sapiens
cgcaggcgtgctgtg

SEQ ID NO: 1214447 - DNA, 15 bp, Homo sapiens
ccgcaggcgtgctgt

SEQ ID NO: 1214448 - DNA, 15 bp, Homo sapiens
gccgcaggcgtgctg

SEQ ID NO: 1214449 - DNA, 15 bp, Homo sapiens
tgccgcaggcgtgct

SEQ ID NO: 1214450 - DNA, 15 bp, Homo sapiens
atgccgcaggcgtgc

SEQ ID NO: 1214451 - DNA, 15 bp, Homo sapiens
tatgccgcaggcgtg

SEQ ID NO: 1214452 - DNA, 15 bp, Homo sapiens
gtatgccgcaggcgt

SEQ ID NO: 1214453 - DNA, 15 bp, Homo sapiens
agtatgccgcaggcg

SEQ ID NO: 1214454 - DNA, 15 bp, Homo sapiens
cagtatgccgcaggc

SEQ ID NO: 1214455 - DNA, 15 bp, Homo sapiens
acagtatgccgcagg

SEQ ID NO: 1214456 - DNA, 15 bp, Homo sapiens
gacagtatgccgcag

SEQ ID NO: 1214457 - DNA, 15 bp, Homo sapiens
tgacagtatgccgca

SEQ ID NO: 1214458 - DNA, 15 bp, Homo sapiens
gtgacagtatgccgc

SEQ ID NO: 1214459 - DNA, 15 bp, Homo sapiens
ggtgacagtatgccg

SEQ ID NO: 1214460 - DNA, 15 bp, Homo sapiens
cggtgacagtatgcc

SEQ ID NO: 1214461 - DNA, 15 bp, Homo sapiens
tcggtgacagtatgc

SEQ ID NO: 1214462 - DNA, 15 bp, Homo sapiens
ttcggtgacagtatg

SEQ ID NO: 1214463 - DNA, 15 bp, Homo sapiens
attcggtgacagtat

SEQ ID NO: 1214464 - DNA, 15 bp, Homo sapiens
aattcggtgacagta

SEQ ID NO: 1214465 - DNA, 15 bp, Homo sapiens
aaattcggtgacagt

SEQ ID NO: 1214466 - DNA, 15 bp, Homo sapiens
gaaattcggtgacag

SEQ ID NO: 1214467 - DNA, 15 bp, Homo sapiens
agaaattcggtgaca

SEQ ID NO: 1214468 - DNA, 15 bp, Homo sapiens
aagaaattcggtgac

SEQ ID NO: 1214469 - DNA, 15 bp, Homo sapiens
aaagaaattcggtga

SEQ ID NO: 1214470 - DNA, 15 bp, Homo sapiens
gaaagaaattcggtg

SEQ ID NO: 1214471 - DNA, 15 bp, Homo sapiens
ggaaagaaattcggt

SEQ ID NO: 1214472 - DNA, 15 bp, Homo sapiens
gggaaagaaattcgg

SEQ ID NO: 1214473 - DNA, 15 bp, Homo sapiens
agggaaagaaattcg

SEQ ID NO: 1214474 - DNA, 15 bp, Homo sapiens
gagggaaagaaattc

SEQ ID NO: 1214475 - DNA, 15 bp, Homo sapiens
ggagggaaagaaatt

SEQ ID NO: 1214476 - DNA, 15 bp, Homo sapiens
tggagggaaagaaat

SEQ ID NO: 1214477 - DNA, 15 bp, Homo sapiens
ggtggagggaaagaa

SEQ ID NO: 1214478 - DNA, 15 bp, Homo sapiens
aggtggagggaaaga

SEQ ID NO: 1214479 - DNA, 15 bp, Homo sapiens
gaggtggagggaaag

SEQ ID NO: 1214480 - DNA, 15 bp, Homo sapiens
ggaggtggagggaaa

SEQ ID NO: 1214481 - DNA, 15 bp, Homo sapiens
tggaggtggagggaa

SEQ ID NO: 1214482 - DNA, 15 bp, Homo sapiens
gtggaggtggaggga

SEQ ID NO: 1214483 - DNA, 15 bp, Homo sapiens
cagtggaggtggagg

SEQ ID NO: 1214484 - DNA, 15 bp, Homo sapiens
tcagtggaggtggag

SEQ ID NO: 1214485 - DNA, 15 bp, Homo sapiens
gtcagtggaggtgga

SEQ ID NO: 1214486 - DNA, 15 bp, Homo sapiens
ggtcagtggaggtgg

SEQ ID NO: 1214487 - DNA, 15 bp, Homo sapiens
aggtcagtggaggtg

SEQ ID NO: 1214488 - DNA, 15 bp, Homo sapiens
caggtcagtggaggt

SEQ ID NO: 1214489 - DNA, 15 bp, Homo sapiens
ccaggtcagtggagg

SEQ ID NO: 1214490 - DNA, 15 bp, Homo sapiens
tccaggtcagtggag

SEQ ID NO: 1214491 - DNA, 15 bp, Homo sapiens
ttccaggtcagtgga

SEQ ID NO: 1214492 - DNA, 15 bp, Homo sapiens
attccaggtcagtgg

SEQ ID NO: 1214493 - DNA, 15 bp, Homo sapiens
cattccaggtcagtg

SEQ ID NO: 1214494 - DNA, 15 bp, Homo sapiens
acattccaggtcagt

SEQ ID NO: 1214495 - DNA, 15 bp, Homo sapiens
aacattccaggtcag

SEQ ID NO: 1214496 - DNA, 15 bp, Homo sapiens
gaacattccaggtca

SEQ ID NO: 1214497 - DNA, 15 bp, Homo sapiens
agaacattccaggtc

SEQ ID NO: 1214498 - DNA, 15 bp, Homo sapiens
aagaacattccaggt

SEQ ID NO: 1214499 - DNA, 15 bp, Homo sapiens
aaagaacattccagg

SEQ ID NO: 1214500 - DNA, 15 bp, Homo sapiens
gaaagaacattccag

SEQ ID NO: 1214501 - DNA, 15 bp, Homo sapiens
ggaaagaacattcca

SEQ ID NO: 1214502 - DNA, 15 bp, Homo sapiens
cggaaagaacattcc

SEQ ID NO: 1214503 - DNA, 15 bp, Homo sapiens
tcggaaagaacattc

SEQ ID NO: 1214504 - DNA, 15 bp, Homo sapiens
ctcggaaagaacatt

SEQ ID NO: 1214505 - DNA, 15 bp, Homo sapiens
tctcggaaagaacat

SEQ ID NO: 1214506 - DNA, 15 bp, Homo sapiens
ttctcggaaagaaca

SEQ ID NO: 1214507 - DNA, 15 bp, Homo sapiens
gttctcggaaagaac

SEQ ID NO: 1214508 - DNA, 15 bp, Homo sapiens
agttctcggaaagaa

SEQ ID NO: 1214509 - DNA, 15 bp, Homo sapiens
aagttctcggaaaga

SEQ ID NO: 1214510 - DNA, 15 bp, Homo sapiens
gaagttctcggaaag

SEQ ID NO: 1214511 - DNA, 15 bp, Homo sapiens
agaagttctcggaaa

SEQ ID NO: 1214512 - DNA, 15 bp, Homo sapiens
cagaagttctcggaa

SEQ ID NO: 1214513 - DNA, 15 bp, Homo sapiens
ccagaagttctcgga

SEQ ID NO: 1214514 - DNA, 15 bp, Homo sapiens
gccagaagttctcgg

SEQ ID NO: 1214515 - DNA, 15 bp, Homo sapiens
ggccagaagttctcg

SEQ ID NO: 1214516 - DNA, 15 bp, Homo sapiens
gggccagaagttctc

SEQ ID NO: 1214517 - DNA, 15 bp, Homo sapiens
ggggccagaagttct

SEQ ID NO: 1214518 - DNA, 15 bp, Homo sapiens
gggggccagaagttc

SEQ ID NO: 1214519 - DNA, 15 bp, Homo sapiens
tgggggccagaagtt

SEQ ID NO: 1214520 - DNA, 15 bp, Homo sapiens
atgggggccagaagt

SEQ ID NO: 1214521 - DNA, 15 bp, Homo sapiens
gatgggggccagaag

SEQ ID NO: 1214522 - DNA, 15 bp, Homo sapiens
tgatgggggccagaa

SEQ ID NO: 1214523 - DNA, 15 bp, Homo sapiens
atgatgggggccaga

SEQ ID NO: 1214524 - DNA, 15 bp, Homo sapiens
aatgatgggggccag

SEQ ID NO: 1214525 - DNA, 15 bp, Homo sapiens
caatgatgggggcca

SEQ ID NO: 1214526 - DNA, 15 bp, Homo sapiens
gcaatgatgggggcc

SEQ ID NO: 1214527 - DNA, 15 bp, Homo sapiens
tgcaatgatgggggc

SEQ ID NO: 1214528 - DNA, 15 bp, Homo sapiens
ctgcaatgatggggg

SEQ ID NO: 1214529 - DNA, 15 bp, Homo sapiens
cctgcaatgatgggg

SEQ ID NO: 1214530 - DNA, 15 bp, Homo sapiens
ccctgcaatgatggg

SEQ ID NO: 1214531 - DNA, 15 bp, Homo sapiens
cccctgcaatgatgg

SEQ ID NO: 1214532 - DNA, 15 bp, Homo sapiens
acccctgcaatgatg

SEQ ID NO: 1214533 - DNA, 15 bp, Homo sapiens
tacccctgcaatgat

SEQ ID NO: 1214534 - DNA, 15 bp, Homo sapiens
gtacccctgcaatga

SEQ ID NO: 1214535 - DNA, 15 bp, Homo sapiens
agtacccctgcaatg

SEQ ID NO: 1214536 - DNA, 15 bp, Homo sapiens
aagtacccctgcaat

SEQ ID NO: 1214537 - DNA, 15 bp, Homo sapiens
aaagtacccctgcaa

SEQ ID NO: 1214538 - DNA, 15 bp, Homo sapiens
caaagtacccctgca

SEQ ID NO: 1214539 - DNA, 15 bp, Homo sapiens
tcaaagtacccctgc

SEQ ID NO: 1214540 - DNA, 15 bp, Homo sapiens
gtcaaagtacccctg

SEQ ID NO: 1214541 - DNA, 15 bp, Homo sapiens
tgtcaaagtacccct

SEQ ID NO: 1214542 - DNA, 15 bp, Homo sapiens
ttgtcaaagtacccc

SEQ ID NO: 1214543 - DNA, 15 bp, Homo sapiens
cttgtcaaagtaccc

SEQ ID NO: 1214544 - DNA, 15 bp, Homo sapiens
tcttgtcaaagtacc

SEQ ID NO: 1214545 - DNA, 15 bp, Homo sapiens
ttcttgtcaaagtac

SEQ ID NO: 1214546 - DNA, 15 bp, Homo sapiens
cttcttgtcaaagta

SEQ ID NO: 1214547 - DNA, 15 bp, Homo sapiens
tcttcttgtcaaagt

SEQ ID NO: 1214548 - DNA, 15 bp, Homo sapiens
gtcttcttgtcaaag

SEQ ID NO: 1214549 - DNA, 15 bp, Homo sapiens
agtcttcttgtcaaa

SEQ ID NO: 1214550 - DNA, 15 bp, Homo sapiens
cagtcttcttgtcaa

SEQ ID NO: 1214551 - DNA, 15 bp, Homo sapiens
gcagtcttcttgtca

SEQ ID NO: 1214552 - DNA, 15 bp, Homo sapiens
agcagtcttcttgtc

SEQ ID NO: 1214553 - DNA, 15 bp, Homo sapiens
cagcagtcttcttgt

SEQ ID NO: 1214554 - DNA, 15 bp, Homo sapiens
acagcagtcttcttg

SEQ ID NO: 1214555 - DNA, 15 bp, Homo sapiens
tacagcagtcttctt

SEQ ID NO: 1214556 - DNA, 15 bp, Homo sapiens
atacagcagtcttct

SEQ ID NO: 1214557 - DNA, 15 bp, Homo sapiens
catacagcagtcttc

SEQ ID NO: 1214558 - DNA, 15 bp, Homo sapiens
acatacagcagtctt

SEQ ID NO: 1214559 - DNA, 15 bp, Homo sapiens
aacatacagcagtct

SEQ ID NO: 1214560 - DNA, 15 bp, Homo sapiens
taacatacagcagtc

SEQ ID NO: 1214561 - DNA, 15 bp, Homo sapiens
ataacatacagcagt

SEQ ID NO: 1214562 - DNA, 15 bp, Homo sapiens
aataacatacagcag

SEQ ID NO: 1214563 - DNA, 15 bp, Homo sapiens
aaataacatacagca

SEQ ID NO: 1214564 - DNA, 15 bp, Homo sapiens
caaataacatacagc

SEQ ID NO: 1214565 - DNA, 15 bp, Homo sapiens
acaaataacatacag

SEQ ID NO: 1214566 - DNA, 15 bp, Homo sapiens
aacaaataacataca

SEQ ID NO: 1214567 - DNA, 15 bp, Homo sapiens
taacaaataacatac

SEQ ID NO: 1214568 - DNA, 15 bp, Homo sapiens
ataacaaataacata

SEQ ID NO: 1214569 - DNA, 15 bp, Homo sapiens
aataacaaataacat

SEQ ID NO: 1214570 - DNA, 15 bp, Homo sapiens
aaataacaaataaca

SEQ ID NO: 1214571 - DNA, 15 bp, Homo sapiens
aaaataacaaataac

SEQ ID NO: 1214572 - DNA, 15 bp, Homo sapiens
gaaaataacaaataa

SEQ ID NO: 1214573 - DNA, 15 bp, Homo sapiens
tgaaaataacaaata

SEQ ID NO: 1214574 - DNA, 15 bp, Homo sapiens
gtgaaaataacaaat

SEQ ID NO: 1214575 - DNA, 15 bp, Homo sapiens
cgtgaaaataacaaa

SEQ ID NO: 1214576 - DNA, 15 bp, Homo sapiens
acgtgaaaataacaa

SEQ ID NO: 1214577 - DNA, 15 bp, Homo sapiens
tacgtgaaaataaca

SEQ ID NO: 1214578 - DNA, 15 bp, Homo sapiens
ttacgtgaaaataac

SEQ ID NO: 1214579 - DNA, 15 bp, Homo sapiens
cttacgtgaaaataa

SEQ ID NO: 1214580 - DNA, 15 bp, Homo sapiens
ccttacgtgaaaata

SEQ ID NO: 1214581 - DNA, 15 bp, Homo sapiens
gccttacgtgaaaat

SEQ ID NO: 1214582 - DNA, 15 bp, Homo sapiens
tgccttacgtgaaaa

SEQ ID NO: 1214583 - DNA, 15 bp, Homo sapiens
atgccttacgtgaaa

SEQ ID NO: 1214584 - DNA, 15 bp, Homo sapiens
tatgccttacgtgaa

SEQ ID NO: 1214585 - DNA, 15 bp, Homo sapiens
ttatgccttacgtga

SEQ ID NO: 1214586 - DNA, 15 bp, Homo sapiens
cttatgccttacgtg

SEQ ID NO: 1214587 - DNA, 15 bp, Homo sapiens
acttatgccttacgt

SEQ ID NO: 1214588 - DNA, 15 bp, Homo sapiens
gacttatgccttacg

SEQ ID NO: 1214589 - DNA, 15 bp, Homo sapiens
tgacttatgccttac

SEQ ID NO: 1214590 - DNA, 15 bp, Homo sapiens
atgacttatgcctta

SEQ ID NO: 1214591 - DNA, 15 bp, Homo sapiens
catgacttatgcctt

SEQ ID NO: 1214592 - DNA, 15 bp, Homo sapiens
acatgacttatgcct

SEQ ID NO: 1214593 - DNA, 15 bp, Homo sapiens
aacatgacttatgcc

SEQ ID NO: 1214594 - DNA, 15 bp, Homo sapiens
taacatgacttatgc

SEQ ID NO: 1214595 - DNA, 15 bp, Homo sapiens
ctaacatgacttatg

SEQ ID NO: 1214596 - DNA, 15 bp, Homo sapiens
actaacatgacttat

SEQ ID NO: 1214597 - DNA, 15 bp, Homo sapiens
aactaacatgactta

SEQ ID NO: 1214598 - DNA, 15 bp, Homo sapiens
aaactaacatgactt

SEQ ID NO: 1214599 - DNA, 15 bp, Homo sapiens
gaaactaacatgact

SEQ ID NO: 1214600 - DNA, 15 bp, Homo sapiens
tgaaactaacatgac

SEQ ID NO: 1214601 - DNA, 15 bp, Homo sapiens
gtgaaactaacatga

SEQ ID NO: 1214602 - DNA, 15 bp, Homo sapiens
ggtgaaactaacatg

SEQ ID NO: 1214603 - DNA, 15 bp, Homo sapiens
aggtgaaactaacat

SEQ ID NO: 1214604 - DNA, 15 bp, Homo sapiens
taggtgaaactaaca

SEQ ID NO: 1214605 - DNA, 15 bp, Homo sapiens
gtaggtgaaactaac

SEQ ID NO: 1214606 - DNA, 15 bp, Homo sapiens
tgtaggtgaaactaa

SEQ ID NO: 1214607 - DNA, 15 bp, Homo sapiens
ctgtaggtgaaacta

SEQ ID NO: 1214608 - DNA, 15 bp, Homo sapiens
gctgtaggtgaaact

SEQ ID NO: 1214609 - DNA, 15 bp, Homo sapiens
tgctgtaggtgaaac

SEQ ID NO: 1214610 - DNA, 15 bp, Homo sapiens
atgctgtaggtgaaa

SEQ ID NO: 1214611 - DNA, 15 bp, Homo sapiens
catgctgtaggtgaa

SEQ ID NO: 1214612 - DNA, 15 bp, Homo sapiens
acatgctgtaggtga

SEQ ID NO: 1214613 - DNA, 15 bp, Homo sapiens
cacatgctgtaggtg

SEQ ID NO: 1214614 - DNA, 15 bp, Homo sapiens
gcacatgctgtaggt

SEQ ID NO: 1214615 - DNA, 15 bp, Homo sapiens
cgcacatgctgtagg

SEQ ID NO: 1214616 - DNA, 15 bp, Homo sapiens
acgcacatgctgtag

SEQ ID NO: 1214617 - DNA, 15 bp, Homo sapiens
cacgcacatgctgta

SEQ ID NO: 1214618 - DNA, 15 bp, Homo sapiens
gcacgcacatgctgt

SEQ ID NO: 1214619 - DNA, 15 bp, Homo sapiens
tgcacgcacatgctg

SEQ ID NO: 1214620 - DNA, 15 bp, Homo sapiens
atgcacgcacatgct

SEQ ID NO: 1214621 - DNA, 15 bp, Homo sapiens
aatgcacgcacatgc

SEQ ID NO: 1214622 - DNA, 15 bp, Homo sapiens
caatgcacgcacatg

SEQ ID NO: 1214623 - DNA, 15 bp, Homo sapiens
acaatgcacgcacat

SEQ ID NO: 1214624 - DNA, 15 bp, Homo sapiens
cacaatgcacgcaca

SEQ ID NO: 1214625 - DNA, 15 bp, Homo sapiens
acacaatgcacgcac

SEQ ID NO: 1214626 - DNA, 15 bp, Homo sapiens
tacacaatgcacgca

SEQ ID NO: 1214627 - DNA, 15 bp, Homo sapiens
gtacacaatgcacgc

SEQ ID NO: 1214628 - DNA, 15 bp, Homo sapiens
tgtacacaatgcacg

SEQ ID NO: 1214629 - DNA, 15 bp, Homo sapiens
atgtacacaatgcac

SEQ ID NO: 1214630 - DNA, 15 bp, Homo sapiens
tatgtacacaatgca

SEQ ID NO: 1214631 - DNA, 15 bp, Homo sapiens
ctatgtacacaatgc

SEQ ID NO: 1214632 - DNA, 15 bp, Homo sapiens
actatgtacacaatg

SEQ ID NO: 1214633 - DNA, 15 bp, Homo sapiens
cactatgtacacaat

SEQ ID NO: 1214634 - DNA, 15 bp, Homo sapiens
tcactatgtacacaa

SEQ ID NO: 1214635 - DNA, 15 bp, Homo sapiens
ttcactatgtacaca

SEQ ID NO: 1214636 - DNA, 15 bp, Homo sapiens
tttcactatgtacac

SEQ ID NO: 1214637 - DNA, 15 bp, Homo sapiens
ttttcactatgtaca

SEQ ID NO: 1214638 - DNA, 15 bp, Homo sapiens
attttcactatgtac

SEQ ID NO: 1214639 - DNA, 15 bp, Homo sapiens
tattttcactatgta

SEQ ID NO: 1214640 - DNA, 15 bp, Homo sapiens
ttattttcactatgt

SEQ ID NO: 1214641 - DNA, 15 bp, Homo sapiens
tttattttcactatg

SEQ ID NO: 1214642 - DNA, 15 bp, Homo sapiens
gtttattttcactat

SEQ ID NO: 1214643 - DNA, 15 bp, Homo sapiens
ggtttattttcacta

SEQ ID NO: 1214644 - DNA, 15 bp, Homo sapiens
gggtttattttcact

SEQ ID NO: 1214645 - DNA, 15 bp, Homo sapiens
agggtttattttcac

SEQ ID NO: 1214646 - DNA, 15 bp, Homo sapiens
cagggtttattttca

SEQ ID NO: 1214647 - DNA, 15 bp, Homo sapiens
ccagggtttattttc

SEQ ID NO: 1214648 - DNA, 15 bp, Homo sapiens
accagggtttatttt

SEQ ID NO: 1214649 - DNA, 15 bp, Homo sapiens
gaccagggtttattt

SEQ ID NO: 1214650 - DNA, 15 bp, Homo sapiens
tgaccagggtttatt

SEQ ID NO: 1214651 - DNA, 15 bp, Homo sapiens
ctgaccagggtttat

SEQ ID NO: 1214652 - DNA, 15 bp, Homo sapiens
tctgaccagggttta

SEQ ID NO: 1214653 - DNA, 15 bp, Homo sapiens
atctgaccagggttt

SEQ ID NO: 1214654 - DNA, 15 bp, Homo sapiens
catctgaccagggtt

SEQ ID NO: 1214655 - DNA, 15 bp, Homo sapiens
gcatctgaccagggt

SEQ ID NO: 1214656 - DNA, 15 bp, Homo sapiens
agcatctgaccaggg

SEQ ID NO: 1214657 - DNA, 15 bp, Homo sapiens
aagcatctgaccagg

SEQ ID NO: 1214658 - DNA, 15 bp, Homo sapiens
caagcatctgaccag

SEQ ID NO: 1214659 - DNA, 15 bp, Homo sapiens
tcaagcatctgacca

SEQ ID NO: 1214660 - DNA, 15 bp, Homo sapiens
ctcaagcatctgacc

SEQ ID NO: 1214661 - DNA, 15 bp, Homo sapiens
cctcaagcatctgac

SEQ ID NO: 1214662 - DNA, 15 bp, Homo sapiens
acctcaagcatctga

SEQ ID NO: 1214663 - DNA, 15 bp, Homo sapiens
gacctcaagcatctg

SEQ ID NO: 1214664 - DNA, 15 bp, Homo sapiens
tgacctcaagcatct

SEQ ID NO: 1214665 - DNA, 15 bp, Homo sapiens
ctgacctcaagcatc

SEQ ID NO: 1214666 - DNA, 15 bp, Homo sapiens
gctgacctcaagcat

SEQ ID NO: 1214667 - DNA, 15 bp, Homo sapiens
ggctgacctcaagca

SEQ ID NO: 1214668 - DNA, 15 bp, Homo sapiens
aggctgacctcaagc

SEQ ID NO: 1214669 - DNA, 15 bp, Homo sapiens
gaggctgacctcaag

SEQ ID NO: 1214670 - DNA, 15 bp, Homo sapiens
ggaggctgacctcaa

SEQ ID NO: 1214671 - DNA, 15 bp, Homo sapiens
gggaggctgacctca

SEQ ID NO: 1214672 - DNA, 15 bp, Homo sapiens
agggaggctgacctc

SEQ ID NO: 1214673 - DNA, 15 bp, Homo sapiens
gagggaggctgacct

SEQ ID NO: 1214674 - DNA, 15 bp, Homo sapiens
agagggaggctgacc

SEQ ID NO: 1214675 - DNA, 15 bp, Homo sapiens
gagagggaggctgac

SEQ ID NO: 1214676 - DNA, 15 bp, Homo sapiens
agagagggaggctga

SEQ ID NO: 1214677 - DNA, 15 bp, Homo sapiens
cagagagggaggctg

SEQ ID NO: 1214678 - DNA, 15 bp, Homo sapiens
gcagagagggaggct

SEQ ID NO: 1214679 - DNA, 15 bp, Homo sapiens
ggcagagagggaggc

SEQ ID NO: 1214680 - DNA, 15 bp, Homo sapiens
aggcagagagggagg

SEQ ID NO: 1214681 - DNA, 15 bp, Homo sapiens
caggcagagagggag

SEQ ID NO: 1214682 - DNA, 15 bp, Homo sapiens
ccaggcagagaggga

SEQ ID NO: 1214683 - DNA, 15 bp, Homo sapiens
accaggcagagaggg

SEQ ID NO: 1214684 - DNA, 15 bp, Homo sapiens
gaccaggcagagagg

SEQ ID NO: 1214685 - DNA, 15 bp, Homo sapiens
agaccaggcagagag

SEQ ID NO: 1214686 - DNA, 15 bp, Homo sapiens
cagaccaggcagaga

SEQ ID NO: 1214687 - DNA, 15 bp, Homo sapiens
acagaccaggcagag

SEQ ID NO: 1214688 - DNA, 15 bp, Homo sapiens
gacagaccaggcaga

SEQ ID NO: 1214689 - DNA, 15 bp, Homo sapiens
agacagaccaggcag

SEQ ID NO: 1214690 - DNA, 15 bp, Homo sapiens
gagacagaccaggca

SEQ ID NO: 1214691 - DNA, 15 bp, Homo sapiens
cgagacagaccaggc

SEQ ID NO: 1214692 - DNA, 15 bp, Homo sapiens
gcgagacagaccagg

SEQ ID NO: 1214693 - DNA, 15 bp, Homo sapiens
agcgagacagaccag

SEQ ID NO: 1214694 - DNA, 15 bp, Homo sapiens
gagcgagacagacca

SEQ ID NO: 1214695 - DNA, 15 bp, Homo sapiens
ggagcgagacagacc

SEQ ID NO: 1214696 - DNA, 15 bp, Homo sapiens
tggagcgagacagac

SEQ ID NO: 1214697 - DNA, 15 bp, Homo sapiens
atggagcgagacaga

SEQ ID NO: 1214698 - DNA, 15 bp, Homo sapiens
gatggagcgagacag

SEQ ID NO: 1214699 - DNA, 15 bp, Homo sapiens
cgatggagcgagaca

SEQ ID NO: 1214700 - DNA, 15 bp, Homo sapiens
acgatggagcgagac

SEQ ID NO: 1214701 - DNA, 15 bp, Homo sapiens
tacgatggagcgaga

SEQ ID NO: 1214702 - DNA, 15 bp, Homo sapiens
ttacgatggagcgag

SEQ ID NO: 1214703 - DNA, 15 bp, Homo sapiens
attacgatggagcga

SEQ ID NO: 1214704 - DNA, 15 bp, Homo sapiens
gattacgatggagcg

SEQ ID NO: 1214705 - DNA, 15 bp, Homo sapiens
tgattacgatggagc

SEQ ID NO: 1214706 - DNA, 15 bp, Homo sapiens
gtgattacgatggag

SEQ ID NO: 1214707 - DNA, 15 bp, Homo sapiens
ggtgattacgatgga

SEQ ID NO: 1214708 - DNA, 15 bp, Homo sapiens
aggtgattacgatgg

SEQ ID NO: 1214709 - DNA, 15 bp, Homo sapiens
caggtgattacgatg

SEQ ID NO: 1214710 - DNA, 15 bp, Homo sapiens
acaggtgattacgat

SEQ ID NO: 1214711 - DNA, 15 bp, Homo sapiens
gacaggtgattacga

SEQ ID NO: 1214712 - DNA, 15 bp, Homo sapiens
agacaggtgattacg

SEQ ID NO: 1214713 - DNA, 15 bp, Homo sapiens
gagacaggtgattac

SEQ ID NO: 1214714 - DNA, 15 bp, Homo sapiens
tgagacaggtgatta

SEQ ID NO: 1214715 - DNA, 15 bp, Homo sapiens
atgagacaggtgatt

SEQ ID NO: 1214716 - DNA, 15 bp, Homo sapiens
gatgagacaggtgat

SEQ ID NO: 1214717 - DNA, 15 bp, Homo sapiens
agatgagacaggtga

SEQ ID NO: 1214718 - DNA, 15 bp, Homo sapiens
cagatgagacaggtg

SEQ ID NO: 1214719 - DNA, 15 bp, Homo sapiens
gcagatgagacaggt

SEQ ID NO: 1214720 - DNA, 15 bp, Homo sapiens
ggcagatgagacagg

SEQ ID NO: 1214721 - DNA, 15 bp, Homo sapiens
tggcagatgagacag

SEQ ID NO: 1214722 - DNA, 15 bp, Homo sapiens
ttggcagatgagaca

SEQ ID NO: 1214723 - DNA, 15 bp, Homo sapiens
tttggcagatgagac

SEQ ID NO: 1214724 - DNA, 15 bp, Homo sapiens
ttttggcagatgaga

SEQ ID NO: 1214725 - DNA, 15 bp, Homo sapiens
attttggcagatgag

SEQ ID NO: 1214726 - DNA, 15 bp, Homo sapiens
gattttggcagatga

SEQ ID NO: 1214727 - DNA, 15 bp, Homo sapiens
agattttggcagatg

SEQ ID NO: 1214728 - DNA, 15 bp, Homo sapiens
tagattttggcagat

SEQ ID NO: 1214729 - DNA, 15 bp, Homo sapiens
ttagattttggcaga

SEQ ID NO: 1214730 - DNA, 15 bp, Homo sapiens
cttagattttggcag

SEQ ID NO: 1214731 - DNA, 15 bp, Homo sapiens
gcttagattttggca

SEQ ID NO: 1214732 - DNA, 15 bp, Homo sapiens
agcttagattttggc

SEQ ID NO: 1214733 - DNA, 15 bp, Homo sapiens
aagcttagattttgg

SEQ ID NO: 1214734 - DNA, 15 bp, Homo sapiens
aaagcttagattttg

SEQ ID NO: 1214735 - DNA, 15 bp, Homo sapiens
aaaagcttagatttt

SEQ ID NO: 1214736 - DNA, 15 bp, Homo sapiens
gaaaagcttagattt

SEQ ID NO: 1214737 - DNA, 15 bp, Homo sapiens
tgaaaagcttagatt

SEQ ID NO: 1214738 - DNA, 15 bp, Homo sapiens
ttgaaaagcttagat

SEQ ID NO: 1214739 - DNA, 15 bp, Homo sapiens
gttgaaaagcttaga

SEQ ID NO: 1214740 - DNA, 15 bp, Homo sapiens
cgttgaaaagcttag

SEQ ID NO: 1214741 - DNA, 15 bp, Homo sapiens
ccgttgaaaagctta

SEQ ID NO: 1214742 - DNA, 15 bp, Homo sapiens
gccgttgaaaagctt

SEQ ID NO: 1214743 - DNA, 15 bp, Homo sapiens
ggccgttgaaaagct

SEQ ID NO: 1214744 - DNA, 15 bp, Homo sapiens
aggccgttgaaaagc

SEQ ID NO: 1214745 - DNA, 15 bp, Homo sapiens
aaggccgttgaaaag

SEQ ID NO: 1214746 - DNA, 15 bp, Homo sapiens
aaaggccgttgaaaa

SEQ ID NO: 1214747 - DNA, 15 bp, Homo sapiens
aaaaggccgttgaaa

SEQ ID NO: 1214748 - DNA, 15 bp, Homo sapiens
gaaaaggccgttgaa

SEQ ID NO: 1214749 - DNA, 15 bp, Homo sapiens
tgaaaaggccgttga

SEQ ID NO: 1214750 - DNA, 15 bp, Homo sapiens
atgaaaaggccgttg

SEQ ID NO: 1214751 - DNA, 15 bp, Homo sapiens
aatgaaaaggccgtt

SEQ ID NO: 1214752 - DNA, 15 bp, Homo sapiens
caatgaaaaggccgt

SEQ ID NO: 1214753 - DNA, 15 bp, Homo sapiens
acaatgaaaaggccg

SEQ ID NO: 1214754 - DNA, 15 bp, Homo sapiens
gacaatgaaaaggcc

SEQ ID NO: 1214755 - DNA, 15 bp, Homo sapiens
tgacaatgaaaaggc

SEQ ID NO: 1214756 - DNA, 15 bp, Homo sapiens
gtgacaatgaaaagg

SEQ ID NO: 1214757 - DNA, 15 bp, Homo sapiens
tgtgacaatgaaaag

SEQ ID NO: 1214758 - DNA, 15 bp, Homo sapiens
atgtgacaatgaaaa

SEQ ID NO: 1214759 - DNA, 15 bp, Homo sapiens
gatgtgacaatgaaa

SEQ ID NO: 1214760 - DNA, 15 bp, Homo sapiens
ggatgtgacaatgaa

SEQ ID NO: 1214761 - DNA, 15 bp, Homo sapiens
gggatgtgacaatga

SEQ ID NO: 1214762 - DNA, 15 bp, Homo sapiens
tgggatgtgacaatg

SEQ ID NO: 1214763 - DNA, 15 bp, Homo sapiens
ttgggatgtgacaat

SEQ ID NO: 1214764 - DNA, 15 bp, Homo sapiens
tttgggatgtgacaa

SEQ ID NO: 1214765 - DNA, 15 bp, Homo sapiens
atttgggatgtgaca

SEQ ID NO: 1214766 - DNA, 15 bp, Homo sapiens
aatttgggatgtgac

SEQ ID NO: 1214767 - DNA, 15 bp, Homo sapiens
gaatttgggatgtga

SEQ ID NO: 1214768 - DNA, 15 bp, Homo sapiens
ggaatttgggatgtg

SEQ ID NO: 1214769 - DNA, 15 bp, Homo sapiens
tggaatttgggatgt

SEQ ID NO: 1214770 - DNA, 15 bp, Homo sapiens
ttggaatttgggatg

SEQ ID NO: 1214771 - DNA, 15 bp, Homo sapiens
cttggaatttgggat

SEQ ID NO: 1214772 - DNA, 15 bp, Homo sapiens
gcttggaatttggga

SEQ ID NO: 1214773 - DNA, 15 bp, Homo sapiens
ggcttggaatttggg

SEQ ID NO: 1214774 - DNA, 15 bp, Homo sapiens
aggcttggaatttgg

SEQ ID NO: 1214775 - DNA, 15 bp, Homo sapiens
caggcttggaatttg

SEQ ID NO: 1214776 - DNA, 15 bp, Homo sapiens
tcaggcttggaattt

SEQ ID NO: 1214777 - DNA, 15 bp, Homo sapiens
ttcaggcttggaatt

SEQ ID NO: 1214778 - DNA, 15 bp, Homo sapiens
cttcaggcttggaat

SEQ ID NO: 1214779 - DNA, 15 bp, Homo sapiens
ccttcaggcttggaa

SEQ ID NO: 1214780 - DNA, 15 bp, Homo sapiens
cccttcaggcttgga

SEQ ID NO: 1214781 - DNA, 15 bp, Homo sapiens
acccttcaggcttgg

SEQ ID NO: 1214782 - DNA, 15 bp, Homo sapiens
cacccttcaggcttg

SEQ ID NO: 1214783 - DNA, 15 bp, Homo sapiens
acacccttcaggctt

SEQ ID NO: 1214784 - DNA, 15 bp, Homo sapiens
aacacccttcaggct

SEQ ID NO: 1214785 - DNA, 15 bp, Homo sapiens
gaacacccttcaggc

SEQ ID NO: 1214786 - DNA, 15 bp, Homo sapiens
agaacacccttcagg

SEQ ID NO: 1214787 - DNA, 15 bp, Homo sapiens
cagaacacccttcag

SEQ ID NO: 1214788 - DNA, 15 bp, Homo sapiens
ccagaacacccttca

SEQ ID NO: 1214789 - DNA, 15 bp, Homo sapiens
cccagaacacccttc

SEQ ID NO: 1214790 - DNA, 15 bp, Homo sapiens
gcccagaacaccctt

SEQ ID NO: 1214791 - DNA, 15 bp, Homo sapiens
agcccagaacaccct

SEQ ID NO: 1214792 - DNA, 15 bp, Homo sapiens
gagcccagaacaccc

SEQ ID NO: 1214793 - DNA, 15 bp, Homo sapiens
ggagcccagaacacc

SEQ ID NO: 1214794 - DNA, 15 bp, Homo sapiens
gggagcccagaacac

SEQ ID NO: 1214795 - DNA, 15 bp, Homo sapiens
ggggagcccagaaca

SEQ ID NO: 1214796 - DNA, 15 bp, Homo sapiens
tggggagcccagaac

SEQ ID NO: 1214797 - DNA, 15 bp, Homo sapiens
atggggagcccagaa

SEQ ID NO: 1214798 - DNA, 15 bp, Homo sapiens
tatggggagcccaga

SEQ ID NO: 1214799 - DNA, 15 bp, Homo sapiens
ttatggggagcccag

SEQ ID NO: 1214800 - DNA, 15 bp, Homo sapiens
cttatggggagccca

SEQ ID NO: 1214801 - DNA, 15 bp, Homo sapiens
acttatggggagccc

SEQ ID NO: 1214802 - DNA, 15 bp, Homo sapiens
cacttatggggagcc

SEQ ID NO: 1214803 - DNA, 15 bp, Homo sapiens
acacttatggggagc

SEQ ID NO: 1214804 - DNA, 15 bp, Homo sapiens
aacacttatggggag

SEQ ID NO: 1214805 - DNA, 15 bp, Homo sapiens
aaacacttatgggga

SEQ ID NO: 1214806 - DNA, 15 bp, Homo sapiens
caaacacttatgggg

SEQ ID NO: 1214807 - DNA, 15 bp, Homo sapiens
acaaacacttatggg

SEQ ID NO: 1214808 - DNA, 15 bp, Homo sapiens
aacaaacacttatgg

SEQ ID NO: 1214809 - DNA, 15 bp, Homo sapiens
caacaaacacttatg

SEQ ID NO: 1214810 - DNA, 15 bp, Homo sapiens
ccaacaaacacttat

SEQ ID NO: 1214811 - DNA, 15 bp, Homo sapiens
cccaacaaacactta

SEQ ID NO: 1214812 - DNA, 15 bp, Homo sapiens
acccaacaaacactt

SEQ ID NO: 1214813 - DNA, 15 bp, Homo sapiens
cacccaacaaacact

SEQ ID NO: 1214814 - DNA, 15 bp, Homo sapiens
gcacccaacaaacac

SEQ ID NO: 1214815 - DNA, 15 bp, Homo sapiens
tgcacccaacaaaca

SEQ ID NO: 1214816 - DNA, 15 bp, Homo sapiens
atgcacccaacaaac

SEQ ID NO: 1214817 - DNA, 15 bp, Homo sapiens
catgcacccaacaaa

SEQ ID NO: 1214818 - DNA, 15 bp, Homo sapiens
ccatgcacccaacaa

SEQ ID NO: 1214819 - DNA, 15 bp, Homo sapiens
accatgcacccaaca

SEQ ID NO: 1214820 - DNA, 15 bp, Homo sapiens
aaccatgcacccaac

SEQ ID NO: 1214821 - DNA, 15 bp, Homo sapiens
caaccatgcacccaa

SEQ ID NO: 1214822 - DNA, 15 bp, Homo sapiens
tcaaccatgcaccca

SEQ ID NO: 1214823 - DNA, 15 bp, Homo sapiens
atcaaccatgcaccc

SEQ ID NO: 1214824 - DNA, 15 bp, Homo sapiens
aatcaaccatgcacc

SEQ ID NO: 1214825 - DNA, 15 bp, Homo sapiens
caatcaaccatgcac

SEQ ID NO: 1214826 - DNA, 15 bp, Homo sapiens
tcaatcaaccatgca

SEQ ID NO: 1214827 - DNA, 15 bp, Homo sapiens
ttcaatcaaccatgc

SEQ ID NO: 1214828 - DNA, 15 bp, Homo sapiens
cttcaatcaaccatg

SEQ ID NO: 1214829 - DNA, 15 bp, Homo sapiens
ccttcaatcaaccat

SEQ ID NO: 1214830 - DNA, 15 bp, Homo sapiens
tccttcaatcaacca

SEQ ID NO: 1214831 - DNA, 15 bp, Homo sapiens
ttccttcaatcaacc

SEQ ID NO: 1214832 - DNA, 15 bp, Homo sapiens
attccttcaatcaac

SEQ ID NO: 1214833 - DNA, 15 bp, Homo sapiens
cattccttcaatcaa

SEQ ID NO: 1214834 - DNA, 15 bp, Homo sapiens
acattccttcaatca

SEQ ID NO: 1214835 - DNA, 15 bp, Homo sapiens
tacattccttcaatc

SEQ ID NO: 1214836 - DNA, 15 bp, Homo sapiens
atacattccttcaat

SEQ ID NO: 1214837 - DNA, 15 bp, Homo sapiens
tatacattccttcaa

SEQ ID NO: 1214838 - DNA, 15 bp, Homo sapiens
ctatacattccttca

SEQ ID NO: 1214839 - DNA, 15 bp, Homo sapiens
actatacattccttc

SEQ ID NO: 1214840 - DNA, 15 bp, Homo sapiens
cactatacattcctt

SEQ ID NO: 1214841 - DNA, 15 bp, Homo sapiens
acactatacattcct

SEQ ID NO: 1214842 - DNA, 15 bp, Homo sapiens
cacactatacattcc

SEQ ID NO: 1214843 - DNA, 15 bp, Homo sapiens
tcacactatacattc

SEQ ID NO: 1214844 - DNA, 15 bp, Homo sapiens
ctcacactatacatt

SEQ ID NO: 1214845 - DNA, 15 bp, Homo sapiens
tctcacactatacat

SEQ ID NO: 1214846 - DNA, 15 bp, Homo sapiens
ttctcacactataca

SEQ ID NO: 1214847 - DNA, 15 bp, Homo sapiens
attctcacactatac

SEQ ID NO: 1214848 - DNA, 15 bp, Homo sapiens
cattctcacactata

SEQ ID NO: 1214849 - DNA, 15 bp, Homo sapiens
ccattctcacactat

SEQ ID NO: 1214850 - DNA, 15 bp, Homo sapiens
accattctcacacta

SEQ ID NO: 1214851 - DNA, 15 bp, Homo sapiens
taccattctcacact

SEQ ID NO: 1214852 - DNA, 15 bp, Homo sapiens
ctaccattctcacac

SEQ ID NO: 1214853 - DNA, 15 bp, Homo sapiens
gctaccattctcaca

SEQ ID NO: 1214854 - DNA, 15 bp, Homo sapiens
agctaccattctcac

SEQ ID NO: 1214855 - DNA, 15 bp, Homo sapiens
aagctaccattctca

SEQ ID NO: 1214856 - DNA, 15 bp, Homo sapiens
caagctaccattctc

SEQ ID NO: 1214857 - DNA, 15 bp, Homo sapiens
tcaagctaccattct

SEQ ID NO: 1214858 - DNA, 15 bp, Homo sapiens
ctcaagctaccattc

SEQ ID NO: 1214859 - DNA, 15 bp, Homo sapiens
cctcaagctaccatt

SEQ ID NO: 1214860 - DNA, 15 bp, Homo sapiens
tcctcaagctaccat

SEQ ID NO: 1214861 - DNA, 15 bp, Homo sapiens
ctcctcaagctacca

SEQ ID NO: 1214862 - DNA, 15 bp, Homo sapiens
cctcctcaagctacc

SEQ ID NO: 1214863 - DNA, 15 bp, Homo sapiens
tcctcctcaagctac

SEQ ID NO: 1214864 - DNA, 15 bp, Homo sapiens
ttcctcctcaagcta

SEQ ID NO: 1214865 - DNA, 15 bp, Homo sapiens
tttcctcctcaagct

SEQ ID NO: 1214866 - DNA, 15 bp, Homo sapiens
ctttcctcctcaagc

SEQ ID NO: 1214867 - DNA, 15 bp, Homo sapiens
actttcctcctcaag

SEQ ID NO: 1214868 - DNA, 15 bp, Homo sapiens
gactttcctcctcaa

SEQ ID NO: 1214869 - DNA, 15 bp, Homo sapiens
agactttcctcctca

SEQ ID NO: 1214870 - DNA, 15 bp, Homo sapiens
tagactttcctcctc

SEQ ID NO: 1214871 - DNA, 15 bp, Homo sapiens
atagactttcctcct

SEQ ID NO: 1214872 - DNA, 15 bp, Homo sapiens
catagactttcctcc

SEQ ID NO: 1214873 - DNA, 15 bp, Homo sapiens
ccatagactttcctc

SEQ ID NO: 1214874 - DNA, 15 bp, Homo sapiens
cccatagactttcct

SEQ ID NO: 1214875 - DNA, 15 bp, Homo sapiens
tcccatagactttcc

SEQ ID NO: 1214876 - DNA, 15 bp, Homo sapiens
ttcccatagactttc

SEQ ID NO: 1214877 - DNA, 15 bp, Homo sapiens
gttcccatagacttt

SEQ ID NO: 1214878 - DNA, 15 bp, Homo sapiens
agttcccatagactt

SEQ ID NO: 1214879 - DNA, 15 bp, Homo sapiens
aagttcccatagact

SEQ ID NO: 1214880 - DNA, 15 bp, Homo sapiens
caagttcccatagac

SEQ ID NO: 1214881 - DNA, 15 bp, Homo sapiens
acaagttcccataga

SEQ ID NO: 1214882 - DNA, 15 bp, Homo sapiens
aacaagttcccatag

SEQ ID NO: 1214883 - DNA, 15 bp, Homo sapiens
taacaagttcccata

SEQ ID NO: 1214884 - DNA, 15 bp, Homo sapiens
ttaacaagttcccat

SEQ ID NO: 1214885 - DNA, 15 bp, Homo sapiens
attaacaagttccca

SEQ ID NO: 1214886 - DNA, 15 bp, Homo sapiens
cattaacaagttccc

SEQ ID NO: 1214887 - DNA, 15 bp, Homo sapiens
tcattaacaagttcc

SEQ ID NO: 1214888 - DNA, 15 bp, Homo sapiens
ttcattaacaagttc

SEQ ID NO: 1214889 - DNA, 15 bp, Homo sapiens
tttcattaacaagtt

SEQ ID NO: 1214890 - DNA, 15 bp, Homo sapiens
ctttcattaacaagt

SEQ ID NO: 1214891 - DNA, 15 bp, Homo sapiens
actttcattaacaag

SEQ ID NO: 1214892 - DNA, 15 bp, Homo sapiens
cactttcattaacaa

SEQ ID NO: 1214893 - DNA, 15 bp, Homo sapiens
acactttcattaaca

SEQ ID NO: 1214894 - DNA, 15 bp, Homo sapiens
tacactttcattaac

SEQ ID NO: 1214895 - DNA, 15 bp, Homo sapiens
gtacactttcattaa

SEQ ID NO: 1214896 - DNA, 15 bp, Homo sapiens
agtacactttcatta

SEQ ID NO: 1214897 - DNA, 15 bp, Homo sapiens
aagtacactttcatt

SEQ ID NO: 1214898 - DNA, 15 bp, Homo sapiens
caagtacactttcat

SEQ ID NO: 1214899 - DNA, 15 bp, Homo sapiens
acaagtacactttca

SEQ ID NO: 1214900 - DNA, 15 bp, Homo sapiens
aacaagtacactttc

SEQ ID NO: 1214901 - DNA, 15 bp, Homo sapiens
gaacaagtacacttt

SEQ ID NO: 1214902 - DNA, 15 bp, Homo sapiens
ggaacaagtacactt

SEQ ID NO: 1214903 - DNA, 15 bp, Homo sapiens
aggaacaagtacact

SEQ ID NO: 1214904 - DNA, 15 bp, Homo sapiens
caggaacaagtacac

SEQ ID NO: 1214905 - DNA, 15 bp, Homo sapiens
gcaggaacaagtaca

SEQ ID NO: 1214906 - DNA, 15 bp, Homo sapiens
ggcaggaacaagtac

SEQ ID NO: 1214907 - DNA, 15 bp, Homo sapiens
aggcaggaacaagta

SEQ ID NO: 1214908 - DNA, 15 bp, Homo sapiens
caggcaggaacaagt

SEQ ID NO: 1214909 - DNA, 15 bp, Homo sapiens
tcaggcaggaacaag

SEQ ID NO: 1214910 - DNA, 15 bp, Homo sapiens
gtcaggcaggaacaa

SEQ ID NO: 1214911 - DNA, 15 bp, Homo sapiens
tgtcaggcaggaaca

SEQ ID NO: 1214912 - DNA, 15 bp, Homo sapiens
ctgtcaggcaggaac

SEQ ID NO: 1214913 - DNA, 15 bp, Homo sapiens
tctgtcaggcaggaa

SEQ ID NO: 1214914 - DNA, 15 bp, Homo sapiens
ttctgtcaggcagga

SEQ ID NO: 1214915 - DNA, 15 bp, Homo sapiens
tttctgtcaggcagg

SEQ ID NO: 1214916 - DNA, 15 bp, Homo sapiens
atttctgtcaggcag

SEQ ID NO: 1214917 - DNA, 15 bp, Homo sapiens
catttctgtcaggca

SEQ ID NO: 1214918 - DNA, 15 bp, Homo sapiens
acatttctgtcaggc

SEQ ID NO: 1214919 - DNA, 15 bp, Homo sapiens
tacatttctgtcagg

SEQ ID NO: 1214920 - DNA, 15 bp, Homo sapiens
ttacatttctgtcag

SEQ ID NO: 1214921 - DNA, 15 bp, Homo sapiens
cttacatttctgtca

SEQ ID NO: 1214922 - DNA, 15 bp, Homo sapiens
tcttacatttctgtc

SEQ ID NO: 1214923 - DNA, 15 bp, Homo sapiens
ttcttacatttctgt

SEQ ID NO: 1214924 - DNA, 15 bp, Homo sapiens
tttcttacatttctg

SEQ ID NO: 1214925 - DNA, 15 bp, Homo sapiens
ttttcttacatttct

SEQ ID NO: 1214926 - DNA, 15 bp, Homo sapiens
tttttcttacatttc

SEQ ID NO: 1214927 - DNA, 15 bp, Homo sapiens
atttttcttacattt

SEQ ID NO: 1214928 - DNA, 15 bp, Homo sapiens
aatttttcttacatt

SEQ ID NO: 1214929 - DNA, 15 bp, Homo sapiens
caatttttcttacat

SEQ ID NO: 1214930 - DNA, 15 bp, Homo sapiens
tcaatttttcttaca

SEQ ID NO: 1214931 - DNA, 15 bp, Homo sapiens
ttcaatttttcttac

SEQ ID NO: 1214932 - DNA, 15 bp, Homo sapiens
attcaatttttctta

SEQ ID NO: 1214933 - DNA, 15 bp, Homo sapiens
cattcaatttttctt

SEQ ID NO: 1214934 - DNA, 15 bp, Homo sapiens
gcattcaatttttct

SEQ ID NO: 1214935 - DNA, 15 bp, Homo sapiens
tgcattcaatttttc

SEQ ID NO: 1214936 - DNA, 15 bp, Homo sapiens
ctgcattcaattttt

SEQ ID NO: 1214937 - DNA, 15 bp, Homo sapiens
actgcattcaatttt

SEQ ID NO: 1214938 - DNA, 15 bp, Homo sapiens
tactgcattcaattt

SEQ ID NO: 1214939 - DNA, 15 bp, Homo sapiens
ttactgcattcaatt

SEQ ID NO: 1214940 - DNA, 15 bp, Homo sapiens
tttactgcattcaat

SEQ ID NO: 1214941 - DNA, 15 bp, Homo sapiens
ttttactgcattcaa

SEQ ID NO: 1214942 - DNA, 15 bp, Homo sapiens
tttttactgcattca

SEQ ID NO: 1214943 - DNA, 15 bp, Homo sapiens
ttttttactgcattc

SEQ ID NO: 1214944 - DNA, 15 bp, Homo sapiens
attttttactgcatt

SEQ ID NO: 1214945 - DNA, 15 bp, Homo sapiens
cattttttactgcat

SEQ ID NO: 1214946 - DNA, 15 bp, Homo sapiens
ccattttttactgca

SEQ ID NO: 1214947 - DNA, 15 bp, Homo sapiens
tccattttttactgc

SEQ ID NO: 1214948 - DNA, 15 bp, Homo sapiens
ctccattttttactg

SEQ ID NO: 1214949 - DNA, 15 bp, Homo sapiens
cctccattttttact

SEQ ID NO: 1214950 - DNA, 15 bp, Homo sapiens
acctccattttttac

SEQ ID NO: 1214951 - DNA, 15 bp, Homo sapiens
gacctccatttttta

SEQ ID NO: 1214952 - DNA, 15 bp, Homo sapiens
tgacctccatttttt

SEQ ID NO: 1214953 - DNA, 15 bp, Homo sapiens
ctgacctccattttt

SEQ ID NO: 1214954 - DNA, 15 bp, Homo sapiens
tctgacctccatttt

SEQ ID NO: 1214955 - DNA, 15 bp, Homo sapiens
gtctgacctccattt

SEQ ID NO: 1214956 - DNA, 15 bp, Homo sapiens
cgtctgacctccatt

SEQ ID NO: 1214957 - DNA, 15 bp, Homo sapiens
tcgtctgacctccat

SEQ ID NO: 1214958 - DNA, 15 bp, Homo sapiens
ctcgtctgacctcca

SEQ ID NO: 1214959 - DNA, 15 bp, Homo sapiens
cctcgtctgacctcc

SEQ ID NO: 1214960 - DNA, 15 bp, Homo sapiens
acctcgtctgacctc

SEQ ID NO: 1214961 - DNA, 15 bp, Homo sapiens
cacctcgtctgacct

SEQ ID NO: 1214962 - DNA, 15 bp, Homo sapiens
ccacctcgtctgacc

SEQ ID NO: 1214963 - DNA, 15 bp, Homo sapiens
accacctcgtctgac

SEQ ID NO: 1214964 - DNA, 15 bp, Homo sapiens
aaccacctcgtctga

SEQ ID NO: 1214965 - DNA, 15 bp, Homo sapiens
gaaccacctcgtctg

SEQ ID NO: 1214966 - DNA, 15 bp, Homo sapiens
tgaaccacctcgtct

SEQ ID NO: 1214967 - DNA, 15 bp, Homo sapiens
gtgaaccacctcgtc

SEQ ID NO: 1214968 - DNA, 15 bp, Homo sapiens
ggtgaaccacctcgt

SEQ ID NO: 1214969 - DNA, 15 bp, Homo sapiens
gggtgaaccacctcg

SEQ ID NO: 1214970 - DNA, 15 bp, Homo sapiens
agggtgaaccacctc

SEQ ID NO: 1214971 - DNA, 15 bp, Homo sapiens
aagggtgaaccacct

SEQ ID NO: 1214972 - DNA, 15 bp, Homo sapiens
caagggtgaaccacc

SEQ ID NO: 1214973 - DNA, 15 bp, Homo sapiens
acaagggtgaaccac

SEQ ID NO: 1214974 - DNA, 15 bp, Homo sapiens
tacaagggtgaacca

SEQ ID NO: 1214975 - DNA, 15 bp, Homo sapiens
ttacaagggtgaacc

SEQ ID NO: 1214976 - DNA, 15 bp, Homo sapiens
attacaagggtgaac

SEQ ID NO: 1214977 - DNA, 15 bp, Homo sapiens
gattacaagggtgaa

SEQ ID NO: 1214978 - DNA, 15 bp, Homo sapiens
tgattacaagggtga

SEQ ID NO: 1214979 - DNA, 15 bp, Homo sapiens
gtgattacaagggtg

SEQ ID NO: 1214980 - DNA, 15 bp, Homo sapiens
tgtgattacaagggt

SEQ ID NO: 1214981 - DNA, 15 bp, Homo sapiens
ctgtgattacaaggg

SEQ ID NO: 1214982 - DNA, 15 bp, Homo sapiens
gctgtgattacaagg

SEQ ID NO: 1214983 - DNA, 15 bp, Homo sapiens
tgctgtgattacaag

SEQ ID NO: 1214984 - DNA, 15 bp, Homo sapiens
gtgctgtgattacaa

SEQ ID NO: 1214985 - DNA, 15 bp, Homo sapiens
agtgctgtgattaca

SEQ ID NO: 1214986 - DNA, 15 bp, Homo sapiens
aagtgctgtgattac

SEQ ID NO: 1214987 - DNA, 15 bp, Homo sapiens
aaagtgctgtgatta

SEQ ID NO: 1214988 - DNA, 15 bp, Homo sapiens
caaagtgctgtgatt

SEQ ID NO: 1214989 - DNA, 15 bp, Homo sapiens
ccaaagtgctgtgat

SEQ ID NO: 1214990 - DNA, 15 bp, Homo sapiens
cccaaagtgctgtga

SEQ ID NO: 1214991 - DNA, 15 bp, Homo sapiens
tcccaaagtgctgtg

SEQ ID NO: 1214992 - DNA, 15 bp, Homo sapiens
atcccaaagtgctgt

SEQ ID NO: 1214993 - DNA, 15 bp, Homo sapiens
acctcagcatcccaa

SEQ ID NO: 1214994 - DNA, 15 bp, Homo sapiens
cacctcagcatccca

SEQ ID NO: 1214995 - DNA, 15 bp, Homo sapiens
ccacctcagcatccc

SEQ ID NO: 1214996 - DNA, 15 bp, Homo sapiens
cccacctcagcatcc

SEQ ID NO: 1214997 - DNA, 15 bp, Homo sapiens
acccacctcagcatc

SEQ ID NO: 1214998 - DNA, 15 bp, Homo sapiens
cacccacctcagcat

SEQ ID NO: 1214999 - DNA, 15 bp, Homo sapiens
ccacccacctcagca

SEQ ID NO: 1215000 - DNA, 15 bp, Homo sapiens
gctcaagtgatccac

SEQ ID NO: 1215001 - DNA, 15 bp, Homo sapiens
ggctcaagtgatcca

SEQ ID NO: 1215002 - DNA, 15 bp, Homo sapiens
ttggtctcaaactcc

SEQ ID NO: 1215003 - DNA, 15 bp, Homo sapiens
gttggtctcaaactc

SEQ ID NO: 1215004 - DNA, 15 bp, Homo sapiens
tgttggtctcaaact

SEQ ID NO: 1215005 - DNA, 15 bp, Homo sapiens
atgttggtctcaaac

SEQ ID NO: 1215006 - DNA, 15 bp, Homo sapiens
catgttggtctcaaa

SEQ ID NO: 1215007 - DNA, 15 bp, Homo sapiens
ccatgttggtctcaa

SEQ ID NO: 1215008 - DNA, 15 bp, Homo sapiens
accatgttggtctca

SEQ ID NO: 1215009 - DNA, 15 bp, Homo sapiens
caccatgttggtctc

SEQ ID NO: 1215010 - DNA, 15 bp, Homo sapiens
tcaccatgttggtct

SEQ ID NO: 1215011 - DNA, 15 bp, Homo sapiens
gtattttttgtagag

SEQ ID NO: 1215012 - DNA, 15 bp, Homo sapiens
tgtattttttgtaga

SEQ ID NO: 1215013 - DNA, 15 bp, Homo sapiens
ttgtattttttgtag

SEQ ID NO: 1215014 - DNA, 15 bp, Homo sapiens
cccaccacacccagc

SEQ ID NO: 1215015 - DNA, 15 bp, Homo sapiens
ccccaccacacccag

SEQ ID NO: 1215016 - DNA, 15 bp, Homo sapiens
tccccaccacaccca

SEQ ID NO: 1215017 - DNA, 15 bp, Homo sapiens
ctccccaccacaccc

SEQ ID NO: 1215018 - DNA, 15 bp, Homo sapiens
cctccccaccacacc

SEQ ID NO: 1215019 - DNA, 15 bp, Homo sapiens
gcctccccaccacac

SEQ ID NO: 1215020 - DNA, 15 bp, Homo sapiens
agcctccccaccaca

SEQ ID NO: 1215021 - DNA, 15 bp, Homo sapiens
cagcctccccaccac

SEQ ID NO: 1215022 - DNA, 15 bp, Homo sapiens
tcagcctccccacca

SEQ ID NO: 1215023 - DNA, 15 bp, Homo sapiens
ctcagcctccccacc

SEQ ID NO: 1215024 - DNA, 15 bp, Homo sapiens
cctcagcctccccac

SEQ ID NO: 1215025 - DNA, 15 bp, Homo sapiens
acctcagcctcccca

SEQ ID NO: 1215026 - DNA, 15 bp, Homo sapiens
cacctcagcctcccc

SEQ ID NO: 1215027 - DNA, 15 bp, Homo sapiens
aggctcaagcaatcc

SEQ ID NO: 1215028 - DNA, 15 bp, Homo sapiens
tcaggctcaagcaat

SEQ ID NO: 1215029 - DNA, 15 bp, Homo sapiens
ctcaggctcaagcaa

SEQ ID NO: 1215030 - DNA, 15 bp, Homo sapiens
tctcaggctcaagca

SEQ ID NO: 1215031 - DNA, 15 bp, Homo sapiens
ctctcaggctcaagc

SEQ ID NO: 1215032 - DNA, 15 bp, Homo sapiens
aacctctcaggctca

SEQ ID NO: 1215033 - DNA, 15 bp, Homo sapiens
caacctctcaggctc

SEQ ID NO: 1215034 - DNA, 15 bp, Homo sapiens
tcaacctctcaggct

SEQ ID NO: 1215035 - DNA, 15 bp, Homo sapiens
ctcaacctctcaggc

SEQ ID NO: 1215036 - DNA, 15 bp, Homo sapiens
cctcaacctctcagg

SEQ ID NO: 1215037 - DNA, 15 bp, Homo sapiens
tcctcaacctctcag

SEQ ID NO: 1215038 - DNA, 15 bp, Homo sapiens
atcctcaacctctca

SEQ ID NO: 1215039 - DNA, 15 bp, Homo sapiens
catcctcaacctctc

SEQ ID NO: 1215040 - DNA, 15 bp, Homo sapiens
gcatcctcaacctct

SEQ ID NO: 1215041 - DNA, 15 bp, Homo sapiens
tgcatcctcaacctc

SEQ ID NO: 1215042 - DNA, 15 bp, Homo sapiens
ctgcatcctcaacct

SEQ ID NO: 1215043 - DNA, 15 bp, Homo sapiens
actgcatcctcaacc

SEQ ID NO: 1215044 - DNA, 15 bp, Homo sapiens
cactgcatcctcaac

SEQ ID NO: 1215045 - DNA, 15 bp, Homo sapiens
tcactgcatcctcaa

SEQ ID NO: 1215046 - DNA, 15 bp, Homo sapiens
ctcactgcatcctca

SEQ ID NO: 1215047 - DNA, 15 bp, Homo sapiens
gctcactgcatcctc

SEQ ID NO: 1215048 - DNA, 15 bp, Homo sapiens
agctcactgcatcct

SEQ ID NO: 1215049 - DNA, 15 bp, Homo sapiens
cagctcactgcatcc

SEQ ID NO: 1215050 - DNA, 15 bp, Homo sapiens
acagctcactgcatc

SEQ ID NO: 1215051 - DNA, 15 bp, Homo sapiens
cacagctcactgcat

SEQ ID NO: 1215052 - DNA, 15 bp, Homo sapiens
atgatcacagctcac

SEQ ID NO: 1215053 - DNA, 15 bp, Homo sapiens
catgatcacagctca

SEQ ID NO: 1215054 - DNA, 15 bp, Homo sapiens
acatgatcacagctc

SEQ ID NO: 1215055 - DNA, 15 bp, Homo sapiens
gacatgatcacagct

SEQ ID NO: 1215056 - DNA, 15 bp, Homo sapiens
tgacatgatcacagc

SEQ ID NO: 1215057 - DNA, 15 bp, Homo sapiens
gtgacatgatcacag

SEQ ID NO: 1215058 - DNA, 15 bp, Homo sapiens
agtgacatgatcaca

SEQ ID NO: 1215059 - DNA, 15 bp, Homo sapiens
cagtgacatgatcac

SEQ ID NO: 1215060 - DNA, 15 bp, Homo sapiens
gcagtgacatgatca

SEQ ID NO: 1215061 - DNA, 15 bp, Homo sapiens
tgcagtgacatgatc

SEQ ID NO: 1215062 - DNA, 15 bp, Homo sapiens
gtgcagtgacatgat

SEQ ID NO: 1215063 - DNA, 15 bp, Homo sapiens
agtgcagtgacatga

SEQ ID NO: 1215064 - DNA, 15 bp, Homo sapiens
gagtgcagtgacatg

SEQ ID NO: 1215065 - DNA, 15 bp, Homo sapiens
ggagtgcagtgacat

SEQ ID NO: 1215066 - DNA, 15 bp, Homo sapiens
tggagtgcagtgaca

SEQ ID NO: 1215067 - DNA, 15 bp, Homo sapiens
atggagtgcagtgac

SEQ ID NO: 1215068 - DNA, 15 bp, Homo sapiens
acccaggatggagtg

SEQ ID NO: 1215069 - DNA, 15 bp, Homo sapiens
cacccaggatggagt

SEQ ID NO: 1215070 - DNA, 15 bp, Homo sapiens
tcacccaggatggag

SEQ ID NO: 1215071 - DNA, 15 bp, Homo sapiens
atcacccaggatgga

SEQ ID NO: 1215072 - DNA, 15 bp, Homo sapiens
tatcacccaggatgg

SEQ ID NO: 1215073 - DNA, 15 bp, Homo sapiens
ctatcacccaggatg

SEQ ID NO: 1215074 - DNA, 15 bp, Homo sapiens
tctatcacccaggat

SEQ ID NO: 1215075 - DNA, 15 bp, Homo sapiens
ctctatcacccagga

SEQ ID NO: 1215076 - DNA, 15 bp, Homo sapiens
gctctatcacccagg

SEQ ID NO: 1215077 - DNA, 15 bp, Homo sapiens
cgctctatcacccag

SEQ ID NO: 1215078 - DNA, 15 bp, Homo sapiens
tcgctctatcaccca

SEQ ID NO: 1215079 - DNA, 15 bp, Homo sapiens
ctcgctctatcaccc

SEQ ID NO: 1215080 - DNA, 15 bp, Homo sapiens
tctcgctctatcacc

SEQ ID NO: 1215081 - DNA, 15 bp, Homo sapiens
gtctcgctctatcac

SEQ ID NO: 1215082 - DNA, 15 bp, Homo sapiens
ggtctcgctctatca

SEQ ID NO: 1215083 - DNA, 15 bp, Homo sapiens
gggtctcgctctatc

SEQ ID NO: 1215084 - DNA, 15 bp, Homo sapiens
tgggtctcgctctat

SEQ ID NO: 1215085 - DNA, 15 bp, Homo sapiens
ttgggtctcgctcta

SEQ ID NO: 1215086 - DNA, 15 bp, Homo sapiens
attgggtctcgctct

SEQ ID NO: 1215087 - DNA, 15 bp, Homo sapiens
gattgggtctcgctc

SEQ ID NO: 1215088 - DNA, 15 bp, Homo sapiens
ggattgggtctcgct

SEQ ID NO: 1215089 - DNA, 15 bp, Homo sapiens
tggattgggtctcgc

SEQ ID NO: 1215090 - DNA, 15 bp, Homo sapiens
ttggattgggtctcg

SEQ ID NO: 1215091 - DNA, 15 bp, Homo sapiens
tttggattgggtctc

SEQ ID NO: 1215092 - DNA, 15 bp, Homo sapiens
ctttggattgggtct

SEQ ID NO: 1215093 - DNA, 15 bp, Homo sapiens
tctttggattgggtc

SEQ ID NO: 1215094 - DNA, 15 bp, Homo sapiens
ttctttggattgggt

SEQ ID NO: 1215095 - DNA, 15 bp, Homo sapiens
tttctttggattggg

SEQ ID NO: 1215096 - DNA, 15 bp, Homo sapiens
ttttctttggattgg

SEQ ID NO: 1215097 - DNA, 15 bp, Homo sapiens
tttttctttggattg

SEQ ID NO: 1215098 - DNA, 15 bp, Homo sapiens
ctttttctttggatt

SEQ ID NO: 1215099 - DNA, 15 bp, Homo sapiens
tctttttctttggat

SEQ ID NO: 1215100 - DNA, 15 bp, Homo sapiens
ttctttttctttgga

SEQ ID NO: 1215101 - DNA, 15 bp, Homo sapiens
tttctttttctttgg

SEQ ID NO: 1215102 - DNA, 15 bp, Homo sapiens
atttctttttctttg

SEQ ID NO: 1215103 - DNA, 15 bp, Homo sapiens
catttctttttcttt

SEQ ID NO: 1215104 - DNA, 15 bp, Homo sapiens
tcatttctttttctt

SEQ ID NO: 1215105 - DNA, 15 bp, Homo sapiens
atcatttctttttct

SEQ ID NO: 1215106 - DNA, 15 bp, Homo sapiens
catcatttctttttc

SEQ ID NO: 1215107 - DNA, 15 bp, Homo sapiens
ccatcatttcttttt

SEQ ID NO: 1215108 - DNA, 15 bp, Homo sapiens
cccatcatttctttt

SEQ ID NO: 1215109 - DNA, 15 bp, Homo sapiens
ccccatcatttcttt

SEQ ID NO: 1215110 - DNA, 15 bp, Homo sapiens
cccccatcatttctt

SEQ ID NO: 1215111 - DNA, 15 bp, Homo sapiens
tcccccatcatttct

SEQ ID NO: 1215112 - DNA, 15 bp, Homo sapiens
gtcccccatcatttc

SEQ ID NO: 1215113 - DNA, 15 bp, Homo sapiens
agtcccccatcattt

SEQ ID NO: 1215114 - DNA, 15 bp, Homo sapiens
aagtcccccatcatt

SEQ ID NO: 1215115 - DNA, 15 bp, Homo sapiens
gaagtcccccatcat

SEQ ID NO: 1215116 - DNA, 15 bp, Homo sapiens
ggaagtcccccatca

SEQ ID NO: 1215117 - DNA, 15 bp, Homo sapiens
aggaagtcccccatc

SEQ ID NO: 1215118 - DNA, 15 bp, Homo sapiens
caggaagtcccccat

SEQ ID NO: 1215119 - DNA, 15 bp, Homo sapiens
acaggaagtccccca

SEQ ID NO: 1215120 - DNA, 15 bp, Homo sapiens
aacaggaagtccccc

SEQ ID NO: 1215121 - DNA, 15 bp, Homo sapiens
caacaggaagtcccc

SEQ ID NO: 1215122 - DNA, 15 bp, Homo sapiens
gcaacaggaagtccc

SEQ ID NO: 1215123 - DNA, 15 bp, Homo sapiens
agcaacaggaagtcc

SEQ ID NO: 1215124 - DNA, 15 bp, Homo sapiens
aagcaacaggaagtc

SEQ ID NO: 1215125 - DNA, 15 bp, Homo sapiens
gaagcaacaggaagt

SEQ ID NO: 1215126 - DNA, 15 bp, Homo sapiens
agaagcaacaggaag

SEQ ID NO: 1215127 - DNA, 15 bp, Homo sapiens
aagaagcaacaggaa

SEQ ID NO: 1215128 - DNA, 15 bp, Homo sapiens
aaagaagcaacagga

SEQ ID NO: 1215129 - DNA, 15 bp, Homo sapiens
caaagaagcaacagg

SEQ ID NO: 1215130 - DNA, 15 bp, Homo sapiens
acaaagaagcaacag

SEQ ID NO: 1215131 - DNA, 15 bp, Homo sapiens
aacaaagaagcaaca

SEQ ID NO: 1215132 - DNA, 15 bp, Homo sapiens
aaacaaagaagcaac

SEQ ID NO: 1215133 - DNA, 15 bp, Homo sapiens
caaacaaagaagcaa

SEQ ID NO: 1215134 - DNA, 15 bp, Homo sapiens
ccaaacaaagaagca

SEQ ID NO: 1215135 - DNA, 15 bp, Homo sapiens
cccaaacaaagaagc

SEQ ID NO: 1215136 - DNA, 15 bp, Homo sapiens
gcccaaacaaagaag

SEQ ID NO: 1215137 - DNA, 15 bp, Homo sapiens
ggcccaaacaaagaa

SEQ ID NO: 1215138 - DNA, 15 bp, Homo sapiens
aggcccaaacaaaga

SEQ ID NO: 1215139 - DNA, 15 bp, Homo sapiens
gaggcccaaacaaag

SEQ ID NO: 1215140 - DNA, 15 bp, Homo sapiens
tgaggcccaaacaaa

SEQ ID NO: 1215141 - DNA, 15 bp, Homo sapiens
ttgaggcccaaacaa

SEQ ID NO: 1215142 - DNA, 15 bp, Homo sapiens
attgaggcccaaaca

SEQ ID NO: 1215143 - DNA, 15 bp, Homo sapiens
cattgaggcccaaac

SEQ ID NO: 1215144 - DNA, 15 bp, Homo sapiens
ccattgaggcccaaa

SEQ ID NO: 1215145 - DNA, 15 bp, Homo sapiens
accattgaggcccaa

SEQ ID NO: 1215146 - DNA, 15 bp, Homo sapiens
aaccattgaggccca

SEQ ID NO: 1215147 - DNA, 15 bp, Homo sapiens
aaaccattgaggccc

SEQ ID NO: 1215148 - DNA, 15 bp, Homo sapiens
taaaccattgaggcc

SEQ ID NO: 1215149 - DNA, 15 bp, Homo sapiens
ttaaaccattgaggc

SEQ ID NO: 1215150 - DNA, 15 bp, Homo sapiens
tttaaaccattgagg

SEQ ID NO: 1215151 - DNA, 15 bp, Homo sapiens
atttaaaccattgag

SEQ ID NO: 1215152 - DNA, 15 bp, Homo sapiens
catttaaaccattga

SEQ ID NO: 1215153 - DNA, 15 bp, Homo sapiens
tcatttaaaccattg

SEQ ID NO: 1215154 - DNA, 15 bp, Homo sapiens
atcatttaaaccatt

SEQ ID NO: 1215155 - DNA, 15 bp, Homo sapiens
aatcatttaaaccat

SEQ ID NO: 1215156 - DNA, 15 bp, Homo sapiens
caatcatttaaacca

SEQ ID NO: 1215157 - DNA, 15 bp, Homo sapiens
tcaatcatttaaacc

SEQ ID NO: 1215158 - DNA, 15 bp, Homo sapiens
ttcaatcatttaaac

SEQ ID NO: 1215159 - DNA, 15 bp, Homo sapiens
attcaatcatttaaa

SEQ ID NO: 1215160 - DNA, 15 bp, Homo sapiens
aattcaatcatttaa

SEQ ID NO: 1215161 - DNA, 15 bp, Homo sapiens
caattcaatcattta

SEQ ID NO: 1215162 - DNA, 15 bp, Homo sapiens
acaattcaatcattt

SEQ ID NO: 1215163 - DNA, 15 bp, Homo sapiens
gacaattcaatcatt

SEQ ID NO: 1215164 - DNA, 15 bp, Homo sapiens
tgacaattcaatcat

SEQ ID NO: 1215165 - DNA, 15 bp, Homo sapiens
ttgacaattcaatca

SEQ ID NO: 1215166 - DNA, 15 bp, Homo sapiens
tttgacaattcaatc

SEQ ID NO: 1215167 - DNA, 15 bp, Homo sapiens
ttttgacaattcaat

SEQ ID NO: 1215168 - DNA, 15 bp, Homo sapiens
attttgacaattcaa

SEQ ID NO: 1215169 - DNA, 15 bp, Homo sapiens
tattttgacaattca

SEQ ID NO: 1215170 - DNA, 15 bp, Homo sapiens
ctattttgacaattc

SEQ ID NO: 1215171 - DNA, 15 bp, Homo sapiens
cctattttgacaatt

SEQ ID NO: 1215172 - DNA, 15 bp, Homo sapiens
tcctattttgacaat

SEQ ID NO: 1215173 - DNA, 15 bp, Homo sapiens
ctcctattttgacaa

SEQ ID NO: 1215174 - DNA, 15 bp, Homo sapiens
cctcctattttgaca

SEQ ID NO: 1215175 - DNA, 15 bp, Homo sapiens
tcctcctattttgac

SEQ ID NO: 1215176 - DNA, 15 bp, Homo sapiens
ttcctcctattttga

SEQ ID NO: 1215177 - DNA, 15 bp, Homo sapiens
attcctcctattttg

SEQ ID NO: 1215178 - DNA, 15 bp, Homo sapiens
aattcctcctatttt

SEQ ID NO: 1215179 - DNA, 15 bp, Homo sapiens
caattcctcctattt

SEQ ID NO: 1215180 - DNA, 15 bp, Homo sapiens
tcaattcctcctatt

SEQ ID NO: 1215181 - DNA, 15 bp, Homo sapiens
ctcaattcctcctat

SEQ ID NO: 1215182 - DNA, 15 bp, Homo sapiens
tctcaattcctccta

SEQ ID NO: 1215183 - DNA, 15 bp, Homo sapiens
atctcaattcctcct

SEQ ID NO: 1215184 - DNA, 15 bp, Homo sapiens
gatctcaattcctcc

SEQ ID NO: 1215185 - DNA, 15 bp, Homo sapiens
agatctcaattcctc

SEQ ID NO: 1215186 - DNA, 15 bp, Homo sapiens
cagatctcaattcct

SEQ ID NO: 1215187 - DNA, 15 bp, Homo sapiens
gcagatctcaattcc

SEQ ID NO: 1215188 - DNA, 15 bp, Homo sapiens
tgcagatctcaattc

SEQ ID NO: 1215189 - DNA, 15 bp, Homo sapiens
ctgcagatctcaatt

SEQ ID NO: 1215190 - DNA, 15 bp, Homo sapiens
tctgcagatctcaat

SEQ ID NO: 1215191 - DNA, 15 bp, Homo sapiens
atctgcagatctcaa

SEQ ID NO: 1215192 - DNA, 15 bp, Homo sapiens
catctgcagatctca

SEQ ID NO: 1215193 - DNA, 15 bp, Homo sapiens
ccatctgcagatctc

SEQ ID NO: 1215194 - DNA, 15 bp, Homo sapiens
accatctgcagatct

SEQ ID NO: 1215195 - DNA, 15 bp, Homo sapiens
aaccatctgcagatc

SEQ ID NO: 1215196 - DNA, 15 bp, Homo sapiens
taaccatctgcagat

SEQ ID NO: 1215197 - DNA, 15 bp, Homo sapiens
ttaaccatctgcaga

SEQ ID NO: 1215198 - DNA, 15 bp, Homo sapiens
attaaccatctgcag

SEQ ID NO: 1215199 - DNA, 15 bp, Homo sapiens
tattaaccatctgca

SEQ ID NO: 1215200 - DNA, 15 bp, Homo sapiens
gtattaaccatctgc

SEQ ID NO: 1215201 - DNA, 15 bp, Homo sapiens
ggtattaaccatctg

SEQ ID NO: 1215202 - DNA, 15 bp, Homo sapiens
tggtattaaccatct

SEQ ID NO: 1215203 - DNA, 15 bp, Homo sapiens
atggtattaaccatc

SEQ ID NO: 1215204 - DNA, 15 bp, Homo sapiens
aatggtattaaccat

SEQ ID NO: 1215205 - DNA, 15 bp, Homo sapiens
gaatggtattaacca

SEQ ID NO: 1215206 - DNA, 15 bp, Homo sapiens
tgaatggtattaacc

SEQ ID NO: 1215207 - DNA, 15 bp, Homo sapiens
ttgaatggtattaac

SEQ ID NO: 1215208 - DNA, 15 bp, Homo sapiens
tttgaatggtattaa

SEQ ID NO: 1215209 - DNA, 15 bp, Homo sapiens
ctttgaatggtatta

SEQ ID NO: 1215210 - DNA, 15 bp, Homo sapiens
cctttgaatggtatt

SEQ ID NO: 1215211 - DNA, 15 bp, Homo sapiens
acctttgaatggtat

SEQ ID NO: 1215212 - DNA, 15 bp, Homo sapiens
tacctttgaatggta

SEQ ID NO: 1215213 - DNA, 15 bp, Homo sapiens
atacctttgaatggt

SEQ ID NO: 1215214 - DNA, 15 bp, Homo sapiens
gatacctttgaatgg

SEQ ID NO: 1215215 - DNA, 15 bp, Homo sapiens
tgatacctttgaatg

SEQ ID NO: 1215216 - DNA, 15 bp, Homo sapiens
ctgatacctttgaat

SEQ ID NO: 1215217 - DNA, 15 bp, Homo sapiens
gctgatacctttgaa

SEQ ID NO: 1215218 - DNA, 15 bp, Homo sapiens
ggctgatacctttga

SEQ ID NO: 1215219 - DNA, 15 bp, Homo sapiens
cggctgatacctttg

SEQ ID NO: 1215220 - DNA, 15 bp, Homo sapiens
tcggctgataccttt

SEQ ID NO: 1215221 - DNA, 15 bp, Homo sapiens
gtcggctgatacctt

SEQ ID NO: 1215222 - DNA, 15 bp, Homo sapiens
tgtcggctgatacct

SEQ ID NO: 1215223 - DNA, 15 bp, Homo sapiens
gtgtcggctgatacc

SEQ ID NO: 1215224 - DNA, 15 bp, Homo sapiens
ggtgtcggctgatac

SEQ ID NO: 1215225 - DNA, 15 bp, Homo sapiens
tggtgtcggctgata

SEQ ID NO: 1215226 - DNA, 15 bp, Homo sapiens
atggtgtcggctgat

SEQ ID NO: 1215227 - DNA, 15 bp, Homo sapiens
catggtgtcggctga

SEQ ID NO: 1215228 - DNA, 15 bp, Homo sapiens
tcatggtgtcggctg

SEQ ID NO: 1215229 - DNA, 15 bp, Homo sapiens
ttcatggtgtcggct

SEQ ID NO: 1215230 - DNA, 15 bp, Homo sapiens
tttcatggtgtcggc

SEQ ID NO: 1215231 - DNA, 15 bp, Homo sapiens
gtttcatggtgtcgg

SEQ ID NO: 1215232 - DNA, 15 bp, Homo sapiens
tgtttcatggtgtcg

SEQ ID NO: 1215233 - DNA, 15 bp, Homo sapiens
atgtttcatggtgtc

SEQ ID NO: 1215234 - DNA, 15 bp, Homo sapiens
aatgtttcatggtgt

SEQ ID NO: 1215235 - DNA, 15 bp, Homo sapiens
caatgtttcatggtg

SEQ ID NO: 1215236 - DNA, 15 bp, Homo sapiens
tcaatgtttcatggt

SEQ ID NO: 1215237 - DNA, 15 bp, Homo sapiens
atcaatgtttcatgg

SEQ ID NO: 1215238 - DNA, 15 bp, Homo sapiens
aatcaatgtttcatg

SEQ ID NO: 1215239 - DNA, 15 bp, Homo sapiens
aaatcaatgtttcat

SEQ ID NO: 1215240 - DNA, 15 bp, Homo sapiens
aaaatcaatgtttca

SEQ ID NO: 1215241 - DNA, 15 bp, Homo sapiens
aaaaatcaatgtttc

SEQ ID NO: 1215242 - DNA, 15 bp, Homo sapiens
aaaaaatcaatgttt

SEQ ID NO: 1215243 - DNA, 15 bp, Homo sapiens
taaaaaatcaatgtt

SEQ ID NO: 1215244 - DNA, 15 bp, Homo sapiens
ttaaaaaatcaatgt

SEQ ID NO: 1215245 - DNA, 15 bp, Homo sapiens
attaaaaaatcaatg

SEQ ID NO: 1215246 - DNA, 15 bp, Homo sapiens
cattaaaaaatcaat

SEQ ID NO: 1215247 - DNA, 15 bp, Homo sapiens
acattaaaaaatcaa

SEQ ID NO: 1215248 - DNA, 15 bp, Homo sapiens
tacattaaaaaatca

SEQ ID NO: 1215249 - DNA, 15 bp, Homo sapiens
gtacattaaaaaatc

SEQ ID NO: 1215250 - DNA, 15 bp, Homo sapiens
tgtacattaaaaaat

SEQ ID NO: 1215251 - DNA, 15 bp, Homo sapiens
atgtacattaaaaaa

SEQ ID NO: 1215252 - DNA, 15 bp, Homo sapiens
aatgtacattaaaaa

SEQ ID NO: 1215253 - DNA, 15 bp, Homo sapiens
gaatgtacattaaaa

SEQ ID NO: 1215254 - DNA, 15 bp, Homo sapiens
tgaatgtacattaaa

SEQ ID NO: 1215255 - DNA, 15 bp, Homo sapiens
ttgaatgtacattaa

SEQ ID NO: 1215256 - DNA, 15 bp, Homo sapiens
tttgaatgtacatta

SEQ ID NO: 1215257 - DNA, 15 bp, Homo sapiens
atttgaatgtacatt

SEQ ID NO: 1215258 - DNA, 15 bp, Homo sapiens
tatttgaatgtacat

SEQ ID NO: 1215259 - DNA, 15 bp, Homo sapiens
atatttgaatgtaca

SEQ ID NO: 1215260 - DNA, 15 bp, Homo sapiens
tatatttgaatgtac

SEQ ID NO: 1215261 - DNA, 15 bp, Homo sapiens
gtatatttgaatgta

SEQ ID NO: 1215262 - DNA, 15 bp, Homo sapiens
ggtatatttgaatgt

SEQ ID NO: 1215263 - DNA, 15 bp, Homo sapiens
tggtatatttgaatg

SEQ ID NO: 1215264 - DNA, 15 bp, Homo sapiens
gtggtatatttgaat

SEQ ID NO: 1215265 - DNA, 15 bp, Homo sapiens
ggtggtatatttgaa

SEQ ID NO: 1215266 - DNA, 15 bp, Homo sapiens
tggtggtatatttga

SEQ ID NO: 1215267 - DNA, 15 bp, Homo sapiens
gtggtggtatatttg

SEQ ID NO: 1215268 - DNA, 15 bp, Homo sapiens
agtggtggtatattt

SEQ ID NO: 1215269 - DNA, 15 bp, Homo sapiens
aagtggtggtatatt

SEQ ID NO: 1215270 - DNA, 15 bp, Homo sapiens
gaagtggtggtatat

SEQ ID NO: 1215271 - DNA, 15 bp, Homo sapiens
cgaagtggtggtata

SEQ ID NO: 1215272 - DNA, 15 bp, Homo sapiens
tcgaagtggtggtat

SEQ ID NO: 1215273 - DNA, 15 bp, Homo sapiens
gtcgaagtggtggta

SEQ ID NO: 1215274 - DNA, 15 bp, Homo sapiens
tgtcgaagtggtggt

SEQ ID NO: 1215275 - DNA, 15 bp, Homo sapiens
ttgtcgaagtggtgg

SEQ ID NO: 1215276 - DNA, 15 bp, Homo sapiens
attgtcgaagtggtg

SEQ ID NO: 1215277 - DNA, 15 bp, Homo sapiens
tattgtcgaagtggt

SEQ ID NO: 1215278 - DNA, 15 bp, Homo sapiens
ttattgtcgaagtgg

SEQ ID NO: 1215279 - DNA, 15 bp, Homo sapiens
gttattgtcgaagtg

SEQ ID NO: 1215280 - DNA, 15 bp, Homo sapiens
tgttattgtcgaagt

SEQ ID NO: 1215281 - DNA, 15 bp, Homo sapiens
ttgttattgtcgaag

SEQ ID NO: 1215282 - DNA, 15 bp, Homo sapiens
gttgttattgtcgaa

SEQ ID NO: 1215283 - DNA, 15 bp, Homo sapiens
tgttgttattgtcga

SEQ ID NO: 1215284 - DNA, 15 bp, Homo sapiens
ttgttgttattgtcg

SEQ ID NO: 1215285 - DNA, 15 bp, Homo sapiens
gttgttgttattgtc

SEQ ID NO: 1215286 - DNA, 15 bp, Homo sapiens
atgttgttgttattg

SEQ ID NO: 1215287 - DNA, 15 bp, Homo sapiens
catgttgttgttatt

SEQ ID NO: 1215288 - DNA, 15 bp, Homo sapiens
tcatgttgttgttat

SEQ ID NO: 1215289 - DNA, 15 bp, Homo sapiens
atcatgttgttgtta

SEQ ID NO: 1215290 - DNA, 15 bp, Homo sapiens
catcatgttgttgtt

SEQ ID NO: 1215291 - DNA, 15 bp, Homo sapiens
tcatcatgttgttgt

SEQ ID NO: 1215292 - DNA, 15 bp, Homo sapiens
atcatcatgttgttg

SEQ ID NO: 1215293 - DNA, 15 bp, Homo sapiens
catcatcatgttgtt

SEQ ID NO: 1215294 - DNA, 15 bp, Homo sapiens
tcatcatcatgttgt

SEQ ID NO: 1215295 - DNA, 15 bp, Homo sapiens
atcatcatcatgttg

SEQ ID NO: 1215296 - DNA, 15 bp, Homo sapiens
catcatcatcatgtt

SEQ ID NO: 1215297 - DNA, 15 bp, Homo sapiens
tcatcatcatcatgt

SEQ ID NO: 1215298 - DNA, 15 bp, Homo sapiens
atcatcatcatcatg

SEQ ID NO: 1215299 - DNA, 15 bp, Homo sapiens
ctcatcatcatcatc

SEQ ID NO: 1215300 - DNA, 15 bp, Homo sapiens
tctcatcatcatcat

SEQ ID NO: 1215301 - DNA, 15 bp, Homo sapiens
ctctcatcatcatca

SEQ ID NO: 1215302 - DNA, 15 bp, Homo sapiens
cctctcatcatcatc

SEQ ID NO: 1215303 - DNA, 15 bp, Homo sapiens
ccctctcatcatcat

SEQ ID NO: 1215304 - DNA, 15 bp, Homo sapiens
tccctctcatcatca

SEQ ID NO: 1215305 - DNA, 15 bp, Homo sapiens
gtccctctcatcatc

SEQ ID NO: 1215306 - DNA, 15 bp, Homo sapiens
agtccctctcatcat

SEQ ID NO: 1215307 - DNA, 15 bp, Homo sapiens
aagtccctctcatca

SEQ ID NO: 1215308 - DNA, 15 bp, Homo sapiens
gaagtccctctcatc

SEQ ID NO: 1215309 - DNA, 15 bp, Homo sapiens
ggaagtccctctcat

SEQ ID NO: 1215310 - DNA, 15 bp, Homo sapiens
aggaagtccctctca

SEQ ID NO: 1215311 - DNA, 15 bp, Homo sapiens
gaggaagtccctctc

SEQ ID NO: 1215312 - DNA, 15 bp, Homo sapiens
agaggaagtccctct

SEQ ID NO: 1215313 - DNA, 15 bp, Homo sapiens
gagaggaagtccctc

SEQ ID NO: 1215314 - DNA, 15 bp, Homo sapiens
tgagaggaagtccct

SEQ ID NO: 1215315 - DNA, 15 bp, Homo sapiens
ttgagaggaagtccc

SEQ ID NO: 1215316 - DNA, 15 bp, Homo sapiens
tttgagaggaagtcc

SEQ ID NO: 1215317 - DNA, 15 bp, Homo sapiens
ctttgagaggaagtc

SEQ ID NO: 1215318 - DNA, 15 bp, Homo sapiens
gctttgagaggaagt

SEQ ID NO: 1215319 - DNA, 15 bp, Homo sapiens
agctttgagaggaag

SEQ ID NO: 1215320 - DNA, 15 bp, Homo sapiens
gagctttgagaggaa

SEQ ID NO: 1215321 - DNA, 15 bp, Homo sapiens
ggagctttgagagga

SEQ ID NO: 1215322 - DNA, 15 bp, Homo sapiens
gggagctttgagagg

SEQ ID NO: 1215323 - DNA, 15 bp, Homo sapiens
tgggagctttgagag

SEQ ID NO: 1215324 - DNA, 15 bp, Homo sapiens
ctgggagctttgaga

SEQ ID NO: 1215325 - DNA, 15 bp, Homo sapiens
gctgggagctttgag

SEQ ID NO: 1215326 - DNA, 15 bp, Homo sapiens
tgctgggagctttga

SEQ ID NO: 1215327 - DNA, 15 bp, Homo sapiens
ctgctgggagctttg

SEQ ID NO: 1215328 - DNA, 15 bp, Homo sapiens
gctgctgggagcttt

SEQ ID NO: 1215329 - DNA, 15 bp, Homo sapiens
tgctgctgggagctt

SEQ ID NO: 1215330 - DNA, 15 bp, Homo sapiens
atgctgctgggagct

SEQ ID NO: 1215331 - DNA, 15 bp, Homo sapiens
aatgctgctgggagc

SEQ ID NO: 1215332 - DNA, 15 bp, Homo sapiens
aaatgctgctgggag

SEQ ID NO: 1215333 - DNA, 15 bp, Homo sapiens
aaaatgctgctggga

SEQ ID NO: 1215334 - DNA, 15 bp, Homo sapiens
gaaaatgctgctggg

SEQ ID NO: 1215335 - DNA, 15 bp, Homo sapiens
ggaaaatgctgctgg

SEQ ID NO: 1215336 - DNA, 15 bp, Homo sapiens
tggaaaatgctgctg

SEQ ID NO: 1215337 - DNA, 15 bp, Homo sapiens
atggaaaatgctgct

SEQ ID NO: 1215338 - DNA, 15 bp, Homo sapiens
gatggaaaatgctgc

SEQ ID NO: 1215339 - DNA, 15 bp, Homo sapiens
tgatggaaaatgctg

SEQ ID NO: 1215340 - DNA, 15 bp, Homo sapiens
gtgatggaaaatgct

SEQ ID NO: 1215341 - DNA, 15 bp, Homo sapiens
agtgatggaaaatgc

SEQ ID NO: 1215342 - DNA, 15 bp, Homo sapiens
aagtgatggaaaatg

SEQ ID NO: 1215343 - DNA, 15 bp, Homo sapiens
aaagtgatggaaaat

SEQ ID NO: 1215344 - DNA, 15 bp, Homo sapiens
caaagtgatggaaaa

SEQ ID NO: 1215345 - DNA, 15 bp, Homo sapiens
acaaagtgatggaaa

SEQ ID NO: 1215346 - DNA, 15 bp, Homo sapiens
aacaaagtgatggaa

SEQ ID NO: 1215347 - DNA, 15 bp, Homo sapiens
caacaaagtgatgga

SEQ ID NO: 1215348 - DNA, 15 bp, Homo sapiens
gcaacaaagtgatgg

SEQ ID NO: 1215349 - DNA, 15 bp, Homo sapiens
tgcaacaaagtgatg

SEQ ID NO: 1215350 - DNA, 15 bp, Homo sapiens
atgcaacaaagtgat

SEQ ID NO: 1215351 - DNA, 15 bp, Homo sapiens
catgcaacaaagtga

SEQ ID NO: 1215352 - DNA, 15 bp, Homo sapiens
tcatgcaacaaagtg

SEQ ID NO: 1215353 - DNA, 15 bp, Homo sapiens
ttcatgcaacaaagt

SEQ ID NO: 1215354 - DNA, 15 bp, Homo sapiens
gttcatgcaacaaag

SEQ ID NO: 1215355 - DNA, 15 bp, Homo sapiens
agttcatgcaacaaa

SEQ ID NO: 1215356 - DNA, 15 bp, Homo sapiens
gagttcatgcaacaa

SEQ ID NO: 1215357 - DNA, 15 bp, Homo sapiens
agagttcatgcaaca

SEQ ID NO: 1215358 - DNA, 15 bp, Homo sapiens
aagagttcatgcaac

SEQ ID NO: 1215359 - DNA, 15 bp, Homo sapiens
gaagagttcatgcaa

SEQ ID NO: 1215360 - DNA, 15 bp, Homo sapiens
tgaagagttcatgca

SEQ ID NO: 1215361 - DNA, 15 bp, Homo sapiens
atgaagagttcatgc

SEQ ID NO: 1215362 - DNA, 15 bp, Homo sapiens
gatgaagagttcatg

SEQ ID NO: 1215363 - DNA, 15 bp, Homo sapiens
tgatgaagagttcat

SEQ ID NO: 1215364 - DNA, 15 bp, Homo sapiens
ttgatgaagagttca

SEQ ID NO: 1215365 - DNA, 15 bp, Homo sapiens
tttgatgaagagttc

SEQ ID NO: 1215366 - DNA, 15 bp, Homo sapiens
ttttgatgaagagtt

SEQ ID NO: 1215367 - DNA, 15 bp, Homo sapiens
attttgatgaagagt

SEQ ID NO: 1215368 - DNA, 15 bp, Homo sapiens
gattttgatgaagag

SEQ ID NO: 1215369 - DNA, 15 bp, Homo sapiens
tgattttgatgaaga

SEQ ID NO: 1215370 - DNA, 15 bp, Homo sapiens
ctgattttgatgaag

SEQ ID NO: 1215371 - DNA, 15 bp, Homo sapiens
tctgattttgatgaa

SEQ ID NO: 1215372 - DNA, 15 bp, Homo sapiens
atctgattttgatga

SEQ ID NO: 1215373 - DNA, 15 bp, Homo sapiens
tatctgattttgatg

SEQ ID NO: 1215374 - DNA, 15 bp, Homo sapiens
atatctgattttgat

SEQ ID NO: 1215375 - DNA, 15 bp, Homo sapiens
catatctgattttga

SEQ ID NO: 1215376 - DNA, 15 bp, Homo sapiens
tcatatctgattttg

SEQ ID NO: 1215377 - DNA, 15 bp, Homo sapiens
ctcatatctgatttt

SEQ ID NO: 1215378 - DNA, 15 bp, Homo sapiens
cctcatatctgattt

SEQ ID NO: 1215379 - DNA, 15 bp, Homo sapiens
tcctcatatctgatt

SEQ ID NO: 1215380 - DNA, 15 bp, Homo sapiens
ctcctcatatctgat

SEQ ID NO: 1215381 - DNA, 15 bp, Homo sapiens
tctcctcatatctga

SEQ ID NO: 1215382 - DNA, 15 bp, Homo sapiens
ttctcctcatatctg

SEQ ID NO: 1215383 - DNA, 15 bp, Homo sapiens
cttctcctcatatct

SEQ ID NO: 1215384 - DNA, 15 bp, Homo sapiens
acttctcctcatatc

SEQ ID NO: 1215385 - DNA, 15 bp, Homo sapiens
tacttctcctcatat

SEQ ID NO: 1215386 - DNA, 15 bp, Homo sapiens
atacttctcctcata

SEQ ID NO: 1215387 - DNA, 15 bp, Homo sapiens
catacttctcctcat

SEQ ID NO: 1215388 - DNA, 15 bp, Homo sapiens
gcatacttctcctca

SEQ ID NO: 1215389 - DNA, 15 bp, Homo sapiens
ggcatacttctcctc

SEQ ID NO: 1215390 - DNA, 15 bp, Homo sapiens
tggcatacttctcct

SEQ ID NO: 1215391 - DNA, 15 bp, Homo sapiens
ctggcatacttctcc

SEQ ID NO: 1215392 - DNA, 15 bp, Homo sapiens
tctggcatacttctc

SEQ ID NO: 1215393 - DNA, 15 bp, Homo sapiens
atctggcatacttct

SEQ ID NO: 1215394 - DNA, 15 bp, Homo sapiens
catctggcatacttc

SEQ ID NO: 1215395 - DNA, 15 bp, Homo sapiens
acatctggcatactt

SEQ ID NO: 1215396 - DNA, 15 bp, Homo sapiens
aacatctggcatact

SEQ ID NO: 1215397 - DNA, 15 bp, Homo sapiens
taacatctggcatac

SEQ ID NO: 1215398 - DNA, 15 bp, Homo sapiens
ctaacatctggcata

SEQ ID NO: 1215399 - DNA, 15 bp, Homo sapiens
actaacatctggcat

SEQ ID NO: 1215400 - DNA, 15 bp, Homo sapiens
cactaacatctggca

SEQ ID NO: 1215401 - DNA, 15 bp, Homo sapiens
tcactaacatctggc

SEQ ID NO: 1215402 - DNA, 15 bp, Homo sapiens
ctcactaacatctgg

SEQ ID NO: 1215403 - DNA, 15 bp, Homo sapiens
cctcactaacatctg

SEQ ID NO: 1215404 - DNA, 15 bp, Homo sapiens
tcctcactaacatct

SEQ ID NO: 1215405 - DNA, 15 bp, Homo sapiens
gtcctcactaacatc

SEQ ID NO: 1215406 - DNA, 15 bp, Homo sapiens
agtcctcactaacat

SEQ ID NO: 1215407 - DNA, 15 bp, Homo sapiens
tagtcctcactaaca

SEQ ID NO: 1215408 - DNA, 15 bp, Homo sapiens
ttagtcctcactaac

SEQ ID NO: 1215409 - DNA, 15 bp, Homo sapiens
cttagtcctcactaa

SEQ ID NO: 1215410 - DNA, 15 bp, Homo sapiens
tcttagtcctcacta

SEQ ID NO: 1215411 - DNA, 15 bp, Homo sapiens
atcttagtcctcact

SEQ ID NO: 1215412 - DNA, 15 bp, Homo sapiens
catcttagtcctcac

SEQ ID NO: 1215413 - DNA, 15 bp, Homo sapiens
acatcttagtcctca

SEQ ID NO: 1215414 - DNA, 15 bp, Homo sapiens
aacatcttagtcctc

SEQ ID NO: 1215415 - DNA, 15 bp, Homo sapiens
caacatcttagtcct

SEQ ID NO: 1215416 - DNA, 15 bp, Homo sapiens
ccaacatcttagtcc

SEQ ID NO: 1215417 - DNA, 15 bp, Homo sapiens
accaacatcttagtc

SEQ ID NO: 1215418 - DNA, 15 bp, Homo sapiens
aaccaacatcttagt

SEQ ID NO: 1215419 - DNA, 15 bp, Homo sapiens
taaccaacatcttag

SEQ ID NO: 1215420 - DNA, 15 bp, Homo sapiens
ctaaccaacatctta

SEQ ID NO: 1215421 - DNA, 15 bp, Homo sapiens
tctaaccaacatctt

SEQ ID NO: 1215422 - DNA, 15 bp, Homo sapiens
ttctaaccaacatct

SEQ ID NO: 1215423 - DNA, 15 bp, Homo sapiens
attctaaccaacatc

SEQ ID NO: 1215424 - DNA, 15 bp, Homo sapiens
aattctaaccaacat

SEQ ID NO: 1215425 - DNA, 15 bp, Homo sapiens
aaattctaaccaaca

SEQ ID NO: 1215426 - DNA, 15 bp, Homo sapiens
aaaattctaaccaac

SEQ ID NO: 1215427 - DNA, 15 bp, Homo sapiens
aaaaattctaaccaa

SEQ ID NO: 1215428 - DNA, 15 bp, Homo sapiens
gaaaaattctaacca

SEQ ID NO: 1215429 - DNA, 15 bp, Homo sapiens
agaaaaattctaacc

SEQ ID NO: 1215430 - DNA, 15 bp, Homo sapiens
gagaaaaattctaac

SEQ ID NO: 1215431 - DNA, 15 bp, Homo sapiens
tgagaaaaattctaa

SEQ ID NO: 1215432 - DNA, 15 bp, Homo sapiens
ctgagaaaaattcta

SEQ ID NO: 1215433 - DNA, 15 bp, Homo sapiens
cctgagaaaaattct

SEQ ID NO: 1215434 - DNA, 15 bp, Homo sapiens
ccctgagaaaaattc

SEQ ID NO: 1215435 - DNA, 15 bp, Homo sapiens
accctgagaaaaatt

SEQ ID NO: 1215436 - DNA, 15 bp, Homo sapiens
caccctgagaaaaat

SEQ ID NO: 1215437 - DNA, 15 bp, Homo sapiens
ccaccctgagaaaaa

SEQ ID NO: 1215438 - DNA, 15 bp, Homo sapiens
accaccctgagaaaa

SEQ ID NO: 1215439 - DNA, 15 bp, Homo sapiens
taccaccctgagaaa

SEQ ID NO: 1215440 - DNA, 15 bp, Homo sapiens
ataccaccctgagaa

SEQ ID NO: 1215441 - DNA, 15 bp, Homo sapiens
gataccaccctgaga

SEQ ID NO: 1215442 - DNA, 15 bp, Homo sapiens
agataccaccctgag

SEQ ID NO: 1215443 - DNA, 15 bp, Homo sapiens
aagataccaccctga

SEQ ID NO: 1215444 - DNA, 15 bp, Homo sapiens
gaagataccaccctg

SEQ ID NO: 1215445 - DNA, 15 bp, Homo sapiens
tgaagataccaccct

SEQ ID NO: 1215446 - DNA, 15 bp, Homo sapiens
atgaagataccaccc

SEQ ID NO: 1215447 - DNA, 15 bp, Homo sapiens
catgaagataccacc

SEQ ID NO: 1215448 - DNA, 15 bp, Homo sapiens
tcatgaagataccac

SEQ ID NO: 1215449 - DNA, 15 bp, Homo sapiens
ttcatgaagatacca

SEQ ID NO: 1215450 - DNA, 15 bp, Homo sapiens
attcatgaagatacc

SEQ ID NO: 1215451 - DNA, 15 bp, Homo sapiens
tattcatgaagatac

SEQ ID NO: 1215452 - DNA, 15 bp, Homo sapiens
atattcatgaagata

SEQ ID NO: 1215453 - DNA, 15 bp, Homo sapiens
aatattcatgaagat

SEQ ID NO: 1215454 - DNA, 15 bp, Homo sapiens
caatattcatgaaga

SEQ ID NO: 1215455 - DNA, 15 bp, Homo sapiens
ccaatattcatgaag

SEQ ID NO: 1215456 - DNA, 15 bp, Homo sapiens
cccaatattcatgaa

SEQ ID NO: 1215457 - DNA, 15 bp, Homo sapiens
gcccaatattcatga

SEQ ID NO: 1215458 - DNA, 15 bp, Homo sapiens
tgcccaatattcatg

SEQ ID NO: 1215459 - DNA, 15 bp, Homo sapiens
atgcccaatattcat

SEQ ID NO: 1215460 - DNA, 15 bp, Homo sapiens
aatgcccaatattca

SEQ ID NO: 1215461 - DNA, 15 bp, Homo sapiens
taatgcccaatattc

SEQ ID NO: 1215462 - DNA, 15 bp, Homo sapiens
ttaatgcccaatatt

SEQ ID NO: 1215463 - DNA, 15 bp, Homo sapiens
gttaatgcccaatat

SEQ ID NO: 1215464 - DNA, 15 bp, Homo sapiens
agttaatgcccaata

SEQ ID NO: 1215465 - DNA, 15 bp, Homo sapiens
gagttaatgcccaat

SEQ ID NO: 1215466 - DNA, 15 bp, Homo sapiens
agagttaatgcccaa

SEQ ID NO: 1215467 - DNA, 15 bp, Homo sapiens
gagagttaatgccca

SEQ ID NO: 1215468 - DNA, 15 bp, Homo sapiens
tgagagttaatgccc

SEQ ID NO: 1215469 - DNA, 15 bp, Homo sapiens
ttgagagttaatgcc

SEQ ID NO: 1215470 - DNA, 15 bp, Homo sapiens
gttgagagttaatgc

SEQ ID NO: 1215471 - DNA, 15 bp, Homo sapiens
tgttgagagttaatg

SEQ ID NO: 1215472 - DNA, 15 bp, Homo sapiens
ctgttgagagttaat

SEQ ID NO: 1215473 - DNA, 15 bp, Homo sapiens
gctgttgagagttaa

SEQ ID NO: 1215474 - DNA, 15 bp, Homo sapiens
agctgttgagagtta

SEQ ID NO: 1215475 - DNA, 15 bp, Homo sapiens
cagctgttgagagtt

SEQ ID NO: 1215476 - DNA, 15 bp, Homo sapiens
gcagctgttgagagt

SEQ ID NO: 1215477 - DNA, 15 bp, Homo sapiens
agcagctgttgagag

SEQ ID NO: 1215478 - DNA, 15 bp, Homo sapiens
aagcagctgttgaga

SEQ ID NO: 1215479 - DNA, 15 bp, Homo sapiens
gaagcagctgttgag

SEQ ID NO: 1215480 - DNA, 15 bp, Homo sapiens
ggaagcagctgttga

SEQ ID NO: 1215481 - DNA, 15 bp, Homo sapiens
gggaagcagctgttg

SEQ ID NO: 1215482 - DNA, 15 bp, Homo sapiens
agggaagcagctgtt

SEQ ID NO: 1215483 - DNA, 15 bp, Homo sapiens
gagggaagcagctgt

SEQ ID NO: 1215484 - DNA, 15 bp, Homo sapiens
agagggaagcagctg

SEQ ID NO: 1215485 - DNA, 15 bp, Homo sapiens
gagagggaagcagct

SEQ ID NO: 1215486 - DNA, 15 bp, Homo sapiens
tgagagggaagcagc

SEQ ID NO: 1215487 - DNA, 15 bp, Homo sapiens
gtgagagggaagcag

SEQ ID NO: 1215488 - DNA, 15 bp, Homo sapiens
tgtgagagggaagca

SEQ ID NO: 1215489 - DNA, 15 bp, Homo sapiens
atgtgagagggaagc

SEQ ID NO: 1215490 - DNA, 15 bp, Homo sapiens
catgtgagagggaag

SEQ ID NO: 1215491 - DNA, 15 bp, Homo sapiens
gcatgtgagagggaa

SEQ ID NO: 1215492 - DNA, 15 bp, Homo sapiens
agcatgtgagaggga

SEQ ID NO: 1215493 - DNA, 15 bp, Homo sapiens
cagcatgtgagaggg

SEQ ID NO: 1215494 - DNA, 15 bp, Homo sapiens
gcagcatgtgagagg

SEQ ID NO: 1215495 - DNA, 15 bp, Homo sapiens
tgcagcatgtgagag

SEQ ID NO: 1215496 - DNA, 15 bp, Homo sapiens
ttgcagcatgtgaga

SEQ ID NO: 1215497 - DNA, 15 bp, Homo sapiens
cttgcagcatgtgag

SEQ ID NO: 1215498 - DNA, 15 bp, Homo sapiens
acttgcagcatgtga

SEQ ID NO: 1215499 - DNA, 15 bp, Homo sapiens
cacttgcagcatgtg

SEQ ID NO: 1215500 - DNA, 15 bp, Homo sapiens
acacttgcagcatgt

SEQ ID NO: 1215501 - DNA, 15 bp, Homo sapiens
gacacttgcagcatg

SEQ ID NO: 1215502 - DNA, 15 bp, Homo sapiens
tgacacttgcagcat

SEQ ID NO: 1215503 - DNA, 15 bp, Homo sapiens
atgacacttgcagca

SEQ ID NO: 1215504 - DNA, 15 bp, Homo sapiens
catgacacttgcagc

SEQ ID NO: 1215505 - DNA, 15 bp, Homo sapiens
acatgacacttgcag

SEQ ID NO: 1215506 - DNA, 15 bp, Homo sapiens
gacatgacacttgca

SEQ ID NO: 1215507 - DNA, 15 bp, Homo sapiens
agacatgacacttgc

SEQ ID NO: 1215508 - DNA, 15 bp, Homo sapiens
cagacatgacacttg

SEQ ID NO: 1215509 - DNA, 15 bp, Homo sapiens
acagacatgacactt

SEQ ID NO: 1215510 - DNA, 15 bp, Homo sapiens
aacagacatgacact

SEQ ID NO: 1215511 - DNA, 15 bp, Homo sapiens
aaacagacatgacac

SEQ ID NO: 1215512 - DNA, 15 bp, Homo sapiens
caaacagacatgaca

SEQ ID NO: 1215513 - DNA, 15 bp, Homo sapiens
ccaaacagacatgac

SEQ ID NO: 1215514 - DNA, 15 bp, Homo sapiens
gccaaacagacatga

SEQ ID NO: 1215515 - DNA, 15 bp, Homo sapiens
ggccaaacagacatg

SEQ ID NO: 1215516 - DNA, 15 bp, Homo sapiens
aggccaaacagacat

SEQ ID NO: 1215517 - DNA, 15 bp, Homo sapiens
gaggccaaacagaca

SEQ ID NO: 1215518 - DNA, 15 bp, Homo sapiens
tgaggccaaacagac

SEQ ID NO: 1215519 - DNA, 15 bp, Homo sapiens
ctgaggccaaacaga

SEQ ID NO: 1215520 - DNA, 15 bp, Homo sapiens
cctgaggccaaacag

SEQ ID NO: 1215521 - DNA, 15 bp, Homo sapiens
tcctgaggccaaaca

SEQ ID NO: 1215522 - DNA, 15 bp, Homo sapiens
ctcctgaggccaaac

SEQ ID NO: 1215523 - DNA, 15 bp, Homo sapiens
tctcctgaggccaaa

SEQ ID NO: 1215524 - DNA, 15 bp, Homo sapiens
atctcctgaggccaa

SEQ ID NO: 1215525 - DNA, 15 bp, Homo sapiens
tatctcctgaggcca

SEQ ID NO: 1215526 - DNA, 15 bp, Homo sapiens
atatctcctgaggcc

SEQ ID NO: 1215527 - DNA, 15 bp, Homo sapiens
aatatctcctgaggc

SEQ ID NO: 1215528 - DNA, 15 bp, Homo sapiens
taatatctcctgagg

SEQ ID NO: 1215529 - DNA, 15 bp, Homo sapiens
ttaatatctcctgag

SEQ ID NO: 1215530 - DNA, 15 bp, Homo sapiens
cttaatatctcctga

SEQ ID NO: 1215531 - DNA, 15 bp, Homo sapiens
gcttaatatctcctg

SEQ ID NO: 1215532 - DNA, 15 bp, Homo sapiens
ggcttaatatctcct

SEQ ID NO: 1215533 - DNA, 15 bp, Homo sapiens
tggcttaatatctcc

SEQ ID NO: 1215534 - DNA, 15 bp, Homo sapiens
ctggcttaatatctc

SEQ ID NO: 1215535 - DNA, 15 bp, Homo sapiens
gctggcttaatatct

SEQ ID NO: 1215536 - DNA, 15 bp, Homo sapiens
agctggcttaatatc

SEQ ID NO: 1215537 - DNA, 15 bp, Homo sapiens
cagctggcttaatat

SEQ ID NO: 1215538 - DNA, 15 bp, Homo sapiens
gcagctggcttaata

SEQ ID NO: 1215539 - DNA, 15 bp, Homo sapiens
tgcagctggcttaat

SEQ ID NO: 1215540 - DNA, 15 bp, Homo sapiens
ctgcagctggcttaa

SEQ ID NO: 1215541 - DNA, 15 bp, Homo sapiens
cctgcagctggctta

SEQ ID NO: 1215542 - DNA, 15 bp, Homo sapiens
ccctgcagctggctt

SEQ ID NO: 1215543 - DNA, 15 bp, Homo sapiens
tccctgcagctggct

SEQ ID NO: 1215544 - DNA, 15 bp, Homo sapiens
ttccctgcagctggc

SEQ ID NO: 1215545 - DNA, 15 bp, Homo sapiens
cttccctgcagctgg

SEQ ID NO: 1215546 - DNA, 15 bp, Homo sapiens
tcttccctgcagctg

SEQ ID NO: 1215547 - DNA, 15 bp, Homo sapiens
ctcttccctgcagct

SEQ ID NO: 1215548 - DNA, 15 bp, Homo sapiens
tctcttccctgcagc

SEQ ID NO: 1215549 - DNA, 15 bp, Homo sapiens
ttctcttccctgcag

SEQ ID NO: 1215550 - DNA, 15 bp, Homo sapiens
tttctcttccctgca

SEQ ID NO: 1215551 - DNA, 15 bp, Homo sapiens
ctttctcttccctgc

SEQ ID NO: 1215552 - DNA, 15 bp, Homo sapiens
actttctcttccctg

SEQ ID NO: 1215553 - DNA, 15 bp, Homo sapiens
aactttctcttccct

SEQ ID NO: 1215554 - DNA, 15 bp, Homo sapiens
taactttctcttccc

SEQ ID NO: 1215555 - DNA, 15 bp, Homo sapiens
ttaactttctcttcc

SEQ ID NO: 1215556 - DNA, 15 bp, Homo sapiens
tttaactttctcttc

SEQ ID NO: 1215557 - DNA, 15 bp, Homo sapiens
ctttaactttctctt

SEQ ID NO: 1215558 - DNA, 15 bp, Homo sapiens
cctttaactttctct

SEQ ID NO: 1215559 - DNA, 15 bp, Homo sapiens
gcctttaactttctc

SEQ ID NO: 1215560 - DNA, 15 bp, Homo sapiens
tgcctttaactttct

SEQ ID NO: 1215561 - DNA, 15 bp, Homo sapiens
ttgcctttaactttc

SEQ ID NO: 1215562 - DNA, 15 bp, Homo sapiens
tttgcctttaacttt

SEQ ID NO: 1215563 - DNA, 15 bp, Homo sapiens
ctttgcctttaactt

SEQ ID NO: 1215564 - DNA, 15 bp, Homo sapiens
tctttgcctttaact

SEQ ID NO: 1215565 - DNA, 15 bp, Homo sapiens
ctctttgcctttaac

SEQ ID NO: 1215566 - DNA, 15 bp, Homo sapiens
actctttgcctttaa

SEQ ID NO: 1215567 - DNA, 15 bp, Homo sapiens
aactctttgccttta

SEQ ID NO: 1215568 - DNA, 15 bp, Homo sapiens
aaactctttgccttt

SEQ ID NO: 1215569 - DNA, 15 bp, Homo sapiens
caaactctttgcctt

SEQ ID NO: 1215570 - DNA, 15 bp, Homo sapiens
gcaaactctttgcct

SEQ ID NO: 1215571 - DNA, 15 bp, Homo sapiens
ggcaaactctttgcc

SEQ ID NO: 1215572 - DNA, 15 bp, Homo sapiens
gggcaaactctttgc

SEQ ID NO: 1215573 - DNA, 15 bp, Homo sapiens
tgggcaaactctttg

SEQ ID NO: 1215574 - DNA, 15 bp, Homo sapiens
gtgggcaaactcttt

SEQ ID NO: 1215575 - DNA, 15 bp, Homo sapiens
agtgggcaaactctt

SEQ ID NO: 1215576 - DNA, 15 bp, Homo sapiens
gagtgggcaaactct

SEQ ID NO: 1215577 - DNA, 15 bp, Homo sapiens
ggagtgggcaaactc

SEQ ID NO: 1215578 - DNA, 15 bp, Homo sapiens
tggagtgggcaaact

SEQ ID NO: 1215579 - DNA, 15 bp, Homo sapiens
ctggagtgggcaaac

SEQ ID NO: 1215580 - DNA, 15 bp, Homo sapiens
actggagtgggcaaa

SEQ ID NO: 1215581 - DNA, 15 bp, Homo sapiens
gactggagtgggcaa

SEQ ID NO: 1215582 - DNA, 15 bp, Homo sapiens
tgactggagtgggca

SEQ ID NO: 1215583 - DNA, 15 bp, Homo sapiens
ctgactggagtgggc

SEQ ID NO: 1215584 - DNA, 15 bp, Homo sapiens
cctgactggagtggg

SEQ ID NO: 1215585 - DNA, 15 bp, Homo sapiens
acctgactggagtgg

SEQ ID NO: 1215586 - DNA, 15 bp, Homo sapiens
gacctgactggagtg

SEQ ID NO: 1215587 - DNA, 15 bp, Homo sapiens
agacctgactggagt

SEQ ID NO: 1215588 - DNA, 15 bp, Homo sapiens
aagacctgactggag

SEQ ID NO: 1215589 - DNA, 15 bp, Homo sapiens
gaagacctgactgga

SEQ ID NO: 1215590 - DNA, 15 bp, Homo sapiens
agaagacctgactgg

SEQ ID NO: 1215591 - DNA, 15 bp, Homo sapiens
gagaagacctgactg

SEQ ID NO: 1215592 - DNA, 15 bp, Homo sapiens
tgagaagacctgact

SEQ ID NO: 1215593 - DNA, 15 bp, Homo sapiens
ctgagaagacctgac

SEQ ID NO: 1215594 - DNA, 15 bp, Homo sapiens
tctgagaagacctga

SEQ ID NO: 1215595 - DNA, 15 bp, Homo sapiens
ctctgagaagacctg

SEQ ID NO: 1215596 - DNA, 15 bp, Homo sapiens
gctctgagaagacct

SEQ ID NO: 1215597 - DNA, 15 bp, Homo sapiens
tgctctgagaagacc

SEQ ID NO: 1215598 - DNA, 15 bp, Homo sapiens
gtgctctgagaagac

SEQ ID NO: 1215599 - DNA, 15 bp, Homo sapiens
tgtgctctgagaaga

SEQ ID NO: 1215600 - DNA, 15 bp, Homo sapiens
ctgtgctctgagaag

SEQ ID NO: 1215601 - DNA, 15 bp, Homo sapiens
tctgtgctctgagaa

SEQ ID NO: 1215602 - DNA, 15 bp, Homo sapiens
ctctgtgctctgaga

SEQ ID NO: 1215603 - DNA, 15 bp, Homo sapiens
cctctgtgctctgag

SEQ ID NO: 1215604 - DNA, 15 bp, Homo sapiens
acctctgtgctctga

SEQ ID NO: 1215605 - DNA, 15 bp, Homo sapiens
aacctctgtgctctg

SEQ ID NO: 1215606 - DNA, 15 bp, Homo sapiens
aaacctctgtgctct

SEQ ID NO: 1215607 - DNA, 15 bp, Homo sapiens
aaaacctctgtgctc

SEQ ID NO: 1215608 - DNA, 15 bp, Homo sapiens
aaaaacctctgtgct

SEQ ID NO: 1215609 - DNA, 15 bp, Homo sapiens
aaaaaacctctgtgc

SEQ ID NO: 1215610 - DNA, 15 bp, Homo sapiens
aaaaaaacctctgtg

SEQ ID NO: 1215611 - DNA, 15 bp, Homo sapiens
taaaaaaacctctgt

SEQ ID NO: 1215612 - DNA, 15 bp, Homo sapiens
ataaaaaaacctctg

SEQ ID NO: 1215613 - DNA, 15 bp, Homo sapiens
tataaaaaaacctct

SEQ ID NO: 1215614 - DNA, 15 bp, Homo sapiens
ctataaaaaaacctc

SEQ ID NO: 1215615 - DNA, 15 bp, Homo sapiens
tctataaaaaaacct

SEQ ID NO: 1215616 - DNA, 15 bp, Homo sapiens
ttctataaaaaaacc

SEQ ID NO: 1215617 - DNA, 15 bp, Homo sapiens
gttctataaaaaaac

SEQ ID NO: 1215618 - DNA, 15 bp, Homo sapiens
agttctataaaaaaa

SEQ ID NO: 1215619 - DNA, 15 bp, Homo sapiens
gagttctataaaaaa

SEQ ID NO: 1215620 - DNA, 15 bp, Homo sapiens
agagttctataaaaa

SEQ ID NO: 1215621 - DNA, 15 bp, Homo sapiens
gagagttctataaaa

SEQ ID NO: 1215622 - DNA, 15 bp, Homo sapiens
agagagttctataaa

SEQ ID NO: 1215623 - DNA, 15 bp, Homo sapiens
gagagagttctataa

SEQ ID NO: 1215624 - DNA, 15 bp, Homo sapiens
ggagagagttctata

SEQ ID NO: 1215625 - DNA, 15 bp, Homo sapiens
cggagagagttctat

SEQ ID NO: 1215626 - DNA, 15 bp, Homo sapiens
ccggagagagttcta

SEQ ID NO: 1215627 - DNA, 15 bp, Homo sapiens
accggagagagttct

SEQ ID NO: 1215628 - DNA, 15 bp, Homo sapiens
gaccggagagagttc

SEQ ID NO: 1215629 - DNA, 15 bp, Homo sapiens
ggaccggagagagtt

SEQ ID NO: 1215630 - DNA, 15 bp, Homo sapiens
tggaccggagagagt

SEQ ID NO: 1215631 - DNA, 15 bp, Homo sapiens
ctggaccggagagag

SEQ ID NO: 1215632 - DNA, 15 bp, Homo sapiens
tctggaccggagaga

SEQ ID NO: 1215633 - DNA, 15 bp, Homo sapiens
ctctggaccggagag

SEQ ID NO: 1215634 - DNA, 15 bp, Homo sapiens
actctggaccggaga

SEQ ID NO: 1215635 - DNA, 15 bp, Homo sapiens
gactctggaccggag

SEQ ID NO: 1215636 - DNA, 15 bp, Homo sapiens
agactctggaccgga

SEQ ID NO: 1215637 - DNA, 15 bp, Homo sapiens
cagactctggaccgg

SEQ ID NO: 1215638 - DNA, 15 bp, Homo sapiens
ccagactctggaccg

SEQ ID NO: 1215639 - DNA, 15 bp, Homo sapiens
cccagactctggacc

SEQ ID NO: 1215640 - DNA, 15 bp, Homo sapiens
acccagactctggac

SEQ ID NO: 1215641 - DNA, 15 bp, Homo sapiens
gacccagactctgga

SEQ ID NO: 1215642 - DNA, 15 bp, Homo sapiens
agacccagactctgg

SEQ ID NO: 1215643 - DNA, 15 bp, Homo sapiens
gagacccagactctg

SEQ ID NO: 1215644 - DNA, 15 bp, Homo sapiens
agagacccagactct

SEQ ID NO: 1215645 - DNA, 15 bp, Homo sapiens
aagagacccagactc

SEQ ID NO: 1215646 - DNA, 15 bp, Homo sapiens
aaagagacccagact

SEQ ID NO: 1215647 - DNA, 15 bp, Homo sapiens
taaagagacccagac

SEQ ID NO: 1215648 - DNA, 15 bp, Homo sapiens
gtaaagagacccaga

SEQ ID NO: 1215649 - DNA, 15 bp, Homo sapiens
ggtaaagagacccag

SEQ ID NO: 1215650 - DNA, 15 bp, Homo sapiens
tggtaaagagaccca

SEQ ID NO: 1215651 - DNA, 15 bp, Homo sapiens
ctggtaaagagaccc

SEQ ID NO: 1215652 - DNA, 15 bp, Homo sapiens
tctggtaaagagacc

SEQ ID NO: 1215653 - DNA, 15 bp, Homo sapiens
ttctggtaaagagac

SEQ ID NO: 1215654 - DNA, 15 bp, Homo sapiens
cttctggtaaagaga

SEQ ID NO: 1215655 - DNA, 15 bp, Homo sapiens
gcttctggtaaagag

SEQ ID NO: 1215656 - DNA, 15 bp, Homo sapiens
agcttctggtaaaga

SEQ ID NO: 1215657 - DNA, 15 bp, Homo sapiens
cagcttctggtaaag

SEQ ID NO: 1215658 - DNA, 15 bp, Homo sapiens
gcagcttctggtaaa

SEQ ID NO: 1215659 - DNA, 15 bp, Homo sapiens
agcagcttctggtaa

SEQ ID NO: 1215660 - DNA, 15 bp, Homo sapiens
aagcagcttctggta

SEQ ID NO: 1215661 - DNA, 15 bp, Homo sapiens
caagcagcttctggt

SEQ ID NO: 1215662 - DNA, 15 bp, Homo sapiens
ccaagcagcttctgg

SEQ ID NO: 1215663 - DNA, 15 bp, Homo sapiens
gccaagcagcttctg

SEQ ID NO: 1215664 - DNA, 15 bp, Homo sapiens
agccaagcagcttct

SEQ ID NO: 1215665 - DNA, 15 bp, Homo sapiens
aagccaagcagcttc

SEQ ID NO: 1215666 - DNA, 15 bp, Homo sapiens
gaagccaagcagctt

SEQ ID NO: 1215667 - DNA, 15 bp, Homo sapiens
tgaagccaagcagct

SEQ ID NO: 1215668 - DNA, 15 bp, Homo sapiens
ctgaagccaagcagc

SEQ ID NO: 1215669 - DNA, 15 bp, Homo sapiens
cctgaagccaagcag

SEQ ID NO: 1215670 - DNA, 15 bp, Homo sapiens
gcctgaagccaagca

SEQ ID NO: 1215671 - DNA, 15 bp, Homo sapiens
agcctgaagccaagc

SEQ ID NO: 1215672 - DNA, 15 bp, Homo sapiens
gagcctgaagccaag

SEQ ID NO: 1215673 - DNA, 15 bp, Homo sapiens
ggagcctgaagccaa

SEQ ID NO: 1215674 - DNA, 15 bp, Homo sapiens
tggagcctgaagcca

SEQ ID NO: 1215675 - DNA, 15 bp, Homo sapiens
gtggagcctgaagcc

SEQ ID NO: 1215676 - DNA, 15 bp, Homo sapiens
ggtggagcctgaagc

SEQ ID NO: 1215677 - DNA, 15 bp, Homo sapiens
tggtggagcctgaag

SEQ ID NO: 1215678 - DNA, 15 bp, Homo sapiens
ctggtggagcctgaa

SEQ ID NO: 1215679 - DNA, 15 bp, Homo sapiens
gctggtggagcctga

SEQ ID NO: 1215680 - DNA, 15 bp, Homo sapiens
ggctggtggagcctg

SEQ ID NO: 1215681 - DNA, 15 bp, Homo sapiens
aggctggtggagcct

SEQ ID NO: 1215682 - DNA, 15 bp, Homo sapiens
caggctggtggagcc

SEQ ID NO: 1215683 - DNA, 15 bp, Homo sapiens
tcaggctggtggagc

SEQ ID NO: 1215684 - DNA, 15 bp, Homo sapiens
ctcaggctggtggag

SEQ ID NO: 1215685 - DNA, 15 bp, Homo sapiens
cctcaggctggtgga

SEQ ID NO: 1215686 - DNA, 15 bp, Homo sapiens
acctcaggctggtgg

SEQ ID NO: 1215687 - DNA, 15 bp, Homo sapiens
aacctcaggctggtg

SEQ ID NO: 1215688 - DNA, 15 bp, Homo sapiens
caacctcaggctggt

SEQ ID NO: 1215689 - DNA, 15 bp, Homo sapiens
tcaacctcaggctgg

SEQ ID NO: 1215690 - DNA, 15 bp, Homo sapiens
ctcaacctcaggctg

SEQ ID NO: 1215691 - DNA, 15 bp, Homo sapiens
cctcaacctcaggct

SEQ ID NO: 1215692 - DNA, 15 bp, Homo sapiens
acctcaacctcaggc

SEQ ID NO: 1215693 - DNA, 15 bp, Homo sapiens
aacctcaacctcagg

SEQ ID NO: 1215694 - DNA, 15 bp, Homo sapiens
gaacctcaacctcag

SEQ ID NO: 1215695 - DNA, 15 bp, Homo sapiens
agaacctcaacctca

SEQ ID NO: 1215696 - DNA, 15 bp, Homo sapiens
gagaacctcaacctc

SEQ ID NO: 1215697 - DNA, 15 bp, Homo sapiens
agagaacctcaacct

SEQ ID NO: 1215698 - DNA, 15 bp, Homo sapiens
cagagaacctcaacc

SEQ ID NO: 1215699 - DNA, 15 bp, Homo sapiens
ccagagaacctcaac

SEQ ID NO: 1215700 - DNA, 15 bp, Homo sapiens
cccagagaacctcaa

SEQ ID NO: 1215701 - DNA, 15 bp, Homo sapiens
tcccagagaacctca

SEQ ID NO: 1215702 - DNA, 15 bp, Homo sapiens
ttcccagagaacctc

SEQ ID NO: 1215703 - DNA, 15 bp, Homo sapiens
cttcccagagaacct

SEQ ID NO: 1215704 - DNA, 15 bp, Homo sapiens
ccttcccagagaacc

SEQ ID NO: 1215705 - DNA, 15 bp, Homo sapiens
accttcccagagaac

SEQ ID NO: 1215706 - DNA, 15 bp, Homo sapiens
caccttcccagagaa

SEQ ID NO: 1215707 - DNA, 15 bp, Homo sapiens
gcaccttcccagaga

SEQ ID NO: 1215708 - DNA, 15 bp, Homo sapiens
ggcaccttcccagag

SEQ ID NO: 1215709 - DNA, 15 bp, Homo sapiens
gggcaccttcccaga

SEQ ID NO: 1215710 - DNA, 15 bp, Homo sapiens
ggggcaccttcccag

SEQ ID NO: 1215711 - DNA, 15 bp, Homo sapiens
cggggcaccttccca

SEQ ID NO: 1215712 - DNA, 15 bp, Homo sapiens
ccggggcaccttccc

SEQ ID NO: 1215713 - DNA, 15 bp, Homo sapiens
cccggggcaccttcc

SEQ ID NO: 1215714 - DNA, 15 bp, Homo sapiens
tcccggggcaccttc

SEQ ID NO: 1215715 - DNA, 15 bp, Homo sapiens
ctcccggggcacctt

SEQ ID NO: 1215716 - DNA, 15 bp, Homo sapiens
tctcccggggcacct

SEQ ID NO: 1215717 - DNA, 15 bp, Homo sapiens
ttctcccggggcacc

SEQ ID NO: 1215718 - DNA, 15 bp, Homo sapiens
cttctcccggggcac

SEQ ID NO: 1215719 - DNA, 15 bp, Homo sapiens
gcttctcccggggca

SEQ ID NO: 1215720 - DNA, 15 bp, Homo sapiens
ggcttctcccggggc

SEQ ID NO: 1215721 - DNA, 15 bp, Homo sapiens
gggcttctcccgggg

SEQ ID NO: 1215722 - DNA, 15 bp, Homo sapiens
ggggcttctcccggg

SEQ ID NO: 1215723 - DNA, 15 bp, Homo sapiens
tggggcttctcccgg

SEQ ID NO: 1215724 - DNA, 15 bp, Homo sapiens
ttggggcttctcccg

SEQ ID NO: 1215725 - DNA, 15 bp, Homo sapiens
tttggggcttctccc

SEQ ID NO: 1215726 - DNA, 15 bp, Homo sapiens
gtttggggcttctcc

SEQ ID NO: 1215727 - DNA, 15 bp, Homo sapiens
ggtttggggcttctc

SEQ ID NO: 1215728 - DNA, 15 bp, Homo sapiens
aggtttggggcttct

SEQ ID NO: 1215729 - DNA, 15 bp, Homo sapiens
gaggtttggggcttc

SEQ ID NO: 1215730 - DNA, 15 bp, Homo sapiens
agaggtttggggctt

SEQ ID NO: 1215731 - DNA, 15 bp, Homo sapiens
gagaggtttggggct

SEQ ID NO: 1215732 - DNA, 15 bp, Homo sapiens
agagaggtttggggc

SEQ ID NO: 1215733 - DNA, 15 bp, Homo sapiens
gagagaggtttgggg

SEQ ID NO: 1215734 - DNA, 15 bp, Homo sapiens
agagagaggtttggg

SEQ ID NO: 1215735 - DNA, 15 bp, Homo sapiens
cagagagaggtttgg

SEQ ID NO: 1215736 - DNA, 15 bp, Homo sapiens
tcagagagaggtttg

SEQ ID NO: 1215737 - DNA, 15 bp, Homo sapiens
ttcagagagaggttt

SEQ ID NO: 1215738 - DNA, 15 bp, Homo sapiens
cttcagagagaggtt

SEQ ID NO: 1215739 - DNA, 15 bp, Homo sapiens
ccttcagagagaggt

SEQ ID NO: 1215740 - DNA, 15 bp, Homo sapiens
cccttcagagagagg

SEQ ID NO: 1215741 - DNA, 15 bp, Homo sapiens
tcccttcagagagag

SEQ ID NO: 1215742 - DNA, 15 bp, Homo sapiens
ttcccttcagagaga

SEQ ID NO: 1215743 - DNA, 15 bp, Homo sapiens
cttcccttcagagag

SEQ ID NO: 1215744 - DNA, 15 bp, Homo sapiens
tcttcccttcagaga

SEQ ID NO: 1215745 - DNA, 15 bp, Homo sapiens
ctcttcccttcagag

SEQ ID NO: 1215746 - DNA, 15 bp, Homo sapiens
cctcttcccttcaga

SEQ ID NO: 1215747 - DNA, 15 bp, Homo sapiens
tcctcttcccttcag

SEQ ID NO: 1215748 - DNA, 15 bp, Homo sapiens
ctcctcttcccttca

SEQ ID NO: 1215749 - DNA, 15 bp, Homo sapiens
tctcctcttcccttc

SEQ ID NO: 1215750 - DNA, 15 bp, Homo sapiens
atctcctcttccctt

SEQ ID NO: 1215751 - DNA, 15 bp, Homo sapiens
catctcctcttccct

SEQ ID NO: 1215752 - DNA, 15 bp, Homo sapiens
ccatctcctcttccc

SEQ ID NO: 1215753 - DNA, 15 bp, Homo sapiens
cccatctcctcttcc

SEQ ID NO: 1215754 - DNA, 15 bp, Homo sapiens
gcccatctcctcttc

SEQ ID NO: 1215755 - DNA, 15 bp, Homo sapiens
ggcccatctcctctt

SEQ ID NO: 1215756 - DNA, 15 bp, Homo sapiens
gggcccatctcctct

SEQ ID NO: 1215757 - DNA, 15 bp, Homo sapiens
agggcccatctcctc

SEQ ID NO: 1215758 - DNA, 15 bp, Homo sapiens
aagggcccatctcct

SEQ ID NO: 1215759 - DNA, 15 bp, Homo sapiens
caagggcccatctcc

SEQ ID NO: 1215760 - DNA, 15 bp, Homo sapiens
acaagggcccatctc

SEQ ID NO: 1215761 - DNA, 15 bp, Homo sapiens
gacaagggcccatct

SEQ ID NO: 1215762 - DNA, 15 bp, Homo sapiens
tgacaagggcccatc

SEQ ID NO: 1215763 - DNA, 15 bp, Homo sapiens
ctgacaagggcccat

SEQ ID NO: 1215764 - DNA, 15 bp, Homo sapiens
gctgacaagggccca

SEQ ID NO: 1215765 - DNA, 15 bp, Homo sapiens
tgctgacaagggccc

SEQ ID NO: 1215766 - DNA, 15 bp, Homo sapiens
gtgctgacaagggcc

SEQ ID NO: 1215767 - DNA, 15 bp, Homo sapiens
agtgctgacaagggc

SEQ ID NO: 1215768 - DNA, 15 bp, Homo sapiens
gagtgctgacaaggg

SEQ ID NO: 1215769 - DNA, 15 bp, Homo sapiens
ggagtgctgacaagg

SEQ ID NO: 1215770 - DNA, 15 bp, Homo sapiens
aggagtgctgacaag

SEQ ID NO: 1215771 - DNA, 15 bp, Homo sapiens
taggagtgctgacaa

SEQ ID NO: 1215772 - DNA, 15 bp, Homo sapiens
ataggagtgctgaca

SEQ ID NO: 1215773 - DNA, 15 bp, Homo sapiens
aataggagtgctgac

SEQ ID NO: 1215774 - DNA, 15 bp, Homo sapiens
aaataggagtgctga

SEQ ID NO: 1215775 - DNA, 15 bp, Homo sapiens
aaaataggagtgctg

SEQ ID NO: 1215776 - DNA, 15 bp, Homo sapiens
gaaaataggagtgct

SEQ ID NO: 1215777 - DNA, 15 bp, Homo sapiens
ggaaaataggagtgc

SEQ ID NO: 1215778 - DNA, 15 bp, Homo sapiens
gggaaaataggagtg

SEQ ID NO: 1215779 - DNA, 15 bp, Homo sapiens
tgggaaaataggagt

SEQ ID NO: 1215780 - DNA, 15 bp, Homo sapiens
ttgggaaaataggag

SEQ ID NO: 1215781 - DNA, 15 bp, Homo sapiens
tttgggaaaatagga

SEQ ID NO: 1215782 - DNA, 15 bp, Homo sapiens
ctttgggaaaatagg

SEQ ID NO: 1215783 - DNA, 15 bp, Homo sapiens
gctttgggaaaatag

SEQ ID NO: 1215784 - DNA, 15 bp, Homo sapiens
ggctttgggaaaata

SEQ ID NO: 1215785 - DNA, 15 bp, Homo sapiens
gggctttgggaaaat

SEQ ID NO: 1215786 - DNA, 15 bp, Homo sapiens
agggctttgggaaaa

SEQ ID NO: 1215787 - DNA, 15 bp, Homo sapiens
cagggctttgggaaa

SEQ ID NO: 1215788 - DNA, 15 bp, Homo sapiens
tcagggctttgggaa

SEQ ID NO: 1215789 - DNA, 15 bp, Homo sapiens
ctcagggctttggga

SEQ ID NO: 1215790 - DNA, 15 bp, Homo sapiens
cctcagggctttggg

SEQ ID NO: 1215791 - DNA, 15 bp, Homo sapiens
acctcagggctttgg

SEQ ID NO: 1215792 - DNA, 15 bp, Homo sapiens
aacctcagggctttg

SEQ ID NO: 1215793 - DNA, 15 bp, Homo sapiens
gaacctcagggcttt

SEQ ID NO: 1215794 - DNA, 15 bp, Homo sapiens
ggaacctcagggctt

SEQ ID NO: 1215795 - DNA, 15 bp, Homo sapiens
tggaacctcagggct

SEQ ID NO: 1215796 - DNA, 15 bp, Homo sapiens
gtggaacctcagggc

SEQ ID NO: 1215797 - DNA, 15 bp, Homo sapiens
ggtggaacctcaggg

SEQ ID NO: 1215798 - DNA, 15 bp, Homo sapiens
aggtggaacctcagg

SEQ ID NO: 1215799 - DNA, 15 bp, Homo sapiens
caggtggaacctcag

SEQ ID NO: 1215800 - DNA, 15 bp, Homo sapiens
acaggtggaacctca

SEQ ID NO: 1215801 - DNA, 15 bp, Homo sapiens
cacaggtggaacctc

SEQ ID NO: 1215802 - DNA, 15 bp, Homo sapiens
gcacaggtggaacct

SEQ ID NO: 1215803 - DNA, 15 bp, Homo sapiens
tgcacaggtggaacc

SEQ ID NO: 1215804 - DNA, 15 bp, Homo sapiens
ttgcacaggtggaac

SEQ ID NO: 1215805 - DNA, 15 bp, Homo sapiens
attgcacaggtggaa

SEQ ID NO: 1215806 - DNA, 15 bp, Homo sapiens
gattgcacaggtgga

SEQ ID NO: 1215807 - DNA, 15 bp, Homo sapiens
ggattgcacaggtgg

SEQ ID NO: 1215808 - DNA, 15 bp, Homo sapiens
gggattgcacaggtg

SEQ ID NO: 1215809 - DNA, 15 bp, Homo sapiens
tgggattgcacaggt

SEQ ID NO: 1215810 - DNA, 15 bp, Homo sapiens
atgggattgcacagg

SEQ ID NO: 1215811 - DNA, 15 bp, Homo sapiens
gatgggattgcacag

SEQ ID NO: 1215812 - DNA, 15 bp, Homo sapiens
agatgggattgcaca

SEQ ID NO: 1215813 - DNA, 15 bp, Homo sapiens
cagatgggattgcac

SEQ ID NO: 1215814 - DNA, 15 bp, Homo sapiens
acagatgggattgca

SEQ ID NO: 1215815 - DNA, 15 bp, Homo sapiens
aacagatgggattgc

SEQ ID NO: 1215816 - DNA, 15 bp, Homo sapiens
caacagatgggattg

SEQ ID NO: 1215817 - DNA, 15 bp, Homo sapiens
gcaacagatgggatt

SEQ ID NO: 1215818 - DNA, 15 bp, Homo sapiens
ggcaacagatgggat

SEQ ID NO: 1215819 - DNA, 15 bp, Homo sapiens
tggcaacagatggga

SEQ ID NO: 1215820 - DNA, 15 bp, Homo sapiens
ttggcaacagatggg

SEQ ID NO: 1215821 - DNA, 15 bp, Homo sapiens
attggcaacagatgg

SEQ ID NO: 1215822 - DNA, 15 bp, Homo sapiens
aattggcaacagatg

SEQ ID NO: 1215823 - DNA, 15 bp, Homo sapiens
aaattggcaacagat

SEQ ID NO: 1215824 - DNA, 15 bp, Homo sapiens
caaattggcaacaga

SEQ ID NO: 1215825 - DNA, 15 bp, Homo sapiens
tcaaattggcaacag

SEQ ID NO: 1215826 - DNA, 15 bp, Homo sapiens
ctcaaattggcaaca

SEQ ID NO: 1215827 - DNA, 15 bp, Homo sapiens
tctcaaattggcaac

SEQ ID NO: 1215828 - DNA, 15 bp, Homo sapiens
atctcaaattggcaa

SEQ ID NO: 1215829 - DNA, 15 bp, Homo sapiens
aatctcaaattggca

SEQ ID NO: 1215830 - DNA, 15 bp, Homo sapiens
aaatctcaaattggc

SEQ ID NO: 1215831 - DNA, 15 bp, Homo sapiens
taaatctcaaattgg

SEQ ID NO: 1215832 - DNA, 15 bp, Homo sapiens
ttaaatctcaaattg

SEQ ID NO: 1215833 - DNA, 15 bp, Homo sapiens
gttaaatctcaaatt

SEQ ID NO: 1215834 - DNA, 15 bp, Homo sapiens
ggttaaatctcaaat

SEQ ID NO: 1215835 - DNA, 15 bp, Homo sapiens
tggttaaatctcaaa

SEQ ID NO: 1215836 - DNA, 15 bp, Homo sapiens
gtggttaaatctcaa

SEQ ID NO: 1215837 - DNA, 15 bp, Homo sapiens
cgtggttaaatctca

SEQ ID NO: 1215838 - DNA, 15 bp, Homo sapiens
acgtggttaaatctc

SEQ ID NO: 1215839 - DNA, 15 bp, Homo sapiens
gacgtggttaaatct

SEQ ID NO: 1215840 - DNA, 15 bp, Homo sapiens
cgacgtggttaaatc

SEQ ID NO: 1215841 - DNA, 15 bp, Homo sapiens
ccgacgtggttaaat

SEQ ID NO: 1215842 - DNA, 15 bp, Homo sapiens
gccgacgtggttaaa

SEQ ID NO: 1215843 - DNA, 15 bp, Homo sapiens
agccgacgtggttaa

SEQ ID NO: 1215844 - DNA, 15 bp, Homo sapiens
gagccgacgtggtta

SEQ ID NO: 1215845 - DNA, 15 bp, Homo sapiens
agagccgacgtggtt

SEQ ID NO: 1215846 - DNA, 15 bp, Homo sapiens
tagagccgacgtggt

SEQ ID NO: 1215847 - DNA, 15 bp, Homo sapiens
ttagagccgacgtgg

SEQ ID NO: 1215848 - DNA, 15 bp, Homo sapiens
cttagagccgacgtg

SEQ ID NO: 1215849 - DNA, 15 bp, Homo sapiens
tcttagagccgacgt

SEQ ID NO: 1215850 - DNA, 15 bp, Homo sapiens
ttcttagagccgacg

SEQ ID NO: 1215851 - DNA, 15 bp, Homo sapiens
cttcttagagccgac

SEQ ID NO: 1215852 - DNA, 15 bp, Homo sapiens
acttcttagagccga

SEQ ID NO: 1215853 - DNA, 15 bp, Homo sapiens
aacttcttagagccg

SEQ ID NO: 1215854 - DNA, 15 bp, Homo sapiens
caacttcttagagcc

SEQ ID NO: 1215855 - DNA, 15 bp, Homo sapiens
gcaacttcttagagc

SEQ ID NO: 1215856 - DNA, 15 bp, Homo sapiens
agcaacttcttagag

SEQ ID NO: 1215857 - DNA, 15 bp, Homo sapiens
gagcaacttcttaga

SEQ ID NO: 1215858 - DNA, 15 bp, Homo sapiens
agagcaacttcttag

SEQ ID NO: 1215859 - DNA, 15 bp, Homo sapiens
gagagcaacttctta

SEQ ID NO: 1215860 - DNA, 15 bp, Homo sapiens
tgagagcaacttctt

SEQ ID NO: 1215861 - DNA, 15 bp, Homo sapiens
gtgagagcaacttct

SEQ ID NO: 1215862 - DNA, 15 bp, Homo sapiens
ggtgagagcaacttc

SEQ ID NO: 1215863 - DNA, 15 bp, Homo sapiens
aggtgagagcaactt

SEQ ID NO: 1215864 - DNA, 15 bp, Homo sapiens
caggtgagagcaact

SEQ ID NO: 1215865 - DNA, 15 bp, Homo sapiens
acaggtgagagcaac

SEQ ID NO: 1215866 - DNA, 15 bp, Homo sapiens
aacaggtgagagcaa

SEQ ID NO: 1215867 - DNA, 15 bp, Homo sapiens
caacaggtgagagca

SEQ ID NO: 1215868 - DNA, 15 bp, Homo sapiens
ccaacaggtgagagc

SEQ ID NO: 1215869 - DNA, 15 bp, Homo sapiens
accaacaggtgagag

SEQ ID NO: 1215870 - DNA, 15 bp, Homo sapiens
aaccaacaggtgaga

SEQ ID NO: 1215871 - DNA, 15 bp, Homo sapiens
aaaccaacaggtgag

SEQ ID NO: 1215872 - DNA, 15 bp, Homo sapiens
gaaaccaacaggtga

SEQ ID NO: 1215873 - DNA, 15 bp, Homo sapiens
ggaaaccaacaggtg

SEQ ID NO: 1215874 - DNA, 15 bp, Homo sapiens
aggaaaccaacaggt

SEQ ID NO: 1215875 - DNA, 15 bp, Homo sapiens
aaggaaaccaacagg

SEQ ID NO: 1215876 - DNA, 15 bp, Homo sapiens
gaaggaaaccaacag

SEQ ID NO: 1215877 - DNA, 15 bp, Homo sapiens
agaaggaaaccaaca

SEQ ID NO: 1215878 - DNA, 15 bp, Homo sapiens
aagaaggaaaccaac

SEQ ID NO: 1215879 - DNA, 15 bp, Homo sapiens
caagaaggaaaccaa

SEQ ID NO: 1215880 - DNA, 15 bp, Homo sapiens
acaagaaggaaacca

SEQ ID NO: 1215881 - DNA, 15 bp, Homo sapiens
gacaagaaggaaacc

SEQ ID NO: 1215882 - DNA, 15 bp, Homo sapiens
agacaagaaggaaac

SEQ ID NO: 1215883 - DNA, 15 bp, Homo sapiens
aagacaagaaggaaa

SEQ ID NO: 1215884 - DNA, 15 bp, Homo sapiens
gaagacaagaaggaa

SEQ ID NO: 1215885 - DNA, 15 bp, Homo sapiens
agaagacaagaagga

SEQ ID NO: 1215886 - DNA, 15 bp, Homo sapiens
gagaagacaagaagg

SEQ ID NO: 1215887 - DNA, 15 bp, Homo sapiens
ggagaagacaagaag

SEQ ID NO: 1215888 - DNA, 15 bp, Homo sapiens
aggagaagacaagaa

SEQ ID NO: 1215889 - DNA, 15 bp, Homo sapiens
taggagaagacaaga

SEQ ID NO: 1215890 - DNA, 15 bp, Homo sapiens
ataggagaagacaag

SEQ ID NO: 1215891 - DNA, 15 bp, Homo sapiens
cataggagaagacaa

SEQ ID NO: 1215892 - DNA, 15 bp, Homo sapiens
acataggagaagaca

SEQ ID NO: 1215893 - DNA, 15 bp, Homo sapiens
aacataggagaagac

SEQ ID NO: 1215894 - DNA, 15 bp, Homo sapiens
gaacataggagaaga

SEQ ID NO: 1215895 - DNA, 15 bp, Homo sapiens
agaacataggagaag

SEQ ID NO: 1215896 - DNA, 15 bp, Homo sapiens
gagaacataggagaa

SEQ ID NO: 1215897 - DNA, 15 bp, Homo sapiens
tgagaacataggaga

SEQ ID NO: 1215898 - DNA, 15 bp, Homo sapiens
ctgagaacataggag

SEQ ID NO: 1215899 - DNA, 15 bp, Homo sapiens
gctgagaacatagga

SEQ ID NO: 1215900 - DNA, 15 bp, Homo sapiens
tgctgagaacatagg

SEQ ID NO: 1215901 - DNA, 15 bp, Homo sapiens
ctgctgagaacatag

SEQ ID NO: 1215902 - DNA, 15 bp, Homo sapiens
gctgctgagaacata

SEQ ID NO: 1215903 - DNA, 15 bp, Homo sapiens
agctgctgagaacat

SEQ ID NO: 1215904 - DNA, 15 bp, Homo sapiens
aagctgctgagaaca

SEQ ID NO: 1215905 - DNA, 15 bp, Homo sapiens
gaagctgctgagaac

SEQ ID NO: 1215906 - DNA, 15 bp, Homo sapiens
agaagctgctgagaa

SEQ ID NO: 1215907 - DNA, 15 bp, Homo sapiens
tagaagctgctgaga

SEQ ID NO: 1215908 - DNA, 15 bp, Homo sapiens
ttagaagctgctgag

SEQ ID NO: 1215909 - DNA, 15 bp, Homo sapiens
tttagaagctgctga

SEQ ID NO: 1215910 - DNA, 15 bp, Homo sapiens
ctttagaagctgctg

SEQ ID NO: 1215911 - DNA, 15 bp, Homo sapiens
cctttagaagctgct

SEQ ID NO: 1215912 - DNA, 15 bp, Homo sapiens
tcctttagaagctgc

SEQ ID NO: 1215913 - DNA, 15 bp, Homo sapiens
ctcctttagaagctg

SEQ ID NO: 1215914 - DNA, 15 bp, Homo sapiens
gctcctttagaagct

SEQ ID NO: 1215915 - DNA, 15 bp, Homo sapiens
ggctcctttagaagc

SEQ ID NO: 1215916 - DNA, 15 bp, Homo sapiens
gggctcctttagaag

SEQ ID NO: 1215917 - DNA, 15 bp, Homo sapiens
ggggctcctttagaa

SEQ ID NO: 1215918 - DNA, 15 bp, Homo sapiens
aggggctcctttaga

SEQ ID NO: 1215919 - DNA, 15 bp, Homo sapiens
gaggggctcctttag

SEQ ID NO: 1215920 - DNA, 15 bp, Homo sapiens
tgaggggctccttta

SEQ ID NO: 1215921 - DNA, 15 bp, Homo sapiens
atgaggggctccttt

SEQ ID NO: 1215922 - DNA, 15 bp, Homo sapiens
gatgaggggctcctt

SEQ ID NO: 1215923 - DNA, 15 bp, Homo sapiens
agatgaggggctcct

SEQ ID NO: 1215924 - DNA, 15 bp, Homo sapiens
gagatgaggggctcc

SEQ ID NO: 1215925 - DNA, 15 bp, Homo sapiens
agagatgaggggctc

SEQ ID NO: 1215926 - DNA, 15 bp, Homo sapiens
gagagatgaggggct

SEQ ID NO: 1215927 - DNA, 15 bp, Homo sapiens
ggagagatgaggggc

SEQ ID NO: 1215928 - DNA, 15 bp, Homo sapiens
aggagagatgagggg

SEQ ID NO: 1215929 - DNA, 15 bp, Homo sapiens
caggagagatgaggg

SEQ ID NO: 1215930 - DNA, 15 bp, Homo sapiens
acaggagagatgagg

SEQ ID NO: 1215931 - DNA, 15 bp, Homo sapiens
gacaggagagatgag

SEQ ID NO: 1215932 - DNA, 15 bp, Homo sapiens
agacaggagagatga

SEQ ID NO: 1215933 - DNA, 15 bp, Homo sapiens
gagacaggagagatg

SEQ ID NO: 1215934 - DNA, 15 bp, Homo sapiens
ggagacaggagagat

SEQ ID NO: 1215935 - DNA, 15 bp, Homo sapiens
gggagacaggagaga

SEQ ID NO: 1215936 - DNA, 15 bp, Homo sapiens
tgggagacaggagag

SEQ ID NO: 1215937 - DNA, 15 bp, Homo sapiens
gtgggagacaggaga

SEQ ID NO: 1215938 - DNA, 15 bp, Homo sapiens
tgtgggagacaggag

SEQ ID NO: 1215939 - DNA, 15 bp, Homo sapiens
ctgtgggagacagga

SEQ ID NO: 1215940 - DNA, 15 bp, Homo sapiens
cctgtgggagacagg

SEQ ID NO: 1215941 - DNA, 15 bp, Homo sapiens
ccctgtgggagacag

SEQ ID NO: 1215942 - DNA, 15 bp, Homo sapiens
gccctgtgggagaca

SEQ ID NO: 1215943 - DNA, 15 bp, Homo sapiens
ggccctgtgggagac

SEQ ID NO: 1215944 - DNA, 15 bp, Homo sapiens
aggccctgtgggaga

SEQ ID NO: 1215945 - DNA, 15 bp, Homo sapiens
gaggccctgtgggag

SEQ ID NO: 1215946 - DNA, 15 bp, Homo sapiens
ggaggccctgtggga

SEQ ID NO: 1215947 - DNA, 15 bp, Homo sapiens
tggaggccctgtggg

SEQ ID NO: 1215948 - DNA, 15 bp, Homo sapiens
ctggaggccctgtgg

SEQ ID NO: 1215949 - DNA, 15 bp, Homo sapiens
cctggaggccctgtg

SEQ ID NO: 1215950 - DNA, 15 bp, Homo sapiens
tcctggaggccctgt

SEQ ID NO: 1215951 - DNA, 15 bp, Homo sapiens
atcctggaggccctg

SEQ ID NO: 1215952 - DNA, 15 bp, Homo sapiens
tatcctggaggccct

SEQ ID NO: 1215953 - DNA, 15 bp, Homo sapiens
ctatcctggaggccc

SEQ ID NO: 1215954 - DNA, 15 bp, Homo sapiens
tctatcctggaggcc

SEQ ID NO: 1215955 - DNA, 15 bp, Homo sapiens
atctatcctggaggc

SEQ ID NO: 1215956 - DNA, 15 bp, Homo sapiens
aatctatcctggagg

SEQ ID NO: 1215957 - DNA, 15 bp, Homo sapiens
caatctatcctggag

SEQ ID NO: 1215958 - DNA, 15 bp, Homo sapiens
acaatctatcctgga

SEQ ID NO: 1215959 - DNA, 15 bp, Homo sapiens
aacaatctatcctgg

SEQ ID NO: 1215960 - DNA, 15 bp, Homo sapiens
gaacaatctatcctg

SEQ ID NO: 1215961 - DNA, 15 bp, Homo sapiens
agaacaatctatcct

SEQ ID NO: 1215962 - DNA, 15 bp, Homo sapiens
gagaacaatctatcc

SEQ ID NO: 1215963 - DNA, 15 bp, Homo sapiens
ggagaacaatctatc

SEQ ID NO: 1215964 - DNA, 15 bp, Homo sapiens
aggagaacaatctat

SEQ ID NO: 1215965 - DNA, 15 bp, Homo sapiens
gaggagaacaatcta

SEQ ID NO: 1215966 - DNA, 15 bp, Homo sapiens
agaggagaacaatct

SEQ ID NO: 1215967 - DNA, 15 bp, Homo sapiens
cagaggagaacaatc

SEQ ID NO: 1215968 - DNA, 15 bp, Homo sapiens
tcagaggagaacaat

SEQ ID NO: 1215969 - DNA, 15 bp, Homo sapiens
ttcagaggagaacaa

SEQ ID NO: 1215970 - DNA, 15 bp, Homo sapiens
tttcagaggagaaca

SEQ ID NO: 1215971 - DNA, 15 bp, Homo sapiens
ctttcagaggagaac

SEQ ID NO: 1215972 - DNA, 15 bp, Homo sapiens
actttcagaggagaa

SEQ ID NO: 1215973 - DNA, 15 bp, Homo sapiens
cactttcagaggaga

SEQ ID NO: 1215974 - DNA, 15 bp, Homo sapiens
tcactttcagaggag

SEQ ID NO: 1215975 - DNA, 15 bp, Homo sapiens
gtcactttcagagga

SEQ ID NO: 1215976 - DNA, 15 bp, Homo sapiens
tgtcactttcagagg

SEQ ID NO: 1215977 - DNA, 15 bp, Homo sapiens
ttgtcactttcagag

SEQ ID NO: 1215978 - DNA, 15 bp, Homo sapiens
gttgtcactttcaga

SEQ ID NO: 1215979 - DNA, 15 bp, Homo sapiens
tgttgtcactttcag

SEQ ID NO: 1215980 - DNA, 15 bp, Homo sapiens
ctgttgtcactttca

SEQ ID NO: 1215981 - DNA, 15 bp, Homo sapiens
gctgttgtcactttc

SEQ ID NO: 1215982 - DNA, 15 bp, Homo sapiens
ggctgttgtcacttt

SEQ ID NO: 1215983 - DNA, 15 bp, Homo sapiens
aggctgttgtcactt

SEQ ID NO: 1215984 - DNA, 15 bp, Homo sapiens
caggctgttgtcact

SEQ ID NO: 1215985 - DNA, 15 bp, Homo sapiens
acaggctgttgtcac

SEQ ID NO: 1215986 - DNA, 15 bp, Homo sapiens
tacaggctgttgtca

SEQ ID NO: 1215987 - DNA, 15 bp, Homo sapiens
gtacaggctgttgtc

SEQ ID NO: 1215988 - DNA, 15 bp, Homo sapiens
agtacaggctgttgt

SEQ ID NO: 1215989 - DNA, 15 bp, Homo sapiens
aagtacaggctgttg

SEQ ID NO: 1215990 - DNA, 15 bp, Homo sapiens
gaagtacaggctgtt

SEQ ID NO: 1215991 - DNA, 15 bp, Homo sapiens
tgaagtacaggctgt

SEQ ID NO: 1215992 - DNA, 15 bp, Homo sapiens
gtgaagtacaggctg

SEQ ID NO: 1215993 - DNA, 15 bp, Homo sapiens
ggtgaagtacaggct

SEQ ID NO: 1215994 - DNA, 15 bp, Homo sapiens
aggtgaagtacaggc

SEQ ID NO: 1215995 - DNA, 15 bp, Homo sapiens
taggtgaagtacagg

SEQ ID NO: 1215996 - DNA, 15 bp, Homo sapiens
gtaggtgaagtacag

SEQ ID NO: 1215997 - DNA, 15 bp, Homo sapiens
tgtaggtgaagtaca

SEQ ID NO: 1215998 - DNA, 15 bp, Homo sapiens
ctgtaggtgaagtac

SEQ ID NO: 1215999 - DNA, 15 bp, Homo sapiens
actgtaggtgaagta

SEQ ID NO: 1216000 - DNA, 15 bp, Homo sapiens
cactgtaggtgaagt

SEQ ID NO: 1216001 - DNA, 15 bp, Homo sapiens
ccactgtaggtgaag

SEQ ID NO: 1216002 - DNA, 15 bp, Homo sapiens
gccactgtaggtgaa

SEQ ID NO: 1216003 - DNA, 15 bp, Homo sapiens
ggccactgtaggtga

SEQ ID NO: 1216004 - DNA, 15 bp, Homo sapiens
tggccactgtaggtg

SEQ ID NO: 1216005 - DNA, 15 bp, Homo sapiens
ctggccactgtaggt

SEQ ID NO: 1216006 - DNA, 15 bp, Homo sapiens
gctggccactgtagg

SEQ ID NO: 1216007 - DNA, 15 bp, Homo sapiens
ggctggccactgtag

SEQ ID NO: 1216008 - DNA, 15 bp, Homo sapiens
gggctggccactgta

SEQ ID NO: 1216009 - DNA, 15 bp, Homo sapiens
tgggctggccactgt

SEQ ID NO: 1216010 - DNA, 15 bp, Homo sapiens
ttgggctggccactg

SEQ ID NO: 1216011 - DNA, 15 bp, Homo sapiens
gttgggctggccact

SEQ ID NO: 1216012 - DNA, 15 bp, Homo sapiens
tgttgggctggccac

SEQ ID NO: 1216013 - DNA, 15 bp, Homo sapiens
gtgttgggctggcca

SEQ ID NO: 1216014 - DNA, 15 bp, Homo sapiens
ggtgttgggctggcc

SEQ ID NO: 1216015 - DNA, 15 bp, Homo sapiens
gggtgttgggctggc

SEQ ID NO: 1216016 - DNA, 15 bp, Homo sapiens
agggtgttgggctgg

SEQ ID NO: 1216017 - DNA, 15 bp, Homo sapiens
cagggtgttgggctg

SEQ ID NO: 1216018 - DNA, 15 bp, Homo sapiens
ccagggtgttgggct

SEQ ID NO: 1216019 - DNA, 15 bp, Homo sapiens
tccagggtgttgggc

SEQ ID NO: 1216020 - DNA, 15 bp, Homo sapiens
ctccagggtgttggg

SEQ ID NO: 1216021 - DNA, 15 bp, Homo sapiens
cctccagggtgttgg

SEQ ID NO: 1216022 - DNA, 15 bp, Homo sapiens
acctccagggtgttg

SEQ ID NO: 1216023 - DNA, 15 bp, Homo sapiens
gacctccagggtgtt

SEQ ID NO: 1216024 - DNA, 15 bp, Homo sapiens
tgacctccagggtgt

SEQ ID NO: 1216025 - DNA, 15 bp, Homo sapiens
ctgacctccagggtg

SEQ ID NO: 1216026 - DNA, 15 bp, Homo sapiens
tctgacctccagggt

SEQ ID NO: 1216027 - DNA, 15 bp, Homo sapiens
ctctgacctccaggg

SEQ ID NO: 1216028 - DNA, 15 bp, Homo sapiens
tctctgacctccagg

SEQ ID NO: 1216029 - DNA, 15 bp, Homo sapiens
gtctctgacctccag

SEQ ID NO: 1216030 - DNA, 15 bp, Homo sapiens
ggtctctgacctcca

SEQ ID NO: 1216031 - DNA, 15 bp, Homo sapiens
aggtctctgacctcc

SEQ ID NO: 1216032 - DNA, 15 bp, Homo sapiens
gaggtctctgacctc

SEQ ID NO: 1216033 - DNA, 15 bp, Homo sapiens
tgaggtctctgacct

SEQ ID NO: 1216034 - DNA, 15 bp, Homo sapiens
ttgaggtctctgacc

SEQ ID NO: 1216035 - DNA, 15 bp, Homo sapiens
gttgaggtctctgac

SEQ ID NO: 1216036 - DNA, 15 bp, Homo sapiens
agttgaggtctctga

SEQ ID NO: 1216037 - DNA, 15 bp, Homo sapiens
tagttgaggtctctg

SEQ ID NO: 1216038 - DNA, 15 bp, Homo sapiens
gtagttgaggtctct

SEQ ID NO: 1216039 - DNA, 15 bp, Homo sapiens
ggtagttgaggtctc

SEQ ID NO: 1216040 - DNA, 15 bp, Homo sapiens
tggtagttgaggtct

SEQ ID NO: 1216041 - DNA, 15 bp, Homo sapiens
ctggtagttgaggtc

SEQ ID NO: 1216042 - DNA, 15 bp, Homo sapiens
cctggtagttgaggt

SEQ ID NO: 1216043 - DNA, 15 bp, Homo sapiens
acctggtagttgagg

SEQ ID NO: 1216044 - DNA, 15 bp, Homo sapiens
tacctggtagttgag

SEQ ID NO: 1216045 - DNA, 15 bp, Homo sapiens
ctacctggtagttga

SEQ ID NO: 1216046 - DNA, 15 bp, Homo sapiens
tctacctggtagttg

SEQ ID NO: 1216047 - DNA, 15 bp, Homo sapiens
ctctacctggtagtt

SEQ ID NO: 1216048 - DNA, 15 bp, Homo sapiens
cctctacctggtagt

SEQ ID NO: 1216049 - DNA, 15 bp, Homo sapiens
gcctctacctggtag

SEQ ID NO: 1216050 - DNA, 15 bp, Homo sapiens
tgcctctacctggta

SEQ ID NO: 1216051 - DNA, 15 bp, Homo sapiens
gtgcctctacctggt

SEQ ID NO: 1216052 - DNA, 15 bp, Homo sapiens
cgtgcctctacctgg

SEQ ID NO: 1216053 - DNA, 15 bp, Homo sapiens
gcgtgcctctacctg

SEQ ID NO: 1216054 - DNA, 15 bp, Homo sapiens
ggcgtgcctctacct

SEQ ID NO: 1216055 - DNA, 15 bp, Homo sapiens
aggcgtgcctctacc

SEQ ID NO: 1216056 - DNA, 15 bp, Homo sapiens
caggcgtgcctctac

SEQ ID NO: 1216057 - DNA, 15 bp, Homo sapiens
ccaggcgtgcctcta

SEQ ID NO: 1216058 - DNA, 15 bp, Homo sapiens
cccaggcgtgcctct

SEQ ID NO: 1216059 - DNA, 15 bp, Homo sapiens
acccaggcgtgcctc

SEQ ID NO: 1216060 - DNA, 15 bp, Homo sapiens
aacccaggcgtgcct

SEQ ID NO: 1216061 - DNA, 15 bp, Homo sapiens
gaacccaggcgtgcc

SEQ ID NO: 1216062 - DNA, 15 bp, Homo sapiens
tgaacccaggcgtgc

SEQ ID NO: 1216063 - DNA, 15 bp, Homo sapiens
ttgaacccaggcgtg

SEQ ID NO: 1216064 - DNA, 15 bp, Homo sapiens
cttgaacccaggcgt

SEQ ID NO: 1216065 - DNA, 15 bp, Homo sapiens
ccttgaacccaggcg

SEQ ID NO: 1216066 - DNA, 15 bp, Homo sapiens
cccttgaacccaggc

SEQ ID NO: 1216067 - DNA, 15 bp, Homo sapiens
ccccttgaacccagg

SEQ ID NO: 1216068 - DNA, 15 bp, Homo sapiens
tccccttgaacccag

SEQ ID NO: 1216069 - DNA, 15 bp, Homo sapiens
ctccccttgaaccca

SEQ ID NO: 1216070 - DNA, 15 bp, Homo sapiens
tctccccttgaaccc

SEQ ID NO: 1216071 - DNA, 15 bp, Homo sapiens
ctctccccttgaacc

SEQ ID NO: 1216072 - DNA, 15 bp, Homo sapiens
cctctccccttgaac

SEQ ID NO: 1216073 - DNA, 15 bp, Homo sapiens
tcctctccccttgaa

SEQ ID NO: 1216074 - DNA, 15 bp, Homo sapiens
ctcctctccccttga

SEQ ID NO: 1216075 - DNA, 15 bp, Homo sapiens
gctcctctccccttg

SEQ ID NO: 1216076 - DNA, 15 bp, Homo sapiens
tgctcctctcccctt

SEQ ID NO: 1216077 - DNA, 15 bp, Homo sapiens
ctgctcctctcccct

SEQ ID NO: 1216078 - DNA, 15 bp, Homo sapiens
cctgctcctctcccc

SEQ ID NO: 1216079 - DNA, 15 bp, Homo sapiens
gcctgctcctctccc

SEQ ID NO: 1216080 - DNA, 15 bp, Homo sapiens
tgcctgctcctctcc

SEQ ID NO: 1216081 - DNA, 15 bp, Homo sapiens
ctgcctgctcctctc

SEQ ID NO: 1216082 - DNA, 15 bp, Homo sapiens
cctgcctgctcctct

SEQ ID NO: 1216083 - DNA, 15 bp, Homo sapiens
ccctgcctgctcctc

SEQ ID NO: 1216084 - DNA, 15 bp, Homo sapiens
tccctgcctgctcct

SEQ ID NO: 1216085 - DNA, 15 bp, Homo sapiens
gtccctgcctgctcc

SEQ ID NO: 1216086 - DNA, 15 bp, Homo sapiens
tgtccctgcctgctc

SEQ ID NO: 1216087 - DNA, 15 bp, Homo sapiens
ctgtccctgcctgct

SEQ ID NO: 1216088 - DNA, 15 bp, Homo sapiens
gctgtccctgcctgc

SEQ ID NO: 1216089 - DNA, 15 bp, Homo sapiens
ggctgtccctgcctg

SEQ ID NO: 1216090 - DNA, 15 bp, Homo sapiens
tggctgtccctgcct

SEQ ID NO: 1216091 - DNA, 15 bp, Homo sapiens
ctggctgtccctgcc

SEQ ID NO: 1216092 - DNA, 15 bp, Homo sapiens
cctggctgtccctgc

SEQ ID NO: 1216093 - DNA, 15 bp, Homo sapiens
tcctggctgtccctg

SEQ ID NO: 1216094 - DNA, 15 bp, Homo sapiens
ttcctggctgtccct

SEQ ID NO: 1216095 - DNA, 15 bp, Homo sapiens
tttcctggctgtccc

SEQ ID NO: 1216096 - DNA, 15 bp, Homo sapiens
atttcctggctgtcc

SEQ ID NO: 1216097 - DNA, 15 bp, Homo sapiens
aatttcctggctgtc

SEQ ID NO: 1216098 - DNA, 15 bp, Homo sapiens
gaatttcctggctgt

SEQ ID NO: 1216099 - DNA, 15 bp, Homo sapiens
ggaatttcctggctg

SEQ ID NO: 1216100 - DNA, 15 bp, Homo sapiens
gggaatttcctggct

SEQ ID NO: 1216101 - DNA, 15 bp, Homo sapiens
ggggaatttcctggc

SEQ ID NO: 1216102 - DNA, 15 bp, Homo sapiens
cggggaatttcctgg

SEQ ID NO: 1216103 - DNA, 15 bp, Homo sapiens
ccggggaatttcctg

SEQ ID NO: 1216104 - DNA, 15 bp, Homo sapiens
cccggggaatttcct

SEQ ID NO: 1216105 - DNA, 15 bp, Homo sapiens
acccggggaatttcc

SEQ ID NO: 1216106 - DNA, 15 bp, Homo sapiens
cacccggggaatttc

SEQ ID NO: 1216107 - DNA, 15 bp, Homo sapiens
ccacccggggaattt

SEQ ID NO: 1216108 - DNA, 15 bp, Homo sapiens
tccacccggggaatt

SEQ ID NO: 1216109 - DNA, 15 bp, Homo sapiens
ttccacccggggaat

SEQ ID NO: 1216110 - DNA, 15 bp, Homo sapiens
tttccacccggggaa

SEQ ID NO: 1216111 - DNA, 15 bp, Homo sapiens
atttccacccgggga

SEQ ID NO: 1216112 - DNA, 15 bp, Homo sapiens
tatttccacccgggg

SEQ ID NO: 1216113 - DNA, 15 bp, Homo sapiens
ttatttccacccggg

SEQ ID NO: 1216114 - DNA, 15 bp, Homo sapiens
tttatttccacccgg

SEQ ID NO: 1216115 - DNA, 15 bp, Homo sapiens
ttttatttccacccg

SEQ ID NO: 1216116 - DNA, 15 bp, Homo sapiens
cttttatttccaccc

SEQ ID NO: 1216117 - DNA, 15 bp, Homo sapiens
ccttttatttccacc

SEQ ID NO: 1216118 - DNA, 15 bp, Homo sapiens
cccttttatttccac

SEQ ID NO: 1216119 - DNA, 15 bp, Homo sapiens
acccttttatttcca

SEQ ID NO: 1216120 - DNA, 15 bp, Homo sapiens
cacccttttatttcc

SEQ ID NO: 1216121 - DNA, 15 bp, Homo sapiens
ccacccttttatttc

SEQ ID NO: 1216122 - DNA, 15 bp, Homo sapiens
cccacccttttattt

SEQ ID NO: 1216123 - DNA, 15 bp, Homo sapiens
gcccacccttttatt

SEQ ID NO: 1216124 - DNA, 15 bp, Homo sapiens
ggcccacccttttat

SEQ ID NO: 1216125 - DNA, 15 bp, Homo sapiens
gggcccaccctttta

SEQ ID NO: 1216126 - DNA, 15 bp, Homo sapiens
tgggcccaccctttt

SEQ ID NO: 1216127 - DNA, 15 bp, Homo sapiens
ttgggcccacccttt

SEQ ID NO: 1216128 - DNA, 15 bp, Homo sapiens
gttgggcccaccctt

SEQ ID NO: 1216129 - DNA, 15 bp, Homo sapiens
agttgggcccaccct

SEQ ID NO: 1216130 - DNA, 15 bp, Homo sapiens
aagttgggcccaccc

SEQ ID NO: 1216131 - DNA, 15 bp, Homo sapiens
caagttgggcccacc

SEQ ID NO: 1216132 - DNA, 15 bp, Homo sapiens
gcaagttgggcccac

SEQ ID NO: 1216133 - DNA, 15 bp, Homo sapiens
tgcaagttgggccca

SEQ ID NO: 1216134 - DNA, 15 bp, Homo sapiens
ctgcaagttgggccc

SEQ ID NO: 1216135 - DNA, 15 bp, Homo sapiens
cctgcaagttgggcc

SEQ ID NO: 1216136 - DNA, 15 bp, Homo sapiens
gcctgcaagttgggc

SEQ ID NO: 1216137 - DNA, 15 bp, Homo sapiens
ggcctgcaagttggg

SEQ ID NO: 1216138 - DNA, 15 bp, Homo sapiens
gggcctgcaagttgg

SEQ ID NO: 1216139 - DNA, 15 bp, Homo sapiens
agggcctgcaagttg

SEQ ID NO: 1216140 - DNA, 15 bp, Homo sapiens
gagggcctgcaagtt

SEQ ID NO: 1216141 - DNA, 15 bp, Homo sapiens
agagggcctgcaagt

SEQ ID NO: 1216142 - DNA, 15 bp, Homo sapiens
cagagggcctgcaag

SEQ ID NO: 1216143 - DNA, 15 bp, Homo sapiens
gcagagggcctgcaa

SEQ ID NO: 1216144 - DNA, 15 bp, Homo sapiens
ggcagagggcctgca

SEQ ID NO: 1216145 - DNA, 15 bp, Homo sapiens
gggcagagggcctgc

SEQ ID NO: 1216146 - DNA, 15 bp, Homo sapiens
cgggcagagggcctg

SEQ ID NO: 1216147 - DNA, 15 bp, Homo sapiens
gcgggcagagggcct

SEQ ID NO: 1216148 - DNA, 15 bp, Homo sapiens
tgcgggcagagggcc

SEQ ID NO: 1216149 - DNA, 15 bp, Homo sapiens
ttgcgggcagagggc

SEQ ID NO: 1216150 - DNA, 15 bp, Homo sapiens
cttgcgggcagaggg

SEQ ID NO: 1216151 - DNA, 15 bp, Homo sapiens
ccttgcgggcagagg

SEQ ID NO: 1216152 - DNA, 15 bp, Homo sapiens
tccttgcgggcagag

SEQ ID NO: 1216153 - DNA, 15 bp, Homo sapiens
gtccttgcgggcaga

SEQ ID NO: 1216154 - DNA, 15 bp, Homo sapiens
tgtccttgcgggcag

SEQ ID NO: 1216155 - DNA, 15 bp, Homo sapiens
ctgtccttgcgggca

SEQ ID NO: 1216156 - DNA, 15 bp, Homo sapiens
tctgtccttgcgggc

SEQ ID NO: 1216157 - DNA, 15 bp, Homo sapiens
ctctgtccttgcggg

SEQ ID NO: 1216158 - DNA, 15 bp, Homo sapiens
actctgtccttgcgg

SEQ ID NO: 1216159 - DNA, 15 bp, Homo sapiens
gactctgtccttgcg

SEQ ID NO: 1216160 - DNA, 15 bp, Homo sapiens
ggactctgtccttgc

SEQ ID NO: 1216161 - DNA, 15 bp, Homo sapiens
tggactctgtccttg

SEQ ID NO: 1216162 - DNA, 15 bp, Homo sapiens
ctggactctgtcctt

SEQ ID NO: 1216163 - DNA, 15 bp, Homo sapiens
actggactctgtcct

SEQ ID NO: 1216164 - DNA, 15 bp, Homo sapiens
gactggactctgtcc

SEQ ID NO: 1216165 - DNA, 15 bp, Homo sapiens
ggactggactctgtc

SEQ ID NO: 1216166 - DNA, 15 bp, Homo sapiens
tggactggactctgt

SEQ ID NO: 1216167 - DNA, 15 bp, Homo sapiens
gtggactggactctg

SEQ ID NO: 1216168 - DNA, 15 bp, Homo sapiens
tgtggactggactct

SEQ ID NO: 1216169 - DNA, 15 bp, Homo sapiens
atgtggactggactc

SEQ ID NO: 1216170 - DNA, 15 bp, Homo sapiens
aatgtggactggact

SEQ ID NO: 1216171 - DNA, 15 bp, Homo sapiens
caatgtggactggac

SEQ ID NO: 1216172 - DNA, 15 bp, Homo sapiens
tcaatgtggactgga

SEQ ID NO: 1216173 - DNA, 15 bp, Homo sapiens
atcaatgtggactgg

SEQ ID NO: 1216174 - DNA, 15 bp, Homo sapiens
catcaatgtggactg

SEQ ID NO: 1216175 - DNA, 15 bp, Homo sapiens
gcatcaatgtggact

SEQ ID NO: 1216176 - DNA, 15 bp, Homo sapiens
ggcatcaatgtggac

SEQ ID NO: 1216177 - DNA, 15 bp, Homo sapiens
aggcatcaatgtgga

SEQ ID NO: 1216178 - DNA, 15 bp, Homo sapiens
gaggcatcaatgtgg

SEQ ID NO: 1216179 - DNA, 15 bp, Homo sapiens
tgaggcatcaatgtg

SEQ ID NO: 1216180 - DNA, 15 bp, Homo sapiens
gtgaggcatcaatgt

SEQ ID NO: 1216181 - DNA, 15 bp, Homo sapiens
cgtgaggcatcaatg

SEQ ID NO: 1216182 - DNA, 15 bp, Homo sapiens
acgtgaggcatcaat

SEQ ID NO: 1216183 - DNA, 15 bp, Homo sapiens
cacgtgaggcatcaa

SEQ ID NO: 1216184 - DNA, 15 bp, Homo sapiens
acacgtgaggcatca

SEQ ID NO: 1216185 - DNA, 15 bp, Homo sapiens
gacacgtgaggcatc

SEQ ID NO: 1216186 - DNA, 15 bp, Homo sapiens
tgacacgtgaggcat

SEQ ID NO: 1216187 - DNA, 15 bp, Homo sapiens
ctgacacgtgaggca

SEQ ID NO: 1216188 - DNA, 15 bp, Homo sapiens
cctgacacgtgaggc

SEQ ID NO: 1216189 - DNA, 15 bp, Homo sapiens
acctgacacgtgagg

SEQ ID NO: 1216190 - DNA, 15 bp, Homo sapiens
cacctgacacgtgag

SEQ ID NO: 1216191 - DNA, 15 bp, Homo sapiens
gcacctgacacgtga

SEQ ID NO: 1216192 - DNA, 15 bp, Homo sapiens
tgcacctgacacgtg

SEQ ID NO: 1216193 - DNA, 15 bp, Homo sapiens
ttgcacctgacacgt

SEQ ID NO: 1216194 - DNA, 15 bp, Homo sapiens
attgcacctgacacg

SEQ ID NO: 1216195 - DNA, 15 bp, Homo sapiens
tattgcacctgacac

SEQ ID NO: 1216196 - DNA, 15 bp, Homo sapiens
ctattgcacctgaca

SEQ ID NO: 1216197 - DNA, 15 bp, Homo sapiens
cctattgcacctgac

SEQ ID NO: 1216198 - DNA, 15 bp, Homo sapiens
acctattgcacctga

SEQ ID NO: 1216199 - DNA, 15 bp, Homo sapiens
cacctattgcacctg

SEQ ID NO: 1216200 - DNA, 15 bp, Homo sapiens
acacctattgcacct

SEQ ID NO: 1216201 - DNA, 15 bp, Homo sapiens
gacacctattgcacc

SEQ ID NO: 1216202 - DNA, 15 bp, Homo sapiens
tgacacctattgcac

SEQ ID NO: 1216203 - DNA, 15 bp, Homo sapiens
atgacacctattgca

SEQ ID NO: 1216204 - DNA, 15 bp, Homo sapiens
gatgacacctattgc

SEQ ID NO: 1216205 - DNA, 15 bp, Homo sapiens
tgatgacacctattg

SEQ ID NO: 1216206 - DNA, 15 bp, Homo sapiens
ttgatgacacctatt

SEQ ID NO: 1216207 - DNA, 15 bp, Homo sapiens
attgatgacacctat

SEQ ID NO: 1216208 - DNA, 15 bp, Homo sapiens
cattgatgacaccta

SEQ ID NO: 1216209 - DNA, 15 bp, Homo sapiens
ccattgatgacacct

SEQ ID NO: 1216210 - DNA, 15 bp, Homo sapiens
gccattgatgacacc

SEQ ID NO: 1216211 - DNA, 15 bp, Homo sapiens
tgccattgatgacac

SEQ ID NO: 1216212 - DNA, 15 bp, Homo sapiens
atgccattgatgaca

SEQ ID NO: 1216213 - DNA, 15 bp, Homo sapiens
tatgccattgatgac

SEQ ID NO: 1216214 - DNA, 15 bp, Homo sapiens
atatgccattgatga

SEQ ID NO: 1216215 - DNA, 15 bp, Homo sapiens
tatatgccattgatg

SEQ ID NO: 1216216 - DNA, 15 bp, Homo sapiens
atatatgccattgat

SEQ ID NO: 1216217 - DNA, 15 bp, Homo sapiens
gatatatgccattga

SEQ ID NO: 1216218 - DNA, 15 bp, Homo sapiens
tgatatatgccattg

SEQ ID NO: 1216219 - DNA, 15 bp, Homo sapiens
ctgatatatgccatt

SEQ ID NO: 1216220 - DNA, 15 bp, Homo sapiens
tctgatatatgccat

SEQ ID NO: 1216221 - DNA, 15 bp, Homo sapiens
ctctgatatatgcca

SEQ ID NO: 1216222 - DNA, 15 bp, Homo sapiens
gctctgatatatgcc

SEQ ID NO: 1216223 - DNA, 15 bp, Homo sapiens
agctctgatatatgc

SEQ ID NO: 1216224 - DNA, 15 bp, Homo sapiens
cagctctgatatatg

SEQ ID NO: 1216225 - DNA, 15 bp, Homo sapiens
ccagctctgatatat

SEQ ID NO: 1216226 - DNA, 15 bp, Homo sapiens
tccagctctgatata

SEQ ID NO: 1216227 - DNA, 15 bp, Homo sapiens
ctccagctctgatat

SEQ ID NO: 1216228 - DNA, 15 bp, Homo sapiens
cctccagctctgata

SEQ ID NO: 1216229 - DNA, 15 bp, Homo sapiens
acctccagctctgat

SEQ ID NO: 1216230 - DNA, 15 bp, Homo sapiens
aacctccagctctga

SEQ ID NO: 1216231 - DNA, 15 bp, Homo sapiens
caacctccagctctg

SEQ ID NO: 1216232 - DNA, 15 bp, Homo sapiens
tcaacctccagctct

SEQ ID NO: 1216233 - DNA, 15 bp, Homo sapiens
ctcaacctccagctc

SEQ ID NO: 1216234 - DNA, 15 bp, Homo sapiens
tctcaacctccagct

SEQ ID NO: 1216235 - DNA, 15 bp, Homo sapiens
ctctcaacctccagc

SEQ ID NO: 1216236 - DNA, 15 bp, Homo sapiens
cctctcaacctccag

SEQ ID NO: 1216237 - DNA, 15 bp, Homo sapiens
gcctctcaacctcca

SEQ ID NO: 1216238 - DNA, 15 bp, Homo sapiens
agcctctcaacctcc

SEQ ID NO: 1216239 - DNA, 15 bp, Homo sapiens
aagcctctcaacctc

SEQ ID NO: 1216240 - DNA, 15 bp, Homo sapiens
caagcctctcaacct

SEQ ID NO: 1216241 - DNA, 15 bp, Homo sapiens
tcaagcctctcaacc

SEQ ID NO: 1216242 - DNA, 15 bp, Homo sapiens
ttcaagcctctcaac

SEQ ID NO: 1216243 - DNA, 15 bp, Homo sapiens
tttcaagcctctcaa

SEQ ID NO: 1216244 - DNA, 15 bp, Homo sapiens
ttttcaagcctctca

SEQ ID NO: 1216245 - DNA, 15 bp, Homo sapiens
cttttcaagcctctc

SEQ ID NO: 1216246 - DNA, 15 bp, Homo sapiens
tcttttcaagcctct

SEQ ID NO: 1216247 - DNA, 15 bp, Homo sapiens
ctcttttcaagcctc

SEQ ID NO: 1216248 - DNA, 15 bp, Homo sapiens
tctcttttcaagcct

SEQ ID NO: 1216249 - DNA, 15 bp, Homo sapiens
ttctcttttcaagcc

SEQ ID NO: 1216250 - DNA, 15 bp, Homo sapiens
attctcttttcaagc

SEQ ID NO: 1216251 - DNA, 15 bp, Homo sapiens
tattctcttttcaag

SEQ ID NO: 1216252 - DNA, 15 bp, Homo sapiens
ttattctcttttcaa

SEQ ID NO: 1216253 - DNA, 15 bp, Homo sapiens
tttattctcttttca

SEQ ID NO: 1216254 - DNA, 15 bp, Homo sapiens
ttttattctcttttc

SEQ ID NO: 1216255 - DNA, 15 bp, Homo sapiens
gttttattctctttt

SEQ ID NO: 1216256 - DNA, 15 bp, Homo sapiens
agttttattctcttt

SEQ ID NO: 1216257 - DNA, 15 bp, Homo sapiens
cagttttattctctt

SEQ ID NO: 1216258 - DNA, 15 bp, Homo sapiens
acagttttattctct

SEQ ID NO: 1216259 - DNA, 15 bp, Homo sapiens
aacagttttattctc

SEQ ID NO: 1216260 - DNA, 15 bp, Homo sapiens
caacagttttattct

SEQ ID NO: 1216261 - DNA, 15 bp, Homo sapiens
acaacagttttattc

SEQ ID NO: 1216262 - DNA, 15 bp, Homo sapiens
tacaacagttttatt

SEQ ID NO: 1216263 - DNA, 15 bp, Homo sapiens
atacaacagttttat

SEQ ID NO: 1216264 - DNA, 15 bp, Homo sapiens
cgtgccaccacgccc

SEQ ID NO: 1216265 - DNA, 15 bp, Homo sapiens
acgtgccaccacgcc

SEQ ID NO: 1216266 - DNA, 15 bp, Homo sapiens
cacgtgccaccacgc

SEQ ID NO: 1216267 - DNA, 15 bp, Homo sapiens
gcacgtgccaccacg

SEQ ID NO: 1216268 - DNA, 15 bp, Homo sapiens
ggcacgtgccaccac

SEQ ID NO: 1216269 - DNA, 15 bp, Homo sapiens
aggcacgtgccacca

SEQ ID NO: 1216270 - DNA, 15 bp, Homo sapiens
caggcacgtgccacc

SEQ ID NO: 1216271 - DNA, 15 bp, Homo sapiens
acaggcacgtgccac

SEQ ID NO: 1216272 - DNA, 15 bp, Homo sapiens
ttacaggcacgtgcc

SEQ ID NO: 1216273 - DNA, 15 bp, Homo sapiens
attacaggcacgtgc

SEQ ID NO: 1216274 - DNA, 15 bp, Homo sapiens
gattacaggcacgtg

SEQ ID NO: 1216275 - DNA, 15 bp, Homo sapiens
ggattacaggcacgt

SEQ ID NO: 1216276 - DNA, 15 bp, Homo sapiens
gggattacaggcacg

SEQ ID NO: 1216277 - DNA, 15 bp, Homo sapiens
atcagcctcccaagt

SEQ ID NO: 1216278 - DNA, 15 bp, Homo sapiens
catcagcctcccaag

SEQ ID NO: 1216279 - DNA, 15 bp, Homo sapiens
acatcagcctcccaa

SEQ ID NO: 1216280 - DNA, 15 bp, Homo sapiens
cacatcagcctccca

SEQ ID NO: 1216281 - DNA, 15 bp, Homo sapiens
ccacatcagcctccc

SEQ ID NO: 1216282 - DNA, 15 bp, Homo sapiens
cccacatcagcctcc

SEQ ID NO: 1216283 - DNA, 15 bp, Homo sapiens
tcccacatcagcctc

SEQ ID NO: 1216284 - DNA, 15 bp, Homo sapiens
ctcccacatcagcct

SEQ ID NO: 1216285 - DNA, 15 bp, Homo sapiens
tctcccacatcagcc

SEQ ID NO: 1216286 - DNA, 15 bp, Homo sapiens
ttctcccacatcagc

SEQ ID NO: 1216287 - DNA, 15 bp, Homo sapiens
attctcccacatcag

SEQ ID NO: 1216288 - DNA, 15 bp, Homo sapiens
gattctcccacatca

SEQ ID NO: 1216289 - DNA, 15 bp, Homo sapiens
cgattctcccacatc

SEQ ID NO: 1216290 - DNA, 15 bp, Homo sapiens
gcgattctcccacat

SEQ ID NO: 1216291 - DNA, 15 bp, Homo sapiens
agcgattctcccaca

SEQ ID NO: 1216292 - DNA, 15 bp, Homo sapiens
aagcgattctcccac

SEQ ID NO: 1216293 - DNA, 15 bp, Homo sapiens
caagcgattctccca

SEQ ID NO: 1216294 - DNA, 15 bp, Homo sapiens
agggttcaagcgatt

SEQ ID NO: 1216295 - DNA, 15 bp, Homo sapiens
cagggttcaagcgat

SEQ ID NO: 1216296 - DNA, 15 bp, Homo sapiens
ccagggttcaagcga

SEQ ID NO: 1216297 - DNA, 15 bp, Homo sapiens
tccagggttcaagcg

SEQ ID NO: 1216298 - DNA, 15 bp, Homo sapiens
ctccagggttcaagc

SEQ ID NO: 1216299 - DNA, 15 bp, Homo sapiens
cctccagggttcaag

SEQ ID NO: 1216300 - DNA, 15 bp, Homo sapiens
acctccagggttcaa

SEQ ID NO: 1216301 - DNA, 15 bp, Homo sapiens
cacctccagggttca

SEQ ID NO: 1216302 - DNA, 15 bp, Homo sapiens
ccacctccagggttc

SEQ ID NO: 1216303 - DNA, 15 bp, Homo sapiens
tccacctccagggtt

SEQ ID NO: 1216304 - DNA, 15 bp, Homo sapiens
ctccacctccagggt

SEQ ID NO: 1216305 - DNA, 15 bp, Homo sapiens
cctccacctccaggg

SEQ ID NO: 1216306 - DNA, 15 bp, Homo sapiens
acctccacctccagg

SEQ ID NO: 1216307 - DNA, 15 bp, Homo sapiens
aacctccacctccag

SEQ ID NO: 1216308 - DNA, 15 bp, Homo sapiens
caacctccacctcca

SEQ ID NO: 1216309 - DNA, 15 bp, Homo sapiens
gctcttgctgcccag

SEQ ID NO: 1216310 - DNA, 15 bp, Homo sapiens
tgctcttgctgccca

SEQ ID NO: 1216311 - DNA, 15 bp, Homo sapiens
ttgctcttgctgccc

SEQ ID NO: 1216312 - DNA, 15 bp, Homo sapiens
tttgctcttgctgcc

SEQ ID NO: 1216313 - DNA, 15 bp, Homo sapiens
ttttgctcttgctgc

SEQ ID NO: 1216314 - DNA, 15 bp, Homo sapiens
gttttgctcttgctg

SEQ ID NO: 1216315 - DNA, 15 bp, Homo sapiens
tgttttgctcttgct

SEQ ID NO: 1216316 - DNA, 15 bp, Homo sapiens
gtgttttgctcttgc

SEQ ID NO: 1216317 - DNA, 15 bp, Homo sapiens
agtgttttgctcttg

SEQ ID NO: 1216318 - DNA, 15 bp, Homo sapiens
cagtgttttgctctt

SEQ ID NO: 1216319 - DNA, 15 bp, Homo sapiens
acagtgttttgctct

SEQ ID NO: 1216320 - DNA, 15 bp, Homo sapiens
gacagtgttttgctc

SEQ ID NO: 1216321 - DNA, 15 bp, Homo sapiens
agacagtgttttgct

SEQ ID NO: 1216322 - DNA, 15 bp, Homo sapiens
tagacagtgttttgc

SEQ ID NO: 1216323 - DNA, 15 bp, Homo sapiens
ttagacagtgttttg

SEQ ID NO: 1216324 - DNA, 15 bp, Homo sapiens
tttagacagtgtttt

SEQ ID NO: 1216325 - DNA, 15 bp, Homo sapiens
ttttagacagtgttt

SEQ ID NO: 1216326 - DNA, 15 bp, Homo sapiens
tttttagacagtgtt

SEQ ID NO: 1216327 - DNA, 15 bp, Homo sapiens
ttttcttttcctttt

SEQ ID NO: 1216328 - DNA, 15 bp, Homo sapiens
cttttcttttccttt

SEQ ID NO: 1216329 - DNA, 15 bp, Homo sapiens
tcttttcttttcctt

SEQ ID NO: 1216330 - DNA, 15 bp, Homo sapiens
ttcttttcttttcct

SEQ ID NO: 1216331 - DNA, 15 bp, Homo sapiens
ctttcttttcttttc

SEQ ID NO: 1216332 - DNA, 15 bp, Homo sapiens
gctttcttttctttt

SEQ ID NO: 1216333 - DNA, 15 bp, Homo sapiens
tgctttcttttcttt

SEQ ID NO: 1216334 - DNA, 15 bp, Homo sapiens
ctgctttcttttctt

SEQ ID NO: 1216335 - DNA, 15 bp, Homo sapiens
gctgctttcttttct

SEQ ID NO: 1216336 - DNA, 15 bp, Homo sapiens
gggctgctttctttt

SEQ ID NO: 1216337 - DNA, 15 bp, Homo sapiens
agggctgctttcttt

SEQ ID NO: 1216338 - DNA, 15 bp, Homo sapiens
tagggctgctttctt

SEQ ID NO: 1216339 - DNA, 15 bp, Homo sapiens
ctagggctgctttct

SEQ ID NO: 1216340 - DNA, 15 bp, Homo sapiens
cctagggctgctttc

SEQ ID NO: 1216341 - DNA, 15 bp, Homo sapiens
gcctagggctgcttt

SEQ ID NO: 1216342 - DNA, 15 bp, Homo sapiens
tgcctagggctgctt

SEQ ID NO: 1216343 - DNA, 15 bp, Homo sapiens
atgcctagggctgct

SEQ ID NO: 1216344 - DNA, 15 bp, Homo sapiens
aatgcctagggctgc

SEQ ID NO: 1216345 - DNA, 15 bp, Homo sapiens
aaatgcctagggctg

SEQ ID NO: 1216346 - DNA, 15 bp, Homo sapiens
aaaatgcctagggct

SEQ ID NO: 1216347 - DNA, 15 bp, Homo sapiens
taaaatgcctagggc

SEQ ID NO: 1216348 - DNA, 15 bp, Homo sapiens
ctaaaatgcctaggg

SEQ ID NO: 1216349 - DNA, 15 bp, Homo sapiens
actaaaatgcctagg

SEQ ID NO: 1216350 - DNA, 15 bp, Homo sapiens
aactaaaatgcctag

SEQ ID NO: 1216351 - DNA, 15 bp, Homo sapiens
aaactaaaatgccta

SEQ ID NO: 1216352 - DNA, 15 bp, Homo sapiens
gaaactaaaatgcct

SEQ ID NO: 1216353 - DNA, 15 bp, Homo sapiens
agaaactaaaatgcc

SEQ ID NO: 1216354 - DNA, 15 bp, Homo sapiens
aagaaactaaaatgc

SEQ ID NO: 1216355 - DNA, 15 bp, Homo sapiens
aaagaaactaaaatg

SEQ ID NO: 1216356 - DNA, 15 bp, Homo sapiens
aaaagaaactaaaat

SEQ ID NO: 1216357 - DNA, 15 bp, Homo sapiens
taaaagaaactaaaa

SEQ ID NO: 1216358 - DNA, 15 bp, Homo sapiens
ataaaagaaactaaa

SEQ ID NO: 1216359 - DNA, 15 bp, Homo sapiens
tataaaagaaactaa

SEQ ID NO: 1216360 - DNA, 15 bp, Homo sapiens
gtataaaagaaacta

SEQ ID NO: 1216361 - DNA, 15 bp, Homo sapiens
agtataaaagaaact

SEQ ID NO: 1216362 - DNA, 15 bp, Homo sapiens
gagtataaaagaaac

SEQ ID NO: 1216363 - DNA, 15 bp, Homo sapiens
agagtataaaagaaa

SEQ ID NO: 1216364 - DNA, 15 bp, Homo sapiens
gagagtataaaagaa

SEQ ID NO: 1216365 - DNA, 15 bp, Homo sapiens
tgagagtataaaaga

SEQ ID NO: 1216366 - DNA, 15 bp, Homo sapiens
ctgagagtataaaag

SEQ ID NO: 1216367 - DNA, 15 bp, Homo sapiens
gctgagagtataaaa

SEQ ID NO: 1216368 - DNA, 15 bp, Homo sapiens
tgctgagagtataaa

SEQ ID NO: 1216369 - DNA, 15 bp, Homo sapiens
ttgctgagagtataa

SEQ ID NO: 1216370 - DNA, 15 bp, Homo sapiens
attgctgagagtata

SEQ ID NO: 1216371 - DNA, 15 bp, Homo sapiens
cattgctgagagtat

SEQ ID NO: 1216372 - DNA, 15 bp, Homo sapiens
gcattgctgagagta

SEQ ID NO: 1216373 - DNA, 15 bp, Homo sapiens
ggcattgctgagagt

SEQ ID NO: 1216374 - DNA, 15 bp, Homo sapiens
tggcattgctgagag

SEQ ID NO: 1216375 - DNA, 15 bp, Homo sapiens
ttggcattgctgaga

SEQ ID NO: 1216376 - DNA, 15 bp, Homo sapiens
tttggcattgctgag

SEQ ID NO: 1216377 - DNA, 15 bp, Homo sapiens
ttttggcattgctga

SEQ ID NO: 1216378 - DNA, 15 bp, Homo sapiens
cttttggcattgctg

SEQ ID NO: 1216379 - DNA, 15 bp, Homo sapiens
acttttggcattgct

SEQ ID NO: 1216380 - DNA, 15 bp, Homo sapiens
cacttttggcattgc

SEQ ID NO: 1216381 - DNA, 15 bp, Homo sapiens
ccacttttggcattg

SEQ ID NO: 1216382 - DNA, 15 bp, Homo sapiens
accacttttggcatt

SEQ ID NO: 1216383 - DNA, 15 bp, Homo sapiens
aaccacttttggcat

SEQ ID NO: 1216384 - DNA, 15 bp, Homo sapiens
aaaccacttttggca

SEQ ID NO: 1216385 - DNA, 15 bp, Homo sapiens
gaaaccacttttggc

SEQ ID NO: 1216386 - DNA, 15 bp, Homo sapiens
ggaaaccacttttgg

SEQ ID NO: 1216387 - DNA, 15 bp, Homo sapiens
tggaaaccacttttg

SEQ ID NO: 1216388 - DNA, 15 bp, Homo sapiens
ttggaaaccactttt

SEQ ID NO: 1216389 - DNA, 15 bp, Homo sapiens
attggaaaccacttt

SEQ ID NO: 1216390 - DNA, 15 bp, Homo sapiens
aattggaaaccactt

SEQ ID NO: 1216391 - DNA, 15 bp, Homo sapiens
caattggaaaccact

SEQ ID NO: 1216392 - DNA, 15 bp, Homo sapiens
tcaattggaaaccac

SEQ ID NO: 1216393 - DNA, 15 bp, Homo sapiens
atcaattggaaacca

SEQ ID NO: 1216394 - DNA, 15 bp, Homo sapiens
catcaattggaaacc

SEQ ID NO: 1216395 - DNA, 15 bp, Homo sapiens
tcatcaattggaaac

SEQ ID NO: 1216396 - DNA, 15 bp, Homo sapiens
ctcatcaattggaaa

SEQ ID NO: 1216397 - DNA, 15 bp, Homo sapiens
actcatcaattggaa

SEQ ID NO: 1216398 - DNA, 15 bp, Homo sapiens
aactcatcaattgga

SEQ ID NO: 1216399 - DNA, 15 bp, Homo sapiens
aaactcatcaattgg

SEQ ID NO: 1216400 - DNA, 15 bp, Homo sapiens
taaactcatcaattg

SEQ ID NO: 1216401 - DNA, 15 bp, Homo sapiens
ataaactcatcaatt

SEQ ID NO: 1216402 - DNA, 15 bp, Homo sapiens
aataaactcatcaat

SEQ ID NO: 1216403 - DNA, 15 bp, Homo sapiens
caataaactcatcaa

SEQ ID NO: 1216404 - DNA, 15 bp, Homo sapiens
tcaataaactcatca

SEQ ID NO: 1216405 - DNA, 15 bp, Homo sapiens
atcaataaactcatc

SEQ ID NO: 1216406 - DNA, 15 bp, Homo sapiens
aatcaataaactcat

SEQ ID NO: 1216407 - DNA, 15 bp, Homo sapiens
aaatcaataaactca

SEQ ID NO: 1216408 - DNA, 15 bp, Homo sapiens
caaatcaataaactc

SEQ ID NO: 1216409 - DNA, 15 bp, Homo sapiens
ccaaatcaataaact

SEQ ID NO: 1216410 - DNA, 15 bp, Homo sapiens
tccaaatcaataaac

SEQ ID NO: 1216411 - DNA, 15 bp, Homo sapiens
ctccaaatcaataaa

SEQ ID NO: 1216412 - DNA, 15 bp, Homo sapiens
tctccaaatcaataa

SEQ ID NO: 1216413 - DNA, 15 bp, Homo sapiens
atctccaaatcaata

SEQ ID NO: 1216414 - DNA, 15 bp, Homo sapiens
aatctccaaatcaat

SEQ ID NO: 1216415 - DNA, 15 bp, Homo sapiens
gaatctccaaatcaa

SEQ ID NO: 1216416 - DNA, 15 bp, Homo sapiens
ggaatctccaaatca

SEQ ID NO: 1216417 - DNA, 15 bp, Homo sapiens
tggaatctccaaatc

SEQ ID NO: 1216418 - DNA, 15 bp, Homo sapiens
ctggaatctccaaat

SEQ ID NO: 1216419 - DNA, 15 bp, Homo sapiens
gctggaatctccaaa

SEQ ID NO: 1216420 - DNA, 15 bp, Homo sapiens
ggctggaatctccaa

SEQ ID NO: 1216421 - DNA, 15 bp, Homo sapiens
tggctggaatctcca

SEQ ID NO: 1216422 - DNA, 15 bp, Homo sapiens
atggctggaatctcc

SEQ ID NO: 1216423 - DNA, 15 bp, Homo sapiens
aatggctggaatctc

SEQ ID NO: 1216424 - DNA, 15 bp, Homo sapiens
caatggctggaatct

SEQ ID NO: 1216425 - DNA, 15 bp, Homo sapiens
tcaatggctggaatc

SEQ ID NO: 1216426 - DNA, 15 bp, Homo sapiens
ttcaatggctggaat

SEQ ID NO: 1216427 - DNA, 15 bp, Homo sapiens
attcaatggctggaa

SEQ ID NO: 1216428 - DNA, 15 bp, Homo sapiens
tattcaatggctgga

SEQ ID NO: 1216429 - DNA, 15 bp, Homo sapiens
ttattcaatggctgg

SEQ ID NO: 1216430 - DNA, 15 bp, Homo sapiens
cttattcaatggctg

SEQ ID NO: 1216431 - DNA, 15 bp, Homo sapiens
ccttattcaatggct

SEQ ID NO: 1216432 - DNA, 15 bp, Homo sapiens
cccttattcaatggc

SEQ ID NO: 1216433 - DNA, 15 bp, Homo sapiens
acccttattcaatgg

SEQ ID NO: 1216434 - DNA, 15 bp, Homo sapiens
gacccttattcaatg

SEQ ID NO: 1216435 - DNA, 15 bp, Homo sapiens
agacccttattcaat

SEQ ID NO: 1216436 - DNA, 15 bp, Homo sapiens
aagacccttattcaa

SEQ ID NO: 1216437 - DNA, 15 bp, Homo sapiens
caagacccttattca

SEQ ID NO: 1216438 - DNA, 15 bp, Homo sapiens
tcaagacccttattc

SEQ ID NO: 1216439 - DNA, 15 bp, Homo sapiens
ttcaagacccttatt

SEQ ID NO: 1216440 - DNA, 15 bp, Homo sapiens
attcaagacccttat

SEQ ID NO: 1216441 - DNA, 15 bp, Homo sapiens
cattcaagaccctta

SEQ ID NO: 1216442 - DNA, 15 bp, Homo sapiens
gcattcaagaccctt

SEQ ID NO: 1216443 - DNA, 15 bp, Homo sapiens
ggcattcaagaccct

SEQ ID NO: 1216444 - DNA, 15 bp, Homo sapiens
tggcattcaagaccc

SEQ ID NO: 1216445 - DNA, 15 bp, Homo sapiens
ctggcattcaagacc

SEQ ID NO: 1216446 - DNA, 15 bp, Homo sapiens
actggcattcaagac

SEQ ID NO: 1216447 - DNA, 15 bp, Homo sapiens
cactggcattcaaga

SEQ ID NO: 1216448 - DNA, 15 bp, Homo sapiens
ccactggcattcaag

SEQ ID NO: 1216449 - DNA, 15 bp, Homo sapiens
cccactggcattcaa

SEQ ID NO: 1216450 - DNA, 15 bp, Homo sapiens
acccactggcattca

SEQ ID NO: 1216451 - DNA, 15 bp, Homo sapiens
cacccactggcattc

SEQ ID NO: 1216452 - DNA, 15 bp, Homo sapiens
acacccactggcatt

SEQ ID NO: 1216453 - DNA, 15 bp, Homo sapiens
aacacccactggcat

SEQ ID NO: 1216454 - DNA, 15 bp, Homo sapiens
aaacacccactggca

SEQ ID NO: 1216455 - DNA, 15 bp, Homo sapiens
aaaacacccactggc

SEQ ID NO: 1216456 - DNA, 15 bp, Homo sapiens
caaaacacccactgg

SEQ ID NO: 1216457 - DNA, 15 bp, Homo sapiens
acaaaacacccactg

SEQ ID NO: 1216458 - DNA, 15 bp, Homo sapiens
gacaaaacacccact

SEQ ID NO: 1216459 - DNA, 15 bp, Homo sapiens
agacaaaacacccac

SEQ ID NO: 1216460 - DNA, 15 bp, Homo sapiens
aagacaaaacaccca

SEQ ID NO: 1216461 - DNA, 15 bp, Homo sapiens
taagacaaaacaccc

SEQ ID NO: 1216462 - DNA, 15 bp, Homo sapiens
ctaagacaaaacacc

SEQ ID NO: 1216463 - DNA, 15 bp, Homo sapiens
actaagacaaaacac

SEQ ID NO: 1216464 - DNA, 15 bp, Homo sapiens
aactaagacaaaaca

SEQ ID NO: 1216465 - DNA, 15 bp, Homo sapiens
gaactaagacaaaac

SEQ ID NO: 1216466 - DNA, 15 bp, Homo sapiens
tgaactaagacaaaa

SEQ ID NO: 1216467 - DNA, 15 bp, Homo sapiens
atgaactaagacaaa

SEQ ID NO: 1216468 - DNA, 15 bp, Homo sapiens
catgaactaagacaa

SEQ ID NO: 1216469 - DNA, 15 bp, Homo sapiens
ccatgaactaagaca

SEQ ID NO: 1216470 - DNA, 15 bp, Homo sapiens
tccatgaactaagac

SEQ ID NO: 1216471 - DNA, 15 bp, Homo sapiens
ttccatgaactaaga

SEQ ID NO: 1216472 - DNA, 15 bp, Homo sapiens
cttccatgaactaag

SEQ ID NO: 1216473 - DNA, 15 bp, Homo sapiens
ccttccatgaactaa

SEQ ID NO: 1216474 - DNA, 15 bp, Homo sapiens
accttccatgaacta

SEQ ID NO: 1216475 - DNA, 15 bp, Homo sapiens
caccttccatgaact

SEQ ID NO: 1216476 - DNA, 15 bp, Homo sapiens
acaccttccatgaac

SEQ ID NO: 1216477 - DNA, 15 bp, Homo sapiens
tacaccttccatgaa

SEQ ID NO: 1216478 - DNA, 15 bp, Homo sapiens
atacaccttccatga

SEQ ID NO: 1216479 - DNA, 15 bp, Homo sapiens
aatacaccttccatg

SEQ ID NO: 1216480 - DNA, 15 bp, Homo sapiens
taatacaccttccat

SEQ ID NO: 1216481 - DNA, 15 bp, Homo sapiens
ctaatacaccttcca

SEQ ID NO: 1216482 - DNA, 15 bp, Homo sapiens
actaatacaccttcc

SEQ ID NO: 1216483 - DNA, 15 bp, Homo sapiens
gactaatacaccttc

SEQ ID NO: 1216484 - DNA, 15 bp, Homo sapiens
ggactaatacacctt

SEQ ID NO: 1216485 - DNA, 15 bp, Homo sapiens
cggactaatacacct

SEQ ID NO: 1216486 - DNA, 15 bp, Homo sapiens
acggactaatacacc

SEQ ID NO: 1216487 - DNA, 15 bp, Homo sapiens
aacggactaatacac

SEQ ID NO: 1216488 - DNA, 15 bp, Homo sapiens
aaacggactaataca

SEQ ID NO: 1216489 - DNA, 15 bp, Homo sapiens
aaaacggactaatac

SEQ ID NO: 1216490 - DNA, 15 bp, Homo sapiens
gagcagtgtgaaaac

SEQ ID NO: 1216491 - DNA, 15 bp, Homo sapiens
agagcagtgtgaaaa

SEQ ID NO: 1216492 - DNA, 15 bp, Homo sapiens
tagagcagtgtgaaa

SEQ ID NO: 1216493 - DNA, 15 bp, Homo sapiens
ttagagcagtgtgaa

SEQ ID NO: 1216494 - DNA, 15 bp, Homo sapiens
tttagagcagtgtga

SEQ ID NO: 1216495 - DNA, 15 bp, Homo sapiens
ctttagagcagtgtg

SEQ ID NO: 1216496 - DNA, 15 bp, Homo sapiens
tctttagagcagtgt

SEQ ID NO: 1216497 - DNA, 15 bp, Homo sapiens
ttctttagagcagtg

SEQ ID NO: 1216498 - DNA, 15 bp, Homo sapiens
gttctttagagcagt

SEQ ID NO: 1216499 - DNA, 15 bp, Homo sapiens
agttctttagagcag

SEQ ID NO: 1216500 - DNA, 15 bp, Homo sapiens
tagttctttagagca

SEQ ID NO: 1216501 - DNA, 15 bp, Homo sapiens
gtagttctttagagc

SEQ ID NO: 1216502 - DNA, 15 bp, Homo sapiens
ggtagttctttagag

SEQ ID NO: 1216503 - DNA, 15 bp, Homo sapiens
aggtagttctttaga

SEQ ID NO: 1216504 - DNA, 15 bp, Homo sapiens
caggtagttctttag

SEQ ID NO: 1216505 - DNA, 15 bp, Homo sapiens
tcaggtagttcttta

SEQ ID NO: 1216506 - DNA, 15 bp, Homo sapiens
ctcaggtagttcttt

SEQ ID NO: 1216507 - DNA, 15 bp, Homo sapiens
tctcaggtagttctt

SEQ ID NO: 1216508 - DNA, 15 bp, Homo sapiens
gtctcaggtagttct

SEQ ID NO: 1216509 - DNA, 15 bp, Homo sapiens
agtctcaggtagttc

SEQ ID NO: 1216510 - DNA, 15 bp, Homo sapiens
cagtctcaggtagtt

SEQ ID NO: 1216511 - DNA, 15 bp, Homo sapiens
ccagtctcaggtagt

SEQ ID NO: 1216512 - DNA, 15 bp, Homo sapiens
cccagtctcaggtag

SEQ ID NO: 1216513 - DNA, 15 bp, Homo sapiens
gttacccagtctcag

SEQ ID NO: 1216514 - DNA, 15 bp, Homo sapiens
agttacccagtctca

SEQ ID NO: 1216515 - DNA, 15 bp, Homo sapiens
aagttacccagtctc

SEQ ID NO: 1216516 - DNA, 15 bp, Homo sapiens
taagttacccagtct

SEQ ID NO: 1216517 - DNA, 15 bp, Homo sapiens
ataagttacccagtc

SEQ ID NO: 1216518 - DNA, 15 bp, Homo sapiens
tataagttacccagt

SEQ ID NO: 1216519 - DNA, 15 bp, Homo sapiens
ttataagttacccag

SEQ ID NO: 1216520 - DNA, 15 bp, Homo sapiens
tttataagttaccca

SEQ ID NO: 1216521 - DNA, 15 bp, Homo sapiens
ctttataagttaccc

SEQ ID NO: 1216522 - DNA, 15 bp, Homo sapiens
tctttataagttacc

SEQ ID NO: 1216523 - DNA, 15 bp, Homo sapiens
ttctttataagttac

SEQ ID NO: 1216524 - DNA, 15 bp, Homo sapiens
tttctttataagtta

SEQ ID NO: 1216525 - DNA, 15 bp, Homo sapiens
ttttctttataagtt

SEQ ID NO: 1216526 - DNA, 15 bp, Homo sapiens
cttttctttataagt

SEQ ID NO: 1216527 - DNA, 15 bp, Homo sapiens
tcttttctttataag

SEQ ID NO: 1216528 - DNA, 15 bp, Homo sapiens
ctcttttctttataa

SEQ ID NO: 1216529 - DNA, 15 bp, Homo sapiens
cctcttttctttata

SEQ ID NO: 1216530 - DNA, 15 bp, Homo sapiens
acctcttttctttat

SEQ ID NO: 1216531 - DNA, 15 bp, Homo sapiens
aacctcttttcttta

SEQ ID NO: 1216532 - DNA, 15 bp, Homo sapiens
aaacctcttttcttt

SEQ ID NO: 1216533 - DNA, 15 bp, Homo sapiens
taaacctcttttctt

SEQ ID NO: 1216534 - DNA, 15 bp, Homo sapiens
ttaaacctcttttct

SEQ ID NO: 1216535 - DNA, 15 bp, Homo sapiens
attaaacctcttttc

SEQ ID NO: 1216536 - DNA, 15 bp, Homo sapiens
aattaaacctctttt

SEQ ID NO: 1216537 - DNA, 15 bp, Homo sapiens
caattaaacctcttt

SEQ ID NO: 1216538 - DNA, 15 bp, Homo sapiens
tcaattaaacctctt

SEQ ID NO: 1216539 - DNA, 15 bp, Homo sapiens
gtcaattaaacctct

SEQ ID NO: 1216540 - DNA, 15 bp, Homo sapiens
agtcaattaaacctc

SEQ ID NO: 1216541 - DNA, 15 bp, Homo sapiens
gagtcaattaaacct

SEQ ID NO: 1216542 - DNA, 15 bp, Homo sapiens
tgagtcaattaaacc

SEQ ID NO: 1216543 - DNA, 15 bp, Homo sapiens
ctgagtcaattaaac

SEQ ID NO: 1216544 - DNA, 15 bp, Homo sapiens
tctgagtcaattaaa

SEQ ID NO: 1216545 - DNA, 15 bp, Homo sapiens
ctctgagtcaattaa

SEQ ID NO: 1216546 - DNA, 15 bp, Homo sapiens
actctgagtcaatta

SEQ ID NO: 1216547 - DNA, 15 bp, Homo sapiens
aactctgagtcaatt

SEQ ID NO: 1216548 - DNA, 15 bp, Homo sapiens
gaactctgagtcaat

SEQ ID NO: 1216549 - DNA, 15 bp, Homo sapiens
ggaactctgagtcaa

SEQ ID NO: 1216550 - DNA, 15 bp, Homo sapiens
aggaactctgagtca

SEQ ID NO: 1216551 - DNA, 15 bp, Homo sapiens
gaggaactctgagtc

SEQ ID NO: 1216552 - DNA, 15 bp, Homo sapiens
tgaggaactctgagt

SEQ ID NO: 1216553 - DNA, 15 bp, Homo sapiens
atgaggaactctgag

SEQ ID NO: 1216554 - DNA, 15 bp, Homo sapiens
catgaggaactctga

SEQ ID NO: 1216555 - DNA, 15 bp, Homo sapiens
ccatgaggaactctg

SEQ ID NO: 1216556 - DNA, 15 bp, Homo sapiens
gccatgaggaactct

SEQ ID NO: 1216557 - DNA, 15 bp, Homo sapiens
agccatgaggaactc

SEQ ID NO: 1216558 - DNA, 15 bp, Homo sapiens
cagccatgaggaact

SEQ ID NO: 1216559 - DNA, 15 bp, Homo sapiens
ccagccatgaggaac

SEQ ID NO: 1216560 - DNA, 15 bp, Homo sapiens
cccagccatgaggaa

SEQ ID NO: 1216561 - DNA, 15 bp, Homo sapiens
ccccagccatgagga

SEQ ID NO: 1216562 - DNA, 15 bp, Homo sapiens
tccccagccatgagg

SEQ ID NO: 1216563 - DNA, 15 bp, Homo sapiens
ctccccagccatgag

SEQ ID NO: 1216564 - DNA, 15 bp, Homo sapiens
cctccccagccatga

SEQ ID NO: 1216565 - DNA, 15 bp, Homo sapiens
cctgaggcctcccca

SEQ ID NO: 1216566 - DNA, 15 bp, Homo sapiens
tcctgaggcctcccc

SEQ ID NO: 1216567 - DNA, 15 bp, Homo sapiens
ttcctgaggcctccc

SEQ ID NO: 1216568 - DNA, 15 bp, Homo sapiens
tttcctgaggcctcc

SEQ ID NO: 1216569 - DNA, 15 bp, Homo sapiens
gtttcctgaggcctc

SEQ ID NO: 1216570 - DNA, 15 bp, Homo sapiens
agtttcctgaggcct

SEQ ID NO: 1216571 - DNA, 15 bp, Homo sapiens
aagtttcctgaggcc

SEQ ID NO: 1216572 - DNA, 15 bp, Homo sapiens
taagtttcctgaggc

SEQ ID NO: 1216573 - DNA, 15 bp, Homo sapiens
gtaagtttcctgagg

SEQ ID NO: 1216574 - DNA, 15 bp, Homo sapiens
tgtaagtttcctgag

SEQ ID NO: 1216575 - DNA, 15 bp, Homo sapiens
ttgtaagtttcctga

SEQ ID NO: 1216576 - DNA, 15 bp, Homo sapiens
attgtaagtttcctg

SEQ ID NO: 1216577 - DNA, 15 bp, Homo sapiens
gattgtaagtttcct

SEQ ID NO: 1216578 - DNA, 15 bp, Homo sapiens
tgattgtaagtttcc

SEQ ID NO: 1216579 - DNA, 15 bp, Homo sapiens
atgattgtaagtttc

SEQ ID NO: 1216580 - DNA, 15 bp, Homo sapiens
catgattgtaagttt

SEQ ID NO: 1216581 - DNA, 15 bp, Homo sapiens
ccatgattgtaagtt

SEQ ID NO: 1216582 - DNA, 15 bp, Homo sapiens
accatgattgtaagt

SEQ ID NO: 1216583 - DNA, 15 bp, Homo sapiens
caccatgattgtaag

SEQ ID NO: 1216584 - DNA, 15 bp, Homo sapiens
ccaccatgattgtaa

SEQ ID NO: 1216585 - DNA, 15 bp, Homo sapiens
tccaccatgattgta

SEQ ID NO: 1216586 - DNA, 15 bp, Homo sapiens
ttccaccatgattgt

SEQ ID NO: 1216587 - DNA, 15 bp, Homo sapiens
cttccaccatgattg

SEQ ID NO: 1216588 - DNA, 15 bp, Homo sapiens
ccttccaccatgatt

SEQ ID NO: 1216589 - DNA, 15 bp, Homo sapiens
gccttccaccatgat

SEQ ID NO: 1216590 - DNA, 15 bp, Homo sapiens
tgccttccaccatga

SEQ ID NO: 1216591 - DNA, 15 bp, Homo sapiens
ttgccttccaccatg

SEQ ID NO: 1216592 - DNA, 15 bp, Homo sapiens
tttgccttccaccat

SEQ ID NO: 1216593 - DNA, 15 bp, Homo sapiens
ctttgccttccacca

SEQ ID NO: 1216594 - DNA, 15 bp, Homo sapiens
cctttgccttccacc

SEQ ID NO: 1216595 - DNA, 15 bp, Homo sapiens
ccctttgccttccac

SEQ ID NO: 1216596 - DNA, 15 bp, Homo sapiens
cccctttgccttcca

SEQ ID NO: 1216597 - DNA, 15 bp, Homo sapiens
tcccctttgccttcc

SEQ ID NO: 1216598 - DNA, 15 bp, Homo sapiens
ttcccctttgccttc

SEQ ID NO: 1216599 - DNA, 15 bp, Homo sapiens
cttcccctttgcctt

SEQ ID NO: 1216600 - DNA, 15 bp, Homo sapiens
gcttcccctttgcct

SEQ ID NO: 1216601 - DNA, 15 bp, Homo sapiens
tgcttcccctttgcc

SEQ ID NO: 1216602 - DNA, 15 bp, Homo sapiens
ttgcttcccctttgc

SEQ ID NO: 1216603 - DNA, 15 bp, Homo sapiens
cttgcttcccctttg

SEQ ID NO: 1216604 - DNA, 15 bp, Homo sapiens
ccttgcttccccttt

SEQ ID NO: 1216605 - DNA, 15 bp, Homo sapiens
accttgcttcccctt

SEQ ID NO: 1216606 - DNA, 15 bp, Homo sapiens
taccttgcttcccct

SEQ ID NO: 1216607 - DNA, 15 bp, Homo sapiens
gtaccttgcttcccc

SEQ ID NO: 1216608 - DNA, 15 bp, Homo sapiens
tgtaccttgcttccc

SEQ ID NO: 1216609 - DNA, 15 bp, Homo sapiens
atgtaccttgcttcc

SEQ ID NO: 1216610 - DNA, 15 bp, Homo sapiens
gatgtaccttgcttc

SEQ ID NO: 1216611 - DNA, 15 bp, Homo sapiens
agatgtaccttgctt

SEQ ID NO: 1216612 - DNA, 15 bp, Homo sapiens
aagatgtaccttgct

SEQ ID NO: 1216613 - DNA, 15 bp, Homo sapiens
taagatgtaccttgc

SEQ ID NO: 1216614 - DNA, 15 bp, Homo sapiens
gtaagatgtaccttg

SEQ ID NO: 1216615 - DNA, 15 bp, Homo sapiens
tgtaagatgtacctt

SEQ ID NO: 1216616 - DNA, 15 bp, Homo sapiens
atgtaagatgtacct

SEQ ID NO: 1216617 - DNA, 15 bp, Homo sapiens
catgtaagatgtacc

SEQ ID NO: 1216618 - DNA, 15 bp, Homo sapiens
ccatgtaagatgtac

SEQ ID NO: 1216619 - DNA, 15 bp, Homo sapiens
accatgtaagatgta

SEQ ID NO: 1216620 - DNA, 15 bp, Homo sapiens
caccatgtaagatgt

SEQ ID NO: 1216621 - DNA, 15 bp, Homo sapiens
ccaccatgtaagatg

SEQ ID NO: 1216622 - DNA, 15 bp, Homo sapiens
gccaccatgtaagat

SEQ ID NO: 1216623 - DNA, 15 bp, Homo sapiens
tgccaccatgtaaga

SEQ ID NO: 1216624 - DNA, 15 bp, Homo sapiens
ctgccaccatgtaag

SEQ ID NO: 1216625 - DNA, 15 bp, Homo sapiens
cctgccaccatgtaa

SEQ ID NO: 1216626 - DNA, 15 bp, Homo sapiens
tcctgccaccatgta

SEQ ID NO: 1216627 - DNA, 15 bp, Homo sapiens
ctcctgccaccatgt

SEQ ID NO: 1216628 - DNA, 15 bp, Homo sapiens
tctcctgccaccatg

SEQ ID NO: 1216629 - DNA, 15 bp, Homo sapiens
ctctcctgccaccat

SEQ ID NO: 1216630 - DNA, 15 bp, Homo sapiens
tctctcctgccacca

SEQ ID NO: 1216631 - DNA, 15 bp, Homo sapiens
ttctctcctgccacc

SEQ ID NO: 1216632 - DNA, 15 bp, Homo sapiens
cttctctcctgccac

SEQ ID NO: 1216633 - DNA, 15 bp, Homo sapiens
tcttctctcctgcca

SEQ ID NO: 1216634 - DNA, 15 bp, Homo sapiens
ttcttctctcctgcc

SEQ ID NO: 1216635 - DNA, 15 bp, Homo sapiens
attcttctctcctgc

SEQ ID NO: 1216636 - DNA, 15 bp, Homo sapiens
cattcttctctcctg

SEQ ID NO: 1216637 - DNA, 15 bp, Homo sapiens
tcattcttctctcct

SEQ ID NO: 1216638 - DNA, 15 bp, Homo sapiens
ctcattcttctctcc

SEQ ID NO: 1216639 - DNA, 15 bp, Homo sapiens
cctcattcttctctc

SEQ ID NO: 1216640 - DNA, 15 bp, Homo sapiens
ccctcattcttctct

SEQ ID NO: 1216641 - DNA, 15 bp, Homo sapiens
cccctcattcttctc

SEQ ID NO: 1216642 - DNA, 15 bp, Homo sapiens
tcccctcattcttct

SEQ ID NO: 1216643 - DNA, 15 bp, Homo sapiens
ctcccctcattcttc

SEQ ID NO: 1216644 - DNA, 15 bp, Homo sapiens
cctcccctcattctt

SEQ ID NO: 1216645 - DNA, 15 bp, Homo sapiens
tcctcccctcattct

SEQ ID NO: 1216646 - DNA, 15 bp, Homo sapiens
ttcctcccctcattc

SEQ ID NO: 1216647 - DNA, 15 bp, Homo sapiens
gttcctcccctcatt

SEQ ID NO: 1216648 - DNA, 15 bp, Homo sapiens
agttcctcccctcat

SEQ ID NO: 1216649 - DNA, 15 bp, Homo sapiens
cagttcctcccctca

SEQ ID NO: 1216650 - DNA, 15 bp, Homo sapiens
gcagttcctcccctc

SEQ ID NO: 1216651 - DNA, 15 bp, Homo sapiens
ggcagttcctcccct

SEQ ID NO: 1216652 - DNA, 15 bp, Homo sapiens
tggcagttcctcccc

SEQ ID NO: 1216653 - DNA, 15 bp, Homo sapiens
ttggcagttcctccc

SEQ ID NO: 1216654 - DNA, 15 bp, Homo sapiens
tttggcagttcctcc

SEQ ID NO: 1216655 - DNA, 15 bp, Homo sapiens
ttttggcagttcctc

SEQ ID NO: 1216656 - DNA, 15 bp, Homo sapiens
tttttggcagttcct

SEQ ID NO: 1216657 - DNA, 15 bp, Homo sapiens
gtttttggcagttcc

SEQ ID NO: 1216658 - DNA, 15 bp, Homo sapiens
agtttttggcagttc

SEQ ID NO: 1216659 - DNA, 15 bp, Homo sapiens
aagtttttggcagtt

SEQ ID NO: 1216660 - DNA, 15 bp, Homo sapiens
aaagtttttggcagt

SEQ ID NO: 1216661 - DNA, 15 bp, Homo sapiens
aaaagtttttggcag

SEQ ID NO: 1216662 - DNA, 15 bp, Homo sapiens
taaaagtttttggca

SEQ ID NO: 1216663 - DNA, 15 bp, Homo sapiens
ttaaaagtttttggc

SEQ ID NO: 1216664 - DNA, 15 bp, Homo sapiens
tttaaaagtttttgg

SEQ ID NO: 1216665 - DNA, 15 bp, Homo sapiens
gtttaaaagtttttg

SEQ ID NO: 1216666 - DNA, 15 bp, Homo sapiens
ggtttaaaagttttt

SEQ ID NO: 1216667 - DNA, 15 bp, Homo sapiens
tggtttaaaagtttt

SEQ ID NO: 1216668 - DNA, 15 bp, Homo sapiens
atggtttaaaagttt

SEQ ID NO: 1216669 - DNA, 15 bp, Homo sapiens
tatggtttaaaagtt

SEQ ID NO: 1216670 - DNA, 15 bp, Homo sapiens
ttatggtttaaaagt

SEQ ID NO: 1216671 - DNA, 15 bp, Homo sapiens
cttatggtttaaaag

SEQ ID NO: 1216672 - DNA, 15 bp, Homo sapiens
tcttatggtttaaaa

SEQ ID NO: 1216673 - DNA, 15 bp, Homo sapiens
ctcttatggtttaaa

SEQ ID NO: 1216674 - DNA, 15 bp, Homo sapiens
actcttatggtttaa

SEQ ID NO: 1216675 - DNA, 15 bp, Homo sapiens
cactcttatggttta

SEQ ID NO: 1216676 - DNA, 15 bp, Homo sapiens
acactcttatggttt

SEQ ID NO: 1216677 - DNA, 15 bp, Homo sapiens
tacactcttatggtt

SEQ ID NO: 1216678 - DNA, 15 bp, Homo sapiens
ttacactcttatggt

SEQ ID NO: 1216679 - DNA, 15 bp, Homo sapiens
tttacactcttatgg

SEQ ID NO: 1216680 - DNA, 15 bp, Homo sapiens
gtttacactcttatg

SEQ ID NO: 1216681 - DNA, 15 bp, Homo sapiens
agtttacactcttat

SEQ ID NO: 1216682 - DNA, 15 bp, Homo sapiens
aagtttacactctta

SEQ ID NO: 1216683 - DNA, 15 bp, Homo sapiens
aaagtttacactctt

SEQ ID NO: 1216684 - DNA, 15 bp, Homo sapiens
aaaagtttacactct

SEQ ID NO: 1216685 - DNA, 15 bp, Homo sapiens
aaaaagtttacactc

SEQ ID NO: 1216686 - DNA, 15 bp, Homo sapiens
taaaaagtttacact

SEQ ID NO: 1216687 - DNA, 15 bp, Homo sapiens
ttaaaaagtttacac

SEQ ID NO: 1216688 - DNA, 15 bp, Homo sapiens
tttaaaaagtttaca

SEQ ID NO: 1216689 - DNA, 15 bp, Homo sapiens
gtttaaaaagtttac

SEQ ID NO: 1216690 - DNA, 15 bp, Homo sapiens
agtttaaaaagttta

SEQ ID NO: 1216691 - DNA, 15 bp, Homo sapiens
gagtttaaaaagttt

SEQ ID NO: 1216692 - DNA, 15 bp, Homo sapiens
tgagtttaaaaagtt

SEQ ID NO: 1216693 - DNA, 15 bp, Homo sapiens
gtgagtttaaaaagt

SEQ ID NO: 1216694 - DNA, 15 bp, Homo sapiens
agtgagtttaaaaag

SEQ ID NO: 1216695 - DNA, 15 bp, Homo sapiens
gagtgagtttaaaaa

SEQ ID NO: 1216696 - DNA, 15 bp, Homo sapiens
tgagtgagtttaaaa

SEQ ID NO: 1216697 - DNA, 15 bp, Homo sapiens
gtgagtgagtttaaa

SEQ ID NO: 1216698 - DNA, 15 bp, Homo sapiens
agtgagtgagtttaa

SEQ ID NO: 1216699 - DNA, 15 bp, Homo sapiens
tagtgagtgagttta

SEQ ID NO: 1216700 - DNA, 15 bp, Homo sapiens
atagtgagtgagttt

SEQ ID NO: 1216701 - DNA, 15 bp, Homo sapiens
gatagtgagtgagtt

SEQ ID NO: 1216702 - DNA, 15 bp, Homo sapiens
tgatagtgagtgagt

SEQ ID NO: 1216703 - DNA, 15 bp, Homo sapiens
atgatagtgagtgag

SEQ ID NO: 1216704 - DNA, 15 bp, Homo sapiens
catgatagtgagtga

SEQ ID NO: 1216705 - DNA, 15 bp, Homo sapiens
tcatgatagtgagtg

SEQ ID NO: 1216706 - DNA, 15 bp, Homo sapiens
ctcatgatagtgagt

SEQ ID NO: 1216707 - DNA, 15 bp, Homo sapiens
tctcatgatagtgag

SEQ ID NO: 1216708 - DNA, 15 bp, Homo sapiens
ttctcatgatagtga

SEQ ID NO: 1216709 - DNA, 15 bp, Homo sapiens
gttctcatgatagtg

SEQ ID NO: 1216710 - DNA, 15 bp, Homo sapiens
tgttctcatgatagt

SEQ ID NO: 1216711 - DNA, 15 bp, Homo sapiens
ctgttctcatgatag

SEQ ID NO: 1216712 - DNA, 15 bp, Homo sapiens
gctgttctcatgata

SEQ ID NO: 1216713 - DNA, 15 bp, Homo sapiens
tgctgttctcatgat

SEQ ID NO: 1216714 - DNA, 15 bp, Homo sapiens
tatgctgttctcatg

SEQ ID NO: 1216715 - DNA, 15 bp, Homo sapiens
ctatgctgttctcat

SEQ ID NO: 1216716 - DNA, 15 bp, Homo sapiens
tctatgctgttctca

SEQ ID NO: 1216717 - DNA, 15 bp, Homo sapiens
ctctatgctgttctc

SEQ ID NO: 1216718 - DNA, 15 bp, Homo sapiens
cctctatgctgttct

SEQ ID NO: 1216719 - DNA, 15 bp, Homo sapiens
tcctctatgctgttc

SEQ ID NO: 1216720 - DNA, 15 bp, Homo sapiens
ttcctctatgctgtt

SEQ ID NO: 1216721 - DNA, 15 bp, Homo sapiens
tttcctctatgctgt

SEQ ID NO: 1216722 - DNA, 15 bp, Homo sapiens
atttcctctatgctg

SEQ ID NO: 1216723 - DNA, 15 bp, Homo sapiens
gatttcctctatgct

SEQ ID NO: 1216724 - DNA, 15 bp, Homo sapiens
agatttcctctatgc

SEQ ID NO: 1216725 - DNA, 15 bp, Homo sapiens
tagatttcctctatg

SEQ ID NO: 1216726 - DNA, 15 bp, Homo sapiens
gtagatttcctctat

SEQ ID NO: 1216727 - DNA, 15 bp, Homo sapiens
ggtagatttcctcta

SEQ ID NO: 1216728 - DNA, 15 bp, Homo sapiens
aggtagatttcctct

SEQ ID NO: 1216729 - DNA, 15 bp, Homo sapiens
aaggtagatttcctc

SEQ ID NO: 1216730 - DNA, 15 bp, Homo sapiens
aaaggtagatttcct

SEQ ID NO: 1216731 - DNA, 15 bp, Homo sapiens
taaaggtagatttcc

SEQ ID NO: 1216732 - DNA, 15 bp, Homo sapiens
ataaaggtagatttc

SEQ ID NO: 1216733 - DNA, 15 bp, Homo sapiens
cataaaggtagattt

SEQ ID NO: 1216734 - DNA, 15 bp, Homo sapiens
tcataaaggtagatt

SEQ ID NO: 1216735 - DNA, 15 bp, Homo sapiens
atcataaaggtagat

SEQ ID NO: 1216736 - DNA, 15 bp, Homo sapiens
gatcataaaggtaga

SEQ ID NO: 1216737 - DNA, 15 bp, Homo sapiens
ggatcataaaggtag

SEQ ID NO: 1216738 - DNA, 15 bp, Homo sapiens
tggatcataaaggta

SEQ ID NO: 1216739 - DNA, 15 bp, Homo sapiens
ttggatcataaaggt

SEQ ID NO: 1216740 - DNA, 15 bp, Homo sapiens
attggatcataaagg

SEQ ID NO: 1216741 - DNA, 15 bp, Homo sapiens
gattggatcataaag

SEQ ID NO: 1216742 - DNA, 15 bp, Homo sapiens
tgattggatcataaa

SEQ ID NO: 1216743 - DNA, 15 bp, Homo sapiens
gtgattggatcataa

SEQ ID NO: 1216744 - DNA, 15 bp, Homo sapiens
ggtgattggatcata

SEQ ID NO: 1216745 - DNA, 15 bp, Homo sapiens
aggtgattggatcat

SEQ ID NO: 1216746 - DNA, 15 bp, Homo sapiens
gaggtgattggatca

SEQ ID NO: 1216747 - DNA, 15 bp, Homo sapiens
ggaggtgattggatc

SEQ ID NO: 1216748 - DNA, 15 bp, Homo sapiens
gggaggtgattggat

SEQ ID NO: 1216749 - DNA, 15 bp, Homo sapiens
tgggaggtgattgga

SEQ ID NO: 1216750 - DNA, 15 bp, Homo sapiens
gtgggaggtgattgg

SEQ ID NO: 1216751 - DNA, 15 bp, Homo sapiens
ggtgggaggtgattg

SEQ ID NO: 1216752 - DNA, 15 bp, Homo sapiens
tggtgggaggtgatt

SEQ ID NO: 1216753 - DNA, 15 bp, Homo sapiens
ctggtgggaggtgat

SEQ ID NO: 1216754 - DNA, 15 bp, Homo sapiens
tctggtgggaggtga

SEQ ID NO: 1216755 - DNA, 15 bp, Homo sapiens
atctggtgggaggtg

SEQ ID NO: 1216756 - DNA, 15 bp, Homo sapiens
gatctggtgggaggt

SEQ ID NO: 1216757 - DNA, 15 bp, Homo sapiens
ggatctggtgggagg

SEQ ID NO: 1216758 - DNA, 15 bp, Homo sapiens
gggatctggtgggag

SEQ ID NO: 1216759 - DNA, 15 bp, Homo sapiens
agggatctggtggga

SEQ ID NO: 1216760 - DNA, 15 bp, Homo sapiens
gagggatctggtggg

SEQ ID NO: 1216761 - DNA, 15 bp, Homo sapiens
ggagggatctggtgg

SEQ ID NO: 1216762 - DNA, 15 bp, Homo sapiens
gggagggatctggtg

SEQ ID NO: 1216763 - DNA, 15 bp, Homo sapiens
agggagggatctggt

SEQ ID NO: 1216764 - DNA, 15 bp, Homo sapiens
gagggagggatctgg

SEQ ID NO: 1216765 - DNA, 15 bp, Homo sapiens
cgagggagggatctg

SEQ ID NO: 1216766 - DNA, 15 bp, Homo sapiens
tcgagggagggatct

SEQ ID NO: 1216767 - DNA, 15 bp, Homo sapiens
gtcgagggagggatc

SEQ ID NO: 1216768 - DNA, 15 bp, Homo sapiens
tgtcgagggagggat

SEQ ID NO: 1216769 - DNA, 15 bp, Homo sapiens
gtgtcgagggaggga

SEQ ID NO: 1216770 - DNA, 15 bp, Homo sapiens
cgtgtcgagggaggg

SEQ ID NO: 1216771 - DNA, 15 bp, Homo sapiens
acgtgtcgagggagg

SEQ ID NO: 1216772 - DNA, 15 bp, Homo sapiens
cacgtgtcgagggag

SEQ ID NO: 1216773 - DNA, 15 bp, Homo sapiens
ccacgtgtcgaggga

SEQ ID NO: 1216774 - DNA, 15 bp, Homo sapiens
cccacgtgtcgaggg

SEQ ID NO: 1216775 - DNA, 15 bp, Homo sapiens
ccccacgtgtcgagg

SEQ ID NO: 1216776 - DNA, 15 bp, Homo sapiens
tccccacgtgtcgag

SEQ ID NO: 1216777 - DNA, 15 bp, Homo sapiens
atccccacgtgtcga

SEQ ID NO: 1216778 - DNA, 15 bp, Homo sapiens
aatccccacgtgtcg

SEQ ID NO: 1216779 - DNA, 15 bp, Homo sapiens
taatccccacgtgtc

SEQ ID NO: 1216780 - DNA, 15 bp, Homo sapiens
gtaatccccacgtgt

SEQ ID NO: 1216781 - DNA, 15 bp, Homo sapiens
tgtaatccccacgtg

SEQ ID NO: 1216782 - DNA, 15 bp, Homo sapiens
ttgtaatccccacgt

SEQ ID NO: 1216783 - DNA, 15 bp, Homo sapiens
attgtaatccccacg

SEQ ID NO: 1216784 - DNA, 15 bp, Homo sapiens
aattgtaatccccac

SEQ ID NO: 1216785 - DNA, 15 bp, Homo sapiens
aaattgtaatcccca

SEQ ID NO: 1216786 - DNA, 15 bp, Homo sapiens
gaaattgtaatcccc

SEQ ID NO: 1216787 - DNA, 15 bp, Homo sapiens
cgaaattgtaatccc

SEQ ID NO: 1216788 - DNA, 15 bp, Homo sapiens
ccgaaattgtaatcc

SEQ ID NO: 1216789 - DNA, 15 bp, Homo sapiens
tccgaaattgtaatc

SEQ ID NO: 1216790 - DNA, 15 bp, Homo sapiens
atccgaaattgtaat

SEQ ID NO: 1216791 - DNA, 15 bp, Homo sapiens
catccgaaattgtaa

SEQ ID NO: 1216792 - DNA, 15 bp, Homo sapiens
tcatccgaaattgta

SEQ ID NO: 1216793 - DNA, 15 bp, Homo sapiens
ctcatccgaaattgt

SEQ ID NO: 1216794 - DNA, 15 bp, Homo sapiens
tctcatccgaaattg

SEQ ID NO: 1216795 - DNA, 15 bp, Homo sapiens
atctcatccgaaatt

SEQ ID NO: 1216796 - DNA, 15 bp, Homo sapiens
aatctcatccgaaat

SEQ ID NO: 1216797 - DNA, 15 bp, Homo sapiens
gaatctcatccgaaa

SEQ ID NO: 1216798 - DNA, 15 bp, Homo sapiens
cgaatctcatccgaa

SEQ ID NO: 1216799 - DNA, 15 bp, Homo sapiens
ccgaatctcatccga

SEQ ID NO: 1216800 - DNA, 15 bp, Homo sapiens
cccgaatctcatccg

SEQ ID NO: 1216801 - DNA, 15 bp, Homo sapiens
acccgaatctcatcc

SEQ ID NO: 1216802 - DNA, 15 bp, Homo sapiens
cacccgaatctcatc

SEQ ID NO: 1216803 - DNA, 15 bp, Homo sapiens
ccacccgaatctcat

SEQ ID NO: 1216804 - DNA, 15 bp, Homo sapiens
cccacccgaatctca

SEQ ID NO: 1216805 - DNA, 15 bp, Homo sapiens
ccccacccgaatctc

SEQ ID NO: 1216806 - DNA, 15 bp, Homo sapiens
tccccacccgaatct

SEQ ID NO: 1216807 - DNA, 15 bp, Homo sapiens
gtccccacccgaatc

SEQ ID NO: 1216808 - DNA, 15 bp, Homo sapiens
tgtccccacccgaat

SEQ ID NO: 1216809 - DNA, 15 bp, Homo sapiens
gtgtccccacccgaa

SEQ ID NO: 1216810 - DNA, 15 bp, Homo sapiens
tgtgtccccacccga

SEQ ID NO: 1216811 - DNA, 15 bp, Homo sapiens
ctgtgtccccacccg

SEQ ID NO: 1216812 - DNA, 15 bp, Homo sapiens
ctgatatggtttggc

SEQ ID NO: 1216813 - DNA, 15 bp, Homo sapiens
tctgatatggtttgg

SEQ ID NO: 1216814 - DNA, 15 bp, Homo sapiens
ctctgatatggtttg

SEQ ID NO: 1216815 - DNA, 15 bp, Homo sapiens
tctctgatatggttt

SEQ ID NO: 1216816 - DNA, 15 bp, Homo sapiens
ctctctgatatggtt

SEQ ID NO: 1216817 - DNA, 15 bp, Homo sapiens
actctctgatatggt

SEQ ID NO: 1216818 - DNA, 15 bp, Homo sapiens
gactctctgatatgg

SEQ ID NO: 1216819 - DNA, 15 bp, Homo sapiens
agactctctgatatg

SEQ ID NO: 1216820 - DNA, 15 bp, Homo sapiens
gagactctctgatat

SEQ ID NO: 1216821 - DNA, 15 bp, Homo sapiens
ggagactctctgata

SEQ ID NO: 1216822 - DNA, 15 bp, Homo sapiens
gggagactctctgat

SEQ ID NO: 1216823 - DNA, 15 bp, Homo sapiens
ggggagactctctga

SEQ ID NO: 1216824 - DNA, 15 bp, Homo sapiens
tggggagactctctg

SEQ ID NO: 1216825 - DNA, 15 bp, Homo sapiens
ctggggagactctct

SEQ ID NO: 1216826 - DNA, 15 bp, Homo sapiens
tctggggagactctc

SEQ ID NO: 1216827 - DNA, 15 bp, Homo sapiens
atctggggagactct

SEQ ID NO: 1216828 - DNA, 15 bp, Homo sapiens
catctggggagactc

SEQ ID NO: 1216829 - DNA, 15 bp, Homo sapiens
gcatctggggagact

SEQ ID NO: 1216830 - DNA, 15 bp, Homo sapiens
ggcatctggggagac

SEQ ID NO: 1216831 - DNA, 15 bp, Homo sapiens
tggcatctggggaga

SEQ ID NO: 1216832 - DNA, 15 bp, Homo sapiens
gtggcatctggggag

SEQ ID NO: 1216833 - DNA, 15 bp, Homo sapiens
tgtggcatctgggga

SEQ ID NO: 1216834 - DNA, 15 bp, Homo sapiens
ctgtggcatctgggg

SEQ ID NO: 1216835 - DNA, 15 bp, Homo sapiens
cctgtggcatctggg

SEQ ID NO: 1216836 - DNA, 15 bp, Homo sapiens
gcctgtggcatctgg

SEQ ID NO: 1216837 - DNA, 15 bp, Homo sapiens
tgcctgtggcatctg

SEQ ID NO: 1216838 - DNA, 15 bp, Homo sapiens
atgcctgtggcatct

SEQ ID NO: 1216839 - DNA, 15 bp, Homo sapiens
gatgcctgtggcatc

SEQ ID NO: 1216840 - DNA, 15 bp, Homo sapiens
ggatgcctgtggcat

SEQ ID NO: 1216841 - DNA, 15 bp, Homo sapiens
aggatgcctgtggca

SEQ ID NO: 1216842 - DNA, 15 bp, Homo sapiens
gaggatgcctgtggc

SEQ ID NO: 1216843 - DNA, 15 bp, Homo sapiens
ggaggatgcctgtgg

SEQ ID NO: 1216844 - DNA, 15 bp, Homo sapiens
tggaggatgcctgtg

SEQ ID NO: 1216845 - DNA, 15 bp, Homo sapiens
atggaggatgcctgt

SEQ ID NO: 1216846 - DNA, 15 bp, Homo sapiens
aatggaggatgcctg

SEQ ID NO: 1216847 - DNA, 15 bp, Homo sapiens
caatggaggatgcct

SEQ ID NO: 1216848 - DNA, 15 bp, Homo sapiens
ccaatggaggatgcc

SEQ ID NO: 1216849 - DNA, 15 bp, Homo sapiens
tccaatggaggatgc

SEQ ID NO: 1216850 - DNA, 15 bp, Homo sapiens
ttccaatggaggatg

SEQ ID NO: 1216851 - DNA, 15 bp, Homo sapiens
cttccaatggaggat

SEQ ID NO: 1216852 - DNA, 15 bp, Homo sapiens
ccttccaatggagga

SEQ ID NO: 1216853 - DNA, 15 bp, Homo sapiens
gccttccaatggagg

SEQ ID NO: 1216854 - DNA, 15 bp, Homo sapiens
agccttccaatggag

SEQ ID NO: 1216855 - DNA, 15 bp, Homo sapiens
gagccttccaatgga

SEQ ID NO: 1216856 - DNA, 15 bp, Homo sapiens
ggagccttccaatgg

SEQ ID NO: 1216857 - DNA, 15 bp, Homo sapiens
gggagccttccaatg

SEQ ID NO: 1216858 - DNA, 15 bp, Homo sapiens
ggggagccttccaat

SEQ ID NO: 1216859 - DNA, 15 bp, Homo sapiens
tggggagccttccaa

SEQ ID NO: 1216860 - DNA, 15 bp, Homo sapiens
gtggggagccttcca

SEQ ID NO: 1216861 - DNA, 15 bp, Homo sapiens
ggtggggagccttcc

SEQ ID NO: 1216862 - DNA, 15 bp, Homo sapiens
cggtggggagccttc

SEQ ID NO: 1216863 - DNA, 15 bp, Homo sapiens
gcggtggggagcctt

SEQ ID NO: 1216864 - DNA, 15 bp, Homo sapiens
agcggtggggagcct

SEQ ID NO: 1216865 - DNA, 15 bp, Homo sapiens
gagcggtggggagcc

SEQ ID NO: 1216866 - DNA, 15 bp, Homo sapiens
agagcggtggggagc

SEQ ID NO: 1216867 - DNA, 15 bp, Homo sapiens
gagagcggtggggag

SEQ ID NO: 1216868 - DNA, 15 bp, Homo sapiens
tgagagcggtgggga

SEQ ID NO: 1216869 - DNA, 15 bp, Homo sapiens
gtgagagcggtgggg

SEQ ID NO: 1216870 - DNA, 15 bp, Homo sapiens
tgtgagagcggtggg

SEQ ID NO: 1216871 - DNA, 15 bp, Homo sapiens
ttgtgagagcggtgg

SEQ ID NO: 1216872 - DNA, 15 bp, Homo sapiens
tttgtgagagcggtg

SEQ ID NO: 1216873 - DNA, 15 bp, Homo sapiens
ctttgtgagagcggt

SEQ ID NO: 1216874 - DNA, 15 bp, Homo sapiens
actttgtgagagcgg

SEQ ID NO: 1216875 - DNA, 15 bp, Homo sapiens
aactttgtgagagcg

SEQ ID NO: 1216876 - DNA, 15 bp, Homo sapiens
aaactttgtgagagc

SEQ ID NO: 1216877 - DNA, 15 bp, Homo sapiens
aaaactttgtgagag

SEQ ID NO: 1216878 - DNA, 15 bp, Homo sapiens
caaaactttgtgaga

SEQ ID NO: 1216879 - DNA, 15 bp, Homo sapiens
gcaaaactttgtgag

SEQ ID NO: 1216880 - DNA, 15 bp, Homo sapiens
agcaaaactttgtga

SEQ ID NO: 1216881 - DNA, 15 bp, Homo sapiens
gagcaaaactttgtg

SEQ ID NO: 1216882 - DNA, 15 bp, Homo sapiens
tgagcaaaactttgt

SEQ ID NO: 1216883 - DNA, 15 bp, Homo sapiens
ctgagcaaaactttg

SEQ ID NO: 1216884 - DNA, 15 bp, Homo sapiens
tctgagcaaaacttt

SEQ ID NO: 1216885 - DNA, 15 bp, Homo sapiens
ttctgagcaaaactt

SEQ ID NO: 1216886 - DNA, 15 bp, Homo sapiens
tttctgagcaaaact

SEQ ID NO: 1216887 - DNA, 15 bp, Homo sapiens
ttttctgagcaaaac

SEQ ID NO: 1216888 - DNA, 15 bp, Homo sapiens
gttttctgagcaaaa

SEQ ID NO: 1216889 - DNA, 15 bp, Homo sapiens
cgttttctgagcaaa

SEQ ID NO: 1216890 - DNA, 15 bp, Homo sapiens
acgttttctgagcaa

SEQ ID NO: 1216891 - DNA, 15 bp, Homo sapiens
cacgttttctgagca

SEQ ID NO: 1216892 - DNA, 15 bp, Homo sapiens
ccacgttttctgagc

SEQ ID NO: 1216893 - DNA, 15 bp, Homo sapiens
gccacgttttctgag

SEQ ID NO: 1216894 - DNA, 15 bp, Homo sapiens
ggccacgttttctga

SEQ ID NO: 1216895 - DNA, 15 bp, Homo sapiens
aggccacgttttctg

SEQ ID NO: 1216896 - DNA, 15 bp, Homo sapiens
aaggccacgttttct

SEQ ID NO: 1216897 - DNA, 15 bp, Homo sapiens
gaaggccacgttttc

SEQ ID NO: 1216898 - DNA, 15 bp, Homo sapiens
ggaaggccacgtttt

SEQ ID NO: 1216899 - DNA, 15 bp, Homo sapiens
aggaaggccacgttt

SEQ ID NO: 1216900 - DNA, 15 bp, Homo sapiens
caggaaggccacgtt

SEQ ID NO: 1216901 - DNA, 15 bp, Homo sapiens
gcaggaaggccacgt

SEQ ID NO: 1216902 - DNA, 15 bp, Homo sapiens
agcaggaaggccacg

SEQ ID NO: 1216903 - DNA, 15 bp, Homo sapiens
aagcaggaaggccac

SEQ ID NO: 1216904 - DNA, 15 bp, Homo sapiens
aaagcaggaaggcca

SEQ ID NO: 1216905 - DNA, 15 bp, Homo sapiens
gaaagcaggaaggcc

SEQ ID NO: 1216906 - DNA, 15 bp, Homo sapiens
agaaagcaggaaggc

SEQ ID NO: 1216907 - DNA, 15 bp, Homo sapiens
cagaaagcaggaagg

SEQ ID NO: 1216908 - DNA, 15 bp, Homo sapiens
tcagaaagcaggaag

SEQ ID NO: 1216909 - DNA, 15 bp, Homo sapiens
ctcagaaagcaggaa

SEQ ID NO: 1216910 - DNA, 15 bp, Homo sapiens
actcagaaagcagga

SEQ ID NO: 1216911 - DNA, 15 bp, Homo sapiens
cactcagaaagcagg

SEQ ID NO: 1216912 - DNA, 15 bp, Homo sapiens
ccactcagaaagcag

SEQ ID NO: 1216913 - DNA, 15 bp, Homo sapiens
cccactcagaaagca

SEQ ID NO: 1216914 - DNA, 15 bp, Homo sapiens
tcccactcagaaagc

SEQ ID NO: 1216915 - DNA, 15 bp, Homo sapiens
ttcccactcagaaag

SEQ ID NO: 1216916 - DNA, 15 bp, Homo sapiens
attcccactcagaaa

SEQ ID NO: 1216917 - DNA, 15 bp, Homo sapiens
gattcccactcagaa

SEQ ID NO: 1216918 - DNA, 15 bp, Homo sapiens
ggattcccactcaga

SEQ ID NO: 1216919 - DNA, 15 bp, Homo sapiens
cggattcccactcag

SEQ ID NO: 1216920 - DNA, 15 bp, Homo sapiens
acggattcccactca

SEQ ID NO: 1216921 - DNA, 15 bp, Homo sapiens
cacggattcccactc

SEQ ID NO: 1216922 - DNA, 15 bp, Homo sapiens
ccacggattcccact

SEQ ID NO: 1216923 - DNA, 15 bp, Homo sapiens
accacggattcccac

SEQ ID NO: 1216924 - DNA, 15 bp, Homo sapiens
gaccacggattccca

SEQ ID NO: 1216925 - DNA, 15 bp, Homo sapiens
ggaccacggattccc

SEQ ID NO: 1216926 - DNA, 15 bp, Homo sapiens
gggaccacggattcc

SEQ ID NO: 1216927 - DNA, 15 bp, Homo sapiens
agggaccacggattc

SEQ ID NO: 1216928 - DNA, 15 bp, Homo sapiens
cagggaccacggatt

SEQ ID NO: 1216929 - DNA, 15 bp, Homo sapiens
acagggaccacggat

SEQ ID NO: 1216930 - DNA, 15 bp, Homo sapiens
cacagggaccacgga

SEQ ID NO: 1216931 - DNA, 15 bp, Homo sapiens
tcacagggaccacgg

SEQ ID NO: 1216932 - DNA, 15 bp, Homo sapiens
ttcacagggaccacg

SEQ ID NO: 1216933 - DNA, 15 bp, Homo sapiens
attcacagggaccac

SEQ ID NO: 1216934 - DNA, 15 bp, Homo sapiens
cattcacagggacca

SEQ ID NO: 1216935 - DNA, 15 bp, Homo sapiens
acattcacagggacc

SEQ ID NO: 1216936 - DNA, 15 bp, Homo sapiens
aacattcacagggac

SEQ ID NO: 1216937 - DNA, 15 bp, Homo sapiens
caacattcacaggga

SEQ ID NO: 1216938 - DNA, 15 bp, Homo sapiens
ccaacattcacaggg

SEQ ID NO: 1216939 - DNA, 15 bp, Homo sapiens
accaacattcacagg

SEQ ID NO: 1216940 - DNA, 15 bp, Homo sapiens
caccaacattcacag

SEQ ID NO: 1216941 - DNA, 15 bp, Homo sapiens
tcaccaacattcaca

SEQ ID NO: 1216942 - DNA, 15 bp, Homo sapiens
ttcaccaacattcac

SEQ ID NO: 1216943 - DNA, 15 bp, Homo sapiens
cttcaccaacattca

SEQ ID NO: 1216944 - DNA, 15 bp, Homo sapiens
acttcaccaacattc

SEQ ID NO: 1216945 - DNA, 15 bp, Homo sapiens
gacttcaccaacatt

SEQ ID NO: 1216946 - DNA, 15 bp, Homo sapiens
ggacttcaccaacat

SEQ ID NO: 1216947 - DNA, 15 bp, Homo sapiens
aggacttcaccaaca

SEQ ID NO: 1216948 - DNA, 15 bp, Homo sapiens
gaggacttcaccaac

SEQ ID NO: 1216949 - DNA, 15 bp, Homo sapiens
agaggacttcaccaa

SEQ ID NO: 1216950 - DNA, 15 bp, Homo sapiens
cagaggacttcacca

SEQ ID NO: 1216951 - DNA, 15 bp, Homo sapiens
acagaggacttcacc

SEQ ID NO: 1216952 - DNA, 15 bp, Homo sapiens
cacagaggacttcac

SEQ ID NO: 1216953 - DNA, 15 bp, Homo sapiens
acacagaggacttca

SEQ ID NO: 1216954 - DNA, 15 bp, Homo sapiens
gacacagaggacttc

SEQ ID NO: 1216955 - DNA, 15 bp, Homo sapiens
ggacacagaggactt

SEQ ID NO: 1216956 - DNA, 15 bp, Homo sapiens
gggacacagaggact

SEQ ID NO: 1216957 - DNA, 15 bp, Homo sapiens
agggacacagaggac

SEQ ID NO: 1216958 - DNA, 15 bp, Homo sapiens
cagggacacagagga

SEQ ID NO: 1216959 - DNA, 15 bp, Homo sapiens
ccagggacacagagg

SEQ ID NO: 1216960 - DNA, 15 bp, Homo sapiens
tccagggacacagag

SEQ ID NO: 1216961 - DNA, 15 bp, Homo sapiens
ctccagggacacaga

SEQ ID NO: 1216962 - DNA, 15 bp, Homo sapiens
gctccagggacacag

SEQ ID NO: 1216963 - DNA, 15 bp, Homo sapiens
ggctccagggacaca

SEQ ID NO: 1216964 - DNA, 15 bp, Homo sapiens
aggctccagggacac

SEQ ID NO: 1216965 - DNA, 15 bp, Homo sapiens
caggctccagggaca

SEQ ID NO: 1216966 - DNA, 15 bp, Homo sapiens
ccaggctccagggac

SEQ ID NO: 1216967 - DNA, 15 bp, Homo sapiens
gccaggctccaggga

SEQ ID NO: 1216968 - DNA, 15 bp, Homo sapiens
agccaggctccaggg

SEQ ID NO: 1216969 - DNA, 15 bp, Homo sapiens
gagccaggctccagg

SEQ ID NO: 1216970 - DNA, 15 bp, Homo sapiens
agagccaggctccag

SEQ ID NO: 1216971 - DNA, 15 bp, Homo sapiens
cagagccaggctcca

SEQ ID NO: 1216972 - DNA, 15 bp, Homo sapiens
tcagagccaggctcc

SEQ ID NO: 1216973 - DNA, 15 bp, Homo sapiens
ttcagagccaggctc

SEQ ID NO: 1216974 - DNA, 15 bp, Homo sapiens
cttcagagccaggct

SEQ ID NO: 1216975 - DNA, 15 bp, Homo sapiens
gcttcagagccaggc

SEQ ID NO: 1216976 - DNA, 15 bp, Homo sapiens
agcttcagagccagg

SEQ ID NO: 1216977 - DNA, 15 bp, Homo sapiens
aagcttcagagccag

SEQ ID NO: 1216978 - DNA, 15 bp, Homo sapiens
gaagcttcagagcca

SEQ ID NO: 1216979 - DNA, 15 bp, Homo sapiens
agaagcttcagagcc

SEQ ID NO: 1216980 - DNA, 15 bp, Homo sapiens
gagaagcttcagagc

SEQ ID NO: 1216981 - DNA, 15 bp, Homo sapiens
agagaagcttcagag

SEQ ID NO: 1216982 - DNA, 15 bp, Homo sapiens
gagagaagcttcaga

SEQ ID NO: 1216983 - DNA, 15 bp, Homo sapiens
ggagagaagcttcag

SEQ ID NO: 1216984 - DNA, 15 bp, Homo sapiens
gggagagaagcttca

SEQ ID NO: 1216985 - DNA, 15 bp, Homo sapiens
tgggagagaagcttc

SEQ ID NO: 1216986 - DNA, 15 bp, Homo sapiens
ctgggagagaagctt

SEQ ID NO: 1216987 - DNA, 15 bp, Homo sapiens
cctgggagagaagct

SEQ ID NO: 1216988 - DNA, 15 bp, Homo sapiens
acctgggagagaagc

SEQ ID NO: 1216989 - DNA, 15 bp, Homo sapiens
aacctgggagagaag

SEQ ID NO: 1216990 - DNA, 15 bp, Homo sapiens
aaacctgggagagaa

SEQ ID NO: 1216991 - DNA, 15 bp, Homo sapiens
gaaacctgggagaga

SEQ ID NO: 1216992 - DNA, 15 bp, Homo sapiens
agaaacctgggagag

SEQ ID NO: 1216993 - DNA, 15 bp, Homo sapiens
gagaaacctgggaga

SEQ ID NO: 1216994 - DNA, 15 bp, Homo sapiens
agagaaacctgggag

SEQ ID NO: 1216995 - DNA, 15 bp, Homo sapiens
gagagaaacctggga

SEQ ID NO: 1216996 - DNA, 15 bp, Homo sapiens
ggagagaaacctggg

SEQ ID NO: 1216997 - DNA, 15 bp, Homo sapiens
aggagagaaacctgg

SEQ ID NO: 1216998 - DNA, 15 bp, Homo sapiens
caggagagaaacctg

SEQ ID NO: 1216999 - DNA, 15 bp, Homo sapiens
ccaggagagaaacct

SEQ ID NO: 1217000 - DNA, 15 bp, Homo sapiens
gccaggagagaaacc

SEQ ID NO: 1217001 - DNA, 15 bp, Homo sapiens
agccaggagagaaac

SEQ ID NO: 1217002 - DNA, 15 bp, Homo sapiens
tagccaggagagaaa

SEQ ID NO: 1217003 - DNA, 15 bp, Homo sapiens
atagccaggagagaa

SEQ ID NO: 1217004 - DNA, 15 bp, Homo sapiens
aatagccaggagaga

SEQ ID NO: 1217005 - DNA, 15 bp, Homo sapiens
aaatagccaggagag

SEQ ID NO: 1217006 - DNA, 15 bp, Homo sapiens
aaaatagccaggaga

SEQ ID NO: 1217007 - DNA, 15 bp, Homo sapiens
caaaatagccaggag

SEQ ID NO: 1217008 - DNA, 15 bp, Homo sapiens
acaaaatagccagga

SEQ ID NO: 1217009 - DNA, 15 bp, Homo sapiens
aacaaaatagccagg

SEQ ID NO: 1217010 - DNA, 15 bp, Homo sapiens
gaacaaaatagccag

SEQ ID NO: 1217011 - DNA, 15 bp, Homo sapiens
ggaacaaaatagcca

SEQ ID NO: 1217012 - DNA, 15 bp, Homo sapiens
tggaacaaaatagcc

SEQ ID NO: 1217013 - DNA, 15 bp, Homo sapiens
gtggaacaaaatagc

SEQ ID NO: 1217014 - DNA, 15 bp, Homo sapiens
agtggaacaaaatag

SEQ ID NO: 1217015 - DNA, 15 bp, Homo sapiens
gagtggaacaaaata

SEQ ID NO: 1217016 - DNA, 15 bp, Homo sapiens
tgagtggaacaaaat

SEQ ID NO: 1217017 - DNA, 15 bp, Homo sapiens
atgagtggaacaaaa

SEQ ID NO: 1217018 - DNA, 15 bp, Homo sapiens
gaacatgagtggaac

SEQ ID NO: 1217019 - DNA, 15 bp, Homo sapiens
agaacatgagtggaa

SEQ ID NO: 1217020 - DNA, 15 bp, Homo sapiens
gagaacatgagtgga

SEQ ID NO: 1217021 - DNA, 15 bp, Homo sapiens
tgagaacatgagtgg

SEQ ID NO: 1217022 - DNA, 15 bp, Homo sapiens
ctgagaacatgagtg

SEQ ID NO: 1217023 - DNA, 15 bp, Homo sapiens
cctgagaacatgagt

SEQ ID NO: 1217024 - DNA, 15 bp, Homo sapiens
ccctgagaacatgag

SEQ ID NO: 1217025 - DNA, 15 bp, Homo sapiens
tccctgagaacatga

SEQ ID NO: 1217026 - DNA, 15 bp, Homo sapiens
atccctgagaacatg

SEQ ID NO: 1217027 - DNA, 15 bp, Homo sapiens
gatccctgagaacat

SEQ ID NO: 1217028 - DNA, 15 bp, Homo sapiens
agatccctgagaaca

SEQ ID NO: 1217029 - DNA, 15 bp, Homo sapiens
aagatccctgagaac

SEQ ID NO: 1217030 - DNA, 15 bp, Homo sapiens
taagatccctgagaa

SEQ ID NO: 1217031 - DNA, 15 bp, Homo sapiens
ttaagatccctgaga

SEQ ID NO: 1217032 - DNA, 15 bp, Homo sapiens
tttaagatccctgag

SEQ ID NO: 1217033 - DNA, 15 bp, Homo sapiens
atttaagatccctga

SEQ ID NO: 1217034 - DNA, 15 bp, Homo sapiens
catttaagatccctg

SEQ ID NO: 1217035 - DNA, 15 bp, Homo sapiens
tcatttaagatccct

SEQ ID NO: 1217036 - DNA, 15 bp, Homo sapiens
ctcatttaagatccc

SEQ ID NO: 1217037 - DNA, 15 bp, Homo sapiens
cctcatttaagatcc

SEQ ID NO: 1217038 - DNA, 15 bp, Homo sapiens
acctcatttaagatc

SEQ ID NO: 1217039 - DNA, 15 bp, Homo sapiens
tacctcatttaagat

SEQ ID NO: 1217040 - DNA, 15 bp, Homo sapiens
gtacctcatttaaga

SEQ ID NO: 1217041 - DNA, 15 bp, Homo sapiens
tgtacctcatttaag

SEQ ID NO: 1217042 - DNA, 15 bp, Homo sapiens
gtgtacctcatttaa

SEQ ID NO: 1217043 - DNA, 15 bp, Homo sapiens
ggtgtacctcattta

SEQ ID NO: 1217044 - DNA, 15 bp, Homo sapiens
gggtgtacctcattt

SEQ ID NO: 1217045 - DNA, 15 bp, Homo sapiens
tgggtgtacctcatt

SEQ ID NO: 1217046 - DNA, 15 bp, Homo sapiens
ctgggtgtacctcat

SEQ ID NO: 1217047 - DNA, 15 bp, Homo sapiens
tctgggtgtacctca

SEQ ID NO: 1217048 - DNA, 15 bp, Homo sapiens
ctctgggtgtacctc

SEQ ID NO: 1217049 - DNA, 15 bp, Homo sapiens
cctctgggtgtacct

SEQ ID NO: 1217050 - DNA, 15 bp, Homo sapiens
acctctgggtgtacc

SEQ ID NO: 1217051 - DNA, 15 bp, Homo sapiens
cacctctgggtgtac

SEQ ID NO: 1217052 - DNA, 15 bp, Homo sapiens
ccacctctgggtgta

SEQ ID NO: 1217053 - DNA, 15 bp, Homo sapiens
accacctctgggtgt

SEQ ID NO: 1217054 - DNA, 15 bp, Homo sapiens
caccacctctgggtg

SEQ ID NO: 1217055 - DNA, 15 bp, Homo sapiens
gcaccacctctgggt

SEQ ID NO: 1217056 - DNA, 15 bp, Homo sapiens
tgcaccacctctggg

SEQ ID NO: 1217057 - DNA, 15 bp, Homo sapiens
gtgcaccacctctgg

SEQ ID NO: 1217058 - DNA, 15 bp, Homo sapiens
tgtgcaccacctctg

SEQ ID NO: 1217059 - DNA, 15 bp, Homo sapiens
ctgtgcaccacctct

SEQ ID NO: 1217060 - DNA, 15 bp, Homo sapiens
cctgtgcaccacctc

SEQ ID NO: 1217061 - DNA, 15 bp, Homo sapiens
gcctgtgcaccacct

SEQ ID NO: 1217062 - DNA, 15 bp, Homo sapiens
ggcctgtgcaccacc

SEQ ID NO: 1217063 - DNA, 15 bp, Homo sapiens
gggcctgtgcaccac

SEQ ID NO: 1217064 - DNA, 15 bp, Homo sapiens
ggggcctgtgcacca

SEQ ID NO: 1217065 - DNA, 15 bp, Homo sapiens
aggggcctgtgcacc

SEQ ID NO: 1217066 - DNA, 15 bp, Homo sapiens
aaggggcctgtgcac

SEQ ID NO: 1217067 - DNA, 15 bp, Homo sapiens
gaaggggcctgtgca

SEQ ID NO: 1217068 - DNA, 15 bp, Homo sapiens
agaaggggcctgtgc

SEQ ID NO: 1217069 - DNA, 15 bp, Homo sapiens
tagaaggggcctgtg

SEQ ID NO: 1217070 - DNA, 15 bp, Homo sapiens
gtagaaggggcctgt

SEQ ID NO: 1217071 - DNA, 15 bp, Homo sapiens
ggtagaaggggcctg

SEQ ID NO: 1217072 - DNA, 15 bp, Homo sapiens
gggtagaaggggcct

SEQ ID NO: 1217073 - DNA, 15 bp, Homo sapiens
agggtagaaggggcc

SEQ ID NO: 1217074 - DNA, 15 bp, Homo sapiens
cagggtagaaggggc

SEQ ID NO: 1217075 - DNA, 15 bp, Homo sapiens
tcagggtagaagggg

SEQ ID NO: 1217076 - DNA, 15 bp, Homo sapiens
ctcagggtagaaggg

SEQ ID NO: 1217077 - DNA, 15 bp, Homo sapiens
tctcagggtagaagg

SEQ ID NO: 1217078 - DNA, 15 bp, Homo sapiens
ctctcagggtagaag

SEQ ID NO: 1217079 - DNA, 15 bp, Homo sapiens
gctctcagggtagaa

SEQ ID NO: 1217080 - DNA, 15 bp, Homo sapiens
ggctctcagggtaga

SEQ ID NO: 1217081 - DNA, 15 bp, Homo sapiens
aggctctcagggtag

SEQ ID NO: 1217082 - DNA, 15 bp, Homo sapiens
gaggctctcagggta

SEQ ID NO: 1217083 - DNA, 15 bp, Homo sapiens
agaggctctcagggt

SEQ ID NO: 1217084 - DNA, 15 bp, Homo sapiens
cagaggctctcaggg

SEQ ID NO: 1217085 - DNA, 15 bp, Homo sapiens
gcagaggctctcagg

SEQ ID NO: 1217086 - DNA, 15 bp, Homo sapiens
tgcagaggctctcag

SEQ ID NO: 1217087 - DNA, 15 bp, Homo sapiens
gtgcagaggctctca

SEQ ID NO: 1217088 - DNA, 15 bp, Homo sapiens
tgtgcagaggctctc

SEQ ID NO: 1217089 - DNA, 15 bp, Homo sapiens
ctgtgcagaggctct

SEQ ID NO: 1217090 - DNA, 15 bp, Homo sapiens
actgtgcagaggctc

SEQ ID NO: 1217091 - DNA, 15 bp, Homo sapiens
tactgtgcagaggct

SEQ ID NO: 1217092 - DNA, 15 bp, Homo sapiens
ttactgtgcagaggc

SEQ ID NO: 1217093 - DNA, 15 bp, Homo sapiens
gttactgtgcagagg

SEQ ID NO: 1217094 - DNA, 15 bp, Homo sapiens
ggttactgtgcagag

SEQ ID NO: 1217095 - DNA, 15 bp, Homo sapiens
tggttactgtgcaga

SEQ ID NO: 1217096 - DNA, 15 bp, Homo sapiens
ctggttactgtgcag

SEQ ID NO: 1217097 - DNA, 15 bp, Homo sapiens
tctggttactgtgca

SEQ ID NO: 1217098 - DNA, 15 bp, Homo sapiens
ttctggttactgtgc

SEQ ID NO: 1217099 - DNA, 15 bp, Homo sapiens
tttctggttactgtg

SEQ ID NO: 1217100 - DNA, 15 bp, Homo sapiens
ctttctggttactgt

SEQ ID NO: 1217101 - DNA, 15 bp, Homo sapiens
tctttctggttactg

SEQ ID NO: 1217102 - DNA, 15 bp, Homo sapiens
atctttctggttact

SEQ ID NO: 1217103 - DNA, 15 bp, Homo sapiens
gatctttctggttac

SEQ ID NO: 1217104 - DNA, 15 bp, Homo sapiens
tgatctttctggtta

SEQ ID NO: 1217105 - DNA, 15 bp, Homo sapiens
atgatctttctggtt

SEQ ID NO: 1217106 - DNA, 15 bp, Homo sapiens
catgatctttctggt

SEQ ID NO: 1217107 - DNA, 15 bp, Homo sapiens
acatgatctttctgg

SEQ ID NO: 1217108 - DNA, 15 bp, Homo sapiens
cacatgatctttctg

SEQ ID NO: 1217109 - DNA, 15 bp, Homo sapiens
tcacatgatctttct

SEQ ID NO: 1217110 - DNA, 15 bp, Homo sapiens
ttcacatgatctttc

SEQ ID NO: 1217111 - DNA, 15 bp, Homo sapiens
cttcacatgatcttt

SEQ ID NO: 1217112 - DNA, 15 bp, Homo sapiens
tcttcacatgatctt

SEQ ID NO: 1217113 - DNA, 15 bp, Homo sapiens
ttcttcacatgatct

SEQ ID NO: 1217114 - DNA, 15 bp, Homo sapiens
cttcttcacatgatc

SEQ ID NO: 1217115 - DNA, 15 bp, Homo sapiens
gcttcttcacatgat

SEQ ID NO: 1217116 - DNA, 15 bp, Homo sapiens
agcttcttcacatga

SEQ ID NO: 1217117 - DNA, 15 bp, Homo sapiens
aagcttcttcacatg

SEQ ID NO: 1217118 - DNA, 15 bp, Homo sapiens
gaagcttcttcacat

SEQ ID NO: 1217119 - DNA, 15 bp, Homo sapiens
agaagcttcttcaca

SEQ ID NO: 1217120 - DNA, 15 bp, Homo sapiens
aagaagcttcttcac

SEQ ID NO: 1217121 - DNA, 15 bp, Homo sapiens
caagaagcttcttca

SEQ ID NO: 1217122 - DNA, 15 bp, Homo sapiens
ccaagaagcttcttc

SEQ ID NO: 1217123 - DNA, 15 bp, Homo sapiens
accaagaagcttctt

SEQ ID NO: 1217124 - DNA, 15 bp, Homo sapiens
aaccaagaagcttct

SEQ ID NO: 1217125 - DNA, 15 bp, Homo sapiens
aaaccaagaagcttc

SEQ ID NO: 1217126 - DNA, 15 bp, Homo sapiens
aaaaccaagaagctt

SEQ ID NO: 1217127 - DNA, 15 bp, Homo sapiens
aaaaaccaagaagct

SEQ ID NO: 1217128 - DNA, 15 bp, Homo sapiens
caaaaaccaagaagc

SEQ ID NO: 1217129 - DNA, 15 bp, Homo sapiens
ccaaaaaccaagaag

SEQ ID NO: 1217130 - DNA, 15 bp, Homo sapiens
tccaaaaaccaagaa

SEQ ID NO: 1217131 - DNA, 15 bp, Homo sapiens
ctccaaaaaccaaga

SEQ ID NO: 1217132 - DNA, 15 bp, Homo sapiens
tctccaaaaaccaag

SEQ ID NO: 1217133 - DNA, 15 bp, Homo sapiens
atctccaaaaaccaa

SEQ ID NO: 1217134 - DNA, 15 bp, Homo sapiens
gatctccaaaaacca

SEQ ID NO: 1217135 - DNA, 15 bp, Homo sapiens
tgatctccaaaaacc

SEQ ID NO: 1217136 - DNA, 15 bp, Homo sapiens
ttgatctccaaaaac

SEQ ID NO: 1217137 - DNA, 15 bp, Homo sapiens
tttgatctccaaaaa

SEQ ID NO: 1217138 - DNA, 15 bp, Homo sapiens
ttttgatctccaaaa

SEQ ID NO: 1217139 - DNA, 15 bp, Homo sapiens
gttttgatctccaaa

SEQ ID NO: 1217140 - DNA, 15 bp, Homo sapiens
agttttgatctccaa

SEQ ID NO: 1217141 - DNA, 15 bp, Homo sapiens
gagttttgatctcca

SEQ ID NO: 1217142 - DNA, 15 bp, Homo sapiens
ggagttttgatctcc

SEQ ID NO: 1217143 - DNA, 15 bp, Homo sapiens
tggagttttgatctc

SEQ ID NO: 1217144 - DNA, 15 bp, Homo sapiens
atggagttttgatct

SEQ ID NO: 1217145 - DNA, 15 bp, Homo sapiens
gatggagttttgatc

SEQ ID NO: 1217146 - DNA, 15 bp, Homo sapiens
agatggagttttgat

SEQ ID NO: 1217147 - DNA, 15 bp, Homo sapiens
cagatggagttttga

SEQ ID NO: 1217148 - DNA, 15 bp, Homo sapiens
ccagatggagttttg

SEQ ID NO: 1217149 - DNA, 15 bp, Homo sapiens
cccagatggagtttt

SEQ ID NO: 1217150 - DNA, 15 bp, Homo sapiens
ccccagatggagttt

SEQ ID NO: 1217151 - DNA, 15 bp, Homo sapiens
gccccagatggagtt

SEQ ID NO: 1217152 - DNA, 15 bp, Homo sapiens
ggccccagatggagt

SEQ ID NO: 1217153 - DNA, 15 bp, Homo sapiens
cggccccagatggag

SEQ ID NO: 1217154 - DNA, 15 bp, Homo sapiens
ccggccccagatgga

SEQ ID NO: 1217155 - DNA, 15 bp, Homo sapiens
cccggccccagatgg

SEQ ID NO: 1217156 - DNA, 15 bp, Homo sapiens
gcccggccccagatg

SEQ ID NO: 1217157 - DNA, 15 bp, Homo sapiens
tgcccggccccagat

SEQ ID NO: 1217158 - DNA, 15 bp, Homo sapiens
gtgcccggccccaga

SEQ ID NO: 1217159 - DNA, 15 bp, Homo sapiens
cgtgcccggccccag

SEQ ID NO: 1217160 - DNA, 15 bp, Homo sapiens
ccgtgcccggcccca

SEQ ID NO: 1217161 - DNA, 15 bp, Homo sapiens
accgtgcccggcccc

SEQ ID NO: 1217162 - DNA, 15 bp, Homo sapiens
acgtgagccaccgtg

SEQ ID NO: 1217163 - DNA, 15 bp, Homo sapiens
gacgtgagccaccgt

SEQ ID NO: 1217164 - DNA, 15 bp, Homo sapiens
agacgtgagccaccg

SEQ ID NO: 1217165 - DNA, 15 bp, Homo sapiens
gacagacgtgagcca

SEQ ID NO: 1217166 - DNA, 15 bp, Homo sapiens
tgacagacgtgagcc

SEQ ID NO: 1217167 - DNA, 15 bp, Homo sapiens
atgacagacgtgagc

SEQ ID NO: 1217168 - DNA, 15 bp, Homo sapiens
gatgacagacgtgag

SEQ ID NO: 1217169 - DNA, 15 bp, Homo sapiens
ggatgacagacgtga

SEQ ID NO: 1217170 - DNA, 15 bp, Homo sapiens
gggatgacagacgtg

SEQ ID NO: 1217171 - DNA, 15 bp, Homo sapiens
tgggatgacagacgt

SEQ ID NO: 1217172 - DNA, 15 bp, Homo sapiens
ctgggatgacagacg

SEQ ID NO: 1217173 - DNA, 15 bp, Homo sapiens
gctgggatgacagac

SEQ ID NO: 1217174 - DNA, 15 bp, Homo sapiens
tgctgggatgacaga

SEQ ID NO: 1217175 - DNA, 15 bp, Homo sapiens
gtgctgggatgacag

SEQ ID NO: 1217176 - DNA, 15 bp, Homo sapiens
agtgctgggatgaca

SEQ ID NO: 1217177 - DNA, 15 bp, Homo sapiens
aagtgctgggatgac

SEQ ID NO: 1217178 - DNA, 15 bp, Homo sapiens
aaagtgctgggatga

SEQ ID NO: 1217179 - DNA, 15 bp, Homo sapiens
caaagtgctgggatg

SEQ ID NO: 1217180 - DNA, 15 bp, Homo sapiens
cgcctgcctcggcct

SEQ ID NO: 1217181 - DNA, 15 bp, Homo sapiens
ccgcctgcctcggcc

SEQ ID NO: 1217182 - DNA, 15 bp, Homo sapiens
tccgcctgcctcggc

SEQ ID NO: 1217183 - DNA, 15 bp, Homo sapiens
atccgcctgcctcgg

SEQ ID NO: 1217184 - DNA, 15 bp, Homo sapiens
ccctgacctcaggtg

SEQ ID NO: 1217185 - DNA, 15 bp, Homo sapiens
gaacccctgacctca

SEQ ID NO: 1217186 - DNA, 15 bp, Homo sapiens
cgaacccctgacctc

SEQ ID NO: 1217187 - DNA, 15 bp, Homo sapiens
tcgaacccctgacct

SEQ ID NO: 1217188 - DNA, 15 bp, Homo sapiens
ctcgaacccctgacc

SEQ ID NO: 1217189 - DNA, 15 bp, Homo sapiens
tctcgaacccctgac

SEQ ID NO: 1217190 - DNA, 15 bp, Homo sapiens
gtctcgaacccctga

SEQ ID NO: 1217191 - DNA, 15 bp, Homo sapiens
ggtctcgaacccctg

SEQ ID NO: 1217192 - DNA, 15 bp, Homo sapiens
tggtctcgaacccct

SEQ ID NO: 1217193 - DNA, 15 bp, Homo sapiens
ctggtctcgaacccc

SEQ ID NO: 1217194 - DNA, 15 bp, Homo sapiens
gctggtctcgaaccc

SEQ ID NO: 1217195 - DNA, 15 bp, Homo sapiens
ggctggtctcgaacc

SEQ ID NO: 1217196 - DNA, 15 bp, Homo sapiens
cgacggggtttcacc

SEQ ID NO: 1217197 - DNA, 15 bp, Homo sapiens
gcgacggggtttcac

SEQ ID NO: 1217198 - DNA, 15 bp, Homo sapiens
agcgacggggtttca

SEQ ID NO: 1217199 - DNA, 15 bp, Homo sapiens
cagcgacggggtttc

SEQ ID NO: 1217200 - DNA, 15 bp, Homo sapiens
gcagcgacggggttt

SEQ ID NO: 1217201 - DNA, 15 bp, Homo sapiens
agcagcgacggggtt

SEQ ID NO: 1217202 - DNA, 15 bp, Homo sapiens
tagcagcgacggggt

SEQ ID NO: 1217203 - DNA, 15 bp, Homo sapiens
ttagcagcgacgggg

SEQ ID NO: 1217204 - DNA, 15 bp, Homo sapiens
tttagcagcgacggg

SEQ ID NO: 1217205 - DNA, 15 bp, Homo sapiens
ttttagcagcgacgg

SEQ ID NO: 1217206 - DNA, 15 bp, Homo sapiens
tttttagcagcgacg

SEQ ID NO: 1217207 - DNA, 15 bp, Homo sapiens
atttttagcagcgac

SEQ ID NO: 1217208 - DNA, 15 bp, Homo sapiens
tatttttagcagcga

SEQ ID NO: 1217209 - DNA, 15 bp, Homo sapiens
gtatttttagcagcg

SEQ ID NO: 1217210 - DNA, 15 bp, Homo sapiens
tgtatttttagcagc

SEQ ID NO: 1217211 - DNA, 15 bp, Homo sapiens
cgccaccacacccag

SEQ ID NO: 1217212 - DNA, 15 bp, Homo sapiens
ccgccaccacaccca

SEQ ID NO: 1217213 - DNA, 15 bp, Homo sapiens
acccgccaccacacc

SEQ ID NO: 1217214 - DNA, 15 bp, Homo sapiens
acacccgccaccaca

SEQ ID NO: 1217215 - DNA, 15 bp, Homo sapiens
cacacccgccaccac

SEQ ID NO: 1217216 - DNA, 15 bp, Homo sapiens
ccacacccgccacca

SEQ ID NO: 1217217 - DNA, 15 bp, Homo sapiens
accacacccgccacc

SEQ ID NO: 1217218 - DNA, 15 bp, Homo sapiens
caccacacccgccac

SEQ ID NO: 1217219 - DNA, 15 bp, Homo sapiens
ccaccacacccgcca

SEQ ID NO: 1217220 - DNA, 15 bp, Homo sapiens
gccaccacacccgcc

SEQ ID NO: 1217221 - DNA, 15 bp, Homo sapiens
tgccaccacacccgc

SEQ ID NO: 1217222 - DNA, 15 bp, Homo sapiens
atgcctgccaccaca

SEQ ID NO: 1217223 - DNA, 15 bp, Homo sapiens
catgcctgccaccac

SEQ ID NO: 1217224 - DNA, 15 bp, Homo sapiens
ccatgcctgccacca

SEQ ID NO: 1217225 - DNA, 15 bp, Homo sapiens
accatgcctgccacc

SEQ ID NO: 1217226 - DNA, 15 bp, Homo sapiens
caccatgcctgccac

SEQ ID NO: 1217227 - DNA, 15 bp, Homo sapiens
ccaccatgcctgcca

SEQ ID NO: 1217228 - DNA, 15 bp, Homo sapiens
gccaccatgcctgcc

SEQ ID NO: 1217229 - DNA, 15 bp, Homo sapiens
tgccaccatgcctgc

SEQ ID NO: 1217230 - DNA, 15 bp, Homo sapiens
acctgccaccatgcc

SEQ ID NO: 1217231 - DNA, 15 bp, Homo sapiens
cacctgccaccatgc

SEQ ID NO: 1217232 - DNA, 15 bp, Homo sapiens
gcacctgccaccatg

SEQ ID NO: 1217233 - DNA, 15 bp, Homo sapiens
ggcacctgccaccat

SEQ ID NO: 1217234 - DNA, 15 bp, Homo sapiens
aggcacctgccacca

SEQ ID NO: 1217235 - DNA, 15 bp, Homo sapiens
caggcacctgccacc

SEQ ID NO: 1217236 - DNA, 15 bp, Homo sapiens
acaggcacctgccac

SEQ ID NO: 1217237 - DNA, 15 bp, Homo sapiens
tacaggcacctgcca

SEQ ID NO: 1217238 - DNA, 15 bp, Homo sapiens
ttacaggcacctgcc

SEQ ID NO: 1217239 - DNA, 15 bp, Homo sapiens
attacaggcacctgc

SEQ ID NO: 1217240 - DNA, 15 bp, Homo sapiens
gattacaggcacctg

SEQ ID NO: 1217241 - DNA, 15 bp, Homo sapiens
ggattacaggcacct

SEQ ID NO: 1217242 - DNA, 15 bp, Homo sapiens
cccctgcctcagcct

SEQ ID NO: 1217243 - DNA, 15 bp, Homo sapiens
tcccctgcctcagcc

SEQ ID NO: 1217244 - DNA, 15 bp, Homo sapiens
ttcccctgcctcagc

SEQ ID NO: 1217245 - DNA, 15 bp, Homo sapiens
attcccctgcctcag

SEQ ID NO: 1217246 - DNA, 15 bp, Homo sapiens
gattcccctgcctca

SEQ ID NO: 1217247 - DNA, 15 bp, Homo sapiens
agattcccctgcctc

SEQ ID NO: 1217248 - DNA, 15 bp, Homo sapiens
gagattcccctgcct

SEQ ID NO: 1217249 - DNA, 15 bp, Homo sapiens
agagattcccctgcc

SEQ ID NO: 1217250 - DNA, 15 bp, Homo sapiens
aagagattcccctgc

SEQ ID NO: 1217251 - DNA, 15 bp, Homo sapiens
caagagattcccctg

SEQ ID NO: 1217252 - DNA, 15 bp, Homo sapiens
tcaagagattcccct

SEQ ID NO: 1217253 - DNA, 15 bp, Homo sapiens
ttcaagagattcccc

SEQ ID NO: 1217254 - DNA, 15 bp, Homo sapiens
gttcaagagattccc

SEQ ID NO: 1217255 - DNA, 15 bp, Homo sapiens
ggttcaagagattcc

SEQ ID NO: 1217256 - DNA, 15 bp, Homo sapiens
aggttcaagagattc

SEQ ID NO: 1217257 - DNA, 15 bp, Homo sapiens
caggttcaagagatt

SEQ ID NO: 1217258 - DNA, 15 bp, Homo sapiens
ccaggttcaagagat

SEQ ID NO: 1217259 - DNA, 15 bp, Homo sapiens
tccaggttcaagaga

SEQ ID NO: 1217260 - DNA, 15 bp, Homo sapiens
atccaggttcaagag

SEQ ID NO: 1217261 - DNA, 15 bp, Homo sapiens
catccaggttcaaga

SEQ ID NO: 1217262 - DNA, 15 bp, Homo sapiens
ccatccaggttcaag

SEQ ID NO: 1217263 - DNA, 15 bp, Homo sapiens
accatccaggttcaa

SEQ ID NO: 1217264 - DNA, 15 bp, Homo sapiens
taccatccaggttca

SEQ ID NO: 1217265 - DNA, 15 bp, Homo sapiens
ctaccatccaggttc

SEQ ID NO: 1217266 - DNA, 15 bp, Homo sapiens
tctaccatccaggtt

SEQ ID NO: 1217267 - DNA, 15 bp, Homo sapiens
ctctaccatccaggt

SEQ ID NO: 1217268 - DNA, 15 bp, Homo sapiens
cctctaccatccagg

SEQ ID NO: 1217269 - DNA, 15 bp, Homo sapiens
gcctctaccatccag

SEQ ID NO: 1217270 - DNA, 15 bp, Homo sapiens
agcctctaccatcca

SEQ ID NO: 1217271 - DNA, 15 bp, Homo sapiens
cagcctctaccatcc

SEQ ID NO: 1217272 - DNA, 15 bp, Homo sapiens
gcagcctctaccatc

SEQ ID NO: 1217273 - DNA, 15 bp, Homo sapiens
tgcagcctctaccat

SEQ ID NO: 1217274 - DNA, 15 bp, Homo sapiens
ctgcagcctctacca

SEQ ID NO: 1217275 - DNA, 15 bp, Homo sapiens
actgcagcctctacc

SEQ ID NO: 1217276 - DNA, 15 bp, Homo sapiens
cactgcagcctctac

SEQ ID NO: 1217277 - DNA, 15 bp, Homo sapiens
gcactgcagcctcta

SEQ ID NO: 1217278 - DNA, 15 bp, Homo sapiens
agcactgcagcctct

SEQ ID NO: 1217279 - DNA, 15 bp, Homo sapiens
gagcactgcagcctc

SEQ ID NO: 1217280 - DNA, 15 bp, Homo sapiens
ggagcactgcagcct

SEQ ID NO: 1217281 - DNA, 15 bp, Homo sapiens
tggagcactgcagcc

SEQ ID NO: 1217282 - DNA, 15 bp, Homo sapiens
ctggagcactgcagc

SEQ ID NO: 1217283 - DNA, 15 bp, Homo sapiens
gctggagcactgcag

SEQ ID NO: 1217284 - DNA, 15 bp, Homo sapiens
ggctggagcactgca

SEQ ID NO: 1217285 - DNA, 15 bp, Homo sapiens
aggctggagcactgc

SEQ ID NO: 1217286 - DNA, 15 bp, Homo sapiens
caggctggagcactg

SEQ ID NO: 1217287 - DNA, 15 bp, Homo sapiens
ccaggctggagcact

SEQ ID NO: 1217288 - DNA, 15 bp, Homo sapiens
cccaggctggagcac

SEQ ID NO: 1217289 - DNA, 15 bp, Homo sapiens
gcccaggctggagca

SEQ ID NO: 1217290 - DNA, 15 bp, Homo sapiens
ggcccaggctggagc

SEQ ID NO: 1217291 - DNA, 15 bp, Homo sapiens
tggcccaggctggag

SEQ ID NO: 1217292 - DNA, 15 bp, Homo sapiens
ctgtggcccaggctg

SEQ ID NO: 1217293 - DNA, 15 bp, Homo sapiens
tctgtggcccaggct

SEQ ID NO: 1217294 - DNA, 15 bp, Homo sapiens
ctctgtggcccaggc

SEQ ID NO: 1217295 - DNA, 15 bp, Homo sapiens
cctctgtggcccagg

SEQ ID NO: 1217296 - DNA, 15 bp, Homo sapiens
ccctctgtggcccag

SEQ ID NO: 1217297 - DNA, 15 bp, Homo sapiens
tccctctgtggccca

SEQ ID NO: 1217298 - DNA, 15 bp, Homo sapiens
ctccctctgtggccc

SEQ ID NO: 1217299 - DNA, 15 bp, Homo sapiens
tctccctctgtggcc

SEQ ID NO: 1217300 - DNA, 15 bp, Homo sapiens
gtctccctctgtggc

SEQ ID NO: 1217301 - DNA, 15 bp, Homo sapiens
ggtctccctctgtgg

SEQ ID NO: 1217302 - DNA, 15 bp, Homo sapiens
gggtctccctctgtg

SEQ ID NO: 1217303 - DNA, 15 bp, Homo sapiens
ggggtctccctctgt

SEQ ID NO: 1217304 - DNA, 15 bp, Homo sapiens
tggggtctccctctg

SEQ ID NO: 1217305 - DNA, 15 bp, Homo sapiens
atggggtctccctct

SEQ ID NO: 1217306 - DNA, 15 bp, Homo sapiens
gatggggtctccctc

SEQ ID NO: 1217307 - DNA, 15 bp, Homo sapiens
agatggggtctccct

SEQ ID NO: 1217308 - DNA, 15 bp, Homo sapiens
gagatggggtctccc

SEQ ID NO: 1217309 - DNA, 15 bp, Homo sapiens
ggagatggggtctcc

SEQ ID NO: 1217310 - DNA, 15 bp, Homo sapiens
tggagatggggtctc

SEQ ID NO: 1217311 - DNA, 15 bp, Homo sapiens
ttggagatggggtct

SEQ ID NO: 1217312 - DNA, 15 bp, Homo sapiens
tttggagatggggtc

SEQ ID NO: 1217313 - DNA, 15 bp, Homo sapiens
ttttggagatggggt

SEQ ID NO: 1217314 - DNA, 15 bp, Homo sapiens
gttttggagatgggg

SEQ ID NO: 1217315 - DNA, 15 bp, Homo sapiens
tgttttggagatggg

SEQ ID NO: 1217316 - DNA, 15 bp, Homo sapiens
ttgttttggagatgg

SEQ ID NO: 1217317 - DNA, 15 bp, Homo sapiens
tttgttttggagatg

SEQ ID NO: 1217318 - DNA, 15 bp, Homo sapiens
gtttgttttggagat

SEQ ID NO: 1217319 - DNA, 15 bp, Homo sapiens
tgtttgttttggaga

SEQ ID NO: 1217320 - DNA, 15 bp, Homo sapiens
ttgtttgttttggag

SEQ ID NO: 1217321 - DNA, 15 bp, Homo sapiens
cttgtttgttttgga

SEQ ID NO: 1217322 - DNA, 15 bp, Homo sapiens
gcttgtttgttttgg

SEQ ID NO: 1217323 - DNA, 15 bp, Homo sapiens
tgcttgtttgttttg

SEQ ID NO: 1217324 - DNA, 15 bp, Homo sapiens
ttgcttgtttgtttt

SEQ ID NO: 1217325 - DNA, 15 bp, Homo sapiens
gtttgcttgtttgtt

SEQ ID NO: 1217326 - DNA, 15 bp, Homo sapiens
tgtttgcttgtttgt

SEQ ID NO: 1217327 - DNA, 15 bp, Homo sapiens
ttgtttgcttgtttg

SEQ ID NO: 1217328 - DNA, 15 bp, Homo sapiens
cttgtttgcttgttt

SEQ ID NO: 1217329 - DNA, 15 bp, Homo sapiens
gcttgtttgcttgtt

SEQ ID NO: 1217330 - DNA, 15 bp, Homo sapiens
tgcttgtttgcttgt

SEQ ID NO: 1217331 - DNA, 15 bp, Homo sapiens
ctgcttgtttgcttg

SEQ ID NO: 1217332 - DNA, 15 bp, Homo sapiens
tctgcttgtttgctt

SEQ ID NO: 1217333 - DNA, 15 bp, Homo sapiens
ttctgcttgtttgct

SEQ ID NO: 1217334 - DNA, 15 bp, Homo sapiens
tttctgcttgtttgc

SEQ ID NO: 1217335 - DNA, 15 bp, Homo sapiens
ttttctgcttgtttg

SEQ ID NO: 1217336 - DNA, 15 bp, Homo sapiens
gttttctgcttgttt

SEQ ID NO: 1217337 - DNA, 15 bp, Homo sapiens
tgttttctgcttgtt

SEQ ID NO: 1217338 - DNA, 15 bp, Homo sapiens
gtgttttctgcttgt

SEQ ID NO: 1217339 - DNA, 15 bp, Homo sapiens
agtgttttctgcttg

SEQ ID NO: 1217340 - DNA, 15 bp, Homo sapiens
gagtgttttctgctt

SEQ ID NO: 1217341 - DNA, 15 bp, Homo sapiens
ggagtgttttctgct

SEQ ID NO: 1217342 - DNA, 15 bp, Homo sapiens
tggagtgttttctgc

SEQ ID NO: 1217343 - DNA, 15 bp, Homo sapiens
atggagtgttttctg

SEQ ID NO: 1217344 - DNA, 15 bp, Homo sapiens
gatggagtgttttct

SEQ ID NO: 1217345 - DNA, 15 bp, Homo sapiens
agatggagtgttttc

SEQ ID NO: 1217346 - DNA, 15 bp, Homo sapiens
cagatggagtgtttt

SEQ ID NO: 1217347 - DNA, 15 bp, Homo sapiens
gcagatggagtgttt

SEQ ID NO: 1217348 - DNA, 15 bp, Homo sapiens
cgcagatggagtgtt

SEQ ID NO: 1217349 - DNA, 15 bp, Homo sapiens
ccgcagatggagtgt

SEQ ID NO: 1217350 - DNA, 15 bp, Homo sapiens
cccgcagatggagtg

SEQ ID NO: 1217351 - DNA, 15 bp, Homo sapiens
tcccgcagatggagt

SEQ ID NO: 1217352 - DNA, 15 bp, Homo sapiens
ctcccgcagatggag

SEQ ID NO: 1217353 - DNA, 15 bp, Homo sapiens
actcccgcagatgga

SEQ ID NO: 1217354 - DNA, 15 bp, Homo sapiens
cactcccgcagatgg

SEQ ID NO: 1217355 - DNA, 15 bp, Homo sapiens
ccactcccgcagatg

SEQ ID NO: 1217356 - DNA, 15 bp, Homo sapiens
tccactcccgcagat

SEQ ID NO: 1217357 - DNA, 15 bp, Homo sapiens
ttccactcccgcaga

SEQ ID NO: 1217358 - DNA, 15 bp, Homo sapiens
tttccactcccgcag

SEQ ID NO: 1217359 - DNA, 15 bp, Homo sapiens
ctttccactcccgca

SEQ ID NO: 1217360 - DNA, 15 bp, Homo sapiens
tctttccactcccgc

SEQ ID NO: 1217361 - DNA, 15 bp, Homo sapiens
ctctttccactcccg

SEQ ID NO: 1217362 - DNA, 15 bp, Homo sapiens
gctctttccactccc

SEQ ID NO: 1217363 - DNA, 15 bp, Homo sapiens
agctctttccactcc

SEQ ID NO: 1217364 - DNA, 15 bp, Homo sapiens
gagctctttccactc

SEQ ID NO: 1217365 - DNA, 15 bp, Homo sapiens
tgagctctttccact

SEQ ID NO: 1217366 - DNA, 15 bp, Homo sapiens
atgagctctttccac

SEQ ID NO: 1217367 - DNA, 15 bp, Homo sapiens
aatgagctctttcca

SEQ ID NO: 1217368 - DNA, 15 bp, Homo sapiens
gaatgagctctttcc

SEQ ID NO: 1217369 - DNA, 15 bp, Homo sapiens
ggaatgagctctttc

SEQ ID NO: 1217370 - DNA, 15 bp, Homo sapiens
aggaatgagctcttt

SEQ ID NO: 1217371 - DNA, 15 bp, Homo sapiens
taggaatgagctctt

SEQ ID NO: 1217372 - DNA, 15 bp, Homo sapiens
ctaggaatgagctct

SEQ ID NO: 1217373 - DNA, 15 bp, Homo sapiens
gctaggaatgagctc

SEQ ID NO: 1217374 - DNA, 15 bp, Homo sapiens
agctaggaatgagct

SEQ ID NO: 1217375 - DNA, 15 bp, Homo sapiens
gagctaggaatgagc

SEQ ID NO: 1217376 - DNA, 15 bp, Homo sapiens
ggagctaggaatgag

SEQ ID NO: 1217377 - DNA, 15 bp, Homo sapiens
tggagctaggaatga

SEQ ID NO: 1217378 - DNA, 15 bp, Homo sapiens
gtggagctaggaatg

SEQ ID NO: 1217379 - DNA, 15 bp, Homo sapiens
cgtggagctaggaat

SEQ ID NO: 1217380 - DNA, 15 bp, Homo sapiens
ccgtggagctaggaa

SEQ ID NO: 1217381 - DNA, 15 bp, Homo sapiens
accgtggagctagga

SEQ ID NO: 1217382 - DNA, 15 bp, Homo sapiens
taccgtggagctagg

SEQ ID NO: 1217383 - DNA, 15 bp, Homo sapiens
ctaccgtggagctag

SEQ ID NO: 1217384 - DNA, 15 bp, Homo sapiens
cctaccgtggagcta

SEQ ID NO: 1217385 - DNA, 15 bp, Homo sapiens
tcctaccgtggagct

SEQ ID NO: 1217386 - DNA, 15 bp, Homo sapiens
ttcctaccgtggagc

SEQ ID NO: 1217387 - DNA, 15 bp, Homo sapiens
cttcctaccgtggag

SEQ ID NO: 1217388 - DNA, 15 bp, Homo sapiens
tcttcctaccgtgga

SEQ ID NO: 1217389 - DNA, 15 bp, Homo sapiens
atcttcctaccgtgg

SEQ ID NO: 1217390 - DNA, 15 bp, Homo sapiens
catcttcctaccgtg

SEQ ID NO: 1217391 - DNA, 15 bp, Homo sapiens
acatcttcctaccgt

SEQ ID NO: 1217392 - DNA, 15 bp, Homo sapiens
aacatcttcctaccg

SEQ ID NO: 1217393 - DNA, 15 bp, Homo sapiens
gaacatcttcctacc

SEQ ID NO: 1217394 - DNA, 15 bp, Homo sapiens
agaacatcttcctac

SEQ ID NO: 1217395 - DNA, 15 bp, Homo sapiens
cagaacatcttccta

SEQ ID NO: 1217396 - DNA, 15 bp, Homo sapiens
tcagaacatcttcct

SEQ ID NO: 1217397 - DNA, 15 bp, Homo sapiens
ctcagaacatcttcc

SEQ ID NO: 1217398 - DNA, 15 bp, Homo sapiens
gctcagaacatcttc

SEQ ID NO: 1217399 - DNA, 15 bp, Homo sapiens
ggctcagaacatctt

SEQ ID NO: 1217400 - DNA, 15 bp, Homo sapiens
aggctcagaacatct

SEQ ID NO: 1217401 - DNA, 15 bp, Homo sapiens
caggctcagaacatc

SEQ ID NO: 1217402 - DNA, 15 bp, Homo sapiens
tcaggctcagaacat

SEQ ID NO: 1217403 - DNA, 15 bp, Homo sapiens
ctcaggctcagaaca

SEQ ID NO: 1217404 - DNA, 15 bp, Homo sapiens
gctcaggctcagaac

SEQ ID NO: 1217405 - DNA, 15 bp, Homo sapiens
ggctcaggctcagaa

SEQ ID NO: 1217406 - DNA, 15 bp, Homo sapiens
gggctcaggctcaga

SEQ ID NO: 1217407 - DNA, 15 bp, Homo sapiens
tgggctcaggctcag

SEQ ID NO: 1217408 - DNA, 15 bp, Homo sapiens
ttgggctcaggctca

SEQ ID NO: 1217409 - DNA, 15 bp, Homo sapiens
attgggctcaggctc

SEQ ID NO: 1217410 - DNA, 15 bp, Homo sapiens
gattgggctcaggct

SEQ ID NO: 1217411 - DNA, 15 bp, Homo sapiens
ggattgggctcaggc

SEQ ID NO: 1217412 - DNA, 15 bp, Homo sapiens
cggattgggctcagg

SEQ ID NO: 1217413 - DNA, 15 bp, Homo sapiens
gcggattgggctcag

SEQ ID NO: 1217414 - DNA, 15 bp, Homo sapiens
tgcggattgggctca

SEQ ID NO: 1217415 - DNA, 15 bp, Homo sapiens
atgcggattgggctc

SEQ ID NO: 1217416 - DNA, 15 bp, Homo sapiens
aatgcggattgggct

SEQ ID NO: 1217417 - DNA, 15 bp, Homo sapiens
gaatgcggattgggc

SEQ ID NO: 1217418 - DNA, 15 bp, Homo sapiens
tgaatgcggattggg

SEQ ID NO: 1217419 - DNA, 15 bp, Homo sapiens
atgaatgcggattgg

SEQ ID NO: 1217420 - DNA, 15 bp, Homo sapiens
tatgaatgcggattg

SEQ ID NO: 1217421 - DNA, 15 bp, Homo sapiens
ctatgaatgcggatt

SEQ ID NO: 1217422 - DNA, 15 bp, Homo sapiens
gctatgaatgcggat

SEQ ID NO: 1217423 - DNA, 15 bp, Homo sapiens
agctatgaatgcgga

SEQ ID NO: 1217424 - DNA, 15 bp, Homo sapiens
aagctatgaatgcgg

SEQ ID NO: 1217425 - DNA, 15 bp, Homo sapiens
caagctatgaatgcg

SEQ ID NO: 1217426 - DNA, 15 bp, Homo sapiens
tcaagctatgaatgc

SEQ ID NO: 1217427 - DNA, 15 bp, Homo sapiens
ttcaagctatgaatg

SEQ ID NO: 1217428 - DNA, 15 bp, Homo sapiens
gttcaagctatgaat

SEQ ID NO: 1217429 - DNA, 15 bp, Homo sapiens
tgttcaagctatgaa

SEQ ID NO: 1217430 - DNA, 15 bp, Homo sapiens
ctgttcaagctatga

SEQ ID NO: 1217431 - DNA, 15 bp, Homo sapiens
gctgttcaagctatg

SEQ ID NO: 1217432 - DNA, 15 bp, Homo sapiens
agctgttcaagctat

SEQ ID NO: 1217433 - DNA, 15 bp, Homo sapiens
cagctgttcaagcta

SEQ ID NO: 1217434 - DNA, 15 bp, Homo sapiens
acagctgttcaagct

SEQ ID NO: 1217435 - DNA, 15 bp, Homo sapiens
gacagctgttcaagc

SEQ ID NO: 1217436 - DNA, 15 bp, Homo sapiens
tgacagctgttcaag

SEQ ID NO: 1217437 - DNA, 15 bp, Homo sapiens
gtgacagctgttcaa

SEQ ID NO: 1217438 - DNA, 15 bp, Homo sapiens
tgtgacagctgttca

SEQ ID NO: 1217439 - DNA, 15 bp, Homo sapiens
ctgtgacagctgttc

SEQ ID NO: 1217440 - DNA, 15 bp, Homo sapiens
tctgtgacagctgtt

SEQ ID NO: 1217441 - DNA, 15 bp, Homo sapiens
gtctgtgacagctgt

SEQ ID NO: 1217442 - DNA, 15 bp, Homo sapiens
tgtctgtgacagctg

SEQ ID NO: 1217443 - DNA, 15 bp, Homo sapiens
ctgtctgtgacagct

SEQ ID NO: 1217444 - DNA, 15 bp, Homo sapiens
tctgtctgtgacagc

SEQ ID NO: 1217445 - DNA, 15 bp, Homo sapiens
ctctgtctgtgacag

SEQ ID NO: 1217446 - DNA, 15 bp, Homo sapiens
cctctgtctgtgaca

SEQ ID NO: 1217447 - DNA, 15 bp, Homo sapiens
gcctctgtctgtgac

SEQ ID NO: 1217448 - DNA, 15 bp, Homo sapiens
agcctctgtctgtga

SEQ ID NO: 1217449 - DNA, 15 bp, Homo sapiens
gagcctctgtctgtg

SEQ ID NO: 1217450 - DNA, 15 bp, Homo sapiens
tgagcctctgtctgt

SEQ ID NO: 1217451 - DNA, 15 bp, Homo sapiens
gtgagcctctgtctg

SEQ ID NO: 1217452 - DNA, 15 bp, Homo sapiens
ggtgagcctctgtct

SEQ ID NO: 1217453 - DNA, 15 bp, Homo sapiens
cggtgagcctctgtc

SEQ ID NO: 1217454 - DNA, 15 bp, Homo sapiens
tcggtgagcctctgt

SEQ ID NO: 1217455 - DNA, 15 bp, Homo sapiens
ttcggtgagcctctg

SEQ ID NO: 1217456 - DNA, 15 bp, Homo sapiens
tttcggtgagcctct

SEQ ID NO: 1217457 - DNA, 15 bp, Homo sapiens
ctttcggtgagcctc

SEQ ID NO: 1217458 - DNA, 15 bp, Homo sapiens
actttcggtgagcct

SEQ ID NO: 1217459 - DNA, 15 bp, Homo sapiens
aactttcggtgagcc

SEQ ID NO: 1217460 - DNA, 15 bp, Homo sapiens
aaactttcggtgagc

SEQ ID NO: 1217461 - DNA, 15 bp, Homo sapiens
aaaactttcggtgag

SEQ ID NO: 1217462 - DNA, 15 bp, Homo sapiens
aaaaactttcggtga

SEQ ID NO: 1217463 - DNA, 15 bp, Homo sapiens
caaaaactttcggtg

SEQ ID NO: 1217464 - DNA, 15 bp, Homo sapiens
ccaaaaactttcggt

SEQ ID NO: 1217465 - DNA, 15 bp, Homo sapiens
tccaaaaactttcgg

SEQ ID NO: 1217466 - DNA, 15 bp, Homo sapiens
ttccaaaaactttcg

SEQ ID NO: 1217467 - DNA, 15 bp, Homo sapiens
tttccaaaaactttc

SEQ ID NO: 1217468 - DNA, 15 bp, Homo sapiens
gtttccaaaaacttt

SEQ ID NO: 1217469 - DNA, 15 bp, Homo sapiens
agtttccaaaaactt

SEQ ID NO: 1217470 - DNA, 15 bp, Homo sapiens
cagtttccaaaaact

SEQ ID NO: 1217471 - DNA, 15 bp, Homo sapiens
ccagtttccaaaaac

SEQ ID NO: 1217472 - DNA, 15 bp, Homo sapiens
tccagtttccaaaaa

SEQ ID NO: 1217473 - DNA, 15 bp, Homo sapiens
atccagtttccaaaa

SEQ ID NO: 1217474 - DNA, 15 bp, Homo sapiens
gatccagtttccaaa

SEQ ID NO: 1217475 - DNA, 15 bp, Homo sapiens
ggatccagtttccaa

SEQ ID NO: 1217476 - DNA, 15 bp, Homo sapiens
tggatccagtttcca

SEQ ID NO: 1217477 - DNA, 15 bp, Homo sapiens
ttggatccagtttcc

SEQ ID NO: 1217478 - DNA, 15 bp, Homo sapiens
attggatccagtttc

SEQ ID NO: 1217479 - DNA, 15 bp, Homo sapiens
gattggatccagttt

SEQ ID NO: 1217480 - DNA, 15 bp, Homo sapiens
agattggatccagtt

SEQ ID NO: 1217481 - DNA, 15 bp, Homo sapiens
cagattggatccagt

SEQ ID NO: 1217482 - DNA, 15 bp, Homo sapiens
tcagattggatccag

SEQ ID NO: 1217483 - DNA, 15 bp, Homo sapiens
atcagattggatcca

SEQ ID NO: 1217484 - DNA, 15 bp, Homo sapiens
catcagattggatcc

SEQ ID NO: 1217485 - DNA, 15 bp, Homo sapiens
gcatcagattggatc

SEQ ID NO: 1217486 - DNA, 15 bp, Homo sapiens
agcatcagattggat

SEQ ID NO: 1217487 - DNA, 15 bp, Homo sapiens
aagcatcagattgga

SEQ ID NO: 1217488 - DNA, 15 bp, Homo sapiens
taagcatcagattgg

SEQ ID NO: 1217489 - DNA, 15 bp, Homo sapiens
gtaagcatcagattg

SEQ ID NO: 1217490 - DNA, 15 bp, Homo sapiens
agtaagcatcagatt

SEQ ID NO: 1217491 - DNA, 15 bp, Homo sapiens
aagtaagcatcagat

SEQ ID NO: 1217492 - DNA, 15 bp, Homo sapiens
aaagtaagcatcaga

SEQ ID NO: 1217493 - DNA, 15 bp, Homo sapiens
gaaagtaagcatcag

SEQ ID NO: 1217494 - DNA, 15 bp, Homo sapiens
agaaagtaagcatca

SEQ ID NO: 1217495 - DNA, 15 bp, Homo sapiens
gagaaagtaagcatc

SEQ ID NO: 1217496 - DNA, 15 bp, Homo sapiens
tgagaaagtaagcat

SEQ ID NO: 1217497 - DNA, 15 bp, Homo sapiens
ttgagaaagtaagca

SEQ ID NO: 1217498 - DNA, 15 bp, Homo sapiens
tttgagaaagtaagc

SEQ ID NO: 1217499 - DNA, 15 bp, Homo sapiens
atttgagaaagtaag

SEQ ID NO: 1217500 - DNA, 15 bp, Homo sapiens
gatttgagaaagtaa

SEQ ID NO: 1217501 - DNA, 15 bp, Homo sapiens
tgatttgagaaagta

SEQ ID NO: 1217502 - DNA, 15 bp, Homo sapiens
ttgatttgagaaagt

SEQ ID NO: 1217503 - DNA, 15 bp, Homo sapiens
attgatttgagaaag

SEQ ID NO: 1217504 - DNA, 15 bp, Homo sapiens
tattgatttgagaaa

SEQ ID NO: 1217505 - DNA, 15 bp, Homo sapiens
ttattgatttgagaa

SEQ ID NO: 1217506 - DNA, 15 bp, Homo sapiens
attattgatttgaga

SEQ ID NO: 1217507 - DNA, 15 bp, Homo sapiens
tattattgatttgag

SEQ ID NO: 1217508 - DNA, 15 bp, Homo sapiens
ttattattgatttga

SEQ ID NO: 1217509 - DNA, 15 bp, Homo sapiens
attattattgatttg

SEQ ID NO: 1217510 - DNA, 15 bp, Homo sapiens
aattattattgattt

SEQ ID NO: 1217511 - DNA, 15 bp, Homo sapiens
taattattattgatt

SEQ ID NO: 1217512 - DNA, 15 bp, Homo sapiens
ctaattattattgat

SEQ ID NO: 1217513 - DNA, 15 bp, Homo sapiens
actaattattattga

SEQ ID NO: 1217514 - DNA, 15 bp, Homo sapiens
tactaattattattg

SEQ ID NO: 1217515 - DNA, 15 bp, Homo sapiens
gtactaattattatt

SEQ ID NO: 1217516 - DNA, 15 bp, Homo sapiens
tgtactaattattat

SEQ ID NO: 1217517 - DNA, 15 bp, Homo sapiens
atgtactaattatta

SEQ ID NO: 1217518 - DNA, 15 bp, Homo sapiens
gatgtactaattatt

SEQ ID NO: 1217519 - DNA, 15 bp, Homo sapiens
tgatgtactaattat

SEQ ID NO: 1217520 - DNA, 15 bp, Homo sapiens
atgatgtactaatta

SEQ ID NO: 1217521 - DNA, 15 bp, Homo sapiens
aatgatgtactaatt

SEQ ID NO: 1217522 - DNA, 15 bp, Homo sapiens
gaatgatgtactaat

SEQ ID NO: 1217523 - DNA, 15 bp, Homo sapiens
tgaatgatgtactaa

SEQ ID NO: 1217524 - DNA, 15 bp, Homo sapiens
ctgaatgatgtacta

SEQ ID NO: 1217525 - DNA, 15 bp, Homo sapiens
tctgaatgatgtact

SEQ ID NO: 1217526 - DNA, 15 bp, Homo sapiens
ttctgaatgatgtac

SEQ ID NO: 1217527 - DNA, 15 bp, Homo sapiens
cttctgaatgatgta

SEQ ID NO: 1217528 - DNA, 15 bp, Homo sapiens
tcttctgaatgatgt

SEQ ID NO: 1217529 - DNA, 15 bp, Homo sapiens
ctcttctgaatgatg

SEQ ID NO: 1217530 - DNA, 15 bp, Homo sapiens
cctcttctgaatgat

SEQ ID NO: 1217531 - DNA, 15 bp, Homo sapiens
ccctcttctgaatga

SEQ ID NO: 1217532 - DNA, 15 bp, Homo sapiens
accctcttctgaatg

SEQ ID NO: 1217533 - DNA, 15 bp, Homo sapiens
caccctcttctgaat

SEQ ID NO: 1217534 - DNA, 15 bp, Homo sapiens
gcaccctcttctgaa

SEQ ID NO: 1217535 - DNA, 15 bp, Homo sapiens
agcaccctcttctga

SEQ ID NO: 1217536 - DNA, 15 bp, Homo sapiens
cagcaccctcttctg

SEQ ID NO: 1217537 - DNA, 15 bp, Homo sapiens
acagcaccctcttct

SEQ ID NO: 1217538 - DNA, 15 bp, Homo sapiens
aacagcaccctcttc

SEQ ID NO: 1217539 - DNA, 15 bp, Homo sapiens
taacagcaccctctt

SEQ ID NO: 1217540 - DNA, 15 bp, Homo sapiens
ttaacagcaccctct

SEQ ID NO: 1217541 - DNA, 15 bp, Homo sapiens
gttaacagcaccctc

SEQ ID NO: 1217542 - DNA, 15 bp, Homo sapiens
agttaacagcaccct

SEQ ID NO: 1217543 - DNA, 15 bp, Homo sapiens
aagttaacagcaccc

SEQ ID NO: 1217544 - DNA, 15 bp, Homo sapiens
caagttaacagcacc

SEQ ID NO: 1217545 - DNA, 15 bp, Homo sapiens
tcaagttaacagcac

SEQ ID NO: 1217546 - DNA, 15 bp, Homo sapiens
ctcaagttaacagca

SEQ ID NO: 1217547 - DNA, 15 bp, Homo sapiens
actcaagttaacagc

SEQ ID NO: 1217548 - DNA, 15 bp, Homo sapiens
cactcaagttaacag

SEQ ID NO: 1217549 - DNA, 15 bp, Homo sapiens
gcactcaagttaaca

SEQ ID NO: 1217550 - DNA, 15 bp, Homo sapiens
tgcactcaagttaac

SEQ ID NO: 1217551 - DNA, 15 bp, Homo sapiens
ttgcactcaagttaa

SEQ ID NO: 1217552 - DNA, 15 bp, Homo sapiens
attgcactcaagtta

SEQ ID NO: 1217553 - DNA, 15 bp, Homo sapiens
cattgcactcaagtt

SEQ ID NO: 1217554 - DNA, 15 bp, Homo sapiens
tcattgcactcaagt

SEQ ID NO: 1217555 - DNA, 15 bp, Homo sapiens
ttcattgcactcaag

SEQ ID NO: 1217556 - DNA, 15 bp, Homo sapiens
attcattgcactcaa

SEQ ID NO: 1217557 - DNA, 15 bp, Homo sapiens
gattcattgcactca

SEQ ID NO: 1217558 - DNA, 15 bp, Homo sapiens
agattcattgcactc

SEQ ID NO: 1217559 - DNA, 15 bp, Homo sapiens
aagattcattgcact

SEQ ID NO: 1217560 - DNA, 15 bp, Homo sapiens
aaagattcattgcac

SEQ ID NO: 1217561 - DNA, 15 bp, Homo sapiens
aaaagattcattgca

SEQ ID NO: 1217562 - DNA, 15 bp, Homo sapiens
aaaaagattcattgc

SEQ ID NO: 1217563 - DNA, 15 bp, Homo sapiens
aaaaaagattcattg

SEQ ID NO: 1217564 - DNA, 15 bp, Homo sapiens
aaaaaaagattcatt

SEQ ID NO: 1217565 - DNA, 15 bp, Homo sapiens
taaaaaaagattcat

SEQ ID NO: 1217566 - DNA, 15 bp, Homo sapiens
ttaaaaaaagattca

SEQ ID NO: 1217567 - DNA, 15 bp, Homo sapiens
gttaaaaaaagattc

SEQ ID NO: 1217568 - DNA, 15 bp, Homo sapiens
aagttaaaaaaagat

SEQ ID NO: 1217569 - DNA, 15 bp, Homo sapiens
aaagttaaaaaaaga

SEQ ID NO: 1217570 - DNA, 15 bp, Homo sapiens
aaaagttaaaaaaag

SEQ ID NO: 1217571 - DNA, 15 bp, Homo sapiens
taaaagttaaaaaaa

SEQ ID NO: 1217572 - DNA, 15 bp, Homo sapiens
ataaaagttaaaaaa

SEQ ID NO: 1217573 - DNA, 15 bp, Homo sapiens
aataaaagttaaaaa

SEQ ID NO: 1217574 - DNA, 15 bp, Homo sapiens
aaataaaagttaaaa

SEQ ID NO: 1217575 - DNA, 15 bp, Homo sapiens
aaaataaaagttaaa

SEQ ID NO: 1217576 - DNA, 15 bp, Homo sapiens
taaaataaaagttaa

SEQ ID NO: 1217577 - DNA, 15 bp, Homo sapiens
ctaaaataaaagtta

SEQ ID NO: 1217578 - DNA, 15 bp, Homo sapiens
cctaaaataaaagtt

SEQ ID NO: 1217579 - DNA, 15 bp, Homo sapiens
acctaaaataaaagt

SEQ ID NO: 1217580 - DNA, 15 bp, Homo sapiens
aacctaaaataaaag

SEQ ID NO: 1217581 - DNA, 15 bp, Homo sapiens
aaacctaaaataaaa

SEQ ID NO: 1217582 - DNA, 15 bp, Homo sapiens
caaacctaaaataaa

SEQ ID NO: 1217583 - DNA, 15 bp, Homo sapiens
ccaaacctaaaataa

SEQ ID NO: 1217584 - DNA, 15 bp, Homo sapiens
cccaaacctaaaata

SEQ ID NO: 1217585 - DNA, 15 bp, Homo sapiens
ccccaaacctaaaat

SEQ ID NO: 1217586 - DNA, 15 bp, Homo sapiens
tccccaaacctaaaa

SEQ ID NO: 1217587 - DNA, 15 bp, Homo sapiens
atccccaaacctaaa

SEQ ID NO: 1217588 - DNA, 15 bp, Homo sapiens
catccccaaacctaa

SEQ ID NO: 1217589 - DNA, 15 bp, Homo sapiens
gcatccccaaaccta

SEQ ID NO: 1217590 - DNA, 15 bp, Homo sapiens
tgcatccccaaacct

SEQ ID NO: 1217591 - DNA, 15 bp, Homo sapiens
gtgcatccccaaacc

SEQ ID NO: 1217592 - DNA, 15 bp, Homo sapiens
tgtgcatccccaaac

SEQ ID NO: 1217593 - DNA, 15 bp, Homo sapiens
ttgtgcatccccaaa

SEQ ID NO: 1217594 - DNA, 15 bp, Homo sapiens
cttgtgcatccccaa

SEQ ID NO: 1217595 - DNA, 15 bp, Homo sapiens
acttgtgcatcccca

SEQ ID NO: 1217596 - DNA, 15 bp, Homo sapiens
tacttgtgcatcccc

SEQ ID NO: 1217597 - DNA, 15 bp, Homo sapiens
ctacttgtgcatccc

SEQ ID NO: 1217598 - DNA, 15 bp, Homo sapiens
cctacttgtgcatcc

SEQ ID NO: 1217599 - DNA, 15 bp, Homo sapiens
acctacttgtgcatc

SEQ ID NO: 1217600 - DNA, 15 bp, Homo sapiens
aacctacttgtgcat

SEQ ID NO: 1217601 - DNA, 15 bp, Homo sapiens
aaacctacttgtgca

SEQ ID NO: 1217602 - DNA, 15 bp, Homo sapiens
caaacctacttgtgc

SEQ ID NO: 1217603 - DNA, 15 bp, Homo sapiens
acaaacctacttgtg

SEQ ID NO: 1217604 - DNA, 15 bp, Homo sapiens
aacaaacctacttgt

SEQ ID NO: 1217605 - DNA, 15 bp, Homo sapiens
taacaaacctacttg

SEQ ID NO: 1217606 - DNA, 15 bp, Homo sapiens
ataacaaacctactt

SEQ ID NO: 1217607 - DNA, 15 bp, Homo sapiens
tataacaaacctact

SEQ ID NO: 1217608 - DNA, 15 bp, Homo sapiens
atataacaaacctac

SEQ ID NO: 1217609 - DNA, 15 bp, Homo sapiens
tatataacaaaccta

SEQ ID NO: 1217610 - DNA, 15 bp, Homo sapiens
ctatataacaaacct

SEQ ID NO: 1217611 - DNA, 15 bp, Homo sapiens
cctatataacaaacc

SEQ ID NO: 1217612 - DNA, 15 bp, Homo sapiens
acctatataacaaac

SEQ ID NO: 1217613 - DNA, 15 bp, Homo sapiens
tacctatataacaaa

SEQ ID NO: 1217614 - DNA, 15 bp, Homo sapiens
ttacctatataacaa

SEQ ID NO: 1217615 - DNA, 15 bp, Homo sapiens
tttacctatataaca

SEQ ID NO: 1217616 - DNA, 15 bp, Homo sapiens
gtttacctatataac

SEQ ID NO: 1217617 - DNA, 15 bp, Homo sapiens
agtttacctatataa

SEQ ID NO: 1217618 - DNA, 15 bp, Homo sapiens
tagtttacctatata

SEQ ID NO: 1217619 - DNA, 15 bp, Homo sapiens
ctagtttacctatat

SEQ ID NO: 1217620 - DNA, 15 bp, Homo sapiens
actagtttacctata

SEQ ID NO: 1217621 - DNA, 15 bp, Homo sapiens
cactagtttacctat

SEQ ID NO: 1217622 - DNA, 15 bp, Homo sapiens
acactagtttaccta

SEQ ID NO: 1217623 - DNA, 15 bp, Homo sapiens
gacactagtttacct

SEQ ID NO: 1217624 - DNA, 15 bp, Homo sapiens
tgacactagtttacc

SEQ ID NO: 1217625 - DNA, 15 bp, Homo sapiens
gtgacactagtttac

SEQ ID NO: 1217626 - DNA, 15 bp, Homo sapiens
cgtgacactagttta

SEQ ID NO: 1217627 - DNA, 15 bp, Homo sapiens
ccgtgacactagttt

SEQ ID NO: 1217628 - DNA, 15 bp, Homo sapiens
cccgtgacactagtt

SEQ ID NO: 1217629 - DNA, 15 bp, Homo sapiens
ccccgtgacactagt

SEQ ID NO: 1217630 - DNA, 15 bp, Homo sapiens
accccgtgacactag

SEQ ID NO: 1217631 - DNA, 15 bp, Homo sapiens
aaccccgtgacacta

SEQ ID NO: 1217632 - DNA, 15 bp, Homo sapiens
aaaccccgtgacact

SEQ ID NO: 1217633 - DNA, 15 bp, Homo sapiens
aaaaccccgtgacac

SEQ ID NO: 1217634 - DNA, 15 bp, Homo sapiens
caaaaccccgtgaca

SEQ ID NO: 1217635 - DNA, 15 bp, Homo sapiens
acaaaaccccgtgac

SEQ ID NO: 1217636 - DNA, 15 bp, Homo sapiens
aacaaaaccccgtga

SEQ ID NO: 1217637 - DNA, 15 bp, Homo sapiens
caacaaaaccccgtg

SEQ ID NO: 1217638 - DNA, 15 bp, Homo sapiens
acaacaaaaccccgt

SEQ ID NO: 1217639 - DNA, 15 bp, Homo sapiens
tacaacaaaaccccg

SEQ ID NO: 1217640 - DNA, 15 bp, Homo sapiens
gtacaacaaaacccc

SEQ ID NO: 1217641 - DNA, 15 bp, Homo sapiens
tgtacaacaaaaccc

SEQ ID NO: 1217642 - DNA, 15 bp, Homo sapiens
ctgtacaacaaaacc

SEQ ID NO: 1217643 - DNA, 15 bp, Homo sapiens
tctgtacaacaaaac

SEQ ID NO: 1217644 - DNA, 15 bp, Homo sapiens
atctgtacaacaaaa

SEQ ID NO: 1217645 - DNA, 15 bp, Homo sapiens
aatctgtacaacaaa

SEQ ID NO: 1217646 - DNA, 15 bp, Homo sapiens
taatctgtacaacaa

SEQ ID NO: 1217647 - DNA, 15 bp, Homo sapiens
ataatctgtacaaca

SEQ ID NO: 1217648 - DNA, 15 bp, Homo sapiens
aataatctgtacaac

SEQ ID NO: 1217649 - DNA, 15 bp, Homo sapiens
aaataatctgtacaa

SEQ ID NO: 1217650 - DNA, 15 bp, Homo sapiens
taaataatctgtaca

SEQ ID NO: 1217651 - DNA, 15 bp, Homo sapiens
ttaaataatctgtac

SEQ ID NO: 1217652 - DNA, 15 bp, Homo sapiens
attaaataatctgta

SEQ ID NO: 1217653 - DNA, 15 bp, Homo sapiens
gattaaataatctgt

SEQ ID NO: 1217654 - DNA, 15 bp, Homo sapiens
tgattaaataatctg

SEQ ID NO: 1217655 - DNA, 15 bp, Homo sapiens
gtgattaaataatct

SEQ ID NO: 1217656 - DNA, 15 bp, Homo sapiens
ggtgattaaataatc

SEQ ID NO: 1217657 - DNA, 15 bp, Homo sapiens
gggtgattaaataat

SEQ ID NO: 1217658 - DNA, 15 bp, Homo sapiens
tgggtgattaaataa

SEQ ID NO: 1217659 - DNA, 15 bp, Homo sapiens
ctgggtgattaaata

SEQ ID NO: 1217660 - DNA, 15 bp, Homo sapiens
cctgggtgattaaat

SEQ ID NO: 1217661 - DNA, 15 bp, Homo sapiens
acctgggtgattaaa

SEQ ID NO: 1217662 - DNA, 15 bp, Homo sapiens
tacctgggtgattaa

SEQ ID NO: 1217663 - DNA, 15 bp, Homo sapiens
ctacctgggtgatta

SEQ ID NO: 1217664 - DNA, 15 bp, Homo sapiens
actacctgggtgatt

SEQ ID NO: 1217665 - DNA, 15 bp, Homo sapiens
tactacctgggtgat

SEQ ID NO: 1217666 - DNA, 15 bp, Homo sapiens
ttactacctgggtga

SEQ ID NO: 1217667 - DNA, 15 bp, Homo sapiens
cttactacctgggtg

SEQ ID NO: 1217668 - DNA, 15 bp, Homo sapiens
gcttactacctgggt

SEQ ID NO: 1217669 - DNA, 15 bp, Homo sapiens
agcttactacctggg

SEQ ID NO: 1217670 - DNA, 15 bp, Homo sapiens
aagcttactacctgg

SEQ ID NO: 1217671 - DNA, 15 bp, Homo sapiens
aaagcttactacctg

SEQ ID NO: 1217672 - DNA, 15 bp, Homo sapiens
caaagcttactacct

SEQ ID NO: 1217673 - DNA, 15 bp, Homo sapiens
acaaagcttactacc

SEQ ID NO: 1217674 - DNA, 15 bp, Homo sapiens
tacaaagcttactac

SEQ ID NO: 1217675 - DNA, 15 bp, Homo sapiens
gtacaaagcttacta

SEQ ID NO: 1217676 - DNA, 15 bp, Homo sapiens
ggtacaaagcttact

SEQ ID NO: 1217677 - DNA, 15 bp, Homo sapiens
gggtacaaagcttac

SEQ ID NO: 1217678 - DNA, 15 bp, Homo sapiens
tgggtacaaagctta

SEQ ID NO: 1217679 - DNA, 15 bp, Homo sapiens
ttgggtacaaagctt

SEQ ID NO: 1217680 - DNA, 15 bp, Homo sapiens
cttgggtacaaagct

SEQ ID NO: 1217681 - DNA, 15 bp, Homo sapiens
acttgggtacaaagc

SEQ ID NO: 1217682 - DNA, 15 bp, Homo sapiens
cacttgggtacaaag

SEQ ID NO: 1217683 - DNA, 15 bp, Homo sapiens
acacttgggtacaaa

SEQ ID NO: 1217684 - DNA, 15 bp, Homo sapiens
aacacttgggtacaa

SEQ ID NO: 1217685 - DNA, 15 bp, Homo sapiens
aaacacttgggtaca

SEQ ID NO: 1217686 - DNA, 15 bp, Homo sapiens
aaaacacttgggtac

SEQ ID NO: 1217687 - DNA, 15 bp, Homo sapiens
aaaaacacttgggta

SEQ ID NO: 1217688 - DNA, 15 bp, Homo sapiens
aaaaaacacttgggt

SEQ ID NO: 1217689 - DNA, 15 bp, Homo sapiens
gaaaaaacacttggg

SEQ ID NO: 1217690 - DNA, 15 bp, Homo sapiens
ggaaaaaacacttgg

SEQ ID NO: 1217691 - DNA, 15 bp, Homo sapiens
aggaaaaaacacttg

SEQ ID NO: 1217692 - DNA, 15 bp, Homo sapiens
caggaaaaaacactt

SEQ ID NO: 1217693 - DNA, 15 bp, Homo sapiens
gcaggaaaaaacact

SEQ ID NO: 1217694 - DNA, 15 bp, Homo sapiens
agcaggaaaaaacac

SEQ ID NO: 1217695 - DNA, 15 bp, Homo sapiens
gagcaggaaaaaaca

SEQ ID NO: 1217696 - DNA, 15 bp, Homo sapiens
agagcaggaaaaaac

SEQ ID NO: 1217697 - DNA, 15 bp, Homo sapiens
gagagcaggaaaaaa

SEQ ID NO: 1217698 - DNA, 15 bp, Homo sapiens
ggagagcaggaaaaa

SEQ ID NO: 1217699 - DNA, 15 bp, Homo sapiens
gggagagcaggaaaa

SEQ ID NO: 1217700 - DNA, 15 bp, Homo sapiens
agggagagcaggaaa

SEQ ID NO: 1217701 - DNA, 15 bp, Homo sapiens
gagggagagcaggaa

SEQ ID NO: 1217702 - DNA, 15 bp, Homo sapiens
ggagggagagcagga

SEQ ID NO: 1217703 - DNA, 15 bp, Homo sapiens
aggagggagagcagg

SEQ ID NO: 1217704 - DNA, 15 bp, Homo sapiens
gaggagggagagcag

SEQ ID NO: 1217705 - DNA, 15 bp, Homo sapiens
ggaggagggagagca

SEQ ID NO: 1217706 - DNA, 15 bp, Homo sapiens
gggaggagggagagc

SEQ ID NO: 1217707 - DNA, 15 bp, Homo sapiens
tgggaggagggagag

SEQ ID NO: 1217708 - DNA, 15 bp, Homo sapiens
atgggaggagggaga

SEQ ID NO: 1217709 - DNA, 15 bp, Homo sapiens
gatgggaggagggag

SEQ ID NO: 1217710 - DNA, 15 bp, Homo sapiens
ggatgggaggaggga

SEQ ID NO: 1217711 - DNA, 15 bp, Homo sapiens
aggatgggaggaggg

SEQ ID NO: 1217712 - DNA, 15 bp, Homo sapiens
gaggatgggaggagg

SEQ ID NO: 1217713 - DNA, 15 bp, Homo sapiens
ggaggatgggaggag

SEQ ID NO: 1217714 - DNA, 15 bp, Homo sapiens
tggaggatgggagga

SEQ ID NO: 1217715 - DNA, 15 bp, Homo sapiens
gtggaggatgggagg

SEQ ID NO: 1217716 - DNA, 15 bp, Homo sapiens
ggtggaggatgggag

SEQ ID NO: 1217717 - DNA, 15 bp, Homo sapiens
gggtggaggatggga

SEQ ID NO: 1217718 - DNA, 15 bp, Homo sapiens
agggtggaggatggg

SEQ ID NO: 1217719 - DNA, 15 bp, Homo sapiens
gagggtggaggatgg

SEQ ID NO: 1217720 - DNA, 15 bp, Homo sapiens
tgagggtggaggatg

SEQ ID NO: 1217721 - DNA, 15 bp, Homo sapiens
ctgagggtggaggat

SEQ ID NO: 1217722 - DNA, 15 bp, Homo sapiens
actgagggtggagga

SEQ ID NO: 1217723 - DNA, 15 bp, Homo sapiens
aactgagggtggagg

SEQ ID NO: 1217724 - DNA, 15 bp, Homo sapiens
taactgagggtggag

SEQ ID NO: 1217725 - DNA, 15 bp, Homo sapiens
ctaactgagggtgga

SEQ ID NO: 1217726 - DNA, 15 bp, Homo sapiens
cctaactgagggtgg

SEQ ID NO: 1217727 - DNA, 15 bp, Homo sapiens
acctaactgagggtg

SEQ ID NO: 1217728 - DNA, 15 bp, Homo sapiens
cacctaactgagggt

SEQ ID NO: 1217729 - DNA, 15 bp, Homo sapiens
tcacctaactgaggg

SEQ ID NO: 1217730 - DNA, 15 bp, Homo sapiens
ttcacctaactgagg

SEQ ID NO: 1217731 - DNA, 15 bp, Homo sapiens
attcacctaactgag

SEQ ID NO: 1217732 - DNA, 15 bp, Homo sapiens
gattcacctaactga

SEQ ID NO: 1217733 - DNA, 15 bp, Homo sapiens
ggattcacctaactg

SEQ ID NO: 1217734 - DNA, 15 bp, Homo sapiens
aggattcacctaact

SEQ ID NO: 1217735 - DNA, 15 bp, Homo sapiens
aaggattcacctaac

SEQ ID NO: 1217736 - DNA, 15 bp, Homo sapiens
aaaggattcacctaa

SEQ ID NO: 1217737 - DNA, 15 bp, Homo sapiens
aaaaggattcaccta

SEQ ID NO: 1217738 - DNA, 15 bp, Homo sapiens
aaaaaggattcacct

SEQ ID NO: 1217739 - DNA, 15 bp, Homo sapiens
aaaaaaggattcacc

SEQ ID NO: 1217740 - DNA, 15 bp, Homo sapiens
taaaaaaggattcac

SEQ ID NO: 1217741 - DNA, 15 bp, Homo sapiens
ttaaaaaaggattca

SEQ ID NO: 1217742 - DNA, 15 bp, Homo sapiens
tttaaaaaaggattc

SEQ ID NO: 1217743 - DNA, 15 bp, Homo sapiens
ttttaaaaaaggatt

SEQ ID NO: 1217744 - DNA, 15 bp, Homo sapiens
tttttaaaaaaggat

SEQ ID NO: 1217745 - DNA, 15 bp, Homo sapiens
ttttttaaaaaagga

SEQ ID NO: 1217746 - DNA, 15 bp, Homo sapiens
cttttttaaaaaagg

SEQ ID NO: 1217747 - DNA, 15 bp, Homo sapiens
tcttttttaaaaaag

SEQ ID NO: 1217748 - DNA, 15 bp, Homo sapiens
ctcttttttaaaaaa

SEQ ID NO: 1217749 - DNA, 15 bp, Homo sapiens
actcttttttaaaaa

SEQ ID NO: 1217750 - DNA, 15 bp, Homo sapiens
tactcttttttaaaa

SEQ ID NO: 1217751 - DNA, 15 bp, Homo sapiens
atactcttttttaaa

SEQ ID NO: 1217752 - DNA, 15 bp, Homo sapiens
aatactcttttttaa

SEQ ID NO: 1217753 - DNA, 15 bp, Homo sapiens
taatactctttttta

SEQ ID NO: 1217754 - DNA, 15 bp, Homo sapiens
ttaatactctttttt

SEQ ID NO: 1217755 - DNA, 15 bp, Homo sapiens
tttaatactcttttt

SEQ ID NO: 1217756 - DNA, 15 bp, Homo sapiens
ttttaatactctttt

SEQ ID NO: 1217757 - DNA, 15 bp, Homo sapiens
tttttaatactcttt

SEQ ID NO: 1217758 - DNA, 15 bp, Homo sapiens
atttttaatactctt

SEQ ID NO: 1217759 - DNA, 15 bp, Homo sapiens
tatttttaatactct

SEQ ID NO: 1217760 - DNA, 15 bp, Homo sapiens
gtatttttaatactc

SEQ ID NO: 1217761 - DNA, 15 bp, Homo sapiens
ggtatttttaatact

SEQ ID NO: 1217762 - DNA, 15 bp, Homo sapiens
tggtatttttaatac

SEQ ID NO: 1217763 - DNA, 15 bp, Homo sapiens
gtggtatttttaata

SEQ ID NO: 1217764 - DNA, 15 bp, Homo sapiens
agtggtatttttaat

SEQ ID NO: 1217765 - DNA, 15 bp, Homo sapiens
cagtggtatttttaa

SEQ ID NO: 1217766 - DNA, 15 bp, Homo sapiens
tcagtggtattttta

SEQ ID NO: 1217767 - DNA, 15 bp, Homo sapiens
atcagtggtattttt

SEQ ID NO: 1217768 - DNA, 15 bp, Homo sapiens
catcagtggtatttt

SEQ ID NO: 1217769 - DNA, 15 bp, Homo sapiens
gcatcagtggtattt

SEQ ID NO: 1217770 - DNA, 15 bp, Homo sapiens
tgcatcagtggtatt

SEQ ID NO: 1217771 - DNA, 15 bp, Homo sapiens
gtgcatcagtggtat

SEQ ID NO: 1217772 - DNA, 15 bp, Homo sapiens
agtgcatcagtggta

SEQ ID NO: 1217773 - DNA, 15 bp, Homo sapiens
aagtgcatcagtggt

SEQ ID NO: 1217774 - DNA, 15 bp, Homo sapiens
aaagtgcatcagtgg

SEQ ID NO: 1217775 - DNA, 15 bp, Homo sapiens
caaagtgcatcagtg

SEQ ID NO: 1217776 - DNA, 15 bp, Homo sapiens
ccaaagtgcatcagt

SEQ ID NO: 1217777 - DNA, 15 bp, Homo sapiens
cccaaagtgcatcag

SEQ ID NO: 1217778 - DNA, 15 bp, Homo sapiens
tcccaaagtgcatca

SEQ ID NO: 1217779 - DNA, 15 bp, Homo sapiens
ctcccaaagtgcatc

SEQ ID NO: 1217780 - DNA, 15 bp, Homo sapiens
cctcccaaagtgcat

SEQ ID NO: 1217781 - DNA, 15 bp, Homo sapiens
gcctcccaaagtgca

SEQ ID NO: 1217782 - DNA, 15 bp, Homo sapiens
acccgcctgggcctc

SEQ ID NO: 1217783 - DNA, 15 bp, Homo sapiens
tacccgcctgggcct

SEQ ID NO: 1217784 - DNA, 15 bp, Homo sapiens
ctacccgcctgggcc

SEQ ID NO: 1217785 - DNA, 15 bp, Homo sapiens
tctacccgcctgggc

SEQ ID NO: 1217786 - DNA, 15 bp, Homo sapiens
atctacccgcctggg

SEQ ID NO: 1217787 - DNA, 15 bp, Homo sapiens
gatctacccgcctgg

SEQ ID NO: 1217788 - DNA, 15 bp, Homo sapiens
tgatctacccgcctg

SEQ ID NO: 1217789 - DNA, 15 bp, Homo sapiens
gtgatctacccgcct

SEQ ID NO: 1217790 - DNA, 15 bp, Homo sapiens
ggtgatctacccgcc

SEQ ID NO: 1217791 - DNA, 15 bp, Homo sapiens
aggtgatctacccgc

SEQ ID NO: 1217792 - DNA, 15 bp, Homo sapiens
caggtgatctacccg

SEQ ID NO: 1217793 - DNA, 15 bp, Homo sapiens
tcaggtgatctaccc

SEQ ID NO: 1217794 - DNA, 15 bp, Homo sapiens
ctcaggtgatctacc

SEQ ID NO: 1217795 - DNA, 15 bp, Homo sapiens
cctcaggtgatctac

SEQ ID NO: 1217796 - DNA, 15 bp, Homo sapiens
acctcaggtgatcta

SEQ ID NO: 1217797 - DNA, 15 bp, Homo sapiens
gaggctggtcttgaa

SEQ ID NO: 1217798 - DNA, 15 bp, Homo sapiens
cgaggctggtcttga

SEQ ID NO: 1217799 - DNA, 15 bp, Homo sapiens
gcgaggctggtcttg

SEQ ID NO: 1217800 - DNA, 15 bp, Homo sapiens
ggcgaggctggtctt

SEQ ID NO: 1217801 - DNA, 15 bp, Homo sapiens
tggcgaggctggtct

SEQ ID NO: 1217802 - DNA, 15 bp, Homo sapiens
ttggcgaggctggtc

SEQ ID NO: 1217803 - DNA, 15 bp, Homo sapiens
gttggcgaggctggt

SEQ ID NO: 1217804 - DNA, 15 bp, Homo sapiens
tgttggcgaggctgg

SEQ ID NO: 1217805 - DNA, 15 bp, Homo sapiens
atgttggcgaggctg

SEQ ID NO: 1217806 - DNA, 15 bp, Homo sapiens
catgttggcgaggct

SEQ ID NO: 1217807 - DNA, 15 bp, Homo sapiens
ccatgttggcgaggc

SEQ ID NO: 1217808 - DNA, 15 bp, Homo sapiens
gccatgttggcgagg

SEQ ID NO: 1217809 - DNA, 15 bp, Homo sapiens
cgccatgttggcgag

SEQ ID NO: 1217810 - DNA, 15 bp, Homo sapiens
tcgccatgttggcga

SEQ ID NO: 1217811 - DNA, 15 bp, Homo sapiens
ttcgccatgttggcg

SEQ ID NO: 1217812 - DNA, 15 bp, Homo sapiens
taccatgcccggcta

SEQ ID NO: 1217813 - DNA, 15 bp, Homo sapiens
ctaccatgcccggct

SEQ ID NO: 1217814 - DNA, 15 bp, Homo sapiens
gctaccatgcccggc

SEQ ID NO: 1217815 - DNA, 15 bp, Homo sapiens
cgctaccatgcccgg

SEQ ID NO: 1217816 - DNA, 15 bp, Homo sapiens
gcgctaccatgcccg

SEQ ID NO: 1217817 - DNA, 15 bp, Homo sapiens
ggcgctaccatgccc

SEQ ID NO: 1217818 - DNA, 15 bp, Homo sapiens
aggcgctaccatgcc

SEQ ID NO: 1217819 - DNA, 15 bp, Homo sapiens
caggcgctaccatgc

SEQ ID NO: 1217820 - DNA, 15 bp, Homo sapiens
acaggcgctaccatg

SEQ ID NO: 1217821 - DNA, 15 bp, Homo sapiens
tacaggcgctaccat

SEQ ID NO: 1217822 - DNA, 15 bp, Homo sapiens
ttacaggcgctacca

SEQ ID NO: 1217823 - DNA, 15 bp, Homo sapiens
attacaggcgctacc

SEQ ID NO: 1217824 - DNA, 15 bp, Homo sapiens
gattacaggcgctac

SEQ ID NO: 1217825 - DNA, 15 bp, Homo sapiens
ggattacaggcgcta

SEQ ID NO: 1217826 - DNA, 15 bp, Homo sapiens
gggattacaggcgct

SEQ ID NO: 1217827 - DNA, 15 bp, Homo sapiens
agttcaagcaattct

SEQ ID NO: 1217828 - DNA, 15 bp, Homo sapiens
gagttcaagcaattc

SEQ ID NO: 1217829 - DNA, 15 bp, Homo sapiens
cgagttcaagcaatt

SEQ ID NO: 1217830 - DNA, 15 bp, Homo sapiens
ccgagttcaagcaat

SEQ ID NO: 1217831 - DNA, 15 bp, Homo sapiens
cccgagttcaagcaa

SEQ ID NO: 1217832 - DNA, 15 bp, Homo sapiens
gcctcccgagttcaa

SEQ ID NO: 1217833 - DNA, 15 bp, Homo sapiens
tgcctcccgagttca

SEQ ID NO: 1217834 - DNA, 15 bp, Homo sapiens
ctgcctcccgagttc

SEQ ID NO: 1217835 - DNA, 15 bp, Homo sapiens
tctgcctcccgagtt

SEQ ID NO: 1217836 - DNA, 15 bp, Homo sapiens
ctctgcctcccgagt

SEQ ID NO: 1217837 - DNA, 15 bp, Homo sapiens
tctctgcctcccgag

SEQ ID NO: 1217838 - DNA, 15 bp, Homo sapiens
atctctgcctcccga

SEQ ID NO: 1217839 - DNA, 15 bp, Homo sapiens
aatctctgcctcccg

SEQ ID NO: 1217840 - DNA, 15 bp, Homo sapiens
caatctctgcctccc

SEQ ID NO: 1217841 - DNA, 15 bp, Homo sapiens
gcaatctctgcctcc

SEQ ID NO: 1217842 - DNA, 15 bp, Homo sapiens
tgcaatctctgcctc

SEQ ID NO: 1217843 - DNA, 15 bp, Homo sapiens
ctgcaatctctgcct

SEQ ID NO: 1217844 - DNA, 15 bp, Homo sapiens
actgcaatctctgcc

SEQ ID NO: 1217845 - DNA, 15 bp, Homo sapiens
cactgcaatctctgc

SEQ ID NO: 1217846 - DNA, 15 bp, Homo sapiens
tcactgcaatctctg

SEQ ID NO: 1217847 - DNA, 15 bp, Homo sapiens
ctcactgcaatctct

SEQ ID NO: 1217848 - DNA, 15 bp, Homo sapiens
gctcactgcaatctc

SEQ ID NO: 1217849 - DNA, 15 bp, Homo sapiens
agctcactgcaatct

SEQ ID NO: 1217850 - DNA, 15 bp, Homo sapiens
cagctcactgcaatc

SEQ ID NO: 1217851 - DNA, 15 bp, Homo sapiens
tcagctcactgcaat

SEQ ID NO: 1217852 - DNA, 15 bp, Homo sapiens
atggtgtgatctcag

SEQ ID NO: 1217853 - DNA, 15 bp, Homo sapiens
aatggtgtgatctca

SEQ ID NO: 1217854 - DNA, 15 bp, Homo sapiens
ctgctgcccaggctg

SEQ ID NO: 1217855 - DNA, 15 bp, Homo sapiens
tctgctgcccaggct

SEQ ID NO: 1217856 - DNA, 15 bp, Homo sapiens
ctctgctgcccaggc

SEQ ID NO: 1217857 - DNA, 15 bp, Homo sapiens
actctgctgcccagg

SEQ ID NO: 1217858 - DNA, 15 bp, Homo sapiens
cactctgctgcccag

SEQ ID NO: 1217859 - DNA, 15 bp, Homo sapiens
ccactctgctgccca

SEQ ID NO: 1217860 - DNA, 15 bp, Homo sapiens
cccactctgctgccc

SEQ ID NO: 1217861 - DNA, 15 bp, Homo sapiens
tcccactctgctgcc

SEQ ID NO: 1217862 - DNA, 15 bp, Homo sapiens
gtcccactctgctgc

SEQ ID NO: 1217863 - DNA, 15 bp, Homo sapiens
agtcccactctgctg

SEQ ID NO: 1217864 - DNA, 15 bp, Homo sapiens
gagtcccactctgct

SEQ ID NO: 1217865 - DNA, 15 bp, Homo sapiens
agagtcccactctgc

SEQ ID NO: 1217866 - DNA, 15 bp, Homo sapiens
cagagtcccactctg

SEQ ID NO: 1217867 - DNA, 15 bp, Homo sapiens
acagagtcccactct

SEQ ID NO: 1217868 - DNA, 15 bp, Homo sapiens
gacagagtcccactc

SEQ ID NO: 1217869 - DNA, 15 bp, Homo sapiens
agacagagtcccact

SEQ ID NO: 1217870 - DNA, 15 bp, Homo sapiens
gagacagagtcccac

SEQ ID NO: 1217871 - DNA, 15 bp, Homo sapiens
tgagacagagtccca

SEQ ID NO: 1217872 - DNA, 15 bp, Homo sapiens
ttgagacagagtccc

SEQ ID NO: 1217873 - DNA, 15 bp, Homo sapiens
tttgagacagagtcc

SEQ ID NO: 1217874 - DNA, 15 bp, Homo sapiens
actttttcttttttt

SEQ ID NO: 1217875 - DNA, 15 bp, Homo sapiens
tactttttctttttt

SEQ ID NO: 1217876 - DNA, 15 bp, Homo sapiens
ttactttttcttttt

SEQ ID NO: 1217877 - DNA, 15 bp, Homo sapiens
tttactttttctttt

SEQ ID NO: 1217878 - DNA, 15 bp, Homo sapiens
cttttactttttctt

SEQ ID NO: 1217879 - DNA, 15 bp, Homo sapiens
acttttactttttct

SEQ ID NO: 1217880 - DNA, 15 bp, Homo sapiens
tacttttactttttc

SEQ ID NO: 1217881 - DNA, 15 bp, Homo sapiens
gtacttttacttttt

SEQ ID NO: 1217882 - DNA, 15 bp, Homo sapiens
ggtacttttactttt

SEQ ID NO: 1217883 - DNA, 15 bp, Homo sapiens
tggtacttttacttt

SEQ ID NO: 1217884 - DNA, 15 bp, Homo sapiens
gtggtacttttactt

SEQ ID NO: 1217885 - DNA, 15 bp, Homo sapiens
agtggtacttttact

SEQ ID NO: 1217886 - DNA, 15 bp, Homo sapiens
cagtggtacttttac

SEQ ID NO: 1217887 - DNA, 15 bp, Homo sapiens
tcagtggtactttta

SEQ ID NO: 1217888 - DNA, 15 bp, Homo sapiens
atcagtggtactttt

SEQ ID NO: 1217889 - DNA, 15 bp, Homo sapiens
catcagtggtacttt

SEQ ID NO: 1217890 - DNA, 15 bp, Homo sapiens
tcatcagtggtactt

SEQ ID NO: 1217891 - DNA, 15 bp, Homo sapiens
ttcatcagtggtact

SEQ ID NO: 1217892 - DNA, 15 bp, Homo sapiens
tttcatcagtggtac

SEQ ID NO: 1217893 - DNA, 15 bp, Homo sapiens
ttttcatcagtggta

SEQ ID NO: 1217894 - DNA, 15 bp, Homo sapiens
cttttcatcagtggt

SEQ ID NO: 1217895 - DNA, 15 bp, Homo sapiens
tcttttcatcagtgg

SEQ ID NO: 1217896 - DNA, 15 bp, Homo sapiens
ttcttttcatcagtg

SEQ ID NO: 1217897 - DNA, 15 bp, Homo sapiens
cttcttttcatcagt

SEQ ID NO: 1217898 - DNA, 15 bp, Homo sapiens
tcttcttttcatcag

SEQ ID NO: 1217899 - DNA, 15 bp, Homo sapiens
ctcttcttttcatca

SEQ ID NO: 1217900 - DNA, 15 bp, Homo sapiens
tctcttcttttcatc

SEQ ID NO: 1217901 - DNA, 15 bp, Homo sapiens
ctctcttcttttcat

SEQ ID NO: 1217902 - DNA, 15 bp, Homo sapiens
tctctcttcttttca

SEQ ID NO: 1217903 - DNA, 15 bp, Homo sapiens
atctctcttcttttc

SEQ ID NO: 1217904 - DNA, 15 bp, Homo sapiens
catctctcttctttt

SEQ ID NO: 1217905 - DNA, 15 bp, Homo sapiens
ccatctctcttcttt

SEQ ID NO: 1217906 - DNA, 15 bp, Homo sapiens
cccatctctcttctt

SEQ ID NO: 1217907 - DNA, 15 bp, Homo sapiens
acccatctctcttct

SEQ ID NO: 1217908 - DNA, 15 bp, Homo sapiens
cacccatctctcttc

SEQ ID NO: 1217909 - DNA, 15 bp, Homo sapiens
acacccatctctctt

SEQ ID NO: 1217910 - DNA, 15 bp, Homo sapiens
tacacccatctctct

SEQ ID NO: 1217911 - DNA, 15 bp, Homo sapiens
ctacacccatctctc

SEQ ID NO: 1217912 - DNA, 15 bp, Homo sapiens
tctacacccatctct

SEQ ID NO: 1217913 - DNA, 15 bp, Homo sapiens
atctacacccatctc

SEQ ID NO: 1217914 - DNA, 15 bp, Homo sapiens
tatctacacccatct

SEQ ID NO: 1217915 - DNA, 15 bp, Homo sapiens
gtatctacacccatc

SEQ ID NO: 1217916 - DNA, 15 bp, Homo sapiens
tgtatctacacccat

SEQ ID NO: 1217917 - DNA, 15 bp, Homo sapiens
ctgtatctacaccca

SEQ ID NO: 1217918 - DNA, 15 bp, Homo sapiens
actgtatctacaccc

SEQ ID NO: 1217919 - DNA, 15 bp, Homo sapiens
gactgtatctacacc

SEQ ID NO: 1217920 - DNA, 15 bp, Homo sapiens
tgactgtatctacac

SEQ ID NO: 1217921 - DNA, 15 bp, Homo sapiens
ctgactgtatctaca

SEQ ID NO: 1217922 - DNA, 15 bp, Homo sapiens
tctgactgtatctac

SEQ ID NO: 1217923 - DNA, 15 bp, Homo sapiens
ttctgactgtatcta

SEQ ID NO: 1217924 - DNA, 15 bp, Homo sapiens
gttctgactgtatct

SEQ ID NO: 1217925 - DNA, 15 bp, Homo sapiens
tgttctgactgtatc

SEQ ID NO: 1217926 - DNA, 15 bp, Homo sapiens
atgttctgactgtat

SEQ ID NO: 1217927 - DNA, 15 bp, Homo sapiens
tatgttctgactgta

SEQ ID NO: 1217928 - DNA, 15 bp, Homo sapiens
atatgttctgactgt

SEQ ID NO: 1217929 - DNA, 15 bp, Homo sapiens
tatatgttctgactg

SEQ ID NO: 1217930 - DNA, 15 bp, Homo sapiens
atatatgttctgact

SEQ ID NO: 1217931 - DNA, 15 bp, Homo sapiens
catatatgttctgac

SEQ ID NO: 1217932 - DNA, 15 bp, Homo sapiens
acatatatgttctga

SEQ ID NO: 1217933 - DNA, 15 bp, Homo sapiens
tacatatatgttctg

SEQ ID NO: 1217934 - DNA, 15 bp, Homo sapiens
gtacatatatgttct

SEQ ID NO: 1217935 - DNA, 15 bp, Homo sapiens
tgtacatatatgttc

SEQ ID NO: 1217936 - DNA, 15 bp, Homo sapiens
gtgtacatatatgtt

SEQ ID NO: 1217937 - DNA, 15 bp, Homo sapiens
agtgtacatatatgt

SEQ ID NO: 1217938 - DNA, 15 bp, Homo sapiens
cagtgtacatatatg

SEQ ID NO: 1217939 - DNA, 15 bp, Homo sapiens
acagtgtacatatat

SEQ ID NO: 1217940 - DNA, 15 bp, Homo sapiens
cacagtgtacatata

SEQ ID NO: 1217941 - DNA, 15 bp, Homo sapiens
gcacagtgtacatat

SEQ ID NO: 1217942 - DNA, 15 bp, Homo sapiens
agcacagtgtacata

SEQ ID NO: 1217943 - DNA, 15 bp, Homo sapiens
cagcacagtgtacat

SEQ ID NO: 1217944 - DNA, 15 bp, Homo sapiens
acagcacagtgtaca

SEQ ID NO: 1217945 - DNA, 15 bp, Homo sapiens
tacagcacagtgtac

SEQ ID NO: 1217946 - DNA, 15 bp, Homo sapiens
ctacagcacagtgta

SEQ ID NO: 1217947 - DNA, 15 bp, Homo sapiens
actacagcacagtgt

SEQ ID NO: 1217948 - DNA, 15 bp, Homo sapiens
aactacagcacagtg

SEQ ID NO: 1217949 - DNA, 15 bp, Homo sapiens
aaactacagcacagt

SEQ ID NO: 1217950 - DNA, 15 bp, Homo sapiens
aaaactacagcacag

SEQ ID NO: 1217951 - DNA, 15 bp, Homo sapiens
taaaactacagcaca

SEQ ID NO: 1217952 - DNA, 15 bp, Homo sapiens
ttaaaactacagcac

SEQ ID NO: 1217953 - DNA, 15 bp, Homo sapiens
tttaaaactacagca

SEQ ID NO: 1217954 - DNA, 15 bp, Homo sapiens
atttaaaactacagc

SEQ ID NO: 1217955 - DNA, 15 bp, Homo sapiens
aatttaaaactacag

SEQ ID NO: 1217956 - DNA, 15 bp, Homo sapiens
caatttaaaactaca

SEQ ID NO: 1217957 - DNA, 15 bp, Homo sapiens
acaatttaaaactac

SEQ ID NO: 1217958 - DNA, 15 bp, Homo sapiens
aacaatttaaaacta

SEQ ID NO: 1217959 - DNA, 15 bp, Homo sapiens
aaacaatttaaaact

SEQ ID NO: 1217960 - DNA, 15 bp, Homo sapiens
gaaacaatttaaaac

SEQ ID NO: 1217961 - DNA, 15 bp, Homo sapiens
ggaaacaatttaaaa

SEQ ID NO: 1217962 - DNA, 15 bp, Homo sapiens
tggaaacaatttaaa

SEQ ID NO: 1217963 - DNA, 15 bp, Homo sapiens
gtggaaacaatttaa

SEQ ID NO: 1217964 - DNA, 15 bp, Homo sapiens
agtggaaacaattta

SEQ ID NO: 1217965 - DNA, 15 bp, Homo sapiens
aagtggaaacaattt

SEQ ID NO: 1217966 - DNA, 15 bp, Homo sapiens
gaagtggaaacaatt

SEQ ID NO: 1217967 - DNA, 15 bp, Homo sapiens
agaagtggaaacaat

SEQ ID NO: 1217968 - DNA, 15 bp, Homo sapiens
tagaagtggaaacaa

SEQ ID NO: 1217969 - DNA, 15 bp, Homo sapiens
atagaagtggaaaca

SEQ ID NO: 1217970 - DNA, 15 bp, Homo sapiens
aatagaagtggaaac

SEQ ID NO: 1217971 - DNA, 15 bp, Homo sapiens
taatagaagtggaaa

SEQ ID NO: 1217972 - DNA, 15 bp, Homo sapiens
ataatagaagtggaa

SEQ ID NO: 1217973 - DNA, 15 bp, Homo sapiens
aataatagaagtgga

SEQ ID NO: 1217974 - DNA, 15 bp, Homo sapiens
aaataatagaagtgg

SEQ ID NO: 1217975 - DNA, 15 bp, Homo sapiens
gaaataatagaagtg

SEQ ID NO: 1217976 - DNA, 15 bp, Homo sapiens
agaaataatagaagt

SEQ ID NO: 1217977 - DNA, 15 bp, Homo sapiens
gagaaataatagaag

SEQ ID NO: 1217978 - DNA, 15 bp, Homo sapiens
agagaaataatagaa

SEQ ID NO: 1217979 - DNA, 15 bp, Homo sapiens
tagagaaataataga

SEQ ID NO: 1217980 - DNA, 15 bp, Homo sapiens
atagagaaataatag

SEQ ID NO: 1217981 - DNA, 15 bp, Homo sapiens
aatagagaaataata

SEQ ID NO: 1217982 - DNA, 15 bp, Homo sapiens
aaatagagaaataat

SEQ ID NO: 1217983 - DNA, 15 bp, Homo sapiens
aaaatagagaaataa

SEQ ID NO: 1217984 - DNA, 15 bp, Homo sapiens
aaaaatagagaaata

SEQ ID NO: 1217985 - DNA, 15 bp, Homo sapiens
aaaaaatagagaaat

SEQ ID NO: 1217986 - DNA, 15 bp, Homo sapiens
gaaaaaaatagagaa

SEQ ID NO: 1217987 - DNA, 15 bp, Homo sapiens
agaaaaaaatagaga

SEQ ID NO: 1217988 - DNA, 15 bp, Homo sapiens
gagaaaaaaatagag

SEQ ID NO: 1217989 - DNA, 15 bp, Homo sapiens
ggagaaaaaaataga

SEQ ID NO: 1217990 - DNA, 15 bp, Homo sapiens
tggagaaaaaaatag

SEQ ID NO: 1217991 - DNA, 15 bp, Homo sapiens
atggagaaaaaaata

SEQ ID NO: 1217992 - DNA, 15 bp, Homo sapiens
aatggagaaaaaaat

SEQ ID NO: 1217993 - DNA, 15 bp, Homo sapiens
taatggagaaaaaaa

SEQ ID NO: 1217994 - DNA, 15 bp, Homo sapiens
ataatggagaaaaaa

SEQ ID NO: 1217995 - DNA, 15 bp, Homo sapiens
aataatggagaaaaa

SEQ ID NO: 1217996 - DNA, 15 bp, Homo sapiens
aaataatggagaaaa

SEQ ID NO: 1217997 - DNA, 15 bp, Homo sapiens
gaaataatggagaaa

SEQ ID NO: 1217998 - DNA, 15 bp, Homo sapiens
agaaataatggagaa

SEQ ID NO: 1217999 - DNA, 15 bp, Homo sapiens
gagaaataatggaga

SEQ ID NO: 1218000 - DNA, 15 bp, Homo sapiens
tgagaaataatggag

SEQ ID NO: 1218001 - DNA, 15 bp, Homo sapiens
ttgagaaataatgga

SEQ ID NO: 1218002 - DNA, 15 bp, Homo sapiens
tttgagaaataatgg

SEQ ID NO: 1218003 - DNA, 15 bp, Homo sapiens
ttttgagaaataatg

SEQ ID NO: 1218004 - DNA, 15 bp, Homo sapiens
attttgagaaataat

SEQ ID NO: 1218005 - DNA, 15 bp, Homo sapiens
tattttgagaaataa

SEQ ID NO: 1218006 - DNA, 15 bp, Homo sapiens
ctattttgagaaata

SEQ ID NO: 1218007 - DNA, 15 bp, Homo sapiens
tctattttgagaaat

SEQ ID NO: 1218008 - DNA, 15 bp, Homo sapiens
atctattttgagaaa

SEQ ID NO: 1218009 - DNA, 15 bp, Homo sapiens
aatctattttgagaa

SEQ ID NO: 1218010 - DNA, 15 bp, Homo sapiens
aaatctattttgaga

SEQ ID NO: 1218011 - DNA, 15 bp, Homo sapiens
caaatctattttgag

SEQ ID NO: 1218012 - DNA, 15 bp, Homo sapiens
ccaaatctattttga

SEQ ID NO: 1218013 - DNA, 15 bp, Homo sapiens
accaaatctattttg

SEQ ID NO: 1218014 - DNA, 15 bp, Homo sapiens
aaccaaatctatttt

SEQ ID NO: 1218015 - DNA, 15 bp, Homo sapiens
aaaccaaatctattt

SEQ ID NO: 1218016 - DNA, 15 bp, Homo sapiens
aaaaccaaatctatt

SEQ ID NO: 1218017 - DNA, 15 bp, Homo sapiens
caaaaccaaatctat

SEQ ID NO: 1218018 - DNA, 15 bp, Homo sapiens
gcaaaaccaaatcta

SEQ ID NO: 1218019 - DNA, 15 bp, Homo sapiens
tgcaaaaccaaatct

SEQ ID NO: 1218020 - DNA, 15 bp, Homo sapiens
atgcaaaaccaaatc

SEQ ID NO: 1218021 - DNA, 15 bp, Homo sapiens
catgcaaaaccaaat

SEQ ID NO: 1218022 - DNA, 15 bp, Homo sapiens
acatgcaaaaccaaa

SEQ ID NO: 1218023 - DNA, 15 bp, Homo sapiens
aacatgcaaaaccaa

SEQ ID NO: 1218024 - DNA, 15 bp, Homo sapiens
aaacatgcaaaacca

SEQ ID NO: 1218025 - DNA, 15 bp, Homo sapiens
taaacatgcaaaacc

SEQ ID NO: 1218026 - DNA, 15 bp, Homo sapiens
ttaaacatgcaaaac

SEQ ID NO: 1218027 - DNA, 15 bp, Homo sapiens
tttaaacatgcaaaa

SEQ ID NO: 1218028 - DNA, 15 bp, Homo sapiens
ttttaaacatgcaaa

SEQ ID NO: 1218029 - DNA, 15 bp, Homo sapiens
cttttaaacatgcaa

SEQ ID NO: 1218030 - DNA, 15 bp, Homo sapiens
tcttttaaacatgca

SEQ ID NO: 1218031 - DNA, 15 bp, Homo sapiens
gtcttttaaacatgc

SEQ ID NO: 1218032 - DNA, 15 bp, Homo sapiens
cgtcttttaaacatg

SEQ ID NO: 1218033 - DNA, 15 bp, Homo sapiens
gcgtcttttaaacat

SEQ ID NO: 1218034 - DNA, 15 bp, Homo sapiens
agcgtcttttaaaca

SEQ ID NO: 1218035 - DNA, 15 bp, Homo sapiens
gagcgtcttttaaac

SEQ ID NO: 1218036 - DNA, 15 bp, Homo sapiens
agagcgtcttttaaa

SEQ ID NO: 1218037 - DNA, 15 bp, Homo sapiens
tagagcgtcttttaa

SEQ ID NO: 1218038 - DNA, 15 bp, Homo sapiens
atagagcgtctttta

SEQ ID NO: 1218039 - DNA, 15 bp, Homo sapiens
tatagagcgtctttt

SEQ ID NO: 1218040 - DNA, 15 bp, Homo sapiens
ttatagagcgtcttt

SEQ ID NO: 1218041 - DNA, 15 bp, Homo sapiens
tttatagagcgtctt

SEQ ID NO: 1218042 - DNA, 15 bp, Homo sapiens
atttatagagcgtct

SEQ ID NO: 1218043 - DNA, 15 bp, Homo sapiens
catttatagagcgtc

SEQ ID NO: 1218044 - DNA, 15 bp, Homo sapiens
gcatttatagagcgt

SEQ ID NO: 1218045 - DNA, 15 bp, Homo sapiens
agcatttatagagcg

SEQ ID NO: 1218046 - DNA, 15 bp, Homo sapiens
gagcatttatagagc

SEQ ID NO: 1218047 - DNA, 15 bp, Homo sapiens
ggagcatttatagag

SEQ ID NO: 1218048 - DNA, 15 bp, Homo sapiens
tggagcatttataga

SEQ ID NO: 1218049 - DNA, 15 bp, Homo sapiens
ttggagcatttatag

SEQ ID NO: 1218050 - DNA, 15 bp, Homo sapiens
tttggagcatttata

SEQ ID NO: 1218051 - DNA, 15 bp, Homo sapiens
atttggagcatttat

SEQ ID NO: 1218052 - DNA, 15 bp, Homo sapiens
aatttggagcattta

SEQ ID NO: 1218053 - DNA, 15 bp, Homo sapiens
taatttggagcattt

SEQ ID NO: 1218054 - DNA, 15 bp, Homo sapiens
ctaatttggagcatt

SEQ ID NO: 1218055 - DNA, 15 bp, Homo sapiens
actaatttggagcat

SEQ ID NO: 1218056 - DNA, 15 bp, Homo sapiens
gactaatttggagca

SEQ ID NO: 1218057 - DNA, 15 bp, Homo sapiens
ggactaatttggagc

SEQ ID NO: 1218058 - DNA, 15 bp, Homo sapiens
aggactaatttggag

SEQ ID NO: 1218059 - DNA, 15 bp, Homo sapiens
gaggactaatttgga

SEQ ID NO: 1218060 - DNA, 15 bp, Homo sapiens
tgaggactaatttgg

SEQ ID NO: 1218061 - DNA, 15 bp, Homo sapiens
gtgaggactaatttg

SEQ ID NO: 1218062 - DNA, 15 bp, Homo sapiens
tgtgaggactaattt

SEQ ID NO: 1218063 - DNA, 15 bp, Homo sapiens
ttgtgaggactaatt

SEQ ID NO: 1218064 - DNA, 15 bp, Homo sapiens
tttgtgaggactaat

SEQ ID NO: 1218065 - DNA, 15 bp, Homo sapiens
ctttgtgaggactaa

SEQ ID NO: 1218066 - DNA, 15 bp, Homo sapiens
gctttgtgaggacta

SEQ ID NO: 1218067 - DNA, 15 bp, Homo sapiens
ggctttgtgaggact

SEQ ID NO: 1218068 - DNA, 15 bp, Homo sapiens
tggctttgtgaggac

SEQ ID NO: 1218069 - DNA, 15 bp, Homo sapiens
ctggctttgtgagga

SEQ ID NO: 1218070 - DNA, 15 bp, Homo sapiens
gctggctttgtgagg

SEQ ID NO: 1218071 - DNA, 15 bp, Homo sapiens
agctggctttgtgag

SEQ ID NO: 1218072 - DNA, 15 bp, Homo sapiens
aagctggctttgtga

SEQ ID NO: 1218073 - DNA, 15 bp, Homo sapiens
gaagctggctttgtg

SEQ ID NO: 1218074 - DNA, 15 bp, Homo sapiens
agaagctggctttgt

SEQ ID NO: 1218075 - DNA, 15 bp, Homo sapiens
cagaagctggctttg

SEQ ID NO: 1218076 - DNA, 15 bp, Homo sapiens
tcagaagctggcttt

SEQ ID NO: 1218077 - DNA, 15 bp, Homo sapiens
ctcagaagctggctt

SEQ ID NO: 1218078 - DNA, 15 bp, Homo sapiens
gctcagaagctggct

SEQ ID NO: 1218079 - DNA, 15 bp, Homo sapiens
ggctcagaagctggc

SEQ ID NO: 1218080 - DNA, 15 bp, Homo sapiens
tggctcagaagctgg

SEQ ID NO: 1218081 - DNA, 15 bp, Homo sapiens
ttggctcagaagctg

SEQ ID NO: 1218082 - DNA, 15 bp, Homo sapiens
gttggctcagaagct

SEQ ID NO: 1218083 - DNA, 15 bp, Homo sapiens
ggttggctcagaagc

SEQ ID NO: 1218084 - DNA, 15 bp, Homo sapiens
cggttggctcagaag

SEQ ID NO: 1218085 - DNA, 15 bp, Homo sapiens
tcggttggctcagaa

SEQ ID NO: 1218086 - DNA, 15 bp, Homo sapiens
gtcggttggctcaga

SEQ ID NO: 1218087 - DNA, 15 bp, Homo sapiens
tgtcggttggctcag

SEQ ID NO: 1218088 - DNA, 15 bp, Homo sapiens
atgtcggttggctca

SEQ ID NO: 1218089 - DNA, 15 bp, Homo sapiens
aatgtcggttggctc

SEQ ID NO: 1218090 - DNA, 15 bp, Homo sapiens
caatgtcggttggct

SEQ ID NO: 1218091 - DNA, 15 bp, Homo sapiens
tcaatgtcggttggc

SEQ ID NO: 1218092 - DNA, 15 bp, Homo sapiens
ttcaatgtcggttgg

SEQ ID NO: 1218093 - DNA, 15 bp, Homo sapiens
attcaatgtcggttg

SEQ ID NO: 1218094 - DNA, 15 bp, Homo sapiens
tattcaatgtcggtt

SEQ ID NO: 1218095 - DNA, 15 bp, Homo sapiens
ttattcaatgtcggt

SEQ ID NO: 1218096 - DNA, 15 bp, Homo sapiens
attattcaatgtcgg

SEQ ID NO: 1218097 - DNA, 15 bp, Homo sapiens
cattattcaatgtcg

SEQ ID NO: 1218098 - DNA, 15 bp, Homo sapiens
tcattattcaatgtc

SEQ ID NO: 1218099 - DNA, 15 bp, Homo sapiens
ctcattattcaatgt

SEQ ID NO: 1218100 - DNA, 15 bp, Homo sapiens
tctcattattcaatg

SEQ ID NO: 1218101 - DNA, 15 bp, Homo sapiens
gtctcattattcaat

SEQ ID NO: 1218102 - DNA, 15 bp, Homo sapiens
tgtctcattattcaa

SEQ ID NO: 1218103 - DNA, 15 bp, Homo sapiens
atgtctcattattca

SEQ ID NO: 1218104 - DNA, 15 bp, Homo sapiens
aatgtctcattattc

SEQ ID NO: 1218105 - DNA, 15 bp, Homo sapiens
caatgtctcattatt

SEQ ID NO: 1218106 - DNA, 15 bp, Homo sapiens
gcaatgtctcattat

SEQ ID NO: 1218107 - DNA, 15 bp, Homo sapiens
agcaatgtctcatta

SEQ ID NO: 1218108 - DNA, 15 bp, Homo sapiens
cagcaatgtctcatt

SEQ ID NO: 1218109 - DNA, 15 bp, Homo sapiens
ccagcaatgtctcat

SEQ ID NO: 1218110 - DNA, 15 bp, Homo sapiens
gccagcaatgtctca

SEQ ID NO: 1218111 - DNA, 15 bp, Homo sapiens
tgccagcaatgtctc

SEQ ID NO: 1218112 - DNA, 15 bp, Homo sapiens
atgccagcaatgtct

SEQ ID NO: 1218113 - DNA, 15 bp, Homo sapiens
catgccagcaatgtc

SEQ ID NO: 1218114 - DNA, 15 bp, Homo sapiens
acatgccagcaatgt

SEQ ID NO: 1218115 - DNA, 15 bp, Homo sapiens
aacatgccagcaatg

SEQ ID NO: 1218116 - DNA, 15 bp, Homo sapiens
aaacatgccagcaat

SEQ ID NO: 1218117 - DNA, 15 bp, Homo sapiens
caaacatgccagcaa

SEQ ID NO: 1218118 - DNA, 15 bp, Homo sapiens
gcaaacatgccagca

SEQ ID NO: 1218119 - DNA, 15 bp, Homo sapiens
ggcaaacatgccagc

SEQ ID NO: 1218120 - DNA, 15 bp, Homo sapiens
tggcaaacatgccag

SEQ ID NO: 1218121 - DNA, 15 bp, Homo sapiens
ctggcaaacatgcca

SEQ ID NO: 1218122 - DNA, 15 bp, Homo sapiens
gctggcaaacatgcc

SEQ ID NO: 1218123 - DNA, 15 bp, Homo sapiens
ggctggcaaacatgc

SEQ ID NO: 1218124 - DNA, 15 bp, Homo sapiens
tggctggcaaacatg

SEQ ID NO: 1218125 - DNA, 15 bp, Homo sapiens
ttggctggcaaacat

SEQ ID NO: 1218126 - DNA, 15 bp, Homo sapiens
tttggctggcaaaca

SEQ ID NO: 1218127 - DNA, 15 bp, Homo sapiens
ttttggctggcaaac

SEQ ID NO: 1218128 - DNA, 15 bp, Homo sapiens
tttttggctggcaaa

SEQ ID NO: 1218129 - DNA, 15 bp, Homo sapiens
atttttggctggcaa

SEQ ID NO: 1218130 - DNA, 15 bp, Homo sapiens
tatttttggctggca

SEQ ID NO: 1218131 - DNA, 15 bp, Homo sapiens
ctatttttggctggc

SEQ ID NO: 1218132 - DNA, 15 bp, Homo sapiens
actatttttggctgg

SEQ ID NO: 1218133 - DNA, 15 bp, Homo sapiens
aactatttttggctg

SEQ ID NO: 1218134 - DNA, 15 bp, Homo sapiens
taactatttttggct

SEQ ID NO: 1218135 - DNA, 15 bp, Homo sapiens
ataactatttttggc

SEQ ID NO: 1218136 - DNA, 15 bp, Homo sapiens
cataactatttttgg

SEQ ID NO: 1218137 - DNA, 15 bp, Homo sapiens
acataactatttttg

SEQ ID NO: 1218138 - DNA, 15 bp, Homo sapiens
aacataactattttt

SEQ ID NO: 1218139 - DNA, 15 bp, Homo sapiens
taacataactatttt

SEQ ID NO: 1218140 - DNA, 15 bp, Homo sapiens
ttaacataactattt

SEQ ID NO: 1218141 - DNA, 15 bp, Homo sapiens
gttaacataactatt

SEQ ID NO: 1218142 - DNA, 15 bp, Homo sapiens
tgttaacataactat

SEQ ID NO: 1218143 - DNA, 15 bp, Homo sapiens
gtgttaacataacta

SEQ ID NO: 1218144 - DNA, 15 bp, Homo sapiens
ggtgttaacataact

SEQ ID NO: 1218145 - DNA, 15 bp, Homo sapiens
tggtgttaacataac

SEQ ID NO: 1218146 - DNA, 15 bp, Homo sapiens
ctggtgttaacataa

SEQ ID NO: 1218147 - DNA, 15 bp, Homo sapiens
gctggtgttaacata

SEQ ID NO: 1218148 - DNA, 15 bp, Homo sapiens
ggctggtgttaacat

SEQ ID NO: 1218149 - DNA, 15 bp, Homo sapiens
aggctggtgttaaca

SEQ ID NO: 1218150 - DNA, 15 bp, Homo sapiens
caggctggtgttaac

SEQ ID NO: 1218151 - DNA, 15 bp, Homo sapiens
gcaggctggtgttaa

SEQ ID NO: 1218152 - DNA, 15 bp, Homo sapiens
ggcaggctggtgtta

SEQ ID NO: 1218153 - DNA, 15 bp, Homo sapiens
aggcaggctggtgtt

SEQ ID NO: 1218154 - DNA, 15 bp, Homo sapiens
aaggcaggctggtgt

SEQ ID NO: 1218155 - DNA, 15 bp, Homo sapiens
caaggcaggctggtg

SEQ ID NO: 1218156 - DNA, 15 bp, Homo sapiens
ccaaggcaggctggt

SEQ ID NO: 1218157 - DNA, 15 bp, Homo sapiens
cccaaggcaggctgg

SEQ ID NO: 1218158 - DNA, 15 bp, Homo sapiens
ccccaaggcaggctg

SEQ ID NO: 1218159 - DNA, 15 bp, Homo sapiens
tccccaaggcaggct

SEQ ID NO: 1218160 - DNA, 15 bp, Homo sapiens
ctccccaaggcaggc

SEQ ID NO: 1218161 - DNA, 15 bp, Homo sapiens
tctccccaaggcagg

SEQ ID NO: 1218162 - DNA, 15 bp, Homo sapiens
ttctccccaaggcag

SEQ ID NO: 1218163 - DNA, 15 bp, Homo sapiens
tttctccccaaggca

SEQ ID NO: 1218164 - DNA, 15 bp, Homo sapiens
ctttctccccaaggc

SEQ ID NO: 1218165 - DNA, 15 bp, Homo sapiens
cctttctccccaagg

SEQ ID NO: 1218166 - DNA, 15 bp, Homo sapiens
ccctttctccccaag

SEQ ID NO: 1218167 - DNA, 15 bp, Homo sapiens
gccctttctccccaa

SEQ ID NO: 1218168 - DNA, 15 bp, Homo sapiens
ggccctttctcccca

SEQ ID NO: 1218169 - DNA, 15 bp, Homo sapiens
aggccctttctcccc

SEQ ID NO: 1218170 - DNA, 15 bp, Homo sapiens
aaggccctttctccc

SEQ ID NO: 1218171 - DNA, 15 bp, Homo sapiens
caaggccctttctcc

SEQ ID NO: 1218172 - DNA, 15 bp, Homo sapiens
ccaaggccctttctc

SEQ ID NO: 1218173 - DNA, 15 bp, Homo sapiens
accaaggccctttct

SEQ ID NO: 1218174 - DNA, 15 bp, Homo sapiens
caccaaggccctttc

SEQ ID NO: 1218175 - DNA, 15 bp, Homo sapiens
ccaccaaggcccttt

SEQ ID NO: 1218176 - DNA, 15 bp, Homo sapiens
cccaccaaggccctt

SEQ ID NO: 1218177 - DNA, 15 bp, Homo sapiens
acccaccaaggccct

SEQ ID NO: 1218178 - DNA, 15 bp, Homo sapiens
cacccaccaaggccc

SEQ ID NO: 1218179 - DNA, 15 bp, Homo sapiens
ccacccaccaaggcc

SEQ ID NO: 1218180 - DNA, 15 bp, Homo sapiens
gccacccaccaaggc

SEQ ID NO: 1218181 - DNA, 15 bp, Homo sapiens
tgccacccaccaagg

SEQ ID NO: 1218182 - DNA, 15 bp, Homo sapiens
ctgccacccaccaag

SEQ ID NO: 1218183 - DNA, 15 bp, Homo sapiens
cctgccacccaccaa

SEQ ID NO: 1218184 - DNA, 15 bp, Homo sapiens
tcctgccacccacca

SEQ ID NO: 1218185 - DNA, 15 bp, Homo sapiens
ctcctgccacccacc

SEQ ID NO: 1218186 - DNA, 15 bp, Homo sapiens
cctcctgccacccac

SEQ ID NO: 1218187 - DNA, 15 bp, Homo sapiens
ccctcctgccaccca

SEQ ID NO: 1218188 - DNA, 15 bp, Homo sapiens
cccctcctgccaccc

SEQ ID NO: 1218189 - DNA, 15 bp, Homo sapiens
tcccctcctgccacc

SEQ ID NO: 1218190 - DNA, 15 bp, Homo sapiens
gtcccctcctgccac

SEQ ID NO: 1218191 - DNA, 15 bp, Homo sapiens
tgtcccctcctgcca

SEQ ID NO: 1218192 - DNA, 15 bp, Homo sapiens
ttgtcccctcctgcc

SEQ ID NO: 1218193 - DNA, 15 bp, Homo sapiens
tttgtcccctcctgc

SEQ ID NO: 1218194 - DNA, 15 bp, Homo sapiens
catttgtcccctcct

SEQ ID NO: 1218195 - DNA, 15 bp, Homo sapiens
gcatttgtcccctcc

SEQ ID NO: 1218196 - DNA, 15 bp, Homo sapiens
agcatttgtcccctc

SEQ ID NO: 1218197 - DNA, 15 bp, Homo sapiens
gagcatttgtcccct

SEQ ID NO: 1218198 - DNA, 15 bp, Homo sapiens
ggagcatttgtcccc

SEQ ID NO: 1218199 - DNA, 15 bp, Homo sapiens
tggagcatttgtccc

SEQ ID NO: 1218200 - DNA, 15 bp, Homo sapiens
ctggagcatttgtcc

SEQ ID NO: 1218201 - DNA, 15 bp, Homo sapiens
cctggagcatttgtc

SEQ ID NO: 1218202 - DNA, 15 bp, Homo sapiens
gcctggagcatttgt

SEQ ID NO: 1218203 - DNA, 15 bp, Homo sapiens
tgcctggagcatttg

SEQ ID NO: 1218204 - DNA, 15 bp, Homo sapiens
gtgcctggagcattt

SEQ ID NO: 1218205 - DNA, 15 bp, Homo sapiens
ggtgcctggagcatt

SEQ ID NO: 1218206 - DNA, 15 bp, Homo sapiens
tggtgcctggagcat

SEQ ID NO: 1218207 - DNA, 15 bp, Homo sapiens
ctggtgcctggagca

SEQ ID NO: 1218208 - DNA, 15 bp, Homo sapiens
gctggtgcctggagc

SEQ ID NO: 1218209 - DNA, 15 bp, Homo sapiens
agctggtgcctggag

SEQ ID NO: 1218210 - DNA, 15 bp, Homo sapiens
cagctggtgcctgga

SEQ ID NO: 1218211 - DNA, 15 bp, Homo sapiens
ccagctggtgcctgg

SEQ ID NO: 1218212 - DNA, 15 bp, Homo sapiens
gccagctggtgcctg

SEQ ID NO: 1218213 - DNA, 15 bp, Homo sapiens
ggccagctggtgcct

SEQ ID NO: 1218214 - DNA, 15 bp, Homo sapiens
gggccagctggtgcc

SEQ ID NO: 1218215 - DNA, 15 bp, Homo sapiens
agggccagctggtgc

SEQ ID NO: 1218216 - DNA, 15 bp, Homo sapiens
cagggccagctggtg

SEQ ID NO: 1218217 - DNA, 15 bp, Homo sapiens
acagggccagctggt

SEQ ID NO: 1218218 - DNA, 15 bp, Homo sapiens
cacagggccagctgg

SEQ ID NO: 1218219 - DNA, 15 bp, Homo sapiens
ccacagggccagctg

SEQ ID NO: 1218220 - DNA, 15 bp, Homo sapiens
gccacagggccagct

SEQ ID NO: 1218221 - DNA, 15 bp, Homo sapiens
tgccacagggccagc

SEQ ID NO: 1218222 - DNA, 15 bp, Homo sapiens
atgccacagggccag

SEQ ID NO: 1218223 - DNA, 15 bp, Homo sapiens
gatgccacagggcca

SEQ ID NO: 1218224 - DNA, 15 bp, Homo sapiens
agatgccacagggcc

SEQ ID NO: 1218225 - DNA, 15 bp, Homo sapiens
tagatgccacagggc

SEQ ID NO: 1218226 - DNA, 15 bp, Homo sapiens
ctagatgccacaggg

SEQ ID NO: 1218227 - DNA, 15 bp, Homo sapiens
cctagatgccacagg

SEQ ID NO: 1218228 - DNA, 15 bp, Homo sapiens
tcctagatgccacag

SEQ ID NO: 1218229 - DNA, 15 bp, Homo sapiens
gtcctagatgccaca

SEQ ID NO: 1218230 - DNA, 15 bp, Homo sapiens
agtcctagatgccac

SEQ ID NO: 1218231 - DNA, 15 bp, Homo sapiens
gagtcctagatgcca

SEQ ID NO: 1218232 - DNA, 15 bp, Homo sapiens
agagtcctagatgcc

SEQ ID NO: 1218233 - DNA, 15 bp, Homo sapiens
tagagtcctagatgc

SEQ ID NO: 1218234 - DNA, 15 bp, Homo sapiens
ctagagtcctagatg

SEQ ID NO: 1218235 - DNA, 15 bp, Homo sapiens
gctagagtcctagat

SEQ ID NO: 1218236 - DNA, 15 bp, Homo sapiens
agctagagtcctaga

SEQ ID NO: 1218237 - DNA, 15 bp, Homo sapiens
aagctagagtcctag

SEQ ID NO: 1218238 - DNA, 15 bp, Homo sapiens
aaagctagagtccta

SEQ ID NO: 1218239 - DNA, 15 bp, Homo sapiens
gaaagctagagtcct

SEQ ID NO: 1218240 - DNA, 15 bp, Homo sapiens
agaaagctagagtcc

SEQ ID NO: 1218241 - DNA, 15 bp, Homo sapiens
gagaaagctagagtc

SEQ ID NO: 1218242 - DNA, 15 bp, Homo sapiens
ggagaaagctagagt

SEQ ID NO: 1218243 - DNA, 15 bp, Homo sapiens
aggagaaagctagag

SEQ ID NO: 1218244 - DNA, 15 bp, Homo sapiens
caggagaaagctaga

SEQ ID NO: 1218245 - DNA, 15 bp, Homo sapiens
acaggagaaagctag

SEQ ID NO: 1218246 - DNA, 15 bp, Homo sapiens
gacaggagaaagcta

SEQ ID NO: 1218247 - DNA, 15 bp, Homo sapiens
tgacaggagaaagct

SEQ ID NO: 1218248 - DNA, 15 bp, Homo sapiens
ctgacaggagaaagc

SEQ ID NO: 1218249 - DNA, 15 bp, Homo sapiens
cctgacaggagaaag

SEQ ID NO: 1218250 - DNA, 15 bp, Homo sapiens
gcctgacaggagaaa

SEQ ID NO: 1218251 - DNA, 15 bp, Homo sapiens
ggcctgacaggagaa

SEQ ID NO: 1218252 - DNA, 15 bp, Homo sapiens
tggcctgacaggaga

SEQ ID NO: 1218253 - DNA, 15 bp, Homo sapiens
gtggcctgacaggag

SEQ ID NO: 1218254 - DNA, 15 bp, Homo sapiens
ggtggcctgacagga

SEQ ID NO: 1218255 - DNA, 15 bp, Homo sapiens
tggtggcctgacagg

SEQ ID NO: 1218256 - DNA, 15 bp, Homo sapiens
gtggtggcctgacag

SEQ ID NO: 1218257 - DNA, 15 bp, Homo sapiens
agtggtggcctgaca

SEQ ID NO: 1218258 - DNA, 15 bp, Homo sapiens
cagtggtggcctgac

SEQ ID NO: 1218259 - DNA, 15 bp, Homo sapiens
ccagtggtggcctga

SEQ ID NO: 1218260 - DNA, 15 bp, Homo sapiens
gccagtggtggcctg

SEQ ID NO: 1218261 - DNA, 15 bp, Homo sapiens
agccagtggtggcct

SEQ ID NO: 1218262 - DNA, 15 bp, Homo sapiens
cagccagtggtggcc

SEQ ID NO: 1218263 - DNA, 15 bp, Homo sapiens
ccagccagtggtggc

SEQ ID NO: 1218264 - DNA, 15 bp, Homo sapiens
gccagccagtggtgg

SEQ ID NO: 1218265 - DNA, 15 bp, Homo sapiens
ggccagccagtggtg

SEQ ID NO: 1218266 - DNA, 15 bp, Homo sapiens
aggccagccagtggt

SEQ ID NO: 1218267 - DNA, 15 bp, Homo sapiens
caggccagccagtgg

SEQ ID NO: 1218268 - DNA, 15 bp, Homo sapiens
ccaggccagccagtg

SEQ ID NO: 1218269 - DNA, 15 bp, Homo sapiens
gccaggccagccagt

SEQ ID NO: 1218270 - DNA, 15 bp, Homo sapiens
ggccaggccagccag

SEQ ID NO: 1218271 - DNA, 15 bp, Homo sapiens
aggccaggccagcca

SEQ ID NO: 1218272 - DNA, 15 bp, Homo sapiens
caggccaggccagcc

SEQ ID NO: 1218273 - DNA, 15 bp, Homo sapiens
tcaggccaggccagc

SEQ ID NO: 1218274 - DNA, 15 bp, Homo sapiens
ttcaggccaggccag

SEQ ID NO: 1218275 - DNA, 15 bp, Homo sapiens
gttcaggccaggcca

SEQ ID NO: 1218276 - DNA, 15 bp, Homo sapiens
ggttcaggccaggcc

SEQ ID NO: 1218277 - DNA, 15 bp, Homo sapiens
gggttcaggccaggc

SEQ ID NO: 1218278 - DNA, 15 bp, Homo sapiens
ggggttcaggccagg

SEQ ID NO: 1218279 - DNA, 15 bp, Homo sapiens
gggggttcaggccag

SEQ ID NO: 1218280 - DNA, 15 bp, Homo sapiens
tgggggttcaggcca

SEQ ID NO: 1218281 - DNA, 15 bp, Homo sapiens
ctgggggttcaggcc

SEQ ID NO: 1218282 - DNA, 15 bp, Homo sapiens
gctgggggttcaggc

SEQ ID NO: 1218283 - DNA, 15 bp, Homo sapiens
cgctgggggttcagg

SEQ ID NO: 1218284 - DNA, 15 bp, Homo sapiens
gcgctgggggttcag

SEQ ID NO: 1218285 - DNA, 15 bp, Homo sapiens
ggcgctgggggttca

SEQ ID NO: 1218286 - DNA, 15 bp, Homo sapiens
tggcgctgggggttc

SEQ ID NO: 1218287 - DNA, 15 bp, Homo sapiens
atggcgctgggggtt

SEQ ID NO: 1218288 - DNA, 15 bp, Homo sapiens
gatggcgctgggggt

SEQ ID NO: 1218289 - DNA, 15 bp, Homo sapiens
tgatggcgctggggg

SEQ ID NO: 1218290 - DNA, 15 bp, Homo sapiens
atgatggcgctgggg

SEQ ID NO: 1218291 - DNA, 15 bp, Homo sapiens
catgatggcgctggg

SEQ ID NO: 1218292 - DNA, 15 bp, Homo sapiens
gcatgatggcgctgg

SEQ ID NO: 1218293 - DNA, 15 bp, Homo sapiens
ggcatgatggcgctg

SEQ ID NO: 1218294 - DNA, 15 bp, Homo sapiens
aggcatgatggcgct

SEQ ID NO: 1218295 - DNA, 15 bp, Homo sapiens
aaggcatgatggcgc

SEQ ID NO: 1218296 - DNA, 15 bp, Homo sapiens
caaggcatgatggcg

SEQ ID NO: 1218297 - DNA, 15 bp, Homo sapiens
gcaaggcatgatggc

SEQ ID NO: 1218298 - DNA, 15 bp, Homo sapiens
tgcaaggcatgatgg

SEQ ID NO: 1218299 - DNA, 15 bp, Homo sapiens
ctgcaaggcatgatg

SEQ ID NO: 1218300 - DNA, 15 bp, Homo sapiens
gctgcaaggcatgat

SEQ ID NO: 1218301 - DNA, 15 bp, Homo sapiens
ggctgcaaggcatga

SEQ ID NO: 1218302 - DNA, 15 bp, Homo sapiens
gggctgcaaggcatg

SEQ ID NO: 1218303 - DNA, 15 bp, Homo sapiens
ggggctgcaaggcat

SEQ ID NO: 1218304 - DNA, 15 bp, Homo sapiens
tggggctgcaaggca

SEQ ID NO: 1218305 - DNA, 15 bp, Homo sapiens
gtggggctgcaaggc

SEQ ID NO: 1218306 - DNA, 15 bp, Homo sapiens
tgtggggctgcaagg

SEQ ID NO: 1218307 - DNA, 15 bp, Homo sapiens
ctgtggggctgcaag

SEQ ID NO: 1218308 - DNA, 15 bp, Homo sapiens
cctgtggggctgcaa

SEQ ID NO: 1218309 - DNA, 15 bp, Homo sapiens
ccctgtggggctgca

SEQ ID NO: 1218310 - DNA, 15 bp, Homo sapiens
cccctgtggggctgc

SEQ ID NO: 1218311 - DNA, 15 bp, Homo sapiens
acccctgtggggctg

SEQ ID NO: 1218312 - DNA, 15 bp, Homo sapiens
cacccctgtggggct

SEQ ID NO: 1218313 - DNA, 15 bp, Homo sapiens
gcacccctgtggggc

SEQ ID NO: 1218314 - DNA, 15 bp, Homo sapiens
agcacccctgtgggg

SEQ ID NO: 1218315 - DNA, 15 bp, Homo sapiens
gagcacccctgtggg

SEQ ID NO: 1218316 - DNA, 15 bp, Homo sapiens
tgagcacccctgtgg

SEQ ID NO: 1218317 - DNA, 15 bp, Homo sapiens
gtgagcacccctgtg

SEQ ID NO: 1218318 - DNA, 15 bp, Homo sapiens
cgtgagcacccctgt

SEQ ID NO: 1218319 - DNA, 15 bp, Homo sapiens
acgtgagcacccctg

SEQ ID NO: 1218320 - DNA, 15 bp, Homo sapiens
aacgtgagcacccct

SEQ ID NO: 1218321 - DNA, 15 bp, Homo sapiens
caacgtgagcacccc

SEQ ID NO: 1218322 - DNA, 15 bp, Homo sapiens
ccaacgtgagcaccc

SEQ ID NO: 1218323 - DNA, 15 bp, Homo sapiens
gccaacgtgagcacc

SEQ ID NO: 1218324 - DNA, 15 bp, Homo sapiens
agccaacgtgagcac

SEQ ID NO: 1218325 - DNA, 15 bp, Homo sapiens
cagccaacgtgagca

SEQ ID NO: 1218326 - DNA, 15 bp, Homo sapiens
gcagccaacgtgagc

SEQ ID NO: 1218327 - DNA, 15 bp, Homo sapiens
tgcagccaacgtgag

SEQ ID NO: 1218328 - DNA, 15 bp, Homo sapiens
ctgcagccaacgtga

SEQ ID NO: 1218329 - DNA, 15 bp, Homo sapiens
tctgcagccaacgtg

SEQ ID NO: 1218330 - DNA, 15 bp, Homo sapiens
gtctgcagccaacgt

SEQ ID NO: 1218331 - DNA, 15 bp, Homo sapiens
tgtctgcagccaacg

SEQ ID NO: 1218332 - DNA, 15 bp, Homo sapiens
ctgtctgcagccaac

SEQ ID NO: 1218333 - DNA, 15 bp, Homo sapiens
tctgtctgcagccaa

SEQ ID NO: 1218334 - DNA, 15 bp, Homo sapiens
ttctgtctgcagcca

SEQ ID NO: 1218335 - DNA, 15 bp, Homo sapiens
cttctgtctgcagcc

SEQ ID NO: 1218336 - DNA, 15 bp, Homo sapiens
ccttctgtctgcagc

SEQ ID NO: 1218337 - DNA, 15 bp, Homo sapiens
gccttctgtctgcag

SEQ ID NO: 1218338 - DNA, 15 bp, Homo sapiens
agccttctgtctgca

SEQ ID NO: 1218339 - DNA, 15 bp, Homo sapiens
aagccttctgtctgc

SEQ ID NO: 1218340 - DNA, 15 bp, Homo sapiens
caagccttctgtctg

SEQ ID NO: 1218341 - DNA, 15 bp, Homo sapiens
ccaagccttctgtct

SEQ ID NO: 1218342 - DNA, 15 bp, Homo sapiens
tccaagccttctgtc

SEQ ID NO: 1218343 - DNA, 15 bp, Homo sapiens
ctccaagccttctgt

SEQ ID NO: 1218344 - DNA, 15 bp, Homo sapiens
gctccaagccttctg

SEQ ID NO: 1218345 - DNA, 15 bp, Homo sapiens
agctccaagccttct

SEQ ID NO: 1218346 - DNA, 15 bp, Homo sapiens
gagctccaagccttc

SEQ ID NO: 1218347 - DNA, 15 bp, Homo sapiens
ggagctccaagcctt

SEQ ID NO: 1218348 - DNA, 15 bp, Homo sapiens
tggagctccaagcct

SEQ ID NO: 1218349 - DNA, 15 bp, Homo sapiens
atggagctccaagcc

SEQ ID NO: 1218350 - DNA, 15 bp, Homo sapiens
catggagctccaagc

SEQ ID NO: 1218351 - DNA, 15 bp, Homo sapiens
acatggagctccaag

SEQ ID NO: 1218352 - DNA, 15 bp, Homo sapiens
gacatggagctccaa

SEQ ID NO: 1218353 - DNA, 15 bp, Homo sapiens
ggacatggagctcca

SEQ ID NO: 1218354 - DNA, 15 bp, Homo sapiens
aggacatggagctcc

SEQ ID NO: 1218355 - DNA, 15 bp, Homo sapiens
caggacatggagctc

SEQ ID NO: 1218356 - DNA, 15 bp, Homo sapiens
ccaggacatggagct

SEQ ID NO: 1218357 - DNA, 15 bp, Homo sapiens
cccaggacatggagc

SEQ ID NO: 1218358 - DNA, 15 bp, Homo sapiens
gcccaggacatggag

SEQ ID NO: 1218359 - DNA, 15 bp, Homo sapiens
ggcccaggacatgga

SEQ ID NO: 1218360 - DNA, 15 bp, Homo sapiens
gggcccaggacatgg

SEQ ID NO: 1218361 - DNA, 15 bp, Homo sapiens
tgggcccaggacatg

SEQ ID NO: 1218362 - DNA, 15 bp, Homo sapiens
gtgggcccaggacat

SEQ ID NO: 1218363 - DNA, 15 bp, Homo sapiens
ggtgggcccaggaca

SEQ ID NO: 1218364 - DNA, 15 bp, Homo sapiens
gggtgggcccaggac

SEQ ID NO: 1218365 - DNA, 15 bp, Homo sapiens
ggggtgggcccagga

SEQ ID NO: 1218366 - DNA, 15 bp, Homo sapiens
tggggtgggcccagg

SEQ ID NO: 1218367 - DNA, 15 bp, Homo sapiens
atggggtgggcccag

SEQ ID NO: 1218368 - DNA, 15 bp, Homo sapiens
gatggggtgggccca

SEQ ID NO: 1218369 - DNA, 15 bp, Homo sapiens
agatggggtgggccc

SEQ ID NO: 1218370 - DNA, 15 bp, Homo sapiens
tagatggggtgggcc

SEQ ID NO: 1218371 - DNA, 15 bp, Homo sapiens
ctagatggggtgggc

SEQ ID NO: 1218372 - DNA, 15 bp, Homo sapiens
cctagatggggtggg

SEQ ID NO: 1218373 - DNA, 15 bp, Homo sapiens
acctagatggggtgg

SEQ ID NO: 1218374 - DNA, 15 bp, Homo sapiens
gacctagatggggtg

SEQ ID NO: 1218375 - DNA, 15 bp, Homo sapiens
ggacctagatggggt

SEQ ID NO: 1218376 - DNA, 15 bp, Homo sapiens
tggacctagatgggg

SEQ ID NO: 1218377 - DNA, 15 bp, Homo sapiens
ctggacctagatggg

SEQ ID NO: 1218378 - DNA, 15 bp, Homo sapiens
cctggacctagatgg

SEQ ID NO: 1218379 - DNA, 15 bp, Homo sapiens
ccctggacctagatg

SEQ ID NO: 1218380 - DNA, 15 bp, Homo sapiens
tccctggacctagat

SEQ ID NO: 1218381 - DNA, 15 bp, Homo sapiens
gtccctggacctaga

SEQ ID NO: 1218382 - DNA, 15 bp, Homo sapiens
agtccctggacctag

SEQ ID NO: 1218383 - DNA, 15 bp, Homo sapiens
tagtccctggaccta

SEQ ID NO: 1218384 - DNA, 15 bp, Homo sapiens
atagtccctggacct

SEQ ID NO: 1218385 - DNA, 15 bp, Homo sapiens
catagtccctggacc

SEQ ID NO: 1218386 - DNA, 15 bp, Homo sapiens
gcatagtccctggac

SEQ ID NO: 1218387 - DNA, 15 bp, Homo sapiens
ggcatagtccctgga

SEQ ID NO: 1218388 - DNA, 15 bp, Homo sapiens
tggcatagtccctgg

SEQ ID NO: 1218389 - DNA, 15 bp, Homo sapiens
gtggcatagtccctg

SEQ ID NO: 1218390 - DNA, 15 bp, Homo sapiens
ggtggcatagtccct

SEQ ID NO: 1218391 - DNA, 15 bp, Homo sapiens
aggtggcatagtccc

SEQ ID NO: 1218392 - DNA, 15 bp, Homo sapiens
gaggtggcatagtcc

SEQ ID NO: 1218393 - DNA, 15 bp, Homo sapiens
agaggtggcatagtc

SEQ ID NO: 1218394 - DNA, 15 bp, Homo sapiens
gagaggtggcatagt

SEQ ID NO: 1218395 - DNA, 15 bp, Homo sapiens
agagaggtggcatag

SEQ ID NO: 1218396 - DNA, 15 bp, Homo sapiens
tagagaggtggcata

SEQ ID NO: 1218397 - DNA, 15 bp, Homo sapiens
ctagagaggtggcat

SEQ ID NO: 1218398 - DNA, 15 bp, Homo sapiens
cctagagaggtggca

SEQ ID NO: 1218399 - DNA, 15 bp, Homo sapiens
ccctagagaggtggc

SEQ ID NO: 1218400 - DNA, 15 bp, Homo sapiens
cccctagagaggtgg

SEQ ID NO: 1218401 - DNA, 15 bp, Homo sapiens
gcccctagagaggtg

SEQ ID NO: 1218402 - DNA, 15 bp, Homo sapiens
agcccctagagaggt

SEQ ID NO: 1218403 - DNA, 15 bp, Homo sapiens
cagcccctagagagg

SEQ ID NO: 1218404 - DNA, 15 bp, Homo sapiens
ccagcccctagagag

SEQ ID NO: 1218405 - DNA, 15 bp, Homo sapiens
accagcccctagaga

SEQ ID NO: 1218406 - DNA, 15 bp, Homo sapiens
gaccagcccctagag

SEQ ID NO: 1218407 - DNA, 15 bp, Homo sapiens
tgaccagcccctaga

SEQ ID NO: 1218408 - DNA, 15 bp, Homo sapiens
gtgaccagcccctag

SEQ ID NO: 1218409 - DNA, 15 bp, Homo sapiens
tgtgaccagccccta

SEQ ID NO: 1218410 - DNA, 15 bp, Homo sapiens
atgtgaccagcccct

SEQ ID NO: 1218411 - DNA, 15 bp, Homo sapiens
gatgtgaccagcccc

SEQ ID NO: 1218412 - DNA, 15 bp, Homo sapiens
agatgtgaccagccc

SEQ ID NO: 1218413 - DNA, 15 bp, Homo sapiens
cagatgtgaccagcc

SEQ ID NO: 1218414 - DNA, 15 bp, Homo sapiens
gcagatgtgaccagc

SEQ ID NO: 1218415 - DNA, 15 bp, Homo sapiens
tgcagatgtgaccag

SEQ ID NO: 1218416 - DNA, 15 bp, Homo sapiens
gtgcagatgtgacca

SEQ ID NO: 1218417 - DNA, 15 bp, Homo sapiens
cgtgcagatgtgacc

SEQ ID NO: 1218418 - DNA, 15 bp, Homo sapiens
ccgtgcagatgtgac

SEQ ID NO: 1218419 - DNA, 15 bp, Homo sapiens
tccgtgcagatgtga

SEQ ID NO: 1218420 - DNA, 15 bp, Homo sapiens
gtccgtgcagatgtg

SEQ ID NO: 1218421 - DNA, 15 bp, Homo sapiens
tgtccgtgcagatgt

SEQ ID NO: 1218422 - DNA, 15 bp, Homo sapiens
ctgtccgtgcagatg

SEQ ID NO: 1218423 - DNA, 15 bp, Homo sapiens
tctgtccgtgcagat

SEQ ID NO: 1218424 - DNA, 15 bp, Homo sapiens
ctctgtccgtgcaga

SEQ ID NO: 1218425 - DNA, 15 bp, Homo sapiens
actctgtccgtgcag

SEQ ID NO: 1218426 - DNA, 15 bp, Homo sapiens
tactctgtccgtgca

SEQ ID NO: 1218427 - DNA, 15 bp, Homo sapiens
ctactctgtccgtgc

SEQ ID NO: 1218428 - DNA, 15 bp, Homo sapiens
actactctgtccgtg

SEQ ID NO: 1218429 - DNA, 15 bp, Homo sapiens
gactactctgtccgt

SEQ ID NO: 1218430 - DNA, 15 bp, Homo sapiens
ggactactctgtccg

SEQ ID NO: 1218431 - DNA, 15 bp, Homo sapiens
cggactactctgtcc

SEQ ID NO: 1218432 - DNA, 15 bp, Homo sapiens
ccggactactctgtc

SEQ ID NO: 1218433 - DNA, 15 bp, Homo sapiens
cccggactactctgt

SEQ ID NO: 1218434 - DNA, 15 bp, Homo sapiens
ccccggactactctg

SEQ ID NO: 1218435 - DNA, 15 bp, Homo sapiens
accccggactactct

SEQ ID NO: 1218436 - DNA, 15 bp, Homo sapiens
gaccccggactactc

SEQ ID NO: 1218437 - DNA, 15 bp, Homo sapiens
ggaccccggactact

SEQ ID NO: 1218438 - DNA, 15 bp, Homo sapiens
aggaccccggactac

SEQ ID NO: 1218439 - DNA, 15 bp, Homo sapiens
caggaccccggacta

SEQ ID NO: 1218440 - DNA, 15 bp, Homo sapiens
ccaggaccccggact

SEQ ID NO: 1218441 - DNA, 15 bp, Homo sapiens
tccaggaccccggac

SEQ ID NO: 1218442 - DNA, 15 bp, Homo sapiens
ctccaggaccccgga

SEQ ID NO: 1218443 - DNA, 15 bp, Homo sapiens
tctccaggaccccgg

SEQ ID NO: 1218444 - DNA, 15 bp, Homo sapiens
ctctccaggaccccg

SEQ ID NO: 1218445 - DNA, 15 bp, Homo sapiens
actctccaggacccc

SEQ ID NO: 1218446 - DNA, 15 bp, Homo sapiens
cactctccaggaccc

SEQ ID NO: 1218447 - DNA, 15 bp, Homo sapiens
acactctccaggacc

SEQ ID NO: 1218448 - DNA, 15 bp, Homo sapiens
tacactctccaggac

SEQ ID NO: 1218449 - DNA, 15 bp, Homo sapiens
atacactctccagga

SEQ ID NO: 1218450 - DNA, 15 bp, Homo sapiens
catacactctccagg

SEQ ID NO: 1218451 - DNA, 15 bp, Homo sapiens
ccatacactctccag

SEQ ID NO: 1218452 - DNA, 15 bp, Homo sapiens
cccatacactctcca

SEQ ID NO: 1218453 - DNA, 15 bp, Homo sapiens
ccccatacactctcc

SEQ ID NO: 1218454 - DNA, 15 bp, Homo sapiens
tccccatacactctc

SEQ ID NO: 1218455 - DNA, 15 bp, Homo sapiens
ctccccatacactct

SEQ ID NO: 1218456 - DNA, 15 bp, Homo sapiens
gctccccatacactc

SEQ ID NO: 1218457 - DNA, 15 bp, Homo sapiens
tgctccccatacact

SEQ ID NO: 1218458 - DNA, 15 bp, Homo sapiens
ctgctccccatacac

SEQ ID NO: 1218459 - DNA, 15 bp, Homo sapiens
actgctccccataca

SEQ ID NO: 1218460 - DNA, 15 bp, Homo sapiens
cactgctccccatac

SEQ ID NO: 1218461 - DNA, 15 bp, Homo sapiens
ccactgctccccata

SEQ ID NO: 1218462 - DNA, 15 bp, Homo sapiens
gccactgctccccat

SEQ ID NO: 1218463 - DNA, 15 bp, Homo sapiens
agccactgctcccca

SEQ ID NO: 1218464 - DNA, 15 bp, Homo sapiens
tcagccactgctccc

SEQ ID NO: 1218465 - DNA, 15 bp, Homo sapiens
gtcagccactgctcc

SEQ ID NO: 1218466 - DNA, 15 bp, Homo sapiens
tgtcagccactgctc

SEQ ID NO: 1218467 - DNA, 15 bp, Homo sapiens
ctgtcagccactgct

SEQ ID NO: 1218468 - DNA, 15 bp, Homo sapiens
gctgtcagccactgc

SEQ ID NO: 1218469 - DNA, 15 bp, Homo sapiens
ggctgtcagccactg

SEQ ID NO: 1218470 - DNA, 15 bp, Homo sapiens
aggctgtcagccact

SEQ ID NO: 1218471 - DNA, 15 bp, Homo sapiens
caggctgtcagccac

SEQ ID NO: 1218472 - DNA, 15 bp, Homo sapiens
ccaggctgtcagcca

SEQ ID NO: 1218473 - DNA, 15 bp, Homo sapiens
gccaggctgtcagcc

SEQ ID NO: 1218474 - DNA, 15 bp, Homo sapiens
ggccaggctgtcagc

SEQ ID NO: 1218475 - DNA, 15 bp, Homo sapiens
gggccaggctgtcag

SEQ ID NO: 1218476 - DNA, 15 bp, Homo sapiens
ggggccaggctgtca

SEQ ID NO: 1218477 - DNA, 15 bp, Homo sapiens
gggggccaggctgtc

SEQ ID NO: 1218478 - DNA, 15 bp, Homo sapiens
tgggggccaggctgt

SEQ ID NO: 1218479 - DNA, 15 bp, Homo sapiens
gtgggggccaggctg

SEQ ID NO: 1218480 - DNA, 15 bp, Homo sapiens
tgtgggggccaggct

SEQ ID NO: 1218481 - DNA, 15 bp, Homo sapiens
ctgtgggggccaggc

SEQ ID NO: 1218482 - DNA, 15 bp, Homo sapiens
tctgtgggggccagg

SEQ ID NO: 1218483 - DNA, 15 bp, Homo sapiens
ttctgtgggggccag

SEQ ID NO: 1218484 - DNA, 15 bp, Homo sapiens
cttctgtgggggcca

SEQ ID NO: 1218485 - DNA, 15 bp, Homo sapiens
gcttctgtgggggcc

SEQ ID NO: 1218486 - DNA, 15 bp, Homo sapiens
agcttctgtgggggc

SEQ ID NO: 1218487 - DNA, 15 bp, Homo sapiens
gagcttctgtggggg

SEQ ID NO: 1218488 - DNA, 15 bp, Homo sapiens
ggagcttctgtgggg

SEQ ID NO: 1218489 - DNA, 15 bp, Homo sapiens
cggagcttctgtggg

SEQ ID NO: 1218490 - DNA, 15 bp, Homo sapiens
gcggagcttctgtgg

SEQ ID NO: 1218491 - DNA, 15 bp, Homo sapiens
agcggagcttctgtg

SEQ ID NO: 1218492 - DNA, 15 bp, Homo sapiens
gagcggagcttctgt

SEQ ID NO: 1218493 - DNA, 15 bp, Homo sapiens
agagcggagcttctg

SEQ ID NO: 1218494 - DNA, 15 bp, Homo sapiens
gagagcggagcttct

SEQ ID NO: 1218495 - DNA, 15 bp, Homo sapiens
tgagagcggagcttc

SEQ ID NO: 1218496 - DNA, 15 bp, Homo sapiens
ctgagagcggagctt

SEQ ID NO: 1218497 - DNA, 15 bp, Homo sapiens
cctgagagcggagct

SEQ ID NO: 1218498 - DNA, 15 bp, Homo sapiens
ccctgagagcggagc

SEQ ID NO: 1218499 - DNA, 15 bp, Homo sapiens
tccctgagagcggag

SEQ ID NO: 1218500 - DNA, 15 bp, Homo sapiens
atccctgagagcgga

SEQ ID NO: 1218501 - DNA, 15 bp, Homo sapiens
tatccctgagagcgg

SEQ ID NO: 1218502 - DNA, 15 bp, Homo sapiens
atatccctgagagcg

SEQ ID NO: 1218503 - DNA, 15 bp, Homo sapiens
gatatccctgagagc

SEQ ID NO: 1218504 - DNA, 15 bp, Homo sapiens
ggatatccctgagag

SEQ ID NO: 1218505 - DNA, 15 bp, Homo sapiens
gggatatccctgaga

SEQ ID NO: 1218506 - DNA, 15 bp, Homo sapiens
agggatatccctgag

SEQ ID NO: 1218507 - DNA, 15 bp, Homo sapiens
cagggatatccctga

SEQ ID NO: 1218508 - DNA, 15 bp, Homo sapiens
ccagggatatccctg

SEQ ID NO: 1218509 - DNA, 15 bp, Homo sapiens
accagggatatccct

SEQ ID NO: 1218510 - DNA, 15 bp, Homo sapiens
caccagggatatccc

SEQ ID NO: 1218511 - DNA, 15 bp, Homo sapiens
ccaccagggatatcc

SEQ ID NO: 1218512 - DNA, 15 bp, Homo sapiens
gccaccagggatatc

SEQ ID NO: 1218513 - DNA, 15 bp, Homo sapiens
agccaccagggatat

SEQ ID NO: 1218514 - DNA, 15 bp, Homo sapiens
aagccaccagggata

SEQ ID NO: 1218515 - DNA, 15 bp, Homo sapiens
aaagccaccagggat

SEQ ID NO: 1218516 - DNA, 15 bp, Homo sapiens
caaagccaccaggga

SEQ ID NO: 1218517 - DNA, 15 bp, Homo sapiens
gcaaagccaccaggg

SEQ ID NO: 1218518 - DNA, 15 bp, Homo sapiens
tgcaaagccaccagg

SEQ ID NO: 1218519 - DNA, 15 bp, Homo sapiens
ctgcaaagccaccag

SEQ ID NO: 1218520 - DNA, 15 bp, Homo sapiens
cctgcaaagccacca

SEQ ID NO: 1218521 - DNA, 15 bp, Homo sapiens
acctgcaaagccacc

SEQ ID NO: 1218522 - DNA, 15 bp, Homo sapiens
aacctgcaaagccac

SEQ ID NO: 1218523 - DNA, 15 bp, Homo sapiens
caacctgcaaagcca

SEQ ID NO: 1218524 - DNA, 15 bp, Homo sapiens
acaacctgcaaagcc

SEQ ID NO: 1218525 - DNA, 15 bp, Homo sapiens
cacaacctgcaaagc

SEQ ID NO: 1218526 - DNA, 15 bp, Homo sapiens
ccacaacctgcaaag

SEQ ID NO: 1218527 - DNA, 15 bp, Homo sapiens
cccacaacctgcaaa

SEQ ID NO: 1218528 - DNA, 15 bp, Homo sapiens
tcccacaacctgcaa

SEQ ID NO: 1218529 - DNA, 15 bp, Homo sapiens
ctcccacaacctgca

SEQ ID NO: 1218530 - DNA, 15 bp, Homo sapiens
tctcccacaacctgc

SEQ ID NO: 1218531 - DNA, 15 bp, Homo sapiens
ctctcccacaacctg

SEQ ID NO: 1218532 - DNA, 15 bp, Homo sapiens
gctctcccacaacct

SEQ ID NO: 1218533 - DNA, 15 bp, Homo sapiens
ggctctcccacaacc

SEQ ID NO: 1218534 - DNA, 15 bp, Homo sapiens
aggctctcccacaac

SEQ ID NO: 1218535 - DNA, 15 bp, Homo sapiens
gaggctctcccacaa

SEQ ID NO: 1218536 - DNA, 15 bp, Homo sapiens
ggaggctctcccaca

SEQ ID NO: 1218537 - DNA, 15 bp, Homo sapiens
aggaggctctcccac

SEQ ID NO: 1218538 - DNA, 15 bp, Homo sapiens
aaggaggctctccca

SEQ ID NO: 1218539 - DNA, 15 bp, Homo sapiens
caaggaggctctccc

SEQ ID NO: 1218540 - DNA, 15 bp, Homo sapiens
gcaaggaggctctcc

SEQ ID NO: 1218541 - DNA, 15 bp, Homo sapiens
agcaaggaggctctc

SEQ ID NO: 1218542 - DNA, 15 bp, Homo sapiens
tagcaaggaggctct

SEQ ID NO: 1218543 - DNA, 15 bp, Homo sapiens
ctagcaaggaggctc

SEQ ID NO: 1218544 - DNA, 15 bp, Homo sapiens
tctagcaaggaggct

SEQ ID NO: 1218545 - DNA, 15 bp, Homo sapiens
atctagcaaggaggc

SEQ ID NO: 1218546 - DNA, 15 bp, Homo sapiens
catctagcaaggagg

SEQ ID NO: 1218547 - DNA, 15 bp, Homo sapiens
acatctagcaaggag

SEQ ID NO: 1218548 - DNA, 15 bp, Homo sapiens
cacatctagcaagga

SEQ ID NO: 1218549 - DNA, 15 bp, Homo sapiens
tcacatctagcaagg

SEQ ID NO: 1218550 - DNA, 15 bp, Homo sapiens
atcacatctagcaag

SEQ ID NO: 1218551 - DNA, 15 bp, Homo sapiens
gatcacatctagcaa

SEQ ID NO: 1218552 - DNA, 15 bp, Homo sapiens
tgatcacatctagca

SEQ ID NO: 1218553 - DNA, 15 bp, Homo sapiens
gtgatcacatctagc

SEQ ID NO: 1218554 - DNA, 15 bp, Homo sapiens
agtgatcacatctag

SEQ ID NO: 1218555 - DNA, 15 bp, Homo sapiens
cagtgatcacatcta

SEQ ID NO: 1218556 - DNA, 15 bp, Homo sapiens
ccagtgatcacatct

SEQ ID NO: 1218557 - DNA, 15 bp, Homo sapiens
gccagtgatcacatc

SEQ ID NO: 1218558 - DNA, 15 bp, Homo sapiens
ggccagtgatcacat

SEQ ID NO: 1218559 - DNA, 15 bp, Homo sapiens
cggccagtgatcaca

SEQ ID NO: 1218560 - DNA, 15 bp, Homo sapiens
tcggccagtgatcac

SEQ ID NO: 1218561 - DNA, 15 bp, Homo sapiens
ctcggccagtgatca

SEQ ID NO: 1218562 - DNA, 15 bp, Homo sapiens
cctcggccagtgatc

SEQ ID NO: 1218563 - DNA, 15 bp, Homo sapiens
acctcggccagtgat

SEQ ID NO: 1218564 - DNA, 15 bp, Homo sapiens
gacctcggccagtga

SEQ ID NO: 1218565 - DNA, 15 bp, Homo sapiens
tgacctcggccagtg

SEQ ID NO: 1218566 - DNA, 15 bp, Homo sapiens
gtgacctcggccagt

SEQ ID NO: 1218567 - DNA, 15 bp, Homo sapiens
cgtgacctcggccag

SEQ ID NO: 1218568 - DNA, 15 bp, Homo sapiens
ccgtgacctcggcca

SEQ ID NO: 1218569 - DNA, 15 bp, Homo sapiens
gccgtgacctcggcc

SEQ ID NO: 1218570 - DNA, 15 bp, Homo sapiens
cgccgtgacctcggc

SEQ ID NO: 1218571 - DNA, 15 bp, Homo sapiens
ccgccgtgacctcgg

SEQ ID NO: 1218572 - DNA, 15 bp, Homo sapiens
gccgccgtgacctcg

SEQ ID NO: 1218573 - DNA, 15 bp, Homo sapiens
tgccgccgtgacctc

SEQ ID NO: 1218574 - DNA, 15 bp, Homo sapiens
ttgccgccgtgacct

SEQ ID NO: 1218575 - DNA, 15 bp, Homo sapiens
cttgccgccgtgacc

SEQ ID NO: 1218576 - DNA, 15 bp, Homo sapiens
tcttgccgccgtgac

SEQ ID NO: 1218577 - DNA, 15 bp, Homo sapiens
atcttgccgccgtga

SEQ ID NO: 1218578 - DNA, 15 bp, Homo sapiens
gatcttgccgccgtg

SEQ ID NO: 1218579 - DNA, 15 bp, Homo sapiens
tgatcttgccgccgt

SEQ ID NO: 1218580 - DNA, 15 bp, Homo sapiens
ttgatcttgccgccg

SEQ ID NO: 1218581 - DNA, 15 bp, Homo sapiens
cttgatcttgccgcc

SEQ ID NO: 1218582 - DNA, 15 bp, Homo sapiens
acttgatcttgccgc

SEQ ID NO: 1218583 - DNA, 15 bp, Homo sapiens
gacttgatcttgccg

SEQ ID NO: 1218584 - DNA, 15 bp, Homo sapiens
tgacttgatcttgcc

SEQ ID NO: 1218585 - DNA, 15 bp, Homo sapiens
ctgacttgatcttgc

SEQ ID NO: 1218586 - DNA, 15 bp, Homo sapiens
cctgacttgatcttg

SEQ ID NO: 1218587 - DNA, 15 bp, Homo sapiens
gcctgacttgatctt

SEQ ID NO: 1218588 - DNA, 15 bp, Homo sapiens
ggcctgacttgatct

SEQ ID NO: 1218589 - DNA, 15 bp, Homo sapiens
tggcctgacttgatc

SEQ ID NO: 1218590 - DNA, 15 bp, Homo sapiens
ctggcctgacttgat

SEQ ID NO: 1218591 - DNA, 15 bp, Homo sapiens
tctggcctgacttga

SEQ ID NO: 1218592 - DNA, 15 bp, Homo sapiens
atctggcctgacttg

SEQ ID NO: 1218593 - DNA, 15 bp, Homo sapiens
gatctggcctgactt

SEQ ID NO: 1218594 - DNA, 15 bp, Homo sapiens
agatctggcctgact

SEQ ID NO: 1218595 - DNA, 15 bp, Homo sapiens
cagatctggcctgac

SEQ ID NO: 1218596 - DNA, 15 bp, Homo sapiens
ccagatctggcctga

SEQ ID NO: 1218597 - DNA, 15 bp, Homo sapiens
tccagatctggcctg

SEQ ID NO: 1218598 - DNA, 15 bp, Homo sapiens
atccagatctggcct

SEQ ID NO: 1218599 - DNA, 15 bp, Homo sapiens
gatccagatctggcc

SEQ ID NO: 1218600 - DNA, 15 bp, Homo sapiens
tgatccagatctggc

SEQ ID NO: 1218601 - DNA, 15 bp, Homo sapiens
ttgatccagatctgg

SEQ ID NO: 1218602 - DNA, 15 bp, Homo sapiens
attgatccagatctg

SEQ ID NO: 1218603 - DNA, 15 bp, Homo sapiens
cattgatccagatct

SEQ ID NO: 1218604 - DNA, 15 bp, Homo sapiens
ccattgatccagatc

SEQ ID NO: 1218605 - DNA, 15 bp, Homo sapiens
cccattgatccagat

SEQ ID NO: 1218606 - DNA, 15 bp, Homo sapiens
gcccattgatccaga

SEQ ID NO: 1218607 - DNA, 15 bp, Homo sapiens
tgcccattgatccag

SEQ ID NO: 1218608 - DNA, 15 bp, Homo sapiens
ctgcccattgatcca

SEQ ID NO: 1218609 - DNA, 15 bp, Homo sapiens
gctgcccattgatcc

SEQ ID NO: 1218610 - DNA, 15 bp, Homo sapiens
ggctgcccattgatc

SEQ ID NO: 1218611 - DNA, 15 bp, Homo sapiens
gggctgcccattgat

SEQ ID NO: 1218612 - DNA, 15 bp, Homo sapiens
tgggctgcccattga

SEQ ID NO: 1218613 - DNA, 15 bp, Homo sapiens
ctgggctgcccattg

SEQ ID NO: 1218614 - DNA, 15 bp, Homo sapiens
gctgggctgcccatt

SEQ ID NO: 1218615 - DNA, 15 bp, Homo sapiens
agctgggctgcccat

SEQ ID NO: 1218616 - DNA, 15 bp, Homo sapiens
gagctgggctgccca

SEQ ID NO: 1218617 - DNA, 15 bp, Homo sapiens
cgagctgggctgccc

SEQ ID NO: 1218618 - DNA, 15 bp, Homo sapiens
gcgagctgggctgcc

SEQ ID NO: 1218619 - DNA, 15 bp, Homo sapiens
ggcgagctgggctgc

SEQ ID NO: 1218620 - DNA, 15 bp, Homo sapiens
aggcgagctgggctg

SEQ ID NO: 1218621 - DNA, 15 bp, Homo sapiens
gaggcgagctgggct

SEQ ID NO: 1218622 - DNA, 15 bp, Homo sapiens
tgaggcgagctgggc

SEQ ID NO: 1218623 - DNA, 15 bp, Homo sapiens
ctgaggcgagctggg

SEQ ID NO: 1218624 - DNA, 15 bp, Homo sapiens
gctgaggcgagctgg

SEQ ID NO: 1218625 - DNA, 15 bp, Homo sapiens
agctgaggcgagctg

SEQ ID NO: 1218626 - DNA, 15 bp, Homo sapiens
cagctgaggcgagct

SEQ ID NO: 1218627 - DNA, 15 bp, Homo sapiens
ccagctgaggcgagc

SEQ ID NO: 1218628 - DNA, 15 bp, Homo sapiens
accagctgaggcgag

SEQ ID NO: 1218629 - DNA, 15 bp, Homo sapiens
caccagctgaggcga

SEQ ID NO: 1218630 - DNA, 15 bp, Homo sapiens
tcaccagctgaggcg

SEQ ID NO: 1218631 - DNA, 15 bp, Homo sapiens
ctcaccagctgaggc

SEQ ID NO: 1218632 - DNA, 15 bp, Homo sapiens
cctcaccagctgagg

SEQ ID NO: 1218633 - DNA, 15 bp, Homo sapiens
tcctcaccagctgag

SEQ ID NO: 1218634 - DNA, 15 bp, Homo sapiens
ttcctcaccagctga

SEQ ID NO: 1218635 - DNA, 15 bp, Homo sapiens
cttcctcaccagctg

SEQ ID NO: 1218636 - DNA, 15 bp, Homo sapiens
acttcctcaccagct

SEQ ID NO: 1218637 - DNA, 15 bp, Homo sapiens
cacttcctcaccagc

SEQ ID NO: 1218638 - DNA, 15 bp, Homo sapiens
acacttcctcaccag

SEQ ID NO: 1218639 - DNA, 15 bp, Homo sapiens
cacacttcctcacca

SEQ ID NO: 1218640 - DNA, 15 bp, Homo sapiens
acacacttcctcacc

SEQ ID NO: 1218641 - DNA, 15 bp, Homo sapiens
cacacacttcctcac

SEQ ID NO: 1218642 - DNA, 15 bp, Homo sapiens
ccacacacttcctca

SEQ ID NO: 1218643 - DNA, 15 bp, Homo sapiens
gccacacacttcctc

SEQ ID NO: 1218644 - DNA, 15 bp, Homo sapiens
ggccacacacttcct

SEQ ID NO: 1218645 - DNA, 15 bp, Homo sapiens
gggccacacacttcc

SEQ ID NO: 1218646 - DNA, 15 bp, Homo sapiens
tgggccacacacttc

SEQ ID NO: 1218647 - DNA, 15 bp, Homo sapiens
gtgggccacacactt

SEQ ID NO: 1218648 - DNA, 15 bp, Homo sapiens
cgtgggccacacact

SEQ ID NO: 1218649 - DNA, 15 bp, Homo sapiens
acgtgggccacacac

SEQ ID NO: 1218650 - DNA, 15 bp, Homo sapiens
cacgtgggccacaca

SEQ ID NO: 1218651 - DNA, 15 bp, Homo sapiens
gcacgtgggccacac

SEQ ID NO: 1218652 - DNA, 15 bp, Homo sapiens
cgcacgtgggccaca

SEQ ID NO: 1218653 - DNA, 15 bp, Homo sapiens
gcgcacgtgggccac

SEQ ID NO: 1218654 - DNA, 15 bp, Homo sapiens
ggcgcacgtgggcca

SEQ ID NO: 1218655 - DNA, 15 bp, Homo sapiens
tggcgcacgtgggcc

SEQ ID NO: 1218656 - DNA, 15 bp, Homo sapiens
ctggcgcacgtgggc

SEQ ID NO: 1218657 - DNA, 15 bp, Homo sapiens
gctggcgcacgtggg

SEQ ID NO: 1218658 - DNA, 15 bp, Homo sapiens
tgctggcgcacgtgg

SEQ ID NO: 1218659 - DNA, 15 bp, Homo sapiens
gtgctggcgcacgtg

SEQ ID NO: 1218660 - DNA, 15 bp, Homo sapiens
tgtgctggcgcacgt

SEQ ID NO: 1218661 - DNA, 15 bp, Homo sapiens
ttgtgctggcgcacg

SEQ ID NO: 1218662 - DNA, 15 bp, Homo sapiens
gttgtgctggcgcac

SEQ ID NO: 1218663 - DNA, 15 bp, Homo sapiens
ggttgtgctggcgca

SEQ ID NO: 1218664 - DNA, 15 bp, Homo sapiens
tggttgtgctggcgc

SEQ ID NO: 1218665 - DNA, 15 bp, Homo sapiens
ctggttgtgctggcg

SEQ ID NO: 1218666 - DNA, 15 bp, Homo sapiens
gctggttgtgctggc

SEQ ID NO: 1218667 - DNA, 15 bp, Homo sapiens
agctggttgtgctgg

SEQ ID NO: 1218668 - DNA, 15 bp, Homo sapiens
cagctggttgtgctg

SEQ ID NO: 1218669 - DNA, 15 bp, Homo sapiens
gcagctggttgtgct

SEQ ID NO: 1218670 - DNA, 15 bp, Homo sapiens
agcagctggttgtgc

SEQ ID NO: 1218671 - DNA, 15 bp, Homo sapiens
gagcagctggttgtg

SEQ ID NO: 1218672 - DNA, 15 bp, Homo sapiens
ggagcagctggttgt

SEQ ID NO: 1218673 - DNA, 15 bp, Homo sapiens
gggagcagctggttg

SEQ ID NO: 1218674 - DNA, 15 bp, Homo sapiens
ggggagcagctggtt

SEQ ID NO: 1218675 - DNA, 15 bp, Homo sapiens
tggggagcagctggt

SEQ ID NO: 1218676 - DNA, 15 bp, Homo sapiens
ttggggagcagctgg

SEQ ID NO: 1218677 - DNA, 15 bp, Homo sapiens
gttggggagcagctg

SEQ ID NO: 1218678 - DNA, 15 bp, Homo sapiens
agttggggagcagct

SEQ ID NO: 1218679 - DNA, 15 bp, Homo sapiens
aagttggggagcagc

SEQ ID NO: 1218680 - DNA, 15 bp, Homo sapiens
caagttggggagcag

SEQ ID NO: 1218681 - DNA, 15 bp, Homo sapiens
tcaagttggggagca

SEQ ID NO: 1218682 - DNA, 15 bp, Homo sapiens
gtcaagttggggagc

SEQ ID NO: 1218683 - DNA, 15 bp, Homo sapiens
agtcaagttggggag

SEQ ID NO: 1218684 - DNA, 15 bp, Homo sapiens
cagtcaagttgggga

SEQ ID NO: 1218685 - DNA, 15 bp, Homo sapiens
acagtcaagttgggg

SEQ ID NO: 1218686 - DNA, 15 bp, Homo sapiens
cacagtcaagttggg

SEQ ID NO: 1218687 - DNA, 15 bp, Homo sapiens
gcacagtcaagttgg

SEQ ID NO: 1218688 - DNA, 15 bp, Homo sapiens
cgcacagtcaagttg

SEQ ID NO: 1218689 - DNA, 15 bp, Homo sapiens
tcgcacagtcaagtt

SEQ ID NO: 1218690 - DNA, 15 bp, Homo sapiens
ctcgcacagtcaagt

SEQ ID NO: 1218691 - DNA, 15 bp, Homo sapiens
tctcgcacagtcaag

SEQ ID NO: 1218692 - DNA, 15 bp, Homo sapiens
ctctcgcacagtcaa

SEQ ID NO: 1218693 - DNA, 15 bp, Homo sapiens
tctctcgcacagtca

SEQ ID NO: 1218694 - DNA, 15 bp, Homo sapiens
gtctctcgcacagtc

SEQ ID NO: 1218695 - DNA, 15 bp, Homo sapiens
ggtctctcgcacagt

SEQ ID NO: 1218696 - DNA, 15 bp, Homo sapiens
aggtctctcgcacag

SEQ ID NO: 1218697 - DNA, 15 bp, Homo sapiens
aaggtctctcgcaca

SEQ ID NO: 1218698 - DNA, 15 bp, Homo sapiens
caaggtctctcgcac

SEQ ID NO: 1218699 - DNA, 15 bp, Homo sapiens
ccaaggtctctcgca

SEQ ID NO: 1218700 - DNA, 15 bp, Homo sapiens
gccaaggtctctcgc

SEQ ID NO: 1218701 - DNA, 15 bp, Homo sapiens
ggccaaggtctctcg

SEQ ID NO: 1218702 - DNA, 15 bp, Homo sapiens
aggccaaggtctctc

SEQ ID NO: 1218703 - DNA, 15 bp, Homo sapiens
aaggccaaggtctct

SEQ ID NO: 1218704 - DNA, 15 bp, Homo sapiens
gaaggccaaggtctc

SEQ ID NO: 1218705 - DNA, 15 bp, Homo sapiens
tgaaggccaaggtct

SEQ ID NO: 1218706 - DNA, 15 bp, Homo sapiens
atgaaggccaaggtc

SEQ ID NO: 1218707 - DNA, 15 bp, Homo sapiens
aatgaaggccaaggt

SEQ ID NO: 1218708 - DNA, 15 bp, Homo sapiens
caatgaaggccaagg

SEQ ID NO: 1218709 - DNA, 15 bp, Homo sapiens
gcaatgaaggccaag

SEQ ID NO: 1218710 - DNA, 15 bp, Homo sapiens
ggcaatgaaggccaa

SEQ ID NO: 1218711 - DNA, 15 bp, Homo sapiens
gggcaatgaaggcca

SEQ ID NO: 1218712 - DNA, 15 bp, Homo sapiens
tgggcaatgaaggcc

SEQ ID NO: 1218713 - DNA, 15 bp, Homo sapiens
ctgggcaatgaaggc

SEQ ID NO: 1218714 - DNA, 15 bp, Homo sapiens
tctgggcaatgaagg

SEQ ID NO: 1218715 - DNA, 15 bp, Homo sapiens
atctgggcaatgaag

SEQ ID NO: 1218716 - DNA, 15 bp, Homo sapiens
catctgggcaatgaa

SEQ ID NO: 1218717 - DNA, 15 bp, Homo sapiens
gcatctgggcaatga

SEQ ID NO: 1218718 - DNA, 15 bp, Homo sapiens
cgcatctgggcaatg

SEQ ID NO: 1218719 - DNA, 15 bp, Homo sapiens
ccgcatctgggcaat

SEQ ID NO: 1218720 - DNA, 15 bp, Homo sapiens
gccgcatctgggcaa

SEQ ID NO: 1218721 - DNA, 15 bp, Homo sapiens
agccgcatctgggca

SEQ ID NO: 1218722 - DNA, 15 bp, Homo sapiens
cagccgcatctgggc

SEQ ID NO: 1218723 - DNA, 15 bp, Homo sapiens
gcagccgcatctggg

SEQ ID NO: 1218724 - DNA, 15 bp, Homo sapiens
ggcagccgcatctgg

SEQ ID NO: 1218725 - DNA, 15 bp, Homo sapiens
gggcagccgcatctg

SEQ ID NO: 1218726 - DNA, 15 bp, Homo sapiens
tgggcagccgcatct

SEQ ID NO: 1218727 - DNA, 15 bp, Homo sapiens
ctgggcagccgcatc

SEQ ID NO: 1218728 - DNA, 15 bp, Homo sapiens
tctgggcagccgcat

SEQ ID NO: 1218729 - DNA, 15 bp, Homo sapiens
ttctgggcagccgca

SEQ ID NO: 1218730 - DNA, 15 bp, Homo sapiens
gttctgggcagccgc

SEQ ID NO: 1218731 - DNA, 15 bp, Homo sapiens
ggttctgggcagccg

SEQ ID NO: 1218732 - DNA, 15 bp, Homo sapiens
aggttctgggcagcc

SEQ ID NO: 1218733 - DNA, 15 bp, Homo sapiens
aaggttctgggcagc

SEQ ID NO: 1218734 - DNA, 15 bp, Homo sapiens
gaaggttctgggcag

SEQ ID NO: 1218735 - DNA, 15 bp, Homo sapiens
agaaggttctgggca

SEQ ID NO: 1218736 - DNA, 15 bp, Homo sapiens
gagaaggttctgggc

SEQ ID NO: 1218737 - DNA, 15 bp, Homo sapiens
ggagaaggttctggg

SEQ ID NO: 1218738 - DNA, 15 bp, Homo sapiens
gggagaaggttctgg

SEQ ID NO: 1218739 - DNA, 15 bp, Homo sapiens
tgggagaaggttctg

SEQ ID NO: 1218740 - DNA, 15 bp, Homo sapiens
ctgggagaaggttct

SEQ ID NO: 1218741 - DNA, 15 bp, Homo sapiens
cctgggagaaggttc

SEQ ID NO: 1218742 - DNA, 15 bp, Homo sapiens
gcctgggagaaggtt

SEQ ID NO: 1218743 - DNA, 15 bp, Homo sapiens
ggcctgggagaaggt

SEQ ID NO: 1218744 - DNA, 15 bp, Homo sapiens
gggcctgggagaagg

SEQ ID NO: 1218745 - DNA, 15 bp, Homo sapiens
tgggcctgggagaag

SEQ ID NO: 1218746 - DNA, 15 bp, Homo sapiens
ctgggcctgggagaa

SEQ ID NO: 1218747 - DNA, 15 bp, Homo sapiens
gctgggcctgggaga

SEQ ID NO: 1218748 - DNA, 15 bp, Homo sapiens
cgctgggcctgggag

SEQ ID NO: 1218749 - DNA, 15 bp, Homo sapiens
acgctgggcctggga

SEQ ID NO: 1218750 - DNA, 15 bp, Homo sapiens
cacgctgggcctggg

SEQ ID NO: 1218751 - DNA, 15 bp, Homo sapiens
tcacgctgggcctgg

SEQ ID NO: 1218752 - DNA, 15 bp, Homo sapiens
gtcacgctgggcctg

SEQ ID NO: 1218753 - DNA, 15 bp, Homo sapiens
tgtcacgctgggcct

SEQ ID NO: 1218754 - DNA, 15 bp, Homo sapiens
ttgtcacgctgggcc

SEQ ID NO: 1218755 - DNA, 15 bp, Homo sapiens
tttgtcacgctgggc

SEQ ID NO: 1218756 - DNA, 15 bp, Homo sapiens
ttttgtcacgctggg

SEQ ID NO: 1218757 - DNA, 15 bp, Homo sapiens
cttttgtcacgctgg

SEQ ID NO: 1218758 - DNA, 15 bp, Homo sapiens
ccttttgtcacgctg

SEQ ID NO: 1218759 - DNA, 15 bp, Homo sapiens
cccttttgtcacgct

SEQ ID NO: 1218760 - DNA, 15 bp, Homo sapiens
acccttttgtcacgc

SEQ ID NO: 1218761 - DNA, 15 bp, Homo sapiens
tacccttttgtcacg

SEQ ID NO: 1218762 - DNA, 15 bp, Homo sapiens
ttacccttttgtcac

SEQ ID NO: 1218763 - DNA, 15 bp, Homo sapiens
gttacccttttgtca

SEQ ID NO: 1218764 - DNA, 15 bp, Homo sapiens
agttacccttttgtc

SEQ ID NO: 1218765 - DNA, 15 bp, Homo sapiens
tagttacccttttgt

SEQ ID NO: 1218766 - DNA, 15 bp, Homo sapiens
ttagttacccttttg

SEQ ID NO: 1218767 - DNA, 15 bp, Homo sapiens
gttagttaccctttt

SEQ ID NO: 1218768 - DNA, 15 bp, Homo sapiens
agttagttacccttt

SEQ ID NO: 1218769 - DNA, 15 bp, Homo sapiens
cagttagttaccctt

SEQ ID NO: 1218770 - DNA, 15 bp, Homo sapiens
ccagttagttaccct

SEQ ID NO: 1218771 - DNA, 15 bp, Homo sapiens
gccagttagttaccc

SEQ ID NO: 1218772 - DNA, 15 bp, Homo sapiens
ggccagttagttacc

SEQ ID NO: 1218773 - DNA, 15 bp, Homo sapiens
gggccagttagttac

SEQ ID NO: 1218774 - DNA, 15 bp, Homo sapiens
ggggccagttagtta

SEQ ID NO: 1218775 - DNA, 15 bp, Homo sapiens
tggggccagttagtt

SEQ ID NO: 1218776 - DNA, 15 bp, Homo sapiens
ctggggccagttagt

SEQ ID NO: 1218777 - DNA, 15 bp, Homo sapiens
actggggccagttag

SEQ ID NO: 1218778 - DNA, 15 bp, Homo sapiens
cactggggccagtta

SEQ ID NO: 1218779 - DNA, 15 bp, Homo sapiens
ccactggggccagtt

SEQ ID NO: 1218780 - DNA, 15 bp, Homo sapiens
accactggggccagt

SEQ ID NO: 1218781 - DNA, 15 bp, Homo sapiens
caccactggggccag

SEQ ID NO: 1218782 - DNA, 15 bp, Homo sapiens
tcaccactggggcca

SEQ ID NO: 1218783 - DNA, 15 bp, Homo sapiens
gtcaccactggggcc

SEQ ID NO: 1218784 - DNA, 15 bp, Homo sapiens
ggtcaccactggggc

SEQ ID NO: 1218785 - DNA, 15 bp, Homo sapiens
gggtcaccactgggg

SEQ ID NO: 1218786 - DNA, 15 bp, Homo sapiens
ggggtcaccactggg

SEQ ID NO: 1218787 - DNA, 15 bp, Homo sapiens
gggggtcaccactgg

SEQ ID NO: 1218788 - DNA, 15 bp, Homo sapiens
tgggggtcaccactg

SEQ ID NO: 1218789 - DNA, 15 bp, Homo sapiens
ctgggggtcaccact

SEQ ID NO: 1218790 - DNA, 15 bp, Homo sapiens
cctgggggtcaccac

SEQ ID NO: 1218791 - DNA, 15 bp, Homo sapiens
acctgggggtcacca

SEQ ID NO: 1218792 - DNA, 15 bp, Homo sapiens
gacctgggggtcacc

SEQ ID NO: 1218793 - DNA, 15 bp, Homo sapiens
ggacctgggggtcac

SEQ ID NO: 1218794 - DNA, 15 bp, Homo sapiens
tggacctgggggtca

SEQ ID NO: 1218795 - DNA, 15 bp, Homo sapiens
ttggacctgggggtc

SEQ ID NO: 1218796 - DNA, 15 bp, Homo sapiens
cttggacctgggggt

SEQ ID NO: 1218797 - DNA, 15 bp, Homo sapiens
tcttggacctggggg

SEQ ID NO: 1218798 - DNA, 15 bp, Homo sapiens
ttcttggacctgggg

SEQ ID NO: 1218799 - DNA, 15 bp, Homo sapiens
cttcttggacctggg

SEQ ID NO: 1218800 - DNA, 15 bp, Homo sapiens
gcttcttggacctgg

SEQ ID NO: 1218801 - DNA, 15 bp, Homo sapiens
agcttcttggacctg

SEQ ID NO: 1218802 - DNA, 15 bp, Homo sapiens
tagcttcttggacct

SEQ ID NO: 1218803 - DNA, 15 bp, Homo sapiens
gtagcttcttggacc

SEQ ID NO: 1218804 - DNA, 15 bp, Homo sapiens
tgtagcttcttggac

SEQ ID NO: 1218805 - DNA, 15 bp, Homo sapiens
ctgtagcttcttgga

SEQ ID NO: 1218806 - DNA, 15 bp, Homo sapiens
actgtagcttcttgg

SEQ ID NO: 1218807 - DNA, 15 bp, Homo sapiens
cactgtagcttcttg

SEQ ID NO: 1218808 - DNA, 15 bp, Homo sapiens
acactgtagcttctt

SEQ ID NO: 1218809 - DNA, 15 bp, Homo sapiens
gacactgtagcttct

SEQ ID NO: 1218810 - DNA, 15 bp, Homo sapiens
ggacactgtagcttc

SEQ ID NO: 1218811 - DNA, 15 bp, Homo sapiens
tggacactgtagctt

SEQ ID NO: 1218812 - DNA, 15 bp, Homo sapiens
atggacactgtagct

SEQ ID NO: 1218813 - DNA, 15 bp, Homo sapiens
catggacactgtagc

SEQ ID NO: 1218814 - DNA, 15 bp, Homo sapiens
gcatggacactgtag

SEQ ID NO: 1218815 - DNA, 15 bp, Homo sapiens
ggcatggacactgta

SEQ ID NO: 1218816 - DNA, 15 bp, Homo sapiens
gggcatggacactgt

SEQ ID NO: 1218817 - DNA, 15 bp, Homo sapiens
ggggcatggacactg

SEQ ID NO: 1218818 - DNA, 15 bp, Homo sapiens
cggggcatggacact

SEQ ID NO: 1218819 - DNA, 15 bp, Homo sapiens
gcggggcatggacac

SEQ ID NO: 1218820 - DNA, 15 bp, Homo sapiens
agcggggcatggaca

SEQ ID NO: 1218821 - DNA, 15 bp, Homo sapiens
gagcggggcatggac

SEQ ID NO: 1218822 - DNA, 15 bp, Homo sapiens
ggagcggggcatgga

SEQ ID NO: 1218823 - DNA, 15 bp, Homo sapiens
aggagcggggcatgg

SEQ ID NO: 1218824 - DNA, 15 bp, Homo sapiens
gaggagcggggcatg

SEQ ID NO: 1218825 - DNA, 15 bp, Homo sapiens
ggaggagcggggcat

SEQ ID NO: 1218826 - DNA, 15 bp, Homo sapiens
gggaggagcggggca

SEQ ID NO: 1218827 - DNA, 15 bp, Homo sapiens
ggggaggagcggggc

SEQ ID NO: 1218828 - DNA, 15 bp, Homo sapiens
aggggaggagcgggg

SEQ ID NO: 1218829 - DNA, 15 bp, Homo sapiens
caggggaggagcggg

SEQ ID NO: 1218830 - DNA, 15 bp, Homo sapiens
gcaggggaggagcgg

SEQ ID NO: 1218831 - DNA, 15 bp, Homo sapiens
agcaggggaggagcg

SEQ ID NO: 1218832 - DNA, 15 bp, Homo sapiens
cagcaggggaggagc

SEQ ID NO: 1218833 - DNA, 15 bp, Homo sapiens
gcagcaggggaggag

SEQ ID NO: 1218834 - DNA, 15 bp, Homo sapiens
ggcagcaggggagga

SEQ ID NO: 1218835 - DNA, 15 bp, Homo sapiens
aggcagcaggggagg

SEQ ID NO: 1218836 - DNA, 15 bp, Homo sapiens
aaggcagcaggggag

SEQ ID NO: 1218837 - DNA, 15 bp, Homo sapiens
caaggcagcagggga

SEQ ID NO: 1218838 - DNA, 15 bp, Homo sapiens
gcaaggcagcagggg

SEQ ID NO: 1218839 - DNA, 15 bp, Homo sapiens
ggcaaggcagcaggg

SEQ ID NO: 1218840 - DNA, 15 bp, Homo sapiens
aggcaaggcagcagg

SEQ ID NO: 1218841 - DNA, 15 bp, Homo sapiens
gaggcaaggcagcag

SEQ ID NO: 1218842 - DNA, 15 bp, Homo sapiens
tgaggcaaggcagca

SEQ ID NO: 1218843 - DNA, 15 bp, Homo sapiens
ctgaggcaaggcagc

SEQ ID NO: 1218844 - DNA, 15 bp, Homo sapiens
cctgaggcaaggcag

SEQ ID NO: 1218845 - DNA, 15 bp, Homo sapiens
tcctgaggcaaggca

SEQ ID NO: 1218846 - DNA, 15 bp, Homo sapiens
gtcctgaggcaaggc

SEQ ID NO: 1218847 - DNA, 15 bp, Homo sapiens
ggtcctgaggcaagg

SEQ ID NO: 1218848 - DNA, 15 bp, Homo sapiens
gggtcctgaggcaag

SEQ ID NO: 1218849 - DNA, 15 bp, Homo sapiens
tgggtcctgaggcaa

SEQ ID NO: 1218850 - DNA, 15 bp, Homo sapiens
ctgggtcctgaggca

SEQ ID NO: 1218851 - DNA, 15 bp, Homo sapiens
gctgggtcctgaggc

SEQ ID NO: 1218852 - DNA, 15 bp, Homo sapiens
ggctgggtcctgagg

SEQ ID NO: 1218853 - DNA, 15 bp, Homo sapiens
cggctgggtcctgag

SEQ ID NO: 1218854 - DNA, 15 bp, Homo sapiens
gcggctgggtcctga

SEQ ID NO: 1218855 - DNA, 15 bp, Homo sapiens
tgcggctgggtcctg

SEQ ID NO: 1218856 - DNA, 15 bp, Homo sapiens
ctgcggctgggtcct

SEQ ID NO: 1218857 - DNA, 15 bp, Homo sapiens
cctgcggctgggtcc

SEQ ID NO: 1218858 - DNA, 15 bp, Homo sapiens
acctgcggctgggtc

SEQ ID NO: 1218859 - DNA, 15 bp, Homo sapiens
gacctgcggctgggt

SEQ ID NO: 1218860 - DNA, 15 bp, Homo sapiens
cgacctgcggctggg

SEQ ID NO: 1218861 - DNA, 15 bp, Homo sapiens
tcgacctgcggctgg

SEQ ID NO: 1218862 - DNA, 15 bp, Homo sapiens
ctcgacctgcggctg

SEQ ID NO: 1218863 - DNA, 15 bp, Homo sapiens
actcgacctgcggct

SEQ ID NO: 1218864 - DNA, 15 bp, Homo sapiens
aactcgacctgcggc

SEQ ID NO: 1218865 - DNA, 15 bp, Homo sapiens
aaactcgacctgcgg

SEQ ID NO: 1218866 - DNA, 15 bp, Homo sapiens
caaactcgacctgcg

SEQ ID NO: 1218867 - DNA, 15 bp, Homo sapiens
tcaaactcgacctgc

SEQ ID NO: 1218868 - DNA, 15 bp, Homo sapiens
ttcaaactcgacctg

SEQ ID NO: 1218869 - DNA, 15 bp, Homo sapiens
gttcaaactcgacct

SEQ ID NO: 1218870 - DNA, 15 bp, Homo sapiens
tgttcaaactcgacc

SEQ ID NO: 1218871 - DNA, 15 bp, Homo sapiens
ttgttcaaactcgac

SEQ ID NO: 1218872 - DNA, 15 bp, Homo sapiens
gttgttcaaactcga

SEQ ID NO: 1218873 - DNA, 15 bp, Homo sapiens
agttgttcaaactcg

SEQ ID NO: 1218874 - DNA, 15 bp, Homo sapiens
gagttgttcaaactc

SEQ ID NO: 1218875 - DNA, 15 bp, Homo sapiens
tgagttgttcaaact

SEQ ID NO: 1218876 - DNA, 15 bp, Homo sapiens
ctgagttgttcaaac

SEQ ID NO: 1218877 - DNA, 15 bp, Homo sapiens
gctgagttgttcaaa

SEQ ID NO: 1218878 - DNA, 15 bp, Homo sapiens
agctgagttgttcaa

SEQ ID NO: 1218879 - DNA, 15 bp, Homo sapiens
aagctgagttgttca

SEQ ID NO: 1218880 - DNA, 15 bp, Homo sapiens
caagctgagttgttc

SEQ ID NO: 1218881 - DNA, 15 bp, Homo sapiens
gcaagctgagttgtt

SEQ ID NO: 1218882 - DNA, 15 bp, Homo sapiens
ggcaagctgagttgt

SEQ ID NO: 1218883 - DNA, 15 bp, Homo sapiens
aggcaagctgagttg

SEQ ID NO: 1218884 - DNA, 15 bp, Homo sapiens
aaggcaagctgagtt

SEQ ID NO: 1218885 - DNA, 15 bp, Homo sapiens
gaaggcaagctgagt

SEQ ID NO: 1218886 - DNA, 15 bp, Homo sapiens
ggaaggcaagctgag

SEQ ID NO: 1218887 - DNA, 15 bp, Homo sapiens
cggaaggcaagctga

SEQ ID NO: 1218888 - DNA, 15 bp, Homo sapiens
gcggaaggcaagctg

SEQ ID NO: 1218889 - DNA, 15 bp, Homo sapiens
ggcggaaggcaagct

SEQ ID NO: 1218890 - DNA, 15 bp, Homo sapiens
tggcggaaggcaagc

SEQ ID NO: 1218891 - DNA, 15 bp, Homo sapiens
ctggcggaaggcaag

SEQ ID NO: 1218892 - DNA, 15 bp, Homo sapiens
gctggcggaaggcaa

SEQ ID NO: 1218893 - DNA, 15 bp, Homo sapiens
ggctggcggaaggca

SEQ ID NO: 1218894 - DNA, 15 bp, Homo sapiens
gggctggcggaaggc

SEQ ID NO: 1218895 - DNA, 15 bp, Homo sapiens
agggctggcggaagg

SEQ ID NO: 1218896 - DNA, 15 bp, Homo sapiens
cagggctggcggaag

SEQ ID NO: 1218897 - DNA, 15 bp, Homo sapiens
ccagggctggcggaa

SEQ ID NO: 1218898 - DNA, 15 bp, Homo sapiens
cccagggctggcgga

SEQ ID NO: 1218899 - DNA, 15 bp, Homo sapiens
gcccagggctggcgg

SEQ ID NO: 1218900 - DNA, 15 bp, Homo sapiens
agcccagggctggcg

SEQ ID NO: 1218901 - DNA, 15 bp, Homo sapiens
cagcccagggctggc

SEQ ID NO: 1218902 - DNA, 15 bp, Homo sapiens
gcagcccagggctgg

SEQ ID NO: 1218903 - DNA, 15 bp, Homo sapiens
tgcagcccagggctg

SEQ ID NO: 1218904 - DNA, 15 bp, Homo sapiens
ctgcagcccagggct

SEQ ID NO: 1218905 - DNA, 15 bp, Homo sapiens
gctgcagcccagggc

SEQ ID NO: 1218906 - DNA, 15 bp, Homo sapiens
ggctgcagcccaggg

SEQ ID NO: 1218907 - DNA, 15 bp, Homo sapiens
gggctgcagcccagg

SEQ ID NO: 1218908 - DNA, 15 bp, Homo sapiens
tgggctgcagcccag

SEQ ID NO: 1218909 - DNA, 15 bp, Homo sapiens
gtgggctgcagccca

SEQ ID NO: 1218910 - DNA, 15 bp, Homo sapiens
ggtgggctgcagccc

SEQ ID NO: 1218911 - DNA, 15 bp, Homo sapiens
gggtgggctgcagcc

SEQ ID NO: 1218912 - DNA, 15 bp, Homo sapiens
agggtgggctgcagc

SEQ ID NO: 1218913 - DNA, 15 bp, Homo sapiens
gagggtgggctgcag

SEQ ID NO: 1218914 - DNA, 15 bp, Homo sapiens
ggagggtgggctgca

SEQ ID NO: 1218915 - DNA, 15 bp, Homo sapiens
tggagggtgggctgc

SEQ ID NO: 1218916 - DNA, 15 bp, Homo sapiens
gtggagggtgggctg

SEQ ID NO: 1218917 - DNA, 15 bp, Homo sapiens
ggtggagggtgggct

SEQ ID NO: 1218918 - DNA, 15 bp, Homo sapiens
gggtggagggtgggc

SEQ ID NO: 1218919 - DNA, 15 bp, Homo sapiens
ggagggtggagggtg

SEQ ID NO: 1218920 - DNA, 15 bp, Homo sapiens
aggagggtggagggt

SEQ ID NO: 1218921 - DNA, 15 bp, Homo sapiens
aaggagggtggaggg

SEQ ID NO: 1218922 - DNA, 15 bp, Homo sapiens
aaaggagggtggagg

SEQ ID NO: 1218923 - DNA, 15 bp, Homo sapiens
gaaaggagggtggag

SEQ ID NO: 1218924 - DNA, 15 bp, Homo sapiens
tgaaaggagggtgga

SEQ ID NO: 1218925 - DNA, 15 bp, Homo sapiens
ttgaaaggagggtgg

SEQ ID NO: 1218926 - DNA, 15 bp, Homo sapiens
tttgaaaggagggtg

SEQ ID NO: 1218927 - DNA, 15 bp, Homo sapiens
gtttgaaaggagggt

SEQ ID NO: 1218928 - DNA, 15 bp, Homo sapiens
ggtttgaaaggaggg

SEQ ID NO: 1218929 - DNA, 15 bp, Homo sapiens
gggtttgaaaggagg

SEQ ID NO: 1218930 - DNA, 15 bp, Homo sapiens
ggggtttgaaaggag

SEQ ID NO: 1218931 - DNA, 15 bp, Homo sapiens
tggggtttgaaagga

SEQ ID NO: 1218932 - DNA, 15 bp, Homo sapiens
gtggggtttgaaagg

SEQ ID NO: 1218933 - DNA, 15 bp, Homo sapiens
tgtggggtttgaaag

SEQ ID NO: 1218934 - DNA, 15 bp, Homo sapiens
ctgtggggtttgaaa

SEQ ID NO: 1218935 - DNA, 15 bp, Homo sapiens
gctgtggggtttgaa

SEQ ID NO: 1218936 - DNA, 15 bp, Homo sapiens
ggctgtggggtttga

SEQ ID NO: 1218937 - DNA, 15 bp, Homo sapiens
gggctgtggggtttg

SEQ ID NO: 1218938 - DNA, 15 bp, Homo sapiens
cgggctgtggggttt

SEQ ID NO: 1218939 - DNA, 15 bp, Homo sapiens
gcgggctgtggggtt

SEQ ID NO: 1218940 - DNA, 15 bp, Homo sapiens
ggcgggctgtggggt

SEQ ID NO: 1218941 - DNA, 15 bp, Homo sapiens
tggcgggctgtgggg

SEQ ID NO: 1218942 - DNA, 15 bp, Homo sapiens
ctggcgggctgtggg

SEQ ID NO: 1218943 - DNA, 15 bp, Homo sapiens
tctggcgggctgtgg

SEQ ID NO: 1218944 - DNA, 15 bp, Homo sapiens
ttctggcgggctgtg

SEQ ID NO: 1218945 - DNA, 15 bp, Homo sapiens
cttctggcgggctgt

SEQ ID NO: 1218946 - DNA, 15 bp, Homo sapiens
gcttctggcgggctg

SEQ ID NO: 1218947 - DNA, 15 bp, Homo sapiens
agcttctggcgggct

SEQ ID NO: 1218948 - DNA, 15 bp, Homo sapiens
tagcttctggcgggc

SEQ ID NO: 1218949 - DNA, 15 bp, Homo sapiens
ctagcttctggcggg

SEQ ID NO: 1218950 - DNA, 15 bp, Homo sapiens
gctagcttctggcgg

SEQ ID NO: 1218951 - DNA, 15 bp, Homo sapiens
agctagcttctggcg

SEQ ID NO: 1218952 - DNA, 15 bp, Homo sapiens
gagctagcttctggc

SEQ ID NO: 1218953 - DNA, 15 bp, Homo sapiens
tgagctagcttctgg

SEQ ID NO: 1218954 - DNA, 15 bp, Homo sapiens
ctgagctagcttctg

SEQ ID NO: 1218955 - DNA, 15 bp, Homo sapiens
gctgagctagcttct

SEQ ID NO: 1218956 - DNA, 15 bp, Homo sapiens
ggctgagctagcttc

SEQ ID NO: 1218957 - DNA, 15 bp, Homo sapiens
gggctgagctagctt

SEQ ID NO: 1218958 - DNA, 15 bp, Homo sapiens
tgggctgagctagct

SEQ ID NO: 1218959 - DNA, 15 bp, Homo sapiens
atgggctgagctagc

SEQ ID NO: 1218960 - DNA, 15 bp, Homo sapiens
aatgggctgagctag

SEQ ID NO: 1218961 - DNA, 15 bp, Homo sapiens
caatgggctgagcta

SEQ ID NO: 1218962 - DNA, 15 bp, Homo sapiens
ccaatgggctgagct

SEQ ID NO: 1218963 - DNA, 15 bp, Homo sapiens
accaatgggctgagc

SEQ ID NO: 1218964 - DNA, 15 bp, Homo sapiens
aaccaatgggctgag

SEQ ID NO: 1218965 - DNA, 15 bp, Homo sapiens
gaaccaatgggctga

SEQ ID NO: 1218966 - DNA, 15 bp, Homo sapiens
ggaaccaatgggctg

SEQ ID NO: 1218967 - DNA, 15 bp, Homo sapiens
gggaaccaatgggct

SEQ ID NO: 1218968 - DNA, 15 bp, Homo sapiens
agggaaccaatgggc

SEQ ID NO: 1218969 - DNA, 15 bp, Homo sapiens
aagggaaccaatggg

SEQ ID NO: 1218970 - DNA, 15 bp, Homo sapiens
gaagggaaccaatgg

SEQ ID NO: 1218971 - DNA, 15 bp, Homo sapiens
tgaagggaaccaatg

SEQ ID NO: 1218972 - DNA, 15 bp, Homo sapiens
gtgaagggaaccaat

SEQ ID NO: 1218973 - DNA, 15 bp, Homo sapiens
agtgaagggaaccaa

SEQ ID NO: 1218974 - DNA, 15 bp, Homo sapiens
cagtgaagggaacca

SEQ ID NO: 1218975 - DNA, 15 bp, Homo sapiens
gcagtgaagggaacc

SEQ ID NO: 1218976 - DNA, 15 bp, Homo sapiens
tgcagtgaagggaac

SEQ ID NO: 1218977 - DNA, 15 bp, Homo sapiens
gtgcagtgaagggaa

SEQ ID NO: 1218978 - DNA, 15 bp, Homo sapiens
agtgcagtgaaggga

SEQ ID NO: 1218979 - DNA, 15 bp, Homo sapiens
aagtgcagtgaaggg

SEQ ID NO: 1218980 - DNA, 15 bp, Homo sapiens
caagtgcagtgaagg

SEQ ID NO: 1218981 - DNA, 15 bp, Homo sapiens
acaagtgcagtgaag

SEQ ID NO: 1218982 - DNA, 15 bp, Homo sapiens
gacaagtgcagtgaa

SEQ ID NO: 1218983 - DNA, 15 bp, Homo sapiens
tgacaagtgcagtga

SEQ ID NO: 1218984 - DNA, 15 bp, Homo sapiens
ttgacaagtgcagtg

SEQ ID NO: 1218985 - DNA, 15 bp, Homo sapiens
cttgacaagtgcagt

SEQ ID NO: 1218986 - DNA, 15 bp, Homo sapiens
tcttgacaagtgcag

SEQ ID NO: 1218987 - DNA, 15 bp, Homo sapiens
atcttgacaagtgca

SEQ ID NO: 1218988 - DNA, 15 bp, Homo sapiens
catcttgacaagtgc

SEQ ID NO: 1218989 - DNA, 15 bp, Homo sapiens
acatcttgacaagtg

SEQ ID NO: 1218990 - DNA, 15 bp, Homo sapiens
cacatcttgacaagt

SEQ ID NO: 1218991 - DNA, 15 bp, Homo sapiens
ccacatcttgacaag

SEQ ID NO: 1218992 - DNA, 15 bp, Homo sapiens
cccacatcttgacaa

SEQ ID NO: 1218993 - DNA, 15 bp, Homo sapiens
tcccacatcttgaca

SEQ ID NO: 1218994 - DNA, 15 bp, Homo sapiens
atcccacatcttgac

SEQ ID NO: 1218995 - DNA, 15 bp, Homo sapiens
catcccacatcttga

SEQ ID NO: 1218996 - DNA, 15 bp, Homo sapiens
tcatcccacatcttg

SEQ ID NO: 1218997 - DNA, 15 bp, Homo sapiens
ctcatcccacatctt

SEQ ID NO: 1218998 - DNA, 15 bp, Homo sapiens
actcatcccacatct

SEQ ID NO: 1218999 - DNA, 15 bp, Homo sapiens
cactcatcccacatc

SEQ ID NO: 1219000 - DNA, 15 bp, Homo sapiens
acactcatcccacat

SEQ ID NO: 1219001 - DNA, 15 bp, Homo sapiens
tacactcatcccaca

SEQ ID NO: 1219002 - DNA, 15 bp, Homo sapiens
atacactcatcccac

SEQ ID NO: 1219003 - DNA, 15 bp, Homo sapiens
aatacactcatccca

SEQ ID NO: 1219004 - DNA, 15 bp, Homo sapiens
aaatacactcatccc

SEQ ID NO: 1219005 - DNA, 15 bp, Homo sapiens
caaatacactcatcc

SEQ ID NO: 1219006 - DNA, 15 bp, Homo sapiens
acaaatacactcatc

SEQ ID NO: 1219007 - DNA, 15 bp, Homo sapiens
aacaaatacactcat

SEQ ID NO: 1219008 - DNA, 15 bp, Homo sapiens
aaacaaatacactca

SEQ ID NO: 1219009 - DNA, 15 bp, Homo sapiens
caaacaaatacactc

SEQ ID NO: 1219010 - DNA, 15 bp, Homo sapiens
acaaacaaatacact

SEQ ID NO: 1219011 - DNA, 15 bp, Homo sapiens
cacaaacaaatacac

SEQ ID NO: 1219012 - DNA, 15 bp, Homo sapiens
acacaaacaaataca

SEQ ID NO: 1219013 - DNA, 15 bp, Homo sapiens
cacacaaacaaatac

SEQ ID NO: 1219014 - DNA, 15 bp, Homo sapiens
acacacaaacaaata

SEQ ID NO: 1219015 - DNA, 15 bp, Homo sapiens
aacacacaaacaaat

SEQ ID NO: 1219016 - DNA, 15 bp, Homo sapiens
aaacacacaaacaaa

SEQ ID NO: 1219017 - DNA, 15 bp, Homo sapiens
aaaacacacaaacaa

SEQ ID NO: 1219018 - DNA, 15 bp, Homo sapiens
gaaaacacacaaaca

SEQ ID NO: 1219019 - DNA, 15 bp, Homo sapiens
agaaaacacacaaac

SEQ ID NO: 1219020 - DNA, 15 bp, Homo sapiens
cagaaaacacacaaa

SEQ ID NO: 1219021 - DNA, 15 bp, Homo sapiens
ccagaaaacacacaa

SEQ ID NO: 1219022 - DNA, 15 bp, Homo sapiens
cccagaaaacacaca

SEQ ID NO: 1219023 - DNA, 15 bp, Homo sapiens
gcccagaaaacacac

SEQ ID NO: 1219024 - DNA, 15 bp, Homo sapiens
ggcccagaaaacaca

SEQ ID NO: 1219025 - DNA, 15 bp, Homo sapiens
aggcccagaaaacac

SEQ ID NO: 1219026 - DNA, 15 bp, Homo sapiens
gaggcccagaaaaca

SEQ ID NO: 1219027 - DNA, 15 bp, Homo sapiens
ggaggcccagaaaac

SEQ ID NO: 1219028 - DNA, 15 bp, Homo sapiens
tggaggcccagaaaa

SEQ ID NO: 1219029 - DNA, 15 bp, Homo sapiens
atggaggcccagaaa

SEQ ID NO: 1219030 - DNA, 15 bp, Homo sapiens
catggaggcccagaa

SEQ ID NO: 1219031 - DNA, 15 bp, Homo sapiens
acatggaggcccaga

SEQ ID NO: 1219032 - DNA, 15 bp, Homo sapiens
cacatggaggcccag

SEQ ID NO: 1219033 - DNA, 15 bp, Homo sapiens
ccacatggaggccca

SEQ ID NO: 1219034 - DNA, 15 bp, Homo sapiens
cccacatggaggccc

SEQ ID NO: 1219035 - DNA, 15 bp, Homo sapiens
acccacatggaggcc

SEQ ID NO: 1219036 - DNA, 15 bp, Homo sapiens
tacccacatggaggc

SEQ ID NO: 1219037 - DNA, 15 bp, Homo sapiens
ctacccacatggagg

SEQ ID NO: 1219038 - DNA, 15 bp, Homo sapiens
tctacccacatggag

SEQ ID NO: 1219039 - DNA, 15 bp, Homo sapiens
ctctacccacatgga

SEQ ID NO: 1219040 - DNA, 15 bp, Homo sapiens
tctctacccacatgg

SEQ ID NO: 1219041 - DNA, 15 bp, Homo sapiens
ctctctacccacatg

SEQ ID NO: 1219042 - DNA, 15 bp, Homo sapiens
gctctctacccacat

SEQ ID NO: 1219043 - DNA, 15 bp, Homo sapiens
ggctctctacccaca

SEQ ID NO: 1219044 - DNA, 15 bp, Homo sapiens
tggctctctacccac

SEQ ID NO: 1219045 - DNA, 15 bp, Homo sapiens
atggctctctaccca

SEQ ID NO: 1219046 - DNA, 15 bp, Homo sapiens
catggctctctaccc

SEQ ID NO: 1219047 - DNA, 15 bp, Homo sapiens
ccatggctctctacc

SEQ ID NO: 1219048 - DNA, 15 bp, Homo sapiens
accatggctctctac

SEQ ID NO: 1219049 - DNA, 15 bp, Homo sapiens
gaccatggctctcta

SEQ ID NO: 1219050 - DNA, 15 bp, Homo sapiens
ggaccatggctctct

SEQ ID NO: 1219051 - DNA, 15 bp, Homo sapiens
gggaccatggctctc

SEQ ID NO: 1219052 - DNA, 15 bp, Homo sapiens
ggggaccatggctct

SEQ ID NO: 1219053 - DNA, 15 bp, Homo sapiens
tggggaccatggctc

SEQ ID NO: 1219054 - DNA, 15 bp, Homo sapiens
ttggggaccatggct

SEQ ID NO: 1219055 - DNA, 15 bp, Homo sapiens
attggggaccatggc

SEQ ID NO: 1219056 - DNA, 15 bp, Homo sapiens
tattggggaccatgg

SEQ ID NO: 1219057 - DNA, 15 bp, Homo sapiens
gtattggggaccatg

SEQ ID NO: 1219058 - DNA, 15 bp, Homo sapiens
tgtattggggaccat

SEQ ID NO: 1219059 - DNA, 15 bp, Homo sapiens
gtgtattggggacca

SEQ ID NO: 1219060 - DNA, 15 bp, Homo sapiens
agtgtattggggacc

SEQ ID NO: 1219061 - DNA, 15 bp, Homo sapiens
cagtgtattggggac

SEQ ID NO: 1219062 - DNA, 15 bp, Homo sapiens
gcagtgtattgggga

SEQ ID NO: 1219063 - DNA, 15 bp, Homo sapiens
ggcagtgtattgggg

SEQ ID NO: 1219064 - DNA, 15 bp, Homo sapiens
tggcagtgtattggg

SEQ ID NO: 1219065 - DNA, 15 bp, Homo sapiens
gtggcagtgtattgg

SEQ ID NO: 1219066 - DNA, 15 bp, Homo sapiens
cgtggcagtgtattg

SEQ ID NO: 1219067 - DNA, 15 bp, Homo sapiens
acgtggcagtgtatt

SEQ ID NO: 1219068 - DNA, 15 bp, Homo sapiens
aacgtggcagtgtat

SEQ ID NO: 1219069 - DNA, 15 bp, Homo sapiens
gaacgtggcagtgta

SEQ ID NO: 1219070 - DNA, 15 bp, Homo sapiens
ggaacgtggcagtgt

SEQ ID NO: 1219071 - DNA, 15 bp, Homo sapiens
aggaacgtggcagtg

SEQ ID NO: 1219072 - DNA, 15 bp, Homo sapiens
taggaacgtggcagt

SEQ ID NO: 1219073 - DNA, 15 bp, Homo sapiens
ttaggaacgtggcag

SEQ ID NO: 1219074 - DNA, 15 bp, Homo sapiens
gttaggaacgtggca

SEQ ID NO: 1219075 - DNA, 15 bp, Homo sapiens
tgttaggaacgtggc

SEQ ID NO: 1219076 - DNA, 15 bp, Homo sapiens
gtgttaggaacgtgg

SEQ ID NO: 1219077 - DNA, 15 bp, Homo sapiens
tgtgttaggaacgtg

SEQ ID NO: 1219078 - DNA, 15 bp, Homo sapiens
ctgtgttaggaacgt

SEQ ID NO: 1219079 - DNA, 15 bp, Homo sapiens
cctgtgttaggaacg

SEQ ID NO: 1219080 - DNA, 15 bp, Homo sapiens
ccctgtgttaggaac

SEQ ID NO: 1219081 - DNA, 15 bp, Homo sapiens
gccctgtgttaggaa

SEQ ID NO: 1219082 - DNA, 15 bp, Homo sapiens
tgccctgtgttagga

SEQ ID NO: 1219083 - DNA, 15 bp, Homo sapiens
gtgccctgtgttagg

SEQ ID NO: 1219084 - DNA, 15 bp, Homo sapiens
ggtgccctgtgttag

SEQ ID NO: 1219085 - DNA, 15 bp, Homo sapiens
tggtgccctgtgtta

SEQ ID NO: 1219086 - DNA, 15 bp, Homo sapiens
atggtgccctgtgtt

SEQ ID NO: 1219087 - DNA, 15 bp, Homo sapiens
catggtgccctgtgt

SEQ ID NO: 1219088 - DNA, 15 bp, Homo sapiens
gcatggtgccctgtg

SEQ ID NO: 1219089 - DNA, 15 bp, Homo sapiens
ggcatggtgccctgt

SEQ ID NO: 1219090 - DNA, 15 bp, Homo sapiens
gggcatggtgccctg

SEQ ID NO: 1219091 - DNA, 15 bp, Homo sapiens
tgggcatggtgccct

SEQ ID NO: 1219092 - DNA, 15 bp, Homo sapiens
ctgggcatggtgccc

SEQ ID NO: 1219093 - DNA, 15 bp, Homo sapiens
gctgggcatggtgcc

SEQ ID NO: 1219094 - DNA, 15 bp, Homo sapiens
tgctgggcatggtgc

SEQ ID NO: 1219095 - DNA, 15 bp, Homo sapiens
gtgctgggcatggtg

SEQ ID NO: 1219096 - DNA, 15 bp, Homo sapiens
cgtgctgggcatggt

SEQ ID NO: 1219097 - DNA, 15 bp, Homo sapiens
acgtgctgggcatgg

SEQ ID NO: 1219098 - DNA, 15 bp, Homo sapiens
gacgtgctgggcatg

SEQ ID NO: 1219099 - DNA, 15 bp, Homo sapiens
cgacgtgctgggcat

SEQ ID NO: 1219100 - DNA, 15 bp, Homo sapiens
tcgacgtgctgggca

SEQ ID NO: 1219101 - DNA, 15 bp, Homo sapiens
ctcgacgtgctgggc

SEQ ID NO: 1219102 - DNA, 15 bp, Homo sapiens
cctcgacgtgctggg

SEQ ID NO: 1219103 - DNA, 15 bp, Homo sapiens
gcctcgacgtgctgg

SEQ ID NO: 1219104 - DNA, 15 bp, Homo sapiens
ggcctcgacgtgctg

SEQ ID NO: 1219105 - DNA, 15 bp, Homo sapiens
gggcctcgacgtgct

SEQ ID NO: 1219106 - DNA, 15 bp, Homo sapiens
ggggcctcgacgtgc

SEQ ID NO: 1219107 - DNA, 15 bp, Homo sapiens
aggggcctcgacgtg

SEQ ID NO: 1219108 - DNA, 15 bp, Homo sapiens
gaggggcctcgacgt

SEQ ID NO: 1219109 - DNA, 15 bp, Homo sapiens
cgaggggcctcgacg

SEQ ID NO: 1219110 - DNA, 15 bp, Homo sapiens
ccgaggggcctcgac

SEQ ID NO: 1219111 - DNA, 15 bp, Homo sapiens
cccgaggggcctcga

SEQ ID NO: 1219112 - DNA, 15 bp, Homo sapiens
tcccgaggggcctcg

SEQ ID NO: 1219113 - DNA, 15 bp, Homo sapiens
gtcccgaggggcctc

SEQ ID NO: 1219114 - DNA, 15 bp, Homo sapiens
ggtcccgaggggcct

SEQ ID NO: 1219115 - DNA, 15 bp, Homo sapiens
aggtcccgaggggcc

SEQ ID NO: 1219116 - DNA, 15 bp, Homo sapiens
caggtcccgaggggc

SEQ ID NO: 1219117 - DNA, 15 bp, Homo sapiens
acaggtcccgagggg

SEQ ID NO: 1219118 - DNA, 15 bp, Homo sapiens
cacaggtcccgaggg

SEQ ID NO: 1219119 - DNA, 15 bp, Homo sapiens
ccacaggtcccgagg

SEQ ID NO: 1219120 - DNA, 15 bp, Homo sapiens
tccacaggtcccgag

SEQ ID NO: 1219121 - DNA, 15 bp, Homo sapiens
ttccacaggtcccga

SEQ ID NO: 1219122 - DNA, 15 bp, Homo sapiens
tttccacaggtcccg

SEQ ID NO: 1219123 - DNA, 15 bp, Homo sapiens
ctttccacaggtccc

SEQ ID NO: 1219124 - DNA, 15 bp, Homo sapiens
tctttccacaggtcc

SEQ ID NO: 1219125 - DNA, 15 bp, Homo sapiens
ttctttccacaggtc

SEQ ID NO: 1219126 - DNA, 15 bp, Homo sapiens
attctttccacaggt

SEQ ID NO: 1219127 - DNA, 15 bp, Homo sapiens
gattctttccacagg

SEQ ID NO: 1219128 - DNA, 15 bp, Homo sapiens
tgattctttccacag

SEQ ID NO: 1219129 - DNA, 15 bp, Homo sapiens
ctgattctttccaca

SEQ ID NO: 1219130 - DNA, 15 bp, Homo sapiens
cctgattctttccac

SEQ ID NO: 1219131 - DNA, 15 bp, Homo sapiens
ccctgattctttcca

SEQ ID NO: 1219132 - DNA, 15 bp, Homo sapiens
cccctgattctttcc

SEQ ID NO: 1219133 - DNA, 15 bp, Homo sapiens
tcccctgattctttc

SEQ ID NO: 1219134 - DNA, 15 bp, Homo sapiens
ttcccctgattcttt

SEQ ID NO: 1219135 - DNA, 15 bp, Homo sapiens
gttcccctgattctt

SEQ ID NO: 1219136 - DNA, 15 bp, Homo sapiens
ggttcccctgattct

SEQ ID NO: 1219137 - DNA, 15 bp, Homo sapiens
tggttcccctgattc

SEQ ID NO: 1219138 - DNA, 15 bp, Homo sapiens
ttggttcccctgatt

SEQ ID NO: 1219139 - DNA, 15 bp, Homo sapiens
attggttcccctgat

SEQ ID NO: 1219140 - DNA, 15 bp, Homo sapiens
cattggttcccctga

SEQ ID NO: 1219141 - DNA, 15 bp, Homo sapiens
acattggttcccctg

SEQ ID NO: 1219142 - DNA, 15 bp, Homo sapiens
aacattggttcccct

SEQ ID NO: 1219143 - DNA, 15 bp, Homo sapiens
caacattggttcccc

SEQ ID NO: 1219144 - DNA, 15 bp, Homo sapiens
gcaacattggttccc

SEQ ID NO: 1219145 - DNA, 15 bp, Homo sapiens
tgcaacattggttcc

SEQ ID NO: 1219146 - DNA, 15 bp, Homo sapiens
ctgcaacattggttc

SEQ ID NO: 1219147 - DNA, 15 bp, Homo sapiens
gctgcaacattggtt

SEQ ID NO: 1219148 - DNA, 15 bp, Homo sapiens
agctgcaacattggt

SEQ ID NO: 1219149 - DNA, 15 bp, Homo sapiens
aagctgcaacattgg

SEQ ID NO: 1219150 - DNA, 15 bp, Homo sapiens
caagctgcaacattg

SEQ ID NO: 1219151 - DNA, 15 bp, Homo sapiens
ccaagctgcaacatt

SEQ ID NO: 1219152 - DNA, 15 bp, Homo sapiens
tccaagctgcaacat

SEQ ID NO: 1219153 - DNA, 15 bp, Homo sapiens
ttccaagctgcaaca

SEQ ID NO: 1219154 - DNA, 15 bp, Homo sapiens
gttccaagctgcaac

SEQ ID NO: 1219155 - DNA, 15 bp, Homo sapiens
agttccaagctgcaa

SEQ ID NO: 1219156 - DNA, 15 bp, Homo sapiens
gagttccaagctgca

SEQ ID NO: 1219157 - DNA, 15 bp, Homo sapiens
tgagttccaagctgc

SEQ ID NO: 1219158 - DNA, 15 bp, Homo sapiens
ttgagttccaagctg

SEQ ID NO: 1219159 - DNA, 15 bp, Homo sapiens
cttgagttccaagct

SEQ ID NO: 1219160 - DNA, 15 bp, Homo sapiens
acttgagttccaagc

SEQ ID NO: 1219161 - DNA, 15 bp, Homo sapiens
cacttgagttccaag

SEQ ID NO: 1219162 - DNA, 15 bp, Homo sapiens
gcacttgagttccaa

SEQ ID NO: 1219163 - DNA, 15 bp, Homo sapiens
agcacttgagttcca

SEQ ID NO: 1219164 - DNA, 15 bp, Homo sapiens
cagcacttgagttcc

SEQ ID NO: 1219165 - DNA, 15 bp, Homo sapiens
ccagcacttgagttc

SEQ ID NO: 1219166 - DNA, 15 bp, Homo sapiens
tccagcacttgagtt

SEQ ID NO: 1219167 - DNA, 15 bp, Homo sapiens
ctccagcacttgagt

SEQ ID NO: 1219168 - DNA, 15 bp, Homo sapiens
gctccagcacttgag

SEQ ID NO: 1219169 - DNA, 15 bp, Homo sapiens
agctccagcacttga

SEQ ID NO: 1219170 - DNA, 15 bp, Homo sapiens
cagctccagcacttg

SEQ ID NO: 1219171 - DNA, 15 bp, Homo sapiens
acagctccagcactt

SEQ ID NO: 1219172 - DNA, 15 bp, Homo sapiens
gacagctccagcact

SEQ ID NO: 1219173 - DNA, 15 bp, Homo sapiens
agacagctccagcac

SEQ ID NO: 1219174 - DNA, 15 bp, Homo sapiens
gagacagctccagca

SEQ ID NO: 1219175 - DNA, 15 bp, Homo sapiens
ggagacagctccagc

SEQ ID NO: 1219176 - DNA, 15 bp, Homo sapiens
gggagacagctccag

SEQ ID NO: 1219177 - DNA, 15 bp, Homo sapiens
agggagacagctcca

SEQ ID NO: 1219178 - DNA, 15 bp, Homo sapiens
aagggagacagctcc

SEQ ID NO: 1219179 - DNA, 15 bp, Homo sapiens
gaagggagacagctc

SEQ ID NO: 1219180 - DNA, 15 bp, Homo sapiens
tgaagggagacagct

SEQ ID NO: 1219181 - DNA, 15 bp, Homo sapiens
gtgaagggagacagc

SEQ ID NO: 1219182 - DNA, 15 bp, Homo sapiens
agtgaagggagacag

SEQ ID NO: 1219183 - DNA, 15 bp, Homo sapiens
aagtgaagggagaca

SEQ ID NO: 1219184 - DNA, 15 bp, Homo sapiens
aaagtgaagggagac

SEQ ID NO: 1219185 - DNA, 15 bp, Homo sapiens
gaaagtgaagggaga

SEQ ID NO: 1219186 - DNA, 15 bp, Homo sapiens
tgaaagtgaagggag

SEQ ID NO: 1219187 - DNA, 15 bp, Homo sapiens
ttgaaagtgaaggga

SEQ ID NO: 1219188 - DNA, 15 bp, Homo sapiens
tttgaaagtgaaggg

SEQ ID NO: 1219189 - DNA, 15 bp, Homo sapiens
gtttgaaagtgaagg

SEQ ID NO: 1219190 - DNA, 15 bp, Homo sapiens
ggtttgaaagtgaag

SEQ ID NO: 1219191 - DNA, 15 bp, Homo sapiens
gggtttgaaagtgaa

SEQ ID NO: 1219192 - DNA, 15 bp, Homo sapiens
tgggtttgaaagtga

SEQ ID NO: 1219193 - DNA, 15 bp, Homo sapiens
ctgggtttgaaagtg

SEQ ID NO: 1219194 - DNA, 15 bp, Homo sapiens
gctgggtttgaaagt

SEQ ID NO: 1219195 - DNA, 15 bp, Homo sapiens
ggctgggtttgaaag

SEQ ID NO: 1219196 - DNA, 15 bp, Homo sapiens
cggctgggtttgaaa

SEQ ID NO: 1219197 - DNA, 15 bp, Homo sapiens
ccggctgggtttgaa

SEQ ID NO: 1219198 - DNA, 15 bp, Homo sapiens
tccggctgggtttga

SEQ ID NO: 1219199 - DNA, 15 bp, Homo sapiens
ctccggctgggtttg

SEQ ID NO: 1219200 - DNA, 15 bp, Homo sapiens
cctccggctgggttt

SEQ ID NO: 1219201 - DNA, 15 bp, Homo sapiens
tcctccggctgggtt

SEQ ID NO: 1219202 - DNA, 15 bp, Homo sapiens
ctcctccggctgggt

SEQ ID NO: 1219203 - DNA, 15 bp, Homo sapiens
gctcctccggctggg

SEQ ID NO: 1219204 - DNA, 15 bp, Homo sapiens
cgctcctccggctgg

SEQ ID NO: 1219205 - DNA, 15 bp, Homo sapiens
ccgctcctccggctg

SEQ ID NO: 1219206 - DNA, 15 bp, Homo sapiens
cccgctcctccggct

SEQ ID NO: 1219207 - DNA, 15 bp, Homo sapiens
gcccgctcctccggc

SEQ ID NO: 1219208 - DNA, 15 bp, Homo sapiens
cgcccgctcctccgg

SEQ ID NO: 1219209 - DNA, 15 bp, Homo sapiens
gcgcccgctcctccg

SEQ ID NO: 1219210 - DNA, 15 bp, Homo sapiens
ggcgcccgctcctcc

SEQ ID NO: 1219211 - DNA, 15 bp, Homo sapiens
aggcgcccgctcctc

SEQ ID NO: 1219212 - DNA, 15 bp, Homo sapiens
aaggcgcccgctcct

SEQ ID NO: 1219213 - DNA, 15 bp, Homo sapiens
aaaggcgcccgctcc

SEQ ID NO: 1219214 - DNA, 15 bp, Homo sapiens
taaaggcgcccgctc

SEQ ID NO: 1219215 - DNA, 15 bp, Homo sapiens
ataaaggcgcccgct

SEQ ID NO: 1219216 - DNA, 15 bp, Homo sapiens
gataaaggcgcccgc

SEQ ID NO: 1219217 - DNA, 15 bp, Homo sapiens
ggataaaggcgcccg

SEQ ID NO: 1219218 - DNA, 15 bp, Homo sapiens
aggataaaggcgccc

SEQ ID NO: 1219219 - DNA, 15 bp, Homo sapiens
aaggataaaggcgcc

SEQ ID NO: 1219220 - DNA, 15 bp, Homo sapiens
caaggataaaggcgc

SEQ ID NO: 1219221 - DNA, 15 bp, Homo sapiens
ccaaggataaaggcg

SEQ ID NO: 1219222 - DNA, 15 bp, Homo sapiens
cccaaggataaaggc

SEQ ID NO: 1219223 - DNA, 15 bp, Homo sapiens
ccccaaggataaagg

SEQ ID NO: 1219224 - DNA, 15 bp, Homo sapiens
accccaaggataaag

SEQ ID NO: 1219225 - DNA, 15 bp, Homo sapiens
gaccccaaggataaa

SEQ ID NO: 1219226 - DNA, 15 bp, Homo sapiens
tgaccccaaggataa

SEQ ID NO: 1219227 - DNA, 15 bp, Homo sapiens
gtgaccccaaggata

SEQ ID NO: 1219228 - DNA, 15 bp, Homo sapiens
tgtgaccccaaggat

SEQ ID NO: 1219229 - DNA, 15 bp, Homo sapiens
ttgtgaccccaagga

SEQ ID NO: 1219230 - DNA, 15 bp, Homo sapiens
attgtgaccccaagg

SEQ ID NO: 1219231 - DNA, 15 bp, Homo sapiens
cattgtgaccccaag

SEQ ID NO: 1219232 - DNA, 15 bp, Homo sapiens
acattgtgaccccaa

SEQ ID NO: 1219233 - DNA, 15 bp, Homo sapiens
cacattgtgacccca

SEQ ID NO: 1219234 - DNA, 15 bp, Homo sapiens
acacattgtgacccc

SEQ ID NO: 1219235 - DNA, 15 bp, Homo sapiens
gacacattgtgaccc

SEQ ID NO: 1219236 - DNA, 15 bp, Homo sapiens
ggacacattgtgacc

SEQ ID NO: 1219237 - DNA, 15 bp, Homo sapiens
tggacacattgtgac

SEQ ID NO: 1219238 - DNA, 15 bp, Homo sapiens
ctggacacattgtga

SEQ ID NO: 1219239 - DNA, 15 bp, Homo sapiens
gctggacacattgtg

SEQ ID NO: 1219240 - DNA, 15 bp, Homo sapiens
ggctggacacattgt

SEQ ID NO: 1219241 - DNA, 15 bp, Homo sapiens
gggctggacacattg

SEQ ID NO: 1219242 - DNA, 15 bp, Homo sapiens
agggctggacacatt

SEQ ID NO: 1219243 - DNA, 15 bp, Homo sapiens
cagggctggacacat

SEQ ID NO: 1219244 - DNA, 15 bp, Homo sapiens
tcagggctggacaca

SEQ ID NO: 1219245 - DNA, 15 bp, Homo sapiens
ttcagggctggacac

SEQ ID NO: 1219246 - DNA, 15 bp, Homo sapiens
cttcagggctggaca

SEQ ID NO: 1219247 - DNA, 15 bp, Homo sapiens
ccttcagggctggac

SEQ ID NO: 1219248 - DNA, 15 bp, Homo sapiens
tccttcagggctgga

SEQ ID NO: 1219249 - DNA, 15 bp, Homo sapiens
ctccttcagggctgg

SEQ ID NO: 1219250 - DNA, 15 bp, Homo sapiens
cctccttcagggctg

SEQ ID NO: 1219251 - DNA, 15 bp, Homo sapiens
gcctccttcagggct

SEQ ID NO: 1219252 - DNA, 15 bp, Homo sapiens
ggcctccttcagggc

SEQ ID NO: 1219253 - DNA, 15 bp, Homo sapiens
gggcctccttcaggg

SEQ ID NO: 1219254 - DNA, 15 bp, Homo sapiens
ggggcctccttcagg

SEQ ID NO: 1219255 - DNA, 15 bp, Homo sapiens
aggggcctccttcag

SEQ ID NO: 1219256 - DNA, 15 bp, Homo sapiens
caggggcctccttca

SEQ ID NO: 1219257 - DNA, 15 bp, Homo sapiens
tcaggggcctccttc

SEQ ID NO: 1219258 - DNA, 15 bp, Homo sapiens
ctcaggggcctcctt

SEQ ID NO: 1219259 - DNA, 15 bp, Homo sapiens
cctcaggggcctcct

SEQ ID NO: 1219260 - DNA, 15 bp, Homo sapiens
acctcaggggcctcc

SEQ ID NO: 1219261 - DNA, 15 bp, Homo sapiens
cacctcaggggcctc

SEQ ID NO: 1219262 - DNA, 15 bp, Homo sapiens
ccacctcaggggcct

SEQ ID NO: 1219263 - DNA, 15 bp, Homo sapiens
gccacctcaggggcc

SEQ ID NO: 1219264 - DNA, 15 bp, Homo sapiens
ggccacctcaggggc

SEQ ID NO: 1219265 - DNA, 15 bp, Homo sapiens
aggccacctcagggg

SEQ ID NO: 1219266 - DNA, 15 bp, Homo sapiens
gaggccacctcaggg

SEQ ID NO: 1219267 - DNA, 15 bp, Homo sapiens
tgaggccacctcagg

SEQ ID NO: 1219268 - DNA, 15 bp, Homo sapiens
ttgaggccacctcag

SEQ ID NO: 1219269 - DNA, 15 bp, Homo sapiens
tttgaggccacctca

SEQ ID NO: 1219270 - DNA, 15 bp, Homo sapiens
ctttgaggccacctc

SEQ ID NO: 1219271 - DNA, 15 bp, Homo sapiens
gctttgaggccacct

SEQ ID NO: 1219272 - DNA, 15 bp, Homo sapiens
agctttgaggccacc

SEQ ID NO: 1219273 - DNA, 15 bp, Homo sapiens
gagctttgaggccac

SEQ ID NO: 1219274 - DNA, 15 bp, Homo sapiens
ggagctttgaggcca

SEQ ID NO: 1219275 - DNA, 15 bp, Homo sapiens
aggagctttgaggcc

SEQ ID NO: 1219276 - DNA, 15 bp, Homo sapiens
aaggagctttgaggc

SEQ ID NO: 1219277 - DNA, 15 bp, Homo sapiens
gaaggagctttgagg

SEQ ID NO: 1219278 - DNA, 15 bp, Homo sapiens
agaaggagctttgag

SEQ ID NO: 1219279 - DNA, 15 bp, Homo sapiens
cagaaggagctttga

SEQ ID NO: 1219280 - DNA, 15 bp, Homo sapiens
ccagaaggagctttg

SEQ ID NO: 1219281 - DNA, 15 bp, Homo sapiens
gccagaaggagcttt

SEQ ID NO: 1219282 - DNA, 15 bp, Homo sapiens
ggccagaaggagctt

SEQ ID NO: 1219283 - DNA, 15 bp, Homo sapiens
gggccagaaggagct

SEQ ID NO: 1219284 - DNA, 15 bp, Homo sapiens
tgggccagaaggagc

SEQ ID NO: 1219285 - DNA, 15 bp, Homo sapiens
gtgggccagaaggag

SEQ ID NO: 1219286 - DNA, 15 bp, Homo sapiens
tgtgggccagaagga

SEQ ID NO: 1219287 - DNA, 15 bp, Homo sapiens
ctgtgggccagaagg

SEQ ID NO: 1219288 - DNA, 15 bp, Homo sapiens
cctgtgggccagaag

SEQ ID NO: 1219289 - DNA, 15 bp, Homo sapiens
acctgtgggccagaa

SEQ ID NO: 1219290 - DNA, 15 bp, Homo sapiens
cacctgtgggccaga

SEQ ID NO: 1219291 - DNA, 15 bp, Homo sapiens
ccacctgtgggccag

SEQ ID NO: 1219292 - DNA, 15 bp, Homo sapiens
tccacctgtgggcca

SEQ ID NO: 1219293 - DNA, 15 bp, Homo sapiens
ctccacctgtgggcc

SEQ ID NO: 1219294 - DNA, 15 bp, Homo sapiens
cctccacctgtgggc

SEQ ID NO: 1219295 - DNA, 15 bp, Homo sapiens
tcctccacctgtggg

SEQ ID NO: 1219296 - DNA, 15 bp, Homo sapiens
gtcctccacctgtgg

SEQ ID NO: 1219297 - DNA, 15 bp, Homo sapiens
cgtcctccacctgtg

SEQ ID NO: 1219298 - DNA, 15 bp, Homo sapiens
acgtcctccacctgt

SEQ ID NO: 1219299 - DNA, 15 bp, Homo sapiens
cacgtcctccacctg

SEQ ID NO: 1219300 - DNA, 15 bp, Homo sapiens
tcacgtcctccacct

SEQ ID NO: 1219301 - DNA, 15 bp, Homo sapiens
atcacgtcctccacc

SEQ ID NO: 1219302 - DNA, 15 bp, Homo sapiens
gatcacgtcctccac

SEQ ID NO: 1219303 - DNA, 15 bp, Homo sapiens
cgatcacgtcctcca

SEQ ID NO: 1219304 - DNA, 15 bp, Homo sapiens
gcgatcacgtcctcc

SEQ ID NO: 1219305 - DNA, 15 bp, Homo sapiens
cgcgatcacgtcctc

SEQ ID NO: 1219306 - DNA, 15 bp, Homo sapiens
ccgcgatcacgtcct

SEQ ID NO: 1219307 - DNA, 15 bp, Homo sapiens
tccgcgatcacgtcc

SEQ ID NO: 1219308 - DNA, 15 bp, Homo sapiens
ctccgcgatcacgtc

SEQ ID NO: 1219309 - DNA, 15 bp, Homo sapiens
gctccgcgatcacgt

SEQ ID NO: 1219310 - DNA, 15 bp, Homo sapiens
agctccgcgatcacg

SEQ ID NO: 1219311 - DNA, 15 bp, Homo sapiens
cagctccgcgatcac

SEQ ID NO: 1219312 - DNA, 15 bp, Homo sapiens
gcagctccgcgatca

SEQ ID NO: 1219313 - DNA, 15 bp, Homo sapiens
cgcagctccgcgatc

SEQ ID NO: 1219314 - DNA, 15 bp, Homo sapiens
ccgcagctccgcgat

SEQ ID NO: 1219315 - DNA, 15 bp, Homo sapiens
gccgcagctccgcga

SEQ ID NO: 1219316 - DNA, 15 bp, Homo sapiens
agccgcagctccgcg

SEQ ID NO: 1219317 - DNA, 15 bp, Homo sapiens
aagccgcagctccgc

SEQ ID NO: 1219318 - DNA, 15 bp, Homo sapiens
taagccgcagctccg

SEQ ID NO: 1219319 - DNA, 15 bp, Homo sapiens
ctaagccgcagctcc

SEQ ID NO: 1219320 - DNA, 15 bp, Homo sapiens
cctaagccgcagctc

SEQ ID NO: 1219321 - DNA, 15 bp, Homo sapiens
gcctaagccgcagct

SEQ ID NO: 1219322 - DNA, 15 bp, Homo sapiens
tgcctaagccgcagc

SEQ ID NO: 1219323 - DNA, 15 bp, Homo sapiens
ctgcctaagccgcag

SEQ ID NO: 1219324 - DNA, 15 bp, Homo sapiens
actgcctaagccgca

SEQ ID NO: 1219325 - DNA, 15 bp, Homo sapiens
cactgcctaagccgc

SEQ ID NO: 1219326 - DNA, 15 bp, Homo sapiens
gcactgcctaagccg

SEQ ID NO: 1219327 - DNA, 15 bp, Homo sapiens
cgcactgcctaagcc

SEQ ID NO: 1219328 - DNA, 15 bp, Homo sapiens
gcgcactgcctaagc

SEQ ID NO: 1219329 - DNA, 15 bp, Homo sapiens
agcgcactgcctaag

SEQ ID NO: 1219330 - DNA, 15 bp, Homo sapiens
cagcgcactgcctaa

SEQ ID NO: 1219331 - DNA, 15 bp, Homo sapiens
tcagcgcactgccta

SEQ ID NO: 1219332 - DNA, 15 bp, Homo sapiens
gtcagcgcactgcct

SEQ ID NO: 1219333 - DNA, 15 bp, Homo sapiens
tgtcagcgcactgcc

SEQ ID NO: 1219334 - DNA, 15 bp, Homo sapiens
gtgtcagcgcactgc

SEQ ID NO: 1219335 - DNA, 15 bp, Homo sapiens
ggtgtcagcgcactg

SEQ ID NO: 1219336 - DNA, 15 bp, Homo sapiens
gggtgtcagcgcact

SEQ ID NO: 1219337 - DNA, 15 bp, Homo sapiens
cgggtgtcagcgcac

SEQ ID NO: 1219338 - DNA, 15 bp, Homo sapiens
gcgggtgtcagcgca

SEQ ID NO: 1219339 - DNA, 15 bp, Homo sapiens
cgcgggtgtcagcgc

SEQ ID NO: 1219340 - DNA, 15 bp, Homo sapiens
acgcgggtgtcagcg

SEQ ID NO: 1219341 - DNA, 15 bp, Homo sapiens
cacgcgggtgtcagc

SEQ ID NO: 1219342 - DNA, 15 bp, Homo sapiens
ccacgcgggtgtcag

SEQ ID NO: 1219343 - DNA, 15 bp, Homo sapiens
cccacgcgggtgtca

SEQ ID NO: 1219344 - DNA, 15 bp, Homo sapiens
gcccacgcgggtgtc

SEQ ID NO: 1219345 - DNA, 15 bp, Homo sapiens
tgcccacgcgggtgt

SEQ ID NO: 1219346 - DNA, 15 bp, Homo sapiens
ttgcccacgcgggtg

SEQ ID NO: 1219347 - DNA, 15 bp, Homo sapiens
gttgcccacgcgggt

SEQ ID NO: 1219348 - DNA, 15 bp, Homo sapiens
tgttgcccacgcggg

SEQ ID NO: 1219349 - DNA, 15 bp, Homo sapiens
atgttgcccacgcgg

SEQ ID NO: 1219350 - DNA, 15 bp, Homo sapiens
catgttgcccacgcg

SEQ ID NO: 1219351 - DNA, 15 bp, Homo sapiens
acatgttgcccacgc

SEQ ID NO: 1219352 - DNA, 15 bp, Homo sapiens
tacatgttgcccacg

SEQ ID NO: 1219353 - DNA, 15 bp, Homo sapiens
gtacatgttgcccac

SEQ ID NO: 1219354 - DNA, 15 bp, Homo sapiens
cgtacatgttgccca

SEQ ID NO: 1219355 - DNA, 15 bp, Homo sapiens
acgtacatgttgccc

SEQ ID NO: 1219356 - DNA, 15 bp, Homo sapiens
cacgtacatgttgcc

SEQ ID NO: 1219357 - DNA, 15 bp, Homo sapiens
gcacgtacatgttgc

SEQ ID NO: 1219358 - DNA, 15 bp, Homo sapiens
cgcacgtacatgttg

SEQ ID NO: 1219359 - DNA, 15 bp, Homo sapiens
ccgcacgtacatgtt

SEQ ID NO: 1219360 - DNA, 15 bp, Homo sapiens
cccgcacgtacatgt

SEQ ID NO: 1219361 - DNA, 15 bp, Homo sapiens
ccccgcacgtacatg

SEQ ID NO: 1219362 - DNA, 15 bp, Homo sapiens
cccccgcacgtacat

SEQ ID NO: 1219363 - DNA, 15 bp, Homo sapiens
acccccgcacgtaca

SEQ ID NO: 1219364 - DNA, 15 bp, Homo sapiens
aacccccgcacgtac

SEQ ID NO: 1219365 - DNA, 15 bp, Homo sapiens
caacccccgcacgta

SEQ ID NO: 1219366 - DNA, 15 bp, Homo sapiens
acaacccccgcacgt

SEQ ID NO: 1219367 - DNA, 15 bp, Homo sapiens
gacaacccccgcacg

SEQ ID NO: 1219368 - DNA, 15 bp, Homo sapiens
cgacaacccccgcac

SEQ ID NO: 1219369 - DNA, 15 bp, Homo sapiens
ccgacaacccccgca

SEQ ID NO: 1219370 - DNA, 15 bp, Homo sapiens
cccgacaacccccgc

SEQ ID NO: 1219371 - DNA, 15 bp, Homo sapiens
ccccgacaacccccg

SEQ ID NO: 1219372 - DNA, 15 bp, Homo sapiens
cccccgacaaccccc

SEQ ID NO: 1219373 - DNA, 15 bp, Homo sapiens
ccccccgacaacccc

SEQ ID NO: 1219374 - DNA, 15 bp, Homo sapiens
accccccgacaaccc

SEQ ID NO: 1219375 - DNA, 15 bp, Homo sapiens
caccccccgacaacc

SEQ ID NO: 1219376 - DNA, 15 bp, Homo sapiens
tcaccccccgacaac

SEQ ID NO: 1219377 - DNA, 15 bp, Homo sapiens
ctcaccccccgacaa

SEQ ID NO: 1219378 - DNA, 15 bp, Homo sapiens
gctcaccccccgaca

SEQ ID NO: 1219379 - DNA, 15 bp, Homo sapiens
cgctcaccccccgac

SEQ ID NO: 1219380 - DNA, 15 bp, Homo sapiens
gcgctcaccccccga

SEQ ID NO: 1219381 - DNA, 15 bp, Homo sapiens
tgcgctcaccccccg

SEQ ID NO: 1219382 - DNA, 15 bp, Homo sapiens
ctgcgctcacccccc

SEQ ID NO: 1219383 - DNA, 15 bp, Homo sapiens
cctgcgctcaccccc

SEQ ID NO: 1219384 - DNA, 15 bp, Homo sapiens
tcctgcgctcacccc

SEQ ID NO: 1219385 - DNA, 15 bp, Homo sapiens
ctcctgcgctcaccc

SEQ ID NO: 1219386 - DNA, 15 bp, Homo sapiens
tctcctgcgctcacc

SEQ ID NO: 1219387 - DNA, 15 bp, Homo sapiens
ctctcctgcgctcac

SEQ ID NO: 1219388 - DNA, 15 bp, Homo sapiens
actctcctgcgctca

SEQ ID NO: 1219389 - DNA, 15 bp, Homo sapiens
gactctcctgcgctc

SEQ ID NO: 1219390 - DNA, 15 bp, Homo sapiens
tgactctcctgcgct

SEQ ID NO: 1219391 - DNA, 15 bp, Homo sapiens
ctgactctcctgcgc

SEQ ID NO: 1219392 - DNA, 15 bp, Homo sapiens
gctgactctcctgcg

SEQ ID NO: 1219393 - DNA, 15 bp, Homo sapiens
tgctgactctcctgc

SEQ ID NO: 1219394 - DNA, 15 bp, Homo sapiens
atgctgactctcctg

SEQ ID NO: 1219395 - DNA, 15 bp, Homo sapiens
aatgctgactctcct

SEQ ID NO: 1219396 - DNA, 15 bp, Homo sapiens
caatgctgactctcc

SEQ ID NO: 1219397 - DNA, 15 bp, Homo sapiens
ccaatgctgactctc

SEQ ID NO: 1219398 - DNA, 15 bp, Homo sapiens
cccaatgctgactct

SEQ ID NO: 1219399 - DNA, 15 bp, Homo sapiens
ccccaatgctgactc

SEQ ID NO: 1219400 - DNA, 15 bp, Homo sapiens
accccaatgctgact

SEQ ID NO: 1219401 - DNA, 15 bp, Homo sapiens
caccccaatgctgac

SEQ ID NO: 1219402 - DNA, 15 bp, Homo sapiens
gcaccccaatgctga

SEQ ID NO: 1219403 - DNA, 15 bp, Homo sapiens
tgcaccccaatgctg

SEQ ID NO: 1219404 - DNA, 15 bp, Homo sapiens
ctgcaccccaatgct

SEQ ID NO: 1219405 - DNA, 15 bp, Homo sapiens
gctgcaccccaatgc

SEQ ID NO: 1219406 - DNA, 15 bp, Homo sapiens
agctgcaccccaatg

SEQ ID NO: 1219407 - DNA, 15 bp, Homo sapiens
gagctgcaccccaat

SEQ ID NO: 1219408 - DNA, 15 bp, Homo sapiens
ggagctgcaccccaa

SEQ ID NO: 1219409 - DNA, 15 bp, Homo sapiens
aggagctgcacccca

SEQ ID NO: 1219410 - DNA, 15 bp, Homo sapiens
caggagctgcacccc

SEQ ID NO: 1219411 - DNA, 15 bp, Homo sapiens
acaggagctgcaccc

SEQ ID NO: 1219412 - DNA, 15 bp, Homo sapiens
cacaggagctgcacc

SEQ ID NO: 1219413 - DNA, 15 bp, Homo sapiens
ccacaggagctgcac

SEQ ID NO: 1219414 - DNA, 15 bp, Homo sapiens
tccacaggagctgca

SEQ ID NO: 1219415 - DNA, 15 bp, Homo sapiens
ttccacaggagctgc

SEQ ID NO: 1219416 - DNA, 15 bp, Homo sapiens
gttccacaggagctg

SEQ ID NO: 1219417 - DNA, 15 bp, Homo sapiens
ggttccacaggagct

SEQ ID NO: 1219418 - DNA, 15 bp, Homo sapiens
gggttccacaggagc

SEQ ID NO: 1219419 - DNA, 15 bp, Homo sapiens
tgggttccacaggag

SEQ ID NO: 1219420 - DNA, 15 bp, Homo sapiens
ctgggttccacagga

SEQ ID NO: 1219421 - DNA, 15 bp, Homo sapiens
cctgggttccacagg

SEQ ID NO: 1219422 - DNA, 15 bp, Homo sapiens
acctgggttccacag

SEQ ID NO: 1219423 - DNA, 15 bp, Homo sapiens
cacctgggttccaca

SEQ ID NO: 1219424 - DNA, 15 bp, Homo sapiens
tcacctgggttccac

SEQ ID NO: 1219425 - DNA, 15 bp, Homo sapiens
ctcacctgggttcca

SEQ ID NO: 1219426 - DNA, 15 bp, Homo sapiens
cctcacctgggttcc

SEQ ID NO: 1219427 - DNA, 15 bp, Homo sapiens
ccctcacctgggttc

SEQ ID NO: 1219428 - DNA, 15 bp, Homo sapiens
gccctcacctgggtt

SEQ ID NO: 1219429 - DNA, 15 bp, Homo sapiens
ggccctcacctgggt

SEQ ID NO: 1219430 - DNA, 15 bp, Homo sapiens
aggccctcacctggg

SEQ ID NO: 1219431 - DNA, 15 bp, Homo sapiens
caggccctcacctgg

SEQ ID NO: 1219432 - DNA, 15 bp, Homo sapiens
ccaggccctcacctg

SEQ ID NO: 1219433 - DNA, 15 bp, Homo sapiens
cccaggccctcacct

SEQ ID NO: 1219434 - DNA, 15 bp, Homo sapiens
ccccaggccctcacc

SEQ ID NO: 1219435 - DNA, 15 bp, Homo sapiens
cccccaggccctcac

SEQ ID NO: 1219436 - DNA, 15 bp, Homo sapiens
ccccccaggccctca

SEQ ID NO: 1219437 - DNA, 15 bp, Homo sapiens
gccccccaggccctc

SEQ ID NO: 1219438 - DNA, 15 bp, Homo sapiens
tgccccccaggccct

SEQ ID NO: 1219439 - DNA, 15 bp, Homo sapiens
ctgccccccaggccc

SEQ ID NO: 1219440 - DNA, 15 bp, Homo sapiens
tctgccccccaggcc

SEQ ID NO: 1219441 - DNA, 15 bp, Homo sapiens
atctgccccccaggc

SEQ ID NO: 1219442 - DNA, 15 bp, Homo sapiens
catctgccccccagg

SEQ ID NO: 1219443 - DNA, 15 bp, Homo sapiens
ccatctgccccccag

SEQ ID NO: 1219444 - DNA, 15 bp, Homo sapiens
cccatctgcccccca

SEQ ID NO: 1219445 - DNA, 15 bp, Homo sapiens
ccccatctgcccccc

SEQ ID NO: 1219446 - DNA, 15 bp, Homo sapiens
cccccatctgccccc

SEQ ID NO: 1219447 - DNA, 15 bp, Homo sapiens
gcccccatctgcccc

SEQ ID NO: 1219448 - DNA, 15 bp, Homo sapiens
tgcccccatctgccc

SEQ ID NO: 1219449 - DNA, 15 bp, Homo sapiens
ctgcccccatctgcc

SEQ ID NO: 1219450 - DNA, 15 bp, Homo sapiens
tctgcccccatctgc

SEQ ID NO: 1219451 - DNA, 15 bp, Homo sapiens
ctctgcccccatctg

SEQ ID NO: 1219452 - DNA, 15 bp, Homo sapiens
cctctgcccccatct

SEQ ID NO: 1219453 - DNA, 15 bp, Homo sapiens
ccctctgcccccatc

SEQ ID NO: 1219454 - DNA, 15 bp, Homo sapiens
tccctctgcccccat

SEQ ID NO: 1219455 - DNA, 15 bp, Homo sapiens
gtccctctgccccca

SEQ ID NO: 1219456 - DNA, 15 bp, Homo sapiens
ggtccctctgccccc

SEQ ID NO: 1219457 - DNA, 15 bp, Homo sapiens
aggtccctctgcccc

SEQ ID NO: 1219458 - DNA, 15 bp, Homo sapiens
caggtccctctgccc

SEQ ID NO: 1219459 - DNA, 15 bp, Homo sapiens
acaggtccctctgcc

SEQ ID NO: 1219460 - DNA, 15 bp, Homo sapiens
cacaggtccctctgc

SEQ ID NO: 1219461 - DNA, 15 bp, Homo sapiens
gcacaggtccctctg

SEQ ID NO: 1219462 - DNA, 15 bp, Homo sapiens
cgcacaggtccctct

SEQ ID NO: 1219463 - DNA, 15 bp, Homo sapiens
ccgcacaggtccctc

SEQ ID NO: 1219464 - DNA, 15 bp, Homo sapiens
accgcacaggtccct

SEQ ID NO: 1219465 - DNA, 15 bp, Homo sapiens
gaccgcacaggtccc

SEQ ID NO: 1219466 - DNA, 15 bp, Homo sapiens
ggaccgcacaggtcc

SEQ ID NO: 1219467 - DNA, 15 bp, Homo sapiens
gggaccgcacaggtc

SEQ ID NO: 1219468 - DNA, 15 bp, Homo sapiens
ggggaccgcacaggt

SEQ ID NO: 1219469 - DNA, 15 bp, Homo sapiens
aggggaccgcacagg

SEQ ID NO: 1219470 - DNA, 15 bp, Homo sapiens
gaggggaccgcacag

SEQ ID NO: 1219471 - DNA, 15 bp, Homo sapiens
tgaggggaccgcaca

SEQ ID NO: 1219472 - DNA, 15 bp, Homo sapiens
ctgaggggaccgcac

SEQ ID NO: 1219473 - DNA, 15 bp, Homo sapiens
cctgaggggaccgca

SEQ ID NO: 1219474 - DNA, 15 bp, Homo sapiens
gcctgaggggaccgc

SEQ ID NO: 1219475 - DNA, 15 bp, Homo sapiens
agcctgaggggaccg

SEQ ID NO: 1219476 - DNA, 15 bp, Homo sapiens
aagcctgaggggacc

SEQ ID NO: 1219477 - DNA, 15 bp, Homo sapiens
caagcctgaggggac

SEQ ID NO: 1219478 - DNA, 15 bp, Homo sapiens
ccaagcctgagggga

SEQ ID NO: 1219479 - DNA, 15 bp, Homo sapiens
gccaagcctgagggg

SEQ ID NO: 1219480 - DNA, 15 bp, Homo sapiens
agccaagcctgaggg

SEQ ID NO: 1219481 - DNA, 15 bp, Homo sapiens
aagccaagcctgagg

SEQ ID NO: 1219482 - DNA, 15 bp, Homo sapiens
caagccaagcctgag

SEQ ID NO: 1219483 - DNA, 15 bp, Homo sapiens
ccaagccaagcctga

SEQ ID NO: 1219484 - DNA, 15 bp, Homo sapiens
accaagccaagcctg

SEQ ID NO: 1219485 - DNA, 15 bp, Homo sapiens
gaccaagccaagcct

SEQ ID NO: 1219486 - DNA, 15 bp, Homo sapiens
agaccaagccaagcc

SEQ ID NO: 1219487 - DNA, 15 bp, Homo sapiens
cagaccaagccaagc

SEQ ID NO: 1219488 - DNA, 15 bp, Homo sapiens
ccagaccaagccaag

SEQ ID NO: 1219489 - DNA, 15 bp, Homo sapiens
gccagaccaagccaa

SEQ ID NO: 1219490 - DNA, 15 bp, Homo sapiens
ggccagaccaagcca

SEQ ID NO: 1219491 - DNA, 15 bp, Homo sapiens
tggccagaccaagcc

SEQ ID NO: 1219492 - DNA, 15 bp, Homo sapiens
ctggccagaccaagc

SEQ ID NO: 1219493 - DNA, 15 bp, Homo sapiens
tctggccagaccaag

SEQ ID NO: 1219494 - DNA, 15 bp, Homo sapiens
ctctggccagaccaa

SEQ ID NO: 1219495 - DNA, 15 bp, Homo sapiens
gctctggccagacca

SEQ ID NO: 1219496 - DNA, 15 bp, Homo sapiens
ggctctggccagacc

SEQ ID NO: 1219497 - DNA, 15 bp, Homo sapiens
gggctctggccagac

SEQ ID NO: 1219498 - DNA, 15 bp, Homo sapiens
ggggctctggccaga

SEQ ID NO: 1219499 - DNA, 15 bp, Homo sapiens
tggggctctggccag

SEQ ID NO: 1219500 - DNA, 15 bp, Homo sapiens
gtggggctctggcca

SEQ ID NO: 1219501 - DNA, 15 bp, Homo sapiens
ggtggggctctggcc

SEQ ID NO: 1219502 - DNA, 15 bp, Homo sapiens
cggtggggctctggc

SEQ ID NO: 1219503 - DNA, 15 bp, Homo sapiens
tcggtggggctctgg

SEQ ID NO: 1219504 - DNA, 15 bp, Homo sapiens
gtcggtggggctctg

SEQ ID NO: 1219505 - DNA, 15 bp, Homo sapiens
agtcggtggggctct

SEQ ID NO: 1219506 - DNA, 15 bp, Homo sapiens
gagtcggtggggctc

SEQ ID NO: 1219507 - DNA, 15 bp, Homo sapiens
tgagtcggtggggct

SEQ ID NO: 1219508 - DNA, 15 bp, Homo sapiens
gtgagtcggtggggc

SEQ ID NO: 1219509 - DNA, 15 bp, Homo sapiens
ggtgagtcggtgggg

SEQ ID NO: 1219510 - DNA, 15 bp, Homo sapiens
tggtgagtcggtggg

SEQ ID NO: 1219511 - DNA, 15 bp, Homo sapiens
ctggtgagtcggtgg

SEQ ID NO: 1219512 - DNA, 15 bp, Homo sapiens
cctggtgagtcggtg

SEQ ID NO: 1219513 - DNA, 15 bp, Homo sapiens
gcctggtgagtcggt

SEQ ID NO: 1219514 - DNA, 15 bp, Homo sapiens
agcctggtgagtcgg

SEQ ID NO: 1219515 - DNA, 15 bp, Homo sapiens
gagcctggtgagtcg

SEQ ID NO: 1219516 - DNA, 15 bp, Homo sapiens
ggagcctggtgagtc

SEQ ID NO: 1219517 - DNA, 15 bp, Homo sapiens
aggagcctggtgagt

SEQ ID NO: 1219518 - DNA, 15 bp, Homo sapiens
gaggagcctggtgag

SEQ ID NO: 1219519 - DNA, 15 bp, Homo sapiens
agaggagcctggtga

SEQ ID NO: 1219520 - DNA, 15 bp, Homo sapiens
gagaggagcctggtg

SEQ ID NO: 1219521 - DNA, 15 bp, Homo sapiens
agagaggagcctggt

SEQ ID NO: 1219522 - DNA, 15 bp, Homo sapiens
cagagaggagcctgg

SEQ ID NO: 1219523 - DNA, 15 bp, Homo sapiens
acagagaggagcctg

SEQ ID NO: 1219524 - DNA, 15 bp, Homo sapiens
cacagagaggagcct

SEQ ID NO: 1219525 - DNA, 15 bp, Homo sapiens
acacagagaggagcc

SEQ ID NO: 1219526 - DNA, 15 bp, Homo sapiens
aacacagagaggagc

SEQ ID NO: 1219527 - DNA, 15 bp, Homo sapiens
caacacagagaggag

SEQ ID NO: 1219528 - DNA, 15 bp, Homo sapiens
ccaacacagagagga

SEQ ID NO: 1219529 - DNA, 15 bp, Homo sapiens
tccaacacagagagg

SEQ ID NO: 1219530 - DNA, 15 bp, Homo sapiens
ttccaacacagagag

SEQ ID NO: 1219531 - DNA, 15 bp, Homo sapiens
tttccaacacagaga

SEQ ID NO: 1219532 - DNA, 15 bp, Homo sapiens
ctttccaacacagag

SEQ ID NO: 1219533 - DNA, 15 bp, Homo sapiens
cctttccaacacaga

SEQ ID NO: 1219534 - DNA, 15 bp, Homo sapiens
tcctttccaacacag

SEQ ID NO: 1219535 - DNA, 15 bp, Homo sapiens
ttcctttccaacaca

SEQ ID NO: 1219536 - DNA, 15 bp, Homo sapiens
attcctttccaacac

SEQ ID NO: 1219537 - DNA, 15 bp, Homo sapiens
gattcctttccaaca

SEQ ID NO: 1219538 - DNA, 15 bp, Homo sapiens
ggattcctttccaac

SEQ ID NO: 1219539 - DNA, 15 bp, Homo sapiens
aggattcctttccaa

SEQ ID NO: 1219540 - DNA, 15 bp, Homo sapiens
aaggattcctttcca

SEQ ID NO: 1219541 - DNA, 15 bp, Homo sapiens
taaggattcctttcc

SEQ ID NO: 1219542 - DNA, 15 bp, Homo sapiens
ataaggattcctttc

SEQ ID NO: 1219543 - DNA, 15 bp, Homo sapiens
aataaggattccttt

SEQ ID NO: 1219544 - DNA, 15 bp, Homo sapiens
gaataaggattcctt

SEQ ID NO: 1219545 - DNA, 15 bp, Homo sapiens
agaataaggattcct

SEQ ID NO: 1219546 - DNA, 15 bp, Homo sapiens
gagaataaggattcc

SEQ ID NO: 1219547 - DNA, 15 bp, Homo sapiens
cgagaataaggattc

SEQ ID NO: 1219548 - DNA, 15 bp, Homo sapiens
tcgagaataaggatt

SEQ ID NO: 1219549 - DNA, 15 bp, Homo sapiens
gtcgagaataaggat

SEQ ID NO: 1219550 - DNA, 15 bp, Homo sapiens
cgtcgagaataagga

SEQ ID NO: 1219551 - DNA, 15 bp, Homo sapiens
tcgtcgagaataagg

SEQ ID NO: 1219552 - DNA, 15 bp, Homo sapiens
ttcgtcgagaataag

SEQ ID NO: 1219553 - DNA, 15 bp, Homo sapiens
gttcgtcgagaataa

SEQ ID NO: 1219554 - DNA, 15 bp, Homo sapiens
ggttcgtcgagaata

SEQ ID NO: 1219555 - DNA, 15 bp, Homo sapiens
gggttcgtcgagaat

SEQ ID NO: 1219556 - DNA, 15 bp, Homo sapiens
tgggttcgtcgagaa

SEQ ID NO: 1219557 - DNA, 15 bp, Homo sapiens
gtgggttcgtcgaga

SEQ ID NO: 1219558 - DNA, 15 bp, Homo sapiens
ggtgggttcgtcgag

SEQ ID NO: 1219559 - DNA, 15 bp, Homo sapiens
aggtgggttcgtcga

SEQ ID NO: 1219560 - DNA, 15 bp, Homo sapiens
gaggtgggttcgtcg

SEQ ID NO: 1219561 - DNA, 15 bp, Homo sapiens
gcccagaggtgggtt

SEQ ID NO: 1219562 - DNA, 15 bp, Homo sapiens
agcccagaggtgggt

SEQ ID NO: 1219563 - DNA, 15 bp, Homo sapiens
gagcccagaggtggg

SEQ ID NO: 1219564 - DNA, 15 bp, Homo sapiens
cgagcccagaggtgg

SEQ ID NO: 1219565 - DNA, 15 bp, Homo sapiens
tcgagcccagaggtg

SEQ ID NO: 1219566 - DNA, 15 bp, Homo sapiens
gtcgagcccagaggt

SEQ ID NO: 1219567 - DNA, 15 bp, Homo sapiens
tgtcgagcccagagg

SEQ ID NO: 1219568 - DNA, 15 bp, Homo sapiens
ctgtcgagcccagag

SEQ ID NO: 1219569 - DNA, 15 bp, Homo sapiens
gctgtcgagcccaga

SEQ ID NO: 1219570 - DNA, 15 bp, Homo sapiens
agctgtcgagcccag

SEQ ID NO: 1219571 - DNA, 15 bp, Homo sapiens
aagctgtcgagccca

SEQ ID NO: 1219572 - DNA, 15 bp, Homo sapiens
gaagctgtcgagccc

SEQ ID NO: 1219573 - DNA, 15 bp, Homo sapiens
tgaagctgtcgagcc

SEQ ID NO: 1219574 - DNA, 15 bp, Homo sapiens
gtgaagctgtcgagc

SEQ ID NO: 1219575 - DNA, 15 bp, Homo sapiens
tgtgaagctgtcgag

SEQ ID NO: 1219576 - DNA, 15 bp, Homo sapiens
ctgtgaagctgtcga

SEQ ID NO: 1219577 - DNA, 15 bp, Homo sapiens
gctgtgaagctgtcg

SEQ ID NO: 1219578 - DNA, 15 bp, Homo sapiens
ggctgtgaagctgtc

SEQ ID NO: 1219579 - DNA, 15 bp, Homo sapiens
gggctgtgaagctgt

SEQ ID NO: 1219580 - DNA, 15 bp, Homo sapiens
tgggctgtgaagctg

SEQ ID NO: 1219581 - DNA, 15 bp, Homo sapiens
gtgggctgtgaagct

SEQ ID NO: 1219582 - DNA, 15 bp, Homo sapiens
tgtgggctgtgaagc

SEQ ID NO: 1219583 - DNA, 15 bp, Homo sapiens
ttgtgggctgtgaag

SEQ ID NO: 1219584 - DNA, 15 bp, Homo sapiens
gttgtgggctgtgaa

SEQ ID NO: 1219585 - DNA, 15 bp, Homo sapiens
ggttgtgggctgtga

SEQ ID NO: 1219586 - DNA, 15 bp, Homo sapiens
aggttgtgggctgtg

SEQ ID NO: 1219587 - DNA, 15 bp, Homo sapiens
caggttgtgggctgt

SEQ ID NO: 1219588 - DNA, 15 bp, Homo sapiens
ccaggttgtgggctg

SEQ ID NO: 1219589 - DNA, 15 bp, Homo sapiens
accaggttgtgggct

SEQ ID NO: 1219590 - DNA, 15 bp, Homo sapiens
caccaggttgtgggc

SEQ ID NO: 1219591 - DNA, 15 bp, Homo sapiens
tcaccaggttgtggg

SEQ ID NO: 1219592 - DNA, 15 bp, Homo sapiens
ttcaccaggttgtgg

SEQ ID NO: 1219593 - DNA, 15 bp, Homo sapiens
cttcaccaggttgtg

SEQ ID NO: 1219594 - DNA, 15 bp, Homo sapiens
tcttcaccaggttgt

SEQ ID NO: 1219595 - DNA, 15 bp, Homo sapiens
gtcttcaccaggttg

SEQ ID NO: 1219596 - DNA, 15 bp, Homo sapiens
ggtcttcaccaggtt

SEQ ID NO: 1219597 - DNA, 15 bp, Homo sapiens
aggtcttcaccaggt

SEQ ID NO: 1219598 - DNA, 15 bp, Homo sapiens
aaggtcttcaccagg

SEQ ID NO: 1219599 - DNA, 15 bp, Homo sapiens
caaggtcttcaccag

SEQ ID NO: 1219600 - DNA, 15 bp, Homo sapiens
acaaggtcttcacca

SEQ ID NO: 1219601 - DNA, 15 bp, Homo sapiens
gacaaggtcttcacc

SEQ ID NO: 1219602 - DNA, 15 bp, Homo sapiens
ggacaaggtcttcac

SEQ ID NO: 1219603 - DNA, 15 bp, Homo sapiens
tggacaaggtcttca

SEQ ID NO: 1219604 - DNA, 15 bp, Homo sapiens
ctggacaaggtcttc

SEQ ID NO: 1219605 - DNA, 15 bp, Homo sapiens
cctggacaaggtctt

SEQ ID NO: 1219606 - DNA, 15 bp, Homo sapiens
gcctggacaaggtct

SEQ ID NO: 1219607 - DNA, 15 bp, Homo sapiens
agcctggacaaggtc

SEQ ID NO: 1219608 - DNA, 15 bp, Homo sapiens
cagcctggacaaggt

SEQ ID NO: 1219609 - DNA, 15 bp, Homo sapiens
ccagcctggacaagg

SEQ ID NO: 1219610 - DNA, 15 bp, Homo sapiens
gccagcctggacaag

SEQ ID NO: 1219611 - DNA, 15 bp, Homo sapiens
ggccagcctggacaa

SEQ ID NO: 1219612 - DNA, 15 bp, Homo sapiens
tggccagcctggaca

SEQ ID NO: 1219613 - DNA, 15 bp, Homo sapiens
ttggccagcctggac

SEQ ID NO: 1219614 - DNA, 15 bp, Homo sapiens
tttggccagcctgga

SEQ ID NO: 1219615 - DNA, 15 bp, Homo sapiens
ctttggccagcctgg

SEQ ID NO: 1219616 - DNA, 15 bp, Homo sapiens
cctttggccagcctg

SEQ ID NO: 1219617 - DNA, 15 bp, Homo sapiens
gcctttggccagcct

SEQ ID NO: 1219618 - DNA, 15 bp, Homo sapiens
tgcctttggccagcc

SEQ ID NO: 1219619 - DNA, 15 bp, Homo sapiens
ttgcctttggccagc

SEQ ID NO: 1219620 - DNA, 15 bp, Homo sapiens
gttgcctttggccag

SEQ ID NO: 1219621 - DNA, 15 bp, Homo sapiens
ggttgcctttggcca

SEQ ID NO: 1219622 - DNA, 15 bp, Homo sapiens
cggttgcctttggcc

SEQ ID NO: 1219623 - DNA, 15 bp, Homo sapiens
ccggttgcctttggc

SEQ ID NO: 1219624 - DNA, 15 bp, Homo sapiens
gccggttgcctttgg

SEQ ID NO: 1219625 - DNA, 15 bp, Homo sapiens
agccggttgcctttg

SEQ ID NO: 1219626 - DNA, 15 bp, Homo sapiens
cagccggttgccttt

SEQ ID NO: 1219627 - DNA, 15 bp, Homo sapiens
ccagccggttgcctt

SEQ ID NO: 1219628 - DNA, 15 bp, Homo sapiens
accagccggttgcct

SEQ ID NO: 1219629 - DNA, 15 bp, Homo sapiens
caccagccggttgcc

SEQ ID NO: 1219630 - DNA, 15 bp, Homo sapiens
gcaccagccggttgc

SEQ ID NO: 1219631 - DNA, 15 bp, Homo sapiens
agcaccagccggttg

SEQ ID NO: 1219632 - DNA, 15 bp, Homo sapiens
gagcaccagccggtt

SEQ ID NO: 1219633 - DNA, 15 bp, Homo sapiens
tgagcaccagccggt

SEQ ID NO: 1219634 - DNA, 15 bp, Homo sapiens
atgagcaccagccgg

SEQ ID NO: 1219635 - DNA, 15 bp, Homo sapiens
gatgagcaccagccg

SEQ ID NO: 1219636 - DNA, 15 bp, Homo sapiens
agatgagcaccagcc

SEQ ID NO: 1219637 - DNA, 15 bp, Homo sapiens
gagatgagcaccagc

SEQ ID NO: 1219638 - DNA, 15 bp, Homo sapiens
ggagatgagcaccag

SEQ ID NO: 1219639 - DNA, 15 bp, Homo sapiens
gggagatgagcacca

SEQ ID NO: 1219640 - DNA, 15 bp, Homo sapiens
agggagatgagcacc

SEQ ID NO: 1219641 - DNA, 15 bp, Homo sapiens
gagggagatgagcac

SEQ ID NO: 1219642 - DNA, 15 bp, Homo sapiens
ggagggagatgagca

SEQ ID NO: 1219643 - DNA, 15 bp, Homo sapiens
tggagggagatgagc

SEQ ID NO: 1219644 - DNA, 15 bp, Homo sapiens
gtggagggagatgag

SEQ ID NO: 1219645 - DNA, 15 bp, Homo sapiens
ggtggagggagatga

SEQ ID NO: 1219646 - DNA, 15 bp, Homo sapiens
tggtggagggagatg

SEQ ID NO: 1219647 - DNA, 15 bp, Homo sapiens
ctggtggagggagat

SEQ ID NO: 1219648 - DNA, 15 bp, Homo sapiens
gctggtggagggaga

SEQ ID NO: 1219649 - DNA, 15 bp, Homo sapiens
ggctggtggagggag

SEQ ID NO: 1219650 - DNA, 15 bp, Homo sapiens
aggctggtggaggga

SEQ ID NO: 1219651 - DNA, 15 bp, Homo sapiens
gaggctggtggaggg

SEQ ID NO: 1219652 - DNA, 15 bp, Homo sapiens
cgaggctggtggagg

SEQ ID NO: 1219653 - DNA, 15 bp, Homo sapiens
gcgaggctggtggag

SEQ ID NO: 1219654 - DNA, 15 bp, Homo sapiens
agcgaggctggtgga

SEQ ID NO: 1219655 - DNA, 15 bp, Homo sapiens
gagcgaggctggtgg

SEQ ID NO: 1219656 - DNA, 15 bp, Homo sapiens
agagcgaggctggtg

SEQ ID NO: 1219657 - DNA, 15 bp, Homo sapiens
cagagcgaggctggt

SEQ ID NO: 1219658 - DNA, 15 bp, Homo sapiens
tcagagcgaggctgg

SEQ ID NO: 1219659 - DNA, 15 bp, Homo sapiens
gtcagagcgaggctg

SEQ ID NO: 1219660 - DNA, 15 bp, Homo sapiens
tgtcagagcgaggct

SEQ ID NO: 1219661 - DNA, 15 bp, Homo sapiens
atgtcagagcgaggc

SEQ ID NO: 1219662 - DNA, 15 bp, Homo sapiens
gatgtcagagcgagg

SEQ ID NO: 1219663 - DNA, 15 bp, Homo sapiens
agatgtcagagcgag

SEQ ID NO: 1219664 - DNA, 15 bp, Homo sapiens
aagatgtcagagcga

SEQ ID NO: 1219665 - DNA, 15 bp, Homo sapiens
gaagatgtcagagcg

SEQ ID NO: 1219666 - DNA, 15 bp, Homo sapiens
tgaagatgtcagagc

SEQ ID NO: 1219667 - DNA, 15 bp, Homo sapiens
ctgaagatgtcagag

SEQ ID NO: 1219668 - DNA, 15 bp, Homo sapiens
cctgaagatgtcaga

SEQ ID NO: 1219669 - DNA, 15 bp, Homo sapiens
gcctgaagatgtcag

SEQ ID NO: 1219670 - DNA, 15 bp, Homo sapiens
agcctgaagatgtca

SEQ ID NO: 1219671 - DNA, 15 bp, Homo sapiens
cagcctgaagatgtc

SEQ ID NO: 1219672 - DNA, 15 bp, Homo sapiens
acagcctgaagatgt

SEQ ID NO: 1219673 - DNA, 15 bp, Homo sapiens
aacagcctgaagatg

SEQ ID NO: 1219674 - DNA, 15 bp, Homo sapiens
aaacagcctgaagat

SEQ ID NO: 1219675 - DNA, 15 bp, Homo sapiens
caaacagcctgaaga

SEQ ID NO: 1219676 - DNA, 15 bp, Homo sapiens
tcaaacagcctgaag

SEQ ID NO: 1219677 - DNA, 15 bp, Homo sapiens
atcaaacagcctgaa

SEQ ID NO: 1219678 - DNA, 15 bp, Homo sapiens
gatcaaacagcctga

SEQ ID NO: 1219679 - DNA, 15 bp, Homo sapiens
agatcaaacagcctg

SEQ ID NO: 1219680 - DNA, 15 bp, Homo sapiens
cagatcaaacagcct

SEQ ID NO: 1219681 - DNA, 15 bp, Homo sapiens
ccagatcaaacagcc

SEQ ID NO: 1219682 - DNA, 15 bp, Homo sapiens
accagatcaaacagc

SEQ ID NO: 1219683 - DNA, 15 bp, Homo sapiens
gaccagatcaaacag

SEQ ID NO: 1219684 - DNA, 15 bp, Homo sapiens
ggaccagatcaaaca

SEQ ID NO: 1219685 - DNA, 15 bp, Homo sapiens
aggaccagatcaaac

SEQ ID NO: 1219686 - DNA, 15 bp, Homo sapiens
gaggaccagatcaaa

SEQ ID NO: 1219687 - DNA, 15 bp, Homo sapiens
ggaggaccagatcaa

SEQ ID NO: 1219688 - DNA, 15 bp, Homo sapiens
aggaggaccagatca

SEQ ID NO: 1219689 - DNA, 15 bp, Homo sapiens
caggaggaccagatc

SEQ ID NO: 1219690 - DNA, 15 bp, Homo sapiens
tcaggaggaccagat

SEQ ID NO: 1219691 - DNA, 15 bp, Homo sapiens
atcaggaggaccaga

SEQ ID NO: 1219692 - DNA, 15 bp, Homo sapiens
catcaggaggaccag

SEQ ID NO: 1219693 - DNA, 15 bp, Homo sapiens
tcatcaggaggacca

SEQ ID NO: 1219694 - DNA, 15 bp, Homo sapiens
gtcatcaggaggacc

SEQ ID NO: 1219695 - DNA, 15 bp, Homo sapiens
cgtcatcaggaggac

SEQ ID NO: 1219696 - DNA, 15 bp, Homo sapiens
acgtcatcaggagga

SEQ ID NO: 1219697 - DNA, 15 bp, Homo sapiens
gacgtcatcaggagg

SEQ ID NO: 1219698 - DNA, 15 bp, Homo sapiens
agacgtcatcaggag

SEQ ID NO: 1219699 - DNA, 15 bp, Homo sapiens
cagacgtcatcagga

SEQ ID NO: 1219700 - DNA, 15 bp, Homo sapiens
ccagacgtcatcagg

SEQ ID NO: 1219701 - DNA, 15 bp, Homo sapiens
gccagacgtcatcag

SEQ ID NO: 1219702 - DNA, 15 bp, Homo sapiens
tgccagacgtcatca

SEQ ID NO: 1219703 - DNA, 15 bp, Homo sapiens
gtgccagacgtcatc

SEQ ID NO: 1219704 - DNA, 15 bp, Homo sapiens
ggtgccagacgtcat

SEQ ID NO: 1219705 - DNA, 15 bp, Homo sapiens
gggtgccagacgtca

SEQ ID NO: 1219706 - DNA, 15 bp, Homo sapiens
ggggtgccagacgtc

SEQ ID NO: 1219707 - DNA, 15 bp, Homo sapiens
gggggtgccagacgt

SEQ ID NO: 1219708 - DNA, 15 bp, Homo sapiens
tgggggtgccagacg

SEQ ID NO: 1219709 - DNA, 15 bp, Homo sapiens
atgggggtgccagac

SEQ ID NO: 1219710 - DNA, 15 bp, Homo sapiens
gatgggggtgccaga

SEQ ID NO: 1219711 - DNA, 15 bp, Homo sapiens
agatgggggtgccag

SEQ ID NO: 1219712 - DNA, 15 bp, Homo sapiens
tagatgggggtgcca

SEQ ID NO: 1219713 - DNA, 15 bp, Homo sapiens
gtagatgggggtgcc

SEQ ID NO: 1219714 - DNA, 15 bp, Homo sapiens
agtagatgggggtgc

SEQ ID NO: 1219715 - DNA, 15 bp, Homo sapiens
aagtagatgggggtg

SEQ ID NO: 1219716 - DNA, 15 bp, Homo sapiens
taagtagatgggggt

SEQ ID NO: 1219717 - DNA, 15 bp, Homo sapiens
ctaagtagatggggg

SEQ ID NO: 1219718 - DNA, 15 bp, Homo sapiens
cctaagtagatgggg

SEQ ID NO: 1219719 - DNA, 15 bp, Homo sapiens
ccctaagtagatggg

SEQ ID NO: 1219720 - DNA, 15 bp, Homo sapiens
cccctaagtagatgg

SEQ ID NO: 1219721 - DNA, 15 bp, Homo sapiens
gcccctaagtagatg

SEQ ID NO: 1219722 - DNA, 15 bp, Homo sapiens
cgcccctaagtagat

SEQ ID NO: 1219723 - DNA, 15 bp, Homo sapiens
ccgcccctaagtaga

SEQ ID NO: 1219724 - DNA, 15 bp, Homo sapiens
gccgcccctaagtag

SEQ ID NO: 1219725 - DNA, 15 bp, Homo sapiens
ggccgcccctaagta

SEQ ID NO: 1219726 - DNA, 15 bp, Homo sapiens
gggccgcccctaagt

SEQ ID NO: 1219727 - DNA, 15 bp, Homo sapiens
tgggccgcccctaag

SEQ ID NO: 1219728 - DNA, 15 bp, Homo sapiens
ctgggccgcccctaa

SEQ ID NO: 1219729 - DNA, 15 bp, Homo sapiens
gctgggccgccccta

SEQ ID NO: 1219730 - DNA, 15 bp, Homo sapiens
tgctgggccgcccct

SEQ ID NO: 1219731 - DNA, 15 bp, Homo sapiens
gtgctgggccgcccc

SEQ ID NO: 1219732 - DNA, 15 bp, Homo sapiens
tgtgctgggccgccc

SEQ ID NO: 1219733 - DNA, 15 bp, Homo sapiens
atgtgctgggccgcc

SEQ ID NO: 1219734 - DNA, 15 bp, Homo sapiens
catgtgctgggccgc

SEQ ID NO: 1219735 - DNA, 15 bp, Homo sapiens
ccatgtgctgggccg

SEQ ID NO: 1219736 - DNA, 15 bp, Homo sapiens
accatgtgctgggcc

SEQ ID NO: 1219737 - DNA, 15 bp, Homo sapiens
gaccatgtgctgggc

SEQ ID NO: 1219738 - DNA, 15 bp, Homo sapiens
ggaccatgtgctggg

SEQ ID NO: 1219739 - DNA, 15 bp, Homo sapiens
tggaccatgtgctgg

SEQ ID NO: 1219740 - DNA, 15 bp, Homo sapiens
ctggaccatgtgctg

SEQ ID NO: 1219741 - DNA, 15 bp, Homo sapiens
actggaccatgtgct

SEQ ID NO: 1219742 - DNA, 15 bp, Homo sapiens
tactggaccatgtgc

SEQ ID NO: 1219743 - DNA, 15 bp, Homo sapiens
atactggaccatgtg

SEQ ID NO: 1219744 - DNA, 15 bp, Homo sapiens
aatactggaccatgt

SEQ ID NO: 1219745 - DNA, 15 bp, Homo sapiens
aaatactggaccatg

SEQ ID NO: 1219746 - DNA, 15 bp, Homo sapiens
gaaatactggaccat

SEQ ID NO: 1219747 - DNA, 15 bp, Homo sapiens
tgaaatactggacca

SEQ ID NO: 1219748 - DNA, 15 bp, Homo sapiens
gtgaaatactggacc

SEQ ID NO: 1219749 - DNA, 15 bp, Homo sapiens
tgtgaaatactggac

SEQ ID NO: 1219750 - DNA, 15 bp, Homo sapiens
ctgtgaaatactgga

SEQ ID NO: 1219751 - DNA, 15 bp, Homo sapiens
gctgtgaaatactgg

SEQ ID NO: 1219752 - DNA, 15 bp, Homo sapiens
ggctgtgaaatactg

SEQ ID NO: 1219753 - DNA, 15 bp, Homo sapiens
tggctgtgaaatact

SEQ ID NO: 1219754 - DNA, 15 bp, Homo sapiens
atggctgtgaaatac

SEQ ID NO: 1219755 - DNA, 15 bp, Homo sapiens
gatggctgtgaaata

SEQ ID NO: 1219756 - DNA, 15 bp, Homo sapiens
cgatggctgtgaaat

SEQ ID NO: 1219757 - DNA, 15 bp, Homo sapiens
ccgatggctgtgaaa

SEQ ID NO: 1219758 - DNA, 15 bp, Homo sapiens
gccgatggctgtgaa

SEQ ID NO: 1219759 - DNA, 15 bp, Homo sapiens
agccgatggctgtga

SEQ ID NO: 1219760 - DNA, 15 bp, Homo sapiens
tagccgatggctgtg

SEQ ID NO: 1219761 - DNA, 15 bp, Homo sapiens
gtagccgatggctgt

SEQ ID NO: 1219762 - DNA, 15 bp, Homo sapiens
ggtagccgatggctg

SEQ ID NO: 1219763 - DNA, 15 bp, Homo sapiens
gggtagccgatggct

SEQ ID NO: 1219764 - DNA, 15 bp, Homo sapiens
ggggtagccgatggc

SEQ ID NO: 1219765 - DNA, 15 bp, Homo sapiens
aggggtagccgatgg

SEQ ID NO: 1219766 - DNA, 15 bp, Homo sapiens
caggggtagccgatg

SEQ ID NO: 1219767 - DNA, 15 bp, Homo sapiens
acaggggtagccgat

SEQ ID NO: 1219768 - DNA, 15 bp, Homo sapiens
gacaggggtagccga

SEQ ID NO: 1219769 - DNA, 15 bp, Homo sapiens
ggacaggggtagccg

SEQ ID NO: 1219770 - DNA, 15 bp, Homo sapiens
aggacaggggtagcc

SEQ ID NO: 1219771 - DNA, 15 bp, Homo sapiens
gaggacaggggtagc

SEQ ID NO: 1219772 - DNA, 15 bp, Homo sapiens
cgaggacaggggtag

SEQ ID NO: 1219773 - DNA, 15 bp, Homo sapiens
gcgaggacaggggta

SEQ ID NO: 1219774 - DNA, 15 bp, Homo sapiens
agcgaggacaggggt

SEQ ID NO: 1219775 - DNA, 15 bp, Homo sapiens
tagcgaggacagggg

SEQ ID NO: 1219776 - DNA, 15 bp, Homo sapiens
gtagcgaggacaggg

SEQ ID NO: 1219777 - DNA, 15 bp, Homo sapiens
tgtagcgaggacagg

SEQ ID NO: 1219778 - DNA, 15 bp, Homo sapiens
ctgtagcgaggacag

SEQ ID NO: 1219779 - DNA, 15 bp, Homo sapiens
gctgtagcgaggaca

SEQ ID NO: 1219780 - DNA, 15 bp, Homo sapiens
tgctgtagcgaggac

SEQ ID NO: 1219781 - DNA, 15 bp, Homo sapiens
ttgctgtagcgagga

SEQ ID NO: 1219782 - DNA, 15 bp, Homo sapiens
attgctgtagcgagg

SEQ ID NO: 1219783 - DNA, 15 bp, Homo sapiens
gattgctgtagcgag

SEQ ID NO: 1219784 - DNA, 15 bp, Homo sapiens
ggattgctgtagcga

SEQ ID NO: 1219785 - DNA, 15 bp, Homo sapiens
aggattgctgtagcg

SEQ ID NO: 1219786 - DNA, 15 bp, Homo sapiens
caggattgctgtagc

SEQ ID NO: 1219787 - DNA, 15 bp, Homo sapiens
gcaggattgctgtag

SEQ ID NO: 1219788 - DNA, 15 bp, Homo sapiens
agcaggattgctgta

SEQ ID NO: 1219789 - DNA, 15 bp, Homo sapiens
cagcaggattgctgt

SEQ ID NO: 1219790 - DNA, 15 bp, Homo sapiens
tcagcaggattgctg

SEQ ID NO: 1219791 - DNA, 15 bp, Homo sapiens
gtcagcaggattgct

SEQ ID NO: 1219792 - DNA, 15 bp, Homo sapiens
agtcagcaggattgc

SEQ ID NO: 1219793 - DNA, 15 bp, Homo sapiens
aagtcagcaggattg

SEQ ID NO: 1219794 - DNA, 15 bp, Homo sapiens
gaagtcagcaggatt

SEQ ID NO: 1219795 - DNA, 15 bp, Homo sapiens
agaagtcagcaggat

SEQ ID NO: 1219796 - DNA, 15 bp, Homo sapiens
tagaagtcagcagga

SEQ ID NO: 1219797 - DNA, 15 bp, Homo sapiens
atagaagtcagcagg

SEQ ID NO: 1219798 - DNA, 15 bp, Homo sapiens
catagaagtcagcag

SEQ ID NO: 1219799 - DNA, 15 bp, Homo sapiens
ccatagaagtcagca

SEQ ID NO: 1219800 - DNA, 15 bp, Homo sapiens
accatagaagtcagc

SEQ ID NO: 1219801 - DNA, 15 bp, Homo sapiens
caccatagaagtcag

SEQ ID NO: 1219802 - DNA, 15 bp, Homo sapiens
tcaccatagaagtca

SEQ ID NO: 1219803 - DNA, 15 bp, Homo sapiens
ctcaccatagaagtc

SEQ ID NO: 1219804 - DNA, 15 bp, Homo sapiens
actcaccatagaagt

SEQ ID NO: 1219805 - DNA, 15 bp, Homo sapiens
gactcaccatagaag

SEQ ID NO: 1219806 - DNA, 15 bp, Homo sapiens
ggactcaccatagaa

SEQ ID NO: 1219807 - DNA, 15 bp, Homo sapiens
gggactcaccataga

SEQ ID NO: 1219808 - DNA, 15 bp, Homo sapiens
ggggactcaccatag

SEQ ID NO: 1219809 - DNA, 15 bp, Homo sapiens
tggggactcaccata

SEQ ID NO: 1219810 - DNA, 15 bp, Homo sapiens
ttggggactcaccat

SEQ ID NO: 1219811 - DNA, 15 bp, Homo sapiens
cttggggactcacca

SEQ ID NO: 1219812 - DNA, 15 bp, Homo sapiens
ccttggggactcacc

SEQ ID NO: 1219813 - DNA, 15 bp, Homo sapiens
gccttggggactcac

SEQ ID NO: 1219814 - DNA, 15 bp, Homo sapiens
ggccttggggactca

SEQ ID NO: 1219815 - DNA, 15 bp, Homo sapiens
tggccttggggactc

SEQ ID NO: 1219816 - DNA, 15 bp, Homo sapiens
ctggccttggggact

SEQ ID NO: 1219817 - DNA, 15 bp, Homo sapiens
gctggccttggggac

SEQ ID NO: 1219818 - DNA, 15 bp, Homo sapiens
tgctggccttgggga

SEQ ID NO: 1219819 - DNA, 15 bp, Homo sapiens
ctgctggccttgggg

SEQ ID NO: 1219820 - DNA, 15 bp, Homo sapiens
gctgctggccttggg

SEQ ID NO: 1219821 - DNA, 15 bp, Homo sapiens
ggctgctggccttgg

SEQ ID NO: 1219822 - DNA, 15 bp, Homo sapiens
tggctgctggccttg

SEQ ID NO: 1219823 - DNA, 15 bp, Homo sapiens
ctggctgctggcctt

SEQ ID NO: 1219824 - DNA, 15 bp, Homo sapiens
cctggctgctggcct

SEQ ID NO: 1219825 - DNA, 15 bp, Homo sapiens
ccctggctgctggcc

SEQ ID NO: 1219826 - DNA, 15 bp, Homo sapiens
gccctggctgctggc

SEQ ID NO: 1219827 - DNA, 15 bp, Homo sapiens
ggccctggctgctgg

SEQ ID NO: 1219828 - DNA, 15 bp, Homo sapiens
gggccctggctgctg

SEQ ID NO: 1219829 - DNA, 15 bp, Homo sapiens
agggccctggctgct

SEQ ID NO: 1219830 - DNA, 15 bp, Homo sapiens
cagggccctggctgc

SEQ ID NO: 1219831 - DNA, 15 bp, Homo sapiens
ccagggccctggctg

SEQ ID NO: 1219832 - DNA, 15 bp, Homo sapiens
gccagggccctggct

SEQ ID NO: 1219833 - DNA, 15 bp, Homo sapiens
tgccagggccctggc

SEQ ID NO: 1219834 - DNA, 15 bp, Homo sapiens
gtgccagggccctgg

SEQ ID NO: 1219835 - DNA, 15 bp, Homo sapiens
tgtgccagggccctg

SEQ ID NO: 1219836 - DNA, 15 bp, Homo sapiens
gtgtgccagggccct

SEQ ID NO: 1219837 - DNA, 15 bp, Homo sapiens
tgtgtgccagggccc

SEQ ID NO: 1219838 - DNA, 15 bp, Homo sapiens
ctgtgtgccagggcc

SEQ ID NO: 1219839 - DNA, 15 bp, Homo sapiens
cctgtgtgccagggc

SEQ ID NO: 1219840 - DNA, 15 bp, Homo sapiens
ccctgtgtgccaggg

SEQ ID NO: 1219841 - DNA, 15 bp, Homo sapiens
gccctgtgtgccagg

SEQ ID NO: 1219842 - DNA, 15 bp, Homo sapiens
ggccctgtgtgccag

SEQ ID NO: 1219843 - DNA, 15 bp, Homo sapiens
aggccctgtgtgcca

SEQ ID NO: 1219844 - DNA, 15 bp, Homo sapiens
gaggccctgtgtgcc

SEQ ID NO: 1219845 - DNA, 15 bp, Homo sapiens
ggaggccctgtgtgc

SEQ ID NO: 1219846 - DNA, 15 bp, Homo sapiens
gggaggccctgtgtg

SEQ ID NO: 1219847 - DNA, 15 bp, Homo sapiens
ggggaggccctgtgt

SEQ ID NO: 1219848 - DNA, 15 bp, Homo sapiens
cggggaggccctgtg

SEQ ID NO: 1219849 - DNA, 15 bp, Homo sapiens
tcggggaggccctgt

SEQ ID NO: 1219850 - DNA, 15 bp, Homo sapiens
atcggggaggccctg

SEQ ID NO: 1219851 - DNA, 15 bp, Homo sapiens
catcggggaggccct

SEQ ID NO: 1219852 - DNA, 15 bp, Homo sapiens
gcatcggggaggccc

SEQ ID NO: 1219853 - DNA, 15 bp, Homo sapiens
agcatcggggaggcc

SEQ ID NO: 1219854 - DNA, 15 bp, Homo sapiens
aagcatcggggaggc

SEQ ID NO: 1219855 - DNA, 15 bp, Homo sapiens
taagcatcggggagg

SEQ ID NO: 1219856 - DNA, 15 bp, Homo sapiens
ttaagcatcggggag

SEQ ID NO: 1219857 - DNA, 15 bp, Homo sapiens
tttaagcatcgggga

SEQ ID NO: 1219858 - DNA, 15 bp, Homo sapiens
gtttaagcatcgggg

SEQ ID NO: 1219859 - DNA, 15 bp, Homo sapiens
ggtttaagcatcggg

SEQ ID NO: 1219860 - DNA, 15 bp, Homo sapiens
gggtttaagcatcgg

SEQ ID NO: 1219861 - DNA, 15 bp, Homo sapiens
agggtttaagcatcg

SEQ ID NO: 1219862 - DNA, 15 bp, Homo sapiens
cagggtttaagcatc

SEQ ID NO: 1219863 - DNA, 15 bp, Homo sapiens
gcagggtttaagcat

SEQ ID NO: 1219864 - DNA, 15 bp, Homo sapiens
ggcagggtttaagca

SEQ ID NO: 1219865 - DNA, 15 bp, Homo sapiens
gggcagggtttaagc

SEQ ID NO: 1219866 - DNA, 15 bp, Homo sapiens
tgggcagggtttaag

SEQ ID NO: 1219867 - DNA, 15 bp, Homo sapiens
ttgggcagggtttaa

SEQ ID NO: 1219868 - DNA, 15 bp, Homo sapiens
cttgggcagggttta

SEQ ID NO: 1219869 - DNA, 15 bp, Homo sapiens
gcttgggcagggttt

SEQ ID NO: 1219870 - DNA, 15 bp, Homo sapiens
agcttgggcagggtt

SEQ ID NO: 1219871 - DNA, 15 bp, Homo sapiens
aagcttgggcagggt

SEQ ID NO: 1219872 - DNA, 15 bp, Homo sapiens
caagcttgggcaggg

SEQ ID NO: 1219873 - DNA, 15 bp, Homo sapiens
gcaagcttgggcagg

SEQ ID NO: 1219874 - DNA, 15 bp, Homo sapiens
agcaagcttgggcag

SEQ ID NO: 1219875 - DNA, 15 bp, Homo sapiens
cagcaagcttgggca

SEQ ID NO: 1219876 - DNA, 15 bp, Homo sapiens
ccagcaagcttgggc

SEQ ID NO: 1219877 - DNA, 15 bp, Homo sapiens
tccagcaagcttggg

SEQ ID NO: 1219878 - DNA, 15 bp, Homo sapiens
ttccagcaagcttgg

SEQ ID NO: 1219879 - DNA, 15 bp, Homo sapiens
tttccagcaagcttg

SEQ ID NO: 1219880 - DNA, 15 bp, Homo sapiens
ctttccagcaagctt

SEQ ID NO: 1219881 - DNA, 15 bp, Homo sapiens
tctttccagcaagct

SEQ ID NO: 1219882 - DNA, 15 bp, Homo sapiens
atctttccagcaagc

SEQ ID NO: 1219883 - DNA, 15 bp, Homo sapiens
aatctttccagcaag

SEQ ID NO: 1219884 - DNA, 15 bp, Homo sapiens
gaatctttccagcaa

SEQ ID NO: 1219885 - DNA, 15 bp, Homo sapiens
tgaatctttccagca

SEQ ID NO: 1219886 - DNA, 15 bp, Homo sapiens
ctgaatctttccagc

SEQ ID NO: 1219887 - DNA, 15 bp, Homo sapiens
cctgaatctttccag

SEQ ID NO: 1219888 - DNA, 15 bp, Homo sapiens
ccctgaatctttcca

SEQ ID NO: 1219889 - DNA, 15 bp, Homo sapiens
cccctgaatctttcc

SEQ ID NO: 1219890 - DNA, 15 bp, Homo sapiens
tcccctgaatctttc

SEQ ID NO: 1219891 - DNA, 15 bp, Homo sapiens
ctcccctgaatcttt

SEQ ID NO: 1219892 - DNA, 15 bp, Homo sapiens
tctcccctgaatctt

SEQ ID NO: 1219893 - DNA, 15 bp, Homo sapiens
ttctcccctgaatct

SEQ ID NO: 1219894 - DNA, 15 bp, Homo sapiens
tttctcccctgaatc

SEQ ID NO: 1219895 - DNA, 15 bp, Homo sapiens
gtttctcccctgaat

SEQ ID NO: 1219896 - DNA, 15 bp, Homo sapiens
agtttctcccctgaa

SEQ ID NO: 1219897 - DNA, 15 bp, Homo sapiens
gagtttctcccctga

SEQ ID NO: 1219898 - DNA, 15 bp, Homo sapiens
ggagtttctcccctg

SEQ ID NO: 1219899 - DNA, 15 bp, Homo sapiens
gggagtttctcccct

SEQ ID NO: 1219900 - DNA, 15 bp, Homo sapiens
tgggagtttctcccc

SEQ ID NO: 1219901 - DNA, 15 bp, Homo sapiens
ctgggagtttctccc

SEQ ID NO: 1219902 - DNA, 15 bp, Homo sapiens
tctgggagtttctcc

SEQ ID NO: 1219903 - DNA, 15 bp, Homo sapiens
ctctgggagtttctc

SEQ ID NO: 1219904 - DNA, 15 bp, Homo sapiens
cctctgggagtttct

SEQ ID NO: 1219905 - DNA, 15 bp, Homo sapiens
acctctgggagtttc

SEQ ID NO: 1219906 - DNA, 15 bp, Homo sapiens
aacctctgggagttt

SEQ ID NO: 1219907 - DNA, 15 bp, Homo sapiens
aaacctctgggagtt

SEQ ID NO: 1219908 - DNA, 15 bp, Homo sapiens
gaaacctctgggagt

SEQ ID NO: 1219909 - DNA, 15 bp, Homo sapiens
tgaaacctctgggag

SEQ ID NO: 1219910 - DNA, 15 bp, Homo sapiens
ctgaaacctctggga

SEQ ID NO: 1219911 - DNA, 15 bp, Homo sapiens
cctgaaacctctggg

SEQ ID NO: 1219912 - DNA, 15 bp, Homo sapiens
tcctgaaacctctgg

SEQ ID NO: 1219913 - DNA, 15 bp, Homo sapiens
ctcctgaaacctctg

SEQ ID NO: 1219914 - DNA, 15 bp, Homo sapiens
tctcctgaaacctct

SEQ ID NO: 1219915 - DNA, 15 bp, Homo sapiens
ctctcctgaaacctc

SEQ ID NO: 1219916 - DNA, 15 bp, Homo sapiens
cctctcctgaaacct

SEQ ID NO: 1219917 - DNA, 15 bp, Homo sapiens
tcctctcctgaaacc

SEQ ID NO: 1219918 - DNA, 15 bp, Homo sapiens
ctcctctcctgaaac

SEQ ID NO: 1219919 - DNA, 15 bp, Homo sapiens
cctcctctcctgaaa

SEQ ID NO: 1219920 - DNA, 15 bp, Homo sapiens
tcctcctctcctgaa

SEQ ID NO: 1219921 - DNA, 15 bp, Homo sapiens
ctcctcctctcctga

SEQ ID NO: 1219922 - DNA, 15 bp, Homo sapiens
gctcctcctctcctg

SEQ ID NO: 1219923 - DNA, 15 bp, Homo sapiens
tgctcctcctctcct

SEQ ID NO: 1219924 - DNA, 15 bp, Homo sapiens
ttgctcctcctctcc

SEQ ID NO: 1219925 - DNA, 15 bp, Homo sapiens
attgctcctcctctc

SEQ ID NO: 1219926 - DNA, 15 bp, Homo sapiens
cattgctcctcctct

SEQ ID NO: 1219927 - DNA, 15 bp, Homo sapiens
tcattgctcctcctc

SEQ ID NO: 1219928 - DNA, 15 bp, Homo sapiens
atcattgctcctcct

SEQ ID NO: 1219929 - DNA, 15 bp, Homo sapiens
catcattgctcctcc

SEQ ID NO: 1219930 - DNA, 15 bp, Homo sapiens
ccatcattgctcctc

SEQ ID NO: 1219931 - DNA, 15 bp, Homo sapiens
cccatcattgctcct

SEQ ID NO: 1219932 - DNA, 15 bp, Homo sapiens
ccccatcattgctcc

SEQ ID NO: 1219933 - DNA, 15 bp, Homo sapiens
tccccatcattgctc

SEQ ID NO: 1219934 - DNA, 15 bp, Homo sapiens
ttccccatcattgct

SEQ ID NO: 1219935 - DNA, 15 bp, Homo sapiens
cttccccatcattgc

SEQ ID NO: 1219936 - DNA, 15 bp, Homo sapiens
tcttccccatcattg

SEQ ID NO: 1219937 - DNA, 15 bp, Homo sapiens
ttcttccccatcatt

SEQ ID NO: 1219938 - DNA, 15 bp, Homo sapiens
gttcttccccatcat

SEQ ID NO: 1219939 - DNA, 15 bp, Homo sapiens
tgttcttccccatca

SEQ ID NO: 1219940 - DNA, 15 bp, Homo sapiens
atgttcttccccatc

SEQ ID NO: 1219941 - DNA, 15 bp, Homo sapiens
catgttcttccccat

SEQ ID NO: 1219942 - DNA, 15 bp, Homo sapiens
ccatgttcttcccca

SEQ ID NO: 1219943 - DNA, 15 bp, Homo sapiens
cccatgttcttcccc

SEQ ID NO: 1219944 - DNA, 15 bp, Homo sapiens
ccccatgttcttccc

SEQ ID NO: 1219945 - DNA, 15 bp, Homo sapiens
accccatgttcttcc

SEQ ID NO: 1219946 - DNA, 15 bp, Homo sapiens
caccccatgttcttc

SEQ ID NO: 1219947 - DNA, 15 bp, Homo sapiens
ccaccccatgttctt

SEQ ID NO: 1219948 - DNA, 15 bp, Homo sapiens
accaccccatgttct

SEQ ID NO: 1219949 - DNA, 15 bp, Homo sapiens
aaccaccccatgttc

SEQ ID NO: 1219950 - DNA, 15 bp, Homo sapiens
aaaccaccccatgtt

SEQ ID NO: 1219951 - DNA, 15 bp, Homo sapiens
caaaccaccccatgt

SEQ ID NO: 1219952 - DNA, 15 bp, Homo sapiens
gcaaaccaccccatg

SEQ ID NO: 1219953 - DNA, 15 bp, Homo sapiens
ggcaaaccaccccat

SEQ ID NO: 1219954 - DNA, 15 bp, Homo sapiens
tggcaaaccacccca

SEQ ID NO: 1219955 - DNA, 15 bp, Homo sapiens
ctggcaaaccacccc

SEQ ID NO: 1219956 - DNA, 15 bp, Homo sapiens
cctggcaaaccaccc

SEQ ID NO: 1219957 - DNA, 15 bp, Homo sapiens
acctggcaaaccacc

SEQ ID NO: 1219958 - DNA, 15 bp, Homo sapiens
tacctggcaaaccac

SEQ ID NO: 1219959 - DNA, 15 bp, Homo sapiens
atacctggcaaacca

SEQ ID NO: 1219960 - DNA, 15 bp, Homo sapiens
gatacctggcaaacc

SEQ ID NO: 1219961 - DNA, 15 bp, Homo sapiens
tgatacctggcaaac

SEQ ID NO: 1219962 - DNA, 15 bp, Homo sapiens
ttgatacctggcaaa

SEQ ID NO: 1219963 - DNA, 15 bp, Homo sapiens
tttgatacctggcaa

SEQ ID NO: 1219964 - DNA, 15 bp, Homo sapiens
atttgatacctggca

SEQ ID NO: 1219965 - DNA, 15 bp, Homo sapiens
catttgatacctggc

SEQ ID NO: 1219966 - DNA, 15 bp, Homo sapiens
gcatttgatacctgg

SEQ ID NO: 1219967 - DNA, 15 bp, Homo sapiens
agcatttgatacctg

SEQ ID NO: 1219968 - DNA, 15 bp, Homo sapiens
tagcatttgatacct

SEQ ID NO: 1219969 - DNA, 15 bp, Homo sapiens
ctagcatttgatacc

SEQ ID NO: 1219970 - DNA, 15 bp, Homo sapiens
tctagcatttgatac

SEQ ID NO: 1219971 - DNA, 15 bp, Homo sapiens
ttctagcatttgata

SEQ ID NO: 1219972 - DNA, 15 bp, Homo sapiens
tttctagcatttgat

SEQ ID NO: 1219973 - DNA, 15 bp, Homo sapiens
atttctagcatttga

SEQ ID NO: 1219974 - DNA, 15 bp, Homo sapiens
catttctagcatttg

SEQ ID NO: 1219975 - DNA, 15 bp, Homo sapiens
tcatttctagcattt

SEQ ID NO: 1219976 - DNA, 15 bp, Homo sapiens
ctcatttctagcatt

SEQ ID NO: 1219977 - DNA, 15 bp, Homo sapiens
cctcatttctagcat

SEQ ID NO: 1219978 - DNA, 15 bp, Homo sapiens
ccctcatttctagca

SEQ ID NO: 1219979 - DNA, 15 bp, Homo sapiens
gccctcatttctagc

SEQ ID NO: 1219980 - DNA, 15 bp, Homo sapiens
ggccctcatttctag

SEQ ID NO: 1219981 - DNA, 15 bp, Homo sapiens
aggccctcatttcta

SEQ ID NO: 1219982 - DNA, 15 bp, Homo sapiens
caggccctcatttct

SEQ ID NO: 1219983 - DNA, 15 bp, Homo sapiens
ccaggccctcatttc

SEQ ID NO: 1219984 - DNA, 15 bp, Homo sapiens
tccaggccctcattt

SEQ ID NO: 1219985 - DNA, 15 bp, Homo sapiens
ttccaggccctcatt

SEQ ID NO: 1219986 - DNA, 15 bp, Homo sapiens
tttccaggccctcat

SEQ ID NO: 1219987 - DNA, 15 bp, Homo sapiens
atttccaggccctca

SEQ ID NO: 1219988 - DNA, 15 bp, Homo sapiens
tatttccaggccctc

SEQ ID NO: 1219989 - DNA, 15 bp, Homo sapiens
ctatttccaggccct

SEQ ID NO: 1219990 - DNA, 15 bp, Homo sapiens
tctatttccaggccc

SEQ ID NO: 1219991 - DNA, 15 bp, Homo sapiens
ttctatttccaggcc

SEQ ID NO: 1219992 - DNA, 15 bp, Homo sapiens
cttctatttccaggc

SEQ ID NO: 1219993 - DNA, 15 bp, Homo sapiens
gcttctatttccagg

SEQ ID NO: 1219994 - DNA, 15 bp, Homo sapiens
agcttctatttccag

SEQ ID NO: 1219995 - DNA, 15 bp, Homo sapiens
aagcttctatttcca

SEQ ID NO: 1219996 - DNA, 15 bp, Homo sapiens
gaagcttctatttcc

SEQ ID NO: 1219997 - DNA, 15 bp, Homo sapiens
agaagcttctatttc

SEQ ID NO: 1219998 - DNA, 15 bp, Homo sapiens
cagaagcttctattt

SEQ ID NO: 1219999 - DNA, 15 bp, Homo sapiens
tcagaagcttctatt

SEQ ID NO: 1220000 - DNA, 15 bp, Homo sapiens
gtcagaagcttctat

SEQ ID NO: 1220001 - DNA, 15 bp, Homo sapiens
tgtcagaagcttcta

SEQ ID NO: 1220002 - DNA, 15 bp, Homo sapiens
ttgtcagaagcttct

SEQ ID NO: 1220003 - DNA, 15 bp, Homo sapiens
tttgtcagaagcttc

SEQ ID NO: 1220004 - DNA, 15 bp, Homo sapiens
ctttgtcagaagctt

SEQ ID NO: 1220005 - DNA, 15 bp, Homo sapiens
tctttgtcagaagct

SEQ ID NO: 1220006 - DNA, 15 bp, Homo sapiens
ctctttgtcagaagc

SEQ ID NO: 1220007 - DNA, 15 bp, Homo sapiens
gctctttgtcagaag

SEQ ID NO: 1220008 - DNA, 15 bp, Homo sapiens
agctctttgtcagaa

SEQ ID NO: 1220009 - DNA, 15 bp, Homo sapiens
tagctctttgtcaga

SEQ ID NO: 1220010 - DNA, 15 bp, Homo sapiens
gtagctctttgtcag

SEQ ID NO: 1220011 - DNA, 15 bp, Homo sapiens
ggtagctctttgtca

SEQ ID NO: 1220012 - DNA, 15 bp, Homo sapiens
gggtagctctttgtc

SEQ ID NO: 1220013 - DNA, 15 bp, Homo sapiens
agggtagctctttgt

SEQ ID NO: 1220014 - DNA, 15 bp, Homo sapiens
aagggtagctctttg

SEQ ID NO: 1220015 - DNA, 15 bp, Homo sapiens
gaagggtagctcttt

SEQ ID NO: 1220016 - DNA, 15 bp, Homo sapiens
agaagggtagctctt

SEQ ID NO: 1220017 - DNA, 15 bp, Homo sapiens
cagaagggtagctct

SEQ ID NO: 1220018 - DNA, 15 bp, Homo sapiens
acagaagggtagctc

SEQ ID NO: 1220019 - DNA, 15 bp, Homo sapiens
cacagaagggtagct

SEQ ID NO: 1220020 - DNA, 15 bp, Homo sapiens
gcacagaagggtagc

SEQ ID NO: 1220021 - DNA, 15 bp, Homo sapiens
tgcacagaagggtag

SEQ ID NO: 1220022 - DNA, 15 bp, Homo sapiens
atgcacagaagggta

SEQ ID NO: 1220023 - DNA, 15 bp, Homo sapiens
catgcacagaagggt

SEQ ID NO: 1220024 - DNA, 15 bp, Homo sapiens
tcatgcacagaaggg

SEQ ID NO: 1220025 - DNA, 15 bp, Homo sapiens
atcatgcacagaagg

SEQ ID NO: 1220026 - DNA, 15 bp, Homo sapiens
tatcatgcacagaag

SEQ ID NO: 1220027 - DNA, 15 bp, Homo sapiens
ctatcatgcacagaa

SEQ ID NO: 1220028 - DNA, 15 bp, Homo sapiens
tctatcatgcacaga

SEQ ID NO: 1220029 - DNA, 15 bp, Homo sapiens
atctatcatgcacag

SEQ ID NO: 1220030 - DNA, 15 bp, Homo sapiens
aatctatcatgcaca

SEQ ID NO: 1220031 - DNA, 15 bp, Homo sapiens
taatctatcatgcac

SEQ ID NO: 1220032 - DNA, 15 bp, Homo sapiens
ctaatctatcatgca

SEQ ID NO: 1220033 - DNA, 15 bp, Homo sapiens
tctaatctatcatgc

SEQ ID NO: 1220034 - DNA, 15 bp, Homo sapiens
ttctaatctatcatg

SEQ ID NO: 1220035 - DNA, 15 bp, Homo sapiens
tttctaatctatcat

SEQ ID NO: 1220036 - DNA, 15 bp, Homo sapiens
gtttctaatctatca

SEQ ID NO: 1220037 - DNA, 15 bp, Homo sapiens
agtttctaatctatc

SEQ ID NO: 1220038 - DNA, 15 bp, Homo sapiens
aagtttctaatctat

SEQ ID NO: 1220039 - DNA, 15 bp, Homo sapiens
caagtttctaatcta

SEQ ID NO: 1220040 - DNA, 15 bp, Homo sapiens
gcaagtttctaatct

SEQ ID NO: 1220041 - DNA, 15 bp, Homo sapiens
tgcaagtttctaatc

SEQ ID NO: 1220042 - DNA, 15 bp, Homo sapiens
ttgcaagtttctaat

SEQ ID NO: 1220043 - DNA, 15 bp, Homo sapiens
tttgcaagtttctaa

SEQ ID NO: 1220044 - DNA, 15 bp, Homo sapiens
gtttgcaagtttcta

SEQ ID NO: 1220045 - DNA, 15 bp, Homo sapiens
agtttgcaagtttct

SEQ ID NO: 1220046 - DNA, 15 bp, Homo sapiens
gagtttgcaagtttc

SEQ ID NO: 1220047 - DNA, 15 bp, Homo sapiens
ggagtttgcaagttt

SEQ ID NO: 1220048 - DNA, 15 bp, Homo sapiens
tggagtttgcaagtt

SEQ ID NO: 1220049 - DNA, 15 bp, Homo sapiens
ttggagtttgcaagt

SEQ ID NO: 1220050 - DNA, 15 bp, Homo sapiens
tttggagtttgcaag

SEQ ID NO: 1220051 - DNA, 15 bp, Homo sapiens
ctttggagtttgcaa

SEQ ID NO: 1220052 - DNA, 15 bp, Homo sapiens
tctttggagtttgca

SEQ ID NO: 1220053 - DNA, 15 bp, Homo sapiens
atctttggagtttgc

SEQ ID NO: 1220054 - DNA, 15 bp, Homo sapiens
catctttggagtttg

SEQ ID NO: 1220055 - DNA, 15 bp, Homo sapiens
ccatctttggagttt

SEQ ID NO: 1220056 - DNA, 15 bp, Homo sapiens
cccatctttggagtt

SEQ ID NO: 1220057 - DNA, 15 bp, Homo sapiens
tcccatctttggagt

SEQ ID NO: 1220058 - DNA, 15 bp, Homo sapiens
ctcccatctttggag

SEQ ID NO: 1220059 - DNA, 15 bp, Homo sapiens
cctcccatctttgga

SEQ ID NO: 1220060 - DNA, 15 bp, Homo sapiens
ccctcccatctttgg

SEQ ID NO: 1220061 - DNA, 15 bp, Homo sapiens
gccctcccatctttg

SEQ ID NO: 1220062 - DNA, 15 bp, Homo sapiens
tgccctcccatcttt

SEQ ID NO: 1220063 - DNA, 15 bp, Homo sapiens
atgccctcccatctt

SEQ ID NO: 1220064 - DNA, 15 bp, Homo sapiens
catgccctcccatct

SEQ ID NO: 1220065 - DNA, 15 bp, Homo sapiens
ccatgccctcccatc

SEQ ID NO: 1220066 - DNA, 15 bp, Homo sapiens
tccatgccctcccat

SEQ ID NO: 1220067 - DNA, 15 bp, Homo sapiens
ttccatgccctccca

SEQ ID NO: 1220068 - DNA, 15 bp, Homo sapiens
attccatgccctccc

SEQ ID NO: 1220069 - DNA, 15 bp, Homo sapiens
aattccatgccctcc

SEQ ID NO: 1220070 - DNA, 15 bp, Homo sapiens
gaattccatgccctc

SEQ ID NO: 1220071 - DNA, 15 bp, Homo sapiens
tgaattccatgccct

SEQ ID NO: 1220072 - DNA, 15 bp, Homo sapiens
ttgaattccatgccc

SEQ ID NO: 1220073 - DNA, 15 bp, Homo sapiens
cttgaattccatgcc

SEQ ID NO: 1220074 - DNA, 15 bp, Homo sapiens
tcttgaattccatgc

SEQ ID NO: 1220075 - DNA, 15 bp, Homo sapiens
ctcttgaattccatg

SEQ ID NO: 1220076 - DNA, 15 bp, Homo sapiens
cctcttgaattccat

SEQ ID NO: 1220077 - DNA, 15 bp, Homo sapiens
ccctcttgaattcca

SEQ ID NO: 1220078 - DNA, 15 bp, Homo sapiens
accctcttgaattcc

SEQ ID NO: 1220079 - DNA, 15 bp, Homo sapiens
caccctcttgaattc

SEQ ID NO: 1220080 - DNA, 15 bp, Homo sapiens
ccaccctcttgaatt

SEQ ID NO: 1220081 - DNA, 15 bp, Homo sapiens
cccaccctcttgaat

SEQ ID NO: 1220082 - DNA, 15 bp, Homo sapiens
ccccaccctcttgaa

SEQ ID NO: 1220083 - DNA, 15 bp, Homo sapiens
tccccaccctcttga

SEQ ID NO: 1220084 - DNA, 15 bp, Homo sapiens
atccccaccctcttg

SEQ ID NO: 1220085 - DNA, 15 bp, Homo sapiens
gatccccaccctctt

SEQ ID NO: 1220086 - DNA, 15 bp, Homo sapiens
tgatccccaccctct

SEQ ID NO: 1220087 - DNA, 15 bp, Homo sapiens
ttgatccccaccctc

SEQ ID NO: 1220088 - DNA, 15 bp, Homo sapiens
attgatccccaccct

SEQ ID NO: 1220089 - DNA, 15 bp, Homo sapiens
tattgatccccaccc

SEQ ID NO: 1220090 - DNA, 15 bp, Homo sapiens
ttattgatccccacc

SEQ ID NO: 1220091 - DNA, 15 bp, Homo sapiens
tttattgatccccac

SEQ ID NO: 1220092 - DNA, 15 bp, Homo sapiens
atttattgatcccca

SEQ ID NO: 1220093 - DNA, 15 bp, Homo sapiens
tatttattgatcccc

SEQ ID NO: 1220094 - DNA, 15 bp, Homo sapiens
atatttattgatccc

SEQ ID NO: 1220095 - DNA, 15 bp, Homo sapiens
gatatttattgatcc

SEQ ID NO: 1220096 - DNA, 15 bp, Homo sapiens
tgatatttattgatc

SEQ ID NO: 1220097 - DNA, 15 bp, Homo sapiens
ctgatatttattgat

SEQ ID NO: 1220098 - DNA, 15 bp, Homo sapiens
tctgatatttattga

SEQ ID NO: 1220099 - DNA, 15 bp, Homo sapiens
ctctgatatttattg

SEQ ID NO: 1220100 - DNA, 15 bp, Homo sapiens
actctgatatttatt

SEQ ID NO: 1220101 - DNA, 15 bp, Homo sapiens
gactctgatatttat

SEQ ID NO: 1220102 - DNA, 15 bp, Homo sapiens
agactctgatattta

SEQ ID NO: 1220103 - DNA, 15 bp, Homo sapiens
aagactctgatattt

SEQ ID NO: 1220104 - DNA, 15 bp, Homo sapiens
aaagactctgatatt

SEQ ID NO: 1220105 - DNA, 15 bp, Homo sapiens
taaagactctgatat

SEQ ID NO: 1220106 - DNA, 15 bp, Homo sapiens
ataaagactctgata

SEQ ID NO: 1220107 - DNA, 15 bp, Homo sapiens
aataaagactctgat

SEQ ID NO: 1220108 - DNA, 15 bp, Homo sapiens
gaataaagactctga

SEQ ID NO: 1220109 - DNA, 15 bp, Homo sapiens
tgaataaagactctg

SEQ ID NO: 1220110 - DNA, 15 bp, Homo sapiens
ctgaataaagactct

SEQ ID NO: 1220111 - DNA, 15 bp, Homo sapiens
tctgaataaagactc

SEQ ID NO: 1220112 - DNA, 15 bp, Homo sapiens
gtctgaataaagact

SEQ ID NO: 1220113 - DNA, 15 bp, Homo sapiens
agtctgaataaagac

SEQ ID NO: 1220114 - DNA, 15 bp, Homo sapiens
gagtctgaataaaga

SEQ ID NO: 1220115 - DNA, 15 bp, Homo sapiens
tgagtctgaataaag

SEQ ID NO: 1220116 - DNA, 15 bp, Homo sapiens
ctgagtctgaataaa

SEQ ID NO: 1220117 - DNA, 15 bp, Homo sapiens
actgagtctgaataa

SEQ ID NO: 1220118 - DNA, 15 bp, Homo sapiens
tactgagtctgaata

SEQ ID NO: 1220119 - DNA, 15 bp, Homo sapiens
ctactgagtctgaat

SEQ ID NO: 1220120 - DNA, 15 bp, Homo sapiens
cctactgagtctgaa

SEQ ID NO: 1220121 - DNA, 15 bp, Homo sapiens
ccctactgagtctga

SEQ ID NO: 1220122 - DNA, 15 bp, Homo sapiens
tccctactgagtctg

SEQ ID NO: 1220123 - DNA, 15 bp, Homo sapiens
ttccctactgagtct

SEQ ID NO: 1220124 - DNA, 15 bp, Homo sapiens
tttccctactgagtc

SEQ ID NO: 1220125 - DNA, 15 bp, Homo sapiens
gtttccctactgagt

SEQ ID NO: 1220126 - DNA, 15 bp, Homo sapiens
tgtttccctactgag

SEQ ID NO: 1220127 - DNA, 15 bp, Homo sapiens
ttgtttccctactga

SEQ ID NO: 1220128 - DNA, 15 bp, Homo sapiens
gttgtttccctactg

SEQ ID NO: 1220129 - DNA, 15 bp, Homo sapiens
ggttgtttccctact

SEQ ID NO: 1220130 - DNA, 15 bp, Homo sapiens
aggttgtttccctac

SEQ ID NO: 1220131 - DNA, 15 bp, Homo sapiens
aaggttgtttcccta

SEQ ID NO: 1220132 - DNA, 15 bp, Homo sapiens
aaaggttgtttccct

SEQ ID NO: 1220133 - DNA, 15 bp, Homo sapiens
taaaggttgtttccc

SEQ ID NO: 1220134 - DNA, 15 bp, Homo sapiens
ttaaaggttgtttcc

SEQ ID NO: 1220135 - DNA, 15 bp, Homo sapiens
cttaaaggttgtttc

SEQ ID NO: 1220136 - DNA, 15 bp, Homo sapiens
ccttaaaggttgttt

SEQ ID NO: 1220137 - DNA, 15 bp, Homo sapiens
accttaaaggttgtt

SEQ ID NO: 1220138 - DNA, 15 bp, Homo sapiens
gaccttaaaggttgt

SEQ ID NO: 1220139 - DNA, 15 bp, Homo sapiens
tgaccttaaaggttg

SEQ ID NO: 1220140 - DNA, 15 bp, Homo sapiens
ttgaccttaaaggtt

SEQ ID NO: 1220141 - DNA, 15 bp, Homo sapiens
cttgaccttaaaggt

SEQ ID NO: 1220142 - DNA, 15 bp, Homo sapiens
tcttgaccttaaagg

SEQ ID NO: 1220143 - DNA, 15 bp, Homo sapiens
ttcttgaccttaaag

SEQ ID NO: 1220144 - DNA, 15 bp, Homo sapiens
cttcttgaccttaaa

SEQ ID NO: 1220145 - DNA, 15 bp, Homo sapiens
acttcttgaccttaa

SEQ ID NO: 1220146 - DNA, 15 bp, Homo sapiens
gacttcttgacctta

SEQ ID NO: 1220147 - DNA, 15 bp, Homo sapiens
tgacttcttgacctt

SEQ ID NO: 1220148 - DNA, 15 bp, Homo sapiens
gtgacttcttgacct

SEQ ID NO: 1220149 - DNA, 15 bp, Homo sapiens
ggtgacttcttgacc

SEQ ID NO: 1220150 - DNA, 15 bp, Homo sapiens
tggtgacttcttgac

SEQ ID NO: 1220151 - DNA, 15 bp, Homo sapiens
ctggtgacttcttga

SEQ ID NO: 1220152 - DNA, 15 bp, Homo sapiens
tctggtgacttcttg

SEQ ID NO: 1220153 - DNA, 15 bp, Homo sapiens
atctggtgacttctt

SEQ ID NO: 1220154 - DNA, 15 bp, Homo sapiens
gatctggtgacttct

SEQ ID NO: 1220155 - DNA, 15 bp, Homo sapiens
agatctggtgacttc

SEQ ID NO: 1220156 - DNA, 15 bp, Homo sapiens
aagatctggtgactt

SEQ ID NO: 1220157 - DNA, 15 bp, Homo sapiens
taagatctggtgact

SEQ ID NO: 1220158 - DNA, 15 bp, Homo sapiens
ttaagatctggtgac

SEQ ID NO: 1220159 - DNA, 15 bp, Homo sapiens
tttaagatctggtga

SEQ ID NO: 1220160 - DNA, 15 bp, Homo sapiens
ttttaagatctggtg

SEQ ID NO: 1220161 - DNA, 15 bp, Homo sapiens
gttttaagatctggt

SEQ ID NO: 1220162 - DNA, 15 bp, Homo sapiens
tgttttaagatctgg

SEQ ID NO: 1220163 - DNA, 15 bp, Homo sapiens
atgttttaagatctg

SEQ ID NO: 1220164 - DNA, 15 bp, Homo sapiens
catgttttaagatct

SEQ ID NO: 1220165 - DNA, 15 bp, Homo sapiens
gcatgttttaagatc

SEQ ID NO: 1220166 - DNA, 15 bp, Homo sapiens
ggcatgttttaagat

SEQ ID NO: 1220167 - DNA, 15 bp, Homo sapiens
gggcatgttttaaga

SEQ ID NO: 1220168 - DNA, 15 bp, Homo sapiens
agggcatgttttaag

SEQ ID NO: 1220169 - DNA, 15 bp, Homo sapiens
cagggcatgttttaa

SEQ ID NO: 1220170 - DNA, 15 bp, Homo sapiens
ccagggcatgtttta

SEQ ID NO: 1220171 - DNA, 15 bp, Homo sapiens
accagggcatgtttt

SEQ ID NO: 1220172 - DNA, 15 bp, Homo sapiens
caccagggcatgttt

SEQ ID NO: 1220173 - DNA, 15 bp, Homo sapiens
acaccagggcatgtt

SEQ ID NO: 1220174 - DNA, 15 bp, Homo sapiens
aacaccagggcatgt

SEQ ID NO: 1220175 - DNA, 15 bp, Homo sapiens
gaacaccagggcatg

SEQ ID NO: 1220176 - DNA, 15 bp, Homo sapiens
ggaacaccagggcat

SEQ ID NO: 1220177 - DNA, 15 bp, Homo sapiens
gggaacaccagggca

SEQ ID NO: 1220178 - DNA, 15 bp, Homo sapiens
tgggaacaccagggc

SEQ ID NO: 1220179 - DNA, 15 bp, Homo sapiens
gtgggaacaccaggg

SEQ ID NO: 1220180 - DNA, 15 bp, Homo sapiens
tgtgggaacaccagg

SEQ ID NO: 1220181 - DNA, 15 bp, Homo sapiens
ctgtgggaacaccag

SEQ ID NO: 1220182 - DNA, 15 bp, Homo sapiens
actgtgggaacacca

SEQ ID NO: 1220183 - DNA, 15 bp, Homo sapiens
cactgtgggaacacc

SEQ ID NO: 1220184 - DNA, 15 bp, Homo sapiens
ccactgtgggaacac

SEQ ID NO: 1220185 - DNA, 15 bp, Homo sapiens
gccactgtgggaaca

SEQ ID NO: 1220186 - DNA, 15 bp, Homo sapiens
tgccactgtgggaac

SEQ ID NO: 1220187 - DNA, 15 bp, Homo sapiens
ctgccactgtgggaa

SEQ ID NO: 1220188 - DNA, 15 bp, Homo sapiens
cctgccactgtggga

SEQ ID NO: 1220189 - DNA, 15 bp, Homo sapiens
ccctgccactgtggg

SEQ ID NO: 1220190 - DNA, 15 bp, Homo sapiens
tccctgccactgtgg

SEQ ID NO: 1220191 - DNA, 15 bp, Homo sapiens
ctccctgccactgtg

SEQ ID NO: 1220192 - DNA, 15 bp, Homo sapiens
gctccctgccactgt

SEQ ID NO: 1220193 - DNA, 15 bp, Homo sapiens
ggctccctgccactg

SEQ ID NO: 1220194 - DNA, 15 bp, Homo sapiens
aggctccctgccact

SEQ ID NO: 1220195 - DNA, 15 bp, Homo sapiens
caggctccctgccac

SEQ ID NO: 1220196 - DNA, 15 bp, Homo sapiens
tcaggctccctgcca

SEQ ID NO: 1220197 - DNA, 15 bp, Homo sapiens
ttcaggctccctgcc

SEQ ID NO: 1220198 - DNA, 15 bp, Homo sapiens
cttcaggctccctgc

SEQ ID NO: 1220199 - DNA, 15 bp, Homo sapiens
accttcaggctccct

SEQ ID NO: 1220200 - DNA, 15 bp, Homo sapiens
caccttcaggctccc

SEQ ID NO: 1220201 - DNA, 15 bp, Homo sapiens
gcaccttcaggctcc

SEQ ID NO: 1220202 - DNA, 15 bp, Homo sapiens
tgcaccttcaggctc

SEQ ID NO: 1220203 - DNA, 15 bp, Homo sapiens
ctgcaccttcaggct

SEQ ID NO: 1220204 - DNA, 15 bp, Homo sapiens
cctgcaccttcaggc

SEQ ID NO: 1220205 - DNA, 15 bp, Homo sapiens
ccctgcaccttcagg

SEQ ID NO: 1220206 - DNA, 15 bp, Homo sapiens
accctgcaccttcag

SEQ ID NO: 1220207 - DNA, 15 bp, Homo sapiens
ccaccctgcaccttc

SEQ ID NO: 1220208 - DNA, 15 bp, Homo sapiens
gccaccctgcacctt

SEQ ID NO: 1220209 - DNA, 15 bp, Homo sapiens
tgccaccctgcacct

SEQ ID NO: 1220210 - DNA, 15 bp, Homo sapiens
ctgccaccctgcacc

SEQ ID NO: 1220211 - DNA, 15 bp, Homo sapiens
tctgccaccctgcac

SEQ ID NO: 1220212 - DNA, 15 bp, Homo sapiens
ctctgccaccctgca

SEQ ID NO: 1220213 - DNA, 15 bp, Homo sapiens
cctctgccaccctgc

SEQ ID NO: 1220214 - DNA, 15 bp, Homo sapiens
ccctctgccaccctg

SEQ ID NO: 1220215 - DNA, 15 bp, Homo sapiens
cccctctgccaccct

SEQ ID NO: 1220216 - DNA, 15 bp, Homo sapiens
ccccctctgccaccc

SEQ ID NO: 1220217 - DNA, 15 bp, Homo sapiens
cccccctctgccacc

SEQ ID NO: 1220218 - DNA, 15 bp, Homo sapiens
gcccccctctgccac

SEQ ID NO: 1220219 - DNA, 15 bp, Homo sapiens
ggcccccctctgcca

SEQ ID NO: 1220220 - DNA, 15 bp, Homo sapiens
gggcccccctctgcc

SEQ ID NO: 1220221 - DNA, 15 bp, Homo sapiens
tgggcccccctctgc

SEQ ID NO: 1220222 - DNA, 15 bp, Homo sapiens
ctgggcccccctctg

SEQ ID NO: 1220223 - DNA, 15 bp, Homo sapiens
cctgggcccccctct

SEQ ID NO: 1220224 - DNA, 15 bp, Homo sapiens
ccctgggcccccctc

SEQ ID NO: 1220225 - DNA, 15 bp, Homo sapiens
accctgggcccccct

SEQ ID NO: 1220226 - DNA, 15 bp, Homo sapiens
caccctgggcccccc

SEQ ID NO: 1220227 - DNA, 15 bp, Homo sapiens
ccaccctgggccccc

SEQ ID NO: 1220228 - DNA, 15 bp, Homo sapiens
accaccctgggcccc

SEQ ID NO: 1220229 - DNA, 15 bp, Homo sapiens
caccaccctgggccc

SEQ ID NO: 1220230 - DNA, 15 bp, Homo sapiens
ccaccaccctgggcc

SEQ ID NO: 1220231 - DNA, 15 bp, Homo sapiens
gccaccaccctgggc

SEQ ID NO: 1220232 - DNA, 15 bp, Homo sapiens
ggccaccaccctggg

SEQ ID NO: 1220233 - DNA, 15 bp, Homo sapiens
aggccaccaccctgg

SEQ ID NO: 1220234 - DNA, 15 bp, Homo sapiens
aaggccaccaccctg

SEQ ID NO: 1220235 - DNA, 15 bp, Homo sapiens
caaggccaccaccct

SEQ ID NO: 1220236 - DNA, 15 bp, Homo sapiens
ccaaggccaccaccc

SEQ ID NO: 1220237 - DNA, 15 bp, Homo sapiens
gccaaggccaccacc

SEQ ID NO: 1220238 - DNA, 15 bp, Homo sapiens
ggccaaggccaccac

SEQ ID NO: 1220239 - DNA, 15 bp, Homo sapiens
tggccaaggccacca

SEQ ID NO: 1220240 - DNA, 15 bp, Homo sapiens
ctggccaaggccacc

SEQ ID NO: 1220241 - DNA, 15 bp, Homo sapiens
cctggccaaggccac

SEQ ID NO: 1220242 - DNA, 15 bp, Homo sapiens
ccctggccaaggcca

SEQ ID NO: 1220243 - DNA, 15 bp, Homo sapiens
tccctggccaaggcc

SEQ ID NO: 1220244 - DNA, 15 bp, Homo sapiens
ttccctggccaaggc

SEQ ID NO: 1220245 - DNA, 15 bp, Homo sapiens
attccctggccaagg

SEQ ID NO: 1220246 - DNA, 15 bp, Homo sapiens
gattccctggccaag

SEQ ID NO: 1220247 - DNA, 15 bp, Homo sapiens
agattccctggccaa

SEQ ID NO: 1220248 - DNA, 15 bp, Homo sapiens
gagattccctggcca

SEQ ID NO: 1220249 - DNA, 15 bp, Homo sapiens
agagattccctggcc

SEQ ID NO: 1220250 - DNA, 15 bp, Homo sapiens
tagagattccctggc

SEQ ID NO: 1220251 - DNA, 15 bp, Homo sapiens
ctagagattccctgg

SEQ ID NO: 1220252 - DNA, 15 bp, Homo sapiens
tctagagattccctg

SEQ ID NO: 1220253 - DNA, 15 bp, Homo sapiens
atctagagattccct

SEQ ID NO: 1220254 - DNA, 15 bp, Homo sapiens
catctagagattccc

SEQ ID NO: 1220255 - DNA, 15 bp, Homo sapiens
acatctagagattcc

SEQ ID NO: 1220256 - DNA, 15 bp, Homo sapiens
cacatctagagattc

SEQ ID NO: 1220257 - DNA, 15 bp, Homo sapiens
tcacatctagagatt

SEQ ID NO: 1220258 - DNA, 15 bp, Homo sapiens
ttcacatctagagat

SEQ ID NO: 1220259 - DNA, 15 bp, Homo sapiens
tttcacatctagaga

SEQ ID NO: 1220260 - DNA, 15 bp, Homo sapiens
ttttcacatctagag

SEQ ID NO: 1220261 - DNA, 15 bp, Homo sapiens
attttcacatctaga

SEQ ID NO: 1220262 - DNA, 15 bp, Homo sapiens
aattttcacatctag

SEQ ID NO: 1220263 - DNA, 15 bp, Homo sapiens
caattttcacatcta

SEQ ID NO: 1220264 - DNA, 15 bp, Homo sapiens
gcaattttcacatct

SEQ ID NO: 1220265 - DNA, 15 bp, Homo sapiens
agcaattttcacatc

SEQ ID NO: 1220266 - DNA, 15 bp, Homo sapiens
gagcaattttcacat

SEQ ID NO: 1220267 - DNA, 15 bp, Homo sapiens
agagcaattttcaca

SEQ ID NO: 1220268 - DNA, 15 bp, Homo sapiens
cagagcaattttcac

SEQ ID NO: 1220269 - DNA, 15 bp, Homo sapiens
ccagagcaattttca

SEQ ID NO: 1220270 - DNA, 15 bp, Homo sapiens
gccagagcaattttc

SEQ ID NO: 1220271 - DNA, 15 bp, Homo sapiens
tgccagagcaatttt

SEQ ID NO: 1220272 - DNA, 15 bp, Homo sapiens
ctgccagagcaattt

SEQ ID NO: 1220273 - DNA, 15 bp, Homo sapiens
gctgccagagcaatt

SEQ ID NO: 1220274 - DNA, 15 bp, Homo sapiens
ggctgccagagcaat

SEQ ID NO: 1220275 - DNA, 15 bp, Homo sapiens
gggctgccagagcaa

SEQ ID NO: 1220276 - DNA, 15 bp, Homo sapiens
ggggctgccagagca

SEQ ID NO: 1220277 - DNA, 15 bp, Homo sapiens
tggggctgccagagc

SEQ ID NO: 1220278 - DNA, 15 bp, Homo sapiens
ctggggctgccagag

SEQ ID NO: 1220279 - DNA, 15 bp, Homo sapiens
cctggggctgccaga

SEQ ID NO: 1220280 - DNA, 15 bp, Homo sapiens
gcctggggctgccag

SEQ ID NO: 1220281 - DNA, 15 bp, Homo sapiens
agcctggggctgcca

SEQ ID NO: 1220282 - DNA, 15 bp, Homo sapiens
aagcctggggctgcc

SEQ ID NO: 1220283 - DNA, 15 bp, Homo sapiens
caagcctggggctgc

SEQ ID NO: 1220284 - DNA, 15 bp, Homo sapiens
gcaagcctggggctg

SEQ ID NO: 1220285 - DNA, 15 bp, Homo sapiens
ggcaagcctggggct

SEQ ID NO: 1220286 - DNA, 15 bp, Homo sapiens
gggcaagcctggggc

SEQ ID NO: 1220287 - DNA, 15 bp, Homo sapiens
agggcaagcctgggg

SEQ ID NO: 1220288 - DNA, 15 bp, Homo sapiens
aagggcaagcctggg

SEQ ID NO: 1220289 - DNA, 15 bp, Homo sapiens
aaagggcaagcctgg

SEQ ID NO: 1220290 - DNA, 15 bp, Homo sapiens
caaagggcaagcctg

SEQ ID NO: 1220291 - DNA, 15 bp, Homo sapiens
gcaaagggcaagcct

SEQ ID NO: 1220292 - DNA, 15 bp, Homo sapiens
agcaaagggcaagcc

SEQ ID NO: 1220293 - DNA, 15 bp, Homo sapiens
aagcaaagggcaagc

SEQ ID NO: 1220294 - DNA, 15 bp, Homo sapiens
caagcaaagggcaag

SEQ ID NO: 1220295 - DNA, 15 bp, Homo sapiens
ccaagcaaagggcaa

SEQ ID NO: 1220296 - DNA, 15 bp, Homo sapiens
cccaagcaaagggca

SEQ ID NO: 1220297 - DNA, 15 bp, Homo sapiens
acccaagcaaagggc

SEQ ID NO: 1220298 - DNA, 15 bp, Homo sapiens
gacccaagcaaaggg

SEQ ID NO: 1220299 - DNA, 15 bp, Homo sapiens
ggacccaagcaaagg

SEQ ID NO: 1220300 - DNA, 15 bp, Homo sapiens
aggacccaagcaaag

SEQ ID NO: 1220301 - DNA, 15 bp, Homo sapiens
caggacccaagcaaa

SEQ ID NO: 1220302 - DNA, 15 bp, Homo sapiens
tcaggacccaagcaa

SEQ ID NO: 1220303 - DNA, 15 bp, Homo sapiens
ttcaggacccaagca

SEQ ID NO: 1220304 - DNA, 15 bp, Homo sapiens
gttcaggacccaagc

SEQ ID NO: 1220305 - DNA, 15 bp, Homo sapiens
tgttcaggacccaag

SEQ ID NO: 1220306 - DNA, 15 bp, Homo sapiens
gtgttcaggacccaa

SEQ ID NO: 1220307 - DNA, 15 bp, Homo sapiens
agtgttcaggaccca

SEQ ID NO: 1220308 - DNA, 15 bp, Homo sapiens
gagtgttcaggaccc

SEQ ID NO: 1220309 - DNA, 15 bp, Homo sapiens
tgagtgttcaggacc

SEQ ID NO: 1220310 - DNA, 15 bp, Homo sapiens
ctgagtgttcaggac

SEQ ID NO: 1220311 - DNA, 15 bp, Homo sapiens
gctgagtgttcagga

SEQ ID NO: 1220312 - DNA, 15 bp, Homo sapiens
tgctgagtgttcagg

SEQ ID NO: 1220313 - DNA, 15 bp, Homo sapiens
atgctgagtgttcag

SEQ ID NO: 1220314 - DNA, 15 bp, Homo sapiens
tatgctgagtgttca

SEQ ID NO: 1220315 - DNA, 15 bp, Homo sapiens
atatgctgagtgttc

SEQ ID NO: 1220316 - DNA, 15 bp, Homo sapiens
aatatgctgagtgtt

SEQ ID NO: 1220317 - DNA, 15 bp, Homo sapiens
taatatgctgagtgt

SEQ ID NO: 1220318 - DNA, 15 bp, Homo sapiens
gtaatatgctgagtg

SEQ ID NO: 1220319 - DNA, 15 bp, Homo sapiens
tgtaatatgctgagt

SEQ ID NO: 1220320 - DNA, 15 bp, Homo sapiens
gtgtaatatgctgag

SEQ ID NO: 1220321 - DNA, 15 bp, Homo sapiens
agtgtaatatgctga

SEQ ID NO: 1220322 - DNA, 15 bp, Homo sapiens
gagtgtaatatgctg

SEQ ID NO: 1220323 - DNA, 15 bp, Homo sapiens
tgagtgtaatatgct

SEQ ID NO: 1220324 - DNA, 15 bp, Homo sapiens
ctgagtgtaatatgc

SEQ ID NO: 1220325 - DNA, 15 bp, Homo sapiens
cctgagtgtaatatg

SEQ ID NO: 1220326 - DNA, 15 bp, Homo sapiens
ccctgagtgtaatat

SEQ ID NO: 1220327 - DNA, 15 bp, Homo sapiens
tccctgagtgtaata

SEQ ID NO: 1220328 - DNA, 15 bp, Homo sapiens
ctccctgagtgtaat

SEQ ID NO: 1220329 - DNA, 15 bp, Homo sapiens
gctccctgagtgtaa

SEQ ID NO: 1220330 - DNA, 15 bp, Homo sapiens
tgctccctgagtgta

SEQ ID NO: 1220331 - DNA, 15 bp, Homo sapiens
atgctccctgagtgt

SEQ ID NO: 1220332 - DNA, 15 bp, Homo sapiens
catgctccctgagtg

SEQ ID NO: 1220333 - DNA, 15 bp, Homo sapiens
tcatgctccctgagt

SEQ ID NO: 1220334 - DNA, 15 bp, Homo sapiens
ctcatgctccctgag

SEQ ID NO: 1220335 - DNA, 15 bp, Homo sapiens
gctcatgctccctga

SEQ ID NO: 1220336 - DNA, 15 bp, Homo sapiens
ggctcatgctccctg

SEQ ID NO: 1220337 - DNA, 15 bp, Homo sapiens
cggctcatgctccct

SEQ ID NO: 1220338 - DNA, 15 bp, Homo sapiens
gcggctcatgctccc

SEQ ID NO: 1220339 - DNA, 15 bp, Homo sapiens
agcggctcatgctcc

SEQ ID NO: 1220340 - DNA, 15 bp, Homo sapiens
aagcggctcatgctc

SEQ ID NO: 1220341 - DNA, 15 bp, Homo sapiens
gaagcggctcatgct

SEQ ID NO: 1220342 - DNA, 15 bp, Homo sapiens
ggaagcggctcatgc

SEQ ID NO: 1220343 - DNA, 15 bp, Homo sapiens
aggaagcggctcatg

SEQ ID NO: 1220344 - DNA, 15 bp, Homo sapiens
aaggaagcggctcat

SEQ ID NO: 1220345 - DNA, 15 bp, Homo sapiens
gaaggaagcggctca

SEQ ID NO: 1220346 - DNA, 15 bp, Homo sapiens
tgaaggaagcggctc

SEQ ID NO: 1220347 - DNA, 15 bp, Homo sapiens
atgaaggaagcggct

SEQ ID NO: 1220348 - DNA, 15 bp, Homo sapiens
aatgaaggaagcggc

SEQ ID NO: 1220349 - DNA, 15 bp, Homo sapiens
gaatgaaggaagcgg

SEQ ID NO: 1220350 - DNA, 15 bp, Homo sapiens
agaatgaaggaagcg

SEQ ID NO: 1220351 - DNA, 15 bp, Homo sapiens
cagaatgaaggaagc

SEQ ID NO: 1220352 - DNA, 15 bp, Homo sapiens
gcagaatgaaggaag

SEQ ID NO: 1220353 - DNA, 15 bp, Homo sapiens
tgcagaatgaaggaa

SEQ ID NO: 1220354 - DNA, 15 bp, Homo sapiens
ctgcagaatgaagga

SEQ ID NO: 1220355 - DNA, 15 bp, Homo sapiens
cctgcagaatgaagg

SEQ ID NO: 1220356 - DNA, 15 bp, Homo sapiens
ccctgcagaatgaag

SEQ ID NO: 1220357 - DNA, 15 bp, Homo sapiens
cccctgcagaatgaa

SEQ ID NO: 1220358 - DNA, 15 bp, Homo sapiens
tcccctgcagaatga

SEQ ID NO: 1220359 - DNA, 15 bp, Homo sapiens
gtcccctgcagaatg

SEQ ID NO: 1220360 - DNA, 15 bp, Homo sapiens
tgtcccctgcagaat

SEQ ID NO: 1220361 - DNA, 15 bp, Homo sapiens
ctgtcccctgcagaa

SEQ ID NO: 1220362 - DNA, 15 bp, Homo sapiens
actgtcccctgcaga

SEQ ID NO: 1220363 - DNA, 15 bp, Homo sapiens
aactgtcccctgcag

SEQ ID NO: 1220364 - DNA, 15 bp, Homo sapiens
caactgtcccctgca

SEQ ID NO: 1220365 - DNA, 15 bp, Homo sapiens
gcaactgtcccctgc

SEQ ID NO: 1220366 - DNA, 15 bp, Homo sapiens
ggcaactgtcccctg

SEQ ID NO: 1220367 - DNA, 15 bp, Homo sapiens
aggcaactgtcccct

SEQ ID NO: 1220368 - DNA, 15 bp, Homo sapiens
aaggcaactgtcccc

SEQ ID NO: 1220369 - DNA, 15 bp, Homo sapiens
gaaggcaactgtccc

SEQ ID NO: 1220370 - DNA, 15 bp, Homo sapiens
ggaaggcaactgtcc

SEQ ID NO: 1220371 - DNA, 15 bp, Homo sapiens
gggaaggcaactgtc

SEQ ID NO: 1220372 - DNA, 15 bp, Homo sapiens
tgggaaggcaactgt

SEQ ID NO: 1220373 - DNA, 15 bp, Homo sapiens
ctgggaaggcaactg

SEQ ID NO: 1220374 - DNA, 15 bp, Homo sapiens
cctgggaaggcaact

SEQ ID NO: 1220375 - DNA, 15 bp, Homo sapiens
acctgggaaggcaac

SEQ ID NO: 1220376 - DNA, 15 bp, Homo sapiens
tacctgggaaggcaa

SEQ ID NO: 1220377 - DNA, 15 bp, Homo sapiens
gtacctgggaaggca

SEQ ID NO: 1220378 - DNA, 15 bp, Homo sapiens
ggtacctgggaaggc

SEQ ID NO: 1220379 - DNA, 15 bp, Homo sapiens
aggtacctgggaagg

SEQ ID NO: 1220380 - DNA, 15 bp, Homo sapiens
caggtacctgggaag

SEQ ID NO: 1220381 - DNA, 15 bp, Homo sapiens
ccaggtacctgggaa

SEQ ID NO: 1220382 - DNA, 15 bp, Homo sapiens
gccaggtacctggga

SEQ ID NO: 1220383 - DNA, 15 bp, Homo sapiens
ggccaggtacctggg

SEQ ID NO: 1220384 - DNA, 15 bp, Homo sapiens
aggccaggtacctgg

SEQ ID NO: 1220385 - DNA, 15 bp, Homo sapiens
caggccaggtacctg

SEQ ID NO: 1220386 - DNA, 15 bp, Homo sapiens
tcaggccaggtacct

SEQ ID NO: 1220387 - DNA, 15 bp, Homo sapiens
ttcaggccaggtacc

SEQ ID NO: 1220388 - DNA, 15 bp, Homo sapiens
tttcaggccaggtac

SEQ ID NO: 1220389 - DNA, 15 bp, Homo sapiens
atttcaggccaggta

SEQ ID NO: 1220390 - DNA, 15 bp, Homo sapiens
gatttcaggccaggt

SEQ ID NO: 1220391 - DNA, 15 bp, Homo sapiens
ggatttcaggccagg

SEQ ID NO: 1220392 - DNA, 15 bp, Homo sapiens
aggatttcaggccag

SEQ ID NO: 1220393 - DNA, 15 bp, Homo sapiens
caggatttcaggcca

SEQ ID NO: 1220394 - DNA, 15 bp, Homo sapiens
tcaggatttcaggcc

SEQ ID NO: 1220395 - DNA, 15 bp, Homo sapiens
ctcaggatttcaggc

SEQ ID NO: 1220396 - DNA, 15 bp, Homo sapiens
actcaggatttcagg

SEQ ID NO: 1220397 - DNA, 15 bp, Homo sapiens
cactcaggatttcag

SEQ ID NO: 1220398 - DNA, 15 bp, Homo sapiens
gcactcaggatttca

SEQ ID NO: 1220399 - DNA, 15 bp, Homo sapiens
agcactcaggatttc

SEQ ID NO: 1220400 - DNA, 15 bp, Homo sapiens
cagcactcaggattt

SEQ ID NO: 1220401 - DNA, 15 bp, Homo sapiens
tcagcactcaggatt

SEQ ID NO: 1220402 - DNA, 15 bp, Homo sapiens
ctcagcactcaggat

SEQ ID NO: 1220403 - DNA, 15 bp, Homo sapiens
cctcagcactcagga

SEQ ID NO: 1220404 - DNA, 15 bp, Homo sapiens
tcctcagcactcagg

SEQ ID NO: 1220405 - DNA, 15 bp, Homo sapiens
ttcctcagcactcag

SEQ ID NO: 1220406 - DNA, 15 bp, Homo sapiens
cttcctcagcactca

SEQ ID NO: 1220407 - DNA, 15 bp, Homo sapiens
ccttcctcagcactc

SEQ ID NO: 1220408 - DNA, 15 bp, Homo sapiens
cccttcctcagcact

SEQ ID NO: 1220409 - DNA, 15 bp, Homo sapiens
gcccttcctcagcac

SEQ ID NO: 1220410 - DNA, 15 bp, Homo sapiens
tgcccttcctcagca

SEQ ID NO: 1220411 - DNA, 15 bp, Homo sapiens
atgcccttcctcagc

SEQ ID NO: 1220412 - DNA, 15 bp, Homo sapiens
catgcccttcctcag

SEQ ID NO: 1220413 - DNA, 15 bp, Homo sapiens
ccatgcccttcctca

SEQ ID NO: 1220414 - DNA, 15 bp, Homo sapiens
gccatgcccttcctc

SEQ ID NO: 1220415 - DNA, 15 bp, Homo sapiens
agccatgcccttcct

SEQ ID NO: 1220416 - DNA, 15 bp, Homo sapiens
cagccatgcccttcc

SEQ ID NO: 1220417 - DNA, 15 bp, Homo sapiens
gcagccatgcccttc

SEQ ID NO: 1220418 - DNA, 15 bp, Homo sapiens
agcagccatgccctt

SEQ ID NO: 1220419 - DNA, 15 bp, Homo sapiens
cagcagccatgccct

SEQ ID NO: 1220420 - DNA, 15 bp, Homo sapiens
ccagcagccatgccc

SEQ ID NO: 1220421 - DNA, 15 bp, Homo sapiens
tccagcagccatgcc

SEQ ID NO: 1220422 - DNA, 15 bp, Homo sapiens
gtccagcagccatgc

SEQ ID NO: 1220423 - DNA, 15 bp, Homo sapiens
tgtccagcagccatg

SEQ ID NO: 1220424 - DNA, 15 bp, Homo sapiens
ctgtccagcagccat

SEQ ID NO: 1220425 - DNA, 15 bp, Homo sapiens
cctgtccagcagcca

SEQ ID NO: 1220426 - DNA, 15 bp, Homo sapiens
gcctgtccagcagcc

SEQ ID NO: 1220427 - DNA, 15 bp, Homo sapiens
cgcctgtccagcagc

SEQ ID NO: 1220428 - DNA, 15 bp, Homo sapiens
acgcctgtccagcag

SEQ ID NO: 1220429 - DNA, 15 bp, Homo sapiens
gacgcctgtccagca

SEQ ID NO: 1220430 - DNA, 15 bp, Homo sapiens
tgacgcctgtccagc

SEQ ID NO: 1220431 - DNA, 15 bp, Homo sapiens
atgacgcctgtccag

SEQ ID NO: 1220432 - DNA, 15 bp, Homo sapiens
catgacgcctgtcca

SEQ ID NO: 1220433 - DNA, 15 bp, Homo sapiens
ccatgacgcctgtcc

SEQ ID NO: 1220434 - DNA, 15 bp, Homo sapiens
accatgacgcctgtc

SEQ ID NO: 1220435 - DNA, 15 bp, Homo sapiens
aaccatgacgcctgt

SEQ ID NO: 1220436 - DNA, 15 bp, Homo sapiens
caaccatgacgcctg

SEQ ID NO: 1220437 - DNA, 15 bp, Homo sapiens
acaaccatgacgcct

SEQ ID NO: 1220438 - DNA, 15 bp, Homo sapiens
tacaaccatgacgcc

SEQ ID NO: 1220439 - DNA, 15 bp, Homo sapiens
gtacaaccatgacgc

SEQ ID NO: 1220440 - DNA, 15 bp, Homo sapiens
ggtacaaccatgacg

SEQ ID NO: 1220441 - DNA, 15 bp, Homo sapiens
tggtacaaccatgac

SEQ ID NO: 1220442 - DNA, 15 bp, Homo sapiens
ctggtacaaccatga

SEQ ID NO: 1220443 - DNA, 15 bp, Homo sapiens
cctggtacaaccatg

SEQ ID NO: 1220444 - DNA, 15 bp, Homo sapiens
acctggtacaaccat

SEQ ID NO: 1220445 - DNA, 15 bp, Homo sapiens
gacctggtacaacca

SEQ ID NO: 1220446 - DNA, 15 bp, Homo sapiens
ggacctggtacaacc

SEQ ID NO: 1220447 - DNA, 15 bp, Homo sapiens
gggacctggtacaac

SEQ ID NO: 1220448 - DNA, 15 bp, Homo sapiens
tgggacctggtacaa

SEQ ID NO: 1220449 - DNA, 15 bp, Homo sapiens
ctgggacctggtaca

SEQ ID NO: 1220450 - DNA, 15 bp, Homo sapiens
cctgggacctggtac

SEQ ID NO: 1220451 - DNA, 15 bp, Homo sapiens
ccctgggacctggta

SEQ ID NO: 1220452 - DNA, 15 bp, Homo sapiens
tccctgggacctggt

SEQ ID NO: 1220453 - DNA, 15 bp, Homo sapiens
ctccctgggacctgg

SEQ ID NO: 1220454 - DNA, 15 bp, Homo sapiens
tctccctgggacctg

SEQ ID NO: 1220455 - DNA, 15 bp, Homo sapiens
gtctccctgggacct

SEQ ID NO: 1220456 - DNA, 15 bp, Homo sapiens
tgtctccctgggacc

SEQ ID NO: 1220457 - DNA, 15 bp, Homo sapiens
ctgtctccctgggac

SEQ ID NO: 1220458 - DNA, 15 bp, Homo sapiens
gctgtctccctggga

SEQ ID NO: 1220459 - DNA, 15 bp, Homo sapiens
agctgtctccctggg

SEQ ID NO: 1220460 - DNA, 15 bp, Homo sapiens
cagctgtctccctgg

SEQ ID NO: 1220461 - DNA, 15 bp, Homo sapiens
acagctgtctccctg

SEQ ID NO: 1220462 - DNA, 15 bp, Homo sapiens
gacagctgtctccct

SEQ ID NO: 1220463 - DNA, 15 bp, Homo sapiens
tgacagctgtctccc

SEQ ID NO: 1220464 - DNA, 15 bp, Homo sapiens
atgacagctgtctcc

SEQ ID NO: 1220465 - DNA, 15 bp, Homo sapiens
catgacagctgtctc

SEQ ID NO: 1220466 - DNA, 15 bp, Homo sapiens
ccatgacagctgtct

SEQ ID NO: 1220467 - DNA, 15 bp, Homo sapiens
gccatgacagctgtc

SEQ ID NO: 1220468 - DNA, 15 bp, Homo sapiens
agccatgacagctgt

SEQ ID NO: 1220469 - DNA, 15 bp, Homo sapiens
aagccatgacagctg

SEQ ID NO: 1220470 - DNA, 15 bp, Homo sapiens
taagccatgacagct

SEQ ID NO: 1220471 - DNA, 15 bp, Homo sapiens
ataagccatgacagc

SEQ ID NO: 1220472 - DNA, 15 bp, Homo sapiens
cataagccatgacag

SEQ ID NO: 1220473 - DNA, 15 bp, Homo sapiens
gcataagccatgaca

SEQ ID NO: 1220474 - DNA, 15 bp, Homo sapiens
agcataagccatgac

SEQ ID NO: 1220475 - DNA, 15 bp, Homo sapiens
tagcataagccatga

SEQ ID NO: 1220476 - DNA, 15 bp, Homo sapiens
atagcataagccatg

SEQ ID NO: 1220477 - DNA, 15 bp, Homo sapiens
tatagcataagccat

SEQ ID NO: 1220478 - DNA, 15 bp, Homo sapiens
ctatagcataagcca

SEQ ID NO: 1220479 - DNA, 15 bp, Homo sapiens
cctatagcataagcc

SEQ ID NO: 1220480 - DNA, 15 bp, Homo sapiens
acctatagcataagc

SEQ ID NO: 1220481 - DNA, 15 bp, Homo sapiens
gacctatagcataag

SEQ ID NO: 1220482 - DNA, 15 bp, Homo sapiens
cgacctatagcataa

SEQ ID NO: 1220483 - DNA, 15 bp, Homo sapiens
gcgacctatagcata

SEQ ID NO: 1220484 - DNA, 15 bp, Homo sapiens
ggcgacctatagcat

SEQ ID NO: 1220485 - DNA, 15 bp, Homo sapiens
aggcgacctatagca

SEQ ID NO: 1220486 - DNA, 15 bp, Homo sapiens
caggcgacctatagc

SEQ ID NO: 1220487 - DNA, 15 bp, Homo sapiens
tcaggcgacctatag

SEQ ID NO: 1220488 - DNA, 15 bp, Homo sapiens
ctcaggcgacctata

SEQ ID NO: 1220489 - DNA, 15 bp, Homo sapiens
gctcaggcgacctat

SEQ ID NO: 1220490 - DNA, 15 bp, Homo sapiens
ggctcaggcgaccta

SEQ ID NO: 1220491 - DNA, 15 bp, Homo sapiens
gggctcaggcgacct

SEQ ID NO: 1220492 - DNA, 15 bp, Homo sapiens
ggggctcaggcgacc

SEQ ID NO: 1220493 - DNA, 15 bp, Homo sapiens
gggggctcaggcgac

SEQ ID NO: 1220494 - DNA, 15 bp, Homo sapiens
tgggggctcaggcga

SEQ ID NO: 1220495 - DNA, 15 bp, Homo sapiens
ctgggggctcaggcg

SEQ ID NO: 1220496 - DNA, 15 bp, Homo sapiens
gctgggggctcaggc

SEQ ID NO: 1220497 - DNA, 15 bp, Homo sapiens
agctgggggctcagg

SEQ ID NO: 1220498 - DNA, 15 bp, Homo sapiens
aagctgggggctcag

SEQ ID NO: 1220499 - DNA, 15 bp, Homo sapiens
gaagctgggggctca

SEQ ID NO: 1220500 - DNA, 15 bp, Homo sapiens
ggaagctgggggctc

SEQ ID NO: 1220501 - DNA, 15 bp, Homo sapiens
tggaagctgggggct

SEQ ID NO: 1220502 - DNA, 15 bp, Homo sapiens
gtggaagctgggggc

SEQ ID NO: 1220503 - DNA, 15 bp, Homo sapiens
ggtggaagctggggg

SEQ ID NO: 1220504 - DNA, 15 bp, Homo sapiens
gggtggaagctgggg

SEQ ID NO: 1220505 - DNA, 15 bp, Homo sapiens
tgggtggaagctggg

SEQ ID NO: 1220506 - DNA, 15 bp, Homo sapiens
ctgggtggaagctgg

SEQ ID NO: 1220507 - DNA, 15 bp, Homo sapiens
cctgggtggaagctg

SEQ ID NO: 1220508 - DNA, 15 bp, Homo sapiens
tcctgggtggaagct

SEQ ID NO: 1220509 - DNA, 15 bp, Homo sapiens
atcctgggtggaagc

SEQ ID NO: 1220510 - DNA, 15 bp, Homo sapiens
catcctgggtggaag

SEQ ID NO: 1220511 - DNA, 15 bp, Homo sapiens
ccatcctgggtggaa

SEQ ID NO: 1220512 - DNA, 15 bp, Homo sapiens
gccatcctgggtgga

SEQ ID NO: 1220513 - DNA, 15 bp, Homo sapiens
tgccatcctgggtgg

SEQ ID NO: 1220514 - DNA, 15 bp, Homo sapiens
ttgccatcctgggtg

SEQ ID NO: 1220515 - DNA, 15 bp, Homo sapiens
tttgccatcctgggt

SEQ ID NO: 1220516 - DNA, 15 bp, Homo sapiens
gtttgccatcctggg

SEQ ID NO: 1220517 - DNA, 15 bp, Homo sapiens
agtttgccatcctgg

SEQ ID NO: 1220518 - DNA, 15 bp, Homo sapiens
cagtttgccatcctg

SEQ ID NO: 1220519 - DNA, 15 bp, Homo sapiens
acagtttgccatcct

SEQ ID NO: 1220520 - DNA, 15 bp, Homo sapiens
tacagtttgccatcc

SEQ ID NO: 1220521 - DNA, 15 bp, Homo sapiens
ctacagtttgccatc

SEQ ID NO: 1220522 - DNA, 15 bp, Homo sapiens
gctacagtttgccat

SEQ ID NO: 1220523 - DNA, 15 bp, Homo sapiens
tgctacagtttgcca

SEQ ID NO: 1220524 - DNA, 15 bp, Homo sapiens
ttgctacagtttgcc

SEQ ID NO: 1220525 - DNA, 15 bp, Homo sapiens
cttgctacagtttgc

SEQ ID NO: 1220526 - DNA, 15 bp, Homo sapiens
ccttgctacagtttg

SEQ ID NO: 1220527 - DNA, 15 bp, Homo sapiens
tccttgctacagttt

SEQ ID NO: 1220528 - DNA, 15 bp, Homo sapiens
gtccttgctacagtt

SEQ ID NO: 1220529 - DNA, 15 bp, Homo sapiens
ggtccttgctacagt

SEQ ID NO: 1220530 - DNA, 15 bp, Homo sapiens
gggtccttgctacag

SEQ ID NO: 1220531 - DNA, 15 bp, Homo sapiens
ggggtccttgctaca

SEQ ID NO: 1220532 - DNA, 15 bp, Homo sapiens
tggggtccttgctac

SEQ ID NO: 1220533 - DNA, 15 bp, Homo sapiens
gtggggtccttgcta

SEQ ID NO: 1220534 - DNA, 15 bp, Homo sapiens
ggtggggtccttgct

SEQ ID NO: 1220535 - DNA, 15 bp, Homo sapiens
tggtggggtccttgc

SEQ ID NO: 1220536 - DNA, 15 bp, Homo sapiens
ctggtggggtccttg

SEQ ID NO: 1220537 - DNA, 15 bp, Homo sapiens
actggtggggtcctt

SEQ ID NO: 1220538 - DNA, 15 bp, Homo sapiens
tactggtggggtcct

SEQ ID NO: 1220539 - DNA, 15 bp, Homo sapiens
ttactggtggggtcc

SEQ ID NO: 1220540 - DNA, 15 bp, Homo sapiens
tttactggtggggtc

SEQ ID NO: 1220541 - DNA, 15 bp, Homo sapiens
gtttactggtggggt

SEQ ID NO: 1220542 - DNA, 15 bp, Homo sapiens
tgtttactggtgggg

SEQ ID NO: 1220543 - DNA, 15 bp, Homo sapiens
ctgtttactggtggg

SEQ ID NO: 1220544 - DNA, 15 bp, Homo sapiens
cctgtttactggtgg

SEQ ID NO: 1220545 - DNA, 15 bp, Homo sapiens
tcctgtttactggtg

SEQ ID NO: 1220546 - DNA, 15 bp, Homo sapiens
gtcctgtttactggt

SEQ ID NO: 1220547 - DNA, 15 bp, Homo sapiens
tgtcctgtttactgg

SEQ ID NO: 1220548 - DNA, 15 bp, Homo sapiens
ttgtcctgtttactg

SEQ ID NO: 1220549 - DNA, 15 bp, Homo sapiens
gttgtcctgtttact

SEQ ID NO: 1220550 - DNA, 15 bp, Homo sapiens
tgttgtcctgtttac

SEQ ID NO: 1220551 - DNA, 15 bp, Homo sapiens
ctgttgtcctgttta

SEQ ID NO: 1220552 - DNA, 15 bp, Homo sapiens
gctgttgtcctgttt

SEQ ID NO: 1220553 - DNA, 15 bp, Homo sapiens
cgctgttgtcctgtt

SEQ ID NO: 1220554 - DNA, 15 bp, Homo sapiens
tcgctgttgtcctgt

SEQ ID NO: 1220555 - DNA, 15 bp, Homo sapiens
atcgctgttgtcctg

SEQ ID NO: 1220556 - DNA, 15 bp, Homo sapiens
gatcgctgttgtcct

SEQ ID NO: 1220557 - DNA, 15 bp, Homo sapiens
tgatcgctgttgtcc

SEQ ID NO: 1220558 - DNA, 15 bp, Homo sapiens
atgatcgctgttgtc

SEQ ID NO: 1220559 - DNA, 15 bp, Homo sapiens
gatgatcgctgttgt

SEQ ID NO: 1220560 - DNA, 15 bp, Homo sapiens
agatgatcgctgttg

SEQ ID NO: 1220561 - DNA, 15 bp, Homo sapiens
gagatgatcgctgtt

SEQ ID NO: 1220562 - DNA, 15 bp, Homo sapiens
ggagatgatcgctgt

SEQ ID NO: 1220563 - DNA, 15 bp, Homo sapiens
aggagatgatcgctg

SEQ ID NO: 1220564 - DNA, 15 bp, Homo sapiens
aaggagatgatcgct

SEQ ID NO: 1220565 - DNA, 15 bp, Homo sapiens
caaggagatgatcgc

SEQ ID NO: 1220566 - DNA, 15 bp, Homo sapiens
tcaaggagatgatcg

SEQ ID NO: 1220567 - DNA, 15 bp, Homo sapiens
ttcaaggagatgatc

SEQ ID NO: 1220568 - DNA, 15 bp, Homo sapiens
cttcaaggagatgat

SEQ ID NO: 1220569 - DNA, 15 bp, Homo sapiens
ccttcaaggagatga

SEQ ID NO: 1220570 - DNA, 15 bp, Homo sapiens
gccttcaaggagatg

SEQ ID NO: 1220571 - DNA, 15 bp, Homo sapiens
tgccttcaaggagat

SEQ ID NO: 1220572 - DNA, 15 bp, Homo sapiens
ttgccttcaaggaga

SEQ ID NO: 1220573 - DNA, 15 bp, Homo sapiens
tttgccttcaaggag

SEQ ID NO: 1220574 - DNA, 15 bp, Homo sapiens
gtttgccttcaagga

SEQ ID NO: 1220575 - DNA, 15 bp, Homo sapiens
tgtttgccttcaagg

SEQ ID NO: 1220576 - DNA, 15 bp, Homo sapiens
atgtttgccttcaag

SEQ ID NO: 1220577 - DNA, 15 bp, Homo sapiens
catgtttgccttcaa

SEQ ID NO: 1220578 - DNA, 15 bp, Homo sapiens
ccatgtttgccttca

SEQ ID NO: 1220579 - DNA, 15 bp, Homo sapiens
cccatgtttgccttc

SEQ ID NO: 1220580 - DNA, 15 bp, Homo sapiens
ccccatgtttgcctt

SEQ ID NO: 1220581 - DNA, 15 bp, Homo sapiens
gccccatgtttgcct

SEQ ID NO: 1220582 - DNA, 15 bp, Homo sapiens
ggccccatgtttgcc

SEQ ID NO: 1220583 - DNA, 15 bp, Homo sapiens
gggccccatgtttgc

SEQ ID NO: 1220584 - DNA, 15 bp, Homo sapiens
tgggccccatgtttg

SEQ ID NO: 1220585 - DNA, 15 bp, Homo sapiens
ttgggccccatgttt

SEQ ID NO: 1220586 - DNA, 15 bp, Homo sapiens
tttgggccccatgtt

SEQ ID NO: 1220587 - DNA, 15 bp, Homo sapiens
gtttgggccccatgt

SEQ ID NO: 1220588 - DNA, 15 bp, Homo sapiens
tgtttgggccccatg

SEQ ID NO: 1220589 - DNA, 15 bp, Homo sapiens
atgtttgggccccat

SEQ ID NO: 1220590 - DNA, 15 bp, Homo sapiens
catgtttgggcccca

SEQ ID NO: 1220591 - DNA, 15 bp, Homo sapiens
gcatgtttgggcccc

SEQ ID NO: 1220592 - DNA, 15 bp, Homo sapiens
ggcatgtttgggccc

SEQ ID NO: 1220593 - DNA, 15 bp, Homo sapiens
tggcatgtttgggcc

SEQ ID NO: 1220594 - DNA, 15 bp, Homo sapiens
ctggcatgtttgggc

SEQ ID NO: 1220595 - DNA, 15 bp, Homo sapiens
cctggcatgtttggg

SEQ ID NO: 1220596 - DNA, 15 bp, Homo sapiens
gcctggcatgtttgg

SEQ ID NO: 1220597 - DNA, 15 bp, Homo sapiens
agcctggcatgtttg

SEQ ID NO: 1220598 - DNA, 15 bp, Homo sapiens
gagcctggcatgttt

SEQ ID NO: 1220599 - DNA, 15 bp, Homo sapiens
tgagcctggcatgtt

SEQ ID NO: 1220600 - DNA, 15 bp, Homo sapiens
ttgagcctggcatgt

SEQ ID NO: 1220601 - DNA, 15 bp, Homo sapiens
tttgagcctggcatg

SEQ ID NO: 1220602 - DNA, 15 bp, Homo sapiens
ctttgagcctggcat

SEQ ID NO: 1220603 - DNA, 15 bp, Homo sapiens
cctttgagcctggca

SEQ ID NO: 1220604 - DNA, 15 bp, Homo sapiens
ccctttgagcctggc

SEQ ID NO: 1220605 - DNA, 15 bp, Homo sapiens
accctttgagcctgg

SEQ ID NO: 1220606 - DNA, 15 bp, Homo sapiens
gaccctttgagcctg

SEQ ID NO: 1220607 - DNA, 15 bp, Homo sapiens
agaccctttgagcct

SEQ ID NO: 1220608 - DNA, 15 bp, Homo sapiens
gagaccctttgagcc

SEQ ID NO: 1220609 - DNA, 15 bp, Homo sapiens
ggagaccctttgagc

SEQ ID NO: 1220610 - DNA, 15 bp, Homo sapiens
aggagaccctttgag

SEQ ID NO: 1220611 - DNA, 15 bp, Homo sapiens
caggagaccctttga

SEQ ID NO: 1220612 - DNA, 15 bp, Homo sapiens
acaggagaccctttg

SEQ ID NO: 1220613 - DNA, 15 bp, Homo sapiens
aacaggagacccttt

SEQ ID NO: 1220614 - DNA, 15 bp, Homo sapiens
aaacaggagaccctt

SEQ ID NO: 1220615 - DNA, 15 bp, Homo sapiens
caaacaggagaccct

SEQ ID NO: 1220616 - DNA, 15 bp, Homo sapiens
tcaaacaggagaccc

SEQ ID NO: 1220617 - DNA, 15 bp, Homo sapiens
gtcaaacaggagacc

SEQ ID NO: 1220618 - DNA, 15 bp, Homo sapiens
agtcaaacaggagac

SEQ ID NO: 1220619 - DNA, 15 bp, Homo sapiens
gagtcaaacaggaga

SEQ ID NO: 1220620 - DNA, 15 bp, Homo sapiens
agagtcaaacaggag

SEQ ID NO: 1220621 - DNA, 15 bp, Homo sapiens
gagagtcaaacagga

SEQ ID NO: 1220622 - DNA, 15 bp, Homo sapiens
tgagagtcaaacagg

SEQ ID NO: 1220623 - DNA, 15 bp, Homo sapiens
ttgagagtcaaacag

SEQ ID NO: 1220624 - DNA, 15 bp, Homo sapiens
cttgagagtcaaaca

SEQ ID NO: 1220625 - DNA, 15 bp, Homo sapiens
gcttgagagtcaaac

SEQ ID NO: 1220626 - DNA, 15 bp, Homo sapiens
ggcttgagagtcaaa

SEQ ID NO: 1220627 - DNA, 15 bp, Homo sapiens
gggcttgagagtcaa

SEQ ID NO: 1220628 - DNA, 15 bp, Homo sapiens
ggggcttgagagtca

SEQ ID NO: 1220629 - DNA, 15 bp, Homo sapiens
cggggcttgagagtc

SEQ ID NO: 1220630 - DNA, 15 bp, Homo sapiens
ccggggcttgagagt

SEQ ID NO: 1220631 - DNA, 15 bp, Homo sapiens
gccggggcttgagag

SEQ ID NO: 1220632 - DNA, 15 bp, Homo sapiens
ggccggggcttgaga

SEQ ID NO: 1220633 - DNA, 15 bp, Homo sapiens
tggccggggcttgag

SEQ ID NO: 1220634 - DNA, 15 bp, Homo sapiens
ctggccggggcttga

SEQ ID NO: 1220635 - DNA, 15 bp, Homo sapiens
cctggccggggcttg

SEQ ID NO: 1220636 - DNA, 15 bp, Homo sapiens
gcctggccggggctt

SEQ ID NO: 1220637 - DNA, 15 bp, Homo sapiens
ggcctggccggggct

SEQ ID NO: 1220638 - DNA, 15 bp, Homo sapiens
tggcctggccggggc

SEQ ID NO: 1220639 - DNA, 15 bp, Homo sapiens
ttggcctggccgggg

SEQ ID NO: 1220640 - DNA, 15 bp, Homo sapiens
cttggcctggccggg

SEQ ID NO: 1220641 - DNA, 15 bp, Homo sapiens
ccttggcctggccgg

SEQ ID NO: 1220642 - DNA, 15 bp, Homo sapiens
gccttggcctggccg

SEQ ID NO: 1220643 - DNA, 15 bp, Homo sapiens
ggccttggcctggcc

SEQ ID NO: 1220644 - DNA, 15 bp, Homo sapiens
tggccttggcctggc

SEQ ID NO: 1220645 - DNA, 15 bp, Homo sapiens
atggccttggcctgg

SEQ ID NO: 1220646 - DNA, 15 bp, Homo sapiens
gatggccttggcctg

SEQ ID NO: 1220647 - DNA, 15 bp, Homo sapiens
agatggccttggcct

SEQ ID NO: 1220648 - DNA, 15 bp, Homo sapiens
gagatggccttggcc

SEQ ID NO: 1220649 - DNA, 15 bp, Homo sapiens
ggagatggccttggc

SEQ ID NO: 1220650 - DNA, 15 bp, Homo sapiens
tggagatggccttgg

SEQ ID NO: 1220651 - DNA, 15 bp, Homo sapiens
atggagatggccttg

SEQ ID NO: 1220652 - DNA, 15 bp, Homo sapiens
gatggagatggcctt

SEQ ID NO: 1220653 - DNA, 15 bp, Homo sapiens
agatggagatggcct

SEQ ID NO: 1220654 - DNA, 15 bp, Homo sapiens
aagatggagatggcc

SEQ ID NO: 1220655 - DNA, 15 bp, Homo sapiens
aaagatggagatggc

SEQ ID NO: 1220656 - DNA, 15 bp, Homo sapiens
taaagatggagatgg

SEQ ID NO: 1220657 - DNA, 15 bp, Homo sapiens
gtaaagatggagatg

SEQ ID NO: 1220658 - DNA, 15 bp, Homo sapiens
tgtaaagatggagat

SEQ ID NO: 1220659 - DNA, 15 bp, Homo sapiens
ctgtaaagatggaga

SEQ ID NO: 1220660 - DNA, 15 bp, Homo sapiens
tctgtaaagatggag

SEQ ID NO: 1220661 - DNA, 15 bp, Homo sapiens
atctgtaaagatgga

SEQ ID NO: 1220662 - DNA, 15 bp, Homo sapiens
catctgtaaagatgg

SEQ ID NO: 1220663 - DNA, 15 bp, Homo sapiens
tcatctgtaaagatg

SEQ ID NO: 1220664 - DNA, 15 bp, Homo sapiens
ctcatctgtaaagat

SEQ ID NO: 1220665 - DNA, 15 bp, Homo sapiens
tctcatctgtaaaga

SEQ ID NO: 1220666 - DNA, 15 bp, Homo sapiens
ttctcatctgtaaag

SEQ ID NO: 1220667 - DNA, 15 bp, Homo sapiens
cttctcatctgtaaa

SEQ ID NO: 1220668 - DNA, 15 bp, Homo sapiens
ggcttctcatctgta

SEQ ID NO: 1220669 - DNA, 15 bp, Homo sapiens
aggcttctcatctgt

SEQ ID NO: 1220670 - DNA, 15 bp, Homo sapiens
caggcttctcatctg

SEQ ID NO: 1220671 - DNA, 15 bp, Homo sapiens
ccaggcttctcatct

SEQ ID NO: 1220672 - DNA, 15 bp, Homo sapiens
tccaggcttctcatc

SEQ ID NO: 1220673 - DNA, 15 bp, Homo sapiens
ctccaggcttctcat

SEQ ID NO: 1220674 - DNA, 15 bp, Homo sapiens
gctccaggcttctca

SEQ ID NO: 1220675 - DNA, 15 bp, Homo sapiens
agctccaggcttctc

SEQ ID NO: 1220676 - DNA, 15 bp, Homo sapiens
aagctccaggcttct

SEQ ID NO: 1220677 - DNA, 15 bp, Homo sapiens
caagctccaggcttc

SEQ ID NO: 1220678 - DNA, 15 bp, Homo sapiens
gcaagctccaggctt

SEQ ID NO: 1220679 - DNA, 15 bp, Homo sapiens
tgcaagctccaggct

SEQ ID NO: 1220680 - DNA, 15 bp, Homo sapiens
ctgcaagctccaggc

SEQ ID NO: 1220681 - DNA, 15 bp, Homo sapiens
tctgcaagctccagg

SEQ ID NO: 1220682 - DNA, 15 bp, Homo sapiens
ctctgcaagctccag

SEQ ID NO: 1220683 - DNA, 15 bp, Homo sapiens
gctctgcaagctcca

SEQ ID NO: 1220684 - DNA, 15 bp, Homo sapiens
agctctgcaagctcc

SEQ ID NO: 1220685 - DNA, 15 bp, Homo sapiens
tagctctgcaagctc

SEQ ID NO: 1220686 - DNA, 15 bp, Homo sapiens
ttagctctgcaagct

SEQ ID NO: 1220687 - DNA, 15 bp, Homo sapiens
tttagctctgcaagc

SEQ ID NO: 1220688 - DNA, 15 bp, Homo sapiens
gtttagctctgcaag

SEQ ID NO: 1220689 - DNA, 15 bp, Homo sapiens
tgtttagctctgcaa

SEQ ID NO: 1220690 - DNA, 15 bp, Homo sapiens
gtgtttagctctgca

SEQ ID NO: 1220691 - DNA, 15 bp, Homo sapiens
ggtgtttagctctgc

SEQ ID NO: 1220692 - DNA, 15 bp, Homo sapiens
aggtgtttagctctg

SEQ ID NO: 1220693 - DNA, 15 bp, Homo sapiens
caggtgtttagctct

SEQ ID NO: 1220694 - DNA, 15 bp, Homo sapiens
acaggtgtttagctc

SEQ ID NO: 1220695 - DNA, 15 bp, Homo sapiens
aacaggtgtttagct

SEQ ID NO: 1220696 - DNA, 15 bp, Homo sapiens
gaacaggtgtttagc

SEQ ID NO: 1220697 - DNA, 15 bp, Homo sapiens
ggaacaggtgtttag

SEQ ID NO: 1220698 - DNA, 15 bp, Homo sapiens
tggaacaggtgttta

SEQ ID NO: 1220699 - DNA, 15 bp, Homo sapiens
ctggaacaggtgttt

SEQ ID NO: 1220700 - DNA, 15 bp, Homo sapiens
gctggaacaggtgtt

SEQ ID NO: 1220701 - DNA, 15 bp, Homo sapiens
tgctggaacaggtgt

SEQ ID NO: 1220702 - DNA, 15 bp, Homo sapiens
gtgctggaacaggtg

SEQ ID NO: 1220703 - DNA, 15 bp, Homo sapiens
tgtgctggaacaggt

SEQ ID NO: 1220704 - DNA, 15 bp, Homo sapiens
ctgtgctggaacagg

SEQ ID NO: 1220705 - DNA, 15 bp, Homo sapiens
actgtgctggaacag

SEQ ID NO: 1220706 - DNA, 15 bp, Homo sapiens
aactgtgctggaaca

SEQ ID NO: 1220707 - DNA, 15 bp, Homo sapiens
caactgtgctggaac

SEQ ID NO: 1220708 - DNA, 15 bp, Homo sapiens
acaactgtgctggaa

SEQ ID NO: 1220709 - DNA, 15 bp, Homo sapiens
tacaactgtgctgga

SEQ ID NO: 1220710 - DNA, 15 bp, Homo sapiens
ttacaactgtgctgg

SEQ ID NO: 1220711 - DNA, 15 bp, Homo sapiens
cttacaactgtgctg

SEQ ID NO: 1220712 - DNA, 15 bp, Homo sapiens
ccttacaactgtgct

SEQ ID NO: 1220713 - DNA, 15 bp, Homo sapiens
gccttacaactgtgc

SEQ ID NO: 1220714 - DNA, 15 bp, Homo sapiens
tgccttacaactgtg

SEQ ID NO: 1220715 - DNA, 15 bp, Homo sapiens
gtgccttacaactgt

SEQ ID NO: 1220716 - DNA, 15 bp, Homo sapiens
tgtgccttacaactg

SEQ ID NO: 1220717 - DNA, 15 bp, Homo sapiens
ctgtgccttacaact

SEQ ID NO: 1220718 - DNA, 15 bp, Homo sapiens
tctgtgccttacaac

SEQ ID NO: 1220719 - DNA, 15 bp, Homo sapiens
ttctgtgccttacaa

SEQ ID NO: 1220720 - DNA, 15 bp, Homo sapiens
gttctgtgccttaca

SEQ ID NO: 1220721 - DNA, 15 bp, Homo sapiens
agttctgtgccttac

SEQ ID NO: 1220722 - DNA, 15 bp, Homo sapiens
cagttctgtgcctta

SEQ ID NO: 1220723 - DNA, 15 bp, Homo sapiens
ccagttctgtgcctt

SEQ ID NO: 1220724 - DNA, 15 bp, Homo sapiens
cccagttctgtgcct

SEQ ID NO: 1220725 - DNA, 15 bp, Homo sapiens
tcccagttctgtgcc

SEQ ID NO: 1220726 - DNA, 15 bp, Homo sapiens
gtcccagttctgtgc

SEQ ID NO: 1220727 - DNA, 15 bp, Homo sapiens
agtcccagttctgtg

SEQ ID NO: 1220728 - DNA, 15 bp, Homo sapiens
cagtcccagttctgt

SEQ ID NO: 1220729 - DNA, 15 bp, Homo sapiens
ccagtcccagttctg

SEQ ID NO: 1220730 - DNA, 15 bp, Homo sapiens
accagtcccagttct

SEQ ID NO: 1220731 - DNA, 15 bp, Homo sapiens
caccagtcccagttc

SEQ ID NO: 1220732 - DNA, 15 bp, Homo sapiens
gcaccagtcccagtt

SEQ ID NO: 1220733 - DNA, 15 bp, Homo sapiens
ggcaccagtcccagt

SEQ ID NO: 1220734 - DNA, 15 bp, Homo sapiens
gggcaccagtcccag

SEQ ID NO: 1220735 - DNA, 15 bp, Homo sapiens
tgggcaccagtccca

SEQ ID NO: 1220736 - DNA, 15 bp, Homo sapiens
ctgggcaccagtccc

SEQ ID NO: 1220737 - DNA, 15 bp, Homo sapiens
gctgggcaccagtcc

SEQ ID NO: 1220738 - DNA, 15 bp, Homo sapiens
ggctgggcaccagtc

SEQ ID NO: 1220739 - DNA, 15 bp, Homo sapiens
gggctgggcaccagt

SEQ ID NO: 1220740 - DNA, 15 bp, Homo sapiens
agggctgggcaccag

SEQ ID NO: 1220741 - DNA, 15 bp, Homo sapiens
cagggctgggcacca

SEQ ID NO: 1220742 - DNA, 15 bp, Homo sapiens
ccagggctgggcacc

SEQ ID NO: 1220743 - DNA, 15 bp, Homo sapiens
gccagggctgggcac

SEQ ID NO: 1220744 - DNA, 15 bp, Homo sapiens
agccagggctgggca

SEQ ID NO: 1220745 - DNA, 15 bp, Homo sapiens
cagccagggctgggc

SEQ ID NO: 1220746 - DNA, 15 bp, Homo sapiens
acagccagggctggg

SEQ ID NO: 1220747 - DNA, 15 bp, Homo sapiens
cacagccagggctgg

SEQ ID NO: 1220748 - DNA, 15 bp, Homo sapiens
tcacagccagggctg

SEQ ID NO: 1220749 - DNA, 15 bp, Homo sapiens
gtcacagccagggct

SEQ ID NO: 1220750 - DNA, 15 bp, Homo sapiens
agtcacagccagggc

SEQ ID NO: 1220751 - DNA, 15 bp, Homo sapiens
gagtcacagccaggg

SEQ ID NO: 1220752 - DNA, 15 bp, Homo sapiens
ggagtcacagccagg

SEQ ID NO: 1220753 - DNA, 15 bp, Homo sapiens
aggagtcacagccag

SEQ ID NO: 1220754 - DNA, 15 bp, Homo sapiens
gaggagtcacagcca

SEQ ID NO: 1220755 - DNA, 15 bp, Homo sapiens
cgaggagtcacagcc

SEQ ID NO: 1220756 - DNA, 15 bp, Homo sapiens
acgaggagtcacagc

SEQ ID NO: 1220757 - DNA, 15 bp, Homo sapiens
gacgaggagtcacag

SEQ ID NO: 1220758 - DNA, 15 bp, Homo sapiens
ggacgaggagtcaca

SEQ ID NO: 1220759 - DNA, 15 bp, Homo sapiens
tggacgaggagtcac

SEQ ID NO: 1220760 - DNA, 15 bp, Homo sapiens
ctggacgaggagtca

SEQ ID NO: 1220761 - DNA, 15 bp, Homo sapiens
gctggacgaggagtc

SEQ ID NO: 1220762 - DNA, 15 bp, Homo sapiens
tgctggacgaggagt

SEQ ID NO: 1220763 - DNA, 15 bp, Homo sapiens
ctgctggacgaggag

SEQ ID NO: 1220764 - DNA, 15 bp, Homo sapiens
gctgctggacgagga

SEQ ID NO: 1220765 - DNA, 15 bp, Homo sapiens
ggctgctggacgagg

SEQ ID NO: 1220766 - DNA, 15 bp, Homo sapiens
gggctgctggacgag

SEQ ID NO: 1220767 - DNA, 15 bp, Homo sapiens
tgggctgctggacga

SEQ ID NO: 1220768 - DNA, 15 bp, Homo sapiens
gtgggctgctggacg

SEQ ID NO: 1220769 - DNA, 15 bp, Homo sapiens
tgtgggctgctggac

SEQ ID NO: 1220770 - DNA, 15 bp, Homo sapiens
gtgtgggctgctgga

SEQ ID NO: 1220771 - DNA, 15 bp, Homo sapiens
ggtgtgggctgctgg

SEQ ID NO: 1220772 - DNA, 15 bp, Homo sapiens
gggtgtgggctgctg

SEQ ID NO: 1220773 - DNA, 15 bp, Homo sapiens
agggtgtgggctgct

SEQ ID NO: 1220774 - DNA, 15 bp, Homo sapiens
gagggtgtgggctgc

SEQ ID NO: 1220775 - DNA, 15 bp, Homo sapiens
ggagggtgtgggctg

SEQ ID NO: 1220776 - DNA, 15 bp, Homo sapiens
aggagggtgtgggct

SEQ ID NO: 1220777 - DNA, 15 bp, Homo sapiens
gaggagggtgtgggc

SEQ ID NO: 1220778 - DNA, 15 bp, Homo sapiens
ggaggagggtgtggg

SEQ ID NO: 1220779 - DNA, 15 bp, Homo sapiens
aggaggagggtgtgg

SEQ ID NO: 1220780 - DNA, 15 bp, Homo sapiens
taggaggagggtgtg

SEQ ID NO: 1220781 - DNA, 15 bp, Homo sapiens
ctaggaggagggtgt

SEQ ID NO: 1220782 - DNA, 15 bp, Homo sapiens
actaggaggagggtg

SEQ ID NO: 1220783 - DNA, 15 bp, Homo sapiens
cactaggaggagggt

SEQ ID NO: 1220784 - DNA, 15 bp, Homo sapiens
acactaggaggaggg

SEQ ID NO: 1220785 - DNA, 15 bp, Homo sapiens
gacactaggaggagg

SEQ ID NO: 1220786 - DNA, 15 bp, Homo sapiens
ggacactaggaggag

SEQ ID NO: 1220787 - DNA, 15 bp, Homo sapiens
gggacactaggagga

SEQ ID NO: 1220788 - DNA, 15 bp, Homo sapiens
tgggacactaggagg

SEQ ID NO: 1220789 - DNA, 15 bp, Homo sapiens
ttgggacactaggag

SEQ ID NO: 1220790 - DNA, 15 bp, Homo sapiens
cttgggacactagga

SEQ ID NO: 1220791 - DNA, 15 bp, Homo sapiens
acttgggacactagg

SEQ ID NO: 1220792 - DNA, 15 bp, Homo sapiens
aacttgggacactag

SEQ ID NO: 1220793 - DNA, 15 bp, Homo sapiens
gaacttgggacacta

SEQ ID NO: 1220794 - DNA, 15 bp, Homo sapiens
agaacttgggacact

SEQ ID NO: 1220795 - DNA, 15 bp, Homo sapiens
gagaacttgggacac

SEQ ID NO: 1220796 - DNA, 15 bp, Homo sapiens
ggagaacttgggaca

SEQ ID NO: 1220797 - DNA, 15 bp, Homo sapiens
tggagaacttgggac

SEQ ID NO: 1220798 - DNA, 15 bp, Homo sapiens
gtggagaacttggga

SEQ ID NO: 1220799 - DNA, 15 bp, Homo sapiens
ggtggagaacttggg

SEQ ID NO: 1220800 - DNA, 15 bp, Homo sapiens
tggtggagaacttgg

SEQ ID NO: 1220801 - DNA, 15 bp, Homo sapiens
atggtggagaacttg

SEQ ID NO: 1220802 - DNA, 15 bp, Homo sapiens
gatggtggagaactt

SEQ ID NO: 1220803 - DNA, 15 bp, Homo sapiens
ggatggtggagaact

SEQ ID NO: 1220804 - DNA, 15 bp, Homo sapiens
aggatggtggagaac

SEQ ID NO: 1220805 - DNA, 15 bp, Homo sapiens
aaggatggtggagaa

SEQ ID NO: 1220806 - DNA, 15 bp, Homo sapiens
gaaggatggtggaga

SEQ ID NO: 1220807 - DNA, 15 bp, Homo sapiens
ggaaggatggtggag

SEQ ID NO: 1220808 - DNA, 15 bp, Homo sapiens
gggaaggatggtgga

SEQ ID NO: 1220809 - DNA, 15 bp, Homo sapiens
ggggaaggatggtgg

SEQ ID NO: 1220810 - DNA, 15 bp, Homo sapiens
gggggaaggatggtg

SEQ ID NO: 1220811 - DNA, 15 bp, Homo sapiens
tgggggaaggatggt

SEQ ID NO: 1220812 - DNA, 15 bp, Homo sapiens
ctgggggaaggatgg

SEQ ID NO: 1220813 - DNA, 15 bp, Homo sapiens
cctgggggaaggatg

SEQ ID NO: 1220814 - DNA, 15 bp, Homo sapiens
tcctgggggaaggat

SEQ ID NO: 1220815 - DNA, 15 bp, Homo sapiens
ctcctgggggaagga

SEQ ID NO: 1220816 - DNA, 15 bp, Homo sapiens
cctcctgggggaagg

SEQ ID NO: 1220817 - DNA, 15 bp, Homo sapiens
tcctcctgggggaag

SEQ ID NO: 1220818 - DNA, 15 bp, Homo sapiens
gtcctcctgggggaa

SEQ ID NO: 1220819 - DNA, 15 bp, Homo sapiens
tgtcctcctggggga

SEQ ID NO: 1220820 - DNA, 15 bp, Homo sapiens
ctgtcctcctggggg

SEQ ID NO: 1220821 - DNA, 15 bp, Homo sapiens
cctgtcctcctgggg

SEQ ID NO: 1220822 - DNA, 15 bp, Homo sapiens
gcctgtcctcctggg

SEQ ID NO: 1220823 - DNA, 15 bp, Homo sapiens
ggcctgtcctcctgg

SEQ ID NO: 1220824 - DNA, 15 bp, Homo sapiens
cggcctgtcctcctg

SEQ ID NO: 1220825 - DNA, 15 bp, Homo sapiens
gcggcctgtcctcct

SEQ ID NO: 1220826 - DNA, 15 bp, Homo sapiens
ggcggcctgtcctcc

SEQ ID NO: 1220827 - DNA, 15 bp, Homo sapiens
gggcggcctgtcctc

SEQ ID NO: 1220828 - DNA, 15 bp, Homo sapiens
ggggcggcctgtcct

SEQ ID NO: 1220829 - DNA, 15 bp, Homo sapiens
aggggcggcctgtcc

SEQ ID NO: 1220830 - DNA, 15 bp, Homo sapiens
aaggggcggcctgtc

SEQ ID NO: 1220831 - DNA, 15 bp, Homo sapiens
caaggggcggcctgt

SEQ ID NO: 1220832 - DNA, 15 bp, Homo sapiens
gcaaggggcggcctg

SEQ ID NO: 1220833 - DNA, 15 bp, Homo sapiens
ggcaaggggcggcct

SEQ ID NO: 1220834 - DNA, 15 bp, Homo sapiens
gggcaaggggcggcc

SEQ ID NO: 1220835 - DNA, 15 bp, Homo sapiens
agggcaaggggcggc

SEQ ID NO: 1220836 - DNA, 15 bp, Homo sapiens
gagggcaaggggcgg

SEQ ID NO: 1220837 - DNA, 15 bp, Homo sapiens
agagggcaaggggcg

SEQ ID NO: 1220838 - DNA, 15 bp, Homo sapiens
cagagggcaaggggc

SEQ ID NO: 1220839 - DNA, 15 bp, Homo sapiens
acagagggcaagggg

SEQ ID NO: 1220840 - DNA, 15 bp, Homo sapiens
tacagagggcaaggg

SEQ ID NO: 1220841 - DNA, 15 bp, Homo sapiens
gtacagagggcaagg

SEQ ID NO: 1220842 - DNA, 15 bp, Homo sapiens
agtacagagggcaag

SEQ ID NO: 1220843 - DNA, 15 bp, Homo sapiens
gagtacagagggcaa

SEQ ID NO: 1220844 - DNA, 15 bp, Homo sapiens
tgagtacagagggca

SEQ ID NO: 1220845 - DNA, 15 bp, Homo sapiens
gtgagtacagagggc

SEQ ID NO: 1220846 - DNA, 15 bp, Homo sapiens
tgtgagtacagaggg

SEQ ID NO: 1220847 - DNA, 15 bp, Homo sapiens
atgtgagtacagagg

SEQ ID NO: 1220848 - DNA, 15 bp, Homo sapiens
aatgtgagtacagag

SEQ ID NO: 1220849 - DNA, 15 bp, Homo sapiens
gaatgtgagtacaga

SEQ ID NO: 1220850 - DNA, 15 bp, Homo sapiens
agaatgtgagtacag

SEQ ID NO: 1220851 - DNA, 15 bp, Homo sapiens
cagaatgtgagtaca

SEQ ID NO: 1220852 - DNA, 15 bp, Homo sapiens
gcagaatgtgagtac

SEQ ID NO: 1220853 - DNA, 15 bp, Homo sapiens
tgcagaatgtgagta

SEQ ID NO: 1220854 - DNA, 15 bp, Homo sapiens
atgcagaatgtgagt

SEQ ID NO: 1220855 - DNA, 15 bp, Homo sapiens
catgcagaatgtgag

SEQ ID NO: 1220856 - DNA, 15 bp, Homo sapiens
tcatgcagaatgtga

SEQ ID NO: 1220857 - DNA, 15 bp, Homo sapiens
ttcatgcagaatgtg

SEQ ID NO: 1220858 - DNA, 15 bp, Homo sapiens
gttcatgcagaatgt

SEQ ID NO: 1220859 - DNA, 15 bp, Homo sapiens
agttcatgcagaatg

SEQ ID NO: 1220860 - DNA, 15 bp, Homo sapiens
gagttcatgcagaat

SEQ ID NO: 1220861 - DNA, 15 bp, Homo sapiens
tgagttcatgcagaa

SEQ ID NO: 1220862 - DNA, 15 bp, Homo sapiens
gtgagttcatgcaga

SEQ ID NO: 1220863 - DNA, 15 bp, Homo sapiens
tgtgagttcatgcag

SEQ ID NO: 1220864 - DNA, 15 bp, Homo sapiens
ctgtgagttcatgca

SEQ ID NO: 1220865 - DNA, 15 bp, Homo sapiens
tctgtgagttcatgc

SEQ ID NO: 1220866 - DNA, 15 bp, Homo sapiens
ttctgtgagttcatg

SEQ ID NO: 1220867 - DNA, 15 bp, Homo sapiens
tttctgtgagttcat

SEQ ID NO: 1220868 - DNA, 15 bp, Homo sapiens
ctttctgtgagttca

SEQ ID NO: 1220869 - DNA, 15 bp, Homo sapiens
cctttctgtgagttc

SEQ ID NO: 1220870 - DNA, 15 bp, Homo sapiens
acctttctgtgagtt

SEQ ID NO: 1220871 - DNA, 15 bp, Homo sapiens
gacctttctgtgagt

SEQ ID NO: 1220872 - DNA, 15 bp, Homo sapiens
tgacctttctgtgag

SEQ ID NO: 1220873 - DNA, 15 bp, Homo sapiens
gtgacctttctgtga

SEQ ID NO: 1220874 - DNA, 15 bp, Homo sapiens
ggtgacctttctgtg

SEQ ID NO: 1220875 - DNA, 15 bp, Homo sapiens
aggtgacctttctgt

SEQ ID NO: 1220876 - DNA, 15 bp, Homo sapiens
gaggtgacctttctg

SEQ ID NO: 1220877 - DNA, 15 bp, Homo sapiens
ggaggtgacctttct

SEQ ID NO: 1220878 - DNA, 15 bp, Homo sapiens
gggaggtgacctttc

SEQ ID NO: 1220879 - DNA, 15 bp, Homo sapiens
agggaggtgaccttt

SEQ ID NO: 1220880 - DNA, 15 bp, Homo sapiens
gagggaggtgacctt

SEQ ID NO: 1220881 - DNA, 15 bp, Homo sapiens
ggagggaggtgacct

SEQ ID NO: 1220882 - DNA, 15 bp, Homo sapiens
gggagggaggtgacc

SEQ ID NO: 1220883 - DNA, 15 bp, Homo sapiens
agggagggaggtgac

SEQ ID NO: 1220884 - DNA, 15 bp, Homo sapiens
cagggagggaggtga

SEQ ID NO: 1220885 - DNA, 15 bp, Homo sapiens
acagggagggaggtg

SEQ ID NO: 1220886 - DNA, 15 bp, Homo sapiens
cacagggagggaggt

SEQ ID NO: 1220887 - DNA, 15 bp, Homo sapiens
gcacagggagggagg

SEQ ID NO: 1220888 - DNA, 15 bp, Homo sapiens
agcacagggagggag

SEQ ID NO: 1220889 - DNA, 15 bp, Homo sapiens
gagcacagggaggga

SEQ ID NO: 1220890 - DNA, 15 bp, Homo sapiens
tgagcacagggaggg

SEQ ID NO: 1220891 - DNA, 15 bp, Homo sapiens
ctgagcacagggagg

SEQ ID NO: 1220892 - DNA, 15 bp, Homo sapiens
cctgagcacagggag

SEQ ID NO: 1220893 - DNA, 15 bp, Homo sapiens
acctgagcacaggga

SEQ ID NO: 1220894 - DNA, 15 bp, Homo sapiens
cacctgagcacaggg

SEQ ID NO: 1220895 - DNA, 15 bp, Homo sapiens
ccacctgagcacagg

SEQ ID NO: 1220896 - DNA, 15 bp, Homo sapiens
gccacctgagcacag

SEQ ID NO: 1220897 - DNA, 15 bp, Homo sapiens
tgccacctgagcaca

SEQ ID NO: 1220898 - DNA, 15 bp, Homo sapiens
ctgccacctgagcac

SEQ ID NO: 1220899 - DNA, 15 bp, Homo sapiens
gctgccacctgagca

SEQ ID NO: 1220900 - DNA, 15 bp, Homo sapiens
ggctgccacctgagc

SEQ ID NO: 1220901 - DNA, 15 bp, Homo sapiens
aggctgccacctgag

SEQ ID NO: 1220902 - DNA, 15 bp, Homo sapiens
caggctgccacctga

SEQ ID NO: 1220903 - DNA, 15 bp, Homo sapiens
ccaggctgccacctg

SEQ ID NO: 1220904 - DNA, 15 bp, Homo sapiens
gccaggctgccacct

SEQ ID NO: 1220905 - DNA, 15 bp, Homo sapiens
agccaggctgccacc

SEQ ID NO: 1220906 - DNA, 15 bp, Homo sapiens
aagccaggctgccac

SEQ ID NO: 1220907 - DNA, 15 bp, Homo sapiens
gaagccaggctgcca

SEQ ID NO: 1220908 - DNA, 15 bp, Homo sapiens
ggaagccaggctgcc

SEQ ID NO: 1220909 - DNA, 15 bp, Homo sapiens
aggaagccaggctgc

SEQ ID NO: 1220910 - DNA, 15 bp, Homo sapiens
caggaagccaggctg

SEQ ID NO: 1220911 - DNA, 15 bp, Homo sapiens
tcaggaagccaggct

SEQ ID NO: 1220912 - DNA, 15 bp, Homo sapiens
gtcaggaagccaggc

SEQ ID NO: 1220913 - DNA, 15 bp, Homo sapiens
cgtcaggaagccagg

SEQ ID NO: 1220914 - DNA, 15 bp, Homo sapiens
ccgtcaggaagccag

SEQ ID NO: 1220915 - DNA, 15 bp, Homo sapiens
accgtcaggaagcca

SEQ ID NO: 1220916 - DNA, 15 bp, Homo sapiens
caccgtcaggaagcc

SEQ ID NO: 1220917 - DNA, 15 bp, Homo sapiens
acaccgtcaggaagc

SEQ ID NO: 1220918 - DNA, 15 bp, Homo sapiens
cacaccgtcaggaag

SEQ ID NO: 1220919 - DNA, 15 bp, Homo sapiens
acacaccgtcaggaa

SEQ ID NO: 1220920 - DNA, 15 bp, Homo sapiens
gacacaccgtcagga

SEQ ID NO: 1220921 - DNA, 15 bp, Homo sapiens
tgacacaccgtcagg

SEQ ID NO: 1220922 - DNA, 15 bp, Homo sapiens
atgacacaccgtcag

SEQ ID NO: 1220923 - DNA, 15 bp, Homo sapiens
gatgacacaccgtca

SEQ ID NO: 1220924 - DNA, 15 bp, Homo sapiens
ggatgacacaccgtc

SEQ ID NO: 1220925 - DNA, 15 bp, Homo sapiens
aggatgacacaccgt

SEQ ID NO: 1220926 - DNA, 15 bp, Homo sapiens
gaggatgacacaccg

SEQ ID NO: 1220927 - DNA, 15 bp, Homo sapiens
tgaggatgacacacc

SEQ ID NO: 1220928 - DNA, 15 bp, Homo sapiens
ctgaggatgacacac

SEQ ID NO: 1220929 - DNA, 15 bp, Homo sapiens
cctgaggatgacaca

SEQ ID NO: 1220930 - DNA, 15 bp, Homo sapiens
gcctgaggatgacac

SEQ ID NO: 1220931 - DNA, 15 bp, Homo sapiens
ggcctgaggatgaca

SEQ ID NO: 1220932 - DNA, 15 bp, Homo sapiens
tggcctgaggatgac

SEQ ID NO: 1220933 - DNA, 15 bp, Homo sapiens
ctggcctgaggatga

SEQ ID NO: 1220934 - DNA, 15 bp, Homo sapiens
gctggcctgaggatg

SEQ ID NO: 1220935 - DNA, 15 bp, Homo sapiens
ggctggcctgaggat

SEQ ID NO: 1220936 - DNA, 15 bp, Homo sapiens
tggctggcctgagga

SEQ ID NO: 1220937 - DNA, 15 bp, Homo sapiens
atggctggcctgagg

SEQ ID NO: 1220938 - DNA, 15 bp, Homo sapiens
gatggctggcctgag

SEQ ID NO: 1220939 - DNA, 15 bp, Homo sapiens
ggatggctggcctga

SEQ ID NO: 1220940 - DNA, 15 bp, Homo sapiens
gggatggctggcctg

SEQ ID NO: 1220941 - DNA, 15 bp, Homo sapiens
ggggatggctggcct

SEQ ID NO: 1220942 - DNA, 15 bp, Homo sapiens
tggggatggctggcc

SEQ ID NO: 1220943 - DNA, 15 bp, Homo sapiens
ctggggatggctggc

SEQ ID NO: 1220944 - DNA, 15 bp, Homo sapiens
tctggggatggctgg

SEQ ID NO: 1220945 - DNA, 15 bp, Homo sapiens
ttctggggatggctg

SEQ ID NO: 1220946 - DNA, 15 bp, Homo sapiens
attctggggatggct

SEQ ID NO: 1220947 - DNA, 15 bp, Homo sapiens
tattctggggatggc

SEQ ID NO: 1220948 - DNA, 15 bp, Homo sapiens
ctattctggggatgg

SEQ ID NO: 1220949 - DNA, 15 bp, Homo sapiens
cctattctggggatg

SEQ ID NO: 1220950 - DNA, 15 bp, Homo sapiens
ccctattctggggat

SEQ ID NO: 1220951 - DNA, 15 bp, Homo sapiens
cccctattctgggga

SEQ ID NO: 1220952 - DNA, 15 bp, Homo sapiens
gcccctattctgggg

SEQ ID NO: 1220953 - DNA, 15 bp, Homo sapiens
ggcccctattctggg

SEQ ID NO: 1220954 - DNA, 15 bp, Homo sapiens
tggcccctattctgg

SEQ ID NO: 1220955 - DNA, 15 bp, Homo sapiens
ttggcccctattctg

SEQ ID NO: 1220956 - DNA, 15 bp, Homo sapiens
tttggcccctattct

SEQ ID NO: 1220957 - DNA, 15 bp, Homo sapiens
ttttggcccctattc

SEQ ID NO: 1220958 - DNA, 15 bp, Homo sapiens
cttttggcccctatt

SEQ ID NO: 1220959 - DNA, 15 bp, Homo sapiens
ccttttggcccctat

SEQ ID NO: 1220960 - DNA, 15 bp, Homo sapiens
gccttttggccccta

SEQ ID NO: 1220961 - DNA, 15 bp, Homo sapiens
tgccttttggcccct

SEQ ID NO: 1220962 - DNA, 15 bp, Homo sapiens
gtgccttttggcccc

SEQ ID NO: 1220963 - DNA, 15 bp, Homo sapiens
ggtgccttttggccc

SEQ ID NO: 1220964 - DNA, 15 bp, Homo sapiens
aggtgccttttggcc

SEQ ID NO: 1220965 - DNA, 15 bp, Homo sapiens
caggtgccttttggc

SEQ ID NO: 1220966 - DNA, 15 bp, Homo sapiens
gcaggtgccttttgg

SEQ ID NO: 1220967 - DNA, 15 bp, Homo sapiens
ggcaggtgccttttg

SEQ ID NO: 1220968 - DNA, 15 bp, Homo sapiens
cggcaggtgcctttt

SEQ ID NO: 1220969 - DNA, 15 bp, Homo sapiens
tcggcaggtgccttt

SEQ ID NO: 1220970 - DNA, 15 bp, Homo sapiens
gtcggcaggtgcctt

SEQ ID NO: 1220971 - DNA, 15 bp, Homo sapiens
ggtcggcaggtgcct

SEQ ID NO: 1220972 - DNA, 15 bp, Homo sapiens
aggtcggcaggtgcc

SEQ ID NO: 1220973 - DNA, 15 bp, Homo sapiens
caggtcggcaggtgc

SEQ ID NO: 1220974 - DNA, 15 bp, Homo sapiens
ccaggtcggcaggtg

SEQ ID NO: 1220975 - DNA, 15 bp, Homo sapiens
gccaggtcggcaggt

SEQ ID NO: 1220976 - DNA, 15 bp, Homo sapiens
ggccaggtcggcagg

SEQ ID NO: 1220977 - DNA, 15 bp, Homo sapiens
tggccaggtcggcag

SEQ ID NO: 1220978 - DNA, 15 bp, Homo sapiens
atggccaggtcggca

SEQ ID NO: 1220979 - DNA, 15 bp, Homo sapiens
gatggccaggtcggc

SEQ ID NO: 1220980 - DNA, 15 bp, Homo sapiens
cgatggccaggtcgg

SEQ ID NO: 1220981 - DNA, 15 bp, Homo sapiens
ccgatggccaggtcg

SEQ ID NO: 1220982 - DNA, 15 bp, Homo sapiens
cccgatggccaggtc

SEQ ID NO: 1220983 - DNA, 15 bp, Homo sapiens
ccccgatggccaggt

SEQ ID NO: 1220984 - DNA, 15 bp, Homo sapiens
tccccgatggccagg

SEQ ID NO: 1220985 - DNA, 15 bp, Homo sapiens
ttccccgatggccag

SEQ ID NO: 1220986 - DNA, 15 bp, Homo sapiens
attccccgatggcca

SEQ ID NO: 1220987 - DNA, 15 bp, Homo sapiens
tattccccgatggcc

SEQ ID NO: 1220988 - DNA, 15 bp, Homo sapiens
ttattccccgatggc

SEQ ID NO: 1220989 - DNA, 15 bp, Homo sapiens
attattccccgatgg

SEQ ID NO: 1220990 - DNA, 15 bp, Homo sapiens
aattattccccgatg

SEQ ID NO: 1220991 - DNA, 15 bp, Homo sapiens
aaattattccccgat

SEQ ID NO: 1220992 - DNA, 15 bp, Homo sapiens
taaattattccccga

SEQ ID NO: 1220993 - DNA, 15 bp, Homo sapiens
ttaaattattccccg

SEQ ID NO: 1220994 - DNA, 15 bp, Homo sapiens
tttaaattattcccc

SEQ ID NO: 1220995 - DNA, 15 bp, Homo sapiens
ctttaaattattccc

SEQ ID NO: 1220996 - DNA, 15 bp, Homo sapiens
actttaaattattcc

SEQ ID NO: 1220997 - DNA, 15 bp, Homo sapiens
tactttaaattattc

SEQ ID NO: 1220998 - DNA, 15 bp, Homo sapiens
ttactttaaattatt

SEQ ID NO: 1220999 - DNA, 15 bp, Homo sapiens
gttactttaaattat

SEQ ID NO: 1221000 - DNA, 15 bp, Homo sapiens
ggttactttaaatta

SEQ ID NO: 1221001 - DNA, 15 bp, Homo sapiens
gggttactttaaatt

SEQ ID NO: 1221002 - DNA, 15 bp, Homo sapiens
ggggttactttaaat

SEQ ID NO: 1221003 - DNA, 15 bp, Homo sapiens
tggggttactttaaa

SEQ ID NO: 1221004 - DNA, 15 bp, Homo sapiens
ctggggttactttaa

SEQ ID NO: 1221005 - DNA, 15 bp, Homo sapiens
tctggggttacttta

SEQ ID NO: 1221006 - DNA, 15 bp, Homo sapiens
ctctggggttacttt

SEQ ID NO: 1221007 - DNA, 15 bp, Homo sapiens
tctctggggttactt

SEQ ID NO: 1221008 - DNA, 15 bp, Homo sapiens
ctctctggggttact

SEQ ID NO: 1221009 - DNA, 15 bp, Homo sapiens
cctctctggggttac

SEQ ID NO: 1221010 - DNA, 15 bp, Homo sapiens
ccctctctggggtta

SEQ ID NO: 1221011 - DNA, 15 bp, Homo sapiens
cccctctctggggtt

SEQ ID NO: 1221012 - DNA, 15 bp, Homo sapiens
acccctctctggggt

SEQ ID NO: 1221013 - DNA, 15 bp, Homo sapiens
aacccctctctgggg

SEQ ID NO: 1221014 - DNA, 15 bp, Homo sapiens
taacccctctctggg

SEQ ID NO: 1221015 - DNA, 15 bp, Homo sapiens
gtaacccctctctgg

SEQ ID NO: 1221016 - DNA, 15 bp, Homo sapiens
ggtaacccctctctg

SEQ ID NO: 1221017 - DNA, 15 bp, Homo sapiens
tggtaacccctctct

SEQ ID NO: 1221018 - DNA, 15 bp, Homo sapiens
ctggtaacccctctc

SEQ ID NO: 1221019 - DNA, 15 bp, Homo sapiens
tctggtaacccctct

SEQ ID NO: 1221020 - DNA, 15 bp, Homo sapiens
ttctggtaacccctc

SEQ ID NO: 1221021 - DNA, 15 bp, Homo sapiens
cttctggtaacccct

SEQ ID NO: 1221022 - DNA, 15 bp, Homo sapiens
acttctggtaacccc

SEQ ID NO: 1221023 - DNA, 15 bp, Homo sapiens
gacttctggtaaccc

SEQ ID NO: 1221024 - DNA, 15 bp, Homo sapiens
tgacttctggtaacc

SEQ ID NO: 1221025 - DNA, 15 bp, Homo sapiens
ttgacttctggtaac

SEQ ID NO: 1221026 - DNA, 15 bp, Homo sapiens
cttgacttctggtaa

SEQ ID NO: 1221027 - DNA, 15 bp, Homo sapiens
acttgacttctggta

SEQ ID NO: 1221028 - DNA, 15 bp, Homo sapiens
cacttgacttctggt

SEQ ID NO: 1221029 - DNA, 15 bp, Homo sapiens
acacttgacttctgg

SEQ ID NO: 1221030 - DNA, 15 bp, Homo sapiens
gacacttgacttctg

SEQ ID NO: 1221031 - DNA, 15 bp, Homo sapiens
ggacacttgacttct

SEQ ID NO: 1221032 - DNA, 15 bp, Homo sapiens
tggacacttgacttc

SEQ ID NO: 1221033 - DNA, 15 bp, Homo sapiens
gtggacacttgactt

SEQ ID NO: 1221034 - DNA, 15 bp, Homo sapiens
tgtggacacttgact

SEQ ID NO: 1221035 - DNA, 15 bp, Homo sapiens
ctgtggacacttgac

SEQ ID NO: 1221036 - DNA, 15 bp, Homo sapiens
gctgtggacacttga

SEQ ID NO: 1221037 - DNA, 15 bp, Homo sapiens
tgctgtggacacttg

SEQ ID NO: 1221038 - DNA, 15 bp, Homo sapiens
ttgctgtggacactt

SEQ ID NO: 1221039 - DNA, 15 bp, Homo sapiens
tttgctgtggacact

SEQ ID NO: 1221040 - DNA, 15 bp, Homo sapiens
gtttgctgtggacac

SEQ ID NO: 1221041 - DNA, 15 bp, Homo sapiens
ggtttgctgtggaca

SEQ ID NO: 1221042 - DNA, 15 bp, Homo sapiens
aggtttgctgtggac

SEQ ID NO: 1221043 - DNA, 15 bp, Homo sapiens
caggtttgctgtgga

SEQ ID NO: 1221044 - DNA, 15 bp, Homo sapiens
tcaggtttgctgtgg

SEQ ID NO: 1221045 - DNA, 15 bp, Homo sapiens
ttcaggtttgctgtg

SEQ ID NO: 1221046 - DNA, 15 bp, Homo sapiens
tttcaggtttgctgt

SEQ ID NO: 1221047 - DNA, 15 bp, Homo sapiens
ttttcaggtttgctg

SEQ ID NO: 1221048 - DNA, 15 bp, Homo sapiens
gttttcaggtttgct

SEQ ID NO: 1221049 - DNA, 15 bp, Homo sapiens
agttttcaggtttgc

SEQ ID NO: 1221050 - DNA, 15 bp, Homo sapiens
gagttttcaggtttg

SEQ ID NO: 1221051 - DNA, 15 bp, Homo sapiens
agagttttcaggttt

SEQ ID NO: 1221052 - DNA, 15 bp, Homo sapiens
aagagttttcaggtt

SEQ ID NO: 1221053 - DNA, 15 bp, Homo sapiens
aaagagttttcaggt

SEQ ID NO: 1221054 - DNA, 15 bp, Homo sapiens
aaaagagttttcagg

SEQ ID NO: 1221055 - DNA, 15 bp, Homo sapiens
aaaaagagttttcag

SEQ ID NO: 1221056 - DNA, 15 bp, Homo sapiens
aaaaaagagttttca

SEQ ID NO: 1221057 - DNA, 15 bp, Homo sapiens
taaaaaagagttttc

SEQ ID NO: 1221058 - DNA, 15 bp, Homo sapiens
gtaaaaaagagtttt

SEQ ID NO: 1221059 - DNA, 15 bp, Homo sapiens
tgtaaaaaagagttt

SEQ ID NO: 1221060 - DNA, 15 bp, Homo sapiens
atgtaaaaaagagtt

SEQ ID NO: 1221061 - DNA, 15 bp, Homo sapiens
aaatgtaaaaaagag

SEQ ID NO: 1221062 - DNA, 15 bp, Homo sapiens
aaaatgtaaaaaaga

SEQ ID NO: 1221063 - DNA, 15 bp, Homo sapiens
taaaatgtaaaaaag

SEQ ID NO: 1221064 - DNA, 15 bp, Homo sapiens
ataaaatgtaaaaaa

SEQ ID NO: 1221065 - DNA, 15 bp, Homo sapiens
tataaaatgtaaaaa

SEQ ID NO: 1221066 - DNA, 15 bp, Homo sapiens
atataaaatgtaaaa

SEQ ID NO: 1221067 - DNA, 15 bp, Homo sapiens
aatataaaatgtaaa

SEQ ID NO: 1221068 - DNA, 15 bp, Homo sapiens
caatataaaatgtaa

SEQ ID NO: 1221069 - DNA, 15 bp, Homo sapiens
acaatataaaatgta

SEQ ID NO: 1221070 - DNA, 15 bp, Homo sapiens
aacaatataaaatgt

SEQ ID NO: 1221071 - DNA, 15 bp, Homo sapiens
taacaatataaaatg

SEQ ID NO: 1221072 - DNA, 15 bp, Homo sapiens
gtaacaatataaaat

SEQ ID NO: 1221073 - DNA, 15 bp, Homo sapiens
agtaacaatataaaa

SEQ ID NO: 1221074 - DNA, 15 bp, Homo sapiens
cagtaacaatataaa

SEQ ID NO: 1221075 - DNA, 15 bp, Homo sapiens
ccagtaacaatataa

SEQ ID NO: 1221076 - DNA, 15 bp, Homo sapiens
tccagtaacaatata

SEQ ID NO: 1221077 - DNA, 15 bp, Homo sapiens
ttccagtaacaatat

SEQ ID NO: 1221078 - DNA, 15 bp, Homo sapiens
cttccagtaacaata

SEQ ID NO: 1221079 - DNA, 15 bp, Homo sapiens
ccttccagtaacaat

SEQ ID NO: 1221080 - DNA, 15 bp, Homo sapiens
cccttccagtaacaa

SEQ ID NO: 1221081 - DNA, 15 bp, Homo sapiens
ccccttccagtaaca

SEQ ID NO: 1221082 - DNA, 15 bp, Homo sapiens
gccccttccagtaac

SEQ ID NO: 1221083 - DNA, 15 bp, Homo sapiens
agccccttccagtaa

SEQ ID NO: 1221084 - DNA, 15 bp, Homo sapiens
gagccccttccagta

SEQ ID NO: 1221085 - DNA, 15 bp, Homo sapiens
agagccccttccagt

SEQ ID NO: 1221086 - DNA, 15 bp, Homo sapiens
cagagccccttccag

SEQ ID NO: 1221087 - DNA, 15 bp, Homo sapiens
ccagagccccttcca

SEQ ID NO: 1221088 - DNA, 15 bp, Homo sapiens
gccagagccccttcc

SEQ ID NO: 1221089 - DNA, 15 bp, Homo sapiens
ggccagagccccttc

SEQ ID NO: 1221090 - DNA, 15 bp, Homo sapiens
aggccagagcccctt

SEQ ID NO: 1221091 - DNA, 15 bp, Homo sapiens
caggccagagcccct

SEQ ID NO: 1221092 - DNA, 15 bp, Homo sapiens
gcaggccagagcccc

SEQ ID NO: 1221093 - DNA, 15 bp, Homo sapiens
tgcaggccagagccc

SEQ ID NO: 1221094 - DNA, 15 bp, Homo sapiens
ttgcaggccagagcc

SEQ ID NO: 1221095 - DNA, 15 bp, Homo sapiens
cttgcaggccagagc

SEQ ID NO: 1221096 - DNA, 15 bp, Homo sapiens
gcttgcaggccagag

SEQ ID NO: 1221097 - DNA, 15 bp, Homo sapiens
ggcttgcaggccaga

SEQ ID NO: 1221098 - DNA, 15 bp, Homo sapiens
gggcttgcaggccag

SEQ ID NO: 1221099 - DNA, 15 bp, Homo sapiens
agggcttgcaggcca

SEQ ID NO: 1221100 - DNA, 15 bp, Homo sapiens
cagggcttgcaggcc

SEQ ID NO: 1221101 - DNA, 15 bp, Homo sapiens
ccagggcttgcaggc

SEQ ID NO: 1221102 - DNA, 15 bp, Homo sapiens
cccagggcttgcagg

SEQ ID NO: 1221103 - DNA, 15 bp, Homo sapiens
ccccagggcttgcag

SEQ ID NO: 1221104 - DNA, 15 bp, Homo sapiens
gccccagggcttgca

SEQ ID NO: 1221105 - DNA, 15 bp, Homo sapiens
tgccccagggcttgc

SEQ ID NO: 1221106 - DNA, 15 bp, Homo sapiens
ctgccccagggcttg

SEQ ID NO: 1221107 - DNA, 15 bp, Homo sapiens
cctgccccagggctt

SEQ ID NO: 1221108 - DNA, 15 bp, Homo sapiens
tcctgccccagggct

SEQ ID NO: 1221109 - DNA, 15 bp, Homo sapiens
ttcctgccccagggc

SEQ ID NO: 1221110 - DNA, 15 bp, Homo sapiens
gttcctgccccaggg

SEQ ID NO: 1221111 - DNA, 15 bp, Homo sapiens
ggttcctgccccagg

SEQ ID NO: 1221112 - DNA, 15 bp, Homo sapiens
aggttcctgccccag

SEQ ID NO: 1221113 - DNA, 15 bp, Homo sapiens
gaggttcctgcccca

SEQ ID NO: 1221114 - DNA, 15 bp, Homo sapiens
agaggttcctgcccc

SEQ ID NO: 1221115 - DNA, 15 bp, Homo sapiens
gagaggttcctgccc

SEQ ID NO: 1221116 - DNA, 15 bp, Homo sapiens
tgagaggttcctgcc

SEQ ID NO: 1221117 - DNA, 15 bp, Homo sapiens
gtgagaggttcctgc

SEQ ID NO: 1221118 - DNA, 15 bp, Homo sapiens
ggtgagaggttcctg

SEQ ID NO: 1221119 - DNA, 15 bp, Homo sapiens
tggtgagaggttcct

SEQ ID NO: 1221120 - DNA, 15 bp, Homo sapiens
ttggtgagaggttcc

SEQ ID NO: 1221121 - DNA, 15 bp, Homo sapiens
gttggtgagaggttc

SEQ ID NO: 1221122 - DNA, 15 bp, Homo sapiens
ggttggtgagaggtt

SEQ ID NO: 1221123 - DNA, 15 bp, Homo sapiens
aggttggtgagaggt

SEQ ID NO: 1221124 - DNA, 15 bp, Homo sapiens
caggttggtgagagg

SEQ ID NO: 1221125 - DNA, 15 bp, Homo sapiens
ccaggttggtgagag

SEQ ID NO: 1221126 - DNA, 15 bp, Homo sapiens
cccaggttggtgaga

SEQ ID NO: 1221127 - DNA, 15 bp, Homo sapiens
tcccaggttggtgag

SEQ ID NO: 1221128 - DNA, 15 bp, Homo sapiens
atcccaggttggtga

SEQ ID NO: 1221129 - DNA, 15 bp, Homo sapiens
catcccaggttggtg

SEQ ID NO: 1221130 - DNA, 15 bp, Homo sapiens
gcatcccaggttggt

SEQ ID NO: 1221131 - DNA, 15 bp, Homo sapiens
tgcatcccaggttgg

SEQ ID NO: 1221132 - DNA, 15 bp, Homo sapiens
ttgcatcccaggttg

SEQ ID NO: 1221133 - DNA, 15 bp, Homo sapiens
cttgcatcccaggtt

SEQ ID NO: 1221134 - DNA, 15 bp, Homo sapiens
tcttgcatcccaggt

SEQ ID NO: 1221135 - DNA, 15 bp, Homo sapiens
ctcttgcatcccagg

SEQ ID NO: 1221136 - DNA, 15 bp, Homo sapiens
gctcttgcatcccag

SEQ ID NO: 1221137 - DNA, 15 bp, Homo sapiens
agctcttgcatccca

SEQ ID NO: 1221138 - DNA, 15 bp, Homo sapiens
tagctcttgcatccc

SEQ ID NO: 1221139 - DNA, 15 bp, Homo sapiens
gtagctcttgcatcc

SEQ ID NO: 1221140 - DNA, 15 bp, Homo sapiens
tgtagctcttgcatc

SEQ ID NO: 1221141 - DNA, 15 bp, Homo sapiens
gtgtagctcttgcat

SEQ ID NO: 1221142 - DNA, 15 bp, Homo sapiens
cgtgtagctcttgca

SEQ ID NO: 1221143 - DNA, 15 bp, Homo sapiens
ccgtgtagctcttgc

SEQ ID NO: 1221144 - DNA, 15 bp, Homo sapiens
cccgtgtagctcttg

SEQ ID NO: 1221145 - DNA, 15 bp, Homo sapiens
ccccgtgtagctctt

SEQ ID NO: 1221146 - DNA, 15 bp, Homo sapiens
gccccgtgtagctct

SEQ ID NO: 1221147 - DNA, 15 bp, Homo sapiens
ggccccgtgtagctc

SEQ ID NO: 1221148 - DNA, 15 bp, Homo sapiens
aggccccgtgtagct

SEQ ID NO: 1221149 - DNA, 15 bp, Homo sapiens
caggccccgtgtagc

SEQ ID NO: 1221150 - DNA, 15 bp, Homo sapiens
ccaggccccgtgtag

SEQ ID NO: 1221151 - DNA, 15 bp, Homo sapiens
taactaaagactgag

SEQ ID NO: 1221152 - DNA, 15 bp, Homo sapiens
ctaactaaagactga

SEQ ID NO: 1221153 - DNA, 15 bp, Homo sapiens
tctaactaaagactg

SEQ ID NO: 1221154 - DNA, 15 bp, Homo sapiens
ttctaactaaagact

SEQ ID NO: 1221155 - DNA, 15 bp, Homo sapiens
gttctaactaaagac

SEQ ID NO: 1221156 - DNA, 15 bp, Homo sapiens
agttctaactaaaga

SEQ ID NO: 1221157 - DNA, 15 bp, Homo sapiens
gagttctaactaaag

SEQ ID NO: 1221158 - DNA, 15 bp, Homo sapiens
agagttctaactaaa

SEQ ID NO: 1221159 - DNA, 15 bp, Homo sapiens
gagagttctaactaa

SEQ ID NO: 1221160 - DNA, 15 bp, Homo sapiens
cgagagttctaacta

SEQ ID NO: 1221161 - DNA, 15 bp, Homo sapiens
gcgagagttctaact

SEQ ID NO: 1221162 - DNA, 15 bp, Homo sapiens
agcgagagttctaac

SEQ ID NO: 1221163 - DNA, 15 bp, Homo sapiens
tagcgagagttctaa

SEQ ID NO: 1221164 - DNA, 15 bp, Homo sapiens
atagcgagagttcta

SEQ ID NO: 1221165 - DNA, 15 bp, Homo sapiens
gatagcgagagttct

SEQ ID NO: 1221166 - DNA, 15 bp, Homo sapiens
agatagcgagagttc

SEQ ID NO: 1221167 - DNA, 15 bp, Homo sapiens
aagatagcgagagtt

SEQ ID NO: 1221168 - DNA, 15 bp, Homo sapiens
aaagatagcgagagt

SEQ ID NO: 1221169 - DNA, 15 bp, Homo sapiens
caaagatagcgagag

SEQ ID NO: 1221170 - DNA, 15 bp, Homo sapiens
acaaagatagcgaga

SEQ ID NO: 1221171 - DNA, 15 bp, Homo sapiens
cacaaagatagcgag

SEQ ID NO: 1221172 - DNA, 15 bp, Homo sapiens
ccacaaagatagcga

SEQ ID NO: 1221173 - DNA, 15 bp, Homo sapiens
tccacaaagatagcg

SEQ ID NO: 1221174 - DNA, 15 bp, Homo sapiens
atccacaaagatagc

SEQ ID NO: 1221175 - DNA, 15 bp, Homo sapiens
tatccacaaagatag

SEQ ID NO: 1221176 - DNA, 15 bp, Homo sapiens
gtatccacaaagata

SEQ ID NO: 1221177 - DNA, 15 bp, Homo sapiens
tgtatccacaaagat

SEQ ID NO: 1221178 - DNA, 15 bp, Homo sapiens
ctgtatccacaaaga

SEQ ID NO: 1221179 - DNA, 15 bp, Homo sapiens
actgtatccacaaag

SEQ ID NO: 1221180 - DNA, 15 bp, Homo sapiens
aactgtatccacaaa

SEQ ID NO: 1221181 - DNA, 15 bp, Homo sapiens
gaactgtatccacaa

SEQ ID NO: 1221182 - DNA, 15 bp, Homo sapiens
agaactgtatccaca

SEQ ID NO: 1221183 - DNA, 15 bp, Homo sapiens
gagaactgtatccac

SEQ ID NO: 1221184 - DNA, 15 bp, Homo sapiens
tgagaactgtatcca

SEQ ID NO: 1221185 - DNA, 15 bp, Homo sapiens
gtgagaactgtatcc

SEQ ID NO: 1221186 - DNA, 15 bp, Homo sapiens
ggtgagaactgtatc

SEQ ID NO: 1221187 - DNA, 15 bp, Homo sapiens
gggtgagaactgtat

SEQ ID NO: 1221188 - DNA, 15 bp, Homo sapiens
agggtgagaactgta

SEQ ID NO: 1221189 - DNA, 15 bp, Homo sapiens
gagggtgagaactgt

SEQ ID NO: 1221190 - DNA, 15 bp, Homo sapiens
ggagggtgagaactg

SEQ ID NO: 1221191 - DNA, 15 bp, Homo sapiens
tggagggtgagaact

SEQ ID NO: 1221192 - DNA, 15 bp, Homo sapiens
ctggagggtgagaac

SEQ ID NO: 1221193 - DNA, 15 bp, Homo sapiens
tctggagggtgagaa

SEQ ID NO: 1221194 - DNA, 15 bp, Homo sapiens
ctctggagggtgaga

SEQ ID NO: 1221195 - DNA, 15 bp, Homo sapiens
tctctggagggtgag

SEQ ID NO: 1221196 - DNA, 15 bp, Homo sapiens
ctctctggagggtga

SEQ ID NO: 1221197 - DNA, 15 bp, Homo sapiens
tctctctggagggtg

SEQ ID NO: 1221198 - DNA, 15 bp, Homo sapiens
ttctctctggagggt

SEQ ID NO: 1221199 - DNA, 15 bp, Homo sapiens
gttctctctggaggg

SEQ ID NO: 1221200 - DNA, 15 bp, Homo sapiens
agttctctctggagg

SEQ ID NO: 1221201 - DNA, 15 bp, Homo sapiens
gagttctctctggag

SEQ ID NO: 1221202 - DNA, 15 bp, Homo sapiens
agagttctctctgga

SEQ ID NO: 1221203 - DNA, 15 bp, Homo sapiens
gagagttctctctgg

SEQ ID NO: 1221204 - DNA, 15 bp, Homo sapiens
tgagagttctctctg

SEQ ID NO: 1221205 - DNA, 15 bp, Homo sapiens
gtgagagttctctct

SEQ ID NO: 1221206 - DNA, 15 bp, Homo sapiens
agtgagagttctctc

SEQ ID NO: 1221207 - DNA, 15 bp, Homo sapiens
tagtgagagttctct

SEQ ID NO: 1221208 - DNA, 15 bp, Homo sapiens
atagtgagagttctc

SEQ ID NO: 1221209 - DNA, 15 bp, Homo sapiens
tagatagatagtgag

SEQ ID NO: 1221210 - DNA, 15 bp, Homo sapiens
ctagatagatagtga

SEQ ID NO: 1221211 - DNA, 15 bp, Homo sapiens
tctagatagatagtg

SEQ ID NO: 1221212 - DNA, 15 bp, Homo sapiens
atctagatagatagt

SEQ ID NO: 1221213 - DNA, 15 bp, Homo sapiens
tatctagatagatag

SEQ ID NO: 1221214 - DNA, 15 bp, Homo sapiens
ctatctagatagata

SEQ ID NO: 1221215 - DNA, 15 bp, Homo sapiens
tctatctagatagat

SEQ ID NO: 1221216 - DNA, 15 bp, Homo sapiens
ttctatctagataga

SEQ ID NO: 1221217 - DNA, 15 bp, Homo sapiens
attctatctagatag

SEQ ID NO: 1221218 - DNA, 15 bp, Homo sapiens
aattctatctagata

SEQ ID NO: 1221219 - DNA, 15 bp, Homo sapiens
taattctatctagat

SEQ ID NO: 1221220 - DNA, 15 bp, Homo sapiens
ataattctatctaga

SEQ ID NO: 1221221 - DNA, 15 bp, Homo sapiens
gataattctatctag

SEQ ID NO: 1221222 - DNA, 15 bp, Homo sapiens
tgataattctatcta

SEQ ID NO: 1221223 - DNA, 15 bp, Homo sapiens
gtgataattctatct

SEQ ID NO: 1221224 - DNA, 15 bp, Homo sapiens
agtgataattctatc

SEQ ID NO: 1221225 - DNA, 15 bp, Homo sapiens
gagtgataattctat

SEQ ID NO: 1221226 - DNA, 15 bp, Homo sapiens
agagtgataattcta

SEQ ID NO: 1221227 - DNA, 15 bp, Homo sapiens
gagagtgataattct

SEQ ID NO: 1221228 - DNA, 15 bp, Homo sapiens
agagagtgataattc

SEQ ID NO: 1221229 - DNA, 15 bp, Homo sapiens
cagagagtgataatt

SEQ ID NO: 1221230 - DNA, 15 bp, Homo sapiens
ccagagagtgataat

SEQ ID NO: 1221231 - DNA, 15 bp, Homo sapiens
tccagagagtgataa

SEQ ID NO: 1221232 - DNA, 15 bp, Homo sapiens
atccagagagtgata

SEQ ID NO: 1221233 - DNA, 15 bp, Homo sapiens
tatccagagagtgat

SEQ ID NO: 1221234 - DNA, 15 bp, Homo sapiens
tttctatccagagag

SEQ ID NO: 1221235 - DNA, 15 bp, Homo sapiens
atttctatccagaga

SEQ ID NO: 1221236 - DNA, 15 bp, Homo sapiens
gatttctatccagag

SEQ ID NO: 1221237 - DNA, 15 bp, Homo sapiens
agatttctatccaga

SEQ ID NO: 1221238 - DNA, 15 bp, Homo sapiens
gagatttctatccag

SEQ ID NO: 1221239 - DNA, 15 bp, Homo sapiens
tgagatttctatcca

SEQ ID NO: 1221240 - DNA, 15 bp, Homo sapiens
gtgagatttctatcc

SEQ ID NO: 1221241 - DNA, 15 bp, Homo sapiens
agtgagatttctatc

SEQ ID NO: 1221242 - DNA, 15 bp, Homo sapiens
tagtgagatttctat

SEQ ID NO: 1221243 - DNA, 15 bp, Homo sapiens
atagtgagatttcta

SEQ ID NO: 1221244 - DNA, 15 bp, Homo sapiens
gatagtgagatttct

SEQ ID NO: 1221245 - DNA, 15 bp, Homo sapiens
agatagtgagatttc

SEQ ID NO: 1221246 - DNA, 15 bp, Homo sapiens
cagatagtgagattt

SEQ ID NO: 1221247 - DNA, 15 bp, Homo sapiens
acagatagtgagatt

SEQ ID NO: 1221248 - DNA, 15 bp, Homo sapiens
gacagatagtgagat

SEQ ID NO: 1221249 - DNA, 15 bp, Homo sapiens
agacagatagtgaga

SEQ ID NO: 1221250 - DNA, 15 bp, Homo sapiens
cagacagatagtgag

SEQ ID NO: 1221251 - DNA, 15 bp, Homo sapiens
ccagacagatagtga

SEQ ID NO: 1221252 - DNA, 15 bp, Homo sapiens
tccagacagatagtg

SEQ ID NO: 1221253 - DNA, 15 bp, Homo sapiens
atccagacagatagt

SEQ ID NO: 1221254 - DNA, 15 bp, Homo sapiens
tatccagacagatag

SEQ ID NO: 1221255 - DNA, 15 bp, Homo sapiens
ctatccagacagata

SEQ ID NO: 1221256 - DNA, 15 bp, Homo sapiens
tctatccagacagat

SEQ ID NO: 1221257 - DNA, 15 bp, Homo sapiens
ttctatccagacaga

SEQ ID NO: 1221258 - DNA, 15 bp, Homo sapiens
attctatccagacag

SEQ ID NO: 1221259 - DNA, 15 bp, Homo sapiens
aattctatccagaca

SEQ ID NO: 1221260 - DNA, 15 bp, Homo sapiens
gaattctatccagac

SEQ ID NO: 1221261 - DNA, 15 bp, Homo sapiens
tgatggtgagaattc

SEQ ID NO: 1221262 - DNA, 15 bp, Homo sapiens
ctgatggtgagaatt

SEQ ID NO: 1221263 - DNA, 15 bp, Homo sapiens
cctgatggtgagaat

SEQ ID NO: 1221264 - DNA, 15 bp, Homo sapiens
tcctgatggtgagaa

SEQ ID NO: 1221265 - DNA, 15 bp, Homo sapiens
atcctgatggtgaga

SEQ ID NO: 1221266 - DNA, 15 bp, Homo sapiens
tatcctgatggtgag

SEQ ID NO: 1221267 - DNA, 15 bp, Homo sapiens
ctatcctgatggtga

SEQ ID NO: 1221268 - DNA, 15 bp, Homo sapiens
tctatcctgatggtg

SEQ ID NO: 1221269 - DNA, 15 bp, Homo sapiens
ttctatcctgatggt

SEQ ID NO: 1221270 - DNA, 15 bp, Homo sapiens
gttctatcctgatgg

SEQ ID NO: 1221271 - DNA, 15 bp, Homo sapiens
agttctatcctgatg

SEQ ID NO: 1221272 - DNA, 15 bp, Homo sapiens
gagttctatcctgat

SEQ ID NO: 1221273 - DNA, 15 bp, Homo sapiens
agagttctatcctga

SEQ ID NO: 1221274 - DNA, 15 bp, Homo sapiens
gagagttctatcctg

SEQ ID NO: 1221275 - DNA, 15 bp, Homo sapiens
tgagagttctatcct

SEQ ID NO: 1221276 - DNA, 15 bp, Homo sapiens
cagtgagagttctat

SEQ ID NO: 1221277 - DNA, 15 bp, Homo sapiens
acagtgagagttcta

SEQ ID NO: 1221278 - DNA, 15 bp, Homo sapiens
gacagtgagagttct

SEQ ID NO: 1221279 - DNA, 15 bp, Homo sapiens
agacagtgagagttc

SEQ ID NO: 1221280 - DNA, 15 bp, Homo sapiens
cagacagtgagagtt

SEQ ID NO: 1221281 - DNA, 15 bp, Homo sapiens
ccagacagtgagagt

SEQ ID NO: 1221282 - DNA, 15 bp, Homo sapiens
tccagacagtgagag

SEQ ID NO: 1221283 - DNA, 15 bp, Homo sapiens
atccagacagtgaga

SEQ ID NO: 1221284 - DNA, 15 bp, Homo sapiens
tatccagacagtgag

SEQ ID NO: 1221285 - DNA, 15 bp, Homo sapiens
ttatccagacagtga

SEQ ID NO: 1221286 - DNA, 15 bp, Homo sapiens
tttatccagacagtg

SEQ ID NO: 1221287 - DNA, 15 bp, Homo sapiens
ttttatccagacagt

SEQ ID NO: 1221288 - DNA, 15 bp, Homo sapiens
attttatccagacag

SEQ ID NO: 1221289 - DNA, 15 bp, Homo sapiens
aattttatccagaca

SEQ ID NO: 1221290 - DNA, 15 bp, Homo sapiens
gaattttatccagac

SEQ ID NO: 1221291 - DNA, 15 bp, Homo sapiens
agaattttatccaga

SEQ ID NO: 1221292 - DNA, 15 bp, Homo sapiens
gagaattttatccag

SEQ ID NO: 1221293 - DNA, 15 bp, Homo sapiens
tgagaattttatcca

SEQ ID NO: 1221294 - DNA, 15 bp, Homo sapiens
gtgagaattttatcc

SEQ ID NO: 1221295 - DNA, 15 bp, Homo sapiens
ggtgagaattttatc

SEQ ID NO: 1221296 - DNA, 15 bp, Homo sapiens
tggtgagaattttat

SEQ ID NO: 1221297 - DNA, 15 bp, Homo sapiens
atggtgagaatttta

SEQ ID NO: 1221298 - DNA, 15 bp, Homo sapiens
gatggtgagaatttt

SEQ ID NO: 1221299 - DNA, 15 bp, Homo sapiens
cgatggtgagaattt

SEQ ID NO: 1221300 - DNA, 15 bp, Homo sapiens
ccgatggtgagaatt

SEQ ID NO: 1221301 - DNA, 15 bp, Homo sapiens
cccgatggtgagaat

SEQ ID NO: 1221302 - DNA, 15 bp, Homo sapiens
tcccgatggtgagaa

SEQ ID NO: 1221303 - DNA, 15 bp, Homo sapiens
atcccgatggtgaga

SEQ ID NO: 1221304 - DNA, 15 bp, Homo sapiens
tatcccgatggtgag

SEQ ID NO: 1221305 - DNA, 15 bp, Homo sapiens
ctatcccgatggtga

SEQ ID NO: 1221306 - DNA, 15 bp, Homo sapiens
tctatcccgatggtg

SEQ ID NO: 1221307 - DNA, 15 bp, Homo sapiens
ttctatcccgatggt

SEQ ID NO: 1221308 - DNA, 15 bp, Homo sapiens
gttctatcccgatgg

SEQ ID NO: 1221309 - DNA, 15 bp, Homo sapiens
agttctatcccgatg

SEQ ID NO: 1221310 - DNA, 15 bp, Homo sapiens
gagttctatcccgat

SEQ ID NO: 1221311 - DNA, 15 bp, Homo sapiens
agagttctatcccga

SEQ ID NO: 1221312 - DNA, 15 bp, Homo sapiens
gagagttctatcccg

SEQ ID NO: 1221313 - DNA, 15 bp, Homo sapiens
tgagagttctatccc

SEQ ID NO: 1221314 - DNA, 15 bp, Homo sapiens
ctagatagtgagagt

SEQ ID NO: 1221315 - DNA, 15 bp, Homo sapiens
tctagatagtgagag

SEQ ID NO: 1221316 - DNA, 15 bp, Homo sapiens
atctagatagtgaga

SEQ ID NO: 1221317 - DNA, 15 bp, Homo sapiens
tatctagatagtgag

SEQ ID NO: 1221318 - DNA, 15 bp, Homo sapiens
ctatctagatagtga

SEQ ID NO: 1221319 - DNA, 15 bp, Homo sapiens
tctatctagatagtg

SEQ ID NO: 1221320 - DNA, 15 bp, Homo sapiens
ttctatctagatagt

SEQ ID NO: 1221321 - DNA, 15 bp, Homo sapiens
gaattctatctagat

SEQ ID NO: 1221322 - DNA, 15 bp, Homo sapiens
agaattctatctaga

SEQ ID NO: 1221323 - DNA, 15 bp, Homo sapiens
gagaattctatctag

SEQ ID NO: 1221324 - DNA, 15 bp, Homo sapiens
tgagaattctatcta

SEQ ID NO: 1221325 - DNA, 15 bp, Homo sapiens
gtgagaattctatct

SEQ ID NO: 1221326 - DNA, 15 bp, Homo sapiens
ggtgagagttctatc

SEQ ID NO: 1221327 - DNA, 15 bp, Homo sapiens
tggtgagagttctat

SEQ ID NO: 1221328 - DNA, 15 bp, Homo sapiens
atggtgagagttcta

SEQ ID NO: 1221329 - DNA, 15 bp, Homo sapiens
gatggtgagagttct

SEQ ID NO: 1221330 - DNA, 15 bp, Homo sapiens
agatggtgagagttc

SEQ ID NO: 1221331 - DNA, 15 bp, Homo sapiens
tagatggtgagagtt

SEQ ID NO: 1221332 - DNA, 15 bp, Homo sapiens
ttagatggtgagagt

SEQ ID NO: 1221333 - DNA, 15 bp, Homo sapiens
tttagatggtgagag

SEQ ID NO: 1221334 - DNA, 15 bp, Homo sapiens
atttagatggtgaga

SEQ ID NO: 1221335 - DNA, 15 bp, Homo sapiens
tatttagatggtgag

SEQ ID NO: 1221336 - DNA, 15 bp, Homo sapiens
atatttagatggtga

SEQ ID NO: 1221337 - DNA, 15 bp, Homo sapiens
tatatttagatggtg

SEQ ID NO: 1221338 - DNA, 15 bp, Homo sapiens
ttatatttagatggt

SEQ ID NO: 1221339 - DNA, 15 bp, Homo sapiens
attatatttagatgg

SEQ ID NO: 1221340 - DNA, 15 bp, Homo sapiens
aattatatttagatg

SEQ ID NO: 1221341 - DNA, 15 bp, Homo sapiens
gaattatatttagat

SEQ ID NO: 1221342 - DNA, 15 bp, Homo sapiens
agaattatatttaga

SEQ ID NO: 1221343 - DNA, 15 bp, Homo sapiens
gagaattatatttag

SEQ ID NO: 1221344 - DNA, 15 bp, Homo sapiens
tgagaattatattta

SEQ ID NO: 1221345 - DNA, 15 bp, Homo sapiens
gtgagaattatattt

SEQ ID NO: 1221346 - DNA, 15 bp, Homo sapiens
agtgagaattatatt

SEQ ID NO: 1221347 - DNA, 15 bp, Homo sapiens
gagtgagaattatat

SEQ ID NO: 1221348 - DNA, 15 bp, Homo sapiens
agagtgagaattata

SEQ ID NO: 1221349 - DNA, 15 bp, Homo sapiens
gagagtgagaattat

SEQ ID NO: 1221350 - DNA, 15 bp, Homo sapiens
tgagagtgagaatta

SEQ ID NO: 1221351 - DNA, 15 bp, Homo sapiens
ctgagagtgagaatt

SEQ ID NO: 1221352 - DNA, 15 bp, Homo sapiens
cctgagagtgagaat

SEQ ID NO: 1221353 - DNA, 15 bp, Homo sapiens
tcctgagagtgagaa

SEQ ID NO: 1221354 - DNA, 15 bp, Homo sapiens
atcctgagagtgaga

SEQ ID NO: 1221355 - DNA, 15 bp, Homo sapiens
tatcctgagagtgag

SEQ ID NO: 1221356 - DNA, 15 bp, Homo sapiens
ctatcctgagagtga

SEQ ID NO: 1221357 - DNA, 15 bp, Homo sapiens
tctatcctgagagtg

SEQ ID NO: 1221358 - DNA, 15 bp, Homo sapiens
ttctatcctgagagt

SEQ ID NO: 1221359 - DNA, 15 bp, Homo sapiens
gttctatcctgagag

SEQ ID NO: 1221360 - DNA, 15 bp, Homo sapiens
agttctatcctgaga

SEQ ID NO: 1221361 - DNA, 15 bp, Homo sapiens
gagttctatcctgag

SEQ ID NO: 1221362 - DNA, 15 bp, Homo sapiens
cccatccagatagat

SEQ ID NO: 1221363 - DNA, 15 bp, Homo sapiens
tcccatccagataga

SEQ ID NO: 1221364 - DNA, 15 bp, Homo sapiens
atcccatccagatag

SEQ ID NO: 1221365 - DNA, 15 bp, Homo sapiens
aatcccatccagata

SEQ ID NO: 1221366 - DNA, 15 bp, Homo sapiens
gaatcccatccagat

SEQ ID NO: 1221367 - DNA, 15 bp, Homo sapiens
agaatcccatccaga

SEQ ID NO: 1221368 - DNA, 15 bp, Homo sapiens
gagaatcccatccag

SEQ ID NO: 1221369 - DNA, 15 bp, Homo sapiens
ggagaatcccatcca

SEQ ID NO: 1221370 - DNA, 15 bp, Homo sapiens
gggagaatcccatcc

SEQ ID NO: 1221371 - DNA, 15 bp, Homo sapiens
agggagaatcccatc

SEQ ID NO: 1221372 - DNA, 15 bp, Homo sapiens
gagggagaatcccat

SEQ ID NO: 1221373 - DNA, 15 bp, Homo sapiens
agagggagaatccca

SEQ ID NO: 1221374 - DNA, 15 bp, Homo sapiens
tagagggagaatccc

SEQ ID NO: 1221375 - DNA, 15 bp, Homo sapiens
atagagggagaatcc

SEQ ID NO: 1221376 - DNA, 15 bp, Homo sapiens
catagagggagaatc

SEQ ID NO: 1221377 - DNA, 15 bp, Homo sapiens
ccatagagggagaat

SEQ ID NO: 1221378 - DNA, 15 bp, Homo sapiens
tccatagagggagaa

SEQ ID NO: 1221379 - DNA, 15 bp, Homo sapiens
atccatagagggaga

SEQ ID NO: 1221380 - DNA, 15 bp, Homo sapiens
tatccatagagggag

SEQ ID NO: 1221381 - DNA, 15 bp, Homo sapiens
ctatccatagaggga

SEQ ID NO: 1221382 - DNA, 15 bp, Homo sapiens
tctatccatagaggg

SEQ ID NO: 1221383 - DNA, 15 bp, Homo sapiens
ttctatccatagagg

SEQ ID NO: 1221384 - DNA, 15 bp, Homo sapiens
gttctatccatagag

SEQ ID NO: 1221385 - DNA, 15 bp, Homo sapiens
agttctatccataga

SEQ ID NO: 1221386 - DNA, 15 bp, Homo sapiens
gagttctatccatag

SEQ ID NO: 1221387 - DNA, 15 bp, Homo sapiens
agagttctatccata

SEQ ID NO: 1221388 - DNA, 15 bp, Homo sapiens
gagagttctatccat

SEQ ID NO: 1221389 - DNA, 15 bp, Homo sapiens
ctgagagttctatcc

SEQ ID NO: 1221390 - DNA, 15 bp, Homo sapiens
actgagagttctatc

SEQ ID NO: 1221391 - DNA, 15 bp, Homo sapiens
cactgagagttctat

SEQ ID NO: 1221392 - DNA, 15 bp, Homo sapiens
acactgagagttcta

SEQ ID NO: 1221393 - DNA, 15 bp, Homo sapiens
tacactgagagttct

SEQ ID NO: 1221394 - DNA, 15 bp, Homo sapiens
atacactgagagttc

SEQ ID NO: 1221395 - DNA, 15 bp, Homo sapiens
tatacactgagagtt

SEQ ID NO: 1221396 - DNA, 15 bp, Homo sapiens
atatacactgagagt

SEQ ID NO: 1221397 - DNA, 15 bp, Homo sapiens
gatatacactgagag

SEQ ID NO: 1221398 - DNA, 15 bp, Homo sapiens
agatatacactgaga

SEQ ID NO: 1221399 - DNA, 15 bp, Homo sapiens
cagatatacactgag

SEQ ID NO: 1221400 - DNA, 15 bp, Homo sapiens
ccagatatacactga

SEQ ID NO: 1221401 - DNA, 15 bp, Homo sapiens
tccagatatacactg

SEQ ID NO: 1221402 - DNA, 15 bp, Homo sapiens
atccagatatacact

SEQ ID NO: 1221403 - DNA, 15 bp, Homo sapiens
tatccagatatacac

SEQ ID NO: 1221404 - DNA, 15 bp, Homo sapiens
ctatccagatataca

SEQ ID NO: 1221405 - DNA, 15 bp, Homo sapiens
tctatccagatatac

SEQ ID NO: 1221406 - DNA, 15 bp, Homo sapiens
ttctatccagatata

SEQ ID NO: 1221407 - DNA, 15 bp, Homo sapiens
attctatccagatat

SEQ ID NO: 1221408 - DNA, 15 bp, Homo sapiens
tgagtgagaattcta

SEQ ID NO: 1221409 - DNA, 15 bp, Homo sapiens
gtgagtgagaattct

SEQ ID NO: 1221410 - DNA, 15 bp, Homo sapiens
agtgagtgagaattc

SEQ ID NO: 1221411 - DNA, 15 bp, Homo sapiens
cagtgagtgagaatt

SEQ ID NO: 1221412 - DNA, 15 bp, Homo sapiens
acagtgagtgagaat

SEQ ID NO: 1221413 - DNA, 15 bp, Homo sapiens
tacagtgagtgagaa

SEQ ID NO: 1221414 - DNA, 15 bp, Homo sapiens
atacagtgagtgaga

SEQ ID NO: 1221415 - DNA, 15 bp, Homo sapiens
tatacagtgagtgag

SEQ ID NO: 1221416 - DNA, 15 bp, Homo sapiens
ctatacagtgagtga

SEQ ID NO: 1221417 - DNA, 15 bp, Homo sapiens
tctatacagtgagtg

SEQ ID NO: 1221418 - DNA, 15 bp, Homo sapiens
ttctatacagtgagt

SEQ ID NO: 1221419 - DNA, 15 bp, Homo sapiens
gttctatacagtgag

SEQ ID NO: 1221420 - DNA, 15 bp, Homo sapiens
agttctatacagtga

SEQ ID NO: 1221421 - DNA, 15 bp, Homo sapiens
gagttctatacagtg

SEQ ID NO: 1221422 - DNA, 15 bp, Homo sapiens
agagttctatacagt

SEQ ID NO: 1221423 - DNA, 15 bp, Homo sapiens
gagagttctatacag

SEQ ID NO: 1221424 - DNA, 15 bp, Homo sapiens
tgagagttctataca

SEQ ID NO: 1221425 - DNA, 15 bp, Homo sapiens
gtgagagttctatac

SEQ ID NO: 1221426 - DNA, 15 bp, Homo sapiens
agtgagagttctata

SEQ ID NO: 1221427 - DNA, 15 bp, Homo sapiens
acagatagtgagagt

SEQ ID NO: 1221428 - DNA, 15 bp, Homo sapiens
gacagatagtgagag

SEQ ID NO: 1221429 - DNA, 15 bp, Homo sapiens
catggtgagaattct

SEQ ID NO: 1221430 - DNA, 15 bp, Homo sapiens
acatggtgagaattc

SEQ ID NO: 1221431 - DNA, 15 bp, Homo sapiens
cacatggtgagaatt

SEQ ID NO: 1221432 - DNA, 15 bp, Homo sapiens
acacatggtgagaat

SEQ ID NO: 1221433 - DNA, 15 bp, Homo sapiens
tacacatggtgagaa

SEQ ID NO: 1221434 - DNA, 15 bp, Homo sapiens
atacacatggtgaga

SEQ ID NO: 1221435 - DNA, 15 bp, Homo sapiens
aatacacatggtgag

SEQ ID NO: 1221436 - DNA, 15 bp, Homo sapiens
caatacacatggtga

SEQ ID NO: 1221437 - DNA, 15 bp, Homo sapiens
tcaatacacatggtg

SEQ ID NO: 1221438 - DNA, 15 bp, Homo sapiens
atcaatacacatggt

SEQ ID NO: 1221439 - DNA, 15 bp, Homo sapiens
gatcaatacacatgg

SEQ ID NO: 1221440 - DNA, 15 bp, Homo sapiens
agatcaatacacatg

SEQ ID NO: 1221441 - DNA, 15 bp, Homo sapiens
gagatcaatacacat

SEQ ID NO: 1221442 - DNA, 15 bp, Homo sapiens
agagatcaatacaca

SEQ ID NO: 1221443 - DNA, 15 bp, Homo sapiens
gagagatcaatacac

SEQ ID NO: 1221444 - DNA, 15 bp, Homo sapiens
tgagagatcaataca

SEQ ID NO: 1221445 - DNA, 15 bp, Homo sapiens
gtgagagatcaatac

SEQ ID NO: 1221446 - DNA, 15 bp, Homo sapiens
agtgagagatcaata

SEQ ID NO: 1221447 - DNA, 15 bp, Homo sapiens
gagtgagagatcaat

SEQ ID NO: 1221448 - DNA, 15 bp, Homo sapiens
agagtgagagatcaa

SEQ ID NO: 1221449 - DNA, 15 bp, Homo sapiens
gagagtgagagatca

SEQ ID NO: 1221450 - DNA, 15 bp, Homo sapiens
cgagagtgagagatc

SEQ ID NO: 1221451 - DNA, 15 bp, Homo sapiens
ccgagagtgagagat

SEQ ID NO: 1221452 - DNA, 15 bp, Homo sapiens
cccgagagtgagaga

SEQ ID NO: 1221453 - DNA, 15 bp, Homo sapiens
tcccgagagtgagag

SEQ ID NO: 1221454 - DNA, 15 bp, Homo sapiens
atcccgagagtgaga

SEQ ID NO: 1221455 - DNA, 15 bp, Homo sapiens
tatcccgagagtgag

SEQ ID NO: 1221456 - DNA, 15 bp, Homo sapiens
ctatcccgagagtga

SEQ ID NO: 1221457 - DNA, 15 bp, Homo sapiens
tctatcccgagagtg

SEQ ID NO: 1221458 - DNA, 15 bp, Homo sapiens
ttctatcccgagagt

SEQ ID NO: 1221459 - DNA, 15 bp, Homo sapiens
attctatcccgagag

SEQ ID NO: 1221460 - DNA, 15 bp, Homo sapiens
aattctatcccgaga

SEQ ID NO: 1221461 - DNA, 15 bp, Homo sapiens
taattctatcccgag

SEQ ID NO: 1221462 - DNA, 15 bp, Homo sapiens
ataattctatcccga

SEQ ID NO: 1221463 - DNA, 15 bp, Homo sapiens
tataattctatcccg

SEQ ID NO: 1221464 - DNA, 15 bp, Homo sapiens
ttataattctatccc

SEQ ID NO: 1221465 - DNA, 15 bp, Homo sapiens
gttataattctatcc

SEQ ID NO: 1221466 - DNA, 15 bp, Homo sapiens
agttataattctatc

SEQ ID NO: 1221467 - DNA, 15 bp, Homo sapiens
gagttataattctat

SEQ ID NO: 1221468 - DNA, 15 bp, Homo sapiens
agagttataattcta

SEQ ID NO: 1221469 - DNA, 15 bp, Homo sapiens
gagagttataattct

SEQ ID NO: 1221470 - DNA, 15 bp, Homo sapiens
agagagttataattc

SEQ ID NO: 1221471 - DNA, 15 bp, Homo sapiens
cagagagttataatt

SEQ ID NO: 1221472 - DNA, 15 bp, Homo sapiens
ccagagagttataat

SEQ ID NO: 1221473 - DNA, 15 bp, Homo sapiens
tccagagagttataa

SEQ ID NO: 1221474 - DNA, 15 bp, Homo sapiens
atccagagagttata

SEQ ID NO: 1221475 - DNA, 15 bp, Homo sapiens
tatccagagagttat

SEQ ID NO: 1221476 - DNA, 15 bp, Homo sapiens
ctatccagagagtta

SEQ ID NO: 1221477 - DNA, 15 bp, Homo sapiens
tctatccagagagtt

SEQ ID NO: 1221478 - DNA, 15 bp, Homo sapiens
tatccagatagatag

SEQ ID NO: 1221479 - DNA, 15 bp, Homo sapiens
ctatccagatagata

SEQ ID NO: 1221480 - DNA, 15 bp, Homo sapiens
tctatccagatagat

SEQ ID NO: 1221481 - DNA, 15 bp, Homo sapiens
aagaattctatccag

SEQ ID NO: 1221482 - DNA, 15 bp, Homo sapiens
taagaattctatcca

SEQ ID NO: 1221483 - DNA, 15 bp, Homo sapiens
gtaagaattctatcc

SEQ ID NO: 1221484 - DNA, 15 bp, Homo sapiens
ggtaagaattctatc

SEQ ID NO: 1221485 - DNA, 15 bp, Homo sapiens
tggtaagaattctat

SEQ ID NO: 1221486 - DNA, 15 bp, Homo sapiens
atggtaagaattcta

SEQ ID NO: 1221487 - DNA, 15 bp, Homo sapiens
gatggtaagaattct

SEQ ID NO: 1221488 - DNA, 15 bp, Homo sapiens
agatggtaagaattc

SEQ ID NO: 1221489 - DNA, 15 bp, Homo sapiens
cagatggtaagaatt

SEQ ID NO: 1221490 - DNA, 15 bp, Homo sapiens
ccagatggtaagaat

SEQ ID NO: 1221491 - DNA, 15 bp, Homo sapiens
tccagatggtaagaa

SEQ ID NO: 1221492 - DNA, 15 bp, Homo sapiens
atccagatggtaaga

SEQ ID NO: 1221493 - DNA, 15 bp, Homo sapiens
tatccagatggtaag

SEQ ID NO: 1221494 - DNA, 15 bp, Homo sapiens
ctatccagatggtaa

SEQ ID NO: 1221495 - DNA, 15 bp, Homo sapiens
tctatccagatggta

SEQ ID NO: 1221496 - DNA, 15 bp, Homo sapiens
tcagatagtgagagt

SEQ ID NO: 1221497 - DNA, 15 bp, Homo sapiens
ttcagatagtgagag

SEQ ID NO: 1221498 - DNA, 15 bp, Homo sapiens
attcagatagtgaga

SEQ ID NO: 1221499 - DNA, 15 bp, Homo sapiens
tattcagatagtgag

SEQ ID NO: 1221500 - DNA, 15 bp, Homo sapiens
ctattcagatagtga

SEQ ID NO: 1221501 - DNA, 15 bp, Homo sapiens
tctattcagatagtg

SEQ ID NO: 1221502 - DNA, 15 bp, Homo sapiens
ttctattcagatagt

SEQ ID NO: 1221503 - DNA, 15 bp, Homo sapiens
attctattcagatag

SEQ ID NO: 1221504 - DNA, 15 bp, Homo sapiens
aattctattcagata

SEQ ID NO: 1221505 - DNA, 15 bp, Homo sapiens
gaattctattcagat

SEQ ID NO: 1221506 - DNA, 15 bp, Homo sapiens
agaattctattcaga

SEQ ID NO: 1221507 - DNA, 15 bp, Homo sapiens
gagaattctattcag

SEQ ID NO: 1221508 - DNA, 15 bp, Homo sapiens
tgagaattctattca

SEQ ID NO: 1221509 - DNA, 15 bp, Homo sapiens
gtgagaattctattc

SEQ ID NO: 1221510 - DNA, 15 bp, Homo sapiens
agtgagaattctatt

SEQ ID NO: 1221511 - DNA, 15 bp, Homo sapiens
aagtgagagttctat

SEQ ID NO: 1221512 - DNA, 15 bp, Homo sapiens
aaagtgagagttcta

SEQ ID NO: 1221513 - DNA, 15 bp, Homo sapiens
gaaagtgagagttct

SEQ ID NO: 1221514 - DNA, 15 bp, Homo sapiens
agaaagtgagagttc

SEQ ID NO: 1221515 - DNA, 15 bp, Homo sapiens
tagaaagtgagagtt

SEQ ID NO: 1221516 - DNA, 15 bp, Homo sapiens
ctagaaagtgagagt

SEQ ID NO: 1221517 - DNA, 15 bp, Homo sapiens
gctagaaagtgagag

SEQ ID NO: 1221518 - DNA, 15 bp, Homo sapiens
agctagaaagtgaga

SEQ ID NO: 1221519 - DNA, 15 bp, Homo sapiens
aagctagaaagtgag

SEQ ID NO: 1221520 - DNA, 15 bp, Homo sapiens
caagctagaaagtga

SEQ ID NO: 1221521 - DNA, 15 bp, Homo sapiens
gcaagctagaaagtg

SEQ ID NO: 1221522 - DNA, 15 bp, Homo sapiens
agcaagctagaaagt

SEQ ID NO: 1221523 - DNA, 15 bp, Homo sapiens
tagcaagctagaaag

SEQ ID NO: 1221524 - DNA, 15 bp, Homo sapiens
ctagcaagctagaaa

SEQ ID NO: 1221525 - DNA, 15 bp, Homo sapiens
tctagcaagctagaa

SEQ ID NO: 1221526 - DNA, 15 bp, Homo sapiens
ttctagcaagctaga

SEQ ID NO: 1221527 - DNA, 15 bp, Homo sapiens
attctagcaagctag

SEQ ID NO: 1221528 - DNA, 15 bp, Homo sapiens
aattctagcaagcta

SEQ ID NO: 1221529 - DNA, 15 bp, Homo sapiens
gaattctagcaagct

SEQ ID NO: 1221530 - DNA, 15 bp, Homo sapiens
agaattctagcaagc

SEQ ID NO: 1221531 - DNA, 15 bp, Homo sapiens
gagaattctagcaag

SEQ ID NO: 1221532 - DNA, 15 bp, Homo sapiens
tgagaattctagcaa

SEQ ID NO: 1221533 - DNA, 15 bp, Homo sapiens
gtgagaattctagca

SEQ ID NO: 1221534 - DNA, 15 bp, Homo sapiens
ggtgagaattctagc

SEQ ID NO: 1221535 - DNA, 15 bp, Homo sapiens
gggtgagaattctag

SEQ ID NO: 1221536 - DNA, 15 bp, Homo sapiens
agggtgagaattcta

SEQ ID NO: 1221537 - DNA, 15 bp, Homo sapiens
gagggtgagaattct

SEQ ID NO: 1221538 - DNA, 15 bp, Homo sapiens
agagggtgagaattc

SEQ ID NO: 1221539 - DNA, 15 bp, Homo sapiens
cagagggtgagaatt

SEQ ID NO: 1221540 - DNA, 15 bp, Homo sapiens
ccagagggtgagaat

SEQ ID NO: 1221541 - DNA, 15 bp, Homo sapiens
tccagagggtgagaa

SEQ ID NO: 1221542 - DNA, 15 bp, Homo sapiens
atccagagggtgaga

SEQ ID NO: 1221543 - DNA, 15 bp, Homo sapiens
tatccagagggtgag

SEQ ID NO: 1221544 - DNA, 15 bp, Homo sapiens
gtatccagagggtga

SEQ ID NO: 1221545 - DNA, 15 bp, Homo sapiens
tgtatccagagggtg

SEQ ID NO: 1221546 - DNA, 15 bp, Homo sapiens
ctgtatccagagggt

SEQ ID NO: 1221547 - DNA, 15 bp, Homo sapiens
actgtatccagaggg

SEQ ID NO: 1221548 - DNA, 15 bp, Homo sapiens
aactgtatccagagg

SEQ ID NO: 1221549 - DNA, 15 bp, Homo sapiens
gaactgtatccagag

SEQ ID NO: 1221550 - DNA, 15 bp, Homo sapiens
agaactgtatccaga

SEQ ID NO: 1221551 - DNA, 15 bp, Homo sapiens
tagaactgtatccag

SEQ ID NO: 1221552 - DNA, 15 bp, Homo sapiens
ttagaactgtatcca

SEQ ID NO: 1221553 - DNA, 15 bp, Homo sapiens
gttagaactgtatcc

SEQ ID NO: 1221554 - DNA, 15 bp, Homo sapiens
agttagaactgtatc

SEQ ID NO: 1221555 - DNA, 15 bp, Homo sapiens
tagttagaactgtat

SEQ ID NO: 1221556 - DNA, 15 bp, Homo sapiens
atagttagaactgta

SEQ ID NO: 1221557 - DNA, 15 bp, Homo sapiens
gatagttagaactgt

SEQ ID NO: 1221558 - DNA, 15 bp, Homo sapiens
agatagttagaactg

SEQ ID NO: 1221559 - DNA, 15 bp, Homo sapiens
cagatagttagaact

SEQ ID NO: 1221560 - DNA, 15 bp, Homo sapiens
acagatagttagaac

SEQ ID NO: 1221561 - DNA, 15 bp, Homo sapiens
tacagatagttagaa

SEQ ID NO: 1221562 - DNA, 15 bp, Homo sapiens
atacagatagttaga

SEQ ID NO: 1221563 - DNA, 15 bp, Homo sapiens
tatacagatagttag

SEQ ID NO: 1221564 - DNA, 15 bp, Homo sapiens
ctatacagatagtta

SEQ ID NO: 1221565 - DNA, 15 bp, Homo sapiens
tctatacagatagtt

SEQ ID NO: 1221566 - DNA, 15 bp, Homo sapiens
ttctatacagatagt

SEQ ID NO: 1221567 - DNA, 15 bp, Homo sapiens
attctatacagatag

SEQ ID NO: 1221568 - DNA, 15 bp, Homo sapiens
aattctatacagata

SEQ ID NO: 1221569 - DNA, 15 bp, Homo sapiens
gaattctatacagat

SEQ ID NO: 1221570 - DNA, 15 bp, Homo sapiens
agaattctatacaga

SEQ ID NO: 1221571 - DNA, 15 bp, Homo sapiens
gagaattctatacag

SEQ ID NO: 1221572 - DNA, 15 bp, Homo sapiens
tgagaattctataca

SEQ ID NO: 1221573 - DNA, 15 bp, Homo sapiens
gtgagaattctatac

SEQ ID NO: 1221574 - DNA, 15 bp, Homo sapiens
tgtgagaattctata

SEQ ID NO: 1221575 - DNA, 15 bp, Homo sapiens
gtgtgagaattctat

SEQ ID NO: 1221576 - DNA, 15 bp, Homo sapiens
agtgtgagaattcta

SEQ ID NO: 1221577 - DNA, 15 bp, Homo sapiens
gagtgtgagaattct

SEQ ID NO: 1221578 - DNA, 15 bp, Homo sapiens
agagtgtgagaattc

SEQ ID NO: 1221579 - DNA, 15 bp, Homo sapiens
cagagtgtgagaatt

SEQ ID NO: 1221580 - DNA, 15 bp, Homo sapiens
ccagagtgtgagaat

SEQ ID NO: 1221581 - DNA, 15 bp, Homo sapiens
cccagagtgtgagaa

SEQ ID NO: 1221582 - DNA, 15 bp, Homo sapiens
acccagagtgtgaga

SEQ ID NO: 1221583 - DNA, 15 bp, Homo sapiens
tacccagagtgtgag

SEQ ID NO: 1221584 - DNA, 15 bp, Homo sapiens
ctacccagagtgtga

SEQ ID NO: 1221585 - DNA, 15 bp, Homo sapiens
tctacccagagtgtg

SEQ ID NO: 1221586 - DNA, 15 bp, Homo sapiens
ttctacccagagtgt

SEQ ID NO: 1221587 - DNA, 15 bp, Homo sapiens
gttctacccagagtg

SEQ ID NO: 1221588 - DNA, 15 bp, Homo sapiens
agttctacccagagt

SEQ ID NO: 1221589 - DNA, 15 bp, Homo sapiens
gagttctacccagag

SEQ ID NO: 1221590 - DNA, 15 bp, Homo sapiens
ggagttctacccaga

SEQ ID NO: 1221591 - DNA, 15 bp, Homo sapiens
gggagttctacccag

SEQ ID NO: 1221592 - DNA, 15 bp, Homo sapiens
tgggagttctaccca

SEQ ID NO: 1221593 - DNA, 15 bp, Homo sapiens
gtgggagttctaccc

SEQ ID NO: 1221594 - DNA, 15 bp, Homo sapiens
agtgggagttctacc

SEQ ID NO: 1221595 - DNA, 15 bp, Homo sapiens
tagtgggagttctac

SEQ ID NO: 1221596 - DNA, 15 bp, Homo sapiens
catagtgggagttct

SEQ ID NO: 1221597 - DNA, 15 bp, Homo sapiens
acatagtgggagttc

SEQ ID NO: 1221598 - DNA, 15 bp, Homo sapiens
tacatagtgggagtt

SEQ ID NO: 1221599 - DNA, 15 bp, Homo sapiens
atacatagtgggagt

SEQ ID NO: 1221600 - DNA, 15 bp, Homo sapiens
gatacatagtgggag

SEQ ID NO: 1221601 - DNA, 15 bp, Homo sapiens
agatacatagtggga

SEQ ID NO: 1221602 - DNA, 15 bp, Homo sapiens
cagatacatagtggg

SEQ ID NO: 1221603 - DNA, 15 bp, Homo sapiens
ccagatacatagtgg

SEQ ID NO: 1221604 - DNA, 15 bp, Homo sapiens
tccagatacatagtg

SEQ ID NO: 1221605 - DNA, 15 bp, Homo sapiens
atccagatacatagt

SEQ ID NO: 1221606 - DNA, 15 bp, Homo sapiens
tatccagatacatag

SEQ ID NO: 1221607 - DNA, 15 bp, Homo sapiens
ctatccagatacata

SEQ ID NO: 1221608 - DNA, 15 bp, Homo sapiens
tctatccagatacat

SEQ ID NO: 1221609 - DNA, 15 bp, Homo sapiens
ctctatccagataca

SEQ ID NO: 1221610 - DNA, 15 bp, Homo sapiens
actctatccagatac

SEQ ID NO: 1221611 - DNA, 15 bp, Homo sapiens
aactctatccagata

SEQ ID NO: 1221612 - DNA, 15 bp, Homo sapiens
gaactctatccagat

SEQ ID NO: 1221613 - DNA, 15 bp, Homo sapiens
agaactctatccaga

SEQ ID NO: 1221614 - DNA, 15 bp, Homo sapiens
gagaactctatccag

SEQ ID NO: 1221615 - DNA, 15 bp, Homo sapiens
tgagaactctatcca

SEQ ID NO: 1221616 - DNA, 15 bp, Homo sapiens
gtgagaactctatcc

SEQ ID NO: 1221617 - DNA, 15 bp, Homo sapiens
agtgagaactctatc

SEQ ID NO: 1221618 - DNA, 15 bp, Homo sapiens
aagtgagaactctat

SEQ ID NO: 1221619 - DNA, 15 bp, Homo sapiens
aaagtgagaactcta

SEQ ID NO: 1221620 - DNA, 15 bp, Homo sapiens
gaaagtgagaactct

SEQ ID NO: 1221621 - DNA, 15 bp, Homo sapiens
agaaagtgagaactc

SEQ ID NO: 1221622 - DNA, 15 bp, Homo sapiens
cagaaagtgagaact

SEQ ID NO: 1221623 - DNA, 15 bp, Homo sapiens
ccagaaagtgagaac

SEQ ID NO: 1221624 - DNA, 15 bp, Homo sapiens
tccagaaagtgagaa

SEQ ID NO: 1221625 - DNA, 15 bp, Homo sapiens
atccagaaagtgaga

SEQ ID NO: 1221626 - DNA, 15 bp, Homo sapiens
tatccagaaagtgag

SEQ ID NO: 1221627 - DNA, 15 bp, Homo sapiens
ctatccagaaagtga

SEQ ID NO: 1221628 - DNA, 15 bp, Homo sapiens
tctatccagaaagtg

SEQ ID NO: 1221629 - DNA, 15 bp, Homo sapiens
ttctatccagaaagt

SEQ ID NO: 1221630 - DNA, 15 bp, Homo sapiens
gttctatccagaaag

SEQ ID NO: 1221631 - DNA, 15 bp, Homo sapiens
agttctatccagaaa

SEQ ID NO: 1221632 - DNA, 15 bp, Homo sapiens
gagttctatccagaa

SEQ ID NO: 1221633 - DNA, 15 bp, Homo sapiens
tcagatagatagtga

SEQ ID NO: 1221634 - DNA, 15 bp, Homo sapiens
ttcagatagatagtg

SEQ ID NO: 1221635 - DNA, 15 bp, Homo sapiens
attcagatagatagt

SEQ ID NO: 1221636 - DNA, 15 bp, Homo sapiens
tattcagatagatag

SEQ ID NO: 1221637 - DNA, 15 bp, Homo sapiens
ctattcagatagata

SEQ ID NO: 1221638 - DNA, 15 bp, Homo sapiens
tctattcagatagat

SEQ ID NO: 1221639 - DNA, 15 bp, Homo sapiens
ttctattcagataga

SEQ ID NO: 1221640 - DNA, 15 bp, Homo sapiens
ggtgagaattctatt

SEQ ID NO: 1221641 - DNA, 15 bp, Homo sapiens
gggtgagaattctat

SEQ ID NO: 1221642 - DNA, 15 bp, Homo sapiens
tagggtgagaattct

SEQ ID NO: 1221643 - DNA, 15 bp, Homo sapiens
atagggtgagaattc

SEQ ID NO: 1221644 - DNA, 15 bp, Homo sapiens
catagggtgagaatt

SEQ ID NO: 1221645 - DNA, 15 bp, Homo sapiens
ccatagggtgagaat

SEQ ID NO: 1221646 - DNA, 15 bp, Homo sapiens
cccatagggtgagaa

SEQ ID NO: 1221647 - DNA, 15 bp, Homo sapiens
acccatagggtgaga

SEQ ID NO: 1221648 - DNA, 15 bp, Homo sapiens
tacccatagggtgag

SEQ ID NO: 1221649 - DNA, 15 bp, Homo sapiens
ctacccatagggtga

SEQ ID NO: 1221650 - DNA, 15 bp, Homo sapiens
tctacccatagggtg

SEQ ID NO: 1221651 - DNA, 15 bp, Homo sapiens
ttctacccatagggt

SEQ ID NO: 1221652 - DNA, 15 bp, Homo sapiens
gttctacccataggg

SEQ ID NO: 1221653 - DNA, 15 bp, Homo sapiens
agttctacccatagg

SEQ ID NO: 1221654 - DNA, 15 bp, Homo sapiens
gagttctacccatag

SEQ ID NO: 1221655 - DNA, 15 bp, Homo sapiens
agagttctacccata

SEQ ID NO: 1221656 - DNA, 15 bp, Homo sapiens
cagagttctacccat

SEQ ID NO: 1221657 - DNA, 15 bp, Homo sapiens
tcagagttctaccca

SEQ ID NO: 1221658 - DNA, 15 bp, Homo sapiens
gtcagagttctaccc

SEQ ID NO: 1221659 - DNA, 15 bp, Homo sapiens
agtcagagttctacc

SEQ ID NO: 1221660 - DNA, 15 bp, Homo sapiens
tagtcagagttctac

SEQ ID NO: 1221661 - DNA, 15 bp, Homo sapiens
atagtcagagttcta

SEQ ID NO: 1221662 - DNA, 15 bp, Homo sapiens
gatagtcagagttct

SEQ ID NO: 1221663 - DNA, 15 bp, Homo sapiens
agatagtcagagttc

SEQ ID NO: 1221664 - DNA, 15 bp, Homo sapiens
cagatagtcagagtt

SEQ ID NO: 1221665 - DNA, 15 bp, Homo sapiens
acagatagtcagagt

SEQ ID NO: 1221666 - DNA, 15 bp, Homo sapiens
gacagatagtcagag

SEQ ID NO: 1221667 - DNA, 15 bp, Homo sapiens
agacagatagtcaga

SEQ ID NO: 1221668 - DNA, 15 bp, Homo sapiens
cagacagatagtcag

SEQ ID NO: 1221669 - DNA, 15 bp, Homo sapiens
ccagacagatagtca

SEQ ID NO: 1221670 - DNA, 15 bp, Homo sapiens
tccagacagatagtc

SEQ ID NO: 1221671 - DNA, 15 bp, Homo sapiens
agagaattctatcca

SEQ ID NO: 1221672 - DNA, 15 bp, Homo sapiens
gagagaattctatcc

SEQ ID NO: 1221673 - DNA, 15 bp, Homo sapiens
ggagagaattctatc

SEQ ID NO: 1221674 - DNA, 15 bp, Homo sapiens
tggagagaattctat

SEQ ID NO: 1221675 - DNA, 15 bp, Homo sapiens
atggagagaattcta

SEQ ID NO: 1221676 - DNA, 15 bp, Homo sapiens
gatggagagaattct

SEQ ID NO: 1221677 - DNA, 15 bp, Homo sapiens
ggatggagagaattc

SEQ ID NO: 1221678 - DNA, 15 bp, Homo sapiens
aggatggagagaatt

SEQ ID NO: 1221679 - DNA, 15 bp, Homo sapiens
caggatggagagaat

SEQ ID NO: 1221680 - DNA, 15 bp, Homo sapiens
tcaggatggagagaa

SEQ ID NO: 1221681 - DNA, 15 bp, Homo sapiens
gtcaggatggagaga

SEQ ID NO: 1221682 - DNA, 15 bp, Homo sapiens
tgtcaggatggagag

SEQ ID NO: 1221683 - DNA, 15 bp, Homo sapiens
ctgtcaggatggaga

SEQ ID NO: 1221684 - DNA, 15 bp, Homo sapiens
tctgtcaggatggag

SEQ ID NO: 1221685 - DNA, 15 bp, Homo sapiens
ttctgtcaggatgga

SEQ ID NO: 1221686 - DNA, 15 bp, Homo sapiens
gttctgtcaggatgg

SEQ ID NO: 1221687 - DNA, 15 bp, Homo sapiens
agttctgtcaggatg

SEQ ID NO: 1221688 - DNA, 15 bp, Homo sapiens
gagttctgtcaggat

SEQ ID NO: 1221689 - DNA, 15 bp, Homo sapiens
agagttctgtcagga

SEQ ID NO: 1221690 - DNA, 15 bp, Homo sapiens
gagagttctgtcagg

SEQ ID NO: 1221691 - DNA, 15 bp, Homo sapiens
tgagagttctgtcag

SEQ ID NO: 1221692 - DNA, 15 bp, Homo sapiens
ttgagagttctgtca

SEQ ID NO: 1221693 - DNA, 15 bp, Homo sapiens
attgagagttctgtc

SEQ ID NO: 1221694 - DNA, 15 bp, Homo sapiens
tattgagagttctgt

SEQ ID NO: 1221695 - DNA, 15 bp, Homo sapiens
atattgagagttctg

SEQ ID NO: 1221696 - DNA, 15 bp, Homo sapiens
cagatattgagagtt

SEQ ID NO: 1221697 - DNA, 15 bp, Homo sapiens
ccagatattgagagt

SEQ ID NO: 1221698 - DNA, 15 bp, Homo sapiens
tccagatattgagag

SEQ ID NO: 1221699 - DNA, 15 bp, Homo sapiens
atccagatattgaga

SEQ ID NO: 1221700 - DNA, 15 bp, Homo sapiens
catccagatattgag

SEQ ID NO: 1221701 - DNA, 15 bp, Homo sapiens
ccatccagatattga

SEQ ID NO: 1221702 - DNA, 15 bp, Homo sapiens
tccatccagatattg

SEQ ID NO: 1221703 - DNA, 15 bp, Homo sapiens
ttccatccagatatt

SEQ ID NO: 1221704 - DNA, 15 bp, Homo sapiens
attccatccagatat

SEQ ID NO: 1221705 - DNA, 15 bp, Homo sapiens
tgagaattccatcca

SEQ ID NO: 1221706 - DNA, 15 bp, Homo sapiens
gtgagaattccatcc

SEQ ID NO: 1221707 - DNA, 15 bp, Homo sapiens
agtgagaattccatc

SEQ ID NO: 1221708 - DNA, 15 bp, Homo sapiens
gagtgagaattccat

SEQ ID NO: 1221709 - DNA, 15 bp, Homo sapiens
agagtgagaattcca

SEQ ID NO: 1221710 - DNA, 15 bp, Homo sapiens
gagagtgagaattcc

SEQ ID NO: 1221711 - DNA, 15 bp, Homo sapiens
gagtgagagttctat

SEQ ID NO: 1221712 - DNA, 15 bp, Homo sapiens
agagtgagagttcta

SEQ ID NO: 1221713 - DNA, 15 bp, Homo sapiens
gagagtgagagttct

SEQ ID NO: 1221714 - DNA, 15 bp, Homo sapiens
agagagtgagagttc

SEQ ID NO: 1221715 - DNA, 15 bp, Homo sapiens
aagagagtgagagtt

SEQ ID NO: 1221716 - DNA, 15 bp, Homo sapiens
aaagagagtgagagt

SEQ ID NO: 1221717 - DNA, 15 bp, Homo sapiens
caaagagagtgagag

SEQ ID NO: 1221718 - DNA, 15 bp, Homo sapiens
acaaagagagtgaga

SEQ ID NO: 1221719 - DNA, 15 bp, Homo sapiens
cacaaagagagtgag

SEQ ID NO: 1221720 - DNA, 15 bp, Homo sapiens
ccacaaagagagtga

SEQ ID NO: 1221721 - DNA, 15 bp, Homo sapiens
tccacaaagagagtg

SEQ ID NO: 1221722 - DNA, 15 bp, Homo sapiens
atccacaaagagagt

SEQ ID NO: 1221723 - DNA, 15 bp, Homo sapiens
tatccacaaagagag

SEQ ID NO: 1221724 - DNA, 15 bp, Homo sapiens
ctatccacaaagaga

SEQ ID NO: 1221725 - DNA, 15 bp, Homo sapiens
tctatccacaaagag

SEQ ID NO: 1221726 - DNA, 15 bp, Homo sapiens
ttctatccacaaaga

SEQ ID NO: 1221727 - DNA, 15 bp, Homo sapiens
gttctatccacaaag

SEQ ID NO: 1221728 - DNA, 15 bp, Homo sapiens
agttctatccacaaa

SEQ ID NO: 1221729 - DNA, 15 bp, Homo sapiens
gagttctatccacaa

SEQ ID NO: 1221730 - DNA, 15 bp, Homo sapiens
agagttctatccaca

SEQ ID NO: 1221731 - DNA, 15 bp, Homo sapiens
gagagttctatccac

SEQ ID NO: 1221732 - DNA, 15 bp, Homo sapiens
ggagtgagagttcta

SEQ ID NO: 1221733 - DNA, 15 bp, Homo sapiens
gggagtgagagttct

SEQ ID NO: 1221734 - DNA, 15 bp, Homo sapiens
agggagtgagagttc

SEQ ID NO: 1221735 - DNA, 15 bp, Homo sapiens
cagggagtgagagtt

SEQ ID NO: 1221736 - DNA, 15 bp, Homo sapiens
acagggagtgagagt

SEQ ID NO: 1221737 - DNA, 15 bp, Homo sapiens
gacagggagtgagag

SEQ ID NO: 1221738 - DNA, 15 bp, Homo sapiens
agacagggagtgaga

SEQ ID NO: 1221739 - DNA, 15 bp, Homo sapiens
cagacagggagtgag

SEQ ID NO: 1221740 - DNA, 15 bp, Homo sapiens
ccagacagggagtga

SEQ ID NO: 1221741 - DNA, 15 bp, Homo sapiens
tccagacagggagtg

SEQ ID NO: 1221742 - DNA, 15 bp, Homo sapiens
atccagacagggagt

SEQ ID NO: 1221743 - DNA, 15 bp, Homo sapiens
tatccagacagggag

SEQ ID NO: 1221744 - DNA, 15 bp, Homo sapiens
ctatccagacaggga

SEQ ID NO: 1221745 - DNA, 15 bp, Homo sapiens
tctatccagacaggg

SEQ ID NO: 1221746 - DNA, 15 bp, Homo sapiens
ttctatccagacagg

SEQ ID NO: 1221747 - DNA, 15 bp, Homo sapiens
gttctatccagacag

SEQ ID NO: 1221748 - DNA, 15 bp, Homo sapiens
agttctatccagaca

SEQ ID NO: 1221749 - DNA, 15 bp, Homo sapiens
gagttctatccagac

SEQ ID NO: 1221750 - DNA, 15 bp, Homo sapiens
gtgtgagagttctat

SEQ ID NO: 1221751 - DNA, 15 bp, Homo sapiens
ggtgtgagagttcta

SEQ ID NO: 1221752 - DNA, 15 bp, Homo sapiens
gggtgtgagagttct

SEQ ID NO: 1221753 - DNA, 15 bp, Homo sapiens
agggtgtgagagttc

SEQ ID NO: 1221754 - DNA, 15 bp, Homo sapiens
cagggtgtgagagtt

SEQ ID NO: 1221755 - DNA, 15 bp, Homo sapiens
acagggtgtgagagt

SEQ ID NO: 1221756 - DNA, 15 bp, Homo sapiens
gacagggtgtgagag

SEQ ID NO: 1221757 - DNA, 15 bp, Homo sapiens
agacagggtgtgaga

SEQ ID NO: 1221758 - DNA, 15 bp, Homo sapiens
cagacagggtgtgag

SEQ ID NO: 1221759 - DNA, 15 bp, Homo sapiens
ccagacagggtgtga

SEQ ID NO: 1221760 - DNA, 15 bp, Homo sapiens
tccagacagggtgtg

SEQ ID NO: 1221761 - DNA, 15 bp, Homo sapiens
atccagacagggtgt

SEQ ID NO: 1221762 - DNA, 15 bp, Homo sapiens
tatccagacagggtg

SEQ ID NO: 1221763 - DNA, 15 bp, Homo sapiens
ctatccagacagggt

SEQ ID NO: 1221764 - DNA, 15 bp, Homo sapiens
tagagagtgagagtt

SEQ ID NO: 1221765 - DNA, 15 bp, Homo sapiens
ctagagagtgagagt

SEQ ID NO: 1221766 - DNA, 15 bp, Homo sapiens
tctagagagtgagag

SEQ ID NO: 1221767 - DNA, 15 bp, Homo sapiens
atctagagagtgaga

SEQ ID NO: 1221768 - DNA, 15 bp, Homo sapiens
tatctagagagtgag

SEQ ID NO: 1221769 - DNA, 15 bp, Homo sapiens
ctatctagagagtga

SEQ ID NO: 1221770 - DNA, 15 bp, Homo sapiens
tctatctagagagtg

SEQ ID NO: 1221771 - DNA, 15 bp, Homo sapiens
ttctatctagagagt

SEQ ID NO: 1221772 - DNA, 15 bp, Homo sapiens
gttctatctagagag

SEQ ID NO: 1221773 - DNA, 15 bp, Homo sapiens
agttctatctagaga

SEQ ID NO: 1221774 - DNA, 15 bp, Homo sapiens
cagttctatctagag

SEQ ID NO: 1221775 - DNA, 15 bp, Homo sapiens
acagttctatctaga

SEQ ID NO: 1221776 - DNA, 15 bp, Homo sapiens
aacagttctatctag

SEQ ID NO: 1221777 - DNA, 15 bp, Homo sapiens
taacagttctatcta

SEQ ID NO: 1221778 - DNA, 15 bp, Homo sapiens
ttaacagttctatct

SEQ ID NO: 1221779 - DNA, 15 bp, Homo sapiens
attaacagttctatc

SEQ ID NO: 1221780 - DNA, 15 bp, Homo sapiens
tattaacagttctat

SEQ ID NO: 1221781 - DNA, 15 bp, Homo sapiens
ttattaacagttcta

SEQ ID NO: 1221782 - DNA, 15 bp, Homo sapiens
gttattaacagttct

SEQ ID NO: 1221783 - DNA, 15 bp, Homo sapiens
agttattaacagttc

SEQ ID NO: 1221784 - DNA, 15 bp, Homo sapiens
cagttattaacagtt

SEQ ID NO: 1221785 - DNA, 15 bp, Homo sapiens
ccagttattaacagt

SEQ ID NO: 1221786 - DNA, 15 bp, Homo sapiens
tccagttattaacag

SEQ ID NO: 1221787 - DNA, 15 bp, Homo sapiens
atccagttattaaca

SEQ ID NO: 1221788 - DNA, 15 bp, Homo sapiens
tatccagttattaac

SEQ ID NO: 1221789 - DNA, 15 bp, Homo sapiens
ctatccagttattaa

SEQ ID NO: 1221790 - DNA, 15 bp, Homo sapiens
tctatccagttatta

SEQ ID NO: 1221791 - DNA, 15 bp, Homo sapiens
ttctatccagttatt

SEQ ID NO: 1221792 - DNA, 15 bp, Homo sapiens
attctatccagttat

SEQ ID NO: 1221793 - DNA, 15 bp, Homo sapiens
aattctatccagtta

SEQ ID NO: 1221794 - DNA, 15 bp, Homo sapiens
aaattctatccagtt

SEQ ID NO: 1221795 - DNA, 15 bp, Homo sapiens
aaaattctatccagt

SEQ ID NO: 1221796 - DNA, 15 bp, Homo sapiens
gaaaattctatccag

SEQ ID NO: 1221797 - DNA, 15 bp, Homo sapiens
tgaaaattctatcca

SEQ ID NO: 1221798 - DNA, 15 bp, Homo sapiens
gtgaaaattctatcc

SEQ ID NO: 1221799 - DNA, 15 bp, Homo sapiens
ggtgaaaattctatc

SEQ ID NO: 1221800 - DNA, 15 bp, Homo sapiens
tggtgaaaattctat

SEQ ID NO: 1221801 - DNA, 15 bp, Homo sapiens
atggtgaaaattcta

SEQ ID NO: 1221802 - DNA, 15 bp, Homo sapiens
gatggtgaaaattct

SEQ ID NO: 1221803 - DNA, 15 bp, Homo sapiens
agatggtgaaaattc

SEQ ID NO: 1221804 - DNA, 15 bp, Homo sapiens
cagatggtgaaaatt

SEQ ID NO: 1221805 - DNA, 15 bp, Homo sapiens
ccagatggtgaaaat

SEQ ID NO: 1221806 - DNA, 15 bp, Homo sapiens
tccagatggtgaaaa

SEQ ID NO: 1221807 - DNA, 15 bp, Homo sapiens
atccagatggtgaaa

SEQ ID NO: 1221808 - DNA, 15 bp, Homo sapiens
tatccagatggtgaa

SEQ ID NO: 1221809 - DNA, 15 bp, Homo sapiens
gttctatccagatag

SEQ ID NO: 1221810 - DNA, 15 bp, Homo sapiens
agttctatccagata

SEQ ID NO: 1221811 - DNA, 15 bp, Homo sapiens
catggtgagagttct

SEQ ID NO: 1221812 - DNA, 15 bp, Homo sapiens
acatggtgagagttc

SEQ ID NO: 1221813 - DNA, 15 bp, Homo sapiens
cacatggtgagagtt

SEQ ID NO: 1221814 - DNA, 15 bp, Homo sapiens
acacatggtgagagt

SEQ ID NO: 1221815 - DNA, 15 bp, Homo sapiens
tacacatggtgagag

SEQ ID NO: 1221816 - DNA, 15 bp, Homo sapiens
tatacacatggtgag

SEQ ID NO: 1221817 - DNA, 15 bp, Homo sapiens
ttatacacatggtga

SEQ ID NO: 1221818 - DNA, 15 bp, Homo sapiens
tttatacacatggtg

SEQ ID NO: 1221819 - DNA, 15 bp, Homo sapiens
ttttatacacatggt

SEQ ID NO: 1221820 - DNA, 15 bp, Homo sapiens
gttttatacacatgg

SEQ ID NO: 1221821 - DNA, 15 bp, Homo sapiens
agttttatacacatg

SEQ ID NO: 1221822 - DNA, 15 bp, Homo sapiens
gagttttatacacat

SEQ ID NO: 1221823 - DNA, 15 bp, Homo sapiens
agagttttatacaca

SEQ ID NO: 1221824 - DNA, 15 bp, Homo sapiens
gagagttttatacac

SEQ ID NO: 1221825 - DNA, 15 bp, Homo sapiens
tgagagttttataca

SEQ ID NO: 1221826 - DNA, 15 bp, Homo sapiens
gtgagagttttatac

SEQ ID NO: 1221827 - DNA, 15 bp, Homo sapiens
agtgagagttttata

SEQ ID NO: 1221828 - DNA, 15 bp, Homo sapiens
cagtgagagttttat

SEQ ID NO: 1221829 - DNA, 15 bp, Homo sapiens
acagtgagagtttta

SEQ ID NO: 1221830 - DNA, 15 bp, Homo sapiens
cacagtgagagtttt

SEQ ID NO: 1221831 - DNA, 15 bp, Homo sapiens
acacagtgagagttt

SEQ ID NO: 1221832 - DNA, 15 bp, Homo sapiens
cacacagtgagagtt

SEQ ID NO: 1221833 - DNA, 15 bp, Homo sapiens
ccacacagtgagagt

SEQ ID NO: 1221834 - DNA, 15 bp, Homo sapiens
cccacacagtgagag

SEQ ID NO: 1221835 - DNA, 15 bp, Homo sapiens
tcccacacagtgaga

SEQ ID NO: 1221836 - DNA, 15 bp, Homo sapiens
ttcccacacagtgag

SEQ ID NO: 1221837 - DNA, 15 bp, Homo sapiens
cttcccacacagtga

SEQ ID NO: 1221838 - DNA, 15 bp, Homo sapiens
tcttcccacacagtg

SEQ ID NO: 1221839 - DNA, 15 bp, Homo sapiens
ctcttcccacacagt

SEQ ID NO: 1221840 - DNA, 15 bp, Homo sapiens
tctcttcccacacag

SEQ ID NO: 1221841 - DNA, 15 bp, Homo sapiens
ttctcttcccacaca

SEQ ID NO: 1221842 - DNA, 15 bp, Homo sapiens
gttctcttcccacac

SEQ ID NO: 1221843 - DNA, 15 bp, Homo sapiens
agttctcttcccaca

SEQ ID NO: 1221844 - DNA, 15 bp, Homo sapiens
gagttctcttcccac

SEQ ID NO: 1221845 - DNA, 15 bp, Homo sapiens
agagttctcttccca

SEQ ID NO: 1221846 - DNA, 15 bp, Homo sapiens
gagagttctcttccc

SEQ ID NO: 1221847 - DNA, 15 bp, Homo sapiens
tgagagttctcttcc

SEQ ID NO: 1221848 - DNA, 15 bp, Homo sapiens
gtgagagttctcttc

SEQ ID NO: 1221849 - DNA, 15 bp, Homo sapiens
agtgagagttctctt

SEQ ID NO: 1221850 - DNA, 15 bp, Homo sapiens
aagtgagagttctct

SEQ ID NO: 1221851 - DNA, 15 bp, Homo sapiens
aaagtgagagttctc

SEQ ID NO: 1221852 - DNA, 15 bp, Homo sapiens
cagaaagtgagagtt

SEQ ID NO: 1221853 - DNA, 15 bp, Homo sapiens
ccagaaagtgagagt

SEQ ID NO: 1221854 - DNA, 15 bp, Homo sapiens
tccagaaagtgagag

SEQ ID NO: 1221855 - DNA, 15 bp, Homo sapiens
tttctatccagaaag

SEQ ID NO: 1221856 - DNA, 15 bp, Homo sapiens
atttctatccagaaa

SEQ ID NO: 1221857 - DNA, 15 bp, Homo sapiens
gatttctatccagaa

SEQ ID NO: 1221858 - DNA, 15 bp, Homo sapiens
aagtgagatttctat

SEQ ID NO: 1221859 - DNA, 15 bp, Homo sapiens
aaagtgagatttcta

SEQ ID NO: 1221860 - DNA, 15 bp, Homo sapiens
gaaagtgagatttct

SEQ ID NO: 1221861 - DNA, 15 bp, Homo sapiens
agaaagtgagatttc

SEQ ID NO: 1221862 - DNA, 15 bp, Homo sapiens
tagaaagtgagattt

SEQ ID NO: 1221863 - DNA, 15 bp, Homo sapiens
atagaaagtgagatt

SEQ ID NO: 1221864 - DNA, 15 bp, Homo sapiens
gatagaaagtgagat

SEQ ID NO: 1221865 - DNA, 15 bp, Homo sapiens
agatagaaagtgaga

SEQ ID NO: 1221866 - DNA, 15 bp, Homo sapiens
cagatagaaagtgag

SEQ ID NO: 1221867 - DNA, 15 bp, Homo sapiens
ccagatagaaagtga

SEQ ID NO: 1221868 - DNA, 15 bp, Homo sapiens
tccagatagaaagtg

SEQ ID NO: 1221869 - DNA, 15 bp, Homo sapiens
atccagatagaaagt

SEQ ID NO: 1221870 - DNA, 15 bp, Homo sapiens
tatccagatagaaag

SEQ ID NO: 1221871 - DNA, 15 bp, Homo sapiens
ctatccagatagaaa

SEQ ID NO: 1221872 - DNA, 15 bp, Homo sapiens
tctatccagatagaa

SEQ ID NO: 1221873 - DNA, 15 bp, Homo sapiens
ggagagttctatcca

SEQ ID NO: 1221874 - DNA, 15 bp, Homo sapiens
gggagagttctatcc

SEQ ID NO: 1221875 - DNA, 15 bp, Homo sapiens
ggggagagttctatc

SEQ ID NO: 1221876 - DNA, 15 bp, Homo sapiens
tggggagagttctat

SEQ ID NO: 1221877 - DNA, 15 bp, Homo sapiens
atggggagagttcta

SEQ ID NO: 1221878 - DNA, 15 bp, Homo sapiens
catggggagagttct

SEQ ID NO: 1221879 - DNA, 15 bp, Homo sapiens
acatggggagagttc

SEQ ID NO: 1221880 - DNA, 15 bp, Homo sapiens
tacatggggagagtt

SEQ ID NO: 1221881 - DNA, 15 bp, Homo sapiens
ctacatggggagagt

SEQ ID NO: 1221882 - DNA, 15 bp, Homo sapiens
tctacatggggagag

SEQ ID NO: 1221883 - DNA, 15 bp, Homo sapiens
atctacatggggaga

SEQ ID NO: 1221884 - DNA, 15 bp, Homo sapiens
tatctacatggggag

SEQ ID NO: 1221885 - DNA, 15 bp, Homo sapiens
ctatctacatgggga

SEQ ID NO: 1221886 - DNA, 15 bp, Homo sapiens
tctatctacatgggg

SEQ ID NO: 1221887 - DNA, 15 bp, Homo sapiens
ttctatctacatggg

SEQ ID NO: 1221888 - DNA, 15 bp, Homo sapiens
gttctatctacatgg

SEQ ID NO: 1221889 - DNA, 15 bp, Homo sapiens
agttctatctacatg

SEQ ID NO: 1221890 - DNA, 15 bp, Homo sapiens
gagttctatctacat

SEQ ID NO: 1221891 - DNA, 15 bp, Homo sapiens
agagttctatctaca

SEQ ID NO: 1221892 - DNA, 15 bp, Homo sapiens
gagagttctatctac

SEQ ID NO: 1221893 - DNA, 15 bp, Homo sapiens
ggagagttctatcta

SEQ ID NO: 1221894 - DNA, 15 bp, Homo sapiens
gggagagttctatct

SEQ ID NO: 1221895 - DNA, 15 bp, Homo sapiens
agggagagttctatc

SEQ ID NO: 1221896 - DNA, 15 bp, Homo sapiens
tagggagagttctat

SEQ ID NO: 1221897 - DNA, 15 bp, Homo sapiens
atagggagagttcta

SEQ ID NO: 1221898 - DNA, 15 bp, Homo sapiens
gatagggagagttct

SEQ ID NO: 1221899 - DNA, 15 bp, Homo sapiens
agatagggagagttc

SEQ ID NO: 1221900 - DNA, 15 bp, Homo sapiens
cagatagggagagtt

SEQ ID NO: 1221901 - DNA, 15 bp, Homo sapiens
ccagatagggagagt

SEQ ID NO: 1221902 - DNA, 15 bp, Homo sapiens
tccagatagggagag

SEQ ID NO: 1221903 - DNA, 15 bp, Homo sapiens
atccagatagggaga

SEQ ID NO: 1221904 - DNA, 15 bp, Homo sapiens
tatccagatagggag

SEQ ID NO: 1221905 - DNA, 15 bp, Homo sapiens
gtatccagataggga

SEQ ID NO: 1221906 - DNA, 15 bp, Homo sapiens
tgtatccagataggg

SEQ ID NO: 1221907 - DNA, 15 bp, Homo sapiens
ttgtatccagatagg

SEQ ID NO: 1221908 - DNA, 15 bp, Homo sapiens
attgtatccagatag

SEQ ID NO: 1221909 - DNA, 15 bp, Homo sapiens
aattgtatccagata

SEQ ID NO: 1221910 - DNA, 15 bp, Homo sapiens
aaattgtatccagat

SEQ ID NO: 1221911 - DNA, 15 bp, Homo sapiens
aaaattgtatccaga

SEQ ID NO: 1221912 - DNA, 15 bp, Homo sapiens
gaaaattgtatccag

SEQ ID NO: 1221913 - DNA, 15 bp, Homo sapiens
ggaaaattgtatcca

SEQ ID NO: 1221914 - DNA, 15 bp, Homo sapiens
gggaaaattgtatcc

SEQ ID NO: 1221915 - DNA, 15 bp, Homo sapiens
tgggaaaattgtatc

SEQ ID NO: 1221916 - DNA, 15 bp, Homo sapiens
atgggaaaattgtat

SEQ ID NO: 1221917 - DNA, 15 bp, Homo sapiens
gatgggaaaattgta

SEQ ID NO: 1221918 - DNA, 15 bp, Homo sapiens
agatgggaaaattgt

SEQ ID NO: 1221919 - DNA, 15 bp, Homo sapiens
cagatgggaaaattg

SEQ ID NO: 1221920 - DNA, 15 bp, Homo sapiens
tcagatgggaaaatt

SEQ ID NO: 1221921 - DNA, 15 bp, Homo sapiens
ttcagatgggaaaat

SEQ ID NO: 1221922 - DNA, 15 bp, Homo sapiens
attcagatgggaaaa

SEQ ID NO: 1221923 - DNA, 15 bp, Homo sapiens
tattcagatgggaaa

SEQ ID NO: 1221924 - DNA, 15 bp, Homo sapiens
ctattcagatgggaa

SEQ ID NO: 1221925 - DNA, 15 bp, Homo sapiens
tctattcagatggga

SEQ ID NO: 1221926 - DNA, 15 bp, Homo sapiens
ttctattcagatggg

SEQ ID NO: 1221927 - DNA, 15 bp, Homo sapiens
gttctattcagatgg

SEQ ID NO: 1221928 - DNA, 15 bp, Homo sapiens
agttctattcagatg

SEQ ID NO: 1221929 - DNA, 15 bp, Homo sapiens
gagttctattcagat

SEQ ID NO: 1221930 - DNA, 15 bp, Homo sapiens
agagagttctattca

SEQ ID NO: 1221931 - DNA, 15 bp, Homo sapiens
tagagagttctattc

SEQ ID NO: 1221932 - DNA, 15 bp, Homo sapiens
atagagagttctatt

SEQ ID NO: 1221933 - DNA, 15 bp, Homo sapiens
gatagagagttctat

SEQ ID NO: 1221934 - DNA, 15 bp, Homo sapiens
ggatagagagttcta

SEQ ID NO: 1221935 - DNA, 15 bp, Homo sapiens
cggatagagagttct

SEQ ID NO: 1221936 - DNA, 15 bp, Homo sapiens
ccggatagagagttc

SEQ ID NO: 1221937 - DNA, 15 bp, Homo sapiens
tccggatagagagtt

SEQ ID NO: 1221938 - DNA, 15 bp, Homo sapiens
atccggatagagagt

SEQ ID NO: 1221939 - DNA, 15 bp, Homo sapiens
tatccggatagagag

SEQ ID NO: 1221940 - DNA, 15 bp, Homo sapiens
ctatccggatagaga

SEQ ID NO: 1221941 - DNA, 15 bp, Homo sapiens
tctatccggatagag

SEQ ID NO: 1221942 - DNA, 15 bp, Homo sapiens
ttctatccggataga

SEQ ID NO: 1221943 - DNA, 15 bp, Homo sapiens
attctatccggatag

SEQ ID NO: 1221944 - DNA, 15 bp, Homo sapiens
aattctatccggata

SEQ ID NO: 1221945 - DNA, 15 bp, Homo sapiens
gaattctatccggat

SEQ ID NO: 1221946 - DNA, 15 bp, Homo sapiens
agaattctatccgga

SEQ ID NO: 1221947 - DNA, 15 bp, Homo sapiens
gagaattctatccgg

SEQ ID NO: 1221948 - DNA, 15 bp, Homo sapiens
tgagaattctatccg

SEQ ID NO: 1221949 - DNA, 15 bp, Homo sapiens
cccagagagtgagaa

SEQ ID NO: 1221950 - DNA, 15 bp, Homo sapiens
acccagagagtgaga

SEQ ID NO: 1221951 - DNA, 15 bp, Homo sapiens
tacccagagagtgag

SEQ ID NO: 1221952 - DNA, 15 bp, Homo sapiens
ctacccagagagtga

SEQ ID NO: 1221953 - DNA, 15 bp, Homo sapiens
tctacccagagagtg

SEQ ID NO: 1221954 - DNA, 15 bp, Homo sapiens
ttctacccagagagt

SEQ ID NO: 1221955 - DNA, 15 bp, Homo sapiens
gttctacccagagag

SEQ ID NO: 1221956 - DNA, 15 bp, Homo sapiens
agttctacccagaga

SEQ ID NO: 1221957 - DNA, 15 bp, Homo sapiens
agagttctacccaga

SEQ ID NO: 1221958 - DNA, 15 bp, Homo sapiens
gagagttctacccag

SEQ ID NO: 1221959 - DNA, 15 bp, Homo sapiens
agagagttctaccca

SEQ ID NO: 1221960 - DNA, 15 bp, Homo sapiens
tagagagttctaccc

SEQ ID NO: 1221961 - DNA, 15 bp, Homo sapiens
atagagagttctacc

SEQ ID NO: 1221962 - DNA, 15 bp, Homo sapiens
gatagagagttctac

SEQ ID NO: 1221963 - DNA, 15 bp, Homo sapiens
agatagagagttcta

SEQ ID NO: 1221964 - DNA, 15 bp, Homo sapiens
tagatagagagttct

SEQ ID NO: 1221965 - DNA, 15 bp, Homo sapiens
atagatagagagttc

SEQ ID NO: 1221966 - DNA, 15 bp, Homo sapiens
gatagatagagagtt

SEQ ID NO: 1221967 - DNA, 15 bp, Homo sapiens
agatagatagagagt

SEQ ID NO: 1221968 - DNA, 15 bp, Homo sapiens
cagatagatagagag

SEQ ID NO: 1221969 - DNA, 15 bp, Homo sapiens
ccagatagatagaga

SEQ ID NO: 1221970 - DNA, 15 bp, Homo sapiens
tccagatagatagag

SEQ ID NO: 1221971 - DNA, 15 bp, Homo sapiens
atccagatagataga

SEQ ID NO: 1221972 - DNA, 15 bp, Homo sapiens
gaattatatccagat

SEQ ID NO: 1221973 - DNA, 15 bp, Homo sapiens
agaattatatccaga

SEQ ID NO: 1221974 - DNA, 15 bp, Homo sapiens
gagaattatatccag

SEQ ID NO: 1221975 - DNA, 15 bp, Homo sapiens
tgagaattatatcca

SEQ ID NO: 1221976 - DNA, 15 bp, Homo sapiens
gtgagaattatatcc

SEQ ID NO: 1221977 - DNA, 15 bp, Homo sapiens
agtgagaattatatc

SEQ ID NO: 1221978 - DNA, 15 bp, Homo sapiens
aagtgagaattatat

SEQ ID NO: 1221979 - DNA, 15 bp, Homo sapiens
aaagtgagaattata

SEQ ID NO: 1221980 - DNA, 15 bp, Homo sapiens
gaaagtgagaattat

SEQ ID NO: 1221981 - DNA, 15 bp, Homo sapiens
agaaagtgagaatta

SEQ ID NO: 1221982 - DNA, 15 bp, Homo sapiens
cagaaagtgagaatt

SEQ ID NO: 1221983 - DNA, 15 bp, Homo sapiens
ccagaaagtgagaat

SEQ ID NO: 1221984 - DNA, 15 bp, Homo sapiens
ggtgagaattccatc

SEQ ID NO: 1221985 - DNA, 15 bp, Homo sapiens
tggtgagaattccat

SEQ ID NO: 1221986 - DNA, 15 bp, Homo sapiens
atggtgagaattcca

SEQ ID NO: 1221987 - DNA, 15 bp, Homo sapiens
gatggtgagaattcc

SEQ ID NO: 1221988 - DNA, 15 bp, Homo sapiens
ttccagatggtgaga

SEQ ID NO: 1221989 - DNA, 15 bp, Homo sapiens
cttccagatggtgag

SEQ ID NO: 1221990 - DNA, 15 bp, Homo sapiens
tcttccagatggtga

SEQ ID NO: 1221991 - DNA, 15 bp, Homo sapiens
ttcttccagatggtg

SEQ ID NO: 1221992 - DNA, 15 bp, Homo sapiens
cttcttccagatggt

SEQ ID NO: 1221993 - DNA, 15 bp, Homo sapiens
acttcttccagatgg

SEQ ID NO: 1221994 - DNA, 15 bp, Homo sapiens
aacttcttccagatg

SEQ ID NO: 1221995 - DNA, 15 bp, Homo sapiens
aaacttcttccagat

SEQ ID NO: 1221996 - DNA, 15 bp, Homo sapiens
gaaacttcttccaga

SEQ ID NO: 1221997 - DNA, 15 bp, Homo sapiens
tgaaacttcttccag

SEQ ID NO: 1221998 - DNA, 15 bp, Homo sapiens
gtgaaacttcttcca

SEQ ID NO: 1221999 - DNA, 15 bp, Homo sapiens
agtgaaacttcttcc

SEQ ID NO: 1222000 - DNA, 15 bp, Homo sapiens
tagtgaaacttcttc

SEQ ID NO: 1222001 - DNA, 15 bp, Homo sapiens
atagtgaaacttctt

SEQ ID NO: 1222002 - DNA, 15 bp, Homo sapiens
gatagtgaaacttct

SEQ ID NO: 1222003 - DNA, 15 bp, Homo sapiens
agatagtgaaacttc

SEQ ID NO: 1222004 - DNA, 15 bp, Homo sapiens
cagatagtgaaactt

SEQ ID NO: 1222005 - DNA, 15 bp, Homo sapiens
ccagatagtgaaact

SEQ ID NO: 1222006 - DNA, 15 bp, Homo sapiens
tccagatagtgaaac

SEQ ID NO: 1222007 - DNA, 15 bp, Homo sapiens
atccagatagtgaaa

SEQ ID NO: 1222008 - DNA, 15 bp, Homo sapiens
tatccagatagtgaa

SEQ ID NO: 1222009 - DNA, 15 bp, Homo sapiens
tagagtgagaattct

SEQ ID NO: 1222010 - DNA, 15 bp, Homo sapiens
ctagagtgagaattc

SEQ ID NO: 1222011 - DNA, 15 bp, Homo sapiens
tctagagtgagaatt

SEQ ID NO: 1222012 - DNA, 15 bp, Homo sapiens
atctagagtgagaat

SEQ ID NO: 1222013 - DNA, 15 bp, Homo sapiens
tatctagagtgagaa

SEQ ID NO: 1222014 - DNA, 15 bp, Homo sapiens
ttatctagagtgaga

SEQ ID NO: 1222015 - DNA, 15 bp, Homo sapiens
tttatctagagtgag

SEQ ID NO: 1222016 - DNA, 15 bp, Homo sapiens
ttttatctagagtga

SEQ ID NO: 1222017 - DNA, 15 bp, Homo sapiens
gttttatctagagtg

SEQ ID NO: 1222018 - DNA, 15 bp, Homo sapiens
agttttatctagagt

SEQ ID NO: 1222019 - DNA, 15 bp, Homo sapiens
gagttttatctagag

SEQ ID NO: 1222020 - DNA, 15 bp, Homo sapiens
agagttttatctaga

SEQ ID NO: 1222021 - DNA, 15 bp, Homo sapiens
gagagttttatctag

SEQ ID NO: 1222022 - DNA, 15 bp, Homo sapiens
tgagagttttatcta

SEQ ID NO: 1222023 - DNA, 15 bp, Homo sapiens
gtgagagttttatct

SEQ ID NO: 1222024 - DNA, 15 bp, Homo sapiens
agtgagagttttatc

SEQ ID NO: 1222025 - DNA, 15 bp, Homo sapiens
tagtgagagttttat

SEQ ID NO: 1222026 - DNA, 15 bp, Homo sapiens
atagtgagagtttta

SEQ ID NO: 1222027 - DNA, 15 bp, Homo sapiens
gatagtgagagtttt

SEQ ID NO: 1222028 - DNA, 15 bp, Homo sapiens
agatagtgagagttt

SEQ ID NO: 1222029 - DNA, 15 bp, Homo sapiens
ctatccagagggtga

SEQ ID NO: 1222030 - DNA, 15 bp, Homo sapiens
tctatccagagggtg

SEQ ID NO: 1222031 - DNA, 15 bp, Homo sapiens
ttctatccagagggt

SEQ ID NO: 1222032 - DNA, 15 bp, Homo sapiens
gttctatccagaggg

SEQ ID NO: 1222033 - DNA, 15 bp, Homo sapiens
cgttctatccagagg

SEQ ID NO: 1222034 - DNA, 15 bp, Homo sapiens
gcgttctatccagag

SEQ ID NO: 1222035 - DNA, 15 bp, Homo sapiens
agcgttctatccaga

SEQ ID NO: 1222036 - DNA, 15 bp, Homo sapiens
gagcgttctatccag

SEQ ID NO: 1222037 - DNA, 15 bp, Homo sapiens
tgagcgttctatcca

SEQ ID NO: 1222038 - DNA, 15 bp, Homo sapiens
gtgagcgttctatcc

SEQ ID NO: 1222039 - DNA, 15 bp, Homo sapiens
agtgagcgttctatc

SEQ ID NO: 1222040 - DNA, 15 bp, Homo sapiens
tagtgagcgttctat

SEQ ID NO: 1222041 - DNA, 15 bp, Homo sapiens
atagtgagcgttcta

SEQ ID NO: 1222042 - DNA, 15 bp, Homo sapiens
gatagtgagcgttct

SEQ ID NO: 1222043 - DNA, 15 bp, Homo sapiens
agatagtgagcgttc

SEQ ID NO: 1222044 - DNA, 15 bp, Homo sapiens
tagatagtgagcgtt

SEQ ID NO: 1222045 - DNA, 15 bp, Homo sapiens
atagatagtgagcgt

SEQ ID NO: 1222046 - DNA, 15 bp, Homo sapiens
gatagatagtgagcg

SEQ ID NO: 1222047 - DNA, 15 bp, Homo sapiens
agatagatagtgagc

SEQ ID NO: 1222048 - DNA, 15 bp, Homo sapiens
ttatccagagagtga

SEQ ID NO: 1222049 - DNA, 15 bp, Homo sapiens
tttatccagagagtg

SEQ ID NO: 1222050 - DNA, 15 bp, Homo sapiens
ttttatccagagagt

SEQ ID NO: 1222051 - DNA, 15 bp, Homo sapiens
gttttatccagagag

SEQ ID NO: 1222052 - DNA, 15 bp, Homo sapiens
agttttatccagaga

SEQ ID NO: 1222053 - DNA, 15 bp, Homo sapiens
gagttttatccagag

SEQ ID NO: 1222054 - DNA, 15 bp, Homo sapiens
agagttttatccaga

SEQ ID NO: 1222055 - DNA, 15 bp, Homo sapiens
gagagttttatccag

SEQ ID NO: 1222056 - DNA, 15 bp, Homo sapiens
tgagagttttatcca

SEQ ID NO: 1222057 - DNA, 15 bp, Homo sapiens
gtgagagttttatcc

SEQ ID NO: 1222058 - DNA, 15 bp, Homo sapiens
accagacagatagtg

SEQ ID NO: 1222059 - DNA, 15 bp, Homo sapiens
taccagacagatagt

SEQ ID NO: 1222060 - DNA, 15 bp, Homo sapiens
ctaccagacagatag

SEQ ID NO: 1222061 - DNA, 15 bp, Homo sapiens
tctaccagacagata

SEQ ID NO: 1222062 - DNA, 15 bp, Homo sapiens
ttctaccagacagat

SEQ ID NO: 1222063 - DNA, 15 bp, Homo sapiens
attctaccagacaga

SEQ ID NO: 1222064 - DNA, 15 bp, Homo sapiens
aattctaccagacag

SEQ ID NO: 1222065 - DNA, 15 bp, Homo sapiens
gaattctaccagaca

SEQ ID NO: 1222066 - DNA, 15 bp, Homo sapiens
agaattctaccagac

SEQ ID NO: 1222067 - DNA, 15 bp, Homo sapiens
gagaattctaccaga

SEQ ID NO: 1222068 - DNA, 15 bp, Homo sapiens
tgagaattctaccag

SEQ ID NO: 1222069 - DNA, 15 bp, Homo sapiens
gtgagaattctacca

SEQ ID NO: 1222070 - DNA, 15 bp, Homo sapiens
ggtgagaattctacc

SEQ ID NO: 1222071 - DNA, 15 bp, Homo sapiens
tggtgagaattctac

SEQ ID NO: 1222072 - DNA, 15 bp, Homo sapiens
attctatccagatgg

SEQ ID NO: 1222073 - DNA, 15 bp, Homo sapiens
aattctatccagatg

SEQ ID NO: 1222074 - DNA, 15 bp, Homo sapiens
tagtgagaattctat

SEQ ID NO: 1222075 - DNA, 15 bp, Homo sapiens
atagtgagaattcta

SEQ ID NO: 1222076 - DNA, 15 bp, Homo sapiens
gatagtgagaattct

SEQ ID NO: 1222077 - DNA, 15 bp, Homo sapiens
agatagtgagaattc

SEQ ID NO: 1222078 - DNA, 15 bp, Homo sapiens
cagatagtgagaatt

SEQ ID NO: 1222079 - DNA, 15 bp, Homo sapiens
ccagatagtgagaat

SEQ ID NO: 1222080 - DNA, 15 bp, Homo sapiens
tccagatagtgagaa

SEQ ID NO: 1222081 - DNA, 15 bp, Homo sapiens
agtaagaattctatc

SEQ ID NO: 1222082 - DNA, 15 bp, Homo sapiens
aagtaagaattctat

SEQ ID NO: 1222083 - DNA, 15 bp, Homo sapiens
aaagtaagaattcta

SEQ ID NO: 1222084 - DNA, 15 bp, Homo sapiens
gaaagtaagaattct

SEQ ID NO: 1222085 - DNA, 15 bp, Homo sapiens
agaaagtaagaattc

SEQ ID NO: 1222086 - DNA, 15 bp, Homo sapiens
cagaaagtaagaatt

SEQ ID NO: 1222087 - DNA, 15 bp, Homo sapiens
ccagaaagtaagaat

SEQ ID NO: 1222088 - DNA, 15 bp, Homo sapiens
tccagaaagtaagaa

SEQ ID NO: 1222089 - DNA, 15 bp, Homo sapiens
atccagaaagtaaga

SEQ ID NO: 1222090 - DNA, 15 bp, Homo sapiens
tatccagaaagtaag

SEQ ID NO: 1222091 - DNA, 15 bp, Homo sapiens
ctatccagaaagtaa

SEQ ID NO: 1222092 - DNA, 15 bp, Homo sapiens
tctatccagaaagta

SEQ ID NO: 1222093 - DNA, 15 bp, Homo sapiens
gacactgagagttct

SEQ ID NO: 1222094 - DNA, 15 bp, Homo sapiens
agacactgagagttc

SEQ ID NO: 1222095 - DNA, 15 bp, Homo sapiens
aagacactgagagtt

SEQ ID NO: 1222096 - DNA, 15 bp, Homo sapiens
aaagacactgagagt

SEQ ID NO: 1222097 - DNA, 15 bp, Homo sapiens
gaaagacactgagag

SEQ ID NO: 1222098 - DNA, 15 bp, Homo sapiens
agaaagacactgaga

SEQ ID NO: 1222099 - DNA, 15 bp, Homo sapiens
cagaaagacactgag

SEQ ID NO: 1222100 - DNA, 15 bp, Homo sapiens
ccagaaagacactga

SEQ ID NO: 1222101 - DNA, 15 bp, Homo sapiens
tccagaaagacactg

SEQ ID NO: 1222102 - DNA, 15 bp, Homo sapiens
atccagaaagacact

SEQ ID NO: 1222103 - DNA, 15 bp, Homo sapiens
tatccagaaagacac

SEQ ID NO: 1222104 - DNA, 15 bp, Homo sapiens
ctatccagaaagaca

SEQ ID NO: 1222105 - DNA, 15 bp, Homo sapiens
tctatccagaaagac

SEQ ID NO: 1222106 - DNA, 15 bp, Homo sapiens
ttctatccagaaaga

SEQ ID NO: 1222107 - DNA, 15 bp, Homo sapiens
attctatccagaaag

SEQ ID NO: 1222108 - DNA, 15 bp, Homo sapiens
aattctatccagaaa

SEQ ID NO: 1222109 - DNA, 15 bp, Homo sapiens
gaattctatccagaa

SEQ ID NO: 1222110 - DNA, 15 bp, Homo sapiens
agttctatccagagg

SEQ ID NO: 1222111 - DNA, 15 bp, Homo sapiens
cgagttctatccaga

SEQ ID NO: 1222112 - DNA, 15 bp, Homo sapiens
gcgagttctatccag

SEQ ID NO: 1222113 - DNA, 15 bp, Homo sapiens
tgcgagttctatcca

SEQ ID NO: 1222114 - DNA, 15 bp, Homo sapiens
gtgcgagttctatcc

SEQ ID NO: 1222115 - DNA, 15 bp, Homo sapiens
agtgcgagttctatc

SEQ ID NO: 1222116 - DNA, 15 bp, Homo sapiens
tagtgcgagttctat

SEQ ID NO: 1222117 - DNA, 15 bp, Homo sapiens
atagtgcgagttcta

SEQ ID NO: 1222118 - DNA, 15 bp, Homo sapiens
gatagtgcgagttct

SEQ ID NO: 1222119 - DNA, 15 bp, Homo sapiens
agatagtgcgagttc

SEQ ID NO: 1222120 - DNA, 15 bp, Homo sapiens
tagatagtgcgagtt

SEQ ID NO: 1222121 - DNA, 15 bp, Homo sapiens
gtagatagtgcgagt

SEQ ID NO: 1222122 - DNA, 15 bp, Homo sapiens
ggtagatagtgcgag

SEQ ID NO: 1222123 - DNA, 15 bp, Homo sapiens
aggtagatagtgcga

SEQ ID NO: 1222124 - DNA, 15 bp, Homo sapiens
caggtagatagtgcg

SEQ ID NO: 1222125 - DNA, 15 bp, Homo sapiens
ccaggtagatagtgc

SEQ ID NO: 1222126 - DNA, 15 bp, Homo sapiens
tccaggtagatagtg

SEQ ID NO: 1222127 - DNA, 15 bp, Homo sapiens
atccaggtagatagt

SEQ ID NO: 1222128 - DNA, 15 bp, Homo sapiens
tatccaggtagatag

SEQ ID NO: 1222129 - DNA, 15 bp, Homo sapiens
ctatccaggtagata

SEQ ID NO: 1222130 - DNA, 15 bp, Homo sapiens
tctatccaggtagat

SEQ ID NO: 1222131 - DNA, 15 bp, Homo sapiens
ttctatccaggtaga

SEQ ID NO: 1222132 - DNA, 15 bp, Homo sapiens
cttctatccaggtag

SEQ ID NO: 1222133 - DNA, 15 bp, Homo sapiens
acttctatccaggta

SEQ ID NO: 1222134 - DNA, 15 bp, Homo sapiens
gacttctatccaggt

SEQ ID NO: 1222135 - DNA, 15 bp, Homo sapiens
agacttctatccagg

SEQ ID NO: 1222136 - DNA, 15 bp, Homo sapiens
gagacttctatccag

SEQ ID NO: 1222137 - DNA, 15 bp, Homo sapiens
tgagacttctatcca

SEQ ID NO: 1222138 - DNA, 15 bp, Homo sapiens
gtgagacttctatcc

SEQ ID NO: 1222139 - DNA, 15 bp, Homo sapiens
agtgagacttctatc

SEQ ID NO: 1222140 - DNA, 15 bp, Homo sapiens
gagtgagacttctat

SEQ ID NO: 1222141 - DNA, 15 bp, Homo sapiens
agagtgagacttcta

SEQ ID NO: 1222142 - DNA, 15 bp, Homo sapiens
gagagtgagacttct

SEQ ID NO: 1222143 - DNA, 15 bp, Homo sapiens
agagagtgagacttc

SEQ ID NO: 1222144 - DNA, 15 bp, Homo sapiens
cagagagtgagactt

SEQ ID NO: 1222145 - DNA, 15 bp, Homo sapiens
ccagagagtgagact

SEQ ID NO: 1222146 - DNA, 15 bp, Homo sapiens
tccagagagtgagac

SEQ ID NO: 1222147 - DNA, 15 bp, Homo sapiens
atatccagagagtga

SEQ ID NO: 1222148 - DNA, 15 bp, Homo sapiens
tatatccagagagtg

SEQ ID NO: 1222149 - DNA, 15 bp, Homo sapiens
ttatatccagagagt

SEQ ID NO: 1222150 - DNA, 15 bp, Homo sapiens
gttatatccagagag

SEQ ID NO: 1222151 - DNA, 15 bp, Homo sapiens
agttatatccagaga

SEQ ID NO: 1222152 - DNA, 15 bp, Homo sapiens
gagttatatccagag

SEQ ID NO: 1222153 - DNA, 15 bp, Homo sapiens
agagttatatccaga

SEQ ID NO: 1222154 - DNA, 15 bp, Homo sapiens
gagagttatatccag

SEQ ID NO: 1222155 - DNA, 15 bp, Homo sapiens
tgagagttatatcca

SEQ ID NO: 1222156 - DNA, 15 bp, Homo sapiens
gtgagagttatatcc

SEQ ID NO: 1222157 - DNA, 15 bp, Homo sapiens
agtgagagttatatc

SEQ ID NO: 1222158 - DNA, 15 bp, Homo sapiens
ttagtgagagttata

SEQ ID NO: 1222159 - DNA, 15 bp, Homo sapiens
gttagtgagagttat

SEQ ID NO: 1222160 - DNA, 15 bp, Homo sapiens
agttagtgagagtta

SEQ ID NO: 1222161 - DNA, 15 bp, Homo sapiens
cagttagtgagagtt

SEQ ID NO: 1222162 - DNA, 15 bp, Homo sapiens
acagttagtgagagt

SEQ ID NO: 1222163 - DNA, 15 bp, Homo sapiens
gacagttagtgagag

SEQ ID NO: 1222164 - DNA, 15 bp, Homo sapiens
agacagttagtgaga

SEQ ID NO: 1222165 - DNA, 15 bp, Homo sapiens
cagacagttagtgag

SEQ ID NO: 1222166 - DNA, 15 bp, Homo sapiens
ccagacagttagtga

SEQ ID NO: 1222167 - DNA, 15 bp, Homo sapiens
tccagacagttagtg

SEQ ID NO: 1222168 - DNA, 15 bp, Homo sapiens
atccagacagttagt

SEQ ID NO: 1222169 - DNA, 15 bp, Homo sapiens
tatccagacagttag

SEQ ID NO: 1222170 - DNA, 15 bp, Homo sapiens
ctatccagacagtta

SEQ ID NO: 1222171 - DNA, 15 bp, Homo sapiens
tctatccagacagtt

SEQ ID NO: 1222172 - DNA, 15 bp, Homo sapiens
ttctatccagacagt

SEQ ID NO: 1222173 - DNA, 15 bp, Homo sapiens
gcagatagtgagaat

SEQ ID NO: 1222174 - DNA, 15 bp, Homo sapiens
tgcagatagtgagaa

SEQ ID NO: 1222175 - DNA, 15 bp, Homo sapiens
tagaattctatgcag

SEQ ID NO: 1222176 - DNA, 15 bp, Homo sapiens
atagaattctatgca

SEQ ID NO: 1222177 - DNA, 15 bp, Homo sapiens
gatagaattctatgc

SEQ ID NO: 1222178 - DNA, 15 bp, Homo sapiens
agatagaattctatg

SEQ ID NO: 1222179 - DNA, 15 bp, Homo sapiens
cagatagaattctat

SEQ ID NO: 1222180 - DNA, 15 bp, Homo sapiens
acagatagaattcta

SEQ ID NO: 1222181 - DNA, 15 bp, Homo sapiens
gacagatagaattct

SEQ ID NO: 1222182 - DNA, 15 bp, Homo sapiens
agacagatagaattc

SEQ ID NO: 1222183 - DNA, 15 bp, Homo sapiens
cagacagatagaatt

SEQ ID NO: 1222184 - DNA, 15 bp, Homo sapiens
ccagacagatagaat

SEQ ID NO: 1222185 - DNA, 15 bp, Homo sapiens
accagacagatagaa

SEQ ID NO: 1222186 - DNA, 15 bp, Homo sapiens
aaccagacagataga

SEQ ID NO: 1222187 - DNA, 15 bp, Homo sapiens
taaccagacagatag

SEQ ID NO: 1222188 - DNA, 15 bp, Homo sapiens
ctaaccagacagata

SEQ ID NO: 1222189 - DNA, 15 bp, Homo sapiens
tctaaccagacagat

SEQ ID NO: 1222190 - DNA, 15 bp, Homo sapiens
ttctaaccagacaga

SEQ ID NO: 1222191 - DNA, 15 bp, Homo sapiens
attctaaccagacag

SEQ ID NO: 1222192 - DNA, 15 bp, Homo sapiens
aattctaaccagaca

SEQ ID NO: 1222193 - DNA, 15 bp, Homo sapiens
aaattctaaccagac

SEQ ID NO: 1222194 - DNA, 15 bp, Homo sapiens
aaaattctaaccaga

SEQ ID NO: 1222195 - DNA, 15 bp, Homo sapiens
gaaaattctaaccag

SEQ ID NO: 1222196 - DNA, 15 bp, Homo sapiens
tgaaaattctaacca

SEQ ID NO: 1222197 - DNA, 15 bp, Homo sapiens
gtgaaaattctaacc

SEQ ID NO: 1222198 - DNA, 15 bp, Homo sapiens
agtgaaaattctaac

SEQ ID NO: 1222199 - DNA, 15 bp, Homo sapiens
gagtgaaaattctaa

SEQ ID NO: 1222200 - DNA, 15 bp, Homo sapiens
agagtgaaaattcta

SEQ ID NO: 1222201 - DNA, 15 bp, Homo sapiens
gagagtgaaaattct

SEQ ID NO: 1222202 - DNA, 15 bp, Homo sapiens
agagagtgaaaattc

SEQ ID NO: 1222203 - DNA, 15 bp, Homo sapiens
tagagagtgaaaatt

SEQ ID NO: 1222204 - DNA, 15 bp, Homo sapiens
ctagagagtgaaaat

SEQ ID NO: 1222205 - DNA, 15 bp, Homo sapiens
tctagagagtgaaaa

SEQ ID NO: 1222206 - DNA, 15 bp, Homo sapiens
atctagagagtgaaa

SEQ ID NO: 1222207 - DNA, 15 bp, Homo sapiens
tatctagagagtgaa

SEQ ID NO: 1222208 - DNA, 15 bp, Homo sapiens
gagttctatctagag

SEQ ID NO: 1222209 - DNA, 15 bp, Homo sapiens
gtccagatagatagt

SEQ ID NO: 1222210 - DNA, 15 bp, Homo sapiens
tgtccagatagatag

SEQ ID NO: 1222211 - DNA, 15 bp, Homo sapiens
ctgtccagatagata

SEQ ID NO: 1222212 - DNA, 15 bp, Homo sapiens
tctgtccagatagat

SEQ ID NO: 1222213 - DNA, 15 bp, Homo sapiens
ttctgtccagataga

SEQ ID NO: 1222214 - DNA, 15 bp, Homo sapiens
attctgtccagatag

SEQ ID NO: 1222215 - DNA, 15 bp, Homo sapiens
aattctgtccagata

SEQ ID NO: 1222216 - DNA, 15 bp, Homo sapiens
gaattctgtccagat

SEQ ID NO: 1222217 - DNA, 15 bp, Homo sapiens
agaattctgtccaga

SEQ ID NO: 1222218 - DNA, 15 bp, Homo sapiens
gagaattctgtccag

SEQ ID NO: 1222219 - DNA, 15 bp, Homo sapiens
tgagaattctgtcca

SEQ ID NO: 1222220 - DNA, 15 bp, Homo sapiens
gtgagaattctgtcc

SEQ ID NO: 1222221 - DNA, 15 bp, Homo sapiens
agtgagaattctgtc

SEQ ID NO: 1222222 - DNA, 15 bp, Homo sapiens
gagtgagaattctgt

SEQ ID NO: 1222223 - DNA, 15 bp, Homo sapiens
agagtgagaattctg

SEQ ID NO: 1222224 - DNA, 15 bp, Homo sapiens
aagagttttatccag

SEQ ID NO: 1222225 - DNA, 15 bp, Homo sapiens
taagagttttatcca

SEQ ID NO: 1222226 - DNA, 15 bp, Homo sapiens
ttaagagttttatcc

SEQ ID NO: 1222227 - DNA, 15 bp, Homo sapiens
gttaagagttttatc

SEQ ID NO: 1222228 - DNA, 15 bp, Homo sapiens
agttaagagttttat

SEQ ID NO: 1222229 - DNA, 15 bp, Homo sapiens
tagttaagagtttta

SEQ ID NO: 1222230 - DNA, 15 bp, Homo sapiens
atagttaagagtttt

SEQ ID NO: 1222231 - DNA, 15 bp, Homo sapiens
gatagttaagagttt

SEQ ID NO: 1222232 - DNA, 15 bp, Homo sapiens
agatagttaagagtt

SEQ ID NO: 1222233 - DNA, 15 bp, Homo sapiens
cagatagttaagagt

SEQ ID NO: 1222234 - DNA, 15 bp, Homo sapiens
acagatagttaagag

SEQ ID NO: 1222235 - DNA, 15 bp, Homo sapiens
gacagatagttaaga

SEQ ID NO: 1222236 - DNA, 15 bp, Homo sapiens
agacagatagttaag

SEQ ID NO: 1222237 - DNA, 15 bp, Homo sapiens
cagacagatagttaa

SEQ ID NO: 1222238 - DNA, 15 bp, Homo sapiens
ccagacagatagtta

SEQ ID NO: 1222239 - DNA, 15 bp, Homo sapiens
tccagacagatagtt

SEQ ID NO: 1222240 - DNA, 15 bp, Homo sapiens
gtccagatggtgaga

SEQ ID NO: 1222241 - DNA, 15 bp, Homo sapiens
tgtccagatggtgag

SEQ ID NO: 1222242 - DNA, 15 bp, Homo sapiens
ctgtccagatggtga

SEQ ID NO: 1222243 - DNA, 15 bp, Homo sapiens
tctgtccagatggtg

SEQ ID NO: 1222244 - DNA, 15 bp, Homo sapiens
ttctgtccagatggt

SEQ ID NO: 1222245 - DNA, 15 bp, Homo sapiens
gttctgtccagatgg

SEQ ID NO: 1222246 - DNA, 15 bp, Homo sapiens
agttctgtccagatg

SEQ ID NO: 1222247 - DNA, 15 bp, Homo sapiens
gagttctgtccagat

SEQ ID NO: 1222248 - DNA, 15 bp, Homo sapiens
agagttctgtccaga

SEQ ID NO: 1222249 - DNA, 15 bp, Homo sapiens
gagagttctgtccag

SEQ ID NO: 1222250 - DNA, 15 bp, Homo sapiens
tgagagttctgtcca

SEQ ID NO: 1222251 - DNA, 15 bp, Homo sapiens
cgatagtgagagttc

SEQ ID NO: 1222252 - DNA, 15 bp, Homo sapiens
ccgatagtgagagtt

SEQ ID NO: 1222253 - DNA, 15 bp, Homo sapiens
accgatagtgagagt

SEQ ID NO: 1222254 - DNA, 15 bp, Homo sapiens
gaccgatagtgagag

SEQ ID NO: 1222255 - DNA, 15 bp, Homo sapiens
agaccgatagtgaga

SEQ ID NO: 1222256 - DNA, 15 bp, Homo sapiens
cagaccgatagtgag

SEQ ID NO: 1222257 - DNA, 15 bp, Homo sapiens
ccagaccgatagtga

SEQ ID NO: 1222258 - DNA, 15 bp, Homo sapiens
tccagaccgatagtg

SEQ ID NO: 1222259 - DNA, 15 bp, Homo sapiens
atccagaccgatagt

SEQ ID NO: 1222260 - DNA, 15 bp, Homo sapiens
tatccagaccgatag

SEQ ID NO: 1222261 - DNA, 15 bp, Homo sapiens
ttatccagaccgata

SEQ ID NO: 1222262 - DNA, 15 bp, Homo sapiens
tttatccagaccgat

SEQ ID NO: 1222263 - DNA, 15 bp, Homo sapiens
ttttatccagaccga

SEQ ID NO: 1222264 - DNA, 15 bp, Homo sapiens
attttatccagaccg

SEQ ID NO: 1222265 - DNA, 15 bp, Homo sapiens
aattttatccagacc

SEQ ID NO: 1222266 - DNA, 15 bp, Homo sapiens
agatggtgagaattt

SEQ ID NO: 1222267 - DNA, 15 bp, Homo sapiens
acagatggtgagaat

SEQ ID NO: 1222268 - DNA, 15 bp, Homo sapiens
cacagatggtgagaa

SEQ ID NO: 1222269 - DNA, 15 bp, Homo sapiens
acacagatggtgaga

SEQ ID NO: 1222270 - DNA, 15 bp, Homo sapiens
tacacagatggtgag

SEQ ID NO: 1222271 - DNA, 15 bp, Homo sapiens
ctacacagatggtga

SEQ ID NO: 1222272 - DNA, 15 bp, Homo sapiens
tctacacagatggtg

SEQ ID NO: 1222273 - DNA, 15 bp, Homo sapiens
ttctacacagatggt

SEQ ID NO: 1222274 - DNA, 15 bp, Homo sapiens
attctacacagatgg

SEQ ID NO: 1222275 - DNA, 15 bp, Homo sapiens
aattctacacagatg

SEQ ID NO: 1222276 - DNA, 15 bp, Homo sapiens
gaattctacacagat

SEQ ID NO: 1222277 - DNA, 15 bp, Homo sapiens
agaattctacacaga

SEQ ID NO: 1222278 - DNA, 15 bp, Homo sapiens
gagaattctacacag

SEQ ID NO: 1222279 - DNA, 15 bp, Homo sapiens
tgagaattctacaca

SEQ ID NO: 1222280 - DNA, 15 bp, Homo sapiens
gtgagaattctacac

SEQ ID NO: 1222281 - DNA, 15 bp, Homo sapiens
agtgagaattctaca

SEQ ID NO: 1222282 - DNA, 15 bp, Homo sapiens
tagtgagaattctac

SEQ ID NO: 1222283 - DNA, 15 bp, Homo sapiens
aagaattctatgcag

SEQ ID NO: 1222284 - DNA, 15 bp, Homo sapiens
taagaattctatgca

SEQ ID NO: 1222285 - DNA, 15 bp, Homo sapiens
gtaagaattctatgc

SEQ ID NO: 1222286 - DNA, 15 bp, Homo sapiens
agtaagaattctatg

SEQ ID NO: 1222287 - DNA, 15 bp, Homo sapiens
gagtaagaattctat

SEQ ID NO: 1222288 - DNA, 15 bp, Homo sapiens
agagtaagaattcta

SEQ ID NO: 1222289 - DNA, 15 bp, Homo sapiens
gagagtaagaattct

SEQ ID NO: 1222290 - DNA, 15 bp, Homo sapiens
agagagtaagaattc

SEQ ID NO: 1222291 - DNA, 15 bp, Homo sapiens
cagagagtaagaatt

SEQ ID NO: 1222292 - DNA, 15 bp, Homo sapiens
ccagagagtaagaat

SEQ ID NO: 1222293 - DNA, 15 bp, Homo sapiens
tccagagagtaagaa

SEQ ID NO: 1222294 - DNA, 15 bp, Homo sapiens
atccagagagtaaga

SEQ ID NO: 1222295 - DNA, 15 bp, Homo sapiens
tatccagagagtaag

SEQ ID NO: 1222296 - DNA, 15 bp, Homo sapiens
ctatccagagagtaa

SEQ ID NO: 1222297 - DNA, 15 bp, Homo sapiens
tctatccagagagta

SEQ ID NO: 1222298 - DNA, 15 bp, Homo sapiens
agagagttctatcca

SEQ ID NO: 1222299 - DNA, 15 bp, Homo sapiens
gagagagttctatcc

SEQ ID NO: 1222300 - DNA, 15 bp, Homo sapiens
cgagagagttctatc

SEQ ID NO: 1222301 - DNA, 15 bp, Homo sapiens
acgagagagttctat

SEQ ID NO: 1222302 - DNA, 15 bp, Homo sapiens
tacgagagagttcta

SEQ ID NO: 1222303 - DNA, 15 bp, Homo sapiens
atacgagagagttct

SEQ ID NO: 1222304 - DNA, 15 bp, Homo sapiens
aatacgagagagttc

SEQ ID NO: 1222305 - DNA, 15 bp, Homo sapiens
gaatacgagagagtt

SEQ ID NO: 1222306 - DNA, 15 bp, Homo sapiens
ggaatacgagagagt

SEQ ID NO: 1222307 - DNA, 15 bp, Homo sapiens
aggaatacgagagag

SEQ ID NO: 1222308 - DNA, 15 bp, Homo sapiens
gaggaatacgagaga

SEQ ID NO: 1222309 - DNA, 15 bp, Homo sapiens
cgaggaatacgagag

SEQ ID NO: 1222310 - DNA, 15 bp, Homo sapiens
tcgaggaatacgaga

SEQ ID NO: 1222311 - DNA, 15 bp, Homo sapiens
atcgaggaatacgag

SEQ ID NO: 1222312 - DNA, 15 bp, Homo sapiens
tatcgaggaatacga

SEQ ID NO: 1222313 - DNA, 15 bp, Homo sapiens
ctatcgaggaatacg

SEQ ID NO: 1222314 - DNA, 15 bp, Homo sapiens
tctatcgaggaatac

SEQ ID NO: 1222315 - DNA, 15 bp, Homo sapiens
ttctatcgaggaata

SEQ ID NO: 1222316 - DNA, 15 bp, Homo sapiens
gttctatcgaggaat

SEQ ID NO: 1222317 - DNA, 15 bp, Homo sapiens
agttctatcgaggaa

SEQ ID NO: 1222318 - DNA, 15 bp, Homo sapiens
gagttctatcgagga

SEQ ID NO: 1222319 - DNA, 15 bp, Homo sapiens
agagttctatcgagg

SEQ ID NO: 1222320 - DNA, 15 bp, Homo sapiens
cagagttctatcgag

SEQ ID NO: 1222321 - DNA, 15 bp, Homo sapiens
tcagagttctatcga

SEQ ID NO: 1222322 - DNA, 15 bp, Homo sapiens
gtcagagttctatcg

SEQ ID NO: 1222323 - DNA, 15 bp, Homo sapiens
ggtcagagttctatc

SEQ ID NO: 1222324 - DNA, 15 bp, Homo sapiens
tggtcagagttctat

SEQ ID NO: 1222325 - DNA, 15 bp, Homo sapiens
atggtcagagttcta

SEQ ID NO: 1222326 - DNA, 15 bp, Homo sapiens
gatggtcagagttct

SEQ ID NO: 1222327 - DNA, 15 bp, Homo sapiens
agatggtcagagttc

SEQ ID NO: 1222328 - DNA, 15 bp, Homo sapiens
cagatggtcagagtt

SEQ ID NO: 1222329 - DNA, 15 bp, Homo sapiens
ccagatggtcagagt

SEQ ID NO: 1222330 - DNA, 15 bp, Homo sapiens
tccagatggtcagag

SEQ ID NO: 1222331 - DNA, 15 bp, Homo sapiens
atccagatggtcaga

SEQ ID NO: 1222332 - DNA, 15 bp, Homo sapiens
tatccagatggtcag

SEQ ID NO: 1222333 - DNA, 15 bp, Homo sapiens
ctatccagatggtca

SEQ ID NO: 1222334 - DNA, 15 bp, Homo sapiens
tctatccagatggtc

SEQ ID NO: 1222335 - DNA, 15 bp, Homo sapiens
gattctatccagata

SEQ ID NO: 1222336 - DNA, 15 bp, Homo sapiens
ggattctatccagat

SEQ ID NO: 1222337 - DNA, 15 bp, Homo sapiens
aggattctatccaga

SEQ ID NO: 1222338 - DNA, 15 bp, Homo sapiens
gaggattctatccag

SEQ ID NO: 1222339 - DNA, 15 bp, Homo sapiens
tgaggattctatcca

SEQ ID NO: 1222340 - DNA, 15 bp, Homo sapiens
gtgaggattctatcc

SEQ ID NO: 1222341 - DNA, 15 bp, Homo sapiens
agtgaggattctatc

SEQ ID NO: 1222342 - DNA, 15 bp, Homo sapiens
gagtgaggattctat

SEQ ID NO: 1222343 - DNA, 15 bp, Homo sapiens
agagtgaggattcta

SEQ ID NO: 1222344 - DNA, 15 bp, Homo sapiens
tagagtgaggattct

SEQ ID NO: 1222345 - DNA, 15 bp, Homo sapiens
atagagtgaggattc

SEQ ID NO: 1222346 - DNA, 15 bp, Homo sapiens
tatagagtgaggatt

SEQ ID NO: 1222347 - DNA, 15 bp, Homo sapiens
atatagagtgaggat

SEQ ID NO: 1222348 - DNA, 15 bp, Homo sapiens
tatatagagtgagga

SEQ ID NO: 1222349 - DNA, 15 bp, Homo sapiens
ctatatagagtgagg

SEQ ID NO: 1222350 - DNA, 15 bp, Homo sapiens
tctatatagagtgag

SEQ ID NO: 1222351 - DNA, 15 bp, Homo sapiens
ttctatatagagtga

SEQ ID NO: 1222352 - DNA, 15 bp, Homo sapiens
gttctatatagagtg

SEQ ID NO: 1222353 - DNA, 15 bp, Homo sapiens
agttctatatagagt

SEQ ID NO: 1222354 - DNA, 15 bp, Homo sapiens
gagttctatatagag

SEQ ID NO: 1222355 - DNA, 15 bp, Homo sapiens
agagttctatataga

SEQ ID NO: 1222356 - DNA, 15 bp, Homo sapiens
gagagttctatatag

SEQ ID NO: 1222357 - DNA, 15 bp, Homo sapiens
tgagagttctatata

SEQ ID NO: 1222358 - DNA, 15 bp, Homo sapiens
gtgagagttctatat

SEQ ID NO: 1222359 - DNA, 15 bp, Homo sapiens
agagatagtgagagt

SEQ ID NO: 1222360 - DNA, 15 bp, Homo sapiens
gagagatagtgagag

SEQ ID NO: 1222361 - DNA, 15 bp, Homo sapiens
agagagatagtgaga

SEQ ID NO: 1222362 - DNA, 15 bp, Homo sapiens
cagagagatagtgag

SEQ ID NO: 1222363 - DNA, 15 bp, Homo sapiens
ccagagagatagtga

SEQ ID NO: 1222364 - DNA, 15 bp, Homo sapiens
tccagagagatagtg

SEQ ID NO: 1222365 - DNA, 15 bp, Homo sapiens
atccagagagatagt

SEQ ID NO: 1222366 - DNA, 15 bp, Homo sapiens
tatccagagagatag

SEQ ID NO: 1222367 - DNA, 15 bp, Homo sapiens
ctatccagagagata

SEQ ID NO: 1222368 - DNA, 15 bp, Homo sapiens
tctatccagagagat

SEQ ID NO: 1222369 - DNA, 15 bp, Homo sapiens
ttctatccagagaga

SEQ ID NO: 1222370 - DNA, 15 bp, Homo sapiens
tccagagtgagaatt

SEQ ID NO: 1222371 - DNA, 15 bp, Homo sapiens
ttccagagtgagaat

SEQ ID NO: 1222372 - DNA, 15 bp, Homo sapiens
tttccagagtgagaa

SEQ ID NO: 1222373 - DNA, 15 bp, Homo sapiens
ctttccagagtgaga

SEQ ID NO: 1222374 - DNA, 15 bp, Homo sapiens
tctttccagagtgag

SEQ ID NO: 1222375 - DNA, 15 bp, Homo sapiens
ttctttccagagtga

SEQ ID NO: 1222376 - DNA, 15 bp, Homo sapiens
gttctttccagagtg

SEQ ID NO: 1222377 - DNA, 15 bp, Homo sapiens
ggttctttccagagt

SEQ ID NO: 1222378 - DNA, 15 bp, Homo sapiens
gggttctttccagag

SEQ ID NO: 1222379 - DNA, 15 bp, Homo sapiens
agggttctttccaga

SEQ ID NO: 1222380 - DNA, 15 bp, Homo sapiens
gagggttctttccag

SEQ ID NO: 1222381 - DNA, 15 bp, Homo sapiens
tgagggttctttcca

SEQ ID NO: 1222382 - DNA, 15 bp, Homo sapiens
gtgagggttctttcc

SEQ ID NO: 1222383 - DNA, 15 bp, Homo sapiens
agtgagggttctttc

SEQ ID NO: 1222384 - DNA, 15 bp, Homo sapiens
tagtgagggttcttt

SEQ ID NO: 1222385 - DNA, 15 bp, Homo sapiens
atagtgagggttctt

SEQ ID NO: 1222386 - DNA, 15 bp, Homo sapiens
gatagtgagggttct

SEQ ID NO: 1222387 - DNA, 15 bp, Homo sapiens
agatagtgagggttc

SEQ ID NO: 1222388 - DNA, 15 bp, Homo sapiens
tagatagtgagggtt

SEQ ID NO: 1222389 - DNA, 15 bp, Homo sapiens
atagatagtgagggt

SEQ ID NO: 1222390 - DNA, 15 bp, Homo sapiens
tatagatagtgaggg

SEQ ID NO: 1222391 - DNA, 15 bp, Homo sapiens
atatagatagtgagg

SEQ ID NO: 1222392 - DNA, 15 bp, Homo sapiens
catatagatagtgag

SEQ ID NO: 1222393 - DNA, 15 bp, Homo sapiens
ccatatagatagtga

SEQ ID NO: 1222394 - DNA, 15 bp, Homo sapiens
tccatatagatagtg

SEQ ID NO: 1222395 - DNA, 15 bp, Homo sapiens
ttccatatagatagt

SEQ ID NO: 1222396 - DNA, 15 bp, Homo sapiens
tttccatatagatag

SEQ ID NO: 1222397 - DNA, 15 bp, Homo sapiens
ctttccatatagata

SEQ ID NO: 1222398 - DNA, 15 bp, Homo sapiens
tctttccatatagat

SEQ ID NO: 1222399 - DNA, 15 bp, Homo sapiens
ttctttccatataga

SEQ ID NO: 1222400 - DNA, 15 bp, Homo sapiens
attctttccatatag

SEQ ID NO: 1222401 - DNA, 15 bp, Homo sapiens
aattctttccatata

SEQ ID NO: 1222402 - DNA, 15 bp, Homo sapiens
gaattctttccatat

SEQ ID NO: 1222403 - DNA, 15 bp, Homo sapiens
agaattctttccata

SEQ ID NO: 1222404 - DNA, 15 bp, Homo sapiens
gagaattctttccat

SEQ ID NO: 1222405 - DNA, 15 bp, Homo sapiens
ttgagaattctttcc

SEQ ID NO: 1222406 - DNA, 15 bp, Homo sapiens
gttgagaattctttc

SEQ ID NO: 1222407 - DNA, 15 bp, Homo sapiens
tgttgagaattcttt

SEQ ID NO: 1222408 - DNA, 15 bp, Homo sapiens
atgttgagaattctt

SEQ ID NO: 1222409 - DNA, 15 bp, Homo sapiens
gatgttgagaattct

SEQ ID NO: 1222410 - DNA, 15 bp, Homo sapiens
agatgttgagaattc

SEQ ID NO: 1222411 - DNA, 15 bp, Homo sapiens
cagatgttgagaatt

SEQ ID NO: 1222412 - DNA, 15 bp, Homo sapiens
ccagatgttgagaat

SEQ ID NO: 1222413 - DNA, 15 bp, Homo sapiens
tccagatgttgagaa

SEQ ID NO: 1222414 - DNA, 15 bp, Homo sapiens
atccagatgttgaga

SEQ ID NO: 1222415 - DNA, 15 bp, Homo sapiens
tatccagatgttgag

SEQ ID NO: 1222416 - DNA, 15 bp, Homo sapiens
ctatccagatgttga

SEQ ID NO: 1222417 - DNA, 15 bp, Homo sapiens
tctatccagatgttg

SEQ ID NO: 1222418 - DNA, 15 bp, Homo sapiens
ttctatccagatgtt

SEQ ID NO: 1222419 - DNA, 15 bp, Homo sapiens
attctatccagatgt

SEQ ID NO: 1222420 - DNA, 15 bp, Homo sapiens
gattctatccagatg

SEQ ID NO: 1222421 - DNA, 15 bp, Homo sapiens
tagtgaggattctat

SEQ ID NO: 1222422 - DNA, 15 bp, Homo sapiens
atagtgaggattcta

SEQ ID NO: 1222423 - DNA, 15 bp, Homo sapiens
gatagtgaggattct

SEQ ID NO: 1222424 - DNA, 15 bp, Homo sapiens
agatagtgaggattc

SEQ ID NO: 1222425 - DNA, 15 bp, Homo sapiens
cagatagtgaggatt

SEQ ID NO: 1222426 - DNA, 15 bp, Homo sapiens
ccagatagtgaggat

SEQ ID NO: 1222427 - DNA, 15 bp, Homo sapiens
tccagatagtgagga

SEQ ID NO: 1222428 - DNA, 15 bp, Homo sapiens
atccagatagtgagg

SEQ ID NO: 1222429 - DNA, 15 bp, Homo sapiens
gagagagtgagaatt

SEQ ID NO: 1222430 - DNA, 15 bp, Homo sapiens
cgagagagtgagaat

SEQ ID NO: 1222431 - DNA, 15 bp, Homo sapiens
tcgagagagtgagaa

SEQ ID NO: 1222432 - DNA, 15 bp, Homo sapiens
atcgagagagtgaga

SEQ ID NO: 1222433 - DNA, 15 bp, Homo sapiens
tatcgagagagtgag

SEQ ID NO: 1222434 - DNA, 15 bp, Homo sapiens
ctatcgagagagtga

SEQ ID NO: 1222435 - DNA, 15 bp, Homo sapiens
tctatcgagagagtg

SEQ ID NO: 1222436 - DNA, 15 bp, Homo sapiens
ttctatcgagagagt

SEQ ID NO: 1222437 - DNA, 15 bp, Homo sapiens
gttctatcgagagag

SEQ ID NO: 1222438 - DNA, 15 bp, Homo sapiens
agttctatcgagaga

SEQ ID NO: 1222439 - DNA, 15 bp, Homo sapiens
gagttctatcgagag

SEQ ID NO: 1222440 - DNA, 15 bp, Homo sapiens
agagttctatcgaga

SEQ ID NO: 1222441 - DNA, 15 bp, Homo sapiens
aagagttctatcgag

SEQ ID NO: 1222442 - DNA, 15 bp, Homo sapiens
caagagttctatcga

SEQ ID NO: 1222443 - DNA, 15 bp, Homo sapiens
gcaagagttctatcg

SEQ ID NO: 1222444 - DNA, 15 bp, Homo sapiens
agcaagagttctatc

SEQ ID NO: 1222445 - DNA, 15 bp, Homo sapiens
tagcaagagttctat

SEQ ID NO: 1222446 - DNA, 15 bp, Homo sapiens
atagcaagagttcta

SEQ ID NO: 1222447 - DNA, 15 bp, Homo sapiens
gatagcaagagttct

SEQ ID NO: 1222448 - DNA, 15 bp, Homo sapiens
agatagcaagagttc

SEQ ID NO: 1222449 - DNA, 15 bp, Homo sapiens
cagatagcaagagtt

SEQ ID NO: 1222450 - DNA, 15 bp, Homo sapiens
acagatagcaagagt

SEQ ID NO: 1222451 - DNA, 15 bp, Homo sapiens
gacagatagcaagag

SEQ ID NO: 1222452 - DNA, 15 bp, Homo sapiens
agacagatagcaaga

SEQ ID NO: 1222453 - DNA, 15 bp, Homo sapiens
cagacagatagcaag

SEQ ID NO: 1222454 - DNA, 15 bp, Homo sapiens
ccagacagatagcaa

SEQ ID NO: 1222455 - DNA, 15 bp, Homo sapiens
tccagacagatagca

SEQ ID NO: 1222456 - DNA, 15 bp, Homo sapiens
atccagacagatagc

SEQ ID NO: 1222457 - DNA, 15 bp, Homo sapiens
gtggtgagaattcta

SEQ ID NO: 1222458 - DNA, 15 bp, Homo sapiens
ggtggtgagaattct

SEQ ID NO: 1222459 - DNA, 15 bp, Homo sapiens
aggtggtgagaattc

SEQ ID NO: 1222460 - DNA, 15 bp, Homo sapiens
taggtggtgagaatt

SEQ ID NO: 1222461 - DNA, 15 bp, Homo sapiens
ctaggtggtgagaat

SEQ ID NO: 1222462 - DNA, 15 bp, Homo sapiens
tctaggtggtgagaa

SEQ ID NO: 1222463 - DNA, 15 bp, Homo sapiens
atctaggtggtgaga

SEQ ID NO: 1222464 - DNA, 15 bp, Homo sapiens
tatctaggtggtgag

SEQ ID NO: 1222465 - DNA, 15 bp, Homo sapiens
ctatctaggtggtga

SEQ ID NO: 1222466 - DNA, 15 bp, Homo sapiens
tctatctaggtggtg

SEQ ID NO: 1222467 - DNA, 15 bp, Homo sapiens
ttctatctaggtggt

SEQ ID NO: 1222468 - DNA, 15 bp, Homo sapiens
gttctatctaggtgg

SEQ ID NO: 1222469 - DNA, 15 bp, Homo sapiens
agttctatctaggtg

SEQ ID NO: 1222470 - DNA, 15 bp, Homo sapiens
gagttctatctaggt

SEQ ID NO: 1222471 - DNA, 15 bp, Homo sapiens
agagttctatctagg

SEQ ID NO: 1222472 - DNA, 15 bp, Homo sapiens
ttattgagagttcta

SEQ ID NO: 1222473 - DNA, 15 bp, Homo sapiens
tttattgagagttct

SEQ ID NO: 1222474 - DNA, 15 bp, Homo sapiens
atttattgagagttc

SEQ ID NO: 1222475 - DNA, 15 bp, Homo sapiens
catttattgagagtt

SEQ ID NO: 1222476 - DNA, 15 bp, Homo sapiens
ccatttattgagagt

SEQ ID NO: 1222477 - DNA, 15 bp, Homo sapiens
accatttattgagag

SEQ ID NO: 1222478 - DNA, 15 bp, Homo sapiens
taccatttattgaga

SEQ ID NO: 1222479 - DNA, 15 bp, Homo sapiens
ctaccatttattgag

SEQ ID NO: 1222480 - DNA, 15 bp, Homo sapiens
tctaccatttattga

SEQ ID NO: 1222481 - DNA, 15 bp, Homo sapiens
ttctaccatttattg

SEQ ID NO: 1222482 - DNA, 15 bp, Homo sapiens
attctaccatttatt

SEQ ID NO: 1222483 - DNA, 15 bp, Homo sapiens
aattctaccatttat

SEQ ID NO: 1222484 - DNA, 15 bp, Homo sapiens
gaattctaccattta

SEQ ID NO: 1222485 - DNA, 15 bp, Homo sapiens
agaattctaccattt

SEQ ID NO: 1222486 - DNA, 15 bp, Homo sapiens
aagaattctaccatt

SEQ ID NO: 1222487 - DNA, 15 bp, Homo sapiens
taagaattctaccat

SEQ ID NO: 1222488 - DNA, 15 bp, Homo sapiens
gtaagaattctacca

SEQ ID NO: 1222489 - DNA, 15 bp, Homo sapiens
agtaagaattctacc

SEQ ID NO: 1222490 - DNA, 15 bp, Homo sapiens
gagtaagaattctac

SEQ ID NO: 1222491 - DNA, 15 bp, Homo sapiens
gtccagagagtaaga

SEQ ID NO: 1222492 - DNA, 15 bp, Homo sapiens
tgtccagagagtaag

SEQ ID NO: 1222493 - DNA, 15 bp, Homo sapiens
ttgtccagagagtaa

SEQ ID NO: 1222494 - DNA, 15 bp, Homo sapiens
tttgtccagagagta

SEQ ID NO: 1222495 - DNA, 15 bp, Homo sapiens
ttttgtccagagagt

SEQ ID NO: 1222496 - DNA, 15 bp, Homo sapiens
gttttgtccagagag

SEQ ID NO: 1222497 - DNA, 15 bp, Homo sapiens
agttttgtccagaga

SEQ ID NO: 1222498 - DNA, 15 bp, Homo sapiens
gagttttgtccagag

SEQ ID NO: 1222499 - DNA, 15 bp, Homo sapiens
agagttttgtccaga

SEQ ID NO: 1222500 - DNA, 15 bp, Homo sapiens
gagagttttgtccag

SEQ ID NO: 1222501 - DNA, 15 bp, Homo sapiens
tgagagttttgtcca

SEQ ID NO: 1222502 - DNA, 15 bp, Homo sapiens
gtgagagttttgtcc

SEQ ID NO: 1222503 - DNA, 15 bp, Homo sapiens
agtgagagttttgtc

SEQ ID NO: 1222504 - DNA, 15 bp, Homo sapiens
tagtgagagttttgt

SEQ ID NO: 1222505 - DNA, 15 bp, Homo sapiens
atagtgagagttttg

SEQ ID NO: 1222506 - DNA, 15 bp, Homo sapiens
aagatagtgagagtt

SEQ ID NO: 1222507 - DNA, 15 bp, Homo sapiens
aaagatagtgagagt

SEQ ID NO: 1222508 - DNA, 15 bp, Homo sapiens
gaaagatagtgagag

SEQ ID NO: 1222509 - DNA, 15 bp, Homo sapiens
tgaaagatagtgaga

SEQ ID NO: 1222510 - DNA, 15 bp, Homo sapiens
ctgaaagatagtgag

SEQ ID NO: 1222511 - DNA, 15 bp, Homo sapiens
cctgaaagatagtga

SEQ ID NO: 1222512 - DNA, 15 bp, Homo sapiens
tcctgaaagatagtg

SEQ ID NO: 1222513 - DNA, 15 bp, Homo sapiens
atcctgaaagatagt

SEQ ID NO: 1222514 - DNA, 15 bp, Homo sapiens
tatcctgaaagatag

SEQ ID NO: 1222515 - DNA, 15 bp, Homo sapiens
ctatcctgaaagata

SEQ ID NO: 1222516 - DNA, 15 bp, Homo sapiens
tctatcctgaaagat

SEQ ID NO: 1222517 - DNA, 15 bp, Homo sapiens
ttctatcctgaaaga

SEQ ID NO: 1222518 - DNA, 15 bp, Homo sapiens
gttctatcctgaaag

SEQ ID NO: 1222519 - DNA, 15 bp, Homo sapiens
agttctatcctgaaa

SEQ ID NO: 1222520 - DNA, 15 bp, Homo sapiens
gagttctatcctgaa

SEQ ID NO: 1222521 - DNA, 15 bp, Homo sapiens
aagagttctatcctg

SEQ ID NO: 1222522 - DNA, 15 bp, Homo sapiens
taagagttctatcct

SEQ ID NO: 1222523 - DNA, 15 bp, Homo sapiens
gtaagagttctatcc

SEQ ID NO: 1222524 - DNA, 15 bp, Homo sapiens
agtaagagttctatc

SEQ ID NO: 1222525 - DNA, 15 bp, Homo sapiens
tagtaagagttctat

SEQ ID NO: 1222526 - DNA, 15 bp, Homo sapiens
gtagtaagagttcta

SEQ ID NO: 1222527 - DNA, 15 bp, Homo sapiens
ggtagtaagagttct

SEQ ID NO: 1222528 - DNA, 15 bp, Homo sapiens
aggtagtaagagttc

SEQ ID NO: 1222529 - DNA, 15 bp, Homo sapiens
caggtagtaagagtt

SEQ ID NO: 1222530 - DNA, 15 bp, Homo sapiens
ccaggtagtaagagt

SEQ ID NO: 1222531 - DNA, 15 bp, Homo sapiens
tccaggtagtaagag

SEQ ID NO: 1222532 - DNA, 15 bp, Homo sapiens
ctccaggtagtaaga

SEQ ID NO: 1222533 - DNA, 15 bp, Homo sapiens
tctccaggtagtaag

SEQ ID NO: 1222534 - DNA, 15 bp, Homo sapiens
ctctccaggtagtaa

SEQ ID NO: 1222535 - DNA, 15 bp, Homo sapiens
tctctccaggtagta

SEQ ID NO: 1222536 - DNA, 15 bp, Homo sapiens
ttctctccaggtagt

SEQ ID NO: 1222537 - DNA, 15 bp, Homo sapiens
gttctctccaggtag

SEQ ID NO: 1222538 - DNA, 15 bp, Homo sapiens
agttctctccaggta

SEQ ID NO: 1222539 - DNA, 15 bp, Homo sapiens
gagttctctccaggt

SEQ ID NO: 1222540 - DNA, 15 bp, Homo sapiens
agagttctctccagg

SEQ ID NO: 1222541 - DNA, 15 bp, Homo sapiens
gagagttctctccag

SEQ ID NO: 1222542 - DNA, 15 bp, Homo sapiens
tgagagttctctcca

SEQ ID NO: 1222543 - DNA, 15 bp, Homo sapiens
gtgagagttctctcc

SEQ ID NO: 1222544 - DNA, 15 bp, Homo sapiens
ttgagaattctatcc

SEQ ID NO: 1222545 - DNA, 15 bp, Homo sapiens
gttgagaattctatc

SEQ ID NO: 1222546 - DNA, 15 bp, Homo sapiens
tgttgagaattctat

SEQ ID NO: 1222547 - DNA, 15 bp, Homo sapiens
atgttgagaattcta

SEQ ID NO: 1222548 - DNA, 15 bp, Homo sapiens
tcagatgttgagaat

SEQ ID NO: 1222549 - DNA, 15 bp, Homo sapiens
ctcagatgttgagaa

SEQ ID NO: 1222550 - DNA, 15 bp, Homo sapiens
cctcagatgttgaga

SEQ ID NO: 1222551 - DNA, 15 bp, Homo sapiens
tcctcagatgttgag

SEQ ID NO: 1222552 - DNA, 15 bp, Homo sapiens
atcctcagatgttga

SEQ ID NO: 1222553 - DNA, 15 bp, Homo sapiens
tatcctcagatgttg

SEQ ID NO: 1222554 - DNA, 15 bp, Homo sapiens
ctatcctcagatgtt

SEQ ID NO: 1222555 - DNA, 15 bp, Homo sapiens
tctatcctcagatgt

SEQ ID NO: 1222556 - DNA, 15 bp, Homo sapiens
atctatcctcagatg

SEQ ID NO: 1222557 - DNA, 15 bp, Homo sapiens
aatctatcctcagat

SEQ ID NO: 1222558 - DNA, 15 bp, Homo sapiens
aaatctatcctcaga

SEQ ID NO: 1222559 - DNA, 15 bp, Homo sapiens
gaaatctatcctcag

SEQ ID NO: 1222560 - DNA, 15 bp, Homo sapiens
ggaaatctatcctca

SEQ ID NO: 1222561 - DNA, 15 bp, Homo sapiens
tggaaatctatcctc

SEQ ID NO: 1222562 - DNA, 15 bp, Homo sapiens
ttggaaatctatcct

SEQ ID NO: 1222563 - DNA, 15 bp, Homo sapiens
gttggaaatctatcc

SEQ ID NO: 1222564 - DNA, 15 bp, Homo sapiens
agttggaaatctatc

SEQ ID NO: 1222565 - DNA, 15 bp, Homo sapiens
tagttggaaatctat

SEQ ID NO: 1222566 - DNA, 15 bp, Homo sapiens
atagttggaaatcta

SEQ ID NO: 1222567 - DNA, 15 bp, Homo sapiens
gatagttggaaatct

SEQ ID NO: 1222568 - DNA, 15 bp, Homo sapiens
agatagttggaaatc

SEQ ID NO: 1222569 - DNA, 15 bp, Homo sapiens
tagatagttggaaat

SEQ ID NO: 1222570 - DNA, 15 bp, Homo sapiens
atagatagttggaaa

SEQ ID NO: 1222571 - DNA, 15 bp, Homo sapiens
gatagatagttggaa

SEQ ID NO: 1222572 - DNA, 15 bp, Homo sapiens
agatagatagttgga

SEQ ID NO: 1222573 - DNA, 15 bp, Homo sapiens
cagatagatagttgg

SEQ ID NO: 1222574 - DNA, 15 bp, Homo sapiens
ccagatagatagttg

SEQ ID NO: 1222575 - DNA, 15 bp, Homo sapiens
tccagatagatagtt

SEQ ID NO: 1222576 - DNA, 15 bp, Homo sapiens
ggaattatatccaga

SEQ ID NO: 1222577 - DNA, 15 bp, Homo sapiens
gggaattatatccag

SEQ ID NO: 1222578 - DNA, 15 bp, Homo sapiens
tgggaattatatcca

SEQ ID NO: 1222579 - DNA, 15 bp, Homo sapiens
gtgggaattatatcc

SEQ ID NO: 1222580 - DNA, 15 bp, Homo sapiens
agtgggaattatatc

SEQ ID NO: 1222581 - DNA, 15 bp, Homo sapiens
gagtgggaattatat

SEQ ID NO: 1222582 - DNA, 15 bp, Homo sapiens
agagtgggaattata

SEQ ID NO: 1222583 - DNA, 15 bp, Homo sapiens
cagagtgggaattat

SEQ ID NO: 1222584 - DNA, 15 bp, Homo sapiens
acagagtgggaatta

SEQ ID NO: 1222585 - DNA, 15 bp, Homo sapiens
gacagagtgggaatt

SEQ ID NO: 1222586 - DNA, 15 bp, Homo sapiens
cgacagagtgggaat

SEQ ID NO: 1222587 - DNA, 15 bp, Homo sapiens
acgacagagtgggaa

SEQ ID NO: 1222588 - DNA, 15 bp, Homo sapiens
aacgacagagtggga

SEQ ID NO: 1222589 - DNA, 15 bp, Homo sapiens
taacgacagagtggg

SEQ ID NO: 1222590 - DNA, 15 bp, Homo sapiens
ctaacgacagagtgg

SEQ ID NO: 1222591 - DNA, 15 bp, Homo sapiens
tctaacgacagagtg

SEQ ID NO: 1222592 - DNA, 15 bp, Homo sapiens
ttctaacgacagagt

SEQ ID NO: 1222593 - DNA, 15 bp, Homo sapiens
gttctaacgacagag

SEQ ID NO: 1222594 - DNA, 15 bp, Homo sapiens
agttctaacgacaga

SEQ ID NO: 1222595 - DNA, 15 bp, Homo sapiens
gagttctaacgacag

SEQ ID NO: 1222596 - DNA, 15 bp, Homo sapiens
agagttctaacgaca

SEQ ID NO: 1222597 - DNA, 15 bp, Homo sapiens
gagagttctaacgac

SEQ ID NO: 1222598 - DNA, 15 bp, Homo sapiens
tgagagttctaacga

SEQ ID NO: 1222599 - DNA, 15 bp, Homo sapiens
gtgagagttctaacg

SEQ ID NO: 1222600 - DNA, 15 bp, Homo sapiens
agtgagagttctaac

SEQ ID NO: 1222601 - DNA, 15 bp, Homo sapiens
tagtgagagttctaa

SEQ ID NO: 1222602 - DNA, 15 bp, Homo sapiens
gtagtgagagttcta

SEQ ID NO: 1222603 - DNA, 15 bp, Homo sapiens
ggtagtgagagttct

SEQ ID NO: 1222604 - DNA, 15 bp, Homo sapiens
aggtagtgagagttc

SEQ ID NO: 1222605 - DNA, 15 bp, Homo sapiens
caggtagtgagagtt

SEQ ID NO: 1222606 - DNA, 15 bp, Homo sapiens
acaggtagtgagagt

SEQ ID NO: 1222607 - DNA, 15 bp, Homo sapiens
gacaggtagtgagag

SEQ ID NO: 1222608 - DNA, 15 bp, Homo sapiens
agacaggtagtgaga

SEQ ID NO: 1222609 - DNA, 15 bp, Homo sapiens
tagacaggtagtgag

SEQ ID NO: 1222610 - DNA, 15 bp, Homo sapiens
ctagacaggtagtga

SEQ ID NO: 1222611 - DNA, 15 bp, Homo sapiens
tctagacaggtagtg

SEQ ID NO: 1222612 - DNA, 15 bp, Homo sapiens
atctagacaggtagt

SEQ ID NO: 1222613 - DNA, 15 bp, Homo sapiens
tatctagacaggtag

SEQ ID NO: 1222614 - DNA, 15 bp, Homo sapiens
gtatctagacaggta

SEQ ID NO: 1222615 - DNA, 15 bp, Homo sapiens
tgtatctagacaggt

SEQ ID NO: 1222616 - DNA, 15 bp, Homo sapiens
ttgtatctagacagg

SEQ ID NO: 1222617 - DNA, 15 bp, Homo sapiens
attgtatctagacag

SEQ ID NO: 1222618 - DNA, 15 bp, Homo sapiens
aattgtatctagaca

SEQ ID NO: 1222619 - DNA, 15 bp, Homo sapiens
aaattgtatctagac

SEQ ID NO: 1222620 - DNA, 15 bp, Homo sapiens
aaaattgtatctaga

SEQ ID NO: 1222621 - DNA, 15 bp, Homo sapiens
gaaaattgtatctag

SEQ ID NO: 1222622 - DNA, 15 bp, Homo sapiens
tgaaaattgtatcta

SEQ ID NO: 1222623 - DNA, 15 bp, Homo sapiens
gtgaaaattgtatct

SEQ ID NO: 1222624 - DNA, 15 bp, Homo sapiens
ggtgaaaattgtatc

SEQ ID NO: 1222625 - DNA, 15 bp, Homo sapiens
tggtgaaaattgtat

SEQ ID NO: 1222626 - DNA, 15 bp, Homo sapiens
atggtgaaaattgta

SEQ ID NO: 1222627 - DNA, 15 bp, Homo sapiens
gatggtgaaaattgt

SEQ ID NO: 1222628 - DNA, 15 bp, Homo sapiens
ggatggtgaaaattg

SEQ ID NO: 1222629 - DNA, 15 bp, Homo sapiens
tggatggtgaaaatt

SEQ ID NO: 1222630 - DNA, 15 bp, Homo sapiens
atggatggtgaaaat

SEQ ID NO: 1222631 - DNA, 15 bp, Homo sapiens
catggatggtgaaaa

SEQ ID NO: 1222632 - DNA, 15 bp, Homo sapiens
tcatggatggtgaaa

SEQ ID NO: 1222633 - DNA, 15 bp, Homo sapiens
ttcatggatggtgaa

SEQ ID NO: 1222634 - DNA, 15 bp, Homo sapiens
gttcatggatggtga

SEQ ID NO: 1222635 - DNA, 15 bp, Homo sapiens
tgttcatggatggtg

SEQ ID NO: 1222636 - DNA, 15 bp, Homo sapiens
ttgttcatggatggt

SEQ ID NO: 1222637 - DNA, 15 bp, Homo sapiens
gttgttcatggatgg

SEQ ID NO: 1222638 - DNA, 15 bp, Homo sapiens
agttgttcatggatg

SEQ ID NO: 1222639 - DNA, 15 bp, Homo sapiens
gagttgttcatggat

SEQ ID NO: 1222640 - DNA, 15 bp, Homo sapiens
gagagttgttcatgg

SEQ ID NO: 1222641 - DNA, 15 bp, Homo sapiens
tgagagttgttcatg

SEQ ID NO: 1222642 - DNA, 15 bp, Homo sapiens
gtgagagttgttcat

SEQ ID NO: 1222643 - DNA, 15 bp, Homo sapiens
tgtgagagttgttca

SEQ ID NO: 1222644 - DNA, 15 bp, Homo sapiens
ttgtgagagttgttc

SEQ ID NO: 1222645 - DNA, 15 bp, Homo sapiens
attgtgagagttgtt

SEQ ID NO: 1222646 - DNA, 15 bp, Homo sapiens
gattgtgagagttgt

SEQ ID NO: 1222647 - DNA, 15 bp, Homo sapiens
agattgtgagagttg

SEQ ID NO: 1222648 - DNA, 15 bp, Homo sapiens
acagattgtgagagt

SEQ ID NO: 1222649 - DNA, 15 bp, Homo sapiens
tacagattgtgagag

SEQ ID NO: 1222650 - DNA, 15 bp, Homo sapiens
atacagattgtgaga

SEQ ID NO: 1222651 - DNA, 15 bp, Homo sapiens
catacagattgtgag

SEQ ID NO: 1222652 - DNA, 15 bp, Homo sapiens
ccatacagattgtga

SEQ ID NO: 1222653 - DNA, 15 bp, Homo sapiens
tccatacagattgtg

SEQ ID NO: 1222654 - DNA, 15 bp, Homo sapiens
ttccatacagattgt

SEQ ID NO: 1222655 - DNA, 15 bp, Homo sapiens
attccatacagattg

SEQ ID NO: 1222656 - DNA, 15 bp, Homo sapiens
aattccatacagatt

SEQ ID NO: 1222657 - DNA, 15 bp, Homo sapiens
gaattccatacagat

SEQ ID NO: 1222658 - DNA, 15 bp, Homo sapiens
cgaattccatacaga

SEQ ID NO: 1222659 - DNA, 15 bp, Homo sapiens
gcgaattccatacag

SEQ ID NO: 1222660 - DNA, 15 bp, Homo sapiens
agcgaattccataca

SEQ ID NO: 1222661 - DNA, 15 bp, Homo sapiens
tagcgaattccatac

SEQ ID NO: 1222662 - DNA, 15 bp, Homo sapiens
atagcgaattccata

SEQ ID NO: 1222663 - DNA, 15 bp, Homo sapiens
gatagcgaattccat

SEQ ID NO: 1222664 - DNA, 15 bp, Homo sapiens
agatagcgaattcca

SEQ ID NO: 1222665 - DNA, 15 bp, Homo sapiens
gagatagcgaattcc

SEQ ID NO: 1222666 - DNA, 15 bp, Homo sapiens
agagatagcgaattc

SEQ ID NO: 1222667 - DNA, 15 bp, Homo sapiens
cagagatagcgaatt

SEQ ID NO: 1222668 - DNA, 15 bp, Homo sapiens
ccagagatagcgaat

SEQ ID NO: 1222669 - DNA, 15 bp, Homo sapiens
tccagagatagcgaa

SEQ ID NO: 1222670 - DNA, 15 bp, Homo sapiens
atccagagatagcga

SEQ ID NO: 1222671 - DNA, 15 bp, Homo sapiens
tatccagagatagcg

SEQ ID NO: 1222672 - DNA, 15 bp, Homo sapiens
ctatccagagatagc

SEQ ID NO: 1222673 - DNA, 15 bp, Homo sapiens
tctatccagagatag

SEQ ID NO: 1222674 - DNA, 15 bp, Homo sapiens
ttctatccagagata

SEQ ID NO: 1222675 - DNA, 15 bp, Homo sapiens
cttctatccagagat

SEQ ID NO: 1222676 - DNA, 15 bp, Homo sapiens
acttctatccagaga

SEQ ID NO: 1222677 - DNA, 15 bp, Homo sapiens
gacttctatccagag

SEQ ID NO: 1222678 - DNA, 15 bp, Homo sapiens
agacttctatccaga

SEQ ID NO: 1222679 - DNA, 15 bp, Homo sapiens
aagacttctatccag

SEQ ID NO: 1222680 - DNA, 15 bp, Homo sapiens
taagacttctatcca

SEQ ID NO: 1222681 - DNA, 15 bp, Homo sapiens
gtaagacttctatcc

SEQ ID NO: 1222682 - DNA, 15 bp, Homo sapiens
agtaagacttctatc

SEQ ID NO: 1222683 - DNA, 15 bp, Homo sapiens
tagtaagacttctat

SEQ ID NO: 1222684 - DNA, 15 bp, Homo sapiens
atagtaagacttcta

SEQ ID NO: 1222685 - DNA, 15 bp, Homo sapiens
gatagtaagacttct

SEQ ID NO: 1222686 - DNA, 15 bp, Homo sapiens
tgatagtaagacttc

SEQ ID NO: 1222687 - DNA, 15 bp, Homo sapiens
ttgatagtaagactt

SEQ ID NO: 1222688 - DNA, 15 bp, Homo sapiens
attgatagtaagact

SEQ ID NO: 1222689 - DNA, 15 bp, Homo sapiens
gattgatagtaagac

SEQ ID NO: 1222690 - DNA, 15 bp, Homo sapiens
agattgatagtaaga

SEQ ID NO: 1222691 - DNA, 15 bp, Homo sapiens
cagattgatagtaag

SEQ ID NO: 1222692 - DNA, 15 bp, Homo sapiens
ccagattgatagtaa

SEQ ID NO: 1222693 - DNA, 15 bp, Homo sapiens
tccagattgatagta

SEQ ID NO: 1222694 - DNA, 15 bp, Homo sapiens
atccagattgatagt

SEQ ID NO: 1222695 - DNA, 15 bp, Homo sapiens
tatccagattgatag

SEQ ID NO: 1222696 - DNA, 15 bp, Homo sapiens
atatccagattgata

SEQ ID NO: 1222697 - DNA, 15 bp, Homo sapiens
tatatccagattgat

SEQ ID NO: 1222698 - DNA, 15 bp, Homo sapiens
ttatatccagattga

SEQ ID NO: 1222699 - DNA, 15 bp, Homo sapiens
attatatccagattg

SEQ ID NO: 1222700 - DNA, 15 bp, Homo sapiens
aattatatccagatt

SEQ ID NO: 1222701 - DNA, 15 bp, Homo sapiens
agagagtgagaatta

SEQ ID NO: 1222702 - DNA, 15 bp, Homo sapiens
cccagatagtgagag

SEQ ID NO: 1222703 - DNA, 15 bp, Homo sapiens
acccagatagtgaga

SEQ ID NO: 1222704 - DNA, 15 bp, Homo sapiens
tacccagatagtgag

SEQ ID NO: 1222705 - DNA, 15 bp, Homo sapiens
ctacccagatagtga

SEQ ID NO: 1222706 - DNA, 15 bp, Homo sapiens
tctacccagatagtg

SEQ ID NO: 1222707 - DNA, 15 bp, Homo sapiens
atctacccagatagt

SEQ ID NO: 1222708 - DNA, 15 bp, Homo sapiens
aatctacccagatag

SEQ ID NO: 1222709 - DNA, 15 bp, Homo sapiens
caatctacccagata

SEQ ID NO: 1222710 - DNA, 15 bp, Homo sapiens
gcaatctacccagat

SEQ ID NO: 1222711 - DNA, 15 bp, Homo sapiens
agcaatctacccaga

SEQ ID NO: 1222712 - DNA, 15 bp, Homo sapiens
gagcaatctacccag

SEQ ID NO: 1222713 - DNA, 15 bp, Homo sapiens
tgagcaatctaccca

SEQ ID NO: 1222714 - DNA, 15 bp, Homo sapiens
gtgagcaatctaccc

SEQ ID NO: 1222715 - DNA, 15 bp, Homo sapiens
ggtgagcaatctacc

SEQ ID NO: 1222716 - DNA, 15 bp, Homo sapiens
tggtgagcaatctac

SEQ ID NO: 1222717 - DNA, 15 bp, Homo sapiens
atggtgagcaatcta

SEQ ID NO: 1222718 - DNA, 15 bp, Homo sapiens
gatggtgagcaatct

SEQ ID NO: 1222719 - DNA, 15 bp, Homo sapiens
agatggtgagcaatc

SEQ ID NO: 1222720 - DNA, 15 bp, Homo sapiens
cagatggtgagcaat

SEQ ID NO: 1222721 - DNA, 15 bp, Homo sapiens
ccagatggtgagcaa

SEQ ID NO: 1222722 - DNA, 15 bp, Homo sapiens
tccagatggtgagca

SEQ ID NO: 1222723 - DNA, 15 bp, Homo sapiens
atccagatggtgagc

SEQ ID NO: 1222724 - DNA, 15 bp, Homo sapiens
tagatagtgagaatt

SEQ ID NO: 1222725 - DNA, 15 bp, Homo sapiens
atagatagtgagaat

SEQ ID NO: 1222726 - DNA, 15 bp, Homo sapiens
gatagatagtgagaa

SEQ ID NO: 1222727 - DNA, 15 bp, Homo sapiens
atagatagatagtga

SEQ ID NO: 1222728 - DNA, 15 bp, Homo sapiens
tatagatagatagtg

SEQ ID NO: 1222729 - DNA, 15 bp, Homo sapiens
ctatagatagatagt

SEQ ID NO: 1222730 - DNA, 15 bp, Homo sapiens
tctatagatagatag

SEQ ID NO: 1222731 - DNA, 15 bp, Homo sapiens
ttctatagatagata

SEQ ID NO: 1222732 - DNA, 15 bp, Homo sapiens
attctatagatagat

SEQ ID NO: 1222733 - DNA, 15 bp, Homo sapiens
aattctatagataga

SEQ ID NO: 1222734 - DNA, 15 bp, Homo sapiens
gaattctatagatag

SEQ ID NO: 1222735 - DNA, 15 bp, Homo sapiens
agaattctatagata

SEQ ID NO: 1222736 - DNA, 15 bp, Homo sapiens
gagaattctatagat

SEQ ID NO: 1222737 - DNA, 15 bp, Homo sapiens
tgagaattctataga

SEQ ID NO: 1222738 - DNA, 15 bp, Homo sapiens
gtgagaattctatag

SEQ ID NO: 1222739 - DNA, 15 bp, Homo sapiens
agtgagaattctata

SEQ ID NO: 1222740 - DNA, 15 bp, Homo sapiens
tagagagtgagaatt

SEQ ID NO: 1222741 - DNA, 15 bp, Homo sapiens
ctagagagtgagaat

SEQ ID NO: 1222742 - DNA, 15 bp, Homo sapiens
tctagagagtgagaa

SEQ ID NO: 1222743 - DNA, 15 bp, Homo sapiens
tatattgagagttct

SEQ ID NO: 1222744 - DNA, 15 bp, Homo sapiens
atatattgagagttc

SEQ ID NO: 1222745 - DNA, 15 bp, Homo sapiens
tatatattgagagtt

SEQ ID NO: 1222746 - DNA, 15 bp, Homo sapiens
atatatattgagagt

SEQ ID NO: 1222747 - DNA, 15 bp, Homo sapiens
gatatatattgagag

SEQ ID NO: 1222748 - DNA, 15 bp, Homo sapiens
agatatatattgaga

SEQ ID NO: 1222749 - DNA, 15 bp, Homo sapiens
cagatatatattgag

SEQ ID NO: 1222750 - DNA, 15 bp, Homo sapiens
ccagatatatattga

SEQ ID NO: 1222751 - DNA, 15 bp, Homo sapiens
tccagatatatattg

SEQ ID NO: 1222752 - DNA, 15 bp, Homo sapiens
atccagatatatatt

SEQ ID NO: 1222753 - DNA, 15 bp, Homo sapiens
tatccagatatatat

SEQ ID NO: 1222754 - DNA, 15 bp, Homo sapiens
ctatccagatatata

SEQ ID NO: 1222755 - DNA, 15 bp, Homo sapiens
tctatccagatatat

SEQ ID NO: 1222756 - DNA, 15 bp, Homo sapiens
ctccagatagtgaga

SEQ ID NO: 1222757 - DNA, 15 bp, Homo sapiens
tctccagatagtgag

SEQ ID NO: 1222758 - DNA, 15 bp, Homo sapiens
ctctccagatagtga

SEQ ID NO: 1222759 - DNA, 15 bp, Homo sapiens
tctctccagatagtg

SEQ ID NO: 1222760 - DNA, 15 bp, Homo sapiens
ttctctccagatagt

SEQ ID NO: 1222761 - DNA, 15 bp, Homo sapiens
attctctccagatag

SEQ ID NO: 1222762 - DNA, 15 bp, Homo sapiens
aattctctccagata

SEQ ID NO: 1222763 - DNA, 15 bp, Homo sapiens
gaattctctccagat

SEQ ID NO: 1222764 - DNA, 15 bp, Homo sapiens
agaattctctccaga

SEQ ID NO: 1222765 - DNA, 15 bp, Homo sapiens
gagaattctctccag

SEQ ID NO: 1222766 - DNA, 15 bp, Homo sapiens
tgagaattctctcca

SEQ ID NO: 1222767 - DNA, 15 bp, Homo sapiens
gtgagaattctctcc

SEQ ID NO: 1222768 - DNA, 15 bp, Homo sapiens
agtgagaattctctc

SEQ ID NO: 1222769 - DNA, 15 bp, Homo sapiens
gagtgagaattctct

SEQ ID NO: 1222770 - DNA, 15 bp, Homo sapiens
agagtgagaattctc

SEQ ID NO: 1222771 - DNA, 15 bp, Homo sapiens
cacagagagtgagaa

SEQ ID NO: 1222772 - DNA, 15 bp, Homo sapiens
acacagagagtgaga

SEQ ID NO: 1222773 - DNA, 15 bp, Homo sapiens
cacacagagagtgag

SEQ ID NO: 1222774 - DNA, 15 bp, Homo sapiens
ccacacagagagtga

SEQ ID NO: 1222775 - DNA, 15 bp, Homo sapiens
tccacacagagagtg

SEQ ID NO: 1222776 - DNA, 15 bp, Homo sapiens
ttccacacagagagt

SEQ ID NO: 1222777 - DNA, 15 bp, Homo sapiens
gttccacacagagag

SEQ ID NO: 1222778 - DNA, 15 bp, Homo sapiens
agttccacacagaga

SEQ ID NO: 1222779 - DNA, 15 bp, Homo sapiens
gagttccacacagag

SEQ ID NO: 1222780 - DNA, 15 bp, Homo sapiens
agagttccacacaga

SEQ ID NO: 1222781 - DNA, 15 bp, Homo sapiens
gagagttccacacag

SEQ ID NO: 1222782 - DNA, 15 bp, Homo sapiens
tgagagttccacaca

SEQ ID NO: 1222783 - DNA, 15 bp, Homo sapiens
gtgagagttccacac

SEQ ID NO: 1222784 - DNA, 15 bp, Homo sapiens
agtgagagttccaca

SEQ ID NO: 1222785 - DNA, 15 bp, Homo sapiens
tagtgagagttccac

SEQ ID NO: 1222786 - DNA, 15 bp, Homo sapiens
atagtgagagttcca

SEQ ID NO: 1222787 - DNA, 15 bp, Homo sapiens
aatagtgagagttcc

SEQ ID NO: 1222788 - DNA, 15 bp, Homo sapiens
aaatagtgagagttc

SEQ ID NO: 1222789 - DNA, 15 bp, Homo sapiens
taaatagtgagagtt

SEQ ID NO: 1222790 - DNA, 15 bp, Homo sapiens
ataaatagtgagagt

SEQ ID NO: 1222791 - DNA, 15 bp, Homo sapiens
gataaatagtgagag

SEQ ID NO: 1222792 - DNA, 15 bp, Homo sapiens
agataaatagtgaga

SEQ ID NO: 1222793 - DNA, 15 bp, Homo sapiens
cagataaatagtgag

SEQ ID NO: 1222794 - DNA, 15 bp, Homo sapiens
ccagataaatagtga

SEQ ID NO: 1222795 - DNA, 15 bp, Homo sapiens
tccagataaatagtg

SEQ ID NO: 1222796 - DNA, 15 bp, Homo sapiens
atccagataaatagt

SEQ ID NO: 1222797 - DNA, 15 bp, Homo sapiens
tatccagataaatag

SEQ ID NO: 1222798 - DNA, 15 bp, Homo sapiens
ctatccagataaata

SEQ ID NO: 1222799 - DNA, 15 bp, Homo sapiens
tctatccagataaat

SEQ ID NO: 1222800 - DNA, 15 bp, Homo sapiens
ttctatccagataaa

SEQ ID NO: 1222801 - DNA, 15 bp, Homo sapiens
attctatccagataa

SEQ ID NO: 1222802 - DNA, 15 bp, Homo sapiens
tagatgttgagaatt

SEQ ID NO: 1222803 - DNA, 15 bp, Homo sapiens
ctagatgttgagaat

SEQ ID NO: 1222804 - DNA, 15 bp, Homo sapiens
tctagatgttgagaa

SEQ ID NO: 1222805 - DNA, 15 bp, Homo sapiens
atctagatgttgaga

SEQ ID NO: 1222806 - DNA, 15 bp, Homo sapiens
tatctagatgttgag

SEQ ID NO: 1222807 - DNA, 15 bp, Homo sapiens
ctatctagatgttga

SEQ ID NO: 1222808 - DNA, 15 bp, Homo sapiens
tctatctagatgttg

SEQ ID NO: 1222809 - DNA, 15 bp, Homo sapiens
ttctatctagatgtt

SEQ ID NO: 1222810 - DNA, 15 bp, Homo sapiens
gttctatctagatgt

SEQ ID NO: 1222811 - DNA, 15 bp, Homo sapiens
aatagtgagagttct

SEQ ID NO: 1222812 - DNA, 15 bp, Homo sapiens
caaatagtgagagtt

SEQ ID NO: 1222813 - DNA, 15 bp, Homo sapiens
acaaatagtgagagt

SEQ ID NO: 1222814 - DNA, 15 bp, Homo sapiens
gacaaatagtgagag

SEQ ID NO: 1222815 - DNA, 15 bp, Homo sapiens
agacaaatagtgaga

SEQ ID NO: 1222816 - DNA, 15 bp, Homo sapiens
cagacaaatagtgag

SEQ ID NO: 1222817 - DNA, 15 bp, Homo sapiens
ccagacaaatagtga

SEQ ID NO: 1222818 - DNA, 15 bp, Homo sapiens
tccagacaaatagtg

SEQ ID NO: 1222819 - DNA, 15 bp, Homo sapiens
atccagacaaatagt

SEQ ID NO: 1222820 - DNA, 15 bp, Homo sapiens
tatccagacaaatag

SEQ ID NO: 1222821 - DNA, 15 bp, Homo sapiens
ctatccagacaaata

SEQ ID NO: 1222822 - DNA, 15 bp, Homo sapiens
tctatccagacaaat

SEQ ID NO: 1222823 - DNA, 15 bp, Homo sapiens
ctctatccagacaaa

SEQ ID NO: 1222824 - DNA, 15 bp, Homo sapiens
actctatccagacaa

SEQ ID NO: 1222825 - DNA, 15 bp, Homo sapiens
aactctatccagaca

SEQ ID NO: 1222826 - DNA, 15 bp, Homo sapiens
gaactctatccagac

SEQ ID NO: 1222827 - DNA, 15 bp, Homo sapiens
ggtgagaactctatc

SEQ ID NO: 1222828 - DNA, 15 bp, Homo sapiens
tggtgagaactctat

SEQ ID NO: 1222829 - DNA, 15 bp, Homo sapiens
atggtgagaactcta

SEQ ID NO: 1222830 - DNA, 15 bp, Homo sapiens
tatggtgagaactct

SEQ ID NO: 1222831 - DNA, 15 bp, Homo sapiens
atatggtgagaactc

SEQ ID NO: 1222832 - DNA, 15 bp, Homo sapiens
catatggtgagaact

SEQ ID NO: 1222833 - DNA, 15 bp, Homo sapiens
ccatatggtgagaac

SEQ ID NO: 1222834 - DNA, 15 bp, Homo sapiens
tccatatggtgagaa

SEQ ID NO: 1222835 - DNA, 15 bp, Homo sapiens
gtccatatggtgaga

SEQ ID NO: 1222836 - DNA, 15 bp, Homo sapiens
tgtccatatggtgag

SEQ ID NO: 1222837 - DNA, 15 bp, Homo sapiens
ctgtccatatggtga

SEQ ID NO: 1222838 - DNA, 15 bp, Homo sapiens
tctgtccatatggtg

SEQ ID NO: 1222839 - DNA, 15 bp, Homo sapiens
ttctgtccatatggt

SEQ ID NO: 1222840 - DNA, 15 bp, Homo sapiens
gttctgtccatatgg

SEQ ID NO: 1222841 - DNA, 15 bp, Homo sapiens
agttctgtccatatg

SEQ ID NO: 1222842 - DNA, 15 bp, Homo sapiens
gagttctgtccatat

SEQ ID NO: 1222843 - DNA, 15 bp, Homo sapiens
agagttctgtccata

SEQ ID NO: 1222844 - DNA, 15 bp, Homo sapiens
gagagttctgtccat

SEQ ID NO: 1222845 - DNA, 15 bp, Homo sapiens
accagatagtgagag

SEQ ID NO: 1222846 - DNA, 15 bp, Homo sapiens
aaccagatagtgaga

SEQ ID NO: 1222847 - DNA, 15 bp, Homo sapiens
taaccagatagtgag

SEQ ID NO: 1222848 - DNA, 15 bp, Homo sapiens
ctaaccagatagtga

SEQ ID NO: 1222849 - DNA, 15 bp, Homo sapiens
tctaaccagatagtg

SEQ ID NO: 1222850 - DNA, 15 bp, Homo sapiens
ttctaaccagatagt

SEQ ID NO: 1222851 - DNA, 15 bp, Homo sapiens
attctaaccagatag

SEQ ID NO: 1222852 - DNA, 15 bp, Homo sapiens
aattctaaccagata

SEQ ID NO: 1222853 - DNA, 15 bp, Homo sapiens
gaattctaaccagat

SEQ ID NO: 1222854 - DNA, 15 bp, Homo sapiens
agaattctaaccaga

SEQ ID NO: 1222855 - DNA, 15 bp, Homo sapiens
gagaattctaaccag

SEQ ID NO: 1222856 - DNA, 15 bp, Homo sapiens
tgagaattctaacca

SEQ ID NO: 1222857 - DNA, 15 bp, Homo sapiens
gtgagaattctaacc

SEQ ID NO: 1222858 - DNA, 15 bp, Homo sapiens
agtgagaattctaac

SEQ ID NO: 1222859 - DNA, 15 bp, Homo sapiens
gagtgagaattctaa

SEQ ID NO: 1222860 - DNA, 15 bp, Homo sapiens
tttctatccagacag

SEQ ID NO: 1222861 - DNA, 15 bp, Homo sapiens
atttctatccagaca

SEQ ID NO: 1222862 - DNA, 15 bp, Homo sapiens
gatttctatccagac

SEQ ID NO: 1222863 - DNA, 15 bp, Homo sapiens
ggtgagatttctatc

SEQ ID NO: 1222864 - DNA, 15 bp, Homo sapiens
tggtgagatttctat

SEQ ID NO: 1222865 - DNA, 15 bp, Homo sapiens
atggtgagatttcta

SEQ ID NO: 1222866 - DNA, 15 bp, Homo sapiens
gatggtgagatttct

SEQ ID NO: 1222867 - DNA, 15 bp, Homo sapiens
agatggtgagatttc

SEQ ID NO: 1222868 - DNA, 15 bp, Homo sapiens
cagatggtgagattt

SEQ ID NO: 1222869 - DNA, 15 bp, Homo sapiens
tcagatggtgagatt

SEQ ID NO: 1222870 - DNA, 15 bp, Homo sapiens
ttcagatggtgagat

SEQ ID NO: 1222871 - DNA, 15 bp, Homo sapiens
attcagatggtgaga

SEQ ID NO: 1222872 - DNA, 15 bp, Homo sapiens
aattcagatggtgag

SEQ ID NO: 1222873 - DNA, 15 bp, Homo sapiens
caattcagatggtga

SEQ ID NO: 1222874 - DNA, 15 bp, Homo sapiens
tcaattcagatggtg

SEQ ID NO: 1222875 - DNA, 15 bp, Homo sapiens
ttcaattcagatggt

SEQ ID NO: 1222876 - DNA, 15 bp, Homo sapiens
gttcaattcagatgg

SEQ ID NO: 1222877 - DNA, 15 bp, Homo sapiens
agttcaattcagatg

SEQ ID NO: 1222878 - DNA, 15 bp, Homo sapiens
gagttcaattcagat

SEQ ID NO: 1222879 - DNA, 15 bp, Homo sapiens
agagttcaattcaga

SEQ ID NO: 1222880 - DNA, 15 bp, Homo sapiens
gagagttcaattcag

SEQ ID NO: 1222881 - DNA, 15 bp, Homo sapiens
tgagagttcaattca

SEQ ID NO: 1222882 - DNA, 15 bp, Homo sapiens
gtgagagttcaattc

SEQ ID NO: 1222883 - DNA, 15 bp, Homo sapiens
agtgagagttcaatt

SEQ ID NO: 1222884 - DNA, 15 bp, Homo sapiens
tagtgagagttcaat

SEQ ID NO: 1222885 - DNA, 15 bp, Homo sapiens
ttagtgagagttcaa

SEQ ID NO: 1222886 - DNA, 15 bp, Homo sapiens
gttagtgagagttca

SEQ ID NO: 1222887 - DNA, 15 bp, Homo sapiens
agttagtgagagttc

SEQ ID NO: 1222888 - DNA, 15 bp, Homo sapiens
ccagttagtgagagt

SEQ ID NO: 1222889 - DNA, 15 bp, Homo sapiens
tccagttagtgagag

SEQ ID NO: 1222890 - DNA, 15 bp, Homo sapiens
atccagttagtgaga

SEQ ID NO: 1222891 - DNA, 15 bp, Homo sapiens
tatccagttagtgag

SEQ ID NO: 1222892 - DNA, 15 bp, Homo sapiens
ctatccagttagtga

SEQ ID NO: 1222893 - DNA, 15 bp, Homo sapiens
tctatccagttagtg

SEQ ID NO: 1222894 - DNA, 15 bp, Homo sapiens
ttctatccagttagt

SEQ ID NO: 1222895 - DNA, 15 bp, Homo sapiens
attctatccagttag

SEQ ID NO: 1222896 - DNA, 15 bp, Homo sapiens
gaattctatccagtt

SEQ ID NO: 1222897 - DNA, 15 bp, Homo sapiens
agaattctatccagt

SEQ ID NO: 1222898 - DNA, 15 bp, Homo sapiens
ataagaattctatcc

SEQ ID NO: 1222899 - DNA, 15 bp, Homo sapiens
aataagaattctatc

SEQ ID NO: 1222900 - DNA, 15 bp, Homo sapiens
agaataagaattcta

SEQ ID NO: 1222901 - DNA, 15 bp, Homo sapiens
gagaataagaattct

SEQ ID NO: 1222902 - DNA, 15 bp, Homo sapiens
agagaataagaattc

SEQ ID NO: 1222903 - DNA, 15 bp, Homo sapiens
cagagaataagaatt

SEQ ID NO: 1222904 - DNA, 15 bp, Homo sapiens
ccagagaataagaat

SEQ ID NO: 1222905 - DNA, 15 bp, Homo sapiens
tccagagaataagaa

SEQ ID NO: 1222906 - DNA, 15 bp, Homo sapiens
atccagagaataaga

SEQ ID NO: 1222907 - DNA, 15 bp, Homo sapiens
tatccagagaataag

SEQ ID NO: 1222908 - DNA, 15 bp, Homo sapiens
ttatccagagaataa

SEQ ID NO: 1222909 - DNA, 15 bp, Homo sapiens
tttatccagagaata

SEQ ID NO: 1222910 - DNA, 15 bp, Homo sapiens
ttttatccagagaat

SEQ ID NO: 1222911 - DNA, 15 bp, Homo sapiens
gttttatccagagaa

SEQ ID NO: 1222912 - DNA, 15 bp, Homo sapiens
agaaagatagtgaga

SEQ ID NO: 1222913 - DNA, 15 bp, Homo sapiens
aagaaagatagtgag

SEQ ID NO: 1222914 - DNA, 15 bp, Homo sapiens
caagaaagatagtga

SEQ ID NO: 1222915 - DNA, 15 bp, Homo sapiens
tcaagaaagatagtg

SEQ ID NO: 1222916 - DNA, 15 bp, Homo sapiens
atcaagaaagatagt

SEQ ID NO: 1222917 - DNA, 15 bp, Homo sapiens
tatcaagaaagatag

SEQ ID NO: 1222918 - DNA, 15 bp, Homo sapiens
ctatcaagaaagata

SEQ ID NO: 1222919 - DNA, 15 bp, Homo sapiens
tctatcaagaaagat

SEQ ID NO: 1222920 - DNA, 15 bp, Homo sapiens
ttctatcaagaaaga

SEQ ID NO: 1222921 - DNA, 15 bp, Homo sapiens
gttctatcaagaaag

SEQ ID NO: 1222922 - DNA, 15 bp, Homo sapiens
agttctatcaagaaa

SEQ ID NO: 1222923 - DNA, 15 bp, Homo sapiens
gagttctatcaagaa

SEQ ID NO: 1222924 - DNA, 15 bp, Homo sapiens
agagttctatcaaga

SEQ ID NO: 1222925 - DNA, 15 bp, Homo sapiens
aagagttctatcaag

SEQ ID NO: 1222926 - DNA, 15 bp, Homo sapiens
taagagttctatcaa

SEQ ID NO: 1222927 - DNA, 15 bp, Homo sapiens
gtaagagttctatca

SEQ ID NO: 1222928 - DNA, 15 bp, Homo sapiens
ttagtaagagttcta

SEQ ID NO: 1222929 - DNA, 15 bp, Homo sapiens
gttagtaagagttct

SEQ ID NO: 1222930 - DNA, 15 bp, Homo sapiens
agttagtaagagttc

SEQ ID NO: 1222931 - DNA, 15 bp, Homo sapiens
cagttagtaagagtt

SEQ ID NO: 1222932 - DNA, 15 bp, Homo sapiens
ccagttagtaagagt

SEQ ID NO: 1222933 - DNA, 15 bp, Homo sapiens
cccagttagtaagag

SEQ ID NO: 1222934 - DNA, 15 bp, Homo sapiens
tcccagttagtaaga

SEQ ID NO: 1222935 - DNA, 15 bp, Homo sapiens
ctcccagttagtaag

SEQ ID NO: 1222936 - DNA, 15 bp, Homo sapiens
cctcccagttagtaa

SEQ ID NO: 1222937 - DNA, 15 bp, Homo sapiens
tcctcccagttagta

SEQ ID NO: 1222938 - DNA, 15 bp, Homo sapiens
ttcctcccagttagt

SEQ ID NO: 1222939 - DNA, 15 bp, Homo sapiens
gttcctcccagttag

SEQ ID NO: 1222940 - DNA, 15 bp, Homo sapiens
agttcctcccagtta

SEQ ID NO: 1222941 - DNA, 15 bp, Homo sapiens
gagttcctcccagtt

SEQ ID NO: 1222942 - DNA, 15 bp, Homo sapiens
agagttcctcccagt

SEQ ID NO: 1222943 - DNA, 15 bp, Homo sapiens
gagagttcctcccag

SEQ ID NO: 1222944 - DNA, 15 bp, Homo sapiens
tgagagttcctccca

SEQ ID NO: 1222945 - DNA, 15 bp, Homo sapiens
gtgagagttcctccc

SEQ ID NO: 1222946 - DNA, 15 bp, Homo sapiens
agtgagagttcctcc

SEQ ID NO: 1222947 - DNA, 15 bp, Homo sapiens
tagtgagagttcctc

SEQ ID NO: 1222948 - DNA, 15 bp, Homo sapiens
atagtgagagttcct

SEQ ID NO: 1222949 - DNA, 15 bp, Homo sapiens
gatagtgagagttcc

SEQ ID NO: 1222950 - DNA, 15 bp, Homo sapiens
cagagaattctatcc

SEQ ID NO: 1222951 - DNA, 15 bp, Homo sapiens
acagagaattctatc

SEQ ID NO: 1222952 - DNA, 15 bp, Homo sapiens
gacagagaattctat

SEQ ID NO: 1222953 - DNA, 15 bp, Homo sapiens
agacagagaattcta

SEQ ID NO: 1222954 - DNA, 15 bp, Homo sapiens
gagacagagaattct

SEQ ID NO: 1222955 - DNA, 15 bp, Homo sapiens
agagacagagaattc

SEQ ID NO: 1222956 - DNA, 15 bp, Homo sapiens
cagagacagagaatt

SEQ ID NO: 1222957 - DNA, 15 bp, Homo sapiens
ccagagacagagaat

SEQ ID NO: 1222958 - DNA, 15 bp, Homo sapiens
tccagagacagagaa

SEQ ID NO: 1222959 - DNA, 15 bp, Homo sapiens
atccagagacagaga

SEQ ID NO: 1222960 - DNA, 15 bp, Homo sapiens
tatccagagacagag

SEQ ID NO: 1222961 - DNA, 15 bp, Homo sapiens
ctatccagagacaga

SEQ ID NO: 1222962 - DNA, 15 bp, Homo sapiens
tctatccagagacag

SEQ ID NO: 1222963 - DNA, 15 bp, Homo sapiens
ttctatccagagaca

SEQ ID NO: 1222964 - DNA, 15 bp, Homo sapiens
gttctatccagagac

SEQ ID NO: 1222965 - DNA, 15 bp, Homo sapiens
tatagtgagagttct

SEQ ID NO: 1222966 - DNA, 15 bp, Homo sapiens
atatagtgagagttc

SEQ ID NO: 1222967 - DNA, 15 bp, Homo sapiens
tatatagtgagagtt

SEQ ID NO: 1222968 - DNA, 15 bp, Homo sapiens
atatatagtgagagt

SEQ ID NO: 1222969 - DNA, 15 bp, Homo sapiens
gatatatagtgagag

SEQ ID NO: 1222970 - DNA, 15 bp, Homo sapiens
agatatatagtgaga

SEQ ID NO: 1222971 - DNA, 15 bp, Homo sapiens
cagatatatagtgag

SEQ ID NO: 1222972 - DNA, 15 bp, Homo sapiens
ccagatatatagtga

SEQ ID NO: 1222973 - DNA, 15 bp, Homo sapiens
tccagatatatagtg

SEQ ID NO: 1222974 - DNA, 15 bp, Homo sapiens
gtccagatatatagt

SEQ ID NO: 1222975 - DNA, 15 bp, Homo sapiens
tgtccagatatatag

SEQ ID NO: 1222976 - DNA, 15 bp, Homo sapiens
ctgtccagatatata

SEQ ID NO: 1222977 - DNA, 15 bp, Homo sapiens
tctgtccagatatat

SEQ ID NO: 1222978 - DNA, 15 bp, Homo sapiens
ttctgtccagatata

SEQ ID NO: 1222979 - DNA, 15 bp, Homo sapiens
gttctgtccagatat

SEQ ID NO: 1222980 - DNA, 15 bp, Homo sapiens
agttctgtccagata

SEQ ID NO: 1222981 - DNA, 15 bp, Homo sapiens
tgtgagagttctgtc

SEQ ID NO: 1222982 - DNA, 15 bp, Homo sapiens
ttgtgagagttctgt

SEQ ID NO: 1222983 - DNA, 15 bp, Homo sapiens
attgtgagagttctg

SEQ ID NO: 1222984 - DNA, 15 bp, Homo sapiens
caattctatccagat

SEQ ID NO: 1222985 - DNA, 15 bp, Homo sapiens
acaattctatccaga

SEQ ID NO: 1222986 - DNA, 15 bp, Homo sapiens
gacaattctatccag

SEQ ID NO: 1222987 - DNA, 15 bp, Homo sapiens
tgacaattctatcca

SEQ ID NO: 1222988 - DNA, 15 bp, Homo sapiens
atgacaattctatcc

SEQ ID NO: 1222989 - DNA, 15 bp, Homo sapiens
aatgacaattctatc

SEQ ID NO: 1222990 - DNA, 15 bp, Homo sapiens
gaatgacaattctat

SEQ ID NO: 1222991 - DNA, 15 bp, Homo sapiens
agaatgacaattcta

SEQ ID NO: 1222992 - DNA, 15 bp, Homo sapiens
gagaatgacaattct

SEQ ID NO: 1222993 - DNA, 15 bp, Homo sapiens
agagaatgacaattc

SEQ ID NO: 1222994 - DNA, 15 bp, Homo sapiens
cagagaatgacaatt

SEQ ID NO: 1222995 - DNA, 15 bp, Homo sapiens
tcagagaatgacaat

SEQ ID NO: 1222996 - DNA, 15 bp, Homo sapiens
ttcagagaatgacaa

SEQ ID NO: 1222997 - DNA, 15 bp, Homo sapiens
attcagagaatgaca

SEQ ID NO: 1222998 - DNA, 15 bp, Homo sapiens
tattcagagaatgac

SEQ ID NO: 1222999 - DNA, 15 bp, Homo sapiens
ctattcagagaatga

SEQ ID NO: 1223000 - DNA, 15 bp, Homo sapiens
actattcagagaatg

SEQ ID NO: 1223001 - DNA, 15 bp, Homo sapiens
tactattcagagaat

SEQ ID NO: 1223002 - DNA, 15 bp, Homo sapiens
gtactattcagagaa

SEQ ID NO: 1223003 - DNA, 15 bp, Homo sapiens
agtactattcagaga

SEQ ID NO: 1223004 - DNA, 15 bp, Homo sapiens
gagtactattcagag

SEQ ID NO: 1223005 - DNA, 15 bp, Homo sapiens
agagtactattcaga

SEQ ID NO: 1223006 - DNA, 15 bp, Homo sapiens
gagagtactattcag

SEQ ID NO: 1223007 - DNA, 15 bp, Homo sapiens
tgagagtactattca

SEQ ID NO: 1223008 - DNA, 15 bp, Homo sapiens
gtgagagtactattc

SEQ ID NO: 1223009 - DNA, 15 bp, Homo sapiens
agtgagagtactatt

SEQ ID NO: 1223010 - DNA, 15 bp, Homo sapiens
tagtgagagtactat

SEQ ID NO: 1223011 - DNA, 15 bp, Homo sapiens
atagtgagagtacta

SEQ ID NO: 1223012 - DNA, 15 bp, Homo sapiens
gatagtgagagtact

SEQ ID NO: 1223013 - DNA, 15 bp, Homo sapiens
agatagtgagagtac

SEQ ID NO: 1223014 - DNA, 15 bp, Homo sapiens
tagatagtgagagta

SEQ ID NO: 1223015 - DNA, 15 bp, Homo sapiens
gagatagatagtgag

SEQ ID NO: 1223016 - DNA, 15 bp, Homo sapiens
cgagatagatagtga

SEQ ID NO: 1223017 - DNA, 15 bp, Homo sapiens
tcgagatagatagtg

SEQ ID NO: 1223018 - DNA, 15 bp, Homo sapiens
atcgagatagatagt

SEQ ID NO: 1223019 - DNA, 15 bp, Homo sapiens
tatcgagatagatag

SEQ ID NO: 1223020 - DNA, 15 bp, Homo sapiens
ctatcgagatagata

SEQ ID NO: 1223021 - DNA, 15 bp, Homo sapiens
tctatcgagatagat

SEQ ID NO: 1223022 - DNA, 15 bp, Homo sapiens
ttctatcgagataga

SEQ ID NO: 1223023 - DNA, 15 bp, Homo sapiens
attctatcgagatag

SEQ ID NO: 1223024 - DNA, 15 bp, Homo sapiens
aattctatcgagata

SEQ ID NO: 1223025 - DNA, 15 bp, Homo sapiens
gaattctatcgagat

SEQ ID NO: 1223026 - DNA, 15 bp, Homo sapiens
agaattctatcgaga

SEQ ID NO: 1223027 - DNA, 15 bp, Homo sapiens
gagaattctatcgag

SEQ ID NO: 1223028 - DNA, 15 bp, Homo sapiens
tgagaattctatcga

SEQ ID NO: 1223029 - DNA, 15 bp, Homo sapiens
gtgagaattctatcg

SEQ ID NO: 1223030 - DNA, 15 bp, Homo sapiens
tagagttctatccag

SEQ ID NO: 1223031 - DNA, 15 bp, Homo sapiens
atagagttctatcca

SEQ ID NO: 1223032 - DNA, 15 bp, Homo sapiens
gatagagttctatcc

SEQ ID NO: 1223033 - DNA, 15 bp, Homo sapiens
agatagagttctatc

SEQ ID NO: 1223034 - DNA, 15 bp, Homo sapiens
cagatagagttctat

SEQ ID NO: 1223035 - DNA, 15 bp, Homo sapiens
acagatagagttcta

SEQ ID NO: 1223036 - DNA, 15 bp, Homo sapiens
gacagatagagttct

SEQ ID NO: 1223037 - DNA, 15 bp, Homo sapiens
agacagatagagttc

SEQ ID NO: 1223038 - DNA, 15 bp, Homo sapiens
cagacagatagagtt

SEQ ID NO: 1223039 - DNA, 15 bp, Homo sapiens
ccagacagatagagt

SEQ ID NO: 1223040 - DNA, 15 bp, Homo sapiens
tccagacagatagag

SEQ ID NO: 1223041 - DNA, 15 bp, Homo sapiens
atccagacagataga

SEQ ID NO: 1223042 - DNA, 15 bp, Homo sapiens
gtctatccagacaga

SEQ ID NO: 1223043 - DNA, 15 bp, Homo sapiens
agtctatccagacag

SEQ ID NO: 1223044 - DNA, 15 bp, Homo sapiens
tagtctatccagaca

SEQ ID NO: 1223045 - DNA, 15 bp, Homo sapiens
gtagtctatccagac

SEQ ID NO: 1223046 - DNA, 15 bp, Homo sapiens
agtagtctatccaga

SEQ ID NO: 1223047 - DNA, 15 bp, Homo sapiens
gagtagtctatccag

SEQ ID NO: 1223048 - DNA, 15 bp, Homo sapiens
tgagtagtctatcca

SEQ ID NO: 1223049 - DNA, 15 bp, Homo sapiens
gtgagtagtctatcc

SEQ ID NO: 1223050 - DNA, 15 bp, Homo sapiens
ggtgagtagtctatc

SEQ ID NO: 1223051 - DNA, 15 bp, Homo sapiens
tggtgagtagtctat

SEQ ID NO: 1223052 - DNA, 15 bp, Homo sapiens
atggtgagtagtcta

SEQ ID NO: 1223053 - DNA, 15 bp, Homo sapiens
aatggtgagtagtct

SEQ ID NO: 1223054 - DNA, 15 bp, Homo sapiens
aaatggtgagtagtc

SEQ ID NO: 1223055 - DNA, 15 bp, Homo sapiens
caaatggtgagtagt

SEQ ID NO: 1223056 - DNA, 15 bp, Homo sapiens
ccaaatggtgagtag

SEQ ID NO: 1223057 - DNA, 15 bp, Homo sapiens
tccaaatggtgagta

SEQ ID NO: 1223058 - DNA, 15 bp, Homo sapiens
atccaaatggtgagt

SEQ ID NO: 1223059 - DNA, 15 bp, Homo sapiens
tatccaaatggtgag

SEQ ID NO: 1223060 - DNA, 15 bp, Homo sapiens
ctatccaaatggtga

SEQ ID NO: 1223061 - DNA, 15 bp, Homo sapiens
tctatccaaatggtg

SEQ ID NO: 1223062 - DNA, 15 bp, Homo sapiens
ttctatccaaatggt

SEQ ID NO: 1223063 - DNA, 15 bp, Homo sapiens
gttctatccaaatgg

SEQ ID NO: 1223064 - DNA, 15 bp, Homo sapiens
agttctatccaaatg

SEQ ID NO: 1223065 - DNA, 15 bp, Homo sapiens
gagttctatccaaat

SEQ ID NO: 1223066 - DNA, 15 bp, Homo sapiens
agagttctatccaaa

SEQ ID NO: 1223067 - DNA, 15 bp, Homo sapiens
tagagttctatccaa

SEQ ID NO: 1223068 - DNA, 15 bp, Homo sapiens
aatagagttctatcc

SEQ ID NO: 1223069 - DNA, 15 bp, Homo sapiens
aaatagagttctatc

SEQ ID NO: 1223070 - DNA, 15 bp, Homo sapiens
aaaatagagttctat

SEQ ID NO: 1223071 - DNA, 15 bp, Homo sapiens
aaaaatagagttcta

SEQ ID NO: 1223072 - DNA, 15 bp, Homo sapiens
gaaaaatagagttct

SEQ ID NO: 1223073 - DNA, 15 bp, Homo sapiens
agaaaaatagagttc

SEQ ID NO: 1223074 - DNA, 15 bp, Homo sapiens
cagaaaaatagagtt

SEQ ID NO: 1223075 - DNA, 15 bp, Homo sapiens
acagaaaaatagagt

SEQ ID NO: 1223076 - DNA, 15 bp, Homo sapiens
tacagaaaaatagag

SEQ ID NO: 1223077 - DNA, 15 bp, Homo sapiens
atacagaaaaataga

SEQ ID NO: 1223078 - DNA, 15 bp, Homo sapiens
tatacagaaaaatag

SEQ ID NO: 1223079 - DNA, 15 bp, Homo sapiens
ctatacagaaaaata

SEQ ID NO: 1223080 - DNA, 15 bp, Homo sapiens
tctatacagaaaaat

SEQ ID NO: 1223081 - DNA, 15 bp, Homo sapiens
ttctatacagaaaaa

SEQ ID NO: 1223082 - DNA, 15 bp, Homo sapiens
gttctatacagaaaa

SEQ ID NO: 1223083 - DNA, 15 bp, Homo sapiens
agttctatacagaaa

SEQ ID NO: 1223084 - DNA, 15 bp, Homo sapiens
gagttctatacagaa

SEQ ID NO: 1223085 - DNA, 15 bp, Homo sapiens
agagttctatacaga

SEQ ID NO: 1223086 - DNA, 15 bp, Homo sapiens
ggaattccatccaga

SEQ ID NO: 1223087 - DNA, 15 bp, Homo sapiens
gggaattccatccag

SEQ ID NO: 1223088 - DNA, 15 bp, Homo sapiens
tgggaattccatcca

SEQ ID NO: 1223089 - DNA, 15 bp, Homo sapiens
gtgggaattccatcc

SEQ ID NO: 1223090 - DNA, 15 bp, Homo sapiens
agtgggaattccatc

SEQ ID NO: 1223091 - DNA, 15 bp, Homo sapiens
gagtgggaattccat

SEQ ID NO: 1223092 - DNA, 15 bp, Homo sapiens
agagtgggaattcca

SEQ ID NO: 1223093 - DNA, 15 bp, Homo sapiens
gagagtgggaattcc

SEQ ID NO: 1223094 - DNA, 15 bp, Homo sapiens
agagagtgggaattc

SEQ ID NO: 1223095 - DNA, 15 bp, Homo sapiens
cagagagtgggaatt

SEQ ID NO: 1223096 - DNA, 15 bp, Homo sapiens
ccagagagtgggaat

SEQ ID NO: 1223097 - DNA, 15 bp, Homo sapiens
tccagagagtgggaa

SEQ ID NO: 1223098 - DNA, 15 bp, Homo sapiens
atccagagagtggga

SEQ ID NO: 1223099 - DNA, 15 bp, Homo sapiens
tatccagagagtggg

SEQ ID NO: 1223100 - DNA, 15 bp, Homo sapiens
ctatccagagagtgg

SEQ ID NO: 1223101 - DNA, 15 bp, Homo sapiens
aagttctatccagag

SEQ ID NO: 1223102 - DNA, 15 bp, Homo sapiens
aaagttctatccaga

SEQ ID NO: 1223103 - DNA, 15 bp, Homo sapiens
gaaagttctatccag

SEQ ID NO: 1223104 - DNA, 15 bp, Homo sapiens
tgaaagttctatcca

SEQ ID NO: 1223105 - DNA, 15 bp, Homo sapiens
gtgaaagttctatcc

SEQ ID NO: 1223106 - DNA, 15 bp, Homo sapiens
agtgaaagttctatc

SEQ ID NO: 1223107 - DNA, 15 bp, Homo sapiens
tagtgaaagttctat

SEQ ID NO: 1223108 - DNA, 15 bp, Homo sapiens
gtagtgaaagttcta

SEQ ID NO: 1223109 - DNA, 15 bp, Homo sapiens
ggtagtgaaagttct

SEQ ID NO: 1223110 - DNA, 15 bp, Homo sapiens
aggtagtgaaagttc

SEQ ID NO: 1223111 - DNA, 15 bp, Homo sapiens
caggtagtgaaagtt

SEQ ID NO: 1223112 - DNA, 15 bp, Homo sapiens
acaggtagtgaaagt

SEQ ID NO: 1223113 - DNA, 15 bp, Homo sapiens
gacaggtagtgaaag

SEQ ID NO: 1223114 - DNA, 15 bp, Homo sapiens
agacaggtagtgaaa

SEQ ID NO: 1223115 - DNA, 15 bp, Homo sapiens
cagacaggtagtgaa

SEQ ID NO: 1223116 - DNA, 15 bp, Homo sapiens
ccagacaggtagtga

SEQ ID NO: 1223117 - DNA, 15 bp, Homo sapiens
tccagacaggtagtg

SEQ ID NO: 1223118 - DNA, 15 bp, Homo sapiens
atccagacaggtagt

SEQ ID NO: 1223119 - DNA, 15 bp, Homo sapiens
tatccagacaggtag

SEQ ID NO: 1223120 - DNA, 15 bp, Homo sapiens
ctatccagacaggta

SEQ ID NO: 1223121 - DNA, 15 bp, Homo sapiens
tctatccagacaggt

SEQ ID NO: 1223122 - DNA, 15 bp, Homo sapiens
atctatccagacagg

SEQ ID NO: 1223123 - DNA, 15 bp, Homo sapiens
aatctatccagacag

SEQ ID NO: 1223124 - DNA, 15 bp, Homo sapiens
aaatctatccagaca

SEQ ID NO: 1223125 - DNA, 15 bp, Homo sapiens
gaaatctatccagac

SEQ ID NO: 1223126 - DNA, 15 bp, Homo sapiens
agaaatctatccaga

SEQ ID NO: 1223127 - DNA, 15 bp, Homo sapiens
gagaaatctatccag

SEQ ID NO: 1223128 - DNA, 15 bp, Homo sapiens
tgagaaatctatcca

SEQ ID NO: 1223129 - DNA, 15 bp, Homo sapiens
gtgagaaatctatcc

SEQ ID NO: 1223130 - DNA, 15 bp, Homo sapiens
tgtgagaaatctatc

SEQ ID NO: 1223131 - DNA, 15 bp, Homo sapiens
gtgtgagaaatctat

SEQ ID NO: 1223132 - DNA, 15 bp, Homo sapiens
agtgtgagaaatcta

SEQ ID NO: 1223133 - DNA, 15 bp, Homo sapiens
gagtgtgagaaatct

SEQ ID NO: 1223134 - DNA, 15 bp, Homo sapiens
agagtgtgagaaatc

SEQ ID NO: 1223135 - DNA, 15 bp, Homo sapiens
cagagtgtgagaaat

SEQ ID NO: 1223136 - DNA, 15 bp, Homo sapiens
ccagagtgtgagaaa

SEQ ID NO: 1223137 - DNA, 15 bp, Homo sapiens
accagagtgtgagaa

SEQ ID NO: 1223138 - DNA, 15 bp, Homo sapiens
aaccagagtgtgaga

SEQ ID NO: 1223139 - DNA, 15 bp, Homo sapiens
taaccagagtgtgag

SEQ ID NO: 1223140 - DNA, 15 bp, Homo sapiens
ctaaccagagtgtga

SEQ ID NO: 1223141 - DNA, 15 bp, Homo sapiens
tctaaccagagtgtg

SEQ ID NO: 1223142 - DNA, 15 bp, Homo sapiens
ttctaaccagagtgt

SEQ ID NO: 1223143 - DNA, 15 bp, Homo sapiens
gttctaaccagagtg

SEQ ID NO: 1223144 - DNA, 15 bp, Homo sapiens
agttctaaccagagt

SEQ ID NO: 1223145 - DNA, 15 bp, Homo sapiens
gagttctaaccagag

SEQ ID NO: 1223146 - DNA, 15 bp, Homo sapiens
agagttctaaccaga

SEQ ID NO: 1223147 - DNA, 15 bp, Homo sapiens
gagagttctaaccag

SEQ ID NO: 1223148 - DNA, 15 bp, Homo sapiens
tgagagttctaacca

SEQ ID NO: 1223149 - DNA, 15 bp, Homo sapiens
gtgagagttctaacc

SEQ ID NO: 1223150 - DNA, 15 bp, Homo sapiens
cggtgagaattctat

SEQ ID NO: 1223151 - DNA, 15 bp, Homo sapiens
acggtgagaattcta

SEQ ID NO: 1223152 - DNA, 15 bp, Homo sapiens
gacggtgagaattct

SEQ ID NO: 1223153 - DNA, 15 bp, Homo sapiens
agacggtgagaattc

SEQ ID NO: 1223154 - DNA, 15 bp, Homo sapiens
cagacggtgagaatt

SEQ ID NO: 1223155 - DNA, 15 bp, Homo sapiens
ccagacggtgagaat

SEQ ID NO: 1223156 - DNA, 15 bp, Homo sapiens
cccagacggtgagaa

SEQ ID NO: 1223157 - DNA, 15 bp, Homo sapiens
acccagacggtgaga

SEQ ID NO: 1223158 - DNA, 15 bp, Homo sapiens
tacccagacggtgag

SEQ ID NO: 1223159 - DNA, 15 bp, Homo sapiens
ctacccagacggtga

SEQ ID NO: 1223160 - DNA, 15 bp, Homo sapiens
tctacccagacggtg

SEQ ID NO: 1223161 - DNA, 15 bp, Homo sapiens
ttctacccagacggt

SEQ ID NO: 1223162 - DNA, 15 bp, Homo sapiens
gttctacccagacgg

SEQ ID NO: 1223163 - DNA, 15 bp, Homo sapiens
agttctacccagacg

SEQ ID NO: 1223164 - DNA, 15 bp, Homo sapiens
gagttctacccagac

SEQ ID NO: 1223165 - DNA, 15 bp, Homo sapiens
tgagagttctaccca

SEQ ID NO: 1223166 - DNA, 15 bp, Homo sapiens
gtgagagttctaccc

SEQ ID NO: 1223167 - DNA, 15 bp, Homo sapiens
agtgagagttctacc

SEQ ID NO: 1223168 - DNA, 15 bp, Homo sapiens
tagtgagagttctac

SEQ ID NO: 1223169 - DNA, 15 bp, Homo sapiens
atccagagtgagaat

SEQ ID NO: 1223170 - DNA, 15 bp, Homo sapiens
tatccagagtgagaa

SEQ ID NO: 1223171 - DNA, 15 bp, Homo sapiens
ctatccagagtgaga

SEQ ID NO: 1223172 - DNA, 15 bp, Homo sapiens
tctatccagagtgag

SEQ ID NO: 1223173 - DNA, 15 bp, Homo sapiens
ttctatccagagtga

SEQ ID NO: 1223174 - DNA, 15 bp, Homo sapiens
gttctatccagagtg

SEQ ID NO: 1223175 - DNA, 15 bp, Homo sapiens
agttctatccagagt

SEQ ID NO: 1223176 - DNA, 15 bp, Homo sapiens
cagagttctatccag

SEQ ID NO: 1223177 - DNA, 15 bp, Homo sapiens
tcagagttctatcca

SEQ ID NO: 1223178 - DNA, 15 bp, Homo sapiens
gtcagagttctatcc

SEQ ID NO: 1223179 - DNA, 15 bp, Homo sapiens
agtcagagttctatc

SEQ ID NO: 1223180 - DNA, 15 bp, Homo sapiens
tagtcagagttctat

SEQ ID NO: 1223181 - DNA, 15 bp, Homo sapiens
tagatagtcagagtt

SEQ ID NO: 1223182 - DNA, 15 bp, Homo sapiens
atagatagtcagagt

SEQ ID NO: 1223183 - DNA, 15 bp, Homo sapiens
aatagatagtcagag

SEQ ID NO: 1223184 - DNA, 15 bp, Homo sapiens
aaatagatagtcaga

SEQ ID NO: 1223185 - DNA, 15 bp, Homo sapiens
gaaatagatagtcag

SEQ ID NO: 1223186 - DNA, 15 bp, Homo sapiens
tgaaatagatagtca

SEQ ID NO: 1223187 - DNA, 15 bp, Homo sapiens
ttgaaatagatagtc

SEQ ID NO: 1223188 - DNA, 15 bp, Homo sapiens
attgaaatagatagt

SEQ ID NO: 1223189 - DNA, 15 bp, Homo sapiens
tattgaaatagatag

SEQ ID NO: 1223190 - DNA, 15 bp, Homo sapiens
ctattgaaatagata

SEQ ID NO: 1223191 - DNA, 15 bp, Homo sapiens
tctattgaaatagat

SEQ ID NO: 1223192 - DNA, 15 bp, Homo sapiens
ttctattgaaataga

SEQ ID NO: 1223193 - DNA, 15 bp, Homo sapiens
attctattgaaatag

SEQ ID NO: 1223194 - DNA, 15 bp, Homo sapiens
aattctattgaaata

SEQ ID NO: 1223195 - DNA, 15 bp, Homo sapiens
gaattctattgaaat

SEQ ID NO: 1223196 - DNA, 15 bp, Homo sapiens
agaattctattgaaa

SEQ ID NO: 1223197 - DNA, 15 bp, Homo sapiens
gagaattctattgaa

SEQ ID NO: 1223198 - DNA, 15 bp, Homo sapiens
tgagaattctattga

SEQ ID NO: 1223199 - DNA, 15 bp, Homo sapiens
gtgagaattctattg

SEQ ID NO: 1223200 - DNA, 15 bp, Homo sapiens
tgtgagaattctatc

SEQ ID NO: 1223201 - DNA, 15 bp, Homo sapiens
ggagtgtgagaattc

SEQ ID NO: 1223202 - DNA, 15 bp, Homo sapiens
cggagtgtgagaatt

SEQ ID NO: 1223203 - DNA, 15 bp, Homo sapiens
ccggagtgtgagaat

SEQ ID NO: 1223204 - DNA, 15 bp, Homo sapiens
tccggagtgtgagaa

SEQ ID NO: 1223205 - DNA, 15 bp, Homo sapiens
atccggagtgtgaga

SEQ ID NO: 1223206 - DNA, 15 bp, Homo sapiens
tatccggagtgtgag

SEQ ID NO: 1223207 - DNA, 15 bp, Homo sapiens
ctatccggagtgtga

SEQ ID NO: 1223208 - DNA, 15 bp, Homo sapiens
tctatccggagtgtg

SEQ ID NO: 1223209 - DNA, 15 bp, Homo sapiens
ttctatccggagtgt

SEQ ID NO: 1223210 - DNA, 15 bp, Homo sapiens
gttctatccggagtg

SEQ ID NO: 1223211 - DNA, 15 bp, Homo sapiens
agttctatccggagt

SEQ ID NO: 1223212 - DNA, 15 bp, Homo sapiens
gagttctatccggag

SEQ ID NO: 1223213 - DNA, 15 bp, Homo sapiens
agagttctatccgga

SEQ ID NO: 1223214 - DNA, 15 bp, Homo sapiens
gagagttctatccgg

SEQ ID NO: 1223215 - DNA, 15 bp, Homo sapiens
tgagagttctatccg

SEQ ID NO: 1223216 - DNA, 15 bp, Homo sapiens
tagatagatattgag

SEQ ID NO: 1223217 - DNA, 15 bp, Homo sapiens
ctagatagatattga

SEQ ID NO: 1223218 - DNA, 15 bp, Homo sapiens
tctagatagatattg

SEQ ID NO: 1223219 - DNA, 15 bp, Homo sapiens
atctagatagatatt

SEQ ID NO: 1223220 - DNA, 15 bp, Homo sapiens
tatctagatagatat

SEQ ID NO: 1223221 - DNA, 15 bp, Homo sapiens
gttctatctagatag

SEQ ID NO: 1223222 - DNA, 15 bp, Homo sapiens
agttctatctagata

SEQ ID NO: 1223223 - DNA, 15 bp, Homo sapiens
ttgtatccagagggt

SEQ ID NO: 1223224 - DNA, 15 bp, Homo sapiens
gttgtatccagaggg

SEQ ID NO: 1223225 - DNA, 15 bp, Homo sapiens
agttgtatccagagg

SEQ ID NO: 1223226 - DNA, 15 bp, Homo sapiens
gagttgtatccagag

SEQ ID NO: 1223227 - DNA, 15 bp, Homo sapiens
agagttgtatccaga

SEQ ID NO: 1223228 - DNA, 15 bp, Homo sapiens
gagagttgtatccag

SEQ ID NO: 1223229 - DNA, 15 bp, Homo sapiens
tgagagttgtatcca

SEQ ID NO: 1223230 - DNA, 15 bp, Homo sapiens
gtgagagttgtatcc

SEQ ID NO: 1223231 - DNA, 15 bp, Homo sapiens
agtgagagttgtatc

SEQ ID NO: 1223232 - DNA, 15 bp, Homo sapiens
cagtgagagttgtat

SEQ ID NO: 1223233 - DNA, 15 bp, Homo sapiens
acagtgagagttgta

SEQ ID NO: 1223234 - DNA, 15 bp, Homo sapiens
gacagtgagagttgt

SEQ ID NO: 1223235 - DNA, 15 bp, Homo sapiens
agacagtgagagttg

SEQ ID NO: 1223236 - DNA, 15 bp, Homo sapiens
tagacagtgagagtt

SEQ ID NO: 1223237 - DNA, 15 bp, Homo sapiens
atagacagtgagagt

SEQ ID NO: 1223238 - DNA, 15 bp, Homo sapiens
gatagacagtgagag

SEQ ID NO: 1223239 - DNA, 15 bp, Homo sapiens
agatagacagtgaga

SEQ ID NO: 1223240 - DNA, 15 bp, Homo sapiens
cagatagacagtgag

SEQ ID NO: 1223241 - DNA, 15 bp, Homo sapiens
ccagatagacagtga

SEQ ID NO: 1223242 - DNA, 15 bp, Homo sapiens
tccagatagacagtg

SEQ ID NO: 1223243 - DNA, 15 bp, Homo sapiens
ctaagaattctatcc

SEQ ID NO: 1223244 - DNA, 15 bp, Homo sapiens
actaagaattctatc

SEQ ID NO: 1223245 - DNA, 15 bp, Homo sapiens
gactaagaattctat

SEQ ID NO: 1223246 - DNA, 15 bp, Homo sapiens
agactaagaattcta

SEQ ID NO: 1223247 - DNA, 15 bp, Homo sapiens
gagactaagaattct

SEQ ID NO: 1223248 - DNA, 15 bp, Homo sapiens
agagactaagaattc

SEQ ID NO: 1223249 - DNA, 15 bp, Homo sapiens
cagagactaagaatt

SEQ ID NO: 1223250 - DNA, 15 bp, Homo sapiens
ccagagactaagaat

SEQ ID NO: 1223251 - DNA, 15 bp, Homo sapiens
tccagagactaagaa

SEQ ID NO: 1223252 - DNA, 15 bp, Homo sapiens
atccagagactaaga

SEQ ID NO: 1223253 - DNA, 15 bp, Homo sapiens
tatccagagactaag

SEQ ID NO: 1223254 - DNA, 15 bp, Homo sapiens
ctatccagagactaa

SEQ ID NO: 1223255 - DNA, 15 bp, Homo sapiens
tctatccagagacta

SEQ ID NO: 1223256 - DNA, 15 bp, Homo sapiens
ttctatccagagact

SEQ ID NO: 1223257 - DNA, 15 bp, Homo sapiens
cttctatccagagac

SEQ ID NO: 1223258 - DNA, 15 bp, Homo sapiens
acagagagtgagact

SEQ ID NO: 1223259 - DNA, 15 bp, Homo sapiens
gacagagagtgagac

SEQ ID NO: 1223260 - DNA, 15 bp, Homo sapiens
agacagagagtgaga

SEQ ID NO: 1223261 - DNA, 15 bp, Homo sapiens
cagacagagagtgag

SEQ ID NO: 1223262 - DNA, 15 bp, Homo sapiens
ccagacagagagtga

SEQ ID NO: 1223263 - DNA, 15 bp, Homo sapiens
gccagacagagagtg

SEQ ID NO: 1223264 - DNA, 15 bp, Homo sapiens
agccagacagagagt

SEQ ID NO: 1223265 - DNA, 15 bp, Homo sapiens
tagccagacagagag

SEQ ID NO: 1223266 - DNA, 15 bp, Homo sapiens
atagccagacagaga

SEQ ID NO: 1223267 - DNA, 15 bp, Homo sapiens
tatagccagacagag

SEQ ID NO: 1223268 - DNA, 15 bp, Homo sapiens
ttatagccagacaga

SEQ ID NO: 1223269 - DNA, 15 bp, Homo sapiens
attatagccagacag

SEQ ID NO: 1223270 - DNA, 15 bp, Homo sapiens
aattatagccagaca

SEQ ID NO: 1223271 - DNA, 15 bp, Homo sapiens
gaattatagccagac

SEQ ID NO: 1223272 - DNA, 15 bp, Homo sapiens
agaattatagccaga

SEQ ID NO: 1223273 - DNA, 15 bp, Homo sapiens
gagaattatagccag

SEQ ID NO: 1223274 - DNA, 15 bp, Homo sapiens
tgagaattatagcca

SEQ ID NO: 1223275 - DNA, 15 bp, Homo sapiens
ttgagaattatagcc

SEQ ID NO: 1223276 - DNA, 15 bp, Homo sapiens
tttgagaattatagc

SEQ ID NO: 1223277 - DNA, 15 bp, Homo sapiens
ttttgagaattatag

SEQ ID NO: 1223278 - DNA, 15 bp, Homo sapiens
attttgagaattata

SEQ ID NO: 1223279 - DNA, 15 bp, Homo sapiens
gattttgagaattat

SEQ ID NO: 1223280 - DNA, 15 bp, Homo sapiens
agattttgagaatta

SEQ ID NO: 1223281 - DNA, 15 bp, Homo sapiens
cagattttgagaatt

SEQ ID NO: 1223282 - DNA, 15 bp, Homo sapiens
ccagattttgagaat

SEQ ID NO: 1223283 - DNA, 15 bp, Homo sapiens
cccagattttgagaa

SEQ ID NO: 1223284 - DNA, 15 bp, Homo sapiens
acccagattttgaga

SEQ ID NO: 1223285 - DNA, 15 bp, Homo sapiens
cacccagattttgag

SEQ ID NO: 1223286 - DNA, 15 bp, Homo sapiens
ccacccagattttga

SEQ ID NO: 1223287 - DNA, 15 bp, Homo sapiens
tccacccagattttg

SEQ ID NO: 1223288 - DNA, 15 bp, Homo sapiens
ttccacccagatttt

SEQ ID NO: 1223289 - DNA, 15 bp, Homo sapiens
gttccacccagattt

SEQ ID NO: 1223290 - DNA, 15 bp, Homo sapiens
agttccacccagatt

SEQ ID NO: 1223291 - DNA, 15 bp, Homo sapiens
gagttccacccagat

SEQ ID NO: 1223292 - DNA, 15 bp, Homo sapiens
agagttccacccaga

SEQ ID NO: 1223293 - DNA, 15 bp, Homo sapiens
gagagttccacccag

SEQ ID NO: 1223294 - DNA, 15 bp, Homo sapiens
tgagagttccaccca

SEQ ID NO: 1223295 - DNA, 15 bp, Homo sapiens
gtgagagttccaccc

SEQ ID NO: 1223296 - DNA, 15 bp, Homo sapiens
agtgagagttccacc

SEQ ID NO: 1223297 - DNA, 15 bp, Homo sapiens
cagttctatccagac

SEQ ID NO: 1223298 - DNA, 15 bp, Homo sapiens
acagttctatccaga

SEQ ID NO: 1223299 - DNA, 15 bp, Homo sapiens
gacagttctatccag

SEQ ID NO: 1223300 - DNA, 15 bp, Homo sapiens
tgacagttctatcca

SEQ ID NO: 1223301 - DNA, 15 bp, Homo sapiens
gtgacagttctatcc

SEQ ID NO: 1223302 - DNA, 15 bp, Homo sapiens
agtgacagttctatc

SEQ ID NO: 1223303 - DNA, 15 bp, Homo sapiens
gagtgacagttctat

SEQ ID NO: 1223304 - DNA, 15 bp, Homo sapiens
agagtgacagttcta

SEQ ID NO: 1223305 - DNA, 15 bp, Homo sapiens
gagagtgacagttct

SEQ ID NO: 1223306 - DNA, 15 bp, Homo sapiens
tgagagtgacagttc

SEQ ID NO: 1223307 - DNA, 15 bp, Homo sapiens
ctgagagtgacagtt

SEQ ID NO: 1223308 - DNA, 15 bp, Homo sapiens
tctgagagtgacagt

SEQ ID NO: 1223309 - DNA, 15 bp, Homo sapiens
ttctgagagtgacag

SEQ ID NO: 1223310 - DNA, 15 bp, Homo sapiens
gttctgagagtgaca

SEQ ID NO: 1223311 - DNA, 15 bp, Homo sapiens
agttctgagagtgac

SEQ ID NO: 1223312 - DNA, 15 bp, Homo sapiens
aagttctgagagtga

SEQ ID NO: 1223313 - DNA, 15 bp, Homo sapiens
aaagttctgagagtg

SEQ ID NO: 1223314 - DNA, 15 bp, Homo sapiens
gaaagttctgagagt

SEQ ID NO: 1223315 - DNA, 15 bp, Homo sapiens
agaaagttctgagag

SEQ ID NO: 1223316 - DNA, 15 bp, Homo sapiens
cagaaagttctgaga

SEQ ID NO: 1223317 - DNA, 15 bp, Homo sapiens
ccagaaagttctgag

SEQ ID NO: 1223318 - DNA, 15 bp, Homo sapiens
tccagaaagttctga

SEQ ID NO: 1223319 - DNA, 15 bp, Homo sapiens
atccagaaagttctg

SEQ ID NO: 1223320 - DNA, 15 bp, Homo sapiens
tatccagaaagttct

SEQ ID NO: 1223321 - DNA, 15 bp, Homo sapiens
ctatccagaaagttc

SEQ ID NO: 1223322 - DNA, 15 bp, Homo sapiens
tctatccagaaagtt

SEQ ID NO: 1223323 - DNA, 15 bp, Homo sapiens
cagtgagaattctat

SEQ ID NO: 1223324 - DNA, 15 bp, Homo sapiens
acagtgagaattcta

SEQ ID NO: 1223325 - DNA, 15 bp, Homo sapiens
gacagtgagaattct

SEQ ID NO: 1223326 - DNA, 15 bp, Homo sapiens
agacagtgagaattc

SEQ ID NO: 1223327 - DNA, 15 bp, Homo sapiens
cagacagtgagaatt

SEQ ID NO: 1223328 - DNA, 15 bp, Homo sapiens
ccagacagtgagaat

SEQ ID NO: 1223329 - DNA, 15 bp, Homo sapiens
tccagacagtgagaa

SEQ ID NO: 1223330 - DNA, 15 bp, Homo sapiens
ctatccagacagtga

SEQ ID NO: 1223331 - DNA, 15 bp, Homo sapiens
tctatccagacagtg

SEQ ID NO: 1223332 - DNA, 15 bp, Homo sapiens
ttggtgagaattcta

SEQ ID NO: 1223333 - DNA, 15 bp, Homo sapiens
tttggtgagaattct

SEQ ID NO: 1223334 - DNA, 15 bp, Homo sapiens
atttggtgagaattc

SEQ ID NO: 1223335 - DNA, 15 bp, Homo sapiens
catttggtgagaatt

SEQ ID NO: 1223336 - DNA, 15 bp, Homo sapiens
acatttggtgagaat

SEQ ID NO: 1223337 - DNA, 15 bp, Homo sapiens
gacatttggtgagaa

SEQ ID NO: 1223338 - DNA, 15 bp, Homo sapiens
agacatttggtgaga

SEQ ID NO: 1223339 - DNA, 15 bp, Homo sapiens
cagacatttggtgag

SEQ ID NO: 1223340 - DNA, 15 bp, Homo sapiens
ccagacatttggtga

SEQ ID NO: 1223341 - DNA, 15 bp, Homo sapiens
tccagacatttggtg

SEQ ID NO: 1223342 - DNA, 15 bp, Homo sapiens
atccagacatttggt

SEQ ID NO: 1223343 - DNA, 15 bp, Homo sapiens
tatccagacatttgg

SEQ ID NO: 1223344 - DNA, 15 bp, Homo sapiens
ctatccagacatttg

SEQ ID NO: 1223345 - DNA, 15 bp, Homo sapiens
tctatccagacattt

SEQ ID NO: 1223346 - DNA, 15 bp, Homo sapiens
ttctatccagacatt

SEQ ID NO: 1223347 - DNA, 15 bp, Homo sapiens
attctatccagacat

SEQ ID NO: 1223348 - DNA, 15 bp, Homo sapiens
acagagtgagaattc

SEQ ID NO: 1223349 - DNA, 15 bp, Homo sapiens
cacagagtgagaatt

SEQ ID NO: 1223350 - DNA, 15 bp, Homo sapiens
ccacagagtgagaat

SEQ ID NO: 1223351 - DNA, 15 bp, Homo sapiens
tccacagagtgagaa

SEQ ID NO: 1223352 - DNA, 15 bp, Homo sapiens
atccacagagtgaga

SEQ ID NO: 1223353 - DNA, 15 bp, Homo sapiens
tatccacagagtgag

SEQ ID NO: 1223354 - DNA, 15 bp, Homo sapiens
ctatccacagagtga

SEQ ID NO: 1223355 - DNA, 15 bp, Homo sapiens
tctatccacagagtg

SEQ ID NO: 1223356 - DNA, 15 bp, Homo sapiens
ttctatccacagagt

SEQ ID NO: 1223357 - DNA, 15 bp, Homo sapiens
gttctatccacagag

SEQ ID NO: 1223358 - DNA, 15 bp, Homo sapiens
agttctatccacaga

SEQ ID NO: 1223359 - DNA, 15 bp, Homo sapiens
gagttctatccacag

SEQ ID NO: 1223360 - DNA, 15 bp, Homo sapiens
cagagttctatccac

SEQ ID NO: 1223361 - DNA, 15 bp, Homo sapiens
cagtcagagttctat

SEQ ID NO: 1223362 - DNA, 15 bp, Homo sapiens
acagtcagagttcta

SEQ ID NO: 1223363 - DNA, 15 bp, Homo sapiens
gacagtcagagttct

SEQ ID NO: 1223364 - DNA, 15 bp, Homo sapiens
agacagtcagagttc

SEQ ID NO: 1223365 - DNA, 15 bp, Homo sapiens
tagacagtcagagtt

SEQ ID NO: 1223366 - DNA, 15 bp, Homo sapiens
atagacagtcagagt

SEQ ID NO: 1223367 - DNA, 15 bp, Homo sapiens
gatagacagtcagag

SEQ ID NO: 1223368 - DNA, 15 bp, Homo sapiens
agatagacagtcaga

SEQ ID NO: 1223369 - DNA, 15 bp, Homo sapiens
cagatagacagtcag

SEQ ID NO: 1223370 - DNA, 15 bp, Homo sapiens
ccagatagacagtca

SEQ ID NO: 1223371 - DNA, 15 bp, Homo sapiens
tccagatagacagtc

SEQ ID NO: 1223372 - DNA, 15 bp, Homo sapiens
gggagagaattctat

SEQ ID NO: 1223373 - DNA, 15 bp, Homo sapiens
agggagagaattcta

SEQ ID NO: 1223374 - DNA, 15 bp, Homo sapiens
gagggagagaattct

SEQ ID NO: 1223375 - DNA, 15 bp, Homo sapiens
ccagagggagagaat

SEQ ID NO: 1223376 - DNA, 15 bp, Homo sapiens
tccagagggagagaa

SEQ ID NO: 1223377 - DNA, 15 bp, Homo sapiens
atccagagggagaga

SEQ ID NO: 1223378 - DNA, 15 bp, Homo sapiens
tatccagagggagag

SEQ ID NO: 1223379 - DNA, 15 bp, Homo sapiens
gtatccagagggaga

SEQ ID NO: 1223380 - DNA, 15 bp, Homo sapiens
tgtatccagagggag

SEQ ID NO: 1223381 - DNA, 15 bp, Homo sapiens
ttgtatccagaggga

SEQ ID NO: 1223382 - DNA, 15 bp, Homo sapiens
tagtgagagttgtat

SEQ ID NO: 1223383 - DNA, 15 bp, Homo sapiens
atagtgagagttgta

SEQ ID NO: 1223384 - DNA, 15 bp, Homo sapiens
gatagtgagagttgt

SEQ ID NO: 1223385 - DNA, 15 bp, Homo sapiens
agatagtgagagttg

SEQ ID NO: 1223386 - DNA, 15 bp, Homo sapiens
tccagagtgtgagaa

SEQ ID NO: 1223387 - DNA, 15 bp, Homo sapiens
atccagagtgtgaga

SEQ ID NO: 1223388 - DNA, 15 bp, Homo sapiens
tatccagagtgtgag

SEQ ID NO: 1223389 - DNA, 15 bp, Homo sapiens
gtatccagagtgtga

SEQ ID NO: 1223390 - DNA, 15 bp, Homo sapiens
tgtatccagagtgtg

SEQ ID NO: 1223391 - DNA, 15 bp, Homo sapiens
ttgtatccagagtgt

SEQ ID NO: 1223392 - DNA, 15 bp, Homo sapiens
gttgtatccagagtg

SEQ ID NO: 1223393 - DNA, 15 bp, Homo sapiens
agttgtatccagagt

SEQ ID NO: 1223394 - DNA, 15 bp, Homo sapiens
gagtgagagttgtat

SEQ ID NO: 1223395 - DNA, 15 bp, Homo sapiens
agagtgagagttgta

SEQ ID NO: 1223396 - DNA, 15 bp, Homo sapiens
gagagtgagagttgt

SEQ ID NO: 1223397 - DNA, 15 bp, Homo sapiens
agagagtgagagttg

SEQ ID NO: 1223398 - DNA, 15 bp, Homo sapiens
cagagagtgagagtt

SEQ ID NO: 1223399 - DNA, 15 bp, Homo sapiens
acagagagtgagagt

SEQ ID NO: 1223400 - DNA, 15 bp, Homo sapiens
gacagagagtgagag

SEQ ID NO: 1223401 - DNA, 15 bp, Homo sapiens
tccagacagagagtg

SEQ ID NO: 1223402 - DNA, 15 bp, Homo sapiens
atccagacagagagt

SEQ ID NO: 1223403 - DNA, 15 bp, Homo sapiens
tatccagacagagag

SEQ ID NO: 1223404 - DNA, 15 bp, Homo sapiens
atatccagacagaga

SEQ ID NO: 1223405 - DNA, 15 bp, Homo sapiens
tatatccagacagag

SEQ ID NO: 1223406 - DNA, 15 bp, Homo sapiens
ttatatccagacaga

SEQ ID NO: 1223407 - DNA, 15 bp, Homo sapiens
attatatccagacag

SEQ ID NO: 1223408 - DNA, 15 bp, Homo sapiens
aattatatccagaca

SEQ ID NO: 1223409 - DNA, 15 bp, Homo sapiens
gaattatatccagac

SEQ ID NO: 1223410 - DNA, 15 bp, Homo sapiens
ggtgagaattatatc

SEQ ID NO: 1223411 - DNA, 15 bp, Homo sapiens
gggtgagaattatat

SEQ ID NO: 1223412 - DNA, 15 bp, Homo sapiens
agggtgagaattata

SEQ ID NO: 1223413 - DNA, 15 bp, Homo sapiens
gagggtgagaattat

SEQ ID NO: 1223414 - DNA, 15 bp, Homo sapiens
agagggtgagaatta

SEQ ID NO: 1223415 - DNA, 15 bp, Homo sapiens
attctatccagaggg

SEQ ID NO: 1223416 - DNA, 15 bp, Homo sapiens
aattctatccagagg

SEQ ID NO: 1223417 - DNA, 15 bp, Homo sapiens
cgagaattctatcca

SEQ ID NO: 1223418 - DNA, 15 bp, Homo sapiens
gcgagaattctatcc

SEQ ID NO: 1223419 - DNA, 15 bp, Homo sapiens
ggcgagaattctatc

SEQ ID NO: 1223420 - DNA, 15 bp, Homo sapiens
tggcgagaattctat

SEQ ID NO: 1223421 - DNA, 15 bp, Homo sapiens
atggcgagaattcta

SEQ ID NO: 1223422 - DNA, 15 bp, Homo sapiens
gatggcgagaattct

SEQ ID NO: 1223423 - DNA, 15 bp, Homo sapiens
agatggcgagaattc

SEQ ID NO: 1223424 - DNA, 15 bp, Homo sapiens
cagatggcgagaatt

SEQ ID NO: 1223425 - DNA, 15 bp, Homo sapiens
gcagatggcgagaat

SEQ ID NO: 1223426 - DNA, 15 bp, Homo sapiens
tgcagatggcgagaa

SEQ ID NO: 1223427 - DNA, 15 bp, Homo sapiens
atgcagatggcgaga

SEQ ID NO: 1223428 - DNA, 15 bp, Homo sapiens
catgcagatggcgag

SEQ ID NO: 1223429 - DNA, 15 bp, Homo sapiens
gcatgcagatggcga

SEQ ID NO: 1223430 - DNA, 15 bp, Homo sapiens
tgcatgcagatggcg

SEQ ID NO: 1223431 - DNA, 15 bp, Homo sapiens
gtgcatgcagatggc

SEQ ID NO: 1223432 - DNA, 15 bp, Homo sapiens
cgtgcatgcagatgg

SEQ ID NO: 1223433 - DNA, 15 bp, Homo sapiens
ccgtgcatgcagatg

SEQ ID NO: 1223434 - DNA, 15 bp, Homo sapiens
cccgtgcatgcagat

SEQ ID NO: 1223435 - DNA, 15 bp, Homo sapiens
tcccgtgcatgcaga

SEQ ID NO: 1223436 - DNA, 15 bp, Homo sapiens
atcccgtgcatgcag

SEQ ID NO: 1223437 - DNA, 15 bp, Homo sapiens
aatcccgtgcatgca

SEQ ID NO: 1223438 - DNA, 15 bp, Homo sapiens
gaatcccgtgcatgc

SEQ ID NO: 1223439 - DNA, 15 bp, Homo sapiens
agaatcccgtgcatg

SEQ ID NO: 1223440 - DNA, 15 bp, Homo sapiens
tagaatcccgtgcat

SEQ ID NO: 1223441 - DNA, 15 bp, Homo sapiens
ttagaatcccgtgca

SEQ ID NO: 1223442 - DNA, 15 bp, Homo sapiens
gttagaatcccgtgc

SEQ ID NO: 1223443 - DNA, 15 bp, Homo sapiens
agttagaatcccgtg

SEQ ID NO: 1223444 - DNA, 15 bp, Homo sapiens
tagttagaatcccgt

SEQ ID NO: 1223445 - DNA, 15 bp, Homo sapiens
atagttagaatcccg

SEQ ID NO: 1223446 - DNA, 15 bp, Homo sapiens
gatagttagaatccc

SEQ ID NO: 1223447 - DNA, 15 bp, Homo sapiens
agatagttagaatcc

SEQ ID NO: 1223448 - DNA, 15 bp, Homo sapiens
cagatagttagaatc

SEQ ID NO: 1223449 - DNA, 15 bp, Homo sapiens
acagatagttagaat

SEQ ID NO: 1223450 - DNA, 15 bp, Homo sapiens
gacagatagttagaa

SEQ ID NO: 1223451 - DNA, 15 bp, Homo sapiens
agacagatagttaga

SEQ ID NO: 1223452 - DNA, 15 bp, Homo sapiens
tagacagatagttag

SEQ ID NO: 1223453 - DNA, 15 bp, Homo sapiens
ctagacagatagtta

SEQ ID NO: 1223454 - DNA, 15 bp, Homo sapiens
tctagacagatagtt

SEQ ID NO: 1223455 - DNA, 15 bp, Homo sapiens
atctagacagatagt

SEQ ID NO: 1223456 - DNA, 15 bp, Homo sapiens
tatctagacagatag

SEQ ID NO: 1223457 - DNA, 15 bp, Homo sapiens
ctatctagacagata

SEQ ID NO: 1223458 - DNA, 15 bp, Homo sapiens
tctatctagacagat

SEQ ID NO: 1223459 - DNA, 15 bp, Homo sapiens
ttctatctagacaga

SEQ ID NO: 1223460 - DNA, 15 bp, Homo sapiens
attctatctagacag

SEQ ID NO: 1223461 - DNA, 15 bp, Homo sapiens
aattctatctagaca

SEQ ID NO: 1223462 - DNA, 15 bp, Homo sapiens
aaattctatctagac

SEQ ID NO: 1223463 - DNA, 15 bp, Homo sapiens
aaaattctatctaga

SEQ ID NO: 1223464 - DNA, 15 bp, Homo sapiens
gaaaattctatctag

SEQ ID NO: 1223465 - DNA, 15 bp, Homo sapiens
tgaaaattctatcta

SEQ ID NO: 1223466 - DNA, 15 bp, Homo sapiens
gtgaaaattctatct

SEQ ID NO: 1223467 - DNA, 15 bp, Homo sapiens
gctatccagatggtg

SEQ ID NO: 1223468 - DNA, 15 bp, Homo sapiens
cgctatccagatggt

SEQ ID NO: 1223469 - DNA, 15 bp, Homo sapiens
gcgctatccagatgg

SEQ ID NO: 1223470 - DNA, 15 bp, Homo sapiens
agcgctatccagatg

SEQ ID NO: 1223471 - DNA, 15 bp, Homo sapiens
gagcgctatccagat

SEQ ID NO: 1223472 - DNA, 15 bp, Homo sapiens
agagcgctatccaga

SEQ ID NO: 1223473 - DNA, 15 bp, Homo sapiens
aagagcgctatccag

SEQ ID NO: 1223474 - DNA, 15 bp, Homo sapiens
taagagcgctatcca

SEQ ID NO: 1223475 - DNA, 15 bp, Homo sapiens
gtaagagcgctatcc

SEQ ID NO: 1223476 - DNA, 15 bp, Homo sapiens
agtaagagcgctatc

SEQ ID NO: 1223477 - DNA, 15 bp, Homo sapiens
tagtaagagcgctat

SEQ ID NO: 1223478 - DNA, 15 bp, Homo sapiens
atagtaagagcgcta

SEQ ID NO: 1223479 - DNA, 15 bp, Homo sapiens
gatagtaagagcgct

SEQ ID NO: 1223480 - DNA, 15 bp, Homo sapiens
agatagtaagagcgc

SEQ ID NO: 1223481 - DNA, 15 bp, Homo sapiens
cagatagtaagagcg

SEQ ID NO: 1223482 - DNA, 15 bp, Homo sapiens
ccagatagtaagagc

SEQ ID NO: 1223483 - DNA, 15 bp, Homo sapiens
tccagatagtaagag

SEQ ID NO: 1223484 - DNA, 15 bp, Homo sapiens
atccagatagtaaga

SEQ ID NO: 1223485 - DNA, 15 bp, Homo sapiens
tatccagatagtaag

SEQ ID NO: 1223486 - DNA, 15 bp, Homo sapiens
ctatccagatagtaa

SEQ ID NO: 1223487 - DNA, 15 bp, Homo sapiens
tctatccagatagta

SEQ ID NO: 1223488 - DNA, 15 bp, Homo sapiens
gcagagtgagaattc

SEQ ID NO: 1223489 - DNA, 15 bp, Homo sapiens
tgcagagtgagaatt

SEQ ID NO: 1223490 - DNA, 15 bp, Homo sapiens
atgcagagtgagaat

SEQ ID NO: 1223491 - DNA, 15 bp, Homo sapiens
tatgcagagtgagaa

SEQ ID NO: 1223492 - DNA, 15 bp, Homo sapiens
ctatgcagagtgaga

SEQ ID NO: 1223493 - DNA, 15 bp, Homo sapiens
tctatgcagagtgag

SEQ ID NO: 1223494 - DNA, 15 bp, Homo sapiens
ttctatgcagagtga

SEQ ID NO: 1223495 - DNA, 15 bp, Homo sapiens
gttctatgcagagtg

SEQ ID NO: 1223496 - DNA, 15 bp, Homo sapiens
agttctatgcagagt

SEQ ID NO: 1223497 - DNA, 15 bp, Homo sapiens
gagttctatgcagag

SEQ ID NO: 1223498 - DNA, 15 bp, Homo sapiens
agagttctatgcaga

SEQ ID NO: 1223499 - DNA, 15 bp, Homo sapiens
gagagttctatgcag

SEQ ID NO: 1223500 - DNA, 15 bp, Homo sapiens
tgagagttctatgca

SEQ ID NO: 1223501 - DNA, 15 bp, Homo sapiens
gtgagagttctatgc

SEQ ID NO: 1223502 - DNA, 15 bp, Homo sapiens
agtgagagttctatg

SEQ ID NO: 1223503 - DNA, 15 bp, Homo sapiens
ctctatccagataga

SEQ ID NO: 1223504 - DNA, 15 bp, Homo sapiens
gctctatccagatag

SEQ ID NO: 1223505 - DNA, 15 bp, Homo sapiens
agctctatccagata

SEQ ID NO: 1223506 - DNA, 15 bp, Homo sapiens
gagctctatccagat

SEQ ID NO: 1223507 - DNA, 15 bp, Homo sapiens
agagctctatccaga

SEQ ID NO: 1223508 - DNA, 15 bp, Homo sapiens
aagagctctatccag

SEQ ID NO: 1223509 - DNA, 15 bp, Homo sapiens
taagagctctatcca

SEQ ID NO: 1223510 - DNA, 15 bp, Homo sapiens
gtaagagctctatcc

SEQ ID NO: 1223511 - DNA, 15 bp, Homo sapiens
agtaagagctctatc

SEQ ID NO: 1223512 - DNA, 15 bp, Homo sapiens
tagtaagagctctat

SEQ ID NO: 1223513 - DNA, 15 bp, Homo sapiens
atagtaagagctcta

SEQ ID NO: 1223514 - DNA, 15 bp, Homo sapiens
gatagtaagagctct

SEQ ID NO: 1223515 - DNA, 15 bp, Homo sapiens
agatagtaagagctc

SEQ ID NO: 1223516 - DNA, 15 bp, Homo sapiens
cagatagtaagagct

SEQ ID NO: 1223517 - DNA, 15 bp, Homo sapiens
gagagatctatccag

SEQ ID NO: 1223518 - DNA, 15 bp, Homo sapiens
tgagagatctatcca

SEQ ID NO: 1223519 - DNA, 15 bp, Homo sapiens
gtgagagatctatcc

SEQ ID NO: 1223520 - DNA, 15 bp, Homo sapiens
agtgagagatctatc

SEQ ID NO: 1223521 - DNA, 15 bp, Homo sapiens
tagtgagagatctat

SEQ ID NO: 1223522 - DNA, 15 bp, Homo sapiens
atagtgagagatcta

SEQ ID NO: 1223523 - DNA, 15 bp, Homo sapiens
aatagtgagagatct

SEQ ID NO: 1223524 - DNA, 15 bp, Homo sapiens
aaatagtgagagatc

SEQ ID NO: 1223525 - DNA, 15 bp, Homo sapiens
caaatagtgagagat

SEQ ID NO: 1223526 - DNA, 15 bp, Homo sapiens
acaaatagtgagaga

SEQ ID NO: 1223527 - DNA, 15 bp, Homo sapiens
ttccagacaaatagt

SEQ ID NO: 1223528 - DNA, 15 bp, Homo sapiens
tttccagacaaatag

SEQ ID NO: 1223529 - DNA, 15 bp, Homo sapiens
ctttccagacaaata

SEQ ID NO: 1223530 - DNA, 15 bp, Homo sapiens
tctttccagacaaat

SEQ ID NO: 1223531 - DNA, 15 bp, Homo sapiens
ttctttccagacaaa

SEQ ID NO: 1223532 - DNA, 15 bp, Homo sapiens
attctttccagacaa

SEQ ID NO: 1223533 - DNA, 15 bp, Homo sapiens
aattctttccagaca

SEQ ID NO: 1223534 - DNA, 15 bp, Homo sapiens
gaattctttccagac

SEQ ID NO: 1223535 - DNA, 15 bp, Homo sapiens
gtgagaattctttcc

SEQ ID NO: 1223536 - DNA, 15 bp, Homo sapiens
agtgagaattctttc

SEQ ID NO: 1223537 - DNA, 15 bp, Homo sapiens
gagtgagaattcttt

SEQ ID NO: 1223538 - DNA, 15 bp, Homo sapiens
agagtgagaattctt

SEQ ID NO: 1223539 - DNA, 15 bp, Homo sapiens
cagttctatccacag

SEQ ID NO: 1223540 - DNA, 15 bp, Homo sapiens
acagttctatccaca

SEQ ID NO: 1223541 - DNA, 15 bp, Homo sapiens
gacagttctatccac

SEQ ID NO: 1223542 - DNA, 15 bp, Homo sapiens
cgacagttctatcca

SEQ ID NO: 1223543 - DNA, 15 bp, Homo sapiens
gcgacagttctatcc

SEQ ID NO: 1223544 - DNA, 15 bp, Homo sapiens
agcgacagttctatc

SEQ ID NO: 1223545 - DNA, 15 bp, Homo sapiens
tagcgacagttctat

SEQ ID NO: 1223546 - DNA, 15 bp, Homo sapiens
atagcgacagttcta

SEQ ID NO: 1223547 - DNA, 15 bp, Homo sapiens
gatagcgacagttct

SEQ ID NO: 1223548 - DNA, 15 bp, Homo sapiens
tgatagcgacagttc

SEQ ID NO: 1223549 - DNA, 15 bp, Homo sapiens
ttgatagcgacagtt

SEQ ID NO: 1223550 - DNA, 15 bp, Homo sapiens
attgatagcgacagt

SEQ ID NO: 1223551 - DNA, 15 bp, Homo sapiens
gattgatagcgacag

SEQ ID NO: 1223552 - DNA, 15 bp, Homo sapiens
agattgatagcgaca

SEQ ID NO: 1223553 - DNA, 15 bp, Homo sapiens
cagattgatagcgac

SEQ ID NO: 1223554 - DNA, 15 bp, Homo sapiens
ccagattgatagcga

SEQ ID NO: 1223555 - DNA, 15 bp, Homo sapiens
tccagattgatagcg

SEQ ID NO: 1223556 - DNA, 15 bp, Homo sapiens
atccagattgatagc

SEQ ID NO: 1223557 - DNA, 15 bp, Homo sapiens
ctatccagattgata

SEQ ID NO: 1223558 - DNA, 15 bp, Homo sapiens
tctatccagattgat

SEQ ID NO: 1223559 - DNA, 15 bp, Homo sapiens
ttctatccagattga

SEQ ID NO: 1223560 - DNA, 15 bp, Homo sapiens
ttctagatagtgaga

SEQ ID NO: 1223561 - DNA, 15 bp, Homo sapiens
cttctagatagtgag

SEQ ID NO: 1223562 - DNA, 15 bp, Homo sapiens
ccttctagatagtga

SEQ ID NO: 1223563 - DNA, 15 bp, Homo sapiens
tccttctagatagtg

SEQ ID NO: 1223564 - DNA, 15 bp, Homo sapiens
atccttctagatagt

SEQ ID NO: 1223565 - DNA, 15 bp, Homo sapiens
aatccttctagatag

SEQ ID NO: 1223566 - DNA, 15 bp, Homo sapiens
aaatccttctagata

SEQ ID NO: 1223567 - DNA, 15 bp, Homo sapiens
gaaatccttctagat

SEQ ID NO: 1223568 - DNA, 15 bp, Homo sapiens
agaaatccttctaga

SEQ ID NO: 1223569 - DNA, 15 bp, Homo sapiens
gagaaatccttctag

SEQ ID NO: 1223570 - DNA, 15 bp, Homo sapiens
tgagaaatccttcta

SEQ ID NO: 1223571 - DNA, 15 bp, Homo sapiens
gtgagaaatccttct

SEQ ID NO: 1223572 - DNA, 15 bp, Homo sapiens
ggtgagaaatccttc

SEQ ID NO: 1223573 - DNA, 15 bp, Homo sapiens
tggtgagaaatcctt

SEQ ID NO: 1223574 - DNA, 15 bp, Homo sapiens
atggtgagaaatcct

SEQ ID NO: 1223575 - DNA, 15 bp, Homo sapiens
gatggtgagaaatcc

SEQ ID NO: 1223576 - DNA, 15 bp, Homo sapiens
ggatggtgagaaatc

SEQ ID NO: 1223577 - DNA, 15 bp, Homo sapiens
tggatggtgagaaat

SEQ ID NO: 1223578 - DNA, 15 bp, Homo sapiens
ctggatggtgagaaa

SEQ ID NO: 1223579 - DNA, 15 bp, Homo sapiens
tctggatggtgagaa

SEQ ID NO: 1223580 - DNA, 15 bp, Homo sapiens
atctggatggtgaga

SEQ ID NO: 1223581 - DNA, 15 bp, Homo sapiens
tatctggatggtgag

SEQ ID NO: 1223582 - DNA, 15 bp, Homo sapiens
ctatctggatggtga

SEQ ID NO: 1223583 - DNA, 15 bp, Homo sapiens
tctatctggatggtg

SEQ ID NO: 1223584 - DNA, 15 bp, Homo sapiens
ttctatctggatggt

SEQ ID NO: 1223585 - DNA, 15 bp, Homo sapiens
gttctatctggatgg

SEQ ID NO: 1223586 - DNA, 15 bp, Homo sapiens
agttctatctggatg

SEQ ID NO: 1223587 - DNA, 15 bp, Homo sapiens
gagttctatctggat

SEQ ID NO: 1223588 - DNA, 15 bp, Homo sapiens
agagttctatctgga

SEQ ID NO: 1223589 - DNA, 15 bp, Homo sapiens
gagagttctatctgg

SEQ ID NO: 1223590 - DNA, 15 bp, Homo sapiens
tgagagttctatctg

SEQ ID NO: 1223591 - DNA, 15 bp, Homo sapiens
aagatagatagtgag

SEQ ID NO: 1223592 - DNA, 15 bp, Homo sapiens
caagatagatagtga

SEQ ID NO: 1223593 - DNA, 15 bp, Homo sapiens
tcaagatagatagtg

SEQ ID NO: 1223594 - DNA, 15 bp, Homo sapiens
atcaagatagatagt

SEQ ID NO: 1223595 - DNA, 15 bp, Homo sapiens
tatcaagatagatag

SEQ ID NO: 1223596 - DNA, 15 bp, Homo sapiens
ctatcaagatagata

SEQ ID NO: 1223597 - DNA, 15 bp, Homo sapiens
tctatcaagatagat

SEQ ID NO: 1223598 - DNA, 15 bp, Homo sapiens
ttctatcaagataga

SEQ ID NO: 1223599 - DNA, 15 bp, Homo sapiens
attctatcaagatag

SEQ ID NO: 1223600 - DNA, 15 bp, Homo sapiens
aattctatcaagata

SEQ ID NO: 1223601 - DNA, 15 bp, Homo sapiens
gaattctatcaagat

SEQ ID NO: 1223602 - DNA, 15 bp, Homo sapiens
agaattctatcaaga

SEQ ID NO: 1223603 - DNA, 15 bp, Homo sapiens
gagaattctatcaag

SEQ ID NO: 1223604 - DNA, 15 bp, Homo sapiens
tgagaattctatcaa

SEQ ID NO: 1223605 - DNA, 15 bp, Homo sapiens
gtgagaattctatca

SEQ ID NO: 1223606 - DNA, 15 bp, Homo sapiens
gctatccagagggtg

SEQ ID NO: 1223607 - DNA, 15 bp, Homo sapiens
tgctatccagagggt

SEQ ID NO: 1223608 - DNA, 15 bp, Homo sapiens
gtgctatccagaggg

SEQ ID NO: 1223609 - DNA, 15 bp, Homo sapiens
agtgctatccagagg

SEQ ID NO: 1223610 - DNA, 15 bp, Homo sapiens
gagtgctatccagag

SEQ ID NO: 1223611 - DNA, 15 bp, Homo sapiens
agagtgctatccaga

SEQ ID NO: 1223612 - DNA, 15 bp, Homo sapiens
gagagtgctatccag

SEQ ID NO: 1223613 - DNA, 15 bp, Homo sapiens
tgagagtgctatcca

SEQ ID NO: 1223614 - DNA, 15 bp, Homo sapiens
gtgagagtgctatcc

SEQ ID NO: 1223615 - DNA, 15 bp, Homo sapiens
agtgagagtgctatc

SEQ ID NO: 1223616 - DNA, 15 bp, Homo sapiens
tagtgagagtgctat

SEQ ID NO: 1223617 - DNA, 15 bp, Homo sapiens
atagtgagagtgcta

SEQ ID NO: 1223618 - DNA, 15 bp, Homo sapiens
tatagtgagagtgct

SEQ ID NO: 1223619 - DNA, 15 bp, Homo sapiens
atatagtgagagtgc

SEQ ID NO: 1223620 - DNA, 15 bp, Homo sapiens
tatatagtgagagtg

SEQ ID NO: 1223621 - DNA, 15 bp, Homo sapiens
atccagatatatagt

SEQ ID NO: 1223622 - DNA, 15 bp, Homo sapiens
tatccagatatatag

SEQ ID NO: 1223623 - DNA, 15 bp, Homo sapiens
agcgagaattctatc

SEQ ID NO: 1223624 - DNA, 15 bp, Homo sapiens
aagcgagaattctat

SEQ ID NO: 1223625 - DNA, 15 bp, Homo sapiens
caagcgagaattcta

SEQ ID NO: 1223626 - DNA, 15 bp, Homo sapiens
gcaagcgagaattct

SEQ ID NO: 1223627 - DNA, 15 bp, Homo sapiens
agcaagcgagaattc

SEQ ID NO: 1223628 - DNA, 15 bp, Homo sapiens
cagcaagcgagaatt

SEQ ID NO: 1223629 - DNA, 15 bp, Homo sapiens
ccagcaagcgagaat

SEQ ID NO: 1223630 - DNA, 15 bp, Homo sapiens
tccagcaagcgagaa

SEQ ID NO: 1223631 - DNA, 15 bp, Homo sapiens
atccagcaagcgaga

SEQ ID NO: 1223632 - DNA, 15 bp, Homo sapiens
tatccagcaagcgag

SEQ ID NO: 1223633 - DNA, 15 bp, Homo sapiens
ttatccagcaagcga

SEQ ID NO: 1223634 - DNA, 15 bp, Homo sapiens
tttatccagcaagcg

SEQ ID NO: 1223635 - DNA, 15 bp, Homo sapiens
ttttatccagcaagc

SEQ ID NO: 1223636 - DNA, 15 bp, Homo sapiens
gttttatccagcaag

SEQ ID NO: 1223637 - DNA, 15 bp, Homo sapiens
agttttatccagcaa

SEQ ID NO: 1223638 - DNA, 15 bp, Homo sapiens
gagttttatccagca

SEQ ID NO: 1223639 - DNA, 15 bp, Homo sapiens
agagttttatccagc

SEQ ID NO: 1223640 - DNA, 15 bp, Homo sapiens
ggatagtgagagttt

SEQ ID NO: 1223641 - DNA, 15 bp, Homo sapiens
cggatagtgagagtt

SEQ ID NO: 1223642 - DNA, 15 bp, Homo sapiens
acggatagtgagagt

SEQ ID NO: 1223643 - DNA, 15 bp, Homo sapiens
gacggatagtgagag

SEQ ID NO: 1223644 - DNA, 15 bp, Homo sapiens
agacggatagtgaga

SEQ ID NO: 1223645 - DNA, 15 bp, Homo sapiens
cagacggatagtgag

SEQ ID NO: 1223646 - DNA, 15 bp, Homo sapiens
ccagacggatagtga

SEQ ID NO: 1223647 - DNA, 15 bp, Homo sapiens
tccagacggatagtg

SEQ ID NO: 1223648 - DNA, 15 bp, Homo sapiens
atccagacggatagt

SEQ ID NO: 1223649 - DNA, 15 bp, Homo sapiens
tatccagacggatag

SEQ ID NO: 1223650 - DNA, 15 bp, Homo sapiens
ctatccagacggata

SEQ ID NO: 1223651 - DNA, 15 bp, Homo sapiens
tctatccagacggat

SEQ ID NO: 1223652 - DNA, 15 bp, Homo sapiens
ttctatccagacgga

SEQ ID NO: 1223653 - DNA, 15 bp, Homo sapiens
attctatccagacgg

SEQ ID NO: 1223654 - DNA, 15 bp, Homo sapiens
aattctatccagacg

SEQ ID NO: 1223655 - DNA, 15 bp, Homo sapiens
actagatggtgagaa

SEQ ID NO: 1223656 - DNA, 15 bp, Homo sapiens
aactagatggtgaga

SEQ ID NO: 1223657 - DNA, 15 bp, Homo sapiens
taactagatggtgag

SEQ ID NO: 1223658 - DNA, 15 bp, Homo sapiens
ctaactagatggtga

SEQ ID NO: 1223659 - DNA, 15 bp, Homo sapiens
tctaactagatggtg

SEQ ID NO: 1223660 - DNA, 15 bp, Homo sapiens
ttctaactagatggt

SEQ ID NO: 1223661 - DNA, 15 bp, Homo sapiens
gttctaactagatgg

SEQ ID NO: 1223662 - DNA, 15 bp, Homo sapiens
agttctaactagatg

SEQ ID NO: 1223663 - DNA, 15 bp, Homo sapiens
aagttctaactagat

SEQ ID NO: 1223664 - DNA, 15 bp, Homo sapiens
aaagttctaactaga

SEQ ID NO: 1223665 - DNA, 15 bp, Homo sapiens
gaaagttctaactag

SEQ ID NO: 1223666 - DNA, 15 bp, Homo sapiens
tgaaagttctaacta

SEQ ID NO: 1223667 - DNA, 15 bp, Homo sapiens
gtgaaagttctaact

SEQ ID NO: 1223668 - DNA, 15 bp, Homo sapiens
agtgaaagttctaac

SEQ ID NO: 1223669 - DNA, 15 bp, Homo sapiens
tagtgaaagttctaa

SEQ ID NO: 1223670 - DNA, 15 bp, Homo sapiens
atagtgaaagttcta

SEQ ID NO: 1223671 - DNA, 15 bp, Homo sapiens
gatagtgaaagttct

SEQ ID NO: 1223672 - DNA, 15 bp, Homo sapiens
agatagtgaaagttc

SEQ ID NO: 1223673 - DNA, 15 bp, Homo sapiens
cagatagtgaaagtt

SEQ ID NO: 1223674 - DNA, 15 bp, Homo sapiens
ccagatagtgaaagt

SEQ ID NO: 1223675 - DNA, 15 bp, Homo sapiens
tccagatagtgaaag

SEQ ID NO: 1223676 - DNA, 15 bp, Homo sapiens
atctatccagagaat

SEQ ID NO: 1223677 - DNA, 15 bp, Homo sapiens
gatctatccagagaa

SEQ ID NO: 1223678 - DNA, 15 bp, Homo sapiens
atgagagatctatcc

SEQ ID NO: 1223679 - DNA, 15 bp, Homo sapiens
aatgagagatctatc

SEQ ID NO: 1223680 - DNA, 15 bp, Homo sapiens
taatgagagatctat

SEQ ID NO: 1223681 - DNA, 15 bp, Homo sapiens
ataatgagagatcta

SEQ ID NO: 1223682 - DNA, 15 bp, Homo sapiens
gataatgagagatct

SEQ ID NO: 1223683 - DNA, 15 bp, Homo sapiens
agataatgagagatc

SEQ ID NO: 1223684 - DNA, 15 bp, Homo sapiens
cagataatgagagat

SEQ ID NO: 1223685 - DNA, 15 bp, Homo sapiens
acagataatgagaga

SEQ ID NO: 1223686 - DNA, 15 bp, Homo sapiens
gacagataatgagag

SEQ ID NO: 1223687 - DNA, 15 bp, Homo sapiens
agacagataatgaga

SEQ ID NO: 1223688 - DNA, 15 bp, Homo sapiens
cagacagataatgag

SEQ ID NO: 1223689 - DNA, 15 bp, Homo sapiens
ccagacagataatga

SEQ ID NO: 1223690 - DNA, 15 bp, Homo sapiens
tccagacagataatg

SEQ ID NO: 1223691 - DNA, 15 bp, Homo sapiens
ctccagacagataat

SEQ ID NO: 1223692 - DNA, 15 bp, Homo sapiens
tctccagacagataa

SEQ ID NO: 1223693 - DNA, 15 bp, Homo sapiens
ctctccagacagata

SEQ ID NO: 1223694 - DNA, 15 bp, Homo sapiens
tctctccagacagat

SEQ ID NO: 1223695 - DNA, 15 bp, Homo sapiens
ttctctccagacaga

SEQ ID NO: 1223696 - DNA, 15 bp, Homo sapiens
attctctccagacag

SEQ ID NO: 1223697 - DNA, 15 bp, Homo sapiens
tattctctccagaca

SEQ ID NO: 1223698 - DNA, 15 bp, Homo sapiens
gtattctctccagac

SEQ ID NO: 1223699 - DNA, 15 bp, Homo sapiens
agtattctctccaga

SEQ ID NO: 1223700 - DNA, 15 bp, Homo sapiens
gagtattctctccag

SEQ ID NO: 1223701 - DNA, 15 bp, Homo sapiens
tgagtattctctcca

SEQ ID NO: 1223702 - DNA, 15 bp, Homo sapiens
atgagtattctctcc

SEQ ID NO: 1223703 - DNA, 15 bp, Homo sapiens
aatgagtattctctc

SEQ ID NO: 1223704 - DNA, 15 bp, Homo sapiens
gaatgagtattctct

SEQ ID NO: 1223705 - DNA, 15 bp, Homo sapiens
agaatgagtattctc

SEQ ID NO: 1223706 - DNA, 15 bp, Homo sapiens
gagaatgagtattct

SEQ ID NO: 1223707 - DNA, 15 bp, Homo sapiens
agagaatgagtattc

SEQ ID NO: 1223708 - DNA, 15 bp, Homo sapiens
cagagaatgagtatt

SEQ ID NO: 1223709 - DNA, 15 bp, Homo sapiens
ccagagaatgagtat

SEQ ID NO: 1223710 - DNA, 15 bp, Homo sapiens
tccagagaatgagta

SEQ ID NO: 1223711 - DNA, 15 bp, Homo sapiens
atccagagaatgagt

SEQ ID NO: 1223712 - DNA, 15 bp, Homo sapiens
tgatagtgagagttc

SEQ ID NO: 1223713 - DNA, 15 bp, Homo sapiens
ttgatagtgagagtt

SEQ ID NO: 1223714 - DNA, 15 bp, Homo sapiens
attgatagtgagagt

SEQ ID NO: 1223715 - DNA, 15 bp, Homo sapiens
cattgatagtgagag

SEQ ID NO: 1223716 - DNA, 15 bp, Homo sapiens
acattgatagtgaga

SEQ ID NO: 1223717 - DNA, 15 bp, Homo sapiens
cacattgatagtgag

SEQ ID NO: 1223718 - DNA, 15 bp, Homo sapiens
ccacattgatagtga

SEQ ID NO: 1223719 - DNA, 15 bp, Homo sapiens
tccacattgatagtg

SEQ ID NO: 1223720 - DNA, 15 bp, Homo sapiens
atccacattgatagt

SEQ ID NO: 1223721 - DNA, 15 bp, Homo sapiens
tatccacattgatag

SEQ ID NO: 1223722 - DNA, 15 bp, Homo sapiens
ctatccacattgata

SEQ ID NO: 1223723 - DNA, 15 bp, Homo sapiens
tctatccacattgat

SEQ ID NO: 1223724 - DNA, 15 bp, Homo sapiens
ttctatccacattga

SEQ ID NO: 1223725 - DNA, 15 bp, Homo sapiens
attctatccacattg

SEQ ID NO: 1223726 - DNA, 15 bp, Homo sapiens
aattctatccacatt

SEQ ID NO: 1223727 - DNA, 15 bp, Homo sapiens
gaattctatccacat

SEQ ID NO: 1223728 - DNA, 15 bp, Homo sapiens
agaattctatccaca

SEQ ID NO: 1223729 - DNA, 15 bp, Homo sapiens
gagaattctatccac

SEQ ID NO: 1223730 - DNA, 15 bp, Homo sapiens
gtccagagggtgaga

SEQ ID NO: 1223731 - DNA, 15 bp, Homo sapiens
tgtccagagggtgag

SEQ ID NO: 1223732 - DNA, 15 bp, Homo sapiens
ctgtccagagggtga

SEQ ID NO: 1223733 - DNA, 15 bp, Homo sapiens
tctgtccagagggtg

SEQ ID NO: 1223734 - DNA, 15 bp, Homo sapiens
ttctgtccagagggt

SEQ ID NO: 1223735 - DNA, 15 bp, Homo sapiens
gttctgtccagaggg

SEQ ID NO: 1223736 - DNA, 15 bp, Homo sapiens
agttctgtccagagg

SEQ ID NO: 1223737 - DNA, 15 bp, Homo sapiens
gagttctgtccagag

SEQ ID NO: 1223738 - DNA, 15 bp, Homo sapiens
cagagttctgtccag

SEQ ID NO: 1223739 - DNA, 15 bp, Homo sapiens
tcagagttctgtcca

SEQ ID NO: 1223740 - DNA, 15 bp, Homo sapiens
ctcagagttctgtcc

SEQ ID NO: 1223741 - DNA, 15 bp, Homo sapiens
actcagagttctgtc

SEQ ID NO: 1223742 - DNA, 15 bp, Homo sapiens
tactcagagttctgt

SEQ ID NO: 1223743 - DNA, 15 bp, Homo sapiens
atactcagagttctg

SEQ ID NO: 1223744 - DNA, 15 bp, Homo sapiens
gatactcagagttct

SEQ ID NO: 1223745 - DNA, 15 bp, Homo sapiens
agatactcagagttc

SEQ ID NO: 1223746 - DNA, 15 bp, Homo sapiens
cagatactcagagtt

SEQ ID NO: 1223747 - DNA, 15 bp, Homo sapiens
ccagatactcagagt

SEQ ID NO: 1223748 - DNA, 15 bp, Homo sapiens
tccagatactcagag

SEQ ID NO: 1223749 - DNA, 15 bp, Homo sapiens
atccagatactcaga

SEQ ID NO: 1223750 - DNA, 15 bp, Homo sapiens
tatccagatactcag

SEQ ID NO: 1223751 - DNA, 15 bp, Homo sapiens
ctatccagatactca

SEQ ID NO: 1223752 - DNA, 15 bp, Homo sapiens
tctatccagatactc

SEQ ID NO: 1223753 - DNA, 15 bp, Homo sapiens
ttctatccagatact

SEQ ID NO: 1223754 - DNA, 15 bp, Homo sapiens
attctatccagatac

SEQ ID NO: 1223755 - DNA, 15 bp, Homo sapiens
taattctatccagat

SEQ ID NO: 1223756 - DNA, 15 bp, Homo sapiens
ataattctatccaga

SEQ ID NO: 1223757 - DNA, 15 bp, Homo sapiens
gataattctatccag

SEQ ID NO: 1223758 - DNA, 15 bp, Homo sapiens
tgataattctatcca

SEQ ID NO: 1223759 - DNA, 15 bp, Homo sapiens
atgataattctatcc

SEQ ID NO: 1223760 - DNA, 15 bp, Homo sapiens
gatgataattctatc

SEQ ID NO: 1223761 - DNA, 15 bp, Homo sapiens
ggatgataattctat

SEQ ID NO: 1223762 - DNA, 15 bp, Homo sapiens
aggatgataattcta

SEQ ID NO: 1223763 - DNA, 15 bp, Homo sapiens
gaggatgataattct

SEQ ID NO: 1223764 - DNA, 15 bp, Homo sapiens
agaggatgataattc

SEQ ID NO: 1223765 - DNA, 15 bp, Homo sapiens
cagaggatgataatt

SEQ ID NO: 1223766 - DNA, 15 bp, Homo sapiens
ccagaggatgataat

SEQ ID NO: 1223767 - DNA, 15 bp, Homo sapiens
tccagaggatgataa

SEQ ID NO: 1223768 - DNA, 15 bp, Homo sapiens
atccagaggatgata

SEQ ID NO: 1223769 - DNA, 15 bp, Homo sapiens
tatccagaggatgat

SEQ ID NO: 1223770 - DNA, 15 bp, Homo sapiens
ctatccagaggatga

SEQ ID NO: 1223771 - DNA, 15 bp, Homo sapiens
tctatccagaggatg

SEQ ID NO: 1223772 - DNA, 15 bp, Homo sapiens
ttctatccagaggat

SEQ ID NO: 1223773 - DNA, 15 bp, Homo sapiens
gttctatccagagga

SEQ ID NO: 1223774 - DNA, 15 bp, Homo sapiens
ttatccagacagata

SEQ ID NO: 1223775 - DNA, 15 bp, Homo sapiens
tttatccagacagat

SEQ ID NO: 1223776 - DNA, 15 bp, Homo sapiens
ttttatccagacaga

SEQ ID NO: 1223777 - DNA, 15 bp, Homo sapiens
agtgagaattttatc

SEQ ID NO: 1223778 - DNA, 15 bp, Homo sapiens
gagtgagaattttat

SEQ ID NO: 1223779 - DNA, 15 bp, Homo sapiens
agagtgagaatttta

SEQ ID NO: 1223780 - DNA, 15 bp, Homo sapiens
gagagtgagaatttt

SEQ ID NO: 1223781 - DNA, 15 bp, Homo sapiens
agagagtgagaattt

SEQ ID NO: 1223782 - DNA, 15 bp, Homo sapiens
ttatccagatggtga

SEQ ID NO: 1223783 - DNA, 15 bp, Homo sapiens
tttatccagatggtg

SEQ ID NO: 1223784 - DNA, 15 bp, Homo sapiens
ttttatccagatggt

SEQ ID NO: 1223785 - DNA, 15 bp, Homo sapiens
gttttatccagatgg

SEQ ID NO: 1223786 - DNA, 15 bp, Homo sapiens
agttttatccagatg

SEQ ID NO: 1223787 - DNA, 15 bp, Homo sapiens
gagttttatccagat

SEQ ID NO: 1223788 - DNA, 15 bp, Homo sapiens
gagtgagagttttat

SEQ ID NO: 1223789 - DNA, 15 bp, Homo sapiens
agagtgagagtttta

SEQ ID NO: 1223790 - DNA, 15 bp, Homo sapiens
gagagtgagagtttt

SEQ ID NO: 1223791 - DNA, 15 bp, Homo sapiens
agagagtgagagttt

SEQ ID NO: 1223792 - DNA, 15 bp, Homo sapiens
ccagagagtgagagt

SEQ ID NO: 1223793 - DNA, 15 bp, Homo sapiens
accagagagtgagag

SEQ ID NO: 1223794 - DNA, 15 bp, Homo sapiens
taccagagagtgaga

SEQ ID NO: 1223795 - DNA, 15 bp, Homo sapiens
ctaccagagagtgag

SEQ ID NO: 1223796 - DNA, 15 bp, Homo sapiens
tctaccagagagtga

SEQ ID NO: 1223797 - DNA, 15 bp, Homo sapiens
ttctaccagagagtg

SEQ ID NO: 1223798 - DNA, 15 bp, Homo sapiens
attctaccagagagt

SEQ ID NO: 1223799 - DNA, 15 bp, Homo sapiens
aattctaccagagag

SEQ ID NO: 1223800 - DNA, 15 bp, Homo sapiens
gaattctaccagaga

SEQ ID NO: 1223801 - DNA, 15 bp, Homo sapiens
agaattctaccagag

SEQ ID NO: 1223802 - DNA, 15 bp, Homo sapiens
atgagaattctacca

SEQ ID NO: 1223803 - DNA, 15 bp, Homo sapiens
catgagaattctacc

SEQ ID NO: 1223804 - DNA, 15 bp, Homo sapiens
tcatgagaattctac

SEQ ID NO: 1223805 - DNA, 15 bp, Homo sapiens
atcatgagaattcta

SEQ ID NO: 1223806 - DNA, 15 bp, Homo sapiens
gatcatgagaattct

SEQ ID NO: 1223807 - DNA, 15 bp, Homo sapiens
agatcatgagaattc

SEQ ID NO: 1223808 - DNA, 15 bp, Homo sapiens
cagatcatgagaatt

SEQ ID NO: 1223809 - DNA, 15 bp, Homo sapiens
ccagatcatgagaat

SEQ ID NO: 1223810 - DNA, 15 bp, Homo sapiens
tccagatcatgagaa

SEQ ID NO: 1223811 - DNA, 15 bp, Homo sapiens
atccagatcatgaga

SEQ ID NO: 1223812 - DNA, 15 bp, Homo sapiens
tatccagatcatgag

SEQ ID NO: 1223813 - DNA, 15 bp, Homo sapiens
ctatccagatcatga

SEQ ID NO: 1223814 - DNA, 15 bp, Homo sapiens
tctatccagatcatg

SEQ ID NO: 1223815 - DNA, 15 bp, Homo sapiens
ttctatccagatcat

SEQ ID NO: 1223816 - DNA, 15 bp, Homo sapiens
gttctatccagatca

SEQ ID NO: 1223817 - DNA, 15 bp, Homo sapiens
agttctatccagatc

SEQ ID NO: 1223818 - DNA, 15 bp, Homo sapiens
tgtaagaattctatc

SEQ ID NO: 1223819 - DNA, 15 bp, Homo sapiens
gtgtaagaattctat

SEQ ID NO: 1223820 - DNA, 15 bp, Homo sapiens
agtgtaagaattcta

SEQ ID NO: 1223821 - DNA, 15 bp, Homo sapiens
gagtgtaagaattct

SEQ ID NO: 1223822 - DNA, 15 bp, Homo sapiens
agagtgtaagaattc

SEQ ID NO: 1223823 - DNA, 15 bp, Homo sapiens
cagagtgtaagaatt

SEQ ID NO: 1223824 - DNA, 15 bp, Homo sapiens
ccagagtgtaagaat

SEQ ID NO: 1223825 - DNA, 15 bp, Homo sapiens
tccagagtgtaagaa

SEQ ID NO: 1223826 - DNA, 15 bp, Homo sapiens
atccagagtgtaaga

SEQ ID NO: 1223827 - DNA, 15 bp, Homo sapiens
tatccagagtgtaag

SEQ ID NO: 1223828 - DNA, 15 bp, Homo sapiens
ctatccagagtgtaa

SEQ ID NO: 1223829 - DNA, 15 bp, Homo sapiens
tctatccagagtgta

SEQ ID NO: 1223830 - DNA, 15 bp, Homo sapiens
ttctatccagagtgt

SEQ ID NO: 1223831 - DNA, 15 bp, Homo sapiens
gaagatagtgagagt

SEQ ID NO: 1223832 - DNA, 15 bp, Homo sapiens
ggaagatagtgagag

SEQ ID NO: 1223833 - DNA, 15 bp, Homo sapiens
aggaagatagtgaga

SEQ ID NO: 1223834 - DNA, 15 bp, Homo sapiens
caggaagatagtgag

SEQ ID NO: 1223835 - DNA, 15 bp, Homo sapiens
ccaggaagatagtga

SEQ ID NO: 1223836 - DNA, 15 bp, Homo sapiens
tccaggaagatagtg

SEQ ID NO: 1223837 - DNA, 15 bp, Homo sapiens
gtccaggaagatagt

SEQ ID NO: 1223838 - DNA, 15 bp, Homo sapiens
cgtccaggaagatag

SEQ ID NO: 1223839 - DNA, 15 bp, Homo sapiens
ccgtccaggaagata

SEQ ID NO: 1223840 - DNA, 15 bp, Homo sapiens
tccgtccaggaagat

SEQ ID NO: 1223841 - DNA, 15 bp, Homo sapiens
ttccgtccaggaaga

SEQ ID NO: 1223842 - DNA, 15 bp, Homo sapiens
gttccgtccaggaag

SEQ ID NO: 1223843 - DNA, 15 bp, Homo sapiens
agttccgtccaggaa

SEQ ID NO: 1223844 - DNA, 15 bp, Homo sapiens
gagttccgtccagga

SEQ ID NO: 1223845 - DNA, 15 bp, Homo sapiens
agagttccgtccagg

SEQ ID NO: 1223846 - DNA, 15 bp, Homo sapiens
gagagttccgtccag

SEQ ID NO: 1223847 - DNA, 15 bp, Homo sapiens
tgagagttccgtcca

SEQ ID NO: 1223848 - DNA, 15 bp, Homo sapiens
gtgagagttccgtcc

SEQ ID NO: 1223849 - DNA, 15 bp, Homo sapiens
ggtgagagttccgtc

SEQ ID NO: 1223850 - DNA, 15 bp, Homo sapiens
gggtgagagttccgt

SEQ ID NO: 1223851 - DNA, 15 bp, Homo sapiens
agggtgagagttccg

SEQ ID NO: 1223852 - DNA, 15 bp, Homo sapiens
gagggtgagagttcc

SEQ ID NO: 1223853 - DNA, 15 bp, Homo sapiens
agagggtgagagttc

SEQ ID NO: 1223854 - DNA, 15 bp, Homo sapiens
cagagggtgagagtt

SEQ ID NO: 1223855 - DNA, 15 bp, Homo sapiens
ccagagggtgagagt

SEQ ID NO: 1223856 - DNA, 15 bp, Homo sapiens
tccagagggtgagag

SEQ ID NO: 1223857 - DNA, 15 bp, Homo sapiens
ccaaatagtgagagt

SEQ ID NO: 1223858 - DNA, 15 bp, Homo sapiens
tccaaatagtgagag

SEQ ID NO: 1223859 - DNA, 15 bp, Homo sapiens
atccaaatagtgaga

SEQ ID NO: 1223860 - DNA, 15 bp, Homo sapiens
tatccaaatagtgag

SEQ ID NO: 1223861 - DNA, 15 bp, Homo sapiens
ctatccaaatagtga

SEQ ID NO: 1223862 - DNA, 15 bp, Homo sapiens
tctatccaaatagtg

SEQ ID NO: 1223863 - DNA, 15 bp, Homo sapiens
ttctatccaaatagt

SEQ ID NO: 1223864 - DNA, 15 bp, Homo sapiens
attctatccaaatag

SEQ ID NO: 1223865 - DNA, 15 bp, Homo sapiens
aattctatccaaata

SEQ ID NO: 1223866 - DNA, 15 bp, Homo sapiens
gaattctatccaaat

SEQ ID NO: 1223867 - DNA, 15 bp, Homo sapiens
agaattctatccaaa

SEQ ID NO: 1223868 - DNA, 15 bp, Homo sapiens
gagaattctatccaa

SEQ ID NO: 1223869 - DNA, 15 bp, Homo sapiens
ttatccagatagtga

SEQ ID NO: 1223870 - DNA, 15 bp, Homo sapiens
tttatccagatagtg

SEQ ID NO: 1223871 - DNA, 15 bp, Homo sapiens
ttttatccagatagt

SEQ ID NO: 1223872 - DNA, 15 bp, Homo sapiens
cttttatccagatag

SEQ ID NO: 1223873 - DNA, 15 bp, Homo sapiens
acttttatccagata

SEQ ID NO: 1223874 - DNA, 15 bp, Homo sapiens
gacttttatccagat

SEQ ID NO: 1223875 - DNA, 15 bp, Homo sapiens
agacttttatccaga

SEQ ID NO: 1223876 - DNA, 15 bp, Homo sapiens
gagacttttatccag

SEQ ID NO: 1223877 - DNA, 15 bp, Homo sapiens
tgagacttttatcca

SEQ ID NO: 1223878 - DNA, 15 bp, Homo sapiens
gtgagacttttatcc

SEQ ID NO: 1223879 - DNA, 15 bp, Homo sapiens
agtgagacttttatc

SEQ ID NO: 1223880 - DNA, 15 bp, Homo sapiens
gagtgagacttttat

SEQ ID NO: 1223881 - DNA, 15 bp, Homo sapiens
agagtgagactttta

SEQ ID NO: 1223882 - DNA, 15 bp, Homo sapiens
gagagtgagactttt

SEQ ID NO: 1223883 - DNA, 15 bp, Homo sapiens
agagagtgagacttt

SEQ ID NO: 1223884 - DNA, 15 bp, Homo sapiens
aacagagagtgagac

SEQ ID NO: 1223885 - DNA, 15 bp, Homo sapiens
aaacagagagtgaga

SEQ ID NO: 1223886 - DNA, 15 bp, Homo sapiens
caaacagagagtgag

SEQ ID NO: 1223887 - DNA, 15 bp, Homo sapiens
ccaaacagagagtga

SEQ ID NO: 1223888 - DNA, 15 bp, Homo sapiens
accaaacagagagtg

SEQ ID NO: 1223889 - DNA, 15 bp, Homo sapiens
taccaaacagagagt

SEQ ID NO: 1223890 - DNA, 15 bp, Homo sapiens
gtaccaaacagagag

SEQ ID NO: 1223891 - DNA, 15 bp, Homo sapiens
tgtaccaaacagaga

SEQ ID NO: 1223892 - DNA, 15 bp, Homo sapiens
ctgtaccaaacagag

SEQ ID NO: 1223893 - DNA, 15 bp, Homo sapiens
actgtaccaaacaga

SEQ ID NO: 1223894 - DNA, 15 bp, Homo sapiens
aactgtaccaaacag

SEQ ID NO: 1223895 - DNA, 15 bp, Homo sapiens
gaactgtaccaaaca

SEQ ID NO: 1223896 - DNA, 15 bp, Homo sapiens
agaactgtaccaaac

SEQ ID NO: 1223897 - DNA, 15 bp, Homo sapiens
gagaactgtaccaaa

SEQ ID NO: 1223898 - DNA, 15 bp, Homo sapiens
tgagaactgtaccaa

SEQ ID NO: 1223899 - DNA, 15 bp, Homo sapiens
gtgagaactgtacca

SEQ ID NO: 1223900 - DNA, 15 bp, Homo sapiens
cgtgagaactgtacc

SEQ ID NO: 1223901 - DNA, 15 bp, Homo sapiens
tcgtgagaactgtac

SEQ ID NO: 1223902 - DNA, 15 bp, Homo sapiens
atcgtgagaactgta

SEQ ID NO: 1223903 - DNA, 15 bp, Homo sapiens
gatcgtgagaactgt

SEQ ID NO: 1223904 - DNA, 15 bp, Homo sapiens
agatcgtgagaactg

SEQ ID NO: 1223905 - DNA, 15 bp, Homo sapiens
cagatcgtgagaact

SEQ ID NO: 1223906 - DNA, 15 bp, Homo sapiens
ccagatcgtgagaac

SEQ ID NO: 1223907 - DNA, 15 bp, Homo sapiens
tccagatcgtgagaa

SEQ ID NO: 1223908 - DNA, 15 bp, Homo sapiens
atccagatcgtgaga

SEQ ID NO: 1223909 - DNA, 15 bp, Homo sapiens
tatccagatcgtgag

SEQ ID NO: 1223910 - DNA, 15 bp, Homo sapiens
ctatccagatcgtga

SEQ ID NO: 1223911 - DNA, 15 bp, Homo sapiens
tctatccagatcgtg

SEQ ID NO: 1223912 - DNA, 15 bp, Homo sapiens
ttctatccagatcgt

SEQ ID NO: 1223913 - DNA, 15 bp, Homo sapiens
gttctatccagatcg

SEQ ID NO: 1223914 - DNA, 15 bp, Homo sapiens
cagaaagatagtgag

SEQ ID NO: 1223915 - DNA, 15 bp, Homo sapiens
ccagaaagatagtga

SEQ ID NO: 1223916 - DNA, 15 bp, Homo sapiens
tccagaaagatagtg

SEQ ID NO: 1223917 - DNA, 15 bp, Homo sapiens
atccagaaagatagt

SEQ ID NO: 1223918 - DNA, 15 bp, Homo sapiens
catccagaaagatag

SEQ ID NO: 1223919 - DNA, 15 bp, Homo sapiens
ccatccagaaagata

SEQ ID NO: 1223920 - DNA, 15 bp, Homo sapiens
tccatccagaaagat

SEQ ID NO: 1223921 - DNA, 15 bp, Homo sapiens
ttccatccagaaaga

SEQ ID NO: 1223922 - DNA, 15 bp, Homo sapiens
gttccatccagaaag

SEQ ID NO: 1223923 - DNA, 15 bp, Homo sapiens
agttccatccagaaa

SEQ ID NO: 1223924 - DNA, 15 bp, Homo sapiens
gagttccatccagaa

SEQ ID NO: 1223925 - DNA, 15 bp, Homo sapiens
agagttccatccaga

SEQ ID NO: 1223926 - DNA, 15 bp, Homo sapiens
gagagttccatccag

SEQ ID NO: 1223927 - DNA, 15 bp, Homo sapiens
tgagagttccatcca

SEQ ID NO: 1223928 - DNA, 15 bp, Homo sapiens
gtgagagttccatcc

SEQ ID NO: 1223929 - DNA, 15 bp, Homo sapiens
ggtgagagttccatc

SEQ ID NO: 1223930 - DNA, 15 bp, Homo sapiens
gggtgagagttccat

SEQ ID NO: 1223931 - DNA, 15 bp, Homo sapiens
agggtgagagttcca

SEQ ID NO: 1223932 - DNA, 15 bp, Homo sapiens
tagagggtgagagtt

SEQ ID NO: 1223933 - DNA, 15 bp, Homo sapiens
ctagagggtgagagt

SEQ ID NO: 1223934 - DNA, 15 bp, Homo sapiens
tctagagggtgagag

SEQ ID NO: 1223935 - DNA, 15 bp, Homo sapiens
atctagagggtgaga

SEQ ID NO: 1223936 - DNA, 15 bp, Homo sapiens
tatctagagggtgag

SEQ ID NO: 1223937 - DNA, 15 bp, Homo sapiens
ctatctagagggtga

SEQ ID NO: 1223938 - DNA, 15 bp, Homo sapiens
tctatctagagggtg

SEQ ID NO: 1223939 - DNA, 15 bp, Homo sapiens
ttctatctagagggt

SEQ ID NO: 1223940 - DNA, 15 bp, Homo sapiens
gttctatctagaggg

SEQ ID NO: 1223941 - DNA, 15 bp, Homo sapiens
agttctatctagagg

SEQ ID NO: 1223942 - DNA, 15 bp, Homo sapiens
accagatagatagtg

SEQ ID NO: 1223943 - DNA, 15 bp, Homo sapiens
aaccagatagatagt

SEQ ID NO: 1223944 - DNA, 15 bp, Homo sapiens
taaccagatagatag

SEQ ID NO: 1223945 - DNA, 15 bp, Homo sapiens
ctaaccagatagata

SEQ ID NO: 1223946 - DNA, 15 bp, Homo sapiens
tctaaccagatagat

SEQ ID NO: 1223947 - DNA, 15 bp, Homo sapiens
ttctaaccagataga

SEQ ID NO: 1223948 - DNA, 15 bp, Homo sapiens
aatcgagagagtgag

SEQ ID NO: 1223949 - DNA, 15 bp, Homo sapiens
caatcgagagagtga

SEQ ID NO: 1223950 - DNA, 15 bp, Homo sapiens
tcaatcgagagagtg

SEQ ID NO: 1223951 - DNA, 15 bp, Homo sapiens
ttcaatcgagagagt

SEQ ID NO: 1223952 - DNA, 15 bp, Homo sapiens
cttcaatcgagagag

SEQ ID NO: 1223953 - DNA, 15 bp, Homo sapiens
acttcaatcgagaga

SEQ ID NO: 1223954 - DNA, 15 bp, Homo sapiens
gacttcaatcgagag

SEQ ID NO: 1223955 - DNA, 15 bp, Homo sapiens
agacttcaatcgaga

SEQ ID NO: 1223956 - DNA, 15 bp, Homo sapiens
gagacttcaatcgag

SEQ ID NO: 1223957 - DNA, 15 bp, Homo sapiens
tgagacttcaatcga

SEQ ID NO: 1223958 - DNA, 15 bp, Homo sapiens
gtgagacttcaatcg

SEQ ID NO: 1223959 - DNA, 15 bp, Homo sapiens
agtgagacttcaatc

SEQ ID NO: 1223960 - DNA, 15 bp, Homo sapiens
tagtgagacttcaat

SEQ ID NO: 1223961 - DNA, 15 bp, Homo sapiens
atagtgagacttcaa

SEQ ID NO: 1223962 - DNA, 15 bp, Homo sapiens
gatagtgagacttca

SEQ ID NO: 1223963 - DNA, 15 bp, Homo sapiens
agatagtgagacttc

SEQ ID NO: 1223964 - DNA, 15 bp, Homo sapiens
cagatagtgagactt

SEQ ID NO: 1223965 - DNA, 15 bp, Homo sapiens
ccagatagtgagact

SEQ ID NO: 1223966 - DNA, 15 bp, Homo sapiens
tccagatagtgagac

SEQ ID NO: 1223967 - DNA, 15 bp, Homo sapiens
gcagatggtgagaat

SEQ ID NO: 1223968 - DNA, 15 bp, Homo sapiens
tgcagatggtgagaa

SEQ ID NO: 1223969 - DNA, 15 bp, Homo sapiens
ctgcagatggtgaga

SEQ ID NO: 1223970 - DNA, 15 bp, Homo sapiens
tctgcagatggtgag

SEQ ID NO: 1223971 - DNA, 15 bp, Homo sapiens
ctctgcagatggtga

SEQ ID NO: 1223972 - DNA, 15 bp, Homo sapiens
tctctgcagatggtg

SEQ ID NO: 1223973 - DNA, 15 bp, Homo sapiens
ttctctgcagatggt

SEQ ID NO: 1223974 - DNA, 15 bp, Homo sapiens
gttctctgcagatgg

SEQ ID NO: 1223975 - DNA, 15 bp, Homo sapiens
agttctctgcagatg

SEQ ID NO: 1223976 - DNA, 15 bp, Homo sapiens
gagttctctgcagat

SEQ ID NO: 1223977 - DNA, 15 bp, Homo sapiens
agagttctctgcaga

SEQ ID NO: 1223978 - DNA, 15 bp, Homo sapiens
gagagttctctgcag

SEQ ID NO: 1223979 - DNA, 15 bp, Homo sapiens
tgagagttctctgca

SEQ ID NO: 1223980 - DNA, 15 bp, Homo sapiens
gtgagagttctctgc

SEQ ID NO: 1223981 - DNA, 15 bp, Homo sapiens
agtgagagttctctg

SEQ ID NO: 1223982 - DNA, 15 bp, Homo sapiens
cagtgagagttctct

SEQ ID NO: 1223983 - DNA, 15 bp, Homo sapiens
acagtgagagttctc

SEQ ID NO: 1223984 - DNA, 15 bp, Homo sapiens
gagatagacagtgag

SEQ ID NO: 1223985 - DNA, 15 bp, Homo sapiens
cgagatagacagtga

SEQ ID NO: 1223986 - DNA, 15 bp, Homo sapiens
tcgagatagacagtg

SEQ ID NO: 1223987 - DNA, 15 bp, Homo sapiens
atcgagatagacagt

SEQ ID NO: 1223988 - DNA, 15 bp, Homo sapiens
tatcgagatagacag

SEQ ID NO: 1223989 - DNA, 15 bp, Homo sapiens
ttatcgagatagaca

SEQ ID NO: 1223990 - DNA, 15 bp, Homo sapiens
tttatcgagatagac

SEQ ID NO: 1223991 - DNA, 15 bp, Homo sapiens
ttttatcgagataga

SEQ ID NO: 1223992 - DNA, 15 bp, Homo sapiens
gttttatcgagatag

SEQ ID NO: 1223993 - DNA, 15 bp, Homo sapiens
agttttatcgagata

SEQ ID NO: 1223994 - DNA, 15 bp, Homo sapiens
gagttttatcgagat

SEQ ID NO: 1223995 - DNA, 15 bp, Homo sapiens
agagttttatcgaga

SEQ ID NO: 1223996 - DNA, 15 bp, Homo sapiens
gagagttttatcgag

SEQ ID NO: 1223997 - DNA, 15 bp, Homo sapiens
tgagagttttatcga

SEQ ID NO: 1223998 - DNA, 15 bp, Homo sapiens
gtgagagttttatcg

SEQ ID NO: 1223999 - DNA, 15 bp, Homo sapiens
gtagtgagagtttta

SEQ ID NO: 1224000 - DNA, 15 bp, Homo sapiens
ggtagtgagagtttt

SEQ ID NO: 1224001 - DNA, 15 bp, Homo sapiens
aggtagtgagagttt

SEQ ID NO: 1224002 - DNA, 15 bp, Homo sapiens
taggtagtgagagtt

SEQ ID NO: 1224003 - DNA, 15 bp, Homo sapiens
ataggtagtgagagt

SEQ ID NO: 1224004 - DNA, 15 bp, Homo sapiens
gataggtagtgagag

SEQ ID NO: 1224005 - DNA, 15 bp, Homo sapiens
agataggtagtgaga

SEQ ID NO: 1224006 - DNA, 15 bp, Homo sapiens
cagataggtagtgag

SEQ ID NO: 1224007 - DNA, 15 bp, Homo sapiens
ccagataggtagtga

SEQ ID NO: 1224008 - DNA, 15 bp, Homo sapiens
tccagataggtagtg

SEQ ID NO: 1224009 - DNA, 15 bp, Homo sapiens
atccagataggtagt

SEQ ID NO: 1224010 - DNA, 15 bp, Homo sapiens
tatccagataggtag

SEQ ID NO: 1224011 - DNA, 15 bp, Homo sapiens
ctatccagataggta

SEQ ID NO: 1224012 - DNA, 15 bp, Homo sapiens
tctatccagataggt

SEQ ID NO: 1224013 - DNA, 15 bp, Homo sapiens
ttctatccagatagg

SEQ ID NO: 1224014 - DNA, 15 bp, Homo sapiens
cgagagttctatcca

SEQ ID NO: 1224015 - DNA, 15 bp, Homo sapiens
gcgagagttctatcc

SEQ ID NO: 1224016 - DNA, 15 bp, Homo sapiens
agcgagagttctatc

SEQ ID NO: 1224017 - DNA, 15 bp, Homo sapiens
tagcgagagttctat

SEQ ID NO: 1224018 - DNA, 15 bp, Homo sapiens
cagatagcgagagtt

SEQ ID NO: 1224019 - DNA, 15 bp, Homo sapiens
ccagatagcgagagt

SEQ ID NO: 1224020 - DNA, 15 bp, Homo sapiens
tccagatagcgagag

SEQ ID NO: 1224021 - DNA, 15 bp, Homo sapiens
atccagatagcgaga

SEQ ID NO: 1224022 - DNA, 15 bp, Homo sapiens
tatccagatagcgag

SEQ ID NO: 1224023 - DNA, 15 bp, Homo sapiens
ctatccagatagcga

SEQ ID NO: 1224024 - DNA, 15 bp, Homo sapiens
tctatccagatagcg

SEQ ID NO: 1224025 - DNA, 15 bp, Homo sapiens
ttctatccagatagc

SEQ ID NO: 1224026 - DNA, 15 bp, Homo sapiens
gtgacaattctatcc

SEQ ID NO: 1224027 - DNA, 15 bp, Homo sapiens
ggtgacaattctatc

SEQ ID NO: 1224028 - DNA, 15 bp, Homo sapiens
tggtgacaattctat

SEQ ID NO: 1224029 - DNA, 15 bp, Homo sapiens
atggtgacaattcta

SEQ ID NO: 1224030 - DNA, 15 bp, Homo sapiens
gatggtgacaattct

SEQ ID NO: 1224031 - DNA, 15 bp, Homo sapiens
agatggtgacaattc

SEQ ID NO: 1224032 - DNA, 15 bp, Homo sapiens
cagatggtgacaatt

SEQ ID NO: 1224033 - DNA, 15 bp, Homo sapiens
ccagatggtgacaat

SEQ ID NO: 1224034 - DNA, 15 bp, Homo sapiens
cccagatggtgacaa

SEQ ID NO: 1224035 - DNA, 15 bp, Homo sapiens
acccagatggtgaca

SEQ ID NO: 1224036 - DNA, 15 bp, Homo sapiens
tacccagatggtgac

SEQ ID NO: 1224037 - DNA, 15 bp, Homo sapiens
ctacccagatggtga

SEQ ID NO: 1224038 - DNA, 15 bp, Homo sapiens
tctacccagatggtg

SEQ ID NO: 1224039 - DNA, 15 bp, Homo sapiens
ttctacccagatggt

SEQ ID NO: 1224040 - DNA, 15 bp, Homo sapiens
gttctacccagatgg

SEQ ID NO: 1224041 - DNA, 15 bp, Homo sapiens
agttctacccagatg

SEQ ID NO: 1224042 - DNA, 15 bp, Homo sapiens
gagttctacccagat

SEQ ID NO: 1224043 - DNA, 15 bp, Homo sapiens
cagagttctacccag

SEQ ID NO: 1224044 - DNA, 15 bp, Homo sapiens
tgtcagagttctacc

SEQ ID NO: 1224045 - DNA, 15 bp, Homo sapiens
ttgtcagagttctac

SEQ ID NO: 1224046 - DNA, 15 bp, Homo sapiens
attgtcagagttcta

SEQ ID NO: 1224047 - DNA, 15 bp, Homo sapiens
gattgtcagagttct

SEQ ID NO: 1224048 - DNA, 15 bp, Homo sapiens
agattgtcagagttc

SEQ ID NO: 1224049 - DNA, 15 bp, Homo sapiens
gagattgtcagagtt

SEQ ID NO: 1224050 - DNA, 15 bp, Homo sapiens
agagattgtcagagt

SEQ ID NO: 1224051 - DNA, 15 bp, Homo sapiens
gagagattgtcagag

SEQ ID NO: 1224052 - DNA, 15 bp, Homo sapiens
agagagattgtcaga

SEQ ID NO: 1224053 - DNA, 15 bp, Homo sapiens
cagagagattgtcag

SEQ ID NO: 1224054 - DNA, 15 bp, Homo sapiens
ccagagagattgtca

SEQ ID NO: 1224055 - DNA, 15 bp, Homo sapiens
tccagagagattgtc

SEQ ID NO: 1224056 - DNA, 15 bp, Homo sapiens
atccagagagattgt

SEQ ID NO: 1224057 - DNA, 15 bp, Homo sapiens
tatccagagagattg

SEQ ID NO: 1224058 - DNA, 15 bp, Homo sapiens
ctatccagagagatt

SEQ ID NO: 1224059 - DNA, 15 bp, Homo sapiens
catccagagggtgag

SEQ ID NO: 1224060 - DNA, 15 bp, Homo sapiens
ccatccagagggtga

SEQ ID NO: 1224061 - DNA, 15 bp, Homo sapiens
tccatccagagggtg

SEQ ID NO: 1224062 - DNA, 15 bp, Homo sapiens
ttccatccagagggt

SEQ ID NO: 1224063 - DNA, 15 bp, Homo sapiens
gttccatccagaggg

SEQ ID NO: 1224064 - DNA, 15 bp, Homo sapiens
agttccatccagagg

SEQ ID NO: 1224065 - DNA, 15 bp, Homo sapiens
gagttccatccagag

SEQ ID NO: 1224066 - DNA, 15 bp, Homo sapiens
agtgagagttccatc

SEQ ID NO: 1224067 - DNA, 15 bp, Homo sapiens
tagtgagagttccat

SEQ ID NO: 1224068 - DNA, 15 bp, Homo sapiens
agcagatagtgagag

SEQ ID NO: 1224069 - DNA, 15 bp, Homo sapiens
cagcagatagtgaga

SEQ ID NO: 1224070 - DNA, 15 bp, Homo sapiens
acagcagatagtgag

SEQ ID NO: 1224071 - DNA, 15 bp, Homo sapiens
tacagcagatagtga

SEQ ID NO: 1224072 - DNA, 15 bp, Homo sapiens
atacagcagatagtg

SEQ ID NO: 1224073 - DNA, 15 bp, Homo sapiens
tatacagcagatagt

SEQ ID NO: 1224074 - DNA, 15 bp, Homo sapiens
ctatacagcagatag

SEQ ID NO: 1224075 - DNA, 15 bp, Homo sapiens
tctatacagcagata

SEQ ID NO: 1224076 - DNA, 15 bp, Homo sapiens
ttctatacagcagat

SEQ ID NO: 1224077 - DNA, 15 bp, Homo sapiens
attctatacagcaga

SEQ ID NO: 1224078 - DNA, 15 bp, Homo sapiens
aattctatacagcag

SEQ ID NO: 1224079 - DNA, 15 bp, Homo sapiens
gaattctatacagca

SEQ ID NO: 1224080 - DNA, 15 bp, Homo sapiens
agaattctatacagc

SEQ ID NO: 1224081 - DNA, 15 bp, Homo sapiens
ggtgagaattctata

SEQ ID NO: 1224082 - DNA, 15 bp, Homo sapiens
cagttctatccagag

SEQ ID NO: 1224083 - DNA, 15 bp, Homo sapiens
tagtgacagttctat

SEQ ID NO: 1224084 - DNA, 15 bp, Homo sapiens
atagtgacagttcta

SEQ ID NO: 1224085 - DNA, 15 bp, Homo sapiens
gatagtgacagttct

SEQ ID NO: 1224086 - DNA, 15 bp, Homo sapiens
agatagtgacagttc

SEQ ID NO: 1224087 - DNA, 15 bp, Homo sapiens
cagatagtgacagtt

SEQ ID NO: 1224088 - DNA, 15 bp, Homo sapiens
acagatagtgacagt

SEQ ID NO: 1224089 - DNA, 15 bp, Homo sapiens
gacagatagtgacag

SEQ ID NO: 1224090 - DNA, 15 bp, Homo sapiens
agacagatagtgaca

SEQ ID NO: 1224091 - DNA, 15 bp, Homo sapiens
cagacagatagtgac

SEQ ID NO: 1224092 - DNA, 15 bp, Homo sapiens
acagacagatagtga

SEQ ID NO: 1224093 - DNA, 15 bp, Homo sapiens
tacagacagatagtg

SEQ ID NO: 1224094 - DNA, 15 bp, Homo sapiens
atacagacagatagt

SEQ ID NO: 1224095 - DNA, 15 bp, Homo sapiens
tatacagacagatag

SEQ ID NO: 1224096 - DNA, 15 bp, Homo sapiens
ctatacagacagata

SEQ ID NO: 1224097 - DNA, 15 bp, Homo sapiens
tctatacagacagat

SEQ ID NO: 1224098 - DNA, 15 bp, Homo sapiens
ttctatacagacaga

SEQ ID NO: 1224099 - DNA, 15 bp, Homo sapiens
attctatacagacag

SEQ ID NO: 1224100 - DNA, 15 bp, Homo sapiens
aattctatacagaca

SEQ ID NO: 1224101 - DNA, 15 bp, Homo sapiens
gaattctatacagac

SEQ ID NO: 1224102 - DNA, 15 bp, Homo sapiens
ttagagttctatcca

SEQ ID NO: 1224103 - DNA, 15 bp, Homo sapiens
gttagagttctatcc

SEQ ID NO: 1224104 - DNA, 15 bp, Homo sapiens
tgttagagttctatc

SEQ ID NO: 1224105 - DNA, 15 bp, Homo sapiens
ttgttagagttctat

SEQ ID NO: 1224106 - DNA, 15 bp, Homo sapiens
attgttagagttcta

SEQ ID NO: 1224107 - DNA, 15 bp, Homo sapiens
gattgttagagttct

SEQ ID NO: 1224108 - DNA, 15 bp, Homo sapiens
agattgttagagttc

SEQ ID NO: 1224109 - DNA, 15 bp, Homo sapiens
cagattgttagagtt

SEQ ID NO: 1224110 - DNA, 15 bp, Homo sapiens
ccagattgttagagt

SEQ ID NO: 1224111 - DNA, 15 bp, Homo sapiens
tccagattgttagag

SEQ ID NO: 1224112 - DNA, 15 bp, Homo sapiens
atccagattgttaga

SEQ ID NO: 1224113 - DNA, 15 bp, Homo sapiens
tatccagattgttag

SEQ ID NO: 1224114 - DNA, 15 bp, Homo sapiens
ctatccagattgtta

SEQ ID NO: 1224115 - DNA, 15 bp, Homo sapiens
tctatccagattgtt

SEQ ID NO: 1224116 - DNA, 15 bp, Homo sapiens
gcagagagtgagaat

SEQ ID NO: 1224117 - DNA, 15 bp, Homo sapiens
tgcagagagtgagaa

SEQ ID NO: 1224118 - DNA, 15 bp, Homo sapiens
atgcagagagtgaga

SEQ ID NO: 1224119 - DNA, 15 bp, Homo sapiens
tatgcagagagtgag

SEQ ID NO: 1224120 - DNA, 15 bp, Homo sapiens
ctatgcagagagtga

SEQ ID NO: 1224121 - DNA, 15 bp, Homo sapiens
tctatgcagagagtg

SEQ ID NO: 1224122 - DNA, 15 bp, Homo sapiens
ttctatgcagagagt

SEQ ID NO: 1224123 - DNA, 15 bp, Homo sapiens
gttctatgcagagag

SEQ ID NO: 1224124 - DNA, 15 bp, Homo sapiens
agttctatgcagaga

SEQ ID NO: 1224125 - DNA, 15 bp, Homo sapiens
atatccagatatata

SEQ ID NO: 1224126 - DNA, 15 bp, Homo sapiens
tatatccagatatat

SEQ ID NO: 1224127 - DNA, 15 bp, Homo sapiens
ttatatccagatata

SEQ ID NO: 1224128 - DNA, 15 bp, Homo sapiens
attatatccagatat

SEQ ID NO: 1224129 - DNA, 15 bp, Homo sapiens
ggatagtgagagttc

SEQ ID NO: 1224130 - DNA, 15 bp, Homo sapiens
ccggatagtgagagt

SEQ ID NO: 1224131 - DNA, 15 bp, Homo sapiens
tccggatagtgagag

SEQ ID NO: 1224132 - DNA, 15 bp, Homo sapiens
atccggatagtgaga

SEQ ID NO: 1224133 - DNA, 15 bp, Homo sapiens
tatccggatagtgag

SEQ ID NO: 1224134 - DNA, 15 bp, Homo sapiens
ctatccggatagtga

SEQ ID NO: 1224135 - DNA, 15 bp, Homo sapiens
tctatccggatagtg

SEQ ID NO: 1224136 - DNA, 15 bp, Homo sapiens
ttctatccggatagt

SEQ ID NO: 1224137 - DNA, 15 bp, Homo sapiens
accagatggtgagaa

SEQ ID NO: 1224138 - DNA, 15 bp, Homo sapiens
aaccagatggtgaga

SEQ ID NO: 1224139 - DNA, 15 bp, Homo sapiens
taaccagatggtgag

SEQ ID NO: 1224140 - DNA, 15 bp, Homo sapiens
ctaaccagatggtga

SEQ ID NO: 1224141 - DNA, 15 bp, Homo sapiens
tctaaccagatggtg

SEQ ID NO: 1224142 - DNA, 15 bp, Homo sapiens
ttctaaccagatggt

SEQ ID NO: 1224143 - DNA, 15 bp, Homo sapiens
attctaaccagatgg

SEQ ID NO: 1224144 - DNA, 15 bp, Homo sapiens
aattctaaccagatg

SEQ ID NO: 1224145 - DNA, 15 bp, Homo sapiens
taattctaaccagat

SEQ ID NO: 1224146 - DNA, 15 bp, Homo sapiens
ataattctaaccaga

SEQ ID NO: 1224147 - DNA, 15 bp, Homo sapiens
gataattctaaccag

SEQ ID NO: 1224148 - DNA, 15 bp, Homo sapiens
tgataattctaacca

SEQ ID NO: 1224149 - DNA, 15 bp, Homo sapiens
gtgataattctaacc

SEQ ID NO: 1224150 - DNA, 15 bp, Homo sapiens
agtgataattctaac

SEQ ID NO: 1224151 - DNA, 15 bp, Homo sapiens
tagtgataattctaa

SEQ ID NO: 1224152 - DNA, 15 bp, Homo sapiens
atagtgataattcta

SEQ ID NO: 1224153 - DNA, 15 bp, Homo sapiens
gatagtgataattct

SEQ ID NO: 1224154 - DNA, 15 bp, Homo sapiens
agatagtgataattc

SEQ ID NO: 1224155 - DNA, 15 bp, Homo sapiens
tagatagtgataatt

SEQ ID NO: 1224156 - DNA, 15 bp, Homo sapiens
atagatagtgataat

SEQ ID NO: 1224157 - DNA, 15 bp, Homo sapiens
gatagatagtgataa

SEQ ID NO: 1224158 - DNA, 15 bp, Homo sapiens
cgatagatagtgata

SEQ ID NO: 1224159 - DNA, 15 bp, Homo sapiens
ccgatagatagtgat

SEQ ID NO: 1224160 - DNA, 15 bp, Homo sapiens
cccgatagatagtga

SEQ ID NO: 1224161 - DNA, 15 bp, Homo sapiens
tcccgatagatagtg

SEQ ID NO: 1224162 - DNA, 15 bp, Homo sapiens
atcccgatagatagt

SEQ ID NO: 1224163 - DNA, 15 bp, Homo sapiens
tatcccgatagatag

SEQ ID NO: 1224164 - DNA, 15 bp, Homo sapiens
ctatcccgatagata

SEQ ID NO: 1224165 - DNA, 15 bp, Homo sapiens
tctatcccgatagat

SEQ ID NO: 1224166 - DNA, 15 bp, Homo sapiens
ttctatcccgataga

SEQ ID NO: 1224167 - DNA, 15 bp, Homo sapiens
attctatcccgatag

SEQ ID NO: 1224168 - DNA, 15 bp, Homo sapiens
aattctatcccgata

SEQ ID NO: 1224169 - DNA, 15 bp, Homo sapiens
gaattctatcccgat

SEQ ID NO: 1224170 - DNA, 15 bp, Homo sapiens
agaattctatcccga

SEQ ID NO: 1224171 - DNA, 15 bp, Homo sapiens
gagaattctatcccg

SEQ ID NO: 1224172 - DNA, 15 bp, Homo sapiens
tgagaattctatccc

SEQ ID NO: 1224173 - DNA, 15 bp, Homo sapiens
ggttctatccagaga

SEQ ID NO: 1224174 - DNA, 15 bp, Homo sapiens
gggttctatccagag

SEQ ID NO: 1224175 - DNA, 15 bp, Homo sapiens
agggttctatccaga

SEQ ID NO: 1224176 - DNA, 15 bp, Homo sapiens
gagggttctatccag

SEQ ID NO: 1224177 - DNA, 15 bp, Homo sapiens
tgagggttctatcca

SEQ ID NO: 1224178 - DNA, 15 bp, Homo sapiens
gtgagggttctatcc

SEQ ID NO: 1224179 - DNA, 15 bp, Homo sapiens
agtgagggttctatc

SEQ ID NO: 1224180 - DNA, 15 bp, Homo sapiens
tagtgagggttctat

SEQ ID NO: 1224181 - DNA, 15 bp, Homo sapiens
atagtgagggttcta

SEQ ID NO: 1224182 - DNA, 15 bp, Homo sapiens
atttccatatagata

SEQ ID NO: 1224183 - DNA, 15 bp, Homo sapiens
tatttccatatagat

SEQ ID NO: 1224184 - DNA, 15 bp, Homo sapiens
ttatttccatataga

SEQ ID NO: 1224185 - DNA, 15 bp, Homo sapiens
gttatttccatatag

SEQ ID NO: 1224186 - DNA, 15 bp, Homo sapiens
agttatttccatata

SEQ ID NO: 1224187 - DNA, 15 bp, Homo sapiens
gagttatttccatat

SEQ ID NO: 1224188 - DNA, 15 bp, Homo sapiens
agagttatttccata

SEQ ID NO: 1224189 - DNA, 15 bp, Homo sapiens
gagagttatttccat

SEQ ID NO: 1224190 - DNA, 15 bp, Homo sapiens
tgagagttatttcca

SEQ ID NO: 1224191 - DNA, 15 bp, Homo sapiens
gtgagagttatttcc

SEQ ID NO: 1224192 - DNA, 15 bp, Homo sapiens
ggtgagagttatttc

SEQ ID NO: 1224193 - DNA, 15 bp, Homo sapiens
tggtgagagttattt

SEQ ID NO: 1224194 - DNA, 15 bp, Homo sapiens
atggtgagagttatt

SEQ ID NO: 1224195 - DNA, 15 bp, Homo sapiens
gatggtgagagttat

SEQ ID NO: 1224196 - DNA, 15 bp, Homo sapiens
agatggtgagagtta

SEQ ID NO: 1224197 - DNA, 15 bp, Homo sapiens
cagatggtgagagtt

SEQ ID NO: 1224198 - DNA, 15 bp, Homo sapiens
ccagatggtgagagt

SEQ ID NO: 1224199 - DNA, 15 bp, Homo sapiens
cccagatggtgagag

SEQ ID NO: 1224200 - DNA, 15 bp, Homo sapiens
acccagatggtgaga

SEQ ID NO: 1224201 - DNA, 15 bp, Homo sapiens
tacccagatggtgag

SEQ ID NO: 1224202 - DNA, 15 bp, Homo sapiens
attctacccagatgg

SEQ ID NO: 1224203 - DNA, 15 bp, Homo sapiens
aattctacccagatg

SEQ ID NO: 1224204 - DNA, 15 bp, Homo sapiens
gaattctacccagat

SEQ ID NO: 1224205 - DNA, 15 bp, Homo sapiens
agaattctacccaga

SEQ ID NO: 1224206 - DNA, 15 bp, Homo sapiens
gagaattctacccag

SEQ ID NO: 1224207 - DNA, 15 bp, Homo sapiens
ggagaattctaccca

SEQ ID NO: 1224208 - DNA, 15 bp, Homo sapiens
gggagaattctaccc

SEQ ID NO: 1224209 - DNA, 15 bp, Homo sapiens
agggagaattctacc

SEQ ID NO: 1224210 - DNA, 15 bp, Homo sapiens
tagggagaattctac

SEQ ID NO: 1224211 - DNA, 15 bp, Homo sapiens
atagggagaattcta

SEQ ID NO: 1224212 - DNA, 15 bp, Homo sapiens
gatagggagaattct

SEQ ID NO: 1224213 - DNA, 15 bp, Homo sapiens
agatagggagaattc

SEQ ID NO: 1224214 - DNA, 15 bp, Homo sapiens
tagatagggagaatt

SEQ ID NO: 1224215 - DNA, 15 bp, Homo sapiens
ctagatagggagaat

SEQ ID NO: 1224216 - DNA, 15 bp, Homo sapiens
tctagatagggagaa

SEQ ID NO: 1224217 - DNA, 15 bp, Homo sapiens
atctagatagggaga

SEQ ID NO: 1224218 - DNA, 15 bp, Homo sapiens
tatctagatagggag

SEQ ID NO: 1224219 - DNA, 15 bp, Homo sapiens
ctatctagataggga

SEQ ID NO: 1224220 - DNA, 15 bp, Homo sapiens
tctatctagataggg

SEQ ID NO: 1224221 - DNA, 15 bp, Homo sapiens
ttctatctagatagg

SEQ ID NO: 1224222 - DNA, 15 bp, Homo sapiens
tagacagtgagaatt

SEQ ID NO: 1224223 - DNA, 15 bp, Homo sapiens
gtagacagtgagaat

SEQ ID NO: 1224224 - DNA, 15 bp, Homo sapiens
tgtagacagtgagaa

SEQ ID NO: 1224225 - DNA, 15 bp, Homo sapiens
atgtagacagtgaga

SEQ ID NO: 1224226 - DNA, 15 bp, Homo sapiens
tatgtagacagtgag

SEQ ID NO: 1224227 - DNA, 15 bp, Homo sapiens
ctatgtagacagtga

SEQ ID NO: 1224228 - DNA, 15 bp, Homo sapiens
tctatgtagacagtg

SEQ ID NO: 1224229 - DNA, 15 bp, Homo sapiens
ctctatgtagacagt

SEQ ID NO: 1224230 - DNA, 15 bp, Homo sapiens
gctctatgtagacag

SEQ ID NO: 1224231 - DNA, 15 bp, Homo sapiens
agctctatgtagaca

SEQ ID NO: 1224232 - DNA, 15 bp, Homo sapiens
gagctctatgtagac

SEQ ID NO: 1224233 - DNA, 15 bp, Homo sapiens
agagctctatgtaga

SEQ ID NO: 1224234 - DNA, 15 bp, Homo sapiens
gagagctctatgtag

SEQ ID NO: 1224235 - DNA, 15 bp, Homo sapiens
cgagagctctatgta

SEQ ID NO: 1224236 - DNA, 15 bp, Homo sapiens
gcgagagctctatgt

SEQ ID NO: 1224237 - DNA, 15 bp, Homo sapiens
agcgagagctctatg

SEQ ID NO: 1224238 - DNA, 15 bp, Homo sapiens
tagcgagagctctat

SEQ ID NO: 1224239 - DNA, 15 bp, Homo sapiens
atagcgagagctcta

SEQ ID NO: 1224240 - DNA, 15 bp, Homo sapiens
gatagcgagagctct

SEQ ID NO: 1224241 - DNA, 15 bp, Homo sapiens
agatagcgagagctc

SEQ ID NO: 1224242 - DNA, 15 bp, Homo sapiens
cagatagcgagagct

SEQ ID NO: 1224243 - DNA, 15 bp, Homo sapiens
acagatagcgagagc

SEQ ID NO: 1224244 - DNA, 15 bp, Homo sapiens
gacagatagcgagag

SEQ ID NO: 1224245 - DNA, 15 bp, Homo sapiens
agacagatagcgaga

SEQ ID NO: 1224246 - DNA, 15 bp, Homo sapiens
cagacagatagcgag

SEQ ID NO: 1224247 - DNA, 15 bp, Homo sapiens
ccagacagatagcga

SEQ ID NO: 1224248 - DNA, 15 bp, Homo sapiens
tccagacagatagcg

SEQ ID NO: 1224249 - DNA, 15 bp, Homo sapiens
tcagtgagagttcta

SEQ ID NO: 1224250 - DNA, 15 bp, Homo sapiens
gtcagtgagagttct

SEQ ID NO: 1224251 - DNA, 15 bp, Homo sapiens
agtcagtgagagttc

SEQ ID NO: 1224252 - DNA, 15 bp, Homo sapiens
cagtcagtgagagtt

SEQ ID NO: 1224253 - DNA, 15 bp, Homo sapiens
ccagtcagtgagagt

SEQ ID NO: 1224254 - DNA, 15 bp, Homo sapiens
tccagtcagtgagag

SEQ ID NO: 1224255 - DNA, 15 bp, Homo sapiens
atccagtcagtgaga

SEQ ID NO: 1224256 - DNA, 15 bp, Homo sapiens
tatccagtcagtgag

SEQ ID NO: 1224257 - DNA, 15 bp, Homo sapiens
ctatccagtcagtga

SEQ ID NO: 1224258 - DNA, 15 bp, Homo sapiens
tctatccagtcagtg

SEQ ID NO: 1224259 - DNA, 15 bp, Homo sapiens
ttctatccagtcagt

SEQ ID NO: 1224260 - DNA, 15 bp, Homo sapiens
attctatccagtcag

SEQ ID NO: 1224261 - DNA, 15 bp, Homo sapiens
aattctatccagtca

SEQ ID NO: 1224262 - DNA, 15 bp, Homo sapiens
gaattctatccagtc

SEQ ID NO: 1224263 - DNA, 15 bp, Homo sapiens
ttatccagagagtaa

SEQ ID NO: 1224264 - DNA, 15 bp, Homo sapiens
tttatccagagagta

SEQ ID NO: 1224265 - DNA, 15 bp, Homo sapiens
gtttatccagagagt

SEQ ID NO: 1224266 - DNA, 15 bp, Homo sapiens
tgtttatccagagag

SEQ ID NO: 1224267 - DNA, 15 bp, Homo sapiens
atgtttatccagaga

SEQ ID NO: 1224268 - DNA, 15 bp, Homo sapiens
gatgtttatccagag

SEQ ID NO: 1224269 - DNA, 15 bp, Homo sapiens
agatgtttatccaga

SEQ ID NO: 1224270 - DNA, 15 bp, Homo sapiens
gagatgtttatccag

SEQ ID NO: 1224271 - DNA, 15 bp, Homo sapiens
tgagatgtttatcca

SEQ ID NO: 1224272 - DNA, 15 bp, Homo sapiens
gtgagatgtttatcc

SEQ ID NO: 1224273 - DNA, 15 bp, Homo sapiens
agtgagatgtttatc

SEQ ID NO: 1224274 - DNA, 15 bp, Homo sapiens
tagtgagatgtttat

SEQ ID NO: 1224275 - DNA, 15 bp, Homo sapiens
atagtgagatgttta

SEQ ID NO: 1224276 - DNA, 15 bp, Homo sapiens
gatagtgagatgttt

SEQ ID NO: 1224277 - DNA, 15 bp, Homo sapiens
agatagtgagatgtt

SEQ ID NO: 1224278 - DNA, 15 bp, Homo sapiens
aagatagtgagatgt

SEQ ID NO: 1224279 - DNA, 15 bp, Homo sapiens
aaagatagtgagatg

SEQ ID NO: 1224280 - DNA, 15 bp, Homo sapiens
gaaagatagtgagat

SEQ ID NO: 1224281 - DNA, 15 bp, Homo sapiens
agtagtaagagttct

SEQ ID NO: 1224282 - DNA, 15 bp, Homo sapiens
aagtagtaagagttc

SEQ ID NO: 1224283 - DNA, 15 bp, Homo sapiens
caagtagtaagagtt

SEQ ID NO: 1224284 - DNA, 15 bp, Homo sapiens
ccaagtagtaagagt

SEQ ID NO: 1224285 - DNA, 15 bp, Homo sapiens
tccaagtagtaagag

SEQ ID NO: 1224286 - DNA, 15 bp, Homo sapiens
ttccaagtagtaaga

SEQ ID NO: 1224287 - DNA, 15 bp, Homo sapiens
tttccaagtagtaag

SEQ ID NO: 1224288 - DNA, 15 bp, Homo sapiens
ctttccaagtagtaa

SEQ ID NO: 1224289 - DNA, 15 bp, Homo sapiens
tctttccaagtagta

SEQ ID NO: 1224290 - DNA, 15 bp, Homo sapiens
ttctttccaagtagt

SEQ ID NO: 1224291 - DNA, 15 bp, Homo sapiens
attctttccaagtag

SEQ ID NO: 1224292 - DNA, 15 bp, Homo sapiens
cattctttccaagta

SEQ ID NO: 1224293 - DNA, 15 bp, Homo sapiens
gcattctttccaagt

SEQ ID NO: 1224294 - DNA, 15 bp, Homo sapiens
agcattctttccaag

SEQ ID NO: 1224295 - DNA, 15 bp, Homo sapiens
gagcattctttccaa

SEQ ID NO: 1224296 - DNA, 15 bp, Homo sapiens
tgagcattctttcca

SEQ ID NO: 1224297 - DNA, 15 bp, Homo sapiens
gtgagcattctttcc

SEQ ID NO: 1224298 - DNA, 15 bp, Homo sapiens
agtgagcattctttc

SEQ ID NO: 1224299 - DNA, 15 bp, Homo sapiens
tagtgagcattcttt

SEQ ID NO: 1224300 - DNA, 15 bp, Homo sapiens
atagtgagcattctt

SEQ ID NO: 1224301 - DNA, 15 bp, Homo sapiens
gatagtgagcattct

SEQ ID NO: 1224302 - DNA, 15 bp, Homo sapiens
agatagtgagcattc

SEQ ID NO: 1224303 - DNA, 15 bp, Homo sapiens
cagatagtgagcatt

SEQ ID NO: 1224304 - DNA, 15 bp, Homo sapiens
acagatagtgagcat

SEQ ID NO: 1224305 - DNA, 15 bp, Homo sapiens
tacagatagtgagca

SEQ ID NO: 1224306 - DNA, 15 bp, Homo sapiens
atacagatagtgagc

SEQ ID NO: 1224307 - DNA, 15 bp, Homo sapiens
tatacagatagtgag

SEQ ID NO: 1224308 - DNA, 15 bp, Homo sapiens
ctatacagatagtga

SEQ ID NO: 1224309 - DNA, 15 bp, Homo sapiens
tctatacagatagtg

SEQ ID NO: 1224310 - DNA, 15 bp, Homo sapiens
tagaattctatacag

SEQ ID NO: 1224311 - DNA, 15 bp, Homo sapiens
ttagaattctataca

SEQ ID NO: 1224312 - DNA, 15 bp, Homo sapiens
gttagaattctatac

SEQ ID NO: 1224313 - DNA, 15 bp, Homo sapiens
ggttagaattctata

SEQ ID NO: 1224314 - DNA, 15 bp, Homo sapiens
tggttagaattctat

SEQ ID NO: 1224315 - DNA, 15 bp, Homo sapiens
atggttagaattcta

SEQ ID NO: 1224316 - DNA, 15 bp, Homo sapiens
gatggttagaattct

SEQ ID NO: 1224317 - DNA, 15 bp, Homo sapiens
agatggttagaattc

SEQ ID NO: 1224318 - DNA, 15 bp, Homo sapiens
cagatggttagaatt

SEQ ID NO: 1224319 - DNA, 15 bp, Homo sapiens
ccagatggttagaat

SEQ ID NO: 1224320 - DNA, 15 bp, Homo sapiens
cccagatggttagaa

SEQ ID NO: 1224321 - DNA, 15 bp, Homo sapiens
acccagatggttaga

SEQ ID NO: 1224322 - DNA, 15 bp, Homo sapiens
tacccagatggttag

SEQ ID NO: 1224323 - DNA, 15 bp, Homo sapiens
ctacccagatggtta

SEQ ID NO: 1224324 - DNA, 15 bp, Homo sapiens
tctacccagatggtt

SEQ ID NO: 1224325 - DNA, 15 bp, Homo sapiens
tgagaattctaccca

SEQ ID NO: 1224326 - DNA, 15 bp, Homo sapiens
gtgagaattctaccc

SEQ ID NO: 1224327 - DNA, 15 bp, Homo sapiens
agtgagaattctacc

SEQ ID NO: 1224328 - DNA, 15 bp, Homo sapiens
cttctatccagatag

SEQ ID NO: 1224329 - DNA, 15 bp, Homo sapiens
acttctatccagata

SEQ ID NO: 1224330 - DNA, 15 bp, Homo sapiens
gacttctatccagat

SEQ ID NO: 1224331 - DNA, 15 bp, Homo sapiens
tagtgagacttctat

SEQ ID NO: 1224332 - DNA, 15 bp, Homo sapiens
atagtgagacttcta

SEQ ID NO: 1224333 - DNA, 15 bp, Homo sapiens
gatagtgagacttct

SEQ ID NO: 1224334 - DNA, 15 bp, Homo sapiens
tagatagtgagactt

SEQ ID NO: 1224335 - DNA, 15 bp, Homo sapiens
atagatagtgagact

SEQ ID NO: 1224336 - DNA, 15 bp, Homo sapiens
aatagatagtgagac

SEQ ID NO: 1224337 - DNA, 15 bp, Homo sapiens
aaatagatagtgaga

SEQ ID NO: 1224338 - DNA, 15 bp, Homo sapiens
caaatagatagtgag

SEQ ID NO: 1224339 - DNA, 15 bp, Homo sapiens
ccaaatagatagtga

SEQ ID NO: 1224340 - DNA, 15 bp, Homo sapiens
tccaaatagatagtg

SEQ ID NO: 1224341 - DNA, 15 bp, Homo sapiens
atccaaatagatagt

SEQ ID NO: 1224342 - DNA, 15 bp, Homo sapiens
tatccaaatagatag

SEQ ID NO: 1224343 - DNA, 15 bp, Homo sapiens
ctatccaaatagata

SEQ ID NO: 1224344 - DNA, 15 bp, Homo sapiens
tctatccaaatagat

SEQ ID NO: 1224345 - DNA, 15 bp, Homo sapiens
ttctatccaaataga

SEQ ID NO: 1224346 - DNA, 15 bp, Homo sapiens
gatagtgagagatct

SEQ ID NO: 1224347 - DNA, 15 bp, Homo sapiens
agatagtgagagatc

SEQ ID NO: 1224348 - DNA, 15 bp, Homo sapiens
cagatagtgagagat

SEQ ID NO: 1224349 - DNA, 15 bp, Homo sapiens
acagatagtgagaga

SEQ ID NO: 1224350 - DNA, 15 bp, Homo sapiens
gatccagacagatag

SEQ ID NO: 1224351 - DNA, 15 bp, Homo sapiens
cgatccagacagata

SEQ ID NO: 1224352 - DNA, 15 bp, Homo sapiens
acgatccagacagat

SEQ ID NO: 1224353 - DNA, 15 bp, Homo sapiens
tacgatccagacaga

SEQ ID NO: 1224354 - DNA, 15 bp, Homo sapiens
atacgatccagacag

SEQ ID NO: 1224355 - DNA, 15 bp, Homo sapiens
aatacgatccagaca

SEQ ID NO: 1224356 - DNA, 15 bp, Homo sapiens
gaatacgatccagac

SEQ ID NO: 1224357 - DNA, 15 bp, Homo sapiens
ggaatacgatccaga

SEQ ID NO: 1224358 - DNA, 15 bp, Homo sapiens
gggaatacgatccag

SEQ ID NO: 1224359 - DNA, 15 bp, Homo sapiens
tgggaatacgatcca

SEQ ID NO: 1224360 - DNA, 15 bp, Homo sapiens
atgggaatacgatcc

SEQ ID NO: 1224361 - DNA, 15 bp, Homo sapiens
aatgggaatacgatc

SEQ ID NO: 1224362 - DNA, 15 bp, Homo sapiens
gaatgggaatacgat

SEQ ID NO: 1224363 - DNA, 15 bp, Homo sapiens
agaatgggaatacga

SEQ ID NO: 1224364 - DNA, 15 bp, Homo sapiens
cagaatgggaatacg

SEQ ID NO: 1224365 - DNA, 15 bp, Homo sapiens
acagaatgggaatac

SEQ ID NO: 1224366 - DNA, 15 bp, Homo sapiens
cacagaatgggaata

SEQ ID NO: 1224367 - DNA, 15 bp, Homo sapiens
ccacagaatgggaat

SEQ ID NO: 1224368 - DNA, 15 bp, Homo sapiens
tccacagaatgggaa

SEQ ID NO: 1224369 - DNA, 15 bp, Homo sapiens
atccacagaatggga

SEQ ID NO: 1224370 - DNA, 15 bp, Homo sapiens
tatccacagaatggg

SEQ ID NO: 1224371 - DNA, 15 bp, Homo sapiens
ctatccacagaatgg

SEQ ID NO: 1224372 - DNA, 15 bp, Homo sapiens
tctatccacagaatg

SEQ ID NO: 1224373 - DNA, 15 bp, Homo sapiens
ttctatccacagaat

SEQ ID NO: 1224374 - DNA, 15 bp, Homo sapiens
gttctatccacagaa

SEQ ID NO: 1224375 - DNA, 15 bp, Homo sapiens
gcattgatagtgaga

SEQ ID NO: 1224376 - DNA, 15 bp, Homo sapiens
cgcattgatagtgag

SEQ ID NO: 1224377 - DNA, 15 bp, Homo sapiens
ccgcattgatagtga

SEQ ID NO: 1224378 - DNA, 15 bp, Homo sapiens
tccgcattgatagtg

SEQ ID NO: 1224379 - DNA, 15 bp, Homo sapiens
atccgcattgatagt

SEQ ID NO: 1224380 - DNA, 15 bp, Homo sapiens
tatccgcattgatag

SEQ ID NO: 1224381 - DNA, 15 bp, Homo sapiens
ctatccgcattgata

SEQ ID NO: 1224382 - DNA, 15 bp, Homo sapiens
tctatccgcattgat

SEQ ID NO: 1224383 - DNA, 15 bp, Homo sapiens
ttctatccgcattga

SEQ ID NO: 1224384 - DNA, 15 bp, Homo sapiens
attctatccgcattg

SEQ ID NO: 1224385 - DNA, 15 bp, Homo sapiens
aattctatccgcatt

SEQ ID NO: 1224386 - DNA, 15 bp, Homo sapiens
gaattctatccgcat

SEQ ID NO: 1224387 - DNA, 15 bp, Homo sapiens
agaattctatccgca

SEQ ID NO: 1224388 - DNA, 15 bp, Homo sapiens
gagaattctatccgc

SEQ ID NO: 1224389 - DNA, 15 bp, Homo sapiens
tagagttttatccag

SEQ ID NO: 1224390 - DNA, 15 bp, Homo sapiens
atagagttttatcca

SEQ ID NO: 1224391 - DNA, 15 bp, Homo sapiens
gatagagttttatcc

SEQ ID NO: 1224392 - DNA, 15 bp, Homo sapiens
agatagagttttatc

SEQ ID NO: 1224393 - DNA, 15 bp, Homo sapiens
cagatagagttttat

SEQ ID NO: 1224394 - DNA, 15 bp, Homo sapiens
acagatagagtttta

SEQ ID NO: 1224395 - DNA, 15 bp, Homo sapiens
gacagatagagtttt

SEQ ID NO: 1224396 - DNA, 15 bp, Homo sapiens
agacagatagagttt

SEQ ID NO: 1224397 - DNA, 15 bp, Homo sapiens
ctgagaattctatcc

SEQ ID NO: 1224398 - DNA, 15 bp, Homo sapiens
gctgagaattctatc

SEQ ID NO: 1224399 - DNA, 15 bp, Homo sapiens
tgctgagaattctat

SEQ ID NO: 1224400 - DNA, 15 bp, Homo sapiens
atgctgagaattcta

SEQ ID NO: 1224401 - DNA, 15 bp, Homo sapiens
gatgctgagaattct

SEQ ID NO: 1224402 - DNA, 15 bp, Homo sapiens
agatgctgagaattc

SEQ ID NO: 1224403 - DNA, 15 bp, Homo sapiens
cagatgctgagaatt

SEQ ID NO: 1224404 - DNA, 15 bp, Homo sapiens
ccagatgctgagaat

SEQ ID NO: 1224405 - DNA, 15 bp, Homo sapiens
tccagatgctgagaa

SEQ ID NO: 1224406 - DNA, 15 bp, Homo sapiens
atccagatgctgaga

SEQ ID NO: 1224407 - DNA, 15 bp, Homo sapiens
tatccagatgctgag

SEQ ID NO: 1224408 - DNA, 15 bp, Homo sapiens
ttatccagatgctga

SEQ ID NO: 1224409 - DNA, 15 bp, Homo sapiens
tttatccagatgctg

SEQ ID NO: 1224410 - DNA, 15 bp, Homo sapiens
ttttatccagatgct

SEQ ID NO: 1224411 - DNA, 15 bp, Homo sapiens
gttttatccagatgc

SEQ ID NO: 1224412 - DNA, 15 bp, Homo sapiens
ggagagttttatcca

SEQ ID NO: 1224413 - DNA, 15 bp, Homo sapiens
gggagagttttatcc

SEQ ID NO: 1224414 - DNA, 15 bp, Homo sapiens
agggagagttttatc

SEQ ID NO: 1224415 - DNA, 15 bp, Homo sapiens
cagggagagttttat

SEQ ID NO: 1224416 - DNA, 15 bp, Homo sapiens
acagggagagtttta

SEQ ID NO: 1224417 - DNA, 15 bp, Homo sapiens
gacagggagagtttt

SEQ ID NO: 1224418 - DNA, 15 bp, Homo sapiens
agacagggagagttt

SEQ ID NO: 1224419 - DNA, 15 bp, Homo sapiens
cagacagggagagtt

SEQ ID NO: 1224420 - DNA, 15 bp, Homo sapiens
acagacagggagagt

SEQ ID NO: 1224421 - DNA, 15 bp, Homo sapiens
gacagacagggagag

SEQ ID NO: 1224422 - DNA, 15 bp, Homo sapiens
agacagacagggaga

SEQ ID NO: 1224423 - DNA, 15 bp, Homo sapiens
cagacagacagggag

SEQ ID NO: 1224424 - DNA, 15 bp, Homo sapiens
ccagacagacaggga

SEQ ID NO: 1224425 - DNA, 15 bp, Homo sapiens
accagacagacaggg

SEQ ID NO: 1224426 - DNA, 15 bp, Homo sapiens
taccagacagacagg

SEQ ID NO: 1224427 - DNA, 15 bp, Homo sapiens
ctaccagacagacag

SEQ ID NO: 1224428 - DNA, 15 bp, Homo sapiens
tctaccagacagaca

SEQ ID NO: 1224429 - DNA, 15 bp, Homo sapiens
ttctaccagacagac

SEQ ID NO: 1224430 - DNA, 15 bp, Homo sapiens
atgagagttctatcc

SEQ ID NO: 1224431 - DNA, 15 bp, Homo sapiens
aatgagagttctatc

SEQ ID NO: 1224432 - DNA, 15 bp, Homo sapiens
taatgagagttctat

SEQ ID NO: 1224433 - DNA, 15 bp, Homo sapiens
ataatgagagttcta

SEQ ID NO: 1224434 - DNA, 15 bp, Homo sapiens
gataatgagagttct

SEQ ID NO: 1224435 - DNA, 15 bp, Homo sapiens
agataatgagagttc

SEQ ID NO: 1224436 - DNA, 15 bp, Homo sapiens
cagataatgagagtt

SEQ ID NO: 1224437 - DNA, 15 bp, Homo sapiens
ccagataatgagagt

SEQ ID NO: 1224438 - DNA, 15 bp, Homo sapiens
tccagataatgagag

SEQ ID NO: 1224439 - DNA, 15 bp, Homo sapiens
atccagataatgaga

SEQ ID NO: 1224440 - DNA, 15 bp, Homo sapiens
tatccagataatgag

SEQ ID NO: 1224441 - DNA, 15 bp, Homo sapiens
ctatccagataatga

SEQ ID NO: 1224442 - DNA, 15 bp, Homo sapiens
tctatccagataatg

SEQ ID NO: 1224443 - DNA, 15 bp, Homo sapiens
ttctatccagataat

SEQ ID NO: 1224444 - DNA, 15 bp, Homo sapiens
tatccagaaagatag

SEQ ID NO: 1224445 - DNA, 15 bp, Homo sapiens
ctatccagaaagata

SEQ ID NO: 1224446 - DNA, 15 bp, Homo sapiens
tctatccagaaagat

SEQ ID NO: 1224447 - DNA, 15 bp, Homo sapiens
tagttctatccagaa

SEQ ID NO: 1224448 - DNA, 15 bp, Homo sapiens
atagttctatccaga

SEQ ID NO: 1224449 - DNA, 15 bp, Homo sapiens
gatagttctatccag

SEQ ID NO: 1224450 - DNA, 15 bp, Homo sapiens
tgatagttctatcca

SEQ ID NO: 1224451 - DNA, 15 bp, Homo sapiens
gtgatagttctatcc

SEQ ID NO: 1224452 - DNA, 15 bp, Homo sapiens
ggtgatagttctatc

SEQ ID NO: 1224453 - DNA, 15 bp, Homo sapiens
gggtgatagttctat

SEQ ID NO: 1224454 - DNA, 15 bp, Homo sapiens
agggtgatagttcta

SEQ ID NO: 1224455 - DNA, 15 bp, Homo sapiens
gagggtgatagttct

SEQ ID NO: 1224456 - DNA, 15 bp, Homo sapiens
agagggtgatagttc

SEQ ID NO: 1224457 - DNA, 15 bp, Homo sapiens
cagagggtgatagtt

SEQ ID NO: 1224458 - DNA, 15 bp, Homo sapiens
ccagagggtgatagt

SEQ ID NO: 1224459 - DNA, 15 bp, Homo sapiens
tccagagggtgatag

SEQ ID NO: 1224460 - DNA, 15 bp, Homo sapiens
atccagagggtgata

SEQ ID NO: 1224461 - DNA, 15 bp, Homo sapiens
tatccagagggtgat

SEQ ID NO: 1224462 - DNA, 15 bp, Homo sapiens
ggagtgagaattcta

SEQ ID NO: 1224463 - DNA, 15 bp, Homo sapiens
gggagtgagaattct

SEQ ID NO: 1224464 - DNA, 15 bp, Homo sapiens
ggggagtgagaattc

SEQ ID NO: 1224465 - DNA, 15 bp, Homo sapiens
tggggagtgagaatt

SEQ ID NO: 1224466 - DNA, 15 bp, Homo sapiens
ctggggagtgagaat

SEQ ID NO: 1224467 - DNA, 15 bp, Homo sapiens
tctggggagtgagaa

SEQ ID NO: 1224468 - DNA, 15 bp, Homo sapiens
atctggggagtgaga

SEQ ID NO: 1224469 - DNA, 15 bp, Homo sapiens
tatctggggagtgag

SEQ ID NO: 1224470 - DNA, 15 bp, Homo sapiens
ctatctggggagtga

SEQ ID NO: 1224471 - DNA, 15 bp, Homo sapiens
actatctggggagtg

SEQ ID NO: 1224472 - DNA, 15 bp, Homo sapiens
cactatctggggagt

SEQ ID NO: 1224473 - DNA, 15 bp, Homo sapiens
ccactatctggggag

SEQ ID NO: 1224474 - DNA, 15 bp, Homo sapiens
tccactatctgggga

SEQ ID NO: 1224475 - DNA, 15 bp, Homo sapiens
gtccactatctgggg

SEQ ID NO: 1224476 - DNA, 15 bp, Homo sapiens
tgtccactatctggg

SEQ ID NO: 1224477 - DNA, 15 bp, Homo sapiens
gtgtccactatctgg

SEQ ID NO: 1224478 - DNA, 15 bp, Homo sapiens
agtgtccactatctg

SEQ ID NO: 1224479 - DNA, 15 bp, Homo sapiens
tagtgtccactatct

SEQ ID NO: 1224480 - DNA, 15 bp, Homo sapiens
atagtgtccactatc

SEQ ID NO: 1224481 - DNA, 15 bp, Homo sapiens
catagtgtccactat

SEQ ID NO: 1224482 - DNA, 15 bp, Homo sapiens
acatagtgtccacta

SEQ ID NO: 1224483 - DNA, 15 bp, Homo sapiens
gacatagtgtccact

SEQ ID NO: 1224484 - DNA, 15 bp, Homo sapiens
agacatagtgtccac

SEQ ID NO: 1224485 - DNA, 15 bp, Homo sapiens
gagacatagtgtcca

SEQ ID NO: 1224486 - DNA, 15 bp, Homo sapiens
tgagacatagtgtcc

SEQ ID NO: 1224487 - DNA, 15 bp, Homo sapiens
gtgagacatagtgtc

SEQ ID NO: 1224488 - DNA, 15 bp, Homo sapiens
agtgagacatagtgt

SEQ ID NO: 1224489 - DNA, 15 bp, Homo sapiens
tagtgagacatagtg

SEQ ID NO: 1224490 - DNA, 15 bp, Homo sapiens
atagtgagacatagt

SEQ ID NO: 1224491 - DNA, 15 bp, Homo sapiens
gatagtgagacatag

SEQ ID NO: 1224492 - DNA, 15 bp, Homo sapiens
ggatagtgagacata

SEQ ID NO: 1224493 - DNA, 15 bp, Homo sapiens
cggatagtgagacat

SEQ ID NO: 1224494 - DNA, 15 bp, Homo sapiens
ccggatagtgagaca

SEQ ID NO: 1224495 - DNA, 15 bp, Homo sapiens
tccggatagtgagac

SEQ ID NO: 1224496 - DNA, 15 bp, Homo sapiens
actatccggatagtg

SEQ ID NO: 1224497 - DNA, 15 bp, Homo sapiens
cactatccggatagt

SEQ ID NO: 1224498 - DNA, 15 bp, Homo sapiens
ccactatccggatag

SEQ ID NO: 1224499 - DNA, 15 bp, Homo sapiens
tccactatccggata

SEQ ID NO: 1224500 - DNA, 15 bp, Homo sapiens
gtccactatccggat

SEQ ID NO: 1224501 - DNA, 15 bp, Homo sapiens
tgtccactatccgga

SEQ ID NO: 1224502 - DNA, 15 bp, Homo sapiens
atgtccactatccgg

SEQ ID NO: 1224503 - DNA, 15 bp, Homo sapiens
tatgtccactatccg

SEQ ID NO: 1224504 - DNA, 15 bp, Homo sapiens
ttatgtccactatcc

SEQ ID NO: 1224505 - DNA, 15 bp, Homo sapiens
attatgtccactatc

SEQ ID NO: 1224506 - DNA, 15 bp, Homo sapiens
aattatgtccactat

SEQ ID NO: 1224507 - DNA, 15 bp, Homo sapiens
gaattatgtccacta

SEQ ID NO: 1224508 - DNA, 15 bp, Homo sapiens
agaattatgtccact

SEQ ID NO: 1224509 - DNA, 15 bp, Homo sapiens
gagaattatgtccac

SEQ ID NO: 1224510 - DNA, 15 bp, Homo sapiens
tgagaattatgtcca

SEQ ID NO: 1224511 - DNA, 15 bp, Homo sapiens
gtgagaattatgtcc

SEQ ID NO: 1224512 - DNA, 15 bp, Homo sapiens
agtgagaattatgtc

SEQ ID NO: 1224513 - DNA, 15 bp, Homo sapiens
tagtgagaattatgt

SEQ ID NO: 1224514 - DNA, 15 bp, Homo sapiens
atagtgagaattatg

SEQ ID NO: 1224515 - DNA, 15 bp, Homo sapiens
gatagtgagaattat

SEQ ID NO: 1224516 - DNA, 15 bp, Homo sapiens
ggatagtgagaatta

SEQ ID NO: 1224517 - DNA, 15 bp, Homo sapiens
cggatagtgagaatt

SEQ ID NO: 1224518 - DNA, 15 bp, Homo sapiens
ccggatagtgagaat

SEQ ID NO: 1224519 - DNA, 15 bp, Homo sapiens
tccggatagtgagaa

SEQ ID NO: 1224520 - DNA, 15 bp, Homo sapiens
tttctatccggatag

SEQ ID NO: 1224521 - DNA, 15 bp, Homo sapiens
atttctatccggata

SEQ ID NO: 1224522 - DNA, 15 bp, Homo sapiens
aatttctatccggat

SEQ ID NO: 1224523 - DNA, 15 bp, Homo sapiens
aaatttctatccgga

SEQ ID NO: 1224524 - DNA, 15 bp, Homo sapiens
gaaatttctatccgg

SEQ ID NO: 1224525 - DNA, 15 bp, Homo sapiens
tgaaatttctatccg

SEQ ID NO: 1224526 - DNA, 15 bp, Homo sapiens
gtgaaatttctatcc

SEQ ID NO: 1224527 - DNA, 15 bp, Homo sapiens
ggtgaaatttctatc

SEQ ID NO: 1224528 - DNA, 15 bp, Homo sapiens
tggtgaaatttctat

SEQ ID NO: 1224529 - DNA, 15 bp, Homo sapiens
atggtgaaatttcta

SEQ ID NO: 1224530 - DNA, 15 bp, Homo sapiens
gatggtgaaatttct

SEQ ID NO: 1224531 - DNA, 15 bp, Homo sapiens
agatggtgaaatttc

SEQ ID NO: 1224532 - DNA, 15 bp, Homo sapiens
cagatggtgaaattt

SEQ ID NO: 1224533 - DNA, 15 bp, Homo sapiens
gcagatggtgaaatt

SEQ ID NO: 1224534 - DNA, 15 bp, Homo sapiens
tgcagatggtgaaat

SEQ ID NO: 1224535 - DNA, 15 bp, Homo sapiens
atgcagatggtgaaa

SEQ ID NO: 1224536 - DNA, 15 bp, Homo sapiens
tatgcagatggtgaa

SEQ ID NO: 1224537 - DNA, 15 bp, Homo sapiens
ctatgcagatggtga

SEQ ID NO: 1224538 - DNA, 15 bp, Homo sapiens
tctatgcagatggtg

SEQ ID NO: 1224539 - DNA, 15 bp, Homo sapiens
ttctatgcagatggt

SEQ ID NO: 1224540 - DNA, 15 bp, Homo sapiens
gttctatgcagatgg

SEQ ID NO: 1224541 - DNA, 15 bp, Homo sapiens
agttctatgcagatg

SEQ ID NO: 1224542 - DNA, 15 bp, Homo sapiens
gagttctatgcagat

SEQ ID NO: 1224543 - DNA, 15 bp, Homo sapiens
cggtagtgagagttc

SEQ ID NO: 1224544 - DNA, 15 bp, Homo sapiens
ccggtagtgagagtt

SEQ ID NO: 1224545 - DNA, 15 bp, Homo sapiens
cccggtagtgagagt

SEQ ID NO: 1224546 - DNA, 15 bp, Homo sapiens
tcccggtagtgagag

SEQ ID NO: 1224547 - DNA, 15 bp, Homo sapiens
atcccggtagtgaga

SEQ ID NO: 1224548 - DNA, 15 bp, Homo sapiens
tatcccggtagtgag

SEQ ID NO: 1224549 - DNA, 15 bp, Homo sapiens
ctatcccggtagtga

SEQ ID NO: 1224550 - DNA, 15 bp, Homo sapiens
tctatcccggtagtg

SEQ ID NO: 1224551 - DNA, 15 bp, Homo sapiens
ttctatcccggtagt

SEQ ID NO: 1224552 - DNA, 15 bp, Homo sapiens
attctatcccggtag

SEQ ID NO: 1224553 - DNA, 15 bp, Homo sapiens
aattctatcccggta

SEQ ID NO: 1224554 - DNA, 15 bp, Homo sapiens
gaattctatcccggt

SEQ ID NO: 1224555 - DNA, 15 bp, Homo sapiens
agaattctatcccgg

SEQ ID NO: 1224556 - DNA, 15 bp, Homo sapiens
atgcagatggtgaga

SEQ ID NO: 1224557 - DNA, 15 bp, Homo sapiens
aatgcagatggtgag

SEQ ID NO: 1224558 - DNA, 15 bp, Homo sapiens
caatgcagatggtga

SEQ ID NO: 1224559 - DNA, 15 bp, Homo sapiens
tcaatgcagatggtg

SEQ ID NO: 1224560 - DNA, 15 bp, Homo sapiens
ttcaatgcagatggt

SEQ ID NO: 1224561 - DNA, 15 bp, Homo sapiens
tttcaatgcagatgg

SEQ ID NO: 1224562 - DNA, 15 bp, Homo sapiens
atttcaatgcagatg

SEQ ID NO: 1224563 - DNA, 15 bp, Homo sapiens
gatttcaatgcagat

SEQ ID NO: 1224564 - DNA, 15 bp, Homo sapiens
agatttcaatgcaga

SEQ ID NO: 1224565 - DNA, 15 bp, Homo sapiens
gagatttcaatgcag

SEQ ID NO: 1224566 - DNA, 15 bp, Homo sapiens
tgagatttcaatgca

SEQ ID NO: 1224567 - DNA, 15 bp, Homo sapiens
gtgagatttcaatgc

SEQ ID NO: 1224568 - DNA, 15 bp, Homo sapiens
agtgagatttcaatg

SEQ ID NO: 1224569 - DNA, 15 bp, Homo sapiens
tagtgagatttcaat

SEQ ID NO: 1224570 - DNA, 15 bp, Homo sapiens
atagtgagatttcaa

SEQ ID NO: 1224571 - DNA, 15 bp, Homo sapiens
gatagtgagatttca

SEQ ID NO: 1224572 - DNA, 15 bp, Homo sapiens
tagatagtgagattt

SEQ ID NO: 1224573 - DNA, 15 bp, Homo sapiens
atagatagtgagatt

SEQ ID NO: 1224574 - DNA, 15 bp, Homo sapiens
gatagatagtgagat

SEQ ID NO: 1224575 - DNA, 15 bp, Homo sapiens
gtgataattctatcc

SEQ ID NO: 1224576 - DNA, 15 bp, Homo sapiens
gtagatagtgagagt

SEQ ID NO: 1224577 - DNA, 15 bp, Homo sapiens
ggtagatagtgagag

SEQ ID NO: 1224578 - DNA, 15 bp, Homo sapiens
aggtagatagtgaga

SEQ ID NO: 1224579 - DNA, 15 bp, Homo sapiens
cgaggtagatagtga

SEQ ID NO: 1224580 - DNA, 15 bp, Homo sapiens
tcgaggtagatagtg

SEQ ID NO: 1224581 - DNA, 15 bp, Homo sapiens
atcgaggtagatagt

SEQ ID NO: 1224582 - DNA, 15 bp, Homo sapiens
tatcgaggtagatag

SEQ ID NO: 1224583 - DNA, 15 bp, Homo sapiens
atatcgaggtagata

SEQ ID NO: 1224584 - DNA, 15 bp, Homo sapiens
tatatcgaggtagat

SEQ ID NO: 1224585 - DNA, 15 bp, Homo sapiens
ttatatcgaggtaga

SEQ ID NO: 1224586 - DNA, 15 bp, Homo sapiens
attatatcgaggtag

SEQ ID NO: 1224587 - DNA, 15 bp, Homo sapiens
aattatatcgaggta

SEQ ID NO: 1224588 - DNA, 15 bp, Homo sapiens
gaattatatcgaggt

SEQ ID NO: 1224589 - DNA, 15 bp, Homo sapiens
agaattatatcgagg

SEQ ID NO: 1224590 - DNA, 15 bp, Homo sapiens
gagaattatatcgag

SEQ ID NO: 1224591 - DNA, 15 bp, Homo sapiens
tgagaattatatcga

SEQ ID NO: 1224592 - DNA, 15 bp, Homo sapiens
gtgagaattatatcg

SEQ ID NO: 1224593 - DNA, 15 bp, Homo sapiens
tagttctatccagag

SEQ ID NO: 1224594 - DNA, 15 bp, Homo sapiens
ctagttctatccaga

SEQ ID NO: 1224595 - DNA, 15 bp, Homo sapiens
gctagttctatccag

SEQ ID NO: 1224596 - DNA, 15 bp, Homo sapiens
tgctagttctatcca

SEQ ID NO: 1224597 - DNA, 15 bp, Homo sapiens
gtgctagttctatcc

SEQ ID NO: 1224598 - DNA, 15 bp, Homo sapiens
agtgctagttctatc

SEQ ID NO: 1224599 - DNA, 15 bp, Homo sapiens
tagtgctagttctat

SEQ ID NO: 1224600 - DNA, 15 bp, Homo sapiens
atagtgctagttcta

SEQ ID NO: 1224601 - DNA, 15 bp, Homo sapiens
catagtgctagttct

SEQ ID NO: 1224602 - DNA, 15 bp, Homo sapiens
acatagtgctagttc

SEQ ID NO: 1224603 - DNA, 15 bp, Homo sapiens
cacatagtgctagtt

SEQ ID NO: 1224604 - DNA, 15 bp, Homo sapiens
tcacatagtgctagt

SEQ ID NO: 1224605 - DNA, 15 bp, Homo sapiens
ttcacatagtgctag

SEQ ID NO: 1224606 - DNA, 15 bp, Homo sapiens
attcacatagtgcta

SEQ ID NO: 1224607 - DNA, 15 bp, Homo sapiens
tattcacatagtgct

SEQ ID NO: 1224608 - DNA, 15 bp, Homo sapiens
ctattcacatagtgc

SEQ ID NO: 1224609 - DNA, 15 bp, Homo sapiens
tctattcacatagtg

SEQ ID NO: 1224610 - DNA, 15 bp, Homo sapiens
ttctattcacatagt

SEQ ID NO: 1224611 - DNA, 15 bp, Homo sapiens
attctattcacatag

SEQ ID NO: 1224612 - DNA, 15 bp, Homo sapiens
aattctattcacata

SEQ ID NO: 1224613 - DNA, 15 bp, Homo sapiens
gaattctattcacat

SEQ ID NO: 1224614 - DNA, 15 bp, Homo sapiens
agaattctattcaca

SEQ ID NO: 1224615 - DNA, 15 bp, Homo sapiens
aagaattctattcac

SEQ ID NO: 1224616 - DNA, 15 bp, Homo sapiens
taagaattctattca

SEQ ID NO: 1224617 - DNA, 15 bp, Homo sapiens
gtaagaattctattc

SEQ ID NO: 1224618 - DNA, 15 bp, Homo sapiens
agtaagaattctatt

SEQ ID NO: 1224619 - DNA, 15 bp, Homo sapiens
acagatagcgagagt

SEQ ID NO: 1224620 - DNA, 15 bp, Homo sapiens
ttagtgagagttcta

SEQ ID NO: 1224621 - DNA, 15 bp, Homo sapiens
gttagtgagagttct

SEQ ID NO: 1224622 - DNA, 15 bp, Homo sapiens
aagagagtaagaatt

SEQ ID NO: 1224623 - DNA, 15 bp, Homo sapiens
caagagagtaagaat

SEQ ID NO: 1224624 - DNA, 15 bp, Homo sapiens
ccaagagagtaagaa

SEQ ID NO: 1224625 - DNA, 15 bp, Homo sapiens
accaagagagtaaga

SEQ ID NO: 1224626 - DNA, 15 bp, Homo sapiens
taccaagagagtaag

SEQ ID NO: 1224627 - DNA, 15 bp, Homo sapiens
ttaccaagagagtaa

SEQ ID NO: 1224628 - DNA, 15 bp, Homo sapiens
tttaccaagagagta

SEQ ID NO: 1224629 - DNA, 15 bp, Homo sapiens
ttttaccaagagagt

SEQ ID NO: 1224630 - DNA, 15 bp, Homo sapiens
tttttaccaagagag

SEQ ID NO: 1224631 - DNA, 15 bp, Homo sapiens
atttttaccaagaga

SEQ ID NO: 1224632 - DNA, 15 bp, Homo sapiens
gatttttaccaagag

SEQ ID NO: 1224633 - DNA, 15 bp, Homo sapiens
agatttttaccaaga

SEQ ID NO: 1224634 - DNA, 15 bp, Homo sapiens
gagatttttaccaag

SEQ ID NO: 1224635 - DNA, 15 bp, Homo sapiens
tgagatttttaccaa

SEQ ID NO: 1224636 - DNA, 15 bp, Homo sapiens
gtgagatttttacca

SEQ ID NO: 1224637 - DNA, 15 bp, Homo sapiens
agtgagatttttacc

SEQ ID NO: 1224638 - DNA, 15 bp, Homo sapiens
tagtgagatttttac

SEQ ID NO: 1224639 - DNA, 15 bp, Homo sapiens
atagtgagattttta

SEQ ID NO: 1224640 - DNA, 15 bp, Homo sapiens
gatagtgagattttt

SEQ ID NO: 1224641 - DNA, 15 bp, Homo sapiens
agatagtgagatttt

SEQ ID NO: 1224642 - DNA, 15 bp, Homo sapiens
aagatagtgagattt

SEQ ID NO: 1224643 - DNA, 15 bp, Homo sapiens
aaagatagtgagatt

SEQ ID NO: 1224644 - DNA, 15 bp, Homo sapiens
aagagttctatccag

SEQ ID NO: 1224645 - DNA, 15 bp, Homo sapiens
taagagttctatcca

SEQ ID NO: 1224646 - DNA, 15 bp, Homo sapiens
ttccaggtagtaaga

SEQ ID NO: 1224647 - DNA, 15 bp, Homo sapiens
tttccaggtagtaag

SEQ ID NO: 1224648 - DNA, 15 bp, Homo sapiens
ctttccaggtagtaa

SEQ ID NO: 1224649 - DNA, 15 bp, Homo sapiens
tctttccaggtagta

SEQ ID NO: 1224650 - DNA, 15 bp, Homo sapiens
ttctttccaggtagt

SEQ ID NO: 1224651 - DNA, 15 bp, Homo sapiens
gttctttccaggtag

SEQ ID NO: 1224652 - DNA, 15 bp, Homo sapiens
agttctttccaggta

SEQ ID NO: 1224653 - DNA, 15 bp, Homo sapiens
gagttctttccaggt

SEQ ID NO: 1224654 - DNA, 15 bp, Homo sapiens
agagttctttccagg

SEQ ID NO: 1224655 - DNA, 15 bp, Homo sapiens
gagagttctttccag

SEQ ID NO: 1224656 - DNA, 15 bp, Homo sapiens
tgagagttctttcca

SEQ ID NO: 1224657 - DNA, 15 bp, Homo sapiens
ctgagagttctttcc

SEQ ID NO: 1224658 - DNA, 15 bp, Homo sapiens
actgagagttctttc

SEQ ID NO: 1224659 - DNA, 15 bp, Homo sapiens
tactgagagttcttt

SEQ ID NO: 1224660 - DNA, 15 bp, Homo sapiens
atactgagagttctt

SEQ ID NO: 1224661 - DNA, 15 bp, Homo sapiens
gatactgagagttct

SEQ ID NO: 1224662 - DNA, 15 bp, Homo sapiens
agatactgagagttc

SEQ ID NO: 1224663 - DNA, 15 bp, Homo sapiens
cagatactgagagtt

SEQ ID NO: 1224664 - DNA, 15 bp, Homo sapiens
ccagatactgagagt

SEQ ID NO: 1224665 - DNA, 15 bp, Homo sapiens
gccagatactgagag

SEQ ID NO: 1224666 - DNA, 15 bp, Homo sapiens
agccagatactgaga

SEQ ID NO: 1224667 - DNA, 15 bp, Homo sapiens
tagccagatactgag

SEQ ID NO: 1224668 - DNA, 15 bp, Homo sapiens
ctagccagatactga

SEQ ID NO: 1224669 - DNA, 15 bp, Homo sapiens
tctagccagatactg

SEQ ID NO: 1224670 - DNA, 15 bp, Homo sapiens
atctagccagatact

SEQ ID NO: 1224671 - DNA, 15 bp, Homo sapiens
aatctagccagatac

SEQ ID NO: 1224672 - DNA, 15 bp, Homo sapiens
aaatctagccagata

SEQ ID NO: 1224673 - DNA, 15 bp, Homo sapiens
gaaatctagccagat

SEQ ID NO: 1224674 - DNA, 15 bp, Homo sapiens
agaaatctagccaga

SEQ ID NO: 1224675 - DNA, 15 bp, Homo sapiens
gagaaatctagccag

SEQ ID NO: 1224676 - DNA, 15 bp, Homo sapiens
tgagaaatctagcca

SEQ ID NO: 1224677 - DNA, 15 bp, Homo sapiens
gtgagaaatctagcc

SEQ ID NO: 1224678 - DNA, 15 bp, Homo sapiens
ggtgagaaatctagc

SEQ ID NO: 1224679 - DNA, 15 bp, Homo sapiens
tggtgagaaatctag

SEQ ID NO: 1224680 - DNA, 15 bp, Homo sapiens
atggtgagaaatcta

SEQ ID NO: 1224681 - DNA, 15 bp, Homo sapiens
gatggtgagaaatct

SEQ ID NO: 1224682 - DNA, 15 bp, Homo sapiens
agatggtgagaaatc

SEQ ID NO: 1224683 - DNA, 15 bp, Homo sapiens
cagatggtgagaaat

SEQ ID NO: 1224684 - DNA, 15 bp, Homo sapiens
ccagatggtgagaaa

SEQ ID NO: 1224685 - DNA, 15 bp, Homo sapiens
cccagatggtgagaa

SEQ ID NO: 1224686 - DNA, 15 bp, Homo sapiens
aagagtgagaattct

SEQ ID NO: 1224687 - DNA, 15 bp, Homo sapiens
aaagagtgagaattc

SEQ ID NO: 1224688 - DNA, 15 bp, Homo sapiens
caaagagtgagaatt

SEQ ID NO: 1224689 - DNA, 15 bp, Homo sapiens
ccaaagagtgagaat

SEQ ID NO: 1224690 - DNA, 15 bp, Homo sapiens
tccaaagagtgagaa

SEQ ID NO: 1224691 - DNA, 15 bp, Homo sapiens
atccaaagagtgaga

SEQ ID NO: 1224692 - DNA, 15 bp, Homo sapiens
tatccaaagagtgag

SEQ ID NO: 1224693 - DNA, 15 bp, Homo sapiens
ctatccaaagagtga

SEQ ID NO: 1224694 - DNA, 15 bp, Homo sapiens
tctatccaaagagtg

SEQ ID NO: 1224695 - DNA, 15 bp, Homo sapiens
ttctatccaaagagt

SEQ ID NO: 1224696 - DNA, 15 bp, Homo sapiens
gttctatccaaagag

SEQ ID NO: 1224697 - DNA, 15 bp, Homo sapiens
agttctatccaaaga

SEQ ID NO: 1224698 - DNA, 15 bp, Homo sapiens
gagttctatccaaag

SEQ ID NO: 1224699 - DNA, 15 bp, Homo sapiens
gagagttctatccaa

SEQ ID NO: 1224700 - DNA, 15 bp, Homo sapiens
ctatccagatgctga

SEQ ID NO: 1224701 - DNA, 15 bp, Homo sapiens
tctatccagatgctg

SEQ ID NO: 1224702 - DNA, 15 bp, Homo sapiens
ttctatccagatgct

SEQ ID NO: 1224703 - DNA, 15 bp, Homo sapiens
gttctatccagatgc

SEQ ID NO: 1224704 - DNA, 15 bp, Homo sapiens
actacccagatagtg

SEQ ID NO: 1224705 - DNA, 15 bp, Homo sapiens
tactacccagatagt

SEQ ID NO: 1224706 - DNA, 15 bp, Homo sapiens
atactacccagatag

SEQ ID NO: 1224707 - DNA, 15 bp, Homo sapiens
aatactacccagata

SEQ ID NO: 1224708 - DNA, 15 bp, Homo sapiens
gaatactacccagat

SEQ ID NO: 1224709 - DNA, 15 bp, Homo sapiens
agaatactacccaga

SEQ ID NO: 1224710 - DNA, 15 bp, Homo sapiens
gagaatactacccag

SEQ ID NO: 1224711 - DNA, 15 bp, Homo sapiens
tgagaatactaccca

SEQ ID NO: 1224712 - DNA, 15 bp, Homo sapiens
gtgagaatactaccc

SEQ ID NO: 1224713 - DNA, 15 bp, Homo sapiens
agtgagaatactacc

SEQ ID NO: 1224714 - DNA, 15 bp, Homo sapiens
gagtgagaatactac

SEQ ID NO: 1224715 - DNA, 15 bp, Homo sapiens
agagtgagaatacta

SEQ ID NO: 1224716 - DNA, 15 bp, Homo sapiens
gagagtgagaatact

SEQ ID NO: 1224717 - DNA, 15 bp, Homo sapiens
agagagtgagaatac

SEQ ID NO: 1224718 - DNA, 15 bp, Homo sapiens
aagagagtgagaata

SEQ ID NO: 1224719 - DNA, 15 bp, Homo sapiens
caagagagtgagaat

SEQ ID NO: 1224720 - DNA, 15 bp, Homo sapiens
ccaagagagtgagaa

SEQ ID NO: 1224721 - DNA, 15 bp, Homo sapiens
accaagagagtgaga

SEQ ID NO: 1224722 - DNA, 15 bp, Homo sapiens
taccaagagagtgag

SEQ ID NO: 1224723 - DNA, 15 bp, Homo sapiens
ctaccaagagagtga

SEQ ID NO: 1224724 - DNA, 15 bp, Homo sapiens
tctaccaagagagtg

SEQ ID NO: 1224725 - DNA, 15 bp, Homo sapiens
ttctaccaagagagt

SEQ ID NO: 1224726 - DNA, 15 bp, Homo sapiens
gttctaccaagagag

SEQ ID NO: 1224727 - DNA, 15 bp, Homo sapiens
agttctaccaagaga

SEQ ID NO: 1224728 - DNA, 15 bp, Homo sapiens
gagttctaccaagag

SEQ ID NO: 1224729 - DNA, 15 bp, Homo sapiens
agagttctaccaaga

SEQ ID NO: 1224730 - DNA, 15 bp, Homo sapiens
gagagttctaccaag

SEQ ID NO: 1224731 - DNA, 15 bp, Homo sapiens
tgagagttctaccaa

SEQ ID NO: 1224732 - DNA, 15 bp, Homo sapiens
gtgagagttctacca

SEQ ID NO: 1224733 - DNA, 15 bp, Homo sapiens
ttgtgagaattctat

SEQ ID NO: 1224734 - DNA, 15 bp, Homo sapiens
attgtgagaattcta

SEQ ID NO: 1224735 - DNA, 15 bp, Homo sapiens
gattgtgagaattct

SEQ ID NO: 1224736 - DNA, 15 bp, Homo sapiens
agattgtgagaattc

SEQ ID NO: 1224737 - DNA, 15 bp, Homo sapiens
cagattgtgagaatt

SEQ ID NO: 1224738 - DNA, 15 bp, Homo sapiens
ccagattgtgagaat

SEQ ID NO: 1224739 - DNA, 15 bp, Homo sapiens
tccagattgtgagaa

SEQ ID NO: 1224740 - DNA, 15 bp, Homo sapiens
cttctatccagattg

SEQ ID NO: 1224741 - DNA, 15 bp, Homo sapiens
acttctatccagatt

SEQ ID NO: 1224742 - DNA, 15 bp, Homo sapiens
cagtaagacttctat

SEQ ID NO: 1224743 - DNA, 15 bp, Homo sapiens
acagtaagacttcta

SEQ ID NO: 1224744 - DNA, 15 bp, Homo sapiens
cacagtaagacttct

SEQ ID NO: 1224745 - DNA, 15 bp, Homo sapiens
acacagtaagacttc

SEQ ID NO: 1224746 - DNA, 15 bp, Homo sapiens
tacacagtaagactt

SEQ ID NO: 1224747 - DNA, 15 bp, Homo sapiens
atacacagtaagact

SEQ ID NO: 1224748 - DNA, 15 bp, Homo sapiens
gatacacagtaagac

SEQ ID NO: 1224749 - DNA, 15 bp, Homo sapiens
agatacacagtaaga

SEQ ID NO: 1224750 - DNA, 15 bp, Homo sapiens
cagatacacagtaag

SEQ ID NO: 1224751 - DNA, 15 bp, Homo sapiens
ccagatacacagtaa

SEQ ID NO: 1224752 - DNA, 15 bp, Homo sapiens
tccagatacacagta

SEQ ID NO: 1224753 - DNA, 15 bp, Homo sapiens
atccagatacacagt

SEQ ID NO: 1224754 - DNA, 15 bp, Homo sapiens
tatccagatacacag

SEQ ID NO: 1224755 - DNA, 15 bp, Homo sapiens
ctatccagatacaca

SEQ ID NO: 1224756 - DNA, 15 bp, Homo sapiens
tctatccagatacac

SEQ ID NO: 1224757 - DNA, 15 bp, Homo sapiens
ttctatccagataca

SEQ ID NO: 1224758 - DNA, 15 bp, Homo sapiens
aaattctatccagat

SEQ ID NO: 1224759 - DNA, 15 bp, Homo sapiens
aaaattctatccaga

SEQ ID NO: 1224760 - DNA, 15 bp, Homo sapiens
agtgaaaattctatc

SEQ ID NO: 1224761 - DNA, 15 bp, Homo sapiens
gagtgaaaattctat

SEQ ID NO: 1224762 - DNA, 15 bp, Homo sapiens
cagagagtgaaaatt

SEQ ID NO: 1224763 - DNA, 15 bp, Homo sapiens
ccagagagtgaaaat

SEQ ID NO: 1224764 - DNA, 15 bp, Homo sapiens
tccagagagtgaaaa

SEQ ID NO: 1224765 - DNA, 15 bp, Homo sapiens
atccagagagtgaaa

SEQ ID NO: 1224766 - DNA, 15 bp, Homo sapiens
tatccagagagtgaa

SEQ ID NO: 1224767 - DNA, 15 bp, Homo sapiens
tatagatagtgagag

SEQ ID NO: 1224768 - DNA, 15 bp, Homo sapiens
atatagatagtgaga

SEQ ID NO: 1224769 - DNA, 15 bp, Homo sapiens
ctccatatagatagt

SEQ ID NO: 1224770 - DNA, 15 bp, Homo sapiens
tctccatatagatag

SEQ ID NO: 1224771 - DNA, 15 bp, Homo sapiens
ctctccatatagata

SEQ ID NO: 1224772 - DNA, 15 bp, Homo sapiens
tctctccatatagat

SEQ ID NO: 1224773 - DNA, 15 bp, Homo sapiens
ttctctccatataga

SEQ ID NO: 1224774 - DNA, 15 bp, Homo sapiens
attctctccatatag

SEQ ID NO: 1224775 - DNA, 15 bp, Homo sapiens
aattctctccatata

SEQ ID NO: 1224776 - DNA, 15 bp, Homo sapiens
taattctctccatat

SEQ ID NO: 1224777 - DNA, 15 bp, Homo sapiens
ataattctctccata

SEQ ID NO: 1224778 - DNA, 15 bp, Homo sapiens
gataattctctccat

SEQ ID NO: 1224779 - DNA, 15 bp, Homo sapiens
tgataattctctcca

SEQ ID NO: 1224780 - DNA, 15 bp, Homo sapiens
gtgataattctctcc

SEQ ID NO: 1224781 - DNA, 15 bp, Homo sapiens
ggtgataattctctc

SEQ ID NO: 1224782 - DNA, 15 bp, Homo sapiens
tggtgataattctct

SEQ ID NO: 1224783 - DNA, 15 bp, Homo sapiens
ttggtgataattctc

SEQ ID NO: 1224784 - DNA, 15 bp, Homo sapiens
gttggtgataattct

SEQ ID NO: 1224785 - DNA, 15 bp, Homo sapiens
agttggtgataattc

SEQ ID NO: 1224786 - DNA, 15 bp, Homo sapiens
cagttggtgataatt

SEQ ID NO: 1224787 - DNA, 15 bp, Homo sapiens
acagttggtgataat

SEQ ID NO: 1224788 - DNA, 15 bp, Homo sapiens
tacagttggtgataa

SEQ ID NO: 1224789 - DNA, 15 bp, Homo sapiens
atacagttggtgata

SEQ ID NO: 1224790 - DNA, 15 bp, Homo sapiens
tatacagttggtgat

SEQ ID NO: 1224791 - DNA, 15 bp, Homo sapiens
ctatacagttggtga

SEQ ID NO: 1224792 - DNA, 15 bp, Homo sapiens
tctatacagttggtg

SEQ ID NO: 1224793 - DNA, 15 bp, Homo sapiens
ttctatacagttggt

SEQ ID NO: 1224794 - DNA, 15 bp, Homo sapiens
gttctatacagttgg

SEQ ID NO: 1224795 - DNA, 15 bp, Homo sapiens
agttctatacagttg

SEQ ID NO: 1224796 - DNA, 15 bp, Homo sapiens
gagttctatacagtt

SEQ ID NO: 1224797 - DNA, 15 bp, Homo sapiens
tagcgagaattctat

SEQ ID NO: 1224798 - DNA, 15 bp, Homo sapiens
atagcgagaattcta

SEQ ID NO: 1224799 - DNA, 15 bp, Homo sapiens
gatagcgagaattct

SEQ ID NO: 1224800 - DNA, 15 bp, Homo sapiens
agatagcgagaattc

SEQ ID NO: 1224801 - DNA, 15 bp, Homo sapiens
cagatagcgagaatt

SEQ ID NO: 1224802 - DNA, 15 bp, Homo sapiens
acagatagcgagaat

SEQ ID NO: 1224803 - DNA, 15 bp, Homo sapiens
gacagatagcgagaa

SEQ ID NO: 1224804 - DNA, 15 bp, Homo sapiens
cagagtaagaattct

SEQ ID NO: 1224805 - DNA, 15 bp, Homo sapiens
tcagagtaagaattc

SEQ ID NO: 1224806 - DNA, 15 bp, Homo sapiens
ttcagagtaagaatt

SEQ ID NO: 1224807 - DNA, 15 bp, Homo sapiens
attcagagtaagaat

SEQ ID NO: 1224808 - DNA, 15 bp, Homo sapiens
tattcagagtaagaa

SEQ ID NO: 1224809 - DNA, 15 bp, Homo sapiens
ttattcagagtaaga

SEQ ID NO: 1224810 - DNA, 15 bp, Homo sapiens
tttattcagagtaag

SEQ ID NO: 1224811 - DNA, 15 bp, Homo sapiens
ttttattcagagtaa

SEQ ID NO: 1224812 - DNA, 15 bp, Homo sapiens
gttttattcagagta

SEQ ID NO: 1224813 - DNA, 15 bp, Homo sapiens
agttttattcagagt

SEQ ID NO: 1224814 - DNA, 15 bp, Homo sapiens
gagttttattcagag

SEQ ID NO: 1224815 - DNA, 15 bp, Homo sapiens
agagttttattcaga

SEQ ID NO: 1224816 - DNA, 15 bp, Homo sapiens
gagagttttattcag

SEQ ID NO: 1224817 - DNA, 15 bp, Homo sapiens
tgagagttttattca

SEQ ID NO: 1224818 - DNA, 15 bp, Homo sapiens
gtgagagttttattc

SEQ ID NO: 1224819 - DNA, 15 bp, Homo sapiens
agtgagagttttatt

SEQ ID NO: 1224820 - DNA, 15 bp, Homo sapiens
catagtgagagtttt

SEQ ID NO: 1224821 - DNA, 15 bp, Homo sapiens
acatagtgagagttt

SEQ ID NO: 1224822 - DNA, 15 bp, Homo sapiens
aacatagtgagagtt

SEQ ID NO: 1224823 - DNA, 15 bp, Homo sapiens
aaacatagtgagagt

SEQ ID NO: 1224824 - DNA, 15 bp, Homo sapiens
gaaacatagtgagag

SEQ ID NO: 1224825 - DNA, 15 bp, Homo sapiens
agaaacatagtgaga

SEQ ID NO: 1224826 - DNA, 15 bp, Homo sapiens
cagaaacatagtgag

SEQ ID NO: 1224827 - DNA, 15 bp, Homo sapiens
ccagaaacatagtga

SEQ ID NO: 1224828 - DNA, 15 bp, Homo sapiens
tccagaaacatagtg

SEQ ID NO: 1224829 - DNA, 15 bp, Homo sapiens
atccagaaacatagt

SEQ ID NO: 1224830 - DNA, 15 bp, Homo sapiens
tatccagaaacatag

SEQ ID NO: 1224831 - DNA, 15 bp, Homo sapiens
ctatccagaaacata

SEQ ID NO: 1224832 - DNA, 15 bp, Homo sapiens
tctatccagaaacat

SEQ ID NO: 1224833 - DNA, 15 bp, Homo sapiens
ttctatccagaaaca

SEQ ID NO: 1224834 - DNA, 15 bp, Homo sapiens
gttctatccagaaac

SEQ ID NO: 1224835 - DNA, 15 bp, Homo sapiens
gtttccaggtagtaa

SEQ ID NO: 1224836 - DNA, 15 bp, Homo sapiens
tgtttccaggtagta

SEQ ID NO: 1224837 - DNA, 15 bp, Homo sapiens
ttgtttccaggtagt

SEQ ID NO: 1224838 - DNA, 15 bp, Homo sapiens
gttgtttccaggtag

SEQ ID NO: 1224839 - DNA, 15 bp, Homo sapiens
agttgtttccaggta

SEQ ID NO: 1224840 - DNA, 15 bp, Homo sapiens
gagttgtttccaggt

SEQ ID NO: 1224841 - DNA, 15 bp, Homo sapiens
agagttgtttccagg

SEQ ID NO: 1224842 - DNA, 15 bp, Homo sapiens
gagagttgtttccag

SEQ ID NO: 1224843 - DNA, 15 bp, Homo sapiens
tgagagttgtttcca

SEQ ID NO: 1224844 - DNA, 15 bp, Homo sapiens
gtgagagttgtttcc

SEQ ID NO: 1224845 - DNA, 15 bp, Homo sapiens
agtgagagttgtttc

SEQ ID NO: 1224846 - DNA, 15 bp, Homo sapiens
tagtgagagttgttt

SEQ ID NO: 1224847 - DNA, 15 bp, Homo sapiens
atagtgagagttgtt

SEQ ID NO: 1224848 - DNA, 15 bp, Homo sapiens
tatagtgagagttgt

SEQ ID NO: 1224849 - DNA, 15 bp, Homo sapiens
atatagtgagagttg

SEQ ID NO: 1224850 - DNA, 15 bp, Homo sapiens
catatagtgagagtt

SEQ ID NO: 1224851 - DNA, 15 bp, Homo sapiens
ccatatagtgagagt

SEQ ID NO: 1224852 - DNA, 15 bp, Homo sapiens
tccatatagtgagag

SEQ ID NO: 1224853 - DNA, 15 bp, Homo sapiens
atccatatagtgaga

SEQ ID NO: 1224854 - DNA, 15 bp, Homo sapiens
tatccatatagtgag

SEQ ID NO: 1224855 - DNA, 15 bp, Homo sapiens
ctatccatatagtga

SEQ ID NO: 1224856 - DNA, 15 bp, Homo sapiens
actatccatatagtg

SEQ ID NO: 1224857 - DNA, 15 bp, Homo sapiens
tactatccatatagt

SEQ ID NO: 1224858 - DNA, 15 bp, Homo sapiens
atactatccatatag

SEQ ID NO: 1224859 - DNA, 15 bp, Homo sapiens
aatactatccatata

SEQ ID NO: 1224860 - DNA, 15 bp, Homo sapiens
gaatactatccatat

SEQ ID NO: 1224861 - DNA, 15 bp, Homo sapiens
agaatactatccata

SEQ ID NO: 1224862 - DNA, 15 bp, Homo sapiens
gagaatactatccat

SEQ ID NO: 1224863 - DNA, 15 bp, Homo sapiens
tgagaatactatcca

SEQ ID NO: 1224864 - DNA, 15 bp, Homo sapiens
gtgagaatactatcc

SEQ ID NO: 1224865 - DNA, 15 bp, Homo sapiens
agtgagaatactatc

SEQ ID NO: 1224866 - DNA, 15 bp, Homo sapiens
tagtgagaatactat

SEQ ID NO: 1224867 - DNA, 15 bp, Homo sapiens
atagtgagaatacta

SEQ ID NO: 1224868 - DNA, 15 bp, Homo sapiens
gatagtgagaatact

SEQ ID NO: 1224869 - DNA, 15 bp, Homo sapiens
agatagtgagaatac

SEQ ID NO: 1224870 - DNA, 15 bp, Homo sapiens
cagatagtgagaata

SEQ ID NO: 1224871 - DNA, 15 bp, Homo sapiens
ttagatagtgagaat

SEQ ID NO: 1224872 - DNA, 15 bp, Homo sapiens
gttagatagtgagaa

SEQ ID NO: 1224873 - DNA, 15 bp, Homo sapiens
agttagatagtgaga

SEQ ID NO: 1224874 - DNA, 15 bp, Homo sapiens
cagttagatagtgag

SEQ ID NO: 1224875 - DNA, 15 bp, Homo sapiens
ccagttagatagtga

SEQ ID NO: 1224876 - DNA, 15 bp, Homo sapiens
tccagttagatagtg

SEQ ID NO: 1224877 - DNA, 15 bp, Homo sapiens
atccagttagatagt

SEQ ID NO: 1224878 - DNA, 15 bp, Homo sapiens
tatccagttagatag

SEQ ID NO: 1224879 - DNA, 15 bp, Homo sapiens
ctatccagttagata

SEQ ID NO: 1224880 - DNA, 15 bp, Homo sapiens
tctatccagttagat

SEQ ID NO: 1224881 - DNA, 15 bp, Homo sapiens
ttctatccagttaga

SEQ ID NO: 1224882 - DNA, 15 bp, Homo sapiens
tattctatccagtta

SEQ ID NO: 1224883 - DNA, 15 bp, Homo sapiens
ctattctatccagtt

SEQ ID NO: 1224884 - DNA, 15 bp, Homo sapiens
tctattctatccagt

SEQ ID NO: 1224885 - DNA, 15 bp, Homo sapiens
ttctattctatccag

SEQ ID NO: 1224886 - DNA, 15 bp, Homo sapiens
attctattctatcca

SEQ ID NO: 1224887 - DNA, 15 bp, Homo sapiens
aattctattctatcc

SEQ ID NO: 1224888 - DNA, 15 bp, Homo sapiens
gaattctattctatc

SEQ ID NO: 1224889 - DNA, 15 bp, Homo sapiens
agaattctattctat

SEQ ID NO: 1224890 - DNA, 15 bp, Homo sapiens
gagaattctattcta

SEQ ID NO: 1224891 - DNA, 15 bp, Homo sapiens
tgagaattctattct

SEQ ID NO: 1224892 - DNA, 15 bp, Homo sapiens
cgtgagagttctatc

SEQ ID NO: 1224893 - DNA, 15 bp, Homo sapiens
tcgtgagagttctat

SEQ ID NO: 1224894 - DNA, 15 bp, Homo sapiens
atcgtgagagttcta

SEQ ID NO: 1224895 - DNA, 15 bp, Homo sapiens
gatcgtgagagttct

SEQ ID NO: 1224896 - DNA, 15 bp, Homo sapiens
agatcgtgagagttc

SEQ ID NO: 1224897 - DNA, 15 bp, Homo sapiens
cagatcgtgagagtt

SEQ ID NO: 1224898 - DNA, 15 bp, Homo sapiens
ccagatcgtgagagt

SEQ ID NO: 1224899 - DNA, 15 bp, Homo sapiens
cccagatcgtgagag

SEQ ID NO: 1224900 - DNA, 15 bp, Homo sapiens
acccagatcgtgaga

SEQ ID NO: 1224901 - DNA, 15 bp, Homo sapiens
tacccagatcgtgag

SEQ ID NO: 1224902 - DNA, 15 bp, Homo sapiens
ctacccagatcgtga

SEQ ID NO: 1224903 - DNA, 15 bp, Homo sapiens
tctacccagatcgtg

SEQ ID NO: 1224904 - DNA, 15 bp, Homo sapiens
ttctacccagatcgt

SEQ ID NO: 1224905 - DNA, 15 bp, Homo sapiens
attctacccagatcg

SEQ ID NO: 1224906 - DNA, 15 bp, Homo sapiens
aattctacccagatc

SEQ ID NO: 1224907 - DNA, 15 bp, Homo sapiens
tagaattctacccag

SEQ ID NO: 1224908 - DNA, 15 bp, Homo sapiens
ttagaattctaccca

SEQ ID NO: 1224909 - DNA, 15 bp, Homo sapiens
cttagaattctaccc

SEQ ID NO: 1224910 - DNA, 15 bp, Homo sapiens
acttagaattctacc

SEQ ID NO: 1224911 - DNA, 15 bp, Homo sapiens
gacttagaattctac

SEQ ID NO: 1224912 - DNA, 15 bp, Homo sapiens
agacttagaattcta

SEQ ID NO: 1224913 - DNA, 15 bp, Homo sapiens
gagacttagaattct

SEQ ID NO: 1224914 - DNA, 15 bp, Homo sapiens
agagacttagaattc

SEQ ID NO: 1224915 - DNA, 15 bp, Homo sapiens
aagagacttagaatt

SEQ ID NO: 1224916 - DNA, 15 bp, Homo sapiens
caagagacttagaat

SEQ ID NO: 1224917 - DNA, 15 bp, Homo sapiens
ccaagagacttagaa

SEQ ID NO: 1224918 - DNA, 15 bp, Homo sapiens
accaagagacttaga

SEQ ID NO: 1224919 - DNA, 15 bp, Homo sapiens
taccaagagacttag

SEQ ID NO: 1224920 - DNA, 15 bp, Homo sapiens
ctaccaagagactta

SEQ ID NO: 1224921 - DNA, 15 bp, Homo sapiens
tctaccaagagactt

SEQ ID NO: 1224922 - DNA, 15 bp, Homo sapiens
ttctaccaagagact

SEQ ID NO: 1224923 - DNA, 15 bp, Homo sapiens
gttctaccaagagac

SEQ ID NO: 1224924 - DNA, 15 bp, Homo sapiens
acagagagatagtga

SEQ ID NO: 1224925 - DNA, 15 bp, Homo sapiens
cacagagagatagtg

SEQ ID NO: 1224926 - DNA, 15 bp, Homo sapiens
acacagagagatagt

SEQ ID NO: 1224927 - DNA, 15 bp, Homo sapiens
tacacagagagatag

SEQ ID NO: 1224928 - DNA, 15 bp, Homo sapiens
ctacacagagagata

SEQ ID NO: 1224929 - DNA, 15 bp, Homo sapiens
tctacacagagagat

SEQ ID NO: 1224930 - DNA, 15 bp, Homo sapiens
ttctacacagagaga

SEQ ID NO: 1224931 - DNA, 15 bp, Homo sapiens
attctacacagagag

SEQ ID NO: 1224932 - DNA, 15 bp, Homo sapiens
aattctacacagaga

SEQ ID NO: 1224933 - DNA, 15 bp, Homo sapiens
gaattctacacagag

SEQ ID NO: 1224934 - DNA, 15 bp, Homo sapiens
cagaattctacacag

SEQ ID NO: 1224935 - DNA, 15 bp, Homo sapiens
tcagaattctacaca

SEQ ID NO: 1224936 - DNA, 15 bp, Homo sapiens
atcagaattctacac

SEQ ID NO: 1224937 - DNA, 15 bp, Homo sapiens
tatcagaattctaca

SEQ ID NO: 1224938 - DNA, 15 bp, Homo sapiens
ttatcagaattctac

SEQ ID NO: 1224939 - DNA, 15 bp, Homo sapiens
attatcagaattcta

SEQ ID NO: 1224940 - DNA, 15 bp, Homo sapiens
gattatcagaattct

SEQ ID NO: 1224941 - DNA, 15 bp, Homo sapiens
agattatcagaattc

SEQ ID NO: 1224942 - DNA, 15 bp, Homo sapiens
cagattatcagaatt

SEQ ID NO: 1224943 - DNA, 15 bp, Homo sapiens
ccagattatcagaat

SEQ ID NO: 1224944 - DNA, 15 bp, Homo sapiens
accagattatcagaa

SEQ ID NO: 1224945 - DNA, 15 bp, Homo sapiens
aaccagattatcaga

SEQ ID NO: 1224946 - DNA, 15 bp, Homo sapiens
taaccagattatcag

SEQ ID NO: 1224947 - DNA, 15 bp, Homo sapiens
ctaaccagattatca

SEQ ID NO: 1224948 - DNA, 15 bp, Homo sapiens
gctaaccagattatc

SEQ ID NO: 1224949 - DNA, 15 bp, Homo sapiens
tgctaaccagattat

SEQ ID NO: 1224950 - DNA, 15 bp, Homo sapiens
gtgctaaccagatta

SEQ ID NO: 1224951 - DNA, 15 bp, Homo sapiens
agtgctaaccagatt

SEQ ID NO: 1224952 - DNA, 15 bp, Homo sapiens
gagtgctaaccagat

SEQ ID NO: 1224953 - DNA, 15 bp, Homo sapiens
agagtgctaaccaga

SEQ ID NO: 1224954 - DNA, 15 bp, Homo sapiens
aagagtgctaaccag

SEQ ID NO: 1224955 - DNA, 15 bp, Homo sapiens
taagagtgctaacca

SEQ ID NO: 1224956 - DNA, 15 bp, Homo sapiens
gtaagagtgctaacc

SEQ ID NO: 1224957 - DNA, 15 bp, Homo sapiens
agtaagagtgctaac

SEQ ID NO: 1224958 - DNA, 15 bp, Homo sapiens
tagtaagagtgctaa

SEQ ID NO: 1224959 - DNA, 15 bp, Homo sapiens
ttagtaagagtgcta

SEQ ID NO: 1224960 - DNA, 15 bp, Homo sapiens
gttagtaagagtgct

SEQ ID NO: 1224961 - DNA, 15 bp, Homo sapiens
agttagtaagagtgc

SEQ ID NO: 1224962 - DNA, 15 bp, Homo sapiens
cagttagtaagagtg

SEQ ID NO: 1224963 - DNA, 15 bp, Homo sapiens
acagttagtaagagt

SEQ ID NO: 1224964 - DNA, 15 bp, Homo sapiens
gacagttagtaagag

SEQ ID NO: 1224965 - DNA, 15 bp, Homo sapiens
agacagttagtaaga

SEQ ID NO: 1224966 - DNA, 15 bp, Homo sapiens
cagacagttagtaag

SEQ ID NO: 1224967 - DNA, 15 bp, Homo sapiens
ccagacagttagtaa

SEQ ID NO: 1224968 - DNA, 15 bp, Homo sapiens
tccagacagttagta

SEQ ID NO: 1224969 - DNA, 15 bp, Homo sapiens
tagacagagagtgag

SEQ ID NO: 1224970 - DNA, 15 bp, Homo sapiens
ctagacagagagtga

SEQ ID NO: 1224971 - DNA, 15 bp, Homo sapiens
cctagacagagagtg

SEQ ID NO: 1224972 - DNA, 15 bp, Homo sapiens
acctagacagagagt

SEQ ID NO: 1224973 - DNA, 15 bp, Homo sapiens
tacctagacagagag

SEQ ID NO: 1224974 - DNA, 15 bp, Homo sapiens
ctacctagacagaga

SEQ ID NO: 1224975 - DNA, 15 bp, Homo sapiens
tctacctagacagag

SEQ ID NO: 1224976 - DNA, 15 bp, Homo sapiens
ttctacctagacaga

SEQ ID NO: 1224977 - DNA, 15 bp, Homo sapiens
attctacctagacag

SEQ ID NO: 1224978 - DNA, 15 bp, Homo sapiens
aattctacctagaca

SEQ ID NO: 1224979 - DNA, 15 bp, Homo sapiens
aaattctacctagac

SEQ ID NO: 1224980 - DNA, 15 bp, Homo sapiens
aaaattctacctaga

SEQ ID NO: 1224981 - DNA, 15 bp, Homo sapiens
gaaaattctacctag

SEQ ID NO: 1224982 - DNA, 15 bp, Homo sapiens
tgaaaattctaccta

SEQ ID NO: 1224983 - DNA, 15 bp, Homo sapiens
gtgaaaattctacct

SEQ ID NO: 1224984 - DNA, 15 bp, Homo sapiens
ggtgaaaattctacc

SEQ ID NO: 1224985 - DNA, 15 bp, Homo sapiens
tggtgaaaattctac

SEQ ID NO: 1224986 - DNA, 15 bp, Homo sapiens
ttccagatggtgaaa

SEQ ID NO: 1224987 - DNA, 15 bp, Homo sapiens
tttccagatggtgaa

SEQ ID NO: 1224988 - DNA, 15 bp, Homo sapiens
gtttccagatggtga

SEQ ID NO: 1224989 - DNA, 15 bp, Homo sapiens
tgtttccagatggtg

SEQ ID NO: 1224990 - DNA, 15 bp, Homo sapiens
ttgtttccagatggt

SEQ ID NO: 1224991 - DNA, 15 bp, Homo sapiens
gttgtttccagatgg

SEQ ID NO: 1224992 - DNA, 15 bp, Homo sapiens
agttgtttccagatg

SEQ ID NO: 1224993 - DNA, 15 bp, Homo sapiens
gagttgtttccagat

SEQ ID NO: 1224994 - DNA, 15 bp, Homo sapiens
agagttgtttccaga

SEQ ID NO: 1224995 - DNA, 15 bp, Homo sapiens
aagagttgtttccag

SEQ ID NO: 1224996 - DNA, 15 bp, Homo sapiens
taagagttgtttcca

SEQ ID NO: 1224997 - DNA, 15 bp, Homo sapiens
gtaagagttgtttcc

SEQ ID NO: 1224998 - DNA, 15 bp, Homo sapiens
tgtaagagttgtttc

SEQ ID NO: 1224999 - DNA, 15 bp, Homo sapiens
ttgtaagagttgttt

SEQ ID NO: 1225000 - DNA, 15 bp, Homo sapiens
attgtaagagttgtt

SEQ ID NO: 1225001 - DNA, 15 bp, Homo sapiens
gattgtaagagttgt

SEQ ID NO: 1225002 - DNA, 15 bp, Homo sapiens
agattgtaagagttg

SEQ ID NO: 1225003 - DNA, 15 bp, Homo sapiens
cagattgtaagagtt

SEQ ID NO: 1225004 - DNA, 15 bp, Homo sapiens
ccagattgtaagagt

SEQ ID NO: 1225005 - DNA, 15 bp, Homo sapiens
tccagattgtaagag

SEQ ID NO: 1225006 - DNA, 15 bp, Homo sapiens
atccagattgtaaga

SEQ ID NO: 1225007 - DNA, 15 bp, Homo sapiens
tatccagattgtaag

SEQ ID NO: 1225008 - DNA, 15 bp, Homo sapiens
ctatccagattgtaa

SEQ ID NO: 1225009 - DNA, 15 bp, Homo sapiens
cctatccagattgta

SEQ ID NO: 1225010 - DNA, 15 bp, Homo sapiens
tcctatccagattgt

SEQ ID NO: 1225011 - DNA, 15 bp, Homo sapiens
atcctatccagattg

SEQ ID NO: 1225012 - DNA, 15 bp, Homo sapiens
aatcctatccagatt

SEQ ID NO: 1225013 - DNA, 15 bp, Homo sapiens
gaatcctatccagat

SEQ ID NO: 1225014 - DNA, 15 bp, Homo sapiens
agaatcctatccaga

SEQ ID NO: 1225015 - DNA, 15 bp, Homo sapiens
gagaatcctatccag

SEQ ID NO: 1225016 - DNA, 15 bp, Homo sapiens
tgagaatcctatcca

SEQ ID NO: 1225017 - DNA, 15 bp, Homo sapiens
gtgagaatcctatcc

SEQ ID NO: 1225018 - DNA, 15 bp, Homo sapiens
agtgagaatcctatc

SEQ ID NO: 1225019 - DNA, 15 bp, Homo sapiens
gagtgagaatcctat

SEQ ID NO: 1225020 - DNA, 15 bp, Homo sapiens
agagtgagaatccta

SEQ ID NO: 1225021 - DNA, 15 bp, Homo sapiens
gagagtgagaatcct

SEQ ID NO: 1225022 - DNA, 15 bp, Homo sapiens
agagagtgagaatcc

SEQ ID NO: 1225023 - DNA, 15 bp, Homo sapiens
cagagagtgagaatc

SEQ ID NO: 1225024 - DNA, 15 bp, Homo sapiens
atagtaagagttcta

SEQ ID NO: 1225025 - DNA, 15 bp, Homo sapiens
gatagtaagagttct

SEQ ID NO: 1225026 - DNA, 15 bp, Homo sapiens
tgatagtaagagttc

SEQ ID NO: 1225027 - DNA, 15 bp, Homo sapiens
ttgatagtaagagtt

SEQ ID NO: 1225028 - DNA, 15 bp, Homo sapiens
attgatagtaagagt

SEQ ID NO: 1225029 - DNA, 15 bp, Homo sapiens
gattgatagtaagag

SEQ ID NO: 1225030 - DNA, 15 bp, Homo sapiens
acagacagtgagaat

SEQ ID NO: 1225031 - DNA, 15 bp, Homo sapiens
tacagacagtgagaa

SEQ ID NO: 1225032 - DNA, 15 bp, Homo sapiens
atacagacagtgaga

SEQ ID NO: 1225033 - DNA, 15 bp, Homo sapiens
tatacagacagtgag

SEQ ID NO: 1225034 - DNA, 15 bp, Homo sapiens
ctatacagacagtga

SEQ ID NO: 1225035 - DNA, 15 bp, Homo sapiens
tctatacagacagtg

SEQ ID NO: 1225036 - DNA, 15 bp, Homo sapiens
ttctatacagacagt

SEQ ID NO: 1225037 - DNA, 15 bp, Homo sapiens
gttctatacagacag

SEQ ID NO: 1225038 - DNA, 15 bp, Homo sapiens
agttctatacagaca

SEQ ID NO: 1225039 - DNA, 15 bp, Homo sapiens
gagttctatacagac

SEQ ID NO: 1225040 - DNA, 15 bp, Homo sapiens
atctatccagatagt

SEQ ID NO: 1225041 - DNA, 15 bp, Homo sapiens
aatctatccagatag

SEQ ID NO: 1225042 - DNA, 15 bp, Homo sapiens
aaatctatccagata

SEQ ID NO: 1225043 - DNA, 15 bp, Homo sapiens
gaaatctatccagat

SEQ ID NO: 1225044 - DNA, 15 bp, Homo sapiens
ggtgagaaatctatc

SEQ ID NO: 1225045 - DNA, 15 bp, Homo sapiens
tggtgagaaatctat

SEQ ID NO: 1225046 - DNA, 15 bp, Homo sapiens
cccacagagtgagaa

SEQ ID NO: 1225047 - DNA, 15 bp, Homo sapiens
acccacagagtgaga

SEQ ID NO: 1225048 - DNA, 15 bp, Homo sapiens
tacccacagagtgag

SEQ ID NO: 1225049 - DNA, 15 bp, Homo sapiens
ctacccacagagtga

SEQ ID NO: 1225050 - DNA, 15 bp, Homo sapiens
tctacccacagagtg

SEQ ID NO: 1225051 - DNA, 15 bp, Homo sapiens
ttctacccacagagt

SEQ ID NO: 1225052 - DNA, 15 bp, Homo sapiens
gttctacccacagag

SEQ ID NO: 1225053 - DNA, 15 bp, Homo sapiens
agttctacccacaga

SEQ ID NO: 1225054 - DNA, 15 bp, Homo sapiens
gagttctacccacag

SEQ ID NO: 1225055 - DNA, 15 bp, Homo sapiens
agagttctacccaca

SEQ ID NO: 1225056 - DNA, 15 bp, Homo sapiens
aagagttctacccac

SEQ ID NO: 1225057 - DNA, 15 bp, Homo sapiens
taagagttctaccca

SEQ ID NO: 1225058 - DNA, 15 bp, Homo sapiens
gtaagagttctaccc

SEQ ID NO: 1225059 - DNA, 15 bp, Homo sapiens
agtaagagttctacc

SEQ ID NO: 1225060 - DNA, 15 bp, Homo sapiens
tagtaagagttctac

SEQ ID NO: 1225061 - DNA, 15 bp, Homo sapiens
agatagtaagagttc

SEQ ID NO: 1225062 - DNA, 15 bp, Homo sapiens
tagatagtaagagtt

SEQ ID NO: 1225063 - DNA, 15 bp, Homo sapiens
atagatagtaagagt

SEQ ID NO: 1225064 - DNA, 15 bp, Homo sapiens
gatagatagtaagag

SEQ ID NO: 1225065 - DNA, 15 bp, Homo sapiens
agatagatagtaaga

SEQ ID NO: 1225066 - DNA, 15 bp, Homo sapiens
aagatagatagtaag

SEQ ID NO: 1225067 - DNA, 15 bp, Homo sapiens
caagatagatagtaa

SEQ ID NO: 1225068 - DNA, 15 bp, Homo sapiens
tcaagatagatagta

SEQ ID NO: 1225069 - DNA, 15 bp, Homo sapiens
cctatcaagatagat

SEQ ID NO: 1225070 - DNA, 15 bp, Homo sapiens
ccctatcaagataga

SEQ ID NO: 1225071 - DNA, 15 bp, Homo sapiens
accctatcaagatag

SEQ ID NO: 1225072 - DNA, 15 bp, Homo sapiens
aaccctatcaagata

SEQ ID NO: 1225073 - DNA, 15 bp, Homo sapiens
gaaccctatcaagat

SEQ ID NO: 1225074 - DNA, 15 bp, Homo sapiens
agaaccctatcaaga

SEQ ID NO: 1225075 - DNA, 15 bp, Homo sapiens
gagaaccctatcaag

SEQ ID NO: 1225076 - DNA, 15 bp, Homo sapiens
tgagaaccctatcaa

SEQ ID NO: 1225077 - DNA, 15 bp, Homo sapiens
gtgagaaccctatca

SEQ ID NO: 1225078 - DNA, 15 bp, Homo sapiens
ggtgagaaccctatc

SEQ ID NO: 1225079 - DNA, 15 bp, Homo sapiens
tggtgagaaccctat

SEQ ID NO: 1225080 - DNA, 15 bp, Homo sapiens
atggtgagaacccta

SEQ ID NO: 1225081 - DNA, 15 bp, Homo sapiens
tatggtgagaaccct

SEQ ID NO: 1225082 - DNA, 15 bp, Homo sapiens
atatggtgagaaccc

SEQ ID NO: 1225083 - DNA, 15 bp, Homo sapiens
catatggtgagaacc

SEQ ID NO: 1225084 - DNA, 15 bp, Homo sapiens
atccatatggtgaga

SEQ ID NO: 1225085 - DNA, 15 bp, Homo sapiens
tatccatatggtgag

SEQ ID NO: 1225086 - DNA, 15 bp, Homo sapiens
ctatccatatggtga

SEQ ID NO: 1225087 - DNA, 15 bp, Homo sapiens
tctatccatatggtg

SEQ ID NO: 1225088 - DNA, 15 bp, Homo sapiens
ttctatccatatggt

SEQ ID NO: 1225089 - DNA, 15 bp, Homo sapiens
gttctatccatatgg

SEQ ID NO: 1225090 - DNA, 15 bp, Homo sapiens
agttctatccatatg

SEQ ID NO: 1225091 - DNA, 15 bp, Homo sapiens
gagttctatccatat

SEQ ID NO: 1225092 - DNA, 15 bp, Homo sapiens
gtagtgagagttata

SEQ ID NO: 1225093 - DNA, 15 bp, Homo sapiens
ggtagtgagagttat

SEQ ID NO: 1225094 - DNA, 15 bp, Homo sapiens
aggtagtgagagtta

SEQ ID NO: 1225095 - DNA, 15 bp, Homo sapiens
atatccagataggta

SEQ ID NO: 1225096 - DNA, 15 bp, Homo sapiens
tatatccagataggt

SEQ ID NO: 1225097 - DNA, 15 bp, Homo sapiens
ttatatccagatagg

SEQ ID NO: 1225098 - DNA, 15 bp, Homo sapiens
gctatccagagagtg

SEQ ID NO: 1225099 - DNA, 15 bp, Homo sapiens
tgctatccagagagt

SEQ ID NO: 1225100 - DNA, 15 bp, Homo sapiens
gtgctatccagagag

SEQ ID NO: 1225101 - DNA, 15 bp, Homo sapiens
agtgctatccagaga

SEQ ID NO: 1225102 - DNA, 15 bp, Homo sapiens
tgagtgctatccaga

SEQ ID NO: 1225103 - DNA, 15 bp, Homo sapiens
gtgagtgctatccag

SEQ ID NO: 1225104 - DNA, 15 bp, Homo sapiens
agtgagtgctatcca

SEQ ID NO: 1225105 - DNA, 15 bp, Homo sapiens
tagtgagtgctatcc

SEQ ID NO: 1225106 - DNA, 15 bp, Homo sapiens
atagtgagtgctatc

SEQ ID NO: 1225107 - DNA, 15 bp, Homo sapiens
gatagtgagtgctat

SEQ ID NO: 1225108 - DNA, 15 bp, Homo sapiens
agatagtgagtgcta

SEQ ID NO: 1225109 - DNA, 15 bp, Homo sapiens
cagatagtgagtgct

SEQ ID NO: 1225110 - DNA, 15 bp, Homo sapiens
ccagatagtgagtgc

SEQ ID NO: 1225111 - DNA, 15 bp, Homo sapiens
tccagatagtgagtg

SEQ ID NO: 1225112 - DNA, 15 bp, Homo sapiens
atccagatagtgagt

SEQ ID NO: 1225113 - DNA, 15 bp, Homo sapiens
cgatggtgagaattc

SEQ ID NO: 1225114 - DNA, 15 bp, Homo sapiens
attctatcccgatgg

SEQ ID NO: 1225115 - DNA, 15 bp, Homo sapiens
aattctatcccgatg

SEQ ID NO: 1225116 - DNA, 15 bp, Homo sapiens
tatagtgagaattct

SEQ ID NO: 1225117 - DNA, 15 bp, Homo sapiens
atatagtgagaattc

SEQ ID NO: 1225118 - DNA, 15 bp, Homo sapiens
tatatagtgagaatt

SEQ ID NO: 1225119 - DNA, 15 bp, Homo sapiens
gtatatagtgagaat

SEQ ID NO: 1225120 - DNA, 15 bp, Homo sapiens
ggtatatagtgagaa

SEQ ID NO: 1225121 - DNA, 15 bp, Homo sapiens
aggtatatagtgaga

SEQ ID NO: 1225122 - DNA, 15 bp, Homo sapiens
taggtatatagtgag

SEQ ID NO: 1225123 - DNA, 15 bp, Homo sapiens
ctaggtatatagtga

SEQ ID NO: 1225124 - DNA, 15 bp, Homo sapiens
tctaggtatatagtg

SEQ ID NO: 1225125 - DNA, 15 bp, Homo sapiens
atctaggtatatagt

SEQ ID NO: 1225126 - DNA, 15 bp, Homo sapiens
tatctaggtatatag

SEQ ID NO: 1225127 - DNA, 15 bp, Homo sapiens
ctatctaggtatata

SEQ ID NO: 1225128 - DNA, 15 bp, Homo sapiens
tctatctaggtatat

SEQ ID NO: 1225129 - DNA, 15 bp, Homo sapiens
ttctatctaggtata

SEQ ID NO: 1225130 - DNA, 15 bp, Homo sapiens
attctatctaggtat

SEQ ID NO: 1225131 - DNA, 15 bp, Homo sapiens
aattctatctaggta

SEQ ID NO: 1225132 - DNA, 15 bp, Homo sapiens
gaattctatctaggt

SEQ ID NO: 1225133 - DNA, 15 bp, Homo sapiens
agaattctatctagg

SEQ ID NO: 1225134 - DNA, 15 bp, Homo sapiens
gttctatccagattg

SEQ ID NO: 1225135 - DNA, 15 bp, Homo sapiens
agttctatccagatt

SEQ ID NO: 1225136 - DNA, 15 bp, Homo sapiens
cgagagttctatcta

SEQ ID NO: 1225137 - DNA, 15 bp, Homo sapiens
gcgagagttctatct

SEQ ID NO: 1225138 - DNA, 15 bp, Homo sapiens
aatagcgagagttct

SEQ ID NO: 1225139 - DNA, 15 bp, Homo sapiens
gaatagcgagagttc

SEQ ID NO: 1225140 - DNA, 15 bp, Homo sapiens
tgaatagcgagagtt

SEQ ID NO: 1225141 - DNA, 15 bp, Homo sapiens
atgaatagcgagagt

SEQ ID NO: 1225142 - DNA, 15 bp, Homo sapiens
gatgaatagcgagag

SEQ ID NO: 1225143 - DNA, 15 bp, Homo sapiens
agatgaatagcgaga

SEQ ID NO: 1225144 - DNA, 15 bp, Homo sapiens
tagatgaatagcgag

SEQ ID NO: 1225145 - DNA, 15 bp, Homo sapiens
ctagatgaatagcga

SEQ ID NO: 1225146 - DNA, 15 bp, Homo sapiens
tctagatgaatagcg

SEQ ID NO: 1225147 - DNA, 15 bp, Homo sapiens
ctctagatgaatagc

SEQ ID NO: 1225148 - DNA, 15 bp, Homo sapiens
tctctagatgaatag

SEQ ID NO: 1225149 - DNA, 15 bp, Homo sapiens
ctctctagatgaata

SEQ ID NO: 1225150 - DNA, 15 bp, Homo sapiens
tctctctagatgaat

SEQ ID NO: 1225151 - DNA, 15 bp, Homo sapiens
ttctctctagatgaa

SEQ ID NO: 1225152 - DNA, 15 bp, Homo sapiens
attctctctagatga

SEQ ID NO: 1225153 - DNA, 15 bp, Homo sapiens
aattctctctagatg

SEQ ID NO: 1225154 - DNA, 15 bp, Homo sapiens
gaattctctctagat

SEQ ID NO: 1225155 - DNA, 15 bp, Homo sapiens
ggaattctctctaga

SEQ ID NO: 1225156 - DNA, 15 bp, Homo sapiens
gggaattctctctag

SEQ ID NO: 1225157 - DNA, 15 bp, Homo sapiens
tgggaattctctcta

SEQ ID NO: 1225158 - DNA, 15 bp, Homo sapiens
atgggaattctctct

SEQ ID NO: 1225159 - DNA, 15 bp, Homo sapiens
gatgggaattctctc

SEQ ID NO: 1225160 - DNA, 15 bp, Homo sapiens
agatgggaattctct

SEQ ID NO: 1225161 - DNA, 15 bp, Homo sapiens
cagatgggaattctc

SEQ ID NO: 1225162 - DNA, 15 bp, Homo sapiens
tcagatgggaattct

SEQ ID NO: 1225163 - DNA, 15 bp, Homo sapiens
ttcagatgggaattc

SEQ ID NO: 1225164 - DNA, 15 bp, Homo sapiens
attcagatgggaatt

SEQ ID NO: 1225165 - DNA, 15 bp, Homo sapiens
tattcagatgggaat

SEQ ID NO: 1225166 - DNA, 15 bp, Homo sapiens
actattcagatggga

SEQ ID NO: 1225167 - DNA, 15 bp, Homo sapiens
tactattcagatggg

SEQ ID NO: 1225168 - DNA, 15 bp, Homo sapiens
gtactattcagatgg

SEQ ID NO: 1225169 - DNA, 15 bp, Homo sapiens
agtactattcagatg

SEQ ID NO: 1225170 - DNA, 15 bp, Homo sapiens
gagtactattcagat

SEQ ID NO: 1225171 - DNA, 15 bp, Homo sapiens
ttagtgagagtacta

SEQ ID NO: 1225172 - DNA, 15 bp, Homo sapiens
gttagtgagagtact

SEQ ID NO: 1225173 - DNA, 15 bp, Homo sapiens
agttagtgagagtac

SEQ ID NO: 1225174 - DNA, 15 bp, Homo sapiens
cagttagtgagagta

SEQ ID NO: 1225175 - DNA, 15 bp, Homo sapiens
ggaattctatccagt

SEQ ID NO: 1225176 - DNA, 15 bp, Homo sapiens
aggaattctatccag

SEQ ID NO: 1225177 - DNA, 15 bp, Homo sapiens
taggaattctatcca

SEQ ID NO: 1225178 - DNA, 15 bp, Homo sapiens
gtaggaattctatcc

SEQ ID NO: 1225179 - DNA, 15 bp, Homo sapiens
agtaggaattctatc

SEQ ID NO: 1225180 - DNA, 15 bp, Homo sapiens
gagtaggaattctat

SEQ ID NO: 1225181 - DNA, 15 bp, Homo sapiens
agagtaggaattcta

SEQ ID NO: 1225182 - DNA, 15 bp, Homo sapiens
gagagtaggaattct

SEQ ID NO: 1225183 - DNA, 15 bp, Homo sapiens
agagagtaggaattc

SEQ ID NO: 1225184 - DNA, 15 bp, Homo sapiens
cagagagtaggaatt

SEQ ID NO: 1225185 - DNA, 15 bp, Homo sapiens
ccagagagtaggaat

SEQ ID NO: 1225186 - DNA, 15 bp, Homo sapiens
tccagagagtaggaa

SEQ ID NO: 1225187 - DNA, 15 bp, Homo sapiens
atccagagagtagga

SEQ ID NO: 1225188 - DNA, 15 bp, Homo sapiens
tatccagagagtagg

SEQ ID NO: 1225189 - DNA, 15 bp, Homo sapiens
ttatccagagagtag

SEQ ID NO: 1225190 - DNA, 15 bp, Homo sapiens
ggaaagatagtgaga

SEQ ID NO: 1225191 - DNA, 15 bp, Homo sapiens
cggaaagatagtgag

SEQ ID NO: 1225192 - DNA, 15 bp, Homo sapiens
ccggaaagatagtga

SEQ ID NO: 1225193 - DNA, 15 bp, Homo sapiens
tccggaaagatagtg

SEQ ID NO: 1225194 - DNA, 15 bp, Homo sapiens
atccggaaagatagt

SEQ ID NO: 1225195 - DNA, 15 bp, Homo sapiens
tatccggaaagatag

SEQ ID NO: 1225196 - DNA, 15 bp, Homo sapiens
ctatccggaaagata

SEQ ID NO: 1225197 - DNA, 15 bp, Homo sapiens
tctatccggaaagat

SEQ ID NO: 1225198 - DNA, 15 bp, Homo sapiens
ttctatccggaaaga

SEQ ID NO: 1225199 - DNA, 15 bp, Homo sapiens
gttctatccggaaag

SEQ ID NO: 1225200 - DNA, 15 bp, Homo sapiens
agttctatccggaaa

SEQ ID NO: 1225201 - DNA, 15 bp, Homo sapiens
gagttctatccggaa

SEQ ID NO: 1225202 - DNA, 15 bp, Homo sapiens
aagagttctatccgg

SEQ ID NO: 1225203 - DNA, 15 bp, Homo sapiens
taagagttctatccg

SEQ ID NO: 1225204 - DNA, 15 bp, Homo sapiens
ctaagagttctatcc

SEQ ID NO: 1225205 - DNA, 15 bp, Homo sapiens
actaagagttctatc

SEQ ID NO: 1225206 - DNA, 15 bp, Homo sapiens
tactaagagttctat

SEQ ID NO: 1225207 - DNA, 15 bp, Homo sapiens
atactaagagttcta

SEQ ID NO: 1225208 - DNA, 15 bp, Homo sapiens
gatactaagagttct

SEQ ID NO: 1225209 - DNA, 15 bp, Homo sapiens
agatactaagagttc

SEQ ID NO: 1225210 - DNA, 15 bp, Homo sapiens
cagatactaagagtt

SEQ ID NO: 1225211 - DNA, 15 bp, Homo sapiens
ccagatactaagagt

SEQ ID NO: 1225212 - DNA, 15 bp, Homo sapiens
tccagatactaagag

SEQ ID NO: 1225213 - DNA, 15 bp, Homo sapiens
ttccagatactaaga

SEQ ID NO: 1225214 - DNA, 15 bp, Homo sapiens
tttccagatactaag

SEQ ID NO: 1225215 - DNA, 15 bp, Homo sapiens
ctttccagatactaa

SEQ ID NO: 1225216 - DNA, 15 bp, Homo sapiens
tctttccagatacta

SEQ ID NO: 1225217 - DNA, 15 bp, Homo sapiens
ttctttccagatact

SEQ ID NO: 1225218 - DNA, 15 bp, Homo sapiens
gttctttccagatac

SEQ ID NO: 1225219 - DNA, 15 bp, Homo sapiens
agttctttccagata

SEQ ID NO: 1225220 - DNA, 15 bp, Homo sapiens
cagttctttccagat

SEQ ID NO: 1225221 - DNA, 15 bp, Homo sapiens
acagttctttccaga

SEQ ID NO: 1225222 - DNA, 15 bp, Homo sapiens
gacagttctttccag

SEQ ID NO: 1225223 - DNA, 15 bp, Homo sapiens
tgacagttctttcca

SEQ ID NO: 1225224 - DNA, 15 bp, Homo sapiens
gtgacagttctttcc

SEQ ID NO: 1225225 - DNA, 15 bp, Homo sapiens
agtgacagttctttc

SEQ ID NO: 1225226 - DNA, 15 bp, Homo sapiens
tagtgacagttcttt

SEQ ID NO: 1225227 - DNA, 15 bp, Homo sapiens
atagtgacagttctt

SEQ ID NO: 1225228 - DNA, 15 bp, Homo sapiens
ccagatagtgacagt

SEQ ID NO: 1225229 - DNA, 15 bp, Homo sapiens
tccagatagtgacag

SEQ ID NO: 1225230 - DNA, 15 bp, Homo sapiens
atccagatagtgaca

SEQ ID NO: 1225231 - DNA, 15 bp, Homo sapiens
tatccagatagtgac

SEQ ID NO: 1225232 - DNA, 15 bp, Homo sapiens
tagaattctatccag

SEQ ID NO: 1225233 - DNA, 15 bp, Homo sapiens
atagaattctatcca

SEQ ID NO: 1225234 - DNA, 15 bp, Homo sapiens
catagaattctatcc

SEQ ID NO: 1225235 - DNA, 15 bp, Homo sapiens
acatagaattctatc

SEQ ID NO: 1225236 - DNA, 15 bp, Homo sapiens
gacatagaattctat

SEQ ID NO: 1225237 - DNA, 15 bp, Homo sapiens
agacatagaattcta

SEQ ID NO: 1225238 - DNA, 15 bp, Homo sapiens
gagacatagaattct

SEQ ID NO: 1225239 - DNA, 15 bp, Homo sapiens
agagacatagaattc

SEQ ID NO: 1225240 - DNA, 15 bp, Homo sapiens
cagagacatagaatt

SEQ ID NO: 1225241 - DNA, 15 bp, Homo sapiens
ccagagacatagaat

SEQ ID NO: 1225242 - DNA, 15 bp, Homo sapiens
tccagagacatagaa

SEQ ID NO: 1225243 - DNA, 15 bp, Homo sapiens
atccagagacataga

SEQ ID NO: 1225244 - DNA, 15 bp, Homo sapiens
tatccagagacatag

SEQ ID NO: 1225245 - DNA, 15 bp, Homo sapiens
ctatccagagacata

SEQ ID NO: 1225246 - DNA, 15 bp, Homo sapiens
tctatccagagacat

SEQ ID NO: 1225247 - DNA, 15 bp, Homo sapiens
attctatccagagac

SEQ ID NO: 1225248 - DNA, 15 bp, Homo sapiens
acagatagtgagaat

SEQ ID NO: 1225249 - DNA, 15 bp, Homo sapiens
gacagatagtgagaa

SEQ ID NO: 1225250 - DNA, 15 bp, Homo sapiens
tgacagatagtgaga

SEQ ID NO: 1225251 - DNA, 15 bp, Homo sapiens
ctgacagatagtgag

SEQ ID NO: 1225252 - DNA, 15 bp, Homo sapiens
cctgacagatagtga

SEQ ID NO: 1225253 - DNA, 15 bp, Homo sapiens
tcctgacagatagtg

SEQ ID NO: 1225254 - DNA, 15 bp, Homo sapiens
atcctgacagatagt

SEQ ID NO: 1225255 - DNA, 15 bp, Homo sapiens
tatcctgacagatag

SEQ ID NO: 1225256 - DNA, 15 bp, Homo sapiens
ttatcctgacagata

SEQ ID NO: 1225257 - DNA, 15 bp, Homo sapiens
tttatcctgacagat

SEQ ID NO: 1225258 - DNA, 15 bp, Homo sapiens
ttttatcctgacaga

SEQ ID NO: 1225259 - DNA, 15 bp, Homo sapiens
attttatcctgacag

SEQ ID NO: 1225260 - DNA, 15 bp, Homo sapiens
aattttatcctgaca

SEQ ID NO: 1225261 - DNA, 15 bp, Homo sapiens
gaattttatcctgac

SEQ ID NO: 1225262 - DNA, 15 bp, Homo sapiens
agaattttatcctga

SEQ ID NO: 1225263 - DNA, 15 bp, Homo sapiens
gagaattttatcctg

SEQ ID NO: 1225264 - DNA, 15 bp, Homo sapiens
tgagaattttatcct

SEQ ID NO: 1225265 - DNA, 15 bp, Homo sapiens
aagatagacagtgag

SEQ ID NO: 1225266 - DNA, 15 bp, Homo sapiens
caagatagacagtga

SEQ ID NO: 1225267 - DNA, 15 bp, Homo sapiens
tcaagatagacagtg

SEQ ID NO: 1225268 - DNA, 15 bp, Homo sapiens
atcaagatagacagt

SEQ ID NO: 1225269 - DNA, 15 bp, Homo sapiens
tatcaagatagacag

SEQ ID NO: 1225270 - DNA, 15 bp, Homo sapiens
ctatcaagatagaca

SEQ ID NO: 1225271 - DNA, 15 bp, Homo sapiens
tctatcaagatagac

SEQ ID NO: 1225272 - DNA, 15 bp, Homo sapiens
tattctatccagaca

SEQ ID NO: 1225273 - DNA, 15 bp, Homo sapiens
gtattctatccagac

SEQ ID NO: 1225274 - DNA, 15 bp, Homo sapiens
agtattctatccaga

SEQ ID NO: 1225275 - DNA, 15 bp, Homo sapiens
gagtattctatccag

SEQ ID NO: 1225276 - DNA, 15 bp, Homo sapiens
tgagtattctatcca

SEQ ID NO: 1225277 - DNA, 15 bp, Homo sapiens
gtgagtattctatcc

SEQ ID NO: 1225278 - DNA, 15 bp, Homo sapiens
ggtgagtattctatc

SEQ ID NO: 1225279 - DNA, 15 bp, Homo sapiens
tggtgagtattctat

SEQ ID NO: 1225280 - DNA, 15 bp, Homo sapiens
atggtgagtattcta

SEQ ID NO: 1225281 - DNA, 15 bp, Homo sapiens
aatggtgagtattct

SEQ ID NO: 1225282 - DNA, 15 bp, Homo sapiens
aaatggtgagtattc

SEQ ID NO: 1225283 - DNA, 15 bp, Homo sapiens
caaatggtgagtatt

SEQ ID NO: 1225284 - DNA, 15 bp, Homo sapiens
ccaaatggtgagtat

SEQ ID NO: 1225285 - DNA, 15 bp, Homo sapiens
cagatagatagtaag

SEQ ID NO: 1225286 - DNA, 15 bp, Homo sapiens
ccagatagatagtaa

SEQ ID NO: 1225287 - DNA, 15 bp, Homo sapiens
tccagatagatagta

SEQ ID NO: 1225288 - DNA, 15 bp, Homo sapiens
cagagtgagaattcc

SEQ ID NO: 1225289 - DNA, 15 bp, Homo sapiens
cctatccacagagtg

SEQ ID NO: 1225290 - DNA, 15 bp, Homo sapiens
tcctatccacagagt

SEQ ID NO: 1225291 - DNA, 15 bp, Homo sapiens
gtcctatccacagag

SEQ ID NO: 1225292 - DNA, 15 bp, Homo sapiens
agtcctatccacaga

SEQ ID NO: 1225293 - DNA, 15 bp, Homo sapiens
gagtcctatccacag

SEQ ID NO: 1225294 - DNA, 15 bp, Homo sapiens
agagtcctatccaca

SEQ ID NO: 1225295 - DNA, 15 bp, Homo sapiens
gagagtcctatccac

SEQ ID NO: 1225296 - DNA, 15 bp, Homo sapiens
tgagagtcctatcca

SEQ ID NO: 1225297 - DNA, 15 bp, Homo sapiens
gtgagagtcctatcc

SEQ ID NO: 1225298 - DNA, 15 bp, Homo sapiens
agtgagagtcctatc

SEQ ID NO: 1225299 - DNA, 15 bp, Homo sapiens
tagtgagagtcctat

SEQ ID NO: 1225300 - DNA, 15 bp, Homo sapiens
gtagtgagagtccta

SEQ ID NO: 1225301 - DNA, 15 bp, Homo sapiens
ggtagtgagagtcct

SEQ ID NO: 1225302 - DNA, 15 bp, Homo sapiens
aggtagtgagagtcc

SEQ ID NO: 1225303 - DNA, 15 bp, Homo sapiens
caggtagtgagagtc

SEQ ID NO: 1225304 - DNA, 15 bp, Homo sapiens
cagacaggtagtgag

SEQ ID NO: 1225305 - DNA, 15 bp, Homo sapiens
tagacagatagtgag

SEQ ID NO: 1225306 - DNA, 15 bp, Homo sapiens
ctagacagatagtga

SEQ ID NO: 1225307 - DNA, 15 bp, Homo sapiens
cctagacagatagtg

SEQ ID NO: 1225308 - DNA, 15 bp, Homo sapiens
acctagacagatagt

SEQ ID NO: 1225309 - DNA, 15 bp, Homo sapiens
tacctagacagatag

SEQ ID NO: 1225310 - DNA, 15 bp, Homo sapiens
ctacctagacagata

SEQ ID NO: 1225311 - DNA, 15 bp, Homo sapiens
tctacctagacagat

SEQ ID NO: 1225312 - DNA, 15 bp, Homo sapiens
gaattctacctagac

SEQ ID NO: 1225313 - DNA, 15 bp, Homo sapiens
agaattctacctaga

SEQ ID NO: 1225314 - DNA, 15 bp, Homo sapiens
gagaattctacctag

SEQ ID NO: 1225315 - DNA, 15 bp, Homo sapiens
tgagaattctaccta

SEQ ID NO: 1225316 - DNA, 15 bp, Homo sapiens
gtgagaattctacct

SEQ ID NO: 1225317 - DNA, 15 bp, Homo sapiens
gagtgagaattctac

SEQ ID NO: 1225318 - DNA, 15 bp, Homo sapiens
caaatagagttctat

SEQ ID NO: 1225319 - DNA, 15 bp, Homo sapiens
acaaatagagttcta

SEQ ID NO: 1225320 - DNA, 15 bp, Homo sapiens
gacaaatagagttct

SEQ ID NO: 1225321 - DNA, 15 bp, Homo sapiens
agacaaatagagttc

SEQ ID NO: 1225322 - DNA, 15 bp, Homo sapiens
tagacaaatagagtt

SEQ ID NO: 1225323 - DNA, 15 bp, Homo sapiens
ctagacaaatagagt

SEQ ID NO: 1225324 - DNA, 15 bp, Homo sapiens
cctagacaaatagag

SEQ ID NO: 1225325 - DNA, 15 bp, Homo sapiens
acctagacaaataga

SEQ ID NO: 1225326 - DNA, 15 bp, Homo sapiens
tacctagacaaatag

SEQ ID NO: 1225327 - DNA, 15 bp, Homo sapiens
ctacctagacaaata

SEQ ID NO: 1225328 - DNA, 15 bp, Homo sapiens
tctacctagacaaat

SEQ ID NO: 1225329 - DNA, 15 bp, Homo sapiens
ttctacctagacaaa

SEQ ID NO: 1225330 - DNA, 15 bp, Homo sapiens
attctacctagacaa

SEQ ID NO: 1225331 - DNA, 15 bp, Homo sapiens
cggtgaaaattctac

SEQ ID NO: 1225332 - DNA, 15 bp, Homo sapiens
acggtgaaaattcta

SEQ ID NO: 1225333 - DNA, 15 bp, Homo sapiens
gacggtgaaaattct

SEQ ID NO: 1225334 - DNA, 15 bp, Homo sapiens
ggacggtgaaaattc

SEQ ID NO: 1225335 - DNA, 15 bp, Homo sapiens
cggacggtgaaaatt

SEQ ID NO: 1225336 - DNA, 15 bp, Homo sapiens
ccggacggtgaaaat

SEQ ID NO: 1225337 - DNA, 15 bp, Homo sapiens
tccggacggtgaaaa

SEQ ID NO: 1225338 - DNA, 15 bp, Homo sapiens
ttccggacggtgaaa

SEQ ID NO: 1225339 - DNA, 15 bp, Homo sapiens
tttccggacggtgaa

SEQ ID NO: 1225340 - DNA, 15 bp, Homo sapiens
gtttccggacggtga

SEQ ID NO: 1225341 - DNA, 15 bp, Homo sapiens
tgtttccggacggtg

SEQ ID NO: 1225342 - DNA, 15 bp, Homo sapiens
atgtttccggacggt

SEQ ID NO: 1225343 - DNA, 15 bp, Homo sapiens
gatgtttccggacgg

SEQ ID NO: 1225344 - DNA, 15 bp, Homo sapiens
agatgtttccggacg

SEQ ID NO: 1225345 - DNA, 15 bp, Homo sapiens
gagatgtttccggac

SEQ ID NO: 1225346 - DNA, 15 bp, Homo sapiens
agagatgtttccgga

SEQ ID NO: 1225347 - DNA, 15 bp, Homo sapiens
gagagatgtttccgg

SEQ ID NO: 1225348 - DNA, 15 bp, Homo sapiens
tgagagatgtttccg

SEQ ID NO: 1225349 - DNA, 15 bp, Homo sapiens
gtgagagatgtttcc

SEQ ID NO: 1225350 - DNA, 15 bp, Homo sapiens
tgtgagagatgtttc

SEQ ID NO: 1225351 - DNA, 15 bp, Homo sapiens
ttgtgagagatgttt

SEQ ID NO: 1225352 - DNA, 15 bp, Homo sapiens
attgtgagagatgtt

SEQ ID NO: 1225353 - DNA, 15 bp, Homo sapiens
gattgtgagagatgt

SEQ ID NO: 1225354 - DNA, 15 bp, Homo sapiens
agattgtgagagatg

SEQ ID NO: 1225355 - DNA, 15 bp, Homo sapiens
cagattgtgagagat

SEQ ID NO: 1225356 - DNA, 15 bp, Homo sapiens
ccagattgtgagaga

SEQ ID NO: 1225357 - DNA, 15 bp, Homo sapiens
cctatccagattgtg

SEQ ID NO: 1225358 - DNA, 15 bp, Homo sapiens
cagagtgagaatcct

SEQ ID NO: 1225359 - DNA, 15 bp, Homo sapiens
acagagtgagaatcc

SEQ ID NO: 1225360 - DNA, 15 bp, Homo sapiens
tacagagtgagaatc

SEQ ID NO: 1225361 - DNA, 15 bp, Homo sapiens
ctacagagtgagaat

SEQ ID NO: 1225362 - DNA, 15 bp, Homo sapiens
cctacagagtgagaa

SEQ ID NO: 1225363 - DNA, 15 bp, Homo sapiens
acctacagagtgaga

SEQ ID NO: 1225364 - DNA, 15 bp, Homo sapiens
tacctacagagtgag

SEQ ID NO: 1225365 - DNA, 15 bp, Homo sapiens
ctacctacagagtga

SEQ ID NO: 1225366 - DNA, 15 bp, Homo sapiens
tctacctacagagtg

SEQ ID NO: 1225367 - DNA, 15 bp, Homo sapiens
ttctacctacagagt

SEQ ID NO: 1225368 - DNA, 15 bp, Homo sapiens
gttctacctacagag

SEQ ID NO: 1225369 - DNA, 15 bp, Homo sapiens
agttctacctacaga

SEQ ID NO: 1225370 - DNA, 15 bp, Homo sapiens
gagttctacctacag

SEQ ID NO: 1225371 - DNA, 15 bp, Homo sapiens
agagttctacctaca

SEQ ID NO: 1225372 - DNA, 15 bp, Homo sapiens
aagagttctacctac

SEQ ID NO: 1225373 - DNA, 15 bp, Homo sapiens
taagagttctaccta

SEQ ID NO: 1225374 - DNA, 15 bp, Homo sapiens
gtaagagttctacct

SEQ ID NO: 1225375 - DNA, 15 bp, Homo sapiens
cagtaagagttctac

SEQ ID NO: 1225376 - DNA, 15 bp, Homo sapiens
acagtaagagttcta

SEQ ID NO: 1225377 - DNA, 15 bp, Homo sapiens
gacagtaagagttct

SEQ ID NO: 1225378 - DNA, 15 bp, Homo sapiens
tgacagtaagagttc

SEQ ID NO: 1225379 - DNA, 15 bp, Homo sapiens
ttgacagtaagagtt

SEQ ID NO: 1225380 - DNA, 15 bp, Homo sapiens
attgacagtaagagt

SEQ ID NO: 1225381 - DNA, 15 bp, Homo sapiens
gattgacagtaagag

SEQ ID NO: 1225382 - DNA, 15 bp, Homo sapiens
agattgacagtaaga

SEQ ID NO: 1225383 - DNA, 15 bp, Homo sapiens
cagattgacagtaag

SEQ ID NO: 1225384 - DNA, 15 bp, Homo sapiens
ccagattgacagtaa

SEQ ID NO: 1225385 - DNA, 15 bp, Homo sapiens
tccagattgacagta

SEQ ID NO: 1225386 - DNA, 15 bp, Homo sapiens
atccagattgacagt

SEQ ID NO: 1225387 - DNA, 15 bp, Homo sapiens
tatccagattgacag

SEQ ID NO: 1225388 - DNA, 15 bp, Homo sapiens
atatccagattgaca

SEQ ID NO: 1225389 - DNA, 15 bp, Homo sapiens
tatatccagattgac

SEQ ID NO: 1225390 - DNA, 15 bp, Homo sapiens
caaatctatccagat

SEQ ID NO: 1225391 - DNA, 15 bp, Homo sapiens
acaaatctatccaga

SEQ ID NO: 1225392 - DNA, 15 bp, Homo sapiens
gacaaatctatccag

SEQ ID NO: 1225393 - DNA, 15 bp, Homo sapiens
tgacaaatctatcca

SEQ ID NO: 1225394 - DNA, 15 bp, Homo sapiens
gtgacaaatctatcc

SEQ ID NO: 1225395 - DNA, 15 bp, Homo sapiens
ggtgacaaatctatc

SEQ ID NO: 1225396 - DNA, 15 bp, Homo sapiens
tggtgacaaatctat

SEQ ID NO: 1225397 - DNA, 15 bp, Homo sapiens
atggtgacaaatcta

SEQ ID NO: 1225398 - DNA, 15 bp, Homo sapiens
gatggtgacaaatct

SEQ ID NO: 1225399 - DNA, 15 bp, Homo sapiens
agatggtgacaaatc

SEQ ID NO: 1225400 - DNA, 15 bp, Homo sapiens
cagatggtgacaaat

SEQ ID NO: 1225401 - DNA, 15 bp, Homo sapiens
gcagatggtgacaaa

SEQ ID NO: 1225402 - DNA, 15 bp, Homo sapiens
tgcagatggtgacaa

SEQ ID NO: 1225403 - DNA, 15 bp, Homo sapiens
atgcagatggtgaca

SEQ ID NO: 1225404 - DNA, 15 bp, Homo sapiens
tatgcagatggtgac

SEQ ID NO: 1225405 - DNA, 15 bp, Homo sapiens
attctatgcagatgg

SEQ ID NO: 1225406 - DNA, 15 bp, Homo sapiens
aattctatgcagatg

SEQ ID NO: 1225407 - DNA, 15 bp, Homo sapiens
ggaattctatccaga

SEQ ID NO: 1225408 - DNA, 15 bp, Homo sapiens
gggaattctatccag

SEQ ID NO: 1225409 - DNA, 15 bp, Homo sapiens
tgggaattctatcca

SEQ ID NO: 1225410 - DNA, 15 bp, Homo sapiens
gtgggaattctatcc

SEQ ID NO: 1225411 - DNA, 15 bp, Homo sapiens
ggtgggaattctatc

SEQ ID NO: 1225412 - DNA, 15 bp, Homo sapiens
tggtgggaattctat

SEQ ID NO: 1225413 - DNA, 15 bp, Homo sapiens
atggtgggaattcta

SEQ ID NO: 1225414 - DNA, 15 bp, Homo sapiens
gatggtgggaattct

SEQ ID NO: 1225415 - DNA, 15 bp, Homo sapiens
agatggtgggaattc

SEQ ID NO: 1225416 - DNA, 15 bp, Homo sapiens
cagatggtgggaatt

SEQ ID NO: 1225417 - DNA, 15 bp, Homo sapiens
ccagatggtgggaat

SEQ ID NO: 1225418 - DNA, 15 bp, Homo sapiens
tccagatggtgggaa

SEQ ID NO: 1225419 - DNA, 15 bp, Homo sapiens
atccagatggtggga

SEQ ID NO: 1225420 - DNA, 15 bp, Homo sapiens
tatccagatggtggg

SEQ ID NO: 1225421 - DNA, 15 bp, Homo sapiens
ctatccagatggtgg

SEQ ID NO: 1225422 - DNA, 15 bp, Homo sapiens
cagtaagaattctat

SEQ ID NO: 1225423 - DNA, 15 bp, Homo sapiens
acagtaagaattcta

SEQ ID NO: 1225424 - DNA, 15 bp, Homo sapiens
cacagtaagaattct

SEQ ID NO: 1225425 - DNA, 15 bp, Homo sapiens
acacagtaagaattc

SEQ ID NO: 1225426 - DNA, 15 bp, Homo sapiens
cacacagtaagaatt

SEQ ID NO: 1225427 - DNA, 15 bp, Homo sapiens
ccacacagtaagaat

SEQ ID NO: 1225428 - DNA, 15 bp, Homo sapiens
tccacacagtaagaa

SEQ ID NO: 1225429 - DNA, 15 bp, Homo sapiens
atccacacagtaaga

SEQ ID NO: 1225430 - DNA, 15 bp, Homo sapiens
tatccacacagtaag

SEQ ID NO: 1225431 - DNA, 15 bp, Homo sapiens
ttatccacacagtaa

SEQ ID NO: 1225432 - DNA, 15 bp, Homo sapiens
tttatccacacagta

SEQ ID NO: 1225433 - DNA, 15 bp, Homo sapiens
ttttatccacacagt

SEQ ID NO: 1225434 - DNA, 15 bp, Homo sapiens
attttatccacacag

SEQ ID NO: 1225435 - DNA, 15 bp, Homo sapiens
tattttatccacaca

SEQ ID NO: 1225436 - DNA, 15 bp, Homo sapiens
gtattttatccacac

SEQ ID NO: 1225437 - DNA, 15 bp, Homo sapiens
agtattttatccaca

SEQ ID NO: 1225438 - DNA, 15 bp, Homo sapiens
gagtattttatccac

SEQ ID NO: 1225439 - DNA, 15 bp, Homo sapiens
tgagtattttatcca

SEQ ID NO: 1225440 - DNA, 15 bp, Homo sapiens
gtgagtattttatcc

SEQ ID NO: 1225441 - DNA, 15 bp, Homo sapiens
gagtgagtattttat

SEQ ID NO: 1225442 - DNA, 15 bp, Homo sapiens
agagtgagtatttta

SEQ ID NO: 1225443 - DNA, 15 bp, Homo sapiens
gagagtgagtatttt

SEQ ID NO: 1225444 - DNA, 15 bp, Homo sapiens
agagagtgagtattt

SEQ ID NO: 1225445 - DNA, 15 bp, Homo sapiens
gagagagtgagagtt

SEQ ID NO: 1225446 - DNA, 15 bp, Homo sapiens
agagagagtgagagt

SEQ ID NO: 1225447 - DNA, 15 bp, Homo sapiens
tagagagagtgagag

SEQ ID NO: 1225448 - DNA, 15 bp, Homo sapiens
atagagagagtgaga

SEQ ID NO: 1225449 - DNA, 15 bp, Homo sapiens
tatagagagagtgag

SEQ ID NO: 1225450 - DNA, 15 bp, Homo sapiens
atatagagagagtga

SEQ ID NO: 1225451 - DNA, 15 bp, Homo sapiens
tatatagagagagtg

SEQ ID NO: 1225452 - DNA, 15 bp, Homo sapiens
atatatagagagagt

SEQ ID NO: 1225453 - DNA, 15 bp, Homo sapiens
ctatatatagagaga

SEQ ID NO: 1225454 - DNA, 15 bp, Homo sapiens
tctatatatagagag

SEQ ID NO: 1225455 - DNA, 15 bp, Homo sapiens
ttctatatatagaga

SEQ ID NO: 1225456 - DNA, 15 bp, Homo sapiens
attctatatatagag

SEQ ID NO: 1225457 - DNA, 15 bp, Homo sapiens
aattctatatataga

SEQ ID NO: 1225458 - DNA, 15 bp, Homo sapiens
gaattctatatatag

SEQ ID NO: 1225459 - DNA, 15 bp, Homo sapiens
ggaattctatatata

SEQ ID NO: 1225460 - DNA, 15 bp, Homo sapiens
gggaattctatatat

SEQ ID NO: 1225461 - DNA, 15 bp, Homo sapiens
tgggaattctatata

SEQ ID NO: 1225462 - DNA, 15 bp, Homo sapiens
gtgggaattctatat

SEQ ID NO: 1225463 - DNA, 15 bp, Homo sapiens
cgtgggaattctata

SEQ ID NO: 1225464 - DNA, 15 bp, Homo sapiens
tcgtgggaattctat

SEQ ID NO: 1225465 - DNA, 15 bp, Homo sapiens
atcgtgggaattcta

SEQ ID NO: 1225466 - DNA, 15 bp, Homo sapiens
gatcgtgggaattct

SEQ ID NO: 1225467 - DNA, 15 bp, Homo sapiens
agatcgtgggaattc

SEQ ID NO: 1225468 - DNA, 15 bp, Homo sapiens
cagatcgtgggaatt

SEQ ID NO: 1225469 - DNA, 15 bp, Homo sapiens
ccagatcgtgggaat

SEQ ID NO: 1225470 - DNA, 15 bp, Homo sapiens
tccagatcgtgggaa

SEQ ID NO: 1225471 - DNA, 15 bp, Homo sapiens
atccagatcgtggga

SEQ ID NO: 1225472 - DNA, 15 bp, Homo sapiens
tatccagatcgtggg

SEQ ID NO: 1225473 - DNA, 15 bp, Homo sapiens
ctatccagatcgtgg

SEQ ID NO: 1225474 - DNA, 15 bp, Homo sapiens
aagttctatccagat

SEQ ID NO: 1225475 - DNA, 15 bp, Homo sapiens
gagagttctacccac

SEQ ID NO: 1225476 - DNA, 15 bp, Homo sapiens
aatagatagtgagag

SEQ ID NO: 1225477 - DNA, 15 bp, Homo sapiens
aaaatagatagtgag

SEQ ID NO: 1225478 - DNA, 15 bp, Homo sapiens
gaaaatagatagtga

SEQ ID NO: 1225479 - DNA, 15 bp, Homo sapiens
tgaaaatagatagtg

SEQ ID NO: 1225480 - DNA, 15 bp, Homo sapiens
atgaaaatagatagt

SEQ ID NO: 1225481 - DNA, 15 bp, Homo sapiens
tatgaaaatagatag

SEQ ID NO: 1225482 - DNA, 15 bp, Homo sapiens
ctatgaaaatagata

SEQ ID NO: 1225483 - DNA, 15 bp, Homo sapiens
tctatgaaaatagat

SEQ ID NO: 1225484 - DNA, 15 bp, Homo sapiens
ttctatgaaaataga

SEQ ID NO: 1225485 - DNA, 15 bp, Homo sapiens
attctatgaaaatag

SEQ ID NO: 1225486 - DNA, 15 bp, Homo sapiens
aattctatgaaaata

SEQ ID NO: 1225487 - DNA, 15 bp, Homo sapiens
gaattctatgaaaat

SEQ ID NO: 1225488 - DNA, 15 bp, Homo sapiens
agaattctatgaaaa

SEQ ID NO: 1225489 - DNA, 15 bp, Homo sapiens
gagaattctatgaaa

SEQ ID NO: 1225490 - DNA, 15 bp, Homo sapiens
tgagaattctatgaa

SEQ ID NO: 1225491 - DNA, 15 bp, Homo sapiens
gtgagaattctatga

SEQ ID NO: 1225492 - DNA, 15 bp, Homo sapiens
ggtgagaattctatg

SEQ ID NO: 1225493 - DNA, 15 bp, Homo sapiens
tatggtgagaattct

SEQ ID NO: 1225494 - DNA, 15 bp, Homo sapiens
atatggtgagaattc

SEQ ID NO: 1225495 - DNA, 15 bp, Homo sapiens
catatggtgagaatt

SEQ ID NO: 1225496 - DNA, 15 bp, Homo sapiens
ccatatggtgagaat

SEQ ID NO: 1225497 - DNA, 15 bp, Homo sapiens
attctatccatatgg

SEQ ID NO: 1225498 - DNA, 15 bp, Homo sapiens
aattctatccatatg

SEQ ID NO: 1225499 - DNA, 15 bp, Homo sapiens
gaattctatccatat

SEQ ID NO: 1225500 - DNA, 15 bp, Homo sapiens
agaattctatccata

SEQ ID NO: 1225501 - DNA, 15 bp, Homo sapiens
gagaattctatccat

SEQ ID NO: 1225502 - DNA, 15 bp, Homo sapiens
aaattctatccagac

SEQ ID NO: 1225503 - DNA, 15 bp, Homo sapiens
catccagagagtgaa

SEQ ID NO: 1225504 - DNA, 15 bp, Homo sapiens
ccatccagagagtga

SEQ ID NO: 1225505 - DNA, 15 bp, Homo sapiens
tccatccagagagtg

SEQ ID NO: 1225506 - DNA, 15 bp, Homo sapiens
ttccatccagagagt

SEQ ID NO: 1225507 - DNA, 15 bp, Homo sapiens
gttccatccagagag

SEQ ID NO: 1225508 - DNA, 15 bp, Homo sapiens
ggttccatccagaga

SEQ ID NO: 1225509 - DNA, 15 bp, Homo sapiens
gggttccatccagag

SEQ ID NO: 1225510 - DNA, 15 bp, Homo sapiens
agggttccatccaga

SEQ ID NO: 1225511 - DNA, 15 bp, Homo sapiens
gagggttccatccag

SEQ ID NO: 1225512 - DNA, 15 bp, Homo sapiens
tgagggttccatcca

SEQ ID NO: 1225513 - DNA, 15 bp, Homo sapiens
gtgagggttccatcc

SEQ ID NO: 1225514 - DNA, 15 bp, Homo sapiens
agtgagggttccatc

SEQ ID NO: 1225515 - DNA, 15 bp, Homo sapiens
tagtgagggttccat

SEQ ID NO: 1225516 - DNA, 15 bp, Homo sapiens
gtagtgagggttcca

SEQ ID NO: 1225517 - DNA, 15 bp, Homo sapiens
ggtagtgagggttcc

SEQ ID NO: 1225518 - DNA, 15 bp, Homo sapiens
aggtagtgagggttc

SEQ ID NO: 1225519 - DNA, 15 bp, Homo sapiens
taggtagtgagggtt

SEQ ID NO: 1225520 - DNA, 15 bp, Homo sapiens
ataggtagtgagggt

SEQ ID NO: 1225521 - DNA, 15 bp, Homo sapiens
gataggtagtgaggg

SEQ ID NO: 1225522 - DNA, 15 bp, Homo sapiens
agataggtagtgagg

SEQ ID NO: 1225523 - DNA, 15 bp, Homo sapiens
tcagatggtgagaat

SEQ ID NO: 1225524 - DNA, 15 bp, Homo sapiens
ttcagatggtgagaa

SEQ ID NO: 1225525 - DNA, 15 bp, Homo sapiens
tattcagatggtgag

SEQ ID NO: 1225526 - DNA, 15 bp, Homo sapiens
ctattcagatggtga

SEQ ID NO: 1225527 - DNA, 15 bp, Homo sapiens
tctattcagatggtg

SEQ ID NO: 1225528 - DNA, 15 bp, Homo sapiens
ttctattcagatggt

SEQ ID NO: 1225529 - DNA, 15 bp, Homo sapiens
cagttctattcagat

SEQ ID NO: 1225530 - DNA, 15 bp, Homo sapiens
acagttctattcaga

SEQ ID NO: 1225531 - DNA, 15 bp, Homo sapiens
gacagttctattcag

SEQ ID NO: 1225532 - DNA, 15 bp, Homo sapiens
tgacagttctattca

SEQ ID NO: 1225533 - DNA, 15 bp, Homo sapiens
ctgacagttctattc

SEQ ID NO: 1225534 - DNA, 15 bp, Homo sapiens
actgacagttctatt

SEQ ID NO: 1225535 - DNA, 15 bp, Homo sapiens
tactgacagttctat

SEQ ID NO: 1225536 - DNA, 15 bp, Homo sapiens
atactgacagttcta

SEQ ID NO: 1225537 - DNA, 15 bp, Homo sapiens
gatactgacagttct

SEQ ID NO: 1225538 - DNA, 15 bp, Homo sapiens
agatactgacagttc

SEQ ID NO: 1225539 - DNA, 15 bp, Homo sapiens
cagatactgacagtt

SEQ ID NO: 1225540 - DNA, 15 bp, Homo sapiens
tcagatactgacagt

SEQ ID NO: 1225541 - DNA, 15 bp, Homo sapiens
ttcagatactgacag

SEQ ID NO: 1225542 - DNA, 15 bp, Homo sapiens
attcagatactgaca

SEQ ID NO: 1225543 - DNA, 15 bp, Homo sapiens
tattcagatactgac

SEQ ID NO: 1225544 - DNA, 15 bp, Homo sapiens
ctattcagatactga

SEQ ID NO: 1225545 - DNA, 15 bp, Homo sapiens
tctattcagatactg

SEQ ID NO: 1225546 - DNA, 15 bp, Homo sapiens
ttctattcagatact

SEQ ID NO: 1225547 - DNA, 15 bp, Homo sapiens
attctattcagatac

SEQ ID NO: 1225548 - DNA, 15 bp, Homo sapiens
tagatagagttctat

SEQ ID NO: 1225549 - DNA, 15 bp, Homo sapiens
atagatagagttcta

SEQ ID NO: 1225550 - DNA, 15 bp, Homo sapiens
gatagatagagttct

SEQ ID NO: 1225551 - DNA, 15 bp, Homo sapiens
agatagatagagttc

SEQ ID NO: 1225552 - DNA, 15 bp, Homo sapiens
tagatagatagagtt

SEQ ID NO: 1225553 - DNA, 15 bp, Homo sapiens
ctagatagatagagt

SEQ ID NO: 1225554 - DNA, 15 bp, Homo sapiens
tctagatagatagag

SEQ ID NO: 1225555 - DNA, 15 bp, Homo sapiens
atctagatagataga

SEQ ID NO: 1225556 - DNA, 15 bp, Homo sapiens
atctatccagagggt

SEQ ID NO: 1225557 - DNA, 15 bp, Homo sapiens
gatctatccagaggg

SEQ ID NO: 1225558 - DNA, 15 bp, Homo sapiens
agatctatccagagg

SEQ ID NO: 1225559 - DNA, 15 bp, Homo sapiens
ggtgagagatctatc

SEQ ID NO: 1225560 - DNA, 15 bp, Homo sapiens
tggtgagagatctat

SEQ ID NO: 1225561 - DNA, 15 bp, Homo sapiens
atggtgagagatcta

SEQ ID NO: 1225562 - DNA, 15 bp, Homo sapiens
gatggtgagagatct

SEQ ID NO: 1225563 - DNA, 15 bp, Homo sapiens
agatggtgagagatc

SEQ ID NO: 1225564 - DNA, 15 bp, Homo sapiens
cagatggtgagagat

SEQ ID NO: 1225565 - DNA, 15 bp, Homo sapiens
acagatggtgagaga

SEQ ID NO: 1225566 - DNA, 15 bp, Homo sapiens
gacagatggtgagag

SEQ ID NO: 1225567 - DNA, 15 bp, Homo sapiens
agacagatggtgaga

SEQ ID NO: 1225568 - DNA, 15 bp, Homo sapiens
cagacagatggtgag

SEQ ID NO: 1225569 - DNA, 15 bp, Homo sapiens
ccagacagatggtga

SEQ ID NO: 1225570 - DNA, 15 bp, Homo sapiens
cccagacagatggtg

SEQ ID NO: 1225571 - DNA, 15 bp, Homo sapiens
acccagacagatggt

SEQ ID NO: 1225572 - DNA, 15 bp, Homo sapiens
tacccagacagatgg

SEQ ID NO: 1225573 - DNA, 15 bp, Homo sapiens
ctacccagacagatg

SEQ ID NO: 1225574 - DNA, 15 bp, Homo sapiens
tctacccagacagat

SEQ ID NO: 1225575 - DNA, 15 bp, Homo sapiens
ttctacccagacaga

SEQ ID NO: 1225576 - DNA, 15 bp, Homo sapiens
attctacccagacag

SEQ ID NO: 1225577 - DNA, 15 bp, Homo sapiens
aattctacccagaca

SEQ ID NO: 1225578 - DNA, 15 bp, Homo sapiens
gaattctacccagac

SEQ ID NO: 1225579 - DNA, 15 bp, Homo sapiens
agagaattctaccca

SEQ ID NO: 1225580 - DNA, 15 bp, Homo sapiens
gagagaattctaccc

SEQ ID NO: 1225581 - DNA, 15 bp, Homo sapiens
ggagagaattctacc

SEQ ID NO: 1225582 - DNA, 15 bp, Homo sapiens
tggagagaattctac

SEQ ID NO: 1225583 - DNA, 15 bp, Homo sapiens
agatggagagaattc

SEQ ID NO: 1225584 - DNA, 15 bp, Homo sapiens
cagatggagagaatt

SEQ ID NO: 1225585 - DNA, 15 bp, Homo sapiens
acagatggagagaat

SEQ ID NO: 1225586 - DNA, 15 bp, Homo sapiens
tacagatggagagaa

SEQ ID NO: 1225587 - DNA, 15 bp, Homo sapiens
atacagatggagaga

SEQ ID NO: 1225588 - DNA, 15 bp, Homo sapiens
tatacagatggagag

SEQ ID NO: 1225589 - DNA, 15 bp, Homo sapiens
ctatacagatggaga

SEQ ID NO: 1225590 - DNA, 15 bp, Homo sapiens
tctatacagatggag

SEQ ID NO: 1225591 - DNA, 15 bp, Homo sapiens
ttctatacagatgga

SEQ ID NO: 1225592 - DNA, 15 bp, Homo sapiens
gttctatacagatgg

SEQ ID NO: 1225593 - DNA, 15 bp, Homo sapiens
agttctatacagatg

SEQ ID NO: 1225594 - DNA, 15 bp, Homo sapiens
gagttctatacagat

SEQ ID NO: 1225595 - DNA, 15 bp, Homo sapiens
tagagttctatacag

SEQ ID NO: 1225596 - DNA, 15 bp, Homo sapiens
ttagagttctataca

SEQ ID NO: 1225597 - DNA, 15 bp, Homo sapiens
gttagagttctatac

SEQ ID NO: 1225598 - DNA, 15 bp, Homo sapiens
agttagagttctata

SEQ ID NO: 1225599 - DNA, 15 bp, Homo sapiens
tagttagagttctat

SEQ ID NO: 1225600 - DNA, 15 bp, Homo sapiens
atagttagagttcta

SEQ ID NO: 1225601 - DNA, 15 bp, Homo sapiens
gatagttagagttct

SEQ ID NO: 1225602 - DNA, 15 bp, Homo sapiens
agatagttagagttc

SEQ ID NO: 1225603 - DNA, 15 bp, Homo sapiens
cagatagttagagtt

SEQ ID NO: 1225604 - DNA, 15 bp, Homo sapiens
ccagatagttagagt

SEQ ID NO: 1225605 - DNA, 15 bp, Homo sapiens
tccagatagttagag

SEQ ID NO: 1225606 - DNA, 15 bp, Homo sapiens
atccagatagttaga

SEQ ID NO: 1225607 - DNA, 15 bp, Homo sapiens
tatccagatagttag

SEQ ID NO: 1225608 - DNA, 15 bp, Homo sapiens
ctatccagatagtta

SEQ ID NO: 1225609 - DNA, 15 bp, Homo sapiens
tctatccagatagtt

SEQ ID NO: 1225610 - DNA, 15 bp, Homo sapiens
catgcagatggtgag

SEQ ID NO: 1225611 - DNA, 15 bp, Homo sapiens
ccatgcagatggtga

SEQ ID NO: 1225612 - DNA, 15 bp, Homo sapiens
tccatgcagatggtg

SEQ ID NO: 1225613 - DNA, 15 bp, Homo sapiens
ttccatgcagatggt

SEQ ID NO: 1225614 - DNA, 15 bp, Homo sapiens
gttccatgcagatgg

SEQ ID NO: 1225615 - DNA, 15 bp, Homo sapiens
agttccatgcagatg

SEQ ID NO: 1225616 - DNA, 15 bp, Homo sapiens
gagttccatgcagat

SEQ ID NO: 1225617 - DNA, 15 bp, Homo sapiens
agagttccatgcaga

SEQ ID NO: 1225618 - DNA, 15 bp, Homo sapiens
gagagttccatgcag

SEQ ID NO: 1225619 - DNA, 15 bp, Homo sapiens
tgagagttccatgca

SEQ ID NO: 1225620 - DNA, 15 bp, Homo sapiens
gtgagagttccatgc

SEQ ID NO: 1225621 - DNA, 15 bp, Homo sapiens
agtgagagttccatg

SEQ ID NO: 1225622 - DNA, 15 bp, Homo sapiens
catagtgagaattct

SEQ ID NO: 1225623 - DNA, 15 bp, Homo sapiens
acatagtgagaattc

SEQ ID NO: 1225624 - DNA, 15 bp, Homo sapiens
cacatagtgagaatt

SEQ ID NO: 1225625 - DNA, 15 bp, Homo sapiens
ccacatagtgagaat

SEQ ID NO: 1225626 - DNA, 15 bp, Homo sapiens
tccacatagtgagaa

SEQ ID NO: 1225627 - DNA, 15 bp, Homo sapiens
atccacatagtgaga

SEQ ID NO: 1225628 - DNA, 15 bp, Homo sapiens
tatccacatagtgag

SEQ ID NO: 1225629 - DNA, 15 bp, Homo sapiens
ctatccacatagtga

SEQ ID NO: 1225630 - DNA, 15 bp, Homo sapiens
tctatccacatagtg

SEQ ID NO: 1225631 - DNA, 15 bp, Homo sapiens
ctctatccacatagt

SEQ ID NO: 1225632 - DNA, 15 bp, Homo sapiens
gctctatccacatag

SEQ ID NO: 1225633 - DNA, 15 bp, Homo sapiens
agctctatccacata

SEQ ID NO: 1225634 - DNA, 15 bp, Homo sapiens
gagctctatccacat

SEQ ID NO: 1225635 - DNA, 15 bp, Homo sapiens
agagctctatccaca

SEQ ID NO: 1225636 - DNA, 15 bp, Homo sapiens
gagagctctatccac

SEQ ID NO: 1225637 - DNA, 15 bp, Homo sapiens
tgagagctctatcca

SEQ ID NO: 1225638 - DNA, 15 bp, Homo sapiens
gtgagagctctatcc

SEQ ID NO: 1225639 - DNA, 15 bp, Homo sapiens
agtgagagctctatc

SEQ ID NO: 1225640 - DNA, 15 bp, Homo sapiens
tagtgagagctctat

SEQ ID NO: 1225641 - DNA, 15 bp, Homo sapiens
atagtgagagctcta

SEQ ID NO: 1225642 - DNA, 15 bp, Homo sapiens
gatagtgagagctct

SEQ ID NO: 1225643 - DNA, 15 bp, Homo sapiens
agatagtgagagctc

SEQ ID NO: 1225644 - DNA, 15 bp, Homo sapiens
cagatagtgagagct

SEQ ID NO: 1225645 - DNA, 15 bp, Homo sapiens
ccagatagtgagagc

SEQ ID NO: 1225646 - DNA, 15 bp, Homo sapiens
catccagatagtgag

SEQ ID NO: 1225647 - DNA, 15 bp, Homo sapiens
ccatccagatagtga

SEQ ID NO: 1225648 - DNA, 15 bp, Homo sapiens
tccatccagatagtg

SEQ ID NO: 1225649 - DNA, 15 bp, Homo sapiens
ttccatccagatagt

SEQ ID NO: 1225650 - DNA, 15 bp, Homo sapiens
ttgagaattccatcc

SEQ ID NO: 1225651 - DNA, 15 bp, Homo sapiens
attgagaattccatc

SEQ ID NO: 1225652 - DNA, 15 bp, Homo sapiens
gattgagaattccat

SEQ ID NO: 1225653 - DNA, 15 bp, Homo sapiens
agattgagaattcca

SEQ ID NO: 1225654 - DNA, 15 bp, Homo sapiens
gagattgagaattcc

SEQ ID NO: 1225655 - DNA, 15 bp, Homo sapiens
agagattgagaattc

SEQ ID NO: 1225656 - DNA, 15 bp, Homo sapiens
cagagattgagaatt

SEQ ID NO: 1225657 - DNA, 15 bp, Homo sapiens
gcagagattgagaat

SEQ ID NO: 1225658 - DNA, 15 bp, Homo sapiens
tgcagagattgagaa

SEQ ID NO: 1225659 - DNA, 15 bp, Homo sapiens
atgcagagattgaga

SEQ ID NO: 1225660 - DNA, 15 bp, Homo sapiens
tatgcagagattgag

SEQ ID NO: 1225661 - DNA, 15 bp, Homo sapiens
ctatgcagagattga

SEQ ID NO: 1225662 - DNA, 15 bp, Homo sapiens
tctatgcagagattg

SEQ ID NO: 1225663 - DNA, 15 bp, Homo sapiens
ttctatgcagagatt

SEQ ID NO: 1225664 - DNA, 15 bp, Homo sapiens
gttctatgcagagat

SEQ ID NO: 1225665 - DNA, 15 bp, Homo sapiens
gggtgggaattctat

SEQ ID NO: 1225666 - DNA, 15 bp, Homo sapiens
agggtgggaattcta

SEQ ID NO: 1225667 - DNA, 15 bp, Homo sapiens
gagggtgggaattct

SEQ ID NO: 1225668 - DNA, 15 bp, Homo sapiens
agagggtgggaattc

SEQ ID NO: 1225669 - DNA, 15 bp, Homo sapiens
tagagggtgggaatt

SEQ ID NO: 1225670 - DNA, 15 bp, Homo sapiens
ctagagggtgggaat

SEQ ID NO: 1225671 - DNA, 15 bp, Homo sapiens
cctagagggtgggaa

SEQ ID NO: 1225672 - DNA, 15 bp, Homo sapiens
acctagagggtggga

SEQ ID NO: 1225673 - DNA, 15 bp, Homo sapiens
tacctagagggtggg

SEQ ID NO: 1225674 - DNA, 15 bp, Homo sapiens
ctacctagagggtgg

SEQ ID NO: 1225675 - DNA, 15 bp, Homo sapiens
tctacctagagggtg

SEQ ID NO: 1225676 - DNA, 15 bp, Homo sapiens
ttctacctagagggt

SEQ ID NO: 1225677 - DNA, 15 bp, Homo sapiens
gttctacctagaggg

SEQ ID NO: 1225678 - DNA, 15 bp, Homo sapiens
agttctacctagagg

SEQ ID NO: 1225679 - DNA, 15 bp, Homo sapiens
gagttctacctagag

SEQ ID NO: 1225680 - DNA, 15 bp, Homo sapiens
agagttctacctaga

SEQ ID NO: 1225681 - DNA, 15 bp, Homo sapiens
gagagttctacctag

SEQ ID NO: 1225682 - DNA, 15 bp, Homo sapiens
tgagagttctaccta

SEQ ID NO: 1225683 - DNA, 15 bp, Homo sapiens
gtgagagttctacct

SEQ ID NO: 1225684 - DNA, 15 bp, Homo sapiens
gcagacggtgagaat

SEQ ID NO: 1225685 - DNA, 15 bp, Homo sapiens
tgcagacggtgagaa

SEQ ID NO: 1225686 - DNA, 15 bp, Homo sapiens
atgcagacggtgaga

SEQ ID NO: 1225687 - DNA, 15 bp, Homo sapiens
catgcagacggtgag

SEQ ID NO: 1225688 - DNA, 15 bp, Homo sapiens
ccatgcagacggtga

SEQ ID NO: 1225689 - DNA, 15 bp, Homo sapiens
tccatgcagacggtg

SEQ ID NO: 1225690 - DNA, 15 bp, Homo sapiens
ttccatgcagacggt

SEQ ID NO: 1225691 - DNA, 15 bp, Homo sapiens
gttccatgcagacgg

SEQ ID NO: 1225692 - DNA, 15 bp, Homo sapiens
agttccatgcagacg

SEQ ID NO: 1225693 - DNA, 15 bp, Homo sapiens
cagttccatgcagac

SEQ ID NO: 1225694 - DNA, 15 bp, Homo sapiens
acagttccatgcaga

SEQ ID NO: 1225695 - DNA, 15 bp, Homo sapiens
gacagttccatgcag

SEQ ID NO: 1225696 - DNA, 15 bp, Homo sapiens
tgacagttccatgca

SEQ ID NO: 1225697 - DNA, 15 bp, Homo sapiens
gtgacagttccatgc

SEQ ID NO: 1225698 - DNA, 15 bp, Homo sapiens
agtgacagttccatg

SEQ ID NO: 1225699 - DNA, 15 bp, Homo sapiens
tagtgacagttccat

SEQ ID NO: 1225700 - DNA, 15 bp, Homo sapiens
atagtgacagttcca

SEQ ID NO: 1225701 - DNA, 15 bp, Homo sapiens
gatagtgacagttcc

SEQ ID NO: 1225702 - DNA, 15 bp, Homo sapiens
ttatacagagagtga

SEQ ID NO: 1225703 - DNA, 15 bp, Homo sapiens
tttatacagagagtg

SEQ ID NO: 1225704 - DNA, 15 bp, Homo sapiens
ttttatacagagagt

SEQ ID NO: 1225705 - DNA, 15 bp, Homo sapiens
gttttatacagagag

SEQ ID NO: 1225706 - DNA, 15 bp, Homo sapiens
agttttatacagaga

SEQ ID NO: 1225707 - DNA, 15 bp, Homo sapiens
gagttttatacagag

SEQ ID NO: 1225708 - DNA, 15 bp, Homo sapiens
agagttttatacaga

SEQ ID NO: 1225709 - DNA, 15 bp, Homo sapiens
gagagttttatacag

SEQ ID NO: 1225710 - DNA, 15 bp, Homo sapiens
tattctatctagata

SEQ ID NO: 1225711 - DNA, 15 bp, Homo sapiens
gtattctatctagat

SEQ ID NO: 1225712 - DNA, 15 bp, Homo sapiens
agtattctatctaga

SEQ ID NO: 1225713 - DNA, 15 bp, Homo sapiens
gagtattctatctag

SEQ ID NO: 1225714 - DNA, 15 bp, Homo sapiens
tgagtattctatcta

SEQ ID NO: 1225715 - DNA, 15 bp, Homo sapiens
tagtgagtattctat

SEQ ID NO: 1225716 - DNA, 15 bp, Homo sapiens
atagtgagtattcta

SEQ ID NO: 1225717 - DNA, 15 bp, Homo sapiens
gatagtgagtattct

SEQ ID NO: 1225718 - DNA, 15 bp, Homo sapiens
agatagtgagtattc

SEQ ID NO: 1225719 - DNA, 15 bp, Homo sapiens
cagatagtgagtatt

SEQ ID NO: 1225720 - DNA, 15 bp, Homo sapiens
ccagatagtgagtat

SEQ ID NO: 1225721 - DNA, 15 bp, Homo sapiens
tccagatagtgagta

SEQ ID NO: 1225722 - DNA, 15 bp, Homo sapiens
gtccagatagacagt

SEQ ID NO: 1225723 - DNA, 15 bp, Homo sapiens
cgtccagatagacag

SEQ ID NO: 1225724 - DNA, 15 bp, Homo sapiens
ccgtccagatagaca

SEQ ID NO: 1225725 - DNA, 15 bp, Homo sapiens
tccgtccagatagac

SEQ ID NO: 1225726 - DNA, 15 bp, Homo sapiens
ttccgtccagataga

SEQ ID NO: 1225727 - DNA, 15 bp, Homo sapiens
attccgtccagatag

SEQ ID NO: 1225728 - DNA, 15 bp, Homo sapiens
aattccgtccagata

SEQ ID NO: 1225729 - DNA, 15 bp, Homo sapiens
gaattccgtccagat

SEQ ID NO: 1225730 - DNA, 15 bp, Homo sapiens
agaattccgtccaga

SEQ ID NO: 1225731 - DNA, 15 bp, Homo sapiens
gagaattccgtccag

SEQ ID NO: 1225732 - DNA, 15 bp, Homo sapiens
tgagaattccgtcca

SEQ ID NO: 1225733 - DNA, 15 bp, Homo sapiens
gtgagaattccgtcc

SEQ ID NO: 1225734 - DNA, 15 bp, Homo sapiens
agtgagaattccgtc

SEQ ID NO: 1225735 - DNA, 15 bp, Homo sapiens
gagtgagaattccgt

SEQ ID NO: 1225736 - DNA, 15 bp, Homo sapiens
agagtgagaattccg

SEQ ID NO: 1225737 - DNA, 15 bp, Homo sapiens
gtatccagagagtga

SEQ ID NO: 1225738 - DNA, 15 bp, Homo sapiens
tgtatccagagagtg

SEQ ID NO: 1225739 - DNA, 15 bp, Homo sapiens
ttgtatccagagagt

SEQ ID NO: 1225740 - DNA, 15 bp, Homo sapiens
gttgtatccagagag

SEQ ID NO: 1225741 - DNA, 15 bp, Homo sapiens
agttgtatccagaga

SEQ ID NO: 1225742 - DNA, 15 bp, Homo sapiens
tacaattctatccag

SEQ ID NO: 1225743 - DNA, 15 bp, Homo sapiens
ttacaattctatcca

SEQ ID NO: 1225744 - DNA, 15 bp, Homo sapiens
gttacaattctatcc

SEQ ID NO: 1225745 - DNA, 15 bp, Homo sapiens
agttacaattctatc

SEQ ID NO: 1225746 - DNA, 15 bp, Homo sapiens
gagttacaattctat

SEQ ID NO: 1225747 - DNA, 15 bp, Homo sapiens
agagttacaattcta

SEQ ID NO: 1225748 - DNA, 15 bp, Homo sapiens
gagagttacaattct

SEQ ID NO: 1225749 - DNA, 15 bp, Homo sapiens
agagagttacaattc

SEQ ID NO: 1225750 - DNA, 15 bp, Homo sapiens
cagagagttacaatt

SEQ ID NO: 1225751 - DNA, 15 bp, Homo sapiens
gcagagagttacaat

SEQ ID NO: 1225752 - DNA, 15 bp, Homo sapiens
tgcagagagttacaa

SEQ ID NO: 1225753 - DNA, 15 bp, Homo sapiens
atgcagagagttaca

SEQ ID NO: 1225754 - DNA, 15 bp, Homo sapiens
tatgcagagagttac

SEQ ID NO: 1225755 - DNA, 15 bp, Homo sapiens
atatgcagagagtta

SEQ ID NO: 1225756 - DNA, 15 bp, Homo sapiens
tatatgcagagagtt

SEQ ID NO: 1225757 - DNA, 15 bp, Homo sapiens
ttatatgcagagagt

SEQ ID NO: 1225758 - DNA, 15 bp, Homo sapiens
gttatatgcagagag

SEQ ID NO: 1225759 - DNA, 15 bp, Homo sapiens
agttatatgcagaga

SEQ ID NO: 1225760 - DNA, 15 bp, Homo sapiens
gagttatatgcagag

SEQ ID NO: 1225761 - DNA, 15 bp, Homo sapiens
agagttatatgcaga

SEQ ID NO: 1225762 - DNA, 15 bp, Homo sapiens
gagagttatatgcag

SEQ ID NO: 1225763 - DNA, 15 bp, Homo sapiens
tgagagttatatgca

SEQ ID NO: 1225764 - DNA, 15 bp, Homo sapiens
gtgagagttatatgc

SEQ ID NO: 1225765 - DNA, 15 bp, Homo sapiens
agtgagagttatatg

SEQ ID NO: 1225766 - DNA, 15 bp, Homo sapiens
catagtcagagttct

SEQ ID NO: 1225767 - DNA, 15 bp, Homo sapiens
acatagtcagagttc

SEQ ID NO: 1225768 - DNA, 15 bp, Homo sapiens
tacatagtcagagtt

SEQ ID NO: 1225769 - DNA, 15 bp, Homo sapiens
atacatagtcagagt

SEQ ID NO: 1225770 - DNA, 15 bp, Homo sapiens
gatacatagtcagag

SEQ ID NO: 1225771 - DNA, 15 bp, Homo sapiens
agatacatagtcaga

SEQ ID NO: 1225772 - DNA, 15 bp, Homo sapiens
cagatacatagtcag

SEQ ID NO: 1225773 - DNA, 15 bp, Homo sapiens
ccagatacatagtca

SEQ ID NO: 1225774 - DNA, 15 bp, Homo sapiens
tccagatacatagtc

SEQ ID NO: 1225775 - DNA, 15 bp, Homo sapiens
acagatagtgggagt

SEQ ID NO: 1225776 - DNA, 15 bp, Homo sapiens
gacagatagtgggag

SEQ ID NO: 1225777 - DNA, 15 bp, Homo sapiens
agacagatagtggga

SEQ ID NO: 1225778 - DNA, 15 bp, Homo sapiens
cagacagatagtggg

SEQ ID NO: 1225779 - DNA, 15 bp, Homo sapiens
ccagacagatagtgg

SEQ ID NO: 1225780 - DNA, 15 bp, Homo sapiens
cagtgagcgttctat

SEQ ID NO: 1225781 - DNA, 15 bp, Homo sapiens
acagtgagcgttcta

SEQ ID NO: 1225782 - DNA, 15 bp, Homo sapiens
gacagtgagcgttct

SEQ ID NO: 1225783 - DNA, 15 bp, Homo sapiens
agacagtgagcgttc

SEQ ID NO: 1225784 - DNA, 15 bp, Homo sapiens
cagacagtgagcgtt

SEQ ID NO: 1225785 - DNA, 15 bp, Homo sapiens
ccagacagtgagcgt

SEQ ID NO: 1225786 - DNA, 15 bp, Homo sapiens
tccagacagtgagcg

SEQ ID NO: 1225787 - DNA, 15 bp, Homo sapiens
atccagacagtgagc

SEQ ID NO: 1225788 - DNA, 15 bp, Homo sapiens
gcagatgctgagaat

SEQ ID NO: 1225789 - DNA, 15 bp, Homo sapiens
tgcagatgctgagaa

SEQ ID NO: 1225790 - DNA, 15 bp, Homo sapiens
atgcagatgctgaga

SEQ ID NO: 1225791 - DNA, 15 bp, Homo sapiens
catgcagatgctgag

SEQ ID NO: 1225792 - DNA, 15 bp, Homo sapiens
ccatgcagatgctga

SEQ ID NO: 1225793 - DNA, 15 bp, Homo sapiens
tccatgcagatgctg

SEQ ID NO: 1225794 - DNA, 15 bp, Homo sapiens
ttccatgcagatgct

SEQ ID NO: 1225795 - DNA, 15 bp, Homo sapiens
gttccatgcagatgc

SEQ ID NO: 1225796 - DNA, 15 bp, Homo sapiens
atagacagatagtga

SEQ ID NO: 1225797 - DNA, 15 bp, Homo sapiens
catagacagatagtg

SEQ ID NO: 1225798 - DNA, 15 bp, Homo sapiens
acatagacagatagt

SEQ ID NO: 1225799 - DNA, 15 bp, Homo sapiens
tacatagacagatag

SEQ ID NO: 1225800 - DNA, 15 bp, Homo sapiens
ctacatagacagata

SEQ ID NO: 1225801 - DNA, 15 bp, Homo sapiens
tctacatagacagat

SEQ ID NO: 1225802 - DNA, 15 bp, Homo sapiens
ttctacatagacaga

SEQ ID NO: 1225803 - DNA, 15 bp, Homo sapiens
attctacatagacag

SEQ ID NO: 1225804 - DNA, 15 bp, Homo sapiens
aattctacatagaca

SEQ ID NO: 1225805 - DNA, 15 bp, Homo sapiens
gaattctacatagac

SEQ ID NO: 1225806 - DNA, 15 bp, Homo sapiens
agaattctacataga

SEQ ID NO: 1225807 - DNA, 15 bp, Homo sapiens
gagaattctacatag

SEQ ID NO: 1225808 - DNA, 15 bp, Homo sapiens
tgagaattctacata

SEQ ID NO: 1225809 - DNA, 15 bp, Homo sapiens
ttgagaattctacat

SEQ ID NO: 1225810 - DNA, 15 bp, Homo sapiens
gttgagaattctaca

SEQ ID NO: 1225811 - DNA, 15 bp, Homo sapiens
tgttgagaattctac

SEQ ID NO: 1225812 - DNA, 15 bp, Homo sapiens
ctctatccagatgtt

SEQ ID NO: 1225813 - DNA, 15 bp, Homo sapiens
gctctatccagatgt

SEQ ID NO: 1225814 - DNA, 15 bp, Homo sapiens
agctctatccagatg

SEQ ID NO: 1225815 - DNA, 15 bp, Homo sapiens
gagagctctatccag

SEQ ID NO: 1225816 - DNA, 15 bp, Homo sapiens
tagatagtgagagct

SEQ ID NO: 1225817 - DNA, 15 bp, Homo sapiens
ctagatagtgagagc

SEQ ID NO: 1225818 - DNA, 15 bp, Homo sapiens
gtacctagacagata

SEQ ID NO: 1225819 - DNA, 15 bp, Homo sapiens
tgtacctagacagat

SEQ ID NO: 1225820 - DNA, 15 bp, Homo sapiens
ttgtacctagacaga

SEQ ID NO: 1225821 - DNA, 15 bp, Homo sapiens
attgtacctagacag

SEQ ID NO: 1225822 - DNA, 15 bp, Homo sapiens
aattgtacctagaca

SEQ ID NO: 1225823 - DNA, 15 bp, Homo sapiens
gaattgtacctagac

SEQ ID NO: 1225824 - DNA, 15 bp, Homo sapiens
agaattgtacctaga

SEQ ID NO: 1225825 - DNA, 15 bp, Homo sapiens
gagaattgtacctag

SEQ ID NO: 1225826 - DNA, 15 bp, Homo sapiens
tgagaattgtaccta

SEQ ID NO: 1225827 - DNA, 15 bp, Homo sapiens
atgagaattgtacct

SEQ ID NO: 1225828 - DNA, 15 bp, Homo sapiens
gatgagaattgtacc

SEQ ID NO: 1225829 - DNA, 15 bp, Homo sapiens
tgatgagaattgtac

SEQ ID NO: 1225830 - DNA, 15 bp, Homo sapiens
atgatgagaattgta

SEQ ID NO: 1225831 - DNA, 15 bp, Homo sapiens
gatgatgagaattgt

SEQ ID NO: 1225832 - DNA, 15 bp, Homo sapiens
agatgatgagaattg

SEQ ID NO: 1225833 - DNA, 15 bp, Homo sapiens
cagatgatgagaatt

SEQ ID NO: 1225834 - DNA, 15 bp, Homo sapiens
gcagatgatgagaat

SEQ ID NO: 1225835 - DNA, 15 bp, Homo sapiens
agcagatgatgagaa

SEQ ID NO: 1225836 - DNA, 15 bp, Homo sapiens
aagcagatgatgaga

SEQ ID NO: 1225837 - DNA, 15 bp, Homo sapiens
taagcagatgatgag

SEQ ID NO: 1225838 - DNA, 15 bp, Homo sapiens
ctaagcagatgatga

SEQ ID NO: 1225839 - DNA, 15 bp, Homo sapiens
tctaagcagatgatg

SEQ ID NO: 1225840 - DNA, 15 bp, Homo sapiens
ctctaagcagatgat

SEQ ID NO: 1225841 - DNA, 15 bp, Homo sapiens
gctctaagcagatga

SEQ ID NO: 1225842 - DNA, 15 bp, Homo sapiens
agctctaagcagatg

SEQ ID NO: 1225843 - DNA, 15 bp, Homo sapiens
gagctctaagcagat

SEQ ID NO: 1225844 - DNA, 15 bp, Homo sapiens
agagctctaagcaga

SEQ ID NO: 1225845 - DNA, 15 bp, Homo sapiens
gagagctctaagcag

SEQ ID NO: 1225846 - DNA, 15 bp, Homo sapiens
tgagagctctaagca

SEQ ID NO: 1225847 - DNA, 15 bp, Homo sapiens
gtgagagctctaagc

SEQ ID NO: 1225848 - DNA, 15 bp, Homo sapiens
agtgagagctctaag

SEQ ID NO: 1225849 - DNA, 15 bp, Homo sapiens
tagtgagagctctaa

SEQ ID NO: 1225850 - DNA, 15 bp, Homo sapiens
actgagaattctatc

SEQ ID NO: 1225851 - DNA, 15 bp, Homo sapiens
gactgagaattctat

SEQ ID NO: 1225852 - DNA, 15 bp, Homo sapiens
agactgagaattcta

SEQ ID NO: 1225853 - DNA, 15 bp, Homo sapiens
gagactgagaattct

SEQ ID NO: 1225854 - DNA, 15 bp, Homo sapiens
agagactgagaattc

SEQ ID NO: 1225855 - DNA, 15 bp, Homo sapiens
cagagactgagaatt

SEQ ID NO: 1225856 - DNA, 15 bp, Homo sapiens
gcagagactgagaat

SEQ ID NO: 1225857 - DNA, 15 bp, Homo sapiens
tgcagagactgagaa

SEQ ID NO: 1225858 - DNA, 15 bp, Homo sapiens
atgcagagactgaga

SEQ ID NO: 1225859 - DNA, 15 bp, Homo sapiens
tatgcagagactgag

SEQ ID NO: 1225860 - DNA, 15 bp, Homo sapiens
ctatgcagagactga

SEQ ID NO: 1225861 - DNA, 15 bp, Homo sapiens
tctatgcagagactg

SEQ ID NO: 1225862 - DNA, 15 bp, Homo sapiens
ttctatgcagagact

SEQ ID NO: 1225863 - DNA, 15 bp, Homo sapiens
gttctatgcagagac

SEQ ID NO: 1225864 - DNA, 15 bp, Homo sapiens
cagttctatgcagag

SEQ ID NO: 1225865 - DNA, 15 bp, Homo sapiens
acagttctatgcaga

SEQ ID NO: 1225866 - DNA, 15 bp, Homo sapiens
gacagttctatgcag

SEQ ID NO: 1225867 - DNA, 15 bp, Homo sapiens
tgacagttctatgca

SEQ ID NO: 1225868 - DNA, 15 bp, Homo sapiens
gtgacagttctatgc

SEQ ID NO: 1225869 - DNA, 15 bp, Homo sapiens
agtgacagttctatg

SEQ ID NO: 1225870 - DNA, 15 bp, Homo sapiens
tagatagtgacagtt

SEQ ID NO: 1225871 - DNA, 15 bp, Homo sapiens
atagatagtgacagt

SEQ ID NO: 1225872 - DNA, 15 bp, Homo sapiens
gatagatagtgacag

SEQ ID NO: 1225873 - DNA, 15 bp, Homo sapiens
agatagatagtgaca

SEQ ID NO: 1225874 - DNA, 15 bp, Homo sapiens
cagatagatagtgac

SEQ ID NO: 1225875 - DNA, 15 bp, Homo sapiens
cagatagtaagagtt

SEQ ID NO: 1225876 - DNA, 15 bp, Homo sapiens
ccagatagtaagagt

SEQ ID NO: 1225877 - DNA, 15 bp, Homo sapiens
atgtgagaattctat

SEQ ID NO: 1225878 - DNA, 15 bp, Homo sapiens
gatgtgagaattcta

SEQ ID NO: 1225879 - DNA, 15 bp, Homo sapiens
agatgtgagaattct

SEQ ID NO: 1225880 - DNA, 15 bp, Homo sapiens
cagatgtgagaattc

SEQ ID NO: 1225881 - DNA, 15 bp, Homo sapiens
gcagatgtgagaatt

SEQ ID NO: 1225882 - DNA, 15 bp, Homo sapiens
tgcagatgtgagaat

SEQ ID NO: 1225883 - DNA, 15 bp, Homo sapiens
atgcagatgtgagaa

SEQ ID NO: 1225884 - DNA, 15 bp, Homo sapiens
catgcagatgtgaga

SEQ ID NO: 1225885 - DNA, 15 bp, Homo sapiens
ccatgcagatgtgag

SEQ ID NO: 1225886 - DNA, 15 bp, Homo sapiens
tccatgcagatgtga

SEQ ID NO: 1225887 - DNA, 15 bp, Homo sapiens
ttccatgcagatgtg

SEQ ID NO: 1225888 - DNA, 15 bp, Homo sapiens
gttccatgcagatgt

SEQ ID NO: 1225889 - DNA, 15 bp, Homo sapiens
ctctatccagatggt

SEQ ID NO: 1225890 - DNA, 15 bp, Homo sapiens
gctctatccagatgg

SEQ ID NO: 1225891 - DNA, 15 bp, Homo sapiens
ctgagagctctatcc

SEQ ID NO: 1225892 - DNA, 15 bp, Homo sapiens
actgagagctctatc

SEQ ID NO: 1225893 - DNA, 15 bp, Homo sapiens
tactgagagctctat

SEQ ID NO: 1225894 - DNA, 15 bp, Homo sapiens
atactgagagctcta

SEQ ID NO: 1225895 - DNA, 15 bp, Homo sapiens
gatactgagagctct

SEQ ID NO: 1225896 - DNA, 15 bp, Homo sapiens
agatactgagagctc

SEQ ID NO: 1225897 - DNA, 15 bp, Homo sapiens
cagatactgagagct

SEQ ID NO: 1225898 - DNA, 15 bp, Homo sapiens
ccagatactgagagc

SEQ ID NO: 1225899 - DNA, 15 bp, Homo sapiens
tccagatactgagag

SEQ ID NO: 1225900 - DNA, 15 bp, Homo sapiens
atccagatactgaga

SEQ ID NO: 1225901 - DNA, 15 bp, Homo sapiens
tatccagatactgag

SEQ ID NO: 1225902 - DNA, 15 bp, Homo sapiens
ctatccagatactga

SEQ ID NO: 1225903 - DNA, 15 bp, Homo sapiens
tctatccagatactg

SEQ ID NO: 1225904 - DNA, 15 bp, Homo sapiens
gctatgcagagactg

SEQ ID NO: 1225905 - DNA, 15 bp, Homo sapiens
tgctatgcagagact

SEQ ID NO: 1225906 - DNA, 15 bp, Homo sapiens
gtgctatgcagagac

SEQ ID NO: 1225907 - DNA, 15 bp, Homo sapiens
agtgctatgcagaga

SEQ ID NO: 1225908 - DNA, 15 bp, Homo sapiens
gagtgctatgcagag

SEQ ID NO: 1225909 - DNA, 15 bp, Homo sapiens
agagtgctatgcaga

SEQ ID NO: 1225910 - DNA, 15 bp, Homo sapiens
gagagtgctatgcag

SEQ ID NO: 1225911 - DNA, 15 bp, Homo sapiens
tgagagtgctatgca

SEQ ID NO: 1225912 - DNA, 15 bp, Homo sapiens
gtgagagtgctatgc

SEQ ID NO: 1225913 - DNA, 15 bp, Homo sapiens
agtgagagtgctatg

SEQ ID NO: 1225914 - DNA, 15 bp, Homo sapiens
gatagtgagagtgct

SEQ ID NO: 1225915 - DNA, 15 bp, Homo sapiens
agatagtgagagtgc

SEQ ID NO: 1225916 - DNA, 15 bp, Homo sapiens
cagatagtgagagtg

SEQ ID NO: 1225917 - DNA, 15 bp, Homo sapiens
atagagtgagaattc

SEQ ID NO: 1225918 - DNA, 15 bp, Homo sapiens
catagagtgagaatt

SEQ ID NO: 1225919 - DNA, 15 bp, Homo sapiens
ccatagagtgagaat

SEQ ID NO: 1225920 - DNA, 15 bp, Homo sapiens
tccatagagtgagaa

SEQ ID NO: 1225921 - DNA, 15 bp, Homo sapiens
atccatagagtgaga

SEQ ID NO: 1225922 - DNA, 15 bp, Homo sapiens
tatccatagagtgag

SEQ ID NO: 1225923 - DNA, 15 bp, Homo sapiens
ctatccatagagtga

SEQ ID NO: 1225924 - DNA, 15 bp, Homo sapiens
tctatccatagagtg

SEQ ID NO: 1225925 - DNA, 15 bp, Homo sapiens
ttctatccatagagt

SEQ ID NO: 1225926 - DNA, 15 bp, Homo sapiens
cagagttctatccat

SEQ ID NO: 1225927 - DNA, 15 bp, Homo sapiens
gatagatagtcagag

SEQ ID NO: 1225928 - DNA, 15 bp, Homo sapiens
agatagatagtcaga

SEQ ID NO: 1225929 - DNA, 15 bp, Homo sapiens
cagatagatagtcag

SEQ ID NO: 1225930 - DNA, 15 bp, Homo sapiens
ccagatagatagtca

SEQ ID NO: 1225931 - DNA, 15 bp, Homo sapiens
tccagatagatagtc

SEQ ID NO: 1225932 - DNA, 15 bp, Homo sapiens
tagagggtgagaatt

SEQ ID NO: 1225933 - DNA, 15 bp, Homo sapiens
ctagagggtgagaat

SEQ ID NO: 1225934 - DNA, 15 bp, Homo sapiens
tctagagggtgagaa

SEQ ID NO: 1225935 - DNA, 15 bp, Homo sapiens
ggagaattctatcca

SEQ ID NO: 1225936 - DNA, 15 bp, Homo sapiens
gggagaattctatcc

SEQ ID NO: 1225937 - DNA, 15 bp, Homo sapiens
agggagaattctatc

SEQ ID NO: 1225938 - DNA, 15 bp, Homo sapiens
tagggagaattctat

SEQ ID NO: 1225939 - DNA, 15 bp, Homo sapiens
gtagggagaattcta

SEQ ID NO: 1225940 - DNA, 15 bp, Homo sapiens
agtagggagaattct

SEQ ID NO: 1225941 - DNA, 15 bp, Homo sapiens
cagtagggagaattc

SEQ ID NO: 1225942 - DNA, 15 bp, Homo sapiens
tcagtagggagaatt

SEQ ID NO: 1225943 - DNA, 15 bp, Homo sapiens
atcagtagggagaat

SEQ ID NO: 1225944 - DNA, 15 bp, Homo sapiens
tatcagtagggagaa

SEQ ID NO: 1225945 - DNA, 15 bp, Homo sapiens
ctatcagtagggaga

SEQ ID NO: 1225946 - DNA, 15 bp, Homo sapiens
tctatcagtagggag

SEQ ID NO: 1225947 - DNA, 15 bp, Homo sapiens
ttctatcagtaggga

SEQ ID NO: 1225948 - DNA, 15 bp, Homo sapiens
gttctatcagtaggg

SEQ ID NO: 1225949 - DNA, 15 bp, Homo sapiens
agttctatcagtagg

SEQ ID NO: 1225950 - DNA, 15 bp, Homo sapiens
gagttctatcagtag

SEQ ID NO: 1225951 - DNA, 15 bp, Homo sapiens
agagttctatcagta

SEQ ID NO: 1225952 - DNA, 15 bp, Homo sapiens
gagagttctatcagt

SEQ ID NO: 1225953 - DNA, 15 bp, Homo sapiens
tgagagttctatcag

SEQ ID NO: 1225954 - DNA, 15 bp, Homo sapiens
gtgagagttctatca

SEQ ID NO: 1225955 - DNA, 15 bp, Homo sapiens
gagagagagtgagag

SEQ ID NO: 1225956 - DNA, 15 bp, Homo sapiens
agagagagagtgaga

SEQ ID NO: 1225957 - DNA, 15 bp, Homo sapiens
cagagagagagtgag

SEQ ID NO: 1225958 - DNA, 15 bp, Homo sapiens
ccagagagagagtga

SEQ ID NO: 1225959 - DNA, 15 bp, Homo sapiens
tccagagagagagtg

SEQ ID NO: 1225960 - DNA, 15 bp, Homo sapiens
atccagagagagagt

SEQ ID NO: 1225961 - DNA, 15 bp, Homo sapiens
tatccagagagagag

SEQ ID NO: 1225962 - DNA, 15 bp, Homo sapiens
ctatccagagagaga

SEQ ID NO: 1225963 - DNA, 15 bp, Homo sapiens
tctatccagagagag

SEQ ID NO: 1225964 - DNA, 15 bp, Homo sapiens
catagatattgagag

SEQ ID NO: 1225965 - DNA, 15 bp, Homo sapiens
acatagatattgaga

SEQ ID NO: 1225966 - DNA, 15 bp, Homo sapiens
cacatagatattgag

SEQ ID NO: 1225967 - DNA, 15 bp, Homo sapiens
ccacatagatattga

SEQ ID NO: 1225968 - DNA, 15 bp, Homo sapiens
tccacatagatattg

SEQ ID NO: 1225969 - DNA, 15 bp, Homo sapiens
atccacatagatatt

SEQ ID NO: 1225970 - DNA, 15 bp, Homo sapiens
tatccacatagatat

SEQ ID NO: 1225971 - DNA, 15 bp, Homo sapiens
ctatccacatagata

SEQ ID NO: 1225972 - DNA, 15 bp, Homo sapiens
tctatccacatagat

SEQ ID NO: 1225973 - DNA, 15 bp, Homo sapiens
ttctatccacataga

SEQ ID NO: 1225974 - DNA, 15 bp, Homo sapiens
gttctatccacatag

SEQ ID NO: 1225975 - DNA, 15 bp, Homo sapiens
agttctatccacata

SEQ ID NO: 1225976 - DNA, 15 bp, Homo sapiens
gagttctatccacat

SEQ ID NO: 1225977 - DNA, 15 bp, Homo sapiens
ttaagaattctatcc

SEQ ID NO: 1225978 - DNA, 15 bp, Homo sapiens
attaagaattctatc

SEQ ID NO: 1225979 - DNA, 15 bp, Homo sapiens
gattaagaattctat

SEQ ID NO: 1225980 - DNA, 15 bp, Homo sapiens
agattaagaattcta

SEQ ID NO: 1225981 - DNA, 15 bp, Homo sapiens
gagattaagaattct

SEQ ID NO: 1225982 - DNA, 15 bp, Homo sapiens
agagattaagaattc

SEQ ID NO: 1225983 - DNA, 15 bp, Homo sapiens
cagagattaagaatt

SEQ ID NO: 1225984 - DNA, 15 bp, Homo sapiens
ccagagattaagaat

SEQ ID NO: 1225985 - DNA, 15 bp, Homo sapiens
tccagagattaagaa

SEQ ID NO: 1225986 - DNA, 15 bp, Homo sapiens
atccagagattaaga

SEQ ID NO: 1225987 - DNA, 15 bp, Homo sapiens
tatccagagattaag

SEQ ID NO: 1225988 - DNA, 15 bp, Homo sapiens
ctatccagagattaa

SEQ ID NO: 1225989 - DNA, 15 bp, Homo sapiens
tctatccagagatta

SEQ ID NO: 1225990 - DNA, 15 bp, Homo sapiens
ttctatccagagatt

SEQ ID NO: 1225991 - DNA, 15 bp, Homo sapiens
tgatagtgagacttc

SEQ ID NO: 1225992 - DNA, 15 bp, Homo sapiens
ctgatagtgagactt

SEQ ID NO: 1225993 - DNA, 15 bp, Homo sapiens
actgatagtgagact

SEQ ID NO: 1225994 - DNA, 15 bp, Homo sapiens
gactgatagtgagac

SEQ ID NO: 1225995 - DNA, 15 bp, Homo sapiens
agactgatagtgaga

SEQ ID NO: 1225996 - DNA, 15 bp, Homo sapiens
cagactgatagtgag

SEQ ID NO: 1225997 - DNA, 15 bp, Homo sapiens
ccagactgatagtga

SEQ ID NO: 1225998 - DNA, 15 bp, Homo sapiens
tccagactgatagtg

SEQ ID NO: 1225999 - DNA, 15 bp, Homo sapiens
atccagactgatagt

SEQ ID NO: 1226000 - DNA, 15 bp, Homo sapiens
tatccagactgatag

SEQ ID NO: 1226001 - DNA, 15 bp, Homo sapiens
ctatccagactgata

SEQ ID NO: 1226002 - DNA, 15 bp, Homo sapiens
tctatccagactgat

SEQ ID NO: 1226003 - DNA, 15 bp, Homo sapiens
ttctatccagactga

SEQ ID NO: 1226004 - DNA, 15 bp, Homo sapiens
attctatccagactg

SEQ ID NO: 1226005 - DNA, 15 bp, Homo sapiens
aattctatccagact

SEQ ID NO: 1226006 - DNA, 15 bp, Homo sapiens
acagatagtgaaagt

SEQ ID NO: 1226007 - DNA, 15 bp, Homo sapiens
gacagatagtgaaag

SEQ ID NO: 1226008 - DNA, 15 bp, Homo sapiens
agacagatagtgaaa

SEQ ID NO: 1226009 - DNA, 15 bp, Homo sapiens
tagacagatagtgaa

SEQ ID NO: 1226010 - DNA, 15 bp, Homo sapiens
tctagacagatagtg

SEQ ID NO: 1226011 - DNA, 15 bp, Homo sapiens
atctatctagacaga

SEQ ID NO: 1226012 - DNA, 15 bp, Homo sapiens
gatctatctagacag

SEQ ID NO: 1226013 - DNA, 15 bp, Homo sapiens
agatctatctagaca

SEQ ID NO: 1226014 - DNA, 15 bp, Homo sapiens
gagatctatctagac

SEQ ID NO: 1226015 - DNA, 15 bp, Homo sapiens
agagatctatctaga

SEQ ID NO: 1226016 - DNA, 15 bp, Homo sapiens
gagagatctatctag

SEQ ID NO: 1226017 - DNA, 15 bp, Homo sapiens
tgagagatctatcta

SEQ ID NO: 1226018 - DNA, 15 bp, Homo sapiens
gtgagagatctatct

SEQ ID NO: 1226019 - DNA, 15 bp, Homo sapiens
tagatagtgagagat

SEQ ID NO: 1226020 - DNA, 15 bp, Homo sapiens
atagatagtgagaga

SEQ ID NO: 1226021 - DNA, 15 bp, Homo sapiens
gagacagatagtgag

SEQ ID NO: 1226022 - DNA, 15 bp, Homo sapiens
cgagacagatagtga

SEQ ID NO: 1226023 - DNA, 15 bp, Homo sapiens
tcgagacagatagtg

SEQ ID NO: 1226024 - DNA, 15 bp, Homo sapiens
atcgagacagatagt

SEQ ID NO: 1226025 - DNA, 15 bp, Homo sapiens
tatcgagacagatag

SEQ ID NO: 1226026 - DNA, 15 bp, Homo sapiens
ctatcgagacagata

SEQ ID NO: 1226027 - DNA, 15 bp, Homo sapiens
tctatcgagacagat

SEQ ID NO: 1226028 - DNA, 15 bp, Homo sapiens
ttctatcgagacaga

SEQ ID NO: 1226029 - DNA, 15 bp, Homo sapiens
attctatcgagacag

SEQ ID NO: 1226030 - DNA, 15 bp, Homo sapiens
cattctatcgagaca

SEQ ID NO: 1226031 - DNA, 15 bp, Homo sapiens
gcattctatcgagac

SEQ ID NO: 1226032 - DNA, 15 bp, Homo sapiens
agcattctatcgaga

SEQ ID NO: 1226033 - DNA, 15 bp, Homo sapiens
gagcattctatcgag

SEQ ID NO: 1226034 - DNA, 15 bp, Homo sapiens
tgagcattctatcga

SEQ ID NO: 1226035 - DNA, 15 bp, Homo sapiens
gtgagcattctatcg

SEQ ID NO: 1226036 - DNA, 15 bp, Homo sapiens
agtgagcattctatc

SEQ ID NO: 1226037 - DNA, 15 bp, Homo sapiens
gagtgagcattctat

SEQ ID NO: 1226038 - DNA, 15 bp, Homo sapiens
agagtgagcattcta

SEQ ID NO: 1226039 - DNA, 15 bp, Homo sapiens
cagagtgagcattct

SEQ ID NO: 1226040 - DNA, 15 bp, Homo sapiens
acagagtgagcattc

SEQ ID NO: 1226041 - DNA, 15 bp, Homo sapiens
cacagagtgagcatt

SEQ ID NO: 1226042 - DNA, 15 bp, Homo sapiens
ccacagagtgagcat

SEQ ID NO: 1226043 - DNA, 15 bp, Homo sapiens
tccacagagtgagca

SEQ ID NO: 1226044 - DNA, 15 bp, Homo sapiens
atccacagagtgagc

SEQ ID NO: 1226045 - DNA, 15 bp, Homo sapiens
aagagggtgagaatt

SEQ ID NO: 1226046 - DNA, 15 bp, Homo sapiens
taagagggtgagaat

SEQ ID NO: 1226047 - DNA, 15 bp, Homo sapiens
ctaagagggtgagaa

SEQ ID NO: 1226048 - DNA, 15 bp, Homo sapiens
cctaagagggtgaga

SEQ ID NO: 1226049 - DNA, 15 bp, Homo sapiens
gcctaagagggtgag

SEQ ID NO: 1226050 - DNA, 15 bp, Homo sapiens
agcctaagagggtga

SEQ ID NO: 1226051 - DNA, 15 bp, Homo sapiens
tagcctaagagggtg

SEQ ID NO: 1226052 - DNA, 15 bp, Homo sapiens
gtagcctaagagggt

SEQ ID NO: 1226053 - DNA, 15 bp, Homo sapiens
tgtagcctaagaggg

SEQ ID NO: 1226054 - DNA, 15 bp, Homo sapiens
ctgtagcctaagagg

SEQ ID NO: 1226055 - DNA, 15 bp, Homo sapiens
actgtagcctaagag

SEQ ID NO: 1226056 - DNA, 15 bp, Homo sapiens
tactgtagcctaaga

SEQ ID NO: 1226057 - DNA, 15 bp, Homo sapiens
ttactgtagcctaag

SEQ ID NO: 1226058 - DNA, 15 bp, Homo sapiens
gttactgtagcctaa

SEQ ID NO: 1226059 - DNA, 15 bp, Homo sapiens
ggttactgtagccta

SEQ ID NO: 1226060 - DNA, 15 bp, Homo sapiens
tggttactgtagcct

SEQ ID NO: 1226061 - DNA, 15 bp, Homo sapiens
ttggttactgtagcc

SEQ ID NO: 1226062 - DNA, 15 bp, Homo sapiens
tttggttactgtagc

SEQ ID NO: 1226063 - DNA, 15 bp, Homo sapiens
ttttggttactgtag

SEQ ID NO: 1226064 - DNA, 15 bp, Homo sapiens
gttttggttactgta

SEQ ID NO: 1226065 - DNA, 15 bp, Homo sapiens
tgttttggttactgt

SEQ ID NO: 1226066 - DNA, 15 bp, Homo sapiens
atgttttggttactg

SEQ ID NO: 1226067 - DNA, 15 bp, Homo sapiens
gatgttttggttact

SEQ ID NO: 1226068 - DNA, 15 bp, Homo sapiens
tgatgttttggttac

SEQ ID NO: 1226069 - DNA, 15 bp, Homo sapiens
atgatgttttggtta

SEQ ID NO: 1226070 - DNA, 15 bp, Homo sapiens
catgatgttttggtt

SEQ ID NO: 1226071 - DNA, 15 bp, Homo sapiens
ccatgatgttttggt

SEQ ID NO: 1226072 - DNA, 15 bp, Homo sapiens
accatgatgttttgg

SEQ ID NO: 1226073 - DNA, 15 bp, Homo sapiens
taccatgatgttttg

SEQ ID NO: 1226074 - DNA, 15 bp, Homo sapiens
gtaccatgatgtttt

SEQ ID NO: 1226075 - DNA, 15 bp, Homo sapiens
agtaccatgatgttt

SEQ ID NO: 1226076 - DNA, 15 bp, Homo sapiens
cagtaccatgatgtt

SEQ ID NO: 1226077 - DNA, 15 bp, Homo sapiens
ccagtaccatgatgt

SEQ ID NO: 1226078 - DNA, 15 bp, Homo sapiens
accagtaccatgatg

SEQ ID NO: 1226079 - DNA, 15 bp, Homo sapiens
taccagtaccatgat

SEQ ID NO: 1226080 - DNA, 15 bp, Homo sapiens
gtaccagtaccatga

SEQ ID NO: 1226081 - DNA, 15 bp, Homo sapiens
ggtaccagtaccatg

SEQ ID NO: 1226082 - DNA, 15 bp, Homo sapiens
tggtaccagtaccat

SEQ ID NO: 1226083 - DNA, 15 bp, Homo sapiens
ttggtaccagtacca

SEQ ID NO: 1226084 - DNA, 15 bp, Homo sapiens
tttggtaccagtacc

SEQ ID NO: 1226085 - DNA, 15 bp, Homo sapiens
ttttggtaccagtac

SEQ ID NO: 1226086 - DNA, 15 bp, Homo sapiens
gttttggtaccagta

SEQ ID NO: 1226087 - DNA, 15 bp, Homo sapiens
tgttttggtaccagt

SEQ ID NO: 1226088 - DNA, 15 bp, Homo sapiens
ctgttttggtaccag

SEQ ID NO: 1226089 - DNA, 15 bp, Homo sapiens
tctgttttggtacca

SEQ ID NO: 1226090 - DNA, 15 bp, Homo sapiens
ttctgttttggtacc

SEQ ID NO: 1226091 - DNA, 15 bp, Homo sapiens
tttctgttttggtac

SEQ ID NO: 1226092 - DNA, 15 bp, Homo sapiens
atttctgttttggta

SEQ ID NO: 1226093 - DNA, 15 bp, Homo sapiens
tatttctgttttggt

SEQ ID NO: 1226094 - DNA, 15 bp, Homo sapiens
atatttctgttttgg

SEQ ID NO: 1226095 - DNA, 15 bp, Homo sapiens
tatatttctgttttg

SEQ ID NO: 1226096 - DNA, 15 bp, Homo sapiens
ctatatttctgtttt

SEQ ID NO: 1226097 - DNA, 15 bp, Homo sapiens
tctatatttctgttt

SEQ ID NO: 1226098 - DNA, 15 bp, Homo sapiens
atctatatttctgtt

SEQ ID NO: 1226099 - DNA, 15 bp, Homo sapiens
gatctatatttctgt

SEQ ID NO: 1226100 - DNA, 15 bp, Homo sapiens
tgatctatatttctg

SEQ ID NO: 1226101 - DNA, 15 bp, Homo sapiens
ttgatctatatttct

SEQ ID NO: 1226102 - DNA, 15 bp, Homo sapiens
attgatctatatttc

SEQ ID NO: 1226103 - DNA, 15 bp, Homo sapiens
tattgatctatattt

SEQ ID NO: 1226104 - DNA, 15 bp, Homo sapiens
ctattgatctatatt

SEQ ID NO: 1226105 - DNA, 15 bp, Homo sapiens
tctattgatctatat

SEQ ID NO: 1226106 - DNA, 15 bp, Homo sapiens
ttctattgatctata

SEQ ID NO: 1226107 - DNA, 15 bp, Homo sapiens
gttctattgatctat

SEQ ID NO: 1226108 - DNA, 15 bp, Homo sapiens
tgttctattgatcta

SEQ ID NO: 1226109 - DNA, 15 bp, Homo sapiens
ctgttctattgatct

SEQ ID NO: 1226110 - DNA, 15 bp, Homo sapiens
tctgttctattgatc

SEQ ID NO: 1226111 - DNA, 15 bp, Homo sapiens
ttctgttctattgat

SEQ ID NO: 1226112 - DNA, 15 bp, Homo sapiens
gttctgttctattga

SEQ ID NO: 1226113 - DNA, 15 bp, Homo sapiens
tgttctgttctattg

SEQ ID NO: 1226114 - DNA, 15 bp, Homo sapiens
ctgttctgttctatt

SEQ ID NO: 1226115 - DNA, 15 bp, Homo sapiens
tctgttctgttctat

SEQ ID NO: 1226116 - DNA, 15 bp, Homo sapiens
ctctgttctgttcta

SEQ ID NO: 1226117 - DNA, 15 bp, Homo sapiens
gctctgttctgttct

SEQ ID NO: 1226118 - DNA, 15 bp, Homo sapiens
ggctctgttctgttc

SEQ ID NO: 1226119 - DNA, 15 bp, Homo sapiens
gggctctgttctgtt

SEQ ID NO: 1226120 - DNA, 15 bp, Homo sapiens
agggctctgttctgt

SEQ ID NO: 1226121 - DNA, 15 bp, Homo sapiens
gagggctctgttctg

SEQ ID NO: 1226122 - DNA, 15 bp, Homo sapiens
tgagggctctgttct

SEQ ID NO: 1226123 - DNA, 15 bp, Homo sapiens
ctgagggctctgttc

SEQ ID NO: 1226124 - DNA, 15 bp, Homo sapiens
tctgagggctctgtt

SEQ ID NO: 1226125 - DNA, 15 bp, Homo sapiens
ttctgagggctctgt

SEQ ID NO: 1226126 - DNA, 15 bp, Homo sapiens
tttctgagggctctg

SEQ ID NO: 1226127 - DNA, 15 bp, Homo sapiens
atttctgagggctct

SEQ ID NO: 1226128 - DNA, 15 bp, Homo sapiens
tatttctgagggctc

SEQ ID NO: 1226129 - DNA, 15 bp, Homo sapiens
ttatttctgagggct

SEQ ID NO: 1226130 - DNA, 15 bp, Homo sapiens
gttatttctgagggc

SEQ ID NO: 1226131 - DNA, 15 bp, Homo sapiens
cgttatttctgaggg

SEQ ID NO: 1226132 - DNA, 15 bp, Homo sapiens
gcgttatttctgagg

SEQ ID NO: 1226133 - DNA, 15 bp, Homo sapiens
ggcgttatttctgag

SEQ ID NO: 1226134 - DNA, 15 bp, Homo sapiens
cggcgttatttctga

SEQ ID NO: 1226135 - DNA, 15 bp, Homo sapiens
gcggcgttatttctg

SEQ ID NO: 1226136 - DNA, 15 bp, Homo sapiens
tgcggcgttatttct

SEQ ID NO: 1226137 - DNA, 15 bp, Homo sapiens
atgcggcgttatttc

SEQ ID NO: 1226138 - DNA, 15 bp, Homo sapiens
tatgcggcgttattt

SEQ ID NO: 1226139 - DNA, 15 bp, Homo sapiens
atatgcggcgttatt

SEQ ID NO: 1226140 - DNA, 15 bp, Homo sapiens
gatatgcggcgttat

SEQ ID NO: 1226141 - DNA, 15 bp, Homo sapiens
agatatgcggcgtta

SEQ ID NO: 1226142 - DNA, 15 bp, Homo sapiens
tagatatgcggcgtt

SEQ ID NO: 1226143 - DNA, 15 bp, Homo sapiens
gtagatatgcggcgt

SEQ ID NO: 1226144 - DNA, 15 bp, Homo sapiens
tgtagatatgcggcg

SEQ ID NO: 1226145 - DNA, 15 bp, Homo sapiens
ttgtagatatgcggc

SEQ ID NO: 1226146 - DNA, 15 bp, Homo sapiens
gttgtagatatgcgg

SEQ ID NO: 1226147 - DNA, 15 bp, Homo sapiens
agttgtagatatgcg

SEQ ID NO: 1226148 - DNA, 15 bp, Homo sapiens
tagttgtagatatgc

SEQ ID NO: 1226149 - DNA, 15 bp, Homo sapiens
atagttgtagatatg

SEQ ID NO: 1226150 - DNA, 15 bp, Homo sapiens
gatagttgtagatat

SEQ ID NO: 1226151 - DNA, 15 bp, Homo sapiens
agatagttgtagata

SEQ ID NO: 1226152 - DNA, 15 bp, Homo sapiens
cagatagttgtagat

SEQ ID NO: 1226153 - DNA, 15 bp, Homo sapiens
tcagatagttgtaga

SEQ ID NO: 1226154 - DNA, 15 bp, Homo sapiens
atcagatagttgtag

SEQ ID NO: 1226155 - DNA, 15 bp, Homo sapiens
gatcagatagttgta

SEQ ID NO: 1226156 - DNA, 15 bp, Homo sapiens
agatcagatagttgt

SEQ ID NO: 1226157 - DNA, 15 bp, Homo sapiens
aagatcagatagttg

SEQ ID NO: 1226158 - DNA, 15 bp, Homo sapiens
aaagatcagatagtt

SEQ ID NO: 1226159 - DNA, 15 bp, Homo sapiens
caaagatcagatagt

SEQ ID NO: 1226160 - DNA, 15 bp, Homo sapiens
tcaaagatcagatag

SEQ ID NO: 1226161 - DNA, 15 bp, Homo sapiens
gtcaaagatcagata

SEQ ID NO: 1226162 - DNA, 15 bp, Homo sapiens
tgtcaaagatcagat

SEQ ID NO: 1226163 - DNA, 15 bp, Homo sapiens
ttgtcaaagatcaga

SEQ ID NO: 1226164 - DNA, 15 bp, Homo sapiens
tttgtcaaagatcag

SEQ ID NO: 1226165 - DNA, 15 bp, Homo sapiens
gtttgtcaaagatca

SEQ ID NO: 1226166 - DNA, 15 bp, Homo sapiens
ggtttgtcaaagatc

SEQ ID NO: 1226167 - DNA, 15 bp, Homo sapiens
aggtttgtcaaagat

SEQ ID NO: 1226168 - DNA, 15 bp, Homo sapiens
caggtttgtcaaaga

SEQ ID NO: 1226169 - DNA, 15 bp, Homo sapiens
tcaggtttgtcaaag

SEQ ID NO: 1226170 - DNA, 15 bp, Homo sapiens
ctcaggtttgtcaaa

SEQ ID NO: 1226171 - DNA, 15 bp, Homo sapiens
tctcaggtttgtcaa

SEQ ID NO: 1226172 - DNA, 15 bp, Homo sapiens
ttctcaggtttgtca

SEQ ID NO: 1226173 - DNA, 15 bp, Homo sapiens
tttctcaggtttgtc

SEQ ID NO: 1226174 - DNA, 15 bp, Homo sapiens
ttttctcaggtttgt

SEQ ID NO: 1226175 - DNA, 15 bp, Homo sapiens
tttttctcaggtttg

SEQ ID NO: 1226176 - DNA, 15 bp, Homo sapiens
gtttttctcaggttt

SEQ ID NO: 1226177 - DNA, 15 bp, Homo sapiens
tgtttttctcaggtt

SEQ ID NO: 1226178 - DNA, 15 bp, Homo sapiens
ttgtttttctcaggt

SEQ ID NO: 1226179 - DNA, 15 bp, Homo sapiens
cttgtttttctcagg

SEQ ID NO: 1226180 - DNA, 15 bp, Homo sapiens
gcttgtttttctcag

SEQ ID NO: 1226181 - DNA, 15 bp, Homo sapiens
tgcttgtttttctca

SEQ ID NO: 1226182 - DNA, 15 bp, Homo sapiens
ttgcttgtttttctc

SEQ ID NO: 1226183 - DNA, 15 bp, Homo sapiens
attgcttgtttttct

SEQ ID NO: 1226184 - DNA, 15 bp, Homo sapiens
cattgcttgtttttc

SEQ ID NO: 1226185 - DNA, 15 bp, Homo sapiens
ccattgcttgttttt

SEQ ID NO: 1226186 - DNA, 15 bp, Homo sapiens
cccattgcttgtttt

SEQ ID NO: 1226187 - DNA, 15 bp, Homo sapiens
ccccattgcttgttt

SEQ ID NO: 1226188 - DNA, 15 bp, Homo sapiens
tccccattgcttgtt

SEQ ID NO: 1226189 - DNA, 15 bp, Homo sapiens
gcaccatttattaaa

SEQ ID NO: 1226190 - DNA, 15 bp, Homo sapiens
agcaccatttattaa

SEQ ID NO: 1226191 - DNA, 15 bp, Homo sapiens
cagcaccatttatta

SEQ ID NO: 1226192 - DNA, 15 bp, Homo sapiens
cagttttcccagcac

SEQ ID NO: 1226193 - DNA, 15 bp, Homo sapiens
ccagttttcccagca

SEQ ID NO: 1226194 - DNA, 15 bp, Homo sapiens
gccagttttcccagc

SEQ ID NO: 1226195 - DNA, 15 bp, Homo sapiens
agccagttttcccag

SEQ ID NO: 1226196 - DNA, 15 bp, Homo sapiens
ctttctacatatggc

SEQ ID NO: 1226197 - DNA, 15 bp, Homo sapiens
gctttctacatatgg

SEQ ID NO: 1226198 - DNA, 15 bp, Homo sapiens
agctttctacatatg

SEQ ID NO: 1226199 - DNA, 15 bp, Homo sapiens
cagctttctacatat

SEQ ID NO: 1226200 - DNA, 15 bp, Homo sapiens
tcagctttctacata

SEQ ID NO: 1226201 - DNA, 15 bp, Homo sapiens
ttcagctttctacat

SEQ ID NO: 1226202 - DNA, 15 bp, Homo sapiens
tttcagctttctaca

SEQ ID NO: 1226203 - DNA, 15 bp, Homo sapiens
gtttcagctttctac

SEQ ID NO: 1226204 - DNA, 15 bp, Homo sapiens
agtttcagctttcta

SEQ ID NO: 1226205 - DNA, 15 bp, Homo sapiens
cagtttcagctttct

SEQ ID NO: 1226206 - DNA, 15 bp, Homo sapiens
ccagtttcagctttc

SEQ ID NO: 1226207 - DNA, 15 bp, Homo sapiens
tccagtttcagcttt

SEQ ID NO: 1226208 - DNA, 15 bp, Homo sapiens
atccagtttcagctt

SEQ ID NO: 1226209 - DNA, 15 bp, Homo sapiens
gatccagtttcagct

SEQ ID NO: 1226210 - DNA, 15 bp, Homo sapiens
ggatccagtttcagc

SEQ ID NO: 1226211 - DNA, 15 bp, Homo sapiens
gggatccagtttcag

SEQ ID NO: 1226212 - DNA, 15 bp, Homo sapiens
agggatccagtttca

SEQ ID NO: 1226213 - DNA, 15 bp, Homo sapiens
aagggatccagtttc

SEQ ID NO: 1226214 - DNA, 15 bp, Homo sapiens
gatttttgtataagg

SEQ ID NO: 1226215 - DNA, 15 bp, Homo sapiens
tgatttttgtataag

SEQ ID NO: 1226216 - DNA, 15 bp, Homo sapiens
ttgatttttgtataa

SEQ ID NO: 1226217 - DNA, 15 bp, Homo sapiens
attgatttttgtata

SEQ ID NO: 1226218 - DNA, 15 bp, Homo sapiens
aattgatttttgtat

SEQ ID NO: 1226219 - DNA, 15 bp, Homo sapiens
gaattgatttttgta

SEQ ID NO: 1226220 - DNA, 15 bp, Homo sapiens
tgaattgatttttgt

SEQ ID NO: 1226221 - DNA, 15 bp, Homo sapiens
ttgaattgatttttg

SEQ ID NO: 1226222 - DNA, 15 bp, Homo sapiens
cttgaattgattttt

SEQ ID NO: 1226223 - DNA, 15 bp, Homo sapiens
tcttgaattgatttt

SEQ ID NO: 1226224 - DNA, 15 bp, Homo sapiens
atcttgaattgattt

SEQ ID NO: 1226225 - DNA, 15 bp, Homo sapiens
catcttgaattgatt

SEQ ID NO: 1226226 - DNA, 15 bp, Homo sapiens
ccatcttgaattgat

SEQ ID NO: 1226227 - DNA, 15 bp, Homo sapiens
tccatcttgaattga

SEQ ID NO: 1226228 - DNA, 15 bp, Homo sapiens
atccatcttgaattg

SEQ ID NO: 1226229 - DNA, 15 bp, Homo sapiens
aatccatcttgaatt

SEQ ID NO: 1226230 - DNA, 15 bp, Homo sapiens
taatccatcttgaat

SEQ ID NO: 1226231 - DNA, 15 bp, Homo sapiens
ttaatccatcttgaa

SEQ ID NO: 1226232 - DNA, 15 bp, Homo sapiens
tttaatccatcttga

SEQ ID NO: 1226233 - DNA, 15 bp, Homo sapiens
ctttaatccatcttg

SEQ ID NO: 1226234 - DNA, 15 bp, Homo sapiens
tctttaatccatctt

SEQ ID NO: 1226235 - DNA, 15 bp, Homo sapiens
ctctttaatccatct

SEQ ID NO: 1226236 - DNA, 15 bp, Homo sapiens
actctttaatccatc

SEQ ID NO: 1226237 - DNA, 15 bp, Homo sapiens
aactctttaatccat

SEQ ID NO: 1226238 - DNA, 15 bp, Homo sapiens
taactctttaatcca

SEQ ID NO: 1226239 - DNA, 15 bp, Homo sapiens
ttaactctttaatcc

SEQ ID NO: 1226240 - DNA, 15 bp, Homo sapiens
tttaactctttaatc

SEQ ID NO: 1226241 - DNA, 15 bp, Homo sapiens
gtttaactctttaat

SEQ ID NO: 1226242 - DNA, 15 bp, Homo sapiens
tgtttaactctttaa

SEQ ID NO: 1226243 - DNA, 15 bp, Homo sapiens
atgtttaactcttta

SEQ ID NO: 1226244 - DNA, 15 bp, Homo sapiens
aatgtttaactcttt

SEQ ID NO: 1226245 - DNA, 15 bp, Homo sapiens
taatgtttaactctt

SEQ ID NO: 1226246 - DNA, 15 bp, Homo sapiens
ctaatgtttaactct

SEQ ID NO: 1226247 - DNA, 15 bp, Homo sapiens
tctaatgtttaactc

SEQ ID NO: 1226248 - DNA, 15 bp, Homo sapiens
gtctaatgtttaact

SEQ ID NO: 1226249 - DNA, 15 bp, Homo sapiens
ggtctaatgtttaac

SEQ ID NO: 1226250 - DNA, 15 bp, Homo sapiens
aggtctaatgtttaa

SEQ ID NO: 1226251 - DNA, 15 bp, Homo sapiens
taggtctaatgttta

SEQ ID NO: 1226252 - DNA, 15 bp, Homo sapiens
ttaggtctaatgttt

SEQ ID NO: 1226253 - DNA, 15 bp, Homo sapiens
tttaggtctaatgtt

SEQ ID NO: 1226254 - DNA, 15 bp, Homo sapiens
ttttaggtctaatgt

SEQ ID NO: 1226255 - DNA, 15 bp, Homo sapiens
gttttaggtctaatg

SEQ ID NO: 1226256 - DNA, 15 bp, Homo sapiens
ggttttaggtctaat

SEQ ID NO: 1226257 - DNA, 15 bp, Homo sapiens
tggttttaggtctaa

SEQ ID NO: 1226258 - DNA, 15 bp, Homo sapiens
atggttttaggtcta

SEQ ID NO: 1226259 - DNA, 15 bp, Homo sapiens
tatggttttaggtct

SEQ ID NO: 1226260 - DNA, 15 bp, Homo sapiens
ttatggttttaggtc

SEQ ID NO: 1226261 - DNA, 15 bp, Homo sapiens
tttatggttttaggt

SEQ ID NO: 1226262 - DNA, 15 bp, Homo sapiens
ttttatggttttagg

SEQ ID NO: 1226263 - DNA, 15 bp, Homo sapiens
cttttatggttttag

SEQ ID NO: 1226264 - DNA, 15 bp, Homo sapiens
gcttttatggtttta

SEQ ID NO: 1226265 - DNA, 15 bp, Homo sapiens
ggcttttatggtttt

SEQ ID NO: 1226266 - DNA, 15 bp, Homo sapiens
gggcttttatggttt

SEQ ID NO: 1226267 - DNA, 15 bp, Homo sapiens
agggcttttatggtt

SEQ ID NO: 1226268 - DNA, 15 bp, Homo sapiens
tagggcttttatggt

SEQ ID NO: 1226269 - DNA, 15 bp, Homo sapiens
ctagggcttttatgg

SEQ ID NO: 1226270 - DNA, 15 bp, Homo sapiens
tctagggcttttatg

SEQ ID NO: 1226271 - DNA, 15 bp, Homo sapiens
ttctagggcttttat

SEQ ID NO: 1226272 - DNA, 15 bp, Homo sapiens
cttctagggctttta

SEQ ID NO: 1226273 - DNA, 15 bp, Homo sapiens
tcttctagggctttt

SEQ ID NO: 1226274 - DNA, 15 bp, Homo sapiens
ttcttctagggcttt

SEQ ID NO: 1226275 - DNA, 15 bp, Homo sapiens
tttcttctagggctt

SEQ ID NO: 1226276 - DNA, 15 bp, Homo sapiens
ttttcttctagggct

SEQ ID NO: 1226277 - DNA, 15 bp, Homo sapiens
gttttcttctagggc

SEQ ID NO: 1226278 - DNA, 15 bp, Homo sapiens
ggttttcttctaggg

SEQ ID NO: 1226279 - DNA, 15 bp, Homo sapiens
aggttttcttctagg

SEQ ID NO: 1226280 - DNA, 15 bp, Homo sapiens
taggttttcttctag

SEQ ID NO: 1226281 - DNA, 15 bp, Homo sapiens
ctaggttttcttcta

SEQ ID NO: 1226282 - DNA, 15 bp, Homo sapiens
cctaggttttcttct

SEQ ID NO: 1226283 - DNA, 15 bp, Homo sapiens
gcctaggttttcttc

SEQ ID NO: 1226284 - DNA, 15 bp, Homo sapiens
tgcctaggttttctt

SEQ ID NO: 1226285 - DNA, 15 bp, Homo sapiens
atgcctaggttttct

SEQ ID NO: 1226286 - DNA, 15 bp, Homo sapiens
aatgcctaggttttc

SEQ ID NO: 1226287 - DNA, 15 bp, Homo sapiens
taatgcctaggtttt

SEQ ID NO: 1226288 - DNA, 15 bp, Homo sapiens
gtaatgcctaggttt

SEQ ID NO: 1226289 - DNA, 15 bp, Homo sapiens
ggtaatgcctaggtt

SEQ ID NO: 1226290 - DNA, 15 bp, Homo sapiens
tggtaatgcctaggt

SEQ ID NO: 1226291 - DNA, 15 bp, Homo sapiens
atggtaatgcctagg

SEQ ID NO: 1226292 - DNA, 15 bp, Homo sapiens
aatggtaatgcctag

SEQ ID NO: 1226293 - DNA, 15 bp, Homo sapiens
gaatggtaatgccta

SEQ ID NO: 1226294 - DNA, 15 bp, Homo sapiens
tgaatggtaatgcct

SEQ ID NO: 1226295 - DNA, 15 bp, Homo sapiens
ctgaatggtaatgcc

SEQ ID NO: 1226296 - DNA, 15 bp, Homo sapiens
cctgaatggtaatgc

SEQ ID NO: 1226297 - DNA, 15 bp, Homo sapiens
tcctgaatggtaatg

SEQ ID NO: 1226298 - DNA, 15 bp, Homo sapiens
gtcctgaatggtaat

SEQ ID NO: 1226299 - DNA, 15 bp, Homo sapiens
tgtcctgaatggtaa

SEQ ID NO: 1226300 - DNA, 15 bp, Homo sapiens
atgtcctgaatggta

SEQ ID NO: 1226301 - DNA, 15 bp, Homo sapiens
tatgtcctgaatggt

SEQ ID NO: 1226302 - DNA, 15 bp, Homo sapiens
ctatgtcctgaatgg

SEQ ID NO: 1226303 - DNA, 15 bp, Homo sapiens
cctatgtcctgaatg

SEQ ID NO: 1226304 - DNA, 15 bp, Homo sapiens
gcctatgtcctgaat

SEQ ID NO: 1226305 - DNA, 15 bp, Homo sapiens
tgcctatgtcctgaa

SEQ ID NO: 1226306 - DNA, 15 bp, Homo sapiens
gtgcctatgtcctga

SEQ ID NO: 1226307 - DNA, 15 bp, Homo sapiens
cgtgcctatgtcctg

SEQ ID NO: 1226308 - DNA, 15 bp, Homo sapiens
ccgtgcctatgtcct

SEQ ID NO: 1226309 - DNA, 15 bp, Homo sapiens
cccgtgcctatgtcc

SEQ ID NO: 1226310 - DNA, 15 bp, Homo sapiens
gcccgtgcctatgtc

SEQ ID NO: 1226311 - DNA, 15 bp, Homo sapiens
tgcccgtgcctatgt

SEQ ID NO: 1226312 - DNA, 15 bp, Homo sapiens
ttgcccgtgcctatg

SEQ ID NO: 1226313 - DNA, 15 bp, Homo sapiens
cttgcccgtgcctat

SEQ ID NO: 1226314 - DNA, 15 bp, Homo sapiens
ccttgcccgtgccta

SEQ ID NO: 1226315 - DNA, 15 bp, Homo sapiens
tccttgcccgtgcct

SEQ ID NO: 1226316 - DNA, 15 bp, Homo sapiens
gtccttgcccgtgcc

SEQ ID NO: 1226317 - DNA, 15 bp, Homo sapiens
agtccttgcccgtgc

SEQ ID NO: 1226318 - DNA, 15 bp, Homo sapiens
aagtccttgcccgtg

SEQ ID NO: 1226319 - DNA, 15 bp, Homo sapiens
gaagtccttgcccgt

SEQ ID NO: 1226320 - DNA, 15 bp, Homo sapiens
tgaagtccttgcccg

SEQ ID NO: 1226321 - DNA, 15 bp, Homo sapiens
atgaagtccttgccc

SEQ ID NO: 1226322 - DNA, 15 bp, Homo sapiens
catgaagtccttgcc

SEQ ID NO: 1226323 - DNA, 15 bp, Homo sapiens
acatgaagtccttgc

SEQ ID NO: 1226324 - DNA, 15 bp, Homo sapiens
gacatgaagtccttg

SEQ ID NO: 1226325 - DNA, 15 bp, Homo sapiens
agacatgaagtcctt

SEQ ID NO: 1226326 - DNA, 15 bp, Homo sapiens
tagacatgaagtcct

SEQ ID NO: 1226327 - DNA, 15 bp, Homo sapiens
ttagacatgaagtcc

SEQ ID NO: 1226328 - DNA, 15 bp, Homo sapiens
tttagacatgaagtc

SEQ ID NO: 1226329 - DNA, 15 bp, Homo sapiens
ttttagacatgaagt

SEQ ID NO: 1226330 - DNA, 15 bp, Homo sapiens
gttttagacatgaag

SEQ ID NO: 1226331 - DNA, 15 bp, Homo sapiens
tgttttagacatgaa

SEQ ID NO: 1226332 - DNA, 15 bp, Homo sapiens
gtgttttagacatga

SEQ ID NO: 1226333 - DNA, 15 bp, Homo sapiens
ggtgttttagacatg

SEQ ID NO: 1226334 - DNA, 15 bp, Homo sapiens
tggtgttttagacat

SEQ ID NO: 1226335 - DNA, 15 bp, Homo sapiens
ttggtgttttagaca

SEQ ID NO: 1226336 - DNA, 15 bp, Homo sapiens
tttggtgttttagac

SEQ ID NO: 1226337 - DNA, 15 bp, Homo sapiens
ttttggtgttttaga

SEQ ID NO: 1226338 - DNA, 15 bp, Homo sapiens
cattgcttttggtgt

SEQ ID NO: 1226339 - DNA, 15 bp, Homo sapiens
ccattgcttttggtg

SEQ ID NO: 1226340 - DNA, 15 bp, Homo sapiens
gccattgcttttggt

SEQ ID NO: 1226341 - DNA, 15 bp, Homo sapiens
tgccattgcttttgg

SEQ ID NO: 1226342 - DNA, 15 bp, Homo sapiens
ttgccattgcttttg

SEQ ID NO: 1226343 - DNA, 15 bp, Homo sapiens
gttgccattgctttt

SEQ ID NO: 1226344 - DNA, 15 bp, Homo sapiens
tgttgccattgcttt

SEQ ID NO: 1226345 - DNA, 15 bp, Homo sapiens
ttgttgccattgctt

SEQ ID NO: 1226346 - DNA, 15 bp, Homo sapiens
tttgttgccattgct

SEQ ID NO: 1226347 - DNA, 15 bp, Homo sapiens
ttttgttgccattgc

SEQ ID NO: 1226348 - DNA, 15 bp, Homo sapiens
cttttgttgccattg

SEQ ID NO: 1226349 - DNA, 15 bp, Homo sapiens
gcttttgttgccatt

SEQ ID NO: 1226350 - DNA, 15 bp, Homo sapiens
ggcttttgttgccat

SEQ ID NO: 1226351 - DNA, 15 bp, Homo sapiens
tggcttttgttgcca

SEQ ID NO: 1226352 - DNA, 15 bp, Homo sapiens
ttggcttttgttgcc

SEQ ID NO: 1226353 - DNA, 15 bp, Homo sapiens
gtcaattttggcttt

SEQ ID NO: 1226354 - DNA, 15 bp, Homo sapiens
tgtcaattttggctt

SEQ ID NO: 1226355 - DNA, 15 bp, Homo sapiens
ttgtcaattttggct

SEQ ID NO: 1226356 - DNA, 15 bp, Homo sapiens
tttgtcaattttggc

SEQ ID NO: 1226357 - DNA, 15 bp, Homo sapiens
atttgtcaattttgg

SEQ ID NO: 1226358 - DNA, 15 bp, Homo sapiens
catttgtcaattttg

SEQ ID NO: 1226359 - DNA, 15 bp, Homo sapiens
ccatttgtcaatttt

SEQ ID NO: 1226360 - DNA, 15 bp, Homo sapiens
cccatttgtcaattt

SEQ ID NO: 1226361 - DNA, 15 bp, Homo sapiens
tcccatttgtcaatt

SEQ ID NO: 1226362 - DNA, 15 bp, Homo sapiens
atcccatttgtcaat

SEQ ID NO: 1226363 - DNA, 15 bp, Homo sapiens
gatcccatttgtcaa

SEQ ID NO: 1226364 - DNA, 15 bp, Homo sapiens
agatcccatttgtca

SEQ ID NO: 1226365 - DNA, 15 bp, Homo sapiens
tagatcccatttgtc

SEQ ID NO: 1226366 - DNA, 15 bp, Homo sapiens
ttagatcccatttgt

SEQ ID NO: 1226367 - DNA, 15 bp, Homo sapiens
attagatcccatttg

SEQ ID NO: 1226368 - DNA, 15 bp, Homo sapiens
aattagatcccattt

SEQ ID NO: 1226369 - DNA, 15 bp, Homo sapiens
taattagatcccatt

SEQ ID NO: 1226370 - DNA, 15 bp, Homo sapiens
ttaattagatcccat

SEQ ID NO: 1226371 - DNA, 15 bp, Homo sapiens
tttaattagatccca

SEQ ID NO: 1226372 - DNA, 15 bp, Homo sapiens
gtttaattagatccc

SEQ ID NO: 1226373 - DNA, 15 bp, Homo sapiens
agtttaattagatcc

SEQ ID NO: 1226374 - DNA, 15 bp, Homo sapiens
tagtttaattagatc

SEQ ID NO: 1226375 - DNA, 15 bp, Homo sapiens
ttagtttaattagat

SEQ ID NO: 1226376 - DNA, 15 bp, Homo sapiens
tttagtttaattaga

SEQ ID NO: 1226377 - DNA, 15 bp, Homo sapiens
ctttagtttaattag

SEQ ID NO: 1226378 - DNA, 15 bp, Homo sapiens
gctctttagtttaat

SEQ ID NO: 1226379 - DNA, 15 bp, Homo sapiens
agctctttagtttaa

SEQ ID NO: 1226380 - DNA, 15 bp, Homo sapiens
aagctctttagttta

SEQ ID NO: 1226381 - DNA, 15 bp, Homo sapiens
gaagctctttagttt

SEQ ID NO: 1226382 - DNA, 15 bp, Homo sapiens
agaagctctttagtt

SEQ ID NO: 1226383 - DNA, 15 bp, Homo sapiens
cagaagctctttagt

SEQ ID NO: 1226384 - DNA, 15 bp, Homo sapiens
gtagtttcttttgct

SEQ ID NO: 1226385 - DNA, 15 bp, Homo sapiens
ggtagtttcttttgc

SEQ ID NO: 1226386 - DNA, 15 bp, Homo sapiens
tggtagtttcttttg

SEQ ID NO: 1226387 - DNA, 15 bp, Homo sapiens
atggtagtttctttt

SEQ ID NO: 1226388 - DNA, 15 bp, Homo sapiens
gatggtagtttcttt

SEQ ID NO: 1226389 - DNA, 15 bp, Homo sapiens
tgatggtagtttctt

SEQ ID NO: 1226390 - DNA, 15 bp, Homo sapiens
ctgatggtagtttct

SEQ ID NO: 1226391 - DNA, 15 bp, Homo sapiens
tctgatggtagtttc

SEQ ID NO: 1226392 - DNA, 15 bp, Homo sapiens
ctctgatggtagttt

SEQ ID NO: 1226393 - DNA, 15 bp, Homo sapiens
actctgatggtagtt

SEQ ID NO: 1226394 - DNA, 15 bp, Homo sapiens
cactctgatggtagt

SEQ ID NO: 1226395 - DNA, 15 bp, Homo sapiens
tcactctgatggtag

SEQ ID NO: 1226396 - DNA, 15 bp, Homo sapiens
ttcactctgatggta

SEQ ID NO: 1226397 - DNA, 15 bp, Homo sapiens
gttcactctgatggt

SEQ ID NO: 1226398 - DNA, 15 bp, Homo sapiens
tgttcactctgatgg

SEQ ID NO: 1226399 - DNA, 15 bp, Homo sapiens
ctgttcactctgatg

SEQ ID NO: 1226400 - DNA, 15 bp, Homo sapiens
cctgttcactctgat

SEQ ID NO: 1226401 - DNA, 15 bp, Homo sapiens
gcctgttcactctga

SEQ ID NO: 1226402 - DNA, 15 bp, Homo sapiens
tgcctgttcactctg

SEQ ID NO: 1226403 - DNA, 15 bp, Homo sapiens
ttgcctgttcactct

SEQ ID NO: 1226404 - DNA, 15 bp, Homo sapiens
gttgcctgttcactc

SEQ ID NO: 1226405 - DNA, 15 bp, Homo sapiens
ggttgcctgttcact

SEQ ID NO: 1226406 - DNA, 15 bp, Homo sapiens
gggttgcctgttcac

SEQ ID NO: 1226407 - DNA, 15 bp, Homo sapiens
tgggttgcctgttca

SEQ ID NO: 1226408 - DNA, 15 bp, Homo sapiens
gtgggttgcctgttc

SEQ ID NO: 1226409 - DNA, 15 bp, Homo sapiens
tgtgggttgcctgtt

SEQ ID NO: 1226410 - DNA, 15 bp, Homo sapiens
ttgtgggttgcctgt

SEQ ID NO: 1226411 - DNA, 15 bp, Homo sapiens
tttgtgggttgcctg

SEQ ID NO: 1226412 - DNA, 15 bp, Homo sapiens
ttttgtgggttgcct

SEQ ID NO: 1226413 - DNA, 15 bp, Homo sapiens
attttgtgggttgcc

SEQ ID NO: 1226414 - DNA, 15 bp, Homo sapiens
ctattttgtgggttg

SEQ ID NO: 1226415 - DNA, 15 bp, Homo sapiens
cctattttgtgggtt

SEQ ID NO: 1226416 - DNA, 15 bp, Homo sapiens
tcctattttgtgggt

SEQ ID NO: 1226417 - DNA, 15 bp, Homo sapiens
ttcctattttgtggg

SEQ ID NO: 1226418 - DNA, 15 bp, Homo sapiens
tttcctattttgtgg

SEQ ID NO: 1226419 - DNA, 15 bp, Homo sapiens
ttttcctattttgtg

SEQ ID NO: 1226420 - DNA, 15 bp, Homo sapiens
tttttcctattttgt

SEQ ID NO: 1226421 - DNA, 15 bp, Homo sapiens
ttttttcctattttg

SEQ ID NO: 1226422 - DNA, 15 bp, Homo sapiens
attttttcctatttt

SEQ ID NO: 1226423 - DNA, 15 bp, Homo sapiens
aattttttcctattt

SEQ ID NO: 1226424 - DNA, 15 bp, Homo sapiens
aaattttttcctatt

SEQ ID NO: 1226425 - DNA, 15 bp, Homo sapiens
aaaattttttcctat

SEQ ID NO: 1226426 - DNA, 15 bp, Homo sapiens
gaaaattttttccta

SEQ ID NO: 1226427 - DNA, 15 bp, Homo sapiens
cgaaaattttttcct

SEQ ID NO: 1226428 - DNA, 15 bp, Homo sapiens
gcgaaaattttttcc

SEQ ID NO: 1226429 - DNA, 15 bp, Homo sapiens
tgcgaaaattttttc

SEQ ID NO: 1226430 - DNA, 15 bp, Homo sapiens
ttgcgaaaatttttt

SEQ ID NO: 1226431 - DNA, 15 bp, Homo sapiens
gttgcgaaaattttt

SEQ ID NO: 1226432 - DNA, 15 bp, Homo sapiens
ggttgcgaaaatttt

SEQ ID NO: 1226433 - DNA, 15 bp, Homo sapiens
aggttgcgaaaattt

SEQ ID NO: 1226434 - DNA, 15 bp, Homo sapiens
taggttgcgaaaatt

SEQ ID NO: 1226435 - DNA, 15 bp, Homo sapiens
gtaggttgcgaaaat

SEQ ID NO: 1226436 - DNA, 15 bp, Homo sapiens
agtaggttgcgaaaa

SEQ ID NO: 1226437 - DNA, 15 bp, Homo sapiens
gagtaggttgcgaaa

SEQ ID NO: 1226438 - DNA, 15 bp, Homo sapiens
tgagtaggttgcgaa

SEQ ID NO: 1226439 - DNA, 15 bp, Homo sapiens
atgagtaggttgcga

SEQ ID NO: 1226440 - DNA, 15 bp, Homo sapiens
gatgagtaggttgcg

SEQ ID NO: 1226441 - DNA, 15 bp, Homo sapiens
agatgagtaggttgc

SEQ ID NO: 1226442 - DNA, 15 bp, Homo sapiens
cagatgagtaggttg

SEQ ID NO: 1226443 - DNA, 15 bp, Homo sapiens
tcagatgagtaggtt

SEQ ID NO: 1226444 - DNA, 15 bp, Homo sapiens
gtcagatgagtaggt

SEQ ID NO: 1226445 - DNA, 15 bp, Homo sapiens
tgtcagatgagtagg

SEQ ID NO: 1226446 - DNA, 15 bp, Homo sapiens
ttgtcagatgagtag

SEQ ID NO: 1226447 - DNA, 15 bp, Homo sapiens
tttgtcagatgagta

SEQ ID NO: 1226448 - DNA, 15 bp, Homo sapiens
ctttgtcagatgagt

SEQ ID NO: 1226449 - DNA, 15 bp, Homo sapiens
cctttgtcagatgag

SEQ ID NO: 1226450 - DNA, 15 bp, Homo sapiens
ccctttgtcagatga

SEQ ID NO: 1226451 - DNA, 15 bp, Homo sapiens
gccctttgtcagatg

SEQ ID NO: 1226452 - DNA, 15 bp, Homo sapiens
agccctttgtcagat

SEQ ID NO: 1226453 - DNA, 15 bp, Homo sapiens
tagccctttgtcaga

SEQ ID NO: 1226454 - DNA, 15 bp, Homo sapiens
ttagccctttgtcag

SEQ ID NO: 1226455 - DNA, 15 bp, Homo sapiens
attagccctttgtca

SEQ ID NO: 1226456 - DNA, 15 bp, Homo sapiens
tattagccctttgtc

SEQ ID NO: 1226457 - DNA, 15 bp, Homo sapiens
atattagccctttgt

SEQ ID NO: 1226458 - DNA, 15 bp, Homo sapiens
gatattagccctttg

SEQ ID NO: 1226459 - DNA, 15 bp, Homo sapiens
ggatattagcccttt

SEQ ID NO: 1226460 - DNA, 15 bp, Homo sapiens
tggatattagccctt

SEQ ID NO: 1226461 - DNA, 15 bp, Homo sapiens
ctggatattagccct

SEQ ID NO: 1226462 - DNA, 15 bp, Homo sapiens
tctggatattagccc

SEQ ID NO: 1226463 - DNA, 15 bp, Homo sapiens
ttctggatattagcc

SEQ ID NO: 1226464 - DNA, 15 bp, Homo sapiens
attctggatattagc

SEQ ID NO: 1226465 - DNA, 15 bp, Homo sapiens
gattctggatattag

SEQ ID NO: 1226466 - DNA, 15 bp, Homo sapiens
agattctggatatta

SEQ ID NO: 1226467 - DNA, 15 bp, Homo sapiens
tagattctggatatt

SEQ ID NO: 1226468 - DNA, 15 bp, Homo sapiens
gtagattctggatat

SEQ ID NO: 1226469 - DNA, 15 bp, Homo sapiens
tgtagattctggata

SEQ ID NO: 1226470 - DNA, 15 bp, Homo sapiens
ttgtagattctggat

SEQ ID NO: 1226471 - DNA, 15 bp, Homo sapiens
attgtagattctgga

SEQ ID NO: 1226472 - DNA, 15 bp, Homo sapiens
cattgtagattctgg

SEQ ID NO: 1226473 - DNA, 15 bp, Homo sapiens
tcattgtagattctg

SEQ ID NO: 1226474 - DNA, 15 bp, Homo sapiens
ttcattgtagattct

SEQ ID NO: 1226475 - DNA, 15 bp, Homo sapiens
cttcattgtagattc

SEQ ID NO: 1226476 - DNA, 15 bp, Homo sapiens
acttcattgtagatt

SEQ ID NO: 1226477 - DNA, 15 bp, Homo sapiens
gacttcattgtagat

SEQ ID NO: 1226478 - DNA, 15 bp, Homo sapiens
tgacttcattgtaga

SEQ ID NO: 1226479 - DNA, 15 bp, Homo sapiens
ttgacttcattgtag

SEQ ID NO: 1226480 - DNA, 15 bp, Homo sapiens
tttgacttcattgta

SEQ ID NO: 1226481 - DNA, 15 bp, Homo sapiens
gtttgacttcattgt

SEQ ID NO: 1226482 - DNA, 15 bp, Homo sapiens
tgtttgacttcattg

SEQ ID NO: 1226483 - DNA, 15 bp, Homo sapiens
ttgtttgacttcatt

SEQ ID NO: 1226484 - DNA, 15 bp, Homo sapiens
tttgtttgacttcat

SEQ ID NO: 1226485 - DNA, 15 bp, Homo sapiens
atttgtttgacttca

SEQ ID NO: 1226486 - DNA, 15 bp, Homo sapiens
aatttgtttgacttc

SEQ ID NO: 1226487 - DNA, 15 bp, Homo sapiens
aaatttgtttgactt

SEQ ID NO: 1226488 - DNA, 15 bp, Homo sapiens
taaatttgtttgact

SEQ ID NO: 1226489 - DNA, 15 bp, Homo sapiens
gtaaatttgtttgac

SEQ ID NO: 1226490 - DNA, 15 bp, Homo sapiens
cttgtaaatttgttt

SEQ ID NO: 1226491 - DNA, 15 bp, Homo sapiens
tcttgtaaatttgtt

SEQ ID NO: 1226492 - DNA, 15 bp, Homo sapiens
ttcttgtaaatttgt

SEQ ID NO: 1226493 - DNA, 15 bp, Homo sapiens
tttcttgtaaatttg

SEQ ID NO: 1226494 - DNA, 15 bp, Homo sapiens
ttttcttgtaaattt

SEQ ID NO: 1226495 - DNA, 15 bp, Homo sapiens
tttttcttgtaaatt

SEQ ID NO: 1226496 - DNA, 15 bp, Homo sapiens
ttttttcttgtaaat

SEQ ID NO: 1226497 - DNA, 15 bp, Homo sapiens
tttttttcttgtaaa

SEQ ID NO: 1226498 - DNA, 15 bp, Homo sapiens
gtttttttcttgtaa

SEQ ID NO: 1226499 - DNA, 15 bp, Homo sapiens
tgtttttttcttgta

SEQ ID NO: 1226500 - DNA, 15 bp, Homo sapiens
ttgtttttttcttgt

SEQ ID NO: 1226501 - DNA, 15 bp, Homo sapiens
tttgtttttttcttg

SEQ ID NO: 1226502 - DNA, 15 bp, Homo sapiens
tgtttgtttttttct

SEQ ID NO: 1226503 - DNA, 15 bp, Homo sapiens
ttgtttgtttttttc

SEQ ID NO: 1226504 - DNA, 15 bp, Homo sapiens
gttgtttgttttttt

SEQ ID NO: 1226505 - DNA, 15 bp, Homo sapiens
ggttgtttgtttttt

SEQ ID NO: 1226506 - DNA, 15 bp, Homo sapiens
gggttgtttgttttt

SEQ ID NO: 1226507 - DNA, 15 bp, Homo sapiens
ggggttgtttgtttt

SEQ ID NO: 1226508 - DNA, 15 bp, Homo sapiens
tggggttgtttgttt

SEQ ID NO: 1226509 - DNA, 15 bp, Homo sapiens
atggggttgtttgtt

SEQ ID NO: 1226510 - DNA, 15 bp, Homo sapiens
gatggggttgtttgt

SEQ ID NO: 1226511 - DNA, 15 bp, Homo sapiens
tgatggggttgtttg

SEQ ID NO: 1226512 - DNA, 15 bp, Homo sapiens
ttgatggggttgttt

SEQ ID NO: 1226513 - DNA, 15 bp, Homo sapiens
tttgatggggttgtt

SEQ ID NO: 1226514 - DNA, 15 bp, Homo sapiens
ttttgatggggttgt

SEQ ID NO: 1226515 - DNA, 15 bp, Homo sapiens
tttttgatggggttg

SEQ ID NO: 1226516 - DNA, 15 bp, Homo sapiens
ctttttgatggggtt

SEQ ID NO: 1226517 - DNA, 15 bp, Homo sapiens
actttttgatggggt

SEQ ID NO: 1226518 - DNA, 15 bp, Homo sapiens
cactttttgatgggg

SEQ ID NO: 1226519 - DNA, 15 bp, Homo sapiens
ccactttttgatggg

SEQ ID NO: 1226520 - DNA, 15 bp, Homo sapiens
cccactttttgatgg

SEQ ID NO: 1226521 - DNA, 15 bp, Homo sapiens
gcccactttttgatg

SEQ ID NO: 1226522 - DNA, 15 bp, Homo sapiens
cgcccactttttgat

SEQ ID NO: 1226523 - DNA, 15 bp, Homo sapiens
tcgcccactttttga

SEQ ID NO: 1226524 - DNA, 15 bp, Homo sapiens
ttcgcccactttttg

SEQ ID NO: 1226525 - DNA, 15 bp, Homo sapiens
cttcgcccacttttt

SEQ ID NO: 1226526 - DNA, 15 bp, Homo sapiens
ccttcgcccactttt

SEQ ID NO: 1226527 - DNA, 15 bp, Homo sapiens
tccttcgcccacttt

SEQ ID NO: 1226528 - DNA, 15 bp, Homo sapiens
gtccttcgcccactt

SEQ ID NO: 1226529 - DNA, 15 bp, Homo sapiens
tgtccttcgcccact

SEQ ID NO: 1226530 - DNA, 15 bp, Homo sapiens
atgtccttcgcccac

SEQ ID NO: 1226531 - DNA, 15 bp, Homo sapiens
catgtccttcgccca

SEQ ID NO: 1226532 - DNA, 15 bp, Homo sapiens
tcatgtccttcgccc

SEQ ID NO: 1226533 - DNA, 15 bp, Homo sapiens
ttcatgtccttcgcc

SEQ ID NO: 1226534 - DNA, 15 bp, Homo sapiens
attcatgtccttcgc

SEQ ID NO: 1226535 - DNA, 15 bp, Homo sapiens
tattcatgtccttcg

SEQ ID NO: 1226536 - DNA, 15 bp, Homo sapiens
ctattcatgtccttc

SEQ ID NO: 1226537 - DNA, 15 bp, Homo sapiens
gtgtctattcatgtc

SEQ ID NO: 1226538 - DNA, 15 bp, Homo sapiens
agtgtctattcatgt

SEQ ID NO: 1226539 - DNA, 15 bp, Homo sapiens
aagtgtctattcatg

SEQ ID NO: 1226540 - DNA, 15 bp, Homo sapiens
gaagtgtctattcat

SEQ ID NO: 1226541 - DNA, 15 bp, Homo sapiens
agaagtgtctattca

SEQ ID NO: 1226542 - DNA, 15 bp, Homo sapiens
gagaagtgtctattc

SEQ ID NO: 1226543 - DNA, 15 bp, Homo sapiens
tgagaagtgtctatt

SEQ ID NO: 1226544 - DNA, 15 bp, Homo sapiens
ttgagaagtgtctat

SEQ ID NO: 1226545 - DNA, 15 bp, Homo sapiens
tttgagaagtgtcta

SEQ ID NO: 1226546 - DNA, 15 bp, Homo sapiens
ttttgagaagtgtct

SEQ ID NO: 1226547 - DNA, 15 bp, Homo sapiens
cttttgagaagtgtc

SEQ ID NO: 1226548 - DNA, 15 bp, Homo sapiens
tcttttgagaagtgt

SEQ ID NO: 1226549 - DNA, 15 bp, Homo sapiens
ttcttttgagaagtg

SEQ ID NO: 1226550 - DNA, 15 bp, Homo sapiens
cttcttttgagaagt

SEQ ID NO: 1226551 - DNA, 15 bp, Homo sapiens
tcttcttttgagaag

SEQ ID NO: 1226552 - DNA, 15 bp, Homo sapiens
gtcttcttttgagaa

SEQ ID NO: 1226553 - DNA, 15 bp, Homo sapiens
tgtcttcttttgaga

SEQ ID NO: 1226554 - DNA, 15 bp, Homo sapiens
atgtcttcttttgag

SEQ ID NO: 1226555 - DNA, 15 bp, Homo sapiens
aatgtcttcttttga

SEQ ID NO: 1226556 - DNA, 15 bp, Homo sapiens
aaatgtcttcttttg

SEQ ID NO: 1226557 - DNA, 15 bp, Homo sapiens
taaatgtcttctttt

SEQ ID NO: 1226558 - DNA, 15 bp, Homo sapiens
ataaatgtcttcttt

SEQ ID NO: 1226559 - DNA, 15 bp, Homo sapiens
cataaatgtcttctt

SEQ ID NO: 1226560 - DNA, 15 bp, Homo sapiens
gcataaatgtcttct

SEQ ID NO: 1226561 - DNA, 15 bp, Homo sapiens
tgcataaatgtcttc

SEQ ID NO: 1226562 - DNA, 15 bp, Homo sapiens
ctgcataaatgtctt

SEQ ID NO: 1226563 - DNA, 15 bp, Homo sapiens
gctgcataaatgtct

SEQ ID NO: 1226564 - DNA, 15 bp, Homo sapiens
ggctgcataaatgtc

SEQ ID NO: 1226565 - DNA, 15 bp, Homo sapiens
tggctgcataaatgt

SEQ ID NO: 1226566 - DNA, 15 bp, Homo sapiens
ttggctgcataaatg

SEQ ID NO: 1226567 - DNA, 15 bp, Homo sapiens
tttggctgcataaat

SEQ ID NO: 1226568 - DNA, 15 bp, Homo sapiens
ttttggctgcataaa

SEQ ID NO: 1226569 - DNA, 15 bp, Homo sapiens
tttttggctgcataa

SEQ ID NO: 1226570 - DNA, 15 bp, Homo sapiens
ttttttggctgcata

SEQ ID NO: 1226571 - DNA, 15 bp, Homo sapiens
gttttttggctgcat

SEQ ID NO: 1226572 - DNA, 15 bp, Homo sapiens
tgttttttggctgca

SEQ ID NO: 1226573 - DNA, 15 bp, Homo sapiens
gtgttttttggctgc

SEQ ID NO: 1226574 - DNA, 15 bp, Homo sapiens
tgtgttttttggctg

SEQ ID NO: 1226575 - DNA, 15 bp, Homo sapiens
atgtgttttttggct

SEQ ID NO: 1226576 - DNA, 15 bp, Homo sapiens
catgtgttttttggc

SEQ ID NO: 1226577 - DNA, 15 bp, Homo sapiens
tcatgtgttttttgg

SEQ ID NO: 1226578 - DNA, 15 bp, Homo sapiens
ttcatgtgttttttg

SEQ ID NO: 1226579 - DNA, 15 bp, Homo sapiens
tttcatgtgtttttt

SEQ ID NO: 1226580 - DNA, 15 bp, Homo sapiens
ttttcatgtgttttt

SEQ ID NO: 1226581 - DNA, 15 bp, Homo sapiens
tttttcatgtgtttt

SEQ ID NO: 1226582 - DNA, 15 bp, Homo sapiens
ttttttcatgtgttt

SEQ ID NO: 1226583 - DNA, 15 bp, Homo sapiens
attttttcatgtgtt

SEQ ID NO: 1226584 - DNA, 15 bp, Homo sapiens
cattttttcatgtgt

SEQ ID NO: 1226585 - DNA, 15 bp, Homo sapiens
gcattttttcatgtg

SEQ ID NO: 1226586 - DNA, 15 bp, Homo sapiens
agcattttttcatgt

SEQ ID NO: 1226587 - DNA, 15 bp, Homo sapiens
gagcattttttcatg

SEQ ID NO: 1226588 - DNA, 15 bp, Homo sapiens
tgagcattttttcat

SEQ ID NO: 1226589 - DNA, 15 bp, Homo sapiens
gtgagcattttttca

SEQ ID NO: 1226590 - DNA, 15 bp, Homo sapiens
ggtgagcattttttc

SEQ ID NO: 1226591 - DNA, 15 bp, Homo sapiens
tggtgagcatttttt

SEQ ID NO: 1226592 - DNA, 15 bp, Homo sapiens
gtggtgagcattttt

SEQ ID NO: 1226593 - DNA, 15 bp, Homo sapiens
ggtggtgagcatttt

SEQ ID NO: 1226594 - DNA, 15 bp, Homo sapiens
tggtggtgagcattt

SEQ ID NO: 1226595 - DNA, 15 bp, Homo sapiens
gtggtggtgagcatt

SEQ ID NO: 1226596 - DNA, 15 bp, Homo sapiens
agtggtggtgagcat

SEQ ID NO: 1226597 - DNA, 15 bp, Homo sapiens
cagtggtggtgagca

SEQ ID NO: 1226598 - DNA, 15 bp, Homo sapiens
ccagtggtggtgagc

SEQ ID NO: 1226599 - DNA, 15 bp, Homo sapiens
gccagtggtggtgag

SEQ ID NO: 1226600 - DNA, 15 bp, Homo sapiens
ggccagtggtggtga

SEQ ID NO: 1226601 - DNA, 15 bp, Homo sapiens
tggccagtggtggtg

SEQ ID NO: 1226602 - DNA, 15 bp, Homo sapiens
atggccagtggtggt

SEQ ID NO: 1226603 - DNA, 15 bp, Homo sapiens
gatggccagtggtgg

SEQ ID NO: 1226604 - DNA, 15 bp, Homo sapiens
tgatggccagtggtg

SEQ ID NO: 1226605 - DNA, 15 bp, Homo sapiens
ctgatggccagtggt

SEQ ID NO: 1226606 - DNA, 15 bp, Homo sapiens
tctgatggccagtgg

SEQ ID NO: 1226607 - DNA, 15 bp, Homo sapiens
ctctgatggccagtg

SEQ ID NO: 1226608 - DNA, 15 bp, Homo sapiens
tctctgatggccagt

SEQ ID NO: 1226609 - DNA, 15 bp, Homo sapiens
ttctctgatggccag

SEQ ID NO: 1226610 - DNA, 15 bp, Homo sapiens
tttctctgatggcca

SEQ ID NO: 1226611 - DNA, 15 bp, Homo sapiens
atttctctgatggcc

SEQ ID NO: 1226612 - DNA, 15 bp, Homo sapiens
catttctctgatggc

SEQ ID NO: 1226613 - DNA, 15 bp, Homo sapiens
gcatttctctgatgg

SEQ ID NO: 1226614 - DNA, 15 bp, Homo sapiens
gtggttttgatttgc

SEQ ID NO: 1226615 - DNA, 15 bp, Homo sapiens
tgtggttttgatttg

SEQ ID NO: 1226616 - DNA, 15 bp, Homo sapiens
ttgtggttttgattt

SEQ ID NO: 1226617 - DNA, 15 bp, Homo sapiens
attgtggttttgatt

SEQ ID NO: 1226618 - DNA, 15 bp, Homo sapiens
cattgtggttttgat

SEQ ID NO: 1226619 - DNA, 15 bp, Homo sapiens
tcattgtggttttga

SEQ ID NO: 1226620 - DNA, 15 bp, Homo sapiens
ctcattgtggttttg

SEQ ID NO: 1226621 - DNA, 15 bp, Homo sapiens
tctcattgtggtttt

SEQ ID NO: 1226622 - DNA, 15 bp, Homo sapiens
atctcattgtggttt

SEQ ID NO: 1226623 - DNA, 15 bp, Homo sapiens
tatctcattgtggtt

SEQ ID NO: 1226624 - DNA, 15 bp, Homo sapiens
gtatctcattgtggt

SEQ ID NO: 1226625 - DNA, 15 bp, Homo sapiens
ggtatctcattgtgg

SEQ ID NO: 1226626 - DNA, 15 bp, Homo sapiens
tggtatctcattgtg

SEQ ID NO: 1226627 - DNA, 15 bp, Homo sapiens
atggtatctcattgt

SEQ ID NO: 1226628 - DNA, 15 bp, Homo sapiens
gatggtatctcattg

SEQ ID NO: 1226629 - DNA, 15 bp, Homo sapiens
agatggtatctcatt

SEQ ID NO: 1226630 - DNA, 15 bp, Homo sapiens
gagatggtatctcat

SEQ ID NO: 1226631 - DNA, 15 bp, Homo sapiens
tgagatggtatctca

SEQ ID NO: 1226632 - DNA, 15 bp, Homo sapiens
gtgagatggtatctc

SEQ ID NO: 1226633 - DNA, 15 bp, Homo sapiens
tgtgagatggtatct

SEQ ID NO: 1226634 - DNA, 15 bp, Homo sapiens
gtgtgagatggtatc

SEQ ID NO: 1226635 - DNA, 15 bp, Homo sapiens
ggtgtgagatggtat

SEQ ID NO: 1226636 - DNA, 15 bp, Homo sapiens
tggtgtgagatggta

SEQ ID NO: 1226637 - DNA, 15 bp, Homo sapiens
ctggtgtgagatggt

SEQ ID NO: 1226638 - DNA, 15 bp, Homo sapiens
actggtgtgagatgg

SEQ ID NO: 1226639 - DNA, 15 bp, Homo sapiens
aactggtgtgagatg

SEQ ID NO: 1226640 - DNA, 15 bp, Homo sapiens
taactggtgtgagat

SEQ ID NO: 1226641 - DNA, 15 bp, Homo sapiens
ctaactggtgtgaga

SEQ ID NO: 1226642 - DNA, 15 bp, Homo sapiens
tctaactggtgtgag

SEQ ID NO: 1226643 - DNA, 15 bp, Homo sapiens
ttctaactggtgtga

SEQ ID NO: 1226644 - DNA, 15 bp, Homo sapiens
attctaactggtgtg

SEQ ID NO: 1226645 - DNA, 15 bp, Homo sapiens
cattctaactggtgt

SEQ ID NO: 1226646 - DNA, 15 bp, Homo sapiens
ccattctaactggtg

SEQ ID NO: 1226647 - DNA, 15 bp, Homo sapiens
gccattctaactggt

SEQ ID NO: 1226648 - DNA, 15 bp, Homo sapiens
tgccattctaactgg

SEQ ID NO: 1226649 - DNA, 15 bp, Homo sapiens
ttgccattctaactg

SEQ ID NO: 1226650 - DNA, 15 bp, Homo sapiens
attgccattctaact

SEQ ID NO: 1226651 - DNA, 15 bp, Homo sapiens
gattgccattctaac

SEQ ID NO: 1226652 - DNA, 15 bp, Homo sapiens
tgattgccattctaa

SEQ ID NO: 1226653 - DNA, 15 bp, Homo sapiens
atgattgccattcta

SEQ ID NO: 1226654 - DNA, 15 bp, Homo sapiens
aatgattgccattct

SEQ ID NO: 1226655 - DNA, 15 bp, Homo sapiens
taatgattgccattc

SEQ ID NO: 1226656 - DNA, 15 bp, Homo sapiens
ttaatgattgccatt

SEQ ID NO: 1226657 - DNA, 15 bp, Homo sapiens
cttaatgattgccat

SEQ ID NO: 1226658 - DNA, 15 bp, Homo sapiens
tcttaatgattgcca

SEQ ID NO: 1226659 - DNA, 15 bp, Homo sapiens
ttcttaatgattgcc

SEQ ID NO: 1226660 - DNA, 15 bp, Homo sapiens
cttcttaatgattgc

SEQ ID NO: 1226661 - DNA, 15 bp, Homo sapiens
acttcttaatgattg

SEQ ID NO: 1226662 - DNA, 15 bp, Homo sapiens
gacttcttaatgatt

SEQ ID NO: 1226663 - DNA, 15 bp, Homo sapiens
tgacttcttaatgat

SEQ ID NO: 1226664 - DNA, 15 bp, Homo sapiens
ctgacttcttaatga

SEQ ID NO: 1226665 - DNA, 15 bp, Homo sapiens
cctgacttcttaatg

SEQ ID NO: 1226666 - DNA, 15 bp, Homo sapiens
tcctgacttcttaat

SEQ ID NO: 1226667 - DNA, 15 bp, Homo sapiens
ttcctgacttcttaa

SEQ ID NO: 1226668 - DNA, 15 bp, Homo sapiens
tttcctgacttctta

SEQ ID NO: 1226669 - DNA, 15 bp, Homo sapiens
gtttcctgacttctt

SEQ ID NO: 1226670 - DNA, 15 bp, Homo sapiens
tgtttcctgacttct

SEQ ID NO: 1226671 - DNA, 15 bp, Homo sapiens
ttgtttcctgacttc

SEQ ID NO: 1226672 - DNA, 15 bp, Homo sapiens
gttgtttcctgactt

SEQ ID NO: 1226673 - DNA, 15 bp, Homo sapiens
tgttgtttcctgact

SEQ ID NO: 1226674 - DNA, 15 bp, Homo sapiens
ctgttgtttcctgac

SEQ ID NO: 1226675 - DNA, 15 bp, Homo sapiens
cctgttgtttcctga

SEQ ID NO: 1226676 - DNA, 15 bp, Homo sapiens
acctgttgtttcctg

SEQ ID NO: 1226677 - DNA, 15 bp, Homo sapiens
cacctgttgtttcct

SEQ ID NO: 1226678 - DNA, 15 bp, Homo sapiens
gcacctgttgtttcc

SEQ ID NO: 1226679 - DNA, 15 bp, Homo sapiens
agcacctgttgtttc

SEQ ID NO: 1226680 - DNA, 15 bp, Homo sapiens
cagcacctgttgttt

SEQ ID NO: 1226681 - DNA, 15 bp, Homo sapiens
ccagcacctgttgtt

SEQ ID NO: 1226682 - DNA, 15 bp, Homo sapiens
tccagcacctgttgt

SEQ ID NO: 1226683 - DNA, 15 bp, Homo sapiens
ctccagcacctgttg

SEQ ID NO: 1226684 - DNA, 15 bp, Homo sapiens
tctccagcacctgtt

SEQ ID NO: 1226685 - DNA, 15 bp, Homo sapiens
ctctccagcacctgt

SEQ ID NO: 1226686 - DNA, 15 bp, Homo sapiens
cctctccagcacctg

SEQ ID NO: 1226687 - DNA, 15 bp, Homo sapiens
tcctctccagcacct

SEQ ID NO: 1226688 - DNA, 15 bp, Homo sapiens
atcctctccagcacc

SEQ ID NO: 1226689 - DNA, 15 bp, Homo sapiens
catcctctccagcac

SEQ ID NO: 1226690 - DNA, 15 bp, Homo sapiens
acatcctctccagca

SEQ ID NO: 1226691 - DNA, 15 bp, Homo sapiens
cacatcctctccagc

SEQ ID NO: 1226692 - DNA, 15 bp, Homo sapiens
ccacatcctctccag

SEQ ID NO: 1226693 - DNA, 15 bp, Homo sapiens
tccacatcctctcca

SEQ ID NO: 1226694 - DNA, 15 bp, Homo sapiens
ctccacatcctctcc

SEQ ID NO: 1226695 - DNA, 15 bp, Homo sapiens
tctccacatcctctc

SEQ ID NO: 1226696 - DNA, 15 bp, Homo sapiens
ttctccacatcctct

SEQ ID NO: 1226697 - DNA, 15 bp, Homo sapiens
tatttctccacatcc

SEQ ID NO: 1226698 - DNA, 15 bp, Homo sapiens
ctatttctccacatc

SEQ ID NO: 1226699 - DNA, 15 bp, Homo sapiens
cctatttctccacat

SEQ ID NO: 1226700 - DNA, 15 bp, Homo sapiens
tcctatttctccaca

SEQ ID NO: 1226701 - DNA, 15 bp, Homo sapiens
ttcctatttctccac

SEQ ID NO: 1226702 - DNA, 15 bp, Homo sapiens
gttcctatttctcca

SEQ ID NO: 1226703 - DNA, 15 bp, Homo sapiens
tgttcctatttctcc

SEQ ID NO: 1226704 - DNA, 15 bp, Homo sapiens
gtgttcctatttctc

SEQ ID NO: 1226705 - DNA, 15 bp, Homo sapiens
agtgttcctatttct

SEQ ID NO: 1226706 - DNA, 15 bp, Homo sapiens
aagtgttcctatttc

SEQ ID NO: 1226707 - DNA, 15 bp, Homo sapiens
aaagtgttcctattt

SEQ ID NO: 1226708 - DNA, 15 bp, Homo sapiens
aaaagtgttcctatt

SEQ ID NO: 1226709 - DNA, 15 bp, Homo sapiens
taaaagtgttcctat

SEQ ID NO: 1226710 - DNA, 15 bp, Homo sapiens
gtaaaagtgttccta

SEQ ID NO: 1226711 - DNA, 15 bp, Homo sapiens
tgtaaaagtgttcct

SEQ ID NO: 1226712 - DNA, 15 bp, Homo sapiens
gtgtaaaagtgttcc

SEQ ID NO: 1226713 - DNA, 15 bp, Homo sapiens
agtgtaaaagtgttc

SEQ ID NO: 1226714 - DNA, 15 bp, Homo sapiens
cagtgtaaaagtgtt

SEQ ID NO: 1226715 - DNA, 15 bp, Homo sapiens
acagtgtaaaagtgt

SEQ ID NO: 1226716 - DNA, 15 bp, Homo sapiens
aacagtgtaaaagtg

SEQ ID NO: 1226717 - DNA, 15 bp, Homo sapiens
caacagtgtaaaagt

SEQ ID NO: 1226718 - DNA, 15 bp, Homo sapiens
atcccaccaacagtg

SEQ ID NO: 1226719 - DNA, 15 bp, Homo sapiens
aatcccaccaacagt

SEQ ID NO: 1226720 - DNA, 15 bp, Homo sapiens
caatcccaccaacag

SEQ ID NO: 1226721 - DNA, 15 bp, Homo sapiens
acaatcccaccaaca

SEQ ID NO: 1226722 - DNA, 15 bp, Homo sapiens
tacaatcccaccaac

SEQ ID NO: 1226723 - DNA, 15 bp, Homo sapiens
ttacaatcccaccaa

SEQ ID NO: 1226724 - DNA, 15 bp, Homo sapiens
tttacaatcccacca

SEQ ID NO: 1226725 - DNA, 15 bp, Homo sapiens
gtttacaatcccacc

SEQ ID NO: 1226726 - DNA, 15 bp, Homo sapiens
agtttacaatcccac

SEQ ID NO: 1226727 - DNA, 15 bp, Homo sapiens
tagtttacaatccca

SEQ ID NO: 1226728 - DNA, 15 bp, Homo sapiens
ctagtttacaatccc

SEQ ID NO: 1226729 - DNA, 15 bp, Homo sapiens
actagtttacaatcc

SEQ ID NO: 1226730 - DNA, 15 bp, Homo sapiens
aactagtttacaatc

SEQ ID NO: 1226731 - DNA, 15 bp, Homo sapiens
gaactagtttacaat

SEQ ID NO: 1226732 - DNA, 15 bp, Homo sapiens
tgaactagtttacaa

SEQ ID NO: 1226733 - DNA, 15 bp, Homo sapiens
ttgaactagtttaca

SEQ ID NO: 1226734 - DNA, 15 bp, Homo sapiens
gttgaactagtttac

SEQ ID NO: 1226735 - DNA, 15 bp, Homo sapiens
ggttgaactagttta

SEQ ID NO: 1226736 - DNA, 15 bp, Homo sapiens
tggttgaactagttt

SEQ ID NO: 1226737 - DNA, 15 bp, Homo sapiens
atggttgaactagtt

SEQ ID NO: 1226738 - DNA, 15 bp, Homo sapiens
aatggttgaactagt

SEQ ID NO: 1226739 - DNA, 15 bp, Homo sapiens
caatggttgaactag

SEQ ID NO: 1226740 - DNA, 15 bp, Homo sapiens
acttccacaatggtt

SEQ ID NO: 1226741 - DNA, 15 bp, Homo sapiens
gacttccacaatggt

SEQ ID NO: 1226742 - DNA, 15 bp, Homo sapiens
tgacttccacaatgg

SEQ ID NO: 1226743 - DNA, 15 bp, Homo sapiens
ttgacttccacaatg

SEQ ID NO: 1226744 - DNA, 15 bp, Homo sapiens
attgacttccacaat

SEQ ID NO: 1226745 - DNA, 15 bp, Homo sapiens
cattgacttccacaa

SEQ ID NO: 1226746 - DNA, 15 bp, Homo sapiens
acattgacttccaca

SEQ ID NO: 1226747 - DNA, 15 bp, Homo sapiens
cacattgacttccac

SEQ ID NO: 1226748 - DNA, 15 bp, Homo sapiens
ccacattgacttcca

SEQ ID NO: 1226749 - DNA, 15 bp, Homo sapiens
accacattgacttcc

SEQ ID NO: 1226750 - DNA, 15 bp, Homo sapiens
caccacattgacttc

SEQ ID NO: 1226751 - DNA, 15 bp, Homo sapiens
tcaccacattgactt

SEQ ID NO: 1226752 - DNA, 15 bp, Homo sapiens
atcaccacattgact

SEQ ID NO: 1226753 - DNA, 15 bp, Homo sapiens
aatcaccacattgac

SEQ ID NO: 1226754 - DNA, 15 bp, Homo sapiens
gaatcaccacattga

SEQ ID NO: 1226755 - DNA, 15 bp, Homo sapiens
ggaatcaccacattg

SEQ ID NO: 1226756 - DNA, 15 bp, Homo sapiens
aggaatcaccacatt

SEQ ID NO: 1226757 - DNA, 15 bp, Homo sapiens
gaggaatcaccacat

SEQ ID NO: 1226758 - DNA, 15 bp, Homo sapiens
tgaggaatcaccaca

SEQ ID NO: 1226759 - DNA, 15 bp, Homo sapiens
ctgaggaatcaccac

SEQ ID NO: 1226760 - DNA, 15 bp, Homo sapiens
cctgaggaatcacca

SEQ ID NO: 1226761 - DNA, 15 bp, Homo sapiens
ccctgaggaatcacc

SEQ ID NO: 1226762 - DNA, 15 bp, Homo sapiens
tccctgaggaatcac

SEQ ID NO: 1226763 - DNA, 15 bp, Homo sapiens
atccctgaggaatca

SEQ ID NO: 1226764 - DNA, 15 bp, Homo sapiens
gatccctgaggaatc

SEQ ID NO: 1226765 - DNA, 15 bp, Homo sapiens
agatccctgaggaat

SEQ ID NO: 1226766 - DNA, 15 bp, Homo sapiens
tagatccctgaggaa

SEQ ID NO: 1226767 - DNA, 15 bp, Homo sapiens
ctagatccctgagga

SEQ ID NO: 1226768 - DNA, 15 bp, Homo sapiens
tctagatccctgagg

SEQ ID NO: 1226769 - DNA, 15 bp, Homo sapiens
ttctagatccctgag

SEQ ID NO: 1226770 - DNA, 15 bp, Homo sapiens
gttctagatccctga

SEQ ID NO: 1226771 - DNA, 15 bp, Homo sapiens
agttctagatccctg

SEQ ID NO: 1226772 - DNA, 15 bp, Homo sapiens
tagttctagatccct

SEQ ID NO: 1226773 - DNA, 15 bp, Homo sapiens
ctagttctagatccc

SEQ ID NO: 1226774 - DNA, 15 bp, Homo sapiens
tctagttctagatcc

SEQ ID NO: 1226775 - DNA, 15 bp, Homo sapiens
ttctagttctagatc

SEQ ID NO: 1226776 - DNA, 15 bp, Homo sapiens
tttctagttctagat

SEQ ID NO: 1226777 - DNA, 15 bp, Homo sapiens
atttctagttctaga

SEQ ID NO: 1226778 - DNA, 15 bp, Homo sapiens
tatttctagttctag

SEQ ID NO: 1226779 - DNA, 15 bp, Homo sapiens
gtatttctagttcta

SEQ ID NO: 1226780 - DNA, 15 bp, Homo sapiens
agtatttctagttct

SEQ ID NO: 1226781 - DNA, 15 bp, Homo sapiens
tagtatttctagttc

SEQ ID NO: 1226782 - DNA, 15 bp, Homo sapiens
atagtatttctagtt

SEQ ID NO: 1226783 - DNA, 15 bp, Homo sapiens
aatagtatttctagt

SEQ ID NO: 1226784 - DNA, 15 bp, Homo sapiens
aaatagtatttctag

SEQ ID NO: 1226785 - DNA, 15 bp, Homo sapiens
caaatagtatttcta

SEQ ID NO: 1226786 - DNA, 15 bp, Homo sapiens
tcaaatagtatttct

SEQ ID NO: 1226787 - DNA, 15 bp, Homo sapiens
gtcaaatagtatttc

SEQ ID NO: 1226788 - DNA, 15 bp, Homo sapiens
ggtcaaatagtattt

SEQ ID NO: 1226789 - DNA, 15 bp, Homo sapiens
gggtcaaatagtatt

SEQ ID NO: 1226790 - DNA, 15 bp, Homo sapiens
tgggtcaaatagtat

SEQ ID NO: 1226791 - DNA, 15 bp, Homo sapiens
ctgggtcaaatagta

SEQ ID NO: 1226792 - DNA, 15 bp, Homo sapiens
gctgggtcaaatagt

SEQ ID NO: 1226793 - DNA, 15 bp, Homo sapiens
ggctgggtcaaatag

SEQ ID NO: 1226794 - DNA, 15 bp, Homo sapiens
tggctgggtcaaata

SEQ ID NO: 1226795 - DNA, 15 bp, Homo sapiens
atggctgggtcaaat

SEQ ID NO: 1226796 - DNA, 15 bp, Homo sapiens
gatggctgggtcaaa

SEQ ID NO: 1226797 - DNA, 15 bp, Homo sapiens
ggatggctgggtcaa

SEQ ID NO: 1226798 - DNA, 15 bp, Homo sapiens
gggatggctgggtca

SEQ ID NO: 1226799 - DNA, 15 bp, Homo sapiens
tgggatggctgggtc

SEQ ID NO: 1226800 - DNA, 15 bp, Homo sapiens
atgggatggctgggt

SEQ ID NO: 1226801 - DNA, 15 bp, Homo sapiens
aatgggatggctggg

SEQ ID NO: 1226802 - DNA, 15 bp, Homo sapiens
taatgggatggctgg

SEQ ID NO: 1226803 - DNA, 15 bp, Homo sapiens
gtaatgggatggctg

SEQ ID NO: 1226804 - DNA, 15 bp, Homo sapiens
agtaatgggatggct

SEQ ID NO: 1226805 - DNA, 15 bp, Homo sapiens
cagtaatgggatggc

SEQ ID NO: 1226806 - DNA, 15 bp, Homo sapiens
ccagtaatgggatgg

SEQ ID NO: 1226807 - DNA, 15 bp, Homo sapiens
cccagtaatgggatg

SEQ ID NO: 1226808 - DNA, 15 bp, Homo sapiens
gtatatacccagtaa

SEQ ID NO: 1226809 - DNA, 15 bp, Homo sapiens
ggtatatacccagta

SEQ ID NO: 1226810 - DNA, 15 bp, Homo sapiens
gggtatatacccagt

SEQ ID NO: 1226811 - DNA, 15 bp, Homo sapiens
tgggtatatacccag

SEQ ID NO: 1226812 - DNA, 15 bp, Homo sapiens
ttgggtatataccca

SEQ ID NO: 1226813 - DNA, 15 bp, Homo sapiens
tttgggtatataccc

SEQ ID NO: 1226814 - DNA, 15 bp, Homo sapiens
ctttgggtatatacc

SEQ ID NO: 1226815 - DNA, 15 bp, Homo sapiens
cctttgggtatatac

SEQ ID NO: 1226816 - DNA, 15 bp, Homo sapiens
tcctttgggtatata

SEQ ID NO: 1226817 - DNA, 15 bp, Homo sapiens
gtcctttgggtatat

SEQ ID NO: 1226818 - DNA, 15 bp, Homo sapiens
agtcctttgggtata

SEQ ID NO: 1226819 - DNA, 15 bp, Homo sapiens
tagtcctttgggtat

SEQ ID NO: 1226820 - DNA, 15 bp, Homo sapiens
atagtcctttgggta

SEQ ID NO: 1226821 - DNA, 15 bp, Homo sapiens
tatagtcctttgggt

SEQ ID NO: 1226822 - DNA, 15 bp, Homo sapiens
ttatagtcctttggg

SEQ ID NO: 1226823 - DNA, 15 bp, Homo sapiens
tttatagtcctttgg

SEQ ID NO: 1226824 - DNA, 15 bp, Homo sapiens
atttatagtcctttg

SEQ ID NO: 1226825 - DNA, 15 bp, Homo sapiens
gatttatagtccttt

SEQ ID NO: 1226826 - DNA, 15 bp, Homo sapiens
tgatttatagtcctt

SEQ ID NO: 1226827 - DNA, 15 bp, Homo sapiens
atgatttatagtcct

SEQ ID NO: 1226828 - DNA, 15 bp, Homo sapiens
catgatttatagtcc

SEQ ID NO: 1226829 - DNA, 15 bp, Homo sapiens
gcatgatttatagtc

SEQ ID NO: 1226830 - DNA, 15 bp, Homo sapiens
agcatgatttatagt

SEQ ID NO: 1226831 - DNA, 15 bp, Homo sapiens
cagcatgatttatag

SEQ ID NO: 1226832 - DNA, 15 bp, Homo sapiens
gcagcatgatttata

SEQ ID NO: 1226833 - DNA, 15 bp, Homo sapiens
agcagcatgatttat

SEQ ID NO: 1226834 - DNA, 15 bp, Homo sapiens
tagcagcatgattta

SEQ ID NO: 1226835 - DNA, 15 bp, Homo sapiens
atagcagcatgattt

SEQ ID NO: 1226836 - DNA, 15 bp, Homo sapiens
tatagcagcatgatt

SEQ ID NO: 1226837 - DNA, 15 bp, Homo sapiens
ttatagcagcatgat

SEQ ID NO: 1226838 - DNA, 15 bp, Homo sapiens
tttatagcagcatga

SEQ ID NO: 1226839 - DNA, 15 bp, Homo sapiens
ctttatagcagcatg

SEQ ID NO: 1226840 - DNA, 15 bp, Homo sapiens
tctttatagcagcat

SEQ ID NO: 1226841 - DNA, 15 bp, Homo sapiens
gtctttatagcagca

SEQ ID NO: 1226842 - DNA, 15 bp, Homo sapiens
tgtctttatagcagc

SEQ ID NO: 1226843 - DNA, 15 bp, Homo sapiens
gtgtctttatagcag

SEQ ID NO: 1226844 - DNA, 15 bp, Homo sapiens
tgtgtctttatagca

SEQ ID NO: 1226845 - DNA, 15 bp, Homo sapiens
atgtgtctttatagc

SEQ ID NO: 1226846 - DNA, 15 bp, Homo sapiens
catgtgtctttatag

SEQ ID NO: 1226847 - DNA, 15 bp, Homo sapiens
gcatgtgtctttata

SEQ ID NO: 1226848 - DNA, 15 bp, Homo sapiens
tgcatgtgtctttat

SEQ ID NO: 1226849 - DNA, 15 bp, Homo sapiens
gtgcatgtgtcttta

SEQ ID NO: 1226850 - DNA, 15 bp, Homo sapiens
tgtgcatgtgtcttt

SEQ ID NO: 1226851 - DNA, 15 bp, Homo sapiens
gtgtgcatgtgtctt

SEQ ID NO: 1226852 - DNA, 15 bp, Homo sapiens
cgtgtgcatgtgtct

SEQ ID NO: 1226853 - DNA, 15 bp, Homo sapiens
acgtgtgcatgtgtc

SEQ ID NO: 1226854 - DNA, 15 bp, Homo sapiens
tacgtgtgcatgtgt

SEQ ID NO: 1226855 - DNA, 15 bp, Homo sapiens
atacgtgtgcatgtg

SEQ ID NO: 1226856 - DNA, 15 bp, Homo sapiens
catacgtgtgcatgt

SEQ ID NO: 1226857 - DNA, 15 bp, Homo sapiens
acatacgtgtgcatg

SEQ ID NO: 1226858 - DNA, 15 bp, Homo sapiens
aacatacgtgtgcat

SEQ ID NO: 1226859 - DNA, 15 bp, Homo sapiens
aaacatacgtgtgca

SEQ ID NO: 1226860 - DNA, 15 bp, Homo sapiens
taaacatacgtgtgc

SEQ ID NO: 1226861 - DNA, 15 bp, Homo sapiens
ataaacatacgtgtg

SEQ ID NO: 1226862 - DNA, 15 bp, Homo sapiens
aataaacatacgtgt

SEQ ID NO: 1226863 - DNA, 15 bp, Homo sapiens
caataaacatacgtg

SEQ ID NO: 1226864 - DNA, 15 bp, Homo sapiens
gcaataaacatacgt

SEQ ID NO: 1226865 - DNA, 15 bp, Homo sapiens
cgcaataaacatacg

SEQ ID NO: 1226866 - DNA, 15 bp, Homo sapiens
ccgcaataaacatac

SEQ ID NO: 1226867 - DNA, 15 bp, Homo sapiens
gccgcaataaacata

SEQ ID NO: 1226868 - DNA, 15 bp, Homo sapiens
tgccgcaataaacat

SEQ ID NO: 1226869 - DNA, 15 bp, Homo sapiens
atgccgcaataaaca

SEQ ID NO: 1226870 - DNA, 15 bp, Homo sapiens
aatgccgcaataaac

SEQ ID NO: 1226871 - DNA, 15 bp, Homo sapiens
taatgccgcaataaa

SEQ ID NO: 1226872 - DNA, 15 bp, Homo sapiens
ataatgccgcaataa

SEQ ID NO: 1226873 - DNA, 15 bp, Homo sapiens
aataatgccgcaata

SEQ ID NO: 1226874 - DNA, 15 bp, Homo sapiens
gaataatgccgcaat

SEQ ID NO: 1226875 - DNA, 15 bp, Homo sapiens
tgaataatgccgcaa

SEQ ID NO: 1226876 - DNA, 15 bp, Homo sapiens
gtgaataatgccgca

SEQ ID NO: 1226877 - DNA, 15 bp, Homo sapiens
tgtgaataatgccgc

SEQ ID NO: 1226878 - DNA, 15 bp, Homo sapiens
ttgtgaataatgccg

SEQ ID NO: 1226879 - DNA, 15 bp, Homo sapiens
attgtgaataatgcc

SEQ ID NO: 1226880 - DNA, 15 bp, Homo sapiens
tattgtgaataatgc

SEQ ID NO: 1226881 - DNA, 15 bp, Homo sapiens
ctattgtgaataatg

SEQ ID NO: 1226882 - DNA, 15 bp, Homo sapiens
gctattgtgaataat

SEQ ID NO: 1226883 - DNA, 15 bp, Homo sapiens
tgctattgtgaataa

SEQ ID NO: 1226884 - DNA, 15 bp, Homo sapiens
caagtctttgctatt

SEQ ID NO: 1226885 - DNA, 15 bp, Homo sapiens
ccaagtctttgctat

SEQ ID NO: 1226886 - DNA, 15 bp, Homo sapiens
tccaagtctttgcta

SEQ ID NO: 1226887 - DNA, 15 bp, Homo sapiens
ttccaagtctttgct

SEQ ID NO: 1226888 - DNA, 15 bp, Homo sapiens
gttccaagtctttgc

SEQ ID NO: 1226889 - DNA, 15 bp, Homo sapiens
ggttccaagtctttg

SEQ ID NO: 1226890 - DNA, 15 bp, Homo sapiens
tggttccaagtcttt

SEQ ID NO: 1226891 - DNA, 15 bp, Homo sapiens
ttggttccaagtctt

SEQ ID NO: 1226892 - DNA, 15 bp, Homo sapiens
gttggttccaagtct

SEQ ID NO: 1226893 - DNA, 15 bp, Homo sapiens
ggttggttccaagtc

SEQ ID NO: 1226894 - DNA, 15 bp, Homo sapiens
gggttggttccaagt

SEQ ID NO: 1226895 - DNA, 15 bp, Homo sapiens
tgggttggttccaag

SEQ ID NO: 1226896 - DNA, 15 bp, Homo sapiens
ttgggttggttccaa

SEQ ID NO: 1226897 - DNA, 15 bp, Homo sapiens
tttgggttggttcca

SEQ ID NO: 1226898 - DNA, 15 bp, Homo sapiens
atttgggttggttcc

SEQ ID NO: 1226899 - DNA, 15 bp, Homo sapiens
catttgggttggttc

SEQ ID NO: 1226900 - DNA, 15 bp, Homo sapiens
acatttgggttggtt

SEQ ID NO: 1226901 - DNA, 15 bp, Homo sapiens
gacatttgggttggt

SEQ ID NO: 1226902 - DNA, 15 bp, Homo sapiens
ggacatttgggttgg

SEQ ID NO: 1226903 - DNA, 15 bp, Homo sapiens
tggacatttgggttg

SEQ ID NO: 1226904 - DNA, 15 bp, Homo sapiens
ttggacatttgggtt

SEQ ID NO: 1226905 - DNA, 15 bp, Homo sapiens
gttggacatttgggt

SEQ ID NO: 1226906 - DNA, 15 bp, Homo sapiens
tgttggacatttggg

SEQ ID NO: 1226907 - DNA, 15 bp, Homo sapiens
ttgttggacatttgg

SEQ ID NO: 1226908 - DNA, 15 bp, Homo sapiens
attgttggacatttg

SEQ ID NO: 1226909 - DNA, 15 bp, Homo sapiens
cattgttggacattt

SEQ ID NO: 1226910 - DNA, 15 bp, Homo sapiens
tcattgttggacatt

SEQ ID NO: 1226911 - DNA, 15 bp, Homo sapiens
atcattgttggacat

SEQ ID NO: 1226912 - DNA, 15 bp, Homo sapiens
tatcattgttggaca

SEQ ID NO: 1226913 - DNA, 15 bp, Homo sapiens
ctatcattgttggac

SEQ ID NO: 1226914 - DNA, 15 bp, Homo sapiens
tctatcattgttgga

SEQ ID NO: 1226915 - DNA, 15 bp, Homo sapiens
gtctatcattgttgg

SEQ ID NO: 1226916 - DNA, 15 bp, Homo sapiens
agtctatcattgttg

SEQ ID NO: 1226917 - DNA, 15 bp, Homo sapiens
cagtctatcattgtt

SEQ ID NO: 1226918 - DNA, 15 bp, Homo sapiens
ccagtctatcattgt

SEQ ID NO: 1226919 - DNA, 15 bp, Homo sapiens
tccagtctatcattg

SEQ ID NO: 1226920 - DNA, 15 bp, Homo sapiens
atccagtctatcatt

SEQ ID NO: 1226921 - DNA, 15 bp, Homo sapiens
aatccagtctatcat

SEQ ID NO: 1226922 - DNA, 15 bp, Homo sapiens
taatccagtctatca

SEQ ID NO: 1226923 - DNA, 15 bp, Homo sapiens
ttaatccagtctatc

SEQ ID NO: 1226924 - DNA, 15 bp, Homo sapiens
cttaatccagtctat

SEQ ID NO: 1226925 - DNA, 15 bp, Homo sapiens
tcttaatccagtcta

SEQ ID NO: 1226926 - DNA, 15 bp, Homo sapiens
ttcttaatccagtct

SEQ ID NO: 1226927 - DNA, 15 bp, Homo sapiens
tttcttaatccagtc

SEQ ID NO: 1226928 - DNA, 15 bp, Homo sapiens
ttttcttaatccagt

SEQ ID NO: 1226929 - DNA, 15 bp, Homo sapiens
attttcttaatccag

SEQ ID NO: 1226930 - DNA, 15 bp, Homo sapiens
cattttcttaatcca

SEQ ID NO: 1226931 - DNA, 15 bp, Homo sapiens
acattttcttaatcc

SEQ ID NO: 1226932 - DNA, 15 bp, Homo sapiens
cacattttcttaatc

SEQ ID NO: 1226933 - DNA, 15 bp, Homo sapiens
ccacattttcttaat

SEQ ID NO: 1226934 - DNA, 15 bp, Homo sapiens
gccacattttcttaa

SEQ ID NO: 1226935 - DNA, 15 bp, Homo sapiens
tgccacattttctta

SEQ ID NO: 1226936 - DNA, 15 bp, Homo sapiens
tatgtgccacatttt

SEQ ID NO: 1226937 - DNA, 15 bp, Homo sapiens
atatgtgccacattt

SEQ ID NO: 1226938 - DNA, 15 bp, Homo sapiens
tatatgtgccacatt

SEQ ID NO: 1226939 - DNA, 15 bp, Homo sapiens
gtatatgtgccacat

SEQ ID NO: 1226940 - DNA, 15 bp, Homo sapiens
tgtatatgtgccaca

SEQ ID NO: 1226941 - DNA, 15 bp, Homo sapiens
gtgtatatgtgccac

SEQ ID NO: 1226942 - DNA, 15 bp, Homo sapiens
ggtgtatatgtgcca

SEQ ID NO: 1226943 - DNA, 15 bp, Homo sapiens
tggtgtatatgtgcc

SEQ ID NO: 1226944 - DNA, 15 bp, Homo sapiens
atggtgtatatgtgc

SEQ ID NO: 1226945 - DNA, 15 bp, Homo sapiens
catggtgtatatgtg

SEQ ID NO: 1226946 - DNA, 15 bp, Homo sapiens
ccatggtgtatatgt

SEQ ID NO: 1226947 - DNA, 15 bp, Homo sapiens
tccatggtgtatatg

SEQ ID NO: 1226948 - DNA, 15 bp, Homo sapiens
ttccatggtgtatat

SEQ ID NO: 1226949 - DNA, 15 bp, Homo sapiens
attccatggtgtata

SEQ ID NO: 1226950 - DNA, 15 bp, Homo sapiens
tattccatggtgtat

SEQ ID NO: 1226951 - DNA, 15 bp, Homo sapiens
gtattccatggtgta

SEQ ID NO: 1226952 - DNA, 15 bp, Homo sapiens
agtattccatggtgt

SEQ ID NO: 1226953 - DNA, 15 bp, Homo sapiens
tagtattccatggtg

SEQ ID NO: 1226954 - DNA, 15 bp, Homo sapiens
atagtattccatggt

SEQ ID NO: 1226955 - DNA, 15 bp, Homo sapiens
catagtattccatgg

SEQ ID NO: 1226956 - DNA, 15 bp, Homo sapiens
gcatagtattccatg

SEQ ID NO: 1226957 - DNA, 15 bp, Homo sapiens
tgcatagtattccat

SEQ ID NO: 1226958 - DNA, 15 bp, Homo sapiens
ctgcatagtattcca

SEQ ID NO: 1226959 - DNA, 15 bp, Homo sapiens
gctgcatagtattcc

SEQ ID NO: 1226960 - DNA, 15 bp, Homo sapiens
attttttatggctgc

SEQ ID NO: 1226961 - DNA, 15 bp, Homo sapiens
cattttttatggctg

SEQ ID NO: 1226962 - DNA, 15 bp, Homo sapiens
ccattttttatggct

SEQ ID NO: 1226963 - DNA, 15 bp, Homo sapiens
accattttttatggc

SEQ ID NO: 1226964 - DNA, 15 bp, Homo sapiens
caccattttttatgg

SEQ ID NO: 1226965 - DNA, 15 bp, Homo sapiens
tcaccattttttatg

SEQ ID NO: 1226966 - DNA, 15 bp, Homo sapiens
ctcaccattttttat

SEQ ID NO: 1226967 - DNA, 15 bp, Homo sapiens
actcaccatttttta

SEQ ID NO: 1226968 - DNA, 15 bp, Homo sapiens
aactcaccatttttt

SEQ ID NO: 1226969 - DNA, 15 bp, Homo sapiens
gaactcaccattttt

SEQ ID NO: 1226970 - DNA, 15 bp, Homo sapiens
tgaactcaccatttt

SEQ ID NO: 1226971 - DNA, 15 bp, Homo sapiens
atgaactcaccattt

SEQ ID NO: 1226972 - DNA, 15 bp, Homo sapiens
catgaactcaccatt

SEQ ID NO: 1226973 - DNA, 15 bp, Homo sapiens
acatgaactcaccat

SEQ ID NO: 1226974 - DNA, 15 bp, Homo sapiens
gacatgaactcacca

SEQ ID NO: 1226975 - DNA, 15 bp, Homo sapiens
ggacatgaactcacc

SEQ ID NO: 1226976 - DNA, 15 bp, Homo sapiens
aggacatgaactcac

SEQ ID NO: 1226977 - DNA, 15 bp, Homo sapiens
aaggacatgaactca

SEQ ID NO: 1226978 - DNA, 15 bp, Homo sapiens
aaaggacatgaactc

SEQ ID NO: 1226979 - DNA, 15 bp, Homo sapiens
taaaggacatgaact

SEQ ID NO: 1226980 - DNA, 15 bp, Homo sapiens
ataaaggacatgaac

SEQ ID NO: 1226981 - DNA, 15 bp, Homo sapiens
tataaaggacatgaa

SEQ ID NO: 1226982 - DNA, 15 bp, Homo sapiens
ctataaaggacatga

SEQ ID NO: 1226983 - DNA, 15 bp, Homo sapiens
cctataaaggacatg

SEQ ID NO: 1226984 - DNA, 15 bp, Homo sapiens
tcctataaaggacat

SEQ ID NO: 1226985 - DNA, 15 bp, Homo sapiens
ttcctataaaggaca

SEQ ID NO: 1226986 - DNA, 15 bp, Homo sapiens
gttcctataaaggac

SEQ ID NO: 1226987 - DNA, 15 bp, Homo sapiens
tgttcctataaagga

SEQ ID NO: 1226988 - DNA, 15 bp, Homo sapiens
atgttcctataaagg

SEQ ID NO: 1226989 - DNA, 15 bp, Homo sapiens
catgttcctataaag

SEQ ID NO: 1226990 - DNA, 15 bp, Homo sapiens
ccatgttcctataaa

SEQ ID NO: 1226991 - DNA, 15 bp, Homo sapiens
tccatgttcctataa

SEQ ID NO: 1226992 - DNA, 15 bp, Homo sapiens
atccatgttcctata

SEQ ID NO: 1226993 - DNA, 15 bp, Homo sapiens
catccatgttcctat

SEQ ID NO: 1226994 - DNA, 15 bp, Homo sapiens
tcatccatgttccta

SEQ ID NO: 1226995 - DNA, 15 bp, Homo sapiens
ttcatccatgttcct

SEQ ID NO: 1226996 - DNA, 15 bp, Homo sapiens
tttcatccatgttcc

SEQ ID NO: 1226997 - DNA, 15 bp, Homo sapiens
atttcatccatgttc

SEQ ID NO: 1226998 - DNA, 15 bp, Homo sapiens
aatttcatccatgtt

SEQ ID NO: 1226999 - DNA, 15 bp, Homo sapiens
caatttcatccatgt

SEQ ID NO: 1227000 - DNA, 15 bp, Homo sapiens
ccaatttcatccatg

SEQ ID NO: 1227001 - DNA, 15 bp, Homo sapiens
tccaatttcatccat

SEQ ID NO: 1227002 - DNA, 15 bp, Homo sapiens
ttccaatttcatcca

SEQ ID NO: 1227003 - DNA, 15 bp, Homo sapiens
tttccaatttcatcc

SEQ ID NO: 1227004 - DNA, 15 bp, Homo sapiens
atttccaatttcatc

SEQ ID NO: 1227005 - DNA, 15 bp, Homo sapiens
gatttccaatttcat

SEQ ID NO: 1227006 - DNA, 15 bp, Homo sapiens
tgatttccaatttca

SEQ ID NO: 1227007 - DNA, 15 bp, Homo sapiens
atgatttccaatttc

SEQ ID NO: 1227008 - DNA, 15 bp, Homo sapiens
gatgatttccaattt

SEQ ID NO: 1227009 - DNA, 15 bp, Homo sapiens
tgatgatttccaatt

SEQ ID NO: 1227010 - DNA, 15 bp, Homo sapiens
atgatgatttccaat

SEQ ID NO: 1227011 - DNA, 15 bp, Homo sapiens
aatgatgatttccaa

SEQ ID NO: 1227012 - DNA, 15 bp, Homo sapiens
gaatgatgatttcca

SEQ ID NO: 1227013 - DNA, 15 bp, Homo sapiens
agaatgatgatttcc

SEQ ID NO: 1227014 - DNA, 15 bp, Homo sapiens
gagaatgatgatttc

SEQ ID NO: 1227015 - DNA, 15 bp, Homo sapiens
tgagaatgatgattt

SEQ ID NO: 1227016 - DNA, 15 bp, Homo sapiens
ctgagaatgatgatt

SEQ ID NO: 1227017 - DNA, 15 bp, Homo sapiens
actgagaatgatgat

SEQ ID NO: 1227018 - DNA, 15 bp, Homo sapiens
tactgagaatgatga

SEQ ID NO: 1227019 - DNA, 15 bp, Homo sapiens
ttactgagaatgatg

SEQ ID NO: 1227020 - DNA, 15 bp, Homo sapiens
tttactgagaatgat

SEQ ID NO: 1227021 - DNA, 15 bp, Homo sapiens
gtttactgagaatga

SEQ ID NO: 1227022 - DNA, 15 bp, Homo sapiens
agtttactgagaatg

SEQ ID NO: 1227023 - DNA, 15 bp, Homo sapiens
tagtttactgagaat

SEQ ID NO: 1227024 - DNA, 15 bp, Homo sapiens
atagtttactgagaa

SEQ ID NO: 1227025 - DNA, 15 bp, Homo sapiens
gatagtttactgaga

SEQ ID NO: 1227026 - DNA, 15 bp, Homo sapiens
cgatagtttactgag

SEQ ID NO: 1227027 - DNA, 15 bp, Homo sapiens
gcgatagtttactga

SEQ ID NO: 1227028 - DNA, 15 bp, Homo sapiens
tgcgatagtttactg

SEQ ID NO: 1227029 - DNA, 15 bp, Homo sapiens
ttgcgatagtttact

SEQ ID NO: 1227030 - DNA, 15 bp, Homo sapiens
cttgcgatagtttac

SEQ ID NO: 1227031 - DNA, 15 bp, Homo sapiens
tcttgcgatagttta

SEQ ID NO: 1227032 - DNA, 15 bp, Homo sapiens
ttcttgcgatagttt

SEQ ID NO: 1227033 - DNA, 15 bp, Homo sapiens
gttcttgcgatagtt

SEQ ID NO: 1227034 - DNA, 15 bp, Homo sapiens
tgttcttgcgatagt

SEQ ID NO: 1227035 - DNA, 15 bp, Homo sapiens
ttgttcttgcgatag

SEQ ID NO: 1227036 - DNA, 15 bp, Homo sapiens
tttgttcttgcgata

SEQ ID NO: 1227037 - DNA, 15 bp, Homo sapiens
ttttgttcttgcgat

SEQ ID NO: 1227038 - DNA, 15 bp, Homo sapiens
tttttgttcttgcga

SEQ ID NO: 1227039 - DNA, 15 bp, Homo sapiens
ttttttgttcttgcg

SEQ ID NO: 1227040 - DNA, 15 bp, Homo sapiens
gttttttgttcttgc

SEQ ID NO: 1227041 - DNA, 15 bp, Homo sapiens
ggttttttgttcttg

SEQ ID NO: 1227042 - DNA, 15 bp, Homo sapiens
tggttttttgttctt

SEQ ID NO: 1227043 - DNA, 15 bp, Homo sapiens
ttggttttttgttct

SEQ ID NO: 1227044 - DNA, 15 bp, Homo sapiens
tttggttttttgttc

SEQ ID NO: 1227045 - DNA, 15 bp, Homo sapiens
gtttggttttttgtt

SEQ ID NO: 1227046 - DNA, 15 bp, Homo sapiens
tgtttggttttttgt

SEQ ID NO: 1227047 - DNA, 15 bp, Homo sapiens
gtgtttggttttttg

SEQ ID NO: 1227048 - DNA, 15 bp, Homo sapiens
ggtgtttggtttttt

SEQ ID NO: 1227049 - DNA, 15 bp, Homo sapiens
cggtgtttggttttt

SEQ ID NO: 1227050 - DNA, 15 bp, Homo sapiens
gcggtgtttggtttt

SEQ ID NO: 1227051 - DNA, 15 bp, Homo sapiens
tgcggtgtttggttt

SEQ ID NO: 1227052 - DNA, 15 bp, Homo sapiens
atgcggtgtttggtt

SEQ ID NO: 1227053 - DNA, 15 bp, Homo sapiens
catgcggtgtttggt

SEQ ID NO: 1227054 - DNA, 15 bp, Homo sapiens
acatgcggtgtttgg

SEQ ID NO: 1227055 - DNA, 15 bp, Homo sapiens
aacatgcggtgtttg

SEQ ID NO: 1227056 - DNA, 15 bp, Homo sapiens
gaacatgcggtgttt

SEQ ID NO: 1227057 - DNA, 15 bp, Homo sapiens
agaacatgcggtgtt

SEQ ID NO: 1227058 - DNA, 15 bp, Homo sapiens
gagaacatgcggtgt

SEQ ID NO: 1227059 - DNA, 15 bp, Homo sapiens
tgagaacatgcggtg

SEQ ID NO: 1227060 - DNA, 15 bp, Homo sapiens
gtgagaacatgcggt

SEQ ID NO: 1227061 - DNA, 15 bp, Homo sapiens
agtgagaacatgcgg

SEQ ID NO: 1227062 - DNA, 15 bp, Homo sapiens
gagtgagaacatgcg

SEQ ID NO: 1227063 - DNA, 15 bp, Homo sapiens
gttcaattcccacct

SEQ ID NO: 1227064 - DNA, 15 bp, Homo sapiens
tgttcaattcccacc

SEQ ID NO: 1227065 - DNA, 15 bp, Homo sapiens
ttgttcaattcccac

SEQ ID NO: 1227066 - DNA, 15 bp, Homo sapiens
attgttcaattccca

SEQ ID NO: 1227067 - DNA, 15 bp, Homo sapiens
cattgttcaattccc

SEQ ID NO: 1227068 - DNA, 15 bp, Homo sapiens
tcattgttcaattcc

SEQ ID NO: 1227069 - DNA, 15 bp, Homo sapiens
ctcattgttcaattc

SEQ ID NO: 1227070 - DNA, 15 bp, Homo sapiens
tctcattgttcaatt

SEQ ID NO: 1227071 - DNA, 15 bp, Homo sapiens
ttctcattgttcaat

SEQ ID NO: 1227072 - DNA, 15 bp, Homo sapiens
cttctcattgttcaa

SEQ ID NO: 1227073 - DNA, 15 bp, Homo sapiens
tcttctcattgttca

SEQ ID NO: 1227074 - DNA, 15 bp, Homo sapiens
gtcttctcattgttc

SEQ ID NO: 1227075 - DNA, 15 bp, Homo sapiens
tgtcttctcattgtt

SEQ ID NO: 1227076 - DNA, 15 bp, Homo sapiens
atgtcttctcattgt

SEQ ID NO: 1227077 - DNA, 15 bp, Homo sapiens
catgtcttctcattg

SEQ ID NO: 1227078 - DNA, 15 bp, Homo sapiens
ccatgtcttctcatt

SEQ ID NO: 1227079 - DNA, 15 bp, Homo sapiens
tccatgtcttctcat

SEQ ID NO: 1227080 - DNA, 15 bp, Homo sapiens
ttccatgtcttctca

SEQ ID NO: 1227081 - DNA, 15 bp, Homo sapiens
tttccatgtcttctc

SEQ ID NO: 1227082 - DNA, 15 bp, Homo sapiens
gtttccatgtcttct

SEQ ID NO: 1227083 - DNA, 15 bp, Homo sapiens
tgtttccatgtcttc

SEQ ID NO: 1227084 - DNA, 15 bp, Homo sapiens
ctgtttccatgtctt

SEQ ID NO: 1227085 - DNA, 15 bp, Homo sapiens
cctgtttccatgtct

SEQ ID NO: 1227086 - DNA, 15 bp, Homo sapiens
tcctgtttccatgtc

SEQ ID NO: 1227087 - DNA, 15 bp, Homo sapiens
ttcctgtttccatgt

SEQ ID NO: 1227088 - DNA, 15 bp, Homo sapiens
cttcctgtttccatg

SEQ ID NO: 1227089 - DNA, 15 bp, Homo sapiens
ccttcctgtttccat

SEQ ID NO: 1227090 - DNA, 15 bp, Homo sapiens
cccttcctgtttcca

SEQ ID NO: 1227091 - DNA, 15 bp, Homo sapiens
ccccttcctgtttcc

SEQ ID NO: 1227092 - DNA, 15 bp, Homo sapiens
tccccttcctgtttc

SEQ ID NO: 1227093 - DNA, 15 bp, Homo sapiens
ttccccttcctgttt

SEQ ID NO: 1227094 - DNA, 15 bp, Homo sapiens
gttccccttcctgtt

SEQ ID NO: 1227095 - DNA, 15 bp, Homo sapiens
cgttccccttcctgt

SEQ ID NO: 1227096 - DNA, 15 bp, Homo sapiens
acgttccccttcctg

SEQ ID NO: 1227097 - DNA, 15 bp, Homo sapiens
gacgttccccttcct

SEQ ID NO: 1227098 - DNA, 15 bp, Homo sapiens
tgacgttccccttcc

SEQ ID NO: 1227099 - DNA, 15 bp, Homo sapiens
gtgacgttccccttc

SEQ ID NO: 1227100 - DNA, 15 bp, Homo sapiens
tgtgacgttcccctt

SEQ ID NO: 1227101 - DNA, 15 bp, Homo sapiens
gtgtgacgttcccct

SEQ ID NO: 1227102 - DNA, 15 bp, Homo sapiens
agtgtgacgttcccc

SEQ ID NO: 1227103 - DNA, 15 bp, Homo sapiens
gagtgtgacgttccc

SEQ ID NO: 1227104 - DNA, 15 bp, Homo sapiens
agagtgtgacgttcc

SEQ ID NO: 1227105 - DNA, 15 bp, Homo sapiens
cagagtgtgacgttc

SEQ ID NO: 1227106 - DNA, 15 bp, Homo sapiens
ccagagtgtgacgtt

SEQ ID NO: 1227107 - DNA, 15 bp, Homo sapiens
cccagagtgtgacgt

SEQ ID NO: 1227108 - DNA, 15 bp, Homo sapiens
ccccagagtgtgacg

SEQ ID NO: 1227109 - DNA, 15 bp, Homo sapiens
tccccagagtgtgac

SEQ ID NO: 1227110 - DNA, 15 bp, Homo sapiens
gtccccagagtgtga

SEQ ID NO: 1227111 - DNA, 15 bp, Homo sapiens
agtccccagagtgtg

SEQ ID NO: 1227112 - DNA, 15 bp, Homo sapiens
cagtccccagagtgt

SEQ ID NO: 1227113 - DNA, 15 bp, Homo sapiens
acagtccccagagtg

SEQ ID NO: 1227114 - DNA, 15 bp, Homo sapiens
aacagtccccagagt

SEQ ID NO: 1227115 - DNA, 15 bp, Homo sapiens
caacagtccccagag

SEQ ID NO: 1227116 - DNA, 15 bp, Homo sapiens
acaacagtccccaga

SEQ ID NO: 1227117 - DNA, 15 bp, Homo sapiens
cacaacagtccccag

SEQ ID NO: 1227118 - DNA, 15 bp, Homo sapiens
ccacaacagtcccca

SEQ ID NO: 1227119 - DNA, 15 bp, Homo sapiens
cccacaacagtcccc

SEQ ID NO: 1227120 - DNA, 15 bp, Homo sapiens
ccccacaacagtccc

SEQ ID NO: 1227121 - DNA, 15 bp, Homo sapiens
accccacaacagtcc

SEQ ID NO: 1227122 - DNA, 15 bp, Homo sapiens
caccccacaacagtc

SEQ ID NO: 1227123 - DNA, 15 bp, Homo sapiens
ccaccccacaacagt

SEQ ID NO: 1227124 - DNA, 15 bp, Homo sapiens
cccaccccacaacag

SEQ ID NO: 1227125 - DNA, 15 bp, Homo sapiens
ccccaccccacaaca

SEQ ID NO: 1227126 - DNA, 15 bp, Homo sapiens
cccccaccccacaac

SEQ ID NO: 1227127 - DNA, 15 bp, Homo sapiens
ccccccaccccacaa

SEQ ID NO: 1227128 - DNA, 15 bp, Homo sapiens
tccccccaccccaca

SEQ ID NO: 1227129 - DNA, 15 bp, Homo sapiens
ctccccccaccccac

SEQ ID NO: 1227130 - DNA, 15 bp, Homo sapiens
cctccccccacccca

SEQ ID NO: 1227131 - DNA, 15 bp, Homo sapiens
ccctccccccacccc

SEQ ID NO: 1227132 - DNA, 15 bp, Homo sapiens
cccctccccccaccc

SEQ ID NO: 1227133 - DNA, 15 bp, Homo sapiens
ccccctccccccacc

SEQ ID NO: 1227134 - DNA, 15 bp, Homo sapiens
cccccctccccccac

SEQ ID NO: 1227135 - DNA, 15 bp, Homo sapiens
tcccccctcccccca

SEQ ID NO: 1227136 - DNA, 15 bp, Homo sapiens
ctcccccctcccccc

SEQ ID NO: 1227137 - DNA, 15 bp, Homo sapiens
cctcccccctccccc

SEQ ID NO: 1227138 - DNA, 15 bp, Homo sapiens
ccctcccccctcccc

SEQ ID NO: 1227139 - DNA, 15 bp, Homo sapiens
tccctcccccctccc

SEQ ID NO: 1227140 - DNA, 15 bp, Homo sapiens
atccctcccccctcc

SEQ ID NO: 1227141 - DNA, 15 bp, Homo sapiens
tatccctcccccctc

SEQ ID NO: 1227142 - DNA, 15 bp, Homo sapiens
ctatccctcccccct

SEQ ID NO: 1227143 - DNA, 15 bp, Homo sapiens
gctatccctcccccc

SEQ ID NO: 1227144 - DNA, 15 bp, Homo sapiens
tgctatccctccccc

SEQ ID NO: 1227145 - DNA, 15 bp, Homo sapiens
gtgctatccctcccc

SEQ ID NO: 1227146 - DNA, 15 bp, Homo sapiens
agtgctatccctccc

SEQ ID NO: 1227147 - DNA, 15 bp, Homo sapiens
cagtgctatccctcc

SEQ ID NO: 1227148 - DNA, 15 bp, Homo sapiens
ccagtgctatccctc

SEQ ID NO: 1227149 - DNA, 15 bp, Homo sapiens
cccagtgctatccct

SEQ ID NO: 1227150 - DNA, 15 bp, Homo sapiens
tcccagtgctatccc

SEQ ID NO: 1227151 - DNA, 15 bp, Homo sapiens
ctcccagtgctatcc

SEQ ID NO: 1227152 - DNA, 15 bp, Homo sapiens
tctcccagtgctatc

SEQ ID NO: 1227153 - DNA, 15 bp, Homo sapiens
atctcccagtgctat

SEQ ID NO: 1227154 - DNA, 15 bp, Homo sapiens
tatctcccagtgcta

SEQ ID NO: 1227155 - DNA, 15 bp, Homo sapiens
atatctcccagtgct

SEQ ID NO: 1227156 - DNA, 15 bp, Homo sapiens
tatatctcccagtgc

SEQ ID NO: 1227157 - DNA, 15 bp, Homo sapiens
gtatatctcccagtg

SEQ ID NO: 1227158 - DNA, 15 bp, Homo sapiens
ggtatatctcccagt

SEQ ID NO: 1227159 - DNA, 15 bp, Homo sapiens
aggtatatctcccag

SEQ ID NO: 1227160 - DNA, 15 bp, Homo sapiens
taggtatatctccca

SEQ ID NO: 1227161 - DNA, 15 bp, Homo sapiens
ttaggtatatctccc

SEQ ID NO: 1227162 - DNA, 15 bp, Homo sapiens
ctagcattaggtata

SEQ ID NO: 1227163 - DNA, 15 bp, Homo sapiens
tctagcattaggtat

SEQ ID NO: 1227164 - DNA, 15 bp, Homo sapiens
atctagcattaggta

SEQ ID NO: 1227165 - DNA, 15 bp, Homo sapiens
catctagcattaggt

SEQ ID NO: 1227166 - DNA, 15 bp, Homo sapiens
tcatctagcattagg

SEQ ID NO: 1227167 - DNA, 15 bp, Homo sapiens
gtcatctagcattag

SEQ ID NO: 1227168 - DNA, 15 bp, Homo sapiens
cgtcatctagcatta

SEQ ID NO: 1227169 - DNA, 15 bp, Homo sapiens
tcgtcatctagcatt

SEQ ID NO: 1227170 - DNA, 15 bp, Homo sapiens
ctcgtcatctagcat

SEQ ID NO: 1227171 - DNA, 15 bp, Homo sapiens
actcgtcatctagca

SEQ ID NO: 1227172 - DNA, 15 bp, Homo sapiens
aactcgtcatctagc

SEQ ID NO: 1227173 - DNA, 15 bp, Homo sapiens
taactcgtcatctag

SEQ ID NO: 1227174 - DNA, 15 bp, Homo sapiens
ctaactcgtcatcta

SEQ ID NO: 1227175 - DNA, 15 bp, Homo sapiens
gctaactcgtcatct

SEQ ID NO: 1227176 - DNA, 15 bp, Homo sapiens
cgctaactcgtcatc

SEQ ID NO: 1227177 - DNA, 15 bp, Homo sapiens
ccgctaactcgtcat

SEQ ID NO: 1227178 - DNA, 15 bp, Homo sapiens
cccgctaactcgtca

SEQ ID NO: 1227179 - DNA, 15 bp, Homo sapiens
acccgctaactcgtc

SEQ ID NO: 1227180 - DNA, 15 bp, Homo sapiens
cacccgctaactcgt

SEQ ID NO: 1227181 - DNA, 15 bp, Homo sapiens
gcacccgctaactcg

SEQ ID NO: 1227182 - DNA, 15 bp, Homo sapiens
tgcacccgctaactc

SEQ ID NO: 1227183 - DNA, 15 bp, Homo sapiens
ctgcacccgctaact

SEQ ID NO: 1227184 - DNA, 15 bp, Homo sapiens
gctgcacccgctaac

SEQ ID NO: 1227185 - DNA, 15 bp, Homo sapiens
cgctgcacccgctaa

SEQ ID NO: 1227186 - DNA, 15 bp, Homo sapiens
gcgctgcacccgcta

SEQ ID NO: 1227187 - DNA, 15 bp, Homo sapiens
tgcgctgcacccgct

SEQ ID NO: 1227188 - DNA, 15 bp, Homo sapiens
gtgcgctgcacccgc

SEQ ID NO: 1227189 - DNA, 15 bp, Homo sapiens
ggtgcgctgcacccg

SEQ ID NO: 1227190 - DNA, 15 bp, Homo sapiens
tggtgcgctgcaccc

SEQ ID NO: 1227191 - DNA, 15 bp, Homo sapiens
ctggtgcgctgcacc

SEQ ID NO: 1227192 - DNA, 15 bp, Homo sapiens
gctggtgcgctgcac

SEQ ID NO: 1227193 - DNA, 15 bp, Homo sapiens
tgctggtgcgctgca

SEQ ID NO: 1227194 - DNA, 15 bp, Homo sapiens
atgctggtgcgctgc

SEQ ID NO: 1227195 - DNA, 15 bp, Homo sapiens
catgctggtgcgctg

SEQ ID NO: 1227196 - DNA, 15 bp, Homo sapiens
acatgctggtgcgct

SEQ ID NO: 1227197 - DNA, 15 bp, Homo sapiens
gacatgctggtgcgc

SEQ ID NO: 1227198 - DNA, 15 bp, Homo sapiens
tgacatgctggtgcg

SEQ ID NO: 1227199 - DNA, 15 bp, Homo sapiens
gtgacatgctggtgc

SEQ ID NO: 1227200 - DNA, 15 bp, Homo sapiens
tgtgacatgctggtg

SEQ ID NO: 1227201 - DNA, 15 bp, Homo sapiens
gtgtgacatgctggt

SEQ ID NO: 1227202 - DNA, 15 bp, Homo sapiens
cgtgtgacatgctgg

SEQ ID NO: 1227203 - DNA, 15 bp, Homo sapiens
acgtgtgacatgctg

SEQ ID NO: 1227204 - DNA, 15 bp, Homo sapiens
tacgtgtgacatgct

SEQ ID NO: 1227205 - DNA, 15 bp, Homo sapiens
atacgtgtgacatgc

SEQ ID NO: 1227206 - DNA, 15 bp, Homo sapiens
catacgtgtgacatg

SEQ ID NO: 1227207 - DNA, 15 bp, Homo sapiens
gcatacgtgtgacat

SEQ ID NO: 1227208 - DNA, 15 bp, Homo sapiens
tgcatacgtgtgaca

SEQ ID NO: 1227209 - DNA, 15 bp, Homo sapiens
atgcatacgtgtgac

SEQ ID NO: 1227210 - DNA, 15 bp, Homo sapiens
tatgcatacgtgtga

SEQ ID NO: 1227211 - DNA, 15 bp, Homo sapiens
atatgcatacgtgtg

SEQ ID NO: 1227212 - DNA, 15 bp, Homo sapiens
catatgcatacgtgt

SEQ ID NO: 1227213 - DNA, 15 bp, Homo sapiens
acatatgcatacgtg

SEQ ID NO: 1227214 - DNA, 15 bp, Homo sapiens
tacatatgcatacgt

SEQ ID NO: 1227215 - DNA, 15 bp, Homo sapiens
ttacatatgcatacg

SEQ ID NO: 1227216 - DNA, 15 bp, Homo sapiens
gttacatatgcatac

SEQ ID NO: 1227217 - DNA, 15 bp, Homo sapiens
agttacatatgcata

SEQ ID NO: 1227218 - DNA, 15 bp, Homo sapiens
tagttacatatgcat

SEQ ID NO: 1227219 - DNA, 15 bp, Homo sapiens
ttagttacatatgca

SEQ ID NO: 1227220 - DNA, 15 bp, Homo sapiens
gttagttacatatgc

SEQ ID NO: 1227221 - DNA, 15 bp, Homo sapiens
ggttagttacatatg

SEQ ID NO: 1227222 - DNA, 15 bp, Homo sapiens
aggttagttacatat

SEQ ID NO: 1227223 - DNA, 15 bp, Homo sapiens
caggttagttacata

SEQ ID NO: 1227224 - DNA, 15 bp, Homo sapiens
gcaggttagttacat

SEQ ID NO: 1227225 - DNA, 15 bp, Homo sapiens
tgcaggttagttaca

SEQ ID NO: 1227226 - DNA, 15 bp, Homo sapiens
gtgcaggttagttac

SEQ ID NO: 1227227 - DNA, 15 bp, Homo sapiens
tgtgcaggttagtta

SEQ ID NO: 1227228 - DNA, 15 bp, Homo sapiens
atgtgcaggttagtt

SEQ ID NO: 1227229 - DNA, 15 bp, Homo sapiens
aatgtgcaggttagt

SEQ ID NO: 1227230 - DNA, 15 bp, Homo sapiens
caatgtgcaggttag

SEQ ID NO: 1227231 - DNA, 15 bp, Homo sapiens
acaatgtgcaggtta

SEQ ID NO: 1227232 - DNA, 15 bp, Homo sapiens
cacaatgtgcaggtt

SEQ ID NO: 1227233 - DNA, 15 bp, Homo sapiens
gcacaatgtgcaggt

SEQ ID NO: 1227234 - DNA, 15 bp, Homo sapiens
tgcacaatgtgcagg

SEQ ID NO: 1227235 - DNA, 15 bp, Homo sapiens
gtgcacaatgtgcag

SEQ ID NO: 1227236 - DNA, 15 bp, Homo sapiens
tgtgcacaatgtgca

SEQ ID NO: 1227237 - DNA, 15 bp, Homo sapiens
atgtgcacaatgtgc

SEQ ID NO: 1227238 - DNA, 15 bp, Homo sapiens
catgtgcacaatgtg

SEQ ID NO: 1227239 - DNA, 15 bp, Homo sapiens
acatgtgcacaatgt

SEQ ID NO: 1227240 - DNA, 15 bp, Homo sapiens
tacatgtgcacaatg

SEQ ID NO: 1227241 - DNA, 15 bp, Homo sapiens
gtacatgtgcacaat

SEQ ID NO: 1227242 - DNA, 15 bp, Homo sapiens
gacagtgagagtttt

SEQ ID NO: 1227243 - DNA, 15 bp, Homo sapiens
agacagtgagagttt

SEQ ID NO: 1227244 - DNA, 15 bp, Homo sapiens
acagacagtgagagt

SEQ ID NO: 1227245 - DNA, 15 bp, Homo sapiens
gacagacagtgagag

SEQ ID NO: 1227246 - DNA, 15 bp, Homo sapiens
agacagacagtgaga

SEQ ID NO: 1227247 - DNA, 15 bp, Homo sapiens
cagacagacagtgag

SEQ ID NO: 1227248 - DNA, 15 bp, Homo sapiens
ccagacagacagtga

SEQ ID NO: 1227249 - DNA, 15 bp, Homo sapiens
tccagacagacagtg

SEQ ID NO: 1227250 - DNA, 15 bp, Homo sapiens
atccagacagacagt

SEQ ID NO: 1227251 - DNA, 15 bp, Homo sapiens
tatccagacagacag

SEQ ID NO: 1227252 - DNA, 15 bp, Homo sapiens
ctatccagacagaca

SEQ ID NO: 1227253 - DNA, 15 bp, Homo sapiens
tctatccagacagac

SEQ ID NO: 1227254 - DNA, 15 bp, Homo sapiens
acagatactgagagt

SEQ ID NO: 1227255 - DNA, 15 bp, Homo sapiens
tacagatactgagag

SEQ ID NO: 1227256 - DNA, 15 bp, Homo sapiens
atacagatactgaga

SEQ ID NO: 1227257 - DNA, 15 bp, Homo sapiens
tatacagatactgag

SEQ ID NO: 1227258 - DNA, 15 bp, Homo sapiens
ctatacagatactga

SEQ ID NO: 1227259 - DNA, 15 bp, Homo sapiens
tctatacagatactg

SEQ ID NO: 1227260 - DNA, 15 bp, Homo sapiens
ttctatacagatact

SEQ ID NO: 1227261 - DNA, 15 bp, Homo sapiens
attctatacagatac

SEQ ID NO: 1227262 - DNA, 15 bp, Homo sapiens
aagaattctatacag

SEQ ID NO: 1227263 - DNA, 15 bp, Homo sapiens
taagaattctataca

SEQ ID NO: 1227264 - DNA, 15 bp, Homo sapiens
gtaagaattctatac

SEQ ID NO: 1227265 - DNA, 15 bp, Homo sapiens
agtaagaattctata

SEQ ID NO: 1227266 - DNA, 15 bp, Homo sapiens
cgagaaagatagtga

SEQ ID NO: 1227267 - DNA, 15 bp, Homo sapiens
tcgagaaagatagtg

SEQ ID NO: 1227268 - DNA, 15 bp, Homo sapiens
atcgagaaagatagt

SEQ ID NO: 1227269 - DNA, 15 bp, Homo sapiens
tatcgagaaagatag

SEQ ID NO: 1227270 - DNA, 15 bp, Homo sapiens
ctatcgagaaagata

SEQ ID NO: 1227271 - DNA, 15 bp, Homo sapiens
tctatcgagaaagat

SEQ ID NO: 1227272 - DNA, 15 bp, Homo sapiens
ttctatcgagaaaga

SEQ ID NO: 1227273 - DNA, 15 bp, Homo sapiens
gttctatcgagaaag

SEQ ID NO: 1227274 - DNA, 15 bp, Homo sapiens
agttctatcgagaaa

SEQ ID NO: 1227275 - DNA, 15 bp, Homo sapiens
cagttctatcgagaa

SEQ ID NO: 1227276 - DNA, 15 bp, Homo sapiens
acagttctatcgaga

SEQ ID NO: 1227277 - DNA, 15 bp, Homo sapiens
gacagttctatcgag

SEQ ID NO: 1227278 - DNA, 15 bp, Homo sapiens
tgacagttctatcga

SEQ ID NO: 1227279 - DNA, 15 bp, Homo sapiens
gtgacagttctatcg

SEQ ID NO: 1227280 - DNA, 15 bp, Homo sapiens
ggtgacagttctatc

SEQ ID NO: 1227281 - DNA, 15 bp, Homo sapiens
gggtgacagttctat

SEQ ID NO: 1227282 - DNA, 15 bp, Homo sapiens
agggtgacagttcta

SEQ ID NO: 1227283 - DNA, 15 bp, Homo sapiens
gagggtgacagttct

SEQ ID NO: 1227284 - DNA, 15 bp, Homo sapiens
agagggtgacagttc

SEQ ID NO: 1227285 - DNA, 15 bp, Homo sapiens
cagagggtgacagtt

SEQ ID NO: 1227286 - DNA, 15 bp, Homo sapiens
ccagagggtgacagt

SEQ ID NO: 1227287 - DNA, 15 bp, Homo sapiens
tccagagggtgacag

SEQ ID NO: 1227288 - DNA, 15 bp, Homo sapiens
atccagagggtgaca

SEQ ID NO: 1227289 - DNA, 15 bp, Homo sapiens
tatccagagggtgac

SEQ ID NO: 1227290 - DNA, 15 bp, Homo sapiens
cgaattctatccaga

SEQ ID NO: 1227291 - DNA, 15 bp, Homo sapiens
gcgaattctatccag

SEQ ID NO: 1227292 - DNA, 15 bp, Homo sapiens
tgcgaattctatcca

SEQ ID NO: 1227293 - DNA, 15 bp, Homo sapiens
gtgcgaattctatcc

SEQ ID NO: 1227294 - DNA, 15 bp, Homo sapiens
agtgcgaattctatc

SEQ ID NO: 1227295 - DNA, 15 bp, Homo sapiens
tagtgcgaattctat

SEQ ID NO: 1227296 - DNA, 15 bp, Homo sapiens
atagtgcgaattcta

SEQ ID NO: 1227297 - DNA, 15 bp, Homo sapiens
gatagtgcgaattct

SEQ ID NO: 1227298 - DNA, 15 bp, Homo sapiens
agatagtgcgaattc

SEQ ID NO: 1227299 - DNA, 15 bp, Homo sapiens
tagatagtgcgaatt

SEQ ID NO: 1227300 - DNA, 15 bp, Homo sapiens
atagatagtgcgaat

SEQ ID NO: 1227301 - DNA, 15 bp, Homo sapiens
gatagatagtgcgaa

SEQ ID NO: 1227302 - DNA, 15 bp, Homo sapiens
agatagatagtgcga

SEQ ID NO: 1227303 - DNA, 15 bp, Homo sapiens
cagatagatagtgcg

SEQ ID NO: 1227304 - DNA, 15 bp, Homo sapiens
ccagatagatagtgc

SEQ ID NO: 1227305 - DNA, 15 bp, Homo sapiens
acagaattctatcca

SEQ ID NO: 1227306 - DNA, 15 bp, Homo sapiens
gacagaattctatcc

SEQ ID NO: 1227307 - DNA, 15 bp, Homo sapiens
agacagaattctatc

SEQ ID NO: 1227308 - DNA, 15 bp, Homo sapiens
gagacagaattctat

SEQ ID NO: 1227309 - DNA, 15 bp, Homo sapiens
agagacagaattcta

SEQ ID NO: 1227310 - DNA, 15 bp, Homo sapiens
cagagacagaattct

SEQ ID NO: 1227311 - DNA, 15 bp, Homo sapiens
ccagagacagaattc

SEQ ID NO: 1227312 - DNA, 15 bp, Homo sapiens
tccagagacagaatt

SEQ ID NO: 1227313 - DNA, 15 bp, Homo sapiens
atccagagacagaat

SEQ ID NO: 1227314 - DNA, 15 bp, Homo sapiens
tatccagagacagaa

SEQ ID NO: 1227315 - DNA, 15 bp, Homo sapiens
atgagacttctatcc

SEQ ID NO: 1227316 - DNA, 15 bp, Homo sapiens
aatgagacttctatc

SEQ ID NO: 1227317 - DNA, 15 bp, Homo sapiens
taatgagacttctat

SEQ ID NO: 1227318 - DNA, 15 bp, Homo sapiens
ataatgagacttcta

SEQ ID NO: 1227319 - DNA, 15 bp, Homo sapiens
gataatgagacttct

SEQ ID NO: 1227320 - DNA, 15 bp, Homo sapiens
agataatgagacttc

SEQ ID NO: 1227321 - DNA, 15 bp, Homo sapiens
cagataatgagactt

SEQ ID NO: 1227322 - DNA, 15 bp, Homo sapiens
acagataatgagact

SEQ ID NO: 1227323 - DNA, 15 bp, Homo sapiens
gacagataatgagac

SEQ ID NO: 1227324 - DNA, 15 bp, Homo sapiens
atccagacagataat

SEQ ID NO: 1227325 - DNA, 15 bp, Homo sapiens
tatccagacagataa

SEQ ID NO: 1227326 - DNA, 15 bp, Homo sapiens
tatgcagatggtgag

SEQ ID NO: 1227327 - DNA, 15 bp, Homo sapiens
tattctatgcagatg

SEQ ID NO: 1227328 - DNA, 15 bp, Homo sapiens
atattctatgcagat

SEQ ID NO: 1227329 - DNA, 15 bp, Homo sapiens
aatattctatgcaga

SEQ ID NO: 1227330 - DNA, 15 bp, Homo sapiens
gaatattctatgcag

SEQ ID NO: 1227331 - DNA, 15 bp, Homo sapiens
tgaatattctatgca

SEQ ID NO: 1227332 - DNA, 15 bp, Homo sapiens
gtgaatattctatgc

SEQ ID NO: 1227333 - DNA, 15 bp, Homo sapiens
agtgaatattctatg

SEQ ID NO: 1227334 - DNA, 15 bp, Homo sapiens
tagtgaatattctat

SEQ ID NO: 1227335 - DNA, 15 bp, Homo sapiens
atagtgaatattcta

SEQ ID NO: 1227336 - DNA, 15 bp, Homo sapiens
gatagtgaatattct

SEQ ID NO: 1227337 - DNA, 15 bp, Homo sapiens
agatagtgaatattc

SEQ ID NO: 1227338 - DNA, 15 bp, Homo sapiens
cagatagtgaatatt

SEQ ID NO: 1227339 - DNA, 15 bp, Homo sapiens
acagatagtgaatat

SEQ ID NO: 1227340 - DNA, 15 bp, Homo sapiens
gacagatagtgaata

SEQ ID NO: 1227341 - DNA, 15 bp, Homo sapiens
agacagatagtgaat

SEQ ID NO: 1227342 - DNA, 15 bp, Homo sapiens
cagacagatagtgaa

SEQ ID NO: 1227343 - DNA, 15 bp, Homo sapiens
ggtcagaattctatc

SEQ ID NO: 1227344 - DNA, 15 bp, Homo sapiens
tggtcagaattctat

SEQ ID NO: 1227345 - DNA, 15 bp, Homo sapiens
ctggtcagaattcta

SEQ ID NO: 1227346 - DNA, 15 bp, Homo sapiens
gctggtcagaattct

SEQ ID NO: 1227347 - DNA, 15 bp, Homo sapiens
agctggtcagaattc

SEQ ID NO: 1227348 - DNA, 15 bp, Homo sapiens
cagctggtcagaatt

SEQ ID NO: 1227349 - DNA, 15 bp, Homo sapiens
ccagctggtcagaat

SEQ ID NO: 1227350 - DNA, 15 bp, Homo sapiens
tccagctggtcagaa

SEQ ID NO: 1227351 - DNA, 15 bp, Homo sapiens
ctccagctggtcaga

SEQ ID NO: 1227352 - DNA, 15 bp, Homo sapiens
tctccagctggtcag

SEQ ID NO: 1227353 - DNA, 15 bp, Homo sapiens
ctctccagctggtca

SEQ ID NO: 1227354 - DNA, 15 bp, Homo sapiens
tctctccagctggtc

SEQ ID NO: 1227355 - DNA, 15 bp, Homo sapiens
ttctctccagctggt

SEQ ID NO: 1227356 - DNA, 15 bp, Homo sapiens
gttctctccagctgg

SEQ ID NO: 1227357 - DNA, 15 bp, Homo sapiens
agttctctccagctg

SEQ ID NO: 1227358 - DNA, 15 bp, Homo sapiens
gagttctctccagct

SEQ ID NO: 1227359 - DNA, 15 bp, Homo sapiens
agagttctctccagc

SEQ ID NO: 1227360 - DNA, 15 bp, Homo sapiens
tattctatccagata

SEQ ID NO: 1227361 - DNA, 15 bp, Homo sapiens
ttattctatccagat

SEQ ID NO: 1227362 - DNA, 15 bp, Homo sapiens
attattctatccaga

SEQ ID NO: 1227363 - DNA, 15 bp, Homo sapiens
gattattctatccag

SEQ ID NO: 1227364 - DNA, 15 bp, Homo sapiens
tgattattctatcca

SEQ ID NO: 1227365 - DNA, 15 bp, Homo sapiens
atgattattctatcc

SEQ ID NO: 1227366 - DNA, 15 bp, Homo sapiens
gatgattattctatc

SEQ ID NO: 1227367 - DNA, 15 bp, Homo sapiens
cgatgattattctat

SEQ ID NO: 1227368 - DNA, 15 bp, Homo sapiens
acgatgattattcta

SEQ ID NO: 1227369 - DNA, 15 bp, Homo sapiens
gacgatgattattct

SEQ ID NO: 1227370 - DNA, 15 bp, Homo sapiens
agacgatgattattc

SEQ ID NO: 1227371 - DNA, 15 bp, Homo sapiens
cagacgatgattatt

SEQ ID NO: 1227372 - DNA, 15 bp, Homo sapiens
ccagacgatgattat

SEQ ID NO: 1227373 - DNA, 15 bp, Homo sapiens
tccagacgatgatta

SEQ ID NO: 1227374 - DNA, 15 bp, Homo sapiens
atccagacgatgatt

SEQ ID NO: 1227375 - DNA, 15 bp, Homo sapiens
tatccagacgatgat

SEQ ID NO: 1227376 - DNA, 15 bp, Homo sapiens
ctatccagacgatga

SEQ ID NO: 1227377 - DNA, 15 bp, Homo sapiens
tctatccagacgatg

SEQ ID NO: 1227378 - DNA, 15 bp, Homo sapiens
ttctatccagacgat

SEQ ID NO: 1227379 - DNA, 15 bp, Homo sapiens
gttctatccagacga

SEQ ID NO: 1227380 - DNA, 15 bp, Homo sapiens
agttctatccagacg

SEQ ID NO: 1227381 - DNA, 15 bp, Homo sapiens
gagtcagagttctat

SEQ ID NO: 1227382 - DNA, 15 bp, Homo sapiens
agagtcagagttcta

SEQ ID NO: 1227383 - DNA, 15 bp, Homo sapiens
gagagtcagagttct

SEQ ID NO: 1227384 - DNA, 15 bp, Homo sapiens
agagagtcagagttc

SEQ ID NO: 1227385 - DNA, 15 bp, Homo sapiens
cagagagtcagagtt

SEQ ID NO: 1227386 - DNA, 15 bp, Homo sapiens
acagagagtcagagt

SEQ ID NO: 1227387 - DNA, 15 bp, Homo sapiens
gacagagagtcagag

SEQ ID NO: 1227388 - DNA, 15 bp, Homo sapiens
agacagagagtcaga

SEQ ID NO: 1227389 - DNA, 15 bp, Homo sapiens
cagacagagagtcag

SEQ ID NO: 1227390 - DNA, 15 bp, Homo sapiens
ccagacagagagtca

SEQ ID NO: 1227391 - DNA, 15 bp, Homo sapiens
tccagacagagagtc

SEQ ID NO: 1227392 - DNA, 15 bp, Homo sapiens
ctatccagacagaga

SEQ ID NO: 1227393 - DNA, 15 bp, Homo sapiens
gctatccagacagag

SEQ ID NO: 1227394 - DNA, 15 bp, Homo sapiens
tgctatccagacaga

SEQ ID NO: 1227395 - DNA, 15 bp, Homo sapiens
gtgctatccagacag

SEQ ID NO: 1227396 - DNA, 15 bp, Homo sapiens
agtgctatccagaca

SEQ ID NO: 1227397 - DNA, 15 bp, Homo sapiens
gagtgctatccagac

SEQ ID NO: 1227398 - DNA, 15 bp, Homo sapiens
gtagtgagagtgcta

SEQ ID NO: 1227399 - DNA, 15 bp, Homo sapiens
ggtagtgagagtgct

SEQ ID NO: 1227400 - DNA, 15 bp, Homo sapiens
aggtagtgagagtgc

SEQ ID NO: 1227401 - DNA, 15 bp, Homo sapiens
aaggtagtgagagtg

SEQ ID NO: 1227402 - DNA, 15 bp, Homo sapiens
aaaggtagtgagagt

SEQ ID NO: 1227403 - DNA, 15 bp, Homo sapiens
gaaaggtagtgagag

SEQ ID NO: 1227404 - DNA, 15 bp, Homo sapiens
agaaaggtagtgaga

SEQ ID NO: 1227405 - DNA, 15 bp, Homo sapiens
cagaaaggtagtgag

SEQ ID NO: 1227406 - DNA, 15 bp, Homo sapiens
ccagaaaggtagtga

SEQ ID NO: 1227407 - DNA, 15 bp, Homo sapiens
tccagaaaggtagtg

SEQ ID NO: 1227408 - DNA, 15 bp, Homo sapiens
atccagaaaggtagt

SEQ ID NO: 1227409 - DNA, 15 bp, Homo sapiens
tatccagaaaggtag

SEQ ID NO: 1227410 - DNA, 15 bp, Homo sapiens
ctatccagaaaggta

SEQ ID NO: 1227411 - DNA, 15 bp, Homo sapiens
tctatccagaaaggt

SEQ ID NO: 1227412 - DNA, 15 bp, Homo sapiens
ttctatccagaaagg

SEQ ID NO: 1227413 - DNA, 15 bp, Homo sapiens
agtatccagagagtg

SEQ ID NO: 1227414 - DNA, 15 bp, Homo sapiens
tagtatccagagagt

SEQ ID NO: 1227415 - DNA, 15 bp, Homo sapiens
gtagtatccagagag

SEQ ID NO: 1227416 - DNA, 15 bp, Homo sapiens
agtagtatccagaga

SEQ ID NO: 1227417 - DNA, 15 bp, Homo sapiens
gagtagtatccagag

SEQ ID NO: 1227418 - DNA, 15 bp, Homo sapiens
agagtagtatccaga

SEQ ID NO: 1227419 - DNA, 15 bp, Homo sapiens
gagagtagtatccag

SEQ ID NO: 1227420 - DNA, 15 bp, Homo sapiens
cgagagtagtatcca

SEQ ID NO: 1227421 - DNA, 15 bp, Homo sapiens
gcgagagtagtatcc

SEQ ID NO: 1227422 - DNA, 15 bp, Homo sapiens
agcgagagtagtatc

SEQ ID NO: 1227423 - DNA, 15 bp, Homo sapiens
tagcgagagtagtat

SEQ ID NO: 1227424 - DNA, 15 bp, Homo sapiens
atagcgagagtagta

SEQ ID NO: 1227425 - DNA, 15 bp, Homo sapiens
gatagcgagagtagt

SEQ ID NO: 1227426 - DNA, 15 bp, Homo sapiens
agatagcgagagtag

SEQ ID NO: 1227427 - DNA, 15 bp, Homo sapiens
cagatagcgagagta

SEQ ID NO: 1227428 - DNA, 15 bp, Homo sapiens
atatccagatgctga

SEQ ID NO: 1227429 - DNA, 15 bp, Homo sapiens
tatatccagatgctg

SEQ ID NO: 1227430 - DNA, 15 bp, Homo sapiens
ttatatccagatgct

SEQ ID NO: 1227431 - DNA, 15 bp, Homo sapiens
attatatccagatgc

SEQ ID NO: 1227432 - DNA, 15 bp, Homo sapiens
aattatatccagatg

SEQ ID NO: 1227433 - DNA, 15 bp, Homo sapiens
tagtgggaattatat

SEQ ID NO: 1227434 - DNA, 15 bp, Homo sapiens
atagtgggaattata

SEQ ID NO: 1227435 - DNA, 15 bp, Homo sapiens
gatagtgggaattat

SEQ ID NO: 1227436 - DNA, 15 bp, Homo sapiens
cgatagtgggaatta

SEQ ID NO: 1227437 - DNA, 15 bp, Homo sapiens
tcgatagtgggaatt

SEQ ID NO: 1227438 - DNA, 15 bp, Homo sapiens
atcgatagtgggaat

SEQ ID NO: 1227439 - DNA, 15 bp, Homo sapiens
gatcgatagtgggaa

SEQ ID NO: 1227440 - DNA, 15 bp, Homo sapiens
tgatcgatagtggga

SEQ ID NO: 1227441 - DNA, 15 bp, Homo sapiens
ctgatcgatagtggg

SEQ ID NO: 1227442 - DNA, 15 bp, Homo sapiens
cctgatcgatagtgg

SEQ ID NO: 1227443 - DNA, 15 bp, Homo sapiens
tcctgatcgatagtg

SEQ ID NO: 1227444 - DNA, 15 bp, Homo sapiens
atcctgatcgatagt

SEQ ID NO: 1227445 - DNA, 15 bp, Homo sapiens
tatcctgatcgatag

SEQ ID NO: 1227446 - DNA, 15 bp, Homo sapiens
ctatcctgatcgata

SEQ ID NO: 1227447 - DNA, 15 bp, Homo sapiens
tctatcctgatcgat

SEQ ID NO: 1227448 - DNA, 15 bp, Homo sapiens
ttctatcctgatcga

SEQ ID NO: 1227449 - DNA, 15 bp, Homo sapiens
attctatcctgatcg

SEQ ID NO: 1227450 - DNA, 15 bp, Homo sapiens
aattctatcctgatc

SEQ ID NO: 1227451 - DNA, 15 bp, Homo sapiens
gaattctatcctgat

SEQ ID NO: 1227452 - DNA, 15 bp, Homo sapiens
agaattctatcctga

SEQ ID NO: 1227453 - DNA, 15 bp, Homo sapiens
gagaattctatcctg

SEQ ID NO: 1227454 - DNA, 15 bp, Homo sapiens
tgagaattctatcct

SEQ ID NO: 1227455 - DNA, 15 bp, Homo sapiens
tgtcagagttctatc

SEQ ID NO: 1227456 - DNA, 15 bp, Homo sapiens
ttgtcagagttctat

SEQ ID NO: 1227457 - DNA, 15 bp, Homo sapiens
cattgtcagagttct

SEQ ID NO: 1227458 - DNA, 15 bp, Homo sapiens
acattgtcagagttc

SEQ ID NO: 1227459 - DNA, 15 bp, Homo sapiens
tacattgtcagagtt

SEQ ID NO: 1227460 - DNA, 15 bp, Homo sapiens
atacattgtcagagt

SEQ ID NO: 1227461 - DNA, 15 bp, Homo sapiens
gatacattgtcagag

SEQ ID NO: 1227462 - DNA, 15 bp, Homo sapiens
agatacattgtcaga

SEQ ID NO: 1227463 - DNA, 15 bp, Homo sapiens
cagatacattgtcag

SEQ ID NO: 1227464 - DNA, 15 bp, Homo sapiens
ccagatacattgtca

SEQ ID NO: 1227465 - DNA, 15 bp, Homo sapiens
tccagatacattgtc

SEQ ID NO: 1227466 - DNA, 15 bp, Homo sapiens
atccagatacattgt

SEQ ID NO: 1227467 - DNA, 15 bp, Homo sapiens
tatccagatacattg

SEQ ID NO: 1227468 - DNA, 15 bp, Homo sapiens
ctatccagatacatt

SEQ ID NO: 1227469 - DNA, 15 bp, Homo sapiens
gggtgacaattctat

SEQ ID NO: 1227470 - DNA, 15 bp, Homo sapiens
agggtgacaattcta

SEQ ID NO: 1227471 - DNA, 15 bp, Homo sapiens
gagggtgacaattct

SEQ ID NO: 1227472 - DNA, 15 bp, Homo sapiens
agagggtgacaattc

SEQ ID NO: 1227473 - DNA, 15 bp, Homo sapiens
cagagggtgacaatt

SEQ ID NO: 1227474 - DNA, 15 bp, Homo sapiens
ccagagggtgacaat

SEQ ID NO: 1227475 - DNA, 15 bp, Homo sapiens
tccagagggtgacaa

SEQ ID NO: 1227476 - DNA, 15 bp, Homo sapiens
ttctacccagatagt

SEQ ID NO: 1227477 - DNA, 15 bp, Homo sapiens
attctacccagatag

SEQ ID NO: 1227478 - DNA, 15 bp, Homo sapiens
aattctacccagata

SEQ ID NO: 1227479 - DNA, 15 bp, Homo sapiens
aagattgtgagagtt

SEQ ID NO: 1227480 - DNA, 15 bp, Homo sapiens
aaagattgtgagagt

SEQ ID NO: 1227481 - DNA, 15 bp, Homo sapiens
gaaagattgtgagag

SEQ ID NO: 1227482 - DNA, 15 bp, Homo sapiens
tgaaagattgtgaga

SEQ ID NO: 1227483 - DNA, 15 bp, Homo sapiens
ctgaaagattgtgag

SEQ ID NO: 1227484 - DNA, 15 bp, Homo sapiens
tctgaaagattgtga

SEQ ID NO: 1227485 - DNA, 15 bp, Homo sapiens
atctgaaagattgtg

SEQ ID NO: 1227486 - DNA, 15 bp, Homo sapiens
tatctgaaagattgt

SEQ ID NO: 1227487 - DNA, 15 bp, Homo sapiens
ctatctgaaagattg

SEQ ID NO: 1227488 - DNA, 15 bp, Homo sapiens
tctatctgaaagatt

SEQ ID NO: 1227489 - DNA, 15 bp, Homo sapiens
ttctatctgaaagat

SEQ ID NO: 1227490 - DNA, 15 bp, Homo sapiens
attctatctgaaaga

SEQ ID NO: 1227491 - DNA, 15 bp, Homo sapiens
aattctatctgaaag

SEQ ID NO: 1227492 - DNA, 15 bp, Homo sapiens
gaattctatctgaaa

SEQ ID NO: 1227493 - DNA, 15 bp, Homo sapiens
agaattctatctgaa

SEQ ID NO: 1227494 - DNA, 15 bp, Homo sapiens
gagaattctatctga

SEQ ID NO: 1227495 - DNA, 15 bp, Homo sapiens
ggagaattctatctg

SEQ ID NO: 1227496 - DNA, 15 bp, Homo sapiens
aggagaattctatct

SEQ ID NO: 1227497 - DNA, 15 bp, Homo sapiens
gaggagaattctatc

SEQ ID NO: 1227498 - DNA, 15 bp, Homo sapiens
ggaggagaattctat

SEQ ID NO: 1227499 - DNA, 15 bp, Homo sapiens
aggaggagaattcta

SEQ ID NO: 1227500 - DNA, 15 bp, Homo sapiens
gaggaggagaattct

SEQ ID NO: 1227501 - DNA, 15 bp, Homo sapiens
agaggaggagaattc

SEQ ID NO: 1227502 - DNA, 15 bp, Homo sapiens
cagaggaggagaatt

SEQ ID NO: 1227503 - DNA, 15 bp, Homo sapiens
ccagaggaggagaat

SEQ ID NO: 1227504 - DNA, 15 bp, Homo sapiens
tccagaggaggagaa

SEQ ID NO: 1227505 - DNA, 15 bp, Homo sapiens
atccagaggaggaga

SEQ ID NO: 1227506 - DNA, 15 bp, Homo sapiens
tatccagaggaggag

SEQ ID NO: 1227507 - DNA, 15 bp, Homo sapiens
ctatccagaggagga

SEQ ID NO: 1227508 - DNA, 15 bp, Homo sapiens
tctatccagaggagg

SEQ ID NO: 1227509 - DNA, 15 bp, Homo sapiens
ctctatccagaggag

SEQ ID NO: 1227510 - DNA, 15 bp, Homo sapiens
gctctatccagagga

SEQ ID NO: 1227511 - DNA, 15 bp, Homo sapiens
agctctatccagagg

SEQ ID NO: 1227512 - DNA, 15 bp, Homo sapiens
tgtgagagctctatc

SEQ ID NO: 1227513 - DNA, 15 bp, Homo sapiens
ctgtgagagctctat

SEQ ID NO: 1227514 - DNA, 15 bp, Homo sapiens
actgtgagagctcta

SEQ ID NO: 1227515 - DNA, 15 bp, Homo sapiens
gactgtgagagctct

SEQ ID NO: 1227516 - DNA, 15 bp, Homo sapiens
agactgtgagagctc

SEQ ID NO: 1227517 - DNA, 15 bp, Homo sapiens
cagactgtgagagct

SEQ ID NO: 1227518 - DNA, 15 bp, Homo sapiens
ccagactgtgagagc

SEQ ID NO: 1227519 - DNA, 15 bp, Homo sapiens
tccagactgtgagag

SEQ ID NO: 1227520 - DNA, 15 bp, Homo sapiens
atccagactgtgaga

SEQ ID NO: 1227521 - DNA, 15 bp, Homo sapiens
tatccagactgtgag

SEQ ID NO: 1227522 - DNA, 15 bp, Homo sapiens
ctatccagactgtga

SEQ ID NO: 1227523 - DNA, 15 bp, Homo sapiens
tctatccagactgtg

SEQ ID NO: 1227524 - DNA, 15 bp, Homo sapiens
ttctatccagactgt

SEQ ID NO: 1227525 - DNA, 15 bp, Homo sapiens
gtattctatccagat

SEQ ID NO: 1227526 - DNA, 15 bp, Homo sapiens
gatggtgagtattct

SEQ ID NO: 1227527 - DNA, 15 bp, Homo sapiens
agatggtgagtattc

SEQ ID NO: 1227528 - DNA, 15 bp, Homo sapiens
gagatggtgagtatt

SEQ ID NO: 1227529 - DNA, 15 bp, Homo sapiens
cgagatggtgagtat

SEQ ID NO: 1227530 - DNA, 15 bp, Homo sapiens
tcgagatggtgagta

SEQ ID NO: 1227531 - DNA, 15 bp, Homo sapiens
atcgagatggtgagt

SEQ ID NO: 1227532 - DNA, 15 bp, Homo sapiens
tatcgagatggtgag

SEQ ID NO: 1227533 - DNA, 15 bp, Homo sapiens
ctatcgagatggtga

SEQ ID NO: 1227534 - DNA, 15 bp, Homo sapiens
tctatcgagatggtg

SEQ ID NO: 1227535 - DNA, 15 bp, Homo sapiens
ttctatcgagatggt

SEQ ID NO: 1227536 - DNA, 15 bp, Homo sapiens
gttctatcgagatgg

SEQ ID NO: 1227537 - DNA, 15 bp, Homo sapiens
agttctatcgagatg

SEQ ID NO: 1227538 - DNA, 15 bp, Homo sapiens
gagttctatcgagat

SEQ ID NO: 1227539 - DNA, 15 bp, Homo sapiens
gagagttctatcgag

SEQ ID NO: 1227540 - DNA, 15 bp, Homo sapiens
tgagagttctatcga

SEQ ID NO: 1227541 - DNA, 15 bp, Homo sapiens
gtgagagttctatcg

SEQ ID NO: 1227542 - DNA, 15 bp, Homo sapiens
gtctatccagataga

SEQ ID NO: 1227543 - DNA, 15 bp, Homo sapiens
agtctatccagatag

SEQ ID NO: 1227544 - DNA, 15 bp, Homo sapiens
aagtctatccagata

SEQ ID NO: 1227545 - DNA, 15 bp, Homo sapiens
gaagtctatccagat

SEQ ID NO: 1227546 - DNA, 15 bp, Homo sapiens
agaagtctatccaga

SEQ ID NO: 1227547 - DNA, 15 bp, Homo sapiens
gagaagtctatccag

SEQ ID NO: 1227548 - DNA, 15 bp, Homo sapiens
cgagaagtctatcca

SEQ ID NO: 1227549 - DNA, 15 bp, Homo sapiens
ccgagaagtctatcc

SEQ ID NO: 1227550 - DNA, 15 bp, Homo sapiens
accgagaagtctatc

SEQ ID NO: 1227551 - DNA, 15 bp, Homo sapiens
gaccgagaagtctat

SEQ ID NO: 1227552 - DNA, 15 bp, Homo sapiens
agaccgagaagtcta

SEQ ID NO: 1227553 - DNA, 15 bp, Homo sapiens
gagaccgagaagtct

SEQ ID NO: 1227554 - DNA, 15 bp, Homo sapiens
agagaccgagaagtc

SEQ ID NO: 1227555 - DNA, 15 bp, Homo sapiens
cagagaccgagaagt

SEQ ID NO: 1227556 - DNA, 15 bp, Homo sapiens
ccagagaccgagaag

SEQ ID NO: 1227557 - DNA, 15 bp, Homo sapiens
tccagagaccgagaa

SEQ ID NO: 1227558 - DNA, 15 bp, Homo sapiens
atccagagaccgaga

SEQ ID NO: 1227559 - DNA, 15 bp, Homo sapiens
tatccagagaccgag

SEQ ID NO: 1227560 - DNA, 15 bp, Homo sapiens
ctatccagagaccga

SEQ ID NO: 1227561 - DNA, 15 bp, Homo sapiens
tctatccagagaccg

SEQ ID NO: 1227562 - DNA, 15 bp, Homo sapiens
ttctatccagagacc

SEQ ID NO: 1227563 - DNA, 15 bp, Homo sapiens
ttgagacttctatcc

SEQ ID NO: 1227564 - DNA, 15 bp, Homo sapiens
attgagacttctatc

SEQ ID NO: 1227565 - DNA, 15 bp, Homo sapiens
cattgagacttctat

SEQ ID NO: 1227566 - DNA, 15 bp, Homo sapiens
gcattgagacttcta

SEQ ID NO: 1227567 - DNA, 15 bp, Homo sapiens
ggcattgagacttct

SEQ ID NO: 1227568 - DNA, 15 bp, Homo sapiens
aggcattgagacttc

SEQ ID NO: 1227569 - DNA, 15 bp, Homo sapiens
caggcattgagactt

SEQ ID NO: 1227570 - DNA, 15 bp, Homo sapiens
acaggcattgagact

SEQ ID NO: 1227571 - DNA, 15 bp, Homo sapiens
gacaggcattgagac

SEQ ID NO: 1227572 - DNA, 15 bp, Homo sapiens
agacaggcattgaga

SEQ ID NO: 1227573 - DNA, 15 bp, Homo sapiens
tagacaggcattgag

SEQ ID NO: 1227574 - DNA, 15 bp, Homo sapiens
ctagacaggcattga

SEQ ID NO: 1227575 - DNA, 15 bp, Homo sapiens
tctagacaggcattg

SEQ ID NO: 1227576 - DNA, 15 bp, Homo sapiens
atctagacaggcatt

SEQ ID NO: 1227577 - DNA, 15 bp, Homo sapiens
tatctagacaggcat

SEQ ID NO: 1227578 - DNA, 15 bp, Homo sapiens
ctatctagacaggca

SEQ ID NO: 1227579 - DNA, 15 bp, Homo sapiens
tctatctagacaggc

SEQ ID NO: 1227580 - DNA, 15 bp, Homo sapiens
ttctatctagacagg

SEQ ID NO: 1227581 - DNA, 15 bp, Homo sapiens
ggatggtgaaaattc

SEQ ID NO: 1227582 - DNA, 15 bp, Homo sapiens
cggatggtgaaaatt

SEQ ID NO: 1227583 - DNA, 15 bp, Homo sapiens
ccggatggtgaaaat

SEQ ID NO: 1227584 - DNA, 15 bp, Homo sapiens
tccggatggtgaaaa

SEQ ID NO: 1227585 - DNA, 15 bp, Homo sapiens
atccggatggtgaaa

SEQ ID NO: 1227586 - DNA, 15 bp, Homo sapiens
tatccggatggtgaa

SEQ ID NO: 1227587 - DNA, 15 bp, Homo sapiens
gtatccggatggtga

SEQ ID NO: 1227588 - DNA, 15 bp, Homo sapiens
tgtatccggatggtg

SEQ ID NO: 1227589 - DNA, 15 bp, Homo sapiens
ttgtatccggatggt

SEQ ID NO: 1227590 - DNA, 15 bp, Homo sapiens
gttgtatccggatgg

SEQ ID NO: 1227591 - DNA, 15 bp, Homo sapiens
agttgtatccggatg

SEQ ID NO: 1227592 - DNA, 15 bp, Homo sapiens
gagttgtatccggat

SEQ ID NO: 1227593 - DNA, 15 bp, Homo sapiens
agagttgtatccgga

SEQ ID NO: 1227594 - DNA, 15 bp, Homo sapiens
gagagttgtatccgg

SEQ ID NO: 1227595 - DNA, 15 bp, Homo sapiens
tgagagttgtatccg

SEQ ID NO: 1227596 - DNA, 15 bp, Homo sapiens
aatccagagaatgag

SEQ ID NO: 1227597 - DNA, 15 bp, Homo sapiens
caatccagagaatga

SEQ ID NO: 1227598 - DNA, 15 bp, Homo sapiens
tcaatccagagaatg

SEQ ID NO: 1227599 - DNA, 15 bp, Homo sapiens
atcaatccagagaat

SEQ ID NO: 1227600 - DNA, 15 bp, Homo sapiens
gatcaatccagagaa

SEQ ID NO: 1227601 - DNA, 15 bp, Homo sapiens
agatcaatccagaga

SEQ ID NO: 1227602 - DNA, 15 bp, Homo sapiens
gagatcaatccagag

SEQ ID NO: 1227603 - DNA, 15 bp, Homo sapiens
agagatcaatccaga

SEQ ID NO: 1227604 - DNA, 15 bp, Homo sapiens
gagagatcaatccag

SEQ ID NO: 1227605 - DNA, 15 bp, Homo sapiens
tgagagatcaatcca

SEQ ID NO: 1227606 - DNA, 15 bp, Homo sapiens
gtgagagatcaatcc

SEQ ID NO: 1227607 - DNA, 15 bp, Homo sapiens
agtgagagatcaatc

SEQ ID NO: 1227608 - DNA, 15 bp, Homo sapiens
tagtgagagatcaat

SEQ ID NO: 1227609 - DNA, 15 bp, Homo sapiens
atagtgagagatcaa

SEQ ID NO: 1227610 - DNA, 15 bp, Homo sapiens
gatagtgagagatca

SEQ ID NO: 1227611 - DNA, 15 bp, Homo sapiens
cacagtgagaattct

SEQ ID NO: 1227612 - DNA, 15 bp, Homo sapiens
ccacagtgagaattc

SEQ ID NO: 1227613 - DNA, 15 bp, Homo sapiens
cccacagtgagaatt

SEQ ID NO: 1227614 - DNA, 15 bp, Homo sapiens
acccacagtgagaat

SEQ ID NO: 1227615 - DNA, 15 bp, Homo sapiens
tacccacagtgagaa

SEQ ID NO: 1227616 - DNA, 15 bp, Homo sapiens
ctacccacagtgaga

SEQ ID NO: 1227617 - DNA, 15 bp, Homo sapiens
tctacccacagtgag

SEQ ID NO: 1227618 - DNA, 15 bp, Homo sapiens
ttctacccacagtga

SEQ ID NO: 1227619 - DNA, 15 bp, Homo sapiens
attctacccacagtg

SEQ ID NO: 1227620 - DNA, 15 bp, Homo sapiens
aattctacccacagt

SEQ ID NO: 1227621 - DNA, 15 bp, Homo sapiens
gaattctacccacag

SEQ ID NO: 1227622 - DNA, 15 bp, Homo sapiens
agaattctacccaca

SEQ ID NO: 1227623 - DNA, 15 bp, Homo sapiens
gagaattctacccac

SEQ ID NO: 1227624 - DNA, 15 bp, Homo sapiens
tgatagtgagaattc

SEQ ID NO: 1227625 - DNA, 15 bp, Homo sapiens
atgatagtgagaatt

SEQ ID NO: 1227626 - DNA, 15 bp, Homo sapiens
aatgatagtgagaat

SEQ ID NO: 1227627 - DNA, 15 bp, Homo sapiens
gaatgatagtgagaa

SEQ ID NO: 1227628 - DNA, 15 bp, Homo sapiens
agaatgatagtgaga

SEQ ID NO: 1227629 - DNA, 15 bp, Homo sapiens
cagaatgatagtgag

SEQ ID NO: 1227630 - DNA, 15 bp, Homo sapiens
ccagaatgatagtga

SEQ ID NO: 1227631 - DNA, 15 bp, Homo sapiens
tccagaatgatagtg

SEQ ID NO: 1227632 - DNA, 15 bp, Homo sapiens
gtccagaatgatagt

SEQ ID NO: 1227633 - DNA, 15 bp, Homo sapiens
tgtccagaatgatag

SEQ ID NO: 1227634 - DNA, 15 bp, Homo sapiens
atgtccagaatgata

SEQ ID NO: 1227635 - DNA, 15 bp, Homo sapiens
tatgtccagaatgat

SEQ ID NO: 1227636 - DNA, 15 bp, Homo sapiens
ttatgtccagaatga

SEQ ID NO: 1227637 - DNA, 15 bp, Homo sapiens
attatgtccagaatg

SEQ ID NO: 1227638 - DNA, 15 bp, Homo sapiens
aattatgtccagaat

SEQ ID NO: 1227639 - DNA, 15 bp, Homo sapiens
gaattatgtccagaa

SEQ ID NO: 1227640 - DNA, 15 bp, Homo sapiens
agaattatgtccaga

SEQ ID NO: 1227641 - DNA, 15 bp, Homo sapiens
aagaattatgtccag

SEQ ID NO: 1227642 - DNA, 15 bp, Homo sapiens
taagaattatgtcca

SEQ ID NO: 1227643 - DNA, 15 bp, Homo sapiens
gtaagaattatgtcc

SEQ ID NO: 1227644 - DNA, 15 bp, Homo sapiens
ggtaagaattatgtc

SEQ ID NO: 1227645 - DNA, 15 bp, Homo sapiens
gggtaagaattatgt

SEQ ID NO: 1227646 - DNA, 15 bp, Homo sapiens
agggtaagaattatg

SEQ ID NO: 1227647 - DNA, 15 bp, Homo sapiens
gagggtaagaattat

SEQ ID NO: 1227648 - DNA, 15 bp, Homo sapiens
agagggtaagaatta

SEQ ID NO: 1227649 - DNA, 15 bp, Homo sapiens
cagagggtaagaatt

SEQ ID NO: 1227650 - DNA, 15 bp, Homo sapiens
ccagagggtaagaat

SEQ ID NO: 1227651 - DNA, 15 bp, Homo sapiens
cccagagggtaagaa

SEQ ID NO: 1227652 - DNA, 15 bp, Homo sapiens
acccagagggtaaga

SEQ ID NO: 1227653 - DNA, 15 bp, Homo sapiens
aacccagagggtaag

SEQ ID NO: 1227654 - DNA, 15 bp, Homo sapiens
caacccagagggtaa

SEQ ID NO: 1227655 - DNA, 15 bp, Homo sapiens
tcaacccagagggta

SEQ ID NO: 1227656 - DNA, 15 bp, Homo sapiens
ttcaacccagagggt

SEQ ID NO: 1227657 - DNA, 15 bp, Homo sapiens
gttcaacccagaggg

SEQ ID NO: 1227658 - DNA, 15 bp, Homo sapiens
agttcaacccagagg

SEQ ID NO: 1227659 - DNA, 15 bp, Homo sapiens
gagttcaacccagag

SEQ ID NO: 1227660 - DNA, 15 bp, Homo sapiens
agagttcaacccaga

SEQ ID NO: 1227661 - DNA, 15 bp, Homo sapiens
gagagttcaacccag

SEQ ID NO: 1227662 - DNA, 15 bp, Homo sapiens
tgagagttcaaccca

SEQ ID NO: 1227663 - DNA, 15 bp, Homo sapiens
gtgagagttcaaccc

SEQ ID NO: 1227664 - DNA, 15 bp, Homo sapiens
agtgagagttcaacc

SEQ ID NO: 1227665 - DNA, 15 bp, Homo sapiens
tagtgagagttcaac

SEQ ID NO: 1227666 - DNA, 15 bp, Homo sapiens
atagtgagagttcaa

SEQ ID NO: 1227667 - DNA, 15 bp, Homo sapiens
gatagtgagagttca

SEQ ID NO: 1227668 - DNA, 15 bp, Homo sapiens
ccacatggtgagaat

SEQ ID NO: 1227669 - DNA, 15 bp, Homo sapiens
cccacatggtgagaa

SEQ ID NO: 1227670 - DNA, 15 bp, Homo sapiens
acccacatggtgaga

SEQ ID NO: 1227671 - DNA, 15 bp, Homo sapiens
cacccacatggtgag

SEQ ID NO: 1227672 - DNA, 15 bp, Homo sapiens
ccacccacatggtga

SEQ ID NO: 1227673 - DNA, 15 bp, Homo sapiens
tccacccacatggtg

SEQ ID NO: 1227674 - DNA, 15 bp, Homo sapiens
ttccacccacatggt

SEQ ID NO: 1227675 - DNA, 15 bp, Homo sapiens
gttccacccacatgg

SEQ ID NO: 1227676 - DNA, 15 bp, Homo sapiens
agttccacccacatg

SEQ ID NO: 1227677 - DNA, 15 bp, Homo sapiens
gagttccacccacat

SEQ ID NO: 1227678 - DNA, 15 bp, Homo sapiens
agagttccacccaca

SEQ ID NO: 1227679 - DNA, 15 bp, Homo sapiens
gagagttccacccac

SEQ ID NO: 1227680 - DNA, 15 bp, Homo sapiens
actatccagatagat

SEQ ID NO: 1227681 - DNA, 15 bp, Homo sapiens
tactatccagataga

SEQ ID NO: 1227682 - DNA, 15 bp, Homo sapiens
atactatccagatag

SEQ ID NO: 1227683 - DNA, 15 bp, Homo sapiens
aatactatccagata

SEQ ID NO: 1227684 - DNA, 15 bp, Homo sapiens
gaatactatccagat

SEQ ID NO: 1227685 - DNA, 15 bp, Homo sapiens
agaatactatccaga

SEQ ID NO: 1227686 - DNA, 15 bp, Homo sapiens
gagaatactatccag

SEQ ID NO: 1227687 - DNA, 15 bp, Homo sapiens
cgagaatactatcca

SEQ ID NO: 1227688 - DNA, 15 bp, Homo sapiens
gcgagaatactatcc

SEQ ID NO: 1227689 - DNA, 15 bp, Homo sapiens
agcgagaatactatc

SEQ ID NO: 1227690 - DNA, 15 bp, Homo sapiens
gagcgagaatactat

SEQ ID NO: 1227691 - DNA, 15 bp, Homo sapiens
agagcgagaatacta

SEQ ID NO: 1227692 - DNA, 15 bp, Homo sapiens
gagagcgagaatact

SEQ ID NO: 1227693 - DNA, 15 bp, Homo sapiens
agagagcgagaatac

SEQ ID NO: 1227694 - DNA, 15 bp, Homo sapiens
cagagagcgagaata

SEQ ID NO: 1227695 - DNA, 15 bp, Homo sapiens
ccagagagcgagaat

SEQ ID NO: 1227696 - DNA, 15 bp, Homo sapiens
tccagagagcgagaa

SEQ ID NO: 1227697 - DNA, 15 bp, Homo sapiens
ttccagagagcgaga

SEQ ID NO: 1227698 - DNA, 15 bp, Homo sapiens
tttccagagagcgag

SEQ ID NO: 1227699 - DNA, 15 bp, Homo sapiens
ctttccagagagcga

SEQ ID NO: 1227700 - DNA, 15 bp, Homo sapiens
tctttccagagagcg

SEQ ID NO: 1227701 - DNA, 15 bp, Homo sapiens
ttctttccagagagc

SEQ ID NO: 1227702 - DNA, 15 bp, Homo sapiens
gttctttccagagag

SEQ ID NO: 1227703 - DNA, 15 bp, Homo sapiens
agttctttccagaga

SEQ ID NO: 1227704 - DNA, 15 bp, Homo sapiens
gagttctttccagag

SEQ ID NO: 1227705 - DNA, 15 bp, Homo sapiens
agagttctttccaga

SEQ ID NO: 1227706 - DNA, 15 bp, Homo sapiens
gtgagagttctttcc

SEQ ID NO: 1227707 - DNA, 15 bp, Homo sapiens
agtgagagttctttc

SEQ ID NO: 1227708 - DNA, 15 bp, Homo sapiens
tagtgagagttcttt

SEQ ID NO: 1227709 - DNA, 15 bp, Homo sapiens
atagtgagagttctt

SEQ ID NO: 1227710 - DNA, 15 bp, Homo sapiens
gggtaagaattctat

SEQ ID NO: 1227711 - DNA, 15 bp, Homo sapiens
agggtaagaattcta

SEQ ID NO: 1227712 - DNA, 15 bp, Homo sapiens
gagggtaagaattct

SEQ ID NO: 1227713 - DNA, 15 bp, Homo sapiens
agagggtaagaattc

SEQ ID NO: 1227714 - DNA, 15 bp, Homo sapiens
tccagagggtaagaa

SEQ ID NO: 1227715 - DNA, 15 bp, Homo sapiens
atccagagggtaaga

SEQ ID NO: 1227716 - DNA, 15 bp, Homo sapiens
tatccagagggtaag

SEQ ID NO: 1227717 - DNA, 15 bp, Homo sapiens
ctatccagagggtaa

SEQ ID NO: 1227718 - DNA, 15 bp, Homo sapiens
tctatccagagggta

SEQ ID NO: 1227719 - DNA, 15 bp, Homo sapiens
gttctatccagatgt

SEQ ID NO: 1227720 - DNA, 15 bp, Homo sapiens
cagtaagagttctat

SEQ ID NO: 1227721 - DNA, 15 bp, Homo sapiens
agacagtaagagttc

SEQ ID NO: 1227722 - DNA, 15 bp, Homo sapiens
tagacagtaagagtt

SEQ ID NO: 1227723 - DNA, 15 bp, Homo sapiens
atagacagtaagagt

SEQ ID NO: 1227724 - DNA, 15 bp, Homo sapiens
tcagatagacagtaa

SEQ ID NO: 1227725 - DNA, 15 bp, Homo sapiens
ttcagatagacagta

SEQ ID NO: 1227726 - DNA, 15 bp, Homo sapiens
attcagatagacagt

SEQ ID NO: 1227727 - DNA, 15 bp, Homo sapiens
tattcagatagacag

SEQ ID NO: 1227728 - DNA, 15 bp, Homo sapiens
ctattcagatagaca

SEQ ID NO: 1227729 - DNA, 15 bp, Homo sapiens
tctattcagatagac

SEQ ID NO: 1227730 - DNA, 15 bp, Homo sapiens
atctattcagataga

SEQ ID NO: 1227731 - DNA, 15 bp, Homo sapiens
aatctattcagatag

SEQ ID NO: 1227732 - DNA, 15 bp, Homo sapiens
aaatctattcagata

SEQ ID NO: 1227733 - DNA, 15 bp, Homo sapiens
gaaatctattcagat

SEQ ID NO: 1227734 - DNA, 15 bp, Homo sapiens
agaaatctattcaga

SEQ ID NO: 1227735 - DNA, 15 bp, Homo sapiens
gagaaatctattcag

SEQ ID NO: 1227736 - DNA, 15 bp, Homo sapiens
tgagaaatctattca

SEQ ID NO: 1227737 - DNA, 15 bp, Homo sapiens
gtgagaaatctattc

SEQ ID NO: 1227738 - DNA, 15 bp, Homo sapiens
agtgagaaatctatt

SEQ ID NO: 1227739 - DNA, 15 bp, Homo sapiens
gagtgagaaatctat

SEQ ID NO: 1227740 - DNA, 15 bp, Homo sapiens
agagtgagaaatcta

SEQ ID NO: 1227741 - DNA, 15 bp, Homo sapiens
gagagtgagaaatct

SEQ ID NO: 1227742 - DNA, 15 bp, Homo sapiens
agagagtgagaaatc

SEQ ID NO: 1227743 - DNA, 15 bp, Homo sapiens
cagagagtgagaaat

SEQ ID NO: 1227744 - DNA, 15 bp, Homo sapiens
ccagagagtgagaaa

SEQ ID NO: 1227745 - DNA, 15 bp, Homo sapiens
catccaaagagtgag

SEQ ID NO: 1227746 - DNA, 15 bp, Homo sapiens
tcatccaaagagtga

SEQ ID NO: 1227747 - DNA, 15 bp, Homo sapiens
ttcatccaaagagtg

SEQ ID NO: 1227748 - DNA, 15 bp, Homo sapiens
tttcatccaaagagt

SEQ ID NO: 1227749 - DNA, 15 bp, Homo sapiens
gtttcatccaaagag

SEQ ID NO: 1227750 - DNA, 15 bp, Homo sapiens
agtttcatccaaaga

SEQ ID NO: 1227751 - DNA, 15 bp, Homo sapiens
gagtttcatccaaag

SEQ ID NO: 1227752 - DNA, 15 bp, Homo sapiens
agagtttcatccaaa

SEQ ID NO: 1227753 - DNA, 15 bp, Homo sapiens
gagagtttcatccaa

SEQ ID NO: 1227754 - DNA, 15 bp, Homo sapiens
tgagagtttcatcca

SEQ ID NO: 1227755 - DNA, 15 bp, Homo sapiens
ctgagagtttcatcc

SEQ ID NO: 1227756 - DNA, 15 bp, Homo sapiens
actgagagtttcatc

SEQ ID NO: 1227757 - DNA, 15 bp, Homo sapiens
tactgagagtttcat

SEQ ID NO: 1227758 - DNA, 15 bp, Homo sapiens
atactgagagtttca

SEQ ID NO: 1227759 - DNA, 15 bp, Homo sapiens
gatactgagagtttc

SEQ ID NO: 1227760 - DNA, 15 bp, Homo sapiens
agatactgagagttt

SEQ ID NO: 1227761 - DNA, 15 bp, Homo sapiens
gacagatactgagag

SEQ ID NO: 1227762 - DNA, 15 bp, Homo sapiens
agacagatactgaga

SEQ ID NO: 1227763 - DNA, 15 bp, Homo sapiens
cagacagatactgag

SEQ ID NO: 1227764 - DNA, 15 bp, Homo sapiens
ccagacagatactga

SEQ ID NO: 1227765 - DNA, 15 bp, Homo sapiens
tccagacagatactg

SEQ ID NO: 1227766 - DNA, 15 bp, Homo sapiens
atccagacagatact

SEQ ID NO: 1227767 - DNA, 15 bp, Homo sapiens
tatccagacagatac

SEQ ID NO: 1227768 - DNA, 15 bp, Homo sapiens
aaaagatagtgagag

SEQ ID NO: 1227769 - DNA, 15 bp, Homo sapiens
aaaaagatagtgaga

SEQ ID NO: 1227770 - DNA, 15 bp, Homo sapiens
caaaaagatagtgag

SEQ ID NO: 1227771 - DNA, 15 bp, Homo sapiens
ccaaaaagatagtga

SEQ ID NO: 1227772 - DNA, 15 bp, Homo sapiens
accaaaaagatagtg

SEQ ID NO: 1227773 - DNA, 15 bp, Homo sapiens
aaccaaaaagatagt

SEQ ID NO: 1227774 - DNA, 15 bp, Homo sapiens
taaccaaaaagatag

SEQ ID NO: 1227775 - DNA, 15 bp, Homo sapiens
ctaaccaaaaagata

SEQ ID NO: 1227776 - DNA, 15 bp, Homo sapiens
tctaaccaaaaagat

SEQ ID NO: 1227777 - DNA, 15 bp, Homo sapiens
ttctaaccaaaaaga

SEQ ID NO: 1227778 - DNA, 15 bp, Homo sapiens
gttctaaccaaaaag

SEQ ID NO: 1227779 - DNA, 15 bp, Homo sapiens
agttctaaccaaaaa

SEQ ID NO: 1227780 - DNA, 15 bp, Homo sapiens
cagttctaaccaaaa

SEQ ID NO: 1227781 - DNA, 15 bp, Homo sapiens
acagttctaaccaaa

SEQ ID NO: 1227782 - DNA, 15 bp, Homo sapiens
gacagttctaaccaa

SEQ ID NO: 1227783 - DNA, 15 bp, Homo sapiens
tgacagttctaacca

SEQ ID NO: 1227784 - DNA, 15 bp, Homo sapiens
gtgacagttctaacc

SEQ ID NO: 1227785 - DNA, 15 bp, Homo sapiens
ggtgacagttctaac

SEQ ID NO: 1227786 - DNA, 15 bp, Homo sapiens
gggtgacagttctaa

SEQ ID NO: 1227787 - DNA, 15 bp, Homo sapiens
cagggtgacagttct

SEQ ID NO: 1227788 - DNA, 15 bp, Homo sapiens
acagggtgacagttc

SEQ ID NO: 1227789 - DNA, 15 bp, Homo sapiens
cacagggtgacagtt

SEQ ID NO: 1227790 - DNA, 15 bp, Homo sapiens
ccacagggtgacagt

SEQ ID NO: 1227791 - DNA, 15 bp, Homo sapiens
tccacagggtgacag

SEQ ID NO: 1227792 - DNA, 15 bp, Homo sapiens
atccacagggtgaca

SEQ ID NO: 1227793 - DNA, 15 bp, Homo sapiens
tatccacagggtgac

SEQ ID NO: 1227794 - DNA, 15 bp, Homo sapiens
ctatccacagggtga

SEQ ID NO: 1227795 - DNA, 15 bp, Homo sapiens
tctatccacagggtg

SEQ ID NO: 1227796 - DNA, 15 bp, Homo sapiens
ttctatccacagggt

SEQ ID NO: 1227797 - DNA, 15 bp, Homo sapiens
tttctatccacaggg

SEQ ID NO: 1227798 - DNA, 15 bp, Homo sapiens
atttctatccacagg

SEQ ID NO: 1227799 - DNA, 15 bp, Homo sapiens
aatttctatccacag

SEQ ID NO: 1227800 - DNA, 15 bp, Homo sapiens
aaatttctatccaca

SEQ ID NO: 1227801 - DNA, 15 bp, Homo sapiens
gaaatttctatccac

SEQ ID NO: 1227802 - DNA, 15 bp, Homo sapiens
agaaatttctatcca

SEQ ID NO: 1227803 - DNA, 15 bp, Homo sapiens
gagaaatttctatcc

SEQ ID NO: 1227804 - DNA, 15 bp, Homo sapiens
agagaaatttctatc

SEQ ID NO: 1227805 - DNA, 15 bp, Homo sapiens
tagagaaatttctat

SEQ ID NO: 1227806 - DNA, 15 bp, Homo sapiens
atagagaaatttcta

SEQ ID NO: 1227807 - DNA, 15 bp, Homo sapiens
gatagagaaatttct

SEQ ID NO: 1227808 - DNA, 15 bp, Homo sapiens
agatagagaaatttc

SEQ ID NO: 1227809 - DNA, 15 bp, Homo sapiens
tagatagagaaattt

SEQ ID NO: 1227810 - DNA, 15 bp, Homo sapiens
atagatagagaaatt

SEQ ID NO: 1227811 - DNA, 15 bp, Homo sapiens
gatagatagagaaat

SEQ ID NO: 1227812 - DNA, 15 bp, Homo sapiens
agatagatagagaaa

SEQ ID NO: 1227813 - DNA, 15 bp, Homo sapiens
cagatagatagagaa

SEQ ID NO: 1227814 - DNA, 15 bp, Homo sapiens
gagggagaattctat

SEQ ID NO: 1227815 - DNA, 15 bp, Homo sapiens
agagggagaattcta

SEQ ID NO: 1227816 - DNA, 15 bp, Homo sapiens
gagagggagaattct

SEQ ID NO: 1227817 - DNA, 15 bp, Homo sapiens
agagagggagaattc

SEQ ID NO: 1227818 - DNA, 15 bp, Homo sapiens
cagagagggagaatt

SEQ ID NO: 1227819 - DNA, 15 bp, Homo sapiens
ccagagagggagaat

SEQ ID NO: 1227820 - DNA, 15 bp, Homo sapiens
tccagagagggagaa

SEQ ID NO: 1227821 - DNA, 15 bp, Homo sapiens
atccagagagggaga

SEQ ID NO: 1227822 - DNA, 15 bp, Homo sapiens
tatccagagagggag

SEQ ID NO: 1227823 - DNA, 15 bp, Homo sapiens
ctatccagagaggga

SEQ ID NO: 1227824 - DNA, 15 bp, Homo sapiens
tctatccagagaggg

SEQ ID NO: 1227825 - DNA, 15 bp, Homo sapiens
ttctatccagagagg

SEQ ID NO: 1227826 - DNA, 15 bp, Homo sapiens
cttctatccagagag

SEQ ID NO: 1227827 - DNA, 15 bp, Homo sapiens
cttctatccagatgg

SEQ ID NO: 1227828 - DNA, 15 bp, Homo sapiens
acttctatccagatg

SEQ ID NO: 1227829 - DNA, 15 bp, Homo sapiens
cacttctatccagat

SEQ ID NO: 1227830 - DNA, 15 bp, Homo sapiens
acacttctatccaga

SEQ ID NO: 1227831 - DNA, 15 bp, Homo sapiens
gacacttctatccag

SEQ ID NO: 1227832 - DNA, 15 bp, Homo sapiens
tgacacttctatcca

SEQ ID NO: 1227833 - DNA, 15 bp, Homo sapiens
gtgacacttctatcc

SEQ ID NO: 1227834 - DNA, 15 bp, Homo sapiens
agtgacacttctatc

SEQ ID NO: 1227835 - DNA, 15 bp, Homo sapiens
tagtgacacttctat

SEQ ID NO: 1227836 - DNA, 15 bp, Homo sapiens
atagtgacacttcta

SEQ ID NO: 1227837 - DNA, 15 bp, Homo sapiens
gatagtgacacttct

SEQ ID NO: 1227838 - DNA, 15 bp, Homo sapiens
agatagtgacacttc

SEQ ID NO: 1227839 - DNA, 15 bp, Homo sapiens
cagatagtgacactt

SEQ ID NO: 1227840 - DNA, 15 bp, Homo sapiens
acagatagtgacact

SEQ ID NO: 1227841 - DNA, 15 bp, Homo sapiens
gacagatagtgacac

SEQ ID NO: 1227842 - DNA, 15 bp, Homo sapiens
ctccagatggtaaga

SEQ ID NO: 1227843 - DNA, 15 bp, Homo sapiens
tctccagatggtaag

SEQ ID NO: 1227844 - DNA, 15 bp, Homo sapiens
ctctccagatggtaa

SEQ ID NO: 1227845 - DNA, 15 bp, Homo sapiens
tctctccagatggta

SEQ ID NO: 1227846 - DNA, 15 bp, Homo sapiens
ttctctccagatggt

SEQ ID NO: 1227847 - DNA, 15 bp, Homo sapiens
gttctctccagatgg

SEQ ID NO: 1227848 - DNA, 15 bp, Homo sapiens
agttctctccagatg

SEQ ID NO: 1227849 - DNA, 15 bp, Homo sapiens
gagttctctccagat

SEQ ID NO: 1227850 - DNA, 15 bp, Homo sapiens
gccagatggtgagaa

SEQ ID NO: 1227851 - DNA, 15 bp, Homo sapiens
agccagatggtgaga

SEQ ID NO: 1227852 - DNA, 15 bp, Homo sapiens
tagccagatggtgag

SEQ ID NO: 1227853 - DNA, 15 bp, Homo sapiens
ctagccagatggtga

SEQ ID NO: 1227854 - DNA, 15 bp, Homo sapiens
tctagccagatggtg

SEQ ID NO: 1227855 - DNA, 15 bp, Homo sapiens
ttctagccagatggt

SEQ ID NO: 1227856 - DNA, 15 bp, Homo sapiens
gttctagccagatgg

SEQ ID NO: 1227857 - DNA, 15 bp, Homo sapiens
ggttctagccagatg

SEQ ID NO: 1227858 - DNA, 15 bp, Homo sapiens
gggttctagccagat

SEQ ID NO: 1227859 - DNA, 15 bp, Homo sapiens
agggttctagccaga

SEQ ID NO: 1227860 - DNA, 15 bp, Homo sapiens
gagggttctagccag

SEQ ID NO: 1227861 - DNA, 15 bp, Homo sapiens
tgagggttctagcca

SEQ ID NO: 1227862 - DNA, 15 bp, Homo sapiens
gtgagggttctagcc

SEQ ID NO: 1227863 - DNA, 15 bp, Homo sapiens
agtgagggttctagc

SEQ ID NO: 1227864 - DNA, 15 bp, Homo sapiens
tagtgagggttctag

SEQ ID NO: 1227865 - DNA, 15 bp, Homo sapiens
cagatagtgagggtt

SEQ ID NO: 1227866 - DNA, 15 bp, Homo sapiens
acagatagtgagggt

SEQ ID NO: 1227867 - DNA, 15 bp, Homo sapiens
gacagatagtgaggg

SEQ ID NO: 1227868 - DNA, 15 bp, Homo sapiens
agacagatagtgagg

SEQ ID NO: 1227869 - DNA, 15 bp, Homo sapiens
catccagacagatag

SEQ ID NO: 1227870 - DNA, 15 bp, Homo sapiens
ccatccagacagata

SEQ ID NO: 1227871 - DNA, 15 bp, Homo sapiens
tccatccagacagat

SEQ ID NO: 1227872 - DNA, 15 bp, Homo sapiens
ttccatccagacaga

SEQ ID NO: 1227873 - DNA, 15 bp, Homo sapiens
gttccatccagacag

SEQ ID NO: 1227874 - DNA, 15 bp, Homo sapiens
agttccatccagaca

SEQ ID NO: 1227875 - DNA, 15 bp, Homo sapiens
gagttccatccagac

SEQ ID NO: 1227876 - DNA, 15 bp, Homo sapiens
catagatagtgagag

SEQ ID NO: 1227877 - DNA, 15 bp, Homo sapiens
acatagatagtgaga

SEQ ID NO: 1227878 - DNA, 15 bp, Homo sapiens
tacatagatagtgag

SEQ ID NO: 1227879 - DNA, 15 bp, Homo sapiens
ctacatagatagtga

SEQ ID NO: 1227880 - DNA, 15 bp, Homo sapiens
tctacatagatagtg

SEQ ID NO: 1227881 - DNA, 15 bp, Homo sapiens
gtctacatagatagt

SEQ ID NO: 1227882 - DNA, 15 bp, Homo sapiens
tgtctacatagatag

SEQ ID NO: 1227883 - DNA, 15 bp, Homo sapiens
ctgtctacatagata

SEQ ID NO: 1227884 - DNA, 15 bp, Homo sapiens
tctgtctacatagat

SEQ ID NO: 1227885 - DNA, 15 bp, Homo sapiens
ttctgtctacataga

SEQ ID NO: 1227886 - DNA, 15 bp, Homo sapiens
attctgtctacatag

SEQ ID NO: 1227887 - DNA, 15 bp, Homo sapiens
aattctgtctacata

SEQ ID NO: 1227888 - DNA, 15 bp, Homo sapiens
gaattctgtctacat

SEQ ID NO: 1227889 - DNA, 15 bp, Homo sapiens
agaattctgtctaca

SEQ ID NO: 1227890 - DNA, 15 bp, Homo sapiens
gagaattctgtctac

SEQ ID NO: 1227891 - DNA, 15 bp, Homo sapiens
tgagaattctgtcta

SEQ ID NO: 1227892 - DNA, 15 bp, Homo sapiens
gtgagaattctgtct

SEQ ID NO: 1227893 - DNA, 15 bp, Homo sapiens
aatccagatagcgag

SEQ ID NO: 1227894 - DNA, 15 bp, Homo sapiens
caatccagatagcga

SEQ ID NO: 1227895 - DNA, 15 bp, Homo sapiens
tcaatccagatagcg

SEQ ID NO: 1227896 - DNA, 15 bp, Homo sapiens
ttcaatccagatagc

SEQ ID NO: 1227897 - DNA, 15 bp, Homo sapiens
attcaatccagatag

SEQ ID NO: 1227898 - DNA, 15 bp, Homo sapiens
aattcaatccagata

SEQ ID NO: 1227899 - DNA, 15 bp, Homo sapiens
aaattcaatccagat

SEQ ID NO: 1227900 - DNA, 15 bp, Homo sapiens
aaaattcaatccaga

SEQ ID NO: 1227901 - DNA, 15 bp, Homo sapiens
gaaaattcaatccag

SEQ ID NO: 1227902 - DNA, 15 bp, Homo sapiens
tgaaaattcaatcca

SEQ ID NO: 1227903 - DNA, 15 bp, Homo sapiens
gtgaaaattcaatcc

SEQ ID NO: 1227904 - DNA, 15 bp, Homo sapiens
ggtgaaaattcaatc

SEQ ID NO: 1227905 - DNA, 15 bp, Homo sapiens
tggtgaaaattcaat

SEQ ID NO: 1227906 - DNA, 15 bp, Homo sapiens
atggtgaaaattcaa

SEQ ID NO: 1227907 - DNA, 15 bp, Homo sapiens
gatggtgaaaattca

SEQ ID NO: 1227908 - DNA, 15 bp, Homo sapiens
catccagatggtgaa

SEQ ID NO: 1227909 - DNA, 15 bp, Homo sapiens
ccatccagatggtga

SEQ ID NO: 1227910 - DNA, 15 bp, Homo sapiens
tccatccagatggtg

SEQ ID NO: 1227911 - DNA, 15 bp, Homo sapiens
ttccatccagatggt

SEQ ID NO: 1227912 - DNA, 15 bp, Homo sapiens
attccatccagatgg

SEQ ID NO: 1227913 - DNA, 15 bp, Homo sapiens
aattccatccagatg

SEQ ID NO: 1227914 - DNA, 15 bp, Homo sapiens
cagtgagaattccat

SEQ ID NO: 1227915 - DNA, 15 bp, Homo sapiens
acagtgagaattcca

SEQ ID NO: 1227916 - DNA, 15 bp, Homo sapiens
gacagtgagaattcc

SEQ ID NO: 1227917 - DNA, 15 bp, Homo sapiens
cgacagtgagaattc

SEQ ID NO: 1227918 - DNA, 15 bp, Homo sapiens
tcgacagtgagaatt

SEQ ID NO: 1227919 - DNA, 15 bp, Homo sapiens
atcgacagtgagaat

SEQ ID NO: 1227920 - DNA, 15 bp, Homo sapiens
gatcgacagtgagaa

SEQ ID NO: 1227921 - DNA, 15 bp, Homo sapiens
tgatcgacagtgaga

SEQ ID NO: 1227922 - DNA, 15 bp, Homo sapiens
gtgatcgacagtgag

SEQ ID NO: 1227923 - DNA, 15 bp, Homo sapiens
cgtgatcgacagtga

SEQ ID NO: 1227924 - DNA, 15 bp, Homo sapiens
acgtgatcgacagtg

SEQ ID NO: 1227925 - DNA, 15 bp, Homo sapiens
aacgtgatcgacagt

SEQ ID NO: 1227926 - DNA, 15 bp, Homo sapiens
caacgtgatcgacag

SEQ ID NO: 1227927 - DNA, 15 bp, Homo sapiens
ccaacgtgatcgaca

SEQ ID NO: 1227928 - DNA, 15 bp, Homo sapiens
tccaacgtgatcgac

SEQ ID NO: 1227929 - DNA, 15 bp, Homo sapiens
ttccaacgtgatcga

SEQ ID NO: 1227930 - DNA, 15 bp, Homo sapiens
attccaacgtgatcg

SEQ ID NO: 1227931 - DNA, 15 bp, Homo sapiens
aattccaacgtgatc

SEQ ID NO: 1227932 - DNA, 15 bp, Homo sapiens
gaattccaacgtgat

SEQ ID NO: 1227933 - DNA, 15 bp, Homo sapiens
agaattccaacgtga

SEQ ID NO: 1227934 - DNA, 15 bp, Homo sapiens
gagaattccaacgtg

SEQ ID NO: 1227935 - DNA, 15 bp, Homo sapiens
tgagaattccaacgt

SEQ ID NO: 1227936 - DNA, 15 bp, Homo sapiens
gtgagaattccaacg

SEQ ID NO: 1227937 - DNA, 15 bp, Homo sapiens
agtgagaattccaac

SEQ ID NO: 1227938 - DNA, 15 bp, Homo sapiens
gagtgagaattccaa

SEQ ID NO: 1227939 - DNA, 15 bp, Homo sapiens
cacagttctatccac

SEQ ID NO: 1227940 - DNA, 15 bp, Homo sapiens
tcacagttctatcca

SEQ ID NO: 1227941 - DNA, 15 bp, Homo sapiens
gtcacagttctatcc

SEQ ID NO: 1227942 - DNA, 15 bp, Homo sapiens
tgtcacagttctatc

SEQ ID NO: 1227943 - DNA, 15 bp, Homo sapiens
ttgtcacagttctat

SEQ ID NO: 1227944 - DNA, 15 bp, Homo sapiens
attgtcacagttcta

SEQ ID NO: 1227945 - DNA, 15 bp, Homo sapiens
gattgtcacagttct

SEQ ID NO: 1227946 - DNA, 15 bp, Homo sapiens
agattgtcacagttc

SEQ ID NO: 1227947 - DNA, 15 bp, Homo sapiens
tagattgtcacagtt

SEQ ID NO: 1227948 - DNA, 15 bp, Homo sapiens
atagattgtcacagt

SEQ ID NO: 1227949 - DNA, 15 bp, Homo sapiens
gatagattgtcacag

SEQ ID NO: 1227950 - DNA, 15 bp, Homo sapiens
agatagattgtcaca

SEQ ID NO: 1227951 - DNA, 15 bp, Homo sapiens
cagatagattgtcac

SEQ ID NO: 1227952 - DNA, 15 bp, Homo sapiens
ccagatagattgtca

SEQ ID NO: 1227953 - DNA, 15 bp, Homo sapiens
tccagatagattgtc

SEQ ID NO: 1227954 - DNA, 15 bp, Homo sapiens
atccagatagattgt

SEQ ID NO: 1227955 - DNA, 15 bp, Homo sapiens
tatccagatagattg

SEQ ID NO: 1227956 - DNA, 15 bp, Homo sapiens
ctatccagatagatt

SEQ ID NO: 1227957 - DNA, 15 bp, Homo sapiens
aagagtaagaattct

SEQ ID NO: 1227958 - DNA, 15 bp, Homo sapiens
caagagtaagaattc

SEQ ID NO: 1227959 - DNA, 15 bp, Homo sapiens
tcaagagtaagaatt

SEQ ID NO: 1227960 - DNA, 15 bp, Homo sapiens
atcaagagtaagaat

SEQ ID NO: 1227961 - DNA, 15 bp, Homo sapiens
tatcaagagtaagaa

SEQ ID NO: 1227962 - DNA, 15 bp, Homo sapiens
ctatcaagagtaaga

SEQ ID NO: 1227963 - DNA, 15 bp, Homo sapiens
tctatcaagagtaag

SEQ ID NO: 1227964 - DNA, 15 bp, Homo sapiens
ttctatcaagagtaa

SEQ ID NO: 1227965 - DNA, 15 bp, Homo sapiens
gttctatcaagagta

SEQ ID NO: 1227966 - DNA, 15 bp, Homo sapiens
agttctatcaagagt

SEQ ID NO: 1227967 - DNA, 15 bp, Homo sapiens
gagttctatcaagag

SEQ ID NO: 1227968 - DNA, 15 bp, Homo sapiens
tagagttctatcaag

SEQ ID NO: 1227969 - DNA, 15 bp, Homo sapiens
atagagttctatcaa

SEQ ID NO: 1227970 - DNA, 15 bp, Homo sapiens
aatagagttctatca

SEQ ID NO: 1227971 - DNA, 15 bp, Homo sapiens
cagacaaatagagtt

SEQ ID NO: 1227972 - DNA, 15 bp, Homo sapiens
gcagacaaatagagt

SEQ ID NO: 1227973 - DNA, 15 bp, Homo sapiens
tgcagacaaatagag

SEQ ID NO: 1227974 - DNA, 15 bp, Homo sapiens
atgcagacaaataga

SEQ ID NO: 1227975 - DNA, 15 bp, Homo sapiens
tatgcagacaaatag

SEQ ID NO: 1227976 - DNA, 15 bp, Homo sapiens
ctatgcagacaaata

SEQ ID NO: 1227977 - DNA, 15 bp, Homo sapiens
tctatgcagacaaat

SEQ ID NO: 1227978 - DNA, 15 bp, Homo sapiens
gtctatgcagacaaa

SEQ ID NO: 1227979 - DNA, 15 bp, Homo sapiens
agtctatgcagacaa

SEQ ID NO: 1227980 - DNA, 15 bp, Homo sapiens
aagtctatgcagaca

SEQ ID NO: 1227981 - DNA, 15 bp, Homo sapiens
gaagtctatgcagac

SEQ ID NO: 1227982 - DNA, 15 bp, Homo sapiens
agaagtctatgcaga

SEQ ID NO: 1227983 - DNA, 15 bp, Homo sapiens
gagaagtctatgcag

SEQ ID NO: 1227984 - DNA, 15 bp, Homo sapiens
tgagaagtctatgca

SEQ ID NO: 1227985 - DNA, 15 bp, Homo sapiens
gtgagaagtctatgc

SEQ ID NO: 1227986 - DNA, 15 bp, Homo sapiens
ggtgagaagtctatg

SEQ ID NO: 1227987 - DNA, 15 bp, Homo sapiens
tggtgagaagtctat

SEQ ID NO: 1227988 - DNA, 15 bp, Homo sapiens
atggtgagaagtcta

SEQ ID NO: 1227989 - DNA, 15 bp, Homo sapiens
gatggtgagaagtct

SEQ ID NO: 1227990 - DNA, 15 bp, Homo sapiens
agatggtgagaagtc

SEQ ID NO: 1227991 - DNA, 15 bp, Homo sapiens
cagatggtgagaagt

SEQ ID NO: 1227992 - DNA, 15 bp, Homo sapiens
ccagatggtgagaag

SEQ ID NO: 1227993 - DNA, 15 bp, Homo sapiens
gactgagagttctat

SEQ ID NO: 1227994 - DNA, 15 bp, Homo sapiens
agactgagagttcta

SEQ ID NO: 1227995 - DNA, 15 bp, Homo sapiens
gagactgagagttct

SEQ ID NO: 1227996 - DNA, 15 bp, Homo sapiens
agagactgagagttc

SEQ ID NO: 1227997 - DNA, 15 bp, Homo sapiens
cagagactgagagtt

SEQ ID NO: 1227998 - DNA, 15 bp, Homo sapiens
ccagagactgagagt

SEQ ID NO: 1227999 - DNA, 15 bp, Homo sapiens
tccagagactgagag

SEQ ID NO: 1228000 - DNA, 15 bp, Homo sapiens
atccagagactgaga

SEQ ID NO: 1228001 - DNA, 15 bp, Homo sapiens
tatccagagactgag

SEQ ID NO: 1228002 - DNA, 15 bp, Homo sapiens
ctatccagagactga

SEQ ID NO: 1228003 - DNA, 15 bp, Homo sapiens
tctatccagagactg

SEQ ID NO: 1228004 - DNA, 15 bp, Homo sapiens
catccagacagtgag

SEQ ID NO: 1228005 - DNA, 15 bp, Homo sapiens
ccatccagacagtga

SEQ ID NO: 1228006 - DNA, 15 bp, Homo sapiens
tccatccagacagtg

SEQ ID NO: 1228007 - DNA, 15 bp, Homo sapiens
ttccatccagacagt

SEQ ID NO: 1228008 - DNA, 15 bp, Homo sapiens
gtagtgagagttcca

SEQ ID NO: 1228009 - DNA, 15 bp, Homo sapiens
ggtagtgagagttcc

SEQ ID NO: 1228010 - DNA, 15 bp, Homo sapiens
gagacaggtagtgag

SEQ ID NO: 1228011 - DNA, 15 bp, Homo sapiens
cgagacaggtagtga

SEQ ID NO: 1228012 - DNA, 15 bp, Homo sapiens
tcgagacaggtagtg

SEQ ID NO: 1228013 - DNA, 15 bp, Homo sapiens
atcgagacaggtagt

SEQ ID NO: 1228014 - DNA, 15 bp, Homo sapiens
tatcgagacaggtag

SEQ ID NO: 1228015 - DNA, 15 bp, Homo sapiens
ctatcgagacaggta

SEQ ID NO: 1228016 - DNA, 15 bp, Homo sapiens
tctatcgagacaggt

SEQ ID NO: 1228017 - DNA, 15 bp, Homo sapiens
ttctatcgagacagg

SEQ ID NO: 1228018 - DNA, 15 bp, Homo sapiens
aattctatcgagaca

SEQ ID NO: 1228019 - DNA, 15 bp, Homo sapiens
gaattctatcgagac

SEQ ID NO: 1228020 - DNA, 15 bp, Homo sapiens
atatccagacagtga

SEQ ID NO: 1228021 - DNA, 15 bp, Homo sapiens
tatatccagacagtg

SEQ ID NO: 1228022 - DNA, 15 bp, Homo sapiens
ttatatccagacagt

SEQ ID NO: 1228023 - DNA, 15 bp, Homo sapiens
gattatatccagaca

SEQ ID NO: 1228024 - DNA, 15 bp, Homo sapiens
ggattatatccagac

SEQ ID NO: 1228025 - DNA, 15 bp, Homo sapiens
aggattatatccaga

SEQ ID NO: 1228026 - DNA, 15 bp, Homo sapiens
gaggattatatccag

SEQ ID NO: 1228027 - DNA, 15 bp, Homo sapiens
tgaggattatatcca

SEQ ID NO: 1228028 - DNA, 15 bp, Homo sapiens
gtgaggattatatcc

SEQ ID NO: 1228029 - DNA, 15 bp, Homo sapiens
agtgaggattatatc

SEQ ID NO: 1228030 - DNA, 15 bp, Homo sapiens
gagtgaggattatat

SEQ ID NO: 1228031 - DNA, 15 bp, Homo sapiens
agagtgaggattata

SEQ ID NO: 1228032 - DNA, 15 bp, Homo sapiens
gagagtgaggattat

SEQ ID NO: 1228033 - DNA, 15 bp, Homo sapiens
agagagtgaggatta

SEQ ID NO: 1228034 - DNA, 15 bp, Homo sapiens
cagagagtgaggatt

SEQ ID NO: 1228035 - DNA, 15 bp, Homo sapiens
ccagagagtgaggat

SEQ ID NO: 1228036 - DNA, 15 bp, Homo sapiens
tccagagagtgagga

SEQ ID NO: 1228037 - DNA, 15 bp, Homo sapiens
atccagagagtgagg

SEQ ID NO: 1228038 - DNA, 15 bp, Homo sapiens
gatagtgctagttct

SEQ ID NO: 1228039 - DNA, 15 bp, Homo sapiens
agatagtgctagttc

SEQ ID NO: 1228040 - DNA, 15 bp, Homo sapiens
cagatagtgctagtt

SEQ ID NO: 1228041 - DNA, 15 bp, Homo sapiens
ccagatagtgctagt

SEQ ID NO: 1228042 - DNA, 15 bp, Homo sapiens
cccagatagtgctag

SEQ ID NO: 1228043 - DNA, 15 bp, Homo sapiens
acccagatagtgcta

SEQ ID NO: 1228044 - DNA, 15 bp, Homo sapiens
tacccagatagtgct

SEQ ID NO: 1228045 - DNA, 15 bp, Homo sapiens
ctacccagatagtgc

SEQ ID NO: 1228046 - DNA, 15 bp, Homo sapiens
tgtgagaattctacc

SEQ ID NO: 1228047 - DNA, 15 bp, Homo sapiens
ttgtgagaattctac

SEQ ID NO: 1228048 - DNA, 15 bp, Homo sapiens
ttagaattctatcca

SEQ ID NO: 1228049 - DNA, 15 bp, Homo sapiens
gttagaattctatcc

SEQ ID NO: 1228050 - DNA, 15 bp, Homo sapiens
agttagaattctatc

SEQ ID NO: 1228051 - DNA, 15 bp, Homo sapiens
gagttagaattctat

SEQ ID NO: 1228052 - DNA, 15 bp, Homo sapiens
agagttagaattcta

SEQ ID NO: 1228053 - DNA, 15 bp, Homo sapiens
cagagttagaattct

SEQ ID NO: 1228054 - DNA, 15 bp, Homo sapiens
ccagagttagaattc

SEQ ID NO: 1228055 - DNA, 15 bp, Homo sapiens
tccagagttagaatt

SEQ ID NO: 1228056 - DNA, 15 bp, Homo sapiens
atccagagttagaat

SEQ ID NO: 1228057 - DNA, 15 bp, Homo sapiens
tatccagagttagaa

SEQ ID NO: 1228058 - DNA, 15 bp, Homo sapiens
ctatccagagttaga

SEQ ID NO: 1228059 - DNA, 15 bp, Homo sapiens
tctatccagagttag

SEQ ID NO: 1228060 - DNA, 15 bp, Homo sapiens
ttctatccagagtta

SEQ ID NO: 1228061 - DNA, 15 bp, Homo sapiens
gttctatccagagtt

SEQ ID NO: 1228062 - DNA, 15 bp, Homo sapiens
tgaattctttccata

SEQ ID NO: 1228063 - DNA, 15 bp, Homo sapiens
gtgaattctttccat

SEQ ID NO: 1228064 - DNA, 15 bp, Homo sapiens
agtgaattctttcca

SEQ ID NO: 1228065 - DNA, 15 bp, Homo sapiens
gagtgaattctttcc

SEQ ID NO: 1228066 - DNA, 15 bp, Homo sapiens
agagtgaattctttc

SEQ ID NO: 1228067 - DNA, 15 bp, Homo sapiens
gagagtgaattcttt

SEQ ID NO: 1228068 - DNA, 15 bp, Homo sapiens
agagagtgaattctt

SEQ ID NO: 1228069 - DNA, 15 bp, Homo sapiens
cagagagtgaattct

SEQ ID NO: 1228070 - DNA, 15 bp, Homo sapiens
ccagagagtgaattc

SEQ ID NO: 1228071 - DNA, 15 bp, Homo sapiens
tccagagagtgaatt

SEQ ID NO: 1228072 - DNA, 15 bp, Homo sapiens
atccagagagtgaat

SEQ ID NO: 1228073 - DNA, 15 bp, Homo sapiens
acacagtgagaattc

SEQ ID NO: 1228074 - DNA, 15 bp, Homo sapiens
tacacagtgagaatt

SEQ ID NO: 1228075 - DNA, 15 bp, Homo sapiens
atacacagtgagaat

SEQ ID NO: 1228076 - DNA, 15 bp, Homo sapiens
catacacagtgagaa

SEQ ID NO: 1228077 - DNA, 15 bp, Homo sapiens
acatacacagtgaga

SEQ ID NO: 1228078 - DNA, 15 bp, Homo sapiens
aacatacacagtgag

SEQ ID NO: 1228079 - DNA, 15 bp, Homo sapiens
caacatacacagtga

SEQ ID NO: 1228080 - DNA, 15 bp, Homo sapiens
tcaacatacacagtg

SEQ ID NO: 1228081 - DNA, 15 bp, Homo sapiens
atcaacatacacagt

SEQ ID NO: 1228082 - DNA, 15 bp, Homo sapiens
catcaacatacacag

SEQ ID NO: 1228083 - DNA, 15 bp, Homo sapiens
ccatcaacatacaca

SEQ ID NO: 1228084 - DNA, 15 bp, Homo sapiens
tccatcaacatacac

SEQ ID NO: 1228085 - DNA, 15 bp, Homo sapiens
ttccatcaacataca

SEQ ID NO: 1228086 - DNA, 15 bp, Homo sapiens
attccatcaacatac

SEQ ID NO: 1228087 - DNA, 15 bp, Homo sapiens
aattccatcaacata

SEQ ID NO: 1228088 - DNA, 15 bp, Homo sapiens
gaattccatcaacat

SEQ ID NO: 1228089 - DNA, 15 bp, Homo sapiens
agaattccatcaaca

SEQ ID NO: 1228090 - DNA, 15 bp, Homo sapiens
gagaattccatcaac

SEQ ID NO: 1228091 - DNA, 15 bp, Homo sapiens
tgagaattccatcaa

SEQ ID NO: 1228092 - DNA, 15 bp, Homo sapiens
ctgagaattccatca

SEQ ID NO: 1228093 - DNA, 15 bp, Homo sapiens
cctgagaattccatc

SEQ ID NO: 1228094 - DNA, 15 bp, Homo sapiens
gcctgagaattccat

SEQ ID NO: 1228095 - DNA, 15 bp, Homo sapiens
agcctgagaattcca

SEQ ID NO: 1228096 - DNA, 15 bp, Homo sapiens
cagcctgagaattcc

SEQ ID NO: 1228097 - DNA, 15 bp, Homo sapiens
acagcctgagaattc

SEQ ID NO: 1228098 - DNA, 15 bp, Homo sapiens
cacagcctgagaatt

SEQ ID NO: 1228099 - DNA, 15 bp, Homo sapiens
ccacagcctgagaat

SEQ ID NO: 1228100 - DNA, 15 bp, Homo sapiens
tccacagcctgagaa

SEQ ID NO: 1228101 - DNA, 15 bp, Homo sapiens
atccacagcctgaga

SEQ ID NO: 1228102 - DNA, 15 bp, Homo sapiens
tatccacagcctgag

SEQ ID NO: 1228103 - DNA, 15 bp, Homo sapiens
atatccacagcctga

SEQ ID NO: 1228104 - DNA, 15 bp, Homo sapiens
tatatccacagcctg

SEQ ID NO: 1228105 - DNA, 15 bp, Homo sapiens
ttatatccacagcct

SEQ ID NO: 1228106 - DNA, 15 bp, Homo sapiens
gttatatccacagcc

SEQ ID NO: 1228107 - DNA, 15 bp, Homo sapiens
agttatatccacagc

SEQ ID NO: 1228108 - DNA, 15 bp, Homo sapiens
gagttatatccacag

SEQ ID NO: 1228109 - DNA, 15 bp, Homo sapiens
agagttatatccaca

SEQ ID NO: 1228110 - DNA, 15 bp, Homo sapiens
gagagttatatccac

SEQ ID NO: 1228111 - DNA, 15 bp, Homo sapiens
aaaaattctatccag

SEQ ID NO: 1228112 - DNA, 15 bp, Homo sapiens
taaaaattctatcca

SEQ ID NO: 1228113 - DNA, 15 bp, Homo sapiens
gtaaaaattctatcc

SEQ ID NO: 1228114 - DNA, 15 bp, Homo sapiens
agtaaaaattctatc

SEQ ID NO: 1228115 - DNA, 15 bp, Homo sapiens
tagtaaaaattctat

SEQ ID NO: 1228116 - DNA, 15 bp, Homo sapiens
atagtaaaaattcta

SEQ ID NO: 1228117 - DNA, 15 bp, Homo sapiens
gatagtaaaaattct

SEQ ID NO: 1228118 - DNA, 15 bp, Homo sapiens
agatagtaaaaattc

SEQ ID NO: 1228119 - DNA, 15 bp, Homo sapiens
cagatagtaaaaatt

SEQ ID NO: 1228120 - DNA, 15 bp, Homo sapiens
ccagatagtaaaaat

SEQ ID NO: 1228121 - DNA, 15 bp, Homo sapiens
tccagatagtaaaaa

SEQ ID NO: 1228122 - DNA, 15 bp, Homo sapiens
atccagatagtaaaa

SEQ ID NO: 1228123 - DNA, 15 bp, Homo sapiens
tatccagatagtaaa

SEQ ID NO: 1228124 - DNA, 15 bp, Homo sapiens
cccagatagtgagaa

SEQ ID NO: 1228125 - DNA, 15 bp, Homo sapiens
cagagagtgagaata

SEQ ID NO: 1228126 - DNA, 15 bp, Homo sapiens
aagggtgagaattct

SEQ ID NO: 1228127 - DNA, 15 bp, Homo sapiens
aaagggtgagaattc

SEQ ID NO: 1228128 - DNA, 15 bp, Homo sapiens
caaagggtgagaatt

SEQ ID NO: 1228129 - DNA, 15 bp, Homo sapiens
ccaaagggtgagaat

SEQ ID NO: 1228130 - DNA, 15 bp, Homo sapiens
tccaaagggtgagaa

SEQ ID NO: 1228131 - DNA, 15 bp, Homo sapiens
atccaaagggtgaga

SEQ ID NO: 1228132 - DNA, 15 bp, Homo sapiens
tatccaaagggtgag

SEQ ID NO: 1228133 - DNA, 15 bp, Homo sapiens
ctatccaaagggtga

SEQ ID NO: 1228134 - DNA, 15 bp, Homo sapiens
tctatccaaagggtg

SEQ ID NO: 1228135 - DNA, 15 bp, Homo sapiens
ttctatccaaagggt

SEQ ID NO: 1228136 - DNA, 15 bp, Homo sapiens
gttctatccaaaggg

SEQ ID NO: 1228137 - DNA, 15 bp, Homo sapiens
agttctatccaaagg

SEQ ID NO: 1228138 - DNA, 15 bp, Homo sapiens
cccagacagatagtg

SEQ ID NO: 1228139 - DNA, 15 bp, Homo sapiens
acccagacagatagt

SEQ ID NO: 1228140 - DNA, 15 bp, Homo sapiens
tacccagacagatag

SEQ ID NO: 1228141 - DNA, 15 bp, Homo sapiens
ctacccagacagata

SEQ ID NO: 1228142 - DNA, 15 bp, Homo sapiens
cgaattctacccaga

SEQ ID NO: 1228143 - DNA, 15 bp, Homo sapiens
gcgaattctacccag

SEQ ID NO: 1228144 - DNA, 15 bp, Homo sapiens
agcgaattctaccca

SEQ ID NO: 1228145 - DNA, 15 bp, Homo sapiens
gagcgaattctaccc

SEQ ID NO: 1228146 - DNA, 15 bp, Homo sapiens
ggagcgaattctacc

SEQ ID NO: 1228147 - DNA, 15 bp, Homo sapiens
cggagcgaattctac

SEQ ID NO: 1228148 - DNA, 15 bp, Homo sapiens
acggagcgaattcta

SEQ ID NO: 1228149 - DNA, 15 bp, Homo sapiens
gacggagcgaattct

SEQ ID NO: 1228150 - DNA, 15 bp, Homo sapiens
cgacggagcgaattc

SEQ ID NO: 1228151 - DNA, 15 bp, Homo sapiens
acgacggagcgaatt

SEQ ID NO: 1228152 - DNA, 15 bp, Homo sapiens
tacgacggagcgaat

SEQ ID NO: 1228153 - DNA, 15 bp, Homo sapiens
ttacgacggagcgaa

SEQ ID NO: 1228154 - DNA, 15 bp, Homo sapiens
attacgacggagcga

SEQ ID NO: 1228155 - DNA, 15 bp, Homo sapiens
tattacgacggagcg

SEQ ID NO: 1228156 - DNA, 15 bp, Homo sapiens
ctattacgacggagc

SEQ ID NO: 1228157 - DNA, 15 bp, Homo sapiens
tctattacgacggag

SEQ ID NO: 1228158 - DNA, 15 bp, Homo sapiens
ttctattacgacgga

SEQ ID NO: 1228159 - DNA, 15 bp, Homo sapiens
gttctattacgacgg

SEQ ID NO: 1228160 - DNA, 15 bp, Homo sapiens
agttctattacgacg

SEQ ID NO: 1228161 - DNA, 15 bp, Homo sapiens
gagttctattacgac

SEQ ID NO: 1228162 - DNA, 15 bp, Homo sapiens
agagttctattacga

SEQ ID NO: 1228163 - DNA, 15 bp, Homo sapiens
gagagttctattacg

SEQ ID NO: 1228164 - DNA, 15 bp, Homo sapiens
tgagagttctattac

SEQ ID NO: 1228165 - DNA, 15 bp, Homo sapiens
gtgagagttctatta

SEQ ID NO: 1228166 - DNA, 15 bp, Homo sapiens
cacagatagtgagag

SEQ ID NO: 1228167 - DNA, 15 bp, Homo sapiens
acacagatagtgaga

SEQ ID NO: 1228168 - DNA, 15 bp, Homo sapiens
cacacagatagtgag

SEQ ID NO: 1228169 - DNA, 15 bp, Homo sapiens
ccacacagatagtga

SEQ ID NO: 1228170 - DNA, 15 bp, Homo sapiens
tccacacagatagtg

SEQ ID NO: 1228171 - DNA, 15 bp, Homo sapiens
atccacacagatagt

SEQ ID NO: 1228172 - DNA, 15 bp, Homo sapiens
tatccacacagatag

SEQ ID NO: 1228173 - DNA, 15 bp, Homo sapiens
ctatccacacagata

SEQ ID NO: 1228174 - DNA, 15 bp, Homo sapiens
tctatccacacagat

SEQ ID NO: 1228175 - DNA, 15 bp, Homo sapiens
ttctatccacacaga

SEQ ID NO: 1228176 - DNA, 15 bp, Homo sapiens
attctatccacacag

SEQ ID NO: 1228177 - DNA, 15 bp, Homo sapiens
aattctatccacaca

SEQ ID NO: 1228178 - DNA, 15 bp, Homo sapiens
gaattctatccacac

SEQ ID NO: 1228179 - DNA, 15 bp, Homo sapiens
cccatatagtgagag

SEQ ID NO: 1228180 - DNA, 15 bp, Homo sapiens
acccatatagtgaga

SEQ ID NO: 1228181 - DNA, 15 bp, Homo sapiens
tacccatatagtgag

SEQ ID NO: 1228182 - DNA, 15 bp, Homo sapiens
ctacccatatagtga

SEQ ID NO: 1228183 - DNA, 15 bp, Homo sapiens
tctacccatatagtg

SEQ ID NO: 1228184 - DNA, 15 bp, Homo sapiens
ttctacccatatagt

SEQ ID NO: 1228185 - DNA, 15 bp, Homo sapiens
attctacccatatag

SEQ ID NO: 1228186 - DNA, 15 bp, Homo sapiens
aattctacccatata

SEQ ID NO: 1228187 - DNA, 15 bp, Homo sapiens
gaattctacccatat

SEQ ID NO: 1228188 - DNA, 15 bp, Homo sapiens
agaattctacccata

SEQ ID NO: 1228189 - DNA, 15 bp, Homo sapiens
cagaattctacccat

SEQ ID NO: 1228190 - DNA, 15 bp, Homo sapiens
tcagaattctaccca

SEQ ID NO: 1228191 - DNA, 15 bp, Homo sapiens
gtcagaattctaccc

SEQ ID NO: 1228192 - DNA, 15 bp, Homo sapiens
agtcagaattctacc

SEQ ID NO: 1228193 - DNA, 15 bp, Homo sapiens
gagtcagaattctac

SEQ ID NO: 1228194 - DNA, 15 bp, Homo sapiens
agagtcagaattcta

SEQ ID NO: 1228195 - DNA, 15 bp, Homo sapiens
gagagtcagaattct

SEQ ID NO: 1228196 - DNA, 15 bp, Homo sapiens
agagagtcagaattc

SEQ ID NO: 1228197 - DNA, 15 bp, Homo sapiens
cagagagtcagaatt

SEQ ID NO: 1228198 - DNA, 15 bp, Homo sapiens
ccagagagtcagaat

SEQ ID NO: 1228199 - DNA, 15 bp, Homo sapiens
tccagagagtcagaa

SEQ ID NO: 1228200 - DNA, 15 bp, Homo sapiens
atccagagagtcaga

SEQ ID NO: 1228201 - DNA, 15 bp, Homo sapiens
gatccagagagtcag

SEQ ID NO: 1228202 - DNA, 15 bp, Homo sapiens
cgatccagagagtca

SEQ ID NO: 1228203 - DNA, 15 bp, Homo sapiens
tcgatccagagagtc

SEQ ID NO: 1228204 - DNA, 15 bp, Homo sapiens
ttcgatccagagagt

SEQ ID NO: 1228205 - DNA, 15 bp, Homo sapiens
gttcgatccagagag

SEQ ID NO: 1228206 - DNA, 15 bp, Homo sapiens
agttcgatccagaga

SEQ ID NO: 1228207 - DNA, 15 bp, Homo sapiens
gagttcgatccagag

SEQ ID NO: 1228208 - DNA, 15 bp, Homo sapiens
agagttcgatccaga

SEQ ID NO: 1228209 - DNA, 15 bp, Homo sapiens
gagagttcgatccag

SEQ ID NO: 1228210 - DNA, 15 bp, Homo sapiens
tgagagttcgatcca

SEQ ID NO: 1228211 - DNA, 15 bp, Homo sapiens
gtgagagttcgatcc

SEQ ID NO: 1228212 - DNA, 15 bp, Homo sapiens
agtgagagttcgatc

SEQ ID NO: 1228213 - DNA, 15 bp, Homo sapiens
tagtgagagttcgat

SEQ ID NO: 1228214 - DNA, 15 bp, Homo sapiens
atagtgagagttcga

SEQ ID NO: 1228215 - DNA, 15 bp, Homo sapiens
gatagtgagagttcg

SEQ ID NO: 1228216 - DNA, 15 bp, Homo sapiens
ttccagacagatagt

SEQ ID NO: 1228217 - DNA, 15 bp, Homo sapiens
tttccagacagatag

SEQ ID NO: 1228218 - DNA, 15 bp, Homo sapiens
ctttccagacagata

SEQ ID NO: 1228219 - DNA, 15 bp, Homo sapiens
tctttccagacagat

SEQ ID NO: 1228220 - DNA, 15 bp, Homo sapiens
ttctttccagacaga

SEQ ID NO: 1228221 - DNA, 15 bp, Homo sapiens
attctttccagacag

SEQ ID NO: 1228222 - DNA, 15 bp, Homo sapiens
gattctttccagaca

SEQ ID NO: 1228223 - DNA, 15 bp, Homo sapiens
ggattctttccagac

SEQ ID NO: 1228224 - DNA, 15 bp, Homo sapiens
aggattctttccaga

SEQ ID NO: 1228225 - DNA, 15 bp, Homo sapiens
gaggattctttccag

SEQ ID NO: 1228226 - DNA, 15 bp, Homo sapiens
tgaggattctttcca

SEQ ID NO: 1228227 - DNA, 15 bp, Homo sapiens
gtgaggattctttcc

SEQ ID NO: 1228228 - DNA, 15 bp, Homo sapiens
agtgaggattctttc

SEQ ID NO: 1228229 - DNA, 15 bp, Homo sapiens
gagtgaggattcttt

SEQ ID NO: 1228230 - DNA, 15 bp, Homo sapiens
agagtgaggattctt

SEQ ID NO: 1228231 - DNA, 15 bp, Homo sapiens
aagagtgaggattct

SEQ ID NO: 1228232 - DNA, 15 bp, Homo sapiens
aaagagtgaggattc

SEQ ID NO: 1228233 - DNA, 15 bp, Homo sapiens
caaagagtgaggatt

SEQ ID NO: 1228234 - DNA, 15 bp, Homo sapiens
ccaaagagtgaggat

SEQ ID NO: 1228235 - DNA, 15 bp, Homo sapiens
tccaaagagtgagga

SEQ ID NO: 1228236 - DNA, 15 bp, Homo sapiens
atccaaagagtgagg

SEQ ID NO: 1228237 - DNA, 15 bp, Homo sapiens
aaatgagagttctat

SEQ ID NO: 1228238 - DNA, 15 bp, Homo sapiens
aaaatgagagttcta

SEQ ID NO: 1228239 - DNA, 15 bp, Homo sapiens
gaaaatgagagttct

SEQ ID NO: 1228240 - DNA, 15 bp, Homo sapiens
agaaaatgagagttc

SEQ ID NO: 1228241 - DNA, 15 bp, Homo sapiens
cagaaaatgagagtt

SEQ ID NO: 1228242 - DNA, 15 bp, Homo sapiens
acagaaaatgagagt

SEQ ID NO: 1228243 - DNA, 15 bp, Homo sapiens
gacagaaaatgagag

SEQ ID NO: 1228244 - DNA, 15 bp, Homo sapiens
agacagaaaatgaga

SEQ ID NO: 1228245 - DNA, 15 bp, Homo sapiens
cagacagaaaatgag

SEQ ID NO: 1228246 - DNA, 15 bp, Homo sapiens
ccagacagaaaatga

SEQ ID NO: 1228247 - DNA, 15 bp, Homo sapiens
tccagacagaaaatg

SEQ ID NO: 1228248 - DNA, 15 bp, Homo sapiens
atccagacagaaaat

SEQ ID NO: 1228249 - DNA, 15 bp, Homo sapiens
tatccagacagaaaa

SEQ ID NO: 1228250 - DNA, 15 bp, Homo sapiens
ctatccagacagaaa

SEQ ID NO: 1228251 - DNA, 15 bp, Homo sapiens
tctatccagacagaa

SEQ ID NO: 1228252 - DNA, 15 bp, Homo sapiens
agattctatccagat

SEQ ID NO: 1228253 - DNA, 15 bp, Homo sapiens
gagattctatccaga

SEQ ID NO: 1228254 - DNA, 15 bp, Homo sapiens
tgagattctatccag

SEQ ID NO: 1228255 - DNA, 15 bp, Homo sapiens
gtgagattctatcca

SEQ ID NO: 1228256 - DNA, 15 bp, Homo sapiens
agtgagattctatcc

SEQ ID NO: 1228257 - DNA, 15 bp, Homo sapiens
tagtgagattctatc

SEQ ID NO: 1228258 - DNA, 15 bp, Homo sapiens
atagtgagattctat

SEQ ID NO: 1228259 - DNA, 15 bp, Homo sapiens
gatagtgagattcta

SEQ ID NO: 1228260 - DNA, 15 bp, Homo sapiens
agatagtgagattct

SEQ ID NO: 1228261 - DNA, 15 bp, Homo sapiens
tagatagtgagattc

SEQ ID NO: 1228262 - DNA, 15 bp, Homo sapiens
ctagatagtgagatt

SEQ ID NO: 1228263 - DNA, 15 bp, Homo sapiens
tctagatagtgagat

SEQ ID NO: 1228264 - DNA, 15 bp, Homo sapiens
atgagaattctatct

SEQ ID NO: 1228265 - DNA, 15 bp, Homo sapiens
gagacagagagtgag

SEQ ID NO: 1228266 - DNA, 15 bp, Homo sapiens
tgagacagagagtga

SEQ ID NO: 1228267 - DNA, 15 bp, Homo sapiens
atgagacagagagtg

SEQ ID NO: 1228268 - DNA, 15 bp, Homo sapiens
aatgagacagagagt

SEQ ID NO: 1228269 - DNA, 15 bp, Homo sapiens
taatgagacagagag

SEQ ID NO: 1228270 - DNA, 15 bp, Homo sapiens
ctaatgagacagaga

SEQ ID NO: 1228271 - DNA, 15 bp, Homo sapiens
tctaatgagacagag

SEQ ID NO: 1228272 - DNA, 15 bp, Homo sapiens
atctaatgagacaga

SEQ ID NO: 1228273 - DNA, 15 bp, Homo sapiens
gatctaatgagacag

SEQ ID NO: 1228274 - DNA, 15 bp, Homo sapiens
agatctaatgagaca

SEQ ID NO: 1228275 - DNA, 15 bp, Homo sapiens
gagatctaatgagac

SEQ ID NO: 1228276 - DNA, 15 bp, Homo sapiens
agagatctaatgaga

SEQ ID NO: 1228277 - DNA, 15 bp, Homo sapiens
gagagatctaatgag

SEQ ID NO: 1228278 - DNA, 15 bp, Homo sapiens
tgagagatctaatga

SEQ ID NO: 1228279 - DNA, 15 bp, Homo sapiens
gtgagagatctaatg

SEQ ID NO: 1228280 - DNA, 15 bp, Homo sapiens
agtgagagatctaat

SEQ ID NO: 1228281 - DNA, 15 bp, Homo sapiens
cagtgagagatctaa

SEQ ID NO: 1228282 - DNA, 15 bp, Homo sapiens
acagacagtgagaga

SEQ ID NO: 1228283 - DNA, 15 bp, Homo sapiens
agttagagttctatc

SEQ ID NO: 1228284 - DNA, 15 bp, Homo sapiens
gagttagagttctat

SEQ ID NO: 1228285 - DNA, 15 bp, Homo sapiens
agagttagagttcta

SEQ ID NO: 1228286 - DNA, 15 bp, Homo sapiens
gagagttagagttct

SEQ ID NO: 1228287 - DNA, 15 bp, Homo sapiens
agagagttagagttc

SEQ ID NO: 1228288 - DNA, 15 bp, Homo sapiens
cagagagttagagtt

SEQ ID NO: 1228289 - DNA, 15 bp, Homo sapiens
ccagagagttagagt

SEQ ID NO: 1228290 - DNA, 15 bp, Homo sapiens
tccagagagttagag

SEQ ID NO: 1228291 - DNA, 15 bp, Homo sapiens
atccagagagttaga

SEQ ID NO: 1228292 - DNA, 15 bp, Homo sapiens
tatccagagagttag

SEQ ID NO: 1228293 - DNA, 15 bp, Homo sapiens
ttaagagttctatcc

SEQ ID NO: 1228294 - DNA, 15 bp, Homo sapiens
attaagagttctatc

SEQ ID NO: 1228295 - DNA, 15 bp, Homo sapiens
tattaagagttctat

SEQ ID NO: 1228296 - DNA, 15 bp, Homo sapiens
ttattaagagttcta

SEQ ID NO: 1228297 - DNA, 15 bp, Homo sapiens
gttattaagagttct

SEQ ID NO: 1228298 - DNA, 15 bp, Homo sapiens
agttattaagagttc

SEQ ID NO: 1228299 - DNA, 15 bp, Homo sapiens
gagttattaagagtt

SEQ ID NO: 1228300 - DNA, 15 bp, Homo sapiens
cgagttattaagagt

SEQ ID NO: 1228301 - DNA, 15 bp, Homo sapiens
tcgagttattaagag

SEQ ID NO: 1228302 - DNA, 15 bp, Homo sapiens
atcgagttattaaga

SEQ ID NO: 1228303 - DNA, 15 bp, Homo sapiens
tatcgagttattaag

SEQ ID NO: 1228304 - DNA, 15 bp, Homo sapiens
ctatcgagttattaa

SEQ ID NO: 1228305 - DNA, 15 bp, Homo sapiens
tctatcgagttatta

SEQ ID NO: 1228306 - DNA, 15 bp, Homo sapiens
ttctatcgagttatt

SEQ ID NO: 1228307 - DNA, 15 bp, Homo sapiens
gttctatcgagttat

SEQ ID NO: 1228308 - DNA, 15 bp, Homo sapiens
agttctatcgagtta

SEQ ID NO: 1228309 - DNA, 15 bp, Homo sapiens
aagttctatcgagtt

SEQ ID NO: 1228310 - DNA, 15 bp, Homo sapiens
aaagttctatcgagt

SEQ ID NO: 1228311 - DNA, 15 bp, Homo sapiens
gaaagttctatcgag

SEQ ID NO: 1228312 - DNA, 15 bp, Homo sapiens
tgaaagttctatcga

SEQ ID NO: 1228313 - DNA, 15 bp, Homo sapiens
gtgaaagttctatcg

SEQ ID NO: 1228314 - DNA, 15 bp, Homo sapiens
ggtgaaagttctatc

SEQ ID NO: 1228315 - DNA, 15 bp, Homo sapiens
tggtgaaagttctat

SEQ ID NO: 1228316 - DNA, 15 bp, Homo sapiens
atggtgaaagttcta

SEQ ID NO: 1228317 - DNA, 15 bp, Homo sapiens
gatggtgaaagttct

SEQ ID NO: 1228318 - DNA, 15 bp, Homo sapiens
agatggtgaaagttc

SEQ ID NO: 1228319 - DNA, 15 bp, Homo sapiens
cagatggtgaaagtt

SEQ ID NO: 1228320 - DNA, 15 bp, Homo sapiens
ccagatggtgaaagt

SEQ ID NO: 1228321 - DNA, 15 bp, Homo sapiens
tccagatggtgaaag

SEQ ID NO: 1228322 - DNA, 15 bp, Homo sapiens
tcagatggtgagagt

SEQ ID NO: 1228323 - DNA, 15 bp, Homo sapiens
ttcagatggtgagag

SEQ ID NO: 1228324 - DNA, 15 bp, Homo sapiens
ttattcagatggtga

SEQ ID NO: 1228325 - DNA, 15 bp, Homo sapiens
tttattcagatggtg

SEQ ID NO: 1228326 - DNA, 15 bp, Homo sapiens
ttttattcagatggt

SEQ ID NO: 1228327 - DNA, 15 bp, Homo sapiens
gttttattcagatgg

SEQ ID NO: 1228328 - DNA, 15 bp, Homo sapiens
agttttattcagatg

SEQ ID NO: 1228329 - DNA, 15 bp, Homo sapiens
gagttttattcagat

SEQ ID NO: 1228330 - DNA, 15 bp, Homo sapiens
attcccacacagtga

SEQ ID NO: 1228331 - DNA, 15 bp, Homo sapiens
tattcccacacagtg

SEQ ID NO: 1228332 - DNA, 15 bp, Homo sapiens
ctattcccacacagt

SEQ ID NO: 1228333 - DNA, 15 bp, Homo sapiens
tctattcccacacag

SEQ ID NO: 1228334 - DNA, 15 bp, Homo sapiens
ttctattcccacaca

SEQ ID NO: 1228335 - DNA, 15 bp, Homo sapiens
gttctattcccacac

SEQ ID NO: 1228336 - DNA, 15 bp, Homo sapiens
agttctattcccaca

SEQ ID NO: 1228337 - DNA, 15 bp, Homo sapiens
gagttctattcccac

SEQ ID NO: 1228338 - DNA, 15 bp, Homo sapiens
agagttctattccca

SEQ ID NO: 1228339 - DNA, 15 bp, Homo sapiens
gagagttctattccc

SEQ ID NO: 1228340 - DNA, 15 bp, Homo sapiens
tgagagttctattcc

SEQ ID NO: 1228341 - DNA, 15 bp, Homo sapiens
tccagagagtgagag

SEQ ID NO: 1228342 - DNA, 15 bp, Homo sapiens
tagagtaagaattct

SEQ ID NO: 1228343 - DNA, 15 bp, Homo sapiens
ctagagtaagaattc

SEQ ID NO: 1228344 - DNA, 15 bp, Homo sapiens
tctagagtaagaatt

SEQ ID NO: 1228345 - DNA, 15 bp, Homo sapiens
atctagagtaagaat

SEQ ID NO: 1228346 - DNA, 15 bp, Homo sapiens
tatctagagtaagaa

SEQ ID NO: 1228347 - DNA, 15 bp, Homo sapiens
ctatctagagtaaga

SEQ ID NO: 1228348 - DNA, 15 bp, Homo sapiens
tctatctagagtaag

SEQ ID NO: 1228349 - DNA, 15 bp, Homo sapiens
ttctatctagagtaa

SEQ ID NO: 1228350 - DNA, 15 bp, Homo sapiens
gttctatctagagta

SEQ ID NO: 1228351 - DNA, 15 bp, Homo sapiens
gatccagatggtgag

SEQ ID NO: 1228352 - DNA, 15 bp, Homo sapiens
tgatccagatggtga

SEQ ID NO: 1228353 - DNA, 15 bp, Homo sapiens
ttgatccagatggtg

SEQ ID NO: 1228354 - DNA, 15 bp, Homo sapiens
tttgatccagatggt

SEQ ID NO: 1228355 - DNA, 15 bp, Homo sapiens
gtttgatccagatgg

SEQ ID NO: 1228356 - DNA, 15 bp, Homo sapiens
agtttgatccagatg

SEQ ID NO: 1228357 - DNA, 15 bp, Homo sapiens
gagtttgatccagat

SEQ ID NO: 1228358 - DNA, 15 bp, Homo sapiens
agagtttgatccaga

SEQ ID NO: 1228359 - DNA, 15 bp, Homo sapiens
gagagtttgatccag

SEQ ID NO: 1228360 - DNA, 15 bp, Homo sapiens
tgagagtttgatcca

SEQ ID NO: 1228361 - DNA, 15 bp, Homo sapiens
gtgagagtttgatcc

SEQ ID NO: 1228362 - DNA, 15 bp, Homo sapiens
agtgagagtttgatc

SEQ ID NO: 1228363 - DNA, 15 bp, Homo sapiens
tagtgagagtttgat

SEQ ID NO: 1228364 - DNA, 15 bp, Homo sapiens
atagtgagagtttga

SEQ ID NO: 1228365 - DNA, 15 bp, Homo sapiens
gatagtgagagtttg

SEQ ID NO: 1228366 - DNA, 15 bp, Homo sapiens
gatggggagagttct

SEQ ID NO: 1228367 - DNA, 15 bp, Homo sapiens
agatggggagagttc

SEQ ID NO: 1228368 - DNA, 15 bp, Homo sapiens
cagatggggagagtt

SEQ ID NO: 1228369 - DNA, 15 bp, Homo sapiens
ccagatggggagagt

SEQ ID NO: 1228370 - DNA, 15 bp, Homo sapiens
tccagatggggagag

SEQ ID NO: 1228371 - DNA, 15 bp, Homo sapiens
atccagatggggaga

SEQ ID NO: 1228372 - DNA, 15 bp, Homo sapiens
aatccagatggggag

SEQ ID NO: 1228373 - DNA, 15 bp, Homo sapiens
caatccagatgggga

SEQ ID NO: 1228374 - DNA, 15 bp, Homo sapiens
tcaatccagatgggg

SEQ ID NO: 1228375 - DNA, 15 bp, Homo sapiens
ttcaatccagatggg

SEQ ID NO: 1228376 - DNA, 15 bp, Homo sapiens
gttcaatccagatgg

SEQ ID NO: 1228377 - DNA, 15 bp, Homo sapiens
agttcaatccagatg

SEQ ID NO: 1228378 - DNA, 15 bp, Homo sapiens
gagttcaatccagat

SEQ ID NO: 1228379 - DNA, 15 bp, Homo sapiens
agagttcaatccaga

SEQ ID NO: 1228380 - DNA, 15 bp, Homo sapiens
gagagttcaatccag

SEQ ID NO: 1228381 - DNA, 15 bp, Homo sapiens
tgagagttcaatcca

SEQ ID NO: 1228382 - DNA, 15 bp, Homo sapiens
gtgagagttcaatcc

SEQ ID NO: 1228383 - DNA, 15 bp, Homo sapiens
agtgagagttcaatc

SEQ ID NO: 1228384 - DNA, 15 bp, Homo sapiens
cagtgacagttctat

SEQ ID NO: 1228385 - DNA, 15 bp, Homo sapiens
acagtgacagttcta

SEQ ID NO: 1228386 - DNA, 15 bp, Homo sapiens
gacagtgacagttct

SEQ ID NO: 1228387 - DNA, 15 bp, Homo sapiens
agacagtgacagttc

SEQ ID NO: 1228388 - DNA, 15 bp, Homo sapiens
tagacagtgacagtt

SEQ ID NO: 1228389 - DNA, 15 bp, Homo sapiens
atagacagtgacagt

SEQ ID NO: 1228390 - DNA, 15 bp, Homo sapiens
gatagacagtgacag

SEQ ID NO: 1228391 - DNA, 15 bp, Homo sapiens
agatagacagtgaca

SEQ ID NO: 1228392 - DNA, 15 bp, Homo sapiens
cagatagacagtgac

SEQ ID NO: 1228393 - DNA, 15 bp, Homo sapiens
cgagagttcaatcca

SEQ ID NO: 1228394 - DNA, 15 bp, Homo sapiens
gcgagagttcaatcc

SEQ ID NO: 1228395 - DNA, 15 bp, Homo sapiens
agcgagagttcaatc

SEQ ID NO: 1228396 - DNA, 15 bp, Homo sapiens
tagcgagagttcaat

SEQ ID NO: 1228397 - DNA, 15 bp, Homo sapiens
atagcgagagttcaa

SEQ ID NO: 1228398 - DNA, 15 bp, Homo sapiens
gatagcgagagttca

SEQ ID NO: 1228399 - DNA, 15 bp, Homo sapiens
catccagagagtgag

SEQ ID NO: 1228400 - DNA, 15 bp, Homo sapiens
cgttccatccagaga

SEQ ID NO: 1228401 - DNA, 15 bp, Homo sapiens
gcgttccatccagag

SEQ ID NO: 1228402 - DNA, 15 bp, Homo sapiens
agcgttccatccaga

SEQ ID NO: 1228403 - DNA, 15 bp, Homo sapiens
gagcgttccatccag

SEQ ID NO: 1228404 - DNA, 15 bp, Homo sapiens
tgagcgttccatcca

SEQ ID NO: 1228405 - DNA, 15 bp, Homo sapiens
gtgagcgttccatcc

SEQ ID NO: 1228406 - DNA, 15 bp, Homo sapiens
agtgagcgttccatc

SEQ ID NO: 1228407 - DNA, 15 bp, Homo sapiens
tagtgagcgttccat

SEQ ID NO: 1228408 - DNA, 15 bp, Homo sapiens
atagtgagcgttcca

SEQ ID NO: 1228409 - DNA, 15 bp, Homo sapiens
gatagtgagcgttcc

SEQ ID NO: 1228410 - DNA, 15 bp, Homo sapiens
cagatagtgagcgtt

SEQ ID NO: 1228411 - DNA, 15 bp, Homo sapiens
ccagatagtgagcgt

SEQ ID NO: 1228412 - DNA, 15 bp, Homo sapiens
cccagatagtgagcg

SEQ ID NO: 1228413 - DNA, 15 bp, Homo sapiens
tcccagatagtgagc

SEQ ID NO: 1228414 - DNA, 15 bp, Homo sapiens
ctcccagatagtgag

SEQ ID NO: 1228415 - DNA, 15 bp, Homo sapiens
gctcccagatagtga

SEQ ID NO: 1228416 - DNA, 15 bp, Homo sapiens
ggctcccagatagtg

SEQ ID NO: 1228417 - DNA, 15 bp, Homo sapiens
aggctcccagatagt

SEQ ID NO: 1228418 - DNA, 15 bp, Homo sapiens
taggctcccagatag

SEQ ID NO: 1228419 - DNA, 15 bp, Homo sapiens
ttaggctcccagata

SEQ ID NO: 1228420 - DNA, 15 bp, Homo sapiens
gttaggctcccagat

SEQ ID NO: 1228421 - DNA, 15 bp, Homo sapiens
agttaggctcccaga

SEQ ID NO: 1228422 - DNA, 15 bp, Homo sapiens
tagttaggctcccag

SEQ ID NO: 1228423 - DNA, 15 bp, Homo sapiens
gtagttaggctccca

SEQ ID NO: 1228424 - DNA, 15 bp, Homo sapiens
agtagttaggctccc

SEQ ID NO: 1228425 - DNA, 15 bp, Homo sapiens
gagtagttaggctcc

SEQ ID NO: 1228426 - DNA, 15 bp, Homo sapiens
tgagtagttaggctc

SEQ ID NO: 1228427 - DNA, 15 bp, Homo sapiens
ctgagtagttaggct

SEQ ID NO: 1228428 - DNA, 15 bp, Homo sapiens
gctgagtagttaggc

SEQ ID NO: 1228429 - DNA, 15 bp, Homo sapiens
ggctgagtagttagg

SEQ ID NO: 1228430 - DNA, 15 bp, Homo sapiens
aggctgagtagttag

SEQ ID NO: 1228431 - DNA, 15 bp, Homo sapiens
gaggctgagtagtta

SEQ ID NO: 1228432 - DNA, 15 bp, Homo sapiens
ggaggctgagtagtt

SEQ ID NO: 1228433 - DNA, 15 bp, Homo sapiens
gggaggctgagtagt

SEQ ID NO: 1228434 - DNA, 15 bp, Homo sapiens
ggggaggctgagtag

SEQ ID NO: 1228435 - DNA, 15 bp, Homo sapiens
gggggaggctgagta

SEQ ID NO: 1228436 - DNA, 15 bp, Homo sapiens
cgggggaggctgagt

SEQ ID NO: 1228437 - DNA, 15 bp, Homo sapiens
tcgggggaggctgag

SEQ ID NO: 1228438 - DNA, 15 bp, Homo sapiens
gtcgggggaggctga

SEQ ID NO: 1228439 - DNA, 15 bp, Homo sapiens
ggtcgggggaggctg

SEQ ID NO: 1228440 - DNA, 15 bp, Homo sapiens
tggtcgggggaggct

SEQ ID NO: 1228441 - DNA, 15 bp, Homo sapiens
ctggtcgggggaggc

SEQ ID NO: 1228442 - DNA, 15 bp, Homo sapiens
gctggtcgggggagg

SEQ ID NO: 1228443 - DNA, 15 bp, Homo sapiens
ggctggtcgggggag

SEQ ID NO: 1228444 - DNA, 15 bp, Homo sapiens
gggctggtcggggga

SEQ ID NO: 1228445 - DNA, 15 bp, Homo sapiens
tgggctggtcggggg

SEQ ID NO: 1228446 - DNA, 15 bp, Homo sapiens
ttgggctggtcgggg

SEQ ID NO: 1228447 - DNA, 15 bp, Homo sapiens
gttgggctggtcggg

SEQ ID NO: 1228448 - DNA, 15 bp, Homo sapiens
agttgggctggtcgg

SEQ ID NO: 1228449 - DNA, 15 bp, Homo sapiens
aagttgggctggtcg

SEQ ID NO: 1228450 - DNA, 15 bp, Homo sapiens
gaagttgggctggtc

SEQ ID NO: 1228451 - DNA, 15 bp, Homo sapiens
agaagttgggctggt

SEQ ID NO: 1228452 - DNA, 15 bp, Homo sapiens
gagaagttgggctgg

SEQ ID NO: 1228453 - DNA, 15 bp, Homo sapiens
ggagaagttgggctg

SEQ ID NO: 1228454 - DNA, 15 bp, Homo sapiens
gggagaagttgggct

SEQ ID NO: 1228455 - DNA, 15 bp, Homo sapiens
ggggagaagttgggc

SEQ ID NO: 1228456 - DNA, 15 bp, Homo sapiens
tggggagaagttggg

SEQ ID NO: 1228457 - DNA, 15 bp, Homo sapiens
atggggagaagttgg

SEQ ID NO: 1228458 - DNA, 15 bp, Homo sapiens
catggggagaagttg

SEQ ID NO: 1228459 - DNA, 15 bp, Homo sapiens
ccatggggagaagtt

SEQ ID NO: 1228460 - DNA, 15 bp, Homo sapiens
tccatggggagaagt

SEQ ID NO: 1228461 - DNA, 15 bp, Homo sapiens
ctccatggggagaag

SEQ ID NO: 1228462 - DNA, 15 bp, Homo sapiens
cctccatggggagaa

SEQ ID NO: 1228463 - DNA, 15 bp, Homo sapiens
ccctccatggggaga

SEQ ID NO: 1228464 - DNA, 15 bp, Homo sapiens
cccctccatggggag

SEQ ID NO: 1228465 - DNA, 15 bp, Homo sapiens
gcccctccatgggga

SEQ ID NO: 1228466 - DNA, 15 bp, Homo sapiens
tgcccctccatgggg

SEQ ID NO: 1228467 - DNA, 15 bp, Homo sapiens
gtgcccctccatggg

SEQ ID NO: 1228468 - DNA, 15 bp, Homo sapiens
agtgcccctccatgg

SEQ ID NO: 1228469 - DNA, 15 bp, Homo sapiens
cagtgcccctccatg

SEQ ID NO: 1228470 - DNA, 15 bp, Homo sapiens
tcagtgcccctccat

SEQ ID NO: 1228471 - DNA, 15 bp, Homo sapiens
ctcagtgcccctcca

SEQ ID NO: 1228472 - DNA, 15 bp, Homo sapiens
actcagtgcccctcc

SEQ ID NO: 1228473 - DNA, 15 bp, Homo sapiens
gactcagtgcccctc

SEQ ID NO: 1228474 - DNA, 15 bp, Homo sapiens
ggactcagtgcccct

SEQ ID NO: 1228475 - DNA, 15 bp, Homo sapiens
aggactcagtgcccc

SEQ ID NO: 1228476 - DNA, 15 bp, Homo sapiens
gaggactcagtgccc

SEQ ID NO: 1228477 - DNA, 15 bp, Homo sapiens
tgaggactcagtgcc

SEQ ID NO: 1228478 - DNA, 15 bp, Homo sapiens
atgaggactcagtgc

SEQ ID NO: 1228479 - DNA, 15 bp, Homo sapiens
aatgaggactcagtg

SEQ ID NO: 1228480 - DNA, 15 bp, Homo sapiens
taatgaggactcagt

SEQ ID NO: 1228481 - DNA, 15 bp, Homo sapiens
ttaatgaggactcag

SEQ ID NO: 1228482 - DNA, 15 bp, Homo sapiens
tttaatgaggactca

SEQ ID NO: 1228483 - DNA, 15 bp, Homo sapiens
ctttaatgaggactc

SEQ ID NO: 1228484 - DNA, 15 bp, Homo sapiens
gctttaatgaggact

SEQ ID NO: 1228485 - DNA, 15 bp, Homo sapiens
agctttaatgaggac

SEQ ID NO: 1228486 - DNA, 15 bp, Homo sapiens
aagctttaatgagga

SEQ ID NO: 1228487 - DNA, 15 bp, Homo sapiens
gaagctttaatgagg

SEQ ID NO: 1228488 - DNA, 15 bp, Homo sapiens
ggaagctttaatgag

SEQ ID NO: 1228489 - DNA, 15 bp, Homo sapiens
aggaagctttaatga

SEQ ID NO: 1228490 - DNA, 15 bp, Homo sapiens
caggaagctttaatg

SEQ ID NO: 1228491 - DNA, 15 bp, Homo sapiens
ccaggaagctttaat

SEQ ID NO: 1228492 - DNA, 15 bp, Homo sapiens
tccaggaagctttaa

SEQ ID NO: 1228493 - DNA, 15 bp, Homo sapiens
gtccaggaagcttta

SEQ ID NO: 1228494 - DNA, 15 bp, Homo sapiens
tgtccaggaagcttt

SEQ ID NO: 1228495 - DNA, 15 bp, Homo sapiens
ctgtccaggaagctt

SEQ ID NO: 1228496 - DNA, 15 bp, Homo sapiens
gctgtccaggaagct

SEQ ID NO: 1228497 - DNA, 15 bp, Homo sapiens
agctgtccaggaagc

SEQ ID NO: 1228498 - DNA, 15 bp, Homo sapiens
cagctgtccaggaag

SEQ ID NO: 1228499 - DNA, 15 bp, Homo sapiens
ccagctgtccaggaa

SEQ ID NO: 1228500 - DNA, 15 bp, Homo sapiens
tccagctgtccagga

SEQ ID NO: 1228501 - DNA, 15 bp, Homo sapiens
ctccagctgtccagg

SEQ ID NO: 1228502 - DNA, 15 bp, Homo sapiens
actccagctgtccag

SEQ ID NO: 1228503 - DNA, 15 bp, Homo sapiens
aactccagctgtcca

SEQ ID NO: 1228504 - DNA, 15 bp, Homo sapiens
caactccagctgtcc

SEQ ID NO: 1228505 - DNA, 15 bp, Homo sapiens
ccaactccagctgtc

SEQ ID NO: 1228506 - DNA, 15 bp, Homo sapiens
tccaactccagctgt

SEQ ID NO: 1228507 - DNA, 15 bp, Homo sapiens
ctccaactccagctg

SEQ ID NO: 1228508 - DNA, 15 bp, Homo sapiens
gctccaactccagct

SEQ ID NO: 1228509 - DNA, 15 bp, Homo sapiens
ggctccaactccagc

SEQ ID NO: 1228510 - DNA, 15 bp, Homo sapiens
tggctccaactccag

SEQ ID NO: 1228511 - DNA, 15 bp, Homo sapiens
ctggctccaactcca

SEQ ID NO: 1228512 - DNA, 15 bp, Homo sapiens
tctggctccaactcc

SEQ ID NO: 1228513 - DNA, 15 bp, Homo sapiens
ctctggctccaactc

SEQ ID NO: 1228514 - DNA, 15 bp, Homo sapiens
gctctggctccaact

SEQ ID NO: 1228515 - DNA, 15 bp, Homo sapiens
tgctctggctccaac

SEQ ID NO: 1228516 - DNA, 15 bp, Homo sapiens
atgctctggctccaa

SEQ ID NO: 1228517 - DNA, 15 bp, Homo sapiens
catgctctggctcca

SEQ ID NO: 1228518 - DNA, 15 bp, Homo sapiens
tcatgctctggctcc

SEQ ID NO: 1228519 - DNA, 15 bp, Homo sapiens
gtcatgctctggctc

SEQ ID NO: 1228520 - DNA, 15 bp, Homo sapiens
agtcatgctctggct

SEQ ID NO: 1228521 - DNA, 15 bp, Homo sapiens
cagtcatgctctggc

SEQ ID NO: 1228522 - DNA, 15 bp, Homo sapiens
acagtcatgctctgg

SEQ ID NO: 1228523 - DNA, 15 bp, Homo sapiens
gacagtcatgctctg

SEQ ID NO: 1228524 - DNA, 15 bp, Homo sapiens
tgacagtcatgctct

SEQ ID NO: 1228525 - DNA, 15 bp, Homo sapiens
atgacagtcatgctc

SEQ ID NO: 1228526 - DNA, 15 bp, Homo sapiens
catgacagtcatgct

SEQ ID NO: 1228527 - DNA, 15 bp, Homo sapiens
acatgacagtcatgc

SEQ ID NO: 1228528 - DNA, 15 bp, Homo sapiens
cacatgacagtcatg

SEQ ID NO: 1228529 - DNA, 15 bp, Homo sapiens
ccacatgacagtcat

SEQ ID NO: 1228530 - DNA, 15 bp, Homo sapiens
gccacatgacagtca

SEQ ID NO: 1228531 - DNA, 15 bp, Homo sapiens
ggccacatgacagtc

SEQ ID NO: 1228532 - DNA, 15 bp, Homo sapiens
gggccacatgacagt

SEQ ID NO: 1228533 - DNA, 15 bp, Homo sapiens
agggccacatgacag

SEQ ID NO: 1228534 - DNA, 15 bp, Homo sapiens
aagggccacatgaca

SEQ ID NO: 1228535 - DNA, 15 bp, Homo sapiens
caagggccacatgac

SEQ ID NO: 1228536 - DNA, 15 bp, Homo sapiens
ccaagggccacatga

SEQ ID NO: 1228537 - DNA, 15 bp, Homo sapiens
gccaagggccacatg

SEQ ID NO: 1228538 - DNA, 15 bp, Homo sapiens
agccaagggccacat

SEQ ID NO: 1228539 - DNA, 15 bp, Homo sapiens
gagccaagggccaca

SEQ ID NO: 1228540 - DNA, 15 bp, Homo sapiens
agagccaagggccac

SEQ ID NO: 1228541 - DNA, 15 bp, Homo sapiens
cagagccaagggcca

SEQ ID NO: 1228542 - DNA, 15 bp, Homo sapiens
tcagagccaagggcc

SEQ ID NO: 1228543 - DNA, 15 bp, Homo sapiens
ttcagagccaagggc

SEQ ID NO: 1228544 - DNA, 15 bp, Homo sapiens
cttcagagccaaggg

SEQ ID NO: 1228545 - DNA, 15 bp, Homo sapiens
ccttcagagccaagg

SEQ ID NO: 1228546 - DNA, 15 bp, Homo sapiens
gccttcagagccaag

SEQ ID NO: 1228547 - DNA, 15 bp, Homo sapiens
agccttcagagccaa

SEQ ID NO: 1228548 - DNA, 15 bp, Homo sapiens
gagccttcagagcca

SEQ ID NO: 1228549 - DNA, 15 bp, Homo sapiens
agagccttcagagcc

SEQ ID NO: 1228550 - DNA, 15 bp, Homo sapiens
aagagccttcagagc

SEQ ID NO: 1228551 - DNA, 15 bp, Homo sapiens
caagagccttcagag

SEQ ID NO: 1228552 - DNA, 15 bp, Homo sapiens
gcaagagccttcaga

SEQ ID NO: 1228553 - DNA, 15 bp, Homo sapiens
agcaagagccttcag

SEQ ID NO: 1228554 - DNA, 15 bp, Homo sapiens
gagcaagagccttca

SEQ ID NO: 1228555 - DNA, 15 bp, Homo sapiens
agagcaagagccttc

SEQ ID NO: 1228556 - DNA, 15 bp, Homo sapiens
cagagcaagagcctt

SEQ ID NO: 1228557 - DNA, 15 bp, Homo sapiens
ggacagagcaagagc

SEQ ID NO: 1228558 - DNA, 15 bp, Homo sapiens
aggacagagcaagag

SEQ ID NO: 1228559 - DNA, 15 bp, Homo sapiens
taggacagagcaaga

SEQ ID NO: 1228560 - DNA, 15 bp, Homo sapiens
ttaggacagagcaag

SEQ ID NO: 1228561 - DNA, 15 bp, Homo sapiens
cttaggacagagcaa

SEQ ID NO: 1228562 - DNA, 15 bp, Homo sapiens
tcttaggacagagca

SEQ ID NO: 1228563 - DNA, 15 bp, Homo sapiens
atcttaggacagagc

SEQ ID NO: 1228564 - DNA, 15 bp, Homo sapiens
catcttaggacagag

SEQ ID NO: 1228565 - DNA, 15 bp, Homo sapiens
acatcttaggacaga

SEQ ID NO: 1228566 - DNA, 15 bp, Homo sapiens
gacatcttaggacag

SEQ ID NO: 1228567 - DNA, 15 bp, Homo sapiens
ggacatcttaggaca

SEQ ID NO: 1228568 - DNA, 15 bp, Homo sapiens
aggacatcttaggac

SEQ ID NO: 1228569 - DNA, 15 bp, Homo sapiens
gaggacatcttagga

SEQ ID NO: 1228570 - DNA, 15 bp, Homo sapiens
tgaggacatcttagg

SEQ ID NO: 1228571 - DNA, 15 bp, Homo sapiens
ttgaggacatcttag

SEQ ID NO: 1228572 - DNA, 15 bp, Homo sapiens
tttgaggacatctta

SEQ ID NO: 1228573 - DNA, 15 bp, Homo sapiens
ttttgaggacatctt

SEQ ID NO: 1228574 - DNA, 15 bp, Homo sapiens
attttgaggacatct

SEQ ID NO: 1228575 - DNA, 15 bp, Homo sapiens
cattttgaggacatc

SEQ ID NO: 1228576 - DNA, 15 bp, Homo sapiens
tcattttgaggacat

SEQ ID NO: 1228577 - DNA, 15 bp, Homo sapiens
ctcattttgaggaca

SEQ ID NO: 1228578 - DNA, 15 bp, Homo sapiens
gctcattttgaggac

SEQ ID NO: 1228579 - DNA, 15 bp, Homo sapiens
ggctcattttgagga

SEQ ID NO: 1228580 - DNA, 15 bp, Homo sapiens
aggctcattttgagg

SEQ ID NO: 1228581 - DNA, 15 bp, Homo sapiens
caggctcattttgag

SEQ ID NO: 1228582 - DNA, 15 bp, Homo sapiens
ccaggctcattttga

SEQ ID NO: 1228583 - DNA, 15 bp, Homo sapiens
cccaggctcattttg

SEQ ID NO: 1228584 - DNA, 15 bp, Homo sapiens
acccaggctcatttt

SEQ ID NO: 1228585 - DNA, 15 bp, Homo sapiens
tacccaggctcattt

SEQ ID NO: 1228586 - DNA, 15 bp, Homo sapiens
ctacccaggctcatt

SEQ ID NO: 1228587 - DNA, 15 bp, Homo sapiens
actacccaggctcat

SEQ ID NO: 1228588 - DNA, 15 bp, Homo sapiens
cactacccaggctca

SEQ ID NO: 1228589 - DNA, 15 bp, Homo sapiens
ccactacccaggctc

SEQ ID NO: 1228590 - DNA, 15 bp, Homo sapiens
cccactacccaggct

SEQ ID NO: 1228591 - DNA, 15 bp, Homo sapiens
tcccactacccaggc

SEQ ID NO: 1228592 - DNA, 15 bp, Homo sapiens
gtcccactacccagg

SEQ ID NO: 1228593 - DNA, 15 bp, Homo sapiens
agtcccactacccag

SEQ ID NO: 1228594 - DNA, 15 bp, Homo sapiens
aagtcccactaccca

SEQ ID NO: 1228595 - DNA, 15 bp, Homo sapiens
caagtcccactaccc

SEQ ID NO: 1228596 - DNA, 15 bp, Homo sapiens
ccaagtcccactacc

SEQ ID NO: 1228597 - DNA, 15 bp, Homo sapiens
cccaagtcccactac

SEQ ID NO: 1228598 - DNA, 15 bp, Homo sapiens
gcccaagtcccacta

SEQ ID NO: 1228599 - DNA, 15 bp, Homo sapiens
cgcccaagtcccact

SEQ ID NO: 1228600 - DNA, 15 bp, Homo sapiens
ccgcccaagtcccac

SEQ ID NO: 1228601 - DNA, 15 bp, Homo sapiens
cccgcccaagtccca

SEQ ID NO: 1228602 - DNA, 15 bp, Homo sapiens
ccccgcccaagtccc

SEQ ID NO: 1228603 - DNA, 15 bp, Homo sapiens
gccccgcccaagtcc

SEQ ID NO: 1228604 - DNA, 15 bp, Homo sapiens
ggccccgcccaagtc

SEQ ID NO: 1228605 - DNA, 15 bp, Homo sapiens
aggccccgcccaagt

SEQ ID NO: 1228606 - DNA, 15 bp, Homo sapiens
gaggccccgcccaag

SEQ ID NO: 1228607 - DNA, 15 bp, Homo sapiens
agaggccccgcccaa

SEQ ID NO: 1228608 - DNA, 15 bp, Homo sapiens
tagaggccccgccca

SEQ ID NO: 1228609 - DNA, 15 bp, Homo sapiens
gtagaggccccgccc

SEQ ID NO: 1228610 - DNA, 15 bp, Homo sapiens
agtagaggccccgcc

SEQ ID NO: 1228611 - DNA, 15 bp, Homo sapiens
gagtagaggccccgc

SEQ ID NO: 1228612 - DNA, 15 bp, Homo sapiens
agagtagaggccccg

SEQ ID NO: 1228613 - DNA, 15 bp, Homo sapiens
aagagtagaggcccc

SEQ ID NO: 1228614 - DNA, 15 bp, Homo sapiens
aaagagtagaggccc

SEQ ID NO: 1228615 - DNA, 15 bp, Homo sapiens
gaaagagtagaggcc

SEQ ID NO: 1228616 - DNA, 15 bp, Homo sapiens
ggaaagagtagaggc

SEQ ID NO: 1228617 - DNA, 15 bp, Homo sapiens
gggaaagagtagagg

SEQ ID NO: 1228618 - DNA, 15 bp, Homo sapiens
tgggaaagagtagag

SEQ ID NO: 1228619 - DNA, 15 bp, Homo sapiens
atgggaaagagtaga

SEQ ID NO: 1228620 - DNA, 15 bp, Homo sapiens
aatgggaaagagtag

SEQ ID NO: 1228621 - DNA, 15 bp, Homo sapiens
aaatgggaaagagta

SEQ ID NO: 1228622 - DNA, 15 bp, Homo sapiens
aaaatgggaaagagt

SEQ ID NO: 1228623 - DNA, 15 bp, Homo sapiens
aaaaatgggaaagag

SEQ ID NO: 1228624 - DNA, 15 bp, Homo sapiens
caaaaaatgggaaag

SEQ ID NO: 1228625 - DNA, 15 bp, Homo sapiens
tcaaaaaatgggaaa

SEQ ID NO: 1228626 - DNA, 15 bp, Homo sapiens
atcaaaaaatgggaa

SEQ ID NO: 1228627 - DNA, 15 bp, Homo sapiens
gatcaaaaaatggga

SEQ ID NO: 1228628 - DNA, 15 bp, Homo sapiens
ggatcaaaaaatggg

SEQ ID NO: 1228629 - DNA, 15 bp, Homo sapiens
tggatcaaaaaatgg

SEQ ID NO: 1228630 - DNA, 15 bp, Homo sapiens
gtggatcaaaaaatg

SEQ ID NO: 1228631 - DNA, 15 bp, Homo sapiens
agtggatcaaaaaat

SEQ ID NO: 1228632 - DNA, 15 bp, Homo sapiens
cagtggatcaaaaaa

SEQ ID NO: 1228633 - DNA, 15 bp, Homo sapiens
gcagtggatcaaaaa

SEQ ID NO: 1228634 - DNA, 15 bp, Homo sapiens
agcagtggatcaaaa

SEQ ID NO: 1228635 - DNA, 15 bp, Homo sapiens
gagcagtggatcaaa

SEQ ID NO: 1228636 - DNA, 15 bp, Homo sapiens
agagcagtggatcaa

SEQ ID NO: 1228637 - DNA, 15 bp, Homo sapiens
aagagcagtggatca

SEQ ID NO: 1228638 - DNA, 15 bp, Homo sapiens
taagagcagtggatc

SEQ ID NO: 1228639 - DNA, 15 bp, Homo sapiens
gtaagagcagtggat

SEQ ID NO: 1228640 - DNA, 15 bp, Homo sapiens
ggtaagagcagtgga

SEQ ID NO: 1228641 - DNA, 15 bp, Homo sapiens
gggtaagagcagtgg

SEQ ID NO: 1228642 - DNA, 15 bp, Homo sapiens
agggtaagagcagtg

SEQ ID NO: 1228643 - DNA, 15 bp, Homo sapiens
cagggtaagagcagt

SEQ ID NO: 1228644 - DNA, 15 bp, Homo sapiens
tcagggtaagagcag

SEQ ID NO: 1228645 - DNA, 15 bp, Homo sapiens
ctcagggtaagagca

SEQ ID NO: 1228646 - DNA, 15 bp, Homo sapiens
cctcagggtaagagc

SEQ ID NO: 1228647 - DNA, 15 bp, Homo sapiens
gcctcagggtaagag

SEQ ID NO: 1228648 - DNA, 15 bp, Homo sapiens
agcctcagggtaaga

SEQ ID NO: 1228649 - DNA, 15 bp, Homo sapiens
aagcctcagggtaag

SEQ ID NO: 1228650 - DNA, 15 bp, Homo sapiens
gaagcctcagggtaa

SEQ ID NO: 1228651 - DNA, 15 bp, Homo sapiens
agaagcctcagggta

SEQ ID NO: 1228652 - DNA, 15 bp, Homo sapiens
cagaagcctcagggt

SEQ ID NO: 1228653 - DNA, 15 bp, Homo sapiens
gcagaagcctcaggg

SEQ ID NO: 1228654 - DNA, 15 bp, Homo sapiens
tgcagaagcctcagg

SEQ ID NO: 1228655 - DNA, 15 bp, Homo sapiens
ctgcagaagcctcag

SEQ ID NO: 1228656 - DNA, 15 bp, Homo sapiens
tctgcagaagcctca

SEQ ID NO: 1228657 - DNA, 15 bp, Homo sapiens
atctgcagaagcctc

SEQ ID NO: 1228658 - DNA, 15 bp, Homo sapiens
catctgcagaagcct

SEQ ID NO: 1228659 - DNA, 15 bp, Homo sapiens
acatctgcagaagcc

SEQ ID NO: 1228660 - DNA, 15 bp, Homo sapiens
cacatctgcagaagc

SEQ ID NO: 1228661 - DNA, 15 bp, Homo sapiens
ccacatctgcagaag

SEQ ID NO: 1228662 - DNA, 15 bp, Homo sapiens
accacatctgcagaa

SEQ ID NO: 1228663 - DNA, 15 bp, Homo sapiens
gaccacatctgcaga

SEQ ID NO: 1228664 - DNA, 15 bp, Homo sapiens
tgaccacatctgcag

SEQ ID NO: 1228665 - DNA, 15 bp, Homo sapiens
ctgaccacatctgca

SEQ ID NO: 1228666 - DNA, 15 bp, Homo sapiens
cctgaccacatctgc

SEQ ID NO: 1228667 - DNA, 15 bp, Homo sapiens
gcctgaccacatctg

SEQ ID NO: 1228668 - DNA, 15 bp, Homo sapiens
ggcctgaccacatct

SEQ ID NO: 1228669 - DNA, 15 bp, Homo sapiens
aggcctgaccacatc

SEQ ID NO: 1228670 - DNA, 15 bp, Homo sapiens
caggcctgaccacat

SEQ ID NO: 1228671 - DNA, 15 bp, Homo sapiens
ccaggcctgaccaca

SEQ ID NO: 1228672 - DNA, 15 bp, Homo sapiens
gccaggcctgaccac

SEQ ID NO: 1228673 - DNA, 15 bp, Homo sapiens
tgccaggcctgacca

SEQ ID NO: 1228674 - DNA, 15 bp, Homo sapiens
ctgccaggcctgacc

SEQ ID NO: 1228675 - DNA, 15 bp, Homo sapiens
cctgccaggcctgac

SEQ ID NO: 1228676 - DNA, 15 bp, Homo sapiens
ccctgccaggcctga

SEQ ID NO: 1228677 - DNA, 15 bp, Homo sapiens
accctgccaggcctg

SEQ ID NO: 1228678 - DNA, 15 bp, Homo sapiens
caccctgccaggcct

SEQ ID NO: 1228679 - DNA, 15 bp, Homo sapiens
ttcaccctgccaggc

SEQ ID NO: 1228680 - DNA, 15 bp, Homo sapiens
cttcaccctgccagg

SEQ ID NO: 1228681 - DNA, 15 bp, Homo sapiens
ccttcaccctgccag

SEQ ID NO: 1228682 - DNA, 15 bp, Homo sapiens
tccttcaccctgcca

SEQ ID NO: 1228683 - DNA, 15 bp, Homo sapiens
gtccttcaccctgcc

SEQ ID NO: 1228684 - DNA, 15 bp, Homo sapiens
ggtccttcaccctgc

SEQ ID NO: 1228685 - DNA, 15 bp, Homo sapiens
tggtccttcaccctg

SEQ ID NO: 1228686 - DNA, 15 bp, Homo sapiens
ctggtccttcaccct

SEQ ID NO: 1228687 - DNA, 15 bp, Homo sapiens
gctggtccttcaccc

SEQ ID NO: 1228688 - DNA, 15 bp, Homo sapiens
ggctggtccttcacc

SEQ ID NO: 1228689 - DNA, 15 bp, Homo sapiens
gggctggtccttcac

SEQ ID NO: 1228690 - DNA, 15 bp, Homo sapiens
agggctggtccttca

SEQ ID NO: 1228691 - DNA, 15 bp, Homo sapiens
aagggctggtccttc

SEQ ID NO: 1228692 - DNA, 15 bp, Homo sapiens
caagggctggtcctt

SEQ ID NO: 1228693 - DNA, 15 bp, Homo sapiens
ccaagggctggtcct

SEQ ID NO: 1228694 - DNA, 15 bp, Homo sapiens
cccaagggctggtcc

SEQ ID NO: 1228695 - DNA, 15 bp, Homo sapiens
ccccaagggctggtc

SEQ ID NO: 1228696 - DNA, 15 bp, Homo sapiens
accccaagggctggt

SEQ ID NO: 1228697 - DNA, 15 bp, Homo sapiens
gaccccaagggctgg

SEQ ID NO: 1228698 - DNA, 15 bp, Homo sapiens
ggaccccaagggctg

SEQ ID NO: 1228699 - DNA, 15 bp, Homo sapiens
gggaccccaagggct

SEQ ID NO: 1228700 - DNA, 15 bp, Homo sapiens
agggaccccaagggc

SEQ ID NO: 1228701 - DNA, 15 bp, Homo sapiens
gagggaccccaaggg

SEQ ID NO: 1228702 - DNA, 15 bp, Homo sapiens
agagggaccccaagg

SEQ ID NO: 1228703 - DNA, 15 bp, Homo sapiens
cagagggaccccaag

SEQ ID NO: 1228704 - DNA, 15 bp, Homo sapiens
gcagagggaccccaa

SEQ ID NO: 1228705 - DNA, 15 bp, Homo sapiens
ggcagagggacccca

SEQ ID NO: 1228706 - DNA, 15 bp, Homo sapiens
aggcagagggacccc

SEQ ID NO: 1228707 - DNA, 15 bp, Homo sapiens
gaggcagagggaccc

SEQ ID NO: 1228708 - DNA, 15 bp, Homo sapiens
agaggcagagggacc

SEQ ID NO: 1228709 - DNA, 15 bp, Homo sapiens
gagaggcagagggac

SEQ ID NO: 1228710 - DNA, 15 bp, Homo sapiens
agagaggcagaggga

SEQ ID NO: 1228711 - DNA, 15 bp, Homo sapiens
gagagaggcagaggg

SEQ ID NO: 1228712 - DNA, 15 bp, Homo sapiens
agagagaggcagagg

SEQ ID NO: 1228713 - DNA, 15 bp, Homo sapiens
cagagagaggcagag

SEQ ID NO: 1228714 - DNA, 15 bp, Homo sapiens
gcagagagaggcaga

SEQ ID NO: 1228715 - DNA, 15 bp, Homo sapiens
agcagagagaggcag

SEQ ID NO: 1228716 - DNA, 15 bp, Homo sapiens
gagcagagagaggca

SEQ ID NO: 1228717 - DNA, 15 bp, Homo sapiens
agagcagagagaggc

SEQ ID NO: 1228718 - DNA, 15 bp, Homo sapiens
cagagcagagagagg

SEQ ID NO: 1228719 - DNA, 15 bp, Homo sapiens
gcagagcagagagag

SEQ ID NO: 1228720 - DNA, 15 bp, Homo sapiens
ggcagagcagagaga

SEQ ID NO: 1228721 - DNA, 15 bp, Homo sapiens
gggcagagcagagag

SEQ ID NO: 1228722 - DNA, 15 bp, Homo sapiens
ggggcagagcagaga

SEQ ID NO: 1228723 - DNA, 15 bp, Homo sapiens
aggggcagagcagag

SEQ ID NO: 1228724 - DNA, 15 bp, Homo sapiens
aaggggcagagcaga

SEQ ID NO: 1228725 - DNA, 15 bp, Homo sapiens
caaggggcagagcag

SEQ ID NO: 1228726 - DNA, 15 bp, Homo sapiens
gcaaggggcagagca

SEQ ID NO: 1228727 - DNA, 15 bp, Homo sapiens
agcaaggggcagagc

SEQ ID NO: 1228728 - DNA, 15 bp, Homo sapiens
aagcaaggggcagag

SEQ ID NO: 1228729 - DNA, 15 bp, Homo sapiens
gaagcaaggggcaga

SEQ ID NO: 1228730 - DNA, 15 bp, Homo sapiens
tgaagcaaggggcag

SEQ ID NO: 1228731 - DNA, 15 bp, Homo sapiens
atgaagcaaggggca

SEQ ID NO: 1228732 - DNA, 15 bp, Homo sapiens
catgaagcaaggggc

SEQ ID NO: 1228733 - DNA, 15 bp, Homo sapiens
ccatgaagcaagggg

SEQ ID NO: 1228734 - DNA, 15 bp, Homo sapiens
gccatgaagcaaggg

SEQ ID NO: 1228735 - DNA, 15 bp, Homo sapiens
agccatgaagcaagg

SEQ ID NO: 1228736 - DNA, 15 bp, Homo sapiens
cagccatgaagcaag

SEQ ID NO: 1228737 - DNA, 15 bp, Homo sapiens
tcagccatgaagcaa

SEQ ID NO: 1228738 - DNA, 15 bp, Homo sapiens
ctcagccatgaagca

SEQ ID NO: 1228739 - DNA, 15 bp, Homo sapiens
cctcagccatgaagc

SEQ ID NO: 1228740 - DNA, 15 bp, Homo sapiens
ccctcagccatgaag

SEQ ID NO: 1228741 - DNA, 15 bp, Homo sapiens
accctcagccatgaa

SEQ ID NO: 1228742 - DNA, 15 bp, Homo sapiens
caccctcagccatga

SEQ ID NO: 1228743 - DNA, 15 bp, Homo sapiens
ccaccctcagccatg

SEQ ID NO: 1228744 - DNA, 15 bp, Homo sapiens
cccaccctcagccat

SEQ ID NO: 1228745 - DNA, 15 bp, Homo sapiens
ccccaccctcagcca

SEQ ID NO: 1228746 - DNA, 15 bp, Homo sapiens
tccccaccctcagcc

SEQ ID NO: 1228747 - DNA, 15 bp, Homo sapiens
ctccccaccctcagc

SEQ ID NO: 1228748 - DNA, 15 bp, Homo sapiens
tctccccaccctcag

SEQ ID NO: 1228749 - DNA, 15 bp, Homo sapiens
ttctccccaccctca

SEQ ID NO: 1228750 - DNA, 15 bp, Homo sapiens
attctccccaccctc

SEQ ID NO: 1228751 - DNA, 15 bp, Homo sapiens
cattctccccaccct

SEQ ID NO: 1228752 - DNA, 15 bp, Homo sapiens
acattctccccaccc

SEQ ID NO: 1228753 - DNA, 15 bp, Homo sapiens
gacattctccccacc

SEQ ID NO: 1228754 - DNA, 15 bp, Homo sapiens
ggacattctccccac

SEQ ID NO: 1228755 - DNA, 15 bp, Homo sapiens
gggacattctcccca

SEQ ID NO: 1228756 - DNA, 15 bp, Homo sapiens
tgggacattctcccc

SEQ ID NO: 1228757 - DNA, 15 bp, Homo sapiens
ctgggacattctccc

SEQ ID NO: 1228758 - DNA, 15 bp, Homo sapiens
tctgggacattctcc

SEQ ID NO: 1228759 - DNA, 15 bp, Homo sapiens
ctctgggacattctc

SEQ ID NO: 1228760 - DNA, 15 bp, Homo sapiens
gctctgggacattct

SEQ ID NO: 1228761 - DNA, 15 bp, Homo sapiens
ggctctgggacattc

SEQ ID NO: 1228762 - DNA, 15 bp, Homo sapiens
gggctctgggacatt

SEQ ID NO: 1228763 - DNA, 15 bp, Homo sapiens
ggggctctgggacat

SEQ ID NO: 1228764 - DNA, 15 bp, Homo sapiens
tggggctctgggaca

SEQ ID NO: 1228765 - DNA, 15 bp, Homo sapiens
gtggggctctgggac

SEQ ID NO: 1228766 - DNA, 15 bp, Homo sapiens
cgtggggctctggga

SEQ ID NO: 1228767 - DNA, 15 bp, Homo sapiens
tcgtggggctctggg

SEQ ID NO: 1228768 - DNA, 15 bp, Homo sapiens
ctcgtggggctctgg

SEQ ID NO: 1228769 - DNA, 15 bp, Homo sapiens
cctcgtggggctctg

SEQ ID NO: 1228770 - DNA, 15 bp, Homo sapiens
ccctcgtggggctct

SEQ ID NO: 1228771 - DNA, 15 bp, Homo sapiens
cccctcgtggggctc

SEQ ID NO: 1228772 - DNA, 15 bp, Homo sapiens
acccctcgtggggct

SEQ ID NO: 1228773 - DNA, 15 bp, Homo sapiens
cacccctcgtggggc

SEQ ID NO: 1228774 - DNA, 15 bp, Homo sapiens
tcacccctcgtgggg

SEQ ID NO: 1228775 - DNA, 15 bp, Homo sapiens
atcacccctcgtggg

SEQ ID NO: 1228776 - DNA, 15 bp, Homo sapiens
gatcacccctcgtgg

SEQ ID NO: 1228777 - DNA, 15 bp, Homo sapiens
tgatcacccctcgtg

SEQ ID NO: 1228778 - DNA, 15 bp, Homo sapiens
ctgatcacccctcgt

SEQ ID NO: 1228779 - DNA, 15 bp, Homo sapiens
gctgatcacccctcg

SEQ ID NO: 1228780 - DNA, 15 bp, Homo sapiens
tgctgatcacccctc

SEQ ID NO: 1228781 - DNA, 15 bp, Homo sapiens
atgctgatcacccct

SEQ ID NO: 1228782 - DNA, 15 bp, Homo sapiens
aatgctgatcacccc

SEQ ID NO: 1228783 - DNA, 15 bp, Homo sapiens
caatgctgatcaccc

SEQ ID NO: 1228784 - DNA, 15 bp, Homo sapiens
acaatgctgatcacc

SEQ ID NO: 1228785 - DNA, 15 bp, Homo sapiens
cacaatgctgatcac

SEQ ID NO: 1228786 - DNA, 15 bp, Homo sapiens
tcacaatgctgatca

SEQ ID NO: 1228787 - DNA, 15 bp, Homo sapiens
ctcacaatgctgatc

SEQ ID NO: 1228788 - DNA, 15 bp, Homo sapiens
gctcacaatgctgat

SEQ ID NO: 1228789 - DNA, 15 bp, Homo sapiens
agctcacaatgctga

SEQ ID NO: 1228790 - DNA, 15 bp, Homo sapiens
cagctcacaatgctg

SEQ ID NO: 1228791 - DNA, 15 bp, Homo sapiens
ccagctcacaatgct

SEQ ID NO: 1228792 - DNA, 15 bp, Homo sapiens
cccagctcacaatgc

SEQ ID NO: 1228793 - DNA, 15 bp, Homo sapiens
gcccagctcacaatg

SEQ ID NO: 1228794 - DNA, 15 bp, Homo sapiens
cgcccagctcacaat

SEQ ID NO: 1228795 - DNA, 15 bp, Homo sapiens
acgcccagctcacaa

SEQ ID NO: 1228796 - DNA, 15 bp, Homo sapiens
cacgcccagctcaca

SEQ ID NO: 1228797 - DNA, 15 bp, Homo sapiens
gcacgcccagctcac

SEQ ID NO: 1228798 - DNA, 15 bp, Homo sapiens
tgcacgcccagctca

SEQ ID NO: 1228799 - DNA, 15 bp, Homo sapiens
gtgcacgcccagctc

SEQ ID NO: 1228800 - DNA, 15 bp, Homo sapiens
ggtgcacgcccagct

SEQ ID NO: 1228801 - DNA, 15 bp, Homo sapiens
tggtgcacgcccagc

SEQ ID NO: 1228802 - DNA, 15 bp, Homo sapiens
ttggtgcacgcccag

SEQ ID NO: 1228803 - DNA, 15 bp, Homo sapiens
cttggtgcacgccca

SEQ ID NO: 1228804 - DNA, 15 bp, Homo sapiens
gcttggtgcacgccc

SEQ ID NO: 1228805 - DNA, 15 bp, Homo sapiens
agcttggtgcacgcc

SEQ ID NO: 1228806 - DNA, 15 bp, Homo sapiens
gagcttggtgcacgc

SEQ ID NO: 1228807 - DNA, 15 bp, Homo sapiens
agagcttggtgcacg

SEQ ID NO: 1228808 - DNA, 15 bp, Homo sapiens
aagagcttggtgcac

SEQ ID NO: 1228809 - DNA, 15 bp, Homo sapiens
gaagagcttggtgca

SEQ ID NO: 1228810 - DNA, 15 bp, Homo sapiens
tgaagagcttggtgc

SEQ ID NO: 1228811 - DNA, 15 bp, Homo sapiens
gtgaagagcttggtg

SEQ ID NO: 1228812 - DNA, 15 bp, Homo sapiens
ggtgaagagcttggt

SEQ ID NO: 1228813 - DNA, 15 bp, Homo sapiens
aggtgaagagcttgg

SEQ ID NO: 1228814 - DNA, 15 bp, Homo sapiens
caggtgaagagcttg

SEQ ID NO: 1228815 - DNA, 15 bp, Homo sapiens
acaggtgaagagctt

SEQ ID NO: 1228816 - DNA, 15 bp, Homo sapiens
cacaggtgaagagct

SEQ ID NO: 1228817 - DNA, 15 bp, Homo sapiens
tcacaggtgaagagc

SEQ ID NO: 1228818 - DNA, 15 bp, Homo sapiens
ctcacaggtgaagag

SEQ ID NO: 1228819 - DNA, 15 bp, Homo sapiens
gctcacaggtgaaga

SEQ ID NO: 1228820 - DNA, 15 bp, Homo sapiens
tgctcacaggtgaag

SEQ ID NO: 1228821 - DNA, 15 bp, Homo sapiens
ctgctcacaggtgaa

SEQ ID NO: 1228822 - DNA, 15 bp, Homo sapiens
cctgctcacaggtga

SEQ ID NO: 1228823 - DNA, 15 bp, Homo sapiens
acctgctcacaggtg

SEQ ID NO: 1228824 - DNA, 15 bp, Homo sapiens
cacctgctcacaggt

SEQ ID NO: 1228825 - DNA, 15 bp, Homo sapiens
gcacctgctcacagg

SEQ ID NO: 1228826 - DNA, 15 bp, Homo sapiens
ggcacctgctcacag

SEQ ID NO: 1228827 - DNA, 15 bp, Homo sapiens
tggcacctgctcaca

SEQ ID NO: 1228828 - DNA, 15 bp, Homo sapiens
ctggcacctgctcac

SEQ ID NO: 1228829 - DNA, 15 bp, Homo sapiens
cctggcacctgctca

SEQ ID NO: 1228830 - DNA, 15 bp, Homo sapiens
ccctggcacctgctc

SEQ ID NO: 1228831 - DNA, 15 bp, Homo sapiens
tccctggcacctgct

SEQ ID NO: 1228832 - DNA, 15 bp, Homo sapiens
ttccctggcacctgc

SEQ ID NO: 1228833 - DNA, 15 bp, Homo sapiens
gttccctggcacctg

SEQ ID NO: 1228834 - DNA, 15 bp, Homo sapiens
tgttccctggcacct

SEQ ID NO: 1228835 - DNA, 15 bp, Homo sapiens
ctgttccctggcacc

SEQ ID NO: 1228836 - DNA, 15 bp, Homo sapiens
cctgttccctggcac

SEQ ID NO: 1228837 - DNA, 15 bp, Homo sapiens
gcctgttccctggca

SEQ ID NO: 1228838 - DNA, 15 bp, Homo sapiens
ggcctgttccctggc

SEQ ID NO: 1228839 - DNA, 15 bp, Homo sapiens
tggcctgttccctgg

SEQ ID NO: 1228840 - DNA, 15 bp, Homo sapiens
gtggcctgttccctg

SEQ ID NO: 1228841 - DNA, 15 bp, Homo sapiens
ggtggcctgttccct

SEQ ID NO: 1228842 - DNA, 15 bp, Homo sapiens
aggtggcctgttccc

SEQ ID NO: 1228843 - DNA, 15 bp, Homo sapiens
caggtggcctgttcc

SEQ ID NO: 1228844 - DNA, 15 bp, Homo sapiens
acaggtggcctgttc

SEQ ID NO: 1228845 - DNA, 15 bp, Homo sapiens
cacaggtggcctgtt

SEQ ID NO: 1228846 - DNA, 15 bp, Homo sapiens
tcacaggtggcctgt

SEQ ID NO: 1228847 - DNA, 15 bp, Homo sapiens
gtcacaggtggcctg

SEQ ID NO: 1228848 - DNA, 15 bp, Homo sapiens
agtcacaggtggcct

SEQ ID NO: 1228849 - DNA, 15 bp, Homo sapiens
gagtcacaggtggcc

SEQ ID NO: 1228850 - DNA, 15 bp, Homo sapiens
ggagtcacaggtggc

SEQ ID NO: 1228851 - DNA, 15 bp, Homo sapiens
tggagtcacaggtgg

SEQ ID NO: 1228852 - DNA, 15 bp, Homo sapiens
gtggagtcacaggtg

SEQ ID NO: 1228853 - DNA, 15 bp, Homo sapiens
tgtggagtcacaggt

SEQ ID NO: 1228854 - DNA, 15 bp, Homo sapiens
atgtggagtcacagg

SEQ ID NO: 1228855 - DNA, 15 bp, Homo sapiens
gatgtggagtcacag

SEQ ID NO: 1228856 - DNA, 15 bp, Homo sapiens
ggatgtggagtcaca

SEQ ID NO: 1228857 - DNA, 15 bp, Homo sapiens
gggatgtggagtcac

SEQ ID NO: 1228858 - DNA, 15 bp, Homo sapiens
ggggatgtggagtca

SEQ ID NO: 1228859 - DNA, 15 bp, Homo sapiens
aggggatgtggagtc

SEQ ID NO: 1228860 - DNA, 15 bp, Homo sapiens
caggggatgtggagt

SEQ ID NO: 1228861 - DNA, 15 bp, Homo sapiens
gcaggggatgtggag

SEQ ID NO: 1228862 - DNA, 15 bp, Homo sapiens
agcaggggatgtgga

SEQ ID NO: 1228863 - DNA, 15 bp, Homo sapiens
aagcaggggatgtgg

SEQ ID NO: 1228864 - DNA, 15 bp, Homo sapiens
caagcaggggatgtg

SEQ ID NO: 1228865 - DNA, 15 bp, Homo sapiens
gcaagcaggggatgt

SEQ ID NO: 1228866 - DNA, 15 bp, Homo sapiens
tgcaagcaggggatg

SEQ ID NO: 1228867 - DNA, 15 bp, Homo sapiens
ctgcaagcaggggat

SEQ ID NO: 1228868 - DNA, 15 bp, Homo sapiens
actgcaagcagggga

SEQ ID NO: 1228869 - DNA, 15 bp, Homo sapiens
cactgcaagcagggg

SEQ ID NO: 1228870 - DNA, 15 bp, Homo sapiens
ccactgcaagcaggg

SEQ ID NO: 1228871 - DNA, 15 bp, Homo sapiens
tccactgcaagcagg

SEQ ID NO: 1228872 - DNA, 15 bp, Homo sapiens
gtccactgcaagcag

SEQ ID NO: 1228873 - DNA, 15 bp, Homo sapiens
ggtccactgcaagca

SEQ ID NO: 1228874 - DNA, 15 bp, Homo sapiens
aggtccactgcaagc

SEQ ID NO: 1228875 - DNA, 15 bp, Homo sapiens
caggtccactgcaag

SEQ ID NO: 1228876 - DNA, 15 bp, Homo sapiens
tcaggtccactgcaa

SEQ ID NO: 1228877 - DNA, 15 bp, Homo sapiens
gtcaggtccactgca

SEQ ID NO: 1228878 - DNA, 15 bp, Homo sapiens
ggtcaggtccactgc

SEQ ID NO: 1228879 - DNA, 15 bp, Homo sapiens
tggtcaggtccactg

SEQ ID NO: 1228880 - DNA, 15 bp, Homo sapiens
ctggtcaggtccact

SEQ ID NO: 1228881 - DNA, 15 bp, Homo sapiens
gctggtcaggtccac

SEQ ID NO: 1228882 - DNA, 15 bp, Homo sapiens
tgctggtcaggtcca

SEQ ID NO: 1228883 - DNA, 15 bp, Homo sapiens
atgctggtcaggtcc

SEQ ID NO: 1228884 - DNA, 15 bp, Homo sapiens
aatgctggtcaggtc

SEQ ID NO: 1228885 - DNA, 15 bp, Homo sapiens
caatgctggtcaggt

SEQ ID NO: 1228886 - DNA, 15 bp, Homo sapiens
tcaatgctggtcagg

SEQ ID NO: 1228887 - DNA, 15 bp, Homo sapiens
gtcaatgctggtcag

SEQ ID NO: 1228888 - DNA, 15 bp, Homo sapiens
tgtcaatgctggtca

SEQ ID NO: 1228889 - DNA, 15 bp, Homo sapiens
ctgtcaatgctggtc

SEQ ID NO: 1228890 - DNA, 15 bp, Homo sapiens
cctgtcaatgctggt

SEQ ID NO: 1228891 - DNA, 15 bp, Homo sapiens
gcctgtcaatgctgg

SEQ ID NO: 1228892 - DNA, 15 bp, Homo sapiens
cgcctgtcaatgctg

SEQ ID NO: 1228893 - DNA, 15 bp, Homo sapiens
gcgcctgtcaatgct

SEQ ID NO: 1228894 - DNA, 15 bp, Homo sapiens
tgcgcctgtcaatgc

SEQ ID NO: 1228895 - DNA, 15 bp, Homo sapiens
ctgcgcctgtcaatg

SEQ ID NO: 1228896 - DNA, 15 bp, Homo sapiens
gctgcgcctgtcaat

SEQ ID NO: 1228897 - DNA, 15 bp, Homo sapiens
tgctgcgcctgtcaa

SEQ ID NO: 1228898 - DNA, 15 bp, Homo sapiens
ctgctgcgcctgtca

SEQ ID NO: 1228899 - DNA, 15 bp, Homo sapiens
tctgctgcgcctgtc

SEQ ID NO: 1228900 - DNA, 15 bp, Homo sapiens
ctctgctgcgcctgt

SEQ ID NO: 1228901 - DNA, 15 bp, Homo sapiens
tctctgctgcgcctg

SEQ ID NO: 1228902 - DNA, 15 bp, Homo sapiens
ctctctgctgcgcct

SEQ ID NO: 1228903 - DNA, 15 bp, Homo sapiens
gctctctgctgcgcc

SEQ ID NO: 1228904 - DNA, 15 bp, Homo sapiens
tgctctctgctgcgc

SEQ ID NO: 1228905 - DNA, 15 bp, Homo sapiens
ctgctctctgctgcg

SEQ ID NO: 1228906 - DNA, 15 bp, Homo sapiens
cctgctctctgctgc

SEQ ID NO: 1228907 - DNA, 15 bp, Homo sapiens
tcctgctctctgctg

SEQ ID NO: 1228908 - DNA, 15 bp, Homo sapiens
ttcctgctctctgct

SEQ ID NO: 1228909 - DNA, 15 bp, Homo sapiens
attcctgctctctgc

SEQ ID NO: 1228910 - DNA, 15 bp, Homo sapiens
aattcctgctctctg

SEQ ID NO: 1228911 - DNA, 15 bp, Homo sapiens
caattcctgctctct

SEQ ID NO: 1228912 - DNA, 15 bp, Homo sapiens
ccaattcctgctctc

SEQ ID NO: 1228913 - DNA, 15 bp, Homo sapiens
gccaattcctgctct

SEQ ID NO: 1228914 - DNA, 15 bp, Homo sapiens
ggccaattcctgctc

SEQ ID NO: 1228915 - DNA, 15 bp, Homo sapiens
tggccaattcctgct

SEQ ID NO: 1228916 - DNA, 15 bp, Homo sapiens
gtggccaattcctgc

SEQ ID NO: 1228917 - DNA, 15 bp, Homo sapiens
ggtggccaattcctg

SEQ ID NO: 1228918 - DNA, 15 bp, Homo sapiens
tggtggccaattcct

SEQ ID NO: 1228919 - DNA, 15 bp, Homo sapiens
ccctggtggccaatt

SEQ ID NO: 1228920 - DNA, 15 bp, Homo sapiens
tccctggtggccaat

SEQ ID NO: 1228921 - DNA, 15 bp, Homo sapiens
ctccctggtggccaa

SEQ ID NO: 1228922 - DNA, 15 bp, Homo sapiens
tctccctggtggcca

SEQ ID NO: 1228923 - DNA, 15 bp, Homo sapiens
ttctccctggtggcc

SEQ ID NO: 1228924 - DNA, 15 bp, Homo sapiens
cttctccctggtggc

SEQ ID NO: 1228925 - DNA, 15 bp, Homo sapiens
ccttctccctggtgg

SEQ ID NO: 1228926 - DNA, 15 bp, Homo sapiens
gccttctccctggtg

SEQ ID NO: 1228927 - DNA, 15 bp, Homo sapiens
agccttctccctggt

SEQ ID NO: 1228928 - DNA, 15 bp, Homo sapiens
gagccttctccctgg

SEQ ID NO: 1228929 - DNA, 15 bp, Homo sapiens
tgagccttctccctg

SEQ ID NO: 1228930 - DNA, 15 bp, Homo sapiens
ctgagccttctccct

SEQ ID NO: 1228931 - DNA, 15 bp, Homo sapiens
actgagccttctccc

SEQ ID NO: 1228932 - DNA, 15 bp, Homo sapiens
gactgagccttctcc

SEQ ID NO: 1228933 - DNA, 15 bp, Homo sapiens
tgactgagccttctc

SEQ ID NO: 1228934 - DNA, 15 bp, Homo sapiens
gtgactgagccttct

SEQ ID NO: 1228935 - DNA, 15 bp, Homo sapiens
agtgactgagccttc

SEQ ID NO: 1228936 - DNA, 15 bp, Homo sapiens
cgagtgactgagcct

SEQ ID NO: 1228937 - DNA, 15 bp, Homo sapiens
gcgagtgactgagcc

SEQ ID NO: 1228938 - DNA, 15 bp, Homo sapiens
tgcgagtgactgagc

SEQ ID NO: 1228939 - DNA, 15 bp, Homo sapiens
ctgcgagtgactgag

SEQ ID NO: 1228940 - DNA, 15 bp, Homo sapiens
gctgcgagtgactga

SEQ ID NO: 1228941 - DNA, 15 bp, Homo sapiens
ggctgcgagtgactg

SEQ ID NO: 1228942 - DNA, 15 bp, Homo sapiens
gggctgcgagtgact

SEQ ID NO: 1228943 - DNA, 15 bp, Homo sapiens
agggctgcgagtgac

SEQ ID NO: 1228944 - DNA, 15 bp, Homo sapiens
cagggctgcgagtga

SEQ ID NO: 1228945 - DNA, 15 bp, Homo sapiens
acagggctgcgagtg

SEQ ID NO: 1228946 - DNA, 15 bp, Homo sapiens
aacagggctgcgagt

SEQ ID NO: 1228947 - DNA, 15 bp, Homo sapiens
aaacagggctgcgag

SEQ ID NO: 1228948 - DNA, 15 bp, Homo sapiens
gaaacagggctgcga

SEQ ID NO: 1228949 - DNA, 15 bp, Homo sapiens
agaaacagggctgcg

SEQ ID NO: 1228950 - DNA, 15 bp, Homo sapiens
tagaaacagggctgc

SEQ ID NO: 1228951 - DNA, 15 bp, Homo sapiens
ctagaaacagggctg

SEQ ID NO: 1228952 - DNA, 15 bp, Homo sapiens
tctagaaacagggct

SEQ ID NO: 1228953 - DNA, 15 bp, Homo sapiens
ttctagaaacagggc

SEQ ID NO: 1228954 - DNA, 15 bp, Homo sapiens
tttctagaaacaggg

SEQ ID NO: 1228955 - DNA, 15 bp, Homo sapiens
ttttctagaaacagg

SEQ ID NO: 1228956 - DNA, 15 bp, Homo sapiens
tttttctagaaacag

SEQ ID NO: 1228957 - DNA, 15 bp, Homo sapiens
ctttttctagaaaca

SEQ ID NO: 1228958 - DNA, 15 bp, Homo sapiens
actttttctagaaac

SEQ ID NO: 1228959 - DNA, 15 bp, Homo sapiens
cactttttctagaaa

SEQ ID NO: 1228960 - DNA, 15 bp, Homo sapiens
gcactttttctagaa

SEQ ID NO: 1228961 - DNA, 15 bp, Homo sapiens
cgcactttttctaga

SEQ ID NO: 1228962 - DNA, 15 bp, Homo sapiens
acgcactttttctag

SEQ ID NO: 1228963 - DNA, 15 bp, Homo sapiens
cacgcactttttcta

SEQ ID NO: 1228964 - DNA, 15 bp, Homo sapiens
tcacgcactttttct

SEQ ID NO: 1228965 - DNA, 15 bp, Homo sapiens
gtcacgcactttttc

SEQ ID NO: 1228966 - DNA, 15 bp, Homo sapiens
agtcacgcacttttt

SEQ ID NO: 1228967 - DNA, 15 bp, Homo sapiens
aagtcacgcactttt

SEQ ID NO: 1228968 - DNA, 15 bp, Homo sapiens
taagtcacgcacttt

SEQ ID NO: 1228969 - DNA, 15 bp, Homo sapiens
ctaagtcacgcactt

SEQ ID NO: 1228970 - DNA, 15 bp, Homo sapiens
tctaagtcacgcact

SEQ ID NO: 1228971 - DNA, 15 bp, Homo sapiens
atctaagtcacgcac

SEQ ID NO: 1228972 - DNA, 15 bp, Homo sapiens
catctaagtcacgca

SEQ ID NO: 1228973 - DNA, 15 bp, Homo sapiens
tcatctaagtcacgc

SEQ ID NO: 1228974 - DNA, 15 bp, Homo sapiens
gtcatctaagtcacg

SEQ ID NO: 1228975 - DNA, 15 bp, Homo sapiens
agtcatctaagtcac

SEQ ID NO: 1228976 - DNA, 15 bp, Homo sapiens
aagtcatctaagtca

SEQ ID NO: 1228977 - DNA, 15 bp, Homo sapiens
aaagtcatctaagtc

SEQ ID NO: 1228978 - DNA, 15 bp, Homo sapiens
gaaagtcatctaagt

SEQ ID NO: 1228979 - DNA, 15 bp, Homo sapiens
agaaagtcatctaag

SEQ ID NO: 1228980 - DNA, 15 bp, Homo sapiens
tagaaagtcatctaa

SEQ ID NO: 1228981 - DNA, 15 bp, Homo sapiens
atagaaagtcatcta

SEQ ID NO: 1228982 - DNA, 15 bp, Homo sapiens
catagaaagtcatct

SEQ ID NO: 1228983 - DNA, 15 bp, Homo sapiens
ccatagaaagtcatc

SEQ ID NO: 1228984 - DNA, 15 bp, Homo sapiens
tccatagaaagtcat

SEQ ID NO: 1228985 - DNA, 15 bp, Homo sapiens
ttccatagaaagtca

SEQ ID NO: 1228986 - DNA, 15 bp, Homo sapiens
tttccatagaaagtc

SEQ ID NO: 1228987 - DNA, 15 bp, Homo sapiens
ctttccatagaaagt

SEQ ID NO: 1228988 - DNA, 15 bp, Homo sapiens
gctttccatagaaag

SEQ ID NO: 1228989 - DNA, 15 bp, Homo sapiens
tgctttccatagaaa

SEQ ID NO: 1228990 - DNA, 15 bp, Homo sapiens
ctgctttccatagaa

SEQ ID NO: 1228991 - DNA, 15 bp, Homo sapiens
tctgctttccataga

SEQ ID NO: 1228992 - DNA, 15 bp, Homo sapiens
ctctgctttccatag

SEQ ID NO: 1228993 - DNA, 15 bp, Homo sapiens
tctctgctttccata

SEQ ID NO: 1228994 - DNA, 15 bp, Homo sapiens
gtctctgctttccat

SEQ ID NO: 1228995 - DNA, 15 bp, Homo sapiens
cgtctctgctttcca

SEQ ID NO: 1228996 - DNA, 15 bp, Homo sapiens
tcgtctctgctttcc

SEQ ID NO: 1228997 - DNA, 15 bp, Homo sapiens
ttcgtctctgctttc

SEQ ID NO: 1228998 - DNA, 15 bp, Homo sapiens
cttcgtctctgcttt

SEQ ID NO: 1228999 - DNA, 15 bp, Homo sapiens
ccttcgtctctgctt

SEQ ID NO: 1229000 - DNA, 15 bp, Homo sapiens
tccttcgtctctgct

SEQ ID NO: 1229001 - DNA, 15 bp, Homo sapiens
atccttcgtctctgc

SEQ ID NO: 1229002 - DNA, 15 bp, Homo sapiens
gatccttcgtctctg

SEQ ID NO: 1229003 - DNA, 15 bp, Homo sapiens
agatccttcgtctct

SEQ ID NO: 1229004 - DNA, 15 bp, Homo sapiens
aagatccttcgtctc

SEQ ID NO: 1229005 - DNA, 15 bp, Homo sapiens
caagatccttcgtct

SEQ ID NO: 1229006 - DNA, 15 bp, Homo sapiens
tcaagatccttcgtc

SEQ ID NO: 1229007 - DNA, 15 bp, Homo sapiens
gtcaagatccttcgt

SEQ ID NO: 1229008 - DNA, 15 bp, Homo sapiens
cgtcaagatccttcg

SEQ ID NO: 1229009 - DNA, 15 bp, Homo sapiens
tcgtcaagatccttc

SEQ ID NO: 1229010 - DNA, 15 bp, Homo sapiens
ctcgtcaagatcctt

SEQ ID NO: 1229011 - DNA, 15 bp, Homo sapiens
cctcgtcaagatcct

SEQ ID NO: 1229012 - DNA, 15 bp, Homo sapiens
tcctcgtcaagatcc

SEQ ID NO: 1229013 - DNA, 15 bp, Homo sapiens
gtcctcgtcaagatc

SEQ ID NO: 1229014 - DNA, 15 bp, Homo sapiens
tgtcctcgtcaagat

SEQ ID NO: 1229015 - DNA, 15 bp, Homo sapiens
gtgtcctcgtcaaga

SEQ ID NO: 1229016 - DNA, 15 bp, Homo sapiens
ggtgtcctcgtcaag

SEQ ID NO: 1229017 - DNA, 15 bp, Homo sapiens
aggtgtcctcgtcaa

SEQ ID NO: 1229018 - DNA, 15 bp, Homo sapiens
caggtgtcctcgtca

SEQ ID NO: 1229019 - DNA, 15 bp, Homo sapiens
acaggtgtcctcgtc

SEQ ID NO: 1229020 - DNA, 15 bp, Homo sapiens
cacaggtgtcctcgt

SEQ ID NO: 1229021 - DNA, 15 bp, Homo sapiens
acacaggtgtcctcg

SEQ ID NO: 1229022 - DNA, 15 bp, Homo sapiens
cacacaggtgtcctc

SEQ ID NO: 1229023 - DNA, 15 bp, Homo sapiens
ccacacaggtgtcct

SEQ ID NO: 1229024 - DNA, 15 bp, Homo sapiens
tccacacaggtgtcc

SEQ ID NO: 1229025 - DNA, 15 bp, Homo sapiens
ttccacacaggtgtc

SEQ ID NO: 1229026 - DNA, 15 bp, Homo sapiens
tttccacacaggtgt

SEQ ID NO: 1229027 - DNA, 15 bp, Homo sapiens
ctttccacacaggtg

SEQ ID NO: 1229028 - DNA, 15 bp, Homo sapiens
cctttccacacaggt

SEQ ID NO: 1229029 - DNA, 15 bp, Homo sapiens
acctttccacacagg

SEQ ID NO: 1229030 - DNA, 15 bp, Homo sapiens
tacctttccacacag

SEQ ID NO: 1229031 - DNA, 15 bp, Homo sapiens
ttacctttccacaca

SEQ ID NO: 1229032 - DNA, 15 bp, Homo sapiens
cttacctttccacac

SEQ ID NO: 1229033 - DNA, 15 bp, Homo sapiens
ccttacctttccaca

SEQ ID NO: 1229034 - DNA, 15 bp, Homo sapiens
accttacctttccac

SEQ ID NO: 1229035 - DNA, 15 bp, Homo sapiens
caccttacctttcca

SEQ ID NO: 1229036 - DNA, 15 bp, Homo sapiens
ccaccttacctttcc

SEQ ID NO: 1229037 - DNA, 15 bp, Homo sapiens
gccaccttacctttc

SEQ ID NO: 1229038 - DNA, 15 bp, Homo sapiens
tgccaccttaccttt

SEQ ID NO: 1229039 - DNA, 15 bp, Homo sapiens
ctgccaccttacctt

SEQ ID NO: 1229040 - DNA, 15 bp, Homo sapiens
cctgccaccttacct

SEQ ID NO: 1229041 - DNA, 15 bp, Homo sapiens
gcctgccaccttacc

SEQ ID NO: 1229042 - DNA, 15 bp, Homo sapiens
cgcctgccaccttac

SEQ ID NO: 1229043 - DNA, 15 bp, Homo sapiens
tcgcctgccacctta

SEQ ID NO: 1229044 - DNA, 15 bp, Homo sapiens
gtcgcctgccacctt

SEQ ID NO: 1229045 - DNA, 15 bp, Homo sapiens
agtcgcctgccacct

SEQ ID NO: 1229046 - DNA, 15 bp, Homo sapiens
gagtcgcctgccacc

SEQ ID NO: 1229047 - DNA, 15 bp, Homo sapiens
agagtcgcctgccac

SEQ ID NO: 1229048 - DNA, 15 bp, Homo sapiens
cagagtcgcctgcca

SEQ ID NO: 1229049 - DNA, 15 bp, Homo sapiens
tcagagtcgcctgcc

SEQ ID NO: 1229050 - DNA, 15 bp, Homo sapiens
ctcagagtcgcctgc

SEQ ID NO: 1229051 - DNA, 15 bp, Homo sapiens
tctcagagtcgcctg

SEQ ID NO: 1229052 - DNA, 15 bp, Homo sapiens
ctctcagagtcgcct

SEQ ID NO: 1229053 - DNA, 15 bp, Homo sapiens
cctctcagagtcgcc

SEQ ID NO: 1229054 - DNA, 15 bp, Homo sapiens
tcctctcagagtcgc

SEQ ID NO: 1229055 - DNA, 15 bp, Homo sapiens
ctcctctcagagtcg

SEQ ID NO: 1229056 - DNA, 15 bp, Homo sapiens
tctcctctcagagtc

SEQ ID NO: 1229057 - DNA, 15 bp, Homo sapiens
ctctcctctcagagt

SEQ ID NO: 1229058 - DNA, 15 bp, Homo sapiens
gctctcctctcagag

SEQ ID NO: 1229059 - DNA, 15 bp, Homo sapiens
agctctcctctcaga

SEQ ID NO: 1229060 - DNA, 15 bp, Homo sapiens
gagctctcctctcag

SEQ ID NO: 1229061 - DNA, 15 bp, Homo sapiens
ggagctctcctctca

SEQ ID NO: 1229062 - DNA, 15 bp, Homo sapiens
gggagctctcctctc

SEQ ID NO: 1229063 - DNA, 15 bp, Homo sapiens
agggagctctcctct

SEQ ID NO: 1229064 - DNA, 15 bp, Homo sapiens
cagggagctctcctc

SEQ ID NO: 1229065 - DNA, 15 bp, Homo sapiens
gcagggagctctcct

SEQ ID NO: 1229066 - DNA, 15 bp, Homo sapiens
tgcagggagctctcc

SEQ ID NO: 1229067 - DNA, 15 bp, Homo sapiens
ctgcagggagctctc

SEQ ID NO: 1229068 - DNA, 15 bp, Homo sapiens
tctgcagggagctct

SEQ ID NO: 1229069 - DNA, 15 bp, Homo sapiens
ttctgcagggagctc

SEQ ID NO: 1229070 - DNA, 15 bp, Homo sapiens
cttctgcagggagct

SEQ ID NO: 1229071 - DNA, 15 bp, Homo sapiens
ccttctgcagggagc

SEQ ID NO: 1229072 - DNA, 15 bp, Homo sapiens
accttctgcagggag

SEQ ID NO: 1229073 - DNA, 15 bp, Homo sapiens
caccttctgcaggga

SEQ ID NO: 1229074 - DNA, 15 bp, Homo sapiens
ccaccttctgcaggg

SEQ ID NO: 1229075 - DNA, 15 bp, Homo sapiens
gccaccttctgcagg

SEQ ID NO: 1229076 - DNA, 15 bp, Homo sapiens
agccaccttctgcag

SEQ ID NO: 1229077 - DNA, 15 bp, Homo sapiens
cagccaccttctgca

SEQ ID NO: 1229078 - DNA, 15 bp, Homo sapiens
gcagccaccttctgc

SEQ ID NO: 1229079 - DNA, 15 bp, Homo sapiens
ggcagccaccttctg

SEQ ID NO: 1229080 - DNA, 15 bp, Homo sapiens
gggcagccaccttct

SEQ ID NO: 1229081 - DNA, 15 bp, Homo sapiens
ggggcagccaccttc

SEQ ID NO: 1229082 - DNA, 15 bp, Homo sapiens
gggggcagccacctt

SEQ ID NO: 1229083 - DNA, 15 bp, Homo sapiens
tgggggcagccacct

SEQ ID NO: 1229084 - DNA, 15 bp, Homo sapiens
atgggggcagccacc

SEQ ID NO: 1229085 - DNA, 15 bp, Homo sapiens
catgggggcagccac

SEQ ID NO: 1229086 - DNA, 15 bp, Homo sapiens
tcatgggggcagcca

SEQ ID NO: 1229087 - DNA, 15 bp, Homo sapiens
gtcatgggggcagcc

SEQ ID NO: 1229088 - DNA, 15 bp, Homo sapiens
ggtcatgggggcagc

SEQ ID NO: 1229089 - DNA, 15 bp, Homo sapiens
aggtcatgggggcag

SEQ ID NO: 1229090 - DNA, 15 bp, Homo sapiens
caggtcatgggggca

SEQ ID NO: 1229091 - DNA, 15 bp, Homo sapiens
ccaggtcatgggggc

SEQ ID NO: 1229092 - DNA, 15 bp, Homo sapiens
gccaggtcatggggg

SEQ ID NO: 1229093 - DNA, 15 bp, Homo sapiens
ggccaggtcatgggg

SEQ ID NO: 1229094 - DNA, 15 bp, Homo sapiens
tggccaggtcatggg

SEQ ID NO: 1229095 - DNA, 15 bp, Homo sapiens
gtggccaggtcatgg

SEQ ID NO: 1229096 - DNA, 15 bp, Homo sapiens
tgtggccaggtcatg

SEQ ID NO: 1229097 - DNA, 15 bp, Homo sapiens
atgtggccaggtcat

SEQ ID NO: 1229098 - DNA, 15 bp, Homo sapiens
gatgtggccaggtca

SEQ ID NO: 1229099 - DNA, 15 bp, Homo sapiens
agatgtggccaggtc

SEQ ID NO: 1229100 - DNA, 15 bp, Homo sapiens
aagatgtggccaggt

SEQ ID NO: 1229101 - DNA, 15 bp, Homo sapiens
gaagatgtggccagg

SEQ ID NO: 1229102 - DNA, 15 bp, Homo sapiens
agaagatgtggccag

SEQ ID NO: 1229103 - DNA, 15 bp, Homo sapiens
cagaagatgtggcca

SEQ ID NO: 1229104 - DNA, 15 bp, Homo sapiens
gcagaagatgtggcc

SEQ ID NO: 1229105 - DNA, 15 bp, Homo sapiens
ggcagaagatgtggc

SEQ ID NO: 1229106 - DNA, 15 bp, Homo sapiens
aggcagaagatgtgg

SEQ ID NO: 1229107 - DNA, 15 bp, Homo sapiens
gaggcagaagatgtg

SEQ ID NO: 1229108 - DNA, 15 bp, Homo sapiens
ggaggcagaagatgt

SEQ ID NO: 1229109 - DNA, 15 bp, Homo sapiens
gggaggcagaagatg

SEQ ID NO: 1229110 - DNA, 15 bp, Homo sapiens
tgggaggcagaagat

SEQ ID NO: 1229111 - DNA, 15 bp, Homo sapiens
ctgggaggcagaaga

SEQ ID NO: 1229112 - DNA, 15 bp, Homo sapiens
gctgggaggcagaag

SEQ ID NO: 1229113 - DNA, 15 bp, Homo sapiens
tgctgggaggcagaa

SEQ ID NO: 1229114 - DNA, 15 bp, Homo sapiens
ctgctgggaggcaga

SEQ ID NO: 1229115 - DNA, 15 bp, Homo sapiens
gctgctgggaggcag

SEQ ID NO: 1229116 - DNA, 15 bp, Homo sapiens
cgctgctgggaggca

SEQ ID NO: 1229117 - DNA, 15 bp, Homo sapiens
acgctgctgggaggc

SEQ ID NO: 1229118 - DNA, 15 bp, Homo sapiens
cacgctgctgggagg

SEQ ID NO: 1229119 - DNA, 15 bp, Homo sapiens
tcacgctgctgggag

SEQ ID NO: 1229120 - DNA, 15 bp, Homo sapiens
gtcacgctgctggga

SEQ ID NO: 1229121 - DNA, 15 bp, Homo sapiens
ggtcacgctgctggg

SEQ ID NO: 1229122 - DNA, 15 bp, Homo sapiens
gggtcacgctgctgg

SEQ ID NO: 1229123 - DNA, 15 bp, Homo sapiens
ggggtcacgctgctg

SEQ ID NO: 1229124 - DNA, 15 bp, Homo sapiens
tggggtcacgctgct

SEQ ID NO: 1229125 - DNA, 15 bp, Homo sapiens
gtggggtcacgctgc

SEQ ID NO: 1229126 - DNA, 15 bp, Homo sapiens
agtggggtcacgctg

SEQ ID NO: 1229127 - DNA, 15 bp, Homo sapiens
tagtggggtcacgct

SEQ ID NO: 1229128 - DNA, 15 bp, Homo sapiens
ctagtggggtcacgc

SEQ ID NO: 1229129 - DNA, 15 bp, Homo sapiens
tctagtggggtcacg

SEQ ID NO: 1229130 - DNA, 15 bp, Homo sapiens
gtctagtggggtcac

SEQ ID NO: 1229131 - DNA, 15 bp, Homo sapiens
tgtctagtggggtca

SEQ ID NO: 1229132 - DNA, 15 bp, Homo sapiens
gtgtctagtggggtc

SEQ ID NO: 1229133 - DNA, 15 bp, Homo sapiens
ggtgtctagtggggt

SEQ ID NO: 1229134 - DNA, 15 bp, Homo sapiens
tggtgtctagtgggg

SEQ ID NO: 1229135 - DNA, 15 bp, Homo sapiens
ttggtgtctagtggg

SEQ ID NO: 1229136 - DNA, 15 bp, Homo sapiens
gttggtgtctagtgg

SEQ ID NO: 1229137 - DNA, 15 bp, Homo sapiens
agttggtgtctagtg

SEQ ID NO: 1229138 - DNA, 15 bp, Homo sapiens
cagttggtgtctagt

SEQ ID NO: 1229139 - DNA, 15 bp, Homo sapiens
gcagttggtgtctag

SEQ ID NO: 1229140 - DNA, 15 bp, Homo sapiens
ggcagttggtgtcta

SEQ ID NO: 1229141 - DNA, 15 bp, Homo sapiens
aggcagttggtgtct

SEQ ID NO: 1229142 - DNA, 15 bp, Homo sapiens
gaggcagttggtgtc

SEQ ID NO: 1229143 - DNA, 15 bp, Homo sapiens
ggaggcagttggtgt

SEQ ID NO: 1229144 - DNA, 15 bp, Homo sapiens
gggaggcagttggtg

SEQ ID NO: 1229145 - DNA, 15 bp, Homo sapiens
cgggaggcagttggt

SEQ ID NO: 1229146 - DNA, 15 bp, Homo sapiens
tcgggaggcagttgg

SEQ ID NO: 1229147 - DNA, 15 bp, Homo sapiens
ctcgggaggcagttg

SEQ ID NO: 1229148 - DNA, 15 bp, Homo sapiens
actcgggaggcagtt

SEQ ID NO: 1229149 - DNA, 15 bp, Homo sapiens
gactcgggaggcagt

SEQ ID NO: 1229150 - DNA, 15 bp, Homo sapiens
ggactcgggaggcag

SEQ ID NO: 1229151 - DNA, 15 bp, Homo sapiens
aggactcgggaggca

SEQ ID NO: 1229152 - DNA, 15 bp, Homo sapiens
taggactcgggaggc

SEQ ID NO: 1229153 - DNA, 15 bp, Homo sapiens
gtaggactcgggagg

SEQ ID NO: 1229154 - DNA, 15 bp, Homo sapiens
cgtaggactcgggag

SEQ ID NO: 1229155 - DNA, 15 bp, Homo sapiens
tcgtaggactcggga

SEQ ID NO: 1229156 - DNA, 15 bp, Homo sapiens
ttcgtaggactcggg

SEQ ID NO: 1229157 - DNA, 15 bp, Homo sapiens
cttcgtaggactcgg

SEQ ID NO: 1229158 - DNA, 15 bp, Homo sapiens
tcttcgtaggactcg

SEQ ID NO: 1229159 - DNA, 15 bp, Homo sapiens
atcttcgtaggactc

SEQ ID NO: 1229160 - DNA, 15 bp, Homo sapiens
catcttcgtaggact

SEQ ID NO: 1229161 - DNA, 15 bp, Homo sapiens
gcatcttcgtaggac

SEQ ID NO: 1229162 - DNA, 15 bp, Homo sapiens
ggcatcttcgtagga

SEQ ID NO: 1229163 - DNA, 15 bp, Homo sapiens
aggcatcttcgtagg

SEQ ID NO: 1229164 - DNA, 15 bp, Homo sapiens
caggcatcttcgtag

SEQ ID NO: 1229165 - DNA, 15 bp, Homo sapiens
ccaggcatcttcgta

SEQ ID NO: 1229166 - DNA, 15 bp, Homo sapiens
cccaggcatcttcgt

SEQ ID NO: 1229167 - DNA, 15 bp, Homo sapiens
ccccaggcatcttcg

SEQ ID NO: 1229168 - DNA, 15 bp, Homo sapiens
gccccaggcatcttc

SEQ ID NO: 1229169 - DNA, 15 bp, Homo sapiens
cgccccaggcatctt

SEQ ID NO: 1229170 - DNA, 15 bp, Homo sapiens
ccgccccaggcatct

SEQ ID NO: 1229171 - DNA, 15 bp, Homo sapiens
accgccccaggcatc

SEQ ID NO: 1229172 - DNA, 15 bp, Homo sapiens
caccgccccaggcat

SEQ ID NO: 1229173 - DNA, 15 bp, Homo sapiens
gcaccgccccaggca

SEQ ID NO: 1229174 - DNA, 15 bp, Homo sapiens
tgcaccgccccaggc

SEQ ID NO: 1229175 - DNA, 15 bp, Homo sapiens
ctgcaccgccccagg

SEQ ID NO: 1229176 - DNA, 15 bp, Homo sapiens
gctgcaccgccccag

SEQ ID NO: 1229177 - DNA, 15 bp, Homo sapiens
tgctgcaccgcccca

SEQ ID NO: 1229178 - DNA, 15 bp, Homo sapiens
ctgctgcaccgcccc

SEQ ID NO: 1229179 - DNA, 15 bp, Homo sapiens
actgctgcaccgccc

SEQ ID NO: 1229180 - DNA, 15 bp, Homo sapiens
aactgctgcaccgcc

SEQ ID NO: 1229181 - DNA, 15 bp, Homo sapiens
aaactgctgcaccgc

SEQ ID NO: 1229182 - DNA, 15 bp, Homo sapiens
taaactgctgcaccg

SEQ ID NO: 1229183 - DNA, 15 bp, Homo sapiens
gtaaactgctgcacc

SEQ ID NO: 1229184 - DNA, 15 bp, Homo sapiens
cgtaaactgctgcac

SEQ ID NO: 1229185 - DNA, 15 bp, Homo sapiens
tcgtaaactgctgca

SEQ ID NO: 1229186 - DNA, 15 bp, Homo sapiens
gtcgtaaactgctgc

SEQ ID NO: 1229187 - DNA, 15 bp, Homo sapiens
cgtcgtaaactgctg

SEQ ID NO: 1229188 - DNA, 15 bp, Homo sapiens
gcgtcgtaaactgct

SEQ ID NO: 1229189 - DNA, 15 bp, Homo sapiens
agcgtcgtaaactgc

SEQ ID NO: 1229190 - DNA, 15 bp, Homo sapiens
cagcgtcgtaaactg

SEQ ID NO: 1229191 - DNA, 15 bp, Homo sapiens
tcagcgtcgtaaact

SEQ ID NO: 1229192 - DNA, 15 bp, Homo sapiens
atcagcgtcgtaaac

SEQ ID NO: 1229193 - DNA, 15 bp, Homo sapiens
gatcagcgtcgtaaa

SEQ ID NO: 1229194 - DNA, 15 bp, Homo sapiens
ggatcagcgtcgtaa

SEQ ID NO: 1229195 - DNA, 15 bp, Homo sapiens
cggatcagcgtcgta

SEQ ID NO: 1229196 - DNA, 15 bp, Homo sapiens
ccggatcagcgtcgt

SEQ ID NO: 1229197 - DNA, 15 bp, Homo sapiens
accggatcagcgtcg

SEQ ID NO: 1229198 - DNA, 15 bp, Homo sapiens
taccggatcagcgtc

SEQ ID NO: 1229199 - DNA, 15 bp, Homo sapiens
ttaccggatcagcgt

SEQ ID NO: 1229200 - DNA, 15 bp, Homo sapiens
attaccggatcagcg

SEQ ID NO: 1229201 - DNA, 15 bp, Homo sapiens
aattaccggatcagc

SEQ ID NO: 1229202 - DNA, 15 bp, Homo sapiens
taattaccggatcag

SEQ ID NO: 1229203 - DNA, 15 bp, Homo sapiens
ataattaccggatca

SEQ ID NO: 1229204 - DNA, 15 bp, Homo sapiens
gataattaccggatc

SEQ ID NO: 1229205 - DNA, 15 bp, Homo sapiens
agataattaccggat

SEQ ID NO: 1229206 - DNA, 15 bp, Homo sapiens
cagataattaccgga

SEQ ID NO: 1229207 - DNA, 15 bp, Homo sapiens
acagataattaccgg

SEQ ID NO: 1229208 - DNA, 15 bp, Homo sapiens
gacagataattaccg

SEQ ID NO: 1229209 - DNA, 15 bp, Homo sapiens
tgacagataattacc

SEQ ID NO: 1229210 - DNA, 15 bp, Homo sapiens
atgacagataattac

SEQ ID NO: 1229211 - DNA, 15 bp, Homo sapiens
aatgacagataatta

SEQ ID NO: 1229212 - DNA, 15 bp, Homo sapiens
aaatgacagataatt

SEQ ID NO: 1229213 - DNA, 15 bp, Homo sapiens
aaaatgacagataat

SEQ ID NO: 1229214 - DNA, 15 bp, Homo sapiens
taaaatgacagataa

SEQ ID NO: 1229215 - DNA, 15 bp, Homo sapiens
ataaaatgacagata

SEQ ID NO: 1229216 - DNA, 15 bp, Homo sapiens
aataaaatgacagat

SEQ ID NO: 1229217 - DNA, 15 bp, Homo sapiens
taataaaatgacaga

SEQ ID NO: 1229218 - DNA, 15 bp, Homo sapiens
gtaataaaatgacag

SEQ ID NO: 1229219 - DNA, 15 bp, Homo sapiens
agtaataaaatgaca

SEQ ID NO: 1229220 - DNA, 15 bp, Homo sapiens
cagtaataaaatgac

SEQ ID NO: 1229221 - DNA, 15 bp, Homo sapiens
tcagtaataaaatga

SEQ ID NO: 1229222 - DNA, 15 bp, Homo sapiens
ttcagtaataaaatg

SEQ ID NO: 1229223 - DNA, 15 bp, Homo sapiens
gttcagtaataaaat

SEQ ID NO: 1229224 - DNA, 15 bp, Homo sapiens
ggttcagtaataaaa

SEQ ID NO: 1229225 - DNA, 15 bp, Homo sapiens
gggttcagtaataaa

SEQ ID NO: 1229226 - DNA, 15 bp, Homo sapiens
cgggttcagtaataa

SEQ ID NO: 1229227 - DNA, 15 bp, Homo sapiens
gcgggttcagtaata

SEQ ID NO: 1229228 - DNA, 15 bp, Homo sapiens
ggcgggttcagtaat

SEQ ID NO: 1229229 - DNA, 15 bp, Homo sapiens
gggcgggttcagtaa

SEQ ID NO: 1229230 - DNA, 15 bp, Homo sapiens
ggggcgggttcagta

SEQ ID NO: 1229231 - DNA, 15 bp, Homo sapiens
gggggcgggttcagt

SEQ ID NO: 1229232 - DNA, 15 bp, Homo sapiens
ggggggcgggttcag

SEQ ID NO: 1229233 - DNA, 15 bp, Homo sapiens
aggggggcgggttca

SEQ ID NO: 1229234 - DNA, 15 bp, Homo sapiens
caggggggcgggttc

SEQ ID NO: 1229235 - DNA, 15 bp, Homo sapiens
gcaggggggcgggtt

SEQ ID NO: 1229236 - DNA, 15 bp, Homo sapiens
ggcaggggggcgggt

SEQ ID NO: 1229237 - DNA, 15 bp, Homo sapiens
gggcaggggggcggg

SEQ ID NO: 1229238 - DNA, 15 bp, Homo sapiens
tgggcaggggggcgg

SEQ ID NO: 1229239 - DNA, 15 bp, Homo sapiens
ttgggcaggggggcg

SEQ ID NO: 1229240 - DNA, 15 bp, Homo sapiens
cttgggcaggggggc

SEQ ID NO: 1229241 - DNA, 15 bp, Homo sapiens
acttgggcagggggg

SEQ ID NO: 1229242 - DNA, 15 bp, Homo sapiens
gacttgggcaggggg

SEQ ID NO: 1229243 - DNA, 15 bp, Homo sapiens
agacttgggcagggg

SEQ ID NO: 1229244 - DNA, 15 bp, Homo sapiens
aagacttgggcaggg

SEQ ID NO: 1229245 - DNA, 15 bp, Homo sapiens
aaagacttgggcagg

SEQ ID NO: 1229246 - DNA, 15 bp, Homo sapiens
caaagacttgggcag

SEQ ID NO: 1229247 - DNA, 15 bp, Homo sapiens
acaaagacttgggca

SEQ ID NO: 1229248 - DNA, 15 bp, Homo sapiens
tacaaagacttgggc

SEQ ID NO: 1229249 - DNA, 15 bp, Homo sapiens
atacaaagacttggg

SEQ ID NO: 1229250 - DNA, 15 bp, Homo sapiens
tatacaaagacttgg

SEQ ID NO: 1229251 - DNA, 15 bp, Homo sapiens
atatacaaagacttg

SEQ ID NO: 1229252 - DNA, 15 bp, Homo sapiens
gatatacaaagactt

SEQ ID NO: 1229253 - DNA, 15 bp, Homo sapiens
tgatatacaaagact

SEQ ID NO: 1229254 - DNA, 15 bp, Homo sapiens
gtgatatacaaagac

SEQ ID NO: 1229255 - DNA, 15 bp, Homo sapiens
tgtgatatacaaaga

SEQ ID NO: 1229256 - DNA, 15 bp, Homo sapiens
atgtgatatacaaag

SEQ ID NO: 1229257 - DNA, 15 bp, Homo sapiens
aatgtgatatacaaa

SEQ ID NO: 1229258 - DNA, 15 bp, Homo sapiens
taatgtgatatacaa

SEQ ID NO: 1229259 - DNA, 15 bp, Homo sapiens
ttaatgtgatataca

SEQ ID NO: 1229260 - DNA, 15 bp, Homo sapiens
cttaatgtgatatac

SEQ ID NO: 1229261 - DNA, 15 bp, Homo sapiens
gcttaatgtgatata

SEQ ID NO: 1229262 - DNA, 15 bp, Homo sapiens
ggcttaatgtgatat

SEQ ID NO: 1229263 - DNA, 15 bp, Homo sapiens
gggcttaatgtgata

SEQ ID NO: 1229264 - DNA, 15 bp, Homo sapiens
agggcttaatgtgat

SEQ ID NO: 1229265 - DNA, 15 bp, Homo sapiens
aagggcttaatgtga

SEQ ID NO: 1229266 - DNA, 15 bp, Homo sapiens
aaagggcttaatgtg

SEQ ID NO: 1229267 - DNA, 15 bp, Homo sapiens
gaaagggcttaatgt

SEQ ID NO: 1229268 - DNA, 15 bp, Homo sapiens
agaaagggcttaatg

SEQ ID NO: 1229269 - DNA, 15 bp, Homo sapiens
tagaaagggcttaat

SEQ ID NO: 1229270 - DNA, 15 bp, Homo sapiens
atagaaagggcttaa

SEQ ID NO: 1229271 - DNA, 15 bp, Homo sapiens
aatagaaagggctta

SEQ ID NO: 1229272 - DNA, 15 bp, Homo sapiens
taatagaaagggctt

SEQ ID NO: 1229273 - DNA, 15 bp, Homo sapiens
ttaatagaaagggct

SEQ ID NO: 1229274 - DNA, 15 bp, Homo sapiens
tttaatagaaagggc

SEQ ID NO: 1229275 - DNA, 15 bp, Homo sapiens
ctttaatagaaaggg

SEQ ID NO: 1229276 - DNA, 15 bp, Homo sapiens
actttaatagaaagg

SEQ ID NO: 1229277 - DNA, 15 bp, Homo sapiens
cactttaatagaaag

SEQ ID NO: 1229278 - DNA, 15 bp, Homo sapiens
tcactttaatagaaa

SEQ ID NO: 1229279 - DNA, 15 bp, Homo sapiens
ttcactttaatagaa

SEQ ID NO: 1229280 - DNA, 15 bp, Homo sapiens
attcactttaataga

SEQ ID NO: 1229281 - DNA, 15 bp, Homo sapiens
aattcactttaatag

SEQ ID NO: 1229282 - DNA, 15 bp, Homo sapiens
aaattcactttaata

SEQ ID NO: 1229283 - DNA, 15 bp, Homo sapiens
taaattcactttaat

SEQ ID NO: 1229284 - DNA, 15 bp, Homo sapiens
ttaaattcactttaa

SEQ ID NO: 1229285 - DNA, 15 bp, Homo sapiens
tttaaattcacttta

SEQ ID NO: 1229286 - DNA, 15 bp, Homo sapiens
ctttaaattcacttt

SEQ ID NO: 1229287 - DNA, 15 bp, Homo sapiens
cctttaaattcactt

SEQ ID NO: 1229288 - DNA, 15 bp, Homo sapiens
tcctttaaattcact

SEQ ID NO: 1229289 - DNA, 15 bp, Homo sapiens
ctcctttaaattcac

SEQ ID NO: 1229290 - DNA, 15 bp, Homo sapiens
tctcctttaaattca

SEQ ID NO: 1229291 - DNA, 15 bp, Homo sapiens
ttctcctttaaattc

SEQ ID NO: 1229292 - DNA, 15 bp, Homo sapiens
tttctcctttaaatt

SEQ ID NO: 1229293 - DNA, 15 bp, Homo sapiens
ctttctcctttaaat

SEQ ID NO: 1229294 - DNA, 15 bp, Homo sapiens
actttctcctttaaa

SEQ ID NO: 1229295 - DNA, 15 bp, Homo sapiens
cactttctcctttaa

SEQ ID NO: 1229296 - DNA, 15 bp, Homo sapiens
tcactttctccttta

SEQ ID NO: 1229297 - DNA, 15 bp, Homo sapiens
ctcactttctccttt

SEQ ID NO: 1229298 - DNA, 15 bp, Homo sapiens
tctcactttctcctt

SEQ ID NO: 1229299 - DNA, 15 bp, Homo sapiens
ctctcactttctcct

SEQ ID NO: 1229300 - DNA, 15 bp, Homo sapiens
cctctcactttctcc

SEQ ID NO: 1229301 - DNA, 15 bp, Homo sapiens
acctctcactttctc

SEQ ID NO: 1229302 - DNA, 15 bp, Homo sapiens
tacctctcactttct

SEQ ID NO: 1229303 - DNA, 15 bp, Homo sapiens
ctacctctcactttc

SEQ ID NO: 1229304 - DNA, 15 bp, Homo sapiens
tctacctctcacttt

SEQ ID NO: 1229305 - DNA, 15 bp, Homo sapiens
ctctacctctcactt

SEQ ID NO: 1229306 - DNA, 15 bp, Homo sapiens
actctacctctcact

SEQ ID NO: 1229307 - DNA, 15 bp, Homo sapiens
gactctacctctcac

SEQ ID NO: 1229308 - DNA, 15 bp, Homo sapiens
tgactctacctctca

SEQ ID NO: 1229309 - DNA, 15 bp, Homo sapiens
atgactctacctctc

SEQ ID NO: 1229310 - DNA, 15 bp, Homo sapiens
aatgactctacctct

SEQ ID NO: 1229311 - DNA, 15 bp, Homo sapiens
aaatgactctacctc

SEQ ID NO: 1229312 - DNA, 15 bp, Homo sapiens
caaatgactctacct

SEQ ID NO: 1229313 - DNA, 15 bp, Homo sapiens
tcaaatgactctacc

SEQ ID NO: 1229314 - DNA, 15 bp, Homo sapiens
ttcaaatgactctac

SEQ ID NO: 1229315 - DNA, 15 bp, Homo sapiens
tttcaaatgactcta

SEQ ID NO: 1229316 - DNA, 15 bp, Homo sapiens
ttttcaaatgactct

SEQ ID NO: 1229317 - DNA, 15 bp, Homo sapiens
tttttcaaatgactc

SEQ ID NO: 1229318 - DNA, 15 bp, Homo sapiens
ttttttcaaatgact

SEQ ID NO: 1229319 - DNA, 15 bp, Homo sapiens
tttttttcaaatgac

SEQ ID NO: 1229320 - DNA, 15 bp, Homo sapiens
gtttttttcaaatga

SEQ ID NO: 1229321 - DNA, 15 bp, Homo sapiens
tgtttttttcaaatg

SEQ ID NO: 1229322 - DNA, 15 bp, Homo sapiens
ctgtttttttcaaat

SEQ ID NO: 1229323 - DNA, 15 bp, Homo sapiens
gctgtttttttcaaa

SEQ ID NO: 1229324 - DNA, 15 bp, Homo sapiens
tgctgtttttttcaa

SEQ ID NO: 1229325 - DNA, 15 bp, Homo sapiens
atgctgtttttttca

SEQ ID NO: 1229326 - DNA, 15 bp, Homo sapiens
gatgctgtttttttc

SEQ ID NO: 1229327 - DNA, 15 bp, Homo sapiens
ggatgctgttttttt

SEQ ID NO: 1229328 - DNA, 15 bp, Homo sapiens
tggatgctgtttttt

SEQ ID NO: 1229329 - DNA, 15 bp, Homo sapiens
ctggatgctgttttt

SEQ ID NO: 1229330 - DNA, 15 bp, Homo sapiens
gctggatgctgtttt

SEQ ID NO: 1229331 - DNA, 15 bp, Homo sapiens
tgctggatgctgttt

SEQ ID NO: 1229332 - DNA, 15 bp, Homo sapiens
ctgctggatgctgtt

SEQ ID NO: 1229333 - DNA, 15 bp, Homo sapiens
cctgctggatgctgt

SEQ ID NO: 1229334 - DNA, 15 bp, Homo sapiens
ccctgctggatgctg

SEQ ID NO: 1229335 - DNA, 15 bp, Homo sapiens
gccctgctggatgct

SEQ ID NO: 1229336 - DNA, 15 bp, Homo sapiens
cgccctgctggatgc

SEQ ID NO: 1229337 - DNA, 15 bp, Homo sapiens
acgccctgctggatg

SEQ ID NO: 1229338 - DNA, 15 bp, Homo sapiens
aacgccctgctggat

SEQ ID NO: 1229339 - DNA, 15 bp, Homo sapiens
caacgccctgctgga

SEQ ID NO: 1229340 - DNA, 15 bp, Homo sapiens
ccaacgccctgctgg

SEQ ID NO: 1229341 - DNA, 15 bp, Homo sapiens
accaacgccctgctg

SEQ ID NO: 1229342 - DNA, 15 bp, Homo sapiens
caccaacgccctgct

SEQ ID NO: 1229343 - DNA, 15 bp, Homo sapiens
ccaccaacgccctgc

SEQ ID NO: 1229344 - DNA, 15 bp, Homo sapiens
gccaccaacgccctg

SEQ ID NO: 1229345 - DNA, 15 bp, Homo sapiens
agccaccaacgccct

SEQ ID NO: 1229346 - DNA, 15 bp, Homo sapiens
aagccaccaacgccc

SEQ ID NO: 1229347 - DNA, 15 bp, Homo sapiens
taagccaccaacgcc

SEQ ID NO: 1229348 - DNA, 15 bp, Homo sapiens
ataagccaccaacgc

SEQ ID NO: 1229349 - DNA, 15 bp, Homo sapiens
cataagccaccaacg

SEQ ID NO: 1229350 - DNA, 15 bp, Homo sapiens
gcataagccaccaac

SEQ ID NO: 1229351 - DNA, 15 bp, Homo sapiens
ggcataagccaccaa

SEQ ID NO: 1229352 - DNA, 15 bp, Homo sapiens
aggcataagccacca

SEQ ID NO: 1229353 - DNA, 15 bp, Homo sapiens
caggcataagccacc

SEQ ID NO: 1229354 - DNA, 15 bp, Homo sapiens
acaggcataagccac

SEQ ID NO: 1229355 - DNA, 15 bp, Homo sapiens
tacaggcataagcca

SEQ ID NO: 1229356 - DNA, 15 bp, Homo sapiens
acagcctcccagagt

SEQ ID NO: 1229357 - DNA, 15 bp, Homo sapiens
cacagcctcccagag

SEQ ID NO: 1229358 - DNA, 15 bp, Homo sapiens
ccacagcctcccaga

SEQ ID NO: 1229359 - DNA, 15 bp, Homo sapiens
accacagcctcccag

SEQ ID NO: 1229360 - DNA, 15 bp, Homo sapiens
caccacagcctccca

SEQ ID NO: 1229361 - DNA, 15 bp, Homo sapiens
gcaccacagcctccc

SEQ ID NO: 1229362 - DNA, 15 bp, Homo sapiens
cgcaccacagcctcc

SEQ ID NO: 1229363 - DNA, 15 bp, Homo sapiens
acgcaccacagcctc

SEQ ID NO: 1229364 - DNA, 15 bp, Homo sapiens
cacgcaccacagcct

SEQ ID NO: 1229365 - DNA, 15 bp, Homo sapiens
ccacgcaccacagcc

SEQ ID NO: 1229366 - DNA, 15 bp, Homo sapiens
tccacgcaccacagc

SEQ ID NO: 1229367 - DNA, 15 bp, Homo sapiens
atccacgcaccacag

SEQ ID NO: 1229368 - DNA, 15 bp, Homo sapiens
gatccacgcaccaca

SEQ ID NO: 1229369 - DNA, 15 bp, Homo sapiens
tgatccacgcaccac

SEQ ID NO: 1229370 - DNA, 15 bp, Homo sapiens
gtgatccacgcacca

SEQ ID NO: 1229371 - DNA, 15 bp, Homo sapiens
agtgatccacgcacc

SEQ ID NO: 1229372 - DNA, 15 bp, Homo sapiens
aagtgatccacgcac

SEQ ID NO: 1229373 - DNA, 15 bp, Homo sapiens
taagtgatccacgca

SEQ ID NO: 1229374 - DNA, 15 bp, Homo sapiens
ttaagtgatccacgc

SEQ ID NO: 1229375 - DNA, 15 bp, Homo sapiens
cttaagtgatccacg

SEQ ID NO: 1229376 - DNA, 15 bp, Homo sapiens
acttaagtgatccac

SEQ ID NO: 1229377 - DNA, 15 bp, Homo sapiens
aacttaagtgatcca

SEQ ID NO: 1229378 - DNA, 15 bp, Homo sapiens
gaacttaagtgatcc

SEQ ID NO: 1229379 - DNA, 15 bp, Homo sapiens
tgaacttaagtgatc

SEQ ID NO: 1229380 - DNA, 15 bp, Homo sapiens
ctgaacttaagtgat

SEQ ID NO: 1229381 - DNA, 15 bp, Homo sapiens
cctgaacttaagtga

SEQ ID NO: 1229382 - DNA, 15 bp, Homo sapiens
tcctgaacttaagtg

SEQ ID NO: 1229383 - DNA, 15 bp, Homo sapiens
ctcctgaacttaagt

SEQ ID NO: 1229384 - DNA, 15 bp, Homo sapiens
actcctgaacttaag

SEQ ID NO: 1229385 - DNA, 15 bp, Homo sapiens
aactcctgaacttaa

SEQ ID NO: 1229386 - DNA, 15 bp, Homo sapiens
gaactcctgaactta

SEQ ID NO: 1229387 - DNA, 15 bp, Homo sapiens
cgaactcctgaactt

SEQ ID NO: 1229388 - DNA, 15 bp, Homo sapiens
tcgaactcctgaact

SEQ ID NO: 1229389 - DNA, 15 bp, Homo sapiens
ctcgaactcctgaac

SEQ ID NO: 1229390 - DNA, 15 bp, Homo sapiens
tctcgaactcctgaa

SEQ ID NO: 1229391 - DNA, 15 bp, Homo sapiens
ccttgttgcccaggc

SEQ ID NO: 1229392 - DNA, 15 bp, Homo sapiens
accttgttgcccagg

SEQ ID NO: 1229393 - DNA, 15 bp, Homo sapiens
caccttgttgcccag

SEQ ID NO: 1229394 - DNA, 15 bp, Homo sapiens
tcaccttgttgccca

SEQ ID NO: 1229395 - DNA, 15 bp, Homo sapiens
ttcaccttgttgccc

SEQ ID NO: 1229396 - DNA, 15 bp, Homo sapiens
tttcaccttgttgcc

SEQ ID NO: 1229397 - DNA, 15 bp, Homo sapiens
ctttcaccttgttgc

SEQ ID NO: 1229398 - DNA, 15 bp, Homo sapiens
gctttcaccttgttg

SEQ ID NO: 1229399 - DNA, 15 bp, Homo sapiens
ggctttcaccttgtt

SEQ ID NO: 1229400 - DNA, 15 bp, Homo sapiens
gggctttcaccttgt

SEQ ID NO: 1229401 - DNA, 15 bp, Homo sapiens
tgggctttcaccttg

SEQ ID NO: 1229402 - DNA, 15 bp, Homo sapiens
atgggctttcacctt

SEQ ID NO: 1229403 - DNA, 15 bp, Homo sapiens
gatgggctttcacct

SEQ ID NO: 1229404 - DNA, 15 bp, Homo sapiens
agatgggctttcacc

SEQ ID NO: 1229405 - DNA, 15 bp, Homo sapiens
gagatgggctttcac

SEQ ID NO: 1229406 - DNA, 15 bp, Homo sapiens
agagatgggctttca

SEQ ID NO: 1229407 - DNA, 15 bp, Homo sapiens
tagagatgggctttc

SEQ ID NO: 1229408 - DNA, 15 bp, Homo sapiens
gtagagatgggcttt

SEQ ID NO: 1229409 - DNA, 15 bp, Homo sapiens
tgtagagatgggctt

SEQ ID NO: 1229410 - DNA, 15 bp, Homo sapiens
ttgtagagatgggct

SEQ ID NO: 1229411 - DNA, 15 bp, Homo sapiens
tttgtagagatgggc

SEQ ID NO: 1229412 - DNA, 15 bp, Homo sapiens
ataattttttgtaga

SEQ ID NO: 1229413 - DNA, 15 bp, Homo sapiens
tataattttttgtag

SEQ ID NO: 1229414 - DNA, 15 bp, Homo sapiens
ttataattttttgta

SEQ ID NO: 1229415 - DNA, 15 bp, Homo sapiens
tttataattttttgt

SEQ ID NO: 1229416 - DNA, 15 bp, Homo sapiens
ttttataattttttg

SEQ ID NO: 1229417 - DNA, 15 bp, Homo sapiens
tttttataatttttt

SEQ ID NO: 1229418 - DNA, 15 bp, Homo sapiens
ctttttataattttt

SEQ ID NO: 1229419 - DNA, 15 bp, Homo sapiens
actttttataatttt

SEQ ID NO: 1229420 - DNA, 15 bp, Homo sapiens
tactttttataattt

SEQ ID NO: 1229421 - DNA, 15 bp, Homo sapiens
ctactttttataatt

SEQ ID NO: 1229422 - DNA, 15 bp, Homo sapiens
gctactttttataat

SEQ ID NO: 1229423 - DNA, 15 bp, Homo sapiens
ggctactttttataa

SEQ ID NO: 1229424 - DNA, 15 bp, Homo sapiens
tggctactttttata

SEQ ID NO: 1229425 - DNA, 15 bp, Homo sapiens
ctggctactttttat

SEQ ID NO: 1229426 - DNA, 15 bp, Homo sapiens
actggctacttttta

SEQ ID NO: 1229427 - DNA, 15 bp, Homo sapiens
aactggctacttttt

SEQ ID NO: 1229428 - DNA, 15 bp, Homo sapiens
taactggctactttt

SEQ ID NO: 1229429 - DNA, 15 bp, Homo sapiens
ataactggctacttt

SEQ ID NO: 1229430 - DNA, 15 bp, Homo sapiens
cataactggctactt

SEQ ID NO: 1229431 - DNA, 15 bp, Homo sapiens
ccataactggctact

SEQ ID NO: 1229432 - DNA, 15 bp, Homo sapiens
accataactggctac

SEQ ID NO: 1229433 - DNA, 15 bp, Homo sapiens
caccataactggcta

SEQ ID NO: 1229434 - DNA, 15 bp, Homo sapiens
ccaccataactggct

SEQ ID NO: 1229435 - DNA, 15 bp, Homo sapiens
gccaccataactggc

SEQ ID NO: 1229436 - DNA, 15 bp, Homo sapiens
cgccaccataactgg

SEQ ID NO: 1229437 - DNA, 15 bp, Homo sapiens
acgccaccataactg

SEQ ID NO: 1229438 - DNA, 15 bp, Homo sapiens
cacgccaccataact

SEQ ID NO: 1229439 - DNA, 15 bp, Homo sapiens
ccacgccaccataac

SEQ ID NO: 1229440 - DNA, 15 bp, Homo sapiens
cccacgccaccataa

SEQ ID NO: 1229441 - DNA, 15 bp, Homo sapiens
gcccacgccaccata

SEQ ID NO: 1229442 - DNA, 15 bp, Homo sapiens
ggcccacgccaccat

SEQ ID NO: 1229443 - DNA, 15 bp, Homo sapiens
aggcccacgccacca

SEQ ID NO: 1229444 - DNA, 15 bp, Homo sapiens
taggcccacgccacc

SEQ ID NO: 1229445 - DNA, 15 bp, Homo sapiens
gtaggcccacgccac

SEQ ID NO: 1229446 - DNA, 15 bp, Homo sapiens
ggtaggcccacgcca

SEQ ID NO: 1229447 - DNA, 15 bp, Homo sapiens
aggtaggcccacgcc

SEQ ID NO: 1229448 - DNA, 15 bp, Homo sapiens
caggtaggcccacgc

SEQ ID NO: 1229449 - DNA, 15 bp, Homo sapiens
ccaggtaggcccacg

SEQ ID NO: 1229450 - DNA, 15 bp, Homo sapiens
accaggtaggcccac

SEQ ID NO: 1229451 - DNA, 15 bp, Homo sapiens
taccaggtaggccca

SEQ ID NO: 1229452 - DNA, 15 bp, Homo sapiens
ctaccaggtaggccc

SEQ ID NO: 1229453 - DNA, 15 bp, Homo sapiens
cctaccaggtaggcc

SEQ ID NO: 1229454 - DNA, 15 bp, Homo sapiens
gcctaccaggtaggc

SEQ ID NO: 1229455 - DNA, 15 bp, Homo sapiens
agcctaccaggtagg

SEQ ID NO: 1229456 - DNA, 15 bp, Homo sapiens
ctcagcctaccaggt

SEQ ID NO: 1229457 - DNA, 15 bp, Homo sapiens
cctcagcctaccagg

SEQ ID NO: 1229458 - DNA, 15 bp, Homo sapiens
acctcagcctaccag

SEQ ID NO: 1229459 - DNA, 15 bp, Homo sapiens
cacctcagcctacca

SEQ ID NO: 1229460 - DNA, 15 bp, Homo sapiens
ccacctcagcctacc

SEQ ID NO: 1229461 - DNA, 15 bp, Homo sapiens
cccacctcagcctac

SEQ ID NO: 1229462 - DNA, 15 bp, Homo sapiens
tcccacctcagccta

SEQ ID NO: 1229463 - DNA, 15 bp, Homo sapiens
atcaagcaatcctcc

SEQ ID NO: 1229464 - DNA, 15 bp, Homo sapiens
aatcaagcaatcctc

SEQ ID NO: 1229465 - DNA, 15 bp, Homo sapiens
gaatcaagcaatcct

SEQ ID NO: 1229466 - DNA, 15 bp, Homo sapiens
ggaatcaagcaatcc

SEQ ID NO: 1229467 - DNA, 15 bp, Homo sapiens
aggaatcaagcaatc

SEQ ID NO: 1229468 - DNA, 15 bp, Homo sapiens
caggaatcaagcaat

SEQ ID NO: 1229469 - DNA, 15 bp, Homo sapiens
ccaggaatcaagcaa

SEQ ID NO: 1229470 - DNA, 15 bp, Homo sapiens
tccaggaatcaagca

SEQ ID NO: 1229471 - DNA, 15 bp, Homo sapiens
ctccaggaatcaagc

SEQ ID NO: 1229472 - DNA, 15 bp, Homo sapiens
cctccaggaatcaag

SEQ ID NO: 1229473 - DNA, 15 bp, Homo sapiens
acctccaggaatcaa

SEQ ID NO: 1229474 - DNA, 15 bp, Homo sapiens
cacctccaggaatca

SEQ ID NO: 1229475 - DNA, 15 bp, Homo sapiens
ccacctccaggaatc

SEQ ID NO: 1229476 - DNA, 15 bp, Homo sapiens
tccacctccaggaat

SEQ ID NO: 1229477 - DNA, 15 bp, Homo sapiens
ctccacctccaggaa

SEQ ID NO: 1229478 - DNA, 15 bp, Homo sapiens
cctccacctccagga

SEQ ID NO: 1229479 - DNA, 15 bp, Homo sapiens
gcctccacctccagg

SEQ ID NO: 1229480 - DNA, 15 bp, Homo sapiens
agcctccacctccag

SEQ ID NO: 1229481 - DNA, 15 bp, Homo sapiens
cagcctccacctcca

SEQ ID NO: 1229482 - DNA, 15 bp, Homo sapiens
cacggctcactgcag

SEQ ID NO: 1229483 - DNA, 15 bp, Homo sapiens
tcacggctcactgca

SEQ ID NO: 1229484 - DNA, 15 bp, Homo sapiens
atcacggctcactgc

SEQ ID NO: 1229485 - DNA, 15 bp, Homo sapiens
aatcacggctcactg

SEQ ID NO: 1229486 - DNA, 15 bp, Homo sapiens
caatcacggctcact

SEQ ID NO: 1229487 - DNA, 15 bp, Homo sapiens
gcaatcacggctcac

SEQ ID NO: 1229488 - DNA, 15 bp, Homo sapiens
tgcaatcacggctca

SEQ ID NO: 1229489 - DNA, 15 bp, Homo sapiens
gtgcaatcacggctc

SEQ ID NO: 1229490 - DNA, 15 bp, Homo sapiens
ggtgcaatcacggct

SEQ ID NO: 1229491 - DNA, 15 bp, Homo sapiens
aggtgcaatcacggc

SEQ ID NO: 1229492 - DNA, 15 bp, Homo sapiens
aaggtgcaatcacgg

SEQ ID NO: 1229493 - DNA, 15 bp, Homo sapiens
gaaggtgcaatcacg

SEQ ID NO: 1229494 - DNA, 15 bp, Homo sapiens
tgaaggtgcaatcac

SEQ ID NO: 1229495 - DNA, 15 bp, Homo sapiens
gtgaaggtgcaatca

SEQ ID NO: 1229496 - DNA, 15 bp, Homo sapiens
agtgaaggtgcaatc

SEQ ID NO: 1229497 - DNA, 15 bp, Homo sapiens
gagtgaaggtgcaat

SEQ ID NO: 1229498 - DNA, 15 bp, Homo sapiens
ggagtgaaggtgcaa

SEQ ID NO: 1229499 - DNA, 15 bp, Homo sapiens
tggagtgaaggtgca

SEQ ID NO: 1229500 - DNA, 15 bp, Homo sapiens
ctggagtgaaggtgc

SEQ ID NO: 1229501 - DNA, 15 bp, Homo sapiens
gctggagtgaaggtg

SEQ ID NO: 1229502 - DNA, 15 bp, Homo sapiens
ggctggagtgaaggt

SEQ ID NO: 1229503 - DNA, 15 bp, Homo sapiens
aggctggagtgaagg

SEQ ID NO: 1229504 - DNA, 15 bp, Homo sapiens
taggctggagtgaag

SEQ ID NO: 1229505 - DNA, 15 bp, Homo sapiens
ctaggctggagtgaa

SEQ ID NO: 1229506 - DNA, 15 bp, Homo sapiens
cctaggctggagtga

SEQ ID NO: 1229507 - DNA, 15 bp, Homo sapiens
gcctaggctggagtg

SEQ ID NO: 1229508 - DNA, 15 bp, Homo sapiens
tgcctaggctggagt

SEQ ID NO: 1229509 - DNA, 15 bp, Homo sapiens
ctgcctaggctggag

SEQ ID NO: 1229510 - DNA, 15 bp, Homo sapiens
gctgcctaggctgga

SEQ ID NO: 1229511 - DNA, 15 bp, Homo sapiens
tgctgcctaggctgg

SEQ ID NO: 1229512 - DNA, 15 bp, Homo sapiens
ctgctgcctaggctg

SEQ ID NO: 1229513 - DNA, 15 bp, Homo sapiens
tctgctgcctaggct

SEQ ID NO: 1229514 - DNA, 15 bp, Homo sapiens
ctctgctgcctaggc

SEQ ID NO: 1229515 - DNA, 15 bp, Homo sapiens
gctctgctgcctagg

SEQ ID NO: 1229516 - DNA, 15 bp, Homo sapiens
tgctctgctgcctag

SEQ ID NO: 1229517 - DNA, 15 bp, Homo sapiens
ttgctctgctgccta

SEQ ID NO: 1229518 - DNA, 15 bp, Homo sapiens
cttgctctgctgcct

SEQ ID NO: 1229519 - DNA, 15 bp, Homo sapiens
tcttgctctgctgcc

SEQ ID NO: 1229520 - DNA, 15 bp, Homo sapiens
gtcttgctctgctgc

SEQ ID NO: 1229521 - DNA, 15 bp, Homo sapiens
ggtcttgctctgctg

SEQ ID NO: 1229522 - DNA, 15 bp, Homo sapiens
gggtcttgctctgct

SEQ ID NO: 1229523 - DNA, 15 bp, Homo sapiens
ggggtcttgctctgc

SEQ ID NO: 1229524 - DNA, 15 bp, Homo sapiens
tggggtcttgctctg

SEQ ID NO: 1229525 - DNA, 15 bp, Homo sapiens
atggggtcttgctct

SEQ ID NO: 1229526 - DNA, 15 bp, Homo sapiens
gatggggtcttgctc

SEQ ID NO: 1229527 - DNA, 15 bp, Homo sapiens
tgagatggggtcttg

SEQ ID NO: 1229528 - DNA, 15 bp, Homo sapiens
ttgagatggggtctt

SEQ ID NO: 1229529 - DNA, 15 bp, Homo sapiens
tttgagatggggtct

SEQ ID NO: 1229530 - DNA, 15 bp, Homo sapiens
ttttgagatggggtc

SEQ ID NO: 1229531 - DNA, 15 bp, Homo sapiens
tttttgagatggggt

SEQ ID NO: 1229532 - DNA, 15 bp, Homo sapiens
ttttttgagatgggg

SEQ ID NO: 1229533 - DNA, 15 bp, Homo sapiens
tttttttgagatggg

SEQ ID NO: 1229534 - DNA, 15 bp, Homo sapiens
cctttttttgagatg

SEQ ID NO: 1229535 - DNA, 15 bp, Homo sapiens
tcctttttttgagat

SEQ ID NO: 1229536 - DNA, 15 bp, Homo sapiens
ttcctttttttgaga

SEQ ID NO: 1229537 - DNA, 15 bp, Homo sapiens
tttcctttttttgag

SEQ ID NO: 1229538 - DNA, 15 bp, Homo sapiens
gtttcctttttttga

SEQ ID NO: 1229539 - DNA, 15 bp, Homo sapiens
tgtttcctttttttg

SEQ ID NO: 1229540 - DNA, 15 bp, Homo sapiens
ctgtttccttttttt

SEQ ID NO: 1229541 - DNA, 15 bp, Homo sapiens
gctgtttcctttttt

SEQ ID NO: 1229542 - DNA, 15 bp, Homo sapiens
tgctgtttccttttt

SEQ ID NO: 1229543 - DNA, 15 bp, Homo sapiens
atgctgtttcctttt

SEQ ID NO: 1229544 - DNA, 15 bp, Homo sapiens
aatgctgtttccttt

SEQ ID NO: 1229545 - DNA, 15 bp, Homo sapiens
caatgctgtttcctt

SEQ ID NO: 1229546 - DNA, 15 bp, Homo sapiens
acaatgctgtttcct

SEQ ID NO: 1229547 - DNA, 15 bp, Homo sapiens
aacaatgctgtttcc

SEQ ID NO: 1229548 - DNA, 15 bp, Homo sapiens
caacaatgctgtttc

SEQ ID NO: 1229549 - DNA, 15 bp, Homo sapiens
ccaacaatgctgttt

SEQ ID NO: 1229550 - DNA, 15 bp, Homo sapiens
cccaacaatgctgtt

SEQ ID NO: 1229551 - DNA, 15 bp, Homo sapiens
tcccaacaatgctgt

SEQ ID NO: 1229552 - DNA, 15 bp, Homo sapiens
gtcccaacaatgctg

SEQ ID NO: 1229553 - DNA, 15 bp, Homo sapiens
ggtcccaacaatgct

SEQ ID NO: 1229554 - DNA, 15 bp, Homo sapiens
tggtcccaacaatgc

SEQ ID NO: 1229555 - DNA, 15 bp, Homo sapiens
ctggtcccaacaatg

SEQ ID NO: 1229556 - DNA, 15 bp, Homo sapiens
gctggtcccaacaat

SEQ ID NO: 1229557 - DNA, 15 bp, Homo sapiens
tgctggtcccaacaa

SEQ ID NO: 1229558 - DNA, 15 bp, Homo sapiens
gtgctggtcccaaca

SEQ ID NO: 1229559 - DNA, 15 bp, Homo sapiens
agtgctggtcccaac

SEQ ID NO: 1229560 - DNA, 15 bp, Homo sapiens
tagtgctggtcccaa

SEQ ID NO: 1229561 - DNA, 15 bp, Homo sapiens
ttagtgctggtccca

SEQ ID NO: 1229562 - DNA, 15 bp, Homo sapiens
gttagtgctggtccc

SEQ ID NO: 1229563 - DNA, 15 bp, Homo sapiens
ggttagtgctggtcc

SEQ ID NO: 1229564 - DNA, 15 bp, Homo sapiens
aggttagtgctggtc

SEQ ID NO: 1229565 - DNA, 15 bp, Homo sapiens
aaggttagtgctggt

SEQ ID NO: 1229566 - DNA, 15 bp, Homo sapiens
gaaggttagtgctgg

SEQ ID NO: 1229567 - DNA, 15 bp, Homo sapiens
tgaaggttagtgctg

SEQ ID NO: 1229568 - DNA, 15 bp, Homo sapiens
ctgaaggttagtgct

SEQ ID NO: 1229569 - DNA, 15 bp, Homo sapiens
actgaaggttagtgc

SEQ ID NO: 1229570 - DNA, 15 bp, Homo sapiens
cactgaaggttagtg

SEQ ID NO: 1229571 - DNA, 15 bp, Homo sapiens
gcactgaaggttagt

SEQ ID NO: 1229572 - DNA, 15 bp, Homo sapiens
cgcactgaaggttag

SEQ ID NO: 1229573 - DNA, 15 bp, Homo sapiens
tcgcactgaaggtta

SEQ ID NO: 1229574 - DNA, 15 bp, Homo sapiens
gtcgcactgaaggtt

SEQ ID NO: 1229575 - DNA, 15 bp, Homo sapiens
tgtcgcactgaaggt

SEQ ID NO: 1229576 - DNA, 15 bp, Homo sapiens
gtgtcgcactgaagg

SEQ ID NO: 1229577 - DNA, 15 bp, Homo sapiens
tgtgtcgcactgaag

SEQ ID NO: 1229578 - DNA, 15 bp, Homo sapiens
ctgtgtcgcactgaa

SEQ ID NO: 1229579 - DNA, 15 bp, Homo sapiens
tctgtgtcgcactga

SEQ ID NO: 1229580 - DNA, 15 bp, Homo sapiens
ttctgtgtcgcactg

SEQ ID NO: 1229581 - DNA, 15 bp, Homo sapiens
gttctgtgtcgcact

SEQ ID NO: 1229582 - DNA, 15 bp, Homo sapiens
tgttctgtgtcgcac

SEQ ID NO: 1229583 - DNA, 15 bp, Homo sapiens
gtgttctgtgtcgca

SEQ ID NO: 1229584 - DNA, 15 bp, Homo sapiens
ggtgttctgtgtcgc

SEQ ID NO: 1229585 - DNA, 15 bp, Homo sapiens
gggtgttctgtgtcg

SEQ ID NO: 1229586 - DNA, 15 bp, Homo sapiens
ggggtgttctgtgtc

SEQ ID NO: 1229587 - DNA, 15 bp, Homo sapiens
aggggtgttctgtgt

SEQ ID NO: 1229588 - DNA, 15 bp, Homo sapiens
taggggtgttctgtg

SEQ ID NO: 1229589 - DNA, 15 bp, Homo sapiens
ataggggtgttctgt

SEQ ID NO: 1229590 - DNA, 15 bp, Homo sapiens
aataggggtgttctg

SEQ ID NO: 1229591 - DNA, 15 bp, Homo sapiens
caataggggtgttct

SEQ ID NO: 1229592 - DNA, 15 bp, Homo sapiens
gcaataggggtgttc

SEQ ID NO: 1229593 - DNA, 15 bp, Homo sapiens
agcaataggggtgtt

SEQ ID NO: 1229594 - DNA, 15 bp, Homo sapiens
aagcaataggggtgt

SEQ ID NO: 1229595 - DNA, 15 bp, Homo sapiens
aaagcaataggggtg

SEQ ID NO: 1229596 - DNA, 15 bp, Homo sapiens
aaaagcaataggggt

SEQ ID NO: 1229597 - DNA, 15 bp, Homo sapiens
taaaagcaatagggg

SEQ ID NO: 1229598 - DNA, 15 bp, Homo sapiens
ataaaagcaataggg

SEQ ID NO: 1229599 - DNA, 15 bp, Homo sapiens
aataaaagcaatagg

SEQ ID NO: 1229600 - DNA, 15 bp, Homo sapiens
gaataaaagcaatag

SEQ ID NO: 1229601 - DNA, 15 bp, Homo sapiens
agaataaaagcaata

SEQ ID NO: 1229602 - DNA, 15 bp, Homo sapiens
aagaataaaagcaat

SEQ ID NO: 1229603 - DNA, 15 bp, Homo sapiens
aaagaataaaagcaa

SEQ ID NO: 1229604 - DNA, 15 bp, Homo sapiens
taaagaataaaagca

SEQ ID NO: 1229605 - DNA, 15 bp, Homo sapiens
ttaaagaataaaagc

SEQ ID NO: 1229606 - DNA, 15 bp, Homo sapiens
cttaaagaataaaag

SEQ ID NO: 1229607 - DNA, 15 bp, Homo sapiens
gcttaaagaataaaa

SEQ ID NO: 1229608 - DNA, 15 bp, Homo sapiens
tgcttaaagaataaa

SEQ ID NO: 1229609 - DNA, 15 bp, Homo sapiens
ttgcttaaagaataa

SEQ ID NO: 1229610 - DNA, 15 bp, Homo sapiens
tttgcttaaagaata

SEQ ID NO: 1229611 - DNA, 15 bp, Homo sapiens
ttttgcttaaagaat

SEQ ID NO: 1229612 - DNA, 15 bp, Homo sapiens
attttgcttaaagaa

SEQ ID NO: 1229613 - DNA, 15 bp, Homo sapiens
aattttgcttaaaga

SEQ ID NO: 1229614 - DNA, 15 bp, Homo sapiens
taattttgcttaaag

SEQ ID NO: 1229615 - DNA, 15 bp, Homo sapiens
ttaattttgcttaaa

SEQ ID NO: 1229616 - DNA, 15 bp, Homo sapiens
cttaattttgcttaa

SEQ ID NO: 1229617 - DNA, 15 bp, Homo sapiens
tcttaattttgctta

SEQ ID NO: 1229618 - DNA, 15 bp, Homo sapiens
atcttaattttgctt

SEQ ID NO: 1229619 - DNA, 15 bp, Homo sapiens
tatcttaattttgct

SEQ ID NO: 1229620 - DNA, 15 bp, Homo sapiens
atatcttaattttgc

SEQ ID NO: 1229621 - DNA, 15 bp, Homo sapiens
gatatcttaattttg

SEQ ID NO: 1229622 - DNA, 15 bp, Homo sapiens
ggatatcttaatttt

SEQ ID NO: 1229623 - DNA, 15 bp, Homo sapiens
aggatatcttaattt

SEQ ID NO: 1229624 - DNA, 15 bp, Homo sapiens
gaggatatcttaatt

SEQ ID NO: 1229625 - DNA, 15 bp, Homo sapiens
tgaggatatcttaat

SEQ ID NO: 1229626 - DNA, 15 bp, Homo sapiens
gtgaggatatcttaa

SEQ ID NO: 1229627 - DNA, 15 bp, Homo sapiens
ggtgaggatatctta

SEQ ID NO: 1229628 - DNA, 15 bp, Homo sapiens
cggtgaggatatctt

SEQ ID NO: 1229629 - DNA, 15 bp, Homo sapiens
ccggtgaggatatct

SEQ ID NO: 1229630 - DNA, 15 bp, Homo sapiens
gccggtgaggatatc

SEQ ID NO: 1229631 - DNA, 15 bp, Homo sapiens
agccggtgaggatat

SEQ ID NO: 1229632 - DNA, 15 bp, Homo sapiens
cagccggtgaggata

SEQ ID NO: 1229633 - DNA, 15 bp, Homo sapiens
ccagccggtgaggat

SEQ ID NO: 1229634 - DNA, 15 bp, Homo sapiens
tccagccggtgagga

SEQ ID NO: 1229635 - DNA, 15 bp, Homo sapiens
ttccagccggtgagg

SEQ ID NO: 1229636 - DNA, 15 bp, Homo sapiens
cttccagccggtgag

SEQ ID NO: 1229637 - DNA, 15 bp, Homo sapiens
tcttccagccggtga

SEQ ID NO: 1229638 - DNA, 15 bp, Homo sapiens
atcttccagccggtg

SEQ ID NO: 1229639 - DNA, 15 bp, Homo sapiens
gatcttccagccggt

SEQ ID NO: 1229640 - DNA, 15 bp, Homo sapiens
cgatcttccagccgg

SEQ ID NO: 1229641 - DNA, 15 bp, Homo sapiens
acgatcttccagccg

SEQ ID NO: 1229642 - DNA, 15 bp, Homo sapiens
tacgatcttccagcc

SEQ ID NO: 1229643 - DNA, 15 bp, Homo sapiens
ctacgatcttccagc

SEQ ID NO: 1229644 - DNA, 15 bp, Homo sapiens
tctacgatcttccag

SEQ ID NO: 1229645 - DNA, 15 bp, Homo sapiens
ttctacgatcttcca

SEQ ID NO: 1229646 - DNA, 15 bp, Homo sapiens
tttctacgatcttcc

SEQ ID NO: 1229647 - DNA, 15 bp, Homo sapiens
atttctacgatcttc

SEQ ID NO: 1229648 - DNA, 15 bp, Homo sapiens
tatttctacgatctt

SEQ ID NO: 1229649 - DNA, 15 bp, Homo sapiens
ctatttctacgatct

SEQ ID NO: 1229650 - DNA, 15 bp, Homo sapiens
gctatttctacgatc

SEQ ID NO: 1229651 - DNA, 15 bp, Homo sapiens
tgctatttctacgat

SEQ ID NO: 1229652 - DNA, 15 bp, Homo sapiens
atgctatttctacga

SEQ ID NO: 1229653 - DNA, 15 bp, Homo sapiens
tatgctatttctacg

SEQ ID NO: 1229654 - DNA, 15 bp, Homo sapiens
ctatgctatttctac

SEQ ID NO: 1229655 - DNA, 15 bp, Homo sapiens
cctatgctatttcta

SEQ ID NO: 1229656 - DNA, 15 bp, Homo sapiens
ccctatgctatttct

SEQ ID NO: 1229657 - DNA, 15 bp, Homo sapiens
accctatgctatttc

SEQ ID NO: 1229658 - DNA, 15 bp, Homo sapiens
gaccctatgctattt

SEQ ID NO: 1229659 - DNA, 15 bp, Homo sapiens
tgaccctatgctatt

SEQ ID NO: 1229660 - DNA, 15 bp, Homo sapiens
atgaccctatgctat

SEQ ID NO: 1229661 - DNA, 15 bp, Homo sapiens
aatgaccctatgcta

SEQ ID NO: 1229662 - DNA, 15 bp, Homo sapiens
caatgaccctatgct

SEQ ID NO: 1229663 - DNA, 15 bp, Homo sapiens
tcaatgaccctatgc

SEQ ID NO: 1229664 - DNA, 15 bp, Homo sapiens
ctcaatgaccctatg

SEQ ID NO: 1229665 - DNA, 15 bp, Homo sapiens
tctcaatgaccctat

SEQ ID NO: 1229666 - DNA, 15 bp, Homo sapiens
ttctcaatgacccta

SEQ ID NO: 1229667 - DNA, 15 bp, Homo sapiens
tttctcaatgaccct

SEQ ID NO: 1229668 - DNA, 15 bp, Homo sapiens
ttttctcaatgaccc

SEQ ID NO: 1229669 - DNA, 15 bp, Homo sapiens
tttttctcaatgacc

SEQ ID NO: 1229670 - DNA, 15 bp, Homo sapiens
atttttctcaatgac

SEQ ID NO: 1229671 - DNA, 15 bp, Homo sapiens
catttttctcaatga

SEQ ID NO: 1229672 - DNA, 15 bp, Homo sapiens
ccatttttctcaatg

SEQ ID NO: 1229673 - DNA, 15 bp, Homo sapiens
tccatttttctcaat

SEQ ID NO: 1229674 - DNA, 15 bp, Homo sapiens
ctccatttttctcaa

SEQ ID NO: 1229675 - DNA, 15 bp, Homo sapiens
tctccatttttctca

SEQ ID NO: 1229676 - DNA, 15 bp, Homo sapiens
gtctccatttttctc

SEQ ID NO: 1229677 - DNA, 15 bp, Homo sapiens
tgtctccatttttct

SEQ ID NO: 1229678 - DNA, 15 bp, Homo sapiens
ttgtctccatttttc

SEQ ID NO: 1229679 - DNA, 15 bp, Homo sapiens
attgtctccattttt

SEQ ID NO: 1229680 - DNA, 15 bp, Homo sapiens
tattgtctccatttt

SEQ ID NO: 1229681 - DNA, 15 bp, Homo sapiens
ctattgtctccattt

SEQ ID NO: 1229682 - DNA, 15 bp, Homo sapiens
cctattgtctccatt

SEQ ID NO: 1229683 - DNA, 15 bp, Homo sapiens
tcctattgtctccat

SEQ ID NO: 1229684 - DNA, 15 bp, Homo sapiens
ctcctattgtctcca

SEQ ID NO: 1229685 - DNA, 15 bp, Homo sapiens
tctcctattgtctcc

SEQ ID NO: 1229686 - DNA, 15 bp, Homo sapiens
ctctcctattgtctc

SEQ ID NO: 1229687 - DNA, 15 bp, Homo sapiens
tctctcctattgtct

SEQ ID NO: 1229688 - DNA, 15 bp, Homo sapiens
ttctctcctattgtc

SEQ ID NO: 1229689 - DNA, 15 bp, Homo sapiens
attctctcctattgt

SEQ ID NO: 1229690 - DNA, 15 bp, Homo sapiens
gattctctcctattg

SEQ ID NO: 1229691 - DNA, 15 bp, Homo sapiens
agattctctcctatt

SEQ ID NO: 1229692 - DNA, 15 bp, Homo sapiens
gagattctctcctat

SEQ ID NO: 1229693 - DNA, 15 bp, Homo sapiens
agagattctctccta

SEQ ID NO: 1229694 - DNA, 15 bp, Homo sapiens
cagagattctctcct

SEQ ID NO: 1229695 - DNA, 15 bp, Homo sapiens
ccagagattctctcc

SEQ ID NO: 1229696 - DNA, 15 bp, Homo sapiens
accagagattctctc

SEQ ID NO: 1229697 - DNA, 15 bp, Homo sapiens
aaccagagattctct

SEQ ID NO: 1229698 - DNA, 15 bp, Homo sapiens
taaccagagattctc

SEQ ID NO: 1229699 - DNA, 15 bp, Homo sapiens
ttaaccagagattct

SEQ ID NO: 1229700 - DNA, 15 bp, Homo sapiens
tttaaccagagattc

SEQ ID NO: 1229701 - DNA, 15 bp, Homo sapiens
ttttaaccagagatt

SEQ ID NO: 1229702 - DNA, 15 bp, Homo sapiens
cttttaaccagagat

SEQ ID NO: 1229703 - DNA, 15 bp, Homo sapiens
ccttttaaccagaga

SEQ ID NO: 1229704 - DNA, 15 bp, Homo sapiens
cccttttaaccagag

SEQ ID NO: 1229705 - DNA, 15 bp, Homo sapiens
tcccttttaaccaga

SEQ ID NO: 1229706 - DNA, 15 bp, Homo sapiens
ttcccttttaaccag

SEQ ID NO: 1229707 - DNA, 15 bp, Homo sapiens
cttcccttttaacca

SEQ ID NO: 1229708 - DNA, 15 bp, Homo sapiens
acttcccttttaacc

SEQ ID NO: 1229709 - DNA, 15 bp, Homo sapiens
gacttcccttttaac

SEQ ID NO: 1229710 - DNA, 15 bp, Homo sapiens
cgacttcccttttaa

SEQ ID NO: 1229711 - DNA, 15 bp, Homo sapiens
acgacttccctttta

SEQ ID NO: 1229712 - DNA, 15 bp, Homo sapiens
cacgacttccctttt

SEQ ID NO: 1229713 - DNA, 15 bp, Homo sapiens
ccacgacttcccttt

SEQ ID NO: 1229714 - DNA, 15 bp, Homo sapiens
accacgacttccctt

SEQ ID NO: 1229715 - DNA, 15 bp, Homo sapiens
gaccacgacttccct

SEQ ID NO: 1229716 - DNA, 15 bp, Homo sapiens
tgaccacgacttccc

SEQ ID NO: 1229717 - DNA, 15 bp, Homo sapiens
atgaccacgacttcc

SEQ ID NO: 1229718 - DNA, 15 bp, Homo sapiens
tatgaccacgacttc

SEQ ID NO: 1229719 - DNA, 15 bp, Homo sapiens
gtatgaccacgactt

SEQ ID NO: 1229720 - DNA, 15 bp, Homo sapiens
ggtatgaccacgact

SEQ ID NO: 1229721 - DNA, 15 bp, Homo sapiens
tggtatgaccacgac

SEQ ID NO: 1229722 - DNA, 15 bp, Homo sapiens
ctggtatgaccacga

SEQ ID NO: 1229723 - DNA, 15 bp, Homo sapiens
gctggtatgaccacg

SEQ ID NO: 1229724 - DNA, 15 bp, Homo sapiens
ggctggtatgaccac

SEQ ID NO: 1229725 - DNA, 15 bp, Homo sapiens
gggctggtatgacca

SEQ ID NO: 1229726 - DNA, 15 bp, Homo sapiens
agggctggtatgacc

SEQ ID NO: 1229727 - DNA, 15 bp, Homo sapiens
gagggctggtatgac

SEQ ID NO: 1229728 - DNA, 15 bp, Homo sapiens
tgagggctggtatga

SEQ ID NO: 1229729 - DNA, 15 bp, Homo sapiens
ttgagggctggtatg

SEQ ID NO: 1229730 - DNA, 15 bp, Homo sapiens
tttgagggctggtat

SEQ ID NO: 1229731 - DNA, 15 bp, Homo sapiens
ctttgagggctggta

SEQ ID NO: 1229732 - DNA, 15 bp, Homo sapiens
tctttgagggctggt

SEQ ID NO: 1229733 - DNA, 15 bp, Homo sapiens
ttctttgagggctgg

SEQ ID NO: 1229734 - DNA, 15 bp, Homo sapiens
tttctttgagggctg

SEQ ID NO: 1229735 - DNA, 15 bp, Homo sapiens
ctttctttgagggct

SEQ ID NO: 1229736 - DNA, 15 bp, Homo sapiens
gctttctttgagggc

SEQ ID NO: 1229737 - DNA, 15 bp, Homo sapiens
ggctttctttgaggg

SEQ ID NO: 1229738 - DNA, 15 bp, Homo sapiens
tggctttctttgagg

SEQ ID NO: 1229739 - DNA, 15 bp, Homo sapiens
ctggctttctttgag

SEQ ID NO: 1229740 - DNA, 15 bp, Homo sapiens
tctggctttctttga

SEQ ID NO: 1229741 - DNA, 15 bp, Homo sapiens
gtctggctttctttg

SEQ ID NO: 1229742 - DNA, 15 bp, Homo sapiens
cgtctggctttcttt

SEQ ID NO: 1229743 - DNA, 15 bp, Homo sapiens
ccgtctggctttctt

SEQ ID NO: 1229744 - DNA, 15 bp, Homo sapiens
gccgtctggctttct

SEQ ID NO: 1229745 - DNA, 15 bp, Homo sapiens
tgccgtctggctttc

SEQ ID NO: 1229746 - DNA, 15 bp, Homo sapiens
gtgccgtctggcttt

SEQ ID NO: 1229747 - DNA, 15 bp, Homo sapiens
agtgccgtctggctt

SEQ ID NO: 1229748 - DNA, 15 bp, Homo sapiens
cagtgccgtctggct

SEQ ID NO: 1229749 - DNA, 15 bp, Homo sapiens
acagtgccgtctggc

SEQ ID NO: 1229750 - DNA, 15 bp, Homo sapiens
cacagtgccgtctgg

SEQ ID NO: 1229751 - DNA, 15 bp, Homo sapiens
acacagtgccgtctg

SEQ ID NO: 1229752 - DNA, 15 bp, Homo sapiens
cacacagtgccgtct

SEQ ID NO: 1229753 - DNA, 15 bp, Homo sapiens
ccacacagtgccgtc

SEQ ID NO: 1229754 - DNA, 15 bp, Homo sapiens
gccacacagtgccgt

SEQ ID NO: 1229755 - DNA, 15 bp, Homo sapiens
cgccacacagtgccg

SEQ ID NO: 1229756 - DNA, 15 bp, Homo sapiens
acgccacacagtgcc

SEQ ID NO: 1229757 - DNA, 15 bp, Homo sapiens
cacgccacacagtgc

SEQ ID NO: 1229758 - DNA, 15 bp, Homo sapiens
acacgccacacagtg

SEQ ID NO: 1229759 - DNA, 15 bp, Homo sapiens
cacacgccacacagt

SEQ ID NO: 1229760 - DNA, 15 bp, Homo sapiens
acacacgccacacag

SEQ ID NO: 1229761 - DNA, 15 bp, Homo sapiens
gacacacgccacaca

SEQ ID NO: 1229762 - DNA, 15 bp, Homo sapiens
agacacacgccacac

SEQ ID NO: 1229763 - DNA, 15 bp, Homo sapiens
aagacacacgccaca

SEQ ID NO: 1229764 - DNA, 15 bp, Homo sapiens
aaagacacacgccac

SEQ ID NO: 1229765 - DNA, 15 bp, Homo sapiens
gaaagacacacgcca

SEQ ID NO: 1229766 - DNA, 15 bp, Homo sapiens
ggaaagacacacgcc

SEQ ID NO: 1229767 - DNA, 15 bp, Homo sapiens
aggaaagacacacgc

SEQ ID NO: 1229768 - DNA, 15 bp, Homo sapiens
caggaaagacacacg

SEQ ID NO: 1229769 - DNA, 15 bp, Homo sapiens
tcaggaaagacacac

SEQ ID NO: 1229770 - DNA, 15 bp, Homo sapiens
atcaggaaagacaca

SEQ ID NO: 1229771 - DNA, 15 bp, Homo sapiens
catcaggaaagacac

SEQ ID NO: 1229772 - DNA, 15 bp, Homo sapiens
acatcaggaaagaca

SEQ ID NO: 1229773 - DNA, 15 bp, Homo sapiens
aacatcaggaaagac

SEQ ID NO: 1229774 - DNA, 15 bp, Homo sapiens
aaacatcaggaaaga

SEQ ID NO: 1229775 - DNA, 15 bp, Homo sapiens
gaaacatcaggaaag

SEQ ID NO: 1229776 - DNA, 15 bp, Homo sapiens
ggaaacatcaggaaa

SEQ ID NO: 1229777 - DNA, 15 bp, Homo sapiens
tggaaacatcaggaa

SEQ ID NO: 1229778 - DNA, 15 bp, Homo sapiens
atggaaacatcagga

SEQ ID NO: 1229779 - DNA, 15 bp, Homo sapiens
catggaaacatcagg

SEQ ID NO: 1229780 - DNA, 15 bp, Homo sapiens
gcatggaaacatcag

SEQ ID NO: 1229781 - DNA, 15 bp, Homo sapiens
tgcatggaaacatca

SEQ ID NO: 1229782 - DNA, 15 bp, Homo sapiens
atgcatggaaacatc

SEQ ID NO: 1229783 - DNA, 15 bp, Homo sapiens
tatgcatggaaacat

SEQ ID NO: 1229784 - DNA, 15 bp, Homo sapiens
gtatgcatggaaaca

SEQ ID NO: 1229785 - DNA, 15 bp, Homo sapiens
tgtatgcatggaaac

SEQ ID NO: 1229786 - DNA, 15 bp, Homo sapiens
gtgtatgcatggaaa

SEQ ID NO: 1229787 - DNA, 15 bp, Homo sapiens
tgtgtatgcatggaa

SEQ ID NO: 1229788 - DNA, 15 bp, Homo sapiens
gtgtgtatgcatgga

SEQ ID NO: 1229789 - DNA, 15 bp, Homo sapiens
tgtgtgtatgcatgg

SEQ ID NO: 1229790 - DNA, 15 bp, Homo sapiens
atgtgtgtatgcatg

SEQ ID NO: 1229791 - DNA, 15 bp, Homo sapiens
aatgtgtgtatgcat

SEQ ID NO: 1229792 - DNA, 15 bp, Homo sapiens
aaatgtgtgtatgca

SEQ ID NO: 1229793 - DNA, 15 bp, Homo sapiens
caaatgtgtgtatgc

SEQ ID NO: 1229794 - DNA, 15 bp, Homo sapiens
acaaatgtgtgtatg

SEQ ID NO: 1229795 - DNA, 15 bp, Homo sapiens
tacaaatgtgtgtat

SEQ ID NO: 1229796 - DNA, 15 bp, Homo sapiens
ttacaaatgtgtgta

SEQ ID NO: 1229797 - DNA, 15 bp, Homo sapiens
tttacaaatgtgtgt

SEQ ID NO: 1229798 - DNA, 15 bp, Homo sapiens
gtttacaaatgtgtg

SEQ ID NO: 1229799 - DNA, 15 bp, Homo sapiens
cgtttacaaatgtgt

SEQ ID NO: 1229800 - DNA, 15 bp, Homo sapiens
acgtttacaaatgtg

SEQ ID NO: 1229801 - DNA, 15 bp, Homo sapiens
tacgtttacaaatgt

SEQ ID NO: 1229802 - DNA, 15 bp, Homo sapiens
ctacgtttacaaatg

SEQ ID NO: 1229803 - DNA, 15 bp, Homo sapiens
gctacgtttacaaat

SEQ ID NO: 1229804 - DNA, 15 bp, Homo sapiens
cgctacgtttacaaa

SEQ ID NO: 1229805 - DNA, 15 bp, Homo sapiens
ccgctacgtttacaa

SEQ ID NO: 1229806 - DNA, 15 bp, Homo sapiens
cccgctacgtttaca

SEQ ID NO: 1229807 - DNA, 15 bp, Homo sapiens
tcccgctacgtttac

SEQ ID NO: 1229808 - DNA, 15 bp, Homo sapiens
atcccgctacgttta

SEQ ID NO: 1229809 - DNA, 15 bp, Homo sapiens
gatcccgctacgttt

SEQ ID NO: 1229810 - DNA, 15 bp, Homo sapiens
tgatcccgctacgtt

SEQ ID NO: 1229811 - DNA, 15 bp, Homo sapiens
atgatcccgctacgt

SEQ ID NO: 1229812 - DNA, 15 bp, Homo sapiens
tatgatcccgctacg

SEQ ID NO: 1229813 - DNA, 15 bp, Homo sapiens
gtatgatcccgctac

SEQ ID NO: 1229814 - DNA, 15 bp, Homo sapiens
agtatgatcccgcta

SEQ ID NO: 1229815 - DNA, 15 bp, Homo sapiens
gagtatgatcccgct

SEQ ID NO: 1229816 - DNA, 15 bp, Homo sapiens
agagtatgatcccgc

SEQ ID NO: 1229817 - DNA, 15 bp, Homo sapiens
cagagtatgatcccg

SEQ ID NO: 1229818 - DNA, 15 bp, Homo sapiens
gcagagtatgatccc

SEQ ID NO: 1229819 - DNA, 15 bp, Homo sapiens
tgcagagtatgatcc

SEQ ID NO: 1229820 - DNA, 15 bp, Homo sapiens
atgcagagtatgatc

SEQ ID NO: 1229821 - DNA, 15 bp, Homo sapiens
catgcagagtatgat

SEQ ID NO: 1229822 - DNA, 15 bp, Homo sapiens
gcatgcagagtatga

SEQ ID NO: 1229823 - DNA, 15 bp, Homo sapiens
agcatgcagagtatg

SEQ ID NO: 1229824 - DNA, 15 bp, Homo sapiens
cagcatgcagagtat

SEQ ID NO: 1229825 - DNA, 15 bp, Homo sapiens
ccagcatgcagagta

SEQ ID NO: 1229826 - DNA, 15 bp, Homo sapiens
accagcatgcagagt

SEQ ID NO: 1229827 - DNA, 15 bp, Homo sapiens
gaccagcatgcagag

SEQ ID NO: 1229828 - DNA, 15 bp, Homo sapiens
agaccagcatgcaga

SEQ ID NO: 1229829 - DNA, 15 bp, Homo sapiens
cagaccagcatgcag

SEQ ID NO: 1229830 - DNA, 15 bp, Homo sapiens
acagaccagcatgca

SEQ ID NO: 1229831 - DNA, 15 bp, Homo sapiens
tacagaccagcatgc

SEQ ID NO: 1229832 - DNA, 15 bp, Homo sapiens
ctacagaccagcatg

SEQ ID NO: 1229833 - DNA, 15 bp, Homo sapiens
gctacagaccagcat

SEQ ID NO: 1229834 - DNA, 15 bp, Homo sapiens
agctacagaccagca

SEQ ID NO: 1229835 - DNA, 15 bp, Homo sapiens
cagctacagaccagc

SEQ ID NO: 1229836 - DNA, 15 bp, Homo sapiens
ccagctacagaccag

SEQ ID NO: 1229837 - DNA, 15 bp, Homo sapiens
accagctacagacca

SEQ ID NO: 1229838 - DNA, 15 bp, Homo sapiens
aaccagctacagacc

SEQ ID NO: 1229839 - DNA, 15 bp, Homo sapiens
aaaccagctacagac

SEQ ID NO: 1229840 - DNA, 15 bp, Homo sapiens
gaaaccagctacaga

SEQ ID NO: 1229841 - DNA, 15 bp, Homo sapiens
agaaaccagctacag

SEQ ID NO: 1229842 - DNA, 15 bp, Homo sapiens
aagaaaccagctaca

SEQ ID NO: 1229843 - DNA, 15 bp, Homo sapiens
aaagaaaccagctac

SEQ ID NO: 1229844 - DNA, 15 bp, Homo sapiens
aaaagaaaccagcta

SEQ ID NO: 1229845 - DNA, 15 bp, Homo sapiens
gaaaagaaaccagct

SEQ ID NO: 1229846 - DNA, 15 bp, Homo sapiens
tgaaaagaaaccagc

SEQ ID NO: 1229847 - DNA, 15 bp, Homo sapiens
gtgaaaagaaaccag

SEQ ID NO: 1229848 - DNA, 15 bp, Homo sapiens
agtgaaaagaaacca

SEQ ID NO: 1229849 - DNA, 15 bp, Homo sapiens
aagtgaaaagaaacc

SEQ ID NO: 1229850 - DNA, 15 bp, Homo sapiens
taagtgaaaagaaac

SEQ ID NO: 1229851 - DNA, 15 bp, Homo sapiens
ctaagtgaaaagaaa

SEQ ID NO: 1229852 - DNA, 15 bp, Homo sapiens
cctaagtgaaaagaa

SEQ ID NO: 1229853 - DNA, 15 bp, Homo sapiens
ccctaagtgaaaaga

SEQ ID NO: 1229854 - DNA, 15 bp, Homo sapiens
gccctaagtgaaaag

SEQ ID NO: 1229855 - DNA, 15 bp, Homo sapiens
tgccctaagtgaaaa

SEQ ID NO: 1229856 - DNA, 15 bp, Homo sapiens
ctgccctaagtgaaa

SEQ ID NO: 1229857 - DNA, 15 bp, Homo sapiens
gctgccctaagtgaa

SEQ ID NO: 1229858 - DNA, 15 bp, Homo sapiens
tgctgccctaagtga

SEQ ID NO: 1229859 - DNA, 15 bp, Homo sapiens
gtgctgccctaagtg

SEQ ID NO: 1229860 - DNA, 15 bp, Homo sapiens
ggtgctgccctaagt

SEQ ID NO: 1229861 - DNA, 15 bp, Homo sapiens
aggtgctgccctaag

SEQ ID NO: 1229862 - DNA, 15 bp, Homo sapiens
gaggtgctgccctaa

SEQ ID NO: 1229863 - DNA, 15 bp, Homo sapiens
agaggtgctgcccta

SEQ ID NO: 1229864 - DNA, 15 bp, Homo sapiens
tagaggtgctgccct

SEQ ID NO: 1229865 - DNA, 15 bp, Homo sapiens
gtagaggtgctgccc

SEQ ID NO: 1229866 - DNA, 15 bp, Homo sapiens
ggtagaggtgctgcc

SEQ ID NO: 1229867 - DNA, 15 bp, Homo sapiens
aggtagaggtgctgc

SEQ ID NO: 1229868 - DNA, 15 bp, Homo sapiens
gaggtagaggtgctg

SEQ ID NO: 1229869 - DNA, 15 bp, Homo sapiens
ggaggtagaggtgct

SEQ ID NO: 1229870 - DNA, 15 bp, Homo sapiens
gggaggtagaggtgc

SEQ ID NO: 1229871 - DNA, 15 bp, Homo sapiens
cgggaggtagaggtg

SEQ ID NO: 1229872 - DNA, 15 bp, Homo sapiens
acgggaggtagaggt

SEQ ID NO: 1229873 - DNA, 15 bp, Homo sapiens
gacgggaggtagagg

SEQ ID NO: 1229874 - DNA, 15 bp, Homo sapiens
agacgggaggtagag

SEQ ID NO: 1229875 - DNA, 15 bp, Homo sapiens
cagacgggaggtaga

SEQ ID NO: 1229876 - DNA, 15 bp, Homo sapiens
tcagacgggaggtag

SEQ ID NO: 1229877 - DNA, 15 bp, Homo sapiens
atcagacgggaggta

SEQ ID NO: 1229878 - DNA, 15 bp, Homo sapiens
aatcagacgggaggt

SEQ ID NO: 1229879 - DNA, 15 bp, Homo sapiens
caatcagacgggagg

SEQ ID NO: 1229880 - DNA, 15 bp, Homo sapiens
ccaatcagacgggag

SEQ ID NO: 1229881 - DNA, 15 bp, Homo sapiens
cccaatcagacggga

SEQ ID NO: 1229882 - DNA, 15 bp, Homo sapiens
acccaatcagacggg

SEQ ID NO: 1229883 - DNA, 15 bp, Homo sapiens
gacccaatcagacgg

SEQ ID NO: 1229884 - DNA, 15 bp, Homo sapiens
agacccaatcagacg

SEQ ID NO: 1229885 - DNA, 15 bp, Homo sapiens
aagacccaatcagac

SEQ ID NO: 1229886 - DNA, 15 bp, Homo sapiens
gaagacccaatcaga

SEQ ID NO: 1229887 - DNA, 15 bp, Homo sapiens
ggaagacccaatcag

SEQ ID NO: 1229888 - DNA, 15 bp, Homo sapiens
aggaagacccaatca

SEQ ID NO: 1229889 - DNA, 15 bp, Homo sapiens
gaggaagacccaatc

SEQ ID NO: 1229890 - DNA, 15 bp, Homo sapiens
cgaggaagacccaat

SEQ ID NO: 1229891 - DNA, 15 bp, Homo sapiens
ccgaggaagacccaa

SEQ ID NO: 1229892 - DNA, 15 bp, Homo sapiens
gccgaggaagaccca

SEQ ID NO: 1229893 - DNA, 15 bp, Homo sapiens
tgccgaggaagaccc

SEQ ID NO: 1229894 - DNA, 15 bp, Homo sapiens
atgccgaggaagacc

SEQ ID NO: 1229895 - DNA, 15 bp, Homo sapiens
aatgccgaggaagac

SEQ ID NO: 1229896 - DNA, 15 bp, Homo sapiens
gaatgccgaggaaga

SEQ ID NO: 1229897 - DNA, 15 bp, Homo sapiens
ggaatgccgaggaag

SEQ ID NO: 1229898 - DNA, 15 bp, Homo sapiens
tggaatgccgaggaa

SEQ ID NO: 1229899 - DNA, 15 bp, Homo sapiens
ctggaatgccgagga

SEQ ID NO: 1229900 - DNA, 15 bp, Homo sapiens
actggaatgccgagg

SEQ ID NO: 1229901 - DNA, 15 bp, Homo sapiens
aactggaatgccgag

SEQ ID NO: 1229902 - DNA, 15 bp, Homo sapiens
taactggaatgccga

SEQ ID NO: 1229903 - DNA, 15 bp, Homo sapiens
ctaactggaatgccg

SEQ ID NO: 1229904 - DNA, 15 bp, Homo sapiens
actaactggaatgcc

SEQ ID NO: 1229905 - DNA, 15 bp, Homo sapiens
gactaactggaatgc

SEQ ID NO: 1229906 - DNA, 15 bp, Homo sapiens
agactaactggaatg

SEQ ID NO: 1229907 - DNA, 15 bp, Homo sapiens
tagactaactggaat

SEQ ID NO: 1229908 - DNA, 15 bp, Homo sapiens
ctagactaactggaa

SEQ ID NO: 1229909 - DNA, 15 bp, Homo sapiens
gctagactaactgga

SEQ ID NO: 1229910 - DNA, 15 bp, Homo sapiens
ggctagactaactgg

SEQ ID NO: 1229911 - DNA, 15 bp, Homo sapiens
tggctagactaactg

SEQ ID NO: 1229912 - DNA, 15 bp, Homo sapiens
atggctagactaact

SEQ ID NO: 1229913 - DNA, 15 bp, Homo sapiens
tatggctagactaac

SEQ ID NO: 1229914 - DNA, 15 bp, Homo sapiens
ttatggctagactaa

SEQ ID NO: 1229915 - DNA, 15 bp, Homo sapiens
attatggctagacta

SEQ ID NO: 1229916 - DNA, 15 bp, Homo sapiens
gattatggctagact

SEQ ID NO: 1229917 - DNA, 15 bp, Homo sapiens
tgattatggctagac

SEQ ID NO: 1229918 - DNA, 15 bp, Homo sapiens
gtgattatggctaga

SEQ ID NO: 1229919 - DNA, 15 bp, Homo sapiens
ggtgattatggctag

SEQ ID NO: 1229920 - DNA, 15 bp, Homo sapiens
gggtgattatggcta

SEQ ID NO: 1229921 - DNA, 15 bp, Homo sapiens
tgggtgattatggct

SEQ ID NO: 1229922 - DNA, 15 bp, Homo sapiens
gtgggtgattatggc

SEQ ID NO: 1229923 - DNA, 15 bp, Homo sapiens
ggtgggtgattatgg

SEQ ID NO: 1229924 - DNA, 15 bp, Homo sapiens
gggtgggtgattatg

SEQ ID NO: 1229925 - DNA, 15 bp, Homo sapiens
tgggtgggtgattat

SEQ ID NO: 1229926 - DNA, 15 bp, Homo sapiens
atgggtgggtgatta

SEQ ID NO: 1229927 - DNA, 15 bp, Homo sapiens
aatgggtgggtgatt

SEQ ID NO: 1229928 - DNA, 15 bp, Homo sapiens
taatgggtgggtgat

SEQ ID NO: 1229929 - DNA, 15 bp, Homo sapiens
ttaatgggtgggtga

SEQ ID NO: 1229930 - DNA, 15 bp, Homo sapiens
cttaatgggtgggtg

SEQ ID NO: 1229931 - DNA, 15 bp, Homo sapiens
acttaatgggtgggt

SEQ ID NO: 1229932 - DNA, 15 bp, Homo sapiens
gacttaatgggtggg

SEQ ID NO: 1229933 - DNA, 15 bp, Homo sapiens
ggacttaatgggtgg

SEQ ID NO: 1229934 - DNA, 15 bp, Homo sapiens
tggacttaatgggtg

SEQ ID NO: 1229935 - DNA, 15 bp, Homo sapiens
atggacttaatgggt

SEQ ID NO: 1229936 - DNA, 15 bp, Homo sapiens
gatggacttaatggg

SEQ ID NO: 1229937 - DNA, 15 bp, Homo sapiens
agatggacttaatgg

SEQ ID NO: 1229938 - DNA, 15 bp, Homo sapiens
aagatggacttaatg

SEQ ID NO: 1229939 - DNA, 15 bp, Homo sapiens
caagatggacttaat

SEQ ID NO: 1229940 - DNA, 15 bp, Homo sapiens
tcaagatggacttaa

SEQ ID NO: 1229941 - DNA, 15 bp, Homo sapiens
atcaagatggactta

SEQ ID NO: 1229942 - DNA, 15 bp, Homo sapiens
catcaagatggactt

SEQ ID NO: 1229943 - DNA, 15 bp, Homo sapiens
ccatcaagatggact

SEQ ID NO: 1229944 - DNA, 15 bp, Homo sapiens
gccatcaagatggac

SEQ ID NO: 1229945 - DNA, 15 bp, Homo sapiens
ggccatcaagatgga

SEQ ID NO: 1229946 - DNA, 15 bp, Homo sapiens
tggccatcaagatgg

SEQ ID NO: 1229947 - DNA, 15 bp, Homo sapiens
ctggccatcaagatg

SEQ ID NO: 1229948 - DNA, 15 bp, Homo sapiens
tctggccatcaagat

SEQ ID NO: 1229949 - DNA, 15 bp, Homo sapiens
atctggccatcaaga

SEQ ID NO: 1229950 - DNA, 15 bp, Homo sapiens
aatctggccatcaag

SEQ ID NO: 1229951 - DNA, 15 bp, Homo sapiens
taatctggccatcaa

SEQ ID NO: 1229952 - DNA, 15 bp, Homo sapiens
ataatctggccatca

SEQ ID NO: 1229953 - DNA, 15 bp, Homo sapiens
gataatctggccatc

SEQ ID NO: 1229954 - DNA, 15 bp, Homo sapiens
agataatctggccat

SEQ ID NO: 1229955 - DNA, 15 bp, Homo sapiens
aagataatctggcca

SEQ ID NO: 1229956 - DNA, 15 bp, Homo sapiens
gaagataatctggcc

SEQ ID NO: 1229957 - DNA, 15 bp, Homo sapiens
tgaagataatctggc

SEQ ID NO: 1229958 - DNA, 15 bp, Homo sapiens
ctgaagataatctgg

SEQ ID NO: 1229959 - DNA, 15 bp, Homo sapiens
cctgaagataatctg

SEQ ID NO: 1229960 - DNA, 15 bp, Homo sapiens
gcctgaagataatct

SEQ ID NO: 1229961 - DNA, 15 bp, Homo sapiens
agcctgaagataatc

SEQ ID NO: 1229962 - DNA, 15 bp, Homo sapiens
aagcctgaagataat

SEQ ID NO: 1229963 - DNA, 15 bp, Homo sapiens
aaagcctgaagataa

SEQ ID NO: 1229964 - DNA, 15 bp, Homo sapiens
aaaagcctgaagata

SEQ ID NO: 1229965 - DNA, 15 bp, Homo sapiens
caaaagcctgaagat

SEQ ID NO: 1229966 - DNA, 15 bp, Homo sapiens
gcaaaagcctgaaga

SEQ ID NO: 1229967 - DNA, 15 bp, Homo sapiens
agcaaaagcctgaag

SEQ ID NO: 1229968 - DNA, 15 bp, Homo sapiens
tagcaaaagcctgaa

SEQ ID NO: 1229969 - DNA, 15 bp, Homo sapiens
gtagcaaaagcctga

SEQ ID NO: 1229970 - DNA, 15 bp, Homo sapiens
agtagcaaaagcctg

SEQ ID NO: 1229971 - DNA, 15 bp, Homo sapiens
tagtagcaaaagcct

SEQ ID NO: 1229972 - DNA, 15 bp, Homo sapiens
gtagtagcaaaagcc

SEQ ID NO: 1229973 - DNA, 15 bp, Homo sapiens
tgtagtagcaaaagc

SEQ ID NO: 1229974 - DNA, 15 bp, Homo sapiens
ttgtagtagcaaaag

SEQ ID NO: 1229975 - DNA, 15 bp, Homo sapiens
cttgtagtagcaaaa

SEQ ID NO: 1229976 - DNA, 15 bp, Homo sapiens
gcttgtagtagcaaa

SEQ ID NO: 1229977 - DNA, 15 bp, Homo sapiens
tgcttgtagtagcaa

SEQ ID NO: 1229978 - DNA, 15 bp, Homo sapiens
ttgcttgtagtagca

SEQ ID NO: 1229979 - DNA, 15 bp, Homo sapiens
attgcttgtagtagc

SEQ ID NO: 1229980 - DNA, 15 bp, Homo sapiens
cattgcttgtagtag

SEQ ID NO: 1229981 - DNA, 15 bp, Homo sapiens
tcattgcttgtagta

SEQ ID NO: 1229982 - DNA, 15 bp, Homo sapiens
ctcattgcttgtagt

SEQ ID NO: 1229983 - DNA, 15 bp, Homo sapiens
cctcattgcttgtag

SEQ ID NO: 1229984 - DNA, 15 bp, Homo sapiens
gcctcattgcttgta

SEQ ID NO: 1229985 - DNA, 15 bp, Homo sapiens
tgcctcattgcttgt

SEQ ID NO: 1229986 - DNA, 15 bp, Homo sapiens
ctgcctcattgcttg

SEQ ID NO: 1229987 - DNA, 15 bp, Homo sapiens
gctgcctcattgctt

SEQ ID NO: 1229988 - DNA, 15 bp, Homo sapiens
tgctgcctcattgct

SEQ ID NO: 1229989 - DNA, 15 bp, Homo sapiens
ctgctgcctcattgc

SEQ ID NO: 1229990 - DNA, 15 bp, Homo sapiens
tctgctgcctcattg

SEQ ID NO: 1229991 - DNA, 15 bp, Homo sapiens
gtctgctgcctcatt

SEQ ID NO: 1229992 - DNA, 15 bp, Homo sapiens
tgtctgctgcctcat

SEQ ID NO: 1229993 - DNA, 15 bp, Homo sapiens
atgtctgctgcctca

SEQ ID NO: 1229994 - DNA, 15 bp, Homo sapiens
gatgtctgctgcctc

SEQ ID NO: 1229995 - DNA, 15 bp, Homo sapiens
tgatgtctgctgcct

SEQ ID NO: 1229996 - DNA, 15 bp, Homo sapiens
atgatgtctgctgcc

SEQ ID NO: 1229997 - DNA, 15 bp, Homo sapiens
aatgatgtctgctgc

SEQ ID NO: 1229998 - DNA, 15 bp, Homo sapiens
caatgatgtctgctg

SEQ ID NO: 1229999 - DNA, 15 bp, Homo sapiens
tcaatgatgtctgct

SEQ ID NO: 1230000 - DNA, 15 bp, Homo sapiens
ctcaatgatgtctgc

SEQ ID NO: 1230001 - DNA, 15 bp, Homo sapiens
gctcaatgatgtctg

SEQ ID NO: 1230002 - DNA, 15 bp, Homo sapiens
cgctcaatgatgtct

SEQ ID NO: 1230003 - DNA, 15 bp, Homo sapiens
acgctcaatgatgtc

SEQ ID NO: 1230004 - DNA, 15 bp, Homo sapiens
tacgctcaatgatgt

SEQ ID NO: 1230005 - DNA, 15 bp, Homo sapiens
gtacgctcaatgatg

SEQ ID NO: 1230006 - DNA, 15 bp, Homo sapiens
tgtacgctcaatgat

SEQ ID NO: 1230007 - DNA, 15 bp, Homo sapiens
atgtacgctcaatga

SEQ ID NO: 1230008 - DNA, 15 bp, Homo sapiens
aatgtacgctcaatg

SEQ ID NO: 1230009 - DNA, 15 bp, Homo sapiens
aaatgtacgctcaat

SEQ ID NO: 1230010 - DNA, 15 bp, Homo sapiens
aaaatgtacgctcaa

SEQ ID NO: 1230011 - DNA, 15 bp, Homo sapiens
aaaaatgtacgctca

SEQ ID NO: 1230012 - DNA, 15 bp, Homo sapiens
aaaaaatgtacgctc

SEQ ID NO: 1230013 - DNA, 15 bp, Homo sapiens
aaaaaaatgtacgct

SEQ ID NO: 1230014 - DNA, 15 bp, Homo sapiens
aaaaaaaatgtacgc

SEQ ID NO: 1230015 - DNA, 15 bp, Homo sapiens
aaaaaaaaatgtacg

SEQ ID NO: 1230016 - DNA, 15 bp, Homo sapiens
aaaaaaaaaatgtac

SEQ ID NO: 1230017 - DNA, 15 bp, Homo sapiens
aaaaaaaaaaaatgt

SEQ ID NO: 1230018 - DNA, 15 bp, Homo sapiens
aaaaaaaaaaaaatg

SEQ ID NO: 1230019 - DNA, 15 bp, Homo sapiens
gttaaaaaaaaaaaa

SEQ ID NO: 1230020 - DNA, 15 bp, Homo sapiens
tgttaaaaaaaaaaa

SEQ ID NO: 1230021 - DNA, 15 bp, Homo sapiens
gtgttaaaaaaaaaa

SEQ ID NO: 1230022 - DNA, 15 bp, Homo sapiens
tgtgttaaaaaaaaa

SEQ ID NO: 1230023 - DNA, 15 bp, Homo sapiens
ctgtgttaaaaaaaa

SEQ ID NO: 1230024 - DNA, 15 bp, Homo sapiens
tctgtgttaaaaaaa

SEQ ID NO: 1230025 - DNA, 15 bp, Homo sapiens
ctctgtgttaaaaaa

SEQ ID NO: 1230026 - DNA, 15 bp, Homo sapiens
actctgtgttaaaaa

SEQ ID NO: 1230027 - DNA, 15 bp, Homo sapiens
gactctgtgttaaaa

SEQ ID NO: 1230028 - DNA, 15 bp, Homo sapiens
agactctgtgttaaa

SEQ ID NO: 1230029 - DNA, 15 bp, Homo sapiens
gagactctgtgttaa

SEQ ID NO: 1230030 - DNA, 15 bp, Homo sapiens
agagactctgtgtta

SEQ ID NO: 1230031 - DNA, 15 bp, Homo sapiens
gagagactctgtgtt

SEQ ID NO: 1230032 - DNA, 15 bp, Homo sapiens
agagagactctgtgt

SEQ ID NO: 1230033 - DNA, 15 bp, Homo sapiens
gagagagactctgtg

SEQ ID NO: 1230034 - DNA, 15 bp, Homo sapiens
gacagagagagactc

SEQ ID NO: 1230035 - DNA, 15 bp, Homo sapiens
tgacagagagagact

SEQ ID NO: 1230036 - DNA, 15 bp, Homo sapiens
gtgacagagagagac

SEQ ID NO: 1230037 - DNA, 15 bp, Homo sapiens
ggtgacagagagaga

SEQ ID NO: 1230038 - DNA, 15 bp, Homo sapiens
gggtgacagagagag

SEQ ID NO: 1230039 - DNA, 15 bp, Homo sapiens
tgggtgacagagaga

SEQ ID NO: 1230040 - DNA, 15 bp, Homo sapiens
ctgggtgacagagag

SEQ ID NO: 1230041 - DNA, 15 bp, Homo sapiens
gtgcactccagcctg

SEQ ID NO: 1230042 - DNA, 15 bp, Homo sapiens
agtgcactccagcct

SEQ ID NO: 1230043 - DNA, 15 bp, Homo sapiens
tagtgcactccagcc

SEQ ID NO: 1230044 - DNA, 15 bp, Homo sapiens
ctagtgcactccagc

SEQ ID NO: 1230045 - DNA, 15 bp, Homo sapiens
cctagtgcactccag

SEQ ID NO: 1230046 - DNA, 15 bp, Homo sapiens
ccctagtgcactcca

SEQ ID NO: 1230047 - DNA, 15 bp, Homo sapiens
gccctagtgcactcc

SEQ ID NO: 1230048 - DNA, 15 bp, Homo sapiens
tgccctagtgcactc

SEQ ID NO: 1230049 - DNA, 15 bp, Homo sapiens
ttgccctagtgcact

SEQ ID NO: 1230050 - DNA, 15 bp, Homo sapiens
attgccctagtgcac

SEQ ID NO: 1230051 - DNA, 15 bp, Homo sapiens
gattgccctagtgca

SEQ ID NO: 1230052 - DNA, 15 bp, Homo sapiens
agattgccctagtgc

SEQ ID NO: 1230053 - DNA, 15 bp, Homo sapiens
aagattgccctagtg

SEQ ID NO: 1230054 - DNA, 15 bp, Homo sapiens
caagattgccctagt

SEQ ID NO: 1230055 - DNA, 15 bp, Homo sapiens
ccaagattgccctag

SEQ ID NO: 1230056 - DNA, 15 bp, Homo sapiens
gccaagattgcccta

SEQ ID NO: 1230057 - DNA, 15 bp, Homo sapiens
agccaagattgccct

SEQ ID NO: 1230058 - DNA, 15 bp, Homo sapiens
gagccaagattgccc

SEQ ID NO: 1230059 - DNA, 15 bp, Homo sapiens
tgagccaagattgcc

SEQ ID NO: 1230060 - DNA, 15 bp, Homo sapiens
acacacctgtaatcc

SEQ ID NO: 1230061 - DNA, 15 bp, Homo sapiens
cacacacctgtaatc

SEQ ID NO: 1230062 - DNA, 15 bp, Homo sapiens
gcacacacctgtaat

SEQ ID NO: 1230063 - DNA, 15 bp, Homo sapiens
ggcacacacctgtaa

SEQ ID NO: 1230064 - DNA, 15 bp, Homo sapiens
tggcacacacctgta

SEQ ID NO: 1230065 - DNA, 15 bp, Homo sapiens
gtggcacacacctgt

SEQ ID NO: 1230066 - DNA, 15 bp, Homo sapiens
ggtggcacacacctg

SEQ ID NO: 1230067 - DNA, 15 bp, Homo sapiens
agtggtggcacacac

SEQ ID NO: 1230068 - DNA, 15 bp, Homo sapiens
gagtggtggcacaca

SEQ ID NO: 1230069 - DNA, 15 bp, Homo sapiens
ggagtggtggcacac

SEQ ID NO: 1230070 - DNA, 15 bp, Homo sapiens
aggagtggtggcaca

SEQ ID NO: 1230071 - DNA, 15 bp, Homo sapiens
caggagtggtggcac

SEQ ID NO: 1230072 - DNA, 15 bp, Homo sapiens
tcaggagtggtggca

SEQ ID NO: 1230073 - DNA, 15 bp, Homo sapiens
gtcaggagtggtggc

SEQ ID NO: 1230074 - DNA, 15 bp, Homo sapiens
agtcaggagtggtgg

SEQ ID NO: 1230075 - DNA, 15 bp, Homo sapiens
tagtcaggagtggtg

SEQ ID NO: 1230076 - DNA, 15 bp, Homo sapiens
ttagtcaggagtggt

SEQ ID NO: 1230077 - DNA, 15 bp, Homo sapiens
attagtcaggagtgg

SEQ ID NO: 1230078 - DNA, 15 bp, Homo sapiens
aattagtcaggagtg

SEQ ID NO: 1230079 - DNA, 15 bp, Homo sapiens
aaattagtcaggagt

SEQ ID NO: 1230080 - DNA, 15 bp, Homo sapiens
aaaattagtcaggag

SEQ ID NO: 1230081 - DNA, 15 bp, Homo sapiens
aaaaattagtcagga

SEQ ID NO: 1230082 - DNA, 15 bp, Homo sapiens
caaaaaattagtcag

SEQ ID NO: 1230083 - DNA, 15 bp, Homo sapiens
acaaaaaattagtca

SEQ ID NO: 1230084 - DNA, 15 bp, Homo sapiens
cacaaaaaattagtc

SEQ ID NO: 1230085 - DNA, 15 bp, Homo sapiens
acacaaaaaattagt

SEQ ID NO: 1230086 - DNA, 15 bp, Homo sapiens
cacacaaaaaattag

SEQ ID NO: 1230087 - DNA, 15 bp, Homo sapiens
acacacaaaaaatta

SEQ ID NO: 1230088 - DNA, 15 bp, Homo sapiens
aacacacaaaaaatt

SEQ ID NO: 1230089 - DNA, 15 bp, Homo sapiens
aaacacacaaaaaat

SEQ ID NO: 1230090 - DNA, 15 bp, Homo sapiens
aaaacacacaaaaaa

SEQ ID NO: 1230091 - DNA, 15 bp, Homo sapiens
aaaaacacacaaaaa

SEQ ID NO: 1230092 - DNA, 15 bp, Homo sapiens
taaaaacacacaaaa

SEQ ID NO: 1230093 - DNA, 15 bp, Homo sapiens
ctaaaaacacacaaa

SEQ ID NO: 1230094 - DNA, 15 bp, Homo sapiens
actaaaaacacacaa

SEQ ID NO: 1230095 - DNA, 15 bp, Homo sapiens
tactaaaaacacaca

SEQ ID NO: 1230096 - DNA, 15 bp, Homo sapiens
ctactaaaaacacac

SEQ ID NO: 1230097 - DNA, 15 bp, Homo sapiens
tctactaaaaacaca

SEQ ID NO: 1230098 - DNA, 15 bp, Homo sapiens
ctctactaaaaacac

SEQ ID NO: 1230099 - DNA, 15 bp, Homo sapiens
tctctactaaaaaca

SEQ ID NO: 1230100 - DNA, 15 bp, Homo sapiens
atctctactaaaaac

SEQ ID NO: 1230101 - DNA, 15 bp, Homo sapiens
agaaactccatctct

SEQ ID NO: 1230102 - DNA, 15 bp, Homo sapiens
ggagaaactccatct

SEQ ID NO: 1230103 - DNA, 15 bp, Homo sapiens
tggagaaactccatc

SEQ ID NO: 1230104 - DNA, 15 bp, Homo sapiens
gtggagaaactccat

SEQ ID NO: 1230105 - DNA, 15 bp, Homo sapiens
cgtggagaaactcca

SEQ ID NO: 1230106 - DNA, 15 bp, Homo sapiens
acgtggagaaactcc

SEQ ID NO: 1230107 - DNA, 15 bp, Homo sapiens
aacgtggagaaactc

SEQ ID NO: 1230108 - DNA, 15 bp, Homo sapiens
caacgtggagaaact

SEQ ID NO: 1230109 - DNA, 15 bp, Homo sapiens
gccaacgtggagaaa

SEQ ID NO: 1230110 - DNA, 15 bp, Homo sapiens
ggccaacgtggagaa

SEQ ID NO: 1230111 - DNA, 15 bp, Homo sapiens
tggccaacgtggaga

SEQ ID NO: 1230112 - DNA, 15 bp, Homo sapiens
ctggccaacgtggag

SEQ ID NO: 1230113 - DNA, 15 bp, Homo sapiens
cctggccaacgtgga

SEQ ID NO: 1230114 - DNA, 15 bp, Homo sapiens
atcgagaccagcctg

SEQ ID NO: 1230115 - DNA, 15 bp, Homo sapiens
gatcgagaccagcct

SEQ ID NO: 1230116 - DNA, 15 bp, Homo sapiens
cgatcgagaccagcc

SEQ ID NO: 1230117 - DNA, 15 bp, Homo sapiens
gcgatcgagaccagc

SEQ ID NO: 1230118 - DNA, 15 bp, Homo sapiens
ggcgatcgagaccag

SEQ ID NO: 1230119 - DNA, 15 bp, Homo sapiens
aggcgatcgagacca

SEQ ID NO: 1230120 - DNA, 15 bp, Homo sapiens
caggcgatcgagacc

SEQ ID NO: 1230121 - DNA, 15 bp, Homo sapiens
ccaggcgatcgagac

SEQ ID NO: 1230122 - DNA, 15 bp, Homo sapiens
gccaggcgatcgaga

SEQ ID NO: 1230123 - DNA, 15 bp, Homo sapiens
ggccaggcgatcgag

SEQ ID NO: 1230124 - DNA, 15 bp, Homo sapiens
aggccaggcgatcga

SEQ ID NO: 1230125 - DNA, 15 bp, Homo sapiens
gaggccaggcgatcg

SEQ ID NO: 1230126 - DNA, 15 bp, Homo sapiens
tgaggccaggcgatc

SEQ ID NO: 1230127 - DNA, 15 bp, Homo sapiens
ttgaggccaggcgat

SEQ ID NO: 1230128 - DNA, 15 bp, Homo sapiens
cttgaggccaggcga

SEQ ID NO: 1230129 - DNA, 15 bp, Homo sapiens
gcttgaggccaggcg

SEQ ID NO: 1230130 - DNA, 15 bp, Homo sapiens
cgcttgaggccaggc

SEQ ID NO: 1230131 - DNA, 15 bp, Homo sapiens
tcgcttgaggccagg

SEQ ID NO: 1230132 - DNA, 15 bp, Homo sapiens
atcgcttgaggccag

SEQ ID NO: 1230133 - DNA, 15 bp, Homo sapiens
gatcgcttgaggcca

SEQ ID NO: 1230134 - DNA, 15 bp, Homo sapiens
ggatcgcttgaggcc

SEQ ID NO: 1230135 - DNA, 15 bp, Homo sapiens
tggatcgcttgaggc

SEQ ID NO: 1230136 - DNA, 15 bp, Homo sapiens
gtggatcgcttgagg

SEQ ID NO: 1230137 - DNA, 15 bp, Homo sapiens
ggtggatcgcttgag

SEQ ID NO: 1230138 - DNA, 15 bp, Homo sapiens
aggtggatcgcttga

SEQ ID NO: 1230139 - DNA, 15 bp, Homo sapiens
caggtggatcgcttg

SEQ ID NO: 1230140 - DNA, 15 bp, Homo sapiens
gcaggtggatcgctt

SEQ ID NO: 1230141 - DNA, 15 bp, Homo sapiens
ggcaggtggatcgct

SEQ ID NO: 1230142 - DNA, 15 bp, Homo sapiens
aggcaggtggatcgc

SEQ ID NO: 1230143 - DNA, 15 bp, Homo sapiens
gaggcaggtggatcg

SEQ ID NO: 1230144 - DNA, 15 bp, Homo sapiens
gaggctgaggcaggt

SEQ ID NO: 1230145 - DNA, 15 bp, Homo sapiens
ttttgggaggctgag

SEQ ID NO: 1230146 - DNA, 15 bp, Homo sapiens
attttgggaggctga

SEQ ID NO: 1230147 - DNA, 15 bp, Homo sapiens
cattttgggaggctg

SEQ ID NO: 1230148 - DNA, 15 bp, Homo sapiens
gcattttgggaggct

SEQ ID NO: 1230149 - DNA, 15 bp, Homo sapiens
ttgtaatcccagcat

SEQ ID NO: 1230150 - DNA, 15 bp, Homo sapiens
tgggcgtggtggctc

SEQ ID NO: 1230151 - DNA, 15 bp, Homo sapiens
ctgggcgtggtggct

SEQ ID NO: 1230152 - DNA, 15 bp, Homo sapiens
ggctgggcgtggtgg

SEQ ID NO: 1230153 - DNA, 15 bp, Homo sapiens
aggctgggcgtggtg

SEQ ID NO: 1230154 - DNA, 15 bp, Homo sapiens
caggctgggcgtggt

SEQ ID NO: 1230155 - DNA, 15 bp, Homo sapiens
acaggctgggcgtgg

SEQ ID NO: 1230156 - DNA, 15 bp, Homo sapiens
gacaggctgggcgtg

SEQ ID NO: 1230157 - DNA, 15 bp, Homo sapiens
ggacaggctgggcgt

SEQ ID NO: 1230158 - DNA, 15 bp, Homo sapiens
cggacaggctgggcg

SEQ ID NO: 1230159 - DNA, 15 bp, Homo sapiens
acggacaggctgggc

SEQ ID NO: 1230160 - DNA, 15 bp, Homo sapiens
tacggacaggctggg

SEQ ID NO: 1230161 - DNA, 15 bp, Homo sapiens
gtacggacaggctgg

SEQ ID NO: 1230162 - DNA, 15 bp, Homo sapiens
tgtacggacaggctg

SEQ ID NO: 1230163 - DNA, 15 bp, Homo sapiens
atgtacggacaggct

SEQ ID NO: 1230164 - DNA, 15 bp, Homo sapiens
gatgtacggacaggc

SEQ ID NO: 1230165 - DNA, 15 bp, Homo sapiens
agatgtacggacagg

SEQ ID NO: 1230166 - DNA, 15 bp, Homo sapiens
aagatgtacggacag

SEQ ID NO: 1230167 - DNA, 15 bp, Homo sapiens
aaagatgtacggaca

SEQ ID NO: 1230168 - DNA, 15 bp, Homo sapiens
taaagatgtacggac

SEQ ID NO: 1230169 - DNA, 15 bp, Homo sapiens
ataaagatgtacgga

SEQ ID NO: 1230170 - DNA, 15 bp, Homo sapiens
cataaagatgtacgg

SEQ ID NO: 1230171 - DNA, 15 bp, Homo sapiens
ccataaagatgtacg

SEQ ID NO: 1230172 - DNA, 15 bp, Homo sapiens
tccataaagatgtac

SEQ ID NO: 1230173 - DNA, 15 bp, Homo sapiens
ttccataaagatgta

SEQ ID NO: 1230174 - DNA, 15 bp, Homo sapiens
cttccataaagatgt

SEQ ID NO: 1230175 - DNA, 15 bp, Homo sapiens
acttccataaagatg

SEQ ID NO: 1230176 - DNA, 15 bp, Homo sapiens
tacttccataaagat

SEQ ID NO: 1230177 - DNA, 15 bp, Homo sapiens
ttacttccataaaga

SEQ ID NO: 1230178 - DNA, 15 bp, Homo sapiens
attacttccataaag

SEQ ID NO: 1230179 - DNA, 15 bp, Homo sapiens
aattacttccataaa

SEQ ID NO: 1230180 - DNA, 15 bp, Homo sapiens
caattacttccataa

SEQ ID NO: 1230181 - DNA, 15 bp, Homo sapiens
tcaattacttccata

SEQ ID NO: 1230182 - DNA, 15 bp, Homo sapiens
atcaattacttccat

SEQ ID NO: 1230183 - DNA, 15 bp, Homo sapiens
aatcaattacttcca

SEQ ID NO: 1230184 - DNA, 15 bp, Homo sapiens
aaatcaattacttcc

SEQ ID NO: 1230185 - DNA, 15 bp, Homo sapiens
aaaatcaattacttc

SEQ ID NO: 1230186 - DNA, 15 bp, Homo sapiens
aaaaatcaattactt

SEQ ID NO: 1230187 - DNA, 15 bp, Homo sapiens
aaaaaatcaattact

SEQ ID NO: 1230188 - DNA, 15 bp, Homo sapiens
gaaaaaatcaattac

SEQ ID NO: 1230189 - DNA, 15 bp, Homo sapiens
ggaaaaaatcaatta

SEQ ID NO: 1230190 - DNA, 15 bp, Homo sapiens
aggaaaaaatcaatt

SEQ ID NO: 1230191 - DNA, 15 bp, Homo sapiens
gaggaaaaaatcaat

SEQ ID NO: 1230192 - DNA, 15 bp, Homo sapiens
tgaggaaaaaatcaa

SEQ ID NO: 1230193 - DNA, 15 bp, Homo sapiens
ctgaggaaaaaatca

SEQ ID NO: 1230194 - DNA, 15 bp, Homo sapiens
cctgaggaaaaaatc

SEQ ID NO: 1230195 - DNA, 15 bp, Homo sapiens
tcctgaggaaaaaat

SEQ ID NO: 1230196 - DNA, 15 bp, Homo sapiens
atcctgaggaaaaaa

SEQ ID NO: 1230197 - DNA, 15 bp, Homo sapiens
gatcctgaggaaaaa

SEQ ID NO: 1230198 - DNA, 15 bp, Homo sapiens
tgatcctgaggaaaa

SEQ ID NO: 1230199 - DNA, 15 bp, Homo sapiens
atgatcctgaggaaa

SEQ ID NO: 1230200 - DNA, 15 bp, Homo sapiens
aatgatcctgaggaa

SEQ ID NO: 1230201 - DNA, 15 bp, Homo sapiens
aaatgatcctgagga

SEQ ID NO: 1230202 - DNA, 15 bp, Homo sapiens
gaaatgatcctgagg

SEQ ID NO: 1230203 - DNA, 15 bp, Homo sapiens
agaaatgatcctgag

SEQ ID NO: 1230204 - DNA, 15 bp, Homo sapiens
aagaaatgatcctga

SEQ ID NO: 1230205 - DNA, 15 bp, Homo sapiens
aaagaaatgatcctg

SEQ ID NO: 1230206 - DNA, 15 bp, Homo sapiens
caaagaaatgatcct

SEQ ID NO: 1230207 - DNA, 15 bp, Homo sapiens
tcaaagaaatgatcc

SEQ ID NO: 1230208 - DNA, 15 bp, Homo sapiens
ctcaaagaaatgatc

SEQ ID NO: 1230209 - DNA, 15 bp, Homo sapiens
actcaaagaaatgat

SEQ ID NO: 1230210 - DNA, 15 bp, Homo sapiens
tactcaaagaaatga

SEQ ID NO: 1230211 - DNA, 15 bp, Homo sapiens
ttactcaaagaaatg

SEQ ID NO: 1230212 - DNA, 15 bp, Homo sapiens
gttactcaaagaaat

SEQ ID NO: 1230213 - DNA, 15 bp, Homo sapiens
tgttactcaaagaaa

SEQ ID NO: 1230214 - DNA, 15 bp, Homo sapiens
atgttactcaaagaa

SEQ ID NO: 1230215 - DNA, 15 bp, Homo sapiens
aatgttactcaaaga

SEQ ID NO: 1230216 - DNA, 15 bp, Homo sapiens
caatgttactcaaag

SEQ ID NO: 1230217 - DNA, 15 bp, Homo sapiens
gcaatgttactcaaa

SEQ ID NO: 1230218 - DNA, 15 bp, Homo sapiens
ggcaatgttactcaa

SEQ ID NO: 1230219 - DNA, 15 bp, Homo sapiens
tggcaatgttactca

SEQ ID NO: 1230220 - DNA, 15 bp, Homo sapiens
ttggcaatgttactc

SEQ ID NO: 1230221 - DNA, 15 bp, Homo sapiens
cttggcaatgttact

SEQ ID NO: 1230222 - DNA, 15 bp, Homo sapiens
gcttggcaatgttac

SEQ ID NO: 1230223 - DNA, 15 bp, Homo sapiens
agcttggcaatgtta

SEQ ID NO: 1230224 - DNA, 15 bp, Homo sapiens
cagcttggcaatgtt

SEQ ID NO: 1230225 - DNA, 15 bp, Homo sapiens
tcagcttggcaatgt

SEQ ID NO: 1230226 - DNA, 15 bp, Homo sapiens
atcagcttggcaatg

SEQ ID NO: 1230227 - DNA, 15 bp, Homo sapiens
tatcagcttggcaat

SEQ ID NO: 1230228 - DNA, 15 bp, Homo sapiens
gtatcagcttggcaa

SEQ ID NO: 1230229 - DNA, 15 bp, Homo sapiens
tgtatcagcttggca

SEQ ID NO: 1230230 - DNA, 15 bp, Homo sapiens
atgtatcagcttggc

SEQ ID NO: 1230231 - DNA, 15 bp, Homo sapiens
aatgtatcagcttgg

SEQ ID NO: 1230232 - DNA, 15 bp, Homo sapiens
gaatgtatcagcttg

SEQ ID NO: 1230233 - DNA, 15 bp, Homo sapiens
tgaatgtatcagctt

SEQ ID NO: 1230234 - DNA, 15 bp, Homo sapiens
atgaatgtatcagct

SEQ ID NO: 1230235 - DNA, 15 bp, Homo sapiens
catgaatgtatcagc

SEQ ID NO: 1230236 - DNA, 15 bp, Homo sapiens
tcatgaatgtatcag

SEQ ID NO: 1230237 - DNA, 15 bp, Homo sapiens
atcatgaatgtatca

SEQ ID NO: 1230238 - DNA, 15 bp, Homo sapiens
tatcatgaatgtatc

SEQ ID NO: 1230239 - DNA, 15 bp, Homo sapiens
ttatcatgaatgtat

SEQ ID NO: 1230240 - DNA, 15 bp, Homo sapiens
tttatcatgaatgta

SEQ ID NO: 1230241 - DNA, 15 bp, Homo sapiens
ttttatcatgaatgt

SEQ ID NO: 1230242 - DNA, 15 bp, Homo sapiens
cttttatcatgaatg

SEQ ID NO: 1230243 - DNA, 15 bp, Homo sapiens
acttttatcatgaat

SEQ ID NO: 1230244 - DNA, 15 bp, Homo sapiens
tacttttatcatgaa

SEQ ID NO: 1230245 - DNA, 15 bp, Homo sapiens
ttacttttatcatga

SEQ ID NO: 1230246 - DNA, 15 bp, Homo sapiens
gttacttttatcatg

SEQ ID NO: 1230247 - DNA, 15 bp, Homo sapiens
tgttacttttatcat

SEQ ID NO: 1230248 - DNA, 15 bp, Homo sapiens
ttgttacttttatca

SEQ ID NO: 1230249 - DNA, 15 bp, Homo sapiens
attgttacttttatc

SEQ ID NO: 1230250 - DNA, 15 bp, Homo sapiens
gattgttacttttat

SEQ ID NO: 1230251 - DNA, 15 bp, Homo sapiens
tgattgttactttta

SEQ ID NO: 1230252 - DNA, 15 bp, Homo sapiens
atgattgttactttt

SEQ ID NO: 1230253 - DNA, 15 bp, Homo sapiens
aatgattgttacttt

SEQ ID NO: 1230254 - DNA, 15 bp, Homo sapiens
aaatgattgttactt

SEQ ID NO: 1230255 - DNA, 15 bp, Homo sapiens
taaatgattgttact

SEQ ID NO: 1230256 - DNA, 15 bp, Homo sapiens
ataaatgattgttac

SEQ ID NO: 1230257 - DNA, 15 bp, Homo sapiens
aataaatgattgtta

SEQ ID NO: 1230258 - DNA, 15 bp, Homo sapiens
caataaatgattgtt

SEQ ID NO: 1230259 - DNA, 15 bp, Homo sapiens
tcaataaatgattgt

SEQ ID NO: 1230260 - DNA, 15 bp, Homo sapiens
ctcaataaatgattg

SEQ ID NO: 1230261 - DNA, 15 bp, Homo sapiens
actcaataaatgatt

SEQ ID NO: 1230262 - DNA, 15 bp, Homo sapiens
tactcaataaatgat

SEQ ID NO: 1230263 - DNA, 15 bp, Homo sapiens
gtactcaataaatga

SEQ ID NO: 1230264 - DNA, 15 bp, Homo sapiens
taggtactcaataaa

SEQ ID NO: 1230265 - DNA, 15 bp, Homo sapiens
gtaggtactcaataa

SEQ ID NO: 1230266 - DNA, 15 bp, Homo sapiens
agtaggtactcaata

SEQ ID NO: 1230267 - DNA, 15 bp, Homo sapiens
cagtaggtactcaat

SEQ ID NO: 1230268 - DNA, 15 bp, Homo sapiens
acagtaggtactcaa

SEQ ID NO: 1230269 - DNA, 15 bp, Homo sapiens
cacagtaggtactca

SEQ ID NO: 1230270 - DNA, 15 bp, Homo sapiens
ccacagtaggtactc

SEQ ID NO: 1230271 - DNA, 15 bp, Homo sapiens
cccacagtaggtact

SEQ ID NO: 1230272 - DNA, 15 bp, Homo sapiens
tcccacagtaggtac

SEQ ID NO: 1230273 - DNA, 15 bp, Homo sapiens
gtcccacagtaggta

SEQ ID NO: 1230274 - DNA, 15 bp, Homo sapiens
tgtcccacagtaggt

SEQ ID NO: 1230275 - DNA, 15 bp, Homo sapiens
ctgtcccacagtagg

SEQ ID NO: 1230276 - DNA, 15 bp, Homo sapiens
tctgtcccacagtag

SEQ ID NO: 1230277 - DNA, 15 bp, Homo sapiens
atctgtcccacagta

SEQ ID NO: 1230278 - DNA, 15 bp, Homo sapiens
catctgtcccacagt

SEQ ID NO: 1230279 - DNA, 15 bp, Homo sapiens
gcatctgtcccacag

SEQ ID NO: 1230280 - DNA, 15 bp, Homo sapiens
agcatctgtcccaca

SEQ ID NO: 1230281 - DNA, 15 bp, Homo sapiens
cagcatctgtcccac

SEQ ID NO: 1230282 - DNA, 15 bp, Homo sapiens
acagcatctgtccca

SEQ ID NO: 1230283 - DNA, 15 bp, Homo sapiens
gacagcatctgtccc

SEQ ID NO: 1230284 - DNA, 15 bp, Homo sapiens
tgacagcatctgtcc

SEQ ID NO: 1230285 - DNA, 15 bp, Homo sapiens
atgacagcatctgtc

SEQ ID NO: 1230286 - DNA, 15 bp, Homo sapiens
gatgacagcatctgt

SEQ ID NO: 1230287 - DNA, 15 bp, Homo sapiens
tgatgacagcatctg

SEQ ID NO: 1230288 - DNA, 15 bp, Homo sapiens
ctgatgacagcatct

SEQ ID NO: 1230289 - DNA, 15 bp, Homo sapiens
actgatgacagcatc

SEQ ID NO: 1230290 - DNA, 15 bp, Homo sapiens
aactgatgacagcat

SEQ ID NO: 1230291 - DNA, 15 bp, Homo sapiens
aaactgatgacagca

SEQ ID NO: 1230292 - DNA, 15 bp, Homo sapiens
aaaactgatgacagc

SEQ ID NO: 1230293 - DNA, 15 bp, Homo sapiens
gaaaactgatgacag

SEQ ID NO: 1230294 - DNA, 15 bp, Homo sapiens
agaaaactgatgaca

SEQ ID NO: 1230295 - DNA, 15 bp, Homo sapiens
cagaaaactgatgac

SEQ ID NO: 1230296 - DNA, 15 bp, Homo sapiens
tcagaaaactgatga

SEQ ID NO: 1230297 - DNA, 15 bp, Homo sapiens
atcagaaaactgatg

SEQ ID NO: 1230298 - DNA, 15 bp, Homo sapiens
aatcagaaaactgat

SEQ ID NO: 1230299 - DNA, 15 bp, Homo sapiens
aaatcagaaaactga

SEQ ID NO: 1230300 - DNA, 15 bp, Homo sapiens
taaatcagaaaactg

SEQ ID NO: 1230301 - DNA, 15 bp, Homo sapiens
ttaaatcagaaaact

SEQ ID NO: 1230302 - DNA, 15 bp, Homo sapiens
attaaatcagaaaac

SEQ ID NO: 1230303 - DNA, 15 bp, Homo sapiens
gattaaatcagaaaa

SEQ ID NO: 1230304 - DNA, 15 bp, Homo sapiens
ggattaaatcagaaa

SEQ ID NO: 1230305 - DNA, 15 bp, Homo sapiens
aggattaaatcagaa

SEQ ID NO: 1230306 - DNA, 15 bp, Homo sapiens
gaggattaaatcaga

SEQ ID NO: 1230307 - DNA, 15 bp, Homo sapiens
tgaggattaaatcag

SEQ ID NO: 1230308 - DNA, 15 bp, Homo sapiens
ctgaggattaaatca

SEQ ID NO: 1230309 - DNA, 15 bp, Homo sapiens
tctgaggattaaatc

SEQ ID NO: 1230310 - DNA, 15 bp, Homo sapiens
ctctgaggattaaat

SEQ ID NO: 1230311 - DNA, 15 bp, Homo sapiens
gctctgaggattaaa

SEQ ID NO: 1230312 - DNA, 15 bp, Homo sapiens
ggctctgaggattaa

SEQ ID NO: 1230313 - DNA, 15 bp, Homo sapiens
tggctctgaggatta

SEQ ID NO: 1230314 - DNA, 15 bp, Homo sapiens
gtggctctgaggatt

SEQ ID NO: 1230315 - DNA, 15 bp, Homo sapiens
agtggctctgaggat

SEQ ID NO: 1230316 - DNA, 15 bp, Homo sapiens
gagtggctctgagga

SEQ ID NO: 1230317 - DNA, 15 bp, Homo sapiens
agagtggctctgagg

SEQ ID NO: 1230318 - DNA, 15 bp, Homo sapiens
tagagtggctctgag

SEQ ID NO: 1230319 - DNA, 15 bp, Homo sapiens
atagagtggctctga

SEQ ID NO: 1230320 - DNA, 15 bp, Homo sapiens
catagagtggctctg

SEQ ID NO: 1230321 - DNA, 15 bp, Homo sapiens
tcatagagtggctct

SEQ ID NO: 1230322 - DNA, 15 bp, Homo sapiens
ctcatagagtggctc

SEQ ID NO: 1230323 - DNA, 15 bp, Homo sapiens
cctcatagagtggct

SEQ ID NO: 1230324 - DNA, 15 bp, Homo sapiens
gcctcatagagtggc

SEQ ID NO: 1230325 - DNA, 15 bp, Homo sapiens
tgcctcatagagtgg

SEQ ID NO: 1230326 - DNA, 15 bp, Homo sapiens
ctgcctcatagagtg

SEQ ID NO: 1230327 - DNA, 15 bp, Homo sapiens
cctgcctcatagagt

SEQ ID NO: 1230328 - DNA, 15 bp, Homo sapiens
acctgcctcatagag

SEQ ID NO: 1230329 - DNA, 15 bp, Homo sapiens
tacctgcctcataga

SEQ ID NO: 1230330 - DNA, 15 bp, Homo sapiens
atacctgcctcatag

SEQ ID NO: 1230331 - DNA, 15 bp, Homo sapiens
aatacctgcctcata

SEQ ID NO: 1230332 - DNA, 15 bp, Homo sapiens
taatacctgcctcat

SEQ ID NO: 1230333 - DNA, 15 bp, Homo sapiens
gtaatacctgcctca

SEQ ID NO: 1230334 - DNA, 15 bp, Homo sapiens
ggtaatacctgcctc

SEQ ID NO: 1230335 - DNA, 15 bp, Homo sapiens
tggtaatacctgcct

SEQ ID NO: 1230336 - DNA, 15 bp, Homo sapiens
atggtaatacctgcc

SEQ ID NO: 1230337 - DNA, 15 bp, Homo sapiens
gatggtaatacctgc

SEQ ID NO: 1230338 - DNA, 15 bp, Homo sapiens
ggatggtaatacctg

SEQ ID NO: 1230339 - DNA, 15 bp, Homo sapiens
gggatggtaatacct

SEQ ID NO: 1230340 - DNA, 15 bp, Homo sapiens
ggggatggtaatacc

SEQ ID NO: 1230341 - DNA, 15 bp, Homo sapiens
tggggatggtaatac

SEQ ID NO: 1230342 - DNA, 15 bp, Homo sapiens
atggggatggtaata

SEQ ID NO: 1230343 - DNA, 15 bp, Homo sapiens
aatggggatggtaat

SEQ ID NO: 1230344 - DNA, 15 bp, Homo sapiens
aaatggggatggtaa

SEQ ID NO: 1230345 - DNA, 15 bp, Homo sapiens
aaaatggggatggta

SEQ ID NO: 1230346 - DNA, 15 bp, Homo sapiens
caaaatggggatggt

SEQ ID NO: 1230347 - DNA, 15 bp, Homo sapiens
gcaaaatggggatgg

SEQ ID NO: 1230348 - DNA, 15 bp, Homo sapiens
tgcaaaatggggatg

SEQ ID NO: 1230349 - DNA, 15 bp, Homo sapiens
atgcaaaatggggat

SEQ ID NO: 1230350 - DNA, 15 bp, Homo sapiens
tatgcaaaatgggga

SEQ ID NO: 1230351 - DNA, 15 bp, Homo sapiens
ctatgcaaaatgggg

SEQ ID NO: 1230352 - DNA, 15 bp, Homo sapiens
cctatgcaaaatggg

SEQ ID NO: 1230353 - DNA, 15 bp, Homo sapiens
tcctatgcaaaatgg

SEQ ID NO: 1230354 - DNA, 15 bp, Homo sapiens
ctcctatgcaaaatg

SEQ ID NO: 1230355 - DNA, 15 bp, Homo sapiens
tctcctatgcaaaat

SEQ ID NO: 1230356 - DNA, 15 bp, Homo sapiens
ttctcctatgcaaaa

SEQ ID NO: 1230357 - DNA, 15 bp, Homo sapiens
tttctcctatgcaaa

SEQ ID NO: 1230358 - DNA, 15 bp, Homo sapiens
ttttctcctatgcaa

SEQ ID NO: 1230359 - DNA, 15 bp, Homo sapiens
tttttctcctatgca

SEQ ID NO: 1230360 - DNA, 15 bp, Homo sapiens
atttttctcctatgc

SEQ ID NO: 1230361 - DNA, 15 bp, Homo sapiens
catttttctcctatg

SEQ ID NO: 1230362 - DNA, 15 bp, Homo sapiens
tcatttttctcctat

SEQ ID NO: 1230363 - DNA, 15 bp, Homo sapiens
ctcatttttctccta

SEQ ID NO: 1230364 - DNA, 15 bp, Homo sapiens
cctcatttttctcct

SEQ ID NO: 1230365 - DNA, 15 bp, Homo sapiens
gcctcatttttctcc

SEQ ID NO: 1230366 - DNA, 15 bp, Homo sapiens
agcctcatttttctc

SEQ ID NO: 1230367 - DNA, 15 bp, Homo sapiens
aagcctcatttttct

SEQ ID NO: 1230368 - DNA, 15 bp, Homo sapiens
taagcctcatttttc

SEQ ID NO: 1230369 - DNA, 15 bp, Homo sapiens
ataagcctcattttt

SEQ ID NO: 1230370 - DNA, 15 bp, Homo sapiens
cataagcctcatttt

SEQ ID NO: 1230371 - DNA, 15 bp, Homo sapiens
ccataagcctcattt

SEQ ID NO: 1230372 - DNA, 15 bp, Homo sapiens
tccataagcctcatt

SEQ ID NO: 1230373 - DNA, 15 bp, Homo sapiens
ctccataagcctcat

SEQ ID NO: 1230374 - DNA, 15 bp, Homo sapiens
tctccataagcctca

SEQ ID NO: 1230375 - DNA, 15 bp, Homo sapiens
gtctccataagcctc

SEQ ID NO: 1230376 - DNA, 15 bp, Homo sapiens
agtctccataagcct

SEQ ID NO: 1230377 - DNA, 15 bp, Homo sapiens
cagtctccataagcc

SEQ ID NO: 1230378 - DNA, 15 bp, Homo sapiens
acagtctccataagc

SEQ ID NO: 1230379 - DNA, 15 bp, Homo sapiens
cacagtctccataag

SEQ ID NO: 1230380 - DNA, 15 bp, Homo sapiens
tcacagtctccataa

SEQ ID NO: 1230381 - DNA, 15 bp, Homo sapiens
gtcacagtctccata

SEQ ID NO: 1230382 - DNA, 15 bp, Homo sapiens
tgtcacagtctccat

SEQ ID NO: 1230383 - DNA, 15 bp, Homo sapiens
atgtcacagtctcca

SEQ ID NO: 1230384 - DNA, 15 bp, Homo sapiens
aatgtcacagtctcc

SEQ ID NO: 1230385 - DNA, 15 bp, Homo sapiens
gaatgtcacagtctc

SEQ ID NO: 1230386 - DNA, 15 bp, Homo sapiens
ggaatgtcacagtct

SEQ ID NO: 1230387 - DNA, 15 bp, Homo sapiens
gggaatgtcacagtc

SEQ ID NO: 1230388 - DNA, 15 bp, Homo sapiens
tgggaatgtcacagt

SEQ ID NO: 1230389 - DNA, 15 bp, Homo sapiens
ctgggaatgtcacag

SEQ ID NO: 1230390 - DNA, 15 bp, Homo sapiens
cctgggaatgtcaca

SEQ ID NO: 1230391 - DNA, 15 bp, Homo sapiens
ccctgggaatgtcac

SEQ ID NO: 1230392 - DNA, 15 bp, Homo sapiens
accctgggaatgtca

SEQ ID NO: 1230393 - DNA, 15 bp, Homo sapiens
gaccctgggaatgtc

SEQ ID NO: 1230394 - DNA, 15 bp, Homo sapiens
tgaccctgggaatgt

SEQ ID NO: 1230395 - DNA, 15 bp, Homo sapiens
gtgaccctgggaatg

SEQ ID NO: 1230396 - DNA, 15 bp, Homo sapiens
cgtgaccctgggaat

SEQ ID NO: 1230397 - DNA, 15 bp, Homo sapiens
ccgtgaccctgggaa

SEQ ID NO: 1230398 - DNA, 15 bp, Homo sapiens
cccgtgaccctggga

SEQ ID NO: 1230399 - DNA, 15 bp, Homo sapiens
ccccgtgaccctggg

SEQ ID NO: 1230400 - DNA, 15 bp, Homo sapiens
gccccgtgaccctgg

SEQ ID NO: 1230401 - DNA, 15 bp, Homo sapiens
agccccgtgaccctg

SEQ ID NO: 1230402 - DNA, 15 bp, Homo sapiens
cagccccgtgaccct

SEQ ID NO: 1230403 - DNA, 15 bp, Homo sapiens
ccagccccgtgaccc

SEQ ID NO: 1230404 - DNA, 15 bp, Homo sapiens
accagccccgtgacc

SEQ ID NO: 1230405 - DNA, 15 bp, Homo sapiens
caccagccccgtgac

SEQ ID NO: 1230406 - DNA, 15 bp, Homo sapiens
acaccagccccgtga

SEQ ID NO: 1230407 - DNA, 15 bp, Homo sapiens
tacaccagccccgtg

SEQ ID NO: 1230408 - DNA, 15 bp, Homo sapiens
atacaccagccccgt

SEQ ID NO: 1230409 - DNA, 15 bp, Homo sapiens
catacaccagccccg

SEQ ID NO: 1230410 - DNA, 15 bp, Homo sapiens
gcatacaccagcccc

SEQ ID NO: 1230411 - DNA, 15 bp, Homo sapiens
agcatacaccagccc

SEQ ID NO: 1230412 - DNA, 15 bp, Homo sapiens
cagcatacaccagcc

SEQ ID NO: 1230413 - DNA, 15 bp, Homo sapiens
acagcatacaccagc

SEQ ID NO: 1230414 - DNA, 15 bp, Homo sapiens
aacagcatacaccag

SEQ ID NO: 1230415 - DNA, 15 bp, Homo sapiens
caacagcatacacca

SEQ ID NO: 1230416 - DNA, 15 bp, Homo sapiens
gcaacagcatacacc

SEQ ID NO: 1230417 - DNA, 15 bp, Homo sapiens
ggcaacagcatacac

SEQ ID NO: 1230418 - DNA, 15 bp, Homo sapiens
aggcaacagcataca

SEQ ID NO: 1230419 - DNA, 15 bp, Homo sapiens
gaggcaacagcatac

SEQ ID NO: 1230420 - DNA, 15 bp, Homo sapiens
tgaggcaacagcata

SEQ ID NO: 1230421 - DNA, 15 bp, Homo sapiens
ctgaggcaacagcat

SEQ ID NO: 1230422 - DNA, 15 bp, Homo sapiens
gctgaggcaacagca

SEQ ID NO: 1230423 - DNA, 15 bp, Homo sapiens
tgctgaggcaacagc

SEQ ID NO: 1230424 - DNA, 15 bp, Homo sapiens
atgctgaggcaacag

SEQ ID NO: 1230425 - DNA, 15 bp, Homo sapiens
gatgctgaggcaaca

SEQ ID NO: 1230426 - DNA, 15 bp, Homo sapiens
agatgctgaggcaac

SEQ ID NO: 1230427 - DNA, 15 bp, Homo sapiens
gagatgctgaggcaa

SEQ ID NO: 1230428 - DNA, 15 bp, Homo sapiens
agagatgctgaggca

SEQ ID NO: 1230429 - DNA, 15 bp, Homo sapiens
aagagatgctgaggc

SEQ ID NO: 1230430 - DNA, 15 bp, Homo sapiens
gaagagatgctgagg

SEQ ID NO: 1230431 - DNA, 15 bp, Homo sapiens
ggaagagatgctgag

SEQ ID NO: 1230432 - DNA, 15 bp, Homo sapiens
aggaagagatgctga

SEQ ID NO: 1230433 - DNA, 15 bp, Homo sapiens
aaggaagagatgctg

SEQ ID NO: 1230434 - DNA, 15 bp, Homo sapiens
aaaggaagagatgct

SEQ ID NO: 1230435 - DNA, 15 bp, Homo sapiens
aaaaggaagagatgc

SEQ ID NO: 1230436 - DNA, 15 bp, Homo sapiens
caaaaggaagagatg

SEQ ID NO: 1230437 - DNA, 15 bp, Homo sapiens
ccaaaaggaagagat

SEQ ID NO: 1230438 - DNA, 15 bp, Homo sapiens
accaaaaggaagaga

SEQ ID NO: 1230439 - DNA, 15 bp, Homo sapiens
aaccaaaaggaagag

SEQ ID NO: 1230440 - DNA, 15 bp, Homo sapiens
aaaccaaaaggaaga

SEQ ID NO: 1230441 - DNA, 15 bp, Homo sapiens
aaaaccaaaaggaag

SEQ ID NO: 1230442 - DNA, 15 bp, Homo sapiens
aaaaaccaaaaggaa

SEQ ID NO: 1230443 - DNA, 15 bp, Homo sapiens
taaaaaccaaaagga

SEQ ID NO: 1230444 - DNA, 15 bp, Homo sapiens
ttaaaaaccaaaagg

SEQ ID NO: 1230445 - DNA, 15 bp, Homo sapiens
cttaaaaaccaaaag

SEQ ID NO: 1230446 - DNA, 15 bp, Homo sapiens
acttaaaaaccaaaa

SEQ ID NO: 1230447 - DNA, 15 bp, Homo sapiens
gacttaaaaaccaaa

SEQ ID NO: 1230448 - DNA, 15 bp, Homo sapiens
cgacttaaaaaccaa

SEQ ID NO: 1230449 - DNA, 15 bp, Homo sapiens
acgacttaaaaacca

SEQ ID NO: 1230450 - DNA, 15 bp, Homo sapiens
gacgacttaaaaacc

SEQ ID NO: 1230451 - DNA, 15 bp, Homo sapiens
tgacgacttaaaaac

SEQ ID NO: 1230452 - DNA, 15 bp, Homo sapiens
ctgacgacttaaaaa

SEQ ID NO: 1230453 - DNA, 15 bp, Homo sapiens
tctgacgacttaaaa

SEQ ID NO: 1230454 - DNA, 15 bp, Homo sapiens
atctgacgacttaaa

SEQ ID NO: 1230455 - DNA, 15 bp, Homo sapiens
aatctgacgacttaa

SEQ ID NO: 1230456 - DNA, 15 bp, Homo sapiens
aaatctgacgactta

SEQ ID NO: 1230457 - DNA, 15 bp, Homo sapiens
gaaatctgacgactt

SEQ ID NO: 1230458 - DNA, 15 bp, Homo sapiens
ggaaatctgacgact

SEQ ID NO: 1230459 - DNA, 15 bp, Homo sapiens
tggaaatctgacgac

SEQ ID NO: 1230460 - DNA, 15 bp, Homo sapiens
ttggaaatctgacga

SEQ ID NO: 1230461 - DNA, 15 bp, Homo sapiens
gttggaaatctgacg

SEQ ID NO: 1230462 - DNA, 15 bp, Homo sapiens
cgttggaaatctgac

SEQ ID NO: 1230463 - DNA, 15 bp, Homo sapiens
tcgttggaaatctga

SEQ ID NO: 1230464 - DNA, 15 bp, Homo sapiens
gtcgttggaaatctg

SEQ ID NO: 1230465 - DNA, 15 bp, Homo sapiens
agtcgttggaaatct

SEQ ID NO: 1230466 - DNA, 15 bp, Homo sapiens
aagtcgttggaaatc

SEQ ID NO: 1230467 - DNA, 15 bp, Homo sapiens
gaagtcgttggaaat

SEQ ID NO: 1230468 - DNA, 15 bp, Homo sapiens
ggaagtcgttggaaa

SEQ ID NO: 1230469 - DNA, 15 bp, Homo sapiens
cggaagtcgttggaa

SEQ ID NO: 1230470 - DNA, 15 bp, Homo sapiens
tcggaagtcgttgga

SEQ ID NO: 1230471 - DNA, 15 bp, Homo sapiens
ctcggaagtcgttgg

SEQ ID NO: 1230472 - DNA, 15 bp, Homo sapiens
tctcggaagtcgttg

SEQ ID NO: 1230473 - DNA, 15 bp, Homo sapiens
gtctcggaagtcgtt

SEQ ID NO: 1230474 - DNA, 15 bp, Homo sapiens
ggtctcggaagtcgt

SEQ ID NO: 1230475 - DNA, 15 bp, Homo sapiens
aggtctcggaagtcg

SEQ ID NO: 1230476 - DNA, 15 bp, Homo sapiens
caggtctcggaagtc

SEQ ID NO: 1230477 - DNA, 15 bp, Homo sapiens
gcaggtctcggaagt

SEQ ID NO: 1230478 - DNA, 15 bp, Homo sapiens
ggcaggtctcggaag

SEQ ID NO: 1230479 - DNA, 15 bp, Homo sapiens
gggcaggtctcggaa

SEQ ID NO: 1230480 - DNA, 15 bp, Homo sapiens
tgggcaggtctcgga

SEQ ID NO: 1230481 - DNA, 15 bp, Homo sapiens
gtgggcaggtctcgg

SEQ ID NO: 1230482 - DNA, 15 bp, Homo sapiens
ggtgggcaggtctcg

SEQ ID NO: 1230483 - DNA, 15 bp, Homo sapiens
gggtgggcaggtctc

SEQ ID NO: 1230484 - DNA, 15 bp, Homo sapiens
agggtgggcaggtct

SEQ ID NO: 1230485 - DNA, 15 bp, Homo sapiens
gagggtgggcaggtc

SEQ ID NO: 1230486 - DNA, 15 bp, Homo sapiens
ggagggtgggcaggt

SEQ ID NO: 1230487 - DNA, 15 bp, Homo sapiens
aggagggtgggcagg

SEQ ID NO: 1230488 - DNA, 15 bp, Homo sapiens
gaggagggtgggcag

SEQ ID NO: 1230489 - DNA, 15 bp, Homo sapiens
tgaggagggtgggca

SEQ ID NO: 1230490 - DNA, 15 bp, Homo sapiens
atgaggagggtgggc

SEQ ID NO: 1230491 - DNA, 15 bp, Homo sapiens
gatgaggagggtggg

SEQ ID NO: 1230492 - DNA, 15 bp, Homo sapiens
ggatgaggagggtgg

SEQ ID NO: 1230493 - DNA, 15 bp, Homo sapiens
tggatgaggagggtg

SEQ ID NO: 1230494 - DNA, 15 bp, Homo sapiens
atggatgaggagggt

SEQ ID NO: 1230495 - DNA, 15 bp, Homo sapiens
catggatgaggaggg

SEQ ID NO: 1230496 - DNA, 15 bp, Homo sapiens
ccatggatgaggagg

SEQ ID NO: 1230497 - DNA, 15 bp, Homo sapiens
cccatggatgaggag

SEQ ID NO: 1230498 - DNA, 15 bp, Homo sapiens
ccccatggatgagga

SEQ ID NO: 1230499 - DNA, 15 bp, Homo sapiens
gccccatggatgagg

SEQ ID NO: 1230500 - DNA, 15 bp, Homo sapiens
cgccccatggatgag

SEQ ID NO: 1230501 - DNA, 15 bp, Homo sapiens
ccgccccatggatga

SEQ ID NO: 1230502 - DNA, 15 bp, Homo sapiens
tccgccccatggatg

SEQ ID NO: 1230503 - DNA, 15 bp, Homo sapiens
ctccgccccatggat

SEQ ID NO: 1230504 - DNA, 15 bp, Homo sapiens
cctccgccccatgga

SEQ ID NO: 1230505 - DNA, 15 bp, Homo sapiens
gcctccgccccatgg

SEQ ID NO: 1230506 - DNA, 15 bp, Homo sapiens
ggcctccgccccatg

SEQ ID NO: 1230507 - DNA, 15 bp, Homo sapiens
aggcctccgccccat

SEQ ID NO: 1230508 - DNA, 15 bp, Homo sapiens
caggcctccgcccca

SEQ ID NO: 1230509 - DNA, 15 bp, Homo sapiens
acaggcctccgcccc

SEQ ID NO: 1230510 - DNA, 15 bp, Homo sapiens
gacaggcctccgccc

SEQ ID NO: 1230511 - DNA, 15 bp, Homo sapiens
agacaggcctccgcc

SEQ ID NO: 1230512 - DNA, 15 bp, Homo sapiens
cagacaggcctccgc

SEQ ID NO: 1230513 - DNA, 15 bp, Homo sapiens
tcagacaggcctccg

SEQ ID NO: 1230514 - DNA, 15 bp, Homo sapiens
atcagacaggcctcc

SEQ ID NO: 1230515 - DNA, 15 bp, Homo sapiens
catcagacaggcctc

SEQ ID NO: 1230516 - DNA, 15 bp, Homo sapiens
acatcagacaggcct

SEQ ID NO: 1230517 - DNA, 15 bp, Homo sapiens
gacatcagacaggcc

SEQ ID NO: 1230518 - DNA, 15 bp, Homo sapiens
tgacatcagacaggc

SEQ ID NO: 1230519 - DNA, 15 bp, Homo sapiens
ttgacatcagacagg

SEQ ID NO: 1230520 - DNA, 15 bp, Homo sapiens
attgacatcagacag

SEQ ID NO: 1230521 - DNA, 15 bp, Homo sapiens
cattgacatcagaca

SEQ ID NO: 1230522 - DNA, 15 bp, Homo sapiens
tcattgacatcagac

SEQ ID NO: 1230523 - DNA, 15 bp, Homo sapiens
gtcattgacatcaga

SEQ ID NO: 1230524 - DNA, 15 bp, Homo sapiens
ggtcattgacatcag

SEQ ID NO: 1230525 - DNA, 15 bp, Homo sapiens
tggtcattgacatca

SEQ ID NO: 1230526 - DNA, 15 bp, Homo sapiens
atggtcattgacatc

SEQ ID NO: 1230527 - DNA, 15 bp, Homo sapiens
gatggtcattgacat

SEQ ID NO: 1230528 - DNA, 15 bp, Homo sapiens
cgatggtcattgaca

SEQ ID NO: 1230529 - DNA, 15 bp, Homo sapiens
ccgatggtcattgac

SEQ ID NO: 1230530 - DNA, 15 bp, Homo sapiens
gccgatggtcattga

SEQ ID NO: 1230531 - DNA, 15 bp, Homo sapiens
agccgatggtcattg

SEQ ID NO: 1230532 - DNA, 15 bp, Homo sapiens
aagccgatggtcatt

SEQ ID NO: 1230533 - DNA, 15 bp, Homo sapiens
gaagccgatggtcat

SEQ ID NO: 1230534 - DNA, 15 bp, Homo sapiens
ggaagccgatggtca

SEQ ID NO: 1230535 - DNA, 15 bp, Homo sapiens
aggaagccgatggtc

SEQ ID NO: 1230536 - DNA, 15 bp, Homo sapiens
gaggaagccgatggt

SEQ ID NO: 1230537 - DNA, 15 bp, Homo sapiens
agaggaagccgatgg

SEQ ID NO: 1230538 - DNA, 15 bp, Homo sapiens
tagaggaagccgatg

SEQ ID NO: 1230539 - DNA, 15 bp, Homo sapiens
atagaggaagccgat

SEQ ID NO: 1230540 - DNA, 15 bp, Homo sapiens
aatagaggaagccga

SEQ ID NO: 1230541 - DNA, 15 bp, Homo sapiens
aaatagaggaagccg

SEQ ID NO: 1230542 - DNA, 15 bp, Homo sapiens
aaaatagaggaagcc

SEQ ID NO: 1230543 - DNA, 15 bp, Homo sapiens
caaaatagaggaagc

SEQ ID NO: 1230544 - DNA, 15 bp, Homo sapiens
ccaaaatagaggaag

SEQ ID NO: 1230545 - DNA, 15 bp, Homo sapiens
gccaaaatagaggaa

SEQ ID NO: 1230546 - DNA, 15 bp, Homo sapiens
ggccaaaatagagga

SEQ ID NO: 1230547 - DNA, 15 bp, Homo sapiens
tggccaaaatagagg

SEQ ID NO: 1230548 - DNA, 15 bp, Homo sapiens
atggccaaaatagag

SEQ ID NO: 1230549 - DNA, 15 bp, Homo sapiens
catggccaaaataga

SEQ ID NO: 1230550 - DNA, 15 bp, Homo sapiens
ccatggccaaaatag

SEQ ID NO: 1230551 - DNA, 15 bp, Homo sapiens
cccatggccaaaata

SEQ ID NO: 1230552 - DNA, 15 bp, Homo sapiens
tcccatggccaaaat

SEQ ID NO: 1230553 - DNA, 15 bp, Homo sapiens
ctcccatggccaaaa

SEQ ID NO: 1230554 - DNA, 15 bp, Homo sapiens
gctcccatggccaaa

SEQ ID NO: 1230555 - DNA, 15 bp, Homo sapiens
tgctcccatggccaa

SEQ ID NO: 1230556 - DNA, 15 bp, Homo sapiens
atgctcccatggcca

SEQ ID NO: 1230557 - DNA, 15 bp, Homo sapiens
gatgctcccatggcc

SEQ ID NO: 1230558 - DNA, 15 bp, Homo sapiens
ggatgctcccatggc

SEQ ID NO: 1230559 - DNA, 15 bp, Homo sapiens
tggatgctcccatgg

SEQ ID NO: 1230560 - DNA, 15 bp, Homo sapiens
ctggatgctcccatg

SEQ ID NO: 1230561 - DNA, 15 bp, Homo sapiens
gctggatgctcccat

SEQ ID NO: 1230562 - DNA, 15 bp, Homo sapiens
agctggatgctccca

SEQ ID NO: 1230563 - DNA, 15 bp, Homo sapiens
gagctggatgctccc

SEQ ID NO: 1230564 - DNA, 15 bp, Homo sapiens
agagctggatgctcc

SEQ ID NO: 1230565 - DNA, 15 bp, Homo sapiens
gagagctggatgctc

SEQ ID NO: 1230566 - DNA, 15 bp, Homo sapiens
ggagagctggatgct

SEQ ID NO: 1230567 - DNA, 15 bp, Homo sapiens
aggagagctggatgc

SEQ ID NO: 1230568 - DNA, 15 bp, Homo sapiens
aaggagagctggatg

SEQ ID NO: 1230569 - DNA, 15 bp, Homo sapiens
gaaggagagctggat

SEQ ID NO: 1230570 - DNA, 15 bp, Homo sapiens
tgaaggagagctgga

SEQ ID NO: 1230571 - DNA, 15 bp, Homo sapiens
atgaaggagagctgg

SEQ ID NO: 1230572 - DNA, 15 bp, Homo sapiens
catgaaggagagctg

SEQ ID NO: 1230573 - DNA, 15 bp, Homo sapiens
ccatgaaggagagct

SEQ ID NO: 1230574 - DNA, 15 bp, Homo sapiens
tccatgaaggagagc

SEQ ID NO: 1230575 - DNA, 15 bp, Homo sapiens
atccatgaaggagag

SEQ ID NO: 1230576 - DNA, 15 bp, Homo sapiens
tatccatgaaggaga

SEQ ID NO: 1230577 - DNA, 15 bp, Homo sapiens
gtatccatgaaggag

SEQ ID NO: 1230578 - DNA, 15 bp, Homo sapiens
tgtatccatgaagga

SEQ ID NO: 1230579 - DNA, 15 bp, Homo sapiens
ctgtatccatgaagg

SEQ ID NO: 1230580 - DNA, 15 bp, Homo sapiens
gctgtatccatgaag

SEQ ID NO: 1230581 - DNA, 15 bp, Homo sapiens
ggctgtatccatgaa

SEQ ID NO: 1230582 - DNA, 15 bp, Homo sapiens
cggctgtatccatga

SEQ ID NO: 1230583 - DNA, 15 bp, Homo sapiens
gcggctgtatccatg

SEQ ID NO: 1230584 - DNA, 15 bp, Homo sapiens
ggcggctgtatccat

SEQ ID NO: 1230585 - DNA, 15 bp, Homo sapiens
gggcggctgtatcca

SEQ ID NO: 1230586 - DNA, 15 bp, Homo sapiens
agggcggctgtatcc

SEQ ID NO: 1230587 - DNA, 15 bp, Homo sapiens
gagggcggctgtatc

SEQ ID NO: 1230588 - DNA, 15 bp, Homo sapiens
agagggcggctgtat

SEQ ID NO: 1230589 - DNA, 15 bp, Homo sapiens
aagagggcggctgta

SEQ ID NO: 1230590 - DNA, 15 bp, Homo sapiens
caagagggcggctgt

SEQ ID NO: 1230591 - DNA, 15 bp, Homo sapiens
acaagagggcggctg

SEQ ID NO: 1230592 - DNA, 15 bp, Homo sapiens
aacaagagggcggct

SEQ ID NO: 1230593 - DNA, 15 bp, Homo sapiens
gaacaagagggcggc

SEQ ID NO: 1230594 - DNA, 15 bp, Homo sapiens
tgaacaagagggcgg

SEQ ID NO: 1230595 - DNA, 15 bp, Homo sapiens
atgaacaagagggcg

SEQ ID NO: 1230596 - DNA, 15 bp, Homo sapiens
catgaacaagagggc

SEQ ID NO: 1230597 - DNA, 15 bp, Homo sapiens
tcatgaacaagaggg

SEQ ID NO: 1230598 - DNA, 15 bp, Homo sapiens
atcatgaacaagagg

SEQ ID NO: 1230599 - DNA, 15 bp, Homo sapiens
gatcatgaacaagag

SEQ ID NO: 1230600 - DNA, 15 bp, Homo sapiens
cgatcatgaacaaga

SEQ ID NO: 1230601 - DNA, 15 bp, Homo sapiens
ccgatcatgaacaag

SEQ ID NO: 1230602 - DNA, 15 bp, Homo sapiens
accgatcatgaacaa

SEQ ID NO: 1230603 - DNA, 15 bp, Homo sapiens
caccgatcatgaaca

SEQ ID NO: 1230604 - DNA, 15 bp, Homo sapiens
gcaccgatcatgaac

SEQ ID NO: 1230605 - DNA, 15 bp, Homo sapiens
agcaccgatcatgaa

SEQ ID NO: 1230606 - DNA, 15 bp, Homo sapiens
gagcaccgatcatga

SEQ ID NO: 1230607 - DNA, 15 bp, Homo sapiens
agagcaccgatcatg

SEQ ID NO: 1230608 - DNA, 15 bp, Homo sapiens
gagagcaccgatcat

SEQ ID NO: 1230609 - DNA, 15 bp, Homo sapiens
tgagagcaccgatca

SEQ ID NO: 1230610 - DNA, 15 bp, Homo sapiens
atgagagcaccgatc

SEQ ID NO: 1230611 - DNA, 15 bp, Homo sapiens
gatgagagcaccgat

SEQ ID NO: 1230612 - DNA, 15 bp, Homo sapiens
ggatgagagcaccga

SEQ ID NO: 1230613 - DNA, 15 bp, Homo sapiens
gggatgagagcaccg

SEQ ID NO: 1230614 - DNA, 15 bp, Homo sapiens
agggatgagagcacc

SEQ ID NO: 1230615 - DNA, 15 bp, Homo sapiens
aagggatgagagcac

SEQ ID NO: 1230616 - DNA, 15 bp, Homo sapiens
aaagggatgagagca

SEQ ID NO: 1230617 - DNA, 15 bp, Homo sapiens
gaaagggatgagagc

SEQ ID NO: 1230618 - DNA, 15 bp, Homo sapiens
tgaaagggatgagag

SEQ ID NO: 1230619 - DNA, 15 bp, Homo sapiens
ttgaaagggatgaga

SEQ ID NO: 1230620 - DNA, 15 bp, Homo sapiens
gttgaaagggatgag

SEQ ID NO: 1230621 - DNA, 15 bp, Homo sapiens
cgttgaaagggatga

SEQ ID NO: 1230622 - DNA, 15 bp, Homo sapiens
acgttgaaagggatg

SEQ ID NO: 1230623 - DNA, 15 bp, Homo sapiens
gacgttgaaagggat

SEQ ID NO: 1230624 - DNA, 15 bp, Homo sapiens
tgacgttgaaaggga

SEQ ID NO: 1230625 - DNA, 15 bp, Homo sapiens
atgacgttgaaaggg

SEQ ID NO: 1230626 - DNA, 15 bp, Homo sapiens
aatgacgttgaaagg

SEQ ID NO: 1230627 - DNA, 15 bp, Homo sapiens
gaatgacgttgaaag

SEQ ID NO: 1230628 - DNA, 15 bp, Homo sapiens
agaatgacgttgaaa

SEQ ID NO: 1230629 - DNA, 15 bp, Homo sapiens
cagaatgacgttgaa

SEQ ID NO: 1230630 - DNA, 15 bp, Homo sapiens
ccagaatgacgttga

SEQ ID NO: 1230631 - DNA, 15 bp, Homo sapiens
tccagaatgacgttg

SEQ ID NO: 1230632 - DNA, 15 bp, Homo sapiens
atccagaatgacgtt

SEQ ID NO: 1230633 - DNA, 15 bp, Homo sapiens
catccagaatgacgt

SEQ ID NO: 1230634 - DNA, 15 bp, Homo sapiens
acatccagaatgacg

SEQ ID NO: 1230635 - DNA, 15 bp, Homo sapiens
gacatccagaatgac

SEQ ID NO: 1230636 - DNA, 15 bp, Homo sapiens
tgacatccagaatga

SEQ ID NO: 1230637 - DNA, 15 bp, Homo sapiens
atgacatccagaatg

SEQ ID NO: 1230638 - DNA, 15 bp, Homo sapiens
gatgacatccagaat

SEQ ID NO: 1230639 - DNA, 15 bp, Homo sapiens
agatgacatccagaa

SEQ ID NO: 1230640 - DNA, 15 bp, Homo sapiens
gagatgacatccaga

SEQ ID NO: 1230641 - DNA, 15 bp, Homo sapiens
ggagatgacatccag

SEQ ID NO: 1230642 - DNA, 15 bp, Homo sapiens
tggagatgacatcca

SEQ ID NO: 1230643 - DNA, 15 bp, Homo sapiens
ttggagatgacatcc

SEQ ID NO: 1230644 - DNA, 15 bp, Homo sapiens
tttggagatgacatc

SEQ ID NO: 1230645 - DNA, 15 bp, Homo sapiens
atttggagatgacat

SEQ ID NO: 1230646 - DNA, 15 bp, Homo sapiens
catttggagatgaca

SEQ ID NO: 1230647 - DNA, 15 bp, Homo sapiens
acatttggagatgac

SEQ ID NO: 1230648 - DNA, 15 bp, Homo sapiens
cacatttggagatga

SEQ ID NO: 1230649 - DNA, 15 bp, Homo sapiens
tcacatttggagatg

SEQ ID NO: 1230650 - DNA, 15 bp, Homo sapiens
ctcacatttggagat

SEQ ID NO: 1230651 - DNA, 15 bp, Homo sapiens
actcacatttggaga

SEQ ID NO: 1230652 - DNA, 15 bp, Homo sapiens
cactcacatttggag

SEQ ID NO: 1230653 - DNA, 15 bp, Homo sapiens
acactcacatttgga

SEQ ID NO: 1230654 - DNA, 15 bp, Homo sapiens
cacactcacatttgg

SEQ ID NO: 1230655 - DNA, 15 bp, Homo sapiens
ccacactcacatttg

SEQ ID NO: 1230656 - DNA, 15 bp, Homo sapiens
gccacactcacattt

SEQ ID NO: 1230657 - DNA, 15 bp, Homo sapiens
ggccacactcacatt

SEQ ID NO: 1230658 - DNA, 15 bp, Homo sapiens
gggccacactcacat

SEQ ID NO: 1230659 - DNA, 15 bp, Homo sapiens
tgggccacactcaca

SEQ ID NO: 1230660 - DNA, 15 bp, Homo sapiens
gtgggccacactcac

SEQ ID NO: 1230661 - DNA, 15 bp, Homo sapiens
agtgggccacactca

SEQ ID NO: 1230662 - DNA, 15 bp, Homo sapiens
cagtgggccacactc

SEQ ID NO: 1230663 - DNA, 15 bp, Homo sapiens
ccagtgggccacact

SEQ ID NO: 1230664 - DNA, 15 bp, Homo sapiens
gccagtgggccacac

SEQ ID NO: 1230665 - DNA, 15 bp, Homo sapiens
tgccagtgggccaca

SEQ ID NO: 1230666 - DNA, 15 bp, Homo sapiens
atgccagtgggccac

SEQ ID NO: 1230667 - DNA, 15 bp, Homo sapiens
catgccagtgggcca

SEQ ID NO: 1230668 - DNA, 15 bp, Homo sapiens
ccatgccagtgggcc

SEQ ID NO: 1230669 - DNA, 15 bp, Homo sapiens
cccatgccagtgggc

SEQ ID NO: 1230670 - DNA, 15 bp, Homo sapiens
gcccatgccagtggg

SEQ ID NO: 1230671 - DNA, 15 bp, Homo sapiens
tgcccatgccagtgg

SEQ ID NO: 1230672 - DNA, 15 bp, Homo sapiens
ctgcccatgccagtg

SEQ ID NO: 1230673 - DNA, 15 bp, Homo sapiens
cctgcccatgccagt

SEQ ID NO: 1230674 - DNA, 15 bp, Homo sapiens
gcctgcccatgccag

SEQ ID NO: 1230675 - DNA, 15 bp, Homo sapiens
tgcctgcccatgcca

SEQ ID NO: 1230676 - DNA, 15 bp, Homo sapiens
ctgcctgcccatgcc

SEQ ID NO: 1230677 - DNA, 15 bp, Homo sapiens
cctgcctgcccatgc

SEQ ID NO: 1230678 - DNA, 15 bp, Homo sapiens
tcctgcctgcccatg

SEQ ID NO: 1230679 - DNA, 15 bp, Homo sapiens
gtcctgcctgcccat

SEQ ID NO: 1230680 - DNA, 15 bp, Homo sapiens
ggtcctgcctgccca

SEQ ID NO: 1230681 - DNA, 15 bp, Homo sapiens
aggtcctgcctgccc

SEQ ID NO: 1230682 - DNA, 15 bp, Homo sapiens
gaggtcctgcctgcc

SEQ ID NO: 1230683 - DNA, 15 bp, Homo sapiens
tgaggtcctgcctgc

SEQ ID NO: 1230684 - DNA, 15 bp, Homo sapiens
ctgaggtcctgcctg

SEQ ID NO: 1230685 - DNA, 15 bp, Homo sapiens
gctgaggtcctgcct

SEQ ID NO: 1230686 - DNA, 15 bp, Homo sapiens
ggctgaggtcctgcc

SEQ ID NO: 1230687 - DNA, 15 bp, Homo sapiens
tggctgaggtcctgc

SEQ ID NO: 1230688 - DNA, 15 bp, Homo sapiens
gtggctgaggtcctg

SEQ ID NO: 1230689 - DNA, 15 bp, Homo sapiens
ggtggctgaggtcct

SEQ ID NO: 1230690 - DNA, 15 bp, Homo sapiens
aggtggctgaggtcc

SEQ ID NO: 1230691 - DNA, 15 bp, Homo sapiens
gaggtggctgaggtc

SEQ ID NO: 1230692 - DNA, 15 bp, Homo sapiens
ggaggtggctgaggt

SEQ ID NO: 1230693 - DNA, 15 bp, Homo sapiens
tggaggtggctgagg

SEQ ID NO: 1230694 - DNA, 15 bp, Homo sapiens
ttggaggtggctgag

SEQ ID NO: 1230695 - DNA, 15 bp, Homo sapiens
cttggaggtggctga

SEQ ID NO: 1230696 - DNA, 15 bp, Homo sapiens
gcttggaggtggctg

SEQ ID NO: 1230697 - DNA, 15 bp, Homo sapiens
agcttggaggtggct

SEQ ID NO: 1230698 - DNA, 15 bp, Homo sapiens
cagcttggaggtggc

SEQ ID NO: 1230699 - DNA, 15 bp, Homo sapiens
acagcttggaggtgg

SEQ ID NO: 1230700 - DNA, 15 bp, Homo sapiens
cacagcttggaggtg

SEQ ID NO: 1230701 - DNA, 15 bp, Homo sapiens
acacagcttggaggt

SEQ ID NO: 1230702 - DNA, 15 bp, Homo sapiens
aacacagcttggagg

SEQ ID NO: 1230703 - DNA, 15 bp, Homo sapiens
gaacacagcttggag

SEQ ID NO: 1230704 - DNA, 15 bp, Homo sapiens
ggaacacagcttgga

SEQ ID NO: 1230705 - DNA, 15 bp, Homo sapiens
aggaacacagcttgg

SEQ ID NO: 1230706 - DNA, 15 bp, Homo sapiens
gaggaacacagcttg

SEQ ID NO: 1230707 - DNA, 15 bp, Homo sapiens
agaggaacacagctt

SEQ ID NO: 1230708 - DNA, 15 bp, Homo sapiens
cagaggaacacagct

SEQ ID NO: 1230709 - DNA, 15 bp, Homo sapiens
tcagaggaacacagc

SEQ ID NO: 1230710 - DNA, 15 bp, Homo sapiens
ctcagaggaacacag

SEQ ID NO: 1230711 - DNA, 15 bp, Homo sapiens
gctcagaggaacaca

SEQ ID NO: 1230712 - DNA, 15 bp, Homo sapiens
agctcagaggaacac

SEQ ID NO: 1230713 - DNA, 15 bp, Homo sapiens
gagctcagaggaaca

SEQ ID NO: 1230714 - DNA, 15 bp, Homo sapiens
ggagctcagaggaac

SEQ ID NO: 1230715 - DNA, 15 bp, Homo sapiens
aggagctcagaggaa

SEQ ID NO: 1230716 - DNA, 15 bp, Homo sapiens
caggagctcagagga

SEQ ID NO: 1230717 - DNA, 15 bp, Homo sapiens
ccaggagctcagagg

SEQ ID NO: 1230718 - DNA, 15 bp, Homo sapiens
cccaggagctcagag

SEQ ID NO: 1230719 - DNA, 15 bp, Homo sapiens
ccccaggagctcaga

SEQ ID NO: 1230720 - DNA, 15 bp, Homo sapiens
tccccaggagctcag

SEQ ID NO: 1230721 - DNA, 15 bp, Homo sapiens
ctccccaggagctca

SEQ ID NO: 1230722 - DNA, 15 bp, Homo sapiens
gctccccaggagctc

SEQ ID NO: 1230723 - DNA, 15 bp, Homo sapiens
cgctccccaggagct

SEQ ID NO: 1230724 - DNA, 15 bp, Homo sapiens
ccgctccccaggagc

SEQ ID NO: 1230725 - DNA, 15 bp, Homo sapiens
cccgctccccaggag

SEQ ID NO: 1230726 - DNA, 15 bp, Homo sapiens
acccgctccccagga

SEQ ID NO: 1230727 - DNA, 15 bp, Homo sapiens
aacccgctccccagg

SEQ ID NO: 1230728 - DNA, 15 bp, Homo sapiens
aaacccgctccccag

SEQ ID NO: 1230729 - DNA, 15 bp, Homo sapiens
caaacccgctcccca

SEQ ID NO: 1230730 - DNA, 15 bp, Homo sapiens
tcaaacccgctcccc

SEQ ID NO: 1230731 - DNA, 15 bp, Homo sapiens
atcaaacccgctccc

SEQ ID NO: 1230732 - DNA, 15 bp, Homo sapiens
aatcaaacccgctcc

SEQ ID NO: 1230733 - DNA, 15 bp, Homo sapiens
aaatcaaacccgctc

SEQ ID NO: 1230734 - DNA, 15 bp, Homo sapiens
gaaatcaaacccgct

SEQ ID NO: 1230735 - DNA, 15 bp, Homo sapiens
tgaaatcaaacccgc

SEQ ID NO: 1230736 - DNA, 15 bp, Homo sapiens
atgaaatcaaacccg

SEQ ID NO: 1230737 - DNA, 15 bp, Homo sapiens
aatgaaatcaaaccc

SEQ ID NO: 1230738 - DNA, 15 bp, Homo sapiens
caatgaaatcaaacc

SEQ ID NO: 1230739 - DNA, 15 bp, Homo sapiens
acaatgaaatcaaac

SEQ ID NO: 1230740 - DNA, 15 bp, Homo sapiens
cacaatgaaatcaaa

SEQ ID NO: 1230741 - DNA, 15 bp, Homo sapiens
tcacaatgaaatcaa

SEQ ID NO: 1230742 - DNA, 15 bp, Homo sapiens
atcacaatgaaatca

SEQ ID NO: 1230743 - DNA, 15 bp, Homo sapiens
aatcacaatgaaatc

SEQ ID NO: 1230744 - DNA, 15 bp, Homo sapiens
caatcacaatgaaat

SEQ ID NO: 1230745 - DNA, 15 bp, Homo sapiens
acaatcacaatgaaa

SEQ ID NO: 1230746 - DNA, 15 bp, Homo sapiens
cacaatcacaatgaa

SEQ ID NO: 1230747 - DNA, 15 bp, Homo sapiens
tcacaatcacaatga

SEQ ID NO: 1230748 - DNA, 15 bp, Homo sapiens
atcacaatcacaatg

SEQ ID NO: 1230749 - DNA, 15 bp, Homo sapiens
tatcacaatcacaat

SEQ ID NO: 1230750 - DNA, 15 bp, Homo sapiens
atatcacaatcacaa

SEQ ID NO: 1230751 - DNA, 15 bp, Homo sapiens
tatatcacaatcaca

SEQ ID NO: 1230752 - DNA, 15 bp, Homo sapiens
atatatcacaatcac

SEQ ID NO: 1230753 - DNA, 15 bp, Homo sapiens
tatatatcacaatca

SEQ ID NO: 1230754 - DNA, 15 bp, Homo sapiens
ttatatatcacaatc

SEQ ID NO: 1230755 - DNA, 15 bp, Homo sapiens
cttatatatcacaat

SEQ ID NO: 1230756 - DNA, 15 bp, Homo sapiens
tcttatatatcacaa

SEQ ID NO: 1230757 - DNA, 15 bp, Homo sapiens
gtcttatatatcaca

SEQ ID NO: 1230758 - DNA, 15 bp, Homo sapiens
tgtcttatatatcac

SEQ ID NO: 1230759 - DNA, 15 bp, Homo sapiens
ttgtcttatatatca

SEQ ID NO: 1230760 - DNA, 15 bp, Homo sapiens
agatcaagtagctgt

SEQ ID NO: 1230761 - DNA, 15 bp, Homo sapiens
cagatcaagtagctg

SEQ ID NO: 1230762 - DNA, 15 bp, Homo sapiens
ccagatcaagtagct

SEQ ID NO: 1230763 - DNA, 15 bp, Homo sapiens
accagatcaagtagc

SEQ ID NO: 1230764 - DNA, 15 bp, Homo sapiens
gaccagatcaagtag

SEQ ID NO: 1230765 - DNA, 15 bp, Homo sapiens
tgaccagatcaagta

SEQ ID NO: 1230766 - DNA, 15 bp, Homo sapiens
ctgaccagatcaagt

SEQ ID NO: 1230767 - DNA, 15 bp, Homo sapiens
cctgaccagatcaag

SEQ ID NO: 1230768 - DNA, 15 bp, Homo sapiens
ccctgaccagatcaa

SEQ ID NO: 1230769 - DNA, 15 bp, Homo sapiens
cccctgaccagatca

SEQ ID NO: 1230770 - DNA, 15 bp, Homo sapiens
ccccctgaccagatc

SEQ ID NO: 1230771 - DNA, 15 bp, Homo sapiens
tccccctgaccagat

SEQ ID NO: 1230772 - DNA, 15 bp, Homo sapiens
ctccccctgaccaga

SEQ ID NO: 1230773 - DNA, 15 bp, Homo sapiens
actccccctgaccag

SEQ ID NO: 1230774 - DNA, 15 bp, Homo sapiens
tactccccctgacca

SEQ ID NO: 1230775 - DNA, 15 bp, Homo sapiens
ctactccccctgacc

SEQ ID NO: 1230776 - DNA, 15 bp, Homo sapiens
cctactccccctgac

SEQ ID NO: 1230777 - DNA, 15 bp, Homo sapiens
ccctactccccctga

SEQ ID NO: 1230778 - DNA, 15 bp, Homo sapiens
tccctactccccctg

SEQ ID NO: 1230779 - DNA, 15 bp, Homo sapiens
gtccctactccccct

SEQ ID NO: 1230780 - DNA, 15 bp, Homo sapiens
agtccctactccccc

SEQ ID NO: 1230781 - DNA, 15 bp, Homo sapiens
aagtccctactcccc

SEQ ID NO: 1230782 - DNA, 15 bp, Homo sapiens
caagtccctactccc

SEQ ID NO: 1230783 - DNA, 15 bp, Homo sapiens
tcaagtccctactcc

SEQ ID NO: 1230784 - DNA, 15 bp, Homo sapiens
ttcaagtccctactc

SEQ ID NO: 1230785 - DNA, 15 bp, Homo sapiens
tttcaagtccctact

SEQ ID NO: 1230786 - DNA, 15 bp, Homo sapiens
gtttcaagtccctac

SEQ ID NO: 1230787 - DNA, 15 bp, Homo sapiens
ggtttcaagtcccta

SEQ ID NO: 1230788 - DNA, 15 bp, Homo sapiens
tggtttcaagtccct

SEQ ID NO: 1230789 - DNA, 15 bp, Homo sapiens
ctggtttcaagtccc

SEQ ID NO: 1230790 - DNA, 15 bp, Homo sapiens
cctggtttcaagtcc

SEQ ID NO: 1230791 - DNA, 15 bp, Homo sapiens
acctggtttcaagtc

SEQ ID NO: 1230792 - DNA, 15 bp, Homo sapiens
gacctggtttcaagt

SEQ ID NO: 1230793 - DNA, 15 bp, Homo sapiens
agacctggtttcaag

SEQ ID NO: 1230794 - DNA, 15 bp, Homo sapiens
aagacctggtttcaa

SEQ ID NO: 1230795 - DNA, 15 bp, Homo sapiens
taagacctggtttca

SEQ ID NO: 1230796 - DNA, 15 bp, Homo sapiens
ctaagacctggtttc

SEQ ID NO: 1230797 - DNA, 15 bp, Homo sapiens
cctaagacctggttt

SEQ ID NO: 1230798 - DNA, 15 bp, Homo sapiens
tcctaagacctggtt

SEQ ID NO: 1230799 - DNA, 15 bp, Homo sapiens
gtcctaagacctggt

SEQ ID NO: 1230800 - DNA, 15 bp, Homo sapiens
tgtcctaagacctgg

SEQ ID NO: 1230801 - DNA, 15 bp, Homo sapiens
ctgtcctaagacctg

SEQ ID NO: 1230802 - DNA, 15 bp, Homo sapiens
gctgtcctaagacct

SEQ ID NO: 1230803 - DNA, 15 bp, Homo sapiens
tgctgtcctaagacc

SEQ ID NO: 1230804 - DNA, 15 bp, Homo sapiens
ctgctgtcctaagac

SEQ ID NO: 1230805 - DNA, 15 bp, Homo sapiens
cctgctgtcctaaga

SEQ ID NO: 1230806 - DNA, 15 bp, Homo sapiens
acctgctgtcctaag

SEQ ID NO: 1230807 - DNA, 15 bp, Homo sapiens
cacctgctgtcctaa

SEQ ID NO: 1230808 - DNA, 15 bp, Homo sapiens
gcacctgctgtccta

SEQ ID NO: 1230809 - DNA, 15 bp, Homo sapiens
ggcacctgctgtcct

SEQ ID NO: 1230810 - DNA, 15 bp, Homo sapiens
gggcacctgctgtcc

SEQ ID NO: 1230811 - DNA, 15 bp, Homo sapiens
tgggcacctgctgtc

SEQ ID NO: 1230812 - DNA, 15 bp, Homo sapiens
atgggcacctgctgt

SEQ ID NO: 1230813 - DNA, 15 bp, Homo sapiens
aatgggcacctgctg

SEQ ID NO: 1230814 - DNA, 15 bp, Homo sapiens
caatgggcacctgct

SEQ ID NO: 1230815 - DNA, 15 bp, Homo sapiens
gcaatgggcacctgc

SEQ ID NO: 1230816 - DNA, 15 bp, Homo sapiens
agcaatgggcacctg

SEQ ID NO: 1230817 - DNA, 15 bp, Homo sapiens
cagcaatgggcacct

SEQ ID NO: 1230818 - DNA, 15 bp, Homo sapiens
gcagcaatgggcacc

SEQ ID NO: 1230819 - DNA, 15 bp, Homo sapiens
ggcagcaatgggcac

SEQ ID NO: 1230820 - DNA, 15 bp, Homo sapiens
gggcagcaatgggca

SEQ ID NO: 1230821 - DNA, 15 bp, Homo sapiens
agggcagcaatgggc

SEQ ID NO: 1230822 - DNA, 15 bp, Homo sapiens
cagggcagcaatggg

SEQ ID NO: 1230823 - DNA, 15 bp, Homo sapiens
ccagggcagcaatgg

SEQ ID NO: 1230824 - DNA, 15 bp, Homo sapiens
cccagggcagcaatg

SEQ ID NO: 1230825 - DNA, 15 bp, Homo sapiens
ccccagggcagcaat

SEQ ID NO: 1230826 - DNA, 15 bp, Homo sapiens
cccccagggcagcaa

SEQ ID NO: 1230827 - DNA, 15 bp, Homo sapiens
tcccccagggcagca

SEQ ID NO: 1230828 - DNA, 15 bp, Homo sapiens
ttcccccagggcagc

SEQ ID NO: 1230829 - DNA, 15 bp, Homo sapiens
tttcccccagggcag

SEQ ID NO: 1230830 - DNA, 15 bp, Homo sapiens
gtttcccccagggca

SEQ ID NO: 1230831 - DNA, 15 bp, Homo sapiens
tgtttcccccagggc

SEQ ID NO: 1230832 - DNA, 15 bp, Homo sapiens
ctgtttcccccaggg

SEQ ID NO: 1230833 - DNA, 15 bp, Homo sapiens
cctgtttcccccagg

SEQ ID NO: 1230834 - DNA, 15 bp, Homo sapiens
gcctgtttcccccag

SEQ ID NO: 1230835 - DNA, 15 bp, Homo sapiens
agcctgtttccccca

SEQ ID NO: 1230836 - DNA, 15 bp, Homo sapiens
cagcctgtttccccc

SEQ ID NO: 1230837 - DNA, 15 bp, Homo sapiens
tcagcctgtttcccc

SEQ ID NO: 1230838 - DNA, 15 bp, Homo sapiens
ttcagcctgtttccc

SEQ ID NO: 1230839 - DNA, 15 bp, Homo sapiens
gttcagcctgtttcc

SEQ ID NO: 1230840 - DNA, 15 bp, Homo sapiens
agttcagcctgtttc

SEQ ID NO: 1230841 - DNA, 15 bp, Homo sapiens
cagttcagcctgttt

SEQ ID NO: 1230842 - DNA, 15 bp, Homo sapiens
gcagttcagcctgtt

SEQ ID NO: 1230843 - DNA, 15 bp, Homo sapiens
ggcagttcagcctgt

SEQ ID NO: 1230844 - DNA, 15 bp, Homo sapiens
gggcagttcagcctg

SEQ ID NO: 1230845 - DNA, 15 bp, Homo sapiens
agggcagttcagcct

SEQ ID NO: 1230846 - DNA, 15 bp, Homo sapiens
tagggcagttcagcc

SEQ ID NO: 1230847 - DNA, 15 bp, Homo sapiens
ctagggcagttcagc

SEQ ID NO: 1230848 - DNA, 15 bp, Homo sapiens
tctagggcagttcag

SEQ ID NO: 1230849 - DNA, 15 bp, Homo sapiens
ctctagggcagttca

SEQ ID NO: 1230850 - DNA, 15 bp, Homo sapiens
cctctagggcagttc

SEQ ID NO: 1230851 - DNA, 15 bp, Homo sapiens
ccctctagggcagtt

SEQ ID NO: 1230852 - DNA, 15 bp, Homo sapiens
tccctctagggcagt

SEQ ID NO: 1230853 - DNA, 15 bp, Homo sapiens
ctccctctagggcag

SEQ ID NO: 1230854 - DNA, 15 bp, Homo sapiens
gctccctctagggca

SEQ ID NO: 1230855 - DNA, 15 bp, Homo sapiens
tgctccctctagggc

SEQ ID NO: 1230856 - DNA, 15 bp, Homo sapiens
atgctccctctaggg

SEQ ID NO: 1230857 - DNA, 15 bp, Homo sapiens
aatgctccctctagg

SEQ ID NO: 1230858 - DNA, 15 bp, Homo sapiens
aaatgctccctctag

SEQ ID NO: 1230859 - DNA, 15 bp, Homo sapiens
caaatgctccctcta

SEQ ID NO: 1230860 - DNA, 15 bp, Homo sapiens
ccaaatgctccctct

SEQ ID NO: 1230861 - DNA, 15 bp, Homo sapiens
accaaatgctccctc

SEQ ID NO: 1230862 - DNA, 15 bp, Homo sapiens
taccaaatgctccct

SEQ ID NO: 1230863 - DNA, 15 bp, Homo sapiens
ataccaaatgctccc

SEQ ID NO: 1230864 - DNA, 15 bp, Homo sapiens
gataccaaatgctcc

SEQ ID NO: 1230865 - DNA, 15 bp, Homo sapiens
agataccaaatgctc

SEQ ID NO: 1230866 - DNA, 15 bp, Homo sapiens
cagataccaaatgct

SEQ ID NO: 1230867 - DNA, 15 bp, Homo sapiens
gcagataccaaatgc

SEQ ID NO: 1230868 - DNA, 15 bp, Homo sapiens
tgcagataccaaatg

SEQ ID NO: 1230869 - DNA, 15 bp, Homo sapiens
ttgcagataccaaat

SEQ ID NO: 1230870 - DNA, 15 bp, Homo sapiens
cttgcagataccaaa

SEQ ID NO: 1230871 - DNA, 15 bp, Homo sapiens
ccttgcagataccaa

SEQ ID NO: 1230872 - DNA, 15 bp, Homo sapiens
cccttgcagatacca

SEQ ID NO: 1230873 - DNA, 15 bp, Homo sapiens
ccccttgcagatacc

SEQ ID NO: 1230874 - DNA, 15 bp, Homo sapiens
cccccttgcagatac

SEQ ID NO: 1230875 - DNA, 15 bp, Homo sapiens
tcccccttgcagata

SEQ ID NO: 1230876 - DNA, 15 bp, Homo sapiens
ctcccccttgcagat

SEQ ID NO: 1230877 - DNA, 15 bp, Homo sapiens
cctcccccttgcaga

SEQ ID NO: 1230878 - DNA, 15 bp, Homo sapiens
gcctcccccttgcag

SEQ ID NO: 1230879 - DNA, 15 bp, Homo sapiens
ggcctcccccttgca

SEQ ID NO: 1230880 - DNA, 15 bp, Homo sapiens
tggcctcccccttgc

SEQ ID NO: 1230881 - DNA, 15 bp, Homo sapiens
ctggcctcccccttg

SEQ ID NO: 1230882 - DNA, 15 bp, Homo sapiens
gctggcctccccctt

SEQ ID NO: 1230883 - DNA, 15 bp, Homo sapiens
tgctggcctccccct

SEQ ID NO: 1230884 - DNA, 15 bp, Homo sapiens
gtgctggcctccccc

SEQ ID NO: 1230885 - DNA, 15 bp, Homo sapiens
agtgctggcctcccc

SEQ ID NO: 1230886 - DNA, 15 bp, Homo sapiens
cagtgctggcctccc

SEQ ID NO: 1230887 - DNA, 15 bp, Homo sapiens
tcagtgctggcctcc

SEQ ID NO: 1230888 - DNA, 15 bp, Homo sapiens
ctcagtgctggcctc

SEQ ID NO: 1230889 - DNA, 15 bp, Homo sapiens
gctcagtgctggcct

SEQ ID NO: 1230890 - DNA, 15 bp, Homo sapiens
agctcagtgctggcc

SEQ ID NO: 1230891 - DNA, 15 bp, Homo sapiens
gagctcagtgctggc

SEQ ID NO: 1230892 - DNA, 15 bp, Homo sapiens
tgagctcagtgctgg

SEQ ID NO: 1230893 - DNA, 15 bp, Homo sapiens
atgagctcagtgctg

SEQ ID NO: 1230894 - DNA, 15 bp, Homo sapiens
catgagctcagtgct

SEQ ID NO: 1230895 - DNA, 15 bp, Homo sapiens
gcatgagctcagtgc

SEQ ID NO: 1230896 - DNA, 15 bp, Homo sapiens
agcatgagctcagtg

SEQ ID NO: 1230897 - DNA, 15 bp, Homo sapiens
gagcatgagctcagt

SEQ ID NO: 1230898 - DNA, 15 bp, Homo sapiens
ggagcatgagctcag

SEQ ID NO: 1230899 - DNA, 15 bp, Homo sapiens
aggagcatgagctca

SEQ ID NO: 1230900 - DNA, 15 bp, Homo sapiens
caggagcatgagctc

SEQ ID NO: 1230901 - DNA, 15 bp, Homo sapiens
ccaggagcatgagct

SEQ ID NO: 1230902 - DNA, 15 bp, Homo sapiens
cccaggagcatgagc

SEQ ID NO: 1230903 - DNA, 15 bp, Homo sapiens
acccaggagcatgag

SEQ ID NO: 1230904 - DNA, 15 bp, Homo sapiens
gacccaggagcatga

SEQ ID NO: 1230905 - DNA, 15 bp, Homo sapiens
ggacccaggagcatg

SEQ ID NO: 1230906 - DNA, 15 bp, Homo sapiens
gggacccaggagcat

SEQ ID NO: 1230907 - DNA, 15 bp, Homo sapiens
tgggacccaggagca

SEQ ID NO: 1230908 - DNA, 15 bp, Homo sapiens
ctgggacccaggagc

SEQ ID NO: 1230909 - DNA, 15 bp, Homo sapiens
gctgggacccaggag

SEQ ID NO: 1230910 - DNA, 15 bp, Homo sapiens
tgctgggacccagga

SEQ ID NO: 1230911 - DNA, 15 bp, Homo sapiens
gtgctgggacccagg

SEQ ID NO: 1230912 - DNA, 15 bp, Homo sapiens
tgtgctgggacccag

SEQ ID NO: 1230913 - DNA, 15 bp, Homo sapiens
gtgtgctgggaccca

SEQ ID NO: 1230914 - DNA, 15 bp, Homo sapiens
ggtgtgctgggaccc

SEQ ID NO: 1230915 - DNA, 15 bp, Homo sapiens
gggtgtgctgggacc

SEQ ID NO: 1230916 - DNA, 15 bp, Homo sapiens
agggtgtgctgggac

SEQ ID NO: 1230917 - DNA, 15 bp, Homo sapiens
gagggtgtgctggga

SEQ ID NO: 1230918 - DNA, 15 bp, Homo sapiens
ggagggtgtgctggg

SEQ ID NO: 1230919 - DNA, 15 bp, Homo sapiens
aggagggtgtgctgg

SEQ ID NO: 1230920 - DNA, 15 bp, Homo sapiens
caggagggtgtgctg

SEQ ID NO: 1230921 - DNA, 15 bp, Homo sapiens
gcaggagggtgtgct

SEQ ID NO: 1230922 - DNA, 15 bp, Homo sapiens
ggcaggagggtgtgc

SEQ ID NO: 1230923 - DNA, 15 bp, Homo sapiens
tggcaggagggtgtg

SEQ ID NO: 1230924 - DNA, 15 bp, Homo sapiens
gtggcaggagggtgt

SEQ ID NO: 1230925 - DNA, 15 bp, Homo sapiens
tgtggcaggagggtg

SEQ ID NO: 1230926 - DNA, 15 bp, Homo sapiens
ctgtggcaggagggt

SEQ ID NO: 1230927 - DNA, 15 bp, Homo sapiens
gctgtggcaggaggg

SEQ ID NO: 1230928 - DNA, 15 bp, Homo sapiens
ggctgtggcaggagg

SEQ ID NO: 1230929 - DNA, 15 bp, Homo sapiens
aggctgtggcaggag

SEQ ID NO: 1230930 - DNA, 15 bp, Homo sapiens
gaggctgtggcagga

SEQ ID NO: 1230931 - DNA, 15 bp, Homo sapiens
tgaggctgtggcagg

SEQ ID NO: 1230932 - DNA, 15 bp, Homo sapiens
atgaggctgtggcag

SEQ ID NO: 1230933 - DNA, 15 bp, Homo sapiens
gatgaggctgtggca

SEQ ID NO: 1230934 - DNA, 15 bp, Homo sapiens
tgatgaggctgtggc

SEQ ID NO: 1230935 - DNA, 15 bp, Homo sapiens
atgatgaggctgtgg

SEQ ID NO: 1230936 - DNA, 15 bp, Homo sapiens
gatgatgaggctgtg

SEQ ID NO: 1230937 - DNA, 15 bp, Homo sapiens
tgatgatgaggctgt

SEQ ID NO: 1230938 - DNA, 15 bp, Homo sapiens
gtgatgatgaggctg

SEQ ID NO: 1230939 - DNA, 15 bp, Homo sapiens
ggtgatgatgaggct

SEQ ID NO: 1230940 - DNA, 15 bp, Homo sapiens
tggtgatgatgaggc

SEQ ID NO: 1230941 - DNA, 15 bp, Homo sapiens
ctggtgatgatgagg

SEQ ID NO: 1230942 - DNA, 15 bp, Homo sapiens
cctggtgatgatgag

SEQ ID NO: 1230943 - DNA, 15 bp, Homo sapiens
tcctggtgatgatga

SEQ ID NO: 1230944 - DNA, 15 bp, Homo sapiens
ctcctggtgatgatg

SEQ ID NO: 1230945 - DNA, 15 bp, Homo sapiens
cctcctggtgatgat

SEQ ID NO: 1230946 - DNA, 15 bp, Homo sapiens
ccctcctggtgatga

SEQ ID NO: 1230947 - DNA, 15 bp, Homo sapiens
tccctcctggtgatg

SEQ ID NO: 1230948 - DNA, 15 bp, Homo sapiens
ttccctcctggtgat

SEQ ID NO: 1230949 - DNA, 15 bp, Homo sapiens
cttccctcctggtga

SEQ ID NO: 1230950 - DNA, 15 bp, Homo sapiens
ccttccctcctggtg

SEQ ID NO: 1230951 - DNA, 15 bp, Homo sapiens
accttccctcctggt

SEQ ID NO: 1230952 - DNA, 15 bp, Homo sapiens
aaccttccctcctgg

SEQ ID NO: 1230953 - DNA, 15 bp, Homo sapiens
caaccttccctcctg

SEQ ID NO: 1230954 - DNA, 15 bp, Homo sapiens
gcaaccttccctcct

SEQ ID NO: 1230955 - DNA, 15 bp, Homo sapiens
agcaaccttccctcc

SEQ ID NO: 1230956 - DNA, 15 bp, Homo sapiens
tagcaaccttccctc

SEQ ID NO: 1230957 - DNA, 15 bp, Homo sapiens
atagcaaccttccct

SEQ ID NO: 1230958 - DNA, 15 bp, Homo sapiens
gatagcaaccttccc

SEQ ID NO: 1230959 - DNA, 15 bp, Homo sapiens
agatagcaaccttcc

SEQ ID NO: 1230960 - DNA, 15 bp, Homo sapiens
cagatagcaaccttc

SEQ ID NO: 1230961 - DNA, 15 bp, Homo sapiens
ccagatagcaacctt

SEQ ID NO: 1230962 - DNA, 15 bp, Homo sapiens
cccagatagcaacct

SEQ ID NO: 1230963 - DNA, 15 bp, Homo sapiens
ccccagatagcaacc

SEQ ID NO: 1230964 - DNA, 15 bp, Homo sapiens
cccccagatagcaac

SEQ ID NO: 1230965 - DNA, 15 bp, Homo sapiens
gcccccagatagcaa

SEQ ID NO: 1230966 - DNA, 15 bp, Homo sapiens
tgcccccagatagca

SEQ ID NO: 1230967 - DNA, 15 bp, Homo sapiens
gtgcccccagatagc

SEQ ID NO: 1230968 - DNA, 15 bp, Homo sapiens
agtgcccccagatag

SEQ ID NO: 1230969 - DNA, 15 bp, Homo sapiens
cagtgcccccagata

SEQ ID NO: 1230970 - DNA, 15 bp, Homo sapiens
gcagtgcccccagat

SEQ ID NO: 1230971 - DNA, 15 bp, Homo sapiens
agcagtgcccccaga

SEQ ID NO: 1230972 - DNA, 15 bp, Homo sapiens
tagcagtgcccccag

SEQ ID NO: 1230973 - DNA, 15 bp, Homo sapiens
gtagcagtgccccca

SEQ ID NO: 1230974 - DNA, 15 bp, Homo sapiens
agtagcagtgccccc

SEQ ID NO: 1230975 - DNA, 15 bp, Homo sapiens
aagtagcagtgcccc

SEQ ID NO: 1230976 - DNA, 15 bp, Homo sapiens
aaagtagcagtgccc

SEQ ID NO: 1230977 - DNA, 15 bp, Homo sapiens
aaaagtagcagtgcc

SEQ ID NO: 1230978 - DNA, 15 bp, Homo sapiens
taaaagtagcagtgc

SEQ ID NO: 1230979 - DNA, 15 bp, Homo sapiens
ttaaaagtagcagtg

SEQ ID NO: 1230980 - DNA, 15 bp, Homo sapiens
tttaaaagtagcagt

SEQ ID NO: 1230981 - DNA, 15 bp, Homo sapiens
gtttaaaagtagcag

SEQ ID NO: 1230982 - DNA, 15 bp, Homo sapiens
cgtttaaaagtagca

SEQ ID NO: 1230983 - DNA, 15 bp, Homo sapiens
acgtttaaaagtagc

SEQ ID NO: 1230984 - DNA, 15 bp, Homo sapiens
aacgtttaaaagtag

SEQ ID NO: 1230985 - DNA, 15 bp, Homo sapiens
aaacgtttaaaagta

SEQ ID NO: 1230986 - DNA, 15 bp, Homo sapiens
taaacgtttaaaagt

SEQ ID NO: 1230987 - DNA, 15 bp, Homo sapiens
ataaacgtttaaaag

SEQ ID NO: 1230988 - DNA, 15 bp, Homo sapiens
tataaacgtttaaaa

SEQ ID NO: 1230989 - DNA, 15 bp, Homo sapiens
ttataaacgtttaaa

SEQ ID NO: 1230990 - DNA, 15 bp, Homo sapiens
attataaacgtttaa

SEQ ID NO: 1230991 - DNA, 15 bp, Homo sapiens
tattataaacgttta

SEQ ID NO: 1230992 - DNA, 15 bp, Homo sapiens
ttattataaacgttt

SEQ ID NO: 1230993 - DNA, 15 bp, Homo sapiens
attattataaacgtt

SEQ ID NO: 1230994 - DNA, 15 bp, Homo sapiens
cattattataaacgt

SEQ ID NO: 1230995 - DNA, 15 bp, Homo sapiens
ccattattataaacg

SEQ ID NO: 1230996 - DNA, 15 bp, Homo sapiens
gccattattataaac

SEQ ID NO: 1230997 - DNA, 15 bp, Homo sapiens
tgccattattataaa

SEQ ID NO: 1230998 - DNA, 15 bp, Homo sapiens
ctgccattattataa

SEQ ID NO: 1230999 - DNA, 15 bp, Homo sapiens
actgccattattata

SEQ ID NO: 1231000 - DNA, 15 bp, Homo sapiens
cactgccattattat

SEQ ID NO: 1231001 - DNA, 15 bp, Homo sapiens
tcactgccattatta

SEQ ID NO: 1231002 - DNA, 15 bp, Homo sapiens
ttcactgccattatt

SEQ ID NO: 1231003 - DNA, 15 bp, Homo sapiens
cttcactgccattat

SEQ ID NO: 1231004 - DNA, 15 bp, Homo sapiens
ccttcactgccatta

SEQ ID NO: 1231005 - DNA, 15 bp, Homo sapiens
accttcactgccatt

SEQ ID NO: 1231006 - DNA, 15 bp, Homo sapiens
caccttcactgccat

SEQ ID NO: 1231007 - DNA, 15 bp, Homo sapiens
gcaccttcactgcca

SEQ ID NO: 1231008 - DNA, 15 bp, Homo sapiens
agcaccttcactgcc

SEQ ID NO: 1231009 - DNA, 15 bp, Homo sapiens
cagcaccttcactgc

SEQ ID NO: 1231010 - DNA, 15 bp, Homo sapiens
ccagcaccttcactg

SEQ ID NO: 1231011 - DNA, 15 bp, Homo sapiens
gccagcaccttcact

SEQ ID NO: 1231012 - DNA, 15 bp, Homo sapiens
agccagcaccttcac

SEQ ID NO: 1231013 - DNA, 15 bp, Homo sapiens
aagccagcaccttca

SEQ ID NO: 1231014 - DNA, 15 bp, Homo sapiens
gaagccagcaccttc

SEQ ID NO: 1231015 - DNA, 15 bp, Homo sapiens
tgaagccagcacctt

SEQ ID NO: 1231016 - DNA, 15 bp, Homo sapiens
atgaagccagcacct

SEQ ID NO: 1231017 - DNA, 15 bp, Homo sapiens
tatgaagccagcacc

SEQ ID NO: 1231018 - DNA, 15 bp, Homo sapiens
atatgaagccagcac

SEQ ID NO: 1231019 - DNA, 15 bp, Homo sapiens
gatatgaagccagca

SEQ ID NO: 1231020 - DNA, 15 bp, Homo sapiens
ggatatgaagccagc

SEQ ID NO: 1231021 - DNA, 15 bp, Homo sapiens
aggatatgaagccag

SEQ ID NO: 1231022 - DNA, 15 bp, Homo sapiens
aaggatatgaagcca

SEQ ID NO: 1231023 - DNA, 15 bp, Homo sapiens
caaggatatgaagcc

SEQ ID NO: 1231024 - DNA, 15 bp, Homo sapiens
gcaaggatatgaagc

SEQ ID NO: 1231025 - DNA, 15 bp, Homo sapiens
tgcaaggatatgaag

SEQ ID NO: 1231026 - DNA, 15 bp, Homo sapiens
ttgcaaggatatgaa

SEQ ID NO: 1231027 - DNA, 15 bp, Homo sapiens
cttgcaaggatatga

SEQ ID NO: 1231028 - DNA, 15 bp, Homo sapiens
ccttgcaaggatatg

SEQ ID NO: 1231029 - DNA, 15 bp, Homo sapiens
cccttgcaaggatat

SEQ ID NO: 1231030 - DNA, 15 bp, Homo sapiens
gcccttgcaaggata

SEQ ID NO: 1231031 - DNA, 15 bp, Homo sapiens
agcccttgcaaggat

SEQ ID NO: 1231032 - DNA, 15 bp, Homo sapiens
cagcccttgcaagga

SEQ ID NO: 1231033 - DNA, 15 bp, Homo sapiens
acagcccttgcaagg

SEQ ID NO: 1231034 - DNA, 15 bp, Homo sapiens
aacagcccttgcaag

SEQ ID NO: 1231035 - DNA, 15 bp, Homo sapiens
gaacagcccttgcaa

SEQ ID NO: 1231036 - DNA, 15 bp, Homo sapiens
agaacagcccttgca

SEQ ID NO: 1231037 - DNA, 15 bp, Homo sapiens
aagaacagcccttgc

SEQ ID NO: 1231038 - DNA, 15 bp, Homo sapiens
aaagaacagcccttg

SEQ ID NO: 1231039 - DNA, 15 bp, Homo sapiens
caaagaacagccctt

SEQ ID NO: 1231040 - DNA, 15 bp, Homo sapiens
gcaaagaacagccct

SEQ ID NO: 1231041 - DNA, 15 bp, Homo sapiens
tgcaaagaacagccc

SEQ ID NO: 1231042 - DNA, 15 bp, Homo sapiens
ctgcaaagaacagcc

SEQ ID NO: 1231043 - DNA, 15 bp, Homo sapiens
tctgcaaagaacagc

SEQ ID NO: 1231044 - DNA, 15 bp, Homo sapiens
atctgcaaagaacag

SEQ ID NO: 1231045 - DNA, 15 bp, Homo sapiens
gatctgcaaagaaca

SEQ ID NO: 1231046 - DNA, 15 bp, Homo sapiens
ggatctgcaaagaac

SEQ ID NO: 1231047 - DNA, 15 bp, Homo sapiens
aggatctgcaaagaa

SEQ ID NO: 1231048 - DNA, 15 bp, Homo sapiens
gaggatctgcaaaga

SEQ ID NO: 1231049 - DNA, 15 bp, Homo sapiens
cgaggatctgcaaag

SEQ ID NO: 1231050 - DNA, 15 bp, Homo sapiens
ccgaggatctgcaaa

SEQ ID NO: 1231051 - DNA, 15 bp, Homo sapiens
cccgaggatctgcaa

SEQ ID NO: 1231052 - DNA, 15 bp, Homo sapiens
ccccgaggatctgca

SEQ ID NO: 1231053 - DNA, 15 bp, Homo sapiens
tccccgaggatctgc

SEQ ID NO: 1231054 - DNA, 15 bp, Homo sapiens
ctccccgaggatctg

SEQ ID NO: 1231055 - DNA, 15 bp, Homo sapiens
gctccccgaggatct

SEQ ID NO: 1231056 - DNA, 15 bp, Homo sapiens
agctccccgaggatc

SEQ ID NO: 1231057 - DNA, 15 bp, Homo sapiens
aagctccccgaggat

SEQ ID NO: 1231058 - DNA, 15 bp, Homo sapiens
gaagctccccgagga

SEQ ID NO: 1231059 - DNA, 15 bp, Homo sapiens
ggaagctccccgagg

SEQ ID NO: 1231060 - DNA, 15 bp, Homo sapiens
cggaagctccccgag

SEQ ID NO: 1231061 - DNA, 15 bp, Homo sapiens
ccggaagctccccga

SEQ ID NO: 1231062 - DNA, 15 bp, Homo sapiens
tccggaagctccccg

SEQ ID NO: 1231063 - DNA, 15 bp, Homo sapiens
ctccggaagctcccc

SEQ ID NO: 1231064 - DNA, 15 bp, Homo sapiens
gctccggaagctccc

SEQ ID NO: 1231065 - DNA, 15 bp, Homo sapiens
tgctccggaagctcc

SEQ ID NO: 1231066 - DNA, 15 bp, Homo sapiens
gtgctccggaagctc

SEQ ID NO: 1231067 - DNA, 15 bp, Homo sapiens
agtgctccggaagct

SEQ ID NO: 1231068 - DNA, 15 bp, Homo sapiens
cagtgctccggaagc

SEQ ID NO: 1231069 - DNA, 15 bp, Homo sapiens
acagtgctccggaag

SEQ ID NO: 1231070 - DNA, 15 bp, Homo sapiens
cacagtgctccggaa

SEQ ID NO: 1231071 - DNA, 15 bp, Homo sapiens
gcacagtgctccgga

SEQ ID NO: 1231072 - DNA, 15 bp, Homo sapiens
ggcacagtgctccgg

SEQ ID NO: 1231073 - DNA, 15 bp, Homo sapiens
aggcacagtgctccg

SEQ ID NO: 1231074 - DNA, 15 bp, Homo sapiens
taggcacagtgctcc

SEQ ID NO: 1231075 - DNA, 15 bp, Homo sapiens
gtaggcacagtgctc

SEQ ID NO: 1231076 - DNA, 15 bp, Homo sapiens
tgtaggcacagtgct

SEQ ID NO: 1231077 - DNA, 15 bp, Homo sapiens
atgtaggcacagtgc

SEQ ID NO: 1231078 - DNA, 15 bp, Homo sapiens
gatgtaggcacagtg

SEQ ID NO: 1231079 - DNA, 15 bp, Homo sapiens
tgatgtaggcacagt

SEQ ID NO: 1231080 - DNA, 15 bp, Homo sapiens
atgatgtaggcacag

SEQ ID NO: 1231081 - DNA, 15 bp, Homo sapiens
gatgatgtaggcaca

SEQ ID NO: 1231082 - DNA, 15 bp, Homo sapiens
tgatgatgtaggcac

SEQ ID NO: 1231083 - DNA, 15 bp, Homo sapiens
atgatgatgtaggca

SEQ ID NO: 1231084 - DNA, 15 bp, Homo sapiens
gatgatgatgtaggc

SEQ ID NO: 1231085 - DNA, 15 bp, Homo sapiens
agatgatgatgtagg

SEQ ID NO: 1231086 - DNA, 15 bp, Homo sapiens
tagatgatgatgtag

SEQ ID NO: 1231087 - DNA, 15 bp, Homo sapiens
gtagatgatgatgta

SEQ ID NO: 1231088 - DNA, 15 bp, Homo sapiens
cgtagatgatgatgt

SEQ ID NO: 1231089 - DNA, 15 bp, Homo sapiens
ccgtagatgatgatg

SEQ ID NO: 1231090 - DNA, 15 bp, Homo sapiens
cccgtagatgatgat

SEQ ID NO: 1231091 - DNA, 15 bp, Homo sapiens
tcccgtagatgatga

SEQ ID NO: 1231092 - DNA, 15 bp, Homo sapiens
atcccgtagatgatg

SEQ ID NO: 1231093 - DNA, 15 bp, Homo sapiens
catcccgtagatgat

SEQ ID NO: 1231094 - DNA, 15 bp, Homo sapiens
gcatcccgtagatga

SEQ ID NO: 1231095 - DNA, 15 bp, Homo sapiens
ggcatcccgtagatg

SEQ ID NO: 1231096 - DNA, 15 bp, Homo sapiens
gggcatcccgtagat

SEQ ID NO: 1231097 - DNA, 15 bp, Homo sapiens
tgggcatcccgtaga

SEQ ID NO: 1231098 - DNA, 15 bp, Homo sapiens
gtgggcatcccgtag

SEQ ID NO: 1231099 - DNA, 15 bp, Homo sapiens
ggtgggcatcccgta

SEQ ID NO: 1231100 - DNA, 15 bp, Homo sapiens
aggtgggcatcccgt

SEQ ID NO: 1231101 - DNA, 15 bp, Homo sapiens
taggtgggcatcccg

SEQ ID NO: 1231102 - DNA, 15 bp, Homo sapiens
gtaggtgggcatccc

SEQ ID NO: 1231103 - DNA, 15 bp, Homo sapiens
agtaggtgggcatcc

SEQ ID NO: 1231104 - DNA, 15 bp, Homo sapiens
cagtaggtgggcatc

SEQ ID NO: 1231105 - DNA, 15 bp, Homo sapiens
ccagtaggtgggcat

SEQ ID NO: 1231106 - DNA, 15 bp, Homo sapiens
gccagtaggtgggca

SEQ ID NO: 1231107 - DNA, 15 bp, Homo sapiens
agccagtaggtgggc

SEQ ID NO: 1231108 - DNA, 15 bp, Homo sapiens
cagccagtaggtggg

SEQ ID NO: 1231109 - DNA, 15 bp, Homo sapiens
ccagccagtaggtgg

SEQ ID NO: 1231110 - DNA, 15 bp, Homo sapiens
gccagccagtaggtg

SEQ ID NO: 1231111 - DNA, 15 bp, Homo sapiens
ggccagccagtaggt

SEQ ID NO: 1231112 - DNA, 15 bp, Homo sapiens
tggccagccagtagg

SEQ ID NO: 1231113 - DNA, 15 bp, Homo sapiens
ttggccagccagtag

SEQ ID NO: 1231114 - DNA, 15 bp, Homo sapiens
gttggccagccagta

SEQ ID NO: 1231115 - DNA, 15 bp, Homo sapiens
ggttggccagccagt

SEQ ID NO: 1231116 - DNA, 15 bp, Homo sapiens
aggttggccagccag

SEQ ID NO: 1231117 - DNA, 15 bp, Homo sapiens
caggttggccagcca

SEQ ID NO: 1231118 - DNA, 15 bp, Homo sapiens
tcaggttggccagcc

SEQ ID NO: 1231119 - DNA, 15 bp, Homo sapiens
ctcaggttggccagc

SEQ ID NO: 1231120 - DNA, 15 bp, Homo sapiens
cctcaggttggccag

SEQ ID NO: 1231121 - DNA, 15 bp, Homo sapiens
gcctcaggttggcca

SEQ ID NO: 1231122 - DNA, 15 bp, Homo sapiens
ggcctcaggttggcc

SEQ ID NO: 1231123 - DNA, 15 bp, Homo sapiens
tggcctcaggttggc

SEQ ID NO: 1231124 - DNA, 15 bp, Homo sapiens
ctggcctcaggttgg

SEQ ID NO: 1231125 - DNA, 15 bp, Homo sapiens
cctggcctcaggttg

SEQ ID NO: 1231126 - DNA, 15 bp, Homo sapiens
gcctggcctcaggtt

SEQ ID NO: 1231127 - DNA, 15 bp, Homo sapiens
ggcctggcctcaggt

SEQ ID NO: 1231128 - DNA, 15 bp, Homo sapiens
aggcctggcctcagg

SEQ ID NO: 1231129 - DNA, 15 bp, Homo sapiens
gaggcctggcctcag

SEQ ID NO: 1231130 - DNA, 15 bp, Homo sapiens
ggaggcctggcctca

SEQ ID NO: 1231131 - DNA, 15 bp, Homo sapiens
tggaggcctggcctc

SEQ ID NO: 1231132 - DNA, 15 bp, Homo sapiens
ctggaggcctggcct

SEQ ID NO: 1231133 - DNA, 15 bp, Homo sapiens
gctggaggcctggcc

SEQ ID NO: 1231134 - DNA, 15 bp, Homo sapiens
ggctggaggcctggc

SEQ ID NO: 1231135 - DNA, 15 bp, Homo sapiens
gggctggaggcctgg

SEQ ID NO: 1231136 - DNA, 15 bp, Homo sapiens
agggctggaggcctg

SEQ ID NO: 1231137 - DNA, 15 bp, Homo sapiens
aagggctggaggcct

SEQ ID NO: 1231138 - DNA, 15 bp, Homo sapiens
gaagggctggaggcc

SEQ ID NO: 1231139 - DNA, 15 bp, Homo sapiens
ggaagggctggaggc

SEQ ID NO: 1231140 - DNA, 15 bp, Homo sapiens
aggaagggctggagg

SEQ ID NO: 1231141 - DNA, 15 bp, Homo sapiens
caggaagggctggag

SEQ ID NO: 1231142 - DNA, 15 bp, Homo sapiens
gcaggaagggctgga

SEQ ID NO: 1231143 - DNA, 15 bp, Homo sapiens
agcaggaagggctgg

SEQ ID NO: 1231144 - DNA, 15 bp, Homo sapiens
cagcaggaagggctg

SEQ ID NO: 1231145 - DNA, 15 bp, Homo sapiens
gcagcaggaagggct

SEQ ID NO: 1231146 - DNA, 15 bp, Homo sapiens
tgcagcaggaagggc

SEQ ID NO: 1231147 - DNA, 15 bp, Homo sapiens
gtgcagcaggaaggg

SEQ ID NO: 1231148 - DNA, 15 bp, Homo sapiens
agtgcagcaggaagg

SEQ ID NO: 1231149 - DNA, 15 bp, Homo sapiens
aagtgcagcaggaag

SEQ ID NO: 1231150 - DNA, 15 bp, Homo sapiens
gaagtgcagcaggaa

SEQ ID NO: 1231151 - DNA, 15 bp, Homo sapiens
ggaagtgcagcagga

SEQ ID NO: 1231152 - DNA, 15 bp, Homo sapiens
aggaagtgcagcagg

SEQ ID NO: 1231153 - DNA, 15 bp, Homo sapiens
caggaagtgcagcag

SEQ ID NO: 1231154 - DNA, 15 bp, Homo sapiens
gcaggaagtgcagca

SEQ ID NO: 1231155 - DNA, 15 bp, Homo sapiens
agcaggaagtgcagc

SEQ ID NO: 1231156 - DNA, 15 bp, Homo sapiens
cagcaggaagtgcag

SEQ ID NO: 1231157 - DNA, 15 bp, Homo sapiens
ccagcaggaagtgca

SEQ ID NO: 1231158 - DNA, 15 bp, Homo sapiens
accagcaggaagtgc

SEQ ID NO: 1231159 - DNA, 15 bp, Homo sapiens
caccagcaggaagtg

SEQ ID NO: 1231160 - DNA, 15 bp, Homo sapiens
acaccagcaggaagt

SEQ ID NO: 1231161 - DNA, 15 bp, Homo sapiens
ccacaccagcaggaa

SEQ ID NO: 1231162 - DNA, 15 bp, Homo sapiens
gccacaccagcagga

SEQ ID NO: 1231163 - DNA, 15 bp, Homo sapiens
agccacaccagcagg

SEQ ID NO: 1231164 - DNA, 15 bp, Homo sapiens
cagccacaccagcag

SEQ ID NO: 1231165 - DNA, 15 bp, Homo sapiens
ccagccacaccagca

SEQ ID NO: 1231166 - DNA, 15 bp, Homo sapiens
accagccacaccagc

SEQ ID NO: 1231167 - DNA, 15 bp, Homo sapiens
caccagccacaccag

SEQ ID NO: 1231168 - DNA, 15 bp, Homo sapiens
ccaccagccacacca

SEQ ID NO: 1231169 - DNA, 15 bp, Homo sapiens
accaccagccacacc

SEQ ID NO: 1231170 - DNA, 15 bp, Homo sapiens
gaccaccagccacac

SEQ ID NO: 1231171 - DNA, 15 bp, Homo sapiens
agaccaccagccaca

SEQ ID NO: 1231172 - DNA, 15 bp, Homo sapiens
aagaccaccagccac

SEQ ID NO: 1231173 - DNA, 15 bp, Homo sapiens
gaagaccaccagcca

SEQ ID NO: 1231174 - DNA, 15 bp, Homo sapiens
agaagaccaccagcc

SEQ ID NO: 1231175 - DNA, 15 bp, Homo sapiens
cagaagaccaccagc

SEQ ID NO: 1231176 - DNA, 15 bp, Homo sapiens
acagaagaccaccag

SEQ ID NO: 1231177 - DNA, 15 bp, Homo sapiens
aacagaagaccacca

SEQ ID NO: 1231178 - DNA, 15 bp, Homo sapiens
caacagaagaccacc

SEQ ID NO: 1231179 - DNA, 15 bp, Homo sapiens
gcaacagaagaccac

SEQ ID NO: 1231180 - DNA, 15 bp, Homo sapiens
tgcaacagaagacca

SEQ ID NO: 1231181 - DNA, 15 bp, Homo sapiens
ctgcaacagaagacc

SEQ ID NO: 1231182 - DNA, 15 bp, Homo sapiens
cctgcaacagaagac

SEQ ID NO: 1231183 - DNA, 15 bp, Homo sapiens
tcctgcaacagaaga

SEQ ID NO: 1231184 - DNA, 15 bp, Homo sapiens
atcctgcaacagaag

SEQ ID NO: 1231185 - DNA, 15 bp, Homo sapiens
aatcctgcaacagaa

SEQ ID NO: 1231186 - DNA, 15 bp, Homo sapiens
taatcctgcaacaga

SEQ ID NO: 1231187 - DNA, 15 bp, Homo sapiens
ataatcctgcaacag

SEQ ID NO: 1231188 - DNA, 15 bp, Homo sapiens
cataatcctgcaaca

SEQ ID NO: 1231189 - DNA, 15 bp, Homo sapiens
ccataatcctgcaac

SEQ ID NO: 1231190 - DNA, 15 bp, Homo sapiens
gccataatcctgcaa

SEQ ID NO: 1231191 - DNA, 15 bp, Homo sapiens
ggccataatcctgca

SEQ ID NO: 1231192 - DNA, 15 bp, Homo sapiens
gggccataatcctgc

SEQ ID NO: 1231193 - DNA, 15 bp, Homo sapiens
agggccataatcctg

SEQ ID NO: 1231194 - DNA, 15 bp, Homo sapiens
cagggccataatcct

SEQ ID NO: 1231195 - DNA, 15 bp, Homo sapiens
ccagggccataatcc

SEQ ID NO: 1231196 - DNA, 15 bp, Homo sapiens
gccagggccataatc

SEQ ID NO: 1231197 - DNA, 15 bp, Homo sapiens
ggccagggccataat

SEQ ID NO: 1231198 - DNA, 15 bp, Homo sapiens
cggccagggccataa

SEQ ID NO: 1231199 - DNA, 15 bp, Homo sapiens
gcggccagggccata

SEQ ID NO: 1231200 - DNA, 15 bp, Homo sapiens
ggcggccagggccat

SEQ ID NO: 1231201 - DNA, 15 bp, Homo sapiens
cggcggccagggcca

SEQ ID NO: 1231202 - DNA, 15 bp, Homo sapiens
gcggcggccagggcc

SEQ ID NO: 1231203 - DNA, 15 bp, Homo sapiens
cgcggcggccagggc

SEQ ID NO: 1231204 - DNA, 15 bp, Homo sapiens
ccgcggcggccaggg

SEQ ID NO: 1231205 - DNA, 15 bp, Homo sapiens
gccgcggcggccagg

SEQ ID NO: 1231206 - DNA, 15 bp, Homo sapiens
ggccgcggcggccag

SEQ ID NO: 1231207 - DNA, 15 bp, Homo sapiens
gggccgcggcggcca

SEQ ID NO: 1231208 - DNA, 15 bp, Homo sapiens
agggccgcggcggcc

SEQ ID NO: 1231209 - DNA, 15 bp, Homo sapiens
cagggccgcggcggc

SEQ ID NO: 1231210 - DNA, 15 bp, Homo sapiens
gcagggccgcggcgg

SEQ ID NO: 1231211 - DNA, 15 bp, Homo sapiens
agcagggccgcggcg

SEQ ID NO: 1231212 - DNA, 15 bp, Homo sapiens
gagcagggccgcggc

SEQ ID NO: 1231213 - DNA, 15 bp, Homo sapiens
ggagcagggccgcgg

SEQ ID NO: 1231214 - DNA, 15 bp, Homo sapiens
gggagcagggccgcg

SEQ ID NO: 1231215 - DNA, 15 bp, Homo sapiens
ggggagcagggccgc

SEQ ID NO: 1231216 - DNA, 15 bp, Homo sapiens
tggggagcagggccg

SEQ ID NO: 1231217 - DNA, 15 bp, Homo sapiens
gtggggagcagggcc

SEQ ID NO: 1231218 - DNA, 15 bp, Homo sapiens
ggtggggagcagggc

SEQ ID NO: 1231219 - DNA, 15 bp, Homo sapiens
aggtggggagcaggg

SEQ ID NO: 1231220 - DNA, 15 bp, Homo sapiens
aaggtggggagcagg

SEQ ID NO: 1231221 - DNA, 15 bp, Homo sapiens
gaaggtggggagcag

SEQ ID NO: 1231222 - DNA, 15 bp, Homo sapiens
ggaaggtggggagca

SEQ ID NO: 1231223 - DNA, 15 bp, Homo sapiens
tggaaggtggggagc

SEQ ID NO: 1231224 - DNA, 15 bp, Homo sapiens
gtggaaggtggggag

SEQ ID NO: 1231225 - DNA, 15 bp, Homo sapiens
tgtggaaggtgggga

SEQ ID NO: 1231226 - DNA, 15 bp, Homo sapiens
atgtggaaggtgggg

SEQ ID NO: 1231227 - DNA, 15 bp, Homo sapiens
catgtggaaggtggg

SEQ ID NO: 1231228 - DNA, 15 bp, Homo sapiens
ccatgtggaaggtgg

SEQ ID NO: 1231229 - DNA, 15 bp, Homo sapiens
gccatgtggaaggtg

SEQ ID NO: 1231230 - DNA, 15 bp, Homo sapiens
ggccatgtggaaggt

SEQ ID NO: 1231231 - DNA, 15 bp, Homo sapiens
aggccatgtggaagg

SEQ ID NO: 1231232 - DNA, 15 bp, Homo sapiens
gaggccatgtggaag

SEQ ID NO: 1231233 - DNA, 15 bp, Homo sapiens
ggaggccatgtggaa

SEQ ID NO: 1231234 - DNA, 15 bp, Homo sapiens
aggaggccatgtgga

SEQ ID NO: 1231235 - DNA, 15 bp, Homo sapiens
aaggaggccatgtgg

SEQ ID NO: 1231236 - DNA, 15 bp, Homo sapiens
gaaggaggccatgtg

SEQ ID NO: 1231237 - DNA, 15 bp, Homo sapiens
agaaggaggccatgt

SEQ ID NO: 1231238 - DNA, 15 bp, Homo sapiens
aagaaggaggccatg

SEQ ID NO: 1231239 - DNA, 15 bp, Homo sapiens
gaagaaggaggccat

SEQ ID NO: 1231240 - DNA, 15 bp, Homo sapiens
tgaagaaggaggcca

SEQ ID NO: 1231241 - DNA, 15 bp, Homo sapiens
ctgaagaaggaggcc

SEQ ID NO: 1231242 - DNA, 15 bp, Homo sapiens
gctgaagaaggaggc

SEQ ID NO: 1231243 - DNA, 15 bp, Homo sapiens
tgctgaagaaggagg

SEQ ID NO: 1231244 - DNA, 15 bp, Homo sapiens
ttgctgaagaaggag

SEQ ID NO: 1231245 - DNA, 15 bp, Homo sapiens
attgctgaagaagga

SEQ ID NO: 1231246 - DNA, 15 bp, Homo sapiens
cattgctgaagaagg

SEQ ID NO: 1231247 - DNA, 15 bp, Homo sapiens
gcattgctgaagaag

SEQ ID NO: 1231248 - DNA, 15 bp, Homo sapiens
ggcattgctgaagaa

SEQ ID NO: 1231249 - DNA, 15 bp, Homo sapiens
gggcattgctgaaga

SEQ ID NO: 1231250 - DNA, 15 bp, Homo sapiens
agggcattgctgaag

SEQ ID NO: 1231251 - DNA, 15 bp, Homo sapiens
gagggcattgctgaa

SEQ ID NO: 1231252 - DNA, 15 bp, Homo sapiens
agagggcattgctga

SEQ ID NO: 1231253 - DNA, 15 bp, Homo sapiens
tagagggcattgctg

SEQ ID NO: 1231254 - DNA, 15 bp, Homo sapiens
gtagagggcattgct

SEQ ID NO: 1231255 - DNA, 15 bp, Homo sapiens
tgtagagggcattgc

SEQ ID NO: 1231256 - DNA, 15 bp, Homo sapiens
ttgtagagggcattg

SEQ ID NO: 1231257 - DNA, 15 bp, Homo sapiens
gttgtagagggcatt

SEQ ID NO: 1231258 - DNA, 15 bp, Homo sapiens
agttgtagagggcat

SEQ ID NO: 1231259 - DNA, 15 bp, Homo sapiens
gagttgtagagggca

SEQ ID NO: 1231260 - DNA, 15 bp, Homo sapiens
ggagttgtagagggc

SEQ ID NO: 1231261 - DNA, 15 bp, Homo sapiens
aggagttgtagaggg

SEQ ID NO: 1231262 - DNA, 15 bp, Homo sapiens
aaggagttgtagagg

SEQ ID NO: 1231263 - DNA, 15 bp, Homo sapiens
gaaggagttgtagag

SEQ ID NO: 1231264 - DNA, 15 bp, Homo sapiens
agaaggagttgtaga

SEQ ID NO: 1231265 - DNA, 15 bp, Homo sapiens
tagaaggagttgtag

SEQ ID NO: 1231266 - DNA, 15 bp, Homo sapiens
gtagaaggagttgta

SEQ ID NO: 1231267 - DNA, 15 bp, Homo sapiens
ggtagaaggagttgt

SEQ ID NO: 1231268 - DNA, 15 bp, Homo sapiens
aggtagaaggagttg

SEQ ID NO: 1231269 - DNA, 15 bp, Homo sapiens
gaggtagaaggagtt
